United States Patent Application Publication US 2006/0003322 A1 - sequence listing, part 11

SEQ ID NO: 421917 - RNA, 22 nt, Human
cggaucacaaggucaggaguuc

SEQ ID NO: 421918 - RNA, 19 nt, Human
cggccgcccugcaccgccc

SEQ ID NO: 421919 - RNA, 19 nt, Human
cggccgcccugcaccgccc

SEQ ID NO: 421920 - RNA, 21 nt, Human
cggcucggcaaccacccgcaa

SEQ ID NO: 421921 - RNA, 27 nt, Human
cgggaggcugaggcagaagaauugcug

SEQ ID NO: 421922 - RNA, 22 nt, Human
cguuaaauuagcagcauaauga

SEQ ID NO: 421923 - RNA, 21 nt, Human
cuaaugaguggaaacaacuga

SEQ ID NO: 421924 - RNA, 24 nt, Human
cuaggacaggcacgguggcucaug

SEQ ID NO: 421925 - RNA, 25 nt, Human
cuagggucagggcugggggugaguc

SEQ ID NO: 421926 - RNA, 21 nt, Human
cucaaagauaaaccgcacacc

SEQ ID NO: 421927 - RNA, 22 nt, Human
cucaagugaauaaccggaccaa

SEQ ID NO: 421928 - RNA, 24 nt, Human
cucacacagcuguggagggggcag

SEQ ID NO: 421929 - RNA, 24 nt, Human
cucacacagcuguggagggggcag

SEQ ID NO: 421930 - RNA, 20 nt, Human
cucacacugcagcgugggca

SEQ ID NO: 421931 - RNA, 22 nt, Human
cucaccucaacacucaaguaac

SEQ ID NO: 421932 - RNA, 21 nt, Human
cucacucuguagaacuggacc

SEQ ID NO: 421933 - RNA, 21 nt, Human
cucacucuguagaacuggacc

SEQ ID NO: 421934 - RNA, 21 nt, Human
cucacucuguagaacuggacc

SEQ ID NO: 421935 - RNA, 24 nt, Human
cucacuggcaaugagaacagcuga

SEQ ID NO: 421936 - RNA, 23 nt, Human
cucaugccuguaaucccagcacu

SEQ ID NO: 421937 - RNA, 24 nt, Human
cucaugccuguaaucccagcacuu

SEQ ID NO: 421938 - RNA, 21 nt, Human
cucauggucaccuaacucaua

SEQ ID NO: 421939 - RNA, 21 nt, Human
cuccaaaugcccaucucccca

SEQ ID NO: 421940 - RNA, 22 nt, Human
cuccacagaaaagcagacagcu

SEQ ID NO: 421941 - RNA, 23 nt, Human
cuccacccccaggaccgcaccuc

SEQ ID NO: 421942 - RNA, 20 nt, Human
cucccucccucccagacaag

SEQ ID NO: 421943 - RNA, 20 nt, Human
cucccucccucccagacaag

SEQ ID NO: 421944 - RNA, 26 nt, Human
cuccgccagccccuccgccgccgccu

SEQ ID NO: 421945 - RNA, 26 nt, Human
cuccgccagccccuccgccgccgccu

SEQ ID NO: 421946 - RNA, 22 nt, Human
cucguuuccccuggguccucug

SEQ ID NO: 421947 - RNA, 22 nt, Human
cucuacugacuaacaaacaguc

SEQ ID NO: 421948 - RNA, 22 nt, Human
cucuacugacuaacaaacaguc

SEQ ID NO: 421949 - RNA, 22 nt, Human
cucuacugacuaacaaacaguc

SEQ ID NO: 421950 - RNA, 18 nt, Human
cucuauccauaccugguu

SEQ ID NO: 421951 - RNA, 18 nt, Human
cucuccgccagccccucc

SEQ ID NO: 421952 - RNA, 19 nt, Human
cucuccgccagccccuccg

SEQ ID NO: 421953 - RNA, 19 nt, Human
cucuccgccagccccuccg

SEQ ID NO: 421954 - RNA, 19 nt, Human
cucuccgccagccccuccg

SEQ ID NO: 421955 - RNA, 24 nt, Human
cucugacugccucuucccuucccc

SEQ ID NO: 421956 - RNA, 24 nt, Human
cucugacugccucuucccuucccc

SEQ ID NO: 421957 - RNA, 19 nt, Human
cucuggguggcaggagagc

SEQ ID NO: 421958 - RNA, 19 nt, Human
cucuggguggcaggagagc

SEQ ID NO: 421959 - RNA, 19 nt, Human
cucuggguggcaggagagc

SEQ ID NO: 421960 - RNA, 18 nt, Human
cucugugacagacccagc

SEQ ID NO: 421961 - RNA, 24 nt, Human
cugaagaugccacccuauuacaau

SEQ ID NO: 421962 - RNA, 22 nt, Human
cugacucaugggcaggccucga

SEQ ID NO: 421963 - RNA, 22 nt, Human
cugacugccucuucccuucccc

SEQ ID NO: 421964 - RNA, 18 nt, Human
cugcaagcucagggccgc

SEQ ID NO: 421965 - RNA, 18 nt, Human
cugcaagcucagggccgc

SEQ ID NO: 421966 - RNA, 18 nt, Human
cugcaagcucagggccgc

SEQ ID NO: 421967 - RNA, 21 nt, Human
cugcagacagcaggcugugca

SEQ ID NO: 421968 - RNA, 21 nt, Human
cugccacacaugggacugucc

SEQ ID NO: 421969 - RNA, 21 nt, Human
cugcccaccuucccaaugucc

SEQ ID NO: 421970 - RNA, 22 nt, Human
cugcccaccuucccaauguccc

SEQ ID NO: 421971 - RNA, 24 nt, Human
cugcgaucugagcuccagcuucac

SEQ ID NO: 421972 - RNA, 26 nt, Human
cugcggguggcacucaaacaucagca

SEQ ID NO: 421973 - RNA, 26 nt, Human
cugcggguggcacucaaacaucagca

SEQ ID NO: 421974 - RNA, 26 nt, Human
cugcggguggcacucaaacaucagca

SEQ ID NO: 421975 - RNA, 18 nt, Human
cugcugcugaauguucuc

SEQ ID NO: 421976 - RNA, 18 nt, Human
cugcugcugaauguucuc

SEQ ID NO: 421977 - RNA, 18 nt, Human
cugcugcugaauguucuc

SEQ ID NO: 421978 - RNA, 19 nt, Human
cuggacagcccccaacuaa

SEQ ID NO: 421979 - RNA, 21 nt, Human
cuggcccuguuuccaaccuug

SEQ ID NO: 421980 - RNA, 19 nt, Human
cuggggcaggacaccaggc

SEQ ID NO: 421981 - RNA, 24 nt, Human
cuguccgagaccugcagcagcauc

SEQ ID NO: 421982 - RNA, 27 nt, Human
cugucuugcucucuuuacacacgaaac

SEQ ID NO: 421983 - RNA, 18 nt, Human
cugugggcuugcaguugc

SEQ ID NO: 421984 - RNA, 18 nt, Human
cugugggcuugcaguugc

SEQ ID NO: 421985 - RNA, 18 nt, Human
cugugggcuugcaguugc

SEQ ID NO: 421986 - RNA, 18 nt, Human
cuguuuccaaccuugcuc

SEQ ID NO: 421987 - RNA, 21 nt, Human
cuuacgccuguaaucccagca

SEQ ID NO: 421988 - RNA, 18 nt, Human
cuucagaggcagccacgc

SEQ ID NO: 421989 - RNA, 26 nt, Human
cuucagggcagggaaugcagucuccu

SEQ ID NO: 421990 - RNA, 23 nt, Human
cuuccgugcaaagcccugcugca

SEQ ID NO: 421991 - RNA, 25 nt, Human
cuuccuggcuaucccuaaauucuag

SEQ ID NO: 421992 - RNA, 19 nt, Human
cuucugccggccaccaucu

SEQ ID NO: 421993 - RNA, 19 nt, Human
cuucugccggccaccaucu

SEQ ID NO: 421994 - RNA, 19 nt, Human
cuucugccggccaccaucu

SEQ ID NO: 421995 - RNA, 20 nt, Human
cuugcucauuaguuuaacag

SEQ ID NO: 421996 - RNA, 20 nt, Human
cuugcucauuaguuuaacag

SEQ ID NO: 421997 - RNA, 20 nt, Human
cuugcucauuaguuuaacag

SEQ ID NO: 421998 - RNA, 21 nt, Human
cuuguagucccagcuacucgg

SEQ ID NO: 421999 - RNA, 21 nt, Human
cuuuugcuaaacccaagagcc

SEQ ID NO: 422000 - RNA, 19 nt, Human
gaaacccugucucuacuaa

SEQ ID NO: 422001 - RNA, 21 nt, Human
gaacaaagcugggcagggccg

SEQ ID NO: 422002 - RNA, 18 nt, Human
gaaccaacgcagacuuac

SEQ ID NO: 422003 - RNA, 24 nt, Human
gaacuggaccuuuuaaaaacuaaa

SEQ ID NO: 422004 - RNA, 24 nt, Human
gaacuggaccuuuuaaaaacuaaa

SEQ ID NO: 422005 - RNA, 21 nt, Human
gaagaauugcuggaaccaagg

SEQ ID NO: 422006 - RNA, 22 nt, Human
gaagaugcugccguggaagccc

SEQ ID NO: 422007 - RNA, 21 nt, Human
gaagugcagcuucuucccagc

SEQ ID NO: 422008 - RNA, 21 nt, Human
gaagugcagcuucuucccagc

SEQ ID NO: 422009 - RNA, 21 nt, Human
gaagugcagcuucuucccagc

SEQ ID NO: 422010 - RNA, 18 nt, Human
gaagugggcagugcagau

SEQ ID NO: 422011 - RNA, 18 nt, Human
gaagugggcagugcagau

SEQ ID NO: 422012 - RNA, 18 nt, Human
gaagugggcagugcagau

SEQ ID NO: 422013 - RNA, 18 nt, Human
gaauuauaaaacagguuu

SEQ ID NO: 422014 - RNA, 18 nt, Human
gaauuauaaaacagguuu

SEQ ID NO: 422015 - RNA, 18 nt, Human
gaauuauaaaacagguuu

SEQ ID NO: 422016 - RNA, 21 nt, Human
gacagaagcccagcucacagc

SEQ ID NO: 422017 - RNA, 20 nt, Human
gacaggagccucuccagcga

SEQ ID NO: 422018 - RNA, 21 nt, Human
gaccaggccccacccuuugcc

SEQ ID NO: 422019 - RNA, 18 nt, Human
gaccauggcagagaccug

SEQ ID NO: 422020 - RNA, 21 nt, Human
gacccagcacuuguucuggca

SEQ ID NO: 422021 - RNA, 24 nt, Human
gacuccgucucucuuuagacccac

SEQ ID NO: 422022 - RNA, 24 nt, Human
gacuccgucucucuuuagacccac

SEQ ID NO: 422023 - RNA, 24 nt, Human
gacuccgucucucuuuagacccac

SEQ ID NO: 422024 - RNA, 20 nt, Human
gacucuccgccagccccucc

SEQ ID NO: 422025 - RNA, 20 nt, Human
gacucuccgccagccccucc

SEQ ID NO: 422026 - RNA, 20 nt, Human
gacucuccgccagccccucc

SEQ ID NO: 422027 - RNA, 25 nt, Human
gacugccuuucaacuugaaaucuac

SEQ ID NO: 422028 - RNA, 21 nt, Human
gagaaacccugcaagcucagg

SEQ ID NO: 422029 - RNA, 21 nt, Human
gagaaacccugcaagcucagg

SEQ ID NO: 422030 - RNA, 19 nt, Human
gagcaaacccccaucagcc

SEQ ID NO: 422031 - RNA, 24 nt, Human
gagcaccaaugcugcgcuuaugaa

SEQ ID NO: 422032 - RNA, 19 nt, Human
gagcucagggccgcaucag

SEQ ID NO: 422033 - RNA, 19 nt, Human
gagcucagggccgcaucag

SEQ ID NO: 422034 - RNA, 19 nt, Human
gagcucagggccgcaucag

SEQ ID NO: 422035 - RNA, 21 nt, Human
gagcugaagggcaaguaagcc

SEQ ID NO: 422036 - RNA, 21 nt, Human
gagcuucagcuucuugcagug

SEQ ID NO: 422037 - RNA, 21 nt, Human
gagcuucagcuucuugcagug

SEQ ID NO: 422038 - RNA, 21 nt, Human
gagcuucagcuucuugcagug

SEQ ID NO: 422039 - RNA, 21 nt, Human
gaggagaagcaacucuaacag

SEQ ID NO: 422040 - RNA, 23 nt, Human
gagguugcagugagccgagauug

SEQ ID NO: 422041 - RNA, 22 nt, Human
gagucucugagaacagaggaag

SEQ ID NO: 422042 - RNA, 21 nt, Human
gaguguccccauucacugucc

SEQ ID NO: 422043 - RNA, 22 nt, Human
gagugugcuggggaggagccug

SEQ ID NO: 422044 - RNA, 22 nt, Human
gaucacaaggucaggaguucaa

SEQ ID NO: 422045 - RNA, 24 nt, Human
gaucacaaggucaggaguucaaga

SEQ ID NO: 422046 - RNA, 24 nt, Human
gaucacgaggucaggaguucaaga

SEQ ID NO: 422047 - RNA, 21 nt, Human
gaucucagcaggcuccauguu

SEQ ID NO: 422048 - RNA, 19 nt, Human
gauggcucaguggugggga

SEQ ID NO: 422049 - RNA, 19 nt, Human
gauggcucaguggugggga

SEQ ID NO: 422050 - RNA, 19 nt, Human
gauggcucaguggugggga

SEQ ID NO: 422051 - RNA, 20 nt, Human
gauggcucagugguggggag

SEQ ID NO: 422052 - RNA, 19 nt, Human
gcaaagaacaagaauuaaa

SEQ ID NO: 422053 - RNA, 19 nt, Human
gcaauucucauggucaccu

SEQ ID NO: 422054 - RNA, 19 nt, Human
gcacaccccauccuuccug

SEQ ID NO: 422055 - RNA, 24 nt, Human
gcacuccagccuggccaacagggu

SEQ ID NO: 422056 - RNA, 18 nt, Human
gcagacugcggucucacg

SEQ ID NO: 422057 - RNA, 18 nt, Human
gcagacugcggucucacg

SEQ ID NO: 422058 - RNA, 18 nt, Human
gcagacugcggucucacg

SEQ ID NO: 422059 - RNA, 22 nt, Human
gcaggccuccacccccaggacc

SEQ ID NO: 422060 - RNA, 21 nt, Human
gcagucaggguggaaggccgc

SEQ ID NO: 422061 - RNA, 21 nt, Human
gcagucaggguggaaggccgc

SEQ ID NO: 422062 - RNA, 21 nt, Human
gcagucaggguggaaggccgc

SEQ ID NO: 422063 - RNA, 18 nt, Human
gcaguggcuuacgccugu

SEQ ID NO: 422064 - RNA, 24 nt, Human
gccaauauggcgaaacccugucuc

SEQ ID NO: 422065 - RNA, 18 nt, Human
gccacacccacggucaca

SEQ ID NO: 422066 - RNA, 18 nt, Human
gccacacccacggucaca

SEQ ID NO: 422067 - RNA, 18 nt, Human
gccacacccacggucaca

SEQ ID NO: 422068 - RNA, 23 nt, Human
gccacuuacugcacuccagccug

SEQ ID NO: 422069 - RNA, 24 nt, Human
gccagggcagcacaggagcagcaa

SEQ ID NO: 422070 - RNA, 18 nt, Human
gccaucugucuugaugau

SEQ ID NO: 422071 - RNA, 18 nt, Human
gccaucugucuugaugau

SEQ ID NO: 422072 - RNA, 20 nt, Human
gcccaucuccccaccccacc

SEQ ID NO: 422073 - RNA, 18 nt, Human
gcccuggggccuucgacu

SEQ ID NO: 422074 - RNA, 18 nt, Human
gcccuucagggugaccug

SEQ ID NO: 422075 - RNA, 22 nt, Human
gccuaggucccugaccuuccug

SEQ ID NO: 422076 - RNA, 26 nt, Human
gccugcagcgcccuacggggcucccu

SEQ ID NO: 422077 - RNA, 26 nt, Human
gccugcagcgcccuacggggcucccu

SEQ ID NO: 422078 - RNA, 26 nt, Human
gccugcagcgcccuacggggcucccu

SEQ ID NO: 422079 - RNA, 23 nt, Human
gcgagaaacccugcaagcucagg

SEQ ID NO: 422080 - RNA, 24 nt, Human
gcgcaacagggcuaugcggcccga

SEQ ID NO: 422081 - RNA, 18 nt, Human
gcuaaaagcacguggccc

SEQ ID NO: 422082 - RNA, 22 nt, Human
gcuccauguucucucuacugua

SEQ ID NO: 422083 - RNA, 21 nt, Human
gcucuggggggggcuucucag

SEQ ID NO: 422084 - RNA, 21 nt, Human
gcucuggggggggcuucucag

SEQ ID NO: 422085 - RNA, 21 nt, Human
gcucuggggggggcuucucag

SEQ ID NO: 422086 - RNA, 24 nt, Human
gcugaggauggcucaguggugggg

SEQ ID NO: 422087 - RNA, 19 nt, Human
gcugcugcaucuccugcaa

SEQ ID NO: 422088 - RNA, 20 nt, Human
gcuggggaggagccuggucu

SEQ ID NO: 422089 - RNA, 21 nt, Human
gcuucuucagugguuuacaug

SEQ ID NO: 422090 - RNA, 23 nt, Human
gcuuguagucccagcuacucggg

SEQ ID NO: 422091 - RNA, 21 nt, Human
ggaaaaaucugaacauaaaca

SEQ ID NO: 422092 - RNA, 18 nt, Human
ggaacauuuuugggaugg

SEQ ID NO: 422093 - RNA, 18 nt, Human
ggaacauuuuugggaugg

SEQ ID NO: 422094 - RNA, 18 nt, Human
ggaacauuuuugggaugg

SEQ ID NO: 422095 - RNA, 19 nt, Human
ggaagcauggcagcucaca

SEQ ID NO: 422096 - RNA, 19 nt, Human
ggaagcauggcagcucaca

SEQ ID NO: 422097 - RNA, 18 nt, Human
ggacaccaggcugcuccc

SEQ ID NO: 422098 - RNA, 23 nt, Human
ggagaagggacagccaccagcca

SEQ ID NO: 422099 - RNA, 23 nt, Human
ggagaagggacagccaccagcca

SEQ ID NO: 422100 - RNA, 23 nt, Human
ggagaagggacagccaccagcca

SEQ ID NO: 422101 - RNA, 21 nt, Human
ggagaaguuagagucugaacu

SEQ ID NO: 422102 - RNA, 21 nt, Human
ggagaaguuagagucugaacu

SEQ ID NO: 422103 - RNA, 21 nt, Human
ggagaaguuagagucugaacu

SEQ ID NO: 422104 - RNA, 20 nt, Human
ggagagugggugucauaccu

SEQ ID NO: 422105 - RNA, 20 nt, Human
ggagagugggugucauaccu

SEQ ID NO: 422106 - RNA, 20 nt, Human
ggagagugggugucauaccu

SEQ ID NO: 422107 - RNA, 25 nt, Human
ggagcacacgaagcaccagcucacg

SEQ ID NO: 422108 - RNA, 25 nt, Human
ggagcacacgaagcaccagcucacg

SEQ ID NO: 422109 - RNA, 25 nt, Human
ggagcacacgaagcaccagcucacg

SEQ ID NO: 422110 - RNA, 18 nt, Human
ggagcagcaagcuugcuc

SEQ ID NO: 422111 - RNA, 22 nt, Human
ggaggcggagguugcagugagc

SEQ ID NO: 422112 - RNA, 22 nt, Human
ggagguugcagugagccgagau

SEQ ID NO: 422113 - RNA, 24 nt, Human
ggagguugcagugagccgagauug

SEQ ID NO: 422114 - RNA, 19 nt, Human
ggaucaggaauaacagaga

SEQ ID NO: 422115 - RNA, 22 nt, Human
ggcagcacaggagcagcaagcu

SEQ ID NO: 422116 - RNA, 23 nt, Human
ggcaggccuccacccccaggacc

SEQ ID NO: 422117 - RNA, 23 nt, Human
ggcaggccuccacccccaggacc

SEQ ID NO: 422118 - RNA, 20 nt, Human
ggccagggccagggcagcac

SEQ ID NO: 422119 - RNA, 19 nt, Human
ggcccagcagucaacaggc

SEQ ID NO: 422120 - RNA, 21 nt, Human
ggcccuguuuccaaccuugcu

SEQ ID NO: 422121 - RNA, 18 nt, Human
ggccgggugcaguggcuc

SEQ ID NO: 422122 - RNA, 21 nt, Human
ggccgggugcaguggcucaca

SEQ ID NO: 422123 - RNA, 19 nt, Human
ggccuccgggaaagcccaa

SEQ ID NO: 422124 - RNA, 19 nt, Human
ggccuccgggaaagcccaa

SEQ ID NO: 422125 - RNA, 19 nt, Human
ggccuccgggaaagcccaa

SEQ ID NO: 422126 - RNA, 21 nt, Human
ggcucaugccuguaaucccag

SEQ ID NO: 422127 - RNA, 22 nt, Human
ggcugaugcucuauagaagcaa

SEQ ID NO: 422128 - RNA, 20 nt, Human
ggcuucucagucuuggugcu

SEQ ID NO: 422129 - RNA, 18 nt, Human
gggaaugcagucuccuug

SEQ ID NO: 422130 - RNA, 20 nt, Human
gggcaggccucgaccccgcu

SEQ ID NO: 422131 - RNA, 21 nt, Human
gggcagugcagaugaugcugu

SEQ ID NO: 422132 - RNA, 21 nt, Human
gggcagugcagaugaugcugu

SEQ ID NO: 422133 - RNA, 21 nt, Human
gggcagugcagaugaugcugu

SEQ ID NO: 422134 - RNA, 22 nt, Human
gggccgagagccagccacaccc

SEQ ID NO: 422135 - RNA, 22 nt, Human
gggccgagagccagccacaccc

SEQ ID NO: 422136 - RNA, 22 nt, Human
gggccgagagccagccacaccc

SEQ ID NO: 422137 - RNA, 18 nt, Human
gggcugggggugagucuc

SEQ ID NO: 422138 - RNA, 25 nt, Human
gggcuucucagucuuggugcuucug

SEQ ID NO: 422139 - RNA, 25 nt, Human
gggcuucucagucuuggugcuucug

SEQ ID NO: 422140 - RNA, 22 nt, Human
ggggcccuggggccuucgacuc

SEQ ID NO: 422141 - RNA, 22 nt, Human
ggggcccuggggccuucgacuc

SEQ ID NO: 422142 - RNA, 24 nt, Human
gggugcaguggcucacaccugcaa

SEQ ID NO: 422143 - RNA, 24 nt, Human
ggguuuaggugcagaugcugguuu

SEQ ID NO: 422144 - RNA, 24 nt, Human
ggguuuaggugcagaugcugguuu

SEQ ID NO: 422145 - RNA, 24 nt, Human
ggguuuaggugcagaugcugguuu

SEQ ID NO: 422146 - RNA, 23 nt, Human
gguauuuuuucacacaagccuca

SEQ ID NO: 422147 - RNA, 23 nt, Human
gguauuuuuucacacaagccuca

SEQ ID NO: 422148 - RNA, 23 nt, Human
gguauuuuuucacacaagccuca

SEQ ID NO: 422149 - RNA, 23 nt, Human
gguauuuuuucacacaagccuca

SEQ ID NO: 422150 - RNA, 21 nt, Human
gguccuucacagagcaggagg

SEQ ID NO: 422151 - RNA, 21 nt, Human
gguccuucacagagcaggagg

SEQ ID NO: 422152 - RNA, 21 nt, Human
gguccuucacagagcaggagg

SEQ ID NO: 422153 - RNA, 23 nt, Human
ggugcaguggcucacaccugcaa

SEQ ID NO: 422154 - RNA, 18 nt, Human
ggugcaguggcuuacgcc

SEQ ID NO: 422155 - RNA, 23 nt, Human
gguggaucacgaggucaggaguu

SEQ ID NO: 422156 - RNA, 23 nt, Human
gguggcucaugccuguaauccca

SEQ ID NO: 422157 - RNA, 24 nt, Human
gguggcucaugccuguaaucccag

SEQ ID NO: 422158 - RNA, 20 nt, Human
ggugggggcuugcgcucgcu

SEQ ID NO: 422159 - RNA, 20 nt, Human
ggugggggcuugcgcucgcu

SEQ ID NO: 422160 - RNA, 20 nt, Human
ggugggggcuugcgcucgcu

SEQ ID NO: 422161 - RNA, 20 nt, Human
guaaacacacacuucagucg

SEQ ID NO: 422162 - RNA, 20 nt, Human
guaaacacacacuucagucg

SEQ ID NO: 422163 - RNA, 20 nt, Human
guaaacacacacuucagucg

SEQ ID NO: 422164 - RNA, 22 nt, Human
guaauaaucuuuagacccaaag

SEQ ID NO: 422165 - RNA, 22 nt, Human
guaauaaucuuuagacccaaag

SEQ ID NO: 422166 - RNA, 22 nt, Human
guaauaaucuuuagacccaaag

SEQ ID NO: 422167 - RNA, 21 nt, Human
guagaagugggugaugucguu

SEQ ID NO: 422168 - RNA, 21 nt, Human
guagaagugggugaugucguu

SEQ ID NO: 422169 - RNA, 21 nt, Human
guagaagugggugaugucguu

SEQ ID NO: 422170 - RNA, 22 nt, Human
guauaucuguacauguacacaa

SEQ ID NO: 422171 - RNA, 20 nt, Human
guccagaacacaggagucau

SEQ ID NO: 422172 - RNA, 20 nt, Human
guccagcacccuaaagcgcc

SEQ ID NO: 422173 - RNA, 19 nt, Human
gucccugaccuuccugcac

SEQ ID NO: 422174 - RNA, 19 nt, Human
gucccuuaccugccggaag

SEQ ID NO: 422175 - RNA, 19 nt, Human
gucccuuaccugccggaag

SEQ ID NO: 422176 - RNA, 19 nt, Human
gucccuuaccugccggaag

SEQ ID NO: 422177 - RNA, 18 nt, Human
guccucacacgggccuca

SEQ ID NO: 422178 - RNA, 18 nt, Human
guccucacacgggccuca

SEQ ID NO: 422179 - RNA, 18 nt, Human
guccucacacgggccuca

SEQ ID NO: 422180 - RNA, 18 nt, Human
gucuuuuugcccuuuucc

SEQ ID NO: 422181 - RNA, 18 nt, Human
gucuuuuugcccuuuucc

SEQ ID NO: 422182 - RNA, 18 nt, Human
gugcaguggcucacaccu

SEQ ID NO: 422183 - RNA, 19 nt, Human
gugcugggguccccggggc

SEQ ID NO: 422184 - RNA, 19 nt, Human
gugcugggguccccggggc

SEQ ID NO: 422185 - RNA, 19 nt, Human
gugcugggguccccggggc

SEQ ID NO: 422186 - RNA, 20 nt, Human
guggaaacaacugaggcaca

SEQ ID NO: 422187 - RNA, 23 nt, Human
guggaucacgaggucaggaguuc

SEQ ID NO: 422188 - RNA, 26 nt, Human
guggcaggagagcuagguggauuacc

SEQ ID NO: 422189 - RNA, 26 nt, Human
guggcaggagagcuagguggauuacc

SEQ ID NO: 422190 - RNA, 26 nt, Human
guggcaggagagcuagguggauuacc

SEQ ID NO: 422191 - RNA, 20 nt, Human
guggccagagugaggccagg

SEQ ID NO: 422192 - RNA, 20 nt, Human
guggccagagugaggccagg

SEQ ID NO: 422193 - RNA, 23 nt, Human
guggcucaugccuguaaucccag

SEQ ID NO: 422194 - RNA, 20 nt, Human
gugggacagaggagcccccg

SEQ ID NO: 422195 - RNA, 21 nt, Human
guguagaucuggacuuucccg

SEQ ID NO: 422196 - RNA, 21 nt, Human
guguagaucuggacuuucccg

SEQ ID NO: 422197 - RNA, 21 nt, Human
guguagaucuggacuuucccg

SEQ ID NO: 422198 - RNA, 18 nt, Human
gugugagucgccuuccac

SEQ ID NO: 422199 - RNA, 24 nt, Human
guugcagugagccgagauugugcc

SEQ ID NO: 422200 - RNA, 22 nt, Human
guuggaagcauggcagcucaca

SEQ ID NO: 422201 - RNA, 22 nt, Human
guuggaagcauggcagcucaca

SEQ ID NO: 422202 - RNA, 20 nt, Human
guuuccacccaccuccuuca

SEQ ID NO: 422203 - RNA, 20 nt, Human
guuugagucccugcagaaaa

SEQ ID NO: 422204 - RNA, 19 nt, Human
guuuuuguguuuugcuuca

SEQ ID NO: 422205 - RNA, 19 nt, Human
guuuuuguguuuugcuuca

SEQ ID NO: 422206 - RNA, 19 nt, Human
guuuuuguguuuugcuuca

SEQ ID NO: 422207 - RNA, 21 nt, Human
uaaaaaaggauagaaucaaaa

SEQ ID NO: 422208 - RNA, 23 nt, Human
uaaaaaugaacacuaauggaaga

SEQ ID NO: 422209 - RNA, 28 nt, Human
uaaaacaauaaaaaugguacccaaaggg

SEQ ID NO: 422210 - RNA, 24 nt, Human
uaaaacacagccaaagaaucugcc

SEQ ID NO: 422211 - RNA, 25 nt, Human
uaaaacacagccaaagaaucugccg

SEQ ID NO: 422212 - RNA, 24 nt, Human
uaaaacauuccauaugccaauuaa

SEQ ID NO: 422213 - RNA, 24 nt, Human
uaaaacauuccauaugccaauuaa

SEQ ID NO: 422214 - RNA, 24 nt, Human
uaaaacauuccauaugccaauuaa

SEQ ID NO: 422215 - RNA, 24 nt, Human
uaaaacauuccauaugccaauuaa

SEQ ID NO: 422216 - RNA, 18 nt, Human
uaaaagaugccacagaaa

SEQ ID NO: 422217 - RNA, 18 nt, Human
uaaaagaugccacagaaa

SEQ ID NO: 422218 - RNA, 20 nt, Human
uaaaagaugccacagaaaau

SEQ ID NO: 422219 - RNA, 22 nt, Human
uaaaauaagcaagaccccgcca

SEQ ID NO: 422220 - RNA, 21 nt, Human
uaaaauauccuaucaacccuc

SEQ ID NO: 422221 - RNA, 23 nt, Human
uaaacaaaaaacacaaaaucaga

SEQ ID NO: 422222 - RNA, 22 nt, Human
uaaacacugaauacauauuuug

SEQ ID NO: 422223 - RNA, 21 nt, Human
uaaagcagccccagucccacc

SEQ ID NO: 422224 - RNA, 25 nt, Human
uaaaguguucugaaauaccaacccu

SEQ ID NO: 422225 - RNA, 27 nt, Human
uaaauaauucuuacugccuuuucucca

SEQ ID NO: 422226 - RNA, 25 nt, Human
uaaaugaccuuucauuuaauuuucu

SEQ ID NO: 422227 - RNA, 24 nt, Human
uaaauggccuucauaccaaugcca

SEQ ID NO: 422228 - RNA, 18 nt, Human
uaaaugguucacaauaau

SEQ ID NO: 422229 - RNA, 21 nt, Human
uaacaaccuaucaacuucuga

SEQ ID NO: 422230 - RNA, 23 nt, Human
uaacagcacaguaaaauguuaaa

SEQ ID NO: 422231 - RNA, 22 nt, Human
uaacauagugcacuguuugucc

SEQ ID NO: 422232 - RNA, 20 nt, Human
uaaccggaccaaaauuauga

SEQ ID NO: 422233 - RNA, 22 nt, Human
uaagaaacauucucuuaaaaac

SEQ ID NO: 422234 - RNA, 19 nt, Human
uaaggugaugaaucuauug

SEQ ID NO: 422235 - RNA, 19 nt, Human
uaaucccuaaaaaucagga

SEQ ID NO: 422236 - RNA, 26 nt, Human
uaauuucacgaaaacgagcuucagcu

SEQ ID NO: 422237 - RNA, 26 nt, Human
uaauuucacgaaaacgagcuucagcu

SEQ ID NO: 422238 - RNA, 26 nt, Human
uaauuucacgaaaacgagcuucagcu

SEQ ID NO: 422239 - RNA, 24 nt, Human
uacaaaaguaguuuaauggaaaag

SEQ ID NO: 422240 - RNA, 22 nt, Human
uacaaaagucuaccuggccaga

SEQ ID NO: 422241 - RNA, 21 nt, Human
uacaaauaauuuucuaccugc

SEQ ID NO: 422242 - RNA, 23 nt, Human
uacacacgaaacaugagugaauc

SEQ ID NO: 422243 - RNA, 23 nt, Human
uacacacgaaacaugagugaauc

SEQ ID NO: 422244 - RNA, 23 nt, Human
uacacacgaaacaugagugaauc

SEQ ID NO: 422245 - RNA, 26 nt, Human
uacacacgaaacaugagugaaucccu

SEQ ID NO: 422246 - RNA, 20 nt, Human
uacacagcucguuuccccug

SEQ ID NO: 422247 - RNA, 22 nt, Human
uacacagcucguuuccccuggg

SEQ ID NO: 422248 - RNA, 22 nt, Human
uacacagcucguuuccccuggg

SEQ ID NO: 422249 - RNA, 23 nt, Human
uacacguaucaaacuguaaagca

SEQ ID NO: 422250 - RNA, 19 nt, Human
uacagaacgaauuggggca

SEQ ID NO: 422251 - RNA, 19 nt, Human
uacagaacgaauuggggca

SEQ ID NO: 422252 - RNA, 19 nt, Human
uacagaacgaauuggggca

SEQ ID NO: 422253 - RNA, 28 nt, Human
uacagaccuugaacaauaaaggacauac

SEQ ID NO: 422254 - RNA, 23 nt, Human
uacagccauuuccaaagagcaga

SEQ ID NO: 422255 - RNA, 23 nt, Human
uacagccauuuccaaagagcaga

SEQ ID NO: 422256 - RNA, 24 nt, Human
uacaguccagcacccuaaagcgcc

SEQ ID NO: 422257 - RNA, 24 nt, Human
uacauaaaacaauaaaaaugguac

SEQ ID NO: 422258 - RNA, 21 nt, Human
uaccaacccuauaaaaguacc

SEQ ID NO: 422259 - RNA, 21 nt, Human
uaccagugguucuaggacagg

SEQ ID NO: 422260 - RNA, 20 nt, Human
uaccccaaagccuggcucca

SEQ ID NO: 422261 - RNA, 20 nt, Human
uaccccaaagccuggcucca

SEQ ID NO: 422262 - RNA, 20 nt, Human
uaccccaaagccuggcucca

SEQ ID NO: 422263 - RNA, 21 nt, Human
uacccuguuccaaaagggccc

SEQ ID NO: 422264 - RNA, 18 nt, Human
uaccuggccagaggaagc

SEQ ID NO: 422265 - RNA, 20 nt, Human
uaccuggccuagaccagugc

SEQ ID NO: 422266 - RNA, 20 nt, Human
uaccuggccuagaccagugc

SEQ ID NO: 422267 - RNA, 20 nt, Human
uaccuggccuagaccagugc

SEQ ID NO: 422268 - RNA, 22 nt, Human
uaccugguuccacgucccccug

SEQ ID NO: 422269 - RNA, 26 nt, Human
uaccuugcugcgaucugagcuccagc

SEQ ID NO: 422270 - RNA, 18 nt, Human
uacgggaacacucgcgcc

SEQ ID NO: 422271 - RNA, 18 nt, Human
uacgggaacacucgcgcc

SEQ ID NO: 422272 - RNA, 18 nt, Human
uacgggaacacucgcgcc

SEQ ID NO: 422273 - RNA, 18 nt, Human
uacugcacuccagccugg

SEQ ID NO: 422274 - RNA, 20 nt, Human
uacugcacuccagccuggcc

SEQ ID NO: 422275 - RNA, 21 nt, Human
uacugcacuccagccuggcca

SEQ ID NO: 422276 - RNA, 24 nt, Human
uacugcacuccagccuggccaaca

SEQ ID NO: 422277 - RNA, 22 nt, Human
uagaaaaaaacacaaaugugga

SEQ ID NO: 422278 - RNA, 24 nt, Human
uagaaaaaaacacaaauguggacc

SEQ ID NO: 422279 - RNA, 24 nt, Human
uagaucgcuugagcucagaaguuc

SEQ ID NO: 422280 - RNA, 18 nt, Human
uagcagcauaaugaauuu

SEQ ID NO: 422281 - RNA, 18 nt, Human
uagccaagaggcccuaaa

SEQ ID NO: 422282 - RNA, 23 nt, Human
uagccacauagccccaagcaggu

SEQ ID NO: 422283 - RNA, 21 nt, Human
uagcggcugccccgguccccc

SEQ ID NO: 422284 - RNA, 23 nt, Human
uagggcaucauaaggagcauaaa

SEQ ID NO: 422285 - RNA, 23 nt, Human
uagggcaucauaaggagcauaaa

SEQ ID NO: 422286 - RNA, 23 nt, Human
uagggcaucauaaggagcauaaa

SEQ ID NO: 422287 - RNA, 18 nt, Human
uaggucuggaagcaacag

SEQ ID NO: 422288 - RNA, 20 nt, Human
uaggugcagaugcugguuuc

SEQ ID NO: 422289 - RNA, 20 nt, Human
uaggugcagaugcugguuuc

SEQ ID NO: 422290 - RNA, 20 nt, Human
uaggugcagaugcugguuuc

SEQ ID NO: 422291 - RNA, 20 nt, Human
uagugagcauguagaagugg

SEQ ID NO: 422292 - RNA, 20 nt, Human
uagugagcauguagaagugg

SEQ ID NO: 422293 - RNA, 20 nt, Human
uagugagcauguagaagugg

SEQ ID NO: 422294 - RNA, 24 nt, Human
uagugagcauguagaaguggguga

SEQ ID NO: 422295 - RNA, 24 nt, Human
uagugagcauguagaaguggguga

SEQ ID NO: 422296 - RNA, 24 nt, Human
uagugagcauguagaaguggguga

SEQ ID NO: 422297 - RNA, 19 nt, Human
uaguucccaaguuucaccc

SEQ ID NO: 422298 - RNA, 19 nt, Human
uaguucccaaguuucaccc

SEQ ID NO: 422299 - RNA, 19 nt, Human
uaguucccaaguuucaccc

SEQ ID NO: 422300 - RNA, 24 nt, Human
uauaaaauuugccuuuucauauuu

SEQ ID NO: 422301 - RNA, 24 nt, Human
uauaauacaaauaauuuucuaccu

SEQ ID NO: 422302 - RNA, 21 nt, Human
uaucccuaaauucuaggguca

SEQ ID NO: 422303 - RNA, 19 nt, Human
uaucuguacauguacacag

SEQ ID NO: 422304 - RNA, 21 nt, Human
uaugucagcucaacugacacu

SEQ ID NO: 422305 - RNA, 19 nt, Human
uauuuugcuaucauguacu

SEQ ID NO: 422306 - RNA, 25 nt, Human
ucaaacaucagcauccuguucagac

SEQ ID NO: 422307 - RNA, 25 nt, Human
ucaaacaucagcauccuguucagac

SEQ ID NO: 422308 - RNA, 25 nt, Human
ucaaacaucagcauccuguucagac

SEQ ID NO: 422309 - RNA, 24 nt, Human
ucaaaguuuucuucagucugaaaa

SEQ ID NO: 422310 - RNA, 23 nt, Human
ucaaggccugcccuugucaaagg

SEQ ID NO: 422311 - RNA, 20 nt, Human
ucacaaaaccacggaguagc

SEQ ID NO: 422312 - RNA, 20 nt, Human
ucacaaaaccacggaguagc

SEQ ID NO: 422313 - RNA, 21 nt, Human
ucacaaggucaggaguucaag

SEQ ID NO: 422314 - RNA, 24 nt, Human
ucacaaggucaggaguucaagacc

SEQ ID NO: 422315 - RNA, 29 nt, Human
ucacacagcauccucccuccuuuccuguu

SEQ ID NO: 422316 - RNA, 22 nt, Human
ucacacagcuguggagggggca

SEQ ID NO: 422317 - RNA, 22 nt, Human
ucacacagcuguggagggggca

SEQ ID NO: 422318 - RNA, 18 nt, Human
ucacacugcagcgugggc

SEQ ID NO: 422319 - RNA, 21 nt, Human
ucacagacggcaaacaggccc

SEQ ID NO: 422320 - RNA, 21 nt, Human
ucacagacggcaaacaggccc

SEQ ID NO: 422321 - RNA, 21 nt, Human
ucacagacggcaaacaggccc

SEQ ID NO: 422322 - RNA, 22 nt, Human
ucacagacggcaaacaggccca

SEQ ID NO: 422323 - RNA, 22 nt, Human
ucacagacggcaaacaggccca

SEQ ID NO: 422324 - RNA, 22 nt, Human
ucacagacggcaaacaggccca

SEQ ID NO: 422325 - RNA, 23 nt, Human
ucacagacggcaaacaggcccac

SEQ ID NO: 422326 - RNA, 23 nt, Human
ucacagacggcaaacaggcccac

SEQ ID NO: 422327 - RNA, 23 nt, Human
ucacagacggcaaacaggcccac

SEQ ID NO: 422328 - RNA, 21 nt, Human
ucacgaggucaggaguucaag

SEQ ID NO: 422329 - RNA, 24 nt, Human
ucacgaggucaggaguucaagacc

SEQ ID NO: 422330 - RNA, 19 nt, Human
ucagaauaagauaguacca

SEQ ID NO: 422331 - RNA, 21 nt, Human
ucagcaggcuccauguucucu

SEQ ID NO: 422332 - RNA, 21 nt, Human
ucagccggaccaggaccccca

SEQ ID NO: 422333 - RNA, 24 nt, Human
ucagggaggcgugggacccugcag

SEQ ID NO: 422334 - RNA, 24 nt, Human
ucagggaggcgugggacccugcag

SEQ ID NO: 422335 - RNA, 24 nt, Human
ucagggaggcgugggacccugcag

SEQ ID NO: 422336 - RNA, 19 nt, Human
ucaguauaucccucccccc

SEQ ID NO: 422337 - RNA, 19 nt, Human
ucaguauaucccucccccc

SEQ ID NO: 422338 - RNA, 19 nt, Human
ucaguauaucccucccccc

SEQ ID NO: 422339 - RNA, 22 nt, Human
ucaugccuguaaucccagcacu

SEQ ID NO: 422340 - RNA, 18 nt, Human
ucauggucaccuaacuca

SEQ ID NO: 422341 - RNA, 18 nt, Human
ucauuuccugaucagggu

SEQ ID NO: 422342 - RNA, 20 nt, Human
ucauuuucugaauauuuggg

SEQ ID NO: 422343 - RNA, 20 nt, Human
ucauuuucugaauauuuggg

SEQ ID NO: 422344 - RNA, 20 nt, Human
ucauuuucugaauauuuggg

SEQ ID NO: 422345 - RNA, 24 nt, Human
uccaaagagcagaguaaugaucac

SEQ ID NO: 422346 - RNA, 24 nt, Human
uccaaagagcagaguaaugaucac

SEQ ID NO: 422347 - RNA, 24 nt, Human
uccaaagagcagaguaaugaucac

SEQ ID NO: 422348 - RNA, 24 nt, Human
uccaaagagcagaguaaugaucac

SEQ ID NO: 422349 - RNA, 19 nt, Human
uccaaaugcccaucucccc

SEQ ID NO: 422350 - RNA, 20 nt, Human
uccaaaugcccaucucccca

SEQ ID NO: 422351 - RNA, 24 nt, Human
uccaaaugcccaucuccccacccc

SEQ ID NO: 422352 - RNA, 18 nt, Human
uccaacacaaaaauaagu

SEQ ID NO: 422353 - RNA, 18 nt, Human
uccaacacaaaaauaagu

SEQ ID NO: 422354 - RNA, 18 nt, Human
uccaacacaaaaauaagu

SEQ ID NO: 422355 - RNA, 25 nt, Human
uccaaguuagggcaucauaaggagc

SEQ ID NO: 422356 - RNA, 25 nt, Human
uccaaguuagggcaucauaaggagc

SEQ ID NO: 422357 - RNA, 25 nt, Human
uccaaguuagggcaucauaaggagc

SEQ ID NO: 422358 - RNA, 20 nt, Human
uccacagaaaagcagacagc

SEQ ID NO: 422359 - RNA, 24 nt, Human
uccacaguguuugcguuuacaaau

SEQ ID NO: 422360 - RNA, 21 nt, Human
uccaccccacccaguauaugu

SEQ ID NO: 422361 - RNA, 20 nt, Human
uccacucccagagcaccacu

SEQ ID NO: 422362 - RNA, 24 nt, Human
uccagccgcaggcuccaccuccac

SEQ ID NO: 422363 - RNA, 23 nt, Human
uccagccuggccaacagggugag

SEQ ID NO: 422364 - RNA, 24 nt, Human
uccagccuggccaacagggugaga

SEQ ID NO: 422365 - RNA, 23 nt, Human
uccaguguucugccacuucuagg

SEQ ID NO: 422366 - RNA, 19 nt, Human
uccaugcacgucucaggcc

SEQ ID NO: 422367 - RNA, 20 nt, Human
uccaugccgggacacagagg

SEQ ID NO: 422368 - RNA, 23 nt, Human
uccaugccgggacacagaggagg

SEQ ID NO: 422369 - RNA, 19 nt, Human
uccauuuuaaaugcuauuu

SEQ ID NO: 422370 - RNA, 19 nt, Human
uccauuuuaaaugcuauuu

SEQ ID NO: 422371 - RNA, 19 nt, Human
uccauuuuaaaugcuauuu

SEQ ID NO: 422372 - RNA, 18 nt, Human
ucccaaguuucacccaaa

SEQ ID NO: 422373 - RNA, 18 nt, Human
ucccaaguuucacccaaa

SEQ ID NO: 422374 - RNA, 18 nt, Human
ucccaaguuucacccaaa

SEQ ID NO: 422375 - RNA, 21 nt, Human
ucccacaaaagcuguuaccag

SEQ ID NO: 422376 - RNA, 18 nt, Human
ucccaccacacccccucc

SEQ ID NO: 422377 - RNA, 19 nt, Human
ucccaccacacccccuccc

SEQ ID NO: 422378 - RNA, 22 nt, Human
ucccagagcaccacugcacacc

SEQ ID NO: 422379 - RNA, 18 nt, Human
ucccauccacguuccccc

SEQ ID NO: 422380 - RNA, 25 nt, Human
uccccaccccaccccgucuuguucc

SEQ ID NO: 422381 - RNA, 19 nt, Human
uccccagggaacgauguca

SEQ ID NO: 422382 - RNA, 20 nt, Human
ucccgcguccaccacagcca

SEQ ID NO: 422383 - RNA, 22 nt, Human
ucccgcguccaccacagccaug

SEQ ID NO: 422384 - RNA, 21 nt, Human
ucccgggcuguccgagaccuc

SEQ ID NO: 422385 - RNA, 21 nt, Human
ucccgggcuguccgagaccuu

SEQ ID NO: 422386 - RNA, 18 nt, Human
ucccuaaaaaucaggaaa

SEQ ID NO: 422387 - RNA, 19 nt, Human
ucccuaacaaaaaguuaaa

SEQ ID NO: 422388 - RNA, 24 nt, Human
ucccugcagaaaaucccacucgga

SEQ ID NO: 422389 - RNA, 21 nt, Human
ucccuucuggccuccgggaaa

SEQ ID NO: 422390 - RNA, 21 nt, Human
ucccuucuggccuccgggaaa

SEQ ID NO: 422391 - RNA, 21 nt, Human
ucccuucuggccuccgggaaa

SEQ ID NO: 422392 - RNA, 21 nt, Human
uccgaacaaaaaagugucaca

SEQ ID NO: 422393 - RNA, 20 nt, Human
uccgagggcucgucucccgg

SEQ ID NO: 422394 - RNA, 20 nt, Human
uccgagggcucgucucccgg

SEQ ID NO: 422395 - RNA, 20 nt, Human
uccgagggcucgucucccgg

SEQ ID NO: 422396 - RNA, 20 nt, Human
uccggccaagcggccgccug

SEQ ID NO: 422397 - RNA, 20 nt, Human
uccggccaagcggccgccug

SEQ ID NO: 422398 - RNA, 20 nt, Human
uccggccaagcggccgccug

SEQ ID NO: 422399 - RNA, 20 nt, Human
uccggccaagcggccgccug

SEQ ID NO: 422400 - RNA, 19 nt, Human
uccugaucagggucuggga

SEQ ID NO: 422401 - RNA, 26 nt, Human
uccuuuguccuucuggcuuaacuuuc

SEQ ID NO: 422402 - RNA, 19 nt, Human
ucgaccccgcuacacuggc

SEQ ID NO: 422403 - RNA, 26 nt, Human
ucgaccccgcuacacuggccucaugc

SEQ ID NO: 422404 - RNA, 23 nt, Human
ucgggaggcugaggcagaagaau

SEQ ID NO: 422405 - RNA, 22 nt, Human
ucuauagugagcauguagaagu

SEQ ID NO: 422406 - RNA, 22 nt, Human
ucuauagugagcauguagaagu

SEQ ID NO: 422407 - RNA, 22 nt, Human
ucuauagugagcauguagaagu

SEQ ID NO: 422408 - RNA, 22 nt, Human
ucucaaagauaaaccgcacacc

SEQ ID NO: 422409 - RNA, 21 nt, Human
ucucacuaggauggaaaagaa

SEQ ID NO: 422410 - RNA, 18 nt, Human
ucucacucuguagaacug

SEQ ID NO: 422411 - RNA, 18 nt, Human
ucucacucuguagaacug

SEQ ID NO: 422412 - RNA, 18 nt, Human
ucucacucuguagaacug

SEQ ID NO: 422413 - RNA, 19 nt, Human
ucucacucuguagaacugg

SEQ ID NO: 422414 - RNA, 19 nt, Human
ucucacucuguagaacugg

SEQ ID NO: 422415 - RNA, 19 nt, Human
ucucacucuguagaacugg

SEQ ID NO: 422416 - RNA, 18 nt, Human
ucuccaaaugcccaucuc

SEQ ID NO: 422417 - RNA, 20 nt, Human
ucucccgcaggcagggccgg

SEQ ID NO: 422418 - RNA, 24 nt, Human
ucucccgcaggcagggccggccgc

SEQ ID NO: 422419 - RNA, 21 nt, Human
ucucuaaacauaaagucuuac

SEQ ID NO: 422420 - RNA, 18 nt, Human
ucucuaaauaaauaaaua

SEQ ID NO: 422421 - RNA, 22 nt, Human
ucucuacuaaaaauacaaaaaa

SEQ ID NO: 422422 - RNA, 18 nt, Human
ucugcaaguccagaacac

SEQ ID NO: 422423 - RNA, 20 nt, Human
ucugcaaguccagaacacag

SEQ ID NO: 422424 - RNA, 20 nt, Human
ucugcaaguccagaacacag

SEQ ID NO: 422425 - RNA, 24 nt, Human
ucugcugccaaggcaacccuuuca

SEQ ID NO: 422426 - RNA, 21 nt, Human
ucuggcaagagccuucucagg

SEQ ID NO: 422427 - RNA, 21 nt, Human
ucuggccgacugcagacagca

SEQ ID NO: 422428 - RNA, 21 nt, Human
ucuguaaacuucucugcaaga

SEQ ID NO: 422429 - RNA, 21 nt, Human
ucuguaaacuucucugcaaga

SEQ ID NO: 422430 - RNA, 21 nt, Human
ucuguaaacuucucugcaaga

SEQ ID NO: 422431 - RNA, 23 nt, Human
ucugugacagacccagcacuugu

SEQ ID NO: 422432 - RNA, 21 nt, Human
ucuucccuuccccuuuugcuc

SEQ ID NO: 422433 - RNA, 21 nt, Human
ucuucccuuccccuuuugcuc

SEQ ID NO: 422434 - RNA, 19 nt, Human
ucuuccucagggugaugga

SEQ ID NO: 422435 - RNA, 18 nt, Human
ucuucuuggucuuuuugc

SEQ ID NO: 422436 - RNA, 18 nt, Human
ucuucuuggucuuuuugc

SEQ ID NO: 422437 - RNA, 18 nt, Human
ucuucuuggucuuuuugc

SEQ ID NO: 422438 - RNA, 19 nt, Human
ugaaaaagaaaugaagcaa

SEQ ID NO: 422439 - RNA, 19 nt, Human
ugaaauaccaacccuauaa

SEQ ID NO: 422440 - RNA, 24 nt, Human
ugaaggguuggaagcauggcagcu

SEQ ID NO: 422441 - RNA, 24 nt, Human
ugaaggguuggaagcauggcagcu

SEQ ID NO: 422442 - RNA, 24 nt, Human
ugaaggguuggaagcauggcagcu

SEQ ID NO: 422443 - RNA, 24 nt, Human
ugaaggguuggaagcauggcagcu

SEQ ID NO: 422444 - RNA, 20 nt, Human
ugaagugggcagugcagaug

SEQ ID NO: 422445 - RNA, 20 nt, Human
ugaagugggcagugcagaug

SEQ ID NO: 422446 - RNA, 20 nt, Human
ugaagugggcagugcagaug

SEQ ID NO: 422447 - RNA, 20 nt, Human
ugaaucccugaggcacacuc

SEQ ID NO: 422448 - RNA, 20 nt, Human
ugaaucccugaggcacacuc

SEQ ID NO: 422449 - RNA, 20 nt, Human
ugaaucccugaggcacacuc

SEQ ID NO: 422450 - RNA, 22 nt, Human
ugacaaaaacaggacccauguc

SEQ ID NO: 422451 - RNA, 22 nt, Human
ugacaaacaaaauucaccucaa

SEQ ID NO: 422452 - RNA, 22 nt, Human
ugacaacagcccugugcucagc

SEQ ID NO: 422453 - RNA, 22 nt, Human
ugacaacaguauaagcaacaac

SEQ ID NO: 422454 - RNA, 25 nt, Human
ugacaguuaccucaguuucucuggc

SEQ ID NO: 422455 - RNA, 22 nt, Human
ugacauucugaagaauuaaaau

SEQ ID NO: 422456 - RNA, 21 nt, Human
ugacucuccgccagccccucc

SEQ ID NO: 422457 - RNA, 21 nt, Human
ugacucuccgccagccccucc

SEQ ID NO: 422458 - RNA, 21 nt, Human
ugagaaaaacagcaucacgga

SEQ ID NO: 422459 - RNA, 23 nt, Human
ugagaaaaacagcaucacggaga

SEQ ID NO: 422460 - RNA, 19 nt, Human
ugagaacaaagaaaucuuu

SEQ ID NO: 422461 - RNA, 20 nt, Human
ugagacagauacuucaguuu

SEQ ID NO: 422462 - RNA, 20 nt, Human
ugagacagauacuucaguuu

SEQ ID NO: 422463 - RNA, 20 nt, Human
ugagacagauacuucaguuu

SEQ ID NO: 422464 - RNA, 18 nt, Human
ugagagccagaaaggggc

SEQ ID NO: 422465 - RNA, 18 nt, Human
ugagagccagaaaggggc

SEQ ID NO: 422466 - RNA, 19 nt, Human
ugagagccagaaagggggc

SEQ ID NO: 422467 - RNA, 19 nt, Human
ugagagccagaaagggggc

SEQ ID NO: 422468 - RNA, 24 nt, Human
ugagcauguagaagugggugaugu

SEQ ID NO: 422469 - RNA, 24 nt, Human
ugagcauguagaagugggugaugu

SEQ ID NO: 422470 - RNA, 24 nt, Human
ugagcauguagaagugggugaugu

SEQ ID NO: 422471 - RNA, 19 nt, Human
ugagccgagauugugccac

SEQ ID NO: 422472 - RNA, 18 nt, Human
ugaggaaaggcccaaaga

SEQ ID NO: 422473 - RNA, 21 nt, Human
ugaggaaaggcccaaagaucc

SEQ ID NO: 422474 - RNA, 24 nt, Human
ugaggaaaggcccaaagauccauc

SEQ ID NO: 422475 - RNA, 30 nt, Human
ugaggaacaauucacauuaguacaaaaaaa

SEQ ID NO: 422476 - RNA, 30 nt, Human; identical to SEQ ID NO: 422475

SEQ ID NO: 422477 - RNA, 30 nt, Human; identical to SEQ ID NO: 422475

SEQ ID NO: 422478 - RNA, 30 nt, Human; identical to SEQ ID NO: 422475

SEQ ID NO: 422479 - RNA, 19 nt, Human
ugaggacaaugacaaaacu

SEQ ID NO: 422480 - RNA, 19 nt, Human
ugaggagaaaaaacuacgg

SEQ ID NO: 422481 - RNA, 19 nt, Human
ugaggagaaaaaacuacgg

SEQ ID NO: 422482 - RNA, 19 nt, Human
ugaggagaaaaaacuacgg

SEQ ID NO: 422483 - RNA, 19 nt, Human
ugaggagaaaaaacuacgg

SEQ ID NO: 422484 - RNA, 19 nt, Human
ugaggcagaagaauugcug

SEQ ID NO: 422485 - RNA, 24 nt, Human
ugaggcagaagaauugcuggaacc

SEQ ID NO: 422486 - RNA, 25 nt, Human
ugaggcgagcggaucacaaggucag

SEQ ID NO: 422487 - RNA, 26 nt, Human
ugaggcgagcggaucacaaggucagg

SEQ ID NO: 422488 - RNA, 24 nt, Human
ugaggcggguggaucacgagguca

SEQ ID NO: 422489 - RNA, 20 nt, Human
ugagugaaucccuaacaaaa

SEQ ID NO: 422490 - RNA, 19 nt, Human
ugagugaaucccugaggca

SEQ ID NO: 422491 - RNA, 19 nt, Human
ugagugaaucccugaggca

SEQ ID NO: 422492 - RNA, 19 nt, Human
ugagugaaucccugaggca

SEQ ID NO: 422493 - RNA, 21 nt, Human
ugaguggaaacaacugaggca

SEQ ID NO: 422494 - RNA, 18 nt, Human
ugagugugaaaucaagac

SEQ ID NO: 422495 - RNA, 18 nt, Human
ugauacagccauuuccaa

SEQ ID NO: 422496 - RNA, 18 nt, Human
ugauacagccauuuccaa

SEQ ID NO: 422497 - RNA, 18 nt, Human
ugauacagccauuuccaa

SEQ ID NO: 422498 - RNA, 18 nt, Human
ugauacagccauuuccaa

SEQ ID NO: 422499 - RNA, 21 nt, Human
ugaugccaaggacauucccaa

SEQ ID NO: 422500 - RNA, 21 nt, Human
ugaugccaaggacauucccaa

SEQ ID NO: 422501 - RNA, 21 nt, Human
ugaugccaaggacauucccaa

SEQ ID NO: 422502 - RNA, 21 nt, Human
ugcaaagcgcucaccuacucu

SEQ ID NO: 422503 - RNA, 20 nt, Human
ugcacacuaugggaucuaug

SEQ ID NO: 422504 - RNA, 22 nt, Human
ugcacacuaugggaucuaugca

SEQ ID NO: 422505 - RNA, 22 nt, Human
ugcacaucacacacagucaccc

SEQ ID NO: 422506 - RNA, 27 nt, Human
ugcacuaccugaagaugccacccuauu

SEQ ID NO: 422507 - RNA, 23 nt, Human
ugcagcgcccuacggggcucccu

SEQ ID NO: 422508 - RNA, 23 nt, Human
ugcagcgcccuacggggcucccu

SEQ ID NO: 422509 - RNA, 23 nt, Human
ugcagcgcccuacggggcucccu

SEQ ID NO: 422510 - RNA, 21 nt, Human
ugcauuacucuaaaucaaagc

SEQ ID NO: 422511 - RNA, 22 nt, Human
ugcauuuggaaaggaaaagugc

SEQ ID NO: 422512 - RNA, 18 nt, Human
ugccaaggaauccugagg

SEQ ID NO: 422513 - RNA, 18 nt, Human
ugccaaggaauccugagg

SEQ ID NO: 422514 - RNA, 18 nt, Human
ugccaaggaauccugagg

SEQ ID NO: 422515 - RNA, 18 nt, Human
ugccaaggaauccugagg

SEQ ID NO: 422516 - RNA, 18 nt, Human
ugccaaggaauccugagg

SEQ ID NO: 422517 - RNA, 18 nt, Human
ugccaaggaauccugagg

SEQ ID NO: 422518 - RNA, 19 nt, Human
ugccacagaaaauuuaaca

SEQ ID NO: 422519 - RNA, 19 nt, Human
ugccacagaaaauuuaaca

SEQ ID NO: 422520 - RNA, 19 nt, Human
ugccacagaaaauuuaaca

SEQ ID NO: 422521 - RNA, 19 nt, Human
ugccacccuauuacaaugg

SEQ ID NO: 422522 - RNA, 22 nt, Human
ugcccccuucucagggugcucc

SEQ ID NO: 422523 - RNA, 22 nt, Human
ugcccccuucucagggugcucc

SEQ ID NO: 422524 - RNA, 22 nt, Human
ugcccccuucucagggugcucc

SEQ ID NO: 422525 - RNA, 23 nt, Human
ugccccggucccccuccauguac

SEQ ID NO: 422526 - RNA, 23 nt, Human
ugccccggucccccuccauguac

SEQ ID NO: 422527 - RNA, 23 nt, Human
ugccccggucccccuccauguac

SEQ ID NO: 422528 - RNA, 23 nt, Human
ugccuaggccagggagacugagc

SEQ ID NO: 422529 - RNA, 18 nt, Human
ugccucacuacccuguuc

SEQ ID NO: 422530 - RNA, 19 nt, Human
ugccugaagaguuuccccc

SEQ ID NO: 422531 - RNA, 19 nt, Human
ugccugaagaguuuccccc

SEQ ID NO: 422532 - RNA, 19 nt, Human
ugccugaagaguuuccccc

SEQ ID NO: 422533 - RNA, 23 nt, Human
ugccuguaaucccagcacuuugg

SEQ ID NO: 422534 - RNA, 23 nt, Human
ugccuguaaucccagcacuuugg

SEQ ID NO: 422535 - RNA, 24 nt, Human
ugccuguaaucccagcacuuuggg

SEQ ID NO: 422536 - RNA, 23 nt, Human
ugcgaaggggacccagccagcca

SEQ ID NO: 422537 - RNA, 23 nt, Human
ugcgaaggggacccagccagcca

SEQ ID NO: 422538 - RNA, 23 nt, Human
ugcgaaggggacccagccagcca

SEQ ID NO: 422539 - RNA, 29 nt, Human
ugcuccugacagcauggcucucacacugc

SEQ ID NO: 422540 - RNA, 25 nt, Human
ugcugaggauggcucaguggugggg

SEQ ID NO: 422541 - RNA, 25 nt, Human
ugcugaggauggcucaguggugggg

SEQ ID NO: 422542 - RNA, 25 nt, Human
ugcugaggauggcucaguggugggg

SEQ ID NO: 422543 - RNA, 19 nt, Human
ugcugggguccccggggcc

SEQ ID NO: 422544 - RNA, 19 nt, Human
ugcugggguccccggggcc

SEQ ID NO: 422545 - RNA, 19 nt, Human
ugcugggguccccggggcc

SEQ ID NO: 422546 - RNA, 21 nt, Human
ugcuguaauuucaaaugaaau

SEQ ID NO: 422547 - RNA, 20 nt, Human
ugcuucaucuaugucuucuc

SEQ ID NO: 422548 - RNA, 21 nt, Human
uggaaaaaucugaacauaaac

SEQ ID NO: 422549 - RNA, 24 nt, Human
uggaaaagacccaguaauuuaaac

SEQ ID NO: 422550 - RNA, 24 nt, Human
uggaaccaaggaggcggagguugc

SEQ ID NO: 422551 - RNA, 21 nt, Human
uggaauuaaaauaagucacuc

SEQ ID NO: 422552 - RNA, 22 nt, Human
uggaucacgaggucaggaguuc

SEQ ID NO: 422553 - RNA, 18 nt, Human
uggcaaaagacuauaauu

SEQ ID NO: 422554 - RNA, 22 nt, Human
uggcaacggcaaaaaauuuagg

SEQ ID NO: 422555 - RNA, 22 nt, Human
uggcaagaagcuugaaagaagg

SEQ ID NO: 422556 - RNA, 20 nt, Human
uggcaagucucaacucucua

SEQ ID NO: 422557 - RNA, 20 nt, Human
uggcaagucucaacucucua

SEQ ID NO: 422558 - RNA, 20 nt, Human
uggcaagucucaacucucua

SEQ ID NO: 422559 - RNA, 18 nt, Human
uggcagagggcacaugug

SEQ ID NO: 422560 - RNA, 18 nt, Human
uggcagagggcacaugug

SEQ ID NO: 422561 - RNA, 18 nt, Human
uggcagagggcacaugug

SEQ ID NO: 422562 - RNA, 23 nt, Human
uggcagugagcaccaaugcugcc

SEQ ID NO: 422563 - RNA, 24 nt, Human
uggccaauauggcgaaacccuguc

SEQ ID NO: 422564 - RNA, 25 nt, Human
uggccagagugaggccagguggcug

SEQ ID NO: 422565 - RNA, 18 nt, Human
uggcccuguuuccaaccu

SEQ ID NO: 422566 - RNA, 21 nt, Human
uggcggcucgagcuggguccu

SEQ ID NO: 422567 - RNA, 21 nt, Human
uggcggcucgagcuggguccu

SEQ ID NO: 422568 - RNA, 21 nt, Human
uggcggcucgagcuggguccu

SEQ ID NO: 422569 - RNA, 21 nt, Human
uggcggcucgagcuggguccu

SEQ ID NO: 422570 - RNA, 23 nt, Human
uggcggcucgagcuggguccucc

SEQ ID NO: 422571 - RNA, 23 nt, Human
uggcggcucgagcuggguccucc

SEQ ID NO: 422572 - RNA, 23 nt, Human
uggcggcucgagcuggguccucc

SEQ ID NO: 422573 - RNA, 23 nt, Human
uggcggcucgagcuggguccucc

SEQ ID NO: 422574 - RNA, 21 nt, Human
uggcucacaccugcaauucca

SEQ ID NO: 422575 - RNA, 22 nt, Human
uggcucaugccuguaaucccag

SEQ ID NO: 422576 - RNA, 24 nt, Human
uggcucaugccuguaaucccagca

SEQ ID NO: 422577 - RNA, 19 nt, Human
uggcugacuucuaaugcau

SEQ ID NO: 422578 - RNA, 24 nt, Human
uggcuuacgccuguaaucccagca

SEQ ID NO: 422579 - RNA, 20 nt, Human
ugggaaaagccuacgcuaca

SEQ ID NO: 422580 - RNA, 25 nt, Human
ugggagaaguuagagucugaacugg

SEQ ID NO: 422581 - RNA, 25 nt, Human
ugggagaaguuagagucugaacugg

SEQ ID NO: 422582 - RNA, 25 nt, Human
ugggagaaguuagagucugaacugg

SEQ ID NO: 422583 - RNA, 24 nt, Human
ugggaggcugaggcgagcggauca

SEQ ID NO: 422584 - RNA, 19 nt, Human
ugggaucuaugcaucaccu

SEQ ID NO: 422585 - RNA, 21 nt, Human
ugggcaagugacagcggggcc

SEQ ID NO: 422586 - RNA, 21 nt, Human
ugggcaagugacagcggggcc

SEQ ID NO: 422587 - RNA, 21 nt, Human
ugggcaagugacagcggggcc

SEQ ID NO: 422588 - RNA, 20 nt, Human
uggggacccugaugggagaa

SEQ ID NO: 422589 - RNA, 20 nt, Human
uggggacccugaugggagaa

SEQ ID NO: 422590 - RNA, 20 nt, Human
uggggacccugaugggagaa

SEQ ID NO: 422591 - RNA, 23 nt, Human
uggugcccccuucucagggugcu

SEQ ID NO: 422592 - RNA, 23 nt, Human
uggugcccccuucucagggugcu

SEQ ID NO: 422593 - RNA, 23 nt, Human
uggugcccccuucucagggugcu

SEQ ID NO: 422594 - RNA, 24 nt, Human
ugguggcagccgcuuguaguccca

SEQ ID NO: 422595 - RNA, 18 nt, Human
uguaaagaaggaagcuga

SEQ ID NO: 422596 - RNA, 19 nt, Human
uguagaacuggaccuuuua

SEQ ID NO: 422597 - RNA, 19 nt, Human
uguagaacuggaccuuuua

SEQ ID NO: 422598 - RNA, 19 nt, Human
uguagaacuggaccuuuua

SEQ ID NO: 422599 - RNA, 22 nt, Human
uguauuuaauuucugacggggc

SEQ ID NO: 422600 - RNA, 22 nt, Human
uguauuuaauuucugacggggc

SEQ ID NO: 422601 - RNA, 22 nt, Human
uguauuuaauuucugacggggc

SEQ ID NO: 422602 - RNA, 19 nt, Human
uguccaaacaucacaaaau

SEQ ID NO: 422603 - RNA, 21 nt, Human
uguccgagaccugcagcagca

SEQ ID NO: 422604 - RNA, 23 nt, Human
uguccuggcggcucgagcugggu

SEQ ID NO: 422605 - RNA, 23 nt, Human
uguccuggcggcucgagcugggu

SEQ ID NO: 422606 - RNA, 23 nt, Human
uguccuggcggcucgagcugggu

SEQ ID NO: 422607 - RNA, 23 nt, Human
uguccuggcggcucgagcugggu

SEQ ID NO: 422608 - RNA, 20 nt, Human
ugucuacaaugagaaaaaca

SEQ ID NO: 422609 - RNA, 21 nt, Human
uguggaagauggucugaagug

SEQ ID NO: 422610 - RNA, 22 nt, Human
uguggaccucaaacagcaauuc

SEQ ID NO: 422611 - RNA, 19 nt, Human
uguggcgguaacgcugagg

SEQ ID NO: 422612 - RNA, 19 nt, Human
uguggcgguaacgcugagg

SEQ ID NO: 422613 - RNA, 19 nt, Human
uguggcgguaacgcugagg

SEQ ID NO: 422614 - RNA, 19 nt, Human
uguggcgguaacgcugagg

SEQ ID NO: 422615 - RNA, 19 nt, Human
uguguggaagauggucuga

SEQ ID NO: 422616 - RNA, 20 nt, Human
uguucucucccucccuccca

SEQ ID NO: 422617 - RNA, 20 nt, Human
uguucucucccucccuccca

SEQ ID NO: 422618 - RNA, 20 nt, Human
uguucucucccucccuccca

SEQ ID NO: 422619 - RNA, 19 nt, Human
uguuuuuaauacaaaaaua

SEQ ID NO: 422620 - RNA, 19 nt, Human
uguuuuuaauacaaaaaua

SEQ ID NO: 422621 - RNA, 19 nt, Human
uguuuuuaauacaaaaaua

SEQ ID NO: 422622 - RNA, 22 nt, Human
uuaaaauaagcaagaccccgcc

SEQ ID NO: 422623 - RNA, 24 nt, Human
uuaaacaaaaaacacaaaaucaga

SEQ ID NO: 422624 - RNA, 18 nt, Human
uuaacaaauucucccuuu

SEQ ID NO: 422625 - RNA, 18 nt, Human
uuaacaaauucucccuuu

SEQ ID NO: 422626 - RNA, 18 nt, Human
uuaacaaauucucccuuu

SEQ ID NO: 422627 - RNA, 21 nt, Human
uuacaggucacaaaaccacgg

SEQ ID NO: 422628 - RNA, 21 nt, Human
uuacaggucacaaaaccacgg

SEQ ID NO: 422629 - RNA, 21 nt, Human
uuacaggucacaaaaccacgg

SEQ ID NO: 422630 - RNA, 21 nt, Human
uuacgccuguaaucccagcau

SEQ ID NO: 422631 - RNA, 23 nt, Human
uuacucuacugacuaacaaacag

SEQ ID NO: 422632 - RNA, 23 nt, Human
uuacucuacugacuaacaaacag

SEQ ID NO: 422633 - RNA, 23 nt, Human
uuacucuacugacuaacaaacag

SEQ ID NO: 422634 - RNA, 19 nt, Human
uuacugcacuccagccugg

SEQ ID NO: 422635 - RNA, 20 nt, Human
uuacugcacuccagccuggc

SEQ ID NO: 422636 - RNA, 21 nt, Human
uuagagucugaacuggaaagc

SEQ ID NO: 422637 - RNA, 21 nt, Human
uuagagucugaacuggaaagc

SEQ ID NO: 422638 - RNA, 22 nt, Human
uuagagucugaacuggaaagca

SEQ ID NO: 422639 - RNA, 23 nt, Human
uuagcacaaaucucuaaacauaa

SEQ ID NO: 422640 - RNA, 19 nt, Human
uuaucaucuccucauaaac

SEQ ID NO: 422641 - RNA, 22 nt, Human
uucagaguggcaagccgcagag

SEQ ID NO: 422642 - RNA, 24 nt, Human
uucaggaaaccaggagaugguccu

SEQ ID NO: 422643 - RNA, 19 nt, Human
uucauuuucugaauauuug

SEQ ID NO: 422644 - RNA, 19 nt, Human
uucauuuucugaauauuug

SEQ ID NO: 422645 - RNA, 19 nt, Human
uucauuuucugaauauuug

SEQ ID NO: 422646 - RNA, 24 nt, Human
uucccagcccugcagucauugcag

SEQ ID NO: 422647 - RNA, 24 nt, Human
uucccagcccugcagucauugcag

SEQ ID NO: 422648 - RNA, 24 nt, Human
uucccagcccugcagucauugcag

SEQ ID NO: 422649 - RNA, 22 nt, Human
uuccccagucccugagcacccc

SEQ ID NO: 422650 - RNA, 26 nt, Human
uuccuucacaggccuuugucaugcaa

SEQ ID NO: 422651 - RNA, 19 nt, Human
uucucccuuucugaugucc

SEQ ID NO: 422652 - RNA, 19 nt, Human
uucucccuuucugaugucc

SEQ ID NO: 422653 - RNA, 19 nt, Human
uucucccuuucugaugucc

SEQ ID NO: 422654 - RNA, 21 nt, Human
uucuggccuccgggaaagccc

SEQ ID NO: 422655 - RNA, 21 nt, Human
uucuggccuccgggaaagccc

SEQ ID NO: 422656 - RNA, 21 nt, Human
uucuggccuccgggaaagccc

SEQ ID NO: 422657 - RNA, 25 nt, Human
uugagaauaaaaaucagaaacuggu

SEQ ID NO: 422658 - RNA, 29 nt, Human
uugauucucgccaugcacuccuccucguc

SEQ ID NO: 422659 - RNA, 29 nt, Human
uugauucucgccaugcacuccuccucguc

SEQ ID NO: 422660 - RNA, 29 nt, Human
uugauucucgccaugcacuccuccucguc

SEQ ID NO: 422661 - RNA, 18 nt, Human
uugcagugagccgagauu

SEQ ID NO: 422662 - RNA, 19 nt, Human
uugcagugagccgagauug

SEQ ID NO: 422663 - RNA, 22 nt, Human
uugcagugagccgagauugugc

SEQ ID NO: 422664 - RNA, 24 nt, Human
uugcuccuagaccaucuuuggggc

SEQ ID NO: 422665 - RNA, 18 nt, Human
uugcucugcgccgccucg

SEQ ID NO: 422666 - RNA, 24 nt, Human
uugcuggaaccaaggaggcggagg

SEQ ID NO: 422667 - RNA, 19 nt, Human
uugcuggggacccugaugg

SEQ ID NO: 422668 - RNA, 19 nt, Human
uugcuggggacccugaugg

SEQ ID NO: 422669 - RNA, 19 nt, Human
uugcuggggacccugaugg

SEQ ID NO: 422670 - RNA, 21 nt, Human
uuggacaccauuuggucauuu

SEQ ID NO: 422671 - RNA, 25 nt, Human
uugggaggcugaggcgagcggauca

SEQ ID NO: 422672 - RNA, 19 nt, Human
uugggauggcaaacuucug

SEQ ID NO: 422673 - RNA, 19 nt, Human
uugggauggcaaacuucug

SEQ ID NO: 422674 - RNA, 19 nt, Human
uugggauggcaaacuucug

SEQ ID NO: 422675 - RNA, 23 nt, Human
uuguccauuucaugaaucugagu

SEQ ID NO: 422676 - RNA, 18 nt, Human
uuuaaaggaccaaagcca

SEQ ID NO: 422677 - RNA, 20 nt, Human
uuuaagaacuaugaaacugc

SEQ ID NO: 422678 - RNA, 21 nt, Human
uuuagcaaaaauauauugaga

SEQ ID NO: 422679 - RNA, 21 nt, Human
uuucaaggggaguucuguaaa

SEQ ID NO: 422680 - RNA, 21 nt, Human
uuucaaggggaguucuguaaa

SEQ ID NO: 422681 - RNA, 21 nt, Human
uuucaaggggaguucuguaaa

SEQ ID NO: 422682 - RNA, 20 nt, Human
uuucaugccaaagcaaaauu

SEQ ID NO: 422683 - RNA, 26 nt, Human
uuucuaccugcuaauuacagucaauu

SEQ ID NO: 422684 - RNA, 23 nt, Human
uuucuuaggacacuuugggagaa

SEQ ID NO: 422685 - RNA, 23 nt, Human
uuucuuaggacacuuugggagaa

SEQ ID NO: 422686 - RNA, 23 nt, Human
uuucuuaggacacuuugggagaa

SEQ ID NO: 422687 - RNA, 21 nt, Human
uuuguguuuugcuucacauua

SEQ ID NO: 422688 - RNA, 21 nt, Human
uuuguguuuugcuucacauua

SEQ ID NO: 422689 - RNA, 21 nt, Human
uuuguguuuugcuucacauua

SEQ ID NO: 422690 - RNA, 19 nt, Human
uuuuaaaugcuauuuuccc

SEQ ID NO: 422691 - RNA, 19 nt, Human
uuuuaaaugcuauuuuccc

SEQ ID NO: 422692 - RNA, 19 nt, Human
uuuuaaaugcuauuuuccc

SEQ ID NO: 422693 - RNA, 23 nt, Human
uuuuacacuggagagccaccucc

SEQ ID NO: 422694 - RNA, 23 nt, Human
uuuucaccaaaagccuuucaaga

SEQ ID NO: 422695 - RNA, 20 nt, Human
uuuuccacacugaguuacca

SEQ ID NO: 422696 - RNA, 20 nt, Human
uuuuccacacugaguuacca

SEQ ID NO: 422697 - RNA, 20 nt, Human
uuuuccacacugaguuacca

SEQ ID NO: 422698 - RNA, 20 nt, Human
uuuuccacacugaguuacca

SEQ ID NO: 422699 - RNA, 20 nt, Human
uuuugaggaaauaaacacug

SEQ ID NO: 422700 - RNA, 22 nt, Human
uuuugcucugcgccgccucguc

SEQ ID NO: 422701 - RNA, 22 nt, Human
uuuugcucugcgccgccucguc

SEQ ID NO: 422702 - RNA, 23 nt, Human
uuuugggagggugaggcgggugg

SEQ ID NO: 422703 - RNA, 19 nt, Human
uuuuuuuuuuuuuuuuuug

SEQ ID NO: 422704 - RNA, 20 nt, Human
uuuuuuuuuuuuuuuuuugg

SEQ ID NO: 422705 - RNA, 20 nt, Human
aaaaaaccaaaaacagucca

SEQ ID NO: 422706 - RNA, 20 nt, Human
aaaaaaggcagagaauagug

SEQ ID NO: 422707 - RNA, 21 nt, Human
aaaaaccaaaaacaguccaug

SEQ ID NO: 422708 - RNA, 22 nt, Human
aaaaaugaaaauaaauaaagga

SEQ ID NO: 422709 - RNA, 21 nt, Human
aaacaaaaaaccaaaaacagu

SEQ ID NO: 422710 - RNA, 24 nt, Human
aaacaaaaaaccaaaaacagucca

SEQ ID NO: 422711 - RNA, 24 nt, Human
aaacaaaaaccagacaccaccaac

SEQ ID NO: 422712 - RNA, 21 nt, Human
aaacacaaguacacaaaucua

SEQ ID NO: 422713 - RNA, 21 nt, Human
aaaccaaaaacaguccauguu

SEQ ID NO: 422714 - RNA, 22 nt, Human
aaagaccaagggaauuuaaccc

SEQ ID NO: 422715 - RNA, 24 nt, Human
aaagaccaagggaauuuaacccuc

SEQ ID NO: 422716 - RNA, 23 nt, Human
aacaaaaaaccaaaaacagucca

SEQ ID NO: 422717 - RNA, 26 nt, Human
aacacaaguacacaaaucuaucuccu

SEQ ID NO: 422718 - RNA, 21 nt, Human
aaccaaaucaaacaaaaacca

SEQ ID NO: 422719 - RNA, 20 nt, Human
aaccaaggaacacaucuuag

SEQ ID NO: 422720 - RNA, 22 nt, Human
aaccgagcuaggccgcaugaaa

SEQ ID NO: 422721 - RNA, 19 nt, Human
aaccucguuaucacauccc

SEQ ID NO: 422722 - RNA, 22 nt, Human
aagaagaaaccaggcaggaaaa

SEQ ID NO: 422723 - RNA, 23 nt, Human
aagaaucccaaaccaaccaaauc

SEQ ID NO: 422724 - RNA, 24 nt, Human
aagaggaaggcucgggagguggga

SEQ ID NO: 422725 - RNA, 19 nt, Human
aagcacaauaaaaggcaag

SEQ ID NO: 422726 - RNA, 18 nt, Human
aaggcaagaaaagaccaa

SEQ ID NO: 422727 - RNA, 23 nt, Human
aauccagccaaaacaauagugca

SEQ ID NO: 422728 - RNA, 24 nt, Human
acaaaagaaucccaaaccaaccaa

SEQ ID NO: 422729 - RNA, 24 nt, Human
acaaaauauuuccuuggccuaaaa

SEQ ID NO: 422730 - RNA, 20 nt, Human
acaacaaacagacaucuaga

SEQ ID NO: 422731 - RNA, 23 nt, Human
acaaguacacaaaucuaucuccu

SEQ ID NO: 422732 - RNA, 25 nt, Human
acacaaguacacaaaucuaucuccu

SEQ ID NO: 422733 - RNA, 23 nt, Human
acagcaaaaacauuucuuuuuca

SEQ ID NO: 422734 - RNA, 22 nt, Human
acagcccccucggccuccgccu

SEQ ID NO: 422735 - RNA, 19 nt, Human
acccagaacaccaucacaa

SEQ ID NO: 422736 - RNA, 19 nt, Human
accgaaaaaaaaaaaucau

SEQ ID NO: 422737 - RNA, 20 nt, Human
acggccgggccgggccgggc

SEQ ID NO: 422738 - RNA, 20 nt, Human
acugccaaagacagcuguca

SEQ ID NO: 422739 - RNA, 19 nt, Human
acuggauuaacaaggaguu

SEQ ID NO: 422740 - RNA, 24 nt, Human
acuuuugcuuuauacaaccaagga

SEQ ID NO: 422741 - RNA, 24 nt, Human
agaaauaaauaggaaaaaaaaggc

SEQ ID NO: 422742 - RNA, 19 nt, Human
agaaaucuugcauggagac

SEQ ID NO: 422743 - RNA, 24 nt, Human
agaacaccaucacaaaauauuucc

SEQ ID NO: 422744 - RNA, 18 nt, Human
agaagaaaccaggcagga

SEQ ID NO: 422745 - RNA, 21 nt, Human
agaagugagccuaccuacugc

SEQ ID NO: 422746 - RNA, 19 nt, Human
agaaucccaaaccaaccaa

SEQ ID NO: 422747 - RNA, 25 nt, Human
agaggaacaggagugcuguacugag

SEQ ID NO: 422748 - RNA, 19 nt, Human
agaggaaggcucgggaggu

SEQ ID NO: 422749 - RNA, 22 nt, Human
agcccauggagaaacaagucuc

SEQ ID NO: 422750 - RNA, 19 nt, Human
agcuaugguggaagugugc

SEQ ID NO: 422751 - RNA, 19 nt, Human
aggaaaaaaaaggcagaga

SEQ ID NO: 422752 - RNA, 22 nt, Human
aggaaaaaaaaggcagagaaua

SEQ ID NO: 422753 - RNA, 21 nt, Human
aggaaggcucgggagguggga

SEQ ID NO: 422754 - RNA, 18 nt, Human
aggaggaggcggaaccga

SEQ ID NO: 422755 - RNA, 19 nt, Human
aggaggaggcggaaccgag

SEQ ID NO: 422756 - RNA, 22 nt, Human
aggaggaggcggaaccgagcua

SEQ ID NO: 422757 - RNA, 20 nt, Human
aggcacggugaauaccaagg

SEQ ID NO: 422758 - RNA, 20 nt, Human
aggcacggugaauaccaagg

SEQ ID NO: 422759 - RNA, 20 nt, Human
aggcccggaguggggcuggg

SEQ ID NO: 422760 - RNA, 24 nt, Human
aguguaaguuaaauggugguuuuu

SEQ ID NO: 422761 - RNA, 26 nt, Human
auagagcccuucucuaagccuaugaa

SEQ ID NO: 422762 - RNA, 23 nt, Human
auagugcaaaaaguuacaaagca

SEQ ID NO: 422763 - RNA, 20 nt, Human
auagugccauuuucccccaa

SEQ ID NO: 422764 - RNA, 18 nt, Human
augaacugguuucccauu

SEQ ID NO: 422765 - RNA, 20 nt, Human
auggagacuacaagucugga

SEQ ID NO: 422766 - RNA, 22 nt, Human
auuuggauguucauaauuguuc

SEQ ID NO: 422767 - RNA, 23 nt, Human
caaaauauuuccuuggccuaaaa

SEQ ID NO: 422768 - RNA, 20 nt, Human
caaacaaaaaccagacacca

SEQ ID NO: 422769 - RNA, 24 nt, Human
caaacagacaucuagaucaaccca

SEQ ID NO: 422770 - RNA, 21 nt, Human
caaagcaacaaucucuugggc

SEQ ID NO: 422771 - RNA, 20 nt, Human
cacaaaagaaucccaaacca

SEQ ID NO: 422772 - RNA, 26 nt, Human
cacaaaagaaucccaaaccaaccaaa

SEQ ID NO: 422773 - RNA, 24 nt, Human
cacaaguacacaaaucuaucuccu

SEQ ID NO: 422774 - RNA, 22 nt, Human
caccaccaacugcuucugccug

SEQ ID NO: 422775 - RNA, 23 nt, Human
caccaccaacugcuucugccugc

SEQ ID NO: 422776 - RNA, 19 nt, Human
cacuuggaacauagccacg

SEQ ID NO: 422777 - RNA, 23 nt, Human
cacuuggaacauagccacguucu

SEQ ID NO: 422778 - RNA, 23 nt, Human
cagacaucuagaucaacccagca

SEQ ID NO: 422779 - RNA, 20 nt, Human
cagacugccaaagacagcug

SEQ ID NO: 422780 - RNA, 20 nt, Human
cagccaaaacaauagugcaa

SEQ ID NO: 422781 - RNA, 22 nt, Human
caggaaaaugccaauaaugaug

SEQ ID NO: 422782 - RNA, 26 nt, Human
cauacaacaaacagacaucuagauca

SEQ ID NO: 422783 - RNA, 20 nt, Human
cauccuuaacuuucccuuuc

SEQ ID NO: 422784 - RNA, 26 nt, Human
caucuccaucuuguuuuuauuaggga

SEQ ID NO: 422785 - RNA, 23 nt, Human
cauguuaaugcugauuaaaaaac

SEQ ID NO: 422786 - RNA, 19 nt, Human
cauucuaaccccccggccg

SEQ ID NO: 422787 - RNA, 24 nt, Human
cauucuaaccccccggccguguca

SEQ ID NO: 422788 - RNA, 22 nt, Human
cauuuuugcuuuaauaaggcag

SEQ ID NO: 422789 - RNA, 24 nt, Human
ccaaccaaaucaaacaaaaaccag

SEQ ID NO: 422790 - RNA, 21 nt, Human
ccaauaaugaugauuggcgaa

SEQ ID NO: 422791 - RNA, 19 nt, Human
ccacaaaagaaucccaaac

SEQ ID NO: 422792 - RNA, 22 nt, Human
ccagaacaccaucacaaaauau

SEQ ID NO: 422793 - RNA, 21 nt, Human
ccagccaaaacaauagugcaa

SEQ ID NO: 422794 - RNA, 24 nt, Human
ccagcucaaaccgaaaaaaaaaaa

SEQ ID NO: 422795 - RNA, 23 nt, Human
cccccaaaauuuccauacaacaa

SEQ ID NO: 422796 - RNA, 18 nt, Human
ccccgcgccggacgccuc

SEQ ID NO: 422797 - RNA, 21 nt, Human
cccuccacaaaagaaucccaa

SEQ ID NO: 422798 - RNA, 19 nt, Human
ccgagggacgggggucgcc

SEQ ID NO: 422799 - RNA, 23 nt, Human
ccgccauuuccgaugaguuucug

SEQ ID NO: 422800 - RNA, 31 nt, Human
ccgccgccgccgccucucccgccgccgccgg

SEQ ID NO: 422801 - RNA, 28 nt, Human
ccgccgccgccgccucucccgccgccgg

SEQ ID NO: 422802 - RNA, 19 nt, Human
ccgccgccgccucucccgc

SEQ ID NO: 422803 - RNA, 19 nt, Human
ccgccgccgccucucccgc

SEQ ID NO: 422804 - RNA, 18 nt, Human
ccgcgccgccgcugcugc

SEQ ID NO: 422805 - RNA, 24 nt, Human
ccgcugcugccagagaggagccug

SEQ ID NO: 422806 - RNA, 22 nt, Human
ccggaguggggcuggggugcgg

SEQ ID NO: 422807 - RNA, 18 nt, Human
ccgggccgggcgugcugc

SEQ ID NO: 422808 - RNA, 27 nt, Human
ccuccgugcuggccgccgccgccgccu

SEQ ID NO: 422809 - RNA, 23 nt, Human
ccucucccgccgccgccgcgcac

SEQ ID NO: 422810 - RNA, 24 nt, Human
ccugcaugaacugguuucccauuu

SEQ ID NO: 422811 - RNA, 20 nt, Human
cgccgccgccgccucucccg

SEQ ID NO: 422812 - RNA, 22 nt, Human
cgccgccgcgcacaaagccccc

SEQ ID NO: 422813 - RNA, 19 nt, Human
cgccucuccgcggcgaccu

SEQ ID NO: 422814 - RNA, 18 nt, Human
cgcgaggaggaggcggaa

SEQ ID NO: 422815 - RNA, 18 nt, Human
cgcgccggacgccucugc

SEQ ID NO: 422816 - RNA, 26 nt, Human
cggcuggcagcccggccuggguagca

SEQ ID NO: 422817 - RNA, 20 nt, Human
cgggggucgccgcgccgccg

SEQ ID NO: 422818 - RNA, 22 nt, Human
cgugucagugcgaucacaggag

SEQ ID NO: 422819 - RNA, 22 nt, Human
cucagauuccuacuuaaaacac

SEQ ID NO: 422820 - RNA, 24 nt, Human
cucggccuccgccuccgugcuggc

SEQ ID NO: 422821 - RNA, 22 nt, Human
cugaggccaugaagauccgcaa

SEQ ID NO: 422822 - RNA, 23 nt, Human
cuggcagcccggccuggguagca

SEQ ID NO: 422823 - RNA, 26 nt, Human
cuguaugcacuguagcagucucuucu

SEQ ID NO: 422824 - RNA, 25 nt, Human
cuuuauuuaaaaacaaaaaaccaaa

SEQ ID NO: 422825 - RNA, 24 nt, Human
gaaaauaaauaaaggaaugauggc

SEQ ID NO: 422826 - RNA, 23 nt, Human
gaaacagccacgaugaaaugugc

SEQ ID NO: 422827 - RNA, 22 nt, Human
gaauaccaaggaaccaaggaga

SEQ ID NO: 422828 - RNA, 22 nt, Human
gacccagaacaccaucacaaaa

SEQ ID NO: 422829 - RNA, 20 nt, Human
gaccugugcacagcccccuc

SEQ ID NO: 422830 - RNA, 20 nt, Human
gagccugcggcuggcagccc

SEQ ID NO: 422831 - RNA, 22 nt, Human
gagccugcggcuggcagcccgg

SEQ ID NO: 422832 - RNA, 28 nt, Human
gauggcaaaggcuguaugccacagaggu

SEQ ID NO: 422833 - RNA, 18 nt, Human
gcaagaaaagaccaaggg

SEQ ID NO: 422834 - RNA, 19 nt, Human
gcaugaucuauuugcuuuu

SEQ ID NO: 422835 - RNA, 20 nt, Human
gccgagggacgggggucgcc

SEQ ID NO: 422836 - RNA, 21 nt, Human
gccgagggacgggggucgccg

SEQ ID NO: 422837 - RNA, 20 nt, Human
gcgcgaggaggaggcggaac

SEQ ID NO: 422838 - RNA, 21 nt, Human
gcggcgaccugugcacagccc

SEQ ID NO: 422839 - RNA, 23 nt, Human
gcgugcugcgggaagaggaaggc

SEQ ID NO: 422840 - RNA, 23 nt, Human
gcucaaaccgaaaaaaaaaaauc

SEQ ID NO: 422841 - RNA, 21 nt, Human
ggacccagaacaccaucacaa

SEQ ID NO: 422842 - RNA, 21 nt, Human
ggagagacacggaggcccgga

SEQ ID NO: 422843 - RNA, 23 nt, Human
ggcccggaguggggcuggggugc

SEQ ID NO: 422844 - RNA, 21 nt, Human
ggccggcacugaggagggcca

SEQ ID NO: 422845 - RNA, 25 nt, Human
ggcuggggugcgggcagccgcuggg

SEQ ID NO: 422846 - RNA, 18 nt, Human
gggaaggggaggccgagg

SEQ ID NO: 422847 - RNA, 26 nt, Human
gggaggccgagggacgggggucgccg

SEQ ID NO: 422848 - RNA, 26 nt, Human
gggccgggccgggcgugcugcgggaa

SEQ ID NO: 422849 - RNA, 18 nt, Human
gggcuggggugcgggcag

SEQ ID NO: 422850 - RNA, 23 nt, Human
gggcuggggugcgggcagccgcu

SEQ ID NO: 422851 - RNA, 26 nt, Human
gggcuggggugcgggcagccgcuggg

SEQ ID NO: 422852 - RNA, 23 nt, Human
guaauacaaauccagccaaaaca

SEQ ID NO: 422853 - RNA, 21 nt, Human
gugucagugcgaucacaggag

SEQ ID NO: 422854 - RNA, 23 nt, Human
guucagagucuugaagaagaaac

SEQ ID NO: 422855 - RNA, 23 nt, Human
uaaaaacaaaaaaccaaaaacag

SEQ ID NO: 422856 - RNA, 18 nt, Human
uaaaaggcaagaaaagac

SEQ ID NO: 422857 - RNA, 18 nt, Human
uaaagcaauuguucagag

SEQ ID NO: 422858 - RNA, 26 nt, Human
uaaagcuuaucauacccuuuccuaga

SEQ ID NO: 422859 - RNA, 20 nt, Human
uaaccccccggccgugucag

SEQ ID NO: 422860 - RNA, 21 nt, Human
uaacuuucccuuucucucauc

SEQ ID NO: 422861 - RNA, 22 nt, Human
uacagaaacagccacgaugaaa

SEQ ID NO: 422862 - RNA, 19 nt, Human
uagagggcuuucucagauu

SEQ ID NO: 422863 - RNA, 19 nt, Human
uaugaaaagcauuuugaag

SEQ ID NO: 422864 - RNA, 19 nt, Human
uauugccccccaauaaaau

SEQ ID NO: 422865 - RNA, 19 nt, Human
uauuucaacccacaguuug

SEQ ID NO: 422866 - RNA, 19 nt, Human
ucacuggauuaacaaggag

SEQ ID NO: 422867 - RNA, 21 nt, Human
ucaguguaaguuaaauggugg

SEQ ID NO: 422868 - RNA, 23 nt, Human
uccauagagcccuucucuaagcc

SEQ ID NO: 422869 - RNA, 21 nt, Human
ucccaaaccaaccaaaucaaa

SEQ ID NO: 422870 - RNA, 23 nt, Human
ucccauucuacaaguuuuucacu

SEQ ID NO: 422871 - RNA, 22 nt, Human
uccccgggcuagauuuuccccg

SEQ ID NO: 422872 - RNA, 30 nt, Human
uccuaaaaaugaaaauaaauaaaggaaugg

SEQ ID NO: 422873 - RNA, 22 nt, Human
uccuacuuaaaacacacacaca

SEQ ID NO: 422874 - RNA, 18 nt, Human
ucgccgcgccgccgcugc

SEQ ID NO: 422875 - RNA, 18 nt, Human
ucgccgcgccgccgcugc

SEQ ID NO: 422876 - RNA, 21 nt, Human
ucgccgcgccgccgcugcugc

SEQ ID NO: 422877 - RNA, 19 nt, Human
ucuccugaggccaugaaga

SEQ ID NO: 422878 - RNA, 18 nt, Human
ucugaaaaugcuagaaaa

SEQ ID NO: 422879 - RNA, 22 nt, Human
ucugagacuuccuuggugaagu

SEQ ID NO: 422880 - RNA, 20 nt, Human
ucuuugauuuguauucgauu

SEQ ID NO: 422881 - RNA, 21 nt, Human
ugaaaagcauuuugaagggaa

SEQ ID NO: 422882 - RNA, 19 nt, Human
ugaaaugugcagaucaggc

SEQ ID NO: 422883 - RNA, 21 nt, Human
ugaagaagaaaccaggcagga

SEQ ID NO: 422884 - RNA, 22 nt, Human
ugacaaaucuuugauuuguauu

SEQ ID NO: 422885 - RNA, 18 nt, Human
ugagccuaccuacugcuc

SEQ ID NO: 422886 - RNA, 21 nt, Human
ugcagagacaucuccaucuug

SEQ ID NO: 422887 - RNA, 19 nt, Human
ugcagcacaucuacauaug

SEQ ID NO: 422888 - RNA, 18 nt, Human
ugcaguccagaagagccc

SEQ ID NO: 422889 - RNA, 19 nt, Human
ugcaguccagaagagccca

SEQ ID NO: 422890 - RNA, 20 nt, Human
ugccaauaaugaugauuggc

SEQ ID NO: 422891 - RNA, 22 nt, Human
ugcgggaagaaauaaauaggaa

SEQ ID NO: 422892 - RNA, 21 nt, Human
uggaagugugcaguccagaag

SEQ ID NO: 422893 - RNA, 22 nt, Human
uggaauuugugcgggaagaaau

SEQ ID NO: 422894 - RNA, 21 nt, Human
uggagacuacaagucuggagu

SEQ ID NO: 422895 - RNA, 19 nt, Human
uggauguucauaauuguuc

SEQ ID NO: 422896 - RNA, 21 nt, Human
uggcagcccggccuggguagc

SEQ ID NO: 422897 - RNA, 19 nt, Human
ugggaaggggaggccgagg

SEQ ID NO: 422898 - RNA, 24 nt, Human
ugggaaggggaggccgagggacgg

SEQ ID NO: 422899 - RNA, 18 nt, Human
ugggaugggaaggggagg

SEQ ID NO: 422900 - RNA, 20 nt, Human
ugggaugggaaggggaggcc

SEQ ID NO: 422901 - RNA, 22 nt, Human
ugggaugggaaggggaggccga

SEQ ID NO: 422902 - RNA, 19 nt, Human
uggggugcgggcagccgcu

SEQ ID NO: 422903 - RNA, 22 nt, Human
uguaaguuaaauggugguuuuu

SEQ ID NO: 422904 - RNA, 20 nt, Human
uuaagcuguacccauccagc

SEQ ID NO: 422905 - RNA, 21 nt, Human
uucauugcugguguauggacc

SEQ ID NO: 422906 - RNA, 23 nt, Human
uuccauacaacaaacagacaucu

SEQ ID NO: 422907 - RNA, 23 nt, Human
uugaacuacacuucuugaaauuc

SEQ ID NO: 422908 - RNA, 18 nt, Human
uuguaauguauacaguuu

SEQ ID NO: 422909 - RNA, 26 nt, Human
uuuaacccuccacaaaagaaucccaa

SEQ ID NO: 422910 - RNA, 21 nt, Human
uuuaagcuguacccauccagc

SEQ ID NO: 422911 - RNA, 24 nt, Human
uuuccauacaacaaacagacaucu

SEQ ID NO: 422912 - RNA, 18 nt, Human
uuugaagggaaagagaag

SEQ ID NO: 422913 - RNA, 22 nt, Human
uuugcaauucaguugauuauug

SEQ ID NO: 422914 - RNA, 22 nt, Human
uuuguguuuuggauuuuuuccc

SEQ ID NO: 422915 - RNA, 22 nt, Human
aacacaugaaagguuaacaaag

SEQ ID NO: 422916 - RNA, 24 nt, Human
aagaaaaucuauaccaucaugcua

SEQ ID NO: 422917 - RNA, 21 nt, Human
aagcaggugguugagcaguuu

SEQ ID NO: 422918 - RNA, 24 nt, Human
aauaaugguaaggucaaaauauau

SEQ ID NO: 422919 - RNA, 22 nt, Human
acacugcucucccucuaguccu

SEQ ID NO: 422920 - RNA, 20 nt, Human
auacauacaaacaguauaaa

SEQ ID NO: 422921 - RNA, 22 nt, Human
caugaaagguuaacaaaggcua

SEQ ID NO: 422922 - RNA, 21 nt, Human
cccccagacaccauaaaugca

SEQ ID NO: 422923 - RNA, 20 nt, Human
cugauuucacacugcucucc

SEQ ID NO: 422924 - RNA, 22 nt, Human
cugcccccagacaccauaaaug

SEQ ID NO: 422925 - RNA, 24 nt, Human
cugucccaaagcacugaaacaaga

SEQ ID NO: 422926 - RNA, 18 nt, Human
cuugguguaacuuaaaac

SEQ ID NO: 422927 - RNA, 21 nt, Human
gcgugugcugccugagcuggg

SEQ ID NO: 422928 - RNA, 18 nt, Human
uaaagcaggugguugagc

SEQ ID NO: 422929 - RNA, 23 nt, Human
uaacaaaggcuaugaacuuggug

SEQ ID NO: 422930 - RNA, 23 nt, Human
uaacuuaaaacguuucagauguc

SEQ ID NO: 422931 - RNA, 20 nt, Human
uaguccuggagggcaaauac

SEQ ID NO: 422932 - RNA, 23 nt, Human
ucaacauuaacugcaccauccaa

SEQ ID NO: 422933 - RNA, 18 nt, Human
ucugacaauaaaaucuga

SEQ ID NO: 422934 - RNA, 20 nt, Human
ugaaaauaucugccaacuac

SEQ ID NO: 422935 - RNA, 21 nt, Human
ugaaacaagaaaaucuauacc

SEQ ID NO: 422936 - RNA, 21 nt, Human
ugauuucacacugcucucccu

SEQ ID NO: 422937 - RNA, 23 nt, Human
ugcaaaaaguucauacauuauau

SEQ ID NO: 422938 - RNA, 24 nt, Human
uucauacauuauauucccuauuuc

SEQ ID NO: 422939 - RNA, 22 nt, Human
uuccaggguagaaacagguccc

SEQ ID NO: 422940 - RNA, 23 nt, Human
aaaaauguccugggaaagacccu

SEQ ID NO: 422941 - RNA, 20 nt, Human
aaaagaccacaaagcagggc

SEQ ID NO: 422942 - RNA, 18 nt, Human
aaagacccuaacaguuuc

SEQ ID NO: 422943 - RNA, 24 nt, Human
aaagugcugggauuacaggcguga

SEQ ID NO: 422944 - RNA, 26 nt, Human
aaaucggaacccccgggacgcgccgg

SEQ ID NO: 422945 - RNA, 26 nt, Human
aagcagggcaaguugacaaaaggcaa

SEQ ID NO: 422946 - RNA, 19 nt, Human
aagugcugggauuacaggc

SEQ ID NO: 422947 - RNA, 19 nt, Human
aagugcugggauuacaggc

SEQ ID NO: 422948 - RNA, 26 nt, Human
aagugcugggauuacaggcgugagcc

SEQ ID NO: 422949 - RNA, 24 nt, Human
aauguuuuguauuuuuaguagaga

SEQ ID NO: 422950 - RNA, 21 nt, Human
acacccaccuccccccgcccc

SEQ ID NO: 422951 - RNA, 21 nt, Human
acagaaaaaaaaauguccugg

SEQ ID NO: 422952 - RNA, 23 nt, Human
acaggcacccaccaccacgcccg

SEQ ID NO: 422953 - RNA, 19 nt, Human
acccaccuccccccgcccc

SEQ ID NO: 422954 - RNA, 22 nt, Human
acccaccuccccccgccccgcc

SEQ ID NO: 422955 - RNA, 19 nt, Human
acccaggcuggagugcagu

SEQ ID NO: 422956 - RNA, 23 nt, Human
acuaggggggaaaaaagaggagg

SEQ ID NO: 422957 - RNA, 21 nt, Human
acugaaaucucugccaaccua

SEQ ID NO: 422958 - RNA, 18 nt, Human
acugcaagcuccgccucc

SEQ ID NO: 422959 - RNA, 18 nt, Human
agccuccagaguagcugg

SEQ ID NO: 422960 - RNA, 25 nt, Human
aggcuggagugcaguggcgcgaucu

SEQ ID NO: 422961 - RNA, 24 nt, Human
agggaagccuggggcauaauccag

SEQ ID NO: 422962 - RNA, 19 nt, Human
aguagagaugggguuucac

SEQ ID NO: 422963 - RNA, 18 nt, Human
aguagcugggacuacagg

SEQ ID NO: 422964 - RNA, 19 nt, Human
aguagcugggacuacaggc

SEQ ID NO: 422965 - RNA, 20 nt, Human
agugcaguggcgcgaucucg

SEQ ID NO: 422966 - RNA, 23 nt, Human
agugcaguggcgcgaucucggcu

SEQ ID NO: 422967 - RNA, 24 nt, Human
agugcaguggcgcgaucucggcuc

SEQ ID NO: 422968 - RNA, 18 nt, Human
agugcugggauuacaggc

SEQ ID NO: 422969 - RNA, 22 nt, Human
auaucaaaaagaccacaaagca

SEQ ID NO: 422970 - RNA, 23 nt, Human
augaggcuuggaaaacccacagc

SEQ ID NO: 422971 - RNA, 24 nt, Human
augggguuucacuguguuagccag

SEQ ID NO: 422972 - RNA, 23 nt, Human
caaaaagaccacaaagcagggca

SEQ ID NO: 422973 - RNA, 18 nt, Human
caaaaggcaaacaacagg

SEQ ID NO: 422974 - RNA, 24 nt, Human
caaagugcugggauuacaggcgug

SEQ ID NO: 422975 - RNA, 23 nt, Human
caacuaggggggaaaaaagagga

SEQ ID NO: 422976 - RNA, 19 nt, Human
caaguugacaaaaggcaaa

SEQ ID NO: 422977 - RNA, 26 nt, Human
caaguugacaaaaggcaaacaacagg

SEQ ID NO: 422978 - RNA, 18 nt, Human
cacccaccaccacgcccg

SEQ ID NO: 422979 - RNA, 21 nt, Human
cacccaccuccccccgccccg

SEQ ID NO: 422980 - RNA, 24 nt, Human
cacccaggcuggagugcaguggcg

SEQ ID NO: 422981 - RNA, 18 nt, Human
caccuccccccgccccgc

SEQ ID NO: 422982 - RNA, 22 nt, Human
cacgccauucuccugccucagc

SEQ ID NO: 422983 - RNA, 18 nt, Human
cacuguguuagccaggau

SEQ ID NO: 422984 - RNA, 19 nt, Human
cacuguguuagccaggaug

SEQ ID NO: 422985 - RNA, 24 nt, Human
cacuguguuagccaggaugaucuc

SEQ ID NO: 422986 - RNA, 24 nt, Human
cagaaaaaaaaauguccugggaaa

SEQ ID NO: 422987 - RNA, 24 nt, Human
cagaguagcugggacuacaggcac

SEQ ID NO: 422988 - RNA, 20 nt, Human
cagccucuucucggagcaac

SEQ ID NO: 422989 - RNA, 22 nt, Human
caggaaaagcugcucuaucuua

SEQ ID NO: 422990 - RNA, 21 nt, Human
caggcacccaccaccacgccc

SEQ ID NO: 422991 - RNA, 21 nt, Human
cagugggugaugagaagcaag

SEQ ID NO: 422992 - RNA, 22 nt, Human
ccaaagugcugggauuacaggc

SEQ ID NO: 422993 - RNA, 22 nt, Human
ccaaagugcugggauuacaggc

SEQ ID NO: 422994 - RNA, 24 nt, Human
ccaaagugcugggauuacaggcgu

SEQ ID NO: 422995 - RNA, 23 nt, Human
ccaacccgacccacagggaaaca

SEQ ID NO: 422996 - RNA, 24 nt, Human
ccagaguagcugggacuacaggca

SEQ ID NO: 422997 - RNA, 24 nt, Human
cccccgccccgcccccgggccccc

SEQ ID NO: 422998 - RNA, 22 nt, Human
cccccgggacgcgccggcaguc

SEQ ID NO: 422999 - RNA, 23 nt, Human
ccccgcccccgggcccccagguu

SEQ ID NO: 423000 - RNA, 23 nt, Human
ccccgccccgcccccgggccccc

SEQ ID NO: 423001 - RNA, 22 nt, Human
ccccgggcccccagguuuugac

SEQ ID NO: 423002 - RNA, 20 nt, Human
cccgcccccgggcccccagg

SEQ ID NO: 423003 - RNA, 18 nt, Human
cccgccccgcccccgggc

SEQ ID NO: 423004 - RNA, 18 nt, Human
ccgccccgcccccgggcc

SEQ ID NO: 423005 - RNA, 19 nt, Human
ccgcccgggacgcccgcga

SEQ ID NO: 423006 - RNA, 23 nt, Human
ccgcgcccggcccuauuuuuuga

SEQ ID NO: 423007 - RNA, 20 nt, Human
ccuauuuuuacuuugaucua

SEQ ID NO: 423008 - RNA, 21 nt, Human
ccugaccucgugauccgccug

SEQ ID NO: 423009 - RNA, 18 nt, Human
cgacccacagggaaacag

SEQ ID NO: 423010 - RNA, 23 nt, Human
cgcccgggacgcccgcgacgccc

SEQ ID NO: 423011 - RNA, 22 nt, Human
cgccggccgccgccgagccccc

SEQ ID NO: 423012 - RNA, 19 nt, Human
cgccucccggguucacgcc

SEQ ID NO: 423013 - RNA, 24 nt, Human
cgcucugucacccaggcuggagug

SEQ ID NO: 423014 - RNA, 22 nt, Human
cggccgccgccgagcccccucc

SEQ ID NO: 423015 - RNA, 24 nt, Human
cucagccuccagaguagcugggac

SEQ ID NO: 423016 - RNA, 25 nt, Human
cuccccccgccccgcccccgggccc

SEQ ID NO: 423017 - RNA, 21 nt, Human
cucccggguucacgccauucu

SEQ ID NO: 423018 - RNA, 24 nt, Human
cuccugaccucgugauccgccugc

SEQ ID NO: 423019 - RNA, 24 nt, Human
cucgcucugucacccaggcuggag

SEQ ID NO: 423020 - RNA, 23 nt, Human
cugccucagccuccagaguagcu

SEQ ID NO: 423021 - RNA, 23 nt, Human
cugcuucggccucccaaagugcu

SEQ ID NO: 423022 - RNA, 19 nt, Human
cugucacccaggcuggagu

SEQ ID NO: 423023 - RNA, 24 nt, Human
cuuggaaaacccacagcacagcug

SEQ ID NO: 423024 - RNA, 26 nt, Human
gaaaaaagaggagggaagaaggcggc

SEQ ID NO: 423025 - RNA, 18 nt, Human
gacccacagggaaacagc

SEQ ID NO: 423026 - RNA, 22 nt, Human
gaccucgugauccgccugcuuc

SEQ ID NO: 423027 - RNA, 22 nt, Human
gaccucgugauccgccugcuuc

SEQ ID NO: 423028 - RNA, 24 nt, Human
gaccucgugauccgccugcuucgg

SEQ ID NO: 423029 - RNA, 21 nt, Human
gagacggagucucgcucuguc

SEQ ID NO: 423030 - RNA, 19 nt, Human
gagggaagaaggcggcaau

SEQ ID NO: 423031 - RNA, 25 nt, Human
gaguagcugggacuacaggcaccca

SEQ ID NO: 423032 - RNA, 18 nt, Human
gauuacaggcgugagcca

SEQ ID NO: 423033 - RNA, 22 nt, Human
gauuacaggcgugagccaccgc

SEQ ID NO: 423034 - RNA, 22 nt, Human
gauuacaggcgugagccaccgc

SEQ ID NO: 423035 - RNA, 20 nt, Human
gcccccgggcccccagguuu

SEQ ID NO: 423036 - RNA, 19 nt, Human
gcccggcucggcccagcuc

SEQ ID NO: 423037 - RNA, 26 nt, Human
gcccugcgcgcccggcucggcccagc

SEQ ID NO: 423038 - RNA, 25 nt, Human
gccucccggguucacgccauucucc

SEQ ID NO: 423039 - RNA, 25 nt, Human
gcucugucacccaggcuggagugca

SEQ ID NO: 423040 - RNA, 19 nt, Human
gcuggagugcaguggcgcg

SEQ ID NO: 423041 - RNA, 20 nt, Human
ggcagaaaaaaaugucccgg

SEQ ID NO: 423042 - RNA, 20 nt, Human
gggcaugaaaaugggcuugu

SEQ ID NO: 423043 - RNA, 18 nt, Human
gggguuucacuguguuag

SEQ ID NO: 423044 - RNA, 21 nt, Human
gugggugaugagaagcaaggu

SEQ ID NO: 423045 - RNA, 18 nt, Human
uaaaacuacaauugcaaa

SEQ ID NO: 423046 - RNA, 22 nt, Human
uaauguauucuacugacaaugc

SEQ ID NO: 423047 - RNA, 24 nt, Human
uaauguuuuguauuuuuaguagag

SEQ ID NO: 423048 - RNA, 23 nt, Human
uacaggcgugagccaccgcgccc

SEQ ID NO: 423049 - RNA, 23 nt, Human
uaggggggaaaaaagaggaggga

SEQ ID NO: 423050 - RNA, 20 nt, Human
uaguagagaugggguuucac

SEQ ID NO: 423051 - RNA, 24 nt, Human
uaguagagaugggguuucacugug

SEQ ID NO: 423052 - RNA, 19 nt, Human
uauacaagcucauugggag

SEQ ID NO: 423053 - RNA, 24 nt, Human
ucacccaggcuggagugcaguggc

SEQ ID NO: 423054 - RNA, 18 nt, Human
ucacugcaagcuccgccu

SEQ ID NO: 423055 - RNA, 19 nt, Human
ucacugcaagcuccgccuc

SEQ ID NO: 423056 - RNA, 24 nt, Human
ucacugcaagcuccgccucccggg

SEQ ID NO: 423057 - RNA, 24 nt, Human
ucacuguguuagccaggaugaucu

SEQ ID NO: 423058 - RNA, 19 nt, Human
ucaguccaacccgacccac

SEQ ID NO: 423059 - RNA, 23 nt, Human
uccaacccgacccacagggaaac

SEQ ID NO: 423060 - RNA, 24 nt, Human
uccagaguagcugggacuacaggc

SEQ ID NO: 423061 - RNA, 24 nt, Human
ucccaaagugcugggauuacaggc

SEQ ID NO: 423062 - RNA, 21 nt, Human
ucccggguucacgccauucuc

SEQ ID NO: 423063 - RNA, 24 nt, Human
ucccggguucacgccauucuccug

SEQ ID NO: 423064 - RNA, 23 nt, Human
uccgcgccgcguccgcccgggac

SEQ ID NO: 423065 - RNA, 24 nt, Human
ucuccugccucagccuccagagua

SEQ ID NO: 423066 - RNA, 19 nt, Human
ucucgcucugucacccagg

SEQ ID NO: 423067 - RNA, 22 nt, Human
ucucgcucugucacccaggcug

SEQ ID NO: 423068 - RNA, 23 nt, Human
ucucgcucugucacccaggcugg

SEQ ID NO: 423069 - RNA, 24 nt, Human
ucucgcucugucacccaggcugga

SEQ ID NO: 423070 - RNA, 26 nt, Human
ucucgcucugucacccaggcuggagu

SEQ ID NO: 423071 - RNA, 27 nt, Human
ucucgcucugucacccaggcuggagug

SEQ ID NO: 423072 - RNA, 24 nt, Human
ucugucacccaggcuggagugcag

SEQ ID NO: 423073 - RNA, 21 nt, Human
ugauacagaaaaaaaaauguc

SEQ ID NO: 423074 - RNA, 26 nt, Human
ugauucaacuaggggggaaaaaagag

SEQ ID NO: 423075 - RNA, 24 nt, Human
ugccucagccuccagaguagcugg

SEQ ID NO: 423076 - RNA, 24 nt, Human
ugcugggauuacaggcgugagcca

SEQ ID NO: 423077 - RNA, 22 nt, Human
uggaaaacccacagcacagcug

SEQ ID NO: 423078 - RNA, 23 nt, Human
uggagugcaguggcgcgaucucg

SEQ ID NO: 423079 - RNA, 24 nt, Human
uggagugcaguggcgcgaucucgg

SEQ ID NO: 423080 - RNA, 19 nt, Human
ugggacuacaggcacccac

SEQ ID NO: 423081 - RNA, 21 nt, Human
ugggacuacaggcacccacca

SEQ ID NO: 423082 - RNA, 24 nt, Human
ugggacuacaggcacccaccacca

SEQ ID NO: 423083 - RNA, 18 nt, Human
ugggauuacaggcgugag

SEQ ID NO: 423084 - RNA, 19 nt, Human
ugggauuacaggcgugagc

SEQ ID NO: 423085 - RNA, 21 nt, Human
ugggauuacaggcgugagcca

SEQ ID NO: 423086 - RNA, 22 nt, Human
ugggauuacaggcgugagccac

SEQ ID NO: 423087 - RNA, 23 nt, Human
ugggauuacaggcgugagccacc

SEQ ID NO: 423088 - RNA, 24 nt, Human
ugggauuacaggcgugagccaccg

SEQ ID NO: 423089 - RNA, 24 nt, Human
ugggguuucacuguguuagccagg

SEQ ID NO: 423090 - RNA, 18 nt, Human
ugguuaagcccugggaaa

SEQ ID NO: 423091 - RNA, 18 nt, Human
ugguuaagcccugggaaa

SEQ ID NO: 423092 - RNA, 21 nt, Human
uguauuaacauuaagcagagg

SEQ ID NO: 423093 - RNA, 21 nt, Human
uguauuuuuaguagagauggg

SEQ ID NO: 423094 - RNA, 21 nt, Human
uguuagacaagcugauucaac

SEQ ID NO: 423095 - RNA, 24 nt, Human
uguuuuguauuuuuaguagagaug

SEQ ID NO: 423096 - RNA, 18 nt, Human
uuaguagagaugggguuu

SEQ ID NO: 423097 - RNA, 21 nt, Human
uuaguagagaugggguuucac

SEQ ID NO: 423098 - RNA, 21 nt, Human
uuaguagagaugggguuucac

SEQ ID NO: 423099 - RNA, 24 nt, Human
uuaguagagaugggguuucacugu

SEQ ID NO: 423100 - RNA, 21 nt, Human
uucaagaaaauuugcgcuuca

SEQ ID NO: 423101 - RNA, 22 nt, Human
uucacuguguuagccaggauga

SEQ ID NO: 423102 - RNA, 19 nt, Human
uucggccucccaaagugcu

SEQ ID NO: 423103 - RNA, 23 nt, Human
uucuccgccggccgccgccgagc

SEQ ID NO: 423104 - RNA, 23 nt, Human
uuguauuuuuaguagagaugggg

SEQ ID NO: 423105 - RNA, 19 nt, Human
uuucacuguguuagccagg

SEQ ID NO: 423106 - RNA, 19 nt, Human
uuugacaucucaugguacc

SEQ ID NO: 423107 - RNA, 20 nt, Human
uuuuguauuuuuaguagaga

SEQ ID NO: 423108 - RNA, 24 nt, Human
uuuuuaguagagaugggguuucac

SEQ ID NO: 423109 - RNA, 21 nt, Human
aaccccaagcaggacaaggga

SEQ ID NO: 423110 - RNA, 19 nt, Human
aaccgguaaaccuccaucu

SEQ ID NO: 423111 - RNA, 20 nt, Human
aacugcccaaagcccugcca

SEQ ID NO: 423112 - RNA, 22 nt, Human
aaggcccuaaauaaaagaauuc

SEQ ID NO: 423113 - RNA, 19 nt, Human
acaggccaguccagaggcc

SEQ ID NO: 423114 - RNA, 22 nt, Human
acauuuggaagcucuaaaaaca

SEQ ID NO: 423115 - RNA, 18 nt, Human
accaacugggugacucug

SEQ ID NO: 423116 - RNA, 21 nt, Human
accaauuccuaugaaccccaa

SEQ ID NO: 423117 - RNA, 20 nt, Human
accagaaaacuggccauuug

SEQ ID NO: 423118 - RNA, 21 nt, Human
acugggugacucugguugagu

SEQ ID NO: 423119 - RNA, 26 nt, Human
agaaauaauaaugggaacuucucaac

SEQ ID NO: 423120 - RNA, 19 nt, Human
agacagaaauggaggccaa

SEQ ID NO: 423121 - RNA, 21 nt, Human
agacagaaauggaggccaagg

SEQ ID NO: 423122 - RNA, 26 nt, Human
agacagaaauggaggccaagggucca

SEQ ID NO: 423123 - RNA, 22 nt, Human
agagcaaugucuggcacagaaa

SEQ ID NO: 423124 - RNA, 21 nt, Human
agaggucaccccaggcugcua

SEQ ID NO: 423125 - RNA, 19 nt, Human
agccuggccaacugcccaa

SEQ ID NO: 423126 - RNA, 24 nt, Human
agccuggccaacugcccaaagccc

SEQ ID NO: 423127 - RNA, 19 nt, Human
agcuucaaccucuucagcu

SEQ ID NO: 423128 - RNA, 18 nt, Human
aguguaggggugaagaga

SEQ ID NO: 423129 - RNA, 21 nt, Human
augggccugagcagcaccauc

SEQ ID NO: 423130 - RNA, 20 nt, Human
caaaccuaaucuguacccuu

SEQ ID NO: 423131 - RNA, 23 nt, Human
caaagcacugagagcaaugucug

SEQ ID NO: 423132 - RNA, 18 nt, Human
caaagcccugccagucag

SEQ ID NO: 423133 - RNA, 19 nt, Human
caaagcccugccagucagc

SEQ ID NO: 423134 - RNA, 24 nt, Human
caaccgguaaaccuccaucuuccu

SEQ ID NO: 423135 - RNA, 18 nt, Human
caaccuuuuccuuuuagc

SEQ ID NO: 423136 - RNA, 27 nt, Human
caauuccuaugaaccccaagcaggaca

SEQ ID NO: 423137 - RNA, 22 nt, Human
cagaaauaauaaugggaacuuc

SEQ ID NO: 423138 - RNA, 19 nt, Human
cagcucuagaggucacccc

SEQ ID NO: 423139 - RNA, 18 nt, Human
caggggccagacaggcca

SEQ ID NO: 423140 - RNA, 23 nt, Human
cauuuggaagcucuaaaaacagg

SEQ ID NO: 423141 - RNA, 22 nt, Human
ccaaagcccugccagucagcag

SEQ ID NO: 423142 - RNA, 21 nt, Human
ccaacugcccaaagcccugcc

SEQ ID NO: 423143 - RNA, 21 nt, Human
ccacaccccuaccugaaccug

SEQ ID NO: 423144 - RNA, 19 nt, Human
ccaguccagaggccuuacc

SEQ ID NO: 423145 - RNA, 18 nt, Human
ccauuacaguaccucuug

SEQ ID NO: 423146 - RNA, 22 nt, Human
cccaagacccaagauuugugcc

SEQ ID NO: 423147 - RNA, 18 nt, Human
cccacaccccuaccugaa

SEQ ID NO: 423148 - RNA, 19 nt, Human
cccacaccccuaccugaac

SEQ ID NO: 423149 - RNA, 22 nt, Human
cccauuacaguaccucuuggca

SEQ ID NO: 423150 - RNA, 23 nt, Human
ccccaagacccaagauuugugcc

SEQ ID NO: 423151 - RNA, 21 nt, Human
ccccuggagucccacagccuc

SEQ ID NO: 423152 - RNA, 22 nt, Human
ccuauucugacacauuuggaag

SEQ ID NO: 423153 - RNA, 22 nt, Human
ccuggccaacugcccaaagccc

SEQ ID NO: 423154 - RNA, 23 nt, Human
ccuggccaacugcccaaagcccu

SEQ ID NO: 423155 - RNA, 23 nt, Human
cuaccugaaccugucuuggucau

SEQ ID NO: 423156 - RNA, 19 nt, Human
cuggcauggucugcagcug

SEQ ID NO: 423157 - RNA, 21 nt, Human
gaaauggaggccaagggucca

SEQ ID NO: 423158 - RNA, 24 nt, Human
gagaaacuuaaccucaacaaugcc

SEQ ID NO: 423159 - RNA, 20 nt, Human
gagccuggccaacugcccaa

SEQ ID NO: 423160 - RNA, 21 nt, Human
gcagcccagaggauccgacca

SEQ ID NO: 423161 - RNA, 20 nt, Human
gcagcugggucucucaaggc

SEQ ID NO: 423162 - RNA, 22 nt, Human
gcaggacaagggagaagauuca

SEQ ID NO: 423163 - RNA, 22 nt, Human
ggaagagccuggccaacugccc

SEQ ID NO: 423164 - RNA, 21 nt, Human
ggaggccaaggguccagauca

SEQ ID NO: 423165 - RNA, 19 nt, Human
uaaaaacagggggaaaaua

SEQ ID NO: 423166 - RNA, 21 nt, Human
uaaacaaccgguaaaccucca

SEQ ID NO: 423167 - RNA, 24 nt, Human
uaccagaaaacuggccauuugguc

SEQ ID NO: 423168 - RNA, 18 nt, Human
uagagacaggcauuuuuc

SEQ ID NO: 423169 - RNA, 18 nt, Human
uagcuucaaccucuucag

SEQ ID NO: 423170 - RNA, 23 nt, Human
uaguccagaacagcuagagacag

SEQ ID NO: 423171 - RNA, 20 nt, Human
uaguuuuggugcgcugacgu

SEQ ID NO: 423172 - RNA, 22 nt, Human
uaugaaccccaagcaggacaag

SEQ ID NO: 423173 - RNA, 22 nt, Human
ucaaccucuucagcuuuaaacc

SEQ ID NO: 423174 - RNA, 22 nt, Human
uccagaucaggguaacuaaggc

SEQ ID NO: 423175 - RNA, 18 nt, Human
ucccacagccuccagcuc

SEQ ID NO: 423176 - RNA, 18 nt, Human
uccugaacacgggggccc

SEQ ID NO: 423177 - RNA, 18 nt, Human
uccugaacacgggggccc

SEQ ID NO: 423178 - RNA, 21 nt, Human
uccugaacacgggggccccug

SEQ ID NO: 423179 - RNA, 18 nt, Human
ucucaggggccagacagg

SEQ ID NO: 423180 - RNA, 22 nt, Human
ucucaggggccagacaggccag

SEQ ID NO: 423181 - RNA, 18 nt, Human
ucugcagcugggucucuc

SEQ ID NO: 423182 - RNA, 23 nt, Human
ucugcagcugggucucucaaggc

SEQ ID NO: 423183 - RNA, 21 nt, Human
ucuguuucuaaacaaccggua

SEQ ID NO: 423184 - RNA, 23 nt, Human
ugaaaaguuauuggccauaaggg

SEQ ID NO: 423185 - RNA, 18 nt, Human
ugaccuuucccugucucu

SEQ ID NO: 423186 - RNA, 22 nt, Human
ugcaauagauguguccugaaca

SEQ ID NO: 423187 - RNA, 21 nt, Human
uggcaaauguuugaugaccuu

SEQ ID NO: 423188 - RNA, 18 nt, Human
uggcauggucugcagcug

SEQ ID NO: 423189 - RNA, 22 nt, Human
uggcauggucugcagcuggguc

SEQ ID NO: 423190 - RNA, 18 nt, Human
uggugaaaaguuauuggc

SEQ ID NO: 423191 - RNA, 18 nt, Human
uguccugaacacgggggc

SEQ ID NO: 423192 - RNA, 19 nt, Human
ugucuggcacagaaaaggc

SEQ ID NO: 423193 - RNA, 20 nt, Human
ugugguuuggcaucuaaaga

SEQ ID NO: 423194 - RNA, 19 nt, Human
uguuugaugaccuugaggu

SEQ ID NO: 423195 - RNA, 23 nt, Human
uuaaccucaacaaugcccagguu

SEQ ID NO: 423196 - RNA, 21 nt, Human
uucagugagcuaauacaugca

SEQ ID NO: 423197 - RNA, 20 nt, Human
uucuugguuugacccacacc

SEQ ID NO: 423198 - RNA, 18 nt, Human
uuggucauuucagugggu

SEQ ID NO: 423199 - RNA, 20 nt, Human
uugguccuucugaaacgggc

SEQ ID NO: 423200 - RNA, 21 nt, Human
uuuccuaauacaauaaauaau

SEQ ID NO: 423201 - RNA, 22 nt, Human
uuuuuuuuuuuuuuuuucaggg

SEQ ID NO: 423202 - RNA, 23 nt, Human
aaaaggcagcaggagauccagaa

SEQ ID NO: 423203 - RNA, 21 nt, Human
aaggcagcaggagauccagaa

SEQ ID NO: 423204 - RNA, 25 nt, Human
acaaacuccagaaaagggggaacgc

SEQ ID NO: 423205 - RNA, 24 nt, Human
acacacaggcacacgcacgaguac

SEQ ID NO: 423206 - RNA, 31 nt, Human
acacgcacgaguacacacgcgcgcgcgcggu

SEQ ID NO: 423207 - RNA, 24 nt, Human
acccuggacaccuuggccagccuc

SEQ ID NO: 423208 - RNA, 22 nt, Human
accguguccccauucccagccc

SEQ ID NO: 423209 - RNA, 23 nt, Human
acuccagaaaaggcagcaggaga

SEQ ID NO: 423210 - RNA, 20 nt, Human
agagccagcuuugagccugg

SEQ ID NO: 423211 - RNA, 18 nt, Human
agaggaaaggggacuagg

SEQ ID NO: 423212 - RNA, 21 nt, Human
agcccagcaccugcugcagcc

SEQ ID NO: 423213 - RNA, 18 nt, Human
aggcacagggccaccagc

SEQ ID NO: 423214 - RNA, 22 nt, Human
aggcagggagugggcuagagga

SEQ ID NO: 423215 - RNA, 24 nt, Human
aguacacacgcgcgcgcgcgcgcg

SEQ ID NO: 423216 - RNA, 18 nt, Human
cacacacacacacacaca

SEQ ID NO: 423217 - RNA, 20 nt, Human
cagcccagcaccugcugcag

SEQ ID NO: 423218 - RNA, 33 nt, Human
caggcacacgcacgaguacacacgcgcgcggug

SEQ ID NO: 423219 - RNA, 20 nt, Human
cagggcccaggcacagggcc

SEQ ID NO: 423220 - RNA, 25 nt, Human
ccagcccagcaccugcugcagccuc

SEQ ID NO: 423221 - RNA, 24 nt, Human
ccagcuuugagccugggaggcgga

SEQ ID NO: 423222 - RNA, 18 nt, Human
ccccauucccagcccggc

SEQ ID NO: 423223 - RNA, 22 nt, Human
ccggcagcugugaggucacucc

SEQ ID NO: 423224 - RNA, 22 nt, Human
ccugcagagccagcuuugagcc

SEQ ID NO: 423225 - RNA, 19 nt, Human
ccugcagccaagggccugg

SEQ ID NO: 423226 - RNA, 21 nt, Human
ccugcagccaagggccugggc

SEQ ID NO: 423227 - RNA, 18 nt, Human
cgaguacacacgcgcgcg

SEQ ID NO: 423228 - RNA, 24 nt, Human
cucuugcccaggggaagucggaga

SEQ ID NO: 423229 - RNA, 18 nt, Human
gaccugugagucuuuaug

SEQ ID NO: 423230 - RNA, 18 nt, Human
gagccagcuuugagccug

SEQ ID NO: 423231 - RNA, 21 nt, Human
gagccugggaggcggaccugu

SEQ ID NO: 423232 - RNA, 22 nt, Human
gcauaggcuuguauucaggaac

SEQ ID NO: 423233 - RNA, 21 nt, Human
gcuuugagccugggaggcgga

SEQ ID NO: 423234 - RNA, 22 nt, Human
uacacacgcgcgcgcgcgcgcg

SEQ ID NO: 423235 - RNA, 21 nt, Human
uagaggaaaggggacuagguc

SEQ ID NO: 423236 - RNA, 18 nt, Human
ucccaucucuugcccagg

SEQ ID NO: 423237 - RNA, 21 nt, Human
ugagccugggaggcggaccug

SEQ ID NO: 423238 - RNA, 19 nt, Human
ugcaccucugccauaccuc

SEQ ID NO: 423239 - RNA, 20 nt, Human
ugcagccaagggccugggca

SEQ ID NO: 423240 - RNA, 22 nt, Human
ugccugcagccaagggccuggg

SEQ ID NO: 423241 - RNA, 21 nt, Human
uucacgcauaggcuuguauuc

SEQ ID NO: 423242 - RNA, 23 nt, Human
uugagccugggaggcggaccugu

SEQ ID NO: 423243 - RNA, 21 nt, Human
uuuacaaacuccagaaaaggc

SEQ ID NO: 423244 - RNA, 20 nt, Human
uuuuuuuuuuuuuuuuucac

SEQ ID NO: 423245 - RNA, 24 nt, Human
uuuuuuuuuuuuuuuuucacgcau

SEQ ID NO: 423246 - RNA, 24 nt, Human
cacaggucaggaaugggcgagcac

SEQ ID NO: 423247 - RNA, 18 nt, Human
gccaccuuucaugggacu

SEQ ID NO: 423248 - RNA, 18 nt, Human
gucaggaaugggcgagca

SEQ ID NO: 423249 - RNA, 18 nt, Human
ucuuuuuuuuuuuuuuuu

SEQ ID NO: 423250 - RNA, 18 nt, Human
ucuuuuuuuuuuuuuuuu

SEQ ID NO: 423251 - RNA, 20 nt, Human
ugacaggauugacuaacuuu

SEQ ID NO: 423252 - RNA, 24 nt, Human
ugacuaacuuuucccccauuugcu

SEQ ID NO: 423253 - RNA, 31 nt, Human; identical to SEQ ID NO: 289987

SEQ ID NO: 423254 - RNA, 32 nt, Human
uuuuuuuuucuuuuuuuuuuuuuuuuuuuuuu

SEQ ID NO: 423255 - RNA, 24 nt, Human
uuuuuuuuuuuuuuuuuucuuuuu

SEQ ID NO: 423256 - RNA, 24 nt, Human
uuuuuuuuuuuuuuuuuuucuuuu

SEQ ID NO: 423257 - RNA, 25 nt, Human
uuuuuuuuuuuuuuuuuuucuuuuu

SEQ ID NO: 423258 - RNA, 24 nt, Human
uuuuuuuuuuuuuuuuuuuucuuu

SEQ ID NO: 423259 - RNA, 18 nt, Human
aaaaggcugcagggagaa

SEQ ID NO: 423260 - RNA, 23 nt, Human
aacugaggagagaagagggacca

SEQ ID NO: 423261 - RNA, 23 nt, Human
aaggggaagaagagaggcagaga

SEQ ID NO: 423262 - RNA, 22 nt, Human
aauacugauuccaggaggcaaa

SEQ ID NO: 423263 - RNA, 21 nt, Human
acccagcacaauaaauaguuu

SEQ ID NO: 423264 - RNA, 18 nt, Human
acgcggcgguggcggcag

SEQ ID NO: 423265 - RNA, 24 nt, Human
agaaaggagagaagaguggagagg

SEQ ID NO: 423266 - RNA, 25 nt, Human
agaaaggagagaagaguggagaggg

SEQ ID NO: 423267 - RNA, 22 nt, Human
agaggaagaugcuacacuggug

SEQ ID NO: 423268 - RNA, 19 nt, Human
agaggcagagaggucgcug

SEQ ID NO: 423269 - RNA, 23 nt, Human
agcugcccuuuugcccuguaacc

SEQ ID NO: 423270 - RNA, 18 nt, Human
aggcauggcucacagcug

SEQ ID NO: 423271 - RNA, 18 nt, Human
agggagggagguaggucc

SEQ ID NO: 423272 - RNA, 26 nt, Human
agggagggagguagguccggggcagg

SEQ ID NO: 423273 - RNA, 23 nt, Human
aggggaagaagagaggcagagag

SEQ ID NO: 423274 - RNA, 18 nt, Human
caaggaaaagccaccaag

SEQ ID NO: 423275 - RNA, 21 nt, Human
caaggaaaagccaccaaguca

SEQ ID NO: 423276 - RNA, 23 nt, Human
cagcugcccuuuugcccuguaac

SEQ ID NO: 423277 - RNA, 19 nt, Human
caggacaaaggggaagaag

SEQ ID NO: 423278 - RNA, 20 nt, Human
caggacaaaggggaagaaga

SEQ ID NO: 423279 - RNA, 23 nt, Human
caggagccgaccccauggcggag

SEQ ID NO: 423280 - RNA, 20 nt, Human
cagggagaaaggagagaaga

SEQ ID NO: 423281 - RNA, 18 nt, Human
cagguaggaggaaguggg

SEQ ID NO: 423282 - RNA, 20 nt, Human
caucacagcugcccuuuugc

SEQ ID NO: 423283 - RNA, 18 nt, Human
ccagggaggcauggcuca

SEQ ID NO: 423284 - RNA, 20 nt, Human
ccaucaggagccgaccccau

SEQ ID NO: 423285 - RNA, 19 nt, Human
cccaggcaagugguuugag

SEQ ID NO: 423286 - RNA, 18 nt, Human
cccccaaccucauuucca

SEQ ID NO: 423287 - RNA, 22 nt, Human
ccgcggggagugugacuggagg

SEQ ID NO: 423288 - RNA, 18 nt, Human
ccggggcagguccaucag

SEQ ID NO: 423289 - RNA, 22 nt, Human
ccggggcagguccaucaggaug

SEQ ID NO: 423290 - RNA, 21 nt, Human
ccuggcuuugcccgcucugug

SEQ ID NO: 423291 - RNA, 22 nt, Human
ccuggcuuugcccgcucugugc

SEQ ID NO: 423292 - RNA, 23 nt, Human
cgauggagcaggcagaaugacac

SEQ ID NO: 423293 - RNA, 20 nt, Human
cucugugcugcaguugcggc

SEQ ID NO: 423294 - RNA, 20 nt, Human
cuuaggaggacccggagaaa

SEQ ID NO: 423295 - RNA, 20 nt, Human
cuuugcccgcucugugcugc

SEQ ID NO: 423296 - RNA, 20 nt, Human
gaagaagagaggcagagagg

SEQ ID NO: 423297 - RNA, 20 nt, Human
gaagaugcuacacugguggg

SEQ ID NO: 423298 - RNA, 20 nt, Human
gagaagaguggagagggauu

SEQ ID NO: 423299 - RNA, 24 nt, Human
gagagaagaguggagagggauugg

SEQ ID NO: 423300 - RNA, 24 nt, Human
gaggaguccccagguaggaggaag

SEQ ID NO: 423301 - RNA, 18 nt, Human
gaggcagagaggucgcug

SEQ ID NO: 423302 - RNA, 21 nt, Human
gaggcggccacggcgggcggc

SEQ ID NO: 423303 - RNA, 22 nt, Human
gagguggucuuugcaaaccagg

SEQ ID NO: 423304 - RNA, 21 nt, Human
gaugaggaggcaggacaggaa

SEQ ID NO: 423305 - RNA, 21 nt, Human
gcaggacaaaggggaagaaga

SEQ ID NO: 423306 - RNA, 21 nt, Human
gcaggacaaaggggaagaaga

SEQ ID NO: 423307 - RNA, 20 nt, Human
gcaguugcggcgacuuuggu

SEQ ID NO: 423308 - RNA, 19 nt, Human
gcccuguaaccuccugcuu

SEQ ID NO: 423309 - RNA, 18 nt, Human
ggaccagaaaaggcugca

SEQ ID NO: 423310 - RNA, 24 nt, Human
ggagagaagagggaccagaaaagg

SEQ ID NO: 423311 - RNA, 18 nt, Human
ggcuggugggcugaggcg

SEQ ID NO: 423312 - RNA, 21 nt, Human
ggcuggugggcugaggcggcc

SEQ ID NO: 423313 - RNA, 18 nt, Human
gggacgcggcgguggcgg

SEQ ID NO: 423314 - RNA, 21 nt, Human
gggacgcggcgguggcggcag

SEQ ID NO: 423315 - RNA, 19 nt, Human
gggagugguaaaaggggag

SEQ ID NO: 423316 - RNA, 23 nt, Human
gggcgaauaaccgggucuugagu

SEQ ID NO: 423317 - RNA, 22 nt, Human
gggguaggagguggcccaggga

SEQ ID NO: 423318 - RNA, 18 nt, Human
ggguaggagguggcccag

SEQ ID NO: 423319 - RNA, 24 nt, Human
ggguaggagguggcccagggaggc

SEQ ID NO: 423320 - RNA, 25 nt, Human
guacucgggugggcgaauaaccggg

SEQ ID NO: 423321 - RNA, 20 nt, Human
uacaacauccaaacucgugg

SEQ ID NO: 423322 - RNA, 19 nt, Human
uccaggaggcaaacgcauc

SEQ ID NO: 423323 - RNA, 22 nt, Human
uccccagguaggaggaaguggg

SEQ ID NO: 423324 - RNA, 23 nt, Human
ucgcggucccggcuggugggcca

SEQ ID NO: 423325 - RNA, 24 nt, Human
ucucccgcggagagggagggaggu

SEQ ID NO: 423326 - RNA, 21 nt, Human
ucugugcugcaguugcggcga

SEQ ID NO: 423327 - RNA, 19 nt, Human
ugacuggagguacucgggu

SEQ ID NO: 423328 - RNA, 21 nt, Human
ugaggagagaagagggaccag

SEQ ID NO: 423329 - RNA, 19 nt, Human
ugcaguugcggcgacuuug

SEQ ID NO: 423330 - RNA, 21 nt, Human
ugcccuguaaccuccugcuuc

SEQ ID NO: 423331 - RNA, 18 nt, Human
uggaaggaaauacugauu

SEQ ID NO: 423332 - RNA, 21 nt, Human
uggcaggagaauaggaaggga

SEQ ID NO: 423333 - RNA, 25 nt, Human
uggcggcaguggcgagaguucgcag

SEQ ID NO: 423334 - RNA, 21 nt, Human
uggggaggagaaaggcccuga

SEQ ID NO: 423335 - RNA, 20 nt, Human
uggguuggguuggagguggu

SEQ ID NO: 423336 - RNA, 18 nt, Human
uugcccgcucugugcugc

SEQ ID NO: 423337 - RNA, 21 nt, Human
uuugagaaacugaggagagaa

SEQ ID NO: 423338 - RNA, 25 nt, Human
uuugggggagggcucgaggagagcg

SEQ ID NO: 423339 - RNA, 25 nt, Human
aaacaggaaccaagaacaagucuca

SEQ ID NO: 423340 - RNA, 22 nt, Human
aaccguggggagacugcgcugg

SEQ ID NO: 423341 - RNA, 23 nt, Human
aaccguggggagacugcgcuggg

SEQ ID NO: 423342 - RNA, 22 nt, Human
aagaaggaaaaagaggcuccaa

SEQ ID NO: 423343 - RNA, 19 nt, Human
aaggaaaaagaggcuccaa

SEQ ID NO: 423344 - RNA, 19 nt, Human
acacaucccagaguccacc

SEQ ID NO: 423345 - RNA, 21 nt, Human
acccuuccugcugaagaagga

SEQ ID NO: 423346 - RNA, 19 nt, Human
accgcuuccccagcgccgc

SEQ ID NO: 423347 - RNA, 22 nt, Human
acuagugcugcuuaaaccgugg

SEQ ID NO: 423348 - RNA, 20 nt, Human
agaaaaaccucucuaccacu

SEQ ID NO: 423349 - RNA, 29 nt, Human
agcaaagggcugaaaaggcgccccucuca

SEQ ID NO: 423350 - RNA, 18 nt, Human
aggaaaaagaggcuccaa

SEQ ID NO: 423351 - RNA, 18 nt, Human
aggaaccaagaacaaguc

SEQ ID NO: 423352 - RNA, 21 nt, Human
aggaaccaagaacaagucuca

SEQ ID NO: 423353 - RNA, 22 nt, Human
aggcuacacaucccagagucca

SEQ ID NO: 423354 - RNA, 18 nt, Human
agggaccaagagugaccu

SEQ ID NO: 423355 - RNA, 19 nt, Human
agggaccaagagugaccuu

SEQ ID NO: 423356 - RNA, 18 nt, Human
aguccucuuccccagccc

SEQ ID NO: 423357 - RNA, 23 nt, Human
aucccuucccacccuuccugcug

SEQ ID NO: 423358 - RNA, 24 nt, Human
caagagggagcccaggcugcagua

SEQ ID NO: 423359 - RNA, 20 nt, Human
caccccuaaagcuguuucca

SEQ ID NO: 423360 - RNA, 20 nt, Human
cagagccgcauucuuccagg

SEQ ID NO: 423361 - RNA, 19 nt, Human
cagaguccaccugaccccc

SEQ ID NO: 423362 - RNA, 21 nt, Human
caucugaauggaaggagacaa

SEQ ID NO: 423363 - RNA, 25 nt, Human
ccaccugacccccaccaccccuaaa

SEQ ID NO: 423364 - RNA, 18 nt, Human
cccaagaaaaaccucucu

SEQ ID NO: 423365 - RNA, 21 nt, Human
cccaagaaaaaccucucuacc

SEQ ID NO: 423366 - RNA, 19 nt, Human
ccccaagguaaggcugacc

SEQ ID NO: 423367 - RNA, 23 nt, Human
ccccucagcacucugucucuuuc

SEQ ID NO: 423368 - RNA, 20 nt, Human
ccgcggccgccgggaggaag

SEQ ID NO: 423369 - RNA, 26 nt, Human
ccgggaggaagggagggaggaaggga

SEQ ID NO: 423370 - RNA, 19 nt, Human
ccggugggcagaucgauca

SEQ ID NO: 423371 - RNA, 23 nt, Human
ccuggacagacaacucucugagg

SEQ ID NO: 423372 - RNA, 21 nt, Human
cgagagagauagcaagccggc

SEQ ID NO: 423373 - RNA, 23 nt, Human
cgagcucaggguggcucugccgg

SEQ ID NO: 423374 - RNA, 26 nt, Human
cgggaggaagggagggaggaagggag

SEQ ID NO: 423375 - RNA, 22 nt, Human
cucaagggagaggaguggugaa

SEQ ID NO: 423376 - RNA, 23 nt, Human
gaaggaaaaagaggcuccaagag

SEQ ID NO: 423377 - RNA, 23 nt, Human
gaagggagggaggaagggaggga

SEQ ID NO: 423378 - RNA, 19 nt, Human
gagcucaggguggcucugc

SEQ ID NO: 423379 - RNA, 18 nt, Human
gaggaagggagggaggaa

SEQ ID NO: 423380 - RNA, 23 nt, Human
gaguccaccugacccccaccacc

SEQ ID NO: 423381 - RNA, 22 nt, Human
gcagaucgaucaggaccuccag

SEQ ID NO: 423382 - RNA, 19 nt, Human
gccaaaaggaguaugaauc

SEQ ID NO: 423383 - RNA, 20 nt, Human
gcucuggcuuugcucucacc

SEQ ID NO: 423384 - RNA, 19 nt, Human
ggaggaagggagggaggaa

SEQ ID NO: 423385 - RNA, 19 nt, Human
ggagggaggaagggaggga

SEQ ID NO: 423386 - RNA, 20 nt, Human
ggagggaggaagggagggag

SEQ ID NO: 423387 - RNA, 21 nt, Human
ggcgagcaaaggacugggggc

SEQ ID NO: 423388 - RNA, 20 nt, Human
gugggaggagcaauacagug

SEQ ID NO: 423389 - RNA, 25 nt, Human
uaacaucugaauggaaggagacaac

SEQ ID NO: 423390 - RNA, 18 nt, Human
uaaggagcagaagagggg

SEQ ID NO: 423391 - RNA, 20 nt, Human
ucaaacaggaaccaagaaca

SEQ ID NO: 423392 - RNA, 20 nt, Human
ucagagcaaagggcugaaaa

SEQ ID NO: 423393 - RNA, 22 nt, Human
uccaccugacccccaccacccc

SEQ ID NO: 423394 - RNA, 21 nt, Human
uccagggccgggccacuccuc

SEQ ID NO: 423395 - RNA, 21 nt, Human
uccagggccgggccacuccuc

SEQ ID NO: 423396 - RNA, 21 nt, Human
ucccacaagagggagcccagg

SEQ ID NO: 423397 - RNA, 18 nt, Human
ucccacccuuccugcuga

SEQ ID NO: 423398 - RNA, 18 nt, Human
ucccagaguccaccugac

SEQ ID NO: 423399 - RNA, 21 nt, Human
ucccagaguccaccugacccc

SEQ ID NO: 423400 - RNA, 25 nt, Human
ucccagaguccaccugacccccacc

SEQ ID NO: 423401 - RNA, 21 nt, Human
uccccagcgccgccgcggccg

SEQ ID NO: 423402 - RNA, 22 nt, Human
uccccagcgccgccgcggccgc

SEQ ID NO: 423403 - RNA, 20 nt, Human
ucgaagcccggaggcuccgg

SEQ ID NO: 423404 - RNA, 21 nt, Human
ucucccauuaucccacaagag

SEQ ID NO: 423405 - RNA, 19 nt, Human
ucugaggauucaggggaga

SEQ ID NO: 423406 - RNA, 23 nt, Human
ucugucucuuucccaagaaaaac

SEQ ID NO: 423407 - RNA, 22 nt, Human
ucuuccagggccgggccacucc

SEQ ID NO: 423408 - RNA, 21 nt, Human
ugaaacuauagggacucccca

SEQ ID NO: 423409 - RNA, 18 nt, Human
ugagaagugggaggagca

SEQ ID NO: 423410 - RNA, 22 nt, Human
ugagaagugggaggagcaauac

SEQ ID NO: 423411 - RNA, 25 nt, Human
ugccccucagcacucugucucuuuc

SEQ ID NO: 423412 - RNA, 20 nt, Human
ugcgcuggguucuguccccu

SEQ ID NO: 423413 - RNA, 19 nt, Human
uggaaggaaaucagagcaa

SEQ ID NO: 423414 - RNA, 19 nt, Human
ugguuugggugcggggucc

SEQ ID NO: 423415 - RNA, 19 nt, Human
ugucuaaggagcagaagag

SEQ ID NO: 423416 - RNA, 21 nt, Human
uucaucuuaguccauucaggu

SEQ ID NO: 423417 - RNA, 22 nt, Human
uuuuuuuuuuuuuuuuuuccag

SEQ ID NO: 423418 - RNA, 23 nt, Human
aaaaagcaaaaaacaaaagaaaa

SEQ ID NO: 423419 - RNA, 22 nt, Human
aaacaaaagaaaacauuuacaa

SEQ ID NO: 423420 - RNA, 21 nt, Human
aaaggaagaaaaagcaaaaaa

SEQ ID NO: 423421 - RNA, 24 nt, Human
aagaaaacauuuacaacccaagcu

SEQ ID NO: 423422 - RNA, 22 nt, Human
aagcaaaaaacaaaagaaaaca

SEQ ID NO: 423423 - RNA, 18 nt, Human
aagcuagugauuccaugu

SEQ ID NO: 423424 - RNA, 20 nt, Human
aagcuagugauuccaugugg

SEQ ID NO: 423425 - RNA, 18 nt, Human
acaccagccugugggcac

SEQ ID NO: 423426 - RNA, 23 nt, Human
agaaaaagcaaaaaacaaaagaa

SEQ ID NO: 423427 - RNA, 24 nt, Human
agaaaaagcaaaaaacaaaagaaa

SEQ ID NO: 423428 - RNA, 19 nt, Human
agcaggcucagaccccagg

SEQ ID NO: 423429 - RNA, 19 nt, Human
aggaagaaaaagcaaaaaa

SEQ ID NO: 423430 - RNA, 24 nt, Human
aggaagaaaaagcaaaaaacaaaa

SEQ ID NO: 423431 - RNA, 26 nt, Human
aggaagaaaaagcaaaaaacaaaaga

SEQ ID NO: 423432 - RNA, 21 nt, Human
aggcucagaccccaggguggg

SEQ ID NO: 423433 - RNA, 19 nt, Human
agggugggccagggggucc

SEQ ID NO: 423434 - RNA, 22 nt, Human
auuucuguagcuuccacauccc

SEQ ID NO: 423435 - RNA, 18 nt, Human
caaagcacaagccgccuc

SEQ ID NO: 423436 - RNA, 21 nt, Human
caaaggaagaaaaagcaaaaa

SEQ ID NO: 423437 - RNA, 26 nt, Human
caaaggaagaaaaagcaaaaaacaaa

SEQ ID NO: 423438 - RNA, 20 nt, Human
caccagccugugggcacucc

SEQ ID NO: 423439 - RNA, 25 nt, Human
caccagccugugggcacuccagagc

SEQ ID NO: 423440 - RNA, 21 nt, Human
cacgccgccugcagccgggga

SEQ ID NO: 423441 - RNA, 20 nt, Human
cacuccagagccucaggcug

SEQ ID NO: 423442 - RNA, 23 nt, Human
cagaccccagggugggccagggg

SEQ ID NO: 423443 - RNA, 18 nt, Human
cagcaggcucagacccca

SEQ ID NO: 423444 - RNA, 22 nt, Human
ccaaaggaagaaaaagcaaaaa

SEQ ID NO: 423445 - RNA, 18 nt, Human
cccaaaggaagaaaaagc

SEQ ID NO: 423446 - RNA, 24 nt, Human
cccaugccuggcaucuggaauuca

SEQ ID NO: 423447 - RNA, 19 nt, Human
ccccaaagaaaaagcuaug

SEQ ID NO: 423448 - RNA, 20 nt, Human
ccccagggugggccaggggg

SEQ ID NO: 423449 - RNA, 18 nt, Human
cccggggucacacccagg

SEQ ID NO: 423450 - RNA, 19 nt, Human
ccgccugcacggccgccgc

SEQ ID NO: 423451 - RNA, 21 nt, Human
ccgcugguccugcacgccgcc

SEQ ID NO: 423452 - RNA, 22 nt, Human
ccgcugguccugcacgccgccu

SEQ ID NO: 423453 - RNA, 24 nt, Human
ccugcagccggggagagcggaggc

SEQ ID NO: 423454 - RNA, 19 nt, Human
ccugcguggggcggagggc

SEQ ID NO: 423455 - RNA, 25 nt, Human
ccuuacaccagccugugggcacucc

SEQ ID NO: 423456 - RNA, 20 nt, Human
ccuuugauguccugcccucc

SEQ ID NO: 423457 - RNA, 20 nt, Human
cgaucccaagccccgcuccu

SEQ ID NO: 423458 - RNA, 21 nt, Human
cgccugcacggccgccgcugg

SEQ ID NO: 423459 - RNA, 18 nt, Human
cggcgggcgcgcccgggg

SEQ ID NO: 423460 - RNA, 22 nt, Human
cggggagagcggaggcggcggg

SEQ ID NO: 423461 - RNA, 24 nt, Human
cggggagagcggaggcggcggguu

SEQ ID NO: 423462 - RNA, 21 nt, Human
cgucgcgcggcgggcgcgccc

SEQ ID NO: 423463 - RNA, 23 nt, Human
cucagaccccagggugggccagg

SEQ ID NO: 423464 - RNA, 21 nt, Human
cuccagagccucaggcugcca

SEQ ID NO: 423465 - RNA, 20 nt, Human
gaaguccuccgccugcacgg

SEQ ID NO: 423466 - RNA, 18 nt, Human
gaggcuggucucuguggc

SEQ ID NO: 423467 - RNA, 23 nt, Human
gcaaagcacaagccgccucccau

SEQ ID NO: 423468 - RNA, 22 nt, Human
gcccagcaggcucagaccccag

SEQ ID NO: 423469 - RNA, 23 nt, Human
gccccgcuccuuacaccagccug

SEQ ID NO: 423470 - RNA, 22 nt, Human
gcgccgaaguccuccgccugca

SEQ ID NO: 423471 - RNA, 25 nt, Human
gcuaguuuuaaaauagagaucauua

SEQ ID NO: 423472 - RNA, 22 nt, Human
ggcccagcaggcucagacccca

SEQ ID NO: 423473 - RNA, 18 nt, Human
uaaagaggaauugagaag

SEQ ID NO: 423474 - RNA, 23 nt, Human
uacaacccaagcuagugauucca

SEQ ID NO: 423475 - RNA, 20 nt, Human
uauacauauauauuuauaua

SEQ ID NO: 423476 - RNA, 22 nt, Human
uauauaaagaggaauugagaag

SEQ ID NO: 423477 - RNA, 22 nt, Human
uauauacauauauauuuauaua

SEQ ID NO: 423478 - RNA, 24 nt, Human
uauauacauauauauuuauauaua

SEQ ID NO: 423479 - RNA, 19 nt, Human
uauauauauacauauauau

SEQ ID NO: 423480 - RNA, 28 nt, Human
uauauauauacauauauauuuauauaua

SEQ ID NO: 423481 - RNA, 22 nt, Human
ucacacccaggaggagccgcgc

SEQ ID NO: 423482 - RNA, 19 nt, Human
uccaagugaaggcaaagca

SEQ ID NO: 423483 - RNA, 22 nt, Human
uccacaucccaaaggaagaaaa

SEQ ID NO: 423484 - RNA, 21 nt, Human
ucccucugccagccccagggu

SEQ ID NO: 423485 - RNA, 18 nt, Human
uccugcacgccgccugca

SEQ ID NO: 423486 - RNA, 22 nt, Human
uccugcacgccgccugcagccg

SEQ ID NO: 423487 - RNA, 22 nt, Human
uccuuacaccagccugugggca

SEQ ID NO: 423488 - RNA, 22 nt, Human
ucuguagcuuccacaucccaaa

SEQ ID NO: 423489 - RNA, 21 nt, Human
ugagaagugccaccccaaaga

SEQ ID NO: 423490 - RNA, 20 nt, Human
ugagcagaguccucgcuccu

SEQ ID NO: 423491 - RNA, 19 nt, Human
ugcaggggcgggcuggggc

SEQ ID NO: 423492 - RNA, 21 nt, Human
ugccuggaaacuggagagcuc

SEQ ID NO: 423493 - RNA, 19 nt, Human
ugcguggggcggagggcag

SEQ ID NO: 423494 - RNA, 19 nt, Human
uggaauucacaagcagagc

SEQ ID NO: 423495 - RNA, 20 nt, Human
uggagagcucccucugccag

SEQ ID NO: 423496 - RNA, 23 nt, Human
uggcccugaaaggucaagucugu

SEQ ID NO: 423497 - RNA, 21 nt, Human
uuccaggguggccagaccuuc

SEQ ID NO: 423498 - RNA, 20 nt, Human
uucccggaggcuggucucug

SEQ ID NO: 423499 - RNA, 21 nt, Human
aaugccugcacucugagcagc

SEQ ID NO: 423500 - RNA, 19 nt, Human
accccacgcagcugggcug

SEQ ID NO: 423501 - RNA, 21 nt, Human
acgcugcuaggucugagccca

SEQ ID NO: 423502 - RNA, 23 nt, Human
agccugugcagguguagacccuu

SEQ ID NO: 423503 - RNA, 19 nt, Human
agguguagaccccucauac

SEQ ID NO: 423504 - RNA, 20 nt, Human
agguguagacccuucacacc

SEQ ID NO: 423505 - RNA, 22 nt, Human
cacagcaggguuggccaggccc

SEQ ID NO: 423506 - RNA, 18 nt, Human
cacccugcacagcagggu

SEQ ID NO: 423507 - RNA, 18 nt, Human
cacccugugcagcagggc

SEQ ID NO: 423508 - RNA, 23 nt, Human
cacgcugcuaggucugagcccag

SEQ ID NO: 423509 - RNA, 18 nt, Human
cacucugagcagcagggc

SEQ ID NO: 423510 - RNA, 18 nt, Human
cacugugugcaaugccug

SEQ ID NO: 423511 - RNA, 26 nt, Human
cagcugggcuggucgagcccaggaac

SEQ ID NO: 423512 - RNA, 18 nt, Human
cagggcugacugggccca

SEQ ID NO: 423513 - RNA, 21 nt, Human
caugugcaaugccugcacucu

SEQ ID NO: 423514 - RNA, 28 nt, Human
cccacgcugcuaggucugagcccaggga

SEQ ID NO: 423515 - RNA, 23 nt, Human
ccucacaccgugugcaaugccug

SEQ ID NO: 423516 - RNA, 20 nt, Human
ccucucaguccuugcaggag

SEQ ID NO: 423517 - RNA, 18 nt, Human
ccugcaccccaugcagcu

SEQ ID NO: 423518 - RNA, 18 nt, Human
ccugcacucugagcagca

SEQ ID NO: 423519 - RNA, 22 nt, Human
ccugugccaugugcagcagggc

SEQ ID NO: 423520 - RNA, 21 nt, Human
cgugugcaaugccugcacccu

SEQ ID NO: 423521 - RNA, 22 nt, Human
cucacaccgugugcaaugccug

SEQ ID NO: 423522 - RNA, 20 nt, Human
cuggcugggcccagggauuc

SEQ ID NO: 423523 - RNA, 19 nt, Human
cugugcaaugccugcaccc

SEQ ID NO: 423524 - RNA, 22 nt, Human
cugugugcaaugccuguacccc

SEQ ID NO: 423525 - RNA, 21 nt, Human
gacucagcccaugcaggugua

SEQ ID NO: 423526 - RNA, 18 nt, Human
gagcagcagggcugacug

SEQ ID NO: 423527 - RNA, 19 nt, Human
gagcagcagggcugacugg

SEQ ID NO: 423528 - RNA, 19 nt, Human
gcaaugccugcaccccaug

SEQ ID NO: 423529 - RNA, 19 nt, Human
gcaaugccuguaccccacg

SEQ ID NO: 423530 - RNA, 19 nt, Human
gcccggggacucgucccuu

SEQ ID NO: 423531 - RNA, 21 nt, Human
gccuguaccccacgcagcugg

SEQ ID NO: 423532 - RNA, 20 nt, Human
gugugcaaugccugugccau

SEQ ID NO: 423533 - RNA, 21 nt, Human
ucacaccaugugcaaugccug

SEQ ID NO: 423534 - RNA, 25 nt, Human
ucagcccaugcagguguagaccccg

SEQ ID NO: 423535 - RNA, 23 nt, Human
ucccuugcagguguagaccuucu

SEQ ID NO: 423536 - RNA, 22 nt, Human
uccuugcagguguagaccccuc

SEQ ID NO: 423537 - RNA, 23 nt, Human
ucucacaccaugugcaaugccug

SEQ ID NO: 423538 - RNA, 25 nt, Human
ugagcccagggacucaggaccaaag

SEQ ID NO: 423539 - RNA, 21 nt, Human
ugcaaugccugcacccugugc

SEQ ID NO: 423540 - RNA, 18 nt, Human
ugccugugccaugugcag

SEQ ID NO: 423541 - RNA, 19 nt, Human
uggcagguguaggcccauu

SEQ ID NO: 423542 - RNA, 19 nt, Human
uggccaggcccggggacuc

SEQ ID NO: 423543 - RNA, 20 nt, Human
uguacacuccucacaccgug

SEQ ID NO: 423544 - RNA, 20 nt, Human
uguagacccuucacaccgug

SEQ ID NO: 423545 - RNA, 23 nt, Human
uguagacccuucacaccgugugc

SEQ ID NO: 423546 - RNA, 21 nt, Human
uguagaccuucucacaccaug

SEQ ID NO: 423547 - RNA, 18 nt, Human
aaaaggcuggccaaggaa

SEQ ID NO: 423548 - RNA, 28 nt, Human
aggcaaaaggcuggccaaggaauggugg

SEQ ID NO: 423549 - RNA, 22 nt, Human
agggugccacaggagguccugg

SEQ ID NO: 423550 - RNA, 22 nt, Human
auagccccucucucccguccaa

SEQ ID NO: 423551 - RNA, 19 nt, Human
cacucugcccuccucucca

SEQ ID NO: 423552 - RNA, 19 nt, Human
ccccucucucccguccaaa

SEQ ID NO: 423553 - RNA, 20 nt, Human
cccuuauuucccuccauguc

SEQ ID NO: 423554 - RNA, 20 nt, Human
cgugugcauuggcacacaug

SEQ ID NO: 423555 - RNA, 21 nt, Human
cucacucugcccuccucucca

SEQ ID NO: 423556 - RNA, 21 nt, Human
cucccguccaaaauuucaguc

SEQ ID NO: 423557 - RNA, 25 nt, Human
cucugcccuccucuccaaguccuca

SEQ ID NO: 423558 - RNA, 21 nt, Human
cucuuuguugaguaucgaggg

SEQ ID NO: 423559 - RNA, 20 nt, Human
cuggcggcgcugcgcccucu

SEQ ID NO: 423560 - RNA, 20 nt, Human
cuugaagggugccacaggag

SEQ ID NO: 423561 - RNA, 27 nt, Human
cuugaagggugccacaggagguccugg

SEQ ID NO: 423562 - RNA, 21 nt, Human
gaagcaagauggaauagcccc

SEQ ID NO: 423563 - RNA, 19 nt, Human
uagccccucucucccgucc

SEQ ID NO: 423564 - RNA, 23 nt, Human
ucccuccaugucuuucucacucu

SEQ ID NO: 423565 - RNA, 22 nt, Human
uccucuccaaguccucaacaag

SEQ ID NO: 423566 - RNA, 19 nt, Human
ucucacucugcccuccucu

SEQ ID NO: 423567 - RNA, 19 nt, Human
ucucccuuauuucccucca

SEQ ID NO: 423568 - RNA, 25 nt, Human
ucucccuuauuucccuccaugucuu

SEQ ID NO: 423569 - RNA, 24 nt, Human
ugccacaggagguccuggcagugc

SEQ ID NO: 423570 - RNA, 18 nt, Human
uggaauagccccucucuc

SEQ ID NO: 423571 - RNA, 23 nt, Human
uggcacacaugccgguuuaugca

SEQ ID NO: 423572 - RNA, 19 nt, Human
aaagcucugcgcgccuccc

SEQ ID NO: 423573 - RNA, 23 nt, Human
aaaguuaagucaggggcaguuga

SEQ ID NO: 423574 - RNA, 23 nt, Human
aaauauccccccagaaagaaccc

SEQ ID NO: 423575 - RNA, 23 nt, Human
aacaccaggagauggauagaaua

SEQ ID NO: 423576 - RNA, 18 nt, Human
aaccacuuguacagacaa

SEQ ID NO: 423577 - RNA, 21 nt, Human
aaggacacacguccccaccuu

SEQ ID NO: 423578 - RNA, 20 nt, Human
aauugggaccauuuguggga

SEQ ID NO: 423579 - RNA, 20 nt, Human
acuuaaaaggguauugaaag

SEQ ID NO: 423580 - RNA, 19 nt, Human
agaaagaacccaaaggucc

SEQ ID NO: 423581 - RNA, 19 nt, Human
agcgagcgccugcagcccg

SEQ ID NO: 423582 - RNA, 21 nt, Human
agcgauaaaggccagcccgga

SEQ ID NO: 423583 - RNA, 23 nt, Human
agcggcagcgagcgccugcagcc

SEQ ID NO: 423584 - RNA, 21 nt, Human
agggaggaagagggggcuucc

SEQ ID NO: 423585 - RNA, 22 nt, Human
auacaacacaccauaguaccaa

SEQ ID NO: 423586 - RNA, 22 nt, Human
auccccccagaaagaacccaaa

SEQ ID NO: 423587 - RNA, 19 nt, Human
aucugagagaaguauggaa

SEQ ID NO: 423588 - RNA, 24 nt, Human
caaagcaaucccuuucugaggcuu

SEQ ID NO: 423589 - RNA, 22 nt, Human
cacaccauaguaccaaaggaca

SEQ ID NO: 423590 - RNA, 23 nt, Human
cacacguccccaccuuguuacau

SEQ ID NO: 423591 - RNA, 21 nt, Human
cagaaagaacccaaaggucca

SEQ ID NO: 423592 - RNA, 18 nt, Human
cagaacaccaggagaugg

SEQ ID NO: 423593 - RNA, 20 nt, Human
cagauuuuaauauggcaaua

SEQ ID NO: 423594 - RNA, 22 nt, Human
cagcccaauuccccagcggcag

SEQ ID NO: 423595 - RNA, 21 nt, Human
ccacuuguacagacaaaaguu

SEQ ID NO: 423596 - RNA, 20 nt, Human
ccauauucacccaauaguua

SEQ ID NO: 423597 - RNA, 22 nt, Human
cccagaaagaacccaaaggucc

SEQ ID NO: 423598 - RNA, 20 nt, Human
ccccagggaggaagaggggg

SEQ ID NO: 423599 - RNA, 18 nt, Human
cccccagggaggaagagg

SEQ ID NO: 423600 - RNA, 23 nt, Human
ccccccgcucgguccugcgacga

SEQ ID NO: 423601 - RNA, 21 nt, Human
cccccgccccccgcucggucc

SEQ ID NO: 423602 - RNA, 20 nt, Human
cccgcucgguccugcgacga

SEQ ID NO: 423603 - RNA, 20 nt, Human
ccgccccccgcucgguccug

SEQ ID NO: 423604 - RNA, 18 nt, Human
ccuggggcccccagggag

SEQ ID NO: 423605 - RNA, 23 nt, Human
cgcccccgccccccgcucggucc

SEQ ID NO: 423606 - RNA, 19 nt, Human
cgccgcgcccccgcccccc

SEQ ID NO: 423607 - RNA, 21 nt, Human
cgccgcgcccccgccccccgc

SEQ ID NO: 423608 - RNA, 19 nt, Human
cucgccgcgcccccgcccc

SEQ ID NO: 423609 - RNA, 23 nt, Human
gaacagccugucaugcuauuucc

SEQ ID NO: 423610 - RNA, 18 nt, Human
gagaacucgccaggaggg

SEQ ID NO: 423611 - RNA, 18 nt, Human
gagacaguggucugggcc

SEQ ID NO: 423612 - RNA, 19 nt, Human
gagcgccugcagcccgaaa

SEQ ID NO: 423613 - RNA, 18 nt, Human
gccgcgcccccgcccccc

SEQ ID NO: 423614 - RNA, 21 nt, Human
ggcaauaaaugccuugaaaaa

SEQ ID NO: 423615 - RNA, 20 nt, Human
gggaagacauugagaaagcu

SEQ ID NO: 423616 - RNA, 19 nt, Human
gggaagguggauggugacg

SEQ ID NO: 423617 - RNA, 25 nt, Human
ggggcccccagggaggaagaggggg

SEQ ID NO: 423618 - RNA, 22 nt, Human
guaaaaccacuuguacagacaa

SEQ ID NO: 423619 - RNA, 20 nt, Human
guaggcuuuaggugcagcgu

SEQ ID NO: 423620 - RNA, 18 nt, Human
gucaggggcaguugauuc

SEQ ID NO: 423621 - RNA, 19 nt, Human
guggucugggcccaccacc

SEQ ID NO: 423622 - RNA, 19 nt, Human
uacaacacaccauaguacc

SEQ ID NO: 423623 - RNA, 23 nt, Human
uacaacacaccauaguaccaaag

SEQ ID NO: 423624 - RNA, 25 nt, Human
uaggaaauauccccccagaaagaac

SEQ ID NO: 423625 - RNA, 23 nt, Human
ucagauuuuaauauggcaauaaa

SEQ ID NO: 423626 - RNA, 22 nt, Human
uccccagcggcagcgagcgccu

SEQ ID NO: 423627 - RNA, 19 nt, Human
uccuuguagaagggaaggu

SEQ ID NO: 423628 - RNA, 24 nt, Human
ucgccgcgcccccgccccccgcuc

SEQ ID NO: 423629 - RNA, 18 nt, Human
ugaaagccauucuucucc

SEQ ID NO: 423630 - RNA, 21 nt, Human
ugaaagccauucuucuccagg

SEQ ID NO: 423631 - RNA, 23 nt, Human
ugacugcagaacaccaggagaug

SEQ ID NO: 423632 - RNA, 22 nt, Human
ugagacacuuuuuuuucugcuu

SEQ ID NO: 423633 - RNA, 22 nt, Human
ugagauaaaggccacaugccuu

SEQ ID NO: 423634 - RNA, 25 nt, Human
aaagcccccuucuuuaaaaaccaca

SEQ ID NO: 423635 - RNA, 20 nt, Human
aaccacacaccauccagagu

SEQ ID NO: 423636 - RNA, 25 nt, Human
aagaaagcccccuucuuuaaaaacc

SEQ ID NO: 423637 - RNA, 21 nt, Human
acaggcgaguugggucugggu

SEQ ID NO: 423638 - RNA, 21 nt, Human
acaggcgaguugggucugggu

SEQ ID NO: 423639 - RNA, 21 nt, Human
accaugaagagggggagcgac

SEQ ID NO: 423640 - RNA, 20 nt, Human
acccuagagaacuaaaaaga

SEQ ID NO: 423641 - RNA, 22 nt, Human
aggaggaaguuugcccgcgacc

SEQ ID NO: 423642 - RNA, 18 nt, Human
aggcgaguugggucuggg

SEQ ID NO: 423643 - RNA, 22 nt, Human
caauaguuggaacaaaguccac

SEQ ID NO: 423644 - RNA, 18 nt, Human
caccauccagaguagggu

SEQ ID NO: 423645 - RNA, 22 nt, Human
cacuugagauuggaaaugacuu

SEQ ID NO: 423646 - RNA, 25 nt, Human
cagacccuagagaacuaaaaagaaa

SEQ ID NO: 423647 - RNA, 26 nt, Human
cccccaauaguuggaacaaaguccac

SEQ ID NO: 423648 - RNA, 21 nt, Human
cggcucuagguccugcuuccc

SEQ ID NO: 423649 - RNA, 22 nt, Human
cugaauccgcccagccacacac

SEQ ID NO: 423650 - RNA, 18 nt, Human
cuucaccccuucccagcg

SEQ ID NO: 423651 - RNA, 19 nt, Human
cuucccagcgcccuggugc

SEQ ID NO: 423652 - RNA, 21 nt, Human
gcugaauccgcccagccacac

SEQ ID NO: 423653 - RNA, 21 nt, Human
gcugugcccggcucuaggucc

SEQ ID NO: 423654 - RNA, 20 nt, Human
ggagagccuccccguccaca

SEQ ID NO: 423655 - RNA, 19 nt, Human
uaaaaaccacacaccaucc

SEQ ID NO: 423656 - RNA, 19 nt, Human
uaaaaagaaagcccccuuc

SEQ ID NO: 423657 - RNA, 22 nt, Human
uagagaacuaaaaagaaagccc

SEQ ID NO: 423658 - RNA, 20 nt, Human
uaucagacccuagagaaccg

SEQ ID NO: 423659 - RNA, 22 nt, Human
ucagacccuagagaacuaaaaa

SEQ ID NO: 423660 - RNA, 18 nt, Human
uccacuugagauuggaaa

SEQ ID NO: 423661 - RNA, 26 nt, Human
uccagaguagggugagaaauguaaga

SEQ ID NO: 423662 - RNA, 24 nt, Human
uccgcccagccacacacuucaccc

SEQ ID NO: 423663 - RNA, 23 nt, Human
ucgcugaauccgcccagccacac

SEQ ID NO: 423664 - RNA, 19 nt, Human
ucuuuaaaaaccacacacc

SEQ ID NO: 423665 - RNA, 18 nt, Human
ugaagagggggagcgacg

SEQ ID NO: 423666 - RNA, 23 nt, Human
ugcccggcucuagguccugcuuc

SEQ ID NO: 423667 - RNA, 21 nt, Human
uuuuuuuuuuuuucuuuaaca

SEQ ID NO: 423668 - RNA, 30 nt, Human
aaaaccccacuccuaaggaggcgcuccgcc

SEQ ID NO: 423669 - RNA, 20 nt, Human
aaaccucccgaacgccccca

SEQ ID NO: 423670 - RNA, 22 nt, Human
aaccaaaaacgcagaauuugag

SEQ ID NO: 423671 - RNA, 23 nt, Human
aaccaaaaacgcagaauuugagg

SEQ ID NO: 423672 - RNA, 18 nt, Human
aacgcagagccccucccc

SEQ ID NO: 423673 - RNA, 23 nt, Human
aacgcccccaaaugagaccagca

SEQ ID NO: 423674 - RNA, 25 nt, Human
aagaagccucauccaccauaaaacc

SEQ ID NO: 423675 - RNA, 18 nt, Human
aagcccugucccacccaa

SEQ ID NO: 423676 - RNA, 23 nt, Human
aagccucauccaccauaaaaccc

SEQ ID NO: 423677 - RNA, 18 nt, Human
aaggagccuaugcaggcc

SEQ ID NO: 423678 - RNA, 19 nt, Human
aaggaggcgcuccgcccuc

SEQ ID NO: 423679 - RNA, 23 nt, Human
acaggcgucggcgcgccuggagc

SEQ ID NO: 423680 - RNA, 18 nt, Human
acaguggcagaggcugag

SEQ ID NO: 423681 - RNA, 21 nt, Human
accauuucuccagucccgcca

SEQ ID NO: 423682 - RNA, 19 nt, Human
acccagagccacagccccc

SEQ ID NO: 423683 - RNA, 19 nt, Human
accccacuccuaaggaggc

SEQ ID NO: 423684 - RNA, 20 nt, Human
agaagccuaccuagugcccc

SEQ ID NO: 423685 - RNA, 21 nt, Human
agaauuugaggcagaggaugg

SEQ ID NO: 423686 - RNA, 18 nt, Human
agagaagccccacccaca

SEQ ID NO: 423687 - RNA, 19 nt, Human
agagacgggcggggccugg

SEQ ID NO: 423688 - RNA, 31 nt, Human
agagccccuccccauccuggagcuccgccuu

SEQ ID NO: 423689 - RNA, 23 nt, Human
agaggcuucuaucucuccuguag

SEQ ID NO: 423690 - RNA, 20 nt, Human
agcuggauggagugcaggug

SEQ ID NO: 423691 - RNA, 24 nt, Human
aggaggagccccgccugcagguag

SEQ ID NO: 423692 - RNA, 19 nt, Human
aggcagggcccgccccguc

SEQ ID NO: 423693 - RNA, 22 nt, Human
aggccacgcccacccagagcca

SEQ ID NO: 423694 - RNA, 21 nt, Human
aggcgucggcgcgccuggagc

SEQ ID NO: 423695 - RNA, 18 nt, Human
aggggccuugcccugguc

SEQ ID NO: 423696 - RNA, 23 nt, Human
aggggcuguggacaggcggagga

SEQ ID NO: 423697 - RNA, 20 nt, Human
agggggccggcccaucucag

SEQ ID NO: 423698 - RNA, 23 nt, Human
agguggguggucaaaccccaggc

SEQ ID NO: 423699 - RNA, 21 nt, Human
caaaccccaggcugaggaagg

SEQ ID NO: 423700 - RNA, 22 nt, Human
caacgcagagccccuccccauc

SEQ ID NO: 423701 - RNA, 20 nt, Human
cacaggaaggagccuaugca

SEQ ID NO: 423702 - RNA, 22 nt, Human
cacaggaaggagccuaugcagg

SEQ ID NO: 423703 - RNA, 21 nt, Human
cacagucgggggguugaugcc

SEQ ID NO: 423704 - RNA, 21 nt, Human
cacuccuaaggaggcgcuccg

SEQ ID NO: 423705 - RNA, 21 nt, Human
caggaagaagccucauccacc

SEQ ID NO: 423706 - RNA, 24 nt, Human
caggccacgcccacccagagccac

SEQ ID NO: 423707 - RNA, 22 nt, Human
cagggagcagccuaccccagag

SEQ ID NO: 423708 - RNA, 21 nt, Human
ccacccagagccacagccccc

SEQ ID NO: 423709 - RNA, 18 nt, Human
ccacccagggaaaagccc

SEQ ID NO: 423710 - RNA, 25 nt, Human
ccacccgcggagagaagccccgccc

SEQ ID NO: 423711 - RNA, 20 nt, Human
ccagccaccagagaggagac

SEQ ID NO: 423712 - RNA, 20 nt, Human
ccaggaagggggccggccca

SEQ ID NO: 423713 - RNA, 21 nt, Human
cccacccagagccacagcccc

SEQ ID NO: 423714 - RNA, 19 nt, Human
cccacccagagccacgccc

SEQ ID NO: 423715 - RNA, 19 nt, Human
cccagcucgacgcaggggu

SEQ ID NO: 423716 - RNA, 19 nt, Human
ccccaaaccucccgaacgc

SEQ ID NO: 423717 - RNA, 22 nt, Human
ccccaggcugaggaaggggugg

SEQ ID NO: 423718 - RNA, 19 nt, Human
ccccgcccacccagagcca

SEQ ID NO: 423719 - RNA, 19 nt, Human
ccccuccccauccuggagc

SEQ ID NO: 423720 - RNA, 22 nt, Human
cccgcccaaucuguagccccgc

SEQ ID NO: 423721 - RNA, 19 nt, Human
cccgccccguccaggggga

SEQ ID NO: 423722 - RNA, 18 nt, Human
ccucaggcagggcccgcc

SEQ ID NO: 423723 - RNA, 19 nt, Human
ccugccuucagguaggagu

SEQ ID NO: 423724 - RNA, 18 nt, Human
cgagggcagggaggaggg

SEQ ID NO: 423725 - RNA, 23 nt, Human
cgcccccagggaggaguacugcc

SEQ ID NO: 423726 - RNA, 21 nt, Human
cucauccaccauaaaacccca

SEQ ID NO: 423727 - RNA, 28 nt, Human
cugcccccagguaggagccccacccccu

SEQ ID NO: 423728 - RNA, 19 nt, Human
cugggcagcugcaaagaag

SEQ ID NO: 423729 - RNA, 19 nt, Human
gacccgacucgcuucaugg

SEQ ID NO: 423730 - RNA, 26 nt, Human
gagaagccccgcccaaucuguagccc

SEQ ID NO: 423731 - RNA, 18 nt, Human
gagaagcucugccccauc

SEQ ID NO: 423732 - RNA, 20 nt, Human
gagcagagcagagacgggcg

SEQ ID NO: 423733 - RNA, 20 nt, Human
gagccccgccuccuucagga

SEQ ID NO: 423734 - RNA, 26 nt, Human
gagccccuccccauccuggggcacuc

SEQ ID NO: 423735 - RNA, 18 nt, Human
gagcgugagcgccggggg

SEQ ID NO: 423736 - RNA, 18 nt, Human
gaggaaagggagggacgg

SEQ ID NO: 423737 - RNA, 21 nt, Human
gcagagccccuccccauccug

SEQ ID NO: 423738 - RNA, 19 nt, Human
gcagaggauggcggugugc

SEQ ID NO: 423739 - RNA, 21 nt, Human
gccaggaagggggccggccca

SEQ ID NO: 423740 - RNA, 25 nt, Human
gccccgagagcgugagcgccggggg

SEQ ID NO: 423741 - RNA, 21 nt, Human
gccgcgcgagagggcgcggag

SEQ ID NO: 423742 - RNA, 21 nt, Human
gcggagagaagccccgcccca

SEQ ID NO: 423743 - RNA, 22 nt, Human
gcggaugagucaggaggggccg

SEQ ID NO: 423744 - RNA, 20 nt, Human
ggaaaagcccacccucaggg

SEQ ID NO: 423745 - RNA, 26 nt, Human
ggagaagccaacgcagagccccuccc

SEQ ID NO: 423746 - RNA, 21 nt, Human
ggaggagccccgccugcaggu

SEQ ID NO: 423747 - RNA, 23 nt, Human
ggauggaaccuuacaggggguug

SEQ ID NO: 423748 - RNA, 19 nt, Human
ggcagaggauggcggugug

SEQ ID NO: 423749 - RNA, 20 nt, Human
ggcagggaggaggggcuggg

SEQ ID NO: 423750 - RNA, 19 nt, Human
gggcagggcgggccucuuu

SEQ ID NO: 423751 - RNA, 24 nt, Human
gggccggguggguucagcggccuc

SEQ ID NO: 423752 - RNA, 23 nt, Human
gggcgggccucuuugggagggcc

SEQ ID NO: 423753 - RNA, 20 nt, Human
gggcggggccuggggcgcag

SEQ ID NO: 423754 - RNA, 19 nt, Human
ggggaugagguggcuggug

SEQ ID NO: 423755 - RNA, 20 nt, Human
ggggccggcccaucucaggg

SEQ ID NO: 423756 - RNA, 18 nt, Human
gggguugggggcugggag

SEQ ID NO: 423757 - RNA, 19 nt, Human
ggguggucaaaccccaggc

SEQ ID NO: 423758 - RNA, 18 nt, Human
ggguugggggcugggagg

SEQ ID NO: 423759 - RNA, 18 nt, Human
gguugggggcugggaggc

SEQ ID NO: 423760 - RNA, 18 nt, Human
gucccuguccucucccag

SEQ ID NO: 423761 - RNA, 19 nt, Human
uaaaaccccacuccuaagg

SEQ ID NO: 423762 - RNA, 18 nt, Human
uagagccccgccuccuuc

SEQ ID NO: 423763 - RNA, 21 nt, Human
uagcuggauggagugcaggug

SEQ ID NO: 423764 - RNA, 19 nt, Human
uaggaguucugcccccagg

SEQ ID NO: 423765 - RNA, 23 nt, Human
uauaacauuaaaaccaaaaacgc

SEQ ID NO: 423766 - RNA, 24 nt, Human
ucagcggccuccccauucauuccc

SEQ ID NO: 423767 - RNA, 21 nt, Human
ucaggcagggcccgccccguc

SEQ ID NO: 423768 - RNA, 24 nt, Human
ucauccaccauaaaaccccacucc

SEQ ID NO: 423769 - RNA, 20 nt, Human
ucauucaggagcagcccagc

SEQ ID NO: 423770 - RNA, 23 nt, Human
uccaggaagaagccucauccacc

SEQ ID NO: 423771 - RNA, 21 nt, Human
ucccagagaagccccacccac

SEQ ID NO: 423772 - RNA, 21 nt, Human
ucccaggacuaagcuuggucu

SEQ ID NO: 423773 - RNA, 26 nt, Human
ucccaggggcacggguuggggacccc

SEQ ID NO: 423774 - RNA, 24 nt, Human
uccuagagccccgccuccuucagg

SEQ ID NO: 423775 - RNA, 21 nt, Human
ucucagggcugugggaccuuc

SEQ ID NO: 423776 - RNA, 19 nt, Human
ugagcgccggggggggccg

SEQ ID NO: 423777 - RNA, 18 nt, Human
ugaggaagggguggcaca

SEQ ID NO: 423778 - RNA, 22 nt, Human
ugaggaagggguggcacaggcg

SEQ ID NO: 423779 - RNA, 25 nt, Human
ugaggcagaggauggcggugugccc

SEQ ID NO: 423780 - RNA, 22 nt, Human
ugagguggcuggugggcugaau

SEQ ID NO: 423781 - RNA, 23 nt, Human
ugcaaagaagggggcgcagcuga

SEQ ID NO: 423782 - RNA, 19 nt, Human
ugccccgcccacccagagc

SEQ ID NO: 423783 - RNA, 20 nt, Human
ugccccgcccacccagagcc

SEQ ID NO: 423784 - RNA, 21 nt, Human
ugccccgcccacccagagcca

SEQ ID NO: 423785 - RNA, 24 nt, Human
ugcccuggucaggagaagcucugc

SEQ ID NO: 423786 - RNA, 20 nt, Human
uggacaggcggaggaaaggg

SEQ ID NO: 423787 - RNA, 19 nt, Human
uggcagaggcugaggggcg

SEQ ID NO: 423788 - RNA, 19 nt, Human
uggcaggaguaccugacgg

SEQ ID NO: 423789 - RNA, 20 nt, Human
ugggcagccuggggggcugg

SEQ ID NO: 423790 - RNA, 26 nt, Human
ugggcagcugcaaagaagggggcgca

SEQ ID NO: 423791 - RNA, 20 nt, Human
uggggggcuggaccucucuu

SEQ ID NO: 423792 - RNA, 20 nt, Human
uggugggcugaauuuccugc

SEQ ID NO: 423793 - RNA, 21 nt, Human
uugaggcagaggauggcggga

SEQ ID NO: 423794 - RNA, 20 nt, Human
uuggagaggggcccucggau

SEQ ID NO: 423795 - RNA, 23 nt, Human
uugggggcugggaggcccuucag

SEQ ID NO: 423796 - RNA, 24 nt, Human
uugggggcugggaggcccuucagg

SEQ ID NO: 423797 - RNA, 19 nt, Human
aggugguugccggcgcagg

SEQ ID NO: 423798 - RNA, 20 nt, Human
cgcccggcccggggcagcgg

SEQ ID NO: 423799 - RNA, 25 nt, Human
cgccgcgggcgcccggcccggggca

SEQ ID NO: 423800 - RNA, 21 nt, Human
cuucccugggccacuaggugg

SEQ ID NO: 423801 - RNA, 18 nt, Human
gcgcagggcuaggcaggc

SEQ ID NO: 423802 - RNA, 18 nt, Human
ggcagcggcugcggccgc

SEQ ID NO: 423803 - RNA, 19 nt, Human
gggcagcggcugcggccgc

SEQ ID NO: 423804 - RNA, 20 nt, Human
gggcgcccggcccggggcag

SEQ ID NO: 423805 - RNA, 26 nt, Human
ggugguugccggcgcagggcuaggca

SEQ ID NO: 423806 - RNA, 18 nt, Human
ucucuugggguagguggu

SEQ ID NO: 423807 - RNA, 19 nt, Human
uucccugggccacuaggug

SEQ ID NO: 423808 - RNA, 20 nt, Human
aaaaaaaaaaaaaaaagcua

SEQ ID NO: 423809 - RNA, 19 nt, Human
aaaaaaaaaagcuaucuau

SEQ ID NO: 423810 - RNA, 20 nt, Human
aaaacauagaaaacuacugc

SEQ ID NO: 423811 - RNA, 18 nt, Human
aaacaaaaaaucuagugu

SEQ ID NO: 423812 - RNA, 18 nt, Human
aaacauagaaaacuacug

SEQ ID NO: 423813 - RNA, 22 nt, Human
aaagaagucuuguauuaccuuu

SEQ ID NO: 423814 - RNA, 18 nt, Human
aaagauguguaucuuucc

SEQ ID NO: 423815 - RNA, 23 nt, Human
aaaggggacccaguggagcugcc

SEQ ID NO: 423816 - RNA, 18 nt, Human
aaaggggugaggcagaaa

SEQ ID NO: 423817 - RNA, 22 nt, Human
aacaaaaaaucuaguguccaga

SEQ ID NO: 423818 - RNA, 23 nt, Human
aacaggaaaaaaaaugguuccgg

SEQ ID NO: 423819 - RNA, 20 nt, Human
aacuggaaccuacccauccc

SEQ ID NO: 423820 - RNA, 22 nt, Human
aagaaaaaaagauaucuucaac

SEQ ID NO: 423821 - RNA, 19 nt, Human
aagcucaagacucaaaaaa

SEQ ID NO: 423822 - RNA, 26 nt, Human
agaaaaaaagauaucuucaacccaac

SEQ ID NO: 423823 - RNA, 24 nt, Human
agaaaagagaaacauugcugaugc

SEQ ID NO: 423824 - RNA, 20 nt, Human
agaaagcaagcuagcagccc

SEQ ID NO: 423825 - RNA, 25 nt, Human
agaaagcaagcuagcagcccugcug

SEQ ID NO: 423826 - RNA, 18 nt, Human
agaauaugacggucuguc

SEQ ID NO: 423827 - RNA, 22 nt, Human
agagccacaguuggcugaggug

SEQ ID NO: 423828 - RNA, 26 nt, Human
aggaugggggcaggacgcgggaggga

SEQ ID NO: 423829 - RNA, 26 nt, Human
aggcagaaaagaaaaaaaggggaccc

SEQ ID NO: 423830 - RNA, 22 nt, Human
aggcgggguggccagcgcgggg

SEQ ID NO: 423831 - RNA, 25 nt, Human
aggcgggguggccagcgcggggggu

SEQ ID NO: 423832 - RNA, 19 nt, Human
auauguauauauauauaua

SEQ ID NO: 423833 - RNA, 20 nt, Human
auauguauauauauauauau

SEQ ID NO: 423834 - RNA, 20 nt, Human
aucacaucacaacacggagg

SEQ ID NO: 423835 - RNA, 23 nt, Human
auggccuguuuggaaagaggugu

SEQ ID NO: 423836 - RNA, 18 nt, Human
auguauauauauauauau

SEQ ID NO: 423837 - RNA, 18 nt, Human
auguauauauauauauau

SEQ ID NO: 423838 - RNA, 20 nt, Human
auguauauauauauauauga

SEQ ID NO: 423839 - RNA, 20 nt, Human
caaaaaccagaaucacugua

SEQ ID NO: 423840 - RNA, 24 nt, Human
caaaggggacccaguggagcugcc

SEQ ID NO: 423841 - RNA, 22 nt, Human
caaccucaccaggaaaucugau

SEQ ID NO: 423842 - RNA, 20 nt, Human
caaccugggccgagcaacaa

SEQ ID NO: 423843 - RNA, 18 nt, Human
caacuggacugcagugaa

SEQ ID NO: 423844 - RNA, 21 nt, Human
caagccaaccuccccaaacaa

SEQ ID NO: 423845 - RNA, 21 nt, Human
caaguaaugcccucuccacaa

SEQ ID NO: 423846 - RNA, 21 nt, Human
cacagcccaagcucaagacuc

SEQ ID NO: 423847 - RNA, 18 nt, Human
cagaauaaaggcuagaag

SEQ ID NO: 423848 - RNA, 19 nt, Human
cagcugggaaaugcagcuc

SEQ ID NO: 423849 - RNA, 19 nt, Human
caucacaucacaacacgga

SEQ ID NO: 423850 - RNA, 23 nt, Human
ccaaccuccccaaacaaaaaauc

SEQ ID NO: 423851 - RNA, 23 nt, Human
ccacccuccguccucuccccaac

SEQ ID NO: 423852 - RNA, 25 nt, Human
ccacccuccguccucuccccaaccu

SEQ ID NO: 423853 - RNA, 21 nt, Human
ccagcaucacaucacaacacg

SEQ ID NO: 423854 - RNA, 18 nt, Human
cccacgcaaccucaccag

SEQ ID NO: 423855 - RNA, 26 nt, Human
cccccuucauucuauacuauccaaaa

SEQ ID NO: 423856 - RNA, 20 nt, Human
cccgcacccccugaccccuc

SEQ ID NO: 423857 - RNA, 22 nt, Human
cccugcugcccaaauuucauga

SEQ ID NO: 423858 - RNA, 21 nt, Human
ccugaccccucucuaguuggu

SEQ ID NO: 423859 - RNA, 22 nt, Human
ccuggugccaggcgcugccucc

SEQ ID NO: 423860 - RNA, 18 nt, Human
cgaacaaguaaugcccuc

SEQ ID NO: 423861 - RNA, 22 nt, Human
cgagaggagcacgggaggcgag

SEQ ID NO: 423862 - RNA, 23 nt, Human
cgggggguggaggaugggggcag

SEQ ID NO: 423863 - RNA, 19 nt, Human
cguuuggaaacguggccag

SEQ ID NO: 423864 - RNA, 20 nt, Human
cuaaaaaccaaaaaccagaa

SEQ ID NO: 423865 - RNA, 23 nt, Human
cuaaaaaccaaaaaccagaauca

SEQ ID NO: 423866 - RNA, 21 nt, Human
cucuagacagagagauaaccc

SEQ ID NO: 423867 - RNA, 22 nt, Human
cugcaacaccucugugaauucc

SEQ ID NO: 423868 - RNA, 21 nt, Human
cugccgccagaggcugccaag

SEQ ID NO: 423869 - RNA, 29 nt, Human
cugucugcaaauggaauauuugaggggaa

SEQ ID NO: 423870 - RNA, 22 nt, Human
cuucaacccaacacgcauuuca

SEQ ID NO: 423871 - RNA, 19 nt, Human
cuugggcugagaaaccugu

SEQ ID NO: 423872 - RNA, 18 nt, Human
gaaaugcagcuccgaauu

SEQ ID NO: 423873 - RNA, 20 nt, Human
gaauaucauuaugcaauaaa

SEQ ID NO: 423874 - RNA, 21 nt, Human
gaauugugaauagauuucuac

SEQ ID NO: 423875 - RNA, 24 nt, Human
gacaaaggggugaggcagaaaaga

SEQ ID NO: 423876 - RNA, 18 nt, Human
gagguguccuuauuaaaa

SEQ ID NO: 423877 - RNA, 20 nt, Human
gauguguaucuuuccaaacu

SEQ ID NO: 423878 - RNA, 19 nt, Human
gcagugcugaauggcacgc

SEQ ID NO: 423879 - RNA, 20 nt, Human
gcagugcugaauggcacgcc

SEQ ID NO: 423880 - RNA, 22 nt, Human
gccaggcgcugccuccuuccug

SEQ ID NO: 423881 - RNA, 22 nt, Human
gcgcgcugccgccagaggcugc

SEQ ID NO: 423882 - RNA, 20 nt, Human
gcgggagggaagggcagggg

SEQ ID NO: 423883 - RNA, 23 nt, Human
gcugccaaggaggcgggguggcc

SEQ ID NO: 423884 - RNA, 23 nt, Human
ggacaacaaugcucuagacagag

SEQ ID NO: 423885 - RNA, 19 nt, Human
ggagcacgggaggcgagug

SEQ ID NO: 423886 - RNA, 18 nt, Human
ggagcggggcugagugcu

SEQ ID NO: 423887 - RNA, 20 nt, Human
ggauaucauuaugcaauaaa

SEQ ID NO: 423888 - RNA, 18 nt, Human
ggcaggggguggggggcg

SEQ ID NO: 423889 - RNA, 21 nt, Human
ggccgagcaacaaguggagcc

SEQ ID NO: 423890 - RNA, 27 nt, Human
gggagggaagggcaggggguggggggc

SEQ ID NO: 423891 - RNA, 19 nt, Human
ggggaagagcagcccggau

SEQ ID NO: 423892 - RNA, 20 nt, Human
ggggaagagcagcccggauu

SEQ ID NO: 423893 - RNA, 21 nt, Human
ggggguggaggaugggggcag

SEQ ID NO: 423894 - RNA, 20 nt, Human
gggguggccagcgcgggggg

SEQ ID NO: 423895 - RNA, 27 nt, Human
gguaacaggaaaaaaaaagggagggcc

SEQ ID NO: 423896 - RNA, 23 nt, Human
ggugauaugaaagcccaaccucc

SEQ ID NO: 423897 - RNA, 20 nt, Human
guauauauauauauauguua

SEQ ID NO: 423898 - RNA, 21 nt, Human
guauuaccuuuucaaagaucc

SEQ ID NO: 423899 - RNA, 23 nt, Human
gugaaggacaacaaugcucuaga

SEQ ID NO: 423900 - RNA, 23 nt, Human
guggagcgcgcugccgccagagg

SEQ ID NO: 423901 - RNA, 22 nt, Human
guggggaaagccacuuccagau

SEQ ID NO: 423902 - RNA, 30 nt, Human
guguccuuauuaaaaaaaaaaaaaaaaaaa

SEQ ID NO: 423903 - RNA, 21 nt, Human
uaaaaaauauuucuaaaaacc

SEQ ID NO: 423904 - RNA, 22 nt, Human
uaaaaguacagaauaaaggcua

SEQ ID NO: 423905 - RNA, 21 nt, Human
uaaacaugagucacuaaaaag

SEQ ID NO: 423906 - RNA, 22 nt, Human
uaacaggaaaaaaaaugguucc

SEQ ID NO: 423907 - RNA, 19 nt, Human
uaaguuaggguauguguua

SEQ ID NO: 423908 - RNA, 21 nt, Human
uaauuucuggggacuuuccuc

SEQ ID NO: 423909 - RNA, 19 nt, Human
uacaaaucacgcaagacag

SEQ ID NO: 423910 - RNA, 20 nt, Human
uacaaguuaaaccaggggag

SEQ ID NO: 423911 - RNA, 23 nt, Human
uagaaaacuacugcuccucaaaa

SEQ ID NO: 423912 - RNA, 20 nt, Human
uauauauauguauauauaua

SEQ ID NO: 423913 - RNA, 23 nt, Human
uauauauauguauauauauauau

SEQ ID NO: 423914 - RNA, 18 nt, Human
uauauauguauauauaua

SEQ ID NO: 423915 - RNA, 18 nt, Human
uauauguauauauauaua

SEQ ID NO: 423916 - RNA, 18 nt, Human
uauguauauauauauaua

SEQ ID NO: 423917 - RNA, 19 nt, Human
uauguauauauauauauau

SEQ ID NO: 423918 - RNA, 27 nt, Human
uauguauauauauauauauguuaugua

SEQ ID NO: 423919 - RNA, 20 nt, Human
ucacaauucacugcaacuga

SEQ ID NO: 423920 - RNA, 22 nt, Human
ucaggguaugaucacagcgggg

SEQ ID NO: 423921 - RNA, 23 nt, Human
uccaaaagaagucuuguauuacc

SEQ ID NO: 423922 - RNA, 24 nt, Human
uccaugggcgagaggagcacggga

SEQ ID NO: 423923 - RNA, 19 nt, Human
ucccacccccauuauugcc

SEQ ID NO: 423924 - RNA, 18 nt, Human
ucccgcacccccugaccc

SEQ ID NO: 423925 - RNA, 19 nt, Human
ucccuaagaaaauacagga

SEQ ID NO: 423926 - RNA, 18 nt, Human
uccugggagcggggcuga

SEQ ID NO: 423927 - RNA, 20 nt, Human
ucgcucgagucccgcacccc

SEQ ID NO: 423928 - RNA, 20 nt, Human
ucgugguucccacccccauu

SEQ ID NO: 423929 - RNA, 21 nt, Human
ucuaccacccucuuucaacug

SEQ ID NO: 423930 - RNA, 20 nt, Human
ucucuuaaguuuacuguuga

SEQ ID NO: 423931 - RNA, 22 nt, Human
ucuucaacccaacacgcauuuc

SEQ ID NO: 423932 - RNA, 19 nt, Human
ugaaagcccaaccuccuaa

SEQ ID NO: 423933 - RNA, 24 nt, Human
ugacggucugucugcaaauggaau

SEQ ID NO: 423934 - RNA, 24 nt, Human
ugaguggauaaucuaaacacagga

SEQ ID NO: 423935 - RNA, 20 nt, Human
ugauacgcugcaacaccucu

SEQ ID NO: 423936 - RNA, 24 nt, Human
ugauggcaagauauaggcaguuuc

SEQ ID NO: 423937 - RNA, 22 nt, Human
ugauggccuguuuggaaagagg

SEQ ID NO: 423938 - RNA, 19 nt, Human
ugauugacugcgcuucucc

SEQ ID NO: 423939 - RNA, 21 nt, Human
ugcaacaccucugugaauucc

SEQ ID NO: 423940 - RNA, 22 nt, Human
ugcaauucuuggggaaaaauaa

SEQ ID NO: 423941 - RNA, 22 nt, Human
uggcaagauauaggcaguuucu

SEQ ID NO: 423942 - RNA, 22 nt, Human
uggcugaggugauaugaaagcc

SEQ ID NO: 423943 - RNA, 22 nt, Human
ugggaaaugcagcuccgaauua

SEQ ID NO: 423944 - RNA, 18 nt, Human
ugggagcggggcugagug

SEQ ID NO: 423945 - RNA, 18 nt, Human
uggggaaaaauaaaaaau

SEQ ID NO: 423946 - RNA, 24 nt, Human
uguaaaucuaaaucacuggcugca

SEQ ID NO: 423947 - RNA, 24 nt, Human
uguagugggcugaauauuccuuag

SEQ ID NO: 423948 - RNA, 18 nt, Human
uguauauauauauauaug

SEQ ID NO: 423949 - RNA, 23 nt, Human
ugucuauaacgaacaaguaaugc

SEQ ID NO: 423950 - RNA, 20 nt, Human
uuaaaaaaaaaaaaaaaaaa

SEQ ID NO: 423951 - RNA, 19 nt, Human
uuaauccacccacgcaacc

SEQ ID NO: 423952 - RNA, 21 nt, Human
uuaccuuguugcuugggcuga

SEQ ID NO: 423953 - RNA, 25 nt, Human
uuagcaaauaaaaaaaguacuucau

SEQ ID NO: 423954 - RNA, 19 nt, Human
uucaagccaaccuccccaa

SEQ ID NO: 423955 - RNA, 21 nt, Human
uucauaaacaugagucacuaa

SEQ ID NO: 423956 - RNA, 25 nt, Human
uucgcugggauccugugcgcggggc

SEQ ID NO: 423957 - RNA, 23 nt, Human
uugacugcgcuucuccuccguga

SEQ ID NO: 423958 - RNA, 19 nt, Human
uugcuucgucgugcucagg

SEQ ID NO: 423959 - RNA, 21 nt, Human
uuucaacuggaaccuacccau

SEQ ID NO: 423960 - RNA, 23 nt, Human
uuuccaaauuaauccacccacgc

SEQ ID NO: 423961 - RNA, 23 nt, Human
uuucuggggacuuuccucccugc

SEQ ID NO: 423962 - RNA, 25 nt, Human
uuuguuuuguuuucccaagaccuuu

SEQ ID NO: 423963 - RNA, 18 nt, Human
uuuguuuuguuuuguuuu

SEQ ID NO: 423964 - RNA, 24 nt, Human
uuuugcuuucaagaucuuuugcuc

SEQ ID NO: 423965 - RNA, 18 nt, Human
uuuuggucauagaagcug

SEQ ID NO: 423966 - RNA, 19 nt, Human
uuuuuuuuuuacaaguaac

SEQ ID NO: 423967 - RNA, 23 nt, Human
aaaaagcccugucucccacccac

SEQ ID NO: 423968 - RNA, 26 nt, Human
aaaaagcccugucucccacccaccaa

SEQ ID NO: 423969 - RNA, 20 nt, Human
aagaggagagaaccagcaaa

SEQ ID NO: 423970 - RNA, 24 nt, Human
acaaagacucuagacuuccagaca

SEQ ID NO: 423971 - RNA, 20 nt, Human
acgccgggcccgccagccug

SEQ ID NO: 423972 - RNA, 21 nt, Human
acgccgggcccgccagccuga

SEQ ID NO: 423973 - RNA, 21 nt, Human
agacaucgagguugaagcuga

SEQ ID NO: 423974 - RNA, 23 nt, Human
agagaaaaagcccugucucccac

SEQ ID NO: 423975 - RNA, 19 nt, Human
agagaaaccguacaccugg

SEQ ID NO: 423976 - RNA, 21 nt, Human
agcccaggcgcaaacauucag

SEQ ID NO: 423977 - RNA, 21 nt, Human
agccuggucaugcacccuggc

SEQ ID NO: 423978 - RNA, 21 nt, Human
agcgucucuuaaauaagcucu

SEQ ID NO: 423979 - RNA, 25 nt, Human
aggaucacaggcaguccucuaacca

SEQ ID NO: 423980 - RNA, 18 nt, Human
aggcagagugcagggggg

SEQ ID NO: 423981 - RNA, 19 nt, Human
aggcagagugcaggggggc

SEQ ID NO: 423982 - RNA, 20 nt, Human
aggcagagugcaggggggcc

SEQ ID NO: 423983 - RNA, 21 nt, Human
agggaaggagccguuccuggu

SEQ ID NO: 423984 - RNA, 26 nt, Human
auccaaccacaaccucccuccuccag

SEQ ID NO: 423985 - RNA, 23 nt, Human
caacaaagacucuagacuuccag

SEQ ID NO: 423986 - RNA, 18 nt, Human
caagaggagagaaccagc

SEQ ID NO: 423987 - RNA, 21 nt, Human
caagaggagagaaccagcaaa

SEQ ID NO: 423988 - RNA, 19 nt, Human
cagagaucuccagcgucuc

SEQ ID NO: 423989 - RNA, 21 nt, Human
cagaguaggguucccucuguc

SEQ ID NO: 423990 - RNA, 22 nt, Human
cagcccaggcgcaaacauucag

SEQ ID NO: 423991 - RNA, 19 nt, Human
caguuccuagguucaaacu

SEQ ID NO: 423992 - RNA, 19 nt, Human
ccagccugacccguugcag

SEQ ID NO: 423993 - RNA, 23 nt, Human
ccagcgucucuuaaauaagcucu

SEQ ID NO: 423994 - RNA, 18 nt, Human
cccaucuacauucuggac

SEQ ID NO: 423995 - RNA, 25 nt, Human
ccccagugcccugggacugacaguu

SEQ ID NO: 423996 - RNA, 25 nt, Human
ccccagugcccugggacugacaguu

SEQ ID NO: 423997 - RNA, 24 nt, Human
ccccuuuccucuucagguaggagc

SEQ ID NO: 423998 - RNA, 23 nt, Human
ccgccagccugacccguugcagc

SEQ ID NO: 423999 - RNA, 23 nt, Human
ccuucugcuucaaaaauuagcag

SEQ ID NO: 424000 - RNA, 20 nt, Human
cucucugguccugcaguucc

SEQ ID NO: 424001 - RNA, 21 nt, Human
cugaagcugucaaccuucugc

SEQ ID NO: 424002 - RNA, 23 nt, Human
cugaagcugucaaccuucugcuu

SEQ ID NO: 424003 - RNA, 20 nt, Human
cuguaaacugcagaugccgc

SEQ ID NO: 424004 - RNA, 23 nt, Human
cuucucgcucucuugagaucuua

SEQ ID NO: 424005 - RNA, 23 nt, Human
gacaguaaauauuuccaaguccc

SEQ ID NO: 424006 - RNA, 22 nt, Human
gagaaaaagcccugucucccac

SEQ ID NO: 424007 - RNA, 22 nt, Human
gagaaccagcaaaguccacucc

SEQ ID NO: 424008 - RNA, 21 nt, Human
gcccugggacugacaguuucc

SEQ ID NO: 424009 - RNA, 21 nt, Human
gcccugggacugacaguuucc

SEQ ID NO: 424010 - RNA, 20 nt, Human
gccgggagcaggcccuccgg

SEQ ID NO: 424011 - RNA, 20 nt, Human
ggagcuagugaaccguggag

SEQ ID NO: 424012 - RNA, 18 nt, Human
gggaaggagccguuccug

SEQ ID NO: 424013 - RNA, 21 nt, Human
gggcagagaugaugagcacgc

SEQ ID NO: 424014 - RNA, 19 nt, Human
gggcauuuaaugucagaga

SEQ ID NO: 424015 - RNA, 21 nt, Human
gggccagagaugaccuuggac

SEQ ID NO: 424016 - RNA, 25 nt, Human
gggggccgggagcaggcccuccggg

SEQ ID NO: 424017 - RNA, 19 nt, Human
guggaggaugaagaauucu

SEQ ID NO: 424018 - RNA, 24 nt, Human
guugcagcguccugugguuuguga

SEQ ID NO: 424019 - RNA, 22 nt, Human
uaaacugcagaugccgcacaaa

SEQ ID NO: 424020 - RNA, 19 nt, Human
uaagagagcaccaggccuc

SEQ ID NO: 424021 - RNA, 20 nt, Human
uaagagagcaccaggccucu

SEQ ID NO: 424022 - RNA, 21 nt, Human
uacauccugagaguccucgcc

SEQ ID NO: 424023 - RNA, 23 nt, Human
uaggagcuagugaaccguggagg

SEQ ID NO: 424024 - RNA, 24 nt, Human
uaguggccaggaucacaggcaguc

SEQ ID NO: 424025 - RNA, 23 nt, Human
uauauagauuuauauaauauaga

SEQ ID NO: 424026 - RNA, 19 nt, Human
uccauuuucaucuuuccau

SEQ ID NO: 424027 - RNA, 20 nt, Human
uccccagugcccugggacug

SEQ ID NO: 424028 - RNA, 20 nt, Human
uccccagugcccugggacug

SEQ ID NO: 424029 - RNA, 25 nt, Human
ucgagguugaagcugaguucccgcc

SEQ ID NO: 424030 - RNA, 21 nt, Human
ucuggacaagacccugaagac

SEQ ID NO: 424031 - RNA, 23 nt, Human
ugaagacaucgagguugaagcug

SEQ ID NO: 424032 - RNA, 24 nt, Human
ugaagacaucgagguugaagcuga

SEQ ID NO: 424033 - RNA, 18 nt, Human
ugacagcagcagcucaag

SEQ ID NO: 424034 - RNA, 18 nt, Human
ugaggcagagugcagggg

SEQ ID NO: 424035 - RNA, 19 nt, Human
ugaggcagagugcaggggg

SEQ ID NO: 424036 - RNA, 21 nt, Human
ugaggcagagugcaggggggc

SEQ ID NO: 424037 - RNA, 23 nt, Human
ugaugagcacgccgggcccgcca

SEQ ID NO: 424038 - RNA, 20 nt, Human
ugcacccuggcuucugcagc

SEQ ID NO: 424039 - RNA, 22 nt, Human
ugcagcguccugugguuuguga

SEQ ID NO: 424040 - RNA, 18 nt, Human
ugccgcacaagugcacgu

SEQ ID NO: 424041 - RNA, 18 nt, Human
uggacaagacccugaaga

SEQ ID NO: 424042 - RNA, 18 nt, Human
uggcccccuuuccucuuc

SEQ ID NO: 424043 - RNA, 19 nt, Human
uggcuucugcagcccaggc

SEQ ID NO: 424044 - RNA, 18 nt, Human
uggggcagagaugaugag

SEQ ID NO: 424045 - RNA, 19 nt, Human
ugggggccaccguuuccga

SEQ ID NO: 424046 - RNA, 20 nt, Human
ugguuugugaggccucccuc

SEQ ID NO: 424047 - RNA, 19 nt, Human
uguaaacugcagaugccgc

SEQ ID NO: 424048 - RNA, 22 nt, Human
ugugguuugugaggccucccuc

SEQ ID NO: 424049 - RNA, 24 nt, Human
ugugguuugugaggccucccucgg

SEQ ID NO: 424050 - RNA, 24 nt, Human
uucaaaaauuagcaguuuccauuu

SEQ ID NO: 424051 - RNA, 23 nt, Human
uucucgcucucuugagaucuuac

SEQ ID NO: 424052 - RNA, 23 nt, Human
uuuuuuuuuuuuuccaugaaggg

SEQ ID NO: 424053 - RNA, 20 nt, Human
uuuuuuuuuuuuuuuuccau

SEQ ID NO: 424054 - RNA, 24 nt, Human
uuuuuuuuuuuuuuuuuuuccaug

SEQ ID NO: 424055 - RNA, 18 nt, Human
aagucagucuagcggccg

SEQ ID NO: 424056 - RNA, 24 nt, Human
accauccuguggccagcaguucug

SEQ ID NO: 424057 - RNA, 21 nt, Human
agagcggacggggcagccagc

SEQ ID NO: 424058 - RNA, 25 nt, Human
agccagcgccugugucgguccucga

SEQ ID NO: 424059 - RNA, 24 nt, Human
agcgccuuuucggggccgucuggc

SEQ ID NO: 424060 - RNA, 18 nt, Human
aggcggagagcggacggg

SEQ ID NO: 424061 - RNA, 19 nt, Human
agggagggccuguacagug

SEQ ID NO: 424062 - RNA, 23 nt, Human
aguugggcuuuggcagggagagg

SEQ ID NO: 424063 - RNA, 19 nt, Human
caacggcggcggccgggag

SEQ ID NO: 424064 - RNA, 22 nt, Human
caguguccuuuaaacgcucccc

SEQ ID NO: 424065 - RNA, 19 nt, Human
cauccuguggccagcaguu

SEQ ID NO: 424066 - RNA, 20 nt, Human
ccacaggugcgagccaccgc

SEQ ID NO: 424067 - RNA, 19 nt, Human
ccagagcccugggaguugg

SEQ ID NO: 424068 - RNA, 23 nt, Human
cccugggccuucgugggugggcg

SEQ ID NO: 424069 - RNA, 18 nt, Human
ccuagaggccaaggggag

SEQ ID NO: 424070 - RNA, 19 nt, Human
ccugaggucccacaggugc

SEQ ID NO: 424071 - RNA, 18 nt, Human
ccugggaguugggcuuug

SEQ ID NO: 424072 - RNA, 23 nt, Human
ccuguggccagcaguucugggga

SEQ ID NO: 424073 - RNA, 18 nt, Human
cggcgcgcgagggcccgg

SEQ ID NO: 424074 - RNA, 18 nt, Human
cuaaccucacccaccauc

SEQ ID NO: 424075 - RNA, 20 nt, Human
gccaaggggagggagggccu

SEQ ID NO: 424076 - RNA, 18 nt, Human
gcggccgggaggcgaggg

SEQ ID NO: 424077 - RNA, 20 nt, Human
ggccaaggggagggagggcc

SEQ ID NO: 424078 - RNA, 20 nt, Human
ggcuuuggcagggagaggcu

SEQ ID NO: 424079 - RNA, 21 nt, Human
gggcuuuggcagggagaggcu

SEQ ID NO: 424080 - RNA, 22 nt, Human
gggugggcagggggcgaggcug

SEQ ID NO: 424081 - RNA, 23 nt, Human
ggucccacaggugcgagccaccg

SEQ ID NO: 424082 - RNA, 22 nt, Human
gucccacaggugcgagccaccg

SEQ ID NO: 424083 - RNA, 19 nt, Human
gugggcagggggcgaggcu

SEQ ID NO: 424084 - RNA, 24 nt, Human
guugggcuuuggcagggagaggcu

SEQ ID NO: 424085 - RNA, 19 nt, Human
ugaccgcccuacggccgcc

SEQ ID NO: 424086 - RNA, 22 nt, Human
ugcccugaggucccacaggugc

SEQ ID NO: 424087 - RNA, 19 nt, Human
ugccggugcccugaggucc

SEQ ID NO: 424088 - RNA, 19 nt, Human
uggcagggagaggcugggc

SEQ ID NO: 424089 - RNA, 21 nt, Human
uggcgcccugggccuucgugg

SEQ ID NO: 424090 - RNA, 20 nt, Human
ugggcuuuggcagggagagg

SEQ ID NO: 424091 - RNA, 24 nt, Human
ugggcuuuggcagggagaggcugg

SEQ ID NO: 424092 - RNA, 21 nt, Human
uuccagagcccugggaguugg

SEQ ID NO: 424093 - RNA, 22 nt, Human
uuccagagcccugggaguuggg

SEQ ID NO: 424094 - RNA, 25 nt, Human
uuuagacuggcuuuuuuccagucuc

SEQ ID NO: 424095 - RNA, 24 nt, Human
uuuccagagcccugggaguugggc

SEQ ID NO: 424096 - RNA, 19 nt, Human
uuuuuuuuuuuuuuuuuug

SEQ ID NO: 424097 - RNA, 25 nt, Human
uuuuuuuuuuuuuuuuuuuuugggg

SEQ ID NO: 424098 - RNA, 18 nt, Human
agccacggagcgggagga

SEQ ID NO: 424099 - RNA, 23 nt, Human
agcccgcagcuuggaaacggucc

SEQ ID NO: 424100 - RNA, 24 nt, Human
agcgggaggguggugugcacacgg

SEQ ID NO: 424101 - RNA, 19 nt, Human
aggagggagggaggagcga

SEQ ID NO: 424102 - RNA, 21 nt, Human
aggagggagggaggagcgagc

SEQ ID NO: 424103 - RNA, 20 nt, Human
agggaggagcgagcgcggcg

SEQ ID NO: 424104 - RNA, 22 nt, Human
agggagggaggagcgagcgcgg

SEQ ID NO: 424105 - RNA, 19 nt, Human
agggguccagaguuccugc

SEQ ID NO: 424106 - RNA, 20 nt, Human
cagaaaagacaagcucagca

SEQ ID NO: 424107 - RNA, 20 nt, Human
cagaaggcuucgcuccagcc

SEQ ID NO: 424108 - RNA, 23 nt, Human
cagcagaaaagacaagcucagca

SEQ ID NO: 424109 - RNA, 21 nt, Human
cagccgcggagggaccugggc

SEQ ID NO: 424110 - RNA, 20 nt, Human
caggaaaaguacccuccuca

SEQ ID NO: 424111 - RNA, 19 nt, Human
cauagcccgcccgggaggc

SEQ ID NO: 424112 - RNA, 23 nt, Human
cccagggguccagaguuccugcu

SEQ ID NO: 424113 - RNA, 19 nt, Human
ccccacggaugccugcagg

SEQ ID NO: 424114 - RNA, 21 nt, Human
ccgcagcuuggaaacggucca

SEQ ID NO: 424115 - RNA, 19 nt, Human
ccuccagcccccgccccuc

SEQ ID NO: 424116 - RNA, 23 nt, Human
ccuccagcccccgccccucccuc

SEQ ID NO: 424117 - RNA, 21 nt, Human
ccugcaggaaacccaggaaaa

SEQ ID NO: 424118 - RNA, 22 nt, Human
cgcccguccgcgcgcuccgcgc

SEQ ID NO: 424119 - RNA, 21 nt, Human
cggcguggggcgacgccgggc

SEQ ID NO: 424120 - RNA, 19 nt, Human
cguccgcgcgcuccgcgcc

SEQ ID NO: 424121 - RNA, 18 nt, Human
cuccagcccccgccccuc

SEQ ID NO: 424122 - RNA, 20 nt, Human
cuccgcgccugagccucgcc

SEQ ID NO: 424123 - RNA, 18 nt, Human
cugcugccuccagccccc

SEQ ID NO: 424124 - RNA, 18 nt, Human
gaaaagacaagcucagca

SEQ ID NO: 424125 - RNA, 22 nt, Human
gaaaaguacccuccucagcaga

SEQ ID NO: 424126 - RNA, 21 nt, Human
gagauuuuuuuucccccacgg

SEQ ID NO: 424127 - RNA, 19 nt, Human
gaggagcgagcgcggcgug

SEQ ID NO: 424128 - RNA, 20 nt, Human
gccuccagcccccgccccuc

SEQ ID NO: 424129 - RNA, 22 nt, Human
gcgccugagccucgccaggagc

SEQ ID NO: 424130 - RNA, 23 nt, Human
gcgggaggguggugugcacacgg

SEQ ID NO: 424131 - RNA, 19 nt, Human
gcugugaugaggcccaggg

SEQ ID NO: 424132 - RNA, 22 nt, Human
ggaagaauucuuuuuaauuaaa

SEQ ID NO: 424133 - RNA, 19 nt, Human
ggaggagggagggaggagc

SEQ ID NO: 424134 - RNA, 21 nt, Human
ggcccagggguccagaguucc

SEQ ID NO: 424135 - RNA, 18 nt, Human
gggaggagggagggagga

SEQ ID NO: 424136 - RNA, 20 nt, Human
gggaggagggagggaggagc

SEQ ID NO: 424137 - RNA, 23 nt, Human
ggggagugcgggggcgcugcugc

SEQ ID NO: 424138 - RNA, 19 nt, Human
gggguccagaguuccugcu

SEQ ID NO: 424139 - RNA, 22 nt, Human
uccagaguuccugcugcagaag

SEQ ID NO: 424140 - RNA, 20 nt, Human
uccccggggccgucugucgg

SEQ ID NO: 424141 - RNA, 22 nt, Human
ucgccaggagcacgggagccac

SEQ ID NO: 424142 - RNA, 20 nt, Human
ugaggcccagggguccagaa

SEQ ID NO: 424143 - RNA, 24 nt, Human
ugccagggagcccgcagcuuggaa

SEQ ID NO: 424144 - RNA, 19 nt, Human
ugggcugugucugggggag

SEQ ID NO: 424145 - RNA, 22 nt, Human
ugggcugugucugggggagggu

SEQ ID NO: 424146 - RNA, 22 nt, Human
ugggggaggguggagcagcauu

SEQ ID NO: 424147 - RNA, 20 nt, Human
ugugaugaggcccagggguc

SEQ ID NO: 424148 - RNA, 19 nt, Human
uuuuuuuuuuuuuuuuugu

SEQ ID NO: 424149 - RNA, 22 nt, Human
uuuuuuuuuuuuuuuuuugugg

SEQ ID NO: 424150 - RNA, 23 nt, Human
aaacaggcuggaaaguggcaagc

SEQ ID NO: 424151 - RNA, 20 nt, Human
aaccagugggaaaaggaggg

SEQ ID NO: 424152 - RNA, 21 nt, Human
aaccagugggaaaaggagggg

SEQ ID NO: 424153 - RNA, 23 nt, Human
aagaagagguaaaguugguugcu

SEQ ID NO: 424154 - RNA, 21 nt, Human
aagccaagaaccagugggaaa

SEQ ID NO: 424155 - RNA, 21 nt, Human
aagcuuuggagaaauugcagu

SEQ ID NO: 424156 - RNA, 25 nt, Human
accccaaagacaugcuuuuccgggg

SEQ ID NO: 424157 - RNA, 19 nt, Human
agagcucccucuuccaucu

SEQ ID NO: 424158 - RNA, 21 nt, Human
aggagaagggagaaguuaccu

SEQ ID NO: 424159 - RNA, 18 nt, Human
aggaggaaguaggucagg

SEQ ID NO: 424160 - RNA, 22 nt, Human
aggaggaaguaggucaggagaa

SEQ ID NO: 424161 - RNA, 19 nt, Human
aguaggucaggagaaggga

SEQ ID NO: 424162 - RNA, 18 nt, Human
agucauugccccacuagu

SEQ ID NO: 424163 - RNA, 20 nt, Human
aucuggagucccucggguua

SEQ ID NO: 424164 - RNA, 20 nt, Human
caagauuccuggggaaucug

SEQ ID NO: 424165 - RNA, 22 nt, Human
cagagcucccucuuccaucuuc

SEQ ID NO: 424166 - RNA, 19 nt, Human
cagcuagagaaaauuccaa

SEQ ID NO: 424167 - RNA, 18 nt, Human
cggggccaguuuccucag

SEQ ID NO: 424168 - RNA, 21 nt, Human
cucccucuuccaucuucaacc

SEQ ID NO: 424169 - RNA, 18 nt, Human
cucuaggaaccaacccca

SEQ ID NO: 424170 - RNA, 21 nt, Human
cugugcagaagagaggugcag

SEQ ID NO: 424171 - RNA, 21 nt, Human
gaaaggaaagggagaagagga

SEQ ID NO: 424172 - RNA, 18 nt, Human
gaaccaaccccaaagaca

SEQ ID NO: 424173 - RNA, 21 nt, Human
gaggggaggaggaacaccugu

SEQ ID NO: 424174 - RNA, 22 nt, Human
ggaaaggaaagggagaagagga

SEQ ID NO: 424175 - RNA, 19 nt, Human
ggaggaacaccuguucucc

SEQ ID NO: 424176 - RNA, 26 nt, Human
ggaggaacaccuguucuccuaaucca

SEQ ID NO: 424177 - RNA, 22 nt, Human
uaaaggaagccaagaaccagug

SEQ ID NO: 424178 - RNA, 22 nt, Human
uaacagcuagagaaaauuccaa

SEQ ID NO: 424179 - RNA, 21 nt, Human
uaggaaccaaccccaaagaca

SEQ ID NO: 424180 - RNA, 20 nt, Human
ucucucccucucaggauccc

SEQ ID NO: 424181 - RNA, 21 nt, Human
uggaaaguggcaagcuuugga

SEQ ID NO: 424182 - RNA, 27 nt, Human
uggaaaguggcaagcuuugguuccaua

SEQ ID NO: 424183 - RNA, 18 nt, Human
uggaguaacagcuagaga

SEQ ID NO: 424184 - RNA, 18 nt, Human
uggcucagaggaacaaag

SEQ ID NO: 424185 - RNA, 19 nt, Human
uggcugcgaggauucagac

SEQ ID NO: 424186 - RNA, 21 nt, Human
uggggaaucuggcucagcagg

SEQ ID NO: 424187 - RNA, 22 nt, Human
uuccccauucccuagguuccac

SEQ ID NO: 424188 - RNA, 22 nt, Human
aaaaaaaaaaucuaaacuaugc

SEQ ID NO: 424189 - RNA, 21 nt, Human
aaaaaaaucuaaacuaugcac

SEQ ID NO: 424190 - RNA, 18 nt, Human
aaacaguguaaaucagau

SEQ ID NO: 424191 - RNA, 21 nt, Human
aaacaguguaaaucagauuuu

SEQ ID NO: 424192 - RNA, 20 nt, Human
aacaaagggagaaaaagccc

SEQ ID NO: 424193 - RNA, 18 nt, Human
aaugaaaaauuaacagcc

SEQ ID NO: 424194 - RNA, 23 nt, Human
acagccucaaguaaguagauaau

SEQ ID NO: 424195 - RNA, 23 nt, Human
aggaagaggaaauccguuuuuua

SEQ ID NO: 424196 - RNA, 23 nt, Human
agggagaaaaagcccacgcaaug

SEQ ID NO: 424197 - RNA, 23 nt, Human
aguaaguagauaauacuauacaa

SEQ ID NO: 424198 - RNA, 24 nt, Human
auugaaugugauuaaagaagaaau

SEQ ID NO: 424199 - RNA, 25 nt, Human
caaguaaguagauaauacuauacaa

SEQ ID NO: 424200 - RNA, 26 nt, Human
caaguugagcacaaaacaaugcaucc

SEQ ID NO: 424201 - RNA, 19 nt, Human
cauucaaaaugcuuuaaau

SEQ ID NO: 424202 - RNA, 25 nt, Human
ccaagaacaaacauauucaacaaaa

SEQ ID NO: 424203 - RNA, 23 nt, Human
cuccuggcugugcuggguccgcu

SEQ ID NO: 424204 - RNA, 21 nt, Human
uaaaaaacaaaacaguguaaa

SEQ ID NO: 424205 - RNA, 26 nt, Human
uaaaaacagcacuaagucuucaaaga

SEQ ID NO: 424206 - RNA, 21 nt, Human
uaaacuggacuuucuuggcuc

SEQ ID NO: 424207 - RNA, 23 nt, Human
uaagagggcaaaucacaagugac

SEQ ID NO: 424208 - RNA, 24 nt, Human
uaagcuaggaagaggaaauccguu

SEQ ID NO: 424209 - RNA, 20 nt, Human
uaagguuuguuuucuguguu

SEQ ID NO: 424210 - RNA, 22 nt, Human
uaagguuuguuuucuguguucc

SEQ ID NO: 424211 - RNA, 22 nt, Human
uacaaaacacaaguugagcaca

SEQ ID NO: 424212 - RNA, 23 nt, Human
uacaaaacacuguaaugaaaaau

SEQ ID NO: 424213 - RNA, 19 nt, Human
uacgugucauaaacuggac

SEQ ID NO: 424214 - RNA, 20 nt, Human
uacgugucauaaacuggacu

SEQ ID NO: 424215 - RNA, 18 nt, Human
ucaaugacagguguagaa

SEQ ID NO: 424216 - RNA, 20 nt, Human
uccaagaacaaacauauuca

SEQ ID NO: 424217 - RNA, 18 nt, Human
ugacagguguagaaaauc

SEQ ID NO: 424218 - RNA, 22 nt, Human
ugacauuuuaaacaaagggaga

SEQ ID NO: 424219 - RNA, 22 nt, Human
uuaaaaaacaaaacaguguaaa

SEQ ID NO: 424220 - RNA, 18 nt, Human
uucguacagaucgaggac

SEQ ID NO: 424221 - RNA, 19 nt, Human
uucuguguuccauucuaaa

SEQ ID NO: 424222 - RNA, 24 nt, Human
uugaaugugauuaaagaagaaauu

SEQ ID NO: 424223 - RNA, 26 nt, Human
uuuuuagccucgcggcuguauccauc

SEQ ID NO: 424224 - RNA, 24 nt, Human
uuuuuaguagcgguauuaaaauua

SEQ ID NO: 424225 - RNA, 18 nt, Human
uuuuuuuuuuuuuuuuug

SEQ ID NO: 424226 - RNA, 18 nt, Human
uuuuuuuuuuuuuuuuug

SEQ ID NO: 424227 - RNA, 19 nt, Human
aaaacccgagaagauccag

SEQ ID NO: 424228 - RNA, 20 nt, Human
aagaaacauaauuguucugg

SEQ ID NO: 424229 - RNA, 19 nt, Human
aagacccagaaacuacaug

SEQ ID NO: 424230 - RNA, 23 nt, Human
acaaaacaauaucugaaagaaaa

SEQ ID NO: 424231 - RNA, 21 nt, Human
acccccucuuccccucagcag

SEQ ID NO: 424232 - RNA, 20 nt, Human
accuacccgacccgccccuc

SEQ ID NO: 424233 - RNA, 21 nt, Human
accuacccgacccgccccucc

SEQ ID NO: 424234 - RNA, 18 nt, Human
acgcgccgggcuucaguc

SEQ ID NO: 424235 - RNA, 18 nt, Human
agaagacccagaaacuac

SEQ ID NO: 424236 - RNA, 23 nt, Human
agaagacccagaaacuacaugaa

SEQ ID NO: 424237 - RNA, 21 nt, Human
agcccauccagccccgcccag

SEQ ID NO: 424238 - RNA, 21 nt, Human
agccggcgccuccccggcgca

SEQ ID NO: 424239 - RNA, 22 nt, Human
aggcugugccgggggaggcggg

SEQ ID NO: 424240 - RNA, 22 nt, Human
aguguagucucuucgcaggugc

SEQ ID NO: 424241 - RNA, 22 nt, Human
auuuuuuacauguuuuuucccu

SEQ ID NO: 424242 - RNA, 20 nt, Human
caacccucccaccacagccc

SEQ ID NO: 424243 - RNA, 23 nt, Human
caagcagggccugcaacccaggc

SEQ ID NO: 424244 - RNA, 18 nt, Human
cacagcccauccagcccc

SEQ ID NO: 424245 - RNA, 25 nt, Human
caccacaagcagggccugcaaccca

SEQ ID NO: 424246 - RNA, 26 nt, Human
cacccaaaaugcgguuucauuuucac

SEQ ID NO: 424247 - RNA, 24 nt, Human
caccccacgcgccgggcuucaguc

SEQ ID NO: 424248 - RNA, 19 nt, Human
caccccuuuccccgccccc

SEQ ID NO: 424249 - RNA, 19 nt, Human
cagcccauccagccccgcc

SEQ ID NO: 424250 - RNA, 25 nt, Human
cagcgcgccgcggugcgcaugcgug

SEQ ID NO: 424251 - RNA, 23 nt, Human
cauccaggcuagacaccaaauca

SEQ ID NO: 424252 - RNA, 18 nt, Human
ccaccgcccgccccccgc

SEQ ID NO: 424253 - RNA, 19 nt, Human
ccaguccaacaggucuucu

SEQ ID NO: 424254 - RNA, 19 nt, Human
cccagcgcgccgcggugcg

SEQ ID NO: 424255 - RNA, 21 nt, Human
cccagcgcgccgcggugcgca

SEQ ID NO: 424256 - RNA, 20 nt, Human
cccauccagccccgcccagc

SEQ ID NO: 424257 - RNA, 20 nt, Human
cccaucuucccaccugucca

SEQ ID NO: 424258 - RNA, 19 nt, Human
ccccccgccgucgcucucc

SEQ ID NO: 424259 - RNA, 23 nt, Human
ccccccgccgucgcucuccccgc

SEQ ID NO: 424260 - RNA, 22 nt, Human
cccccgccgucgcucuccccgc

SEQ ID NO: 424261 - RNA, 20 nt, Human
cccccggcccggcucgccuu

SEQ ID NO: 424262 - RNA, 20 nt, Human
ccccgccgucgcucuccccg

SEQ ID NO: 424263 - RNA, 18 nt, Human
ccccgccuccccuucccu

SEQ ID NO: 424264 - RNA, 24 nt, Human
ccccggcccggcucgccuuucucg

SEQ ID NO: 424265 - RNA, 22 nt, Human
cccgccgucgcucuccccgccu

SEQ ID NO: 424266 - RNA, 23 nt, Human
cccggcccggcucgccuuucucg

SEQ ID NO: 424267 - RNA, 22 nt, Human
ccgcagcggccgcaggaggggc

SEQ ID NO: 424268 - RNA, 19 nt, Human
ccgccccccgccgucgcuc

SEQ ID NO: 424269 - RNA, 20 nt, Human
ccgccccccgccgucgcucc

SEQ ID NO: 424270 - RNA, 21 nt, Human
ccgcccgccccccgccgucgc

SEQ ID NO: 424271 - RNA, 24 nt, Human
ccgcccgccccccgccgucgcucu

SEQ ID NO: 424272 - RNA, 19 nt, Human
ccgccgucgcucuccccgc

SEQ ID NO: 424273 - RNA, 20 nt, Human
ccgccgucgcucuccccgcc

SEQ ID NO: 424274 - RNA, 23 nt, Human
ccgccgucgcucuccccgccucc

SEQ ID NO: 424275 - RNA, 21 nt, Human
ccggcgcacacaguacacagu

SEQ ID NO: 424276 - RNA, 21 nt, Human
ccuacccgacccgccccucca

SEQ ID NO: 424277 - RNA, 21 nt, Human
ccuccagcgccguccccgccc

SEQ ID NO: 424278 - RNA, 18 nt, Human
ccucccaccacagcccau

SEQ ID NO: 424279 - RNA, 23 nt, Human
ccucccaccacagcccauccagc

SEQ ID NO: 424280 - RNA, 25 nt, Human
ccucuuauaauacagcaagaaacug

SEQ ID NO: 424281 - RNA, 19 nt, Human
ccugcaacccaggcaucca

SEQ ID NO: 424282 - RNA, 22 nt, Human
ccugcaacccaggcauccaggc

SEQ ID NO: 424283 - RNA, 23 nt, Human
ccugcaacccaggcauccaggcu

SEQ ID NO: 424284 - RNA, 21 nt, Human
cgcaggugcggcugggcagcu

SEQ ID NO: 424285 - RNA, 24 nt, Human
cgcugccgaguacaagccggcgcc

SEQ ID NO: 424286 - RNA, 25 nt, Human
cggcccggcucgccuuucucgcggg

SEQ ID NO: 424287 - RNA, 20 nt, Human
cuacccgacccgccccucca

SEQ ID NO: 424288 - RNA, 21 nt, Human
cuagacaccaaaucagcaaac

SEQ ID NO: 424289 - RNA, 22 nt, Human
cucccgcugcaccccacgcgcc

SEQ ID NO: 424290 - RNA, 20 nt, Human
cugagcaccucgggaagugu

SEQ ID NO: 424291 - RNA, 19 nt, Human
cugcaccccacgcgccggg

SEQ ID NO: 424292 - RNA, 19 nt, Human
cuuuccccgcccccggccc

SEQ ID NO: 424293 - RNA, 20 nt, Human
gaaauguccuauuugcagag

SEQ ID NO: 424294 - RNA, 18 nt, Human
gacaccaaaucagcaaac

SEQ ID NO: 424295 - RNA, 21 nt, Human
gcaacccucccaccacagccc

SEQ ID NO: 424296 - RNA, 21 nt, Human
gcccucgcugccgcugagcac

SEQ ID NO: 424297 - RNA, 21 nt, Human
gccgguguccgaagucaggcg

SEQ ID NO: 424298 - RNA, 22 nt, Human
gcugcaacccucccaccacagc

SEQ ID NO: 424299 - RNA, 20 nt, Human
ggaagagcggagacccccuc

SEQ ID NO: 424300 - RNA, 22 nt, Human
ggaauccggagaagugagaaca

SEQ ID NO: 424301 - RNA, 23 nt, Human
ggaggcgggguccaccgcccgcc

SEQ ID NO: 424302 - RNA, 26 nt, Human
ggccgguguccgaagucaggcggcgg

SEQ ID NO: 424303 - RNA, 21 nt, Human
ggugcgcaugcguggaggccc

SEQ ID NO: 424304 - RNA, 22 nt, Human
uaaaauaacuaugcuuucuuac

SEQ ID NO: 424305 - RNA, 23 nt, Human
uaaacagugaacuuuguaauuag

SEQ ID NO: 424306 - RNA, 23 nt, Human
uacaaaacaauaucugaaagaaa

SEQ ID NO: 424307 - RNA, 19 nt, Human
uagugcaauuggucuccau

SEQ ID NO: 424308 - RNA, 22 nt, Human
uaucugaaagaaaacccgagaa

SEQ ID NO: 424309 - RNA, 19 nt, Human
ucagcaggcugugccgggg

SEQ ID NO: 424310 - RNA, 19 nt, Human
uccaguccccucgcacucc

SEQ ID NO: 424311 - RNA, 21 nt, Human
uccccgcccccggcccggcuc

SEQ ID NO: 424312 - RNA, 19 nt, Human
uccccgcccccguuccugc

SEQ ID NO: 424313 - RNA, 23 nt, Human
uccccgccuccccuucccucccc

SEQ ID NO: 424314 - RNA, 21 nt, Human
uccccucgcacucccgcugca

SEQ ID NO: 424315 - RNA, 24 nt, Human
ucuauaucaaaucagagccggggc

SEQ ID NO: 424316 - RNA, 23 nt, Human
ucuucaaaagacaguaaaaacaa

SEQ ID NO: 424317 - RNA, 19 nt, Human
ucuucaauaaacagugaac

SEQ ID NO: 424318 - RNA, 20 nt, Human
ugagaacauucccgccgccc

SEQ ID NO: 424319 - RNA, 23 nt, Human
ugcaacccucccaccacagccca

SEQ ID NO: 424320 - RNA, 21 nt, Human
uguccaguccccucgcacucc

SEQ ID NO: 424321 - RNA, 19 nt, Human
uugcggaaggcugauuuaa

SEQ ID NO: 424322 - RNA, 23 nt, Human
uuuaagaacuucuucaaaagaca

SEQ ID NO: 424323 - RNA, 19 nt, Human
uuugaaauguccuauuugc

SEQ ID NO: 424324 - RNA, 24 nt, Human
aaagugcugggauuacaggcguga

SEQ ID NO: 424325 - RNA, 20 nt, Human
aaccugcaugagcaucccuc

SEQ ID NO: 424326 - RNA, 19 nt, Human
aagugcugggauuacaggc

SEQ ID NO: 424327 - RNA, 19 nt, Human
aagugcugggauuacaggc

SEQ ID NO: 424328 - RNA, 26 nt, Human
aagugcugggauuacaggcgugagcc

SEQ ID NO: 424329 - RNA, 24 nt, Human
aaguggcucggacuacaggugugu

SEQ ID NO: 424330 - RNA, 19 nt, Human
accauacacacacacacac

SEQ ID NO: 424331 - RNA, 24 nt, Human
accucagccucccaaguggcucgg

SEQ ID NO: 424332 - RNA, 24 nt, Human
accuuccauccgugucuuccccau

SEQ ID NO: 424333 - RNA, 18 nt, Human
acuacaggugugugccau

SEQ ID NO: 424334 - RNA, 19 nt, Human
agaacucaguccaugcugc

SEQ ID NO: 424335 - RNA, 21 nt, Human
agaacucaguccaugcugcac

SEQ ID NO: 424336 - RNA, 20 nt, Human
agccccgaguccggcccagc

SEQ ID NO: 424337 - RNA, 20 nt, Human
aggcaaggaaaggauguggg

SEQ ID NO: 424338 - RNA, 24 nt, Human
agggggaguggggaggcggccugg

SEQ ID NO: 424339 - RNA, 23 nt, Human
aggggggccaccugccaccuucu

SEQ ID NO: 424340 - RNA, 24 nt, Human
aggggucuugcuauauugcccagg

SEQ ID NO: 424341 - RNA, 22 nt, Human
agguuccuuuucauuucuugcu

SEQ ID NO: 424342 - RNA, 19 nt, Human
agugcaguggugcaaucag

SEQ ID NO: 424343 - RNA, 24 nt, Human
agugcaguggugcaaucagagguc

SEQ ID NO: 424344 - RNA, 18 nt, Human
agugcugggauuacaggc

SEQ ID NO: 424345 - RNA, 22 nt, Human
auccccgaaaccuguccuacgc

SEQ ID NO: 424346 - RNA, 22 nt, Human
auggugcccaaaugcaguguuu

SEQ ID NO: 424347 - RNA, 24 nt, Human
caaagugcugggauuacaggcgug

SEQ ID NO: 424348 - RNA, 19 nt, Human
caagggagcugagauggug

SEQ ID NO: 424349 - RNA, 19 nt, Human
caccugccaccuucucugg

SEQ ID NO: 424350 - RNA, 21 nt, Human
cagagcucuccuaggggggcc

SEQ ID NO: 424351 - RNA, 23 nt, Human
cagcuucgaacuccugggcucaa

SEQ ID NO: 424352 - RNA, 23 nt, Human
cauccgugucuuccccauggggg

SEQ ID NO: 424353 - RNA, 20 nt, Human
cauguauuuuccuuugcucc

SEQ ID NO: 424354 - RNA, 18 nt, Human
cauucuguuacccagccu

SEQ ID NO: 424355 - RNA, 20 nt, Human
ccaaagugcugggauuacag

SEQ ID NO: 424356 - RNA, 22 nt, Human
ccaaagugcugggauuacaggc

SEQ ID NO: 424357 - RNA, 22 nt, Human
ccaaagugcugggauuacaggc

SEQ ID NO: 424358 - RNA, 22 nt, Human
ccaaagugcugggauuacaggc

SEQ ID NO: 424359 - RNA, 24 nt, Human
ccaaagugcugggauuacaggcgu

SEQ ID NO: 424360 - RNA, 25 nt, Human
ccaccuuccauccgugucuucccca

SEQ ID NO: 424361 - RNA, 23 nt, Human
cccaacaaccauacacacacaca

SEQ ID NO: 424362 - RNA, 24 nt, Human
cccaaguggcucggacuacaggug

SEQ ID NO: 424363 - RNA, 20 nt, Human
cccaccucagccucccaagu

SEQ ID NO: 424364 - RNA, 23 nt, Human
cccaccucagccucccaaguggc

SEQ ID NO: 424365 - RNA, 20 nt, Human
ccccgaguccggcccagccu

SEQ ID NO: 424366 - RNA, 21 nt, Human
ccccggcuggggcugcuugag

SEQ ID NO: 424367 - RNA, 23 nt, Human
ccgauccucccaccucagccucc

SEQ ID NO: 424368 - RNA, 24 nt, Human
ccgcaccuuucgcucagggucccc

SEQ ID NO: 424369 - RNA, 22 nt, Human
ccgcgcggccgcgcugcuccuc

SEQ ID NO: 424370 - RNA, 23 nt, Human
ccucagguaagugacucagccuu

SEQ ID NO: 424371 - RNA, 22 nt, Human
ccugccaccuucucuggggucc

SEQ ID NO: 424372 - RNA, 23 nt, Human
ccugggcucaaccgauccuccca

SEQ ID NO: 424373 - RNA, 25 nt, Human
cgaacuccugggcucaaccgauccu

SEQ ID NO: 424374 - RNA, 22 nt, Human
cgcccaacaaccauacacacac

SEQ ID NO: 424375 - RNA, 19 nt, Human
cggacuacaggugugugcc

SEQ ID NO: 424376 - RNA, 20 nt, Human
cggcaggccgccuccgcacc

SEQ ID NO: 424377 - RNA, 19 nt, Human
cggcuggggcugcuugagg

SEQ ID NO: 424378 - RNA, 18 nt, Human
cgugagccacugugcugg

SEQ ID NO: 424379 - RNA, 24 nt, Human
cucaaccgauccucccaccucagc

SEQ ID NO: 424380 - RNA, 19 nt, Human
cucaggguccccgccccuu

SEQ ID NO: 424381 - RNA, 23 nt, Human
cugcaugagcaucccucuagccu

SEQ ID NO: 424382 - RNA, 18 nt, Human
cugggggugggggccucc

SEQ ID NO: 424383 - RNA, 25 nt, Human
cugggggugggggccuccgaggggu

SEQ ID NO: 424384 - RNA, 19 nt, Human
cuucgaacuccugggcuca

SEQ ID NO: 424385 - RNA, 18 nt, Human
cuuuuuuuuuuuuuuuug

SEQ ID NO: 424386 - RNA, 24 nt, Human
gacuacaggugugugccaucaugc

SEQ ID NO: 424387 - RNA, 18 nt, Human
gauuacaggcgugagcca

SEQ ID NO: 424388 - RNA, 21 nt, Human
gauuacaggcgugagccacug

SEQ ID NO: 424389 - RNA, 24 nt, Human
gauuacaggcgugagccacugugc

SEQ ID NO: 424390 - RNA, 18 nt, Human
gcccaacaaccauacaca

SEQ ID NO: 424391 - RNA, 20 nt, Human
gccccgaguccggcccagcc

SEQ ID NO: 424392 - RNA, 24 nt, Human
gccgccuccgcaccuuucgcuccu

SEQ ID NO: 424393 - RNA, 19 nt, Human
ggacuacaggugugugcca

SEQ ID NO: 424394 - RNA, 24 nt, Human
ggacuacaggugugugccaucaug

SEQ ID NO: 424395 - RNA, 23 nt, Human
ggcaaggaaaggaugugggggag

SEQ ID NO: 424396 - RNA, 21 nt, Human
ggccugggcgucugggggugg

SEQ ID NO: 424397 - RNA, 21 nt, Human
ggcgucugggggugggggccu

SEQ ID NO: 424398 - RNA, 18 nt, Human
ggggaggcggccugggcg

SEQ ID NO: 424399 - RNA, 20 nt, Human
gggggugggggccuccgagg

SEQ ID NO: 424400 - RNA, 22 nt, Human
gggucuugcuauauugcccagg

SEQ ID NO: 424401 - RNA, 24 nt, Human
gucccucgggagccccgaguccgg

SEQ ID NO: 424402 - RNA, 24 nt, Human
gucuugcuauauugcccaggcugg

SEQ ID NO: 424403 - RNA, 23 nt, Human
guggugcaaucagaggucccugc

SEQ ID NO: 424404 - RNA, 21 nt, Human
gugugugccaucaugcccagc

SEQ ID NO: 424405 - RNA, 23 nt, Human
guuggcauaugucacuucugacc

SEQ ID NO: 424406 - RNA, 19 nt, Human
uaagugauccuuccaccuu

SEQ ID NO: 424407 - RNA, 22 nt, Human
uacaggcgugagccacugugcu

SEQ ID NO: 424408 - RNA, 21 nt, Human
uacccagccuggagugcagug

SEQ ID NO: 424409 - RNA, 24 nt, Human
uacccagccuggagugcaguggug

SEQ ID NO: 424410 - RNA, 26 nt, Human
uaggcaaggaaaggaugugggggagg

SEQ ID NO: 424411 - RNA, 18 nt, Human
uaggggggccaccugcca

SEQ ID NO: 424412 - RNA, 18 nt, Human
uagggguccuucaauccu

SEQ ID NO: 424413 - RNA, 23 nt, Human
uauauugcccaggcuggucucaa

SEQ ID NO: 424414 - RNA, 24 nt, Human
uauauugcccaggcuggucucaaa

SEQ ID NO: 424415 - RNA, 25 nt, Human
ucaaccgauccucccaccucagccu

SEQ ID NO: 424416 - RNA, 20 nt, Human
ucaagaacucaguccaugcu

SEQ ID NO: 424417 - RNA, 19 nt, Human
ucagccucccaaguggcuc

SEQ ID NO: 424418 - RNA, 21 nt, Human
ucagccucccaaguggcucgg

SEQ ID NO: 424419 - RNA, 18 nt, Human
ucagccucucugaguccu

SEQ ID NO: 424420 - RNA, 24 nt, Human
ucccaaguggcucggacuacaggu

SEQ ID NO: 424421 - RNA, 22 nt, Human
uccccgcgacggaaaguccccg

SEQ ID NO: 424422 - RNA, 23 nt, Human
ucccucuagccuggcuggcagcc

SEQ ID NO: 424423 - RNA, 22 nt, Human
ucccugcagcuucgaacuccug

SEQ ID NO: 424424 - RNA, 24 nt, Human
ucccugcagcuucgaacuccuggg

SEQ ID NO: 424425 - RNA, 20 nt, Human
uccgugucuuccccaugggg

SEQ ID NO: 424426 - RNA, 23 nt, Human
uccgugucuuccccaugggggcc

SEQ ID NO: 424427 - RNA, 19 nt, Human
uccuacgcccaacaaccau

SEQ ID NO: 424428 - RNA, 27 nt, Human
uccucccaccucagccucccaaguggc

SEQ ID NO: 424429 - RNA, 22 nt, Human
uccugggcucaaccgauccucc

SEQ ID NO: 424430 - RNA, 28 nt, Human
ucuaagugauccuuccaccuuggccugc

SEQ ID NO: 424431 - RNA, 24 nt, Human
ucucauucuguuacccagccugga

SEQ ID NO: 424432 - RNA, 20 nt, Human
ucugccuggcuggguguccu

SEQ ID NO: 424433 - RNA, 24 nt, Human
ucuguuacccagccuggagugcag

SEQ ID NO: 424434 - RNA, 23 nt, Human
ucuugcuauauugcccaggcugg

SEQ ID NO: 424435 - RNA, 24 nt, Human
ucuugcuauauugcccaggcuggu

SEQ ID NO: 424436 - RNA, 22 nt, Human
ucuugcuccaccuuccccuugg

SEQ ID NO: 424437 - RNA, 18 nt, Human
ucuuuuuuuuuuuuuuuu

SEQ ID NO: 424438 - RNA, 22 nt, Human
ugagauaaggucucauucuguu

SEQ ID NO: 424439 - RNA, 21 nt, Human
ugagauggugcccaaaugcag

SEQ ID NO: 424440 - RNA, 23 nt, Human
ugagauggugcccaaaugcagug

SEQ ID NO: 424441 - RNA, 25 nt, Human
ugagauggugcccaaaugcaguguu

SEQ ID NO: 424442 - RNA, 23 nt, Human
ugcagcuucgaacuccugggcuc

SEQ ID NO: 424443 - RNA, 20 nt, Human
ugcccagagcucuccuaggg

SEQ ID NO: 424444 - RNA, 24 nt, Human
ugcccaggcuggucucaaacuccu

SEQ ID NO: 424445 - RNA, 21 nt, Human
ugccuggcuggguguccucag

SEQ ID NO: 424446 - RNA, 24 nt, Human
ugcuauauugcccaggcuggucuc

SEQ ID NO: 424447 - RNA, 27 nt, Human
ugcuauauugcccaggcuggucucaaa

SEQ ID NO: 424448 - RNA, 24 nt, Human
ugcugggauuacaggcgugagcca

SEQ ID NO: 424449 - RNA, 18 nt, Human
uggagugcaguggugcaa

SEQ ID NO: 424450 - RNA, 21 nt, Human
uggagugcaguggugcaauca

SEQ ID NO: 424451 - RNA, 25 nt, Human
uggagugcaguggugcaaucagagg

SEQ ID NO: 424452 - RNA, 19 nt, Human
uggcagcccccagccagac

SEQ ID NO: 424453 - RNA, 18 nt, Human
uggcucggacuacaggug

SEQ ID NO: 424454 - RNA, 18 nt, Human
ugggauuacaggcgugag

SEQ ID NO: 424455 - RNA, 21 nt, Human
ugggauuacaggcgugagcca

SEQ ID NO: 424456 - RNA, 22 nt, Human
ugggauuacaggcgugagccac

SEQ ID NO: 424457 - RNA, 22 nt, Human
ugggauuacaggcgugagccac

SEQ ID NO: 424458 - RNA, 22 nt, Human
ugggauuacaggcgugagccac

SEQ ID NO: 424459 - RNA, 23 nt, Human
ugggauuacaggcgugagccacu

SEQ ID NO: 424460 - RNA, 24 nt, Human
ugggauuacaggcgugagccacug

SEQ ID NO: 424461 - RNA, 20 nt, Human
uggggcugcuugagggggag

SEQ ID NO: 424462 - RNA, 18 nt, Human
ugggggccuccgaggggu

SEQ ID NO: 424463 - RNA, 23 nt, Human
uggguacagcgcccgaggcggca

SEQ ID NO: 424464 - RNA, 18 nt, Human
uggguaugaccaaagcug

SEQ ID NO: 424465 - RNA, 24 nt, Human
uguuuuauuuuuguagugaggggu

SEQ ID NO: 424466 - RNA, 26 nt, Human
uucuuuuuuuuuuuuuuuugcuuuuu

SEQ ID NO: 424467 - RNA, 24 nt, Human
uuuuauuuuuguagugaggggucu

SEQ ID NO: 424468 - RNA, 19 nt, Human
uuuuucuuagugguucuau

SEQ ID NO: 424469 - RNA, 24 nt, Human
uuuuuuuuuuuuuuuugcuuuuua

SEQ ID NO: 424470 - RNA, 23 nt, Human
aaaaguaggcagggcagagacca

SEQ ID NO: 424471 - RNA, 23 nt, Human
aaaauccacaccaaauggcaaug

SEQ ID NO: 424472 - RNA, 18 nt, Human
aaacaaaacacaacacaa

SEQ ID NO: 424473 - RNA, 22 nt, Human
aaaguaggcagggcagagacca

SEQ ID NO: 424474 - RNA, 23 nt, Human
aauaucuuguaagaucaacaccc

SEQ ID NO: 424475 - RNA, 22 nt, Human
acaaaacacaacacaacacaca

SEQ ID NO: 424476 - RNA, 33 nt, Human
acaacacaacacacacacacacacacacacagu

SEQ ID NO: 424477 - RNA, 33 nt, Human
acacaacacaacacacacacacacacacacagu

SEQ ID NO: 424478 - RNA, 31 nt, Human; identical to SEQ ID NO: 314502

SEQ ID NO: 424479 - RNA, 23 nt, Human
acacacacacacacacacacaca

SEQ ID NO: 424480 - RNA, 23 nt, Human
acacacacacacacacacacaca

SEQ ID NO: 424481 - RNA, 23 nt, Human
acacacacacacacacacacaca

SEQ ID NO: 424482 - RNA, 24 nt, Human
acacacacacacacacacacacag

SEQ ID NO: 424483 - RNA, 25 nt, Human
acacacacacacacacacacacagu

SEQ ID NO: 424484 - RNA, 23 nt, Human
acacacacacacacacacacacg

SEQ ID NO: 424485 - RNA, 24 nt, Human
acacacacacacacacacacacga

SEQ ID NO: 424486 - RNA, 23 nt, Human
acacacacacacacacacacagu

SEQ ID NO: 424487 - RNA, 25 nt, Human
acacacacacacacacacgaccauc

SEQ ID NO: 424488 - RNA, 22 nt, Human
acaguagaaaauccacaccaaa

SEQ ID NO: 424489 - RNA, 22 nt, Human
acaguagaaaauccagaccaaa

SEQ ID NO: 424490 - RNA, 18 nt, Human
accugguaguuuccagaa

SEQ ID NO: 424491 - RNA, 26 nt, Human
acugugcugccugggacacugaacgg

SEQ ID NO: 424492 - RNA, 23 nt, Human
aggaggaguggagagucagacuu

SEQ ID NO: 424493 - RNA, 18 nt, Human
aggaguggagagucagac

SEQ ID NO: 424494 - RNA, 28 nt, Human
aggcacaccugguaguuuccagaagcac

SEQ ID NO: 424495 - RNA, 18 nt, Human
aggcacccaggcccggag

SEQ ID NO: 424496 - RNA, 18 nt, Human
aguagaaaauccacacca

SEQ ID NO: 424497 - RNA, 18 nt, Human
aguaggugggagggaggg

SEQ ID NO: 424498 - RNA, 19 nt, Human
agugaugaaaaugaauucc

SEQ ID NO: 424499 - RNA, 19 nt, Human
augaguaggugggagggag

SEQ ID NO: 424500 - RNA, 20 nt, Human
caaaacacaacacaacacac

SEQ ID NO: 424501 - RNA, 19 nt, Human
caagaggaaguccaggauc

SEQ ID NO: 424502 - RNA, 20 nt, Human
caauaucuuguaagaucaac

SEQ ID NO: 424503 - RNA, 24 nt, Human
caauaucuuguaagaucaacaccc

SEQ ID NO: 424504 - RNA, 20 nt, Human
cacacacacacacacacaca

SEQ ID NO: 424505 - RNA, 20 nt, Human
cacacacacacacacacaca

SEQ ID NO: 424506 - RNA, 20 nt, Human
cacacacacacacacacaca

SEQ ID NO: 424507 - RNA, 20 nt, Human
cacacacacacacacacaca

SEQ ID NO: 424508 - RNA, 22 nt, Human
cacacacacacacacacacaca

SEQ ID NO: 424509 - RNA, 22 nt, Human
cacacacacacacacacacaca

SEQ ID NO: 424510 - RNA, 26 nt, Human
cacacacacacacacacacacacaca

SEQ ID NO: 424511 - RNA, 26 nt, Human
cacacacacacacacacacacacacg

SEQ ID NO: 424512 - RNA, 26 nt, Human
cacacacacacacacacacacacgac

SEQ ID NO: 424513 - RNA, 27 nt, Human
cacacacacacacacacacgaccaucu

SEQ ID NO: 424514 - RNA, 22 nt, Human
cacacacacacacacacgacca

SEQ ID NO: 424515 - RNA, 18 nt, Human
cacacguggaagccgggu

SEQ ID NO: 424516 - RNA, 19 nt, Human
cacacguggaagccggguc

SEQ ID NO: 424517 - RNA, 27 nt, Human
cacccagugaugcaucuaguacuuaua

SEQ ID NO: 424518 - RNA, 19 nt, Human
cagcaagaggaaguccagg

SEQ ID NO: 424519 - RNA, 20 nt, Human
caguagaaaauccagaccaa

SEQ ID NO: 424520 - RNA, 23 nt, Human
caucaauaucuuguaagaucaac

SEQ ID NO: 424521 - RNA, 19 nt, Human
caugguuuuuauacacuaa

SEQ ID NO: 424522 - RNA, 26 nt, Human
ccagaccaaauggcaaugggcuuuua

SEQ ID NO: 424523 - RNA, 22 nt, Human
ccagggccugugagucaacuaa

SEQ ID NO: 424524 - RNA, 18 nt, Human
ccccgaugccuugcucuc

SEQ ID NO: 424525 - RNA, 23 nt, Human
cccgggucccggacucccugcug

SEQ ID NO: 424526 - RNA, 19 nt, Human
cccucccuuaaaaaacaaa

SEQ ID NO: 424527 - RNA, 20 nt, Human
cccugcugcucuggcugcug

SEQ ID NO: 424528 - RNA, 21 nt, Human
cccuggagacguucagcgcug

SEQ ID NO: 424529 - RNA, 20 nt, Human
cccuuaaaaaacaaaacaca

SEQ ID NO: 424530 - RNA, 18 nt, Human
ccggagcggagcgugugc

SEQ ID NO: 424531 - RNA, 20 nt, Human
ccgggucccggacucccugc

SEQ ID NO: 424532 - RNA, 25 nt, Human
ccugggacacugaacgguccccgag

SEQ ID NO: 424533 - RNA, 27 nt, Human
cgccugggcugccgucccggcucuggg

SEQ ID NO: 424534 - RNA, 22 nt, Human
cgcugccuugaacuccuuaccc

SEQ ID NO: 424535 - RNA, 23 nt, Human
cgcuggccucggcggcgccuaac

SEQ ID NO: 424536 - RNA, 19 nt, Human
cggcggcgccuaacuuggc

SEQ ID NO: 424537 - RNA, 19 nt, Human
cggguugcggagagccccc

SEQ ID NO: 424538 - RNA, 24 nt, Human
cucccuuaaaaaacaaaacacaac

SEQ ID NO: 424539 - RNA, 21 nt, Human
cuccggcccuggagacguuca

SEQ ID NO: 424540 - RNA, 23 nt, Human
cuccuccggcccuggagacguuc

SEQ ID NO: 424541 - RNA, 19 nt, Human
cucugauuuauuucuugcu

SEQ ID NO: 424542 - RNA, 20 nt, Human
cugccuugaacuccuuaccc

SEQ ID NO: 424543 - RNA, 21 nt, Human
cuggccucggcggcgccuaac

SEQ ID NO: 424544 - RNA, 21 nt, Human
cuuaaaaacagucuuaucagu

SEQ ID NO: 424545 - RNA, 18 nt, Human
gaaugaguaggugggagg

SEQ ID NO: 424546 - RNA, 19 nt, Human
gacgccggcuccgggacac

SEQ ID NO: 424547 - RNA, 19 nt, Human
gagcauaaaaaaagaaggg

SEQ ID NO: 424548 - RNA, 18 nt, Human
gcgaaaacgagcauaaaa

SEQ ID NO: 424549 - RNA, 21 nt, Human
gcugccugggacacugaacgg

SEQ ID NO: 424550 - RNA, 22 nt, Human
gcuguaggcacccaggcccgga

SEQ ID NO: 424551 - RNA, 19 nt, Human
ggcccggagcggagcgugu

SEQ ID NO: 424552 - RNA, 21 nt, Human
ggcgggaagugggggagcgga

SEQ ID NO: 424553 - RNA, 28 nt, Human
ggcgggaagugggggagcgggggacccc

SEQ ID NO: 424554 - RNA, 19 nt, Human
gggaagugggggagcggac

SEQ ID NO: 424555 - RNA, 21 nt, Human
gggcagagaccaacucuucca

SEQ ID NO: 424556 - RNA, 22 nt, Human
gggcgggaagugggggagcgga

SEQ ID NO: 424557 - RNA, 22 nt, Human
guacaucuauaaagacacauau

SEQ ID NO: 424558 - RNA, 19 nt, Human
guaggugggagggagggcg

SEQ ID NO: 424559 - RNA, 19 nt, Human
guucagcgcuggccucggc

SEQ ID NO: 424560 - RNA, 18 nt, Human
uaaaaaaagaagggaagg

SEQ ID NO: 424561 - RNA, 19 nt, Human
uaaaaaacaaaacacaaca

SEQ ID NO: 424562 - RNA, 26 nt, Human
uaaagucacuuucauuuuuacaacuu

SEQ ID NO: 424563 - RNA, 22 nt, Human
uaaauucccucccuuaaaaaac

SEQ ID NO: 424564 - RNA, 25 nt, Human
uaaauucccucccuuaaaaaacaaa

SEQ ID NO: 424565 - RNA, 23 nt, Human
uacaguagaaaauccacaccaaa

SEQ ID NO: 424566 - RNA, 24 nt, Human
uagaaaaugguacaauaauuccau

SEQ ID NO: 424567 - RNA, 18 nt, Human
uauacuuguagacccaaa

SEQ ID NO: 424568 - RNA, 22 nt, Human
uauacuuguagacccaaagguc

SEQ ID NO: 424569 - RNA, 18 nt, Human
uaucaguggagauccugg

SEQ ID NO: 424570 - RNA, 24 nt, Human
ucaacacccagugaugcaucuagu

SEQ ID NO: 424571 - RNA, 18 nt, Human
ucagcuauggcucuucuu

SEQ ID NO: 424572 - RNA, 22 nt, Human
uccaggaucgcggcgaggagac

SEQ ID NO: 424573 - RNA, 20 nt, Human
ucccggacucccugcugcuc

SEQ ID NO: 424574 - RNA, 22 nt, Human
ucccugcugcucuggcugcugu

SEQ ID NO: 424575 - RNA, 23 nt, Human
ucccuuaaaaaacaaaacacaac

SEQ ID NO: 424576 - RNA, 18 nt, Human
uccgggacacacguggaa

SEQ ID NO: 424577 - RNA, 18 nt, Human
ugaaaaugaauuccccuc

SEQ ID NO: 424578 - RNA, 20 nt, Human
ugaaagcaguucacacacug

SEQ ID NO: 424579 - RNA, 21 nt, Human
ugagagcaaagugaaaaaugc

SEQ ID NO: 424580 - RNA, 22 nt, Human
ugcccuggccuauaaauauucc

SEQ ID NO: 424581 - RNA, 19 nt, Human
ugccuugcucucugauuua

SEQ ID NO: 424582 - RNA, 23 nt, Human
ugcucucugauuuauuucuugcu

SEQ ID NO: 424583 - RNA, 18 nt, Human
ugcugaggcucagacccg

SEQ ID NO: 424584 - RNA, 21 nt, Human
uggaagccggguccugcagca

SEQ ID NO: 424585 - RNA, 25 nt, Human
uggaagccggguccugcagcaagag

SEQ ID NO: 424586 - RNA, 19 nt, Human
uggagagucagacuugaaa

SEQ ID NO: 424587 - RNA, 19 nt, Human
uggcccagaugccgcccgg

SEQ ID NO: 424588 - RNA, 20 nt, Human
uggcccagaugccgcccggg

SEQ ID NO: 424589 - RNA, 27 nt, Human
uuaaagucacuuucauuuuuacaacuu

SEQ ID NO: 424590 - RNA, 18 nt, Human
uuagugaggaggagugga

SEQ ID NO: 424591 - RNA, 18 nt, Human
uuagugaggaggagugga

SEQ ID NO: 424592 - RNA, 20 nt, Human
uugcucucugauuuauuucu

SEQ ID NO: 424593 - RNA, 19 nt, Human
uuggaaguuggaugaagaa

SEQ ID NO: 424594 - RNA, 20 nt, Human
uuuuuuuuuuuuuuccuuuu

SEQ ID NO: 424595 - RNA, 21 nt, Human
uuuuuuuuuuuuuuuuccuuu

SEQ ID NO: 424596 - RNA, 22 nt, Human
uuuuuuuuuuuuuuuuccuuuu

SEQ ID NO: 424597 - RNA, 24 nt, Human
uuuuuuuuuuuuuuuuccuuuuga

SEQ ID NO: 424598 - RNA, 23 nt, Human
aaaaaaaaaagaaaagaaaagaa

SEQ ID NO: 424599 - RNA, 27 nt, Human
aaaaaaaccaaaacguacacccacaaa

SEQ ID NO: 424600 - RNA, 20 nt, Human
aaaaaacaacaaaaaaaaac

SEQ ID NO: 424601 - RNA, 25 nt, Human
aaaaaacaacaaaaaaaaaccaaaa

SEQ ID NO: 424602 - RNA, 21 nt, Human
aaaaaaccaaaacguacaccc

SEQ ID NO: 424603 - RNA, 24 nt, Human
aaaaaaccaaaacguacacccaca

SEQ ID NO: 424604 - RNA, 31 nt, Human
aaaaacaaagaaaaaaaacaacaaaaaaaaa

SEQ ID NO: 424605 - RNA, 27 nt, Human
aaaaacaacaaaaaaaaaccaaaacgu

SEQ ID NO: 424606 - RNA, 22 nt, Human
aaaaaggcaaauugugacaaaa

SEQ ID NO: 424607 - RNA, 23 nt, Human
aaaagaaaagaaaaacaaagaaa

SEQ ID NO: 424608 - RNA, 19 nt, Human
aaacaacaaaaaaaaacca

SEQ ID NO: 424609 - RNA, 22 nt, Human
aaaccaaaacguacacccacaa

SEQ ID NO: 424610 - RNA, 22 nt, Human
aaacuguaucuaacacugaaac

SEQ ID NO: 424611 - RNA, 22 nt, Human
aaagaaaaaaaacaacaaaaaa

SEQ ID NO: 424612 - RNA, 22 nt, Human
aaagagaaagugcacagaugua

SEQ ID NO: 424613 - RNA, 20 nt, Human
aacccacaucuacucuaaca

SEQ ID NO: 424614 - RNA, 24 nt, Human
aagaaaaaaaacaacaaaaaaaaa

SEQ ID NO: 424615 - RNA, 24 nt, Human
aagaaaaacaaagaaaaaaaacaa

SEQ ID NO: 424616 - RNA, 30 nt, Human
aagaaaaacaaagaaaaaaaacaacaaaag

SEQ ID NO: 424617 - RNA, 21 nt, Human
aagaaaagaaaagaaaaacaa

SEQ ID NO: 424618 - RNA, 27 nt, Human
aagaaaagaaaagaaaaacaaagaaaa

SEQ ID NO: 424619 - RNA, 18 nt, Human
aagcaaaaaaaaaaaaag

SEQ ID NO: 424620 - RNA, 25 nt, Human
acaaaaaaaaaccaaaacguacacc

SEQ ID NO: 424621 - RNA, 23 nt, Human
acaaagaaaaaaaacaacaaaaa

SEQ ID NO: 424622 - RNA, 21 nt, Human
acacugaaacuacuacaggac

SEQ ID NO: 424623 - RNA, 22 nt, Human
acagcacagauucuaaacagac

SEQ ID NO: 424624 - RNA, 19 nt, Human
acaguaacagcaugaguac

SEQ ID NO: 424625 - RNA, 21 nt, Human
agaaaagaaaaacaaagaaaa

SEQ ID NO: 424626 - RNA, 21 nt, Human
agaaaagaaaaacaaagaaaa

SEQ ID NO: 424627 - RNA, 24 nt, Human
agaaaagaaaaacaaagaaaaaaa

SEQ ID NO: 424628 - RNA, 19 nt, Human
agaaaagaaaagaaaaaca

SEQ ID NO: 424629 - RNA, 26 nt, Human
agaaaagaaaagaaaaacaaagaaaa

SEQ ID NO: 424630 - RNA, 25 nt, Human
agaaaagaaaagaaaaacaaagaag

SEQ ID NO: 424631 - RNA, 19 nt, Human
agcaaaaaaaaaaaaagaa

SEQ ID NO: 424632 - RNA, 25 nt, Human
aguauccucucccaaauuaaaugac

SEQ ID NO: 424633 - RNA, 23 nt, Human
auaaacccacaucuacucuaaca

SEQ ID NO: 424634 - RNA, 20 nt, Human
caaaaaggcaaauugugaca

SEQ ID NO: 424635 - RNA, 26 nt, Human
caaaaaggcaaauugugacaaaagua

SEQ ID NO: 424636 - RNA, 24 nt, Human
caaaacguacacccacaaaaaggc

SEQ ID NO: 424637 - RNA, 24 nt, Human
caaagcggcagaaguauugaagca

SEQ ID NO: 424638 - RNA, 19 nt, Human
caauaugcauuaacaggau

SEQ ID NO: 424639 - RNA, 21 nt, Human
cacagauucuaaacagacaga

SEQ ID NO: 424640 - RNA, 21 nt, Human
caggagaggaaaggugaaggg

SEQ ID NO: 424641 - RNA, 21 nt, Human
caguaacagcaugaguacgaa

SEQ ID NO: 424642 - RNA, 21 nt, Human
cauaaaaacugagcaacuaug

SEQ ID NO: 424643 - RNA, 20 nt, Human
cccacaaaaaggcaaauugu

SEQ ID NO: 424644 - RNA, 24 nt, Human
ccccgccaggagaggaaaggugaa

SEQ ID NO: 424645 - RNA, 19 nt, Human
ccccggagcucagcaagcu

SEQ ID NO: 424646 - RNA, 22 nt, Human
cggcagaaguauugaagcaaaa

SEQ ID NO: 424647 - RNA, 31 nt, Human
cggcagaaguauugaagcaaaaaaaaaaaaa

SEQ ID NO: 424648 - RNA, 23 nt, Human
cuaaagagaaagugcacagaugu

SEQ ID NO: 424649 - RNA, 20 nt, Human
cuaacacugaaacuacuaca

SEQ ID NO: 424650 - RNA, 20 nt, Human
cucgcccgccgccgaacccc

SEQ ID NO: 424651 - RNA, 22 nt, Human
gcgagcuccgcgggccccggag

SEQ ID NO: 424652 - RNA, 24 nt, Human
uaaacccacaucuacucuaacaag

SEQ ID NO: 424653 - RNA, 25 nt, Human
uaacucauauaaaaauaacuugacc

SEQ ID NO: 424654 - RNA, 18 nt, Human
uaacuugacccuacacaa

SEQ ID NO: 424655 - RNA, 22 nt, Human
uagugauaaaaaacuacuguac

SEQ ID NO: 424656 - RNA, 23 nt, Human
ucacucgcccgccgccgaacccc

SEQ ID NO: 424657 - RNA, 23 nt, Human
uccaaagcggcagaaguauugaa

SEQ ID NO: 424658 - RNA, 18 nt, Human
uccccgguaacacucccc

SEQ ID NO: 424659 - RNA, 25 nt, Human
ucuaacacugaaacuacuacaggac

SEQ ID NO: 424660 - RNA, 21 nt, Human
uggaaaaaacuguaucuaaca

SEQ ID NO: 424661 - RNA, 22 nt, Human
uggaaaaaacuguaucuaacac

SEQ ID NO: 424662 - RNA, 19 nt, Human
uggacaguauccucuccca

SEQ ID NO: 424663 - RNA, 19 nt, Human
uggagcagcugcuccccgg

SEQ ID NO: 424664 - RNA, 19 nt, Human
ugggcaaacuuggcaguca

SEQ ID NO: 424665 - RNA, 22 nt, Human
uguacugggcaaacuuggcagu

SEQ ID NO: 424666 - RNA, 22 nt, Human
uguaugguggaaaaaacuguau

SEQ ID NO: 424667 - RNA, 19 nt, Human
uuguauuuuaaggaaaaau

SEQ ID NO: 424668 - RNA, 20 nt, Human
uuuuuuuuuuuuuaaggagu

SEQ ID NO: 424669 - RNA, 23 nt, Human
uuuuuuuuuuuuuuuuuuuaagg

SEQ ID NO: 424670 - RNA, 19 nt, Human
aaaaugcugggauuacagg

SEQ ID NO: 424671 - RNA, 19 nt, Human
aaaaugcugggauuacagg

SEQ ID NO: 424672 - RNA, 24 nt, Human
aaaaugcugggauuacaggaguga

SEQ ID NO: 424673 - RNA, 26 nt, Human
aaacacuuaacauugucaacauuucu

SEQ ID NO: 424674 - RNA, 26 nt, Human
aaaugcugggauuacaggagugagcc

SEQ ID NO: 424675 - RNA, 20 nt, Human
aaccucugccucuugggcuc

SEQ ID NO: 424676 - RNA, 19 nt, Human
aacugccucccuagggcuc

SEQ ID NO: 424677 - RNA, 22 nt, Human
aagaauaccaaaacaguuuccu

SEQ ID NO: 424678 - RNA, 27 nt, Human
aagcagcauuuauuaaccagaguacuu

SEQ ID NO: 424679 - RNA, 18 nt, Human
aagcucuuacaaaacuua

SEQ ID NO: 424680 - RNA, 20 nt, Human
aaguagcugggacuagaggc

SEQ ID NO: 424681 - RNA, 24 nt, Human
aaguagcugggacuagaggcacac

SEQ ID NO: 424682 - RNA, 19 nt, Human
acaauaagguuccaaaucc

SEQ ID NO: 424683 - RNA, 25 nt, Human
accauguugcccaggcuggucuuaa

SEQ ID NO: 424684 - RNA, 24 nt, Human
acccggcuaauuuuuuuguauuuu

SEQ ID NO: 424685 - RNA, 23 nt, Human
acccugcaaccucugccucuugg

SEQ ID NO: 424686 - RNA, 24 nt, Human
acccugcaaccucugccucuuggg

SEQ ID NO: 424687 - RNA, 23 nt, Human
accucagccucccaaguagcugg

SEQ ID NO: 424688 - RNA, 22 nt, Human
accucugccucuugggcucaag

SEQ ID NO: 424689 - RNA, 19 nt, Human
agcgguccacccaccucgg

SEQ ID NO: 424690 - RNA, 22 nt, Human
aggaacucuccacugccucguc

SEQ ID NO: 424691 - RNA, 19 nt, Human
aggcacacaccaucauacc

SEQ ID NO: 424692 - RNA, 18 nt, Human
aucaagaauaccaaaaca

SEQ ID NO: 424693 - RNA, 18 nt, Human
aucacaauaagguuccaa

SEQ ID NO: 424694 - RNA, 18 nt, Human
auggggcuucaccauguu

SEQ ID NO: 424695 - RNA, 19 nt, Human
auggggcuucaccauguug

SEQ ID NO: 424696 - RNA, 24 nt, Human
auggggcuucaccauguugcccag

SEQ ID NO: 424697 - RNA, 24 nt, Human
caaaaugcugggauuacaggagug

SEQ ID NO: 424698 - RNA, 18 nt, Human
caacaugcuuuaaaagga

SEQ ID NO: 424699 - RNA, 18 nt, Human
caacauuucuucaguuau

SEQ ID NO: 424700 - RNA, 23 nt, Human
caaccucugccucuugggcucaa

SEQ ID NO: 424701 - RNA, 23 nt, Human
caagaauaccaaaacaguuuccu

SEQ ID NO: 424702 - RNA, 23 nt, Human
caaguagcugggacuagaggcac

SEQ ID NO: 424703 - RNA, 23 nt, Human
cacacaccaucauacccggcuaa

SEQ ID NO: 424704 - RNA, 24 nt, Human
cacauguaaauauaacugaagaac

SEQ ID NO: 424705 - RNA, 23 nt, Human
caccauguugcccaggcuggucu

SEQ ID NO: 424706 - RNA, 24 nt, Human
caccauguugcccaggcuggucuu

SEQ ID NO: 424707 - RNA, 27 nt, Human
caccauguugcccaggcuggucuuaaa

SEQ ID NO: 424708 - RNA, 22 nt, Human
cacccaccucggccucccaaaa

SEQ ID NO: 424709 - RNA, 23 nt, Human
cacccaccucggccucccaaaau

SEQ ID NO: 424710 - RNA, 24 nt, Human
caccucggccucccaaaaugcugg

SEQ ID NO: 424711 - RNA, 21 nt, Human
cacuggcugaaaauaaggaag

SEQ ID NO: 424712 - RNA, 19 nt, Human
cagcgacgccgggccaggg

SEQ ID NO: 424713 - RNA, 22 nt, Human
cagggccagggccaugguccgc

SEQ ID NO: 424714 - RNA, 19 nt, Human
cauguugcccaggcugguc

SEQ ID NO: 424715 - RNA, 23 nt, Human
cauguugcccaggcuggucuuaa

SEQ ID NO: 424716 - RNA, 24 nt, Human
cauguugcccaggcuggucuuaaa

SEQ ID NO: 424717 - RNA, 22 nt, Human
ccaaaaauuuuuuuugaauccc

SEQ ID NO: 424718 - RNA, 23 nt, Human
ccaaaaggggagaaaaacuggga

SEQ ID NO: 424719 - RNA, 24 nt, Human
ccaaaaugcugggauuacaggagu

SEQ ID NO: 424720 - RNA, 22 nt, Human
ccaaguagcugggacuagaggc

SEQ ID NO: 424721 - RNA, 20 nt, Human
ccaccuccgccggcgccgcc

SEQ ID NO: 424722 - RNA, 23 nt, Human
ccagcgacgccgggccagggcca

SEQ ID NO: 424723 - RNA, 19 nt, Human
cccaaguagcugggacuag

SEQ ID NO: 424724 - RNA, 24 nt, Human
cccgcucugcgacgcugcucgggg

SEQ ID NO: 424725 - RNA, 22 nt, Human
cccugcaaccucugccucuugg

SEQ ID NO: 424726 - RNA, 25 nt, Human
ccgagccgccgccuccgccgccgcc

SEQ ID NO: 424727 - RNA, 18 nt, Human
ccgcagggacugccgcau

SEQ ID NO: 424728 - RNA, 24 nt, Human
ccgccgccaccuccgccggcgccg

SEQ ID NO: 424729 - RNA, 20 nt, Human
ccgccgccaccuccgccggg

SEQ ID NO: 424730 - RNA, 27 nt, Human
ccgccgccuccgccgccgccuguccgg

SEQ ID NO: 424731 - RNA, 22 nt, Human
ccgccgccuguccggagcccgg

SEQ ID NO: 424732 - RNA, 19 nt, Human
ccggcgccgccgccuccuu

SEQ ID NO: 424733 - RNA, 21 nt, Human
ccgucuccgccgccaccuccg

SEQ ID NO: 424734 - RNA, 20 nt, Human
ccuccgccggcgccgccgcc

SEQ ID NO: 424735 - RNA, 19 nt, Human
ccuccuucccucccgagcc

SEQ ID NO: 424736 - RNA, 24 nt, Human
ccucuugggcucaagccauccucu

SEQ ID NO: 424737 - RNA, 22 nt, Human
cgccgccaccuccgccggcgcc

SEQ ID NO: 424738 - RNA, 18 nt, Human
cgcgccgggcgccggccg

SEQ ID NO: 424739 - RNA, 24 nt, Human
cgguccacccaccucggccuccca

SEQ ID NO: 424740 - RNA, 24 nt, Human
cucaagccauccucugaccucagc

SEQ ID NO: 424741 - RNA, 24 nt, Human
cucagccucccaaguagcugggac

SEQ ID NO: 424742 - RNA, 26 nt, Human
cuccgcgccgggcgccggccgucucc

SEQ ID NO: 424743 - RNA, 23 nt, Human
cugaccucagccucccaaguagc

SEQ ID NO: 424744 - RNA, 19 nt, Human
cugcaaccucugccucuug

SEQ ID NO: 424745 - RNA, 20 nt, Human
cugcaaccucugccucuugg

SEQ ID NO: 424746 - RNA, 21 nt, Human
cugcaaccucugccucuuggg

SEQ ID NO: 424747 - RNA, 24 nt, Human
cugcaaccucugccucuugggcuc

SEQ ID NO: 424748 - RNA, 18 nt, Human
cuuugaguuucacgcacc

SEQ ID NO: 424749 - RNA, 23 nt, Human
cuuuuuuuuuuuuaaagaaggua

SEQ ID NO: 424750 - RNA, 24 nt, Human
gaaaauaaggaagaugauguuagc

SEQ ID NO: 424751 - RNA, 18 nt, Human
gauuacaggagugagcca

SEQ ID NO: 424752 - RNA, 20 nt, Human
gcccgucacccauucauacc

SEQ ID NO: 424753 - RNA, 21 nt, Human
gccgccaccuccgccggcgcc

SEQ ID NO: 424754 - RNA, 24 nt, Human
gccuccuucccucccgagccgccg

SEQ ID NO: 424755 - RNA, 20 nt, Human
gcgcugaacugccucccuag

SEQ ID NO: 424756 - RNA, 26 nt, Human
gcgcugaacugccucccuagggcucc

SEQ ID NO: 424757 - RNA, 24 nt, Human
gcgguccacccaccucggccuccc

SEQ ID NO: 424758 - RNA, 22 nt, Human
ggacgccgugaggaaagcccag

SEQ ID NO: 424759 - RNA, 24 nt, Human
ggacucaagcgguccacccaccuc

SEQ ID NO: 424760 - RNA, 22 nt, Human
gggcuucaccauguugcccagg

SEQ ID NO: 424761 - RNA, 22 nt, Human
ggggcuucaccauguugcccag

SEQ ID NO: 424762 - RNA, 23 nt, Human
ggggcuucaccauguugcccagg

SEQ ID NO: 424763 - RNA, 21 nt, Human
ggucuggcucucucucucuca

SEQ ID NO: 424764 - RNA, 22 nt, Human
guagagauggggcuucaccaug

SEQ ID NO: 424765 - RNA, 19 nt, Human
guauuuuuuguagagaugg

SEQ ID NO: 424766 - RNA, 20 nt, Human
gucuggcucucucucucuca

SEQ ID NO: 424767 - RNA, 21 nt, Human
guggugcgaucuugacccugc

SEQ ID NO: 424768 - RNA, 18 nt, Human
uaacuauuaaaccaaaag

SEQ ID NO: 424769 - RNA, 24 nt, Human
uaacugaagaacuacuucaaauaa

SEQ ID NO: 424770 - RNA, 19 nt, Human
uacagcacuaauuaugaaa

SEQ ID NO: 424771 - RNA, 24 nt, Human
uacaggagugagccaccacgccca

SEQ ID NO: 424772 - RNA, 22 nt, Human
uagagauggggcuucaccaugu

SEQ ID NO: 424773 - RNA, 18 nt, Human
uauuucaacuacaucaug

SEQ ID NO: 424774 - RNA, 24 nt, Human
ucacacuacagcgguagugggaac

SEQ ID NO: 424775 - RNA, 21 nt, Human
ucagagccaugcuaaaugcag

SEQ ID NO: 424776 - RNA, 18 nt, Human
ucagccucccaaguagcu

SEQ ID NO: 424777 - RNA, 20 nt, Human
ucagccucccaaguagcugg

SEQ ID NO: 424778 - RNA, 23 nt, Human
ucagucgcuggucaguuccuucc

SEQ ID NO: 424779 - RNA, 23 nt, Human
ucccaaaaugcugggauuacagg

SEQ ID NO: 424780 - RNA, 24 nt, Human
ucccaaguagcugggacuagaggc

SEQ ID NO: 424781 - RNA, 25 nt, Human
ucccgagccgccgccuccucgggag

SEQ ID NO: 424782 - RNA, 20 nt, Human
ucccugguugucauuuuugg

SEQ ID NO: 424783 - RNA, 19 nt, Human
uccucugaccucagccucc

SEQ ID NO: 424784 - RNA, 21 nt, Human
uccugaaagauuaaaaggccc

SEQ ID NO: 424785 - RNA, 18 nt, Human
ucggccucccaaaaugcu

SEQ ID NO: 424786 - RNA, 21 nt, Human
ucuggaagacuuccuaagcua

SEQ ID NO: 424787 - RNA, 20 nt, Human
ugaagaacuacuucaaauaa

SEQ ID NO: 424788 - RNA, 21 nt, Human
ugagacaaggucuggcucucu

SEQ ID NO: 424789 - RNA, 21 nt, Human
ugaggaaagcccagcgacgcc

SEQ ID NO: 424790 - RNA, 21 nt, Human
ugcccaggcuggucuuaaacu

SEQ ID NO: 424791 - RNA, 22 nt, Human
uggacucaagcgguccacccac

SEQ ID NO: 424792 - RNA, 21 nt, Human
ugggacuagaggcacacacca

SEQ ID NO: 424793 - RNA, 18 nt, Human
ugggagggaaauauaugg

SEQ ID NO: 424794 - RNA, 20 nt, Human
ugggagggaaauauauggug

SEQ ID NO: 424795 - RNA, 18 nt, Human
ugggauuacaggagugag

SEQ ID NO: 424796 - RNA, 19 nt, Human
ugggauuacaggagugagc

SEQ ID NO: 424797 - RNA, 22 nt, Human
ugggauuacaggagugagccac

SEQ ID NO: 424798 - RNA, 23 nt, Human
ugggauuacaggagugagccacc

SEQ ID NO: 424799 - RNA, 24 nt, Human
ugggauuacaggagugagccacca

SEQ ID NO: 424800 - RNA, 24 nt, Human
uggggcuucaccauguugcccagg

SEQ ID NO: 424801 - RNA, 24 nt, Human
uguagagauggggcuucaccaugu

SEQ ID NO: 424802 - RNA, 18 nt, Human
ugucaacauuucuucagu

SEQ ID NO: 424803 - RNA, 23 nt, Human
uuaacauugucaacauuucuuca

SEQ ID NO: 424804 - RNA, 21 nt, Human
uuauauuucaacuacaucaug

SEQ ID NO: 424805 - RNA, 18 nt, Human
uucccaauacaggcuaag

SEQ ID NO: 424806 - RNA, 20 nt, Human
uucccggaagucggcccgcu

SEQ ID NO: 424807 - RNA, 24 nt, Human
uuguagagauggggcuucaccaug

SEQ ID NO: 424808 - RNA, 25 nt, Human
uuuccacaaaggaagcagcauuuau

SEQ ID NO: 424809 - RNA, 21 nt, Human
uuugaaucccugguugucauu

SEQ ID NO: 424810 - RNA, 24 nt, Human
uuuguagagauggggcuucaccau

SEQ ID NO: 424811 - RNA, 25 nt, Human
uuuuauuuuuugagacaaggucugg

SEQ ID NO: 424812 - RNA, 20 nt, Human
uuuuugguagcuuaacccag

SEQ ID NO: 424813 - RNA, 19 nt, Human
uuuuuugaaucccugguug

SEQ ID NO: 424814 - RNA, 24 nt, Human
uuuuuuguagagauggggcuucac

SEQ ID NO: 424815 - RNA, 21 nt, Human
uuuuuuguauuuuuuguagag

SEQ ID NO: 424816 - RNA, 24 nt, Human
uuuuuuguauuuuuuguagagaug

SEQ ID NO: 424817 - RNA, 18 nt, Human
aaacaggccaccaccaga

SEQ ID NO: 424818 - RNA, 18 nt, Human
aagagaacugagacugug

SEQ ID NO: 424819 - RNA, 21 nt, Human
acaaugugaaagcaagagaac

SEQ ID NO: 424820 - RNA, 21 nt, Human
acaaugugaaagcaagagaac

SEQ ID NO: 424821 - RNA, 19 nt, Human
accagaaagcaaagagacc

SEQ ID NO: 424822 - RNA, 28 nt, Human
acccuggacccuuuucccugaagcuccu

SEQ ID NO: 424823 - RNA, 22 nt, Human
accuaugccuagcccagcccca

SEQ ID NO: 424824 - RNA, 26 nt, Human
acuggcugggacaagguucugagauu

SEQ ID NO: 424825 - RNA, 26 nt, Human
acuggcugggacaagguucugagauu

SEQ ID NO: 424826 - RNA, 24 nt, Human
agaaagcaaagagaccuaugccua

SEQ ID NO: 424827 - RNA, 21 nt, Human
agcagguuuuuacuuucaaac

SEQ ID NO: 424828 - RNA, 20 nt, Human
aggccaccaccagaaagcaa

SEQ ID NO: 424829 - RNA, 24 nt, Human
agugaacacuugcuuuuucuuccc

SEQ ID NO: 424830 - RNA, 19 nt, Human
caagagaacugagacugug

SEQ ID NO: 424831 - RNA, 23 nt, Human
caagguucugagauuugucuccc

SEQ ID NO: 424832 - RNA, 23 nt, Human
caagguucugagauuugucuccc

SEQ ID NO: 424833 - RNA, 18 nt, Human
caaugcagcaaggagcag

SEQ ID NO: 424834 - RNA, 18 nt, Human
caaugcagcaaggagcag

SEQ ID NO: 424835 - RNA, 19 nt, Human
cacacagggcgggugugug

SEQ ID NO: 424836 - RNA, 23 nt, Human
caccaccagaaagcaaagagacc

SEQ ID NO: 424837 - RNA, 18 nt, Human
cacuggcugggacaaggu

SEQ ID NO: 424838 - RNA, 18 nt, Human
cacuggcugggacaaggu

SEQ ID NO: 424839 - RNA, 20 nt, Human
cacugucauccucacuggcu

SEQ ID NO: 424840 - RNA, 20 nt, Human
cacugucauccucacuggcu

SEQ ID NO: 424841 - RNA, 22 nt, Human
cagacaaagggauuaacuaacg

SEQ ID NO: 424842 - RNA, 22 nt, Human
cagacaaagggauuaacuaacg

SEQ ID NO: 424843 - RNA, 20 nt, Human
cagcucaaagucacugacaa

SEQ ID NO: 424844 - RNA, 22 nt, Human
caucuuuauuuuuuggcgggga

SEQ ID NO: 424845 - RNA, 23 nt, Human
ccccagaaaagugauacuuuacc

SEQ ID NO: 424846 - RNA, 20 nt, Human
ccccaggaauucccugcuuc

SEQ ID NO: 424847 - RNA, 20 nt, Human
cccccaaaauauccugugua

SEQ ID NO: 424848 - RNA, 21 nt, Human
ccccccaaaauauccugugua

SEQ ID NO: 424849 - RNA, 20 nt, Human
ccccgcuggacccgaggccc

SEQ ID NO: 424850 - RNA, 23 nt, Human
ccccgcuggacccgaggcccacc

SEQ ID NO: 424851 - RNA, 24 nt, Human
cccgcgcgcgucggggcccgaccg

SEQ ID NO: 424852 - RNA, 20 nt, Human
cccgcuggacccgaggccca

SEQ ID NO: 424853 - RNA, 19 nt, Human
ccgcgccgcgcagugcugc

SEQ ID NO: 424854 - RNA, 21 nt, Human
ccuggaucaaugcagcaagga

SEQ ID NO: 424855 - RNA, 21 nt, Human
ccuggaucaaugcagcaagga

SEQ ID NO: 424856 - RNA, 25 nt, Human
ccuggcacuugcgugaggggacaca

SEQ ID NO: 424857 - RNA, 23 nt, Human
cguccgcggccccacugcggccc

SEQ ID NO: 424858 - RNA, 19 nt, Human
cuacugggaacccuggacc

SEQ ID NO: 424859 - RNA, 27 nt, Human
cuauucuauaacaguaaaagaaagaga

SEQ ID NO: 424860 - RNA, 28 nt, Human
cuccccagcaguugcuaagcuggccgac

SEQ ID NO: 424861 - RNA, 28 nt, Human
cuccccagcaguugcuaagcuggccgac

SEQ ID NO: 424862 - RNA, 19 nt, Human
cugggaacccuggacccuu

SEQ ID NO: 424863 - RNA, 18 nt, Human
gaaagcaagagaacugag

SEQ ID NO: 424864 - RNA, 18 nt, Human
gaaagcaagagaacugag

SEQ ID NO: 424865 - RNA, 24 nt, Human
gacacacacagggcgggugugugu

SEQ ID NO: 424866 - RNA, 19 nt, Human
gagaccuaugccuagccca

SEQ ID NO: 424867 - RNA, 23 nt, Human
gccaccaccagaaagcaaagaga

SEQ ID NO: 424868 - RNA, 19 nt, Human
gcccuggcacuugcgugag

SEQ ID NO: 424869 - RNA, 20 nt, Human
ggccaccaccagaaagcaaa

SEQ ID NO: 424870 - RNA, 24 nt, Human
ggugucacugucauccucacuggc

SEQ ID NO: 424871 - RNA, 23 nt, Human
gugaacacuugcuuuuucuuccc

SEQ ID NO: 424872 - RNA, 24 nt, Human
guuggagggacauuuggaaggggc

SEQ ID NO: 424873 - RNA, 19 nt, Human
guuuuauucucugcccccc

SEQ ID NO: 424874 - RNA, 19 nt, Human
guuuuauucucugcccccc

SEQ ID NO: 424875 - RNA, 20 nt, Human
uaagauuuuucacucuguug

SEQ ID NO: 424876 - RNA, 19 nt, Human
uaaguauauacgcuucccu

SEQ ID NO: 424877 - RNA, 19 nt, Human
uaaguauauacgcuucccu

SEQ ID NO: 424878 - RNA, 19 nt, Human
uacaaugugaaagcaagag

SEQ ID NO: 424879 - RNA, 19 nt, Human
uacaaugugaaagcaagag

SEQ ID NO: 424880 - RNA, 21 nt, Human
uacaaugugaaagcaagagaa

SEQ ID NO: 424881 - RNA, 21 nt, Human
uacaaugugaaagcaagagaa

SEQ ID NO: 424882 - RNA, 20 nt, Human
uacuuucacuuugcaccgca

SEQ ID NO: 424883 - RNA, 18 nt, Human
uaugacaaguacuuugcc

SEQ ID NO: 424884 - RNA, 18 nt, Human
uaugacaaguacuuugcc

SEQ ID NO: 424885 - RNA, 19 nt, Human
uaugacaaguacuuugcca

SEQ ID NO: 424886 - RNA, 19 nt, Human
uaugacaaguacuuugcca

SEQ ID NO: 424887 - RNA, 20 nt, Human
uaugacaaguacuuugccac

SEQ ID NO: 424888 - RNA, 20 nt, Human
uaugacaaguacuuugccac

SEQ ID NO: 424889 - RNA, 23 nt, Human
uauucuacucccucuggguguca

SEQ ID NO: 424890 - RNA, 23 nt, Human
uauucuacucccucuggguguca

SEQ ID NO: 424891 - RNA, 18 nt, Human
uauuucagcacucagcuc

SEQ ID NO: 424892 - RNA, 22 nt, Human
ucaaacaggccaccaccagaaa

SEQ ID NO: 424893 - RNA, 21 nt, Human
ucuaaggaaugauuugaaaaa

SEQ ID NO: 424894 - RNA, 21 nt, Human
ucuaaggaaugauuugaaaaa

SEQ ID NO: 424895 - RNA, 20 nt, Human
ugaaagcaagagaacugaga

SEQ ID NO: 424896 - RNA, 21 nt, Human
ugaaagcaagagaacugagac

SEQ ID NO: 424897 - RNA, 21 nt, Human
ugaacacuugcuuuuucuucc

SEQ ID NO: 424898 - RNA, 21 nt, Human
ugaacacuugcuuuuucuucc

SEQ ID NO: 424899 - RNA, 21 nt, Human
ugagacuauucaagaucuuuu

SEQ ID NO: 424900 - RNA, 23 nt, Human
ugaggggacacacacagggcggg

SEQ ID NO: 424901 - RNA, 21 nt, Human
uggaaggggcccagcccuggc

SEQ ID NO: 424902 - RNA, 22 nt, Human
uggaaggggcccagcccuggca

SEQ ID NO: 424903 - RNA, 22 nt, Human
uggacccuuuucccugaagcuc

SEQ ID NO: 424904 - RNA, 20 nt, Human
ugucacugucauccucacug

SEQ ID NO: 424905 - RNA, 18 nt, Human
uugcaccgcacgcgcugc

SEQ ID NO: 424906 - RNA, 20 nt, Human
uugccaccugguaguucugc

SEQ ID NO: 424907 - RNA, 18 nt, Human
uugcggaucuguguugga

SEQ ID NO: 424908 - RNA, 23 nt, Human
uuuaaguacaaugugaaagcaag

SEQ ID NO: 424909 - RNA, 23 nt, Human
uuuaaguacaaugugaaagcaag

SEQ ID NO: 424910 - RNA, 19 nt, Human
uuuauuuuuuccuucuuuu

SEQ ID NO: 424911 - RNA, 21 nt, Human
uuugccaccugguaguucugc

SEQ ID NO: 424912 - RNA, 22 nt, Human
uuuuuggcggggaugaggccgc

SEQ ID NO: 424913 - RNA, 21 nt, Human
uuuuuuggcggggaugaggcc

SEQ ID NO: 424914 - RNA, 18 nt, Human
uuuuuuuuuuuuuuuuug

SEQ ID NO: 424915 - RNA, 27 nt, Human
uuuuuuuuuuuuuuuuuuuuuuugggg

SEQ ID NO: 424916 - RNA, 24 nt, Human
aacagccacccccaguggccaguc

SEQ ID NO: 424917 - RNA, 18 nt, Human
aaccacuucaaguuuaua

SEQ ID NO: 424918 - RNA, 26 nt, Human
aacuaguccaggaggucuccggccuc

SEQ ID NO: 424919 - RNA, 22 nt, Human
acaggggagaguuuugcagaga

SEQ ID NO: 424920 - RNA, 24 nt, Human
acccaggcagcuuagacaaaccuu

SEQ ID NO: 424921 - RNA, 18 nt, Human
accuucacuucaucucca

SEQ ID NO: 424922 - RNA, 18 nt, Human
acugcagggccuccuggg

SEQ ID NO: 424923 - RNA, 19 nt, Human
agagaaguccccugacucc

SEQ ID NO: 424924 - RNA, 21 nt, Human
agagggucagcccucuggaac

SEQ ID NO: 424925 - RNA, 25 nt, Human
aggcagagauggccucgccccaggg

SEQ ID NO: 424926 - RNA, 24 nt, Human
aggcagggaggacucaggacuaca

SEQ ID NO: 424927 - RNA, 18 nt, Human
aucagagaggcucaauua

SEQ ID NO: 424928 - RNA, 23 nt, Human
caagggcugcggggccaguggcc

SEQ ID NO: 424929 - RNA, 24 nt, Human
cagcccucuuuagccuuucuguuu

SEQ ID NO: 424930 - RNA, 21 nt, Human
cagcguaacaaaaaaccugca

SEQ ID NO: 424931 - RNA, 21 nt, Human
cagucccgaacagccaccccc

SEQ ID NO: 424932 - RNA, 21 nt, Human
caguguggucccacacagggc

SEQ ID NO: 424933 - RNA, 20 nt, Human
ccacgggggccucccaaggg

SEQ ID NO: 424934 - RNA, 20 nt, Human
ccaggguggggucuagagga

SEQ ID NO: 424935 - RNA, 23 nt, Human
cccacacagggccacauccacgg

SEQ ID NO: 424936 - RNA, 22 nt, Human
ccccagggcccgcucccucaga

SEQ ID NO: 424937 - RNA, 23 nt, Human
cccccaguggccagucuccucgc

SEQ ID NO: 424938 - RNA, 21 nt, Human
ccccuggggaugcaacaccuu

SEQ ID NO: 424939 - RNA, 24 nt, Human
ccguggauacccaggcagcuuaga

SEQ ID NO: 424940 - RNA, 23 nt, Human
ccucugcggcagccccuggggau

SEQ ID NO: 424941 - RNA, 24 nt, Human
ccucuggaacuuugcaaagguggg

SEQ ID NO: 424942 - RNA, 22 nt, Human
ccugacuccagcccucuuuagc

SEQ ID NO: 424943 - RNA, 18 nt, Human
ccugcaacccuacaacac

SEQ ID NO: 424944 - RNA, 19 nt, Human
ccugcaacccuacaacaca

SEQ ID NO: 424945 - RNA, 21 nt, Human
cgacucagccuccaccgcugg

SEQ ID NO: 424946 - RNA, 20 nt, Human
cggccucugcggcagccccu

SEQ ID NO: 424947 - RNA, 20 nt, Human
cucagccuccaccgcuggcc

SEQ ID NO: 424948 - RNA, 22 nt, Human
cucagccuccaccgcuggcgcc

SEQ ID NO: 424949 - RNA, 19 nt, Human
cuccucgccgaacuagucc

SEQ ID NO: 424950 - RNA, 19 nt, Human
gacagaaagugacagcagc

SEQ ID NO: 424951 - RNA, 20 nt, Human
gacagcagcguaacaaaaaa

SEQ ID NO: 424952 - RNA, 19 nt, Human
gacuccagcccucuuuagc

SEQ ID NO: 424953 - RNA, 24 nt, Human
gcagaaccuccuuugcuggcaaag

SEQ ID NO: 424954 - RNA, 23 nt, Human
gcagagauggccucgccccaggg

SEQ ID NO: 424955 - RNA, 20 nt, Human
gcggcagccccuggggaugc

SEQ ID NO: 424956 - RNA, 24 nt, Human
gcguaacaaaaaaccugcaacccu

SEQ ID NO: 424957 - RNA, 24 nt, Human
gcucucagucccgaacagccaccu

SEQ ID NO: 424958 - RNA, 28 nt, Human
ggacucaggacuacaugugcgcuggggg

SEQ ID NO: 424959 - RNA, 24 nt, Human
ggaucaggcuuuucugccagcagc

SEQ ID NO: 424960 - RNA, 18 nt, Human
ggaugcaacaccuucccu

SEQ ID NO: 424961 - RNA, 20 nt, Human
ggggccaguggccucucagg

SEQ ID NO: 424962 - RNA, 19 nt, Human
gggucgggggaacugcagg

SEQ ID NO: 424963 - RNA, 19 nt, Human
gugacagcagcguaacaaa

SEQ ID NO: 424964 - RNA, 23 nt, Human
uacaacacaaccacuucaaguuu

SEQ ID NO: 424965 - RNA, 22 nt, Human
uagaggacaggggagaguuuug

SEQ ID NO: 424966 - RNA, 20 nt, Human
uauuccagacugccauccgc

SEQ ID NO: 424967 - RNA, 21 nt, Human
ucccaagggcugcggggccag

SEQ ID NO: 424968 - RNA, 25 nt, Human
ucccgaacagccacccccaguggcc

SEQ ID NO: 424969 - RNA, 19 nt, Human
ucucaggcagggaggacuc

SEQ ID NO: 424970 - RNA, 22 nt, Human
ugacuccagcccucuuuagccu

SEQ ID NO: 424971 - RNA, 18 nt, Human
ugagaaugaauuaacugg

SEQ ID NO: 424972 - RNA, 20 nt, Human
ugcacacucacauacaccca

SEQ ID NO: 424973 - RNA, 19 nt, Human
ugcgcuggggggcguggga

SEQ ID NO: 424974 - RNA, 23 nt, Human
ugcggggccaguggccucucagg

SEQ ID NO: 424975 - RNA, 18 nt, Human
ugggaggggcggccucgg

SEQ ID NO: 424976 - RNA, 22 nt, Human
ugggaucaggcuuuucugccag

SEQ ID NO: 424977 - RNA, 23 nt, Human
uucaucuccaucaucagagaggc

SEQ ID NO: 424978 - RNA, 21 nt, Human
uugcuguuuuugucccgugga

SEQ ID NO: 424979 - RNA, 21 nt, Human
uuucugccagcagcgagauga

SEQ ID NO: 424980 - RNA, 19 nt, Human
aaacuggaggcaagccagg

SEQ ID NO: 424981 - RNA, 22 nt, Human
aaagagcccccucagcaggugu

SEQ ID NO: 424982 - RNA, 23 nt, Human
aagcaaacuaaaggaccuaaaac

SEQ ID NO: 424983 - RNA, 24 nt, Human
aagggggaagagaaaugauaaaga

SEQ ID NO: 424984 - RNA, 20 nt, Human
acagguucuuccuucacuga

SEQ ID NO: 424985 - RNA, 21 nt, Human
agaaagcaccuuucagaagcu

SEQ ID NO: 424986 - RNA, 24 nt, Human
agaaaugauaaagaaccauucaua

SEQ ID NO: 424987 - RNA, 21 nt, Human
agcuguaguucucaauuauag

SEQ ID NO: 424988 - RNA, 18 nt, Human
aggcaggaagauggcuuu

SEQ ID NO: 424989 - RNA, 21 nt, Human
aggggcugagaggugcuuccu

SEQ ID NO: 424990 - RNA, 22 nt, Human
agggggaagagaaaugauaaag

SEQ ID NO: 424991 - RNA, 18 nt, Human
caaggaaaagggcaacag

SEQ ID NO: 424992 - RNA, 23 nt, Human
caccgcgcaccgcgcgccgcagc

SEQ ID NO: 424993 - RNA, 22 nt, Human
cagacaggcuucucugcuaucc

SEQ ID NO: 424994 - RNA, 21 nt, Human
cagcagguguucccguugcuu

SEQ ID NO: 424995 - RNA, 18 nt, Human
caggaagauggcuuuggg

SEQ ID NO: 424996 - RNA, 22 nt, Human
caguggcuggaugaaagcagau

SEQ ID NO: 424997 - RNA, 24 nt, Human
cccaagaaugguuuacaccaagca

SEQ ID NO: 424998 - RNA, 20 nt, Human
ccccucagcagguguucccg

SEQ ID NO: 424999 - RNA, 23 nt, Human
ccgcgcaccgcgcgccgcagccg

SEQ ID NO: 425000 - RNA, 18 nt, Human
ccgcgcgccgcagccgcc

SEQ ID NO: 425001 - RNA, 24 nt, Human
ccucagcagguguucccguugcuu

SEQ ID NO: 425002 - RNA, 20 nt, Human
ccuccaggcaguguaauagu

SEQ ID NO: 425003 - RNA, 19 nt, Human
cuccagacuacgcaccgcg

SEQ ID NO: 425004 - RNA, 21 nt, Human
cucugaggggcugagaggugc

SEQ ID NO: 425005 - RNA, 18 nt, Human
cugcuauccuccaggcag

SEQ ID NO: 425006 - RNA, 24 nt, Human
cuuugggcaguggcuggaugaaag

SEQ ID NO: 425007 - RNA, 22 nt, Human
gaagcaaacuaaaggaccuaaa

SEQ ID NO: 425008 - RNA, 18 nt, Human
gcuuggcucucugucuca

SEQ ID NO: 425009 - RNA, 21 nt, Human
gggaacccccguauccacagu

SEQ ID NO: 425010 - RNA, 19 nt, Human
guaguuuuaaauaaaugga

SEQ ID NO: 425011 - RNA, 26 nt, Human
uaaaacuggaggcaagccaggaugcc

SEQ ID NO: 425012 - RNA, 23 nt, Human
uaaaaguacaaucuuaaaagcug

SEQ ID NO: 425013 - RNA, 24 nt, Human
uaagacuaggggcuugguauauau

SEQ ID NO: 425014 - RNA, 19 nt, Human
uaauaugucucaauaccuu

SEQ ID NO: 425015 - RNA, 18 nt, Human
uaccacauuagcuuggcu

SEQ ID NO: 425016 - RNA, 18 nt, Human
uaccugggggucaucuau

SEQ ID NO: 425017 - RNA, 22 nt, Human
uaccugggggucaucuaugaga

SEQ ID NO: 425018 - RNA, 19 nt, Human
uagcaggaaaaaauuccau

SEQ ID NO: 425019 - RNA, 18 nt, Human
ucaaaagacaauaccugg

SEQ ID NO: 425020 - RNA, 21 nt, Human
ucacuguaagcauccaguagg

SEQ ID NO: 425021 - RNA, 24 nt, Human
ucacuguaagcauccaguaggcag

SEQ ID NO: 425022 - RNA, 18 nt, Human
ucaucuucuacagguucu

SEQ ID NO: 425023 - RNA, 20 nt, Human
ucccaagaaugguuuacacc

SEQ ID NO: 425024 - RNA, 20 nt, Human
uccggaacgaggucaucuuc

SEQ ID NO: 425025 - RNA, 26 nt, Human
ugaaguacagacaggcuucucugcua

SEQ ID NO: 425026 - RNA, 22 nt, Human
ugagacaaugaauucaggguga

SEQ ID NO: 425027 - RNA, 18 nt, Human
ugagauacccagcuccgg

SEQ ID NO: 425028 - RNA, 19 nt, Human
ugaggggcugagaggugcu

SEQ ID NO: 425029 - RNA, 22 nt, Human
uggagaaagcaccuuucagaag

SEQ ID NO: 425030 - RNA, 18 nt, Human
uggcaaaaguguccuccc

SEQ ID NO: 425031 - RNA, 24 nt, Human
uucaagacauuugucuaaugaccc

SEQ ID NO: 425032 - RNA, 23 nt, Human
uucauaaauuccaugucuacuuc

SEQ ID NO: 425033 - RNA, 22 nt, Human
uucucugcuauccuccaggcag

SEQ ID NO: 425034 - RNA, 23 nt, Human
uugcauuguaccuuuuaauugca

SEQ ID NO: 425035 - RNA, 25 nt, Human
uugcauuguaccuuuuaauugcaug

SEQ ID NO: 425036 - RNA, 20 nt, Human
uuucuauaauuucacaaaag

SEQ ID NO: 425037 - RNA, 25 nt, Human
uuuugaaugaaguacagacaggcuu

SEQ ID NO: 425038 - RNA, 19 nt, Human
uuuuuuuuuuuuuuuugca

SEQ ID NO: 425039 - RNA, 18 nt, Human
uuuuuuuuuuuuuuuuug

SEQ ID NO: 425040 - RNA, 19 nt, Human
uuuuuuuuuuuuuuuuugc

SEQ ID NO: 425041 - RNA, 21 nt, Human
aagcuggacucuaagagagau

SEQ ID NO: 425042 - RNA, 19 nt, Human
aaggguauugauuuuuacu

SEQ ID NO: 425043 - RNA, 19 nt, Human
aauaaaguuucuuuauacc

SEQ ID NO: 425044 - RNA, 22 nt, Human
aauaggacaccaaaauaaaaca

SEQ ID NO: 425045 - RNA, 22 nt, Human
acucuaagagagauugauauag

SEQ ID NO: 425046 - RNA, 21 nt, Human
agcguguaaagugaaaugagc

SEQ ID NO: 425047 - RNA, 19 nt, Human
agugaauacagaagacauu

SEQ ID NO: 425048 - RNA, 18 nt, Human
auaaaguuucuuuauacc

SEQ ID NO: 425049 - RNA, 26 nt, Human
auaggacaccaaaauaaaacacaaag

SEQ ID NO: 425050 - RNA, 26 nt, Human
augauaacuagcguaauggcaaauac

SEQ ID NO: 425051 - RNA, 19 nt, Human
augguuaccaucaaagaga

SEQ ID NO: 425052 - RNA, 23 nt, Human
caaggucagaaaucaaacaacaa

SEQ ID NO: 425053 - RNA, 24 nt, Human
cagaaugggaacccagugaagacu

SEQ ID NO: 425054 - RNA, 25 nt, Human
cauuuuauuccuuuaauaggacacc

SEQ ID NO: 425055 - RNA, 19 nt, Human
cccucagaaugggaaccca

SEQ ID NO: 425056 - RNA, 24 nt, Human
cucagaaugggaacccagugaaga

SEQ ID NO: 425057 - RNA, 21 nt, Human
ggacaccaaaauaaaacacaa

SEQ ID NO: 425058 - RNA, 20 nt, Human
uauugcaugggucagcauuu

SEQ ID NO: 425059 - RNA, 24 nt, Human
ucagaaaucaaacaacaaugauac

SEQ ID NO: 425060 - RNA, 24 nt, Human
ugaaaugagcuggcuggcuggaga

SEQ ID NO: 425061 - RNA, 23 nt, Human
ugagcauuuaauuaaaaguuuac

SEQ ID NO: 425062 - RNA, 20 nt, Human
ugagcuggcuggcuggagac

SEQ ID NO: 425063 - RNA, 23 nt, Human
ugaggaaauauugcaugggucaa

SEQ ID NO: 425064 - RNA, 18 nt, Human
ugaguauaaacucagucc

SEQ ID NO: 425065 - RNA, 19 nt, Human
ugcaaauugugaucacauu

SEQ ID NO: 425066 - RNA, 19 nt, Human
ugcaugggucagcauuugg

SEQ ID NO: 425067 - RNA, 19 nt, Human
uggcuggagacggacaggg

SEQ ID NO: 425068 - RNA, 18 nt, Human
uguaaagugaaaugagcu

SEQ ID NO: 425069 - RNA, 21 nt, Human
uguguaaagaaccauuacaag

SEQ ID NO: 425070 - RNA, 22 nt, Human
uugcuaaugggacaaaaaaggg

SEQ ID NO: 425071 - RNA, 21 nt, Human
aagcccaaaggcagcacaaga

SEQ ID NO: 425072 - RNA, 21 nt, Human
acaggucugucauucugugac

SEQ ID NO: 425073 - RNA, 19 nt, Human
agacagaaaaugauccuaa

SEQ ID NO: 425074 - RNA, 18 nt, Human
agguugggguccccgaac

SEQ ID NO: 425075 - RNA, 21 nt, Human
aguaaguggggaauagcacaa

SEQ ID NO: 425076 - RNA, 21 nt, Human
augauuaaaacagaccggggc

SEQ ID NO: 425077 - RNA, 19 nt, Human
cagcacaagaagacucugc

SEQ ID NO: 425078 - RNA, 19 nt, Human
ccccgaacuccagguaccu

SEQ ID NO: 425079 - RNA, 24 nt, Human
ccccgaacuccagguaccucacuc

SEQ ID NO: 425080 - RNA, 19 nt, Human
ccuccugcuccauggaagc

SEQ ID NO: 425081 - RNA, 23 nt, Human
cgaacuccagguaccucacuccu

SEQ ID NO: 425082 - RNA, 21 nt, Human
cugugguauguuccuccugcu

SEQ ID NO: 425083 - RNA, 23 nt, Human
guuuugaauuugcuuaucauugu

SEQ ID NO: 425084 - RNA, 22 nt, Human
uaaaacagacagaaaaugaucc

SEQ ID NO: 425085 - RNA, 24 nt, Human
uaagagacacuggcagguaguuau

SEQ ID NO: 425086 - RNA, 22 nt, Human
uaggcauaacaguuuugaauuu

SEQ ID NO: 425087 - RNA, 19 nt, Human
uauuccagauacaugauua

SEQ ID NO: 425088 - RNA, 25 nt, Human
uggaagcccaaaggcagcacaagaa

SEQ ID NO: 425089 - RNA, 20 nt, Human
ugucauucugugacuuuaau

SEQ ID NO: 425090 - RNA, 19 nt, Human
ugucuuccaaaucccaucu

SEQ ID NO: 425091 - RNA, 23 nt, Human
ugugacuuuaauagauccauguu

SEQ ID NO: 425092 - RNA, 20 nt, Human
uguucugugguauguuccuc

SEQ ID NO: 425093 - RNA, 25 nt, Human
uuccaaaucccaucuugacaaauca

SEQ ID NO: 425094 - RNA, 21 nt, Human
uuuuuuuuuuuuuuuuugagg

SEQ ID NO: 425095 - RNA, 20 nt, Human
aaaaaauaaaaauaaccugc

SEQ ID NO: 425096 - RNA, 24 nt, Human
aaaaugaucuacugccuggacacc

SEQ ID NO: 425097 - RNA, 21 nt, Human
aaaauuccagggcuuucaugg

SEQ ID NO: 425098 - RNA, 26 nt, Human
aaacucacauccaaauaaugccuuga

SEQ ID NO: 425099 - RNA, 20 nt, Human
aacaugccuagucaguggga

SEQ ID NO: 425100 - RNA, 23 nt, Human
aaccaaacuugaacagcccuccc

SEQ ID NO: 425101 - RNA, 25 nt, Human
aaccuaaugaaucuaaccaguacaa

SEQ ID NO: 425102 - RNA, 19 nt, Human
aacuugucagugaaaaggc

SEQ ID NO: 425103 - RNA, 19 nt, Human
aagaaaugcuguauuugac

SEQ ID NO: 425104 - RNA, 28 nt, Human
aagaauauauacugcuuucuugaccucc

SEQ ID NO: 425105 - RNA, 20 nt, Human
aagcagucaacgaaagcuca

SEQ ID NO: 425106 - RNA, 18 nt, Human
aaggcuggaaaaaaccag

SEQ ID NO: 425107 - RNA, 20 nt, Human
aaugacacuacuuauuucuu

SEQ ID NO: 425108 - RNA, 21 nt, Human
acaaaaaagcccuaaugagau

SEQ ID NO: 425109 - RNA, 21 nt, Human
acacauuuuaacuccaaacac

SEQ ID NO: 425110 - RNA, 22 nt, Human
acacccccacaaaguuaaacca

SEQ ID NO: 425111 - RNA, 20 nt, Human
acccuaguaaucuuuuuugg

SEQ ID NO: 425112 - RNA, 22 nt, Human
acucccaaggccugagcugaag

SEQ ID NO: 425113 - RNA, 18 nt, Human
acucuauuccuugaaaua

SEQ ID NO: 425114 - RNA, 21 nt, Human
agaaagaaaguacugacaccc

SEQ ID NO: 425115 - RNA, 20 nt, Human
agaagaacacaacaugguua

SEQ ID NO: 425116 - RNA, 21 nt, Human
agagguuuuccuggcuucuuc

SEQ ID NO: 425117 - RNA, 20 nt, Human
agcccuaaugagaugaaaau

SEQ ID NO: 425118 - RNA, 26 nt, Human
aggaagaaacaaaaaaugagggaccc

SEQ ID NO: 425119 - RNA, 20 nt, Human
aggaagucuaaacauguuug

SEQ ID NO: 425120 - RNA, 21 nt, Human
agggugucagaggauacaacu

SEQ ID NO: 425121 - RNA, 24 nt, Human
auaaaugugugaagugggcuuugg

SEQ ID NO: 425122 - RNA, 20 nt, Human
auagugcaagugguaaguga

SEQ ID NO: 425123 - RNA, 21 nt, Human
auuugaucuuucugauaaccu

SEQ ID NO: 425124 - RNA, 18 nt, Human
caaaaaccaaacuugaac

SEQ ID NO: 425125 - RNA, 23 nt, Human
caaagcaccaagaaauuuaaaaa

SEQ ID NO: 425126 - RNA, 22 nt, Human
caaagucuccaaaucuaggccc

SEQ ID NO: 425127 - RNA, 27 nt, Human
caaauuaacucacaauuaugccaaguc

SEQ ID NO: 425128 - RNA, 20 nt, Human
caaggcuggaaaaaaccagu

SEQ ID NO: 425129 - RNA, 19 nt, Human
caauaggacaaccuagcuc

SEQ ID NO: 425130 - RNA, 25 nt, Human
cacacagaaagaaaguacugacacc

SEQ ID NO: 425131 - RNA, 19 nt, Human
cacauccaaauaaugccuu

SEQ ID NO: 425132 - RNA, 19 nt, Human
caccccuccugauccagaa

SEQ ID NO: 425133 - RNA, 19 nt, Human
caccccuccugauccagaa

SEQ ID NO: 425134 - RNA, 18 nt, Human
caccugaacugggugaga

SEQ ID NO: 425135 - RNA, 20 nt, Human
cagaaagaaaguacugacac

SEQ ID NO: 425136 - RNA, 19 nt, Human
caggacagcucuuggguga

SEQ ID NO: 425137 - RNA, 22 nt, Human
cauacacucauaaccauagcac

SEQ ID NO: 425138 - RNA, 22 nt, Human
caucaacgacugcagagaagca

SEQ ID NO: 425139 - RNA, 22 nt, Human
cauggcuuauguuuucaccccg

SEQ ID NO: 425140 - RNA, 22 nt, Human
ccacacagaaagaaaguacuga

SEQ ID NO: 425141 - RNA, 22 nt, Human
ccauuugccacugcagagccuc

SEQ ID NO: 425142 - RNA, 18 nt, Human
cccacaaaguuaaaccac

SEQ ID NO: 425143 - RNA, 21 nt, Human
cccacaaaguuaaaccacaaa

SEQ ID NO: 425144 - RNA, 21 nt, Human
cccacaccucacucccaaggc

SEQ ID NO: 425145 - RNA, 22 nt, Human
cccccacaaaguuaaaccacaa

SEQ ID NO: 425146 - RNA, 18 nt, Human
cuaaggaacaaagucucc

SEQ ID NO: 425147 - RNA, 24 nt, Human
cuacugccuggacacccccacaaa

SEQ ID NO: 425148 - RNA, 23 nt, Human
cucauaaccauagcacuaauguu

SEQ ID NO: 425149 - RNA, 20 nt, Human
cucuacacugggcugucucc

SEQ ID NO: 425150 - RNA, 23 nt, Human
cugaaaaacacauuuuaacucca

SEQ ID NO: 425151 - RNA, 21 nt, Human
cugccuggacacccccacaaa

SEQ ID NO: 425152 - RNA, 21 nt, Human
cugugcucugagaccuugggu

SEQ ID NO: 425153 - RNA, 23 nt, Human
cuguggcggcggcggccguugcc

SEQ ID NO: 425154 - RNA, 21 nt, Human
cuucagguuacccaaaccagc

SEQ ID NO: 425155 - RNA, 21 nt, Human
cuugaaucaauuagagacagc

SEQ ID NO: 425156 - RNA, 21 nt, Human
gaacagguaagccccucuccu

SEQ ID NO: 425157 - RNA, 26 nt, Human
gaacauuaaagggugucagaggauac

SEQ ID NO: 425158 - RNA, 18 nt, Human
gaagacauacuucacccc

SEQ ID NO: 425159 - RNA, 21 nt, Human
gaagugccaaucucuacacug

SEQ ID NO: 425160 - RNA, 21 nt, Human
gcucaccggggacggacgcag

SEQ ID NO: 425161 - RNA, 18 nt, Human
ggaauggggaggcaggag

SEQ ID NO: 425162 - RNA, 24 nt, Human
ggcuuugggugucggacaaaccag

SEQ ID NO: 425163 - RNA, 21 nt, Human
guggaucccuauuccauaugg

SEQ ID NO: 425164 - RNA, 28 nt, Human
guggcggcggcggccguugacgacggcg

SEQ ID NO: 425165 - RNA, 32 nt, Human
guggcggcggcuguguggcuguggcggcgacg

SEQ ID NO: 425166 - RNA, 20 nt, Human
guggcuguggcggcggcggc

SEQ ID NO: 425167 - RNA, 21 nt, Human
guguggcuguggcggcggcga

SEQ ID NO: 425168 - RNA, 24 nt, Human
guuacccaaaccagcagucuggaa

SEQ ID NO: 425169 - RNA, 24 nt, Human
uaaaacugacaaaauacccaaaug

SEQ ID NO: 425170 - RNA, 19 nt, Human
uaaaaugguccugacaggc

SEQ ID NO: 425171 - RNA, 19 nt, Human
uaacaugccuagucagugg

SEQ ID NO: 425172 - RNA, 22 nt, Human
uaaccaagguaacucuucuaaa

SEQ ID NO: 425173 - RNA, 18 nt, Human
uaacgaguaucaaaccca

SEQ ID NO: 425174 - RNA, 23 nt, Human
uaacuugucagugaaaaggccag

SEQ ID NO: 425175 - RNA, 25 nt, Human
uaacuugucagugaaaaggccagua

SEQ ID NO: 425176 - RNA, 20 nt, Human
uacaaggagaaauugaaaaa

SEQ ID NO: 425177 - RNA, 22 nt, Human
uacacucauaaccauagcacua

SEQ ID NO: 425178 - RNA, 20 nt, Human
uacaugaagagugcauggaa

SEQ ID NO: 425179 - RNA, 21 nt, Human
uacucccacaccucacuccca

SEQ ID NO: 425180 - RNA, 23 nt, Human
uacuucacccccauccagccaaa

SEQ ID NO: 425181 - RNA, 23 nt, Human
uagugcaagugguaagugaugug

SEQ ID NO: 425182 - RNA, 21 nt, Human
uaucaaagaaucacaacuuuc

SEQ ID NO: 425183 - RNA, 22 nt, Human
uaugcacauaugugauuacaug

SEQ ID NO: 425184 - RNA, 23 nt, Human
uaugcacauaugugauuacauga

SEQ ID NO: 425185 - RNA, 19 nt, Human
ucaaaugagaaaaaccaaa

SEQ ID NO: 425186 - RNA, 23 nt, Human
ucaaguugcucaccuaucuucua

SEQ ID NO: 425187 - RNA, 20 nt, Human
ucaguuggagcaacuauccu

SEQ ID NO: 425188 - RNA, 22 nt, Human
ucauucaaccuaaugaaucuaa

SEQ ID NO: 425189 - RNA, 21 nt, Human
ucccaaggccugagcugaagg

SEQ ID NO: 425190 - RNA, 20 nt, Human
ucccacaccucacucccaag

SEQ ID NO: 425191 - RNA, 23 nt, Human
ucgcauauccacucaggaacuca

SEQ ID NO: 425192 - RNA, 22 nt, Human
ucuuuaucaaauuaacucacaa

SEQ ID NO: 425193 - RNA, 24 nt, Human
ugaaaaacacauuuuaacuccaaa

SEQ ID NO: 425194 - RNA, 23 nt, Human
ugaaaagauuaaacucacaucca

SEQ ID NO: 425195 - RNA, 20 nt, Human
ugaaaagggagcgcuauugc

SEQ ID NO: 425196 - RNA, 19 nt, Human
ugaaacaaauagggucucc

SEQ ID NO: 425197 - RNA, 19 nt, Human
ugaaacaaauagggucucc

SEQ ID NO: 425198 - RNA, 25 nt, Human
ugacaaaauacccaaaugaguuacc

SEQ ID NO: 425199 - RNA, 18 nt, Human
ugacuaaagaauggccuu

SEQ ID NO: 425200 - RNA, 22 nt, Human
ugacuaaagaauggccuuacag

SEQ ID NO: 425201 - RNA, 22 nt, Human
ugagaggaagucuaaacauguu

SEQ ID NO: 425202 - RNA, 20 nt, Human
ugcagugugaacuguaauuu

SEQ ID NO: 425203 - RNA, 23 nt, Human
ugcauuccaugaaagacaaaaau

SEQ ID NO: 425204 - RNA, 19 nt, Human
uggcaaaacccuaguaauu

SEQ ID NO: 425205 - RNA, 22 nt, Human
uggcacuagaucuacgcauuuu

SEQ ID NO: 425206 - RNA, 22 nt, Human
uggcggcggcuguguggcugug

SEQ ID NO: 425207 - RNA, 23 nt, Human
uggcggcggcuguguggcugugg

SEQ ID NO: 425208 - RNA, 22 nt, Human
uggcuauguacaaaaaagcccu

SEQ ID NO: 425209 - RNA, 22 nt, Human
uggcuguggcggcggcggccgu

SEQ ID NO: 425210 - RNA, 21 nt, Human
ugggaucacucaaguugcuca

SEQ ID NO: 425211 - RNA, 21 nt, Human
ugggauguaauuaauuagaca

SEQ ID NO: 425212 - RNA, 23 nt, Human
ugggugagagauuucuguggggu

SEQ ID NO: 425213 - RNA, 18 nt, Human
ugguagugaggaaaacuc

SEQ ID NO: 425214 - RNA, 23 nt, Human
ugguuuguuuuaugccaauagga

SEQ ID NO: 425215 - RNA, 19 nt, Human
ugugaagugggcuuugggu

SEQ ID NO: 425216 - RNA, 18 nt, Human
ugugcucugagaccuugg

SEQ ID NO: 425217 - RNA, 21 nt, Human
uguguaucuaugcacauaugu

SEQ ID NO: 425218 - RNA, 22 nt, Human
uguguaucuaugcacauaugug

SEQ ID NO: 425219 - RNA, 20 nt, Human
uuaaaaacauuuucaaagca

SEQ ID NO: 425220 - RNA, 25 nt, Human
uuaucaaauuaacucacaauuaugc

SEQ ID NO: 425221 - RNA, 22 nt, Human
uucacccccauccagccaaaug

SEQ ID NO: 425222 - RNA, 18 nt, Human
uuccaaagaaaugcugua

SEQ ID NO: 425223 - RNA, 18 nt, Human
uugaacagcccucccuga

SEQ ID NO: 425224 - RNA, 19 nt, Human
uugccacugcagagccuca

SEQ ID NO: 425225 - RNA, 25 nt, Human
uuggucaccaggacagcucuugggu

SEQ ID NO: 425226 - RNA, 18 nt, Human
uuguagguuaacagagaa

SEQ ID NO: 425227 - RNA, 23 nt, Human
uuuaauauauauuuucccauuua

SEQ ID NO: 425228 - RNA, 22 nt, Human
uuuaaugguagaaauaauggca

SEQ ID NO: 425229 - RNA, 18 nt, Human
uuuccuggcuucuuccca

SEQ ID NO: 425230 - RNA, 18 nt, Human
uuuguaaauuucucagac

SEQ ID NO: 425231 - RNA, 23 nt, Human
uuuuauucaaagucauauauuuu

SEQ ID NO: 425232 - RNA, 19 nt, Human
aacuguguuuuagacucug

SEQ ID NO: 425233 - RNA, 22 nt, Human
aacuguguuuuagacucuggug

SEQ ID NO: 425234 - RNA, 18 nt, Human
aauggccacuuucucuuu

SEQ ID NO: 425235 - RNA, 21 nt, Human
acagugcuucuggaugauuuu

SEQ ID NO: 425236 - RNA, 20 nt, Human
acuguguuuuagacucuggu

SEQ ID NO: 425237 - RNA, 20 nt, Human
agaaaaaaaaagauuuguua

SEQ ID NO: 425238 - RNA, 19 nt, Human
agaaacuaaauaucaauau

SEQ ID NO: 425239 - RNA, 19 nt, Human
agaaacuaaauaucaauau

SEQ ID NO: 425240 - RNA, 22 nt, Human
agaacaaauaaaauugcgugaa

SEQ ID NO: 425241 - RNA, 21 nt, Human
aggaaauuacgguguaaaaua

SEQ ID NO: 425242 - RNA, 19 nt, Human
auacugacagaagcggagc

SEQ ID NO: 425243 - RNA, 19 nt, Human
auacugacagaagcggagc

SEQ ID NO: 425244 - RNA, 19 nt, Human
auaggaggugaaugcaaua

SEQ ID NO: 425245 - RNA, 24 nt, Human
auguauauacacauucccuuaaaa

SEQ ID NO: 425246 - RNA, 20 nt, Human
auuauuaucacauuuucuaa

SEQ ID NO: 425247 - RNA, 18 nt, Human
cacaauaucacagugcuu

SEQ ID NO: 425248 - RNA, 18 nt, Human
cacaauaucacagugcuu

SEQ ID NO: 425249 - RNA, 23 nt, Human
cacaauaucacagugcuucugga

SEQ ID NO: 425250 - RNA, 23 nt, Human
cacaauaucacagugcuucugga

SEQ ID NO: 425251 - RNA, 21 nt, Human
cacacucagccucuuuacucu

SEQ ID NO: 425252 - RNA, 21 nt, Human
cacacucagccucuuuacucu

SEQ ID NO: 425253 - RNA, 19 nt, Human
caccuagaaagaagucuca

SEQ ID NO: 425254 - RNA, 22 nt, Human
caccuccuucggaaaauaauuu

SEQ ID NO: 425255 - RNA, 23 nt, Human
caccuccuucggaaaauaauuua

SEQ ID NO: 425256 - RNA, 24 nt, Human
cacuucgguaaaacguucccucca

SEQ ID NO: 425257 - RNA, 24 nt, Human
cacuucgguaaaacguucccucca

SEQ ID NO: 425258 - RNA, 22 nt, Human
cccaacccaccuccuucggaaa

SEQ ID NO: 425259 - RNA, 26 nt, Human
ccuucggaaaauaauuuacauacaaa

SEQ ID NO: 425260 - RNA, 23 nt, Human
cuagagaagcagaaaaauuaaaa

SEQ ID NO: 425261 - RNA, 22 nt, Human
cuccuggcaauacuuugcccga

SEQ ID NO: 425262 - RNA, 22 nt, Human
cuccuggcaauacuuugcccga

SEQ ID NO: 425263 - RNA, 24 nt, Human
cuuaaaauaaaauaacuggaacuc

SEQ ID NO: 425264 - RNA, 25 nt, Human
ggagcuuaaagccaaaggcuaauag

SEQ ID NO: 425265 - RNA, 25 nt, Human
ggagcuuaaagccaaaggcuaauag

SEQ ID NO: 425266 - RNA, 21 nt, Human
gguacuagagaagcagaaaaa

SEQ ID NO: 425267 - RNA, 23 nt, Human
uaagugauuugugugggcauguu

SEQ ID NO: 425268 - RNA, 21 nt, Human
uagaaacuacuuccaagguuu

SEQ ID NO: 425269 - RNA, 21 nt, Human
uagaaacuacuuccaagguuu

SEQ ID NO: 425270 - RNA, 18 nt, Human
uaggaggugaaugcaaua

SEQ ID NO: 425271 - RNA, 25 nt, Human
uauaaaauaaagaauaagugaauac

SEQ ID NO: 425272 - RNA, 18 nt, Human
uauaaauguauauacaca

SEQ ID NO: 425273 - RNA, 21 nt, Human
uauaugcaugcaaaacauaua

SEQ ID NO: 425274 - RNA, 22 nt, Human
ucaaguaaauucuggaagugga

SEQ ID NO: 425275 - RNA, 27 nt, Human
ucaauuaagaacaaauaaaauugcgug

SEQ ID NO: 425276 - RNA, 18 nt, Human
ucacaacacuucgguaaa

SEQ ID NO: 425277 - RNA, 18 nt, Human
ucacaacacuucgguaaa

SEQ ID NO: 425278 - RNA, 18 nt, Human
ucucccaacccaccuccu

SEQ ID NO: 425279 - RNA, 23 nt, Human
ucuccuggcaauacuuugcccga

SEQ ID NO: 425280 - RNA, 23 nt, Human
ucuccuggcaauacuuugcccga

SEQ ID NO: 425281 - RNA, 23 nt, Human
ucuccuggcaauacuuugcccga

SEQ ID NO: 425282 - RNA, 23 nt, Human
ucuccuggcaauacuuugcccga

SEQ ID NO: 425283 - RNA, 28 nt, Human
ugaacuacacggcaauuauugagucaca

SEQ ID NO: 425284 - RNA, 28 nt, Human
ugaacuacacggcaauuauugagucaca

SEQ ID NO: 425285 - RNA, 25 nt, Human
ugaauacacacauacacaaauuuau

SEQ ID NO: 425286 - RNA, 18 nt, Human
ugacagcaccuagaaaga

SEQ ID NO: 425287 - RNA, 19 nt, Human
ugagugauaguaauuccuc

SEQ ID NO: 425288 - RNA, 19 nt, Human
ugagugauaguaauuccuc

SEQ ID NO: 425289 - RNA, 29 nt, Human
uggcaauacuuugcccgaccaccuugguu

SEQ ID NO: 425290 - RNA, 29 nt, Human
uggcaauacuuugcccgaccaccuugguu

SEQ ID NO: 425291 - RNA, 19 nt, Human
ugugugauggaauacaagg

SEQ ID NO: 425292 - RNA, 22 nt, Human
ugugugauggaauacaagguac

SEQ ID NO: 425293 - RNA, 25 nt, Human
uuaaaauaaaauaacuggaacucau

SEQ ID NO: 425294 - RNA, 21 nt, Human
uucgguaaaacguucccucca

SEQ ID NO: 425295 - RNA, 21 nt, Human
uucgguaaaacguucccucca

SEQ ID NO: 425296 - RNA, 22 nt, Human
uugaaaauauccuacccuucuc

SEQ ID NO: 425297 - RNA, 22 nt, Human
uugaaaauauccuacccuucuc

SEQ ID NO: 425298 - RNA, 23 nt, Human
uugaaaauauccuacccuucucc

SEQ ID NO: 425299 - RNA, 23 nt, Human
uugaaaauauccuacccuucucc

SEQ ID NO: 425300 - RNA, 21 nt, Human
uugcccgaccaccuugguugc

SEQ ID NO: 425301 - RNA, 21 nt, Human
uugcccgaccaccuugguugc

SEQ ID NO: 425302 - RNA, 26 nt, Human
uuuagacucuggugauaacaggaaau

SEQ ID NO: 425303 - RNA, 23 nt, Human
uuugcccgaccaccuugguugca

SEQ ID NO: 425304 - RNA, 23 nt, Human
uuugcccgaccaccuugguugca

SEQ ID NO: 425305 - RNA, 21 nt, Human
uuuuuguuuguguguacuuag

SEQ ID NO: 425306 - RNA, 24 nt, Human
aaaaacacaugacuagaaccuggg

SEQ ID NO: 425307 - RNA, 21 nt, Human
acacaaccaggccaggugacc

SEQ ID NO: 425308 - RNA, 24 nt, Human
acccuuuucccucuaccccaaucu

SEQ ID NO: 425309 - RNA, 23 nt, Human
auuacuuauacaaggguuucauu

SEQ ID NO: 425310 - RNA, 22 nt, Human
cacagacaugacauugugcaca

SEQ ID NO: 425311 - RNA, 22 nt, Human
cagaaaucguccuaaaaaacac

SEQ ID NO: 425312 - RNA, 21 nt, Human
cagcaguaguuccccacuguu

SEQ ID NO: 425313 - RNA, 19 nt, Human
caucucuguuguaagaagg

SEQ ID NO: 425314 - RNA, 19 nt, Human
ccaccaucguggagacaga

SEQ ID NO: 425315 - RNA, 23 nt, Human
ccaguucagccuuuguugaaccc

SEQ ID NO: 425316 - RNA, 20 nt, Human
gaacccuuuucccucuaccc

SEQ ID NO: 425317 - RNA, 25 nt, Human
gaccuaccacuucugcaccuacucu

SEQ ID NO: 425318 - RNA, 18 nt, Human
uaaaacaggucacugaac

SEQ ID NO: 425319 - RNA, 23 nt, Human
uagcugaccuaccacuucugcac

SEQ ID NO: 425320 - RNA, 21 nt, Human
ucugcaccuacucuagcacuc

SEQ ID NO: 425321 - RNA, 24 nt, Human
ucuggcccacuccgaggaccuagc

SEQ ID NO: 425322 - RNA, 19 nt, Human
ugacauugugcacacaacc

SEQ ID NO: 425323 - RNA, 20 nt, Human
ugccuugguaucuuguccuc

SEQ ID NO: 425324 - RNA, 22 nt, Human
ugccuugguaucuuguccucaa

SEQ ID NO: 425325 - RNA, 22 nt, Human
uguugcuuuuuuuuuugaauuu

SEQ ID NO: 425326 - RNA, 21 nt, Human
aaagaacaggucuaggaggca

SEQ ID NO: 425327 - RNA, 24 nt, Human
aacuagaucccagcagaugaccug

SEQ ID NO: 425328 - RNA, 21 nt, Human
acugauguuucuaaagaugga

SEQ ID NO: 425329 - RNA, 19 nt, Human
agcagaugaccuguacuuc

SEQ ID NO: 425330 - RNA, 26 nt, Human
agcuuggccucgucuccccugacccc

SEQ ID NO: 425331 - RNA, 19 nt, Human
agggugagugggcuuuggu

SEQ ID NO: 425332 - RNA, 19 nt, Human
agguguggggccuguagug

SEQ ID NO: 425333 - RNA, 21 nt, Human
agugaacuugucggacagaug

SEQ ID NO: 425334 - RNA, 18 nt, Human
caaagaggcagugagggc

SEQ ID NO: 425335 - RNA, 24 nt, Human
caccaccauccagaaaucucccgg

SEQ ID NO: 425336 - RNA, 19 nt, Human
caccauccagaaaucuccc

SEQ ID NO: 425337 - RNA, 19 nt, Human
cagcagagaagcccccacc

SEQ ID NO: 425338 - RNA, 18 nt, Human
cagcuuggccucgucucc

SEQ ID NO: 425339 - RNA, 23 nt, Human
ccaccaggggcugggcaugccca

SEQ ID NO: 425340 - RNA, 19 nt, Human
ccagcagaugaccuguacu

SEQ ID NO: 425341 - RNA, 26 nt, Human
ccagcagaugaccuguacuguaauga

SEQ ID NO: 425342 - RNA, 20 nt, Human
ccagcagaugaccuguacuu

SEQ ID NO: 425343 - RNA, 26 nt, Human
ccauccagaaaucucccgguggcuuc

SEQ ID NO: 425344 - RNA, 22 nt, Human
ccccaccaccaggggcugggca

SEQ ID NO: 425345 - RNA, 25 nt, Human
ccuacugcaaagaggcagugagggc

SEQ ID NO: 425346 - RNA, 23 nt, Human
ccugaccccgccuccgugcaugc

SEQ ID NO: 425347 - RNA, 19 nt, Human
ccugcagcaccuccucagc

SEQ ID NO: 425348 - RNA, 22 nt, Human
ccuguaguggggcagcagcaac

SEQ ID NO: 425349 - RNA, 18 nt, Human
cgggaccugcagcaccuc

SEQ ID NO: 425350 - RNA, 24 nt, Human
cgugcaugcugccucaguuugccu

SEQ ID NO: 425351 - RNA, 18 nt, Human
cucagcagagaagccccc

SEQ ID NO: 425352 - RNA, 26 nt, Human
cucagcuuggccucgucuccccugac

SEQ ID NO: 425353 - RNA, 22 nt, Human
cugaccccgccuccgugcaugc

SEQ ID NO: 425354 - RNA, 19 nt, Human
cuuggccucgucuccccug

SEQ ID NO: 425355 - RNA, 23 nt, Human
gcaaaguguucuguagcucaaag

SEQ ID NO: 425356 - RNA, 21 nt, Human
gcagagaagcccccaccacca

SEQ ID NO: 425357 - RNA, 19 nt, Human
gcagcaacuggugggugcc

SEQ ID NO: 425358 - RNA, 19 nt, Human
gcccagggcaggugugggg

SEQ ID NO: 425359 - RNA, 21 nt, Human
ggcaugcccagggcaggugug

SEQ ID NO: 425360 - RNA, 22 nt, Human
gggaagguaaguggccugcaga

SEQ ID NO: 425361 - RNA, 18 nt, Human
gggcagcagcaacuggug

SEQ ID NO: 425362 - RNA, 22 nt, Human
gggcagcagcaacuggugggug

SEQ ID NO: 425363 - RNA, 18 nt, Human
guggggcagcagcaacug

SEQ ID NO: 425364 - RNA, 23 nt, Human
uaucuaguaaugaauacaaucua

SEQ ID NO: 425365 - RNA, 22 nt, Human
uccgcaaccgaggcgagugaac

SEQ ID NO: 425366 - RNA, 18 nt, Human
ugaaucugacaagggcug

SEQ ID NO: 425367 - RNA, 19 nt, Human
ugcaccaccauccagaaau

SEQ ID NO: 425368 - RNA, 19 nt, Human
ugcaccaccauccagaaau

SEQ ID NO: 425369 - RNA, 21 nt, Human
ugcaccaccauccagaaaucu

SEQ ID NO: 425370 - RNA, 18 nt, Human
ugcccagggcaggugugg

SEQ ID NO: 425371 - RNA, 24 nt, Human
uggaaagaacaggucuaggaggca

SEQ ID NO: 425372 - RNA, 28 nt, Human
uggccugcagagaaaugguccuaggucc

SEQ ID NO: 425373 - RNA, 22 nt, Human
uggggcagcagcaacugguggg

SEQ ID NO: 425374 - RNA, 23 nt, Human
uggggcagcagcaacuggugggu

SEQ ID NO: 425375 - RNA, 19 nt, Human
ugguccuagguccgcaacc

SEQ ID NO: 425376 - RNA, 19 nt, Human
uucacccugggugaaucug

SEQ ID NO: 425377 - RNA, 19 nt, Human
uucuaaagauggaaagaac

SEQ ID NO: 425378 - RNA, 20 nt, Human
acccuuacucgcgguggcuu

SEQ ID NO: 425379 - RNA, 18 nt, Human
accuggaacaugaccauc

SEQ ID NO: 425380 - RNA, 22 nt, Human
agaaggaaaggaaaggggaaag

SEQ ID NO: 425381 - RNA, 21 nt, Human
agggaagaaggaaaggaaagg

SEQ ID NO: 425382 - RNA, 19 nt, Human
agguagggaagaaggaaag

SEQ ID NO: 425383 - RNA, 24 nt, Human
aucacuggccaaagaagucggggc

SEQ ID NO: 425384 - RNA, 22 nt, Human
aucuuccuuucaccaaguguuc

SEQ ID NO: 425385 - RNA, 20 nt, Human
caaaaacaaaaccggggagg

SEQ ID NO: 425386 - RNA, 19 nt, Human
caauaaaauaucaaagagg

SEQ ID NO: 425387 - RNA, 19 nt, Human
caccaaguguucaacuuug

SEQ ID NO: 425388 - RNA, 19 nt, Human
caccucguuagguucaauu

SEQ ID NO: 425389 - RNA, 19 nt, Human
ccacguuucuuccuuccuc

SEQ ID NO: 425390 - RNA, 22 nt, Human
ccacguuucuuccuuccuccag

SEQ ID NO: 425391 - RNA, 21 nt, Human
gaacaugaccaucauggagcc

SEQ ID NO: 425392 - RNA, 22 nt, Human
gagggacccuccuucuggugca

SEQ ID NO: 425393 - RNA, 21 nt, Human
gaucugccacguuucuuccuu

SEQ ID NO: 425394 - RNA, 20 nt, Human
gcaccuggaacaugaccauc

SEQ ID NO: 425395 - RNA, 19 nt, Human
uaaaagacugaguguuugc

SEQ ID NO: 425396 - RNA, 20 nt, Human
uaagaagauuuucuguucuu

SEQ ID NO: 425397 - RNA, 19 nt, Human
ucaaagaggauaagaagau

SEQ ID NO: 425398 - RNA, 21 nt, Human
ucacugaucauaaauauaguc

SEQ ID NO: 425399 - RNA, 20 nt, Human
ucaguugaaaauccugguga

SEQ ID NO: 425400 - RNA, 18 nt, Human
ucuuaaauuucucaguug

SEQ ID NO: 425401 - RNA, 27 nt, Human
uucacaguucugacauuuuuauucacu

SEQ ID NO: 425402 - RNA, 21 nt, Human
uuucucaguugaaaauccugg

SEQ ID NO: 425403 - RNA, 24 nt, Human
uuuuuuuuuuuuuuuuucacaguu

SEQ ID NO: 425404 - RNA, 23 nt, Human
uuuuuuuuuuuuuuuuuucacag

SEQ ID NO: 425405 - RNA, 25 nt, Human
aaacgucuuagcaggauguggaccc

SEQ ID NO: 425406 - RNA, 18 nt, Human
aagcaagggagcccccca

SEQ ID NO: 425407 - RNA, 19 nt, Human
agaggagcuuugggcugcc

SEQ ID NO: 425408 - RNA, 19 nt, Human
agcaaauucuucucaccac

SEQ ID NO: 425409 - RNA, 23 nt, Human
agccagggugggcagaggagcuu

SEQ ID NO: 425410 - RNA, 23 nt, Human
agcuguagcagucuguguuaggu

SEQ ID NO: 425411 - RNA, 20 nt, Human
agggacucugcauguugcug

SEQ ID NO: 425412 - RNA, 20 nt, Human
aggggcauuguuuucuuggg

SEQ ID NO: 425413 - RNA, 19 nt, Human
aggguuuugggagccaggg

SEQ ID NO: 425414 - RNA, 20 nt, Human
aggucuuggagaaggaggau

SEQ ID NO: 425415 - RNA, 19 nt, Human
agugucuuuguuaggcugu

SEQ ID NO: 425416 - RNA, 22 nt, Human
caaggugaaggggcauccaaga

SEQ ID NO: 425417 - RNA, 18 nt, Human
cacccuugggugguaggg

SEQ ID NO: 425418 - RNA, 23 nt, Human
caccgcauucccucuuacuccac

SEQ ID NO: 425419 - RNA, 19 nt, Human
cagagggugggggcuggcg

SEQ ID NO: 425420 - RNA, 22 nt, Human
cagcauuguagcuguggcugca

SEQ ID NO: 425421 - RNA, 23 nt, Human
cauggcacccuugggugguaggg

SEQ ID NO: 425422 - RNA, 22 nt, Human
cauucccucuuacuccacagcc

SEQ ID NO: 425423 - RNA, 19 nt, Human
ccauggcacccuugggugg

SEQ ID NO: 425424 - RNA, 20 nt, Human
cccuguguuuccuggggccu

SEQ ID NO: 425425 - RNA, 22 nt, Human
cccuguguuuccuggggccugg

SEQ ID NO: 425426 - RNA, 19 nt, Human
ccucaccgcauucccucuu

SEQ ID NO: 425427 - RNA, 23 nt, Human
ccuguguuuccuggggccuggga

SEQ ID NO: 425428 - RNA, 22 nt, Human
cgaacagcucuggcuaugccca

SEQ ID NO: 425429 - RNA, 24 nt, Human
cggcgcuggguggauggagggaca

SEQ ID NO: 425430 - RNA, 22 nt, Human
cgggaggggagcagcuguagca

SEQ ID NO: 425431 - RNA, 18 nt, Human
cuagcuggcuuuccuauu

SEQ ID NO: 425432 - RNA, 23 nt, Human
cucgagcagacagaggguggggg

SEQ ID NO: 425433 - RNA, 23 nt, Human
cuggaaugcuggcucaucuggcc

SEQ ID NO: 425434 - RNA, 19 nt, Human
gaagcccuguguuuccugg

SEQ ID NO: 425435 - RNA, 22 nt, Human
gaagcucaguuuuccugucucc

SEQ ID NO: 425436 - RNA, 20 nt, Human
gagccagggugggcagagga

SEQ ID NO: 425437 - RNA, 21 nt, Human
gaggcggacugugcaaguucc

SEQ ID NO: 425438 - RNA, 22 nt, Human
gcaaauucuucucaccacagug

SEQ ID NO: 425439 - RNA, 21 nt, Human
gccagcaggggcucuuggggu

SEQ ID NO: 425440 - RNA, 18 nt, Human
gccaucuggggccaagaa

SEQ ID NO: 425441 - RNA, 23 nt, Human
gcccaaguuuguucuccaaccuc

SEQ ID NO: 425442 - RNA, 22 nt, Human
gcccagggugugguauacaacc

SEQ ID NO: 425443 - RNA, 22 nt, Human
gcccuguguuuccuggggccug

SEQ ID NO: 425444 - RNA, 20 nt, Human
gcuggguucgaacagcucug

SEQ ID NO: 425445 - RNA, 20 nt, Human
ggagcagcuguagcagucug

SEQ ID NO: 425446 - RNA, 19 nt, Human
ggagccagggugggcagag

SEQ ID NO: 425447 - RNA, 22 nt, Human
ggaggugggcucagggacucug

SEQ ID NO: 425448 - RNA, 18 nt, Human
ggccugggauuaggggcc

SEQ ID NO: 425449 - RNA, 21 nt, Human
ggcugggaggugggcucaggg

SEQ ID NO: 425450 - RNA, 18 nt, Human
gggacaagggagagaggg

SEQ ID NO: 425451 - RNA, 23 nt, Human
gggugcagggaggugccaucugg

SEQ ID NO: 425452 - RNA, 23 nt, Human
gguaggggcauuguuuucuuggg

SEQ ID NO: 425453 - RNA, 21 nt, Human
ggugaaggggcauccaagaaa

SEQ ID NO: 425454 - RNA, 19 nt, Human
ggugggcucagggacucug

SEQ ID NO: 425455 - RNA, 26 nt, Human
gugaaggggcauccaagaaauguggg

SEQ ID NO: 425456 - RNA, 20 nt, Human
guguuuccuggggccuggga

SEQ ID NO: 425457 - RNA, 20 nt, Human
uaaaaagugggggcgauuuu

SEQ ID NO: 425458 - RNA, 19 nt, Human
uacaaccccggggugcagg

SEQ ID NO: 425459 - RNA, 24 nt, Human
uaggggcauuguuuucuuggggcu

SEQ ID NO: 425460 - RNA, 19 nt, Human
ucauauuccacacugccuc

SEQ ID NO: 425461 - RNA, 18 nt, Human
uccacacaaggugaaggg

SEQ ID NO: 425462 - RNA, 20 nt, Human
uccacacaaggugaaggggc

SEQ ID NO: 425463 - RNA, 21 nt, Human
ucggggccugggauuaggggc

SEQ ID NO: 425464 - RNA, 23 nt, Human
ucucaccacaguggguucagaga

SEQ ID NO: 425465 - RNA, 19 nt, Human
ucuccagaugccggcgcug

SEQ ID NO: 425466 - RNA, 19 nt, Human
ucugcauguugcugaaggg

SEQ ID NO: 425467 - RNA, 28 nt, Human
ucugcuguuacuuggcauggaaccuacc

SEQ ID NO: 425468 - RNA, 23 nt, Human
ucuuuuguuuuggaggguuuugg

SEQ ID NO: 425469 - RNA, 18 nt, Human
ugaggagagggcugggag

SEQ ID NO: 425470 - RNA, 19 nt, Human
ugaggagagggcugggagg

SEQ ID NO: 425471 - RNA, 21 nt, Human
ugcagggaggugccaucuggg

SEQ ID NO: 425472 - RNA, 19 nt, Human
ugcuggguggagagugcug

SEQ ID NO: 425473 - RNA, 21 nt, Human
ugcuggguggagagugcuuuu

SEQ ID NO: 425474 - RNA, 22 nt, Human
uggagagugcuuuucugguccu

SEQ ID NO: 425475 - RNA, 20 nt, Human
uggcgggaggggagcagcug

SEQ ID NO: 425476 - RNA, 23 nt, Human
uggcgggaggggagcagcuguag

SEQ ID NO: 425477 - RNA, 19 nt, Human
uggcuggguucgaacagcu

SEQ ID NO: 425478 - RNA, 21 nt, Human
ugggagccagggugggcagag

SEQ ID NO: 425479 - RNA, 20 nt, Human
ugggcagaggagcuuugggc

SEQ ID NO: 425480 - RNA, 22 nt, Human
ugggcagaggagcuuugggcug

SEQ ID NO: 425481 - RNA, 23 nt, Human
uguaaaauggggaaaccagacac

SEQ ID NO: 425482 - RNA, 24 nt, Human
uguuuggcgggaggggagcagcug

SEQ ID NO: 425483 - RNA, 23 nt, Human
uuaggcaaagcccacccccuguc

SEQ ID NO: 425484 - RNA, 23 nt, Human
uuccuggggccugggaccuucuc

SEQ ID NO: 425485 - RNA, 24 nt, Human
uuccuggggccugggaccuucucc

SEQ ID NO: 425486 - RNA, 22 nt, Human
uugcugaagggugaaacagcug

SEQ ID NO: 425487 - RNA, 22 nt, Human
uuguucuccaaccucugguagg

SEQ ID NO: 425488 - RNA, 22 nt, Human
uuucccgggaccauggcacccu

SEQ ID NO: 425489 - RNA, 21 nt, Human
uuuccugucuguaaaaugggg

SEQ ID NO: 425490 - RNA, 21 nt, Human
uuucggggccugggauuaggg

SEQ ID NO: 425491 - RNA, 18 nt, Human
uuugggagccaggguggg

SEQ ID NO: 425492 - RNA, 24 nt, Human
uuuguucuccaaccucugguaggg

SEQ ID NO: 425493 - RNA, 21 nt, Human
aaaaaaacagcaugaauuugg

SEQ ID NO: 425494 - RNA, 22 nt, Human
aaaaaacagcaugaauuuggau

SEQ ID NO: 425495 - RNA, 24 nt, Human
aaaaacacauaagaaaaagggcca

SEQ ID NO: 425496 - RNA, 23 nt, Human
aaaaagaacuguguaaaaauaac

SEQ ID NO: 425497 - RNA, 23 nt, Human
aaacuaaauaaagaugaccaaaa

SEQ ID NO: 425498 - RNA, 23 nt, Human
aaauaacuaacuguguucccaua

SEQ ID NO: 425499 - RNA, 19 nt, Human
acaagcgacagcacacaca

SEQ ID NO: 425500 - RNA, 20 nt, Human
acacaaaaacaaaaagaacu

SEQ ID NO: 425501 - RNA, 22 nt, Human
acacacacaaaaacaaaaagaa

SEQ ID NO: 425502 - RNA, 22 nt, Human
acacauaagaaaaagggccacu

SEQ ID NO: 425503 - RNA, 20 nt, Human
acggaguugcagagaaaaaa

SEQ ID NO: 425504 - RNA, 21 nt, Human
agacaaacgauucaguccaag

SEQ ID NO: 425505 - RNA, 23 nt, Human
agacuagaaggaaaaugcucccu

SEQ ID NO: 425506 - RNA, 22 nt, Human
agcccagccacaaaaaugggca

SEQ ID NO: 425507 - RNA, 21 nt, Human
aggcucacaaaugagcaacac

SEQ ID NO: 425508 - RNA, 20 nt, Human
aucuugcugcaaucuugcca

SEQ ID NO: 425509 - RNA, 21 nt, Human
augaaguaaaauuuuuaaaaa

SEQ ID NO: 425510 - RNA, 22 nt, Human
augcuguuuuccucugcuaacg

SEQ ID NO: 425511 - RNA, 18 nt, Human
auuugccuccucccccca

SEQ ID NO: 425512 - RNA, 26 nt, Human
caaacuaaauaaagaugaccaaaaca

SEQ ID NO: 425513 - RNA, 18 nt, Human
caaauugaauuugccucc

SEQ ID NO: 425514 - RNA, 30 nt, Human
caacuucaugcaaacuaaauaaagaugacu

SEQ ID NO: 425515 - RNA, 26 nt, Human
cacacaaaaacaaaaagaacugugua

SEQ ID NO: 425516 - RNA, 22 nt, Human
cacacacaaaaacaaaaagaac

SEQ ID NO: 425517 - RNA, 21 nt, Human
cacacacacacaaaaacaaaa

SEQ ID NO: 425518 - RNA, 24 nt, Human
cacacacacacaaaaacaaaaaga

SEQ ID NO: 425519 - RNA, 25 nt, Human
cauuagaauuacaaguauauguuca

SEQ ID NO: 425520 - RNA, 21 nt, Human
ccaaaacaaaagcuuaaacaa

SEQ ID NO: 425521 - RNA, 19 nt, Human
ccaaagagacuuuguaaua

SEQ ID NO: 425522 - RNA, 22 nt, Human
ccacuaggugacauuuuaauuu

SEQ ID NO: 425523 - RNA, 21 nt, Human
cccccagcccagccacaaaaa

SEQ ID NO: 425524 - RNA, 19 nt, Human
ccuuuaaacaacgcaauuu

SEQ ID NO: 425525 - RNA, 18 nt, Human
cucacaaaugagcaacac

SEQ ID NO: 425526 - RNA, 21 nt, Human
cucacaaaugagcaacacucc

SEQ ID NO: 425527 - RNA, 20 nt, Human
gaaaaagggccacuagguga

SEQ ID NO: 425528 - RNA, 18 nt, Human
gcacuauaauccuuuaaa

SEQ ID NO: 425529 - RNA, 23 nt, Human
gcagagaaaaaaaacagcaugaa

SEQ ID NO: 425530 - RNA, 19 nt, Human
gccacaaaaaugggcauga

SEQ ID NO: 425531 - RNA, 22 nt, Human
gcgacagcacacacacacaaaa

SEQ ID NO: 425532 - RNA, 23 nt, Human
gcuaacggaguugcagagaaaaa

SEQ ID NO: 425533 - RNA, 21 nt, Human
gcuguugucgacaagcgacag

SEQ ID NO: 425534 - RNA, 19 nt, Human
gcuguuuuccucugcuaac

SEQ ID NO: 425535 - RNA, 22 nt, Human
ucaucucaaaagccagaguugu

SEQ ID NO: 425536 - RNA, 22 nt, Human
uccaagaggugcuaacuucaga

SEQ ID NO: 425537 - RNA, 24 nt, Human
ucgacaagcgacagcacacacaca

SEQ ID NO: 425538 - RNA, 25 nt, Human
ucuagacaaacgauucaguccaaga

SEQ ID NO: 425539 - RNA, 23 nt, Human
ucuugcugcaaucuugccaaaga

SEQ ID NO: 425540 - RNA, 18 nt, Human
ucuuuucuucuaggcuga

SEQ ID NO: 425541 - RNA, 19 nt, Human
ugaccaaaacaaaagcuua

SEQ ID NO: 425542 - RNA, 24 nt, Human
ugaccaaaacaaaagcuuaaacaa

SEQ ID NO: 425543 - RNA, 23 nt, Human
ugcaaacuaaauaaagaugacca

SEQ ID NO: 425544 - RNA, 18 nt, Human
ugcacaugaucuugcugc

SEQ ID NO: 425545 - RNA, 18 nt, Human
ugcagagaaaaaaaacag

SEQ ID NO: 425546 - RNA, 19 nt, Human
ugccuccuccccccagccc

SEQ ID NO: 425547 - RNA, 23 nt, Human
uucacagaaaauuucuuauacaa

SEQ ID NO: 425548 - RNA, 18 nt, Human
uuguuuacaggaaaaauu

SEQ ID NO: 425549 - RNA, 23 nt, Human
uuguuuuguuuuuuaaugaguug

SEQ ID NO: 425550 - RNA, 22 nt, Human
uuugaagucgcuuuacaauggg

SEQ ID NO: 425551 - RNA, 21 nt, Human
uuugccuccuccccccagccc

SEQ ID NO: 425552 - RNA, 24 nt, Human
aaaaaauucuccacauaaacugac

SEQ ID NO: 425553 - RNA, 22 nt, Human
aaaaaccucgauucaaaaaggg

SEQ ID NO: 425554 - RNA, 24 nt, Human
aaaacaaaacaaaacaaaaaaacc

SEQ ID NO: 425555 - RNA, 19 nt, Human
aaacaaaacaaaacaaaaa

SEQ ID NO: 425556 - RNA, 24 nt, Human
aaacaaagaaaagaaaaggucaaa

SEQ ID NO: 425557 - RNA, 21 nt, Human
aaaccgggcugagcggaagcc

SEQ ID NO: 425558 - RNA, 25 nt, Human
aaacuaaaaagcauuaauuaaacau

SEQ ID NO: 425559 - RNA, 26 nt, Human
aacaaaacaaaaaaaccucgauucaa

SEQ ID NO: 425560 - RNA, 20 nt, Human
aagaaaagaaaagaaacaca

SEQ ID NO: 425561 - RNA, 19 nt, Human
aagaaaagaaacacaguga

SEQ ID NO: 425562 - RNA, 20 nt, Human
aagaaaagaaacacagugaa

SEQ ID NO: 425563 - RNA, 22 nt, Human
aaguagcuucaugaaugaagau

SEQ ID NO: 425564 - RNA, 20 nt, Human
aaugaaacuuuggcuuaaaa

SEQ ID NO: 425565 - RNA, 24 nt, Human
acaaaaaagcaauagaagcacaaa

SEQ ID NO: 425566 - RNA, 23 nt, Human
acaaaacaaaacaaaaaaaccuc

SEQ ID NO: 425567 - RNA, 25 nt, Human
acaaaacaaaacaaaaaaaccucga

SEQ ID NO: 425568 - RNA, 18 nt, Human
acaaaacacaaaaaagca

SEQ ID NO: 425569 - RNA, 26 nt, Human
acaaaacacaaaaaagcaauagaagc

SEQ ID NO: 425570 - RNA, 22 nt, Human
acaaagaaaagaaaaggucaaa

SEQ ID NO: 425571 - RNA, 22 nt, Human
acaaagaagugacaaugggcac

SEQ ID NO: 425572 - RNA, 19 nt, Human
acagagccucugaaauagc

SEQ ID NO: 425573 - RNA, 22 nt, Human
acaugcuuaacaaaacacaaaa

SEQ ID NO: 425574 - RNA, 21 nt, Human
accauacauguggaugcauaa

SEQ ID NO: 425575 - RNA, 22 nt, Human
acccacccagcaacccuuccca

SEQ ID NO: 425576 - RNA, 22 nt, Human
acuccuccccacaugggccccg

SEQ ID NO: 425577 - RNA, 18 nt, Human
agaaaagaaaagaaacac

SEQ ID NO: 425578 - RNA, 19 nt, Human
agaaaagaaaagaaacaca

SEQ ID NO: 425579 - RNA, 24 nt, Human
agaaaagaaaagaaacacagugag

SEQ ID NO: 425580 - RNA, 20 nt, Human
agaaaagaaacacagugagc

SEQ ID NO: 425581 - RNA, 23 nt, Human
agagguaugugggacugacccuc

SEQ ID NO: 425582 - RNA, 19 nt, Human
agcaacccuucccaaaaua

SEQ ID NO: 425583 - RNA, 27 nt, Human
agcaauagaagcacaaaagggagggcc

SEQ ID NO: 425584 - RNA, 21 nt, Human
agcgaaugguaauagcugccc

SEQ ID NO: 425585 - RNA, 21 nt, Human
aggcggcggcggcaacagcga

SEQ ID NO: 425586 - RNA, 27 nt, Human
agggaagaaaugagacaaaggggaccc

SEQ ID NO: 425587 - RNA, 24 nt, Human
agucaaaaaacagaauaguuaggg

SEQ ID NO: 425588 - RNA, 20 nt, Human
aucaccuucauugcacagga

SEQ ID NO: 425589 - RNA, 20 nt, Human
aucauauuucccacccaccc

SEQ ID NO: 425590 - RNA, 25 nt, Human
augcuaaauuuaaugccaaccauau

SEQ ID NO: 425591 - RNA, 19 nt, Human
augguggaagugcugauga

SEQ ID NO: 425592 - RNA, 21 nt, Human
caaaacaaaaaaaccucgauu

SEQ ID NO: 425593 - RNA, 23 nt, Human
caaaacaaaaaaaccucgauuca

SEQ ID NO: 425594 - RNA, 24 nt, Human
caaaacaaaaaaaccucgauucaa

SEQ ID NO: 425595 - RNA, 22 nt, Human
caaaacaaaacaaaaaaaccuc

SEQ ID NO: 425596 - RNA, 19 nt, Human
cacccagcaacccuuccca

SEQ ID NO: 425597 - RNA, 25 nt, Human
cacgcuacagggaccauacaugugg

SEQ ID NO: 425598 - RNA, 20 nt, Human
cagaaaacaaaacaaaacaa

SEQ ID NO: 425599 - RNA, 20 nt, Human
cagaagaaaaacuaucuagu

SEQ ID NO: 425600 - RNA, 23 nt, Human
cagcagcaacuuaagaaguuagc

SEQ ID NO: 425601 - RNA, 25 nt, Human
cagcagcaacuuaagaaguuagcaa

SEQ ID NO: 425602 - RNA, 19 nt, Human
caguaaccgaauguuuuga

SEQ ID NO: 425603 - RNA, 24 nt, Human
caucauauuucccacccacccagc

SEQ ID NO: 425604 - RNA, 22 nt, Human
caucauauuucccacccacccc

SEQ ID NO: 425605 - RNA, 21 nt, Human
cauguaugaccaaguaaagau

SEQ ID NO: 425606 - RNA, 24 nt, Human
cauguggaugcauaauaaggcaua

SEQ ID NO: 425607 - RNA, 24 nt, Human
cauuuccucuucauuugggccaag

SEQ ID NO: 425608 - RNA, 19 nt, Human
cccagcaacccuucccaaa

SEQ ID NO: 425609 - RNA, 23 nt, Human
cggcgcugcgcuucucuccuccu

SEQ ID NO: 425610 - RNA, 20 nt, Human
cggcggcaacagcgacuccg

SEQ ID NO: 425611 - RNA, 23 nt, Human
cucgauucaaaaagggaacacau

SEQ ID NO: 425612 - RNA, 21 nt, Human
cugcugguauugacuuugaaa

SEQ ID NO: 425613 - RNA, 23 nt, Human
cuuaaaacauccucugauuggca

SEQ ID NO: 425614 - RNA, 21 nt, Human
gaaaaggucaaacuggugcaa

SEQ ID NO: 425615 - RNA, 22 nt, Human
gacaaaaaauuuaaaaaccaau

SEQ ID NO: 425616 - RNA, 22 nt, Human
gaggaaguauaauuuguuccau

SEQ ID NO: 425617 - RNA, 22 nt, Human
ggacaugcuuaacaaaacacaa

SEQ ID NO: 425618 - RNA, 23 nt, Human
ggcgcggcgcggcgcugcgcuuc

SEQ ID NO: 425619 - RNA, 20 nt, Human
ggcggcaacagcgacuccga

SEQ ID NO: 425620 - RNA, 25 nt, Human
ggcuuaaaauaaaaacaaagaaaag

SEQ ID NO: 425621 - RNA, 19 nt, Human
gggaacacauuuuggaagc

SEQ ID NO: 425622 - RNA, 22 nt, Human
ggggucucuucagagcagcccg

SEQ ID NO: 425623 - RNA, 26 nt, Human
uaaaccagaagaaaagaaaagaaaca

SEQ ID NO: 425624 - RNA, 25 nt, Human
uaaacuaaaaagcauuaauuaaaca

SEQ ID NO: 425625 - RNA, 24 nt, Human
uaaaugucauccaacguaaguuuc

SEQ ID NO: 425626 - RNA, 21 nt, Human
uaacaaaacacaaaaaagcaa

SEQ ID NO: 425627 - RNA, 25 nt, Human
uaacaaaacacaaaaaagcaauaga

SEQ ID NO: 425628 - RNA, 21 nt, Human
uaacaaauacaucauauuucc

SEQ ID NO: 425629 - RNA, 22 nt, Human
uaaccuaccaagggucacuagu

SEQ ID NO: 425630 - RNA, 23 nt, Human
uaagaaaaguuacaucaaauuaa

SEQ ID NO: 425631 - RNA, 19 nt, Human
uaagaaaugccugguccac

SEQ ID NO: 425632 - RNA, 18 nt, Human
uaaguuuccccugccuuc

SEQ ID NO: 425633 - RNA, 20 nt, Human
uagcaaugaaacuuuggcuu

SEQ ID NO: 425634 - RNA, 22 nt, Human
uauuccacaucuguuccuuaaa

SEQ ID NO: 425635 - RNA, 23 nt, Human
ucaaccagucaaaaccgggcuga

SEQ ID NO: 425636 - RNA, 23 nt, Human
ucaggacucuaaagcagcagcaa

SEQ ID NO: 425637 - RNA, 26 nt, Human
ucaggcuuauuuggaugacuaaggaa

SEQ ID NO: 425638 - RNA, 19 nt, Human
ucaguaccgucccaucaga

SEQ ID NO: 425639 - RNA, 22 nt, Human
ucauucuguaugguuaaguuuc

SEQ ID NO: 425640 - RNA, 21 nt, Human
uccaugaaauucagccggugg

SEQ ID NO: 425641 - RNA, 20 nt, Human
uccucugauuggcaaaugaa

SEQ ID NO: 425642 - RNA, 27 nt, Human
uccuugcaaugccuguucuucauccug

SEQ ID NO: 425643 - RNA, 20 nt, Human
ugaaaauagaaaauuaaaau

SEQ ID NO: 425644 - RNA, 23 nt, Human
ugaacccagaagaaaaacuaucu

SEQ ID NO: 425645 - RNA, 21 nt, Human
ugaagugugggauuccuuguu

SEQ ID NO: 425646 - RNA, 22 nt, Human
ugacaaaaaauuuaaaaaccaa

SEQ ID NO: 425647 - RNA, 23 nt, Human
ugacaaaaaauuuaaaaaccaau

SEQ ID NO: 425648 - RNA, 22 nt, Human
ugacagaccagugauauuuccc

SEQ ID NO: 425649 - RNA, 23 nt, Human
ugcucaggacucuaaagcagcag

SEQ ID NO: 425650 - RNA, 21 nt, Human
ugcugggagaaauggcugcca

SEQ ID NO: 425651 - RNA, 24 nt, Human
ugggcacuguggacagaucauaau

SEQ ID NO: 425652 - RNA, 21 nt, Human
ugguugaacccagaagaaaaa

SEQ ID NO: 425653 - RNA, 19 nt, Human
uuaaaacugcugggagaaa

SEQ ID NO: 425654 - RNA, 20 nt, Human
uucccaaaauaagaaaaguu

SEQ ID NO: 425655 - RNA, 23 nt, Human
uucccacccacccagcaaccccu

SEQ ID NO: 425656 - RNA, 23 nt, Human
uugaacccagaagaaaaacuauc

SEQ ID NO: 425657 - RNA, 22 nt, Human
uuuaaugccaaccauauucaau

SEQ ID NO: 425658 - RNA, 19 nt, Human
uuucagaaaacaaaacaaa

SEQ ID NO: 425659 - RNA, 26 nt, Human
uuucagaaaacaaaacaaaacaaaaa

SEQ ID NO: 425660 - RNA, 22 nt, Human
uuuugaaaauagaaaauuaaaa

SEQ ID NO: 425661 - RNA, 21 nt, Human
cgugugugugugugugugugu

SEQ ID NO: 425662 - RNA, 21 nt, Human
gaggggcagggagagugggag

SEQ ID NO: 425663 - RNA, 23 nt, Human
ggagggagcggggugcgcccugc

SEQ ID NO: 425664 - RNA, 18 nt, Human
ggcuucgccuggccagaa

SEQ ID NO: 425665 - RNA, 24 nt, Human
gggagggagcggggugcgcccugc

SEQ ID NO: 425666 - RNA, 21 nt, Human
gggcagggagagugggaggga

SEQ ID NO: 425667 - RNA, 21 nt, Human
gugugugugugugugugugug

SEQ ID NO: 425668 - RNA, 22 nt, Human
ugcaucgugugugugugugugu

SEQ ID NO: 425669 - RNA, 27 nt, Human
ugcaucgugugugugugugugugugug

SEQ ID NO: 425670 - RNA, 20 nt, Human
uguguguguguauagcacau

SEQ ID NO: 425671 - RNA, 18 nt, Human
uguguguguguguguaua

SEQ ID NO: 425672 - RNA, 21 nt, Human
uguguguguguguguguauag

SEQ ID NO: 425673 - RNA, 18 nt, Human
ugugugugugugugugug

SEQ ID NO: 425674 - RNA, 18 nt, Human
ugugugugugugugugug

SEQ ID NO: 425675 - RNA, 18 nt, Human
ugugugugugugugugug

SEQ ID NO: 425676 - RNA, 18 nt, Human
ugugugugugugugugug

SEQ ID NO: 425677 - RNA, 18 nt, Human
ugugugugugugugugug

SEQ ID NO: 425678 - RNA, 18 nt, Human
ugugugugugugugugug

SEQ ID NO: 425679 - RNA, 18 nt, Human
ugugugugugugugugug

SEQ ID NO: 425680 - RNA, 18 nt, Human
ugugugugugugugugug

SEQ ID NO: 425681 - RNA, 22 nt, Human
uguguguguguguguguguaua

SEQ ID NO: 425682 - RNA, 21 nt, Human
ugugugugugugugugugugu

SEQ ID NO: 425683 - RNA, 21 nt, Human
ugugugugugugugugugugu

SEQ ID NO: 425684 - RNA, 21 nt, Human
ugugugugugugugugugugu

SEQ ID NO: 425685 - RNA, 21 nt, Human
ugugugugugugugugugugu

SEQ ID NO: 425686 - RNA, 21 nt, Human
ugugugugugugugugugugu

SEQ ID NO: 425687 - RNA, 21 nt, Human
ugugugugugugugugugugu

SEQ ID NO: 425688 - RNA, 21 nt, Human
ugugugugugugugugugugu

SEQ ID NO: 425689 - RNA, 21 nt, Human
ugugugugugugugugugugu

SEQ ID NO: 425690 - RNA, 21 nt, Human
ugugugugugugugugugugu

SEQ ID NO: 425691 - RNA, 21 nt, Human
ugugugugugugugugugugu

SEQ ID NO: 425692 - RNA, 21 nt, Human
ugugugugugugugugugugu

SEQ ID NO: 425693 - RNA, 21 nt, Human
ugugugugugugugugugugu

SEQ ID NO: 425694 - RNA, 21 nt, Human
ugugugugugugugugugugu

SEQ ID NO: 425695 - RNA, 22 nt, Human
ugugugugugugugugugugua

SEQ ID NO: 425696 - RNA, 22 nt, Human
ugugugugugugugugugugug

SEQ ID NO: 425697 - RNA, 22 nt, Human
ugugugugugugugugugugug

SEQ ID NO: 425698 - RNA, 22 nt, Human
ugugugugugugugugugugug

SEQ ID NO: 425699 - RNA, 22 nt, Human
ugugugugugugugugugugug

SEQ ID NO: 425700 - RNA, 22 nt, Human
ugugugugugugugugugugug

SEQ ID NO: 425701 - RNA, 23 nt, Human
aaaagaaaaaaaaaaaaaaagaa

SEQ ID NO: 425702 - RNA, 19 nt, Human
aaagugcuaggaucacagg

SEQ ID NO: 425703 - RNA, 24 nt, Human
aaagugcuaggaucacaggcauga

SEQ ID NO: 425704 - RNA, 19 nt, Human
aacauggugaaaccccguc

SEQ ID NO: 425705 - RNA, 20 nt, Human
aacauggugaaaccccgucu

SEQ ID NO: 425706 - RNA, 21 nt, Human
aacauggugaaaccccgucuc

SEQ ID NO: 425707 - RNA, 25 nt, Human
aacgaacauacgcgugcaugugucu

SEQ ID NO: 425708 - RNA, 23 nt, Human
aagaaaacuuuuggccacgagca

SEQ ID NO: 425709 - RNA, 22 nt, Human
aagaggcagaggcugcagcggg

SEQ ID NO: 425710 - RNA, 26 nt, Human
aagugcuaggaucacaggcaugagcc

SEQ ID NO: 425711 - RNA, 24 nt, Human
aaucacuugaacccaagaggcaga

SEQ ID NO: 425712 - RNA, 24 nt, Human
acagagcaagacucugucuuaaga

SEQ ID NO: 425713 - RNA, 21 nt, Human
acagaguaagacuguuucaaa

SEQ ID NO: 425714 - RNA, 19 nt, Human
accacauuuuuuuaaucca

SEQ ID NO: 425715 - RNA, 24 nt, Human
accccgucucuauuaaaaauacaa

SEQ ID NO: 425716 - RNA, 24 nt, Human
accguguugcccaggcuggucuug

SEQ ID NO: 425717 - RNA, 25 nt, Human
accguguugcccaggcuggucuuga

SEQ ID NO: 425718 - RNA, 18 nt, Human
acguguguuuuugugcca

SEQ ID NO: 425719 - RNA, 23 nt, Human
acuccagccugggagacagagca

SEQ ID NO: 425720 - RNA, 21 nt, Human
acugcacuccagcagccuggg

SEQ ID NO: 425721 - RNA, 18 nt, Human
acugcacuccagccuggg

SEQ ID NO: 425722 - RNA, 24 nt, Human
acugcacuccagccugggagacag

SEQ ID NO: 425723 - RNA, 24 nt, Human
acuugaggucaggaguucgagacc

SEQ ID NO: 425724 - RNA, 19 nt, Human
agagaugggguuucaccgu

SEQ ID NO: 425725 - RNA, 24 nt, Human
agaggcugcagcgggccgagauug

SEQ ID NO: 425726 - RNA, 20 nt, Human
agcaauucuccugccucggc

SEQ ID NO: 425727 - RNA, 20 nt, Human
agcacuuugggaggccgagg

SEQ ID NO: 425728 - RNA, 24 nt, Human
agcacuuugggaggccgagguggg

SEQ ID NO: 425729 - RNA, 23 nt, Human
agccaggcgugguggugggugcc

SEQ ID NO: 425730 - RNA, 22 nt, Human
agccuggccaacauggugaaac

SEQ ID NO: 425731 - RNA, 24 nt, Human
agccuggccaacauggugaaaccc

SEQ ID NO: 425732 - RNA, 24 nt, Human
agccugggagacagagcaagacuc

SEQ ID NO: 425733 - RNA, 24 nt, Human
aggaucccuugaggccaggaguuc

SEQ ID NO: 425734 - RNA, 20 nt, Human
aggcacgcaccaccaugccc

SEQ ID NO: 425735 - RNA, 21 nt, Human
aggcagaggcugcagcgggcc

SEQ ID NO: 425736 - RNA, 21 nt, Human
aggccgagguggguggaucac

SEQ ID NO: 425737 - RNA, 25 nt, Human
aggcgggagugcaauggcgcgaucu

SEQ ID NO: 425738 - RNA, 24 nt, Human
aggcgugguggugggugccuguaa

SEQ ID NO: 425739 - RNA, 24 nt, Human
aggcugagguggaagaaucacuug

SEQ ID NO: 425740 - RNA, 18 nt, Human
agguggaagaaucacuug

SEQ ID NO: 425741 - RNA, 23 nt, Human
agguggaagaaucacuugaaccc

SEQ ID NO: 425742 - RNA, 23 nt, Human
agguggguggaucacuugagguc

SEQ ID NO: 425743 - RNA, 21 nt, Human
agugcaauggcgcgaucucag

SEQ ID NO: 425744 - RNA, 24 nt, Human
aguggcucacgccuguaaucccug

SEQ ID NO: 425745 - RNA, 18 nt, Human
augggguuucaccguguu

SEQ ID NO: 425746 - RNA, 19 nt, Human
augggguuucaccguguug

SEQ ID NO: 425747 - RNA, 24 nt, Human
augggguuucaccguguugcccag

SEQ ID NO: 425748 - RNA, 27 nt, Human
auugugccacugcacuccagcagccug

SEQ ID NO: 425749 - RNA, 24 nt, Human
auugugccacugcacuccagccug

SEQ ID NO: 425750 - RNA, 21 nt, Human
auuugugaauuuuugcuucug

SEQ ID NO: 425751 - RNA, 24 nt, Human
caaagugcuaggaucacaggcaug

SEQ ID NO: 425752 - RNA, 22 nt, Human
caacagccuagaaacagaauag

SEQ ID NO: 425753 - RNA, 24 nt, Human
caacauggugaaaccccgucucua

SEQ ID NO: 425754 - RNA, 23 nt, Human
caaccuccaccuccuggguucca

SEQ ID NO: 425755 - RNA, 24 nt, Human
cacaggcaugagccaccacgccca

SEQ ID NO: 425756 - RNA, 22 nt, Human
caccaccaugcccagcuaauuu

SEQ ID NO: 425757 - RNA, 21 nt, Human
caccguguugcccaggcuggu

SEQ ID NO: 425758 - RNA, 22 nt, Human
caccguguugcccaggcugguc

SEQ ID NO: 425759 - RNA, 23 nt, Human
caccguguugcccaggcuggucu

SEQ ID NO: 425760 - RNA, 24 nt, Human
caccguguugcccaggcuggucuu

SEQ ID NO: 425761 - RNA, 28 nt, Human
caccuccuggguuccagcaauucuccuu

SEQ ID NO: 425762 - RNA, 27 nt, Human
cacgagcaguggcucacgccuguaauc

SEQ ID NO: 425763 - RNA, 19 nt, Human
cacgccuguaaucccugca

SEQ ID NO: 425764 - RNA, 24 nt, Human
cacgggccuguaauccuagcacuu

SEQ ID NO: 425765 - RNA, 21 nt, Human
cacugcaaccuccaccuccug

SEQ ID NO: 425766 - RNA, 23 nt, Human
cacugcaaccuccaccuccuggg

SEQ ID NO: 425767 - RNA, 22 nt, Human
cacugcacuccagcagccuggg

SEQ ID NO: 425768 - RNA, 22 nt, Human
cacugcacuccagcagccuggg

SEQ ID NO: 425769 - RNA, 18 nt, Human
cacugcacuccagccugg

SEQ ID NO: 425770 - RNA, 19 nt, Human
cacugcacuccagccuggg

SEQ ID NO: 425771 - RNA, 22 nt, Human
cacugcacuccagccugggaga

SEQ ID NO: 425772 - RNA, 24 nt, Human
cacugcacuccagccugggagaca

SEQ ID NO: 425773 - RNA, 24 nt, Human
cacugcacuccagccugggagaca

SEQ ID NO: 425774 - RNA, 23 nt, Human
cacuugaggucaggaguucgaga

SEQ ID NO: 425775 - RNA, 24 nt, Human
cagcuaccugggaggcugaggugg

SEQ ID NO: 425776 - RNA, 22 nt, Human
caggagagacucaacuuucccg

SEQ ID NO: 425777 - RNA, 19 nt, Human
caguggcucacgccuguaa

SEQ ID NO: 425778 - RNA, 24 nt, Human
caugauugugccacugcacuccag

SEQ ID NO: 425779 - RNA, 19 nt, Human
ccacaaccucaccagcauc

SEQ ID NO: 425780 - RNA, 18 nt, Human
ccacugcacuccagcagc

SEQ ID NO: 425781 - RNA, 23 nt, Human
ccacugcacuccagcagccuggg

SEQ ID NO: 425782 - RNA, 25 nt, Human
ccacugcacuccagcagccugggag

SEQ ID NO: 425783 - RNA, 27 nt, Human
ccacugcacuccagcagccugggagac

SEQ ID NO: 425784 - RNA, 19 nt, Human
ccacugcacuccagccugg

SEQ ID NO: 425785 - RNA, 20 nt, Human
ccacugcacuccagccuggg

SEQ ID NO: 425786 - RNA, 22 nt, Human
ccacugcacuccagccugggag

SEQ ID NO: 425787 - RNA, 24 nt, Human
ccacugcacuccagccugggagac

SEQ ID NO: 425788 - RNA, 23 nt, Human
ccgccaccaacgccauucaccaa

SEQ ID NO: 425789 - RNA, 23 nt, Human
ccuccaccuccuggguuccagca

SEQ ID NO: 425790 - RNA, 24 nt, Human
ccuccuggguuccagcaauucucc

SEQ ID NO: 425791 - RNA, 24 nt, Human
ccugagcgcgggcaauccacccac

SEQ ID NO: 425792 - RNA, 23 nt, Human
ccugccucggccuccugaguagc

SEQ ID NO: 425793 - RNA, 23 nt, Human
ccuggccaacauggugaaacccc

SEQ ID NO: 425794 - RNA, 24 nt, Human
ccuggccaacauggugaaaccccg

SEQ ID NO: 425795 - RNA, 22 nt, Human
ccugggagacagagcaagacuc

SEQ ID NO: 425796 - RNA, 19 nt, Human
ccuguaaucccagcuaccu

SEQ ID NO: 425797 - RNA, 21 nt, Human
ccuguaaucccagcuaccugg

SEQ ID NO: 425798 - RNA, 20 nt, Human
ccuguaauccuagcacuuug

SEQ ID NO: 425799 - RNA, 22 nt, Human
ccuguaauccuagcacuuuggg

SEQ ID NO: 425800 - RNA, 24 nt, Human
cgagaccagccuggccaacauggu

SEQ ID NO: 425801 - RNA, 24 nt, Human
cgagguggguggaucacuugaggu

SEQ ID NO: 425802 - RNA, 26 nt, Human
cgagguggguggaucacuugagguca

SEQ ID NO: 425803 - RNA, 19 nt, Human
cggccuccugaguagcugg

SEQ ID NO: 425804 - RNA, 22 nt, Human
cgggccgagauugugccacugc

SEQ ID NO: 425805 - RNA, 22 nt, Human
cucacgccuguaaucccugcac

SEQ ID NO: 425806 - RNA, 24 nt, Human
cucacugcaaccuccaccuccugg

SEQ ID NO: 425807 - RNA, 21 nt, Human
cuccuggguuccagcaauucu

SEQ ID NO: 425808 - RNA, 23 nt, Human
cuccuggguuccagcaauucucc

SEQ ID NO: 425809 - RNA, 23 nt, Human
cugcaaccuccaccuccuggguu

SEQ ID NO: 425810 - RNA, 22 nt, Human
cugcagugagccaugauugugc

SEQ ID NO: 425811 - RNA, 23 nt, Human
cugccucggccuccugaguagcu

SEQ ID NO: 425812 - RNA, 23 nt, Human
cuggauuucagaccuuucucaga

SEQ ID NO: 425813 - RNA, 25 nt, Human
cugggaggcugagguggaagaauca

SEQ ID NO: 425814 - RNA, 23 nt, Human
cuggucuugaccuccugagcgcg

SEQ ID NO: 425815 - RNA, 23 nt, Human
cuuacuaucaauauuucuuuaga

SEQ ID NO: 425816 - RNA, 24 nt, Human
cuuccacaauggcugaacuaauuu

SEQ ID NO: 425817 - RNA, 27 nt, Human
cuuucccgccaccaacgccauucacca

SEQ ID NO: 425818 - RNA, 23 nt, Human
gaaaagugucuguucauguccuu

SEQ ID NO: 425819 - RNA, 19 nt, Human
gaagaaucacuugaaccca

SEQ ID NO: 425820 - RNA, 19 nt, Human
gaaucacuugaacccaaga

SEQ ID NO: 425821 - RNA, 24 nt, Human
gacagagcaagacucugucuuaag

SEQ ID NO: 425822 - RNA, 23 nt, Human
gagaugggguuucaccguguugc

SEQ ID NO: 425823 - RNA, 23 nt, Human
gagauugugccacugcacuccag

SEQ ID NO: 425824 - RNA, 24 nt, Human
gaguagcuggcacuacaggcacgc

SEQ ID NO: 425825 - RNA, 18 nt, Human
gaucacaggcaugagcca

SEQ ID NO: 425826 - RNA, 24 nt, Human
gaucacuugaggucaggaguucga

SEQ ID NO: 425827 - RNA, 24 nt, Human
gaucccuugaggccaggaguucaa

SEQ ID NO: 425828 - RNA, 22 nt, Human
gaugggguuucaccguguugcc

SEQ ID NO: 425829 - RNA, 22 nt, Human
gcaaccuccaccuccuggguuc

SEQ ID NO: 425830 - RNA, 20 nt, Human
gcaccaccaugcccagcuaa

SEQ ID NO: 425831 - RNA, 19 nt, Human
gcacgcaccaccaugccca

SEQ ID NO: 425832 - RNA, 24 nt, Human
gcacuccagccugggagacagagc

SEQ ID NO: 425833 - RNA, 19 nt, Human
gcauaucuuuuucuccaca

SEQ ID NO: 425834 - RNA, 24 nt, Human
gccaacauggugaaaccccgucuc

SEQ ID NO: 425835 - RNA, 24 nt, Human
gcccacuuuuuaauggggugguuu

SEQ ID NO: 425836 - RNA, 23 nt, Human
gcccagcuaauuuuuuguauuuu

SEQ ID NO: 425837 - RNA, 21 nt, Human
gccucggccuccugaguagcu

SEQ ID NO: 425838 - RNA, 20 nt, Human
gccuguaaucccugcacucu

SEQ ID NO: 425839 - RNA, 20 nt, Human
gcugaacuaauuuaauuuac

SEQ ID NO: 425840 - RNA, 19 nt, Human
ggaucacaggcaugagcca

SEQ ID NO: 425841 - RNA, 22 nt, Human
ggaucacaggcaugagccacca

SEQ ID NO: 425842 - RNA, 22 nt, Human
ggaucacuugaggucaggaguu

SEQ ID NO: 425843 - RNA, 23 nt, Human
ggcaauccacccaccucggccuc

SEQ ID NO: 425844 - RNA, 24 nt, Human
ggccaggaguucaaggcugcagug

SEQ ID NO: 425845 - RNA, 23 nt, Human
ggccuguaauccuagcacuuugg

SEQ ID NO: 425846 - RNA, 24 nt, Human
gggcacgggccuguaauccuagca

SEQ ID NO: 425847 - RNA, 22 nt, Human
gggguuucaccguguugcccag

SEQ ID NO: 425848 - RNA, 23 nt, Human
gggguuucaccguguugcccagg

SEQ ID NO: 425849 - RNA, 21 nt, Human
gguggaucacuugaggucagg

SEQ ID NO: 425850 - RNA, 21 nt, Human
ggugggugccuguaaucccag

SEQ ID NO: 425851 - RNA, 24 nt, Human
gguggugggugccuguaaucccag

SEQ ID NO: 425852 - RNA, 18 nt, Human
gguuacuguagccuugua

SEQ ID NO: 425853 - RNA, 23 nt, Human
guaguauaguuugaagcugggua

SEQ ID NO: 425854 - RNA, 24 nt, Human
gugcaugugucuuuauaacaauga

SEQ ID NO: 425855 - RNA, 22 nt, Human
guuucaaaaagaaaaaaaaaaa

SEQ ID NO: 425856 - RNA, 21 nt, Human
uaaaaauacaaaaauuagcca

SEQ ID NO: 425857 - RNA, 21 nt, Human
uaaaacuuuagggcugggcac

SEQ ID NO: 425858 - RNA, 21 nt, Human
uaaaacuuuagggcugggcac

SEQ ID NO: 425859 - RNA, 20 nt, Human
uaaaaguuccuuugugaaga

SEQ ID NO: 425860 - RNA, 21 nt, Human
uaauagagaugggguuucacc

SEQ ID NO: 425861 - RNA, 24 nt, Human
uaauagagaugggguuucaccgug

SEQ ID NO: 425862 - RNA, 26 nt, Human
uaauagagaugggguuucaccguguu

SEQ ID NO: 425863 - RNA, 23 nt, Human
uaauuuuuuguauuuuaauagag

SEQ ID NO: 425864 - RNA, 24 nt, Human
uaauuuuuuguauuuuaauagaga

SEQ ID NO: 425865 - RNA, 18 nt, Human
uacaaaguuuaauugcua

SEQ ID NO: 425866 - RNA, 26 nt, Human
uacccaguaaugagauugcuggguug

SEQ ID NO: 425867 - RNA, 26 nt, Human
uagaguuuaaaacuuuagggcugggc

SEQ ID NO: 425868 - RNA, 24 nt, Human
uagcacuuugggaggccgaggugg

SEQ ID NO: 425869 - RNA, 18 nt, Human
uagcuggcacuacaggca

SEQ ID NO: 425870 - RNA, 24 nt, Human
uaggaucacaggcaugagccacca

SEQ ID NO: 425871 - RNA, 24 nt, Human
uaggaucacaggcaugagccacca

SEQ ID NO: 425872 - RNA, 23 nt, Human
uauauggcauaaggaaggcgucc

SEQ ID NO: 425873 - RNA, 20 nt, Human
uauccccacacugucuucca

SEQ ID NO: 425874 - RNA, 26 nt, Human
ucaaaaagaaaaaaaaaaaaaaagaa

SEQ ID NO: 425875 - RNA, 23 nt, Human
ucacugcaaccuccaccuccugg

SEQ ID NO: 425876 - RNA, 24 nt, Human
ucacugcaaccuccaccuccuggg

SEQ ID NO: 425877 - RNA, 25 nt, Human
ucacugcaaccuccaccuccugggu

SEQ ID NO: 425878 - RNA, 20 nt, Human
ucacuugaggucaggaguuc

SEQ ID NO: 425879 - RNA, 20 nt, Human
uccacaauggcugaacuaau

SEQ ID NO: 425880 - RNA, 22 nt, Human
uccacccaccucggccucgcaa

SEQ ID NO: 425881 - RNA, 26 nt, Human
uccauugcccauugcuuguuuuuguc

SEQ ID NO: 425882 - RNA, 27 nt, Human
uccccacacugucuuccacaauggcug

SEQ ID NO: 425883 - RNA, 19 nt, Human
ucccuugaggccaggaguu

SEQ ID NO: 425884 - RNA, 24 nt, Human
uccugaguagcuggcacuacaggc

SEQ ID NO: 425885 - RNA, 21 nt, Human
uccuggguuccagcaauucuc

SEQ ID NO: 425886 - RNA, 24 nt, Human
uccuggguuccagcaauucuccug

SEQ ID NO: 425887 - RNA, 18 nt, Human
ucgcccaggcgggagugc

SEQ ID NO: 425888 - RNA, 21 nt, Human
ucggccuccugaguagcuggc

SEQ ID NO: 425889 - RNA, 24 nt, Human
ucucuaaugaucagugaugcuggg

SEQ ID NO: 425890 - RNA, 21 nt, Human
ucucuauuaaaaauacaaaaa

SEQ ID NO: 425891 - RNA, 24 nt, Human
ugagaugguaucucguuguuguuu

SEQ ID NO: 425892 - RNA, 18 nt, Human
ugagcgcgggcaauccac

SEQ ID NO: 425893 - RNA, 19 nt, Human
ugagguggaagaaucacuu

SEQ ID NO: 425894 - RNA, 20 nt, Human
ugagguggaagaaucacuug

SEQ ID NO: 425895 - RNA, 21 nt, Human
ugagguggaagaaucacuuga

SEQ ID NO: 425896 - RNA, 24 nt, Human
ugagguggaagaaucacuugaacc

SEQ ID NO: 425897 - RNA, 22 nt, Human
ugauaguuucuuuugcugugca

SEQ ID NO: 425898 - RNA, 22 nt, Human
ugcagugagccaugauugugcc

SEQ ID NO: 425899 - RNA, 20 nt, Human
ugccacugcacuccagcagc

SEQ ID NO: 425900 - RNA, 24 nt, Human
ugcccaggcuggucuugaccuccu

SEQ ID NO: 425901 - RNA, 24 nt, Human
ugccucggccuccugaguagcugg

SEQ ID NO: 425902 - RNA, 19 nt, Human
ugccuggguugucuuccag

SEQ ID NO: 425903 - RNA, 23 nt, Human
ugccuguaaucccagcuaccugg

SEQ ID NO: 425904 - RNA, 24 nt, Human
ugccuguaaucccagcuaccuggg

SEQ ID NO: 425905 - RNA, 19 nt, Human
ugcuaggaucacaggcaug

SEQ ID NO: 425906 - RNA, 26 nt, Human
ugcugcaacgaacauacgcgugcaug

SEQ ID NO: 425907 - RNA, 23 nt, Human
ugcugugcagcucuuuaguuuaa

SEQ ID NO: 425908 - RNA, 24 nt, Human
uggaucacuugaggucaggaguuc

SEQ ID NO: 425909 - RNA, 27 nt, Human
uggaucacuugaggucaggaguucgag

SEQ ID NO: 425910 - RNA, 24 nt, Human
uggcacuacaggcacgcaccacca

SEQ ID NO: 425911 - RNA, 24 nt, Human
uggccaacauggugaaaccccguc

SEQ ID NO: 425912 - RNA, 24 nt, Human
uggccacgagcaguggcucacgcc

SEQ ID NO: 425913 - RNA, 24 nt, Human
uggcgcgaucucagcucacugcaa

SEQ ID NO: 425914 - RNA, 24 nt, Human
uggcucacgccuguaaucccugca

SEQ ID NO: 425915 - RNA, 23 nt, Human
ugggaggccgagguggguggauc

SEQ ID NO: 425916 - RNA, 24 nt, Human
ugggaggccgagguggguggauca

SEQ ID NO: 425917 - RNA, 24 nt, Human
ugggaggcugagguggaagaauca

SEQ ID NO: 425918 - RNA, 24 nt, Human
ugggguuucaccguguugcccagg

SEQ ID NO: 425919 - RNA, 24 nt, Human
uggguggaucacuugaggucagga

SEQ ID NO: 425920 - RNA, 20 nt, Human
uggguuccagcaauucuccu

SEQ ID NO: 425921 - RNA, 24 nt, Human
uggugggugccuguaaucccagcu

SEQ ID NO: 425922 - RNA, 24 nt, Human
ugguggugggugccuguaauccca

SEQ ID NO: 425923 - RNA, 22 nt, Human
ugguguguauguaccacauuuu

SEQ ID NO: 425924 - RNA, 22 nt, Human
ugguuuuuucuucuaaauuugu

SEQ ID NO: 425925 - RNA, 18 nt, Human
ugugccaguacuaugcug

SEQ ID NO: 425926 - RNA, 21 nt, Human
uguugcccaggcuggucuuga

SEQ ID NO: 425927 - RNA, 24 nt, Human
uuaaaacuuuagggcugggcacgg

SEQ ID NO: 425928 - RNA, 18 nt, Human
uuaauagagaugggguuu

SEQ ID NO: 425929 - RNA, 22 nt, Human
uuaauagagaugggguuucacc

SEQ ID NO: 425930 - RNA, 24 nt, Human
uuaauagagaugggguuucaccgu

SEQ ID NO: 425931 - RNA, 24 nt, Human
uuagccaggcgugguggugggugc

SEQ ID NO: 425932 - RNA, 18 nt, Human
uucuccacaaccucacca

SEQ ID NO: 425933 - RNA, 21 nt, Human
uugaggccaggaguucaaggc

SEQ ID NO: 425934 - RNA, 24 nt, Human
uugcccaggcuggucuugaccucc

SEQ ID NO: 425935 - RNA, 25 nt, Human
uugggaggccgagguggguggauca

SEQ ID NO: 425936 - RNA, 23 nt, Human
uuguaguauaguuugaagcuggg

SEQ ID NO: 425937 - RNA, 26 nt, Human
uugugccacugcacuccagcagccug

SEQ ID NO: 425938 - RNA, 23 nt, Human
uugugccacugcacuccagccug

SEQ ID NO: 425939 - RNA, 23 nt, Human
uuuacauuuccaccaacagugua

SEQ ID NO: 425940 - RNA, 22 nt, Human
uuucaccguguugcccaggcug

SEQ ID NO: 425941 - RNA, 23 nt, Human
uuucaccguguugcccaggcugg

SEQ ID NO: 425942 - RNA, 19 nt, Human
uuuguauuuuaauagagaa

SEQ ID NO: 425943 - RNA, 23 nt, Human
uuuuaauagagaugggguuucac

SEQ ID NO: 425944 - RNA, 22 nt, Human
uuuuauggcuguauaguauucc

SEQ ID NO: 425945 - RNA, 20 nt, Human
uuuuuguauuuuaauagaga

SEQ ID NO: 425946 - RNA, 23 nt, Human
uuuuuuguauuuuaauagagaug

SEQ ID NO: 425947 - RNA, 22 nt, Human
aagaagcaggcggcucccaggg

SEQ ID NO: 425948 - RNA, 22 nt, Human
aagacagaacaauggaugcaaa

SEQ ID NO: 425949 - RNA, 18 nt, Human
aagcaggcggcucccagg

SEQ ID NO: 425950 - RNA, 18 nt, Human
aaggacccagaggugggu

SEQ ID NO: 425951 - RNA, 18 nt, Human
aaggcaguccccccaccc

SEQ ID NO: 425952 - RNA, 19 nt, Human
acacuacuagagacaaggc

SEQ ID NO: 425953 - RNA, 22 nt, Human
acacugaaguuuuguggggcac

SEQ ID NO: 425954 - RNA, 21 nt, Human
acccucgugggcacgguccca

SEQ ID NO: 425955 - RNA, 22 nt, Human
acgccacucugccugcugggug

SEQ ID NO: 425956 - RNA, 24 nt, Human
acugugcccauggggaggccacgc

SEQ ID NO: 425957 - RNA, 19 nt, Human
agaagcaggcggcucccag

SEQ ID NO: 425958 - RNA, 18 nt, Human
agacccagggagaggcag

SEQ ID NO: 425959 - RNA, 18 nt, Human
agcuggacgcccagaccc

SEQ ID NO: 425960 - RNA, 19 nt, Human
agcugugucugaaccaggc

SEQ ID NO: 425961 - RNA, 20 nt, Human
aggccagggcugagcuggaa

SEQ ID NO: 425962 - RNA, 19 nt, Human
agggggucaccacugugcc

SEQ ID NO: 425963 - RNA, 18 nt, Human
aguggugggggaguaagg

SEQ ID NO: 425964 - RNA, 21 nt, Human
aguuuuguggggcacagugug

SEQ ID NO: 425965 - RNA, 22 nt, Human
aucaccucuccccaagggccag

SEQ ID NO: 425966 - RNA, 19 nt, Human
auuuauuugucaaaggccu

SEQ ID NO: 425967 - RNA, 21 nt, Human
caacggcaguccggcuccuga

SEQ ID NO: 425968 - RNA, 21 nt, Human
cacagugugugccgagguggg

SEQ ID NO: 425969 - RNA, 25 nt, Human
cacccccaggcucuccuggacccuu

SEQ ID NO: 425970 - RNA, 20 nt, Human
caccgggacccuccuuccuc

SEQ ID NO: 425971 - RNA, 19 nt, Human
cacgccacucugccugcug

SEQ ID NO: 425972 - RNA, 18 nt, Human
cacuacuagagacaaggc

SEQ ID NO: 425973 - RNA, 21 nt, Human
cacucgccuucaauucaaagc

SEQ ID NO: 425974 - RNA, 21 nt, Human
cacugagugggggguggaggg

SEQ ID NO: 425975 - RNA, 22 nt, Human
cagcaagcgggccuguccccuc

SEQ ID NO: 425976 - RNA, 24 nt, Human
cagcaguggggaccagguacccag

SEQ ID NO: 425977 - RNA, 19 nt, Human
cagcccagggggcaggccu

SEQ ID NO: 425978 - RNA, 20 nt, Human
cagccugugcagccagaugu

SEQ ID NO: 425979 - RNA, 18 nt, Human
cagcucagauggggguca

SEQ ID NO: 425980 - RNA, 23 nt, Human
caggaaagacagaacaauggaug

SEQ ID NO: 425981 - RNA, 20 nt, Human
caggcuccagcccugagaaa

SEQ ID NO: 425982 - RNA, 21 nt, Human
cagguacccagcaagcgggcc

SEQ ID NO: 425983 - RNA, 23 nt, Human
cagugugugccgagguggggccc

SEQ ID NO: 425984 - RNA, 22 nt, Human
ccacacuacuagagacaaggca

SEQ ID NO: 425985 - RNA, 20 nt, Human
ccagacccagggagaggcag

SEQ ID NO: 425986 - RNA, 21 nt, Human
ccaggaaagacagaacaaugg

SEQ ID NO: 425987 - RNA, 24 nt, Human
cccaaggcugagggggucugaggc

SEQ ID NO: 425988 - RNA, 22 nt, Human
cccaggcagacgcguuuuaaag

SEQ ID NO: 425989 - RNA, 24 nt, Human
cccagggccaggauacaccgggac

SEQ ID NO: 425990 - RNA, 19 nt, Human
ccccacccccaggcucucc

SEQ ID NO: 425991 - RNA, 25 nt, Human
ccccacccccaggcucuccuggacc

SEQ ID NO: 425992 - RNA, 21 nt, Human
ccccaggcucuccuggacccu

SEQ ID NO: 425993 - RNA, 26 nt, Human
ccccccacccccaggcucuccuggac

SEQ ID NO: 425994 - RNA, 20 nt, Human
cccccgggagccaaggaccc

SEQ ID NO: 425995 - RNA, 22 nt, Human
cccccgggagccaaggacccag

SEQ ID NO: 425996 - RNA, 21 nt, Human
ccccgugugucggggcuucuc

SEQ ID NO: 425997 - RNA, 22 nt, Human
cccgcggguuccgcacuccucu

SEQ ID NO: 425998 - RNA, 22 nt, Human
cccugugugcaggagggaagac

SEQ ID NO: 425999 - RNA, 18 nt, Human
ccgaaccagggaagugac

SEQ ID NO: 426000 - RNA, 18 nt, Human
ccugcagguggcccugcc

SEQ ID NO: 426001 - RNA, 22 nt, Human
ccuggacccugacacuggaggu

SEQ ID NO: 426002 - RNA, 20 nt, Human
cgaaccagggaagugacagc

SEQ ID NO: 426003 - RNA, 21 nt, Human
cgcccagacccccagggccag

SEQ ID NO: 426004 - RNA, 21 nt, Human
cgcugccugcgcuccucugac

SEQ ID NO: 426005 - RNA, 20 nt, Human
cgggagccaaggacccagag

SEQ ID NO: 426006 - RNA, 22 nt, Human
cgggagccaaggacccagaggu

SEQ ID NO: 426007 - RNA, 22 nt, Human
cgugggcacggucccaaggcug

SEQ ID NO: 426008 - RNA, 18 nt, Human
cgugucaucggggcucug

SEQ ID NO: 426009 - RNA, 20 nt, Human
cuccagcccugagaaucacc

SEQ ID NO: 426010 - RNA, 21 nt, Human
cuccugaggcuccuccugggc

SEQ ID NO: 426011 - RNA, 22 nt, Human
cuccugaggcuccuccugggcc

SEQ ID NO: 426012 - RNA, 19 nt, Human
cuccugggcccucugugca

SEQ ID NO: 426013 - RNA, 27 nt, Human
cuccugggcccucugugcacauccucc

SEQ ID NO: 426014 - RNA, 18 nt, Human
cucuuugcccagaacugu

SEQ ID NO: 426015 - RNA, 23 nt, Human
cucuuugcccagaacuguguucc

SEQ ID NO: 426016 - RNA, 20 nt, Human
cugcagguggcccugccagg

SEQ ID NO: 426017 - RNA, 21 nt, Human
cugugccaggcagcaugugga

SEQ ID NO: 426018 - RNA, 21 nt, Human
cugugcccauggggaggccac

SEQ ID NO: 426019 - RNA, 23 nt, Human
cugugucugaaccaggcucccag

SEQ ID NO: 426020 - RNA, 23 nt, Human
gaugaauaacuucccaggaaaga

SEQ ID NO: 426021 - RNA, 19 nt, Human
gcaaauucugaggcacucg

SEQ ID NO: 426022 - RNA, 21 nt, Human
gcagaacauccccccagcuca

SEQ ID NO: 426023 - RNA, 19 nt, Human
gcccagggggcaggccuca

SEQ ID NO: 426024 - RNA, 18 nt, Human
gcccugcgcugccugcgc

SEQ ID NO: 426025 - RNA, 22 nt, Human
gcccugcgcugccugcgcuccu

SEQ ID NO: 426026 - RNA, 19 nt, Human
gccuggccacaguguggga

SEQ ID NO: 426027 - RNA, 19 nt, Human
gcuccuccugggcccucug

SEQ ID NO: 426028 - RNA, 25 nt, Human
ggaaagacagaacaauggaugcaaa

SEQ ID NO: 426029 - RNA, 19 nt, Human
ggaccagguacccagcaag

SEQ ID NO: 426030 - RNA, 21 nt, Human
ggagguuggugggauaugcuu

SEQ ID NO: 426031 - RNA, 19 nt, Human
ggcccucugugcacauccu

SEQ ID NO: 426032 - RNA, 19 nt, Human
gggauaugcuuucuccacc

SEQ ID NO: 426033 - RNA, 22 nt, Human
gggcaggccucagacgcaaccc

SEQ ID NO: 426034 - RNA, 24 nt, Human
gggggcaggccucagacgcaaccc

SEQ ID NO: 426035 - RNA, 23 nt, Human
gggggucaccacugugcccaugg

SEQ ID NO: 426036 - RNA, 18 nt, Human
gggggucugaggccccag

SEQ ID NO: 426037 - RNA, 23 nt, Human
gucugaaccaggcucccagcugu

SEQ ID NO: 426038 - RNA, 18 nt, Human
uaaaggcccgagccccgu

SEQ ID NO: 426039 - RNA, 18 nt, Human
uauuugucaaaggccugg

SEQ ID NO: 426040 - RNA, 20 nt, Human
ucaaagccugugggaggccc

SEQ ID NO: 426041 - RNA, 20 nt, Human
ucccaggaaagacagaacaa

SEQ ID NO: 426042 - RNA, 25 nt, Human
ucccagggagucacuguaggacacc

SEQ ID NO: 426043 - RNA, 22 nt, Human
uccccccagcucagaugggggu

SEQ ID NO: 426044 - RNA, 24 nt, Human
uccuggacccugacacuggagguu

SEQ ID NO: 426045 - RNA, 20 nt, Human
ucggugggcuggccaccagg

SEQ ID NO: 426046 - RNA, 22 nt, Human
ucucaaccucggauccucuuug

SEQ ID NO: 426047 - RNA, 21 nt, Human
ucugucacucucuggggcuug

SEQ ID NO: 426048 - RNA, 20 nt, Human
ucugugccaggcagcauguc

SEQ ID NO: 426049 - RNA, 24 nt, Human
ugacugaggcaucucuugcacucu

SEQ ID NO: 426050 - RNA, 21 nt, Human
ugagaaaguggagccgcugcc

SEQ ID NO: 426051 - RNA, 19 nt, Human
ugagcuggacgcccagacc

SEQ ID NO: 426052 - RNA, 23 nt, Human
ugagcuggacgcccagaccccca

SEQ ID NO: 426053 - RNA, 18 nt, Human
ugaggaggagccgccugc

SEQ ID NO: 426054 - RNA, 21 nt, Human
ugaggccccagcccagggggc

SEQ ID NO: 426055 - RNA, 20 nt, Human
ugcacucugcaguuuaauuu

SEQ ID NO: 426056 - RNA, 21 nt, Human
ugcaggacaggguccugcagg

SEQ ID NO: 426057 - RNA, 23 nt, Human
ugccagcccugcgcugccugcgc

SEQ ID NO: 426058 - RNA, 19 nt, Human
ugccaggcagcauguggag

SEQ ID NO: 426059 - RNA, 23 nt, Human
ugccugcagccccacuguggccu

SEQ ID NO: 426060 - RNA, 21 nt, Human
ugcgcugccugcgcuccucug

SEQ ID NO: 426061 - RNA, 19 nt, Human
ugggcuggccaccaggaug

SEQ ID NO: 426062 - RNA, 20 nt, Human
ugucaaaggccuggucugug

SEQ ID NO: 426063 - RNA, 24 nt, Human
ugucggggcuucucaggcagggcu

SEQ ID NO: 426064 - RNA, 18 nt, Human
ugugcagccagauguguu

SEQ ID NO: 426065 - RNA, 19 nt, Human
uguggaggcacugaguggg

SEQ ID NO: 426066 - RNA, 24 nt, Human
uuggccaacggcaguccggcuccu

SEQ ID NO: 426067 - RNA, 20 nt, Human
uuuccagccagauguaaggc

SEQ ID NO: 426068 - RNA, 20 nt, Human
uuuguggggcacagugugug

SEQ ID NO: 426069 - RNA, 19 nt, Human
uuuuaaaggcccgagcccc

SEQ ID NO: 426070 - RNA, 19 nt, Human
uuuuuuuuuuuuuuuugca

SEQ ID NO: 426071 - RNA, 18 nt, Human
uuuuuuuuuuuuuuuuug

SEQ ID NO: 426072 - RNA, 19 nt, Human
uuuuuuuuuuuuuuuuugc

SEQ ID NO: 426073 - RNA, 19 nt, Human
aaaacgcccgcuuucacag

SEQ ID NO: 426074 - RNA, 18 nt, Human
aaacauagucuagugaac

SEQ ID NO: 426075 - RNA, 21 nt, Human
aaacgcccgcuuucacagauc

SEQ ID NO: 426076 - RNA, 23 nt, Human
aaacgcccgcuuucacagaucaa

SEQ ID NO: 426077 - RNA, 22 nt, Human
aauacucuccgugacucuacuu

SEQ ID NO: 426078 - RNA, 21 nt, Human
acaggauguuggacagcuauc

SEQ ID NO: 426079 - RNA, 24 nt, Human
acucuacuuccgguaucuuccaaa

SEQ ID NO: 426080 - RNA, 18 nt, Human
agaaaugaauagaaaaca

SEQ ID NO: 426081 - RNA, 21 nt, Human
aucuucccagacaggauguug

SEQ ID NO: 426082 - RNA, 26 nt, Human
caaaaaaagcugaagacauuuuaaaa

SEQ ID NO: 426083 - RNA, 18 nt, Human
ccggauccuaccucuccg

SEQ ID NO: 426084 - RNA, 23 nt, Human
cucuacuuccgguaucuuccaaa

SEQ ID NO: 426085 - RNA, 18 nt, Human
cugaaugaauaguuuaga

SEQ ID NO: 426086 - RNA, 19 nt, Human
gcugaaugaauaguuuaga

SEQ ID NO: 426087 - RNA, 18 nt, Human
guccuguuuucaaaaucu

SEQ ID NO: 426088 - RNA, 21 nt, Human
uaaaauguucaaacaucaaug

SEQ ID NO: 426089 - RNA, 22 nt, Human
uaaaauguucaaacaucaaugu

SEQ ID NO: 426090 - RNA, 23 nt, Human
uaaaauguucaaacaucaauguu

SEQ ID NO: 426091 - RNA, 19 nt, Human
uacaucaucacacaaauua

SEQ ID NO: 426092 - RNA, 24 nt, Human
uacaucaucacacaaauuaaaaug

SEQ ID NO: 426093 - RNA, 23 nt, Human
uagaacucaaugugccaguguca

SEQ ID NO: 426094 - RNA, 19 nt, Human
ucaaaaaaagcugaagaca

SEQ ID NO: 426095 - RNA, 20 nt, Human
ucaauguaucaaaaauuuua

SEQ ID NO: 426096 - RNA, 23 nt, Human
uccaaaacgcccgcuuucacaga

SEQ ID NO: 426097 - RNA, 18 nt, Human
ugacuugaaauucuccuu

SEQ ID NO: 426098 - RNA, 19 nt, Human
ugauguuuucuuuguccug

SEQ ID NO: 426099 - RNA, 22 nt, Human
ugauguuuucuuuguccuguuu

SEQ ID NO: 426100 - RNA, 26 nt, Human
ugugugaaugaauaugauaaaugugu

SEQ ID NO: 426101 - RNA, 18 nt, Human
uuauauuuucuacaucau

SEQ ID NO: 426102 - RNA, 23 nt, Human
uucacaauguuuauguacaaacu

SEQ ID NO: 426103 - RNA, 20 nt, Human
aaacuuucucucuuugaggc

SEQ ID NO: 426104 - RNA, 21 nt, Human
aaagaucaguaagaccacaga

SEQ ID NO: 426105 - RNA, 23 nt, Human
aaccaccuauauacagaggcaga

SEQ ID NO: 426106 - RNA, 19 nt, Human
aaccagaaaauaacaauga

SEQ ID NO: 426107 - RNA, 20 nt, Human
aaccagaaaauaacaaugac

SEQ ID NO: 426108 - RNA, 24 nt, Human
aagaaugaggacaagaaaaaaaga

SEQ ID NO: 426109 - RNA, 21 nt, Human
aagaucuacuuuccagaaacu

SEQ ID NO: 426110 - RNA, 23 nt, Human
accacagaaaaaauaauacacca

SEQ ID NO: 426111 - RNA, 20 nt, Human
acucaaggcaagaaugagga

SEQ ID NO: 426112 - RNA, 19 nt, Human
agagaacagugaagugaua

SEQ ID NO: 426113 - RNA, 19 nt, Human
agaggaacuggaacucaag

SEQ ID NO: 426114 - RNA, 19 nt, Human
aggacaagaaaaaaagaga

SEQ ID NO: 426115 - RNA, 27 nt, Human
aggcaagaaugaggacaagagggaccc

SEQ ID NO: 426116 - RNA, 21 nt, Human
auugugcuccccuucccaccc

SEQ ID NO: 426117 - RNA, 20 nt, Human
caaagaggaacuggaacuca

SEQ ID NO: 426118 - RNA, 24 nt, Human
caaagaugaaagcugacuuaggua

SEQ ID NO: 426119 - RNA, 21 nt, Human
caaccagaaaauaacaaugac

SEQ ID NO: 426120 - RNA, 22 nt, Human
caccuauauacagaggcagagu

SEQ ID NO: 426121 - RNA, 20 nt, Human
cacugcuuaaaaggaguaug

SEQ ID NO: 426122 - RNA, 18 nt, Human
caucacagcgauggcagc

SEQ ID NO: 426123 - RNA, 20 nt, Human
caugagaccaccaccauaac

SEQ ID NO: 426124 - RNA, 24 nt, Human
ccacagagaauuagaugauccgcc

SEQ ID NO: 426125 - RNA, 24 nt, Human
ccaccccacuuaaagaaaaccacc

SEQ ID NO: 426126 - RNA, 19 nt, Human
ccaugguuuuccuaaccca

SEQ ID NO: 426127 - RNA, 19 nt, Human
cccaccccacuuaaagaaa

SEQ ID NO: 426128 - RNA, 25 nt, Human
cccuucccaccccacuuaaagaaaa

SEQ ID NO: 426129 - RNA, 21 nt, Human
ccgguccucaggcgcuuuggu

SEQ ID NO: 426130 - RNA, 24 nt, Human
ccuccagguaaccugcugggaauu

SEQ ID NO: 426131 - RNA, 19 nt, Human
ccuuacccaugguuuuccu

SEQ ID NO: 426132 - RNA, 30 nt, Human
ccuuacccaugguuuuccuaacccagcugg

SEQ ID NO: 426133 - RNA, 19 nt, Human
cuauauacagaggcagagu

SEQ ID NO: 426134 - RNA, 19 nt, Human
cucaaggcaagaaugagga

SEQ ID NO: 426135 - RNA, 23 nt, Human
cuuguugggaggaagcaaaugcu

SEQ ID NO: 426136 - RNA, 23 nt, Human
gaacucccagcaucacagcgaug

SEQ ID NO: 426137 - RNA, 18 nt, Human
gaauuucuugagauuuug

SEQ ID NO: 426138 - RNA, 18 nt, Human
gacuuaugagggugcuga

SEQ ID NO: 426139 - RNA, 21 nt, Human
gagaccaccaccauaacucac

SEQ ID NO: 426140 - RNA, 19 nt, Human
gaggacaagaaaaaaagag

SEQ ID NO: 426141 - RNA, 22 nt, Human
gaguaugaagggaaauugugcu

SEQ ID NO: 426142 - RNA, 19 nt, Human
gcuccccuucccaccccac

SEQ ID NO: 426143 - RNA, 23 nt, Human
gcuguuggaggaucaggcaaagg

SEQ ID NO: 426144 - RNA, 21 nt, Human
guaaaggagacaccauccaca

SEQ ID NO: 426145 - RNA, 18 nt, Human
guccucaggcgcuuuggu

SEQ ID NO: 426146 - RNA, 18 nt, Human
uaacgaaacuuucucucu

SEQ ID NO: 426147 - RNA, 27 nt, Human
uaacgaaacuuucucucuuugaggcuu

SEQ ID NO: 426148 - RNA, 22 nt, Human
uaagaaacucaucaauaaccau

SEQ ID NO: 426149 - RNA, 23 nt, Human
uacaaagaucaguaagaccacag

SEQ ID NO: 426150 - RNA, 18 nt, Human
uagaacucccagcaucac

SEQ ID NO: 426151 - RNA, 19 nt, Human
ucaaggcaagaaugaggac

SEQ ID NO: 426152 - RNA, 25 nt, Human
ucaguuuuugaguuucuaaagguuc

SEQ ID NO: 426153 - RNA, 25 nt, Human
ugagaccaccaccauaacucacugc

SEQ ID NO: 426154 - RNA, 23 nt, Human
ugccgguccucaggcgcuuuggu

SEQ ID NO: 426155 - RNA, 20 nt, Human
ugcugaagacagaggugacu

SEQ ID NO: 426156 - RNA, 24 nt, Human
uggcagagauugggccaaaagguc

SEQ ID NO: 426157 - RNA, 20 nt, Human
ugggaaagaccgaaaaguua

SEQ ID NO: 426158 - RNA, 19 nt, Human
ugggaggaagcaaaugcua

SEQ ID NO: 426159 - RNA, 21 nt, Human
uguacaccaaagaggaacugg

SEQ ID NO: 426160 - RNA, 24 nt, Human
ugugguaacuagaaggccucaacu

SEQ ID NO: 426161 - RNA, 22 nt, Human
uguuggaggaucaggcaaagga

SEQ ID NO: 426162 - RNA, 21 nt, Human
uuggcuccccuugaauggccg

SEQ ID NO: 426163 - RNA, 20 nt, Human
aaacuauuccguagaaguaa

SEQ ID NO: 426164 - RNA, 19 nt, Human
aaagaggccucccuccuuc

SEQ ID NO: 426165 - RNA, 26 nt, Human
aaaugauucuugugccucagcagcca

SEQ ID NO: 426166 - RNA, 21 nt, Human
aagaaggucagcagggaaaca

SEQ ID NO: 426167 - RNA, 20 nt, Human
aagagaauuuuacagcacaa

SEQ ID NO: 426168 - RNA, 19 nt, Human
aagcaggagacagaagccu

SEQ ID NO: 426169 - RNA, 23 nt, Human
aagcauacagccugcaaacauau

SEQ ID NO: 426170 - RNA, 24 nt, Human
aaggugcuaggauuacaggcguga

SEQ ID NO: 426171 - RNA, 23 nt, Human
aaucugaucuuucuuuuccccac

SEQ ID NO: 426172 - RNA, 22 nt, Human
acaaaaauaaaaagacaucucc

SEQ ID NO: 426173 - RNA, 24 nt, Human
acacagacacaguaacaaucugau

SEQ ID NO: 426174 - RNA, 19 nt, Human
acaucggaucaccuaggga

SEQ ID NO: 426175 - RNA, 19 nt, Human
acauuauucuguaacagug

SEQ ID NO: 426176 - RNA, 19 nt, Human
accuagggaguuuuugggg

SEQ ID NO: 426177 - RNA, 21 nt, Human
acuacaacucaaaaaagaaga

SEQ ID NO: 426178 - RNA, 21 nt, Human
agacacucaggaaguugaugg

SEQ ID NO: 426179 - RNA, 19 nt, Human
agacaggauugauuacugg

SEQ ID NO: 426180 - RNA, 23 nt, Human
agccaaaaacaaaaauugcuuaa

SEQ ID NO: 426181 - RNA, 25 nt, Human
aggaaauggcaaagaacauuuuuug

SEQ ID NO: 426182 - RNA, 23 nt, Human
aggaggcaggugacagggaggaa

SEQ ID NO: 426183 - RNA, 22 nt, Human
agggauggaaugucccuuuguc

SEQ ID NO: 426184 - RNA, 19 nt, Human
aguagcuggaauuacaggc

SEQ ID NO: 426185 - RNA, 19 nt, Human
agugauccacccaccuuga

SEQ ID NO: 426186 - RNA, 24 nt, Human
aguggaguggcaugaucuuggcuc

SEQ ID NO: 426187 - RNA, 22 nt, Human
auagagaaagaacagugggccc

SEQ ID NO: 426188 - RNA, 25 nt, Human
auggcuaccacuaaggguacaggga

SEQ ID NO: 426189 - RNA, 18 nt, Human
augggguuucgccauguu

SEQ ID NO: 426190 - RNA, 23 nt, Human
augggguuucgccauguuggcca

SEQ ID NO: 426191 - RNA, 24 nt, Human
augggguuucgccauguuggccag

SEQ ID NO: 426192 - RNA, 19 nt, Human
auggugugucuucaguuac

SEQ ID NO: 426193 - RNA, 24 nt, Human
caaggugcuaggauuacaggcgug

SEQ ID NO: 426194 - RNA, 23 nt, Human
caagugauccacccaccuugacc

SEQ ID NO: 426195 - RNA, 23 nt, Human
cacagaaauugcauauucacuac

SEQ ID NO: 426196 - RNA, 20 nt, Human
caccaagacacacaccacgg

SEQ ID NO: 426197 - RNA, 22 nt, Human
caccgagacauuccauuaccag

SEQ ID NO: 426198 - RNA, 20 nt, Human
caccuugacccccaaggugc

SEQ ID NO: 426199 - RNA, 21 nt, Human
cagaggucccugcagcuuucu

SEQ ID NO: 426200 - RNA, 18 nt, Human
cagcagccagaguagcug

SEQ ID NO: 426201 - RNA, 19 nt, Human
cagcagccagaguagcugg

SEQ ID NO: 426202 - RNA, 20 nt, Human
cagcauaucucaccuccagc

SEQ ID NO: 426203 - RNA, 21 nt, Human
cagccgaggaguuuccgccug

SEQ ID NO: 426204 - RNA, 19 nt, Human
caggagacagaagccuucc

SEQ ID NO: 426205 - RNA, 25 nt, Human
cauaaaagaaccuucugauaagaag

SEQ ID NO: 426206 - RNA, 19 nt, Human
cauagcccacccccuucca

SEQ ID NO: 426207 - RNA, 20 nt, Human
caugaaauucacagaaacga

SEQ ID NO: 426208 - RNA, 22 nt, Human
cauguuggccaggcuggccuca

SEQ ID NO: 426209 - RNA, 22 nt, Human
ccaaggugcuaggauuacaggc

SEQ ID NO: 426210 - RNA, 24 nt, Human
ccaaggugcuaggauuacaggcgu

SEQ ID NO: 426211 - RNA, 18 nt, Human
ccacagaaacucuccaga

SEQ ID NO: 426212 - RNA, 18 nt, Human
ccacuuuugugcaguauc

SEQ ID NO: 426213 - RNA, 19 nt, Human
ccaggcuuucuugggcaga

SEQ ID NO: 426214 - RNA, 22 nt, Human
ccauguuggccaggcuggccuc

SEQ ID NO: 426215 - RNA, 18 nt, Human
cccagacuggaguggagu

SEQ ID NO: 426216 - RNA, 24 nt, Human
ccccaaggugcuaggauuacaggc

SEQ ID NO: 426217 - RNA, 20 nt, Human
cccccaaggugcuaggauua

SEQ ID NO: 426218 - RNA, 21 nt, Human
cccggccucggcgcgcucggc

SEQ ID NO: 426219 - RNA, 19 nt, Human
ccucccuccuucacuauuc

SEQ ID NO: 426220 - RNA, 24 nt, Human
ccugaccucaagugauccacccac

SEQ ID NO: 426221 - RNA, 21 nt, Human
ccugcacagcccuaaauccau

SEQ ID NO: 426222 - RNA, 23 nt, Human
ccugcagcuuucugcugugcauu

SEQ ID NO: 426223 - RNA, 24 nt, Human
cgccauguuggccaggcuggccuc

SEQ ID NO: 426224 - RNA, 27 nt, Human
cgccauguuggccaggcuggccucaaa

SEQ ID NO: 426225 - RNA, 26 nt, Human
cgcgcucggcuccggcucgggggucc

SEQ ID NO: 426226 - RNA, 24 nt, Human
cggcucggggguccggcacggcag

SEQ ID NO: 426227 - RNA, 21 nt, Human
cggcuuucauagcccaccccc

SEQ ID NO: 426228 - RNA, 21 nt, Human
cuaaaaauauuuguccucuaa

SEQ ID NO: 426229 - RNA, 18 nt, Human
cuaaaguuauaggcuaac

SEQ ID NO: 426230 - RNA, 24 nt, Human
cucaaaaaugccuucaaauuuuua

SEQ ID NO: 426231 - RNA, 23 nt, Human
cucaagugauccacccaccuuga

SEQ ID NO: 426232 - RNA, 26 nt, Human
cucacagcaaccgccaccuccuaggu

SEQ ID NO: 426233 - RNA, 20 nt, Human
cucugucgcccagacuggag

SEQ ID NO: 426234 - RNA, 23 nt, Human
cucugucgcccagacuggagugg

SEQ ID NO: 426235 - RNA, 24 nt, Human
cuggaguggaguggcaugaucuug

SEQ ID NO: 426236 - RNA, 23 nt, Human
cuuuuuuuuuuuuuugagucaga

SEQ ID NO: 426237 - RNA, 24 nt, Human
gaagaugagaugguugcugaagac

SEQ ID NO: 426238 - RNA, 20 nt, Human
gagggccagauccuccagga

SEQ ID NO: 426239 - RNA, 26 nt, Human
gaguagcuggaauuacaggccuaugc

SEQ ID NO: 426240 - RNA, 18 nt, Human
gauuacaggcgugagcca

SEQ ID NO: 426241 - RNA, 21 nt, Human
gauuacaggcgugagccaccg

SEQ ID NO: 426242 - RNA, 24 nt, Human
gauuacaggcgugagccaccgugc

SEQ ID NO: 426243 - RNA, 21 nt, Human
gauucuugugccucagcagcc

SEQ ID NO: 426244 - RNA, 22 nt, Human
gcaaccgccaccuccuagguuc

SEQ ID NO: 426245 - RNA, 23 nt, Human
gcccagacuggaguggaguggca

SEQ ID NO: 426246 - RNA, 23 nt, Human
gcuggccucaaacuccugaccuc

SEQ ID NO: 426247 - RNA, 22 nt, Human
ggauuacaggcgugagccaccg

SEQ ID NO: 426248 - RNA, 20 nt, Human
gggcagaggucccugcagcu

SEQ ID NO: 426249 - RNA, 23 nt, Human
gggcaucuggaguuuuaaaugcu

SEQ ID NO: 426250 - RNA, 22 nt, Human
gggguuucgccauguuggccag

SEQ ID NO: 426251 - RNA, 22 nt, Human
ggguuucgccauguuggccagg

SEQ ID NO: 426252 - RNA, 21 nt, Human
gugauccacccaccuugaccc

SEQ ID NO: 426253 - RNA, 21 nt, Human
gugcuaggauuacaggcguga

SEQ ID NO: 426254 - RNA, 20 nt, Human
guucaaggaaagguacugug

SEQ ID NO: 426255 - RNA, 21 nt, Human
uaaaagaaccuucugauaaga

SEQ ID NO: 426256 - RNA, 22 nt, Human
uaacaaggcacauccugcacag

SEQ ID NO: 426257 - RNA, 23 nt, Human
uaagauuuaaaggguggaagggg

SEQ ID NO: 426258 - RNA, 24 nt, Human
uacaggcgugagccaccgugccca

SEQ ID NO: 426259 - RNA, 19 nt, Human
uacuaugacaauugcuaaa

SEQ ID NO: 426260 - RNA, 22 nt, Human
uagaaaugggguuucgccaugu

SEQ ID NO: 426261 - RNA, 18 nt, Human
uaggauuacaggcgugag

SEQ ID NO: 426262 - RNA, 21 nt, Human
uaggauuacaggcgugagcca

SEQ ID NO: 426263 - RNA, 22 nt, Human
uaggauuacaggcgugagccac

SEQ ID NO: 426264 - RNA, 23 nt, Human
uaggauuacaggcgugagccacc

SEQ ID NO: 426265 - RNA, 23 nt, Human
uaggauuacaggcgugagccacc

SEQ ID NO: 426266 - RNA, 24 nt, Human
uaggauuacaggcgugagccaccg

SEQ ID NO: 426267 - RNA, 23 nt, Human
uaggcuaacaacaucucaaagca

SEQ ID NO: 426268 - RNA, 24 nt, Human
uaguagaaaugggguuucgccaug

SEQ ID NO: 426269 - RNA, 21 nt, Human
uauaaaauguaaauacuccuc

SEQ ID NO: 426270 - RNA, 21 nt, Human
uaucucaggcugucucagugg

SEQ ID NO: 426271 - RNA, 26 nt, Human
uaucucaggcugucucaguggggggg

SEQ ID NO: 426272 - RNA, 22 nt, Human
uaugacaauugcuaaaaaacaa

SEQ ID NO: 426273 - RNA, 20 nt, Human
uauucuguaacaguggugcu

SEQ ID NO: 426274 - RNA, 19 nt, Human
uauugcugccagcauaucu

SEQ ID NO: 426275 - RNA, 24 nt, Human
ucacagcaaccgccaccuccuagg

SEQ ID NO: 426276 - RNA, 18 nt, Human
ucagagccacuuuuuuuu

SEQ ID NO: 426277 - RNA, 27 nt, Human
ucagcaccgacccuuuaaccuccggag

SEQ ID NO: 426278 - RNA, 25 nt, Human
ucagccaaaaacaaaaauugcuuaa

SEQ ID NO: 426279 - RNA, 25 nt, Human
ucaggugaagcuggaagaugagaug

SEQ ID NO: 426280 - RNA, 24 nt, Human
ucagugggggggaaaccuuggaca

SEQ ID NO: 426281 - RNA, 18 nt, Human
ucauagcccacccccuuc

SEQ ID NO: 426282 - RNA, 24 nt, Human
uccacagaaacucuccagaauucc

SEQ ID NO: 426283 - RNA, 21 nt, Human
uccagaauuccaugaucucaa

SEQ ID NO: 426284 - RNA, 22 nt, Human
uccaugggguacaugcugguuc

SEQ ID NO: 426285 - RNA, 19 nt, Human
uccauuaccagggacaagc

SEQ ID NO: 426286 - RNA, 24 nt, Human
ucccagcuaauuuuuuuguauuuu

SEQ ID NO: 426287 - RNA, 21 nt, Human
uccuagguucaaaugauucuu

SEQ ID NO: 426288 - RNA, 22 nt, Human
uccuagguucaaaugauucuug

SEQ ID NO: 426289 - RNA, 21 nt, Human
uccucagcaccgacccuuuac

SEQ ID NO: 426290 - RNA, 22 nt, Human
uccucuaauauuuuggugucuc

SEQ ID NO: 426291 - RNA, 25 nt, Human
uccuggacccacugucagagaccuu

SEQ ID NO: 426292 - RNA, 24 nt, Human
ucgccauguuggccaggcuggccu

SEQ ID NO: 426293 - RNA, 21 nt, Human
ucgcccagacuggaguggagu

SEQ ID NO: 426294 - RNA, 23 nt, Human
ucuagggcuuuccuggaaugaag

SEQ ID NO: 426295 - RNA, 24 nt, Human
ucuggccaucgugucauggcuacc

SEQ ID NO: 426296 - RNA, 24 nt, Human
ucuugcucugucgcccagacugga

SEQ ID NO: 426297 - RNA, 20 nt, Human
ugacagcagguuuuuugaca

SEQ ID NO: 426298 - RNA, 20 nt, Human
ugacccccaaggugcuagga

SEQ ID NO: 426299 - RNA, 25 nt, Human
ugaccucaagugauccacccaccuu

SEQ ID NO: 426300 - RNA, 18 nt, Human
ugagcacagaguuggggc

SEQ ID NO: 426301 - RNA, 21 nt, Human
ugagcacagaguuggggcuaa

SEQ ID NO: 426302 - RNA, 18 nt, Human
ugaggaggcaggugacag

SEQ ID NO: 426303 - RNA, 23 nt, Human
ugaggaggcaggugacagggagg

SEQ ID NO: 426304 - RNA, 20 nt, Human
ugaucuaggacauuuaucuu

SEQ ID NO: 426305 - RNA, 18 nt, Human
ugauggguggccccaggg

SEQ ID NO: 426306 - RNA, 21 nt, Human
ugauggguggccccagggugu

SEQ ID NO: 426307 - RNA, 18 nt, Human
ugcaccacugacaaauag

SEQ ID NO: 426308 - RNA, 19 nt, Human
ugcauauucacuacaacuc

SEQ ID NO: 426309 - RNA, 24 nt, Human
ugcuaggauuacaggcgugagcca

SEQ ID NO: 426310 - RNA, 21 nt, Human
uggaaaugcucaaaaaugccu

SEQ ID NO: 426311 - RNA, 23 nt, Human
uggaaaugcucaaaaaugccuuc

SEQ ID NO: 426312 - RNA, 21 nt, Human
uggaagaugagaugguugcug

SEQ ID NO: 426313 - RNA, 24 nt, Human
uggaauuacaggccuaugccacca

SEQ ID NO: 426314 - RNA, 24 nt, Human
uggaguggaguggcaugaucuugg

SEQ ID NO: 426315 - RNA, 24 nt, Human
uggccaggcuggccucaaacuccu

SEQ ID NO: 426316 - RNA, 20 nt, Human
uggccucaaacuccugaccu

SEQ ID NO: 426317 - RNA, 20 nt, Human
uggccucugaguucccucag

SEQ ID NO: 426318 - RNA, 23 nt, Human
uggcuaccacuaaggguacaggg

SEQ ID NO: 426319 - RNA, 20 nt, Human
uggcuccugacuccuuuucc

SEQ ID NO: 426320 - RNA, 27 nt, Human
ugggaaagucagagccacuuuuuuuuu

SEQ ID NO: 426321 - RNA, 19 nt, Human
ugggcugagcacuccuggc

SEQ ID NO: 426322 - RNA, 21 nt, Human
uggggcaauuuuuuguagaga

SEQ ID NO: 426323 - RNA, 20 nt, Human
uggggguugagaggagggcc

SEQ ID NO: 426324 - RNA, 24 nt, Human
ugggguuucgccauguuggccagg

SEQ ID NO: 426325 - RNA, 20 nt, Human
uggguggccccagggugugg

SEQ ID NO: 426326 - RNA, 18 nt, Human
uggugugggcaucuggag

SEQ ID NO: 426327 - RNA, 21 nt, Human
uguauuuuuaguagaaauggg

SEQ ID NO: 426328 - RNA, 23 nt, Human
ugucccuuugucgcuccagcuua

SEQ ID NO: 426329 - RNA, 18 nt, Human
uguggaggacccgcaccg

SEQ ID NO: 426330 - RNA, 18 nt, Human
uuacgcacccugacugau

SEQ ID NO: 426331 - RNA, 18 nt, Human
uuaguagaaaugggguuu

SEQ ID NO: 426332 - RNA, 22 nt, Human
uuaguagaaaugggguuucgcc

SEQ ID NO: 426333 - RNA, 24 nt, Human
uuaguagaaaugggguuucgccau

SEQ ID NO: 426334 - RNA, 23 nt, Human
uucaaaacuccuuaaauggaucu

SEQ ID NO: 426335 - RNA, 23 nt, Human
uucaaaugauucuugugccucag

SEQ ID NO: 426336 - RNA, 22 nt, Human
uucauucucaccucacaguggc

SEQ ID NO: 426337 - RNA, 19 nt, Human
uuccagaaggucugauggg

SEQ ID NO: 426338 - RNA, 21 nt, Human
uucugugagcacagaguuggg

SEQ ID NO: 426339 - RNA, 19 nt, Human
uuggaggguggguggacaa

SEQ ID NO: 426340 - RNA, 23 nt, Human
uuggaggguggguggacaaaugg

SEQ ID NO: 426341 - RNA, 21 nt, Human
uuggucccauaagaauuauag

SEQ ID NO: 426342 - RNA, 23 nt, Human
uuguauuuuuaguagaaaugggg

SEQ ID NO: 426343 - RNA, 22 nt, Human
uugugcaguaucuaggaaaugg

SEQ ID NO: 426344 - RNA, 21 nt, Human
uuucgccauguuggccaggcu

SEQ ID NO: 426345 - RNA, 18 nt, Human
uuugaaaaagcagccgag

SEQ ID NO: 426346 - RNA, 22 nt, Human
uuuguggucuugauagaguugg

SEQ ID NO: 426347 - RNA, 24 nt, Human
uuuuuaguagaaaugggguuucgc

SEQ ID NO: 426348 - RNA, 18 nt, Human
uuuuuuguauuuuuagua

SEQ ID NO: 426349 - RNA, 19 nt, Human
uuuuuuuuuugagucagag

SEQ ID NO: 426350 - RNA, 22 nt, Human
aaaaagaaauccagaauuuugg

SEQ ID NO: 426351 - RNA, 22 nt, Human
aaaacaggagggauaaagagga

SEQ ID NO: 426352 - RNA, 22 nt, Human
aaaauaaaaaagaaauccagaa

SEQ ID NO: 426353 - RNA, 18 nt, Human
aaagacaggaaaagagag

SEQ ID NO: 426354 - RNA, 27 nt, Human
aacaaggagggcagggugugggagaga

SEQ ID NO: 426355 - RNA, 18 nt, Human
aagagagagggaaugagg

SEQ ID NO: 426356 - RNA, 19 nt, Human
aauccagaauuuuggaaau

SEQ ID NO: 426357 - RNA, 21 nt, Human
acacaacuucuucagcaagug

SEQ ID NO: 426358 - RNA, 28 nt, Human
accgggcuuugucucccccauucugcug

SEQ ID NO: 426359 - RNA, 19 nt, Human
agagaagagacuguggggu

SEQ ID NO: 426360 - RNA, 24 nt, Human
agagaagagacugugggguuugga

SEQ ID NO: 426361 - RNA, 20 nt, Human
agauaggaugagguuagggg

SEQ ID NO: 426362 - RNA, 22 nt, Human
agauaggaugagguuagggggu

SEQ ID NO: 426363 - RNA, 21 nt, Human
agauggugaaaggagagaaug

SEQ ID NO: 426364 - RNA, 25 nt, Human
aggaaaaaggaacucacuauacaaa

SEQ ID NO: 426365 - RNA, 25 nt, Human
aggaaaaaggaacucacuauacaaa

SEQ ID NO: 426366 - RNA, 23 nt, Human
aggaagaaaacucaaagugagaa

SEQ ID NO: 426367 - RNA, 21 nt, Human
aggaaggaaaaaggaacucac

SEQ ID NO: 426368 - RNA, 18 nt, Human
aggcaggggcaacaggga

SEQ ID NO: 426369 - RNA, 21 nt, Human
aggcaggggcaacagggaugc

SEQ ID NO: 426370 - RNA, 18 nt, Human
agggggagaggagagaug

SEQ ID NO: 426371 - RNA, 20 nt, Human
agguauggggugggggcggc

SEQ ID NO: 426372 - RNA, 20 nt, Human
aggugguacuagggggaguu

SEQ ID NO: 426373 - RNA, 23 nt, Human
agguugugaauuaugccaaguga

SEQ ID NO: 426374 - RNA, 21 nt, Human
agugccuaucuaucuucaugc

SEQ ID NO: 426375 - RNA, 21 nt, Human
aguguuguccugccuccuggg

SEQ ID NO: 426376 - RNA, 18 nt, Human
aucccagucucaguguug

SEQ ID NO: 426377 - RNA, 18 nt, Human
augguagaucaagguaug

SEQ ID NO: 426378 - RNA, 22 nt, Human
caacuucuucagcaaguggacu

SEQ ID NO: 426379 - RNA, 19 nt, Human
caccacuugggagaugguc

SEQ ID NO: 426380 - RNA, 21 nt, Human
caccucagacagcugaaacaa

SEQ ID NO: 426381 - RNA, 19 nt, Human
cacuauacaaauauaggaa

SEQ ID NO: 426382 - RNA, 25 nt, Human
cacuauacaaauauaggaagaaaac

SEQ ID NO: 426383 - RNA, 19 nt, Human
cagcgcccagagacgcagg

SEQ ID NO: 426384 - RNA, 21 nt, Human
cagcgcccagagacgcagggg

SEQ ID NO: 426385 - RNA, 21 nt, Human
cagcugaaacaaggagggcag

SEQ ID NO: 426386 - RNA, 19 nt, Human
caggauuuugucacucugg

SEQ ID NO: 426387 - RNA, 19 nt, Human
cagggugugggagagaaga

SEQ ID NO: 426388 - RNA, 20 nt, Human
caguaaaucugggcaggcag

SEQ ID NO: 426389 - RNA, 20 nt, Human
caugccuccaaaggacacca

SEQ ID NO: 426390 - RNA, 21 nt, Human
ccccuuccuuuuaacuuccca

SEQ ID NO: 426391 - RNA, 21 nt, Human
ccgcgcuccagcgcccagaga

SEQ ID NO: 426392 - RNA, 25 nt, Human
ccgggcuuugucucccccauucugc

SEQ ID NO: 426393 - RNA, 21 nt, Human
ccuccaaaggacaccacucac

SEQ ID NO: 426394 - RNA, 22 nt, Human
ccuccaaaggacaccacucacu

SEQ ID NO: 426395 - RNA, 19 nt, Human
cgccgcgcuccagcgccca

SEQ ID NO: 426396 - RNA, 23 nt, Human
cucaguguuguccugccuccugg

SEQ ID NO: 426397 - RNA, 18 nt, Human
cuucggaaucuugggcuu

SEQ ID NO: 426398 - RNA, 26 nt, Human
gaaauucuuccagagaaaugacacua

SEQ ID NO: 426399 - RNA, 21 nt, Human
gaauuucugaucucugguguu

SEQ ID NO: 426400 - RNA, 22 nt, Human
gaccgggcuuugucucccccau

SEQ ID NO: 426401 - RNA, 21 nt, Human
gagaauggggacagcauggaa

SEQ ID NO: 426402 - RNA, 24 nt, Human
gagagaauggggacagcauggaaa

SEQ ID NO: 426403 - RNA, 22 nt, Human
gagaugaaggagggggagagga

SEQ ID NO: 426404 - RNA, 22 nt, Human
gaggcaccucagacagcugaaa

SEQ ID NO: 426405 - RNA, 24 nt, Human
gagggaaugagggagaaaaaggga

SEQ ID NO: 426406 - RNA, 23 nt, Human
gauaggaugagguuaggggguga

SEQ ID NO: 426407 - RNA, 18 nt, Human
gcuuccuuugcgccuuuc

SEQ ID NO: 426408 - RNA, 19 nt, Human
ggaguugucugucuucuuc

SEQ ID NO: 426409 - RNA, 21 nt, Human
ggaugguagaucaagguaugg

SEQ ID NO: 426410 - RNA, 22 nt, Human
gggaaugagggagaaaaaggga

SEQ ID NO: 426411 - RNA, 21 nt, Human
gggauaaaagacaggaaaaga

SEQ ID NO: 426412 - RNA, 21 nt, Human
ggggugagaccgggcuuuguc

SEQ ID NO: 426413 - RNA, 18 nt, Human
gggguuuggauuggggaa

SEQ ID NO: 426414 - RNA, 23 nt, Human
guagaucaagguauggggugggg

SEQ ID NO: 426415 - RNA, 20 nt, Human
gucgccgcgcuccagcgccc

SEQ ID NO: 426416 - RNA, 26 nt, Human
uaaaaaagaaauccagaauuuuggaa

SEQ ID NO: 426417 - RNA, 23 nt, Human
uaagagaggcccugcgaggcacc

SEQ ID NO: 426418 - RNA, 21 nt, Human
uaagaugguccuggacacucc

SEQ ID NO: 426419 - RNA, 23 nt, Human
uaagaugguccuggacacuccaa

SEQ ID NO: 426420 - RNA, 18 nt, Human
uagcuuuucuuacuccua

SEQ ID NO: 426421 - RNA, 23 nt, Human
uagggggugagaccgggcuuugu

SEQ ID NO: 426422 - RNA, 21 nt, Human
uauaggaagaaaacucaaagu

SEQ ID NO: 426423 - RNA, 23 nt, Human
ucagacagcugaaacaaggaggg

SEQ ID NO: 426424 - RNA, 18 nt, Human
ucaguccguccguccgcc

SEQ ID NO: 426425 - RNA, 23 nt, Human
ucaguguuguccugccuccuggg

SEQ ID NO: 426426 - RNA, 22 nt, Human
uccaccaugccuccaaaggaca

SEQ ID NO: 426427 - RNA, 21 nt, Human
ucccaaguucagucaguucuc

SEQ ID NO: 426428 - RNA, 24 nt, Human
ucccaguagcuacugcucugagcu

SEQ ID NO: 426429 - RNA, 20 nt, Human
uccuuugcgccuuucaucca

SEQ ID NO: 426430 - RNA, 24 nt, Human
ucgacaaauggggucaguaaaucu

SEQ ID NO: 426431 - RNA, 18 nt, Human
ucgccgcgcuccagcgcc

SEQ ID NO: 426432 - RNA, 18 nt, Human
ucuucggaaucuugggcu

SEQ ID NO: 426433 - RNA, 18 nt, Human
ugaaaggagagaaugggg

SEQ ID NO: 426434 - RNA, 21 nt, Human
ugaaaggagagaauggggaca

SEQ ID NO: 426435 - RNA, 23 nt, Human
ugaaaggagagaauggggacagc

SEQ ID NO: 426436 - RNA, 24 nt, Human
ugaaauacuccaaaauaaaaaaga

SEQ ID NO: 426437 - RNA, 22 nt, Human
ugagaacaugcguauuuugauu

SEQ ID NO: 426438 - RNA, 20 nt, Human
ugagcucaguaaaggccuug

SEQ ID NO: 426439 - RNA, 22 nt, Human
ugagcucaguaaaggccuuggg

SEQ ID NO: 426440 - RNA, 21 nt, Human
ugaguuuggggagggaggaga

SEQ ID NO: 426441 - RNA, 21 nt, Human
ugcccuggggcacacgggcac

SEQ ID NO: 426442 - RNA, 20 nt, Human
ugcuggacaauaauguaaaa

SEQ ID NO: 426443 - RNA, 21 nt, Human
uggaagagucugcaggaguca

SEQ ID NO: 426444 - RNA, 25 nt, Human
ugggauaaaagacaggaaaagagag

SEQ ID NO: 426445 - RNA, 24 nt, Human
ugggcaggcaggggcaacagggau

SEQ ID NO: 426446 - RNA, 19 nt, Human
uggggaagaggauggaugg

SEQ ID NO: 426447 - RNA, 25 nt, Human
uggggagggaggagagaugaaggag

SEQ ID NO: 426448 - RNA, 28 nt, Human
uggggagggaggagagaugaaggagggg

SEQ ID NO: 426449 - RNA, 22 nt, Human
uggggcacacgggcacagggac

SEQ ID NO: 426450 - RNA, 25 nt, Human
uggggcacacgggcacagggacagg

SEQ ID NO: 426451 - RNA, 21 nt, Human
uggggccaugucgacaaaugg

SEQ ID NO: 426452 - RNA, 23 nt, Human
ugggugagaacaugcguauuuug

SEQ ID NO: 426453 - RNA, 19 nt, Human
ugucauuuuauuucugggu

SEQ ID NO: 426454 - RNA, 19 nt, Human
uuaacucuaugccacuguc

SEQ ID NO: 426455 - RNA, 19 nt, Human
uuuacuguuucauggucca

SEQ ID NO: 426456 - RNA, 24 nt, Human
uuucccaaguucagucaguucucu

SEQ ID NO: 426457 - RNA, 20 nt, Human
uuugaauuuuaaauauuaac

SEQ ID NO: 426458 - RNA, 22 nt, Human
aaaacauauacaccagaccuuc

SEQ ID NO: 426459 - RNA, 20 nt, Human
aaacagaaaaaacaaccaca

SEQ ID NO: 426460 - RNA, 20 nt, Human
aaaggacugaagugaaaaag

SEQ ID NO: 426461 - RNA, 21 nt, Human
aaaugcaagaaacuuuaaaaa

SEQ ID NO: 426462 - RNA, 20 nt, Human
aacacggugaaacugcgucu

SEQ ID NO: 426463 - RNA, 21 nt, Human
aacacggugaaacugcgucuc

SEQ ID NO: 426464 - RNA, 24 nt, Human
aacuuuaaaaaacuggaauggaau

SEQ ID NO: 426465 - RNA, 25 nt, Human
aagaaaacaaaaaaaagugaaugua

SEQ ID NO: 426466 - RNA, 18 nt, Human
aagaaacuuuaaaaaacu

SEQ ID NO: 426467 - RNA, 23 nt, Human
aagaaaggaaaugauuuauaaau

SEQ ID NO: 426468 - RNA, 18 nt, Human
aaugacagcacucuucuu

SEQ ID NO: 426469 - RNA, 19 nt, Human
acacggugaaacugcgucu

SEQ ID NO: 426470 - RNA, 23 nt, Human
accaugagcaaaagugcauucaa

SEQ ID NO: 426471 - RNA, 23 nt, Human
accuguagucccagcuacucggg

SEQ ID NO: 426472 - RNA, 24 nt, Human
acugcacuccagccugggcggcag

SEQ ID NO: 426473 - RNA, 26 nt, Human
acugcacuccagccugggcggcagag

SEQ ID NO: 426474 - RNA, 24 nt, Human
acugcgucucuacuaaaaauacaa

SEQ ID NO: 426475 - RNA, 20 nt, Human
agaaaaucuacacaaguucu

SEQ ID NO: 426476 - RNA, 18 nt, Human
agacacucaaaccacuaa

SEQ ID NO: 426477 - RNA, 21 nt, Human
agacacugaagacgaaaagcu

SEQ ID NO: 426478 - RNA, 24 nt, Human
agagcuugcagugagccgagaucg

SEQ ID NO: 426479 - RNA, 24 nt, Human
agcacuuugggaggccgaggcggg

SEQ ID NO: 426480 - RNA, 20 nt, Human
agccaggcgugguggugggc

SEQ ID NO: 426481 - RNA, 24 nt, Human
agccugggcggcagagcgagacuc

SEQ ID NO: 426482 - RNA, 18 nt, Human
aggacugaagugaaaaag

SEQ ID NO: 426483 - RNA, 21 nt, Human
aggcagagcuugcagugagcc

SEQ ID NO: 426484 - RNA, 24 nt, Human
aggcagagcuugcagugagccgag

SEQ ID NO: 426485 - RNA, 18 nt, Human
aggcaggagaauggugug

SEQ ID NO: 426486 - RNA, 22 nt, Human
aggcaggagaauggugugaacc

SEQ ID NO: 426487 - RNA, 24 nt, Human
aggcaggagaauggugugaaccug

SEQ ID NO: 426488 - RNA, 23 nt, Human
aggccgaggcgggcagaucacaa

SEQ ID NO: 426489 - RNA, 24 nt, Human
aggcgggcagaucacaaggucagg

SEQ ID NO: 426490 - RNA, 24 nt, Human
aggcgugguggugggcaccuguag

SEQ ID NO: 426491 - RNA, 19 nt, Human
aggcugaggcaggagaaug

SEQ ID NO: 426492 - RNA, 23 nt, Human
aguaaagaagauuuucuucuuuu

SEQ ID NO: 426493 - RNA, 20 nt, Human
auaaagcccuuaaaaaaucu

SEQ ID NO: 426494 - RNA, 24 nt, Human
aucgcgccacugcacuccagccug

SEQ ID NO: 426495 - RNA, 22 nt, Human
caaaagaaagcauauauuaaga

SEQ ID NO: 426496 - RNA, 18 nt, Human
caaauuccacuucugugg

SEQ ID NO: 426497 - RNA, 18 nt, Human
caagucccugaucugguc

SEQ ID NO: 426498 - RNA, 21 nt, Human
caagucccugaucuggucaua

SEQ ID NO: 426499 - RNA, 18 nt, Human
caaugcaaccucauacaa

SEQ ID NO: 426500 - RNA, 23 nt, Human
caccuguagucccagcuacucgg

SEQ ID NO: 426501 - RNA, 24 nt, Human
caccuguagucccagcuacucggg

SEQ ID NO: 426502 - RNA, 24 nt, Human
cacgccuguaaucccagcacuuug

SEQ ID NO: 426503 - RNA, 23 nt, Human
cacuccagccugggcggcagagc

SEQ ID NO: 426504 - RNA, 24 nt, Human
cacuccagccugggcggcagagcg

SEQ ID NO: 426505 - RNA, 19 nt, Human
cacugcacuccagccuggg

SEQ ID NO: 426506 - RNA, 22 nt, Human
cacugcacuccagccugggcgg

SEQ ID NO: 426507 - RNA, 23 nt, Human
cacugcacuccagccugggcggc

SEQ ID NO: 426508 - RNA, 24 nt, Human
cacugcacuccagccugggcggca

SEQ ID NO: 426509 - RNA, 24 nt, Human
cagaaccacugccaacuugcauga

SEQ ID NO: 426510 - RNA, 19 nt, Human
cagagcgagacuccgucuc

SEQ ID NO: 426511 - RNA, 23 nt, Human
cagagcgagacuccgucucaaaa

SEQ ID NO: 426512 - RNA, 22 nt, Human
cagcacuuugggaggccgaggc

SEQ ID NO: 426513 - RNA, 24 nt, Human
cagcacuuugggaggccgaggcgg

SEQ ID NO: 426514 - RNA, 24 nt, Human
cagcuacucgggaggcugaggcag

SEQ ID NO: 426515 - RNA, 22 nt, Human
cauaaaaaccauaucccacugc

SEQ ID NO: 426516 - RNA, 20 nt, Human
ccacugcacuccagccuggg

SEQ ID NO: 426517 - RNA, 21 nt, Human
ccacugcacuccagccugggc

SEQ ID NO: 426518 - RNA, 22 nt, Human
ccacugcacuccagccugggcg

SEQ ID NO: 426519 - RNA, 23 nt, Human
ccacugcacuccagccugggcgg

SEQ ID NO: 426520 - RNA, 24 nt, Human
ccacugcacuccagccugggcggc

SEQ ID NO: 426521 - RNA, 21 nt, Human
ccaugacaucaacauuaaaca

SEQ ID NO: 426522 - RNA, 25 nt, Human
cccuuaaaaaaucucaugucacaag

SEQ ID NO: 426523 - RNA, 23 nt, Human
ccgucucaaaaaagaaaacaaaa

SEQ ID NO: 426524 - RNA, 20 nt, Human
ccuggcuaacacggugaaac

SEQ ID NO: 426525 - RNA, 22 nt, Human
ccuggcuaacacggugaaacug

SEQ ID NO: 426526 - RNA, 22 nt, Human
ccugggcggcagagcgagacuc

SEQ ID NO: 426527 - RNA, 21 nt, Human
ccuguagucccagcuacucgg

SEQ ID NO: 426528 - RNA, 24 nt, Human
cgagaccauccuggcuaacacggu

SEQ ID NO: 426529 - RNA, 24 nt, Human
cgagaucgcgccacugcacuccag

SEQ ID NO: 426530 - RNA, 26 nt, Human
cgccacugcacuccagccugggcggc

SEQ ID NO: 426531 - RNA, 24 nt, Human
cgccuguaaucccagcacuuuggg

SEQ ID NO: 426532 - RNA, 22 nt, Human
cgggcagaucacaaggucagga

SEQ ID NO: 426533 - RNA, 22 nt, Human
cuaaugaauaccaucaacuuuu

SEQ ID NO: 426534 - RNA, 24 nt, Human
cuagccaggcgugguggugggcac

SEQ ID NO: 426535 - RNA, 22 nt, Human
cucacgccuguaaucccagcac

SEQ ID NO: 426536 - RNA, 24 nt, Human
cucacgccuguaaucccagcacuu

SEQ ID NO: 426537 - RNA, 19 nt, Human
cucugagugccagcaaagc

SEQ ID NO: 426538 - RNA, 19 nt, Human
cucuguucaucuauauuca

SEQ ID NO: 426539 - RNA, 18 nt, Human
cuggcuaacacggugaaa

SEQ ID NO: 426540 - RNA, 22 nt, Human
cuuccacauuaagacacugaag

SEQ ID NO: 426541 - RNA, 21 nt, Human
cuugcagugagccgagaucgc

SEQ ID NO: 426542 - RNA, 22 nt, Human
cuugcaugaaguccaucuucac

SEQ ID NO: 426543 - RNA, 18 nt, Human
gaaaaaccuggcccaugu

SEQ ID NO: 426544 - RNA, 24 nt, Human
gaaaauaucuccaaauuuacaaag

SEQ ID NO: 426545 - RNA, 20 nt, Human
gaaccugggaggcagagcuu

SEQ ID NO: 426546 - RNA, 24 nt, Human
gaggcgggcagaucacaaggucag

SEQ ID NO: 426547 - RNA, 18 nt, Human
gaucaaaacauuuccccu

SEQ ID NO: 426548 - RNA, 24 nt, Human
gcacuccagccugggcggcagagc

SEQ ID NO: 426549 - RNA, 22 nt, Human
gccacugcacuccagccugggc

SEQ ID NO: 426550 - RNA, 24 nt, Human
gccacugcacuccagccugggcgg

SEQ ID NO: 426551 - RNA, 22 nt, Human
gccagcaaagccauucugucac

SEQ ID NO: 426552 - RNA, 20 nt, Human
gccgagaucgcgccacugca

SEQ ID NO: 426553 - RNA, 24 nt, Human
gcuaacacggugaaacugcgucuc

SEQ ID NO: 426554 - RNA, 20 nt, Human
gcuguuuuugccaacuuccu

SEQ ID NO: 426555 - RNA, 19 nt, Human
ggcaccuguagucccagcu

SEQ ID NO: 426556 - RNA, 24 nt, Human
ggcagagcgagacuccgucucaaa

SEQ ID NO: 426557 - RNA, 21 nt, Human
gggaaaaaaagaaaggaaaga

SEQ ID NO: 426558 - RNA, 20 nt, Human
gggcaccuguagucccagcu

SEQ ID NO: 426559 - RNA, 24 nt, Human
gggcagaucacaaggucaggagau

SEQ ID NO: 426560 - RNA, 24 nt, Human
gggcgcgguggcucacgccuguaa

SEQ ID NO: 426561 - RNA, 23 nt, Human
gguggcucacgccuguaauccca

SEQ ID NO: 426562 - RNA, 24 nt, Human
gguggcucacgccuguaaucccag

SEQ ID NO: 426563 - RNA, 24 nt, Human
gguggugggcaccuguagucccag

SEQ ID NO: 426564 - RNA, 22 nt, Human
guaaacagaaaaaacaaccaca

SEQ ID NO: 426565 - RNA, 23 nt, Human
gucaucaguaucuuagcucuauu

SEQ ID NO: 426566 - RNA, 18 nt, Human
gugaaaaaguucuuauuc

SEQ ID NO: 426567 - RNA, 21 nt, Human
gugcauucaagucccugaucu

SEQ ID NO: 426568 - RNA, 26 nt, Human
uaaaaaaucaaugcaaccucauacaa

SEQ ID NO: 426569 - RNA, 19 nt, Human
uaaaaaccauaucccacug

SEQ ID NO: 426570 - RNA, 22 nt, Human
uaaaaaccauaucccacugcaa

SEQ ID NO: 426571 - RNA, 22 nt, Human
uaacacggugaaacugcgucuc

SEQ ID NO: 426572 - RNA, 24 nt, Human
uaacacggugaaacugcgucucua

SEQ ID NO: 426573 - RNA, 20 nt, Human
uaacuuguaaaacuuucaca

SEQ ID NO: 426574 - RNA, 22 nt, Human
uaccagaaccacugccaacuug

SEQ ID NO: 426575 - RNA, 21 nt, Human
uacguaaacagaaaaaacaac

SEQ ID NO: 426576 - RNA, 23 nt, Human
uaggcugggcgcgguggcucacg

SEQ ID NO: 426577 - RNA, 18 nt, Human
uaguaccagaaccacugc

SEQ ID NO: 426578 - RNA, 19 nt, Human
uauacgccauggcacagaa

SEQ ID NO: 426579 - RNA, 20 nt, Human
uauuuuguauguuucacuuu

SEQ ID NO: 426580 - RNA, 22 nt, Human
ucaaaaaagaaaacaaaaaaaa

SEQ ID NO: 426581 - RNA, 18 nt, Human
ucacaaggucaggagauc

SEQ ID NO: 426582 - RNA, 24 nt, Human
ucacaaggucaggagaucgagacc

SEQ ID NO: 426583 - RNA, 20 nt, Human
uccacauuaagacacugaag

SEQ ID NO: 426584 - RNA, 23 nt, Human
uccagccugggcggcagagcgag

SEQ ID NO: 426585 - RNA, 24 nt, Human
uccagccugggcggcagagcgaga

SEQ ID NO: 426586 - RNA, 22 nt, Human
uccaugaacaugaauauuaaug

SEQ ID NO: 426587 - RNA, 22 nt, Human
ucccacugcaaugaaugugaag

SEQ ID NO: 426588 - RNA, 23 nt, Human
ucgcgccacugcacuccagccug

SEQ ID NO: 426589 - RNA, 20 nt, Human
ucuauuuuguuuggacccug

SEQ ID NO: 426590 - RNA, 24 nt, Human
ucucuacuaaaaauacaaaaaacu

SEQ ID NO: 426591 - RNA, 19 nt, Human
ucucucaaguuuuaucugu

SEQ ID NO: 426592 - RNA, 18 nt, Human
ucuucagaaaaggacuga

SEQ ID NO: 426593 - RNA, 19 nt, Human
ucuuugagcaauucugacu

SEQ ID NO: 426594 - RNA, 22 nt, Human
ugagccgagaucgcgccacugc

SEQ ID NO: 426595 - RNA, 23 nt, Human
ugaggcaggagaauggugugaac

SEQ ID NO: 426596 - RNA, 24 nt, Human
ugaggcaggagaauggugugaacc

SEQ ID NO: 426597 - RNA, 25 nt, Human
ugaggcaggagaauggugugaaccu

SEQ ID NO: 426598 - RNA, 19 nt, Human
ugcuagacacucaaaccac

SEQ ID NO: 426599 - RNA, 24 nt, Human
uggcucacgccuguaaucccagca

SEQ ID NO: 426600 - RNA, 20 nt, Human
ugggaggccgaggcgggcag

SEQ ID NO: 426601 - RNA, 24 nt, Human
ugggaggccgaggcgggcagauca

SEQ ID NO: 426602 - RNA, 22 nt, Human
ugguauagcuuuuuaucucuca

SEQ ID NO: 426603 - RNA, 24 nt, Human
ugguggugggcaccuguaguccca

SEQ ID NO: 426604 - RNA, 18 nt, Human
uguuuauauuccuuuuga

SEQ ID NO: 426605 - RNA, 19 nt, Human
uguuuggacccugaaauac

SEQ ID NO: 426606 - RNA, 22 nt, Human
uguuuuacauaaaaaccauauc

SEQ ID NO: 426607 - RNA, 25 nt, Human
uuaagacacugaagacgaaaagcug

SEQ ID NO: 426608 - RNA, 21 nt, Human
uuacguaaacagaaaaaacaa

SEQ ID NO: 426609 - RNA, 22 nt, Human
uucagaaaaggacugaagugaa

SEQ ID NO: 426610 - RNA, 22 nt, Human
uucaucauugguacauuagagu

SEQ ID NO: 426611 - RNA, 23 nt, Human
uucauuuuauucaucaauuuuuc

SEQ ID NO: 426612 - RNA, 22 nt, Human
uugcagugagccgagaucgcgc

SEQ ID NO: 426613 - RNA, 21 nt, Human
uuggacccugaaauacgcuga

SEQ ID NO: 426614 - RNA, 25 nt, Human
uugggaggccgaggcgggcagauca

SEQ ID NO: 426615 - RNA, 21 nt, Human
uuuaaaaugcugggucuuacu

SEQ ID NO: 426616 - RNA, 19 nt, Human
uuuaggguaaaaacugucc

SEQ ID NO: 426617 - RNA, 22 nt, Human
uuuuuaguaccagaaccacugc

SEQ ID NO: 426618 - RNA, 22 nt, Human
aacaaagacccuuccgagcgaa

SEQ ID NO: 426619 - RNA, 18 nt, Human
acaaagcacgagaaacac

SEQ ID NO: 426620 - RNA, 30 nt, Human
aguggcugcagcggcggcggcggcggcgac

SEQ ID NO: 426621 - RNA, 27 nt, Human
aucggcggcggcgguggcgguagcucc

SEQ ID NO: 426622 - RNA, 20 nt, Human
cagugcucuuccugcuucuc

SEQ ID NO: 426623 - RNA, 21 nt, Human
ccgagcgagaugaccucuucc

SEQ ID NO: 426624 - RNA, 19 nt, Human
ccggaaucggcggcggcgg

SEQ ID NO: 426625 - RNA, 20 nt, Human
ccucuuccuuccuaagccca

SEQ ID NO: 426626 - RNA, 18 nt, Human
cggcggcggcgguggcgg

SEQ ID NO: 426627 - RNA, 18 nt, Human
cggcggcggcgguggcgg

SEQ ID NO: 426628 - RNA, 24 nt, Human
cuauccacagccgaaugggcaaaa

SEQ ID NO: 426629 - RNA, 19 nt, Human
cuccggaaucggcggcggc

SEQ ID NO: 426630 - RNA, 21 nt, Human
cugcagcggcggcggcggcuu

SEQ ID NO: 426631 - RNA, 23 nt, Human
gaccucuuccuuccuaagcccac

SEQ ID NO: 426632 - RNA, 20 nt, Human
gcagcggcggcggcggcggc

SEQ ID NO: 426633 - RNA, 22 nt, Human
gcggcggcgacuaccccggcuc

SEQ ID NO: 426634 - RNA, 25 nt, Human
gcggcggcggcggcggcgacuaccc

SEQ ID NO: 426635 - RNA, 22 nt, Human
gcggcgguggcgguagcuccac

SEQ ID NO: 426636 - RNA, 19 nt, Human
ggaacaaagacccuuccga

SEQ ID NO: 426637 - RNA, 23 nt, Human
ggaaucggcggcggcgguggcgg

SEQ ID NO: 426638 - RNA, 20 nt, Human
ggcggcgacuaccccggcuc

SEQ ID NO: 426639 - RNA, 20 nt, Human
ggcggcggcagcggugccug

SEQ ID NO: 426640 - RNA, 18 nt, Human
ggcgguggcgguagcucc

SEQ ID NO: 426641 - RNA, 23 nt, Human
ggcugcagcggcggcggcggcgg

SEQ ID NO: 426642 - RNA, 18 nt, Human
uaccccggcuccggaauc

SEQ ID NO: 426643 - RNA, 23 nt, Human
uagcggcccaaaucucuggagac

SEQ ID NO: 426644 - RNA, 24 nt, Human
uauguugaggguacagagugacac

SEQ ID NO: 426645 - RNA, 19 nt, Human
ucggcggcggcgguggcgg

SEQ ID NO: 426646 - RNA, 22 nt, Human
ucucuggagacucugccguggg

SEQ ID NO: 426647 - RNA, 22 nt, Human
ugaacagaucacaaagcacgag

SEQ ID NO: 426648 - RNA, 20 nt, Human
ugaacagaucacaaagcacu

SEQ ID NO: 426649 - RNA, 26 nt, Human
ugcagcggcggcggcggcggcgacuu

SEQ ID NO: 426650 - RNA, 19 nt, Human
ugccgugggagggcugcag

SEQ ID NO: 426651 - RNA, 21 nt, Human
ugccugcaguggcugcagcgg

SEQ ID NO: 426652 - RNA, 24 nt, Human
uggagacucugccgugggagggcu

SEQ ID NO: 426653 - RNA, 18 nt, Human
uggcugcagcggcggcgg

SEQ ID NO: 426654 - RNA, 18 nt, Human
uuccuaagcccacuacuc

SEQ ID NO: 426655 - RNA, 25 nt, Human
uuuuuuuuuuuuuuaucgcacaagg

SEQ ID NO: 426656 - RNA, 27 nt, Human
uuuuuuuuuuuuuuuaucgcacaaggg

SEQ ID NO: 426657 - RNA, 21 nt, Human
aaaaaaaaaaaaaaaaccaac

SEQ ID NO: 426658 - RNA, 30 nt, Human
aaaaaaaaaaaaaaccaacagggcaggaag

SEQ ID NO: 426659 - RNA, 22 nt, Human
aaaaaaaaaaaaccaacagggc

SEQ ID NO: 426660 - RNA, 23 nt, Human
aaaaaaaccaacagggcaggaac

SEQ ID NO: 426661 - RNA, 22 nt, Human
aaaaccaacagggcaggaaccu

SEQ ID NO: 426662 - RNA, 22 nt, Human
aaagucagauuuggugguucuc

SEQ ID NO: 426663 - RNA, 21 nt, Human
aaauccacagaaauucacucu

SEQ ID NO: 426664 - RNA, 21 nt, Human
aacauuuuuuacagcaaaacc

SEQ ID NO: 426665 - RNA, 21 nt, Human
aaccaacagggcaggaaccua

SEQ ID NO: 426666 - RNA, 20 nt, Human
aaccaccuuuaaccaucuca

SEQ ID NO: 426667 - RNA, 23 nt, Human
aaccaucucaagcuaacacccaa

SEQ ID NO: 426668 - RNA, 22 nt, Human
aagaauugaacaggcaugcagg

SEQ ID NO: 426669 - RNA, 22 nt, Human
aagggugggauggggaggaggg

SEQ ID NO: 426670 - RNA, 19 nt, Human
acaacgaagucccucccca

SEQ ID NO: 426671 - RNA, 24 nt, Human
acaacgaagucccuccccaaacca

SEQ ID NO: 426672 - RNA, 24 nt, Human
acugguauaaaacacaguuuaaac

SEQ ID NO: 426673 - RNA, 25 nt, Human
acuuuugaaaacuguuuaaaaaaaa

SEQ ID NO: 426674 - RNA, 21 nt, Human
agaccaaauguaaaagucaga

SEQ ID NO: 426675 - RNA, 19 nt, Human
aggagaagaaacaaaagaa

SEQ ID NO: 426676 - RNA, 22 nt, Human
aggaggggaggagugaggggaa

SEQ ID NO: 426677 - RNA, 20 nt, Human
agguagggggagggggaagg

SEQ ID NO: 426678 - RNA, 18 nt, Human
auggggaggagggggugg

SEQ ID NO: 426679 - RNA, 20 nt, Human
auggggaggagggggugguc

SEQ ID NO: 426680 - RNA, 20 nt, Human
caaaagagguugagcgagcg

SEQ ID NO: 426681 - RNA, 21 nt, Human
caaguuacacauacugaacaa

SEQ ID NO: 426682 - RNA, 22 nt, Human
caccuucaacgcuaaccugcuu

SEQ ID NO: 426683 - RNA, 28 nt, Human
cacucuugccuuuaagaacuuuugaaaa

SEQ ID NO: 426684 - RNA, 22 nt, Human
cagcaaaaccauuacaacgaag

SEQ ID NO: 426685 - RNA, 24 nt, Human
cauaccaccuucaacggggaagcc

SEQ ID NO: 426686 - RNA, 22 nt, Human
caugcaggcuuuuccauaccac

SEQ ID NO: 426687 - RNA, 18 nt, Human
cauuucagcggaguugga

SEQ ID NO: 426688 - RNA, 21 nt, Human
ccaaaccaccuuuaaccaucu

SEQ ID NO: 426689 - RNA, 24 nt, Human
gaacaggcaugcaggcuuuuccau

SEQ ID NO: 426690 - RNA, 22 nt, Human
gaagucccuccccaaaccaccu

SEQ ID NO: 426691 - RNA, 22 nt, Human
gagaagaaacaaaagaauugaa

SEQ ID NO: 426692 - RNA, 19 nt, Human
gagcgaaggaggggaggaa

SEQ ID NO: 426693 - RNA, 21 nt, Human
gaggggaaggagguaggggga

SEQ ID NO: 426694 - RNA, 24 nt, Human
gaggggaggagugaggggaaggag

SEQ ID NO: 426695 - RNA, 18 nt, Human
gagguagggggaggggga

SEQ ID NO: 426696 - RNA, 22 nt, Human
ggaaccuaaauucugagaccaa

SEQ ID NO: 426697 - RNA, 18 nt, Human
ggaaggagguagggggag

SEQ ID NO: 426698 - RNA, 19 nt, Human
ggaaggagguagggggagg

SEQ ID NO: 426699 - RNA, 24 nt, Human
ggagaguaaaguaggcaagaauga

SEQ ID NO: 426700 - RNA, 18 nt, Human
ggauggggaggagggggu

SEQ ID NO: 426701 - RNA, 18 nt, Human
ggcagggucugcgcgacg

SEQ ID NO: 426702 - RNA, 22 nt, Human
gggaaggagaagaaacaaaaga

SEQ ID NO: 426703 - RNA, 20 nt, Human
gggaaggagguagggggagg

SEQ ID NO: 426704 - RNA, 18 nt, Human
gggaguuuccaaagggug

SEQ ID NO: 426705 - RNA, 18 nt, Human
gggauggggaggaggggg

SEQ ID NO: 426706 - RNA, 22 nt, Human
gggcaggaaccuaaauucugag

SEQ ID NO: 426707 - RNA, 23 nt, Human
ggggaaggagguagggggagggg

SEQ ID NO: 426708 - RNA, 19 nt, Human
gguggucagagaugguuuc

SEQ ID NO: 426709 - RNA, 27 nt, Human
gugaggggaaggagguagggggagggg

SEQ ID NO: 426710 - RNA, 28 nt, Human
guuuaaaaaaaaaaaaaaaaaaaaccaa

SEQ ID NO: 426711 - RNA, 18 nt, Human
uaaagaaccuaaaagcug

SEQ ID NO: 426712 - RNA, 25 nt, Human
uaaaguaggcaagaaugagcagcca

SEQ ID NO: 426713 - RNA, 20 nt, Human
uaaccaucucaagcuaacac

SEQ ID NO: 426714 - RNA, 24 nt, Human
uaaguuuaauguuaauuccaugcu

SEQ ID NO: 426715 - RNA, 22 nt, Human
uacacauacugaacaaaagagg

SEQ ID NO: 426716 - RNA, 18 nt, Human
uagggggagggggaagga

SEQ ID NO: 426717 - RNA, 21 nt, Human
ucacucuugccuuuaagaagg

SEQ ID NO: 426718 - RNA, 25 nt, Human
ucagugacaauggggaguuuccaaa

SEQ ID NO: 426719 - RNA, 20 nt, Human
uccaaagggugggaugggga

SEQ ID NO: 426720 - RNA, 18 nt, Human
uccccaaaccaccuuuaa

SEQ ID NO: 426721 - RNA, 19 nt, Human
ucuaauggcuuucaaaugu

SEQ ID NO: 426722 - RNA, 19 nt, Human
ucucucagccucucgcucc

SEQ ID NO: 426723 - RNA, 19 nt, Human
ucuggcacggagacgacac

SEQ ID NO: 426724 - RNA, 25 nt, Human
ugaaaacuguuuaaaaaaaaaaaaa

SEQ ID NO: 426725 - RNA, 31 nt, Human
ugaaaacuguuuaaaaaaaaaaaaaaaaaaa

SEQ ID NO: 426726 - RNA, 23 nt, Human
ugagcgagcgaaggaggggagga

SEQ ID NO: 426727 - RNA, 19 nt, Human
ugggauggggaggaggggg

SEQ ID NO: 426728 - RNA, 20 nt, Human
ugggauggggaggagggggu

SEQ ID NO: 426729 - RNA, 25 nt, Human
ugggauggggaggagggggugguca

SEQ ID NO: 426730 - RNA, 20 nt, Human
uggggaggagggggugguca

SEQ ID NO: 426731 - RNA, 24 nt, Human
uguuaccagcaccaugcuuuucag

SEQ ID NO: 426732 - RNA, 20 nt, Human
uuaaaaaaaaaaaaaaaaaa

SEQ ID NO: 426733 - RNA, 18 nt, Human
uuagaugcuugcaucacc

SEQ ID NO: 426734 - RNA, 18 nt, Human
uuccaaagggugggaugg

SEQ ID NO: 426735 - RNA, 24 nt, Human
aaaaaucccacagccaccugccga

SEQ ID NO: 426736 - RNA, 20 nt, Human
aaaaccaaccuggauaaggc

SEQ ID NO: 426737 - RNA, 23 nt, Human
aaaagcacaaaggcucauucaga

SEQ ID NO: 426738 - RNA, 21 nt, Human
aaaagcagccagagccaaagc

SEQ ID NO: 426739 - RNA, 19 nt, Human
aaacaaagaaaacaagugu

SEQ ID NO: 426740 - RNA, 22 nt, Human
aaacaaagaaacaaagaaaaca

SEQ ID NO: 426741 - RNA, 25 nt, Human
aaacaccagacauuaagauuaagcu

SEQ ID NO: 426742 - RNA, 20 nt, Human
aaacgccccagugcagagug

SEQ ID NO: 426743 - RNA, 26 nt, Human
aaagccccaccuacccugcccccccc

SEQ ID NO: 426744 - RNA, 22 nt, Human
aaaguacccaaaacgagagacg

SEQ ID NO: 426745 - RNA, 22 nt, Human
aaauggguggaaauagcaacgu

SEQ ID NO: 426746 - RNA, 22 nt, Human
aacaaauggguggaaauagcaa

SEQ ID NO: 426747 - RNA, 22 nt, Human
aaccauaaggaugaaugagacc

SEQ ID NO: 426748 - RNA, 18 nt, Human
aaccauucaagcugcuua

SEQ ID NO: 426749 - RNA, 21 nt, Human
aacugugcgauguuacagagc

SEQ ID NO: 426750 - RNA, 23 nt, Human
aagaaaaaacuaucucgagagga

SEQ ID NO: 426751 - RNA, 18 nt, Human
aagaaggaccaaaaaaaa

SEQ ID NO: 426752 - RNA, 18 nt, Human
aagaggaaagaaggacca

SEQ ID NO: 426753 - RNA, 23 nt, Human
aagcccaaacaacuagcaaagga

SEQ ID NO: 426754 - RNA, 22 nt, Human
aagugcauuucuuuaaaaauaa

SEQ ID NO: 426755 - RNA, 19 nt, Human
aauaaaacaaagaaacaaa

SEQ ID NO: 426756 - RNA, 24 nt, Human
aauuccuuagagaaacacggagcu

SEQ ID NO: 426757 - RNA, 23 nt, Human
acaaaauauauaacugcauguca

SEQ ID NO: 426758 - RNA, 18 nt, Human
acagaacuuacugaauga

SEQ ID NO: 426759 - RNA, 18 nt, Human
acagaccuucuccaaacg

SEQ ID NO: 426760 - RNA, 18 nt, Human
acaguuuuuuuaucuucc

SEQ ID NO: 426761 - RNA, 18 nt, Human
acccacagagcgagcagc

SEQ ID NO: 426762 - RNA, 21 nt, Human
acccgaaaugagaaugagggc

SEQ ID NO: 426763 - RNA, 24 nt, Human
acccugcccccccccucccccccc

SEQ ID NO: 426764 - RNA, 25 nt, Human
acccugcccccccccucccccccca

SEQ ID NO: 426765 - RNA, 21 nt, Human
acccuggaaaacaugcagagc

SEQ ID NO: 426766 - RNA, 25 nt, Human
accuacccugcccccccccuccccc

SEQ ID NO: 426767 - RNA, 23 nt, Human
accugaauuuucacacacugcac

SEQ ID NO: 426768 - RNA, 25 nt, Human
acuguuccaugucuguaggcuacac

SEQ ID NO: 426769 - RNA, 25 nt, Human
agaaaaaccauucaagcugcuuaaa

SEQ ID NO: 426770 - RNA, 21 nt, Human
agaaaagaaaaaccauucaag

SEQ ID NO: 426771 - RNA, 22 nt, Human
agaaggaggaggacacuggggc

SEQ ID NO: 426772 - RNA, 22 nt, Human
agaccuucuccaaacgccucuc

SEQ ID NO: 426773 - RNA, 21 nt, Human
agacgagagcguauguacaua

SEQ ID NO: 426774 - RNA, 19 nt, Human
agagacaguaucauaggcc

SEQ ID NO: 426775 - RNA, 20 nt, Human
agaggcgaucaaagacagga

SEQ ID NO: 426776 - RNA, 27 nt, Human
agcaaaaccaaccuggauaaggcugaa

SEQ ID NO: 426777 - RNA, 20 nt, Human
agccagagccaaagcugaaa

SEQ ID NO: 426778 - RNA, 20 nt, Human
agcucuuccuuuuggguuuu

SEQ ID NO: 426779 - RNA, 19 nt, Human
agcugcagcagcuucagaa

SEQ ID NO: 426780 - RNA, 19 nt, Human
aggcggcggcugcgcggag

SEQ ID NO: 426781 - RNA, 21 nt, Human
agggagcugcagcagcuucag

SEQ ID NO: 426782 - RNA, 24 nt, Human
agggcuuggagggcgcgacuggag

SEQ ID NO: 426783 - RNA, 24 nt, Human
aucccucccuuucccucccccacc

SEQ ID NO: 426784 - RNA, 20 nt, Human
aucuacagaacaguccagac

SEQ ID NO: 426785 - RNA, 23 nt, Human
caaaaaaaaaaaaaaucccacag

SEQ ID NO: 426786 - RNA, 20 nt, Human
caaaaagcacaaaggcucau

SEQ ID NO: 426787 - RNA, 19 nt, Human
caaaacgagagacgagagc

SEQ ID NO: 426788 - RNA, 19 nt, Human
caacuaaucagagacuucg

SEQ ID NO: 426789 - RNA, 21 nt, Human
cacacacugcaccacagaccu

SEQ ID NO: 426790 - RNA, 24 nt, Human
cacaccucuucuugccuaaauaaa

SEQ ID NO: 426791 - RNA, 19 nt, Human
cacacugcaccacagaccu

SEQ ID NO: 426792 - RNA, 23 nt, Human
caccuaugaaccaaaaaccugaa

SEQ ID NO: 426793 - RNA, 25 nt, Human
cacugcaccacagaccuucuccaaa

SEQ ID NO: 426794 - RNA, 23 nt, Human
cacugcauaacaugacaaaaagc

SEQ ID NO: 426795 - RNA, 23 nt, Human
caucccucccuuucccuccccca

SEQ ID NO: 426796 - RNA, 18 nt, Human
caugacaaacaccagaca

SEQ ID NO: 426797 - RNA, 18 nt, Human
caugacaaacaccagaca

SEQ ID NO: 426798 - RNA, 22 nt, Human
caugggaaaaaaauaaagacug

SEQ ID NO: 426799 - RNA, 23 nt, Human
cauuaaaaagaaaaaacuaucuc

SEQ ID NO: 426800 - RNA, 21 nt, Human
cauuaagauuaagcuaacacu

SEQ ID NO: 426801 - RNA, 23 nt, Human
cauucagagaacauauuuguugu

SEQ ID NO: 426802 - RNA, 18 nt, Human
cauuucacuggagagaca

SEQ ID NO: 426803 - RNA, 22 nt, Human
ccaaaaaaaaaaaaaaucccac

SEQ ID NO: 426804 - RNA, 23 nt, Human
ccaaaaaaaaaaaaaaucccaca

SEQ ID NO: 426805 - RNA, 18 nt, Human
ccaaccuggauaaggcug

SEQ ID NO: 426806 - RNA, 18 nt, Human
ccacagaccuucuccaaa

SEQ ID NO: 426807 - RNA, 24 nt, Human
ccagcugcguccgccagcacgagg

SEQ ID NO: 426808 - RNA, 20 nt, Human
cccacagccaccugccgagc

SEQ ID NO: 426809 - RNA, 22 nt, Human
cccacagcuucugcacccagcu

SEQ ID NO: 426810 - RNA, 21 nt, Human
ccccaccuacccugccccccc

SEQ ID NO: 426811 - RNA, 21 nt, Human
cccccccaaaucgucuuccuc

SEQ ID NO: 426812 - RNA, 21 nt, Human
cccccccccuccccccccaaa

SEQ ID NO: 426813 - RNA, 19 nt, Human
cccccccuccccccccaaa

SEQ ID NO: 426814 - RNA, 21 nt, Human
cccccccuccccccccaaauc

SEQ ID NO: 426815 - RNA, 22 nt, Human
cccccccuccccccccaaaucg

SEQ ID NO: 426816 - RNA, 21 nt, Human
cccgacccccaacucauggga

SEQ ID NO: 426817 - RNA, 21 nt, Human
cccucccccacccgaccccca

SEQ ID NO: 426818 - RNA, 22 nt, Human
ccugccgagcaccuaugaacca

SEQ ID NO: 426819 - RNA, 24 nt, Human
ccugccgagcaccuaugaaccaaa

SEQ ID NO: 426820 - RNA, 22 nt, Human
ccugggaaggucaucccucccu

SEQ ID NO: 426821 - RNA, 21 nt, Human
ccuguuacacauacucaguuc

SEQ ID NO: 426822 - RNA, 23 nt, Human
cgacagcuacauaaugacucaca

SEQ ID NO: 426823 - RNA, 20 nt, Human
cgagcagcugaggcggcggc

SEQ ID NO: 426824 - RNA, 22 nt, Human
cgauggcuugauguuacauaug

SEQ ID NO: 426825 - RNA, 21 nt, Human
cuaaaaagcagccagagccaa

SEQ ID NO: 426826 - RNA, 26 nt, Human
cucaagaggauuaauaauuuuggugg

SEQ ID NO: 426827 - RNA, 23 nt, Human
cuccaaacgccucuccgacccca

SEQ ID NO: 426828 - RNA, 18 nt, Human
cugcacccagcugcgucc

SEQ ID NO: 426829 - RNA, 18 nt, Human
cugcccccccccuccccc

SEQ ID NO: 426830 - RNA, 24 nt, Human
gaaaacccuauuaucuagcaauaa

SEQ ID NO: 426831 - RNA, 19 nt, Human
gaaauacuguaaacugcaa

SEQ ID NO: 426832 - RNA, 23 nt, Human
gaaggaggaggacacuggggcgg

SEQ ID NO: 426833 - RNA, 28 nt, Human
gaaggaggaggacacuggggcggccuga

SEQ ID NO: 426834 - RNA, 21 nt, Human
gacaaggcucccgaaauugga

SEQ ID NO: 426835 - RNA, 20 nt, Human
gacccacagagcgagcagcu

SEQ ID NO: 426836 - RNA, 20 nt, Human
gacggcagugugaucccuga

SEQ ID NO: 426837 - RNA, 21 nt, Human
gagaaggaggaggacacuggg

SEQ ID NO: 426838 - RNA, 24 nt, Human
gagccaaagcugaaauuuaaagga

SEQ ID NO: 426839 - RNA, 18 nt, Human
gaggcggcggcugcgcgg

SEQ ID NO: 426840 - RNA, 22 nt, Human
gaucaacagcaaaaccaaccug

SEQ ID NO: 426841 - RNA, 21 nt, Human
gcagcagcuucagaagcggga

SEQ ID NO: 426842 - RNA, 18 nt, Human
gcaguaggaaacgcccca

SEQ ID NO: 426843 - RNA, 21 nt, Human
gccccaccuacccugcccccc

SEQ ID NO: 426844 - RNA, 20 nt, Human
gcgcggaggaggcggcugga

SEQ ID NO: 426845 - RNA, 22 nt, Human
gcuucagaagcgggauguucuc

SEQ ID NO: 426846 - RNA, 23 nt, Human
ggaaaaacugacacacugacaag

SEQ ID NO: 426847 - RNA, 23 nt, Human
ggaaggagugucuucggggagga

SEQ ID NO: 426848 - RNA, 24 nt, Human
ggagaccgaucaacagcaaaacca

SEQ ID NO: 426849 - RNA, 24 nt, Human
gggaaggagugucuucggggagga

SEQ ID NO: 426850 - RNA, 19 nt, Human
guagagcaaacuuuacccc

SEQ ID NO: 426851 - RNA, 24 nt, Human
guagagcaaacuuuacccccaaaa

SEQ ID NO: 426852 - RNA, 19 nt, Human
guaggcuucacuuaacugg

SEQ ID NO: 426853 - RNA, 22 nt, Human
gucaccuguauccuguuacaca

SEQ ID NO: 426854 - RNA, 20 nt, Human
gucugggauuuacacuguuc

SEQ ID NO: 426855 - RNA, 19 nt, Human
guuacacauacucaguucc

SEQ ID NO: 426856 - RNA, 19 nt, Human
uaaaaagcagccagagcca

SEQ ID NO: 426857 - RNA, 25 nt, Human
uaaaaagcagccagagccaaagcug

SEQ ID NO: 426858 - RNA, 26 nt, Human
uaaaaagcagccagagccaaagcuga

SEQ ID NO: 426859 - RNA, 21 nt, Human
uaaaaauccuuacuggaacca

SEQ ID NO: 426860 - RNA, 21 nt, Human
uaaaacaaagaaacaaagaaa

SEQ ID NO: 426861 - RNA, 21 nt, Human
uaaauaaaacaaagaaacaaa

SEQ ID NO: 426862 - RNA, 26 nt, Human
uaaauaaaacaaagaaacaaagaaaa

SEQ ID NO: 426863 - RNA, 20 nt, Human
uaacaugacaaaaagcacaa

SEQ ID NO: 426864 - RNA, 18 nt, Human
uaagucugucagucuggg

SEQ ID NO: 426865 - RNA, 22 nt, Human
uaauaguuauaauuucaccaug

SEQ ID NO: 426866 - RNA, 21 nt, Human
uacaaggaaaaacgcaacacu

SEQ ID NO: 426867 - RNA, 18 nt, Human
uacagaacaguccagacg

SEQ ID NO: 426868 - RNA, 19 nt, Human
uacccaaaacgagagacga

SEQ ID NO: 426869 - RNA, 23 nt, Human
uacccaaaacgagagacgagagc

SEQ ID NO: 426870 - RNA, 20 nt, Human
uacccugcccccccccuccc

SEQ ID NO: 426871 - RNA, 26 nt, Human
uacccugcccccccccucccccccca

SEQ ID NO: 426872 - RNA, 19 nt, Human
uauauaaaaaaaagaaugc

SEQ ID NO: 426873 - RNA, 23 nt, Human
uaucaagucucccauucccucuc

SEQ ID NO: 426874 - RNA, 23 nt, Human
uccaaacgccucuccgaccccac

SEQ ID NO: 426875 - RNA, 26 nt, Human
uccaauaccagcacagcuagccugac

SEQ ID NO: 426876 - RNA, 21 nt, Human
uccaugacauacagaccugaa

SEQ ID NO: 426877 - RNA, 20 nt, Human
ucccacagccaccugccgag

SEQ ID NO: 426878 - RNA, 21 nt, Human
ucccacagccaccugccgagc

SEQ ID NO: 426879 - RNA, 19 nt, Human
ucccccacccgacccccaa

SEQ ID NO: 426880 - RNA, 21 nt, Human
ucccccccuuuuaaaaacaaa

SEQ ID NO: 426881 - RNA, 18 nt, Human
ucccugaggagggagcug

SEQ ID NO: 426882 - RNA, 21 nt, Human
uccguuuucagcccucaggug

SEQ ID NO: 426883 - RNA, 23 nt, Human
uccucccauggcaaugacuuuag

SEQ ID NO: 426884 - RNA, 19 nt, Human
ucugaaaacccuauuaucu

SEQ ID NO: 426885 - RNA, 23 nt, Human
ucugguaggcuucacuuaacugg

SEQ ID NO: 426886 - RNA, 18 nt, Human
ugaaaacccuauuaucua

SEQ ID NO: 426887 - RNA, 21 nt, Human
ugaaaauaccaacacgaucca

SEQ ID NO: 426888 - RNA, 23 nt, Human
ugaaaauaccaacacgauccagu

SEQ ID NO: 426889 - RNA, 22 nt, Human
ugaaaauaccaacacgauccau

SEQ ID NO: 426890 - RNA, 19 nt, Human
ugaauuuucacacacugca

SEQ ID NO: 426891 - RNA, 21 nt, Human
ugacaaaaagcacaaaggcuc

SEQ ID NO: 426892 - RNA, 18 nt, Human
ugacaaggcucccgaaau

SEQ ID NO: 426893 - RNA, 22 nt, Human
ugacacacugacaaggcucccc

SEQ ID NO: 426894 - RNA, 18 nt, Human
ugagacaagccaaucucc

SEQ ID NO: 426895 - RNA, 21 nt, Human
ugagacaagccaaucuccaau

SEQ ID NO: 426896 - RNA, 24 nt, Human
ugaggaaacugcuaaagauggucc

SEQ ID NO: 426897 - RNA, 22 nt, Human
ugaggcugcuauuccaauacca

SEQ ID NO: 426898 - RNA, 20 nt, Human
ugcagagugggugacggcag

SEQ ID NO: 426899 - RNA, 20 nt, Human
ugcccccccccucccccccc

SEQ ID NO: 426900 - RNA, 22 nt, Human
ugccuaaauaaaacaaagaaac

SEQ ID NO: 426901 - RNA, 19 nt, Human
uggaaaacaugcagagccg

SEQ ID NO: 426902 - RNA, 23 nt, Human
uggaaaacaugcagagccgagac

SEQ ID NO: 426903 - RNA, 19 nt, Human
uggcuugauguuacauaug

SEQ ID NO: 426904 - RNA, 22 nt, Human
ugggugacggcagugugauccc

SEQ ID NO: 426905 - RNA, 21 nt, Human
ugguaggcuucacuuaacugg

SEQ ID NO: 426906 - RNA, 19 nt, Human
uuacccccaaaaggaaaaa

SEQ ID NO: 426907 - RNA, 19 nt, Human
uucaagcugcuuaaauauc

SEQ ID NO: 426908 - RNA, 21 nt, Human
uucacagauagacagauucac

SEQ ID NO: 426909 - RNA, 25 nt, Human
uucacagauagacagauucacccga

SEQ ID NO: 426910 - RNA, 19 nt, Human
uucaguguuuguuaucugg

SEQ ID NO: 426911 - RNA, 22 nt, Human
uuguaucaauagaguaauggag

SEQ ID NO: 426912 - RNA, 19 nt, Human
uuucaccaugacaaacacc

SEQ ID NO: 426913 - RNA, 19 nt, Human
aaaaugccucaucagaaca

SEQ ID NO: 426914 - RNA, 19 nt, Human
aaagcugauggaaaggagc

SEQ ID NO: 426915 - RNA, 21 nt, Human
aacaauugcaaccaaaaaaaa

SEQ ID NO: 426916 - RNA, 24 nt, Human
aacugcuucccaagagacaggagu

SEQ ID NO: 426917 - RNA, 18 nt, Human
aagauguacugcuuaacg

SEQ ID NO: 426918 - RNA, 18 nt, Human
aaggaagaaucggugaug

SEQ ID NO: 426919 - RNA, 24 nt, Human
acaaggacaauagccaaagaguua

SEQ ID NO: 426920 - RNA, 25 nt, Human
acacaauucaaaaaggggggaacgc

SEQ ID NO: 426921 - RNA, 20 nt, Human
acauggcgcugucaggauac

SEQ ID NO: 426922 - RNA, 21 nt, Human
agcaaccaucaguccagcaau

SEQ ID NO: 426923 - RNA, 21 nt, Human
aggcagcgccgccgcucgcgc

SEQ ID NO: 426924 - RNA, 20 nt, Human
aggcauaguaaaaugccuca

SEQ ID NO: 426925 - RNA, 21 nt, Human
agggagcuccugugggcucaa

SEQ ID NO: 426926 - RNA, 23 nt, Human
caaaaccaaggagcuacugaaac

SEQ ID NO: 426927 - RNA, 26 nt, Human
caaaaccaaggagcuacugaaaccuc

SEQ ID NO: 426928 - RNA, 21 nt, Human
caaagcaaccaucaguccagc

SEQ ID NO: 426929 - RNA, 27 nt, Human
caauacagauagguuuagcacuagaua

SEQ ID NO: 426930 - RNA, 20 nt, Human
caauagccaaagaguuacaa

SEQ ID NO: 426931 - RNA, 19 nt, Human
caguuuauuauaaagcuga

SEQ ID NO: 426932 - RNA, 23 nt, Human
ccccaaagcagcauuuauuuacc

SEQ ID NO: 426933 - RNA, 18 nt, Human
ccccauuacuuucgccua

SEQ ID NO: 426934 - RNA, 21 nt, Human
ccucucgcuggcucgccccgg

SEQ ID NO: 426935 - RNA, 25 nt, Human
cgcacgcgcacuggcucgccggccg

SEQ ID NO: 426936 - RNA, 18 nt, Human
cggucgcugcggaggccg

SEQ ID NO: 426937 - RNA, 24 nt, Human
cucaaagcaaccaucaguccagca

SEQ ID NO: 426938 - RNA, 21 nt, Human
cucgccucgcgccucacaccg

SEQ ID NO: 426939 - RNA, 23 nt, Human
cucggccucgccucgcgccgguu

SEQ ID NO: 426940 - RNA, 19 nt, Human
gaguagcugugcugccaau

SEQ ID NO: 426941 - RNA, 20 nt, Human
gggcucaaagcaaccaucag

SEQ ID NO: 426942 - RNA, 22 nt, Human
gucuggcauuucauaaucaccc

SEQ ID NO: 426943 - RNA, 27 nt, Human
uaaaaugccucaucagaacacacuucu

SEQ ID NO: 426944 - RNA, 19 nt, Human
uaauuuaaagaggcaaaac

SEQ ID NO: 426945 - RNA, 22 nt, Human
uacugaaaccucacguuaaaca

SEQ ID NO: 426946 - RNA, 19 nt, Human
uauaaagcugauggaaagg

SEQ ID NO: 426947 - RNA, 22 nt, Human
ucacaccgcuggcucgcuagcc

SEQ ID NO: 426948 - RNA, 19 nt, Human
ucaguccgcuccccggucg

SEQ ID NO: 426949 - RNA, 21 nt, Human
ucgcugcggaggccgccgccg

SEQ ID NO: 426950 - RNA, 21 nt, Human
ucgcuggcucgccccggccgc

SEQ ID NO: 426951 - RNA, 24 nt, Human
ugacaugggcugacacacauggcg

SEQ ID NO: 426952 - RNA, 19 nt, Human
ugauugacaugggcugaca

SEQ ID NO: 426953 - RNA, 19 nt, Human
ugauuguggcaaggaagaa

SEQ ID NO: 426954 - RNA, 22 nt, Human
ugcaaccaaaaaaaaaaaaaag

SEQ ID NO: 426955 - RNA, 27 nt, Human
ugcaaccaaaaaaaaaaaaaaguuaca

SEQ ID NO: 426956 - RNA, 22 nt, Human
uggugggugaaggaagggccag

SEQ ID NO: 426957 - RNA, 24 nt, Human
uggugggugaaggaagggccaggg

SEQ ID NO: 426958 - RNA, 18 nt, Human
uuaaauaucaacuguagc

SEQ ID NO: 426959 - RNA, 26 nt, Human
uugcaaccaaaaaaaaaaaaaaguua

SEQ ID NO: 426960 - RNA, 27 nt, Human
aaaaaaaaaaaaaaaaaaucacaaaag

SEQ ID NO: 426961 - RNA, 26 nt, Human
aaaaaaaaaaaaaaucacaaaagcaa

SEQ ID NO: 426962 - RNA, 24 nt, Human
aaacuuacaguuaaugcuacccaa

SEQ ID NO: 426963 - RNA, 28 nt, Human
aaagcaaaaauccuaaaaaaaaguuaaa

SEQ ID NO: 426964 - RNA, 20 nt, Human
aacaauuaugcuuggauugu

SEQ ID NO: 426965 - RNA, 22 nt, Human
aacucauuuuuuucaggguggg

SEQ ID NO: 426966 - RNA, 21 nt, Human
aagaaaaaauacaccuuuuuu

SEQ ID NO: 426967 - RNA, 23 nt, Human
aauaaauuucaaaaaauguacaa

SEQ ID NO: 426968 - RNA, 23 nt, Human
accaaugaucccuuuuauucccc

SEQ ID NO: 426969 - RNA, 20 nt, Human
accacagccuuguaagugcu

SEQ ID NO: 426970 - RNA, 23 nt, Human
acgucguaguccccaggguucca

SEQ ID NO: 426971 - RNA, 18 nt, Human
agaaaaugccauaugcca

SEQ ID NO: 426972 - RNA, 18 nt, Human
agaaagaggaaggauuuu

SEQ ID NO: 426973 - RNA, 20 nt, Human
agaaggcuaaaacaggaagg

SEQ ID NO: 426974 - RNA, 21 nt, Human
agacagaaggcuaaaacagga

SEQ ID NO: 426975 - RNA, 20 nt, Human
agcaaaggaagcagggugcc

SEQ ID NO: 426976 - RNA, 23 nt, Human
agccacaauguaccaaaaguacu

SEQ ID NO: 426977 - RNA, 20 nt, Human
aggaggaagaaagaggaagg

SEQ ID NO: 426978 - RNA, 20 nt, Human
aggguggggaggaagagagg

SEQ ID NO: 426979 - RNA, 24 nt, Human
auagaacauacagaaaacauuguc

SEQ ID NO: 426980 - RNA, 22 nt, Human
augaggcagacaaaaguuggaa

SEQ ID NO: 426981 - RNA, 19 nt, Human
caagacagaaggcuaaaac

SEQ ID NO: 426982 - RNA, 22 nt, Human
caagacagaaggcuaaaacagg

SEQ ID NO: 426983 - RNA, 21 nt, Human
cacaugggaaauauagaaauu

SEQ ID NO: 426984 - RNA, 19 nt, Human
cagggugccuuagacacug

SEQ ID NO: 426985 - RNA, 20 nt, Human
caggguggggaggaagagag

SEQ ID NO: 426986 - RNA, 23 nt, Human
ccaaaaguacuaugccaaacacu

SEQ ID NO: 426987 - RNA, 19 nt, Human
cuacaccugugacuggaac

SEQ ID NO: 426988 - RNA, 19 nt, Human
cuacaccugugacuggaac

SEQ ID NO: 426989 - RNA, 18 nt, Human
cuagccaucaucucaagu

SEQ ID NO: 426990 - RNA, 23 nt, Human
cucaagaugaaaacagauaacuc

SEQ ID NO: 426991 - RNA, 23 nt, Human
cucacccuuaucaucaagacuca

SEQ ID NO: 426992 - RNA, 19 nt, Human
cucccagaaaaaauaggaa

SEQ ID NO: 426993 - RNA, 24 nt, Human
cuuaaaguacccacaauuacuaca

SEQ ID NO: 426994 - RNA, 20 nt, Human
gaggcagacaaaaguuggaa

SEQ ID NO: 426995 - RNA, 27 nt, Human
gcaaguaucaaaaaaaaaaaaaaaaaa

SEQ ID NO: 426996 - RNA, 20 nt, Human
ggguggggaggaagagaggg

SEQ ID NO: 426997 - RNA, 25 nt, Human
guaaauuuuagaaugaggcagacaa

SEQ ID NO: 426998 - RNA, 21 nt, Human
guacaauuuccuuuagagaag

SEQ ID NO: 426999 - RNA, 21 nt, Human
uaaaucguaaacaaaaaacua

SEQ ID NO: 427000 - RNA, 25 nt, Human
uaacuuguauaaaaauuccacaucc

SEQ ID NO: 427001 - RNA, 18 nt, Human
uacauggccaccaaguaa

SEQ ID NO: 427002 - RNA, 21 nt, Human
uaccaagcaauucauuuuucc

SEQ ID NO: 427003 - RNA, 20 nt, Human
uagaaaaugccauaugccaa

SEQ ID NO: 427004 - RNA, 22 nt, Human
uagaacauacagaaaacauugu

SEQ ID NO: 427005 - RNA, 22 nt, Human
uagaagcaagguuugagggacg

SEQ ID NO: 427006 - RNA, 23 nt, Human
uagacacugaguggagccagaaa

SEQ ID NO: 427007 - RNA, 19 nt, Human
uagcaaaaauaaugaaagc

SEQ ID NO: 427008 - RNA, 22 nt, Human
uagcaaaaauaaugaaagcuaa

SEQ ID NO: 427009 - RNA, 22 nt, Human
uagucugugggaugcaagcaaa

SEQ ID NO: 427010 - RNA, 22 nt, Human
uauacaugguuuaauauguggu

SEQ ID NO: 427011 - RNA, 22 nt, Human
ucaaaaaaaaaaaaaaaaaauc

SEQ ID NO: 427012 - RNA, 22 nt, Human
ucaaucccccccucucccagaa

SEQ ID NO: 427013 - RNA, 19 nt, Human
ucauuauuuagagaauaga

SEQ ID NO: 427014 - RNA, 21 nt, Human
ucccuaaauguuaacuggcuc

SEQ ID NO: 427015 - RNA, 22 nt, Human
ucguaguccccaggguuccagc

SEQ ID NO: 427016 - RNA, 20 nt, Human
ucucaucaacuaaggagaga

SEQ ID NO: 427017 - RNA, 26 nt, Human
ucuccuagaagcaagguuugagggac

SEQ ID NO: 427018 - RNA, 21 nt, Human
ugaaaacagauaacucccuaa

SEQ ID NO: 427019 - RNA, 19 nt, Human
ugacaaauggucuacugug

SEQ ID NO: 427020 - RNA, 23 nt, Human
ugaguggagccagaaagaucaug

SEQ ID NO: 427021 - RNA, 19 nt, Human
ugaugggccaagaacauug

SEQ ID NO: 427022 - RNA, 22 nt, Human
ugcaccugacaaauagaaagaa

SEQ ID NO: 427023 - RNA, 22 nt, Human
uggaaugugaaccguuucugcc

SEQ ID NO: 427024 - RNA, 23 nt, Human
uggcauuuuuguuugguguuuuc

SEQ ID NO: 427025 - RNA, 22 nt, Human
ugggacagcauggaugacaaau

SEQ ID NO: 427026 - RNA, 23 nt, Human
uggguauaacuuagccccaucau

SEQ ID NO: 427027 - RNA, 21 nt, Human
uguacuaggcacaauagaaca

SEQ ID NO: 427028 - RNA, 19 nt, Human
uguaggcaguuuucuuugc

SEQ ID NO: 427029 - RNA, 19 nt, Human
ugucaugaugggccaagaa

SEQ ID NO: 427030 - RNA, 20 nt, Human
uuuuacagcacaugcauguu

SEQ ID NO: 427031 - RNA, 19 nt, Human
aaagaaaaucuacugcaag

SEQ ID NO: 427032 - RNA, 24 nt, Human
aaccgcccgcccuggccgcgccuc

SEQ ID NO: 427033 - RNA, 27 nt, Human
aaggggcgggcgccgcggcggcggcgg

SEQ ID NO: 427034 - RNA, 23 nt, Human
aauacaaaauuaaaaaaauugua

SEQ ID NO: 427035 - RNA, 22 nt, Human
aaucacacguagcauuacuaag

SEQ ID NO: 427036 - RNA, 23 nt, Human
acaauuauacaaaauguguuaac

SEQ ID NO: 427037 - RNA, 23 nt, Human
acacuucuggaagaugcuucccg

SEQ ID NO: 427038 - RNA, 21 nt, Human
acuaagcauauccccaaaaaa

SEQ ID NO: 427039 - RNA, 22 nt, Human
acuacaugauucaauacagcua

SEQ ID NO: 427040 - RNA, 18 nt, Human
aggcggcgagcgggcggg

SEQ ID NO: 427041 - RNA, 22 nt, Human
agggaggaaggcggcgagcggg

SEQ ID NO: 427042 - RNA, 19 nt, Human
agguguuaaaagguacaau

SEQ ID NO: 427043 - RNA, 20 nt, Human
caacuccucaacccgagccc

SEQ ID NO: 427044 - RNA, 21 nt, Human
caacuccucaacccgagccca

SEQ ID NO: 427045 - RNA, 19 nt, Human
cacacaaauaccaacuccu

SEQ ID NO: 427046 - RNA, 21 nt, Human
cagagcaagauagagcaucuu

SEQ ID NO: 427047 - RNA, 20 nt, Human
cauauccccaaaaaagugua

SEQ ID NO: 427048 - RNA, 18 nt, Human
cccccuuccuccugcgcc

SEQ ID NO: 427049 - RNA, 28 nt, Human
ccccgccucccucgccucggugcgcccg

SEQ ID NO: 427050 - RNA, 20 nt, Human
ccccuuccuccugcgccucc

SEQ ID NO: 427051 - RNA, 20 nt, Human
cccgagcccagaucucgccg

SEQ ID NO: 427052 - RNA, 19 nt, Human
cccuccgggccggcgcucc

SEQ ID NO: 427053 - RNA, 18 nt, Human
cccuggccgcgccuccuc

SEQ ID NO: 427054 - RNA, 21 nt, Human
ccgcccuggccgcgccuccuc

SEQ ID NO: 427055 - RNA, 27 nt, Human
ccgccgccacggccgcggcggccucgg

SEQ ID NO: 427056 - RNA, 18 nt, Human
ccgcgccuccucccgccc

SEQ ID NO: 427057 - RNA, 21 nt, Human
ccgcgcucgcucggccgcugc

SEQ ID NO: 427058 - RNA, 19 nt, Human
ccucccgcccuccgggccg

SEQ ID NO: 427059 - RNA, 22 nt, Human
ccuccgccuccuuccacacaaa

SEQ ID NO: 427060 - RNA, 23 nt, Human
ccucgccgcaaccgcccgcccug

SEQ ID NO: 427061 - RNA, 24 nt, Human
cgcaaccgcccgcccuggccgcgc

SEQ ID NO: 427062 - RNA, 21 nt, Human
cgccucgccucgccgcaaccg

SEQ ID NO: 427063 - RNA, 20 nt, Human
cgcgccuccucccgcccucc

SEQ ID NO: 427064 - RNA, 21 nt, Human
cggccgcggcggccucggcuu

SEQ ID NO: 427065 - RNA, 21 nt, Human
cggcggccucggcuccucggc

SEQ ID NO: 427066 - RNA, 22 nt, Human
cggcggggcuuccccgccuccc

SEQ ID NO: 427067 - RNA, 28 nt, Human
gaauacaaccaaaauuaagauagcaaac

SEQ ID NO: 427068 - RNA, 22 nt, Human
gagcgggcggggggagaggggg

SEQ ID NO: 427069 - RNA, 21 nt, Human
gcccuggccgcgccuccuccc

SEQ ID NO: 427070 - RNA, 22 nt, Human
gcccuggccgcgccuccucccg

SEQ ID NO: 427071 - RNA, 19 nt, Human
gccgcgccuccucccgccc

SEQ ID NO: 427072 - RNA, 20 nt, Human
gccgcgccuccucccgcccu

SEQ ID NO: 427073 - RNA, 21 nt, Human
gccgcgccuccucccgcccuc

SEQ ID NO: 427074 - RNA, 19 nt, Human
gcuccgccgccacggccgc

SEQ ID NO: 427075 - RNA, 19 nt, Human
ggagagggggcgggcggcg

SEQ ID NO: 427076 - RNA, 21 nt, Human
ggccgcgccuccucccgcccu

SEQ ID NO: 427077 - RNA, 23 nt, Human
gggaaggggcgggcgccgcggcg

SEQ ID NO: 427078 - RNA, 28 nt, Human
gggcgggcggcgggggaaggggcgggcg

SEQ ID NO: 427079 - RNA, 18 nt, Human
gggcgggcgggcgaggag

SEQ ID NO: 427080 - RNA, 18 nt, Human
gggcggggggagaggggg

SEQ ID NO: 427081 - RNA, 24 nt, Human
ggggcgggcgccgcggcggcggcg

SEQ ID NO: 427082 - RNA, 20 nt, Human
uaaaagguacaauacauucu

SEQ ID NO: 427083 - RNA, 21 nt, Human
uaacaucaaagaauacaacca

SEQ ID NO: 427084 - RNA, 23 nt, Human
uaacugaacaggcaaagaaauua

SEQ ID NO: 427085 - RNA, 26 nt, Human
uagcaaugucaucuuaguaaaguuuu

SEQ ID NO: 427086 - RNA, 23 nt, Human
uagcauuacuaagcauaucccca

SEQ ID NO: 427087 - RNA, 24 nt, Human
uccacacaaauaccaacuccucaa

SEQ ID NO: 427088 - RNA, 19 nt, Human
uccgccgccacggccgcgg

SEQ ID NO: 427089 - RNA, 24 nt, Human
uccgggccggcgcuccgcuucccc

SEQ ID NO: 427090 - RNA, 20 nt, Human
ucucgccgccgccgccacac

SEQ ID NO: 427091 - RNA, 23 nt, Human
ucuguaacugaacaggccggggc

SEQ ID NO: 427092 - RNA, 20 nt, Human
ugaacaggcaaagaaauuac

SEQ ID NO: 427093 - RNA, 23 nt, Human
ugagggcuccgccgccacggccg

SEQ ID NO: 427094 - RNA, 18 nt, Human
ugcacacuuggaaaauac

SEQ ID NO: 427095 - RNA, 21 nt, Human
uggccgcgccuccucccgccc

SEQ ID NO: 427096 - RNA, 22 nt, Human
ugggaccacacuuuacaaaaac

SEQ ID NO: 427097 - RNA, 23 nt, Human
ugggaccacacuuuacaaaaaca

SEQ ID NO: 427098 - RNA, 19 nt, Human
uggggaaggaaggcagagg

SEQ ID NO: 427099 - RNA, 22 nt, Human
uguaagcaacaggugagcuuca

SEQ ID NO: 427100 - RNA, 19 nt, Human
ugugaaaagaagucccauu

SEQ ID NO: 427101 - RNA, 25 nt, Human
uuaacacuauuaaaucacaucuaau

SEQ ID NO: 427102 - RNA, 20 nt, Human
uuccacacaaauaccaacuc

SEQ ID NO: 427103 - RNA, 21 nt, Human
uuccacacaaauaccaacucc

SEQ ID NO: 427104 - RNA, 18 nt, Human
uucccaaucacacuucug

SEQ ID NO: 427105 - RNA, 19 nt, Human
uuuacaggaaaauacuuuu

SEQ ID NO: 427106 - RNA, 19 nt, Human
uuuuuuuuuuuuacaggaa

SEQ ID NO: 427107 - RNA, 22 nt, Human
agagauacuagaagggcccaga

SEQ ID NO: 427108 - RNA, 24 nt, Human
agagauacuagaagggcccagagc

SEQ ID NO: 427109 - RNA, 22 nt, Human
agauacuagaagggcccagagc

SEQ ID NO: 427110 - RNA, 20 nt, Human
agccagagcuacuucugucc

SEQ ID NO: 427111 - RNA, 20 nt, Human
aggaagagagguagcaggga

SEQ ID NO: 427112 - RNA, 20 nt, Human
aguggaggagcagaacugaa

SEQ ID NO: 427113 - RNA, 18 nt, Human
cagaagcccccggcagag

SEQ ID NO: 427114 - RNA, 26 nt, Human
ccagaagcccccggcagagauacuag

SEQ ID NO: 427115 - RNA, 18 nt, Human
cccagagccaaauccagc

SEQ ID NO: 427116 - RNA, 19 nt, Human
cugaagaaagagaaaugau

SEQ ID NO: 427117 - RNA, 22 nt, Human
cuggcagagcugagccucccuc

SEQ ID NO: 427118 - RNA, 23 nt, Human
gaagaaagagaaaugauccugga

SEQ ID NO: 427119 - RNA, 19 nt, Human
gagccaaauccagcagcug

SEQ ID NO: 427120 - RNA, 23 nt, Human
gggcccagagccaaauccagcag

SEQ ID NO: 427121 - RNA, 20 nt, Human
guccuuucuuccagccuccu

SEQ ID NO: 427122 - RNA, 20 nt, Human
uagagaggaguaccagaagc

SEQ ID NO: 427123 - RNA, 22 nt, Human
uaggcaugaugaccaaguccua

SEQ ID NO: 427124 - RNA, 25 nt, Human
uaugauuagauauuuauugagcacc

SEQ ID NO: 427125 - RNA, 19 nt, Human
ucccucgggucuucuggug

SEQ ID NO: 427126 - RNA, 22 nt, Human
ucuguccuuucuuccagccucc

SEQ ID NO: 427127 - RNA, 20 nt, Human
ugaaauaacaauuucaauua

SEQ ID NO: 427128 - RNA, 18 nt, Human
ugaccaaguccuagugcu

SEQ ID NO: 427129 - RNA, 21 nt, Human
ugagcaccaggagagagucag

SEQ ID NO: 427130 - RNA, 23 nt, Human
ugggcaucuucccucugguauuu

SEQ ID NO: 427131 - RNA, 18 nt, Human
uuaaaagcugucuggccc

SEQ ID NO: 427132 - RNA, 19 nt, Human
uuagacuuauaguggagga

SEQ ID NO: 427133 - RNA, 22 nt, Human
uuuuuugcuguuaugauuagau

SEQ ID NO: 427134 - RNA, 21 nt, Human
uuuuuuuuuuuuuuuugcugu

SEQ ID NO: 427135 - RNA, 18 nt, Human
uuuuuuuuuuuuuuuuug

SEQ ID NO: 427136 - RNA, 20 nt, Human
uuuuuuuuuuuuuuuuugcu

SEQ ID NO: 427137 - RNA, 20 nt, Human
aagaaugaacagagaagcac

SEQ ID NO: 427138 - RNA, 18 nt, Human
aagacagcucaaaacuga

SEQ ID NO: 427139 - RNA, 18 nt, Human
agaggggaagggcacagu

SEQ ID NO: 427140 - RNA, 27 nt, Human
cagaaaagcucaaggaucagaaaucaa

SEQ ID NO: 427141 - RNA, 24 nt, Human
cagagaagcacagaaaagcucaag

SEQ ID NO: 427142 - RNA, 19 nt, Human
cagcucaaaacugagcaac

SEQ ID NO: 427143 - RNA, 21 nt, Human
ccccccuggccuccuuagcuu

SEQ ID NO: 427144 - RNA, 18 nt, Human
gaacagagaagcacagaa

SEQ ID NO: 427145 - RNA, 19 nt, Human
gggagaggggaagggcaca

SEQ ID NO: 427146 - RNA, 18 nt, Human
ugaagacagcucaaaacu

SEQ ID NO: 427147 - RNA, 19 nt, Human
ugaagacagcucaaaacug

SEQ ID NO: 427148 - RNA, 21 nt, Human
agaggacagggggccaggcag

SEQ ID NO: 427149 - RNA, 20 nt, Human
agccagagaggacagggggc

SEQ ID NO: 427150 - RNA, 19 nt, Human
agcccaggacaggcugcac

SEQ ID NO: 427151 - RNA, 18 nt, Human
agccgguucugaaugccc

SEQ ID NO: 427152 - RNA, 21 nt, Human
agcucagggcccuccgggagc

SEQ ID NO: 427153 - RNA, 23 nt, Human
aggcaaugcaaggccgguguggc

SEQ ID NO: 427154 - RNA, 22 nt, Human
cagcccaggacaggcugcacag

SEQ ID NO: 427155 - RNA, 22 nt, Human
ccccagcagcagcucugaggcc

SEQ ID NO: 427156 - RNA, 24 nt, Human
ccccugggccucccgaaaccuggg

SEQ ID NO: 427157 - RNA, 25 nt, Human
cccggaccucccugcuccccagcca

SEQ ID NO: 427158 - RNA, 23 nt, Human
ccucccggaccucccugcucccc

SEQ ID NO: 427159 - RNA, 20 nt, Human
ccuccgggagccaccagccc

SEQ ID NO: 427160 - RNA, 22 nt, Human
ccuccgggagccaccagcccag

SEQ ID NO: 427161 - RNA, 22 nt, Human
ccugagacacccccuaccacag

SEQ ID NO: 427162 - RNA, 23 nt, Human
cgccccugggccucccgaaaccu

SEQ ID NO: 427163 - RNA, 19 nt, Human
cuccgggagccaccagccc

SEQ ID NO: 427164 - RNA, 21 nt, Human
cucuggucccaaugccaaugg

SEQ ID NO: 427165 - RNA, 22 nt, Human
gagacacccccuaccacagccc

SEQ ID NO: 427166 - RNA, 24 nt, Human
gccccagcagcagcucugaggccc

SEQ ID NO: 427167 - RNA, 20 nt, Human
gcccuccgggagccaccagg

SEQ ID NO: 427168 - RNA, 21 nt, Human
gcucagggcccuccgggagcc

SEQ ID NO: 427169 - RNA, 25 nt, Human
ggacaggcugcacagccgcacccuc

SEQ ID NO: 427170 - RNA, 25 nt, Human
ggaccugggguggggcugagggugg

SEQ ID NO: 427171 - RNA, 20 nt, Human
ggcccaggggaaggcauccg

SEQ ID NO: 427172 - RNA, 24 nt, Human
ggcccuccgggagccaccagccca

SEQ ID NO: 427173 - RNA, 18 nt, Human
ggggcugaggguggggaa

SEQ ID NO: 427174 - RNA, 20 nt, Human
ggguggggcugagggugggg

SEQ ID NO: 427175 - RNA, 20 nt, Human
ucccggaccucccugcuccc

SEQ ID NO: 427176 - RNA, 21 nt, Human
ucccugcuccccagccagaga

SEQ ID NO: 427177 - RNA, 19 nt, Human
ucugaaugccccagcagca

SEQ ID NO: 427178 - RNA, 19 nt, Human
ugaaugccccagcagcagc

SEQ ID NO: 427179 - RNA, 23 nt, Human
ugagacacccccuaccacagccc

SEQ ID NO: 427180 - RNA, 19 nt, Human
ugaggguggggaagagccg

SEQ ID NO: 427181 - RNA, 25 nt, Human
ugggguggggcugaggguggggaag

SEQ ID NO: 427182 - RNA, 21 nt, Human
aaauaagaagcaaacccaggg

SEQ ID NO: 427183 - RNA, 24 nt, Human
augccugcaacugaauaggaucga

SEQ ID NO: 427184 - RNA, 18 nt, Human
guggccucuaauuccucc

SEQ ID NO: 427185 - RNA, 18 nt, Human
ucaccuacaacuuugccc

SEQ ID NO: 427186 - RNA, 20 nt, Human
ugagauuuuuuccucuuuuu

SEQ ID NO: 427187 - RNA, 22 nt, Human
ugggguguuuuucggguuuggu

SEQ ID NO: 427188 - RNA, 21 nt, Human
ugguggccucuaauuccuccu

SEQ ID NO: 427189 - RNA, 24 nt, Human
uuuuuuuuuuuauuuuuuauuuuu

SEQ ID NO: 427190 - RNA, 25 nt, Human
uuuuuuuuuuuuuuuuuuuauuuuu

SEQ ID NO: 427191 - RNA, 23 nt, Human
aaaaaaaaaaauugaggccuaaa

SEQ ID NO: 427192 - RNA, 25 nt, Human
aaaaaacaagaugaagaaaguggaa

SEQ ID NO: 427193 - RNA, 28 nt, Human
aaaacaaaaauaaaauaauaaaauugaa

SEQ ID NO: 427194 - RNA, 20 nt, Human
aacagcucccggagcaaacu

SEQ ID NO: 427195 - RNA, 23 nt, Human
aagcuggugcaaagguaacccau

SEQ ID NO: 427196 - RNA, 19 nt, Human
aaggaaaguacagaggaau

SEQ ID NO: 427197 - RNA, 20 nt, Human
acaggaauuagucucugaac

SEQ ID NO: 427198 - RNA, 19 nt, Human
acugaagcuggugcaaagg

SEQ ID NO: 427199 - RNA, 19 nt, Human
agaaaaagcaugaagaagc

SEQ ID NO: 427200 - RNA, 22 nt, Human
agaaauggugagaagaaaaagc

SEQ ID NO: 427201 - RNA, 18 nt, Human
agaagaaaaagcaugaag

SEQ ID NO: 427202 - RNA, 19 nt, Human
agaagaaaaagcaugaaga

SEQ ID NO: 427203 - RNA, 20 nt, Human
agaagaaaaagcaugaagaa

SEQ ID NO: 427204 - RNA, 20 nt, Human
agacauaguuuuuuaaaguu

SEQ ID NO: 427205 - RNA, 23 nt, Human
agcgaaaggaaaguacagaggaa

SEQ ID NO: 427206 - RNA, 21 nt, Human
agcgaagaaacagcucccgga

SEQ ID NO: 427207 - RNA, 21 nt, Human
agucucugaaccacacaguuu

SEQ ID NO: 427208 - RNA, 22 nt, Human
aguuuuuaacaauacccagcuc

SEQ ID NO: 427209 - RNA, 22 nt, Human
auaggaagcuuaaaaugcagua

SEQ ID NO: 427210 - RNA, 18 nt, Human
augacauuuuuuucuuuu

SEQ ID NO: 427211 - RNA, 25 nt, Human
auuuccaguaauuggaaaaaaacaa

SEQ ID NO: 427212 - RNA, 25 nt, Human
caaaacacaauaaaugcucuucucu

SEQ ID NO: 427213 - RNA, 18 nt, Human
cacacaguuuuuaggccu

SEQ ID NO: 427214 - RNA, 24 nt, Human
cacuccaggaaacacaaaccuggg

SEQ ID NO: 427215 - RNA, 18 nt, Human
cagucgaaaauacagugu

SEQ ID NO: 427216 - RNA, 20 nt, Human
cauggacucggcgcccugcu

SEQ ID NO: 427217 - RNA, 21 nt, Human
ccacuccaggaaacacaaacc

SEQ ID NO: 427218 - RNA, 21 nt, Human
ccaggaaacacaaaccugggg

SEQ ID NO: 427219 - RNA, 26 nt, Human
cccuucugucccucucuacagcuucc

SEQ ID NO: 427220 - RNA, 24 nt, Human
ccucuuuuuagcuaaaaaacaaga

SEQ ID NO: 427221 - RNA, 21 nt, Human
cggagcaaacuguacaaaaac

SEQ ID NO: 427222 - RNA, 22 nt, Human
cggagcaaacuguacaaaaacc

SEQ ID NO: 427223 - RNA, 24 nt, Human
cucccggagcaaacuguacaaaaa

SEQ ID NO: 427224 - RNA, 19 nt, Human
cuguacaaaaaccucgcca

SEQ ID NO: 427225 - RNA, 19 nt, Human
cugucccucucuacagcuu

SEQ ID NO: 427226 - RNA, 23 nt, Human
cuucaaguuccuucacagaaaaa

SEQ ID NO: 427227 - RNA, 19 nt, Human
gaaaaaaaaaaaugggaaa

SEQ ID NO: 427228 - RNA, 18 nt, Human
gaagaaacagcucccgga

SEQ ID NO: 427229 - RNA, 19 nt, Human
gaagccgcgaagugugggg

SEQ ID NO: 427230 - RNA, 21 nt, Human
ggaaacacaaaccuggggacg

SEQ ID NO: 427231 - RNA, 19 nt, Human
ggcagcacgcaggcucgau

SEQ ID NO: 427232 - RNA, 19 nt, Human
guaugguagugcgggcacc

SEQ ID NO: 427233 - RNA, 18 nt, Human
uaaaaccaccuuacaaag

SEQ ID NO: 427234 - RNA, 25 nt, Human
uaaaauaauaaaauugaaaaauccc

SEQ ID NO: 427235 - RNA, 22 nt, Human
uaaaauguuauuugaccuaaaa

SEQ ID NO: 427236 - RNA, 24 nt, Human
uaaaauuaggaaauauaaaaugag

SEQ ID NO: 427237 - RNA, 23 nt, Human
uaaaugaaugcaaaaaaaauuuu

SEQ ID NO: 427238 - RNA, 25 nt, Human
uaagcugaaaaaaaaaaaugggaaa

SEQ ID NO: 427239 - RNA, 22 nt, Human
uacaaauugaaaauucaauaau

SEQ ID NO: 427240 - RNA, 24 nt, Human
uacaauuuucuaguugugcuuaaa

SEQ ID NO: 427241 - RNA, 19 nt, Human
uauaaaaugagccacauaa

SEQ ID NO: 427242 - RNA, 24 nt, Human
uaucaaaaguucccaaauuuggaa

SEQ ID NO: 427243 - RNA, 22 nt, Human
ucacaauuaauguuccaaaaca

SEQ ID NO: 427244 - RNA, 26 nt, Human
ucacacaugcaucacuucaaguuccu

SEQ ID NO: 427245 - RNA, 24 nt, Human
uccaguaauuggaaaaaaacaaaa

SEQ ID NO: 427246 - RNA, 23 nt, Human
uccuucacagaaaaaaaaaaaaa

SEQ ID NO: 427247 - RNA, 24 nt, Human
ucuuaaauucacacaugcaucacu

SEQ ID NO: 427248 - RNA, 20 nt, Human
ugacaaaauuaaugaacaag

SEQ ID NO: 427249 - RNA, 19 nt, Human
ugaugaauagcgaaaggaa

SEQ ID NO: 427250 - RNA, 21 nt, Human
ugcagagcagguuagaacuga

SEQ ID NO: 427251 - RNA, 23 nt, Human
ugccuauucuucuaauacugaca

SEQ ID NO: 427252 - RNA, 20 nt, Human
uggaauuuucagucgaaaau

SEQ ID NO: 427253 - RNA, 18 nt, Human
ugggaaauugaugaauag

SEQ ID NO: 427254 - RNA, 22 nt, Human
uggugagaagaaaaagcaugaa

SEQ ID NO: 427255 - RNA, 24 nt, Human
uguaugguagugcgggcaccuuuu

SEQ ID NO: 427256 - RNA, 24 nt, Human
uuagaacugaucucuuucggccac

SEQ ID NO: 427257 - RNA, 18 nt, Human
uucacagaaaaaaaaaaa

SEQ ID NO: 427258 - RNA, 21 nt, Human
uucugucccucucuacagcuu

SEQ ID NO: 427259 - RNA, 23 nt, Human
uucuuuuucuuuucuguaggaga

SEQ ID NO: 427260 - RNA, 19 nt, Human
uugaaaaaucccaucucac

SEQ ID NO: 427261 - RNA, 20 nt, Human
uugaugaauagcgaaaggaa

SEQ ID NO: 427262 - RNA, 29 nt, Human
uuuguaguuuuggccagaaauggugagaa

SEQ ID NO: 427263 - RNA, 23 nt, Human
uuuucaagcagguaacaauacua

SEQ ID NO: 427264 - RNA, 24 nt, Human
uuuucuguaggagagagacgagag

SEQ ID NO: 427265 - RNA, 23 nt, Human
aaaaccccauccauuaagcacag

SEQ ID NO: 427266 - RNA, 26 nt, Human
aaaaccccauccauuaagcacagaaa

SEQ ID NO: 427267 - RNA, 19 nt, Human
aaccaagaggugcuggaca

SEQ ID NO: 427268 - RNA, 23 nt, Human
aagauacucaaagcuuauaaagg

SEQ ID NO: 427269 - RNA, 24 nt, Human
aagggaggaaacauuuaggauaag

SEQ ID NO: 427270 - RNA, 20 nt, Human
acaauuagguaugcauucaa

SEQ ID NO: 427271 - RNA, 23 nt, Human
acccguccccaacacccccgcca

SEQ ID NO: 427272 - RNA, 19 nt, Human
acuaaacuucaaaccacaa

SEQ ID NO: 427273 - RNA, 20 nt, Human
aggccccgagacugcuccuc

SEQ ID NO: 427274 - RNA, 20 nt, Human
aggccccgccgaccgcccag

SEQ ID NO: 427275 - RNA, 24 nt, Human
aggcgggcggcacugcggcccggc

SEQ ID NO: 427276 - RNA, 26 nt, Human
agggaaaaaaccaauaauaggccccg

SEQ ID NO: 427277 - RNA, 20 nt, Human
aggggccgugggggccggac

SEQ ID NO: 427278 - RNA, 18 nt, Human
auccgcgcgggcgcgagg

SEQ ID NO: 427279 - RNA, 21 nt, Human
caaaaaaacauuaacuucuga

SEQ ID NO: 427280 - RNA, 21 nt, Human
caaaaaauaacucagauccgc

SEQ ID NO: 427281 - RNA, 25 nt, Human
caaaccacaaaaacauugugacuaa

SEQ ID NO: 427282 - RNA, 19 nt, Human
cacugcacuaacauuaaac

SEQ ID NO: 427283 - RNA, 19 nt, Human
cagcgcccgucccgcucgg

SEQ ID NO: 427284 - RNA, 20 nt, Human
cagcgcccgucccgcucgga

SEQ ID NO: 427285 - RNA, 21 nt, Human
caggccggggcccgaggggcc

SEQ ID NO: 427286 - RNA, 21 nt, Human
ccacaaaaacauugugacuaa

SEQ ID NO: 427287 - RNA, 20 nt, Human
ccagagagcucggaauacgg

SEQ ID NO: 427288 - RNA, 23 nt, Human
ccaggccccaggccccgccgacc

SEQ ID NO: 427289 - RNA, 22 nt, Human
cccaggccccaggccccgccga

SEQ ID NO: 427290 - RNA, 22 nt, Human
ccccaacacccccgccaccucc

SEQ ID NO: 427291 - RNA, 18 nt, Human
ccccgccgaccgcccagg

SEQ ID NO: 427292 - RNA, 21 nt, Human
ccccguguccacgcgcgggcc

SEQ ID NO: 427293 - RNA, 22 nt, Human
cccgaagcccaggccccaggcc

SEQ ID NO: 427294 - RNA, 18 nt, Human
ccgcggcucgguggcagc

SEQ ID NO: 427295 - RNA, 21 nt, Human
ccggugccgcgaucucaaggg

SEQ ID NO: 427296 - RNA, 19 nt, Human
ccuccggagaccgcggccg

SEQ ID NO: 427297 - RNA, 22 nt, Human
ccucgcgccgggccucccaguc

SEQ ID NO: 427298 - RNA, 23 nt, Human
cgacaaaaauaaaggggaaaaga

SEQ ID NO: 427299 - RNA, 23 nt, Human
cgagaagagcggcgggcacggcg

SEQ ID NO: 427300 - RNA, 23 nt, Human
cgccgaccgcccaggcuccgcga

SEQ ID NO: 427301 - RNA, 18 nt, Human
cggcccggcccaggaugg

SEQ ID NO: 427302 - RNA, 19 nt, Human
cggcucgguggcagcuugg

SEQ ID NO: 427303 - RNA, 23 nt, Human
cggcucgguggcagcuugggcga

SEQ ID NO: 427304 - RNA, 22 nt, Human
cucaaaaccccauccauuaagc

SEQ ID NO: 427305 - RNA, 24 nt, Human
cucaaaaccccauccauuaagcaa

SEQ ID NO: 427306 - RNA, 19 nt, Human
cucagauccgcccaggagg

SEQ ID NO: 427307 - RNA, 25 nt, Human
cuccaggcggcuacccggcuccucc

SEQ ID NO: 427308 - RNA, 26 nt, Human
cugacccagguggcggggucggcccu

SEQ ID NO: 427309 - RNA, 24 nt, Human
gaacaaaacgagggacgcuucccc

SEQ ID NO: 427310 - RNA, 22 nt, Human
gagacugcuccuccaggcggcu

SEQ ID NO: 427311 - RNA, 21 nt, Human
gagaggggcgcgcgggagagc

SEQ ID NO: 427312 - RNA, 19 nt, Human
gcacuaacauuaaacuaaa

SEQ ID NO: 427313 - RNA, 23 nt, Human
gcaggccggggcccgaggggccg

SEQ ID NO: 427314 - RNA, 23 nt, Human
gccccaggccccgccgaccgccc

SEQ ID NO: 427315 - RNA, 20 nt, Human
gcccgaagcccaggccccag

SEQ ID NO: 427316 - RNA, 20 nt, Human
gcccggggcccagcguguuc

SEQ ID NO: 427317 - RNA, 19 nt, Human
gccgcgcccgaagcccagg

SEQ ID NO: 427318 - RNA, 19 nt, Human
gcggcaggccggggcccga

SEQ ID NO: 427319 - RNA, 19 nt, Human
ggaagaacaaaacgagggg

SEQ ID NO: 427320 - RNA, 20 nt, Human
ggaagcaggugacgggaucc

SEQ ID NO: 427321 - RNA, 20 nt, Human
ggcgacgagggacgcagaga

SEQ ID NO: 427322 - RNA, 21 nt, Human
ggcggcaggccggggcccgag

SEQ ID NO: 427323 - RNA, 19 nt, Human
ggcgggggccgcggcucgg

SEQ ID NO: 427324 - RNA, 21 nt, Human
gggaaaaacucaaaaccccau

SEQ ID NO: 427325 - RNA, 20 nt, Human
gggcgggggccgcggcucgg

SEQ ID NO: 427326 - RNA, 18 nt, Human
gggggaggagcggccgcc

SEQ ID NO: 427327 - RNA, 22 nt, Human
uaaaaaggcaagcuguaagaua

SEQ ID NO: 427328 - RNA, 18 nt, Human
uaacacacaaggcaacca

SEQ ID NO: 427329 - RNA, 19 nt, Human
uaacuucugaauuuccaau

SEQ ID NO: 427330 - RNA, 24 nt, Human
ucacugcacuaacauuaaacuaaa

SEQ ID NO: 427331 - RNA, 28 nt, Human
uccagagagcucggaauacggcggaccg

SEQ ID NO: 427332 - RNA, 21 nt, Human
uccccaacacccccgccaccu

SEQ ID NO: 427333 - RNA, 19 nt, Human
uccccggcgggaagcaggu

SEQ ID NO: 427334 - RNA, 22 nt, Human
uccccggggcgggcacugaccc

SEQ ID NO: 427335 - RNA, 23 nt, Human
ucccuggagucuccucucuuucc

SEQ ID NO: 427336 - RNA, 24 nt, Human
uccgcggccgcgggucaggagggc

SEQ ID NO: 427337 - RNA, 19 nt, Human
ucggagggaaaaaaccaau

SEQ ID NO: 427338 - RNA, 21 nt, Human
ugacccagguggcggggucgg

SEQ ID NO: 427339 - RNA, 23 nt, Human
ugacgggauccgcgcgggcgcga

SEQ ID NO: 427340 - RNA, 24 nt, Human
uggcgggcggcgccucucaggcgg

SEQ ID NO: 427341 - RNA, 21 nt, Human
uggcggggucggcccuccggu

SEQ ID NO: 427342 - RNA, 20 nt, Human
ugggcagugccggucgcagc

SEQ ID NO: 427343 - RNA, 20 nt, Human
ugugacuaacauuaaaaagg

SEQ ID NO: 427344 - RNA, 24 nt, Human
uuacaauuagguaugcauucaauu

SEQ ID NO: 427345 - RNA, 21 nt, Human
uuuaaccaagaggugcuggac

SEQ ID NO: 427346 - RNA, 22 nt, Human
uuuaaccaagaggugcuggaca

SEQ ID NO: 427347 - RNA, 25 nt, Human
uuuuacaauuagguaugcauucaau

SEQ ID NO: 427348 - RNA, 21 nt, Human
acucugaucaggagcacgcca

SEQ ID NO: 427349 - RNA, 21 nt, Human
cacgccagaccggaagaacuc

SEQ ID NO: 427350 - RNA, 20 nt, Human
cagcagcaucucccaugggg

SEQ ID NO: 427351 - RNA, 19 nt, Human
cauccugggugucagcagc

SEQ ID NO: 427352 - RNA, 25 nt, Human
cauccugggugucagcagcaucucc

SEQ ID NO: 427353 - RNA, 19 nt, Human
ccuugaacgccaaaaucuu

SEQ ID NO: 427354 - RNA, 19 nt, Human
cgccagaccggaagaacuc

SEQ ID NO: 427355 - RNA, 22 nt, Human
gaguaacucugaucaggagcac

SEQ ID NO: 427356 - RNA, 18 nt, Human
gccagaccggaagaacuc

SEQ ID NO: 427357 - RNA, 21 nt, Human
ggaagaacuccauccugcaga

SEQ ID NO: 427358 - RNA, 23 nt, Human
ucugaucaggagcacgccagacc

SEQ ID NO: 427359 - RNA, 23 nt, Human
uugaacgccaaaaucuucagauc

SEQ ID NO: 427360 - RNA, 24 nt, Human
aaaaauacaagggaagcagacgac

SEQ ID NO: 427361 - RNA, 21 nt, Human
aaaaauagacuuuuaagguaa

SEQ ID NO: 427362 - RNA, 21 nt, Human
acaaaaauagacuuuuaaggu

SEQ ID NO: 427363 - RNA, 21 nt, Human
acaagggaagcagacgaccca

SEQ ID NO: 427364 - RNA, 20 nt, Human
acacuccaucccccaccauc

SEQ ID NO: 427365 - RNA, 20 nt, Human
agcccugggguccaugcaga

SEQ ID NO: 427366 - RNA, 22 nt, Human
aggucaggggaguggguuaaug

SEQ ID NO: 427367 - RNA, 18 nt, Human
caagggaagcagacgacc

SEQ ID NO: 427368 - RNA, 24 nt, Human
caaguccccacagcccuggggucc

SEQ ID NO: 427369 - RNA, 21 nt, Human
cacagcacauaagauucuagg

SEQ ID NO: 427370 - RNA, 23 nt, Human
cacagcccugggguccaugcaga

SEQ ID NO: 427371 - RNA, 24 nt, Human
ccagcugaucugaccgggcaguca

SEQ ID NO: 427372 - RNA, 21 nt, Human
cccaagaaccucggaagacac

SEQ ID NO: 427373 - RNA, 24 nt, Human
cccccaaguccccacagcccuggg

SEQ ID NO: 427374 - RNA, 20 nt, Human
cggaagacacuccauccccc

SEQ ID NO: 427375 - RNA, 19 nt, Human
gaaaaauacaagggaagca

SEQ ID NO: 427376 - RNA, 28 nt, Human
gaagcagacgacccaauauuguaaugac

SEQ ID NO: 427377 - RNA, 22 nt, Human
gacgacccaauauauauaaaua

SEQ ID NO: 427378 - RNA, 19 nt, Human
gagagguuccaguuaccag

SEQ ID NO: 427379 - RNA, 19 nt, Human
gccccagcgugaggucagg

SEQ ID NO: 427380 - RNA, 22 nt, Human
gcugagauccagcugaucugac

SEQ ID NO: 427381 - RNA, 22 nt, Human
ggaaccucaggucuauaaaaac

SEQ ID NO: 427382 - RNA, 19 nt, Human
ggaagacacuccauccccc

SEQ ID NO: 427383 - RNA, 19 nt, Human
ggaagaggugggggagagg

SEQ ID NO: 427384 - RNA, 22 nt, Human
gucccccaaguccccacagccc

SEQ ID NO: 427385 - RNA, 20 nt, Human
gucggccgagagugggagcg

SEQ ID NO: 427386 - RNA, 23 nt, Human
uaagauucuaggagacagauuug

SEQ ID NO: 427387 - RNA, 24 nt, Human
uacugagcuugcacacuuggggac

SEQ ID NO: 427388 - RNA, 21 nt, Human
uccaucccccaccaucaugaa

SEQ ID NO: 427389 - RNA, 23 nt, Human
ugagcaccaggauucccccucag

SEQ ID NO: 427390 - RNA, 18 nt, Human
ugaggucaggggaguggg

SEQ ID NO: 427391 - RNA, 22 nt, Human
ugauuacugucccccaaguccc

SEQ ID NO: 427392 - RNA, 18 nt, Human
ugcccaaaacacaaaaau

SEQ ID NO: 427393 - RNA, 27 nt, Human
ugggcagggaagaggugggggagaggg

SEQ ID NO: 427394 - RNA, 18 nt, Human
ugggggagaggguucauu

SEQ ID NO: 427395 - RNA, 21 nt, Human
ugggggagaggguucauugcc

SEQ ID NO: 427396 - RNA, 24 nt, Human
ugucccccaaguccccacagcccu

SEQ ID NO: 427397 - RNA, 24 nt, Human
uuaaaaaugcccaaaacacaaaaa

SEQ ID NO: 427398 - RNA, 22 nt, Human
uucaauauuacaaaaaaaggaa

SEQ ID NO: 427399 - RNA, 18 nt, Human
uucccccucaggagaggu

SEQ ID NO: 427400 - RNA, 19 nt, Human
uuggggaccugccccagcg

SEQ ID NO: 427401 - RNA, 25 nt, Human
aaaaaaaagcauaguuuggcaauaa

SEQ ID NO: 427402 - RNA, 25 nt, Human
aaaaaaaaggcaucuacugacaaaa

SEQ ID NO: 427403 - RNA, 24 nt, Human
aaaaaggaaaaagacacgucacaa

SEQ ID NO: 427404 - RNA, 24 nt, Human
aaaagaaaaaauuaaaucacaaag

SEQ ID NO: 427405 - RNA, 18 nt, Human
aaaauaaaauaaccaaaa

SEQ ID NO: 427406 - RNA, 24 nt, Human
aaaauuaacaaaaaaaagcauagu

SEQ ID NO: 427407 - RNA, 24 nt, Human
aaagaaagagaaauagaaagcgac

SEQ ID NO: 427408 - RNA, 21 nt, Human
aagaaacucaauuugcagucc

SEQ ID NO: 427409 - RNA, 25 nt, Human
aagagaaagaaacucaauuugcaaa

SEQ ID NO: 427410 - RNA, 23 nt, Human
aagcauaguuuggcaauaaauac

SEQ ID NO: 427411 - RNA, 19 nt, Human
aaugaauaccauuaacugc

SEQ ID NO: 427412 - RNA, 21 nt, Human
acaaagaaagagaaauagaaa

SEQ ID NO: 427413 - RNA, 20 nt, Human
acaaagucccacuuaaguca

SEQ ID NO: 427414 - RNA, 20 nt, Human
accgggaagaggggaggagg

SEQ ID NO: 427415 - RNA, 22 nt, Human
aggaaaaagacacgucacaaaa

SEQ ID NO: 427416 - RNA, 23 nt, Human
aggcaagauuagucaacaggggu

SEQ ID NO: 427417 - RNA, 19 nt, Human
aggcgcagccucuccuguc

SEQ ID NO: 427418 - RNA, 19 nt, Human
agggccuguggggaauggg

SEQ ID NO: 427419 - RNA, 20 nt, Human
aggggugggggggguggggg

SEQ ID NO: 427420 - RNA, 21 nt, Human
aggugcugggggaaagggguu

SEQ ID NO: 427421 - RNA, 21 nt, Human
agguggagaggugccaccggg

SEQ ID NO: 427422 - RNA, 19 nt, Human
augagggggagagggaggg

SEQ ID NO: 427423 - RNA, 23 nt, Human
auuuuaagauuaauaugaagauc

SEQ ID NO: 427424 - RNA, 19 nt, Human
caaaaucaagucucuccua

SEQ ID NO: 427425 - RNA, 22 nt, Human
caaagucccacuuaagucaaaa

SEQ ID NO: 427426 - RNA, 24 nt, Human
caaagucccacuuaagucaaaauc

SEQ ID NO: 427427 - RNA, 21 nt, Human
caaaguuagauuacaaggcac

SEQ ID NO: 427428 - RNA, 18 nt, Human
cagccuuccuuccugcag

SEQ ID NO: 427429 - RNA, 20 nt, Human
caggguaggggcuggaguag

SEQ ID NO: 427430 - RNA, 26 nt, Human
caucuagcuuccccuuccuccccacu

SEQ ID NO: 427431 - RNA, 24 nt, Human
ccagaaccucaaaucugugagugg

SEQ ID NO: 427432 - RNA, 18 nt, Human
ccaguggagggggcugcu

SEQ ID NO: 427433 - RNA, 20 nt, Human
cccacacgccaguucccggc

SEQ ID NO: 427434 - RNA, 20 nt, Human
ccccucgccuuucugacucc

SEQ ID NO: 427435 - RNA, 21 nt, Human
ccuaguugugaaaggccuaaa

SEQ ID NO: 427436 - RNA, 26 nt, Human
ccuccccacuuaaaaaaaagaaaaaa

SEQ ID NO: 427437 - RNA, 19 nt, Human
ccugcagaccuacacaaac

SEQ ID NO: 427438 - RNA, 20 nt, Human
ccuuccuccccacuuaaaaa

SEQ ID NO: 427439 - RNA, 24 nt, Human
ccuuccuccccacuuaaaaaaaag

SEQ ID NO: 427440 - RNA, 21 nt, Human
cucuccugucuggagucccac

SEQ ID NO: 427441 - RNA, 19 nt, Human
cuguuacugcuuuuucucu

SEQ ID NO: 427442 - RNA, 22 nt, Human
gacagguuucccccaaaacccu

SEQ ID NO: 427443 - RNA, 22 nt, Human
gaggcccacgggugcccucugg

SEQ ID NO: 427444 - RNA, 23 nt, Human
ggaaaacuccagaccuggaaucc

SEQ ID NO: 427445 - RNA, 19 nt, Human
ggagggggcugcugguucc

SEQ ID NO: 427446 - RNA, 21 nt, Human
ggauggguagggagaagaggg

SEQ ID NO: 427447 - RNA, 19 nt, Human
gggaauuucuaaaauaaau

SEQ ID NO: 427448 - RNA, 22 nt, Human
gggaggggguuucaagccagaa

SEQ ID NO: 427449 - RNA, 18 nt, Human
gggcaggggugggggggg

SEQ ID NO: 427450 - RNA, 19 nt, Human
gggcagggguggggggggu

SEQ ID NO: 427451 - RNA, 19 nt, Human
ggggcaggggugggggggg

SEQ ID NO: 427452 - RNA, 20 nt, Human
gggguggggggggugggggg

SEQ ID NO: 427453 - RNA, 22 nt, Human
gggguggggggggugggggggc

SEQ ID NO: 427454 - RNA, 21 nt, Human
ggguggggggggugggggggc

SEQ ID NO: 427455 - RNA, 18 nt, Human
gguggggggggugggggg

SEQ ID NO: 427456 - RNA, 19 nt, Human
gguuaugagggggagaggg

SEQ ID NO: 427457 - RNA, 24 nt, Human
gucuggagucccacacgccaguuc

SEQ ID NO: 427458 - RNA, 20 nt, Human
guuucaagccagaagaagcu

SEQ ID NO: 427459 - RNA, 22 nt, Human
uaaaacuguggaaaaaaaggaa

SEQ ID NO: 427460 - RNA, 21 nt, Human
uaagccggaaaaaaaaaggca

SEQ ID NO: 427461 - RNA, 25 nt, Human
uaagccggaaaaaaaaaggcaucua

SEQ ID NO: 427462 - RNA, 18 nt, Human
uaagugugcgggagacug

SEQ ID NO: 427463 - RNA, 19 nt, Human
uacacaaacccaggcaaga

SEQ ID NO: 427464 - RNA, 26 nt, Human
uacacaaacccaggcaagauuaguca

SEQ ID NO: 427465 - RNA, 22 nt, Human
uacauucaucuuaaugugugug

SEQ ID NO: 427466 - RNA, 24 nt, Human
uagaagcuauacauaaaaaguugu

SEQ ID NO: 427467 - RNA, 22 nt, Human
ucaagacagguuucccccaaaa

SEQ ID NO: 427468 - RNA, 18 nt, Human
ucacauaugaacugggga

SEQ ID NO: 427469 - RNA, 18 nt, Human
ucagaucgggaagaaaaa

SEQ ID NO: 427470 - RNA, 20 nt, Human
ucccacacgccaguucccgg

SEQ ID NO: 427471 - RNA, 23 nt, Human
uccccuuccuccccacuuaaaaa

SEQ ID NO: 427472 - RNA, 21 nt, Human
ucgccaguggagggggcugcu

SEQ ID NO: 427473 - RNA, 23 nt, Human
ucuaaaauaaauaauccaacagu

SEQ ID NO: 427474 - RNA, 21 nt, Human
ucucuuuuuuuuuuuuucccc

SEQ ID NO: 427475 - RNA, 25 nt, Human
ucuuuuuuuuuuuuuccccuuuuag

SEQ ID NO: 427476 - RNA, 20 nt, Human
ugaaaggccuaaagagaaag

SEQ ID NO: 427477 - RNA, 24 nt, Human
ugaaaggccuaaagagaaagaaac

SEQ ID NO: 427478 - RNA, 21 nt, Human
ugagggaaggugcaguugugu

SEQ ID NO: 427479 - RNA, 18 nt, Human
ugaggugcugggggaaag

SEQ ID NO: 427480 - RNA, 18 nt, Human
uggaguaggcaggagguc

SEQ ID NO: 427481 - RNA, 24 nt, Human
uggcacuuaaggcuuaagccggaa

SEQ ID NO: 427482 - RNA, 23 nt, Human
ugggauggguagggagaagaggg

SEQ ID NO: 427483 - RNA, 21 nt, Human
ugggcacguggaagucaaagg

SEQ ID NO: 427484 - RNA, 26 nt, Human
ugggcacguggaagucaaaggguuuc

SEQ ID NO: 427485 - RNA, 21 nt, Human
ugggggaaagggguugagcuu

SEQ ID NO: 427486 - RNA, 22 nt, Human
ugggguuaugagggggagaggg

SEQ ID NO: 427487 - RNA, 20 nt, Human
ugguuccgggucuccacccc

SEQ ID NO: 427488 - RNA, 24 nt, Human
ugucaagacagguuucccccaaaa

SEQ ID NO: 427489 - RNA, 25 nt, Human
ugucacagaacuuuuacauacauuc

SEQ ID NO: 427490 - RNA, 23 nt, Human
ugucuggagucccacacgccagg

SEQ ID NO: 427491 - RNA, 24 nt, Human
uuaacugcucaccccuuacuuuuu

SEQ ID NO: 427492 - RNA, 18 nt, Human
uuccugcagaccuacaca

SEQ ID NO: 427493 - RNA, 19 nt, Human
uugaugugcagugacaagc

SEQ ID NO: 427494 - RNA, 23 nt, Human
uugcucuccaauuucugaaaguu

SEQ ID NO: 427495 - RNA, 22 nt, Human
uuuucagccuuccuuccugcag

SEQ ID NO: 427496 - RNA, 22 nt, Human
aaaacaagaagaaacacaggaa

SEQ ID NO: 427497 - RNA, 19 nt, Human
aaacaagaagaaacacagg

SEQ ID NO: 427498 - RNA, 18 nt, Human
aacauuuuuuacauauau

SEQ ID NO: 427499 - RNA, 22 nt, Human
aagaagaaacacaggaacuguc

SEQ ID NO: 427500 - RNA, 23 nt, Human
aagaagaaacacaggaacuguca

SEQ ID NO: 427501 - RNA, 24 nt, Human
acacauacagagauaagagacaga

SEQ ID NO: 427502 - RNA, 19 nt, Human
agagauaagagacagaggu

SEQ ID NO: 427503 - RNA, 18 nt, Human
caaaacaagaagaaacac

SEQ ID NO: 427504 - RNA, 19 nt, Human
caaaacaagaagaaacaca

SEQ ID NO: 427505 - RNA, 24 nt, Human
cauacagauacauguauauaugca

SEQ ID NO: 427506 - RNA, 20 nt, Human
cccaauggcaaccaccauga

SEQ ID NO: 427507 - RNA, 25 nt, Human
cuaaaggcuuucuaacacucuuuaa

SEQ ID NO: 427508 - RNA, 18 nt, Human
cucccuaccagcacauuu

SEQ ID NO: 427509 - RNA, 26 nt, Human
cuucacaauauaucuugaauaucgcu

SEQ ID NO: 427510 - RNA, 18 nt, Human
gcggcuacccggagggcg

SEQ ID NO: 427511 - RNA, 21 nt, Human
uaaaagguuuuguaucaaguu

SEQ ID NO: 427512 - RNA, 24 nt, Human
uaacaacccuuuuaaaaagauuuc

SEQ ID NO: 427513 - RNA, 26 nt, Human
uaagaaagagcugggugaaaauguca

SEQ ID NO: 427514 - RNA, 21 nt, Human
uacaaaacaagaagaaacaca

SEQ ID NO: 427515 - RNA, 22 nt, Human
uacaaaacaagaagaaacacag

SEQ ID NO: 427516 - RNA, 24 nt, Human
uacaaaacaagaagaaacacagga

SEQ ID NO: 427517 - RNA, 22 nt, Human
uauaugaagauccauuuucaaa

SEQ ID NO: 427518 - RNA, 29 nt, Human
uauaugcauacaaagauacauacacauag

SEQ ID NO: 427519 - RNA, 26 nt, Human
uauucacauacagauacauguauaua

SEQ ID NO: 427520 - RNA, 23 nt, Human
uauucuguauuuuuucaaagucu

SEQ ID NO: 427521 - RNA, 25 nt, Human
uauuuuuuauaaaagguuuuguauc

SEQ ID NO: 427522 - RNA, 21 nt, Human
ucaaagaggcuuauacagaug

SEQ ID NO: 427523 - RNA, 23 nt, Human
uccuagaccccaguccuauacuc

SEQ ID NO: 427524 - RNA, 23 nt, Human
uccucugcccaauggcaaccacc

SEQ ID NO: 427525 - RNA, 19 nt, Human
ugaacauguagaucauuua

SEQ ID NO: 427526 - RNA, 23 nt, Human
ugaagauccauuuucaaaguuuc

SEQ ID NO: 427527 - RNA, 23 nt, Human
ugaugcagaagccaacacagaca

SEQ ID NO: 427528 - RNA, 19 nt, Human
ugcuccuauccuagacccc

SEQ ID NO: 427529 - RNA, 28 nt, Human
uguauauaugcauacaaagauacauaca

SEQ ID NO: 427530 - RNA, 22 nt, Human
ugucaaagaggcuuauacagau

SEQ ID NO: 427531 - RNA, 26 nt, Human
uucucauguacaacaaggugugacau

SEQ ID NO: 427532 - RNA, 18 nt, Human
uugcuuugaauauucaaa

SEQ ID NO: 427533 - RNA, 18 nt, Human
uuguuucuccauugcuuu

SEQ ID NO: 427534 - RNA, 19 nt, Human
uuuuccuguuaacauuuuu

SEQ ID NO: 427535 - RNA, 22 nt, Human
aagaacuaaggcugaaggaugg

SEQ ID NO: 427536 - RNA, 24 nt, Human
aagaacuaaggcugaaggauggga

SEQ ID NO: 427537 - RNA, 19 nt, Human
aagaauucauguccuaacc

SEQ ID NO: 427538 - RNA, 21 nt, Human
aggcagaguuccggggaagug

SEQ ID NO: 427539 - RNA, 21 nt, Human
aggcuacuugcaggauuccuu

SEQ ID NO: 427540 - RNA, 19 nt, Human
aguagaaaacagacuagaa

SEQ ID NO: 427541 - RNA, 21 nt, Human
auguaaauugcagggucacau

SEQ ID NO: 427542 - RNA, 22 nt, Human
caacugaugauacacuguacaa

SEQ ID NO: 427543 - RNA, 20 nt, Human
cagauccgaccucgccuucc

SEQ ID NO: 427544 - RNA, 21 nt, Human
ccuccuucugggaaaaggcag

SEQ ID NO: 427545 - RNA, 19 nt, Human
cuccugugcagacuccgac

SEQ ID NO: 427546 - RNA, 21 nt, Human
gaaauaugacguuuguaaaga

SEQ ID NO: 427547 - RNA, 21 nt, Human
gccucucuccugugcagacuc

SEQ ID NO: 427548 - RNA, 23 nt, Human
ggacuucccaacggagacaaaga

SEQ ID NO: 427549 - RNA, 18 nt, Human
ggugaaaaacaccuccuu

SEQ ID NO: 427550 - RNA, 20 nt, Human
gugaaaaacaccuccuuaca

SEQ ID NO: 427551 - RNA, 18 nt, Human
uaaaacacagcauuugag

SEQ ID NO: 427552 - RNA, 18 nt, Human
uacaaagaacuaaggcug

SEQ ID NO: 427553 - RNA, 22 nt, Human
uacaaagaacuaaggcugaagg

SEQ ID NO: 427554 - RNA, 23 nt, Human
uacaucuugagaaccgggacacc

SEQ ID NO: 427555 - RNA, 23 nt, Human
uagaaaacagacuagaauuuuca

SEQ ID NO: 427556 - RNA, 19 nt, Human
ucacauuagauaaaaacag

SEQ ID NO: 427557 - RNA, 19 nt, Human
ucccaacggagacaaagau

SEQ ID NO: 427558 - RNA, 19 nt, Human
ucccugggagauaucucag

SEQ ID NO: 427559 - RNA, 23 nt, Human
uccuaaccaagucuaaaacacag

SEQ ID NO: 427560 - RNA, 24 nt, Human
ucuucaguaauugcugggcccuau

SEQ ID NO: 427561 - RNA, 23 nt, Human
ugaaaaacaccuccuuacauaga

SEQ ID NO: 427562 - RNA, 22 nt, Human
ugagagacuucuuuccugucaa

SEQ ID NO: 427563 - RNA, 21 nt, Human
ugagcucuaacugaaggcuga

SEQ ID NO: 427564 - RNA, 22 nt, Human
ugaugauacacuguacaaagaa

SEQ ID NO: 427565 - RNA, 22 nt, Human
uggcaguauuauauacuuuuca

SEQ ID NO: 427566 - RNA, 19 nt, Human
ugguagagauagaguggug

SEQ ID NO: 427567 - RNA, 21 nt, Human
uguaaagaauucauguccuaa

SEQ ID NO: 427568 - RNA, 22 nt, Human
ugucaagauucuuugaagcucu

SEQ ID NO: 427569 - RNA, 18 nt, Human
uguuaguauggauggcag

SEQ ID NO: 427570 - RNA, 21 nt, Human
uugcaggauuccuuuugaaua

SEQ ID NO: 427571 - RNA, 28 nt, Human
uuugagagacuucuuuccugucaagauu

SEQ ID NO: 427572 - RNA, 20 nt, Human
uuuuccccuccuccuucugg

SEQ ID NO: 427573 - RNA, 24 nt, Human
aggaguucgagaccagccuggggc

SEQ ID NO: 427574 - RNA, 22 nt, Human
aucuuaaucuugaacauccacu

SEQ ID NO: 427575 - RNA, 24 nt, Human
caaacugaauagaauucagaacac

SEQ ID NO: 427576 - RNA, 19 nt, Human
cagcaaaacaauucuaucu

SEQ ID NO: 427577 - RNA, 23 nt, Human
cagcauaaaucaauauacaguau

SEQ ID NO: 427578 - RNA, 22 nt, Human
cagcucagggaacagacggcag

SEQ ID NO: 427579 - RNA, 20 nt, Human
ccaggaguucgagaccagcc

SEQ ID NO: 427580 - RNA, 23 nt, Human
cuagcauguugccaguuuucccu

SEQ ID NO: 427581 - RNA, 21 nt, Human
gaacacacuacugagcaaaau

SEQ ID NO: 427582 - RNA, 22 nt, Human
gcccaggaguucgagaccagcc

SEQ ID NO: 427583 - RNA, 18 nt, Human
ggcagugacaggcgggca

SEQ ID NO: 427584 - RNA, 24 nt, Human
ggccaauaucucuacaaacguucu

SEQ ID NO: 427585 - RNA, 21 nt, Human
uaaaauucuaagauauaaaac

SEQ ID NO: 427586 - RNA, 23 nt, Human
uaaagcacagcucagggaacaga

SEQ ID NO: 427587 - RNA, 23 nt, Human
uaacuagcauguugccaguuuuc

SEQ ID NO: 427588 - RNA, 20 nt, Human
uauagcaagaaccggacgga

SEQ ID NO: 427589 - RNA, 22 nt, Human
ucacacaacuugacucuaaucu

SEQ ID NO: 427590 - RNA, 18 nt, Human
ucagaacacacuacugag

SEQ ID NO: 427591 - RNA, 24 nt, Human
ucagucacagcuccugucuuaauc

SEQ ID NO: 427592 - RNA, 25 nt, Human
ucccagcguaaagcacaggguaccc

SEQ ID NO: 427593 - RNA, 23 nt, Human
ucuaucuucuuaauaguucuucu

SEQ ID NO: 427594 - RNA, 24 nt, Human
ucucuacaaacguucuguagaagu

SEQ ID NO: 427595 - RNA, 22 nt, Human
ugaauagaauucagaacacacu

SEQ ID NO: 427596 - RNA, 23 nt, Human
ugagcccaggaguucgagaccag

SEQ ID NO: 427597 - RNA, 24 nt, Human
uguacacagcauaaaucaauauac

SEQ ID NO: 427598 - RNA, 25 nt, Human
ugugaaugagacugauuggcuuuaa

SEQ ID NO: 427599 - RNA, 18 nt, Human
uguugccaguuuucccua

SEQ ID NO: 427600 - RNA, 23 nt, Human
uuaauaguucuucuaugucuuuc

SEQ ID NO: 427601 - RNA, 22 nt, Human
uugagcccaggaguucgagacc

SEQ ID NO: 427602 - RNA, 22 nt, Human
gaugugaacaagacuggcuuua

SEQ ID NO: 427603 - RNA, 23 nt, Human
guaaagaaaaguggacuagaagc

SEQ ID NO: 427604 - RNA, 24 nt, Human
guauaguaauggaugugaacaaga

SEQ ID NO: 427605 - RNA, 21 nt, Human
uguaaagaaaaguggacuaga

SEQ ID NO: 427606 - RNA, 24 nt, Human
uguaaagaaaaguggacuagaagc

SEQ ID NO: 427607 - RNA, 21 nt, Human
ugugaacaagacuggcuuuaa

SEQ ID NO: 427608 - RNA, 22 nt, Human
uuaaagaaacugaauaggauuc

SEQ ID NO: 427609 - RNA, 21 nt, Human
aaaaaagccacccacaaagcc

SEQ ID NO: 427610 - RNA, 19 nt, Human
aaaaagccacccacaaagc

SEQ ID NO: 427611 - RNA, 18 nt, Human
aaaagaaaaaaaaaaagc

SEQ ID NO: 427612 - RNA, 19 nt, Human
aaaagccacccacaaagcc

SEQ ID NO: 427613 - RNA, 29 nt, Human
aaagggagcaauuuaaucauuucagaggg

SEQ ID NO: 427614 - RNA, 20 nt, Human
aacacucccaugauucauaa

SEQ ID NO: 427615 - RNA, 21 nt, Human
aagaaguuuuuaaacguguaa

SEQ ID NO: 427616 - RNA, 23 nt, Human
aagggccagugaaaccauaaaau

SEQ ID NO: 427617 - RNA, 19 nt, Human
aaucagcuucuaauggaac

SEQ ID NO: 427618 - RNA, 20 nt, Human
agaaagucuaagauucagaa

SEQ ID NO: 427619 - RNA, 19 nt, Human
agacauaguaauaaaucag

SEQ ID NO: 427620 - RNA, 21 nt, Human
agcuauaguuaaaaaauaaaa

SEQ ID NO: 427621 - RNA, 22 nt, Human
aucacaucucaaagaauagagg

SEQ ID NO: 427622 - RNA, 19 nt, Human
augaaaaaagccacccaca

SEQ ID NO: 427623 - RNA, 19 nt, Human
auggaacaaguaacaguag

SEQ ID NO: 427624 - RNA, 19 nt, Human
caauaugaaugaacagcac

SEQ ID NO: 427625 - RNA, 21 nt, Human
cagaaaaacauguuaaaaucc

SEQ ID NO: 427626 - RNA, 23 nt, Human
cagagugcuuuaagaaguuuuua

SEQ ID NO: 427627 - RNA, 23 nt, Human
caguagaaacagugguauucaug

SEQ ID NO: 427628 - RNA, 22 nt, Human
caguaguaugaaaaaagccacc

SEQ ID NO: 427629 - RNA, 21 nt, Human
cauuacggucuuuacauugcu

SEQ ID NO: 427630 - RNA, 25 nt, Human
cauucagaaaaacauguuaaaaucc

SEQ ID NO: 427631 - RNA, 22 nt, Human
ccucagaaagucuaagauucag

SEQ ID NO: 427632 - RNA, 21 nt, Human
cuaguggucauuaaacccccu

SEQ ID NO: 427633 - RNA, 21 nt, Human
cugcaguaguuuaacuuuggc

SEQ ID NO: 427634 - RNA, 23 nt, Human
cuguauaaacauuucugauuucc

SEQ ID NO: 427635 - RNA, 22 nt, Human
gccccaaaacguuuucaauguc

SEQ ID NO: 427636 - RNA, 19 nt, Human
ggccagugaaaccauaaaa

SEQ ID NO: 427637 - RNA, 23 nt, Human
gugaaaagcuaacuuuuaacuca

SEQ ID NO: 427638 - RNA, 24 nt, Human
uaaaaaauaaaaaguuuauaaaaa

SEQ ID NO: 427639 - RNA, 24 nt, Human
uaaacguguaaaagaaaaaaaaaa

SEQ ID NO: 427640 - RNA, 18 nt, Human
uaaguuccauuucuuuug

SEQ ID NO: 427641 - RNA, 22 nt, Human
uacuacgugauucuuuuucaca

SEQ ID NO: 427642 - RNA, 22 nt, Human
ucccaauaugaaugaacagcac

SEQ ID NO: 427643 - RNA, 26 nt, Human
ucccaauaugaaugaacaggguaccc

SEQ ID NO: 427644 - RNA, 18 nt, Human
ucuuuuucacauuuuugg

SEQ ID NO: 427645 - RNA, 24 nt, Human
ugaaaaaagccacccacaaagcca

SEQ ID NO: 427646 - RNA, 21 nt, Human
ugaggacaagcucuagugguc

SEQ ID NO: 427647 - RNA, 21 nt, Human
uggaauuacuaauaaagcuau

SEQ ID NO: 427648 - RNA, 23 nt, Human
uggcugaaaaacauuuaaccaag

SEQ ID NO: 427649 - RNA, 24 nt, Human
ugggcaaauucacaguaaaucaga

SEQ ID NO: 427650 - RNA, 20 nt, Human
uguuauaaaauuucacugaa

SEQ ID NO: 427651 - RNA, 27 nt, Human
uguucuauuuacauugcagaacuucca

SEQ ID NO: 427652 - RNA, 25 nt, Human
uuaaaaaaguuaacaguaguaugaa

SEQ ID NO: 427653 - RNA, 22 nt, Human
uucacauuuuuggugcaguauu

SEQ ID NO: 427654 - RNA, 21 nt, Human
uucauggauguguuuaaugaa

SEQ ID NO: 427655 - RNA, 23 nt, Human
uuucaacauauauaaauaggcug

SEQ ID NO: 427656 - RNA, 24 nt, Human
uuuucauaacauuuucaauggcug

SEQ ID NO: 427657 - RNA, 24 nt, Human
uuuuuuuuuuuguuuauaaaaggg

SEQ ID NO: 427658 - RNA, 18 nt, Human
uuuuuuuuuuuuuuuuug

SEQ ID NO: 427659 - RNA, 25 nt, Human
aaaaaaaaaaaaaaagugggugggg

SEQ ID NO: 427660 - RNA, 28 nt, Human
aaaaaaaaaagugggugggggggugaag

SEQ ID NO: 427661 - RNA, 30 nt, Human
aaaaaagaaaaauaaugaaagcgaaaggaa

SEQ ID NO: 427662 - RNA, 20 nt, Human
aaaaagaagccgaagcccca

SEQ ID NO: 427663 - RNA, 19 nt, Human
aaaaagccaaagaaaaggc

SEQ ID NO: 427664 - RNA, 21 nt, Human
aaaacaaagaaaaaaagaagc

SEQ ID NO: 427665 - RNA, 18 nt, Human
aaagaaaaggcgcaaauc

SEQ ID NO: 427666 - RNA, 22 nt, Human
aaagaaagaaaaagccaaagaa

SEQ ID NO: 427667 - RNA, 19 nt, Human
aaagaggauugcggggucu

SEQ ID NO: 427668 - RNA, 20 nt, Human
aaaguguacauacgaguucu

SEQ ID NO: 427669 - RNA, 21 nt, Human
aaauaaugaaagcgaaaggaa

SEQ ID NO: 427670 - RNA, 23 nt, Human
aagaaaaagccaaagaaaaggcg

SEQ ID NO: 427671 - RNA, 23 nt, Human
aagaaagaaagaaaaagccaaag

SEQ ID NO: 427672 - RNA, 27 nt, Human
aagaaagaaagaaaaagccaaagaaaa

SEQ ID NO: 427673 - RNA, 22 nt, Human
aauaggguuuuguucgauguuu

SEQ ID NO: 427674 - RNA, 18 nt, Human
acaaagaaaaaaagaagc

SEQ ID NO: 427675 - RNA, 21 nt, Human
acaaagaaaaaaagaagccga

SEQ ID NO: 427676 - RNA, 20 nt, Human
acccucgccagccgaggagg

SEQ ID NO: 427677 - RNA, 21 nt, Human
acgaguucuucuagccauaaa

SEQ ID NO: 427678 - RNA, 25 nt, Human
acuaaaguguacauacgaguucuuc

SEQ ID NO: 427679 - RNA, 18 nt, Human
acuagccccucgcccuuu

SEQ ID NO: 427680 - RNA, 23 nt, Human
acugcuucgcccucucuccgccu

SEQ ID NO: 427681 - RNA, 26 nt, Human
agaaagaaagaaaaagccaaagaaaa

SEQ ID NO: 427682 - RNA, 19 nt, Human
agaagaggaggagggaggg

SEQ ID NO: 427683 - RNA, 20 nt, Human
agaggaggagggagggugaa

SEQ ID NO: 427684 - RNA, 18 nt, Human
agcccccuaaaaaaaaac

SEQ ID NO: 427685 - RNA, 18 nt, Human
agcccguaccaauucgac

SEQ ID NO: 427686 - RNA, 22 nt, Human
agccgaagccccagagagcccg

SEQ ID NO: 427687 - RNA, 18 nt, Human
aggaagaagaggaggagg

SEQ ID NO: 427688 - RNA, 18 nt, Human
aggaagaagaggaggagg

SEQ ID NO: 427689 - RNA, 22 nt, Human
aggaagaggaggaagaagagga

SEQ ID NO: 427690 - RNA, 19 nt, Human
aggaggaacaagaggagga

SEQ ID NO: 427691 - RNA, 22 nt, Human
aggaggaagaggaggaagaaga

SEQ ID NO: 427692 - RNA, 18 nt, Human
aggaggagggagggugag

SEQ ID NO: 427693 - RNA, 19 nt, Human
auagccaggaacugagagc

SEQ ID NO: 427694 - RNA, 19 nt, Human
aucccacccacccgcucca

SEQ ID NO: 427695 - RNA, 18 nt, Human
auccggucccuccccccu

SEQ ID NO: 427696 - RNA, 24 nt, Human
auccggucccuccccccuccccca

SEQ ID NO: 427697 - RNA, 24 nt, Human
auccggucccuccccccuccccca

SEQ ID NO: 427698 - RNA, 18 nt, Human
auggagcaucucagcccc

SEQ ID NO: 427699 - RNA, 24 nt, Human
caaaguagccggacggcugcgggc

SEQ ID NO: 427700 - RNA, 23 nt, Human
caagaaaacaaagaaaaaaagaa

SEQ ID NO: 427701 - RNA, 23 nt, Human
cacccacccgcuccaaccgagau

SEQ ID NO: 427702 - RNA, 19 nt, Human
caccucgcgaaguccuagc

SEQ ID NO: 427703 - RNA, 19 nt, Human
ccaaacgcaaaguagccgg

SEQ ID NO: 427704 - RNA, 22 nt, Human
ccaccccucccccucccccucc

SEQ ID NO: 427705 - RNA, 27 nt, Human
cccaaugcaaagaccacaagguacccc

SEQ ID NO: 427706 - RNA, 20 nt, Human
cccauccggucccucccccc

SEQ ID NO: 427707 - RNA, 21 nt, Human
cccccaaugcaaagaccacaa

SEQ ID NO: 427708 - RNA, 21 nt, Human
cccccccacccucgccagccg

SEQ ID NO: 427709 - RNA, 23 nt, Human
ccccccccacccucgccagccga

SEQ ID NO: 427710 - RNA, 21 nt, Human
cccccgccccccccacccucg

SEQ ID NO: 427711 - RNA, 28 nt, Human
cccccuaccgcaccuuggguaccaagcc

SEQ ID NO: 427712 - RNA, 19 nt, Human
ccccggccucccccgcccc

SEQ ID NO: 427713 - RNA, 21 nt, Human
ccccggccucccccgcccccc

SEQ ID NO: 427714 - RNA, 26 nt, Human
ccccggccucccccgccccccccacc

SEQ ID NO: 427715 - RNA, 19 nt, Human
ccccuaaaaaaaaacuucc

SEQ ID NO: 427716 - RNA, 23 nt, Human
cccggccucccccgcccccccca

SEQ ID NO: 427717 - RNA, 18 nt, Human
ccggucccuccccccucc

SEQ ID NO: 427718 - RNA, 24 nt, Human
ccuaaaaaaaaacuuccuccugga

SEQ ID NO: 427719 - RNA, 19 nt, Human
ccuaccgcaccuuggguac

SEQ ID NO: 427720 - RNA, 20 nt, Human
ccucccccaaugcaaagacu

SEQ ID NO: 427721 - RNA, 23 nt, Human
ccuccccccucccccaaugcaaa

SEQ ID NO: 427722 - RNA, 22 nt, Human
ccucccccucccccuccccccg

SEQ ID NO: 427723 - RNA, 30 nt, Human
ccucucugcuuuuugaaaaaaaaaaaaaaa

SEQ ID NO: 427724 - RNA, 20 nt, Human
ccuuucuuuucucucucucc

SEQ ID NO: 427725 - RNA, 20 nt, Human
cgccccuccuuccuuccucc

SEQ ID NO: 427726 - RNA, 27 nt, Human
cgcuccaaccgagauauaacuauuuac

SEQ ID NO: 427727 - RNA, 24 nt, Human
cggccgcccaccccucccccuccc

SEQ ID NO: 427728 - RNA, 22 nt, Human
cggccucccccgccccccccac

SEQ ID NO: 427729 - RNA, 24 nt, Human
cggccucccccgccccccccaccc

SEQ ID NO: 427730 - RNA, 23 nt, Human
cggcugcgggccgcgaguaacgc

SEQ ID NO: 427731 - RNA, 20 nt, Human
cggucccuccccccuccccc

SEQ ID NO: 427732 - RNA, 22 nt, Human
cucccccuccccccgcccaucc

SEQ ID NO: 427733 - RNA, 23 nt, Human
cucccccucgacccccuaccgca

SEQ ID NO: 427734 - RNA, 18 nt, Human
cuccucccccucgacccc

SEQ ID NO: 427735 - RNA, 24 nt, Human
cuccucccccucgacccccuaccg

SEQ ID NO: 427736 - RNA, 21 nt, Human
cuccucgcuccuucacucucc

SEQ ID NO: 427737 - RNA, 26 nt, Human
cugcuucgcccucucuccgccucgcg

SEQ ID NO: 427738 - RNA, 18 nt, Human
cuucgcccucucuccgcc

SEQ ID NO: 427739 - RNA, 22 nt, Human
cuuucaccuccucagccgggcg

SEQ ID NO: 427740 - RNA, 20 nt, Human
cuuucggccgcccaccccuc

SEQ ID NO: 427741 - RNA, 21 nt, Human
gaagaggaggagggaggguga

SEQ ID NO: 427742 - RNA, 21 nt, Human
gacacgcagauccaggcucgu

SEQ ID NO: 427743 - RNA, 21 nt, Human
gagccccggccucccccgccc

SEQ ID NO: 427744 - RNA, 18 nt, Human
gauugcggggucugugug

SEQ ID NO: 427745 - RNA, 18 nt, Human
gcauuuggucagguggcc

SEQ ID NO: 427746 - RNA, 27 nt, Human
gcccaccccucccccucccccuccccc

SEQ ID NO: 427747 - RNA, 21 nt, Human
gccccccccacccucgccagc

SEQ ID NO: 427748 - RNA, 22 nt, Human
gccccucgcccuuucuuuucuc

SEQ ID NO: 427749 - RNA, 19 nt, Human
gccucccccgcccccccca

SEQ ID NO: 427750 - RNA, 18 nt, Human
gcucggggcgagccccgg

SEQ ID NO: 427751 - RNA, 20 nt, Human
ggacaguuauaguuuauauc

SEQ ID NO: 427752 - RNA, 18 nt, Human
ggaggaagaagaggagga

SEQ ID NO: 427753 - RNA, 18 nt, Human
ggaggaggaagaggagga

SEQ ID NO: 427754 - RNA, 22 nt, Human
ggagggaaaaucgggaggagga

SEQ ID NO: 427755 - RNA, 28 nt, Human
ggggagaaacuuucaccuccucaggacc

SEQ ID NO: 427756 - RNA, 23 nt, Human
guaacgcaggcuccagcgcccgc

SEQ ID NO: 427757 - RNA, 22 nt, Human
uaaaaaaaaacuuccuccugga

SEQ ID NO: 427758 - RNA, 22 nt, Human
uaacauggauaaaccggcccuu

SEQ ID NO: 427759 - RNA, 19 nt, Human
uaauguuguguauacgugu

SEQ ID NO: 427760 - RNA, 24 nt, Human
uacuauacgaauucuugacaggac

SEQ ID NO: 427761 - RNA, 18 nt, Human
ucacgcucgccuccucgc

SEQ ID NO: 427762 - RNA, 23 nt, Human
ucacucuccguuuuucccucucu

SEQ ID NO: 427763 - RNA, 25 nt, Human
ucccccgccccccccacccucgcca

SEQ ID NO: 427764 - RNA, 19 nt, Human
ucccccucccccucccccc

SEQ ID NO: 427765 - RNA, 24 nt, Human
ucccuccccccucccccaaugcaa

SEQ ID NO: 427766 - RNA, 23 nt, Human
ucgcuccuucacucuccguuuuu

SEQ ID NO: 427767 - RNA, 22 nt, Human
ucgggaggaggaggaggaacaa

SEQ ID NO: 427768 - RNA, 18 nt, Human
ucuguauuuacaagaaaa

SEQ ID NO: 427769 - RNA, 21 nt, Human
ucuucuagccauaaauauuga

SEQ ID NO: 427770 - RNA, 20 nt, Human
ucuuuucucucucucuccuu

SEQ ID NO: 427771 - RNA, 25 nt, Human
ugaaacaacauuuuacugcacuaaa

SEQ ID NO: 427772 - RNA, 23 nt, Human
ugaagaaagaaagaaaaagccaa

SEQ ID NO: 427773 - RNA, 18 nt, Human
ugacaggacaugaaacaa

SEQ ID NO: 427774 - RNA, 19 nt, Human
ugagcgcgagacugauagu

SEQ ID NO: 427775 - RNA, 22 nt, Human
ugcaggcaauggcgcgcgcgcg

SEQ ID NO: 427776 - RNA, 23 nt, Human
uggccuccucccccucgaccccc

SEQ ID NO: 427777 - RNA, 24 nt, Human
uggcggcauuuggucagguggccu

SEQ ID NO: 427778 - RNA, 23 nt, Human
ugggggggugaagaaagaaagaa

SEQ ID NO: 427779 - RNA, 24 nt, Human
ugggugggggggugaagaaagaaa

SEQ ID NO: 427780 - RNA, 20 nt, Human
uguuguguauacguguguga

SEQ ID NO: 427781 - RNA, 22 nt, Human
uuacugcacuaaaguacuuaga

SEQ ID NO: 427782 - RNA, 20 nt, Human
uucuguauuuacaagaaaac

SEQ ID NO: 427783 - RNA, 18 nt, Human
uugaugcuuccucucuuu

SEQ ID NO: 427784 - RNA, 23 nt, Human
uuggcagauuuuuuaaaagagga

SEQ ID NO: 427785 - RNA, 21 nt, Human
uuuacuagaacauucuugcca

SEQ ID NO: 427786 - RNA, 28 nt, Human
uuucuuuucucucucucuccuuucucuc

SEQ ID NO: 427787 - RNA, 24 nt, Human
aaaaaaaaaguuuauuacaaaagg

SEQ ID NO: 427788 - RNA, 20 nt, Human
aaaauaguaaguggagggcg

SEQ ID NO: 427789 - RNA, 20 nt, Human
aaacgucacaauguguagag

SEQ ID NO: 427790 - RNA, 19 nt, Human
aaacugacacuguaaggaa

SEQ ID NO: 427791 - RNA, 18 nt, Human
aaagaaaaauaagcaaaa

SEQ ID NO: 427792 - RNA, 19 nt, Human
aacaucaccaccaccaaca

SEQ ID NO: 427793 - RNA, 23 nt, Human
aacucgcaguuaaacaaccaucu

SEQ ID NO: 427794 - RNA, 21 nt, Human
aagaggaaggggaagaaaaag

SEQ ID NO: 427795 - RNA, 26 nt, Human
aaggggaagaaaaaguaguguaaaga

SEQ ID NO: 427796 - RNA, 19 nt, Human
aagggguggcggcgguugg

SEQ ID NO: 427797 - RNA, 18 nt, Human
acaaaacaagagaaagga

SEQ ID NO: 427798 - RNA, 19 nt, Human
acaaaacaagagaaaggag

SEQ ID NO: 427799 - RNA, 20 nt, Human
acaaaacaagagaaaggagu

SEQ ID NO: 427800 - RNA, 23 nt, Human
acaucaccaccaccaacaagccu

SEQ ID NO: 427801 - RNA, 22 nt, Human
acucgccgccucgugccgaauu

SEQ ID NO: 427802 - RNA, 20 nt, Human
acugaauugaucaguaauau

SEQ ID NO: 427803 - RNA, 26 nt, Human
agaaagagcagggaggggguguuggc

SEQ ID NO: 427804 - RNA, 19 nt, Human
agaagaaggcuguuacaaa

SEQ ID NO: 427805 - RNA, 20 nt, Human
agacugugagaguuuaaaca

SEQ ID NO: 427806 - RNA, 20 nt, Human
agagagcaagaggaagggga

SEQ ID NO: 427807 - RNA, 18 nt, Human
aggagggaggagaaggga

SEQ ID NO: 427808 - RNA, 25 nt, Human
aggagggaggaggggaagaaagagc

SEQ ID NO: 427809 - RNA, 21 nt, Human
agggaggggguguuggcgggg

SEQ ID NO: 427810 - RNA, 21 nt, Human
aggggaagaaagagcagggag

SEQ ID NO: 427811 - RNA, 18 nt, Human
agugcacagaaccgcggg

SEQ ID NO: 427812 - RNA, 24 nt, Human
auagauugauaggcagauuagaua

SEQ ID NO: 427813 - RNA, 22 nt, Human
auguagcccuauauauggccuc

SEQ ID NO: 427814 - RNA, 20 nt, Human
caaaauaguaaguggagggc

SEQ ID NO: 427815 - RNA, 26 nt, Human
caaggcgcuaccaggggcugcaacuu

SEQ ID NO: 427816 - RNA, 24 nt, Human
cacaggcgauccggccgaagugag

SEQ ID NO: 427817 - RNA, 20 nt, Human
caccacuaaggcgaaaaaga

SEQ ID NO: 427818 - RNA, 22 nt, Human
cagauuagauaagucauagaua

SEQ ID NO: 427819 - RNA, 23 nt, Human
cagccugaaaaaauacugaacaa

SEQ ID NO: 427820 - RNA, 22 nt, Human
caguuucgacccuauuagacaa

SEQ ID NO: 427821 - RNA, 22 nt, Human
cauagauacaaacauauauagg

SEQ ID NO: 427822 - RNA, 19 nt, Human
ccggcuagcggccgggcag

SEQ ID NO: 427823 - RNA, 21 nt, Human
ccuggguaccggccuccgggc

SEQ ID NO: 427824 - RNA, 22 nt, Human
ccuuaaaacuccauuuccaucu

SEQ ID NO: 427825 - RNA, 23 nt, Human
ccuuauguuuauauauguagggc

SEQ ID NO: 427826 - RNA, 20 nt, Human
cgaaggaggagaucuccgaa

SEQ ID NO: 427827 - RNA, 18 nt, Human
cggaaagggguggcggcg

SEQ ID NO: 427828 - RNA, 23 nt, Human
cggggccaggaggcucccugggu

SEQ ID NO: 427829 - RNA, 19 nt, Human
cguuacucgccgccucgug

SEQ ID NO: 427830 - RNA, 19 nt, Human
cuauauauggccucuugcc

SEQ ID NO: 427831 - RNA, 21 nt, Human
cugucccgggcaccccuccuc

SEQ ID NO: 427832 - RNA, 21 nt, Human
cuuuccgucacugcaagaguc

SEQ ID NO: 427833 - RNA, 21 nt, Human
gagauagagauaaagaaagga

SEQ ID NO: 427834 - RNA, 24 nt, Human
gaggggaagaaagagcagggaggg

SEQ ID NO: 427835 - RNA, 18 nt, Human
gagucagugguuccaaaa

SEQ ID NO: 427836 - RNA, 18 nt, Human
gagugcacagaaccgcgg

SEQ ID NO: 427837 - RNA, 20 nt, Human
gcaccccuccucuccccgag

SEQ ID NO: 427838 - RNA, 24 nt, Human
gccgaagugagagaggguaccggu

SEQ ID NO: 427839 - RNA, 21 nt, Human
ggaagaaaaaguaguguaaag

SEQ ID NO: 427840 - RNA, 20 nt, Human
ggaggcucccuggguaccgg

SEQ ID NO: 427841 - RNA, 19 nt, Human
ggaggggguguuggcgggg

SEQ ID NO: 427842 - RNA, 18 nt, Human
gggcacaggcgauccggc

SEQ ID NO: 427843 - RNA, 18 nt, Human
ggggaggaggagggagga

SEQ ID NO: 427844 - RNA, 25 nt, Human
gggggaggaggagggaggagaaggg

SEQ ID NO: 427845 - RNA, 19 nt, Human
gguaauaaagaacuaaggg

SEQ ID NO: 427846 - RNA, 21 nt, Human
ggugugcagagagcaagagga

SEQ ID NO: 427847 - RNA, 20 nt, Human
gucuucccagauggaaacug

SEQ ID NO: 427848 - RNA, 22 nt, Human
uaaaaaaugcuucaaaugccaa

SEQ ID NO: 427849 - RNA, 23 nt, Human
uaaacaaucaccacuaaggcgaa

SEQ ID NO: 427850 - RNA, 22 nt, Human
uaaagcaguuauaaucaaaagc

SEQ ID NO: 427851 - RNA, 21 nt, Human
uaaauauggcaucaauggaua

SEQ ID NO: 427852 - RNA, 20 nt, Human
uaaauggacuaugguuucuu

SEQ ID NO: 427853 - RNA, 25 nt, Human
uaacaucaccaccaccaacaagccu

SEQ ID NO: 427854 - RNA, 25 nt, Human
uaacuuccucucaagaaacaggaca

SEQ ID NO: 427855 - RNA, 20 nt, Human
uaauuugcucacaucuccuc

SEQ ID NO: 427856 - RNA, 20 nt, Human
uacaaacgauaaauauggca

SEQ ID NO: 427857 - RNA, 25 nt, Human
uaccggccuccgggcugggcugcgc

SEQ ID NO: 427858 - RNA, 18 nt, Human
uagauacaaacauauaua

SEQ ID NO: 427859 - RNA, 21 nt, Human
uauccugagaaaagggcaugg

SEQ ID NO: 427860 - RNA, 25 nt, Human
uauggauuggaacuauauacagcaa

SEQ ID NO: 427861 - RNA, 20 nt, Human
uauguuuauauauguagggc

SEQ ID NO: 427862 - RNA, 18 nt, Human
uccaggacaaacacauuu

SEQ ID NO: 427863 - RNA, 20 nt, Human
ucccgggcaccccuccucuc

SEQ ID NO: 427864 - RNA, 20 nt, Human
ucccuggguaccggccuccg

SEQ ID NO: 427865 - RNA, 18 nt, Human
uccugucccgggcacccc

SEQ ID NO: 427866 - RNA, 19 nt, Human
ucuagauagaacagacaga

SEQ ID NO: 427867 - RNA, 20 nt, Human
ucuccucuuuguagaagaag

SEQ ID NO: 427868 - RNA, 21 nt, Human
ugacacuguaaggaauuuaua

SEQ ID NO: 427869 - RNA, 20 nt, Human
ugcggggagacccccaaggc

SEQ ID NO: 427870 - RNA, 22 nt, Human
ugugagaguuuaaacaaucacc

SEQ ID NO: 427871 - RNA, 21 nt, Human
uuaaccauaaguaagcaaugc

SEQ ID NO: 427872 - RNA, 22 nt, Human
uucccggcacuuguugcaauaa

SEQ ID NO: 427873 - RNA, 23 nt, Human
uugcaugccgaaaauccaggaca

SEQ ID NO: 427874 - RNA, 20 nt, Human
uuggcggggggaggaggagg

SEQ ID NO: 427875 - RNA, 22 nt, Human
uuguucaguucccggcacuugu

SEQ ID NO: 427876 - RNA, 20 nt, Human
aacaauacaauagaacaacu

SEQ ID NO: 427877 - RNA, 22 nt, Human
aauacauagacucuuuuccuua

SEQ ID NO: 427878 - RNA, 22 nt, Human
aaugcuuucccacauuccauac

SEQ ID NO: 427879 - RNA, 19 nt, Human
accaagugcuuacauucac

SEQ ID NO: 427880 - RNA, 21 nt, Human
aggcugccucagaacuuccag

SEQ ID NO: 427881 - RNA, 18 nt, Human
aucaagggaugacuguac

SEQ ID NO: 427882 - RNA, 23 nt, Human
cagccagacaaaggcugccucag

SEQ ID NO: 427883 - RNA, 18 nt, Human
cauggcucacggagugcu

SEQ ID NO: 427884 - RNA, 22 nt, Human
ccaauacccagcagguaucaag

SEQ ID NO: 427885 - RNA, 21 nt, Human
ccaaugcguguuccagccaga

SEQ ID NO: 427886 - RNA, 19 nt, Human
gggaguugaaacaaagaaa

SEQ ID NO: 427887 - RNA, 22 nt, Human
uaaaagggacuggacauggcuc

SEQ ID NO: 427888 - RNA, 21 nt, Human
uaaaauuaauaaaugcuuucc

SEQ ID NO: 427889 - RNA, 23 nt, Human
uaaacaauacaauagaacaacua

SEQ ID NO: 427890 - RNA, 30 nt, Human
uacauagacucuuuuccuuaucaugauucu

SEQ ID NO: 427891 - RNA, 22 nt, Human
ucccagguccuaccgacagcuc

SEQ ID NO: 427892 - RNA, 25 nt, Human
ugaaacaaagaaacuuuaagggagc

SEQ ID NO: 427893 - RNA, 22 nt, Human
ugaaacaaagaaacuuuaaugu

SEQ ID NO: 427894 - RNA, 24 nt, Human
ugccaaugcguguuccagccagac

SEQ ID NO: 427895 - RNA, 21 nt, Human
uggaaagaaacugaaacuacu

SEQ ID NO: 427896 - RNA, 23 nt, Human
uggaaagaaacugaaacuacuua

SEQ ID NO: 427897 - RNA, 24 nt, Human
ugggaguugaaacaaagaaacuuu

SEQ ID NO: 427898 - RNA, 20 nt, Human
uucacagggucuaucuccaa

SEQ ID NO: 427899 - RNA, 24 nt, Human
uugauaggcugacaauuacugcau

SEQ ID NO: 427900 - RNA, 23 nt, Human
aaacauaccaaacacuacuaaau

SEQ ID NO: 427901 - RNA, 18 nt, Human
aaagcgaucccgucacaa

SEQ ID NO: 427902 - RNA, 20 nt, Human
aacagagaacgcgacuccau

SEQ ID NO: 427903 - RNA, 21 nt, Human
aaccaaaauaugguuucuacc

SEQ ID NO: 427904 - RNA, 24 nt, Human
aagcaacuagaagguucgauggga

SEQ ID NO: 427905 - RNA, 21 nt, Human
aagcgaucccgucacaaaggc

SEQ ID NO: 427906 - RNA, 21 nt, Human
aauaagaguggaaaaagugga

SEQ ID NO: 427907 - RNA, 20 nt, Human
aaucugugguuucuuucccu

SEQ ID NO: 427908 - RNA, 22 nt, Human
acaagacugaaagcauuuccac

SEQ ID NO: 427909 - RNA, 25 nt, Human
acuccauucaccagcggagcgcgaa

SEQ ID NO: 427910 - RNA, 23 nt, Human
acucccuuaaugaaaaccauuuc

SEQ ID NO: 427911 - RNA, 23 nt, Human
acucugugacccaaaacaauuua

SEQ ID NO: 427912 - RNA, 30 nt, Human
acucugugacccaaaacaauuuagaauagg

SEQ ID NO: 427913 - RNA, 24 nt, Human
agaagagagacauagucaagaaaa

SEQ ID NO: 427914 - RNA, 21 nt, Human
agaaugcucucaggccaauua

SEQ ID NO: 427915 - RNA, 23 nt, Human
agacauagucaagaaaacaauga

SEQ ID NO: 427916 - RNA, 24 nt, Human
agagagaucaagaucucugguugg

SEQ ID NO: 427917 - RNA, 19 nt, Human
agagcagcaggaaacauga

SEQ ID NO: 427918 - RNA, 19 nt, Human
agcuuaucuccaggaguuc

SEQ ID NO: 427919 - RNA, 21 nt, Human
aggaaacaugaaacccaggac

SEQ ID NO: 427920 - RNA, 18 nt, Human
aggaaauugagccacagg

SEQ ID NO: 427921 - RNA, 18 nt, Human
aggaccaauucucuaaug

SEQ ID NO: 427922 - RNA, 25 nt, Human
aggcaaaagggaaaaaccauguaug

SEQ ID NO: 427923 - RNA, 21 nt, Human
aggcagcagcaacagcaaaac

SEQ ID NO: 427924 - RNA, 25 nt, Human
aggcagcagcaacagcaaaacagag

SEQ ID NO: 427925 - RNA, 19 nt, Human
augaaaagaagaaaaucug

SEQ ID NO: 427926 - RNA, 24 nt, Human
caaaggcagcagcaacagcaaaac

SEQ ID NO: 427927 - RNA, 25 nt, Human
caacauuaaacagacuauaaaacuc

SEQ ID NO: 427928 - RNA, 24 nt, Human
caagcagauuucaauuaaauaaca

SEQ ID NO: 427929 - RNA, 18 nt, Human
caaguaugagcuagaggc

SEQ ID NO: 427930 - RNA, 21 nt, Human
cacagccaguaacuacagaga

SEQ ID NO: 427931 - RNA, 18 nt, Human
cacauaaaacauaccaaa

SEQ ID NO: 427932 - RNA, 21 nt, Human
cacuacuaaaugucccagaag

SEQ ID NO: 427933 - RNA, 19 nt, Human
cacuugaucucaauuguac

SEQ ID NO: 427934 - RNA, 22 nt, Human
cagcagcaacagcaaaacagag

SEQ ID NO: 427935 - RNA, 24 nt, Human
cagcagcaacagcaaaacagagaa

SEQ ID NO: 427936 - RNA, 20 nt, Human
caggagcuuuugcagugcua

SEQ ID NO: 427937 - RNA, 21 nt, Human
cauuacaagcuguuuauugau

SEQ ID NO: 427938 - RNA, 26 nt, Human
cauugcucuuugugaaaaauucccau

SEQ ID NO: 427939 - RNA, 20 nt, Human
ccacaugacaacgcuuugag

SEQ ID NO: 427940 - RNA, 19 nt, Human
ccagagaaucugaagacug

SEQ ID NO: 427941 - RNA, 23 nt, Human
cccgucacaaaggcagcagcaac

SEQ ID NO: 427942 - RNA, 19 nt, Human
cccuauaguagcauacuca

SEQ ID NO: 427943 - RNA, 24 nt, Human
cuccugauucuaaccaucauuucu

SEQ ID NO: 427944 - RNA, 22 nt, Human
cuguuuauugauccucagaaau

SEQ ID NO: 427945 - RNA, 19 nt, Human
cuuaauucucagcaacaac

SEQ ID NO: 427946 - RNA, 18 nt, Human
gaagagcggcgucagagg

SEQ ID NO: 427947 - RNA, 20 nt, Human
gaauucaugaaaagaagaaa

SEQ ID NO: 427948 - RNA, 23 nt, Human
gacacauaaaacauaccaaacac

SEQ ID NO: 427949 - RNA, 18 nt, Human
gacuccauucaccagcgg

SEQ ID NO: 427950 - RNA, 23 nt, Human
gcagcagcaacagcaaaacagag

SEQ ID NO: 427951 - RNA, 24 nt, Human
gcaugguguguacacagugagaag

SEQ ID NO: 427952 - RNA, 23 nt, Human
gcauuuccacauagauucaauuu

SEQ ID NO: 427953 - RNA, 18 nt, Human
gcccaauguuccccuagg

SEQ ID NO: 427954 - RNA, 19 nt, Human
ggcagcagcaacagcaaaa

SEQ ID NO: 427955 - RNA, 19 nt, Human
gggcaugguguguacacag

SEQ ID NO: 427956 - RNA, 19 nt, Human
gggguuucaaccuggguag

SEQ ID NO: 427957 - RNA, 23 nt, Human
uaaaacauaccaaacacuacuaa

SEQ ID NO: 427958 - RNA, 24 nt, Human
uaaaacauaccaaacacuacuaaa

SEQ ID NO: 427959 - RNA, 21 nt, Human
uaaaacucagucaaaaucucc

SEQ ID NO: 427960 - RNA, 19 nt, Human
uaagaguggaaaaagugga

SEQ ID NO: 427961 - RNA, 22 nt, Human
uaagugacuauucuacucccuu

SEQ ID NO: 427962 - RNA, 25 nt, Human
uacaaacagaauaaauguguauaca

SEQ ID NO: 427963 - RNA, 24 nt, Human
uacaacgacaaguaugagcuagag

SEQ ID NO: 427964 - RNA, 19 nt, Human
uacaagcuguuuauugauc

SEQ ID NO: 427965 - RNA, 23 nt, Human
uaccaaacacuacuaaauguccc

SEQ ID NO: 427966 - RNA, 23 nt, Human
uacuaugugccaggcacucuuuu

SEQ ID NO: 427967 - RNA, 24 nt, Human
uacuucuguaggaauucaugaaaa

SEQ ID NO: 427968 - RNA, 20 nt, Human
uagaauagagaaacuagagg

SEQ ID NO: 427969 - RNA, 21 nt, Human
uaguaauauuauuaauggcac

SEQ ID NO: 427970 - RNA, 24 nt, Human
uaguguacauuuuuuauuuugcaa

SEQ ID NO: 427971 - RNA, 18 nt, Human
uauguuguaugugggcau

SEQ ID NO: 427972 - RNA, 23 nt, Human
uauuaugcuaguguacauuuuuu

SEQ ID NO: 427973 - RNA, 20 nt, Human
ucaaaugcccaauguucccc

SEQ ID NO: 427974 - RNA, 20 nt, Human
ucacaugaggacacuugcuc

SEQ ID NO: 427975 - RNA, 20 nt, Human
ucaccauaauccuaccaggu

SEQ ID NO: 427976 - RNA, 27 nt, Human
ucagugaucauccucauacauauuucu

SEQ ID NO: 427977 - RNA, 21 nt, Human
ucagugauuuucccaggcugu

SEQ ID NO: 427978 - RNA, 18 nt, Human
uccaaugcaaaauaaagu

SEQ ID NO: 427979 - RNA, 18 nt, Human
uccacaugacaacgcuuu

SEQ ID NO: 427980 - RNA, 23 nt, Human
uccacaugacaacgcuuugaggu

SEQ ID NO: 427981 - RNA, 22 nt, Human
uccauagaauggaaaaccuuug

SEQ ID NO: 427982 - RNA, 23 nt, Human
uccauagaauggaaaaccuuugu

SEQ ID NO: 427983 - RNA, 19 nt, Human
ucccuauaguagcauacuc

SEQ ID NO: 427984 - RNA, 21 nt, Human
ucuccauagaauggaaaaccu

SEQ ID NO: 427985 - RNA, 20 nt, Human
ucugacuucacugaaaaugu

SEQ ID NO: 427986 - RNA, 19 nt, Human
ucugugguuucuuucccuu

SEQ ID NO: 427987 - RNA, 25 nt, Human
ugaaauaaaaucugugguuucuuuc

SEQ ID NO: 427988 - RNA, 18 nt, Human
ugagaagagcagcaggaa

SEQ ID NO: 427989 - RNA, 20 nt, Human
ugagaagagcagcaggaaac

SEQ ID NO: 427990 - RNA, 21 nt, Human
ugagugacagcagagugcugg

SEQ ID NO: 427991 - RNA, 18 nt, Human
uggcacagagaagcuaag

SEQ ID NO: 427992 - RNA, 22 nt, Human
ugggcaugguguguacacagug

SEQ ID NO: 427993 - RNA, 20 nt, Human
uguucaagaucacccagcua

SEQ ID NO: 427994 - RNA, 19 nt, Human
uuaaauucucaggagcuuu

SEQ ID NO: 427995 - RNA, 22 nt, Human
uuaauacucaccauaauccuac

SEQ ID NO: 427996 - RNA, 18 nt, Human
uuccuugagugacagcag

SEQ ID NO: 427997 - RNA, 22 nt, Human
uuguguacauauuuuaaugccu

SEQ ID NO: 427998 - RNA, 23 nt, Human
uuuauagaaugaaagagaaaauu

SEQ ID NO: 427999 - RNA, 21 nt, Human
uuuguacaaacagaauaaaug

SEQ ID NO: 428000 - RNA, 21 nt, Human
aaaaugacaaccccaucauua

SEQ ID NO: 428001 - RNA, 26 nt, Human
aaggucaaucuggaguauguguuacc

SEQ ID NO: 428002 - RNA, 23 nt, Human
acauggcucccuccccuauagcu

SEQ ID NO: 428003 - RNA, 22 nt, Human
agaagugaaaaucuauauucua

SEQ ID NO: 428004 - RNA, 23 nt, Human
auaaaguuuuucucuagaaugag

SEQ ID NO: 428005 - RNA, 25 nt, Human
auuccacauaaguggcacuguugug

SEQ ID NO: 428006 - RNA, 20 nt, Human
auuuauaaggucaaucugga

SEQ ID NO: 428007 - RNA, 18 nt, Human
caacauggcucccucccc

SEQ ID NO: 428008 - RNA, 19 nt, Human
caacauggcucccuccccu

SEQ ID NO: 428009 - RNA, 21 nt, Human
cacugcuaccaauaucagaga

SEQ ID NO: 428010 - RNA, 20 nt, Human
cagugaguccuuucaaguuu

SEQ ID NO: 428011 - RNA, 21 nt, Human
cauaaguggcacuguuguggu

SEQ ID NO: 428012 - RNA, 25 nt, Human
cauauggauuuucuucagugagucc

SEQ ID NO: 428013 - RNA, 19 nt, Human
cauguuuuugacaaaaacu

SEQ ID NO: 428014 - RNA, 20 nt, Human
ccuggugugaggugcuuggg

SEQ ID NO: 428015 - RNA, 21 nt, Human
cuggagguuuuucuacacuga

SEQ ID NO: 428016 - RNA, 24 nt, Human
gaaggcauucucacauucgauacc

SEQ ID NO: 428017 - RNA, 19 nt, Human
gaccuggugugaggugcuu

SEQ ID NO: 428018 - RNA, 18 nt, Human
gcaaaaaaugacaacccc

SEQ ID NO: 428019 - RNA, 18 nt, Human
guucauguuuuugacaaa

SEQ ID NO: 428020 - RNA, 19 nt, Human
uaaaauuuggcaucuggag

SEQ ID NO: 428021 - RNA, 23 nt, Human
uacaggauuuauuuccaguggga

SEQ ID NO: 428022 - RNA, 21 nt, Human
uauugcuuauagucauagggu

SEQ ID NO: 428023 - RNA, 22 nt, Human
ucacauucgauaccuucauaaa

SEQ ID NO: 428024 - RNA, 22 nt, Human
ucagaauuuucuguauuucuag

SEQ ID NO: 428025 - RNA, 25 nt, Human
uccgauuguuaaaaaaaaaaaaaaa

SEQ ID NO: 428026 - RNA, 26 nt, Human
uccgauuguuaaaaaaaaaaaaaaaa

SEQ ID NO: 428027 - RNA, 22 nt, Human
ucucgcucuauuaguuccugaa

SEQ ID NO: 428028 - RNA, 21 nt, Human
ucuucaaaaaugagcaaccaa

SEQ ID NO: 428029 - RNA, 19 nt, Human
ugaguccuuucaaguuuuc

SEQ ID NO: 428030 - RNA, 23 nt, Human
ugcagguuuucuaacauaaacaa

SEQ ID NO: 428031 - RNA, 18 nt, Human
uggugugaggugcuuggg

SEQ ID NO: 428032 - RNA, 24 nt, Human
uuacuaagucugaacuuacacugc

SEQ ID NO: 428033 - RNA, 23 nt, Human
uucacaguuucucucaaguaugu

SEQ ID NO: 428034 - RNA, 24 nt, Human
uugacaaaaacuguagugauuaaa

SEQ ID NO: 428035 - RNA, 22 nt, Human
uugugguaaugagugacuucuc

SEQ ID NO: 428036 - RNA, 20 nt, Human
uuuauagcuccuaaaacauc

SEQ ID NO: 428037 - RNA, 18 nt, Human
uuuuuuuuucaaaagaag

SEQ ID NO: 428038 - RNA, 24 nt, Human
aacugcacaguaacaaugcacuuu

SEQ ID NO: 428039 - RNA, 23 nt, Human
aagaacguuuguucaaacuaaag

SEQ ID NO: 428040 - RNA, 23 nt, Human
aaggaagaacuuuuaccacaaug

SEQ ID NO: 428041 - RNA, 22 nt, Human
aauuuucuaacaugcauuagaa

SEQ ID NO: 428042 - RNA, 21 nt, Human
acuuugguccacuugucuguu

SEQ ID NO: 428043 - RNA, 27 nt, Human
auccauuuaaguuuccagaaauauacu

SEQ ID NO: 428044 - RNA, 19 nt, Human
augaaaauagauacauucg

SEQ ID NO: 428045 - RNA, 26 nt, Human
caaacuaaagaaagccagaagccaaa

SEQ ID NO: 428046 - RNA, 21 nt, Human
cagcacaacaggaaacagcuu

SEQ ID NO: 428047 - RNA, 23 nt, Human
cauucuagaaauuuugccaccac

SEQ ID NO: 428048 - RNA, 18 nt, Human
cuccucuguggcaauaag

SEQ ID NO: 428049 - RNA, 19 nt, Human
gaacuuuuaccacaaugaa

SEQ ID NO: 428050 - RNA, 21 nt, Human
ggaagaacaugaccugggaaa

SEQ ID NO: 428051 - RNA, 18 nt, Human
uaaguuuccagaaauaua

SEQ ID NO: 428052 - RNA, 24 nt, Human
ucaacggacaacaguucagcacaa

SEQ ID NO: 428053 - RNA, 23 nt, Human
ucuaaugauuuaaguuugauuuu

SEQ ID NO: 428054 - RNA, 18 nt, Human
ucucaaaacuccccuuca

SEQ ID NO: 428055 - RNA, 19 nt, Human
ugaggaagaacaugaccug

SEQ ID NO: 428056 - RNA, 21 nt, Human
ugccaccaccacucuuucugg

SEQ ID NO: 428057 - RNA, 20 nt, Human
uggaaaagaucccuccucug

SEQ ID NO: 428058 - RNA, 25 nt, Human
uggaaaagaucccuccucuguggca

SEQ ID NO: 428059 - RNA, 20 nt, Human
aaaccaaaaccauaaugaga

SEQ ID NO: 428060 - RNA, 21 nt, Human
aagcaacagaauaagggagac

SEQ ID NO: 428061 - RNA, 21 nt, Human
aagcauggagguaauuuuucu

SEQ ID NO: 428062 - RNA, 22 nt, Human
acuccauugccaagaaccugag

SEQ ID NO: 428063 - RNA, 20 nt, Human
acuuggugggaaugguugac

SEQ ID NO: 428064 - RNA, 20 nt, Human
agcauggagguaauuuuucu

SEQ ID NO: 428065 - RNA, 19 nt, Human
augguugacuucauuagaa

SEQ ID NO: 428066 - RNA, 26 nt, Human
cacacccaagaagaggucccagggau

SEQ ID NO: 428067 - RNA, 22 nt, Human
cacccucuacuccauugccaag

SEQ ID NO: 428068 - RNA, 19 nt, Human
cagaauaagggagaccuca

SEQ ID NO: 428069 - RNA, 20 nt, Human
cagaauaagggagaccucac

SEQ ID NO: 428070 - RNA, 23 nt, Human
cagcauccuuaaacaugaggagu

SEQ ID NO: 428071 - RNA, 18 nt, Human
caucagggugaagaaggg

SEQ ID NO: 428072 - RNA, 19 nt, Human
ccccucacccucuacucca

SEQ ID NO: 428073 - RNA, 24 nt, Human
cccucuacuccauugccaagaacc

SEQ ID NO: 428074 - RNA, 20 nt, Human
ccucuacuccauugccaaga

SEQ ID NO: 428075 - RNA, 22 nt, Human
ccugaaaguagagaaaugccag

SEQ ID NO: 428076 - RNA, 19 nt, Human
cuaaagcauggagguaauu

SEQ ID NO: 428077 - RNA, 21 nt, Human
cucacccucuacuccauugcc

SEQ ID NO: 428078 - RNA, 21 nt, Human
cucuacuccauugccaagaac

SEQ ID NO: 428079 - RNA, 19 nt, Human
cugguauggggauucugcu

SEQ ID NO: 428080 - RNA, 22 nt, Human
gaccacuuccauaaggcuccac

SEQ ID NO: 428081 - RNA, 19 nt, Human
gcaggauagggaccagcca

SEQ ID NO: 428082 - RNA, 22 nt, Human
gccaagcaacagaauaagggag

SEQ ID NO: 428083 - RNA, 24 nt, Human
gcugaagauuuucucacaaagacc

SEQ ID NO: 428084 - RNA, 24 nt, Human
uaaaagaagauauauacacaaaug

SEQ ID NO: 428085 - RNA, 27 nt, Human
uaacacuucuacagaaacauucugcuu

SEQ ID NO: 428086 - RNA, 19 nt, Human
uacuauuggcaggauaggg

SEQ ID NO: 428087 - RNA, 23 nt, Human
uagggaccagccaagcaacagaa

SEQ ID NO: 428088 - RNA, 22 nt, Human
ucaucagggugaagaagggccc

SEQ ID NO: 428089 - RNA, 20 nt, Human
ucccagggauugcugacagg

SEQ ID NO: 428090 - RNA, 24 nt, Human
ucccagggauugcugacaggccaa

SEQ ID NO: 428091 - RNA, 22 nt, Human
ugaagaagggcccauuacuauu

SEQ ID NO: 428092 - RNA, 23 nt, Human
ugggcccccucacccucuacucc

SEQ ID NO: 428093 - RNA, 22 nt, Human
uucauuagaaauguuacccagg

SEQ ID NO: 428094 - RNA, 20 nt, Human
uucuugguggaaggaucugc

SEQ ID NO: 428095 - RNA, 24 nt, Human
aacagagcaagacucugucucagg

SEQ ID NO: 428096 - RNA, 22 nt, Human
aacagucaaauguccuuugacc

SEQ ID NO: 428097 - RNA, 22 nt, Human
aagccaaguuuauuacaaccga

SEQ ID NO: 428098 - RNA, 18 nt, Human
aauuagccaggcauggug

SEQ ID NO: 428099 - RNA, 24 nt, Human
aauugcucgaacucagggggugga

SEQ ID NO: 428100 - RNA, 23 nt, Human
acaaaacauuccccuggcucucc

SEQ ID NO: 428101 - RNA, 24 nt, Human
acaaaacauuccccuggcucuccg

SEQ ID NO: 428102 - RNA, 19 nt, Human
acaaccgaagccacaaaac

SEQ ID NO: 428103 - RNA, 21 nt, Human
acagagcaagacucugucuca

SEQ ID NO: 428104 - RNA, 24 nt, Human
acuccgucucuacuaaaaauacaa

SEQ ID NO: 428105 - RNA, 24 nt, Human
agaagguagaucagcggaaucaag

SEQ ID NO: 428106 - RNA, 18 nt, Human
agacuuaguguggagaaa

SEQ ID NO: 428107 - RNA, 18 nt, Human
agagcaagacucugucuc

SEQ ID NO: 428108 - RNA, 22 nt, Human
agcauuuugggaggcugaggca

SEQ ID NO: 428109 - RNA, 24 nt, Human
agcauuuugggaggcugaggcagg

SEQ ID NO: 428110 - RNA, 21 nt, Human
agccaggcauggugaggcgcc

SEQ ID NO: 428111 - RNA, 24 nt, Human
agccugggcaacagagcaagacuc

SEQ ID NO: 428112 - RNA, 18 nt, Human
aggcaggagaauugcucg

SEQ ID NO: 428113 - RNA, 18 nt, Human
aggcagguggaucaccug

SEQ ID NO: 428114 - RNA, 22 nt, Human
aggcagguggaucaccugaggg

SEQ ID NO: 428115 - RNA, 22 nt, Human
aggcagguggaucaccugaggu

SEQ ID NO: 428116 - RNA, 22 nt, Human
aggcauggugaggcgccuguaa

SEQ ID NO: 428117 - RNA, 21 nt, Human
aggcugaggcagguggaucac

SEQ ID NO: 428118 - RNA, 24 nt, Human
aggcugaggcagguggaucaccug

SEQ ID NO: 428119 - RNA, 23 nt, Human
aguggcucaugccuguaauccca

SEQ ID NO: 428120 - RNA, 24 nt, Human
aguggcucaugccuguaaucccag

SEQ ID NO: 428121 - RNA, 20 nt, Human
aucccagcuacucgggagcc

SEQ ID NO: 428122 - RNA, 24 nt, Human
auggugaggcgccuguaaucccag

SEQ ID NO: 428123 - RNA, 23 nt, Human
auugcacuccagccugggcaaca

SEQ ID NO: 428124 - RNA, 24 nt, Human
auugcacuccagccugggcaacag

SEQ ID NO: 428125 - RNA, 24 nt, Human
auugugccauugcacuccagccug

SEQ ID NO: 428126 - RNA, 23 nt, Human
caaaugcugaaacuccgucucua

SEQ ID NO: 428127 - RNA, 23 nt, Human
cacuccagccugggcaacagagc

SEQ ID NO: 428128 - RNA, 27 nt, Human
cagcaguucaaaaucaccugcaaaugc

SEQ ID NO: 428129 - RNA, 24 nt, Human
cagcauuuugggaggcugaggcag

SEQ ID NO: 428130 - RNA, 26 nt, Human
cagcauuuugggaggcugaggcaggu

SEQ ID NO: 428131 - RNA, 19 nt, Human
caggggguggagguugcag

SEQ ID NO: 428132 - RNA, 24 nt, Human
caggggguggagguugcagugagu

SEQ ID NO: 428133 - RNA, 27 nt, Human
cagguggaucaccugaggucagcaguu

SEQ ID NO: 428134 - RNA, 24 nt, Human
caugccuguaaucccagcauuuug

SEQ ID NO: 428135 - RNA, 19 nt, Human
cauugcacuccagccuggg

SEQ ID NO: 428136 - RNA, 21 nt, Human
cauugcacuccagccugggca

SEQ ID NO: 428137 - RNA, 22 nt, Human
cauugcacuccagccugggcaa

SEQ ID NO: 428138 - RNA, 24 nt, Human
cauugcacuccagccugggcaaca

SEQ ID NO: 428139 - RNA, 27 nt, Human
cauugcacuccagccugggcaacagag

SEQ ID NO: 428140 - RNA, 20 nt, Human
ccauugcacuccagccuggg

SEQ ID NO: 428141 - RNA, 21 nt, Human
ccauugcacuccagccugggc

SEQ ID NO: 428142 - RNA, 23 nt, Human
ccauugcacuccagccugggcaa

SEQ ID NO: 428143 - RNA, 24 nt, Human
ccauugcacuccagccugggcaac

SEQ ID NO: 428144 - RNA, 21 nt, Human
ccgaagccacaaaacauggag

SEQ ID NO: 428145 - RNA, 22 nt, Human
ccgggacccuguggcuuuuuuu

SEQ ID NO: 428146 - RNA, 22 nt, Human
ccugggcaacagagcaagacuc

SEQ ID NO: 428147 - RNA, 19 nt, Human
ccuguaaucccagcuacuc

SEQ ID NO: 428148 - RNA, 21 nt, Human
ccuguaaucccagcuacucgg

SEQ ID NO: 428149 - RNA, 23 nt, Human
ccuuaucucccugaagaaggaug

SEQ ID NO: 428150 - RNA, 24 nt, Human
cgccuguaaucccagcuacucggg

SEQ ID NO: 428151 - RNA, 19 nt, Human
cggaaucaaggccaggcua

SEQ ID NO: 428152 - RNA, 20 nt, Human
cuacucgggagccaaggcag

SEQ ID NO: 428153 - RNA, 23 nt, Human
cucaugccuguaaucccagcauu

SEQ ID NO: 428154 - RNA, 24 nt, Human
cucaugccuguaaucccagcauuu

SEQ ID NO: 428155 - RNA, 20 nt, Human
cucuacuccauuucaucaaa

SEQ ID NO: 428156 - RNA, 27 nt, Human
gaaucaaggccaggcuagguuaggaaa

SEQ ID NO: 428157 - RNA, 23 nt, Human
gagauugugccauugcacuccag

SEQ ID NO: 428158 - RNA, 23 nt, Human
gagguugcagugaguugagauug

SEQ ID NO: 428159 - RNA, 24 nt, Human
gaucaccugaggucagcaguucaa

SEQ ID NO: 428160 - RNA, 24 nt, Human
gcacuccagccugggcaacagagc

SEQ ID NO: 428161 - RNA, 22 nt, Human
gcauuucucuacuccauuucau

SEQ ID NO: 428162 - RNA, 22 nt, Human
gccauugcacuccagccugggc

SEQ ID NO: 428163 - RNA, 24 nt, Human
gccauugcacuccagccugggcaa

SEQ ID NO: 428164 - RNA, 19 nt, Human
gcucuccgggacccugugg

SEQ ID NO: 428165 - RNA, 22 nt, Human
ggagguugcagugaguugagau

SEQ ID NO: 428166 - RNA, 24 nt, Human
ggagguugcagugaguugagauug

SEQ ID NO: 428167 - RNA, 23 nt, Human
ggcgcaguggcucaugccuguaa

SEQ ID NO: 428168 - RNA, 21 nt, Human
ggcugggcgcaguggcucaug

SEQ ID NO: 428169 - RNA, 23 nt, Human
ggcugggcgcaguggcucaugcc

SEQ ID NO: 428170 - RNA, 18 nt, Human
gguggagguugcagugag

SEQ ID NO: 428171 - RNA, 23 nt, Human
gguggagguugcagugaguugag

SEQ ID NO: 428172 - RNA, 24 nt, Human
guugcagugaguugagauugugcc

SEQ ID NO: 428173 - RNA, 21 nt, Human
uaaaaauacaaaaauuagcca

SEQ ID NO: 428174 - RNA, 19 nt, Human
uaaaguuuuuuuuuuuuuu

SEQ ID NO: 428175 - RNA, 24 nt, Human
uaacacaaaacauuccccuggcuc

SEQ ID NO: 428176 - RNA, 24 nt, Human
ucgaacucaggggguggagguugc

SEQ ID NO: 428177 - RNA, 21 nt, Human
ucucuacuaaaaauacaaaaa

SEQ ID NO: 428178 - RNA, 19 nt, Human
ugacucuuaguccuugucc

SEQ ID NO: 428179 - RNA, 20 nt, Human
ugaggcagguggaucaccug

SEQ ID NO: 428180 - RNA, 24 nt, Human
ugaggcagguggaucaccugaggu

SEQ ID NO: 428181 - RNA, 26 nt, Human
ugaggcagguggaucaccugagguca

SEQ ID NO: 428182 - RNA, 22 nt, Human
ugaggucagcaguucaaaauca

SEQ ID NO: 428183 - RNA, 22 nt, Human
ugcacuccagccugggcaacag

SEQ ID NO: 428184 - RNA, 22 nt, Human
ugcacuccagccugggcaacag

SEQ ID NO: 428185 - RNA, 24 nt, Human
ugccauugcacuccagccugggca

SEQ ID NO: 428186 - RNA, 24 nt, Human
ugccuguaaucccagcauuuuggg

SEQ ID NO: 428187 - RNA, 24 nt, Human
uggaucaccugaggucagcaguuc

SEQ ID NO: 428188 - RNA, 24 nt, Human
uggcucaugccuguaaucccagca

SEQ ID NO: 428189 - RNA, 24 nt, Human
ugggaggcugaggcagguggauca

SEQ ID NO: 428190 - RNA, 22 nt, Human
uggugaggcgccuguaauccca

SEQ ID NO: 428191 - RNA, 18 nt, Human
uuacaaccgaagccacaa

SEQ ID NO: 428192 - RNA, 23 nt, Human
uuagccaggcauggugaggcgcc

SEQ ID NO: 428193 - RNA, 22 nt, Human
uuccccuggcucuccgggaccc

SEQ ID NO: 428194 - RNA, 20 nt, Human
uucuuuaaaacucucggcug

SEQ ID NO: 428195 - RNA, 28 nt, Human
uugaccacuuacagaaugcauuucucua

SEQ ID NO: 428196 - RNA, 19 nt, Human
uugcagugaguugagauug

SEQ ID NO: 428197 - RNA, 22 nt, Human
uugcagugaguugagauugugc

SEQ ID NO: 428198 - RNA, 24 nt, Human
uugcucgaacucaggggguggagg

SEQ ID NO: 428199 - RNA, 25 nt, Human
uugggaggcugaggcagguggauca

SEQ ID NO: 428200 - RNA, 23 nt, Human
uugugccauugcacuccagccug

SEQ ID NO: 428201 - RNA, 21 nt, Human
uuuuuuuuuuauaaagaagcc

SEQ ID NO: 428202 - RNA, 24 nt, Human
aaaaaaccugagcaagucagaaag

SEQ ID NO: 428203 - RNA, 22 nt, Human
aaacuuuuuguauaagccacca

SEQ ID NO: 428204 - RNA, 22 nt, Human
aaauaucuuucaagauggggcc

SEQ ID NO: 428205 - RNA, 23 nt, Human
aaccacagaggaucugcgccggg

SEQ ID NO: 428206 - RNA, 19 nt, Human
aacucaggcauuucaugau

SEQ ID NO: 428207 - RNA, 25 nt, Human
aaguacuuucccaggccaggugacc

SEQ ID NO: 428208 - RNA, 21 nt, Human
accagggccuguccaagcccc

SEQ ID NO: 428209 - RNA, 21 nt, Human
acccucuuggcuaaaaauggg

SEQ ID NO: 428210 - RNA, 23 nt, Human
accuggcaccauaagguaucucc

SEQ ID NO: 428211 - RNA, 20 nt, Human
acucgcagagcgaacagcga

SEQ ID NO: 428212 - RNA, 19 nt, Human
agaaagugcaacauauccc

SEQ ID NO: 428213 - RNA, 18 nt, Human
agcaaccccgagcuucug

SEQ ID NO: 428214 - RNA, 25 nt, Human
agcagauacagcucagacccucuuc

SEQ ID NO: 428215 - RNA, 23 nt, Human
aggcagccagaguucucucucuu

SEQ ID NO: 428216 - RNA, 26 nt, Human
auccauaccuauaccugucauacaga

SEQ ID NO: 428217 - RNA, 22 nt, Human
caaaaaaccugagcaagucaga

SEQ ID NO: 428218 - RNA, 23 nt, Human
caaaaaaccugagcaagucagaa

SEQ ID NO: 428219 - RNA, 23 nt, Human
caaaccagagcaacaugaggcaa

SEQ ID NO: 428220 - RNA, 21 nt, Human
caaccacagaggaucugcgcc

SEQ ID NO: 428221 - RNA, 19 nt, Human
cacauggauugacagugac

SEQ ID NO: 428222 - RNA, 22 nt, Human
caccucggaaccgcccagcaac

SEQ ID NO: 428223 - RNA, 23 nt, Human
cagagcgaacagcgacuucuccc

SEQ ID NO: 428224 - RNA, 21 nt, Human
cagcucagacccucuuggcua

SEQ ID NO: 428225 - RNA, 24 nt, Human
cagcucagacccucuuggcuaaaa

SEQ ID NO: 428226 - RNA, 18 nt, Human
cauaugucacaagggaga

SEQ ID NO: 428227 - RNA, 21 nt, Human
ccaagaauauccaugaagaaa

SEQ ID NO: 428228 - RNA, 20 nt, Human
ccacagaggaucugcgccgg

SEQ ID NO: 428229 - RNA, 22 nt, Human
ccauaccuauaccugucauaca

SEQ ID NO: 428230 - RNA, 23 nt, Human
ccccgggggcgcaggcggggucu

SEQ ID NO: 428231 - RNA, 18 nt, Human
cccugguguucauccagg

SEQ ID NO: 428232 - RNA, 18 nt, Human
ccgcacccucccgcuucc

SEQ ID NO: 428233 - RNA, 18 nt, Human
ccgcccagcaaccccgag

SEQ ID NO: 428234 - RNA, 19 nt, Human
ccgccgccaucacaguucg

SEQ ID NO: 428235 - RNA, 21 nt, Human
ccgggcccaucaccgcggccg

SEQ ID NO: 428236 - RNA, 22 nt, Human
ccuguggcuuaaacuguaaagc

SEQ ID NO: 428237 - RNA, 19 nt, Human
cgacuucucccgcacccuc

SEQ ID NO: 428238 - RNA, 23 nt, Human
cucccgcuuccgucaccucggaa

SEQ ID NO: 428239 - RNA, 21 nt, Human
cugcugugacuagagucaugc

SEQ ID NO: 428240 - RNA, 19 nt, Human
cuguccaagccccuccugc

SEQ ID NO: 428241 - RNA, 19 nt, Human
gacacugcuauagaaaugc

SEQ ID NO: 428242 - RNA, 18 nt, Human
gcaaaauaucuuucaaga

SEQ ID NO: 428243 - RNA, 24 nt, Human
gcagagcgaacagcgacuucuccc

SEQ ID NO: 428244 - RNA, 23 nt, Human
gccuguccaagccccuccugcug

SEQ ID NO: 428245 - RNA, 21 nt, Human
ggccgccgccaucacaguucg

SEQ ID NO: 428246 - RNA, 19 nt, Human
uaaaguuuuuuuuuuuuuu

SEQ ID NO: 428247 - RNA, 23 nt, Human
uaagccaccagcagauacagcuc

SEQ ID NO: 428248 - RNA, 19 nt, Human
uacagcucagacccucuuu

SEQ ID NO: 428249 - RNA, 19 nt, Human
uaccuggcaccauaaggua

SEQ ID NO: 428250 - RNA, 25 nt, Human
uaucacaaaccagagcaacaugagg

SEQ ID NO: 428251 - RNA, 19 nt, Human
ucagaagaugacucuucau

SEQ ID NO: 428252 - RNA, 23 nt, Human
ucagauacaugaaauucaacauc

SEQ ID NO: 428253 - RNA, 24 nt, Human
uccccgggggcgcaggcggggucu

SEQ ID NO: 428254 - RNA, 23 nt, Human
ucccuagaagguucccacguacc

SEQ ID NO: 428255 - RNA, 18 nt, Human
ucucaggcagccagaguu

SEQ ID NO: 428256 - RNA, 21 nt, Human
ugacagugacauaacucuggc

SEQ ID NO: 428257 - RNA, 24 nt, Human
ugagcaagucagaaagugcaacau

SEQ ID NO: 428258 - RNA, 22 nt, Human
ugcucuguucagaagaugacuc

SEQ ID NO: 428259 - RNA, 23 nt, Human
uggggccacauaugucacaaggg

SEQ ID NO: 428260 - RNA, 23 nt, Human
uguucagauacaugaaauucaac

SEQ ID NO: 428261 - RNA, 19 nt, Human
uucacuucaugccaacaac

SEQ ID NO: 428262 - RNA, 18 nt, Human
uucccaggccaggugacu

SEQ ID NO: 428263 - RNA, 25 nt, Human
uucccaggccaggugacuuggaggc

SEQ ID NO: 428264 - RNA, 18 nt, Human
uuuuuuuuucuuucccug

SEQ ID NO: 428265 - RNA, 28 nt, Human
aaaaauaaugcagggauaaccgguaccc

SEQ ID NO: 428266 - RNA, 20 nt, Human
aaagaugccacucucauuuc

SEQ ID NO: 428267 - RNA, 20 nt, Human
aaagcguucccuggauccac

SEQ ID NO: 428268 - RNA, 26 nt, Human
aagaugccacucucauuucuggaaca

SEQ ID NO: 428269 - RNA, 21 nt, Human
acaaaggaaaaaucucccuuu

SEQ ID NO: 428270 - RNA, 25 nt, Human
acaagacagcuguuuacugagacag

SEQ ID NO: 428271 - RNA, 30 nt, Human
acacacagacaagacagcuguuuacugagg

SEQ ID NO: 428272 - RNA, 26 nt, Human
acagagcagcaaaagccaucucagaa

SEQ ID NO: 428273 - RNA, 21 nt, Human
accuguuuauaguacacugau

SEQ ID NO: 428274 - RNA, 26 nt, Human
acucucugagggugucugaggggagu

SEQ ID NO: 428275 - RNA, 25 nt, Human
agccaucucagaaucagugagacuc

SEQ ID NO: 428276 - RNA, 22 nt, Human
aucagugagacucuauggaagc

SEQ ID NO: 428277 - RNA, 22 nt, Human
auccacagugauuccauaaaga

SEQ ID NO: 428278 - RNA, 21 nt, Human
augaccuagagcuuggugguc

SEQ ID NO: 428279 - RNA, 18 nt, Human
caagacagcuguuuacug

SEQ ID NO: 428280 - RNA, 22 nt, Human
caagacagcuguuuacugagac

SEQ ID NO: 428281 - RNA, 19 nt, Human
cagagucaacugaccauuc

SEQ ID NO: 428282 - RNA, 22 nt, Human
cagggauaacuaaaaaccuguu

SEQ ID NO: 428283 - RNA, 23 nt, Human
caucucagaaucagugagacucu

SEQ ID NO: 428284 - RNA, 18 nt, Human
cccauacaaagcuuuuca

SEQ ID NO: 428285 - RNA, 21 nt, Human
ccuaugucccagcacaugugg

SEQ ID NO: 428286 - RNA, 19 nt, Human
cgaugguuuaacaaaggaa

SEQ ID NO: 428287 - RNA, 24 nt, Human
cggugaauccuuggacaaaagcgu

SEQ ID NO: 428288 - RNA, 20 nt, Human
cuacuauuuggaugcagaga

SEQ ID NO: 428289 - RNA, 18 nt, Human
cugaggggagugcugugu

SEQ ID NO: 428290 - RNA, 23 nt, Human
gacaaaagcguucccuggaucca

SEQ ID NO: 428291 - RNA, 18 nt, Human
gacuuauguuuucccuuu

SEQ ID NO: 428292 - RNA, 21 nt, Human
gagcagcaaaagccaucucag

SEQ ID NO: 428293 - RNA, 24 nt, Human
gccauguacccugaucaaacaaua

SEQ ID NO: 428294 - RNA, 18 nt, Human
guagagggagaacagagc

SEQ ID NO: 428295 - RNA, 24 nt, Human
gucauuucccaucagugugaacuc

SEQ ID NO: 428296 - RNA, 21 nt, Human
uaaaacaaauaucuguguuuc

SEQ ID NO: 428297 - RNA, 27 nt, Human
uaaaacaaauaucuguguuucuaacgc

SEQ ID NO: 428298 - RNA, 19 nt, Human
uagaaagggaugagcuaug

SEQ ID NO: 428299 - RNA, 21 nt, Human
uagaaagggaugagcuauggc

SEQ ID NO: 428300 - RNA, 21 nt, Human
ucaggguucagacuuauguuu

SEQ ID NO: 428301 - RNA, 24 nt, Human
ucucauguguaugauugggucaaa

SEQ ID NO: 428302 - RNA, 22 nt, Human
ugagacucuauggaagcagcuu

SEQ ID NO: 428303 - RNA, 21 nt, Human
uggaugcagagauggaugacc

SEQ ID NO: 428304 - RNA, 23 nt, Human
uggcuuaaggucuuccuaugucc

SEQ ID NO: 428305 - RNA, 19 nt, Human
ugucccagcacauguggag

SEQ ID NO: 428306 - RNA, 27 nt, Human
uguuccauuucuuuuuuguagguucua

SEQ ID NO: 428307 - RNA, 21 nt, Human
uucauuuggucucguauauau

SEQ ID NO: 428308 - RNA, 25 nt, Human
uucccuggauccacuacauuuguuc

SEQ ID NO: 428309 - RNA, 24 nt, Human
uugguggucccauggucauuuccc

SEQ ID NO: 428310 - RNA, 22 nt, Human
uuuguuggguuucucaccaauu

SEQ ID NO: 428311 - RNA, 18 nt, Human
aaaaaaggcacugacaga

SEQ ID NO: 428312 - RNA, 24 nt, Human
aaagugcugggauuacagguguga

SEQ ID NO: 428313 - RNA, 24 nt, Human
aagcaugugggcuggcuaaaaacg

SEQ ID NO: 428314 - RNA, 18 nt, Human
aagugcugggauuacagg

SEQ ID NO: 428315 - RNA, 19 nt, Human
aagugcugggauuacaggu

SEQ ID NO: 428316 - RNA, 26 nt, Human
aagugcugggauuacaggugugagcc

SEQ ID NO: 428317 - RNA, 18 nt, Human
acacccagccagagccaa

SEQ ID NO: 428318 - RNA, 19 nt, Human
acacccagccagagccaaa

SEQ ID NO: 428319 - RNA, 23 nt, Human
acuggucucaaacuccugaccuc

SEQ ID NO: 428320 - RNA, 22 nt, Human
agagccagagcccucaaaugac

SEQ ID NO: 428321 - RNA, 19 nt, Human
agccaccacacccagccag

SEQ ID NO: 428322 - RNA, 25 nt, Human
agccagagccaaaacaucuguucaa

SEQ ID NO: 428323 - RNA, 21 nt, Human
augacuaaaggcucucccaca

SEQ ID NO: 428324 - RNA, 24 nt, Human
caaagugcugggauuacaggugug

SEQ ID NO: 428325 - RNA, 22 nt, Human
caagugauccuccugccucagc

SEQ ID NO: 428326 - RNA, 27 nt, Human
caagugauccuccugccucagccuccc

SEQ ID NO: 428327 - RNA, 27 nt, Human
caagugauccuccugccucagccuccc

SEQ ID NO: 428328 - RNA, 20 nt, Human
cacacuggucucaaacuccu

SEQ ID NO: 428329 - RNA, 19 nt, Human
caccacacccagccagagc

SEQ ID NO: 428330 - RNA, 23 nt, Human
caccacacccagccagagccaaa

SEQ ID NO: 428331 - RNA, 19 nt, Human
cacuacacauucaugugug

SEQ ID NO: 428332 - RNA, 23 nt, Human
cagcuuccucccuccggaucccc

SEQ ID NO: 428333 - RNA, 22 nt, Human
caggguuucucucaaauauggg

SEQ ID NO: 428334 - RNA, 19 nt, Human
cauucaugugugacagggu

SEQ ID NO: 428335 - RNA, 20 nt, Human
ccaaagugcugggauuacag

SEQ ID NO: 428336 - RNA, 21 nt, Human
ccaaagugcugggauuacagg

SEQ ID NO: 428337 - RNA, 21 nt, Human
ccaaagugcugggauuacagg

SEQ ID NO: 428338 - RNA, 24 nt, Human
ccaaagugcugggauuacaggugu

SEQ ID NO: 428339 - RNA, 23 nt, Human
ccacaaagccacagagccagagc

SEQ ID NO: 428340 - RNA, 21 nt, Human
ccagacaaguacuuuaaccca

SEQ ID NO: 428341 - RNA, 23 nt, Human
ccagacaaguacuuuaacccaca

SEQ ID NO: 428342 - RNA, 24 nt, Human
ccagacaaguacuuuaacccacaa

SEQ ID NO: 428343 - RNA, 25 nt, Human
ccagccagagccaaaacaucuguuc

SEQ ID NO: 428344 - RNA, 23 nt, Human
cccauguuacuuacauguauaug

SEQ ID NO: 428345 - RNA, 23 nt, Human
ccgcgccacagagacuccaggcg

SEQ ID NO: 428346 - RNA, 21 nt, Human
ccuccggaucccaaggcaggu

SEQ ID NO: 428347 - RNA, 18 nt, Human
ccugaccucaagugaucc

SEQ ID NO: 428348 - RNA, 23 nt, Human
ccugaccucaagugauccuccug

SEQ ID NO: 428349 - RNA, 22 nt, Human
cgccacagagacuccaggcgag

SEQ ID NO: 428350 - RNA, 24 nt, Human
cggaucccaaggcagguacaggaa

SEQ ID NO: 428351 - RNA, 24 nt, Human
cucaagugauccuccugccucagc

SEQ ID NO: 428352 - RNA, 18 nt, Human
cucuuuacauuuaccaag

SEQ ID NO: 428353 - RNA, 23 nt, Human
cugccucagccucccaaagugcu

SEQ ID NO: 428354 - RNA, 24 nt, Human
cugccucagccucccaaagugcug

SEQ ID NO: 428355 - RNA, 22 nt, Human
gaccucaagugauccuccugcc

SEQ ID NO: 428356 - RNA, 24 nt, Human
gaccucaagugauccuccugccuc

SEQ ID NO: 428357 - RNA, 20 nt, Human
gagaugaggucuugcuaugu

SEQ ID NO: 428358 - RNA, 22 nt, Human
gagccaaaacaucuguucaaau

SEQ ID NO: 428359 - RNA, 18 nt, Human
gauuacaggugugagcca

SEQ ID NO: 428360 - RNA, 21 nt, Human
gauuacaggugugagccacca

SEQ ID NO: 428361 - RNA, 22 nt, Human
gauuacaggugugagccaccac

SEQ ID NO: 428362 - RNA, 21 nt, Human
gggauugaaauccagcaucuc

SEQ ID NO: 428363 - RNA, 19 nt, Human
gguuccuuuccaaaaagca

SEQ ID NO: 428364 - RNA, 24 nt, Human
gugauccuccugccucagccuccc

SEQ ID NO: 428365 - RNA, 24 nt, Human
uacaggugugagccaccacaccca

SEQ ID NO: 428366 - RNA, 20 nt, Human
uacccaggguuucucucaaa

SEQ ID NO: 428367 - RNA, 24 nt, Human
uaccucaacuagugaggcccugcu

SEQ ID NO: 428368 - RNA, 23 nt, Human
ucccaaagugcugggauuacagg

SEQ ID NO: 428369 - RNA, 18 nt, Human
ucccgggugucccagcuu

SEQ ID NO: 428370 - RNA, 27 nt, Human
uccuccugccucagccucccaaagugc

SEQ ID NO: 428371 - RNA, 21 nt, Human
uccuuuccaaaaagcauuugu

SEQ ID NO: 428372 - RNA, 23 nt, Human
ucuugcuauguuuugcacacugg

SEQ ID NO: 428373 - RNA, 20 nt, Human
ugaaaggaacuaaaaugauu

SEQ ID NO: 428374 - RNA, 21 nt, Human
ugacaaaaccuuuccuacacc

SEQ ID NO: 428375 - RNA, 18 nt, Human
ugaccucaagugauccuc

SEQ ID NO: 428376 - RNA, 20 nt, Human
ugaccucaagugauccuccu

SEQ ID NO: 428377 - RNA, 21 nt, Human
ugaccucaagugauccuccug

SEQ ID NO: 428378 - RNA, 24 nt, Human
ugaccucaagugauccuccugccu

SEQ ID NO: 428379 - RNA, 24 nt, Human
ugacuaaaggcucucccacacucu

SEQ ID NO: 428380 - RNA, 25 nt, Human
ugacucccgggugucccagcuuccu

SEQ ID NO: 428381 - RNA, 20 nt, Human
ugaggucuugcuauguuuug

SEQ ID NO: 428382 - RNA, 19 nt, Human
ugaugacaaaaccuuuccu

SEQ ID NO: 428383 - RNA, 24 nt, Human
ugccucagccucccaaagugcugg

SEQ ID NO: 428384 - RNA, 24 nt, Human
ugcugggauuacaggugugagcca

SEQ ID NO: 428385 - RNA, 18 nt, Human
ugggauuacaggugugag

SEQ ID NO: 428386 - RNA, 19 nt, Human
ugggauuacaggugugagc

SEQ ID NO: 428387 - RNA, 22 nt, Human
ugggauuacaggugugagccac

SEQ ID NO: 428388 - RNA, 23 nt, Human
ugggauuacaggugugagccacc

SEQ ID NO: 428389 - RNA, 24 nt, Human
ugggauuacaggugugagccacca

SEQ ID NO: 428390 - RNA, 26 nt, Human
ugggauugaaauccagcaucuccugu

SEQ ID NO: 428391 - RNA, 20 nt, Human
uguauauggcuucucucuag

SEQ ID NO: 428392 - RNA, 22 nt, Human
ugucccagcuuccucccuccgg

SEQ ID NO: 428393 - RNA, 19 nt, Human
uuuaccaagguucucucca

SEQ ID NO: 428394 - RNA, 23 nt, Human
uuuauaguguuuugauccagggu

SEQ ID NO: 428395 - RNA, 24 nt, Human
aaaaaggcgcuuugcauuaaaacc

SEQ ID NO: 428396 - RNA, 22 nt, Human
aaacccuaacccacaacuuuug

SEQ ID NO: 428397 - RNA, 24 nt, Human
aaagugcugggauuacagguguga

SEQ ID NO: 428398 - RNA, 19 nt, Human
aaauaagccuuagaccaga

SEQ ID NO: 428399 - RNA, 24 nt, Human
aaauaagccuuagaccagaaugug

SEQ ID NO: 428400 - RNA, 24 nt, Human
aaauacaccccugggucauuaagc

SEQ ID NO: 428401 - RNA, 22 nt, Human
aaauguguaagguucucuccag

SEQ ID NO: 428402 - RNA, 25 nt, Human
aagcgauccucccuccuuggccucu

SEQ ID NO: 428403 - RNA, 26 nt, Human
aagcugaaaaaagguuuaauuucuaa

SEQ ID NO: 428404 - RNA, 22 nt, Human
aaggcgcuuugcauuaaaacca

SEQ ID NO: 428405 - RNA, 18 nt, Human
aagugcugggauuacagg

SEQ ID NO: 428406 - RNA, 19 nt, Human
aagugcugggauuacaggu

SEQ ID NO: 428407 - RNA, 26 nt, Human
aagugcugggauuacaggugugagcc

SEQ ID NO: 428408 - RNA, 20 nt, Human
acauguguaagguuucuuuc

SEQ ID NO: 428409 - RNA, 20 nt, Human
accuguaaucccagcuacuc

SEQ ID NO: 428410 - RNA, 18 nt, Human
agaggaaaagagcuaaga

SEQ ID NO: 428411 - RNA, 22 nt, Human
aggucuuacuauguugccuagg

SEQ ID NO: 428412 - RNA, 19 nt, Human
agguguggacuaacacacc

SEQ ID NO: 428413 - RNA, 22 nt, Human
agucaacucaaucucaagucaa

SEQ ID NO: 428414 - RNA, 24 nt, Human
agugguucauaccuguaaucccag

SEQ ID NO: 428415 - RNA, 19 nt, Human
caaagagagcucccaaguc

SEQ ID NO: 428416 - RNA, 20 nt, Human
caaagugcugggauuacagg

SEQ ID NO: 428417 - RNA, 23 nt, Human
caaagugcugggauuacaggugu

SEQ ID NO: 428418 - RNA, 24 nt, Human
caaagugcugggauuacaggugug

SEQ ID NO: 428419 - RNA, 24 nt, Human
caacauggcgacaggggcccucuc

SEQ ID NO: 428420 - RNA, 22 nt, Human
caagauaaacacuaaucagucc

SEQ ID NO: 428421 - RNA, 25 nt, Human
caagauaaacacuaaucaguccuca

SEQ ID NO: 428422 - RNA, 19 nt, Human
caccuggcuguuuuuuuuu

SEQ ID NO: 428423 - RNA, 21 nt, Human
cacuggacucagguugccuga

SEQ ID NO: 428424 - RNA, 21 nt, Human
cagcgcgccacuccaccccuu

SEQ ID NO: 428425 - RNA, 24 nt, Human
caguaugaacucucugauguugug

SEQ ID NO: 428426 - RNA, 19 nt, Human
cauaccuguaaucccagcu

SEQ ID NO: 428427 - RNA, 28 nt, Human
cauuccucucaaggcucagaauuaucuc

SEQ ID NO: 428428 - RNA, 23 nt, Human
cauuuucaacuuaagaggaaaaa

SEQ ID NO: 428429 - RNA, 21 nt, Human
cccagacagaggggagcucgc

SEQ ID NO: 428430 - RNA, 24 nt, Human
cccgcggcaaccagcgcgccacuc

SEQ ID NO: 428431 - RNA, 21 nt, Human
ccuacaauccgacagaaacug

SEQ ID NO: 428432 - RNA, 19 nt, Human
ccucccuccuuggccucuc

SEQ ID NO: 428433 - RNA, 23 nt, Human
ccugccccucucccccacccugc

SEQ ID NO: 428434 - RNA, 20 nt, Human
ccugggcuuaagcgauccuc

SEQ ID NO: 428435 - RNA, 21 nt, Human
ccuguaaucccagcuacucgg

SEQ ID NO: 428436 - RNA, 22 nt, Human
cgccuguaaucccaccuggccc

SEQ ID NO: 428437 - RNA, 24 nt, Human
cgggcgcggugcucgcgccuguaa

SEQ ID NO: 428438 - RNA, 21 nt, Human
cucccccacccugccccagac

SEQ ID NO: 428439 - RNA, 21 nt, Human
cucgcgccuguaaucccaccu

SEQ ID NO: 428440 - RNA, 23 nt, Human
cucuggugaggcuccuacaaucc

SEQ ID NO: 428441 - RNA, 21 nt, Human
cugaauuuugagcaaaggucu

SEQ ID NO: 428442 - RNA, 24 nt, Human
cugccccucucccccacccugccc

SEQ ID NO: 428443 - RNA, 24 nt, Human
cuuaaacucaagguuaagucaacu

SEQ ID NO: 428444 - RNA, 24 nt, Human
cuuggccucucaaagugcugggau

SEQ ID NO: 428445 - RNA, 23 nt, Human
cuuuaugaucuucuauagucacu

SEQ ID NO: 428446 - RNA, 22 nt, Human
cuuucaguuuccauuauccacu

SEQ ID NO: 428447 - RNA, 24 nt, Human
gaaauaugaaauuauccuccacuc

SEQ ID NO: 428448 - RNA, 18 nt, Human
gagaaacccuaacccaca

SEQ ID NO: 428449 - RNA, 20 nt, Human
gagggagggggagaaacccu

SEQ ID NO: 428450 - RNA, 18 nt, Human
gauuacaggugugagcca

SEQ ID NO: 428451 - RNA, 21 nt, Human
gauuacaggugugagccaccg

SEQ ID NO: 428452 - RNA, 22 nt, Human
gauuacaggugugagccaccgc

SEQ ID NO: 428453 - RNA, 25 nt, Human
gcccaacacaauauguuguuuuacc

SEQ ID NO: 428454 - RNA, 18 nt, Human
gccccgccugccggaugc

SEQ ID NO: 428455 - RNA, 20 nt, Human
gccgggcgcggugcucgcgc

SEQ ID NO: 428456 - RNA, 18 nt, Human
gcucgccccgccugccgg

SEQ ID NO: 428457 - RNA, 19 nt, Human
gcucgcgccuguaauccca

SEQ ID NO: 428458 - RNA, 21 nt, Human
ggaaauagaggaaaagagccg

SEQ ID NO: 428459 - RNA, 23 nt, Human
ggagggggagaaacccuaaccca

SEQ ID NO: 428460 - RNA, 23 nt, Human
ggcauagugguucauaccuguaa

SEQ ID NO: 428461 - RNA, 20 nt, Human
gggaagaggacacauaguug

SEQ ID NO: 428462 - RNA, 22 nt, Human
guaagguucucuccaguaugaa

SEQ ID NO: 428463 - RNA, 20 nt, Human
gucccugccccucuccccca

SEQ ID NO: 428464 - RNA, 19 nt, Human
gugugaguuuuacaacaug

SEQ ID NO: 428465 - RNA, 20 nt, Human
uaagcugaaaaaagguuuaa

SEQ ID NO: 428466 - RNA, 27 nt, Human
uaauugccagugcccgcggcaaccagc

SEQ ID NO: 428467 - RNA, 20 nt, Human
uacaggugugagccaccgcu

SEQ ID NO: 428468 - RNA, 22 nt, Human
uacaggugugagccaccgcucc

SEQ ID NO: 428469 - RNA, 20 nt, Human
uaccgaggucccugccccuc

SEQ ID NO: 428470 - RNA, 19 nt, Human
uaccugcucaaaaaaaggc

SEQ ID NO: 428471 - RNA, 24 nt, Human
uaccuguaaucccagcuacucggg

SEQ ID NO: 428472 - RNA, 24 nt, Human
uacuauguugccuaggcugauuuc

SEQ ID NO: 428473 - RNA, 21 nt, Human
uacuuuaucacuacauaagaa

SEQ ID NO: 428474 - RNA, 22 nt, Human
uagagaugaggucuuacuaugu

SEQ ID NO: 428475 - RNA, 25 nt, Human
uagaggaaaagagcuaagaguuuga

SEQ ID NO: 428476 - RNA, 24 nt, Human
uaguagagaugaggucuuacuaug

SEQ ID NO: 428477 - RNA, 24 nt, Human
uagugguucauaccuguaauccca

SEQ ID NO: 428478 - RNA, 18 nt, Human
uauguugccuaggcugau

SEQ ID NO: 428479 - RNA, 24 nt, Human
uauguugccuaggcugauuucgaa

SEQ ID NO: 428480 - RNA, 21 nt, Human
uauuaauaaauaagccuuaga

SEQ ID NO: 428481 - RNA, 22 nt, Human
ucaaaaauacaccccuggguca

SEQ ID NO: 428482 - RNA, 20 nt, Human
ucaaagugcugggauuacag

SEQ ID NO: 428483 - RNA, 21 nt, Human
ucaaagugcugggauuacagg

SEQ ID NO: 428484 - RNA, 24 nt, Human
ucaaagugcugggauuacaggugu

SEQ ID NO: 428485 - RNA, 21 nt, Human
ucaaucucaagucaaugccua

SEQ ID NO: 428486 - RNA, 19 nt, Human
ucagcaguaaauaauaaaa

SEQ ID NO: 428487 - RNA, 19 nt, Human
ucauaccuguaaucccagc

SEQ ID NO: 428488 - RNA, 21 nt, Human
uccacucaaacaacccaggac

SEQ ID NO: 428489 - RNA, 22 nt, Human
ucccccacccugccccagacag

SEQ ID NO: 428490 - RNA, 23 nt, Human
ucccugccccucucccccacccu

SEQ ID NO: 428491 - RNA, 20 nt, Human
uccuacaauccgacagaaac

SEQ ID NO: 428492 - RNA, 21 nt, Human
uccugggcuuaagcgauccuc

SEQ ID NO: 428493 - RNA, 21 nt, Human
ucuaaaaaaaaaaaacaaagu

SEQ ID NO: 428494 - RNA, 23 nt, Human
ucucaaagugcugggauuacagg

SEQ ID NO: 428495 - RNA, 24 nt, Human
ucucaaagugcugggauuacaggu

SEQ ID NO: 428496 - RNA, 20 nt, Human
ucucuggggcuacuuagucu

SEQ ID NO: 428497 - RNA, 19 nt, Human
ucuuacuauguugccuagg

SEQ ID NO: 428498 - RNA, 22 nt, Human
ucuuacuauguugccuaggcug

SEQ ID NO: 428499 - RNA, 23 nt, Human
ucuuacuauguugccuaggcuga

SEQ ID NO: 428500 - RNA, 21 nt, Human
ugacucuacuugguaauggag

SEQ ID NO: 428501 - RNA, 19 nt, Human
ugagggagggggagaaacc

SEQ ID NO: 428502 - RNA, 24 nt, Human
ugaggucuuacuauguugccuagg

SEQ ID NO: 428503 - RNA, 21 nt, Human
ugccagugcccgcggcaacca

SEQ ID NO: 428504 - RNA, 24 nt, Human
ugccuaggcugauuucgaauuccu

SEQ ID NO: 428505 - RNA, 23 nt, Human
ugcucgcgccuguaaucccaccu

SEQ ID NO: 428506 - RNA, 24 nt, Human
ugcugggauuacaggugugagcca

SEQ ID NO: 428507 - RNA, 19 nt, Human
ugggaccacagguguggac

SEQ ID NO: 428508 - RNA, 21 nt, Human
ugggaccacagguguggacua

SEQ ID NO: 428509 - RNA, 18 nt, Human
ugggauuacaggugugag

SEQ ID NO: 428510 - RNA, 19 nt, Human
ugggauuacaggugugagc

SEQ ID NO: 428511 - RNA, 21 nt, Human
ugggauuacaggugugagcca

SEQ ID NO: 428512 - RNA, 22 nt, Human
ugggauuacaggugugagccac

SEQ ID NO: 428513 - RNA, 23 nt, Human
ugggauuacaggugugagccacc

SEQ ID NO: 428514 - RNA, 24 nt, Human
ugggauuacaggugugagccaccg

SEQ ID NO: 428515 - RNA, 21 nt, Human
ugguucauaccuguaauccca

SEQ ID NO: 428516 - RNA, 18 nt, Human
uguaagguucucuccagu

SEQ ID NO: 428517 - RNA, 19 nt, Human
uguaagguuucuuuccagu

SEQ ID NO: 428518 - RNA, 24 nt, Human
ugugaugggaaauagaggaaaaga

SEQ ID NO: 428519 - RNA, 21 nt, Human
uguuuuaccuucgauuguuuc

SEQ ID NO: 428520 - RNA, 21 nt, Human
uuaacuuaggggccgggcgcg

SEQ ID NO: 428521 - RNA, 21 nt, Human
uuacaagggcugaauuuugag

SEQ ID NO: 428522 - RNA, 18 nt, Human
uuagaccagaaugugaug

SEQ ID NO: 428523 - RNA, 18 nt, Human
uuaguagagaugaggucu

SEQ ID NO: 428524 - RNA, 24 nt, Human
uuaguagagaugaggucuuacuau

SEQ ID NO: 428525 - RNA, 26 nt, Human
uucaagauaaacacuaaucaguccuc

SEQ ID NO: 428526 - RNA, 20 nt, Human
uucaaggaagguuacuuuau

SEQ ID NO: 428527 - RNA, 21 nt, Human
uuccaguaugaauugccuuau

SEQ ID NO: 428528 - RNA, 20 nt, Human
uuccaugaaauaugaaauua

SEQ ID NO: 428529 - RNA, 23 nt, Human
uuccugggcuuaagcgauccucc

SEQ ID NO: 428530 - RNA, 24 nt, Human
uucuaaaaaaaaaaaacaaaguua

SEQ ID NO: 428531 - RNA, 19 nt, Human
uugagcaaaggucuuucca

SEQ ID NO: 428532 - RNA, 23 nt, Human
uugcauuaaaaccauuuucaacu

SEQ ID NO: 428533 - RNA, 19 nt, Human
uuuuuaguagagaugaggu

SEQ ID NO: 428534 - RNA, 24 nt, Human
uuuuuguuuaaagaaauaaaaauc

SEQ ID NO: 428535 - RNA, 21 nt, Human
uuuuuuuuauuuuuaguagag

SEQ ID NO: 428536 - RNA, 24 nt, Human
uuuuuuuuauuuuuaguagagaug

SEQ ID NO: 428537 - RNA, 19 nt, Human
aaagcucugccacauucuu

SEQ ID NO: 428538 - RNA, 20 nt, Human
acaaagaccccgccgccucc

SEQ ID NO: 428539 - RNA, 22 nt, Human
acucuauggccacauccauaaa

SEQ ID NO: 428540 - RNA, 18 nt, Human
agacagguaaucaggucu

SEQ ID NO: 428541 - RNA, 25 nt, Human
agacagguaaucaggucuggccaag

SEQ ID NO: 428542 - RNA, 19 nt, Human
agagaacucuauggccaca

SEQ ID NO: 428543 - RNA, 19 nt, Human
auuugugggguuucucccc

SEQ ID NO: 428544 - RNA, 19 nt, Human
caaagaccccgccgccucc

SEQ ID NO: 428545 - RNA, 20 nt, Human
caauaaccagaucacagcgc

SEQ ID NO: 428546 - RNA, 24 nt, Human
cacagcgccacagaggcugggccu

SEQ ID NO: 428547 - RNA, 21 nt, Human
cacauucuucacauuuguaga

SEQ ID NO: 428548 - RNA, 20 nt, Human
caguaugaauuuucuuaugu

SEQ ID NO: 428549 - RNA, 21 nt, Human
cccgcugcagcgagacaaaga

SEQ ID NO: 428550 - RNA, 22 nt, Human
ccgcugcagcgagacaaagacc

SEQ ID NO: 428551 - RNA, 19 nt, Human
ccgggggauccuggcgucu

SEQ ID NO: 428552 - RNA, 23 nt, Human
ccugcagcacccgcugcagcgag

SEQ ID NO: 428553 - RNA, 19 nt, Human
cgccacagaggcugggccu

SEQ ID NO: 428554 - RNA, 19 nt, Human
cuaggcuuccgggggaucc

SEQ ID NO: 428555 - RNA, 18 nt, Human
cucccggaagacgucaug

SEQ ID NO: 428556 - RNA, 22 nt, Human
cucuauggccacauccauaaau

SEQ ID NO: 428557 - RNA, 20 nt, Human
gcagaaaggguugaagacuu

SEQ ID NO: 428558 - RNA, 21 nt, Human
gcugcagcgagacaaagaccc

SEQ ID NO: 428559 - RNA, 20 nt, Human
gcugggccucuaggaguaag

SEQ ID NO: 428560 - RNA, 23 nt, Human
guagaguuucucuccaguuugaa

SEQ ID NO: 428561 - RNA, 25 nt, Human
uaagaggacgcagaaaagugaaggc

SEQ ID NO: 428562 - RNA, 21 nt, Human
uacuaaggauugaguaucggu

SEQ ID NO: 428563 - RNA, 19 nt, Human
uaggaguaagaggacgcag

SEQ ID NO: 428564 - RNA, 21 nt, Human
uaucuuauguguaauaagagu

SEQ ID NO: 428565 - RNA, 21 nt, Human
uaucuuauguguaauaagggu

SEQ ID NO: 428566 - RNA, 25 nt, Human
ucaguggucccauuucuaggcuucc

SEQ ID NO: 428567 - RNA, 20 nt, Human
ucccaauaaccagaucacag

SEQ ID NO: 428568 - RNA, 21 nt, Human
ugaauuuucuuaugucucaua

SEQ ID NO: 428569 - RNA, 20 nt, Human
ugcagaaaggguugaagacu

SEQ ID NO: 428570 - RNA, 22 nt, Human
ugccacauuccucacauuugua

SEQ ID NO: 428571 - RNA, 22 nt, Human
ugccacauucuucacauuugua

SEQ ID NO: 428572 - RNA, 22 nt, Human
ugccacauucuucacauuugua

SEQ ID NO: 428573 - RNA, 22 nt, Human
ugccacauucuucacauuugua

SEQ ID NO: 428574 - RNA, 22 nt, Human
ugccacauucuucacauuugua

SEQ ID NO: 428575 - RNA, 21 nt, Human
uggccaagaaaaccagguuuc

SEQ ID NO: 428576 - RNA, 22 nt, Human
uggccaagaaaaccagguuucu

SEQ ID NO: 428577 - RNA, 20 nt, Human
uggcuaaaaccuuugccaca

SEQ ID NO: 428578 - RNA, 23 nt, Human
uguagaguuucucuccaguuuga

SEQ ID NO: 428579 - RNA, 19 nt, Human
uguaggcuuucucucuagu

SEQ ID NO: 428580 - RNA, 23 nt, Human
uguaggguuucucucuaguauga

SEQ ID NO: 428581 - RNA, 23 nt, Human
uguaggguuucucuuuacuauga

SEQ ID NO: 428582 - RNA, 23 nt, Human
uguaggguuuuucuccacuguga

SEQ ID NO: 428583 - RNA, 23 nt, Human
uguaggguuuuucuccaguauga

SEQ ID NO: 428584 - RNA, 19 nt, Human
ugucucauaaggugugagg

SEQ ID NO: 428585 - RNA, 23 nt, Human
ugugggguuucucuccaguauga

SEQ ID NO: 428586 - RNA, 23 nt, Human
ugugggguuucucuccgcuauga

SEQ ID NO: 428587 - RNA, 22 nt, Human
uuaugugcagaaaggguugaag

SEQ ID NO: 428588 - RNA, 20 nt, Human
uucacauuugugguguuucc

SEQ ID NO: 428589 - RNA, 30 nt, Human
uucacauuugugguguuucucuccugcauu

SEQ ID NO: 428590 - RNA, 18 nt, Human
uucauauuugugggguuu

SEQ ID NO: 428591 - RNA, 20 nt, Human
uuccagggcucuuuuccuug

SEQ ID NO: 428592 - RNA, 23 nt, Human
uuccagggcucuuuuccuuguuc

SEQ ID NO: 428593 - RNA, 19 nt, Human
uugaaaacugguuaaaggc

SEQ ID NO: 428594 - RNA, 26 nt, Human
uuguaggcuuucucucuaguguaaau

SEQ ID NO: 428595 - RNA, 19 nt, Human
uuuguaagguuucucucca

SEQ ID NO: 428596 - RNA, 19 nt, Human
uuuguagaguuucucucca

SEQ ID NO: 428597 - RNA, 19 nt, Human
uuugugggguuucucccca

SEQ ID NO: 428598 - RNA, 19 nt, Human
uuugugggguuucucucca

SEQ ID NO: 428599 - RNA, 24 nt, Human
aaagugcugggacuauaggcauga

SEQ ID NO: 428600 - RNA, 18 nt, Human
aaggcugugugaaggcuu

SEQ ID NO: 428601 - RNA, 19 nt, Human
aagugcugggacuauaggc

SEQ ID NO: 428602 - RNA, 19 nt, Human
aaugcaguggcgugaucuc

SEQ ID NO: 428603 - RNA, 21 nt, Human
aaugcaguggcgugaucucag

SEQ ID NO: 428604 - RNA, 18 nt, Human
accaugccugguucauuu

SEQ ID NO: 428605 - RNA, 24 nt, Human
accauguugaccacgcuggucucg

SEQ ID NO: 428606 - RNA, 24 nt, Human
acugcaaccucugucuccagguuc

SEQ ID NO: 428607 - RNA, 18 nt, Human
agagccaccuucggccuu

SEQ ID NO: 428608 - RNA, 21 nt, Human
agagccaccuucggccuucag

SEQ ID NO: 428609 - RNA, 18 nt, Human
agccuccugaguagcugg

SEQ ID NO: 428610 - RNA, 21 nt, Human
agguucaagugauucuccugc

SEQ ID NO: 428611 - RNA, 22 nt, Human
agguucaagugauucuccugcc

SEQ ID NO: 428612 - RNA, 23 nt, Human
agguucaagugauucuccugccu

SEQ ID NO: 428613 - RNA, 22 nt, Human
aguagagaugggguuacaccau

SEQ ID NO: 428614 - RNA, 21 nt, Human
aguagcugggauuagaggcau

SEQ ID NO: 428615 - RNA, 23 nt, Human
aguagcugggauuagaggcaugc

SEQ ID NO: 428616 - RNA, 24 nt, Human
aguggcgugaucucagcucacugc

SEQ ID NO: 428617 - RNA, 18 nt, Human
augggguuacaccauguu

SEQ ID NO: 428618 - RNA, 19 nt, Human
augggguuacaccauguug

SEQ ID NO: 428619 - RNA, 24 nt, Human
auuuuuugguaauuuuuaguagag

SEQ ID NO: 428620 - RNA, 22 nt, Human
caaaaaacaaaaaacaaaacag

SEQ ID NO: 428621 - RNA, 23 nt, Human
caaaaaacaaaaaacaaaacaga

SEQ ID NO: 428622 - RNA, 24 nt, Human
caaaagaaacuggaacaaucaagg

SEQ ID NO: 428623 - RNA, 24 nt, Human
caaagugcugggacuauaggcaug

SEQ ID NO: 428624 - RNA, 25 nt, Human
caaaugucuuacauuuauagacuuu

SEQ ID NO: 428625 - RNA, 21 nt, Human
caacaaaagaacuaggaugaa

SEQ ID NO: 428626 - RNA, 24 nt, Human
caacaacaaaagaacuaggaugaa

SEQ ID NO: 428627 - RNA, 20 nt, Human
caagugauucuccugccuua

SEQ ID NO: 428628 - RNA, 22 nt, Human
caagugauucuccugccuuagc

SEQ ID NO: 428629 - RNA, 25 nt, Human
cacacucuagaggacaguuggaaga

SEQ ID NO: 428630 - RNA, 21 nt, Human
cacauucuuaauauuuauagg

SEQ ID NO: 428631 - RNA, 21 nt, Human
caccauguugaccacgcuggu

SEQ ID NO: 428632 - RNA, 24 nt, Human
caccauguugaccacgcuggucuc

SEQ ID NO: 428633 - RNA, 18 nt, Human
cacugcaaccucugucuc

SEQ ID NO: 428634 - RNA, 21 nt, Human
caucaacaacaacaaaagaac

SEQ ID NO: 428635 - RNA, 24 nt, Human
cauucugucgcacaggcuggaaug

SEQ ID NO: 428636 - RNA, 24 nt, Human
ccaaagugcugggacuauaggcau

SEQ ID NO: 428637 - RNA, 19 nt, Human
ccagguucaagugauucuc

SEQ ID NO: 428638 - RNA, 22 nt, Human
ccagguucaagugauucuccug

SEQ ID NO: 428639 - RNA, 24 nt, Human
cccaaagugcugggacuauaggca

SEQ ID NO: 428640 - RNA, 19 nt, Human
ccugaguagcugggauuag

SEQ ID NO: 428641 - RNA, 23 nt, Human
ccugccuuagccuccugaguagc

SEQ ID NO: 428642 - RNA, 24 nt, Human
cgccuugcaccuuggccucccaaa

SEQ ID NO: 428643 - RNA, 18 nt, Human
cucaaaugaucugcccgc

SEQ ID NO: 428644 - RNA, 24 nt, Human
cucacugcaaccucugucuccagg

SEQ ID NO: 428645 - RNA, 18 nt, Human
cuccagguucaagugauu

SEQ ID NO: 428646 - RNA, 22 nt, Human
cuccagguucaagugauucucc

SEQ ID NO: 428647 - RNA, 24 nt, Human
cuccagguucaagugauucuccug

SEQ ID NO: 428648 - RNA, 21 nt, Human
cugaccucaaaugaucugccc

SEQ ID NO: 428649 - RNA, 23 nt, Human
cugcaaccucugucuccagguuc

SEQ ID NO: 428650 - RNA, 18 nt, Human
cugcagcacgaguccugu

SEQ ID NO: 428651 - RNA, 23 nt, Human
cugccuuagccuccugaguagcu

SEQ ID NO: 428652 - RNA, 24 nt, Human
cuggaaugcaguggcgugaucuca

SEQ ID NO: 428653 - RNA, 24 nt, Human
cuuagccuccugaguagcugggau

SEQ ID NO: 428654 - RNA, 20 nt, Human
gacaguuggaagauuuuccc

SEQ ID NO: 428655 - RNA, 23 nt, Human
gaccucaaaugaucugcccgccu

SEQ ID NO: 428656 - RNA, 18 nt, Human
gacuauaggcaugagcca

SEQ ID NO: 428657 - RNA, 19 nt, Human
gcuggaaugcaguggcgug

SEQ ID NO: 428658 - RNA, 22 nt, Human
ggcuggaaugcaguggcgugau

SEQ ID NO: 428659 - RNA, 19 nt, Human
ggucucgaauuucugaccu

SEQ ID NO: 428660 - RNA, 23 nt, Human
guagagaugggguuacaccaugu

SEQ ID NO: 428661 - RNA, 20 nt, Human
guguauucagaaggagcugg

SEQ ID NO: 428662 - RNA, 24 nt, Human
uacauuuauagacuuucaccccac

SEQ ID NO: 428663 - RNA, 22 nt, Human
uagagaugggguuacaccaugu

SEQ ID NO: 428664 - RNA, 20 nt, Human
uagccuccugaguagcuggg

SEQ ID NO: 428665 - RNA, 24 nt, Human
uaguagagaugggguuacaccaug

SEQ ID NO: 428666 - RNA, 19 nt, Human
ucaagugauucuccugccu

SEQ ID NO: 428667 - RNA, 19 nt, Human
ucacugcaaccucugucuc

SEQ ID NO: 428668 - RNA, 23 nt, Human
ucacugcaaccucugucuccagg

SEQ ID NO: 428669 - RNA, 24 nt, Human
ucagaaggagcuggaacaaccgaa

SEQ ID NO: 428670 - RNA, 19 nt, Human
ucauauauucacacucuag

SEQ ID NO: 428671 - RNA, 23 nt, Human
uccagguucaagugauucuccuc

SEQ ID NO: 428672 - RNA, 24 nt, Human
ucccaaagugcugggacuauaggc

SEQ ID NO: 428673 - RNA, 24 nt, Human
uccugaguagcugggauuagaggc

SEQ ID NO: 428674 - RNA, 24 nt, Human
ucucauucugucgcacaggcugga

SEQ ID NO: 428675 - RNA, 22 nt, Human
ucuccagguucaagugauucuc

SEQ ID NO: 428676 - RNA, 24 nt, Human
ucuccugccuuagccuccugagua

SEQ ID NO: 428677 - RNA, 22 nt, Human
ugaaaugaauuaggucaacuga

SEQ ID NO: 428678 - RNA, 24 nt, Human
ugaccacgcuggucucgaauuucu

SEQ ID NO: 428679 - RNA, 18 nt, Human
ugaccucaaaugaucugc

SEQ ID NO: 428680 - RNA, 20 nt, Human
ugauucuccugccuuagccu

SEQ ID NO: 428681 - RNA, 22 nt, Human
ugcaguggcgugaucucagcuc

SEQ ID NO: 428682 - RNA, 21 nt, Human
ugccugguucauuuuuuggua

SEQ ID NO: 428683 - RNA, 20 nt, Human
ugccuuagccuccugaguaa

SEQ ID NO: 428684 - RNA, 24 nt, Human
ugccuuagccuccugaguagcugg

SEQ ID NO: 428685 - RNA, 19 nt, Human
uggaagauuuucccacuuu

SEQ ID NO: 428686 - RNA, 19 nt, Human
uggaaugcaguggcgugau

SEQ ID NO: 428687 - RNA, 19 nt, Human
uggaaugcaguggcgugau

SEQ ID NO: 428688 - RNA, 24 nt, Human
uggaaugcaguggcgugaucucag

SEQ ID NO: 428689 - RNA, 24 nt, Human
uggcgugaucucagcucacugcaa

SEQ ID NO: 428690 - RNA, 18 nt, Human
ugggacuauaggcaugag

SEQ ID NO: 428691 - RNA, 21 nt, Human
ugggacuauaggcaugagcca

SEQ ID NO: 428692 - RNA, 23 nt, Human
ugggacuauaggcaugagccaac

SEQ ID NO: 428693 - RNA, 24 nt, Human
ugggacuauaggcaugagccaaca

SEQ ID NO: 428694 - RNA, 24 nt, Human
ugggauuagaggcaugcacuacca

SEQ ID NO: 428695 - RNA, 18 nt, Human
ugggguuacaccauguug

SEQ ID NO: 428696 - RNA, 21 nt, Human
uggucucgaauuucugaccuc

SEQ ID NO: 428697 - RNA, 27 nt, Human
ugugaaggcuuucccaaaugucuuaca

SEQ ID NO: 428698 - RNA, 22 nt, Human
uguuuguauucacacagcuucu

SEQ ID NO: 428699 - RNA, 22 nt, Human
uuaguagagaugggguuacacc

SEQ ID NO: 428700 - RNA, 24 nt, Human
uuaguagagaugggguuacaccau

SEQ ID NO: 428701 - RNA, 23 nt, Human
uucaagugauucuccugccuuag

SEQ ID NO: 428702 - RNA, 24 nt, Human
uucaagugauucuccugccuuagc

SEQ ID NO: 428703 - RNA, 25 nt, Human
uugagacagugucucauucugucgc

SEQ ID NO: 428704 - RNA, 18 nt, Human
uuggccucccaaagugcu

SEQ ID NO: 428705 - RNA, 19 nt, Human
uugguaauuuuuaguagag

SEQ ID NO: 428706 - RNA, 19 nt, Human
uuuauaggguuucucucca

SEQ ID NO: 428707 - RNA, 26 nt, Human
uuucugaccucaaaugaucugcccgc

SEQ ID NO: 428708 - RNA, 24 nt, Human
uuuugguaauuuuuaguagagaug

SEQ ID NO: 428709 - RNA, 22 nt, Human
uuuuuaguagagaugggguuac

SEQ ID NO: 428710 - RNA, 30 nt, Human
aaaaaacaaaaaggaaucccccuucccucc

SEQ ID NO: 428711 - RNA, 23 nt, Human
aaaacaaaaaggaaucccccuuc

SEQ ID NO: 428712 - RNA, 21 nt, Human
aaugguaguuuucccacagug

SEQ ID NO: 428713 - RNA, 24 nt, Human
agguugcaaauauugcagaaaguc

SEQ ID NO: 428714 - RNA, 21 nt, Human
aucacuguguuuguaucacuu

SEQ ID NO: 428715 - RNA, 25 nt, Human
caaagugcaucaucuuuguaaagcu

SEQ ID NO: 428716 - RNA, 19 nt, Human
cacacguaaaguaagggac

SEQ ID NO: 428717 - RNA, 24 nt, Human
cacaggccagacgcucgcgccgcc

SEQ ID NO: 428718 - RNA, 23 nt, Human
cagaaggaugcguuuccguggug

SEQ ID NO: 428719 - RNA, 20 nt, Human
ccccagggccccuccgcggg

SEQ ID NO: 428720 - RNA, 24 nt, Human
ccccuccgcgggcgucgcaggaau

SEQ ID NO: 428721 - RNA, 21 nt, Human
ccguggugcuuuccgccaggu

SEQ ID NO: 428722 - RNA, 23 nt, Human
ccuacagccaacacaggccagac

SEQ ID NO: 428723 - RNA, 19 nt, Human
cuccggaccgagucaccgc

SEQ ID NO: 428724 - RNA, 18 nt, Human
gaaggaugcguuuccgug

SEQ ID NO: 428725 - RNA, 22 nt, Human
gaagggaaggaggagaucagaa

SEQ ID NO: 428726 - RNA, 24 nt, Human
gaaguaaggcauuauacuucuuuu

SEQ ID NO: 428727 - RNA, 21 nt, Human
gccgccccccagggccccucc

SEQ ID NO: 428728 - RNA, 20 nt, Human
gcggggcuaaucucuggcuu

SEQ ID NO: 428729 - RNA, 20 nt, Human
ggccagacgcucgcgccgcc

SEQ ID NO: 428730 - RNA, 22 nt, Human
ggccagacgcucgcgccgcccc

SEQ ID NO: 428731 - RNA, 21 nt, Human
gucaucacuuucacauaaggc

SEQ ID NO: 428732 - RNA, 24 nt, Human
gucuucagaagccucgccgaccuu

SEQ ID NO: 428733 - RNA, 19 nt, Human
uaaagcucaucccuugucc

SEQ ID NO: 428734 - RNA, 21 nt, Human
uauugcaaaaaaauaaaagag

SEQ ID NO: 428735 - RNA, 21 nt, Human
ucacuuaaaaaacaaaaagga

SEQ ID NO: 428736 - RNA, 18 nt, Human
uccaggguggugaauaaa

SEQ ID NO: 428737 - RNA, 20 nt, Human
ucccccuucccucaaaauag

SEQ ID NO: 428738 - RNA, 24 nt, Human
ucccccuucccucaaaauagaacc

SEQ ID NO: 428739 - RNA, 18 nt, Human
ucccucaaaauagaaccg

SEQ ID NO: 428740 - RNA, 22 nt, Human
uccuaccaaaugaagucuucuc

SEQ ID NO: 428741 - RNA, 19 nt, Human
ucuccuacaagaguauuaa

SEQ ID NO: 428742 - RNA, 23 nt, Human
uuaauggcuuuuccacauauucc

SEQ ID NO: 428743 - RNA, 23 nt, Human
uuccguggugcuuuccgccaggu

SEQ ID NO: 428744 - RNA, 18 nt, Human
uugcaaaaaaauaaaaga

SEQ ID NO: 428745 - RNA, 19 nt, Human
uugcagaaagucacucuac

SEQ ID NO: 428746 - RNA, 20 nt, Human
uuggauauguauucuuuccu

SEQ ID NO: 428747 - RNA, 24 nt, Human
uuuucugaauucacuuaaaaaaca

SEQ ID NO: 428748 - RNA, 23 nt, Human
aaagacugaggaagauuuaaaga

SEQ ID NO: 428749 - RNA, 19 nt, Human
aagcauuuuugcuccagca

SEQ ID NO: 428750 - RNA, 21 nt, Human
aagccccuaacccgcggucug

SEQ ID NO: 428751 - RNA, 22 nt, Human
aagccccuaacccgcggucugc

SEQ ID NO: 428752 - RNA, 19 nt, Human
aaggcuuugcacacgguuc

SEQ ID NO: 428753 - RNA, 19 nt, Human
aaggcuuugcacauuuuuc

SEQ ID NO: 428754 - RNA, 22 nt, Human
aauagauugagugugguugcaa

SEQ ID NO: 428755 - RNA, 24 nt, Human
agaauacucuucuucacuuuaaag

SEQ ID NO: 428756 - RNA, 18 nt, Human
agccccuaacccgcgguc

SEQ ID NO: 428757 - RNA, 21 nt, Human
aggaagauuuaaagacugcca

SEQ ID NO: 428758 - RNA, 21 nt, Human
agguuugagaaugagguaaag

SEQ ID NO: 428759 - RNA, 22 nt, Human
auggcuuaaagguuuugucaca

SEQ ID NO: 428760 - RNA, 18 nt, Human
auuuguaagacuuuccuc

SEQ ID NO: 428761 - RNA, 21 nt, Human
auuuguagcauuuuuuucccc

SEQ ID NO: 428762 - RNA, 20 nt, Human
cacaacugagaacgcagaga

SEQ ID NO: 428763 - RNA, 20 nt, Human
cacaggcuuugcauauucuu

SEQ ID NO: 428764 - RNA, 24 nt, Human
cacaguaaggguugagaaccuauu

SEQ ID NO: 428765 - RNA, 21 nt, Human
caccaaggccucccacaacug

SEQ ID NO: 428766 - RNA, 21 nt, Human
cacuucuccacguuugcaguu

SEQ ID NO: 428767 - RNA, 19 nt, Human
cagagagaugaagccccua

SEQ ID NO: 428768 - RNA, 18 nt, Human
caggucacagagcgacgg

SEQ ID NO: 428769 - RNA, 24 nt, Human
cagugugaauuaucuucaugauuu

SEQ ID NO: 428770 - RNA, 25 nt, Human
cauuuuuugcauuuccaggggauuu

SEQ ID NO: 428771 - RNA, 21 nt, Human
ccaauacccgcaggucacaga

SEQ ID NO: 428772 - RNA, 22 nt, Human
cccacaacugagaacgcagaga

SEQ ID NO: 428773 - RNA, 24 nt, Human
cucugccacguuuuucacauuugu

SEQ ID NO: 428774 - RNA, 23 nt, Human
cugaggcuguggccgaaucacca

SEQ ID NO: 428775 - RNA, 23 nt, Human
cuggaguauggcuuaaagguuuu

SEQ ID NO: 428776 - RNA, 21 nt, Human
cuguggccgaaucaccaaggc

SEQ ID NO: 428777 - RNA, 22 nt, Human
cuucaugauuuagaaaagacug

SEQ ID NO: 428778 - RNA, 24 nt, Human
uaaaaauccugccacauuuuuugc

SEQ ID NO: 428779 - RNA, 24 nt, Human
uaaagguuuguggauggucugaag

SEQ ID NO: 428780 - RNA, 21 nt, Human
uacacucuuuacauuugcagg

SEQ ID NO: 428781 - RNA, 21 nt, Human
uacauguguaggguuucucuc

SEQ ID NO: 428782 - RNA, 21 nt, Human
uaucuaggaugaauucuuaua

SEQ ID NO: 428783 - RNA, 23 nt, Human
uauucgggagucuuagcuaccaa

SEQ ID NO: 428784 - RNA, 20 nt, Human
ucauaaagguuuguggaugg

SEQ ID NO: 428785 - RNA, 19 nt, Human
ucauaucuucucaauguaa

SEQ ID NO: 428786 - RNA, 19 nt, Human
ucgaauauaaaggauauca

SEQ ID NO: 428787 - RNA, 19 nt, Human
ucuugugcacaguaagggu

SEQ ID NO: 428788 - RNA, 19 nt, Human
ugagguaaagaacuuugcc

SEQ ID NO: 428789 - RNA, 25 nt, Human
ugcaaaaagaugagcauugguaaaa

SEQ ID NO: 428790 - RNA, 22 nt, Human
ugcacacuucuuuacaugugua

SEQ ID NO: 428791 - RNA, 26 nt, Human
ugcacauuuuucaauauuuuuggugg

SEQ ID NO: 428792 - RNA, 20 nt, Human
ugccacguucuucacauuuc

SEQ ID NO: 428793 - RNA, 22 nt, Human
ugccacguucuucacauuucca

SEQ ID NO: 428794 - RNA, 22 nt, Human
ugccacguuuuucacauuugua

SEQ ID NO: 428795 - RNA, 24 nt, Human
uggccgaaucaccaaggccuccca

SEQ ID NO: 428796 - RNA, 21 nt, Human
uggcuuaaagguuuugucaca

SEQ ID NO: 428797 - RNA, 20 nt, Human
ugguaaagacugugccacau

SEQ ID NO: 428798 - RNA, 18 nt, Human
uggucugaaggcucugcc

SEQ ID NO: 428799 - RNA, 21 nt, Human
uguacaguuucucuccgguau

SEQ ID NO: 428800 - RNA, 18 nt, Human
uguaggguuucucucugg

SEQ ID NO: 428801 - RNA, 22 nt, Human
ugugccacauucuucgcaugug

SEQ ID NO: 428802 - RNA, 26 nt, Human
uguuuaagaagccuggaguauggcuu

SEQ ID NO: 428803 - RNA, 24 nt, Human
uguuuauucaccggugagggcugu

SEQ ID NO: 428804 - RNA, 20 nt, Human
uuccaggggauuucuucagu

SEQ ID NO: 428805 - RNA, 18 nt, Human
uucuaugguuuuauaucu

SEQ ID NO: 428806 - RNA, 22 nt, Human
uucucauuauguuuaagaagcc

SEQ ID NO: 428807 - RNA, 23 nt, Human
uucucauuauguuuaagaagccu

SEQ ID NO: 428808 - RNA, 19 nt, Human
uuugcacauuuuucaauau

SEQ ID NO: 428809 - RNA, 24 nt, Human
uuuuucaauauuuuugguggcuuc

SEQ ID NO: 428810 - RNA, 21 nt, Human
aaaauccagaucuuauagcca

SEQ ID NO: 428811 - RNA, 18 nt, Human
agaaacugagaacuugca

SEQ ID NO: 428812 - RNA, 18 nt, Human
agacaggugggcaccaga

SEQ ID NO: 428813 - RNA, 18 nt, Human
aggagacaggugggcacc

SEQ ID NO: 428814 - RNA, 21 nt, Human
agggacuuugauggagugaug

SEQ ID NO: 428815 - RNA, 23 nt, Human
caacuguuuuuagaagauucuga

SEQ ID NO: 428816 - RNA, 22 nt, Human
cacaucucagaccauacccucu

SEQ ID NO: 428817 - RNA, 21 nt, Human
cacccuuguaccccaaaagcc

SEQ ID NO: 428818 - RNA, 26 nt, Human
cacccuuguaccccaaaagccagucu

SEQ ID NO: 428819 - RNA, 20 nt, Human
cacucucucuuccucuugcc

SEQ ID NO: 428820 - RNA, 25 nt, Human
cagguuaaaaacgcaauguacagca

SEQ ID NO: 428821 - RNA, 19 nt, Human
ccacucucucuuccucuug

SEQ ID NO: 428822 - RNA, 21 nt, Human
ccagacccagagccggcggga

SEQ ID NO: 428823 - RNA, 22 nt, Human
ccagacccagagccggcgggag

SEQ ID NO: 428824 - RNA, 27 nt, Human
ccagacccagagccggcgggagcccuc

SEQ ID NO: 428825 - RNA, 25 nt, Human
ccgcggcuggaacggcccccggggc

SEQ ID NO: 428826 - RNA, 20 nt, Human
ccuaucuccagacccagagc

SEQ ID NO: 428827 - RNA, 20 nt, Human
ccucaggcuagcgcuggucc

SEQ ID NO: 428828 - RNA, 18 nt, Human
ccuccggcucagccgccu

SEQ ID NO: 428829 - RNA, 23 nt, Human
ccucuugccggcugccgggguac

SEQ ID NO: 428830 - RNA, 19 nt, Human
cgaccgccuccggcucagc

SEQ ID NO: 428831 - RNA, 18 nt, Human
cgcuggucccagucugca

SEQ ID NO: 428832 - RNA, 23 nt, Human
cugggccucagcuuuccuaucuc

SEQ ID NO: 428833 - RNA, 23 nt, Human
gaagauggaguggguaaaaucca

SEQ ID NO: 428834 - RNA, 21 nt, Human
gagccgcaucucuauggucgg

SEQ ID NO: 428835 - RNA, 18 nt, Human
gcacaucucagaccauac

SEQ ID NO: 428836 - RNA, 19 nt, Human
gccagggacuuugauggag

SEQ ID NO: 428837 - RNA, 20 nt, Human
gcgcguggucuuggacagac

SEQ ID NO: 428838 - RNA, 20 nt, Human
gcuucgcuucucugggccuc

SEQ ID NO: 428839 - RNA, 21 nt, Human
gcuucgcuucucugggccuca

SEQ ID NO: 428840 - RNA, 21 nt, Human
uagccagggacuuugauggag

SEQ ID NO: 428841 - RNA, 25 nt, Human
ucuagucacccuuguaccccaaaag

SEQ ID NO: 428842 - RNA, 24 nt, Human
ucugcacaucucagaccauacccu

SEQ ID NO: 428843 - RNA, 22 nt, Human
ugaagaaacugagaacuugcag

SEQ ID NO: 428844 - RNA, 20 nt, Human
ugagguaggagacagguggg

SEQ ID NO: 428845 - RNA, 21 nt, Human
uuaaaaacgcaauguacagca

SEQ ID NO: 428846 - RNA, 22 nt, Human
uuaaaugugaauauuagcguug

SEQ ID NO: 428847 - RNA, 23 nt, Human
uuaaaugugaauauuagcguugu

SEQ ID NO: 428848 - RNA, 22 nt, Human
uuagcguuguucuggggaaucu

SEQ ID NO: 428849 - RNA, 23 nt, Human
uucucugggccucagcuuuccua

SEQ ID NO: 428850 - RNA, 22 nt, Human
aaaaaaaaaaaaagaggcagaa

SEQ ID NO: 428851 - RNA, 25 nt, Human
aaaaacagcaaauuacacaagaccc

SEQ ID NO: 428852 - RNA, 23 nt, Human
aaaacagcaaauuacacaagacc

SEQ ID NO: 428853 - RNA, 21 nt, Human
aaaaugaacaccauuuuccac

SEQ ID NO: 428854 - RNA, 19 nt, Human
aacccgccccccaccccca

SEQ ID NO: 428855 - RNA, 20 nt, Human
aacccgccccccacccccaa

SEQ ID NO: 428856 - RNA, 18 nt, Human
aaggccacacacacagga

SEQ ID NO: 428857 - RNA, 20 nt, Human
acaagaccccccccaaaaaa

SEQ ID NO: 428858 - RNA, 24 nt, Human
acaagauaaaugaugcaaaggcca

SEQ ID NO: 428859 - RNA, 19 nt, Human
acagcagccaagaugggga

SEQ ID NO: 428860 - RNA, 24 nt, Human
acauacacacacacauaaaguuug

SEQ ID NO: 428861 - RNA, 22 nt, Human
acuccaguggcccauccaguuu

SEQ ID NO: 428862 - RNA, 22 nt, Human
agaaagaaacaauucuaacuga

SEQ ID NO: 428863 - RNA, 22 nt, Human
agcugagaccucucagggccug

SEQ ID NO: 428864 - RNA, 19 nt, Human
aggcaggacagcagccaag

SEQ ID NO: 428865 - RNA, 19 nt, Human
agguuaacccacccccacu

SEQ ID NO: 428866 - RNA, 20 nt, Human
aguggagaggcuuggcugga

SEQ ID NO: 428867 - RNA, 26 nt, Human
auccaguucaucuccaggcaccccca

SEQ ID NO: 428868 - RNA, 24 nt, Human
augcaggugccaccuccacccugc

SEQ ID NO: 428869 - RNA, 21 nt, Human
auguacauauauauauauauu

SEQ ID NO: 428870 - RNA, 20 nt, Human
auuuauaaaacccgcccccc

SEQ ID NO: 428871 - RNA, 26 nt, Human
caaaaacagcaaauuacacaagaccc

SEQ ID NO: 428872 - RNA, 25 nt, Human
caacacaccaccugccuugggaaac

SEQ ID NO: 428873 - RNA, 20 nt, Human
cacacacauaaaguuuguuu

SEQ ID NO: 428874 - RNA, 22 nt, Human
cacuuccacucuaggccccagg

SEQ ID NO: 428875 - RNA, 21 nt, Human
cacuugcuccucagaaccagg

SEQ ID NO: 428876 - RNA, 27 nt, Human
cagcaacaaaagcaguucagcuuccaa

SEQ ID NO: 428877 - RNA, 19 nt, Human
cagccaguuggaaucaugc

SEQ ID NO: 428878 - RNA, 19 nt, Human
caggaaaaaaaaaaaaaag

SEQ ID NO: 428879 - RNA, 25 nt, Human
caugugaccugcacaaagcuguacc

SEQ ID NO: 428880 - RNA, 20 nt, Human
ccaaaaacagcaaauuacac

SEQ ID NO: 428881 - RNA, 24 nt, Human
ccaaaaacagcaaauuacacaaga

SEQ ID NO: 428882 - RNA, 22 nt, Human
ccaaggugggaagagcugggga

SEQ ID NO: 428883 - RNA, 21 nt, Human
ccacacauacacacacacaua

SEQ ID NO: 428884 - RNA, 23 nt, Human
ccacacauacacacacacauaaa

SEQ ID NO: 428885 - RNA, 18 nt, Human
ccaggcacccccaaaaac

SEQ ID NO: 428886 - RNA, 23 nt, Human
ccaggcacccccaaaaacagcaa

SEQ ID NO: 428887 - RNA, 25 nt, Human
ccaguggcccauccaguucaucucc

SEQ ID NO: 428888 - RNA, 21 nt, Human
ccaguucaucuccaggcaccc

SEQ ID NO: 428889 - RNA, 23 nt, Human
cccaaaaacagcaaauuacacaa

SEQ ID NO: 428890 - RNA, 22 nt, Human
cccacuuccacucuaggcccca

SEQ ID NO: 428891 - RNA, 19 nt, Human
cccauccaguucaucucca

SEQ ID NO: 428892 - RNA, 22 nt, Human
ccccaaaaacagcaaauuacac

SEQ ID NO: 428893 - RNA, 19 nt, Human
ccccaacacaccaccugcc

SEQ ID NO: 428894 - RNA, 24 nt, Human
cccccaaaaaaaaugaacaccauu

SEQ ID NO: 428895 - RNA, 18 nt, Human
ccccccaaaaaaaaugaa

SEQ ID NO: 428896 - RNA, 24 nt, Human
ccccggugaggguaagguuggugg

SEQ ID NO: 428897 - RNA, 19 nt, Human
ccucagaaccagggauaaa

SEQ ID NO: 428898 - RNA, 22 nt, Human
cuccacccugcacuugcuccuc

SEQ ID NO: 428899 - RNA, 18 nt, Human
cuccuauaugcagccagu

SEQ ID NO: 428900 - RNA, 22 nt, Human
cucuaggccccaggugagacuc

SEQ ID NO: 428901 - RNA, 20 nt, Human
cuguacccucuuccuguucg

SEQ ID NO: 428902 - RNA, 19 nt, Human
cuuugggucugaaggggcc

SEQ ID NO: 428903 - RNA, 21 nt, Human
gaaggggcccccaacacacca

SEQ ID NO: 428904 - RNA, 21 nt, Human
gagcuuuauugagacuccagu

SEQ ID NO: 428905 - RNA, 18 nt, Human
gcaagaggaggaggugau

SEQ ID NO: 428906 - RNA, 19 nt, Human
gcacaaaguuuccacugca

SEQ ID NO: 428907 - RNA, 18 nt, Human
gccucuggcaaagucugg

SEQ ID NO: 428908 - RNA, 21 nt, Human
gcugcagugggcaugugaccu

SEQ ID NO: 428909 - RNA, 25 nt, Human
ggaaacagcgaggauggugcagagc

SEQ ID NO: 428910 - RNA, 20 nt, Human
ggccccaggugagacuccac

SEQ ID NO: 428911 - RNA, 19 nt, Human
ggcuggaagaagggagagg

SEQ ID NO: 428912 - RNA, 20 nt, Human
gggagagaaagaaacaauuc

SEQ ID NO: 428913 - RNA, 21 nt, Human
gggaguggggggacuggggag

SEQ ID NO: 428914 - RNA, 22 nt, Human
gggaguggggggacuggggagc

SEQ ID NO: 428915 - RNA, 18 nt, Human
ggggagagaaacggggag

SEQ ID NO: 428916 - RNA, 21 nt, Human
ggggagagaaagaaacaauuc

SEQ ID NO: 428917 - RNA, 24 nt, Human
uaaaacccgccccccacccccaag

SEQ ID NO: 428918 - RNA, 23 nt, Human
uaaagccuuagcccuccuccaag

SEQ ID NO: 428919 - RNA, 22 nt, Human
uaacugacuccuauaugcagcc

SEQ ID NO: 428920 - RNA, 27 nt, Human
uaagucuuccagcaacaaaagcaguuc

SEQ ID NO: 428921 - RNA, 21 nt, Human
uacacaagaccccccccaaaa

SEQ ID NO: 428922 - RNA, 23 nt, Human
uacacaagaccccccccaaaaaa

SEQ ID NO: 428923 - RNA, 18 nt, Human
uauguacauauauauaua

SEQ ID NO: 428924 - RNA, 18 nt, Human
uauguacauauauauaua

SEQ ID NO: 428925 - RNA, 20 nt, Human
uauguacauauauauauaua

SEQ ID NO: 428926 - RNA, 21 nt, Human
uauguacauauauauauauau

SEQ ID NO: 428927 - RNA, 21 nt, Human
ucagaggcaggacagcagcca

SEQ ID NO: 428928 - RNA, 22 nt, Human
ucaucuccaggcacccccaaaa

SEQ ID NO: 428929 - RNA, 20 nt, Human
uccacacauacacacacaca

SEQ ID NO: 428930 - RNA, 22 nt, Human
uccacacauacacacacacagu

SEQ ID NO: 428931 - RNA, 21 nt, Human
uccacacauacacacacacau

SEQ ID NO: 428932 - RNA, 22 nt, Human
uccacacauacacacacacaua

SEQ ID NO: 428933 - RNA, 20 nt, Human
uccggggucgggaguggggg

SEQ ID NO: 428934 - RNA, 23 nt, Human
ucucagggccugaaucuucuuuu

SEQ ID NO: 428935 - RNA, 26 nt, Human
ucucagggccugaaucuucuuuucca

SEQ ID NO: 428936 - RNA, 23 nt, Human
ucuccaggcacccccaaaaacag

SEQ ID NO: 428937 - RNA, 24 nt, Human
ucuggacauucaacaacgcggggg

SEQ ID NO: 428938 - RNA, 22 nt, Human
ugaccugcacaaagcuguaccc

SEQ ID NO: 428939 - RNA, 27 nt, Human
ugaggguaagguuggugggggugcagg

SEQ ID NO: 428940 - RNA, 18 nt, Human
ugagguuaacccaccccc

SEQ ID NO: 428941 - RNA, 23 nt, Human
ugcacaaaguuuccacugcaaga

SEQ ID NO: 428942 - RNA, 19 nt, Human
ugccuaaagcuuugggucu

SEQ ID NO: 428943 - RNA, 21 nt, Human
ugggaaacagcgaggauggug

SEQ ID NO: 428944 - RNA, 21 nt, Human
ugggaagagcuggggaaagua

SEQ ID NO: 428945 - RNA, 24 nt, Human
ugggaagagcuggggaaaguagaa

SEQ ID NO: 428946 - RNA, 18 nt, Human
ugggaucugugcuugugu

SEQ ID NO: 428947 - RNA, 19 nt, Human
uggggagagaaacggggag

SEQ ID NO: 428948 - RNA, 21 nt, Human
uggggagcguugcccuuuugu

SEQ ID NO: 428949 - RNA, 19 nt, Human
uguacauauauauauauau

SEQ ID NO: 428950 - RNA, 21 nt, Human
uuccuguggcauuuaaauuaa

SEQ ID NO: 428951 - RNA, 20 nt, Human
uuuauaaaacccgcccccca

SEQ ID NO: 428952 - RNA, 25 nt, Human
uuuccacacauacacacacacauaa

SEQ ID NO: 428953 - RNA, 19 nt, Human
aaacguuuuaaaccaaaga

SEQ ID NO: 428954 - RNA, 27 nt, Human
aacaaacuaccuccacuuaaaaaaaau

SEQ ID NO: 428955 - RNA, 27 nt, Human
aacacucugguaacagaugagguacaa

SEQ ID NO: 428956 - RNA, 28 nt, Human
aacauguacauguacauacauauaugca

SEQ ID NO: 428957 - RNA, 19 nt, Human
aauuuuaaaaauacagaaa

SEQ ID NO: 428958 - RNA, 21 nt, Human
acaggguuuuaaucauaugca

SEQ ID NO: 428959 - RNA, 21 nt, Human
acauauaugcauccauuacca

SEQ ID NO: 428960 - RNA, 19 nt, Human
acuacaaaucaagccacag

SEQ ID NO: 428961 - RNA, 20 nt, Human
agcaauaaaaaacaggccuc

SEQ ID NO: 428962 - RNA, 21 nt, Human
agggauaagguuugagaggaa

SEQ ID NO: 428963 - RNA, 22 nt, Human
auagagagcaaguccauccauu

SEQ ID NO: 428964 - RNA, 25 nt, Human
augcauaggucuuuuuuugaaaucu

SEQ ID NO: 428965 - RNA, 24 nt, Human
auguacauacauauaugcauccau

SEQ ID NO: 428966 - RNA, 26 nt, Human
auuauuuucccuucuccaaccuucag

SEQ ID NO: 428967 - RNA, 18 nt, Human
auucccauccucacuccc

SEQ ID NO: 428968 - RNA, 21 nt, Human
caagccacaguaaauauccua

SEQ ID NO: 428969 - RNA, 25 nt, Human
cagguuucucuguuggacacagggu

SEQ ID NO: 428970 - RNA, 18 nt, Human
cauauuacauagagagca

SEQ ID NO: 428971 - RNA, 20 nt, Human
cauggucuauuuuucccccu

SEQ ID NO: 428972 - RNA, 19 nt, Human
ccaaagacauuuacacuua

SEQ ID NO: 428973 - RNA, 24 nt, Human
ccaauacccaucccaccucccaca

SEQ ID NO: 428974 - RNA, 18 nt, Human
ccacaucucuuacauuua

SEQ ID NO: 428975 - RNA, 22 nt, Human
ccacuuaaaaaaaauaguucca

SEQ ID NO: 428976 - RNA, 21 nt, Human
ccauaaggaguaagcuguggu

SEQ ID NO: 428977 - RNA, 24 nt, Human
ccauuaccaauagauaguacugag

SEQ ID NO: 428978 - RNA, 19 nt, Human
cccaucccaccucccacac

SEQ ID NO: 428979 - RNA, 19 nt, Human
cccuuuaaccaauacccau

SEQ ID NO: 428980 - RNA, 19 nt, Human
ccuauaccacaauccagaa

SEQ ID NO: 428981 - RNA, 20 nt, Human
ccuauaccacaauccagaau

SEQ ID NO: 428982 - RNA, 18 nt, Human
ccucaugauuucagucca

SEQ ID NO: 428983 - RNA, 22 nt, Human
ccucccaaguccuggugccucu

SEQ ID NO: 428984 - RNA, 26 nt, Human
cuaccuccacuuaaaaaaaauaguuc

SEQ ID NO: 428985 - RNA, 21 nt, Human
cuacuacaaaucaagccacag

SEQ ID NO: 428986 - RNA, 21 nt, Human
cucagucuuuccuggagaugg

SEQ ID NO: 428987 - RNA, 22 nt, Human
cucagucuuuccuggagaugga

SEQ ID NO: 428988 - RNA, 23 nt, Human
cucauuauuuucccuucuccacu

SEQ ID NO: 428989 - RNA, 24 nt, Human
cucauuauuuucccuucuccacuc

SEQ ID NO: 428990 - RNA, 19 nt, Human
cucccaaaugcagaguaag

SEQ ID NO: 428991 - RNA, 21 nt, Human
cucuccagcaugaauuuucug

SEQ ID NO: 428992 - RNA, 22 nt, Human
cucuccaguaugaacacucugg

SEQ ID NO: 428993 - RNA, 18 nt, Human
cuggugucccuuaaguuu

SEQ ID NO: 428994 - RNA, 22 nt, Human
cuguauccuuccaauccguuuc

SEQ ID NO: 428995 - RNA, 18 nt, Human
cugugcaucaucuucuca

SEQ ID NO: 428996 - RNA, 18 nt, Human
cuguguaugaucucccaa

SEQ ID NO: 428997 - RNA, 19 nt, Human
cuucacuaguuucucucca

SEQ ID NO: 428998 - RNA, 21 nt, Human
cuucccacuucuuucuccacc

SEQ ID NO: 428999 - RNA, 19 nt, Human
cuucuugcuucaacagagg

SEQ ID NO: 429000 - RNA, 23 nt, Human
cuuucaccauuaucucugcugca

SEQ ID NO: 429001 - RNA, 18 nt, Human
gaccaugucaucuauuuu

SEQ ID NO: 429002 - RNA, 21 nt, Human
gagaagcucccaacuaagucc

SEQ ID NO: 429003 - RNA, 24 nt, Human
gaggauuuacuuuuggcugaagau

SEQ ID NO: 429004 - RNA, 19 nt, Human
ggcugaagauauuuccaca

SEQ ID NO: 429005 - RNA, 21 nt, Human
gggcaugaugaggugcaaauu

SEQ ID NO: 429006 - RNA, 21 nt, Human
ggggcaugaugaggugcaaau

SEQ ID NO: 429007 - RNA, 19 nt, Human
guggauguuuauauaaaaa

SEQ ID NO: 429008 - RNA, 24 nt, Human
uaaaugcauaggucuuuuuuugaa

SEQ ID NO: 429009 - RNA, 18 nt, Human
uaaccaauacccauccca

SEQ ID NO: 429010 - RNA, 24 nt, Human
uaaccaauacccaucccaccuccc

SEQ ID NO: 429011 - RNA, 20 nt, Human
uaagacaagauaucccuaua

SEQ ID NO: 429012 - RNA, 21 nt, Human
uaagacaagauaucccuauac

SEQ ID NO: 429013 - RNA, 20 nt, Human
uaaggcuucucuguguauga

SEQ ID NO: 429014 - RNA, 24 nt, Human
uacaaaaaauaagacaagauaucc

SEQ ID NO: 429015 - RNA, 24 nt, Human
uacaaacguuuuaaaccaaagaca

SEQ ID NO: 429016 - RNA, 24 nt, Human
uacagaaaaguacaaaaaauaaga

SEQ ID NO: 429017 - RNA, 19 nt, Human
uacauguacauacauauau

SEQ ID NO: 429018 - RNA, 23 nt, Human
uaccacaauccagaaucaaucag

SEQ ID NO: 429019 - RNA, 22 nt, Human
uacuccuuagaagcacaggguu

SEQ ID NO: 429020 - RNA, 21 nt, Human
uauuuacaacuuaauuuuucu

SEQ ID NO: 429021 - RNA, 24 nt, Human
ucacucccauuccuauuuugagaa

SEQ ID NO: 429022 - RNA, 21 nt, Human
ucaguauauucaaugcuuucu

SEQ ID NO: 429023 - RNA, 22 nt, Human
uccacagauacagcauucccau

SEQ ID NO: 429024 - RNA, 22 nt, Human
uccauccauucauccgugauaa

SEQ ID NO: 429025 - RNA, 21 nt, Human
ucccacuuuuagugaaaaugu

SEQ ID NO: 429026 - RNA, 21 nt, Human
ucccauccucacucccauucc

SEQ ID NO: 429027 - RNA, 26 nt, Human
ucccuauaccacaauccagaaucaau

SEQ ID NO: 429028 - RNA, 22 nt, Human
uccuggagauggaucaacaugc

SEQ ID NO: 429029 - RNA, 19 nt, Human
ucuaucugugcaucaucuu

SEQ ID NO: 429030 - RNA, 25 nt, Human
ucucuguguaugaucucccaaaugc

SEQ ID NO: 429031 - RNA, 20 nt, Human
ucuucuugcuucaacagagg

SEQ ID NO: 429032 - RNA, 20 nt, Human
ugaaagagaaguggauguuu

SEQ ID NO: 429033 - RNA, 19 nt, Human
ugaagucuuuugaaagaga

SEQ ID NO: 429034 - RNA, 24 nt, Human
ugaauggaagcuuucccacauuca

SEQ ID NO: 429035 - RNA, 25 nt, Human
ugccuaaacuuucaccauuaucucu

SEQ ID NO: 429036 - RNA, 24 nt, Human
uguacauacauauaugcauccauu

SEQ ID NO: 429037 - RNA, 18 nt, Human
uguacauguacauacaua

SEQ ID NO: 429038 - RNA, 25 nt, Human
uguacauguacauacauauaugcau

SEQ ID NO: 429039 - RNA, 24 nt, Human
uuaaaccaaagacauuuacacuua

SEQ ID NO: 429040 - RNA, 19 nt, Human
uucacaagguuucucucca

SEQ ID NO: 429041 - RNA, 20 nt, Human
uucagaaggauuauuucugg

SEQ ID NO: 429042 - RNA, 23 nt, Human
uucccacuucuuucuccaccaua

SEQ ID NO: 429043 - RNA, 21 nt, Human
uucccuucuccacucuucaca

SEQ ID NO: 429044 - RNA, 23 nt, Human
uugaugagugaggauuuacuuuu

SEQ ID NO: 429045 - RNA, 18 nt, Human
uuggcuacuacaaaucaa

SEQ ID NO: 429046 - RNA, 19 nt, Human
uuggcuacuacaaaucaag

SEQ ID NO: 429047 - RNA, 21 nt, Human
uuggcuacuacaaaucaagcc

SEQ ID NO: 429048 - RNA, 19 nt, Human
uuucaaggcuuucaugggg

SEQ ID NO: 429049 - RNA, 23 nt, Human
uuucucuguuggacacaggguuu

SEQ ID NO: 429050 - RNA, 22 nt, Human
uuuuguguauaguucauggucu

SEQ ID NO: 429051 - RNA, 23 nt, Human
aaaacaccaagaucugaaggcua

SEQ ID NO: 429052 - RNA, 18 nt, Human
aacacaaucacucucacc

SEQ ID NO: 429053 - RNA, 19 nt, Human
aacacaaucacucucaccc

SEQ ID NO: 429054 - RNA, 20 nt, Human
aacacaaucacucucacccc

SEQ ID NO: 429055 - RNA, 24 nt, Human
acaauggggaguaggucacccugc

SEQ ID NO: 429056 - RNA, 19 nt, Human
acccucccgccagcucccc

SEQ ID NO: 429057 - RNA, 22 nt, Human
acucaugacuucacuucccaga

SEQ ID NO: 429058 - RNA, 24 nt, Human
acuucccagagcucugcccagcug

SEQ ID NO: 429059 - RNA, 19 nt, Human
agagcucugcccagcugcc

SEQ ID NO: 429060 - RNA, 21 nt, Human
aggcaccaggggguggaaacg

SEQ ID NO: 429061 - RNA, 24 nt, Human
aucccaccucccacccucccgcca

SEQ ID NO: 429062 - RNA, 25 nt, Human
aucccaccucccacccucccgccag

SEQ ID NO: 429063 - RNA, 21 nt, Human
caaaacaccaagaucugaagg

SEQ ID NO: 429064 - RNA, 22 nt, Human
cacaacacaaucacucucaccc

SEQ ID NO: 429065 - RNA, 18 nt, Human
caccucccacccucccgc

SEQ ID NO: 429066 - RNA, 18 nt, Human
cagagcucugcccagcug

SEQ ID NO: 429067 - RNA, 20 nt, Human
cagcuccccucccaugcucc

SEQ ID NO: 429068 - RNA, 22 nt, Human
ccagcuccccucccaugcuccc

SEQ ID NO: 429069 - RNA, 21 nt, Human
ccccucccaugcucccaaucc

SEQ ID NO: 429070 - RNA, 22 nt, Human
ccucccgccagcuccccuccca

SEQ ID NO: 429071 - RNA, 25 nt, Human
ccuggcuaaaucccaccucccaccc

SEQ ID NO: 429072 - RNA, 19 nt, Human
ccuuggggaccucuugggg

SEQ ID NO: 429073 - RNA, 22 nt, Human
cgccuccucgcccacaacacaa

SEQ ID NO: 429074 - RNA, 24 nt, Human
cgccuccucgcccacaacacaauc

SEQ ID NO: 429075 - RNA, 21 nt, Human
cucccacccucccgccagcuc

SEQ ID NO: 429076 - RNA, 22 nt, Human
cugaaggcuauggauuuucucu

SEQ ID NO: 429077 - RNA, 20 nt, Human
gacuucacuucccagagcuc

SEQ ID NO: 429078 - RNA, 21 nt, Human
gagcucugcccagcugcccag

SEQ ID NO: 429079 - RNA, 24 nt, Human
gauuuccagaacaauggggaguag

SEQ ID NO: 429080 - RNA, 23 nt, Human
ggaaacgccuccucgcccacaac

SEQ ID NO: 429081 - RNA, 23 nt, Human
ggacacaacugcugcacccgcgc

SEQ ID NO: 429082 - RNA, 19 nt, Human
ggagauuuccagaacaaug

SEQ ID NO: 429083 - RNA, 20 nt, Human
ucaccccuuuccuggcuaaa

SEQ ID NO: 429084 - RNA, 23 nt, Human
ucacuagggucuugggacuucug

SEQ ID NO: 429085 - RNA, 20 nt, Human
ucacuucccagagcucugcc

SEQ ID NO: 429086 - RNA, 18 nt, Human
ucccagagcucugcccag

SEQ ID NO: 429087 - RNA, 18 nt, Human
ucccgccagcuccccucc

SEQ ID NO: 429088 - RNA, 22 nt, Human
ucucaccccuuuccuggcuaaa

SEQ ID NO: 429089 - RNA, 21 nt, Human
ucugaaggcuauggauuuucu

SEQ ID NO: 429090 - RNA, 24 nt, Human
ugaaggcuauggauuuucucuaag

SEQ ID NO: 429091 - RNA, 19 nt, Human
ugcaggcagucagcccaag

SEQ ID NO: 429092 - RNA, 25 nt, Human
ugcugcacccgcgcuccgaggccgc

SEQ ID NO: 429093 - RNA, 22 nt, Human
uggaaacgccuccucgcccaca

SEQ ID NO: 429094 - RNA, 21 nt, Human
uucacuucccagagcucugcc

SEQ ID NO: 429095 - RNA, 30 nt, Human
uucacuucccagagcucugcccagcugccu

SEQ ID NO: 429096 - RNA, 25 nt, Human
aaaaacgaagacuucaaggaaagga

SEQ ID NO: 429097 - RNA, 20 nt, Human
aaagaaugcugacuaaccaa

SEQ ID NO: 429098 - RNA, 22 nt, Human
acuccauuuacacauaguaacc

SEQ ID NO: 429099 - RNA, 22 nt, Human
agaggaggggaaggggggaggg

SEQ ID NO: 429100 - RNA, 23 nt, Human
agaggaggggaaggggggagggg

SEQ ID NO: 429101 - RNA, 22 nt, Human
cagaucacgugcuugaauuucc

SEQ ID NO: 429102 - RNA, 23 nt, Human
cauugcuucuauaaaggugacaa

SEQ ID NO: 429103 - RNA, 18 nt, Human
ccaguauuauuucacuuu

SEQ ID NO: 429104 - RNA, 23 nt, Human
cccgccagaucacgugcuugaau

SEQ ID NO: 429105 - RNA, 22 nt, Human
cuaagguaaaaacgaagacuuc

SEQ ID NO: 429106 - RNA, 22 nt, Human
cucaauaccaccuuaaucacuu

SEQ ID NO: 429107 - RNA, 19 nt, Human
ggaaggggggaggggggag

SEQ ID NO: 429108 - RNA, 21 nt, Human
ggaggggggagaacuuuugcu

SEQ ID NO: 429109 - RNA, 22 nt, Human
uaaauacguuaggcaaacgccc

SEQ ID NO: 429110 - RNA, 18 nt, Human
uaagguaaaaacgaagac

SEQ ID NO: 429111 - RNA, 18 nt, Human
uaggcaaacgcccauccc

SEQ ID NO: 429112 - RNA, 25 nt, Human
ucaauaccaccuuaaucacuuaugc

SEQ ID NO: 429113 - RNA, 19 nt, Human
ugaucuaaaacaaguaaug

SEQ ID NO: 429114 - RNA, 28 nt, Human
ugcccgagacuaagguaaaaacgaagac

SEQ ID NO: 429115 - RNA, 21 nt, Human
ugcuguagaguugaaaaagaa

SEQ ID NO: 429116 - RNA, 20 nt, Human
uggguggaauagcaaguuuc

SEQ ID NO: 429117 - RNA, 22 nt, Human
uucaaagaaugcugacuaacca

SEQ ID NO: 429118 - RNA, 23 nt, Human
uucggcaacagcucccaccccug

SEQ ID NO: 429119 - RNA, 23 nt, Human
aaacagucagaagggccgccagc

SEQ ID NO: 429120 - RNA, 19 nt, Human
cacccuucccgguuccagg

SEQ ID NO: 429121 - RNA, 22 nt, Human
cggaccccaccgcagagggagg

SEQ ID NO: 429122 - RNA, 21 nt, Human
gggugccauccauccuuaaau

SEQ ID NO: 429123 - RNA, 25 nt, Human
uaaacuccagcuuggcuccccucgu

SEQ ID NO: 429124 - RNA, 19 nt, Human
uagaaaauaauccaauuua

SEQ ID NO: 429125 - RNA, 23 nt, Human
uccccucguccggcucauuaccu

SEQ ID NO: 429126 - RNA, 21 nt, Human
ucccggaccccaccgcagagg

SEQ ID NO: 429127 - RNA, 18 nt, Human
ucccgguuccagggugcc

SEQ ID NO: 429128 - RNA, 20 nt, Human
ugccaugucccggaccccac

SEQ ID NO: 429129 - RNA, 18 nt, Human
ugccuguguaaacuccag

SEQ ID NO: 429130 - RNA, 18 nt, Human
ugucccggaccccaccgc

SEQ ID NO: 429131 - RNA, 23 nt, Human
uuaccugccaugucccggacccc

SEQ ID NO: 429132 - RNA, 26 nt, Human
uucccgguuccagggugccauccauc

SEQ ID NO: 429133 - RNA, 24 nt, Human
acccgcaagacacauacuuggcuc

SEQ ID NO: 429134 - RNA, 22 nt, Human
agacuccugggugaugcaguuu

SEQ ID NO: 429135 - RNA, 23 nt, Human
caagacacauacuuggcucaaac

SEQ ID NO: 429136 - RNA, 25 nt, Human
ccacaguccccuuaguugacccccc

SEQ ID NO: 429137 - RNA, 22 nt, Human
ccgcaagacacauacuuggcuc

SEQ ID NO: 429138 - RNA, 22 nt, Human
cgcaagacacauacuuggcuca

SEQ ID NO: 429139 - RNA, 21 nt, Human
cugaaacgugccacagucccc

SEQ ID NO: 429140 - RNA, 23 nt, Human
uagcacguuguaccccauaaaua

SEQ ID NO: 429141 - RNA, 20 nt, Human
ugaaacgugccacagucccc

SEQ ID NO: 429142 - RNA, 27 nt, Human
ugaaacgugccacaguccccuuaguug

SEQ ID NO: 429143 - RNA, 25 nt, Human
uguaugcacacauuaaaauagcacg

SEQ ID NO: 429144 - RNA, 30 nt, Human
aaaaaacccaaauagccaaucaacagauag

SEQ ID NO: 429145 - RNA, 21 nt, Human
aaaaacccaaauagccaauca

SEQ ID NO: 429146 - RNA, 24 nt, Human
aaaaagcaagagaugaacagccca

SEQ ID NO: 429147 - RNA, 23 nt, Human
aaaacaacaugugaaccaaaaag

SEQ ID NO: 429148 - RNA, 19 nt, Human
aaacaacaugugaaccaaa

SEQ ID NO: 429149 - RNA, 19 nt, Human
aacauggugaaacccgucu

SEQ ID NO: 429150 - RNA, 20 nt, Human
aacauggugaaacccgucuu

SEQ ID NO: 429151 - RNA, 21 nt, Human
aagcaagagaugaacagccca

SEQ ID NO: 429152 - RNA, 23 nt, Human
aaucgcuugaacccgggaggcga

SEQ ID NO: 429153 - RNA, 24 nt, Human
acagagugagacuccaucucaaaa

SEQ ID NO: 429154 - RNA, 24 nt, Human
acuccagccugggugacagaguga

SEQ ID NO: 429155 - RNA, 22 nt, Human
agaaucgcuugaacccgggagg

SEQ ID NO: 429156 - RNA, 24 nt, Human
agacugaggcaggagaaucgcuug

SEQ ID NO: 429157 - RNA, 18 nt, Human
agccaggcaugguggugc

SEQ ID NO: 429158 - RNA, 22 nt, Human
agccuggccaacauggugaaac

SEQ ID NO: 429159 - RNA, 24 nt, Human
agccuggccaacauggugaaaccc

SEQ ID NO: 429160 - RNA, 24 nt, Human
agccugggugacagagugagacuc

SEQ ID NO: 429161 - RNA, 24 nt, Human
aggcaggagaaucgcuugaacccg

SEQ ID NO: 429162 - RNA, 18 nt, Human
aggcagguggaucaccug

SEQ ID NO: 429163 - RNA, 22 nt, Human
aggcagguggaucaccugaggu

SEQ ID NO: 429164 - RNA, 26 nt, Human
aggcagguggaucaccugaggucagg

SEQ ID NO: 429165 - RNA, 24 nt, Human
aggcaugguggugcacaccuguaa

SEQ ID NO: 429166 - RNA, 21 nt, Human
aggccgaggcagguggaucac

SEQ ID NO: 429167 - RNA, 24 nt, Human
aggcgaagguugaaaugagcugag

SEQ ID NO: 429168 - RNA, 22 nt, Human
agggaaaucugaauaaaaacaa

SEQ ID NO: 429169 - RNA, 21 nt, Human
auugcacuccagccuggguga

SEQ ID NO: 429170 - RNA, 24 nt, Human
auugcacuccagccugggugacag

SEQ ID NO: 429171 - RNA, 24 nt, Human
caacacuuuuggaggccgaggcag

SEQ ID NO: 429172 - RNA, 20 nt, Human
caacauggugaaacccgucu

SEQ ID NO: 429173 - RNA, 23 nt, Human
caacauggugaaacccgucuuua

SEQ ID NO: 429174 - RNA, 20 nt, Human
caaugcacagaagaaaaaac

SEQ ID NO: 429175 - RNA, 24 nt, Human
cacacaccacuaauuagggaaauc

SEQ ID NO: 429176 - RNA, 25 nt, Human
cacaccuguaaucccaacacuuuug

SEQ ID NO: 429177 - RNA, 24 nt, Human
cacaccuguaaucccagcuacuug

SEQ ID NO: 429178 - RNA, 19 nt, Human
caccuguaaucccaacacu

SEQ ID NO: 429179 - RNA, 23 nt, Human
caccuguaaucccagcuacuugg

SEQ ID NO: 429180 - RNA, 24 nt, Human
caccuguaaucccagcuacuuggg

SEQ ID NO: 429181 - RNA, 22 nt, Human
cacuccagccugggugacagag

SEQ ID NO: 429182 - RNA, 24 nt, Human
cacuccagccugggugacagagug

SEQ ID NO: 429183 - RNA, 24 nt, Human
cagaagaaaaaacccaaauagcca

SEQ ID NO: 429184 - RNA, 24 nt, Human
cagguggaucaccugaggucagga

SEQ ID NO: 429185 - RNA, 19 nt, Human
cauugcacuccagccuggg

SEQ ID NO: 429186 - RNA, 19 nt, Human
cauugcacuccagccuggg

SEQ ID NO: 429187 - RNA, 21 nt, Human
cauugcacuccagccugggug

SEQ ID NO: 429188 - RNA, 22 nt, Human
cauugcacuccagccuggguga

SEQ ID NO: 429189 - RNA, 24 nt, Human
cauugcacuccagccugggugaca

SEQ ID NO: 429190 - RNA, 25 nt, Human
cauugcacuccagccugggugacag

SEQ ID NO: 429191 - RNA, 19 nt, Human
ccaaauuuucacagcacac

SEQ ID NO: 429192 - RNA, 20 nt, Human
ccauugcacuccagccuggg

SEQ ID NO: 429193 - RNA, 21 nt, Human
ccauugcacuccagccugggu

SEQ ID NO: 429194 - RNA, 21 nt, Human
ccauugcacuccagccugggu

SEQ ID NO: 429195 - RNA, 22 nt, Human
ccauugcacuccagccugggug

SEQ ID NO: 429196 - RNA, 24 nt, Human
ccauugcacuccagccugggugac

SEQ ID NO: 429197 - RNA, 22 nt, Human
cccgucuuuacuaaaaauacaa

SEQ ID NO: 429198 - RNA, 22 nt, Human
ccugaggucaggaguuagagac

SEQ ID NO: 429199 - RNA, 22 nt, Human
ccuggccaacauggugaaaccc

SEQ ID NO: 429200 - RNA, 23 nt, Human
ccuggccaacauggugaaacccg

SEQ ID NO: 429201 - RNA, 21 nt, Human
ccuggccucagcccaccuucc

SEQ ID NO: 429202 - RNA, 22 nt, Human
ccugggugacagagugagacuc

SEQ ID NO: 429203 - RNA, 21 nt, Human
ccuguaaucccagcuacuugg

SEQ ID NO: 429204 - RNA, 20 nt, Human
cgaggcagguggaucaccug

SEQ ID NO: 429205 - RNA, 24 nt, Human
cgaggcagguggaucaccugaggu

SEQ ID NO: 429206 - RNA, 26 nt, Human
cgaggcagguggaucaccugagguca

SEQ ID NO: 429207 - RNA, 22 nt, Human
cucacaccuguaaucccaacac

SEQ ID NO: 429208 - RNA, 24 nt, Human
cucacaccuguaaucccaacacuu

SEQ ID NO: 429209 - RNA, 21 nt, Human
cuguaaucccagcuacuuggg

SEQ ID NO: 429210 - RNA, 28 nt, Human
gaaaacaaugagcagaggaccgguaccc

SEQ ID NO: 429211 - RNA, 24 nt, Human
gaagguugaaaugagcugagguca

SEQ ID NO: 429212 - RNA, 24 nt, Human
gacagagugagacuccaucucaaa

SEQ ID NO: 429213 - RNA, 23 nt, Human
gagaccagccuggccaacauggu

SEQ ID NO: 429214 - RNA, 24 nt, Human
gaucaccugaggucaggaguuaga

SEQ ID NO: 429215 - RNA, 24 nt, Human
gcacuccagccugggugacagagu

SEQ ID NO: 429216 - RNA, 22 nt, Human
gccaacauggugaaacccgucu

SEQ ID NO: 429217 - RNA, 19 nt, Human
gccauugcacuccagccug

SEQ ID NO: 429218 - RNA, 24 nt, Human
gccauugcacuccagccuggguga

SEQ ID NO: 429219 - RNA, 22 nt, Human
ggacagcugucuguguguagag

SEQ ID NO: 429220 - RNA, 22 nt, Human
ggaggccgaggcagguggauca

SEQ ID NO: 429221 - RNA, 22 nt, Human
ggaucaccugaggucaggaguu

SEQ ID NO: 429222 - RNA, 24 nt, Human
ggccucagcccaccuuccgugcug

SEQ ID NO: 429223 - RNA, 23 nt, Human
gguggcucacaccuguaauccca

SEQ ID NO: 429224 - RNA, 24 nt, Human
gguggugcacaccuguaaucccag

SEQ ID NO: 429225 - RNA, 22 nt, Human
guagaggguccugcagccucca

SEQ ID NO: 429226 - RNA, 24 nt, Human
gucaugccauugcacuccagccug

SEQ ID NO: 429227 - RNA, 24 nt, Human
uaaaaaacaacaugugaaccaaaa

SEQ ID NO: 429228 - RNA, 28 nt, Human
uaaaaaacaacaugugaaccaaaaagca

SEQ ID NO: 429229 - RNA, 25 nt, Human
uaaaaaaccaacgacaguuggagac

SEQ ID NO: 429230 - RNA, 21 nt, Human
uaaaaauacaaaaauuagcca

SEQ ID NO: 429231 - RNA, 25 nt, Human
ucacagcacacuguggugcccuggu

SEQ ID NO: 429232 - RNA, 23 nt, Human
ucaugccauugcacuccagccug

SEQ ID NO: 429233 - RNA, 23 nt, Human
uccagccugggugacagagugag

SEQ ID NO: 429234 - RNA, 24 nt, Human
uccagccugggugacagagugaga

SEQ ID NO: 429235 - RNA, 20 nt, Human
uccugcagccuccaguaagg

SEQ ID NO: 429236 - RNA, 18 nt, Human
ucgcuugaacccgggagg

SEQ ID NO: 429237 - RNA, 19 nt, Human
ucucaaaaaauaaaaaaua

SEQ ID NO: 429238 - RNA, 21 nt, Human
ucugaauaaaaacaaugagcu

SEQ ID NO: 429239 - RNA, 22 nt, Human
ugaaaacaaugagcagaggaca

SEQ ID NO: 429240 - RNA, 18 nt, Human
ugaaccaaaaagcaagag

SEQ ID NO: 429241 - RNA, 20 nt, Human
ugaggcaggagaaucgcuug

SEQ ID NO: 429242 - RNA, 24 nt, Human
ugaggcaggagaaucgcuugaacc

SEQ ID NO: 429243 - RNA, 25 nt, Human
ugaggcaggagaaucgcuugaaccc

SEQ ID NO: 429244 - RNA, 24 nt, Human
ugaggucaugccauugcacuccag

SEQ ID NO: 429245 - RNA, 24 nt, Human
ugcacuccagccugggugacagag

SEQ ID NO: 429246 - RNA, 20 nt, Human
ugccaaauuuucacagcacu

SEQ ID NO: 429247 - RNA, 23 nt, Human
uggaucaccugaggucaggaguu

SEQ ID NO: 429248 - RNA, 27 nt, Human
uggaucaccugaggucaggaguuagag

SEQ ID NO: 429249 - RNA, 20 nt, Human
uggcaaaauuuaaaaaacca

SEQ ID NO: 429250 - RNA, 23 nt, Human
uggccaacauggugaaacccguc

SEQ ID NO: 429251 - RNA, 21 nt, Human
uggcucacaccuguaauccca

SEQ ID NO: 429252 - RNA, 21 nt, Human
ugggagaagauauuugcaaca

SEQ ID NO: 429253 - RNA, 24 nt, Human
ugguggugcacaccuguaauccca

SEQ ID NO: 429254 - RNA, 23 nt, Human
uguagaggguccugcagccucca

SEQ ID NO: 429255 - RNA, 19 nt, Human
ugugaaccaaaaagcaaga

SEQ ID NO: 429256 - RNA, 23 nt, Human
uuaaaaaacaacaugugaaccaa

SEQ ID NO: 429257 - RNA, 23 nt, Human
uuagagaccagccuggccaacau

SEQ ID NO: 429258 - RNA, 24 nt, Human
uugggagacugaggcaggagaauc

SEQ ID NO: 429259 - RNA, 22 nt, Human
uuucacagcacacuguggugcc

SEQ ID NO: 429260 - RNA, 21 nt, Human
aaacaagcccaaacccaagac

SEQ ID NO: 429261 - RNA, 27 nt, Human
aagaggcaagagcaguggcagugggca

SEQ ID NO: 429262 - RNA, 20 nt, Human
aaucuucucccuuguaacaa

SEQ ID NO: 429263 - RNA, 20 nt, Human
acuggauguaggcagugagc

SEQ ID NO: 429264 - RNA, 19 nt, Human
agaagggagccuguaaagg

SEQ ID NO: 429265 - RNA, 19 nt, Human
caaacccaagacaucacaa

SEQ ID NO: 429266 - RNA, 22 nt, Human
caaacccaagacaucacaagag

SEQ ID NO: 429267 - RNA, 21 nt, Human
caagagcaguggcagugagaa

SEQ ID NO: 429268 - RNA, 24 nt, Human
caagcccaaacccaagacaucaca

SEQ ID NO: 429269 - RNA, 22 nt, Human
cacaagcuguaaaaacaagccc

SEQ ID NO: 429270 - RNA, 21 nt, Human
cagccuccauaaucuucuccc

SEQ ID NO: 429271 - RNA, 22 nt, Human
ccaagacaucacaagaggcaag

SEQ ID NO: 429272 - RNA, 26 nt, Human
cccaaacccaagacaucacaagaggc

SEQ ID NO: 429273 - RNA, 19 nt, Human
ccguucacaagcuguaaaa

SEQ ID NO: 429274 - RNA, 19 nt, Human
cuuuacuuuuuugguaacu

SEQ ID NO: 429275 - RNA, 19 nt, Human
gagcaguggcagugagaag

SEQ ID NO: 429276 - RNA, 23 nt, Human
gagcugaguccaggcuuucgguc

SEQ ID NO: 429277 - RNA, 22 nt, Human
gaguuggagaggaaacuaugcu

SEQ ID NO: 429278 - RNA, 19 nt, Human
ggcagugagcugaguccag

SEQ ID NO: 429279 - RNA, 18 nt, Human
uaaaaacaagcccaaacc

SEQ ID NO: 429280 - RNA, 19 nt, Human
uaaaaacaagcccaaaccc

SEQ ID NO: 429281 - RNA, 23 nt, Human
uaaaaacaagcccaaacccaaga

SEQ ID NO: 429282 - RNA, 19 nt, Human
uaggcagugagcugagucc

SEQ ID NO: 429283 - RNA, 19 nt, Human
ucccaggcuauguggccac

SEQ ID NO: 429284 - RNA, 20 nt, Human
uggagaggaaacuaugcucg

SEQ ID NO: 429285 - RNA, 18 nt, Human
uggcagaggcugagacaa

SEQ ID NO: 429286 - RNA, 20 nt, Human
uggcagaggcugagacaaug

SEQ ID NO: 429287 - RNA, 18 nt, Human
uggccaaagaggaguugg

SEQ ID NO: 429288 - RNA, 20 nt, Human
aaaaggaauuucugauuaaa

SEQ ID NO: 429289 - RNA, 23 nt, Human
aauucuggcauuucaucuugcca

SEQ ID NO: 429290 - RNA, 22 nt, Human
agaaaaaugcuaccacacucuu

SEQ ID NO: 429291 - RNA, 20 nt, Human
ccaucgggauuaauaugcug

SEQ ID NO: 429292 - RNA, 19 nt, Human
ccccccuccuccccacucc

SEQ ID NO: 429293 - RNA, 20 nt, Human
cccccuccuccccacucccc

SEQ ID NO: 429294 - RNA, 20 nt, Human
ccccuccuccccacuccccc

SEQ ID NO: 429295 - RNA, 22 nt, Human
cccuccuccccacuccccccgc

SEQ ID NO: 429296 - RNA, 23 nt, Human
cgaccccccuccuccccacuccc

SEQ ID NO: 429297 - RNA, 25 nt, Human
cggcggccgaccccccuccucccca

SEQ ID NO: 429298 - RNA, 21 nt, Human
cugcggcggccgaccccccuc

SEQ ID NO: 429299 - RNA, 25 nt, Human
gaccccccuccuccccacucccccc

SEQ ID NO: 429300 - RNA, 20 nt, Human
gccgaccccccuccucccca

SEQ ID NO: 429301 - RNA, 23 nt, Human
gccgaccccccuccuccccacuc

SEQ ID NO: 429302 - RNA, 21 nt, Human
ggcugcggcggccgacccccc

SEQ ID NO: 429303 - RNA, 20 nt, Human
guaaaaugcauauucucuga

SEQ ID NO: 429304 - RNA, 19 nt, Human
uaaaaugcauauucucuga

SEQ ID NO: 429305 - RNA, 24 nt, Human
uaaaaugcauauucucugaaaugc

SEQ ID NO: 429306 - RNA, 22 nt, Human
uacucauaaaaacaauaaacac

SEQ ID NO: 429307 - RNA, 22 nt, Human
uauucccaaagguaaaaugcau

SEQ ID NO: 429308 - RNA, 18 nt, Human
ucagguuaaaaucagcca

SEQ ID NO: 429309 - RNA, 25 nt, Human
ucaugguuuacuuuuugcuuuaauc

SEQ ID NO: 429310 - RNA, 18 nt, Human
uccuccccacuccccccg

SEQ ID NO: 429311 - RNA, 22 nt, Human
uuagaaauaguaaugcuguuuu

SEQ ID NO: 429312 - RNA, 21 nt, Human
uuucaugguuuacuuuuugcu

SEQ ID NO: 429313 - RNA, 18 nt, Human
uuugaaguggguucuacu

SEQ ID NO: 429314 - RNA, 21 nt, Human
uuuuaauucuggcauuucauc

SEQ ID NO: 429315 - RNA, 22 nt, Human
uccucagcauuuacuuacaaau

SEQ ID NO: 429316 - RNA, 24 nt, Human
uuuuuuuuuuuuuuuuuuuuucag

SEQ ID NO: 429317 - RNA, 19 nt, Human
aaagcggcugcucgcugcc

SEQ ID NO: 429318 - RNA, 18 nt, Human
aagcaagggggaggagaa

SEQ ID NO: 429319 - RNA, 26 nt, Human
acaacucucuccuuguaaacggguua

SEQ ID NO: 429320 - RNA, 19 nt, Human
agcuugccccaacucuccc

SEQ ID NO: 429321 - RNA, 21 nt, Human
aguagcaagcacacaggucuc

SEQ ID NO: 429322 - RNA, 19 nt, Human
aguggcuccggccuccagg

SEQ ID NO: 429323 - RNA, 19 nt, Human
augcauaacuauauauaua

SEQ ID NO: 429324 - RNA, 19 nt, Human
caaagccucacuugcuagc

SEQ ID NO: 429325 - RNA, 23 nt, Human
cagaaugugcaucaucauuccuc

SEQ ID NO: 429326 - RNA, 19 nt, Human
cagccuccugcacgcgagc

SEQ ID NO: 429327 - RNA, 20 nt, Human
caggagacaacucucuccuu

SEQ ID NO: 429328 - RNA, 21 nt, Human
cagugcccagaccugccuucu

SEQ ID NO: 429329 - RNA, 18 nt, Human
ccagugcccagaccugcc

SEQ ID NO: 429330 - RNA, 19 nt, Human
cccaacucucccgcauccu

SEQ ID NO: 429331 - RNA, 19 nt, Human
ccccagugcccagaccugc

SEQ ID NO: 429332 - RNA, 19 nt, Human
cccugguuggccuuuucug

SEQ ID NO: 429333 - RNA, 19 nt, Human
ccugauucucucucaguag

SEQ ID NO: 429334 - RNA, 19 nt, Human
cgccgggugcuaaacggua

SEQ ID NO: 429335 - RNA, 23 nt, Human
cucaagacaacgcggucccuggg

SEQ ID NO: 429336 - RNA, 21 nt, Human
cucuuugccccagugcccaga

SEQ ID NO: 429337 - RNA, 21 nt, Human
cugggagugggaagaguuuug

SEQ ID NO: 429338 - RNA, 25 nt, Human
gaacgggaugcagagacaaagccuc

SEQ ID NO: 429339 - RNA, 21 nt, Human
gaccugccuucucugcacccu

SEQ ID NO: 429340 - RNA, 20 nt, Human
guaaacggguuaagccuuug

SEQ ID NO: 429341 - RNA, 18 nt, Human
uaagccuuugggaucaug

SEQ ID NO: 429342 - RNA, 21 nt, Human
uagccaaacucaagacaacgc

SEQ ID NO: 429343 - RNA, 18 nt, Human
ucaagggccucgugcuuu

SEQ ID NO: 429344 - RNA, 19 nt, Human
ucaagggccucgugcuuuc

SEQ ID NO: 429345 - RNA, 19 nt, Human
ucaguagcaagcacacagg

SEQ ID NO: 429346 - RNA, 22 nt, Human
ucucccgcauccuggcggaaac

SEQ ID NO: 429347 - RNA, 19 nt, Human
ugacagcaaaugcauaacu

SEQ ID NO: 429348 - RNA, 22 nt, Human
ugcagagacaaagccucacuug

SEQ ID NO: 429349 - RNA, 27 nt, Human
ugcccagaccugccuucucugcacccu

SEQ ID NO: 429350 - RNA, 24 nt, Human
ugccccaacucucccgcauccugg

SEQ ID NO: 429351 - RNA, 22 nt, Human
ugccuucucugcacccugucau

SEQ ID NO: 429352 - RNA, 22 nt, Human
uuaacauauuuuagaggauaaa

SEQ ID NO: 429353 - RNA, 23 nt, Human
uucucuuugccccagugcccaga

SEQ ID NO: 429354 - RNA, 20 nt, Human
uuucugguagaucacucauc

SEQ ID NO: 429355 - RNA, 27 nt, Human
aaaaacaguugggaggccauauuuggc

SEQ ID NO: 429356 - RNA, 23 nt, Human
aaaauaacucaucugcuuacauc

SEQ ID NO: 429357 - RNA, 22 nt, Human
aaaaugcuucugaucccaggca

SEQ ID NO: 429358 - RNA, 23 nt, Human
aaagaucaguaaacauuauagaa

SEQ ID NO: 429359 - RNA, 18 nt, Human
aaagggggggcaagcuga

SEQ ID NO: 429360 - RNA, 23 nt, Human
aacucaucugcuuacaucuccug

SEQ ID NO: 429361 - RNA, 21 nt, Human
aagccccucaucacuccccca

SEQ ID NO: 429362 - RNA, 20 nt, Human
aauaugcugaugcacuagga

SEQ ID NO: 429363 - RNA, 19 nt, Human
aaugcacauucauguguau

SEQ ID NO: 429364 - RNA, 22 nt, Human
aauucugcagcaaaccccacug

SEQ ID NO: 429365 - RNA, 18 nt, Human
acccccaacaagccccuc

SEQ ID NO: 429366 - RNA, 24 nt, Human
acccccacugcuaauauucccaau

SEQ ID NO: 429367 - RNA, 24 nt, Human
acgcacccccacccccaacaagcc

SEQ ID NO: 429368 - RNA, 23 nt, Human
acuccacuuuucccaggagccag

SEQ ID NO: 429369 - RNA, 31 nt, Human
acugagggcauacauacauacauacauacgg

SEQ ID NO: 429370 - RNA, 20 nt, Human
agaagagaaaaucuguaaua

SEQ ID NO: 429371 - RNA, 23 nt, Human
auacgcauacauacacauaugcu

SEQ ID NO: 429372 - RNA, 21 nt, Human
aucacgcacccccacccccaa

SEQ ID NO: 429373 - RNA, 23 nt, Human
augaagagagauccugcagccuc

SEQ ID NO: 429374 - RNA, 21 nt, Human
augcacauucauguguaugua

SEQ ID NO: 429375 - RNA, 23 nt, Human
auuagaccugauucugagaagau

SEQ ID NO: 429376 - RNA, 19 nt, Human
cacauucauguguauguau

SEQ ID NO: 429377 - RNA, 24 nt, Human
cacgcacccccacccccaacaagc

SEQ ID NO: 429378 - RNA, 27 nt, Human
cacgcacccccacccccaacaagcccc

SEQ ID NO: 429379 - RNA, 22 nt, Human
cacuuuucccaggagccagaag

SEQ ID NO: 429380 - RNA, 20 nt, Human
cagcaaaccccacugcacug

SEQ ID NO: 429381 - RNA, 22 nt, Human
cagccucgucuucagccgagaa

SEQ ID NO: 429382 - RNA, 18 nt, Human
caguuuguugacuccugg

SEQ ID NO: 429383 - RNA, 19 nt, Human
cauacacauaugcugacca

SEQ ID NO: 429384 - RNA, 23 nt, Human
cauacauacacauaugcugacca

SEQ ID NO: 429385 - RNA, 24 nt, Human
cauacauacauacgcauacauaca

SEQ ID NO: 429386 - RNA, 24 nt, Human
cauaugcauauauauacauacaua

SEQ ID NO: 429387 - RNA, 22 nt, Human
ccaauaaaacuuuauuuuaaaa

SEQ ID NO: 429388 - RNA, 23 nt, Human
ccacugcuaauauucccaaucac

SEQ ID NO: 429389 - RNA, 21 nt, Human
ccauauacauaugucugcaua

SEQ ID NO: 429390 - RNA, 27 nt, Human
ccauauacauaugucugcauaugcaua

SEQ ID NO: 429391 - RNA, 19 nt, Human
cccaacaagccccucauca

SEQ ID NO: 429392 - RNA, 23 nt, Human
ccccaacaagccccucaucacuc

SEQ ID NO: 429393 - RNA, 19 nt, Human
cccccacccccaacaagcc

SEQ ID NO: 429394 - RNA, 23 nt, Human
cccccacugcuaauauucccaau

SEQ ID NO: 429395 - RNA, 19 nt, Human
ccccucaucacucccccaa

SEQ ID NO: 429396 - RNA, 25 nt, Human
ccccucaucacucccccaaagccag

SEQ ID NO: 429397 - RNA, 22 nt, Human
ccuacagaacccccacugcuaa

SEQ ID NO: 429398 - RNA, 22 nt, Human
cgcacccccacccccaacaagc

SEQ ID NO: 429399 - RNA, 22 nt, Human
cucacagccucgucuucagccg

SEQ ID NO: 429400 - RNA, 20 nt, Human
cuuggauuuucagauuaggg

SEQ ID NO: 429401 - RNA, 28 nt, Human
gaaaucccuuuaucacgcacccccaccc

SEQ ID NO: 429402 - RNA, 18 nt, Human
gacgcucaaaggaaaugc

SEQ ID NO: 429403 - RNA, 23 nt, Human
ggcgcacacacacacauaaaaua

SEQ ID NO: 429404 - RNA, 24 nt, Human
gggagaaaauuuauaauccuuaau

SEQ ID NO: 429405 - RNA, 22 nt, Human
gguggagauggaaagggggggc

SEQ ID NO: 429406 - RNA, 22 nt, Human
uaaaaaauaacucaucugcuua

SEQ ID NO: 429407 - RNA, 21 nt, Human
uaacucaucugcuuacaucuc

SEQ ID NO: 429408 - RNA, 28 nt, Human
uacagaacccccacugcuaauauuccca

SEQ ID NO: 429409 - RNA, 25 nt, Human
uacauacauacauacauacgcauag

SEQ ID NO: 429410 - RNA, 24 nt, Human
uacauacauacauacgcauacaua

SEQ ID NO: 429411 - RNA, 25 nt, Human
uacauacauacauacgcauacauac

SEQ ID NO: 429412 - RNA, 28 nt, Human
uacauacauagauacagaaauauacgua

SEQ ID NO: 429413 - RNA, 26 nt, Human
uauauacauacauagauacagaaaua

SEQ ID NO: 429414 - RNA, 18 nt, Human
uauauauacauacauaga

SEQ ID NO: 429415 - RNA, 20 nt, Human
uauauauaugcuuauauaca

SEQ ID NO: 429416 - RNA, 21 nt, Human
uaucaugacuguguuggcacu

SEQ ID NO: 429417 - RNA, 21 nt, Human
uaucugaaauccaaaaugcuu

SEQ ID NO: 429418 - RNA, 19 nt, Human
uccaaaaugcuucugaucc

SEQ ID NO: 429419 - RNA, 18 nt, Human
ucccaggagccagaagcu

SEQ ID NO: 429420 - RNA, 21 nt, Human
ucccccaaagccagccgcccc

SEQ ID NO: 429421 - RNA, 19 nt, Human
uccuaucaugacuguguug

SEQ ID NO: 429422 - RNA, 18 nt, Human
uccugacccuacagaacc

SEQ ID NO: 429423 - RNA, 24 nt, Human
ucuccugcuaugcagugaauucug

SEQ ID NO: 429424 - RNA, 24 nt, Human
ucugaaaacccaaaaucugaaacu

SEQ ID NO: 429425 - RNA, 20 nt, Human
ucugcagaagccucacagcc

SEQ ID NO: 429426 - RNA, 18 nt, Human
ugaaaacccaaaaucuga

SEQ ID NO: 429427 - RNA, 22 nt, Human
ugaacgagacuaaugguuggca

SEQ ID NO: 429428 - RNA, 21 nt, Human
ugaagagagauccugcagccu

SEQ ID NO: 429429 - RNA, 21 nt, Human
ugaagcaugaauucaauaaca

SEQ ID NO: 429430 - RNA, 20 nt, Human
ugacaacuccacuuuuccca

SEQ ID NO: 429431 - RNA, 19 nt, Human
ugagaagauguucucuucu

SEQ ID NO: 429432 - RNA, 26 nt, Human
ugagaagauguucucuucuucaagaa

SEQ ID NO: 429433 - RNA, 18 nt, Human
ugauguggccugaccugg

SEQ ID NO: 429434 - RNA, 19 nt, Human
ugauguggccugaccuggg

SEQ ID NO: 429435 - RNA, 21 nt, Human
ugcacauucauguguauguau

SEQ ID NO: 429436 - RNA, 29 nt, Human
ugcacugagggcauacauacauacauaca

SEQ ID NO: 429437 - RNA, 25 nt, Human
ugcauauauauacauacauagauac

SEQ ID NO: 429438 - RNA, 21 nt, Human
ugcauaugcauauauauacau

SEQ ID NO: 429439 - RNA, 18 nt, Human
ugcuucugaucccaggca

SEQ ID NO: 429440 - RNA, 21 nt, Human
uggagauggaaagggggggca

SEQ ID NO: 429441 - RNA, 23 nt, Human
uggggguucugcagaagccucac

SEQ ID NO: 429442 - RNA, 23 nt, Human
uguaauugcccucacuaaaauaa

SEQ ID NO: 429443 - RNA, 18 nt, Human
ugucugcauaugcauaua

SEQ ID NO: 429444 - RNA, 20 nt, Human
ugucugcauaugcauauaua

SEQ ID NO: 429445 - RNA, 24 nt, Human
uuccaauaaaacuuuauuuuaaaa

SEQ ID NO: 429446 - RNA, 23 nt, Human
uuccugacccuacagaaccccca

SEQ ID NO: 429447 - RNA, 21 nt, Human
uuuaucacgcacccccacccc

SEQ ID NO: 429448 - RNA, 19 nt, Human
uuucccacauauuuuacua

SEQ ID NO: 429449 - RNA, 18 nt, Human
uuucugcuuacucuuuuc

SEQ ID NO: 429450 - RNA, 19 nt, Human
aaaggacacagacccaaga

SEQ ID NO: 429451 - RNA, 22 nt, Human
aagcugcaucuucuuacaagcc

SEQ ID NO: 429452 - RNA, 18 nt, Human
aagguguuauucuuucgc

SEQ ID NO: 429453 - RNA, 19 nt, Human
aagucaguuucauagccua

SEQ ID NO: 429454 - RNA, 19 nt, Human
acacagacccaagagaggc

SEQ ID NO: 429455 - RNA, 26 nt, Human
acacagacccaagagagggggaacgc

SEQ ID NO: 429456 - RNA, 22 nt, Human
acccagacaccgagcauucgac

SEQ ID NO: 429457 - RNA, 21 nt, Human
acccuguaaguuucauagccu

SEQ ID NO: 429458 - RNA, 20 nt, Human
accuugagucccagcucagc

SEQ ID NO: 429459 - RNA, 21 nt, Human
agcaccucaucagugcucccc

SEQ ID NO: 429460 - RNA, 23 nt, Human
agccagaaacccugggauguagc

SEQ ID NO: 429461 - RNA, 21 nt, Human
agccuagaagucuuccuagua

SEQ ID NO: 429462 - RNA, 20 nt, Human
agggcaugggcacuccccca

SEQ ID NO: 429463 - RNA, 22 nt, Human
auaaaauaaaggauaaugugcc

SEQ ID NO: 429464 - RNA, 26 nt, Human
aucacccucccccgaccugccccucu

SEQ ID NO: 429465 - RNA, 18 nt, Human
aucuaaacaggcuugaaa

SEQ ID NO: 429466 - RNA, 22 nt, Human
auguagccuaucugugacaagg

SEQ ID NO: 429467 - RNA, 24 nt, Human
auuuuauuuuucauaaaauaaagg

SEQ ID NO: 429468 - RNA, 22 nt, Human
cacagacccaagagaggcccuu

SEQ ID NO: 429469 - RNA, 20 nt, Human
cagagggagaacucccgcac

SEQ ID NO: 429470 - RNA, 23 nt, Human
cagagggggaggccccgagaccu

SEQ ID NO: 429471 - RNA, 22 nt, Human
caucagugcuccccgcuccuga

SEQ ID NO: 429472 - RNA, 23 nt, Human
cauccuggggcuucucacaucug

SEQ ID NO: 429473 - RNA, 21 nt, Human
ccaccuagggguagacuucca

SEQ ID NO: 429474 - RNA, 23 nt, Human
ccagagguaaggaugccuuuucu

SEQ ID NO: 429475 - RNA, 19 nt, Human
ccagaugcugccucccagg

SEQ ID NO: 429476 - RNA, 18 nt, Human
ccagcaaagagugguuca

SEQ ID NO: 429477 - RNA, 22 nt, Human
ccauggucaaucauccuggggc

SEQ ID NO: 429478 - RNA, 20 nt, Human
cccacccauacccuguaagu

SEQ ID NO: 429479 - RNA, 21 nt, Human
ccccagaugcugccucccagg

SEQ ID NO: 429480 - RNA, 22 nt, Human
ccccagcaccucaucagugcuc

SEQ ID NO: 429481 - RNA, 18 nt, Human
cccccagagggagaacuc

SEQ ID NO: 429482 - RNA, 19 nt, Human
ccccucuucuucaucccca

SEQ ID NO: 429483 - RNA, 22 nt, Human
cccgaccugccccucuucuuca

SEQ ID NO: 429484 - RNA, 20 nt, Human
ccgcacccccaguucccagg

SEQ ID NO: 429485 - RNA, 20 nt, Human
ccucccccgaccugccccuc

SEQ ID NO: 429486 - RNA, 19 nt, Human
cucagaaugcaagaaaagg

SEQ ID NO: 429487 - RNA, 19 nt, Human
cucccgcacccccaguucc

SEQ ID NO: 429488 - RNA, 22 nt, Human
cucucgaccaccuagggguaga

SEQ ID NO: 429489 - RNA, 18 nt, Human
cuggagcagauuugggaa

SEQ ID NO: 429490 - RNA, 20 nt, Human
cuggagcagauuugggaagg

SEQ ID NO: 429491 - RNA, 23 nt, Human
cuucuuacaagcccaggggagaa

SEQ ID NO: 429492 - RNA, 24 nt, Human
gaccugccccucuucuucaucccc

SEQ ID NO: 429493 - RNA, 20 nt, Human
gagaggguccggaugcagag

SEQ ID NO: 429494 - RNA, 21 nt, Human
gaggagcugcaucaagcugca

SEQ ID NO: 429495 - RNA, 26 nt, Human
gaggccccgagaccuucaaccagagg

SEQ ID NO: 429496 - RNA, 18 nt, Human
gaggcugggauggggaga

SEQ ID NO: 429497 - RNA, 27 nt, Human
gagucccagcucagcuggucauccgug

SEQ ID NO: 429498 - RNA, 22 nt, Human
gcccaguguuccuuccuuccug

SEQ ID NO: 429499 - RNA, 28 nt, Human
gccccgagaccuucaaccagagguaagg

SEQ ID NO: 429500 - RNA, 21 nt, Human
gccucccagguuccaagagcc

SEQ ID NO: 429501 - RNA, 21 nt, Human
gcugccucccagguuccaaga

SEQ ID NO: 429502 - RNA, 20 nt, Human
ggagucucacuugcagccag

SEQ ID NO: 429503 - RNA, 22 nt, Human
ggcacuucacagagggcauggg

SEQ ID NO: 429504 - RNA, 22 nt, Human
ggcugugggccaggagugggaa

SEQ ID NO: 429505 - RNA, 20 nt, Human
gggcagugcaguacauggcg

SEQ ID NO: 429506 - RNA, 23 nt, Human
uaaguuucauagccuagaaguca

SEQ ID NO: 429507 - RNA, 18 nt, Human
uagaaguuguucauuuug

SEQ ID NO: 429508 - RNA, 21 nt, Human
ucccagguuccaagagccacc

SEQ ID NO: 429509 - RNA, 21 nt, Human
ucccgcacccccaguucccag

SEQ ID NO: 429510 - RNA, 21 nt, Human
ucccuggcaucacccuccccc

SEQ ID NO: 429511 - RNA, 21 nt, Human
ucuauccacugcccccagaug

SEQ ID NO: 429512 - RNA, 26 nt, Human
ucucugcucuggggucugggccacag

SEQ ID NO: 429513 - RNA, 18 nt, Human
ucucuggggcugugggcc

SEQ ID NO: 429514 - RNA, 19 nt, Human
ucugcaaccagaaacaggc

SEQ ID NO: 429515 - RNA, 20 nt, Human
ucugcaaccagaaacaggcc

SEQ ID NO: 429516 - RNA, 21 nt, Human
ucugcccaguguuccuuccuu

SEQ ID NO: 429517 - RNA, 21 nt, Human
ucugugacaagggcagaucgg

SEQ ID NO: 429518 - RNA, 23 nt, Human
ucuucauccccaccugacaucuc

SEQ ID NO: 429519 - RNA, 25 nt, Human
ugacaagggcagaucggcaaccauc

SEQ ID NO: 429520 - RNA, 22 nt, Human
ugcacagacaggcucucugggg

SEQ ID NO: 429521 - RNA, 19 nt, Human
ugcaguacauggcggugcc

SEQ ID NO: 429522 - RNA, 22 nt, Human
ugccucccagguuccaagagcc

SEQ ID NO: 429523 - RNA, 18 nt, Human
ugccuuggaaucccuggc

SEQ ID NO: 429524 - RNA, 23 nt, Human
ugccuuggaaucccuggcaucac

SEQ ID NO: 429525 - RNA, 18 nt, Human
uggaaucccuggcaucac

SEQ ID NO: 429526 - RNA, 19 nt, Human
uggaaucccuggcaucacc

SEQ ID NO: 429527 - RNA, 21 nt, Human
ugggaagggucaugggaacaa

SEQ ID NO: 429528 - RNA, 22 nt, Human
ugggaagggucaugggaacaag

SEQ ID NO: 429529 - RNA, 21 nt, Human
ugggauggggagaggguccgg

SEQ ID NO: 429530 - RNA, 23 nt, Human
ugggauggggagaggguccggau

SEQ ID NO: 429531 - RNA, 23 nt, Human
ugggauguagccuaucugugaca

SEQ ID NO: 429532 - RNA, 20 nt, Human
ugggccaggagugggaaagc

SEQ ID NO: 429533 - RNA, 18 nt, Human
uggggcugugggccagga

SEQ ID NO: 429534 - RNA, 19 nt, Human
uguucauuuuguuuuccuu

SEQ ID NO: 429535 - RNA, 19 nt, Human
uguucuauccacugccccc

SEQ ID NO: 429536 - RNA, 19 nt, Human
uguuugaggagcugcauca

SEQ ID NO: 429537 - RNA, 20 nt, Human
uucacagagggcaugggcac

SEQ ID NO: 429538 - RNA, 18 nt, Human
aaaacuggaucuccaauu

SEQ ID NO: 429539 - RNA, 23 nt, Human
aaacaaauaagauagaaagugac

SEQ ID NO: 429540 - RNA, 24 nt, Human
aacaaacaaauaagauagaaagug

SEQ ID NO: 429541 - RNA, 18 nt, Human
aacuaggucuucaccagg

SEQ ID NO: 429542 - RNA, 23 nt, Human
aagcagugacuacagcuaauccc

SEQ ID NO: 429543 - RNA, 18 nt, Human
agaaagcacuucuaaaac

SEQ ID NO: 429544 - RNA, 22 nt, Human
agauauccuccaaguccaaagc

SEQ ID NO: 429545 - RNA, 19 nt, Human
aggggcugacuuuggaguu

SEQ ID NO: 429546 - RNA, 26 nt, Human
caaagaacacacgugagcucacaggc

SEQ ID NO: 429547 - RNA, 22 nt, Human
cacagugaacaaacaaauaaga

SEQ ID NO: 429548 - RNA, 26 nt, Human
cagaggauucacagcugaguaggcac

SEQ ID NO: 429549 - RNA, 19 nt, Human
caggcccucuaugcuucuc

SEQ ID NO: 429550 - RNA, 23 nt, Human
ccaagaaaaaaggagauuaacaa

SEQ ID NO: 429551 - RNA, 19 nt, Human
ccagaaagcacuucuaaaa

SEQ ID NO: 429552 - RNA, 25 nt, Human
cccucuaugcuucuccccuucugga

SEQ ID NO: 429553 - RNA, 24 nt, Human
ccuccaaguccaaagccaugucca

SEQ ID NO: 429554 - RNA, 19 nt, Human
cucuccucuccaauccaag

SEQ ID NO: 429555 - RNA, 24 nt, Human
cugaggcagaaucaagaauuuaag

SEQ ID NO: 429556 - RNA, 24 nt, Human
cuucuaaaacuggaucuccaauuu

SEQ ID NO: 429557 - RNA, 22 nt, Human
gaacaaacaaauaagauagaaa

SEQ ID NO: 429558 - RNA, 20 nt, Human
gagauagaaauggggaaaga

SEQ ID NO: 429559 - RNA, 20 nt, Human
gauaugaaaaaaugaacuuc

SEQ ID NO: 429560 - RNA, 22 nt, Human
gcuacauuaugaacuugagguu

SEQ ID NO: 429561 - RNA, 18 nt, Human
ggagauagaaauggggaa

SEQ ID NO: 429562 - RNA, 21 nt, Human
ggagauagaaauggggaaaga

SEQ ID NO: 429563 - RNA, 20 nt, Human
gucugaacauuagccuagga

SEQ ID NO: 429564 - RNA, 21 nt, Human
uaaggggcugaucugagguuc

SEQ ID NO: 429565 - RNA, 18 nt, Human
ucaccaggacacucggcc

SEQ ID NO: 429566 - RNA, 21 nt, Human
ucaccccuaugacaaagaaca

SEQ ID NO: 429567 - RNA, 20 nt, Human
uccaagaaaaaaggagauua

SEQ ID NO: 429568 - RNA, 23 nt, Human
uccagauucucuccucuccaauc

SEQ ID NO: 429569 - RNA, 23 nt, Human
ucuccugaggcagaaucaagaau

SEQ ID NO: 429570 - RNA, 20 nt, Human
ucugcaguggaauugucucc

SEQ ID NO: 429571 - RNA, 22 nt, Human
ucugcuacauuaugaacuugag

SEQ ID NO: 429572 - RNA, 18 nt, Human
ugacaaagaacacacgug

SEQ ID NO: 429573 - RNA, 25 nt, Human
ugacaaagaacacacgugagcucaa

SEQ ID NO: 429574 - RNA, 18 nt, Human
ugacugggcugggagaua

SEQ ID NO: 429575 - RNA, 22 nt, Human
ugacugggcugggagauagaaa

SEQ ID NO: 429576 - RNA, 23 nt, Human
ugagauaaagguguugccaggac

SEQ ID NO: 429577 - RNA, 25 nt, Human
ugaggcagaaucaagaauuuaagcc

SEQ ID NO: 429578 - RNA, 24 nt, Human
ugcuucccagaaagcacuucuaaa

SEQ ID NO: 429579 - RNA, 19 nt, Human
ugugacugggcugggagau

SEQ ID NO: 429580 - RNA, 24 nt, Human
uugagguuuauaggggcugacuuu

SEQ ID NO: 429581 - RNA, 20 nt, Human
aaaagaaugaauaaaaagga

SEQ ID NO: 429582 - RNA, 23 nt, Human
aaacugagaaauugaauagauac

SEQ ID NO: 429583 - RNA, 19 nt, Human
aagcgcugccccacgcccc

SEQ ID NO: 429584 - RNA, 23 nt, Human
aaucccuuucuauucuaauccau

SEQ ID NO: 429585 - RNA, 21 nt, Human
acagcaaccuuuaaauuuucu

SEQ ID NO: 429586 - RNA, 22 nt, Human
accaagcgcugccccacgcccc

SEQ ID NO: 429587 - RNA, 18 nt, Human
aggcaacccccugccccg

SEQ ID NO: 429588 - RNA, 21 nt, Human
auagacacuuuccuaaaauuu

SEQ ID NO: 429589 - RNA, 21 nt, Human
cacacuuuucacuauauauca

SEQ ID NO: 429590 - RNA, 19 nt, Human
cagaacaaauuugagacac

SEQ ID NO: 429591 - RNA, 21 nt, Human
cauaacagcguacauuccaaa

SEQ ID NO: 429592 - RNA, 22 nt, Human
cauccauaaucccuuucuauuc

SEQ ID NO: 429593 - RNA, 18 nt, Human
cauuccauuuacucuuua

SEQ ID NO: 429594 - RNA, 24 nt, Human
cauuuacucuuuauggaaaaagag

SEQ ID NO: 429595 - RNA, 18 nt, Human
cccgcagcccgggcuggg

SEQ ID NO: 429596 - RNA, 22 nt, Human
ccugccccgauucugcaacacc

SEQ ID NO: 429597 - RNA, 21 nt, Human
cgccccuaccaaccugggcgu

SEQ ID NO: 429598 - RNA, 19 nt, Human
cgccucagugccuagcacg

SEQ ID NO: 429599 - RNA, 21 nt, Human
cggcccgacagcaagcguccg

SEQ ID NO: 429600 - RNA, 24 nt, Human
cuaaaauaugguuuuccagccuaa

SEQ ID NO: 429601 - RNA, 18 nt, Human
cuccccuagucagcaucc

SEQ ID NO: 429602 - RNA, 18 nt, Human
cuggcccgcagcccgggc

SEQ ID NO: 429603 - RNA, 18 nt, Human
cuuucccccuuucuuuuc

SEQ ID NO: 429604 - RNA, 19 nt, Human
cuuucccccuuucuuuucc

SEQ ID NO: 429605 - RNA, 18 nt, Human
gaagaucauguaguaaaa

SEQ ID NO: 429606 - RNA, 18 nt, Human
gccagguugaaaagucgu

SEQ ID NO: 429607 - RNA, 18 nt, Human
gcccgcagcccgggcugg

SEQ ID NO: 429608 - RNA, 23 nt, Human
gcccgcagcccgggcugggccug

SEQ ID NO: 429609 - RNA, 19 nt, Human
gcuggcccgcagcccgggc

SEQ ID NO: 429610 - RNA, 18 nt, Human
gggcugggccugucaccg

SEQ ID NO: 429611 - RNA, 21 nt, Human
uaaaagaaugaauaaaaagga

SEQ ID NO: 429612 - RNA, 18 nt, Human
uaaaaugaugcacuaaaa

SEQ ID NO: 429613 - RNA, 21 nt, Human
uaacagcguacauuccaaaaa

SEQ ID NO: 429614 - RNA, 25 nt, Human
uaaguucuaaacacuacagcaaccu

SEQ ID NO: 429615 - RNA, 22 nt, Human
uagacuuucccccuuucuuuuc

SEQ ID NO: 429616 - RNA, 29 nt, Human
ucauuuaucauagcauaacagcguacauu

SEQ ID NO: 429617 - RNA, 25 nt, Human
uccauaaucccuuucuauucuaauc

SEQ ID NO: 429618 - RNA, 26 nt, Human
uccauaaucccuuucuauucuaaucc

SEQ ID NO: 429619 - RNA, 18 nt, Human
ucggcccgacagcaagcg

SEQ ID NO: 429620 - RNA, 20 nt, Human
ucuagcacuggcaguuggcu

SEQ ID NO: 429621 - RNA, 18 nt, Human
ugagugcuuucugcaagg

SEQ ID NO: 429622 - RNA, 18 nt, Human
ugauucaggucugagugc

SEQ ID NO: 429623 - RNA, 19 nt, Human
ugccccacgccccuaccaa

SEQ ID NO: 429624 - RNA, 18 nt, Human
ugcucggcccgacagcaa

SEQ ID NO: 429625 - RNA, 20 nt, Human
uuccaaaaaggaaggcccaa

SEQ ID NO: 429626 - RNA, 24 nt, Human
uucuuccaacuacauguacuaccu

SEQ ID NO: 429627 - RNA, 23 nt, Human
uucuuuuccagaacaaauuugag

SEQ ID NO: 429628 - RNA, 21 nt, Human
uuuauaaaaucuucacaugua

SEQ ID NO: 429629 - RNA, 19 nt, Human
uuucccacacuuuucacua

SEQ ID NO: 429630 - RNA, 21 nt, Human
aaaaggacaaacuaaaguaaa

SEQ ID NO: 429631 - RNA, 24 nt, Human
aacaaaaggacaaacuaaaguaaa

SEQ ID NO: 429632 - RNA, 20 nt, Human
aacaugcauaaacauacaca

SEQ ID NO: 429633 - RNA, 18 nt, Human
aacuaaagcuuaaaacag

SEQ ID NO: 429634 - RNA, 22 nt, Human
aacugauuauaaaacuccaaac

SEQ ID NO: 429635 - RNA, 20 nt, Human
aacuggacuuccagcgcgcc

SEQ ID NO: 429636 - RNA, 24 nt, Human
aagcacaaauucuauuggcaaaac

SEQ ID NO: 429637 - RNA, 20 nt, Human
aaggcaguuucuaaauccac

SEQ ID NO: 429638 - RNA, 21 nt, Human
accagaccuaacgcagggagc

SEQ ID NO: 429639 - RNA, 21 nt, Human
acccugagcuccccucccccu

SEQ ID NO: 429640 - RNA, 19 nt, Human
aggagcauacuagaucccc

SEQ ID NO: 429641 - RNA, 22 nt, Human
auaugcaauugaauuguuaauu

SEQ ID NO: 429642 - RNA, 25 nt, Human
caaacuaaaguaaauaucuccccua

SEQ ID NO: 429643 - RNA, 21 nt, Human
caacacagcaaaaugcugaug

SEQ ID NO: 429644 - RNA, 24 nt, Human
caauguaaaugcauuagaccagga

SEQ ID NO: 429645 - RNA, 22 nt, Human
cagaccuaacgcagggagccga

SEQ ID NO: 429646 - RNA, 27 nt, Human
caucccguuccucuggaacuugaacac

SEQ ID NO: 429647 - RNA, 24 nt, Human
ccagaccuaacgcagggagccgaa

SEQ ID NO: 429648 - RNA, 22 nt, Human
ccccucccccuauagcgaucca

SEQ ID NO: 429649 - RNA, 19 nt, Human
cccugagcuccccuccccc

SEQ ID NO: 429650 - RNA, 23 nt, Human
ccuuugaaauaaucuacuccaaa

SEQ ID NO: 429651 - RNA, 18 nt, Human
cuaaagcuuaaaacagua

SEQ ID NO: 429652 - RNA, 20 nt, Human
cugcaacacgcugagguugu

SEQ ID NO: 429653 - RNA, 22 nt, Human
gccaccagaccuaacgcaggga

SEQ ID NO: 429654 - RNA, 19 nt, Human
uaaacaauguaaaugcauu

SEQ ID NO: 429655 - RNA, 19 nt, Human
uaaacccauucaagaaaau

SEQ ID NO: 429656 - RNA, 20 nt, Human
uaaaugcauuagaccaggag

SEQ ID NO: 429657 - RNA, 28 nt, Human
uacccugagcuccccucccccuauagcc

SEQ ID NO: 429658 - RNA, 23 nt, Human
ucaguacuuaacaaaaggacaaa

SEQ ID NO: 429659 - RNA, 23 nt, Human
uccaaacuaccuuugaaauaauc

SEQ ID NO: 429660 - RNA, 18 nt, Human
uccacacacucugauccc

SEQ ID NO: 429661 - RNA, 22 nt, Human
ucugcaacacgcugagguuguc

SEQ ID NO: 429662 - RNA, 22 nt, Human
ugaaauaaucuacuccaaaucc

SEQ ID NO: 429663 - RNA, 22 nt, Human
ugaccgccaccagaccuaacgc

SEQ ID NO: 429664 - RNA, 19 nt, Human
ugagcuccccucccccuau

SEQ ID NO: 429665 - RNA, 27 nt, Human
ugcaacacagcaaaaugcugauguaua

SEQ ID NO: 429666 - RNA, 22 nt, Human
uuacugaguuaggcuauuauau

SEQ ID NO: 429667 - RNA, 18 nt, Human
aaaaacauuugggcuuug

SEQ ID NO: 429668 - RNA, 20 nt, Human
aaaaaggcacucccaaaggu

SEQ ID NO: 429669 - RNA, 19 nt, Human
aaaacaaaaaaggcacucc

SEQ ID NO: 429670 - RNA, 18 nt, Human
aaaaccaaugcaauacca

SEQ ID NO: 429671 - RNA, 18 nt, Human
aaaaggcacucccaaagg

SEQ ID NO: 429672 - RNA, 20 nt, Human
aaacaaaaaaggcacuccca

SEQ ID NO: 429673 - RNA, 23 nt, Human
aaacaaaaaaggcacucccaaag

SEQ ID NO: 429674 - RNA, 21 nt, Human
aaaccaaugcaauaccaaaau

SEQ ID NO: 429675 - RNA, 21 nt, Human
aacaauaucuuccuccacuuu

SEQ ID NO: 429676 - RNA, 24 nt, Human
aaccaaugcaauaccaaaauaucu

SEQ ID NO: 429677 - RNA, 19 nt, Human
aagaacaauaucuuccucc

SEQ ID NO: 429678 - RNA, 19 nt, Human
aagcgaaaaacaaaacagg

SEQ ID NO: 429679 - RNA, 20 nt, Human
acaaaaaaggcacucccaaa

SEQ ID NO: 429680 - RNA, 20 nt, Human
acauggugacagaagacucu

SEQ ID NO: 429681 - RNA, 24 nt, Human
accaaugcaauaccaaaauaucuc

SEQ ID NO: 429682 - RNA, 18 nt, Human
agccaaacauaucaugga

SEQ ID NO: 429683 - RNA, 23 nt, Human
aggcauuggaacugccuuuaacu

SEQ ID NO: 429684 - RNA, 21 nt, Human
agggauaagcucauucacaua

SEQ ID NO: 429685 - RNA, 23 nt, Human
auaggggcaggaauugggggcgg

SEQ ID NO: 429686 - RNA, 21 nt, Human
caaaaaaggcacucccaaagg

SEQ ID NO: 429687 - RNA, 21 nt, Human
caaagcgaaaaacaaaacagg

SEQ ID NO: 429688 - RNA, 18 nt, Human
cacaauaugacaugguga

SEQ ID NO: 429689 - RNA, 22 nt, Human
cacaauaugacauggugacaga

SEQ ID NO: 429690 - RNA, 23 nt, Human
cagcuuccuagcauagacuccuu

SEQ ID NO: 429691 - RNA, 24 nt, Human
cauaggacuacaaauaucucucac

SEQ ID NO: 429692 - RNA, 22 nt, Human
ccuccacuuuuuuuggguccau

SEQ ID NO: 429693 - RNA, 21 nt, Human
cucacagguaggagggcacaa

SEQ ID NO: 429694 - RNA, 18 nt, Human
cucagcuuccuagcauag

SEQ ID NO: 429695 - RNA, 22 nt, Human
cugaaagacccacaauaugaca

SEQ ID NO: 429696 - RNA, 20 nt, Human
cuuccuagcauagacuccag

SEQ ID NO: 429697 - RNA, 19 nt, Human
cuuucauaugcaccugguu

SEQ ID NO: 429698 - RNA, 20 nt, Human
cuuucauaugcaccugguug

SEQ ID NO: 429699 - RNA, 24 nt, Human
gaaacuauuugccugaggcccaag

SEQ ID NO: 429700 - RNA, 18 nt, Human
gaggaucccuggcugggu

SEQ ID NO: 429701 - RNA, 21 nt, Human
gcauuggaacugccuuuaacu

SEQ ID NO: 429702 - RNA, 22 nt, Human
gccaaacauaucauggaacugg

SEQ ID NO: 429703 - RNA, 18 nt, Human
ggggcggccucacggaaa

SEQ ID NO: 429704 - RNA, 21 nt, Human
uaauagguuuauaauaaccau

SEQ ID NO: 429705 - RNA, 23 nt, Human
uaauauguacacuuucauaugca

SEQ ID NO: 429706 - RNA, 23 nt, Human
uaaucacugggacuuuggcaugc

SEQ ID NO: 429707 - RNA, 19 nt, Human
uaauugcaugcaaaaccua

SEQ ID NO: 429708 - RNA, 20 nt, Human
uaggggcaggaauugggggc

SEQ ID NO: 429709 - RNA, 21 nt, Human
uaucauggaacugaaagaccc

SEQ ID NO: 429710 - RNA, 28 nt, Human
ucacuaaaucugauccauguugagccau

SEQ ID NO: 429711 - RNA, 20 nt, Human
ucacugggacuuuggcaugc

SEQ ID NO: 429712 - RNA, 21 nt, Human
ucauagaucuggggaaccauc

SEQ ID NO: 429713 - RNA, 19 nt, Human
ucauggaacugaaagaccc

SEQ ID NO: 429714 - RNA, 20 nt, Human
ucucucacagguaggagggc

SEQ ID NO: 429715 - RNA, 21 nt, Human
ugaaaaacaaaaaaggcacuc

SEQ ID NO: 429716 - RNA, 24 nt, Human
ugaaaaacaaaaaaggcacuccca

SEQ ID NO: 429717 - RNA, 22 nt, Human
ugcuccagcucccuuauacuaa

SEQ ID NO: 429718 - RNA, 20 nt, Human
uggugaggccuacccggcug

SEQ ID NO: 429719 - RNA, 23 nt, Human
uuaaucacugggacuuuggcauu

SEQ ID NO: 429720 - RNA, 20 nt, Human
uuaaugguccacccauuuca

SEQ ID NO: 429721 - RNA, 22 nt, Human
uucaaagcgaaaaacaaaacag

SEQ ID NO: 429722 - RNA, 20 nt, Human
uuuagaaacuauuugccuga

SEQ ID NO: 429723 - RNA, 22 nt, Human
uuuccacuaucagcugcuccag

SEQ ID NO: 429724 - RNA, 22 nt, Human
uuuuccacuaucagcugcucca

SEQ ID NO: 429725 - RNA, 24 nt, Human
uuuuccacuaucagcugcuccagc

SEQ ID NO: 429726 - RNA, 25 nt, Human
uuuuuuggguccaucuugaaaaaca

SEQ ID NO: 429727 - RNA, 24 nt, Human
uuuuuuuucaaagcgaaaaacaaa

SEQ ID NO: 429728 - RNA, 23 nt, Human
uuuuuuuuuuuuuuuuuucaaag

SEQ ID NO: 429729 - RNA, 18 nt, Human
agagccugaaaagcucag

SEQ ID NO: 429730 - RNA, 21 nt, Human
agccugaaaagcucaggaagu

SEQ ID NO: 429731 - RNA, 25 nt, Human
uaccuucuuuaucuucuuaagagaa

SEQ ID NO: 429732 - RNA, 19 nt, Human
uacuuugugaguugcagag

SEQ ID NO: 429733 - RNA, 21 nt, Human
uuuaucuucuuaagagaagac

SEQ ID NO: 429734 - RNA, 23 nt, Human
aaagagaaaacaguagcuucaaa

SEQ ID NO: 429735 - RNA, 24 nt, Human
aaggaagaaagaggcauuuucuag

SEQ ID NO: 429736 - RNA, 21 nt, Human
acagcuuaaaagguacccucc

SEQ ID NO: 429737 - RNA, 20 nt, Human
accuugaacagcuuaaaagg

SEQ ID NO: 429738 - RNA, 21 nt, Human
accuuggaggcgcuugcgaga

SEQ ID NO: 429739 - RNA, 23 nt, Human
agaaagagguaaaaugaacaaaa

SEQ ID NO: 429740 - RNA, 22 nt, Human
aggcgcuugcgagacccggaac

SEQ ID NO: 429741 - RNA, 20 nt, Human
cacacaacuuggguggugau

SEQ ID NO: 429742 - RNA, 20 nt, Human
cauuuucuagucucaaccug

SEQ ID NO: 429743 - RNA, 20 nt, Human
ccggcccggcguugcuagaa

SEQ ID NO: 429744 - RNA, 21 nt, Human
gagacccggaacgcgcaagga

SEQ ID NO: 429745 - RNA, 18 nt, Human
gcaaggagggagaggggg

SEQ ID NO: 429746 - RNA, 19 nt, Human
gcggcacgaacaaugcccc

SEQ ID NO: 429747 - RNA, 18 nt, Human
ggcauguuggcuguggca

SEQ ID NO: 429748 - RNA, 20 nt, Human
gggcauguuggcuguggcag

SEQ ID NO: 429749 - RNA, 19 nt, Human
guggugaucuggaaaacuu

SEQ ID NO: 429750 - RNA, 24 nt, Human
uaaaagguacccuccagcuggagc

SEQ ID NO: 429751 - RNA, 23 nt, Human
uaagaaagagguaaaaugaacaa

SEQ ID NO: 429752 - RNA, 20 nt, Human
uaagagggacacagcuagua

SEQ ID NO: 429753 - RNA, 18 nt, Human
uagaagcgcggcacgaac

SEQ ID NO: 429754 - RNA, 20 nt, Human
uagaagcgcggcacgaacaa

SEQ ID NO: 429755 - RNA, 24 nt, Human
uagcagccaucucaaaaaaauaaa

SEQ ID NO: 429756 - RNA, 21 nt, Human
uagcuucaaacacccaacuuu

SEQ ID NO: 429757 - RNA, 21 nt, Human
uucaagacaaaccuuggaggc

SEQ ID NO: 429758 - RNA, 21 nt, Human
uugaccuugaacagcuuaaaa

SEQ ID NO: 429759 - RNA, 23 nt, Human
uuuuuuuuuuuuuuuuugggcau

SEQ ID NO: 429760 - RNA, 24 nt, Human
uuuuuuuuuuuuuuuuuuuuuggg

SEQ ID NO: 429761 - RNA, 21 nt, Human
aucuuuuaguaugaacucuag

SEQ ID NO: 429762 - RNA, 22 nt, Human
auuccuuucuccuucaaauccu

SEQ ID NO: 429763 - RNA, 19 nt, Human
cugaaaguuuaagcaacug

SEQ ID NO: 429764 - RNA, 23 nt, Human
cugaugcaagucuuccaucuagu

SEQ ID NO: 429765 - RNA, 20 nt, Human
cuggccuccagagagccugg

SEQ ID NO: 429766 - RNA, 20 nt, Human
gucugaacucugauguaaag

SEQ ID NO: 429767 - RNA, 21 nt, Human
gugcucuauuccuuucuccuu

SEQ ID NO: 429768 - RNA, 21 nt, Human
ucuccuucaaauccuccauug

SEQ ID NO: 429769 - RNA, 24 nt, Human
ucucuguagacucaacacagggau

SEQ ID NO: 429770 - RNA, 20 nt, Human
ugaacaaauguuauuccaca

SEQ ID NO: 429771 - RNA, 21 nt, Human
ugaacucuaguguuuucuaag

SEQ ID NO: 429772 - RNA, 21 nt, Human
ugcucuggagacuuauauuuc

SEQ ID NO: 429773 - RNA, 25 nt, Human
uguaaagugggaugcgagcagauac

SEQ ID NO: 429774 - RNA, 20 nt, Human
uguagacucaacacagggau

SEQ ID NO: 429775 - RNA, 20 nt, Human
ugucucuguagacucaacac

SEQ ID NO: 429776 - RNA, 22 nt, Human
uucuccuucaaauccuccauug

SEQ ID NO: 429777 - RNA, 22 nt, Human
uucucuacaaauuuucugaaag

SEQ ID NO: 429778 - RNA, 24 nt, Human
aaacaaaaaccccagccuauuagu

SEQ ID NO: 429779 - RNA, 24 nt, Human
aaacaaaacaaaaaccccagccua

SEQ ID NO: 429780 - RNA, 20 nt, Human
aaacaaaacaaaaccccaaa

SEQ ID NO: 429781 - RNA, 21 nt, Human
aaacaaaacaaaaccccaaaa

SEQ ID NO: 429782 - RNA, 24 nt, Human
aaaccaaacaaaacaaaaccccaa

SEQ ID NO: 429783 - RNA, 25 nt, Human
aaaccaaacaaaacaaaaccccaaa

SEQ ID NO: 429784 - RNA, 22 nt, Human
aaaccccaaaacaaaacaaaaa

SEQ ID NO: 429785 - RNA, 21 nt, Human
aacaaaacaaaaccccaaaac

SEQ ID NO: 429786 - RNA, 23 nt, Human
aacaaaacaaaaccccaaaacaa

SEQ ID NO: 429787 - RNA, 19 nt, Human
aaccccaaaacaaaacaaa

SEQ ID NO: 429788 - RNA, 22 nt, Human
aaccuccccucccccggcccac

SEQ ID NO: 429789 - RNA, 22 nt, Human
aaccuuguaaggcuucaguaac

SEQ ID NO: 429790 - RNA, 21 nt, Human
aagagcccccuuccaaggaag

SEQ ID NO: 429791 - RNA, 23 nt, Human
aaggaugcaccagacagggcuga

SEQ ID NO: 429792 - RNA, 20 nt, Human
acaaaaccccaaaacaaaac

SEQ ID NO: 429793 - RNA, 24 nt, Human
acaaaaccccaaaacaaaacaaaa

SEQ ID NO: 429794 - RNA, 22 nt, Human
acaaccaucugguuaagaaccc

SEQ ID NO: 429795 - RNA, 21 nt, Human
accccaaaacaaaacaaaaac

SEQ ID NO: 429796 - RNA, 25 nt, Human
accccaaaacaaaacaaaaacccca

SEQ ID NO: 429797 - RNA, 23 nt, Human
accccagccuauuaguuuacagu

SEQ ID NO: 429798 - RNA, 24 nt, Human
acuaaaauguaaaaccaaacaaaa

SEQ ID NO: 429799 - RNA, 19 nt, Human
agaaggaguaaacuugaaa

SEQ ID NO: 429800 - RNA, 21 nt, Human
agacacugcaaguucuaaacu

SEQ ID NO: 429801 - RNA, 19 nt, Human
agccacaaaugagaaaagg

SEQ ID NO: 429802 - RNA, 18 nt, Human
auuccgaaagacacugca

SEQ ID NO: 429803 - RNA, 19 nt, Human
caaaacaaaacaaaaaccc

SEQ ID NO: 429804 - RNA, 21 nt, Human
caaaacaaaacaaaaacccca

SEQ ID NO: 429805 - RNA, 24 nt, Human
caaaacaaaaccccaaaacaaaac

SEQ ID NO: 429806 - RNA, 20 nt, Human
caaaacaaaaccccaaaacc

SEQ ID NO: 429807 - RNA, 21 nt, Human
caaaaccccaaaacaaaacaa

SEQ ID NO: 429808 - RNA, 20 nt, Human
caaaacucaaaacagaagga

SEQ ID NO: 429809 - RNA, 25 nt, Human
caaaacucaaaacagaaggaguaaa

SEQ ID NO: 429810 - RNA, 25 nt, Human
caaaacucaaaacagaaggaguaaa

SEQ ID NO: 429811 - RNA, 33 nt, Human
caaacaaaacaaaaccccaaaacaaaacaaagg

SEQ ID NO: 429812 - RNA, 19 nt, Human
cacugcaaguucuaaacuu

SEQ ID NO: 429813 - RNA, 26 nt, Human
cacugcuacaaaacucaaaacagaag

SEQ ID NO: 429814 - RNA, 19 nt, Human
cagcaugacuaucuaaugc

SEQ ID NO: 429815 - RNA, 24 nt, Human
caguaacuaaaauguaaaaccaaa

SEQ ID NO: 429816 - RNA, 19 nt, Human
ccaaaacaaaacaaaaacc

SEQ ID NO: 429817 - RNA, 22 nt, Human
ccaaaacaaaacaaaaacccca

SEQ ID NO: 429818 - RNA, 22 nt, Human
cccuuccaaggaagcuuugcaa

SEQ ID NO: 429819 - RNA, 20 nt, Human
ccucccccggcccacccccc

SEQ ID NO: 429820 - RNA, 21 nt, Human
cgugacuucaaauguuccaug

SEQ ID NO: 429821 - RNA, 23 nt, Human
cuacaaaacucaaaacagaagga

SEQ ID NO: 429822 - RNA, 23 nt, Human
cucacuuucugccaaggaugcac

SEQ ID NO: 429823 - RNA, 25 nt, Human
cuuucacucacagauuauuuacaug

SEQ ID NO: 429824 - RNA, 26 nt, Human
gaaccuccccucccccggcccacccc

SEQ ID NO: 429825 - RNA, 21 nt, Human
gaacgaaccuccccucccccg

SEQ ID NO: 429826 - RNA, 25 nt, Human
gaacgaaccuccccucccccggccc

SEQ ID NO: 429827 - RNA, 18 nt, Human
gcggaacgaaccuccccu

SEQ ID NO: 429828 - RNA, 18 nt, Human
guaaaaccaaacaaaaca

SEQ ID NO: 429829 - RNA, 20 nt, Human
guauuuguuaaguauccuaa

SEQ ID NO: 429830 - RNA, 21 nt, Human
gucccgguucuggcugcgcuc

SEQ ID NO: 429831 - RNA, 24 nt, Human
gugcuacccauacacaaccaucug

SEQ ID NO: 429832 - RNA, 22 nt, Human
uaaaaauuccgaaagacacugc

SEQ ID NO: 429833 - RNA, 23 nt, Human
uaaaaccaaacaaaacaaaaccc

SEQ ID NO: 429834 - RNA, 18 nt, Human
ucccccggcccacccccc

SEQ ID NO: 429835 - RNA, 22 nt, Human
ucccccggcccaccccccuucg

SEQ ID NO: 429836 - RNA, 21 nt, Human
uccccucccccggcccacccc

SEQ ID NO: 429837 - RNA, 18 nt, Human
uccgaaagacacugcaag

SEQ ID NO: 429838 - RNA, 21 nt, Human
uccgcggaacgaaccuccccu

SEQ ID NO: 429839 - RNA, 22 nt, Human
ucuaacaauggggguguuuucc

SEQ ID NO: 429840 - RNA, 24 nt, Human
ucuaacaauggggguguuuuccuc

SEQ ID NO: 429841 - RNA, 20 nt, Human
ucuacauaaccuuguaaggc

SEQ ID NO: 429842 - RNA, 19 nt, Human
ucugccaaggaugcaccag

SEQ ID NO: 429843 - RNA, 25 nt, Human
ugacuaucuaaugcuguuuuauccc

SEQ ID NO: 429844 - RNA, 21 nt, Human
ugaugcagaaagccacaaaug

SEQ ID NO: 429845 - RNA, 23 nt, Human
ugcuacccauacacaaccaucug

SEQ ID NO: 429846 - RNA, 18 nt, Human
uggcugcgcuccgcggaa

SEQ ID NO: 429847 - RNA, 22 nt, Human
aaaacaaacaaaccaucgagca

SEQ ID NO: 429848 - RNA, 21 nt, Human
aaaagcugggacacaagagaa

SEQ ID NO: 429849 - RNA, 21 nt, Human
aaacaaacaaaccaucgagca

SEQ ID NO: 429850 - RNA, 24 nt, Human
aaacaaacaaaccaucgagcauaa

SEQ ID NO: 429851 - RNA, 18 nt, Human
aaacaaaccaucgagcau

SEQ ID NO: 429852 - RNA, 23 nt, Human
aaauuauaaaacaaacaaaccau

SEQ ID NO: 429853 - RNA, 22 nt, Human
aacaaaccaucgagcauaaugg

SEQ ID NO: 429854 - RNA, 21 nt, Human
acaggacaacggcagccagag

SEQ ID NO: 429855 - RNA, 18 nt, Human
acugcugugauaucauuc

SEQ ID NO: 429856 - RNA, 26 nt, Human
agugccuacuucauaugguuggugac

SEQ ID NO: 429857 - RNA, 20 nt, Human
aguucuccagcaucaccucc

SEQ ID NO: 429858 - RNA, 22 nt, Human
auaaugguaaagagaauagauu

SEQ ID NO: 429859 - RNA, 22 nt, Human
auccuauugucugacaaaccuc

SEQ ID NO: 429860 - RNA, 19 nt, Human
auggugccucguguccagc

SEQ ID NO: 429861 - RNA, 19 nt, Human
auucugccuuucccuccug

SEQ ID NO: 429862 - RNA, 21 nt, Human
caaucuaguugagaggauaau

SEQ ID NO: 429863 - RNA, 18 nt, Human
cacaggguccuggcgacu

SEQ ID NO: 429864 - RNA, 20 nt, Human
cacugugugagauacaaaga

SEQ ID NO: 429865 - RNA, 21 nt, Human
cacugugugagauacaaagac

SEQ ID NO: 429866 - RNA, 23 nt, Human
cacugugugagauacaaagaccu

SEQ ID NO: 429867 - RNA, 26 nt, Human
cagaguccuccggcacagagugcucc

SEQ ID NO: 429868 - RNA, 18 nt, Human
cagcgcugucgccuuagc

SEQ ID NO: 429869 - RNA, 20 nt, Human
caggacaggacaacggcagc

SEQ ID NO: 429870 - RNA, 27 nt, Human
cagucuagagagacacucucuggccau

SEQ ID NO: 429871 - RNA, 31 nt, Human
caucaaaacaaauguucugaaaaaaaaaaaa

SEQ ID NO: 429872 - RNA, 19 nt, Human
cauggugccucguguccag

SEQ ID NO: 429873 - RNA, 20 nt, Human
ccaagagagggggacuaaca

SEQ ID NO: 429874 - RNA, 18 nt, Human
ccccuacaguucuguaac

SEQ ID NO: 429875 - RNA, 19 nt, Human
cccguggcugaacaggauc

SEQ ID NO: 429876 - RNA, 21 nt, Human
ccuccaguauccgaugggagc

SEQ ID NO: 429877 - RNA, 24 nt, Human
ccuccccuacaguucuguaacacc

SEQ ID NO: 429878 - RNA, 19 nt, Human
ccuuguggacaagggcaga

SEQ ID NO: 429879 - RNA, 21 nt, Human
cuccuuguagaggucccucug

SEQ ID NO: 429880 - RNA, 18 nt, Human
cucugaucauggugccuc

SEQ ID NO: 429881 - RNA, 25 nt, Human
cuuauggucacccugaaguacugcc

SEQ ID NO: 429882 - RNA, 18 nt, Human
cuuccuguaaaacccuua

SEQ ID NO: 429883 - RNA, 24 nt, Human
cuuccuguaaaacccuuagcugag

SEQ ID NO: 429884 - RNA, 22 nt, Human
gacccaugaagaucuaccaucc

SEQ ID NO: 429885 - RNA, 24 nt, Human
gacccaugaagaucuaccauccac

SEQ ID NO: 429886 - RNA, 20 nt, Human
gaccugucuucaagaccugg

SEQ ID NO: 429887 - RNA, 20 nt, Human
gagaacaagauuagugcccc

SEQ ID NO: 429888 - RNA, 21 nt, Human
gcaaauggcagcuuuaagaca

SEQ ID NO: 429889 - RNA, 19 nt, Human
gcagccauucucuccugug

SEQ ID NO: 429890 - RNA, 23 nt, Human
gcaguggaaguaagaggucuaaa

SEQ ID NO: 429891 - RNA, 20 nt, Human
gcugaacaggauccaaaaug

SEQ ID NO: 429892 - RNA, 19 nt, Human
ggaacuggaaggcccaaug

SEQ ID NO: 429893 - RNA, 20 nt, Human
ggcgcagaagcaggacagga

SEQ ID NO: 429894 - RNA, 22 nt, Human
gggaagacggcgccucuucagg

SEQ ID NO: 429895 - RNA, 20 nt, Human
gggccuucgcaaggacuuca

SEQ ID NO: 429896 - RNA, 19 nt, Human
guaacacagcaggaaggga

SEQ ID NO: 429897 - RNA, 23 nt, Human
uaaaacaaacaaaccaucgagcc

SEQ ID NO: 429898 - RNA, 18 nt, Human
uagcaguggaaguaagag

SEQ ID NO: 429899 - RNA, 19 nt, Human
uaguucuccagcaucaccu

SEQ ID NO: 429900 - RNA, 20 nt, Human
uaucauucugccuuucccuc

SEQ ID NO: 429901 - RNA, 19 nt, Human
ucauuuccauggccucccc

SEQ ID NO: 429902 - RNA, 23 nt, Human
uccauggccuccccuacaguucu

SEQ ID NO: 429903 - RNA, 25 nt, Human
ucccucaaugauccuucugauuuuu

SEQ ID NO: 429904 - RNA, 24 nt, Human
uccgaaaaugugugcaaacgccgg

SEQ ID NO: 429905 - RNA, 24 nt, Human
ucgcaaggacuucaucucccagaa

SEQ ID NO: 429906 - RNA, 18 nt, Human
ucuagugucgcgucccuc

SEQ ID NO: 429907 - RNA, 21 nt, Human
ucuagugucgcgucccuccag

SEQ ID NO: 429908 - RNA, 22 nt, Human
ucuagugucgcgucccuccagu

SEQ ID NO: 429909 - RNA, 21 nt, Human
ucuccucagacccaugaagau

SEQ ID NO: 429910 - RNA, 24 nt, Human
ucuccuuguggacaagggcagagu

SEQ ID NO: 429911 - RNA, 22 nt, Human
ucucuccugugugcucuccuug

SEQ ID NO: 429912 - RNA, 25 nt, Human
ucugaagcaucgugaaucucaggcu

SEQ ID NO: 429913 - RNA, 21 nt, Human
uggcugaacaggauccaaaau

SEQ ID NO: 429914 - RNA, 23 nt, Human
uggguagaaugagcaaauggcag

SEQ ID NO: 429915 - RNA, 18 nt, Human
ugucgcgucccuccagua

SEQ ID NO: 429916 - RNA, 24 nt, Human
ugugcaaacgccggcuucccgugg

SEQ ID NO: 429917 - RNA, 18 nt, Human
uuuuuuuuuuuuuuuuug

SEQ ID NO: 429918 - RNA, 24 nt, Human
uuuuuuuuuuuuuuuuuugucauu

SEQ ID NO: 429919 - RNA, 26 nt, Human
aaacauuuuaacauuucugaagaaac

SEQ ID NO: 429920 - RNA, 21 nt, Human
aaaccaacucaaucuauagaa

SEQ ID NO: 429921 - RNA, 20 nt, Human
aagaguugggcaucagugag

SEQ ID NO: 429922 - RNA, 22 nt, Human
acagcaaagugggcauguaucu

SEQ ID NO: 429923 - RNA, 24 nt, Human
acagcaaagugggcauguaucuuu

SEQ ID NO: 429924 - RNA, 19 nt, Human
agaaacagcaaagugggcc

SEQ ID NO: 429925 - RNA, 19 nt, Human
aggugaauuguauuacgaa

SEQ ID NO: 429926 - RNA, 19 nt, Human
auaucuggagaccuacaac

SEQ ID NO: 429927 - RNA, 20 nt, Human
auguaucuuuaauguggagc

SEQ ID NO: 429928 - RNA, 18 nt, Human
caaaaagcaguuauccag

SEQ ID NO: 429929 - RNA, 18 nt, Human
caagccaaagaaucagga

SEQ ID NO: 429930 - RNA, 18 nt, Human
caaugcuugcaauacaaa

SEQ ID NO: 429931 - RNA, 20 nt, Human
cacggugcaggcggcagagc

SEQ ID NO: 429932 - RNA, 18 nt, Human
cagcaaagugggcaugua

SEQ ID NO: 429933 - RNA, 20 nt, Human
cauaucuggagaccuacaac

SEQ ID NO: 429934 - RNA, 21 nt, Human
ccucuuaaaccaacucaaucu

SEQ ID NO: 429935 - RNA, 25 nt, Human
cggcuucugggugucccgguguccu

SEQ ID NO: 429936 - RNA, 23 nt, Human
cucaauucaaaaagcaguuaucc

SEQ ID NO: 429937 - RNA, 20 nt, Human
cuuguguuucaaaggaagug

SEQ ID NO: 429938 - RNA, 20 nt, Human
gagggacccggggccucucg

SEQ ID NO: 429939 - RNA, 21 nt, Human
gcaagucucucuucucaauuc

SEQ ID NO: 429940 - RNA, 25 nt, Human
gugggacaacagaaagcuucucccg

SEQ ID NO: 429941 - RNA, 21 nt, Human
uacaaaguagaccucuuaaac

SEQ ID NO: 429942 - RNA, 25 nt, Human
uacaacucugaggaacagagacaag

SEQ ID NO: 429943 - RNA, 19 nt, Human
uagccacacaccucucucc

SEQ ID NO: 429944 - RNA, 21 nt, Human
ucaaaaagcaguuauccagag

SEQ ID NO: 429945 - RNA, 19 nt, Human
ucaccacucucuuuucuug

SEQ ID NO: 429946 - RNA, 21 nt, Human
ucucuagggcucccgugaaua

SEQ ID NO: 429947 - RNA, 23 nt, Human
ugaauagugcgggucacggugca

SEQ ID NO: 429948 - RNA, 23 nt, Human
ugcgggucacggugcaggcggca

SEQ ID NO: 429949 - RNA, 24 nt, Human
uggagaccuacaacucugaggaac

SEQ ID NO: 429950 - RNA, 18 nt, Human
uggcagagggacccgggg

SEQ ID NO: 429951 - RNA, 19 nt, Human
uggcagagggacccggggc

SEQ ID NO: 429952 - RNA, 25 nt, Human
ugugacugaugccuuccuuuucugu

SEQ ID NO: 429953 - RNA, 21 nt, Human
uguuucaaaggaagugggaca

SEQ ID NO: 429954 - RNA, 18 nt, Human
uuaacauuucugaagaaa

SEQ ID NO: 429955 - RNA, 24 nt, Human
uuauccagagguucuuucaccacu

SEQ ID NO: 429956 - RNA, 20 nt, Human
uuuccagccauaacaacauu

SEQ ID NO: 429957 - RNA, 22 nt, Human
aaaaagccuagaugcugaggua

SEQ ID NO: 429958 - RNA, 21 nt, Human
agagccaagcucucggggccu

SEQ ID NO: 429959 - RNA, 19 nt, Human
agcagacuccagauucauc

SEQ ID NO: 429960 - RNA, 19 nt, Human
aggcagcaccaucagaccc

SEQ ID NO: 429961 - RNA, 19 nt, Human
auacuuucaauagacacaa

SEQ ID NO: 429962 - RNA, 19 nt, Human
caccagaacacaguuccag

SEQ ID NO: 429963 - RNA, 19 nt, Human
cagaacuacuuaugaaagc

SEQ ID NO: 429964 - RNA, 18 nt, Human
cagcaccaucagacccag

SEQ ID NO: 429965 - RNA, 24 nt, Human
ccacacaccacacucguuucgcgg

SEQ ID NO: 429966 - RNA, 19 nt, Human
ccagaacacaguuccagau

SEQ ID NO: 429967 - RNA, 22 nt, Human
ccagagccaccucuuacuagag

SEQ ID NO: 429968 - RNA, 25 nt, Human
ccccucgcccuuccgagugcccuca

SEQ ID NO: 429969 - RNA, 19 nt, Human
ccccugagcguuugcuggg

SEQ ID NO: 429970 - RNA, 20 nt, Human
ccuuccaaguaagcagacuc

SEQ ID NO: 429971 - RNA, 24 nt, Human
cgagcccuccccucgcccuuccga

SEQ ID NO: 429972 - RNA, 23 nt, Human
cgggagagauagaaaaacuaggc

SEQ ID NO: 429973 - RNA, 20 nt, Human
cucgcccuuccgagugcccu

SEQ ID NO: 429974 - RNA, 18 nt, Human
cuuaugaaagcucucagg

SEQ ID NO: 429975 - RNA, 20 nt, Human
gagcccuccccucgcccuuc

SEQ ID NO: 429976 - RNA, 20 nt, Human
gcucucagguugaggcagca

SEQ ID NO: 429977 - RNA, 24 nt, Human
gcucucggggccucugcagccccu

SEQ ID NO: 429978 - RNA, 20 nt, Human
ggcucagagacucaggcucc

SEQ ID NO: 429979 - RNA, 20 nt, Human
uaacuucaaaaaggaaagcu

SEQ ID NO: 429980 - RNA, 20 nt, Human
ucaacuguuuuccuauauuc

SEQ ID NO: 429981 - RNA, 18 nt, Human
ucagaacuacuuaugaaa

SEQ ID NO: 429982 - RNA, 23 nt, Human
ucagacccagaaaggguucccag

SEQ ID NO: 429983 - RNA, 25 nt, Human
uccaaaguaaacaauuccuuucaac

SEQ ID NO: 429984 - RNA, 22 nt, Human
ucugcagccccugagcguuugc

SEQ ID NO: 429985 - RNA, 26 nt, Human
ugaccuguacauuaucauauaacuuc

SEQ ID NO: 429986 - RNA, 21 nt, Human
ugaggcagcaccaucagaccc

SEQ ID NO: 429987 - RNA, 19 nt, Human
ugagguauagcccuugaaa

SEQ ID NO: 429988 - RNA, 26 nt, Human
ugccuuccaaguaagcagacuccuuu

SEQ ID NO: 429989 - RNA, 20 nt, Human
uucgcggggccuccagagcc

SEQ ID NO: 429990 - RNA, 21 nt, Human
uucucaaguaugaauccccau

SEQ ID NO: 429991 - RNA, 19 nt, Human
uugcuggggacggcucaga

SEQ ID NO: 429992 - RNA, 23 nt, Human
agaaggcauuuccugaugaggau

SEQ ID NO: 429993 - RNA, 19 nt, Human
agccccucucuccucccuc

SEQ ID NO: 429994 - RNA, 24 nt, Human
agcuuagaaggcauuuccugaugg

SEQ ID NO: 429995 - RNA, 18 nt, Human
agcuucuggccaggagcc

SEQ ID NO: 429996 - RNA, 19 nt, Human
aggagccgggguggaggca

SEQ ID NO: 429997 - RNA, 19 nt, Human
cagcucccuucccgagccc

SEQ ID NO: 429998 - RNA, 23 nt, Human
caggagccgggguggaggcagag

SEQ ID NO: 429999 - RNA, 18 nt, Human
ccaucgccaugccucacc

SEQ ID NO: 430000 - RNA, 23 nt, Human
ccccaucgccaugccucacccca

SEQ ID NO: 430001 - RNA, 19 nt, Human
ccccaugcccucaccgccc

SEQ ID NO: 430002 - RNA, 20 nt, Human
ccccaugcccucaccgcccc

SEQ ID NO: 430003 - RNA, 21 nt, Human
cccccgggaagggagucucca

SEQ ID NO: 430004 - RNA, 18 nt, Human
ccccgcucccccuuuccu

SEQ ID NO: 430005 - RNA, 18 nt, Human
ccccugaagguaccgccu

SEQ ID NO: 430006 - RNA, 23 nt, Human
cccugaagguaccgccuccccca

SEQ ID NO: 430007 - RNA, 25 nt, Human
cccugggcgccccgcuccucgggag

SEQ ID NO: 430008 - RNA, 19 nt, Human
ccgggaagggagucuccac

SEQ ID NO: 430009 - RNA, 23 nt, Human
ccgggguggaggcagagggggca

SEQ ID NO: 430010 - RNA, 21 nt, Human
ccgucugcagacauuuucuau

SEQ ID NO: 430011 - RNA, 21 nt, Human
ccucccucggagccuugacuc

SEQ ID NO: 430012 - RNA, 19 nt, Human
ccugcggcagugggggccc

SEQ ID NO: 430013 - RNA, 24 nt, Human
ccugcggcagugggggcccccucc

SEQ ID NO: 430014 - RNA, 22 nt, Human
cgagccccucucuccucccucc

SEQ ID NO: 430015 - RNA, 22 nt, Human
cgccccagcucccuucccgagc

SEQ ID NO: 430016 - RNA, 19 nt, Human
cgccccgcucccccuuucc

SEQ ID NO: 430017 - RNA, 25 nt, Human
cggcagugggggcccccucccccgg

SEQ ID NO: 430018 - RNA, 21 nt, Human
cucaccccaugcccucaccgc

SEQ ID NO: 430019 - RNA, 22 nt, Human
cucccccaucgccaugccucac

SEQ ID NO: 430020 - RNA, 20 nt, Human
cugcccuuucucgcccucgc

SEQ ID NO: 430021 - RNA, 18 nt, Human
cugggcgccccgcucccc

SEQ ID NO: 430022 - RNA, 24 nt, Human
cuucuggccaggagccggggugga

SEQ ID NO: 430023 - RNA, 21 nt, Human
gaaccuccgggggugucuccu

SEQ ID NO: 430024 - RNA, 23 nt, Human
gagccuugacuccaguggggcug

SEQ ID NO: 430025 - RNA, 22 nt, Human
gagcuagaaagaacagcugagu

SEQ ID NO: 430026 - RNA, 23 nt, Human
gcagagggggcaccugcggcagu

SEQ ID NO: 430027 - RNA, 18 nt, Human
gcccugggcgccccgcuc

SEQ ID NO: 430028 - RNA, 18 nt, Human
ggggugucuccuuguccu

SEQ ID NO: 430029 - RNA, 20 nt, Human
guggcccugggcgccccgcu

SEQ ID NO: 430030 - RNA, 23 nt, Human
uaauucgcagagugccugcccuu

SEQ ID NO: 430031 - RNA, 24 nt, Human
uccagcuucuggccaggagccggg

SEQ ID NO: 430032 - RNA, 22 nt, Human
ucccccgggaagggagucucca

SEQ ID NO: 430033 - RNA, 19 nt, Human
ucucgcccucgcccucccc

SEQ ID NO: 430034 - RNA, 21 nt, Human
ucucgcccucgcccuccccca

SEQ ID NO: 430035 - RNA, 20 nt, Human
ugaagguaccgccuccccca

SEQ ID NO: 430036 - RNA, 19 nt, Human
ugacuccugaguguccccu

SEQ ID NO: 430037 - RNA, 19 nt, Human
uggaggcagagggggcacc

SEQ ID NO: 430038 - RNA, 24 nt, Human
uggaggcagagggggcaccugcgg

SEQ ID NO: 430039 - RNA, 24 nt, Human
uucagagcuagaaagaacagcuga

SEQ ID NO: 430040 - RNA, 23 nt, Human
uucccgagccccucucuccuccc

SEQ ID NO: 430041 - RNA, 23 nt, Human
uucgcagagugccugcccuuucu

SEQ ID NO: 430042 - RNA, 20 nt, Human
uuggccaagcccccuccagc

SEQ ID NO: 430043 - RNA, 21 nt, Human
uuucuauuucagagcuagaaa

SEQ ID NO: 430044 - RNA, 24 nt, Human
uuuuuuuuuuuuuuuuuuuucaag

SEQ ID NO: 430045 - RNA, 22 nt, Human
aaaagaagcaggagaaacgagg

SEQ ID NO: 430046 - RNA, 25 nt, Human
aaaagggaggagaaaagaagcagga

SEQ ID NO: 430047 - RNA, 23 nt, Human
aaaaucccucacuuucccaaccc

SEQ ID NO: 430048 - RNA, 20 nt, Human
aaacaugaaaaagaagccau

SEQ ID NO: 430049 - RNA, 19 nt, Human
aaacgaggccaaaaauccc

SEQ ID NO: 430050 - RNA, 22 nt, Human
aaaugcugugaaggcaaacuuu

SEQ ID NO: 430051 - RNA, 20 nt, Human
aagaagcaggagaaacgagg

SEQ ID NO: 430052 - RNA, 21 nt, Human
aagcagacacaaagaugcgac

SEQ ID NO: 430053 - RNA, 23 nt, Human
aagcaggagaaacgaggccaaaa

SEQ ID NO: 430054 - RNA, 18 nt, Human
aggaagcagacacaaaga

SEQ ID NO: 430055 - RNA, 21 nt, Human
aggagaaaagaagcaggagaa

SEQ ID NO: 430056 - RNA, 18 nt, Human
aggagaaacgaggccaaa

SEQ ID NO: 430057 - RNA, 18 nt, Human
aucugaaaugcugugaag

SEQ ID NO: 430058 - RNA, 20 nt, Human
augaaacaugaaaaagaagc

SEQ ID NO: 430059 - RNA, 21 nt, Human
caacaugaggaacucuaaaua

SEQ ID NO: 430060 - RNA, 18 nt, Human
caccaagcuagguugggg

SEQ ID NO: 430061 - RNA, 23 nt, Human
cagaaaagucacaugaccuuggu

SEQ ID NO: 430062 - RNA, 18 nt, Human
cagcccucaccaagcuag

SEQ ID NO: 430063 - RNA, 24 nt, Human
caggagaaacgaggccaaaaaucc

SEQ ID NO: 430064 - RNA, 21 nt, Human
caggcagugguccacagcugg

SEQ ID NO: 430065 - RNA, 21 nt, Human
caguacagaaaagucacauga

SEQ ID NO: 430066 - RNA, 24 nt, Human
caucugaaaugcugugaaggcaaa

SEQ ID NO: 430067 - RNA, 23 nt, Human
caugaaaaagaagccauacagua

SEQ ID NO: 430068 - RNA, 18 nt, Human
ccaaauaauuuuucccau

SEQ ID NO: 430069 - RNA, 24 nt, Human
ccauacaguauaaauugcaacuuc

SEQ ID NO: 430070 - RNA, 23 nt, Human
cccacaggaagcagacacaaaga

SEQ ID NO: 430071 - RNA, 19 nt, Human
cccucacuuucccaaccca

SEQ ID NO: 430072 - RNA, 22 nt, Human
cuaccaccacgucccacaggaa

SEQ ID NO: 430073 - RNA, 18 nt, Human
cucucucucucucucucu

SEQ ID NO: 430074 - RNA, 18 nt, Human
cucucucucucucucucu

SEQ ID NO: 430075 - RNA, 18 nt, Human
cucucucucucucucucu

SEQ ID NO: 430076 - RNA, 18 nt, Human
cucucucucucucucucu

SEQ ID NO: 430077 - RNA, 18 nt, Human
cucucucucucucucucu

SEQ ID NO: 430078 - RNA, 18 nt, Human
cucucucucucucucucu

SEQ ID NO: 430079 - RNA, 18 nt, Human
cucucucucucucucucu

SEQ ID NO: 430080 - RNA, 18 nt, Human
cucucucucucucucucu

SEQ ID NO: 430081 - RNA, 18 nt, Human
cucucucucucucucucu

SEQ ID NO: 430082 - RNA, 18 nt, Human
cucucucucucucucucu

SEQ ID NO: 430083 - RNA, 18 nt, Human
cucucucucucucucucu

SEQ ID NO: 430084 - RNA, 18 nt, Human
cucucucucucucucucu

SEQ ID NO: 430085 - RNA, 18 nt, Human
cucucucucucucucucu

SEQ ID NO: 430086 - RNA, 18 nt, Human
cucucucucucucucucu

SEQ ID NO: 430087 - RNA, 18 nt, Human
cucucucucucucucucu

SEQ ID NO: 430088 - RNA, 18 nt, Human
cucucucucucucucucu

SEQ ID NO: 430089 - RNA, 18 nt, Human
cucucucucucucucucu

SEQ ID NO: 430090 - RNA, 18 nt, Human
cucucucucucucucucu

SEQ ID NO: 430091 - RNA, 18 nt, Human
cucucucucucucucucu

SEQ ID NO: 430092 - RNA, 18 nt, Human
cucucucucucucucucu

SEQ ID NO: 430093 - RNA, 18 nt, Human
cucucucucucucucucu

SEQ ID NO: 430094 - RNA, 18 nt, Human
cucucucucucucucucu

SEQ ID NO: 430095 - RNA, 18 nt, Human
cucucucucucucucucu

SEQ ID NO: 430096 - RNA, 24 nt, Human
gaaacaugaaaaagaagccauaca

SEQ ID NO: 430097 - RNA, 22 nt, Human
gaaccaaauuuacuauacuuca

SEQ ID NO: 430098 - RNA, 23 nt, Human
gaagcaggagaaacgaggccaaa

SEQ ID NO: 430099 - RNA, 18 nt, Human
ggaaacaguuacagcccu

SEQ ID NO: 430100 - RNA, 18 nt, Human
gggugguauguucaugua

SEQ ID NO: 430101 - RNA, 25 nt, Human
uaaacccugcaacaugaggaacucu

SEQ ID NO: 430102 - RNA, 20 nt, Human
uauuccaaauaauuuuuccc

SEQ ID NO: 430103 - RNA, 21 nt, Human
ucaggcagugguccacagcug

SEQ ID NO: 430104 - RNA, 21 nt, Human
ucuaccggcaaaguaaaaggg

SEQ ID NO: 430105 - RNA, 18 nt, Human
ugaaaaagaagccauaca

SEQ ID NO: 430106 - RNA, 21 nt, Human
ugagaaaagguuuaaucucca

SEQ ID NO: 430107 - RNA, 24 nt, Human
ugcaacaugaggaacucuaaauac

SEQ ID NO: 430108 - RNA, 22 nt, Human
aaccaguuucaauucaaaccaa

SEQ ID NO: 430109 - RNA, 22 nt, Human
aagacuagaaugaaauagaaug

SEQ ID NO: 430110 - RNA, 18 nt, Human
acauuaaaaugcacagaa

SEQ ID NO: 430111 - RNA, 22 nt, Human
acggagccugugagaguggacc

SEQ ID NO: 430112 - RNA, 20 nt, Human
agaguggaccgggauggcca

SEQ ID NO: 430113 - RNA, 23 nt, Human
agaguggaccgggauggccaaaa

SEQ ID NO: 430114 - RNA, 23 nt, Human
agaucuccuuuugaagcaaauaa

SEQ ID NO: 430115 - RNA, 24 nt, Human
agcuguuaacuaaaugaacaauau

SEQ ID NO: 430116 - RNA, 21 nt, Human
auaguagguaaagaaaaauac

SEQ ID NO: 430117 - RNA, 22 nt, Human
aucuacacgggugucucugggg

SEQ ID NO: 430118 - RNA, 22 nt, Human
caugucacuuaacggagccugu

SEQ ID NO: 430119 - RNA, 21 nt, Human
ggaguuuuuaggggaguuaag

SEQ ID NO: 430120 - RNA, 22 nt, Human
gguaaagaaaaauacacuauaa

SEQ ID NO: 430121 - RNA, 24 nt, Human
guccuccugagaguucaugucacu

SEQ ID NO: 430122 - RNA, 21 nt, Human
uaaaaugcacagaaaaaaaga

SEQ ID NO: 430123 - RNA, 25 nt, Human
uaaaaugcacagaaaaaaagacuag

SEQ ID NO: 430124 - RNA, 19 nt, Human
uacaaaauugaacacacaa

SEQ ID NO: 430125 - RNA, 22 nt, Human
uagcuucucagucccugacccu

SEQ ID NO: 430126 - RNA, 21 nt, Human
uagggauuuuucuaaagaucu

SEQ ID NO: 430127 - RNA, 25 nt, Human
ugaaaauacaaaauugaacacacaa

SEQ ID NO: 430128 - RNA, 22 nt, Human
ugcccuguccgcuucuggcuca

SEQ ID NO: 430129 - RNA, 19 nt, Human
ugggagagaagccgugaug

SEQ ID NO: 430130 - RNA, 18 nt, Human
uuccuaucuuuuauuagg

SEQ ID NO: 430131 - RNA, 23 nt, Human
uucuaaagaucuccuuuugaagc

SEQ ID NO: 430132 - RNA, 21 nt, Human
uuuaauauauuuaugacugua

SEQ ID NO: 430133 - RNA, 19 nt, Human
aaacagauaagauaauuau

SEQ ID NO: 430134 - RNA, 18 nt, Human
aaacuucuaaagacccca

SEQ ID NO: 430135 - RNA, 18 nt, Human
aaagaccccaaacgcuuc

SEQ ID NO: 430136 - RNA, 22 nt, Human
aacauuuuucaaggaccugcua

SEQ ID NO: 430137 - RNA, 23 nt, Human
aacccucaacucacugccggcuc

SEQ ID NO: 430138 - RNA, 19 nt, Human
aagaguauuguuuggcuuu

SEQ ID NO: 430139 - RNA, 20 nt, Human
aauagguucuuaggaacugc

SEQ ID NO: 430140 - RNA, 23 nt, Human
acagauuuucuauccaaugauuu

SEQ ID NO: 430141 - RNA, 22 nt, Human
acagcaauacauacuucuccca

SEQ ID NO: 430142 - RNA, 18 nt, Human
accuucuuaaaagggcug

SEQ ID NO: 430143 - RNA, 23 nt, Human
agacauuaaaauaaaucugagcu

SEQ ID NO: 430144 - RNA, 18 nt, Human
aggaaucccugaccucgc

SEQ ID NO: 430145 - RNA, 21 nt, Human
aggaaucccugaccucgccga

SEQ ID NO: 430146 - RNA, 24 nt, Human
aggaaucccugaccucgccgaacc

SEQ ID NO: 430147 - RNA, 23 nt, Human
aucagacauuaaaauaaaucuga

SEQ ID NO: 430148 - RNA, 20 nt, Human
cacacagugucccuggcugg

SEQ ID NO: 430149 - RNA, 23 nt, Human
cacugaacaucaucaauagguuc

SEQ ID NO: 430150 - RNA, 22 nt, Human
cagacugagauaauuuagauau

SEQ ID NO: 430151 - RNA, 18 nt, Human
cagagcuaggacagggag

SEQ ID NO: 430152 - RNA, 18 nt, Human
cagcaagacaacaaaggg

SEQ ID NO: 430153 - RNA, 22 nt, Human
cagcucagggcaauggugggaa

SEQ ID NO: 430154 - RNA, 25 nt, Human
caguaagucugcacugaacaucauc

SEQ ID NO: 430155 - RNA, 23 nt, Human
ccgccuuacuagauugcaguaau

SEQ ID NO: 430156 - RNA, 23 nt, Human
ccugaccucgccgaacccucaac

SEQ ID NO: 430157 - RNA, 22 nt, Human
ccugcuauaaacaaaugcagau

SEQ ID NO: 430158 - RNA, 23 nt, Human
cgacgcacuccugcgcacgcgca

SEQ ID NO: 430159 - RNA, 22 nt, Human
cggaacaaccucgacgcacucc

SEQ ID NO: 430160 - RNA, 20 nt, Human
cucgccgaacccucaacuca

SEQ ID NO: 430161 - RNA, 21 nt, Human
gaccccaaacgcuuccaauau

SEQ ID NO: 430162 - RNA, 19 nt, Human
gaccuucuuaaaagggcug

SEQ ID NO: 430163 - RNA, 21 nt, Human
gauauaccuaaggcuauggac

SEQ ID NO: 430164 - RNA, 22 nt, Human
gccgaacccucaacucacugcc

SEQ ID NO: 430165 - RNA, 23 nt, Human
gcugcaacuaggaaucccugacc

SEQ ID NO: 430166 - RNA, 18 nt, Human
ggagcacccggagacaua

SEQ ID NO: 430167 - RNA, 30 nt, Human
ggagcacccggagacauagggagagugugg

SEQ ID NO: 430168 - RNA, 23 nt, Human
uaaagaccccaaacgcuuccaau

SEQ ID NO: 430169 - RNA, 24 nt, Human
uaacagcaauacauacuucuccca

SEQ ID NO: 430170 - RNA, 21 nt, Human
uaacuucauaaugucugguau

SEQ ID NO: 430171 - RNA, 20 nt, Human
uacagagcuaggacagggag

SEQ ID NO: 430172 - RNA, 22 nt, Human
uaccauagacuaauggauacaa

SEQ ID NO: 430173 - RNA, 20 nt, Human
uagaacucccacaguaguuc

SEQ ID NO: 430174 - RNA, 23 nt, Human
uagguucuuaggaacugcaacuu

SEQ ID NO: 430175 - RNA, 24 nt, Human
uauaacaaaacaaaaacauuuuuc

SEQ ID NO: 430176 - RNA, 19 nt, Human
uaucaaaauaaugauaaac

SEQ ID NO: 430177 - RNA, 24 nt, Human
uauccagcauaaauucaugauguu

SEQ ID NO: 430178 - RNA, 23 nt, Human
uauuaguaugcuauagaccuauu

SEQ ID NO: 430179 - RNA, 19 nt, Human
ucaacagcaagacaacaaa

SEQ ID NO: 430180 - RNA, 21 nt, Human
ucaacagcaagacaacaaagg

SEQ ID NO: 430181 - RNA, 20 nt, Human
ucaaggaccugcuauaaaca

SEQ ID NO: 430182 - RNA, 22 nt, Human
uccaagaguauuguuuggcuuu

SEQ ID NO: 430183 - RNA, 21 nt, Human
uccugcgcacgcgcaccagcu

SEQ ID NO: 430184 - RNA, 24 nt, Human
ucggugagguagaccaggccuuug

SEQ ID NO: 430185 - RNA, 21 nt, Human
ucuaaagaccccaaacgcuuc

SEQ ID NO: 430186 - RNA, 24 nt, Human
ucuaaagaccccaaacgcuuccaa

SEQ ID NO: 430187 - RNA, 26 nt, Human
ugaaacuggagcacccggagacauag

SEQ ID NO: 430188 - RNA, 23 nt, Human
ugaaaugauguauaacaaaacca

SEQ ID NO: 430189 - RNA, 25 nt, Human
uggacgucucuccagccuaaauucc

SEQ ID NO: 430190 - RNA, 18 nt, Human
ugugauaucauuuaagag

SEQ ID NO: 430191 - RNA, 28 nt, Human
uguggaaggaacccccuaggagcccccg

SEQ ID NO: 430192 - RNA, 19 nt, Human
uguguacuauaugcagugu

SEQ ID NO: 430193 - RNA, 19 nt, Human
uguuacuguugucuuagcc

SEQ ID NO: 430194 - RNA, 20 nt, Human
uucuuaggaacugcaacuuu

SEQ ID NO: 430195 - RNA, 21 nt, Human
uugaugauagagauccaaggu

SEQ ID NO: 430196 - RNA, 24 nt, Human
uugcaguaauucucaggcuugagg

SEQ ID NO: 430197 - RNA, 27 nt, Human
uuuaagagggauaucugacaaauguuu

SEQ ID NO: 430198 - RNA, 23 nt, Human
uuuagauaugucaauuaaccuaa

SEQ ID NO: 430199 - RNA, 19 nt, Human
aaaaauacaggcacauaac

SEQ ID NO: 430200 - RNA, 22 nt, Human
aaaacucuggagaacaucaaag

SEQ ID NO: 430201 - RNA, 21 nt, Human
aaacacccaaacauccuaaaa

SEQ ID NO: 430202 - RNA, 28 nt, Human
aaacugaaugcuuuaagaauaaaaguaa

SEQ ID NO: 430203 - RNA, 20 nt, Human
aaauaaaaacaaaguuucag

SEQ ID NO: 430204 - RNA, 19 nt, Human
aaguacaauaugauaaagc

SEQ ID NO: 430205 - RNA, 21 nt, Human
aaguuucauacaucacaaaaa

SEQ ID NO: 430206 - RNA, 18 nt, Human
acacuagaguccuacacc

SEQ ID NO: 430207 - RNA, 23 nt, Human
acaggcauuaccacaacacuaac

SEQ ID NO: 430208 - RNA, 24 nt, Human
acugaagucuuuuaaaaagcuuua

SEQ ID NO: 430209 - RNA, 18 nt, Human
agaagugauuauuaccag

SEQ ID NO: 430210 - RNA, 26 nt, Human
aggaggagguggagggagggggaccc

SEQ ID NO: 430211 - RNA, 24 nt, Human
aggccgggccgaggccuccgggaa

SEQ ID NO: 430212 - RNA, 22 nt, Human
auccaauuuuuuucaggggagg

SEQ ID NO: 430213 - RNA, 21 nt, Human
augucuuauuugacagcuuua

SEQ ID NO: 430214 - RNA, 21 nt, Human
caagcaucagugaaguauacu

SEQ ID NO: 430215 - RNA, 23 nt, Human
caauacacccaagaacacuagag

SEQ ID NO: 430216 - RNA, 19 nt, Human
cagcagcgucgagcguggc

SEQ ID NO: 430217 - RNA, 21 nt, Human
cagcccaugcaauacacccaa

SEQ ID NO: 430218 - RNA, 24 nt, Human
caggccaguacaauaagcuucaaa

SEQ ID NO: 430219 - RNA, 22 nt, Human
caucugcucuuuaauguuuucc

SEQ ID NO: 430220 - RNA, 19 nt, Human
caugcagagauuucauuua

SEQ ID NO: 430221 - RNA, 20 nt, Human
caugcagagauuucauuuau

SEQ ID NO: 430222 - RNA, 23 nt, Human
ccaauucugccuguaacaaacac

SEQ ID NO: 430223 - RNA, 20 nt, Human
cccaaaugcgaaagccgggu

SEQ ID NO: 430224 - RNA, 19 nt, Human
cccaugcaauacacccaag

SEQ ID NO: 430225 - RNA, 21 nt, Human
ccgccgcgggccgggagcggg

SEQ ID NO: 430226 - RNA, 18 nt, Human
ccgccgcggggucuuccu

SEQ ID NO: 430227 - RNA, 18 nt, Human
ccugcagcagcgucgagc

SEQ ID NO: 430228 - RNA, 21 nt, Human
ccugcagcagcgucgagcgug

SEQ ID NO: 430229 - RNA, 21 nt, Human
ccugcagcagcgucgagcgug

SEQ ID NO: 430230 - RNA, 21 nt, Human
ccuugauuacauucccaaaag

SEQ ID NO: 430231 - RNA, 18 nt, Human
cgacaaaagaugcacaug

SEQ ID NO: 430232 - RNA, 20 nt, Human
cgagggggggccgaggagga

SEQ ID NO: 430233 - RNA, 25 nt, Human
cgccgccgccgccgcggggucuucc

SEQ ID NO: 430234 - RNA, 20 nt, Human
cgggaaggcugagccgggcg

SEQ ID NO: 430235 - RNA, 20 nt, Human
cgggucggagcagcaggcgg

SEQ ID NO: 430236 - RNA, 20 nt, Human
cucaagacccuguuguuggc

SEQ ID NO: 430237 - RNA, 25 nt, Human
cucauuuauauauaaaaaacacaag

SEQ ID NO: 430238 - RNA, 22 nt, Human
cugcucuuuaauguuuuccuac

SEQ ID NO: 430239 - RNA, 22 nt, Human
cuucuggugcaggccaguacaa

SEQ ID NO: 430240 - RNA, 21 nt, Human
cuugaaccaaaacauucgacc

SEQ ID NO: 430241 - RNA, 22 nt, Human
gagaacaucaaagaaaaauggc

SEQ ID NO: 430242 - RNA, 18 nt, Human
gaggagggaagcgagggg

SEQ ID NO: 430243 - RNA, 24 nt, Human
gaggagguggagggaggaccggcg

SEQ ID NO: 430244 - RNA, 19 nt, Human
gagggaagcgagggggggc

SEQ ID NO: 430245 - RNA, 28 nt, Human
gcaauacacccaagaacacuagaguccc

SEQ ID NO: 430246 - RNA, 22 nt, Human
gcccaugcaauacacccaagaa

SEQ ID NO: 430247 - RNA, 24 nt, Human
gcguggccgggacgacgccggagc

SEQ ID NO: 430248 - RNA, 22 nt, Human
ggagguggagggaggaccggcg

SEQ ID NO: 430249 - RNA, 18 nt, Human
uaaaacucuggagaacau

SEQ ID NO: 430250 - RNA, 18 nt, Human
uaaaauugaaagcaaaac

SEQ ID NO: 430251 - RNA, 23 nt, Human
uaacucagaacuaagguacauaa

SEQ ID NO: 430252 - RNA, 27 nt, Human
uacacaucugcaggucuaacucagaac

SEQ ID NO: 430253 - RNA, 22 nt, Human
uacauacuuaacuauuuacaga

SEQ ID NO: 430254 - RNA, 22 nt, Human
uauacugccuuuucuaguuguu

SEQ ID NO: 430255 - RNA, 21 nt, Human
uaugugcaauacauaaauaug

SEQ ID NO: 430256 - RNA, 23 nt, Human
uauguugugaaauuaaagagggu

SEQ ID NO: 430257 - RNA, 24 nt, Human
uauucaauagagcugcuguaugug

SEQ ID NO: 430258 - RNA, 19 nt, Human
ucaaagguuaucucaagac

SEQ ID NO: 430259 - RNA, 23 nt, Human
ucaaugcugaauagcaugauuau

SEQ ID NO: 430260 - RNA, 20 nt, Human
ucagaugcauguuauucaau

SEQ ID NO: 430261 - RNA, 20 nt, Human
uccauuauaacacagaaguu

SEQ ID NO: 430262 - RNA, 19 nt, Human
ucccaaaaggcagauaugc

SEQ ID NO: 430263 - RNA, 19 nt, Human
ucggagcagcaggcggagg

SEQ ID NO: 430264 - RNA, 21 nt, Human
ucugcucuuuaauguuuuccu

SEQ ID NO: 430265 - RNA, 23 nt, Human
ucugguguaccauuuuaaaaaaa

SEQ ID NO: 430266 - RNA, 18 nt, Human
ucuugaaccaaaacauuc

SEQ ID NO: 430267 - RNA, 20 nt, Human
ugaaccaaaacauucgacaa

SEQ ID NO: 430268 - RNA, 24 nt, Human
ugaaccaaaacauucgacaaaaga

SEQ ID NO: 430269 - RNA, 21 nt, Human
ugagccgggcgcccuggugcc

SEQ ID NO: 430270 - RNA, 23 nt, Human
ugcaauaaaucagaaguagugcc

SEQ ID NO: 430271 - RNA, 21 nt, Human
ugcagcagcgucgagcguggc

SEQ ID NO: 430272 - RNA, 18 nt, Human
ugcagcccaugcaauaca

SEQ ID NO: 430273 - RNA, 24 nt, Human
ugcaucugcucuuuaauguuuucc

SEQ ID NO: 430274 - RNA, 19 nt, Human
uggagaacaucaaagaaaa

SEQ ID NO: 430275 - RNA, 20 nt, Human
uggagggaggaccggcggcc

SEQ ID NO: 430276 - RNA, 21 nt, Human
uggcgccaaauacugguuuca

SEQ ID NO: 430277 - RNA, 19 nt, Human
uggcgcuggauaccacuaa

SEQ ID NO: 430278 - RNA, 20 nt, Human
uggcuuuuauuauuuacaua

SEQ ID NO: 430279 - RNA, 22 nt, Human
uggcuuuuauuauuuacauaau

SEQ ID NO: 430280 - RNA, 21 nt, Human
uguaacaaacacccaaacauc

SEQ ID NO: 430281 - RNA, 21 nt, Human
uucagucucuucacaagaagu

SEQ ID NO: 430282 - RNA, 23 nt, Human
uucauacaucacaaaaaaccuuc

SEQ ID NO: 430283 - RNA, 19 nt, Human
uuccaaagaauauguugug

SEQ ID NO: 430284 - RNA, 20 nt, Human
uugcugugcagauuuucauc

SEQ ID NO: 430285 - RNA, 21 nt, Human
uuuacagaugaaaacaggcau

SEQ ID NO: 430286 - RNA, 26 nt, Human
aaaauaaaucaaacuggaaugaaaua

SEQ ID NO: 430287 - RNA, 22 nt, Human
aaacaaggcauacaggguuccc

SEQ ID NO: 430288 - RNA, 20 nt, Human
aaagagaaaucugaaagccc

SEQ ID NO: 430289 - RNA, 19 nt, Human
aaagcccaaaaaauuccag

SEQ ID NO: 430290 - RNA, 19 nt, Human
aaggugccuuccccaucug

SEQ ID NO: 430291 - RNA, 19 nt, Human
aagugcaaaacuaugaaaa

SEQ ID NO: 430292 - RNA, 21 nt, Human
aauagcagaaacugcuccaag

SEQ ID NO: 430293 - RNA, 24 nt, Human
acacuuccacauauaauaacauaa

SEQ ID NO: 430294 - RNA, 22 nt, Human
acagugcaaauuuauuuuugaa

SEQ ID NO: 430295 - RNA, 20 nt, Human
acaguuuaaaaaaaaaaaaa

SEQ ID NO: 430296 - RNA, 18 nt, Human
acugaggucuagaaacag

SEQ ID NO: 430297 - RNA, 21 nt, Human
agagaaaucugaaagcccaaa

SEQ ID NO: 430298 - RNA, 22 nt, Human
agcacaauagcagaaacugcuc

SEQ ID NO: 430299 - RNA, 20 nt, Human
agcugcauuagagaaaagga

SEQ ID NO: 430300 - RNA, 18 nt, Human
aguucacccaaaugccag

SEQ ID NO: 430301 - RNA, 18 nt, Human
aguuuaaaaaaaaaaaaa

SEQ ID NO: 430302 - RNA, 21 nt, Human
aucaacucuaguauguccaca

SEQ ID NO: 430303 - RNA, 22 nt, Human
caaaacccccccgccacugaau

SEQ ID NO: 430304 - RNA, 21 nt, Human
caagcagguuuacaacuuaga

SEQ ID NO: 430305 - RNA, 19 nt, Human
caauagcagaaacugcucc

SEQ ID NO: 430306 - RNA, 21 nt, Human
caauagcagaaacugcuccaa

SEQ ID NO: 430307 - RNA, 24 nt, Human
caaugccaacagacugaucucaaa

SEQ ID NO: 430308 - RNA, 24 nt, Human
cacaacuguaguguuccuugcaga

SEQ ID NO: 430309 - RNA, 21 nt, Human
cacaguauuugaacaagcagg

SEQ ID NO: 430310 - RNA, 20 nt, Human
caccaagaccuuuuuucccc

SEQ ID NO: 430311 - RNA, 23 nt, Human
caccaagaccuuuuuucccccua

SEQ ID NO: 430312 - RNA, 23 nt, Human
cacucaccccucuaacagcccug

SEQ ID NO: 430313 - RNA, 19 nt, Human
cagcauauuaaagaacaaa

SEQ ID NO: 430314 - RNA, 21 nt, Human
cagcccuggguuccaaaaacc

SEQ ID NO: 430315 - RNA, 23 nt, Human
cagcgggcucggccagcaguucc

SEQ ID NO: 430316 - RNA, 21 nt, Human
ccaaaaaauuccagcauaaua

SEQ ID NO: 430317 - RNA, 21 nt, Human
ccagagcaaauauuuauuaua

SEQ ID NO: 430318 - RNA, 22 nt, Human
ccagauacauuaagacuaccaa

SEQ ID NO: 430319 - RNA, 22 nt, Human
ccagcuuccgaauggcugaccu

SEQ ID NO: 430320 - RNA, 21 nt, Human
cccaaaaaauuccagcauaau

SEQ ID NO: 430321 - RNA, 19 nt, Human
cccaaaauuucccuuaaaa

SEQ ID NO: 430322 - RNA, 20 nt, Human
cccaucccgccccacccaac

SEQ ID NO: 430323 - RNA, 23 nt, Human
cccaucccgccccacccaaccca

SEQ ID NO: 430324 - RNA, 21 nt, Human
cccaucugagaugcucaaagu

SEQ ID NO: 430325 - RNA, 18 nt, Human
cccauguauguaaguucc

SEQ ID NO: 430326 - RNA, 18 nt, Human
ccccaauaccugcaauuc

SEQ ID NO: 430327 - RNA, 24 nt, Human
ccccaucugagaugcucaaaguug

SEQ ID NO: 430328 - RNA, 18 nt, Human
cccuggguuccaaaaacc

SEQ ID NO: 430329 - RNA, 24 nt, Human
ccuaaaauguuccccccaaaauuu

SEQ ID NO: 430330 - RNA, 21 nt, Human
ccugauacaaagcacuucauu

SEQ ID NO: 430331 - RNA, 23 nt, Human
cgccacugaaucguccaacaaaa

SEQ ID NO: 430332 - RNA, 22 nt, Human
cuaaaacccaaauugcaugugc

SEQ ID NO: 430333 - RNA, 22 nt, Human
cucaaaugaguucucccuugua

SEQ ID NO: 430334 - RNA, 28 nt, Human
cucagugauggugucacugguucuuucc

SEQ ID NO: 430335 - RNA, 19 nt, Human
cuccaagugaugagcugca

SEQ ID NO: 430336 - RNA, 24 nt, Human
cucuauuaucacauacccccuuua

SEQ ID NO: 430337 - RNA, 22 nt, Human
cugaccucgauaucugcagcac

SEQ ID NO: 430338 - RNA, 23 nt, Human
cugaccucgauaucugcagcaca

SEQ ID NO: 430339 - RNA, 26 nt, Human
cuucaaaacaaccaaaaaugggaaaa

SEQ ID NO: 430340 - RNA, 23 nt, Human
gaaaauaacugaggucuagaaac

SEQ ID NO: 430341 - RNA, 21 nt, Human
gagcugcauuagagaaaagga

SEQ ID NO: 430342 - RNA, 19 nt, Human
gcccuggguuccaaaaacc

SEQ ID NO: 430343 - RNA, 24 nt, Human
guccacaguucacccaaaugccag

SEQ ID NO: 430344 - RNA, 21 nt, Human
guuuaaaaaaaaaaaaacaua

SEQ ID NO: 430345 - RNA, 24 nt, Human
uaaaagugcaaaacuaugaaaaca

SEQ ID NO: 430346 - RNA, 19 nt, Human
uaaaucaaacuggaaugaa

SEQ ID NO: 430347 - RNA, 20 nt, Human
uaacugaggucuagaaacag

SEQ ID NO: 430348 - RNA, 24 nt, Human
uaagcacugacauccaccaagacc

SEQ ID NO: 430349 - RNA, 23 nt, Human
uaauacugauggacacaaaaaca

SEQ ID NO: 430350 - RNA, 25 nt, Human
uacaaaccuaaaauguuccccccaa

SEQ ID NO: 430351 - RNA, 21 nt, Human
uacaguuuauguuuauacaac

SEQ ID NO: 430352 - RNA, 18 nt, Human
uaccugcaauucacagau

SEQ ID NO: 430353 - RNA, 18 nt, Human
uagaaacagauuuucucu

SEQ ID NO: 430354 - RNA, 21 nt, Human
uaguauguccacaguucaccc

SEQ ID NO: 430355 - RNA, 19 nt, Human
uaguuaauacugauggaca

SEQ ID NO: 430356 - RNA, 22 nt, Human
uauaaaaccaguaguauaccaa

SEQ ID NO: 430357 - RNA, 23 nt, Human
uauacuuuucccccaucccgccc

SEQ ID NO: 430358 - RNA, 20 nt, Human
uauggagaacagcgaggcca

SEQ ID NO: 430359 - RNA, 19 nt, Human
ucagugauggugucacugg

SEQ ID NO: 430360 - RNA, 21 nt, Human
ucagugauggugucacugguc

SEQ ID NO: 430361 - RNA, 23 nt, Human
uccaccaagaccuuuuuuccccc

SEQ ID NO: 430362 - RNA, 22 nt, Human
uccauuaacaauuuuaagacaa

SEQ ID NO: 430363 - RNA, 23 nt, Human
uccauuaacaauuuuaagacaac

SEQ ID NO: 430364 - RNA, 23 nt, Human
uccccccaaaauuucccuuaaaa

SEQ ID NO: 430365 - RNA, 21 nt, Human
ucccgccccacccaacccaaa

SEQ ID NO: 430366 - RNA, 23 nt, Human
ucucuuaaaaauccuacaagccc

SEQ ID NO: 430367 - RNA, 20 nt, Human
ucuuuuuuuuaaauacaggg

SEQ ID NO: 430368 - RNA, 18 nt, Human
ugaaagagcacaauagca

SEQ ID NO: 430369 - RNA, 25 nt, Human
ugaaauaaauacauaaacaaaaauc

SEQ ID NO: 430370 - RNA, 23 nt, Human
ugaacaagcagguuuacaacuua

SEQ ID NO: 430371 - RNA, 18 nt, Human
ugaaguacaaagggcugu

SEQ ID NO: 430372 - RNA, 25 nt, Human
ugacagaaacaaauuuaaauaacug

SEQ ID NO: 430373 - RNA, 20 nt, Human
ugagaugcucaaaguugcga

SEQ ID NO: 430374 - RNA, 20 nt, Human
ugaggucuagaaacagauuu

SEQ ID NO: 430375 - RNA, 19 nt, Human
ugcacauacaguuuauguu

SEQ ID NO: 430376 - RNA, 20 nt, Human
ugcacugagaaaaauguuac

SEQ ID NO: 430377 - RNA, 24 nt, Human
uggaaugaaauaaauacauaaaca

SEQ ID NO: 430378 - RNA, 20 nt, Human
uggcugaccucgauaucugc

SEQ ID NO: 430379 - RNA, 25 nt, Human
uggcugaccucgauaucugcagcac

SEQ ID NO: 430380 - RNA, 18 nt, Human
ugguauuuuuauacauuc

SEQ ID NO: 430381 - RNA, 21 nt, Human
uguacuaauaaacucagccau

SEQ ID NO: 430382 - RNA, 22 nt, Human
uguacuaauaaacucagccaug

SEQ ID NO: 430383 - RNA, 19 nt, Human
ugugaacaggaaaaaaggu

SEQ ID NO: 430384 - RNA, 21 nt, Human
uuaaguaucaacaauuaaaau

SEQ ID NO: 430385 - RNA, 22 nt, Human
uuacaacuuagauauuuacaga

SEQ ID NO: 430386 - RNA, 23 nt, Human
uuccccccaaaauuucccuuaaa

SEQ ID NO: 430387 - RNA, 21 nt, Human
uuuaagacaacaauagauuug

SEQ ID NO: 430388 - RNA, 20 nt, Human
uuugaaguacaaagggcugu

SEQ ID NO: 430389 - RNA, 24 nt, Human
aaaauaaacucucacgccuaugga

SEQ ID NO: 430390 - RNA, 22 nt, Human
aacuaccucuagcgcucccccg

SEQ ID NO: 430391 - RNA, 21 nt, Human
aagacaccuguuuauugggga

SEQ ID NO: 430392 - RNA, 24 nt, Human
aagacaccuguuuauuggggacac

SEQ ID NO: 430393 - RNA, 18 nt, Human
aagugcagggaagaggag

SEQ ID NO: 430394 - RNA, 20 nt, Human
acaaaaauaaacucucacgc

SEQ ID NO: 430395 - RNA, 23 nt, Human
acacaaaccuucucugccagccc

SEQ ID NO: 430396 - RNA, 21 nt, Human
acagggccccugauggggcua

SEQ ID NO: 430397 - RNA, 24 nt, Human
acgccuauggaccagcaaagacug

SEQ ID NO: 430398 - RNA, 21 nt, Human
acuaccucuagcgcucccccg

SEQ ID NO: 430399 - RNA, 18 nt, Human
agaaggguacagugcccc

SEQ ID NO: 430400 - RNA, 26 nt, Human
agcgggcggcggcggcggcggcgggg

SEQ ID NO: 430401 - RNA, 19 nt, Human
aggaaaagcugcuaaugaa

SEQ ID NO: 430402 - RNA, 22 nt, Human
agggacacaaaccuucucugcc

SEQ ID NO: 430403 - RNA, 22 nt, Human
aggugcuguggaggagccccgg

SEQ ID NO: 430404 - RNA, 25 nt, Human
cacuaagcuaaucgccccugagggc

SEQ ID NO: 430405 - RNA, 24 nt, Human
ccaaaaauagcgacgucuacaggg

SEQ ID NO: 430406 - RNA, 21 nt, Human
ccacgcugcccccugcuggcu

SEQ ID NO: 430407 - RNA, 21 nt, Human
ccagcccacccuccuacgccc

SEQ ID NO: 430408 - RNA, 22 nt, Human
ccccccacccucaccccuugua

SEQ ID NO: 430409 - RNA, 19 nt, Human
cccccccgcccccggcccg

SEQ ID NO: 430410 - RNA, 21 nt, Human
cccccgcccccggcccggccc

SEQ ID NO: 430411 - RNA, 22 nt, Human
cccccgcccccggcccuggccc

SEQ ID NO: 430412 - RNA, 22 nt, Human
cccccgcccccuccccgguccc

SEQ ID NO: 430413 - RNA, 19 nt, Human
cccccggcccggcccccgc

SEQ ID NO: 430414 - RNA, 18 nt, Human
ccccgcccccggcccugg

SEQ ID NO: 430415 - RNA, 20 nt, Human
ccccugcuggcuucucuacc

SEQ ID NO: 430416 - RNA, 22 nt, Human
cccgcccccggcccggcccccg

SEQ ID NO: 430417 - RNA, 18 nt, Human
cccgcccccggcccuggc

SEQ ID NO: 430418 - RNA, 22 nt, Human
cccgcccccggcccuggcccgc

SEQ ID NO: 430419 - RNA, 19 nt, Human
cccgcccccuccccggucc

SEQ ID NO: 430420 - RNA, 19 nt, Human
cccggcccccgcccccucc

SEQ ID NO: 430421 - RNA, 24 nt, Human
ccgcccccggcccuggcccgcauu

SEQ ID NO: 430422 - RNA, 21 nt, Human
ccgcgccuuccaccucugguc

SEQ ID NO: 430423 - RNA, 27 nt, Human
ccgggccccggcccccccgcccccggc

SEQ ID NO: 430424 - RNA, 18 nt, Human
ccucugguccgccugggg

SEQ ID NO: 430425 - RNA, 24 nt, Human
ccuggcccgcauugugugcggcgg

SEQ ID NO: 430426 - RNA, 19 nt, Human
cgcauugugugcggcggga

SEQ ID NO: 430427 - RNA, 21 nt, Human
cgccagcccacccuccuacgc

SEQ ID NO: 430428 - RNA, 22 nt, Human
cgcgccuuccaccucugguccg

SEQ ID NO: 430429 - RNA, 21 nt, Human
cggcccccccgcccccggccc

SEQ ID NO: 430430 - RNA, 22 nt, Human
cggcccccgcccccuccccccu

SEQ ID NO: 430431 - RNA, 19 nt, Human
cggcgggaggcggcccggc

SEQ ID NO: 430432 - RNA, 23 nt, Human
cggggcugggagccgcgcgggag

SEQ ID NO: 430433 - RNA, 19 nt, Human
cgggggagaugcgccgggc

SEQ ID NO: 430434 - RNA, 21 nt, Human
cuagaaggguacagugccccc

SEQ ID NO: 430435 - RNA, 18 nt, Human
cuggcagaguggcuccuc

SEQ ID NO: 430436 - RNA, 20 nt, Human
cuggcuccggggacagggag

SEQ ID NO: 430437 - RNA, 19 nt, Human
gaagaggaggaaaagcugc

SEQ ID NO: 430438 - RNA, 18 nt, Human
gacagggagcuggggacc

SEQ ID NO: 430439 - RNA, 23 nt, Human
gagcuggggaccccgggagccgc

SEQ ID NO: 430440 - RNA, 18 nt, Human
gaggagccccgggcgggc

SEQ ID NO: 430441 - RNA, 24 nt, Human
gcaugcggggggcggcgcggcggg

SEQ ID NO: 430442 - RNA, 20 nt, Human
gcccccccgcccccggcccg

SEQ ID NO: 430443 - RNA, 18 nt, Human
gccgggccccggcccccc

SEQ ID NO: 430444 - RNA, 18 nt, Human
gcgcggcggggcugggag

SEQ ID NO: 430445 - RNA, 26 nt, Human
gcggcggcggagcgggcggcggcggc

SEQ ID NO: 430446 - RNA, 30 nt, Human
gcggcggcggagcgggcggcggcggcggcg

SEQ ID NO: 430447 - RNA, 20 nt, Human
gcggcggcggcggcggcggc

SEQ ID NO: 430448 - RNA, 20 nt, Human
gcggcggcggcggcggcggc

SEQ ID NO: 430449 - RNA, 23 nt, Human
gcggcggcggcggcggcggcggc

SEQ ID NO: 430450 - RNA, 21 nt, Human
gcggcggcggcggcggcgggc

SEQ ID NO: 430451 - RNA, 22 nt, Human
gcggcggcggcggcgggcggcg

SEQ ID NO: 430452 - RNA, 18 nt, Human
gcggcggcggcgggcggc

SEQ ID NO: 430453 - RNA, 20 nt, Human
gcucuggcuccggggacagg

SEQ ID NO: 430454 - RNA, 21 nt, Human
ggaagugcagggaagaggagg

SEQ ID NO: 430455 - RNA, 19 nt, Human
ggacagggagcuggggacc

SEQ ID NO: 430456 - RNA, 19 nt, Human
ggaccagcaaagacuggca

SEQ ID NO: 430457 - RNA, 19 nt, Human
ggacccccuucacauucuu

SEQ ID NO: 430458 - RNA, 25 nt, Human
ggagaugcgccgggccccggccccc

SEQ ID NO: 430459 - RNA, 30 nt, Human
ggagcgggcggcggcggcggcggcggcgac

SEQ ID NO: 430460 - RNA, 23 nt, Human
ggcggcgcggcggggcugggagc

SEQ ID NO: 430461 - RNA, 23 nt, Human
ggcggcggcggcggcggcggcgg

SEQ ID NO: 430462 - RNA, 32 nt, Human
ggcgggcggcggcggagcgggcggcggcgggg

SEQ ID NO: 430463 - RNA, 20 nt, Human
ggcgggcggcgggccggcgg

SEQ ID NO: 430464 - RNA, 22 nt, Human
ggcugggauaugggucccacgg

SEQ ID NO: 430465 - RNA, 20 nt, Human
gggaagugcagggaagagga

SEQ ID NO: 430466 - RNA, 31 nt, Human
gggcggcggcggagcgggcggcggcggcggg

SEQ ID NO: 430467 - RNA, 24 nt, Human
gggcggcggcggcggcggcggcgg

SEQ ID NO: 430468 - RNA, 20 nt, Human
gggcggcgggccggcggcga

SEQ ID NO: 430469 - RNA, 25 nt, Human
gggcgggcggcggcggagcgggcga

SEQ ID NO: 430470 - RNA, 21 nt, Human
gggggcggcgcggcggggcug

SEQ ID NO: 430471 - RNA, 21 nt, Human
gggucccacgcugcccccugc

SEQ ID NO: 430472 - RNA, 21 nt, Human
gucccccgcccccggcccugg

SEQ ID NO: 430473 - RNA, 22 nt, Human
gugcggcgggaggcggcccggc

SEQ ID NO: 430474 - RNA, 18 nt, Human
uacccaacuaccucuagc

SEQ ID NO: 430475 - RNA, 25 nt, Human
ucaccccuuguacaaaaauaaacuc

SEQ ID NO: 430476 - RNA, 20 nt, Human
ugccccccacccucaccccu

SEQ ID NO: 430477 - RNA, 23 nt, Human
ugcuguggaggagccccgggcgg

SEQ ID NO: 430478 - RNA, 23 nt, Human
uggaccagcaaagacuggcagag

SEQ ID NO: 430479 - RNA, 21 nt, Human
uggcagaguggcuccucaaca

SEQ ID NO: 430480 - RNA, 24 nt, Human
uggguaccgccagcccacccuccu

SEQ ID NO: 430481 - RNA, 24 nt, Human
ugggucccacgcugcccccugcug

SEQ ID NO: 430482 - RNA, 20 nt, Human
ugguucugggaagugcaggg

SEQ ID NO: 430483 - RNA, 19 nt, Human
ugugugcggcgggaggcgg

SEQ ID NO: 430484 - RNA, 19 nt, Human
uucuuugguucugggaagu

SEQ ID NO: 430485 - RNA, 25 nt, Human
aaaaaaacaaaacaaacaaaacaaa

SEQ ID NO: 430486 - RNA, 20 nt, Human
aaaaaaagggaaauccuuac

SEQ ID NO: 430487 - RNA, 24 nt, Human
aaaaaagauuccuuucauuuuuua

SEQ ID NO: 430488 - RNA, 22 nt, Human
aaaacaaacaaaacaaaaaaag

SEQ ID NO: 430489 - RNA, 23 nt, Human
aaaacaaacaaaacaaaaaaagg

SEQ ID NO: 430490 - RNA, 31 nt, Human
aaacaaaacaaacaaaacaaaaaaagggaaa

SEQ ID NO: 430491 - RNA, 24 nt, Human
aaacaaaaucucaucuguugcaga

SEQ ID NO: 430492 - RNA, 22 nt, Human
aaacaaacgacacagcaguuac

SEQ ID NO: 430493 - RNA, 18 nt, Human
aaacaauucauguaacac

SEQ ID NO: 430494 - RNA, 23 nt, Human
aaaccgauaugauuauaaaagau

SEQ ID NO: 430495 - RNA, 24 nt, Human
aaagggaaauccuuacuccuuuca

SEQ ID NO: 430496 - RNA, 23 nt, Human
aacaaacaaaacaaaaaaaggga

SEQ ID NO: 430497 - RNA, 21 nt, Human
aagaaauaaaagacaacuaau

SEQ ID NO: 430498 - RNA, 18 nt, Human
aagauaccaaaaaaucag

SEQ ID NO: 430499 - RNA, 22 nt, Human
aagcaagcugagauuuuucuug

SEQ ID NO: 430500 - RNA, 27 nt, Human
aagcaucucuauuucuaaaaaagauuc

SEQ ID NO: 430501 - RNA, 18 nt, Human
aaggagaagaaauaaaag

SEQ ID NO: 430502 - RNA, 21 nt, Human
acaaaacaaacaaaacaaaaa

SEQ ID NO: 430503 - RNA, 24 nt, Human
acaaaacaaacaaaacaaaaaaag

SEQ ID NO: 430504 - RNA, 25 nt, Human
acaaggagaagaaauaaaagacaac

SEQ ID NO: 430505 - RNA, 24 nt, Human
accauucucauggaagugaagaaa

SEQ ID NO: 430506 - RNA, 20 nt, Human
acucuauuaguaggaauaga

SEQ ID NO: 430507 - RNA, 19 nt, Human
agaaaguccuaaaacugag

SEQ ID NO: 430508 - RNA, 19 nt, Human
agaucuaaaaggcuggcuc

SEQ ID NO: 430509 - RNA, 22 nt, Human
agauuccuuucauuuuuuacuu

SEQ ID NO: 430510 - RNA, 20 nt, Human
agguguguaaauuguagguu

SEQ ID NO: 430511 - RNA, 19 nt, Human
aguggaauugauuucuucu

SEQ ID NO: 430512 - RNA, 21 nt, Human
auacuacaaaacuuuacaaac

SEQ ID NO: 430513 - RNA, 21 nt, Human
auaugauuauaaaagauacca

SEQ ID NO: 430514 - RNA, 23 nt, Human
augucaugcucccucaaaacaua

SEQ ID NO: 430515 - RNA, 23 nt, Human
augucauuaaauucccaauguuu

SEQ ID NO: 430516 - RNA, 24 nt, Human
caaaacaaacaaaacaaaaaaagg

SEQ ID NO: 430517 - RNA, 19 nt, Human
caacuuguggaaaacaaac

SEQ ID NO: 430518 - RNA, 19 nt, Human
cacagaaagaguuaaauuu

SEQ ID NO: 430519 - RNA, 21 nt, Human
cacagaaaguccuaaaacuga

SEQ ID NO: 430520 - RNA, 19 nt, Human
ccacucuggcucgcugggc

SEQ ID NO: 430521 - RNA, 19 nt, Human
ccagaagaggucaagggca

SEQ ID NO: 430522 - RNA, 21 nt, Human
ccuagagguguacagcucaga

SEQ ID NO: 430523 - RNA, 22 nt, Human
cgcgcgggaccagccaccacuc

SEQ ID NO: 430524 - RNA, 24 nt, Human
cgggaccagccaccacucuggcuc

SEQ ID NO: 430525 - RNA, 22 nt, Human
gagguguacagcucagaauuuu

SEQ ID NO: 430526 - RNA, 21 nt, Human
ggaugucaugcucccucaaaa

SEQ ID NO: 430527 - RNA, 18 nt, Human
ggucaagggcauggggau

SEQ ID NO: 430528 - RNA, 23 nt, Human
uaaaaaaaacaaaacaaacaaaa

SEQ ID NO: 430529 - RNA, 18 nt, Human
uaaaaaagaaaugagggu

SEQ ID NO: 430530 - RNA, 19 nt, Human
uaaaaaagaaaugagggua

SEQ ID NO: 430531 - RNA, 25 nt, Human
uaaaagauaccaaaaaaucagaaga

SEQ ID NO: 430532 - RNA, 24 nt, Human
uaacacagaaagaguuaaauuuca

SEQ ID NO: 430533 - RNA, 21 nt, Human
uacaaaacuuuacaaacaaaa

SEQ ID NO: 430534 - RNA, 21 nt, Human
uaccaaaaaaucagaagaaug

SEQ ID NO: 430535 - RNA, 21 nt, Human
uaguaggaauagaagacuuga

SEQ ID NO: 430536 - RNA, 23 nt, Human
uauaaaagauaccaaaaaaucag

SEQ ID NO: 430537 - RNA, 18 nt, Human
ucaagggcauggggaugu

SEQ ID NO: 430538 - RNA, 21 nt, Human
ucaauagaaauuaaaaccuga

SEQ ID NO: 430539 - RNA, 27 nt, Human
ucauuuuuuacuuuuuauuuuuucuua

SEQ ID NO: 430540 - RNA, 25 nt, Human
uccacaaggagaagaaauaaaagac

SEQ ID NO: 430541 - RNA, 24 nt, Human
ucccuuuuuucuuccacagaaagu

SEQ ID NO: 430542 - RNA, 20 nt, Human
ucucccuuuuuucuuccaca

SEQ ID NO: 430543 - RNA, 18 nt, Human
uggaauugauuucuucuc

SEQ ID NO: 430544 - RNA, 20 nt, Human
uucaguucuuugugcuccau

SEQ ID NO: 430545 - RNA, 19 nt, Human
uucuuccacagaaaguccu

SEQ ID NO: 430546 - RNA, 24 nt, Human
uugguuaaaaaaaacaaaacaaac

SEQ ID NO: 430547 - RNA, 18 nt, Human
aaaagugaacaacaacaa

SEQ ID NO: 430548 - RNA, 22 nt, Human
aaaauauacaauacacaaagca

SEQ ID NO: 430549 - RNA, 30 nt, Human
aaaaugcacagagaaaagaguggaaaaaaa

SEQ ID NO: 430550 - RNA, 20 nt, Human
aaaaugucuauuucuuuagg

SEQ ID NO: 430551 - RNA, 22 nt, Human
aaacaugaaggaaaaucugaca

SEQ ID NO: 430552 - RNA, 23 nt, Human
aaagacaaugauucuuuagauaa

SEQ ID NO: 430553 - RNA, 18 nt, Human
aaauaacccagcaagaac

SEQ ID NO: 430554 - RNA, 24 nt, Human
aaauaacccagcaagaacaaaagu

SEQ ID NO: 430555 - RNA, 21 nt, Human
aacaacaaaaaaaucaaaaga

SEQ ID NO: 430556 - RNA, 23 nt, Human
aacacuugaagcuuuaaaacaga

SEQ ID NO: 430557 - RNA, 22 nt, Human
aagaaguccaguaucacaagca

SEQ ID NO: 430558 - RNA, 20 nt, Human
aagcaguuuggaaaagaagu

SEQ ID NO: 430559 - RNA, 22 nt, Human
aauacaauucaccaaacuagcu

SEQ ID NO: 430560 - RNA, 20 nt, Human
acaaaauauacuguucagcc

SEQ ID NO: 430561 - RNA, 21 nt, Human
acccagcaagaacaaaaguuu

SEQ ID NO: 430562 - RNA, 23 nt, Human
acuaauuuucaaaaugcacagag

SEQ ID NO: 430563 - RNA, 20 nt, Human
acuuguagggccgcuccccc

SEQ ID NO: 430564 - RNA, 20 nt, Human
agaaaucucuuuucuagaau

SEQ ID NO: 430565 - RNA, 22 nt, Human
agaaggcgcggucacacuccag

SEQ ID NO: 430566 - RNA, 21 nt, Human
agacgcugacuguggcgugug

SEQ ID NO: 430567 - RNA, 24 nt, Human
aggaaaaucugacauacuuuuucc

SEQ ID NO: 430568 - RNA, 20 nt, Human
aggaauggcgugcacgcacu

SEQ ID NO: 430569 - RNA, 20 nt, Human
aguaucacaagcauaaguca

SEQ ID NO: 430570 - RNA, 24 nt, Human
agucucugaaagacaaugauucuu

SEQ ID NO: 430571 - RNA, 21 nt, Human
auaaagaucaaccuguacccc

SEQ ID NO: 430572 - RNA, 19 nt, Human
aucugacauacuuuuucca

SEQ ID NO: 430573 - RNA, 25 nt, Human
caaaagugaacaacaacaacaaaaa

SEQ ID NO: 430574 - RNA, 22 nt, Human
cacuagcgucaccucccacgcc

SEQ ID NO: 430575 - RNA, 21 nt, Human
cacuaguaugacuugcggcug

SEQ ID NO: 430576 - RNA, 18 nt, Human
cacucugcccagcacggg

SEQ ID NO: 430577 - RNA, 23 nt, Human
cagaaccuuuaaaacucuagcac

SEQ ID NO: 430578 - RNA, 23 nt, Human
cagcaagaacaaaaguuuaaaau

SEQ ID NO: 430579 - RNA, 25 nt, Human
cagcgugacacuagcgucaccuccc

SEQ ID NO: 430580 - RNA, 18 nt, Human
cagcuccuccccauccug

SEQ ID NO: 430581 - RNA, 18 nt, Human
caguaucacaagcauaag

SEQ ID NO: 430582 - RNA, 21 nt, Human
caguaucacaagcauaaguca

SEQ ID NO: 430583 - RNA, 18 nt, Human
cauaugcggcuacagcca

SEQ ID NO: 430584 - RNA, 27 nt, Human
ccacgcccgacgaggacaguggaccuc

SEQ ID NO: 430585 - RNA, 26 nt, Human
ccacgcccgacgaggacaugaccagg

SEQ ID NO: 430586 - RNA, 28 nt, Human
ccagcaagaacaaaaguuuaaaauucca

SEQ ID NO: 430587 - RNA, 21 nt, Human
ccagcuuuauaugacaaugaa

SEQ ID NO: 430588 - RNA, 22 nt, Human
ccccauguugacgccccagaua

SEQ ID NO: 430589 - RNA, 21 nt, Human
ccggcagccuccugcaccacc

SEQ ID NO: 430590 - RNA, 19 nt, Human
ccggccuggugugucugca

SEQ ID NO: 430591 - RNA, 22 nt, Human
ccuacccauuaccucuuucuuc

SEQ ID NO: 430592 - RNA, 26 nt, Human
ccuccagauagcauacccugaguauc

SEQ ID NO: 430593 - RNA, 23 nt, Human
ccuccagguggaggguccggcuc

SEQ ID NO: 430594 - RNA, 19 nt, Human
ccuccugcaccaccuccuc

SEQ ID NO: 430595 - RNA, 22 nt, Human
ccucuuucuuccuaaacacaaa

SEQ ID NO: 430596 - RNA, 20 nt, Human
ccugcagcgcacucuucugg

SEQ ID NO: 430597 - RNA, 23 nt, Human
ccugcagcgcacucuucugguug

SEQ ID NO: 430598 - RNA, 23 nt, Human
ccugcuccacccuggcccgagag

SEQ ID NO: 430599 - RNA, 18 nt, Human
cgauguauggcuugugcu

SEQ ID NO: 430600 - RNA, 20 nt, Human
cgccagcccguguggacagc

SEQ ID NO: 430601 - RNA, 24 nt, Human
cgcucccggccaugcaccuccuug

SEQ ID NO: 430602 - RNA, 24 nt, Human
cuaaagaauucccugaaaucaaaa

SEQ ID NO: 430603 - RNA, 23 nt, Human
cuauguacauauguauuuauaua

SEQ ID NO: 430604 - RNA, 25 nt, Human
cuccaggcacuggugcgcccggccc

SEQ ID NO: 430605 - RNA, 18 nt, Human
cucccggccaugcaccuc

SEQ ID NO: 430606 - RNA, 23 nt, Human
cucccggccaugcaccuccuugc

SEQ ID NO: 430607 - RNA, 24 nt, Human
cucccggccaugcaccuccuugcu

SEQ ID NO: 430608 - RNA, 21 nt, Human
cuccgggugaccugcagacuc

SEQ ID NO: 430609 - RNA, 19 nt, Human
cugaaaccaaggaggcaac

SEQ ID NO: 430610 - RNA, 19 nt, Human
cugacauucaaggaaggaa

SEQ ID NO: 430611 - RNA, 19 nt, Human
cugcaauuaggacuaguac

SEQ ID NO: 430612 - RNA, 19 nt, Human
cugcaccaccuccuccagg

SEQ ID NO: 430613 - RNA, 23 nt, Human
cugcugacccugagaggugaugu

SEQ ID NO: 430614 - RNA, 20 nt, Human
cuuuggggauauuuuuucac

SEQ ID NO: 430615 - RNA, 24 nt, Human
cuuuucuuuuucuuaaaaaaauau

SEQ ID NO: 430616 - RNA, 18 nt, Human
gaaaccaaggaggcaacg

SEQ ID NO: 430617 - RNA, 23 nt, Human
gagaaggcgcggucacacuccag

SEQ ID NO: 430618 - RNA, 20 nt, Human
gagccugcuccacccuggcc

SEQ ID NO: 430619 - RNA, 18 nt, Human
gcacgggugggauuuggu

SEQ ID NO: 430620 - RNA, 18 nt, Human
gcagacgcugacuguggc

SEQ ID NO: 430621 - RNA, 24 nt, Human
gccagcccguguggacagcugaau

SEQ ID NO: 430622 - RNA, 24 nt, Human
gcgcccggcccuccuucucuggcu

SEQ ID NO: 430623 - RNA, 20 nt, Human
gcggcgagccugcuccaccc

SEQ ID NO: 430624 - RNA, 25 nt, Human
gcggcgagccugcuccacccuggcc

SEQ ID NO: 430625 - RNA, 20 nt, Human
gcugggaacugcugacccug

SEQ ID NO: 430626 - RNA, 18 nt, Human
gcuucuuauaaccagaaa

SEQ ID NO: 430627 - RNA, 21 nt, Human
ggaccugaacacagauugaug

SEQ ID NO: 430628 - RNA, 18 nt, Human
ggaggagacugaggagga

SEQ ID NO: 430629 - RNA, 23 nt, Human
ggcagccguggaugcgcucccgg

SEQ ID NO: 430630 - RNA, 18 nt, Human
gguuuuuacggauucgug

SEQ ID NO: 430631 - RNA, 23 nt, Human
guuuuugucuuugcuaauacaaa

SEQ ID NO: 430632 - RNA, 19 nt, Human
uaaaacagagauuccaagu

SEQ ID NO: 430633 - RNA, 19 nt, Human
uaaaaugaauacaauacug

SEQ ID NO: 430634 - RNA, 21 nt, Human
uaaacagucaauuaaccaaua

SEQ ID NO: 430635 - RNA, 23 nt, Human
uaaagaauucccugaaaucaaaa

SEQ ID NO: 430636 - RNA, 27 nt, Human
uaaauaucuucacauaacaaaaguuuu

SEQ ID NO: 430637 - RNA, 18 nt, Human
uaacuucagaaacauucu

SEQ ID NO: 430638 - RNA, 19 nt, Human
uaccaagugcaaucacgac

SEQ ID NO: 430639 - RNA, 21 nt, Human
uagcauacccugaguaucggc

SEQ ID NO: 430640 - RNA, 18 nt, Human
uaggcucuagauucaccu

SEQ ID NO: 430641 - RNA, 18 nt, Human
uauaaaauaaaaagugca

SEQ ID NO: 430642 - RNA, 22 nt, Human
uaugaugagauaguucuaaaaa

SEQ ID NO: 430643 - RNA, 23 nt, Human
uaugcuucuuauuugcuggggug

SEQ ID NO: 430644 - RNA, 22 nt, Human
uauguacauauguauuuauaua

SEQ ID NO: 430645 - RNA, 22 nt, Human
ucaaggaauguucugcaaaaaa

SEQ ID NO: 430646 - RNA, 24 nt, Human
ucaauauuacuuauauacauaugc

SEQ ID NO: 430647 - RNA, 22 nt, Human
uccaguaucacaagcauaaguc

SEQ ID NO: 430648 - RNA, 20 nt, Human
ucccagagacgccagcuacc

SEQ ID NO: 430649 - RNA, 23 nt, Human
ucccagagacgccagcuaccugg

SEQ ID NO: 430650 - RNA, 20 nt, Human
uccggcucagcuccucccca

SEQ ID NO: 430651 - RNA, 22 nt, Human
uccugcacacggggcagccgug

SEQ ID NO: 430652 - RNA, 19 nt, Human
ucucugaaagacaaugauu

SEQ ID NO: 430653 - RNA, 22 nt, Human
ucucuggcugguugcccggggc

SEQ ID NO: 430654 - RNA, 28 nt, Human
ucugcaauuaggacuaguaccggggucc

SEQ ID NO: 430655 - RNA, 24 nt, Human
ucugcaauuauguaacccuggacc

SEQ ID NO: 430656 - RNA, 20 nt, Human
ucuggcugguugcccggggc

SEQ ID NO: 430657 - RNA, 20 nt, Human
ugaaaaagauauccauuuau

SEQ ID NO: 430658 - RNA, 23 nt, Human
ugaaaaagauauccauuuaugaa

SEQ ID NO: 430659 - RNA, 26 nt, Human
ugaaaaagauauccauuuaugaauaa

SEQ ID NO: 430660 - RNA, 23 nt, Human
ugaacaacaacaacaaaaaaauc

SEQ ID NO: 430661 - RNA, 27 nt, Human
ugaacaacaacaacaaaaaaaucaaaa

SEQ ID NO: 430662 - RNA, 23 nt, Human
ugagaugacauuuaaugcuaaaa

SEQ ID NO: 430663 - RNA, 19 nt, Human
ugauauuuucuuuuucuuu

SEQ ID NO: 430664 - RNA, 21 nt, Human
ugauuaaacaugucauggaga

SEQ ID NO: 430665 - RNA, 20 nt, Human
ugauuccuacccauuaccuc

SEQ ID NO: 430666 - RNA, 18 nt, Human
ugcaugugcuccuugagg

SEQ ID NO: 430667 - RNA, 25 nt, Human
ugcccggggccagguucccagagac

SEQ ID NO: 430668 - RNA, 18 nt, Human
ugccucaaucuuacgcuu

SEQ ID NO: 430669 - RNA, 20 nt, Human
ugccucaaucuuacgcuugc

SEQ ID NO: 430670 - RNA, 26 nt, Human
ugcuaaaaucaaaauaaauaaccuua

SEQ ID NO: 430671 - RNA, 19 nt, Human
ugcugggguggacagggcc

SEQ ID NO: 430672 - RNA, 23 nt, Human
ugcuuugcucuucacaaaacgua

SEQ ID NO: 430673 - RNA, 25 nt, Human
uggccgauggagacgucgguguugu

SEQ ID NO: 430674 - RNA, 21 nt, Human
uggcuugguuuggcaaaugcc

SEQ ID NO: 430675 - RNA, 21 nt, Human
ugggagcucaaagaggggccg

SEQ ID NO: 430676 - RNA, 18 nt, Human
uggugggucagguuuacu

SEQ ID NO: 430677 - RNA, 20 nt, Human
uggugugucugcaugugcuc

SEQ ID NO: 430678 - RNA, 23 nt, Human
ugucacauuuaaacacucuuggc

SEQ ID NO: 430679 - RNA, 18 nt, Human
ugucuuguguuugcuaau

SEQ ID NO: 430680 - RNA, 21 nt, Human
uuaaaagcagaaccuuuaaaa

SEQ ID NO: 430681 - RNA, 22 nt, Human
uuauugauauuuucuuuuucuu

SEQ ID NO: 430682 - RNA, 21 nt, Human
uucacaagcagcagacgcuga

SEQ ID NO: 430683 - RNA, 20 nt, Human
uucauaucaccgucaauauu

SEQ ID NO: 430684 - RNA, 26 nt, Human
uucccaguuuuuuuuuccuaugaguc

SEQ ID NO: 430685 - RNA, 22 nt, Human
uuccuaaacacaaaauuaacac

SEQ ID NO: 430686 - RNA, 20 nt, Human
uugaagcuuuaaaacagaga

SEQ ID NO: 430687 - RNA, 21 nt, Human
uugaagcuuuaaaacagagau

SEQ ID NO: 430688 - RNA, 19 nt, Human
uugcagacgguucuguggu

SEQ ID NO: 430689 - RNA, 20 nt, Human
uuuuauguggcaccauugac

SEQ ID NO: 430690 - RNA, 18 nt, Human
uuuuccuaacuucaucuu

SEQ ID NO: 430691 - RNA, 19 nt, Human
aacaugcccugcuugagaa

SEQ ID NO: 430692 - RNA, 19 nt, Human
acaaagugcuugauacuua

SEQ ID NO: 430693 - RNA, 22 nt, Human
acaaccaucugcacaaaugccc

SEQ ID NO: 430694 - RNA, 18 nt, Human
acaagaacaauccauuca

SEQ ID NO: 430695 - RNA, 21 nt, Human
acccaacacucugaccucaca

SEQ ID NO: 430696 - RNA, 22 nt, Human
acucuacccaucugagaaacaa

SEQ ID NO: 430697 - RNA, 19 nt, Human
agaccugaaugggcuaaug

SEQ ID NO: 430698 - RNA, 19 nt, Human
agcacauuccuccucaaca

SEQ ID NO: 430699 - RNA, 24 nt, Human
agguauagaagaaguuugcagcuc

SEQ ID NO: 430700 - RNA, 22 nt, Human
auccugacaaccuuaacacucg

SEQ ID NO: 430701 - RNA, 24 nt, Human
caaugaucucagccacauuucauc

SEQ ID NO: 430702 - RNA, 24 nt, Human
cacauuccuccucaacaaacaacc

SEQ ID NO: 430703 - RNA, 22 nt, Human
cagcagcacuggaaaagguaag

SEQ ID NO: 430704 - RNA, 24 nt, Human
cagcauaacaaagugcuugauacu

SEQ ID NO: 430705 - RNA, 19 nt, Human
cagcuuccugggagcagag

SEQ ID NO: 430706 - RNA, 22 nt, Human
caggaggaaagcucauguaaca

SEQ ID NO: 430707 - RNA, 25 nt, Human
cagugccaaugaucucagccacauu

SEQ ID NO: 430708 - RNA, 22 nt, Human
cauuccuccucaacaaacaacc

SEQ ID NO: 430709 - RNA, 21 nt, Human
cauuguacagcauaacaaagu

SEQ ID NO: 430710 - RNA, 22 nt, Human
ccaaaucauuucccuccugccc

SEQ ID NO: 430711 - RNA, 24 nt, Human
ccaaguuucuguaguugcccagca

SEQ ID NO: 430712 - RNA, 18 nt, Human
ccacagaauuuucauuca

SEQ ID NO: 430713 - RNA, 24 nt, Human
cucaaguucucagcuacugaaucu

SEQ ID NO: 430714 - RNA, 22 nt, Human
cugaagauucuccacagaauuu

SEQ ID NO: 430715 - RNA, 18 nt, Human
cuuccaaaacuagccagg

SEQ ID NO: 430716 - RNA, 21 nt, Human
cuucuugugucauugcugagu

SEQ ID NO: 430717 - RNA, 22 nt, Human
cuugccguuaaaugcuggguag

SEQ ID NO: 430718 - RNA, 21 nt, Human
gaaguguuuucugcugaagau

SEQ ID NO: 430719 - RNA, 24 nt, Human
gaccucacauuucuuaaucuccac

SEQ ID NO: 430720 - RNA, 26 nt, Human
gggagcagaguccaggugaccucacu

SEQ ID NO: 430721 - RNA, 18 nt, Human
uaagcacauuccuccuca

SEQ ID NO: 430722 - RNA, 26 nt, Human
uaagcacauuccuccucaacaaacaa

SEQ ID NO: 430723 - RNA, 20 nt, Human
uauccugacaaccuuaacac

SEQ ID NO: 430724 - RNA, 21 nt, Human
uccaaaucauuucccuccugc

SEQ ID NO: 430725 - RNA, 22 nt, Human
uccucggugaaggccacagagg

SEQ ID NO: 430726 - RNA, 27 nt, Human
uccuuuguaggaauauaaaguaagagu

SEQ ID NO: 430727 - RNA, 22 nt, Human
ucuacccaucugagaaacaaga

SEQ ID NO: 430728 - RNA, 20 nt, Human
ucuccacagugccaaugauc

SEQ ID NO: 430729 - RNA, 18 nt, Human
ucugcugaagauucucca

SEQ ID NO: 430730 - RNA, 20 nt, Human
ucugcugaagauucuccaca

SEQ ID NO: 430731 - RNA, 21 nt, Human
ugaagaccugaaugggcuaau

SEQ ID NO: 430732 - RNA, 19 nt, Human
ugagugagcuaagccaagu

SEQ ID NO: 430733 - RNA, 20 nt, Human
ugcacaaaugcccugcaagu

SEQ ID NO: 430734 - RNA, 21 nt, Human
ugcacaaaugcccugcaagug

SEQ ID NO: 430735 - RNA, 21 nt, Human
ugcugaguugucaucuucacc

SEQ ID NO: 430736 - RNA, 20 nt, Human
uggaaaagguaagaaaggua

SEQ ID NO: 430737 - RNA, 27 nt, Human
ugugucacucucuucuugugucauugc

SEQ ID NO: 430738 - RNA, 23 nt, Human
uuguacagcauaacaaagugcuu

SEQ ID NO: 430739 - RNA, 23 nt, Human
uuucugcugaagauucuccacag

SEQ ID NO: 430740 - RNA, 18 nt, Human
uuuguuggaaagucuuuc

SEQ ID NO: 430741 - RNA, 23 nt, Human
aaaaagaccugagugcugauucu

SEQ ID NO: 430742 - RNA, 19 nt, Human
aaaagacaacugaggcaga

SEQ ID NO: 430743 - RNA, 23 nt, Human
aaaaugguuuucagacuuuguaa

SEQ ID NO: 430744 - RNA, 22 nt, Human
aaacuuucaagaaagggacaau

SEQ ID NO: 430745 - RNA, 18 nt, Human
aaaggaauaaaaaauagg

SEQ ID NO: 430746 - RNA, 27 nt, Human
aaauagguaaccugauacuguaaugac

SEQ ID NO: 430747 - RNA, 22 nt, Human
aaaugguuuucagacuuuguaa

SEQ ID NO: 430748 - RNA, 18 nt, Human
aacacccugguaaaaaaa

SEQ ID NO: 430749 - RNA, 24 nt, Human
aaccugauacuugcccaccuguca

SEQ ID NO: 430750 - RNA, 23 nt, Human
aagaaaagacaacugaggcagaa

SEQ ID NO: 430751 - RNA, 21 nt, Human
acguucaacccuuuuguacca

SEQ ID NO: 430752 - RNA, 22 nt, Human
aggcagaauauaagccucaggg

SEQ ID NO: 430753 - RNA, 18 nt, Human
aguucugggaaccucaca

SEQ ID NO: 430754 - RNA, 21 nt, Human
augcucagacaaggggaagag

SEQ ID NO: 430755 - RNA, 19 nt, Human
auuugccuucaacacugcc

SEQ ID NO: 430756 - RNA, 20 nt, Human
caacacccugguaaaaaaaa

SEQ ID NO: 430757 - RNA, 21 nt, Human
caagaaaagacaacugaggca

SEQ ID NO: 430758 - RNA, 20 nt, Human
cacuccggcgcaaacuccgg

SEQ ID NO: 430759 - RNA, 22 nt, Human
caggcaaaauauaaauucuuga

SEQ ID NO: 430760 - RNA, 23 nt, Human
cauaaaacagcaaaccccuauga

SEQ ID NO: 430761 - RNA, 25 nt, Human
caucuuuuucuaaaagccaugacag

SEQ ID NO: 430762 - RNA, 23 nt, Human
ccaaaggaauaaaaaauagguaa

SEQ ID NO: 430763 - RNA, 25 nt, Human
ccccguuuucuucacaggcacuccg

SEQ ID NO: 430764 - RNA, 19 nt, Human
ccgcagacuucgcugucca

SEQ ID NO: 430765 - RNA, 21 nt, Human
cuccuccaaauacaacacccu

SEQ ID NO: 430766 - RNA, 25 nt, Human
cugagugcugauucuuuuuuuuuuu

SEQ ID NO: 430767 - RNA, 18 nt, Human
cuuaacaaagaugaaggc

SEQ ID NO: 430768 - RNA, 20 nt, Human
gcugauucuuuuuuuuuuuu

SEQ ID NO: 430769 - RNA, 18 nt, Human
uaaauaucauaaugguga

SEQ ID NO: 430770 - RNA, 24 nt, Human
uaaauucuugauacauuucaauuc

SEQ ID NO: 430771 - RNA, 20 nt, Human
uaacucacauaaaacagcaa

SEQ ID NO: 430772 - RNA, 26 nt, Human
uagaaaaugcuuaauaauaaaugcau

SEQ ID NO: 430773 - RNA, 22 nt, Human
ucacauaaaacagcaaaccccu

SEQ ID NO: 430774 - RNA, 23 nt, Human
ucacuuuuugauguuuaucacca

SEQ ID NO: 430775 - RNA, 24 nt, Human
ucagggcaauaccccguuuucuuc

SEQ ID NO: 430776 - RNA, 19 nt, Human
ucauuauuuggagaaguaa

SEQ ID NO: 430777 - RNA, 18 nt, Human
uccacggcagacgcagaa

SEQ ID NO: 430778 - RNA, 24 nt, Human
ucuguccuuaacaaagaugaaggc

SEQ ID NO: 430779 - RNA, 19 nt, Human
ugaggaaugcucagacaag

SEQ ID NO: 430780 - RNA, 24 nt, Human
ugaggaaugcucagacaaggggaa

SEQ ID NO: 430781 - RNA, 24 nt, Human
ugccuuuuaauauauaagggaaug

SEQ ID NO: 430782 - RNA, 26 nt, Human
uucaacacugccauccgcuacaaauu

SEQ ID NO: 430783 - RNA, 23 nt, Human
uucaagauaaauaucauaauggu

SEQ ID NO: 430784 - RNA, 23 nt, Human
uucacaggcacuccggcgcaaac

SEQ ID NO: 430785 - RNA, 22 nt, Human
uucacuuuuugauguuuaucac

SEQ ID NO: 430786 - RNA, 22 nt, Human
uucgcuguccacggcagacgca

SEQ ID NO: 430787 - RNA, 26 nt, Human
uuguaccaaaggaauaaaaaauaggu

SEQ ID NO: 430788 - RNA, 25 nt, Human
uuucuucacaggcacuccggcgcaa

SEQ ID NO: 430789 - RNA, 19 nt, Human
uuugucuucauuucugaag

SEQ ID NO: 430790 - RNA, 24 nt, Human
aauggcuuaaacccaggaggcaga

SEQ ID NO: 430791 - RNA, 19 nt, Human
acaagagugaaacuccauc

SEQ ID NO: 430792 - RNA, 20 nt, Human
acaagagugaaacuccaucu

SEQ ID NO: 430793 - RNA, 21 nt, Human
acaagagugaaacuccaucuc

SEQ ID NO: 430794 - RNA, 24 nt, Human
aggcagaagaauggcuuaaaccca

SEQ ID NO: 430795 - RNA, 27 nt, Human
aggcagaagaauggcuuaaacccagga

SEQ ID NO: 430796 - RNA, 20 nt, Human
aggcagagauugcagugaac

SEQ ID NO: 430797 - RNA, 18 nt, Human
agggcugguuaaaggcuu

SEQ ID NO: 430798 - RNA, 23 nt, Human
aucaugucauugcacuccagccu

SEQ ID NO: 430799 - RNA, 18 nt, Human
auugcacuccagccucgg

SEQ ID NO: 430800 - RNA, 21 nt, Human
auugcacuccagccucgguga

SEQ ID NO: 430801 - RNA, 21 nt, Human
caccuguaaucccagcuacuu

SEQ ID NO: 430802 - RNA, 23 nt, Human
caccuguaaucccagcuacuugg

SEQ ID NO: 430803 - RNA, 24 nt, Human
caccuguaaucccagcuacuuggg

SEQ ID NO: 430804 - RNA, 24 nt, Human
cacuccagccucggugacaagagu

SEQ ID NO: 430805 - RNA, 24 nt, Human
cagcuacuugggaggcugaggcag

SEQ ID NO: 430806 - RNA, 19 nt, Human
cauugcacuccagccucgg

SEQ ID NO: 430807 - RNA, 19 nt, Human
cauugcacuccagccucgg

SEQ ID NO: 430808 - RNA, 20 nt, Human
cauugcacuccagccucggu

SEQ ID NO: 430809 - RNA, 20 nt, Human
cauugcacuccagccucggu

SEQ ID NO: 430810 - RNA, 21 nt, Human
cauugcacuccagccucggug

SEQ ID NO: 430811 - RNA, 23 nt, Human
cauugcacuccagccucggugac

SEQ ID NO: 430812 - RNA, 24 nt, Human
cauugcacuccagccucggugaca

SEQ ID NO: 430813 - RNA, 25 nt, Human
cauugcacuccagccucggugacaa

SEQ ID NO: 430814 - RNA, 21 nt, Human
ccauauaaacucucaaauuua

SEQ ID NO: 430815 - RNA, 19 nt, Human
ccucggugacaagagugaa

SEQ ID NO: 430816 - RNA, 21 nt, Human
ccuguaaucccagcuacuugg

SEQ ID NO: 430817 - RNA, 23 nt, Human
cucaaaaaaaaaggaauugagaa

SEQ ID NO: 430818 - RNA, 21 nt, Human
cuguaaucccagcuacuuggg

SEQ ID NO: 430819 - RNA, 22 nt, Human
gcagaagaauggcuuaaaccca

SEQ ID NO: 430820 - RNA, 24 nt, Human
ggagaucaugucauugcacuccag

SEQ ID NO: 430821 - RNA, 21 nt, Human
guugggcaccuguaaucccag

SEQ ID NO: 430822 - RNA, 20 nt, Human
ucauugcacuccagccucgg

SEQ ID NO: 430823 - RNA, 21 nt, Human
ucauugcacuccagccucggu

SEQ ID NO: 430824 - RNA, 24 nt, Human
ucauugcacuccagccucggugac

SEQ ID NO: 430825 - RNA, 22 nt, Human
ucggugacaagagugaaacucc

SEQ ID NO: 430826 - RNA, 24 nt, Human
ugaggcagaagaauggcuuaaacc

SEQ ID NO: 430827 - RNA, 20 nt, Human
ugaggcagaagaauggcuuc

SEQ ID NO: 430828 - RNA, 25 nt, Human
ugcacuccagccucggugacaagag

SEQ ID NO: 430829 - RNA, 24 nt, Human
ugggaggcugaggcagaagaaugg

SEQ ID NO: 430830 - RNA, 25 nt, Human
ugggaggcugaggcagaagaauggc

SEQ ID NO: 430831 - RNA, 24 nt, Human
ugguuaaaggcuuucccacauuca

SEQ ID NO: 430832 - RNA, 21 nt, Human
uguugggcaccuguaauccca

SEQ ID NO: 430833 - RNA, 22 nt, Human
uguugggcaccuguaaucccag

SEQ ID NO: 430834 - RNA, 18 nt, Human
uugggaggcugaggcaga

SEQ ID NO: 430835 - RNA, 23 nt, Human
aaaccaauuuuaaacaaaaguaa

SEQ ID NO: 430836 - RNA, 26 nt, Human
aaaccaauuuuaaacaaaaguaauau

SEQ ID NO: 430837 - RNA, 18 nt, Human
aacauuauaccugcuacu

SEQ ID NO: 430838 - RNA, 21 nt, Human
aauaaaauaugaaucaaaacc

SEQ ID NO: 430839 - RNA, 18 nt, Human
acaucaaaaggacaccug

SEQ ID NO: 430840 - RNA, 23 nt, Human
accaaccuaagugcccaucaacc

SEQ ID NO: 430841 - RNA, 21 nt, Human
acugagugaagacuuuauugc

SEQ ID NO: 430842 - RNA, 23 nt, Human
aggaauggaaaaccaaauaccgu

SEQ ID NO: 430843 - RNA, 19 nt, Human
auggguguggugaaaagaa

SEQ ID NO: 430844 - RNA, 19 nt, Human
caccauggaauacuauuca

SEQ ID NO: 430845 - RNA, 21 nt, Human
caccauggaauacuauucagc

SEQ ID NO: 430846 - RNA, 18 nt, Human
cagacuccaaauggggag

SEQ ID NO: 430847 - RNA, 26 nt, Human
cagcacaauucacaauuucaaagaca

SEQ ID NO: 430848 - RNA, 20 nt, Human
cauuauaccugcuacucuuc

SEQ ID NO: 430849 - RNA, 21 nt, Human
ccauguaaccaaaaaccagua

SEQ ID NO: 430850 - RNA, 23 nt, Human
cucagacuucaccauuagacaau

SEQ ID NO: 430851 - RNA, 21 nt, Human
cucaggaauggaaaaccaaau

SEQ ID NO: 430852 - RNA, 22 nt, Human
cucaggaauggaaaaccaaaua

SEQ ID NO: 430853 - RNA, 18 nt, Human
gaaaaacaauagauguug

SEQ ID NO: 430854 - RNA, 24 nt, Human
ggaaaagaaguccuuacaucaaaa

SEQ ID NO: 430855 - RNA, 18 nt, Human
ggccauggcaggaaacuc

SEQ ID NO: 430856 - RNA, 18 nt, Human
guggaucuaccauuugau

SEQ ID NO: 430857 - RNA, 23 nt, Human
guggaucuaccauuugauccagc

SEQ ID NO: 430858 - RNA, 18 nt, Human
uaaaaucucagacuucac

SEQ ID NO: 430859 - RNA, 21 nt, Human
uaaccaaaaaccaguauauac

SEQ ID NO: 430860 - RNA, 18 nt, Human
uacagcacaauucacaau

SEQ ID NO: 430861 - RNA, 30 nt, Human
uagugaauuuccuaaucagucuaaaaucuu

SEQ ID NO: 430862 - RNA, 21 nt, Human
uaugauacaaacauuauaccu

SEQ ID NO: 430863 - RNA, 27 nt, Human
uauuacagcacaauucacaauuucaaa

SEQ ID NO: 430864 - RNA, 22 nt, Human
ucacaauuucaaagacauggaa

SEQ ID NO: 430865 - RNA, 23 nt, Human
ucacaauuucaaagacauggaac

SEQ ID NO: 430866 - RNA, 20 nt, Human
uccauguaaccaaaaaccaa

SEQ ID NO: 430867 - RNA, 23 nt, Human
ucccacuacuaucuacccaaagg

SEQ ID NO: 430868 - RNA, 19 nt, Human
ucuaaagaacuaaaagugg

SEQ ID NO: 430869 - RNA, 22 nt, Human
ucucuaaagaacuaaaagugga

SEQ ID NO: 430870 - RNA, 21 nt, Human
ugaaaagaaacgccuauacac

SEQ ID NO: 430871 - RNA, 21 nt, Human
ugaggacaagugaagccuuug

SEQ ID NO: 430872 - RNA, 21 nt, Human
ugauagaaauaaaagacgaaa

SEQ ID NO: 430873 - RNA, 20 nt, Human
ugcagcaacuuggauggagc

SEQ ID NO: 430874 - RNA, 20 nt, Human
ugcagcaacuuggauggagc

SEQ ID NO: 430875 - RNA, 19 nt, Human
uggaaccaaccuaagugcc

SEQ ID NO: 430876 - RNA, 19 nt, Human
uggaauacuauucagccau

SEQ ID NO: 430877 - RNA, 22 nt, Human
uggagauucucuaaagaacuaa

SEQ ID NO: 430878 - RNA, 20 nt, Human
uggauaaagaaaauauggua

SEQ ID NO: 430879 - RNA, 21 nt, Human
uggggaggguggaagguaggg

SEQ ID NO: 430880 - RNA, 25 nt, Human
uguaaccaaaaaccaguauauacuu

SEQ ID NO: 430881 - RNA, 24 nt, Human
uguggugaaaagaaacgccuauac

SEQ ID NO: 430882 - RNA, 21 nt, Human
uucaaagacauggaaccaacc

SEQ ID NO: 430883 - RNA, 24 nt, Human
uucaaagacauggaaccaaccuaa

SEQ ID NO: 430884 - RNA, 24 nt, Human
uuccuaaucagucuaaaaucuugc

SEQ ID NO: 430885 - RNA, 23 nt, Human
uucuaagugaaguaacucaggaa

SEQ ID NO: 430886 - RNA, 24 nt, Human
uugcagcaacuuggauggagcugg

SEQ ID NO: 430887 - RNA, 21 nt, Human
aaacaugguuauugaaaauac

SEQ ID NO: 430888 - RNA, 20 nt, Human
aguauguacacauauaaacu

SEQ ID NO: 430889 - RNA, 23 nt, Human
ccugcuccagaaccacccaggga

SEQ ID NO: 430890 - RNA, 20 nt, Human
cugaccaugguguguuccuu

SEQ ID NO: 430891 - RNA, 18 nt, Human
cugauaaggugccuccuc

SEQ ID NO: 430892 - RNA, 19 nt, Human
uaagugucaaguucuccag

SEQ ID NO: 430893 - RNA, 21 nt, Human
uaagugucaaguucuccagca

SEQ ID NO: 430894 - RNA, 23 nt, Human
ucaucaagaagaccccauuccuu

SEQ ID NO: 430895 - RNA, 18 nt, Human
uccucauccccugcucca

SEQ ID NO: 430896 - RNA, 21 nt, Human
uccuugguguucaaccaagug

SEQ ID NO: 430897 - RNA, 22 nt, Human
ugcagggacacuucucaguccg

SEQ ID NO: 430898 - RNA, 26 nt, Human
uguacacauauaaacuuauuuguaua

SEQ ID NO: 430899 - RNA, 25 nt, Human
aaauguugaggauuuguuaaaagcc

SEQ ID NO: 430900 - RNA, 18 nt, Human
aagcacugugacaucauu

SEQ ID NO: 430901 - RNA, 22 nt, Human
aggaacaguuaaaagcuuugac

SEQ ID NO: 430902 - RNA, 19 nt, Human
aggcuaugccacauucauc

SEQ ID NO: 430903 - RNA, 24 nt, Human
aguuucgcuccaguaugaaacauc

SEQ ID NO: 430904 - RNA, 24 nt, Human
auauuuguaggcuuuaucuuccac

SEQ ID NO: 430905 - RNA, 19 nt, Human
cacugugacaucauucagg

SEQ ID NO: 430906 - RNA, 27 nt, Human
caucuuauaucuguuaagaauugagga

SEQ ID NO: 430907 - RNA, 21 nt, Human
ccaauaccugcaggucacagg

SEQ ID NO: 430908 - RNA, 18 nt, Human
ccacagaggcugggcccc

SEQ ID NO: 430909 - RNA, 21 nt, Human
cugcaggucacagggccacag

SEQ ID NO: 430910 - RNA, 22 nt, Human
ggccacguucuucacauuugua

SEQ ID NO: 430911 - RNA, 20 nt, Human
uaccugcaggucacagggcc

SEQ ID NO: 430912 - RNA, 22 nt, Human
uaguaaggauugaggaacaguu

SEQ ID NO: 430913 - RNA, 18 nt, Human
ucccaauaccugcagguc

SEQ ID NO: 430914 - RNA, 21 nt, Human
ucccuuauguuuaguaaggau

SEQ ID NO: 430915 - RNA, 21 nt, Human
ugccacauucaucacauuuca

SEQ ID NO: 430916 - RNA, 20 nt, Human
ugggaagaggcuaugccaca

SEQ ID NO: 430917 - RNA, 22 nt, Human
ugucacauucuucauauuugua

SEQ ID NO: 430918 - RNA, 25 nt, Human
uguccaguauaaauuauguguaaua

SEQ ID NO: 430919 - RNA, 20 nt, Human
uguuuaguaagaguugagaa

SEQ ID NO: 430920 - RNA, 22 nt, Human
uguuuaguaaggauugaggaac

SEQ ID NO: 430921 - RNA, 21 nt, Human
uucauauuuguaggcuuuauc

SEQ ID NO: 430922 - RNA, 20 nt, Human
uuccaggaggaccuggcguc

SEQ ID NO: 430923 - RNA, 23 nt, Human
uucuucauauuuguaggcuuuau

SEQ ID NO: 430924 - RNA, 21 nt, Human
uugacacauucuucacauuug

SEQ ID NO: 430925 - RNA, 24 nt, Human
uuguaggcuuuaucuuccacagug

SEQ ID NO: 430926 - RNA, 22 nt, Human
uuuguaggguuuucuauuauga

SEQ ID NO: 430927 - RNA, 20 nt, Human
aaaaaacaacuuuauacucc

SEQ ID NO: 430928 - RNA, 21 nt, Human
aaaaacaacuuuauacuccac

SEQ ID NO: 430929 - RNA, 20 nt, Human
aaauaugguucuucauaacc

SEQ ID NO: 430930 - RNA, 20 nt, Human
aacacacagaucagagaagc

SEQ ID NO: 430931 - RNA, 21 nt, Human
aacugcaaaauauaauaaacg

SEQ ID NO: 430932 - RNA, 19 nt, Human
aagaccuucucgcacucac

SEQ ID NO: 430933 - RNA, 21 nt, Human
aagacucuguucccugcguuu

SEQ ID NO: 430934 - RNA, 22 nt, Human
aauccccagcacgaagcugucc

SEQ ID NO: 430935 - RNA, 19 nt, Human
acucucaagcucaucuuga

SEQ ID NO: 430936 - RNA, 24 nt, Human
agacaaccucccggucuggguacc

SEQ ID NO: 430937 - RNA, 24 nt, Human
agacacuaccacaggaagcacccc

SEQ ID NO: 430938 - RNA, 18 nt, Human
agagaaaacaggggugcu

SEQ ID NO: 430939 - RNA, 22 nt, Human
agagaagcagguucuaaaggga

SEQ ID NO: 430940 - RNA, 19 nt, Human
agauuuguaacuuauuucu

SEQ ID NO: 430941 - RNA, 18 nt, Human
agcaggaggcugaucugg

SEQ ID NO: 430942 - RNA, 22 nt, Human
aggagauaggacuuacuccuaa

SEQ ID NO: 430943 - RNA, 22 nt, Human
agguauuucuccagagaaaaca

SEQ ID NO: 430944 - RNA, 24 nt, Human
auagaacaaguuacauuaaaaaau

SEQ ID NO: 430945 - RNA, 19 nt, Human
auccauggaucuucuccuu

SEQ ID NO: 430946 - RNA, 19 nt, Human
auccgaagucuccugaaca

SEQ ID NO: 430947 - RNA, 18 nt, Human
augaauuacagacucaaa

SEQ ID NO: 430948 - RNA, 22 nt, Human
auggaacugcaaaauauaauaa

SEQ ID NO: 430949 - RNA, 19 nt, Human
caaaugaauuacagacuca

SEQ ID NO: 430950 - RNA, 19 nt, Human
caagucucuggucugccca

SEQ ID NO: 430951 - RNA, 18 nt, Human
cacagaucagagaagcag

SEQ ID NO: 430952 - RNA, 22 nt, Human
cacuaccacaggaagcacccca

SEQ ID NO: 430953 - RNA, 19 nt, Human
caggugcgggaccagggcc

SEQ ID NO: 430954 - RNA, 18 nt, Human
cauacgguuucacuccug

SEQ ID NO: 430955 - RNA, 20 nt, Human
ccacgcccacguucgcgcgc

SEQ ID NO: 430956 - RNA, 19 nt, Human
ccauuauuuucaucuacaa

SEQ ID NO: 430957 - RNA, 19 nt, Human
cccaacacacuacaagcau

SEQ ID NO: 430958 - RNA, 19 nt, Human
ccggcuccucagcucucgc

SEQ ID NO: 430959 - RNA, 21 nt, Human
ccucagcucucgcccaacaca

SEQ ID NO: 430960 - RNA, 23 nt, Human
ccuccugcuuguaaauccugucu

SEQ ID NO: 430961 - RNA, 19 nt, Human
cgugacuagacaaccuccc

SEQ ID NO: 430962 - RNA, 21 nt, Human
cugcggagagaccgugaggga

SEQ ID NO: 430963 - RNA, 20 nt, Human
cugggacaagaaugaaugag

SEQ ID NO: 430964 - RNA, 22 nt, Human
cuguccggaaacugguggccau

SEQ ID NO: 430965 - RNA, 24 nt, Human
cuuggcacugaaggcucuuucaca

SEQ ID NO: 430966 - RNA, 21 nt, Human
cuuguaaucaauuagccagaa

SEQ ID NO: 430967 - RNA, 23 nt, Human
gaaacacacagaucagagaagca

SEQ ID NO: 430968 - RNA, 19 nt, Human
gaacggauaccugaaagac

SEQ ID NO: 430969 - RNA, 28 nt, Human
gacucuguucccugcguuuugguugacc

SEQ ID NO: 430970 - RNA, 18 nt, Human
gagaagcagguucuaaag

SEQ ID NO: 430971 - RNA, 21 nt, Human
gagaggggagguauuucucca

SEQ ID NO: 430972 - RNA, 21 nt, Human
gccagaaugaauggauguucu

SEQ ID NO: 430973 - RNA, 20 nt, Human
gcccgaagacaggugcggga

SEQ ID NO: 430974 - RNA, 20 nt, Human
gccugcgggggcaggacccg

SEQ ID NO: 430975 - RNA, 22 nt, Human
gcugcggagagaccgugaggga

SEQ ID NO: 430976 - RNA, 19 nt, Human
ggcuccucagcucucgccc

SEQ ID NO: 430977 - RNA, 21 nt, Human
ggucuggguaccaggagucgc

SEQ ID NO: 430978 - RNA, 20 nt, Human
guaauuuuagggccuccugc

SEQ ID NO: 430979 - RNA, 21 nt, Human
gucucucuccuguaugaauuc

SEQ ID NO: 430980 - RNA, 18 nt, Human
uaaaaugcucaccuguag

SEQ ID NO: 430981 - RNA, 21 nt, Human
uaaaaugcucaccuguagcua

SEQ ID NO: 430982 - RNA, 19 nt, Human
uaaagggaucguauccaca

SEQ ID NO: 430983 - RNA, 18 nt, Human
uaagucuucccaacacac

SEQ ID NO: 430984 - RNA, 24 nt, Human
uaccaagauuuuauuuuacaaaaa

SEQ ID NO: 430985 - RNA, 18 nt, Human
uaccacaggaagcacccc

SEQ ID NO: 430986 - RNA, 19 nt, Human
uaccacaggaagcacccca

SEQ ID NO: 430987 - RNA, 21 nt, Human
uaccccacugauaucagguua

SEQ ID NO: 430988 - RNA, 22 nt, Human
uauauagauagauagaacaagu

SEQ ID NO: 430989 - RNA, 21 nt, Human
ucacugcauuuaugggguuuc

SEQ ID NO: 430990 - RNA, 21 nt, Human
ucagauuaagucuucccaaca

SEQ ID NO: 430991 - RNA, 24 nt, Human
uccagagaaaacaggggugcucau

SEQ ID NO: 430992 - RNA, 20 nt, Human
ucccacauucacugcagcca

SEQ ID NO: 430993 - RNA, 22 nt, Human
ucccacauucacugcagccaua

SEQ ID NO: 430994 - RNA, 20 nt, Human
uccuuguuccaacuugaaga

SEQ ID NO: 430995 - RNA, 18 nt, Human
ucgcacggauggauuugu

SEQ ID NO: 430996 - RNA, 21 nt, Human
ucgcugcauucauacgguuuc

SEQ ID NO: 430997 - RNA, 26 nt, Human
ucuccagagaaaacaggggugcucau

SEQ ID NO: 430998 - RNA, 21 nt, Human
ucuccagagaaaacagggguu

SEQ ID NO: 430999 - RNA, 19 nt, Human
ucuccuguaugaauucuga

SEQ ID NO: 431000 - RNA, 19 nt, Human
ucucugaugagcauuaagg

SEQ ID NO: 431001 - RNA, 21 nt, Human
ucugaaaaagagauuaccauu

SEQ ID NO: 431002 - RNA, 19 nt, Human
ucugagauguacaaugagc

SEQ ID NO: 431003 - RNA, 24 nt, Human
ucuuucacauuuacugcauucaua

SEQ ID NO: 431004 - RNA, 21 nt, Human
ugaaaaagaaaucaaaagaua

SEQ ID NO: 431005 - RNA, 25 nt, Human
ugaaagacacuaccacaggaagcac

SEQ ID NO: 431006 - RNA, 18 nt, Human
ugaaugacaauaaucccc

SEQ ID NO: 431007 - RNA, 19 nt, Human
ugaaugacaauaaucccca

SEQ ID NO: 431008 - RNA, 22 nt, Human
ugaaugacaauaauccccagca

SEQ ID NO: 431009 - RNA, 21 nt, Human
ugacuuggcacugaaggcucu

SEQ ID NO: 431010 - RNA, 20 nt, Human
uggaacugcaaaauauaaua

SEQ ID NO: 431011 - RNA, 21 nt, Human
uggaaugugacuuuccaugga

SEQ ID NO: 431012 - RNA, 18 nt, Human
uggacaacaggcauggaa

SEQ ID NO: 431013 - RNA, 24 nt, Human
uggacagcucugccuggaaauuuu

SEQ ID NO: 431014 - RNA, 18 nt, Human
ugggacaagaaugaauga

SEQ ID NO: 431015 - RNA, 23 nt, Human
ugggacaagaaugaaugaguucc

SEQ ID NO: 431016 - RNA, 21 nt, Human
uggguaaaaugcucaccugua

SEQ ID NO: 431017 - RNA, 19 nt, Human
ugguaccauucuucccagc

SEQ ID NO: 431018 - RNA, 23 nt, Human
uggucaagucucuggucugccca

SEQ ID NO: 431019 - RNA, 20 nt, Human
uguagcuaguggaacggaua

SEQ ID NO: 431020 - RNA, 24 nt, Human
uguuauagagucucugucuugaag

SEQ ID NO: 431021 - RNA, 20 nt, Human
uguucucaacagaauucugg

SEQ ID NO: 431022 - RNA, 23 nt, Human
uguucucaacagaauucugggac

SEQ ID NO: 431023 - RNA, 24 nt, Human
uucauaaccaugaaacuuaucagg

SEQ ID NO: 431024 - RNA, 21 nt, Human
uugaugcuuaagaaaauaugg

SEQ ID NO: 431025 - RNA, 24 nt, Human
uuucccacauucacugcagccaua

SEQ ID NO: 431026 - RNA, 26 nt, Human
aaaaacacaaaaaggagccugggaaa

SEQ ID NO: 431027 - RNA, 26 nt, Human
aaagggaggcaguuacagagggggcu

SEQ ID NO: 431028 - RNA, 21 nt, Human
aacacagaaaccaaggggaca

SEQ ID NO: 431029 - RNA, 19 nt, Human
aacccaaagccaacaggau

SEQ ID NO: 431030 - RNA, 25 nt, Human
aacccagccucaacccaagucagaa

SEQ ID NO: 431031 - RNA, 24 nt, Human
aagcauaaagaaaacgggcaaggu

SEQ ID NO: 431032 - RNA, 23 nt, Human
aagccaggguuccuagagaaggc

SEQ ID NO: 431033 - RNA, 19 nt, Human
aaggagccugggaaacagc

SEQ ID NO: 431034 - RNA, 22 nt, Human
aauuguuuucugggaccuccaa

SEQ ID NO: 431035 - RNA, 24 nt, Human
acaaaaaggagccugggaaacagc

SEQ ID NO: 431036 - RNA, 21 nt, Human
acaacaggagucugcuccccg

SEQ ID NO: 431037 - RNA, 23 nt, Human
accacagaucccauccugcauga

SEQ ID NO: 431038 - RNA, 20 nt, Human
accagagcuauuaacacucc

SEQ ID NO: 431039 - RNA, 23 nt, Human
accagagcuauuaacacuccacc

SEQ ID NO: 431040 - RNA, 19 nt, Human
acccagccucaacccaagu

SEQ ID NO: 431041 - RNA, 19 nt, Human
acucugaagcauaaagaaa

SEQ ID NO: 431042 - RNA, 18 nt, Human
agaagggagugggcacag

SEQ ID NO: 431043 - RNA, 18 nt, Human
agagacaaacacagaaac

SEQ ID NO: 431044 - RNA, 23 nt, Human
agagagacaaacacagaaaccaa

SEQ ID NO: 431045 - RNA, 24 nt, Human
agagagacaaacacagaaaccaag

SEQ ID NO: 431046 - RNA, 18 nt, Human
aggagccugggaaacagc

SEQ ID NO: 431047 - RNA, 20 nt, Human
aggcagggaaugggugagcg

SEQ ID NO: 431048 - RNA, 25 nt, Human
aggcauuuggaagauuuuaaaaacg

SEQ ID NO: 431049 - RNA, 22 nt, Human
aggcuacaagccuagaacugca

SEQ ID NO: 431050 - RNA, 23 nt, Human
agggagugggcacagggcagaga

SEQ ID NO: 431051 - RNA, 19 nt, Human
agggcagagaaggcagcug

SEQ ID NO: 431052 - RNA, 18 nt, Human
caaccuaagauggcagag

SEQ ID NO: 431053 - RNA, 24 nt, Human
caagccuagaacugcagacagcga

SEQ ID NO: 431054 - RNA, 24 nt, Human
cacaaaaaggagccugggaaacag

SEQ ID NO: 431055 - RNA, 22 nt, Human
cacagcuccucgccuguccuuu

SEQ ID NO: 431056 - RNA, 28 nt, Human
cagacagcgacggccccgcgcuccuucu

SEQ ID NO: 431057 - RNA, 26 nt, Human
cagagucuggacccagaaggaggggu

SEQ ID NO: 431058 - RNA, 25 nt, Human
cagcaaagucaacagggaaagaaag

SEQ ID NO: 431059 - RNA, 18 nt, Human
cagccucaacccaaguca

SEQ ID NO: 431060 - RNA, 18 nt, Human
caggaaacccaaagccaa

SEQ ID NO: 431061 - RNA, 21 nt, Human
caguggcggcaggcccugcgc

SEQ ID NO: 431062 - RNA, 24 nt, Human
ccaaagccaacaggaucaccagag

SEQ ID NO: 431063 - RNA, 25 nt, Human
ccaaagccaacaggaucaccagagc

SEQ ID NO: 431064 - RNA, 23 nt, Human
ccaaugcaagauggggaagagag

SEQ ID NO: 431065 - RNA, 22 nt, Human
ccagccucaacccaagucagaa

SEQ ID NO: 431066 - RNA, 21 nt, Human
ccucaacccaagucagaaggu

SEQ ID NO: 431067 - RNA, 18 nt, Human
ccuuuuggcauggugcug

SEQ ID NO: 431068 - RNA, 19 nt, Human
ccuuuuggcauggugcugg

SEQ ID NO: 431069 - RNA, 22 nt, Human
cgccucagaacaauauauacaa

SEQ ID NO: 431070 - RNA, 18 nt, Human
cuagagaaggcagggaau

SEQ ID NO: 431071 - RNA, 20 nt, Human
gaagaguagagaagggagug

SEQ ID NO: 431072 - RNA, 23 nt, Human
gaagguaguuuuugccuugggag

SEQ ID NO: 431073 - RNA, 18 nt, Human
gacaggagucugcacaac

SEQ ID NO: 431074 - RNA, 18 nt, Human
gcacagggcagagaaggc

SEQ ID NO: 431075 - RNA, 21 nt, Human
gcaguggcggcaggcccugcg

SEQ ID NO: 431076 - RNA, 22 nt, Human
gcauggcucacugaagggacag

SEQ ID NO: 431077 - RNA, 21 nt, Human
gcggcaggcccugcgcccaca

SEQ ID NO: 431078 - RNA, 19 nt, Human
gcuucucacuacaacacaa

SEQ ID NO: 431079 - RNA, 25 nt, Human
ggaaacagcaaagucaaccgguacc

SEQ ID NO: 431080 - RNA, 21 nt, Human
ggaaacccaaagccaacagga

SEQ ID NO: 431081 - RNA, 20 nt, Human
ggcagagaaggcagcugggu

SEQ ID NO: 431082 - RNA, 25 nt, Human
gggaagaguagagaagggagugggc

SEQ ID NO: 431083 - RNA, 20 nt, Human
gggcagagaaggcagcuggg

SEQ ID NO: 431084 - RNA, 25 nt, Human
ggggaacaauagaggggaacccagc

SEQ ID NO: 431085 - RNA, 20 nt, Human
ggggaacccagccucaaccc

SEQ ID NO: 431086 - RNA, 20 nt, Human
gguggugagauggugccaac

SEQ ID NO: 431087 - RNA, 22 nt, Human
uaaacaguggcuaacuggugac

SEQ ID NO: 431088 - RNA, 18 nt, Human
uaaagaaaacgggcaagc

SEQ ID NO: 431089 - RNA, 18 nt, Human
uaacuggugacaguuaua

SEQ ID NO: 431090 - RNA, 22 nt, Human
uaagauggcagagagacaaaca

SEQ ID NO: 431091 - RNA, 18 nt, Human
uagucauucucugccucu

SEQ ID NO: 431092 - RNA, 22 nt, Human
ucccauaggcuuggccuagcuc

SEQ ID NO: 431093 - RNA, 21 nt, Human
uccccguacuuagucauucuc

SEQ ID NO: 431094 - RNA, 20 nt, Human
uccucgccuguccuuugacc

SEQ ID NO: 431095 - RNA, 23 nt, Human
uccugcaugacucaaggucccau

SEQ ID NO: 431096 - RNA, 19 nt, Human
ucucacuacaacacaaggg

SEQ ID NO: 431097 - RNA, 21 nt, Human
ucucacuacaacacaaggguu

SEQ ID NO: 431098 - RNA, 22 nt, Human
ucugcacaacaggagucugcuc

SEQ ID NO: 431099 - RNA, 22 nt, Human
ugaaacaaacaauuucagagac

SEQ ID NO: 431100 - RNA, 18 nt, Human
ugaagcauaaagaaaacg

SEQ ID NO: 431101 - RNA, 23 nt, Human
ugaagcauaaagaaaacgggcaa

SEQ ID NO: 431102 - RNA, 20 nt, Human
ugaccacagaucccauccug

SEQ ID NO: 431103 - RNA, 22 nt, Human
ugagggacauggccacaggaca

SEQ ID NO: 431104 - RNA, 20 nt, Human
ugcuggggaagaguagagaa

SEQ ID NO: 431105 - RNA, 19 nt, Human
uggcauggugcuggggaag

SEQ ID NO: 431106 - RNA, 25 nt, Human
uggccacaggacagacauugauggu

SEQ ID NO: 431107 - RNA, 21 nt, Human
uggcuaacuggugacaguuau

SEQ ID NO: 431108 - RNA, 19 nt, Human
uggggaagaguagagaagg

SEQ ID NO: 431109 - RNA, 26 nt, Human
uggguacccccuuugccagaagcuaa

SEQ ID NO: 431110 - RNA, 22 nt, Human
ugggucaggaaacccaaagcca

SEQ ID NO: 431111 - RNA, 20 nt, Human
ugggugagcggaaaggagca

SEQ ID NO: 431112 - RNA, 22 nt, Human
ugguuccugggccugucacccu

SEQ ID NO: 431113 - RNA, 23 nt, Human
ugucaagugguacggaagaagau

SEQ ID NO: 431114 - RNA, 21 nt, Human
uuuaaacaguggcuaacuggu

SEQ ID NO: 431115 - RNA, 25 nt, Human
uuucagagacagaagguuagucguu

SEQ ID NO: 431116 - RNA, 24 nt, Human
aaaaaaaaaaaaaaaggucaagag

SEQ ID NO: 431117 - RNA, 21 nt, Human
aaaaaagacaagacugggggg

SEQ ID NO: 431118 - RNA, 20 nt, Human
aaaaauaauuccugagauaa

SEQ ID NO: 431119 - RNA, 20 nt, Human
aaacaaaaagugauagaagg

SEQ ID NO: 431120 - RNA, 24 nt, Human
aaacaacugccaacucugaaucuu

SEQ ID NO: 431121 - RNA, 21 nt, Human
aaacucacugcacaaacucaa

SEQ ID NO: 431122 - RNA, 22 nt, Human
aaagaaacugacuucauaagua

SEQ ID NO: 431123 - RNA, 21 nt, Human
aaagagcaacacacuuccaca

SEQ ID NO: 431124 - RNA, 19 nt, Human
aaagugcuaggauuacagg

SEQ ID NO: 431125 - RNA, 19 nt, Human
aacauggugaaaccccguc

SEQ ID NO: 431126 - RNA, 20 nt, Human
aacauggugaaaccccgucu

SEQ ID NO: 431127 - RNA, 21 nt, Human
aacauggugaaaccccgucuc

SEQ ID NO: 431128 - RNA, 20 nt, Human
aaccaccagagaaccaugac

SEQ ID NO: 431129 - RNA, 21 nt, Human
aacugacuucauaaguaauga

SEQ ID NO: 431130 - RNA, 23 nt, Human
aagaaugaacaauggaaugggua

SEQ ID NO: 431131 - RNA, 23 nt, Human
aagacaaaagccugaauguuaac

SEQ ID NO: 431132 - RNA, 25 nt, Human
aagacuaguaaacaaccccaaauaa

SEQ ID NO: 431133 - RNA, 23 nt, Human
aagaucgugccacugcacuccag

SEQ ID NO: 431134 - RNA, 20 nt, Human
aagauggugaaaccccgucu

SEQ ID NO: 431135 - RNA, 21 nt, Human
aagcauggccugaguauaugc

SEQ ID NO: 431136 - RNA, 23 nt, Human
aagcugaggcaguuaauugcuug

SEQ ID NO: 431137 - RNA, 20 nt, Human
aaggaaacauaaagacaucu

SEQ ID NO: 431138 - RNA, 18 nt, Human
aagggcgggggaggagag

SEQ ID NO: 431139 - RNA, 23 nt, Human
aagguuggcggaucacaagguca

SEQ ID NO: 431140 - RNA, 20 nt, Human
aaucagugaggaccauggaa

SEQ ID NO: 431141 - RNA, 22 nt, Human
aaucauuuaagggcacacuuaa

SEQ ID NO: 431142 - RNA, 24 nt, Human
aaucgcuugaacccaggaggcgga

SEQ ID NO: 431143 - RNA, 24 nt, Human
aauugcuugaacccgggaggcaga

SEQ ID NO: 431144 - RNA, 27 nt, Human
acaaacaaaaaagcacccuaggaugca

SEQ ID NO: 431145 - RNA, 22 nt, Human
acaaguaauauucagcaacaga

SEQ ID NO: 431146 - RNA, 20 nt, Human
acacaaacaaaaaagcaccc

SEQ ID NO: 431147 - RNA, 24 nt, Human
acacacacacaaacaaaaaagcac

SEQ ID NO: 431148 - RNA, 23 nt, Human
acagaacagagagauacaucucu

SEQ ID NO: 431149 - RNA, 20 nt, Human
acagagugagacucugucuc

SEQ ID NO: 431150 - RNA, 24 nt, Human
acagagugagacuuggucucaaaa

SEQ ID NO: 431151 - RNA, 24 nt, Human
acagcacuccagcgugggugacag

SEQ ID NO: 431152 - RNA, 18 nt, Human
acaggguuuugccauguu

SEQ ID NO: 431153 - RNA, 21 nt, Human
acaggguuuugccauguuggc

SEQ ID NO: 431154 - RNA, 24 nt, Human
acaggguuuugccauguuggccag

SEQ ID NO: 431155 - RNA, 21 nt, Human
accauauggcuacaaugauga

SEQ ID NO: 431156 - RNA, 25 nt, Human
acccaaaaacuuccaugccacgcac

SEQ ID NO: 431157 - RNA, 22 nt, Human
acccacccaauggaaauuaaac

SEQ ID NO: 431158 - RNA, 24 nt, Human
accccgucucuacuaaaaauacaa

SEQ ID NO: 431159 - RNA, 24 nt, Human
accccgucucuacuaaaaauacaa

SEQ ID NO: 431160 - RNA, 19 nt, Human
acuaagaaauccaugacaa

SEQ ID NO: 431161 - RNA, 24 nt, Human
acucacugcacaaacucaacagau

SEQ ID NO: 431162 - RNA, 24 nt, Human
acuccagccugggugacagaguga

SEQ ID NO: 431163 - RNA, 24 nt, Human
acugcacuccagccugggugacag

SEQ ID NO: 431164 - RNA, 26 nt, Human
acugcacuccagccugggugacagag

SEQ ID NO: 431165 - RNA, 21 nt, Human
agaagguguacaaaagaaccc

SEQ ID NO: 431166 - RNA, 23 nt, Human
agacaaaagccugaauguuaaca

SEQ ID NO: 431167 - RNA, 21 nt, Human
agacagaaaauagacuggaaa

SEQ ID NO: 431168 - RNA, 18 nt, Human
agacaggguuuugccaug

SEQ ID NO: 431169 - RNA, 24 nt, Human
agagcugggacagaggagccccgg

SEQ ID NO: 431170 - RNA, 19 nt, Human
agaggagccccgggcggcc

SEQ ID NO: 431171 - RNA, 22 nt, Human
agaggucgacaggccaagguug

SEQ ID NO: 431172 - RNA, 24 nt, Human
agagguugcagagagccgagaucg

SEQ ID NO: 431173 - RNA, 24 nt, Human
agaguaaguacuauuguggaauac

SEQ ID NO: 431174 - RNA, 20 nt, Human
agagucaauucaccacaaag

SEQ ID NO: 431175 - RNA, 24 nt, Human
agcacuuuggggggccgaggcggg

SEQ ID NO: 431176 - RNA, 22 nt, Human
agccugagcaacauggugaaac

SEQ ID NO: 431177 - RNA, 24 nt, Human
agccugagcaacauggugaaaccc

SEQ ID NO: 431178 - RNA, 24 nt, Human
agccugggugacagagugagacuc

SEQ ID NO: 431179 - RNA, 24 nt, Human
agcgugggugacagagugagacuu

SEQ ID NO: 431180 - RNA, 18 nt, Human
agcuugacagaacugaug

SEQ ID NO: 431181 - RNA, 20 nt, Human
aggaguuugagaccagccug

SEQ ID NO: 431182 - RNA, 21 nt, Human
aggcagagguugcagagagcc

SEQ ID NO: 431183 - RNA, 24 nt, Human
aggcagagguugcagagagccgag

SEQ ID NO: 431184 - RNA, 23 nt, Human
aggcaggagaaucgcuugaaccc

SEQ ID NO: 431185 - RNA, 23 nt, Human
aggcaguuaauugcuugaacccg

SEQ ID NO: 431186 - RNA, 24 nt, Human
aggcggagguugcagugagccaag

SEQ ID NO: 431187 - RNA, 24 nt, Human
aggcggguggaucaugaggucaag

SEQ ID NO: 431188 - RNA, 24 nt, Human
aggcgugguggcgggcgccuguaa

SEQ ID NO: 431189 - RNA, 20 nt, Human
aggcugaggcaggagaaucg

SEQ ID NO: 431190 - RNA, 24 nt, Human
aggcugaggcaggagaaucgcuug

SEQ ID NO: 431191 - RNA, 25 nt, Human
aggcuggagugcaguggcacgaucu

SEQ ID NO: 431192 - RNA, 25 nt, Human
aggcuggagugcaguggugagaucu

SEQ ID NO: 431193 - RNA, 21 nt, Human
aggggucaggcucguacaaag

SEQ ID NO: 431194 - RNA, 23 nt, Human
aggggucaggcucguacaaaggu

SEQ ID NO: 431195 - RNA, 18 nt, Human
aggugauccacccgccuu

SEQ ID NO: 431196 - RNA, 24 nt, Human
agguuggcggaucacaaggucagg

SEQ ID NO: 431197 - RNA, 19 nt, Human
agugcagagagcuagggaa

SEQ ID NO: 431198 - RNA, 21 nt, Human
agugcaguggcacgaucucag

SEQ ID NO: 431199 - RNA, 23 nt, Human
agugcaguggcacgaucucagcu

SEQ ID NO: 431200 - RNA, 24 nt, Human
agugcaguggcacgaucucagcuc

SEQ ID NO: 431201 - RNA, 21 nt, Human
agugcaguggugagaucucag

SEQ ID NO: 431202 - RNA, 23 nt, Human
agugcaguggugagaucucagcu

SEQ ID NO: 431203 - RNA, 24 nt, Human
agugcaguggugagaucucagcuc

SEQ ID NO: 431204 - RNA, 24 nt, Human
aguggugagaucucagcucacugc

SEQ ID NO: 431205 - RNA, 18 nt, Human
aguucaaacaucaaugcc

SEQ ID NO: 431206 - RNA, 24 nt, Human
auaauguacagaacagagagauac

SEQ ID NO: 431207 - RNA, 20 nt, Human
aucacaaggucaggaguuuc

SEQ ID NO: 431208 - RNA, 21 nt, Human
aucacaaggucaggaguuuga

SEQ ID NO: 431209 - RNA, 24 nt, Human
aucgugccacugcacuccagccug

SEQ ID NO: 431210 - RNA, 20 nt, Human
auuacuauuacuuaagauag

SEQ ID NO: 431211 - RNA, 18 nt, Human
auuuuacaaacauuccau

SEQ ID NO: 431212 - RNA, 21 nt, Human
caaaaagcugggcaagcacca

SEQ ID NO: 431213 - RNA, 23 nt, Human
caaaagacgggcaucaagacaaa

SEQ ID NO: 431214 - RNA, 21 nt, Human
caaaagccugaauguuaacau

SEQ ID NO: 431215 - RNA, 18 nt, Human
caaaccaccagagaacca

SEQ ID NO: 431216 - RNA, 23 nt, Human
caaagaaacagaagguguacaaa

SEQ ID NO: 431217 - RNA, 24 nt, Human
caaagcgccauaggcuuggcagag

SEQ ID NO: 431218 - RNA, 18 nt, Human
caacacacuuccacaauc

SEQ ID NO: 431219 - RNA, 22 nt, Human
caacauggugaaaccccgucuc

SEQ ID NO: 431220 - RNA, 24 nt, Human
caacauggugaaaccccgucucua

SEQ ID NO: 431221 - RNA, 18 nt, Human
caacucagaagacugugg

SEQ ID NO: 431222 - RNA, 19 nt, Human
caagacaaaccaccagaga

SEQ ID NO: 431223 - RNA, 23 nt, Human
caagacaaaccaccagagaacca

SEQ ID NO: 431224 - RNA, 24 nt, Human
caagauggugaaaccccgucucua

SEQ ID NO: 431225 - RNA, 24 nt, Human
caauaaaaaagaacacaaaaauca

SEQ ID NO: 431226 - RNA, 23 nt, Human
cacaaaaaucauuuaagggcaca

SEQ ID NO: 431227 - RNA, 24 nt, Human
cacaaggucaggaguuugagacca

SEQ ID NO: 431228 - RNA, 24 nt, Human
cacaccuguaaccccagcacuuug

SEQ ID NO: 431229 - RNA, 19 nt, Human
cacaccuguaaucccagcu

SEQ ID NO: 431230 - RNA, 19 nt, Human
cacagcacuccagcguggg

SEQ ID NO: 431231 - RNA, 19 nt, Human
cacagcacuccagcguggg

SEQ ID NO: 431232 - RNA, 23 nt, Human
cacagcacuccagcgugggugac

SEQ ID NO: 431233 - RNA, 23 nt, Human
cacaggcacacgccaccaugccc

SEQ ID NO: 431234 - RNA, 24 nt, Human
caccacaaagacuuggcaaacccc

SEQ ID NO: 431235 - RNA, 24 nt, Human
caccaugcccggcuaauuuuugua

SEQ ID NO: 431236 - RNA, 24 nt, Human
cacccgccuuaguggucucaaagu

SEQ ID NO: 431237 - RNA, 19 nt, Human
caccuguaaccccagcacu

SEQ ID NO: 431238 - RNA, 24 nt, Human
caccuguaaccccagcacuuuggg

SEQ ID NO: 431239 - RNA, 21 nt, Human
caccuguaaucccagcuacuc

SEQ ID NO: 431240 - RNA, 24 nt, Human
caccuguaaucccagcuacucagg

SEQ ID NO: 431241 - RNA, 22 nt, Human
cacuccagccugggugacagag

SEQ ID NO: 431242 - RNA, 22 nt, Human
cacuccagccugggugacagag

SEQ ID NO: 431243 - RNA, 24 nt, Human
cacuccagccugggugacagagug

SEQ ID NO: 431244 - RNA, 22 nt, Human
cacuccagcgugggugacagag

SEQ ID NO: 431245 - RNA, 22 nt, Human
cacuccagcgugggugacagag

SEQ ID NO: 431246 - RNA, 24 nt, Human
cacuccagcgugggugacagagug

SEQ ID NO: 431247 - RNA, 21 nt, Human
cacugcaaccuccgccuccca

SEQ ID NO: 431248 - RNA, 19 nt, Human
cacugcacuccagccuggg

SEQ ID NO: 431249 - RNA, 19 nt, Human
cacugcacuccagccuggg

SEQ ID NO: 431250 - RNA, 21 nt, Human
cacugcacuccagccugggug

SEQ ID NO: 431251 - RNA, 22 nt, Human
cacugcacuccagccuggguga

SEQ ID NO: 431252 - RNA, 24 nt, Human
cacugcacuccagccugggugaca

SEQ ID NO: 431253 - RNA, 24 nt, Human
cacugcacuccagccugggugaca

SEQ ID NO: 431254 - RNA, 19 nt, Human
cacuguaaacuaaggagaa

SEQ ID NO: 431255 - RNA, 18 nt, Human
cagacccagggcgccgcc

SEQ ID NO: 431256 - RNA, 23 nt, Human
cagacgcagggccgccgccuccu

SEQ ID NO: 431257 - RNA, 21 nt, Human
cagagcugggacagaggagcc

SEQ ID NO: 431258 - RNA, 24 nt, Human
cagcacuuuggggggccgaggcgg

SEQ ID NO: 431259 - RNA, 25 nt, Human
cagcagcugggaccacaggcacacg

SEQ ID NO: 431260 - RNA, 24 nt, Human
cagcuacucaggaggcugaggcag

SEQ ID NO: 431261 - RNA, 24 nt, Human
caggguuuugccauguuggccagg

SEQ ID NO: 431262 - RNA, 18 nt, Human
caucuugcaacauagcgc

SEQ ID NO: 431263 - RNA, 24 nt, Human
cauguuggccaggcuggucucgaa

SEQ ID NO: 431264 - RNA, 23 nt, Human
cauucaguagaaaccacacuuga

SEQ ID NO: 431265 - RNA, 23 nt, Human
ccacaaagacuuggcaaaccuac

SEQ ID NO: 431266 - RNA, 33 nt, Human
ccacgcacaucacagccaaacuucugaacaccg

SEQ ID NO: 431267 - RNA, 18 nt, Human
ccacugcacuccagccug

SEQ ID NO: 431268 - RNA, 20 nt, Human
ccacugcacuccagccuggg

SEQ ID NO: 431269 - RNA, 20 nt, Human
ccacugcacuccagccuggg

SEQ ID NO: 431270 - RNA, 20 nt, Human
ccacugcacuccagccuggg

SEQ ID NO: 431271 - RNA, 21 nt, Human
ccacugcacuccagccugggu

SEQ ID NO: 431272 - RNA, 21 nt, Human
ccacugcacuccagccugggu

SEQ ID NO: 431273 - RNA, 23 nt, Human
ccacugcacuccagccuggguga

SEQ ID NO: 431274 - RNA, 24 nt, Human
ccacugcacuccagccugggugac

SEQ ID NO: 431275 - RNA, 22 nt, Human
ccaggaggcggagguugcagug

SEQ ID NO: 431276 - RNA, 19 nt, Human
ccauguuggccaggcuggu

SEQ ID NO: 431277 - RNA, 22 nt, Human
ccauguuggccaggcuggucuc

SEQ ID NO: 431278 - RNA, 23 nt, Human
ccauguuggccaggcuggucucg

SEQ ID NO: 431279 - RNA, 22 nt, Human
cccaaaaacuuccaugccacgc

SEQ ID NO: 431280 - RNA, 19 nt, Human
cccaggcuggagugcagug

SEQ ID NO: 431281 - RNA, 19 nt, Human
ccccaaauaacagaggaac

SEQ ID NO: 431282 - RNA, 23 nt, Human
ccccaccugugcccgacccuggc

SEQ ID NO: 431283 - RNA, 20 nt, Human
ccccagcacuuuggggggcc

SEQ ID NO: 431284 - RNA, 25 nt, Human
cccccaaauacacuaagaaauccau

SEQ ID NO: 431285 - RNA, 24 nt, Human
ccccccagcagcugggaccacagg

SEQ ID NO: 431286 - RNA, 23 nt, Human
ccccgggcggccugacggacccc

SEQ ID NO: 431287 - RNA, 18 nt, Human
cccuaaaaaagacaagac

SEQ ID NO: 431288 - RNA, 21 nt, Human
cccuggccgguugcccggggc

SEQ ID NO: 431289 - RNA, 21 nt, Human
ccucaggugauccacccgccu

SEQ ID NO: 431290 - RNA, 24 nt, Human
ccugagcaacauggugaaaccccg

SEQ ID NO: 431291 - RNA, 23 nt, Human
ccuggccaagauggugaaacccc

SEQ ID NO: 431292 - RNA, 24 nt, Human
ccuggccaagauggugaaaccccg

SEQ ID NO: 431293 - RNA, 18 nt, Human
ccuggccucaggugaucc

SEQ ID NO: 431294 - RNA, 22 nt, Human
ccuggccucaggugauccaccc

SEQ ID NO: 431295 - RNA, 23 nt, Human
ccuggccucaggugauccacccg

SEQ ID NO: 431296 - RNA, 22 nt, Human
ccugggugacagagugagacuc

SEQ ID NO: 431297 - RNA, 21 nt, Human
ccuguaaucccagcuacucag

SEQ ID NO: 431298 - RNA, 22 nt, Human
ccuugaaacauuucccuucccc

SEQ ID NO: 431299 - RNA, 22 nt, Human
cgacccaggaacaaacccacgg

SEQ ID NO: 431300 - RNA, 19 nt, Human
cgacuuacuacuugacuuu

SEQ ID NO: 431301 - RNA, 22 nt, Human
cgaggcggguggaucaugaggu

SEQ ID NO: 431302 - RNA, 24 nt, Human
cgaggcggguggaucaugagguca

SEQ ID NO: 431303 - RNA, 25 nt, Human
cgccuguaauccauuacuagggaag

SEQ ID NO: 431304 - RNA, 24 nt, Human
cgcucugcugcccaggcuggagug

SEQ ID NO: 431305 - RNA, 24 nt, Human
cgcucuguugcccaggcuggagug

SEQ ID NO: 431306 - RNA, 21 nt, Human
cggaucacaaggucaggaguu

SEQ ID NO: 431307 - RNA, 18 nt, Human
cuaaaaaagacaagacug

SEQ ID NO: 431308 - RNA, 19 nt, Human
cuauacgcugaaaauuuuu

SEQ ID NO: 431309 - RNA, 22 nt, Human
cucacaccuguaaccccagcac

SEQ ID NO: 431310 - RNA, 24 nt, Human
cucacaccuguaaccccagcacuu

SEQ ID NO: 431311 - RNA, 18 nt, Human
cuccccugcucgguccug

SEQ ID NO: 431312 - RNA, 25 nt, Human
cuccugccucagccccccagcagcu

SEQ ID NO: 431313 - RNA, 21 nt, Human
cucgcucuguugcccaggcug

SEQ ID NO: 431314 - RNA, 24 nt, Human
cucgcucuguugcccaggcuggag

SEQ ID NO: 431315 - RNA, 24 nt, Human
cugacggaccccaccugugcccga

SEQ ID NO: 431316 - RNA, 24 nt, Human
cugcaaccuccgccucccacguuc

SEQ ID NO: 431317 - RNA, 24 nt, Human
cugcccaggcuggagugcaguggu

SEQ ID NO: 431318 - RNA, 18 nt, Human
cuggaaaauacaaaacca

SEQ ID NO: 431319 - RNA, 21 nt, Human
cuguaaucccagcuacucagg

SEQ ID NO: 431320 - RNA, 19 nt, Human
cuguugcccaggcuggagu

SEQ ID NO: 431321 - RNA, 23 nt, Human
cuuaagcccuaaaauaucaauaa

SEQ ID NO: 431322 - RNA, 24 nt, Human
cuuuacucaauuuaaaaauuuacc

SEQ ID NO: 431323 - RNA, 19 nt, Human
gaaaaacacuuugaaugaa

SEQ ID NO: 431324 - RNA, 22 nt, Human
gaacauuuguuacucuagaaga

SEQ ID NO: 431325 - RNA, 26 nt, Human
gacagagugagacucugucucuuuaa

SEQ ID NO: 431326 - RNA, 24 nt, Human
gacagagugagacuuggucucaaa

SEQ ID NO: 431327 - RNA, 19 nt, Human
gacaggguuuugccauguu

SEQ ID NO: 431328 - RNA, 19 nt, Human
gaccgcagcuugacggcga

SEQ ID NO: 431329 - RNA, 23 nt, Human
gagaaucgcuugaacccaggagg

SEQ ID NO: 431330 - RNA, 23 nt, Human
gagguugcagugagccaagaucg

SEQ ID NO: 431331 - RNA, 21 nt, Human
gaucacaaggucaggaguuug

SEQ ID NO: 431332 - RNA, 22 nt, Human
gaucacaaggucaggaguuuga

SEQ ID NO: 431333 - RNA, 24 nt, Human
gaucacaaggucaggaguuugaga

SEQ ID NO: 431334 - RNA, 24 nt, Human
gaucaugaggucaagaguucaaga

SEQ ID NO: 431335 - RNA, 25 nt, Human
gcaaagaaacagaagguguacaaaa

SEQ ID NO: 431336 - RNA, 22 nt, Human
gcaaccuccgccucccacguuc

SEQ ID NO: 431337 - RNA, 19 nt, Human
gcaagcaccagggagcgcc

SEQ ID NO: 431338 - RNA, 21 nt, Human
gcacaacucagaagacugugg

SEQ ID NO: 431339 - RNA, 18 nt, Human
gcacaucacagccaaacu

SEQ ID NO: 431340 - RNA, 23 nt, Human
gcacuccagccugggugacagag

SEQ ID NO: 431341 - RNA, 24 nt, Human
gcacuccagcgugggugacagagu

SEQ ID NO: 431342 - RNA, 22 nt, Human
gcaggagaaucgcuugaaccca

SEQ ID NO: 431343 - RNA, 24 nt, Human
gcauacuuuuccuaaacuaacugu

SEQ ID NO: 431344 - RNA, 20 nt, Human
gccaagaucgugccacugca

SEQ ID NO: 431345 - RNA, 24 nt, Human
gccaagauggugaaaccccgucuc

SEQ ID NO: 431346 - RNA, 19 nt, Human
gccacugcacuccagccug

SEQ ID NO: 431347 - RNA, 24 nt, Human
gccacugcacuccagccuggguga

SEQ ID NO: 431348 - RNA, 20 nt, Human
gccauguuggccaggcuggu

SEQ ID NO: 431349 - RNA, 19 nt, Human
gcccaggcuggagugcagu

SEQ ID NO: 431350 - RNA, 19 nt, Human
gcccaggcuggagugcagu

SEQ ID NO: 431351 - RNA, 22 nt, Human
gcccggcuaauuuuuguauuuu

SEQ ID NO: 431352 - RNA, 18 nt, Human
gccugaaaagaugugugc

SEQ ID NO: 431353 - RNA, 23 nt, Human
gcggcgcacaccuguaaucccag

SEQ ID NO: 431354 - RNA, 25 nt, Human
gcucugcugcccaggcuggagugca

SEQ ID NO: 431355 - RNA, 25 nt, Human
gcucuguugcccaggcuggagugca

SEQ ID NO: 431356 - RNA, 19 nt, Human
gcuggagugcaguggcacg

SEQ ID NO: 431357 - RNA, 23 nt, Human
gcuggucucgaacuccuggccuc

SEQ ID NO: 431358 - RNA, 22 nt, Human
ggaaaaagaaaaaagaugagag

SEQ ID NO: 431359 - RNA, 24 nt, Human
ggaaugucaaaggaacuagaaaug

SEQ ID NO: 431360 - RNA, 22 nt, Human
ggaggcggagguugcagugagc

SEQ ID NO: 431361 - RNA, 20 nt, Human
ggagguugcagugagccaag

SEQ ID NO: 431362 - RNA, 24 nt, Human
ggagguugcagugagccaagaucg

SEQ ID NO: 431363 - RNA, 23 nt, Human
ggagucucgcucuguugcccagg

SEQ ID NO: 431364 - RNA, 20 nt, Human
ggaucacaaggucaggaguu

SEQ ID NO: 431365 - RNA, 23 nt, Human
ggaucacaaggucaggaguuuga

SEQ ID NO: 431366 - RNA, 18 nt, Human
ggccaagauggugaaacc

SEQ ID NO: 431367 - RNA, 19 nt, Human
ggccgggugcaguggcuca

SEQ ID NO: 431368 - RNA, 23 nt, Human
ggcggaucacaaggucaggaguu

SEQ ID NO: 431369 - RNA, 24 nt, Human
ggcggcgcacaccuguaaucccag

SEQ ID NO: 431370 - RNA, 22 nt, Human
ggcuacaaugaugacguaaacc

SEQ ID NO: 431371 - RNA, 24 nt, Human
ggcuggucucgaacuccuggccuc

SEQ ID NO: 431372 - RNA, 20 nt, Human
gggccgaggcggguggauca

SEQ ID NO: 431373 - RNA, 24 nt, Human
ggguguggcggcgcacaccuguaa

SEQ ID NO: 431374 - RNA, 22 nt, Human
ggguuuugccauguuggccagg

SEQ ID NO: 431375 - RNA, 22 nt, Human
gguaagcuuuaaaauaaaauga

SEQ ID NO: 431376 - RNA, 23 nt, Human
ggugcaguggcucacaccuguaa

SEQ ID NO: 431377 - RNA, 23 nt, Human
gguggaucaugaggucaagaguu

SEQ ID NO: 431378 - RNA, 18 nt, Human
gguugcccggggcuucca

SEQ ID NO: 431379 - RNA, 24 nt, Human
guaaaacaagaucugccacucaug

SEQ ID NO: 431380 - RNA, 19 nt, Human
guacaaaagaacccaccca

SEQ ID NO: 431381 - RNA, 24 nt, Human
gucucgcucugcugcccaggcugg

SEQ ID NO: 431382 - RNA, 21 nt, Human
gucucuuuaaaaaaaaaaaaa

SEQ ID NO: 431383 - RNA, 25 nt, Human
gugauccacccgccuuaguggucuc

SEQ ID NO: 431384 - RNA, 18 nt, Human
gugcaguggcucacaccu

SEQ ID NO: 431385 - RNA, 19 nt, Human
gugggugacagagugagac

SEQ ID NO: 431386 - RNA, 21 nt, Human
uaaaaaauaagcaaagaaaca

SEQ ID NO: 431387 - RNA, 21 nt, Human
uaaaaauacaaaaauuagcca

SEQ ID NO: 431388 - RNA, 18 nt, Human
uaaaaauacaaaauuagc

SEQ ID NO: 431389 - RNA, 19 nt, Human
uaaaaauacaaaauuagcu

SEQ ID NO: 431390 - RNA, 21 nt, Human
uaaaacaagaucugccacuca

SEQ ID NO: 431391 - RNA, 21 nt, Human
uaaacaaccccaaauaacaga

SEQ ID NO: 431392 - RNA, 21 nt, Human
uaaacuaaggagaaagaugca

SEQ ID NO: 431393 - RNA, 21 nt, Human
uaaaggaaccuaauggaagua

SEQ ID NO: 431394 - RNA, 24 nt, Human
uaaaguuugcauacuuuuccuaaa

SEQ ID NO: 431395 - RNA, 18 nt, Human
uaaauguacauacaagca

SEQ ID NO: 431396 - RNA, 18 nt, Human
uaagaggccuacuccugc

SEQ ID NO: 431397 - RNA, 19 nt, Human
uaagggcacacuuaagccc

SEQ ID NO: 431398 - RNA, 22 nt, Human
uaaucaauauuaacaagacaga

SEQ ID NO: 431399 - RNA, 18 nt, Human
uaauggaaguaaagugcu

SEQ ID NO: 431400 - RNA, 20 nt, Human
uaauggaaguaaagugcuaa

SEQ ID NO: 431401 - RNA, 22 nt, Human
uaauuuuuguauuuuuaguaga

SEQ ID NO: 431402 - RNA, 21 nt, Human
uacacacacacacaaacaaaa

SEQ ID NO: 431403 - RNA, 23 nt, Human
uacagaucaaaaagcugggcaag

SEQ ID NO: 431404 - RNA, 24 nt, Human
uaccauauggcuacaaugaugacg

SEQ ID NO: 431405 - RNA, 24 nt, Human
uacuauuguggaauacagaagaug

SEQ ID NO: 431406 - RNA, 22 nt, Human
uagaacaaucacuaaaaaaugc

SEQ ID NO: 431407 - RNA, 19 nt, Human
uagaauacacccaaaaacu

SEQ ID NO: 431408 - RNA, 23 nt, Human
uagaauacacccaaaaacuucca

SEQ ID NO: 431409 - RNA, 24 nt, Human
uagggaccugcaaagcggccccga

SEQ ID NO: 431410 - RNA, 22 nt, Human
uaguagacaggguuuugccaug

SEQ ID NO: 431411 - RNA, 23 nt, Human
uaguagacaggguuuugccaugu

SEQ ID NO: 431412 - RNA, 23 nt, Human
uaguggucucaaagugcuaggau

SEQ ID NO: 431413 - RNA, 21 nt, Human
uauuguggaauacagaagaug

SEQ ID NO: 431414 - RNA, 21 nt, Human
ucaaaaagcugggcaagcacc

SEQ ID NO: 431415 - RNA, 18 nt, Human
ucaaaggaacuagaaaug

SEQ ID NO: 431416 - RNA, 20 nt, Human
ucaaagugcuaggauuacag

SEQ ID NO: 431417 - RNA, 22 nt, Human
ucaaagugcuaggauuacaggu

SEQ ID NO: 431418 - RNA, 25 nt, Human
ucaacugauccuccugccucagccc

SEQ ID NO: 431419 - RNA, 18 nt, Human
ucaagacaaaccaccaga

SEQ ID NO: 431420 - RNA, 18 nt, Human
ucaagaguucaagaccaa

SEQ ID NO: 431421 - RNA, 21 nt, Human
ucaauauuaacaagacagaaa

SEQ ID NO: 431422 - RNA, 24 nt, Human
ucacaaggucaggaguuugagacc

SEQ ID NO: 431423 - RNA, 21 nt, Human
ucacagcacuccagcgugggu

SEQ ID NO: 431424 - RNA, 24 nt, Human
ucacagcacuccagcgugggugac

SEQ ID NO: 431425 - RNA, 18 nt, Human
ucacugcaaccuccgccu

SEQ ID NO: 431426 - RNA, 19 nt, Human
ucacugcaaccuccgccuc

SEQ ID NO: 431427 - RNA, 22 nt, Human
ucacugcaaccuccgccuccca

SEQ ID NO: 431428 - RNA, 24 nt, Human
ucacugcaaccuccgccucccacg

SEQ ID NO: 431429 - RNA, 26 nt, Human
ucacugcaaccuccgccucccacguu

SEQ ID NO: 431430 - RNA, 21 nt, Human
ucagugaggaccauggaaggu

SEQ ID NO: 431431 - RNA, 24 nt, Human
ucaugaggucaagaguucaagacc

SEQ ID NO: 431432 - RNA, 23 nt, Human
uccagccugggugacagagugag

SEQ ID NO: 431433 - RNA, 24 nt, Human
uccagccugggugacagagugaga

SEQ ID NO: 431434 - RNA, 24 nt, Human
uccagcgugggugacagagugaga

SEQ ID NO: 431435 - RNA, 25 nt, Human
uccaugccacgcacaucacagccaa

SEQ ID NO: 431436 - RNA, 18 nt, Human
ucccuaaaaaagacaaga

SEQ ID NO: 431437 - RNA, 19 nt, Human
ucccuaaaaaagacaagac

SEQ ID NO: 431438 - RNA, 24 nt, Human
uccuccugccucagccccccagca

SEQ ID NO: 431439 - RNA, 26 nt, Human
uccuccugccucagccccccagcagc

SEQ ID NO: 431440 - RNA, 23 nt, Human
uccugacuagggaccugcaaagc

SEQ ID NO: 431441 - RNA, 24 nt, Human
ucgcaucacagcacuccagcgugg

SEQ ID NO: 431442 - RNA, 24 nt, Human
ucgcucugcugcccaggcuggagu

SEQ ID NO: 431443 - RNA, 24 nt, Human
ucgcuugaacccaggaggcggagg

SEQ ID NO: 431444 - RNA, 20 nt, Human
ucgguccugacuagggaccu

SEQ ID NO: 431445 - RNA, 24 nt, Human
ucucaaagugcuaggauuacaggu

SEQ ID NO: 431446 - RNA, 20 nt, Human
ucucgaacuccuggccucag

SEQ ID NO: 431447 - RNA, 23 nt, Human
ucucgcucugcugcccaggcugg

SEQ ID NO: 431448 - RNA, 24 nt, Human
ucucgcucugcugcccaggcugga

SEQ ID NO: 431449 - RNA, 26 nt, Human
ucucgcucugcugcccaggcuggagu

SEQ ID NO: 431450 - RNA, 27 nt, Human
ucucgcucugcugcccaggcuggagug

SEQ ID NO: 431451 - RNA, 19 nt, Human
ucucgcucuguugcccagg

SEQ ID NO: 431452 - RNA, 23 nt, Human
ucucgcucuguugcccaggcugg

SEQ ID NO: 431453 - RNA, 24 nt, Human
ucucgcucuguugcccaggcugga

SEQ ID NO: 431454 - RNA, 26 nt, Human
ucucgcucuguugcccaggcuggagu

SEQ ID NO: 431455 - RNA, 27 nt, Human
ucucgcucuguugcccaggcuggagug

SEQ ID NO: 431456 - RNA, 21 nt, Human
ucucuacuaaaaauacaaaaa

SEQ ID NO: 431457 - RNA, 22 nt, Human
ucucuacuaaaaauacaaaauu

SEQ ID NO: 431458 - RNA, 22 nt, Human
ucucuuuaaaaaaaaaaaaaaa

SEQ ID NO: 431459 - RNA, 23 nt, Human
ucugacacuggauagcaauaaau

SEQ ID NO: 431460 - RNA, 18 nt, Human
ucuguugcccaggcugga

SEQ ID NO: 431461 - RNA, 24 nt, Human
ucuguugcccaggcuggagugcag

SEQ ID NO: 431462 - RNA, 20 nt, Human
ucuuuaaaaaaaaaaaaaaa

SEQ ID NO: 431463 - RNA, 19 nt, Human
ugaaagagcaacacacuuc

SEQ ID NO: 431464 - RNA, 24 nt, Human
ugaaagauaaaaaauggucuguau

SEQ ID NO: 431465 - RNA, 25 nt, Human
ugacaaguaauauucagcaacagaa

SEQ ID NO: 431466 - RNA, 26 nt, Human
ugagaacaucagguaaaguauugaca

SEQ ID NO: 431467 - RNA, 18 nt, Human
ugagagucuuucuuuggc

SEQ ID NO: 431468 - RNA, 19 nt, Human
ugagagucuuucuuuggcg

SEQ ID NO: 431469 - RNA, 22 nt, Human
ugagccaagaucgugccacugc

SEQ ID NO: 431470 - RNA, 20 nt, Human
ugaggcaggagaaucgcuug

SEQ ID NO: 431471 - RNA, 24 nt, Human
ugaggcaggagaaucgcuugaacc

SEQ ID NO: 431472 - RNA, 25 nt, Human
ugaggcaggagaaucgcuugaaccc

SEQ ID NO: 431473 - RNA, 24 nt, Human
ugaggcaguuaauugcuugaaccc

SEQ ID NO: 431474 - RNA, 18 nt, Human
ugcaguggugagaucuca

SEQ ID NO: 431475 - RNA, 22 nt, Human
ugcaguggugagaucucagcuc

SEQ ID NO: 431476 - RNA, 24 nt, Human
ugccauguuggccaggcuggucuc

SEQ ID NO: 431477 - RNA, 27 nt, Human
ugccauguuggccaggcuggucucgaa

SEQ ID NO: 431478 - RNA, 18 nt, Human
ugcccaggcuggagugca

SEQ ID NO: 431479 - RNA, 18 nt, Human
ugcccaggcuggagugca

SEQ ID NO: 431480 - RNA, 21 nt, Human
ugcccaggcuggagugcagug

SEQ ID NO: 431481 - RNA, 21 nt, Human
ugcccaggcuggagugcagug

SEQ ID NO: 431482 - RNA, 22 nt, Human
ugcccaggcuggagugcagugg

SEQ ID NO: 431483 - RNA, 24 nt, Human
ugcccaggcuggagugcaguggca

SEQ ID NO: 431484 - RNA, 24 nt, Human
ugcccaggcuggagugcaguggug

SEQ ID NO: 431485 - RNA, 24 nt, Human
ugcccggcuaauuuuuguauuuuu

SEQ ID NO: 431486 - RNA, 18 nt, Human
ugcccggggcuuccaggc

SEQ ID NO: 431487 - RNA, 23 nt, Human
ugcccggggcuuccaggcgcgcu

SEQ ID NO: 431488 - RNA, 20 nt, Human
ugccucagccccccagcagc

SEQ ID NO: 431489 - RNA, 23 nt, Human
ugccucagccccccagcagcugg

SEQ ID NO: 431490 - RNA, 18 nt, Human
ugcuaggauuacagguaa

SEQ ID NO: 431491 - RNA, 21 nt, Human
ugcugcccaggcuggagugca

SEQ ID NO: 431492 - RNA, 22 nt, Human
ugcuugcauuucauuuuuucua

SEQ ID NO: 431493 - RNA, 18 nt, Human
uggaaugucaaaggaacu

SEQ ID NO: 431494 - RNA, 23 nt, Human
uggagaauaaggcucuagacuga

SEQ ID NO: 431495 - RNA, 24 nt, Human
uggagucucgcucuguugcccagg

SEQ ID NO: 431496 - RNA, 23 nt, Human
uggagugcaguggcacgaucuca

SEQ ID NO: 431497 - RNA, 24 nt, Human
uggagugcaguggcacgaucucag

SEQ ID NO: 431498 - RNA, 20 nt, Human
uggagugcaguggugagauc

SEQ ID NO: 431499 - RNA, 23 nt, Human
uggagugcaguggugagaucuca

SEQ ID NO: 431500 - RNA, 24 nt, Human
uggagugcaguggugagaucucag

SEQ ID NO: 431501 - RNA, 18 nt, Human
uggcacgaucucagcuca

SEQ ID NO: 431502 - RNA, 18 nt, Human
uggcagagaagccugaaa

SEQ ID NO: 431503 - RNA, 24 nt, Human
uggccaggcuggucucgaacuccu

SEQ ID NO: 431504 - RNA, 24 nt, Human
uggccucaggugauccacccgccu

SEQ ID NO: 431505 - RNA, 24 nt, Human
uggcggcgcacaccuguaauccca

SEQ ID NO: 431506 - RNA, 21 nt, Human
uggcucacaccuguaacccca

SEQ ID NO: 431507 - RNA, 22 nt, Human
uggcucacaccuguaaccccag

SEQ ID NO: 431508 - RNA, 23 nt, Human
uggcucacaccuguaaccccagc

SEQ ID NO: 431509 - RNA, 24 nt, Human
uggcucacaccuguaaccccagca

SEQ ID NO: 431510 - RNA, 21 nt, Human
ugggaccacaggcacacgcca

SEQ ID NO: 431511 - RNA, 24 nt, Human
ugggaccacaggcacacgccacca

SEQ ID NO: 431512 - RNA, 23 nt, Human
uggggggccgaggcggguggauc

SEQ ID NO: 431513 - RNA, 24 nt, Human
uggggggccgaggcggguggauca

SEQ ID NO: 431514 - RNA, 19 nt, Human
ugggugacagagugagacu

SEQ ID NO: 431515 - RNA, 21 nt, Human
ugggugacagagugagacucu

SEQ ID NO: 431516 - RNA, 21 nt, Human
ugguaguagguuucuuauauu

SEQ ID NO: 431517 - RNA, 24 nt, Human
uggugagaucucagcucacugcaa

SEQ ID NO: 431518 - RNA, 24 nt, Human
ugguucgacuuacuacuugacuuu

SEQ ID NO: 431519 - RNA, 21 nt, Human
uguauuugcagaugacauuuc

SEQ ID NO: 431520 - RNA, 24 nt, Human
uguggccgggugcaguggcucaca

SEQ ID NO: 431521 - RNA, 20 nt, Human
uguuacucuagaagaaaggc

SEQ ID NO: 431522 - RNA, 25 nt, Human
uguuagaugauuuugcccaacugcc

SEQ ID NO: 431523 - RNA, 22 nt, Human
uguucaaagaaacugacuucau

SEQ ID NO: 431524 - RNA, 20 nt, Human
uguuguuguugagacagagu

SEQ ID NO: 431525 - RNA, 23 nt, Human
uguuguuguuguugagacagagu

SEQ ID NO: 431526 - RNA, 20 nt, Human
uuaacucaauuucuguaaaa

SEQ ID NO: 431527 - RNA, 18 nt, Human
uuagcuggguguggcggc

SEQ ID NO: 431528 - RNA, 20 nt, Human
uuagcuggguguggcggcgc

SEQ ID NO: 431529 - RNA, 22 nt, Human
uuaguagacaggguuuugccau

SEQ ID NO: 431530 - RNA, 23 nt, Human
uuaguagacaggguuuugccaug

SEQ ID NO: 431531 - RNA, 23 nt, Human
uucaacauaccaauuaagagaga

SEQ ID NO: 431532 - RNA, 25 nt, Human
uucaacauaccaauuaagagagaca

SEQ ID NO: 431533 - RNA, 18 nt, Human
uugaaacauuucccuucc

SEQ ID NO: 431534 - RNA, 25 nt, Human
uugaaagagcaacacacuuccacaa

SEQ ID NO: 431535 - RNA, 24 nt, Human
uugaacccaggaggcggagguugc

SEQ ID NO: 431536 - RNA, 24 nt, Human
uugaaugaagcuugacagaacuga

SEQ ID NO: 431537 - RNA, 20 nt, Human
uugcagagagccgagaucgc

SEQ ID NO: 431538 - RNA, 21 nt, Human
uugcagagagccgagaucgca

SEQ ID NO: 431539 - RNA, 22 nt, Human
uugcagugagccaagaucgugc

SEQ ID NO: 431540 - RNA, 24 nt, Human
uugccauguuggccaggcuggucu

SEQ ID NO: 431541 - RNA, 24 nt, Human
uugcccaggcuggagugcaguggc

SEQ ID NO: 431542 - RNA, 18 nt, Human
uugcuugaacccgggagg

SEQ ID NO: 431543 - RNA, 24 nt, Human
uugcuugaacccgggaggcagagg

SEQ ID NO: 431544 - RNA, 25 nt, Human
uuggggggccgaggcggguggauca

SEQ ID NO: 431545 - RNA, 20 nt, Human
uuuacaaucacucaaauuac

SEQ ID NO: 431546 - RNA, 23 nt, Human
uuuaguagacaggguuuugccau

SEQ ID NO: 431547 - RNA, 19 nt, Human
uuugcaaacaaaaagugau

SEQ ID NO: 431548 - RNA, 24 nt, Human
uuuuaguagacaggguuuugccau

SEQ ID NO: 431549 - RNA, 23 nt, Human
uuuugccauguuggccaggcugg

SEQ ID NO: 431550 - RNA, 19 nt, Human
uuuuuaguagacaggguuu

SEQ ID NO: 431551 - RNA, 19 nt, Human
uuuuuaguagacaggguuu

SEQ ID NO: 431552 - RNA, 18 nt, Human
uuuuuguauuuuuaguag

SEQ ID NO: 431553 - RNA, 21 nt, Human
uuuuuguauuuuuaguagaca

SEQ ID NO: 431554 - RNA, 18 nt, Human
aaaaaaaacaagaaauca

SEQ ID NO: 431555 - RNA, 24 nt, Human
aaaaaaguaaagcuggauaaaaga

SEQ ID NO: 431556 - RNA, 20 nt, Human
aaaaacaugggaaagcucac

SEQ ID NO: 431557 - RNA, 21 nt, Human
aaagaaacuuaagacauaaaa

SEQ ID NO: 431558 - RNA, 22 nt, Human
aaagcaaugaaaggcaugcacc

SEQ ID NO: 431559 - RNA, 18 nt, Human
aacaaaaagcccccaagc

SEQ ID NO: 431560 - RNA, 18 nt, Human
aacauugguaaacauuuu

SEQ ID NO: 431561 - RNA, 20 nt, Human
aaccagaaaacaaacuaaag

SEQ ID NO: 431562 - RNA, 21 nt, Human
aaccagaaaacaaacuaaagc

SEQ ID NO: 431563 - RNA, 23 nt, Human
aaccuacauaaacgcagcaaaga

SEQ ID NO: 431564 - RNA, 24 nt, Human
aacuaguuuccagucuuucuucca

SEQ ID NO: 431565 - RNA, 18 nt, Human
aagaauaucacacaaagc

SEQ ID NO: 431566 - RNA, 21 nt, Human
aaucauaaucaucagaauugu

SEQ ID NO: 431567 - RNA, 23 nt, Human
acaggauguauuuggaaaugaca

SEQ ID NO: 431568 - RNA, 23 nt, Human
accaaaagagaaauauacuuuaa

SEQ ID NO: 431569 - RNA, 20 nt, Human
accaaguaagacaccaacuu

SEQ ID NO: 431570 - RNA, 21 nt, Human
acuuuguuauagcugaaaugg

SEQ ID NO: 431571 - RNA, 18 nt, Human
agaaaacaaacuaaagcu

SEQ ID NO: 431572 - RNA, 21 nt, Human
agaaaggaaaauauaucccac

SEQ ID NO: 431573 - RNA, 23 nt, Human
agacaccaacuucuuuaaaaaua

SEQ ID NO: 431574 - RNA, 18 nt, Human
agcaaaaaaguaaagcug

SEQ ID NO: 431575 - RNA, 20 nt, Human
aggcaugcaccucuacuagc

SEQ ID NO: 431576 - RNA, 23 nt, Human
agggguuggcccugggcucaggg

SEQ ID NO: 431577 - RNA, 24 nt, Human
auaaaagagacacaaugauucuaa

SEQ ID NO: 431578 - RNA, 26 nt, Human
augcuauuuacuuuuaacuucacaaa

SEQ ID NO: 431579 - RNA, 24 nt, Human
caaaugaaaucauaaucaucagaa

SEQ ID NO: 431580 - RNA, 22 nt, Human
caaccguaucagcagagaaaag

SEQ ID NO: 431581 - RNA, 24 nt, Human
caaccuacauaaacgcagcaaaga

SEQ ID NO: 431582 - RNA, 22 nt, Human
caagaaaucaauaucccauaac

SEQ ID NO: 431583 - RNA, 19 nt, Human
caaguaagacaccaacuuc

SEQ ID NO: 431584 - RNA, 20 nt, Human
cacaagaauaaaccaauggu

SEQ ID NO: 431585 - RNA, 18 nt, Human
cccauaacaaaaagcccc

SEQ ID NO: 431586 - RNA, 22 nt, Human
cccauaacaaaaagcccccaag

SEQ ID NO: 431587 - RNA, 23 nt, Human
cccccaagcacaacuguugauuu

SEQ ID NO: 431588 - RNA, 24 nt, Human
cccccaagcacaacuguugauuuc

SEQ ID NO: 431589 - RNA, 19 nt, Human
cggaaaaaaaacaagaaau

SEQ ID NO: 431590 - RNA, 20 nt, Human
cuuaaaaugcuauuuacuuu

SEQ ID NO: 431591 - RNA, 20 nt, Human
gaacgggaaccagaauggga

SEQ ID NO: 431592 - RNA, 20 nt, Human
gagaaauauacuuuaaaagc

SEQ ID NO: 431593 - RNA, 19 nt, Human
gaugucuuuaucaagcaac

SEQ ID NO: 431594 - RNA, 25 nt, Human
gcagcaaagaaacuuaagacauaaa

SEQ ID NO: 431595 - RNA, 21 nt, Human
ggaaagcucacuguaaaaaua

SEQ ID NO: 431596 - RNA, 18 nt, Human
gggguuggcccugggcuc

SEQ ID NO: 431597 - RNA, 19 nt, Human
guggagcaaaaaaguaaag

SEQ ID NO: 431598 - RNA, 24 nt, Human
gugucagaaaggaaaauauauccc

SEQ ID NO: 431599 - RNA, 23 nt, Human
uaaaaauaugcuucaugcacugu

SEQ ID NO: 431600 - RNA, 21 nt, Human
uaaaaguucuugugcaaccua

SEQ ID NO: 431601 - RNA, 26 nt, Human
uaaaccagaaaacaaacuaaagcuca

SEQ ID NO: 431602 - RNA, 24 nt, Human
uaagagaaaccuuuuuauuuuuua

SEQ ID NO: 431603 - RNA, 23 nt, Human
uacaguaucauuuccuuaugaaa

SEQ ID NO: 431604 - RNA, 27 nt, Human
uacaguaucauuuccuuaugaaaugaa

SEQ ID NO: 431605 - RNA, 24 nt, Human
uacggaaaaaaaacaagaaaucaa

SEQ ID NO: 431606 - RNA, 18 nt, Human
uagcagauuuagcacuuc

SEQ ID NO: 431607 - RNA, 22 nt, Human
uagugguguuccguagggguug

SEQ ID NO: 431608 - RNA, 20 nt, Human
ucaaaaagucugaggcacaa

SEQ ID NO: 431609 - RNA, 19 nt, Human
ucaaaauagacauuuacag

SEQ ID NO: 431610 - RNA, 18 nt, Human
ucacaaugucuccauugg

SEQ ID NO: 431611 - RNA, 20 nt, Human
ucagcagagaaaagauaaac

SEQ ID NO: 431612 - RNA, 19 nt, Human
ugaaaagcaaugaaaggca

SEQ ID NO: 431613 - RNA, 21 nt, Human
ugagaaauaaacuccaaaagc

SEQ ID NO: 431614 - RNA, 24 nt, Human
ugaggcaaauguucacuuaaauuc

SEQ ID NO: 431615 - RNA, 20 nt, Human
ugaggcacaauuacaaguga

SEQ ID NO: 431616 - RNA, 21 nt, Human
ugcagcagacaauguuacgga

SEQ ID NO: 431617 - RNA, 20 nt, Human
uggaagaauaucacacaaag

SEQ ID NO: 431618 - RNA, 20 nt, Human
ugggacauuauggcuuaaaa

SEQ ID NO: 431619 - RNA, 20 nt, Human
uguggagcaaaaaaguaaag

SEQ ID NO: 431620 - RNA, 22 nt, Human
uguggagcaaaaaaguaaagcu

SEQ ID NO: 431621 - RNA, 24 nt, Human
uuaacuucacaaauaaacacagcu

SEQ ID NO: 431622 - RNA, 22 nt, Human
uuaauuuugagaaauaaacucc

SEQ ID NO: 431623 - RNA, 25 nt, Human
uucaaaauagacauuuacaguuggc

SEQ ID NO: 431624 - RNA, 22 nt, Human
uucuuccaugcccaaaguucag

SEQ ID NO: 431625 - RNA, 21 nt, Human
uugaacuugaacgggaaccag

SEQ ID NO: 431626 - RNA, 23 nt, Human
uuucaaaaagucugaggcacaau

SEQ ID NO: 431627 - RNA, 24 nt, Human
uuugccccaaauuaugugucagaa

SEQ ID NO: 431628 - RNA, 21 nt, Human
uuuuaaaccagaaaacaaacu

SEQ ID NO: 431629 - RNA, 19 nt, Human
uuuuuugcuugacucacag

SEQ ID NO: 431630 - RNA, 18 nt, Human
uuuuuuuuuuuuuuuuug

SEQ ID NO: 431631 - RNA, 23 nt, Human
uuuuuuuuuuuuuuuuugcuuga

SEQ ID NO: 431632 - RNA, 25 nt, Human
aagcaucuguuccaggucucugucc

SEQ ID NO: 431633 - RNA, 24 nt, Human
aagcuuuucccaaguuccucacag

SEQ ID NO: 431634 - RNA, 18 nt, Human
aaggaacuaggacuuagg

SEQ ID NO: 431635 - RNA, 22 nt, Human
aaguuccucacaguauuaguuu

SEQ ID NO: 431636 - RNA, 19 nt, Human
aaugauuuaaccaagagaa

SEQ ID NO: 431637 - RNA, 25 nt, Human
acaaccagacugggaggucaucuga

SEQ ID NO: 431638 - RNA, 19 nt, Human
acagagucugagggcucac

SEQ ID NO: 431639 - RNA, 19 nt, Human
accaagagaaauuuauugc

SEQ ID NO: 431640 - RNA, 24 nt, Human
agauucucuacauucauacaguuu

SEQ ID NO: 431641 - RNA, 18 nt, Human
aggguugguuuccucugg

SEQ ID NO: 431642 - RNA, 19 nt, Human
agguccucucuauccacac

SEQ ID NO: 431643 - RNA, 18 nt, Human
caaaaugcaauaccuaca

SEQ ID NO: 431644 - RNA, 28 nt, Human
caaugugaguucacauacacacagugug

SEQ ID NO: 431645 - RNA, 21 nt, Human
cacaaccagacugggagguca

SEQ ID NO: 431646 - RNA, 18 nt, Human
cacauugcccaccccagg

SEQ ID NO: 431647 - RNA, 18 nt, Human
cagagucugagggcucac

SEQ ID NO: 431648 - RNA, 25 nt, Human
cagaucaucaaaagucacugaaucc

SEQ ID NO: 431649 - RNA, 23 nt, Human
cagugacacggcuugaauggcac

SEQ ID NO: 431650 - RNA, 19 nt, Human
cagugaguuuucaugucuu

SEQ ID NO: 431651 - RNA, 20 nt, Human
cauugcccaccccaggaggu

SEQ ID NO: 431652 - RNA, 22 nt, Human
ccaacaaccucauuugaaguua

SEQ ID NO: 431653 - RNA, 18 nt, Human
ccacacucacucacuguc

SEQ ID NO: 431654 - RNA, 18 nt, Human
ccccaggagguccucucu

SEQ ID NO: 431655 - RNA, 24 nt, Human
ccuccacugcagcacacucuugag

SEQ ID NO: 431656 - RNA, 24 nt, Human
cucacucacugucaguccccucca

SEQ ID NO: 431657 - RNA, 19 nt, Human
cuccauguguauccuuccu

SEQ ID NO: 431658 - RNA, 23 nt, Human
cucucuauccacacucacucacu

SEQ ID NO: 431659 - RNA, 25 nt, Human
cucuugagcagaugcuagauaaaca

SEQ ID NO: 431660 - RNA, 23 nt, Human
cugagauacaaaguugcuuccac

SEQ ID NO: 431661 - RNA, 24 nt, Human
cugggaggucaucugauuucccuc

SEQ ID NO: 431662 - RNA, 22 nt, Human
cuguuugaaaacccuaugucca

SEQ ID NO: 431663 - RNA, 20 nt, Human
gacugggaggucaucugauu

SEQ ID NO: 431664 - RNA, 18 nt, Human
gagaauucagcaaaguca

SEQ ID NO: 431665 - RNA, 18 nt, Human
gagccacaaaacaugucu

SEQ ID NO: 431666 - RNA, 18 nt, Human
gccaucuucugguggauc

SEQ ID NO: 431667 - RNA, 20 nt, Human
ggacaagcuugaucuaaagc

SEQ ID NO: 431668 - RNA, 20 nt, Human
ggagguccucucuauccaca

SEQ ID NO: 431669 - RNA, 26 nt, Human
ggcacuucuuacacaugauuguaugu

SEQ ID NO: 431670 - RNA, 22 nt, Human
guccacagccagaucaucaaaa

SEQ ID NO: 431671 - RNA, 19 nt, Human
guccccuccagugacacgg

SEQ ID NO: 431672 - RNA, 24 nt, Human
uaagaccugagauacaaaguugcu

SEQ ID NO: 431673 - RNA, 23 nt, Human
uaccaguguucacugcaaaaugc

SEQ ID NO: 431674 - RNA, 20 nt, Human
uagagguuucucugaguugg

SEQ ID NO: 431675 - RNA, 18 nt, Human
uaucaagguggagacagg

SEQ ID NO: 431676 - RNA, 20 nt, Human
uaucaagguggagacagggu

SEQ ID NO: 431677 - RNA, 25 nt, Human
uauguaacacaaccagacugggagg

SEQ ID NO: 431678 - RNA, 22 nt, Human
ucagaaagguauucccagauuc

SEQ ID NO: 431679 - RNA, 20 nt, Human
uccacagccagaucaucaaa

SEQ ID NO: 431680 - RNA, 21 nt, Human
ucuauccacacucacucacug

SEQ ID NO: 431681 - RNA, 20 nt, Human
ucuguuccaggucucugucc

SEQ ID NO: 431682 - RNA, 22 nt, Human
ucuucagagagaacagggacac

SEQ ID NO: 431683 - RNA, 20 nt, Human
ugaguuggguccaguaaagu

SEQ ID NO: 431684 - RNA, 21 nt, Human
ugcaauaccuacagagucuga

SEQ ID NO: 431685 - RNA, 24 nt, Human
ugcaauaccuacagagucugaggg

SEQ ID NO: 431686 - RNA, 23 nt, Human
ugcaggguuucucuccaauguga

SEQ ID NO: 431687 - RNA, 20 nt, Human
uggagacaggguugguuucc

SEQ ID NO: 431688 - RNA, 25 nt, Human
uugagccacaaaacaugucuaccag

SEQ ID NO: 431689 - RNA, 18 nt, Human
agacucggagcuguggcg

SEQ ID NO: 431690 - RNA, 19 nt, Human
agacucggagcuguggcga

SEQ ID NO: 431691 - RNA, 18 nt, Human
caagucgcagagcaacag

SEQ ID NO: 431692 - RNA, 22 nt, Human
cagaacgcgaagccgccugggc

SEQ ID NO: 431693 - RNA, 18 nt, Human
cagagcaacagagguucu

SEQ ID NO: 431694 - RNA, 19 nt, Human
cagagguucuguuuauucu

SEQ ID NO: 431695 - RNA, 21 nt, Human
ccagugccugcaagucgcaga

SEQ ID NO: 431696 - RNA, 23 nt, Human
cgaagccgccugggccucccaga

SEQ ID NO: 431697 - RNA, 19 nt, Human
ggcgaggagacccgagcuc

SEQ ID NO: 431698 - RNA, 18 nt, Human
uaaaaaaucugcuccaug

SEQ ID NO: 431699 - RNA, 21 nt, Human
uaguauggauuaucuugagua

SEQ ID NO: 431700 - RNA, 21 nt, Human
uucucugcuauuguguaaggc

SEQ ID NO: 431701 - RNA, 21 nt, Human
uugagcacaguuuaaaauaau

SEQ ID NO: 431702 - RNA, 21 nt, Human
aagacuuucccacauucacag

SEQ ID NO: 431703 - RNA, 21 nt, Human
acaacagcugcauccaaaggg

SEQ ID NO: 431704 - RNA, 20 nt, Human
acccugaaggggcagcagaa

SEQ ID NO: 431705 - RNA, 18 nt, Human
acugccuccaccuccaga

SEQ ID NO: 431706 - RNA, 18 nt, Human
agugacaggacgcgaggg

SEQ ID NO: 431707 - RNA, 23 nt, Human
agugacaggacgcgagggaugcu

SEQ ID NO: 431708 - RNA, 18 nt, Human
caaacccugaaggggcag

SEQ ID NO: 431709 - RNA, 20 nt, Human
caaaggcaaaaaaacuacaa

SEQ ID NO: 431710 - RNA, 21 nt, Human
caaaggcaaaaaaacuacaac

SEQ ID NO: 431711 - RNA, 24 nt, Human
caaauguagugcauucaaagcuuu

SEQ ID NO: 431712 - RNA, 24 nt, Human
cagaauagaguccaggguacugcc

SEQ ID NO: 431713 - RNA, 18 nt, Human
cagcagaauagaguccag

SEQ ID NO: 431714 - RNA, 22 nt, Human
cagcagaauagaguccagggua

SEQ ID NO: 431715 - RNA, 25 nt, Human
cauggagaggcaaaggcaaaaaaac

SEQ ID NO: 431716 - RNA, 19 nt, Human
cauucaaagcuuuuugccg

SEQ ID NO: 431717 - RNA, 24 nt, Human
cccacauucauuacacacauaugg

SEQ ID NO: 431718 - RNA, 25 nt, Human
ccuccaaacccugaaggggcagcag

SEQ ID NO: 431719 - RNA, 19 nt, Human
cggcgcggaacaauggcgg

SEQ ID NO: 431720 - RNA, 26 nt, Human
cuacugaagucuuucccaaccggagg

SEQ ID NO: 431721 - RNA, 22 nt, Human
cucuucggcaugaguuugcuga

SEQ ID NO: 431722 - RNA, 19 nt, Human
cugaaggcuuucucacaac

SEQ ID NO: 431723 - RNA, 24 nt, Human
gaauagaguccaggguacugccuc

SEQ ID NO: 431724 - RNA, 19 nt, Human
gauguauaacaagcuguga

SEQ ID NO: 431725 - RNA, 25 nt, Human
gcagaauagaguccaggguacugcc

SEQ ID NO: 431726 - RNA, 20 nt, Human
gcagcagaauagaguccagg

SEQ ID NO: 431727 - RNA, 23 nt, Human
ggcgaugaacgcuaucugaggaa

SEQ ID NO: 431728 - RNA, 22 nt, Human
gucaguuuugugugccucgcug

SEQ ID NO: 431729 - RNA, 21 nt, Human
ucacugcauucauguaguuuc

SEQ ID NO: 431730 - RNA, 22 nt, Human
uccaaacccugaaggggcagca

SEQ ID NO: 431731 - RNA, 19 nt, Human
uccauguaccugaaaccca

SEQ ID NO: 431732 - RNA, 21 nt, Human
uccggcuccuccaaacccuga

SEQ ID NO: 431733 - RNA, 19 nt, Human
uccuccaaacccugaaggg

SEQ ID NO: 431734 - RNA, 22 nt, Human
ugagguaugauuuacuacugaa

SEQ ID NO: 431735 - RNA, 21 nt, Human
ugcuccggcuccuccaaaccc

SEQ ID NO: 431736 - RNA, 27 nt, Human
uggaagaaugauuuuccauguaccuga

SEQ ID NO: 431737 - RNA, 26 nt, Human
uggaagugacaggacgcgagggaugc

SEQ ID NO: 431738 - RNA, 22 nt, Human
uucacagcacucauagggauuc

SEQ ID NO: 431739 - RNA, 18 nt, Human
uucgcaaccacuccagac

SEQ ID NO: 431740 - RNA, 20 nt, Human
uucgcaaccacuccagacuc

SEQ ID NO: 431741 - RNA, 23 nt, Human
uuugcucauguuuagaauggaag

SEQ ID NO: 431742 - RNA, 21 nt, Human
aagccggggacagcaggagga

SEQ ID NO: 431743 - RNA, 22 nt, Human
aaugggugaugcuugguugggu

SEQ ID NO: 431744 - RNA, 21 nt, Human
aggcgaccacucuuggggcag

SEQ ID NO: 431745 - RNA, 23 nt, Human
aggggcggcaggcgaagccgggg

SEQ ID NO: 431746 - RNA, 24 nt, Human
aggggcggcaggcgaagccgggga

SEQ ID NO: 431747 - RNA, 18 nt, Human
auacacauaaauacugug

SEQ ID NO: 431748 - RNA, 21 nt, Human
augacuaaaugagugaacaaa

SEQ ID NO: 431749 - RNA, 20 nt, Human
caaggggaggccucugguga

SEQ ID NO: 431750 - RNA, 19 nt, Human
cagagcagaagcuggagaa

SEQ ID NO: 431751 - RNA, 19 nt, Human
cauacacauaaauacugug

SEQ ID NO: 431752 - RNA, 24 nt, Human
caucuugacuggccgguuaggggc

SEQ ID NO: 431753 - RNA, 24 nt, Human
cccccgcggcgcgccagcuugccu

SEQ ID NO: 431754 - RNA, 27 nt, Human
ccgaacuacaacucccagacgcccccg

SEQ ID NO: 431755 - RNA, 18 nt, Human
ccggcggcgaagugcguc

SEQ ID NO: 431756 - RNA, 22 nt, Human
ccucacucaauacuucccuuuc

SEQ ID NO: 431757 - RNA, 23 nt, Human
ccucacucaauacuucccuuuca

SEQ ID NO: 431758 - RNA, 22 nt, Human
ccuccuucucaaugugucucug

SEQ ID NO: 431759 - RNA, 20 nt, Human
ccuuugguuuugggaauguc

SEQ ID NO: 431760 - RNA, 18 nt, Human
cgcuaggccgcagggccc

SEQ ID NO: 431761 - RNA, 18 nt, Human
cucaauacuucccuuuca

SEQ ID NO: 431762 - RNA, 20 nt, Human
cuccucaguuguccuuuggu

SEQ ID NO: 431763 - RNA, 19 nt, Human
cuugguuggguggcggugg

SEQ ID NO: 431764 - RNA, 24 nt, Human
gaugcuugguuggguggcgguggg

SEQ ID NO: 431765 - RNA, 21 nt, Human
gcuggagcucaggauacuccg

SEQ ID NO: 431766 - RNA, 20 nt, Human
gguuggguggcggugggggc

SEQ ID NO: 431767 - RNA, 20 nt, Human
guccagcuggagcucaggau

SEQ ID NO: 431768 - RNA, 23 nt, Human
gugucucugguggaagugggcag

SEQ ID NO: 431769 - RNA, 20 nt, Human
uaacuccucacucauuuucu

SEQ ID NO: 431770 - RNA, 26 nt, Human
ucccagacgcccccgcggcgcgccag

SEQ ID NO: 431771 - RNA, 23 nt, Human
uccuccuucucaaugugucucug

SEQ ID NO: 431772 - RNA, 19 nt, Human
ugagugaacaaacaauauc

SEQ ID NO: 431773 - RNA, 18 nt, Human
uggaagugggcagagucc

SEQ ID NO: 431774 - RNA, 19 nt, Human
uggaagugggcagaguccc

SEQ ID NO: 431775 - RNA, 23 nt, Human
ugggaaaucuuuuuuccaaauga

SEQ ID NO: 431776 - RNA, 22 nt, Human
ugggcggcgacccgagcuggga

SEQ ID NO: 431777 - RNA, 21 nt, Human
uggggcagagcagaagcugga

SEQ ID NO: 431778 - RNA, 24 nt, Human
uuaauaacuccucacucauuuucu

SEQ ID NO: 431779 - RNA, 22 nt, Human
uugguuggguggcggugggggc

SEQ ID NO: 431780 - RNA, 21 nt, Human
uuuauuuauccacauuaucuu

SEQ ID NO: 431781 - RNA, 18 nt, Human
uuucacauucaguccuga

SEQ ID NO: 431782 - RNA, 18 nt, Human
uuuuaaugacuaaaugag

SEQ ID NO: 431783 - RNA, 23 nt, Human
uuuuauuaaucucacuuuuaaug

SEQ ID NO: 431784 - RNA, 20 nt, Human
agggcgggucggaggcgggg

SEQ ID NO: 431785 - RNA, 24 nt, Human
auuacccggcagaaaagaaaaggg

SEQ ID NO: 431786 - RNA, 24 nt, Human
cacacaauaaaacuuuacagccaa

SEQ ID NO: 431787 - RNA, 18 nt, Human
cagcccccugggucuugg

SEQ ID NO: 431788 - RNA, 22 nt, Human
cccccugggucuuggaagcagc

SEQ ID NO: 431789 - RNA, 18 nt, Human
cggcagaaaagaaaaggg

SEQ ID NO: 431790 - RNA, 23 nt, Human
cuuuauuuuuugaaaagaacauu

SEQ ID NO: 431791 - RNA, 20 nt, Human
gccaaaauacaaagucuuca

SEQ ID NO: 431792 - RNA, 21 nt, Human
gcuucugugguaguuucuucu

SEQ ID NO: 431793 - RNA, 20 nt, Human
ggcagaaaagaaaagggagg

SEQ ID NO: 431794 - RNA, 22 nt, Human
gguaguuucuucuagguuuuca

SEQ ID NO: 431795 - RNA, 19 nt, Human
guuucuucuagguuuucaa

SEQ ID NO: 431796 - RNA, 26 nt, Human
uacaaagucuucaucuuauuuuccua

SEQ ID NO: 431797 - RNA, 19 nt, Human
ucauaggagaaaaacauga

SEQ ID NO: 431798 - RNA, 20 nt, Human
ucauguucuuaguaagugca

SEQ ID NO: 431799 - RNA, 25 nt, Human
ugaaaagaacauucauuuuugaaaa

SEQ ID NO: 431800 - RNA, 19 nt, Human
uucauuuuuuuucauguuc

SEQ ID NO: 431801 - RNA, 20 nt, Human
aaacaaaaggcgaaggcgaa

SEQ ID NO: 431802 - RNA, 24 nt, Human
aagcaggaucuagaucugaggaac

SEQ ID NO: 431803 - RNA, 20 nt, Human
aagcagggcucagaaagguc

SEQ ID NO: 431804 - RNA, 20 nt, Human
aagcagggcucagaaagguc

SEQ ID NO: 431805 - RNA, 21 nt, Human
aagcaggggucucaggccaaa

SEQ ID NO: 431806 - RNA, 26 nt, Human
aaggcaccaaccuccaaaaucaccua

SEQ ID NO: 431807 - RNA, 22 nt, Human
aaggcgaaggcggcggcggcgg

SEQ ID NO: 431808 - RNA, 18 nt, Human
aagucuacuucacuagcc

SEQ ID NO: 431809 - RNA, 21 nt, Human
aauuagagaauuaaaacccaa

SEQ ID NO: 431810 - RNA, 21 nt, Human
aauuagagaauuaaaacccaa

SEQ ID NO: 431811 - RNA, 18 nt, Human
acauagccaacccccgcu

SEQ ID NO: 431812 - RNA, 26 nt, Human
accaccccccacauagccaacccccg

SEQ ID NO: 431813 - RNA, 21 nt, Human
accuuccugguucccaacagc

SEQ ID NO: 431814 - RNA, 24 nt, Human
acuagagaagugggaggggaccaa

SEQ ID NO: 431815 - RNA, 24 nt, Human
acuagagaagugggaggggaccaa

SEQ ID NO: 431816 - RNA, 19 nt, Human
agaaggaguuggagugggg

SEQ ID NO: 431817 - RNA, 19 nt, Human
agaaggaguuggagugggg

SEQ ID NO: 431818 - RNA, 24 nt, Human
agccagaaaugaaagcaggaucua

SEQ ID NO: 431819 - RNA, 21 nt, Human
agcccagaaagaaacuuggau

SEQ ID NO: 431820 - RNA, 22 nt, Human
agcgggcgggcggcggcggcgg

SEQ ID NO: 431821 - RNA, 18 nt, Human
agcuacagaacccaaaca

SEQ ID NO: 431822 - RNA, 18 nt, Human
agcuacagaacccaaaca

SEQ ID NO: 431823 - RNA, 20 nt, Human
agcugguggcuaguucccag

SEQ ID NO: 431824 - RNA, 21 nt, Human
aggagagaaaggugagccaag

SEQ ID NO: 431825 - RNA, 23 nt, Human
aggccccagucuagaaaccccag

SEQ ID NO: 431826 - RNA, 19 nt, Human
aggcgaaggcgaaggcggc

SEQ ID NO: 431827 - RNA, 21 nt, Human
aggcgaaggcgaaggcggcgg

SEQ ID NO: 431828 - RNA, 19 nt, Human
aggcgaaggcggcggcggc

SEQ ID NO: 431829 - RNA, 21 nt, Human
aguuggagugggguugggggg

SEQ ID NO: 431830 - RNA, 20 nt, Human
auuagagaauuaaaacccaa

SEQ ID NO: 431831 - RNA, 22 nt, Human
caacagcauguugaaugguuaa

SEQ ID NO: 431832 - RNA, 22 nt, Human
caacagcauguugaaugguuaa

SEQ ID NO: 431833 - RNA, 22 nt, Human
caacagcauugaaacccccuac

SEQ ID NO: 431834 - RNA, 22 nt, Human
caacagcauugaaacccccuac

SEQ ID NO: 431835 - RNA, 19 nt, Human
caacccucuccagggaggc

SEQ ID NO: 431836 - RNA, 20 nt, Human
caagagagcccagaaagaaa

SEQ ID NO: 431837 - RNA, 21 nt, Human
caauucacaucacaaggucaa

SEQ ID NO: 431838 - RNA, 21 nt, Human
caauucacaucacaaggucaa

SEQ ID NO: 431839 - RNA, 19 nt, Human
cacacuccccacacgugcc

SEQ ID NO: 431840 - RNA, 23 nt, Human
cacagcauuucccagcagucccc

SEQ ID NO: 431841 - RNA, 23 nt, Human
cacagcauuucccagcagucccc

SEQ ID NO: 431842 - RNA, 21 nt, Human
cacaugugacacaacugaggu

SEQ ID NO: 431843 - RNA, 26 nt, Human
caccccccacauagccaacccccgcc

SEQ ID NO: 431844 - RNA, 20 nt, Human
cacccugcuagccucuccca

SEQ ID NO: 431845 - RNA, 22 nt, Human
cacccugcuagccucucccaaa

SEQ ID NO: 431846 - RNA, 23 nt, Human
cacccugcuagccucucccaaaa

SEQ ID NO: 431847 - RNA, 23 nt, Human
cacucugcuucucuggcgucuuc

SEQ ID NO: 431848 - RNA, 19 nt, Human
cagcagcgagaagcggggc

SEQ ID NO: 431849 - RNA, 19 nt, Human
caggaaggcaccaaccucc

SEQ ID NO: 431850 - RNA, 23 nt, Human
caggaaggcaccaaccuccaaaa

SEQ ID NO: 431851 - RNA, 25 nt, Human
cagucugaucagaucaauucacauc

SEQ ID NO: 431852 - RNA, 25 nt, Human
cagucugaucagaucaauucacauc

SEQ ID NO: 431853 - RNA, 20 nt, Human
cauagccaacccccgcccuc

SEQ ID NO: 431854 - RNA, 21 nt, Human
ccacacgugccggcccgaggc

SEQ ID NO: 431855 - RNA, 19 nt, Human
ccacauagccaacccccgc

SEQ ID NO: 431856 - RNA, 22 nt, Human
ccaccccccacauagccaaccc

SEQ ID NO: 431857 - RNA, 22 nt, Human
ccaugggcugcuggucaaccuc

SEQ ID NO: 431858 - RNA, 20 nt, Human
cccacauagccaacccccgc

SEQ ID NO: 431859 - RNA, 23 nt, Human
cccacauagccaacccccgcccu

SEQ ID NO: 431860 - RNA, 24 nt, Human
cccaccuuccugguucccaacagc

SEQ ID NO: 431861 - RNA, 24 nt, Human
cccaccuuccugguucccaacagc

SEQ ID NO: 431862 - RNA, 18 nt, Human
cccacuagcccggccgcu

SEQ ID NO: 431863 - RNA, 19 nt, Human
cccacuagcccggccgcug

SEQ ID NO: 431864 - RNA, 20 nt, Human
cccaugguccaugggaugcu

SEQ ID NO: 431865 - RNA, 22 nt, Human
ccccacauagccaacccccgcc

SEQ ID NO: 431866 - RNA, 21 nt, Human
ccccaugguccaugggaugcu

SEQ ID NO: 431867 - RNA, 22 nt, Human
cccccagggggcccccgagagc

SEQ ID NO: 431868 - RNA, 27 nt, Human
cccccucccuuccccucagcagcgaga

SEQ ID NO: 431869 - RNA, 22 nt, Human
ccccucagcagcgagaagcggg

SEQ ID NO: 431870 - RNA, 19 nt, Human
ccccucccgcccgccaggc

SEQ ID NO: 431871 - RNA, 18 nt, Human
ccccuccuguucccuucc

SEQ ID NO: 431872 - RNA, 20 nt, Human
ccccuccuguucccuuccac

SEQ ID NO: 431873 - RNA, 19 nt, Human
cccgagagcccggacaugc

SEQ ID NO: 431874 - RNA, 18 nt, Human
cccggagccuggagggcg

SEQ ID NO: 431875 - RNA, 19 nt, Human
cccggagccuggagggcgg

SEQ ID NO: 431876 - RNA, 20 nt, Human
cccggucuaccuuccggggg

SEQ ID NO: 431877 - RNA, 22 nt, Human
cccucccacuagcccggccgcu

SEQ ID NO: 431878 - RNA, 25 nt, Human
cccucccuuccccucagcagcgaga

SEQ ID NO: 431879 - RNA, 24 nt, Human
ccgagucacccagggaggagcugg

SEQ ID NO: 431880 - RNA, 26 nt, Human
ccgcccccucccuuccccucagcagc

SEQ ID NO: 431881 - RNA, 22 nt, Human
ccuccaaaaucaccuaggcaag

SEQ ID NO: 431882 - RNA, 25 nt, Human
ccuccaaaaucaccuaggcaaggac

SEQ ID NO: 431883 - RNA, 18 nt, Human
ccugccaccuccccuccc

SEQ ID NO: 431884 - RNA, 24 nt, Human
cgacugaacaaucugaaacccaaa

SEQ ID NO: 431885 - RNA, 19 nt, Human
cgcccccucccacuagccc

SEQ ID NO: 431886 - RNA, 20 nt, Human
cgcccccucccacuagcccg

SEQ ID NO: 431887 - RNA, 25 nt, Human
cgcccccucccuuccccucagcagc

SEQ ID NO: 431888 - RNA, 22 nt, Human
cgccgcccccucccacuagccc

SEQ ID NO: 431889 - RNA, 23 nt, Human
cgccgcgcaggcgcgcgcgcgcg

SEQ ID NO: 431890 - RNA, 20 nt, Human
cgcgagccggggcgggggcg

SEQ ID NO: 431891 - RNA, 19 nt, Human
cgcgcagccaagaagggca

SEQ ID NO: 431892 - RNA, 20 nt, Human
cgcgcaggcgcgcgcgcgcg

SEQ ID NO: 431893 - RNA, 20 nt, Human
cggagccuggagggcggugg

SEQ ID NO: 431894 - RNA, 23 nt, Human
cggaggaaacaaaaggcgaaggc

SEQ ID NO: 431895 - RNA, 18 nt, Human
cggcgccggcgcgcagcc

SEQ ID NO: 431896 - RNA, 22 nt, Human
cggggaggagaaggaggggucc

SEQ ID NO: 431897 - RNA, 20 nt, Human
cgggggcgccggagcggagg

SEQ ID NO: 431898 - RNA, 18 nt, Human
cggggugcaccacccccc

SEQ ID NO: 431899 - RNA, 23 nt, Human
cguguccacacuccccacacgug

SEQ ID NO: 431900 - RNA, 23 nt, Human
cucacaugugacacaacugaggu

SEQ ID NO: 431901 - RNA, 20 nt, Human
cuccgcauucacagcauuuc

SEQ ID NO: 431902 - RNA, 20 nt, Human
cuccucuccgcccgcccgcc

SEQ ID NO: 431903 - RNA, 22 nt, Human
cucuccucuccgcccgcccgcc

SEQ ID NO: 431904 - RNA, 21 nt, Human
cugaaauuuggggugggggug

SEQ ID NO: 431905 - RNA, 21 nt, Human
cugaaauuuggggugggggug

SEQ ID NO: 431906 - RNA, 18 nt, Human
cugaggagagaaagguga

SEQ ID NO: 431907 - RNA, 19 nt, Human
cugcaaacgcgccugccac

SEQ ID NO: 431908 - RNA, 19 nt, Human
cugcgcgccacucucuccu

SEQ ID NO: 431909 - RNA, 23 nt, Human
cuggcgucuucaggucgcuggca

SEQ ID NO: 431910 - RNA, 20 nt, Human
cugguccuaaaaaauaauaa

SEQ ID NO: 431911 - RNA, 20 nt, Human
cugguccuaaaaaauaauaa

SEQ ID NO: 431912 - RNA, 23 nt, Human
cuuccacugucaacccucuccag

SEQ ID NO: 431913 - RNA, 20 nt, Human
cuucccggucuaccuuccgg

SEQ ID NO: 431914 - RNA, 19 nt, Human
gaaacaaaaggcgaaggcg

SEQ ID NO: 431915 - RNA, 23 nt, Human
gaaacaaaaggcgaaggcgaagg

SEQ ID NO: 431916 - RNA, 18 nt, Human
gaagcagauaagcuggug

SEQ ID NO: 431917 - RNA, 24 nt, Human
gaccugcuaauaaaccucaaaaac

SEQ ID NO: 431918 - RNA, 18 nt, Human
gacucacucguggagugg

SEQ ID NO: 431919 - RNA, 18 nt, Human
gagaaagagccauuggca

SEQ ID NO: 431920 - RNA, 18 nt, Human
gagccuggagggcggugg

SEQ ID NO: 431921 - RNA, 22 nt, Human
gagucacccagggaggagcugg

SEQ ID NO: 431922 - RNA, 20 nt, Human
gagugggguuggggggcagu

SEQ ID NO: 431923 - RNA, 20 nt, Human
gagugggguuggggggcagu

SEQ ID NO: 431924 - RNA, 18 nt, Human
gcaccugcccgcccccuc

SEQ ID NO: 431925 - RNA, 22 nt, Human
gcagcagacguguccacacucc

SEQ ID NO: 431926 - RNA, 21 nt, Human
gccaacccccgcccucgcugg

SEQ ID NO: 431927 - RNA, 21 nt, Human
gcccaggucccccagggggcc

SEQ ID NO: 431928 - RNA, 22 nt, Human
gcccaggucccccagggggccc

SEQ ID NO: 431929 - RNA, 18 nt, Human
gccgaguguacacgcccc

SEQ ID NO: 431930 - RNA, 18 nt, Human
gccggcccgaggcucugu

SEQ ID NO: 431931 - RNA, 19 nt, Human
gccggcugucccaccuucc

SEQ ID NO: 431932 - RNA, 19 nt, Human
gccggcugucccaccuucc

SEQ ID NO: 431933 - RNA, 24 nt, Human
gccuaugggaagugaugccagggg

SEQ ID NO: 431934 - RNA, 18 nt, Human
gcgcagccaagaagggca

SEQ ID NO: 431935 - RNA, 18 nt, Human
gcggcggcggcggcagag

SEQ ID NO: 431936 - RNA, 24 nt, Human
gcggcggcggcggcagaguaggcc

SEQ ID NO: 431937 - RNA, 23 nt, Human
gcggcggcggcggcggcuggagc

SEQ ID NO: 431938 - RNA, 24 nt, Human
gcggcggcggcggcggcuggagcg

SEQ ID NO: 431939 - RNA, 21 nt, Human
gcggggugcaccaccccccac

SEQ ID NO: 431940 - RNA, 20 nt, Human
gcgguggcggcggcggcggc

SEQ ID NO: 431941 - RNA, 23 nt, Human
gcgguggcggcggcggcggcggc

SEQ ID NO: 431942 - RNA, 22 nt, Human
gcuuccuuaaaaacaguuggga

SEQ ID NO: 431943 - RNA, 22 nt, Human
gcuuccuuaaaaacaguuggga

SEQ ID NO: 431944 - RNA, 22 nt, Human
ggaaaaggcaagagagcccaga

SEQ ID NO: 431945 - RNA, 22 nt, Human
ggacacucaccccaugguccau

SEQ ID NO: 431946 - RNA, 22 nt, Human
ggacacucaccccaugguccau

SEQ ID NO: 431947 - RNA, 22 nt, Human
ggaggaaacaaaaggcgaaggc

SEQ ID NO: 431948 - RNA, 25 nt, Human
ggagggcgguggcggcggcggcggg

SEQ ID NO: 431949 - RNA, 20 nt, Human
ggauccgagggagggggucu

SEQ ID NO: 431950 - RNA, 22 nt, Human
ggccaaaugccccuccuguucc

SEQ ID NO: 431951 - RNA, 20 nt, Human
gggcacaccaauaaggaucc

SEQ ID NO: 431952 - RNA, 23 nt, Human
gggcagcauggguugacucuagu

SEQ ID NO: 431953 - RNA, 23 nt, Human
gggcccaggucccccagggggcc

SEQ ID NO: 431954 - RNA, 26 nt, Human
gggcggcggcggcggcagaguaggcc

SEQ ID NO: 431955 - RNA, 21 nt, Human
gggcgggcggcggcggcggca

SEQ ID NO: 431956 - RNA, 24 nt, Human
gggcgguggcggcggcggcggcgg

SEQ ID NO: 431957 - RNA, 26 nt, Human
gggcgguggcggcggcggcggcggcu

SEQ ID NO: 431958 - RNA, 18 nt, Human
ggggaggagaaggagggg

SEQ ID NO: 431959 - RNA, 18 nt, Human
ggggcgccggagcggagg

SEQ ID NO: 431960 - RNA, 18 nt, Human
ggggugccaucugugaaa

SEQ ID NO: 431961 - RNA, 21 nt, Human
gggguggccaggccccagucu

SEQ ID NO: 431962 - RNA, 19 nt, Human
gguggagaaggaguuggag

SEQ ID NO: 431963 - RNA, 19 nt, Human
gguggagaaggaguuggag

SEQ ID NO: 431964 - RNA, 23 nt, Human
guggaguggggaaagggguggcc

SEQ ID NO: 431965 - RNA, 20 nt, Human
guggcggcggcggcggcggc

SEQ ID NO: 431966 - RNA, 22 nt, Human
guggcggcggcggcggcggcug

SEQ ID NO: 431967 - RNA, 21 nt, Human
uaaaacccaacagcauguugg

SEQ ID NO: 431968 - RNA, 21 nt, Human
uaaaacccaacagcauguugg

SEQ ID NO: 431969 - RNA, 24 nt, Human
uaaaccucaaaaacacaaaagucu

SEQ ID NO: 431970 - RNA, 19 nt, Human
uaauaauaauaauuagaga

SEQ ID NO: 431971 - RNA, 19 nt, Human
uaauaauaauaauuagaga

SEQ ID NO: 431972 - RNA, 19 nt, Human
uacagaacccaaacaucac

SEQ ID NO: 431973 - RNA, 20 nt, Human
uacagaacccaaacaucacu

SEQ ID NO: 431974 - RNA, 24 nt, Human
uauaaagcuacucauuaguuuggu

SEQ ID NO: 431975 - RNA, 20 nt, Human
ucaaguaggacuuagagcgg

SEQ ID NO: 431976 - RNA, 19 nt, Human
ucacagcauuucccagcag

SEQ ID NO: 431977 - RNA, 24 nt, Human
ucacagcauuucccagcagucccc

SEQ ID NO: 431978 - RNA, 24 nt, Human
ucaccugggauagcuuucaguagc

SEQ ID NO: 431979 - RNA, 24 nt, Human
ucaccugggauagcuuucaguagc

SEQ ID NO: 431980 - RNA, 20 nt, Human
ucacuacaacugguccuaaa

SEQ ID NO: 431981 - RNA, 20 nt, Human
ucacuacaacugguccuaaa

SEQ ID NO: 431982 - RNA, 19 nt, Human
ucagaucaauucacaucac

SEQ ID NO: 431983 - RNA, 19 nt, Human
ucagaucaauucacaucac

SEQ ID NO: 431984 - RNA, 20 nt, Human
ucagcagcgagaagcggggc

SEQ ID NO: 431985 - RNA, 24 nt, Human
ucccaacagcauugaaacccccua

SEQ ID NO: 431986 - RNA, 24 nt, Human
ucccaacagcauugaaacccccua

SEQ ID NO: 431987 - RNA, 20 nt, Human
ucccaccuuccugguuccca

SEQ ID NO: 431988 - RNA, 20 nt, Human
ucccaccuuccugguuccca

SEQ ID NO: 431989 - RNA, 20 nt, Human
ucccaccuuccugguuccca

SEQ ID NO: 431990 - RNA, 20 nt, Human
ucccaccuuccugguuccca

SEQ ID NO: 431991 - RNA, 21 nt, Human
ucccaccuuccugguucccaa

SEQ ID NO: 431992 - RNA, 21 nt, Human
ucccaccuuccugguucccaa

SEQ ID NO: 431993 - RNA, 20 nt, Human
uccccagaugguuguuuccg

SEQ ID NO: 431994 - RNA, 20 nt, Human
uccccagaugguuguuuccg

SEQ ID NO: 431995 - RNA, 24 nt, Human
uccccagaugguuguuuccguggg

SEQ ID NO: 431996 - RNA, 24 nt, Human
uccccagaugguuguuuccguggg

SEQ ID NO: 431997 - RNA, 27 nt, Human
uccccagaugguuguuuccgugggagg

SEQ ID NO: 431998 - RNA, 21 nt, Human
ucccggagccuggagggcggu

SEQ ID NO: 431999 - RNA, 22 nt, Human
ucccggucuaccuuccgggggg

SEQ ID NO: 432000 - RNA, 23 nt, Human
uccugcaaacgcgccugccaccu

SEQ ID NO: 432001 - RNA, 18 nt, Human
ucucccaaaagcaggggu

SEQ ID NO: 432002 - RNA, 25 nt, Human
ucucccaaaagcaggggucucaggc

SEQ ID NO: 432003 - RNA, 19 nt, Human
ucugaaacccaaaggacuu

SEQ ID NO: 432004 - RNA, 23 nt, Human
ucugcugaggagagaaaggugag

SEQ ID NO: 432005 - RNA, 19 nt, Human
ugaaaggggggaaaaggca

SEQ ID NO: 432006 - RNA, 28 nt, Human
ugaauaaaaaucucucagcuacagaacc

SEQ ID NO: 432007 - RNA, 28 nt, Human
ugaauaaaaaucucucagcuacagaacc

SEQ ID NO: 432008 - RNA, 24 nt, Human
ugaugccaggggaagggaagcaga

SEQ ID NO: 432009 - RNA, 21 nt, Human
ugcaccuucuggauguguuug

SEQ ID NO: 432010 - RNA, 21 nt, Human
ugcccaggggugccaucugug

SEQ ID NO: 432011 - RNA, 21 nt, Human
ugccccuccuguucccuucca

SEQ ID NO: 432012 - RNA, 24 nt, Human
ugccucauuucccuucaggcccca

SEQ ID NO: 432013 - RNA, 23 nt, Human
ugccuuggaggccuauguagugu

SEQ ID NO: 432014 - RNA, 23 nt, Human
ugccuuggaggccuauguagugu

SEQ ID NO: 432015 - RNA, 18 nt, Human
ugcgccgaguguacacgc

SEQ ID NO: 432016 - RNA, 18 nt, Human
ugcggagugcuaaagggc

SEQ ID NO: 432017 - RNA, 20 nt, Human
ugcuagccucucccaaaagc

SEQ ID NO: 432018 - RNA, 21 nt, Human
ugcucacaugugacacaacug

SEQ ID NO: 432019 - RNA, 21 nt, Human
ugcucacaugugacacaacug

SEQ ID NO: 432020 - RNA, 20 nt, Human
ugcugggcaggaaccacccu

SEQ ID NO: 432021 - RNA, 22 nt, Human
uggagcccuccaggcagagggc

SEQ ID NO: 432022 - RNA, 22 nt, Human
uggagcccuccaggcagagggc

SEQ ID NO: 432023 - RNA, 18 nt, Human
uggaggccuauguagugu

SEQ ID NO: 432024 - RNA, 18 nt, Human
uggaggccuauguagugu

SEQ ID NO: 432025 - RNA, 29 nt, Human
uggagggcgguggcggcggcggcggcgac

SEQ ID NO: 432026 - RNA, 21 nt, Human
uggagugggguuggggggcag

SEQ ID NO: 432027 - RNA, 21 nt, Human
uggagugggguuggggggcag

SEQ ID NO: 432028 - RNA, 24 nt, Human
uggccaggccccagucuagaaacc

SEQ ID NO: 432029 - RNA, 19 nt, Human
uggcggcggcggcggcggc

SEQ ID NO: 432030 - RNA, 19 nt, Human
ugggaagggcagagggcag

SEQ ID NO: 432031 - RNA, 21 nt, Human
ugggaagggcagagggcagca

SEQ ID NO: 432032 - RNA, 18 nt, Human
ugggagaauggguggugg

SEQ ID NO: 432033 - RNA, 18 nt, Human
ugggagaauggguggugg

SEQ ID NO: 432034 - RNA, 20 nt, Human
ugggcuugcucacaugugac

SEQ ID NO: 432035 - RNA, 20 nt, Human
ugggcuugcucacaugugac

SEQ ID NO: 432036 - RNA, 20 nt, Human
uggggguguccucaacagcc

SEQ ID NO: 432037 - RNA, 20 nt, Human
uggggguguccucaacagcc

SEQ ID NO: 432038 - RNA, 21 nt, Human
uggggucacuaagaauugagc

SEQ ID NO: 432039 - RNA, 21 nt, Human
uggggucacuaagaauugagc

SEQ ID NO: 432040 - RNA, 24 nt, Human
ugggugguggagaaggaguuggag

SEQ ID NO: 432041 - RNA, 24 nt, Human
ugggugguggagaaggaguuggag

SEQ ID NO: 432042 - RNA, 23 nt, Human
ugugaaaggggggaaaaggcaag

SEQ ID NO: 432043 - RNA, 21 nt, Human
ugugccagucuucucuggagg

SEQ ID NO: 432044 - RNA, 20 nt, Human
uuaaaaacaguugggcaucc

SEQ ID NO: 432045 - RNA, 20 nt, Human
uuaaaaacaguugggcaucc

SEQ ID NO: 432046 - RNA, 22 nt, Human
uucacagcauuucccagcaguc

SEQ ID NO: 432047 - RNA, 21 nt, Human
uuccacugucaacccucucca

SEQ ID NO: 432048 - RNA, 21 nt, Human
uucccaacagcauugaaaccc

SEQ ID NO: 432049 - RNA, 21 nt, Human
uucccaacagcauugaaaccc

SEQ ID NO: 432050 - RNA, 19 nt, Human
uucccgggcccgcuggggg

SEQ ID NO: 432051 - RNA, 21 nt, Human
uuccugguucccaacagcauu

SEQ ID NO: 432052 - RNA, 21 nt, Human
uuccugguucccaacagcauu

SEQ ID NO: 432053 - RNA, 22 nt, Human
uuggguauaggauuggggucac

SEQ ID NO: 432054 - RNA, 22 nt, Human
uuggguauaggauuggggucac

SEQ ID NO: 432055 - RNA, 20 nt, Human
uugugccagucuucucugga

SEQ ID NO: 432056 - RNA, 25 nt, Human
uuuaauacuaacccuaaugugugac

SEQ ID NO: 432057 - RNA, 25 nt, Human
uuuaauacuaacccuaaugugugac

SEQ ID NO: 432058 - RNA, 18 nt, Human
uuucccgggcccgcuggg

SEQ ID NO: 432059 - RNA, 23 nt, Human
uuucuuccauagacuucaaacaa

SEQ ID NO: 432060 - RNA, 23 nt, Human
uuucuuccauagacuucaaacaa

SEQ ID NO: 432061 - RNA, 21 nt, Human
uuugaaggauaugggaaggga

SEQ ID NO: 432062 - RNA, 21 nt, Human
uuugaaggauaugggaaggga

SEQ ID NO: 432063 - RNA, 19 nt, Human
aaaaaagccuucuaccuuc

SEQ ID NO: 432064 - RNA, 19 nt, Human
aaaaagccuucuaccuucc

SEQ ID NO: 432065 - RNA, 18 nt, Human
aaauccuccccagcuucc

SEQ ID NO: 432066 - RNA, 21 nt, Human
aacccuagagccagcaaaaaa

SEQ ID NO: 432067 - RNA, 22 nt, Human
aacuccuuccaggccucccccu

SEQ ID NO: 432068 - RNA, 22 nt, Human
aaggagcucagccccaggagcc

SEQ ID NO: 432069 - RNA, 23 nt, Human
aaggccucgaacuagaagaaccc

SEQ ID NO: 432070 - RNA, 20 nt, Human
aagugagcagcagcuguggg

SEQ ID NO: 432071 - RNA, 22 nt, Human
aauacaaacaguccagaaagaa

SEQ ID NO: 432072 - RNA, 19 nt, Human
acaaagguccuuccccucu

SEQ ID NO: 432073 - RNA, 19 nt, Human
acacacaccacacauacga

SEQ ID NO: 432074 - RNA, 21 nt, Human
acagcagacaagacccuccau

SEQ ID NO: 432075 - RNA, 19 nt, Human
accacacauacgaaguaac

SEQ ID NO: 432076 - RNA, 20 nt, Human
accacacauacgaaguaaca

SEQ ID NO: 432077 - RNA, 20 nt, Human
acccaaaggugggggcuggg

SEQ ID NO: 432078 - RNA, 23 nt, Human
accccacacacacaccacacaua

SEQ ID NO: 432079 - RNA, 24 nt, Human
accccacacacacaccacacauac

SEQ ID NO: 432080 - RNA, 21 nt, Human
acuccuuccaggccucccccu

SEQ ID NO: 432081 - RNA, 22 nt, Human
acuccuuccaggccucccccug

SEQ ID NO: 432082 - RNA, 18 nt, Human
agaacccuagagccagca

SEQ ID NO: 432083 - RNA, 21 nt, Human
agaagaacccuagagccagca

SEQ ID NO: 432084 - RNA, 19 nt, Human
agacgggagaacccaaggg

SEQ ID NO: 432085 - RNA, 22 nt, Human
agaggaaggagcucagccccag

SEQ ID NO: 432086 - RNA, 20 nt, Human
agaggauggggacccaaggc

SEQ ID NO: 432087 - RNA, 19 nt, Human
agcagacaagacccuccau

SEQ ID NO: 432088 - RNA, 24 nt, Human
agcagcagcagcaaguccgcagcc

SEQ ID NO: 432089 - RNA, 23 nt, Human
agcaucaagcucacagcauccag

SEQ ID NO: 432090 - RNA, 19 nt, Human
aggcagaggacaagggcug

SEQ ID NO: 432091 - RNA, 27 nt, Human
aggccaagcccagaaugaugcagagga

SEQ ID NO: 432092 - RNA, 19 nt, Human
auaaagggcucaguccaca

SEQ ID NO: 432093 - RNA, 18 nt, Human
aucguaagccugagucac

SEQ ID NO: 432094 - RNA, 20 nt, Human
aucguaagccugagucacag

SEQ ID NO: 432095 - RNA, 18 nt, Human
augaaaccuuuagguacc

SEQ ID NO: 432096 - RNA, 19 nt, Human
caacagggagccaggcccu

SEQ ID NO: 432097 - RNA, 24 nt, Human
caagacccuccauggccaccaacc

SEQ ID NO: 432098 - RNA, 19 nt, Human
cacagcauccagagucgaa

SEQ ID NO: 432099 - RNA, 21 nt, Human
caccacuuuguuucaauacaa

SEQ ID NO: 432100 - RNA, 21 nt, Human
caccccacacacacaccacac

SEQ ID NO: 432101 - RNA, 19 nt, Human
cacucagaccaacagggag

SEQ ID NO: 432102 - RNA, 21 nt, Human
cagaagaggccacuggcagca

SEQ ID NO: 432103 - RNA, 23 nt, Human
cagaggauggggacccaaggccu

SEQ ID NO: 432104 - RNA, 18 nt, Human
cagaggguccugcauucc

SEQ ID NO: 432105 - RNA, 19 nt, Human
cagcaaaaaaagccuucua

SEQ ID NO: 432106 - RNA, 22 nt, Human
cagcagcagcagcaaguccgca

SEQ ID NO: 432107 - RNA, 21 nt, Human
caggcagaggacaagggcugg

SEQ ID NO: 432108 - RNA, 21 nt, Human
ccacacauacgaaguaacaaa

SEQ ID NO: 432109 - RNA, 26 nt, Human
ccaccccacacacacaccacacauac

SEQ ID NO: 432110 - RNA, 21 nt, Human
cccacacacacaccacacaua

SEQ ID NO: 432111 - RNA, 22 nt, Human
cccacacacacaccacacauac

SEQ ID NO: 432112 - RNA, 19 nt, Human
ccccacacacacaccacac

SEQ ID NO: 432113 - RNA, 23 nt, Human
ccccagccugggaacuguggagu

SEQ ID NO: 432114 - RNA, 19 nt, Human
ccccagcuuccacaaggca

SEQ ID NO: 432115 - RNA, 18 nt, Human
ccccaggagccugccucu

SEQ ID NO: 432116 - RNA, 21 nt, Human
ccccaggagccugccucugcc

SEQ ID NO: 432117 - RNA, 24 nt, Human
ccccaggagccugccucugccucu

SEQ ID NO: 432118 - RNA, 24 nt, Human
ccccugguuccagaggauggggac

SEQ ID NO: 432119 - RNA, 20 nt, Human
cccuagagccagcaaaaaaa

SEQ ID NO: 432120 - RNA, 18 nt, Human
cccucugggggaggggca

SEQ ID NO: 432121 - RNA, 23 nt, Human
ccuacaacccaaaggugggggcu

SEQ ID NO: 432122 - RNA, 24 nt, Human
ccuacaacccaaaggugggggcug

SEQ ID NO: 432123 - RNA, 18 nt, Human
ccucaaaggccaccccac

SEQ ID NO: 432124 - RNA, 21 nt, Human
ccucccccugguuccagagga

SEQ ID NO: 432125 - RNA, 22 nt, Human
ccucccccugguuccagaggau

SEQ ID NO: 432126 - RNA, 19 nt, Human
ccucgaacuagaagaaccc

SEQ ID NO: 432127 - RNA, 19 nt, Human
ccucuccuggcacccagaa

SEQ ID NO: 432128 - RNA, 19 nt, Human
ccuggccagcaucaagcuc

SEQ ID NO: 432129 - RNA, 23 nt, Human
ccuucuaccuuccgcuuucccua

SEQ ID NO: 432130 - RNA, 18 nt, Human
cuacagugaacuccuucc

SEQ ID NO: 432131 - RNA, 25 nt, Human
cucaaaggccaccccacacacacac

SEQ ID NO: 432132 - RNA, 19 nt, Human
cucagaccaacagggagcc

SEQ ID NO: 432133 - RNA, 24 nt, Human
cugaccauuccccucacaggagug

SEQ ID NO: 432134 - RNA, 26 nt, Human
cugaucccaaaugaaaccuuuaggua

SEQ ID NO: 432135 - RNA, 19 nt, Human
cugccucugccucucacau

SEQ ID NO: 432136 - RNA, 22 nt, Human
cuuccacaaggcaaagcauccc

SEQ ID NO: 432137 - RNA, 20 nt, Human
cuuccaggccucccccuggu

SEQ ID NO: 432138 - RNA, 23 nt, Human
cuuccgcuuucccuaccugggga

SEQ ID NO: 432139 - RNA, 19 nt, Human
gacaagagucuaacacacg

SEQ ID NO: 432140 - RNA, 21 nt, Human
gagcagcagcugugggggcag

SEQ ID NO: 432141 - RNA, 21 nt, Human
gaggggcaaggggaagagugg

SEQ ID NO: 432142 - RNA, 20 nt, Human
gaggguccugcauuccacag

SEQ ID NO: 432143 - RNA, 19 nt, Human
gcaggacagaaggacaaga

SEQ ID NO: 432144 - RNA, 24 nt, Human
gccaccccacacacacaccacaca

SEQ ID NO: 432145 - RNA, 19 nt, Human
gccccaggagccugccucu

SEQ ID NO: 432146 - RNA, 24 nt, Human
gccucucacauccucugcuucccu

SEQ ID NO: 432147 - RNA, 18 nt, Human
gccugagucacagagcuc

SEQ ID NO: 432148 - RNA, 19 nt, Human
gcucagccccaggagccug

SEQ ID NO: 432149 - RNA, 18 nt, Human
gcugagacugccggugcg

SEQ ID NO: 432150 - RNA, 19 nt, Human
gcugggcugagacugccgg

SEQ ID NO: 432151 - RNA, 21 nt, Human
ggaagaagggauaaagaaugu

SEQ ID NO: 432152 - RNA, 20 nt, Human
ggcugggcugagacugccgg

SEQ ID NO: 432153 - RNA, 24 nt, Human
gggugcuguccaggccaagcccag

SEQ ID NO: 432154 - RNA, 19 nt, Human
ggucuguguugcuugggag

SEQ ID NO: 432155 - RNA, 23 nt, Human
ggugcuguccaggccaagcccag

SEQ ID NO: 432156 - RNA, 23 nt, Human
uacaacccaaaggugggggcugg

SEQ ID NO: 432157 - RNA, 23 nt, Human
uaccuggggaaagucuggaccca

SEQ ID NO: 432158 - RNA, 22 nt, Human
uagagccagcaaaaaaagccuu

SEQ ID NO: 432159 - RNA, 23 nt, Human
uagagccagcaaaaaaagccuuc

SEQ ID NO: 432160 - RNA, 20 nt, Human
uagguaccagguaaaguuuc

SEQ ID NO: 432161 - RNA, 22 nt, Human
uccacagcagaugguacagagg

SEQ ID NO: 432162 - RNA, 22 nt, Human
uccagaaagaaagucaaguccc

SEQ ID NO: 432163 - RNA, 25 nt, Human
uccaggccucccccugguuccagag

SEQ ID NO: 432164 - RNA, 20 nt, Human
ucccuggccagcaucaagcu

SEQ ID NO: 432165 - RNA, 19 nt, Human
uccuuccaggccucccccu

SEQ ID NO: 432166 - RNA, 20 nt, Human
ucgaaucacagcagacaaga

SEQ ID NO: 432167 - RNA, 23 nt, Human
ucugggggaggggcaaggggaag

SEQ ID NO: 432168 - RNA, 19 nt, Human
ugagagggaauaaagggcu

SEQ ID NO: 432169 - RNA, 22 nt, Human
ugagcagcagcugugggggcag

SEQ ID NO: 432170 - RNA, 18 nt, Human
ugcuuggcucagcugcca

SEQ ID NO: 432171 - RNA, 25 nt, Human
uggcagcagcagcagcagcaagucc

SEQ ID NO: 432172 - RNA, 24 nt, Human
uggcgggugcuguccaggccaagc

SEQ ID NO: 432173 - RNA, 21 nt, Human
ugggggaacccccuuucccag

SEQ ID NO: 432174 - RNA, 18 nt, Human
ugggggaggggcaagggg

SEQ ID NO: 432175 - RNA, 24 nt, Human
ugguaacgcccagacaaagguccu

SEQ ID NO: 432176 - RNA, 22 nt, Human
uggugugagagggaauaaaggg

SEQ ID NO: 432177 - RNA, 22 nt, Human
uggugugagagggaauaaaggg

SEQ ID NO: 432178 - RNA, 23 nt, Human
uggugugagagggaauaaagggc

SEQ ID NO: 432179 - RNA, 18 nt, Human
ugucacagaggguccugc

SEQ ID NO: 432180 - RNA, 23 nt, Human
ugucacagaggguccugcauucc

SEQ ID NO: 432181 - RNA, 20 nt, Human
ugugggggcaggacagaagg

SEQ ID NO: 432182 - RNA, 23 nt, Human
uguugccgucaccaucguaagcc

SEQ ID NO: 432183 - RNA, 18 nt, Human
aagcuuucagccacagcu

SEQ ID NO: 432184 - RNA, 19 nt, Human
acagaacacacuuggugga

SEQ ID NO: 432185 - RNA, 22 nt, Human
accuugaaaaugaaaaaggaac

SEQ ID NO: 432186 - RNA, 27 nt, Human
caaagccuuuaguaauagcucaaaucc

SEQ ID NO: 432187 - RNA, 21 nt, Human
cacagcucaaaccucacccuc

SEQ ID NO: 432188 - RNA, 22 nt, Human
cacagcucaaaccucacccucc

SEQ ID NO: 432189 - RNA, 22 nt, Human
cacccuccauuacagaacacac

SEQ ID NO: 432190 - RNA, 22 nt, Human
cagacucagcgggaagcggguu

SEQ ID NO: 432191 - RNA, 22 nt, Human
ccuaugacuguaaguguggaaa

SEQ ID NO: 432192 - RNA, 22 nt, Human
ccuccauuacagaacacacuug

SEQ ID NO: 432193 - RNA, 23 nt, Human
cucacccuccauuacagaacaca

SEQ ID NO: 432194 - RNA, 18 nt, Human
cuucaagaggcaggcucc

SEQ ID NO: 432195 - RNA, 26 nt, Human
cuucaagaggcaggcuccaagaaagg

SEQ ID NO: 432196 - RNA, 20 nt, Human
gaacacacuugguggaccgg

SEQ ID NO: 432197 - RNA, 20 nt, Human
gcucaaaucucaccaaacac

SEQ ID NO: 432198 - RNA, 21 nt, Human
ggaaaagcuuuugggcagagc

SEQ ID NO: 432199 - RNA, 19 nt, Human
gugugcaccaaguguggga

SEQ ID NO: 432200 - RNA, 19 nt, Human
uccugggugcagacucagc

SEQ ID NO: 432201 - RNA, 21 nt, Human
ugaaaaaggaacaaaaccccc

SEQ ID NO: 432202 - RNA, 19 nt, Human
uggaaaagcuuuugggcag

SEQ ID NO: 432203 - RNA, 20 nt, Human
uuuuuuuuuuuugaggggcu

SEQ ID NO: 432204 - RNA, 23 nt, Human
uuuuuuuuuuuuugaggggcuca

SEQ ID NO: 432205 - RNA, 23 nt, Human
uuuuuuuuuuuuuuuuuugaggg

SEQ ID NO: 432206 - RNA, 18 nt, Human
acuccugcuuacgaccuc

SEQ ID NO: 432207 - RNA, 21 nt, Human
agacaaaggccggcgccgagc

SEQ ID NO: 432208 - RNA, 21 nt, Human
agagaacuucucuucaggaaa

SEQ ID NO: 432209 - RNA, 24 nt, Human
cagucaccaccucuucauaugauu

SEQ ID NO: 432210 - RNA, 18 nt, Human
ccaccucuucauaugauu

SEQ ID NO: 432211 - RNA, 25 nt, Human
cccgcagacaaaggccggcgccgag

SEQ ID NO: 432212 - RNA, 21 nt, Human
ccgagcccgcagcagcgccag

SEQ ID NO: 432213 - RNA, 20 nt, Human
cggcgccgagcccgcagcag

SEQ ID NO: 432214 - RNA, 22 nt, Human
cgugcccgcagacaaaggccgg

SEQ ID NO: 432215 - RNA, 21 nt, Human
gaacuggauagguugcuucau

SEQ ID NO: 432216 - RNA, 18 nt, Human
gaccucagucaccaccuc

SEQ ID NO: 432217 - RNA, 21 nt, Human
gcuguuccugagcaccgcagc

SEQ ID NO: 432218 - RNA, 20 nt, Human
ggggaaaggaaaaaaaucag

SEQ ID NO: 432219 - RNA, 24 nt, Human
uuuauuuuucauacucuuuugggg

SEQ ID NO: 432220 - RNA, 22 nt, Human
aaaaaacaaaauuaagcaaaaa

SEQ ID NO: 432221 - RNA, 23 nt, Human
aaaaaacaaaauuaagcaaaaaa

SEQ ID NO: 432222 - RNA, 25 nt, Human
aaaaaacaaaauuaagcaaaaaaga

SEQ ID NO: 432223 - RNA, 24 nt, Human
aaaaacaaaauuaagcaaaaaaga

SEQ ID NO: 432224 - RNA, 20 nt, Human
aaaacaaaauuaagcaaaaa

SEQ ID NO: 432225 - RNA, 18 nt, Human
aaccagaaauauuagaau

SEQ ID NO: 432226 - RNA, 23 nt, Human
aagcuucuucuugaguuucuucc

SEQ ID NO: 432227 - RNA, 19 nt, Human
acagacccagaggucccca

SEQ ID NO: 432228 - RNA, 20 nt, Human
accaggcagauaaccugccu

SEQ ID NO: 432229 - RNA, 24 nt, Human
agaaaacagcaaagaggugucuca

SEQ ID NO: 432230 - RNA, 24 nt, Human
agaggaggaagaaaacagcaaaga

SEQ ID NO: 432231 - RNA, 19 nt, Human
aggaagaaaacagcaaaga

SEQ ID NO: 432232 - RNA, 20 nt, Human
aggaagaaaacagcaaagag

SEQ ID NO: 432233 - RNA, 18 nt, Human
agggccaagaugaguacu

SEQ ID NO: 432234 - RNA, 18 nt, Human
agugaauuguugaacugc

SEQ ID NO: 432235 - RNA, 18 nt, Human
auggagacuagggaaugg

SEQ ID NO: 432236 - RNA, 24 nt, Human
cauuccuaggaaagccacauucca

SEQ ID NO: 432237 - RNA, 18 nt, Human
ccacuucagagaacauga

SEQ ID NO: 432238 - RNA, 21 nt, Human
cccaaauagcaucauuaccac

SEQ ID NO: 432239 - RNA, 19 nt, Human
cccaaauggaaugcgaugg

SEQ ID NO: 432240 - RNA, 21 nt, Human
ccccaaauagcaucauuacca

SEQ ID NO: 432241 - RNA, 20 nt, Human
cucucaauucugcagucauc

SEQ ID NO: 432242 - RNA, 19 nt, Human
cugcagucaucuucucugc

SEQ ID NO: 432243 - RNA, 20 nt, Human
cuggaggucuuccucuuccu

SEQ ID NO: 432244 - RNA, 18 nt, Human
gaauggucagaacagacc

SEQ ID NO: 432245 - RNA, 24 nt, Human
gaggaggaagaaaacagcaaagag

SEQ ID NO: 432246 - RNA, 23 nt, Human
gccuaugugcgcagcugagaagc

SEQ ID NO: 432247 - RNA, 20 nt, Human
gcuggaggucuuccucuucc

SEQ ID NO: 432248 - RNA, 22 nt, Human
ggagaaggagcuguugaucuug

SEQ ID NO: 432249 - RNA, 20 nt, Human
uaaaaaacaaaauuaagcaa

SEQ ID NO: 432250 - RNA, 18 nt, Human
uaaauuagccucugaaau

SEQ ID NO: 432251 - RNA, 24 nt, Human
uaacuuuuaaggacacagcccuca

SEQ ID NO: 432252 - RNA, 19 nt, Human
uaagcaaaaaagaccuuuc

SEQ ID NO: 432253 - RNA, 19 nt, Human
uacaauaccaagguucagg

SEQ ID NO: 432254 - RNA, 22 nt, Human
uaggcaagcuuuauucuuugac

SEQ ID NO: 432255 - RNA, 23 nt, Human
uccccaaauagcaucauuaccac

SEQ ID NO: 432256 - RNA, 20 nt, Human
uccccagaucuuuacaauac

SEQ ID NO: 432257 - RNA, 20 nt, Human
uccuauagcugggcgcugcc

SEQ ID NO: 432258 - RNA, 21 nt, Human
uccuauagcugggcgcugccc

SEQ ID NO: 432259 - RNA, 24 nt, Human
uccuucauccaggaaggggcuguu

SEQ ID NO: 432260 - RNA, 21 nt, Human
uccuugagugcuuggccaugg

SEQ ID NO: 432261 - RNA, 24 nt, Human
ucucaauucugcagucaucuucuc

SEQ ID NO: 432262 - RNA, 25 nt, Human
ucugcagucaucuucucuucccuug

SEQ ID NO: 432263 - RNA, 18 nt, Human
ugaaaugcuuuucuugug

SEQ ID NO: 432264 - RNA, 20 nt, Human
ugcgaugggaauugggggcu

SEQ ID NO: 432265 - RNA, 22 nt, Human
ugugugguguccaucaauccuu

SEQ ID NO: 432266 - RNA, 23 nt, Human
uuacccagucaccacuuaaccag

SEQ ID NO: 432267 - RNA, 22 nt, Human
uuagccucugaaaugcuuuucu

SEQ ID NO: 432268 - RNA, 21 nt, Human
uuuuuuuuuuuuuuuuugccu

SEQ ID NO: 432269 - RNA, 25 nt, Human
uuuuuuuuuuuuuuuuugccucuag

SEQ ID NO: 432270 - RNA, 27 nt, Human
uuuuuuuuuuuuuuuuuuuuuuugggg

SEQ ID NO: 432271 - RNA, 18 nt, Human
aaaacauuuucugccucc

SEQ ID NO: 432272 - RNA, 24 nt, Human
aaaagcacaggaguuuucuacaaa

SEQ ID NO: 432273 - RNA, 19 nt, Human
aaacaaaagggggaaaugg

SEQ ID NO: 432274 - RNA, 24 nt, Human
aaagugcugggauuacaggcguga

SEQ ID NO: 432275 - RNA, 21 nt, Human
aacaaaagggggaaauggcuu

SEQ ID NO: 432276 - RNA, 21 nt, Human
aagaugacgaugauaaaguca

SEQ ID NO: 432277 - RNA, 28 nt, Human
aagcaacaaaaaucacaucuucugaacu

SEQ ID NO: 432278 - RNA, 19 nt, Human
aaguagcugggauuacagg

SEQ ID NO: 432279 - RNA, 25 nt, Human
aagugauucuccugccucagccucc

SEQ ID NO: 432280 - RNA, 19 nt, Human
aagugcugggauuacaggc

SEQ ID NO: 432281 - RNA, 19 nt, Human
aagugcugggauuacaggc

SEQ ID NO: 432282 - RNA, 26 nt, Human
aagugcugggauuacaggcgugagcc

SEQ ID NO: 432283 - RNA, 18 nt, Human
accacguuccuuuuucug

SEQ ID NO: 432284 - RNA, 18 nt, Human
accauguuggccaggcug

SEQ ID NO: 432285 - RNA, 20 nt, Human
accauguuggccaggcuggu

SEQ ID NO: 432286 - RNA, 23 nt, Human
accauguuggccaggcuggucuc

SEQ ID NO: 432287 - RNA, 21 nt, Human
acccaggcuggagugcagugu

SEQ ID NO: 432288 - RNA, 22 nt, Human
accgcaccuggccucaguugcu

SEQ ID NO: 432289 - RNA, 18 nt, Human
acgggauuuuaccauguu

SEQ ID NO: 432290 - RNA, 20 nt, Human
acgggauuuuaccauguugg

SEQ ID NO: 432291 - RNA, 24 nt, Human
acgggauuuuaccauguuggccag

SEQ ID NO: 432292 - RNA, 20 nt, Human
acuugcaacacguuuuccca

SEQ ID NO: 432293 - RNA, 26 nt, Human
agaagucagucugaaugagugccucu

SEQ ID NO: 432294 - RNA, 19 nt, Human
agacuggugcacauacccu

SEQ ID NO: 432295 - RNA, 20 nt, Human
agccaccgcaccuggccuca

SEQ ID NO: 432296 - RNA, 18 nt, Human
agccuuucccugcagggg

SEQ ID NO: 432297 - RNA, 22 nt, Human
agcuauagggaaguuguaguug

SEQ ID NO: 432298 - RNA, 21 nt, Human
aggcagaacacugcugaugug

SEQ ID NO: 432299 - RNA, 24 nt, Human
aggcuggagugcagugugcaaucu

SEQ ID NO: 432300 - RNA, 24 nt, Human
aggugauccgcucaccucggccuc

SEQ ID NO: 432301 - RNA, 22 nt, Human
aguagagacgggauuuuaccau

SEQ ID NO: 432302 - RNA, 24 nt, Human
agugauucuccugccucagccucc

SEQ ID NO: 432303 - RNA, 22 nt, Human
agugcagugugcaaucuuggcu

SEQ ID NO: 432304 - RNA, 23 nt, Human
agugcagugugcaaucuuggcuc

SEQ ID NO: 432305 - RNA, 18 nt, Human
agugcugggauuacaggc

SEQ ID NO: 432306 - RNA, 21 nt, Human
aucacaucuucugaacuccag

SEQ ID NO: 432307 - RNA, 21 nt, Human
aucagacccuagagguuuagc

SEQ ID NO: 432308 - RNA, 18 nt, Human
auucuccugccucagccu

SEQ ID NO: 432309 - RNA, 22 nt, Human
caaaaaaaaaaaaugaccuuca

SEQ ID NO: 432310 - RNA, 23 nt, Human
caaaagcacaggaguuuucuaca

SEQ ID NO: 432311 - RNA, 24 nt, Human
caaagugcugggauuacaggcgug

SEQ ID NO: 432312 - RNA, 18 nt, Human
caaaugauucagaaaauc

SEQ ID NO: 432313 - RNA, 20 nt, Human
caaccucugccuccuggguu

SEQ ID NO: 432314 - RNA, 23 nt, Human
caacuacuacauaaaggcagaac

SEQ ID NO: 432315 - RNA, 22 nt, Human
caagugauucuccugccucagc

SEQ ID NO: 432316 - RNA, 18 nt, Human
cacaacgaugggaccaau

SEQ ID NO: 432317 - RNA, 24 nt, Human
cacccugcgcacaacgaugggacu

SEQ ID NO: 432318 - RNA, 24 nt, Human
caccucggccucccaaagugcugg

SEQ ID NO: 432319 - RNA, 19 nt, Human
caccuggccucaguugcuu

SEQ ID NO: 432320 - RNA, 21 nt, Human
cacugcaaccucugccuccug

SEQ ID NO: 432321 - RNA, 23 nt, Human
cacugcaaccucugccuccuggg

SEQ ID NO: 432322 - RNA, 19 nt, Human
caggugcccaccaucaugc

SEQ ID NO: 432323 - RNA, 21 nt, Human
caggugcccaccaucaugccc

SEQ ID NO: 432324 - RNA, 18 nt, Human
cagugaaugacugaugag

SEQ ID NO: 432325 - RNA, 18 nt, Human
cauaaagccaaggagagg

SEQ ID NO: 432326 - RNA, 24 nt, Human
cauguuggccaggcuggucucaaa

SEQ ID NO: 432327 - RNA, 20 nt, Human
ccaaagugcugggauuacag

SEQ ID NO: 432328 - RNA, 22 nt, Human
ccaaagugcugggauuacaggc

SEQ ID NO: 432329 - RNA, 22 nt, Human
ccaaagugcugggauuacaggc

SEQ ID NO: 432330 - RNA, 24 nt, Human
ccaaagugcugggauuacaggcgu

SEQ ID NO: 432331 - RNA, 21 nt, Human
ccaaguagcugggauuacagg

SEQ ID NO: 432332 - RNA, 20 nt, Human
ccauuucaguagaacugauc

SEQ ID NO: 432333 - RNA, 22 nt, Human
cccaaguagcugggauuacagg

SEQ ID NO: 432334 - RNA, 23 nt, Human
cccaaguagcugggauuacaggu

SEQ ID NO: 432335 - RNA, 24 nt, Human
cccaaguagcugggauuacaggug

SEQ ID NO: 432336 - RNA, 19 nt, Human
ccccgggagcggccugggg

SEQ ID NO: 432337 - RNA, 21 nt, Human
ccgugagccccgggagcggcc

SEQ ID NO: 432338 - RNA, 24 nt, Human
ccuccuggguucaagugauucucc

SEQ ID NO: 432339 - RNA, 22 nt, Human
ccucugccuccuggguucaagu

SEQ ID NO: 432340 - RNA, 24 nt, Human
ccugaccucaggugauccgcucac

SEQ ID NO: 432341 - RNA, 23 nt, Human
ccugccucagccucccaaguagc

SEQ ID NO: 432342 - RNA, 23 nt, Human
ccuggguucaagugauucuccuc

SEQ ID NO: 432343 - RNA, 23 nt, Human
ccuggguucaagugauucuccug

SEQ ID NO: 432344 - RNA, 18 nt, Human
ccuuguggcuacgaaggu

SEQ ID NO: 432345 - RNA, 24 nt, Human
cgggagcggccugggggcgcuggg

SEQ ID NO: 432346 - RNA, 18 nt, Human
cuacuacauaaaggcaga

SEQ ID NO: 432347 - RNA, 24 nt, Human
cuagucacccaggcuggagugcag

SEQ ID NO: 432348 - RNA, 25 nt, Human
cucaaaacuccugaccucaggugau

SEQ ID NO: 432349 - RNA, 28 nt, Human
cucacaaucuccugugugugaaacaguc

SEQ ID NO: 432350 - RNA, 24 nt, Human
cucacugcaaccucugccuccugg

SEQ ID NO: 432351 - RNA, 24 nt, Human
cucagccucccaaguagcugggau

SEQ ID NO: 432352 - RNA, 23 nt, Human
cuccaggaacugacuugauccaa

SEQ ID NO: 432353 - RNA, 19 nt, Human
cuccaggagcacacaucuc

SEQ ID NO: 432354 - RNA, 20 nt, Human
cuccuggguucaagugauuc

SEQ ID NO: 432355 - RNA, 21 nt, Human
cuccuggguucaagugauucu

SEQ ID NO: 432356 - RNA, 19 nt, Human
cugcaaccucugccuccug

SEQ ID NO: 432357 - RNA, 24 nt, Human
cugcaaccucugccuccuggguuc

SEQ ID NO: 432358 - RNA, 23 nt, Human
cugccucagccucccaaguagcu

SEQ ID NO: 432359 - RNA, 23 nt, Human
cugccuccuggguucaagugauu

SEQ ID NO: 432360 - RNA, 21 nt, Human
cuggaguaauggguuuuucuu

SEQ ID NO: 432361 - RNA, 25 nt, Human
cugggccaggcuaccauauuucagg

SEQ ID NO: 432362 - RNA, 19 nt, Human
cuuguccuacuugaguggc

SEQ ID NO: 432363 - RNA, 24 nt, Human
gaccucaggugauccgcucaccuc

SEQ ID NO: 432364 - RNA, 19 nt, Human
gaggacagaaccaucuaca

SEQ ID NO: 432365 - RNA, 18 nt, Human
gauuacaggcgugagcca

SEQ ID NO: 432366 - RNA, 20 nt, Human
gauuacaggcgugagccacc

SEQ ID NO: 432367 - RNA, 23 nt, Human
gauuacaggcgugagccaccgca

SEQ ID NO: 432368 - RNA, 21 nt, Human
gauuacaggugcccaccauca

SEQ ID NO: 432369 - RNA, 20 nt, Human
gccccgggagcggccugggg

SEQ ID NO: 432370 - RNA, 19 nt, Human
gcuagucacccaggcugga

SEQ ID NO: 432371 - RNA, 21 nt, Human
gcucacugcaaccucugccuc

SEQ ID NO: 432372 - RNA, 24 nt, Human
gcuggucucaaaacuccugaccuc

SEQ ID NO: 432373 - RNA, 20 nt, Human
ggaacaaaaacagcaucaga

SEQ ID NO: 432374 - RNA, 22 nt, Human
ggaguuuugcuagucacccagg

SEQ ID NO: 432375 - RNA, 24 nt, Human
ggauuacaggugcccaccaucaug

SEQ ID NO: 432376 - RNA, 22 nt, Human
ggauuuuaccauguuggccagg

SEQ ID NO: 432377 - RNA, 24 nt, Human
ggccaggcuaccauauuucaggga

SEQ ID NO: 432378 - RNA, 19 nt, Human
gggagagauguauuuggag

SEQ ID NO: 432379 - RNA, 23 nt, Human
gggauuuuaccauguuggccagg

SEQ ID NO: 432380 - RNA, 25 nt, Human
gggccaggcuaccauauuucaggga

SEQ ID NO: 432381 - RNA, 18 nt, Human
guagcugggauuacaggu

SEQ ID NO: 432382 - RNA, 24 nt, Human
gugauucuccugccucagccuccc

SEQ ID NO: 432383 - RNA, 24 nt, Human
guuuugcuagucacccaggcugga

SEQ ID NO: 432384 - RNA, 25 nt, Human
guuuuuguuuucacugucccucuuu

SEQ ID NO: 432385 - RNA, 20 nt, Human
uaacuuguggagaaaugcau

SEQ ID NO: 432386 - RNA, 18 nt, Human
uaaugcugaugaaacugc

SEQ ID NO: 432387 - RNA, 24 nt, Human
uaauuuuuauaauuuuaguagaga

SEQ ID NO: 432388 - RNA, 19 nt, Human
uacaaucaagugcuaacuu

SEQ ID NO: 432389 - RNA, 22 nt, Human
uacaggcgugagccaccgcacc

SEQ ID NO: 432390 - RNA, 23 nt, Human
uacaggcgugagccaccgcaccu

SEQ ID NO: 432391 - RNA, 21 nt, Human
uaccauguuggccaggcuggu

SEQ ID NO: 432392 - RNA, 24 nt, Human
uaccauguuggccaggcuggucuc

SEQ ID NO: 432393 - RNA, 22 nt, Human
uagagacgggauuuuaccaugu

SEQ ID NO: 432394 - RNA, 19 nt, Human
uaggcuaccagugaucaua

SEQ ID NO: 432395 - RNA, 24 nt, Human
uaguagagacgggauuuuaccaug

SEQ ID NO: 432396 - RNA, 24 nt, Human
uauauacaacuuaucguauauaua

SEQ ID NO: 432397 - RNA, 21 nt, Human
uauuucuuuuucccuccagga

SEQ ID NO: 432398 - RNA, 19 nt, Human
ucaagugauucuccugccu

SEQ ID NO: 432399 - RNA, 23 nt, Human
ucacccaggcuggagugcagugu

SEQ ID NO: 432400 - RNA, 24 nt, Human
ucacugcaaccucugccuccuggg

SEQ ID NO: 432401 - RNA, 25 nt, Human
ucacugcaaccucugccuccugggu

SEQ ID NO: 432402 - RNA, 27 nt, Human
ucacugcaaccucugccuccuggguuc

SEQ ID NO: 432403 - RNA, 20 nt, Human
ucagccucccaaguagcugg

SEQ ID NO: 432404 - RNA, 19 nt, Human
ucauacuguucagcagcua

SEQ ID NO: 432405 - RNA, 24 nt, Human
ucccaaagugcugggauuacaggc

SEQ ID NO: 432406 - RNA, 23 nt, Human
ucccaaguagcugggauuacagg

SEQ ID NO: 432407 - RNA, 24 nt, Human
ucccaaguagcugggauuacaggu

SEQ ID NO: 432408 - RNA, 24 nt, Human
ucccuugacaaccgaaucuuuuuu

SEQ ID NO: 432409 - RNA, 23 nt, Human
uccucuuuagaagcugggccagg

SEQ ID NO: 432410 - RNA, 21 nt, Human
uccuggguucaagugauucuc

SEQ ID NO: 432411 - RNA, 24 nt, Human
uccuggguucaagugauucuccug

SEQ ID NO: 432412 - RNA, 18 nt, Human
ucggccucccaaagugcu

SEQ ID NO: 432413 - RNA, 20 nt, Human
ucgggaagagauagaaaucu

SEQ ID NO: 432414 - RNA, 27 nt, Human
ucucagagcaacaaaauacauuuagua

SEQ ID NO: 432415 - RNA, 26 nt, Human
ucuccugccucagccucccaaguagc

SEQ ID NO: 432416 - RNA, 22 nt, Human
ucugaaaagcaacaaaaaucac

SEQ ID NO: 432417 - RNA, 19 nt, Human
ugaaaagcaacaaaaauca

SEQ ID NO: 432418 - RNA, 24 nt, Human
ugaaaagcaacaaaaaucacaucu

SEQ ID NO: 432419 - RNA, 20 nt, Human
ugaaaguuucauaaccucac

SEQ ID NO: 432420 - RNA, 19 nt, Human
ugaccucaggugauccgcu

SEQ ID NO: 432421 - RNA, 25 nt, Human
ugaccucaggugauccgcucaccuc

SEQ ID NO: 432422 - RNA, 23 nt, Human
ugacuugcaacacguuuucccaa

SEQ ID NO: 432423 - RNA, 19 nt, Human
ugauagucuugagguuugu

SEQ ID NO: 432424 - RNA, 22 nt, Human
ugauccaaacagggucugugcu

SEQ ID NO: 432425 - RNA, 24 nt, Human
ugauccgcucaccucggccuccca

SEQ ID NO: 432426 - RNA, 18 nt, Human
ugauguguuucuuuacua

SEQ ID NO: 432427 - RNA, 21 nt, Human
ugcaggcggcugacuagugcc

SEQ ID NO: 432428 - RNA, 21 nt, Human
ugcagugugcaaucuuggcuc

SEQ ID NO: 432429 - RNA, 24 nt, Human
ugcagugugcaaucuuggcucacu

SEQ ID NO: 432430 - RNA, 19 nt, Human
ugccacagaaagaugucaa

SEQ ID NO: 432431 - RNA, 24 nt, Human
ugcccggcuaauuuuuauaauuuu

SEQ ID NO: 432432 - RNA, 25 nt, Human
ugccgagaguccaagagugccuuaa

SEQ ID NO: 432433 - RNA, 24 nt, Human
ugccucagccucccaaguagcugg

SEQ ID NO: 432434 - RNA, 24 nt, Human
ugcugggauuacaggcgugagcca

SEQ ID NO: 432435 - RNA, 21 nt, Human
uggagugcagugugcaaucuu

SEQ ID NO: 432436 - RNA, 23 nt, Human
uggagugcagugugcaaucuugg

SEQ ID NO: 432437 - RNA, 23 nt, Human
uggaguuuugcuagucacccagg

SEQ ID NO: 432438 - RNA, 25 nt, Human
uggccaggcuggucucaaaacuccu

SEQ ID NO: 432439 - RNA, 18 nt, Human
ugggauuacaggcgugag

SEQ ID NO: 432440 - RNA, 19 nt, Human
ugggauuacaggcgugagc

SEQ ID NO: 432441 - RNA, 21 nt, Human
ugggauuacaggcgugagcca

SEQ ID NO: 432442 - RNA, 22 nt, Human
ugggauuacaggcgugagccac

SEQ ID NO: 432443 - RNA, 23 nt, Human
ugggauuacaggcgugagccacc

SEQ ID NO: 432444 - RNA, 24 nt, Human
ugggauuacaggcgugagccaccg

SEQ ID NO: 432445 - RNA, 21 nt, Human
ugggauuacaggugcccacca

SEQ ID NO: 432446 - RNA, 22 nt, Human
ugggauuacaggugcccaccau

SEQ ID NO: 432447 - RNA, 23 nt, Human
uggguucaagugauucuccugcc

SEQ ID NO: 432448 - RNA, 24 nt, Human
uggguucaagugauucuccugccu

SEQ ID NO: 432449 - RNA, 24 nt, Human
uggucucaaaacuccugaccucag

SEQ ID NO: 432450 - RNA, 24 nt, Human
ugucaaaaaaaaaaaaugaccuuc

SEQ ID NO: 432451 - RNA, 21 nt, Human
uguccugggagguuuuaugau

SEQ ID NO: 432452 - RNA, 22 nt, Human
ugugcucaccuuuauguccugg

SEQ ID NO: 432453 - RNA, 22 nt, Human
ugugcucaccuuuauguccugg

SEQ ID NO: 432454 - RNA, 23 nt, Human
ugugcucaccuuuauguccuggg

SEQ ID NO: 432455 - RNA, 26 nt, Human
uguggagaaaugcauuuaggagugcg

SEQ ID NO: 432456 - RNA, 21 nt, Human
uuaaaacauuuucugccucca

SEQ ID NO: 432457 - RNA, 18 nt, Human
uuaguagagacgggauuu

SEQ ID NO: 432458 - RNA, 18 nt, Human
uuaguagagacgggauuu

SEQ ID NO: 432459 - RNA, 24 nt, Human
uuaguagagacgggauuuuaccau

SEQ ID NO: 432460 - RNA, 20 nt, Human
uuaugauguguuucuuuacu

SEQ ID NO: 432461 - RNA, 21 nt, Human
uucaagugauucuccugccuc

SEQ ID NO: 432462 - RNA, 23 nt, Human
uucaagugauucuccugccucag

SEQ ID NO: 432463 - RNA, 24 nt, Human
uucaagugauucuccugccucagc

SEQ ID NO: 432464 - RNA, 22 nt, Human
uucucuuguguggaaaucucac

SEQ ID NO: 432465 - RNA, 19 nt, Human
uugauccaaacagggucug

SEQ ID NO: 432466 - RNA, 21 nt, Human
uugcuagucacccaggcugga

SEQ ID NO: 432467 - RNA, 24 nt, Human
uugcuagucacccaggcuggagug

SEQ ID NO: 432468 - RNA, 22 nt, Human
uuugcuagucacccaggcugga

SEQ ID NO: 432469 - RNA, 24 nt, Human
uuugcuagucacccaggcuggagu

SEQ ID NO: 432470 - RNA, 21 nt, Human
uuuuauaauuuuaguagagac

SEQ ID NO: 432471 - RNA, 22 nt, Human
uuuuaugauguguuucuuuacu

SEQ ID NO: 432472 - RNA, 21 nt, Human
uuuugcuagucacccaggcug

SEQ ID NO: 432473 - RNA, 23 nt, Human
uuuugcuagucacccaggcugga

SEQ ID NO: 432474 - RNA, 20 nt, Human
uuuuuauaauuuuaguagag

SEQ ID NO: 432475 - RNA, 19 nt, Human
agcuccuggggcaggaugg

SEQ ID NO: 432476 - RNA, 23 nt, Human
agguacuugccuuucucuucuuu

SEQ ID NO: 432477 - RNA, 21 nt, Human
cacccggaguuggcucagggc

SEQ ID NO: 432478 - RNA, 18 nt, Human
caggccuggagcuccugg

SEQ ID NO: 432479 - RNA, 19 nt, Human
cccaggccuggagcuccug

SEQ ID NO: 432480 - RNA, 21 nt, Human
ccucagccacucacagcagag

SEQ ID NO: 432481 - RNA, 19 nt, Human
ccugcacccaggccuggag

SEQ ID NO: 432482 - RNA, 20 nt, Human
ccuguggaggccuagggccc

SEQ ID NO: 432483 - RNA, 23 nt, Human
cgaggagagugacagccucuuca

SEQ ID NO: 432484 - RNA, 25 nt, Human
cugaagcgcuggcggaacaucucca

SEQ ID NO: 432485 - RNA, 23 nt, Human
cugcuccagcaccaguagcucca

SEQ ID NO: 432486 - RNA, 23 nt, Human
cugcuccuguggaggccuagggc

SEQ ID NO: 432487 - RNA, 23 nt, Human
cuugccuuucucuucuuucuccu

SEQ ID NO: 432488 - RNA, 21 nt, Human
cuuucucuucuuucuccucga

SEQ ID NO: 432489 - RNA, 23 nt, Human
gccuggagcuccuggggcaggau

SEQ ID NO: 432490 - RNA, 18 nt, Human
gccuuucucuucuuucuc

SEQ ID NO: 432491 - RNA, 22 nt, Human
gcuccuugguguggaucucggg

SEQ ID NO: 432492 - RNA, 21 nt, Human
uacccaaacugccugaagcgc

SEQ ID NO: 432493 - RNA, 18 nt, Human
uagggcccagaacugggg

SEQ ID NO: 432494 - RNA, 21 nt, Human
uagggcccagaacuggggcca

SEQ ID NO: 432495 - RNA, 21 nt, Human
uaucaugguacccaaacugcc

SEQ ID NO: 432496 - RNA, 18 nt, Human
ucuccgggcaaugcuccu

SEQ ID NO: 432497 - RNA, 21 nt, Human
ucuccgggcaaugcuccugca

SEQ ID NO: 432498 - RNA, 20 nt, Human
ugccugaagcgcuggcggaa

SEQ ID NO: 432499 - RNA, 20 nt, Human
uggagcuccuggggcaggau

SEQ ID NO: 432500 - RNA, 22 nt, Human
uggagcuccuggggcaggaugg

SEQ ID NO: 432501 - RNA, 23 nt, Human
uggggccaugccuaguaccuugg

SEQ ID NO: 432502 - RNA, 18 nt, Human
uguggaggccuagggccc

SEQ ID NO: 432503 - RNA, 20 nt, Human
aaccccacucuuccccaagc

SEQ ID NO: 432504 - RNA, 18 nt, Human
caacaggccuuccuccuc

SEQ ID NO: 432505 - RNA, 22 nt, Human
ccccacucuuccccaagcugga

SEQ ID NO: 432506 - RNA, 24 nt, Human
cccucaggcucuccugcugacaac

SEQ ID NO: 432507 - RNA, 26 nt, Human
ccugcugacaaccccacucuucccca

SEQ ID NO: 432508 - RNA, 26 nt, Human
cuccucccugcuauuagauaccugau

SEQ ID NO: 432509 - RNA, 21 nt, Human
cugggccucagcccucaggcc

SEQ ID NO: 432510 - RNA, 21 nt, Human
gcaacaggccuuccuccuccc

SEQ ID NO: 432511 - RNA, 18 nt, Human
ucaggcucuccugcugac

SEQ ID NO: 432512 - RNA, 22 nt, Human
ugacaaccccacucuuccccaa

SEQ ID NO: 432513 - RNA, 22 nt, Human
uucacgcugggccucagcccuc

SEQ ID NO: 432514 - RNA, 22 nt, Human
aaaucaguaagaagaucaauaa

SEQ ID NO: 432515 - RNA, 21 nt, Human
aaaugcaccuuagggcugaac

SEQ ID NO: 432516 - RNA, 20 nt, Human
aaccaaaaaacucuccacag

SEQ ID NO: 432517 - RNA, 24 nt, Human
aacccagcacaaggaggaagacug

SEQ ID NO: 432518 - RNA, 20 nt, Human
aagagcuacaauaaaucagu

SEQ ID NO: 432519 - RNA, 22 nt, Human
aagagggugcaggcuccuggau

SEQ ID NO: 432520 - RNA, 22 nt, Human
aaggacaaauggcaaaccaaaa

SEQ ID NO: 432521 - RNA, 18 nt, Human
aauggccaaaaaacaaaa

SEQ ID NO: 432522 - RNA, 19 nt, Human
acagaaugcccaccgugcc

SEQ ID NO: 432523 - RNA, 18 nt, Human
acuucaucccuggggaca

SEQ ID NO: 432524 - RNA, 20 nt, Human
agaaucagggccuggagaag

SEQ ID NO: 432525 - RNA, 18 nt, Human
agagggugcaggcuccug

SEQ ID NO: 432526 - RNA, 18 nt, Human
aggagagaaguggguccc

SEQ ID NO: 432527 - RNA, 20 nt, Human
aggaggaggcaccagcaacu

SEQ ID NO: 432528 - RNA, 20 nt, Human
aggcuccuggauaguggucu

SEQ ID NO: 432529 - RNA, 24 nt, Human
aggcuggagguggagccaacagaa

SEQ ID NO: 432530 - RNA, 20 nt, Human
agggaagugggugggucucg

SEQ ID NO: 432531 - RNA, 21 nt, Human
aguagccaagcccugggcgac

SEQ ID NO: 432532 - RNA, 20 nt, Human
caaaaaacucuccacaggca

SEQ ID NO: 432533 - RNA, 21 nt, Human
caaaaaccacaucggagucaa

SEQ ID NO: 432534 - RNA, 23 nt, Human
caaaagacaaauggccaaaaaac

SEQ ID NO: 432535 - RNA, 23 nt, Human
caaaugcagggaagugggugggu

SEQ ID NO: 432536 - RNA, 22 nt, Human
caacagaaagagggugcaggcu

SEQ ID NO: 432537 - RNA, 24 nt, Human
caacagaaagagggugcaggcucc

SEQ ID NO: 432538 - RNA, 22 nt, Human
caagaagacugagagagcagug

SEQ ID NO: 432539 - RNA, 19 nt, Human
cacagaacccgggccugca

SEQ ID NO: 432540 - RNA, 21 nt, Human
cacagaacccgggccugcaag

SEQ ID NO: 432541 - RNA, 21 nt, Human
cacagacuucaugaaggcugu

SEQ ID NO: 432542 - RNA, 23 nt, Human
cagaaugcccaccgugccgggac

SEQ ID NO: 432543 - RNA, 18 nt, Human
cagcaaaaaccacaucgg

SEQ ID NO: 432544 - RNA, 22 nt, Human
cagcaacuccaacugagaauca

SEQ ID NO: 432545 - RNA, 23 nt, Human
caggggaggaccauggcggacac

SEQ ID NO: 432546 - RNA, 24 nt, Human
cagugagggcuuuuaguggugaga

SEQ ID NO: 432547 - RNA, 20 nt, Human
caucggagucaaaagacaaa

SEQ ID NO: 432548 - RNA, 19 nt, Human
caucugaggaacacagacu

SEQ ID NO: 432549 - RNA, 19 nt, Human
caucugccauuuccacacc

SEQ ID NO: 432550 - RNA, 21 nt, Human
caucugccauuuccacacccu

SEQ ID NO: 432551 - RNA, 23 nt, Human
caugacagaaugcccaccgugcc

SEQ ID NO: 432552 - RNA, 26 nt, Human
ccaaaaaacaaaaaaaauuaaaaaag

SEQ ID NO: 432553 - RNA, 22 nt, Human
ccaacagaaagagggugcaggc

SEQ ID NO: 432554 - RNA, 21 nt, Human
ccacaggcaaaaggcuaauua

SEQ ID NO: 432555 - RNA, 18 nt, Human
ccuugcuugugaugucug

SEQ ID NO: 432556 - RNA, 23 nt, Human
cuggaggagguuaaaucaagaag

SEQ ID NO: 432557 - RNA, 22 nt, Human
gaaaucagcaaaaaccacaucg

SEQ ID NO: 432558 - RNA, 24 nt, Human
gcaaaugcagggaagugggugggu

SEQ ID NO: 432559 - RNA, 25 nt, Human
gccaaaaaacaaaaaaaauuaaaaa

SEQ ID NO: 432560 - RNA, 22 nt, Human
gcuggagguggagccaacagaa

SEQ ID NO: 432561 - RNA, 27 nt, Human
gcuguggggaaacgugagcaagggcuc

SEQ ID NO: 432562 - RNA, 19 nt, Human
ggagaaggcggaagccugg

SEQ ID NO: 432563 - RNA, 24 nt, Human
ggccaaaaaacaaaaaaaauuaaa

SEQ ID NO: 432564 - RNA, 23 nt, Human
ggcgacaaaugcagggguaggga

SEQ ID NO: 432565 - RNA, 18 nt, Human
gucucagcaaaugcaggg

SEQ ID NO: 432566 - RNA, 19 nt, Human
uaaaaaaggacaaauggca

SEQ ID NO: 432567 - RNA, 21 nt, Human
uaaaaaaggacaaauggcaaa

SEQ ID NO: 432568 - RNA, 20 nt, Human
uaagaaaaaugcaccuuagg

SEQ ID NO: 432569 - RNA, 21 nt, Human
uaagaagaucaauaaccucau

SEQ ID NO: 432570 - RNA, 23 nt, Human
uagccaagcccugggcgaccugc

SEQ ID NO: 432571 - RNA, 18 nt, Human
uagggcaagcgugggggc

SEQ ID NO: 432572 - RNA, 19 nt, Human
uaguaagaaaaaugcaccu

SEQ ID NO: 432573 - RNA, 24 nt, Human
ucccuggggacacagugugaacua

SEQ ID NO: 432574 - RNA, 18 nt, Human
ucuccacaggcaaaaggc

SEQ ID NO: 432575 - RNA, 21 nt, Human
ucucggaggcuggagguggag

SEQ ID NO: 432576 - RNA, 26 nt, Human
ucuguacagacuucccugaugaggug

SEQ ID NO: 432577 - RNA, 18 nt, Human
ugaaaaagcuuucuaguc

SEQ ID NO: 432578 - RNA, 20 nt, Human
ugaacuacagggaccugaaa

SEQ ID NO: 432579 - RNA, 20 nt, Human
ugaaggcuguggggaaacgu

SEQ ID NO: 432580 - RNA, 23 nt, Human
ugaccaaagaggcagacggaggc

SEQ ID NO: 432581 - RNA, 18 nt, Human
ugagagagcagugagggc

SEQ ID NO: 432582 - RNA, 20 nt, Human
ugagcaagggcucuagggca

SEQ ID NO: 432583 - RNA, 18 nt, Human
ugaucaacacaggggugg

SEQ ID NO: 432584 - RNA, 25 nt, Human
uggagguggagccaacagaaagagg

SEQ ID NO: 432585 - RNA, 18 nt, Human
uguagggcaagcgugggg

SEQ ID NO: 432586 - RNA, 19 nt, Human
uuggaugugccuugcuugu

SEQ ID NO: 432587 - RNA, 25 nt, Human
augucacaaugcccucugcgacagc

SEQ ID NO: 432588 - RNA, 23 nt, Human
ccacauucuucacacuuguagaa

SEQ ID NO: 432589 - RNA, 21 nt, Human
ccagcuuccaggauguccggg

SEQ ID NO: 432590 - RNA, 25 nt, Human
ccagugauacaucacaauccucuuu

SEQ ID NO: 432591 - RNA, 25 nt, Human
ccagugauaugucacaaugcccucu

SEQ ID NO: 432592 - RNA, 21 nt, Human
ccucugcgacagcaccaaggc

SEQ ID NO: 432593 - RNA, 19 nt, Human
cgacagcaccaaggcaaga

SEQ ID NO: 432594 - RNA, 22 nt, Human
cucacauucugagcagagguug

SEQ ID NO: 432595 - RNA, 20 nt, Human
cuguguacugggcccaggcc

SEQ ID NO: 432596 - RNA, 21 nt, Human
ggucacaugaucuacaugcug

SEQ ID NO: 432597 - RNA, 23 nt, Human
gucaaaucgcucacauucugagc

SEQ ID NO: 432598 - RNA, 23 nt, Human
uaugucacaaucccaucugugua

SEQ ID NO: 432599 - RNA, 22 nt, Human
ucccugggugcagggaccagug

SEQ ID NO: 432600 - RNA, 23 nt, Human
ucuagaauuucucaccaguauaa

SEQ ID NO: 432601 - RNA, 24 nt, Human
ucuaggugcuggguccagggccga

SEQ ID NO: 432602 - RNA, 20 nt, Human
ugauaugucacaaugcccuc

SEQ ID NO: 432603 - RNA, 22 nt, Human
ugccacauucuucacacuugua

SEQ ID NO: 432604 - RNA, 19 nt, Human
uguccgggcaucuuagcug

SEQ ID NO: 432605 - RNA, 21 nt, Human
uuaauggcuuuuccacauucu

SEQ ID NO: 432606 - RNA, 20 nt, Human
uuguguauauaccuuuuucc

SEQ ID NO: 432607 - RNA, 19 nt, Human
aaggagaaaaaagccauga

SEQ ID NO: 432608 - RNA, 21 nt, Human
caagucuuaagagggaaggag

SEQ ID NO: 432609 - RNA, 18 nt, Human
cacuggcugaacuacuga

SEQ ID NO: 432610 - RNA, 23 nt, Human
gaaggagaaaaaagccaugagag

SEQ ID NO: 432611 - RNA, 18 nt, Human
gaaggagaaaacaugagg

SEQ ID NO: 432612 - RNA, 24 nt, Human
ggaaggagaaaaaagccaugagag

SEQ ID NO: 432613 - RNA, 22 nt, Human
uacuccagaucagacucauccu

SEQ ID NO: 432614 - RNA, 25 nt, Human
uauaaaacaaauguuuugucuauga

SEQ ID NO: 432615 - RNA, 19 nt, Human
ucuggagaagugccaaguc

SEQ ID NO: 432616 - RNA, 21 nt, Human
ucuggagaagugccaagucuu

SEQ ID NO: 432617 - RNA, 24 nt, Human
ugaggcuucucugcuguguggucu

SEQ ID NO: 432618 - RNA, 22 nt, Human
ugagggaaggagaaaaaagcca

SEQ ID NO: 432619 - RNA, 20 nt, Human
ugugaggcuucucugcugug

SEQ ID NO: 432620 - RNA, 18 nt, Human
uuaaaauauuucagcacc

SEQ ID NO: 432621 - RNA, 23 nt, Human
uucucugcuguguggucucccaa

SEQ ID NO: 432622 - RNA, 24 nt, Human
uucugauuuacuccagaucagacu

SEQ ID NO: 432623 - RNA, 19 nt, Human
uuggccaaaacaaaaaaac

SEQ ID NO: 432624 - RNA, 22 nt, Human
aacccggugagacaguuaguga

SEQ ID NO: 432625 - RNA, 19 nt, Human
acuuccaccgccugaaucc

SEQ ID NO: 432626 - RNA, 21 nt, Human
auccauuucuuccagacccag

SEQ ID NO: 432627 - RNA, 21 nt, Human
caccucuggcucccaggguuc

SEQ ID NO: 432628 - RNA, 24 nt, Human
ccaccgccugaauccauacuuagc

SEQ ID NO: 432629 - RNA, 23 nt, Human
ccgccgccgccgccgccgccgcc

SEQ ID NO: 432630 - RNA, 24 nt, Human
ccgccgccgccgccgccgccgccu

SEQ ID NO: 432631 - RNA, 18 nt, Human
ccgccgccgccgccuccg

SEQ ID NO: 432632 - RNA, 23 nt, Human
ccgccgccgccgccuccgugccg

SEQ ID NO: 432633 - RNA, 18 nt, Human
ccgccgccgccuccgugc

SEQ ID NO: 432634 - RNA, 19 nt, Human
ccgccgccgccuccgugcc

SEQ ID NO: 432635 - RNA, 18 nt, Human
ccgccgccgcugccgccg

SEQ ID NO: 432636 - RNA, 21 nt, Human
ccgccgccgcugccgccgccg

SEQ ID NO: 432637 - RNA, 22 nt, Human
ccgccgccgcugccgccgccgc

SEQ ID NO: 432638 - RNA, 24 nt, Human
ccgccgccgcugccgccgccgccg

SEQ ID NO: 432639 - RNA, 22 nt, Human
ccgccgccuccgugccgccagu

SEQ ID NO: 432640 - RNA, 18 nt, Human
ccgccgcugccgccgccg

SEQ ID NO: 432641 - RNA, 24 nt, Human
ccgccgcugccgccgccgccgccg

SEQ ID NO: 432642 - RNA, 24 nt, Human
ccgccgcugccgccgccgcugccg

SEQ ID NO: 432643 - RNA, 18 nt, Human
ccgcugccgccgccgccg

SEQ ID NO: 432644 - RNA, 24 nt, Human
ccgcugccgccgccgccgccgccg

SEQ ID NO: 432645 - RNA, 24 nt, Human
ccgcugccgccgccgcugccgccg

SEQ ID NO: 432646 - RNA, 19 nt, Human
ccugcugcugcagcuacag

SEQ ID NO: 432647 - RNA, 23 nt, Human
cgccagucggacugugaccgcgc

SEQ ID NO: 432648 - RNA, 23 nt, Human
cgccgccgccgccgccgccuccg

SEQ ID NO: 432649 - RNA, 20 nt, Human
cuacagcugccgccgccgcu

SEQ ID NO: 432650 - RNA, 27 nt, Human
cugccgccgccgccgccgccgccgccu

SEQ ID NO: 432651 - RNA, 18 nt, Human
gagcucugcagauaaacu

SEQ ID NO: 432652 - RNA, 22 nt, Human
gccgccgccgccgccgccgccg

SEQ ID NO: 432653 - RNA, 22 nt, Human
gccgccgccgcugccgccgccg

SEQ ID NO: 432654 - RNA, 22 nt, Human
gccgccgccgcugccgccgccg

SEQ ID NO: 432655 - RNA, 22 nt, Human
gcugccgccgccgcugccgccg

SEQ ID NO: 432656 - RNA, 22 nt, Human
uagcaaaguucauucaccaaua

SEQ ID NO: 432657 - RNA, 23 nt, Human
uagugaauuucauccacuggcuc

SEQ ID NO: 432658 - RNA, 23 nt, Human
uauuagaggacucagaugucuag

SEQ ID NO: 432659 - RNA, 25 nt, Human
uccaagacuuccaccgccugaaucc

SEQ ID NO: 432660 - RNA, 19 nt, Human
ucucuugucucaguuuuga

SEQ ID NO: 432661 - RNA, 19 nt, Human
uggcucccaggguucuacu

SEQ ID NO: 432662 - RNA, 23 nt, Human
uguauucaccucuggcucccagg

SEQ ID NO: 432663 - RNA, 24 nt, Human
uguauucaccucuggcucccaggg

SEQ ID NO: 432664 - RNA, 19 nt, Human
aaagcccccgcgcuuuccc

SEQ ID NO: 432665 - RNA, 19 nt, Human
aaggcgggagggcuaagga

SEQ ID NO: 432666 - RNA, 18 nt, Human
aaguuaaggcuauagguu

SEQ ID NO: 432667 - RNA, 20 nt, Human
accccaaugccgaaggcggg

SEQ ID NO: 432668 - RNA, 24 nt, Human
cacauauauacacauuuauaugua

SEQ ID NO: 432669 - RNA, 20 nt, Human
cauauauacacauuuauaug

SEQ ID NO: 432670 - RNA, 22 nt, Human
ccaccucccacaccaggcgcuc

SEQ ID NO: 432671 - RNA, 18 nt, Human
ccacguguucuggccgag

SEQ ID NO: 432672 - RNA, 22 nt, Human
ccacguguucuggccgagagac

SEQ ID NO: 432673 - RNA, 20 nt, Human
cccacaccaggcgcucaagg

SEQ ID NO: 432674 - RNA, 22 nt, Human
cgcucaaggccccgcaaagccc

SEQ ID NO: 432675 - RNA, 19 nt, Human
cgggagggcuaaggaagcg

SEQ ID NO: 432676 - RNA, 21 nt, Human
cggggaccccaaugccgaagg

SEQ ID NO: 432677 - RNA, 26 nt, Human
gaccaccucccacaccaggcgcucaa

SEQ ID NO: 432678 - RNA, 22 nt, Human
ucgaccaccucccacaccaggc

SEQ ID NO: 432679 - RNA, 23 nt, Human
uucacauauauacacauuuauau

SEQ ID NO: 432680 - RNA, 24 nt, Human
aaacauggcaaaaccccgucucua

SEQ ID NO: 432681 - RNA, 18 nt, Human
aaagaugcuggaugcuuc

SEQ ID NO: 432682 - RNA, 18 nt, Human
aaagccaugucaggagcc

SEQ ID NO: 432683 - RNA, 20 nt, Human
aacauggcaaaaccccgucu

SEQ ID NO: 432684 - RNA, 21 nt, Human
aacauggcaaaaccccgucuc

SEQ ID NO: 432685 - RNA, 20 nt, Human
aacccgauauauccucgaga

SEQ ID NO: 432686 - RNA, 21 nt, Human
aagagugaagcuguaccuguc

SEQ ID NO: 432687 - RNA, 19 nt, Human
aagcagagguugcagugag

SEQ ID NO: 432688 - RNA, 22 nt, Human
aaguccacagccacauccuuga

SEQ ID NO: 432689 - RNA, 24 nt, Human
aagugauccccuugccuuggccuc

SEQ ID NO: 432690 - RNA, 25 nt, Human
aagugauccccuugccuuggccucc

SEQ ID NO: 432691 - RNA, 19 nt, Human
aaucauggcucacugcagc

SEQ ID NO: 432692 - RNA, 25 nt, Human
aaugauccucccaccucagccuccu

SEQ ID NO: 432693 - RNA, 22 nt, Human
aaugauugggcgcggggaagaa

SEQ ID NO: 432694 - RNA, 19 nt, Human
acaguguuaagauuacagg

SEQ ID NO: 432695 - RNA, 24 nt, Human
acaguguuaagauuacagguguga

SEQ ID NO: 432696 - RNA, 24 nt, Human
accaacagaaacagcaucgaggaa

SEQ ID NO: 432697 - RNA, 20 nt, Human
acccacuccccacaccaggc

SEQ ID NO: 432698 - RNA, 26 nt, Human
acccacuccccacaccaggcucagcc

SEQ ID NO: 432699 - RNA, 24 nt, Human
accccgucucuacuaaaaauacaa

SEQ ID NO: 432700 - RNA, 20 nt, Human
accuggcuucgggaagaccc

SEQ ID NO: 432701 - RNA, 24 nt, Human
acuaaaaauacaaacauuagccgg

SEQ ID NO: 432702 - RNA, 19 nt, Human
acugcagccuugaccuccu

SEQ ID NO: 432703 - RNA, 20 nt, Human
agacauacugacuacaagag

SEQ ID NO: 432704 - RNA, 25 nt, Human
agagguugcagugagcggaagauca

SEQ ID NO: 432705 - RNA, 25 nt, Human
agaugcuggaugcuucugggaaacu

SEQ ID NO: 432706 - RNA, 20 nt, Human
agauuacaggugugagccau

SEQ ID NO: 432707 - RNA, 24 nt, Human
agauuacaggugugagccauggca

SEQ ID NO: 432708 - RNA, 24 nt, Human
agcacuuugggaggccgaggcggg

SEQ ID NO: 432709 - RNA, 22 nt, Human
agcccguccgaggauacaacag

SEQ ID NO: 432710 - RNA, 23 nt, Human
agccgaucggcucacgccuguaa

SEQ ID NO: 432711 - RNA, 23 nt, Human
agccgggcgugguggcgcgugcc

SEQ ID NO: 432712 - RNA, 21 nt, Human
agcuguguagccuccaggauc

SEQ ID NO: 432713 - RNA, 18 nt, Human
aggaagguggucuggauc

SEQ ID NO: 432714 - RNA, 19 nt, Human
aggccgaggcgggcggauc

SEQ ID NO: 432715 - RNA, 24 nt, Human
aggccgaggcgggcggaucgcuug

SEQ ID NO: 432716 - RNA, 24 nt, Human
aggcgggagaauaguuugaacccg

SEQ ID NO: 432717 - RNA, 22 nt, Human
aggucucaccauguuguccagg

SEQ ID NO: 432718 - RNA, 25 nt, Human
aguagcugggaccacagggacaugc

SEQ ID NO: 432719 - RNA, 24 nt, Human
agugcagugcugugaaucauggcu

SEQ ID NO: 432720 - RNA, 25 nt, Human
agugcagugcugugaaucauggcuc

SEQ ID NO: 432721 - RNA, 22 nt, Human
aguguuaagauuacagguguga

SEQ ID NO: 432722 - RNA, 26 nt, Human
auacccacuccccacaccaggcucag

SEQ ID NO: 432723 - RNA, 24 nt, Human
aucggcucacgccuguaaucccag

SEQ ID NO: 432724 - RNA, 24 nt, Human
auggcucacugcagccuugaccuc

SEQ ID NO: 432725 - RNA, 24 nt, Human
caaaugacucucaacacuccuccu

SEQ ID NO: 432726 - RNA, 20 nt, Human
caaaugauccucccaccuca

SEQ ID NO: 432727 - RNA, 21 nt, Human
caacagaaacagcaucgagga

SEQ ID NO: 432728 - RNA, 22 nt, Human
caacagaaacagcaucgaggaa

SEQ ID NO: 432729 - RNA, 21 nt, Human
caacccgauauauccucgaga

SEQ ID NO: 432730 - RNA, 22 nt, Human
caacuacuugggagguugaggc

SEQ ID NO: 432731 - RNA, 24 nt, Human
caacuacuugggagguugaggcgg

SEQ ID NO: 432732 - RNA, 22 nt, Human
caagugauccccuugccuuggc

SEQ ID NO: 432733 - RNA, 27 nt, Human
caagugauccccuugccuuggccuccc

SEQ ID NO: 432734 - RNA, 22 nt, Human
cacagccacauccuugaaacuc

SEQ ID NO: 432735 - RNA, 22 nt, Human
caccauguuguccaggcugguc

SEQ ID NO: 432736 - RNA, 27 nt, Human
caccauguuguccaggcugguccuaga

SEQ ID NO: 432737 - RNA, 24 nt, Human
caccucagccuccugaguagcugg

SEQ ID NO: 432738 - RNA, 24 nt, Human
cacgccuguaaucccagcacuuug

SEQ ID NO: 432739 - RNA, 22 nt, Human
cacucccgccugggugacagag

SEQ ID NO: 432740 - RNA, 23 nt, Human
cacucccgccugggugacagagu

SEQ ID NO: 432741 - RNA, 24 nt, Human
cacucccgccugggugacagagug

SEQ ID NO: 432742 - RNA, 19 nt, Human
cacugcagccuugaccucc

SEQ ID NO: 432743 - RNA, 22 nt, Human
cagagaggaggcagaaccugcc

SEQ ID NO: 432744 - RNA, 24 nt, Human
cagcacuuugggaggccgaggcgg

SEQ ID NO: 432745 - RNA, 20 nt, Human
cagccuccugaguagcuggg

SEQ ID NO: 432746 - RNA, 21 nt, Human
cagccuugaccuccuaggcuc

SEQ ID NO: 432747 - RNA, 23 nt, Human
cagccuugaccuccuaggcucaa

SEQ ID NO: 432748 - RNA, 24 nt, Human
cagccuugaccuccuaggcucaaa

SEQ ID NO: 432749 - RNA, 25 nt, Human
cagcuacugacaccaaagcacauca

SEQ ID NO: 432750 - RNA, 20 nt, Human
cagcuguguagccuccagga

SEQ ID NO: 432751 - RNA, 21 nt, Human
caggagccaucggacgcggag

SEQ ID NO: 432752 - RNA, 21 nt, Human
caggagccgaucggcucacgc

SEQ ID NO: 432753 - RNA, 24 nt, Human
cagggucuugcuuugucacccagg

SEQ ID NO: 432754 - RNA, 19 nt, Human
cagugagcggaagaucaag

SEQ ID NO: 432755 - RNA, 24 nt, Human
caguguuaagauuacaggugugag

SEQ ID NO: 432756 - RNA, 22 nt, Human
cauggcacccaacgauaucccu

SEQ ID NO: 432757 - RNA, 23 nt, Human
cauggcacccaacgauaucccuu

SEQ ID NO: 432758 - RNA, 20 nt, Human
cauggcucacugcagccuug

SEQ ID NO: 432759 - RNA, 20 nt, Human
cauguuguccaggcuggucc

SEQ ID NO: 432760 - RNA, 23 nt, Human
cauguuguccaggcugguccuag

SEQ ID NO: 432761 - RNA, 24 nt, Human
cauguuguccaggcugguccuaga

SEQ ID NO: 432762 - RNA, 26 nt, Human
cauugcaccacucccgccugggugac

SEQ ID NO: 432763 - RNA, 24 nt, Human
ccacaguguuaagauuacaggugu

SEQ ID NO: 432764 - RNA, 20 nt, Human
ccacgcgcucacagcugcac

SEQ ID NO: 432765 - RNA, 22 nt, Human
ccauuuaaaaaaaaaaaaaaaa

SEQ ID NO: 432766 - RNA, 24 nt, Human
ccauuuaaaaaaaaaaaaaaaaga

SEQ ID NO: 432767 - RNA, 23 nt, Human
cccaccucagccuccugaguagc

SEQ ID NO: 432768 - RNA, 24 nt, Human
cccaccucagccuccugaguagcu

SEQ ID NO: 432769 - RNA, 19 nt, Human
cccaugcucggcgcacuca

SEQ ID NO: 432770 - RNA, 21 nt, Human
ccccaacccgauauauccucg

SEQ ID NO: 432771 - RNA, 18 nt, Human
ccccaguagcuagcacca

SEQ ID NO: 432772 - RNA, 19 nt, Human
ccccaugcucggcgcacuc

SEQ ID NO: 432773 - RNA, 18 nt, Human
ccccgccacacgcuccuc

SEQ ID NO: 432774 - RNA, 21 nt, Human
ccccgccacacgcuccucccg

SEQ ID NO: 432775 - RNA, 23 nt, Human
ccccuugucaacaacuuccaggc

SEQ ID NO: 432776 - RNA, 21 nt, Human
cccgaagcggacagagaccgc

SEQ ID NO: 432777 - RNA, 22 nt, Human
cccgguacaaggcccucugagg

SEQ ID NO: 432778 - RNA, 20 nt, Human
ccgaagcggacagagaccgc

SEQ ID NO: 432779 - RNA, 19 nt, Human
ccgcagauacccacucccc

SEQ ID NO: 432780 - RNA, 19 nt, Human
ccuccacggcagccucccc

SEQ ID NO: 432781 - RNA, 20 nt, Human
ccuccaggauccagggcagg

SEQ ID NO: 432782 - RNA, 20 nt, Human
ccucgagauucucuuucagg

SEQ ID NO: 432783 - RNA, 18 nt, Human
ccugcaaucccaacuacu

SEQ ID NO: 432784 - RNA, 23 nt, Human
ccugcagcggagccccgcggggc

SEQ ID NO: 432785 - RNA, 20 nt, Human
ccuggaguguggcccuucug

SEQ ID NO: 432786 - RNA, 23 nt, Human
ccuggcuucgggaagaccccaac

SEQ ID NO: 432787 - RNA, 21 nt, Human
ccugggcucaagugauccccu

SEQ ID NO: 432788 - RNA, 22 nt, Human
ccugggcucaagugauccccuu

SEQ ID NO: 432789 - RNA, 22 nt, Human
ccugggcucaagugauccccuu

SEQ ID NO: 432790 - RNA, 22 nt, Human
ccugggugacagagugagauuc

SEQ ID NO: 432791 - RNA, 22 nt, Human
ccuguaaucccagcacuuuggg

SEQ ID NO: 432792 - RNA, 23 nt, Human
ccugucguggcacaagugagaau

SEQ ID NO: 432793 - RNA, 22 nt, Human
ccuugaccuccuaggcucaaau

SEQ ID NO: 432794 - RNA, 22 nt, Human
cgaggcgggcggaucgcuugag

SEQ ID NO: 432795 - RNA, 24 nt, Human
cgaggucucaccauguuguccagg

SEQ ID NO: 432796 - RNA, 24 nt, Human
cgccgacggucugagggaccggca

SEQ ID NO: 432797 - RNA, 22 nt, Human
cgcucacagcugcacgaucaca

SEQ ID NO: 432798 - RNA, 23 nt, Human
cggcagccuccccaggaggagug

SEQ ID NO: 432799 - RNA, 22 nt, Human
cggcucacgccuguaaucccag

SEQ ID NO: 432800 - RNA, 24 nt, Human
cggcucacgccuguaaucccagca

SEQ ID NO: 432801 - RNA, 24 nt, Human
cgggaagcagagguugcagugagc

SEQ ID NO: 432802 - RNA, 24 nt, Human
cgugccugcaaucccaacuacuug

SEQ ID NO: 432803 - RNA, 24 nt, Human
cucaaaugauccucccaccucagc

SEQ ID NO: 432804 - RNA, 22 nt, Human
cucacgccuguaaucccagcac

SEQ ID NO: 432805 - RNA, 24 nt, Human
cucacgccuguaaucccagcacuu

SEQ ID NO: 432806 - RNA, 21 nt, Human
cucacugcagccuugaccucc

SEQ ID NO: 432807 - RNA, 24 nt, Human
cucagccuccugaguagcugggac

SEQ ID NO: 432808 - RNA, 21 nt, Human
cuccgcagauacccacucccc

SEQ ID NO: 432809 - RNA, 25 nt, Human
cuccuaggcucaaaugauccuccca

SEQ ID NO: 432810 - RNA, 24 nt, Human
cuccugaguagcugggaccacagg

SEQ ID NO: 432811 - RNA, 18 nt, Human
cucgggcuccggggcagg

SEQ ID NO: 432812 - RNA, 21 nt, Human
cugaaaauaauaguuuaugga

SEQ ID NO: 432813 - RNA, 22 nt, Human
cugcagccuugaccuccuaggc

SEQ ID NO: 432814 - RNA, 23 nt, Human
cugcagccuugaccuccuaggcu

SEQ ID NO: 432815 - RNA, 25 nt, Human
cugcuaccgccaaucaagcacgucu

SEQ ID NO: 432816 - RNA, 21 nt, Human
cugcuccuggggcugaggggc

SEQ ID NO: 432817 - RNA, 24 nt, Human
cugucuucucgggcuccggggcag

SEQ ID NO: 432818 - RNA, 20 nt, Human
cuucucgggcuccggggcag

SEQ ID NO: 432819 - RNA, 20 nt, Human
cuuugucacccaggcugcag

SEQ ID NO: 432820 - RNA, 23 nt, Human
gacagagugagauuccauuuaaa

SEQ ID NO: 432821 - RNA, 28 nt, Human
gaccccacuccuccugggugaaguccac

SEQ ID NO: 432822 - RNA, 19 nt, Human
gagccaucggacgcggagc

SEQ ID NO: 432823 - RNA, 21 nt, Human
gagcccccuccccgcgcccgg

SEQ ID NO: 432824 - RNA, 18 nt, Human
gauuacaggugugagcca

SEQ ID NO: 432825 - RNA, 20 nt, Human
gcaaggcucccacaccugga

SEQ ID NO: 432826 - RNA, 22 nt, Human
gcagauacccacuccccacacc

SEQ ID NO: 432827 - RNA, 23 nt, Human
gcgaacccgcgcucggagaccag

SEQ ID NO: 432828 - RNA, 22 nt, Human
gcucaaaugauccucccaccuc

SEQ ID NO: 432829 - RNA, 21 nt, Human
gcucacugcagccuugaccuc

SEQ ID NO: 432830 - RNA, 19 nt, Human
gcuccuggggcugaggggc

SEQ ID NO: 432831 - RNA, 18 nt, Human
ggaaacauggcaaaaccc

SEQ ID NO: 432832 - RNA, 24 nt, Human
ggaagaccccaacccgauauaucc

SEQ ID NO: 432833 - RNA, 20 nt, Human
ggaagcagagguugcaguga

SEQ ID NO: 432834 - RNA, 19 nt, Human
ggagcccccuccccgcgcc

SEQ ID NO: 432835 - RNA, 20 nt, Human
ggaggaagguggucuggauc

SEQ ID NO: 432836 - RNA, 21 nt, Human
ggcagggaucuccauggccuc

SEQ ID NO: 432837 - RNA, 23 nt, Human
ggcgugguggcgcgugccugcaa

SEQ ID NO: 432838 - RNA, 20 nt, Human
ggcucacgccuguaauccca

SEQ ID NO: 432839 - RNA, 18 nt, Human
gggcucaagugauccccu

SEQ ID NO: 432840 - RNA, 20 nt, Human
gggugcuuuccuuguugagu

SEQ ID NO: 432841 - RNA, 24 nt, Human
ggucucaccauguuguccaggcug

SEQ ID NO: 432842 - RNA, 22 nt, Human
guagagacgaggucucaccaug

SEQ ID NO: 432843 - RNA, 20 nt, Human
uaaaaauacaaacauuagcc

SEQ ID NO: 432844 - RNA, 19 nt, Human
uaaagccaugucaggagcc

SEQ ID NO: 432845 - RNA, 21 nt, Human
uaacuagaggaggcacccugg

SEQ ID NO: 432846 - RNA, 21 nt, Human
uaagauuacaggugugagcca

SEQ ID NO: 432847 - RNA, 22 nt, Human
uaagauuacaggugugagccau

SEQ ID NO: 432848 - RNA, 24 nt, Human
uaauuuuugcauuuuuuguagaga

SEQ ID NO: 432849 - RNA, 21 nt, Human
uacaagagugaagcuguaccu

SEQ ID NO: 432850 - RNA, 19 nt, Human
uacccacuccccacaccuc

SEQ ID NO: 432851 - RNA, 20 nt, Human
uacuaaaaauacaaacauua

SEQ ID NO: 432852 - RNA, 25 nt, Human
uagacuccugggcucaagugauccc

SEQ ID NO: 432853 - RNA, 22 nt, Human
uagagacgaggucucaccaugu

SEQ ID NO: 432854 - RNA, 19 nt, Human
uagccuccaggauccaggg

SEQ ID NO: 432855 - RNA, 24 nt, Human
uaguuugaacccgggaagcagagg

SEQ ID NO: 432856 - RNA, 19 nt, Human
ucacugcagccuugaccuc

SEQ ID NO: 432857 - RNA, 23 nt, Human
ucacugcagccuugaccuccuag

SEQ ID NO: 432858 - RNA, 24 nt, Human
ucacugcagccuugaccuccuagg

SEQ ID NO: 432859 - RNA, 21 nt, Human
ucagacacuccaauucaugac

SEQ ID NO: 432860 - RNA, 23 nt, Human
ucagccuccugaguagcugggac

SEQ ID NO: 432861 - RNA, 22 nt, Human
uccacagccacauccuugaaac

SEQ ID NO: 432862 - RNA, 23 nt, Human
uccaggcugguccuagacuccug

SEQ ID NO: 432863 - RNA, 20 nt, Human
uccagggcaggcccugaaga

SEQ ID NO: 432864 - RNA, 25 nt, Human
uccauggccuccacggcagccuccc

SEQ ID NO: 432865 - RNA, 23 nt, Human
ucccacaguguuaagauuacagg

SEQ ID NO: 432866 - RNA, 19 nt, Human
uccccacaccaggcucagc

SEQ ID NO: 432867 - RNA, 21 nt, Human
uccccacaccaggcucagccc

SEQ ID NO: 432868 - RNA, 22 nt, Human
uccccaggaggagugggcagcu

SEQ ID NO: 432869 - RNA, 24 nt, Human
ucccgccugggugacagagugaga

SEQ ID NO: 432870 - RNA, 24 nt, Human
ucccggcgaacccgcgcucggaga

SEQ ID NO: 432871 - RNA, 20 nt, Human
ucccgguacaaggcccucug

SEQ ID NO: 432872 - RNA, 27 nt, Human
uccgcagauacccacuccccacaccag

SEQ ID NO: 432873 - RNA, 23 nt, Human
uccgcggccaggagccaucggac

SEQ ID NO: 432874 - RNA, 18 nt, Human
uccuagacuccugggcuc

SEQ ID NO: 432875 - RNA, 26 nt, Human
uccucccaccucagccuccugaguag

SEQ ID NO: 432876 - RNA, 18 nt, Human
uccugaguagcugggacc

SEQ ID NO: 432877 - RNA, 18 nt, Human
uccugggcucaagugauc

SEQ ID NO: 432878 - RNA, 23 nt, Human
uccugggcucaagugauccccuu

SEQ ID NO: 432879 - RNA, 19 nt, Human
uccuuggaccuggcuucgg

SEQ ID NO: 432880 - RNA, 23 nt, Human
ucucaccauguuguccaggcugg

SEQ ID NO: 432881 - RNA, 23 nt, Human
ucucuacuaaaaauacaaacauu

SEQ ID NO: 432882 - RNA, 19 nt, Human
ucuugcuuugucacccagg

SEQ ID NO: 432883 - RNA, 22 nt, Human
ucuugcuuugucacccaggcug

SEQ ID NO: 432884 - RNA, 22 nt, Human
ugaaaauaauaguuuauggagg

SEQ ID NO: 432885 - RNA, 25 nt, Human
ugaccuccuaggcucaaaugauccu

SEQ ID NO: 432886 - RNA, 21 nt, Human
ugacucucaacacuccuccug

SEQ ID NO: 432887 - RNA, 25 nt, Human
ugacugacuuuaacuagaggaggcc

SEQ ID NO: 432888 - RNA, 25 nt, Human
ugagaggaaagagcuggcgaaggag

SEQ ID NO: 432889 - RNA, 26 nt, Human
ugagauuccauuuaaaaaaaaaaaaa

SEQ ID NO: 432890 - RNA, 22 nt, Human
ugagcuuaagaccagccuggga

SEQ ID NO: 432891 - RNA, 24 nt, Human
ugagggaccggcaaguggacagac

SEQ ID NO: 432892 - RNA, 19 nt, Human
ugaggggccugcagcggag

SEQ ID NO: 432893 - RNA, 22 nt, Human
ugaggugggguucaggccggcu

SEQ ID NO: 432894 - RNA, 20 nt, Human
ugauugggcgcggggaagaa

SEQ ID NO: 432895 - RNA, 18 nt, Human
ugcaaauccacagacaua

SEQ ID NO: 432896 - RNA, 24 nt, Human
ugccugcaaucccaacuacuuggg

SEQ ID NO: 432897 - RNA, 19 nt, Human
ugccuuggccucccacagu

SEQ ID NO: 432898 - RNA, 21 nt, Human
ugccuuggccucccacagugu

SEQ ID NO: 432899 - RNA, 22 nt, Human
ugcuggaugcuucugggaaacu

SEQ ID NO: 432900 - RNA, 22 nt, Human
uggaguguggcccuucugggga

SEQ ID NO: 432901 - RNA, 19 nt, Human
uggaugcuucugggaaacu

SEQ ID NO: 432902 - RNA, 19 nt, Human
uggcaagaaagaucuuucc

SEQ ID NO: 432903 - RNA, 21 nt, Human
uggccuccacggcagccuccc

SEQ ID NO: 432904 - RNA, 21 nt, Human
uggcgaaggagaaaugaguca

SEQ ID NO: 432905 - RNA, 24 nt, Human
uggcucacugcagccuugaccucc

SEQ ID NO: 432906 - RNA, 22 nt, Human
uggcuucgggaagaccccaacc

SEQ ID NO: 432907 - RNA, 20 nt, Human
ugggaccacagggacaugcc

SEQ ID NO: 432908 - RNA, 24 nt, Human
ugggaccacagggacaugccgcca

SEQ ID NO: 432909 - RNA, 19 nt, Human
ugggaggccgaggcgggcg

SEQ ID NO: 432910 - RNA, 23 nt, Human
ugggaggccgaggcgggcggauc

SEQ ID NO: 432911 - RNA, 24 nt, Human
ugggaggccgaggcgggcggaucg

SEQ ID NO: 432912 - RNA, 20 nt, Human
ugggcucaagugauccccuu

SEQ ID NO: 432913 - RNA, 24 nt, Human
ugguggcgcgugccugcaauccca

SEQ ID NO: 432914 - RNA, 24 nt, Human
uguagagacgaggucucaccaugu

SEQ ID NO: 432915 - RNA, 21 nt, Human
ugucacccaggcugcagugca

SEQ ID NO: 432916 - RNA, 22 nt, Human
uguccaggcugguccuagacuc

SEQ ID NO: 432917 - RNA, 24 nt, Human
uguccaggcugguccuagacuccu

SEQ ID NO: 432918 - RNA, 21 nt, Human
uuaaaaaaaaaaaaaaaagau

SEQ ID NO: 432919 - RNA, 20 nt, Human
uuagccgggcgugguggcgc

SEQ ID NO: 432920 - RNA, 20 nt, Human
uuagccgggcgugguggcgc

SEQ ID NO: 432921 - RNA, 24 nt, Human
uuagccgggcgugguggcgcgugc

SEQ ID NO: 432922 - RNA, 22 nt, Human
uugcaccacucccgccugggug

SEQ ID NO: 432923 - RNA, 18 nt, Human
aaacagacagcuuagauu

SEQ ID NO: 432924 - RNA, 23 nt, Human
aagaugcaaugcugaauaaaaca

SEQ ID NO: 432925 - RNA, 19 nt, Human
cagaaagggcuaacaucug

SEQ ID NO: 432926 - RNA, 18 nt, Human
gauagcuaaaggaaucuc

SEQ ID NO: 432927 - RNA, 20 nt, Human
gugaaguguaacauguaccc

SEQ ID NO: 432928 - RNA, 22 nt, Human
uaaaacagacagcuuagauucc

SEQ ID NO: 432929 - RNA, 24 nt, Human
uaauuuuguauucuuucaccacuu

SEQ ID NO: 432930 - RNA, 19 nt, Human
ucuuuucugcucagaaagg

SEQ ID NO: 432931 - RNA, 21 nt, Human
ugccucauaauuuuguauucu

SEQ ID NO: 432932 - RNA, 18 nt, Human
uguggguagaaaauagcc

SEQ ID NO: 432933 - RNA, 21 nt, Human
uuauguaucaacucuugugcu

SEQ ID NO: 432934 - RNA, 24 nt, Human
aaaaaaacaaaacaaaucaaaccc

SEQ ID NO: 432935 - RNA, 26 nt, Human
aaacaaaucaaacccaauccccagca

SEQ ID NO: 432936 - RNA, 22 nt, Human
aacugcugcucgugcacucaga

SEQ ID NO: 432937 - RNA, 19 nt, Human
acaaaacaaaucaaaccca

SEQ ID NO: 432938 - RNA, 20 nt, Human
acccaauccccagcagucua

SEQ ID NO: 432939 - RNA, 20 nt, Human
agagugggcgcccagcugau

SEQ ID NO: 432940 - RNA, 18 nt, Human
agccugggcccuuggggc

SEQ ID NO: 432941 - RNA, 19 nt, Human
agccugggcccuugggggc

SEQ ID NO: 432942 - RNA, 20 nt, Human
agcgccggccccacaacccg

SEQ ID NO: 432943 - RNA, 23 nt, Human
agcugauuuugagaggcgggugc

SEQ ID NO: 432944 - RNA, 22 nt, Human
aggaggagagugggcgcccagc

SEQ ID NO: 432945 - RNA, 21 nt, Human
aggcaucucagcuggccucca

SEQ ID NO: 432946 - RNA, 23 nt, Human
aggcgggugcccugguguagccu

SEQ ID NO: 432947 - RNA, 23 nt, Human
agggaggugguuauugcugggag

SEQ ID NO: 432948 - RNA, 19 nt, Human
agggccacucccugccucu

SEQ ID NO: 432949 - RNA, 24 nt, Human
aguagccaggcaucucagcuggcc

SEQ ID NO: 432950 - RNA, 22 nt, Human
augugccaccaccacccagagc

SEQ ID NO: 432951 - RNA, 23 nt, Human
caccacccagagcaggaaaaaaa

SEQ ID NO: 432952 - RNA, 21 nt, Human
cagcagucuauguacagggcc

SEQ ID NO: 432953 - RNA, 24 nt, Human
cagccccaaucucuaccugagaag

SEQ ID NO: 432954 - RNA, 25 nt, Human
cagcucccgaggaugaugcacuccc

SEQ ID NO: 432955 - RNA, 27 nt, Human
caggaaaaaaauuaucaaaauggaauu

SEQ ID NO: 432956 - RNA, 20 nt, Human
caggaagucccuggugccaa

SEQ ID NO: 432957 - RNA, 22 nt, Human
caguuuucuugcugucuucuca

SEQ ID NO: 432958 - RNA, 22 nt, Human
cauccaugugccaccaccaccc

SEQ ID NO: 432959 - RNA, 23 nt, Human
caugugccaccaccacccagagc

SEQ ID NO: 432960 - RNA, 22 nt, Human
ccaagagccacagcugagguca

SEQ ID NO: 432961 - RNA, 19 nt, Human
ccaugcaccgggccccgcc

SEQ ID NO: 432962 - RNA, 23 nt, Human
ccccagagaccuauguggccacc

SEQ ID NO: 432963 - RNA, 24 nt, Human
ccccugauuccagcugccuggccc

SEQ ID NO: 432964 - RNA, 21 nt, Human
cccuacagggccaguccccau

SEQ ID NO: 432965 - RNA, 20 nt, Human
cccuugggggcaagaguggc

SEQ ID NO: 432966 - RNA, 18 nt, Human
ccggccccacaacccgcc

SEQ ID NO: 432967 - RNA, 22 nt, Human
ccgggccccgccaccagcgccg

SEQ ID NO: 432968 - RNA, 23 nt, Human
ccgggccccgccaccagcgccgg

SEQ ID NO: 432969 - RNA, 25 nt, Human
ccugcuccacugcuacugggcugaa

SEQ ID NO: 432970 - RNA, 24 nt, Human
ccuggcccccuucuugcaccacug

SEQ ID NO: 432971 - RNA, 23 nt, Human
cuacugggcugaagagcugucug

SEQ ID NO: 432972 - RNA, 26 nt, Human
cugaggucagagauuuccuucugggu

SEQ ID NO: 432973 - RNA, 23 nt, Human
cuggccagcaccaagagccacag

SEQ ID NO: 432974 - RNA, 19 nt, Human
cuucuaugugucagccaca

SEQ ID NO: 432975 - RNA, 21 nt, Human
gccccacaacccgccugcgcc

SEQ ID NO: 432976 - RNA, 22 nt, Human
gccccugaggaauuaauugacu

SEQ ID NO: 432977 - RNA, 21 nt, Human
gcccgcccgcccgcgcgcagc

SEQ ID NO: 432978 - RNA, 22 nt, Human
gcuccacugcuacugggcugaa

SEQ ID NO: 432979 - RNA, 23 nt, Human
guagccaggcaucucagcuggcc

SEQ ID NO: 432980 - RNA, 19 nt, Human
ucagagauuuccuucuggg

SEQ ID NO: 432981 - RNA, 27 nt, Human
ucagagauuuccuucugggucacaagg

SEQ ID NO: 432982 - RNA, 18 nt, Human
uccccauagcagccccaa

SEQ ID NO: 432983 - RNA, 21 nt, Human
uccccauagcagccccaaucu

SEQ ID NO: 432984 - RNA, 27 nt, Human
uccccauagcagccccaaucucuaccu

SEQ ID NO: 432985 - RNA, 22 nt, Human
ucccgaggaugaugcacucccc

SEQ ID NO: 432986 - RNA, 20 nt, Human
ucuccagccacaggccccug

SEQ ID NO: 432987 - RNA, 23 nt, Human
ucuguggcucaacccuacagggc

SEQ ID NO: 432988 - RNA, 18 nt, Human
ugagaggcgggugcccug

SEQ ID NO: 432989 - RNA, 24 nt, Human
ugagcagggcccccauucccuuca

SEQ ID NO: 432990 - RNA, 19 nt, Human
ugcccugguguagccuggc

SEQ ID NO: 432991 - RNA, 20 nt, Human
uggcucaacccuacagggcc

SEQ ID NO: 432992 - RNA, 18 nt, Human
uggcuucuggccagcacc

SEQ ID NO: 432993 - RNA, 20 nt, Human
ugggggcaagaguggccaug

SEQ ID NO: 432994 - RNA, 21 nt, Human
uugcugggagggcaggacagg

SEQ ID NO: 432995 - RNA, 21 nt, Human
uuuaggaggagagugggcgcc

SEQ ID NO: 432996 - RNA, 24 nt, Human
uuuuuuuuuuuuuugaaauuugga

SEQ ID NO: 432997 - RNA, 20 nt, Human
uuuuuuuuuuuuuuuuuugg

SEQ ID NO: 432998 - RNA, 18 nt, Human
aacccggugaaaaagccg

SEQ ID NO: 432999 - RNA, 23 nt, Human
aagaaccgcuguccaaguaccgc

SEQ ID NO: 433000 - RNA, 19 nt, Human
aagccgcugccagcuuucc

SEQ ID NO: 433001 - RNA, 23 nt, Human
aagccuuuagcauuucucagauc

SEQ ID NO: 433002 - RNA, 18 nt, Human
accccguucugcagggcu

SEQ ID NO: 433003 - RNA, 20 nt, Human
agcuguccgggccugcccag

SEQ ID NO: 433004 - RNA, 18 nt, Human
agggucuaucuacagcag

SEQ ID NO: 433005 - RNA, 23 nt, Human
caacgccagguccuggcuccagc

SEQ ID NO: 433006 - RNA, 20 nt, Human
cagccucccagcaguucucu

SEQ ID NO: 433007 - RNA, 23 nt, Human
cagcuuuccgaaaaacgacuggc

SEQ ID NO: 433008 - RNA, 18 nt, Human
cauuucucagauccucac

SEQ ID NO: 433009 - RNA, 23 nt, Human
ccacagccucccagcaguucucu

SEQ ID NO: 433010 - RNA, 19 nt, Human
ccucgcgccacagccuccc

SEQ ID NO: 433011 - RNA, 18 nt, Human
ccucuccagccucucccc

SEQ ID NO: 433012 - RNA, 21 nt, Human
cgaaaaacgacuggcaacugg

SEQ ID NO: 433013 - RNA, 18 nt, Human
cgccacagccucccagca

SEQ ID NO: 433014 - RNA, 19 nt, Human
cucaagcagaacccgguga

SEQ ID NO: 433015 - RNA, 19 nt, Human
cugauccugcggugcuggg

SEQ ID NO: 433016 - RNA, 23 nt, Human
cuguccgggccugcccagccggg

SEQ ID NO: 433017 - RNA, 19 nt, Human
gagucacagccacucuuug

SEQ ID NO: 433018 - RNA, 22 nt, Human
gcagaacccggugaaaaagccg

SEQ ID NO: 433019 - RNA, 23 nt, Human
gccucgcgccacagccucccagc

SEQ ID NO: 433020 - RNA, 24 nt, Human
guggcucugggcugcagacucccc

SEQ ID NO: 433021 - RNA, 20 nt, Human
uccaaguaccgcccaacgcc

SEQ ID NO: 433022 - RNA, 19 nt, Human
ucccgagucacagccacuc

SEQ ID NO: 433023 - RNA, 23 nt, Human
ucggcauguccgggacucucucc

SEQ ID NO: 433024 - RNA, 24 nt, Human
ucggccucaagcagaacccgguga

SEQ ID NO: 433025 - RNA, 25 nt, Human
ucggccucaagcagaacccggugaa

SEQ ID NO: 433026 - RNA, 22 nt, Human
ugacggcucccaggccggacuc

SEQ ID NO: 433027 - RNA, 19 nt, Human
uguccgggccugcccagcc

SEQ ID NO: 433028 - RNA, 21 nt, Human
uguccgggccugcccagccgg

SEQ ID NO: 433029 - RNA, 19 nt, Human
uguuccacuccgucucccg

SEQ ID NO: 433030 - RNA, 20 nt, Human
acuugugguuaaaagucauc

SEQ ID NO: 433031 - RNA, 23 nt, Human
agaaaacaggcaggccuguguca

SEQ ID NO: 433032 - RNA, 19 nt, Human
agaggaagaauggaaaagg

SEQ ID NO: 433033 - RNA, 22 nt, Human
cacccaugacauuucuaccccc

SEQ ID NO: 433034 - RNA, 23 nt, Human
cagugcuuucuggcagaggaaga

SEQ ID NO: 433035 - RNA, 22 nt, Human
caucagugcuuucuggcagagg

SEQ ID NO: 433036 - RNA, 21 nt, Human
ccaugacauuucuacccccuc

SEQ ID NO: 433037 - RNA, 21 nt, Human
cccaugacauuucuaccccca

SEQ ID NO: 433038 - RNA, 21 nt, Human
gaagucacccaugacauuucu

SEQ ID NO: 433039 - RNA, 19 nt, Human
gguguaauggaaggaaugu

SEQ ID NO: 433040 - RNA, 23 nt, Human
uacaaaauggggccgcauauuga

SEQ ID NO: 433041 - RNA, 24 nt, Human
uaccacauuuuuuacuugugguua

SEQ ID NO: 433042 - RNA, 21 nt, Human
uagaaagucagaagucaccca

SEQ ID NO: 433043 - RNA, 23 nt, Human
uauguggacuuaccacauuuuuu

SEQ ID NO: 433044 - RNA, 20 nt, Human
ucacccaugacauuucuacc

SEQ ID NO: 433045 - RNA, 19 nt, Human
uggaaaaggagaaaacagg

SEQ ID NO: 433046 - RNA, 19 nt, Human
uggaaaaggagaaaacagg

SEQ ID NO: 433047 - RNA, 23 nt, Human
uggcagaggaagaauggaaaagg

SEQ ID NO: 433048 - RNA, 26 nt, Human
uggcagaggaagaauggaaaaggaga

SEQ ID NO: 433049 - RNA, 23 nt, Human
uguaauggaaggaaugucacaaa

SEQ ID NO: 433050 - RNA, 24 nt, Human
aaaaaaaaaaagaaaacccacaaa

SEQ ID NO: 433051 - RNA, 23 nt, Human
aaaaaaaaaagaaaacccacaaa

SEQ ID NO: 433052 - RNA, 22 nt, Human
aaacauuuagauugucucaacg

SEQ ID NO: 433053 - RNA, 18 nt, Human
aagcugcagaccuucgug

SEQ ID NO: 433054 - RNA, 19 nt, Human
aagugcacaauaaccaaca

SEQ ID NO: 433055 - RNA, 20 nt, Human
aagugcccuucugcauuucc

SEQ ID NO: 433056 - RNA, 25 nt, Human
aagugcccuucugcauuuccaacug

SEQ ID NO: 433057 - RNA, 18 nt, Human
acuguaucuuagagaucu

SEQ ID NO: 433058 - RNA, 22 nt, Human
acuugcaaaaggccuucccaca

SEQ ID NO: 433059 - RNA, 22 nt, Human
agaaggccaaagaagcugagaa

SEQ ID NO: 433060 - RNA, 20 nt, Human
agcaagauuuauugcaaaga

SEQ ID NO: 433061 - RNA, 22 nt, Human
caaaaacaauaaaugcuuuuua

SEQ ID NO: 433062 - RNA, 23 nt, Human
cacagcuucaccaucauucucuc

SEQ ID NO: 433063 - RNA, 20 nt, Human
cacaguauuucauagacagu

SEQ ID NO: 433064 - RNA, 18 nt, Human
cacgcacaucucugcaua

SEQ ID NO: 433065 - RNA, 23 nt, Human
cauugcauauaacccugguccaa

SEQ ID NO: 433066 - RNA, 21 nt, Human
ccacuauuaacaguuuuaugc

SEQ ID NO: 433067 - RNA, 23 nt, Human
ccaucugcaaaaugaagaacuga

SEQ ID NO: 433068 - RNA, 19 nt, Human
cccacauaucucauagagu

SEQ ID NO: 433069 - RNA, 24 nt, Human
ccucuuacagaaggccaaagaagc

SEQ ID NO: 433070 - RNA, 20 nt, Human
cguggugaguguuacagcuc

SEQ ID NO: 433071 - RNA, 23 nt, Human
cguuugcggugaguguuacagcu

SEQ ID NO: 433072 - RNA, 26 nt, Human
cuccagaagguguccgugugggagac

SEQ ID NO: 433073 - RNA, 21 nt, Human
cucucgucccuuucagccauc

SEQ ID NO: 433074 - RNA, 19 nt, Human
cugccacugaauucagagu

SEQ ID NO: 433075 - RNA, 20 nt, Human
cugcuggcuccggcccgaau

SEQ ID NO: 433076 - RNA, 24 nt, Human
cuguaucuuagagaucuuuugaua

SEQ ID NO: 433077 - RNA, 21 nt, Human
cuucugcauuuccaacugugu

SEQ ID NO: 433078 - RNA, 22 nt, Human
cuuguggugaguguuacagcuc

SEQ ID NO: 433079 - RNA, 18 nt, Human
gaaacucaagugcccuuc

SEQ ID NO: 433080 - RNA, 20 nt, Human
gaaagaacaaagcuuccaca

SEQ ID NO: 433081 - RNA, 22 nt, Human
gaaagcaacacagcuucaccau

SEQ ID NO: 433082 - RNA, 18 nt, Human
gaaugaagccgcggaccc

SEQ ID NO: 433083 - RNA, 18 nt, Human
gaauucagagugcuucuc

SEQ ID NO: 433084 - RNA, 21 nt, Human
gaauucgguuuuuuuuuuuuu

SEQ ID NO: 433085 - RNA, 20 nt, Human
gaggaugagcugcaggucac

SEQ ID NO: 433086 - RNA, 20 nt, Human
gaguuguucguuccucccgg

SEQ ID NO: 433087 - RNA, 20 nt, Human
gcggacccuuguggugagug

SEQ ID NO: 433088 - RNA, 22 nt, Human
ggccaaagaagcugagaaagca

SEQ ID NO: 433089 - RNA, 23 nt, Human
gugggugguucuuuuaagugcac

SEQ ID NO: 433090 - RNA, 18 nt, Human
uaaaugcuuuuuauuuuu

SEQ ID NO: 433091 - RNA, 23 nt, Human
uaacuucuagaaaacuagugaca

SEQ ID NO: 433092 - RNA, 21 nt, Human
uagcaagauuuauugcaaaga

SEQ ID NO: 433093 - RNA, 22 nt, Human
ucaaagaaaaaaaaaaaaagaa

SEQ ID NO: 433094 - RNA, 23 nt, Human
ucaaagaaaaaaaaaaaaagaaa

SEQ ID NO: 433095 - RNA, 23 nt, Human
ucacaguauuucauagacagugu

SEQ ID NO: 433096 - RNA, 23 nt, Human
ucauuagauuagauaagcugugu

SEQ ID NO: 433097 - RNA, 21 nt, Human
uccagcgauuauucuuugcac

SEQ ID NO: 433098 - RNA, 24 nt, Human
uccuguggccaaaagauuuucuuc

SEQ ID NO: 433099 - RNA, 18 nt, Human
ucgucccuuucagccauc

SEQ ID NO: 433100 - RNA, 25 nt, Human
ucuagaguuuguuccuucugauguu

SEQ ID NO: 433101 - RNA, 25 nt, Human
ucuauguaucaaagaaaaaaaaaaa

SEQ ID NO: 433102 - RNA, 23 nt, Human
ucucauagaguuuaucucuggaa

SEQ ID NO: 433103 - RNA, 27 nt, Human
ucucuauguaucaaagaaaaaaaaaaa

SEQ ID NO: 433104 - RNA, 21 nt, Human
ucuuacuuaaaaaaaaaaaaa

SEQ ID NO: 433105 - RNA, 18 nt, Human
ucuuuuacaguucccuuc

SEQ ID NO: 433106 - RNA, 20 nt, Human
ugaacauugcauauaacccu

SEQ ID NO: 433107 - RNA, 21 nt, Human
ugagaaagcacagaggaaaua

SEQ ID NO: 433108 - RNA, 25 nt, Human
ugagaaguagcaagauuuauugcaa

SEQ ID NO: 433109 - RNA, 22 nt, Human
uggaguuguucguuccucccgg

SEQ ID NO: 433110 - RNA, 18 nt, Human
uguccggaauuggugggu

SEQ ID NO: 433111 - RNA, 20 nt, Human
uguggugaguguuacagcuc

SEQ ID NO: 433112 - RNA, 20 nt, Human
uuaaguucucugacgucgac

SEQ ID NO: 433113 - RNA, 21 nt, Human
uucacaguauuucauagacag

SEQ ID NO: 433114 - RNA, 19 nt, Human
uucggaguuucuuccuucu

SEQ ID NO: 433115 - RNA, 22 nt, Human
uucguggugaguguuacagcuc

SEQ ID NO: 433116 - RNA, 28 nt, Human
uucucugacgucgacugaugagggccca

SEQ ID NO: 433117 - RNA, 27 nt, Human
uuguucguuccucccggugggcucgug

SEQ ID NO: 433118 - RNA, 21 nt, Human
uuuccugaaacuuucucuuuu

SEQ ID NO: 433119 - RNA, 24 nt, Human
uuuuuuuuuuuuuuuucuaacaug

SEQ ID NO: 433120 - RNA, 24 nt, Human
aaugguuucccacucucaguguuu

SEQ ID NO: 433121 - RNA, 23 nt, Human
aauugugccagaagaccuugcca

SEQ ID NO: 433122 - RNA, 20 nt, Human
acauuuuucuggguuucucu

SEQ ID NO: 433123 - RNA, 23 nt, Human
agaauucuuugaaaaauccuggu

SEQ ID NO: 433124 - RNA, 18 nt, Human
agccuugaacaaaaacua

SEQ ID NO: 433125 - RNA, 19 nt, Human
auucuuugaaaaauccugg

SEQ ID NO: 433126 - RNA, 18 nt, Human
cacagacacugagaguca

SEQ ID NO: 433127 - RNA, 21 nt, Human
caugcacguuacauuuguaug

SEQ ID NO: 433128 - RNA, 21 nt, Human
cauuuagaaaaaauaccugag

SEQ ID NO: 433129 - RNA, 18 nt, Human
ccagaagaccuugccaca

SEQ ID NO: 433130 - RNA, 18 nt, Human
ccucuuccccuuccgggu

SEQ ID NO: 433131 - RNA, 24 nt, Human
ccuuauaggucacacgcacucgcu

SEQ ID NO: 433132 - RNA, 26 nt, Human
cgacaaaaucaugaauauuacacuga

SEQ ID NO: 433133 - RNA, 24 nt, Human
cucagaaucaauacaccccauucc

SEQ ID NO: 433134 - RNA, 24 nt, Human
cuguauuacucuccuuuuuuggug

SEQ ID NO: 433135 - RNA, 21 nt, Human
cuuuccaacauuacugucugg

SEQ ID NO: 433136 - RNA, 19 nt, Human
cuuuguguaguuacucucc

SEQ ID NO: 433137 - RNA, 23 nt, Human
gcaaaguuuuucuccaguauaaa

SEQ ID NO: 433138 - RNA, 23 nt, Human
gccuguggaaaaucucuaucaca

SEQ ID NO: 433139 - RNA, 19 nt, Human
uaaaugcucuuuaguaugg

SEQ ID NO: 433140 - RNA, 19 nt, Human
uaccugaggaagaaccauu

SEQ ID NO: 433141 - RNA, 24 nt, Human
uacuugcaaaguuuuucuccagua

SEQ ID NO: 433142 - RNA, 18 nt, Human
uagaaaaaauaccugagg

SEQ ID NO: 433143 - RNA, 23 nt, Human
ucaaaaaaguuuuugaugccuag

SEQ ID NO: 433144 - RNA, 23 nt, Human
uccuuuuuuggugguaauuccuu

SEQ ID NO: 433145 - RNA, 23 nt, Human
ucucuaucacauauaauuauuau

SEQ ID NO: 433146 - RNA, 23 nt, Human
ucucucacgacaaaaucaugaau

SEQ ID NO: 433147 - RNA, 24 nt, Human
ugaauauuacacugaaaggcuuuu

SEQ ID NO: 433148 - RNA, 21 nt, Human
ugccagaagaccuugccacau

SEQ ID NO: 433149 - RNA, 22 nt, Human
ugccagaagaccuugccacauu

SEQ ID NO: 433150 - RNA, 22 nt, Human
uuaagccuugaacaaaaacuaa

SEQ ID NO: 433151 - RNA, 22 nt, Human
uuccacagacacugagagucau

SEQ ID NO: 433152 - RNA, 24 nt, Human
uugaacaaaaacuaaaggcucugc

SEQ ID NO: 433153 - RNA, 21 nt, Human
aaaacacaaagcagggaaaac

SEQ ID NO: 433154 - RNA, 21 nt, Human
cacgagcagaaaacacaaagc

SEQ ID NO: 433155 - RNA, 21 nt, Human
ccaauaccugcaggccacagg

SEQ ID NO: 433156 - RNA, 26 nt, Human
ccaauaugaauuaucuuaccuaaagu

SEQ ID NO: 433157 - RNA, 19 nt, Human
cuaggcuuccagggggucc

SEQ ID NO: 433158 - RNA, 23 nt, Human
cucccaauaccugcaggccacag

SEQ ID NO: 433159 - RNA, 21 nt, Human
cugcaggccacagggccacag

SEQ ID NO: 433160 - RNA, 25 nt, Human
gagcagauauuaacggcuuuuccac

SEQ ID NO: 433161 - RNA, 26 nt, Human
uaguaguuucucuccaguauaaauuu

SEQ ID NO: 433162 - RNA, 20 nt, Human
uccacgagcagaaaacacaa

SEQ ID NO: 433163 - RNA, 24 nt, Human
uccacgagcagaaaacacaaagca

SEQ ID NO: 433164 - RNA, 18 nt, Human
ucccaauaccugcaggcc

SEQ ID NO: 433165 - RNA, 19 nt, Human
ugucaaaauuauugucaca

SEQ ID NO: 433166 - RNA, 21 nt, Human
uucagguuaguaguuucucuc

SEQ ID NO: 433167 - RNA, 18 nt, Human
uuguuugcacuuguaguu

SEQ ID NO: 433168 - RNA, 22 nt, Human
uuuuuuuuuuuuuuuuccauuu

SEQ ID NO: 433169 - RNA, 24 nt, Human
aagucgguuuuuuuccaccccuuu

SEQ ID NO: 433170 - RNA, 21 nt, Human
aguugccucuaucugccaacc

SEQ ID NO: 433171 - RNA, 22 nt, Human
aucauuauacuaaaauuaaagu

SEQ ID NO: 433172 - RNA, 24 nt, Human
cagcuuuauuggaauaguuuaaaa

SEQ ID NO: 433173 - RNA, 23 nt, Human
ccuccuacaugggaacauguuca

SEQ ID NO: 433174 - RNA, 18 nt, Human
cuacaugggaacauguuc

SEQ ID NO: 433175 - RNA, 23 nt, Human
cucuuuccaucugacuuuuaaaa

SEQ ID NO: 433176 - RNA, 23 nt, Human
gaaaaugcauuucucugcaauuc

SEQ ID NO: 433177 - RNA, 22 nt, Human
gaauagcuccaaauuaugcuaa

SEQ ID NO: 433178 - RNA, 18 nt, Human
gcagucagaucuuccgcg

SEQ ID NO: 433179 - RNA, 19 nt, Human
ggccuggggaagacggcuc

SEQ ID NO: 433180 - RNA, 18 nt, Human
ggcugcagucagaucuuc

SEQ ID NO: 433181 - RNA, 24 nt, Human
gucgguuuuuuuccaccccuuucc

SEQ ID NO: 433182 - RNA, 19 nt, Human
uaaagcucacuggccuggg

SEQ ID NO: 433183 - RNA, 23 nt, Human
uaacaccucuaccaaacuaaaca

SEQ ID NO: 433184 - RNA, 18 nt, Human
ucaaucagaaaaaggagg

SEQ ID NO: 433185 - RNA, 20 nt, Human
uccaacaucaacacugugau

SEQ ID NO: 433186 - RNA, 22 nt, Human
ugacucaacucuucccauucau

SEQ ID NO: 433187 - RNA, 23 nt, Human
ugaggucagacaauccaagacca

SEQ ID NO: 433188 - RNA, 24 nt, Human
ugccaucaccaucuauguguccaa

SEQ ID NO: 433189 - RNA, 19 nt, Human
uggaaguucauagacacuu

SEQ ID NO: 433190 - RNA, 25 nt, Human
uuaaaguuauuuauggaaguucauu

SEQ ID NO: 433191 - RNA, 23 nt, Human
acaggcgcccgccaccacgcccg

SEQ ID NO: 433192 - RNA, 18 nt, Human
acugcaagcuccgccucc

SEQ ID NO: 433193 - RNA, 19 nt, Human
agugcaguggcgugaucuc

SEQ ID NO: 433194 - RNA, 20 nt, Human
agugcaguggcgugaucucg

SEQ ID NO: 433195 - RNA, 23 nt, Human
agugcaguggcgugaucucggcu

SEQ ID NO: 433196 - RNA, 24 nt, Human
agugcaguggcgugaucucggcuc

SEQ ID NO: 433197 - RNA, 18 nt, Human
auagcugggacuacaggc

SEQ ID NO: 433198 - RNA, 22 nt, Human
auagcugggacuacaggcgccc

SEQ ID NO: 433199 - RNA, 21 nt, Human
cacagagcagugaagucgaga

SEQ ID NO: 433200 - RNA, 22 nt, Human
cacgccauucuccugccucagc

SEQ ID NO: 433201 - RNA, 21 nt, Human
caggcgcccgccaccacgccc

SEQ ID NO: 433202 - RNA, 21 nt, Human
ccaauaccugcaggucacagg

SEQ ID NO: 433203 - RNA, 25 nt, Human
ccuccuggagcagaggacacagagc

SEQ ID NO: 433204 - RNA, 23 nt, Human
ccugccucagccucucgcauagc

SEQ ID NO: 433205 - RNA, 19 nt, Human
cgccucccggguucacgcc

SEQ ID NO: 433206 - RNA, 21 nt, Human
cucccggguucacgccauucu

SEQ ID NO: 433207 - RNA, 20 nt, Human
cucugucgcccaggcuugag

SEQ ID NO: 433208 - RNA, 23 nt, Human
cugccucagccucucgcauagcu

SEQ ID NO: 433209 - RNA, 22 nt, Human
gagugcaguggcgugaucucgg

SEQ ID NO: 433210 - RNA, 24 nt, Human
gcccaggcuugagugcaguggcgu

SEQ ID NO: 433211 - RNA, 25 nt, Human
gccucccggguucacgccauucucc

SEQ ID NO: 433212 - RNA, 20 nt, Human
gcucugucgcccaggcuuga

SEQ ID NO: 433213 - RNA, 22 nt, Human
ggcuugagugcaguggcgugau

SEQ ID NO: 433214 - RNA, 21 nt, Human
gugaucucggcucacugcaag

SEQ ID NO: 433215 - RNA, 23 nt, Human
uacaggcgcccgccaccacgccc

SEQ ID NO: 433216 - RNA, 20 nt, Human
uaccugcaggucacagggcc

SEQ ID NO: 433217 - RNA, 18 nt, Human
ucacugcaagcuccgccu

SEQ ID NO: 433218 - RNA, 19 nt, Human
ucacugcaagcuccgccuc

SEQ ID NO: 433219 - RNA, 24 nt, Human
ucacugcaagcuccgccucccggg

SEQ ID NO: 433220 - RNA, 21 nt, Human
ucccggguucacgccauucuc

SEQ ID NO: 433221 - RNA, 24 nt, Human
ucccggguucacgccauucuccug

SEQ ID NO: 433222 - RNA, 23 nt, Human
ucgcauagcugggacuacaggcg

SEQ ID NO: 433223 - RNA, 18 nt, Human
ucgcccaggcuugagugc

SEQ ID NO: 433224 - RNA, 26 nt, Human
ucuccugccucagccucucgcauagc

SEQ ID NO: 433225 - RNA, 24 nt, Human
ucucgcauagcugggacuacaggc

SEQ ID NO: 433226 - RNA, 19 nt, Human
ucucgcucugucgcccagg

SEQ ID NO: 433227 - RNA, 24 nt, Human
ucucgcucugucgcccaggcuuga

SEQ ID NO: 433228 - RNA, 25 nt, Human
ucucgcucugucgcccaggcuugag

SEQ ID NO: 433229 - RNA, 24 nt, Human
ucugucgcccaggcuugagugcag

SEQ ID NO: 433230 - RNA, 22 nt, Human
ugagacggagucucgcucuguc

SEQ ID NO: 433231 - RNA, 18 nt, Human
ugagugcaguggcgugau

SEQ ID NO: 433232 - RNA, 24 nt, Human
ugccucagccucucgcauagcugg

SEQ ID NO: 433233 - RNA, 20 nt, Human
uggcgugaucucggcucacu

SEQ ID NO: 433234 - RNA, 21 nt, Human
ugggacuacaggcgcccgcca

SEQ ID NO: 433235 - RNA, 22 nt, Human
ugggacuacaggcgcccgccac

SEQ ID NO: 433236 - RNA, 24 nt, Human
ugggacuacaggcgcccgccacca

SEQ ID NO: 433237 - RNA, 23 nt, Human
uugagugcaguggcgugaucucg

SEQ ID NO: 433238 - RNA, 24 nt, Human
uugagugcaguggcgugaucucgg

SEQ ID NO: 433239 - RNA, 21 nt, Human
aacgaugcugaauacauagga

SEQ ID NO: 433240 - RNA, 24 nt, Human
accccugugaacacagcuaaaaau

SEQ ID NO: 433241 - RNA, 21 nt, Human
agccugugaagggcagaaggg

SEQ ID NO: 433242 - RNA, 21 nt, Human
aggaagacaguguuucucugg

SEQ ID NO: 433243 - RNA, 23 nt, Human
aggaagacaguguuucucuggga

SEQ ID NO: 433244 - RNA, 19 nt, Human
caaagguuucacaaaagua

SEQ ID NO: 433245 - RNA, 20 nt, Human
caaggucagcuggucagcuc

SEQ ID NO: 433246 - RNA, 20 nt, Human
cagcuggucagcucuuccuc

SEQ ID NO: 433247 - RNA, 18 nt, Human
cauguaugacugaaaggc

SEQ ID NO: 433248 - RNA, 23 nt, Human
ccugugaagggcagaagggugag

SEQ ID NO: 433249 - RNA, 21 nt, Human
gagcugccgcuguggcuacuc

SEQ ID NO: 433250 - RNA, 22 nt, Human
gcuaaaaaugguaugaaaagaa

SEQ ID NO: 433251 - RNA, 23 nt, Human
gggaaaacaaagguuucacaaaa

SEQ ID NO: 433252 - RNA, 20 nt, Human
ucccagcaaggucagcuggu

SEQ ID NO: 433253 - RNA, 22 nt, Human
ucccugaugggaaaacaaaggu

SEQ ID NO: 433254 - RNA, 21 nt, Human
ugaaaagaaguuuggaacuga

SEQ ID NO: 433255 - RNA, 25 nt, Human
ugaaaggcuuuuccacgugugguug

SEQ ID NO: 433256 - RNA, 21 nt, Human
ugacugaaaggcuuuuccacg

SEQ ID NO: 433257 - RNA, 24 nt, Human
ugcauguaugacugaaaggcuuuu

SEQ ID NO: 433258 - RNA, 19 nt, Human
ugguuuuuagaaacgaugc

SEQ ID NO: 433259 - RNA, 19 nt, Human
uucagccugugaagggcag

SEQ ID NO: 433260 - RNA, 22 nt, Human
uugguuuuuagaaacgaugcug

SEQ ID NO: 433261 - RNA, 25 nt, Human
aaauaagcaaugaaaauccuagugc

SEQ ID NO: 433262 - RNA, 24 nt, Human
aacacacccaccauauaauaguca

SEQ ID NO: 433263 - RNA, 19 nt, Human
aagacacuuuaaaauaagc

SEQ ID NO: 433264 - RNA, 19 nt, Human
aagcaucgggacaggaagc

SEQ ID NO: 433265 - RNA, 25 nt, Human
aagucuucacagccagcagcagccu

SEQ ID NO: 433266 - RNA, 20 nt, Human
accauauaauagucacugag

SEQ ID NO: 433267 - RNA, 20 nt, Human
acccugagaaccuaaggaau

SEQ ID NO: 433268 - RNA, 22 nt, Human
accuagggagaauucccuucag

SEQ ID NO: 433269 - RNA, 23 nt, Human
accucgcaagacuguuucuaacc

SEQ ID NO: 433270 - RNA, 21 nt, Human
accucugacccuccacccacu

SEQ ID NO: 433271 - RNA, 21 nt, Human
acuccagggcucaugucacac

SEQ ID NO: 433272 - RNA, 20 nt, Human
agaagcagauggugggcuug

SEQ ID NO: 433273 - RNA, 18 nt, Human
agacgaagauuugagucu

SEQ ID NO: 433274 - RNA, 23 nt, Human
agaggaaggggccagccacgugg

SEQ ID NO: 433275 - RNA, 22 nt, Human
agccaaggacaggagaggcuuc

SEQ ID NO: 433276 - RNA, 24 nt, Human
agcuacaaaguuuugguaaugaaa

SEQ ID NO: 433277 - RNA, 21 nt, Human
aggagaggcuuccaaggcucc

SEQ ID NO: 433278 - RNA, 18 nt, Human
aggcaggaggagcagggc

SEQ ID NO: 433279 - RNA, 22 nt, Human
aggcauggagggaagagccaag

SEQ ID NO: 433280 - RNA, 18 nt, Human
aggcuccaagagcagcag

SEQ ID NO: 433281 - RNA, 22 nt, Human
agggacgacacacuccagggcu

SEQ ID NO: 433282 - RNA, 23 nt, Human
auagucacugagcuugccccggg

SEQ ID NO: 433283 - RNA, 20 nt, Human
aucuccgccacccuccuccu

SEQ ID NO: 433284 - RNA, 22 nt, Human
cacacccaccauauaauaguca

SEQ ID NO: 433285 - RNA, 18 nt, Human
cacccacuccggugaccu

SEQ ID NO: 433286 - RNA, 21 nt, Human
cacccacuccggugaccugca

SEQ ID NO: 433287 - RNA, 20 nt, Human
cacugagcuugccccggggg

SEQ ID NO: 433288 - RNA, 21 nt, Human
cacuuuaaaauaagcaaugaa

SEQ ID NO: 433289 - RNA, 18 nt, Human
cagaagcagauggugggc

SEQ ID NO: 433290 - RNA, 22 nt, Human
cagaagcagauggugggcuuga

SEQ ID NO: 433291 - RNA, 20 nt, Human
cagcaaggcggcgucggggg

SEQ ID NO: 433292 - RNA, 22 nt, Human
caggagaggcuuccaaggcucc

SEQ ID NO: 433293 - RNA, 21 nt, Human
caggcuguuucaggcaggaag

SEQ ID NO: 433294 - RNA, 19 nt, Human
cauaaagugcaagcaaaga

SEQ ID NO: 433295 - RNA, 19 nt, Human
cauccugugcucaguuucc

SEQ ID NO: 433296 - RNA, 25 nt, Human
cauuucuacuucucagggccgaaga

SEQ ID NO: 433297 - RNA, 20 nt, Human
ccacaccuucgggccugccc

SEQ ID NO: 433298 - RNA, 22 nt, Human
ccauauacuucccuaaagcuca

SEQ ID NO: 433299 - RNA, 20 nt, Human
ccccugcauuucuacuucuc

SEQ ID NO: 433300 - RNA, 19 nt, Human
cccgggcuuccuccucucc

SEQ ID NO: 433301 - RNA, 18 nt, Human
cccugcuggagaaggcuc

SEQ ID NO: 433302 - RNA, 20 nt, Human
cccuuugcgauaaguugcaa

SEQ ID NO: 433303 - RNA, 26 nt, Human
ccuccauaaagugcaagcaaagauug

SEQ ID NO: 433304 - RNA, 21 nt, Human
ccucuaagacucuuguauuag

SEQ ID NO: 433305 - RNA, 22 nt, Human
cgaagacccgaccucugacccu

SEQ ID NO: 433306 - RNA, 20 nt, Human
cgacacucagaagcagaugg

SEQ ID NO: 433307 - RNA, 20 nt, Human
cgaccucugacccuccaccc

SEQ ID NO: 433308 - RNA, 18 nt, Human
cgcaccaggaaugaccgc

SEQ ID NO: 433309 - RNA, 21 nt, Human
cgggacaggaagcccugcugg

SEQ ID NO: 433310 - RNA, 18 nt, Human
cuaaagcucaacccaccc

SEQ ID NO: 433311 - RNA, 19 nt, Human
cuaaagcucaacccaccca

SEQ ID NO: 433312 - RNA, 20 nt, Human
cuaaagcucaacccacccac

SEQ ID NO: 433313 - RNA, 22 nt, Human
cuaaagcucaacccacccaccg

SEQ ID NO: 433314 - RNA, 19 nt, Human
cucaguuucccuggaaggu

SEQ ID NO: 433315 - RNA, 20 nt, Human
cuccaucuccgccacccucc

SEQ ID NO: 433316 - RNA, 24 nt, Human
cugaacacuuuaaaaaagaacacc

SEQ ID NO: 433317 - RNA, 22 nt, Human
cugaagaucaaauccaccauga

SEQ ID NO: 433318 - RNA, 24 nt, Human
cuggaagguuucucaugaucgccc

SEQ ID NO: 433319 - RNA, 21 nt, Human
cuguugucaguugggaucagc

SEQ ID NO: 433320 - RNA, 22 nt, Human
gaagacccgaccucugacccuc

SEQ ID NO: 433321 - RNA, 19 nt, Human
gaccucugacccuccaccc

SEQ ID NO: 433322 - RNA, 19 nt, Human
gaccuggcucggcucauga

SEQ ID NO: 433323 - RNA, 24 nt, Human
gacuaaaacaggcuuaagccaaga

SEQ ID NO: 433324 - RNA, 20 nt, Human
gagaggagaggacacacacc

SEQ ID NO: 433325 - RNA, 21 nt, Human
gagagggacgacacacuccag

SEQ ID NO: 433326 - RNA, 19 nt, Human
gagauguccaggcucuuga

SEQ ID NO: 433327 - RNA, 22 nt, Human
gagauguccaggcucuugagga

SEQ ID NO: 433328 - RNA, 18 nt, Human
gaggcaggaggagcaggg

SEQ ID NO: 433329 - RNA, 21 nt, Human
gauacgccccgagugccuuuc

SEQ ID NO: 433330 - RNA, 20 nt, Human
gauucagguucauuccccuu

SEQ ID NO: 433331 - RNA, 22 nt, Human
gcaagguccccugcccugaggg

SEQ ID NO: 433332 - RNA, 20 nt, Human
gcauggagggaagagccaag

SEQ ID NO: 433333 - RNA, 20 nt, Human
gccacugccaccucacccug

SEQ ID NO: 433334 - RNA, 20 nt, Human
gccagccacgugguggccau

SEQ ID NO: 433335 - RNA, 22 nt, Human
gcucuugaggagaaacaaaagu

SEQ ID NO: 433336 - RNA, 22 nt, Human
ggaaggggccagccacguggug

SEQ ID NO: 433337 - RNA, 25 nt, Human
ggagaauucccuucaggcuguuuca

SEQ ID NO: 433338 - RNA, 22 nt, Human
ggccacugaagaucaaauccaa

SEQ ID NO: 433339 - RNA, 18 nt, Human
gggacaggaagcccugcu

SEQ ID NO: 433340 - RNA, 22 nt, Human
gggcagaggcuauuccucagga

SEQ ID NO: 433341 - RNA, 18 nt, Human
ggguucacgguggugggu

SEQ ID NO: 433342 - RNA, 19 nt, Human
gucacugagcuugccccgg

SEQ ID NO: 433343 - RNA, 19 nt, Human
gugccgccuuuugggaaag

SEQ ID NO: 433344 - RNA, 21 nt, Human
gugccgccuuuugggaaagcc

SEQ ID NO: 433345 - RNA, 21 nt, Human
guugugugucugggaacaaag

SEQ ID NO: 433346 - RNA, 21 nt, Human
uaaaauaagcaaugaaaaucc

SEQ ID NO: 433347 - RNA, 19 nt, Human
uaccacugagaagcucggc

SEQ ID NO: 433348 - RNA, 27 nt, Human
uagacuuuuaaaaacaacuaacaguuc

SEQ ID NO: 433349 - RNA, 21 nt, Human
uagaguagggucccagucacu

SEQ ID NO: 433350 - RNA, 20 nt, Human
uagcagcaacguugauuugg

SEQ ID NO: 433351 - RNA, 20 nt, Human
uagugcgacacucagaagca

SEQ ID NO: 433352 - RNA, 22 nt, Human
uauagacuuuuaaaaacaacua

SEQ ID NO: 433353 - RNA, 19 nt, Human
ucacccccacugagggaaa

SEQ ID NO: 433354 - RNA, 19 nt, Human
ucacuggaccccaggaggc

SEQ ID NO: 433355 - RNA, 21 nt, Human
ucaguuccuuccuugcuguuc

SEQ ID NO: 433356 - RNA, 18 nt, Human
uccauccucaucuccauc

SEQ ID NO: 433357 - RNA, 23 nt, Human
ucccagucacuggaccccaggag

SEQ ID NO: 433358 - RNA, 19 nt, Human
ucccgggcuuccuccucuc

SEQ ID NO: 433359 - RNA, 21 nt, Human
ucccuggaagguuucucauga

SEQ ID NO: 433360 - RNA, 20 nt, Human
uccuccuucguugccucccg

SEQ ID NO: 433361 - RNA, 22 nt, Human
ucuccaucuccgccacccuccu

SEQ ID NO: 433362 - RNA, 21 nt, Human
ucuccuguugucaguugggau

SEQ ID NO: 433363 - RNA, 24 nt, Human
ucucugacuaaaacaggcuuaagc

SEQ ID NO: 433364 - RNA, 23 nt, Human
ucucuugcaaggaccaaagagau

SEQ ID NO: 433365 - RNA, 23 nt, Human
ugagagaggucugauggguucac

SEQ ID NO: 433366 - RNA, 18 nt, Human
ugagggggccgaggggug

SEQ ID NO: 433367 - RNA, 18 nt, Human
ugagggggccgaggggug

SEQ ID NO: 433368 - RNA, 20 nt, Human
ugcaaggaccaaagagauaa

SEQ ID NO: 433369 - RNA, 20 nt, Human
ugccucccgggcuuccuccu

SEQ ID NO: 433370 - RNA, 18 nt, Human
ugggaaagccgaguggag

SEQ ID NO: 433371 - RNA, 21 nt, Human
ugggaacaaaggauuaagaca

SEQ ID NO: 433372 - RNA, 27 nt, Human
ugggaucagcugaucggagugaacuuc

SEQ ID NO: 433373 - RNA, 18 nt, Human
ugguaaggaaacacaccc

SEQ ID NO: 433374 - RNA, 19 nt, Human
uggugggcuugagggggcc

SEQ ID NO: 433375 - RNA, 21 nt, Human
uguuauaguucuucacaaaca

SEQ ID NO: 433376 - RNA, 19 nt, Human
uugcugccucuaagacucu

SEQ ID NO: 433377 - RNA, 23 nt, Human
agcagcaccacugaggugucaga

SEQ ID NO: 433378 - RNA, 21 nt, Human
aggcagugcgacaccuccugg

SEQ ID NO: 433379 - RNA, 26 nt, Human
auaacagcagucagagucagggacac

SEQ ID NO: 433380 - RNA, 21 nt, Human
caccacagccaggccuacgcc

SEQ ID NO: 433381 - RNA, 22 nt, Human
cagcagucagagucagggacac

SEQ ID NO: 433382 - RNA, 21 nt, Human
ccacagccaggccuacgccca

SEQ ID NO: 433383 - RNA, 23 nt, Human
ccacugaggugucagaaggcaaa

SEQ ID NO: 433384 - RNA, 21 nt, Human
ccaggccuacgcccagcagca

SEQ ID NO: 433385 - RNA, 21 nt, Human
ccugcagagcagcaggcagcc

SEQ ID NO: 433386 - RNA, 26 nt, Human
cuacgcccagcagcaccacugaggug

SEQ ID NO: 433387 - RNA, 20 nt, Human
gaagcagacacaggguggga

SEQ ID NO: 433388 - RNA, 19 nt, Human
gaaggcaaagcccacugcu

SEQ ID NO: 433389 - RNA, 20 nt, Human
gcagagcagcaggcagccgg

SEQ ID NO: 433390 - RNA, 25 nt, Human
uauucggaagcagacacaggguggg

SEQ ID NO: 433391 - RNA, 21 nt, Human
ucagaaggcaaagcccacugc

SEQ ID NO: 433392 - RNA, 24 nt, Human
ugggaggcagugcgacaccuccug

SEQ ID NO: 433393 - RNA, 18 nt, Human
uggugagaaccaggauaa

SEQ ID NO: 433394 - RNA, 21 nt, Human
augcacacacaacaaagauug

SEQ ID NO: 433395 - RNA, 21 nt, Human
auggagacgaccaguaagcac

SEQ ID NO: 433396 - RNA, 21 nt, Human
caguaagcacuuccgggaugg

SEQ ID NO: 433397 - RNA, 20 nt, Human
ccgagccucgcgccuuggcc

SEQ ID NO: 433398 - RNA, 21 nt, Human
cgccuuggcucuaagacgccc

SEQ ID NO: 433399 - RNA, 22 nt, Human
cgcuuaggguccccuccagcuc

SEQ ID NO: 433400 - RNA, 22 nt, Human
cuccagcucuaccucucacucc

SEQ ID NO: 433401 - RNA, 21 nt, Human
gaccaguaagcacuuccggga

SEQ ID NO: 433402 - RNA, 24 nt, Human
gcccggugggcgcagcggcucacg

SEQ ID NO: 433403 - RNA, 20 nt, Human
gcgcauggagacgaccagua

SEQ ID NO: 433404 - RNA, 18 nt, Human
ggaaccggcgcauggaga

SEQ ID NO: 433405 - RNA, 21 nt, Human
ggcgcagcggcucacgucccg

SEQ ID NO: 433406 - RNA, 18 nt, Human
ggcgccgggucuagcccg

SEQ ID NO: 433407 - RNA, 21 nt, Human
ggguccccuccagcucuaccu

SEQ ID NO: 433408 - RNA, 18 nt, Human
guccccuccagcucuacc

SEQ ID NO: 433409 - RNA, 23 nt, Human
uauaaaaaugcacacacaacaaa

SEQ ID NO: 433410 - RNA, 21 nt, Human
ucuaagacgcccaggaaccgg

SEQ ID NO: 433411 - RNA, 18 nt, Human
ucucacuccgagccucgc

SEQ ID NO: 433412 - RNA, 18 nt, Human
ucuuucgugguguggagg

SEQ ID NO: 433413 - RNA, 20 nt, Human
uuaggguccccuccagcucu

SEQ ID NO: 433414 - RNA, 20 nt, Human
uuccgggauggaucuuucgu

SEQ ID NO: 433415 - RNA, 23 nt, Human
acacgguggugaagcucuugcca

SEQ ID NO: 433416 - RNA, 19 nt, Human
agagguggugaagguccag

SEQ ID NO: 433417 - RNA, 21 nt, Human
agguggugaagguccagccuc

SEQ ID NO: 433418 - RNA, 22 nt, Human
caaaaagaaaugacugcacuua

SEQ ID NO: 433419 - RNA, 19 nt, Human
ccaaaaagaaaugacugca

SEQ ID NO: 433420 - RNA, 19 nt, Human
gaagcucuugccacagccc

SEQ ID NO: 433421 - RNA, 22 nt, Human
ggugaagcucuugccacagccc

SEQ ID NO: 433422 - RNA, 22 nt, Human
uccagccgcagccacccagggg

SEQ ID NO: 433423 - RNA, 18 nt, Human
uggcaaggaaugaauaga

SEQ ID NO: 433424 - RNA, 19 nt, Human
uggcaaggaaugaauagag

SEQ ID NO: 433425 - RNA, 22 nt, Human
uggcaaggaaugaauagaguug

SEQ ID NO: 433426 - RNA, 23 nt, Human
uuuagaucuccaaacucauaguc

SEQ ID NO: 433427 - RNA, 19 nt, Human
aagcagcagcacuaaaccu

SEQ ID NO: 433428 - RNA, 22 nt, Human
agcagaguacaaaggcugcucg

SEQ ID NO: 433429 - RNA, 23 nt, Human
agcagugaaagcagcagcacuaa

SEQ ID NO: 433430 - RNA, 22 nt, Human
agggugggaauguccuggaggg

SEQ ID NO: 433431 - RNA, 19 nt, Human
cacuaaaccuggugccccc

SEQ ID NO: 433432 - RNA, 24 nt, Human
cacuaaaccuggugccccccucag

SEQ ID NO: 433433 - RNA, 23 nt, Human
cagcacuaaaccuggugcccccc

SEQ ID NO: 433434 - RNA, 23 nt, Human
caggaugggcgaggaccagaccc

SEQ ID NO: 433435 - RNA, 19 nt, Human
ccacaauggggcauggacu

SEQ ID NO: 433436 - RNA, 18 nt, Human
ccagaccccagggcgggg

SEQ ID NO: 433437 - RNA, 20 nt, Human
cccgguccggagcagccucc

SEQ ID NO: 433438 - RNA, 23 nt, Human
cccuagaccauguuggguccugg

SEQ ID NO: 433439 - RNA, 25 nt, Human
cccuccgcaagcagaguacaaaggc

SEQ ID NO: 433440 - RNA, 19 nt, Human
cccugcaggaugggcgagg

SEQ ID NO: 433441 - RNA, 21 nt, Human
ccgcagacucugcgucccggu

SEQ ID NO: 433442 - RNA, 18 nt, Human
cuggagggucucccagcc

SEQ ID NO: 433443 - RNA, 23 nt, Human
cuggugccccccucagguggggu

SEQ ID NO: 433444 - RNA, 22 nt, Human
gcagcagugaaagcagcagcac

SEQ ID NO: 433445 - RNA, 23 nt, Human
gcagugaaagcagcagcacuaaa

SEQ ID NO: 433446 - RNA, 21 nt, Human
ggcgaggaccagaccccaggg

SEQ ID NO: 433447 - RNA, 22 nt, Human
gggcgaggaccagaccccaggg

SEQ ID NO: 433448 - RNA, 20 nt, Human
gggguuggaaaugggagggg

SEQ ID NO: 433449 - RNA, 20 nt, Human
gggugcagcagugaaagcag

SEQ ID NO: 433450 - RNA, 22 nt, Human
gggugguccacaauggggcaug

SEQ ID NO: 433451 - RNA, 21 nt, Human
ggugguccacaauggggcaug

SEQ ID NO: 433452 - RNA, 23 nt, Human
guccuggagggucucccagcccu

SEQ ID NO: 433453 - RNA, 20 nt, Human
uaacugaggugggggcaggu

SEQ ID NO: 433454 - RNA, 18 nt, Human
uccacaauggggcaugga

SEQ ID NO: 433455 - RNA, 19 nt, Human
uccacaauggggcauggac

SEQ ID NO: 433456 - RNA, 18 nt, Human
ucggcgccggguccgcag

SEQ ID NO: 433457 - RNA, 21 nt, Human
ucggcgccggguccgcagacu

SEQ ID NO: 433458 - RNA, 19 nt, Human
uggcagcaugggggagggu

SEQ ID NO: 433459 - RNA, 24 nt, Human
ugggaggggcuagacaucaaaaca

SEQ ID NO: 433460 - RNA, 22 nt, Human
ugggaugcuagggagggguugg

SEQ ID NO: 433461 - RNA, 19 nt, Human
ugggggagggugggaaugu

SEQ ID NO: 433462 - RNA, 22 nt, Human
uggguccugggucagggcaccu

SEQ ID NO: 433463 - RNA, 18 nt, Human
ugggugguccacaauggg

SEQ ID NO: 433464 - RNA, 21 nt, Human
ugguccacaauggggcaugga

SEQ ID NO: 433465 - RNA, 22 nt, Human
uggugccccccucagguggggu

SEQ ID NO: 433466 - RNA, 18 nt, Human
uuuuuuuuuuuuuuucug

SEQ ID NO: 433467 - RNA, 21 nt, Human
aaaaaagaaaaaagaaaagaa

SEQ ID NO: 433468 - RNA, 18 nt, Human
aaaaagaaaaaagaaaaa

SEQ ID NO: 433469 - RNA, 25 nt, Human
aaaaagaaaaaagaaaagaaaaugg

SEQ ID NO: 433470 - RNA, 23 nt, Human
aaaagaaaagaaaauggaacaag

SEQ ID NO: 433471 - RNA, 25 nt, Human
aaaagcaaccuucuaguaaaaagca

SEQ ID NO: 433472 - RNA, 19 nt, Human
aaaggaagguacuguucag

SEQ ID NO: 433473 - RNA, 19 nt, Human
aacccaguggggacaggag

SEQ ID NO: 433474 - RNA, 20 nt, Human
aaccgaggaagaccccaccu

SEQ ID NO: 433475 - RNA, 23 nt, Human
aagaaacaaaguaacaacucaua

SEQ ID NO: 433476 - RNA, 22 nt, Human
aagaaaggaaaaagaaaaaaga

SEQ ID NO: 433477 - RNA, 19 nt, Human
aagaggcugggaggacggg

SEQ ID NO: 433478 - RNA, 22 nt, Human
aagcaaccuucuaguaaaaagc

SEQ ID NO: 433479 - RNA, 23 nt, Human
acugggaucggcuuucuucuggg

SEQ ID NO: 433480 - RNA, 28 nt, Human
acuguucaguguagucggcuuugguaug

SEQ ID NO: 433481 - RNA, 19 nt, Human
agaaaaaagaaaaaagaaa

SEQ ID NO: 433482 - RNA, 21 nt, Human
agaaaggaaaaagaaaaaaga

SEQ ID NO: 433483 - RNA, 19 nt, Human
agaauaucaauuaagcuua

SEQ ID NO: 433484 - RNA, 25 nt, Human
agacagggaaagaauauacauguuu

SEQ ID NO: 433485 - RNA, 22 nt, Human
agagucuaucuggaccauuuuu

SEQ ID NO: 433486 - RNA, 19 nt, Human
agcaguauaaauaugcuca

SEQ ID NO: 433487 - RNA, 19 nt, Human
aggaaaaagaaaaaagaaa

SEQ ID NO: 433488 - RNA, 20 nt, Human
aggcgcccagaggcagcucu

SEQ ID NO: 433489 - RNA, 18 nt, Human
aggcggcggccgcgcugc

SEQ ID NO: 433490 - RNA, 23 nt, Human
agucuaaagaaaguucugaacag

SEQ ID NO: 433491 - RNA, 22 nt, Human
auuaaaauaugcaugccugaca

SEQ ID NO: 433492 - RNA, 20 nt, Human
auuuugccugccccuuucuc

SEQ ID NO: 433493 - RNA, 20 nt, Human
caaccgaggaagaccccacc

SEQ ID NO: 433494 - RNA, 22 nt, Human
caccagaaacgccggcugccgg

SEQ ID NO: 433495 - RNA, 22 nt, Human
caccuccggcuccggccgggag

SEQ ID NO: 433496 - RNA, 21 nt, Human
cacugaaugacguugccccag

SEQ ID NO: 433497 - RNA, 22 nt, Human
cacuugacagcauuaaguuuaa

SEQ ID NO: 433498 - RNA, 24 nt, Human
cagagugaauaaguuacauagaua

SEQ ID NO: 433499 - RNA, 21 nt, Human
cagccuccggcccacacggcc

SEQ ID NO: 433500 - RNA, 23 nt, Human
caggugaaaagacuuggaauuua

SEQ ID NO: 433501 - RNA, 25 nt, Human
caucgaagaaacaaaguaacaacuu

SEQ ID NO: 433502 - RNA, 19 nt, Human
ccagaggcagcucugcgga

SEQ ID NO: 433503 - RNA, 19 nt, Human
ccaggacuugcuucuuauu

SEQ ID NO: 433504 - RNA, 25 nt, Human
ccaggacuugcuucuuauuugcugg

SEQ ID NO: 433505 - RNA, 19 nt, Human
cccacacggccgccgcggg

SEQ ID NO: 433506 - RNA, 21 nt, Human
cccacacggccgccgcggggc

SEQ ID NO: 433507 - RNA, 23 nt, Human
cccacacggccgccgcggggcua

SEQ ID NO: 433508 - RNA, 22 nt, Human
ccgcccaccagcucggcuccag

SEQ ID NO: 433509 - RNA, 19 nt, Human
ccugccccuuucucagccc

SEQ ID NO: 433510 - RNA, 19 nt, Human
ccugucacagguugugaug

SEQ ID NO: 433511 - RNA, 20 nt, Human
cgagaagacacugaaugacg

SEQ ID NO: 433512 - RNA, 22 nt, Human
cgcuccuccuccuccgggucca

SEQ ID NO: 433513 - RNA, 19 nt, Human
cuaaaggacacggcggagc

SEQ ID NO: 433514 - RNA, 19 nt, Human
cucccugcagcccucggag

SEQ ID NO: 433515 - RNA, 23 nt, Human
cuugugaauaguuuucucuacaa

SEQ ID NO: 433516 - RNA, 21 nt, Human
cuuucagaaacaguagccuag

SEQ ID NO: 433517 - RNA, 21 nt, Human
gcagcggccgggagcagguac

SEQ ID NO: 433518 - RNA, 20 nt, Human
gcgcccagaggcagcucugc

SEQ ID NO: 433519 - RNA, 20 nt, Human
ggaacccaguggggacagga

SEQ ID NO: 433520 - RNA, 21 nt, Human
ggagucuguccaggacguucu

SEQ ID NO: 433521 - RNA, 20 nt, Human
ggccggccucccugacgcgg

SEQ ID NO: 433522 - RNA, 21 nt, Human
gggcugucaucaccagaaacg

SEQ ID NO: 433523 - RNA, 18 nt, Human
uaaaaagcagccaagauc

SEQ ID NO: 433524 - RNA, 20 nt, Human
uaaaaagcagccaagauccu

SEQ ID NO: 433525 - RNA, 21 nt, Human
uaaagaaaguucugaacagaa

SEQ ID NO: 433526 - RNA, 18 nt, Human
uaaaggacacggcggagc

SEQ ID NO: 433527 - RNA, 23 nt, Human
uaacacauuugugccacacagca

SEQ ID NO: 433528 - RNA, 19 nt, Human
uacacaggcugucagcuuu

SEQ ID NO: 433529 - RNA, 28 nt, Human
uacacguuggaaguucugccauccucuu

SEQ ID NO: 433530 - RNA, 21 nt, Human
uacagguaacaagagggagaa

SEQ ID NO: 433531 - RNA, 20 nt, Human
uagaaaaagcccuacaggua

SEQ ID NO: 433532 - RNA, 20 nt, Human
uaguaaaaagcagccaagau

SEQ ID NO: 433533 - RNA, 26 nt, Human
uaucuggaccauuuuuggugcaaagg

SEQ ID NO: 433534 - RNA, 19 nt, Human
ucaccagaaacgccggcug

SEQ ID NO: 433535 - RNA, 21 nt, Human
ucagcccacgaaagaaaggaa

SEQ ID NO: 433536 - RNA, 19 nt, Human
ucuaaaggacacggcggag

SEQ ID NO: 433537 - RNA, 18 nt, Human
ucuuuuuuuuuuuuuuuu

SEQ ID NO: 433538 - RNA, 21 nt, Human
ucuuuuuuuuuuuuuuuuagu

SEQ ID NO: 433539 - RNA, 24 nt, Human
ugaaaagacuuggaauuuaucuug

SEQ ID NO: 433540 - RNA, 22 nt, Human
ugacaggugaaaagacuuggaa

SEQ ID NO: 433541 - RNA, 19 nt, Human
ugagugaagaaaacauugc

SEQ ID NO: 433542 - RNA, 22 nt, Human
ugccauccucuuuagaaaaagc

SEQ ID NO: 433543 - RNA, 23 nt, Human
uggaacaagacagggaaagaaua

SEQ ID NO: 433544 - RNA, 19 nt, Human
uggcagcacugcaguuugg

SEQ ID NO: 433545 - RNA, 25 nt, Human
uggcagcacugcaguuuggaaccca

SEQ ID NO: 433546 - RNA, 18 nt, Human
ugucacagguugugaugu

SEQ ID NO: 433547 - RNA, 20 nt, Human
uuacauauauauuacacaua

SEQ ID NO: 433548 - RNA, 25 nt, Human
uugccugccccuuucucagcccacg

SEQ ID NO: 433549 - RNA, 23 nt, Human
uuggaaguucugccauccucuuu

SEQ ID NO: 433550 - RNA, 22 nt, Human
uuuacagagugaauaaguuaca

SEQ ID NO: 433551 - RNA, 20 nt, Human
agcaaauggggaugggguug

SEQ ID NO: 433552 - RNA, 18 nt, Human
agcaggaaauggguaaug

SEQ ID NO: 433553 - RNA, 19 nt, Human
auaaaagacauauuuacag

SEQ ID NO: 433554 - RNA, 22 nt, Human
cauaguugaauucuaaaaaguu

SEQ ID NO: 433555 - RNA, 25 nt, Human
uacuaaaaaaagaauguguuacagc

SEQ ID NO: 433556 - RNA, 18 nt, Human
ucuggacagcaaaugggg

SEQ ID NO: 433557 - RNA, 21 nt, Human
uggaacauccauacauugaaa

SEQ ID NO: 433558 - RNA, 29 nt, Human
aaaaaaaaaaaacacccuucucagagggg

SEQ ID NO: 433559 - RNA, 23 nt, Human
aaaaaaaacacccuucucagagg

SEQ ID NO: 433560 - RNA, 20 nt, Human
aaaaaaaugccagaucccac

SEQ ID NO: 433561 - RNA, 20 nt, Human
aaaaaacagagagaacaaac

SEQ ID NO: 433562 - RNA, 25 nt, Human
aaaaaagaaaacaaaaaacagagag

SEQ ID NO: 433563 - RNA, 21 nt, Human
aaaaaagaaagaaaacacgag

SEQ ID NO: 433564 - RNA, 24 nt, Human
aaaaagaaaacaaaaaacagagag

SEQ ID NO: 433565 - RNA, 25 nt, Human
aaaaagaaaacaaaaaacagagaga

SEQ ID NO: 433566 - RNA, 21 nt, Human
aaaauaccccagaccaaaaug

SEQ ID NO: 433567 - RNA, 18 nt, Human
aaacaaaaaacagagaga

SEQ ID NO: 433568 - RNA, 24 nt, Human
aaacaaaaauaccccagaccaaaa

SEQ ID NO: 433569 - RNA, 24 nt, Human
aaacacccuucucagagggucccc

SEQ ID NO: 433570 - RNA, 19 nt, Human
aaacaguauuuccccccca

SEQ ID NO: 433571 - RNA, 19 nt, Human
aaagaaagaaaacacgagg

SEQ ID NO: 433572 - RNA, 24 nt, Human
aacaaaaaacagagagaacaaaca

SEQ ID NO: 433573 - RNA, 18 nt, Human
aacaaacaaaaauacccc

SEQ ID NO: 433574 - RNA, 20 nt, Human
aacagagagaacaaacaaaa

SEQ ID NO: 433575 - RNA, 22 nt, Human
aacagcuccagcgagaaagaau

SEQ ID NO: 433576 - RNA, 18 nt, Human
aagaaaaaaaagaaaaca

SEQ ID NO: 433577 - RNA, 25 nt, Human
aagaaaacaaaaaacagagagaaca

SEQ ID NO: 433578 - RNA, 20 nt, Human
aagaggagagacugguagcu

SEQ ID NO: 433579 - RNA, 23 nt, Human
acacgcuagaagcuuccagaacc

SEQ ID NO: 433580 - RNA, 21 nt, Human
acaugccaccuguagucccag

SEQ ID NO: 433581 - RNA, 19 nt, Human
accacugcacuccagccug

SEQ ID NO: 433582 - RNA, 24 nt, Human
accccagaguggaaggaaaaacaa

SEQ ID NO: 433583 - RNA, 23 nt, Human
accuugggcgaugcggcuucuug

SEQ ID NO: 433584 - RNA, 18 nt, Human
acugcacuccagccuggg

SEQ ID NO: 433585 - RNA, 22 nt, Human
acugcacuccagccugggugac

SEQ ID NO: 433586 - RNA, 26 nt, Human
acugcacuccagccugggugacugag

SEQ ID NO: 433587 - RNA, 18 nt, Human
agaaaacaaaaaacagag

SEQ ID NO: 433588 - RNA, 20 nt, Human
agaaaacaaaaaacagagag

SEQ ID NO: 433589 - RNA, 22 nt, Human
agaaaacaguauuuccccccca

SEQ ID NO: 433590 - RNA, 26 nt, Human
agaaagugagaugcugauaaaaaaaa

SEQ ID NO: 433591 - RNA, 19 nt, Human
agagggcuuuccuggguca

SEQ ID NO: 433592 - RNA, 24 nt, Human
agcuaguugggaggcugagguggg

SEQ ID NO: 433593 - RNA, 21 nt, Human
agcugccgucugcucccugcu

SEQ ID NO: 433594 - RNA, 24 nt, Human
aggcugaggugggaguaucgcuug

SEQ ID NO: 433595 - RNA, 18 nt, Human
agggagaggaugggggcc

SEQ ID NO: 433596 - RNA, 20 nt, Human
agggaggggguuggggcuga

SEQ ID NO: 433597 - RNA, 19 nt, Human
aggugccaaccuugggcga

SEQ ID NO: 433598 - RNA, 19 nt, Human
agguggaggcugcagugag

SEQ ID NO: 433599 - RNA, 20 nt, Human
agguggaggcugcagugagc

SEQ ID NO: 433600 - RNA, 18 nt, Human
aggugggaguaucgcuug

SEQ ID NO: 433601 - RNA, 23 nt, Human
aguggaaggaaaaacaacccaga

SEQ ID NO: 433602 - RNA, 27 nt, Human
auaaaaaaaaaaaaaacacccuucuca

SEQ ID NO: 433603 - RNA, 24 nt, Human
aucauaccacugcacuccagccug

SEQ ID NO: 433604 - RNA, 22 nt, Human
auggcagggaggggguuggggc

SEQ ID NO: 433605 - RNA, 23 nt, Human
auggcagggaggggguuggggcu

SEQ ID NO: 433606 - RNA, 19 nt, Human
augggggugggguugaugg

SEQ ID NO: 433607 - RNA, 23 nt, Human
caaaaaacagagagaacaaacaa

SEQ ID NO: 433608 - RNA, 22 nt, Human
caaacaaaaauaccccagacca

SEQ ID NO: 433609 - RNA, 22 nt, Human
caacaggaucaagcagagggcu

SEQ ID NO: 433610 - RNA, 18 nt, Human
caaccuugggcgaugcgg

SEQ ID NO: 433611 - RNA, 23 nt, Human
caccuguagucccagcuaguugg

SEQ ID NO: 433612 - RNA, 24 nt, Human
caccuguagucccagcuaguuggg

SEQ ID NO: 433613 - RNA, 20 nt, Human
cacgcugucaaaagcgaggc

SEQ ID NO: 433614 - RNA, 18 nt, Human
cacuccagccugggugac

SEQ ID NO: 433615 - RNA, 18 nt, Human
cacuccagccugggugac

SEQ ID NO: 433616 - RNA, 20 nt, Human
cacuccagccugggugacug

SEQ ID NO: 433617 - RNA, 19 nt, Human
cacugcacuccagccuggg

SEQ ID NO: 433618 - RNA, 19 nt, Human
cacugcacuccagccuggg

SEQ ID NO: 433619 - RNA, 22 nt, Human
cacugcacuccagccuggguga

SEQ ID NO: 433620 - RNA, 23 nt, Human
cacugcacuccagccugggugac

SEQ ID NO: 433621 - RNA, 23 nt, Human
cacugcacuccagccugggugac

SEQ ID NO: 433622 - RNA, 20 nt, Human
cagagggcuuuccuggguca

SEQ ID NO: 433623 - RNA, 24 nt, Human
cagcuaguugggaggcugaggugg

SEQ ID NO: 433624 - RNA, 20 nt, Human
cagcuccagcgagaaagaau

SEQ ID NO: 433625 - RNA, 20 nt, Human
caggagguggaggcugcagu

SEQ ID NO: 433626 - RNA, 24 nt, Human
ccaaugccugaacgagaccccaga

SEQ ID NO: 433627 - RNA, 23 nt, Human
ccaccuguagucccagcuaguug

SEQ ID NO: 433628 - RNA, 20 nt, Human
ccacugcacuccagccuggg

SEQ ID NO: 433629 - RNA, 20 nt, Human
ccacugcacuccagccuggg

SEQ ID NO: 433630 - RNA, 21 nt, Human
ccacugcacuccagccugggu

SEQ ID NO: 433631 - RNA, 21 nt, Human
ccacugcacuccagccugggu

SEQ ID NO: 433632 - RNA, 23 nt, Human
ccacugcacuccagccuggguga

SEQ ID NO: 433633 - RNA, 24 nt, Human
ccacugcacuccagccugggugac

SEQ ID NO: 433634 - RNA, 21 nt, Human
ccagaauggggggacccuuaa

SEQ ID NO: 433635 - RNA, 22 nt, Human
ccaggagguggaggcugcagug

SEQ ID NO: 433636 - RNA, 18 nt, Human
ccaucuagaaauggacug

SEQ ID NO: 433637 - RNA, 18 nt, Human
cccagaguggaaggaaaa

SEQ ID NO: 433638 - RNA, 21 nt, Human
ccccacuucuuuaauaggcaa

SEQ ID NO: 433639 - RNA, 24 nt, Human
ccccccacuucuuuaauaggcaaa

SEQ ID NO: 433640 - RNA, 20 nt, Human
ccccugcugaaccccagcuc

SEQ ID NO: 433641 - RNA, 19 nt, Human
cccggggggagaggggagg

SEQ ID NO: 433642 - RNA, 23 nt, Human
cccggggggagaggggaggggug

SEQ ID NO: 433643 - RNA, 21 nt, Human
cccugcccacggggccccccc

SEQ ID NO: 433644 - RNA, 22 nt, Human
cccugcccacggggccccccca

SEQ ID NO: 433645 - RNA, 19 nt, Human
ccugcugaaccccagcuca

SEQ ID NO: 433646 - RNA, 23 nt, Human
ccugcugaaccccagcucaguuc

SEQ ID NO: 433647 - RNA, 21 nt, Human
ccuguagucccagcuaguugg

SEQ ID NO: 433648 - RNA, 23 nt, Human
cgagaccccagaguggaaggaaa

SEQ ID NO: 433649 - RNA, 22 nt, Human
cucaggaccuaggugguggugg

SEQ ID NO: 433650 - RNA, 20 nt, Human
cucuuccucuacgcggaaga

SEQ ID NO: 433651 - RNA, 21 nt, Human
cugcucccugcuggugggucc

SEQ ID NO: 433652 - RNA, 22 nt, Human
cugcucccugcugguggguccu

SEQ ID NO: 433653 - RNA, 23 nt, Human
cugcugguggguccuuggggugg

SEQ ID NO: 433654 - RNA, 25 nt, Human
cugggggaugauggcagacaggcuu

SEQ ID NO: 433655 - RNA, 22 nt, Human
cuugggaaaaaaaaagaaagaa

SEQ ID NO: 433656 - RNA, 27 nt, Human
cuuuaugggggugggguugauggcagu

SEQ ID NO: 433657 - RNA, 22 nt, Human
gaaaaaaaaagaaagaaaacac

SEQ ID NO: 433658 - RNA, 19 nt, Human
gaaaaacaacccagaaaug

SEQ ID NO: 433659 - RNA, 22 nt, Human
gaaggaaaaacaacccagaaau

SEQ ID NO: 433660 - RNA, 19 nt, Human
gagaggaugggggccagaa

SEQ ID NO: 433661 - RNA, 21 nt, Human
gagaggaugggggccagaaug

SEQ ID NO: 433662 - RNA, 18 nt, Human
gagcugucguguggcagg

SEQ ID NO: 433663 - RNA, 19 nt, Human
gagggagaggaugggggcc

SEQ ID NO: 433664 - RNA, 19 nt, Human
gaggggguuggggcugaau

SEQ ID NO: 433665 - RNA, 19 nt, Human
gaggugagagcugucgugu

SEQ ID NO: 433666 - RNA, 19 nt, Human
gcucuccccuccccucccc

SEQ ID NO: 433667 - RNA, 20 nt, Human
gcugugaucauaccacugca

SEQ ID NO: 433668 - RNA, 19 nt, Human
ggaaugggcaggcggccca

SEQ ID NO: 433669 - RNA, 18 nt, Human
ggaggcugcagugagcug

SEQ ID NO: 433670 - RNA, 20 nt, Human
ggaggcugcagugagcuggc

SEQ ID NO: 433671 - RNA, 23 nt, Human
ggcuucuugggaaauaacagcuc

SEQ ID NO: 433672 - RNA, 20 nt, Human
gggaaaaaaaaagaaagaaa

SEQ ID NO: 433673 - RNA, 19 nt, Human
gggaggggguuggggcuga

SEQ ID NO: 433674 - RNA, 23 nt, Human
gggcccccccacgcugucaaaag

SEQ ID NO: 433675 - RNA, 21 nt, Human
ggggaaugggcaggcggccca

SEQ ID NO: 433676 - RNA, 20 nt, Human
ggggaggggugggcguggug

SEQ ID NO: 433677 - RNA, 19 nt, Human
ggggcugaauggagaagaa

SEQ ID NO: 433678 - RNA, 21 nt, Human
ggugagggagaggaugggggc

SEQ ID NO: 433679 - RNA, 18 nt, Human
guccuugggguggaaagc

SEQ ID NO: 433680 - RNA, 20 nt, Human
guggaggcugcagugagcug

SEQ ID NO: 433681 - RNA, 21 nt, Human
gugggcucuccccuccccucc

SEQ ID NO: 433682 - RNA, 21 nt, Human
uaaaaaaaugccagaucccac

SEQ ID NO: 433683 - RNA, 22 nt, Human
uaaaaaaaugccagaucccacc

SEQ ID NO: 433684 - RNA, 23 nt, Human
uaacgggaggaggaggguuuuua

SEQ ID NO: 433685 - RNA, 22 nt, Human
uaccacugcacuccagccuggg

SEQ ID NO: 433686 - RNA, 19 nt, Human
uaccccagaccaaaaugcc

SEQ ID NO: 433687 - RNA, 22 nt, Human
uacgcggaagaggagagacugg

SEQ ID NO: 433688 - RNA, 22 nt, Human
uacuucagcuuuuuuuuugucu

SEQ ID NO: 433689 - RNA, 22 nt, Human
uagaaaaucaacaggaucaagc

SEQ ID NO: 433690 - RNA, 20 nt, Human
ucaggaccuaggugguggug

SEQ ID NO: 433691 - RNA, 21 nt, Human
ucaggaccuaggugguggugg

SEQ ID NO: 433692 - RNA, 23 nt, Human
ucauaccacugcacuccagccug

SEQ ID NO: 433693 - RNA, 19 nt, Human
uccagccugggugacugag

SEQ ID NO: 433694 - RNA, 20 nt, Human
uccagccugggugacugaga

SEQ ID NO: 433695 - RNA, 26 nt, Human
ucccggggggagaggggagggguggg

SEQ ID NO: 433696 - RNA, 24 nt, Human
uccugggucaccccugcugaaccc

SEQ ID NO: 433697 - RNA, 22 nt, Human
uccuugggguggaaagcauggc

SEQ ID NO: 433698 - RNA, 22 nt, Human
uccuugggguggaaagcauggc

SEQ ID NO: 433699 - RNA, 22 nt, Human
ucgcuugagcccaggaggugga

SEQ ID NO: 433700 - RNA, 24 nt, Human
ucgcuugagcccaggagguggagg

SEQ ID NO: 433701 - RNA, 25 nt, Human
ucucagaggguccacggcccugguu

SEQ ID NO: 433702 - RNA, 25 nt, Human
ucuugggaaaaaaaaagaaagaaaa

SEQ ID NO: 433703 - RNA, 19 nt, Human
ugaaaaaucaagguccugg

SEQ ID NO: 433704 - RNA, 22 nt, Human
ugaccugacagcccccaauucc

SEQ ID NO: 433705 - RNA, 18 nt, Human
ugagagagaacccaucuu

SEQ ID NO: 433706 - RNA, 25 nt, Human
ugagaugcugauaaaaaaaaaaaaa

SEQ ID NO: 433707 - RNA, 21 nt, Human
ugaggagaccccaaugccuga

SEQ ID NO: 433708 - RNA, 19 nt, Human
ugagggagaggaugggggc

SEQ ID NO: 433709 - RNA, 24 nt, Human
ugaggugggaguaucgcuugagcc

SEQ ID NO: 433710 - RNA, 25 nt, Human
ugaggugggaguaucgcuugagccc

SEQ ID NO: 433711 - RNA, 20 nt, Human
ugcccacggggcccccccac

SEQ ID NO: 433712 - RNA, 20 nt, Human
ugccgucugcucccugcugg

SEQ ID NO: 433713 - RNA, 23 nt, Human
ugccugaacgagaccccagagug

SEQ ID NO: 433714 - RNA, 20 nt, Human
ugccuggaguaggggaaugg

SEQ ID NO: 433715 - RNA, 23 nt, Human
uggaaggaaaaacaacccagaaa

SEQ ID NO: 433716 - RNA, 24 nt, Human
uggacugucauaaaaaaaugccag

SEQ ID NO: 433717 - RNA, 26 nt, Human
uggcagggaggggguugaccggaacg

SEQ ID NO: 433718 - RNA, 18 nt, Human
uggcagggaggggguugg

SEQ ID NO: 433719 - RNA, 19 nt, Human
ugggaggcugaggugggag

SEQ ID NO: 433720 - RNA, 23 nt, Human
ugggaggcugaggugggaguauc

SEQ ID NO: 433721 - RNA, 24 nt, Human
ugggaggcugaggugggaguaucg

SEQ ID NO: 433722 - RNA, 20 nt, Human
ugggcgaugcggcuucuugg

SEQ ID NO: 433723 - RNA, 23 nt, Human
ugggcucuccccuccccuccccc

SEQ ID NO: 433724 - RNA, 21 nt, Human
ugggggugggguugauggcag

SEQ ID NO: 433725 - RNA, 21 nt, Human
uggggugagggagaggauggg

SEQ ID NO: 433726 - RNA, 20 nt, Human
ugggguggaaagcauggcag

SEQ ID NO: 433727 - RNA, 27 nt, Human
uggugggcucuccccuccccucccccg

SEQ ID NO: 433728 - RNA, 24 nt, Human
ugucauaaaaaaaugccagauccc

SEQ ID NO: 433729 - RNA, 19 nt, Human
ugucguguggcagguuagg

SEQ ID NO: 433730 - RNA, 21 nt, Human
ugucguguggcagguuaggag

SEQ ID NO: 433731 - RNA, 20 nt, Human
uuaaauaauaacgggaggag

SEQ ID NO: 433732 - RNA, 21 nt, Human
uuaggagaggugccaaccuug

SEQ ID NO: 433733 - RNA, 21 nt, Human
uucagcgcaucucaggaccua

SEQ ID NO: 433734 - RNA, 19 nt, Human
aggaagcagaguguggagc

SEQ ID NO: 433735 - RNA, 18 nt, Human
agggccggaggcugaggc

SEQ ID NO: 433736 - RNA, 25 nt, Human
cagcgcuaaauaaaugguacuuccu

SEQ ID NO: 433737 - RNA, 19 nt, Human
ccgcaugagauuauuuuau

SEQ ID NO: 433738 - RNA, 22 nt, Human
cuaaauaaaugguacuuccuuc

SEQ ID NO: 433739 - RNA, 22 nt, Human
cucaucuacacagugcacgguc

SEQ ID NO: 433740 - RNA, 22 nt, Human
cuuccuucgcccuccccucgga

SEQ ID NO: 433741 - RNA, 18 nt, Human
gagcgaguugacucgaaa

SEQ ID NO: 433742 - RNA, 18 nt, Human
ggaacagaacaagggcug

SEQ ID NO: 433743 - RNA, 20 nt, Human
ggccggaggcugaggccgag

SEQ ID NO: 433744 - RNA, 18 nt, Human
guggagcgguaucugucc

SEQ ID NO: 433745 - RNA, 19 nt, Human
uccagggccggaggcugag

SEQ ID NO: 433746 - RNA, 22 nt, Human
ugacucgaaaccauuucagcac

SEQ ID NO: 433747 - RNA, 22 nt, Human
uuauuaaaaaacucaaaggaag

SEQ ID NO: 433748 - RNA, 25 nt, Human
acaaauccagggaucagcuguccca

SEQ ID NO: 433749 - RNA, 23 nt, Human
acgcagaggcggcggcucgggcu

SEQ ID NO: 433750 - RNA, 24 nt, Human
cacaaauccagggaucagcugucc

SEQ ID NO: 433751 - RNA, 25 nt, Human
cacaaauccagggaucagcuguccc

SEQ ID NO: 433752 - RNA, 18 nt, Human
cacaaucacucaacaaac

SEQ ID NO: 433753 - RNA, 21 nt, Human
cagcuggggcagcagcggcgg

SEQ ID NO: 433754 - RNA, 24 nt, Human
ccagcacuagcggcuggggcuccu

SEQ ID NO: 433755 - RNA, 22 nt, Human
cccauccccaaggccgcgaccg

SEQ ID NO: 433756 - RNA, 24 nt, Human
cccauccccaaggccgcgaccgcc

SEQ ID NO: 433757 - RNA, 24 nt, Human
ccucuuucacaaucacucaacaaa

SEQ ID NO: 433758 - RNA, 20 nt, Human
cgcccauccccaaggccgcg

SEQ ID NO: 433759 - RNA, 19 nt, Human
cuccagcuggggcagcagc

SEQ ID NO: 433760 - RNA, 22 nt, Human
gcagcagcggcggccaccagca

SEQ ID NO: 433761 - RNA, 23 nt, Human
gcggcucgggcuccagcuggggc

SEQ ID NO: 433762 - RNA, 18 nt, Human
gcggcuggggcuccgccc

SEQ ID NO: 433763 - RNA, 19 nt, Human
ggccaccagcacuagcggc

SEQ ID NO: 433764 - RNA, 23 nt, Human
uagcgugacacaaauccagggau

SEQ ID NO: 433765 - RNA, 19 nt, Human
uccccaaggccgcgaccgc

SEQ ID NO: 433766 - RNA, 20 nt, Human
uucacaaucacucaacaaac

SEQ ID NO: 433767 - RNA, 27 nt, Human
uuuuuuuuuuuuuucccgaaggccccc

SEQ ID NO: 433768 - RNA, 21 nt, Human
uuuuuuuuuuuuuuuucccga

SEQ ID NO: 433769 - RNA, 18 nt, Human
aggcagcugcuccgcgcc

SEQ ID NO: 433770 - RNA, 22 nt, Human
cacccggccgcgcgacacgucc

SEQ ID NO: 433771 - RNA, 24 nt, Human
ccacccggccgcgcgacacguccc

SEQ ID NO: 433772 - RNA, 21 nt, Human
ccaggguaccgaccgaggcca

SEQ ID NO: 433773 - RNA, 27 nt, Human
ccccgccggucucggccaccauguccg

SEQ ID NO: 433774 - RNA, 24 nt, Human
cgcgacgcucgcuguccccgaggg

SEQ ID NO: 433775 - RNA, 24 nt, Human
cgcucgcuguccccgagggcccgc

SEQ ID NO: 433776 - RNA, 25 nt, Human
cggccgcgcgacacgucccccaccc

SEQ ID NO: 433777 - RNA, 26 nt, Human
uaccgaccgaggccacccggccgcgc

SEQ ID NO: 433778 - RNA, 26 nt, Human
uccgcgcccaggguaccgaccgaggc

SEQ ID NO: 433779 - RNA, 18 nt, Human
uguccccgagggcccgcu

SEQ ID NO: 433780 - RNA, 23 nt, Human
uucaaugaaugaaaaacucagug

SEQ ID NO: 433781 - RNA, 24 nt, Human
uucaaugaaugaaaaacucagugc

SEQ ID NO: 433782 - RNA, 18 nt, Human
aaacugcaaucaaaaaag

SEQ ID NO: 433783 - RNA, 19 nt, Human
aagaagcccauguucaugc

SEQ ID NO: 433784 - RNA, 26 nt, Human
aagaagcccauguucaugcugaaacc

SEQ ID NO: 433785 - RNA, 22 nt, Human
acaaggaagcaaauccccuuca

SEQ ID NO: 433786 - RNA, 20 nt, Human
agacagcaagaagcccaugu

SEQ ID NO: 433787 - RNA, 22 nt, Human
agagacagacagcaagaagccc

SEQ ID NO: 433788 - RNA, 19 nt, Human
aguggaggaugaaagugga

SEQ ID NO: 433789 - RNA, 21 nt, Human
augcugaaaccugaaaaaucc

SEQ ID NO: 433790 - RNA, 25 nt, Human
caagaaaaagaagaggguaaaacac

SEQ ID NO: 433791 - RNA, 20 nt, Human
cacaccgagaaacuuuacau

SEQ ID NO: 433792 - RNA, 21 nt, Human
caccauggaguuauuuugaag

SEQ ID NO: 433793 - RNA, 22 nt, Human
caugcugaaaccugaaaaaucc

SEQ ID NO: 433794 - RNA, 20 nt, Human
cccauguucaugcugaaacc

SEQ ID NO: 433795 - RNA, 21 nt, Human
cgggaggcugggcccggaggg

SEQ ID NO: 433796 - RNA, 21 nt, Human
cugaaaccugaaaaaucccuc

SEQ ID NO: 433797 - RNA, 20 nt, Human
gcucuuggaugcaggugcuc

SEQ ID NO: 433798 - RNA, 24 nt, Human
ggacggcgcccgcuccggcuucca

SEQ ID NO: 433799 - RNA, 27 nt, Human
uacacaacuguucaucgucuuacauua

SEQ ID NO: 433800 - RNA, 19 nt, Human
uacacuugcuacaccuuga

SEQ ID NO: 433801 - RNA, 23 nt, Human
uacauaacaaggaagcaaauccc

SEQ ID NO: 433802 - RNA, 24 nt, Human
uacguguugaggaguuccaagaaa

SEQ ID NO: 433803 - RNA, 18 nt, Human
uaggaugcaauuauuuuc

SEQ ID NO: 433804 - RNA, 28 nt, Human
uaggaugcaauuauuuucuccacaacuu

SEQ ID NO: 433805 - RNA, 25 nt, Human
uaguagggauaaagcuuaagucuac

SEQ ID NO: 433806 - RNA, 23 nt, Human
uauaaacugcaaucaaaaaagua

SEQ ID NO: 433807 - RNA, 20 nt, Human
uccccggagcugggcugggg

SEQ ID NO: 433808 - RNA, 21 nt, Human
ugaaguugcaaguuauuuuuu

SEQ ID NO: 433809 - RNA, 19 nt, Human
ugcuaucuguguggguaca

SEQ ID NO: 433810 - RNA, 26 nt, Human
ugcugaaaccugaaaaaucccuccaa

SEQ ID NO: 433811 - RNA, 18 nt, Human
ugggcccggagggcgcga

SEQ ID NO: 433812 - RNA, 19 nt, Human
ugucaaagaaguuaugaag

SEQ ID NO: 433813 - RNA, 26 nt, Human
uucuccacaacuuagguacaugagaa

SEQ ID NO: 433814 - RNA, 19 nt, Human
aagaacucaaaucucuggc

SEQ ID NO: 433815 - RNA, 18 nt, Human
caaaucucuggccugccu

SEQ ID NO: 433816 - RNA, 22 nt, Human
ccccaggcuugucacuuaaucu

SEQ ID NO: 433817 - RNA, 20 nt, Human
ccuucuaugugcuaccccag

SEQ ID NO: 433818 - RNA, 24 nt, Human
ccuucuaugugcuaccccaggcuu

SEQ ID NO: 433819 - RNA, 22 nt, Human
cucugcaccguuccacagucuc

SEQ ID NO: 433820 - RNA, 19 nt, Human
cuucuggcucugcaccguu

SEQ ID NO: 433821 - RNA, 20 nt, Human
ucauuggcuggucuugcaag

SEQ ID NO: 433822 - RNA, 19 nt, Human
ugaaaggugaguuccuggc

SEQ ID NO: 433823 - RNA, 20 nt, Human
ugaguuccuggcccaguggc

SEQ ID NO: 433824 - RNA, 24 nt, Human
ugcaccguuccacagucucuuccu

SEQ ID NO: 433825 - RNA, 21 nt, Human
aaaagaagagggagacaggag

SEQ ID NO: 433826 - RNA, 22 nt, Human
aaagauggaggugcggaaaaga

SEQ ID NO: 433827 - RNA, 19 nt, Human
aaggggaggcaagagaggc

SEQ ID NO: 433828 - RNA, 20 nt, Human
acaguaacugguguugcccc

SEQ ID NO: 433829 - RNA, 23 nt, Human
accgcuggucccuaaaaucccca

SEQ ID NO: 433830 - RNA, 21 nt, Human
acuagaggccaaucguggggu

SEQ ID NO: 433831 - RNA, 21 nt, Human
acucucccacuggaacucugg

SEQ ID NO: 433832 - RNA, 21 nt, Human
aggcaagagaggccagccuag

SEQ ID NO: 433833 - RNA, 18 nt, Human
agggagggagaaacagug

SEQ ID NO: 433834 - RNA, 23 nt, Human
aggggcugggugaugaguggggu

SEQ ID NO: 433835 - RNA, 18 nt, Human
aggugacucaccacacca

SEQ ID NO: 433836 - RNA, 18 nt, Human
auuggaaaggccagacuc

SEQ ID NO: 433837 - RNA, 21 nt, Human
auuucaggguggcugggcacu

SEQ ID NO: 433838 - RNA, 23 nt, Human
auuugguuggcagcagcaagagg

SEQ ID NO: 433839 - RNA, 24 nt, Human
auuugguuggcagcagcaagaggg

SEQ ID NO: 433840 - RNA, 18 nt, Human
caacucucgaagauaauc

SEQ ID NO: 433841 - RNA, 20 nt, Human
caagagaggccagccuagca

SEQ ID NO: 433842 - RNA, 21 nt, Human
caagagggccgacuagaggug

SEQ ID NO: 433843 - RNA, 21 nt, Human
caccagggcaccgccuuagcc

SEQ ID NO: 433844 - RNA, 18 nt, Human
caccagggugaugcucac

SEQ ID NO: 433845 - RNA, 24 nt, Human
cacugaggcaccauuauuggggau

SEQ ID NO: 433846 - RNA, 21 nt, Human
cacuggaacucuggggcccac

SEQ ID NO: 433847 - RNA, 26 nt, Human
cagacacauacacacaugcauggagg

SEQ ID NO: 433848 - RNA, 23 nt, Human
caggagggaaccguacucuccca

SEQ ID NO: 433849 - RNA, 19 nt, Human
caggauaggggcugccccc

SEQ ID NO: 433850 - RNA, 18 nt, Human
caggguggcugggcacug

SEQ ID NO: 433851 - RNA, 21 nt, Human
caguaccaccuuauacagggg

SEQ ID NO: 433852 - RNA, 18 nt, Human
ccacaaagauggaggugc

SEQ ID NO: 433853 - RNA, 22 nt, Human
ccacugaggcaccauuauuggg

SEQ ID NO: 433854 - RNA, 23 nt, Human
ccacugaggcaccauuauugggg

SEQ ID NO: 433855 - RNA, 21 nt, Human
cccacacgccugcuucagacg

SEQ ID NO: 433856 - RNA, 24 nt, Human
cccccacaaacagugccucaugcu

SEQ ID NO: 433857 - RNA, 19 nt, Human
ccccuccaaaagggagggg

SEQ ID NO: 433858 - RNA, 20 nt, Human
cccuggaaacugggaaugag

SEQ ID NO: 433859 - RNA, 22 nt, Human
cccuguguccaugcuggaaccc

SEQ ID NO: 433860 - RNA, 25 nt, Human
ccuaaaauccccaggccccagacuu

SEQ ID NO: 433861 - RNA, 18 nt, Human
cuaaaauccccaggcccc

SEQ ID NO: 433862 - RNA, 20 nt, Human
cuccucuguggucccugaaa

SEQ ID NO: 433863 - RNA, 21 nt, Human
cugggugaugagugggguggg

SEQ ID NO: 433864 - RNA, 20 nt, Human
cuuggcaacuaguguccaaa

SEQ ID NO: 433865 - RNA, 18 nt, Human
cuuuuuggcaacaaaagg

SEQ ID NO: 433866 - RNA, 20 nt, Human
gagcucggccugagcaacag

SEQ ID NO: 433867 - RNA, 21 nt, Human
gauggucacaaccgcuggucc

SEQ ID NO: 433868 - RNA, 21 nt, Human
gcacaccaguccucacagaca

SEQ ID NO: 433869 - RNA, 18 nt, Human
gccccaggcuaccccugu

SEQ ID NO: 433870 - RNA, 24 nt, Human
ggaaaagaagagggagacaggagg

SEQ ID NO: 433871 - RNA, 21 nt, Human
ggauuucaggguggcugggca

SEQ ID NO: 433872 - RNA, 24 nt, Human
ggccaaggggaggcaagagaggcc

SEQ ID NO: 433873 - RNA, 20 nt, Human
gggaggcaagagaggccagc

SEQ ID NO: 433874 - RNA, 20 nt, Human
gggauuucaggguggcuggg

SEQ ID NO: 433875 - RNA, 21 nt, Human
gggcaaggagauggggauugg

SEQ ID NO: 433876 - RNA, 19 nt, Human
gggcugggugaugaguggg

SEQ ID NO: 433877 - RNA, 19 nt, Human
ggugcggaaaagaagaggg

SEQ ID NO: 433878 - RNA, 19 nt, Human
guaccagacugcccccagc

SEQ ID NO: 433879 - RNA, 24 nt, Human
gucccuaaaauccccaggccccag

SEQ ID NO: 433880 - RNA, 18 nt, Human
guuggcagcagcaagagg

SEQ ID NO: 433881 - RNA, 19 nt, Human
uaagccccaggcuaccccu

SEQ ID NO: 433882 - RNA, 19 nt, Human
uacacacaugcauggaggc

SEQ ID NO: 433883 - RNA, 23 nt, Human
uccacaaagauggaggugcggaa

SEQ ID NO: 433884 - RNA, 19 nt, Human
uccacgcacaccaguccuc

SEQ ID NO: 433885 - RNA, 22 nt, Human
ucccuaaaauccccaggcccca

SEQ ID NO: 433886 - RNA, 19 nt, Human
uccguaccagacugccccc

SEQ ID NO: 433887 - RNA, 18 nt, Human
uccuugaggaugccagug

SEQ ID NO: 433888 - RNA, 27 nt, Human
ucgcuggcaaccaggagcucggccuga

SEQ ID NO: 433889 - RNA, 19 nt, Human
ucuauaagccccaggcuac

SEQ ID NO: 433890 - RNA, 18 nt, Human
ucuguuaucuccauuugc

SEQ ID NO: 433891 - RNA, 19 nt, Human
ugcccccagccugacgcuu

SEQ ID NO: 433892 - RNA, 19 nt, Human
ugccccggccaaggggagg

SEQ ID NO: 433893 - RNA, 18 nt, Human
uggaacccaggauagggg

SEQ ID NO: 433894 - RNA, 25 nt, Human
uggaacccaggauaggggcugcccc

SEQ ID NO: 433895 - RNA, 18 nt, Human
uggaacucuggggcccac

SEQ ID NO: 433896 - RNA, 21 nt, Human
uggcagcagcaagagggccga

SEQ ID NO: 433897 - RNA, 23 nt, Human
uggcagcagcaagagggccgacu

SEQ ID NO: 433898 - RNA, 18 nt, Human
uucucuauaagccccagg

SEQ ID NO: 433899 - RNA, 24 nt, Human
uuuuuuuuuuuuuuuucagucuca

SEQ ID NO: 433900 - RNA, 24 nt, Human
uuuuuuuuuuuuuuuuuuuuucag

SEQ ID NO: 433901 - RNA, 19 nt, Human
aaacacucccaugaucccc

SEQ ID NO: 433902 - RNA, 24 nt, Human
aagcaucccugcaauugauggggc

SEQ ID NO: 433903 - RNA, 21 nt, Human
acaaacacucccaugaucccc

SEQ ID NO: 433904 - RNA, 21 nt, Human
acauauugcuaggggugaugg

SEQ ID NO: 433905 - RNA, 19 nt, Human
acccaggagccccacucac

SEQ ID NO: 433906 - RNA, 23 nt, Human
agagggcaggggaggagacugag

SEQ ID NO: 433907 - RNA, 19 nt, Human
agccccacucacaaacacu

SEQ ID NO: 433908 - RNA, 24 nt, Human
aggcugcccccaggcucaccccag

SEQ ID NO: 433909 - RNA, 23 nt, Human
auggcaacacuucagacuuuaau

SEQ ID NO: 433910 - RNA, 23 nt, Human
caaacacucccaugauccccaca

SEQ ID NO: 433911 - RNA, 21 nt, Human
cacucaggcuuucuccucuga

SEQ ID NO: 433912 - RNA, 24 nt, Human
cacucaggcuuucuccucugaguu

SEQ ID NO: 433913 - RNA, 19 nt, Human
cagaggcaauccucagcuu

SEQ ID NO: 433914 - RNA, 21 nt, Human
cagcaggcaggcugcccccag

SEQ ID NO: 433915 - RNA, 20 nt, Human
cagcugcccuacucucggcc

SEQ ID NO: 433916 - RNA, 19 nt, Human
caggcaggcugcccccagg

SEQ ID NO: 433917 - RNA, 18 nt, Human
cagggccuucugagcccc

SEQ ID NO: 433918 - RNA, 24 nt, Human
ccaggucucuuuugccucugguuc

SEQ ID NO: 433919 - RNA, 24 nt, Human
cccaggagccccacucacaaacac

SEQ ID NO: 433920 - RNA, 21 nt, Human
cccagugcucagcauugcaug

SEQ ID NO: 433921 - RNA, 24 nt, Human
ccccagagucuggaggcagcugcc

SEQ ID NO: 433922 - RNA, 21 nt, Human
cccccaggcucaccccagugc

SEQ ID NO: 433923 - RNA, 28 nt, Human
cccccuugagcucugugggggugggggc

SEQ ID NO: 433924 - RNA, 18 nt, Human
ccccuggacaggcucucu

SEQ ID NO: 433925 - RNA, 21 nt, Human
cucccaugauccccacaaucc

SEQ ID NO: 433926 - RNA, 20 nt, Human
cucgcccgcccuccucccuc

SEQ ID NO: 433927 - RNA, 25 nt, Human
cucuccggcugcgcccagcacugcc

SEQ ID NO: 433928 - RNA, 18 nt, Human
cucucuccggcugcgccc

SEQ ID NO: 433929 - RNA, 19 nt, Human
cugcccccaggcucacccc

SEQ ID NO: 433930 - RNA, 24 nt, Human
cuucagacuuuaauacauauugcu

SEQ ID NO: 433931 - RNA, 23 nt, Human
cuuccaggucucuuuugccucug

SEQ ID NO: 433932 - RNA, 23 nt, Human
gacuuccaggucucuuuugccuc

SEQ ID NO: 433933 - RNA, 21 nt, Human
gagcagggccuucugagcccc

SEQ ID NO: 433934 - RNA, 22 nt, Human
gaugccccagggauuugggggu

SEQ ID NO: 433935 - RNA, 18 nt, Human
gcuaggucucacccagga

SEQ ID NO: 433936 - RNA, 21 nt, Human
gcuccagcucgcccgcccucc

SEQ ID NO: 433937 - RNA, 23 nt, Human
ggagacugagggucagcagaggc

SEQ ID NO: 433938 - RNA, 23 nt, Human
ggagccccacucacaaacacucu

SEQ ID NO: 433939 - RNA, 22 nt, Human
ggaugccccagggauuuggggg

SEQ ID NO: 433940 - RNA, 21 nt, Human
ggcaggggaggagacugaggg

SEQ ID NO: 433941 - RNA, 21 nt, Human
ggcaggggaggagacugaggg

SEQ ID NO: 433942 - RNA, 24 nt, Human
gggcaggcaagcuggcuacuuucc

SEQ ID NO: 433943 - RNA, 23 nt, Human
gggcaggggaggagacugagggu

SEQ ID NO: 433944 - RNA, 20 nt, Human
gguucugguccccaugcugg

SEQ ID NO: 433945 - RNA, 21 nt, Human
gugggggugggggcuaggucu

SEQ ID NO: 433946 - RNA, 19 nt, Human
guucugguccccaugcugg

SEQ ID NO: 433947 - RNA, 21 nt, Human
uauccucagccccccaccccc

SEQ ID NO: 433948 - RNA, 24 nt, Human
ucacaaacacucccaugaucccca

SEQ ID NO: 433949 - RNA, 19 nt, Human
ucagcccccuggacaggcu

SEQ ID NO: 433950 - RNA, 19 nt, Human
uccccacaauccucgcccu

SEQ ID NO: 433951 - RNA, 20 nt, Human
uccccaugcugggacuucca

SEQ ID NO: 433952 - RNA, 19 nt, Human
uccucugaguucagcaggc

SEQ ID NO: 433953 - RNA, 24 nt, Human
ucggccagaaugagguguuacuca

SEQ ID NO: 433954 - RNA, 22 nt, Human
ucgggcucccgcugccugccgg

SEQ ID NO: 433955 - RNA, 19 nt, Human
ucuagcgcccgucucccca

SEQ ID NO: 433956 - RNA, 21 nt, Human
ucucucgggcucccgcugccu

SEQ ID NO: 433957 - RNA, 22 nt, Human
ucucucgggcucccgcugccug

SEQ ID NO: 433958 - RNA, 22 nt, Human
ucugugggggugggggcuaggu

SEQ ID NO: 433959 - RNA, 22 nt, Human
ucuuuugccucugguucuugac

SEQ ID NO: 433960 - RNA, 19 nt, Human
ugagcucuguggggguggg

SEQ ID NO: 433961 - RNA, 19 nt, Human
ugauggggcaggcaagcug

SEQ ID NO: 433962 - RNA, 18 nt, Human
ugccccagggauuugggg

SEQ ID NO: 433963 - RNA, 23 nt, Human
ugcuaggggugauggaagcugag

SEQ ID NO: 433964 - RNA, 24 nt, Human
ugcuaggggugauggaagcugagu

SEQ ID NO: 433965 - RNA, 20 nt, Human
uggaagcugaguagggcauc

SEQ ID NO: 433966 - RNA, 19 nt, Human
uggacaggcucucuccggc

SEQ ID NO: 433967 - RNA, 23 nt, Human
uggaugccccagggauuuggggg

SEQ ID NO: 433968 - RNA, 22 nt, Human
uggcaacacuucagacuuuaau

SEQ ID NO: 433969 - RNA, 24 nt, Human
ugguucuugaccagucaggaaucu

SEQ ID NO: 433970 - RNA, 24 nt, Human
ugucagcaggcaggcugcccccag

SEQ ID NO: 433971 - RNA, 19 nt, Human
ugugggggugggggcuagg

SEQ ID NO: 433972 - RNA, 21 nt, Human
uucagacuuuaauacauauug

SEQ ID NO: 433973 - RNA, 24 nt, Human
uucugagccccaaaucuagcgccc

SEQ ID NO: 433974 - RNA, 19 nt, Human
uucuggaugccccagggau

SEQ ID NO: 433975 - RNA, 22 nt, Human
uuucauacugggcggggccuuc

SEQ ID NO: 433976 - RNA, 20 nt, Human
uuucccaacuaugaggcugg

SEQ ID NO: 433977 - RNA, 20 nt, Human
aaauaaacaaaggagagccg

SEQ ID NO: 433978 - RNA, 21 nt, Human
aagagcgcuuguaggagggcg

SEQ ID NO: 433979 - RNA, 19 nt, Human
accccgcgcucgggagacc

SEQ ID NO: 433980 - RNA, 22 nt, Human
agcuggaggcggcggaaggggg

SEQ ID NO: 433981 - RNA, 22 nt, Human
aggcggcggaagggggugcugg

SEQ ID NO: 433982 - RNA, 20 nt, Human
augaguucuuugaccaguuu

SEQ ID NO: 433983 - RNA, 18 nt, Human
caaaccccgcgcucggga

SEQ ID NO: 433984 - RNA, 24 nt, Human
caaaccccgcgcucgggagaccag

SEQ ID NO: 433985 - RNA, 24 nt, Human
caagaagcucggaauucuccugcu

SEQ ID NO: 433986 - RNA, 22 nt, Human
cacacucaccauaagcuggagg

SEQ ID NO: 433987 - RNA, 22 nt, Human
cacccagacggccagcaagagc

SEQ ID NO: 433988 - RNA, 24 nt, Human
cagguauugcagucugcuuugaua

SEQ ID NO: 433989 - RNA, 18 nt, Human
cagugccgccgccucugc

SEQ ID NO: 433990 - RNA, 25 nt, Human
ccccacccgacgcggccccugggcu

SEQ ID NO: 433991 - RNA, 23 nt, Human
ccccagccacacucaccauaagc

SEQ ID NO: 433992 - RNA, 20 nt, Human
ccccgaauucccgugcgcuc

SEQ ID NO: 433993 - RNA, 18 nt, Human
ccccgcccuggcgcgccu

SEQ ID NO: 433994 - RNA, 21 nt, Human
ccccuuagcugcucucuuuca

SEQ ID NO: 433995 - RNA, 22 nt, Human
cccgcgcucgggagaccaggaa

SEQ ID NO: 433996 - RNA, 23 nt, Human
cccgugcgcucucugcaccccca

SEQ ID NO: 433997 - RNA, 25 nt, Human
ccuccagauguggggugcucggcuc

SEQ ID NO: 433998 - RNA, 21 nt, Human
ccuccgcgcugcuuggagaac

SEQ ID NO: 433999 - RNA, 21 nt, Human
ccugccugggcgcggcgaggg

SEQ ID NO: 434000 - RNA, 21 nt, Human
ccugggcuccguccgccgucc

SEQ ID NO: 434001 - RNA, 26 nt, Human
cgcacggggacuggaaaggaggugac

SEQ ID NO: 434002 - RNA, 19 nt, Human
cggccccugggcuccgucc

SEQ ID NO: 434003 - RNA, 20 nt, Human
cgggagagaauaaagaggaa

SEQ ID NO: 434004 - RNA, 26 nt, Human
cggggcggggcccacggcuggcuguc

SEQ ID NO: 434005 - RNA, 21 nt, Human
cgggugcugcuggggggcugg

SEQ ID NO: 434006 - RNA, 22 nt, Human
cgggugcugcuggggggcuggg

SEQ ID NO: 434007 - RNA, 19 nt, Human
cuccuuccuucuucagccc

SEQ ID NO: 434008 - RNA, 19 nt, Human
cugcacccccagccacacu

SEQ ID NO: 434009 - RNA, 23 nt, Human
cugcuggggggcuggggcgaagg

SEQ ID NO: 434010 - RNA, 19 nt, Human
cugcuuggagaaccacuuc

SEQ ID NO: 434011 - RNA, 19 nt, Human
cuguucccggggcuggcag

SEQ ID NO: 434012 - RNA, 19 nt, Human
cuucaaaccccgcgcucgg

SEQ ID NO: 434013 - RNA, 20 nt, Human
gacucuggcuggaggaggcg

SEQ ID NO: 434014 - RNA, 23 nt, Human
gagcgcccccgccccaccgcggg

SEQ ID NO: 434015 - RNA, 18 nt, Human
gcagagcgcccccgcccc

SEQ ID NO: 434016 - RNA, 22 nt, Human
gcccacggcuggcuguccccuc

SEQ ID NO: 434017 - RNA, 22 nt, Human
gccccagacccccgaauucccg

SEQ ID NO: 434018 - RNA, 22 nt, Human
ggaaagcuuccuuucuccccac

SEQ ID NO: 434019 - RNA, 18 nt, Human
ggacaggcgggaccuggc

SEQ ID NO: 434020 - RNA, 18 nt, Human
ggcggggcccacggcugg

SEQ ID NO: 434021 - RNA, 26 nt, Human
gggaccuggcggccacuggguggggg

SEQ ID NO: 434022 - RNA, 23 nt, Human
gggagaccaggaagggggcuggg

SEQ ID NO: 434023 - RNA, 25 nt, Human
gggcagcgcagccagucccgggccc

SEQ ID NO: 434024 - RNA, 27 nt, Human
gggcccacggcuggcuguccccuccag

SEQ ID NO: 434025 - RNA, 22 nt, Human
gggcuggggugaucgagggagc

SEQ ID NO: 434026 - RNA, 23 nt, Human
ggggcuggcagagcgcccccgcc

SEQ ID NO: 434027 - RNA, 21 nt, Human
gggggcuggggcgaaggggga

SEQ ID NO: 434028 - RNA, 24 nt, Human
gggugcugcuggggggcuggggcg

SEQ ID NO: 434029 - RNA, 19 nt, Human
guccccuccagaugugggg

SEQ ID NO: 434030 - RNA, 22 nt, Human
uagaaaauaaacaaaggagagc

SEQ ID NO: 434031 - RNA, 20 nt, Human
uccugcuccggacgccgggg

SEQ ID NO: 434032 - RNA, 20 nt, Human
ucugcuguucccggggcugg

SEQ ID NO: 434033 - RNA, 27 nt, Human
ucuggagcgcaaggacucucaaucccg

SEQ ID NO: 434034 - RNA, 22 nt, Human
ucuuugaccaguuuccuagaac

SEQ ID NO: 434035 - RNA, 20 nt, Human
ugcuguucccggggcuggca

SEQ ID NO: 434036 - RNA, 27 nt, Human
uggaaaggaggugaccuucaaaccccg

SEQ ID NO: 434037 - RNA, 22 nt, Human
uggagaaccacuucagggcagc

SEQ ID NO: 434038 - RNA, 21 nt, Human
uggaggaggcggcggcagcgc

SEQ ID NO: 434039 - RNA, 23 nt, Human
uggcuguccccuccagauguggg

SEQ ID NO: 434040 - RNA, 20 nt, Human
ugggcaagaagcucggaauu

SEQ ID NO: 434041 - RNA, 24 nt, Human
ugucaggggcagcggcugcuuccu

SEQ ID NO: 434042 - RNA, 24 nt, Human
ugucuugaaaccuuucugucuucu

SEQ ID NO: 434043 - RNA, 23 nt, Human
uucaaaccccgcgcucgggagac

SEQ ID NO: 434044 - RNA, 22 nt, Human
uucccggggcuggcagagcgcc

SEQ ID NO: 434045 - RNA, 25 nt, Human
uugcuaaaaugauguacuacugcau

SEQ ID NO: 434046 - RNA, 18 nt, Human
uuuccacgcagguauugc

SEQ ID NO: 434047 - RNA, 19 nt, Human
aaagaacaaagcauccucc

SEQ ID NO: 434048 - RNA, 20 nt, Human
aaagagccuccccacccagc

SEQ ID NO: 434049 - RNA, 24 nt, Human
aaagcauccuccgccccggacccu

SEQ ID NO: 434050 - RNA, 26 nt, Human
aaagcauccuccgccccggacccuug

SEQ ID NO: 434051 - RNA, 23 nt, Human
aagagccuccccacccagggcac

SEQ ID NO: 434052 - RNA, 20 nt, Human
aagaggaaccaaaaccagaa

SEQ ID NO: 434053 - RNA, 20 nt, Human
aagcauccuccgccccggag

SEQ ID NO: 434054 - RNA, 19 nt, Human
acaaagcauccuccgcccc

SEQ ID NO: 434055 - RNA, 18 nt, Human
accggcuggucagccugg

SEQ ID NO: 434056 - RNA, 23 nt, Human
agaaggcccggggcacucacuga

SEQ ID NO: 434057 - RNA, 18 nt, Human
agcggcggcgggcgggcg

SEQ ID NO: 434058 - RNA, 19 nt, Human
aggaagaaggauggggugg

SEQ ID NO: 434059 - RNA, 19 nt, Human
aggauggggugggcagaag

SEQ ID NO: 434060 - RNA, 18 nt, Human
caaaaccagaaaagaaca

SEQ ID NO: 434061 - RNA, 21 nt, Human
caacacgaacacggcccuucc

SEQ ID NO: 434062 - RNA, 20 nt, Human
caccaugugucagcccugcc

SEQ ID NO: 434063 - RNA, 25 nt, Human
caccggccucugcccucgugggcac

SEQ ID NO: 434064 - RNA, 18 nt, Human
caccucugucccaacugc

SEQ ID NO: 434065 - RNA, 21 nt, Human
cacucagucccuguugaccuc

SEQ ID NO: 434066 - RNA, 20 nt, Human
cacuucugggccucugcccc

SEQ ID NO: 434067 - RNA, 23 nt, Human
cacuugcagcggcugcaaaucca

SEQ ID NO: 434068 - RNA, 19 nt, Human
cagcccugccucgagacag

SEQ ID NO: 434069 - RNA, 18 nt, Human
cagccuccucuccucucu

SEQ ID NO: 434070 - RNA, 22 nt, Human
caucaggagcagguuggggagg

SEQ ID NO: 434071 - RNA, 23 nt, Human
ccaaaaccagaaaagaacaaagc

SEQ ID NO: 434072 - RNA, 18 nt, Human
ccacugggccugcuccca

SEQ ID NO: 434073 - RNA, 19 nt, Human
ccacugggccugcucccac

SEQ ID NO: 434074 - RNA, 18 nt, Human
ccagaaaagaacaaagca

SEQ ID NO: 434075 - RNA, 19 nt, Human
ccagaucagaccaggagcu

SEQ ID NO: 434076 - RNA, 21 nt, Human
ccaggcuggcacuucugggcc

SEQ ID NO: 434077 - RNA, 23 nt, Human
cccacagcuccucaacagccugc

SEQ ID NO: 434078 - RNA, 22 nt, Human
cccauugcagagagguggggau

SEQ ID NO: 434079 - RNA, 25 nt, Human
ccccaggcuggcacuucugggccuc

SEQ ID NO: 434080 - RNA, 24 nt, Human
ccccccgcgaaagaggaaccaaaa

SEQ ID NO: 434081 - RNA, 22 nt, Human
cccccuggcaucucuggagagg

SEQ ID NO: 434082 - RNA, 22 nt, Human
ccccgggaagggcggcccagug

SEQ ID NO: 434083 - RNA, 20 nt, Human
ccccuuagcaccggccucug

SEQ ID NO: 434084 - RNA, 23 nt, Human
cccgguggcagcucgggccuccc

SEQ ID NO: 434085 - RNA, 18 nt, Human
cccuucuuccccaucccc

SEQ ID NO: 434086 - RNA, 25 nt, Human
ccgcgaaagaggaaccaaaaccaga

SEQ ID NO: 434087 - RNA, 21 nt, Human
ccggacccuuggggcuggguc

SEQ ID NO: 434088 - RNA, 23 nt, Human
ccuaaagagccuccccacccagc

SEQ ID NO: 434089 - RNA, 25 nt, Human
ccucccacugggccugcucccacag

SEQ ID NO: 434090 - RNA, 24 nt, Human
ccuccgggagacacgcccuggcuc

SEQ ID NO: 434091 - RNA, 20 nt, Human
ccucgagacaggacacuguc

SEQ ID NO: 434092 - RNA, 19 nt, Human
ccucugccccacucagucc

SEQ ID NO: 434093 - RNA, 23 nt, Human
ccuuccugccuguugucuagaag

SEQ ID NO: 434094 - RNA, 26 nt, Human
cgaaagaggaaccaaaaccagaaaag

SEQ ID NO: 434095 - RNA, 22 nt, Human
cgcgaaagaggaaccaaaacca

SEQ ID NO: 434096 - RNA, 25 nt, Human
cggccucugcccucgugggcaccuc

SEQ ID NO: 434097 - RNA, 21 nt, Human
cgggagacacgcccuggcuca

SEQ ID NO: 434098 - RNA, 22 nt, Human
cuaaagagccuccccacccagc

SEQ ID NO: 434099 - RNA, 21 nt, Human
cucccacugggccugcuccca

SEQ ID NO: 434100 - RNA, 19 nt, Human
cuccccaggcuggcacuuc

SEQ ID NO: 434101 - RNA, 29 nt, Human
cucccccaccccccgcgaaagaggaaccc

SEQ ID NO: 434102 - RNA, 18 nt, Human
cugagguucauccuuccu

SEQ ID NO: 434103 - RNA, 21 nt, Human
cugcucccacagcuccucaac

SEQ ID NO: 434104 - RNA, 25 nt, Human
cuggcagcccacaggccuccgggag

SEQ ID NO: 434105 - RNA, 19 nt, Human
cugggccucugccccacuc

SEQ ID NO: 434106 - RNA, 23 nt, Human
cuuccacacacuugcagcggcug

SEQ ID NO: 434107 - RNA, 26 nt, Human
cuucugggccucugccccacucaguc

SEQ ID NO: 434108 - RNA, 22 nt, Human
gaaagaggaaccaaaaccagaa

SEQ ID NO: 434109 - RNA, 18 nt, Human
gagaggaagaaggauggg

SEQ ID NO: 434110 - RNA, 22 nt, Human
gcaccaccugggggugcccuga

SEQ ID NO: 434111 - RNA, 19 nt, Human
gcggcccagugccccauca

SEQ ID NO: 434112 - RNA, 20 nt, Human
ggacccuuggggcugggucu

SEQ ID NO: 434113 - RNA, 19 nt, Human
ggggcugggucucccccag

SEQ ID NO: 434114 - RNA, 18 nt, Human
ggugggcagaaggggcug

SEQ ID NO: 434115 - RNA, 18 nt, Human
guagagcauacacgcccc

SEQ ID NO: 434116 - RNA, 25 nt, Human
uaccaacagccuccucuccucucug

SEQ ID NO: 434117 - RNA, 18 nt, Human
uagcuccagcggcggcgg

SEQ ID NO: 434118 - RNA, 23 nt, Human
uauggcaccaugugucagcccug

SEQ ID NO: 434119 - RNA, 21 nt, Human
ucagcccugccucgagacagg

SEQ ID NO: 434120 - RNA, 26 nt, Human
uccccagaucagaccaggagcuucca

SEQ ID NO: 434121 - RNA, 20 nt, Human
uccccaggcuggcacuucug

SEQ ID NO: 434122 - RNA, 22 nt, Human
uccccaggcuggcacuucuggg

SEQ ID NO: 434123 - RNA, 18 nt, Human
ucccccagcccugccacu

SEQ ID NO: 434124 - RNA, 20 nt, Human
ucccgggcccucaaucuugc

SEQ ID NO: 434125 - RNA, 23 nt, Human
ucccgggcccucaaucuugccuc

SEQ ID NO: 434126 - RNA, 23 nt, Human
uccgcaccaccugggggugcccu

SEQ ID NO: 434127 - RNA, 23 nt, Human
uccuggcagcccacaggccuccg

SEQ ID NO: 434128 - RNA, 18 nt, Human
ucuagaaggcccggggca

SEQ ID NO: 434129 - RNA, 18 nt, Human
ucucugggaaucuugucc

SEQ ID NO: 434130 - RNA, 33 nt, Human
ugccccacucagucccuguugaccucccccaac

SEQ ID NO: 434131 - RNA, 20 nt, Human
ugccuaagcccgguggcagc

SEQ ID NO: 434132 - RNA, 22 nt, Human
ugggaaucuugucccuucuucc

SEQ ID NO: 434133 - RNA, 20 nt, Human
ugggccucugccccacucag

SEQ ID NO: 434134 - RNA, 23 nt, Human
ugggccucugccccacucagucc

SEQ ID NO: 434135 - RNA, 18 nt, Human
uggggugggcagaagggg

SEQ ID NO: 434136 - RNA, 21 nt, Human
uucugggccucugccccacuc

SEQ ID NO: 434137 - RNA, 18 nt, Human
aaaaaaagaagaaucugc

SEQ ID NO: 434138 - RNA, 28 nt, Human
aaacaaaaaaaaaaaaaagaagaaucug

SEQ ID NO: 434139 - RNA, 24 nt, Human
aaacucugucucaaacaaaaaaaa

SEQ ID NO: 434140 - RNA, 20 nt, Human
aaacuugagacggcucggcg

SEQ ID NO: 434141 - RNA, 19 nt, Human
aaagagcugguagcacagg

SEQ ID NO: 434142 - RNA, 19 nt, Human
aacauggagaaaccccauc

SEQ ID NO: 434143 - RNA, 20 nt, Human
aacauggagaaaccccaucu

SEQ ID NO: 434144 - RNA, 21 nt, Human
aacauggagaaaccccaucuc

SEQ ID NO: 434145 - RNA, 19 nt, Human
aagcuggagggcaguggca

SEQ ID NO: 434146 - RNA, 18 nt, Human
aauuagccaggcauggug

SEQ ID NO: 434147 - RNA, 18 nt, Human
aauugccugaacccggga

SEQ ID NO: 434148 - RNA, 21 nt, Human
acaaaaaaaaaaaaaagaaga

SEQ ID NO: 434149 - RNA, 20 nt, Human
acaagagugaaacucugucu

SEQ ID NO: 434150 - RNA, 21 nt, Human
acaagagugaaacucugucuc

SEQ ID NO: 434151 - RNA, 18 nt, Human
accccaucucuacuaaaa

SEQ ID NO: 434152 - RNA, 24 nt, Human
acccgggagauggaggcugcagug

SEQ ID NO: 434153 - RNA, 24 nt, Human
accugaggucaggaguucgagacc

SEQ ID NO: 434154 - RNA, 20 nt, Human
acucuagaaaucuccagaua

SEQ ID NO: 434155 - RNA, 27 nt, Human
acugcacuccagcccaggcaacaagag

SEQ ID NO: 434156 - RNA, 18 nt, Human
agagugaaacucugucuc

SEQ ID NO: 434157 - RNA, 21 nt, Human
agauggaggcugcagugagcc

SEQ ID NO: 434158 - RNA, 24 nt, Human
agauggaggcugcagugagccgag

SEQ ID NO: 434159 - RNA, 20 nt, Human
agauuuuuuuuuuuuuuuuu

SEQ ID NO: 434160 - RNA, 23 nt, Human
agccaggcaugguggugcacgcc

SEQ ID NO: 434161 - RNA, 24 nt, Human
agcgaucuaucccaccuuggccuc

SEQ ID NO: 434162 - RNA, 19 nt, Human
aggaagcagaccaagcccc

SEQ ID NO: 434163 - RNA, 18 nt, Human
aggcaggagaauugccug

SEQ ID NO: 434164 - RNA, 24 nt, Human
aggcaggagaauugccugaacccg

SEQ ID NO: 434165 - RNA, 18 nt, Human
aggcaggcggaucaccug

SEQ ID NO: 434166 - RNA, 26 nt, Human
aggcaggcggaucaccugaggucagg

SEQ ID NO: 434167 - RNA, 24 nt, Human
aggcaugguggugcacgccuguaa

SEQ ID NO: 434168 - RNA, 26 nt, Human
aggcaugguggugcacgccuguaacc

SEQ ID NO: 434169 - RNA, 20 nt, Human
aggcugaggcaggagaauug

SEQ ID NO: 434170 - RNA, 21 nt, Human
aggcugaggcaggagaauugc

SEQ ID NO: 434171 - RNA, 21 nt, Human
aggucucuaaaaugccagucu

SEQ ID NO: 434172 - RNA, 21 nt, Human
aucaccugaggucaggaguuc

SEQ ID NO: 434173 - RNA, 24 nt, Human
aucaccugaggucaggaguucgag

SEQ ID NO: 434174 - RNA, 20 nt, Human
aucuugccacugcacuccag

SEQ ID NO: 434175 - RNA, 22 nt, Human
augaucagggcucacugcagcc

SEQ ID NO: 434176 - RNA, 23 nt, Human
caacaagagugaaacucugucuc

SEQ ID NO: 434177 - RNA, 18 nt, Human
caagaaaggcaaaaaaua

SEQ ID NO: 434178 - RNA, 22 nt, Human
caagccccugcccuggauucua

SEQ ID NO: 434179 - RNA, 24 nt, Human
caaggcaggcggaucaccugaggu

SEQ ID NO: 434180 - RNA, 26 nt, Human
caaggcaggcggaucaccugagguca

SEQ ID NO: 434181 - RNA, 21 nt, Human
caaggucauggcacuucugag

SEQ ID NO: 434182 - RNA, 24 nt, Human
caccccugcaaucccagcacuuug

SEQ ID NO: 434183 - RNA, 21 nt, Human
cacccgaauccggccgugggg

SEQ ID NO: 434184 - RNA, 24 nt, Human
caccucggagaggagccacccgaa

SEQ ID NO: 434185 - RNA, 24 nt, Human
caccuggccaauuaacaacacuuu

SEQ ID NO: 434186 - RNA, 19 nt, Human
cacgccuguaaccccagcu

SEQ ID NO: 434187 - RNA, 19 nt, Human
cacugcacuccagcccagg

SEQ ID NO: 434188 - RNA, 21 nt, Human
cacugcacuccagcccaggca

SEQ ID NO: 434189 - RNA, 22 nt, Human
cacugcacuccagcccaggcaa

SEQ ID NO: 434190 - RNA, 23 nt, Human
cacugcacuccagcccaggcaac

SEQ ID NO: 434191 - RNA, 24 nt, Human
cacugcacuccagcccaggcaaca

SEQ ID NO: 434192 - RNA, 18 nt, Human
cacuucauuuggagugau

SEQ ID NO: 434193 - RNA, 24 nt, Human
cagcacuuugggaggccaaggcag

SEQ ID NO: 434194 - RNA, 25 nt, Human
cagcacuuugggaggccaaggcagg

SEQ ID NO: 434195 - RNA, 25 nt, Human
cagccucaaacccccuggcucaaag

SEQ ID NO: 434196 - RNA, 24 nt, Human
cagccugaccaacauggagaaacc

SEQ ID NO: 434197 - RNA, 18 nt, Human
cagcggguccccuccucc

SEQ ID NO: 434198 - RNA, 19 nt, Human
cagcggguccccuccuccu

SEQ ID NO: 434199 - RNA, 24 nt, Human
cagcuacucgggaggcugaggcag

SEQ ID NO: 434200 - RNA, 23 nt, Human
caugaucagggcucacugcagcc

SEQ ID NO: 434201 - RNA, 24 nt, Human
ccaaagagcugguagcacaggcgu

SEQ ID NO: 434202 - RNA, 22 nt, Human
ccacgugacaccccucagcugc

SEQ ID NO: 434203 - RNA, 21 nt, Human
ccacugcacccagccauguga

SEQ ID NO: 434204 - RNA, 19 nt, Human
ccacugcacuccagcccag

SEQ ID NO: 434205 - RNA, 20 nt, Human
ccacugcacuccagcccagg

SEQ ID NO: 434206 - RNA, 20 nt, Human
ccacugcacuccagcccagg

SEQ ID NO: 434207 - RNA, 21 nt, Human
ccacugcacuccagcccaggc

SEQ ID NO: 434208 - RNA, 22 nt, Human
ccacugcacuccagcccaggca

SEQ ID NO: 434209 - RNA, 24 nt, Human
ccacugcacuccagcccaggcaac

SEQ ID NO: 434210 - RNA, 21 nt, Human
ccagugggcaaaauguuuucu

SEQ ID NO: 434211 - RNA, 20 nt, Human
ccaucucaaaccccauccca

SEQ ID NO: 434212 - RNA, 19 nt, Human
ccccugcaaucccagcacu

SEQ ID NO: 434213 - RNA, 21 nt, Human
cccgcgacauugucacggccg

SEQ ID NO: 434214 - RNA, 23 nt, Human
ccgaugguuucuagauuuuuuuu

SEQ ID NO: 434215 - RNA, 18 nt, Human
ccgggccggccugcgacg

SEQ ID NO: 434216 - RNA, 19 nt, Human
ccgggccggccugcgacgc

SEQ ID NO: 434217 - RNA, 19 nt, Human
ccuccuggaguacaggggc

SEQ ID NO: 434218 - RNA, 24 nt, Human
ccugaccaacauggagaaacccca

SEQ ID NO: 434219 - RNA, 22 nt, Human
ccugaggucaggaguucgagac

SEQ ID NO: 434220 - RNA, 21 nt, Human
ccugcgacgcagagaagaggc

SEQ ID NO: 434221 - RNA, 20 nt, Human
ccuggaguacaggggccuug

SEQ ID NO: 434222 - RNA, 19 nt, Human
ccuguaaccccagcuacuc

SEQ ID NO: 434223 - RNA, 22 nt, Human
ccuguaaccccagcuacucggg

SEQ ID NO: 434224 - RNA, 23 nt, Human
cgaaaagcaaggaaaacacuuca

SEQ ID NO: 434225 - RNA, 20 nt, Human
cgcagcggguccccuccucc

SEQ ID NO: 434226 - RNA, 21 nt, Human
cgccgggccggccugcgacgc

SEQ ID NO: 434227 - RNA, 24 nt, Human
cgccuguaaccccagcuacucggg

SEQ ID NO: 434228 - RNA, 24 nt, Human
cggaucaccugaggucaggaguuc

SEQ ID NO: 434229 - RNA, 24 nt, Human
cgucucagccucccaaagagcugg

SEQ ID NO: 434230 - RNA, 30 nt, Human
cucaaacaaaaaaaaaaaaaagaagaaucc

SEQ ID NO: 434231 - RNA, 25 nt, Human
cucaagcgaucuaucccaccuuggc

SEQ ID NO: 434232 - RNA, 24 nt, Human
cucaccccugcaaucccagcacuu

SEQ ID NO: 434233 - RNA, 22 nt, Human
cucacugcagccucaaaccccc

SEQ ID NO: 434234 - RNA, 21 nt, Human
cucggcucccgcccgcccgcc

SEQ ID NO: 434235 - RNA, 22 nt, Human
cugcagccucaaacccccuggc

SEQ ID NO: 434236 - RNA, 22 nt, Human
cugcagccucaaacccccuggc

SEQ ID NO: 434237 - RNA, 22 nt, Human
cugcagugagccgagaucuugc

SEQ ID NO: 434238 - RNA, 23 nt, Human
cugggcaugguggcucaccccug

SEQ ID NO: 434239 - RNA, 20 nt, Human
gaaaagcaaggaaaacacuu

SEQ ID NO: 434240 - RNA, 19 nt, Human
gaaaaugugagagaggaag

SEQ ID NO: 434241 - RNA, 23 nt, Human
gaacauaagccgcucagcaaacc

SEQ ID NO: 434242 - RNA, 23 nt, Human
gagaccagccugaccaacaugga

SEQ ID NO: 434243 - RNA, 23 nt, Human
gagaucuugccacugcacuccag

SEQ ID NO: 434244 - RNA, 22 nt, Human
gaggagccacccgaauccggcc

SEQ ID NO: 434245 - RNA, 24 nt, Human
gaucaccugaggucaggaguucga

SEQ ID NO: 434246 - RNA, 22 nt, Human
gcaaagcaaaauaccgaugguu

SEQ ID NO: 434247 - RNA, 21 nt, Human
gcaccacgugacaccccucag

SEQ ID NO: 434248 - RNA, 19 nt, Human
gcagcggguccccuccucc

SEQ ID NO: 434249 - RNA, 21 nt, Human
gcagcuggauguacaugggcc

SEQ ID NO: 434250 - RNA, 18 nt, Human
gccaugugaagacuuucu

SEQ ID NO: 434251 - RNA, 20 nt, Human
gccucccaaaguccuguggu

SEQ ID NO: 434252 - RNA, 21 nt, Human
gcggaucaccugaggucagga

SEQ ID NO: 434253 - RNA, 19 nt, Human
ggaggccuuuugcaccacg

SEQ ID NO: 434254 - RNA, 18 nt, Human
ggaggcugcagugagccg

SEQ ID NO: 434255 - RNA, 20 nt, Human
ggaggcugcagugagccgag

SEQ ID NO: 434256 - RNA, 23 nt, Human
ggaggcugcagugagccgagauc

SEQ ID NO: 434257 - RNA, 19 nt, Human
ggaguacaggggccuugga

SEQ ID NO: 434258 - RNA, 22 nt, Human
ggaucaccugaggucaggaguu

SEQ ID NO: 434259 - RNA, 23 nt, Human
ggaucaccugaggucaggaguuc

SEQ ID NO: 434260 - RNA, 25 nt, Human
ggaucaccugaggucaggaguucga

SEQ ID NO: 434261 - RNA, 21 nt, Human
ggcaguggcaugaucagggcu

SEQ ID NO: 434262 - RNA, 23 nt, Human
ggcaugguggcucaccccugcaa

SEQ ID NO: 434263 - RNA, 22 nt, Human
ggcucggcggccggcgcccugc

SEQ ID NO: 434264 - RNA, 24 nt, Human
ggggugggggcugagggaggaugc

SEQ ID NO: 434265 - RNA, 24 nt, Human
gguggugcacgccuguaaccccag

SEQ ID NO: 434266 - RNA, 19 nt, Human
gguuacaagugugagccac

SEQ ID NO: 434267 - RNA, 21 nt, Human
gguuacaagugugagccacug

SEQ ID NO: 434268 - RNA, 22 nt, Human
gguuacaagugugagccacugc

SEQ ID NO: 434269 - RNA, 18 nt, Human
guacccccgaaaagcaag

SEQ ID NO: 434270 - RNA, 22 nt, Human
guagggauggggucuucccaug

SEQ ID NO: 434271 - RNA, 23 nt, Human
gugaucuuccgucucagccuccc

SEQ ID NO: 434272 - RNA, 22 nt, Human
uaagaaaagagauccaaggauu

SEQ ID NO: 434273 - RNA, 21 nt, Human
uaaguuacuuuauuucugcug

SEQ ID NO: 434274 - RNA, 24 nt, Human
uacaagugugagccacugcaccca

SEQ ID NO: 434275 - RNA, 18 nt, Human
uagcugggaggccuuuug

SEQ ID NO: 434276 - RNA, 22 nt, Human
uaucccaccuuggccucccaaa

SEQ ID NO: 434277 - RNA, 23 nt, Human
uaucccaccuuggccucccaaag

SEQ ID NO: 434278 - RNA, 24 nt, Human
ucaaacaaaaaaaaaaaaaagaaa

SEQ ID NO: 434279 - RNA, 26 nt, Human
ucaaacaaaaaaaaaaaaaagaagaa

SEQ ID NO: 434280 - RNA, 24 nt, Human
ucaaucgcgcagcggguccccucc

SEQ ID NO: 434281 - RNA, 20 nt, Human
ucacugagcaugcaugugca

SEQ ID NO: 434282 - RNA, 20 nt, Human
ucagccucccaaagagcugg

SEQ ID NO: 434283 - RNA, 24 nt, Human
ucccaaagagcugguagcacaggc

SEQ ID NO: 434284 - RNA, 24 nt, Human
uccgucucagccucccaaagagcu

SEQ ID NO: 434285 - RNA, 23 nt, Human
ucgggaggcugaggcaggagaau

SEQ ID NO: 434286 - RNA, 22 nt, Human
ucucaaacaaaaaaaaaaaaaa

SEQ ID NO: 434287 - RNA, 23 nt, Human
ucucaaacaaaaaaaaaaaaaag

SEQ ID NO: 434288 - RNA, 19 nt, Human
ucucaggcaagguggaaag

SEQ ID NO: 434289 - RNA, 23 nt, Human
ucucuacuaaaaauauaaaaauu

SEQ ID NO: 434290 - RNA, 19 nt, Human
ugaaacuuuccacauuccu

SEQ ID NO: 434291 - RNA, 19 nt, Human
ugagauggugucuugcucc

SEQ ID NO: 434292 - RNA, 22 nt, Human
ugagccgagaucuugccacugc

SEQ ID NO: 434293 - RNA, 20 nt, Human
ugaggcaggagaauugccug

SEQ ID NO: 434294 - RNA, 24 nt, Human
ugaggcaggagaauugccugaacc

SEQ ID NO: 434295 - RNA, 25 nt, Human
ugaggcaggagaauugccugaaccc

SEQ ID NO: 434296 - RNA, 21 nt, Human
ugccugccuugcuguuggaac

SEQ ID NO: 434297 - RNA, 19 nt, Human
uggagggcaguggcaugau

SEQ ID NO: 434298 - RNA, 23 nt, Human
uggagggcaguggcaugaucagg

SEQ ID NO: 434299 - RNA, 22 nt, Human
uggcucaccccugcaaucccag

SEQ ID NO: 434300 - RNA, 24 nt, Human
uggcucaccccugcaaucccagca

SEQ ID NO: 434301 - RNA, 24 nt, Human
ugggaggccaaggcaggcggauca

SEQ ID NO: 434302 - RNA, 18 nt, Human
ugggcugggcaugguggc

SEQ ID NO: 434303 - RNA, 21 nt, Human
ugggggugggggcugagggag

SEQ ID NO: 434304 - RNA, 21 nt, Human
uggugcacgccuguaacccca

SEQ ID NO: 434305 - RNA, 22 nt, Human
uggugcacgccuguaaccccag

SEQ ID NO: 434306 - RNA, 23 nt, Human
uggugcacgccuguaaccccagc

SEQ ID NO: 434307 - RNA, 20 nt, Human
ugguuacaagugugagccac

SEQ ID NO: 434308 - RNA, 22 nt, Human
ugguuacaagugugagccacug

SEQ ID NO: 434309 - RNA, 28 nt, Human
ugguuucuagauuuuuuuuuuuuuuuuu

SEQ ID NO: 434310 - RNA, 21 nt, Human
uguagggauggggucuuccca

SEQ ID NO: 434311 - RNA, 22 nt, Human
ugugguuacaagugugagccac

SEQ ID NO: 434312 - RNA, 21 nt, Human
uuacaagugugagccacugca

SEQ ID NO: 434313 - RNA, 18 nt, Human
uucacuuuuauuaaggga

SEQ ID NO: 434314 - RNA, 19 nt, Human
uuccaaagaagaaucuggg

SEQ ID NO: 434315 - RNA, 20 nt, Human
uucccaugcuucccaggcuc

SEQ ID NO: 434316 - RNA, 22 nt, Human
uucucauaaacaaauucagaac

SEQ ID NO: 434317 - RNA, 24 nt, Human
uugccugaacccgggagauggagg

SEQ ID NO: 434318 - RNA, 24 nt, Human
uuguagggauggggucuucccaug

SEQ ID NO: 434319 - RNA, 20 nt, Human
uuucugguaauuucacuuuu

SEQ ID NO: 434320 - RNA, 20 nt, Human
uuugcaccacgugacacccc

SEQ ID NO: 434321 - RNA, 18 nt, Human
uuuguagggauggggucu

SEQ ID NO: 434322 - RNA, 24 nt, Human
uuuguagggauggggucuucccau

SEQ ID NO: 434323 - RNA, 24 nt, Human
uuuugcaccacgugacaccccucc

SEQ ID NO: 434324 - RNA, 19 nt, Human
uuuuuuguagggauggggu

SEQ ID NO: 434325 - RNA, 25 nt, Human
uuuuuuuuuuuuuuuuuuuuuaagg

SEQ ID NO: 434326 - RNA, 18 nt, Human
aaacaccuacuccccaca

SEQ ID NO: 434327 - RNA, 22 nt, Human
aaagaacgggaaccucaaacac

SEQ ID NO: 434328 - RNA, 22 nt, Human
aaagugaaagagaaacaggucc

SEQ ID NO: 434329 - RNA, 23 nt, Human
aaauacacaccccauggcucaca

SEQ ID NO: 434330 - RNA, 21 nt, Human
aagaacgggaaccucaaacac

SEQ ID NO: 434331 - RNA, 22 nt, Human
acaaauacacaccccauggcuc

SEQ ID NO: 434332 - RNA, 24 nt, Human
acaaauacacaccccauggcucac

SEQ ID NO: 434333 - RNA, 22 nt, Human
acaccuacuccccacauacaaa

SEQ ID NO: 434334 - RNA, 23 nt, Human
accccauggcucacaccagcaaa

SEQ ID NO: 434335 - RNA, 27 nt, Human
accuacuccccacauacaaauacacac

SEQ ID NO: 434336 - RNA, 20 nt, Human
accucaaacaccuacucccc

SEQ ID NO: 434337 - RNA, 18 nt, Human
agagaagaaaaggagagg

SEQ ID NO: 434338 - RNA, 24 nt, Human
agggcccaccaggucugggcaagg

SEQ ID NO: 434339 - RNA, 25 nt, Human
aucucuuccuccuuuccacccccag

SEQ ID NO: 434340 - RNA, 21 nt, Human
caaacaccuacuccccacaua

SEQ ID NO: 434341 - RNA, 22 nt, Human
caaauacacaccccauggcuca

SEQ ID NO: 434342 - RNA, 21 nt, Human
caagucaguugaagaggcugg

SEQ ID NO: 434343 - RNA, 22 nt, Human
cacaccagcaaaugaaagugaa

SEQ ID NO: 434344 - RNA, 23 nt, Human
caccccucccucugaagggccca

SEQ ID NO: 434345 - RNA, 18 nt, Human
cagggccccacccuccuc

SEQ ID NO: 434346 - RNA, 18 nt, Human
caggggucccuucguccu

SEQ ID NO: 434347 - RNA, 20 nt, Human
cauggcucacaccagcaaau

SEQ ID NO: 434348 - RNA, 19 nt, Human
ccaccccucccucugaagg

SEQ ID NO: 434349 - RNA, 21 nt, Human
ccccauggcucacaccagcaa

SEQ ID NO: 434350 - RNA, 18 nt, Human
ccucuucccucugugccc

SEQ ID NO: 434351 - RNA, 20 nt, Human
cuacuccccacauacaaaua

SEQ ID NO: 434352 - RNA, 18 nt, Human
cuacugccucugcuggca

SEQ ID NO: 434353 - RNA, 22 nt, Human
cuaguaucucuuccuccuuucc

SEQ ID NO: 434354 - RNA, 26 nt, Human
cuaguaucucuuccuccuuuccaccc

SEQ ID NO: 434355 - RNA, 20 nt, Human
cucuaaagagaagaaaagga

SEQ ID NO: 434356 - RNA, 19 nt, Human
cugcuggcagacaggggca

SEQ ID NO: 434357 - RNA, 19 nt, Human
gaaagaacgggaaccucaa

SEQ ID NO: 434358 - RNA, 19 nt, Human
gaaagagaaacagguccac

SEQ ID NO: 434359 - RNA, 20 nt, Human
gggaaagaacgggaaccuca

SEQ ID NO: 434360 - RNA, 25 nt, Human
gggaaguauauuuuauuuacauuuu

SEQ ID NO: 434361 - RNA, 19 nt, Human
gugggagggcccugggcug

SEQ ID NO: 434362 - RNA, 22 nt, Human
uaucucuuccuccuuuccaccc

SEQ ID NO: 434363 - RNA, 30 nt, Human
uaucucuuccuccuuuccacccccagagaa

SEQ ID NO: 434364 - RNA, 21 nt, Human
ucacaccagcaaaugaaagug

SEQ ID NO: 434365 - RNA, 27 nt, Human
ucacaccagcaaaugaaagugaaagag

SEQ ID NO: 434366 - RNA, 24 nt, Human
ucauccagggccccacccuccucu

SEQ ID NO: 434367 - RNA, 19 nt, Human
ucucuuccuccuuuccacc

SEQ ID NO: 434368 - RNA, 26 nt, Human
ucugaagggcccaccaggucugggca

SEQ ID NO: 434369 - RNA, 26 nt, Human
ucugcuggcagacaggggcagggguu

SEQ ID NO: 434370 - RNA, 21 nt, Human
ugaagggcccaccaggucugg

SEQ ID NO: 434371 - RNA, 22 nt, Human
aaaaaaaucaaauaugucaaua

SEQ ID NO: 434372 - RNA, 23 nt, Human
aaaaaucuuccucauggauaaaa

SEQ ID NO: 434373 - RNA, 22 nt, Human
aaaagugaguaaauuaugguag

SEQ ID NO: 434374 - RNA, 22 nt, Human
aaaaucuuccucauggauaaaa

SEQ ID NO: 434375 - RNA, 22 nt, Human
aaacaaaccaacugaggucaag

SEQ ID NO: 434376 - RNA, 22 nt, Human
aaacgaaaacagguaaaaacaa

SEQ ID NO: 434377 - RNA, 27 nt, Human
aaacguggccccacccccuucuucccg

SEQ ID NO: 434378 - RNA, 18 nt, Human
aaaguuuuucauaucacc

SEQ ID NO: 434379 - RNA, 18 nt, Human
aaaugucagacauugccu

SEQ ID NO: 434380 - RNA, 18 nt, Human
aacacagaaaaaagugag

SEQ ID NO: 434381 - RNA, 20 nt, Human
aaccaacugaggucaaggca

SEQ ID NO: 434382 - RNA, 19 nt, Human
aacugaggggaaaucuucu

SEQ ID NO: 434383 - RNA, 18 nt, Human
aagaggaauacgaaaagc

SEQ ID NO: 434384 - RNA, 20 nt, Human
aauaccuacaauugaccaag

SEQ ID NO: 434385 - RNA, 18 nt, Human
aaugacaccccugaaccc

SEQ ID NO: 434386 - RNA, 22 nt, Human
acuaugcuuggcauaacugggc

SEQ ID NO: 434387 - RNA, 20 nt, Human
acugcagauaaucaaaaugu

SEQ ID NO: 434388 - RNA, 18 nt, Human
aggaaagaaagagguaaa

SEQ ID NO: 434389 - RNA, 22 nt, Human
aggaauacgaaaagccaauaac

SEQ ID NO: 434390 - RNA, 24 nt, Human
auggaaacugaggggaaaucuucu

SEQ ID NO: 434391 - RNA, 22 nt, Human
auuccagugagcuaucuugaac

SEQ ID NO: 434392 - RNA, 21 nt, Human
caaaccaacugaggucaaggc

SEQ ID NO: 434393 - RNA, 21 nt, Human
caagacaugcacuacaaccac

SEQ ID NO: 434394 - RNA, 23 nt, Human
caagacaugcacuacaaccacau

SEQ ID NO: 434395 - RNA, 25 nt, Human
cacaaaaaguuauguuacagaggua

SEQ ID NO: 434396 - RNA, 22 nt, Human
cacccccuucuucccggcgucc

SEQ ID NO: 434397 - RNA, 26 nt, Human
cagagaccaaaaaugucagacauugc

SEQ ID NO: 434398 - RNA, 24 nt, Human
cagcagcucuugugaucgagaggu

SEQ ID NO: 434399 - RNA, 20 nt, Human
caucaauaugaugguccugg

SEQ ID NO: 434400 - RNA, 23 nt, Human
ccagaagucugcuuuuuuuuuuu

SEQ ID NO: 434401 - RNA, 19 nt, Human
cccaccgacagcccuccca

SEQ ID NO: 434402 - RNA, 18 nt, Human
ccccacccccuucuuccc

SEQ ID NO: 434403 - RNA, 25 nt, Human
ccgacagcccucccagcccgccccc

SEQ ID NO: 434404 - RNA, 27 nt, Human
cugcagauaaucaaaaugucuaacaca

SEQ ID NO: 434405 - RNA, 25 nt, Human
cuuccaauuccauucuucacaccua

SEQ ID NO: 434406 - RNA, 21 nt, Human
gaaaacagguaaaaacaauga

SEQ ID NO: 434407 - RNA, 20 nt, Human
gcaaacguggccccaccccc

SEQ ID NO: 434408 - RNA, 21 nt, Human
gcaaacguggccccacccccu

SEQ ID NO: 434409 - RNA, 21 nt, Human
ggacgggccgucgcuacgcag

SEQ ID NO: 434410 - RNA, 23 nt, Human
ggcaaaaauuaaaccaaaaagaa

SEQ ID NO: 434411 - RNA, 19 nt, Human
guacauuagaaccacaaaa

SEQ ID NO: 434412 - RNA, 21 nt, Human
uaaaaagaauuuacaaaacag

SEQ ID NO: 434413 - RNA, 22 nt, Human
uaaauguuuccuuuugcuuaug

SEQ ID NO: 434414 - RNA, 21 nt, Human
uaaccugaucuaagucaaugg

SEQ ID NO: 434415 - RNA, 23 nt, Human
uaacucaaaauguacaaggacau

SEQ ID NO: 434416 - RNA, 19 nt, Human
uaaggcaaaacaaaccaac

SEQ ID NO: 434417 - RNA, 21 nt, Human
uaaggcaaaacaaaccaacug

SEQ ID NO: 434418 - RNA, 27 nt, Human
uaaggcaaaacaaaccaacugagguca

SEQ ID NO: 434419 - RNA, 23 nt, Human
uaaguacuacuugcuaaaacgaa

SEQ ID NO: 434420 - RNA, 19 nt, Human
uacauuggcaaaaauuaaa

SEQ ID NO: 434421 - RNA, 21 nt, Human
uauaauuaaagcccuaugaac

SEQ ID NO: 434422 - RNA, 22 nt, Human
uauacaauuugcacacuuuuaa

SEQ ID NO: 434423 - RNA, 18 nt, Human
uaugucaaacaauuuccu

SEQ ID NO: 434424 - RNA, 21 nt, Human
uauucuggcagggggagggaa

SEQ ID NO: 434425 - RNA, 22 nt, Human
uccaagacaugcacuacaacca

SEQ ID NO: 434426 - RNA, 24 nt, Human
uccaagacaugcacuacaaccaca

SEQ ID NO: 434427 - RNA, 21 nt, Human
uccauucuucacaccuagcuu

SEQ ID NO: 434428 - RNA, 22 nt, Human
ugaauacggaagaucacaaaca

SEQ ID NO: 434429 - RNA, 20 nt, Human
ugacaagacaaaguuuuuca

SEQ ID NO: 434430 - RNA, 21 nt, Human
ugcuuuuuuuuuuuaauugga

SEQ ID NO: 434431 - RNA, 19 nt, Human
uggcaaaaauuaaaccaaa

SEQ ID NO: 434432 - RNA, 23 nt, Human
uggcagggggagggaagucacau

SEQ ID NO: 434433 - RNA, 26 nt, Human
uggccaaaagcauccuaacuuguauu

SEQ ID NO: 434434 - RNA, 19 nt, Human
uggcccaccgacagcccuc

SEQ ID NO: 434435 - RNA, 22 nt, Human
uguuaaaaaucuuccucaugga

SEQ ID NO: 434436 - RNA, 24 nt, Human
uucaaauuuuuuucuuuuacuaau

SEQ ID NO: 434437 - RNA, 25 nt, Human
uucaaauuuuuuucuuuuacuaauc

SEQ ID NO: 434438 - RNA, 27 nt, Human
uuccuagguuacuuaggccaauuauau

SEQ ID NO: 434439 - RNA, 23 nt, Human
uucuacaguuagcauguaucacu

SEQ ID NO: 434440 - RNA, 24 nt, Human
uugaaagauagcauuuaaauguuu

SEQ ID NO: 434441 - RNA, 22 nt, Human
uuucuuaugggaaggcaguggg

SEQ ID NO: 434442 - RNA, 18 nt, Human
uuugcacacuuuuaaugu

SEQ ID NO: 434443 - RNA, 19 nt, Human
uuuugcuuaugugcauuuu

SEQ ID NO: 434444 - RNA, 20 nt, Human
aaaaauaaauauucuucugc

SEQ ID NO: 434445 - RNA, 18 nt, Human
aaaacaacaaaaaaccau

SEQ ID NO: 434446 - RNA, 19 nt, Human
aaaaguacccuucaccaca

SEQ ID NO: 434447 - RNA, 23 nt, Human
aaaccaugauaaauuaaaaccaa

SEQ ID NO: 434448 - RNA, 21 nt, Human
acuuucuucucugcagcagcc

SEQ ID NO: 434449 - RNA, 22 nt, Human
caaagcuccaaggucaaagcuc

SEQ ID NO: 434450 - RNA, 18 nt, Human
caaagcuccccagaauac

SEQ ID NO: 434451 - RNA, 21 nt, Human
caccaugaaaaguacccuuca

SEQ ID NO: 434452 - RNA, 24 nt, Human
cacuccucucugccuccuccucca

SEQ ID NO: 434453 - RNA, 19 nt, Human
ccccagaauacagaggaau

SEQ ID NO: 434454 - RNA, 21 nt, Human
cgaaaacaacaaaaaaccaug

SEQ ID NO: 434455 - RNA, 21 nt, Human
cgcccuccacuccucucugcc

SEQ ID NO: 434456 - RNA, 20 nt, Human
cuacuccgcccuccacuccu

SEQ ID NO: 434457 - RNA, 24 nt, Human
cuacuccgcccuccacuccucucu

SEQ ID NO: 434458 - RNA, 20 nt, Human
cuccgucuacuccgcccucc

SEQ ID NO: 434459 - RNA, 22 nt, Human
cuccucucugccuccuccucca

SEQ ID NO: 434460 - RNA, 18 nt, Human
gacacuuucuucucugca

SEQ ID NO: 434461 - RNA, 18 nt, Human
gccuccuccuccaccgcc

SEQ ID NO: 434462 - RNA, 24 nt, Human
ggcaaauaauaaaauuuguucuaa

SEQ ID NO: 434463 - RNA, 27 nt, Human
uauugugcaucuugcaggugaaguacu

SEQ ID NO: 434464 - RNA, 21 nt, Human
ucaaagcuccccagaauacag

SEQ ID NO: 434465 - RNA, 24 nt, Human
ucuaauguuuucucaagcuguaca

SEQ ID NO: 434466 - RNA, 28 nt, Human
ucucugcagcagccuccuccgucuacuc

SEQ ID NO: 434467 - RNA, 18 nt, Human
ucugcagcagccuccucc

SEQ ID NO: 434468 - RNA, 19 nt, Human
ucugccuccuccuccaccc

SEQ ID NO: 434469 - RNA, 18 nt, Human
ugauaaauuaaaaccaaa

SEQ ID NO: 434470 - RNA, 23 nt, Human
ugcacagaguugaaaauuauugu

SEQ ID NO: 434471 - RNA, 22 nt, Human
uguacaaagcuccaaggucaaa

SEQ ID NO: 434472 - RNA, 23 nt, Human
uucaaaacgaaaacaacaaaaaa

SEQ ID NO: 434473 - RNA, 25 nt, Human
uucaaaacgaaaacaacaaaaaacc

SEQ ID NO: 434474 - RNA, 20 nt, Human
uuucuucucugcagcagccu

SEQ ID NO: 434475 - RNA, 19 nt, Human
uuuuuuuuuuuuuuuuugu

SEQ ID NO: 434476 - RNA, 22 nt, Human
uuuuuuuuuuuuuuuuuguggg

SEQ ID NO: 434477 - RNA, 27 nt, Human
uuuuuuuuuuuuuuuuuuuuuuugggg

SEQ ID NO: 434478 - RNA, 18 nt, Human
aaaaaugaaaacuguaau

SEQ ID NO: 434479 - RNA, 19 nt, Human
aaacugauccacgcuuccc

SEQ ID NO: 434480 - RNA, 24 nt, Human
aacaauaaaaacaauaauaacaac

SEQ ID NO: 434481 - RNA, 19 nt, Human
aaccgaaaaccaaccuaau

SEQ ID NO: 434482 - RNA, 20 nt, Human
aagagccugaauuuguugac

SEQ ID NO: 434483 - RNA, 23 nt, Human
aagcacaaaauagacccauguug

SEQ ID NO: 434484 - RNA, 26 nt, Human
aagcacuuggauccacuggucucuuu

SEQ ID NO: 434485 - RNA, 19 nt, Human
aaguucaggcuaaaaaacu

SEQ ID NO: 434486 - RNA, 22 nt, Human
acaaugaagaauccuucaagga

SEQ ID NO: 434487 - RNA, 19 nt, Human
acuaacagaacaacaauaa

SEQ ID NO: 434488 - RNA, 24 nt, Human
agaaaacaaugaagaauccuucaa

SEQ ID NO: 434489 - RNA, 20 nt, Human
agaaugucauuauaauuaaa

SEQ ID NO: 434490 - RNA, 18 nt, Human
aggaaauaagcuauuuca

SEQ ID NO: 434491 - RNA, 22 nt, Human
auacuaccuuugaaaaaggauc

SEQ ID NO: 434492 - RNA, 25 nt, Human
caagaaaacaaugaagaauccuuca

SEQ ID NO: 434493 - RNA, 22 nt, Human
cacaaaaauacaguaugguauu

SEQ ID NO: 434494 - RNA, 22 nt, Human
cagaagagccugaauuuguuga

SEQ ID NO: 434495 - RNA, 19 nt, Human
cagagaguguaaugaauug

SEQ ID NO: 434496 - RNA, 23 nt, Human
caggaaagaaaauaaaaaaucaa

SEQ ID NO: 434497 - RNA, 22 nt, Human
caggccagagucauuaaacuga

SEQ ID NO: 434498 - RNA, 25 nt, Human
cagggcacaauuagaaugaaguuuu

SEQ ID NO: 434499 - RNA, 21 nt, Human
ccuacugauacuaccuuugaa

SEQ ID NO: 434500 - RNA, 19 nt, Human
ccuuguccaguuacucuuc

SEQ ID NO: 434501 - RNA, 23 nt, Human
cuucugaaaagccauggucugug

SEQ ID NO: 434502 - RNA, 27 nt, Human
gaaaacaaugaagaauccuucaaggac

SEQ ID NO: 434503 - RNA, 24 nt, Human
gaaaagaugcacaaauauagcccu

SEQ ID NO: 434504 - RNA, 23 nt, Human
gaaagaaaauaaaaaaucaaugu

SEQ ID NO: 434505 - RNA, 20 nt, Human
gagaaguauuugaagcacuu

SEQ ID NO: 434506 - RNA, 21 nt, Human
gauuauggcuaucuucuucca

SEQ ID NO: 434507 - RNA, 24 nt, Human
ggaaauaagcuauuucaggaaaga

SEQ ID NO: 434508 - RNA, 21 nt, Human
ggguagcucugaaguguuccg

SEQ ID NO: 434509 - RNA, 20 nt, Human
gucuguguguagaacaugcc

SEQ ID NO: 434510 - RNA, 24 nt, Human
gugaaaagauacagaaaaugacua

SEQ ID NO: 434511 - RNA, 21 nt, Human
uaaaauguucucaguguuagc

SEQ ID NO: 434512 - RNA, 20 nt, Human
uaaaguaaauauugcagagc

SEQ ID NO: 434513 - RNA, 22 nt, Human
uaacaaacucagggcacaauua

SEQ ID NO: 434514 - RNA, 23 nt, Human
uaacagaacaacaauaaaaacaa

SEQ ID NO: 434515 - RNA, 22 nt, Human
uaagcuauuucaggaaagaaaa

SEQ ID NO: 434516 - RNA, 24 nt, Human
uauaugccacuaccaggccagagu

SEQ ID NO: 434517 - RNA, 22 nt, Human
ucaggcuaaaaaacucauauuu

SEQ ID NO: 434518 - RNA, 21 nt, Human
ucaguuuaucagaccuucuua

SEQ ID NO: 434519 - RNA, 21 nt, Human
ucauuaaacugauccacgcuu

SEQ ID NO: 434520 - RNA, 22 nt, Human
uccuuuguguuauguuacugac

SEQ ID NO: 434521 - RNA, 24 nt, Human
ucucuuuuuuaaccauuuuguccu

SEQ ID NO: 434522 - RNA, 19 nt, Human
ucuuguagaauuauggaac

SEQ ID NO: 434523 - RNA, 19 nt, Human
ugaaaaaggauccauaaaa

SEQ ID NO: 434524 - RNA, 18 nt, Human
ugagaauaaauucuuucc

SEQ ID NO: 434525 - RNA, 18 nt, Human
ugaggugaaaagauacag

SEQ ID NO: 434526 - RNA, 23 nt, Human
ugcacaaauauagcccuagaaac

SEQ ID NO: 434527 - RNA, 20 nt, Human
uggggaugaauaacaugucu

SEQ ID NO: 434528 - RNA, 20 nt, Human
uguuggggaugaauaacaug

SEQ ID NO: 434529 - RNA, 24 nt, Human
uuacugacugguguauaugccacu

SEQ ID NO: 434530 - RNA, 22 nt, Human
uuagaauccgaguaaauaaugu

SEQ ID NO: 434531 - RNA, 26 nt, Human
uucauccuaaauuuuuaaaaaugaaa

SEQ ID NO: 434532 - RNA, 18 nt, Human
uucucaguguuagcuuua

SEQ ID NO: 434533 - RNA, 25 nt, Human
uugcagagcaauagaguuaagaaaa

SEQ ID NO: 434534 - RNA, 28 nt, Human
agacaucuaugcucuuuuguuggaaaua

SEQ ID NO: 434535 - RNA, 19 nt, Human
aggagaaaaugcagaaauc

SEQ ID NO: 434536 - RNA, 23 nt, Human
caucuaugcucuuuuguuggaaa

SEQ ID NO: 434537 - RNA, 19 nt, Human
cuuaaagauuuuuuuccuc

SEQ ID NO: 434538 - RNA, 23 nt, Human
ugcagaaaucugcagaaucauuc

SEQ ID NO: 434539 - RNA, 21 nt, Human
uuccucagugaaaaccauccc

SEQ ID NO: 434540 - RNA, 18 nt, Human
uuuguuggaaauauuugu

SEQ ID NO: 434541 - RNA, 18 nt, Human
aaacaaacaaacaaaccc

SEQ ID NO: 434542 - RNA, 23 nt, Human
aaacaaacaaacaaacccggagc

SEQ ID NO: 434543 - RNA, 19 nt, Human
aaacaaacaaacccggagc

SEQ ID NO: 434544 - RNA, 22 nt, Human
aaacaaacaaacccggagccaa

SEQ ID NO: 434545 - RNA, 25 nt, Human
aaacaaacaaacccggagccacgca

SEQ ID NO: 434546 - RNA, 25 nt, Human
aaagaggaaaaacaaacaaacaaac

SEQ ID NO: 434547 - RNA, 18 nt, Human
aaagcaaaacacacaacc

SEQ ID NO: 434548 - RNA, 19 nt, Human
aacaaaagccuagugcagc

SEQ ID NO: 434549 - RNA, 20 nt, Human
aacaaacaaacccggagcca

SEQ ID NO: 434550 - RNA, 22 nt, Human
aacagacagaccacuguccaaa

SEQ ID NO: 434551 - RNA, 22 nt, Human
aacccggagccacgcaguaaac

SEQ ID NO: 434552 - RNA, 18 nt, Human
aagcaaaacacacaacca

SEQ ID NO: 434553 - RNA, 19 nt, Human
aagcagcuguuucaguccc

SEQ ID NO: 434554 - RNA, 20 nt, Human
aaggagcuuagaaaaauuuc

SEQ ID NO: 434555 - RNA, 18 nt, Human
aagugaaaaagaaagaag

SEQ ID NO: 434556 - RNA, 27 nt, Human
aaguggcuuuuuuagaaauuaaaaagg

SEQ ID NO: 434557 - RNA, 22 nt, Human
aaucacaaauucagaagcacug

SEQ ID NO: 434558 - RNA, 21 nt, Human
aaucccuuuugcuuuucuucu

SEQ ID NO: 434559 - RNA, 21 nt, Human
aauccuauuagugugacaaag

SEQ ID NO: 434560 - RNA, 21 nt, Human
acaaacaaacaaacccggagc

SEQ ID NO: 434561 - RNA, 20 nt, Human
acaauggagaaaauaaacac

SEQ ID NO: 434562 - RNA, 21 nt, Human
acagaccaaaaagguacugca

SEQ ID NO: 434563 - RNA, 24 nt, Human
accacuguccaaauccagacuguu

SEQ ID NO: 434564 - RNA, 18 nt, Human
acgcaguaaacugcaugu

SEQ ID NO: 434565 - RNA, 18 nt, Human
acggaugacaacuuccau

SEQ ID NO: 434566 - RNA, 23 nt, Human
agaaagaagucccaguaagcaga

SEQ ID NO: 434567 - RNA, 18 nt, Human
agaagccuuagcuuugaa

SEQ ID NO: 434568 - RNA, 18 nt, Human
aggaaaaacaaacaaaca

SEQ ID NO: 434569 - RNA, 21 nt, Human
aggagaagcaagaaacuuuca

SEQ ID NO: 434570 - RNA, 25 nt, Human
aggauagaaacagcagccacaggga

SEQ ID NO: 434571 - RNA, 26 nt, Human
aggcagcuccagaagaaggggaacgc

SEQ ID NO: 434572 - RNA, 23 nt, Human
agugguacuuuuucuccuuugga

SEQ ID NO: 434573 - RNA, 19 nt, Human
aguuguuuuuaauuccugu

SEQ ID NO: 434574 - RNA, 21 nt, Human
aucacaaauucagaagcacug

SEQ ID NO: 434575 - RNA, 20 nt, Human
auuaagugaaaaagaaagaa

SEQ ID NO: 434576 - RNA, 24 nt, Human
caaaauaagcagcuguuucagucc

SEQ ID NO: 434577 - RNA, 20 nt, Human
caaacaaacaaacccggagc

SEQ ID NO: 434578 - RNA, 25 nt, Human
caaacaaacaaacccggagccacgc

SEQ ID NO: 434579 - RNA, 19 nt, Human
caaacccggagccacgcag

SEQ ID NO: 434580 - RNA, 24 nt, Human
caaauucagaagcacuguuucuga

SEQ ID NO: 434581 - RNA, 21 nt, Human
caacacucugaggcaggaaaa

SEQ ID NO: 434582 - RNA, 24 nt, Human
caauauacuucaauacaaacaugc

SEQ ID NO: 434583 - RNA, 20 nt, Human
cacaaauucagaagcacugu

SEQ ID NO: 434584 - RNA, 22 nt, Human
cacaagacagaccaaaaaggua

SEQ ID NO: 434585 - RNA, 20 nt, Human
cacacacaagacagaccaaa

SEQ ID NO: 434586 - RNA, 19 nt, Human
cacuguccaaauccagacu

SEQ ID NO: 434587 - RNA, 22 nt, Human
cagaccacuguccaaauccaga

SEQ ID NO: 434588 - RNA, 22 nt, Human
cagcagccacagggaagcaaaa

SEQ ID NO: 434589 - RNA, 28 nt, Human
cagugguacuuuuucuccuuugguaucu

SEQ ID NO: 434590 - RNA, 20 nt, Human
caugcaagcaaucccauggu

SEQ ID NO: 434591 - RNA, 23 nt, Human
ccaguaagcagaccgaacaauac

SEQ ID NO: 434592 - RNA, 21 nt, Human
cguucuugguucuccaguuac

SEQ ID NO: 434593 - RNA, 21 nt, Human
cuaccuccuaccauugggccc

SEQ ID NO: 434594 - RNA, 22 nt, Human
cucccgaaccgcccacagaggc

SEQ ID NO: 434595 - RNA, 25 nt, Human
cugaaaaguaaacaaggcaugugaa

SEQ ID NO: 434596 - RNA, 24 nt, Human
cuggacauacauaaauccaauccu

SEQ ID NO: 434597 - RNA, 22 nt, Human
cuuagcuuugaauugaggaaug

SEQ ID NO: 434598 - RNA, 19 nt, Human
cuugagaaacugaacuaac

SEQ ID NO: 434599 - RNA, 22 nt, Human
gaaaaacaaacaaacaaacccg

SEQ ID NO: 434600 - RNA, 21 nt, Human
gaaaauaaacacuagcucucu

SEQ ID NO: 434601 - RNA, 21 nt, Human
gaaagcacucuaaaaaguugu

SEQ ID NO: 434602 - RNA, 23 nt, Human
gaaauaccaccauaucaacagug

SEQ ID NO: 434603 - RNA, 30 nt, Human
gacuacaguaacaaaagccuagugcagccc

SEQ ID NO: 434604 - RNA, 25 nt, Human
gccagacuacaguaacaaaagccua

SEQ ID NO: 434605 - RNA, 25 nt, Human
ggaaaaacaaacaaacaaacccgga

SEQ ID NO: 434606 - RNA, 18 nt, Human
ggagcagcaaucugucag

SEQ ID NO: 434607 - RNA, 21 nt, Human
ggaggauagaaacagcagcca

SEQ ID NO: 434608 - RNA, 23 nt, Human
ggaugacaacuuccauucaaagu

SEQ ID NO: 434609 - RNA, 24 nt, Human
ggcagcuccagaagaagccuuagc

SEQ ID NO: 434610 - RNA, 18 nt, Human
gggaagcaaaaaguagaa

SEQ ID NO: 434611 - RNA, 23 nt, Human
ggguagaccagaauuugaaauac

SEQ ID NO: 434612 - RNA, 23 nt, Human
guauccccacaugcaagcaaucc

SEQ ID NO: 434613 - RNA, 24 nt, Human
guggguagaaacuuaugaccugaa

SEQ ID NO: 434614 - RNA, 26 nt, Human
uaaaccuauuaaagaggaaaaacaaa

SEQ ID NO: 434615 - RNA, 20 nt, Human
uaaacuaaaaugacaacuac

SEQ ID NO: 434616 - RNA, 22 nt, Human
uaagcagaccgaacaauacaaa

SEQ ID NO: 434617 - RNA, 19 nt, Human
uaagcagcuguuucagucc

SEQ ID NO: 434618 - RNA, 25 nt, Human
uacaaacuauauaguucaauauacu

SEQ ID NO: 434619 - RNA, 30 nt, Human
uagcaaaucuuuuuuucuuuucugaauucu

SEQ ID NO: 434620 - RNA, 18 nt, Human
ucaauacaaacaugcagc

SEQ ID NO: 434621 - RNA, 27 nt, Human
ucacugcaaggcacacacaagacagac

SEQ ID NO: 434622 - RNA, 22 nt, Human
ucuccuguauccccacaugcaa

SEQ ID NO: 434623 - RNA, 22 nt, Human
ucucuggcuggaggauagaaac

SEQ ID NO: 434624 - RNA, 21 nt, Human
ucucuggcuggaggauagaac

SEQ ID NO: 434625 - RNA, 23 nt, Human
ugaaaaauaaacuaaaaugacaa

SEQ ID NO: 434626 - RNA, 19 nt, Human
ugaaaaguaaacaaggcau

SEQ ID NO: 434627 - RNA, 19 nt, Human
ugaaauaccaccauaucaa

SEQ ID NO: 434628 - RNA, 24 nt, Human
ugaauggugaaaaagaugacauac

SEQ ID NO: 434629 - RNA, 21 nt, Human
ugaggcaggaaaaccuuucuc

SEQ ID NO: 434630 - RNA, 21 nt, Human
ugcaaggcacacacaagacag

SEQ ID NO: 434631 - RNA, 22 nt, Human
ugcagcugcacaaguguguaac

SEQ ID NO: 434632 - RNA, 21 nt, Human
uggagcagcaaucugucagcu

SEQ ID NO: 434633 - RNA, 19 nt, Human
uggguagaaacuuaugacc

SEQ ID NO: 434634 - RNA, 23 nt, Human
uguauccccacaugcaagcaauc

SEQ ID NO: 434635 - RNA, 22 nt, Human
uguccaaauccagacuguucac

SEQ ID NO: 434636 - RNA, 23 nt, Human
uuaaagaaaagcaaaacacacaa

SEQ ID NO: 434637 - RNA, 18 nt, Human
uuacacuucagcuuuuac

SEQ ID NO: 434638 - RNA, 21 nt, Human
uucaaagaauguggguagaaa

SEQ ID NO: 434639 - RNA, 19 nt, Human
uucaauggaacuaucguug

SEQ ID NO: 434640 - RNA, 22 nt, Human
uuccauucaaaguggcuuuuuu

SEQ ID NO: 434641 - RNA, 18 nt, Human
uugcuuuucuucucuacc

SEQ ID NO: 434642 - RNA, 23 nt, Human
uuugaaauaccaccauaucaaca

SEQ ID NO: 434643 - RNA, 21 nt, Human
acucuagaaacacugucaaaa

SEQ ID NO: 434644 - RNA, 22 nt, Human
agugccugacucuuugggugac

SEQ ID NO: 434645 - RNA, 21 nt, Human
auaaaaagcacucuagaaaca

SEQ ID NO: 434646 - RNA, 25 nt, Human
caggaaaauaauaaaaagcacucua

SEQ ID NO: 434647 - RNA, 23 nt, Human
cuuuacuaauauuuuguauugcc

SEQ ID NO: 434648 - RNA, 19 nt, Human
ggagaaaguaaucauggug

SEQ ID NO: 434649 - RNA, 21 nt, Human
uaaaaagcacucuagaaacac

SEQ ID NO: 434650 - RNA, 24 nt, Human
uaaaaagcacucuagaaacacugu

SEQ ID NO: 434651 - RNA, 25 nt, Human
uacccagugccugacucuuugggug

SEQ ID NO: 434652 - RNA, 18 nt, Human
uaucaccccuauguuuga

SEQ ID NO: 434653 - RNA, 22 nt, Human
uucuuuauugcugcuucuucau

SEQ ID NO: 434654 - RNA, 19 nt, Human
aaacaggaacacagaauuu

SEQ ID NO: 434655 - RNA, 22 nt, Human
aaacaggaacacagaauuuggg

SEQ ID NO: 434656 - RNA, 18 nt, Human
aaaguccagugaaaaugc

SEQ ID NO: 434657 - RNA, 20 nt, Human
aaaugccucuguccacacug

SEQ ID NO: 434658 - RNA, 20 nt, Human
aaauucuuaggaaaguauca

SEQ ID NO: 434659 - RNA, 25 nt, Human
aaccaagugacaaauauccacaaaa

SEQ ID NO: 434660 - RNA, 21 nt, Human
aaccuccuccucccaccacac

SEQ ID NO: 434661 - RNA, 22 nt, Human
acauggcacuuacccagcaccc

SEQ ID NO: 434662 - RNA, 22 nt, Human
accaagugacaaauauccacaa

SEQ ID NO: 434663 - RNA, 22 nt, Human
acccagcacccgaaccuccucc

SEQ ID NO: 434664 - RNA, 23 nt, Human
acccaugacauuuaguauuuuua

SEQ ID NO: 434665 - RNA, 18 nt, Human
accuccuccucccaccac

SEQ ID NO: 434666 - RNA, 19 nt, Human
agacaucacuaaagucuag

SEQ ID NO: 434667 - RNA, 18 nt, Human
aggaaucuagagguaugg

SEQ ID NO: 434668 - RNA, 23 nt, Human
auaguuucuaaaaauagaacauu

SEQ ID NO: 434669 - RNA, 22 nt, Human
caaaguaucauacaccuagaaa

SEQ ID NO: 434670 - RNA, 21 nt, Human
cacccgaaccuccuccuccca

SEQ ID NO: 434671 - RNA, 23 nt, Human
cagaacaauggaaccaguauggc

SEQ ID NO: 434672 - RNA, 23 nt, Human
cagugaaaauggcacacaguugg

SEQ ID NO: 434673 - RNA, 21 nt, Human
ccacacggagaaccauuucug

SEQ ID NO: 434674 - RNA, 18 nt, Human
ccagugaaaauggcacac

SEQ ID NO: 434675 - RNA, 19 nt, Human
cccgaaccuccuccuccca

SEQ ID NO: 434676 - RNA, 21 nt, Human
cccgaaccuccuccucccacc

SEQ ID NO: 434677 - RNA, 23 nt, Human
cgaaccuccuccucccaccacac

SEQ ID NO: 434678 - RNA, 20 nt, Human
cucccaccacacggagaacc

SEQ ID NO: 434679 - RNA, 30 nt, Human
cugaaaccaagugacaaauauccacaaaaa

SEQ ID NO: 434680 - RNA, 20 nt, Human
cuuucugaaaccaagugaca

SEQ ID NO: 434681 - RNA, 20 nt, Human
gacauggcacuuacccagca

SEQ ID NO: 434682 - RNA, 25 nt, Human
gcacccgaaccuccuccucccacca

SEQ ID NO: 434683 - RNA, 20 nt, Human
gucaaaugccucuguccaca

SEQ ID NO: 434684 - RNA, 27 nt, Human
gugaacuuucugaaaccaagugacaaa

SEQ ID NO: 434685 - RNA, 18 nt, Human
uaaaaaaauuuaaacaga

SEQ ID NO: 434686 - RNA, 25 nt, Human
uagcaauaagaagcacacuuaaauc

SEQ ID NO: 434687 - RNA, 20 nt, Human
uaugacauguuaaauucuua

SEQ ID NO: 434688 - RNA, 23 nt, Human
uauuuucuccuggucucuaccau

SEQ ID NO: 434689 - RNA, 25 nt, Human
ucaaaugccucuguccacacugaca

SEQ ID NO: 434690 - RNA, 21 nt, Human
ucacauuuucuaccuacucag

SEQ ID NO: 434691 - RNA, 18 nt, Human
ucuccuggucucuaccau

SEQ ID NO: 434692 - RNA, 20 nt, Human
ugcugcuauaaaaauaaaug

SEQ ID NO: 434693 - RNA, 20 nt, Human
uuaguauuuuuagcaauaag

SEQ ID NO: 434694 - RNA, 22 nt, Human
aacucugaaaaaugacagaaaa

SEQ ID NO: 434695 - RNA, 22 nt, Human
aauaaaugcauuuuuaaacuua

SEQ ID NO: 434696 - RNA, 18 nt, Human
acaacagacaaaacaugg

SEQ ID NO: 434697 - RNA, 23 nt, Human
agacaaaacauggacucacaauc

SEQ ID NO: 434698 - RNA, 21 nt, Human
agucacaggauuaaagaaaga

SEQ ID NO: 434699 - RNA, 21 nt, Human
auggcugcauaguauuccaug

SEQ ID NO: 434700 - RNA, 26 nt, Human
caaaacauggacucacaaucuaaacc

SEQ ID NO: 434701 - RNA, 19 nt, Human
cagagaaagaaaauuaagc

SEQ ID NO: 434702 - RNA, 18 nt, Human
caucaacccaucaucuac

SEQ ID NO: 434703 - RNA, 22 nt, Human
caucaacccaucaucuacauca

SEQ ID NO: 434704 - RNA, 20 nt, Human
cccaucaucuacaucaggua

SEQ ID NO: 434705 - RNA, 23 nt, Human
cccccauccccccaacaggcccc

SEQ ID NO: 434706 - RNA, 25 nt, Human
cccccauccccccaacaggccccag

SEQ ID NO: 434707 - RNA, 23 nt, Human
ccccuagcccccauccccccaac

SEQ ID NO: 434708 - RNA, 27 nt, Human
ccuacgaucgcccucacugacauugcc

SEQ ID NO: 434709 - RNA, 21 nt, Human
ccuagcccccauccccccaac

SEQ ID NO: 434710 - RNA, 22 nt, Human
ccuccccuagcccccauccccc

SEQ ID NO: 434711 - RNA, 23 nt, Human
cuccuaaugcuaucccuccccua

SEQ ID NO: 434712 - RNA, 20 nt, Human
gaauaugaacucauccuuuu

SEQ ID NO: 434713 - RNA, 18 nt, Human
gauuugguugcuggcaca

SEQ ID NO: 434714 - RNA, 20 nt, Human
gcauucuccaugacauccuc

SEQ ID NO: 434715 - RNA, 25 nt, Human
ggguauuuugguugguuccaagucu

SEQ ID NO: 434716 - RNA, 26 nt, Human
gucacuacuacaucaugcuuuuaauu

SEQ ID NO: 434717 - RNA, 18 nt, Human
gugugcaugugucuuuau

SEQ ID NO: 434718 - RNA, 20 nt, Human
gugugcaugugucuuuauag

SEQ ID NO: 434719 - RNA, 25 nt, Human
uaagaacaaguauuuaaaaagggaa

SEQ ID NO: 434720 - RNA, 23 nt, Human
uaaggcauauuaaggcuauaaaa

SEQ ID NO: 434721 - RNA, 26 nt, Human
uagcccccauccccccaacaggcccc

SEQ ID NO: 434722 - RNA, 22 nt, Human
uaggcacaacagacaaaacaug

SEQ ID NO: 434723 - RNA, 21 nt, Human
uauuccaugguguauaugugu

SEQ ID NO: 434724 - RNA, 18 nt, Human
ucccuccccuagccccca

SEQ ID NO: 434725 - RNA, 18 nt, Human
uccuguguuaguuugcug

SEQ ID NO: 434726 - RNA, 27 nt, Human
ugaaaaaugacagaaaaggaaaaccag

SEQ ID NO: 434727 - RNA, 20 nt, Human
ugaaguucagagaaagaaaa

SEQ ID NO: 434728 - RNA, 21 nt, Human
ugacagaaaaggaaaaccagu

SEQ ID NO: 434729 - RNA, 22 nt, Human
ugacagaaaaggaaaaccaguc

SEQ ID NO: 434730 - RNA, 24 nt, Human
ugaggaugaugguuuccagcuuca

SEQ ID NO: 434731 - RNA, 19 nt, Human
ugagugagaacaugcggug

SEQ ID NO: 434732 - RNA, 24 nt, Human
ugagugagaacaugcgguguuugg

SEQ ID NO: 434733 - RNA, 26 nt, Human
ugcugcaauaaacauacgugugcaug

SEQ ID NO: 434734 - RNA, 19 nt, Human
ugcuggguaaucaauugac

SEQ ID NO: 434735 - RNA, 22 nt, Human
uggcacaaaggcugcaugguau

SEQ ID NO: 434736 - RNA, 23 nt, Human
ugggucucugcauguucuggagg

SEQ ID NO: 434737 - RNA, 22 nt, Human
ugguguuccccucccugugucc

SEQ ID NO: 434738 - RNA, 21 nt, Human
uguaaacagugcugcaauaaa

SEQ ID NO: 434739 - RNA, 25 nt, Human
ugugaagaauaugaacucauccuuu

SEQ ID NO: 434740 - RNA, 24 nt, Human
uguuugguuuucuguuccuguguu

SEQ ID NO: 434741 - RNA, 24 nt, Human
uuaugagugagaacaugcgguguu

SEQ ID NO: 434742 - RNA, 19 nt, Human
uucagagaaagaaaauuaa

SEQ ID NO: 434743 - RNA, 25 nt, Human
uuccaugguguauaugugucacguu

SEQ ID NO: 434744 - RNA, 22 nt, Human
uucuauggcugcauaguauucc

SEQ ID NO: 434745 - RNA, 22 nt, Human
uugacuccccuuacccggaagu

SEQ ID NO: 434746 - RNA, 23 nt, Human
uugacuccccuuacccggaaguc

SEQ ID NO: 434747 - RNA, 24 nt, Human
uuuaaacuuaacacaguaggaaac

SEQ ID NO: 434748 - RNA, 23 nt, Human
uuuaauauuuugaaguucagaga

SEQ ID NO: 434749 - RNA, 19 nt, Human
uuuccagcuucauccaugu

SEQ ID NO: 434750 - RNA, 22 nt, Human
uuucucucaggaaagcuggagg

SEQ ID NO: 434751 - RNA, 24 nt, Human
aaaaggccacaacuaaguaucgua

SEQ ID NO: 434752 - RNA, 18 nt, Human
aacacaaggacugccacc

SEQ ID NO: 434753 - RNA, 20 nt, Human
aagaaccuucucuacucuuu

SEQ ID NO: 434754 - RNA, 21 nt, Human
aaggagauauacggccauuag

SEQ ID NO: 434755 - RNA, 27 nt, Human
aauauccaccuucuccugcccguggac

SEQ ID NO: 434756 - RNA, 21 nt, Human
acaacaagaagugccacugca

SEQ ID NO: 434757 - RNA, 19 nt, Human
acacacacacucuuaccug

SEQ ID NO: 434758 - RNA, 24 nt, Human
acagggaaacaugacaaccagaac

SEQ ID NO: 434759 - RNA, 20 nt, Human
acauuugauaaaaguaaggc

SEQ ID NO: 434760 - RNA, 18 nt, Human
acccuugcuuaauaaaau

SEQ ID NO: 434761 - RNA, 23 nt, Human
acccuuucugucuguuucugcca

SEQ ID NO: 434762 - RNA, 22 nt, Human
accucacuuugccuccuugcag

SEQ ID NO: 434763 - RNA, 21 nt, Human
accugaugaucuaaacaaaaa

SEQ ID NO: 434764 - RNA, 19 nt, Human
acuucuaacuccucagacu

SEQ ID NO: 434765 - RNA, 19 nt, Human
agaaaaacaguggggaugg

SEQ ID NO: 434766 - RNA, 21 nt, Human
agaacucaagguuaccuggcc

SEQ ID NO: 434767 - RNA, 19 nt, Human
agacugugggacuucuugg

SEQ ID NO: 434768 - RNA, 19 nt, Human
agagcccggcugcggcugu

SEQ ID NO: 434769 - RNA, 21 nt, Human
agcagaaaaacaguggggaug

SEQ ID NO: 434770 - RNA, 21 nt, Human
agccaaaaucugagcuguguu

SEQ ID NO: 434771 - RNA, 19 nt, Human
auaaaacgguaacuucuaa

SEQ ID NO: 434772 - RNA, 25 nt, Human
auauauccuauugguucuguuucuu

SEQ ID NO: 434773 - RNA, 19 nt, Human
auugguucuguuucucugg

SEQ ID NO: 434774 - RNA, 22 nt, Human
auuguagauaacccuaauagca

SEQ ID NO: 434775 - RNA, 20 nt, Human
caaaugucaccuuaucacca

SEQ ID NO: 434776 - RNA, 18 nt, Human
caccuuucugaccucagu

SEQ ID NO: 434777 - RNA, 18 nt, Human
cacugcauagccauagcu

SEQ ID NO: 434778 - RNA, 19 nt, Human
cagcucucugcuccaaccu

SEQ ID NO: 434779 - RNA, 25 nt, Human
ccaaaaucugagcuguguucacaga

SEQ ID NO: 434780 - RNA, 20 nt, Human
cccggccgcuggcugagagc

SEQ ID NO: 434781 - RNA, 20 nt, Human
ccugcccguggacgucagaa

SEQ ID NO: 434782 - RNA, 22 nt, Human
cgcccggccgcuggcugagagc

SEQ ID NO: 434783 - RNA, 23 nt, Human
cggcugcggcugucacuucccuu

SEQ ID NO: 434784 - RNA, 19 nt, Human
cucaaaaggccacaacuaa

SEQ ID NO: 434785 - RNA, 20 nt, Human
cucaaaaucuuccaaauucu

SEQ ID NO: 434786 - RNA, 20 nt, Human
cuucaugacuuuugcccuuc

SEQ ID NO: 434787 - RNA, 19 nt, Human
cuuggcuuccucccuaacu

SEQ ID NO: 434788 - RNA, 23 nt, Human
cuuucaguccuacccagugcgcc

SEQ ID NO: 434789 - RNA, 21 nt, Human
cuuuuuucucuccuuuuccuu

SEQ ID NO: 434790 - RNA, 18 nt, Human
gaagagauuagcauuuga

SEQ ID NO: 434791 - RNA, 20 nt, Human
gacaaauuacuccacccuuu

SEQ ID NO: 434792 - RNA, 20 nt, Human
gaccuagaacaguuuuggca

SEQ ID NO: 434793 - RNA, 18 nt, Human
gagaaaggggcagaaaug

SEQ ID NO: 434794 - RNA, 20 nt, Human
gagcccggcugcggcuguca

SEQ ID NO: 434795 - RNA, 20 nt, Human
gcacuccgccccggcagagu

SEQ ID NO: 434796 - RNA, 19 nt, Human
gccuuucaguccuacccag

SEQ ID NO: 434797 - RNA, 19 nt, Human
gcucaacucucaaaaggcc

SEQ ID NO: 434798 - RNA, 19 nt, Human
ggaaucccuuccacuggcu

SEQ ID NO: 434799 - RNA, 19 nt, Human
ggcauucccuuacccuacu

SEQ ID NO: 434800 - RNA, 18 nt, Human
gggagcagaaaaacagug

SEQ ID NO: 434801 - RNA, 18 nt, Human
gucaacuugacuggugaa

SEQ ID NO: 434802 - RNA, 22 nt, Human
gucaccuuaucaccaaugucuu

SEQ ID NO: 434803 - RNA, 22 nt, Human
gucagcuuucaccuuaguccuu

SEQ ID NO: 434804 - RNA, 22 nt, Human
gugaggagggaaaaaaaaccca

SEQ ID NO: 434805 - RNA, 18 nt, Human
gugcucaauaaauauuga

SEQ ID NO: 434806 - RNA, 20 nt, Human
guguauguuugugugugugu

SEQ ID NO: 434807 - RNA, 19 nt, Human
uaaaacacaaccagagucu

SEQ ID NO: 434808 - RNA, 24 nt, Human
uaaaacacaaccagagucugacca

SEQ ID NO: 434809 - RNA, 19 nt, Human
uaaaacuuuauuuuucuca

SEQ ID NO: 434810 - RNA, 21 nt, Human
uaacaaacacaaggacugcca

SEQ ID NO: 434811 - RNA, 23 nt, Human
uaacuccucagacuggcauuccc

SEQ ID NO: 434812 - RNA, 21 nt, Human
uaacugguguuucuucuucca

SEQ ID NO: 434813 - RNA, 21 nt, Human
uaaguuugugacagcaugauc

SEQ ID NO: 434814 - RNA, 23 nt, Human
uacaacaagaagugccacugcau

SEQ ID NO: 434815 - RNA, 24 nt, Human
uacauucaagcgagacuuccuaga

SEQ ID NO: 434816 - RNA, 22 nt, Human
uacuacaaggauaugcugacuc

SEQ ID NO: 434817 - RNA, 21 nt, Human
uacuccacccuuucugucugu

SEQ ID NO: 434818 - RNA, 22 nt, Human
uacuccacccuuucugucuguu

SEQ ID NO: 434819 - RNA, 19 nt, Human
uagaaauguuucaagucau

SEQ ID NO: 434820 - RNA, 20 nt, Human
uauuuucaugaauuaaaugg

SEQ ID NO: 434821 - RNA, 29 nt, Human
ucagcuuucaccuuaguccuugccuucca

SEQ ID NO: 434822 - RNA, 23 nt, Human
ucagucuuaccuuuccagcucuc

SEQ ID NO: 434823 - RNA, 21 nt, Human
uccgcugggcgcccggccgcu

SEQ ID NO: 434824 - RNA, 20 nt, Human
uccuaauucccauuuauauu

SEQ ID NO: 434825 - RNA, 21 nt, Human
uccuugaaaaagguggcacag

SEQ ID NO: 434826 - RNA, 19 nt, Human
ucugcaccuuucugaccuc

SEQ ID NO: 434827 - RNA, 25 nt, Human
ucuguuucucuggcgaacccuugcu

SEQ ID NO: 434828 - RNA, 20 nt, Human
ucuuuuuucucuccuuuucc

SEQ ID NO: 434829 - RNA, 22 nt, Human
ugacuauauuauccuaauuccc

SEQ ID NO: 434830 - RNA, 18 nt, Human
ugacuggugaagagaugg

SEQ ID NO: 434831 - RNA, 20 nt, Human
ugaggugagcauguuaaaac

SEQ ID NO: 434832 - RNA, 24 nt, Human
ugaggugagcauguuaaaacguug

SEQ ID NO: 434833 - RNA, 21 nt, Human
ugagguuugcugucaagucca

SEQ ID NO: 434834 - RNA, 19 nt, Human
ugaguguauguuugugugu

SEQ ID NO: 434835 - RNA, 24 nt, Human
ugaguguauguuugugugugugug

SEQ ID NO: 434836 - RNA, 18 nt, Human
ugauaaaaguaaggccuu

SEQ ID NO: 434837 - RNA, 20 nt, Human
ugauuagggccaaugcuggg

SEQ ID NO: 434838 - RNA, 19 nt, Human
ugccaaaggagauauacgg

SEQ ID NO: 434839 - RNA, 23 nt, Human
ugccauuguaauacugaauguaa

SEQ ID NO: 434840 - RNA, 21 nt, Human
ugcccguggacgucagaacuc

SEQ ID NO: 434841 - RNA, 19 nt, Human
ugcucaaaaucuuccaaau

SEQ ID NO: 434842 - RNA, 19 nt, Human
ugcuccaaccucacuuugc

SEQ ID NO: 434843 - RNA, 19 nt, Human
uggcaggcccaucaaauaa

SEQ ID NO: 434844 - RNA, 23 nt, Human
uggcuugugaguacgagguuauu

SEQ ID NO: 434845 - RNA, 22 nt, Human
ugguguuucuucuuccacucuu

SEQ ID NO: 434846 - RNA, 23 nt, Human
uguauguuuguguguguguguaa

SEQ ID NO: 434847 - RNA, 18 nt, Human
ugucugggugugucugug

SEQ ID NO: 434848 - RNA, 24 nt, Human
ugucugggugugucugugaggcug

SEQ ID NO: 434849 - RNA, 25 nt, Human
ugugaccaaaugucaccuuaucacc

SEQ ID NO: 434850 - RNA, 22 nt, Human
ugugugaguguauguuugugug

SEQ ID NO: 434851 - RNA, 19 nt, Human
ugugugugugaguguaugu

SEQ ID NO: 434852 - RNA, 19 nt, Human
ugugugugugaguguaugu

SEQ ID NO: 434853 - RNA, 20 nt, Human
uguuaaacaucugaaguguu

SEQ ID NO: 434854 - RNA, 19 nt, Human
uguuccuaagcacugaugg

SEQ ID NO: 434855 - RNA, 26 nt, Human
uuaaagcucaacucucaaaaggccac

SEQ ID NO: 434856 - RNA, 21 nt, Human
uuaacucuaccuuuaaaacac

SEQ ID NO: 434857 - RNA, 23 nt, Human
uuaccugaugaucuaaacaaaaa

SEQ ID NO: 434858 - RNA, 19 nt, Human
uucauugucugccuguaaa

SEQ ID NO: 434859 - RNA, 21 nt, Human
uucauugucugccuguaaacc

SEQ ID NO: 434860 - RNA, 19 nt, Human
uuccuggagcugaaauauc

SEQ ID NO: 434861 - RNA, 23 nt, Human
uugaaugaauauauuccugaaua

SEQ ID NO: 434862 - RNA, 20 nt, Human
uugcaaaugcaagacugugg

SEQ ID NO: 434863 - RNA, 24 nt, Human
uuggaaauuuuucaauacuaaaaa

SEQ ID NO: 434864 - RNA, 23 nt, Human
uuggauuaucgcaaacaaacuuc

SEQ ID NO: 434865 - RNA, 20 nt, Human
uuggcagcggacagucaguu

SEQ ID NO: 434866 - RNA, 20 nt, Human
uuucuuugcauuuccuucau

SEQ ID NO: 434867 - RNA, 23 nt, Human
acgccagcugcucaaacacgucg

SEQ ID NO: 434868 - RNA, 24 nt, Human
agcugguguacuuggugacagccu

SEQ ID NO: 434869 - RNA, 19 nt, Human
agggugguccggcccgagu

SEQ ID NO: 434870 - RNA, 20 nt, Human
gacacagcgugcuuggccag

SEQ ID NO: 434871 - RNA, 21 nt, Human
gccagccgggcagccucacac

SEQ ID NO: 434872 - RNA, 23 nt, Human
ggagcugguguacuuggugacag

SEQ ID NO: 434873 - RNA, 20 nt, Human
uggccagcuccccaggcagc

SEQ ID NO: 434874 - RNA, 20 nt, Human
ugaacugagaccccaaaugg

SEQ ID NO: 434875 - RNA, 21 nt, Human
aaacaaccuaaaagccaucca

SEQ ID NO: 434876 - RNA, 24 nt, Human
aaacuagauguacuuggcuuaaaa

SEQ ID NO: 434877 - RNA, 27 nt, Human
aagaacucugucacuugucaccaugcc

SEQ ID NO: 434878 - RNA, 19 nt, Human
aagcaaccagaugcugaaa

SEQ ID NO: 434879 - RNA, 24 nt, Human
accagaugcugaaacuggacagag

SEQ ID NO: 434880 - RNA, 18 nt, Human
acccugugccagguacug

SEQ ID NO: 434881 - RNA, 19 nt, Human
agaccugaaacagggggug

SEQ ID NO: 434882 - RNA, 19 nt, Human
agauguacuuggcuuaaaa

SEQ ID NO: 434883 - RNA, 22 nt, Human
agcaaccagaugcugaaacugg

SEQ ID NO: 434884 - RNA, 25 nt, Human
agccuggagcucccaggaagagcug

SEQ ID NO: 434885 - RNA, 20 nt, Human
aguaacuccaugcacuucuc

SEQ ID NO: 434886 - RNA, 18 nt, Human
augaagaggacagaaccc

SEQ ID NO: 434887 - RNA, 20 nt, Human
augcacuucucaaaacaauc

SEQ ID NO: 434888 - RNA, 18 nt, Human
auggauuccucugugacc

SEQ ID NO: 434889 - RNA, 23 nt, Human
caaaaauagccuggagcucccag

SEQ ID NO: 434890 - RNA, 24 nt, Human
caaccuaaaagccauccaucucuu

SEQ ID NO: 434891 - RNA, 27 nt, Human
cacauggauuccucugugaccaagucu

SEQ ID NO: 434892 - RNA, 19 nt, Human
cagccggaaccccuggcca

SEQ ID NO: 434893 - RNA, 18 nt, Human
cauggugggugcccccug

SEQ ID NO: 434894 - RNA, 21 nt, Human
ccagguacuguucuaaaugcu

SEQ ID NO: 434895 - RNA, 20 nt, Human
cccagcccccgcucucgacc

SEQ ID NO: 434896 - RNA, 22 nt, Human
ccccuggccagugcagcucccg

SEQ ID NO: 434897 - RNA, 21 nt, Human
ccggcccagcccccgcucucg

SEQ ID NO: 434898 - RNA, 19 nt, Human
ccuaaaagccauccaucuc

SEQ ID NO: 434899 - RNA, 21 nt, Human
ccucagggcucggccaccaga

SEQ ID NO: 434900 - RNA, 20 nt, Human
ccuggccagugcagcucccg

SEQ ID NO: 434901 - RNA, 26 nt, Human
cgcccccagucugguuccugcagcuc

SEQ ID NO: 434902 - RNA, 22 nt, Human
cgccgcuaccggcccagccccc

SEQ ID NO: 434903 - RNA, 22 nt, Human
cggacgcugugaguagaaacag

SEQ ID NO: 434904 - RNA, 23 nt, Human
cuaaaagccauccaucucuuuca

SEQ ID NO: 434905 - RNA, 24 nt, Human
cuuucagcuguguggcucucugau

SEQ ID NO: 434906 - RNA, 22 nt, Human
gaaccccuggccagugcagcuc

SEQ ID NO: 434907 - RNA, 21 nt, Human
gacgcagcuuccagaggaggg

SEQ ID NO: 434908 - RNA, 18 nt, Human
gagaugggagaccugaaa

SEQ ID NO: 434909 - RNA, 21 nt, Human
gaguagaaacaggaucuccug

SEQ ID NO: 434910 - RNA, 20 nt, Human
gcauaaguagggagcacccu

SEQ ID NO: 434911 - RNA, 22 nt, Human
gccauccaucucuuucagcugu

SEQ ID NO: 434912 - RNA, 20 nt, Human
gucacugagggagaugggag

SEQ ID NO: 434913 - RNA, 21 nt, Human
gugcauggugggugcccccug

SEQ ID NO: 434914 - RNA, 19 nt, Human
uaacaaugcaauggagaaa

SEQ ID NO: 434915 - RNA, 23 nt, Human
uaacaaugcaauggagaaaacca

SEQ ID NO: 434916 - RNA, 20 nt, Human
uacagccggaaccccuggcc

SEQ ID NO: 434917 - RNA, 21 nt, Human
uacaggugcucagcucgcccc

SEQ ID NO: 434918 - RNA, 18 nt, Human
uaccggcccagcccccgc

SEQ ID NO: 434919 - RNA, 21 nt, Human
uagaaacaggaucuccugcca

SEQ ID NO: 434920 - RNA, 22 nt, Human
uaugaaggauucaucugugcca

SEQ ID NO: 434921 - RNA, 20 nt, Human
ucacauggauuccucuguga

SEQ ID NO: 434922 - RNA, 24 nt, Human
uccagauaaauaugaaggauucau

SEQ ID NO: 434923 - RNA, 23 nt, Human
uccugcagcuccccggcugccag

SEQ ID NO: 434924 - RNA, 20 nt, Human
ugaaacagggggugagggga

SEQ ID NO: 434925 - RNA, 19 nt, Human
ugaagaguuguacaguugg

SEQ ID NO: 434926 - RNA, 23 nt, Human
ugagggagaugggagaccugaaa

SEQ ID NO: 434927 - RNA, 21 nt, Human
ugaggucagauccaggucacu

SEQ ID NO: 434928 - RNA, 22 nt, Human
ugcaauggagaaaaccaguaac

SEQ ID NO: 434929 - RNA, 21 nt, Human
uggacagagggcaagaacucu

SEQ ID NO: 434930 - RNA, 19 nt, Human
uggagcucccaggaagagc

SEQ ID NO: 434931 - RNA, 23 nt, Human
uggagcucccaggaagaggggag

SEQ ID NO: 434932 - RNA, 21 nt, Human
uggauuccucugugaccaagu

SEQ ID NO: 434933 - RNA, 25 nt, Human
uuccagaggagggcugcuggagcgu

SEQ ID NO: 434934 - RNA, 22 nt, Human
uuccugcagcuccccggcugcc

SEQ ID NO: 434935 - RNA, 27 nt, Human
uuccugcagcuccccggcugccagcgg

SEQ ID NO: 434936 - RNA, 22 nt, Human
uuccuugaagaguuguacaguu

SEQ ID NO: 434937 - RNA, 18 nt, Human
uuuuuuuuuuuuuuuucg

SEQ ID NO: 434938 - RNA, 20 nt, Human
uuuuuuuuuuuuuuuucgcu

SEQ ID NO: 434939 - RNA, 20 nt, Human
aaaaugcacccaaagaacua

SEQ ID NO: 434940 - RNA, 18 nt, Human
agacaaaaugcacccaaa

SEQ ID NO: 434941 - RNA, 21 nt, Human
agacaaaaugcacccaaagaa

SEQ ID NO: 434942 - RNA, 20 nt, Human
aguaaaagagcacauauaga

SEQ ID NO: 434943 - RNA, 24 nt, Human
aguuaaaauuugugcacuaagcug

SEQ ID NO: 434944 - RNA, 22 nt, Human
cacaauugugguucagacaaaa

SEQ ID NO: 434945 - RNA, 20 nt, Human
caucugcuggcuuauuugcu

SEQ ID NO: 434946 - RNA, 19 nt, Human
cauguuaucaucaacuaua

SEQ ID NO: 434947 - RNA, 18 nt, Human
ccugcggcgggaggagag

SEQ ID NO: 434948 - RNA, 19 nt, Human
cggacgcggcgccgcugcc

SEQ ID NO: 434949 - RNA, 19 nt, Human
cggcgggaggagagccggc

SEQ ID NO: 434950 - RNA, 21 nt, Human
cgggcgagagcggacgcggcg

SEQ ID NO: 434951 - RNA, 21 nt, Human
cuggaccucuucacccaucug

SEQ ID NO: 434952 - RNA, 18 nt, Human
cuucacccaucugcuggc

SEQ ID NO: 434953 - RNA, 24 nt, Human
gcggcgcgcggguccugcggcggg

SEQ ID NO: 434954 - RNA, 25 nt, Human
uaaaguaccauuaaaucaccuaaaa

SEQ ID NO: 434955 - RNA, 21 nt, Human
uaaaucaccuaaaacaaauaa

SEQ ID NO: 434956 - RNA, 24 nt, Human
uaaaucaccuaaaacaaauaaucu

SEQ ID NO: 434957 - RNA, 22 nt, Human
uaguaaaaauaaaaucuacgua

SEQ ID NO: 434958 - RNA, 26 nt, Human
uauauacaacaguuaaaauuugugca

SEQ ID NO: 434959 - RNA, 19 nt, Human
uaucagaguaaaagagcac

SEQ ID NO: 434960 - RNA, 22 nt, Human
ucagacaaaaugcacccaaaga

SEQ ID NO: 434961 - RNA, 23 nt, Human
uggcuuauuugcuuuauauacaa

SEQ ID NO: 434962 - RNA, 22 nt, Human
uguuuuguuucucuaaaaagua

SEQ ID NO: 434963 - RNA, 20 nt, Human
uucauguacauacuacuuug

SEQ ID NO: 434964 - RNA, 21 nt, Human
uuuuuuuuuuuuuuaaaaugg

SEQ ID NO: 434965 - RNA, 22 nt, Human
aucugggaagaccugacuauuc

SEQ ID NO: 434966 - RNA, 21 nt, Human
ccagggccuucagauaaucug

SEQ ID NO: 434967 - RNA, 19 nt, Human
ccuccuccuccuccucccc

SEQ ID NO: 434968 - RNA, 18 nt, Human
gggaauaaaccaaaaaaa

SEQ ID NO: 434969 - RNA, 18 nt, Human
gugaggcaagcacagccc

SEQ ID NO: 434970 - RNA, 21 nt, Human
gugaggcaagcacagcccugc

SEQ ID NO: 434971 - RNA, 21 nt, Human
ugacauacauaaaaaugguca

SEQ ID NO: 434972 - RNA, 19 nt, Human
ugaggcaagcacagcccug

SEQ ID NO: 434973 - RNA, 25 nt, Human
uguacaaaugauggcagaaagaucc

SEQ ID NO: 434974 - RNA, 20 nt, Human
uuccugugaggcaagcacag

SEQ ID NO: 434975 - RNA, 27 nt, Human
uugcuuuguuuuuaauacuggggaaua

SEQ ID NO: 434976 - RNA, 21 nt, Human
uuuacuggaguggaaucccca

SEQ ID NO: 434977 - RNA, 21 nt, Human
uuuguauccuucauucuacuu

SEQ ID NO: 434978 - RNA, 18 nt, Human
uuuuuuuuuuuuuuuuug

SEQ ID NO: 434979 - RNA, 26 nt, Human
aauggcggggguggccacccuagugu

SEQ ID NO: 434980 - RNA, 18 nt, Human
accccaucuccaccucca

SEQ ID NO: 434981 - RNA, 26 nt, Human
accccaucuccaccuccagccuccag

SEQ ID NO: 434982 - RNA, 21 nt, Human
agccgcaauacuccauuugac

SEQ ID NO: 434983 - RNA, 21 nt, Human
aggcaggcugggggaggggcu

SEQ ID NO: 434984 - RNA, 22 nt, Human
aggcccgcccgggaggccgcgc

SEQ ID NO: 434985 - RNA, 20 nt, Human
aggcgagcgaugagggcggc

SEQ ID NO: 434986 - RNA, 27 nt, Human
aucuccaccuccagccuccagccucac

SEQ ID NO: 434987 - RNA, 25 nt, Human
caccccuuucuaggcaggcuggggg

SEQ ID NO: 434988 - RNA, 18 nt, Human
caccgggccaggaggccg

SEQ ID NO: 434989 - RNA, 19 nt, Human
cagccgcuguccggccucg

SEQ ID NO: 434990 - RNA, 19 nt, Human
cagccucacuggcaguucc

SEQ ID NO: 434991 - RNA, 26 nt, Human
cagccucacuggcaguucccugugac

SEQ ID NO: 434992 - RNA, 23 nt, Human
ccauggcaucugagagcacccac

SEQ ID NO: 434993 - RNA, 18 nt, Human
ccccaucuccaccuccag

SEQ ID NO: 434994 - RNA, 21 nt, Human
ccccgggucccgggacauggc

SEQ ID NO: 434995 - RNA, 19 nt, Human
cccgaccccgggucccggg

SEQ ID NO: 434996 - RNA, 21 nt, Human
cccgcaacuauucuaggggcc

SEQ ID NO: 434997 - RNA, 18 nt, Human
cccucugccagauguucc

SEQ ID NO: 434998 - RNA, 22 nt, Human
ccuccagcgcggccaggcgggc

SEQ ID NO: 434999 - RNA, 19 nt, Human
ccucccagccgcccgaccc

SEQ ID NO: 435000 - RNA, 22 nt, Human
ccucccagccgcccgaccccgg

SEQ ID NO: 435001 - RNA, 22 nt, Human
ccuccucccagccgcccgaccc

SEQ ID NO: 435002 - RNA, 20 nt, Human
ccucggcggcgccgcccucc

SEQ ID NO: 435003 - RNA, 20 nt, Human
ccugccuucgcagcugcucc

SEQ ID NO: 435004 - RNA, 21 nt, Human
cgcggccaggcgggcgcggag

SEQ ID NO: 435005 - RNA, 18 nt, Human
cgggaggccgcgcggccg

SEQ ID NO: 435006 - RNA, 23 nt, Human
cgggaggccgcgcggccgccggc

SEQ ID NO: 435007 - RNA, 24 nt, Human
cucacuggcaguucccugugaccc

SEQ ID NO: 435008 - RNA, 25 nt, Human
cucacuggcaguucccugugaccca

SEQ ID NO: 435009 - RNA, 23 nt, Human
cucccggaagcgcgcaaccugcu

SEQ ID NO: 435010 - RNA, 24 nt, Human
cucccucucuuuuucuucuagucg

SEQ ID NO: 435011 - RNA, 24 nt, Human
cucccucugccagauguuccugac

SEQ ID NO: 435012 - RNA, 23 nt, Human
cugaccccaucuccaccuccagc

SEQ ID NO: 435013 - RNA, 20 nt, Human
cugcgcgcggggccuccucc

SEQ ID NO: 435014 - RNA, 21 nt, Human
cuggcaguucccugugaccca

SEQ ID NO: 435015 - RNA, 20 nt, Human
gaggccgcgcggccgccggc

SEQ ID NO: 435016 - RNA, 25 nt, Human
gcccuccugccuucgcagcugcucc

SEQ ID NO: 435017 - RNA, 21 nt, Human
gccucggcggcgccgcccucc

SEQ ID NO: 435018 - RNA, 23 nt, Human
gccuuggcucucaguagagcuca

SEQ ID NO: 435019 - RNA, 21 nt, Human
gcgcggcagcugcgcgcgggg

SEQ ID NO: 435020 - RNA, 22 nt, Human
gcggccgccggcaacuuccccu

SEQ ID NO: 435021 - RNA, 18 nt, Human
gcgggcgcggaggcgagc

SEQ ID NO: 435022 - RNA, 20 nt, Human
gcgucgcgggcagcgagcug

SEQ ID NO: 435023 - RNA, 22 nt, Human
ggagacacagacugggaccucc

SEQ ID NO: 435024 - RNA, 18 nt, Human
ucacagcagcaagaacgu

SEQ ID NO: 435025 - RNA, 22 nt, Human
ucagucagccucucaauuuccu

SEQ ID NO: 435026 - RNA, 21 nt, Human
uccauagccaaagggaccaaa

SEQ ID NO: 435027 - RNA, 23 nt, Human
uccauagccaaagggaccggggc

SEQ ID NO: 435028 - RNA, 23 nt, Human
ucccagccgcccgaccccggguc

SEQ ID NO: 435029 - RNA, 19 nt, Human
ucccucaggcagccacccc

SEQ ID NO: 435030 - RNA, 19 nt, Human
ucggcggcgccgcccuccu

SEQ ID NO: 435031 - RNA, 20 nt, Human
ugaaaugcaguuucucagug

SEQ ID NO: 435032 - RNA, 24 nt, Human
ugacccagccuguuccauagccaa

SEQ ID NO: 435033 - RNA, 20 nt, Human
ugacucccucaggcagccac

SEQ ID NO: 435034 - RNA, 20 nt, Human
ugagagcacccacccugucc

SEQ ID NO: 435035 - RNA, 19 nt, Human
ugcagagcgcggcagcugc

SEQ ID NO: 435036 - RNA, 21 nt, Human
ugcagagcgcggcagcugcgc

SEQ ID NO: 435037 - RNA, 22 nt, Human
uggaugacaaaugcuacugaaa

SEQ ID NO: 435038 - RNA, 22 nt, Human
uggcaguucccugugacccagc

SEQ ID NO: 435039 - RNA, 24 nt, Human
uuccauagaacaggauggggcucc

SEQ ID NO: 435040 - RNA, 21 nt, Human
uugcagucacagcagcaagaa

SEQ ID NO: 435041 - RNA, 20 nt, Human
uuucucagugcagacaugug

SEQ ID NO: 435042 - RNA, 18 nt, Human
uuuuuuuuuuuuuuuuug

SEQ ID NO: 435043 - RNA, 21 nt, Human
uuuuuuuuuuuuuuuuugcag

SEQ ID NO: 435044 - RNA, 22 nt, Human
uuuuuuuuuuuuuuuuugcagu

SEQ ID NO: 435045 - RNA, 21 nt, Human
aaaaggaauucuucuaaacau

SEQ ID NO: 435046 - RNA, 21 nt, Human
aaacagugauuaaaaaaaaug

SEQ ID NO: 435047 - RNA, 23 nt, Human
aacagugacuguucauuccaccc

SEQ ID NO: 435048 - RNA, 20 nt, Human
aagaaaccuuaaaaaccaac

SEQ ID NO: 435049 - RNA, 22 nt, Human
aagaaaccuuaaaaaccaacaa

SEQ ID NO: 435050 - RNA, 22 nt, Human
aagaacauuucauaacuaaccc

SEQ ID NO: 435051 - RNA, 18 nt, Human
aagaagaaagcugaaaag

SEQ ID NO: 435052 - RNA, 20 nt, Human
aagaagaaagcugaaaaggc

SEQ ID NO: 435053 - RNA, 19 nt, Human
aagaggcuuuguagaugcc

SEQ ID NO: 435054 - RNA, 19 nt, Human
aagcaaggaugaggacacc

SEQ ID NO: 435055 - RNA, 19 nt, Human
aagcagaaagaguuaaggg

SEQ ID NO: 435056 - RNA, 21 nt, Human
aagcauaucugccaccaccuc

SEQ ID NO: 435057 - RNA, 19 nt, Human
aagcaugcugagcccaguu

SEQ ID NO: 435058 - RNA, 25 nt, Human
aagcugaaaaggccaaauuaaauac

SEQ ID NO: 435059 - RNA, 19 nt, Human
aagguuuccuuucauuccu

SEQ ID NO: 435060 - RNA, 23 nt, Human
aaguucagaacacggccaagagg

SEQ ID NO: 435061 - RNA, 25 nt, Human
aaucaaagaacucagagagcuucaa

SEQ ID NO: 435062 - RNA, 26 nt, Human
acaacccaucccuccagcuggagccu

SEQ ID NO: 435063 - RNA, 20 nt, Human
acaaggaaagcaggguuuca

SEQ ID NO: 435064 - RNA, 23 nt, Human
acacacacacacacacacacaca

SEQ ID NO: 435065 - RNA, 23 nt, Human
acacacacacacacacacacaca

SEQ ID NO: 435066 - RNA, 23 nt, Human
acacacacacacacacacacaca

SEQ ID NO: 435067 - RNA, 23 nt, Human
acacacacacacacacacacaca

SEQ ID NO: 435068 - RNA, 23 nt, Human
acacacacacacacacacacaca

SEQ ID NO: 435069 - RNA, 23 nt, Human
acacacacacacacacacacaca

SEQ ID NO: 435070 - RNA, 23 nt, Human
acacacacacacacacacacaca

SEQ ID NO: 435071 - RNA, 23 nt, Human
acacacacacacacacacacaca

SEQ ID NO: 435072 - RNA, 18 nt, Human
acacacucggugacaaug

SEQ ID NO: 435073 - RNA, 20 nt, Human
acacagcaggacaaacauuc

SEQ ID NO: 435074 - RNA, 23 nt, Human
acaccuuuccaugaaggaaguga

SEQ ID NO: 435075 - RNA, 21 nt, Human
acagggaacacgacacagcuu

SEQ ID NO: 435076 - RNA, 18 nt, Human
acauaaaaccccaaaaga

SEQ ID NO: 435077 - RNA, 21 nt, Human
acauaaaaccccaaaagaaca

SEQ ID NO: 435078 - RNA, 20 nt, Human
acccagguggccaccauugu

SEQ ID NO: 435079 - RNA, 20 nt, Human
accccauggacagaccccuc

SEQ ID NO: 435080 - RNA, 18 nt, Human
acuaugugauagccugga

SEQ ID NO: 435081 - RNA, 23 nt, Human
acugaguuuaaaagauacaagga

SEQ ID NO: 435082 - RNA, 18 nt, Human
acugcaaacugcagugug

SEQ ID NO: 435083 - RNA, 21 nt, Human
acuggaaaugcaccauccucu

SEQ ID NO: 435084 - RNA, 19 nt, Human
acuggauugggauggagag

SEQ ID NO: 435085 - RNA, 23 nt, Human
agaaaaagaagaaaacaacgcag

SEQ ID NO: 435086 - RNA, 19 nt, Human
agagccauuugcuaaacau

SEQ ID NO: 435087 - RNA, 24 nt, Human
agcugaaaaggccaaauuaaauac

SEQ ID NO: 435088 - RNA, 21 nt, Human
agcugcccuguucccugaugg

SEQ ID NO: 435089 - RNA, 23 nt, Human
aggaagaaccacacgccuuccaa

SEQ ID NO: 435090 - RNA, 19 nt, Human
aggaugagaacugaaaaag

SEQ ID NO: 435091 - RNA, 21 nt, Human
aggcugccauugcaggagggc

SEQ ID NO: 435092 - RNA, 22 nt, Human
agggagcacaaaagagcaagcu

SEQ ID NO: 435093 - RNA, 27 nt, Human
agggagcacaaaagagcaagcuuuggg

SEQ ID NO: 435094 - RNA, 22 nt, Human
agguuuuggagaacaggaaguu

SEQ ID NO: 435095 - RNA, 26 nt, Human
auaacaauccauaugcaaagcauauc

SEQ ID NO: 435096 - RNA, 21 nt, Human
aucagcgccaacaccuuucca

SEQ ID NO: 435097 - RNA, 19 nt, Human
augauauggccccuacgca

SEQ ID NO: 435098 - RNA, 24 nt, Human
augggacuuguuuuuguuuuuugc

SEQ ID NO: 435099 - RNA, 26 nt, Human
auguagcccuuuacaucggcaccagg

SEQ ID NO: 435100 - RNA, 18 nt, Human
auugacagguaaggaagc

SEQ ID NO: 435101 - RNA, 25 nt, Human
caacccaucccuccagcuggagccu

SEQ ID NO: 435102 - RNA, 18 nt, Human
caaggaaagcaggguuuc

SEQ ID NO: 435103 - RNA, 23 nt, Human
cacaacccaucccuccagcugga

SEQ ID NO: 435104 - RNA, 20 nt, Human
cacacacacacacacacaca

SEQ ID NO: 435105 - RNA, 20 nt, Human
cacacacacacacacacaca

SEQ ID NO: 435106 - RNA, 20 nt, Human
cacacacacacacacacaca

SEQ ID NO: 435107 - RNA, 20 nt, Human
cacacacacacacacacaca

SEQ ID NO: 435108 - RNA, 20 nt, Human
cacacacacacacacacaca

SEQ ID NO: 435109 - RNA, 20 nt, Human
cacacacacacacacacaca

SEQ ID NO: 435110 - RNA, 20 nt, Human
cacacacacacacacacaca

SEQ ID NO: 435111 - RNA, 20 nt, Human
cacacacacacacacacaca

SEQ ID NO: 435112 - RNA, 20 nt, Human
cacacacacacacacacaca

SEQ ID NO: 435113 - RNA, 20 nt, Human
cacacacacacacacacaca

SEQ ID NO: 435114 - RNA, 20 nt, Human
cacacacacacacacacaca

SEQ ID NO: 435115 - RNA, 20 nt, Human
cacacacacacacacacaca

SEQ ID NO: 435116 - RNA, 20 nt, Human
cacacacacacacacacaca

SEQ ID NO: 435117 - RNA, 20 nt, Human
cacacacacacacacacaca

SEQ ID NO: 435118 - RNA, 22 nt, Human
cacacacacacacacacacaca

SEQ ID NO: 435119 - RNA, 22 nt, Human
cacacacacacacacacacaca

SEQ ID NO: 435120 - RNA, 22 nt, Human
cacacacacacacacacacaca

SEQ ID NO: 435121 - RNA, 22 nt, Human
cacacacacacacacacacaca

SEQ ID NO: 435122 - RNA, 22 nt, Human
cacacacacacacacacacaca

SEQ ID NO: 435123 - RNA, 22 nt, Human
cacacacacacacacacacaca

SEQ ID NO: 435124 - RNA, 22 nt, Human
cacacacacacacacacacaca

SEQ ID NO: 435125 - RNA, 22 nt, Human
cacacacacacacacacacaca

SEQ ID NO: 435126 - RNA, 22 nt, Human
cacacacacacacacacacaca

SEQ ID NO: 435127 - RNA, 22 nt, Human
cacacacacacacacacacaca

SEQ ID NO: 435128 - RNA, 22 nt, Human
cacacacacacacacacacaca

SEQ ID NO: 435129 - RNA, 22 nt, Human
cacacacacacacacacacaca

SEQ ID NO: 435130 - RNA, 20 nt, Human
cacacacccaugaauucgac

SEQ ID NO: 435131 - RNA, 20 nt, Human
caccaaaggcuaaacugcaa

SEQ ID NO: 435132 - RNA, 22 nt, Human
caccauccucuccauccccaca

SEQ ID NO: 435133 - RNA, 20 nt, Human
caccuccuccucuacacaca

SEQ ID NO: 435134 - RNA, 22 nt, Human
caccuccuccucuacacacaag

SEQ ID NO: 435135 - RNA, 20 nt, Human
cacgacacagcuuuucaaaa

SEQ ID NO: 435136 - RNA, 21 nt, Human
cacugcaaaucucaaguccca

SEQ ID NO: 435137 - RNA, 20 nt, Human
cagauagaaaacuaccccca

SEQ ID NO: 435138 - RNA, 21 nt, Human
cagauagaaaacuacccccau

SEQ ID NO: 435139 - RNA, 23 nt, Human
cagcgccaacaccuuuccaugaa

SEQ ID NO: 435140 - RNA, 27 nt, Human
caggaaccacacacaugauuggacaac

SEQ ID NO: 435141 - RNA, 23 nt, Human
caggaaccagguugccccacaag

SEQ ID NO: 435142 - RNA, 21 nt, Human
caggguuucauuagugggagc

SEQ ID NO: 435143 - RNA, 22 nt, Human
cauaacuaaccccaaaccaaaa

SEQ ID NO: 435144 - RNA, 20 nt, Human
cauaugcacgcacguguugg

SEQ ID NO: 435145 - RNA, 21 nt, Human
caucugcacaugucuggguga

SEQ ID NO: 435146 - RNA, 20 nt, Human
ccaaaggcuaaacugcaaac

SEQ ID NO: 435147 - RNA, 26 nt, Human
ccaacacacacacacacacacacaca

SEQ ID NO: 435148 - RNA, 18 nt, Human
ccacugcuuccugggccg

SEQ ID NO: 435149 - RNA, 20 nt, Human
ccagacagcuccuguccuag

SEQ ID NO: 435150 - RNA, 24 nt, Human
ccaggcuucaaguucagaacacgg

SEQ ID NO: 435151 - RNA, 19 nt, Human
cccaaccuggagcggucac

SEQ ID NO: 435152 - RNA, 19 nt, Human
cccacaacccaucccucca

SEQ ID NO: 435153 - RNA, 20 nt, Human
cccauggacagaccccucac

SEQ ID NO: 435154 - RNA, 21 nt, Human
ccgcaaacagaaaaauaaaca

SEQ ID NO: 435155 - RNA, 25 nt, Human
ccuccagcuggagccuuuugcuggg

SEQ ID NO: 435156 - RNA, 21 nt, Human
ccucccacugcuuccugggcc

SEQ ID NO: 435157 - RNA, 23 nt, Human
ccuuccaccaucuuccaugagag

SEQ ID NO: 435158 - RNA, 25 nt, Human
ccuuccaccaucuuccaugagaguc

SEQ ID NO: 435159 - RNA, 19 nt, Human
cggcaccagggaagccugc

SEQ ID NO: 435160 - RNA, 21 nt, Human
cucagcccgacagacugaggc

SEQ ID NO: 435161 - RNA, 25 nt, Human
cucauggccacccugucagagccau

SEQ ID NO: 435162 - RNA, 23 nt, Human
cucucuguuccccuggcuccuua

SEQ ID NO: 435163 - RNA, 23 nt, Human
cucugaccuccacaucccaccuc

SEQ ID NO: 435164 - RNA, 21 nt, Human
cugcuccagccucugccucag

SEQ ID NO: 435165 - RNA, 24 nt, Human
cugcugcaucgugcacagcugggg

SEQ ID NO: 435166 - RNA, 27 nt, Human
cugcugcaucgugcacagcuggggugg

SEQ ID NO: 435167 - RNA, 19 nt, Human
cuuaaaaaccaacaacagc

SEQ ID NO: 435168 - RNA, 19 nt, Human
cuuaguggcauaugaaggu

SEQ ID NO: 435169 - RNA, 19 nt, Human
cuucagagcuuuuguucuu

SEQ ID NO: 435170 - RNA, 22 nt, Human
cuuccaccaucuuccaugagag

SEQ ID NO: 435171 - RNA, 21 nt, Human
cuugcagauaggaggcuacug

SEQ ID NO: 435172 - RNA, 20 nt, Human
cuuuugcuuuugaacaguuu

SEQ ID NO: 435173 - RNA, 19 nt, Human
gaagaaccacacgccuucc

SEQ ID NO: 435174 - RNA, 19 nt, Human
gaccuccacaucccaccuc

SEQ ID NO: 435175 - RNA, 19 nt, Human
gacuuguuuuuguuuuuug

SEQ ID NO: 435176 - RNA, 23 nt, Human
gagaugcucugaccuccacaucc

SEQ ID NO: 435177 - RNA, 24 nt, Human
gcaaaucucaagucccaaauaauc

SEQ ID NO: 435178 - RNA, 24 nt, Human
gcaacucgcaggaaccacacacau

SEQ ID NO: 435179 - RNA, 28 nt, Human
gcacagccccaaagcaugagggaacgcc

SEQ ID NO: 435180 - RNA, 18 nt, Human
gcagagccugagggacuc

SEQ ID NO: 435181 - RNA, 19 nt, Human
gcagggccaccuccuccuc

SEQ ID NO: 435182 - RNA, 23 nt, Human
gcaggguuucauuagugggagcu

SEQ ID NO: 435183 - RNA, 18 nt, Human
gcggggagcaggaaccag

SEQ ID NO: 435184 - RNA, 21 nt, Human
gcuaaacugcaaacugcagug

SEQ ID NO: 435185 - RNA, 22 nt, Human
gcuugcagauaggaggcuacug

SEQ ID NO: 435186 - RNA, 21 nt, Human
ggaaauggaguagggggccca

SEQ ID NO: 435187 - RNA, 20 nt, Human
ggacauuuugaggacaagca

SEQ ID NO: 435188 - RNA, 23 nt, Human
ggacuuguuuuuguuuuuugcuu

SEQ ID NO: 435189 - RNA, 23 nt, Human
ggagaggaugagaacugaaaaag

SEQ ID NO: 435190 - RNA, 19 nt, Human
ggaguuccauuccugccag

SEQ ID NO: 435191 - RNA, 25 nt, Human
gggaagcagaaagaguuaagggaag

SEQ ID NO: 435192 - RNA, 21 nt, Human
gggaguggggacccaaggagc

SEQ ID NO: 435193 - RNA, 20 nt, Human
ggggaguggggacccaagga

SEQ ID NO: 435194 - RNA, 18 nt, Human
gggugugaaaucacugcc

SEQ ID NO: 435195 - RNA, 20 nt, Human
ggugauaauucauuaaucaa

SEQ ID NO: 435196 - RNA, 21 nt, Human
gguugucccaguuuucagucu

SEQ ID NO: 435197 - RNA, 25 nt, Human
gugcugccccacaauucucucuguu

SEQ ID NO: 435198 - RNA, 19 nt, Human
uaaaaaaaaugccaaagug

SEQ ID NO: 435199 - RNA, 18 nt, Human
uaaagaaauccagugaaa

SEQ ID NO: 435200 - RNA, 31 nt, Human
uaacuaaccccaaaccaaaauguagaugcug

SEQ ID NO: 435201 - RNA, 21 nt, Human
uaacucuaucucuuugagguu

SEQ ID NO: 435202 - RNA, 19 nt, Human
uaaggaaggggguuguccc

SEQ ID NO: 435203 - RNA, 20 nt, Human
uaauccuaauauuuggugcc

SEQ ID NO: 435204 - RNA, 21 nt, Human
uaauguuugucaccugccuca

SEQ ID NO: 435205 - RNA, 18 nt, Human
uacaaggaaagcaggguu

SEQ ID NO: 435206 - RNA, 21 nt, Human
uacauaaaaccccaaaagaac

SEQ ID NO: 435207 - RNA, 23 nt, Human
uaccacuggugucagagagacag

SEQ ID NO: 435208 - RNA, 21 nt, Human
uaccagaaacacagaagaggu

SEQ ID NO: 435209 - RNA, 24 nt, Human
uagaaaguuauucaaaagggagca

SEQ ID NO: 435210 - RNA, 18 nt, Human
uagccucacucuugaucu

SEQ ID NO: 435211 - RNA, 25 nt, Human
uagggugaacaagcuccaccaguuu

SEQ ID NO: 435212 - RNA, 21 nt, Human
uauacuggauugggauggaga

SEQ ID NO: 435213 - RNA, 20 nt, Human
uaugugaaguuauugaacac

SEQ ID NO: 435214 - RNA, 21 nt, Human
uaugugaaguuauugaacacg

SEQ ID NO: 435215 - RNA, 20 nt, Human
ucaaaagugguuaauuugaa

SEQ ID NO: 435216 - RNA, 23 nt, Human
ucacacacacucggugacaaugu

SEQ ID NO: 435217 - RNA, 18 nt, Human
ucacaggcacagcagcgc

SEQ ID NO: 435218 - RNA, 26 nt, Human
ucacugcaaucuuaggcaggccccuu

SEQ ID NO: 435219 - RNA, 21 nt, Human
ucagaaauuguuggauuuguu

SEQ ID NO: 435220 - RNA, 23 nt, Human
ucagaaauuguuggauuuguuua

SEQ ID NO: 435221 - RNA, 22 nt, Human
ucagcgccaacaccuuuccaug

SEQ ID NO: 435222 - RNA, 23 nt, Human
ucaucugcacaugucugggugau

SEQ ID NO: 435223 - RNA, 21 nt, Human
uccaacacacacacacacaca

SEQ ID NO: 435224 - RNA, 22 nt, Human
uccaccagccaagugcugggac

SEQ ID NO: 435225 - RNA, 19 nt, Human
uccccccuucuuuuugagu

SEQ ID NO: 435226 - RNA, 23 nt, Human
ucccuccagcuggagccuuuugc

SEQ ID NO: 435227 - RNA, 19 nt, Human
uccuccaggcuucaaguuc

SEQ ID NO: 435228 - RNA, 21 nt, Human
uccuccaggcuucaaguucag

SEQ ID NO: 435229 - RNA, 25 nt, Human
uccuccaggcuucaaguucagaaca

SEQ ID NO: 435230 - RNA, 23 nt, Human
ucuaguguugcagagccugagga

SEQ ID NO: 435231 - RNA, 21 nt, Human
ucucaagucccaaauaaucuc

SEQ ID NO: 435232 - RNA, 18 nt, Human
ucuuaagcacagccccaa

SEQ ID NO: 435233 - RNA, 25 nt, Human
ucuucuaauucuguuccuuggcugu

SEQ ID NO: 435234 - RNA, 26 nt, Human
ugaaaaggucacauguggacacuacu

SEQ ID NO: 435235 - RNA, 19 nt, Human
ugacucaugguguuuuaac

SEQ ID NO: 435236 - RNA, 24 nt, Human
ugacuguucauuccaccccccaaa

SEQ ID NO: 435237 - RNA, 26 nt, Human
ugagacaccaaaggcuaaacugcaag

SEQ ID NO: 435238 - RNA, 18 nt, Human
ugaggacaagcaugcuga

SEQ ID NO: 435239 - RNA, 31 nt, Human
ugaggacacccaggcauugugccaaggcugg

SEQ ID NO: 435240 - RNA, 24 nt, Human
ugauaucaucaucugagaagcaau

SEQ ID NO: 435241 - RNA, 23 nt, Human
ugauauggaaagaagcuuuuuuu

SEQ ID NO: 435242 - RNA, 19 nt, Human
ugaugcagaguauaugaca

SEQ ID NO: 435243 - RNA, 19 nt, Human
ugcaaaucucaagucccaa

SEQ ID NO: 435244 - RNA, 21 nt, Human
ugccauugcaggagggcacag

SEQ ID NO: 435245 - RNA, 22 nt, Human
ugccucagaagaggaaacucag

SEQ ID NO: 435246 - RNA, 23 nt, Human
ugccucagaagaggaaacucagc

SEQ ID NO: 435247 - RNA, 21 nt, Human
ugcugggacccagguggccac

SEQ ID NO: 435248 - RNA, 18 nt, Human
uggaaaugcaccaucccu

SEQ ID NO: 435249 - RNA, 19 nt, Human
uggaaaugcaccauccucu

SEQ ID NO: 435250 - RNA, 23 nt, Human
uggacaagucuguacauaaaacc

SEQ ID NO: 435251 - RNA, 21 nt, Human
ugggaaauggaguagggggcc

SEQ ID NO: 435252 - RNA, 19 nt, Human
ugggacccagguggccacc

SEQ ID NO: 435253 - RNA, 18 nt, Human
uggggacccaaggagcgg

SEQ ID NO: 435254 - RNA, 22 nt, Human
uggggaguggggacccaaggag

SEQ ID NO: 435255 - RNA, 23 nt, Human
uggggcauacugacaaacacuuc

SEQ ID NO: 435256 - RNA, 22 nt, Human
uggggugguaauguuugucacc

SEQ ID NO: 435257 - RNA, 21 nt, Human
ugucaaggucuacaggauugu

SEQ ID NO: 435258 - RNA, 25 nt, Human
ugugccaaggcugccauugcaggag

SEQ ID NO: 435259 - RNA, 19 nt, Human
uuaaaagauacaaggaaag

SEQ ID NO: 435260 - RNA, 19 nt, Human
uuaaauagcuaccagaaac

SEQ ID NO: 435261 - RNA, 18 nt, Human
uuaaccagacuuucucuu

SEQ ID NO: 435262 - RNA, 20 nt, Human
uuaauaaaaacugagauugc

SEQ ID NO: 435263 - RNA, 18 nt, Human
uuagauuccuuagguaag

SEQ ID NO: 435264 - RNA, 23 nt, Human
uuagugggagcugauuuaggguu

SEQ ID NO: 435265 - RNA, 22 nt, Human
uucauaacuaaccccaaaccaa

SEQ ID NO: 435266 - RNA, 20 nt, Human
uuccaugauuaaacuugccc

SEQ ID NO: 435267 - RNA, 18 nt, Human
uuccuagggugaacaagc

SEQ ID NO: 435268 - RNA, 19 nt, Human
uucuguuccuuggcugugc

SEQ ID NO: 435269 - RNA, 22 nt, Human
uucuucuaucacaacauaguug

SEQ ID NO: 435270 - RNA, 22 nt, Human
uugaaagaaaccuuaaaaaccu

SEQ ID NO: 435271 - RNA, 20 nt, Human
uugaauaacaaccaccacuc

SEQ ID NO: 435272 - RNA, 20 nt, Human
uugcagagccugagggacuc

SEQ ID NO: 435273 - RNA, 18 nt, Human
uugcaucugcugcaucgu

SEQ ID NO: 435274 - RNA, 23 nt, Human
uugcuguguaccuauacauuguu

SEQ ID NO: 435275 - RNA, 19 nt, Human
uugugccaaggcugccauu

SEQ ID NO: 435276 - RNA, 19 nt, Human
uuuaaaaaaaaacaacaac

SEQ ID NO: 435277 - RNA, 21 nt, Human
uuuccaagcaaugagaaaugg

SEQ ID NO: 435278 - RNA, 18 nt, Human
uuucuucuaauucuguuc

SEQ ID NO: 435279 - RNA, 19 nt, Human
uuugguuuuuuuuggccau

SEQ ID NO: 435280 - RNA, 24 nt, Human
uuuucuucuucggcuuuaaaacag

SEQ ID NO: 435281 - RNA, 24 nt, Human
uuuuuagaaagacuuaccuaguca

SEQ ID NO: 435282 - RNA, 18 nt, Human
aaaaggaaacaaaaacag

SEQ ID NO: 435283 - RNA, 25 nt, Human
aaggaaacaaaaacaguaauucuga

SEQ ID NO: 435284 - RNA, 21 nt, Human
aggaaacaaaaacaguaauuc

SEQ ID NO: 435285 - RNA, 18 nt, Human
agggggcugcuguaugug

SEQ ID NO: 435286 - RNA, 24 nt, Human
caaaaacaguaauucugaagagca

SEQ ID NO: 435287 - RNA, 23 nt, Human
ccuggcccauuccaggccagcug

SEQ ID NO: 435288 - RNA, 19 nt, Human
cugaaaugcugauucuguc

SEQ ID NO: 435289 - RNA, 23 nt, Human
gggaacaggcagccaggaccagc

SEQ ID NO: 435290 - RNA, 20 nt, Human
ugggguaaaaggaaacaaaa

SEQ ID NO: 435291 - RNA, 18 nt, Human
uguccagggggcugcugu

SEQ ID NO: 435292 - RNA, 20 nt, Human
uuggagagaagggaagacug

SEQ ID NO: 435293 - RNA, 22 nt, Human
uuuuuuuuuuuuuugggcuaga

SEQ ID NO: 435294 - RNA, 19 nt, Human
aaaaagaugcuaauaccac

SEQ ID NO: 435295 - RNA, 25 nt, Human
aaacaaaaacaaacagcacaagcaa

SEQ ID NO: 435296 - RNA, 24 nt, Human
aaauaaaaaggcacauaaaaauau

SEQ ID NO: 435297 - RNA, 21 nt, Human
aacaaaaacaaacagcacaag

SEQ ID NO: 435298 - RNA, 24 nt, Human
aacaaaaauaaaaaggcacauaaa

SEQ ID NO: 435299 - RNA, 22 nt, Human
aacagcacaagcaaacagaaau

SEQ ID NO: 435300 - RNA, 21 nt, Human
acaaaaacaaacagcacaagc

SEQ ID NO: 435301 - RNA, 23 nt, Human
acaaaacaagcauaugcaauagu

SEQ ID NO: 435302 - RNA, 20 nt, Human
acagagaaagauugccugga

SEQ ID NO: 435303 - RNA, 21 nt, Human
agacacuuggucugagaaaca

SEQ ID NO: 435304 - RNA, 24 nt, Human
agacaggaagcagagcagggccag

SEQ ID NO: 435305 - RNA, 26 nt, Human
agacaggaagcagagcagggccagga

SEQ ID NO: 435306 - RNA, 22 nt, Human
agccaagagucaaacaaaacaa

SEQ ID NO: 435307 - RNA, 21 nt, Human
aggaagcagagcagggccagg

SEQ ID NO: 435308 - RNA, 18 nt, Human
aggauaugaaggugaagg

SEQ ID NO: 435309 - RNA, 23 nt, Human
aggcagccaagagucaaacaaaa

SEQ ID NO: 435310 - RNA, 21 nt, Human
aggcccuuucugggggcagga

SEQ ID NO: 435311 - RNA, 21 nt, Human
agggggaggggggcucuaaga

SEQ ID NO: 435312 - RNA, 20 nt, Human
agguggguggcagggggagg

SEQ ID NO: 435313 - RNA, 26 nt, Human
agguggguggcagggggaggggggcu

SEQ ID NO: 435314 - RNA, 18 nt, Human
auggcucccauuccaccc

SEQ ID NO: 435315 - RNA, 22 nt, Human
caaacaauggcuuagaaaaugc

SEQ ID NO: 435316 - RNA, 19 nt, Human
caacaaaaauaaaaaggca

SEQ ID NO: 435317 - RNA, 21 nt, Human
caagaugaaaguuggaacuug

SEQ ID NO: 435318 - RNA, 22 nt, Human
caagcaaacagaaauuauaauc

SEQ ID NO: 435319 - RNA, 25 nt, Human
cacaagcaaacagaaauuauaauca

SEQ ID NO: 435320 - RNA, 20 nt, Human
cacauugacagaugaaaaac

SEQ ID NO: 435321 - RNA, 20 nt, Human
caccaacaaaaauaaaaagg

SEQ ID NO: 435322 - RNA, 22 nt, Human
caguuuacuuuguaggaaugau

SEQ ID NO: 435323 - RNA, 22 nt, Human
cauuaacucaauuuuuucuaca

SEQ ID NO: 435324 - RNA, 19 nt, Human
ccaacaaaaauaaaaaggc

SEQ ID NO: 435325 - RNA, 21 nt, Human
ccaagagucaaacaaaacaag

SEQ ID NO: 435326 - RNA, 24 nt, Human
ccaccuuuacaaugguuccaacuc

SEQ ID NO: 435327 - RNA, 22 nt, Human
cccacaaaacuccauguuuggg

SEQ ID NO: 435328 - RNA, 19 nt, Human
ccuccuaguuggaaauaaa

SEQ ID NO: 435329 - RNA, 22 nt, Human
ccuccuaguuggaaauaaaggc

SEQ ID NO: 435330 - RNA, 19 nt, Human
ccugaggugcacugguucu

SEQ ID NO: 435331 - RNA, 22 nt, Human
cuacauaaaaaagaugcuaaua

SEQ ID NO: 435332 - RNA, 27 nt, Human
cucuaagaucaggauaugaaggugaag

SEQ ID NO: 435333 - RNA, 20 nt, Human
cucuaucacuucaugcaaca

SEQ ID NO: 435334 - RNA, 20 nt, Human
cuuguccaaugaccucccca

SEQ ID NO: 435335 - RNA, 25 nt, Human
gaaaaacaaaaacaaacagcacaag

SEQ ID NO: 435336 - RNA, 21 nt, Human
gacaccuagguuuucaguucc

SEQ ID NO: 435337 - RNA, 26 nt, Human
gacuuauuauucucccaguuuacuuu

SEQ ID NO: 435338 - RNA, 20 nt, Human
gccaagagucaaacaaaaca

SEQ ID NO: 435339 - RNA, 22 nt, Human
gcccggguagucacgaucauuc

SEQ ID NO: 435340 - RNA, 18 nt, Human
gcuuagaaaaugcugacu

SEQ ID NO: 435341 - RNA, 23 nt, Human
ggaaauguauuucuucccaaccc

SEQ ID NO: 435342 - RNA, 19 nt, Human
ggacugacucaccacugaa

SEQ ID NO: 435343 - RNA, 19 nt, Human
ggauaugaaggugaaggga

SEQ ID NO: 435344 - RNA, 23 nt, Human
ggcaggaagugggauuuucaggg

SEQ ID NO: 435345 - RNA, 21 nt, Human
gggccaggaaauggaaggggc

SEQ ID NO: 435346 - RNA, 20 nt, Human
ggggacccuacagacguagg

SEQ ID NO: 435347 - RNA, 22 nt, Human
ggguggcagggggaggggggcu

SEQ ID NO: 435348 - RNA, 18 nt, Human
guggcagggggagggggg

SEQ ID NO: 435349 - RNA, 22 nt, Human
guucccauugagaggacucuau

SEQ ID NO: 435350 - RNA, 19 nt, Human
guuuauugugacaccuagg

SEQ ID NO: 435351 - RNA, 22 nt, Human
uaaagugcaccugucaagauca

SEQ ID NO: 435352 - RNA, 23 nt, Human
uaaagugcaccugucaagaucau

SEQ ID NO: 435353 - RNA, 22 nt, Human
uacagggcugcuuugccucagc

SEQ ID NO: 435354 - RNA, 19 nt, Human
uacccuauaaaacacagau

SEQ ID NO: 435355 - RNA, 19 nt, Human
uagaaaaaaaaauccaggu

SEQ ID NO: 435356 - RNA, 23 nt, Human
uagacaaaaauuaaauagaaaaa

SEQ ID NO: 435357 - RNA, 21 nt, Human
uaguuggaaauaaaggcccuu

SEQ ID NO: 435358 - RNA, 24 nt, Human
ucagccccaccauauguaagugca

SEQ ID NO: 435359 - RNA, 19 nt, Human
ucaguuccuuuuaguggcu

SEQ ID NO: 435360 - RNA, 19 nt, Human
uccaacucaacacuccacc

SEQ ID NO: 435361 - RNA, 18 nt, Human
uccaaugaccuccccacc

SEQ ID NO: 435362 - RNA, 24 nt, Human
uccaaugaccuccccaccaacaaa

SEQ ID NO: 435363 - RNA, 23 nt, Human
uccacucuacccuauaaaacaca

SEQ ID NO: 435364 - RNA, 25 nt, Human
uccacucuacccuauaaaacacaga

SEQ ID NO: 435365 - RNA, 18 nt, Human
ucccaacccaguccaccc

SEQ ID NO: 435366 - RNA, 25 nt, Human
ucccaacccaguccaccccauuaac

SEQ ID NO: 435367 - RNA, 22 nt, Human
uccccaccaacaaaaauaaaaa

SEQ ID NO: 435368 - RNA, 19 nt, Human
uccuaguuggaaauaaagg

SEQ ID NO: 435369 - RNA, 18 nt, Human
ucuacuaggcuuugccca

SEQ ID NO: 435370 - RNA, 21 nt, Human
ucuccccaguaaagugcaccu

SEQ ID NO: 435371 - RNA, 21 nt, Human
ucuucccaacccaguccaccc

SEQ ID NO: 435372 - RNA, 18 nt, Human
ucuuuguaauugugggag

SEQ ID NO: 435373 - RNA, 23 nt, Human
ugacaccuagguuuucaguuccu

SEQ ID NO: 435374 - RNA, 23 nt, Human
ugaccugccauggcucccauucc

SEQ ID NO: 435375 - RNA, 18 nt, Human
ugagaggacucuaugacc

SEQ ID NO: 435376 - RNA, 19 nt, Human
ugagguagacaggaagcag

SEQ ID NO: 435377 - RNA, 23 nt, Human
ugccucagccccaccauauguaa

SEQ ID NO: 435378 - RNA, 18 nt, Human
ugcuaguaugacaguaug

SEQ ID NO: 435379 - RNA, 18 nt, Human
uggaagcccacaaaacuc

SEQ ID NO: 435380 - RNA, 21 nt, Human
uggguggcagggggagggggg

SEQ ID NO: 435381 - RNA, 24 nt, Human
uguccaaugaccuccccaccaaca

SEQ ID NO: 435382 - RNA, 19 nt, Human
ugugacaccuagguuuuca

SEQ ID NO: 435383 - RNA, 28 nt, Human
uuccaacucaacacuccacccaggaagc

SEQ ID NO: 435384 - RNA, 18 nt, Human
uugaagccuacagggcug

SEQ ID NO: 435385 - RNA, 18 nt, Human
uuucaggggacccuacag

SEQ ID NO: 435386 - RNA, 25 nt, Human
uuucugggggcaggaagugggauuu

SEQ ID NO: 435387 - RNA, 23 nt, Human
aaaguaggcacuacgugcacccc

SEQ ID NO: 435388 - RNA, 18 nt, Human
aagcaauucagggcuagg

SEQ ID NO: 435389 - RNA, 18 nt, Human
aagugcuaagaccaaagc

SEQ ID NO: 435390 - RNA, 22 nt, Human
aauggauccuccccuggggucu

SEQ ID NO: 435391 - RNA, 21 nt, Human
acacaaacgcauacacaugcu

SEQ ID NO: 435392 - RNA, 19 nt, Human
acacacacucccccagccc

SEQ ID NO: 435393 - RNA, 21 nt, Human
accaaagcccacccccacccc

SEQ ID NO: 435394 - RNA, 20 nt, Human
acucggcccacaucccccuu

SEQ ID NO: 435395 - RNA, 22 nt, Human
agaaggaaagugcuaagaccaa

SEQ ID NO: 435396 - RNA, 23 nt, Human
agaccaaagcccacccccacccc

SEQ ID NO: 435397 - RNA, 22 nt, Human
agagaagccccacugagccccu

SEQ ID NO: 435398 - RNA, 24 nt, Human
agcgaugcacccggaauggcuucc

SEQ ID NO: 435399 - RNA, 18 nt, Human
agcgcucaccaucgaagg

SEQ ID NO: 435400 - RNA, 20 nt, Human
aggaaggaggucagagccug

SEQ ID NO: 435401 - RNA, 22 nt, Human
aggaaggaggucagagccuggg

SEQ ID NO: 435402 - RNA, 18 nt, Human
aggggggaucuggagaag

SEQ ID NO: 435403 - RNA, 21 nt, Human
aggucagagccugggucagga

SEQ ID NO: 435404 - RNA, 20 nt, Human
caaacgcauacacaugcuug

SEQ ID NO: 435405 - RNA, 22 nt, Human
caaagcccacccccaccccagg

SEQ ID NO: 435406 - RNA, 20 nt, Human
cacaucccccuuccugcagc

SEQ ID NO: 435407 - RNA, 19 nt, Human
cacuacgugcacccaggac

SEQ ID NO: 435408 - RNA, 20 nt, Human
cacugagccccucgcacccc

SEQ ID NO: 435409 - RNA, 21 nt, Human
cacugagccccucgcaccccc

SEQ ID NO: 435410 - RNA, 19 nt, Human
cagcuuagagaagcaauuc

SEQ ID NO: 435411 - RNA, 25 nt, Human
caggacgcagcgaugcacccggaau

SEQ ID NO: 435412 - RNA, 19 nt, Human
cagggcuaggcaagggcca

SEQ ID NO: 435413 - RNA, 18 nt, Human
ccacacaagcaggcauag

SEQ ID NO: 435414 - RNA, 25 nt, Human
ccacaucccccuuccugcagcuggc

SEQ ID NO: 435415 - RNA, 20 nt, Human
ccacugagccccucgcaccc

SEQ ID NO: 435416 - RNA, 21 nt, Human
ccacugagccccucgcacccc

SEQ ID NO: 435417 - RNA, 18 nt, Human
cccacacaagcaggcaua

SEQ ID NO: 435418 - RNA, 25 nt, Human
cccacugagccccucgcacccccca

SEQ ID NO: 435419 - RNA, 21 nt, Human
cccagggucuugggggcuggc

SEQ ID NO: 435420 - RNA, 22 nt, Human
ccccagcccuuccugaauggcc

SEQ ID NO: 435421 - RNA, 26 nt, Human
ccccaugaagcccucaaugugcaggg

SEQ ID NO: 435422 - RNA, 18 nt, Human
cccccagggucuuggggg

SEQ ID NO: 435423 - RNA, 21 nt, Human
cccccagggucuugggggcug

SEQ ID NO: 435424 - RNA, 22 nt, Human
cccuggggcugcccagccaggg

SEQ ID NO: 435425 - RNA, 19 nt, Human
cccuggggucuccaggcuc

SEQ ID NO: 435426 - RNA, 21 nt, Human
cccugugcaugggaacaccag

SEQ ID NO: 435427 - RNA, 20 nt, Human
ccuccugcaggaagccguga

SEQ ID NO: 435428 - RNA, 22 nt, Human
cgucucgcugcuccagcaggua

SEQ ID NO: 435429 - RNA, 18 nt, Human
cuaagaccaaagcccacc

SEQ ID NO: 435430 - RNA, 24 nt, Human
cuaagaccaaagcccacccccacc

SEQ ID NO: 435431 - RNA, 26 nt, Human
cucccccagcccuuccugaauggccc

SEQ ID NO: 435432 - RNA, 21 nt, Human
cuccccuggggucuccaggcu

SEQ ID NO: 435433 - RNA, 21 nt, Human
cucgcaccccccaugaagccc

SEQ ID NO: 435434 - RNA, 23 nt, Human
cucuagaagccgcugcaagaagu

SEQ ID NO: 435435 - RNA, 24 nt, Human
cuggccccuggggcugcccagcca

SEQ ID NO: 435436 - RNA, 22 nt, Human
gaacaccagcuuagagaagcaa

SEQ ID NO: 435437 - RNA, 21 nt, Human
gaaccgcgcacccggcggaug

SEQ ID NO: 435438 - RNA, 22 nt, Human
gaagaagagcugcacacaaacg

SEQ ID NO: 435439 - RNA, 23 nt, Human
gagugguguccacccccaggguc

SEQ ID NO: 435440 - RNA, 23 nt, Human
gccacacacacucccccagcccu

SEQ ID NO: 435441 - RNA, 25 nt, Human
gcucaucccaaauggauccuccccu

SEQ ID NO: 435442 - RNA, 22 nt, Human
ggacuggauuugggacuggggu

SEQ ID NO: 435443 - RNA, 23 nt, Human
ggacuggauuugggacuggggug

SEQ ID NO: 435444 - RNA, 24 nt, Human
ggacuggauuugggacuggggugg

SEQ ID NO: 435445 - RNA, 18 nt, Human
ggacugggguggguaggg

SEQ ID NO: 435446 - RNA, 20 nt, Human
ggcaggaaggaggucagagc

SEQ ID NO: 435447 - RNA, 24 nt, Human
ggcaggaaggaggucagagccugg

SEQ ID NO: 435448 - RNA, 19 nt, Human
ggccccuggggcugcccag

SEQ ID NO: 435449 - RNA, 19 nt, Human
ggggaucuggagaaggaaa

SEQ ID NO: 435450 - RNA, 23 nt, Human
ggguggguaggggggaucuggag

SEQ ID NO: 435451 - RNA, 20 nt, Human
uaagaccaaagcccaccccc

SEQ ID NO: 435452 - RNA, 26 nt, Human
uacccgagccgaacgaccggggguuc

SEQ ID NO: 435453 - RNA, 20 nt, Human
uagaagccgcugcaagaagu

SEQ ID NO: 435454 - RNA, 21 nt, Human
uccaagagagcuccuggcccc

SEQ ID NO: 435455 - RNA, 24 nt, Human
ucccacggugccuucaagcuuuau

SEQ ID NO: 435456 - RNA, 18 nt, Human
ucccccagcccuuccuga

SEQ ID NO: 435457 - RNA, 23 nt, Human
uccccuggggucuccaggcucau

SEQ ID NO: 435458 - RNA, 21 nt, Human
ucccugagugguguccacccc

SEQ ID NO: 435459 - RNA, 22 nt, Human
ucuccaagagagcuccuggccc

SEQ ID NO: 435460 - RNA, 19 nt, Human
ucucgcugcuccagcaggu

SEQ ID NO: 435461 - RNA, 26 nt, Human
ugagugguguccacccccagggucuu

SEQ ID NO: 435462 - RNA, 22 nt, Human
ugcacacaaacgcauacacaug

SEQ ID NO: 435463 - RNA, 23 nt, Human
ugccacacacacucccccagccc

SEQ ID NO: 435464 - RNA, 18 nt, Human
ugcuaagaccaaagccca

SEQ ID NO: 435465 - RNA, 21 nt, Human
ugcuugucuccaagagagcuc

SEQ ID NO: 435466 - RNA, 19 nt, Human
uggccccuggggcugcccu

SEQ ID NO: 435467 - RNA, 23 nt, Human
ugggaacaccagcuuagagaagc

SEQ ID NO: 435468 - RNA, 20 nt, Human
ugggacugggguggguaggg

SEQ ID NO: 435469 - RNA, 22 nt, Human
ugggacugggguggguaggggg

SEQ ID NO: 435470 - RNA, 18 nt, Human
ugggggcuggcuugugca

SEQ ID NO: 435471 - RNA, 21 nt, Human
uggggucacucagugccccau

SEQ ID NO: 435472 - RNA, 18 nt, Human
ugggguggguagggggga

SEQ ID NO: 435473 - RNA, 21 nt, Human
uuuuuuuuuucccacggugcc

SEQ ID NO: 435474 - RNA, 25 nt, Human
uuuuuuuuuuuuuuuuuucccacgg

SEQ ID NO: 435475 - RNA, 21 nt, Human
aaacaaaacaggaaacaugug

SEQ ID NO: 435476 - RNA, 26 nt, Human
aaacaaaacaggaaacaugugcuugg

SEQ ID NO: 435477 - RNA, 18 nt, Human
aagccacuccucaagcug

SEQ ID NO: 435478 - RNA, 18 nt, Human
aaggcaacauuuauuuga

SEQ ID NO: 435479 - RNA, 22 nt, Human
acaaaacaggaaacaugugcuu

SEQ ID NO: 435480 - RNA, 21 nt, Human
accauggcuugaucaaacuua

SEQ ID NO: 435481 - RNA, 24 nt, Human
agcaaauucagacaagucaguagc

SEQ ID NO: 435482 - RNA, 24 nt, Human
auagccucugcguccuccuggguu

SEQ ID NO: 435483 - RNA, 22 nt, Human
caccauggcuugaucaaacuua

SEQ ID NO: 435484 - RNA, 23 nt, Human
cagugaagucuuucagaaggccu

SEQ ID NO: 435485 - RNA, 26 nt, Human
caugaucaaugcauuuuugugucacc

SEQ ID NO: 435486 - RNA, 24 nt, Human
ccagcagacaaggcagccuuggca

SEQ ID NO: 435487 - RNA, 21 nt, Human
ccuccguaagcuccaaagggc

SEQ ID NO: 435488 - RNA, 21 nt, Human
cgauuucuuuuaaugucuucu

SEQ ID NO: 435489 - RNA, 20 nt, Human
cuaaggcagaaguggugguu

SEQ ID NO: 435490 - RNA, 18 nt, Human
cuccaagagcagacgucc

SEQ ID NO: 435491 - RNA, 21 nt, Human
gaaggccuccguaagcuccaa

SEQ ID NO: 435492 - RNA, 21 nt, Human
gcagaaguggugguuacuugg

SEQ ID NO: 435493 - RNA, 27 nt, Human
gcagugaagucuuucagaaggccuccg

SEQ ID NO: 435494 - RNA, 18 nt, Human
gccaguuguggcagcugc

SEQ ID NO: 435495 - RNA, 21 nt, Human
gcuugaucaaacuuaaucacu

SEQ ID NO: 435496 - RNA, 23 nt, Human
ggaaacaugcaucuucagacuuc

SEQ ID NO: 435497 - RNA, 22 nt, Human
gggcauggccaguuguggcagc

SEQ ID NO: 435498 - RNA, 25 nt, Human
ggggaguauaaagguuuaaaauuuu

SEQ ID NO: 435499 - RNA, 22 nt, Human
ggucauuccgcucuuguaguug

SEQ ID NO: 435500 - RNA, 21 nt, Human
gguucaaaucugagagaaugu

SEQ ID NO: 435501 - RNA, 23 nt, Human
guuucaggugagacuuugccagc

SEQ ID NO: 435502 - RNA, 18 nt, Human
uacccguucuucaaauuc

SEQ ID NO: 435503 - RNA, 25 nt, Human
uacuuggcaagaauacgauuucuuu

SEQ ID NO: 435504 - RNA, 19 nt, Human
uagcagcaacuacaaacac

SEQ ID NO: 435505 - RNA, 20 nt, Human
uagcagcaacuacaaacaca

SEQ ID NO: 435506 - RNA, 18 nt, Human
uagccucugcguccuccu

SEQ ID NO: 435507 - RNA, 24 nt, Human
ucacacugucaacuguuucaggug

SEQ ID NO: 435508 - RNA, 23 nt, Human
ucugaacugcuccacucugguga

SEQ ID NO: 435509 - RNA, 22 nt, Human
ucugcguccuccuggguuuucu

SEQ ID NO: 435510 - RNA, 23 nt, Human
ucugcugggugcugagggaggua

SEQ ID NO: 435511 - RNA, 22 nt, Human
ugccuggauuguucguauaaag

SEQ ID NO: 435512 - RNA, 24 nt, Human
ugccuggauuguucguauaaaggc

SEQ ID NO: 435513 - RNA, 20 nt, Human
ugccugugcuccaagagcag

SEQ ID NO: 435514 - RNA, 21 nt, Human
ugcugagggagguacacaggg

SEQ ID NO: 435515 - RNA, 19 nt, Human
uggaaacaaaacaggaaac

SEQ ID NO: 435516 - RNA, 18 nt, Human
uggaucagagguuccaug

SEQ ID NO: 435517 - RNA, 19 nt, Human
uggcagcugcucugaaggu

SEQ ID NO: 435518 - RNA, 20 nt, Human
uggccaguuguggcagcugc

SEQ ID NO: 435519 - RNA, 24 nt, Human
ugggaaucaaacuaaugcuggaaa

SEQ ID NO: 435520 - RNA, 20 nt, Human
uguacuucuagcaugggcuc

SEQ ID NO: 435521 - RNA, 24 nt, Human
uguggcagcugcucugaaggucaa

SEQ ID NO: 435522 - RNA, 25 nt, Human
uguggcagcugcucugaaggucacu

SEQ ID NO: 435523 - RNA, 22 nt, Human
uguuacccguucuucaaauuca

SEQ ID NO: 435524 - RNA, 19 nt, Human
uucaggggaguauaaaggu

SEQ ID NO: 435525 - RNA, 19 nt, Human
uucaugaucaaugcauuuu

SEQ ID NO: 435526 - RNA, 18 nt, Human
uuccauggucugaacugc

SEQ ID NO: 435527 - RNA, 19 nt, Human
uuccauggucugaacugcu

SEQ ID NO: 435528 - RNA, 23 nt, Human
uuggcaagaauacgauuucuuuu

SEQ ID NO: 435529 - RNA, 19 nt, Human
aaaauuccuuggcaauguc

SEQ ID NO: 435530 - RNA, 22 nt, Human
aaagggaauucagacccagaac

SEQ ID NO: 435531 - RNA, 19 nt, Human
aacaaaacacauuuacucc

SEQ ID NO: 435532 - RNA, 21 nt, Human
acuccugagggggcaaagagg

SEQ ID NO: 435533 - RNA, 22 nt, Human
acuggcugucaaggcaggaagg

SEQ ID NO: 435534 - RNA, 23 nt, Human
agacaguacuggcaucuggcaca

SEQ ID NO: 435535 - RNA, 21 nt, Human
agacccagaacagaagcagca

SEQ ID NO: 435536 - RNA, 22 nt, Human
agacccagaacagaagcagcaa

SEQ ID NO: 435537 - RNA, 23 nt, Human
agccuuuucgucucuguucuggg

SEQ ID NO: 435538 - RNA, 21 nt, Human
agggaggguagugugggucaa

SEQ ID NO: 435539 - RNA, 23 nt, Human
auuccuuggcaaugucuccccag

SEQ ID NO: 435540 - RNA, 18 nt, Human
caagaaaacagaguuuca

SEQ ID NO: 435541 - RNA, 24 nt, Human
caccacaaagaagugcccaccuca

SEQ ID NO: 435542 - RNA, 18 nt, Human
cagaacagaagcagcaaa

SEQ ID NO: 435543 - RNA, 18 nt, Human
cagaacagaagcagcaaa

SEQ ID NO: 435544 - RNA, 25 nt, Human
cagcacuccugagggggcaaagagg

SEQ ID NO: 435545 - RNA, 21 nt, Human
cccaccucaccaucauuucac

SEQ ID NO: 435546 - RNA, 21 nt, Human
cccauacagccccuggagcca

SEQ ID NO: 435547 - RNA, 22 nt, Human
ccggucccagacagcuggucaa

SEQ ID NO: 435548 - RNA, 22 nt, Human
ccuaggaacaaaacacauuuac

SEQ ID NO: 435549 - RNA, 21 nt, Human
ccucccugcuucaguggaggc

SEQ ID NO: 435550 - RNA, 20 nt, Human
ccucuggcccuaggaacaaa

SEQ ID NO: 435551 - RNA, 20 nt, Human
ccuucaaagaagcagaugau

SEQ ID NO: 435552 - RNA, 21 nt, Human
cggucccagacagcuggucaa

SEQ ID NO: 435553 - RNA, 24 nt, Human
cgucucuguucuggguucugagag

SEQ ID NO: 435554 - RNA, 27 nt, Human
cucacauccccuuugaacacuuaacuu

SEQ ID NO: 435555 - RNA, 23 nt, Human
cugacuggggcaagaaaacagag

SEQ ID NO: 435556 - RNA, 18 nt, Human
cugagggggcaaagagga

SEQ ID NO: 435557 - RNA, 22 nt, Human
gaccugggcccuguccuuucug

SEQ ID NO: 435558 - RNA, 22 nt, Human
gcugucaaggcaggaaggauuc

SEQ ID NO: 435559 - RNA, 23 nt, Human
ggcugucaaggcaggaaggauuc

SEQ ID NO: 435560 - RNA, 21 nt, Human
gggccagggcauggagucuuc

SEQ ID NO: 435561 - RNA, 23 nt, Human
gggucaacacuggcccucagcac

SEQ ID NO: 435562 - RNA, 24 nt, Human
ggguucuguucaggggaggguggg

SEQ ID NO: 435563 - RNA, 22 nt, Human
ggucaacacuggcccucagcac

SEQ ID NO: 435564 - RNA, 23 nt, Human
gguucuguucaggggaggguggg

SEQ ID NO: 435565 - RNA, 20 nt, Human
guggaggcccucacaucccc

SEQ ID NO: 435566 - RNA, 18 nt, Human
uaagggcaagugcaugcc

SEQ ID NO: 435567 - RNA, 27 nt, Human
uagccuuuucgucucuguucuggguuc

SEQ ID NO: 435568 - RNA, 23 nt, Human
uaggaacaaaacacauuuacucc

SEQ ID NO: 435569 - RNA, 19 nt, Human
ucacagacuggcugucaag

SEQ ID NO: 435570 - RNA, 20 nt, Human
ucagacccagaacagaagca

SEQ ID NO: 435571 - RNA, 23 nt, Human
ucaguggaggcccucacaucccc

SEQ ID NO: 435572 - RNA, 20 nt, Human
ucccagacagcuggucaagg

SEQ ID NO: 435573 - RNA, 28 nt, Human
uccccagaauucugcacucuucccuggg

SEQ ID NO: 435574 - RNA, 22 nt, Human
ucucuguucuggguucugagag

SEQ ID NO: 435575 - RNA, 22 nt, Human
ucucuuaugggcuggguucugu

SEQ ID NO: 435576 - RNA, 21 nt, Human
ucugagagcucugcagucugg

SEQ ID NO: 435577 - RNA, 18 nt, Human
ucuggaggcacagcagac

SEQ ID NO: 435578 - RNA, 21 nt, Human
ugaauacccucuggagacuga

SEQ ID NO: 435579 - RNA, 20 nt, Human
ugacuggggcaagaaaacag

SEQ ID NO: 435580 - RNA, 27 nt, Human
ugccgggacugagaaaaccggggguuc

SEQ ID NO: 435581 - RNA, 18 nt, Human
ugccuggcagucacagga

SEQ ID NO: 435582 - RNA, 20 nt, Human
ugccuggcagucacaggaug

SEQ ID NO: 435583 - RNA, 22 nt, Human
uggagucuuccaguaaaauucc

SEQ ID NO: 435584 - RNA, 19 nt, Human
ugucaaggcaggaaggauu

SEQ ID NO: 435585 - RNA, 19 nt, Human
uugaacacuuaacuugggu

SEQ ID NO: 435586 - RNA, 23 nt, Human
uuuggagcaggaggaauccuagg

SEQ ID NO: 435587 - RNA, 25 nt, Human
aaaaaaggagauuuucauaacuaca

SEQ ID NO: 435588 - RNA, 22 nt, Human
aaacaaagagagacuggaucca

SEQ ID NO: 435589 - RNA, 26 nt, Human
aaaccaaacucagauggcagaaccag

SEQ ID NO: 435590 - RNA, 22 nt, Human
aaagaacauguucaaguaaauc

SEQ ID NO: 435591 - RNA, 19 nt, Human
aaagaugccggaggcuugg

SEQ ID NO: 435592 - RNA, 19 nt, Human
aaagggcucucagcccagc

SEQ ID NO: 435593 - RNA, 22 nt, Human
aacaaaauaaagcuuuauuuga

SEQ ID NO: 435594 - RNA, 19 nt, Human
aaccgccagccccugcaug

SEQ ID NO: 435595 - RNA, 26 nt, Human
aagaggccagcacaaccacgaccgag

SEQ ID NO: 435596 - RNA, 21 nt, Human
aagcacccacuggcgucguga

SEQ ID NO: 435597 - RNA, 21 nt, Human
aagggacccggcucacugggc

SEQ ID NO: 435598 - RNA, 22 nt, Human
aagggacccggcucacugggcc

SEQ ID NO: 435599 - RNA, 25 nt, Human
aaguaaauccacacacuacauguga

SEQ ID NO: 435600 - RNA, 22 nt, Human
acaaagagagacuggauccaga

SEQ ID NO: 435601 - RNA, 20 nt, Human
acacuacagccccccaugcc

SEQ ID NO: 435602 - RNA, 23 nt, Human
acacuacagccccccaugcccag

SEQ ID NO: 435603 - RNA, 22 nt, Human
agaugccggaggcuuggaaguu

SEQ ID NO: 435604 - RNA, 22 nt, Human
agcacaggagaaacacucacca

SEQ ID NO: 435605 - RNA, 22 nt, Human
aggcaaaaaaggagauuuucau

SEQ ID NO: 435606 - RNA, 20 nt, Human
agggcacagcuuuguugcua

SEQ ID NO: 435607 - RNA, 22 nt, Human
auacacaaccaagcacaggaga

SEQ ID NO: 435608 - RNA, 27 nt, Human
caaaaaaggagauuuucauaacuacau

SEQ ID NO: 435609 - RNA, 22 nt, Human
caaacucagauggcagaaccag

SEQ ID NO: 435610 - RNA, 21 nt, Human
caaagagagacuggauccaga

SEQ ID NO: 435611 - RNA, 26 nt, Human
caaccgccagccccugcaugccuagc

SEQ ID NO: 435612 - RNA, 20 nt, Human
caagaggccagcacaaccac

SEQ ID NO: 435613 - RNA, 21 nt, Human
cacaaaaaucuuucuggauca

SEQ ID NO: 435614 - RNA, 19 nt, Human
cacauuaaaacaaagagag

SEQ ID NO: 435615 - RNA, 22 nt, Human
caccaccuccugggcuucacag

SEQ ID NO: 435616 - RNA, 18 nt, Human
caccacgcgcccaccccg

SEQ ID NO: 435617 - RNA, 19 nt, Human
caccaggaaaagaugccgg

SEQ ID NO: 435618 - RNA, 21 nt, Human
caccaguagaggcaaaaaagg

SEQ ID NO: 435619 - RNA, 20 nt, Human
caccccggaguccuugguug

SEQ ID NO: 435620 - RNA, 22 nt, Human
caccgcuuaggaguuagcucca

SEQ ID NO: 435621 - RNA, 23 nt, Human
caccuugcacuuggcuccucacc

SEQ ID NO: 435622 - RNA, 18 nt, Human
cagcaacauggaaagcua

SEQ ID NO: 435623 - RNA, 18 nt, Human
cagcuugaagaaacagaa

SEQ ID NO: 435624 - RNA, 21 nt, Human
cagcuugaagaaacagaacau

SEQ ID NO: 435625 - RNA, 18 nt, Human
cccagggccucaccuucc

SEQ ID NO: 435626 - RNA, 27 nt, Human
cccaugcccagggcacagccggggucc

SEQ ID NO: 435627 - RNA, 21 nt, Human
ccccccaugcccagggcacag

SEQ ID NO: 435628 - RNA, 21 nt, Human
ccccggaguccuugguugaag

SEQ ID NO: 435629 - RNA, 20 nt, Human
cccugcagccaacaccaccu

SEQ ID NO: 435630 - RNA, 20 nt, Human
cccugccaaccgccagcccc

SEQ ID NO: 435631 - RNA, 21 nt, Human
ccucagggguaccuucuggga

SEQ ID NO: 435632 - RNA, 23 nt, Human
ccucagggguaccuucugggaag

SEQ ID NO: 435633 - RNA, 21 nt, Human
ccucagugguucucaccgccc

SEQ ID NO: 435634 - RNA, 19 nt, Human
ccugaaggguagacugugg

SEQ ID NO: 435635 - RNA, 20 nt, Human
cgcgcccaccccggaguccu

SEQ ID NO: 435636 - RNA, 24 nt, Human
cuaagccuguaacaaaagaccacc

SEQ ID NO: 435637 - RNA, 23 nt, Human
cuacagccccccaugcccagggc

SEQ ID NO: 435638 - RNA, 18 nt, Human
cucaccgccccaaccaca

SEQ ID NO: 435639 - RNA, 24 nt, Human
cuccaagucucaucauuggaccuc

SEQ ID NO: 435640 - RNA, 20 nt, Human
cuccaccacgcgcccacccc

SEQ ID NO: 435641 - RNA, 19 nt, Human
cuccugggcuucacagguu

SEQ ID NO: 435642 - RNA, 18 nt, Human
cugaagccagcaaagaug

SEQ ID NO: 435643 - RNA, 18 nt, Human
cuuuguugcuaagccugu

SEQ ID NO: 435644 - RNA, 20 nt, Human
cuuuucauuccaggaaacca

SEQ ID NO: 435645 - RNA, 24 nt, Human
gaacauguucaaguaaauccacac

SEQ ID NO: 435646 - RNA, 23 nt, Human
gagcaggcgcgcuaucccagggc

SEQ ID NO: 435647 - RNA, 28 nt, Human
gcccagcuucacgugaggggggaacgcc

SEQ ID NO: 435648 - RNA, 22 nt, Human
gcccaucccaagagccccacaa

SEQ ID NO: 435649 - RNA, 19 nt, Human
gcccgcccaucccaagagc

SEQ ID NO: 435650 - RNA, 21 nt, Human
gcucacugggccuccuucccc

SEQ ID NO: 435651 - RNA, 19 nt, Human
gcucuguguuaucugagca

SEQ ID NO: 435652 - RNA, 21 nt, Human
gugguucucaccgccccaacc

SEQ ID NO: 435653 - RNA, 19 nt, Human
uaacaaaagaccaccacuc

SEQ ID NO: 435654 - RNA, 23 nt, Human
uaagggacccggcucacugggcc

SEQ ID NO: 435655 - RNA, 23 nt, Human
uacaaacaucuccaauucagacu

SEQ ID NO: 435656 - RNA, 19 nt, Human
uacagaucauucagaugcc

SEQ ID NO: 435657 - RNA, 18 nt, Human
uacccugcagccaacacc

SEQ ID NO: 435658 - RNA, 19 nt, Human
uagccaugucgcauagccu

SEQ ID NO: 435659 - RNA, 24 nt, Human
uagccaugucgcauagccucucca

SEQ ID NO: 435660 - RNA, 22 nt, Human
uagcuucccugaagaacccaac

SEQ ID NO: 435661 - RNA, 19 nt, Human
uauaaaaauaagauuucug

SEQ ID NO: 435662 - RNA, 19 nt, Human
uaucuagacagaucuggag

SEQ ID NO: 435663 - RNA, 19 nt, Human
ucacagguucacucaccca

SEQ ID NO: 435664 - RNA, 18 nt, Human
ucacucacccaagaggcc

SEQ ID NO: 435665 - RNA, 20 nt, Human
ucagcccagcuucacgugag

SEQ ID NO: 435666 - RNA, 21 nt, Human
ucaguggcccagacacccccc

SEQ ID NO: 435667 - RNA, 19 nt, Human
ucagugguucucaccgccc

SEQ ID NO: 435668 - RNA, 23 nt, Human
uccaugggugacacuccugggac

SEQ ID NO: 435669 - RNA, 18 nt, Human
ucccagggccucaccuuc

SEQ ID NO: 435670 - RNA, 19 nt, Human
ucccagggccucaccuucc

SEQ ID NO: 435671 - RNA, 22 nt, Human
ucccagggccucaccuuccugu

SEQ ID NO: 435672 - RNA, 24 nt, Human
uccucaccaguagaggcaaaaaag

SEQ ID NO: 435673 - RNA, 26 nt, Human
uccuugguugaaggugauaaccaccu

SEQ ID NO: 435674 - RNA, 19 nt, Human
ucuaacaagucaccugagu

SEQ ID NO: 435675 - RNA, 22 nt, Human
ucugcacugaagccagcaaaga

SEQ ID NO: 435676 - RNA, 24 nt, Human
ucuucagcuccaccacgcgcccac

SEQ ID NO: 435677 - RNA, 19 nt, Human
ugcccagggcacagcuuug

SEQ ID NO: 435678 - RNA, 19 nt, Human
ugcccgcccaucccaagag

SEQ ID NO: 435679 - RNA, 20 nt, Human
ugcccgggaccauguccagg

SEQ ID NO: 435680 - RNA, 22 nt, Human
ugccggaggcuuggaaguucuc

SEQ ID NO: 435681 - RNA, 18 nt, Human
uggaugggagaaagggcu

SEQ ID NO: 435682 - RNA, 24 nt, Human
uggcccagacaccccccgaacacu

SEQ ID NO: 435683 - RNA, 19 nt, Human
uggggugggggcugcuucu

SEQ ID NO: 435684 - RNA, 20 nt, Human
uggggugggggcugcuucug

SEQ ID NO: 435685 - RNA, 27 nt, Human
ugggugcccgcccaucccaagagcccc

SEQ ID NO: 435686 - RNA, 21 nt, Human
uguaacaaaagaccaccacuc

SEQ ID NO: 435687 - RNA, 18 nt, Human
uguggggugggggcugcu

SEQ ID NO: 435688 - RNA, 24 nt, Human
uucacagccucauccacuauuuuc

SEQ ID NO: 435689 - RNA, 21 nt, Human
uucucaccgccccaaccacag

SEQ ID NO: 435690 - RNA, 24 nt, Human
aggcauguccaggaugucagggcg

SEQ ID NO: 435691 - RNA, 19 nt, Human
gaagacggaaaagcuacgu

SEQ ID NO: 435692 - RNA, 19 nt, Human
gaagacggaaaagcuacgu

SEQ ID NO: 435693 - RNA, 20 nt, Human
ucagggcggggcuccgagga

SEQ ID NO: 435694 - RNA, 24 nt, Human
ugaagacggaaaagcuacgugcag

SEQ ID NO: 435695 - RNA, 24 nt, Human
ugaagacggaaaagcuacgugcag

SEQ ID NO: 435696 - RNA, 24 nt, Human
ugaugcauuaggacuuuauuuggg

SEQ ID NO: 435697 - RNA, 24 nt, Human
ugaugcauuaggacuuuauuuggg

SEQ ID NO: 435698 - RNA, 19 nt, Human
ugcauuaggacuuuauuug

SEQ ID NO: 435699 - RNA, 19 nt, Human
ugcauuaggacuuuauuug

SEQ ID NO: 435700 - RNA, 21 nt, Human
uguccaggaugucagggcggg

SEQ ID NO: 435701 - RNA, 18 nt, Human
uuuuuuuuuuuuuuuuug

SEQ ID NO: 435702 - RNA, 26 nt, Human
uuuuuuuuuuuuuuuuuuuuuugggg

SEQ ID NO: 435703 - RNA, 20 nt, Human
aaucagguuaauuaggguug

SEQ ID NO: 435704 - RNA, 18 nt, Human
agcuauauccugugcgcu

SEQ ID NO: 435705 - RNA, 22 nt, Human
agguuuuuggcacagcacuguu

SEQ ID NO: 435706 - RNA, 19 nt, Human
cagguuaauuaggguugcu

SEQ ID NO: 435707 - RNA, 19 nt, Human
cagguuaauuaggguugcu

SEQ ID NO: 435708 - RNA, 21 nt, Human
cauuggggaccgaguuagagg

SEQ ID NO: 435709 - RNA, 27 nt, Human
ccacccggaaaagguuuccuugauuau

SEQ ID NO: 435710 - RNA, 21 nt, Human
ccucuaaauuccuggaccaag

SEQ ID NO: 435711 - RNA, 28 nt, Human
cgaguuagagguuuauuucuuuuuuuuu

SEQ ID NO: 435712 - RNA, 21 nt, Human
gaaccucuaaauuccuggacc

SEQ ID NO: 435713 - RNA, 21 nt, Human
gaccagugcgcggagggcugc

SEQ ID NO: 435714 - RNA, 23 nt, Human
gaguuagagguuuauuucuuuuu

SEQ ID NO: 435715 - RNA, 22 nt, Human
uaaauuccuggaccaagcuaua

SEQ ID NO: 435716 - RNA, 23 nt, Human
uagagaaaauccacagguuuuug

SEQ ID NO: 435717 - RNA, 22 nt, Human
uagaguuuugugugucuuauuc

SEQ ID NO: 435718 - RNA, 19 nt, Human
ucugagugccgcucaaucc

SEQ ID NO: 435719 - RNA, 25 nt, Human
ugaucauuggggaccgaguuagagg

SEQ ID NO: 435720 - RNA, 21 nt, Human
ugauuugauuccauugagagu

SEQ ID NO: 435721 - RNA, 19 nt, Human
ugcgcggagggcugcuucc

SEQ ID NO: 435722 - RNA, 20 nt, Human
uucuauaauugguauaagcu

SEQ ID NO: 435723 - RNA, 24 nt, Human
uuggggaccgaguuagagguuuau

SEQ ID NO: 435724 - RNA, 21 nt, Human
uuuugugugucuuauucuuaa

SEQ ID NO: 435725 - RNA, 20 nt, Human
uuuuuuuuuuuuaauagagu

SEQ ID NO: 435726 - RNA, 22 nt, Human
aaaccucuuucacuggcugccc

SEQ ID NO: 435727 - RNA, 25 nt, Human
aucaccuccaaagcaaacccguacc

SEQ ID NO: 435728 - RNA, 22 nt, Human
caaaaaugagauauccuuuuga

SEQ ID NO: 435729 - RNA, 18 nt, Human
cacccagccuccguagcc

SEQ ID NO: 435730 - RNA, 20 nt, Human
cacccagccuccguagccaa

SEQ ID NO: 435731 - RNA, 18 nt, Human
caugcaaggaaagaaguu

SEQ ID NO: 435732 - RNA, 18 nt, Human
cguagccaaaccucuuuc

SEQ ID NO: 435733 - RNA, 19 nt, Human
cucacucuacugguguuuc

SEQ ID NO: 435734 - RNA, 19 nt, Human
cucccuugcugugguguug

SEQ ID NO: 435735 - RNA, 24 nt, Human
cugcccuguuuucccugucucacu

SEQ ID NO: 435736 - RNA, 21 nt, Human
gcccuguuuucccugucucac

SEQ ID NO: 435737 - RNA, 22 nt, Human
guagaauaugacuauggauguc

SEQ ID NO: 435738 - RNA, 21 nt, Human
uccugggaucaccuccaaagc

SEQ ID NO: 435739 - RNA, 20 nt, Human
ugcccuguuuucccugucuc

SEQ ID NO: 435740 - RNA, 24 nt, Human
uguugauaccuguugauacauauu

SEQ ID NO: 435741 - RNA, 22 nt, Human
uuuagaucuggccauucuuuug

SEQ ID NO: 435742 - RNA, 19 nt, Human
uuucaacaacuuugcuucu

SEQ ID NO: 435743 - RNA, 19 nt, Human
uuuccugggaucaccucca

SEQ ID NO: 435744 - RNA, 20 nt, Human
uuuugguagaauaugacuau

SEQ ID NO: 435745 - RNA, 24 nt, Human
uuuuuuuuuuuuuuuuuuuuucag

SEQ ID NO: 435746 - RNA, 19 nt, Human
aaaaggccggcugacgggu

SEQ ID NO: 435747 - RNA, 19 nt, Human
aaaccaccacaaaguccca

SEQ ID NO: 435748 - RNA, 23 nt, Human
aaagaaagaagaauggaaaagaa

SEQ ID NO: 435749 - RNA, 18 nt, Human
aaccaccacaaaguccca

SEQ ID NO: 435750 - RNA, 26 nt, Human
aagaaaaaaaccaccacaaaguccca

SEQ ID NO: 435751 - RNA, 18 nt, Human
aagaaaaccaaagaggga

SEQ ID NO: 435752 - RNA, 26 nt, Human
aagaaagaaagaagaauggaaaagaa

SEQ ID NO: 435753 - RNA, 21 nt, Human
aagaagaaaaaaaccaccaca

SEQ ID NO: 435754 - RNA, 18 nt, Human
aagcauaaaauaaccaau

SEQ ID NO: 435755 - RNA, 22 nt, Human
accacaaagucccaaaccucag

SEQ ID NO: 435756 - RNA, 21 nt, Human
agaaagaagaauggaaaagaa

SEQ ID NO: 435757 - RNA, 19 nt, Human
agcaaacaacauaaaaaga

SEQ ID NO: 435758 - RNA, 27 nt, Human
caaaagcuaagaaaaccaaagagggaa

SEQ ID NO: 435759 - RNA, 21 nt, Human
caaagucccaaaccucagaaa

SEQ ID NO: 435760 - RNA, 19 nt, Human
caaauucaaaagcuaagaa

SEQ ID NO: 435761 - RNA, 26 nt, Human
cagcaaacaacauaaaaagaaagaaa

SEQ ID NO: 435762 - RNA, 20 nt, Human
ccaagaaagcauaaaauaac

SEQ ID NO: 435763 - RNA, 22 nt, Human
ccacaaagucccaaaccucaga

SEQ ID NO: 435764 - RNA, 22 nt, Human
cccaaaccucagaaauuaacau

SEQ ID NO: 435765 - RNA, 25 nt, Human
cccgggucggggcgggcggcggagc

SEQ ID NO: 435766 - RNA, 22 nt, Human
ccgggucaacucaucauugaca

SEQ ID NO: 435767 - RNA, 18 nt, Human
ccguggccgcccccacgu

SEQ ID NO: 435768 - RNA, 21 nt, Human
cgggcacagcaggcugcgcgg

SEQ ID NO: 435769 - RNA, 20 nt, Human
cgggucggggcgggcggcgg

SEQ ID NO: 435770 - RNA, 19 nt, Human
cuccaguacgagcgcgggg

SEQ ID NO: 435771 - RNA, 24 nt, Human
cucgggacccacgggcacagcagg

SEQ ID NO: 435772 - RNA, 22 nt, Human
gaaaaaaaccaccacaaagucc

SEQ ID NO: 435773 - RNA, 21 nt, Human
gaaccugaaggaaaaggccgg

SEQ ID NO: 435774 - RNA, 24 nt, Human
gagagcaaacagugggguaguggc

SEQ ID NO: 435775 - RNA, 19 nt, Human
gcaguagcuaacacucaaa

SEQ ID NO: 435776 - RNA, 24 nt, Human
gcugggcccgggucggggcgggcg

SEQ ID NO: 435777 - RNA, 18 nt, Human
ggaaaaggccggcugacg

SEQ ID NO: 435778 - RNA, 20 nt, Human
ggcugggcccgggucggggc

SEQ ID NO: 435779 - RNA, 25 nt, Human
gggccguggaggcggcugggcccgg

SEQ ID NO: 435780 - RNA, 20 nt, Human
ggguaguggccauggcacuc

SEQ ID NO: 435781 - RNA, 25 nt, Human
uaaauuaaaagcaguugauuugcaa

SEQ ID NO: 435782 - RNA, 26 nt, Human
uaacacucaaaacaauuuguuuaagu

SEQ ID NO: 435783 - RNA, 20 nt, Human
uaagaaaaccaaagagggaa

SEQ ID NO: 435784 - RNA, 24 nt, Human
uacagcaaacaacauaaaaagaaa

SEQ ID NO: 435785 - RNA, 21 nt, Human
uagcuaacacucaaaacaauu

SEQ ID NO: 435786 - RNA, 23 nt, Human
uaguggagaugccgccugucaug

SEQ ID NO: 435787 - RNA, 21 nt, Human
ucaaaacaauuuguuuaagug

SEQ ID NO: 435788 - RNA, 21 nt, Human
uccuucaggaggccgcucuuc

SEQ ID NO: 435789 - RNA, 18 nt, Human
ugagccugacgaaccuga

SEQ ID NO: 435790 - RNA, 18 nt, Human
ugccguggccgcccccac

SEQ ID NO: 435791 - RNA, 24 nt, Human
uucaaaagcuaagaaaaccaaaga

SEQ ID NO: 435792 - RNA, 21 nt, Human
uucaaauucaaaagcuaagaa

SEQ ID NO: 435793 - RNA, 20 nt, Human
uuuuuuuuuucagugaaauu

SEQ ID NO: 435794 - RNA, 21 nt, Human
uuuuuuuuuuuuuuuuuucag

SEQ ID NO: 435795 - RNA, 21 nt, Human
acaauagagaacgugggcagg

SEQ ID NO: 435796 - RNA, 21 nt, Human
acgugggcagguugggcuggg

SEQ ID NO: 435797 - RNA, 23 nt, Human
caaaacaauagagaacgugggca

SEQ ID NO: 435798 - RNA, 25 nt, Human
caaaacaauagagaacgugggccgg

SEQ ID NO: 435799 - RNA, 24 nt, Human
cccaaggaaaugugaguaggggcc

SEQ ID NO: 435800 - RNA, 20 nt, Human
cccguggacacaagccgccu

SEQ ID NO: 435801 - RNA, 21 nt, Human
cccguggacacaagccgccuc

SEQ ID NO: 435802 - RNA, 23 nt, Human
cgucccguggacacaagccgccu

SEQ ID NO: 435803 - RNA, 22 nt, Human
cguggacacaagccgccucuaa

SEQ ID NO: 435804 - RNA, 18 nt, Human
cucaaaacaauagagaac

SEQ ID NO: 435805 - RNA, 18 nt, Human
gcagccugaaagcaaugg

SEQ ID NO: 435806 - RNA, 18 nt, Human
gcagccugaaagcaaugg

SEQ ID NO: 435807 - RNA, 22 nt, Human
gcagccugaaagcaaugggguc

SEQ ID NO: 435808 - RNA, 22 nt, Human
ggccgaguaacagacccagaaa

SEQ ID NO: 435809 - RNA, 22 nt, Human
ggcuggggugugggcagaauag

SEQ ID NO: 435810 - RNA, 22 nt, Human
gggcagccugaaagcaaugggg

SEQ ID NO: 435811 - RNA, 21 nt, Human
gggcagguugggcuggggugu

SEQ ID NO: 435812 - RNA, 20 nt, Human
gguugggcuggggugugggc

SEQ ID NO: 435813 - RNA, 22 nt, Human
uagagaacgugggcagguuggg

SEQ ID NO: 435814 - RNA, 18 nt, Human
ucccaccguggcccucuc

SEQ ID NO: 435815 - RNA, 22 nt, Human
ugggacuguugcuccaacccaa

SEQ ID NO: 435816 - RNA, 18 nt, Human
agagggaaaggaggaggg

SEQ ID NO: 435817 - RNA, 21 nt, Human
agagggaaaggaggagggggg

SEQ ID NO: 435818 - RNA, 19 nt, Human
agcagguguguggggagga

SEQ ID NO: 435819 - RNA, 21 nt, Human
agcagguguguggggaggagu

SEQ ID NO: 435820 - RNA, 23 nt, Human
aggacaagagggaaaggaggagg

SEQ ID NO: 435821 - RNA, 20 nt, Human
aggaggggggcaauguggca

SEQ ID NO: 435822 - RNA, 20 nt, Human
caacccagaaacaucaccau

SEQ ID NO: 435823 - RNA, 23 nt, Human
caacccagaaacaucaccauuua

SEQ ID NO: 435824 - RNA, 18 nt, Human
cagcaccgaggcggccgg

SEQ ID NO: 435825 - RNA, 21 nt, Human
ccaucugagcuugggagcagg

SEQ ID NO: 435826 - RNA, 21 nt, Human
cgcugcuagcggcccgugggc

SEQ ID NO: 435827 - RNA, 19 nt, Human
cggcccgugggcgguggcg

SEQ ID NO: 435828 - RNA, 22 nt, Human
gaaacaucaccauuuaugagga

SEQ ID NO: 435829 - RNA, 18 nt, Human
gcgguggcgggaucagca

SEQ ID NO: 435830 - RNA, 19 nt, Human
ggacaagagggaaaggagg

SEQ ID NO: 435831 - RNA, 20 nt, Human
gggggcaauguggcaugggg

SEQ ID NO: 435832 - RNA, 21 nt, Human
uagcggcccgugggcgguggc

SEQ ID NO: 435833 - RNA, 19 nt, Human
ucaacccagaaacaucacc

SEQ ID NO: 435834 - RNA, 19 nt, Human
ucagcaccgaggcggccgg

SEQ ID NO: 435835 - RNA, 20 nt, Human
ugaggacaagagggaaagga

SEQ ID NO: 435836 - RNA, 23 nt, Human
ugcuagcggcccgugggcggugg

SEQ ID NO: 435837 - RNA, 20 nt, Human
uuaagggacuuccaucugag

SEQ ID NO: 435838 - RNA, 18 nt, Human
cccccuguguguaggagu

SEQ ID NO: 435839 - RNA, 21 nt, Human
uaagcgccggcuccacccccu

SEQ ID NO: 435840 - RNA, 25 nt, Human
uccacccccuguguguaggagugcg

SEQ ID NO: 435841 - RNA, 20 nt, Human
cugugccaucugugcuggag

SEQ ID NO: 435842 - RNA, 20 nt, Human
ugcuggaggccuugucugug

SEQ ID NO: 435843 - RNA, 20 nt, Human
aaacucucccaaggcccccg

SEQ ID NO: 435844 - RNA, 22 nt, Human
aacacuccgacucaagaaagcg

SEQ ID NO: 435845 - RNA, 18 nt, Human
aaccagacagaacucaac

SEQ ID NO: 435846 - RNA, 23 nt, Human
aaccagacagaacucaaccccag

SEQ ID NO: 435847 - RNA, 20 nt, Human
aagcucccucucuccagccc

SEQ ID NO: 435848 - RNA, 22 nt, Human
aaggaacugcccagccgggucc

SEQ ID NO: 435849 - RNA, 18 nt, Human
aagucugggauuggggug

SEQ ID NO: 435850 - RNA, 24 nt, Human
aagucugggauuggggugggucuu

SEQ ID NO: 435851 - RNA, 21 nt, Human
aaguggaguuaacuucagaga

SEQ ID NO: 435852 - RNA, 23 nt, Human
aauggcaacaaaaccagacagaa

SEQ ID NO: 435853 - RNA, 19 nt, Human
acacacgcacucacacaca

SEQ ID NO: 435854 - RNA, 23 nt, Human
acacacucauauccacacacgca

SEQ ID NO: 435855 - RNA, 19 nt, Human
acacggcacucgcaugugc

SEQ ID NO: 435856 - RNA, 19 nt, Human
acacugggccccaccaggc

SEQ ID NO: 435857 - RNA, 23 nt, Human
accaaaauggcaacaaaaccaga

SEQ ID NO: 435858 - RNA, 21 nt, Human
acugggcugggaacauuaacu

SEQ ID NO: 435859 - RNA, 19 nt, Human
agagagaggugaagaugau

SEQ ID NO: 435860 - RNA, 19 nt, Human
agaggaaaagggagaaaga

SEQ ID NO: 435861 - RNA, 21 nt, Human
agagugaggacugcuccugcc

SEQ ID NO: 435862 - RNA, 24 nt, Human
agccagccagaggccaccugagga

SEQ ID NO: 435863 - RNA, 24 nt, Human
agccaguuaguggucaacccccuc

SEQ ID NO: 435864 - RNA, 22 nt, Human
agccuaggauggucagcagcaa

SEQ ID NO: 435865 - RNA, 20 nt, Human
agcuccuggcacucuggucu

SEQ ID NO: 435866 - RNA, 27 nt, Human
aggcagcagcugccuggggccucaggg

SEQ ID NO: 435867 - RNA, 18 nt, Human
agggggccuucccaccuc

SEQ ID NO: 435868 - RNA, 18 nt, Human
agguggggcccuggaggc

SEQ ID NO: 435869 - RNA, 21 nt, Human
agucaggaggcaucgauagug

SEQ ID NO: 435870 - RNA, 22 nt, Human
aucagcccagagggggccuucc

SEQ ID NO: 435871 - RNA, 23 nt, Human
caaaaccagacagaacucaaccc

SEQ ID NO: 435872 - RNA, 19 nt, Human
caacaaaaccagacagaac

SEQ ID NO: 435873 - RNA, 23 nt, Human
caacaagaacagauggaaagcga

SEQ ID NO: 435874 - RNA, 23 nt, Human
caagaauggcacaagaucagccc

SEQ ID NO: 435875 - RNA, 22 nt, Human
cacagccagccagaggccaccu

SEQ ID NO: 435876 - RNA, 20 nt, Human
caccuggcaggggccuuugg

SEQ ID NO: 435877 - RNA, 19 nt, Human
cagaacucaaccccagucc

SEQ ID NO: 435878 - RNA, 21 nt, Human
cagccuaggauggucagcagc

SEQ ID NO: 435879 - RNA, 18 nt, Human
caggagccaguuaguggu

SEQ ID NO: 435880 - RNA, 21 nt, Human
caggaggcagcaagcucccuc

SEQ ID NO: 435881 - RNA, 19 nt, Human
cagguccaaggucaagaau

SEQ ID NO: 435882 - RNA, 25 nt, Human
cauauccacacacgcacucacacac

SEQ ID NO: 435883 - RNA, 18 nt, Human
caucguccuuucugggcc

SEQ ID NO: 435884 - RNA, 26 nt, Human
caugugcacacacacucauauccaca

SEQ ID NO: 435885 - RNA, 21 nt, Human
cauucagagugaggacugcuc

SEQ ID NO: 435886 - RNA, 23 nt, Human
ccaaaccaaaauggcaacaaaac

SEQ ID NO: 435887 - RNA, 22 nt, Human
ccaagcagguccaaggucaaga

SEQ ID NO: 435888 - RNA, 22 nt, Human
ccagccccuaacugaacaaaca

SEQ ID NO: 435889 - RNA, 18 nt, Human
ccagccucccaaaccaaa

SEQ ID NO: 435890 - RNA, 24 nt, Human
cccacagccagccagaggccaccu

SEQ ID NO: 435891 - RNA, 26 nt, Human
cccccacagccagccagaggccaccu

SEQ ID NO: 435892 - RNA, 18 nt, Human
ccuccuguuucagaaaau

SEQ ID NO: 435893 - RNA, 23 nt, Human
ccuggcacucuggucuggcccac

SEQ ID NO: 435894 - RNA, 22 nt, Human
ccuuaaacucucccaaggcccc

SEQ ID NO: 435895 - RNA, 24 nt, Human
ccuugcuuaggggccucugccaaa

SEQ ID NO: 435896 - RNA, 26 nt, Human
cgcaaacacuccgacucaagaaagcg

SEQ ID NO: 435897 - RNA, 20 nt, Human
cuccaacaccccucccuugc

SEQ ID NO: 435898 - RNA, 21 nt, Human
cuccugcccuccuccaguggc

SEQ ID NO: 435899 - RNA, 21 nt, Human
cugaacaaacacuucaauaaa

SEQ ID NO: 435900 - RNA, 23 nt, Human
gaaaggggacugggcugggaaca

SEQ ID NO: 435901 - RNA, 19 nt, Human
gaagucugggauuggggug

SEQ ID NO: 435902 - RNA, 19 nt, Human
gagcacagccucugccagc

SEQ ID NO: 435903 - RNA, 22 nt, Human
gaggcagcagcugccuggggcc

SEQ ID NO: 435904 - RNA, 24 nt, Human
gagugucuuugaguguagcuucca

SEQ ID NO: 435905 - RNA, 21 nt, Human
gcacugcaguccgcggggcgc

SEQ ID NO: 435906 - RNA, 19 nt, Human
gcccagagggggccuuccc

SEQ ID NO: 435907 - RNA, 19 nt, Human
gccuuuggucauaggacgg

SEQ ID NO: 435908 - RNA, 23 nt, Human
gcucuuggggugcuuuuccagcc

SEQ ID NO: 435909 - RNA, 18 nt, Human
gcugaaggccuuuggacc

SEQ ID NO: 435910 - RNA, 22 nt, Human
ggcagugagcaagaggaaaagg

SEQ ID NO: 435911 - RNA, 19 nt, Human
ggcucuccaacaccccucc

SEQ ID NO: 435912 - RNA, 20 nt, Human
gggcacccuggggguggggg

SEQ ID NO: 435913 - RNA, 22 nt, Human
ggggugggggugaggguggggc

SEQ ID NO: 435914 - RNA, 18 nt, Human
ggggugggucuugguguc

SEQ ID NO: 435915 - RNA, 22 nt, Human
gucauaggacggcgugggggag

SEQ ID NO: 435916 - RNA, 27 nt, Human
gugguccuguucccuggucggccguac

SEQ ID NO: 435917 - RNA, 19 nt, Human
uaagagaagggaggugagu

SEQ ID NO: 435918 - RNA, 20 nt, Human
uacaaccuaguccccugguc

SEQ ID NO: 435919 - RNA, 24 nt, Human
uagcuuccaaucucaaaugguccu

SEQ ID NO: 435920 - RNA, 21 nt, Human
uaguccccuggucagcuacag

SEQ ID NO: 435921 - RNA, 18 nt, Human
ucagaaaaucuaaccagc

SEQ ID NO: 435922 - RNA, 19 nt, Human
ucagagugaggacugcucc

SEQ ID NO: 435923 - RNA, 18 nt, Human
ucagcccagagggggccu

SEQ ID NO: 435924 - RNA, 19 nt, Human
ucagcugggagaggugggg

SEQ ID NO: 435925 - RNA, 19 nt, Human
ucaggccaucaccacugca

SEQ ID NO: 435926 - RNA, 20 nt, Human
ucagggcacccugggggugg

SEQ ID NO: 435927 - RNA, 25 nt, Human
ucauauccacacacgcacucacaca

SEQ ID NO: 435928 - RNA, 18 nt, Human
uccacacacgcacucaca

SEQ ID NO: 435929 - RNA, 20 nt, Human
uccagggcagugagcaagag

SEQ ID NO: 435930 - RNA, 22 nt, Human
ucccucugucucccugugguag

SEQ ID NO: 435931 - RNA, 18 nt, Human
ucgcaaacacuccgacuc

SEQ ID NO: 435932 - RNA, 20 nt, Human
ucuaggcugaaggccuuugg

SEQ ID NO: 435933 - RNA, 23 nt, Human
ucuccagccccuaacugaacaaa

SEQ ID NO: 435934 - RNA, 25 nt, Human
ucuccagccccuaacugaacaaaca

SEQ ID NO: 435935 - RNA, 19 nt, Human
ucuggggaaggaacugccc

SEQ ID NO: 435936 - RNA, 20 nt, Human
ugaaggccuuuggaccacuc

SEQ ID NO: 435937 - RNA, 18 nt, Human
ugaggagggagcacagcc

SEQ ID NO: 435938 - RNA, 20 nt, Human
ugccuggggccucagggcac

SEQ ID NO: 435939 - RNA, 19 nt, Human
ugcgagggacaggcuuggg

SEQ ID NO: 435940 - RNA, 23 nt, Human
uggaaagcgagguccuggaacca

SEQ ID NO: 435941 - RNA, 23 nt, Human
uggaaccagcaggugccuuaaac

SEQ ID NO: 435942 - RNA, 19 nt, Human
uggaggcagcagcugccug

SEQ ID NO: 435943 - RNA, 21 nt, Human
uggcaacaaaaccagacagaa

SEQ ID NO: 435944 - RNA, 25 nt, Human
uggcacucuggucuggcccacuccc

SEQ ID NO: 435945 - RNA, 23 nt, Human
ugggagagguggggcccuggagg

SEQ ID NO: 435946 - RNA, 21 nt, Human
ugguccuggaaccuguggaca

SEQ ID NO: 435947 - RNA, 25 nt, Human
uggugggagugucuuugaguguagc

SEQ ID NO: 435948 - RNA, 20 nt, Human
ugucacaggugagggugccg

SEQ ID NO: 435949 - RNA, 19 nt, Human
ugucuuugaguguagcuuc

SEQ ID NO: 435950 - RNA, 21 nt, Human
ugugcacacacacucauaucc

SEQ ID NO: 435951 - RNA, 27 nt, Human
ugugcacacacacucauauccacacac

SEQ ID NO: 435952 - RNA, 22 nt, Human
uguuucagaaaaucuaaccagc

SEQ ID NO: 435953 - RNA, 18 nt, Human
uugauuccagggcaguga

SEQ ID NO: 435954 - RNA, 23 nt, Human
uuucacacauaccugcugcugug

SEQ ID NO: 435955 - RNA, 19 nt, Human
aaaaaagaaagcauuacgg

SEQ ID NO: 435956 - RNA, 21 nt, Human
aaaacaaauaaaucccuaagc

SEQ ID NO: 435957 - RNA, 23 nt, Human
aaaacaaauaaaucccuaagcca

SEQ ID NO: 435958 - RNA, 21 nt, Human
aaacaaauaaaucccuaagcc

SEQ ID NO: 435959 - RNA, 20 nt, Human
aaacaaauaaaucccuaagg

SEQ ID NO: 435960 - RNA, 24 nt, Human
aaacagaagcauuaacaaaacacc

SEQ ID NO: 435961 - RNA, 20 nt, Human
aaacuuagaaauaacucaug

SEQ ID NO: 435962 - RNA, 18 nt, Human
aaagcuuccccaagacac

SEQ ID NO: 435963 - RNA, 20 nt, Human
aaaggaaaaaagaaagcauu

SEQ ID NO: 435964 - RNA, 19 nt, Human
aaaguuccucuacguacuc

SEQ ID NO: 435965 - RNA, 18 nt, Human
aacagcuccaggcagagc

SEQ ID NO: 435966 - RNA, 24 nt, Human
aagcgccacauuacagaggaaaug

SEQ ID NO: 435967 - RNA, 26 nt, Human
acaaaacaacuaaugaaaauuaccca

SEQ ID NO: 435968 - RNA, 23 nt, Human
acaaagcuuccccaagacaccag

SEQ ID NO: 435969 - RNA, 18 nt, Human
accaaggaauaccgacag

SEQ ID NO: 435970 - RNA, 21 nt, Human
acccauuguuacccucccccc

SEQ ID NO: 435971 - RNA, 18 nt, Human
accuacagccaccgccgc

SEQ ID NO: 435972 - RNA, 25 nt, Human
agaagaccacccauuguuacccucc

SEQ ID NO: 435973 - RNA, 18 nt, Human
agcagacagaauccuuag

SEQ ID NO: 435974 - RNA, 18 nt, Human
agccgcacaaccuacagc

SEQ ID NO: 435975 - RNA, 21 nt, Human
agccgcugcagccgcacaacc

SEQ ID NO: 435976 - RNA, 22 nt, Human
aggaaaaaagaaagcauuacgg

SEQ ID NO: 435977 - RNA, 24 nt, Human
aggcagagcacaaguagaagaaaa

SEQ ID NO: 435978 - RNA, 23 nt, Human
augccuacuuagaagaaacaaag

SEQ ID NO: 435979 - RNA, 20 nt, Human
auggaaacagcuccaggcag

SEQ ID NO: 435980 - RNA, 19 nt, Human
caaaacaccagaucuuaag

SEQ ID NO: 435981 - RNA, 23 nt, Human
caaaacacuuuaguucugaaccu

SEQ ID NO: 435982 - RNA, 20 nt, Human
caacaaaacccacccaaaac

SEQ ID NO: 435983 - RNA, 19 nt, Human
cacaaccuacagccaccgc

SEQ ID NO: 435984 - RNA, 24 nt, Human
cacaaccuacagccaccgccgccc

SEQ ID NO: 435985 - RNA, 21 nt, Human
cagaagaccacccauuguuac

SEQ ID NO: 435986 - RNA, 27 nt, Human
cagaagaccacccauuguuacccuccc

SEQ ID NO: 435987 - RNA, 27 nt, Human
cagagcacaaguagaagaaaaccugcc

SEQ ID NO: 435988 - RNA, 19 nt, Human
cagcagacagaauccuuag

SEQ ID NO: 435989 - RNA, 18 nt, Human
ccaaaucaaaguacugua

SEQ ID NO: 435990 - RNA, 22 nt, Human
ccaucccgaaccaccccccauc

SEQ ID NO: 435991 - RNA, 22 nt, Human
cccccccgcaacaaaacccacc

SEQ ID NO: 435992 - RNA, 26 nt, Human
cccccgcaacaaaacccacccaaaac

SEQ ID NO: 435993 - RNA, 22 nt, Human
cccgaaccaccccccaucccag

SEQ ID NO: 435994 - RNA, 25 nt, Human
cccgaaccaccccccaucccaguaa

SEQ ID NO: 435995 - RNA, 22 nt, Human
cccgcaacaaaacccacccaaa

SEQ ID NO: 435996 - RNA, 24 nt, Human
cccgcaacaaaacccacccaaaac

SEQ ID NO: 435997 - RNA, 18 nt, Human
ccgcaacaaaacccaccc

SEQ ID NO: 435998 - RNA, 24 nt, Human
ccuacagccaccgccgcccggccg

SEQ ID NO: 435999 - RNA, 26 nt, Human
ccuacagccaccgccgcccggccguu

SEQ ID NO: 436000 - RNA, 18 nt, Human
ccuggaguugaaugaguu

SEQ ID NO: 436001 - RNA, 22 nt, Human
cgcaacaaaacccacccaaaac

SEQ ID NO: 436002 - RNA, 25 nt, Human
cuacagccaccgccgcccggccguu

SEQ ID NO: 436003 - RNA, 24 nt, Human
cucaaaaauaaaaaucagaagacc

SEQ ID NO: 436004 - RNA, 21 nt, Human
cuggaauaaacagaagcauua

SEQ ID NO: 436005 - RNA, 19 nt, Human
gcaacaaaacccacccaaa

SEQ ID NO: 436006 - RNA, 22 nt, Human
gcagacagaauccuuagcccuc

SEQ ID NO: 436007 - RNA, 20 nt, Human
gcagagcacaaguagaagaa

SEQ ID NO: 436008 - RNA, 18 nt, Human
gccacauaguaauggaau

SEQ ID NO: 436009 - RNA, 18 nt, Human
gcccagggaagagccgcu

SEQ ID NO: 436010 - RNA, 18 nt, Human
gcugcagccgcacaaccu

SEQ ID NO: 436011 - RNA, 19 nt, Human
gcugcccacccaucccgaa

SEQ ID NO: 436012 - RNA, 19 nt, Human
gcuuguuuuauuaagcacu

SEQ ID NO: 436013 - RNA, 21 nt, Human
ggcaauaaaggaaaaaagaaa

SEQ ID NO: 436014 - RNA, 19 nt, Human
guccuggaguugaaugagu

SEQ ID NO: 436015 - RNA, 21 nt, Human
uaaaugccuacuuagaagaaa

SEQ ID NO: 436016 - RNA, 23 nt, Human
uaagcacuggucaguuauauaaa

SEQ ID NO: 436017 - RNA, 26 nt, Human
uacagccaccgccgcccggccguuuu

SEQ ID NO: 436018 - RNA, 21 nt, Human
uacaggaaugaucuaaaugcc

SEQ ID NO: 436019 - RNA, 20 nt, Human
uagaagaaaaccugccaaau

SEQ ID NO: 436020 - RNA, 19 nt, Human
uagaagaaacaaagcagca

SEQ ID NO: 436021 - RNA, 26 nt, Human
uagaagaaacaaagcagcagacagaa

SEQ ID NO: 436022 - RNA, 20 nt, Human
uauaaaagaauaauuugcaa

SEQ ID NO: 436023 - RNA, 18 nt, Human
ucagcagcugcccaccca

SEQ ID NO: 436024 - RNA, 22 nt, Human
uccaguugacaaaaccucaaaa

SEQ ID NO: 436025 - RNA, 18 nt, Human
ucccaguaauauguaaaa

SEQ ID NO: 436026 - RNA, 20 nt, Human
ucccuaagaaguucacagga

SEQ ID NO: 436027 - RNA, 18 nt, Human
ucccuaagccacauagua

SEQ ID NO: 436028 - RNA, 18 nt, Human
ucuacguacuccaguuga

SEQ ID NO: 436029 - RNA, 21 nt, Human
ugaaccuaacauuucccuaag

SEQ ID NO: 436030 - RNA, 18 nt, Human
ugcccacccaucccgaac

SEQ ID NO: 436031 - RNA, 20 nt, Human
ugccuacuuagaagaaacaa

SEQ ID NO: 436032 - RNA, 20 nt, Human
uggaauacuacacuugcuuu

SEQ ID NO: 436033 - RNA, 22 nt, Human
uggcaauaaaggaaaaaagaaa

SEQ ID NO: 436034 - RNA, 24 nt, Human
uguaaauaaaguuccucuacguac

SEQ ID NO: 436035 - RNA, 24 nt, Human
uuacggguaugaugggaacaagcu

SEQ ID NO: 436036 - RNA, 21 nt, Human
uucaaaucaaaacaaacaaaa

SEQ ID NO: 436037 - RNA, 24 nt, Human
uuccucuacguacuccaguugaca

SEQ ID NO: 436038 - RNA, 25 nt, Human
uuccucuacguacuccaguugacaa

SEQ ID NO: 436039 - RNA, 20 nt, Human
uuuuaaauguuacuuuucca

SEQ ID NO: 436040 - RNA, 21 nt, Human
uuuuucagauaccaaggaaua

SEQ ID NO: 436041 - RNA, 23 nt, Human
uuuuuuuuuuuuuuuuuuauuuu

SEQ ID NO: 436042 - RNA, 20 nt, Human
aaaaccagccauccagacaa

SEQ ID NO: 436043 - RNA, 22 nt, Human
aaaaccucaaaaccagccaucc

SEQ ID NO: 436044 - RNA, 19 nt, Human
aaacagaaugcgaguaauc

SEQ ID NO: 436045 - RNA, 23 nt, Human
aaacagaaugcgaguaaucagaa

SEQ ID NO: 436046 - RNA, 19 nt, Human
aaagaaaaccuuuuggggg

SEQ ID NO: 436047 - RNA, 21 nt, Human
aaagcaagaaacagaaugcga

SEQ ID NO: 436048 - RNA, 19 nt, Human
aagcaagaaacagaaugcg

SEQ ID NO: 436049 - RNA, 29 nt, Human
aagcaagaaacagaaugcgaggggacccc

SEQ ID NO: 436050 - RNA, 21 nt, Human
aagcucuugcacugcacacuu

SEQ ID NO: 436051 - RNA, 27 nt, Human
aagucagguuuaaaaccucaaaaccag

SEQ ID NO: 436052 - RNA, 20 nt, Human
accucccuaaccccaauaac

SEQ ID NO: 436053 - RNA, 22 nt, Human
agaaagauuaucucuuccccac

SEQ ID NO: 436054 - RNA, 19 nt, Human
agaaagcagcaggcucggu

SEQ ID NO: 436055 - RNA, 21 nt, Human
agagauuggcggcgggagaca

SEQ ID NO: 436056 - RNA, 22 nt, Human
agagauuggcggcgggagacaa

SEQ ID NO: 436057 - RNA, 20 nt, Human
agcaagaaagcagcaggcuc

SEQ ID NO: 436058 - RNA, 19 nt, Human
aggcaggcaggcagucgcc

SEQ ID NO: 436059 - RNA, 23 nt, Human
aucuaaagaaaaacacaaucacu

SEQ ID NO: 436060 - RNA, 18 nt, Human
aucugcauggugauacac

SEQ ID NO: 436061 - RNA, 23 nt, Human
cacuagcaggcaucaguuaaucc

SEQ ID NO: 436062 - RNA, 24 nt, Human
cacuucuuuuuguuacacauaaga

SEQ ID NO: 436063 - RNA, 21 nt, Human
cagaaagaacuaaaacccacu

SEQ ID NO: 436064 - RNA, 20 nt, Human
cagggcacagaaagaacuaa

SEQ ID NO: 436065 - RNA, 23 nt, Human
ccagacaaaacagguaaucagaa

SEQ ID NO: 436066 - RNA, 21 nt, Human
ccauccagacaaaacagguaa

SEQ ID NO: 436067 - RNA, 18 nt, Human
ccccaauaacuaugaagc

SEQ ID NO: 436068 - RNA, 21 nt, Human
ccccaauaacuaugaagccaa

SEQ ID NO: 436069 - RNA, 18 nt, Human
ccgucugcuccgugcugc

SEQ ID NO: 436070 - RNA, 19 nt, Human
ccugcugcugcugcugccg

SEQ ID NO: 436071 - RNA, 19 nt, Human
cgaagcaguagcaagaaag

SEQ ID NO: 436072 - RNA, 21 nt, Human
cgaagcaguagcaagaaagca

SEQ ID NO: 436073 - RNA, 21 nt, Human
cggcuaucacuuccgcaaccc

SEQ ID NO: 436074 - RNA, 26 nt, Human
cuaaaacccacuucuuuuuguuacac

SEQ ID NO: 436075 - RNA, 18 nt, Human
cucaaaguauaaaaagua

SEQ ID NO: 436076 - RNA, 21 nt, Human
cuccucgccugcugcugcugc

SEQ ID NO: 436077 - RNA, 21 nt, Human
cucgccugcugcugcugcugc

SEQ ID NO: 436078 - RNA, 18 nt, Human
cucuugucuuuacucuuc

SEQ ID NO: 436079 - RNA, 22 nt, Human
cugcuaggggccagagauuggc

SEQ ID NO: 436080 - RNA, 25 nt, Human
cuguauaaucauguuugguguuacu

SEQ ID NO: 436081 - RNA, 22 nt, Human
cuugcacugcacacuuagaagu

SEQ ID NO: 436082 - RNA, 23 nt, Human
gaagccgaagcaguagcaagaaa

SEQ ID NO: 436083 - RNA, 19 nt, Human
gccgccgucugcuccgugc

SEQ ID NO: 436084 - RNA, 24 nt, Human
gggccagagauuggcggcgggaga

SEQ ID NO: 436085 - RNA, 19 nt, Human
ggggaagggguggagaggg

SEQ ID NO: 436086 - RNA, 22 nt, Human
gggggaagggguggagagggau

SEQ ID NO: 436087 - RNA, 27 nt, Human
uacaauucaagcauuauagagcuaucu

SEQ ID NO: 436088 - RNA, 23 nt, Human
uagccgggaagccgaagcaguag

SEQ ID NO: 436089 - RNA, 23 nt, Human
uauaaacaagcucuugcacugca

SEQ ID NO: 436090 - RNA, 23 nt, Human
ucaaucuaaagaaaaacacaauc

SEQ ID NO: 436091 - RNA, 26 nt, Human
ucagaaagauuaucucuuccccaccu

SEQ ID NO: 436092 - RNA, 18 nt, Human
ucagaaagcacuagcagg

SEQ ID NO: 436093 - RNA, 24 nt, Human
ucccacgaguguguaugccaaguc

SEQ ID NO: 436094 - RNA, 18 nt, Human
uccccaccucccuaaccc

SEQ ID NO: 436095 - RNA, 21 nt, Human
uccccaccucccuaaccccaa

SEQ ID NO: 436096 - RNA, 22 nt, Human
uccgcaacccaggcaggcaggc

SEQ ID NO: 436097 - RNA, 23 nt, Human
uccgugcugcuaggggccagaga

SEQ ID NO: 436098 - RNA, 24 nt, Human
uccucgccugcugcugcugcugcc

SEQ ID NO: 436099 - RNA, 20 nt, Human
ucuaaagaaaaacacaauca

SEQ ID NO: 436100 - RNA, 18 nt, Human
ucuuccccaccucccuaa

SEQ ID NO: 436101 - RNA, 24 nt, Human
ucuucuuuuaaagcaagaaacaga

SEQ ID NO: 436102 - RNA, 21 nt, Human
ucuuugacuuuuuuuccucaa

SEQ ID NO: 436103 - RNA, 19 nt, Human
ugcacacuuagaaguguac

SEQ ID NO: 436104 - RNA, 21 nt, Human
uggaagcacuccauaauaacu

SEQ ID NO: 436105 - RNA, 21 nt, Human
uggggggaagggguggagagg

SEQ ID NO: 436106 - RNA, 24 nt, Human
uuaucucuuccccaccucccuaac

SEQ ID NO: 436107 - RNA, 21 nt, Human
uucaccguccgggggguagcc

SEQ ID NO: 436108 - RNA, 22 nt, Human
uuggucaugguuuuuucccuca

SEQ ID NO: 436109 - RNA, 25 nt, Human
uuuaaaaccucaaaaccagccaucc

SEQ ID NO: 436110 - RNA, 21 nt, Human
uuuuuuuuuuuuuuuuacugg

SEQ ID NO: 436111 - RNA, 23 nt, Human
uuuuuuuuuuuuuuuuuuacugg

SEQ ID NO: 436112 - RNA, 27 nt, Human
aaaaaaaaaaaaaaaaaacgcucagaa

SEQ ID NO: 436113 - RNA, 21 nt, Human
aaaaaaaaaaaacgcucagaa

SEQ ID NO: 436114 - RNA, 27 nt, Human
aaacaacagcaaaugcaauaaaaacaa

SEQ ID NO: 436115 - RNA, 24 nt, Human
aaagauccuugauuuggagagggc

SEQ ID NO: 436116 - RNA, 20 nt, Human
aaaguuucuuuauagaguuu

SEQ ID NO: 436117 - RNA, 20 nt, Human
acagaacagcagcacacuaa

SEQ ID NO: 436118 - RNA, 19 nt, Human
accaaaaaaaaaaaaaaaa

SEQ ID NO: 436119 - RNA, 23 nt, Human
accaaaaaaaaaaaaaaaaaaaa

SEQ ID NO: 436120 - RNA, 20 nt, Human
acuccauuagccagguccaa

SEQ ID NO: 436121 - RNA, 21 nt, Human
agaacagcagcacacuaaaca

SEQ ID NO: 436122 - RNA, 21 nt, Human
auguacacagaacagcagcac

SEQ ID NO: 436123 - RNA, 25 nt, Human
caaagggucuucuuucuuaacauuu

SEQ ID NO: 436124 - RNA, 18 nt, Human
cacagaacagcagcacac

SEQ ID NO: 436125 - RNA, 23 nt, Human
cagagcaacauuuuucaacaaag

SEQ ID NO: 436126 - RNA, 21 nt, Human
cagcaaaugcaauaaaaacaa

SEQ ID NO: 436127 - RNA, 23 nt, Human
ccaaaaaaaaaaaaaaaaaaaaa

SEQ ID NO: 436128 - RNA, 25 nt, Human
ccagaccaaaaaaaaaaaaaaaaaa

SEQ ID NO: 436129 - RNA, 22 nt, Human
ccagagcaacauuuuucaacaa

SEQ ID NO: 436130 - RNA, 24 nt, Human
ccagagcaacauuuuucaacaaag

SEQ ID NO: 436131 - RNA, 23 nt, Human
cccagaccaaaaaaaaaaaaaaa

SEQ ID NO: 436132 - RNA, 26 nt, Human
cccagagcaacauuuuucuccuacgg

SEQ ID NO: 436133 - RNA, 18 nt, Human
cggcaaugcaguaagucu

SEQ ID NO: 436134 - RNA, 23 nt, Human
cuaaacauucacaagcugugucc

SEQ ID NO: 436135 - RNA, 22 nt, Human
cuccaguucagagucccauuuc

SEQ ID NO: 436136 - RNA, 19 nt, Human
cuuuauagaguuugcaagg

SEQ ID NO: 436137 - RNA, 19 nt, Human
uaaaguaaugcuuggaagc

SEQ ID NO: 436138 - RNA, 21 nt, Human
uagaaacaacagcaaaugcaa

SEQ ID NO: 436139 - RNA, 18 nt, Human
uagcuuagcagcuccagu

SEQ ID NO: 436140 - RNA, 24 nt, Human
uauguacacagaacagcagcacag

SEQ ID NO: 436141 - RNA, 25 nt, Human
ucauaaaacauauucggaagcccag

SEQ ID NO: 436142 - RNA, 23 nt, Human
ucccagagcaacauuuuucaaca

SEQ ID NO: 436143 - RNA, 22 nt, Human
ucccugggucuuccucggagac

SEQ ID NO: 436144 - RNA, 18 nt, Human
uccuugauuuggagaggg

SEQ ID NO: 436145 - RNA, 24 nt, Human
ugauuuaaaaaaaauagcaguagu

SEQ ID NO: 436146 - RNA, 22 nt, Human
uguaaaaucaaccgucauaaaa

SEQ ID NO: 436147 - RNA, 22 nt, Human
uuaaaaaaaauagcaguaguuc

SEQ ID NO: 436148 - RNA, 20 nt, Human
agggaccucugugcucagag

SEQ ID NO: 436149 - RNA, 18 nt, Human
cacguggccccagagggu

SEQ ID NO: 436150 - RNA, 25 nt, Human
cagaugggaagacugagguugggga

SEQ ID NO: 436151 - RNA, 20 nt, Human
cauuuuauagaaagggaaau

SEQ ID NO: 436152 - RNA, 21 nt, Human
cauuuuauagaaagggaaauu

SEQ ID NO: 436153 - RNA, 19 nt, Human
ccacguggccccagagggu

SEQ ID NO: 436154 - RNA, 19 nt, Human
cugguguggggugcagaac

SEQ ID NO: 436155 - RNA, 23 nt, Human
gaacauggugcaugguagguggc

SEQ ID NO: 436156 - RNA, 18 nt, Human
gaggccagggguugggga

SEQ ID NO: 436157 - RNA, 18 nt, Human
ggaagacugagguugggg

SEQ ID NO: 436158 - RNA, 21 nt, Human
gggaagacugagguuggggag

SEQ ID NO: 436159 - RNA, 24 nt, Human
ucccgggccaccaggacuggcguc

SEQ ID NO: 436160 - RNA, 23 nt, Human
ucuuccauuuuauagaaagggaa

SEQ ID NO: 436161 - RNA, 23 nt, Human
ugccucaggacccaucguucaga

SEQ ID NO: 436162 - RNA, 19 nt, Human
uggcaaggaacauggugca

SEQ ID NO: 436163 - RNA, 21 nt, Human
uggggugcagaaccgcugaug

SEQ ID NO: 436164 - RNA, 20 nt, Human
ugguagguggcagaagggac

SEQ ID NO: 436165 - RNA, 19 nt, Human
uucccgggccaccaggacu

SEQ ID NO: 436166 - RNA, 23 nt, Human
uuuuuuuuuuuuuuucuggacau

SEQ ID NO: 436167 - RNA, 23 nt, Human
uuuuuuuuuuuuuuuuuucuggg

SEQ ID NO: 436168 - RNA, 22 nt, Human
aaaguuccuuuucacccuacuc

SEQ ID NO: 436169 - RNA, 25 nt, Human
aaaugagacugcggggccugggagc

SEQ ID NO: 436170 - RNA, 19 nt, Human
acaguaucuauuguucagu

SEQ ID NO: 436171 - RNA, 18 nt, Human
agggaggggacacauggg

SEQ ID NO: 436172 - RNA, 22 nt, Human
agggaggggacacaugggacug

SEQ ID NO: 436173 - RNA, 21 nt, Human
auacauagucuuaagaacaua

SEQ ID NO: 436174 - RNA, 22 nt, Human
augcuguaauguucauugaaau

SEQ ID NO: 436175 - RNA, 22 nt, Human
caaaaaaagaguggcuuccccc

SEQ ID NO: 436176 - RNA, 19 nt, Human
cagcuuuauuaaaguguaa

SEQ ID NO: 436177 - RNA, 22 nt, Human
ccaaaaaaagaguggcuucccc

SEQ ID NO: 436178 - RNA, 23 nt, Human
ccaaaaaaagaguggcuuccccc

SEQ ID NO: 436179 - RNA, 24 nt, Human
cccaaaaaaagaguggcuuccccc

SEQ ID NO: 436180 - RNA, 25 nt, Human
ccccgcgccugucaccggucccgga

SEQ ID NO: 436181 - RNA, 22 nt, Human
cccucuguugaggagccggaga

SEQ ID NO: 436182 - RNA, 23 nt, Human
ccggagaggggcucggggcgcag

SEQ ID NO: 436183 - RNA, 22 nt, Human
cgcuagcgcgccggggucacgc

SEQ ID NO: 436184 - RNA, 24 nt, Human
cggagaggggcucggggcgcagcg

SEQ ID NO: 436185 - RNA, 21 nt, Human
cggcgagcccucuguugagga

SEQ ID NO: 436186 - RNA, 26 nt, Human
cuacucugcuacuauuauucuaguau

SEQ ID NO: 436187 - RNA, 22 nt, Human
cuuagcuuucagaacagaaagu

SEQ ID NO: 436188 - RNA, 24 nt, Human
gaggagccggagaggggcucgggg

SEQ ID NO: 436189 - RNA, 20 nt, Human
gcaaaugagacugcggggcc

SEQ ID NO: 436190 - RNA, 19 nt, Human
gcgcagcgacugcggcggc

SEQ ID NO: 436191 - RNA, 24 nt, Human
gcggcaaaugagacugcggggccu

SEQ ID NO: 436192 - RNA, 18 nt, Human
ggcagccggggacgccag

SEQ ID NO: 436193 - RNA, 19 nt, Human
ggccgcugggccccaggca

SEQ ID NO: 436194 - RNA, 18 nt, Human
ggggacgccaggagggaa

SEQ ID NO: 436195 - RNA, 21 nt, Human
ucccggacgcuagcgcgccgg

SEQ ID NO: 436196 - RNA, 20 nt, Human
ucuccacagcgcucccuacc

SEQ ID NO: 436197 - RNA, 21 nt, Human
ucuccacagcgcucccuacca

SEQ ID NO: 436198 - RNA, 21 nt, Human
ugcccaaaaaaagaguggcuu

SEQ ID NO: 436199 - RNA, 22 nt, Human
ugcccaaaaaaagaguggcuuc

SEQ ID NO: 436200 - RNA, 26 nt, Human
ugggacugcuuggcgcaccccgcgcc

SEQ ID NO: 436201 - RNA, 23 nt, Human
uguugaggagccggagaggggcu

SEQ ID NO: 436202 - RNA, 21 nt, Human
uuaaagauuccaugagacaag

SEQ ID NO: 436203 - RNA, 24 nt, Human
uucacacuaaauauuuuguaauga

SEQ ID NO: 436204 - RNA, 23 nt, Human
uucaguguguuacaauuuuucuc

SEQ ID NO: 436205 - RNA, 23 nt, Human
acacugaagucuucaagucccca

SEQ ID NO: 436206 - RNA, 18 nt, Human
agaagaagauggggaaga

SEQ ID NO: 436207 - RNA, 21 nt, Human
agaagaagauggggaagagga

SEQ ID NO: 436208 - RNA, 23 nt, Human
agagaagaagauggggaagagga

SEQ ID NO: 436209 - RNA, 18 nt, Human
agaggaagggagggcggc

SEQ ID NO: 436210 - RNA, 28 nt, Human
agcccuggagccccuuccacccaauccc

SEQ ID NO: 436211 - RNA, 25 nt, Human
cagcagcacccuccccgccgggucc

SEQ ID NO: 436212 - RNA, 18 nt, Human
caggcagccaggcccaug

SEQ ID NO: 436213 - RNA, 25 nt, Human
cagggcagcacccaugggcuccacc

SEQ ID NO: 436214 - RNA, 26 nt, Human
ccaccuugcuuuuuuuuuuuuuuuuu

SEQ ID NO: 436215 - RNA, 23 nt, Human
cccacauggggagcaccaggagc

SEQ ID NO: 436216 - RNA, 21 nt, Human
cccagcugccagcucccccca

SEQ ID NO: 436217 - RNA, 18 nt, Human
cccaugggcuccaccagc

SEQ ID NO: 436218 - RNA, 19 nt, Human
ccccuuccacccaauccca

SEQ ID NO: 436219 - RNA, 20 nt, Human
cccgccgggucccaccuugc

SEQ ID NO: 436220 - RNA, 18 nt, Human
ccuccccuagguaaagau

SEQ ID NO: 436221 - RNA, 19 nt, Human
ccuugcuuuuuuuuuuuuu

SEQ ID NO: 436222 - RNA, 24 nt, Human
cgcacuggaucuugcccagcugcc

SEQ ID NO: 436223 - RNA, 20 nt, Human
cgcggagacgccacaagcca

SEQ ID NO: 436224 - RNA, 26 nt, Human
cgggucccaccuugcuuuuuuuuuuu

SEQ ID NO: 436225 - RNA, 24 nt, Human
cugaagucuucaaguccccagcaa

SEQ ID NO: 436226 - RNA, 18 nt, Human
cuggagccccuuccaccc

SEQ ID NO: 436227 - RNA, 20 nt, Human
cugggcuccugccucaccgc

SEQ ID NO: 436228 - RNA, 22 nt, Human
cugugguuccucaguuucuccu

SEQ ID NO: 436229 - RNA, 18 nt, Human
gaagauggggaagaggaa

SEQ ID NO: 436230 - RNA, 22 nt, Human
gaagauggggaagaggaaggga

SEQ ID NO: 436231 - RNA, 18 nt, Human
gagaagaagauggggaag

SEQ ID NO: 436232 - RNA, 24 nt, Human
gagaagaagauggggaagaggaag

SEQ ID NO: 436233 - RNA, 23 nt, Human
gagagaagaagauggggaagagg

SEQ ID NO: 436234 - RNA, 18 nt, Human
gagcaccaggagcccugg

SEQ ID NO: 436235 - RNA, 20 nt, Human
gagcaccaggagcccuggag

SEQ ID NO: 436236 - RNA, 22 nt, Human
gagccccuuccacccaaggcac

SEQ ID NO: 436237 - RNA, 18 nt, Human
gcacuggaucuugcccag

SEQ ID NO: 436238 - RNA, 18 nt, Human
gcccauggcuggaaggcc

SEQ ID NO: 436239 - RNA, 26 nt, Human
gcccuggagccccuuccaaccggagg

SEQ ID NO: 436240 - RNA, 19 nt, Human
gcccuggagccccuuccac

SEQ ID NO: 436241 - RNA, 21 nt, Human
ggagccccuuccacccaaucc

SEQ ID NO: 436242 - RNA, 21 nt, Human
ggcccauggcuggaaggccgg

SEQ ID NO: 436243 - RNA, 21 nt, Human
ggcucuacucaagcaccacga

SEQ ID NO: 436244 - RNA, 21 nt, Human
gggcagcacccaugggcucca

SEQ ID NO: 436245 - RNA, 24 nt, Human
gggcuccaccagcccagcucuguc

SEQ ID NO: 436246 - RNA, 18 nt, Human
gggguguuuccuuccucu

SEQ ID NO: 436247 - RNA, 20 nt, Human
ucccacauggggagcaccag

SEQ ID NO: 436248 - RNA, 19 nt, Human
uccccagcaaccaaguugg

SEQ ID NO: 436249 - RNA, 21 nt, Human
uccucaguuucuccugccagc

SEQ ID NO: 436250 - RNA, 20 nt, Human
ucuccgggcgggggcucccg

SEQ ID NO: 436251 - RNA, 24 nt, Human
ucugggcuccugccucaccgcugg

SEQ ID NO: 436252 - RNA, 22 nt, Human
ucuucaggcagccaggcccaug

SEQ ID NO: 436253 - RNA, 24 nt, Human
ucuucaggcagccaggcccauggc

SEQ ID NO: 436254 - RNA, 22 nt, Human
ucuugcccagcugccagcuccc

SEQ ID NO: 436255 - RNA, 18 nt, Human
ugccagcuccccccacca

SEQ ID NO: 436256 - RNA, 20 nt, Human
ugccagcuccccccaccagg

SEQ ID NO: 436257 - RNA, 19 nt, Human
ugccucaccgcugguucag

SEQ ID NO: 436258 - RNA, 19 nt, Human
uggggaagaggaagggagg

SEQ ID NO: 436259 - RNA, 22 nt, Human
uggggaagaggaagggagggcg

SEQ ID NO: 436260 - RNA, 18 nt, Human
uuccucaguuucuccugc

SEQ ID NO: 436261 - RNA, 22 nt, Human
uuuccuuccucuucaggcagcc

SEQ ID NO: 436262 - RNA, 19 nt, Human
uuuuuuuuuuugaguggac

SEQ ID NO: 436263 - RNA, 21 nt, Human
uuuuuuuuuuuuuugagugga

SEQ ID NO: 436264 - RNA, 22 nt, Human
uuuuuuuuuuuuuuuugagugg

SEQ ID NO: 436265 - RNA, 18 nt, Human
uuuuuuuuuuuuuuuuug

SEQ ID NO: 436266 - RNA, 23 nt, Human
acagguuacaaaauuaaaaccaa

SEQ ID NO: 436267 - RNA, 21 nt, Human
aggcauugaagccuagcaacu

SEQ ID NO: 436268 - RNA, 28 nt, Human
agucauucagcauuguaguaagaaaaca

SEQ ID NO: 436269 - RNA, 22 nt, Human
cagcauuguaguaagaaaacac

SEQ ID NO: 436270 - RNA, 20 nt, Human
cccacgcaugcuaucuucca

SEQ ID NO: 436271 - RNA, 21 nt, Human
cggaaagugaugugacgcucc

SEQ ID NO: 436272 - RNA, 21 nt, Human
cuagccauaucaguucuucuu

SEQ ID NO: 436273 - RNA, 22 nt, Human
gguuacaaaauuaaaaccaaca

SEQ ID NO: 436274 - RNA, 19 nt, Human
uacaaaauuaaaaccaaca

SEQ ID NO: 436275 - RNA, 23 nt, Human
ucccaccaggcucagagauaccc

SEQ ID NO: 436276 - RNA, 22 nt, Human
ugcuaccgauaggcauugaagc

SEQ ID NO: 436277 - RNA, 24 nt, Human
aaaauaacaagugcaaacaugcug

SEQ ID NO: 436278 - RNA, 24 nt, Human
aaaauaugaagcagcucuaaacac

SEQ ID NO: 436279 - RNA, 21 nt, Human
aaacaggaugacagguuuuua

SEQ ID NO: 436280 - RNA, 24 nt, Human
aaagauaaauuucuaaagccaaag

SEQ ID NO: 436281 - RNA, 21 nt, Human
aaaguacuucaguaucaauug

SEQ ID NO: 436282 - RNA, 19 nt, Human
aaauaauguucgugaccau

SEQ ID NO: 436283 - RNA, 18 nt, Human
aacacagcuacuucaucu

SEQ ID NO: 436284 - RNA, 20 nt, Human
aacacagcuacuucaucugu

SEQ ID NO: 436285 - RNA, 20 nt, Human
aacuaaagagcaaugcaaua

SEQ ID NO: 436286 - RNA, 18 nt, Human
aagaagucugaacacagc

SEQ ID NO: 436287 - RNA, 21 nt, Human
aagaagucugaacacagccua

SEQ ID NO: 436288 - RNA, 18 nt, Human
aagcagcucuaaacacca

SEQ ID NO: 436289 - RNA, 19 nt, Human
aagcagcucuaaacaccaa

SEQ ID NO: 436290 - RNA, 23 nt, Human
aagcauaaauaauguucgugacc

SEQ ID NO: 436291 - RNA, 20 nt, Human
aagugcaaacaugcugaacc

SEQ ID NO: 436292 - RNA, 18 nt, Human
aauugccauaacacucag

SEQ ID NO: 436293 - RNA, 18 nt, Human
acaaaguaaugaguuaaa

SEQ ID NO: 436294 - RNA, 23 nt, Human
acagaagacaauuuacugccaca

SEQ ID NO: 436295 - RNA, 19 nt, Human
acagguuuuuaugaaggag

SEQ ID NO: 436296 - RNA, 19 nt, Human
accuguaaaagauuccccc

SEQ ID NO: 436297 - RNA, 23 nt, Human
acuucaucuguucucuuuuugca

SEQ ID NO: 436298 - RNA, 26 nt, Human
agucaagaaaugaaacaaagggaccc

SEQ ID NO: 436299 - RNA, 21 nt, Human
augaagcagcucuaaacacca

SEQ ID NO: 436300 - RNA, 24 nt, Human
auggaacuaguuuaaaauaugaag

SEQ ID NO: 436301 - RNA, 25 nt, Human
caaaacucucaagauaccagcacau

SEQ ID NO: 436302 - RNA, 19 nt, Human
caaaauaacaagugcaaac

SEQ ID NO: 436303 - RNA, 18 nt, Human
caaagcauuaaacugccu

SEQ ID NO: 436304 - RNA, 22 nt, Human
caacuaaagagcaaugcaauau

SEQ ID NO: 436305 - RNA, 21 nt, Human
cacaacucugagaugauuaga

SEQ ID NO: 436306 - RNA, 22 nt, Human
cacacaggaaucaaccacagcu

SEQ ID NO: 436307 - RNA, 21 nt, Human
ccaaacucacacccacaaggu

SEQ ID NO: 436308 - RNA, 19 nt, Human
ccacacaggaaucaaccac

SEQ ID NO: 436309 - RNA, 18 nt, Human
ccacugcuuucuggucuc

SEQ ID NO: 436310 - RNA, 19 nt, Human
ccagcacauaacacagcua

SEQ ID NO: 436311 - RNA, 19 nt, Human
cccaaacucacacccacaa

SEQ ID NO: 436312 - RNA, 22 nt, Human
cccaaacucacacccacaaggu

SEQ ID NO: 436313 - RNA, 18 nt, Human
cccacauauagcaggggc

SEQ ID NO: 436314 - RNA, 22 nt, Human
cccacccagcauccccucccca

SEQ ID NO: 436315 - RNA, 24 nt, Human
ccggauggguacaugaaagauaaa

SEQ ID NO: 436316 - RNA, 23 nt, Human
cggauggguacaugaaagauaaa

SEQ ID NO: 436317 - RNA, 22 nt, Human
cugaagaacaaaacaggaugaa

SEQ ID NO: 436318 - RNA, 24 nt, Human
cugaugaggagcugaagaacaaaa

SEQ ID NO: 436319 - RNA, 20 nt, Human
cugguuugaacuagaacugu

SEQ ID NO: 436320 - RNA, 24 nt, Human
cuuagggaaagucaagaaaugaaa

SEQ ID NO: 436321 - RNA, 18 nt, Human
cuuuuugguacauucugg

SEQ ID NO: 436322 - RNA, 21 nt, Human
gagugacauucccuucugcca

SEQ ID NO: 436323 - RNA, 19 nt, Human
gcaaaacucucaagauacc

SEQ ID NO: 436324 - RNA, 21 nt, Human
gcacuuuuugguacauucugg

SEQ ID NO: 436325 - RNA, 24 nt, Human
gcuuaucugcuuagggaaagucaa

SEQ ID NO: 436326 - RNA, 18 nt, Human
ggagcugaagaacaaaac

SEQ ID NO: 436327 - RNA, 18 nt, Human
gggguccggguucagugg

SEQ ID NO: 436328 - RNA, 18 nt, Human
gggguccggguucagugg

SEQ ID NO: 436329 - RNA, 19 nt, Human
ggguuuauggugaugccag

SEQ ID NO: 436330 - RNA, 21 nt, Human
guaaaagauucccccagagga

SEQ ID NO: 436331 - RNA, 19 nt, Human
guaagacacaucaaacaaa

SEQ ID NO: 436332 - RNA, 22 nt, Human
uaaaaaggagcugacuucauuc

SEQ ID NO: 436333 - RNA, 20 nt, Human
uaaauaauguucgugaccau

SEQ ID NO: 436334 - RNA, 24 nt, Human
uaacaagugcaaacaugcugaacc

SEQ ID NO: 436335 - RNA, 21 nt, Human
uaacacagcuacuucaucugu

SEQ ID NO: 436336 - RNA, 27 nt, Human
uaacuccauggcaaaguacuucaguau

SEQ ID NO: 436337 - RNA, 28 nt, Human
uaacuuuuagucaaaaauauguaagaca

SEQ ID NO: 436338 - RNA, 18 nt, Human
uaagacacaucaaacaaa

SEQ ID NO: 436339 - RNA, 21 nt, Human
uaagaugacaaaacuucaauc

SEQ ID NO: 436340 - RNA, 22 nt, Human
uaagaugacaaaacuucaaucu

SEQ ID NO: 436341 - RNA, 21 nt, Human
uacaaaauaacaagugcaaac

SEQ ID NO: 436342 - RNA, 21 nt, Human
uaccagcacauaacacagcua

SEQ ID NO: 436343 - RNA, 20 nt, Human
uaccuugugcacuuuuuggu

SEQ ID NO: 436344 - RNA, 24 nt, Human
uacuucaucuguucucuuuuugca

SEQ ID NO: 436345 - RNA, 19 nt, Human
uagaauuuccagagacaac

SEQ ID NO: 436346 - RNA, 20 nt, Human
uagaauuuccagagacaacu

SEQ ID NO: 436347 - RNA, 20 nt, Human
ucaacuggaagacccauguc

SEQ ID NO: 436348 - RNA, 18 nt, Human
ucccacccagcauccccu

SEQ ID NO: 436349 - RNA, 21 nt, Human
ucccacccagcauccccuccc

SEQ ID NO: 436350 - RNA, 23 nt, Human
ucccacccagcauccccucccca

SEQ ID NO: 436351 - RNA, 24 nt, Human
ucccacccagcauccccuccccaa

SEQ ID NO: 436352 - RNA, 19 nt, Human
ucccuaaugagccucaguu

SEQ ID NO: 436353 - RNA, 21 nt, Human
uccuucccuaaugagccucag

SEQ ID NO: 436354 - RNA, 19 nt, Human
ucucucauuugaauuucuc

SEQ ID NO: 436355 - RNA, 19 nt, Human
ucucucucuucaaaagaag

SEQ ID NO: 436356 - RNA, 24 nt, Human
ugaaagauaaauuucuaaagccaa

SEQ ID NO: 436357 - RNA, 23 nt, Human
ugaagcagcucuaaacaccaagc

SEQ ID NO: 436358 - RNA, 18 nt, Human
ugaccaugaguuuucccc

SEQ ID NO: 436359 - RNA, 21 nt, Human
ugccaaaugcugagccaucua

SEQ ID NO: 436360 - RNA, 18 nt, Human
uggaguaagcagacagaa

SEQ ID NO: 436361 - RNA, 19 nt, Human
uggcaguugaugacuuggg

SEQ ID NO: 436362 - RNA, 18 nt, Human
uggccuacaggguuuaug

SEQ ID NO: 436363 - RNA, 21 nt, Human
ugggggagcgcccgcuugaca

SEQ ID NO: 436364 - RNA, 21 nt, Human
ugggggagcgcccgcuugaca

SEQ ID NO: 436365 - RNA, 22 nt, Human
ugguaugaaaaccucucaaaau

SEQ ID NO: 436366 - RNA, 18 nt, Human
uguaaauuaccuuuaccu

SEQ ID NO: 436367 - RNA, 22 nt, Human
uguaacaacacaagaguuuggg

SEQ ID NO: 436368 - RNA, 21 nt, Human
uguggaauggaacuaguuuaa

SEQ ID NO: 436369 - RNA, 20 nt, Human
uguuucccacccagcauccc

SEQ ID NO: 436370 - RNA, 20 nt, Human
uucaacuauaaaaaggagcu

SEQ ID NO: 436371 - RNA, 24 nt, Human
uucagugguaauagcggcggagau

SEQ ID NO: 436372 - RNA, 25 nt, Human
uucccacccagcauccccuccccaa

SEQ ID NO: 436373 - RNA, 24 nt, Human
uuuccuguuccacuagauuuccuu

SEQ ID NO: 436374 - RNA, 25 nt, Human
uuuccuguuccacuagauuuccuuu

SEQ ID NO: 436375 - RNA, 20 nt, Human
uuucuagaaacccucaaagc

SEQ ID NO: 436376 - RNA, 19 nt, Human
uuucuuggcaaaacucuca

SEQ ID NO: 436377 - RNA, 23 nt, Human
uuucuuggcauuucauaacuguu

SEQ ID NO: 436378 - RNA, 19 nt, Human
uuugugcagacaaugguga

SEQ ID NO: 436379 - RNA, 23 nt, Human
uuuuuuuuuuuuuuuuuuuaggg

SEQ ID NO: 436380 - RNA, 20 nt, Human
aaauggccucacauccugaa

SEQ ID NO: 436381 - RNA, 21 nt, Human
accguugaaaacucugacagg

SEQ ID NO: 436382 - RNA, 25 nt, Human
acuacaaacaugaaucaaaaaggag

SEQ ID NO: 436383 - RNA, 21 nt, Human
agcugacaaaaaucaagucug

SEQ ID NO: 436384 - RNA, 21 nt, Human
cacaauuagcaaaacuaaaag

SEQ ID NO: 436385 - RNA, 21 nt, Human
cacagcaaaccuaccuuucca

SEQ ID NO: 436386 - RNA, 24 nt, Human
cauuuccauuucacaauuagcaaa

SEQ ID NO: 436387 - RNA, 23 nt, Human
cccaagaacucaauaaucucuua

SEQ ID NO: 436388 - RNA, 18 nt, Human
gacuacaaacaugaauca

SEQ ID NO: 436389 - RNA, 19 nt, Human
uagcucagagacaaugugg

SEQ ID NO: 436390 - RNA, 26 nt, Human
ucaaaaaggaguuaaggaauuuuaag

SEQ ID NO: 436391 - RNA, 24 nt, Human
ucaaauauuaacuauuucggugcc

SEQ ID NO: 436392 - RNA, 21 nt, Human
ucacaauuagcaaaacuaaaa

SEQ ID NO: 436393 - RNA, 27 nt, Human
uccacagcaaaccuaccuuuccagaag

SEQ ID NO: 436394 - RNA, 19 nt, Human
ucuuauguuuucuuuugaa

SEQ ID NO: 436395 - RNA, 20 nt, Human
ucuuuaauguugaauucuga

SEQ ID NO: 436396 - RNA, 21 nt, Human
ugaaaacacaaccauaaauca

SEQ ID NO: 436397 - RNA, 23 nt, Human
ugaaaacucugacaggcuuugug

SEQ ID NO: 436398 - RNA, 19 nt, Human
ugaaauaaaggauccaguc

SEQ ID NO: 436399 - RNA, 23 nt, Human
ugugguaccuguuuggaauccag

SEQ ID NO: 436400 - RNA, 21 nt, Human
uuaaauggccucacauccuga

SEQ ID NO: 436401 - RNA, 21 nt, Human
uugcaacaaucagggcaaaac

SEQ ID NO: 436402 - RNA, 23 nt, Human
uuucaauuauagcuuaccaauua

SEQ ID NO: 436403 - RNA, 26 nt, Human
aaaaaaaagagauauguaauagagaa

SEQ ID NO: 436404 - RNA, 19 nt, Human
aaaaaaagagauauguaau

SEQ ID NO: 436405 - RNA, 18 nt, Human
aaaaaaccaaacaccaca

SEQ ID NO: 436406 - RNA, 24 nt, Human
aaaaaagagauauguaauagagaa

SEQ ID NO: 436407 - RNA, 22 nt, Human
aaaccaaacaccacauauucuc

SEQ ID NO: 436408 - RNA, 22 nt, Human
aaaccaucauucucagcaaacu

SEQ ID NO: 436409 - RNA, 19 nt, Human
aaccaaacaccacauauuc

SEQ ID NO: 436410 - RNA, 19 nt, Human
aaccugcacauugugcaca

SEQ ID NO: 436411 - RNA, 26 nt, Human
aaggacaaaaaaccaaacaccacaua

SEQ ID NO: 436412 - RNA, 21 nt, Human
agaaaaaaaagagauauguaa

SEQ ID NO: 436413 - RNA, 26 nt, Human
agaaaaaaaagagauauguaauagag

SEQ ID NO: 436414 - RNA, 29 nt, Human
agaaaaaaaagagauauguaauagagaag

SEQ ID NO: 436415 - RNA, 21 nt, Human
agccggacucuaggcucagcu

SEQ ID NO: 436416 - RNA, 18 nt, Human
agcucccgcagccccgcc

SEQ ID NO: 436417 - RNA, 18 nt, Human
aggaacauggaugaagcu

SEQ ID NO: 436418 - RNA, 24 nt, Human
auauacaccauggaauacuaugca

SEQ ID NO: 436419 - RNA, 22 nt, Human
caauagcaaagacuuggaacca

SEQ ID NO: 436420 - RNA, 18 nt, Human
cacauguauacauaugua

SEQ ID NO: 436421 - RNA, 26 nt, Human
caccacauauucucacuccuaggugg

SEQ ID NO: 436422 - RNA, 18 nt, Human
caccagauccgcgcccac

SEQ ID NO: 436423 - RNA, 21 nt, Human
caccagauccgcgcccacucu

SEQ ID NO: 436424 - RNA, 18 nt, Human
caggcaggccugaguccc

SEQ ID NO: 436425 - RNA, 22 nt, Human
ccaaacaccacauauucucacu

SEQ ID NO: 436426 - RNA, 21 nt, Human
ccacauauucucacuccuagg

SEQ ID NO: 436427 - RNA, 20 nt, Human
ccccacaccagauccgcgcc

SEQ ID NO: 436428 - RNA, 21 nt, Human
ccccacaccagauccgcgccc

SEQ ID NO: 436429 - RNA, 22 nt, Human
cccgcagccccgccaacuuucc

SEQ ID NO: 436430 - RNA, 21 nt, Human
cccgccgccuuccccacacca

SEQ ID NO: 436431 - RNA, 21 nt, Human
cggacucuaggcucagcuccc

SEQ ID NO: 436432 - RNA, 21 nt, Human
gcaaacuaucgaaaggacaaa

SEQ ID NO: 436433 - RNA, 22 nt, Human
gcaaacuaucgaaaggacaaaa

SEQ ID NO: 436434 - RNA, 19 nt, Human
ggggagggauagcauuagg

SEQ ID NO: 436435 - RNA, 19 nt, Human
guaauagagaagaaaaaua

SEQ ID NO: 436436 - RNA, 23 nt, Human
guauaguaauaauaaaaacaaga

SEQ ID NO: 436437 - RNA, 25 nt, Human
uaauaaaaacaagaaaaaaaagaga

SEQ ID NO: 436438 - RNA, 21 nt, Human
uauaguaauaauaaaaacaag

SEQ ID NO: 436439 - RNA, 18 nt, Human
uauauacacuauuuguau

SEQ ID NO: 436440 - RNA, 24 nt, Human
ucagcaaacuaucgaaaggacaaa

SEQ ID NO: 436441 - RNA, 19 nt, Human
ucgaaaggacaaaaaacca

SEQ ID NO: 436442 - RNA, 20 nt, Human
ugaaaugacgaguuaauggg

SEQ ID NO: 436443 - RNA, 24 nt, Human
ugaacaaugagaacacauggacac

SEQ ID NO: 436444 - RNA, 20 nt, Human
ugagucccgccgccuucccc

SEQ ID NO: 436445 - RNA, 20 nt, Human
uggaauacuaugcagccaua

SEQ ID NO: 436446 - RNA, 20 nt, Human
uggauuaagaaaauguggcc

SEQ ID NO: 436447 - RNA, 19 nt, Human
uggcacauguauacauaug

SEQ ID NO: 436448 - RNA, 27 nt, Human
uguauacauauguaacaaaccugcaca

SEQ ID NO: 436449 - RNA, 18 nt, Human
uugggggaggggggaggg

SEQ ID NO: 436450 - RNA, 23 nt, Human
uugugcacauguacccuaaaacu

SEQ ID NO: 436451 - RNA, 23 nt, Human
uuuauuucggcacuauucacaau

SEQ ID NO: 436452 - RNA, 27 nt, Human
uuuuggagacacaugcacacguauggu

SEQ ID NO: 436453 - RNA, 28 nt, Human
uuuuuuuuuuuuuuuuuuuuuuuggggg

SEQ ID NO: 436454 - RNA, 19 nt, Human
aaauccucugucaacacca

SEQ ID NO: 436455 - RNA, 30 nt, Human
aagagaaaaaaauauaaaaauaaaaauguu

SEQ ID NO: 436456 - RNA, 20 nt, Human
acagacagugccacgaugac

SEQ ID NO: 436457 - RNA, 22 nt, Human
acuccaaaaagaacauuaaaga

SEQ ID NO: 436458 - RNA, 22 nt, Human
agaaagcaaaaccaauuuuccc

SEQ ID NO: 436459 - RNA, 22 nt, Human
agagcuuuuuacauaguuacau

SEQ ID NO: 436460 - RNA, 21 nt, Human
agcugaacugugggugaaauu

SEQ ID NO: 436461 - RNA, 18 nt, Human
aggcagaguugcagugaa

SEQ ID NO: 436462 - RNA, 19 nt, Human
aggcgagaaaaggaacuga

SEQ ID NO: 436463 - RNA, 21 nt, Human
aggcgagaaaaggaacugagg

SEQ ID NO: 436464 - RNA, 20 nt, Human
auaaaaauaaaaauguacaa

SEQ ID NO: 436465 - RNA, 28 nt, Human
auaaauccucugucaacaccagacagag

SEQ ID NO: 436466 - RNA, 23 nt, Human
caaaaagaacauuaaagacgaag

SEQ ID NO: 436467 - RNA, 25 nt, Human
caaagaaagcaaaaccaauuuuccc

SEQ ID NO: 436468 - RNA, 25 nt, Human
caauaagccaucuuccagaugcagc

SEQ ID NO: 436469 - RNA, 19 nt, Human
cacacaaaggcagaguugc

SEQ ID NO: 436470 - RNA, 18 nt, Human
cacgugcgacgggaaaac

SEQ ID NO: 436471 - RNA, 18 nt, Human
cagccagcugaacugugg

SEQ ID NO: 436472 - RNA, 21 nt, Human
ccuugcaaaccauucagaagc

SEQ ID NO: 436473 - RNA, 22 nt, Human
cgccgccggaggccgccgcucu

SEQ ID NO: 436474 - RNA, 20 nt, Human
cgggaccgacagauccacca

SEQ ID NO: 436475 - RNA, 28 nt, Human
cugguuaaaaccaauaagccaucuucca

SEQ ID NO: 436476 - RNA, 21 nt, Human
gagcauuacaaaugaucgcca

SEQ ID NO: 436477 - RNA, 22 nt, Human
gagcuuagagcuuuuuacauag

SEQ ID NO: 436478 - RNA, 19 nt, Human
guacaaagaaagcaaaacc

SEQ ID NO: 436479 - RNA, 23 nt, Human
guccaugacuggagagcgccgcc

SEQ ID NO: 436480 - RNA, 23 nt, Human
uaaaaccaauaagccaucuucca

SEQ ID NO: 436481 - RNA, 19 nt, Human
uaagagcauuacaaaugau

SEQ ID NO: 436482 - RNA, 21 nt, Human
uaagagcauuacaaaugaucg

SEQ ID NO: 436483 - RNA, 21 nt, Human
uacacacaaaggcagaguugc

SEQ ID NO: 436484 - RNA, 22 nt, Human
uacccacggccgauccaaaggc

SEQ ID NO: 436485 - RNA, 19 nt, Human
ucagaagccaacaguggcc

SEQ ID NO: 436486 - RNA, 19 nt, Human
ucuggacacucauguaaga

SEQ ID NO: 436487 - RNA, 19 nt, Human
ugagugccucuggacacuc

SEQ ID NO: 436488 - RNA, 18 nt, Human
uggaaaggaacggcucag

SEQ ID NO: 436489 - RNA, 23 nt, Human
uuaaaaccaauaagccaucuucc

SEQ ID NO: 436490 - RNA, 22 nt, Human
uucacagacagugccacgauga

SEQ ID NO: 436491 - RNA, 25 nt, Human
uucaggcgagaaaaggaacugagga

SEQ ID NO: 436492 - RNA, 27 nt, Human
uucaggcgagaaaaggaacugaggaaa

SEQ ID NO: 436493 - RNA, 23 nt, Human
uuuuuuuuuuuuuuuuuuuuggg

SEQ ID NO: 436494 - RNA, 19 nt, Human
agagugucgacuggagaag

SEQ ID NO: 436495 - RNA, 22 nt, Human
aggugcuagggagcggcgagcu

SEQ ID NO: 436496 - RNA, 18 nt, Human
cagcggcugccagggaca

SEQ ID NO: 436497 - RNA, 24 nt, Human
cgagagugucgacuggagaaggug

SEQ ID NO: 436498 - RNA, 19 nt, Human
ucgcccgcgggucgcugcu

SEQ ID NO: 436499 - RNA, 18 nt, Human
ucgggcucagcggcugcc

SEQ ID NO: 436500 - RNA, 24 nt, Human
ucuccgggcgcgagagugucgacu

SEQ ID NO: 436501 - RNA, 19 nt, Human
uccacugacuucauuccuc

SEQ ID NO: 436502 - RNA, 24 nt, Human
aacauagcaagaccccccauugcu

SEQ ID NO: 436503 - RNA, 26 nt, Human
agcaagaccccccauugcuacauauu

SEQ ID NO: 436504 - RNA, 24 nt, Human
agcacuuuggaaggcugaggcagg

SEQ ID NO: 436505 - RNA, 24 nt, Human
agccugggcaacauagcaagaccc

SEQ ID NO: 436506 - RNA, 24 nt, Human
aggauugcaugaagccagaaguuu

SEQ ID NO: 436507 - RNA, 24 nt, Human
cacgccuguaaucccagcacuuug

SEQ ID NO: 436508 - RNA, 24 nt, Human
cagcacuuuggaaggcugaggcag

SEQ ID NO: 436509 - RNA, 26 nt, Human
cagcacuuuggaaggcugaggcaggu

SEQ ID NO: 436510 - RNA, 18 nt, Human
cgccuguaaucccagcac

SEQ ID NO: 436511 - RNA, 23 nt, Human
cgccuguaaucccagcacuuugg

SEQ ID NO: 436512 - RNA, 22 nt, Human
cucacgccuguaaucccagcac

SEQ ID NO: 436513 - RNA, 24 nt, Human
cucacgccuguaaucccagcacuu

SEQ ID NO: 436514 - RNA, 18 nt, Human
gcucauuuggaaggauug

SEQ ID NO: 436515 - RNA, 24 nt, Human
gggugagguggcucacgccuguaa

SEQ ID NO: 436516 - RNA, 23 nt, Human
gguggcucacgccuguaauccca

SEQ ID NO: 436517 - RNA, 24 nt, Human
gguggcucacgccuguaaucccag

SEQ ID NO: 436518 - RNA, 19 nt, Human
uaucuaaauuagccggcug

SEQ ID NO: 436519 - RNA, 21 nt, Human
uauuacuuucuaguauacuaa

SEQ ID NO: 436520 - RNA, 23 nt, Human
ucuaaagcuuuguuuaaaaguua

SEQ ID NO: 436521 - RNA, 18 nt, Human
uggaaggcugaggcaggu

SEQ ID NO: 436522 - RNA, 18 nt, Human
uggaaggcugaggcaggu

SEQ ID NO: 436523 - RNA, 22 nt, Human
uggcucacgccuguaaucccag

SEQ ID NO: 436524 - RNA, 24 nt, Human
uggcucacgccuguaaucccagca

SEQ ID NO: 436525 - RNA, 24 nt, Human
uugcaugaagccagaaguuugaga

SEQ ID NO: 436526 - RNA, 19 nt, Human
uauggaaguucugugcaau

SEQ ID NO: 436527 - RNA, 20 nt, Human
accaaaaaugugaguagcag

SEQ ID NO: 436528 - RNA, 24 nt, Human
acguuugaaacacuaccaaaaaug

SEQ ID NO: 436529 - RNA, 21 nt, Human
agaacguuugaaacacuacca

SEQ ID NO: 436530 - RNA, 22 nt, Human
auccagaauccccagccuaagc

SEQ ID NO: 436531 - RNA, 20 nt, Human
caccuuucuuccuccucacu

SEQ ID NO: 436532 - RNA, 19 nt, Human
cucacuuccacugcaggga

SEQ ID NO: 436533 - RNA, 18 nt, Human
uaacagaaauaaguuguu

SEQ ID NO: 436534 - RNA, 25 nt, Human
ucaccuuucuuccuccucacuucca

SEQ ID NO: 436535 - RNA, 22 nt, Human
ugcacggccauuuuggauaucc

SEQ ID NO: 436536 - RNA, 19 nt, Human
uuucuuccuccucacuucc

SEQ ID NO: 436537 - RNA, 23 nt, Human
aaaaacuaaugaaauucaguuaa

SEQ ID NO: 436538 - RNA, 22 nt, Human
aagaaaacaucaagaaaaaaaa

SEQ ID NO: 436539 - RNA, 21 nt, Human
aauaacauguucaaaaaaucc

SEQ ID NO: 436540 - RNA, 22 nt, Human
acacacacacucuuuuaguaua

SEQ ID NO: 436541 - RNA, 20 nt, Human
agaaaaaaaaaaaguauuag

SEQ ID NO: 436542 - RNA, 20 nt, Human
agaaaaccauuucuuccuuc

SEQ ID NO: 436543 - RNA, 23 nt, Human
aguaacuuuuuuguagguauuua

SEQ ID NO: 436544 - RNA, 18 nt, Human
agugagugacagacaaga

SEQ ID NO: 436545 - RNA, 21 nt, Human
auauacacaaaccaaaaacac

SEQ ID NO: 436546 - RNA, 25 nt, Human
caucaagaaaaaaaaaaaguauuag

SEQ ID NO: 436547 - RNA, 25 nt, Human
ccauaucugccauaguaaaaauuca

SEQ ID NO: 436548 - RNA, 19 nt, Human
cuaagaugauaacucauag

SEQ ID NO: 436549 - RNA, 20 nt, Human
cucaugaaauucucaagugg

SEQ ID NO: 436550 - RNA, 21 nt, Human
cugaagacauuugcaaaaaga

SEQ ID NO: 436551 - RNA, 23 nt, Human
cuugugcauucuuuugaagacaa

SEQ ID NO: 436552 - RNA, 20 nt, Human
gacccagcacaccuuaguaa

SEQ ID NO: 436553 - RNA, 19 nt, Human
gcaacagaaaggcuuuuca

SEQ ID NO: 436554 - RNA, 22 nt, Human
gccuccaccuccgccucuucca

SEQ ID NO: 436555 - RNA, 23 nt, Human
gccuccaccuccgccucuuccau

SEQ ID NO: 436556 - RNA, 23 nt, Human
uaaacacuuaaugacaaaaaucu

SEQ ID NO: 436557 - RNA, 21 nt, Human
uaaccucaccgaugacugaau

SEQ ID NO: 436558 - RNA, 22 nt, Human
uaaccucaccgaugacugaaua

SEQ ID NO: 436559 - RNA, 26 nt, Human
uaagaaaaccauuucuuccuucuuuc

SEQ ID NO: 436560 - RNA, 23 nt, Human
uacacacacacucuuuuaguaua

SEQ ID NO: 436561 - RNA, 24 nt, Human
uacauuaaugauaacuaagguaga

SEQ ID NO: 436562 - RNA, 22 nt, Human
uagugagugacagacaagauuc

SEQ ID NO: 436563 - RNA, 18 nt, Human
uauauguauauauacaca

SEQ ID NO: 436564 - RNA, 21 nt, Human
ucagaauaacacuuaaacacu

SEQ ID NO: 436565 - RNA, 24 nt, Human
ucagaauaacacuuaaacacuuaa

SEQ ID NO: 436566 - RNA, 28 nt, Human
uccaugauuagugcauuaaccggggucc

SEQ ID NO: 436567 - RNA, 21 nt, Human
ugagaaucacugcaauaacau

SEQ ID NO: 436568 - RNA, 25 nt, Human
ugcgugaauacacacacacucuuuu

SEQ ID NO: 436569 - RNA, 19 nt, Human
uguaaaaguucaauugauu

SEQ ID NO: 436570 - RNA, 22 nt, Human
uguauauguauauauacacaaa

SEQ ID NO: 436571 - RNA, 22 nt, Human
ugugguucuugugcauucuuuu

SEQ ID NO: 436572 - RNA, 20 nt, Human
uuacugcauuuccuuguauu

SEQ ID NO: 436573 - RNA, 21 nt, Human
uuagugcuuaaaauuuuacga

SEQ ID NO: 436574 - RNA, 23 nt, Human
uucauuuuuaacacagcuaagau

SEQ ID NO: 436575 - RNA, 24 nt, Human
uugaagauuuuauaauugcuccug

SEQ ID NO: 436576 - RNA, 21 nt, Human
uuggcagcugauuagucaguu

SEQ ID NO: 436577 - RNA, 24 nt, Human
uuuguagguauuuaagaaaaccau

SEQ ID NO: 436578 - RNA, 19 nt, Human
uuuuauaauugcuccugcu

SEQ ID NO: 436579 - RNA, 27 nt, Human
uuuuuuuuuuuuuuuuuuuuuuugggg

SEQ ID NO: 436580 - RNA, 25 nt, Human
aaaaaagaaaaaaaaaaguaaaaag

SEQ ID NO: 436581 - RNA, 18 nt, Human
aaaaagaaaaaagaaaaa

SEQ ID NO: 436582 - RNA, 27 nt, Human
aaaaguaaaaagaaagauuaggccuag

SEQ ID NO: 436583 - RNA, 24 nt, Human
aaacaaagagccaaugucucuaau

SEQ ID NO: 436584 - RNA, 22 nt, Human
aaagaaagauuaggccuaaaca

SEQ ID NO: 436585 - RNA, 24 nt, Human
aagaaaaaaaaaaguaaaaagaaa

SEQ ID NO: 436586 - RNA, 20 nt, Human
acugcacuuucaagagcaag

SEQ ID NO: 436587 - RNA, 20 nt, Human
agaaaaaaaaaaguaaaaag

SEQ ID NO: 436588 - RNA, 21 nt, Human
agaaaaaagaaaaaaaaaagu

SEQ ID NO: 436589 - RNA, 30 nt, Human
agaaaaaagaaaaaaaaaaguaaaaagaaa

SEQ ID NO: 436590 - RNA, 21 nt, Human
aguaaaaagaaagauuaggcc

SEQ ID NO: 436591 - RNA, 21 nt, Human
auacugcacuuucaagagcaa

SEQ ID NO: 436592 - RNA, 22 nt, Human
augauguagaaaaauacugcac

SEQ ID NO: 436593 - RNA, 23 nt, Human
auguagaaaaauacugcacuuuc

SEQ ID NO: 436594 - RNA, 23 nt, Human
cauuaagccuucuuugcuggcuc

SEQ ID NO: 436595 - RNA, 20 nt, Human
ccuucacccaucaaguggua

SEQ ID NO: 436596 - RNA, 20 nt, Human
cuuguccuggcaagguagca

SEQ ID NO: 436597 - RNA, 19 nt, Human
ggcgaagugaacacagagg

SEQ ID NO: 436598 - RNA, 22 nt, Human
gugauuugauggaagacugcuu

SEQ ID NO: 436599 - RNA, 20 nt, Human
uaagaugaaagaagcauuaa

SEQ ID NO: 436600 - RNA, 18 nt, Human
uaauuuaacaauucugga

SEQ ID NO: 436601 - RNA, 21 nt, Human
uaggccuaaacaaagagccaa

SEQ ID NO: 436602 - RNA, 18 nt, Human
uauaugaugaugaaggag

SEQ ID NO: 436603 - RNA, 19 nt, Human
uaugaugaugaaggagaug

SEQ ID NO: 436604 - RNA, 24 nt, Human
ucuucuuucuauugccaaagccuu

SEQ ID NO: 436605 - RNA, 18 nt, Human
ucuugguucuuguccugg

SEQ ID NO: 436606 - RNA, 22 nt, Human
ucuuuaaaaaaaaagaaaaaag

SEQ ID NO: 436607 - RNA, 24 nt, Human
ugaaagaagcauuaaagcauagua

SEQ ID NO: 436608 - RNA, 25 nt, Human
ugacaagugaaagaccauuauggga

SEQ ID NO: 436609 - RNA, 24 nt, Human
uguagaaaaauacugcacuuucaa

SEQ ID NO: 436610 - RNA, 24 nt, Human
uguagacuucucaaaauaaacuuc

SEQ ID NO: 436611 - RNA, 20 nt, Human
uuguggucuccccagugucc

SEQ ID NO: 436612 - RNA, 20 nt, Human
uuugauggaagacugcuuuc

SEQ ID NO: 436613 - RNA, 18 nt, Human
accugggccucccucucu

SEQ ID NO: 436614 - RNA, 21 nt, Human
cacaugucucuccccagcccc

SEQ ID NO: 436615 - RNA, 21 nt, Human
cacccuucccucccaguuccc

SEQ ID NO: 436616 - RNA, 21 nt, Human
caccgggcuccuuuugggggc

SEQ ID NO: 436617 - RNA, 23 nt, Human
caccgggcuccuuuugggggcuu

SEQ ID NO: 436618 - RNA, 23 nt, Human
cagcccccacagugccgccuccc

SEQ ID NO: 436619 - RNA, 21 nt, Human
cagccuucgcagcaucaccgg

SEQ ID NO: 436620 - RNA, 18 nt, Human
cccagccccggcugccgg

SEQ ID NO: 436621 - RNA, 19 nt, Human
ccccacagugccgccuccc

SEQ ID NO: 436622 - RNA, 18 nt, Human
ccccggggcccccucugg

SEQ ID NO: 436623 - RNA, 22 nt, Human
ccccuguacggauccuucccuc

SEQ ID NO: 436624 - RNA, 23 nt, Human
ccgccagcuguggcuccgggugc

SEQ ID NO: 436625 - RNA, 22 nt, Human
ccgggcuccuuuugggggcuuc

SEQ ID NO: 436626 - RNA, 20 nt, Human
ccucccaguucccgcccccc

SEQ ID NO: 436627 - RNA, 18 nt, Human
ccugcgccgcgcccgggg

SEQ ID NO: 436628 - RNA, 19 nt, Human
cggggccuccgcgccgucg

SEQ ID NO: 436629 - RNA, 18 nt, Human
cgguugguggaguagugu

SEQ ID NO: 436630 - RNA, 21 nt, Human
cgguugguggaguaguguugg

SEQ ID NO: 436631 - RNA, 19 nt, Human
cucccugcaccugggccuc

SEQ ID NO: 436632 - RNA, 24 nt, Human
cuccuuuugggggcuucgguuggu

SEQ ID NO: 436633 - RNA, 22 nt, Human
cugggccuugguuucuucuucu

SEQ ID NO: 436634 - RNA, 19 nt, Human
cuuccggcuccgucucacc

SEQ ID NO: 436635 - RNA, 19 nt, Human
gagccugcgccgcgcccgg

SEQ ID NO: 436636 - RNA, 26 nt, Human
gccacguguccacaugucucucccca

SEQ ID NO: 436637 - RNA, 19 nt, Human
gccuccccuguucacagcc

SEQ ID NO: 436638 - RNA, 24 nt, Human
gcuccgucucacccuucccuccca

SEQ ID NO: 436639 - RNA, 18 nt, Human
gcugcagggcuggcggcg

SEQ ID NO: 436640 - RNA, 20 nt, Human
gggcccccucuggccggccc

SEQ ID NO: 436641 - RNA, 22 nt, Human
gguuucuucuucuuuggagccu

SEQ ID NO: 436642 - RNA, 20 nt, Human
guggaguaguguugggcccc

SEQ ID NO: 436643 - RNA, 24 nt, Human
uaacuuccggcuccgucucacccu

SEQ ID NO: 436644 - RNA, 21 nt, Human
ucacccuucccucccaguucc

SEQ ID NO: 436645 - RNA, 18 nt, Human
uccccagccccggcugcc

SEQ ID NO: 436646 - RNA, 23 nt, Human
uccccccagccagggcccugcag

SEQ ID NO: 436647 - RNA, 23 nt, Human
ucccugcaccugggccucccucu

SEQ ID NO: 436648 - RNA, 22 nt, Human
uguccacaugucucuccccagc

SEQ ID NO: 436649 - RNA, 18 nt, Human
uuggagccugcgccgcgc

SEQ ID NO: 436650 - RNA, 19 nt, Human
gugggauggcagggcacag

SEQ ID NO: 436651 - RNA, 18 nt, Human
ugggauggcagggcacag

SEQ ID NO: 436652 - RNA, 23 nt, Human
ucuuguggcagccgggugggggc

SEQ ID NO: 436653 - RNA, 23 nt, Human
ucuuguggcagccgggugggggc

SEQ ID NO: 436654 - RNA, 18 nt, Human
uggcagccgggugggggc

SEQ ID NO: 436655 - RNA, 18 nt, Human
uggcagccgggugggggc

SEQ ID NO: 436656 - RNA, 19 nt, Human
ugguaggcuugcggguggg

SEQ ID NO: 436657 - RNA, 21 nt, Human
ugguaggcuugcgggugggug

SEQ ID NO: 436658 - RNA, 19 nt, Human
uuguggcagccgggugggg

SEQ ID NO: 436659 - RNA, 24 nt, Human
uuuuuuuuuuuuuuuuuuuccaag

SEQ ID NO: 436660 - RNA, 23 nt, Human
uuuuuuuuuuuuuuuuuuuucca

SEQ ID NO: 436661 - RNA, 24 nt, Human
uuuuuuuuuuuuuuuuuuuuuccu

SEQ ID NO: 436662 - RNA, 19 nt, Human
cagacuacaggcgccugcc

SEQ ID NO: 436663 - RNA, 20 nt, Human
ccuugccuggcuaauuuuuu

SEQ ID NO: 436664 - RNA, 21 nt, Human
cgggcggcgcgcauucuuucc

SEQ ID NO: 436665 - RNA, 19 nt, Human
cggguggccagacgcggca

SEQ ID NO: 436666 - RNA, 23 nt, Human
gccuggcuaauuuuuuguauuuu

SEQ ID NO: 436667 - RNA, 23 nt, Human
ggcggagcgcacgggcggcgcgc

SEQ ID NO: 436668 - RNA, 24 nt, Human
uaauuuuuuguauuuuuaguagag

SEQ ID NO: 436669 - RNA, 25 nt, Human
ugccuggcuaauuuuuuguauuuuu

SEQ ID NO: 436670 - RNA, 18 nt, Human
uggccagacgcggcaggc

SEQ ID NO: 436671 - RNA, 22 nt, Human
uggccagacgcggcaggcggag

SEQ ID NO: 436672 - RNA, 18 nt, Human
uuaguagagacaggguuu

SEQ ID NO: 436673 - RNA, 22 nt, Human
uugccuggcuaauuuuuuguau

SEQ ID NO: 436674 - RNA, 24 nt, Human
uuuuguauuuuuaguagagacaac

SEQ ID NO: 436675 - RNA, 21 nt, Human
uuuuuguauuuuuaguagaga

SEQ ID NO: 436676 - RNA, 18 nt, Human
aaaaacaugcuagugugu

SEQ ID NO: 436677 - RNA, 20 nt, Human
auuuggucugaaaaacaugc

SEQ ID NO: 436678 - RNA, 23 nt, Human
caaaacaagcaccacauuggaug

SEQ ID NO: 436679 - RNA, 22 nt, Human
guaauugccaagagcugugauc

SEQ ID NO: 436680 - RNA, 22 nt, Human
guuuggcaggcaaaaaaauaaa

SEQ ID NO: 436681 - RNA, 22 nt, Human
uguguguguuuauaaauaaugu

SEQ ID NO: 436682 - RNA, 20 nt, Human
aaaaauaugggaaauacccc

SEQ ID NO: 436683 - RNA, 21 nt, Human
aaaacaguuucaaauauagaa

SEQ ID NO: 436684 - RNA, 23 nt, Human
aaacauaaagggcagacaccucg

SEQ ID NO: 436685 - RNA, 21 nt, Human
aacagauugaaugaccagaug

SEQ ID NO: 436686 - RNA, 20 nt, Human
aaccaguucacuuugcagau

SEQ ID NO: 436687 - RNA, 19 nt, Human
aagcugcuaagugcuccuc

SEQ ID NO: 436688 - RNA, 20 nt, Human
acaaagcauaauacauacaa

SEQ ID NO: 436689 - RNA, 23 nt, Human
acaaagcauaauacauacaaaau

SEQ ID NO: 436690 - RNA, 21 nt, Human
acaucauuuacuuuuggucau

SEQ ID NO: 436691 - RNA, 21 nt, Human
acuuaguuacuuugcuaauga

SEQ ID NO: 436692 - RNA, 23 nt, Human
agaaacuugaagaaagacacuuu

SEQ ID NO: 436693 - RNA, 20 nt, Human
agagccaaaaagcuuuggug

SEQ ID NO: 436694 - RNA, 18 nt, Human
agaguguggagcugcuca

SEQ ID NO: 436695 - RNA, 24 nt, Human
agguuuccuaacaucuauaaguuu

SEQ ID NO: 436696 - RNA, 19 nt, Human
aucaaagcagcuuuuacag

SEQ ID NO: 436697 - RNA, 23 nt, Human
augaccgcuacuuccaaaaauau

SEQ ID NO: 436698 - RNA, 21 nt, Human
caaagcauaauacauacaaaa

SEQ ID NO: 436699 - RNA, 18 nt, Human
cacagcagcaggaguagc

SEQ ID NO: 436700 - RNA, 25 nt, Human
cagaacccaugaaagcuacaaccag

SEQ ID NO: 436701 - RNA, 21 nt, Human
cagaucaucagguacaaccag

SEQ ID NO: 436702 - RNA, 21 nt, Human
cagcagcaggaguagcuguuu

SEQ ID NO: 436703 - RNA, 19 nt, Human
cagcagguuuccuaacauc

SEQ ID NO: 436704 - RNA, 25 nt, Human
caguugcuucccugugcuauuugag

SEQ ID NO: 436705 - RNA, 27 nt, Human
cauuccuacuccaggagcuaagcuggu

SEQ ID NO: 436706 - RNA, 24 nt, Human
ccaaaaauaugggaaauaccccua

SEQ ID NO: 436707 - RNA, 25 nt, Human
ccagaugcccaauguagauugcacc

SEQ ID NO: 436708 - RNA, 22 nt, Human
ccagugagacacugcuuucuuu

SEQ ID NO: 436709 - RNA, 19 nt, Human
cccaugaaagcuacaacca

SEQ ID NO: 436710 - RNA, 23 nt, Human
ccccaugucugguagcaugucua

SEQ ID NO: 436711 - RNA, 18 nt, Human
cccuugaaaggcaguugc

SEQ ID NO: 436712 - RNA, 22 nt, Human
cggaaucagaaucggacacuga

SEQ ID NO: 436713 - RNA, 20 nt, Human
cucagaucaucagguacaac

SEQ ID NO: 436714 - RNA, 22 nt, Human
cuccaaugauuaauauacauag

SEQ ID NO: 436715 - RNA, 25 nt, Human
cugccuacaaaauaaagaaucaugg

SEQ ID NO: 436716 - RNA, 21 nt, Human
cuucuagacaccucaagaaga

SEQ ID NO: 436717 - RNA, 25 nt, Human
gaacaauagaggcuucuugaagaaa

SEQ ID NO: 436718 - RNA, 20 nt, Human
gagcugcucaggguacccgg

SEQ ID NO: 436719 - RNA, 23 nt, Human
gcuaaugaccgcuacuuccaaaa

SEQ ID NO: 436720 - RNA, 20 nt, Human
gggcagacaccucgcccuag

SEQ ID NO: 436721 - RNA, 21 nt, Human
guucacuuugcagauguggaa

SEQ ID NO: 436722 - RNA, 22 nt, Human
uaaacaaaacaguuucaaauau

SEQ ID NO: 436723 - RNA, 23 nt, Human
uaaacaaaacaguuucaaauaua

SEQ ID NO: 436724 - RNA, 21 nt, Human
uaguuggugacagcaggauga

SEQ ID NO: 436725 - RNA, 21 nt, Human
uaugggaaauaccccuacaug

SEQ ID NO: 436726 - RNA, 23 nt, Human
ucaaauauagaacagucugugcu

SEQ ID NO: 436727 - RNA, 22 nt, Human
ucagugaagagucuuuugucau

SEQ ID NO: 436728 - RNA, 21 nt, Human
ucaucuuucuguuuccuuuac

SEQ ID NO: 436729 - RNA, 21 nt, Human
ucaugcuggauuuggggcauu

SEQ ID NO: 436730 - RNA, 20 nt, Human
uccucuucccccuucuccaa

SEQ ID NO: 436731 - RNA, 21 nt, Human
ucugcugccaugaagccacag

SEQ ID NO: 436732 - RNA, 20 nt, Human
ugaaacuaaucaaucuuuaa

SEQ ID NO: 436733 - RNA, 19 nt, Human
ugaaugacauuuuauguuu

SEQ ID NO: 436734 - RNA, 20 nt, Human
ugaccgcuacuuccaaaaau

SEQ ID NO: 436735 - RNA, 21 nt, Human
ugccggaaucagaaucggaca

SEQ ID NO: 436736 - RNA, 22 nt, Human
ugucacagcucugaucugcugc

SEQ ID NO: 436737 - RNA, 21 nt, Human
uugauuacauugaaaggcaaa

SEQ ID NO: 436738 - RNA, 20 nt, Human
uuuaaacaaaacaguuucaa

SEQ ID NO: 436739 - RNA, 19 nt, Human
uuuaaacuacgauuauagc

SEQ ID NO: 436740 - RNA, 24 nt, Human
uuuuacagauucgggaucauucau

SEQ ID NO: 436741 - RNA, 24 nt, Human
uuuuuaauuuugacuaccagcacu

SEQ ID NO: 436742 - RNA, 24 nt, Human
uuuuuuuuuuuuuuuuuuaauuuu

SEQ ID NO: 436743 - RNA, 23 nt, Human
uuuuuuuuuuuuuuuuuuuuggg

SEQ ID NO: 436744 - RNA, 24 nt, Human
accccuuugccugaauggagcccc

SEQ ID NO: 436745 - RNA, 24 nt, Human
acccucacacaacccagaccucag

SEQ ID NO: 436746 - RNA, 24 nt, Human
acgcagggguggggugcagggacg

SEQ ID NO: 436747 - RNA, 20 nt, Human
acuugcucccacugggcugg

SEQ ID NO: 436748 - RNA, 21 nt, Human
agcgagcugcucccuggucag

SEQ ID NO: 436749 - RNA, 20 nt, Human
agcuucccgcgggcucugcc

SEQ ID NO: 436750 - RNA, 19 nt, Human
aggcgcggagcccagagcc

SEQ ID NO: 436751 - RNA, 20 nt, Human
aggcugcagcuaaaaccccu

SEQ ID NO: 436752 - RNA, 23 nt, Human
agguggaguauaaaaaccuaaac

SEQ ID NO: 436753 - RNA, 21 nt, Human
caagcuagugagaccccagca

SEQ ID NO: 436754 - RNA, 24 nt, Human
cacaacccagaccucaguggcucu

SEQ ID NO: 436755 - RNA, 18 nt, Human
caccauaaaccaaacgcc

SEQ ID NO: 436756 - RNA, 21 nt, Human
caccugcaccugccuccuucc

SEQ ID NO: 436757 - RNA, 19 nt, Human
cacuccugccuggugucgu

SEQ ID NO: 436758 - RNA, 20 nt, Human
cacugggcugggggccucgg

SEQ ID NO: 436759 - RNA, 23 nt, Human
caggcgcggagcccagagccgcc

SEQ ID NO: 436760 - RNA, 19 nt, Human
ccaaaguaaaacgaaugca

SEQ ID NO: 436761 - RNA, 18 nt, Human
ccaucccuccagcguccc

SEQ ID NO: 436762 - RNA, 22 nt, Human
cccacugggcugggggccucgg

SEQ ID NO: 436763 - RNA, 26 nt, Human
cccaggcgcggagcccagagccgccu

SEQ ID NO: 436764 - RNA, 23 nt, Human
cccccucaagcuagugagacccc

SEQ ID NO: 436765 - RNA, 21 nt, Human
ccccucccucagacuccacag

SEQ ID NO: 436766 - RNA, 21 nt, Human
ccccugggugugggggacagg

SEQ ID NO: 436767 - RNA, 22 nt, Human
ccccugggugugggggacaggg

SEQ ID NO: 436768 - RNA, 19 nt, Human
cccgccacgucgcccccca

SEQ ID NO: 436769 - RNA, 22 nt, Human
cccgccacgucgccccccagac

SEQ ID NO: 436770 - RNA, 23 nt, Human
cccgccacgucgccccccagaca

SEQ ID NO: 436771 - RNA, 21 nt, Human
ccgacccgccacgucgccccc

SEQ ID NO: 436772 - RNA, 19 nt, Human
ccgccacgucgccccccag

SEQ ID NO: 436773 - RNA, 18 nt, Human
ccgccgccgcugcugcga

SEQ ID NO: 436774 - RNA, 18 nt, Human
ccgcgggcucugccuccu

SEQ ID NO: 436775 - RNA, 19 nt, Human
ccucaagcuagugagaccc

SEQ ID NO: 436776 - RNA, 19 nt, Human
ccucagacuccacaggaag

SEQ ID NO: 436777 - RNA, 22 nt, Human
ccuccagcgucccgcucagcuc

SEQ ID NO: 436778 - RNA, 21 nt, Human
ccugaauggagccccucccuc

SEQ ID NO: 436779 - RNA, 20 nt, Human
cgccccccagacacgguccc

SEQ ID NO: 436780 - RNA, 18 nt, Human
cgccuggagcgagcugcu

SEQ ID NO: 436781 - RNA, 23 nt, Human
cgcggagcccagagccgccuccc

SEQ ID NO: 436782 - RNA, 22 nt, Human
cggacugaacaggcaugggcca

SEQ ID NO: 436783 - RNA, 21 nt, Human
cggcguccugagugcuccgag

SEQ ID NO: 436784 - RNA, 21 nt, Human
cuaaacgaauagugaaaauaa

SEQ ID NO: 436785 - RNA, 20 nt, Human
cuccagcgucccgcucagcu

SEQ ID NO: 436786 - RNA, 29 nt, Human
cugaggcucacuccugccuggugucgugu

SEQ ID NO: 436787 - RNA, 19 nt, Human
cugcugcgaagcuugaggu

SEQ ID NO: 436788 - RNA, 21 nt, Human
cugggcugggggccucggcug

SEQ ID NO: 436789 - RNA, 23 nt, Human
cuggggcuggggugggcauggcu

SEQ ID NO: 436790 - RNA, 24 nt, Human
cuuccaaggcugcagcuaaaaccc

SEQ ID NO: 436791 - RNA, 19 nt, Human
cuugcucccacugggcugg

SEQ ID NO: 436792 - RNA, 21 nt, Human
gaaugcagggaaccggccgac

SEQ ID NO: 436793 - RNA, 19 nt, Human
gacccgccacgucgccccc

SEQ ID NO: 436794 - RNA, 21 nt, Human
gaccucaguggcucuuaguau

SEQ ID NO: 436795 - RNA, 19 nt, Human
gagcccagagccgccuccc

SEQ ID NO: 436796 - RNA, 18 nt, Human
gcaccugcaccugccucc

SEQ ID NO: 436797 - RNA, 23 nt, Human
gcagccgccgccgccgcugcugc

SEQ ID NO: 436798 - RNA, 18 nt, Human
gccaugacggacugaaca

SEQ ID NO: 436799 - RNA, 22 nt, Human
gccuccuucccggcagccgccg

SEQ ID NO: 436800 - RNA, 20 nt, Human
gcuugcuuucuaaugaaaau

SEQ ID NO: 436801 - RNA, 18 nt, Human
ggagggcggggaagggcg

SEQ ID NO: 436802 - RNA, 19 nt, Human
ggccgacccgccacgucgc

SEQ ID NO: 436803 - RNA, 22 nt, Human
ggcuggggugggcauggcuuuu

SEQ ID NO: 436804 - RNA, 19 nt, Human
gggaauggcuuucguuucu

SEQ ID NO: 436805 - RNA, 23 nt, Human
gggccucggcugggcgccuggag

SEQ ID NO: 436806 - RNA, 22 nt, Human
gggcuggggugggcauggcuuu

SEQ ID NO: 436807 - RNA, 18 nt, Human
ggggaagggcgcgcggcg

SEQ ID NO: 436808 - RNA, 25 nt, Human
ggucccaucccuccagcgucccgcu

SEQ ID NO: 436809 - RNA, 21 nt, Human
uaaaacgaaugcagggaaccg

SEQ ID NO: 436810 - RNA, 19 nt, Human
uaccugguagggagguuau

SEQ ID NO: 436811 - RNA, 24 nt, Human
uauuuugugcuugcuuucuaauga

SEQ ID NO: 436812 - RNA, 19 nt, Human
ucaggacugagcaggaaag

SEQ ID NO: 436813 - RNA, 20 nt, Human
ucaggacugagcaggaaagg

SEQ ID NO: 436814 - RNA, 22 nt, Human
ucccggcagccgccgccgccgc

SEQ ID NO: 436815 - RNA, 27 nt, Human
ucccuccagcgucccgcucagcuccag

SEQ ID NO: 436816 - RNA, 24 nt, Human
uccuucacuuugugggaauggcuu

SEQ ID NO: 436817 - RNA, 19 nt, Human
ucgguaaugucguacaucu

SEQ ID NO: 436818 - RNA, 21 nt, Human
ucggugccuccuuccaaggcu

SEQ ID NO: 436819 - RNA, 23 nt, Human
ucugccuccugcucugggcuccc

SEQ ID NO: 436820 - RNA, 20 nt, Human
ugagaccccagcaucaccaa

SEQ ID NO: 436821 - RNA, 23 nt, Human
ugcagggacggggccugaggcuc

SEQ ID NO: 436822 - RNA, 24 nt, Human
ugggcauggcuuuucucuucauuu

SEQ ID NO: 436823 - RNA, 19 nt, Human
ugggcugggggccucggcu

SEQ ID NO: 436824 - RNA, 18 nt, Human
ugggggacaggguucugg

SEQ ID NO: 436825 - RNA, 21 nt, Human
ugggugugggggacaggguuc

SEQ ID NO: 436826 - RNA, 21 nt, Human
ugugggggacaggguucuggg

SEQ ID NO: 436827 - RNA, 25 nt, Human
uguguuguugcucguccaaacauug

SEQ ID NO: 436828 - RNA, 26 nt, Human
aaaugucccaugugggggugcuggag

SEQ ID NO: 436829 - RNA, 22 nt, Human
aacucacagcagaaagaaacaa

SEQ ID NO: 436830 - RNA, 18 nt, Human
aagaaaacccgacacacg

SEQ ID NO: 436831 - RNA, 22 nt, Human
aagacacuacugcaaagaccua

SEQ ID NO: 436832 - RNA, 23 nt, Human
accauugauacugcagcacauua

SEQ ID NO: 436833 - RNA, 23 nt, Human
acguggcauuuuuuuuuccccag

SEQ ID NO: 436834 - RNA, 25 nt, Human
agacaaaugcagcauuguggucccc

SEQ ID NO: 436835 - RNA, 20 nt, Human
aggcuguggcuggaggcccg

SEQ ID NO: 436836 - RNA, 20 nt, Human
agggcgccaccgcugcugaa

SEQ ID NO: 436837 - RNA, 22 nt, Human
auggagaugcuaaauguccaca

SEQ ID NO: 436838 - RNA, 21 nt, Human
caaaugucccaugugggggug

SEQ ID NO: 436839 - RNA, 19 nt, Human
caagcaaacuuaaguugaa

SEQ ID NO: 436840 - RNA, 22 nt, Human
cagaaagaaacaaacgacccua

SEQ ID NO: 436841 - RNA, 18 nt, Human
cagcagaaagaaacaaac

SEQ ID NO: 436842 - RNA, 22 nt, Human
cagcagaaagaaacaaacgacc

SEQ ID NO: 436843 - RNA, 22 nt, Human
cagccgaugguaacaucugcaa

SEQ ID NO: 436844 - RNA, 21 nt, Human
cagcuaaaucucaguuccaca

SEQ ID NO: 436845 - RNA, 25 nt, Human
caugcaguccccaggcuauugucuc

SEQ ID NO: 436846 - RNA, 19 nt, Human
cauuauacuggaaaacaca

SEQ ID NO: 436847 - RNA, 18 nt, Human
ccccugggacucuccaag

SEQ ID NO: 436848 - RNA, 22 nt, Human
cccgcugcauucaggcaagaau

SEQ ID NO: 436849 - RNA, 24 nt, Human
ccuguccccugggacucuccaaga

SEQ ID NO: 436850 - RNA, 22 nt, Human
cuaagacacuacugcaaagacc

SEQ ID NO: 436851 - RNA, 24 nt, Human
cuacaguuaucuuacuaccaagaa

SEQ ID NO: 436852 - RNA, 20 nt, Human
cucacagcagaaagaaacaa

SEQ ID NO: 436853 - RNA, 24 nt, Human
cugauuccacuuguucuuagccau

SEQ ID NO: 436854 - RNA, 18 nt, Human
cugcugauuuucuuccuc

SEQ ID NO: 436855 - RNA, 20 nt, Human
cuggaggcccgcugcauuca

SEQ ID NO: 436856 - RNA, 24 nt, Human
cugucugcugauuuucuuccucug

SEQ ID NO: 436857 - RNA, 19 nt, Human
gagcagcaucguggggggu

SEQ ID NO: 436858 - RNA, 21 nt, Human
gaugguaacaucugcaaucuc

SEQ ID NO: 436859 - RNA, 24 nt, Human
gcaagaaugugcagcuaaaucuca

SEQ ID NO: 436860 - RNA, 18 nt, Human
gccagcaggcuguggcug

SEQ ID NO: 436861 - RNA, 18 nt, Human
uaacucacagcagaaaga

SEQ ID NO: 436862 - RNA, 23 nt, Human
uaagggcuugaaaccuguccccu

SEQ ID NO: 436863 - RNA, 19 nt, Human
uaccaagaaagaaaagccc

SEQ ID NO: 436864 - RNA, 23 nt, Human
uaccaagaaagaaaagcccuuuu

SEQ ID NO: 436865 - RNA, 26 nt, Human
uacugcaaagaccuacaguuaucuua

SEQ ID NO: 436866 - RNA, 27 nt, Human
uacugcagcacauuauacuggaaaaca

SEQ ID NO: 436867 - RNA, 23 nt, Human
uaucgcacccaagaaaacccgac

SEQ ID NO: 436868 - RNA, 25 nt, Human
ucaauaaaaaugauauggccuuugu

SEQ ID NO: 436869 - RNA, 19 nt, Human
ucaggcaagaaugugcagc

SEQ ID NO: 436870 - RNA, 21 nt, Human
ucagucaccauuuccccguuu

SEQ ID NO: 436871 - RNA, 25 nt, Human
uccccaggcuauugucuccucaguu

SEQ ID NO: 436872 - RNA, 22 nt, Human
uccccaguauuuuucugucugc

SEQ ID NO: 436873 - RNA, 19 nt, Human
ucugcugauuuucuuccuc

SEQ ID NO: 436874 - RNA, 19 nt, Human
ucuuccucugauguccugg

SEQ ID NO: 436875 - RNA, 28 nt, Human
ugaaaccuguccccugggacucuccaag

SEQ ID NO: 436876 - RNA, 19 nt, Human
ugaacagaaccacguggca

SEQ ID NO: 436877 - RNA, 19 nt, Human
ugaugcaaguuccaguuca

SEQ ID NO: 436878 - RNA, 19 nt, Human
ugcagcuaaaucucaguuc

SEQ ID NO: 436879 - RNA, 21 nt, Human
ugcuaaauguccacauuggag

SEQ ID NO: 436880 - RNA, 21 nt, Human
uggagggagcagaagcucagc

SEQ ID NO: 436881 - RNA, 18 nt, Human
uggaugugaacggcugug

SEQ ID NO: 436882 - RNA, 20 nt, Human
ugucacagaaucaaugacac

SEQ ID NO: 436883 - RNA, 20 nt, Human
uuucucacuuguaagaugga

SEQ ID NO: 436884 - RNA, 20 nt, Human
aagcagcuuggcuuuccucu

SEQ ID NO: 436885 - RNA, 21 nt, Human
accuggcccacuuucuucaac

SEQ ID NO: 436886 - RNA, 21 nt, Human
acuucguucuccccggcucug

SEQ ID NO: 436887 - RNA, 22 nt, Human
agaugcuaaggagaccaucugg

SEQ ID NO: 436888 - RNA, 21 nt, Human
agccucugaggccuaacaccc

SEQ ID NO: 436889 - RNA, 21 nt, Human
aggcaguuccaggaagucuuc

SEQ ID NO: 436890 - RNA, 19 nt, Human
agguccccccucccccgcc

SEQ ID NO: 436891 - RNA, 25 nt, Human
caacagaagcagcuuggcuuuccuc

SEQ ID NO: 436892 - RNA, 25 nt, Human
caaccaccuggcccacuuucuucaa

SEQ ID NO: 436893 - RNA, 22 nt, Human
cacauggcuuucuucaaccacc

SEQ ID NO: 436894 - RNA, 26 nt, Human
cacccucaaacaccucacagucccaa

SEQ ID NO: 436895 - RNA, 21 nt, Human
cagcaauccaaguuccuaucu

SEQ ID NO: 436896 - RNA, 18 nt, Human
cagcccgcaaaccuagag

SEQ ID NO: 436897 - RNA, 22 nt, Human
cagcuuggcuuuccucuggaag

SEQ ID NO: 436898 - RNA, 25 nt, Human
caggcucuuggcugauucgcucaca

SEQ ID NO: 436899 - RNA, 19 nt, Human
cccaccagcccgcaaaccu

SEQ ID NO: 436900 - RNA, 18 nt, Human
ccccccucccccgccaaa

SEQ ID NO: 436901 - RNA, 21 nt, Human
cccucaaacaccucacagucc

SEQ ID NO: 436902 - RNA, 21 nt, Human
ccuacagccucugaggccuaa

SEQ ID NO: 436903 - RNA, 24 nt, Human
ccucaaacaccucacagucccaaa

SEQ ID NO: 436904 - RNA, 20 nt, Human
cucacagucccaaacggggu

SEQ ID NO: 436905 - RNA, 20 nt, Human
cuccaaaaaaaagaaaaagg

SEQ ID NO: 436906 - RNA, 22 nt, Human
cucuguaacccaaggacccuac

SEQ ID NO: 436907 - RNA, 21 nt, Human
cucuuggcugauucgcucaca

SEQ ID NO: 436908 - RNA, 26 nt, Human
cuuuacauacaacaaacaugucaaga

SEQ ID NO: 436909 - RNA, 23 nt, Human
gaaguaccaauuugaaagcccac

SEQ ID NO: 436910 - RNA, 22 nt, Human
gagaugcuaaggagaccaucug

SEQ ID NO: 436911 - RNA, 24 nt, Human
gagcugagaugcuaaggagaccau

SEQ ID NO: 436912 - RNA, 20 nt, Human
ggaaguaccaauuugaaagc

SEQ ID NO: 436913 - RNA, 19 nt, Human
guccacacccucaaacacc

SEQ ID NO: 436914 - RNA, 19 nt, Human
uaacacccaagcucuuccu

SEQ ID NO: 436915 - RNA, 25 nt, Human
uaagcccuugggauuugcugagcuc

SEQ ID NO: 436916 - RNA, 21 nt, Human
uacaacaaacaugucaagacc

SEQ ID NO: 436917 - RNA, 20 nt, Human
uagaguguauucuccacccc

SEQ ID NO: 436918 - RNA, 24 nt, Human
uccaaguuccuaucuaucucggug

SEQ ID NO: 436919 - RNA, 23 nt, Human
uccacacccucaaacaccucaca

SEQ ID NO: 436920 - RNA, 20 nt, Human
ucccaaacggggugcuccua

SEQ ID NO: 436921 - RNA, 21 nt, Human
uccccccucccccgccaaaau

SEQ ID NO: 436922 - RNA, 23 nt, Human
ucuguaacccaaggacccuacag

SEQ ID NO: 436923 - RNA, 22 nt, Human
ucuuaagaaugggcucuguuuu

SEQ ID NO: 436924 - RNA, 23 nt, Human
ugccaguccacacccucaaacac

SEQ ID NO: 436925 - RNA, 22 nt, Human
uggaagaaaggcaguuccagga

SEQ ID NO: 436926 - RNA, 20 nt, Human
uggcuucuaauguaaggccu

SEQ ID NO: 436927 - RNA, 22 nt, Human
ugggaccuccaaaaaaaagaaa

SEQ ID NO: 436928 - RNA, 23 nt, Human
ugggaccuccaaaaaaaagaaaa

SEQ ID NO: 436929 - RNA, 21 nt, Human
ugggauuugcugagcucccac

SEQ ID NO: 436930 - RNA, 22 nt, Human
ugguuuguaaaauaucuuccuc

SEQ ID NO: 436931 - RNA, 25 nt, Human
uguaacccaaggacccuacagccuc

SEQ ID NO: 436932 - RNA, 22 nt, Human
uuagaaaaaucaaaaauuuuaa

SEQ ID NO: 436933 - RNA, 22 nt, Human
uugaaaagguccccccuccccc

SEQ ID NO: 436934 - RNA, 21 nt, Human
uugcugagcucccacauggcu

SEQ ID NO: 436935 - RNA, 22 nt, Human
uuugaaagcccaccagcccgca

SEQ ID NO: 436936 - RNA, 19 nt, Human
aaacaauucaugaacucug

SEQ ID NO: 436937 - RNA, 22 nt, Human
aacauauaaauaugcaaugcca

SEQ ID NO: 436938 - RNA, 23 nt, Human
aagcaaaacugcaaaacguaguc

SEQ ID NO: 436939 - RNA, 26 nt, Human
aagcauuuaaaacaauucaugaacuc

SEQ ID NO: 436940 - RNA, 24 nt, Human
aaguccaggucugguucuucagcc

SEQ ID NO: 436941 - RNA, 19 nt, Human
accacaaauacaauaacug

SEQ ID NO: 436942 - RNA, 22 nt, Human
agagacauguauuucaaacucc

SEQ ID NO: 436943 - RNA, 18 nt, Human
agcacuuuaagcaugauu

SEQ ID NO: 436944 - RNA, 20 nt, Human
aguuggguguaucucccugc

SEQ ID NO: 436945 - RNA, 23 nt, Human
aguuggguguaucucccugcggc

SEQ ID NO: 436946 - RNA, 23 nt, Human
auaauacuuacuugguuaucuaa

SEQ ID NO: 436947 - RNA, 21 nt, Human
auacuuacuugguuaucuaaa

SEQ ID NO: 436948 - RNA, 21 nt, Human
augcagcccaacgacuucuac

SEQ ID NO: 436949 - RNA, 18 nt, Human
augccaaacaucuuucuc

SEQ ID NO: 436950 - RNA, 25 nt, Human
caaacaucuuucucucuagcucgcc

SEQ ID NO: 436951 - RNA, 19 nt, Human
caacaaauacauguucaga

SEQ ID NO: 436952 - RNA, 25 nt, Human
caacaccacaaauacaauaacugaa

SEQ ID NO: 436953 - RNA, 24 nt, Human
caagcugcaguaaguuuguccuaa

SEQ ID NO: 436954 - RNA, 18 nt, Human
caaggcaaggcaacacca

SEQ ID NO: 436955 - RNA, 18 nt, Human
cacaaacaagggugcaaa

SEQ ID NO: 436956 - RNA, 21 nt, Human
caccuccggcugcugcagucc

SEQ ID NO: 436957 - RNA, 19 nt, Human
cagaagagaaugccugcug

SEQ ID NO: 436958 - RNA, 23 nt, Human
caguaaguuuguccuaagaaagu

SEQ ID NO: 436959 - RNA, 21 nt, Human
caguucuccagggaccagccu

SEQ ID NO: 436960 - RNA, 21 nt, Human
cccagcaucaugcaaggcaag

SEQ ID NO: 436961 - RNA, 20 nt, Human
ccccagcaucaugcaaggca

SEQ ID NO: 436962 - RNA, 26 nt, Human
cccccccuugcugcuauggucccaac

SEQ ID NO: 436963 - RNA, 27 nt, Human
ccuccagcuuauucuuuuggggccgcc

SEQ ID NO: 436964 - RNA, 26 nt, Human
ccugcggcuugggugagcgccgaggc

SEQ ID NO: 436965 - RNA, 22 nt, Human
ccugcugguagaauauuacuuc

SEQ ID NO: 436966 - RNA, 21 nt, Human
cgcaaacuuguguccaaccgc

SEQ ID NO: 436967 - RNA, 23 nt, Human
cgcaaacuuguguccaaccgcac

SEQ ID NO: 436968 - RNA, 18 nt, Human
cggccccgcccucaggac

SEQ ID NO: 436969 - RNA, 18 nt, Human
cgguggcccaauacaugc

SEQ ID NO: 436970 - RNA, 26 nt, Human
cguaaacaaggauaggauacuucuga

SEQ ID NO: 436971 - RNA, 19 nt, Human
cuaccuggcuaauuccggu

SEQ ID NO: 436972 - RNA, 19 nt, Human
cucaaauucuaccuggcua

SEQ ID NO: 436973 - RNA, 18 nt, Human
cuccaggcagaaaggcag

SEQ ID NO: 436974 - RNA, 18 nt, Human
cucccagcgacuccuucc

SEQ ID NO: 436975 - RNA, 21 nt, Human
cucgagagggggcgcuuuccc

SEQ ID NO: 436976 - RNA, 24 nt, Human
cucguucgcaguucuccagggacc

SEQ ID NO: 436977 - RNA, 20 nt, Human
cucugcaaaggagccacuau

SEQ ID NO: 436978 - RNA, 19 nt, Human
cugcagcucguucgcaguu

SEQ ID NO: 436979 - RNA, 25 nt, Human
cuucucauacgcugccacucuuagu

SEQ ID NO: 436980 - RNA, 23 nt, Human
cuugcuaaaacucaaauucuacc

SEQ ID NO: 436981 - RNA, 21 nt, Human
gaaaacacuccuacgcaaacu

SEQ ID NO: 436982 - RNA, 23 nt, Human
gcgucgcugucaccuccggcugc

SEQ ID NO: 436983 - RNA, 19 nt, Human
gcuuuggcuccuccccagc

SEQ ID NO: 436984 - RNA, 21 nt, Human
ggagcuguugaguuccugcug

SEQ ID NO: 436985 - RNA, 20 nt, Human
ggcgucgcugucaccuccgg

SEQ ID NO: 436986 - RNA, 18 nt, Human
gggcuccgagagcaacag

SEQ ID NO: 436987 - RNA, 19 nt, Human
guauuauaauacuuacuug

SEQ ID NO: 436988 - RNA, 25 nt, Human
uaaaacaauucaugaacucuguaug

SEQ ID NO: 436989 - RNA, 28 nt, Human
uaaagcacaauguagcaugugcaaagaa

SEQ ID NO: 436990 - RNA, 18 nt, Human
uaacacaaacaagggugc

SEQ ID NO: 436991 - RNA, 18 nt, Human
uaagacuuagggggucca

SEQ ID NO: 436992 - RNA, 22 nt, Human
uaaguuuguccuaagaaagucc

SEQ ID NO: 436993 - RNA, 22 nt, Human
uagaaaauaagacuuagggggu

SEQ ID NO: 436994 - RNA, 20 nt, Human
uagagaagagagugcuuuuc

SEQ ID NO: 436995 - RNA, 18 nt, Human
uaggucuguuaggagucu

SEQ ID NO: 436996 - RNA, 23 nt, Human
uauaaagccagacuuuaagaagc

SEQ ID NO: 436997 - RNA, 23 nt, Human
ucauaacacaaacaagggugcaa

SEQ ID NO: 436998 - RNA, 21 nt, Human
uccccagcugcugcgagcuuc

SEQ ID NO: 436999 - RNA, 22 nt, Human
ucccucuacacugaaugaaagu

SEQ ID NO: 437000 - RNA, 24 nt, Human
ugaaaguacaaaaagaaaccaguc

SEQ ID NO: 437001 - RNA, 25 nt, Human
ugaacucuguaugaaaggaaauaau

SEQ ID NO: 437002 - RNA, 20 nt, Human
ugacaguagccuauaaagau

SEQ ID NO: 437003 - RNA, 21 nt, Human
ugauuugugagguaaagucac

SEQ ID NO: 437004 - RNA, 24 nt, Human
ugcaaggcaaggcaacaccacaaa

SEQ ID NO: 437005 - RNA, 21 nt, Human
ugcgccgggcgccugggagcc

SEQ ID NO: 437006 - RNA, 20 nt, Human
ugcuccuucgcgaaaugauc

SEQ ID NO: 437007 - RNA, 22 nt, Human
ugcuguuuccucaucucccagu

SEQ ID NO: 437008 - RNA, 18 nt, Human
uggguguaucucccugcg

SEQ ID NO: 437009 - RNA, 22 nt, Human
ugguucuucagccuugcuccuu

SEQ ID NO: 437010 - RNA, 23 nt, Human
uguggguuaguucuccucucugg

SEQ ID NO: 437011 - RNA, 26 nt, Human
uguguugacagaauaugauuugugag

SEQ ID NO: 437012 - RNA, 22 nt, Human
uucaaacuccaggcagaaaggc

SEQ ID NO: 437013 - RNA, 19 nt, Human
uuccaguaucaucaguuua

SEQ ID NO: 437014 - RNA, 24 nt, Human
uuccgguggcccaauacaugcuuu

SEQ ID NO: 437015 - RNA, 19 nt, Human
uuccucaucucccaguugg

SEQ ID NO: 437016 - RNA, 21 nt, Human
uucuuuucucuuuuuccccca

SEQ ID NO: 437017 - RNA, 24 nt, Human
uuuacuagaaaauaagacuuaggg

SEQ ID NO: 437018 - RNA, 24 nt, Human
uuuccagaaaaauuuuguaggaaa

SEQ ID NO: 437019 - RNA, 26 nt, Human
uuuguccuaagaaaguccaggucugg

SEQ ID NO: 437020 - RNA, 23 nt, Human
uuuucauaacacaaacaagggug

SEQ ID NO: 437021 - RNA, 19 nt, Human
uuuucccucuacacugaau

SEQ ID NO: 437022 - RNA, 23 nt, Human
acgccugaguuucccuugggagc

SEQ ID NO: 437023 - RNA, 22 nt, Human
auggggagcugugaggaggcug

SEQ ID NO: 437024 - RNA, 21 nt, Human
ggagccccucgguccuggagg

SEQ ID NO: 437025 - RNA, 23 nt, Human
aaaaagaaaucuaugaugggcac

SEQ ID NO: 437026 - RNA, 22 nt, Human
aaacuaaauauccaaaaugcag

SEQ ID NO: 437027 - RNA, 19 nt, Human
aaccaguacucacaaggca

SEQ ID NO: 437028 - RNA, 19 nt, Human
aagaaauguugaaaaggca

SEQ ID NO: 437029 - RNA, 21 nt, Human
acagcggcggcggcggcgggc

SEQ ID NO: 437030 - RNA, 23 nt, Human
acaguaacaggaucaugagcauc

SEQ ID NO: 437031 - RNA, 18 nt, Human
accagugagaagacagcu

SEQ ID NO: 437032 - RNA, 22 nt, Human
agaagacagcuuugcagucaca

SEQ ID NO: 437033 - RNA, 20 nt, Human
agcggcggcggcggcgggcg

SEQ ID NO: 437034 - RNA, 18 nt, Human
aggcaggaaacggagucc

SEQ ID NO: 437035 - RNA, 22 nt, Human
aggcaguaccagugagaagaca

SEQ ID NO: 437036 - RNA, 24 nt, Human
aguaccagugagaagacagcuuug

SEQ ID NO: 437037 - RNA, 19 nt, Human
auaaaugaauccaccauga

SEQ ID NO: 437038 - RNA, 18 nt, Human
auucagaacaagaaaaau

SEQ ID NO: 437039 - RNA, 23 nt, Human
caaaauuaguagcugcaaaguca

SEQ ID NO: 437040 - RNA, 26 nt, Human
caaggcaggaaacggaguccagaucc

SEQ ID NO: 437041 - RNA, 25 nt, Human
cacagcaagggcaacacuaaaaaaa

SEQ ID NO: 437042 - RNA, 21 nt, Human
cacaugccccacaguccaacc

SEQ ID NO: 437043 - RNA, 24 nt, Human
cagaacaagaaaaauccuauaaua

SEQ ID NO: 437044 - RNA, 27 nt, Human
cagcaagggcaacacuaaaaaaagaaa

SEQ ID NO: 437045 - RNA, 20 nt, Human
cagcggcggcggcggcgggc

SEQ ID NO: 437046 - RNA, 19 nt, Human
caugccccacaguccaacc

SEQ ID NO: 437047 - RNA, 27 nt, Human
ccaaccaguacucacaaggcaguacca

SEQ ID NO: 437048 - RNA, 24 nt, Human
ccggacagcggcggcggcggcuuu

SEQ ID NO: 437049 - RNA, 24 nt, Human
ccuguccugucauagacuuagaaa

SEQ ID NO: 437050 - RNA, 22 nt, Human
cgcccggggccucgucgcgcuc

SEQ ID NO: 437051 - RNA, 20 nt, Human
cggccucgaggcgcgcgcgg

SEQ ID NO: 437052 - RNA, 21 nt, Human
cggcggacuccggcucgcgcc

SEQ ID NO: 437053 - RNA, 18 nt, Human
cucgucgcgcuccggcuc

SEQ ID NO: 437054 - RNA, 21 nt, Human
cugaaauaccaguuuuuguuu

SEQ ID NO: 437055 - RNA, 19 nt, Human
cugcagcggccacaugccc

SEQ ID NO: 437056 - RNA, 18 nt, Human
gacagcggcggcggcggc

SEQ ID NO: 437057 - RNA, 18 nt, Human
gaucaugagcaucacuug

SEQ ID NO: 437058 - RNA, 27 nt, Human
gauggcggcggcacggcgguggcggca

SEQ ID NO: 437059 - RNA, 22 nt, Human
gcaaaaacuaagucuguccaaa

SEQ ID NO: 437060 - RNA, 18 nt, Human
gcggcagcggggagggcg

SEQ ID NO: 437061 - RNA, 26 nt, Human
gcggcggcacggcgguggcggcagcg

SEQ ID NO: 437062 - RNA, 30 nt, Human
gcggcggcggcgggcggauggcggcggcaa

SEQ ID NO: 437063 - RNA, 23 nt, Human
gcggggccggcgugcucgggggc

SEQ ID NO: 437064 - RNA, 23 nt, Human
gcugcagcaugucaccaaugcca

SEQ ID NO: 437065 - RNA, 21 nt, Human
ggauggcggcggcacggcggu

SEQ ID NO: 437066 - RNA, 19 nt, Human
ggcgggcggauggcggcgg

SEQ ID NO: 437067 - RNA, 25 nt, Human
ggggagggcgcgcccggggccucgu

SEQ ID NO: 437068 - RNA, 29 nt, Human
gggggccggacagcggcggcggcggcggg

SEQ ID NO: 437069 - RNA, 21 nt, Human
gucaauucuugcaugugauuu

SEQ ID NO: 437070 - RNA, 22 nt, Human
uaaaaugaauacaaagggaaaa

SEQ ID NO: 437071 - RNA, 18 nt, Human
uaacacuucucaaagaca

SEQ ID NO: 437072 - RNA, 21 nt, Human
uaagcacaauacagcaauuua

SEQ ID NO: 437073 - RNA, 22 nt, Human
uacauacuacaacaguguguca

SEQ ID NO: 437074 - RNA, 28 nt, Human
uauacacauuagacugguagcuuguaug

SEQ ID NO: 437075 - RNA, 21 nt, Human
uauuacacagcaagggcaaca

SEQ ID NO: 437076 - RNA, 23 nt, Human
ucaaaauuaguagcugcaaaguc

SEQ ID NO: 437077 - RNA, 25 nt, Human
ucacaaggcaguaccagugagaaga

SEQ ID NO: 437078 - RNA, 25 nt, Human
ucagaaaacagaucugaaauaccag

SEQ ID NO: 437079 - RNA, 21 nt, Human
uccaaagagcaaggcaggaaa

SEQ ID NO: 437080 - RNA, 22 nt, Human
uccaaccaguacucacaaggca

SEQ ID NO: 437081 - RNA, 23 nt, Human
uccaggcugcagcaugucaccaa

SEQ ID NO: 437082 - RNA, 20 nt, Human
uccggcucgcgccgcggccg

SEQ ID NO: 437083 - RNA, 23 nt, Human
ucucaaagacaucugaccaauca

SEQ ID NO: 437084 - RNA, 22 nt, Human
ugaaaaaaaaucgcuuuuccca

SEQ ID NO: 437085 - RNA, 18 nt, Human
ugaaaaggcagauaaaau

SEQ ID NO: 437086 - RNA, 19 nt, Human
ugaagcaagaacagccugu

SEQ ID NO: 437087 - RNA, 23 nt, Human
ugaagcaagaacagccugucccc

SEQ ID NO: 437088 - RNA, 21 nt, Human
ugaauacaaagggaaaauaaa

SEQ ID NO: 437089 - RNA, 23 nt, Human
ugaauacaaagggaaaauaaaga

SEQ ID NO: 437090 - RNA, 21 nt, Human
ugcucgggggccggacagcgg

SEQ ID NO: 437091 - RNA, 23 nt, Human
uggcggcagcggggagggcgcgc

SEQ ID NO: 437092 - RNA, 19 nt, Human
uggcggcggcacggcggug

SEQ ID NO: 437093 - RNA, 19 nt, Human
uggcggcggcacggcggug

SEQ ID NO: 437094 - RNA, 24 nt, Human
uggcggcggcacggcgguggcggc

SEQ ID NO: 437095 - RNA, 22 nt, Human
ugguagcuuguauguuggcccu

SEQ ID NO: 437096 - RNA, 22 nt, Human
ugucaaggauauucagaacaag

SEQ ID NO: 437097 - RNA, 22 nt, Human
ugucagagaagguucugaagca

SEQ ID NO: 437098 - RNA, 21 nt, Human
ugucauagacuuagaaauaac

SEQ ID NO: 437099 - RNA, 22 nt, Human
ugugcaucucacaccuugacuc

SEQ ID NO: 437100 - RNA, 19 nt, Human
uuaacacuucucaaagaca

SEQ ID NO: 437101 - RNA, 21 nt, Human
uuagaugcuuaaaaugaauac

SEQ ID NO: 437102 - RNA, 21 nt, Human
uucagaaugaauacaugaaaa

SEQ ID NO: 437103 - RNA, 28 nt, Human
uucagaaugaauacaugaaaaaaaaucc

SEQ ID NO: 437104 - RNA, 22 nt, Human
uuccaggcugcagcaugucacc

SEQ ID NO: 437105 - RNA, 23 nt, Human
uuucgcauugugcaucucacacc

SEQ ID NO: 437106 - RNA, 23 nt, Human
aaaaggaaauacacaaaagaaga

SEQ ID NO: 437107 - RNA, 25 nt, Human
aaaggaaauaggaugaggagcaaga

SEQ ID NO: 437108 - RNA, 28 nt, Human
aagaaauagcagaaaaggaaauacacaa

SEQ ID NO: 437109 - RNA, 24 nt, Human
aagacaaaggaaauaggaugagga

SEQ ID NO: 437110 - RNA, 22 nt, Human
acucuugacuuuggaaaaacug

SEQ ID NO: 437111 - RNA, 23 nt, Human
acuuuggaaaaacugaaaagaaa

SEQ ID NO: 437112 - RNA, 26 nt, Human
agaaaaggaaauacacaaaagaagaa

SEQ ID NO: 437113 - RNA, 22 nt, Human
agcagaaaaggaaauacacaaa

SEQ ID NO: 437114 - RNA, 20 nt, Human
agccugaaaaaacugagcuu

SEQ ID NO: 437115 - RNA, 22 nt, Human
agggugucuuuguggggaaauu

SEQ ID NO: 437116 - RNA, 18 nt, Human
auacacaaaagaagaauc

SEQ ID NO: 437117 - RNA, 18 nt, Human
augagccugaaaaaacug

SEQ ID NO: 437118 - RNA, 23 nt, Human
augaggagcaagaagaaucagaa

SEQ ID NO: 437119 - RNA, 22 nt, Human
caaaauucccugaguacaaggu

SEQ ID NO: 437120 - RNA, 20 nt, Human
cugggcucuggagagggugu

SEQ ID NO: 437121 - RNA, 22 nt, Human
gaaaagaaauagcagaaaagga

SEQ ID NO: 437122 - RNA, 19 nt, Human
gacuuuggaaaaacugaag

SEQ ID NO: 437123 - RNA, 24 nt, Human
gcaagaagaaucagaaaaaacaac

SEQ ID NO: 437124 - RNA, 20 nt, Human
gcugggcucuggagagggug

SEQ ID NO: 437125 - RNA, 20 nt, Human
gggcucuggagagggugucu

SEQ ID NO: 437126 - RNA, 18 nt, Human
uaagacaaaggaaauagg

SEQ ID NO: 437127 - RNA, 21 nt, Human
uagcagaaaaggaaauacaca

SEQ ID NO: 437128 - RNA, 23 nt, Human
uagcagaaaaggaaauacacaaa

SEQ ID NO: 437129 - RNA, 23 nt, Human
ugaaaagaaauagcagaaaagga

SEQ ID NO: 437130 - RNA, 21 nt, Human
uggggaaauuaagacaaagga

SEQ ID NO: 437131 - RNA, 25 nt, Human
uuggaaaaacugaaaagaaauagca

SEQ ID NO: 437132 - RNA, 22 nt, Human
aaaauucacaaguacaacacug

SEQ ID NO: 437133 - RNA, 23 nt, Human
accuguacaguuuuuauuacaua

SEQ ID NO: 437134 - RNA, 18 nt, Human
cccugccgccgccggugc

SEQ ID NO: 437135 - RNA, 23 nt, Human
cguguugccauuauuaacucuuu

SEQ ID NO: 437136 - RNA, 19 nt, Human
cugccgccgccggugcucc

SEQ ID NO: 437137 - RNA, 24 nt, Human
gaccuguacaguuuuuauuacaua

SEQ ID NO: 437138 - RNA, 19 nt, Human
gacuccugucucuggcauc

SEQ ID NO: 437139 - RNA, 28 nt, Human
gccgccgccggugcuccgucgccgccgg

SEQ ID NO: 437140 - RNA, 19 nt, Human
gcuccgucgccgccgcgcc

SEQ ID NO: 437141 - RNA, 19 nt, Human
gggaagagucuucuggagc

SEQ ID NO: 437142 - RNA, 18 nt, Human
uaacucuuuugcuuucau

SEQ ID NO: 437143 - RNA, 21 nt, Human
ucgcccugccgccgccggugc

SEQ ID NO: 437144 - RNA, 19 nt, Human
ucucgcccugccgccgccg

SEQ ID NO: 437145 - RNA, 19 nt, Human
ugcuccgucgccgccgcgc

SEQ ID NO: 437146 - RNA, 19 nt, Human
uggcaggggaagagucuuc

SEQ ID NO: 437147 - RNA, 20 nt, Human
uguugccauuauuaacucuu

SEQ ID NO: 437148 - RNA, 18 nt, Human
uuucuuggcaggggaaga

SEQ ID NO: 437149 - RNA, 21 nt, Human
aagaaaagcagggacauggga

SEQ ID NO: 437150 - RNA, 20 nt, Human
aagcagggacaugggagagg

SEQ ID NO: 437151 - RNA, 18 nt, Human
acagaaagacaaacacug

SEQ ID NO: 437152 - RNA, 19 nt, Human
agaaagacaaacacugcau

SEQ ID NO: 437153 - RNA, 27 nt, Human
caagaaaagcagggacaugggagaggu

SEQ ID NO: 437154 - RNA, 30 nt, Human
cagaaagacaaacacugcaugaucucacua

SEQ ID NO: 437155 - RNA, 20 nt, Human
caugggcugggaggagaggg

SEQ ID NO: 437156 - RNA, 18 nt, Human
ccccgggggacagggcgg

SEQ ID NO: 437157 - RNA, 25 nt, Human
cuagcaacucuccaugagccucagg

SEQ ID NO: 437158 - RNA, 19 nt, Human
cugccacccggccugguug

SEQ ID NO: 437159 - RNA, 19 nt, Human
cuggggcaggccgagucag

SEQ ID NO: 437160 - RNA, 20 nt, Human
ggcugggaggagagggacug

SEQ ID NO: 437161 - RNA, 23 nt, Human
ggcugggaggagagggacugggc

SEQ ID NO: 437162 - RNA, 22 nt, Human
ggggaugagcuuguguggggga

SEQ ID NO: 437163 - RNA, 21 nt, Human
guggaaccuauaaaagcugcc

SEQ ID NO: 437164 - RNA, 24 nt, Human
uacaaguaaagagucaaaugcugg

SEQ ID NO: 437165 - RNA, 21 nt, Human
uaccagagaugggcaggauga

SEQ ID NO: 437166 - RNA, 18 nt, Human
ucccagaggccggggaug

SEQ ID NO: 437167 - RNA, 22 nt, Human
ucccagaggccggggaugagcu

SEQ ID NO: 437168 - RNA, 20 nt, Human
ucccaggucuagcaacucuc

SEQ ID NO: 437169 - RNA, 26 nt, Human
ugaaaaaaaggagugauauaggggua

SEQ ID NO: 437170 - RNA, 19 nt, Human
ugggagagguccuggcugc

SEQ ID NO: 437171 - RNA, 19 nt, Human
ugggaggagagggacuggg

SEQ ID NO: 437172 - RNA, 19 nt, Human
ugugcgccucccagggcag

SEQ ID NO: 437173 - RNA, 20 nt, Human
ugugugcgccucccagggca

SEQ ID NO: 437174 - RNA, 19 nt, Human
agcgcccaguuccucggag

SEQ ID NO: 437175 - RNA, 20 nt, Human
aggaaaagacuuuauuaaua

SEQ ID NO: 437176 - RNA, 20 nt, Human
agugggugggaggugagggu

SEQ ID NO: 437177 - RNA, 19 nt, Human
cccacacucguucgagagg

SEQ ID NO: 437178 - RNA, 21 nt, Human
gugggaggugagggugugcaa

SEQ ID NO: 437179 - RNA, 19 nt, Human
agccucuggcucuuagguc

SEQ ID NO: 437180 - RNA, 21 nt, Human
aggggccuuccaugugcugau

SEQ ID NO: 437181 - RNA, 19 nt, Human
cagcaggcuugggaagugc

SEQ ID NO: 437182 - RNA, 21 nt, Human
cagcccuuccuuucagugucc

SEQ ID NO: 437183 - RNA, 19 nt, Human
cccucugccccuacuccaa

SEQ ID NO: 437184 - RNA, 19 nt, Human
ccggggagggcgcgggggg

SEQ ID NO: 437185 - RNA, 19 nt, Human
ccucuacacagccucuggc

SEQ ID NO: 437186 - RNA, 21 nt, Human
ccucuacacagccucuggcuc

SEQ ID NO: 437187 - RNA, 22 nt, Human
cucuuaggucccagucauguuu

SEQ ID NO: 437188 - RNA, 18 nt, Human
cugcagcaaccccaucuc

SEQ ID NO: 437189 - RNA, 19 nt, Human
cugcagcaaccccaucucu

SEQ ID NO: 437190 - RNA, 18 nt, Human
cugccccuacuccaacac

SEQ ID NO: 437191 - RNA, 19 nt, Human
gagacuggcagguggagca

SEQ ID NO: 437192 - RNA, 22 nt, Human
gagcuuguuuuauuggagugac

SEQ ID NO: 437193 - RNA, 19 nt, Human
gcaggaccagcccuuccuu

SEQ ID NO: 437194 - RNA, 22 nt, Human
gcagguggagcaggagccucua

SEQ ID NO: 437195 - RNA, 20 nt, Human
gcuccggggagggcgcgggg

SEQ ID NO: 437196 - RNA, 20 nt, Human
gggaucgagacgggugaggg

SEQ ID NO: 437197 - RNA, 20 nt, Human
gggcgcggggggucaggggc

SEQ ID NO: 437198 - RNA, 19 nt, Human
ggggccuuccaugugcuga

SEQ ID NO: 437199 - RNA, 24 nt, Human
ggucucugggaaagggcggagagg

SEQ ID NO: 437200 - RNA, 21 nt, Human
ucagcaggcuugggaagugcu

SEQ ID NO: 437201 - RNA, 20 nt, Human
ucaguguccauaccaggggc

SEQ ID NO: 437202 - RNA, 23 nt, Human
ucauguuugcacccccucaaagg

SEQ ID NO: 437203 - RNA, 18 nt, Human
uccggggagggcgcgggg

SEQ ID NO: 437204 - RNA, 19 nt, Human
ucugccccuacuccaacac

SEQ ID NO: 437205 - RNA, 19 nt, Human
ugaccuuggcucccucccu

SEQ ID NO: 437206 - RNA, 22 nt, Human
ugaguugggcuggggucuuggu

SEQ ID NO: 437207 - RNA, 26 nt, Human
uggcagguggagcaggagccucuucu

SEQ ID NO: 437208 - RNA, 19 nt, Human
uggcucccucccucugccc

SEQ ID NO: 437209 - RNA, 21 nt, Human
ugggaagugcugcuccggggc

SEQ ID NO: 437210 - RNA, 24 nt, Human
uuccaugugcugaugggugaugug

SEQ ID NO: 437211 - RNA, 23 nt, Human
uuggagugaccuuggcucccucc

SEQ ID NO: 437212 - RNA, 18 nt, Human
uuuuuuuuuuuuuuuuug

SEQ ID NO: 437213 - RNA, 22 nt, Human
uuuuuuuuuuuuuuuuugccau

SEQ ID NO: 437214 - RNA, 25 nt, Human
uuuuuuuuuuuuuuuuuugccauga

SEQ ID NO: 437215 - RNA, 24 nt, Human
aaagcuuucccacaaugacugcac

SEQ ID NO: 437216 - RNA, 20 nt, Human
aaggugcugggauuacaggu

SEQ ID NO: 437217 - RNA, 25 nt, Human
aaggugcugggauuacagguguugg

SEQ ID NO: 437218 - RNA, 24 nt, Human
aagugauccaccugccucggccuc

SEQ ID NO: 437219 - RNA, 25 nt, Human
aagugauccucccaccucagccucc

SEQ ID NO: 437220 - RNA, 18 nt, Human
aagugcugggauuacagg

SEQ ID NO: 437221 - RNA, 19 nt, Human
aagugcugggauuacaggu

SEQ ID NO: 437222 - RNA, 23 nt, Human
aagugcugggauuacagguguga

SEQ ID NO: 437223 - RNA, 20 nt, Human
acaggguuucaccauauuag

SEQ ID NO: 437224 - RNA, 20 nt, Human
acccaccuuggccuaccuaa

SEQ ID NO: 437225 - RNA, 23 nt, Human
accucagccuccugaguagcugg

SEQ ID NO: 437226 - RNA, 23 nt, Human
accucagccuuccagagugcugg

SEQ ID NO: 437227 - RNA, 24 nt, Human
accucgugauccacccaccuuggc

SEQ ID NO: 437228 - RNA, 21 nt, Human
acucugagagucauguuuugg

SEQ ID NO: 437229 - RNA, 18 nt, Human
agacaggauuuugccaug

SEQ ID NO: 437230 - RNA, 19 nt, Human
agacaggauuuugccaugu

SEQ ID NO: 437231 - RNA, 20 nt, Human
agagggcagagguccucaga

SEQ ID NO: 437232 - RNA, 24 nt, Human
agagugcugggauuacaggcauga

SEQ ID NO: 437233 - RNA, 20 nt, Human
agccccuggccuguauuuuu

SEQ ID NO: 437234 - RNA, 19 nt, Human
agccuccugaguagcuggg

SEQ ID NO: 437235 - RNA, 21 nt, Human
agcugggacuacaggagcccg

SEQ ID NO: 437236 - RNA, 25 nt, Human
aggaggcucuuggcugccaccugca

SEQ ID NO: 437237 - RNA, 18 nt, Human
aggcagcggugugauggc

SEQ ID NO: 437238 - RNA, 25 nt, Human
aggcuggagugcaguggugugaucu

SEQ ID NO: 437239 - RNA, 24 nt, Human
aggugauccacccaccucagccuu

SEQ ID NO: 437240 - RNA, 24 nt, Human
agguguuggcaacugcacccggcu

SEQ ID NO: 437241 - RNA, 18 nt, Human
aguagcugggacuacagg

SEQ ID NO: 437242 - RNA, 18 nt, Human
aguagcugggacuacagg

SEQ ID NO: 437243 - RNA, 19 nt, Human
agugcaguggugugaucuc

SEQ ID NO: 437244 - RNA, 21 nt, Human
agugcaguggugugaucucag

SEQ ID NO: 437245 - RNA, 23 nt, Human
agugcaguggugugaucucagcu

SEQ ID NO: 437246 - RNA, 24 nt, Human
agugcaguggugugaucucagcuc

SEQ ID NO: 437247 - RNA, 18 nt, Human
agugcugggauuacaggc

SEQ ID NO: 437248 - RNA, 20 nt, Human
agugcugggauuacaggcau

SEQ ID NO: 437249 - RNA, 22 nt, Human
agugcugggauuacaggcauga

SEQ ID NO: 437250 - RNA, 24 nt, Human
aguggugugaucucagcucacugc

SEQ ID NO: 437251 - RNA, 26 nt, Human
aucacagcucacugcaacaaccgccu

SEQ ID NO: 437252 - RNA, 21 nt, Human
augcuaggcuaauuuuuguau

SEQ ID NO: 437253 - RNA, 26 nt, Human
caaacuucugacuucaggugauccaa

SEQ ID NO: 437254 - RNA, 22 nt, Human
caaccgccucccaaguccaagu

SEQ ID NO: 437255 - RNA, 20 nt, Human
caaggugcugggauuacagg

SEQ ID NO: 437256 - RNA, 22 nt, Human
caaggugcugggauuacaggug

SEQ ID NO: 437257 - RNA, 22 nt, Human
caagugauccaccugccucggc

SEQ ID NO: 437258 - RNA, 20 nt, Human
caagugauccucccaccuca

SEQ ID NO: 437259 - RNA, 27 nt, Human
caagugauccucccaccucagccuccu

SEQ ID NO: 437260 - RNA, 18 nt, Human
caccauauuagccaggau

SEQ ID NO: 437261 - RNA, 22 nt, Human
caccauauuagccaggaugguc

SEQ ID NO: 437262 - RNA, 24 nt, Human
caccauauuagccaggauggucuc

SEQ ID NO: 437263 - RNA, 24 nt, Human
caccaugcuaggcuaauuuuugua

SEQ ID NO: 437264 - RNA, 23 nt, Human
cacccaccucagccuuccagagu

SEQ ID NO: 437265 - RNA, 26 nt, Human
caccugaagaggccgcuguguagagg

SEQ ID NO: 437266 - RNA, 21 nt, Human
caccuuggccuaccuaagugc

SEQ ID NO: 437267 - RNA, 19 nt, Human
cagacuccuggauuuuacu

SEQ ID NO: 437268 - RNA, 24 nt, Human
cagagugcugggauuacaggcaug

SEQ ID NO: 437269 - RNA, 20 nt, Human
cagccuccugaguagcuggg

SEQ ID NO: 437270 - RNA, 24 nt, Human
caggauuuugccauguuacccagg

SEQ ID NO: 437271 - RNA, 24 nt, Human
caggguuucaccauauuagccagg

SEQ ID NO: 437272 - RNA, 19 nt, Human
caugcccacucaccugugu

SEQ ID NO: 437273 - RNA, 23 nt, Human
cauguuacccaggcugguuucaa

SEQ ID NO: 437274 - RNA, 23 nt, Human
cauguuacccaggcugguuucaa

SEQ ID NO: 437275 - RNA, 25 nt, Human
ccacccaccucagccuuccagagug

SEQ ID NO: 437276 - RNA, 22 nt, Human
ccagagugcugggauuacaggc

SEQ ID NO: 437277 - RNA, 24 nt, Human
ccagagugcugggauuacaggcau

SEQ ID NO: 437278 - RNA, 18 nt, Human
ccagccccuggccuguau

SEQ ID NO: 437279 - RNA, 19 nt, Human
ccauguuacccaggcuggu

SEQ ID NO: 437280 - RNA, 19 nt, Human
ccauguuacccaggcuggu

SEQ ID NO: 437281 - RNA, 19 nt, Human
ccauguuugccaggcuggu

SEQ ID NO: 437282 - RNA, 22 nt, Human
ccauguuugccaggcuggucuc

SEQ ID NO: 437283 - RNA, 25 nt, Human
cccacaaucaaugcauucguagggc

SEQ ID NO: 437284 - RNA, 23 nt, Human
cccaccucagccuccugaguagc

SEQ ID NO: 437285 - RNA, 24 nt, Human
cccaccucagccuccugaguagcu

SEQ ID NO: 437286 - RNA, 24 nt, Human
ccgccucccaaguccaagugaucc

SEQ ID NO: 437287 - RNA, 21 nt, Human
ccuaagugcugggauuacagg

SEQ ID NO: 437288 - RNA, 22 nt, Human
ccuaagugcugggauuacaggu

SEQ ID NO: 437289 - RNA, 24 nt, Human
ccuaagugcugggauuacaggugu

SEQ ID NO: 437290 - RNA, 19 nt, Human
ccucagaagaccagucuac

SEQ ID NO: 437291 - RNA, 19 nt, Human
ccucauccguagacaucau

SEQ ID NO: 437292 - RNA, 22 nt, Human
ccugaccucgugauccacccac

SEQ ID NO: 437293 - RNA, 23 nt, Human
ccugaguagcugggacuacagga

SEQ ID NO: 437294 - RNA, 23 nt, Human
ccugaguagcugggacuacaggu

SEQ ID NO: 437295 - RNA, 24 nt, Human
ccugaguagcugggacuacaggua

SEQ ID NO: 437296 - RNA, 18 nt, Human
ccugggcucaagugaucc

SEQ ID NO: 437297 - RNA, 21 nt, Human
ccugggcucaagugauccacc

SEQ ID NO: 437298 - RNA, 22 nt, Human
ccugggcucaagugauccaccu

SEQ ID NO: 437299 - RNA, 23 nt, Human
ccugggcucaagugauccaccug

SEQ ID NO: 437300 - RNA, 21 nt, Human
ccuguauuuuuaauagagaaa

SEQ ID NO: 437301 - RNA, 24 nt, Human
cgccucccaaguccaagugauccu

SEQ ID NO: 437302 - RNA, 24 nt, Human
cgugcccagccccuggccuguauu

SEQ ID NO: 437303 - RNA, 21 nt, Human
cuaaaggcuuucucgcaaugg

SEQ ID NO: 437304 - RNA, 20 nt, Human
cuaagugcugggauuacagg

SEQ ID NO: 437305 - RNA, 24 nt, Human
cuaagugcugggauuacaggugug

SEQ ID NO: 437306 - RNA, 23 nt, Human
cuagccuccugaguagcugggac

SEQ ID NO: 437307 - RNA, 21 nt, Human
cucaagugauccaccugccuc

SEQ ID NO: 437308 - RNA, 23 nt, Human
cucaagugauccaccugccucgg

SEQ ID NO: 437309 - RNA, 24 nt, Human
cucagccuccugaguagcugggac

SEQ ID NO: 437310 - RNA, 18 nt, Human
cuccugaccucgugaucc

SEQ ID NO: 437311 - RNA, 21 nt, Human
cuccugggcucaagugaucca

SEQ ID NO: 437312 - RNA, 21 nt, Human
cucgcaaggugcugggauuac

SEQ ID NO: 437313 - RNA, 23 nt, Human
cucucguguuuacuaaggguuga

SEQ ID NO: 437314 - RNA, 23 nt, Human
cugacuucaggugauccacccac

SEQ ID NO: 437315 - RNA, 23 nt, Human
cugcaacaaccgccucccaaguc

SEQ ID NO: 437316 - RNA, 23 nt, Human
cugcucuagccuccugaguagcu

SEQ ID NO: 437317 - RNA, 19 nt, Human
cugcugccuaguaaguuga

SEQ ID NO: 437318 - RNA, 24 nt, Human
cuggagugcaguggugugaucuca

SEQ ID NO: 437319 - RNA, 20 nt, Human
cugugccaggaggcucuugg

SEQ ID NO: 437320 - RNA, 22 nt, Human
cuucccaccgacaugcguccuc

SEQ ID NO: 437321 - RNA, 21 nt, Human
cuugcucuguugcccaggcug

SEQ ID NO: 437322 - RNA, 21 nt, Human
gaccucgugauccacccaccu

SEQ ID NO: 437323 - RNA, 21 nt, Human
gaccucgugauccacccaccu

SEQ ID NO: 437324 - RNA, 24 nt, Human
gaccucgugauccacccaccuugg

SEQ ID NO: 437325 - RNA, 24 nt, Human
gaccucgugauccacccaccuugg

SEQ ID NO: 437326 - RNA, 24 nt, Human
gacuacagguaugcgccaccaugc

SEQ ID NO: 437327 - RNA, 24 nt, Human
gacuucaggugauccacccaccuc

SEQ ID NO: 437328 - RNA, 20 nt, Human
gagcccgccaccaugccuag

SEQ ID NO: 437329 - RNA, 23 nt, Human
gaguagcugggacuacaggagcc

SEQ ID NO: 437330 - RNA, 26 nt, Human
gaguagcugggacuacaggagcccgc

SEQ ID NO: 437331 - RNA, 24 nt, Human
gaguagcugggacuacagguaugc

SEQ ID NO: 437332 - RNA, 19 nt, Human
gagugcugggauuacaggc

SEQ ID NO: 437333 - RNA, 18 nt, Human
gauuacaggcaugagcca

SEQ ID NO: 437334 - RNA, 21 nt, Human
gauuacaggcaugagccacca

SEQ ID NO: 437335 - RNA, 24 nt, Human
gauuacaggcaugagccaccaugc

SEQ ID NO: 437336 - RNA, 24 nt, Human
gauuacaggugugagguaccgugc

SEQ ID NO: 437337 - RNA, 22 nt, Human
gauuacagguguuggcaacugc

SEQ ID NO: 437338 - RNA, 23 nt, Human
gauuacagguguuggcaacugca

SEQ ID NO: 437339 - RNA, 24 nt, Human
gcaaggugcugggauuacaggugu

SEQ ID NO: 437340 - RNA, 22 nt, Human
gccaggcuggucucaaacuucu

SEQ ID NO: 437341 - RNA, 20 nt, Human
gccauguuacccaggcuggu

SEQ ID NO: 437342 - RNA, 20 nt, Human
gccauguuugccaggcuggu

SEQ ID NO: 437343 - RNA, 19 nt, Human
gcccagccccuggccugua

SEQ ID NO: 437344 - RNA, 24 nt, Human
gcccaggcuggagugcaguggugu

SEQ ID NO: 437345 - RNA, 24 nt, Human
gccuagcuaauuuuuuuguauuuu

SEQ ID NO: 437346 - RNA, 24 nt, Human
gcucaagugauccaccugccucgg

SEQ ID NO: 437347 - RNA, 25 nt, Human
gcucuguugcccaggcuggagugca

SEQ ID NO: 437348 - RNA, 24 nt, Human
ggacuacagguaugcgccaccaug

SEQ ID NO: 437349 - RNA, 21 nt, Human
ggagcugggaugaccucuggg

SEQ ID NO: 437350 - RNA, 24 nt, Human
ggauggucucaaucuccugaccuc

SEQ ID NO: 437351 - RNA, 24 nt, Human
ggauuacaggcaugagccaccaug

SEQ ID NO: 437352 - RNA, 22 nt, Human
ggcuggagugcaguggugugau

SEQ ID NO: 437353 - RNA, 22 nt, Human
gggcucaagugauccaccugcc

SEQ ID NO: 437354 - RNA, 21 nt, Human
ggugcaugaugaggggagacc

SEQ ID NO: 437355 - RNA, 23 nt, Human
ggugugauggcaugaucacagcu

SEQ ID NO: 437356 - RNA, 22 nt, Human
gucaugaagccccacucugaga

SEQ ID NO: 437357 - RNA, 21 nt, Human
guccucugauguucaaugagu

SEQ ID NO: 437358 - RNA, 24 nt, Human
gucuugcucuguugcccaggcugg

SEQ ID NO: 437359 - RNA, 24 nt, Human
gugauccacccaccucagccuucc

SEQ ID NO: 437360 - RNA, 25 nt, Human
gugauccacccaccuuggccuaccu

SEQ ID NO: 437361 - RNA, 22 nt, Human
gugauccaccugccucggccuc

SEQ ID NO: 437362 - RNA, 24 nt, Human
gugauccucccaccucagccuccu

SEQ ID NO: 437363 - RNA, 20 nt, Human
uaacuggaagcuuuuccaca

SEQ ID NO: 437364 - RNA, 19 nt, Human
uaagugcugggauuacagg

SEQ ID NO: 437365 - RNA, 24 nt, Human
uaagugcugggauuacagguguga

SEQ ID NO: 437366 - RNA, 22 nt, Human
uaauagagacaguuuugccaug

SEQ ID NO: 437367 - RNA, 22 nt, Human
uaauuuuuguauuuuuuguaga

SEQ ID NO: 437368 - RNA, 24 nt, Human
uacaggcaugagccaccaugccca

SEQ ID NO: 437369 - RNA, 18 nt, Human
uacagguaugcgccacca

SEQ ID NO: 437370 - RNA, 22 nt, Human
uaccgugcccagccccuggccu

SEQ ID NO: 437371 - RNA, 20 nt, Human
uagagacaggguuucaccau

SEQ ID NO: 437372 - RNA, 19 nt, Human
uaguagagacaggguuuca

SEQ ID NO: 437373 - RNA, 25 nt, Human
uaguagagacaggguuucaccauau

SEQ ID NO: 437374 - RNA, 27 nt, Human
uauuuaguuggcuagagugagcuuggu

SEQ ID NO: 437375 - RNA, 19 nt, Human
ucaaacuccugggcucaag

SEQ ID NO: 437376 - RNA, 24 nt, Human
ucaccauauuagccaggauggucu

SEQ ID NO: 437377 - RNA, 24 nt, Human
ucacugcaacaaccgccucccaag

SEQ ID NO: 437378 - RNA, 23 nt, Human
ucagccuccugaguagcugggac

SEQ ID NO: 437379 - RNA, 26 nt, Human
ucagcucacugcaagcuacgccuccc

SEQ ID NO: 437380 - RNA, 20 nt, Human
ucaggugauccacccaccuc

SEQ ID NO: 437381 - RNA, 24 nt, Human
uccaagugauccucccaccucagc

SEQ ID NO: 437382 - RNA, 21 nt, Human
uccacccaccucagccuucca

SEQ ID NO: 437383 - RNA, 23 nt, Human
uccagagugcugggauuacaggc

SEQ ID NO: 437384 - RNA, 24 nt, Human
uccagagugcugggauuacaggca

SEQ ID NO: 437385 - RNA, 22 nt, Human
uccaucuugguuauucauagag

SEQ ID NO: 437386 - RNA, 21 nt, Human
ucccaaguccaagugauccuc

SEQ ID NO: 437387 - RNA, 24 nt, Human
ucccauguucgcgccauucuccug

SEQ ID NO: 437388 - RNA, 26 nt, Human
uccucccaccucagccuccugaguag

SEQ ID NO: 437389 - RNA, 18 nt, Human
uccugaguagcugggacu

SEQ ID NO: 437390 - RNA, 24 nt, Human
uccugaguagcugggacuacaggu

SEQ ID NO: 437391 - RNA, 18 nt, Human
uccugggcucaagugauc

SEQ ID NO: 437392 - RNA, 24 nt, Human
uccugggcucaagugauccaccug

SEQ ID NO: 437393 - RNA, 24 nt, Human
ucgcaaggugcugggauuacaggu

SEQ ID NO: 437394 - RNA, 24 nt, Human
ucuccaggccucaguuuccucauc

SEQ ID NO: 437395 - RNA, 26 nt, Human
ucuccugaccucgugauccacccacc

SEQ ID NO: 437396 - RNA, 18 nt, Human
ucuguugcccaggcugga

SEQ ID NO: 437397 - RNA, 24 nt, Human
ucuguugcccaggcuggagugcag

SEQ ID NO: 437398 - RNA, 26 nt, Human
ucuugcccaugagcuuucucauguug

SEQ ID NO: 437399 - RNA, 23 nt, Human
ucuugcucuguugcccaggcugg

SEQ ID NO: 437400 - RNA, 24 nt, Human
ucuugcucuguugcccaggcugga

SEQ ID NO: 437401 - RNA, 18 nt, Human
ugaccucugggguccaau

SEQ ID NO: 437402 - RNA, 21 nt, Human
ugacuucaggugauccaccca

SEQ ID NO: 437403 - RNA, 24 nt, Human
ugacuucaggugauccacccaccu

SEQ ID NO: 437404 - RNA, 24 nt, Human
ugauccacccaccucagccuucca

SEQ ID NO: 437405 - RNA, 20 nt, Human
ugaugaggggagaccucugg

SEQ ID NO: 437406 - RNA, 24 nt, Human
ugcacccggcuccaucuugguuau

SEQ ID NO: 437407 - RNA, 31 nt, Human
ugccauguuacccaggcugguuucaaacucc

SEQ ID NO: 437408 - RNA, 18 nt, Human
ugcccaggcuggagugca

SEQ ID NO: 437409 - RNA, 21 nt, Human
ugcccaggcuggagugcagug

SEQ ID NO: 437410 - RNA, 24 nt, Human
ugcccaggcuggagugcaguggug

SEQ ID NO: 437411 - RNA, 20 nt, Human
ugcucuagccuccugaguaa

SEQ ID NO: 437412 - RNA, 24 nt, Human
ugcucuguugcccaggcuggagug

SEQ ID NO: 437413 - RNA, 20 nt, Human
ugcugggauuacagguguga

SEQ ID NO: 437414 - RNA, 23 nt, Human
ugcugggauuacagguguuggca

SEQ ID NO: 437415 - RNA, 19 nt, Human
uggaagaaaauguguccac

SEQ ID NO: 437416 - RNA, 18 nt, Human
uggagcugggaugaccuc

SEQ ID NO: 437417 - RNA, 19 nt, Human
uggagugcaguggugugau

SEQ ID NO: 437418 - RNA, 24 nt, Human
uggagugcaguggugugaucucag

SEQ ID NO: 437419 - RNA, 20 nt, Human
uggcagggaaauuucccauc

SEQ ID NO: 437420 - RNA, 24 nt, Human
uggcaugaucacagcucacugcaa

SEQ ID NO: 437421 - RNA, 22 nt, Human
ugggacuacaggagcccgccac

SEQ ID NO: 437422 - RNA, 24 nt, Human
ugggacuacaggagcccgccacca

SEQ ID NO: 437423 - RNA, 21 nt, Human
ugggacuacagguaugcgcca

SEQ ID NO: 437424 - RNA, 22 nt, Human
ugggacuacagguaugcgccac

SEQ ID NO: 437425 - RNA, 24 nt, Human
ugggacuacagguaugcgccacca

SEQ ID NO: 437426 - RNA, 18 nt, Human
ugggauuacaggcaugag

SEQ ID NO: 437427 - RNA, 22 nt, Human
ugggauuacaggcaugagccac

SEQ ID NO: 437428 - RNA, 23 nt, Human
ugggauuacaggcaugagccacc

SEQ ID NO: 437429 - RNA, 24 nt, Human
ugggauuacaggcaugagccacca

SEQ ID NO: 437430 - RNA, 25 nt, Human
ugggauuacaggcaugagccaccau

SEQ ID NO: 437431 - RNA, 18 nt, Human
ugggauuacaggugugag

SEQ ID NO: 437432 - RNA, 18 nt, Human
ugggauuacaggugugag

SEQ ID NO: 437433 - RNA, 19 nt, Human
ugggauuacaggugugagg

SEQ ID NO: 437434 - RNA, 21 nt, Human
ugggauuacaggugugaggua

SEQ ID NO: 437435 - RNA, 22 nt, Human
ugggauuacaggugugagguac

SEQ ID NO: 437436 - RNA, 23 nt, Human
ugggauuacaggugugagguacc

SEQ ID NO: 437437 - RNA, 23 nt, Human
ugggauuacaggugugagguacc

SEQ ID NO: 437438 - RNA, 24 nt, Human
ugggauuacaggugugagguaccg

SEQ ID NO: 437439 - RNA, 19 nt, Human
ugggauuacagguguuggc

SEQ ID NO: 437440 - RNA, 20 nt, Human
ugggauuacagguguuggca

SEQ ID NO: 437441 - RNA, 22 nt, Human
ugggauuacagguguuggcaac

SEQ ID NO: 437442 - RNA, 24 nt, Human
ugggauuacagguguuggcaacug

SEQ ID NO: 437443 - RNA, 24 nt, Human
uggugugaucucagcucacugcaa

SEQ ID NO: 437444 - RNA, 22 nt, Human
uguagacaggauuuugccaugu

SEQ ID NO: 437445 - RNA, 22 nt, Human
uguaggacucugaacgggucuc

SEQ ID NO: 437446 - RNA, 22 nt, Human
uuaauagagacaguuuugccau

SEQ ID NO: 437447 - RNA, 24 nt, Human
uuaguagagacaggguuucaccau

SEQ ID NO: 437448 - RNA, 19 nt, Human
uucacagggcuucucucca

SEQ ID NO: 437449 - RNA, 23 nt, Human
uucaggugauccacccaccucag

SEQ ID NO: 437450 - RNA, 27 nt, Human
uucucauguugaauaaggaaaguauca

SEQ ID NO: 437451 - RNA, 23 nt, Human
uugagacagucuugcucuguugc

SEQ ID NO: 437452 - RNA, 24 nt, Human
uugagacagucuugcucuguugcc

SEQ ID NO: 437453 - RNA, 24 nt, Human
uugcccaggcuggagugcaguggu

SEQ ID NO: 437454 - RNA, 24 nt, Human
uugcucuguugcccaggcuggagu

SEQ ID NO: 437455 - RNA, 20 nt, Human
uuucaccauauuagccagga

SEQ ID NO: 437456 - RNA, 21 nt, Human
uuuguagacaggauuuugcca

SEQ ID NO: 437457 - RNA, 22 nt, Human
uuuguagacaggauuuugccau

SEQ ID NO: 437458 - RNA, 21 nt, Human
uuuugagacagucuugcucug

SEQ ID NO: 437459 - RNA, 23 nt, Human
uuuugccauguuugccaggcugg

SEQ ID NO: 437460 - RNA, 22 nt, Human
uuuuuaauagagacaguuuugc

SEQ ID NO: 437461 - RNA, 24 nt, Human
uuuuuaguagagacaggguuucac

SEQ ID NO: 437462 - RNA, 21 nt, Human
uuuuuguauuuuuaguagaga

SEQ ID NO: 437463 - RNA, 18 nt, Human
uuuuuguauuuuuuguag

SEQ ID NO: 437464 - RNA, 21 nt, Human
uuuuuguauuuuuuguagaca

SEQ ID NO: 437465 - RNA, 21 nt, Human
uuuuuuguauuuuuaguagag

SEQ ID NO: 437466 - RNA, 24 nt, Human
uuuuuuguauuuuuaguagagaca

SEQ ID NO: 437467 - RNA, 23 nt, Human
uuuuuuuuuuuuugagacagucu

SEQ ID NO: 437468 - RNA, 27 nt, Human
acaguggaaaaagcacuugaaucugaa

SEQ ID NO: 437469 - RNA, 21 nt, Human
acaucacagugcucuaaaagc

SEQ ID NO: 437470 - RNA, 19 nt, Human
accuguuuaugauguucug

SEQ ID NO: 437471 - RNA, 19 nt, Human
aucaugucaucuacagcac

SEQ ID NO: 437472 - RNA, 19 nt, Human
auguucugccaaaugaaua

SEQ ID NO: 437473 - RNA, 18 nt, Human
caaaugaauaucacucuc

SEQ ID NO: 437474 - RNA, 24 nt, Human
caagaggaggccauccugggcagc

SEQ ID NO: 437475 - RNA, 20 nt, Human
cagauucuggggugcagcug

SEQ ID NO: 437476 - RNA, 20 nt, Human
cauguugggaaugcacaaaa

SEQ ID NO: 437477 - RNA, 18 nt, Human
ccccuggcccccucaccc

SEQ ID NO: 437478 - RNA, 19 nt, Human
ccccuggcccccucacccc

SEQ ID NO: 437479 - RNA, 20 nt, Human
ccuggcccccucacccccug

SEQ ID NO: 437480 - RNA, 22 nt, Human
cugcugaguuuaaaagcuuccu

SEQ ID NO: 437481 - RNA, 19 nt, Human
cuguaaacaugcucccuau

SEQ ID NO: 437482 - RNA, 18 nt, Human
gaggaggccauccugggc

SEQ ID NO: 437483 - RNA, 19 nt, Human
gaugauuccaggcagaguu

SEQ ID NO: 437484 - RNA, 18 nt, Human
ggaaacaguggaaaaagc

SEQ ID NO: 437485 - RNA, 20 nt, Human
ggaaacaguggaaaaagcac

SEQ ID NO: 437486 - RNA, 21 nt, Human
uacucugcuaucaugucaucu

SEQ ID NO: 437487 - RNA, 21 nt, Human
uagaauggcuguaaacaugcu

SEQ ID NO: 437488 - RNA, 19 nt, Human
uaugaauaaauccuugggc

SEQ ID NO: 437489 - RNA, 23 nt, Human
uaugguagaaauuugaaauucuu

SEQ ID NO: 437490 - RNA, 21 nt, Human
uccuuuggagaugcccccugg

SEQ ID NO: 437491 - RNA, 20 nt, Human
ucuuuuggugaugauuccag

SEQ ID NO: 437492 - RNA, 22 nt, Human
uggaaaaagcacuugaaucuga

SEQ ID NO: 437493 - RNA, 23 nt, Human
uggaaaaagcacuugaaucugaa

SEQ ID NO: 437494 - RNA, 21 nt, Human
uggagaugcccccuggccccc

SEQ ID NO: 437495 - RNA, 21 nt, Human
uggcccccucacccccugucc

SEQ ID NO: 437496 - RNA, 21 nt, Human
uggggugcagcugcugaguuu

SEQ ID NO: 437497 - RNA, 22 nt, Human
uggugaugauuccaggcagagu

SEQ ID NO: 437498 - RNA, 21 nt, Human
uuccuuuggagaugcccccug

SEQ ID NO: 437499 - RNA, 22 nt, Human
uugcaaguuucccaucauacaa

SEQ ID NO: 437500 - RNA, 22 nt, Human
uuuggugaugauuccaggcaga

SEQ ID NO: 437501 - RNA, 22 nt, Human
uuuuuuuuuuuucaaaaaguca

SEQ ID NO: 437502 - RNA, 21 nt, Human
aacuuggaaaaugaguacaaa

SEQ ID NO: 437503 - RNA, 24 nt, Human
aagacccugcccagggaggguggg

SEQ ID NO: 437504 - RNA, 25 nt, Human
aagaccuuuccucuuccagggaguc

SEQ ID NO: 437505 - RNA, 19 nt, Human
aggcaggaaagagaagagg

SEQ ID NO: 437506 - RNA, 21 nt, Human
aggcaggaaagagaagagggu

SEQ ID NO: 437507 - RNA, 27 nt, Human
aggcaggaaagagaagaggguaggguc

SEQ ID NO: 437508 - RNA, 19 nt, Human
caacuuggaaaaugaguac

SEQ ID NO: 437509 - RNA, 22 nt, Human
cagacccaggcccagggccccc

SEQ ID NO: 437510 - RNA, 19 nt, Human
cagagcuggggggcgugag

SEQ ID NO: 437511 - RNA, 24 nt, Human
cagggccuggagucagagcugggg

SEQ ID NO: 437512 - RNA, 23 nt, Human
caguggcugccucaagacccugc

SEQ ID NO: 437513 - RNA, 18 nt, Human
ccaagaccuuuccucuuc

SEQ ID NO: 437514 - RNA, 24 nt, Human
ccaccucgacggccacgcccaccc

SEQ ID NO: 437515 - RNA, 20 nt, Human
ccagggaggguggggugggc

SEQ ID NO: 437516 - RNA, 21 nt, Human
cccagggaggguggggugggc

SEQ ID NO: 437517 - RNA, 20 nt, Human
ccccaagaccuuuccucuuc

SEQ ID NO: 437518 - RNA, 18 nt, Human
cccgcagacccaggccca

SEQ ID NO: 437519 - RNA, 22 nt, Human
cccgcagacccaggcccagggc

SEQ ID NO: 437520 - RNA, 23 nt, Human
cccgcagacccaggcccagggcc

SEQ ID NO: 437521 - RNA, 20 nt, Human
cccgcuagauggggcucccg

SEQ ID NO: 437522 - RNA, 18 nt, Human
ccgccgccgccuuggaac

SEQ ID NO: 437523 - RNA, 18 nt, Human
ccucaagacccugcccag

SEQ ID NO: 437524 - RNA, 19 nt, Human
ccucaagacccugcccagg

SEQ ID NO: 437525 - RNA, 20 nt, Human
ccucaagacccugcccaggg

SEQ ID NO: 437526 - RNA, 22 nt, Human
ccuggagucagagcuggggggc

SEQ ID NO: 437527 - RNA, 20 nt, Human
ccuuuccucuuccagcucug

SEQ ID NO: 437528 - RNA, 25 nt, Human
cgccuuggaaccccgcuagaugggg

SEQ ID NO: 437529 - RNA, 21 nt, Human
cucccgcagacccaggcccag

SEQ ID NO: 437530 - RNA, 19 nt, Human
cucuuccagcucugcccca

SEQ ID NO: 437531 - RNA, 20 nt, Human
gacccgccgagccccaccuc

SEQ ID NO: 437532 - RNA, 20 nt, Human
gaggaguggggaguaggcag

SEQ ID NO: 437533 - RNA, 28 nt, Human
ggacagggccuggagucagagcuggggg

SEQ ID NO: 437534 - RNA, 21 nt, Human
ggaguaggcaggaaagagaag

SEQ ID NO: 437535 - RNA, 22 nt, Human
gggcagagcucaggggacaggg

SEQ ID NO: 437536 - RNA, 19 nt, Human
guaggaggcaagguaaggu

SEQ ID NO: 437537 - RNA, 21 nt, Human
ucccgcagacccaggcccagg

SEQ ID NO: 437538 - RNA, 23 nt, Human
uccuucggacccgccgagcccca

SEQ ID NO: 437539 - RNA, 24 nt, Human
uggaaccccgcuagauggggcucc

SEQ ID NO: 437540 - RNA, 22 nt, Human
uggcugccucaagacccugccc

SEQ ID NO: 437541 - RNA, 19 nt, Human
uuccucuuccagcucugcc

SEQ ID NO: 437542 - RNA, 20 nt, Human
uuuuuuuuuuuuuuuuuauc

SEQ ID NO: 437543 - RNA, 21 nt, Human
aacggaaaccacagcaacuac

SEQ ID NO: 437544 - RNA, 23 nt, Human
aagcaacaccaaguauaaauaac

SEQ ID NO: 437545 - RNA, 22 nt, Human
accacagcaacuaccggcgccg

SEQ ID NO: 437546 - RNA, 19 nt, Human
agaauaaaccgcaggaaga

SEQ ID NO: 437547 - RNA, 23 nt, Human
agggugguugagcuccuggcucc

SEQ ID NO: 437548 - RNA, 24 nt, Human
augcagucacagaguuacggcaug

SEQ ID NO: 437549 - RNA, 21 nt, Human
cacagcaacuaccggcgccgc

SEQ ID NO: 437550 - RNA, 22 nt, Human
cacauccaggggucuaucccuc

SEQ ID NO: 437551 - RNA, 21 nt, Human
cacugauggccggacucggac

SEQ ID NO: 437552 - RNA, 20 nt, Human
cacugcacuuacaaugcagu

SEQ ID NO: 437553 - RNA, 19 nt, Human
caggcaccgagcgucgagg

SEQ ID NO: 437554 - RNA, 23 nt, Human
ccacacuggggcaggcggcggaa

SEQ ID NO: 437555 - RNA, 20 nt, Human
ccacugcacuuacaaugcag

SEQ ID NO: 437556 - RNA, 21 nt, Human
ccccggagccgaccuaggccc

SEQ ID NO: 437557 - RNA, 22 nt, Human
ccccggagccgaccuaggcccc

SEQ ID NO: 437558 - RNA, 22 nt, Human
ccggcgccgcgguauuuccccu

SEQ ID NO: 437559 - RNA, 18 nt, Human
ccuaagccgcccccggag

SEQ ID NO: 437560 - RNA, 18 nt, Human
cgucgagggcacagcagc

SEQ ID NO: 437561 - RNA, 21 nt, Human
cuaagccgcccccggagccga

SEQ ID NO: 437562 - RNA, 22 nt, Human
cucacaggacugcuuaccccca

SEQ ID NO: 437563 - RNA, 18 nt, Human
cucgccggcggccuucuc

SEQ ID NO: 437564 - RNA, 19 nt, Human
gcaacaccaaguauaaaua

SEQ ID NO: 437565 - RNA, 18 nt, Human
gcacagcagcaggccggc

SEQ ID NO: 437566 - RNA, 22 nt, Human
gcagucacagaguuacggcaug

SEQ ID NO: 437567 - RNA, 21 nt, Human
gcccuguuccgaagaagggug

SEQ ID NO: 437568 - RNA, 20 nt, Human
gggcacagcagcaggccggc

SEQ ID NO: 437569 - RNA, 18 nt, Human
gguugagcuccuggcucc

SEQ ID NO: 437570 - RNA, 18 nt, Human
uaacagaacuacagcaga

SEQ ID NO: 437571 - RNA, 24 nt, Human
uacagcagagcaaacuaagauaaa

SEQ ID NO: 437572 - RNA, 22 nt, Human
uaggccccggaguagauacagg

SEQ ID NO: 437573 - RNA, 24 nt, Human
uaguuuccuuuuaaaaagaagagu

SEQ ID NO: 437574 - RNA, 19 nt, Human
uaugacacagcauauacau

SEQ ID NO: 437575 - RNA, 20 nt, Human
uaugacacagcauauacaua

SEQ ID NO: 437576 - RNA, 21 nt, Human
uccaugacaagcaacaccaag

SEQ ID NO: 437577 - RNA, 19 nt, Human
uccuaagcugcgagcucag

SEQ ID NO: 437578 - RNA, 18 nt, Human
ugcgccacucacaggacu

SEQ ID NO: 437579 - RNA, 23 nt, Human
uucaugguaaagguaucuccccc

SEQ ID NO: 437580 - RNA, 18 nt, Human
uugcaucguccuccacau

SEQ ID NO: 437581 - RNA, 20 nt, Human
uuuuuuuuacaaaccaggaa

SEQ ID NO: 437582 - RNA, 21 nt, Human
aaacagacagccgccucuagc

SEQ ID NO: 437583 - RNA, 24 nt, Human
aaccucccuagagauucuuuauua

SEQ ID NO: 437584 - RNA, 18 nt, Human
aauuaauuucugaagguu

SEQ ID NO: 437585 - RNA, 19 nt, Human
agaggugacaguauacaua

SEQ ID NO: 437586 - RNA, 19 nt, Human
ccacacgcucugaguuucc

SEQ ID NO: 437587 - RNA, 20 nt, Human
cucacaacgcccggcucgcc

SEQ ID NO: 437588 - RNA, 22 nt, Human
uccccaaauauaacaacacuga

SEQ ID NO: 437589 - RNA, 22 nt, Human
uccgcucacaacgcccggcucg

SEQ ID NO: 437590 - RNA, 21 nt, Human
ugggguccacacgcucugagu

SEQ ID NO: 437591 - RNA, 27 nt, Human
uuuucugccgcggcaaaccuccucgac

SEQ ID NO: 437592 - RNA, 19 nt, Human
aaaaaaguacaacagagaa

SEQ ID NO: 437593 - RNA, 18 nt, Human
aaaaaauuaaaacaacuc

SEQ ID NO: 437594 - RNA, 20 nt, Human
aaaacaaaucuuugccaaau

SEQ ID NO: 437595 - RNA, 18 nt, Human
aaacaauguggcgauuac

SEQ ID NO: 437596 - RNA, 24 nt, Human
aacaaauaucacauucuuccaacu

SEQ ID NO: 437597 - RNA, 26 nt, Human
aacaaauaucacauucuuccaacuag

SEQ ID NO: 437598 - RNA, 25 nt, Human
cagaggaaacugaauaaugaaacaa

SEQ ID NO: 437599 - RNA, 25 nt, Human
cauguaacuugcaaaaugacaaacc

SEQ ID NO: 437600 - RNA, 23 nt, Human
cuagaaaaugagcucaacucuca

SEQ ID NO: 437601 - RNA, 21 nt, Human
gaggacaaagcccauuccacu

SEQ ID NO: 437602 - RNA, 18 nt, Human
gaugcagaaaaaaaaauu

SEQ ID NO: 437603 - RNA, 19 nt, Human
gcagauucagaugcagaaa

SEQ ID NO: 437604 - RNA, 22 nt, Human
uaaaacauguaacuugcaaaau

SEQ ID NO: 437605 - RNA, 20 nt, Human
uaaagaagggauuaaaccau

SEQ ID NO: 437606 - RNA, 21 nt, Human
uaacuugcaaaaugacaaacc

SEQ ID NO: 437607 - RNA, 24 nt, Human
uaccacauucccccaccuccugga

SEQ ID NO: 437608 - RNA, 21 nt, Human
uaccccugggcuccuugaagg

SEQ ID NO: 437609 - RNA, 19 nt, Human
uagguaaacuaccaacaca

SEQ ID NO: 437610 - RNA, 22 nt, Human
ucaaaaucuucuuaggguaaaa

SEQ ID NO: 437611 - RNA, 19 nt, Human
ucaggcacaagauaauuug

SEQ ID NO: 437612 - RNA, 19 nt, Human
ucuuaaagcuaucaggccu

SEQ ID NO: 437613 - RNA, 18 nt, Human
ugaaagccuucuaugacc

SEQ ID NO: 437614 - RNA, 21 nt, Human
ugaaagccuucuaugaccagu

SEQ ID NO: 437615 - RNA, 21 nt, Human
ugaaugcauuuagauugacca

SEQ ID NO: 437616 - RNA, 23 nt, Human
ugcaguaccauaaacauguuaau

SEQ ID NO: 437617 - RNA, 25 nt, Human
ugccaaauaguuuaaguacuuuuaa

SEQ ID NO: 437618 - RNA, 26 nt, Human
uucagaugcagaaaaaaaaauuaaaa

SEQ ID NO: 437619 - RNA, 24 nt, Human
uucccccaccuccuggaggacaaa

SEQ ID NO: 437620 - RNA, 19 nt, Human
uugaaagccuucuaugacg

SEQ ID NO: 437621 - RNA, 20 nt, Human
uuuacagaggaaacugaaua

SEQ ID NO: 437622 - RNA, 23 nt, Human
uuugugguuucuucuacuuuauc

SEQ ID NO: 437623 - RNA, 19 nt, Human
uuuuuuuuuuuuuuugugg

SEQ ID NO: 437624 - RNA, 18 nt, Human
uuuuuuuuuuuuuuuuug

SEQ ID NO: 437625 - RNA, 19 nt, Human
uuuuuuuuuuuuuuuuugu

SEQ ID NO: 437626 - RNA, 21 nt, Human
uuuuuuuuuuuuuuuuugugg

SEQ ID NO: 437627 - RNA, 21 nt, Human
aaaaaagucagucaggccucu

SEQ ID NO: 437628 - RNA, 24 nt, Human
aaaaaagucagucaggccucugug

SEQ ID NO: 437629 - RNA, 23 nt, Human
aaacaccaagaacauuuacaaaa

SEQ ID NO: 437630 - RNA, 19 nt, Human
aacauccuccagggccgcu

SEQ ID NO: 437631 - RNA, 20 nt, Human
aagauaaaaaucugugaaga

SEQ ID NO: 437632 - RNA, 18 nt, Human
aagcacuugcuuccugau

SEQ ID NO: 437633 - RNA, 18 nt, Human
aagccaacacacaaaugc

SEQ ID NO: 437634 - RNA, 21 nt, Human
aagccuuuuccuccugcccaa

SEQ ID NO: 437635 - RNA, 18 nt, Human
acagagucuuagaacacc

SEQ ID NO: 437636 - RNA, 22 nt, Human
acaggcagggaagacacccccc

SEQ ID NO: 437637 - RNA, 20 nt, Human
accagggggccccggggcug

SEQ ID NO: 437638 - RNA, 26 nt, Human
accggcaggaaaagcacuugcuuccu

SEQ ID NO: 437639 - RNA, 19 nt, Human
accggggcguguggagcug

SEQ ID NO: 437640 - RNA, 19 nt, Human
acucagguucucuguggcc

SEQ ID NO: 437641 - RNA, 18 nt, Human
agacaggaaggggugggg

SEQ ID NO: 437642 - RNA, 22 nt, Human
agacaggaaggggugggggcag

SEQ ID NO: 437643 - RNA, 24 nt, Human
agacaggaaggggugggggcaggg

SEQ ID NO: 437644 - RNA, 25 nt, Human
agacaggaaggggugggggcagggc

SEQ ID NO: 437645 - RNA, 20 nt, Human
agagacccaagcuccugcuc

SEQ ID NO: 437646 - RNA, 21 nt, Human
agaggcuguuucccuggacag

SEQ ID NO: 437647 - RNA, 18 nt, Human
agcagggagggcguggcu

SEQ ID NO: 437648 - RNA, 20 nt, Human
agccacacagagucuuagaa

SEQ ID NO: 437649 - RNA, 24 nt, Human
agcugcaaagccaacacacaaaug

SEQ ID NO: 437650 - RNA, 19 nt, Human
aggcacgaaggcgcauggg

SEQ ID NO: 437651 - RNA, 24 nt, Human
aggcagcggugggagggggcuggg

SEQ ID NO: 437652 - RNA, 23 nt, Human
aggcagggaagacaccccccgca

SEQ ID NO: 437653 - RNA, 22 nt, Human
aggcugagucucggugaccagg

SEQ ID NO: 437654 - RNA, 20 nt, Human
agggggccccggggcuguuc

SEQ ID NO: 437655 - RNA, 21 nt, Human
agggggcuggggagagaagag

SEQ ID NO: 437656 - RNA, 19 nt, Human
agguguaccuggggcagau

SEQ ID NO: 437657 - RNA, 21 nt, Human
aguggccacuacucagacagc

SEQ ID NO: 437658 - RNA, 24 nt, Human
auaaaucuuuaauauuucuaauug

SEQ ID NO: 437659 - RNA, 22 nt, Human
augggaggaugagacuggagcc

SEQ ID NO: 437660 - RNA, 19 nt, Human
caaggaugcugcugugcac

SEQ ID NO: 437661 - RNA, 24 nt, Human
caccaggaccaaaggauauguaca

SEQ ID NO: 437662 - RNA, 26 nt, Human
caccaggaccaaaggauauguacaac

SEQ ID NO: 437663 - RNA, 22 nt, Human
caccccuccagcacauccaccc

SEQ ID NO: 437664 - RNA, 23 nt, Human
cacugcuggggcugagcagggac

SEQ ID NO: 437665 - RNA, 23 nt, Human
cagcagcugcaaagccaacacac

SEQ ID NO: 437666 - RNA, 23 nt, Human
cagcccuggcugcaggcagggcc

SEQ ID NO: 437667 - RNA, 24 nt, Human
cagccuagagcugaggaaaaccgg

SEQ ID NO: 437668 - RNA, 23 nt, Human
cagcggugggagggggcugggga

SEQ ID NO: 437669 - RNA, 18 nt, Human
caggaaggggugggggca

SEQ ID NO: 437670 - RNA, 19 nt, Human
caggcagggaagacacccc

SEQ ID NO: 437671 - RNA, 18 nt, Human
caggcccugccugugugg

SEQ ID NO: 437672 - RNA, 23 nt, Human
caggccucugugcuagcagggag

SEQ ID NO: 437673 - RNA, 23 nt, Human
cagggccucuggcaaccccagcc

SEQ ID NO: 437674 - RNA, 26 nt, Human
caggggcagaggggugauuccugcag

SEQ ID NO: 437675 - RNA, 18 nt, Human
ccacugucaccugucccc

SEQ ID NO: 437676 - RNA, 21 nt, Human
ccagcccuggcugcaggcagg

SEQ ID NO: 437677 - RNA, 19 nt, Human
ccagcgccuccaccgcacu

SEQ ID NO: 437678 - RNA, 21 nt, Human
cccaauacuguucucuagauu

SEQ ID NO: 437679 - RNA, 19 nt, Human
cccacccuucuuacccagg

SEQ ID NO: 437680 - RNA, 23 nt, Human
cccacucccacccuucuuaccca

SEQ ID NO: 437681 - RNA, 19 nt, Human
ccccaguggccacuacucu

SEQ ID NO: 437682 - RNA, 25 nt, Human
ccccuguaugcagcgccuggguccu

SEQ ID NO: 437683 - RNA, 26 nt, Human
cccgcagacaccaagccuuuuccucc

SEQ ID NO: 437684 - RNA, 21 nt, Human
cccuccagcacauccacccuu

SEQ ID NO: 437685 - RNA, 19 nt, Human
cccugcccuggcucugcug

SEQ ID NO: 437686 - RNA, 24 nt, Human
ccggccccagcuguggggugcgcc

SEQ ID NO: 437687 - RNA, 18 nt, Human
ccgggaacucagguucuc

SEQ ID NO: 437688 - RNA, 20 nt, Human
ccugcagcucgcccugcccu

SEQ ID NO: 437689 - RNA, 19 nt, Human
ccuguaugcagcgccuggg

SEQ ID NO: 437690 - RNA, 19 nt, Human
ccuguguggccacccuggu

SEQ ID NO: 437691 - RNA, 23 nt, Human
cgagagagacccaagcuccugcu

SEQ ID NO: 437692 - RNA, 20 nt, Human
cgccuggguccuuggccggg

SEQ ID NO: 437693 - RNA, 23 nt, Human
cgccuggguccuuggccgggggc

SEQ ID NO: 437694 - RNA, 22 nt, Human
cgccuguccaggccccgggagc

SEQ ID NO: 437695 - RNA, 19 nt, Human
cggcggcggcggcggcgcu

SEQ ID NO: 437696 - RNA, 20 nt, Human
cucaucugucuugaaagugg

SEQ ID NO: 437697 - RNA, 24 nt, Human
cucauugucgcggcggcggcggcg

SEQ ID NO: 437698 - RNA, 20 nt, Human
cuccagcacauccacccuuc

SEQ ID NO: 437699 - RNA, 19 nt, Human
cuccagggccgcuauuucc

SEQ ID NO: 437700 - RNA, 21 nt, Human
cucccaucuuccuguggucug

SEQ ID NO: 437701 - RNA, 25 nt, Human
cucucggccugagagcucacccacc

SEQ ID NO: 437702 - RNA, 21 nt, Human
cucugcuggcaaaggccccac

SEQ ID NO: 437703 - RNA, 20 nt, Human
cucuguggccugggcaggag

SEQ ID NO: 437704 - RNA, 20 nt, Human
cuggcaaaggccccacuccc

SEQ ID NO: 437705 - RNA, 21 nt, Human
cuggcccagugaaggcacccc

SEQ ID NO: 437706 - RNA, 18 nt, Human
cugggggaccggggcgug

SEQ ID NO: 437707 - RNA, 21 nt, Human
cuguaugcagcgccugggucc

SEQ ID NO: 437708 - RNA, 22 nt, Human
cugugaucccugguggcccagc

SEQ ID NO: 437709 - RNA, 18 nt, Human
cuguguggccacccuggu

SEQ ID NO: 437710 - RNA, 20 nt, Human
gaagagucuguacacuuuua

SEQ ID NO: 437711 - RNA, 22 nt, Human
gaagcugugguugcgguccagc

SEQ ID NO: 437712 - RNA, 21 nt, Human
gaaggcgcauggguggggaca

SEQ ID NO: 437713 - RNA, 23 nt, Human
gacaagacagaagagugagacag

SEQ ID NO: 437714 - RNA, 18 nt, Human
gagauaguuacauuacag

SEQ ID NO: 437715 - RNA, 23 nt, Human
gagcagggcucacugggcaaugg

SEQ ID NO: 437716 - RNA, 20 nt, Human
gcaagggcagcuggcaccgg

SEQ ID NO: 437717 - RNA, 28 nt, Human
gcagcagucccggccagcccucggcagc

SEQ ID NO: 437718 - RNA, 24 nt, Human
gcagcgccuggguccuuggccggg

SEQ ID NO: 437719 - RNA, 19 nt, Human
gccaccccuccagcacauc

SEQ ID NO: 437720 - RNA, 21 nt, Human
gccccacucccacccuucuua

SEQ ID NO: 437721 - RNA, 18 nt, Human
gcccugcccuggcucugc

SEQ ID NO: 437722 - RNA, 23 nt, Human
gccucuggcaaccccagcccugg

SEQ ID NO: 437723 - RNA, 24 nt, Human
gccucuggcaaccccagcccuggc

SEQ ID NO: 437724 - RNA, 21 nt, Human
gcuccugcucaucugucuuga

SEQ ID NO: 437725 - RNA, 19 nt, Human
gcugcugugcacgggcuug

SEQ ID NO: 437726 - RNA, 23 nt, Human
ggaagacaccccccgcagacacc

SEQ ID NO: 437727 - RNA, 25 nt, Human
ggcagaggggugauuccugcagcuc

SEQ ID NO: 437728 - RNA, 19 nt, Human
ggcagcggugggagggggc

SEQ ID NO: 437729 - RNA, 18 nt, Human
ggcagggccucugcuucc

SEQ ID NO: 437730 - RNA, 21 nt, Human
gggagagaagagcagggcuca

SEQ ID NO: 437731 - RNA, 19 nt, Human
gggccucuggcaaccccag

SEQ ID NO: 437732 - RNA, 24 nt, Human
gggcugggaacagacaggggccga

SEQ ID NO: 437733 - RNA, 20 nt, Human
gggcuuuguggcugaguguu

SEQ ID NO: 437734 - RNA, 21 nt, Human
ggggcugggaacagacagggg

SEQ ID NO: 437735 - RNA, 23 nt, Human
ggggugggggcagggccucugcu

SEQ ID NO: 437736 - RNA, 18 nt, Human
gucacucuacgaggcagc

SEQ ID NO: 437737 - RNA, 20 nt, Human
gucgcggcggcggcggcggc

SEQ ID NO: 437738 - RNA, 19 nt, Human
guggggugcgccccucccc

SEQ ID NO: 437739 - RNA, 19 nt, Human
uaaaaggccccuguguucc

SEQ ID NO: 437740 - RNA, 21 nt, Human
uaaaaggccccuguguuccaa

SEQ ID NO: 437741 - RNA, 26 nt, Human
uaagcuacagaacagccuagagcuga

SEQ ID NO: 437742 - RNA, 24 nt, Human
uaaggcucucggccugagagcuca

SEQ ID NO: 437743 - RNA, 20 nt, Human
uacaaaagaggggagcuggg

SEQ ID NO: 437744 - RNA, 21 nt, Human
uacagaacagccuagagcuga

SEQ ID NO: 437745 - RNA, 18 nt, Human
uaccuggggcagaugcuc

SEQ ID NO: 437746 - RNA, 21 nt, Human
uaccuggggcagaugcucugg

SEQ ID NO: 437747 - RNA, 21 nt, Human
uagaacaccaacagcuuccuc

SEQ ID NO: 437748 - RNA, 18 nt, Human
uagccuccgagcccgccu

SEQ ID NO: 437749 - RNA, 21 nt, Human
uagccucgguccuccaccccc

SEQ ID NO: 437750 - RNA, 19 nt, Human
uagguuacaucuaaaagcc

SEQ ID NO: 437751 - RNA, 22 nt, Human
ucacccagaacauggaaguuaa

SEQ ID NO: 437752 - RNA, 19 nt, Human
uccaccgcacugcuggggc

SEQ ID NO: 437753 - RNA, 21 nt, Human
uccaccgcacugcuggggcug

SEQ ID NO: 437754 - RNA, 19 nt, Human
uccaggccccgggagccuc

SEQ ID NO: 437755 - RNA, 21 nt, Human
uccaugcugagguccagcgcc

SEQ ID NO: 437756 - RNA, 19 nt, Human
ucccagagcagccacuguc

SEQ ID NO: 437757 - RNA, 22 nt, Human
ucccagagcagccacugucacc

SEQ ID NO: 437758 - RNA, 25 nt, Human
ucccagagcagccacugucaccuuu

SEQ ID NO: 437759 - RNA, 18 nt, Human
ucccuggacagucuggcu

SEQ ID NO: 437760 - RNA, 18 nt, Human
ucccugguggcccagccc

SEQ ID NO: 437761 - RNA, 21 nt, Human
ucgcccugcccuggcucugcu

SEQ ID NO: 437762 - RNA, 24 nt, Human
ucgcggcggcggcggcggcgcucc

SEQ ID NO: 437763 - RNA, 24 nt, Human
ucggugaccagggggccccggggc

SEQ ID NO: 437764 - RNA, 21 nt, Human
ucuguacauuauuacauaguu

SEQ ID NO: 437765 - RNA, 19 nt, Human
ucuuuaauauuucuaauug

SEQ ID NO: 437766 - RNA, 18 nt, Human
ugaaggcaccccaguggc

SEQ ID NO: 437767 - RNA, 19 nt, Human
ugaauuguagguuacaucu

SEQ ID NO: 437768 - RNA, 23 nt, Human
ugagacuggagccaggcccugcc

SEQ ID NO: 437769 - RNA, 26 nt, Human
ugaguguguagaaaagagagaggcug

SEQ ID NO: 437770 - RNA, 26 nt, Human
ugcaaagccaacacacaaaugccaca

SEQ ID NO: 437771 - RNA, 19 nt, Human
ugcacagccacacagaguc

SEQ ID NO: 437772 - RNA, 23 nt, Human
ugcaggcugcugcugucuuggag

SEQ ID NO: 437773 - RNA, 19 nt, Human
ugcauuuuuuccuuuucac

SEQ ID NO: 437774 - RNA, 20 nt, Human
ugcuagcagggagggcgugg

SEQ ID NO: 437775 - RNA, 19 nt, Human
ugcucugggggaccggggc

SEQ ID NO: 437776 - RNA, 22 nt, Human
ugcugcugucuuggagagggag

SEQ ID NO: 437777 - RNA, 24 nt, Human
uggagcuguagccucgguccucca

SEQ ID NO: 437778 - RNA, 19 nt, Human
uggcaaaggccccacuccc

SEQ ID NO: 437779 - RNA, 18 nt, Human
uggcaaccccagcccugg

SEQ ID NO: 437780 - RNA, 21 nt, Human
uggccaaggaugcugcugugc

SEQ ID NO: 437781 - RNA, 19 nt, Human
uggcucugcuggcaaaggc

SEQ ID NO: 437782 - RNA, 22 nt, Human
ugggacgcggugugggagcugg

SEQ ID NO: 437783 - RNA, 18 nt, Human
ugggagcuggggggcuuu

SEQ ID NO: 437784 - RNA, 24 nt, Human
ugggcaaugggaggaugagacugg

SEQ ID NO: 437785 - RNA, 18 nt, Human
uggggagagaagagcagg

SEQ ID NO: 437786 - RNA, 19 nt, Human
uggggagagaagagcaggg

SEQ ID NO: 437787 - RNA, 21 nt, Human
uggggagagaagagcagggcu

SEQ ID NO: 437788 - RNA, 26 nt, Human
uggggccucuguggcacauuccagcu

SEQ ID NO: 437789 - RNA, 19 nt, Human
uggggcugagcagggacuc

SEQ ID NO: 437790 - RNA, 27 nt, Human
uggggcugagcagggacucgugggagc

SEQ ID NO: 437791 - RNA, 27 nt, Human
uguacagaaauugcacagccacacaga

SEQ ID NO: 437792 - RNA, 20 nt, Human
uguagaaaagagagaggcug

SEQ ID NO: 437793 - RNA, 25 nt, Human
uguagaaaagagagaggcuguuucc

SEQ ID NO: 437794 - RNA, 24 nt, Human
uguaugcagcgccuggguccuugg

SEQ ID NO: 437795 - RNA, 22 nt, Human
uguguagaaaagagagaggcug

SEQ ID NO: 437796 - RNA, 24 nt, Human
uuacaucuaaaagccccuucccag

SEQ ID NO: 437797 - RNA, 21 nt, Human
uucagaaauaaaauaaaaccc

SEQ ID NO: 437798 - RNA, 23 nt, Human
uucccuggacagucuggcucccg

SEQ ID NO: 437799 - RNA, 19 nt, Human
uuccuccaugcugaggucc

SEQ ID NO: 437800 - RNA, 18 nt, Human
uucucuguggccugggca

SEQ ID NO: 437801 - RNA, 22 nt, Human
uugcacagccacacagagucuu

SEQ ID NO: 437802 - RNA, 21 nt, Human
aaacaccuuuccaucacuuuu

SEQ ID NO: 437803 - RNA, 18 nt, Human
aaagaaaggcuggcugau

SEQ ID NO: 437804 - RNA, 21 nt, Human
aaauaccagcucaaacuauga

SEQ ID NO: 437805 - RNA, 21 nt, Human
aacaccuuuccaucacuuuuu

SEQ ID NO: 437806 - RNA, 24 nt, Human
aacacuugugcacggugaaguuga

SEQ ID NO: 437807 - RNA, 20 nt, Human
aagcagcuuccaauucgugu

SEQ ID NO: 437808 - RNA, 23 nt, Human
aagccgccgcccgccagccccaa

SEQ ID NO: 437809 - RNA, 19 nt, Human
aagcugcagggcacccugc

SEQ ID NO: 437810 - RNA, 19 nt, Human
acaaaauagagccaggagc

SEQ ID NO: 437811 - RNA, 20 nt, Human
acacagcaccucaccugggu

SEQ ID NO: 437812 - RNA, 19 nt, Human
acagcgcgauuuucucaug

SEQ ID NO: 437813 - RNA, 22 nt, Human
accacauuccucgcauugcggu

SEQ ID NO: 437814 - RNA, 19 nt, Human
acgcugcccuuugaguccc

SEQ ID NO: 437815 - RNA, 18 nt, Human
acuaaccaccaaaaccuc

SEQ ID NO: 437816 - RNA, 24 nt, Human
agaaagaagacagugacaaccagg

SEQ ID NO: 437817 - RNA, 25 nt, Human
agaaagaagacagugacaaccagga

SEQ ID NO: 437818 - RNA, 22 nt, Human
agaaagaugucacuucgccuga

SEQ ID NO: 437819 - RNA, 19 nt, Human
agcagccuccgggagacca

SEQ ID NO: 437820 - RNA, 20 nt, Human
agcagccuccgggagaccaa

SEQ ID NO: 437821 - RNA, 19 nt, Human
aggaacccaaaaccguucc

SEQ ID NO: 437822 - RNA, 18 nt, Human
aggaaggggaggggcagg

SEQ ID NO: 437823 - RNA, 18 nt, Human
aggcaagcaagaaagcug

SEQ ID NO: 437824 - RNA, 20 nt, Human
aggcaagcaagaaagcuggg

SEQ ID NO: 437825 - RNA, 24 nt, Human
aggcaaggggugcuuguuccuggg

SEQ ID NO: 437826 - RNA, 25 nt, Human
aggcaaggggugcuuguuccugggg

SEQ ID NO: 437827 - RNA, 18 nt, Human
aggccacucugggcagag

SEQ ID NO: 437828 - RNA, 24 nt, Human
aggcugccaaucagaguggcccaa

SEQ ID NO: 437829 - RNA, 20 nt, Human
auaaaauaaggaaccucuga

SEQ ID NO: 437830 - RNA, 27 nt, Human
auaauaauaaaagguaaaaaacguuuc

SEQ ID NO: 437831 - RNA, 20 nt, Human
augaacacagcaccucacug

SEQ ID NO: 437832 - RNA, 21 nt, Human
auggacuugaagugacuguuc

SEQ ID NO: 437833 - RNA, 22 nt, Human
auggugggaagucugccugcaa

SEQ ID NO: 437834 - RNA, 20 nt, Human
caaaggggcacgccaagggc

SEQ ID NO: 437835 - RNA, 27 nt, Human
caaauaauuaauuaauaaaauaaggaa

SEQ ID NO: 437836 - RNA, 18 nt, Human
caagcaccaaacuguggc

SEQ ID NO: 437837 - RNA, 20 nt, Human
caaggggugcuuguuccugg

SEQ ID NO: 437838 - RNA, 19 nt, Human
caaugaaccucaaacuccu

SEQ ID NO: 437839 - RNA, 19 nt, Human
cacacaguaaaaagacauu

SEQ ID NO: 437840 - RNA, 18 nt, Human
caccaaaaccucacacag

SEQ ID NO: 437841 - RNA, 18 nt, Human
caccaccuuaaacaugaa

SEQ ID NO: 437842 - RNA, 19 nt, Human
caccacuuccugggugcag

SEQ ID NO: 437843 - RNA, 24 nt, Human
cacgugaaacaguagaaaauucaa

SEQ ID NO: 437844 - RNA, 18 nt, Human
cacuuccugggugcaguu

SEQ ID NO: 437845 - RNA, 24 nt, Human
cagacgcccugcuauggcuugggg

SEQ ID NO: 437846 - RNA, 22 nt, Human
cagcagccuccgggagaccaag

SEQ ID NO: 437847 - RNA, 22 nt, Human
cagcugccacagaggcaagggg

SEQ ID NO: 437848 - RNA, 20 nt, Human
cagcuucgacgcugcccuuu

SEQ ID NO: 437849 - RNA, 19 nt, Human
cagggcacccauuuugaaa

SEQ ID NO: 437850 - RNA, 24 nt, Human
cagggcacccugccggccaacccu

SEQ ID NO: 437851 - RNA, 20 nt, Human
cagggggacaaagggagccc

SEQ ID NO: 437852 - RNA, 22 nt, Human
cagguggacucaagcagcuucc

SEQ ID NO: 437853 - RNA, 21 nt, Human
cauccaaauucuccaagaaau

SEQ ID NO: 437854 - RNA, 20 nt, Human
ccacagaggcaaggggugcu

SEQ ID NO: 437855 - RNA, 18 nt, Human
ccaccaaaaccucacaca

SEQ ID NO: 437856 - RNA, 22 nt, Human
ccagcuccaucgcguggccacc

SEQ ID NO: 437857 - RNA, 25 nt, Human
ccagugcccauggccagccacacuc

SEQ ID NO: 437858 - RNA, 24 nt, Human
cccauggccagccacacucaugcc

SEQ ID NO: 437859 - RNA, 18 nt, Human
ccccagaggcuccuggug

SEQ ID NO: 437860 - RNA, 22 nt, Human
ccccuggcccuccuggugggcg

SEQ ID NO: 437861 - RNA, 19 nt, Human
cccgugcaccacacagcua

SEQ ID NO: 437862 - RNA, 24 nt, Human
cccugagcccgcaggggucggccc

SEQ ID NO: 437863 - RNA, 19 nt, Human
cccuggcccuccugguggg

SEQ ID NO: 437864 - RNA, 19 nt, Human
ccgccgcccgccagcccca

SEQ ID NO: 437865 - RNA, 20 nt, Human
ccggccagcuccaucgcgug

SEQ ID NO: 437866 - RNA, 22 nt, Human
ccuacaccuaaccccagcuucg

SEQ ID NO: 437867 - RNA, 21 nt, Human
ccucgcauugcggucggcacc

SEQ ID NO: 437868 - RNA, 24 nt, Human
ccugcggaggcguucaggggugac

SEQ ID NO: 437869 - RNA, 25 nt, Human
ccuggcccuccuggugguccccugg

SEQ ID NO: 437870 - RNA, 21 nt, Human
ccuugccccaguuccccgcag

SEQ ID NO: 437871 - RNA, 19 nt, Human
cgggcucaagcgccaccac

SEQ ID NO: 437872 - RNA, 18 nt, Human
cuaaccaccaaaaccuca

SEQ ID NO: 437873 - RNA, 19 nt, Human
cuaaccccagcuucgacgc

SEQ ID NO: 437874 - RNA, 22 nt, Human
cucacaacccuacaccuaaccc

SEQ ID NO: 437875 - RNA, 21 nt, Human
cuccgcuuuaaaaggcuuagg

SEQ ID NO: 437876 - RNA, 24 nt, Human
cugacccagcugguaagccgccgc

SEQ ID NO: 437877 - RNA, 21 nt, Human
cuggccccaagcagcaguaaa

SEQ ID NO: 437878 - RNA, 21 nt, Human
cuguaaagucccgugcaccac

SEQ ID NO: 437879 - RNA, 22 nt, Human
cuuccuggggguggccuccaga

SEQ ID NO: 437880 - RNA, 18 nt, Human
cuugcgggcucaagcgcc

SEQ ID NO: 437881 - RNA, 21 nt, Human
gaagaggcuguuucaaggaug

SEQ ID NO: 437882 - RNA, 23 nt, Human
gaaggcagcaaaaaucuauggag

SEQ ID NO: 437883 - RNA, 24 nt, Human
gacacaaaguccacgucaggacug

SEQ ID NO: 437884 - RNA, 24 nt, Human
gaggaaggcaauaguuuaguuuaa

SEQ ID NO: 437885 - RNA, 21 nt, Human
gcaacgccagggcauaggcac

SEQ ID NO: 437886 - RNA, 19 nt, Human
gcaaucaauucaaguucag

SEQ ID NO: 437887 - RNA, 22 nt, Human
gccaacccugaugccuggagac

SEQ ID NO: 437888 - RNA, 21 nt, Human
gcccgcaggggucggcccccu

SEQ ID NO: 437889 - RNA, 19 nt, Human
gccuccagagcugaggcca

SEQ ID NO: 437890 - RNA, 21 nt, Human
gccuggugaggaagcuggugg

SEQ ID NO: 437891 - RNA, 22 nt, Human
gcgaaaggaugcgucugacgcc

SEQ ID NO: 437892 - RNA, 24 nt, Human
gcuaaggcuccggggccuccuugc

SEQ ID NO: 437893 - RNA, 22 nt, Human
gcuacacuaaaaagacccggua

SEQ ID NO: 437894 - RNA, 20 nt, Human
gcuacugggacuggucucca

SEQ ID NO: 437895 - RNA, 19 nt, Human
gcuuuuucugcagugcugu

SEQ ID NO: 437896 - RNA, 24 nt, Human
ggaaacccaaggagucagucagug

SEQ ID NO: 437897 - RNA, 18 nt, Human
ggaaagggaagguguggc

SEQ ID NO: 437898 - RNA, 18 nt, Human
ggaaggggaggggcagga

SEQ ID NO: 437899 - RNA, 19 nt, Human
ggacaguggcccaugcucc

SEQ ID NO: 437900 - RNA, 19 nt, Human
ggacccuggccugccuguc

SEQ ID NO: 437901 - RNA, 20 nt, Human
ggacuaggccgggaggaacg

SEQ ID NO: 437902 - RNA, 22 nt, Human
ggacuggucuccaugaaucugc

SEQ ID NO: 437903 - RNA, 18 nt, Human
ggauguccuagugggaag

SEQ ID NO: 437904 - RNA, 18 nt, Human
ggcaagauggcucgcgug

SEQ ID NO: 437905 - RNA, 25 nt, Human
ggcaagcaagaaagcuucgagggcg

SEQ ID NO: 437906 - RNA, 18 nt, Human
ggcagccggggauccaag

SEQ ID NO: 437907 - RNA, 19 nt, Human
ggccauaaugacaaugaac

SEQ ID NO: 437908 - RNA, 19 nt, Human
ggcccacgugacacuuugc

SEQ ID NO: 437909 - RNA, 18 nt, Human
ggcgucacggaugcuggu

SEQ ID NO: 437910 - RNA, 25 nt, Human
gggcaggaggcccuggaauuccugc

SEQ ID NO: 437911 - RNA, 22 nt, Human
gggguggccuccagagcugagg

SEQ ID NO: 437912 - RNA, 20 nt, Human
gguaagucuggugccugggg

SEQ ID NO: 437913 - RNA, 19 nt, Human
ggugacugcuuuuucugca

SEQ ID NO: 437914 - RNA, 18 nt, Human
ggugcaguuucccuucuu

SEQ ID NO: 437915 - RNA, 20 nt, Human
guccuccggccagcuccauc

SEQ ID NO: 437916 - RNA, 28 nt, Human
gucggcccccucaccugaccuguccucc

SEQ ID NO: 437917 - RNA, 19 nt, Human
gucuccaugaaucugccug

SEQ ID NO: 437918 - RNA, 21 nt, Human
gugaaacaguagaaaauucaa

SEQ ID NO: 437919 - RNA, 21 nt, Human
gugaauuacaaaccuggguuu

SEQ ID NO: 437920 - RNA, 24 nt, Human
gugacucagcagauccacacuggu

SEQ ID NO: 437921 - RNA, 24 nt, Human
gugcagcugaggccacucugggcc

SEQ ID NO: 437922 - RNA, 20 nt, Human
guucccggcagauggcuuug

SEQ ID NO: 437923 - RNA, 18 nt, Human
guuuucccgccaucucuu

SEQ ID NO: 437924 - RNA, 22 nt, Human
uaagauacaggggaagguuaaa

SEQ ID NO: 437925 - RNA, 19 nt, Human
uacaccuaaccccagcuuc

SEQ ID NO: 437926 - RNA, 24 nt, Human
uacacuaaaaagacccgguaacac

SEQ ID NO: 437927 - RNA, 24 nt, Human
uacaggggaagguuaagccuggca

SEQ ID NO: 437928 - RNA, 19 nt, Human
uacgccaagacacaaaguc

SEQ ID NO: 437929 - RNA, 20 nt, Human
uagaauggaaagagcccuga

SEQ ID NO: 437930 - RNA, 23 nt, Human
uaggcacagaggggcgagauggg

SEQ ID NO: 437931 - RNA, 26 nt, Human
uauggcaccucuguauucuaugcucc

SEQ ID NO: 437932 - RNA, 18 nt, Human
ucaaaggacugcccuggc

SEQ ID NO: 437933 - RNA, 19 nt, Human
ucacgaauagaggugacug

SEQ ID NO: 437934 - RNA, 21 nt, Human
ucagaauucuggcaagauggc

SEQ ID NO: 437935 - RNA, 19 nt, Human
ucaggagaggcagcacggg

SEQ ID NO: 437936 - RNA, 24 nt, Human
ucaugaacuacgggcgaaaggaug

SEQ ID NO: 437937 - RNA, 19 nt, Human
uccaugagggaacaaauuc

SEQ ID NO: 437938 - RNA, 20 nt, Human
uccaugagggaacaaauucc

SEQ ID NO: 437939 - RNA, 20 nt, Human
uccccgcccgaccugccugg

SEQ ID NO: 437940 - RNA, 19 nt, Human
ucccgugcacaagcaccaa

SEQ ID NO: 437941 - RNA, 24 nt, Human
uccgggagaccaagaaguuaaucu

SEQ ID NO: 437942 - RNA, 25 nt, Human
uccggggccuccuugccuggugagg

SEQ ID NO: 437943 - RNA, 23 nt, Human
uccuggggguggccuccagagcu

SEQ ID NO: 437944 - RNA, 20 nt, Human
uccugggugcaguuucccuu

SEQ ID NO: 437945 - RNA, 22 nt, Human
uccuuuaugccuuaggcaucca

SEQ ID NO: 437946 - RNA, 22 nt, Human
ucgagcaccaaucagcugugcc

SEQ ID NO: 437947 - RNA, 18 nt, Human
ucgcagcugccacagagg

SEQ ID NO: 437948 - RNA, 22 nt, Human
ucgcugcugcccaccugugcug

SEQ ID NO: 437949 - RNA, 20 nt, Human
ucuaugaaaaaguuggucag

SEQ ID NO: 437950 - RNA, 23 nt, Human
ucuccggggacccuggccugccc

SEQ ID NO: 437951 - RNA, 18 nt, Human
ucuggaagaccaaagccg

SEQ ID NO: 437952 - RNA, 18 nt, Human
ugaaacaguagaaaauuc

SEQ ID NO: 437953 - RNA, 18 nt, Human
ugaaacauugccacgacc

SEQ ID NO: 437954 - RNA, 20 nt, Human
ugaaaucagacacacucgca

SEQ ID NO: 437955 - RNA, 21 nt, Human
ugacaagcuggaggaagggga

SEQ ID NO: 437956 - RNA, 25 nt, Human
ugacaagcuggaggaaggggagggg

SEQ ID NO: 437957 - RNA, 19 nt, Human
ugacccgaaggcagcaaaa

SEQ ID NO: 437958 - RNA, 27 nt, Human
ugagcccgcaggggucgggaccaaagu

SEQ ID NO: 437959 - RNA, 24 nt, Human
ugauggcucaggaacccaaaaccg

SEQ ID NO: 437960 - RNA, 20 nt, Human
ugcacagaaggcaagcaaga

SEQ ID NO: 437961 - RNA, 20 nt, Human
ugcaucagaggggaaagaaa

SEQ ID NO: 437962 - RNA, 18 nt, Human
ugcccaggucagggggac

SEQ ID NO: 437963 - RNA, 25 nt, Human
ugccccaguuccccgcagauucugg

SEQ ID NO: 437964 - RNA, 19 nt, Human
ugcccuggccccaagcagc

SEQ ID NO: 437965 - RNA, 19 nt, Human
ugccuggugaggaagcugg

SEQ ID NO: 437966 - RNA, 22 nt, Human
ugccuggugaggaagcugguga

SEQ ID NO: 437967 - RNA, 21 nt, Human
ugccugugcccaggucagggg

SEQ ID NO: 437968 - RNA, 23 nt, Human
ugcgaagaaauccggcuucuccg

SEQ ID NO: 437969 - RNA, 18 nt, Human
ugcuguuucuuugccugu

SEQ ID NO: 437970 - RNA, 19 nt, Human
ugcuuggggaaggggcggu

SEQ ID NO: 437971 - RNA, 19 nt, Human
uggacaguggacagaagga

SEQ ID NO: 437972 - RNA, 18 nt, Human
uggaggaaggggaggggc

SEQ ID NO: 437973 - RNA, 20 nt, Human
uggaggaaggggaggggcag

SEQ ID NO: 437974 - RNA, 21 nt, Human
uggcagcuuuucaugucuugg

SEQ ID NO: 437975 - RNA, 19 nt, Human
uggcagugcagcggacggc

SEQ ID NO: 437976 - RNA, 23 nt, Human
uggccauaaugacaaugaaccuc

SEQ ID NO: 437977 - RNA, 22 nt, Human
uggcccaagagcgucaaccagg

SEQ ID NO: 437978 - RNA, 20 nt, Human
ugggaaagaggcccuacuuu

SEQ ID NO: 437979 - RNA, 20 nt, Human
ugggagaccgcuuuccgcuu

SEQ ID NO: 437980 - RNA, 19 nt, Human
ugggaugaguaagauacag

SEQ ID NO: 437981 - RNA, 19 nt, Human
ugggcagagcuuccugccg

SEQ ID NO: 437982 - RNA, 23 nt, Human
ugggccugggggacaggcacugg

SEQ ID NO: 437983 - RNA, 20 nt, Human
uggggguggccuccagagcu

SEQ ID NO: 437984 - RNA, 21 nt, Human
ugucagaauucuggcaagaug

SEQ ID NO: 437985 - RNA, 21 nt, Human
uguccuagugggaagcuggcg

SEQ ID NO: 437986 - RNA, 25 nt, Human
uguuauaguuccaugagggaacaaa

SEQ ID NO: 437987 - RNA, 24 nt, Human
uuagaaauggccaguaauaauucu

SEQ ID NO: 437988 - RNA, 24 nt, Human
uuagugaaguauuaaaacccucug

SEQ ID NO: 437989 - RNA, 19 nt, Human
uucaaacuaugucauggac

SEQ ID NO: 437990 - RNA, 20 nt, Human
uucaaggauggacauccacc

SEQ ID NO: 437991 - RNA, 20 nt, Human
uucccagaagaggcuguuuc

SEQ ID NO: 437992 - RNA, 19 nt, Human
uuccuggggguggccucca

SEQ ID NO: 437993 - RNA, 20 nt, Human
uuccugggugcaguuucccu

SEQ ID NO: 437994 - RNA, 21 nt, Human
uucgccugauagcauccuuuc

SEQ ID NO: 437995 - RNA, 23 nt, Human
uucuggacaguggacagaaggaa

SEQ ID NO: 437996 - RNA, 19 nt, Human
uugagauuuucuggaagac

SEQ ID NO: 437997 - RNA, 22 nt, Human
uugucuauuuagaaauggccag

SEQ ID NO: 437998 - RNA, 20 nt, Human
uuuuuuuuuuuuuuuggggg

SEQ ID NO: 437999 - RNA, 23 nt, Human
aaaaaaucaaagcaguacaagua

SEQ ID NO: 438000 - RNA, 27 nt, Human
aaacaguaccaacaacagagauuuuaa

SEQ ID NO: 438001 - RNA, 25 nt, Human
aaacaugcugaaagaaacugaugga

SEQ ID NO: 438002 - RNA, 21 nt, Human
aagcgauucuccugccucagc

SEQ ID NO: 438003 - RNA, 24 nt, Human
aaucaaagcaguacaaguacuccu

SEQ ID NO: 438004 - RNA, 24 nt, Human
accauguugggcaggcugaucuug

SEQ ID NO: 438005 - RNA, 18 nt, Human
acgagguuucaccauguu

SEQ ID NO: 438006 - RNA, 20 nt, Human
acgagguuucaccauguugg

SEQ ID NO: 438007 - RNA, 25 nt, Human
acugcacuccagccugggugacaag

SEQ ID NO: 438008 - RNA, 19 nt, Human
acugcagccuccgcuuccu

SEQ ID NO: 438009 - RNA, 19 nt, Human
acuguguugcccagggugg

SEQ ID NO: 438010 - RNA, 18 nt, Human
agaaaauccaacaaacgc

SEQ ID NO: 438011 - RNA, 26 nt, Human
agagaggacaggcaugggagugggga

SEQ ID NO: 438012 - RNA, 21 nt, Human
agaggacaggcaugggagugg

SEQ ID NO: 438013 - RNA, 22 nt, Human
agaucgggccacugcacuccag

SEQ ID NO: 438014 - RNA, 25 nt, Human
agccaaaaacaaacaguaccaacaa

SEQ ID NO: 438015 - RNA, 21 nt, Human
agccugggugacaagcaaaac

SEQ ID NO: 438016 - RNA, 23 nt, Human
agccugggugacaagcaaaacuc

SEQ ID NO: 438017 - RNA, 24 nt, Human
agcgauucuccugccucagccucc

SEQ ID NO: 438018 - RNA, 20 nt, Human
aggccugggauuacaggcgu

SEQ ID NO: 438019 - RNA, 22 nt, Human
aggccugggauuacaggcguga

SEQ ID NO: 438020 - RNA, 24 nt, Human
agugcagugacacgaucucggcuc

SEQ ID NO: 438021 - RNA, 24 nt, Human
aucgggccacugcacuccagccug

SEQ ID NO: 438022 - RNA, 22 nt, Human
auggaaacaugcugaaagaaac

SEQ ID NO: 438023 - RNA, 23 nt, Human
caaaaaaaaaaaauguuuaaaag

SEQ ID NO: 438024 - RNA, 18 nt, Human
caaaacucuaucucaaaa

SEQ ID NO: 438025 - RNA, 23 nt, Human
caaaacucuaucucaaaaaaaaa

SEQ ID NO: 438026 - RNA, 19 nt, Human
caccacaccacgucuggcu

SEQ ID NO: 438027 - RNA, 21 nt, Human
caccacgucuggcuaaucuuu

SEQ ID NO: 438028 - RNA, 23 nt, Human
caccauguugggcaggcugaucu

SEQ ID NO: 438029 - RNA, 24 nt, Human
caccauguugggcaggcugaucuu

SEQ ID NO: 438030 - RNA, 20 nt, Human
cacuccagccugggugacaa

SEQ ID NO: 438031 - RNA, 21 nt, Human
cacuccagccugggugacaag

SEQ ID NO: 438032 - RNA, 19 nt, Human
cacugcacuccagccuggg

SEQ ID NO: 438033 - RNA, 19 nt, Human
cacugcacuccagccuggg

SEQ ID NO: 438034 - RNA, 19 nt, Human
cacugcacuccagccuggg

SEQ ID NO: 438035 - RNA, 20 nt, Human
cacugcacuccagccugggg

SEQ ID NO: 438036 - RNA, 22 nt, Human
cacugcacuccagccuggguga

SEQ ID NO: 438037 - RNA, 24 nt, Human
cacugcacuccagccugggugaca

SEQ ID NO: 438038 - RNA, 25 nt, Human
cacugcacuccagccugggugacaa

SEQ ID NO: 438039 - RNA, 19 nt, Human
cagccuccgcuuccugggc

SEQ ID NO: 438040 - RNA, 23 nt, Human
cagccuccgcuuccugggcuuaa

SEQ ID NO: 438041 - RNA, 23 nt, Human
caguuggguuuucuuucucaacu

SEQ ID NO: 438042 - RNA, 22 nt, Human
ccaacagccaaaaacaaacagu

SEQ ID NO: 438043 - RNA, 18 nt, Human
ccacucacuccagccaag

SEQ ID NO: 438044 - RNA, 19 nt, Human
ccacucacuccagccaaga

SEQ ID NO: 438045 - RNA, 20 nt, Human
ccacucacuccagccaagau

SEQ ID NO: 438046 - RNA, 20 nt, Human
ccacugcacuccagccuggg

SEQ ID NO: 438047 - RNA, 20 nt, Human
ccacugcacuccagccuggg

SEQ ID NO: 438048 - RNA, 20 nt, Human
ccacugcacuccagccuggg

SEQ ID NO: 438049 - RNA, 21 nt, Human
ccacugcacuccagccugggu

SEQ ID NO: 438050 - RNA, 21 nt, Human
ccacugcacuccagccugggu

SEQ ID NO: 438051 - RNA, 23 nt, Human
ccacugcacuccagccuggguga

SEQ ID NO: 438052 - RNA, 24 nt, Human
ccacugcacuccagccugggugac

SEQ ID NO: 438053 - RNA, 24 nt, Human
cccaaguaguugggacaaugggug

SEQ ID NO: 438054 - RNA, 23 nt, Human
ccuaggccugggauuacaggcgu

SEQ ID NO: 438055 - RNA, 19 nt, Human
ccucacuuccccuuuaucc

SEQ ID NO: 438056 - RNA, 20 nt, Human
cuaggccugggauuacaggc

SEQ ID NO: 438057 - RNA, 24 nt, Human
cucaagugaucuucccgccuaggc

SEQ ID NO: 438058 - RNA, 24 nt, Human
cucacugcagccuccgcuuccugg

SEQ ID NO: 438059 - RNA, 24 nt, Human
cucagccucccaaguaguugggac

SEQ ID NO: 438060 - RNA, 19 nt, Human
cucuaucucaaaaaaaaaa

SEQ ID NO: 438061 - RNA, 20 nt, Human
cugaugcucacauucuuugc

SEQ ID NO: 438062 - RNA, 23 nt, Human
cugcagccuccgcuuccugggcu

SEQ ID NO: 438063 - RNA, 21 nt, Human
cugccucagccucccaaguag

SEQ ID NO: 438064 - RNA, 20 nt, Human
cugggauuacaggcgugagc

SEQ ID NO: 438065 - RNA, 24 nt, Human
cuuaagcgauucuccugccucagc

SEQ ID NO: 438066 - RNA, 24 nt, Human
cuucacagccagcaaugacacuuu

SEQ ID NO: 438067 - RNA, 24 nt, Human
cuuccugggcuuaagcgauucucc

SEQ ID NO: 438068 - RNA, 20 nt, Human
cuuggcauaaacucuuuagu

SEQ ID NO: 438069 - RNA, 18 nt, Human
gauuacaggcgugagcua

SEQ ID NO: 438070 - RNA, 22 nt, Human
gauuacaggcgugagcuaagau

SEQ ID NO: 438071 - RNA, 19 nt, Human
gccacugcacuccagccug

SEQ ID NO: 438072 - RNA, 24 nt, Human
gccacugcacuccagccuggguga

SEQ ID NO: 438073 - RNA, 24 nt, Human
gcgauucuccugccucagccuccc

SEQ ID NO: 438074 - RNA, 20 nt, Human
gcggaccccugugucagccu

SEQ ID NO: 438075 - RNA, 18 nt, Human
gcugaaagaaacugaugg

SEQ ID NO: 438076 - RNA, 21 nt, Human
ggaccccugugucaggacccu

SEQ ID NO: 438077 - RNA, 24 nt, Human
ggcugaucuugaacuccugaucuc

SEQ ID NO: 438078 - RNA, 24 nt, Human
gggaaucuuacuguguugcccagg

SEQ ID NO: 438079 - RNA, 22 nt, Human
gggaguggggaauaaccaaagg

SEQ ID NO: 438080 - RNA, 21 nt, Human
gggccugggucugcggacccc

SEQ ID NO: 438081 - RNA, 23 nt, Human
gguggagugcagugacacgaucu

SEQ ID NO: 438082 - RNA, 21 nt, Human
uaaaaggaagauauagaaaua

SEQ ID NO: 438083 - RNA, 27 nt, Human
uaagcgauucuccugccucagccuccc

SEQ ID NO: 438084 - RNA, 27 nt, Human
uaaucuuuuuuguauuuuuaguagaga

SEQ ID NO: 438085 - RNA, 20 nt, Human
uacuguguugcccagggugg

SEQ ID NO: 438086 - RNA, 22 nt, Human
uagagacgagguuucaccaugu

SEQ ID NO: 438087 - RNA, 23 nt, Human
uaggccugggauuacaggcguga

SEQ ID NO: 438088 - RNA, 24 nt, Human
uaguagagacgagguuucaccaug

SEQ ID NO: 438089 - RNA, 26 nt, Human
uaguagagacgagguuucaccauguu

SEQ ID NO: 438090 - RNA, 20 nt, Human
ucaaaggaaaaaaaaucaaa

SEQ ID NO: 438091 - RNA, 24 nt, Human
ucacugcagccuccgcuuccuggg

SEQ ID NO: 438092 - RNA, 22 nt, Human
ucauaaguucuucuugagaacu

SEQ ID NO: 438093 - RNA, 23 nt, Human
uccaaguuccuuagaaauguugc

SEQ ID NO: 438094 - RNA, 21 nt, Human
uccagagaaaauccaacaaac

SEQ ID NO: 438095 - RNA, 24 nt, Human
ucccaaguaguugggacaaugggu

SEQ ID NO: 438096 - RNA, 23 nt, Human
uccucacuuccccuuuauccucc

SEQ ID NO: 438097 - RNA, 20 nt, Human
uccugggcuuaagcgauucu

SEQ ID NO: 438098 - RNA, 21 nt, Human
uccugggcuuaagcgauucuc

SEQ ID NO: 438099 - RNA, 24 nt, Human
uccugggcuuaagcgauucuccug

SEQ ID NO: 438100 - RNA, 22 nt, Human
uccuuuuuuuuucccccaauua

SEQ ID NO: 438101 - RNA, 20 nt, Human
ucuaucucaaaaaaaaaaaa

SEQ ID NO: 438102 - RNA, 19 nt, Human
ucuccugccucagccuccc

SEQ ID NO: 438103 - RNA, 20 nt, Human
ucuuacuguguugcccaggg

SEQ ID NO: 438104 - RNA, 24 nt, Human
ucuuacuguguugcccagggugga

SEQ ID NO: 438105 - RNA, 21 nt, Human
ucuugaacuccugaucucaag

SEQ ID NO: 438106 - RNA, 25 nt, Human
ugacaagcaaaacucuaucucaaaa

SEQ ID NO: 438107 - RNA, 24 nt, Human
ugaucucaagugaucuucccgccu

SEQ ID NO: 438108 - RNA, 25 nt, Human
ugaugcucacauucuuugcaguggg

SEQ ID NO: 438109 - RNA, 20 nt, Human
ugauggaaugaggggccugg

SEQ ID NO: 438110 - RNA, 22 nt, Human
ugcagugacacgaucucggcuc

SEQ ID NO: 438111 - RNA, 24 nt, Human
ugccucagccucccaaguaguugg

SEQ ID NO: 438112 - RNA, 23 nt, Human
uggagugcagugacacgaucucg

SEQ ID NO: 438113 - RNA, 24 nt, Human
uggagugcagugacacgaucucgg

SEQ ID NO: 438114 - RNA, 19 nt, Human
ugggaguggggaauaacca

SEQ ID NO: 438115 - RNA, 18 nt, Human
ugggauuacaggcgugag

SEQ ID NO: 438116 - RNA, 19 nt, Human
ugggauuacaggcgugagc

SEQ ID NO: 438117 - RNA, 19 nt, Human
ugggauuacaggcgugagc

SEQ ID NO: 438118 - RNA, 19 nt, Human
ugggauuacaggcgugagc

SEQ ID NO: 438119 - RNA, 19 nt, Human
ugggauuacaggcgugagc

SEQ ID NO: 438120 - RNA, 21 nt, Human
ugggauuacaggcgugagcua

SEQ ID NO: 438121 - RNA, 25 nt, Human
ugggauuacaggcgugagcuaagau

SEQ ID NO: 438122 - RNA, 24 nt, Human
ugggcaggcugaucuugaacuccu

SEQ ID NO: 438123 - RNA, 19 nt, Human
ugucuugaagagcacaaga

SEQ ID NO: 438124 - RNA, 21 nt, Human
uguugcccaggguggagugca

SEQ ID NO: 438125 - RNA, 20 nt, Human
uguugggcaggcugaucuug

SEQ ID NO: 438126 - RNA, 24 nt, Human
uuaguagagacgagguuucaccau

SEQ ID NO: 438127 - RNA, 24 nt, Human
uucaaaauaugaaaacauggaaac

SEQ ID NO: 438128 - RNA, 20 nt, Human
uugaaagaaauucuccucac

SEQ ID NO: 438129 - RNA, 24 nt, Human
uugagagggaaucuuacuguguug

SEQ ID NO: 438130 - RNA, 18 nt, Human
uugcccaggguggagugc

SEQ ID NO: 438131 - RNA, 21 nt, Human
uuucaccauguugggcaggcu

SEQ ID NO: 438132 - RNA, 21 nt, Human
uuucuuggcauaaacucuuua

SEQ ID NO: 438133 - RNA, 24 nt, Human
uuuuuaguagagacgagguuucac

SEQ ID NO: 438134 - RNA, 19 nt, Human
uuuuucuucuuaauguggu

SEQ ID NO: 438135 - RNA, 21 nt, Human
uuuuuguauuuuuaguagaga

SEQ ID NO: 438136 - RNA, 21 nt, Human
uuuuuuguauuuuuaguagag

SEQ ID NO: 438137 - RNA, 24 nt, Human
uuuuuuguauuuuuaguagagacg

SEQ ID NO: 438138 - RNA, 23 nt, Human
uuuuuuuuucuugagagggaauc

SEQ ID NO: 438139 - RNA, 18 nt, Human
uuuuuuuuuuuuuucuug

SEQ ID NO: 438140 - RNA, 24 nt, Human
uuuuuuuuuuuuuucuugagaggg

SEQ ID NO: 438141 - RNA, 25 nt, Human
uuuuuuuuuuuuuuuucuugagagg

SEQ ID NO: 438142 - RNA, 21 nt, Human
aaagaaauaaauuaaaagccc

SEQ ID NO: 438143 - RNA, 21 nt, Human
aaagaaauaaauuaaaagccc

SEQ ID NO: 438144 - RNA, 19 nt, Human
aaagcccuccuauccccuc

SEQ ID NO: 438145 - RNA, 19 nt, Human
aaagcccuccuauccccuc

SEQ ID NO: 438146 - RNA, 21 nt, Human
aaagcccuccuauccccucca

SEQ ID NO: 438147 - RNA, 21 nt, Human
aaagcccuccuauccccucca

SEQ ID NO: 438148 - RNA, 25 nt, Human
aacagaaaaagaaauaaauuaaaag

SEQ ID NO: 438149 - RNA, 25 nt, Human
aacagaaaaagaaauaaauuaaaag

SEQ ID NO: 438150 - RNA, 22 nt, Human
aaccacgcaaaacuggguccca

SEQ ID NO: 438151 - RNA, 22 nt, Human
aaccacgcaaaacuggguccca

SEQ ID NO: 438152 - RNA, 26 nt, Human
aacuggcucagagagggggaagccuc

SEQ ID NO: 438153 - RNA, 26 nt, Human
aacuggcucagagagggggaagccuc

SEQ ID NO: 438154 - RNA, 24 nt, Human
aagcucccaggaugagccugggag

SEQ ID NO: 438155 - RNA, 21 nt, Human
aaggguccagcccccacugac

SEQ ID NO: 438156 - RNA, 21 nt, Human
aaggguccagcccccacugac

SEQ ID NO: 438157 - RNA, 22 nt, Human
acccugggcaucugggcaaggg

SEQ ID NO: 438158 - RNA, 22 nt, Human
acccugggcaucugggcaaggg

SEQ ID NO: 438159 - RNA, 19 nt, Human
agaaauguggagacugaac

SEQ ID NO: 438160 - RNA, 19 nt, Human
agaaauguggagacugaac

SEQ ID NO: 438161 - RNA, 18 nt, Human
agacaguaggaggugggg

SEQ ID NO: 438162 - RNA, 24 nt, Human
agaggagaauaaguggggagaggg

SEQ ID NO: 438163 - RNA, 18 nt, Human
agauggucagcagggcug

SEQ ID NO: 438164 - RNA, 22 nt, Human
agcucccaggaugagccuggga

SEQ ID NO: 438165 - RNA, 23 nt, Human
aggaagaaaugaaaacuggcuca

SEQ ID NO: 438166 - RNA, 23 nt, Human
aggaagaaaugaaaacuggcuca

SEQ ID NO: 438167 - RNA, 26 nt, Human
aggaagaaaugaaaacuggcucagag

SEQ ID NO: 438168 - RNA, 26 nt, Human
aggaagaaaugaaaacuggcucagag

SEQ ID NO: 438169 - RNA, 18 nt, Human
aggaagauggggacagau

SEQ ID NO: 438170 - RNA, 22 nt, Human
aggaggugggggucaagagugg

SEQ ID NO: 438171 - RNA, 23 nt, Human
aggcugcggcagcggugguggcg

SEQ ID NO: 438172 - RNA, 19 nt, Human
aggggagacaaggaagagg

SEQ ID NO: 438173 - RNA, 25 nt, Human
agggggcaggaguggcgcuguaucc

SEQ ID NO: 438174 - RNA, 20 nt, Human
aguaggaggugggggucaag

SEQ ID NO: 438175 - RNA, 21 nt, Human
aguggcuaaugccaccaggaa

SEQ ID NO: 438176 - RNA, 21 nt, Human
aguggcuaaugccaccaggaa

SEQ ID NO: 438177 - RNA, 18 nt, Human
aguggggagaggggagac

SEQ ID NO: 438178 - RNA, 22 nt, Human
auaaaaaccaaccacgcaaaac

SEQ ID NO: 438179 - RNA, 23 nt, Human
auaaaaaccaaccacgcaaaacu

SEQ ID NO: 438180 - RNA, 23 nt, Human
auagcgguaggaauggugggggg

SEQ ID NO: 438181 - RNA, 22 nt, Human
caaaacugggucccacccucuc

SEQ ID NO: 438182 - RNA, 22 nt, Human
caaaacugggucccacccucuc

SEQ ID NO: 438183 - RNA, 21 nt, Human
cacauaggaagagacuccacu

SEQ ID NO: 438184 - RNA, 24 nt, Human
cacauucacuucagaaguugaaga

SEQ ID NO: 438185 - RNA, 26 nt, Human
cacccucccucccucccuuucugcug

SEQ ID NO: 438186 - RNA, 21 nt, Human
cacccucuccuuuugcuccca

SEQ ID NO: 438187 - RNA, 21 nt, Human
cacccucuccuuuugcuccca

SEQ ID NO: 438188 - RNA, 20 nt, Human
cacgacccugggcaucuggg

SEQ ID NO: 438189 - RNA, 20 nt, Human
cacgacccugggcaucuggg

SEQ ID NO: 438190 - RNA, 24 nt, Human
cacgacccugggcaucugggcaag

SEQ ID NO: 438191 - RNA, 24 nt, Human
cacgacccugggcaucugggcaag

SEQ ID NO: 438192 - RNA, 18 nt, Human
cagcacccucccucccuc

SEQ ID NO: 438193 - RNA, 21 nt, Human
cagccagagggcgagaagucc

SEQ ID NO: 438194 - RNA, 21 nt, Human
cagccagagggcgagaagucc

SEQ ID NO: 438195 - RNA, 23 nt, Human
ccaggguucguuccuuuccccaa

SEQ ID NO: 438196 - RNA, 23 nt, Human
ccaggguucguuccuuuccccaa

SEQ ID NO: 438197 - RNA, 19 nt, Human
cccaacgccugcugacuuc

SEQ ID NO: 438198 - RNA, 22 nt, Human
cccacagacaagacaguaggag

SEQ ID NO: 438199 - RNA, 19 nt, Human
ccccaguugugggaacagg

SEQ ID NO: 438200 - RNA, 19 nt, Human
ccccaguugugggaacagg

SEQ ID NO: 438201 - RNA, 22 nt, Human
cccccagcacccucccucccuc

SEQ ID NO: 438202 - RNA, 18 nt, Human
cccccgccaccccucccc

SEQ ID NO: 438203 - RNA, 21 nt, Human
cccccgccaccccuccccaac

SEQ ID NO: 438204 - RNA, 25 nt, Human
ccccgccaccccuccccaacgccug

SEQ ID NO: 438205 - RNA, 23 nt, Human
ccccuccagccaggguucguucc

SEQ ID NO: 438206 - RNA, 20 nt, Human
cccgccaccccuccccaacg

SEQ ID NO: 438207 - RNA, 22 nt, Human
cccucccucccuuucugcuguc

SEQ ID NO: 438208 - RNA, 19 nt, Human
cccugcuucagggcccacu

SEQ ID NO: 438209 - RNA, 21 nt, Human
cccugggcaucugggcaaggg

SEQ ID NO: 438210 - RNA, 21 nt, Human
cccugggcaucugggcaaggg

SEQ ID NO: 438211 - RNA, 18 nt, Human
ccucagagggguaggggg

SEQ ID NO: 438212 - RNA, 21 nt, Human
ccucuccuuuugcucccagcc

SEQ ID NO: 438213 - RNA, 21 nt, Human
ccucuccuuuugcucccagcc

SEQ ID NO: 438214 - RNA, 19 nt, Human
cggcagcggugguggcgga

SEQ ID NO: 438215 - RNA, 21 nt, Human
cucacaaauggaugaguccau

SEQ ID NO: 438216 - RNA, 21 nt, Human
cucacaaauggaugaguccau

SEQ ID NO: 438217 - RNA, 19 nt, Human
cucccagccuaccucccca

SEQ ID NO: 438218 - RNA, 19 nt, Human
cucccagccuaccucccca

SEQ ID NO: 438219 - RNA, 20 nt, Human
cuccccagggggcagaaguu

SEQ ID NO: 438220 - RNA, 20 nt, Human
cuccccagggggcagaaguu

SEQ ID NO: 438221 - RNA, 19 nt, Human
cucucucucuuuauuuuca

SEQ ID NO: 438222 - RNA, 19 nt, Human
cucucucucuuuauuuuca

SEQ ID NO: 438223 - RNA, 22 nt, Human
cugcugucucucugagggcugg

SEQ ID NO: 438224 - RNA, 23 nt, Human
cugcugucucucugagggcuggg

SEQ ID NO: 438225 - RNA, 24 nt, Human
cuggccaccuaaccaccauuuucc

SEQ ID NO: 438226 - RNA, 21 nt, Human
cuggcccccuccccagccagg

SEQ ID NO: 438227 - RNA, 18 nt, Human
cuggcucagagaggggga

SEQ ID NO: 438228 - RNA, 18 nt, Human
cuggcucagagaggggga

SEQ ID NO: 438229 - RNA, 20 nt, Human
gaagauggggacagauggga

SEQ ID NO: 438230 - RNA, 22 nt, Human
gacaggaggcuacacugggagg

SEQ ID NO: 438231 - RNA, 22 nt, Human
gagaggggagacaaggaagagg

SEQ ID NO: 438232 - RNA, 23 nt, Human
gagauggucagcagggcugcagg

SEQ ID NO: 438233 - RNA, 24 nt, Human
gagauggugcagcagggcugcagg

SEQ ID NO: 438234 - RNA, 18 nt, Human
gaggaagauggggacaga

SEQ ID NO: 438235 - RNA, 19 nt, Human
gaggaagauggggacagau

SEQ ID NO: 438236 - RNA, 21 nt, Human
gaggagaauaaguggggagag

SEQ ID NO: 438237 - RNA, 23 nt, Human
gagggcuggggcugcugccgccg

SEQ ID NO: 438238 - RNA, 24 nt, Human
gagggggaggcaacugucccacag

SEQ ID NO: 438239 - RNA, 23 nt, Human
gaggguuuggcccugcuucaggg

SEQ ID NO: 438240 - RNA, 24 nt, Human
gagugcuucagguaucagcuucca

SEQ ID NO: 438241 - RNA, 24 nt, Human
gagugcuucagguaucagcuucca

SEQ ID NO: 438242 - RNA, 24 nt, Human
gaguggcuaaugccaccaggaaga

SEQ ID NO: 438243 - RNA, 24 nt, Human
gaguggcuaaugccaccaggaaga

SEQ ID NO: 438244 - RNA, 20 nt, Human
gauggggacagaugggagga

SEQ ID NO: 438245 - RNA, 23 nt, Human
gcagcagggcugcagggggcugg

SEQ ID NO: 438246 - RNA, 23 nt, Human
gcuacacugggagggaaggugaa

SEQ ID NO: 438247 - RNA, 23 nt, Human
gcuacacugggagggaaggugaa

SEQ ID NO: 438248 - RNA, 24 nt, Human
gcucagagagggggaagccucaac

SEQ ID NO: 438249 - RNA, 24 nt, Human
gcucagagagggggaagccucaac

SEQ ID NO: 438250 - RNA, 18 nt, Human
gcucccagccuaccuccc

SEQ ID NO: 438251 - RNA, 24 nt, Human
gcugagucacuggagaugaggggg

SEQ ID NO: 438252 - RNA, 18 nt, Human
ggagaggggagacaagga

SEQ ID NO: 438253 - RNA, 24 nt, Human
ggagugagaggcagggaguggcua

SEQ ID NO: 438254 - RNA, 24 nt, Human
ggagugagaggcagggaguggcua

SEQ ID NO: 438255 - RNA, 21 nt, Human
ggauggggccaagagggggca

SEQ ID NO: 438256 - RNA, 21 nt, Human
ggcuaaugccaccaggaagaa

SEQ ID NO: 438257 - RNA, 21 nt, Human
ggcuaaugccaccaggaagaa

SEQ ID NO: 438258 - RNA, 18 nt, Human
gggacagaugggaggaga

SEQ ID NO: 438259 - RNA, 18 nt, Human
gggagaggggagacaagg

SEQ ID NO: 438260 - RNA, 23 nt, Human
gggaggaagauggggacagaugg

SEQ ID NO: 438261 - RNA, 22 nt, Human
ggggacagaugggaggagagcu

SEQ ID NO: 438262 - RNA, 21 nt, Human
ggggagaggggagacaaggga

SEQ ID NO: 438263 - RNA, 20 nt, Human
gggguagggggccugggggg

SEQ ID NO: 438264 - RNA, 19 nt, Human
ggguagggggccugggggg

SEQ ID NO: 438265 - RNA, 19 nt, Human
ggucagcagggcugcaggg

SEQ ID NO: 438266 - RNA, 18 nt, Human
ggugagauggugcagcag

SEQ ID NO: 438267 - RNA, 21 nt, Human
ggugcagcagggcugcagggg

SEQ ID NO: 438268 - RNA, 19 nt, Human
guaucagcuuccagccaga

SEQ ID NO: 438269 - RNA, 19 nt, Human
guaucagcuuccagccaga

SEQ ID NO: 438270 - RNA, 22 nt, Human
gugcagcagggcugcagggggc

SEQ ID NO: 438271 - RNA, 19 nt, Human
uacacugggagggaaggug

SEQ ID NO: 438272 - RNA, 19 nt, Human
uacacugggagggaaggug

SEQ ID NO: 438273 - RNA, 19 nt, Human
uagcgguaggaaugguggg

SEQ ID NO: 438274 - RNA, 23 nt, Human
uagguguggggaggaagaugggg

SEQ ID NO: 438275 - RNA, 25 nt, Human
uaucccagagagugcacgacccugg

SEQ ID NO: 438276 - RNA, 25 nt, Human
uaucccagagagugcacgacccugg

SEQ ID NO: 438277 - RNA, 25 nt, Human
uaucccagagagugcacgacccugg

SEQ ID NO: 438278 - RNA, 25 nt, Human
uaucccagagagugcacgacccugg

SEQ ID NO: 438279 - RNA, 20 nt, Human
uccaaagaauggaugagucc

SEQ ID NO: 438280 - RNA, 20 nt, Human
uccaaagaauggaugagucc

SEQ ID NO: 438281 - RNA, 23 nt, Human
uccagcccccacugacaggaggc

SEQ ID NO: 438282 - RNA, 23 nt, Human
uccagcccccacugacaggaggc

SEQ ID NO: 438283 - RNA, 25 nt, Human
ucccacagacaagacaguaggaggu

SEQ ID NO: 438284 - RNA, 23 nt, Human
ucccacccucuccuuuugcuccc

SEQ ID NO: 438285 - RNA, 23 nt, Human
ucccacccucuccuuuugcuccc

SEQ ID NO: 438286 - RNA, 19 nt, Human
ucccaggaugagccugggg

SEQ ID NO: 438287 - RNA, 19 nt, Human
ucccaggaugagccugggg

SEQ ID NO: 438288 - RNA, 20 nt, Human
uccccaacuccccagggggc

SEQ ID NO: 438289 - RNA, 20 nt, Human
uccccaacuccccagggggc

SEQ ID NO: 438290 - RNA, 24 nt, Human
uccccuccagccaggguucguucc

SEQ ID NO: 438291 - RNA, 24 nt, Human
uccgucaaguuuuagccaaugagu

SEQ ID NO: 438292 - RNA, 25 nt, Human
ucugucggggugucggugccaaggg

SEQ ID NO: 438293 - RNA, 21 nt, Human
ugaaaacuggcucagagaggg

SEQ ID NO: 438294 - RNA, 21 nt, Human
ugaaaacuggcucagagaggg

SEQ ID NO: 438295 - RNA, 23 nt, Human
ugaagaacuguacuauggggaca

SEQ ID NO: 438296 - RNA, 23 nt, Human
ugaagaacuguacuauggggaca

SEQ ID NO: 438297 - RNA, 23 nt, Human
ugaauuagaaggguccagccccc

SEQ ID NO: 438298 - RNA, 23 nt, Human
ugaauuagaaggguccagccccc

SEQ ID NO: 438299 - RNA, 24 nt, Human
ugacaggaggcuacacugggaggg

SEQ ID NO: 438300 - RNA, 18 nt, Human
ugagaggcagggaguggc

SEQ ID NO: 438301 - RNA, 18 nt, Human
ugagaggcagggaguggc

SEQ ID NO: 438302 - RNA, 21 nt, Human
ugaguccauugaauccaugga

SEQ ID NO: 438303 - RNA, 21 nt, Human
ugaguccauugaauccaugga

SEQ ID NO: 438304 - RNA, 23 nt, Human
ugcacgacccugggcaucugggc

SEQ ID NO: 438305 - RNA, 23 nt, Human
ugcacgacccugggcaucugggc

SEQ ID NO: 438306 - RNA, 19 nt, Human
ugcagcagggcugcagggg

SEQ ID NO: 438307 - RNA, 24 nt, Human
ugcagcagggcugcagggggcugg

SEQ ID NO: 438308 - RNA, 20 nt, Human
ugcagggggcuggguggggu

SEQ ID NO: 438309 - RNA, 20 nt, Human
ugcagggggcuggguggggu

SEQ ID NO: 438310 - RNA, 25 nt, Human
uggaggggaggugggagugggaggu

SEQ ID NO: 438311 - RNA, 20 nt, Human
uggaguggggggggauuugu

SEQ ID NO: 438312 - RNA, 19 nt, Human
uggcuaaugccaccaggaa

SEQ ID NO: 438313 - RNA, 19 nt, Human
uggcuaaugccaccaggaa

SEQ ID NO: 438314 - RNA, 23 nt, Human
ugggagugcuucagguaucagcu

SEQ ID NO: 438315 - RNA, 23 nt, Human
ugggagugcuucagguaucagcu

SEQ ID NO: 438316 - RNA, 19 nt, Human
ugggagugggagguugggc

SEQ ID NO: 438317 - RNA, 26 nt, Human
uggggagaggggagacaaggaagagg

SEQ ID NO: 438318 - RNA, 21 nt, Human
uggggaggaagauggggacag

SEQ ID NO: 438319 - RNA, 27 nt, Human
ugucccacagacaagacaguaggaggu

SEQ ID NO: 438320 - RNA, 18 nt, Human
ugucucugucucugucgg

SEQ ID NO: 438321 - RNA, 25 nt, Human
uuaaaagcccuccuauccccuccag

SEQ ID NO: 438322 - RNA, 25 nt, Human
uuaaaagcccuccuauccccuccag

SEQ ID NO: 438323 - RNA, 19 nt, Human
uuagaaggguccagccccc

SEQ ID NO: 438324 - RNA, 22 nt, Human
uuccaaagaggagaauaagugg

SEQ ID NO: 438325 - RNA, 23 nt, Human
uuccaaagaggagaauaaguggg

SEQ ID NO: 438326 - RNA, 21 nt, Human
uucccccgccaccccucccca

SEQ ID NO: 438327 - RNA, 22 nt, Human
uucccccgccaccccuccccaa

SEQ ID NO: 438328 - RNA, 27 nt, Human
uucuuccccuugugucuggccaaccag

SEQ ID NO: 438329 - RNA, 27 nt, Human
uucuuccccuugugucuggccaaccag

SEQ ID NO: 438330 - RNA, 20 nt, Human
uugaagauuccaaagaggag

SEQ ID NO: 438331 - RNA, 28 nt, Human
uuuugcucccagccuaccuccccaguug

SEQ ID NO: 438332 - RNA, 28 nt, Human
uuuugcucccagccuaccuccccaguug

SEQ ID NO: 438333 - RNA, 21 nt, Human
uuuuuuuuuuuuuuuucucuc

SEQ ID NO: 438334 - RNA, 21 nt, Human
aaacagaaaaacaaauguacc

SEQ ID NO: 438335 - RNA, 22 nt, Human
acagacgugagcaauaaauacg

SEQ ID NO: 438336 - RNA, 19 nt, Human
acccgcugcucguccaugc

SEQ ID NO: 438337 - RNA, 21 nt, Human
agcccugggggcuguggggcc

SEQ ID NO: 438338 - RNA, 18 nt, Human
aggaaaaacagaaaaaca

SEQ ID NO: 438339 - RNA, 25 nt, Human
aggaaaaacagaaaaacaaauguac

SEQ ID NO: 438340 - RNA, 23 nt, Human
aggagugggggcagggugggccu

SEQ ID NO: 438341 - RNA, 20 nt, Human
agucgucccccggcuccugg

SEQ ID NO: 438342 - RNA, 25 nt, Human
auacgcacauacauucaaguaugcg

SEQ ID NO: 438343 - RNA, 19 nt, Human
auccuggaggacugguacu

SEQ ID NO: 438344 - RNA, 20 nt, Human
augaggucgaagaauuccuc

SEQ ID NO: 438345 - RNA, 22 nt, Human
caaagaagcacuccucguccga

SEQ ID NO: 438346 - RNA, 19 nt, Human
caccacacccugugucagc

SEQ ID NO: 438347 - RNA, 23 nt, Human
caccaggcccagaucugccucuc

SEQ ID NO: 438348 - RNA, 18 nt, Human
cagacaucccgggaagcc

SEQ ID NO: 438349 - RNA, 21 nt, Human
caggucaaagaagcacuccuc

SEQ ID NO: 438350 - RNA, 23 nt, Human
caguccaggccucuguccgucac

SEQ ID NO: 438351 - RNA, 20 nt, Human
ccagcccugggggcuguggg

SEQ ID NO: 438352 - RNA, 18 nt, Human
ccauccuagccugagagu

SEQ ID NO: 438353 - RNA, 21 nt, Human
ccauccuagccugagaguggg

SEQ ID NO: 438354 - RNA, 22 nt, Human
cccaccacacccugugucagcc

SEQ ID NO: 438355 - RNA, 26 nt, Human
cccagccuuggccuggaaccgguucc

SEQ ID NO: 438356 - RNA, 20 nt, Human
cccccugcuccgggcccccg

SEQ ID NO: 438357 - RNA, 20 nt, Human
cccgggaagccucccgugcc

SEQ ID NO: 438358 - RNA, 24 nt, Human
cccugggccagccuccccagccuu

SEQ ID NO: 438359 - RNA, 23 nt, Human
ccguggccucggcagccccggcc

SEQ ID NO: 438360 - RNA, 19 nt, Human
ccuagaggcacccuccuag

SEQ ID NO: 438361 - RNA, 18 nt, Human
ccuggccaucguccaggg

SEQ ID NO: 438362 - RNA, 19 nt, Human
ccuuggccuggaacacuuc

SEQ ID NO: 438363 - RNA, 24 nt, Human
cgaagaauuccucggucuggggcg

SEQ ID NO: 438364 - RNA, 22 nt, Human
cgaggccgucaucgagggcugg

SEQ ID NO: 438365 - RNA, 22 nt, Human
cgcacauacauucaaguaugcg

SEQ ID NO: 438366 - RNA, 24 nt, Human
cgcccucccaccacgggcagcuug

SEQ ID NO: 438367 - RNA, 22 nt, Human
cggcaggcugcccacgcuggcc

SEQ ID NO: 438368 - RNA, 22 nt, Human
cggcccugccccuccagaagca

SEQ ID NO: 438369 - RNA, 18 nt, Human
cggccuggccaucgucca

SEQ ID NO: 438370 - RNA, 18 nt, Human
cggcuccuggggcucgcc

SEQ ID NO: 438371 - RNA, 18 nt, Human
cgggcaccugucccugcu

SEQ ID NO: 438372 - RNA, 19 nt, Human
cggggaggccguggggcug

SEQ ID NO: 438373 - RNA, 20 nt, Human
cgucccccggcuccuggggc

SEQ ID NO: 438374 - RNA, 25 nt, Human
cgugagcaauaaauacgcacauaca

SEQ ID NO: 438375 - RNA, 24 nt, Human
cgugccuccugucccugugcccac

SEQ ID NO: 438376 - RNA, 19 nt, Human
cucaugggugcuaccccag

SEQ ID NO: 438377 - RNA, 19 nt, Human
cuccagggugggggcggcc

SEQ ID NO: 438378 - RNA, 19 nt, Human
cuccuggggcucgccgugg

SEQ ID NO: 438379 - RNA, 24 nt, Human
cucuguccgucaccugcccugggc

SEQ ID NO: 438380 - RNA, 19 nt, Human
cugcugcuggggcucgggc

SEQ ID NO: 438381 - RNA, 28 nt, Human
cugcugcuggggcucgggccggcucguc

SEQ ID NO: 438382 - RNA, 25 nt, Human
cugggccagccuccccagccuuggc

SEQ ID NO: 438383 - RNA, 20 nt, Human
gaagcacgcccucccaccac

SEQ ID NO: 438384 - RNA, 22 nt, Human
gaaugaggcugaagaaguccuc

SEQ ID NO: 438385 - RNA, 25 nt, Human
gagugggggcagggugggccuggcg

SEQ ID NO: 438386 - RNA, 19 nt, Human
gccucgggaggacguggcu

SEQ ID NO: 438387 - RNA, 21 nt, Human
gccuggaacacuucccagaca

SEQ ID NO: 438388 - RNA, 19 nt, Human
gcgagguccacccgcugcu

SEQ ID NO: 438389 - RNA, 18 nt, Human
gcgauccuguccuccagg

SEQ ID NO: 438390 - RNA, 22 nt, Human
gcuccuggggcucgccguggcc

SEQ ID NO: 438391 - RNA, 26 nt, Human
gcugcuggggcucgggccggcucguc

SEQ ID NO: 438392 - RNA, 22 nt, Human
ggagugggggcagggugggccu

SEQ ID NO: 438393 - RNA, 18 nt, Human
ggcagccccggccuggcc

SEQ ID NO: 438394 - RNA, 20 nt, Human
ggcccagaucugccucucca

SEQ ID NO: 438395 - RNA, 20 nt, Human
ggcccugccccuccagaagc

SEQ ID NO: 438396 - RNA, 18 nt, Human
ggccugagccugucgccc

SEQ ID NO: 438397 - RNA, 19 nt, Human
gggaggccguggggcugca

SEQ ID NO: 438398 - RNA, 22 nt, Human
ggggggcgcuacguccuggaga

SEQ ID NO: 438399 - RNA, 20 nt, Human
ggucaucgauccuggaggac

SEQ ID NO: 438400 - RNA, 18 nt, Human
ggucggggaggccguggg

SEQ ID NO: 438401 - RNA, 20 nt, Human
ggucggggaggccguggggc

SEQ ID NO: 438402 - RNA, 21 nt, Human
ggugcccugcauugcuguggg

SEQ ID NO: 438403 - RNA, 20 nt, Human
guccucggcaauggccucgg

SEQ ID NO: 438404 - RNA, 18 nt, Human
gugggggcagggugggcc

SEQ ID NO: 438405 - RNA, 19 nt, Human
uagggcccuuggcagucuu

SEQ ID NO: 438406 - RNA, 18 nt, Human
ucaucgagggcugggcga

SEQ ID NO: 438407 - RNA, 23 nt, Human
uccaggccucuguccgucaccug

SEQ ID NO: 438408 - RNA, 21 nt, Human
uccccagccuuggccuggaac

SEQ ID NO: 438409 - RNA, 22 nt, Human
uccuagauggaacugccagccc

SEQ ID NO: 438410 - RNA, 23 nt, Human
ucucaugggugcuaccccagucc

SEQ ID NO: 438411 - RNA, 20 nt, Human
ucuuggguuggaaaggaccc

SEQ ID NO: 438412 - RNA, 19 nt, Human
ugacaacauggcacagacg

SEQ ID NO: 438413 - RNA, 24 nt, Human
ugagcauguugaagaagucguccc

SEQ ID NO: 438414 - RNA, 24 nt, Human
ugcaugcccagugccuguccucgg

SEQ ID NO: 438415 - RNA, 26 nt, Human
ugcccugggccagccuccccagccuu

SEQ ID NO: 438416 - RNA, 20 nt, Human
ugccuccugucccugugccc

SEQ ID NO: 438417 - RNA, 18 nt, Human
ugcggcccugccccucca

SEQ ID NO: 438418 - RNA, 23 nt, Human
ugcugcuggggcucgggcgggcc

SEQ ID NO: 438419 - RNA, 20 nt, Human
ugcuggggcucgggcgggcc

SEQ ID NO: 438420 - RNA, 28 nt, Human
uggaaaggacccauugacaacauggcag

SEQ ID NO: 438421 - RNA, 23 nt, Human
uggccaucguccaggggacaacg

SEQ ID NO: 438422 - RNA, 22 nt, Human
uggccucggcagccccggccug

SEQ ID NO: 438423 - RNA, 24 nt, Human
uggcggugggcacagggccuuagc

SEQ ID NO: 438424 - RNA, 18 nt, Human
ugggagcuggcgaugagg

SEQ ID NO: 438425 - RNA, 18 nt, Human
ugggaggugccaaggcug

SEQ ID NO: 438426 - RNA, 18 nt, Human
ugggggcagggugggccu

SEQ ID NO: 438427 - RNA, 20 nt, Human
uguguucgggcaccuguccc

SEQ ID NO: 438428 - RNA, 22 nt, Human
uuggucaacaggucaaagaagc

SEQ ID NO: 438429 - RNA, 23 nt, Human
aaagaccaccauccucagaagcc

SEQ ID NO: 438430 - RNA, 20 nt, Human
aacagaaauggguuuccaga

SEQ ID NO: 438431 - RNA, 22 nt, Human
aaccccagcaauaaccaacaaa

SEQ ID NO: 438432 - RNA, 23 nt, Human
aagaaaccaccagcuuuauagug

SEQ ID NO: 438433 - RNA, 25 nt, Human
aaggaaaggggaaacccacaugugg

SEQ ID NO: 438434 - RNA, 24 nt, Human
aaggggaaacccacaugugacccc

SEQ ID NO: 438435 - RNA, 20 nt, Human
accccagcaauaaccaacaa

SEQ ID NO: 438436 - RNA, 24 nt, Human
agaggacuuaagucagauggacuc

SEQ ID NO: 438437 - RNA, 19 nt, Human
agccuggccaaaugccauu

SEQ ID NO: 438438 - RNA, 26 nt, Human
agcugacuugggacuccuggcucggc

SEQ ID NO: 438439 - RNA, 22 nt, Human
aggaaaggggaaacccacaugu

SEQ ID NO: 438440 - RNA, 20 nt, Human
aggaagaugagggaagcccu

SEQ ID NO: 438441 - RNA, 31 nt, Human
aggcaaccccugaugauuuguaaagccaggg

SEQ ID NO: 438442 - RNA, 19 nt, Human
aggcaaggaaaggggaaac

SEQ ID NO: 438443 - RNA, 19 nt, Human
aggcaggagagcugacuug

SEQ ID NO: 438444 - RNA, 20 nt, Human
aggcaggagagcugacuugg

SEQ ID NO: 438445 - RNA, 21 nt, Human
agggagagaggacuuaaguca

SEQ ID NO: 438446 - RNA, 22 nt, Human
agguccccacucacccucugcc

SEQ ID NO: 438447 - RNA, 21 nt, Human
aguaaagccagccuggccaaa

SEQ ID NO: 438448 - RNA, 21 nt, Human
aguuuguggaaacaaagaucu

SEQ ID NO: 438449 - RNA, 24 nt, Human
caaaagaccaccauccucagaagc

SEQ ID NO: 438450 - RNA, 26 nt, Human
caacagaaauggguuuccagaagaau

SEQ ID NO: 438451 - RNA, 24 nt, Human
caaccccugaugauuuguaaagcc

SEQ ID NO: 438452 - RNA, 28 nt, Human
caagcaggcaaccccugauuguaaugac

SEQ ID NO: 438453 - RNA, 19 nt, Human
caagcucaccaccucaucc

SEQ ID NO: 438454 - RNA, 19 nt, Human
cacaaugauauuguguggu

SEQ ID NO: 438455 - RNA, 19 nt, Human
cacaaugauauuguguggu

SEQ ID NO: 438456 - RNA, 18 nt, Human
caccagaguucaguguuu

SEQ ID NO: 438457 - RNA, 20 nt, Human
caccauccucagaagccaag

SEQ ID NO: 438458 - RNA, 19 nt, Human
cacccuccuccugccaccc

SEQ ID NO: 438459 - RNA, 23 nt, Human
cacccuuguggacuaggaccagg

SEQ ID NO: 438460 - RNA, 19 nt, Human
caccuucuggaaauccgca

SEQ ID NO: 438461 - RNA, 22 nt, Human
cagagaacaacuugaaugacuu

SEQ ID NO: 438462 - RNA, 23 nt, Human
cagguccugaccccagucagaaa

SEQ ID NO: 438463 - RNA, 18 nt, Human
caugcaaaagaccaccau

SEQ ID NO: 438464 - RNA, 25 nt, Human
ccaauaccuugauuugauuuucagu

SEQ ID NO: 438465 - RNA, 20 nt, Human
ccagaaccugccacaggaac

SEQ ID NO: 438466 - RNA, 22 nt, Human
ccccaaagcuggagggagaugg

SEQ ID NO: 438467 - RNA, 24 nt, Human
ccccaucucuucuccuuguaccug

SEQ ID NO: 438468 - RNA, 20 nt, Human
cccccuucccaccaucccuc

SEQ ID NO: 438469 - RNA, 22 nt, Human
ccccuucccaccaucccucggc

SEQ ID NO: 438470 - RNA, 19 nt, Human
cccuccuguggaaucgagg

SEQ ID NO: 438471 - RNA, 20 nt, Human
ccuggccaaaugccauuuga

SEQ ID NO: 438472 - RNA, 25 nt, Human
ccuggccaaaugccauuugauuuug

SEQ ID NO: 438473 - RNA, 24 nt, Human
ccuggcucggccccaacagggagc

SEQ ID NO: 438474 - RNA, 21 nt, Human
ccuugauuugauuuucaguuu

SEQ ID NO: 438475 - RNA, 19 nt, Human
cucacccucugccaggagc

SEQ ID NO: 438476 - RNA, 20 nt, Human
cucccagaaccugccacagg

SEQ ID NO: 438477 - RNA, 24 nt, Human
cucccagaaccugccacaggaaac

SEQ ID NO: 438478 - RNA, 19 nt, Human
cuugaggaagaugagggaa

SEQ ID NO: 438479 - RNA, 19 nt, Human
gaaacccacaugugacccu

SEQ ID NO: 438480 - RNA, 19 nt, Human
gagggaagcccuccccucu

SEQ ID NO: 438481 - RNA, 19 nt, Human
gagggagagaggacuuaag

SEQ ID NO: 438482 - RNA, 22 nt, Human
gauagaguucccugaaaacucc

SEQ ID NO: 438483 - RNA, 19 nt, Human
gcaaaagaccaccauccuc

SEQ ID NO: 438484 - RNA, 18 nt, Human
gccuucuaggcuucaucc

SEQ ID NO: 438485 - RNA, 19 nt, Human
ggagagcucagccaacaga

SEQ ID NO: 438486 - RNA, 18 nt, Human
gggccucucuccuacuuu

SEQ ID NO: 438487 - RNA, 18 nt, Human
guccccaucucuucuccu

SEQ ID NO: 438488 - RNA, 19 nt, Human
guggaacaguucuugcucu

SEQ ID NO: 438489 - RNA, 20 nt, Human
guggagggagagaggacuuu

SEQ ID NO: 438490 - RNA, 19 nt, Human
guguucuuagccuccaccc

SEQ ID NO: 438491 - RNA, 22 nt, Human
guguucuuagccuccacccucc

SEQ ID NO: 438492 - RNA, 18 nt, Human
uaccugucaacaccagag

SEQ ID NO: 438493 - RNA, 23 nt, Human
uaccugucaacaccagaguucag

SEQ ID NO: 438494 - RNA, 21 nt, Human
uaccuugauuugauuuucagu

SEQ ID NO: 438495 - RNA, 26 nt, Human
uaccuugauuugauuuucaguuucau

SEQ ID NO: 438496 - RNA, 20 nt, Human
uagaguucccugaaaacucc

SEQ ID NO: 438497 - RNA, 20 nt, Human
uaggaaaaugaaucauuugg

SEQ ID NO: 438498 - RNA, 19 nt, Human
uaggaagaaaccaccagcu

SEQ ID NO: 438499 - RNA, 22 nt, Human
uaguccccaucucuucuccuug

SEQ ID NO: 438500 - RNA, 20 nt, Human
ucaaugaaaugaguagccca

SEQ ID NO: 438501 - RNA, 19 nt, Human
uccacacugcuccuggcua

SEQ ID NO: 438502 - RNA, 19 nt, Human
ucccagaaccugccacagg

SEQ ID NO: 438503 - RNA, 22 nt, Human
ucccucggcaagcucaccaccu

SEQ ID NO: 438504 - RNA, 19 nt, Human
uccugggcacccacucaag

SEQ ID NO: 438505 - RNA, 19 nt, Human
ucuaggcuucaucccagaa

SEQ ID NO: 438506 - RNA, 21 nt, Human
ucuggagaccccaaagcugga

SEQ ID NO: 438507 - RNA, 20 nt, Human
ucugggcugugcucaguguu

SEQ ID NO: 438508 - RNA, 18 nt, Human
ugaagaggcaaggaaagg

SEQ ID NO: 438509 - RNA, 25 nt, Human
ugaguaggugguucauauuguaaua

SEQ ID NO: 438510 - RNA, 20 nt, Human
ugauauuguguggucuuccc

SEQ ID NO: 438511 - RNA, 21 nt, Human
ugauauuguguggucuucccu

SEQ ID NO: 438512 - RNA, 21 nt, Human
ugaugauauguacaguggcac

SEQ ID NO: 438513 - RNA, 19 nt, Human
ugcaggggccucuggagug

SEQ ID NO: 438514 - RNA, 18 nt, Human
ugcaguggccccaacuag

SEQ ID NO: 438515 - RNA, 18 nt, Human
ugccuucuaggcuucauc

SEQ ID NO: 438516 - RNA, 20 nt, Human
ugccuucuaggcuucauccc

SEQ ID NO: 438517 - RNA, 22 nt, Human
ugcucuuuuuaucaccuucugg

SEQ ID NO: 438518 - RNA, 18 nt, Human
uggcacaccuuaaccagu

SEQ ID NO: 438519 - RNA, 20 nt, Human
uggcuaaccccagcaauaac

SEQ ID NO: 438520 - RNA, 23 nt, Human
uggcuaaccccagcaauaaccaa

SEQ ID NO: 438521 - RNA, 22 nt, Human
ugggcacccacucaagagugcu

SEQ ID NO: 438522 - RNA, 18 nt, Human
ugguaggaagccccaucu

SEQ ID NO: 438523 - RNA, 25 nt, Human
ugucuuuggccucagagaacaacuu

SEQ ID NO: 438524 - RNA, 21 nt, Human
ugugcuaaaaccagggaagca

SEQ ID NO: 438525 - RNA, 23 nt, Human
uguggacuaggaccagguccuga

SEQ ID NO: 438526 - RNA, 21 nt, Human
uucauaguccccaucucuucu

SEQ ID NO: 438527 - RNA, 25 nt, Human
uuuccagaagaauaaugaaaaguuc

SEQ ID NO: 438528 - RNA, 24 nt, Human
uuuccuggcauaaauuauuccugg

SEQ ID NO: 438529 - RNA, 18 nt, Human
uuuuguguguuuucugug

SEQ ID NO: 438530 - RNA, 26 nt, Human
aacuuucccugaaggcaccuccacca

SEQ ID NO: 438531 - RNA, 19 nt, Human
aagccggcugacauggugc

SEQ ID NO: 438532 - RNA, 21 nt, Human
acagaacaaugaauuuauuac

SEQ ID NO: 438533 - RNA, 27 nt, Human
acaucacauauucaugcauaaaccaau

SEQ ID NO: 438534 - RNA, 24 nt, Human
accauaccuaacauaaacuaauua

SEQ ID NO: 438535 - RNA, 18 nt, Human
acuaagcacuuggcuucc

SEQ ID NO: 438536 - RNA, 18 nt, Human
aggcaccuccaccaaaag

SEQ ID NO: 438537 - RNA, 18 nt, Human
caaccucaccaaaaaggg

SEQ ID NO: 438538 - RNA, 23 nt, Human
caagauaagaggggcucugcuaa

SEQ ID NO: 438539 - RNA, 22 nt, Human
caagccggcugacauggugcca

SEQ ID NO: 438540 - RNA, 19 nt, Human
caccaaaagauuuuucuuc

SEQ ID NO: 438541 - RNA, 18 nt, Human
cagcgcaacaagaagaca

SEQ ID NO: 438542 - RNA, 19 nt, Human
ccugaaggcaccuccacca

SEQ ID NO: 438543 - RNA, 21 nt, Human
ccugaaggcaccuccaccaaa

SEQ ID NO: 438544 - RNA, 22 nt, Human
cugaagagugagggugaagaaa

SEQ ID NO: 438545 - RNA, 24 nt, Human
cuucuugaacugaagagugagggu

SEQ ID NO: 438546 - RNA, 22 nt, Human
cuucuuugacaucacuaagcac

SEQ ID NO: 438547 - RNA, 25 nt, Human
gaagaaaacuuucccugaaggcacc

SEQ ID NO: 438548 - RNA, 19 nt, Human
gaaggcaccuccaccaaaa

SEQ ID NO: 438549 - RNA, 20 nt, Human
gagguaggguggcuccagga

SEQ ID NO: 438550 - RNA, 22 nt, Human
uaccagugguucugaaauucuu

SEQ ID NO: 438551 - RNA, 18 nt, Human
uagggagauccuuucccu

SEQ ID NO: 438552 - RNA, 21 nt, Human
ucacuaagcacuuggcuucca

SEQ ID NO: 438553 - RNA, 21 nt, Human
ucaugcauaaaccaaucacug

SEQ ID NO: 438554 - RNA, 19 nt, Human
ucccugaaggcaccuccac

SEQ ID NO: 438555 - RNA, 25 nt, Human
uccuguggagagcugcaggcuuucu

SEQ ID NO: 438556 - RNA, 22 nt, Human
ucucugagcuagggagauccuu

SEQ ID NO: 438557 - RNA, 19 nt, Human
ucucuggauaccagugguu

SEQ ID NO: 438558 - RNA, 25 nt, Human
ucuucaagauucacuggacaaaaau

SEQ ID NO: 438559 - RNA, 19 nt, Human
ugagcuagggagauccuuu

SEQ ID NO: 438560 - RNA, 19 nt, Human
ugagguaggguggcuccag

SEQ ID NO: 438561 - RNA, 20 nt, Human
ugagguaggguggcuccagg

SEQ ID NO: 438562 - RNA, 21 nt, Human
ugcaaaggggaaucaaauuac

SEQ ID NO: 438563 - RNA, 23 nt, Human
uggaguucucaagauaagagggg

SEQ ID NO: 438564 - RNA, 25 nt, Human
uggcuuccauccaucuuccaaccuc

SEQ ID NO: 438565 - RNA, 22 nt, Human
ugguucugaaauucuucaaauu

SEQ ID NO: 438566 - RNA, 23 nt, Human
uuccaaccucaccaaaaaggguu

SEQ ID NO: 438567 - RNA, 22 nt, Human
uuccauccaucuuccaaccuca

SEQ ID NO: 438568 - RNA, 23 nt, Human
uucuucaaauucacccuugaaca

SEQ ID NO: 438569 - RNA, 22 nt, Human
acaucuacucauucucuguaac

SEQ ID NO: 438570 - RNA, 22 nt, Human
acaugguuugauuaucacuugg

SEQ ID NO: 438571 - RNA, 18 nt, Human
acugacaauuccaccuuu

SEQ ID NO: 438572 - RNA, 24 nt, Human
uaaaucagguagcuucagaaauca

SEQ ID NO: 438573 - RNA, 26 nt, Human
uauaauagagcuauuaaccgaugaga

SEQ ID NO: 438574 - RNA, 19 nt, Human
ucagguagcuucagaaauc

SEQ ID NO: 438575 - RNA, 23 nt, Human
ucagguagcuucagaaaucaacu

SEQ ID NO: 438576 - RNA, 22 nt, Human
aaacaagaaugaaauuauagga

SEQ ID NO: 438577 - RNA, 23 nt, Human
aaaguccccagaaaugguaaaga

SEQ ID NO: 438578 - RNA, 24 nt, Human
aaaguccccagaaaugguaaagag

SEQ ID NO: 438579 - RNA, 21 nt, Human
aaaugggcucuuuuaaggcga

SEQ ID NO: 438580 - RNA, 19 nt, Human
aaccagaagcagcagcucc

SEQ ID NO: 438581 - RNA, 24 nt, Human
aagaaugaaauuauaggaaaaaaa

SEQ ID NO: 438582 - RNA, 19 nt, Human
aagaggaaaggaguaagaa

SEQ ID NO: 438583 - RNA, 22 nt, Human
aagcagcagcuccgagcuccga

SEQ ID NO: 438584 - RNA, 25 nt, Human
acuagagugagggacccugaacuuc

SEQ ID NO: 438585 - RNA, 18 nt, Human
agaaccagaagcagcagc

SEQ ID NO: 438586 - RNA, 19 nt, Human
agagugugugguucaggug

SEQ ID NO: 438587 - RNA, 22 nt, Human
agcccaaggcagccggacagcg

SEQ ID NO: 438588 - RNA, 28 nt, Human
agcccaaggcagccggacagcgacgggg

SEQ ID NO: 438589 - RNA, 21 nt, Human
agcgacgguggccacaagaga

SEQ ID NO: 438590 - RNA, 18 nt, Human
aggaaaaaaaucaagagg

SEQ ID NO: 438591 - RNA, 19 nt, Human
aggaaaaaaaucaagagga

SEQ ID NO: 438592 - RNA, 18 nt, Human
aggaagggcuauacuaua

SEQ ID NO: 438593 - RNA, 20 nt, Human
aggcagccggacagcgacgg

SEQ ID NO: 438594 - RNA, 19 nt, Human
auaaauccuagaggacaaa

SEQ ID NO: 438595 - RNA, 20 nt, Human
aucaccuuucugggcugggg

SEQ ID NO: 438596 - RNA, 18 nt, Human
aucuaaagagccaugaag

SEQ ID NO: 438597 - RNA, 22 nt, Human
caagagaaccagaagcagcagc

SEQ ID NO: 438598 - RNA, 19 nt, Human
cacaagagaaccagaagca

SEQ ID NO: 438599 - RNA, 23 nt, Human
cacaagagaaccagaagcagcag

SEQ ID NO: 438600 - RNA, 19 nt, Human
cagcuccgagcuccgaccu

SEQ ID NO: 438601 - RNA, 26 nt, Human
caggaaacagggcuuggaacuucuaa

SEQ ID NO: 438602 - RNA, 18 nt, Human
cccgccucuuucccccuc

SEQ ID NO: 438603 - RNA, 20 nt, Human
ccgcgccgccaccuccgcug

SEQ ID NO: 438604 - RNA, 21 nt, Human
ccgcgccgccaccuccgcugu

SEQ ID NO: 438605 - RNA, 21 nt, Human
ccggacagcgacgguggccac

SEQ ID NO: 438606 - RNA, 22 nt, Human
ccggccccugcgucgagcugcg

SEQ ID NO: 438607 - RNA, 19 nt, Human
cgaggguagagggcgguga

SEQ ID NO: 438608 - RNA, 21 nt, Human
cgcaaacacgcacgcaaagcg

SEQ ID NO: 438609 - RNA, 23 nt, Human
cggacagcgacgguggccacaag

SEQ ID NO: 438610 - RNA, 18 nt, Human
cuccgaccugcccgcgcc

SEQ ID NO: 438611 - RNA, 28 nt, Human
cuccugaucuuaacaagccaugcucauu

SEQ ID NO: 438612 - RNA, 21 nt, Human
cugacccgccgcccccgccuc

SEQ ID NO: 438613 - RNA, 22 nt, Human
gacaacagaaauaaauccuaga

SEQ ID NO: 438614 - RNA, 20 nt, Human
gcaaacacgcacgcaaagcg

SEQ ID NO: 438615 - RNA, 22 nt, Human
gccacaagagaaccagaagcag

SEQ ID NO: 438616 - RNA, 24 nt, Human
gccacaagagaaccagaagcagca

SEQ ID NO: 438617 - RNA, 20 nt, Human
gcccacccuccugccggccc

SEQ ID NO: 438618 - RNA, 25 nt, Human
ggacaacagaaauaaauccuagagg

SEQ ID NO: 438619 - RNA, 19 nt, Human
gggcugggggaguaaaauc

SEQ ID NO: 438620 - RNA, 24 nt, Human
guaaaauccuucuuuagugacuag

SEQ ID NO: 438621 - RNA, 22 nt, Human
uaaaaguuaucuuaaaaaauau

SEQ ID NO: 438622 - RNA, 18 nt, Human
uaaagagaagaaucaccu

SEQ ID NO: 438623 - RNA, 20 nt, Human
uaacaugcaccacccacauc

SEQ ID NO: 438624 - RNA, 24 nt, Human
uaacaugcaccacccacaucuaac

SEQ ID NO: 438625 - RNA, 26 nt, Human
uaacaugcaccacccacaucuaaccu

SEQ ID NO: 438626 - RNA, 20 nt, Human
uaagaagaaaauaaaaguua

SEQ ID NO: 438627 - RNA, 27 nt, Human
uacacaucucugaacuggacauaccac

SEQ ID NO: 438628 - RNA, 19 nt, Human
uaccaccuuuacgcaggaa

SEQ ID NO: 438629 - RNA, 19 nt, Human
uacuauaaauccaaguggg

SEQ ID NO: 438630 - RNA, 19 nt, Human
uaggaaaaaaaucaagagg

SEQ ID NO: 438631 - RNA, 22 nt, Human
uaggaaaaaaaucaagaggaaa

SEQ ID NO: 438632 - RNA, 21 nt, Human
uccccagaaaugguaaagaga

SEQ ID NO: 438633 - RNA, 20 nt, Human
ucuaaccuaccugccgggua

SEQ ID NO: 438634 - RNA, 20 nt, Human
ucuguucggcagcccaaggc

SEQ ID NO: 438635 - RNA, 22 nt, Human
ugaaagagcacugauuucagca

SEQ ID NO: 438636 - RNA, 19 nt, Human
ugaagaagugaaagagcac

SEQ ID NO: 438637 - RNA, 21 nt, Human
ugaagcaaguuccuguguggu

SEQ ID NO: 438638 - RNA, 18 nt, Human
ugacuagagugagggacc

SEQ ID NO: 438639 - RNA, 21 nt, Human
ugagaugaaaaaacaagaaug

SEQ ID NO: 438640 - RNA, 21 nt, Human
ugagcaagucuggugggagug

SEQ ID NO: 438641 - RNA, 19 nt, Human
ugcaccacccacaucuaac

SEQ ID NO: 438642 - RNA, 21 nt, Human
ugcccgcgccgccaccuccgc

SEQ ID NO: 438643 - RNA, 25 nt, Human
uggaacuucuaagggaaauuaacau

SEQ ID NO: 438644 - RNA, 25 nt, Human
uggcccacgccuugucuguucggca

SEQ ID NO: 438645 - RNA, 24 nt, Human
ugguucagguggacugguccuugg

SEQ ID NO: 438646 - RNA, 20 nt, Human
uguacgcaaacacgcacgca

SEQ ID NO: 438647 - RNA, 22 nt, Human
uuauaggaaaaaaaucaagagg

SEQ ID NO: 438648 - RNA, 28 nt, Human
uuucugggcugggggaguaaaauccuuc

SEQ ID NO: 438649 - RNA, 30 nt, Human
uuuuuuggacaacagaaauaaauccuaggg

SEQ ID NO: 438650 - RNA, 18 nt, Human
uuuuuuuuuuuuuuuuug

SEQ ID NO: 438651 - RNA, 23 nt, Human
aaacuuauuuccccucaacccua

SEQ ID NO: 438652 - RNA, 21 nt, Human
aacuuauuuccccucaacccu

SEQ ID NO: 438653 - RNA, 21 nt, Human
aagagcccagcccugucaagc

SEQ ID NO: 438654 - RNA, 25 nt, Human
acauaacagaaguauuugagguacc

SEQ ID NO: 438655 - RNA, 23 nt, Human
acccuauacccaaagaagaaaua

SEQ ID NO: 438656 - RNA, 24 nt, Human
agcaaagccauaaggaagcccagg

SEQ ID NO: 438657 - RNA, 23 nt, Human
agcauagcccguugaccucccca

SEQ ID NO: 438658 - RNA, 18 nt, Human
aggcagagacuaaaggac

SEQ ID NO: 438659 - RNA, 22 nt, Human
caacccuauacccaaagaagaa

SEQ ID NO: 438660 - RNA, 21 nt, Human
cagacaccuaaguaggaaucc

SEQ ID NO: 438661 - RNA, 18 nt, Human
ccagugggaagcaaagcc

SEQ ID NO: 438662 - RNA, 26 nt, Human
cccaaagaagaaauaaaaucacagau

SEQ ID NO: 438663 - RNA, 19 nt, Human
ccccugagggcagacaccu

SEQ ID NO: 438664 - RNA, 20 nt, Human
cccucaacccuauacccaaa

SEQ ID NO: 438665 - RNA, 19 nt, Human
cucaggcagagacuaaagg

SEQ ID NO: 438666 - RNA, 23 nt, Human
cucaggcagagacuaaaggacau

SEQ ID NO: 438667 - RNA, 19 nt, Human
cuccccaaacacuacaccu

SEQ ID NO: 438668 - RNA, 27 nt, Human
cucucauauaugcaaacaaaugcagac

SEQ ID NO: 438669 - RNA, 23 nt, Human
gaccccugagggcagacaccuaa

SEQ ID NO: 438670 - RNA, 19 nt, Human
uaaaaucacagauacauaa

SEQ ID NO: 438671 - RNA, 26 nt, Human
uaaaaucacagauacauaacagaagu

SEQ ID NO: 438672 - RNA, 19 nt, Human
ucccagugggaagcaaagc

SEQ ID NO: 438673 - RNA, 21 nt, Human
uccugaagugauuuggacccc

SEQ ID NO: 438674 - RNA, 23 nt, Human
uccugaagugauuuggaccccug

SEQ ID NO: 438675 - RNA, 18 nt, Human
uccuugugaucaggaagu

SEQ ID NO: 438676 - RNA, 21 nt, Human
ugaccuccccaaacacuacac

SEQ ID NO: 438677 - RNA, 22 nt, Human
ugaccuccccaaacacuacacc

SEQ ID NO: 438678 - RNA, 23 nt, Human
ugcaaacaaaugcagacuaggcc

SEQ ID NO: 438679 - RNA, 21 nt, Human
uggaccccugagggcagacac

SEQ ID NO: 438680 - RNA, 21 nt, Human
uucagcuaaaacguuuauuuc

SEQ ID NO: 438681 - RNA, 19 nt, Human
uuccuugugaucaggaagu

SEQ ID NO: 438682 - RNA, 22 nt, Human
uugggguguccugaagugauuu

SEQ ID NO: 438683 - RNA, 21 nt, Human
aacacuccucucaagggaaua

SEQ ID NO: 438684 - RNA, 19 nt, Human
aauccuaacccuccuaccc

SEQ ID NO: 438685 - RNA, 19 nt, Human
acccccagcccugucucca

SEQ ID NO: 438686 - RNA, 21 nt, Human
acccccagcccugucuccacc

SEQ ID NO: 438687 - RNA, 21 nt, Human
agagguggggagacagaccaa

SEQ ID NO: 438688 - RNA, 18 nt, Human
aggaagugggguugggga

SEQ ID NO: 438689 - RNA, 18 nt, Human
aggaggaggaggggcagg

SEQ ID NO: 438690 - RNA, 18 nt, Human
aggaggaggaggggcagg

SEQ ID NO: 438691 - RNA, 18 nt, Human
aggcagaggaaguggggu

SEQ ID NO: 438692 - RNA, 20 nt, Human
aggcuagaaggggaugggga

SEQ ID NO: 438693 - RNA, 24 nt, Human
agggaccgcaguguggcaggaggg

SEQ ID NO: 438694 - RNA, 19 nt, Human
aggggauggggaugugagg

SEQ ID NO: 438695 - RNA, 25 nt, Human
aggggcaggcagaggaagugggguu

SEQ ID NO: 438696 - RNA, 18 nt, Human
agggggaagaggaagggc

SEQ ID NO: 438697 - RNA, 18 nt, Human
agggugcuaggaaaggcu

SEQ ID NO: 438698 - RNA, 30 nt, Human
auguugagccuguggacaaggguagggauu

SEQ ID NO: 438699 - RNA, 24 nt, Human
caacugcuagguggaggagacaac

SEQ ID NO: 438700 - RNA, 22 nt, Human
ccaaccaacugcuagguggagg

SEQ ID NO: 438701 - RNA, 24 nt, Human
cccaucaucccuuuucccuucaaa

SEQ ID NO: 438702 - RNA, 24 nt, Human
cccaucaucccuuuucccuucaaa

SEQ ID NO: 438703 - RNA, 23 nt, Human
ccccuucaaucccaucaucccuu

SEQ ID NO: 438704 - RNA, 23 nt, Human
ccccuucaaucccaucaucccuu

SEQ ID NO: 438705 - RNA, 22 nt, Human
cccuccuacccccagcccuguc

SEQ ID NO: 438706 - RNA, 24 nt, Human
cccuccuacccccagcccugucuc

SEQ ID NO: 438707 - RNA, 20 nt, Human
cccugucuccaccgccuaca

SEQ ID NO: 438708 - RNA, 21 nt, Human
ccuacaguuucccccucaccu

SEQ ID NO: 438709 - RNA, 21 nt, Human
ccuccuacccccagcccuguc

SEQ ID NO: 438710 - RNA, 19 nt, Human
ccuucaaucccaucauccc

SEQ ID NO: 438711 - RNA, 19 nt, Human
cgggaaagggaccgcagug

SEQ ID NO: 438712 - RNA, 20 nt, Human
cuaggaauugcuuguugauc

SEQ ID NO: 438713 - RNA, 18 nt, Human
cugcugggccuucagcag

SEQ ID NO: 438714 - RNA, 19 nt, Human
cuggaggccucugucugca

SEQ ID NO: 438715 - RNA, 19 nt, Human
cuuguggaaauccuaaccc

SEQ ID NO: 438716 - RNA, 23 nt, Human
cuuuuuaucucugcuguuccugc

SEQ ID NO: 438717 - RNA, 23 nt, Human
gaagccccuucaaucccaucauc

SEQ ID NO: 438718 - RNA, 24 nt, Human
gaagccccuucaaucccaucaucc

SEQ ID NO: 438719 - RNA, 19 nt, Human
gaaggaggaggaggggcag

SEQ ID NO: 438720 - RNA, 18 nt, Human
gaggaggggcaggcagag

SEQ ID NO: 438721 - RNA, 18 nt, Human
gaucuggaggagggggua

SEQ ID NO: 438722 - RNA, 18 nt, Human
gaucuggaggagggggua

SEQ ID NO: 438723 - RNA, 18 nt, Human
gccuacaguuucccccuc

SEQ ID NO: 438724 - RNA, 22 nt, Human
ggaaagggaccgcaguguggca

SEQ ID NO: 438725 - RNA, 18 nt, Human
ggaagugggguuggggag

SEQ ID NO: 438726 - RNA, 21 nt, Human
ggcaggcagaggaaguggggu

SEQ ID NO: 438727 - RNA, 25 nt, Human
ggcaggcagaggaagugggguuggg

SEQ ID NO: 438728 - RNA, 23 nt, Human
ggcagggguuggaguuucugggg

SEQ ID NO: 438729 - RNA, 24 nt, Human
gggaagaggaagggcagggguugg

SEQ ID NO: 438730 - RNA, 18 nt, Human
gggcagggguuggaguuu

SEQ ID NO: 438731 - RNA, 24 nt, Human
gggcagggguuggaguuucugggg

SEQ ID NO: 438732 - RNA, 19 nt, Human
ggggauggggaugugaggg

SEQ ID NO: 438733 - RNA, 24 nt, Human
ggugaggggagagagcagaaggga

SEQ ID NO: 438734 - RNA, 24 nt, Human
guggaaggaggaggaggggcaggc

SEQ ID NO: 438735 - RNA, 26 nt, Human
uaacccuccuacccccagcccugucu

SEQ ID NO: 438736 - RNA, 20 nt, Human
uacccccagcccugucucca

SEQ ID NO: 438737 - RNA, 21 nt, Human
uagaagccccuucaaucccau

SEQ ID NO: 438738 - RNA, 21 nt, Human
uagaagccccuucaaucccau

SEQ ID NO: 438739 - RNA, 22 nt, Human
uaggaaaggcuagaaggggaug

SEQ ID NO: 438740 - RNA, 21 nt, Human
uagguggaggagacaacgugg

SEQ ID NO: 438741 - RNA, 23 nt, Human
ucccuuuucccuucaaaucaggg

SEQ ID NO: 438742 - RNA, 24 nt, Human
ucccuuuucccuucaaaucagggc

SEQ ID NO: 438743 - RNA, 20 nt, Human
ucucgcuuuuuccucauaca

SEQ ID NO: 438744 - RNA, 18 nt, Human
ucucugcuguuccugccu

SEQ ID NO: 438745 - RNA, 26 nt, Human
ucucugggugaggggagagagcaacg

SEQ ID NO: 438746 - RNA, 22 nt, Human
ucuggggaccaggacuauggau

SEQ ID NO: 438747 - RNA, 18 nt, Human
ugagagaggcaggcccgg

SEQ ID NO: 438748 - RNA, 23 nt, Human
ugaggggagagagcagaagggau

SEQ ID NO: 438749 - RNA, 24 nt, Human
ugccuuguucuuguggaaauccua

SEQ ID NO: 438750 - RNA, 22 nt, Human
ugcugagagaggcaggcccggg

SEQ ID NO: 438751 - RNA, 19 nt, Human
uggaaauccuaacccuccu

SEQ ID NO: 438752 - RNA, 18 nt, Human
uggaaggaggaggagggg

SEQ ID NO: 438753 - RNA, 23 nt, Human
uggaaggaggaggaggggcaggc

SEQ ID NO: 438754 - RNA, 22 nt, Human
uggaagggggaagaggaagggc

SEQ ID NO: 438755 - RNA, 22 nt, Human
uggcuuacaauuuugucuucug

SEQ ID NO: 438756 - RNA, 22 nt, Human
uggcuuacaauuuugucuucug

SEQ ID NO: 438757 - RNA, 25 nt, Human
ugggccuucagcaguccgaaagcuu

SEQ ID NO: 438758 - RNA, 22 nt, Human
ugggggaggagaaaacagguaa

SEQ ID NO: 438759 - RNA, 18 nt, Human
ugucugcaggcucuccuu

SEQ ID NO: 438760 - RNA, 22 nt, Human
uguugagccuguggacaagggu

SEQ ID NO: 438761 - RNA, 20 nt, Human
uuagaagccccuucaauccc

SEQ ID NO: 438762 - RNA, 20 nt, Human
uuagaagccccuucaauccc

SEQ ID NO: 438763 - RNA, 21 nt, Human
uugagaugggaagaggcacag

SEQ ID NO: 438764 - RNA, 19 nt, Human
uuuccuuuucucucgcuuu

SEQ ID NO: 438765 - RNA, 28 nt, Human
uuuccuuuucucucgcuuuuuccucaua

SEQ ID NO: 438766 - RNA, 18 nt, Human
acaaaagccuuacucuau

SEQ ID NO: 438767 - RNA, 20 nt, Human
auuacaaauggugcucauuu

SEQ ID NO: 438768 - RNA, 18 nt, Human
caacugugacauuaugca

SEQ ID NO: 438769 - RNA, 24 nt, Human
caucuaggaaaaguuucacaugau

SEQ ID NO: 438770 - RNA, 21 nt, Human
ccaaaauaaaaauccaagguc

SEQ ID NO: 438771 - RNA, 25 nt, Human
ccaaaauaaaaauccaagguccaau

SEQ ID NO: 438772 - RNA, 20 nt, Human
ccccuucccucucagguccc

SEQ ID NO: 438773 - RNA, 20 nt, Human
ccccuucccucucagguccc

SEQ ID NO: 438774 - RNA, 22 nt, Human
ccuuugacuuuaacauauuucu

SEQ ID NO: 438775 - RNA, 18 nt, Human
cucccccacugccaaugc

SEQ ID NO: 438776 - RNA, 18 nt, Human
gggggugcugaugccacc

SEQ ID NO: 438777 - RNA, 27 nt, Human
uaggaaaaguuucacaugauuaaauca

SEQ ID NO: 438778 - RNA, 18 nt, Human
uaucaguaaugacuuugg

SEQ ID NO: 438779 - RNA, 23 nt, Human
uccccaugguggccuagguucau

SEQ ID NO: 438780 - RNA, 19 nt, Human
ucuguccccuucccucuca

SEQ ID NO: 438781 - RNA, 23 nt, Human
ugagaaacaucuguccccuuccc

SEQ ID NO: 438782 - RNA, 19 nt, Human
ugagggugaguucuuuugg

SEQ ID NO: 438783 - RNA, 23 nt, Human
ugcugaugccaccaaguuccuuu

SEQ ID NO: 438784 - RNA, 23 nt, Human
uguccccuucccucucagguccc

SEQ ID NO: 438785 - RNA, 25 nt, Human
uguccccuucccucucaggucccca

SEQ ID NO: 438786 - RNA, 27 nt, Human
uucaugaaauugacaucauuauuacaa

SEQ ID NO: 438787 - RNA, 26 nt, Human
uucaugauuacagccaccuuuaggau

SEQ ID NO: 438788 - RNA, 22 nt, Human
uuuaacauauuucucaaaaaga

SEQ ID NO: 438789 - RNA, 26 nt, Human
uuugucuuuauuagucagcauuugca

SEQ ID NO: 438790 - RNA, 30 nt, Human; identical to SEQ ID NO: 242631

SEQ ID NO: 438791 - RNA, 20 nt, Human
acgcagcacgggcagggggg

SEQ ID NO: 438792 - RNA, 20 nt, Human
agcaugacgcagcacgggca

SEQ ID NO: 438793 - RNA, 21 nt, Human
ccuuccccgcugcucccuuuc

SEQ ID NO: 438794 - RNA, 20 nt, Human
cgcugcucccuuucggcaac

SEQ ID NO: 438795 - RNA, 22 nt, Human
cggcaacuccuagcaccucggu

SEQ ID NO: 438796 - RNA, 20 nt, Human
cuggcagcugcagcaguggg

SEQ ID NO: 438797 - RNA, 20 nt, Human
gagcuagcgccauuuuccuc

SEQ ID NO: 438798 - RNA, 21 nt, Human
gcagcugcagcagugggcuug

SEQ ID NO: 438799 - RNA, 23 nt, Human
ggcuuggcagguaaggcagggcc

SEQ ID NO: 438800 - RNA, 21 nt, Human
uagcuuccgagcuagcgccuc

SEQ ID NO: 438801 - RNA, 18 nt, Human
uauauacacagaagcaug

SEQ ID NO: 438802 - RNA, 23 nt, Human
ugagagauaaauaaaggccuuua

SEQ ID NO: 438803 - RNA, 24 nt, Human
uggcagguaaggcagggccaagug

SEQ ID NO: 438804 - RNA, 20 nt, Human
uuccccgcugcucccuuucg

SEQ ID NO: 438805 - RNA, 18 nt, Human
uuuuuuuuuuuuuuuuug

SEQ ID NO: 438806 - RNA, 20 nt, Human
aaacaaaugccauacaaugu

SEQ ID NO: 438807 - RNA, 21 nt, Human
aaacaaaugccauacaaugug

SEQ ID NO: 438808 - RNA, 19 nt, Human
aacucgucuuuccaacucu

SEQ ID NO: 438809 - RNA, 22 nt, Human
aagccucacucuucugauugcc

SEQ ID NO: 438810 - RNA, 23 nt, Human
acaaaguuuugcauucaucacca

SEQ ID NO: 438811 - RNA, 20 nt, Human
acacauaaauuugugcugcc

SEQ ID NO: 438812 - RNA, 21 nt, Human
agccucacucuucugauugcc

SEQ ID NO: 438813 - RNA, 19 nt, Human
augcuagacuaauacugug

SEQ ID NO: 438814 - RNA, 23 nt, Human
cuaacggguuaacuccgucguac

SEQ ID NO: 438815 - RNA, 22 nt, Human
cugccuccaacagcaaugauuc

SEQ ID NO: 438816 - RNA, 20 nt, Human
gccucacucuucugauugcc

SEQ ID NO: 438817 - RNA, 21 nt, Human
uacaaaaguuugaaaaaagaa

SEQ ID NO: 438818 - RNA, 23 nt, Human
uaucaccaaguauauccucuaaa

SEQ ID NO: 438819 - RNA, 22 nt, Human
ucaacagagaucaucuaaugca

SEQ ID NO: 438820 - RNA, 28 nt, Human
ucuucugauugccauuauaauaagugau

SEQ ID NO: 438821 - RNA, 18 nt, Human
ugaaaaaagaagccucac

SEQ ID NO: 438822 - RNA, 18 nt, Human
ugaaaaaagaagccucac

SEQ ID NO: 438823 - RNA, 20 nt, Human
ugcauucaucaccacuaccc

SEQ ID NO: 438824 - RNA, 24 nt, Human
ugcauuuuucauucaauaaauguu

SEQ ID NO: 438825 - RNA, 20 nt, Human
ugccuccaacagcaaugauu

SEQ ID NO: 438826 - RNA, 23 nt, Human
uucacauuaucaccaaguauauc

SEQ ID NO: 438827 - RNA, 22 nt, Human
uucaucaccacuacccaguucc

SEQ ID NO: 438828 - RNA, 19 nt, Human
uugaauuuguaaaguuauc

SEQ ID NO: 438829 - RNA, 20 nt, Human
uuuaaacuacuguuguaaca

SEQ ID NO: 438830 - RNA, 22 nt, Human
aaaacagccagacaccaaagga

SEQ ID NO: 438831 - RNA, 22 nt, Human
aaagggcccauaugaaacaaac

SEQ ID NO: 438832 - RNA, 19 nt, Human
aacacaccacuuacugaca

SEQ ID NO: 438833 - RNA, 18 nt, Human
aacauuguguuaaggaau

SEQ ID NO: 438834 - RNA, 20 nt, Human
aagagaacccaaacuucacu

SEQ ID NO: 438835 - RNA, 22 nt, Human
aaugcaaggaaacacaguuuug

SEQ ID NO: 438836 - RNA, 22 nt, Human
acaaaacagccagacaccaaag

SEQ ID NO: 438837 - RNA, 18 nt, Human
acaaaagagaacccaaac

SEQ ID NO: 438838 - RNA, 26 nt, Human
agaaaaaaaaaaaaauucaugcaaag

SEQ ID NO: 438839 - RNA, 22 nt, Human
aggaaggugugacuggggguua

SEQ ID NO: 438840 - RNA, 25 nt, Human
agguggugguugguggggggcggug

SEQ ID NO: 438841 - RNA, 18 nt, Human
auguacaaggcauugugu

SEQ ID NO: 438842 - RNA, 26 nt, Human
auuuauaauugcugaaaugcaucacc

SEQ ID NO: 438843 - RNA, 19 nt, Human
caaaggaagaugcccaggg

SEQ ID NO: 438844 - RNA, 22 nt, Human
caacaaauacaugggugaccau

SEQ ID NO: 438845 - RNA, 19 nt, Human
caauucuaucccagaaaug

SEQ ID NO: 438846 - RNA, 18 nt, Human
cacacaggucuagcuggg

SEQ ID NO: 438847 - RNA, 19 nt, Human
caccaaaggaagaugccca

SEQ ID NO: 438848 - RNA, 22 nt, Human
cagacaccucucacacaggucu

SEQ ID NO: 438849 - RNA, 21 nt, Human
ccagacaccucucacacaggu

SEQ ID NO: 438850 - RNA, 21 nt, Human
ccauaaugacaguauuccaag

SEQ ID NO: 438851 - RNA, 21 nt, Human
ccaugcaugauuuccagacac

SEQ ID NO: 438852 - RNA, 23 nt, Human
ccaugcaugauuuccagacaccu

SEQ ID NO: 438853 - RNA, 21 nt, Human
ccccuaugccaggggccucca

SEQ ID NO: 438854 - RNA, 20 nt, Human
cccuaugccaggggccuccc

SEQ ID NO: 438855 - RNA, 23 nt, Human
ccucccacccacaucagguuugu

SEQ ID NO: 438856 - RNA, 21 nt, Human
cuuacugacaugccccuccca

SEQ ID NO: 438857 - RNA, 30 nt, Human
gaccauuuaaaaucaaaauuauaauuugaa

SEQ ID NO: 438858 - RNA, 25 nt, Human
gccccucccacccacaucagguuug

SEQ ID NO: 438859 - RNA, 18 nt, Human
gccuccauuggggaacag

SEQ ID NO: 438860 - RNA, 18 nt, Human
ggagaaccagaugaucag

SEQ ID NO: 438861 - RNA, 21 nt, Human
ggugguugguggggggcggug

SEQ ID NO: 438862 - RNA, 20 nt, Human
gguuacacaauuuaucagau

SEQ ID NO: 438863 - RNA, 24 nt, Human
uauccugucuuccauuuaauuuua

SEQ ID NO: 438864 - RNA, 24 nt, Human
uccuuaucugcacaaccauugaag

SEQ ID NO: 438865 - RNA, 24 nt, Human
ucucacacaggucuagcugggaag

SEQ ID NO: 438866 - RNA, 18 nt, Human
ucucuuagccauaaugac

SEQ ID NO: 438867 - RNA, 18 nt, Human
ucugcacaaccauugaag

SEQ ID NO: 438868 - RNA, 24 nt, Human
ugaaacaaacacauugaacacacc

SEQ ID NO: 438869 - RNA, 20 nt, Human
ugaaacaaacacauugaacc

SEQ ID NO: 438870 - RNA, 22 nt, Human
ugacaaaacagccagacaccaa

SEQ ID NO: 438871 - RNA, 27 nt, Human
ugacaaaacagccagacaccaaaggaa

SEQ ID NO: 438872 - RNA, 20 nt, Human
ugacugaguggaagaugcag

SEQ ID NO: 438873 - RNA, 23 nt, Human
ugaucagggucuagcaaggccug

SEQ ID NO: 438874 - RNA, 26 nt, Human
ugcaaacugaaacuaugcuuuuuugu

SEQ ID NO: 438875 - RNA, 22 nt, Human
ugcaugauacaaagugugcgug

SEQ ID NO: 438876 - RNA, 21 nt, Human
ugcugaaaugcaucaccaugu

SEQ ID NO: 438877 - RNA, 21 nt, Human
uggaaagggcccauaugaaac

SEQ ID NO: 438878 - RNA, 19 nt, Human
uggggaacaguauguaaga

SEQ ID NO: 438879 - RNA, 18 nt, Human
uguguuaaggaaugaacu

SEQ ID NO: 438880 - RNA, 20 nt, Human
uuaaugcaaggaaacacagu

SEQ ID NO: 438881 - RNA, 27 nt, Human
uucaagaaaaaaaaaugacuuaaaaaa

SEQ ID NO: 438882 - RNA, 22 nt, Human
uugcugaaaugcaucaccaugu

SEQ ID NO: 438883 - RNA, 24 nt, Human
uuuccauucuaacaaacaugcauu

SEQ ID NO: 438884 - RNA, 22 nt, Human
aaaagggacccuucuuccggga

SEQ ID NO: 438885 - RNA, 22 nt, Human
aaacaacagugacagaucagaa

SEQ ID NO: 438886 - RNA, 26 nt, Human
aagcagauuuccuuuaucucaaguuu

SEQ ID NO: 438887 - RNA, 24 nt, Human
aagcugccuggcucucgguggggc

SEQ ID NO: 438888 - RNA, 22 nt, Human
aagcugcuagcaccacgcugcc

SEQ ID NO: 438889 - RNA, 21 nt, Human
acccuguuccgcugaagcugc

SEQ ID NO: 438890 - RNA, 20 nt, Human
acccuucuuccgggaguggg

SEQ ID NO: 438891 - RNA, 25 nt, Human
acugcauuaugguggaagucuagga

SEQ ID NO: 438892 - RNA, 19 nt, Human
acuggagugcagaauucca

SEQ ID NO: 438893 - RNA, 18 nt, Human
aggaaggaggaagucacu

SEQ ID NO: 438894 - RNA, 20 nt, Human
auacugccaucagaggaagg

SEQ ID NO: 438895 - RNA, 24 nt, Human
caaagcaaaccaccucuggcaccu

SEQ ID NO: 438896 - RNA, 23 nt, Human
caacagugacagaucagaaauau

SEQ ID NO: 438897 - RNA, 21 nt, Human
caccacgcugccacucaaagc

SEQ ID NO: 438898 - RNA, 23 nt, Human
cacgcugccacucaaagcugccu

SEQ ID NO: 438899 - RNA, 21 nt, Human
cacugugugaacaucaugugc

SEQ ID NO: 438900 - RNA, 23 nt, Human
ccagaggggccgcugcacuagcg

SEQ ID NO: 438901 - RNA, 25 nt, Human
ccccaccgccuccucgggaugccca

SEQ ID NO: 438902 - RNA, 19 nt, Human
ccgccuccucgggaugccc

SEQ ID NO: 438903 - RNA, 22 nt, Human
cgcugcacuagcgcgaaaaggg

SEQ ID NO: 438904 - RNA, 20 nt, Human
cuucccagaggauguggucc

SEQ ID NO: 438905 - RNA, 25 nt, Human
cuugacccaugacuugucaguuucc

SEQ ID NO: 438906 - RNA, 21 nt, Human
gcagauuuccuuuaucucaag

SEQ ID NO: 438907 - RNA, 19 nt, Human
gggagugggccccaccgcc

SEQ ID NO: 438908 - RNA, 21 nt, Human
uaaaccagauucacacccuuc

SEQ ID NO: 438909 - RNA, 20 nt, Human
uaaauggguuauugccauug

SEQ ID NO: 438910 - RNA, 24 nt, Human
uaggcuaaaacacucucauaaaug

SEQ ID NO: 438911 - RNA, 20 nt, Human
ucaaguaucaguucuaugcu

SEQ ID NO: 438912 - RNA, 23 nt, Human
ucauuggcuguguugaagaaucc

SEQ ID NO: 438913 - RNA, 19 nt, Human
ucucacccuguuccgcuga

SEQ ID NO: 438914 - RNA, 21 nt, Human
ugacagaucagaaauauagug

SEQ ID NO: 438915 - RNA, 18 nt, Human
ugacuugucaguuuccuu

SEQ ID NO: 438916 - RNA, 19 nt, Human
ugugugaacaucaugugca

SEQ ID NO: 438917 - RNA, 24 nt, Human
uguugaagaauccaaccaagggaa

SEQ ID NO: 438918 - RNA, 19 nt, Human
uucauuggcuguguugaag

SEQ ID NO: 438919 - RNA, 22 nt, Human
uuccggguccagaggggccgcu

SEQ ID NO: 438920 - RNA, 22 nt, Human
uucucuuauuuuucacaagcag

SEQ ID NO: 438921 - RNA, 19 nt, Human
uuucacaagcagauuuccu

SEQ ID NO: 438922 - RNA, 20 nt, Human
aaaaagcuaccaauagcuga

SEQ ID NO: 438923 - RNA, 21 nt, Human
aaaacaaacaaacaaacaaac

SEQ ID NO: 438924 - RNA, 18 nt, Human
aaaacaccacauucuugg

SEQ ID NO: 438925 - RNA, 21 nt, Human
aaaaucaaaguccccaaaaaa

SEQ ID NO: 438926 - RNA, 19 nt, Human
aaaaugccaucaagccagg

SEQ ID NO: 438927 - RNA, 18 nt, Human
aaaauguacagcacagca

SEQ ID NO: 438928 - RNA, 19 nt, Human
aaacacaggucuuuuucug

SEQ ID NO: 438929 - RNA, 20 nt, Human
aaacaggaaaggccaaaagg

SEQ ID NO: 438930 - RNA, 18 nt, Human
aaaccuaaaauacuaaug

SEQ ID NO: 438931 - RNA, 21 nt, Human
aaaccuacgauguaaccucga

SEQ ID NO: 438932 - RNA, 19 nt, Human
aaaguuauagaaaagggcc

SEQ ID NO: 438933 - RNA, 24 nt, Human
aaauagaucuagaacaucuuugga

SEQ ID NO: 438934 - RNA, 25 nt, Human
aacaaacaaacaaacaaaaaaaaca

SEQ ID NO: 438935 - RNA, 20 nt, Human
aacaagaaaguggauuacuu

SEQ ID NO: 438936 - RNA, 22 nt, Human
aacaccuauucaaucucacugc

SEQ ID NO: 438937 - RNA, 24 nt, Human
aacaucuuuggaaaaaccacaaag

SEQ ID NO: 438938 - RNA, 22 nt, Human
aacccaaaauugucaaaaaaaa

SEQ ID NO: 438939 - RNA, 25 nt, Human
aacugacuacaaguccucuuaaugc

SEQ ID NO: 438940 - RNA, 23 nt, Human
aagcaaaugcugaacucagcacu

SEQ ID NO: 438941 - RNA, 19 nt, Human
aagggccaaaauguacagc

SEQ ID NO: 438942 - RNA, 22 nt, Human
aaguagcugggauuacaggugc

SEQ ID NO: 438943 - RNA, 21 nt, Human
aaguccucuuaaugcuuaaag

SEQ ID NO: 438944 - RNA, 18 nt, Human
aagugauccacccccacc

SEQ ID NO: 438945 - RNA, 21 nt, Human
aauaguauucaaacauuacaa

SEQ ID NO: 438946 - RNA, 24 nt, Human
aaucauuaauuuucugagccuaaa

SEQ ID NO: 438947 - RNA, 21 nt, Human
aauguacagcacagcaauauu

SEQ ID NO: 438948 - RNA, 22 nt, Human
acaaaauaagaacuucuagaac

SEQ ID NO: 438949 - RNA, 23 nt, Human
acaaacaaacaaacaaaaaaaac

SEQ ID NO: 438950 - RNA, 18 nt, Human
acaaacaaacaaacaaac

SEQ ID NO: 438951 - RNA, 22 nt, Human
acaagguucugaaaacccccua

SEQ ID NO: 438952 - RNA, 23 nt, Human
acaaguccucuuaaugcuuaaag

SEQ ID NO: 438953 - RNA, 23 nt, Human
acacacacacacacacacacaca

SEQ ID NO: 438954 - RNA, 23 nt, Human
acacacacacacacacacacaca

SEQ ID NO: 438955 - RNA, 23 nt, Human
acacacacacacacacacacaca

SEQ ID NO: 438956 - RNA, 23 nt, Human
acacacacacacacacacacaca

SEQ ID NO: 438957 - RNA, 23 nt, Human
acacacacacacacacacacaca

SEQ ID NO: 438958 - RNA, 23 nt, Human
acacacacacacacacacacaca

SEQ ID NO: 438959 - RNA, 23 nt, Human
acacacacacacacacacacaca

SEQ ID NO: 438960 - RNA, 22 nt, Human
acacacccacacauacacagga

SEQ ID NO: 438961 - RNA, 26 nt, Human
acacacccacacauacacaggacaca

SEQ ID NO: 438962 - RNA, 22 nt, Human
acaccaccaauccuggaugagc

SEQ ID NO: 438963 - RNA, 20 nt, Human
acaccuuucaugccagaaug

SEQ ID NO: 438964 - RNA, 24 nt, Human
acagaaauaaacauuuucaaacac

SEQ ID NO: 438965 - RNA, 19 nt, Human
acaggugccugccaccacg

SEQ ID NO: 438966 - RNA, 21 nt, Human
acaguggcacaaucucagcuc

SEQ ID NO: 438967 - RNA, 18 nt, Human
accacaauuacuaauuca

SEQ ID NO: 438968 - RNA, 22 nt, Human
accauguugcccaggcuggucu

SEQ ID NO: 438969 - RNA, 25 nt, Human
accauguugcccaggcuggucuuga

SEQ ID NO: 438970 - RNA, 18 nt, Human
acgggguuucaccauguu

SEQ ID NO: 438971 - RNA, 19 nt, Human
acgggguuucaccauguug

SEQ ID NO: 438972 - RNA, 24 nt, Human
acgggguuucaccauguugcccag

SEQ ID NO: 438973 - RNA, 28 nt, Human
agaaguaucuuaaaaaucaaccuuaacu

SEQ ID NO: 438974 - RNA, 18 nt, Human
agacaaaagcaagacaca

SEQ ID NO: 438975 - RNA, 20 nt, Human
agacaaaagcaagacacaaa

SEQ ID NO: 438976 - RNA, 20 nt, Human
agagagugggggguggggga

SEQ ID NO: 438977 - RNA, 21 nt, Human
agaguuaauccacaaaacacc

SEQ ID NO: 438978 - RNA, 22 nt, Human
agaguugcagggagggaagaga

SEQ ID NO: 438979 - RNA, 22 nt, Human
agaguuguucaacugacuacaa

SEQ ID NO: 438980 - RNA, 23 nt, Human
agaguuguucaacugacuacaag

SEQ ID NO: 438981 - RNA, 22 nt, Human
agcaaaugcugaacucagcaca

SEQ ID NO: 438982 - RNA, 22 nt, Human
aggacagaaccaaggacagaaa

SEQ ID NO: 438983 - RNA, 19 nt, Human
aggcgugaaucaccgcgcc

SEQ ID NO: 438984 - RNA, 22 nt, Human
aggggggagggggaagagagug

SEQ ID NO: 438985 - RNA, 18 nt, Human
aguggggggugggggagg

SEQ ID NO: 438986 - RNA, 22 nt, Human
aguucugggauuacaggcguga

SEQ ID NO: 438987 - RNA, 23 nt, Human
auacacacacacccacacauaca

SEQ ID NO: 438988 - RNA, 18 nt, Human
auaguuuggggaaaucaa

SEQ ID NO: 438989 - RNA, 18 nt, Human
aucaaaguccccaaaaaa

SEQ ID NO: 438990 - RNA, 20 nt, Human
auccacccccacccccauug

SEQ ID NO: 438991 - RNA, 19 nt, Human
auuacaggugccugccacc

SEQ ID NO: 438992 - RNA, 26 nt, Human
auuauuauuaccacacaugcuaauac

SEQ ID NO: 438993 - RNA, 20 nt, Human
auugagaaaaaucaaaaccu

SEQ ID NO: 438994 - RNA, 24 nt, Human
auuuuuguauuuuugguagagacg

SEQ ID NO: 438995 - RNA, 21 nt, Human
caaaaagcuaccaauagcuga

SEQ ID NO: 438996 - RNA, 20 nt, Human
caaacaaaaaaaacaccaca

SEQ ID NO: 438997 - RNA, 25 nt, Human
caaacaaacaaaaaaaacaccacau

SEQ ID NO: 438998 - RNA, 20 nt, Human
caaaguccccaaaaaaagug

SEQ ID NO: 438999 - RNA, 21 nt, Human
caacauaucuuguaaaucaau

SEQ ID NO: 439000 - RNA, 23 nt, Human
caacugacuuacgauguuaauau

SEQ ID NO: 439001 - RNA, 22 nt, Human
caagcaauucuccugccuuagc

SEQ ID NO: 439002 - RNA, 27 nt, Human
caagcaauucuccugccuuagccuccc

SEQ ID NO: 439003 - RNA, 18 nt, Human
cacacacacacacacaca

SEQ ID NO: 439004 - RNA, 20 nt, Human
cacacacacacacacacaca

SEQ ID NO: 439005 - RNA, 20 nt, Human
cacacacacacacacacaca

SEQ ID NO: 439006 - RNA, 20 nt, Human
cacacacacacacacacaca

SEQ ID NO: 439007 - RNA, 20 nt, Human
cacacacacacacacacaca

SEQ ID NO: 439008 - RNA, 20 nt, Human
cacacacacacacacacaca

SEQ ID NO: 439009 - RNA, 20 nt, Human
cacacacacacacacacaca

SEQ ID NO: 439010 - RNA, 20 nt, Human
cacacacacacacacacaca

SEQ ID NO: 439011 - RNA, 20 nt, Human
cacacacacacacacacaca

SEQ ID NO: 439012 - RNA, 20 nt, Human
cacacacacacacacacaca

SEQ ID NO: 439013 - RNA, 20 nt, Human
cacacacacacacacacaca

SEQ ID NO: 439014 - RNA, 20 nt, Human
cacacacacacacacacaca

SEQ ID NO: 439015 - RNA, 20 nt, Human
cacacacacacacacacaca

SEQ ID NO: 439016 - RNA, 22 nt, Human
cacacacacacacacacacaca

SEQ ID NO: 439017 - RNA, 22 nt, Human
cacacacacacacacacacaca

SEQ ID NO: 439018 - RNA, 22 nt, Human
cacacacacacacacacacaca

SEQ ID NO: 439019 - RNA, 22 nt, Human
cacacacacacacacacacaca

SEQ ID NO: 439020 - RNA, 30 nt, Human
cacacacacacacacacacacacacaccuu

SEQ ID NO: 439021 - RNA, 20 nt, Human
cacacacacccacacauaca

SEQ ID NO: 439022 - RNA, 24 nt, Human
caccacgccuggcuaauuuuugua

SEQ ID NO: 439023 - RNA, 20 nt, Human
caccauaaacagaaauaaac

SEQ ID NO: 439024 - RNA, 24 nt, Human
caccauguugcccaggcuggucuu

SEQ ID NO: 439025 - RNA, 27 nt, Human
caccauguugcccaggcuggucuugaa

SEQ ID NO: 439026 - RNA, 21 nt, Human
caccucaaucucccauuuuaa

SEQ ID NO: 439027 - RNA, 22 nt, Human
caccucagaaugauuacaccau

SEQ ID NO: 439028 - RNA, 18 nt, Human
cacugcaaucucugccuc

SEQ ID NO: 439029 - RNA, 21 nt, Human
cacugcccuuuuuuauugcag

SEQ ID NO: 439030 - RNA, 19 nt, Human
cacuguauaugcaacgagc

SEQ ID NO: 439031 - RNA, 20 nt, Human
cagaaccaaggacagaaacu

SEQ ID NO: 439032 - RNA, 18 nt, Human
caggacacagcgagagau

SEQ ID NO: 439033 - RNA, 22 nt, Human
caggacacagcgagagauggua

SEQ ID NO: 439034 - RNA, 19 nt, Human
caggugccugccaccacgc

SEQ ID NO: 439035 - RNA, 21 nt, Human
caggugccugccaccacgccu

SEQ ID NO: 439036 - RNA, 23 nt, Human
caggugccugccaccacgccugg

SEQ ID NO: 439037 - RNA, 23 nt, Human
cagugcaguuucuagcagcacua

SEQ ID NO: 439038 - RNA, 23 nt, Human
cagugcucagaaaaaaugaaaac

SEQ ID NO: 439039 - RNA, 23 nt, Human
cauacacucaaguuacuaaacac

SEQ ID NO: 439040 - RNA, 24 nt, Human
cauauuaacauuaauuuuuaaaau

SEQ ID NO: 439041 - RNA, 19 nt, Human
cauguugcccaggcugguc

SEQ ID NO: 439042 - RNA, 24 nt, Human
cauguugcccaggcuggucuugaa

SEQ ID NO: 439043 - RNA, 23 nt, Human
cauugcccccacuugcuucuacc

SEQ ID NO: 439044 - RNA, 24 nt, Human
cauuuuaacgccaggauuuccuag

SEQ ID NO: 439045 - RNA, 20 nt, Human
ccaaauacacacacacccac

SEQ ID NO: 439046 - RNA, 22 nt, Human
ccaaauacacacacacccacac

SEQ ID NO: 439047 - RNA, 21 nt, Human
ccaaguagcugggauuacagg

SEQ ID NO: 439048 - RNA, 20 nt, Human
ccaccacgccuggcuaauuu

SEQ ID NO: 439049 - RNA, 24 nt, Human
ccacugcugaaacaaaacuuuagu

SEQ ID NO: 439050 - RNA, 22 nt, Human
ccagaguucugggauuacaggc

SEQ ID NO: 439051 - RNA, 24 nt, Human
ccagaguucugggauuacaggcgu

SEQ ID NO: 439052 - RNA, 22 nt, Human
cccaaguagcugggauuacagg

SEQ ID NO: 439053 - RNA, 23 nt, Human
cccaaguagcugggauuacaggu

SEQ ID NO: 439054 - RNA, 24 nt, Human
cccaaguagcugggauuacaggug

SEQ ID NO: 439055 - RNA, 23 nt, Human
cccacaccucaaucucccauuuu

SEQ ID NO: 439056 - RNA, 23 nt, Human
cccagguucaagcaauucuccug

SEQ ID NO: 439057 - RNA, 18 nt, Human
ccgcgcccagcccaaauc

SEQ ID NO: 439058 - RNA, 24 nt, Human
ccucccagguucaagcaauucucc

SEQ ID NO: 439059 - RNA, 24 nt, Human
ccugaccucaagugauccaccccc

SEQ ID NO: 439060 - RNA, 24 nt, Human
ccugaccucaagugauccaccccc

SEQ ID NO: 439061 - RNA, 24 nt, Human
ccugccuuagccucccaaguagcu

SEQ ID NO: 439062 - RNA, 18 nt, Human
cgaacaaaacucuucgag

SEQ ID NO: 439063 - RNA, 24 nt, Human
cgggguuucaccauguugcccagg

SEQ ID NO: 439064 - RNA, 20 nt, Human
cuaaaacaaacaaacaaaca

SEQ ID NO: 439065 - RNA, 23 nt, Human
cuacaaguccucuuaaugcuuaa

SEQ ID NO: 439066 - RNA, 21 nt, Human
cuauaauuauuccaagcugcu

SEQ ID NO: 439067 - RNA, 21 nt, Human
cuaucagaggucucauucacu

SEQ ID NO: 439068 - RNA, 18 nt, Human
cucaagugauccaccccc

SEQ ID NO: 439069 - RNA, 19 nt, Human
cucaagugauccacccccc

SEQ ID NO: 439070 - RNA, 25 nt, Human
cucaaguuacuaaacacaauuugau

SEQ ID NO: 439071 - RNA, 24 nt, Human
cucacugcaaucucugccucccag

SEQ ID NO: 439072 - RNA, 21 nt, Human
cuccccaaacaaauacuaaaa

SEQ ID NO: 439073 - RNA, 18 nt, Human
cucuagcaaaaugcaaag

SEQ ID NO: 439074 - RNA, 18 nt, Human
cucugucgcccaggaugg

SEQ ID NO: 439075 - RNA, 23 nt, Human
cugaaaacccccugguuagaccu

SEQ ID NO: 439076 - RNA, 24 nt, Human
cugcaaucucugccucccagguuc

SEQ ID NO: 439077 - RNA, 23 nt, Human
cuggugacagguggacaggguuu

SEQ ID NO: 439078 - RNA, 23 nt, Human
cuuaaagccucuacccacaccuc

SEQ ID NO: 439079 - RNA, 23 nt, Human
cuuagccucccaaguagcuggga

SEQ ID NO: 439080 - RNA, 18 nt, Human
cuucagugcaguuucuag

SEQ ID NO: 439081 - RNA, 20 nt, Human
cuugguuuaggaaaacauga

SEQ ID NO: 439082 - RNA, 19 nt, Human
cuuguuccccuccccaaac

SEQ ID NO: 439083 - RNA, 18 nt, Human
cuuuuuuauugcaaagug

SEQ ID NO: 439084 - RNA, 18 nt, Human
gaaacugguaaaaacaga

SEQ ID NO: 439085 - RNA, 23 nt, Human
gaaccaacauuuacacacccaaa

SEQ ID NO: 439086 - RNA, 20 nt, Human
gaaccaaggacagaaaccgg

SEQ ID NO: 439087 - RNA, 24 nt, Human
gaagagagagacaaaagcaagaca

SEQ ID NO: 439088 - RNA, 21 nt, Human
gacaaaauauacuuuacaaaa

SEQ ID NO: 439089 - RNA, 27 nt, Human
gacaagagugacuaauucuguauccac

SEQ ID NO: 439090 - RNA, 18 nt, Human
gaccucaagugauccacc

SEQ ID NO: 439091 - RNA, 22 nt, Human
gacgggguuucaccauguugcc

SEQ ID NO: 439092 - RNA, 19 nt, Human
gagaaaaaaugcaucucac

SEQ ID NO: 439093 - RNA, 22 nt, Human
gagaagaaacuaaauguuagua

SEQ ID NO: 439094 - RNA, 21 nt, Human
gagacaaaagcaagacacaac

SEQ ID NO: 439095 - RNA, 25 nt, Human
gagacagugggaggaggggggaggg

SEQ ID NO: 439096 - RNA, 23 nt, Human
gagacgggguuucaccauguugc

SEQ ID NO: 439097 - RNA, 18 nt, Human
gagcacaccaccaauccu

SEQ ID NO: 439098 - RNA, 23 nt, Human
gagcacagccaaauaaacagcua

SEQ ID NO: 439099 - RNA, 18 nt, Human
gaggaggggggaggggga

SEQ ID NO: 439100 - RNA, 20 nt, Human
gaguuaauccacaaaacacc

SEQ ID NO: 439101 - RNA, 24 nt, Human
gauaaaagaacaauuaauugcaaa

SEQ ID NO: 439102 - RNA, 19 nt, Human
gauuacaggcgugaaucac

SEQ ID NO: 439103 - RNA, 22 nt, Human
gauuacaggcgugaaucaccgc

SEQ ID NO: 439104 - RNA, 18 nt, Human
gauuacaggugccugcca

SEQ ID NO: 439105 - RNA, 21 nt, Human
gcaaauccagcaauauuaaaa

SEQ ID NO: 439106 - RNA, 22 nt, Human
gcaaucucugccucccagguuc

SEQ ID NO: 439107 - RNA, 20 nt, Human
gccuuagccucccaaguagc

SEQ ID NO: 439108 - RNA, 22 nt, Human
gcuaaaggcaggaacaauucug

SEQ ID NO: 439109 - RNA, 23 nt, Human
gcuggucuugaacuccugaccuc

SEQ ID NO: 439110 - RNA, 21 nt, Human
gcuguuugacuauagagcaac

SEQ ID NO: 439111 - RNA, 19 nt, Human
ggaggaggggagagagagu

SEQ ID NO: 439112 - RNA, 22 nt, Human
ggaggggggagggggaagagag

SEQ ID NO: 439113 - RNA, 24 nt, Human
ggcuggucuugaacuccugaccuc

SEQ ID NO: 439114 - RNA, 19 nt, Human
gggaggaggggagagagag

SEQ ID NO: 439115 - RNA, 21 nt, Human
gggggagggggaagagagugg

SEQ ID NO: 439116 - RNA, 23 nt, Human
gggguuucaccauguugcccagg

SEQ ID NO: 439117 - RNA, 21 nt, Human
gguagagacgggguuucacca

SEQ ID NO: 439118 - RNA, 19 nt, Human
ggucuugaacuccugaccu

SEQ ID NO: 439119 - RNA, 20 nt, Human
guaagggccaaaauguacag

SEQ ID NO: 439120 - RNA, 19 nt, Human
guagagacgggguuucacc

SEQ ID NO: 439121 - RNA, 21 nt, Human
guagagacgggguuucaccau

SEQ ID NO: 439122 - RNA, 22 nt, Human
guagagacgggguuucaccaug

SEQ ID NO: 439123 - RNA, 23 nt, Human
guagagacgggguuucaccaugu

SEQ ID NO: 439124 - RNA, 21 nt, Human
guagauauaguuuaucugggu

SEQ ID NO: 439125 - RNA, 18 nt, Human
guagcugggauuacaggu

SEQ ID NO: 439126 - RNA, 22 nt, Human
gugaaucaccgcgcccagccca

SEQ ID NO: 439127 - RNA, 24 nt, Human
guuucaccauguugcccaggcugg

SEQ ID NO: 439128 - RNA, 19 nt, Human
guuugacuauagagcaacc

SEQ ID NO: 439129 - RNA, 27 nt, Human
uaaaaaaacccaguccagugcugccac

SEQ ID NO: 439130 - RNA, 30 nt, Human
uaaaugcaaaguauucucccuacacccugg

SEQ ID NO: 439131 - RNA, 27 nt, Human
uaaauugagaaaaaucaaaaccuacga

SEQ ID NO: 439132 - RNA, 19 nt, Human
uaacaccaaaauauacaug

SEQ ID NO: 439133 - RNA, 20 nt, Human
uaacuaaguagacauuuaaa

SEQ ID NO: 439134 - RNA, 24 nt, Human
uaauuuuuguauuuuugguagaga

SEQ ID NO: 439135 - RNA, 22 nt, Human
uacacacacacccacacauaca

SEQ ID NO: 439136 - RNA, 25 nt, Human
uacacacccaaauacacacacaccc

SEQ ID NO: 439137 - RNA, 21 nt, Human
uacaccauaaacagaaauaaa

SEQ ID NO: 439138 - RNA, 22 nt, Human
uacaggugccugccaccacgcc

SEQ ID NO: 439139 - RNA, 24 nt, Human
uaccaguuuuaaacacugucuuuu

SEQ ID NO: 439140 - RNA, 20 nt, Human
uagaaaccuaaaauacuaau

SEQ ID NO: 439141 - RNA, 22 nt, Human
uagagacgggguuucaccaugu

SEQ ID NO: 439142 - RNA, 18 nt, Human
uagcaaauccagcaauau

SEQ ID NO: 439143 - RNA, 22 nt, Human
uaggcaacacugucaaccccac

SEQ ID NO: 439144 - RNA, 18 nt, Human
uaguguuuauagaaaccu

SEQ ID NO: 439145 - RNA, 19 nt, Human
uauagaaaccuaaaauacu

SEQ ID NO: 439146 - RNA, 22 nt, Human
uauaguaacugagcacagccaa

SEQ ID NO: 439147 - RNA, 20 nt, Human
uauccuagauuacaaaaucc

SEQ ID NO: 439148 - RNA, 22 nt, Human
uauuaccacacaugcuaauacc

SEQ ID NO: 439149 - RNA, 22 nt, Human
uauugaagaacucuuagcuggg

SEQ ID NO: 439150 - RNA, 20 nt, Human
uauuuugcuguugaucaaac

SEQ ID NO: 439151 - RNA, 23 nt, Human
uauuuugcuguugaucaaacuug

SEQ ID NO: 439152 - RNA, 19 nt, Human
uauuuuugguagagacggg

SEQ ID NO: 439153 - RNA, 21 nt, Human
ucaccauguugcccaggcugg

SEQ ID NO: 439154 - RNA, 18 nt, Human
ucaccggccucaacgacc

SEQ ID NO: 439155 - RNA, 19 nt, Human
ucacugcaaucucugccuc

SEQ ID NO: 439156 - RNA, 24 nt, Human
ucacugcaaucucugccucccagg

SEQ ID NO: 439157 - RNA, 25 nt, Human
ucacugcaaucucugccucccaggg

SEQ ID NO: 439158 - RNA, 25 nt, Human
ucacugcaaucucugccucccaggu

SEQ ID NO: 439159 - RNA, 27 nt, Human
ucagcucacugcaaucucugccuccca

SEQ ID NO: 439160 - RNA, 27 nt, Human
uccacccccacccccauuggcuuccca

SEQ ID NO: 439161 - RNA, 28 nt, Human
uccagugcugccacaucucaaguucuga

SEQ ID NO: 439162 - RNA, 23 nt, Human
ucccaaguagcugggauuacagg

SEQ ID NO: 439163 - RNA, 24 nt, Human
ucccagaguucugggauuacaggc

SEQ ID NO: 439164 - RNA, 21 nt, Human
ucccagguucaagcaauucuc

SEQ ID NO: 439165 - RNA, 24 nt, Human
ucccagguucaagcaauucuccug

SEQ ID NO: 439166 - RNA, 22 nt, Human
ucgagaugaaguguucuaucag

SEQ ID NO: 439167 - RNA, 18 nt, Human
ucucaggacccuucacug

SEQ ID NO: 439168 - RNA, 26 nt, Human
ucuccugccuuagccucccaaguagc

SEQ ID NO: 439169 - RNA, 23 nt, Human
ucuguaucuuaaauugagaaaaa

SEQ ID NO: 439170 - RNA, 20 nt, Human
ucugucucugucgcccagga

SEQ ID NO: 439171 - RNA, 24 nt, Human
ucugucucugucgcccaggaugga

SEQ ID NO: 439172 - RNA, 21 nt, Human
ucuugaacuccugaccucaag

SEQ ID NO: 439173 - RNA, 20 nt, Human
ugaaaagcaaaaaagaguua

SEQ ID NO: 439174 - RNA, 24 nt, Human
ugaaguuccacuauuauuauuacc

SEQ ID NO: 439175 - RNA, 22 nt, Human
ugacaaaaugccaucaagccag

SEQ ID NO: 439176 - RNA, 24 nt, Human
ugacaaaaugccaucaagccaggu

SEQ ID NO: 439177 - RNA, 20 nt, Human
ugacagguggacaggguuuu

SEQ ID NO: 439178 - RNA, 22 nt, Human
ugacagguggacaggguuuuua

SEQ ID NO: 439179 - RNA, 22 nt, Human
ugaccucaagugauccaccccc

SEQ ID NO: 439180 - RNA, 20 nt, Human
ugacuauagagcaaccaaau

SEQ ID NO: 439181 - RNA, 18 nt, Human
ugacuggcagcauuggca

SEQ ID NO: 439182 - RNA, 19 nt, Human
ugagaaaaaucaaaaccua

SEQ ID NO: 439183 - RNA, 21 nt, Human
ugagccccgcuuuuucucugu

SEQ ID NO: 439184 - RNA, 20 nt, Human
ugaggucucugaaucaccug

SEQ ID NO: 439185 - RNA, 20 nt, Human
ugauauacugaugggaaauu

SEQ ID NO: 439186 - RNA, 18 nt, Human
ugauccacccccaccccc

SEQ ID NO: 439187 - RNA, 24 nt, Human
ugauuuauaaaggaaacauuccuu

SEQ ID NO: 439188 - RNA, 20 nt, Human
ugauuugugacauugccccc

SEQ ID NO: 439189 - RNA, 28 nt, Human
ugcacaaguaaccaaagguagcaaaucc

SEQ ID NO: 439190 - RNA, 25 nt, Human
ugccaucaagccagguuugcucccc

SEQ ID NO: 439191 - RNA, 24 nt, Human
ugcccaggcuggucuugaacuccu

SEQ ID NO: 439192 - RNA, 24 nt, Human
ugccuuagccucccaaguagcugg

SEQ ID NO: 439193 - RNA, 22 nt, Human
ugcuuaaagccucuacccacac

SEQ ID NO: 439194 - RNA, 19 nt, Human
uggaguacaguggcacaau

SEQ ID NO: 439195 - RNA, 24 nt, Human
uggcacaaucucagcucacugcaa

SEQ ID NO: 439196 - RNA, 19 nt, Human
uggcagcauuggcaaauaa

SEQ ID NO: 439197 - RNA, 21 nt, Human
uggcuucccagaguucuggga

SEQ ID NO: 439198 - RNA, 19 nt, Human
uggcuuguuccccucccca

SEQ ID NO: 439199 - RNA, 19 nt, Human
ugggaacccaaaauuguca

SEQ ID NO: 439200 - RNA, 23 nt, Human
ugggagaagaaagaucacaggaa

SEQ ID NO: 439201 - RNA, 18 nt, Human
ugggauuacaggcgugaa

SEQ ID NO: 439202 - RNA, 19 nt, Human
ugggauuacaggcgugaau

SEQ ID NO: 439203 - RNA, 21 nt, Human
ugggauuacaggcgugaauca

SEQ ID NO: 439204 - RNA, 22 nt, Human
ugggauuacaggcgugaaucac

SEQ ID NO: 439205 - RNA, 23 nt, Human
ugggauuacaggcgugaaucacc

SEQ ID NO: 439206 - RNA, 24 nt, Human
ugggauuacaggcgugaaucaccg

SEQ ID NO: 439207 - RNA, 21 nt, Human
ugggauuacaggugccugcca

SEQ ID NO: 439208 - RNA, 22 nt, Human
ugggauuacaggugccugccac

SEQ ID NO: 439209 - RNA, 24 nt, Human
ugggauuacaggugccugccacca

SEQ ID NO: 439210 - RNA, 21 nt, Human
ugggggaaacuaucacuuaua

SEQ ID NO: 439211 - RNA, 22 nt, Human
ugggggaaacuaucacuuauag

SEQ ID NO: 439212 - RNA, 21 nt, Human
ugggggaggugagagacagug

SEQ ID NO: 439213 - RNA, 24 nt, Human
ugguagagacgggguuucaccaug

SEQ ID NO: 439214 - RNA, 23 nt, Human
uguauccacaucuucagagcagg

SEQ ID NO: 439215 - RNA, 22 nt, Human
uguuacacaguacaagaucuua

SEQ ID NO: 439216 - RNA, 25 nt, Human
uguuccccuccccaaacaaauacua

SEQ ID NO: 439217 - RNA, 22 nt, Human
uuaaacacugucuuuuuggacc

SEQ ID NO: 439218 - RNA, 23 nt, Human
uuagaaaaacauaaaauuuaaag

SEQ ID NO: 439219 - RNA, 23 nt, Human
uuaguauaauuuuucuaaauucu

SEQ ID NO: 439220 - RNA, 24 nt, Human
uucaagcaauucuccugccuuagc

SEQ ID NO: 439221 - RNA, 22 nt, Human
uuccaagcugcuuuugcuaugu

SEQ ID NO: 439222 - RNA, 18 nt, Human
uuccagguuaauccaagc

SEQ ID NO: 439223 - RNA, 25 nt, Human
uuccuaggcaacacugucaacccca

SEQ ID NO: 439224 - RNA, 20 nt, Human
uucucuugugcuggugacag

SEQ ID NO: 439225 - RNA, 20 nt, Human
uugaagguuuugaaacuggu

SEQ ID NO: 439226 - RNA, 18 nt, Human
uugauguaagugugaagu

SEQ ID NO: 439227 - RNA, 20 nt, Human
uugcaaagugucaaagagaa

SEQ ID NO: 439228 - RNA, 19 nt, Human
uugcuccccacuuaaguuc

SEQ ID NO: 439229 - RNA, 20 nt, Human
uuggcuucccagaguucugg

SEQ ID NO: 439230 - RNA, 24 nt, Human
uugguagagacgggguuucaccau

SEQ ID NO: 439231 - RNA, 19 nt, Human
uugugcagcuuucagaaca

SEQ ID NO: 439232 - RNA, 24 nt, Human
uuucaccauguugcccaggcuggu

SEQ ID NO: 439233 - RNA, 21 nt, Human
uuucuugaaaagcaaauuuga

SEQ ID NO: 439234 - RNA, 25 nt, Human
uuugcuccccacuuaaguucaaaua

SEQ ID NO: 439235 - RNA, 20 nt, Human
uuugugcagcuuucagaaca

SEQ ID NO: 439236 - RNA, 26 nt, Human
uuuuaaacacugucuuuuuggaccua

SEQ ID NO: 439237 - RNA, 23 nt, Human
uuuuaacacugcacaaguaacca

SEQ ID NO: 439238 - RNA, 22 nt, Human
uuuuugguagagacgggguuuc

SEQ ID NO: 439239 - RNA, 24 nt, Human
uuuuugguagagacgggguuucac

SEQ ID NO: 439240 - RNA, 20 nt, Human
uuuuuguauuuuugguagag

SEQ ID NO: 439241 - RNA, 20 nt, Human
aaagcuccccaagccugcac

SEQ ID NO: 439242 - RNA, 21 nt, Human
aaaucagucgucaaaucacaa

SEQ ID NO: 439243 - RNA, 24 nt, Human
aacauuaagaaaaaaauauacaau

SEQ ID NO: 439244 - RNA, 24 nt, Human
aagaaccugacuuauuucaugcca

SEQ ID NO: 439245 - RNA, 24 nt, Human
aagagccaaaagacgcgcgcccgc

SEQ ID NO: 439246 - RNA, 24 nt, Human
aagugaccaauuucagaguaccac

SEQ ID NO: 439247 - RNA, 24 nt, Human
acaacuuauccaaaugaauguguu

SEQ ID NO: 439248 - RNA, 25 nt, Human
acaauccaguaucuaucaaaauacc

SEQ ID NO: 439249 - RNA, 22 nt, Human
acauuaagaaaaaaauauacaa

SEQ ID NO: 439250 - RNA, 20 nt, Human
acuccaguuucagaagcaga

SEQ ID NO: 439251 - RNA, 27 nt, Human
agaaaaaaauauacaauagauacagga

SEQ ID NO: 439252 - RNA, 18 nt, Human
agccgacugcgaacgcgc

SEQ ID NO: 439253 - RNA, 21 nt, Human
aggaugggggagaaccggagg

SEQ ID NO: 439254 - RNA, 24 nt, Human
auucuguauguuucaaaaugcuuu

SEQ ID NO: 439255 - RNA, 24 nt, Human
cacaaauauggcacaaacacaauc

SEQ ID NO: 439256 - RNA, 26 nt, Human
cacaauccaguaucuaucaaaauacc

SEQ ID NO: 439257 - RNA, 20 nt, Human
cagaagcagaacuagguauu

SEQ ID NO: 439258 - RNA, 22 nt, Human
cauauaagaguagaaucaaaaa

SEQ ID NO: 439259 - RNA, 18 nt, Human
ccaaugacaauagaacau

SEQ ID NO: 439260 - RNA, 21 nt, Human
ccaauuucagaguaccacuaa

SEQ ID NO: 439261 - RNA, 22 nt, Human
ccggaggaugggggagaaccgg

SEQ ID NO: 439262 - RNA, 18 nt, Human
ccggguuacgccuucccc

SEQ ID NO: 439263 - RNA, 19 nt, Human
ccugccaaccgcagguggu

SEQ ID NO: 439264 - RNA, 18 nt, Human
cgggaucagagcggacug

SEQ ID NO: 439265 - RNA, 20 nt, Human
cuagaaaugagaucaguuga

SEQ ID NO: 439266 - RNA, 19 nt, Human
cuccaguuucagaagcaga

SEQ ID NO: 439267 - RNA, 19 nt, Human
cuccccggcagacgccuag

SEQ ID NO: 439268 - RNA, 19 nt, Human
cuccguguaauaggaaagu

SEQ ID NO: 439269 - RNA, 19 nt, Human
cuccugccugccaaccgca

SEQ ID NO: 439270 - RNA, 21 nt, Human
cuuaaagcuccccaagccugc

SEQ ID NO: 439271 - RNA, 21 nt, Human
cuuagcgggucccugcccucc

SEQ ID NO: 439272 - RNA, 18 nt, Human
gaccucaaucauuaguga

SEQ ID NO: 439273 - RNA, 25 nt, Human
gcagcagcauucauuuucuucuacu

SEQ ID NO: 439274 - RNA, 21 nt, Human
gccaugugugaaugcagucca

SEQ ID NO: 439275 - RNA, 23 nt, Human
gccgcagggacaggggcaagagc

SEQ ID NO: 439276 - RNA, 19 nt, Human
gcgaacgcgcccagccugc

SEQ ID NO: 439277 - RNA, 24 nt, Human
gggacaggggcaagagccaaaaga

SEQ ID NO: 439278 - RNA, 19 nt, Human
ggucuuggaaagaggaaau

SEQ ID NO: 439279 - RNA, 22 nt, Human
gugaagcaaauauuuuauuuaa

SEQ ID NO: 439280 - RNA, 24 nt, Human
guuucagaagcagaacuagguauu

SEQ ID NO: 439281 - RNA, 24 nt, Human
uaaaagaauggcacaaauauggca

SEQ ID NO: 439282 - RNA, 19 nt, Human
uaaagcuccccaagccugc

SEQ ID NO: 439283 - RNA, 30 nt, Human
uaagaaaaaaauauacaauagauacaggaa

SEQ ID NO: 439284 - RNA, 20 nt, Human
uagcgggucccugcccuccc

SEQ ID NO: 439285 - RNA, 19 nt, Human
uauaacugaggcuuaaagc

SEQ ID NO: 439286 - RNA, 25 nt, Human
ucagcuuagcgggucccugcccucc

SEQ ID NO: 439287 - RNA, 21 nt, Human
uccagguuaagaauuuaggac

SEQ ID NO: 439288 - RNA, 24 nt, Human
uccccaagccgcagggacaggggc

SEQ ID NO: 439289 - RNA, 19 nt, Human
uccccaagccugcacuaug

SEQ ID NO: 439290 - RNA, 23 nt, Human
uccccaagccugcacuauggcac

SEQ ID NO: 439291 - RNA, 21 nt, Human
uccccggcagacgccuagucu

SEQ ID NO: 439292 - RNA, 24 nt, Human
uccuccgcacuucucccgcgccua

SEQ ID NO: 439293 - RNA, 18 nt, Human
ucuaggaggcucuguuuu

SEQ ID NO: 439294 - RNA, 23 nt, Human
ucuucacauucuggucuuccaaa

SEQ ID NO: 439295 - RNA, 27 nt, Human
ucuucagucucagcagcagcauucauu

SEQ ID NO: 439296 - RNA, 21 nt, Human
ugaagcaaauauuuuauuuaa

SEQ ID NO: 439297 - RNA, 21 nt, Human
ugaggcuuaaagcuccccaag

SEQ ID NO: 439298 - RNA, 22 nt, Human
ugccaugugugaaugcagucca

SEQ ID NO: 439299 - RNA, 19 nt, Human
uggucuuggaaagaggaaa

SEQ ID NO: 439300 - RNA, 24 nt, Human
uguaguauccugcacauuuccuuc

SEQ ID NO: 439301 - RNA, 25 nt, Human
ugugugaaugcaguccagcauauag

SEQ ID NO: 439302 - RNA, 21 nt, Human
uuaaauggcucuagcuccuga

SEQ ID NO: 439303 - RNA, 20 nt, Human
uuccuuaaacauuaagaaaa

SEQ ID NO: 439304 - RNA, 22 nt, Human
aaagucaaugaagaugcuggga

SEQ ID NO: 439305 - RNA, 26 nt, Human
aucuuguuucuuccuguggccuucca

SEQ ID NO: 439306 - RNA, 18 nt, Human
auggacaggaaaaucugc

SEQ ID NO: 439307 - RNA, 18 nt, Human
ccacggaagacuccagaa

SEQ ID NO: 439308 - RNA, 18 nt, Human
ccagaagaggggaaagca

SEQ ID NO: 439309 - RNA, 18 nt, Human
ccggccccacugccagaa

SEQ ID NO: 439310 - RNA, 19 nt, Human
gauauagagggggagaugu

SEQ ID NO: 439311 - RNA, 18 nt, Human
gauguggaagugagaaag

SEQ ID NO: 439312 - RNA, 23 nt, Human
gccagaagaggggaaagcagugg

SEQ ID NO: 439313 - RNA, 21 nt, Human
uagcacaagaugacaugucuu

SEQ ID NO: 439314 - RNA, 21 nt, Human
ucaguuuaccccccuccugcc

SEQ ID NO: 439315 - RNA, 21 nt, Human
ucccucaguuuaccccccucc

SEQ ID NO: 439316 - RNA, 21 nt, Human
ucugagauaugaggaaagcuc

SEQ ID NO: 439317 - RNA, 28 nt, Human
ucugcaaaauccaguggcuagcacaaga

SEQ ID NO: 439318 - RNA, 19 nt, Human
ugaagaugcugggauguuc

SEQ ID NO: 439319 - RNA, 18 nt, Human
ugaugagaguggugugaa

SEQ ID NO: 439320 - RNA, 19 nt, Human
ugcugggauguucuugcuc

SEQ ID NO: 439321 - RNA, 18 nt, Human
ugcuugcauggacaggaa

SEQ ID NO: 439322 - RNA, 19 nt, Human
uggaauagugaaccacgga

SEQ ID NO: 439323 - RNA, 21 nt, Human
ugggauguucuugcucagcuc

SEQ ID NO: 439324 - RNA, 21 nt, Human
uggugugaagauaauguuagg

SEQ ID NO: 439325 - RNA, 21 nt, Human
uuuuuggagcccuuuaauugu

SEQ ID NO: 439326 - RNA, 29 nt, Human
aaaaagaugagcaaaaaugucacacuagg

SEQ ID NO: 439327 - RNA, 18 nt, Human
aaacaacaagaaccaaaa

SEQ ID NO: 439328 - RNA, 19 nt, Human
aacaacaagaaccaaaaau

SEQ ID NO: 439329 - RNA, 18 nt, Human
accacaauauuacaaaga

SEQ ID NO: 439330 - RNA, 26 nt, Human
agcaaacaacaagaaccaaaaaugaa

SEQ ID NO: 439331 - RNA, 22 nt, Human
agccagaugacaaaacugaacu

SEQ ID NO: 439332 - RNA, 18 nt, Human
aguauagaaaugcccagu

SEQ ID NO: 439333 - RNA, 22 nt, Human
aguuguuuuaggugguuucucu

SEQ ID NO: 439334 - RNA, 26 nt, Human
augagccuauuauuuucugugguguc

SEQ ID NO: 439335 - RNA, 22 nt, Human
caaagauggugguaucaccacg

SEQ ID NO: 439336 - RNA, 26 nt, Human
caacaagaaccaaaaaugaagugcag

SEQ ID NO: 439337 - RNA, 21 nt, Human
cacauguuuccaccauaaucu

SEQ ID NO: 439338 - RNA, 25 nt, Human
ccagccagaugacaaaacugaacuc

SEQ ID NO: 439339 - RNA, 24 nt, Human
cuaaaaauguauguuccaucaagg

SEQ ID NO: 439340 - RNA, 21 nt, Human
cuauuauuuucuguggagacu

SEQ ID NO: 439341 - RNA, 18 nt, Human
cucagauuaacacaagau

SEQ ID NO: 439342 - RNA, 20 nt, Human
cugucauuucccacucuuaa

SEQ ID NO: 439343 - RNA, 23 nt, Human
cuuaaagcuuauguucugaaacu

SEQ ID NO: 439344 - RNA, 21 nt, Human
gaaaauuuagcauuacuguca

SEQ ID NO: 439345 - RNA, 26 nt, Human
gaagugcaggaugaaaagcaagcuga

SEQ ID NO: 439346 - RNA, 21 nt, Human
gagcucagauuaacacaagau

SEQ ID NO: 439347 - RNA, 26 nt, Human
gcaaacaacaagaaccaaaaaugaag

SEQ ID NO: 439348 - RNA, 20 nt, Human
gcaaguuaagcaaacaacaa

SEQ ID NO: 439349 - RNA, 25 nt, Human
gcccuauuaaagaguucagugugau

SEQ ID NO: 439350 - RNA, 19 nt, Human
gcuguaacagagcucagau

SEQ ID NO: 439351 - RNA, 21 nt, Human
ggcagagcuguaacagagcuc

SEQ ID NO: 439352 - RNA, 18 nt, Human
guaaaauuucuuccaggc

SEQ ID NO: 439353 - RNA, 19 nt, Human
guaaaauuucuuccaggca

SEQ ID NO: 439354 - RNA, 21 nt, Human
uaacacaagauugcuuguugc

SEQ ID NO: 439355 - RNA, 19 nt, Human
uaagcaaacaacaagaacc

SEQ ID NO: 439356 - RNA, 20 nt, Human
uaagcaaacaacaagaacca

SEQ ID NO: 439357 - RNA, 27 nt, Human
uaagcaaacaacaagaaccaaaaauga

SEQ ID NO: 439358 - RNA, 19 nt, Human
uaaggucauagccagaguu

SEQ ID NO: 439359 - RNA, 19 nt, Human
uacauacaucucuaauccu

SEQ ID NO: 439360 - RNA, 28 nt, Human
uaugacucuaaagugcaaguuaagcaaa

SEQ ID NO: 439361 - RNA, 19 nt, Human
uauuaaagaguucagugug

SEQ ID NO: 439362 - RNA, 18 nt, Human
uauugagcaauucuuggg

SEQ ID NO: 439363 - RNA, 19 nt, Human
uauuuuguuuuauccuccu

SEQ ID NO: 439364 - RNA, 23 nt, Human
ucacuaugagccuauuauuuucu

SEQ ID NO: 439365 - RNA, 20 nt, Human
uccagccagaugacaaaagg

SEQ ID NO: 439366 - RNA, 23 nt, Human
uccucaccacaauauuacaaaga

SEQ ID NO: 439367 - RNA, 19 nt, Human
ucugcacauaguuggaagu

SEQ ID NO: 439368 - RNA, 19 nt, Human
ugagagaaaagaaaguggu

SEQ ID NO: 439369 - RNA, 19 nt, Human
ugagauuacggcagagcug

SEQ ID NO: 439370 - RNA, 20 nt, Human
ugcaggaugaaaagcaagcu

SEQ ID NO: 439371 - RNA, 20 nt, Human
uggagaauaaacauuggggu

SEQ ID NO: 439372 - RNA, 27 nt, Human
uguaacagagcucagauuaacacaaga

SEQ ID NO: 439373 - RNA, 22 nt, Human
ugugaauugcuuaugacucuaa

SEQ ID NO: 439374 - RNA, 24 nt, Human
uuaguuguguugucugugugaauu

SEQ ID NO: 439375 - RNA, 24 nt, Human
uuccuuagcagccuuuugugacaa

SEQ ID NO: 439376 - RNA, 27 nt, Human
uuguuuuauccuccuuguugaaacuuc

SEQ ID NO: 439377 - RNA, 23 nt, Human
aaaaaaaaauccagauugauaca

SEQ ID NO: 439378 - RNA, 21 nt, Human
aaaacagcaucuccugauccc

SEQ ID NO: 439379 - RNA, 22 nt, Human
aaaacucuuucaauaaacacag

SEQ ID NO: 439380 - RNA, 22 nt, Human
aaaccucacuucuuuccaaaac

SEQ ID NO: 439381 - RNA, 21 nt, Human
aaauacagcaaggcacacuuu

SEQ ID NO: 439382 - RNA, 18 nt, Human
aacaguuugccuuaacag

SEQ ID NO: 439383 - RNA, 19 nt, Human
aaccagaggccagcccagg

SEQ ID NO: 439384 - RNA, 25 nt, Human
aacggcagugacaaacgugauggaa

SEQ ID NO: 439385 - RNA, 20 nt, Human
aacuuuccacucucugcaag

SEQ ID NO: 439386 - RNA, 18 nt, Human
aagauaaucugggcugcu

SEQ ID NO: 439387 - RNA, 24 nt, Human
aauaaaugguauaagaaauacagc

SEQ ID NO: 439388 - RNA, 23 nt, Human
aauucaguaaauuuuuauugaau

SEQ ID NO: 439389 - RNA, 22 nt, Human
acaauaauagaauaaacauauc

SEQ ID NO: 439390 - RNA, 24 nt, Human
acagccuucugagggcagggcuuu

SEQ ID NO: 439391 - RNA, 20 nt, Human
acauggggugggagauugag

SEQ ID NO: 439392 - RNA, 18 nt, Human
accaugucaccuaauuua

SEQ ID NO: 439393 - RNA, 22 nt, Human
accucacuucuuuccaaaacag

SEQ ID NO: 439394 - RNA, 22 nt, Human
acuaccuauuaagaagccuaga

SEQ ID NO: 439395 - RNA, 23 nt, Human
agaaagaacuuucuaacaaagag

SEQ ID NO: 439396 - RNA, 19 nt, Human
agacaggagaauuuaaugg

SEQ ID NO: 439397 - RNA, 21 nt, Human
agaugaugaguaacuggccuu

SEQ ID NO: 439398 - RNA, 22 nt, Human
agggaagggaggaggcaaagag

SEQ ID NO: 439399 - RNA, 18 nt, Human
agggauagaugucaccau

SEQ ID NO: 439400 - RNA, 18 nt, Human
auacauauauacagaaau

SEQ ID NO: 439401 - RNA, 21 nt, Human
auucaaauguuggcuuuuuag

SEQ ID NO: 439402 - RNA, 19 nt, Human
auuccacuaacuuuccacu

SEQ ID NO: 439403 - RNA, 22 nt, Human
auucuagacaggagaauuuaau

SEQ ID NO: 439404 - RNA, 22 nt, Human
caaaacagcaucuccugauccc

SEQ ID NO: 439405 - RNA, 20 nt, Human
caaccaauucaaauguuggc

SEQ ID NO: 439406 - RNA, 19 nt, Human
caacuagaugucuggcuaa

SEQ ID NO: 439407 - RNA, 21 nt, Human
cacaucuuaaccuugcuauuu

SEQ ID NO: 439408 - RNA, 24 nt, Human
caccaugucaccuaauuuaauccu

SEQ ID NO: 439409 - RNA, 21 nt, Human
cagaaagauuuugaaaacuga

SEQ ID NO: 439410 - RNA, 19 nt, Human
cagcccagggcgggaggau

SEQ ID NO: 439411 - RNA, 20 nt, Human
cagccuucugagggcagggc

SEQ ID NO: 439412 - RNA, 21 nt, Human
caugaacccacaacauucuuu

SEQ ID NO: 439413 - RNA, 18 nt, Human
cccacaacauucuuuacc

SEQ ID NO: 439414 - RNA, 19 nt, Human
cccagggcgggaggaugag

SEQ ID NO: 439415 - RNA, 21 nt, Human
cccagggcgggaggaugaggc

SEQ ID NO: 439416 - RNA, 19 nt, Human
ccccugaguugcagccagg

SEQ ID NO: 439417 - RNA, 20 nt, Human
ccccugaguugcagccaggc

SEQ ID NO: 439418 - RNA, 21 nt, Human
ccuuccauuaaguccucccaa

SEQ ID NO: 439419 - RNA, 19 nt, Human
ccuuguacccacugcugcu

SEQ ID NO: 439420 - RNA, 18 nt, Human
cggcagugacaaacguga

SEQ ID NO: 439421 - RNA, 23 nt, Human
cuaaaccucacuucuuuccaaag

SEQ ID NO: 439422 - RNA, 22 nt, Human
cuaacuuuccacucucugcaag

SEQ ID NO: 439423 - RNA, 24 nt, Human
cuagacaggagaauuuaauggacu

SEQ ID NO: 439424 - RNA, 22 nt, Human
cucaagaagcauaaaaaaugaa

SEQ ID NO: 439425 - RNA, 20 nt, Human
cucuaugcugcaaccaauuc

SEQ ID NO: 439426 - RNA, 25 nt, Human
cuggcuaaaaccgcuuuugaacaaa

SEQ ID NO: 439427 - RNA, 21 nt, Human
cuguacuuuucuacuagcuuu

SEQ ID NO: 439428 - RNA, 20 nt, Human
cuuccaaccugaaaaggcau

SEQ ID NO: 439429 - RNA, 26 nt, Human
cuuccaaccugaaaaggcauuguuca

SEQ ID NO: 439430 - RNA, 22 nt, Human
cuugcuauuuccuccuuucaaa

SEQ ID NO: 439431 - RNA, 21 nt, Human
gaacugacauuuaaucauuug

SEQ ID NO: 439432 - RNA, 18 nt, Human
gaaggaccaguguuucuu

SEQ ID NO: 439433 - RNA, 22 nt, Human
gaagggaagggaggaggcaaag

SEQ ID NO: 439434 - RNA, 24 nt, Human
gaagggaagggaggaggcaaagag

SEQ ID NO: 439435 - RNA, 19 nt, Human
gaagggaggaggcaaagag

SEQ ID NO: 439436 - RNA, 21 nt, Human
gacaucacaaacaugaaagca

SEQ ID NO: 439437 - RNA, 18 nt, Human
gagaaaacacauuuggaa

SEQ ID NO: 439438 - RNA, 22 nt, Human
gauuuucaugcuuggggagggg

SEQ ID NO: 439439 - RNA, 18 nt, Human
gcaaaacagccuguacaa

SEQ ID NO: 439440 - RNA, 21 nt, Human
gcacacuuuuuuaaaaaacuu

SEQ ID NO: 439441 - RNA, 25 nt, Human
ggaaaagaucagaaggggcauaaaa

SEQ ID NO: 439442 - RNA, 21 nt, Human
ggaaguguguaggcagaguug

SEQ ID NO: 439443 - RNA, 18 nt, Human
ggcauuguucaacaaacc

SEQ ID NO: 439444 - RNA, 19 nt, Human
gugcaaaacagccuguaca

SEQ ID NO: 439445 - RNA, 22 nt, Human
uaaaaaaugaaaauguuguaca

SEQ ID NO: 439446 - RNA, 20 nt, Human
uaaaagaccuuccauuaagu

SEQ ID NO: 439447 - RNA, 22 nt, Human
uaaaauaaauuaagacauacaa

SEQ ID NO: 439448 - RNA, 18 nt, Human
uaaaauaauaccauaucc

SEQ ID NO: 439449 - RNA, 23 nt, Human
uaaaauaauaccauaucccaaca

SEQ ID NO: 439450 - RNA, 19 nt, Human
uaaagugguagaauuacag

SEQ ID NO: 439451 - RNA, 24 nt, Human
uaaauaaaaucaggugcaaaacag

SEQ ID NO: 439452 - RNA, 22 nt, Human
uaacaaauacuuucaauacugc

SEQ ID NO: 439453 - RNA, 19 nt, Human
uaaggguaauuggggaggu

SEQ ID NO: 439454 - RNA, 24 nt, Human
uaaucucuuucccccauaauccuc

SEQ ID NO: 439455 - RNA, 23 nt, Human
uaauucaauaguagaaugucacc

SEQ ID NO: 439456 - RNA, 20 nt, Human
uaccugaaauccaacauuaa

SEQ ID NO: 439457 - RNA, 22 nt, Human
uagaauaaacauaucuugaaua

SEQ ID NO: 439458 - RNA, 18 nt, Human
uagacaauuaucucuaau

SEQ ID NO: 439459 - RNA, 23 nt, Human
uagacaucacaaacaugaaagca

SEQ ID NO: 439460 - RNA, 25 nt, Human
uagcgggguacuaggcagauuuuaa

SEQ ID NO: 439461 - RNA, 22 nt, Human
uaggagaugccuuguuugaccu

SEQ ID NO: 439462 - RNA, 18 nt, Human
uaguauaaauguuuauug

SEQ ID NO: 439463 - RNA, 21 nt, Human
ucacacaucuuaaccuugcua

SEQ ID NO: 439464 - RNA, 21 nt, Human
ucacuggaaguguguaggcag

SEQ ID NO: 439465 - RNA, 21 nt, Human
ucacuucuuuccaaaacagca

SEQ ID NO: 439466 - RNA, 24 nt, Human
ucagucagguuggaauggaucuga

SEQ ID NO: 439467 - RNA, 26 nt, Human
ucagucagguuggaauggaucugaaa

SEQ ID NO: 439468 - RNA, 22 nt, Human
uccacaucacuagacaucacaa

SEQ ID NO: 439469 - RNA, 20 nt, Human
ucccccauaauccucuugaa

SEQ ID NO: 439470 - RNA, 18 nt, Human
uccuccuuguacccacug

SEQ ID NO: 439471 - RNA, 24 nt, Human
ucgcacuuaaauguucagauucuu

SEQ ID NO: 439472 - RNA, 26 nt, Human
ucuaaaccucacuucuuuccaaaaca

SEQ ID NO: 439473 - RNA, 18 nt, Human
ucuaaucucuuuccccca

SEQ ID NO: 439474 - RNA, 18 nt, Human
ucuaugcugcaaccaauu

SEQ ID NO: 439475 - RNA, 22 nt, Human
ucuaugcugcaaccaauucaaa

SEQ ID NO: 439476 - RNA, 25 nt, Human
ucuccugaucccaccgucuucuuuu

SEQ ID NO: 439477 - RNA, 26 nt, Human
ucuccugaucccaccgucuucuuuug

SEQ ID NO: 439478 - RNA, 18 nt, Human
ugaaagucauucuacaaa

SEQ ID NO: 439479 - RNA, 25 nt, Human
ugaaagucauucuacaaauuuagug

SEQ ID NO: 439480 - RNA, 24 nt, Human
ugacauuaguuacuacccaaagaa

SEQ ID NO: 439481 - RNA, 19 nt, Human
ugcaagcccuuuuucuucc

SEQ ID NO: 439482 - RNA, 25 nt, Human
ugcuccauaagacagaacaggguag

SEQ ID NO: 439483 - RNA, 20 nt, Human
ugcugcaaccaauucaaaug

SEQ ID NO: 439484 - RNA, 23 nt, Human
ugggagaagucaauguaauaaac

SEQ ID NO: 439485 - RNA, 18 nt, Human
uggggugggagauugagg

SEQ ID NO: 439486 - RNA, 19 nt, Human
uggggugggagauugaggc

SEQ ID NO: 439487 - RNA, 23 nt, Human
uguaaaauaauaccauaucccaa

SEQ ID NO: 439488 - RNA, 18 nt, Human
ugugacuuuauauugcau

SEQ ID NO: 439489 - RNA, 22 nt, Human
uuacuaccuauuaagaagccua

SEQ ID NO: 439490 - RNA, 21 nt, Human
uuagaaauuucaaagacucua

SEQ ID NO: 439491 - RNA, 21 nt, Human
uucaaaauaaauauuuaaaau

SEQ ID NO: 439492 - RNA, 20 nt, Human
uucaacaaaccugaaaguca

SEQ ID NO: 439493 - RNA, 21 nt, Human
uuccauuaaguccucccaauu

SEQ ID NO: 439494 - RNA, 24 nt, Human
uucuggaucuagaauagugccuug

SEQ ID NO: 439495 - RNA, 25 nt, Human
uugcauuguaccucuuucuaguugu

SEQ ID NO: 439496 - RNA, 23 nt, Human
uuuaaucauuugcuguuccaaga

SEQ ID NO: 439497 - RNA, 24 nt, Human
uuuacagcacaucuguaggaugca

SEQ ID NO: 439498 - RNA, 23 nt, Human
uuucaugaauauuccacuaacuu

SEQ ID NO: 439499 - RNA, 25 nt, Human
uuugauauauauuaucuauugugac

SEQ ID NO: 439500 - RNA, 18 nt, Human
aaaacacaaguguagcuc

SEQ ID NO: 439501 - RNA, 23 nt, Human
acgcugcaagucagucccuagac

SEQ ID NO: 439502 - RNA, 24 nt, Human
acgcugcaagucagucccuagacc

SEQ ID NO: 439503 - RNA, 20 nt, Human
acuugggccauucuucuuuc

SEQ ID NO: 439504 - RNA, 21 nt, Human
agaaauaucucacaacagcua

SEQ ID NO: 439505 - RNA, 18 nt, Human
agagggaagcagggaggc

SEQ ID NO: 439506 - RNA, 20 nt, Human
agcuacuuaauaagcugaaa

SEQ ID NO: 439507 - RNA, 21 nt, Human
aggagaagggaacuugcugcc

SEQ ID NO: 439508 - RNA, 23 nt, Human
agggauacgauaagaccuggagc

SEQ ID NO: 439509 - RNA, 22 nt, Human
agugaaaaaauagcuaaaaucc

SEQ ID NO: 439510 - RNA, 21 nt, Human
auagaaaagguugcauuucac

SEQ ID NO: 439511 - RNA, 20 nt, Human
auagcacagucugcgagcac

SEQ ID NO: 439512 - RNA, 27 nt, Human
auagcacagucugcgagcacacccugc

SEQ ID NO: 439513 - RNA, 24 nt, Human
caaacagaagcagugcaaacaaag

SEQ ID NO: 439514 - RNA, 23 nt, Human
caaagagcuacuuaauaagcuga

SEQ ID NO: 439515 - RNA, 24 nt, Human
caaauucucauuaaaaguaacacu

SEQ ID NO: 439516 - RNA, 24 nt, Human
caagucagucccuagacucagcag

SEQ ID NO: 439517 - RNA, 25 nt, Human
caagucagucccuagacucagcaga

SEQ ID NO: 439518 - RNA, 23 nt, Human
cacaacagcuaauuaagaaauca

SEQ ID NO: 439519 - RNA, 23 nt, Human
cacccugccuuuuucacuccacg

SEQ ID NO: 439520 - RNA, 19 nt, Human
cacugcauagcaacagcac

SEQ ID NO: 439521 - RNA, 19 nt, Human
cagcacaggcagcuugaag

SEQ ID NO: 439522 - RNA, 23 nt, Human
cagcacaggcagcuugaagagcc

SEQ ID NO: 439523 - RNA, 23 nt, Human
cauguauuccuuaagaaaugaaa

SEQ ID NO: 439524 - RNA, 23 nt, Human
ccagugaaaaaauagcuaaaauc

SEQ ID NO: 439525 - RNA, 23 nt, Human
cccaaauagaaauugcaguuuau

SEQ ID NO: 439526 - RNA, 19 nt, Human
ccccaaauagaaauugcag

SEQ ID NO: 439527 - RNA, 19 nt, Human
ccgugagcaaaaaaggcuc

SEQ ID NO: 439528 - RNA, 22 nt, Human
ccuagacucagcagagggaagc

SEQ ID NO: 439529 - RNA, 21 nt, Human
ccucagauaaaguagucaaau

SEQ ID NO: 439530 - RNA, 21 nt, Human
cuagacucagcagagggaagc

SEQ ID NO: 439531 - RNA, 24 nt, Human
cuccauuuuucuucuguuguguuu

SEQ ID NO: 439532 - RNA, 20 nt, Human
cugccagucccagcacucca

SEQ ID NO: 439533 - RNA, 23 nt, Human
cugccgugagcaaaaaaggcucc

SEQ ID NO: 439534 - RNA, 19 nt, Human
cuguuguuggcucuguuuu

SEQ ID NO: 439535 - RNA, 19 nt, Human
gagagaaaggagaagggaa

SEQ ID NO: 439536 - RNA, 22 nt, Human
gcaccagagaaacuuaacuuaa

SEQ ID NO: 439537 - RNA, 20 nt, Human
gcagcacaggcagcuugaag

SEQ ID NO: 439538 - RNA, 22 nt, Human
gcguccaggaggcauaacccaa

SEQ ID NO: 439539 - RNA, 18 nt, Human
gggaggcuuugcacagag

SEQ ID NO: 439540 - RNA, 18 nt, Human
guaguauaauuuacccag

SEQ ID NO: 439541 - RNA, 20 nt, Human
guauuccuuaagaaaugaaa

SEQ ID NO: 439542 - RNA, 21 nt, Human
guggcugagggcgaaugaaac

SEQ ID NO: 439543 - RNA, 18 nt, Human
uaaaaaauaaaaauccca

SEQ ID NO: 439544 - RNA, 20 nt, Human
uaaaaaauaaaaaucccaaa

SEQ ID NO: 439545 - RNA, 20 nt, Human
uaaaacacaaguguagcuca

SEQ ID NO: 439546 - RNA, 18 nt, Human
uaacccaaaguucccuuu

SEQ ID NO: 439547 - RNA, 22 nt, Human
uaagcugaaaagauuucauaag

SEQ ID NO: 439548 - RNA, 23 nt, Human
uaagcugaaaagauuucauaagc

SEQ ID NO: 439549 - RNA, 22 nt, Human
uacccagugaaaaaauagcuaa

SEQ ID NO: 439550 - RNA, 24 nt, Human
uagcacagucugcgagcacacccu

SEQ ID NO: 439551 - RNA, 23 nt, Human
uagcucaaaaaauaauugggcag

SEQ ID NO: 439552 - RNA, 18 nt, Human
uauuacagaaacagauau

SEQ ID NO: 439553 - RNA, 18 nt, Human
ucaaaguugugcugaaau

SEQ ID NO: 439554 - RNA, 19 nt, Human
uccaugaguaaacuggauu

SEQ ID NO: 439555 - RNA, 23 nt, Human
uccauuuuucuucuguuguguuu

SEQ ID NO: 439556 - RNA, 21 nt, Human
ucuaaaacacaaguguagcuc

SEQ ID NO: 439557 - RNA, 25 nt, Human
ucuccagugauuuccccuucccaag

SEQ ID NO: 439558 - RNA, 26 nt, Human
ucuccgugaggaccccaaauagaaau

SEQ ID NO: 439559 - RNA, 20 nt, Human
ucugucuuuccugguguucu

SEQ ID NO: 439560 - RNA, 21 nt, Human
ugaaaaaauagcuaaaaucca

SEQ ID NO: 439561 - RNA, 22 nt, Human
ugaaaaaauagcuaaaauccau

SEQ ID NO: 439562 - RNA, 24 nt, Human
ugaaaaaauagcuaaaauccauga

SEQ ID NO: 439563 - RNA, 18 nt, Human
ugaaaaagcagaacaaca

SEQ ID NO: 439564 - RNA, 19 nt, Human
ugaaaaagcagaacaacau

SEQ ID NO: 439565 - RNA, 25 nt, Human
ugaaacauaauuuacuauaaauaaa

SEQ ID NO: 439566 - RNA, 25 nt, Human
ugaggaccccaaauagaaauugcag

SEQ ID NO: 439567 - RNA, 24 nt, Human
ugagggcgaaugaaacuugggcca

SEQ ID NO: 439568 - RNA, 19 nt, Human
ugaucuacuccaucaauga

SEQ ID NO: 439569 - RNA, 21 nt, Human
ugaucuccagugauuuccccu

SEQ ID NO: 439570 - RNA, 18 nt, Human
ugcaaacaaguucagaug

SEQ ID NO: 439571 - RNA, 18 nt, Human
ugcacagagacauggggg

SEQ ID NO: 439572 - RNA, 23 nt, Human
ugcguccaggaggcauaacccaa

SEQ ID NO: 439573 - RNA, 25 nt, Human
uggcaaggccucuuucucggccuuu

SEQ ID NO: 439574 - RNA, 22 nt, Human
uggcauacugacuuaucaaaau

SEQ ID NO: 439575 - RNA, 25 nt, Human
uguaguauaauuuacccagugaaaa

SEQ ID NO: 439576 - RNA, 24 nt, Human
ugucugucuuuccugguguucuuc

SEQ ID NO: 439577 - RNA, 21 nt, Human
uuaaaaaaacuuuaaaauguu

SEQ ID NO: 439578 - RNA, 19 nt, Human
uuacauauuugaucuccag

SEQ ID NO: 439579 - RNA, 22 nt, Human
uucccuugugcguggcugaggg

SEQ ID NO: 439580 - RNA, 23 nt, Human
uuccuucaaaaagcucccuccua

SEQ ID NO: 439581 - RNA, 20 nt, Human
uucucauuaaaaguaacacu

SEQ ID NO: 439582 - RNA, 19 nt, Human
uucucgaugcaaagcuuca

SEQ ID NO: 439583 - RNA, 22 nt, Human
uucuuuggcaagaaauugcuaa

SEQ ID NO: 439584 - RNA, 24 nt, Human
uucuuugguguuuaccaaagagcu

SEQ ID NO: 439585 - RNA, 22 nt, Human
uugcugccgugagcaaaaaagg

SEQ ID NO: 439586 - RNA, 18 nt, Human
uuugaucagugaaaaaua

SEQ ID NO: 439587 - RNA, 19 nt, Human
uuuuuuuuuuuucaaggga

SEQ ID NO: 439588 - RNA, 24 nt, Human
uuuuuuuuuuuuuuuuuuucaagg

SEQ ID NO: 439589 - RNA, 18 nt, Human
aaaggaaaaaaaccugaa

SEQ ID NO: 439590 - RNA, 18 nt, Human
aaggaaaaaaauaaaaaa

SEQ ID NO: 439591 - RNA, 18 nt, Human
aagugcugggauuauagg

SEQ ID NO: 439592 - RNA, 18 nt, Human
aagugcugggauuauagg

SEQ ID NO: 439593 - RNA, 21 nt, Human
accacggccuccccaagugcu

SEQ ID NO: 439594 - RNA, 23 nt, Human
acuucagcuuugaaaccugggca

SEQ ID NO: 439595 - RNA, 18 nt, Human
agaaugugcuuggugagu

SEQ ID NO: 439596 - RNA, 21 nt, Human
agagauggggucuugcuaugu

SEQ ID NO: 439597 - RNA, 22 nt, Human
agauaccuucuaucuauggcaa

SEQ ID NO: 439598 - RNA, 22 nt, Human
agcaaggacuaaagauugggac

SEQ ID NO: 439599 - RNA, 19 nt, Human
agcauuccaucaguggcug

SEQ ID NO: 439600 - RNA, 22 nt, Human
agccacacgacugcaugagaca

SEQ ID NO: 439601 - RNA, 20 nt, Human
agccgcuaaggacaauguac

SEQ ID NO: 439602 - RNA, 21 nt, Human
aguauucagcuguucccaacc

SEQ ID NO: 439603 - RNA, 20 nt, Human
auagagcaagauauauuccu

SEQ ID NO: 439604 - RNA, 23 nt, Human
aucaaguuuucuuuccuuuuuuu

SEQ ID NO: 439605 - RNA, 18 nt, Human
augcaucaccgugccugg

SEQ ID NO: 439606 - RNA, 18 nt, Human
augugcuuggugaguuag

SEQ ID NO: 439607 - RNA, 24 nt, Human
caaaaaaaaauccucuauagagca

SEQ ID NO: 439608 - RNA, 19 nt, Human
caagaagccacacgacugc

SEQ ID NO: 439609 - RNA, 19 nt, Human
caagugcugggauuauagg

SEQ ID NO: 439610 - RNA, 19 nt, Human
caccuauggcaaucacauc

SEQ ID NO: 439611 - RNA, 24 nt, Human
caccuggaaucuccacuaaggcuc

SEQ ID NO: 439612 - RNA, 20 nt, Human
cagcaaggacuaaagauugg

SEQ ID NO: 439613 - RNA, 24 nt, Human
cagcagggccauuucaaaagggga

SEQ ID NO: 439614 - RNA, 21 nt, Human
caucccaacgccuucccugga

SEQ ID NO: 439615 - RNA, 22 nt, Human
caugcuagccucccuuucucag

SEQ ID NO: 439616 - RNA, 18 nt, Human
ccaacgcauccaucaucc

SEQ ID NO: 439617 - RNA, 20 nt, Human
ccaagugcugggauuauagg

SEQ ID NO: 439618 - RNA, 20 nt, Human
ccaagugcugggauuauagg

SEQ ID NO: 439619 - RNA, 24 nt, Human
ccaagugcugggauuauagguaug

SEQ ID NO: 439620 - RNA, 18 nt, Human
ccacaugugaaccaggug

SEQ ID NO: 439621 - RNA, 20 nt, Human
ccacggccuccccaagugcu

SEQ ID NO: 439622 - RNA, 18 nt, Human
ccaguggccagcguuucc

SEQ ID NO: 439623 - RNA, 18 nt, Human
cccaagugcugggauuau

SEQ ID NO: 439624 - RNA, 24 nt, Human
cccaagugcugggauuauagguau

SEQ ID NO: 439625 - RNA, 22 nt, Human
ccccaagugcugggauuauagg

SEQ ID NO: 439626 - RNA, 21 nt, Human
ccccugguauacaguagaggc

SEQ ID NO: 439627 - RNA, 22 nt, Human
ccucaugagcagggcccaauuc

SEQ ID NO: 439628 - RNA, 18 nt, Human
ccugaaguaaucuagagg

SEQ ID NO: 439629 - RNA, 18 nt, Human
cgacugcaugagacaagc

SEQ ID NO: 439630 - RNA, 23 nt, Human
cgcuaaggacaauguacuucagc

SEQ ID NO: 439631 - RNA, 21 nt, Human
cuaaggacaauguacuucagc

SEQ ID NO: 439632 - RNA, 23 nt, Human
cuccugggcuuaagcuauccucu

SEQ ID NO: 439633 - RNA, 20 nt, Human
cugaagcuugaaacauacaa

SEQ ID NO: 439634 - RNA, 24 nt, Human
cugcuuacaaaccaagggagaaag

SEQ ID NO: 439635 - RNA, 21 nt, Human
cugggauuauagguaugcauc

SEQ ID NO: 439636 - RNA, 22 nt, Human
cuucugauuuuaggaaauucug

SEQ ID NO: 439637 - RNA, 24 nt, Human
gaaaaaaauaaaaaaggaagccgg

SEQ ID NO: 439638 - RNA, 18 nt, Human
gagcagggcccaauuccu

SEQ ID NO: 439639 - RNA, 20 nt, Human
gauauaaucacccaaccuuu

SEQ ID NO: 439640 - RNA, 22 nt, Human
gccauuucaaaaggggaggauc

SEQ ID NO: 439641 - RNA, 22 nt, Human
gggucuugcuauguuguccagg

SEQ ID NO: 439642 - RNA, 22 nt, Human
uacuucagcuuugaaaccuggg

SEQ ID NO: 439643 - RNA, 24 nt, Human
uaggaaauucuguugcgugcuaac

SEQ ID NO: 439644 - RNA, 19 nt, Human
uauauuacagauaccuucu

SEQ ID NO: 439645 - RNA, 24 nt, Human
uauguuguccagguuggucuugaa

SEQ ID NO: 439646 - RNA, 19 nt, Human
uauuagagaacugauucag

SEQ ID NO: 439647 - RNA, 23 nt, Human
uauuagagaacugauucaggauu

SEQ ID NO: 439648 - RNA, 20 nt, Human
uauuccaagugcacuacugu

SEQ ID NO: 439649 - RNA, 20 nt, Human
uauuucucuaaaaugaaaca

SEQ ID NO: 439650 - RNA, 21 nt, Human
uccaucaucccaacgccuucc

SEQ ID NO: 439651 - RNA, 23 nt, Human
uccccaagugcugggauuauagg

SEQ ID NO: 439652 - RNA, 20 nt, Human
ucggucagauacuucuggcc

SEQ ID NO: 439653 - RNA, 19 nt, Human
ucucaccacggccucccca

SEQ ID NO: 439654 - RNA, 21 nt, Human
ucugguucuugagguugcggu

SEQ ID NO: 439655 - RNA, 23 nt, Human
ucuugaacuccugggcuuaagcu

SEQ ID NO: 439656 - RNA, 19 nt, Human
ucuugcuauguuguccagg

SEQ ID NO: 439657 - RNA, 22 nt, Human
ucuugcuauguuguccagguug

SEQ ID NO: 439658 - RNA, 23 nt, Human
ucuugcuauguuguccagguugg

SEQ ID NO: 439659 - RNA, 24 nt, Human
ucuugcuauguuguccagguuggu

SEQ ID NO: 439660 - RNA, 25 nt, Human
ucuuuccuuuuuuuuuaagagaugg

SEQ ID NO: 439661 - RNA, 20 nt, Human
uggaaagaucuaaaguaaua

SEQ ID NO: 439662 - RNA, 20 nt, Human
uggccuuugggagugcgugg

SEQ ID NO: 439663 - RNA, 23 nt, Human
uggcuguauugaacaaguaaugu

SEQ ID NO: 439664 - RNA, 21 nt, Human
ugggagugcguggaugugacg

SEQ ID NO: 439665 - RNA, 18 nt, Human
ugggauuauagguaugca

SEQ ID NO: 439666 - RNA, 22 nt, Human
ugggauuauagguaugcaucaa

SEQ ID NO: 439667 - RNA, 24 nt, Human
uggggucuugcuauguuguccagg

SEQ ID NO: 439668 - RNA, 19 nt, Human
uggguguguuuccaguggc

SEQ ID NO: 439669 - RNA, 24 nt, Human
uguccagguuggucuugaacuccu

SEQ ID NO: 439670 - RNA, 22 nt, Human
uuacuaggcgaccacagcacgc

SEQ ID NO: 439671 - RNA, 20 nt, Human
uucaaaaggccacagggaaa

SEQ ID NO: 439672 - RNA, 25 nt, Human
uucauuuuauauauauauauauauu

SEQ ID NO: 439673 - RNA, 20 nt, Human
uucccaaccaaauaaaaaaa

SEQ ID NO: 439674 - RNA, 21 nt, Human
uuugaaaccugggcaagaagc

SEQ ID NO: 439675 - RNA, 20 nt, Human
uuuuuucuuuucaagcaguu

SEQ ID NO: 439676 - RNA, 24 nt, Human
uuuuuuuuuuuuuuucuuuucaag

SEQ ID NO: 439677 - RNA, 27 nt, Human
aauacaaaagcacaaaagaaccauuga

SEQ ID NO: 439678 - RNA, 23 nt, Human
acaaaaggaaaucuauuuaaaau

SEQ ID NO: 439679 - RNA, 18 nt, Human
acaauacaaaagcacaaa

SEQ ID NO: 439680 - RNA, 26 nt, Human
accccauaaaauucaaaacuucuacc

SEQ ID NO: 439681 - RNA, 20 nt, Human
aggcaggggaaaacaggggu

SEQ ID NO: 439682 - RNA, 20 nt, Human
aguagccuuauaagaaaagu

SEQ ID NO: 439683 - RNA, 22 nt, Human
auacauacacaaugcuuauaua

SEQ ID NO: 439684 - RNA, 20 nt, Human
caccgccgccgccgccgcca

SEQ ID NO: 439685 - RNA, 20 nt, Human
caccgccgccgccgccgcca

SEQ ID NO: 439686 - RNA, 18 nt, Human
cauguaacuucaguagcc

SEQ ID NO: 439687 - RNA, 21 nt, Human
cauguaacuucaguagccuua

SEQ ID NO: 439688 - RNA, 20 nt, Human
ccauuugauaaauacacaag

SEQ ID NO: 439689 - RNA, 18 nt, Human
ccgccgccgccgccgcca

SEQ ID NO: 439690 - RNA, 26 nt, Human
cgaaguggaagcagucuccgcgcuca

SEQ ID NO: 439691 - RNA, 24 nt, Human
cgccgucaccgccgccgccgccgg

SEQ ID NO: 439692 - RNA, 24 nt, Human
cuggcggaucguccucagccgcac

SEQ ID NO: 439693 - RNA, 24 nt, Human
cuuauaagaaaagugcaggacacc

SEQ ID NO: 439694 - RNA, 21 nt, Human
ggcaaaacauguaacuucagu

SEQ ID NO: 439695 - RNA, 20 nt, Human
guuggggauagaaaggaaag

SEQ ID NO: 439696 - RNA, 27 nt, Human
uacacaaugcuuauauauacaaauucc

SEQ ID NO: 439697 - RNA, 24 nt, Human
uagccuuauaagaaaagugcagga

SEQ ID NO: 439698 - RNA, 18 nt, Human
uauuaggcaaaacaugua

SEQ ID NO: 439699 - RNA, 18 nt, Human
ucacaauacaaaagcaca

SEQ ID NO: 439700 - RNA, 26 nt, Human
ucaguacuugacaaaauaccccauaa

SEQ ID NO: 439701 - RNA, 21 nt, Human
ucccccgcccgaaguggaagc

SEQ ID NO: 439702 - RNA, 29 nt, Human
ugaauacauacacaaugcuuauauauaca

SEQ ID NO: 439703 - RNA, 23 nt, Human
ugaauauucacaauacaaaagca

SEQ ID NO: 439704 - RNA, 20 nt, Human
ugaggggugguuggggauag

SEQ ID NO: 439705 - RNA, 19 nt, Human
ugcaaggaaggcaggggaa

SEQ ID NO: 439706 - RNA, 26 nt, Human
ugcaugaauacauacacaaugcuuau

SEQ ID NO: 439707 - RNA, 21 nt, Human
uggcaagggauuuguauacaa

SEQ ID NO: 439708 - RNA, 24 nt, Human
uggcaagggauuuguauacaauca

SEQ ID NO: 439709 - RNA, 21 nt, Human
uucaugugcuggcaagggauu

SEQ ID NO: 439710 - RNA, 25 nt, Human
aaacggaacagauuuuuaaaggcaa

SEQ ID NO: 439711 - RNA, 19 nt, Human
aagaacaaaguaauagcca

SEQ ID NO: 439712 - RNA, 23 nt, Human
acaucuuuauagcaaauugaaaa

SEQ ID NO: 439713 - RNA, 22 nt, Human
accauguuccacaaugcuggaa

SEQ ID NO: 439714 - RNA, 20 nt, Human
agaaaaaccagcaaguagau

SEQ ID NO: 439715 - RNA, 24 nt, Human
agaacuccuucaggaaacucacuu

SEQ ID NO: 439716 - RNA, 18 nt, Human
agaagaaaagggaaauaa

SEQ ID NO: 439717 - RNA, 18 nt, Human
agcgccacuagcaggcgg

SEQ ID NO: 439718 - RNA, 19 nt, Human
aguaccugggaaaaaaacg

SEQ ID NO: 439719 - RNA, 20 nt, Human
aguguaaaggcagcagugaa

SEQ ID NO: 439720 - RNA, 19 nt, Human
agugucucaccauguucca

SEQ ID NO: 439721 - RNA, 22 nt, Human
auagaguucuuucuccuuaaaa

SEQ ID NO: 439722 - RNA, 18 nt, Human
aucaaguuuuuccuccau

SEQ ID NO: 439723 - RNA, 22 nt, Human
auccuuaguauccaaaauaaaa

SEQ ID NO: 439724 - RNA, 22 nt, Human
caaacgaugcaucuuaguaucc

SEQ ID NO: 439725 - RNA, 25 nt, Human
caaaguaauagccacaguuaugaaa

SEQ ID NO: 439726 - RNA, 18 nt, Human
caagaacaaaguaauagc

SEQ ID NO: 439727 - RNA, 23 nt, Human
cacacaguacaucagcaaccauc

SEQ ID NO: 439728 - RNA, 20 nt, Human
caccgcgcggguaccagggc

SEQ ID NO: 439729 - RNA, 25 nt, Human
cacuuguauuuuaaguaccugggaa

SEQ ID NO: 439730 - RNA, 20 nt, Human
caggaacaaagaacuccuuc

SEQ ID NO: 439731 - RNA, 20 nt, Human
caggcaugccucaucuauuu

SEQ ID NO: 439732 - RNA, 23 nt, Human
caggcggcuacugcgguuccccg

SEQ ID NO: 439733 - RNA, 22 nt, Human
ccaagaacaaaguaauagccac

SEQ ID NO: 439734 - RNA, 20 nt, Human
ccagaccacacaguacauca

SEQ ID NO: 439735 - RNA, 18 nt, Human
cccacuucuaccagacca

SEQ ID NO: 439736 - RNA, 20 nt, Human
ccccaaaacacauaagaacc

SEQ ID NO: 439737 - RNA, 20 nt, Human
ccccaaaacacauaagaacc

SEQ ID NO: 439738 - RNA, 22 nt, Human
ccccccaaaacacauaagaacc

SEQ ID NO: 439739 - RNA, 20 nt, Human
ccgaaucauuuggcacaucc

SEQ ID NO: 439740 - RNA, 22 nt, Human
ccuaaaacacauuucuuaaccu

SEQ ID NO: 439741 - RNA, 24 nt, Human
ccuccaucucucauauuuccccac

SEQ ID NO: 439742 - RNA, 23 nt, Human
ccugggaaaaaaacggaacagau

SEQ ID NO: 439743 - RNA, 23 nt, Human
cggguuucucuuuuuucuucucu

SEQ ID NO: 439744 - RNA, 18 nt, Human
cuaaaacacauuucuuaa

SEQ ID NO: 439745 - RNA, 19 nt, Human
cucuuuuuucuucucuuuu

SEQ ID NO: 439746 - RNA, 21 nt, Human
gaacaaagaacuccuucagga

SEQ ID NO: 439747 - RNA, 18 nt, Human
gacaccaauagaguucuu

SEQ ID NO: 439748 - RNA, 21 nt, Human
gcaaguagauccuaaaacaca

SEQ ID NO: 439749 - RNA, 22 nt, Human
gcaaguagauccuaaaacacau

SEQ ID NO: 439750 - RNA, 19 nt, Human
gcgcggguaccagggcuuu

SEQ ID NO: 439751 - RNA, 20 nt, Human
gcugcucagacgacaccaau

SEQ ID NO: 439752 - RNA, 20 nt, Human
ggaacagauuuuuaaaggca

SEQ ID NO: 439753 - RNA, 19 nt, Human
ggcaauaacgacuuguaag

SEQ ID NO: 439754 - RNA, 19 nt, Human
ggcagaucacacauuugga

SEQ ID NO: 439755 - RNA, 24 nt, Human
gucaucuuaaaguaauauuuuucu

SEQ ID NO: 439756 - RNA, 19 nt, Human
gugaaggaccaagaacaaa

SEQ ID NO: 439757 - RNA, 20 nt, Human
guucagacaucgcugauguu

SEQ ID NO: 439758 - RNA, 20 nt, Human
uaaaaucaguagaaauaaaa

SEQ ID NO: 439759 - RNA, 23 nt, Human
uaaacugaaaguaugcuuaacga

SEQ ID NO: 439760 - RNA, 24 nt, Human
uaaccuagugauaauccauaaguu

SEQ ID NO: 439761 - RNA, 27 nt, Human
uaccaaaugcucuuuuaauuuugcucu

SEQ ID NO: 439762 - RNA, 22 nt, Human
uacugcgguuccccggcguucc

SEQ ID NO: 439763 - RNA, 19 nt, Human
ucagaagaaaagggaaaua

SEQ ID NO: 439764 - RNA, 23 nt, Human
uccuuaguauccaaaauaaaauc

SEQ ID NO: 439765 - RNA, 21 nt, Human
ucuccuuaaaauaugguggca

SEQ ID NO: 439766 - RNA, 23 nt, Human
ucucucauauuuccccacuucua

SEQ ID NO: 439767 - RNA, 22 nt, Human
ucuuucuggaauuuuauauagu

SEQ ID NO: 439768 - RNA, 22 nt, Human
ucuuugaucaggaacaaagaac

SEQ ID NO: 439769 - RNA, 18 nt, Human
ugacacaaaucauaaccc

SEQ ID NO: 439770 - RNA, 19 nt, Human
ugaggcccgcaccgcgcgg

SEQ ID NO: 439771 - RNA, 22 nt, Human
ugagucauaacugaaaacauag

SEQ ID NO: 439772 - RNA, 20 nt, Human
ugauguuuuugaggauaacu

SEQ ID NO: 439773 - RNA, 20 nt, Human
ugcauacaacacacuagaug

SEQ ID NO: 439774 - RNA, 23 nt, Human
ugggaaaaaaacggaacagauuu

SEQ ID NO: 439775 - RNA, 18 nt, Human
uguaaauccaguugcuuu

SEQ ID NO: 439776 - RNA, 18 nt, Human
ugucucacaauaaaucug

SEQ ID NO: 439777 - RNA, 22 nt, Human
uuaguguaaaggcagcagugaa

SEQ ID NO: 439778 - RNA, 24 nt, Human
uuaguguaaaggcagcagugaauu

SEQ ID NO: 439779 - RNA, 18 nt, Human
uucaaaggaaacaaguca

SEQ ID NO: 439780 - RNA, 19 nt, Human
uucaaaggaaacaagucau

SEQ ID NO: 439781 - RNA, 20 nt, Human
uucaaaggaaacaagucauc

SEQ ID NO: 439782 - RNA, 22 nt, Human
uuccccccaaaacacauaagaa

SEQ ID NO: 439783 - RNA, 19 nt, Human
uuucaaaggaaacaaguca

SEQ ID NO: 439784 - RNA, 19 nt, Human
uuucaaaggaaacaaguca

SEQ ID NO: 439785 - RNA, 24 nt, Human
uuuggcacauccuuaguauccaaa

SEQ ID NO: 439786 - RNA, 18 nt, Human
aagaaagagaaucuccug

SEQ ID NO: 439787 - RNA, 18 nt, Human
aguagcugggauuacagg

SEQ ID NO: 439788 - RNA, 22 nt, Human
agucuugcacuguugccaaggc

SEQ ID NO: 439789 - RNA, 21 nt, Human
agugcaguggugcgaucucag

SEQ ID NO: 439790 - RNA, 23 nt, Human
agugcaguggugcgaucucagcu

SEQ ID NO: 439791 - RNA, 24 nt, Human
agugcaguggugcgaucucagcuc

SEQ ID NO: 439792 - RNA, 21 nt, Human
auucuccugccucagccuccc

SEQ ID NO: 439793 - RNA, 21 nt, Human
caaacuccugagcucaggccu

SEQ ID NO: 439794 - RNA, 22 nt, Human
caagcaauucuccugccucagc

SEQ ID NO: 439795 - RNA, 23 nt, Human
cacuacaaccucugucuccuggg

SEQ ID NO: 439796 - RNA, 21 nt, Human
caggcgcccaccgugacuccc

SEQ ID NO: 439797 - RNA, 23 nt, Human
cccgaguagcugggauuacaggc

SEQ ID NO: 439798 - RNA, 24 nt, Human
cccgaguagcugggauuacaggcg

SEQ ID NO: 439799 - RNA, 22 nt, Human
ccgaguagcugggauuacaggc

SEQ ID NO: 439800 - RNA, 23 nt, Human
ccugccucagccucccgaguagc

SEQ ID NO: 439801 - RNA, 24 nt, Human
ccugccucagccucccgaguagcu

SEQ ID NO: 439802 - RNA, 23 nt, Human
ccuggguucaagcaauucuccug

SEQ ID NO: 439803 - RNA, 20 nt, Human
cgaagaaagagaaucuccug

SEQ ID NO: 439804 - RNA, 21 nt, Human
cuacaaccucugucuccuggg

SEQ ID NO: 439805 - RNA, 23 nt, Human
cuacaaccucugucuccuggguu

SEQ ID NO: 439806 - RNA, 24 nt, Human
cuacaaccucugucuccuggguuc

SEQ ID NO: 439807 - RNA, 24 nt, Human
cucacuacaaccucugucuccugg

SEQ ID NO: 439808 - RNA, 24 nt, Human
cucagccucccgaguagcugggau

SEQ ID NO: 439809 - RNA, 21 nt, Human
cuccuggguucaagcaauucu

SEQ ID NO: 439810 - RNA, 21 nt, Human
cucucuguugcuguuuuugag

SEQ ID NO: 439811 - RNA, 19 nt, Human
cuugcacuguugccaaggc

SEQ ID NO: 439812 - RNA, 22 nt, Human
gagacagucuugcacuguugcc

SEQ ID NO: 439813 - RNA, 25 nt, Human
gaguagcugggauuacaggcgccca

SEQ ID NO: 439814 - RNA, 21 nt, Human
gaucuuaaauaagcuuggcua

SEQ ID NO: 439815 - RNA, 28 nt, Human
ggacuaaguucacugugaucuuaaauaa

SEQ ID NO: 439816 - RNA, 18 nt, Human
guagcugggauuacaggc

SEQ ID NO: 439817 - RNA, 23 nt, Human
uaaaacagcaccucgauucucgu

SEQ ID NO: 439818 - RNA, 23 nt, Human
uaaauaagcuuggcuaaaauggg

SEQ ID NO: 439819 - RNA, 24 nt, Human
uaauuuuuauauuguuaguagaga

SEQ ID NO: 439820 - RNA, 23 nt, Human
uagagugcaguggugcgaucuca

SEQ ID NO: 439821 - RNA, 24 nt, Human
uagagugcaguggugcgaucucag

SEQ ID NO: 439822 - RNA, 25 nt, Human
uaguagagacaggcuggucucaaac

SEQ ID NO: 439823 - RNA, 18 nt, Human
uauauuguuaguagagac

SEQ ID NO: 439824 - RNA, 19 nt, Human
ucaagcaauucuccugccu

SEQ ID NO: 439825 - RNA, 19 nt, Human
ucaagccaugcuuuucugu

SEQ ID NO: 439826 - RNA, 24 nt, Human
ucacuacaaccucugucuccuggg

SEQ ID NO: 439827 - RNA, 25 nt, Human
ucacuacaaccucugucuccugggu

SEQ ID NO: 439828 - RNA, 20 nt, Human
ucagccucccgaguagcugg

SEQ ID NO: 439829 - RNA, 24 nt, Human
ucccgaguagcugggauuacaggc

SEQ ID NO: 439830 - RNA, 19 nt, Human
uccugcucucuguugcugu

SEQ ID NO: 439831 - RNA, 21 nt, Human
uccuggguucaagcaauucuc

SEQ ID NO: 439832 - RNA, 24 nt, Human
uccuggguucaagcaauucuccug

SEQ ID NO: 439833 - RNA, 23 nt, Human
ucuaaaacagcaccucgauucuc

SEQ ID NO: 439834 - RNA, 23 nt, Human
ucucaaacuccugagcucaggcc

SEQ ID NO: 439835 - RNA, 25 nt, Human
ucucaaacuccugagcucaggccuc

SEQ ID NO: 439836 - RNA, 24 nt, Human
ucuccugccucagccucccgagua

SEQ ID NO: 439837 - RNA, 24 nt, Human
ucuccuggguucaagcaauucucc

SEQ ID NO: 439838 - RNA, 24 nt, Human
ucugucuccuggguucaagcaauu

SEQ ID NO: 439839 - RNA, 18 nt, Human
ugagcucaggccucgugc

SEQ ID NO: 439840 - RNA, 23 nt, Human
ugaguggagguagucacacuuca

SEQ ID NO: 439841 - RNA, 24 nt, Human
ugcacuguugccaaggcuagagug

SEQ ID NO: 439842 - RNA, 22 nt, Human
ugcaguggugcgaucucagcuc

SEQ ID NO: 439843 - RNA, 24 nt, Human
ugccaaggcuagagugcaguggug

SEQ ID NO: 439844 - RNA, 24 nt, Human
ugccucagccucccgaguagcugg

SEQ ID NO: 439845 - RNA, 18 nt, Human
ugggacaugaguggaggu

SEQ ID NO: 439846 - RNA, 20 nt, Human
ugggauuacaggcgcccacc

SEQ ID NO: 439847 - RNA, 20 nt, Human
ugggauuacaggcgcccacc

SEQ ID NO: 439848 - RNA, 21 nt, Human
ugggauuacaggcgcccaccg

SEQ ID NO: 439849 - RNA, 21 nt, Human
uggguucaagcaauucuccug

SEQ ID NO: 439850 - RNA, 23 nt, Human
uggguucaagcaauucuccugcc

SEQ ID NO: 439851 - RNA, 24 nt, Human
uggguucaagcaauucuccugccu

SEQ ID NO: 439852 - RNA, 19 nt, Human
uggugcagaaaugauucug

SEQ ID NO: 439853 - RNA, 24 nt, Human
uggugcgaucucagcucacuacaa

SEQ ID NO: 439854 - RNA, 21 nt, Human
uucaagcaauucuccugccuc

SEQ ID NO: 439855 - RNA, 24 nt, Human
uucaagcaauucuccugccucagc

SEQ ID NO: 439856 - RNA, 20 nt, Human
uugagacagucuugcacugu

SEQ ID NO: 439857 - RNA, 24 nt, Human
uugagacagucuugcacuguugcc

SEQ ID NO: 439858 - RNA, 22 nt, Human
uuggugcagaaaugauucugag

SEQ ID NO: 439859 - RNA, 18 nt, Human
uuuugagacagucuugca

SEQ ID NO: 439860 - RNA, 23 nt, Human
uuuuugagacagucuugcacugu

SEQ ID NO: 439861 - RNA, 27 nt, Human
uuuuuuaugauuauuauuuuuuuuauu

SEQ ID NO: 439862 - RNA, 21 nt, Human
aaaauuaccagaguucuuuug

SEQ ID NO: 439863 - RNA, 24 nt, Human
aaagugcugggauuauaggcauga

SEQ ID NO: 439864 - RNA, 19 nt, Human
aagaacucagauuaccaac

SEQ ID NO: 439865 - RNA, 22 nt, Human
aagcaccuuguuucaauauauc

SEQ ID NO: 439866 - RNA, 23 nt, Human
aaggccacugccagcacacugcc

SEQ ID NO: 439867 - RNA, 23 nt, Human
aaguacaauaaucuuauaaagca

SEQ ID NO: 439868 - RNA, 19 nt, Human
aagugcugggauuauaggc

SEQ ID NO: 439869 - RNA, 21 nt, Human
aagugcugggauuauaggcau

SEQ ID NO: 439870 - RNA, 19 nt, Human
acaggcccccgccaccgcg

SEQ ID NO: 439871 - RNA, 24 nt, Human
accuccugaucugcccaccuuggc

SEQ ID NO: 439872 - RNA, 18 nt, Human
acgggguuucaccuuguu

SEQ ID NO: 439873 - RNA, 20 nt, Human
acgggguuucaccuuguuag

SEQ ID NO: 439874 - RNA, 24 nt, Human
acugcaguggcgcuaucucggcuc

SEQ ID NO: 439875 - RNA, 24 nt, Human
agauggucucgaucuccugaccuc

SEQ ID NO: 439876 - RNA, 20 nt, Human
aggcaugagccaccgcaccc

SEQ ID NO: 439877 - RNA, 18 nt, Human
aguagcugggauuacagg

SEQ ID NO: 439878 - RNA, 18 nt, Human
agugaaaaaucuguucag

SEQ ID NO: 439879 - RNA, 19 nt, Human
augacagugaccuaaugug

SEQ ID NO: 439880 - RNA, 24 nt, Human
caaagugcugggauuauaggcaug

SEQ ID NO: 439881 - RNA, 18 nt, Human
caacucaaggugcagcaa

SEQ ID NO: 439882 - RNA, 18 nt, Human
caaggccacugccagcac

SEQ ID NO: 439883 - RNA, 24 nt, Human
caaguaacacuauuaaagucuuaa

SEQ ID NO: 439884 - RNA, 20 nt, Human
cacccaggccggacugcagu

SEQ ID NO: 439885 - RNA, 24 nt, Human
caccuuguuagccaagauggucuc

SEQ ID NO: 439886 - RNA, 21 nt, Human
cacugcaagcuccuccucccg

SEQ ID NO: 439887 - RNA, 19 nt, Human
cacugcacaaacauuaaac

SEQ ID NO: 439888 - RNA, 22 nt, Human
cagcacacugccacaugcacuu

SEQ ID NO: 439889 - RNA, 23 nt, Human
cagcacacugccacaugcacuuc

SEQ ID NO: 439890 - RNA, 20 nt, Human
cagccuccugaguagcuggg

SEQ ID NO: 439891 - RNA, 25 nt, Human
caguauagaccaaauuuuuuaaaau

SEQ ID NO: 439892 - RNA, 18 nt, Human
caguggcgcuaucucggc

SEQ ID NO: 439893 - RNA, 22 nt, Human
caugccauucuucugccucagc

SEQ ID NO: 439894 - RNA, 24 nt, Human
ccaaagugcugggauuauaggcau

SEQ ID NO: 439895 - RNA, 24 nt, Human
ccaggccggacugcaguggcgcua

SEQ ID NO: 439896 - RNA, 19 nt, Human
ccauugcaccgucuuggca

SEQ ID NO: 439897 - RNA, 19 nt, Human
cccucucucuucauuuuca

SEQ ID NO: 439898 - RNA, 18 nt, Human
ccuccugaucugcccacc

SEQ ID NO: 439899 - RNA, 24 nt, Human
ccucucaacucaaggugcagcaaa

SEQ ID NO: 439900 - RNA, 23 nt, Human
ccugaguagcugggauuacaggc

SEQ ID NO: 439901 - RNA, 21 nt, Human
ccuuugaugucuuuucugaag

SEQ ID NO: 439902 - RNA, 23 nt, Human
cucacugcaagcuccuccucccg

SEQ ID NO: 439903 - RNA, 24 nt, Human
cucagccuccugaguagcugggau

SEQ ID NO: 439904 - RNA, 21 nt, Human
cucccggguucaugccauucu

SEQ ID NO: 439905 - RNA, 20 nt, Human
cuccugaccuccugaucugc

SEQ ID NO: 439906 - RNA, 20 nt, Human
cuuauucacucuuuaaauug

SEQ ID NO: 439907 - RNA, 20 nt, Human
gagacgggguuucaccuugu

SEQ ID NO: 439908 - RNA, 26 nt, Human
gaguagcugggauuacaggcccccgc

SEQ ID NO: 439909 - RNA, 20 nt, Human
gauuauaggcaugagccacc

SEQ ID NO: 439910 - RNA, 23 nt, Human
gauuauaggcaugagccaccgca

SEQ ID NO: 439911 - RNA, 23 nt, Human
gccuggcuaauuuuuuguauuuu

SEQ ID NO: 439912 - RNA, 20 nt, Human
gcucacugcaagcuccuccu

SEQ ID NO: 439913 - RNA, 22 nt, Human
gcucacugcaagcuccuccucc

SEQ ID NO: 439914 - RNA, 24 nt, Human
ggaucuuaucuuggcugugucugu

SEQ ID NO: 439915 - RNA, 23 nt, Human
ggcaggguuuuauuuguauaugu

SEQ ID NO: 439916 - RNA, 22 nt, Human
guccaaagccucaaggccacug

SEQ ID NO: 439917 - RNA, 19 nt, Human
guggaucuuaucuuggcug

SEQ ID NO: 439918 - RNA, 22 nt, Human
gugguguuuagcucuauuuuaa

SEQ ID NO: 439919 - RNA, 24 nt, Human
uaauuuuuuguauuuuuaguagag

SEQ ID NO: 439920 - RNA, 25 nt, Human
uaauuuuuuguauuuuuaguagaga

SEQ ID NO: 439921 - RNA, 19 nt, Human
uacaggcccccgccaccgc

SEQ ID NO: 439922 - RNA, 23 nt, Human
uacauuggagggaaacaaacacc

SEQ ID NO: 439923 - RNA, 24 nt, Human
uaguagagacgggguuucaccuug

SEQ ID NO: 439924 - RNA, 26 nt, Human
uaguagagacgggguuucaccuuguu

SEQ ID NO: 439925 - RNA, 23 nt, Human
uauuucuguaguugaauugaaaa

SEQ ID NO: 439926 - RNA, 22 nt, Human
ucaaugugacugagucaaaguc

SEQ ID NO: 439927 - RNA, 19 nt, Human
ucacccaggccggacugca

SEQ ID NO: 439928 - RNA, 24 nt, Human
ucacugcaagcuccuccucccggg

SEQ ID NO: 439929 - RNA, 20 nt, Human
ucagccuccugaguagcugg

SEQ ID NO: 439930 - RNA, 18 nt, Human
ucaugccauucuucugcc

SEQ ID NO: 439931 - RNA, 18 nt, Human
uccaucauuauuucuucu

SEQ ID NO: 439932 - RNA, 24 nt, Human
ucccaaagugcugggauuauaggc

SEQ ID NO: 439933 - RNA, 20 nt, Human
ucccggguucaugccauucu

SEQ ID NO: 439934 - RNA, 24 nt, Human
ucccggguucaugccauucuucug

SEQ ID NO: 439935 - RNA, 22 nt, Human
uccucagguuggauaaaaacua

SEQ ID NO: 439936 - RNA, 25 nt, Human
uccucccggguucaugccauucuuc

SEQ ID NO: 439937 - RNA, 24 nt, Human
uccugaguagcugggauuacaggc

SEQ ID NO: 439938 - RNA, 24 nt, Human
ucucgcucuuucacccaggccgga

SEQ ID NO: 439939 - RNA, 24 nt, Human
ucugccucagccuccugaguagcu

SEQ ID NO: 439940 - RNA, 21 nt, Human
ucuuauucacucuuuaaauug

SEQ ID NO: 439941 - RNA, 18 nt, Human
ugacaguaugacagugac

SEQ ID NO: 439942 - RNA, 18 nt, Human
ugaccuccugaucugccc

SEQ ID NO: 439943 - RNA, 24 nt, Human
ugaucugcccaccuuggccuccca

SEQ ID NO: 439944 - RNA, 18 nt, Human
ugauucugaacaccacag

SEQ ID NO: 439945 - RNA, 22 nt, Human
ugcaguggcgcuaucucggcuc

SEQ ID NO: 439946 - RNA, 24 nt, Human
ugccucagccuccugaguagcugg

SEQ ID NO: 439947 - RNA, 20 nt, Human
uggaaucagugaaaacaauc

SEQ ID NO: 439948 - RNA, 18 nt, Human
ugggagugaaaaaucugu

SEQ ID NO: 439949 - RNA, 21 nt, Human
ugggauuacaggcccccgcca

SEQ ID NO: 439950 - RNA, 22 nt, Human
ugggauuacaggcccccgccac

SEQ ID NO: 439951 - RNA, 23 nt, Human
ugggauuacaggcccccgccacc

SEQ ID NO: 439952 - RNA, 24 nt, Human
ugggauuacaggcccccgccaccg

SEQ ID NO: 439953 - RNA, 18 nt, Human
ugggauuauaggcaugag

SEQ ID NO: 439954 - RNA, 19 nt, Human
ugggauuauaggcaugagc

SEQ ID NO: 439955 - RNA, 21 nt, Human
ugggauuauaggcaugagcca

SEQ ID NO: 439956 - RNA, 22 nt, Human
ugggauuauaggcaugagccac

SEQ ID NO: 439957 - RNA, 23 nt, Human
ugggauuauaggcaugagccacc

SEQ ID NO: 439958 - RNA, 24 nt, Human
ugggauuauaggcaugagccaccg

SEQ ID NO: 439959 - RNA, 21 nt, Human
uguauuuuuaguagagacggg

SEQ ID NO: 439960 - RNA, 24 nt, Human
uuagcucuauuuuaagacuuuucu

SEQ ID NO: 439961 - RNA, 24 nt, Human
uuaguagagacgggguuucaccuu

SEQ ID NO: 439962 - RNA, 25 nt, Human
uuaguagagacgggguuucaccuug

SEQ ID NO: 439963 - RNA, 22 nt, Human
uuaguugauaauuuccuaagag

SEQ ID NO: 439964 - RNA, 24 nt, Human
uucaauauaucucccaaguuaaga

SEQ ID NO: 439965 - RNA, 19 nt, Human
uucaugccauucuucugcc

SEQ ID NO: 439966 - RNA, 22 nt, Human
uugcaccgucuuggcacucaug

SEQ ID NO: 439967 - RNA, 18 nt, Human
uuggccucccaaagugcu

SEQ ID NO: 439968 - RNA, 23 nt, Human
uuguauuuuuaguagagacgggg

SEQ ID NO: 439969 - RNA, 18 nt, Human
uuuaaggaugcaagagag

SEQ ID NO: 439970 - RNA, 23 nt, Human
uuuucacguaauagugguucuau

SEQ ID NO: 439971 - RNA, 18 nt, Human
uuuucuuuuuuuuuuuug

SEQ ID NO: 439972 - RNA, 24 nt, Human
uuuuuaguagagacgggguuucac

SEQ ID NO: 439973 - RNA, 21 nt, Human
uuuuuguauuuuuaguagaga

SEQ ID NO: 439974 - RNA, 24 nt, Human
uuuuuuguauuuuuaguagagacg

SEQ ID NO: 439975 - RNA, 24 nt, Human
uuuuuuguuuuugagacggagucu

SEQ ID NO: 439976 - RNA, 25 nt, Human
uuuuuuguuuuugagacggagucuc

SEQ ID NO: 439977 - RNA, 20 nt, Human
aaaaacccuucuaagucagc

SEQ ID NO: 439978 - RNA, 23 nt, Human
aaauaaugcauggaucuagacaa

SEQ ID NO: 439979 - RNA, 25 nt, Human
agagaacaaaagaggugacagaaaa

SEQ ID NO: 439980 - RNA, 21 nt, Human
agcgcgcgggccucgggcggc

SEQ ID NO: 439981 - RNA, 25 nt, Human
aggcaggaagcuagaaaaagggacc

SEQ ID NO: 439982 - RNA, 19 nt, Human
aguguaaagugaauaggga

SEQ ID NO: 439983 - RNA, 23 nt, Human
caggucaagugccugcuuuauuc

SEQ ID NO: 439984 - RNA, 19 nt, Human
cgcgcaguggacggcggcg

SEQ ID NO: 439985 - RNA, 24 nt, Human
cucaagaccuaggcuacagccagg

SEQ ID NO: 439986 - RNA, 21 nt, Human
gaacaaaagaggugacagaaa

SEQ ID NO: 439987 - RNA, 19 nt, Human
gagaacaaaagaggugacc

SEQ ID NO: 439988 - RNA, 22 nt, Human
gagcgcgcgggccucgggcggc

SEQ ID NO: 439989 - RNA, 19 nt, Human
gcagccugagccaugaugg

SEQ ID NO: 439990 - RNA, 26 nt, Human
gugagagaacaaaagaggugacagaa

SEQ ID NO: 439991 - RNA, 21 nt, Human
uaagucagcuuaaggccaaga

SEQ ID NO: 439992 - RNA, 23 nt, Human
ucaagaccuaggcuacagccagg

SEQ ID NO: 439993 - RNA, 24 nt, Human
uucacaguguaaagugaauagggg

SEQ ID NO: 439994 - RNA, 20 nt, Human
aggcucggagcgggcggcga

SEQ ID NO: 439995 - RNA, 19 nt, Human
caccaggcucggagcgggc

SEQ ID NO: 439996 - RNA, 24 nt, Human
cagcccaggagccgcgcgcagcgg

SEQ ID NO: 439997 - RNA, 21 nt, Human
gcgcgcagcggucggaagcac

SEQ ID NO: 439998 - RNA, 19 nt, Human
ugacagcccaggagccgcg

SEQ ID NO: 439999 - RNA, 23 nt, Human
aaaaaauuaaauaaggcaaacac

SEQ ID NO: 440000 - RNA, 19 nt, Human
aaauguaccuagaaucagu

SEQ ID NO: 440001 - RNA, 24 nt, Human
aaauguaccuagaaucaguguauc

SEQ ID NO: 440002 - RNA, 23 nt, Human
aagaaggaaaaaagguuuccaag

SEQ ID NO: 440003 - RNA, 21 nt, Human
aagagcuaggacuggugaugu

SEQ ID NO: 440004 - RNA, 22 nt, Human
aagcuaauucacguagaacuga

SEQ ID NO: 440005 - RNA, 18 nt, Human
agacaguagcagcaacag

SEQ ID NO: 440006 - RNA, 22 nt, Human
agggguuaaauggcagcaucuc

SEQ ID NO: 440007 - RNA, 19 nt, Human
aguguauuugcguguaugu

SEQ ID NO: 440008 - RNA, 21 nt, Human
auacuacugcaauauaaacaa

SEQ ID NO: 440009 - RNA, 20 nt, Human
augcaaaaacaaaaacugga

SEQ ID NO: 440010 - RNA, 18 nt, Human
auuaaauaaggcaaacac

SEQ ID NO: 440011 - RNA, 18 nt, Human
caauggugggcucaugac

SEQ ID NO: 440012 - RNA, 24 nt, Human
caccaggaauuuaaaaaaaaaaaa

SEQ ID NO: 440013 - RNA, 21 nt, Human
caggggaaagaugcucucugg

SEQ ID NO: 440014 - RNA, 23 nt, Human
caguaccaagggguuaaauggca

SEQ ID NO: 440015 - RNA, 20 nt, Human
caguagcagcaacagcauga

SEQ ID NO: 440016 - RNA, 22 nt, Human
caguagcagcaacagcaugaga

SEQ ID NO: 440017 - RNA, 19 nt, Human
caucugagaaaaagcuaau

SEQ ID NO: 440018 - RNA, 26 nt, Human
caugcaaaaacaaaaacuggagugua

SEQ ID NO: 440019 - RNA, 18 nt, Human
cuacaguauccaccagga

SEQ ID NO: 440020 - RNA, 19 nt, Human
cuacugcaauauaaacaaa

SEQ ID NO: 440021 - RNA, 20 nt, Human
cucaugauugcccgugaagu

SEQ ID NO: 440022 - RNA, 24 nt, Human
gacauucaaaguuucaacaucuga

SEQ ID NO: 440023 - RNA, 21 nt, Human
gcaaaaacaaaaacuggagug

SEQ ID NO: 440024 - RNA, 21 nt, Human
ggugauaaaugucaagaagga

SEQ ID NO: 440025 - RNA, 22 nt, Human
uaaaaaauaaauacuacugcaa

SEQ ID NO: 440026 - RNA, 20 nt, Human
uaaaaaauguaccuagaauc

SEQ ID NO: 440027 - RNA, 20 nt, Human
uaaaaaauuaaauaaggcaa

SEQ ID NO: 440028 - RNA, 25 nt, Human
uaacaugacauacaauucucaucac

SEQ ID NO: 440029 - RNA, 22 nt, Human
uaaccccuuggcaugcauaguu

SEQ ID NO: 440030 - RNA, 21 nt, Human
uacauaugcacgccaccaccc

SEQ ID NO: 440031 - RNA, 25 nt, Human
uaccaaaugcuuccuaaucaauucc

SEQ ID NO: 440032 - RNA, 21 nt, Human
uaccugucuacauucuucagc

SEQ ID NO: 440033 - RNA, 22 nt, Human
uagaacaguguucacuugcuca

SEQ ID NO: 440034 - RNA, 19 nt, Human
uauauauauauauauauau

SEQ ID NO: 440035 - RNA, 21 nt, Human
uauaugccuacuucacgcacg

SEQ ID NO: 440036 - RNA, 26 nt, Human
uauccaccaggaauuuaaaaaaaaaa

SEQ ID NO: 440037 - RNA, 23 nt, Human
ucaagaaggaaaaaagguuucca

SEQ ID NO: 440038 - RNA, 19 nt, Human
ucaguucuugguagaacag

SEQ ID NO: 440039 - RNA, 20 nt, Human
ucaguucuugguagaacagu

SEQ ID NO: 440040 - RNA, 20 nt, Human
uccaaagguuggaaaauuac

SEQ ID NO: 440041 - RNA, 20 nt, Human
ucccaaagccaaauucuaac

SEQ ID NO: 440042 - RNA, 18 nt, Human
ucuacaguauccaccagg

SEQ ID NO: 440043 - RNA, 19 nt, Human
ugaaguagcagaaugaaag

SEQ ID NO: 440044 - RNA, 23 nt, Human
ugaagucucgacauccacaugug

SEQ ID NO: 440045 - RNA, 25 nt, Human
ugagaaaaagcuaauucacguagga

SEQ ID NO: 440046 - RNA, 23 nt, Human
ugagauacaauuucaugcaaaaa

SEQ ID NO: 440047 - RNA, 22 nt, Human
ugaugugcuuuacauaugcacg

SEQ ID NO: 440048 - RNA, 22 nt, Human
ugauugcccgugaagucucgac

SEQ ID NO: 440049 - RNA, 19 nt, Human
ugcacgccaccacccuucc

SEQ ID NO: 440050 - RNA, 22 nt, Human
ugcacgccaccacccuuccaca

SEQ ID NO: 440051 - RNA, 18 nt, Human
uggcaugcauaguugggg

SEQ ID NO: 440052 - RNA, 23 nt, Human
ugucaagaaggaaaaaagguuuc

SEQ ID NO: 440053 - RNA, 18 nt, Human
uguucaguccuucuacca

SEQ ID NO: 440054 - RNA, 19 nt, Human
uuaacagaggagaaaaagu

SEQ ID NO: 440055 - RNA, 23 nt, Human
uuacauaugcacgccaccacccu

SEQ ID NO: 440056 - RNA, 18 nt, Human
uuauauauauauauauau

SEQ ID NO: 440057 - RNA, 23 nt, Human
uuauauauauauauauauauccc

SEQ ID NO: 440058 - RNA, 19 nt, Human
uucaugcaaaaacaaaaac

SEQ ID NO: 440059 - RNA, 21 nt, Human
uucaugcaaaaacaaaaacug

SEQ ID NO: 440060 - RNA, 22 nt, Human
uuccaaagguuggaaaauuacu

SEQ ID NO: 440061 - RNA, 28 nt, Human
uuugcguguauguguguuuucaugaggg

SEQ ID NO: 440062 - RNA, 20 nt, Human
uuuuuuuuuuuuuuguugcc

SEQ ID NO: 440063 - RNA, 23 nt, Human
uuuuuuuuuuuuuuguugccagg

SEQ ID NO: 440064 - RNA, 20 nt, Human
uuuuuuuuuuuuuuuuuguu

SEQ ID NO: 440065 - RNA, 20 nt, Human
uuuuuuuuuuuuuuuuuugg

SEQ ID NO: 440066 - RNA, 22 nt, Human
aaaauaauggauggcauguacc

SEQ ID NO: 440067 - RNA, 23 nt, Human
aaagaggguucacucaaaccucu

SEQ ID NO: 440068 - RNA, 20 nt, Human
aaccucugccgcaacaccuc

SEQ ID NO: 440069 - RNA, 24 nt, Human
aaggccacucagggaaggagccag

SEQ ID NO: 440070 - RNA, 21 nt, Human
acauuaagggcagggguagga

SEQ ID NO: 440071 - RNA, 20 nt, Human
accucugccgcaacaccucc

SEQ ID NO: 440072 - RNA, 22 nt, Human
agcugggcugugguggggagcc

SEQ ID NO: 440073 - RNA, 18 nt, Human
aggaauagggagaggugc

SEQ ID NO: 440074 - RNA, 23 nt, Human
caaacaggacagaaaugaaaaua

SEQ ID NO: 440075 - RNA, 21 nt, Human
caagggucuccuucaaggugc

SEQ ID NO: 440076 - RNA, 26 nt, Human
cacaguaucgcaaggagcuaaguaag

SEQ ID NO: 440077 - RNA, 23 nt, Human
cagggguaggauuugcaucuguu

SEQ ID NO: 440078 - RNA, 22 nt, Human
ccaggccaugccacugcgugcc

SEQ ID NO: 440079 - RNA, 25 nt, Human
ccaugccacugcgugccuuccaucc

SEQ ID NO: 440080 - RNA, 18 nt, Human
cccagugcugguucucug

SEQ ID NO: 440081 - RNA, 22 nt, Human
ccucugccgcaacaccuccaga

SEQ ID NO: 440082 - RNA, 23 nt, Human
ccuucaaggugcucugggcccau

SEQ ID NO: 440083 - RNA, 24 nt, Human
ccuugugcugugccugcucugagg

SEQ ID NO: 440084 - RNA, 21 nt, Human
cuaccaagcugcuucugcuau

SEQ ID NO: 440085 - RNA, 21 nt, Human
cucacagaagcacggacaauu

SEQ ID NO: 440086 - RNA, 21 nt, Human
cucacaguaucgcaaggagcu

SEQ ID NO: 440087 - RNA, 20 nt, Human
cucugccgcaacaccuccag

SEQ ID NO: 440088 - RNA, 20 nt, Human
cugaggcagcugggcugugg

SEQ ID NO: 440089 - RNA, 23 nt, Human
cugccugccagucacagucaagg

SEQ ID NO: 440090 - RNA, 19 nt, Human
cugcuucugcuauucuuug

SEQ ID NO: 440091 - RNA, 18 nt, Human
cugguucucugggagucu

SEQ ID NO: 440092 - RNA, 23 nt, Human
gaggcagcugggcuguggugggg

SEQ ID NO: 440093 - RNA, 23 nt, Human
gcaucaauuaaaauaugguucag

SEQ ID NO: 440094 - RNA, 21 nt, Human
gccucauucuguaaacccagu

SEQ ID NO: 440095 - RNA, 22 nt, Human
gcugcuucugcuauucuuugcu

SEQ ID NO: 440096 - RNA, 18 nt, Human
ggaggggugcugugcccc

SEQ ID NO: 440097 - RNA, 25 nt, Human
ggcaacaaggccacucagggaagga

SEQ ID NO: 440098 - RNA, 26 nt, Human
ggcagggguaggauuuggggaggucc

SEQ ID NO: 440099 - RNA, 19 nt, Human
gggaaggagccaggccaug

SEQ ID NO: 440100 - RNA, 19 nt, Human
gggaggggugcugugcccc

SEQ ID NO: 440101 - RNA, 19 nt, Human
gggcugugguggggagcca

SEQ ID NO: 440102 - RNA, 22 nt, Human
gugcugguucucugggagucug

SEQ ID NO: 440103 - RNA, 22 nt, Human
guucacucaaaccucugccgca

SEQ ID NO: 440104 - RNA, 19 nt, Human
uaagauuacaaggacugga

SEQ ID NO: 440105 - RNA, 23 nt, Human
uaccaagcugcuucugcuauucu

SEQ ID NO: 440106 - RNA, 23 nt, Human
ucaagccuuugugacggcccaug

SEQ ID NO: 440107 - RNA, 19 nt, Human
ucaagggucuccuucaagg

SEQ ID NO: 440108 - RNA, 22 nt, Human
ucugcagccacaggcacguggc

SEQ ID NO: 440109 - RNA, 22 nt, Human
ugaaagaggguucacucaaacc

SEQ ID NO: 440110 - RNA, 23 nt, Human
ugaacacacgcccaaggcaacaa

SEQ ID NO: 440111 - RNA, 25 nt, Human
ugaagugcuuuuacuuucucucugg

SEQ ID NO: 440112 - RNA, 20 nt, Human
ugcgugccuuccauccuacc

SEQ ID NO: 440113 - RNA, 22 nt, Human
ugcugguucucugggagucugc

SEQ ID NO: 440114 - RNA, 21 nt, Human
ugcugugccugcucugaggca

SEQ ID NO: 440115 - RNA, 18 nt, Human
ugggaggugcugaacaca

SEQ ID NO: 440116 - RNA, 20 nt, Human
ugggaggugcugaacacacg

SEQ ID NO: 440117 - RNA, 21 nt, Human
ugggaugggaggugcugaaca

SEQ ID NO: 440118 - RNA, 24 nt, Human
ugugccacugcccaggcagugauc

SEQ ID NO: 440119 - RNA, 18 nt, Human
ugugguggggagccaggg

SEQ ID NO: 440120 - RNA, 20 nt, Human
ugugguggggagccagggcc

SEQ ID NO: 440121 - RNA, 23 nt, Human
uugugaagugcuuuuacuuucuc

SEQ ID NO: 440122 - RNA, 26 nt, Human
uugugccacugcccaggcagugauca

SEQ ID NO: 440123 - RNA, 20 nt, Human
aaggaacaaagaaaucuaca

SEQ ID NO: 440124 - RNA, 18 nt, Human
aaggacccaagauaggga

SEQ ID NO: 440125 - RNA, 20 nt, Human
aaucacagcuuucuugauua

SEQ ID NO: 440126 - RNA, 22 nt, Human
acaagacaccacauucucucca

SEQ ID NO: 440127 - RNA, 24 nt, Human
acaccacauucucuccaccacgcc

SEQ ID NO: 440128 - RNA, 24 nt, Human
accacgggaggggcgggacccucg

SEQ ID NO: 440129 - RNA, 22 nt, Human
acgccgccauaccccacacagu

SEQ ID NO: 440130 - RNA, 28 nt, Human
acgccgccauaccccacaccgggugucc

SEQ ID NO: 440131 - RNA, 24 nt, Human
agaaggaacaaagaaaucuacaaa

SEQ ID NO: 440132 - RNA, 21 nt, Human
agagagaaagaguaacaugaa

SEQ ID NO: 440133 - RNA, 21 nt, Human
agcagugggaauggagaagga

SEQ ID NO: 440134 - RNA, 22 nt, Human
agugaggaagcugauggagaga

SEQ ID NO: 440135 - RNA, 23 nt, Human
aucuaauccccucccuaucccag

SEQ ID NO: 440136 - RNA, 21 nt, Human
caauagguuucacugcagguu

SEQ ID NO: 440137 - RNA, 22 nt, Human
caauagguuucacugcagguuu

SEQ ID NO: 440138 - RNA, 19 nt, Human
cacagaauuugaccccauc

SEQ ID NO: 440139 - RNA, 18 nt, Human
caccacauucucuccacc

SEQ ID NO: 440140 - RNA, 18 nt, Human
caccacgccgccauaccc

SEQ ID NO: 440141 - RNA, 21 nt, Human
cagcuuucucaauggaaugac

SEQ ID NO: 440142 - RNA, 23 nt, Human
caggaacaaguucuuugaaauac

SEQ ID NO: 440143 - RNA, 23 nt, Human
caggagagggccgaagacugcgg

SEQ ID NO: 440144 - RNA, 18 nt, Human
caggcccuccccucucca

SEQ ID NO: 440145 - RNA, 21 nt, Human
caggcccuccccucuccagga

SEQ ID NO: 440146 - RNA, 21 nt, Human
cagucuccaggcgggaagagg

SEQ ID NO: 440147 - RNA, 19 nt, Human
cagugaggaagcugaugga

SEQ ID NO: 440148 - RNA, 18 nt, Human
caucuauuaucuaauccc

SEQ ID NO: 440149 - RNA, 18 nt, Human
cauugcauguaagcaucc

SEQ ID NO: 440150 - RNA, 18 nt, Human
ccaccacgccgccauacc

SEQ ID NO: 440151 - RNA, 18 nt, Human
ccuauaaaggaacaaggu

SEQ ID NO: 440152 - RNA, 19 nt, Human
ccucuguaaacagggccaa

SEQ ID NO: 440153 - RNA, 23 nt, Human
cgcggcagaggcugacggaccac

SEQ ID NO: 440154 - RNA, 21 nt, Human
cgugaucaauauuuacguagc

SEQ ID NO: 440155 - RNA, 25 nt, Human
cuguucucuagaaguauguuacugg

SEQ ID NO: 440156 - RNA, 19 nt, Human
gaacaagacaccacauucu

SEQ ID NO: 440157 - RNA, 24 nt, Human
gaagaagcggggagagcgcggcca

SEQ ID NO: 440158 - RNA, 22 nt, Human
gaagauguauuauccuagucuc

SEQ ID NO: 440159 - RNA, 18 nt, Human
gaauggagaaggaacaaa

SEQ ID NO: 440160 - RNA, 20 nt, Human
gaauuccuuuuuuuuuuuuu

SEQ ID NO: 440161 - RNA, 18 nt, Human
gauggagagagaaagagu

SEQ ID NO: 440162 - RNA, 22 nt, Human
gccagagaauuaacauuaucag

SEQ ID NO: 440163 - RNA, 19 nt, Human
gccaggaacaaguucuuug

SEQ ID NO: 440164 - RNA, 20 nt, Human
gccaggcccuccccucucca

SEQ ID NO: 440165 - RNA, 20 nt, Human
ggcgacaggagagggccgaa

SEQ ID NO: 440166 - RNA, 19 nt, Human
gggccgaagacugcgaaga

SEQ ID NO: 440167 - RNA, 28 nt, Human
gguuuuuuuuguuuuuuguuuuuuuucu

SEQ ID NO: 440168 - RNA, 22 nt, Human
guuuuuuuuguuuuuuguuuuu

SEQ ID NO: 440169 - RNA, 18 nt, Human
uaacauuaucagugggcc

SEQ ID NO: 440170 - RNA, 18 nt, Human
uaccccacacagucucca

SEQ ID NO: 440171 - RNA, 24 nt, Human
uagaaguauguuacuggcucuuaa

SEQ ID NO: 440172 - RNA, 24 nt, Human
ucagcuuucucaauggaaugacaa

SEQ ID NO: 440173 - RNA, 19 nt, Human
uccaccacgccgccauacc

SEQ ID NO: 440174 - RNA, 21 nt, Human
uccaccacgccgccauacccc

SEQ ID NO: 440175 - RNA, 22 nt, Human
uccaccacgccgccauacccca

SEQ ID NO: 440176 - RNA, 22 nt, Human
uccacugguguaagacagcagg

SEQ ID NO: 440177 - RNA, 24 nt, Human
uccacugguguaagacagcaggcu

SEQ ID NO: 440178 - RNA, 24 nt, Human
ucccuaucccaguugucagcuuuc

SEQ ID NO: 440179 - RNA, 22 nt, Human
uccgcggcagaggcugacggac

SEQ ID NO: 440180 - RNA, 18 nt, Human
uccuuuuuuuuuuuuuuu

SEQ ID NO: 440181 - RNA, 24 nt, Human
ucuaucgcaguagugaacagagac

SEQ ID NO: 440182 - RNA, 23 nt, Human
ucuccaccacgccgccauacccc

SEQ ID NO: 440183 - RNA, 18 nt, Human
ucugcgguccaggccagg

SEQ ID NO: 440184 - RNA, 18 nt, Human
ugaacagagacaaagugc

SEQ ID NO: 440185 - RNA, 18 nt, Human
ugaggagaaucacagcuu

SEQ ID NO: 440186 - RNA, 21 nt, Human
ugaucaauauuuacguagcac

SEQ ID NO: 440187 - RNA, 24 nt, Human
ugauuaguaucuacaaggcacuua

SEQ ID NO: 440188 - RNA, 20 nt, Human
ugcucggagaaaaugagugg

SEQ ID NO: 440189 - RNA, 20 nt, Human
uggaacaagacaccacauuc

SEQ ID NO: 440190 - RNA, 24 nt, Human
uggaagauguauuauccuagucuc

SEQ ID NO: 440191 - RNA, 27 nt, Human
uggaagauguauuauccuagucucuuu

SEQ ID NO: 440192 - RNA, 21 nt, Human
uggaaugacaaggggauacag

SEQ ID NO: 440193 - RNA, 22 nt, Human
uucacauucacacagaauuuga

SEQ ID NO: 440194 - RNA, 18 nt, Human
uucaguuguacugccucu

SEQ ID NO: 440195 - RNA, 18 nt, Human
uuucagugaggaagcuga

SEQ ID NO: 440196 - RNA, 18 nt, Human
aggcaggcggagggccag

SEQ ID NO: 440197 - RNA, 20 nt, Human
aggcaggcggagggccaggc

SEQ ID NO: 440198 - RNA, 18 nt, Human
aggccuagguccagcagc

SEQ ID NO: 440199 - RNA, 21 nt, Human
ccagcagcagcuuggguggcc

SEQ ID NO: 440200 - RNA, 18 nt, Human
ccucuccaggcaggcgga

SEQ ID NO: 440201 - RNA, 22 nt, Human
ccucuccaggcaggcggagggc

SEQ ID NO: 440202 - RNA, 18 nt, Human
gcagcagcuuggguggca

SEQ ID NO: 440203 - RNA, 20 nt, Human
uuugcccagggccaggccuc

SEQ ID NO: 440204 - RNA, 21 nt, Human
aacuaaaaauuugaacagcuc

SEQ ID NO: 440205 - RNA, 19 nt, Human
caaaauagauguacugagc

SEQ ID NO: 440206 - RNA, 19 nt, Human
gauguucacaaaauagaug

SEQ ID NO: 440207 - RNA, 25 nt, Human
uaaauuccauacagugaacuaaaaa

SEQ ID NO: 440208 - RNA, 21 nt, Human
uugaacagcucugugcuggac

SEQ ID NO: 440209 - RNA, 22 nt, Human
aagaacacaacugaagacugca

SEQ ID NO: 440210 - RNA, 22 nt, Human
acaacugaagacugcaaacaac

SEQ ID NO: 440211 - RNA, 23 nt, Human
acugaagcauaagaacacaacug

SEQ ID NO: 440212 - RNA, 18 nt, Human
ccaugccguggcagcccu

SEQ ID NO: 440213 - RNA, 21 nt, Human
cuccaugccguggcagcccuc

SEQ ID NO: 440214 - RNA, 21 nt, Human
uaagaacacaacugaagacug

SEQ ID NO: 440215 - RNA, 21 nt, Human
ucuccaugccguggcagcccc

SEQ ID NO: 440216 - RNA, 23 nt, Human
ucuccaugccguggcagcccucg

SEQ ID NO: 440217 - RNA, 23 nt, Human
ugacaagaaguuuauuucagcuu

SEQ ID NO: 440218 - RNA, 20 nt, Human
ugacacugaagcauaagaac

SEQ ID NO: 440219 - RNA, 22 nt, Human
ugacacugaagcauaagaacac

SEQ ID NO: 440220 - RNA, 19 nt, Human
uuuuuuuuuuuuuuuucaa

SEQ ID NO: 440221 - RNA, 18 nt, Human
aacaaguuuagugguuca

SEQ ID NO: 440222 - RNA, 20 nt, Human
aacagauaugguucugagau

SEQ ID NO: 440223 - RNA, 18 nt, Human
aagcaaguaccaaagaac

SEQ ID NO: 440224 - RNA, 20 nt, Human
aagugcgcgguuggcucuag

SEQ ID NO: 440225 - RNA, 18 nt, Human
aaguguucagaaaacauu

SEQ ID NO: 440226 - RNA, 21 nt, Human
acaaaaaaaaaauggcaaaaa

SEQ ID NO: 440227 - RNA, 22 nt, Human
accaagcacaugggacacccac

SEQ ID NO: 440228 - RNA, 28 nt, Human
agaacaaaaaaaaaauggcaaaaacauu

SEQ ID NO: 440229 - RNA, 19 nt, Human
aggcagccggggcagcacg

SEQ ID NO: 440230 - RNA, 18 nt, Human
aguuaucuuuucaugcug

SEQ ID NO: 440231 - RNA, 21 nt, Human
augaagaacaggagaacagca

SEQ ID NO: 440232 - RNA, 22 nt, Human
caaaaaaaaaauggcaaaaaca

SEQ ID NO: 440233 - RNA, 25 nt, Human
cagaaaacauuaaugcucauuaaca

SEQ ID NO: 440234 - RNA, 24 nt, Human
cagcagaaggggagaccaagcaca

SEQ ID NO: 440235 - RNA, 21 nt, Human
caucccacgcccccugcggcu

SEQ ID NO: 440236 - RNA, 18 nt, Human
cauguacuaucacuuuau

SEQ ID NO: 440237 - RNA, 22 nt, Human
ccccaucccacgcccccugcgg

SEQ ID NO: 440238 - RNA, 24 nt, Human
ccccaucccacgcccccugcggcu

SEQ ID NO: 440239 - RNA, 18 nt, Human
cccgcuuugaaguucccg

SEQ ID NO: 440240 - RNA, 21 nt, Human
ccgucuguaggguuugguugu

SEQ ID NO: 440241 - RNA, 25 nt, Human
ccuuccucuuccuuuucugucuuuu

SEQ ID NO: 440242 - RNA, 19 nt, Human
cgcccccaucccacgcccc

SEQ ID NO: 440243 - RNA, 26 nt, Human
cgcuuugaaguucccgggccgcggga

SEQ ID NO: 440244 - RNA, 23 nt, Human
cggggcugcgaggccccagagca

SEQ ID NO: 440245 - RNA, 20 nt, Human
cggugcgcggcgcuccugcc

SEQ ID NO: 440246 - RNA, 23 nt, Human
cuaaccuuacgguguucauuauc

SEQ ID NO: 440247 - RNA, 22 nt, Human
cucaaaauauuuccuuccuucc

SEQ ID NO: 440248 - RNA, 24 nt, Human
cucaaaauauuuccuuccuuccuc

SEQ ID NO: 440249 - RNA, 20 nt, Human
cuccugcccaugcuuaacuu

SEQ ID NO: 440250 - RNA, 20 nt, Human
cuggcggugcgcggcgcucc

SEQ ID NO: 440251 - RNA, 21 nt, Human
cuggcggugcgcggcgcuccu

SEQ ID NO: 440252 - RNA, 21 nt, Human
cuguucauucaugugcucuug

SEQ ID NO: 440253 - RNA, 19 nt, Human
cuuccucuuccuuuucugu

SEQ ID NO: 440254 - RNA, 20 nt, Human
cuuccucuuccuuuucuguc

SEQ ID NO: 440255 - RNA, 22 nt, Human
cuucuguacucacucacucacu

SEQ ID NO: 440256 - RNA, 19 nt, Human
cuuuuggucuuggaucauc

SEQ ID NO: 440257 - RNA, 21 nt, Human
gaaaaaaugucaacagauaug

SEQ ID NO: 440258 - RNA, 20 nt, Human
gaacaaaaaaaaaauggcaa

SEQ ID NO: 440259 - RNA, 20 nt, Human
gaacagcagaaggggagacc

SEQ ID NO: 440260 - RNA, 20 nt, Human
gagaaaagcacuauucaagg

SEQ ID NO: 440261 - RNA, 20 nt, Human
gagaaaagcacuauucaagg

SEQ ID NO: 440262 - RNA, 22 nt, Human
gccccccuccccggccgccccc

SEQ ID NO: 440263 - RNA, 19 nt, Human
gcuguuucugauaccgucu

SEQ ID NO: 440264 - RNA, 21 nt, Human
ggaauggaguuugaaaaaaga

SEQ ID NO: 440265 - RNA, 19 nt, Human
ggagaacagcagaagggga

SEQ ID NO: 440266 - RNA, 25 nt, Human
ggagaacagcagaaggggagaccgg

SEQ ID NO: 440267 - RNA, 18 nt, Human
ggcggugcgcggcgcucc

SEQ ID NO: 440268 - RNA, 19 nt, Human
gggaaaauggaaaagaaag

SEQ ID NO: 440269 - RNA, 18 nt, Human
gggacacccaccucacuu

SEQ ID NO: 440270 - RNA, 22 nt, Human
gggccgcgggaggggagcgcgg

SEQ ID NO: 440271 - RNA, 30 nt, Human
uaaaauaaaaacuuaaugacuauaacauuu

SEQ ID NO: 440272 - RNA, 22 nt, Human
uaacauguacuaucacuuuaua

SEQ ID NO: 440273 - RNA, 23 nt, Human
uaagcaaguaccaaagaacacuu

SEQ ID NO: 440274 - RNA, 19 nt, Human
uacuguacugucuuaucuu

SEQ ID NO: 440275 - RNA, 27 nt, Human
uacuguacugucuuaucuuugagguag

SEQ ID NO: 440276 - RNA, 26 nt, Human
ucaaaauauuuccuuccuuccucuuc

SEQ ID NO: 440277 - RNA, 20 nt, Human
ucagugugggcgccccccuc

SEQ ID NO: 440278 - RNA, 22 nt, Human
ucccgggccgcgggaggggagc

SEQ ID NO: 440279 - RNA, 19 nt, Human
uccugccacuggccccgca

SEQ ID NO: 440280 - RNA, 22 nt, Human
uccugcccaugcuuaacuuuag

SEQ ID NO: 440281 - RNA, 18 nt, Human
uccuuccucuuccuuuuc

SEQ ID NO: 440282 - RNA, 20 nt, Human
ucucaaaauauuuccuuccu

SEQ ID NO: 440283 - RNA, 21 nt, Human
ugaaaggguagaggaauaucu

SEQ ID NO: 440284 - RNA, 18 nt, Human
ugaagucaacuccugccc

SEQ ID NO: 440285 - RNA, 20 nt, Human
ugcaaaauaacucaauaugc

SEQ ID NO: 440286 - RNA, 19 nt, Human
uggaaaagaaagcuaugag

SEQ ID NO: 440287 - RNA, 23 nt, Human
uggcaaaaacauucacauaaagg

SEQ ID NO: 440288 - RNA, 21 nt, Human
uguacaaaggaaauagggacc

SEQ ID NO: 440289 - RNA, 23 nt, Human
uguguauguacaaaggaaauagg

SEQ ID NO: 440290 - RNA, 18 nt, Human
uguucagaaaacauuaau

SEQ ID NO: 440291 - RNA, 22 nt, Human
uuaaaaaguccugcuaacuuaa

SEQ ID NO: 440292 - RNA, 24 nt, Human
uucaaaauacauuauaugcuaaca

SEQ ID NO: 440293 - RNA, 21 nt, Human
uucugccauuagcugugugac

SEQ ID NO: 440294 - RNA, 22 nt, Human
uucuucucaauauauucucaaa

SEQ ID NO: 440295 - RNA, 23 nt, Human
uuggaucaucucaguagaagaau

SEQ ID NO: 440296 - RNA, 18 nt, Human
uuguaauauauuucuucc

SEQ ID NO: 440297 - RNA, 21 nt, Human
uuuggaaguguucagaaaaca

SEQ ID NO: 440298 - RNA, 22 nt, Human
aaagauaauauucacaaaauca

SEQ ID NO: 440299 - RNA, 21 nt, Human
aaauccuacacagacaccccc

SEQ ID NO: 440300 - RNA, 22 nt, Human
aaguugucuccucccuccucca

SEQ ID NO: 440301 - RNA, 22 nt, Human
aaucaccagguguucaaaacau

SEQ ID NO: 440302 - RNA, 18 nt, Human
acacagacucagacaaga

SEQ ID NO: 440303 - RNA, 23 nt, Human
acagcagccugaaauuaggucug

SEQ ID NO: 440304 - RNA, 18 nt, Human
acagcaucugauucuagu

SEQ ID NO: 440305 - RNA, 22 nt, Human
acauuuuaucauaucucuuugu

SEQ ID NO: 440306 - RNA, 19 nt, Human
accagaacaacuuucccag

SEQ ID NO: 440307 - RNA, 20 nt, Human
acccuccugucuucuccagu

SEQ ID NO: 440308 - RNA, 21 nt, Human
acucccacacagacucagaca

SEQ ID NO: 440309 - RNA, 18 nt, Human
agacacccccaaaagcga

SEQ ID NO: 440310 - RNA, 22 nt, Human
agauaauauucacaaaaucaaa

SEQ ID NO: 440311 - RNA, 18 nt, Human
agcaaauagcuaccaaaa

SEQ ID NO: 440312 - RNA, 20 nt, Human
aguagaacgaauguuuuguu

SEQ ID NO: 440313 - RNA, 18 nt, Human
auucagaauacaaaagau

SEQ ID NO: 440314 - RNA, 24 nt, Human
caaaagauuacuuauguuccucac

SEQ ID NO: 440315 - RNA, 19 nt, Human
caaaaucaaauugcugcug

SEQ ID NO: 440316 - RNA, 21 nt, Human
caacaccacccugcuuagcaa

SEQ ID NO: 440317 - RNA, 22 nt, Human
caauuccaccaucugaaaagga

SEQ ID NO: 440318 - RNA, 19 nt, Human
cacacagacucagacaaga

SEQ ID NO: 440319 - RNA, 24 nt, Human
cacagacacccccaaaagcgaugg

SEQ ID NO: 440320 - RNA, 22 nt, Human
cacagcaucugauucuaguaga

SEQ ID NO: 440321 - RNA, 20 nt, Human
cagaacaacuuucccagcuc

SEQ ID NO: 440322 - RNA, 18 nt, Human
cagcagccugaaauuagg

SEQ ID NO: 440323 - RNA, 19 nt, Human
cagcagccugaaauuaggu

SEQ ID NO: 440324 - RNA, 23 nt, Human
cagcagccugaaauuaggucugc

SEQ ID NO: 440325 - RNA, 20 nt, Human
caucugaaaaggaaaggugc

SEQ ID NO: 440326 - RNA, 24 nt, Human
cauucgggaaauucaccauacaga

SEQ ID NO: 440327 - RNA, 24 nt, Human
cccacacagacucagacaagagaa

SEQ ID NO: 440328 - RNA, 22 nt, Human
ccugaaauuaggucugcagagc

SEQ ID NO: 440329 - RNA, 20 nt, Human
ccugcuaaaaucagucucca

SEQ ID NO: 440330 - RNA, 23 nt, Human
cuaccaaaaucaacucacagcau

SEQ ID NO: 440331 - RNA, 22 nt, Human
cucuaagucgugcaauuccacc

SEQ ID NO: 440332 - RNA, 20 nt, Human
cuucccucucaugcucugaa

SEQ ID NO: 440333 - RNA, 19 nt, Human
cuugauauuacccuguacc

SEQ ID NO: 440334 - RNA, 20 nt, Human
gaacaacuccaaggucaaac

SEQ ID NO: 440335 - RNA, 23 nt, Human
gacucagacaagagaaccuuaug

SEQ ID NO: 440336 - RNA, 21 nt, Human
gagaaccacagcagccugaaa

SEQ ID NO: 440337 - RNA, 25 nt, Human
gcagagcagcaaauagcuaccaaaa

SEQ ID NO: 440338 - RNA, 19 nt, Human
gcauuuuuaauauagaaaa

SEQ ID NO: 440339 - RNA, 24 nt, Human
gcccacugccccagggccuuugca

SEQ ID NO: 440340 - RNA, 23 nt, Human
ggucugggcacauaguaggcauu

SEQ ID NO: 440341 - RNA, 19 nt, Human
guucuuuggggucaguugc

SEQ ID NO: 440342 - RNA, 21 nt, Human
guuuguaaaaauggcugcuug

SEQ ID NO: 440343 - RNA, 25 nt, Human
uacaaaagauaauauucacaaaauc

SEQ ID NO: 440344 - RNA, 21 nt, Human
uacacagacacccccaaaagc

SEQ ID NO: 440345 - RNA, 23 nt, Human
uacacagacacccccaaaagcga

SEQ ID NO: 440346 - RNA, 24 nt, Human
uacuaaauccuacacagacacccc

SEQ ID NO: 440347 - RNA, 24 nt, Human
uagaagaggucugggcacauagua

SEQ ID NO: 440348 - RNA, 24 nt, Human
uaucauacacuacaggacccuccu

SEQ ID NO: 440349 - RNA, 19 nt, Human
ucaguugcaguccagucuu

SEQ ID NO: 440350 - RNA, 22 nt, Human
uccaauacccagaaugcgaaau

SEQ ID NO: 440351 - RNA, 22 nt, Human
uccuacacagacacccccaaaa

SEQ ID NO: 440352 - RNA, 30 nt, Human
ucugaaguugucuccucccuccuccauucu

SEQ ID NO: 440353 - RNA, 25 nt, Human
ugaaaagaagacuaugacugggaaa

SEQ ID NO: 440354 - RNA, 26 nt, Human
ugaaaagaagacuaugacugggaaau

SEQ ID NO: 440355 - RNA, 20 nt, Human
ugagaaccacagcagccuga

SEQ ID NO: 440356 - RNA, 19 nt, Human
ugccccagggccuuugcac

SEQ ID NO: 440357 - RNA, 23 nt, Human
ugcugagaaccacagcagccuga

SEQ ID NO: 440358 - RNA, 22 nt, Human
ugcugcugagaaccacagcagc

SEQ ID NO: 440359 - RNA, 21 nt, Human
ugcuguguguccgacaccggg

SEQ ID NO: 440360 - RNA, 18 nt, Human
uggccacacccaccugcu

SEQ ID NO: 440361 - RNA, 18 nt, Human
ugggcacauaguaggcau

SEQ ID NO: 440362 - RNA, 19 nt, Human
ugugagacgaccacuuuau

SEQ ID NO: 440363 - RNA, 20 nt, Human
uguguguccgacaccggggc

SEQ ID NO: 440364 - RNA, 22 nt, Human
uguuuuguuucuucgaauauua

SEQ ID NO: 440365 - RNA, 23 nt, Human
uuaaaugaacaacuccaagguca

SEQ ID NO: 440366 - RNA, 22 nt, Human
uuccaccaucugaaaaggaaag

SEQ ID NO: 440367 - RNA, 18 nt, Human
uugucuccucccuccucc

SEQ ID NO: 440368 - RNA, 22 nt, Human
uuguguaucauacacuacagga

SEQ ID NO: 440369 - RNA, 21 nt, Human
uuuuuuuuuugugagacgacc

SEQ ID NO: 440370 - RNA, 18 nt, Human
uuuuuuuuuuuuuuuuug

SEQ ID NO: 440371 - RNA, 19 nt, Human
uuuuuuuuuuuuuuuuugu

SEQ ID NO: 440372 - RNA, 22 nt, Human
aaacaaaaccaacuagcaaaac

SEQ ID NO: 440373 - RNA, 18 nt, Human
aaagacucagugguucug

SEQ ID NO: 440374 - RNA, 24 nt, Human
aaagugcugggauuaugggcauga

SEQ ID NO: 440375 - RNA, 19 nt, Human
aagugcugggauuaugggc

SEQ ID NO: 440376 - RNA, 21 nt, Human
aagugcugggauuaugggcau

SEQ ID NO: 440377 - RNA, 18 nt, Human
aggcuggccuugaacuuc

SEQ ID NO: 440378 - RNA, 22 nt, Human
aggugggcucugcgggcacuuu

SEQ ID NO: 440379 - RNA, 23 nt, Human
aucugggccuguguuccccuggg

SEQ ID NO: 440380 - RNA, 26 nt, Human
caaaacaaaaccaacuagcaaaaccc

SEQ ID NO: 440381 - RNA, 19 nt, Human
caaaacccucaaggugggc

SEQ ID NO: 440382 - RNA, 24 nt, Human
caaagugcugggauuaugggcaug

SEQ ID NO: 440383 - RNA, 22 nt, Human
cagugguucuguccugagacuc

SEQ ID NO: 440384 - RNA, 24 nt, Human
ccaaagugcugggauuaugggcau

SEQ ID NO: 440385 - RNA, 20 nt, Human
ccacuucuugguggcugucc

SEQ ID NO: 440386 - RNA, 23 nt, Human
ccccacggcuguaaacgcaaaac

SEQ ID NO: 440387 - RNA, 21 nt, Human
cccucaaggugggcucugcgg

SEQ ID NO: 440388 - RNA, 23 nt, Human
ccgccuccaucucccaaagugcu

SEQ ID NO: 440389 - RNA, 22 nt, Human
ccuagagcgauguggucaaagg

SEQ ID NO: 440390 - RNA, 22 nt, Human
ccuccaaaagacucagugguuc

SEQ ID NO: 440391 - RNA, 23 nt, Human
cgcaaaacaaaaccaacuagcaa

SEQ ID NO: 440392 - RNA, 20 nt, Human
cuacggcgcacagggcugcg

SEQ ID NO: 440393 - RNA, 24 nt, Human
cucaaaugauuuucccgccuccau

SEQ ID NO: 440394 - RNA, 22 nt, Human
cucuguucuugguagauuuucu

SEQ ID NO: 440395 - RNA, 21 nt, Human
cugggccuguguuccccuggg

SEQ ID NO: 440396 - RNA, 21 nt, Human
cuuuggcagccacuucuuggu

SEQ ID NO: 440397 - RNA, 18 nt, Human
gauuaugggcaugagcca

SEQ ID NO: 440398 - RNA, 22 nt, Human
gauuaugggcaugagccacugc

SEQ ID NO: 440399 - RNA, 22 nt, Human
gauuaugggcaugagccacugc

SEQ ID NO: 440400 - RNA, 21 nt, Human
gcugggauuaugggcaugagc

SEQ ID NO: 440401 - RNA, 22 nt, Human
ggagucucgcuaugucguccag

SEQ ID NO: 440402 - RNA, 23 nt, Human
ggagucucgcuaugucguccagg

SEQ ID NO: 440403 - RNA, 20 nt, Human
ggcaugagccacugcgccca

SEQ ID NO: 440404 - RNA, 19 nt, Human
ggccuugaacuucugaccu

SEQ ID NO: 440405 - RNA, 24 nt, Human
ggcuggccuugaacuucugaccuc

SEQ ID NO: 440406 - RNA, 22 nt, Human
gggcugcagagcggggcucccc

SEQ ID NO: 440407 - RNA, 24 nt, Human
gguccaaucaguggaugcuagugg

SEQ ID NO: 440408 - RNA, 23 nt, Human
gguggugggggugaguuacagag

SEQ ID NO: 440409 - RNA, 19 nt, Human
guccaaucaguggaugcua

SEQ ID NO: 440410 - RNA, 23 nt, Human
gucccaggagaggcacauggggg

SEQ ID NO: 440411 - RNA, 24 nt, Human
guggaugcuagugggcccuggggc

SEQ ID NO: 440412 - RNA, 22 nt, Human
uaauuuuuauuuuuugguagag

SEQ ID NO: 440413 - RNA, 22 nt, Human
uagagguggagucucgcuaugu

SEQ ID NO: 440414 - RNA, 22 nt, Human
uaugucguccaggcuggccuug

SEQ ID NO: 440415 - RNA, 24 nt, Human
uaugucguccaggcuggccuugaa

SEQ ID NO: 440416 - RNA, 19 nt, Human
ucaguggaugcuagugggc

SEQ ID NO: 440417 - RNA, 24 nt, Human
ucccaaagugcugggauuaugggc

SEQ ID NO: 440418 - RNA, 23 nt, Human
uccccccacggcuguaaacgcaa

SEQ ID NO: 440419 - RNA, 18 nt, Human
ucccccugggacacgccu

SEQ ID NO: 440420 - RNA, 19 nt, Human
ucucgcuaugucguccagg

SEQ ID NO: 440421 - RNA, 23 nt, Human
ucucgcuaugucguccaggcugg

SEQ ID NO: 440422 - RNA, 18 nt, Human
ucuguccugagacucugu

SEQ ID NO: 440423 - RNA, 20 nt, Human
ucuguccugagacucuguuc

SEQ ID NO: 440424 - RNA, 23 nt, Human
ucuguucuugguagauuuucuuc

SEQ ID NO: 440425 - RNA, 30 nt, Human
ucuguuuugauuuuguuucuguuuuugugg

SEQ ID NO: 440426 - RNA, 24 nt, Human
ugaccucaaaugauuuucccgccu

SEQ ID NO: 440427 - RNA, 21 nt, Human
ugaggaguccuuuucucuggg

SEQ ID NO: 440428 - RNA, 18 nt, Human
uggcuguccuugaguugg

SEQ ID NO: 440429 - RNA, 18 nt, Human
ugggauuaugggcaugag

SEQ ID NO: 440430 - RNA, 19 nt, Human
ugggauuaugggcaugagc

SEQ ID NO: 440431 - RNA, 22 nt, Human
ugggauuaugggcaugagccac

SEQ ID NO: 440432 - RNA, 22 nt, Human
ugggauuaugggcaugagccac

SEQ ID NO: 440433 - RNA, 24 nt, Human
ugggauuaugggcaugagccacug

SEQ ID NO: 440434 - RNA, 20 nt, Human
ugggcucugcgggcacuuug

SEQ ID NO: 440435 - RNA, 19 nt, Human
ugggugccaguuauccuag

SEQ ID NO: 440436 - RNA, 24 nt, Human
ugguagagguggagucucgcuaug

SEQ ID NO: 440437 - RNA, 25 nt, Human
uggucaaagggaugucaucugggcc

SEQ ID NO: 440438 - RNA, 19 nt, Human
uguuuuuguguguguguau

SEQ ID NO: 440439 - RNA, 24 nt, Human
uugguagagguggagucucgcuau

SEQ ID NO: 440440 - RNA, 22 nt, Human
uuucccgccuccaucucccaaa

SEQ ID NO: 440441 - RNA, 19 nt, Human
uuucuguuuuugugugugu

SEQ ID NO: 440442 - RNA, 23 nt, Human
uuuuauuuuuugguagaggugga

SEQ ID NO: 440443 - RNA, 27 nt, Human
uuuuauuuuuugguagagguggagucu

SEQ ID NO: 440444 - RNA, 23 nt, Human
uuuucugcuuucucuguuuugau

SEQ ID NO: 440445 - RNA, 22 nt, Human
uuuuugguagagguggagucuc

SEQ ID NO: 440446 - RNA, 24 nt, Human
uuuuuugguagagguggagucucg

SEQ ID NO: 440447 - RNA, 20 nt, Human
uuuuuuuuuuuuuuuuuugg

SEQ ID NO: 440448 - RNA, 24 nt, Human
uuuuuuuuuuuuuuuuuuguuuuu

SEQ ID NO: 440449 - RNA, 21 nt, Human
aaagacagaucuccacaaaca

SEQ ID NO: 440450 - RNA, 19 nt, Human
aaagggagugggaugaaag

SEQ ID NO: 440451 - RNA, 18 nt, Human
aagaagggaugccccggc

SEQ ID NO: 440452 - RNA, 21 nt, Human
acagaaagaaaaaaaugggau

SEQ ID NO: 440453 - RNA, 21 nt, Human
acccagauggauaucaggagc

SEQ ID NO: 440454 - RNA, 21 nt, Human
agaaaagcucagaaacccaag

SEQ ID NO: 440455 - RNA, 18 nt, Human
agaaagagaacguagaaa

SEQ ID NO: 440456 - RNA, 20 nt, Human
agaaggaguuuggggauugg

SEQ ID NO: 440457 - RNA, 19 nt, Human
aggcagagaugagcacagg

SEQ ID NO: 440458 - RNA, 19 nt, Human
agggaggauggaagggucu

SEQ ID NO: 440459 - RNA, 20 nt, Human
agggagugggaugaaagggg

SEQ ID NO: 440460 - RNA, 18 nt, Human
aucuccacaaacacccca

SEQ ID NO: 440461 - RNA, 19 nt, Human
augggaacgaagaagggau

SEQ ID NO: 440462 - RNA, 22 nt, Human
augggaacgaagaagggaugcc

SEQ ID NO: 440463 - RNA, 18 nt, Human
augugcagaagagaaggu

SEQ ID NO: 440464 - RNA, 23 nt, Human
cagccggucccucuggcuggcuc

SEQ ID NO: 440465 - RNA, 18 nt, Human
ccacauguuagacccagg

SEQ ID NO: 440466 - RNA, 19 nt, Human
ccacuccccaauguccccc

SEQ ID NO: 440467 - RNA, 24 nt, Human
ccaggcacacaguccuucugugcc

SEQ ID NO: 440468 - RNA, 19 nt, Human
ccaggcuuuuccagagaag

SEQ ID NO: 440469 - RNA, 24 nt, Human
cccaagaucuguuccuccccauuc

SEQ ID NO: 440470 - RNA, 21 nt, Human
ccccaagaucuguuccucccc

SEQ ID NO: 440471 - RNA, 20 nt, Human
ccccaggccugggaaccugu

SEQ ID NO: 440472 - RNA, 24 nt, Human
ccccuuaaaggugcuagggacaaa

SEQ ID NO: 440473 - RNA, 27 nt, Human
cccggcaacgcuggccgcaacagcagc

SEQ ID NO: 440474 - RNA, 18 nt, Human
ccggcaacgcuggccgca

SEQ ID NO: 440475 - RNA, 24 nt, Human
ccucaugcuuggaccuuucuuucu

SEQ ID NO: 440476 - RNA, 19 nt, Human
ccuccaauucuuccccucc

SEQ ID NO: 440477 - RNA, 22 nt, Human
ccuccaauucuuccccuccccu

SEQ ID NO: 440478 - RNA, 20 nt, Human
ccuccccuuaaaggugcuag

SEQ ID NO: 440479 - RNA, 24 nt, Human
ccugggaaccuguuccugggucgg

SEQ ID NO: 440480 - RNA, 18 nt, Human
cgccuguauaauugggac

SEQ ID NO: 440481 - RNA, 20 nt, Human
cuccacaaacaccccaggcc

SEQ ID NO: 440482 - RNA, 24 nt, Human
cugaggaugggcccagcucucucu

SEQ ID NO: 440483 - RNA, 24 nt, Human
cugcuggcggcucgggcuuccucu

SEQ ID NO: 440484 - RNA, 22 nt, Human
cuggaacaagaggcugccccaa

SEQ ID NO: 440485 - RNA, 21 nt, Human
cuggaggaccugaggaacugg

SEQ ID NO: 440486 - RNA, 20 nt, Human
cugggcugguggcucuaggc

SEQ ID NO: 440487 - RNA, 19 nt, Human
cuuguuugcuugccucuga

SEQ ID NO: 440488 - RNA, 18 nt, Human
gaaagacagaucuccaca

SEQ ID NO: 440489 - RNA, 23 nt, Human
gaagaaagagaacguagaaaggc

SEQ ID NO: 440490 - RNA, 20 nt, Human
gaccuuucuuucuucuuugg

SEQ ID NO: 440491 - RNA, 23 nt, Human
gaccuuucuuucuucuuuggagu

SEQ ID NO: 440492 - RNA, 22 nt, Human
gagaaagacagaucuccacaaa

SEQ ID NO: 440493 - RNA, 18 nt, Human
gagaaggaagcugggcug

SEQ ID NO: 440494 - RNA, 19 nt, Human
gagugggaugaaaggggag

SEQ ID NO: 440495 - RNA, 19 nt, Human
gaguuuggggauuggggag

SEQ ID NO: 440496 - RNA, 22 nt, Human
gaugcugagauggagaaaagga

SEQ ID NO: 440497 - RNA, 21 nt, Human
gcaacagcagccggccuggag

SEQ ID NO: 440498 - RNA, 24 nt, Human
gcccagcucucucugggauguucc

SEQ ID NO: 440499 - RNA, 21 nt, Human
gccgcaacagcagccggccug

SEQ ID NO: 440500 - RNA, 22 nt, Human
gcuggaacaagaggcugcccca

SEQ ID NO: 440501 - RNA, 19 nt, Human
gcuuguccgcccacucccc

SEQ ID NO: 440502 - RNA, 19 nt, Human
ggagccuggguuccacugc

SEQ ID NO: 440503 - RNA, 25 nt, Human
gggagugggaugaaaggggaguugg

SEQ ID NO: 440504 - RNA, 21 nt, Human
gggcggagggcuaggggcugc

SEQ ID NO: 440505 - RNA, 21 nt, Human
ggggaggaugagggagaaaag

SEQ ID NO: 440506 - RNA, 21 nt, Human
gggguccaggcaagcugcccu

SEQ ID NO: 440507 - RNA, 19 nt, Human
ggguagggcugaggauggg

SEQ ID NO: 440508 - RNA, 20 nt, Human
ggugcuagggacaaagggga

SEQ ID NO: 440509 - RNA, 19 nt, Human
gucccccaagaucuguucc

SEQ ID NO: 440510 - RNA, 20 nt, Human
ucaaggacagaaagaaaaaa

SEQ ID NO: 440511 - RNA, 19 nt, Human
uccacaaacaccccaggcc

SEQ ID NO: 440512 - RNA, 22 nt, Human
uccacaaacaccccaggccugg

SEQ ID NO: 440513 - RNA, 22 nt, Human
uccagagaaggaagcugggcug

SEQ ID NO: 440514 - RNA, 24 nt, Human
uccccaaugucccccaagaucugu

SEQ ID NO: 440515 - RNA, 23 nt, Human
uccccauucccaggcagagauug

SEQ ID NO: 440516 - RNA, 24 nt, Human
ucccccaagaucuguuccucccca

SEQ ID NO: 440517 - RNA, 24 nt, Human
uccgcccacuccccaauguccccc

SEQ ID NO: 440518 - RNA, 27 nt, Human
ucuaauacuuguuugcuugccucugac

SEQ ID NO: 440519 - RNA, 20 nt, Human
ucuaggcuuggaagaaagag

SEQ ID NO: 440520 - RNA, 25 nt, Human
ucuccacaaacaccccaggccuggg

SEQ ID NO: 440521 - RNA, 24 nt, Human
ucucucugggauguuccugggcuu

SEQ ID NO: 440522 - RNA, 22 nt, Human
ugaaagggagugggaugaaagg

SEQ ID NO: 440523 - RNA, 22 nt, Human
ugaaaucuuuggagaaagacag

SEQ ID NO: 440524 - RNA, 25 nt, Human
ugagagccaaauauuuugguuuuua

SEQ ID NO: 440525 - RNA, 20 nt, Human
ugcccuggagugcuuguccg

SEQ ID NO: 440526 - RNA, 21 nt, Human
ugccucugacacagccggucc

SEQ ID NO: 440527 - RNA, 22 nt, Human
uggagaaagacagaucuccaca

SEQ ID NO: 440528 - RNA, 19 nt, Human
uggcugcaaaagucuccau

SEQ ID NO: 440529 - RNA, 18 nt, Human
ugggauguuccugggcuu

SEQ ID NO: 440530 - RNA, 21 nt, Human
ugggcccagcucucucuggga

SEQ ID NO: 440531 - RNA, 21 nt, Human
ugggcggagggcuaggggcug

SEQ ID NO: 440532 - RNA, 22 nt, Human
ugggcucaaggacagaaagaaa

SEQ ID NO: 440533 - RNA, 21 nt, Human
ugggcugguggcucuaggcuu

SEQ ID NO: 440534 - RNA, 23 nt, Human
ugggcuuucucucuccgaagcuc

SEQ ID NO: 440535 - RNA, 18 nt, Human
uggguagggcugaggaug

SEQ ID NO: 440536 - RNA, 20 nt, Human
uuaaaggugcuagggacaaa

SEQ ID NO: 440537 - RNA, 18 nt, Human
uugaacucacugggcuca

SEQ ID NO: 440538 - RNA, 18 nt, Human
uuuggggauuggggagga

SEQ ID NO: 440539 - RNA, 22 nt, Human
aaaugccccaggggacaaaggu

SEQ ID NO: 440540 - RNA, 24 nt, Human
aagguagaagaaaaauaguacaaa

SEQ ID NO: 440541 - RNA, 18 nt, Human
acaaaacucagagaaagc

SEQ ID NO: 440542 - RNA, 23 nt, Human
agaaaaauaguacaaaacucaga

SEQ ID NO: 440543 - RNA, 23 nt, Human
agucagagcaacccaagaacuaa

SEQ ID NO: 440544 - RNA, 24 nt, Human
caagaaaacccucccaggaguuuc

SEQ ID NO: 440545 - RNA, 22 nt, Human
cacaucaucuuuuuuugcuacc

SEQ ID NO: 440546 - RNA, 19 nt, Human
cauucagagagucagagca

SEQ ID NO: 440547 - RNA, 20 nt, Human
ccaggggacaaagguacacc

SEQ ID NO: 440548 - RNA, 21 nt, Human
cccaggggacaaagguacacc

SEQ ID NO: 440549 - RNA, 24 nt, Human
cgaaauacgucaagguagaagaaa

SEQ ID NO: 440550 - RNA, 20 nt, Human
cuucaacaaugcagagcaac

SEQ ID NO: 440551 - RNA, 21 nt, Human
gaacuaaacucauuauaugca

SEQ ID NO: 440552 - RNA, 19 nt, Human
gcauuuucucaagaaaacc

SEQ ID NO: 440553 - RNA, 18 nt, Human
uaaaaucaacacaucauc

SEQ ID NO: 440554 - RNA, 24 nt, Human
uacaaaacucagagaaagcucagc

SEQ ID NO: 440555 - RNA, 23 nt, Human
uagaagaaaaauaguacaaaacu

SEQ ID NO: 440556 - RNA, 22 nt, Human
uaguacaaaacucagagaaagc

SEQ ID NO: 440557 - RNA, 23 nt, Human
uccgugauaagcugugaaauuca

SEQ ID NO: 440558 - RNA, 21 nt, Human
ucucaagaaaacccucccagg

SEQ ID NO: 440559 - RNA, 27 nt, Human
uuauaugcauuuucucaagaaaacccu

SEQ ID NO: 440560 - RNA, 23 nt, Human
uucagagagucagagcaacccaa

SEQ ID NO: 440561 - RNA, 22 nt, Human
uucagugaagaguccgugauaa

SEQ ID NO: 440562 - RNA, 18 nt, Human
uuugcuaccuaaaugccc

SEQ ID NO: 440563 - RNA, 20 nt, Human
acaucaucuggauccaggau

SEQ ID NO: 440564 - RNA, 19 nt, Human
acccggggcgccgcucccc

SEQ ID NO: 440565 - RNA, 26 nt, Human
acccugaggcccggaggcucgcggca

SEQ ID NO: 440566 - RNA, 19 nt, Human
caaaagcaucugggcucug

SEQ ID NO: 440567 - RNA, 21 nt, Human
cacagcaaucagcuugucuuu

SEQ ID NO: 440568 - RNA, 19 nt, Human
caccacgaugcccguccug

SEQ ID NO: 440569 - RNA, 25 nt, Human
cacuucugucucaaaagcaucuggg

SEQ ID NO: 440570 - RNA, 21 nt, Human
cagagacccggggcgccgcuc

SEQ ID NO: 440571 - RNA, 21 nt, Human
caggacccuucucccgggucu

SEQ ID NO: 440572 - RNA, 21 nt, Human
ccaguaaccaggacccuucuc

SEQ ID NO: 440573 - RNA, 22 nt, Human
cccccggcgaccacgccgggcc

SEQ ID NO: 440574 - RNA, 20 nt, Human
ccccgcgggcgcagccccca

SEQ ID NO: 440575 - RNA, 19 nt, Human
cccggaacacccugaggcc

SEQ ID NO: 440576 - RNA, 23 nt, Human
cccggaacacccugaggcccgga

SEQ ID NO: 440577 - RNA, 18 nt, Human
cccggggcgccgcucccc

SEQ ID NO: 440578 - RNA, 19 nt, Human
cccugaggcccggaggcuc

SEQ ID NO: 440579 - RNA, 23 nt, Human
ccgacgcgcagcuggcccuccuu

SEQ ID NO: 440580 - RNA, 19 nt, Human
ccuggcccccggcgaccac

SEQ ID NO: 440581 - RNA, 21 nt, Human
cggggcgggugggcccagaga

SEQ ID NO: 440582 - RNA, 21 nt, Human
cgggugggcccagagacccgg

SEQ ID NO: 440583 - RNA, 23 nt, Human
cuucagguaccgcugcagcgccu

SEQ ID NO: 440584 - RNA, 21 nt, Human
cuuucauccuggcccccggcg

SEQ ID NO: 440585 - RNA, 18 nt, Human
gaggacgcccggggcggg

SEQ ID NO: 440586 - RNA, 19 nt, Human
ggaacacccugaggcccgg

SEQ ID NO: 440587 - RNA, 21 nt, Human
ggcccagagacccggggcgcc

SEQ ID NO: 440588 - RNA, 19 nt, Human
ucaaacacagcaaucagcu

SEQ ID NO: 440589 - RNA, 25 nt, Human
ucacuuucauccuggcccccggcga

SEQ ID NO: 440590 - RNA, 20 nt, Human
ucagguaccgcugcagcgcc

SEQ ID NO: 440591 - RNA, 22 nt, Human
uccccggaacacccugaggccc

SEQ ID NO: 440592 - RNA, 22 nt, Human
uccccggaacacccugaggccc

SEQ ID NO: 440593 - RNA, 22 nt, Human
uccuggcccccggcgaccacgc

SEQ ID NO: 440594 - RNA, 22 nt, Human
ucgcggcagcgccccuuccacc

SEQ ID NO: 440595 - RNA, 18 nt, Human
ucucggaggacgcccggg

SEQ ID NO: 440596 - RNA, 19 nt, Human
ucucggaggacgcccgggg

SEQ ID NO: 440597 - RNA, 18 nt, Human
ucugcaggguuuccacug

SEQ ID NO: 440598 - RNA, 22 nt, Human
ugcccguccugccgaagcacac

SEQ ID NO: 440599 - RNA, 22 nt, Human
ugucugaccccgcgggcgcagc

SEQ ID NO: 440600 - RNA, 22 nt, Human
uucaaacacagcaaucagcuug

SEQ ID NO: 440601 - RNA, 18 nt, Human
aaaaagcagcaaggagaa

SEQ ID NO: 440602 - RNA, 19 nt, Human
aaacagagggacuacaaac

SEQ ID NO: 440603 - RNA, 18 nt, Human
aagaaaaagcagcaagga

SEQ ID NO: 440604 - RNA, 22 nt, Human
aagggacagcaaaauacugaaa

SEQ ID NO: 440605 - RNA, 22 nt, Human
accuagaaauacagaagaaaaa

SEQ ID NO: 440606 - RNA, 18 nt, Human
acugaaaaaaauuaacug

SEQ ID NO: 440607 - RNA, 24 nt, Human
agaaaaaaauuccagaauaaauga

SEQ ID NO: 440608 - RNA, 23 nt, Human
agaaaaagggaaagcacaaacau

SEQ ID NO: 440609 - RNA, 23 nt, Human
agaaagugacaaaaauccaucua

SEQ ID NO: 440610 - RNA, 21 nt, Human
agaagaaaaagcagcaaggag

SEQ ID NO: 440611 - RNA, 20 nt, Human
agagggacuacaaacuggug

SEQ ID NO: 440612 - RNA, 21 nt, Human
agcagcaaggagaaaguguug

SEQ ID NO: 440613 - RNA, 25 nt, Human
agggcggcgaggccgcgaccggggc

SEQ ID NO: 440614 - RNA, 19 nt, Human
auuaacagaagaaaaaggg

SEQ ID NO: 440615 - RNA, 21 nt, Human
cacuguccucugagggcccau

SEQ ID NO: 440616 - RNA, 23 nt, Human
cagaagaaaaagggaaagcacaa

SEQ ID NO: 440617 - RNA, 28 nt, Human
cagcaaaauacugaaaaaaauuaacugg

SEQ ID NO: 440618 - RNA, 20 nt, Human
cagugcaccaacuguauuuu

SEQ ID NO: 440619 - RNA, 20 nt, Human
cccaagggacagcaaaauac

SEQ ID NO: 440620 - RNA, 19 nt, Human
cccaggcuacccgcuggga

SEQ ID NO: 440621 - RNA, 22 nt, Human
ccccaggcuacccgcugggaac

SEQ ID NO: 440622 - RNA, 19 nt, Human
ccccuuugaacagaguggu

SEQ ID NO: 440623 - RNA, 19 nt, Human
cccggcgcggggcgcggga

SEQ ID NO: 440624 - RNA, 20 nt, Human
ccgcgaccggggccgugggc

SEQ ID NO: 440625 - RNA, 21 nt, Human
cgaggcgagcgcucuaggccc

SEQ ID NO: 440626 - RNA, 32 nt, Human
cuagcggcgaccacggccagcgacucucuuuu

SEQ ID NO: 440627 - RNA, 24 nt, Human
cucugcaccagccccaggcuaccc

SEQ ID NO: 440628 - RNA, 20 nt, Human
gaagcacuguccucugaggg

SEQ ID NO: 440629 - RNA, 21 nt, Human
gccgcgaccggggccgugggc

SEQ ID NO: 440630 - RNA, 28 nt, Human
gcggcgaccacggccagcgacucucuuc

SEQ ID NO: 440631 - RNA, 21 nt, Human
gcuuggaacucugcaccagcc

SEQ ID NO: 440632 - RNA, 20 nt, Human
ggcgggcgccagagcccugc

SEQ ID NO: 440633 - RNA, 22 nt, Human
gggcgccagagcccugcucgcg

SEQ ID NO: 440634 - RNA, 25 nt, Human
ggucgcggccccgccucccuccccg

SEQ ID NO: 440635 - RNA, 21 nt, Human
uaaugugagugaggcucaguu

SEQ ID NO: 440636 - RNA, 19 nt, Human
uaccagaaaagggucugau

SEQ ID NO: 440637 - RNA, 20 nt, Human
uaguaauucugauguuuccu

SEQ ID NO: 440638 - RNA, 19 nt, Human
uaguucacacagaaaguga

SEQ ID NO: 440639 - RNA, 19 nt, Human
uauuaacagaagaaaaagg

SEQ ID NO: 440640 - RNA, 21 nt, Human
ucccaagggacagcaaaauac

SEQ ID NO: 440641 - RNA, 18 nt, Human
ucccggcgcggggcgcgg

SEQ ID NO: 440642 - RNA, 28 nt, Human
ucuaccagaaaagggucuggucccguga

SEQ ID NO: 440643 - RNA, 23 nt, Human
ugacaaaaauccaucuauuccaa

SEQ ID NO: 440644 - RNA, 19 nt, Human
uggaacucugcaccagccc

SEQ ID NO: 440645 - RNA, 18 nt, Human
aaaaaacagcaaaaccca

SEQ ID NO: 440646 - RNA, 19 nt, Human
aaacagaaaggaaaauagg

SEQ ID NO: 440647 - RNA, 28 nt, Human
aaacagaaaggaaaauaggagucuccag

SEQ ID NO: 440648 - RNA, 24 nt, Human
aaacucuacacucuauugaccuca

SEQ ID NO: 440649 - RNA, 22 nt, Human
aaaucccucccacccucuaccc

SEQ ID NO: 440650 - RNA, 18 nt, Human
aacaaagauaggggcaca

SEQ ID NO: 440651 - RNA, 18 nt, Human
aacugcgugcugucuaga

SEQ ID NO: 440652 - RNA, 20 nt, Human
aagcaagcacccggguuuua

SEQ ID NO: 440653 - RNA, 25 nt, Human
aagcaagcacccggguuuuacuuca

SEQ ID NO: 440654 - RNA, 22 nt, Human
aagcagcagccgaagcugcugc

SEQ ID NO: 440655 - RNA, 23 nt, Human
aaggaauuuuuaaaaacaugcaa

SEQ ID NO: 440656 - RNA, 22 nt, Human
aaguaaaucccucccacccucu

SEQ ID NO: 440657 - RNA, 18 nt, Human
aauuugcccgacuuccuc

SEQ ID NO: 440658 - RNA, 21 nt, Human
accaaguacuaauucuguacu

SEQ ID NO: 440659 - RNA, 23 nt, Human
accccaccaaccccucagaacgg

SEQ ID NO: 440660 - RNA, 19 nt, Human
acccuugugcaacauuccu

SEQ ID NO: 440661 - RNA, 25 nt, Human
accugcuggaauccuuucugaaacu

SEQ ID NO: 440662 - RNA, 23 nt, Human
acuugugcccacucugaggggga

SEQ ID NO: 440663 - RNA, 19 nt, Human
agacauuacacaacaguau

SEQ ID NO: 440664 - RNA, 19 nt, Human
agagucacuuuaugaaaua

SEQ ID NO: 440665 - RNA, 22 nt, Human
agaguucuucagaaaacugccu

SEQ ID NO: 440666 - RNA, 22 nt, Human
aggaagaaaaaaccacaaucuc

SEQ ID NO: 440667 - RNA, 18 nt, Human
aguacaggucugcaugca

SEQ ID NO: 440668 - RNA, 24 nt, Human
agugcauaucuauccuucaugugc

SEQ ID NO: 440669 - RNA, 23 nt, Human
auuuucuuuuagacagauuuucu

SEQ ID NO: 440670 - RNA, 22 nt, Human
caaauuaagcaccaaaaagauc

SEQ ID NO: 440671 - RNA, 26 nt, Human
caacaucaucacucggcgaccucggu

SEQ ID NO: 440672 - RNA, 19 nt, Human
caagaaaacucaacugaag

SEQ ID NO: 440673 - RNA, 19 nt, Human
caagacaagaaaacucaac

SEQ ID NO: 440674 - RNA, 22 nt, Human
caagacaagaaaacucaacuga

SEQ ID NO: 440675 - RNA, 20 nt, Human
cacacugcacugcuguuggg

SEQ ID NO: 440676 - RNA, 21 nt, Human
cacauucacaacccuugugca

SEQ ID NO: 440677 - RNA, 19 nt, Human
caccaaguacuaauucugu

SEQ ID NO: 440678 - RNA, 21 nt, Human
caccacccugccuccaaagug

SEQ ID NO: 440679 - RNA, 20 nt, Human
cacccccaccacccugccuc

SEQ ID NO: 440680 - RNA, 21 nt, Human
cacccugccuccaaagugauc

SEQ ID NO: 440681 - RNA, 19 nt, Human
cacuaaacacuaagagccc

SEQ ID NO: 440682 - RNA, 19 nt, Human
cacuucuggcuuaaccccu

SEQ ID NO: 440683 - RNA, 19 nt, Human
caguuguuuuuuuuuuugg

SEQ ID NO: 440684 - RNA, 23 nt, Human
cauacagcacaacauuuucuaaa

SEQ ID NO: 440685 - RNA, 26 nt, Human
ccagaccacauguuucagugcauauc

SEQ ID NO: 440686 - RNA, 24 nt, Human
ccagccuccaaggaauuuuuaaaa

SEQ ID NO: 440687 - RNA, 23 nt, Human
ccagguaucgaacaauaguauuc

SEQ ID NO: 440688 - RNA, 19 nt, Human
cccacugccagcaaccgcc

SEQ ID NO: 440689 - RNA, 24 nt, Human
cccagagccucacuuugccauuuc

SEQ ID NO: 440690 - RNA, 18 nt, Human
ccccaccacccugccucc

SEQ ID NO: 440691 - RNA, 19 nt, Human
ccccaccacccugccucca

SEQ ID NO: 440692 - RNA, 19 nt, Human
ccccagagccucacuuugc

SEQ ID NO: 440693 - RNA, 22 nt, Human
cccccuuucacauucacaaccc

SEQ ID NO: 440694 - RNA, 24 nt, Human
ccgaagcugcugccgcugcuccca

SEQ ID NO: 440695 - RNA, 19 nt, Human
ccuccauuagggcucaucc

SEQ ID NO: 440696 - RNA, 23 nt, Human
ccuccauucccccuuucacauuc

SEQ ID NO: 440697 - RNA, 20 nt, Human
ccucccacccucuacccagu

SEQ ID NO: 440698 - RNA, 20 nt, Human
ccugcuggaauccuuucuga

SEQ ID NO: 440699 - RNA, 21 nt, Human
ccuuuucucuucccauccuuc

SEQ ID NO: 440700 - RNA, 19 nt, Human
cgcccgggcguggcaggga

SEQ ID NO: 440701 - RNA, 21 nt, Human
cgcucaguuaucacacugcac

SEQ ID NO: 440702 - RNA, 26 nt, Human
cuacacucuauugaccucagcacaac

SEQ ID NO: 440703 - RNA, 24 nt, Human
cuccuaauuuugcuaaugcugcga

SEQ ID NO: 440704 - RNA, 21 nt, Human
cucugcuuuaugcuuaccaga

SEQ ID NO: 440705 - RNA, 22 nt, Human
cugcugccgcugcucccacugc

SEQ ID NO: 440706 - RNA, 20 nt, Human
cuuaaccccuuccagccucc

SEQ ID NO: 440707 - RNA, 22 nt, Human
cuuaccccaccaaccccucaga

SEQ ID NO: 440708 - RNA, 23 nt, Human
cuucaaaaaacagcaaaacccag

SEQ ID NO: 440709 - RNA, 21 nt, Human
cuuucuugcuuugguugagaa

SEQ ID NO: 440710 - RNA, 20 nt, Human
gaaaaaaccacaaucucaaa

SEQ ID NO: 440711 - RNA, 23 nt, Human
gagcuuaccccaccaaccccuca

SEQ ID NO: 440712 - RNA, 19 nt, Human
gcagccugaaagcagcagc

SEQ ID NO: 440713 - RNA, 18 nt, Human
ggaagauauuucuccuau

SEQ ID NO: 440714 - RNA, 19 nt, Human
ggaauccuuucugaaacuc

SEQ ID NO: 440715 - RNA, 19 nt, Human
ggagaacuuuuaauucuga

SEQ ID NO: 440716 - RNA, 21 nt, Human
gggauucuucuauuuaaugcc

SEQ ID NO: 440717 - RNA, 25 nt, Human
gggcguggcagggacaggcgggcga

SEQ ID NO: 440718 - RNA, 19 nt, Human
ggggcucaaaggccugaaa

SEQ ID NO: 440719 - RNA, 20 nt, Human
ggguugcauguggaguacag

SEQ ID NO: 440720 - RNA, 22 nt, Human
guaauacacauaaaucggacaa

SEQ ID NO: 440721 - RNA, 20 nt, Human
gucaggacaaaggaacaaaa

SEQ ID NO: 440722 - RNA, 19 nt, Human
gugugccuaugggaaccau

SEQ ID NO: 440723 - RNA, 22 nt, Human
guuguuuuuuuuuuuggagguu

SEQ ID NO: 440724 - RNA, 24 nt, Human
uaacuuauuuccucccuugccaaa

SEQ ID NO: 440725 - RNA, 22 nt, Human
uaacuuguauaaaaggucaguu

SEQ ID NO: 440726 - RNA, 23 nt, Human
uaagcaauaaaacugcuccuuuu

SEQ ID NO: 440727 - RNA, 24 nt, Human
uaauacacccccaccacccugccu

SEQ ID NO: 440728 - RNA, 23 nt, Human
uacacauaaaucggacaauuuaa

SEQ ID NO: 440729 - RNA, 21 nt, Human
uacacccccaccacccugccu

SEQ ID NO: 440730 - RNA, 20 nt, Human
uaggcucuuguaagcugccu

SEQ ID NO: 440731 - RNA, 20 nt, Human
ucaaaaaacagcaaaaccca

SEQ ID NO: 440732 - RNA, 20 nt, Human
ucaaaucaagaacauacagc

SEQ ID NO: 440733 - RNA, 19 nt, Human
ucagagaaguggcccacua

SEQ ID NO: 440734 - RNA, 21 nt, Human
ucagugcauaucuauccuuca

SEQ ID NO: 440735 - RNA, 18 nt, Human
ucccacccucuacccagu

SEQ ID NO: 440736 - RNA, 20 nt, Human
ucccacccucuacccaguug

SEQ ID NO: 440737 - RNA, 20 nt, Human
ucccauccuucuaaccuggg

SEQ ID NO: 440738 - RNA, 21 nt, Human
uccguagcaacgagcacucuc

SEQ ID NO: 440739 - RNA, 20 nt, Human
ucuauaagcaauaaaacugc

SEQ ID NO: 440740 - RNA, 23 nt, Human
ucucucaucuuuucucuaucaug

SEQ ID NO: 440741 - RNA, 22 nt, Human
ucuguacuaaaauggucagaaa

SEQ ID NO: 440742 - RNA, 23 nt, Human
ucuuaaaaguaaaucccucccac

SEQ ID NO: 440743 - RNA, 18 nt, Human
ucuucacccuuuguuuuu

SEQ ID NO: 440744 - RNA, 18 nt, Human
ucuuuuguauaaagacau

SEQ ID NO: 440745 - RNA, 21 nt, Human
ugaaaacagaaaggaaaauag

SEQ ID NO: 440746 - RNA, 23 nt, Human
ugaaaucuaaccccagagccuca

SEQ ID NO: 440747 - RNA, 18 nt, Human
ugaauaaaaaaaagaacc

SEQ ID NO: 440748 - RNA, 21 nt, Human
ugaauuggaauaugcgggaaa

SEQ ID NO: 440749 - RNA, 22 nt, Human
ugacaaaacaaagauaggggca

SEQ ID NO: 440750 - RNA, 18 nt, Human
ugacauccguagcaacga

SEQ ID NO: 440751 - RNA, 20 nt, Human
ugagaaggacagcuuuggua

SEQ ID NO: 440752 - RNA, 21 nt, Human
ugagcacauagcucuaagugg

SEQ ID NO: 440753 - RNA, 18 nt, Human
ugcagcggcagccugaaa

SEQ ID NO: 440754 - RNA, 19 nt, Human
ugccagcaaguucaguauc

SEQ ID NO: 440755 - RNA, 21 nt, Human
ugccuaagguuauuuacauaa

SEQ ID NO: 440756 - RNA, 20 nt, Human
ugccuaugggaaccauagga

SEQ ID NO: 440757 - RNA, 25 nt, Human
uggaaaaaguugguuuaguugucaa

SEQ ID NO: 440758 - RNA, 18 nt, Human
uggaauaugcgggaaauu

SEQ ID NO: 440759 - RNA, 21 nt, Human
uggcagggacaggcgggcgac

SEQ ID NO: 440760 - RNA, 23 nt, Human
uguucaagacaagaaaacucaac

SEQ ID NO: 440761 - RNA, 23 nt, Human
uguuggguugcauguggaguaca

SEQ ID NO: 440762 - RNA, 20 nt, Human
uuacuucaguuuacaauaau

SEQ ID NO: 440763 - RNA, 22 nt, Human
uuaggcuccaauucuucuuacu

SEQ ID NO: 440764 - RNA, 24 nt, Human
uuaguugucaccaacuuuucuuac

SEQ ID NO: 440765 - RNA, 26 nt, Human
uuauuuccauuccuccauucccccuu

SEQ ID NO: 440766 - RNA, 23 nt, Human
uucacauauaaaccugcuggaau

SEQ ID NO: 440767 - RNA, 27 nt, Human
uucacccuuuguuuuugucacgacacg

SEQ ID NO: 440768 - RNA, 25 nt, Human
uuccauuccuccauucccccuuuca

SEQ ID NO: 440769 - RNA, 23 nt, Human
uucccccuuucacauucacaacc

SEQ ID NO: 440770 - RNA, 19 nt, Human
uugaccucagcacaacuga

SEQ ID NO: 440771 - RNA, 21 nt, Human
uugcaaauuaagcaccaaaaa

SEQ ID NO: 440772 - RNA, 23 nt, Human
uuuagaaaaauuuuauugagaga

SEQ ID NO: 440773 - RNA, 21 nt, Human
uuuccuauacuggcaugaaag

SEQ ID NO: 440774 - RNA, 23 nt, Human
uuuuuuuuuugaaaauucaagcu

SEQ ID NO: 440775 - RNA, 19 nt, Human
aacugcagaaauacagccc

SEQ ID NO: 440776 - RNA, 19 nt, Human
aagcaaaugaaaaccgaaa

SEQ ID NO: 440777 - RNA, 26 nt, Human
accgaaacugcagaaauacagcccug

SEQ ID NO: 440778 - RNA, 22 nt, Human
agaugauggcucugccuggagc

SEQ ID NO: 440779 - RNA, 24 nt, Human
augaaaaccgaaacugcagaaaua

SEQ ID NO: 440780 - RNA, 20 nt, Human
augcaaaugacaauagcaau

SEQ ID NO: 440781 - RNA, 25 nt, Human
caaaugacaauagcaauaaccuucc

SEQ ID NO: 440782 - RNA, 22 nt, Human
caccauauuuaaacuauuccag

SEQ ID NO: 440783 - RNA, 18 nt, Human
cagcccuggaagaaccuu

SEQ ID NO: 440784 - RNA, 19 nt, Human
cauaggugaggacauaaag

SEQ ID NO: 440785 - RNA, 18 nt, Human
ccuggaagaaccuuggug

SEQ ID NO: 440786 - RNA, 21 nt, Human
uagcaauaaccuuccacugaa

SEQ ID NO: 440787 - RNA, 23 nt, Human
uaggucuguuagaugauggcucu

SEQ ID NO: 440788 - RNA, 18 nt, Human
ugaaaaccgaaacugcag

SEQ ID NO: 440789 - RNA, 23 nt, Human
ugacaauagcaauaaccuuccac

SEQ ID NO: 440790 - RNA, 19 nt, Human
ugcaagaaacuccacauca

SEQ ID NO: 440791 - RNA, 23 nt, Human
uggagcagccucacaacuucagc

SEQ ID NO: 440792 - RNA, 18 nt, Human
uggaguuagauuugaagc

SEQ ID NO: 440793 - RNA, 23 nt, Human
uggcucugccuggagcagccuca

SEQ ID NO: 440794 - RNA, 23 nt, Human
aaaaagaacccuaaaaagcaagg

SEQ ID NO: 440795 - RNA, 18 nt, Human
aaagauauauuaaaccuu

SEQ ID NO: 440796 - RNA, 24 nt, Human
aaaucuaauacuucaucuuucuua

SEQ ID NO: 440797 - RNA, 25 nt, Human
aagcauucuacuacccccagaaaug

SEQ ID NO: 440798 - RNA, 19 nt, Human
aagcggaaaaagaacccua

SEQ ID NO: 440799 - RNA, 25 nt, Human
aagugacauugggaucaggauaguu

SEQ ID NO: 440800 - RNA, 19 nt, Human
aauuuugcaauccaguucu

SEQ ID NO: 440801 - RNA, 18 nt, Human
acacacauacaaacauau

SEQ ID NO: 440802 - RNA, 20 nt, Human
agaaaaucuuuguacccuug

SEQ ID NO: 440803 - RNA, 23 nt, Human
agaagaaaacacaggagaaaauc

SEQ ID NO: 440804 - RNA, 21 nt, Human
agauagcaaaucaacuugaaa

SEQ ID NO: 440805 - RNA, 26 nt, Human
aggagagaacaaguucuuuuucagaa

SEQ ID NO: 440806 - RNA, 19 nt, Human
aucuccauccauccucccu

SEQ ID NO: 440807 - RNA, 18 nt, Human
cacacaauguuuuuguug

SEQ ID NO: 440808 - RNA, 20 nt, Human
cagcagcauuuucucggucu

SEQ ID NO: 440809 - RNA, 21 nt, Human
cccaagggguccggcuccuuc

SEQ ID NO: 440810 - RNA, 27 nt, Human
cccccagaaauguccuuucuuguccac

SEQ ID NO: 440811 - RNA, 18 nt, Human
ccccuucuaaacguaagg

SEQ ID NO: 440812 - RNA, 19 nt, Human
cccucagaaaaacaacuau

SEQ ID NO: 440813 - RNA, 19 nt, Human
cggaaaaagaacccuaaaa

SEQ ID NO: 440814 - RNA, 23 nt, Human
cggaaaaagaacccuaaaaagca

SEQ ID NO: 440815 - RNA, 22 nt, Human
cucaagcauucuacuaccccca

SEQ ID NO: 440816 - RNA, 23 nt, Human
gaacaaguucuuuuucagaacuu

SEQ ID NO: 440817 - RNA, 22 nt, Human
gagaaaaucuuuguacccuugg

SEQ ID NO: 440818 - RNA, 19 nt, Human
gaucacagacuaucaaaug

SEQ ID NO: 440819 - RNA, 24 nt, Human
uaaaaaaaaaauucaugauauaca

SEQ ID NO: 440820 - RNA, 22 nt, Human
uaaaacuucuagaagaaaacac

SEQ ID NO: 440821 - RNA, 18 nt, Human
uaaauaaaagcuucucau

SEQ ID NO: 440822 - RNA, 21 nt, Human
uaagacaucagaagucaccag

SEQ ID NO: 440823 - RNA, 18 nt, Human
uaaguaaacuauuugugu

SEQ ID NO: 440824 - RNA, 22 nt, Human
uacaaaauaagaagaguaaaac

SEQ ID NO: 440825 - RNA, 23 nt, Human
uacaaacauauauucacacaaug

SEQ ID NO: 440826 - RNA, 26 nt, Human
uacacacauacaaacauauauucaca

SEQ ID NO: 440827 - RNA, 25 nt, Human
uacauacacacauacaaacauauag

SEQ ID NO: 440828 - RNA, 22 nt, Human
uacuucaucuuucuuaaugaga

SEQ ID NO: 440829 - RNA, 21 nt, Human
uaucaaaugauaaaacuucua

SEQ ID NO: 440830 - RNA, 24 nt, Human
uaucaguuuuaaauaaaagcuucu

SEQ ID NO: 440831 - RNA, 23 nt, Human
ucagaacuuaaaaaaaaaauuca

SEQ ID NO: 440832 - RNA, 27 nt, Human
ucagaagucaccagaguuguaaauucu

SEQ ID NO: 440833 - RNA, 18 nt, Human
uccaggccucaagcauuc

SEQ ID NO: 440834 - RNA, 18 nt, Human
uccauccauccucccuca

SEQ ID NO: 440835 - RNA, 18 nt, Human
ucccucagaaaaacaacu

SEQ ID NO: 440836 - RNA, 21 nt, Human
ucuaagacaucagaagucacc

SEQ ID NO: 440837 - RNA, 23 nt, Human
ucuagaagaaaacacaggagaaa

SEQ ID NO: 440838 - RNA, 21 nt, Human
ucucaaugccacgcuuugacu

SEQ ID NO: 440839 - RNA, 18 nt, Human
ucucaucaaacuggucuu

SEQ ID NO: 440840 - RNA, 21 nt, Human
ucucuuaaggaagguaaaaau

SEQ ID NO: 440841 - RNA, 19 nt, Human
ucuuaaggaagguaaaaau

SEQ ID NO: 440842 - RNA, 18 nt, Human
ucuucaguccaauuaucu

SEQ ID NO: 440843 - RNA, 20 nt, Human
ugacuauauucaccuuccuu

SEQ ID NO: 440844 - RNA, 22 nt, Human
ugacuauauucaccuuccuuuc

SEQ ID NO: 440845 - RNA, 20 nt, Human
ugauauacauacacacauac

SEQ ID NO: 440846 - RNA, 20 nt, Human
ugcaauccaguucugccuuc

SEQ ID NO: 440847 - RNA, 22 nt, Human
ugggaggaugauuuuccccuuc

SEQ ID NO: 440848 - RNA, 24 nt, Human
uguuuuuguugcuguuguucuuuu

SEQ ID NO: 440849 - RNA, 23 nt, Human
uucagaacuuaaaaaaaaaauuc

SEQ ID NO: 440850 - RNA, 19 nt, Human
uucaucuuucuuaaugaga

SEQ ID NO: 440851 - RNA, 27 nt, Human
uucaugauauacauacacacauacagu

SEQ ID NO: 440852 - RNA, 22 nt, Human
uucuaagacaucagaagucacc

SEQ ID NO: 440853 - RNA, 22 nt, Human
aaaaaugaagacagagccggga

SEQ ID NO: 440854 - RNA, 18 nt, Human
aaagcaaagguuacgugg

SEQ ID NO: 440855 - RNA, 19 nt, Human
aaagugcugcgauuauaga

SEQ ID NO: 440856 - RNA, 24 nt, Human
aaagugcugcgauuauagacagga

SEQ ID NO: 440857 - RNA, 23 nt, Human
aaauacaacacauuccacacuuu

SEQ ID NO: 440858 - RNA, 20 nt, Human
aaccuccaccuccugggcuc

SEQ ID NO: 440859 - RNA, 24 nt, Human
accaacuccgcaaagugaaauuuc

SEQ ID NO: 440860 - RNA, 28 nt, Human
accauguugguuggccaggcuggucucg

SEQ ID NO: 440861 - RNA, 27 nt, Human
accccaaagccugccccacuguguccc

SEQ ID NO: 440862 - RNA, 19 nt, Human
acccugggguggguagggg

SEQ ID NO: 440863 - RNA, 19 nt, Human
acccugggguggguagggg

SEQ ID NO: 440864 - RNA, 23 nt, Human
accucggccucccaaagugcugc

SEQ ID NO: 440865 - RNA, 18 nt, Human
accuuauguggaaaagcu

SEQ ID NO: 440866 - RNA, 22 nt, Human
acgagguuucaccauguugguu

SEQ ID NO: 440867 - RNA, 22 nt, Human
acgagguuucaccauguugguu

SEQ ID NO: 440868 - RNA, 24 nt, Human
acgagguuucaccauguugguugg

SEQ ID NO: 440869 - RNA, 19 nt, Human
acgcccggccaccgcccag

SEQ ID NO: 440870 - RNA, 18 nt, Human
acgggguuucgccauguu

SEQ ID NO: 440871 - RNA, 23 nt, Human
acgggguuucgccauguuggcca

SEQ ID NO: 440872 - RNA, 24 nt, Human
acgggguuucgccauguuggccag

SEQ ID NO: 440873 - RNA, 22 nt, Human
acugcaaccuccaccucccagg

SEQ ID NO: 440874 - RNA, 24 nt, Human
agcgauucucuggccucagccucc

SEQ ID NO: 440875 - RNA, 19 nt, Human
agcgugagccaccacgccc

SEQ ID NO: 440876 - RNA, 24 nt, Human
aggcagagaacccgcugcacguag

SEQ ID NO: 440877 - RNA, 18 nt, Human
aggcuggagugcaguggc

SEQ ID NO: 440878 - RNA, 18 nt, Human
agggcauuuuggcuaaaa

SEQ ID NO: 440879 - RNA, 22 nt, Human
aguagagacgggguuucgccau

SEQ ID NO: 440880 - RNA, 19 nt, Human
aguagcugggauuacaggc

SEQ ID NO: 440881 - RNA, 20 nt, Human
aguccuggcuaauuuuugua

SEQ ID NO: 440882 - RNA, 23 nt, Human
agugcaguggcguagucuuggcu

SEQ ID NO: 440883 - RNA, 24 nt, Human
agugcaguggcguagucuuggcuc

SEQ ID NO: 440884 - RNA, 24 nt, Human
auuuuuguauuuuuaguagagacg

SEQ ID NO: 440885 - RNA, 22 nt, Human
caaagugcugcgauuauagaca

SEQ ID NO: 440886 - RNA, 23 nt, Human
caaccuccaccucccagguucaa

SEQ ID NO: 440887 - RNA, 20 nt, Human
caaccuccaccuccugggcu

SEQ ID NO: 440888 - RNA, 23 nt, Human
caaccuccaccuccugggcucaa

SEQ ID NO: 440889 - RNA, 24 nt, Human
caaccuccaccuccugggcucaag

SEQ ID NO: 440890 - RNA, 18 nt, Human
caagcaauaugcuaagcc

SEQ ID NO: 440891 - RNA, 25 nt, Human
caauucccaagcagaagcguuggca

SEQ ID NO: 440892 - RNA, 22 nt, Human
cacagacuuaaaccggcucagg

SEQ ID NO: 440893 - RNA, 25 nt, Human
caccauguugguuggccaggcuggu

SEQ ID NO: 440894 - RNA, 28 nt, Human
caccauguugguuggccaggcuggucuc

SEQ ID NO: 440895 - RNA, 24 nt, Human
cacccacuuuuguuuuguuuugaa

SEQ ID NO: 440896 - RNA, 19 nt, Human
caccggagccugccugcug

SEQ ID NO: 440897 - RNA, 19 nt, Human
caccggagccugccugcug

SEQ ID NO: 440898 - RNA, 21 nt, Human
caccggagccugccugcugga

SEQ ID NO: 440899 - RNA, 21 nt, Human
caccggagccugccugcugga

SEQ ID NO: 440900 - RNA, 20 nt, Human
caccguccuccccagcccag

SEQ ID NO: 440901 - RNA, 21 nt, Human
cacugcaaccuccaccuccug

SEQ ID NO: 440902 - RNA, 23 nt, Human
cacugcaaccuccaccuccuggg

SEQ ID NO: 440903 - RNA, 22 nt, Human
cagaagcugggauuacaggcac

SEQ ID NO: 440904 - RNA, 25 nt, Human
cagaagcugggauuacaggcacaug

SEQ ID NO: 440905 - RNA, 21 nt, Human
cagaauggagcccacggaggc

SEQ ID NO: 440906 - RNA, 24 nt, Human
cagcaaccugucgaaaauacaaca

SEQ ID NO: 440907 - RNA, 19 nt, Human
cagcaggaagcaggcucuc

SEQ ID NO: 440908 - RNA, 19 nt, Human
cagcccugagaagucagca

SEQ ID NO: 440909 - RNA, 21 nt, Human
cagcccugagaagucagcagc

SEQ ID NO: 440910 - RNA, 18 nt, Human
cagcgccgcagcagcugc

SEQ ID NO: 440911 - RNA, 21 nt, Human
cagggagcaaccccaaagccu

SEQ ID NO: 440912 - RNA, 22 nt, Human
caguggauggucucugagguuc

SEQ ID NO: 440913 - RNA, 20 nt, Human
cauggcccggaggugucagg

SEQ ID NO: 440914 - RNA, 23 nt, Human
cauguuggccaggcuggucucga

SEQ ID NO: 440915 - RNA, 18 nt, Human
ccaaagugcugcgauuau

SEQ ID NO: 440916 - RNA, 18 nt, Human
ccaagcaauaugcuaagc

SEQ ID NO: 440917 - RNA, 19 nt, Human
ccacccagaauguuccugc

SEQ ID NO: 440918 - RNA, 24 nt, Human
ccaccucccagguucaagcgauuc

SEQ ID NO: 440919 - RNA, 21 nt, Human
ccacggaggcgugggcugccc

SEQ ID NO: 440920 - RNA, 19 nt, Human
ccacucaaagccaccucuc

SEQ ID NO: 440921 - RNA, 22 nt, Human
ccacugugucccuuccagcugc

SEQ ID NO: 440922 - RNA, 23 nt, Human
ccacugugucccuuccagcugcc

SEQ ID NO: 440923 - RNA, 21 nt, Human
ccagaagcugggauuacaggc

SEQ ID NO: 440924 - RNA, 22 nt, Human
ccagaagcugggauuacaggca

SEQ ID NO: 440925 - RNA, 19 nt, Human
ccauguuggccaggcuggu

SEQ ID NO: 440926 - RNA, 22 nt, Human
ccauguuggccaggcuggucuc

SEQ ID NO: 440927 - RNA, 23 nt, Human
ccauguuggccaggcuggucucg

SEQ ID NO: 440928 - RNA, 20 nt, Human
cccaggcuggagugcagcga

SEQ ID NO: 440929 - RNA, 20 nt, Human
cccagguucaagcgauucuc

SEQ ID NO: 440930 - RNA, 22 nt, Human
cccagguucaagcgauucucug

SEQ ID NO: 440931 - RNA, 18 nt, Human
ccccaaagccugccccac

SEQ ID NO: 440932 - RNA, 22 nt, Human
ccccagcccagcuugucuucac

SEQ ID NO: 440933 - RNA, 18 nt, Human
cccccgcggcagcgccgc

SEQ ID NO: 440934 - RNA, 23 nt, Human
cccccgcggcagcgccgcagcag

SEQ ID NO: 440935 - RNA, 23 nt, Human
ccccggguccccggccauggccc

SEQ ID NO: 440936 - RNA, 23 nt, Human
ccccuccggggccuggcgggggc

SEQ ID NO: 440937 - RNA, 23 nt, Human
cccgaguagcugggauuacaggc

SEQ ID NO: 440938 - RNA, 24 nt, Human
cccgaguagcugggauuacaggcg

SEQ ID NO: 440939 - RNA, 19 nt, Human
cccgcugcacguagaaucc

SEQ ID NO: 440940 - RNA, 19 nt, Human
cccugcguccccggccucg

SEQ ID NO: 440941 - RNA, 22 nt, Human
ccgaguagcugggauuacaggc

SEQ ID NO: 440942 - RNA, 18 nt, Human
ccgccgccgcuuccgcgc

SEQ ID NO: 440943 - RNA, 23 nt, Human
ccgccgccgcuuccgcgccgccc

SEQ ID NO: 440944 - RNA, 19 nt, Human
ccgccgcuuccgcgccgcc

SEQ ID NO: 440945 - RNA, 23 nt, Human
ccgccucagccucccgaguagcu

SEQ ID NO: 440946 - RNA, 21 nt, Human
ccgcgccgccgccgcuucccc

SEQ ID NO: 440947 - RNA, 24 nt, Human
ccgcuccuccccuccggggccugg

SEQ ID NO: 440948 - RNA, 23 nt, Human
ccguccuccccagcccagcuugu

SEQ ID NO: 440949 - RNA, 19 nt, Human
ccuccaccuccugggcuca

SEQ ID NO: 440950 - RNA, 24 nt, Human
ccuccagaagcugggauuacaggc

SEQ ID NO: 440951 - RNA, 24 nt, Human
ccucccagguucaagcgauucucu

SEQ ID NO: 440952 - RNA, 24 nt, Human
ccuccggggccuggcgggggcgcg

SEQ ID NO: 440953 - RNA, 24 nt, Human
ccuccuagacaccguccuccccag

SEQ ID NO: 440954 - RNA, 25 nt, Human
ccuccugggcucaagcgaaucuucc

SEQ ID NO: 440955 - RNA, 19 nt, Human
ccugaccucagcugaucug

SEQ ID NO: 440956 - RNA, 21 nt, Human
cgagcccccggguccccggcc

SEQ ID NO: 440957 - RNA, 28 nt, Human
cgagguuucaccauguugguuggccagg

SEQ ID NO: 440958 - RNA, 24 nt, Human
cgccauguuggccaggcuggucuc

SEQ ID NO: 440959 - RNA, 22 nt, Human
cgccgccgccgcuuccgcgccg

SEQ ID NO: 440960 - RNA, 24 nt, Human
cgccucagccucccgaguagcugg

SEQ ID NO: 440961 - RNA, 24 nt, Human
cgcucuugucgcccaggcuggagu

SEQ ID NO: 440962 - RNA, 18 nt, Human
cggaggcagagaacccgc

SEQ ID NO: 440963 - RNA, 19 nt, Human
cggcggaaccgcuucccuu

SEQ ID NO: 440964 - RNA, 21 nt, Human
cgggggggcggcugcacgggg

SEQ ID NO: 440965 - RNA, 24 nt, Human
cgggguuucgccauguuggccagg

SEQ ID NO: 440966 - RNA, 25 nt, Human
cguagacccgcagggccgcccgcgc

SEQ ID NO: 440967 - RNA, 23 nt, Human
cguuucuucuaaacccucccagg

SEQ ID NO: 440968 - RNA, 26 nt, Human
cucaaaucucuuuccuuuuuccaccu

SEQ ID NO: 440969 - RNA, 18 nt, Human
cucaagcgaaucuuccgc

SEQ ID NO: 440970 - RNA, 24 nt, Human
cucacugcaaccuccaccuccugg

SEQ ID NO: 440971 - RNA, 26 nt, Human
cucacugcaaccuccaccuccugggc

SEQ ID NO: 440972 - RNA, 23 nt, Human
cucacuucucaaaucucuuuccu

SEQ ID NO: 440973 - RNA, 24 nt, Human
cucagccucccgaguagcugggau

SEQ ID NO: 440974 - RNA, 23 nt, Human
cuccaggcuggagugcaguggcg

SEQ ID NO: 440975 - RNA, 24 nt, Human
cuccaggcuggagugcaguggcgu

SEQ ID NO: 440976 - RNA, 22 nt, Human
cuccggggccuggcgggggcgc

SEQ ID NO: 440977 - RNA, 22 nt, Human
cuccucuaggcucugcugcacg

SEQ ID NO: 440978 - RNA, 25 nt, Human
cuccugggcucaagcgaaucuuccg

SEQ ID NO: 440979 - RNA, 21 nt, Human
cucgaacuccugaccucagcc

SEQ ID NO: 440980 - RNA, 25 nt, Human
cucgaaucucuuuccuuuuuccacc

SEQ ID NO: 440981 - RNA, 19 nt, Human
cucgaucuccugaccucag

SEQ ID NO: 440982 - RNA, 24 nt, Human
cucgcucuugucgcccaggcugga

SEQ ID NO: 440983 - RNA, 19 nt, Human
cucucuggcagcaaccugu

SEQ ID NO: 440984 - RNA, 23 nt, Human
cucuggccucagccuccagaagc

SEQ ID NO: 440985 - RNA, 21 nt, Human
cucuugucgcccaggcuggag

SEQ ID NO: 440986 - RNA, 24 nt, Human
cugaucugcccaccucggccuccc

SEQ ID NO: 440987 - RNA, 23 nt, Human
cugcaaccuccaccucccagguu

SEQ ID NO: 440988 - RNA, 24 nt, Human
cugcaaccuccaccucccagguuc

SEQ ID NO: 440989 - RNA, 18 nt, Human
cugcaaccuccaccuccu

SEQ ID NO: 440990 - RNA, 20 nt, Human
cugccuggagcugagugggg

SEQ ID NO: 440991 - RNA, 22 nt, Human
cuggagugcagcgaucucagcu

SEQ ID NO: 440992 - RNA, 19 nt, Human
cuggccucagccuccagaa

SEQ ID NO: 440993 - RNA, 21 nt, Human
cuggccucagccuccagaagc

SEQ ID NO: 440994 - RNA, 18 nt, Human
cuggccuccaggcuggag

SEQ ID NO: 440995 - RNA, 23 nt, Human
cuggccuccaggcuggagugcag

SEQ ID NO: 440996 - RNA, 21 nt, Human
cugugucccuuccagcugccc

SEQ ID NO: 440997 - RNA, 19 nt, Human
cuguuugcuuuuuguuaag

SEQ ID NO: 440998 - RNA, 24 nt, Human
cuuacugcaaccuccaccucccag

SEQ ID NO: 440999 - RNA, 24 nt, Human
cuugucgcccaggcuggagugcag

SEQ ID NO: 441000 - RNA, 22 nt, Human
cuuuuuaagaagggcauuuugg

SEQ ID NO: 441001 - RNA, 19 nt, Human
gaaaauacaacacauucca

SEQ ID NO: 441002 - RNA, 20 nt, Human
gaccucagcgugagccacca

SEQ ID NO: 441003 - RNA, 24 nt, Human
gaccucagcugaucugcccaccuc

SEQ ID NO: 441004 - RNA, 20 nt, Human
gagaacacccggagcugagg

SEQ ID NO: 441005 - RNA, 18 nt, Human
gagaacgcuggcaaugcu

SEQ ID NO: 441006 - RNA, 24 nt, Human
gagacgggguuucgccauguuggc

SEQ ID NO: 441007 - RNA, 26 nt, Human
gaguagcugggauuacaggcgggugc

SEQ ID NO: 441008 - RNA, 21 nt, Human
gauucucuggccucagccucc

SEQ ID NO: 441009 - RNA, 18 nt, Human
gcaaccuccaccucccag

SEQ ID NO: 441010 - RNA, 22 nt, Human
gcaaccuccaccuccugggcuc

SEQ ID NO: 441011 - RNA, 23 nt, Human
gcagcgaucucagcuuacugcaa

SEQ ID NO: 441012 - RNA, 23 nt, Human
gccauguuggccaggcuggucuc

SEQ ID NO: 441013 - RNA, 22 nt, Human
gcccaggcuggagugcagcgau

SEQ ID NO: 441014 - RNA, 22 nt, Human
gcccggaggugucagggugcgc

SEQ ID NO: 441015 - RNA, 18 nt, Human
gccucagccuccagaagc

SEQ ID NO: 441016 - RNA, 24 nt, Human
gcgaaucuuccgccucagccuccc

SEQ ID NO: 441017 - RNA, 19 nt, Human
gcguccccggccucggggc

SEQ ID NO: 441018 - RNA, 24 nt, Human
gcucuugucgcccaggcuggagug

SEQ ID NO: 441019 - RNA, 21 nt, Human
gcugcacgggggcugcuuggu

SEQ ID NO: 441020 - RNA, 18 nt, Human
gcugcgauuauagacagg

SEQ ID NO: 441021 - RNA, 19 nt, Human
gcuggagugcaguggcgua

SEQ ID NO: 441022 - RNA, 23 nt, Human
gcuggucucgaacuccugaccuc

SEQ ID NO: 441023 - RNA, 23 nt, Human
gcuggucucgaucuccugaccuc

SEQ ID NO: 441024 - RNA, 22 nt, Human
ggagccaccgcccccgacccuc

SEQ ID NO: 441025 - RNA, 22 nt, Human
ggccucagccuccagaagcugg

SEQ ID NO: 441026 - RNA, 19 nt, Human
ggccuccaggcuggagugc

SEQ ID NO: 441027 - RNA, 24 nt, Human
ggcuggucucgaacuccugaccuc

SEQ ID NO: 441028 - RNA, 24 nt, Human
ggcuggucucgaucuccugaccuc

SEQ ID NO: 441029 - RNA, 19 nt, Human
gggaacuggacuuuuaggg

SEQ ID NO: 441030 - RNA, 19 nt, Human
gggaauaggggaggaaagg

SEQ ID NO: 441031 - RNA, 19 nt, Human
gggcaauauuuuaaaauuc

SEQ ID NO: 441032 - RNA, 19 nt, Human
gggcgugcgagcccccggg

SEQ ID NO: 441033 - RNA, 28 nt, Human
gggcgugcgagcccccggguccccggcc

SEQ ID NO: 441034 - RNA, 21 nt, Human
ggggaacgauggcuuaaaaau

SEQ ID NO: 441035 - RNA, 22 nt, Human
ggggcggcugcacgggggcugc

SEQ ID NO: 441036 - RNA, 23 nt, Human
gggguuucgccauguuggccagg

SEQ ID NO: 441037 - RNA, 21 nt, Human
gggucgaggucccugggacgc

SEQ ID NO: 441038 - RNA, 21 nt, Human
gggugccaccgcaucuggcua

SEQ ID NO: 441039 - RNA, 22 nt, Human
ggguuucgccauguuggccagg

SEQ ID NO: 441040 - RNA, 20 nt, Human
ggucgaggucccugggacgc

SEQ ID NO: 441041 - RNA, 19 nt, Human
ggucucgaacuccugaccu

SEQ ID NO: 441042 - RNA, 23 nt, Human
guagagacgggguuucgccaugu

SEQ ID NO: 441043 - RNA, 30 nt, Human
uaaaaagcaguucuacauguuggaaaacgg

SEQ ID NO: 441044 - RNA, 18 nt, Human
uaaaauucauuuccccua

SEQ ID NO: 441045 - RNA, 24 nt, Human
uaagaagggcauuuuggcuaaaag

SEQ ID NO: 441046 - RNA, 24 nt, Human
uaauuuuuguauuuuuaguagaga

SEQ ID NO: 441047 - RNA, 21 nt, Human
uaccgcguagacccgcagggc

SEQ ID NO: 441048 - RNA, 20 nt, Human
uacugcaaccuccaccuccc

SEQ ID NO: 441049 - RNA, 21 nt, Human
uacugcaaccuccaccuccca

SEQ ID NO: 441050 - RNA, 22 nt, Human
uagacaggagccaccgcccccg

SEQ ID NO: 441051 - RNA, 22 nt, Human
uagagacgggguuucgccaugu

SEQ ID NO: 441052 - RNA, 23 nt, Human
uaggggaggaaaggaaacccacu

SEQ ID NO: 441053 - RNA, 20 nt, Human
uaggggucgaggucccuggg

SEQ ID NO: 441054 - RNA, 24 nt, Human
uaguagacacgagguuucaccaug

SEQ ID NO: 441055 - RNA, 24 nt, Human
uaguagagacgggguuucgccaug

SEQ ID NO: 441056 - RNA, 23 nt, Human
uaguuucuuguauuuuuaguaga

SEQ ID NO: 441057 - RNA, 25 nt, Human
uauagacaggagccaccgcccccga

SEQ ID NO: 441058 - RNA, 22 nt, Human
ucaaagacaguggauggucucu

SEQ ID NO: 441059 - RNA, 21 nt, Human
ucaccgcggcgccuaccgcgu

SEQ ID NO: 441060 - RNA, 23 nt, Human
ucacugcaaccuccaccuccugg

SEQ ID NO: 441061 - RNA, 24 nt, Human
ucacugcaaccuccaccuccuggg

SEQ ID NO: 441062 - RNA, 25 nt, Human
ucacugcaaccuccaccuccugggc

SEQ ID NO: 441063 - RNA, 27 nt, Human
ucacugcaaccuccaccuccugggcuc

SEQ ID NO: 441064 - RNA, 20 nt, Human
ucagccucccgaguagcugg

SEQ ID NO: 441065 - RNA, 25 nt, Human
ucagcuuacugcaaccuccaccucc

SEQ ID NO: 441066 - RNA, 23 nt, Human
uccagaagcugggauuacaggca

SEQ ID NO: 441067 - RNA, 24 nt, Human
ucccaaagugcugcgauuauagac

SEQ ID NO: 441068 - RNA, 21 nt, Human
ucccagguucaagcgauucuc

SEQ ID NO: 441069 - RNA, 23 nt, Human
ucccagguucaagcgauucucug

SEQ ID NO: 441070 - RNA, 24 nt, Human
ucccgaguagcugggauuacaggc

SEQ ID NO: 441071 - RNA, 21 nt, Human
ucccugggacgcccgcuccuc

SEQ ID NO: 441072 - RNA, 26 nt, Human
ucccugggacgcccgcuccuccccuc

SEQ ID NO: 441073 - RNA, 19 nt, Human
ucccuuccagcugcccuuc

SEQ ID NO: 441074 - RNA, 21 nt, Human
uccuagacaccguccucccca

SEQ ID NO: 441075 - RNA, 21 nt, Human
uccugggcucaagcgaaucuu

SEQ ID NO: 441076 - RNA, 22 nt, Human
ucgccauguuggccaggcuggu

SEQ ID NO: 441077 - RNA, 24 nt, Human
ucgccauguuggccaggcuggucu

SEQ ID NO: 441078 - RNA, 18 nt, Human
ucgcccaggcuggagugc

SEQ ID NO: 441079 - RNA, 18 nt, Human
ucggccucccaaagugcu

SEQ ID NO: 441080 - RNA, 26 nt, Human
ucucaaaucucuuuccuuuuuccacc

SEQ ID NO: 441081 - RNA, 22 nt, Human
ucucacucuggccuccaggcug

SEQ ID NO: 441082 - RNA, 23 nt, Human
ucucacucuggccuccaggcugg

SEQ ID NO: 441083 - RNA, 24 nt, Human
ucucacucuggccuccaggcugga

SEQ ID NO: 441084 - RNA, 23 nt, Human
ucucgaacuccugaccucagcgu

SEQ ID NO: 441085 - RNA, 24 nt, Human
ucucgcucuugucgcccaggcugg

SEQ ID NO: 441086 - RNA, 25 nt, Human
ucucgcucuugucgcccaggcugga

SEQ ID NO: 441087 - RNA, 23 nt, Human
ucucuuuccuuuuuccaccuucu

SEQ ID NO: 441088 - RNA, 21 nt, Human
ugaaaggcagguaguuccuuu

SEQ ID NO: 441089 - RNA, 25 nt, Human
ugaaugacugaaagcaacucgcagg

SEQ ID NO: 441090 - RNA, 18 nt, Human
ugaccucagcugaucugc

SEQ ID NO: 441091 - RNA, 18 nt, Human
ugacugaaagcaacucgc

SEQ ID NO: 441092 - RNA, 25 nt, Human
ugacugaaagcaacucgcaggaauc

SEQ ID NO: 441093 - RNA, 27 nt, Human
ugacuuguaagacaacacgcuuccucu

SEQ ID NO: 441094 - RNA, 20 nt, Human
ugagaagucagcagccguga

SEQ ID NO: 441095 - RNA, 23 nt, Human
ugaucugcccaccucggccuccc

SEQ ID NO: 441096 - RNA, 24 nt, Human
ugaucugcccaccucggccuccca

SEQ ID NO: 441097 - RNA, 22 nt, Human
ugaucuggaccucgcagaaguc

SEQ ID NO: 441098 - RNA, 22 nt, Human
ugcaguggcguagucuuggcuc

SEQ ID NO: 441099 - RNA, 21 nt, Human
ugccccacugugucccuucca

SEQ ID NO: 441100 - RNA, 19 nt, Human
ugccuggagcugagugggg

SEQ ID NO: 441101 - RNA, 19 nt, Human
ugccuggagcugagugggg

SEQ ID NO: 441102 - RNA, 24 nt, Human
ugcgauuauagacaggagccaccg

SEQ ID NO: 441103 - RNA, 22 nt, Human
ugcggggaugacuuguaagaca

SEQ ID NO: 441104 - RNA, 22 nt, Human
ugcguuucuucuaaacccuccc

SEQ ID NO: 441105 - RNA, 24 nt, Human
ugcuacagaauggagcccacggag

SEQ ID NO: 441106 - RNA, 23 nt, Human
uggagugcaguggcguagucuug

SEQ ID NO: 441107 - RNA, 24 nt, Human
uggagugcaguggcguagucuugg

SEQ ID NO: 441108 - RNA, 24 nt, Human
uggccaggcuggucucgaacuccu

SEQ ID NO: 441109 - RNA, 24 nt, Human
uggccaggcuggucucgaucuccu

SEQ ID NO: 441110 - RNA, 20 nt, Human
uggccucagccuccagaagc

SEQ ID NO: 441111 - RNA, 22 nt, Human
uggcuccaggaagcccccgcgg

SEQ ID NO: 441112 - RNA, 19 nt, Human
ugggauuacaggcacaugc

SEQ ID NO: 441113 - RNA, 21 nt, Human
ugggauuacaggcacaugcca

SEQ ID NO: 441114 - RNA, 21 nt, Human
ugggauuacaggcacaugcca

SEQ ID NO: 441115 - RNA, 22 nt, Human
ugggauuacaggcacaugccau

SEQ ID NO: 441116 - RNA, 23 nt, Human
ugggauuacaggcacaugccauc

SEQ ID NO: 441117 - RNA, 24 nt, Human
ugggauuacaggcacaugccauca

SEQ ID NO: 441118 - RNA, 21 nt, Human
ugggauuacaggcgggugcca

SEQ ID NO: 441119 - RNA, 22 nt, Human
ugggauuacaggcgggugccac

SEQ ID NO: 441120 - RNA, 24 nt, Human
ugggauuacaggcgggugccaccg

SEQ ID NO: 441121 - RNA, 27 nt, Human
uggggacccugggguggguaggggucg

SEQ ID NO: 441122 - RNA, 22 nt, Human
ugggguggguaggggucgaggu

SEQ ID NO: 441123 - RNA, 19 nt, Human
ugguuggccaggcuggucu

SEQ ID NO: 441124 - RNA, 21 nt, Human
uguauuuuuaguagagacggg

SEQ ID NO: 441125 - RNA, 20 nt, Human
ugucagggugcgcggggggg

SEQ ID NO: 441126 - RNA, 18 nt, Human
ugucccuuccagcugccc

SEQ ID NO: 441127 - RNA, 18 nt, Human
ugucccuuccagcugccc

SEQ ID NO: 441128 - RNA, 23 nt, Human
ugucccuuccagcugcccuucug

SEQ ID NO: 441129 - RNA, 21 nt, Human
ugucgcccaggcuggagugca

SEQ ID NO: 441130 - RNA, 23 nt, Human
ugucuucacggaggcagagaacc

SEQ ID NO: 441131 - RNA, 23 nt, Human
uguugguuggccaggcuggucuc

SEQ ID NO: 441132 - RNA, 23 nt, Human
uguuuuguuuugagacggagucu

SEQ ID NO: 441133 - RNA, 24 nt, Human
uuacugcaaccuccaccucccagg

SEQ ID NO: 441134 - RNA, 25 nt, Human
uuacugcaaccuccaccucccaggu

SEQ ID NO: 441135 - RNA, 24 nt, Human
uuaguagacacgagguuucaccau

SEQ ID NO: 441136 - RNA, 18 nt, Human
uuaguagagacgggguuu

SEQ ID NO: 441137 - RNA, 22 nt, Human
uuaguagagacgggguuucgcc

SEQ ID NO: 441138 - RNA, 24 nt, Human
uuaguagagacgggguuucgccau

SEQ ID NO: 441139 - RNA, 23 nt, Human
uucaagcgauucucuggccucag

SEQ ID NO: 441140 - RNA, 18 nt, Human
uuccaaguucacggcgga

SEQ ID NO: 441141 - RNA, 22 nt, Human
uucccaagcagaagucguccgg

SEQ ID NO: 441142 - RNA, 24 nt, Human
uucucgaaucucuuuccuuuuucc

SEQ ID NO: 441143 - RNA, 21 nt, Human
uucucuggccucagccuccag

SEQ ID NO: 441144 - RNA, 19 nt, Human
uucuuguauuuuuaguaga

SEQ ID NO: 441145 - RNA, 23 nt, Human
uuguauuuuuaguagagacgggg

SEQ ID NO: 441146 - RNA, 19 nt, Human
uuucaccauguugguuggc

SEQ ID NO: 441147 - RNA, 24 nt, Human
uuucgccauguuggccaggcuggu

SEQ ID NO: 441148 - RNA, 23 nt, Human
uuucgccauguuggccaggcugu

SEQ ID NO: 441149 - RNA, 19 nt, Human
uuucuguuucccugaauga

SEQ ID NO: 441150 - RNA, 24 nt, Human
uuuuuaguagacacgagguuucac

SEQ ID NO: 441151 - RNA, 23 nt, Human
uuuuuaguagagacgggguuucg

SEQ ID NO: 441152 - RNA, 24 nt, Human
uuuuuaguagagacgggguuucgc

SEQ ID NO: 441153 - RNA, 25 nt, Human
uuuuuccuccaguuaaaaagcaguu

SEQ ID NO: 441154 - RNA, 20 nt, Human
uuuuuguauuuuuaguagag

SEQ ID NO: 441155 - RNA, 23 nt, Human
uuuuuucuuuuugagagagucuc

SEQ ID NO: 441156 - RNA, 19 nt, Human
aaaaaaaaaaagaaaaaaa

SEQ ID NO: 441157 - RNA, 19 nt, Human
aaaaaaaagaaaaaaaaaa

SEQ ID NO: 441158 - RNA, 23 nt, Human
aaaagaaaaaaaaaaaaccuuua

SEQ ID NO: 441159 - RNA, 18 nt, Human
aaaagaaacaaauccauc

SEQ ID NO: 441160 - RNA, 22 nt, Human
aaagaaacaaauccaucauugg

SEQ ID NO: 441161 - RNA, 23 nt, Human
aaagaaacaaauccaucauuggg

SEQ ID NO: 441162 - RNA, 18 nt, Human
aacagcaaccaguaaaau

SEQ ID NO: 441163 - RNA, 20 nt, Human
acauaaaagaaacaaaucca

SEQ ID NO: 441164 - RNA, 22 nt, Human
caaccaguaaaauuuaucccaa

SEQ ID NO: 441165 - RNA, 20 nt, Human
cacaacagcaaccaguaaaa

SEQ ID NO: 441166 - RNA, 19 nt, Human
cacagccccagccaccgcc

SEQ ID NO: 441167 - RNA, 23 nt, Human
cacagccccagccaccgcccccc

SEQ ID NO: 441168 - RNA, 26 nt, Human
cacagccccagccaccgccccccaac

SEQ ID NO: 441169 - RNA, 20 nt, Human
cagccaccgccccccaacca

SEQ ID NO: 441170 - RNA, 21 nt, Human
cauuucuauuuuauuauggaa

SEQ ID NO: 441171 - RNA, 22 nt, Human
ccaaaaauaacucgguacaaaa

SEQ ID NO: 441172 - RNA, 19 nt, Human
ccaguaaaauuuaucccaa

SEQ ID NO: 441173 - RNA, 24 nt, Human
ccaucauugggcgcacagccccag

SEQ ID NO: 441174 - RNA, 21 nt, Human
cccaaccagggagcaagagga

SEQ ID NO: 441175 - RNA, 20 nt, Human
cgcacagccccagccaccgc

SEQ ID NO: 441176 - RNA, 19 nt, Human
cgccaccuucuccacaaca

SEQ ID NO: 441177 - RNA, 22 nt, Human
cgcggaaucgggcucgugccga

SEQ ID NO: 441178 - RNA, 20 nt, Human
gagcaagaggagacgccugg

SEQ ID NO: 441179 - RNA, 21 nt, Human
gcacagccccagccaccgccc

SEQ ID NO: 441180 - RNA, 23 nt, Human
gccaccuucuccacaacagcaac

SEQ ID NO: 441181 - RNA, 20 nt, Human
ggagcaagaggagacgccug

SEQ ID NO: 441182 - RNA, 27 nt, Human
uaaaagaaacaaauccaucauugggcg

SEQ ID NO: 441183 - RNA, 18 nt, Human
uaacucgguacaaaacag

SEQ ID NO: 441184 - RNA, 23 nt, Human
ucagaauuaaaaaaaaaaaaaag

SEQ ID NO: 441185 - RNA, 29 nt, Human
ucagaauuaaaaaaaaaaaaaagaaaaaa

SEQ ID NO: 441186 - RNA, 23 nt, Human
uucagaauuaaaaaaaaaaaaaa

SEQ ID NO: 441187 - RNA, 25 nt, Human
uucagaauuaaaaaaaaaaaaaaga

SEQ ID NO: 441188 - RNA, 21 nt, Human
uuucagaauuaaaaaaaaaaa

SEQ ID NO: 441189 - RNA, 21 nt, Human
aucccugucccucccaacccc

SEQ ID NO: 441190 - RNA, 20 nt, Human
auuuaucccugucccuccca

SEQ ID NO: 441191 - RNA, 18 nt, Human
cccucccaacccccgggc

SEQ ID NO: 441192 - RNA, 19 nt, Human
cccucccaacccccgggcu

SEQ ID NO: 441193 - RNA, 20 nt, Human
ccucagagcuccagccauug

SEQ ID NO: 441194 - RNA, 24 nt, Human
ccuccuggcucagggagccugggc

SEQ ID NO: 441195 - RNA, 25 nt, Human
cucccaacccccgggcucccaaguu

SEQ ID NO: 441196 - RNA, 18 nt, Human
gccugggccccucagagc

SEQ ID NO: 441197 - RNA, 20 nt, Human
gccugggccccucagagcuc

SEQ ID NO: 441198 - RNA, 22 nt, Human
gggagccugggccccucagagc

SEQ ID NO: 441199 - RNA, 21 nt, Human
ucccaacccccgggcucccaa

SEQ ID NO: 441200 - RNA, 22 nt, Human
ucccucccaacccccgggcucc

SEQ ID NO: 441201 - RNA, 20 nt, Human
ugggccccucagagcuccag

SEQ ID NO: 441202 - RNA, 25 nt, Human
ugggguucuucccuggaacucuccu

SEQ ID NO: 441203 - RNA, 27 nt, Human
ugucuuuauuuaucccugucccuccca

SEQ ID NO: 441204 - RNA, 19 nt, Human
uuaucccugucccucccaa

SEQ ID NO: 441205 - RNA, 18 nt, Human
aaaaaacauccccucccc

SEQ ID NO: 441206 - RNA, 23 nt, Human
aaaaacuaguggagaucuucuga

SEQ ID NO: 441207 - RNA, 18 nt, Human
aaaaagagaacaugaugg

SEQ ID NO: 441208 - RNA, 19 nt, Human
aaaaagucacugaaccucu

SEQ ID NO: 441209 - RNA, 20 nt, Human
aaaagucacugaaccucucc

SEQ ID NO: 441210 - RNA, 22 nt, Human
aaacagcacacacucaauucuc

SEQ ID NO: 441211 - RNA, 26 nt, Human
aaaccagaagauaaaaagaugcaaag

SEQ ID NO: 441212 - RNA, 19 nt, Human
aaaccucuacccccaaccc

SEQ ID NO: 441213 - RNA, 24 nt, Human
aaacucccuaccuuuuuuccagcu

SEQ ID NO: 441214 - RNA, 19 nt, Human
aaagcucuuucacucugcu

SEQ ID NO: 441215 - RNA, 19 nt, Human
aaaugcagaucagaaaagg

SEQ ID NO: 441216 - RNA, 25 nt, Human
aacaaaaagagaacaugaugggucu

SEQ ID NO: 441217 - RNA, 27 nt, Human
aacaaagauccuuccucacuuugcaaa

SEQ ID NO: 441218 - RNA, 19 nt, Human
aacccuuguccucacccuc

SEQ ID NO: 441219 - RNA, 18 nt, Human
aaccucuacccccaaccc

SEQ ID NO: 441220 - RNA, 26 nt, Human
aaccugucaacaaagauccuuccucu

SEQ ID NO: 441221 - RNA, 20 nt, Human
aacucccggcugcuccccuc

SEQ ID NO: 441222 - RNA, 24 nt, Human
aagaauccauuuccaaagcaccac

SEQ ID NO: 441223 - RNA, 26 nt, Human
aagaggaggcgaaagagaggggaccc

SEQ ID NO: 441224 - RNA, 25 nt, Human
aagaugccuuuucauaaaauggaau

SEQ ID NO: 441225 - RNA, 25 nt, Human
aagcaaaugcaaauucugcugcacu

SEQ ID NO: 441226 - RNA, 26 nt, Human
aaggguacaaaaggaauaucaagggg

SEQ ID NO: 441227 - RNA, 20 nt, Human
acaacccuuguccucacccu

SEQ ID NO: 441228 - RNA, 22 nt, Human
acacacacaggcacacacacaa

SEQ ID NO: 441229 - RNA, 20 nt, Human
acacuuguccuacugaugau

SEQ ID NO: 441230 - RNA, 23 nt, Human
acccaacaguguaacaacaaaaa

SEQ ID NO: 441231 - RNA, 18 nt, Human
accccaugcaacucucca

SEQ ID NO: 441232 - RNA, 18 nt, Human
accccuuaaaacugaucu

SEQ ID NO: 441233 - RNA, 22 nt, Human
acccuuaccuaacaccccccac

SEQ ID NO: 441234 - RNA, 22 nt, Human
accuaacaccccccacuucccu

SEQ ID NO: 441235 - RNA, 21 nt, Human
accucuacccccaacccuuac

SEQ ID NO: 441236 - RNA, 23 nt, Human
accuuuuuuccagcuuacauagc

SEQ ID NO: 441237 - RNA, 20 nt, Human
acuuuauaacugaggacuag

SEQ ID NO: 441238 - RNA, 21 nt, Human
agaaauucaaagcauucaacc

SEQ ID NO: 441239 - RNA, 24 nt, Human
agaaccaauaaaagggggaaaaug

SEQ ID NO: 441240 - RNA, 23 nt, Human
agagaagaggaggcgaaagagag

SEQ ID NO: 441241 - RNA, 23 nt, Human
agauacauauucccuggaccaug

SEQ ID NO: 441242 - RNA, 18 nt, Human
agauauuuuagguuccug

SEQ ID NO: 441243 - RNA, 20 nt, Human
agcaccccaugcaacucucc

SEQ ID NO: 441244 - RNA, 21 nt, Human
aggaggcgaaagagagcggag

SEQ ID NO: 441245 - RNA, 23 nt, Human
aggcacacacacaaaauaauucc

SEQ ID NO: 441246 - RNA, 26 nt, Human
aggcagccagaaagcuccucggaagg

SEQ ID NO: 441247 - RNA, 18 nt, Human
aggcgagacugacuggag

SEQ ID NO: 441248 - RNA, 21 nt, Human
auacucacagaggaaccccaa

SEQ ID NO: 441249 - RNA, 20 nt, Human
auauaucaggccuacucuuc

SEQ ID NO: 441250 - RNA, 22 nt, Human
auccuucauuaaaucaacaauc

SEQ ID NO: 441251 - RNA, 23 nt, Human
augaagggcagacaggugacaca

SEQ ID NO: 441252 - RNA, 20 nt, Human
auggugcugcugcugcuguu

SEQ ID NO: 441253 - RNA, 21 nt, Human
caaaaagagaacaugaugggu

SEQ ID NO: 441254 - RNA, 21 nt, Human
caaaagcucuuucacucugcu

SEQ ID NO: 441255 - RNA, 23 nt, Human
caaaauaguacucagccaagaac

SEQ ID NO: 441256 - RNA, 18 nt, Human
caaacaauaagcuuuaga

SEQ ID NO: 441257 - RNA, 22 nt, Human
caacccuuaccuaacacccccc

SEQ ID NO: 441258 - RNA, 22 nt, Human
caagauacauauucccuggacc

SEQ ID NO: 441259 - RNA, 30 nt, Human
cacaaauaaagccucugucggguaaacacc

SEQ ID NO: 441260 - RNA, 23 nt, Human
cacacaaaauaauuccuuuggaa

SEQ ID NO: 441261 - RNA, 22 nt, Human
cacacacacaggcacacacaca

SEQ ID NO: 441262 - RNA, 18 nt, Human
caccccaugcaacucucc

SEQ ID NO: 441263 - RNA, 22 nt, Human
caccccccacuucccucacccu

SEQ ID NO: 441264 - RNA, 22 nt, Human
caccuuaaugaagggcagacag

SEQ ID NO: 441265 - RNA, 21 nt, Human
cagacaggugacacagggcag

SEQ ID NO: 441266 - RNA, 23 nt, Human
cagaggucagagaagaaguaggg

SEQ ID NO: 441267 - RNA, 24 nt, Human
caguguaacaacaaaaagagaaca

SEQ ID NO: 441268 - RNA, 20 nt, Human
caguugauuacagaaugggg

SEQ ID NO: 441269 - RNA, 23 nt, Human
caucccaaaaccucuacccccaa

SEQ ID NO: 441270 - RNA, 24 nt, Human
cauccccuccccacaacccuuguc

SEQ ID NO: 441271 - RNA, 18 nt, Human
cauggaagucugcauaua

SEQ ID NO: 441272 - RNA, 21 nt, Human
ccaaagcaccacugaaaugaa

SEQ ID NO: 441273 - RNA, 21 nt, Human
ccacacaacugugaaaaggug

SEQ ID NO: 441274 - RNA, 28 nt, Human
ccacuucccucacccucccuauaccccu

SEQ ID NO: 441275 - RNA, 21 nt, Human
ccagcggccagggaugggcag

SEQ ID NO: 441276 - RNA, 23 nt, Human
ccaguacccuucugcaccccaaa

SEQ ID NO: 441277 - RNA, 20 nt, Human
cccaaaaccucuacccccaa

SEQ ID NO: 441278 - RNA, 25 nt, Human
cccaaaacucccuaccuuuuuucca

SEQ ID NO: 441279 - RNA, 21 nt, Human
cccaacucccggcugcucccc

SEQ ID NO: 441280 - RNA, 27 nt, Human
cccacaacccuuguccucacccucaaa

SEQ ID NO: 441281 - RNA, 20 nt, Human
cccacuucccucacccuccc

SEQ ID NO: 441282 - RNA, 22 nt, Human
ccccccacuucccucacccucc

SEQ ID NO: 441283 - RNA, 22 nt, Human
ccccuccccacaacccuugucc

SEQ ID NO: 441284 - RNA, 20 nt, Human
cccggcugcuccccuccucg

SEQ ID NO: 441285 - RNA, 20 nt, Human
cccuaagcauaccaaaauag

SEQ ID NO: 441286 - RNA, 20 nt, Human
cccuugaaaggcaauuucac

SEQ ID NO: 441287 - RNA, 21 nt, Human
ccuaacaccccccacuucccu

SEQ ID NO: 441288 - RNA, 19 nt, Human
ccucacccucccuauaccc

SEQ ID NO: 441289 - RNA, 19 nt, Human
ccuuccaaaaugcuaacca

SEQ ID NO: 441290 - RNA, 19 nt, Human
ccuucuaaggagacaaaag

SEQ ID NO: 441291 - RNA, 19 nt, Human
ccuugguggcagcggacag

SEQ ID NO: 441292 - RNA, 23 nt, Human
cggagauggaggaguaauucaga

SEQ ID NO: 441293 - RNA, 22 nt, Human
cuacccccaacccuuaccuaac

SEQ ID NO: 441294 - RNA, 20 nt, Human
cuccaguacccuucugcacc

SEQ ID NO: 441295 - RNA, 24 nt, Human
cuccccacaacccuuguccucacc

SEQ ID NO: 441296 - RNA, 22 nt, Human
cucccugguuugggaccaaggg

SEQ ID NO: 441297 - RNA, 22 nt, Human
cuccucgcugcuccguccgggc

SEQ ID NO: 441298 - RNA, 19 nt, Human
cuccuggcugcugcugugg

SEQ ID NO: 441299 - RNA, 20 nt, Human
cugcuccguccgggcucucc

SEQ ID NO: 441300 - RNA, 19 nt, Human
cugcugcugcuguugcugc

SEQ ID NO: 441301 - RNA, 19 nt, Human
cugcugcuguggcugcugc

SEQ ID NO: 441302 - RNA, 19 nt, Human
cugcugcuguugcugcugc

SEQ ID NO: 441303 - RNA, 19 nt, Human
cugcuguugcugcugcugc

SEQ ID NO: 441304 - RNA, 24 nt, Human
cuguggcugcugcugcugcuguug

SEQ ID NO: 441305 - RNA, 19 nt, Human
cuuaccuaacaccccccac

SEQ ID NO: 441306 - RNA, 20 nt, Human
cuucuccuggcugcugcugu

SEQ ID NO: 441307 - RNA, 22 nt, Human
gaagacaaacacaauucccugg

SEQ ID NO: 441308 - RNA, 21 nt, Human
gaauuagaagguccucagaga

SEQ ID NO: 441309 - RNA, 21 nt, Human
gacacuuguccuacugaugau

SEQ ID NO: 441310 - RNA, 20 nt, Human
gauggugaugauggugcugc

SEQ ID NO: 441311 - RNA, 24 nt, Human
gauggugcugcugcugcuguugcu

SEQ ID NO: 441312 - RNA, 20 nt, Human
gccagaggguggagcagcgg

SEQ ID NO: 441313 - RNA, 20 nt, Human
gccagggaugggcagggggg

SEQ ID NO: 441314 - RNA, 20 nt, Human
gcucaaaagcagcauuaaaa

SEQ ID NO: 441315 - RNA, 20 nt, Human
gcugcgaguuccuggcugac

SEQ ID NO: 441316 - RNA, 20 nt, Human
gcugcugcuguggcugcugc

SEQ ID NO: 441317 - RNA, 20 nt, Human
ggaaacuggaagaaaaaauu

SEQ ID NO: 441318 - RNA, 25 nt, Human
ggaaauccuucauuaaaucaacaau

SEQ ID NO: 441319 - RNA, 21 nt, Human
ggaccccccagaggucagaga

SEQ ID NO: 441320 - RNA, 24 nt, Human
ggagagaacuaagagaagaggagg

SEQ ID NO: 441321 - RNA, 22 nt, Human
ggagauggaggaguaauucagg

SEQ ID NO: 441322 - RNA, 20 nt, Human
ggagcagcggauagccggag

SEQ ID NO: 441323 - RNA, 21 nt, Human
ggauaguaacuauacaaaaca

SEQ ID NO: 441324 - RNA, 18 nt, Human
gggggaaaaugauuaaaa

SEQ ID NO: 441325 - RNA, 18 nt, Human
ggggucuaccaguuuagg

SEQ ID NO: 441326 - RNA, 21 nt, Human
guacccuucugcaccccaaaa

SEQ ID NO: 441327 - RNA, 22 nt, Human
guggagcagcggauagccggag

SEQ ID NO: 441328 - RNA, 21 nt, Human
guggcugcugcugcugcuguu

SEQ ID NO: 441329 - RNA, 21 nt, Human
uaaaaaacauccccuccccac

SEQ ID NO: 441330 - RNA, 22 nt, Human
uaaaaaacauccccuccccaca

SEQ ID NO: 441331 - RNA, 24 nt, Human
uaaaaaagauaaagaguuucccaa

SEQ ID NO: 441332 - RNA, 18 nt, Human
uaaaagcauuuuugcuga

SEQ ID NO: 441333 - RNA, 22 nt, Human
uaaaaucauggcucccagagcc

SEQ ID NO: 441334 - RNA, 25 nt, Human
uaaacaccaaagcauuuuccacacg

SEQ ID NO: 441335 - RNA, 21 nt, Human
uaaagagauggcuaccacaca

SEQ ID NO: 441336 - RNA, 24 nt, Human
uaaagagauggcuaccacacaaug

SEQ ID NO: 441337 - RNA, 18 nt, Human
uaacagauaugagaauau

SEQ ID NO: 441338 - RNA, 23 nt, Human
uaacuaagacaucccaaaaccuc

SEQ ID NO: 441339 - RNA, 18 nt, Human
uaacuuuauugucaguga

SEQ ID NO: 441340 - RNA, 25 nt, Human
uaagacaaccuggucacccuccuuu

SEQ ID NO: 441341 - RNA, 20 nt, Human
uaagcaauugagauaauagg

SEQ ID NO: 441342 - RNA, 21 nt, Human
uaagcauaccaaaauagacug

SEQ ID NO: 441343 - RNA, 23 nt, Human
uaauguacucucccagcaucuga

SEQ ID NO: 441344 - RNA, 21 nt, Human
uacaaaacagcacacacucaa

SEQ ID NO: 441345 - RNA, 20 nt, Human
uacaacugaauuagaagguc

SEQ ID NO: 441346 - RNA, 23 nt, Human
uacaagauacauauucccuggac

SEQ ID NO: 441347 - RNA, 18 nt, Human
uacaugauuuuaaaagaa

SEQ ID NO: 441348 - RNA, 26 nt, Human
uaccacacaauguggaauguaugaca

SEQ ID NO: 441349 - RNA, 25 nt, Human
uacccccaacccuuaccuaacaccc

SEQ ID NO: 441350 - RNA, 19 nt, Human
uacccuucugcaccccaaa

SEQ ID NO: 441351 - RNA, 22 nt, Human
uaccuugaagcucaaaagcagc

SEQ ID NO: 441352 - RNA, 18 nt, Human
uacugcugcaauccaccu

SEQ ID NO: 441353 - RNA, 22 nt, Human
uagaaagaagugggauugguuu

SEQ ID NO: 441354 - RNA, 21 nt, Human
uagccaucugccaaccccagc

SEQ ID NO: 441355 - RNA, 27 nt, Human
uagcccacagcugauaccuuccuuuga

SEQ ID NO: 441356 - RNA, 22 nt, Human
uagcuccugaaacuauucccuc

SEQ ID NO: 441357 - RNA, 21 nt, Human
uaguggaugguggagauugua

SEQ ID NO: 441358 - RNA, 22 nt, Human
uaguggaugguggagauuguag

SEQ ID NO: 441359 - RNA, 22 nt, Human
uauacucacagaggaaccccaa

SEQ ID NO: 441360 - RNA, 18 nt, Human
uaucaaguaaaguuuguu

SEQ ID NO: 441361 - RNA, 18 nt, Human
uaucuaagauacccaauc

SEQ ID NO: 441362 - RNA, 23 nt, Human
uaucuuauuuguccuucuuagca

SEQ ID NO: 441363 - RNA, 19 nt, Human
ucaaaauaguacucagcca

SEQ ID NO: 441364 - RNA, 21 nt, Human
ucaaacaauaagcuuuagagc

SEQ ID NO: 441365 - RNA, 22 nt, Human
ucaacaaagauccuuccucacu

SEQ ID NO: 441366 - RNA, 23 nt, Human
ucaaguggcuucggucccgggcc

SEQ ID NO: 441367 - RNA, 24 nt, Human
ucacccucccuauaccccuuaaaa

SEQ ID NO: 441368 - RNA, 20 nt, Human
ucacugaaccucuccaguuc

SEQ ID NO: 441369 - RNA, 24 nt, Human
ucagaacaaggguacaaaaggaau

SEQ ID NO: 441370 - RNA, 20 nt, Human
uccauuuccaaagcaccacu

SEQ ID NO: 441371 - RNA, 19 nt, Human
ucccaaaaccucuaccccc

SEQ ID NO: 441372 - RNA, 21 nt, Human
ucccaaaaccucuacccccaa

SEQ ID NO: 441373 - RNA, 25 nt, Human
ucccaaagguauuccaagauggugu

SEQ ID NO: 441374 - RNA, 26 nt, Human
uccccacaacccuuguccucacccuc

SEQ ID NO: 441375 - RNA, 18 nt, Human
ucccuggggcaggguagc

SEQ ID NO: 441376 - RNA, 18 nt, Human
ucccuggggcaggguagc

SEQ ID NO: 441377 - RNA, 19 nt, Human
ucccuggggcaggguagcu

SEQ ID NO: 441378 - RNA, 18 nt, Human
uccugcugcuucccaaag

SEQ ID NO: 441379 - RNA, 22 nt, Human
uccugcugcuucccaaagguau

SEQ ID NO: 441380 - RNA, 19 nt, Human
uccuggcugcugcuguggc

SEQ ID NO: 441381 - RNA, 21 nt, Human
uccuggcugcugcuguggcug

SEQ ID NO: 441382 - RNA, 18 nt, Human
ucuccuggcugcugcugu

SEQ ID NO: 441383 - RNA, 24 nt, Human
ucugcaccccaaaacucccuaccu

SEQ ID NO: 441384 - RNA, 25 nt, Human
ugaaaacgucgauguauagccaccu

SEQ ID NO: 441385 - RNA, 21 nt, Human
ugaaaagauaggcacaaagug

SEQ ID NO: 441386 - RNA, 19 nt, Human
ugaaagagucuuaacacaa

SEQ ID NO: 441387 - RNA, 19 nt, Human
ugaaaugcagaucagaaaa

SEQ ID NO: 441388 - RNA, 18 nt, Human
ugaaggcaaagaagacaa

SEQ ID NO: 441389 - RNA, 23 nt, Human
ugacaaacaaaacaaguuauuuc

SEQ ID NO: 441390 - RNA, 21 nt, Human
ugagauguccugcgcuggccu

SEQ ID NO: 441391 - RNA, 20 nt, Human
ugaggcugcgaguuccuggc

SEQ ID NO: 441392 - RNA, 22 nt, Human
ugaggugccgguaaaaugcaca

SEQ ID NO: 441393 - RNA, 23 nt, Human
ugauacagcacaaauaaagccuc

SEQ ID NO: 441394 - RNA, 23 nt, Human
ugauggcagauauuuuagguucc

SEQ ID NO: 441395 - RNA, 24 nt, Human
ugauggugcugcugcugcuguugc

SEQ ID NO: 441396 - RNA, 21 nt, Human
ugcacagauagguaggagucc

SEQ ID NO: 441397 - RNA, 21 nt, Human
ugcagaaugugauuaaaauca

SEQ ID NO: 441398 - RNA, 21 nt, Human
ugcuccguccgggcucuccuu

SEQ ID NO: 441399 - RNA, 27 nt, Human
ugcugcuguggcugcugcugcugcugu

SEQ ID NO: 441400 - RNA, 19 nt, Human
uggaaaguucaaaauagua

SEQ ID NO: 441401 - RNA, 19 nt, Human
uggacaagcuacuccaacc

SEQ ID NO: 441402 - RNA, 24 nt, Human
uggagcagcggauagccggaggcg

SEQ ID NO: 441403 - RNA, 21 nt, Human
uggaugguggagauuguagca

SEQ ID NO: 441404 - RNA, 18 nt, Human
uggcauccuucugugucc

SEQ ID NO: 441405 - RNA, 21 nt, Human
uggcauccuucuguguccuuc

SEQ ID NO: 441406 - RNA, 25 nt, Human
uggcugcugcugcugcuguuguugg

SEQ ID NO: 441407 - RNA, 24 nt, Human
ugggcaggggggaagccccaacuc

SEQ ID NO: 441408 - RNA, 19 nt, Human
uguugcugcugcugcugac

SEQ ID NO: 441409 - RNA, 24 nt, Human
uuaaaaaacauccccuccccacaa

SEQ ID NO: 441410 - RNA, 24 nt, Human
uuagcuccaguacccuucugcacc

SEQ ID NO: 441411 - RNA, 19 nt, Human
uuauuuguccuucuuagca

SEQ ID NO: 441412 - RNA, 20 nt, Human
uuccaaaaugcuaaccaaag

SEQ ID NO: 441413 - RNA, 21 nt, Human
uuuuuucuccuuaugacuaaa

SEQ ID NO: 441414 - RNA, 18 nt, Human
aaacagcucccaucuccc

SEQ ID NO: 441415 - RNA, 19 nt, Human
aagaaaggaauuucauugc

SEQ ID NO: 441416 - RNA, 23 nt, Human
aagaagccaggcagacaggagca

SEQ ID NO: 441417 - RNA, 22 nt, Human
aagagaaaggucagagcucagg

SEQ ID NO: 441418 - RNA, 24 nt, Human
aagcaggacagacaagaagccagg

SEQ ID NO: 441419 - RNA, 19 nt, Human
aaggaacaacaaaaaauua

SEQ ID NO: 441420 - RNA, 20 nt, Human
aaugaaggaacaacaaaaaa

SEQ ID NO: 441421 - RNA, 18 nt, Human
aaugagguucgcagcugc

SEQ ID NO: 441422 - RNA, 23 nt, Human
aauucagaaaagcuaagaagccc

SEQ ID NO: 441423 - RNA, 21 nt, Human
acaaaaaauuaaagacuguaa

SEQ ID NO: 441424 - RNA, 18 nt, Human
acaggcccuccccaagag

SEQ ID NO: 441425 - RNA, 19 nt, Human
accccaagacacugacaaa

SEQ ID NO: 441426 - RNA, 24 nt, Human
acggaaucuccugccuccucaaag

SEQ ID NO: 441427 - RNA, 22 nt, Human
acuccuucccaccaaagucccg

SEQ ID NO: 441428 - RNA, 24 nt, Human
acucuguucugcuucagucucuga

SEQ ID NO: 441429 - RNA, 29 nt, Human
agaaaaaaaugaaggaacaacaaaaaaga

SEQ ID NO: 441430 - RNA, 24 nt, Human
agacaaaaaagcaagugccacgag

SEQ ID NO: 441431 - RNA, 25 nt, Human
agacaaaaaagcaagugccacgauc

SEQ ID NO: 441432 - RNA, 24 nt, Human
agacaagaagccaggcagacagga

SEQ ID NO: 441433 - RNA, 19 nt, Human
agacagagaugaacucaga

SEQ ID NO: 441434 - RNA, 22 nt, Human
agagagccauggcugacuccag

SEQ ID NO: 441435 - RNA, 23 nt, Human
agauacauuuucuguacaaugaa

SEQ ID NO: 441436 - RNA, 18 nt, Human
aggcaaggagaauggggg

SEQ ID NO: 441437 - RNA, 19 nt, Human
aggcaaggagaaugggggu

SEQ ID NO: 441438 - RNA, 22 nt, Human
aggcacacagucucccugcguu

SEQ ID NO: 441439 - RNA, 25 nt, Human
agggacccacggaaucuccugccuc

SEQ ID NO: 441440 - RNA, 20 nt, Human
agguaauuaggugaagacca

SEQ ID NO: 441441 - RNA, 21 nt, Human
agugaucccaggggaggggcc

SEQ ID NO: 441442 - RNA, 24 nt, Human
auccugacagguagagacuggggg

SEQ ID NO: 441443 - RNA, 20 nt, Human
auuucauugcuucugauuua

SEQ ID NO: 441444 - RNA, 19 nt, Human
caaacacaguaggaaugau

SEQ ID NO: 441445 - RNA, 20 nt, Human
caaagucccgcuuucuucuc

SEQ ID NO: 441446 - RNA, 21 nt, Human
caccaaagucccgcuuucuuc

SEQ ID NO: 441447 - RNA, 21 nt, Human
cagcccagaugucagaaugga

SEQ ID NO: 441448 - RNA, 19 nt, Human
caggacagacaagaagcca

SEQ ID NO: 441449 - RNA, 23 nt, Human
caggacagacaagaagccaggca

SEQ ID NO: 441450 - RNA, 24 nt, Human
caggcucucaagauuuccuggagg

SEQ ID NO: 441451 - RNA, 28 nt, Human
cagggacccacggaaucuccugccuccu

SEQ ID NO: 441452 - RNA, 22 nt, Human
caguucagguacuggucucaua

SEQ ID NO: 441453 - RNA, 23 nt, Human
cauccuucacacucccccagagc

SEQ ID NO: 441454 - RNA, 21 nt, Human
caugagccuccugccucccag

SEQ ID NO: 441455 - RNA, 21 nt, Human
cauuaugccaagacaggcucu

SEQ ID NO: 441456 - RNA, 25 nt, Human
ccacggaaucuccugccuccucaaa

SEQ ID NO: 441457 - RNA, 18 nt, Human
ccagcccagaugucagaa

SEQ ID NO: 441458 - RNA, 19 nt, Human
cccagcccagaugucagaa

SEQ ID NO: 441459 - RNA, 21 nt, Human
cccaugguuggcacaggugac

SEQ ID NO: 441460 - RNA, 25 nt, Human
ccccaugguuggcacaggugacacu

SEQ ID NO: 441461 - RNA, 18 nt, Human
cccccagagcucacauca

SEQ ID NO: 441462 - RNA, 20 nt, Human
ccucaaagcuugcuuaguuc

SEQ ID NO: 441463 - RNA, 22 nt, Human
ccucccagcauccacccaacuu

SEQ ID NO: 441464 - RNA, 18 nt, Human
ccugcguuuccuuucucc

SEQ ID NO: 441465 - RNA, 20 nt, Human
cucacugccacacucacacu

SEQ ID NO: 441466 - RNA, 24 nt, Human
cuccuggccuggauuucgcccauu

SEQ ID NO: 441467 - RNA, 18 nt, Human
cuccuucccaccaaaguc

SEQ ID NO: 441468 - RNA, 20 nt, Human
cugcaacagguagaccuggg

SEQ ID NO: 441469 - RNA, 22 nt, Human
cugccacacucacacucacggg

SEQ ID NO: 441470 - RNA, 25 nt, Human
cugccgcuuuccuuguuugucagug

SEQ ID NO: 441471 - RNA, 21 nt, Human
gaaucuccugccuccucaaag

SEQ ID NO: 441472 - RNA, 20 nt, Human
gacaacacagaacuuuaaga

SEQ ID NO: 441473 - RNA, 18 nt, Human
gagaugcauccuucacac

SEQ ID NO: 441474 - RNA, 22 nt, Human
gagcaugagccuccugccuccc

SEQ ID NO: 441475 - RNA, 26 nt, Human
gagcugcaagagugcaucuuuacgug

SEQ ID NO: 441476 - RNA, 24 nt, Human
gaggggccuucauguggagauucu

SEQ ID NO: 441477 - RNA, 21 nt, Human
gaucauaaucuauccuguuua

SEQ ID NO: 441478 - RNA, 19 nt, Human
gauguacacaugugggauc

SEQ ID NO: 441479 - RNA, 18 nt, Human
gcaugauguacacaugug

SEQ ID NO: 441480 - RNA, 23 nt, Human
gcccaggguuguuugaguuucag

SEQ ID NO: 441481 - RNA, 21 nt, Human
gcucccaucucccauuuccau

SEQ ID NO: 441482 - RNA, 21 nt, Human
ggaacaacaaaaaauuaaaga

SEQ ID NO: 441483 - RNA, 19 nt, Human
ggggguauuccaaggauga

SEQ ID NO: 441484 - RNA, 20 nt, Human
ggggugggugaggagacagg

SEQ ID NO: 441485 - RNA, 23 nt, Human
gguguacaaggggccaagagaaa

SEQ ID NO: 441486 - RNA, 24 nt, Human
guacuccagcugucuuccuggagu

SEQ ID NO: 441487 - RNA, 21 nt, Human
guagaagcaggacagacaaga

SEQ ID NO: 441488 - RNA, 19 nt, Human
gugguuccugaggccccag

SEQ ID NO: 441489 - RNA, 20 nt, Human
gugguuccugaggccccaga

SEQ ID NO: 441490 - RNA, 18 nt, Human
uaaaucaaacaugcuaag

SEQ ID NO: 441491 - RNA, 20 nt, Human
uaaaucaaacaugcuaagag

SEQ ID NO: 441492 - RNA, 20 nt, Human
uaccgugugacuccuuccca

SEQ ID NO: 441493 - RNA, 21 nt, Human
uacuccagcugucuuccugga

SEQ ID NO: 441494 - RNA, 22 nt, Human
uacuccagcugucuuccuggag

SEQ ID NO: 441495 - RNA, 23 nt, Human
uagaagcaggacagacaagaagc

SEQ ID NO: 441496 - RNA, 21 nt, Human
uaggucuuucuucuuucucug

SEQ ID NO: 441497 - RNA, 24 nt, Human
uauaaaucacacugaugauuacuc

SEQ ID NO: 441498 - RNA, 18 nt, Human
ucaaauccccacccugcc

SEQ ID NO: 441499 - RNA, 18 nt, Human
ucaaggaagcuuuuccua

SEQ ID NO: 441500 - RNA, 21 nt, Human
ucacugccacacucacacuca

SEQ ID NO: 441501 - RNA, 21 nt, Human
ucagaaugagguucgcagcug

SEQ ID NO: 441502 - RNA, 21 nt, Human
ucaggcucagagagccauggc

SEQ ID NO: 441503 - RNA, 23 nt, Human
ucaggcucagagagccauggcug

SEQ ID NO: 441504 - RNA, 20 nt, Human
ucauaaucuauccuguuuag

SEQ ID NO: 441505 - RNA, 20 nt, Human
uccaccauguguaauaaaau

SEQ ID NO: 441506 - RNA, 18 nt, Human
uccauccucaggcucaga

SEQ ID NO: 441507 - RNA, 20 nt, Human
ucgcugaaaaggcaugacca

SEQ ID NO: 441508 - RNA, 23 nt, Human
ucucccugcguuuccuuucuccu

SEQ ID NO: 441509 - RNA, 18 nt, Human
ucuccugccuccucaaaa

SEQ ID NO: 441510 - RNA, 23 nt, Human
ucuccuuauuugugaaagacaaa

SEQ ID NO: 441511 - RNA, 18 nt, Human
ucucugaggcuccuggcc

SEQ ID NO: 441512 - RNA, 23 nt, Human
ucuguacugaaauuccacaggga

SEQ ID NO: 441513 - RNA, 25 nt, Human
ucuucagucauguaguuuuuguguu

SEQ ID NO: 441514 - RNA, 25 nt, Human
ucuuucuucuuucucugccgcuuuc

SEQ ID NO: 441515 - RNA, 23 nt, Human
ugaaaaggcaugaccagagaaua

SEQ ID NO: 441516 - RNA, 18 nt, Human
ugaaagacaaaaaagcaa

SEQ ID NO: 441517 - RNA, 20 nt, Human
ugaagcagccaggaagucgg

SEQ ID NO: 441518 - RNA, 24 nt, Human
ugacaaaacagcucccaucuccca

SEQ ID NO: 441519 - RNA, 21 nt, Human
ugacaacacagaacuuuaaga

SEQ ID NO: 441520 - RNA, 26 nt, Human
ugacaacacagaacuuuaagaaagga

SEQ ID NO: 441521 - RNA, 19 nt, Human
ugacuccuucccaccaaag

SEQ ID NO: 441522 - RNA, 19 nt, Human
ugagccuccugccucccag

SEQ ID NO: 441523 - RNA, 19 nt, Human
ugaggccccagcccagaug

SEQ ID NO: 441524 - RNA, 18 nt, Human
ugaucauuugcaggcucu

SEQ ID NO: 441525 - RNA, 19 nt, Human
ugcaagagugcaucuuuac

SEQ ID NO: 441526 - RNA, 18 nt, Human
ugcacacgcacacagaug

SEQ ID NO: 441527 - RNA, 19 nt, Human
ugcacaugcaagucccuug

SEQ ID NO: 441528 - RNA, 18 nt, Human
ugcagaggaguccucggg

SEQ ID NO: 441529 - RNA, 21 nt, Human
ugccaagacaggcucucaaga

SEQ ID NO: 441530 - RNA, 25 nt, Human
ugccaagacaggcucucaagauuuc

SEQ ID NO: 441531 - RNA, 20 nt, Human
ugcuagggcugggggugggu

SEQ ID NO: 441532 - RNA, 23 nt, Human
ugcuuaguucacagucagaauga

SEQ ID NO: 441533 - RNA, 24 nt, Human
ugcuucagucucugaggcuccugg

SEQ ID NO: 441534 - RNA, 19 nt, Human
uggacacucacaugugauc

SEQ ID NO: 441535 - RNA, 18 nt, Human
uggcugacuccaggcugc

SEQ ID NO: 441536 - RNA, 20 nt, Human
ugggaucagcgugggaaggu

SEQ ID NO: 441537 - RNA, 20 nt, Human
ugggguguacaaggggcccc

SEQ ID NO: 441538 - RNA, 21 nt, Human
ugguuccugaggccccagccc

SEQ ID NO: 441539 - RNA, 18 nt, Human
ugguuggcacaggugaca

SEQ ID NO: 441540 - RNA, 21 nt, Human
uguacaaggggccaagagaaa

SEQ ID NO: 441541 - RNA, 19 nt, Human
ugugaaagacaaaaaagca

SEQ ID NO: 441542 - RNA, 23 nt, Human
ugugaccccaagacacugacaaa

SEQ ID NO: 441543 - RNA, 19 nt, Human
ugugaucaaaguggacacc

SEQ ID NO: 441544 - RNA, 20 nt, Human
ugugaucaaaguggacaccc

SEQ ID NO: 441545 - RNA, 18 nt, Human
ugugggaucagcguggga

SEQ ID NO: 441546 - RNA, 22 nt, Human
uuaaagacuguaaagcagagac

SEQ ID NO: 441547 - RNA, 19 nt, Human
uuccugaggccccagccca

SEQ ID NO: 441548 - RNA, 23 nt, Human
uugugguuccugaggccccagcc

SEQ ID NO: 441549 - RNA, 24 nt, Human
uugugguuccugaggccccagccc

SEQ ID NO: 441550 - RNA, 24 nt, Human
aaccacgcucggaggcccugcccc

SEQ ID NO: 441551 - RNA, 24 nt, Human
acagaugcccuuauugagcccaga

SEQ ID NO: 441552 - RNA, 22 nt, Human
agagguaaauauaaacaaauug

SEQ ID NO: 441553 - RNA, 21 nt, Human
agaugcccuuauugagcccag

SEQ ID NO: 441554 - RNA, 23 nt, Human
aguugcuuuugggugaccauguu

SEQ ID NO: 441555 - RNA, 24 nt, Human
caaaaacuuccaaagcuuucuaga

SEQ ID NO: 441556 - RNA, 18 nt, Human
caaaaucagcucuuucuc

SEQ ID NO: 441557 - RNA, 18 nt, Human
caccacguucccgggacc

SEQ ID NO: 441558 - RNA, 20 nt, Human
caccccaguaauaagcucca

SEQ ID NO: 441559 - RNA, 23 nt, Human
ccaaauuucugcacagaugcccu

SEQ ID NO: 441560 - RNA, 22 nt, Human
ccuuauugagcccagagguaaa

SEQ ID NO: 441561 - RNA, 22 nt, Human
ccuucaaaguccaaccacgcuc

SEQ ID NO: 441562 - RNA, 23 nt, Human
cuaucuacaaaaacuuccaaagc

SEQ ID NO: 441563 - RNA, 22 nt, Human
cugaaauauuuauuaaauaaca

SEQ ID NO: 441564 - RNA, 19 nt, Human
cugacuugccuaaaaaaua

SEQ ID NO: 441565 - RNA, 21 nt, Human
cuggucaaauggaguaagcug

SEQ ID NO: 441566 - RNA, 23 nt, Human
cuuauugagcccagagguaaaua

SEQ ID NO: 441567 - RNA, 22 nt, Human
gcuuuugggugaccauguucuc

SEQ ID NO: 441568 - RNA, 21 nt, Human
ggaaggguauauggggguuca

SEQ ID NO: 441569 - RNA, 19 nt, Human
uagaaagcuuaaauuaagg

SEQ ID NO: 441570 - RNA, 23 nt, Human
uccaaaaaggggaugcagcaugg

SEQ ID NO: 441571 - RNA, 18 nt, Human
ucucaggugaugcccccc

SEQ ID NO: 441572 - RNA, 21 nt, Human
ucucuugggagagguucuuga

SEQ ID NO: 441573 - RNA, 23 nt, Human
ucucuugggagagguucuugugg

SEQ ID NO: 441574 - RNA, 24 nt, Human
ugccauaaaccacaggaaaaucca

SEQ ID NO: 441575 - RNA, 23 nt, Human
uggguuaagaaaggaaccaccuc

SEQ ID NO: 441576 - RNA, 25 nt, Human
uugccuaaaaaauauguucaguuau

SEQ ID NO: 441577 - RNA, 22 nt, Human
uuucucaggugaugccccccuu

SEQ ID NO: 441578 - RNA, 21 nt, Human
uuucugagcuacuuaauuucu

SEQ ID NO: 441579 - RNA, 21 nt, Human
uuucugaguaacuuaauuucu

SEQ ID NO: 441580 - RNA, 20 nt, Human
uuuugggugaccauguucuc

SEQ ID NO: 441581 - RNA, 19 nt, Human
uuuuuuuuuuuuuuuuuaa

SEQ ID NO: 441582 - RNA, 22 nt, Human
aaaacaaacgcagcuccagccc

SEQ ID NO: 441583 - RNA, 23 nt, Human
aaacaaacgcagcuccagcccuu

SEQ ID NO: 441584 - RNA, 20 nt, Human
aacaugacgaaacuccgucu

SEQ ID NO: 441585 - RNA, 21 nt, Human
aacaugacgaaacuccgucuc

SEQ ID NO: 441586 - RNA, 19 nt, Human
acaugacgaaacuccgucu

SEQ ID NO: 441587 - RNA, 18 nt, Human
aucggcgccagcaugagg

SEQ ID NO: 441588 - RNA, 18 nt, Human
caugaggaaggagucuca

SEQ ID NO: 441589 - RNA, 23 nt, Human
ccccagcagccaucggcgccagc

SEQ ID NO: 441590 - RNA, 23 nt, Human
ccuggccaacaugacgaaacucc

SEQ ID NO: 441591 - RNA, 24 nt, Human
ccuggccaacaugacgaaacuccg

SEQ ID NO: 441592 - RNA, 24 nt, Human
cgcgggaagguauaaaaacgacca

SEQ ID NO: 441593 - RNA, 20 nt, Human
cgggaagguauaaaaacgac

SEQ ID NO: 441594 - RNA, 22 nt, Human
gaaacuccgucucgcccuaccc

SEQ ID NO: 441595 - RNA, 25 nt, Human
gcaaaacaaacgcagcuccagcccu

SEQ ID NO: 441596 - RNA, 21 nt, Human
gccuggccaacaugacgaaac

SEQ ID NO: 441597 - RNA, 22 nt, Human
ggcaaaacaaacgcagcuccag

SEQ ID NO: 441598 - RNA, 24 nt, Human
ggccuggccaacaugacgaaacuc

SEQ ID NO: 441599 - RNA, 20 nt, Human
ucucgcccuacccgcccuuc

SEQ ID NO: 441600 - RNA, 21 nt, Human
ugacgaaacuccgucucgccc

SEQ ID NO: 441601 - RNA, 19 nt, Human
ugauggcaaaacaaacgca

SEQ ID NO: 441602 - RNA, 24 nt, Human
ugauggcaaaacaaacgcagcucc

SEQ ID NO: 441603 - RNA, 22 nt, Human
uguccccagcagccaucggcgc

SEQ ID NO: 441604 - RNA, 18 nt, Human
uuuaagauuugaguaguu

SEQ ID NO: 441605 - RNA, 20 nt, Human
uuuuuuuuuuuuuuuuuaag

SEQ ID NO: 441606 - RNA, 22 nt, Human
aaaaaaauccaggcuauacaaa

SEQ ID NO: 441607 - RNA, 24 nt, Human
aaaagaaaaagucucaccuacaag

SEQ ID NO: 441608 - RNA, 20 nt, Human
aaaccaaaugaaccaaaccc

SEQ ID NO: 441609 - RNA, 18 nt, Human
aaagacgucauccccuag

SEQ ID NO: 441610 - RNA, 24 nt, Human
aaagaugaguaaaaaaaauccauu

SEQ ID NO: 441611 - RNA, 19 nt, Human
aaaggcccugcauuuggag

SEQ ID NO: 441612 - RNA, 18 nt, Human
aacacaaaagaaaaaguc

SEQ ID NO: 441613 - RNA, 23 nt, Human
aacagacaacugaaagccacaua

SEQ ID NO: 441614 - RNA, 20 nt, Human
aaccaaaccccuagaaggua

SEQ ID NO: 441615 - RNA, 21 nt, Human
aaugaguuucccaaagacucg

SEQ ID NO: 441616 - RNA, 24 nt, Human
acaaaagaaaaagucucaccuaca

SEQ ID NO: 441617 - RNA, 22 nt, Human
auaaugaguuucccaaagacuc

SEQ ID NO: 441618 - RNA, 22 nt, Human
caaacagacaacugaaagccac

SEQ ID NO: 441619 - RNA, 25 nt, Human
caaacagacaacugaaagccacaua

SEQ ID NO: 441620 - RNA, 24 nt, Human
cacaaugcaucucugaaaggcccu

SEQ ID NO: 441621 - RNA, 21 nt, Human
caguaauuacaaucacaaugc

SEQ ID NO: 441622 - RNA, 23 nt, Human
caugacaaaaaccaaaugaacca

SEQ ID NO: 441623 - RNA, 24 nt, Human
caugacaaaaaccaaaugaaccaa

SEQ ID NO: 441624 - RNA, 25 nt, Human
caugacaaaaaccaaaugaaccaaa

SEQ ID NO: 441625 - RNA, 22 nt, Human
ccgggugaccucgugccgaauu

SEQ ID NO: 441626 - RNA, 24 nt, Human
ccuuccuugcacaugacaaaaacc

SEQ ID NO: 441627 - RNA, 21 nt, Human
ccuugcacaugacaaaaacca

SEQ ID NO: 441628 - RNA, 21 nt, Human
cgaaacacaaaagaaaaaguc

SEQ ID NO: 441629 - RNA, 23 nt, Human
cgaaacacaaaagaaaaagucuc

SEQ ID NO: 441630 - RNA, 23 nt, Human
cucgaguuuuuuuuuuuuuuuuu

SEQ ID NO: 441631 - RNA, 24 nt, Human
cucgaguuuuuuuuuuuuuuuuuc

SEQ ID NO: 441632 - RNA, 19 nt, Human
cugcauuuggaggcagagu

SEQ ID NO: 441633 - RNA, 20 nt, Human
gaaacacaaaagaaaaaguc

SEQ ID NO: 441634 - RNA, 20 nt, Human
ggaaauuuccgaaacacaaa

SEQ ID NO: 441635 - RNA, 23 nt, Human
uaagaaacaaauucaaauugguu

SEQ ID NO: 441636 - RNA, 23 nt, Human
uacaaacagacaacugaaagcca

SEQ ID NO: 441637 - RNA, 25 nt, Human
uacaagauuauuuacauguuuaggg

SEQ ID NO: 441638 - RNA, 18 nt, Human
uaccuuggcuuuaaugau

SEQ ID NO: 441639 - RNA, 22 nt, Human
ucaaaaaaauccaggcuauaca

SEQ ID NO: 441640 - RNA, 20 nt, Human
uccaggcuauacaaacagac

SEQ ID NO: 441641 - RNA, 18 nt, Human
uccccuaggucuaguaga

SEQ ID NO: 441642 - RNA, 21 nt, Human
uccccuaggucuaguagaaac

SEQ ID NO: 441643 - RNA, 19 nt, Human
ucccuagggucacuuucuu

SEQ ID NO: 441644 - RNA, 20 nt, Human
uccuugcacaugacaaaaac

SEQ ID NO: 441645 - RNA, 25 nt, Human
ucucaccuacaagauuauuuacaug

SEQ ID NO: 441646 - RNA, 23 nt, Human
ugacaaaaaccaaaugaaccaaa

SEQ ID NO: 441647 - RNA, 25 nt, Human
ugacaaaaaccaaaugaaccaaacc

SEQ ID NO: 441648 - RNA, 21 nt, Human
ugauaguuuuuacauaugucc

SEQ ID NO: 441649 - RNA, 24 nt, Human
uggaggcagaguaaucugcaaaga

SEQ ID NO: 441650 - RNA, 24 nt, Human
uuacuucccuagggucacuuucuu

SEQ ID NO: 441651 - RNA, 22 nt, Human
uucaaauugguuggagcuucaa

SEQ ID NO: 441652 - RNA, 25 nt, Human
aacuucuuuuuccuuuuacaauacu

SEQ ID NO: 441653 - RNA, 20 nt, Human
aacuugcugcccuuauucuu

SEQ ID NO: 441654 - RNA, 19 nt, Human
cauuuuuaagagcugaaaa

SEQ ID NO: 441655 - RNA, 21 nt, Human
cuugcugcccuuauucuugau

SEQ ID NO: 441656 - RNA, 24 nt, Human
cuuugcucugucugccacauggaa

SEQ ID NO: 441657 - RNA, 21 nt, Human
gucugugggccgucuuuaauc

SEQ ID NO: 441658 - RNA, 23 nt, Human
uaagucuuuacuuaguuguuuuu

SEQ ID NO: 441659 - RNA, 26 nt, Human
uaauauacauguaacauuuacauuuu

SEQ ID NO: 441660 - RNA, 19 nt, Human
uaauggcagcugcauuuuu

SEQ ID NO: 441661 - RNA, 19 nt, Human
uaguagcuuuucucuucuu

SEQ ID NO: 441662 - RNA, 19 nt, Human
ugagguuguaaaaugaugu

SEQ ID NO: 441663 - RNA, 23 nt, Human
ugccaaguaauauacauguaaca

SEQ ID NO: 441664 - RNA, 22 nt, Human
uguaagaaggaacuucuuuuuc

SEQ ID NO: 441665 - RNA, 24 nt, Human
uuaauuuuauuaguagcuuuucuc

SEQ ID NO: 441666 - RNA, 20 nt, Human
uuguucaucugugacuuuaa

SEQ ID NO: 441667 - RNA, 20 nt, Human
uuugacaagccaccuaugua

SEQ ID NO: 441668 - RNA, 19 nt, Human
aagcccugguccccgucag

SEQ ID NO: 441669 - RNA, 21 nt, Human
aagccgcuggaaagaaucgga

SEQ ID NO: 441670 - RNA, 21 nt, Human
aaguggucccucugagucccc

SEQ ID NO: 441671 - RNA, 21 nt, Human
acacaacagcaccagcaccau

SEQ ID NO: 441672 - RNA, 20 nt, Human
accaugagggcgcucucgac

SEQ ID NO: 441673 - RNA, 19 nt, Human
acucucggggacguugggg

SEQ ID NO: 441674 - RNA, 21 nt, Human
agaacucugugagcuccgccc

SEQ ID NO: 441675 - RNA, 18 nt, Human
agagccaagagucaccgu

SEQ ID NO: 441676 - RNA, 18 nt, Human
aguccccaacucccuggc

SEQ ID NO: 441677 - RNA, 18 nt, Human
agugaagcuccaugcccc

SEQ ID NO: 441678 - RNA, 25 nt, Human
augcagccccccugcacucagaaag

SEQ ID NO: 441679 - RNA, 22 nt, Human
caaguggucccucugagucccc

SEQ ID NO: 441680 - RNA, 22 nt, Human
caaguggucccucugagucccc

SEQ ID NO: 441681 - RNA, 18 nt, Human
cacaacagcaccagcacc

SEQ ID NO: 441682 - RNA, 24 nt, Human
cacauccucgggcagagccaagag

SEQ ID NO: 441683 - RNA, 24 nt, Human
cacucagaaagggggcuucuccag

SEQ ID NO: 441684 - RNA, 18 nt, Human
cagccccccugcacucag

SEQ ID NO: 441685 - RNA, 23 nt, Human
cagccucgaucucaggaggcaac

SEQ ID NO: 441686 - RNA, 22 nt, Human
cauccucgggcagagccaagag

SEQ ID NO: 441687 - RNA, 22 nt, Human
ccacacaagcccugguccccgu

SEQ ID NO: 441688 - RNA, 20 nt, Human
ccgcccagauaccauuggcg

SEQ ID NO: 441689 - RNA, 20 nt, Human
ccugcuuguguccccagggg

SEQ ID NO: 441690 - RNA, 26 nt, Human
ccuggccagcaaggagugaagcucca

SEQ ID NO: 441691 - RNA, 22 nt, Human
cgaggacuggagacgcggagga

SEQ ID NO: 441692 - RNA, 20 nt, Human
cgccauugaggccagucugg

SEQ ID NO: 441693 - RNA, 21 nt, Human
cuggccagcaaggagugaagc

SEQ ID NO: 441694 - RNA, 20 nt, Human
cuggccccaaguggucccuc

SEQ ID NO: 441695 - RNA, 18 nt, Human
cuggcuggccccaagugg

SEQ ID NO: 441696 - RNA, 20 nt, Human
gaggcaacgcaugcagcccc

SEQ ID NO: 441697 - RNA, 22 nt, Human
gcaacgcaugcagccccccugc

SEQ ID NO: 441698 - RNA, 18 nt, Human
gccauugaggccagucug

SEQ ID NO: 441699 - RNA, 27 nt, Human
gguugcuuuuauuccaagaacucuguu

SEQ ID NO: 441700 - RNA, 24 nt, Human
gucugagcauauccugcagccucg

SEQ ID NO: 441701 - RNA, 23 nt, Human
ucaccgucuuucgugggccuggg

SEQ ID NO: 441702 - RNA, 19 nt, Human
uccccaacucccuggccag

SEQ ID NO: 441703 - RNA, 21 nt, Human
ucccucugaguccccaacucc

SEQ ID NO: 441704 - RNA, 18 nt, Human
ucugugagcuccgcccag

SEQ ID NO: 441705 - RNA, 25 nt, Human
ugaggauccgcucagcucggcuucu

SEQ ID NO: 441706 - RNA, 20 nt, Human
ugcgaggacuggagacgcgg

SEQ ID NO: 441707 - RNA, 19 nt, Human
uggccccaaguggucccuc

SEQ ID NO: 441708 - RNA, 23 nt, Human
ugggagcggggauucggggacuc

SEQ ID NO: 441709 - RNA, 23 nt, Human
ugggagcggggauucggggggag

SEQ ID NO: 441710 - RNA, 24 nt, Human
uugcuuuuauuccaagaacucugu

SEQ ID NO: 441711 - RNA, 20 nt, Human
uugguugcagaagccgcugg

SEQ ID NO: 441712 - RNA, 21 nt, Human
aggcugggcccucaguuagcu

SEQ ID NO: 441713 - RNA, 20 nt, Human
cagaaaaaaggcugggcccu

SEQ ID NO: 441714 - RNA, 18 nt, Human
caugcagaaaaaaggcug

SEQ ID NO: 441715 - RNA, 22 nt, Human
caugcagaaaaaaggcugggcc

SEQ ID NO: 441716 - RNA, 20 nt, Human
cuccuggaucaugcagaaaa

SEQ ID NO: 441717 - RNA, 24 nt, Human
cugggcccucaguuagcuccggga

SEQ ID NO: 441718 - RNA, 20 nt, Human
gaggggcuggguagcuggcu

SEQ ID NO: 441719 - RNA, 20 nt, Human
ggcuggguagcuggcugggc

SEQ ID NO: 441720 - RNA, 18 nt, Human
ggguagcuggcugggcug

SEQ ID NO: 441721 - RNA, 19 nt, Human
ugcacacagagaggggcug

SEQ ID NO: 441722 - RNA, 19 nt, Human
uggguagcuggcugggcug

SEQ ID NO: 441723 - RNA, 21 nt, Human
uggguagcuggcugggcuggg

SEQ ID NO: 441724 - RNA, 21 nt, Human
uggguagcuggcugggcuggg

SEQ ID NO: 441725 - RNA, 21 nt, Human
ugugguaguuugugguaugug

SEQ ID NO: 441726 - RNA, 21 nt, Human
aaaugcuuucuggaccaaaac

SEQ ID NO: 441727 - RNA, 21 nt, Human
accccaagaaauaacugcuau

SEQ ID NO: 441728 - RNA, 18 nt, Human
cagcuccuugaaaaugcu

SEQ ID NO: 441729 - RNA, 22 nt, Human
cccggagcccggcggaggcgcc

SEQ ID NO: 441730 - RNA, 19 nt, Human
ccugggccugcuggggcga

SEQ ID NO: 441731 - RNA, 22 nt, Human
cgaccuugggcucccggagccc

SEQ ID NO: 441732 - RNA, 19 nt, Human
cgcgggacagcagggcugg

SEQ ID NO: 441733 - RNA, 21 nt, Human
cuccuugaaaaugcuuucugg

SEQ ID NO: 441734 - RNA, 18 nt, Human
cuggcccagccgcgaccu

SEQ ID NO: 441735 - RNA, 18 nt, Human
gccccgggcccccccgcu

SEQ ID NO: 441736 - RNA, 18 nt, Human
ggccccgggcccccccgc

SEQ ID NO: 441737 - RNA, 22 nt, Human
ggguguguguguccaugggccc

SEQ ID NO: 441738 - RNA, 23 nt, Human
guguauggauugcuuuggcuuug

SEQ ID NO: 441739 - RNA, 22 nt, Human
uaccucaguuucugcaucugug

SEQ ID NO: 441740 - RNA, 20 nt, Human
ucccggagcccggcggaggc

SEQ ID NO: 441741 - RNA, 19 nt, Human
ucuggaccaaaacuaaagc

SEQ ID NO: 441742 - RNA, 19 nt, Human
ugccugggccugcuggggc

SEQ ID NO: 441743 - RNA, 21 nt, Human
uggaaauaucuacuuucucca

SEQ ID NO: 441744 - RNA, 18 nt, Human
ugggccccgggccccccc

SEQ ID NO: 441745 - RNA, 25 nt, Human
uggguguguguguccaugggccccg

SEQ ID NO: 441746 - RNA, 19 nt, Human
uggugagcuggcgcgcggg

SEQ ID NO: 441747 - RNA, 19 nt, Human
uguauggauugcuuuggcu

SEQ ID NO: 441748 - RNA, 24 nt, Human
uugauggaaauaucuacuuucucc

SEQ ID NO: 441749 - RNA, 22 nt, Human
aaaaaaacacuaauacuguaca

SEQ ID NO: 441750 - RNA, 23 nt, Human
aaaagaaaaaacccuaaaacuga

SEQ ID NO: 441751 - RNA, 21 nt, Human
aaacacaugaaaaucaacuug

SEQ ID NO: 441752 - RNA, 18 nt, Human
aaacccaaaacuaagcaa

SEQ ID NO: 441753 - RNA, 22 nt, Human
aaagaaaaaacccuaaaacuga

SEQ ID NO: 441754 - RNA, 23 nt, Human
aaagaaagguuuucagggaagcg

SEQ ID NO: 441755 - RNA, 24 nt, Human
aacugacuuuucaauaaauuuuau

SEQ ID NO: 441756 - RNA, 21 nt, Human
aacuuccugggcauaggaaac

SEQ ID NO: 441757 - RNA, 22 nt, Human
aagaagcuuguccaaaguuuca

SEQ ID NO: 441758 - RNA, 22 nt, Human
aagcaguagaaagcuuuugagg

SEQ ID NO: 441759 - RNA, 20 nt, Human
aaggcauaaccaugaaaaca

SEQ ID NO: 441760 - RNA, 23 nt, Human
aaggcugcagugaggugugauca

SEQ ID NO: 441761 - RNA, 20 nt, Human
acaaacaaggcauaaccaug

SEQ ID NO: 441762 - RNA, 21 nt, Human
acaagacaagcucccaaacac

SEQ ID NO: 441763 - RNA, 23 nt, Human
acaaggcauaaccaugaaaacaa

SEQ ID NO: 441764 - RNA, 20 nt, Human
acagagcaagacccugucuc

SEQ ID NO: 441765 - RNA, 26 nt, Human
acagagcaagacccugucucaacaaa

SEQ ID NO: 441766 - RNA, 20 nt, Human
acaucaugaaaauauuucuc

SEQ ID NO: 441767 - RNA, 19 nt, Human
accaugaaaacaacacucc

SEQ ID NO: 441768 - RNA, 18 nt, Human
acucaggauuuaauuucu

SEQ ID NO: 441769 - RNA, 29 nt, Human
acugauuuuuugacugaaaauacagaaaa

SEQ ID NO: 441770 - RNA, 24 nt, Human
acugcacuccagucugggugacag

SEQ ID NO: 441771 - RNA, 26 nt, Human
acugcacuccagucugggugacagag

SEQ ID NO: 441772 - RNA, 21 nt, Human
agaaaauaacaaacaauuuga

SEQ ID NO: 441773 - RNA, 21 nt, Human
agaacaagacaagcucccaaa

SEQ ID NO: 441774 - RNA, 20 nt, Human
agaauccuuucauauuuccu

SEQ ID NO: 441775 - RNA, 19 nt, Human
agacaagcucccaaacaca

SEQ ID NO: 441776 - RNA, 20 nt, Human
agauuuagaaaacugaaggu

SEQ ID NO: 441777 - RNA, 24 nt, Human
agccugggcaauaucaugagaccu

SEQ ID NO: 441778 - RNA, 19 nt, Human
agcuguugaaaauuucagc

SEQ ID NO: 441779 - RNA, 18 nt, Human
aggaucaaaaacagauga

SEQ ID NO: 441780 - RNA, 20 nt, Human
aggcaggaggaucacgagcc

SEQ ID NO: 441781 - RNA, 22 nt, Human
aggcaggaggaucacgagccug

SEQ ID NO: 441782 - RNA, 24 nt, Human
aggcaggaggaucacgagccugag

SEQ ID NO: 441783 - RNA, 23 nt, Human
aggcugcagugaggugugaucau

SEQ ID NO: 441784 - RNA, 18 nt, Human
agggaaaaauaaggaaaa

SEQ ID NO: 441785 - RNA, 22 nt, Human
agguugaggcaggaggaucacg

SEQ ID NO: 441786 - RNA, 21 nt, Human
auaaccaugaaaacaacacuc

SEQ ID NO: 441787 - RNA, 19 nt, Human
auacuuuguuuuucuuggu

SEQ ID NO: 441788 - RNA, 23 nt, Human
aucaaaauacucccaccaaagca

SEQ ID NO: 441789 - RNA, 24 nt, Human
aucaugccacugcacuccagucug

SEQ ID NO: 441790 - RNA, 22 nt, Human
caacaaaauaaaaaacaucaaa

SEQ ID NO: 441791 - RNA, 23 nt, Human
caacacuugacuccacaaacaag

SEQ ID NO: 441792 - RNA, 24 nt, Human
caagacaagcucccaaacacauga

SEQ ID NO: 441793 - RNA, 20 nt, Human
caaggcauaaccaugaaaac

SEQ ID NO: 441794 - RNA, 27 nt, Human
cacaaacaaggcauaaccaugaaaaca

SEQ ID NO: 441795 - RNA, 24 nt, Human
cacgccuguagucccaagcuacuu

SEQ ID NO: 441796 - RNA, 22 nt, Human
cacuaucaaaaaaagaaaaaac

SEQ ID NO: 441797 - RNA, 22 nt, Human
cacuccagucugggugacagag

SEQ ID NO: 441798 - RNA, 19 nt, Human
cacugcacuccagucuggg

SEQ ID NO: 441799 - RNA, 19 nt, Human
cacugcacuccagucuggg

SEQ ID NO: 441800 - RNA, 21 nt, Human
cacugcacuccagucugggug

SEQ ID NO: 441801 - RNA, 22 nt, Human
cacugcacuccagucuggguga

SEQ ID NO: 441802 - RNA, 24 nt, Human
cacugcacuccagucugggugaca

SEQ ID NO: 441803 - RNA, 24 nt, Human
cacugcacuccagucugggugaca

SEQ ID NO: 441804 - RNA, 22 nt, Human
cagcucaacacgaagucacugg

SEQ ID NO: 441805 - RNA, 19 nt, Human
caguucucaauaaauugau

SEQ ID NO: 441806 - RNA, 19 nt, Human
caguuuaauuguugaaguc

SEQ ID NO: 441807 - RNA, 23 nt, Human
caugaaaaucaacuugaaauaac

SEQ ID NO: 441808 - RNA, 18 nt, Human
ccaaaacuaagcaagcuu

SEQ ID NO: 441809 - RNA, 22 nt, Human
ccaccaaagcacucuauggucu

SEQ ID NO: 441810 - RNA, 20 nt, Human
ccacugcacuccagucuggg

SEQ ID NO: 441811 - RNA, 20 nt, Human
ccacugcacuccagucuggg

SEQ ID NO: 441812 - RNA, 20 nt, Human
ccacugcacuccagucuggg

SEQ ID NO: 441813 - RNA, 21 nt, Human
ccacugcacuccagucugggu

SEQ ID NO: 441814 - RNA, 21 nt, Human
ccacugcacuccagucugggu

SEQ ID NO: 441815 - RNA, 23 nt, Human
ccacugcacuccagucuggguga

SEQ ID NO: 441816 - RNA, 24 nt, Human
ccacugcacuccagucugggugac

SEQ ID NO: 441817 - RNA, 24 nt, Human
cccaccaaagcacucuauggucua

SEQ ID NO: 441818 - RNA, 19 nt, Human
cccggccuggcacccagag

SEQ ID NO: 441819 - RNA, 19 nt, Human
ccugcuucugauggguagg

SEQ ID NO: 441820 - RNA, 21 nt, Human
ccuguagucccaagcuacuug

SEQ ID NO: 441821 - RNA, 21 nt, Human
cuagguccuuuugacccuucu

SEQ ID NO: 441822 - RNA, 18 nt, Human
cuccuugggcauagcuau

SEQ ID NO: 441823 - RNA, 19 nt, Human
cugggugacagagcaagac

SEQ ID NO: 441824 - RNA, 20 nt, Human
gaccuuucucucccgcgccg

SEQ ID NO: 441825 - RNA, 21 nt, Human
gaucaugccacugcacuccag

SEQ ID NO: 441826 - RNA, 18 nt, Human
gauuaaaaugucaacagu

SEQ ID NO: 441827 - RNA, 24 nt, Human
gcacuccagucugggugacagagc

SEQ ID NO: 441828 - RNA, 19 nt, Human
gccacugcacuccagucug

SEQ ID NO: 441829 - RNA, 24 nt, Human
gccacugcacuccagucuggguga

SEQ ID NO: 441830 - RNA, 24 nt, Human
gcucaacacgaagucacuggcccg

SEQ ID NO: 441831 - RNA, 18 nt, Human
gggaaaaauaaggaaaaa

SEQ ID NO: 441832 - RNA, 26 nt, Human
uaaaaaaacacuaauacuguacagua

SEQ ID NO: 441833 - RNA, 19 nt, Human
uaaaucccauauuccaaag

SEQ ID NO: 441834 - RNA, 26 nt, Human
uaaaucccauauuccaaaggacaaga

SEQ ID NO: 441835 - RNA, 22 nt, Human
uaaccuggacugaggcuaagag

SEQ ID NO: 441836 - RNA, 21 nt, Human
uaaugaaacccaaaacuaagc

SEQ ID NO: 441837 - RNA, 20 nt, Human
uacagaaaauaacaaacaau

SEQ ID NO: 441838 - RNA, 23 nt, Human
uagaagacacauaacaugccuca

SEQ ID NO: 441839 - RNA, 25 nt, Human
uaguaagccacacuagguccuuuug

SEQ ID NO: 441840 - RNA, 18 nt, Human
uagucacuagguuccugu

SEQ ID NO: 441841 - RNA, 26 nt, Human
uaucaaaaaaagaaaaaacccuaaaa

SEQ ID NO: 441842 - RNA, 23 nt, Human
uaugaaugacuacuugaguucag

SEQ ID NO: 441843 - RNA, 21 nt, Human
ucaaaaaaagaaaaaacccua

SEQ ID NO: 441844 - RNA, 25 nt, Human
ucaauaaauugauguauacugagga

SEQ ID NO: 441845 - RNA, 23 nt, Human
ucaugccacugcacuccagucug

SEQ ID NO: 441846 - RNA, 18 nt, Human
uccacaaacaaggcauaa

SEQ ID NO: 441847 - RNA, 19 nt, Human
uccacaaacaaggcauaac

SEQ ID NO: 441848 - RNA, 24 nt, Human
uccagucugggugacagagcaaga

SEQ ID NO: 441849 - RNA, 23 nt, Human
uccauguaguaagccacacuagg

SEQ ID NO: 441850 - RNA, 20 nt, Human
uccccauguuaauaaaucau

SEQ ID NO: 441851 - RNA, 20 nt, Human
ucucugggggaagacugucu

SEQ ID NO: 441852 - RNA, 21 nt, Human
ucugggugaggaugcugacug

SEQ ID NO: 441853 - RNA, 19 nt, Human
ucuguguuuauauuucauu

SEQ ID NO: 441854 - RNA, 25 nt, Human
ucuuuuucuuuggaaaaguacaguu

SEQ ID NO: 441855 - RNA, 28 nt, Human
ugaaacaacauuugcugaaaggucaucc

SEQ ID NO: 441856 - RNA, 24 nt, Human
ugaaacccaaaacuaagcaagcuu

SEQ ID NO: 441857 - RNA, 28 nt, Human
ugaaacccaaaacuaagcaagcuucccc

SEQ ID NO: 441858 - RNA, 22 nt, Human
ugacagagcaagacccugucuc

SEQ ID NO: 441859 - RNA, 19 nt, Human
ugacuccacaaacaaggca

SEQ ID NO: 441860 - RNA, 22 nt, Human
ugagaacaagacaagcucccaa

SEQ ID NO: 441861 - RNA, 22 nt, Human
ugagaacaagacaagcucccaa

SEQ ID NO: 441862 - RNA, 25 nt, Human
ugagaacaagacaagcucccaaaca

SEQ ID NO: 441863 - RNA, 26 nt, Human
ugagaacaagacaagcucccaaacac

SEQ ID NO: 441864 - RNA, 18 nt, Human
ugaggcaggaggaucacg

SEQ ID NO: 441865 - RNA, 22 nt, Human
ugaggcaggaggaucacgagcc

SEQ ID NO: 441866 - RNA, 23 nt, Human
ugaggcaggaggaucacgagccu

SEQ ID NO: 441867 - RNA, 24 nt, Human
ugaggcaggaggaucacgagccug

SEQ ID NO: 441868 - RNA, 18 nt, Human
ugccaaggaucaaaaaca

SEQ ID NO: 441869 - RNA, 25 nt, Human
ugccaaggaucaaaaacagaugaaa

SEQ ID NO: 441870 - RNA, 24 nt, Human
ugccacugcacuccagucugggug

SEQ ID NO: 441871 - RNA, 20 nt, Human
ugccaucucugggugaggau

SEQ ID NO: 441872 - RNA, 24 nt, Human
ugcgagguugaggcaggaggauca

SEQ ID NO: 441873 - RNA, 18 nt, Human
uggaacacagccuacuga

SEQ ID NO: 441874 - RNA, 19 nt, Human
uggauugucacuaucaaaa

SEQ ID NO: 441875 - RNA, 21 nt, Human
uggcacacgccuguaguccca

SEQ ID NO: 441876 - RNA, 19 nt, Human
uggcauggcuugcuuaauc

SEQ ID NO: 441877 - RNA, 24 nt, Human
uggcccggccuggcacccagaggu

SEQ ID NO: 441878 - RNA, 24 nt, Human
ugggggaagacugucuaccugcgu

SEQ ID NO: 441879 - RNA, 24 nt, Human
uggucuagacuugauacuuaaaau

SEQ ID NO: 441880 - RNA, 24 nt, Human
ugguggcacacgccuguaguccca

SEQ ID NO: 441881 - RNA, 22 nt, Human
ugucacuaucaaaaaaagaaaa

SEQ ID NO: 441882 - RNA, 19 nt, Human
uguuuauauuucauuaugg

SEQ ID NO: 441883 - RNA, 19 nt, Human
uguuucuucuucuacgaca

SEQ ID NO: 441884 - RNA, 19 nt, Human
uuaaccuggacugaggcua

SEQ ID NO: 441885 - RNA, 22 nt, Human
uuaguuuuucccacagcuguug

SEQ ID NO: 441886 - RNA, 21 nt, Human
uuauaaugaaacccaaaacua

SEQ ID NO: 441887 - RNA, 19 nt, Human
uuauaucuacaaaaaauua

SEQ ID NO: 441888 - RNA, 20 nt, Human
uucaaauuuauaugaaugac

SEQ ID NO: 441889 - RNA, 21 nt, Human
uucuacgacagaccuccaaga

SEQ ID NO: 441890 - RNA, 21 nt, Human
uucuccucaaaaaucugauaa

SEQ ID NO: 441891 - RNA, 19 nt, Human
uucuucuacgacagaccuc

SEQ ID NO: 441892 - RNA, 24 nt, Human
uucuuggcauggcuugcuuaaucu

SEQ ID NO: 441893 - RNA, 18 nt, Human
uuucuuggcauggcuugc

SEQ ID NO: 441894 - RNA, 19 nt, Human
uuugacaaaaauacucagu

SEQ ID NO: 441895 - RNA, 22 nt, Human
uuuuucuugguguccccauguu

SEQ ID NO: 441896 - RNA, 18 nt, Human
aauacaugccuaacacag

SEQ ID NO: 441897 - RNA, 23 nt, Human
acaaacuuuucuucaacugggua

SEQ ID NO: 441898 - RNA, 21 nt, Human
caaacuuuucuucaacugggu

SEQ ID NO: 441899 - RNA, 23 nt, Human
caaauccccgacugaagcagcuc

SEQ ID NO: 441900 - RNA, 19 nt, Human
caauucaaggaagcggcaa

SEQ ID NO: 441901 - RNA, 19 nt, Human
gaaaaaaaaaaaaucccau

SEQ ID NO: 441902 - RNA, 20 nt, Human
gugaaaaaaaaaaaauccca

SEQ ID NO: 441903 - RNA, 23 nt, Human
uaacgugaaaaaaaaaaaauccc

SEQ ID NO: 441904 - RNA, 24 nt, Human
uagauguuuaucuuuuaaaauuuc

SEQ ID NO: 441905 - RNA, 18 nt, Human
ucauauuucuugaucuga

SEQ ID NO: 441906 - RNA, 23 nt, Human
ucuucaaauccccgacugaagca

SEQ ID NO: 441907 - RNA, 21 nt, Human
uucaaggaagcggcaaagaaa

SEQ ID NO: 441908 - RNA, 20 nt, Human
uucuucaaauccccgacuga

SEQ ID NO: 441909 - RNA, 20 nt, Human
uuguagaaauggguuccaua

SEQ ID NO: 441910 - RNA, 23 nt, Human
aaaaaaaaaaaaauuuacaaaag

SEQ ID NO: 441911 - RNA, 23 nt, Human
aaaaaguugagaauacaggaaua

SEQ ID NO: 441912 - RNA, 19 nt, Human
aaaaggaaaaaaguugaga

SEQ ID NO: 441913 - RNA, 24 nt, Human
aaauauugaugucauaaccaaacu

SEQ ID NO: 441914 - RNA, 20 nt, Human
aacacagugagacccugucu

SEQ ID NO: 441915 - RNA, 21 nt, Human
aacacagugagacccugucuc

SEQ ID NO: 441916 - RNA, 19 nt, Human
aagaaguacauuuggugga

SEQ ID NO: 441917 - RNA, 18 nt, Human
acagcaaaaaaaaaaaaa

SEQ ID NO: 441918 - RNA, 18 nt, Human
agaaccagcagggggaac

SEQ ID NO: 441919 - RNA, 25 nt, Human
agaaccagcagggggaaccgguacc

SEQ ID NO: 441920 - RNA, 21 nt, Human
agaaccagcagggggaacuug

SEQ ID NO: 441921 - RNA, 22 nt, Human
agaagcuccacugaggugaagg

SEQ ID NO: 441922 - RNA, 23 nt, Human
agcaaaaaaaaaaaaauuuacaa

SEQ ID NO: 441923 - RNA, 22 nt, Human
agccugggcaacacagugagac

SEQ ID NO: 441924 - RNA, 24 nt, Human
agccugggcaacacagugagaccc

SEQ ID NO: 441925 - RNA, 25 nt, Human
augaguuguagaguuuuauuuuugu

SEQ ID NO: 441926 - RNA, 21 nt, Human
auggccccguuucauaaaggu

SEQ ID NO: 441927 - RNA, 22 nt, Human
caacacagugagacccugucuc

SEQ ID NO: 441928 - RNA, 24 nt, Human
caacacagugagacccugucucua

SEQ ID NO: 441929 - RNA, 24 nt, Human
cacagugagacccugucucuaaaa

SEQ ID NO: 441930 - RNA, 21 nt, Human
cacaugaagaacccauggaca

SEQ ID NO: 441931 - RNA, 27 nt, Human
cacuacacagacuaugaacaguuagca

SEQ ID NO: 441932 - RNA, 24 nt, Human
cagcuuacccuauucuuguuauug

SEQ ID NO: 441933 - RNA, 22 nt, Human
ccugggcaacacagugagaccc

SEQ ID NO: 441934 - RNA, 30 nt, Human
gggaacuugacauuaaaaaucuagaaacag

SEQ ID NO: 441935 - RNA, 26 nt, Human
guggggaugacagcaaaaaaaaaaaa

SEQ ID NO: 441936 - RNA, 21 nt, Human
uaaaacucagaagcuccacug

SEQ ID NO: 441937 - RNA, 25 nt, Human
uacaaaaggaaaaaaguugagaaua

SEQ ID NO: 441938 - RNA, 24 nt, Human
uacauuugguggaguuugagacca

SEQ ID NO: 441939 - RNA, 20 nt, Human
uagcagaaaaagaucucgug

SEQ ID NO: 441940 - RNA, 21 nt, Human
uagcuuuuaaguaagcaaugu

SEQ ID NO: 441941 - RNA, 22 nt, Human
ucuagaaacagaauuuuaggau

SEQ ID NO: 441942 - RNA, 21 nt, Human
ucucgugacuaaaguggggau

SEQ ID NO: 441943 - RNA, 22 nt, Human
ucuuuucagagaucauagcaca

SEQ ID NO: 441944 - RNA, 22 nt, Human
ugaaggaaacauggacaugaua

SEQ ID NO: 441945 - RNA, 18 nt, Human
ugacgaucuugagcagua

SEQ ID NO: 441946 - RNA, 19 nt, Human
ugaggugaaggaaacaugg

SEQ ID NO: 441947 - RNA, 24 nt, Human
ugggcaacacagugagacccuguc

SEQ ID NO: 441948 - RNA, 26 nt, Human
uggggaugacagcaaaaaaaaaaaaa

SEQ ID NO: 441949 - RNA, 21 nt, Human
ugucucuaaaagcauuaaagc

SEQ ID NO: 441950 - RNA, 19 nt, Human
uguuaauauuagaaccagc

SEQ ID NO: 441951 - RNA, 22 nt, Human
uuacaaaaggaaaaaaguugaa

SEQ ID NO: 441952 - RNA, 23 nt, Human
uuagaaccagcagggggaacuug

SEQ ID NO: 441953 - RNA, 22 nt, Human
uucagagaucauagcacaugaa

SEQ ID NO: 441954 - RNA, 20 nt, Human
uugguggaguuugagaccag

SEQ ID NO: 441955 - RNA, 23 nt, Human
uuguucaaauucuccugaagcuu

SEQ ID NO: 441956 - RNA, 22 nt, Human
uuuuaaguaagcaauguuagaa

SEQ ID NO: 441957 - RNA, 22 nt, Human
aaaaaaccaggagucugaggcg

SEQ ID NO: 441958 - RNA, 19 nt, Human
aaaagauauaaauacugca

SEQ ID NO: 441959 - RNA, 23 nt, Human
aaaccaggagucugaggcggggg

SEQ ID NO: 441960 - RNA, 24 nt, Human
aauacguagugaauauuggcacaa

SEQ ID NO: 441961 - RNA, 22 nt, Human
aggaagagaaaagugagucuca

SEQ ID NO: 441962 - RNA, 23 nt, Human
auuacuaaaaauguuucuguaaa

SEQ ID NO: 441963 - RNA, 23 nt, Human
caagaccuacagcuccaagaaga

SEQ ID NO: 441964 - RNA, 20 nt, Human
cauacaaaagauauaaauac

SEQ ID NO: 441965 - RNA, 19 nt, Human
ccccugaaagacguugcug

SEQ ID NO: 441966 - RNA, 22 nt, Human
ccccugaaagacguugcugcuu

SEQ ID NO: 441967 - RNA, 22 nt, Human
ccucuagauagcauggaaauuu

SEQ ID NO: 441968 - RNA, 19 nt, Human
cgucggacuacgagacgau

SEQ ID NO: 441969 - RNA, 19 nt, Human
cuggaaaaaaccaggaguc

SEQ ID NO: 441970 - RNA, 22 nt, Human
gacgauggaaacggugguucaa

SEQ ID NO: 441971 - RNA, 26 nt, Human
ggaacucucccacaaccagcugucuu

SEQ ID NO: 441972 - RNA, 22 nt, Human
ucccacaaccagcugucuucuc

SEQ ID NO: 441973 - RNA, 25 nt, Human
ugaggcuuuuaaauuaagauuuagc

SEQ ID NO: 441974 - RNA, 23 nt, Human
ugaugcucuuaaguguguuucuu

SEQ ID NO: 441975 - RNA, 24 nt, Human
uggaaaaaaccaggagucugaggc

SEQ ID NO: 441976 - RNA, 18 nt, Human
uggcacaaacccuuucgu

SEQ ID NO: 441977 - RNA, 27 nt, Human
uggcacaaacccuuucguacuuaaagc

SEQ ID NO: 441978 - RNA, 22 nt, Human
ugucuucuccucucggcuucca

SEQ ID NO: 441979 - RNA, 19 nt, Human
uucaggaagagaaaaguga

SEQ ID NO: 441980 - RNA, 24 nt, Human
uucaggaagagaaaagugagucuc

SEQ ID NO: 441981 - RNA, 19 nt, Human
aaaaaccuaacaacgcuua

SEQ ID NO: 441982 - RNA, 19 nt, Human
aaacagcuacaaaauccau

SEQ ID NO: 441983 - RNA, 19 nt, Human
aagcaaagcaugaaaaaac

SEQ ID NO: 441984 - RNA, 22 nt, Human
aagcaugaaaaaacagacccaa

SEQ ID NO: 441985 - RNA, 22 nt, Human
aaguaaaaaugcuguuacaauc

SEQ ID NO: 441986 - RNA, 23 nt, Human
acagcuaccuuuuuuuuuuuuuu

SEQ ID NO: 441987 - RNA, 20 nt, Human
accuuuuuuuuuuuuuuaaa

SEQ ID NO: 441988 - RNA, 18 nt, Human
agccaaguuacucacggg

SEQ ID NO: 441989 - RNA, 21 nt, Human
aggccggcggcgcgguccugg

SEQ ID NO: 441990 - RNA, 22 nt, Human
aggcgagcggagcccccggagc

SEQ ID NO: 441991 - RNA, 23 nt, Human
auaauaauaauuaaaaagcaaag

SEQ ID NO: 441992 - RNA, 24 nt, Human
aucacagcuauccacgcuacagca

SEQ ID NO: 441993 - RNA, 22 nt, Human
caaagcaugaaaaaacagaccc

SEQ ID NO: 441994 - RNA, 20 nt, Human
cacagcuaccuuuuuuuuuu

SEQ ID NO: 441995 - RNA, 18 nt, Human
cagaaaguaaaaaugcug

SEQ ID NO: 441996 - RNA, 18 nt, Human
cgggcaggcgagcggagc

SEQ ID NO: 441997 - RNA, 19 nt, Human
cgggcaggcgagcggagcc

SEQ ID NO: 441998 - RNA, 19 nt, Human
cgguugacucaccaaucac

SEQ ID NO: 441999 - RNA, 22 nt, Human
cuaccuuuuuuuuuuuuuuaaa

SEQ ID NO: 442000 - RNA, 21 nt, Human
gaaaaaacagacccaaaaugu

SEQ ID NO: 442001 - RNA, 25 nt, Human
gaaaaaacagacccaaaauguuaag

SEQ ID NO: 442002 - RNA, 21 nt, Human
gcgggcaggcgagcggagccc

SEQ ID NO: 442003 - RNA, 23 nt, Human
ggaggccggcggcgcgguccugg

SEQ ID NO: 442004 - RNA, 25 nt, Human
ggaggccggcggcgcgguccugggu

SEQ ID NO: 442005 - RNA, 24 nt, Human
gggcggcgugcgggcaggcgagcg

SEQ ID NO: 442006 - RNA, 18 nt, Human
ggguggguguccuggggu

SEQ ID NO: 442007 - RNA, 22 nt, Human
ggugguagauuaccaagaggga

SEQ ID NO: 442008 - RNA, 25 nt, Human
guaaaaaugcuguuacaaucucagu

SEQ ID NO: 442009 - RNA, 22 nt, Human
uacagaaaguaaaaaugcuguu

SEQ ID NO: 442010 - RNA, 24 nt, Human
uacagcaagaaucuuacacaaaaa

SEQ ID NO: 442011 - RNA, 18 nt, Human
ucacagcuaccuuuuuuu

SEQ ID NO: 442012 - RNA, 24 nt, Human
uccacaagcuuggugguagauuac

SEQ ID NO: 442013 - RNA, 24 nt, Human
uccacgcuacagcaagaaucuuac

SEQ ID NO: 442014 - RNA, 18 nt, Human
uccaugagcaguccaacc

SEQ ID NO: 442015 - RNA, 22 nt, Human
uccuggguggcgggcggcgugc

SEQ ID NO: 442016 - RNA, 19 nt, Human
ucuuuggcucuuugggugg

SEQ ID NO: 442017 - RNA, 20 nt, Human
ucuuuggcucuuuggguggg

SEQ ID NO: 442018 - RNA, 25 nt, Human
ucuuuggguggguggguguccuggg

SEQ ID NO: 442019 - RNA, 20 nt, Human
uggggugaaguccacaagcu

SEQ ID NO: 442020 - RNA, 23 nt, Human
uggguggguggguguccuggggu

SEQ ID NO: 442021 - RNA, 24 nt, Human
uggguggguggguguccugggguu

SEQ ID NO: 442022 - RNA, 19 nt, Human
uggguggguguccuggggu

SEQ ID NO: 442023 - RNA, 18 nt, Human
ugucacaggaacuauucu

SEQ ID NO: 442024 - RNA, 24 nt, Human
uuccccucuuccccccucuucaaa

SEQ ID NO: 442025 - RNA, 22 nt, Human
uuggggugaaguccacaagcuu

SEQ ID NO: 442026 - RNA, 18 nt, Human
auagaagagaaaauauga

SEQ ID NO: 442027 - RNA, 22 nt, Human
auaguuuuguuaauagugccau

SEQ ID NO: 442028 - RNA, 19 nt, Human
gaucgauugcauaaacuug

SEQ ID NO: 442029 - RNA, 20 nt, Human
uaagguucacuguuaaauca

SEQ ID NO: 442030 - RNA, 21 nt, Human
uagugccaugaacaguacaaa

SEQ ID NO: 442031 - RNA, 20 nt, Human
uccacauuuaaaauaaaauc

SEQ ID NO: 442032 - RNA, 19 nt, Human
ucccaaugccaauuuuucc

SEQ ID NO: 442033 - RNA, 23 nt, Human
ugaacaguacaaauuugugagaa

SEQ ID NO: 442034 - RNA, 18 nt, Human
ugccaugaacaguacaaa

SEQ ID NO: 442035 - RNA, 20 nt, Human
ugccaugaacaguacaaauu

SEQ ID NO: 442036 - RNA, 20 nt, Human
uuccacauuuaaaauaaaau

SEQ ID NO: 442037 - RNA, 21 nt, Human
uugaugguaauuguuaaccuc

SEQ ID NO: 442038 - RNA, 19 nt, Human
uuucaaagauagaagagaa

SEQ ID NO: 442039 - RNA, 26 nt, Human
aaggugguuccacccuguguuccuag

SEQ ID NO: 442040 - RNA, 19 nt, Human
aauuuugucuuuccuguac

SEQ ID NO: 442041 - RNA, 23 nt, Human
aggcaaaguuuaccgacagcaac

SEQ ID NO: 442042 - RNA, 22 nt, Human
aggcauaauccacaacuuuaau

SEQ ID NO: 442043 - RNA, 19 nt, Human
agugaagaggcagccuaga

SEQ ID NO: 442044 - RNA, 18 nt, Human
auccgggacucuuaaggg

SEQ ID NO: 442045 - RNA, 19 nt, Human
caaguuugauuuggaaugu

SEQ ID NO: 442046 - RNA, 22 nt, Human
caucuuaacguuacugcccuua

SEQ ID NO: 442047 - RNA, 24 nt, Human
caucuuaacguuacugcccuuaac

SEQ ID NO: 442048 - RNA, 19 nt, Human
cccuguguuccuauugccc

SEQ ID NO: 442049 - RNA, 22 nt, Human
ccuguaccuuacuugugugaug

SEQ ID NO: 442050 - RNA, 21 nt, Human
gccagaguucaaggugcccug

SEQ ID NO: 442051 - RNA, 23 nt, Human
guguuccuauugcccuggcuugg

SEQ ID NO: 442052 - RNA, 23 nt, Human
uacacagcuuggccuggcugcgc

SEQ ID NO: 442053 - RNA, 21 nt, Human
uagaaaacauccaguuaccau

SEQ ID NO: 442054 - RNA, 22 nt, Human
ucauuugcaaguuugauuugga

SEQ ID NO: 442055 - RNA, 22 nt, Human
ugaacacacagaaggaaaauua

SEQ ID NO: 442056 - RNA, 20 nt, Human
ugacaaaggugguuccaccc

SEQ ID NO: 442057 - RNA, 21 nt, Human
ugcccuuaacuuacacagcuu

SEQ ID NO: 442058 - RNA, 19 nt, Human
aaaggucucuuucccugcu

SEQ ID NO: 442059 - RNA, 24 nt, Human
aacaaauaugacuucauuggucac

SEQ ID NO: 442060 - RNA, 22 nt, Human
aagggaagccuuuucugcaauc

SEQ ID NO: 442061 - RNA, 21 nt, Human
acagaaccagcagagugcuga

SEQ ID NO: 442062 - RNA, 23 nt, Human
accugcuacaccuccuugggagc

SEQ ID NO: 442063 - RNA, 24 nt, Human
acgugauaggacaguuaaaaaaaa

SEQ ID NO: 442064 - RNA, 22 nt, Human
aggaaaacacaauuggcagcug

SEQ ID NO: 442065 - RNA, 18 nt, Human
aggucucuuucccugcuc

SEQ ID NO: 442066 - RNA, 27 nt, Human
caacaagauuugaguuuuaaauacaga

SEQ ID NO: 442067 - RNA, 19 nt, Human
cacagcaccaacuucucca

SEQ ID NO: 442068 - RNA, 21 nt, Human
caccuccuugggagccaaggg

SEQ ID NO: 442069 - RNA, 22 nt, Human
caucuggguuauucuagaaguu

SEQ ID NO: 442070 - RNA, 22 nt, Human
caucuggguuauucuagaaguu

SEQ ID NO: 442071 - RNA, 22 nt, Human
ccugcagagauccaacaagauu

SEQ ID NO: 442072 - RNA, 18 nt, Human
cgcaucuggguuauucua

SEQ ID NO: 442073 - RNA, 21 nt, Human
cuucaaguucugccacucuuc

SEQ ID NO: 442074 - RNA, 21 nt, Human
gaaaauagcaacccacugcaa

SEQ ID NO: 442075 - RNA, 20 nt, Human
gaaccagcagagugcugaug

SEQ ID NO: 442076 - RNA, 20 nt, Human
gaaggcagagaguauaaaga

SEQ ID NO: 442077 - RNA, 18 nt, Human
gauagaaacuuaucacaa

SEQ ID NO: 442078 - RNA, 21 nt, Human
gcagcugacauccucuggcuc

SEQ ID NO: 442079 - RNA, 21 nt, Human
uaagccauugguauagcaacu

SEQ ID NO: 442080 - RNA, 21 nt, Human
uacacaucaucggaaaacaga

SEQ ID NO: 442081 - RNA, 25 nt, Human
uagaaaauagcaacccacugcaaga

SEQ ID NO: 442082 - RNA, 22 nt, Human
uagcaaaauauuuaaaggucuc

SEQ ID NO: 442083 - RNA, 21 nt, Human
uagcaaccuaaaaaccuuggc

SEQ ID NO: 442084 - RNA, 22 nt, Human
uauugcucacaccugcuacacc

SEQ ID NO: 442085 - RNA, 21 nt, Human
uauuuuguucccuaaaaagua

SEQ ID NO: 442086 - RNA, 24 nt, Human
ucaaacagaaccagcagagugcug

SEQ ID NO: 442087 - RNA, 28 nt, Human
ucaagaaacuuuuagugccauuuucauu

SEQ ID NO: 442088 - RNA, 18 nt, Human
ucuagaaaauagcaaccc

SEQ ID NO: 442089 - RNA, 30 nt, Human
ucucaagaaacuuuuagugccauuuucauu

SEQ ID NO: 442090 - RNA, 22 nt, Human
ugauaggacaguuaaaaaaaaa

SEQ ID NO: 442091 - RNA, 20 nt, Human
ugaugagggggcgccgcugg

SEQ ID NO: 442092 - RNA, 23 nt, Human
ugcaaacccugugugaaaggcac

SEQ ID NO: 442093 - RNA, 19 nt, Human
uggcagcugacauccucug

SEQ ID NO: 442094 - RNA, 21 nt, Human
ugggcuuuauacuuggauauu

SEQ ID NO: 442095 - RNA, 21 nt, Human
ugggugacaggagaggacgug

SEQ ID NO: 442096 - RNA, 25 nt, Human
uuaaaggucucuuucccugcucuuc

SEQ ID NO: 442097 - RNA, 24 nt, Human
uucaaaaugggugacaggagagga

SEQ ID NO: 442098 - RNA, 22 nt, Human
uuuaaaggucucuuucccugcu

SEQ ID NO: 442099 - RNA, 23 nt, Human
uuuacagaggaaguugaacuuca

SEQ ID NO: 442100 - RNA, 21 nt, Human
aacuccgcuccucugcccccc

SEQ ID NO: 442101 - RNA, 22 nt, Human
aacuccgcuccucugcccccca

SEQ ID NO: 442102 - RNA, 24 nt, Human
acauccuuaccacccggagagccu

SEQ ID NO: 442103 - RNA, 18 nt, Human
accccaccgcccgagaag

SEQ ID NO: 442104 - RNA, 27 nt, Human
acccuaaaauugcgcccgcauuuuacc

SEQ ID NO: 442105 - RNA, 22 nt, Human
agcggcagcggcagcgacagcc

SEQ ID NO: 442106 - RNA, 24 nt, Human
agcggcagcggcagcgacagcccc

SEQ ID NO: 442107 - RNA, 22 nt, Human
agcugcuggggcccccuggggu

SEQ ID NO: 442108 - RNA, 22 nt, Human
auugagcaugcgcgggagcccc

SEQ ID NO: 442109 - RNA, 24 nt, Human
caaagccagagcgccaccugcugg

SEQ ID NO: 442110 - RNA, 22 nt, Human
caagaggccuccucgcacaucc

SEQ ID NO: 442111 - RNA, 25 nt, Human
cacauccuuaccacccggagagccu

SEQ ID NO: 442112 - RNA, 21 nt, Human
caccacgggaccccgcccucc

SEQ ID NO: 442113 - RNA, 18 nt, Human
cacccggagagccucagu

SEQ ID NO: 442114 - RNA, 21 nt, Human
cacuacgcaugcguccgcacc

SEQ ID NO: 442115 - RNA, 21 nt, Human
cagcggcagcgacagccugcc

SEQ ID NO: 442116 - RNA, 19 nt, Human
cagcggcagcggcagcgac

SEQ ID NO: 442117 - RNA, 24 nt, Human
ccaaaggagaugacaauccccccc

SEQ ID NO: 442118 - RNA, 22 nt, Human
ccaccacgggaccccgcccucc

SEQ ID NO: 442119 - RNA, 25 nt, Human
ccaccccaccgcccgagaagcccac

SEQ ID NO: 442120 - RNA, 21 nt, Human
ccaccgcccgagaagcccacu

SEQ ID NO: 442121 - RNA, 19 nt, Human
cccaccccaccgcccgaga

SEQ ID NO: 442122 - RNA, 24 nt, Human
cccaccgcccgagaagcccacuac

SEQ ID NO: 442123 - RNA, 18 nt, Human
ccgagcagggguuggugc

SEQ ID NO: 442124 - RNA, 20 nt, Human
ccgcaccccacgggcgcccc

SEQ ID NO: 442125 - RNA, 22 nt, Human
ccucccccuaaccugguacccc

SEQ ID NO: 442126 - RNA, 21 nt, Human
ccucgcacauccuuaccaccc

SEQ ID NO: 442127 - RNA, 22 nt, Human
ccugugucaagacccuaagagc

SEQ ID NO: 442128 - RNA, 22 nt, Human
cgccuccaccacgggaccccgc

SEQ ID NO: 442129 - RNA, 18 nt, Human
cggagagacagcaugaua

SEQ ID NO: 442130 - RNA, 25 nt, Human
cguccugugucaagacccuaagagc

SEQ ID NO: 442131 - RNA, 28 nt, Human
cguuuccucccccuaaccugguacccca

SEQ ID NO: 442132 - RNA, 19 nt, Human
cuacgcaugcguccgcacc

SEQ ID NO: 442133 - RNA, 19 nt, Human
cuccgcuccucugcccccc

SEQ ID NO: 442134 - RNA, 18 nt, Human
cugggguuugggacacag

SEQ ID NO: 442135 - RNA, 20 nt, Human
gaacccuccgcuguuucuuc

SEQ ID NO: 442136 - RNA, 18 nt, Human
gaagggggcuggucccca

SEQ ID NO: 442137 - RNA, 20 nt, Human
gcccaccccaccgcccgaga

SEQ ID NO: 442138 - RNA, 21 nt, Human
gcccaccccaccgcccgagaa

SEQ ID NO: 442139 - RNA, 19 nt, Human
gcccacuacgcaugcgucc

SEQ ID NO: 442140 - RNA, 21 nt, Human
gccuccaccacgggaccccgc

SEQ ID NO: 442141 - RNA, 24 nt, Human
gccugccuaccccaggacuccagc

SEQ ID NO: 442142 - RNA, 21 nt, Human
gcgagcuuccucccccgauuu

SEQ ID NO: 442143 - RNA, 23 nt, Human
gcuggggcccccugggguuuggg

SEQ ID NO: 442144 - RNA, 25 nt, Human
gcugguccccaguuuuugcagugcc

SEQ ID NO: 442145 - RNA, 20 nt, Human
guacggggccgagcaggggu

SEQ ID NO: 442146 - RNA, 21 nt, Human
uaaccugguaccccaucccuu

SEQ ID NO: 442147 - RNA, 22 nt, Human
uaccccaggacuccagccucac

SEQ ID NO: 442148 - RNA, 21 nt, Human
uagcucagccauugcuuuuuu

SEQ ID NO: 442149 - RNA, 21 nt, Human
ucaagacccuaagagcccggg

SEQ ID NO: 442150 - RNA, 20 nt, Human
uccaaauuccgcgcccaccc

SEQ ID NO: 442151 - RNA, 21 nt, Human
uccaaauuccgcgcccacccc

SEQ ID NO: 442152 - RNA, 19 nt, Human
uccaccacgggaccccgcc

SEQ ID NO: 442153 - RNA, 20 nt, Human
uccaucucaggcagcggcag

SEQ ID NO: 442154 - RNA, 24 nt, Human
uccccgccuccaccacgggacccc

SEQ ID NO: 442155 - RNA, 22 nt, Human
ucccuuagcucagccauugcuu

SEQ ID NO: 442156 - RNA, 21 nt, Human
uccgcaccccacgggcgcccc

SEQ ID NO: 442157 - RNA, 21 nt, Human
uccgcgcccaccccaccgccc

SEQ ID NO: 442158 - RNA, 22 nt, Human
uccucccccuaaccugguaccc

SEQ ID NO: 442159 - RNA, 19 nt, Human
uccucgcacauccuuacca

SEQ ID NO: 442160 - RNA, 25 nt, Human
uccucugaccucgggccucaggcuu

SEQ ID NO: 442161 - RNA, 23 nt, Human
uccugggccgacugcagagccuu

SEQ ID NO: 442162 - RNA, 18 nt, Human
ucgaagcugcuggggccc

SEQ ID NO: 442163 - RNA, 18 nt, Human
ugacuggcuucugccuca

SEQ ID NO: 442164 - RNA, 20 nt, Human
ugcgguccuucccucucccc

SEQ ID NO: 442165 - RNA, 18 nt, Human
ugcuggggcccccugggg

SEQ ID NO: 442166 - RNA, 20 nt, Human
ugcuggggcccccugggguu

SEQ ID NO: 442167 - RNA, 22 nt, Human
ugggucuccaaauuccgcgccc

SEQ ID NO: 442168 - RNA, 18 nt, Human
ugucaagacccuaagagc

SEQ ID NO: 442169 - RNA, 18 nt, Human
uucccgaagugggucucc

SEQ ID NO: 442170 - RNA, 24 nt, Human
uucucaggcuuuauugggcuuuau

SEQ ID NO: 442171 - RNA, 24 nt, Human
uuggugcuccgugcgguccuuccc

SEQ ID NO: 442172 - RNA, 22 nt, Human
uuuccaucucaggcagcggcag

SEQ ID NO: 442173 - RNA, 22 nt, Human
aaaacaagcacuggcuccaagc

SEQ ID NO: 442174 - RNA, 22 nt, Human
aaaacaagcacuggcuccaagc

SEQ ID NO: 442175 - RNA, 25 nt, Human
aaaauucaguacuguuucuggacaa

SEQ ID NO: 442176 - RNA, 25 nt, Human
aaaauucaguacuguuucuggacaa

SEQ ID NO: 442177 - RNA, 23 nt, Human
aaaccacaauaguaaaaucuacc

SEQ ID NO: 442178 - RNA, 22 nt, Human
aaacuggcaagagcugggaagg

SEQ ID NO: 442179 - RNA, 22 nt, Human
aaacuggcaagagcugggaagg

SEQ ID NO: 442180 - RNA, 24 nt, Human
aaagcguugagauuacagguguga

SEQ ID NO: 442181 - RNA, 21 nt, Human
aaaggucaaagguugccagcu

SEQ ID NO: 442182 - RNA, 24 nt, Human
aaauacuggcaauuacuucguacu

SEQ ID NO: 442183 - RNA, 18 nt, Human
aaccacaauaguaaaauc

SEQ ID NO: 442184 - RNA, 20 nt, Human
aagaacaucuaacaucucag

SEQ ID NO: 442185 - RNA, 20 nt, Human
aagagcaucuucacuuacaa

SEQ ID NO: 442186 - RNA, 21 nt, Human
aagagcugggaagguggucuc

SEQ ID NO: 442187 - RNA, 21 nt, Human
aagagcugggaagguggucuc

SEQ ID NO: 442188 - RNA, 21 nt, Human
aagaggcacacuccacaggca

SEQ ID NO: 442189 - RNA, 24 nt, Human
aagcagaagaggcaaacucaaaug

SEQ ID NO: 442190 - RNA, 26 nt, Human
aagcguugagauuacaggugugagcc

SEQ ID NO: 442191 - RNA, 23 nt, Human
aagcuccugagcauuuuuaaucc

SEQ ID NO: 442192 - RNA, 20 nt, Human
aaggucaaagguugccagcu

SEQ ID NO: 442193 - RNA, 20 nt, Human
aauuugcugauuuugggcuu

SEQ ID NO: 442194 - RNA, 23 nt, Human
acacgguuucauuguguuggcca

SEQ ID NO: 442195 - RNA, 24 nt, Human
acacgguuucauuguguuggccag

SEQ ID NO: 442196 - RNA, 24 nt, Human
acacuaggccgagagcuccacauu

SEQ ID NO: 442197 - RNA, 24 nt, Human
acacuaggccgagagcuccacauu

SEQ ID NO: 442198 - RNA, 23 nt, Human
acagcuggcgugauacuggugcc

SEQ ID NO: 442199 - RNA, 23 nt, Human
acagcuggcgugauacuggugcc

SEQ ID NO: 442200 - RNA, 19 nt, Human
acaguugauccagaaguug

SEQ ID NO: 442201 - RNA, 19 nt, Human
acaguugauccagaaguug

SEQ ID NO: 442202 - RNA, 22 nt, Human
acaugacaugcuuaagaucucc

SEQ ID NO: 442203 - RNA, 23 nt, Human
accaaacgagcuaaugagcaaua

SEQ ID NO: 442204 - RNA, 19 nt, Human
accugccgcugccuucgcc

SEQ ID NO: 442205 - RNA, 18 nt, Human
acgaccccuccugucagg

SEQ ID NO: 442206 - RNA, 22 nt, Human
acgguuucauuguguuggccag

SEQ ID NO: 442207 - RNA, 23 nt, Human
acuggucugaggaaucgugucuu

SEQ ID NO: 442208 - RNA, 23 nt, Human
acuggucugaggaaucgugucuu

SEQ ID NO: 442209 - RNA, 18 nt, Human
acugguucaguugugaca

SEQ ID NO: 442210 - RNA, 18 nt, Human
acugguucaguugugaca

SEQ ID NO: 442211 - RNA, 23 nt, Human
agacaauucccuacuccaggaag

SEQ ID NO: 442212 - RNA, 23 nt, Human
agacaauucccuacuccaggaag

SEQ ID NO: 442213 - RNA, 18 nt, Human
agacaggaagcggugggg

SEQ ID NO: 442214 - RNA, 19 nt, Human
agacaggaagcggugggga

SEQ ID NO: 442215 - RNA, 19 nt, Human
agagaaugacccaccuaca

SEQ ID NO: 442216 - RNA, 26 nt, Human
agagaccaggcaaguaaagugaacaa

SEQ ID NO: 442217 - RNA, 18 nt, Human
agauccccggcccccacu

SEQ ID NO: 442218 - RNA, 23 nt, Human
agauuacaggugugagccaccgc

SEQ ID NO: 442219 - RNA, 19 nt, Human
agcauucuucacggcugca

SEQ ID NO: 442220 - RNA, 19 nt, Human
agcauucuucacggcugca

SEQ ID NO: 442221 - RNA, 27 nt, Human
agccguaggcagguccuguuuugugaa

SEQ ID NO: 442222 - RNA, 27 nt, Human
agccguaggcagguccuguuuugugaa

SEQ ID NO: 442223 - RNA, 19 nt, Human
agcuuguaagugugcucac

SEQ ID NO: 442224 - RNA, 24 nt, Human
aggcacacuccacaggcaagcucc

SEQ ID NO: 442225 - RNA, 18 nt, Human
aggcaggacgaggccagg

SEQ ID NO: 442226 - RNA, 18 nt, Human
aggcaggacgaggccagg

SEQ ID NO: 442227 - RNA, 21 nt, Human
aggcaggacgaggccaggagg

SEQ ID NO: 442228 - RNA, 21 nt, Human
aggcaggacgaggccaggagg

SEQ ID NO: 442229 - RNA, 22 nt, Human
aggcauucacaaacacauuccu

SEQ ID NO: 442230 - RNA, 19 nt, Human
agggaacaugagcggagcu

SEQ ID NO: 442231 - RNA, 23 nt, Human
aggucaggcaggacgaggccagg

SEQ ID NO: 442232 - RNA, 23 nt, Human
aggucaggcaggacgaggccagg

SEQ ID NO: 442233 - RNA, 20 nt, Human
aguacgguggugugaucucg

SEQ ID NO: 442234 - RNA, 24 nt, Human
aguacgguggugugaucucggcuc

SEQ ID NO: 442235 - RNA, 18 nt, Human
aguagcugggacuacagg

SEQ ID NO: 442236 - RNA, 24 nt, Human
aguucuuccuuagaucaagaaagc

SEQ ID NO: 442237 - RNA, 24 nt, Human
aguucuuccuuagaucaagaaagc

SEQ ID NO: 442238 - RNA, 23 nt, Human
auacuggugcccuccauaggcca

SEQ ID NO: 442239 - RNA, 23 nt, Human
auacuggugcccuccauaggcca

SEQ ID NO: 442240 - RNA, 21 nt, Human
aucaacgaccccuccugucag

SEQ ID NO: 442241 - RNA, 19 nt, Human
auccgaacauucguugggg

SEQ ID NO: 442242 - RNA, 18 nt, Human
aucuucagaguccuccuu

SEQ ID NO: 442243 - RNA, 20 nt, Human
augcuuuuuuaggauguucu

SEQ ID NO: 442244 - RNA, 24 nt, Human
auguaucuaucccauaaauauaca

SEQ ID NO: 442245 - RNA, 24 nt, Human
auguaucuaucccauaaauauaca

SEQ ID NO: 442246 - RNA, 19 nt, Human
auucacaaacacauuccuc

SEQ ID NO: 442247 - RNA, 19 nt, Human
caaagacaauucccuacuc

SEQ ID NO: 442248 - RNA, 19 nt, Human
caaagacaauucccuacuc

SEQ ID NO: 442249 - RNA, 24 nt, Human
caaagcguugagauuacaggugug

SEQ ID NO: 442250 - RNA, 20 nt, Human
caagaggcacacuccacagg

SEQ ID NO: 442251 - RNA, 22 nt, Human
caagcaauucuccugccucagc

SEQ ID NO: 442252 - RNA, 26 nt, Human
cacagaaaaaaaaaagucaaugcuuc

SEQ ID NO: 442253 - RNA, 22 nt, Human
cacagauacugcaaagucaggc

SEQ ID NO: 442254 - RNA, 24 nt, Human
cacagcuggcgugauacuggugcc

SEQ ID NO: 442255 - RNA, 18 nt, Human
cacaggauuugggccucu

SEQ ID NO: 442256 - RNA, 22 nt, Human
cacauucaagaggcacacucca

SEQ ID NO: 442257 - RNA, 19 nt, Human
caccaauggaagggagauc

SEQ ID NO: 442258 - RNA, 21 nt, Human
caccuaguccagacccuuccg

SEQ ID NO: 442259 - RNA, 24 nt, Human
cacgguuucauuguguuggccagg

SEQ ID NO: 442260 - RNA, 19 nt, Human
cacuuugcaaccuuuggau

SEQ ID NO: 442261 - RNA, 24 nt, Human
cagaaaaaaaaaagucaaugcuuc

SEQ ID NO: 442262 - RNA, 21 nt, Human
cagaagaggcaaacucaaaug

SEQ ID NO: 442263 - RNA, 27 nt, Human
cagaagaggcaaacucaaaugccuuca

SEQ ID NO: 442264 - RNA, 18 nt, Human
cagaccggaguacggugg

SEQ ID NO: 442265 - RNA, 18 nt, Human
cagaggaguuguucagag

SEQ ID NO: 442266 - RNA, 18 nt, Human
cagaggaguuguucagag

SEQ ID NO: 442267 - RNA, 20 nt, Human
cagcccacgacccucuucuu

SEQ ID NO: 442268 - RNA, 20 nt, Human
cagccuccugaguagcuggg

SEQ ID NO: 442269 - RNA, 18 nt, Human
cagcuggcgugauacugg

SEQ ID NO: 442270 - RNA, 20 nt, Human
cagcuggcgugauacuggug

SEQ ID NO: 442271 - RNA, 18 nt, Human
caggaggaugcuggccac

SEQ ID NO: 442272 - RNA, 19 nt, Human
cagggaacaugagcggagc

SEQ ID NO: 442273 - RNA, 21 nt, Human
caugccuggcuaauuuuugua

SEQ ID NO: 442274 - RNA, 19 nt, Human
cauuguguuggccaggcug

SEQ ID NO: 442275 - RNA, 24 nt, Human
cauuguguuggccaggcuggucuc

SEQ ID NO: 442276 - RNA, 23 nt, Human
ccaaagagcuaucagacaugaca

SEQ ID NO: 442277 - RNA, 23 nt, Human
ccaaagcguugagauuacaggug

SEQ ID NO: 442278 - RNA, 24 nt, Human
ccaaagcguugagauuacaggugu

SEQ ID NO: 442279 - RNA, 19 nt, Human
ccaaguggguaaaaucugc

SEQ ID NO: 442280 - RNA, 19 nt, Human
ccaggcaaguaaagugaac

SEQ ID NO: 442281 - RNA, 22 nt, Human
ccauaggccagcuugaaacugu

SEQ ID NO: 442282 - RNA, 22 nt, Human
ccauaggccagcuugaaacugu

SEQ ID NO: 442283 - RNA, 26 nt, Human
ccgccuccuggguucaagcaauucuu

SEQ ID NO: 442284 - RNA, 19 nt, Human
ccuccgccuccuggguuca

SEQ ID NO: 442285 - RNA, 24 nt, Human
ccuccuggguucaagcaauucucc

SEQ ID NO: 442286 - RNA, 23 nt, Human
ccugaguagcugggacuacaggu

SEQ ID NO: 442287 - RNA, 24 nt, Human
ccugaguagcugggacuacaggug

SEQ ID NO: 442288 - RNA, 21 nt, Human
ccugcagcaggaggaugcugg

SEQ ID NO: 442289 - RNA, 23 nt, Human
ccugccucagccuccugaguagc

SEQ ID NO: 442290 - RNA, 24 nt, Human
ccugccucagccuccugaguagcu

SEQ ID NO: 442291 - RNA, 22 nt, Human
ccugccugcuacuguccagggg

SEQ ID NO: 442292 - RNA, 22 nt, Human
ccugccugcuacuguccagggg

SEQ ID NO: 442293 - RNA, 23 nt, Human
ccuggguucaagcaauucuccug

SEQ ID NO: 442294 - RNA, 22 nt, Human
cgacacaguugauccagaaguu

SEQ ID NO: 442295 - RNA, 22 nt, Human
cgacacaguugauccagaaguu

SEQ ID NO: 442296 - RNA, 21 nt, Human
cgcugagacaggaagcggugg

SEQ ID NO: 442297 - RNA, 24 nt, Human
cggaguacgguggugugaucucgg

SEQ ID NO: 442298 - RNA, 24 nt, Human
cggcagaacagguuugcagcgaag

SEQ ID NO: 442299 - RNA, 24 nt, Human
cggcagaacagguuugcagcgaag

SEQ ID NO: 442300 - RNA, 22 nt, Human
cggcugcagagugcccaggcau

SEQ ID NO: 442301 - RNA, 22 nt, Human
cggcugcagagugcccaggcau

SEQ ID NO: 442302 - RNA, 26 nt, Human
cuaacaucucaguggaaaaaaaccac

SEQ ID NO: 442303 - RNA, 21 nt, Human
cucaaguuaucugccugccuc

SEQ ID NO: 442304 - RNA, 24 nt, Human
cucagccuccugaguagcugggac

SEQ ID NO: 442305 - RNA, 19 nt, Human
cuccaaagcuggagaagga

SEQ ID NO: 442306 - RNA, 21 nt, Human
cuccuggguucaagcaauucu

SEQ ID NO: 442307 - RNA, 19 nt, Human
cucuuuuuauucauuucag

SEQ ID NO: 442308 - RNA, 19 nt, Human
cucuuuuuauucauuucag

SEQ ID NO: 442309 - RNA, 23 nt, Human
cugaaguccugcagacuggccgu

SEQ ID NO: 442310 - RNA, 23 nt, Human
cugaaguccugcagacuggccgu

SEQ ID NO: 442311 - RNA, 20 nt, Human
cugcagcagcaaguucuucc

SEQ ID NO: 442312 - RNA, 20 nt, Human
cugcagcagcaaguucuucc

SEQ ID NO: 442313 - RNA, 23 nt, Human
cugcaguggcuuuuauccccagc

SEQ ID NO: 442314 - RNA, 20 nt, Human
cugccaccaauggaagggag

SEQ ID NO: 442315 - RNA, 20 nt, Human
cuggccuuuuaacacagcac

SEQ ID NO: 442316 - RNA, 21 nt, Human
cuggcuccaagcagucgccca

SEQ ID NO: 442317 - RNA, 21 nt, Human
cuggcuccaagcagucgccca

SEQ ID NO: 442318 - RNA, 24 nt, Human
cuuagaucaagaaagccgacagcg

SEQ ID NO: 442319 - RNA, 24 nt, Human
cuuagaucaagaaagccgacagcg

SEQ ID NO: 442320 - RNA, 23 nt, Human
cuucacaggacaguaaguguccu

SEQ ID NO: 442321 - RNA, 23 nt, Human
cuucacaggacaguaaguguccu

SEQ ID NO: 442322 - RNA, 23 nt, Human
cuuuacacuaggccgagagcucc

SEQ ID NO: 442323 - RNA, 23 nt, Human
cuuuacacuaggccgagagcucc

SEQ ID NO: 442324 - RNA, 18 nt, Human
gaaaaguuggaaauccag

SEQ ID NO: 442325 - RNA, 18 nt, Human
gaacaucuaacaucucag

SEQ ID NO: 442326 - RNA, 22 nt, Human
gaacuacuacugauuccauuua

SEQ ID NO: 442327 - RNA, 21 nt, Human
gaagagcaucuucacuuacaa

SEQ ID NO: 442328 - RNA, 25 nt, Human
gacagauucuugcucugucgcucag

SEQ ID NO: 442329 - RNA, 20 nt, Human
gaccugccgcugccuucgcc

SEQ ID NO: 442330 - RNA, 21 nt, Human
gacuacaggugcacaccauca

SEQ ID NO: 442331 - RNA, 19 nt, Human
gagagagagaaugacccac

SEQ ID NO: 442332 - RNA, 20 nt, Human
gagagugcaucuucagaguc

SEQ ID NO: 442333 - RNA, 21 nt, Human
gagaugucauggugauguuuu

SEQ ID NO: 442334 - RNA, 21 nt, Human
gagaugucauggugauguuuu

SEQ ID NO: 442335 - RNA, 26 nt, Human
gaguagcugggacuacaggugcacac

SEQ ID NO: 442336 - RNA, 19 nt, Human
gaguuguguggcuuuucca

SEQ ID NO: 442337 - RNA, 19 nt, Human
gaucuccucccacaucagc

SEQ ID NO: 442338 - RNA, 22 nt, Human
gaugaaauagagcuauuacuga

SEQ ID NO: 442339 - RNA, 18 nt, Human
gauuacaggugugagcca

SEQ ID NO: 442340 - RNA, 20 nt, Human
gauuacaggugugagccacc

SEQ ID NO: 442341 - RNA, 20 nt, Human
gauuuguaaccgaguuccuu

SEQ ID NO: 442342 - RNA, 22 nt, Human
gcaaccuccgccuccuggguuc

SEQ ID NO: 442343 - RNA, 22 nt, Human
gcagaaucuucuccauaaaaag

SEQ ID NO: 442344 - RNA, 22 nt, Human
gcagaaucuucuccauaaaaag

SEQ ID NO: 442345 - RNA, 18 nt, Human
gcagagucuucuuuggug

SEQ ID NO: 442346 - RNA, 19 nt, Human
gccgcugccuucgccgccg

SEQ ID NO: 442347 - RNA, 21 nt, Human
gcuuccaaaagcagcauauuu

SEQ ID NO: 442348 - RNA, 21 nt, Human
gcuucucuucuuuccggcucc

SEQ ID NO: 442349 - RNA, 24 nt, Human
ggacuacaggugcacaccaucaug

SEQ ID NO: 442350 - RNA, 23 nt, Human
ggagaugggcagaaucuucucca

SEQ ID NO: 442351 - RNA, 23 nt, Human
ggagaugggcagaaucuucucca

SEQ ID NO: 442352 - RNA, 21 nt, Human
ggcauucacaaacacauuccu

SEQ ID NO: 442353 - RNA, 26 nt, Human
ggccacuaacuguugguaaauccaaa

SEQ ID NO: 442354 - RNA, 24 nt, Human
ggcuggucucgaacuccugaucuc

SEQ ID NO: 442355 - RNA, 23 nt, Human
gggaaaucuuuauuauagcuauc

SEQ ID NO: 442356 - RNA, 22 nt, Human
ggucuuuguacuugucucggau

SEQ ID NO: 442357 - RNA, 19 nt, Human
ggugcucuucggcuccagc

SEQ ID NO: 442358 - RNA, 21 nt, Human
gguuucauuguguuggccagg

SEQ ID NO: 442359 - RNA, 24 nt, Human
gucccgcaacgguaaucuauuuuu

SEQ ID NO: 442360 - RNA, 24 nt, Human
gucccgcaacgguaaucuauuuuu

SEQ ID NO: 442361 - RNA, 21 nt, Human
gucucuguuuucauauuccuu

SEQ ID NO: 442362 - RNA, 21 nt, Human
gucucuguuuucauauuccuu

SEQ ID NO: 442363 - RNA, 22 nt, Human
gugagccaccgcgcccagccca

SEQ ID NO: 442364 - RNA, 19 nt, Human
gugcaaccuccgccuccug

SEQ ID NO: 442365 - RNA, 19 nt, Human
gugccacgugcaguuuggg

SEQ ID NO: 442366 - RNA, 19 nt, Human
guggacagaagugaaggga

SEQ ID NO: 442367 - RNA, 25 nt, Human
guggggugucacagaaaaaaaaaag

SEQ ID NO: 442368 - RNA, 25 nt, Human
uaaagugaacaacuuaaguaggucc

SEQ ID NO: 442369 - RNA, 19 nt, Human
uaacaucucaguggaaaaa

SEQ ID NO: 442370 - RNA, 22 nt, Human
uaauuuuuguauuuuuaguaga

SEQ ID NO: 442371 - RNA, 24 nt, Human
uacaggugugagccaccgcgccca

SEQ ID NO: 442372 - RNA, 21 nt, Human
uacccuguacacuucaacaac

SEQ ID NO: 442373 - RNA, 19 nt, Human
uacuguagcuuccaaaagc

SEQ ID NO: 442374 - RNA, 21 nt, Human
uacuucacaggacaguaagug

SEQ ID NO: 442375 - RNA, 21 nt, Human
uacuucacaggacaguaagug

SEQ ID NO: 442376 - RNA, 19 nt, Human
uacuuuggagagagauguc

SEQ ID NO: 442377 - RNA, 19 nt, Human
uacuuuggagagagauguc

SEQ ID NO: 442378 - RNA, 22 nt, Human
uagagaacugguucaguuguga

SEQ ID NO: 442379 - RNA, 22 nt, Human
uagagaacugguucaguuguga

SEQ ID NO: 442380 - RNA, 23 nt, Human
uagcuuccaaaagcagcauauuu

SEQ ID NO: 442381 - RNA, 19 nt, Human
uagcuuguaagugugcuca

SEQ ID NO: 442382 - RNA, 18 nt, Human
uauuacugaaagccauaa

SEQ ID NO: 442383 - RNA, 24 nt, Human
uauuggucccugucaccccguggg

SEQ ID NO: 442384 - RNA, 24 nt, Human
uauuggucccugucaccccguggg

SEQ ID NO: 442385 - RNA, 19 nt, Human
ucaacaccuaguccagacc

SEQ ID NO: 442386 - RNA, 19 nt, Human
ucaagcaauucuccugccu

SEQ ID NO: 442387 - RNA, 19 nt, Human
ucaauccaguugaaaucaa

SEQ ID NO: 442388 - RNA, 23 nt, Human
ucacaguuucaauacugcagcag

SEQ ID NO: 442389 - RNA, 23 nt, Human
ucacaguuucaauacugcagcag

SEQ ID NO: 442390 - RNA, 18 nt, Human
ucacugcacacugcagug

SEQ ID NO: 442391 - RNA, 22 nt, Human
ucacuggucugaggaaucgugu

SEQ ID NO: 442392 - RNA, 22 nt, Human
ucacuggucugaggaaucgugu

SEQ ID NO: 442393 - RNA, 21 nt, Human
ucagacauuaacaaacuaaau

SEQ ID NO: 442394 - RNA, 21 nt, Human
ucagacauuaacaaacuaaau

SEQ ID NO: 442395 - RNA, 21 nt, Human
ucagaccggaguacgguggug

SEQ ID NO: 442396 - RNA, 19 nt, Human
ucagagcaggucaggcagg

SEQ ID NO: 442397 - RNA, 19 nt, Human
ucagagcaggucaggcagg

SEQ ID NO: 442398 - RNA, 20 nt, Human
ucagaguccuccuugccaac

SEQ ID NO: 442399 - RNA, 21 nt, Human
ucagcaaaaucaucaucacuu

SEQ ID NO: 442400 - RNA, 23 nt, Human
ucagccuccugaguagcugggac

SEQ ID NO: 442401 - RNA, 21 nt, Human
ucagggaagcgaacugugcag

SEQ ID NO: 442402 - RNA, 21 nt, Human
ucagggaagcgaacugugcag

SEQ ID NO: 442403 - RNA, 18 nt, Human
ucaggucuuuguacuugu

SEQ ID NO: 442404 - RNA, 18 nt, Human
ucagugcaaccuccgccu

SEQ ID NO: 442405 - RNA, 24 nt, Human
ucagugcaaccuccgccuccuggg

SEQ ID NO: 442406 - RNA, 27 nt, Human
ucagugcaaccuccgccuccuggguuc

SEQ ID NO: 442407 - RNA, 21 nt, Human
ucaguugugacaaccaagugg

SEQ ID NO: 442408 - RNA, 21 nt, Human
ucaguugugacaaccaagugg

SEQ ID NO: 442409 - RNA, 25 nt, Human
ucauaugcauaucucucauuuuucu

SEQ ID NO: 442410 - RNA, 18 nt, Human
ucauuccacugccuuucc

SEQ ID NO: 442411 - RNA, 18 nt, Human
ucauuccacugccuuucc

SEQ ID NO: 442412 - RNA, 22 nt, Human
ucauuguguuggccaggcuggu

SEQ ID NO: 442413 - RNA, 21 nt, Human
uccaaaagcagcauauuuuaa

SEQ ID NO: 442414 - RNA, 24 nt, Human
uccaaagagcuaucagacaugaca

SEQ ID NO: 442415 - RNA, 19 nt, Human
uccacacgcuugguuaccc

SEQ ID NO: 442416 - RNA, 24 nt, Human
uccacacuuuaucgauguccuuca

SEQ ID NO: 442417 - RNA, 20 nt, Human
ucccaaagcguugagauuac

SEQ ID NO: 442418 - RNA, 23 nt, Human
ucccaaagcguugagauuacagg

SEQ ID NO: 442419 - RNA, 23 nt, Human
ucccugucaccccgugggguguc

SEQ ID NO: 442420 - RNA, 23 nt, Human
ucccugucaccccgugggguguc

SEQ ID NO: 442421 - RNA, 24 nt, Human
uccgccuccuggguucaagcaauu

SEQ ID NO: 442422 - RNA, 24 nt, Human
uccugaguagcugggacuacaggu

SEQ ID NO: 442423 - RNA, 21 nt, Human
uccuggguucaagcaauucuc

SEQ ID NO: 442424 - RNA, 24 nt, Human
uccuggguucaagcaauucuccug

SEQ ID NO: 442425 - RNA, 24 nt, Human
uccuugaacagaaaggucggugcc

SEQ ID NO: 442426 - RNA, 25 nt, Human
ucgaauccauuuaucuggccuuuua

SEQ ID NO: 442427 - RNA, 24 nt, Human
ucuccugccucagccuccugagua

SEQ ID NO: 442428 - RNA, 21 nt, Human
ucucgaacuccugaucucaag

SEQ ID NO: 442429 - RNA, 23 nt, Human
ucucugaucuaucacaagucuuc

SEQ ID NO: 442430 - RNA, 19 nt, Human
ucugaaaggcugcuccaaa

SEQ ID NO: 442431 - RNA, 18 nt, Human
ucugaccagucauagcuu

SEQ ID NO: 442432 - RNA, 18 nt, Human
ucugaccagucauagcuu

SEQ ID NO: 442433 - RNA, 21 nt, Human
ucugaguugaaugcccggcuc

SEQ ID NO: 442434 - RNA, 20 nt, Human
ucugccugccuccccuccca

SEQ ID NO: 442435 - RNA, 21 nt, Human
ucuggugugaguguggcgagu

SEQ ID NO: 442436 - RNA, 18 nt, Human
ucuucagaugcuuauguc

SEQ ID NO: 442437 - RNA, 24 nt, Human
ucuuccauaaugcccagugcagaa

SEQ ID NO: 442438 - RNA, 21 nt, Human
ucuugauacuuuacacuaggc

SEQ ID NO: 442439 - RNA, 21 nt, Human
ucuugauacuuuacacuaggc

SEQ ID NO: 442440 - RNA, 18 nt, Human
ucuugcucugucgcucag

SEQ ID NO: 442441 - RNA, 18 nt, Human
ucuugcucugucgcucag

SEQ ID NO: 442442 - RNA, 19 nt, Human
ucuugcucugucgcucaga

SEQ ID NO: 442443 - RNA, 20 nt, Human
ucuugcucugucgcucagac

SEQ ID NO: 442444 - RNA, 24 nt, Human
ucuugcucugucgcucagaccgga

SEQ ID NO: 442445 - RNA, 18 nt, Human
ucuugucugagaaaacuc

SEQ ID NO: 442446 - RNA, 18 nt, Human
ucuugucugagaaaacuc

SEQ ID NO: 442447 - RNA, 23 nt, Human
ucuuuggaaauuuggagagaggc

SEQ ID NO: 442448 - RNA, 23 nt, Human
ucuuuggaaauuuggagagaggc

SEQ ID NO: 442449 - RNA, 21 nt, Human
ucuuuggugugucugaaagcc

SEQ ID NO: 442450 - RNA, 21 nt, Human
ugaaagccauaaaaucugcaa

SEQ ID NO: 442451 - RNA, 23 nt, Human
ugaaauagagcuauuacugaaag

SEQ ID NO: 442452 - RNA, 18 nt, Human
ugaagggaaggaguagag

SEQ ID NO: 442453 - RNA, 18 nt, Human
ugaagggaaggaguagag

SEQ ID NO: 442454 - RNA, 18 nt, Human
ugaauuacuucugugcaa

SEQ ID NO: 442455 - RNA, 18 nt, Human
ugacccugauuucaaaga

SEQ ID NO: 442456 - RNA, 18 nt, Human
ugagacaggaagcggugg

SEQ ID NO: 442457 - RNA, 25 nt, Human
ugagauuaaagcagaagaggcaaac

SEQ ID NO: 442458 - RNA, 19 nt, Human
ugagauuacaggugugagc

SEQ ID NO: 442459 - RNA, 21 nt, Human
ugagauuacaggugugagcca

SEQ ID NO: 442460 - RNA, 22 nt, Human
ugagauuacaggugugagccac

SEQ ID NO: 442461 - RNA, 23 nt, Human
ugagauuacaggugugagccacc

SEQ ID NO: 442462 - RNA, 24 nt, Human
ugagauuacaggugugagccaccg

SEQ ID NO: 442463 - RNA, 22 nt, Human
ugagggggauccacuuccugcu

SEQ ID NO: 442464 - RNA, 21 nt, Human
ugaguguggcgagugacauga

SEQ ID NO: 442465 - RNA, 20 nt, Human
ugaguugaaugcccggcucc

SEQ ID NO: 442466 - RNA, 22 nt, Human
ugaguugaaugcccggcuccuc

SEQ ID NO: 442467 - RNA, 21 nt, Human
ugcaaacagaacuacuacuga

SEQ ID NO: 442468 - RNA, 20 nt, Human
ugcaaccuccgccuccuggg

SEQ ID NO: 442469 - RNA, 19 nt, Human
ugcagagucuucuuuggug

SEQ ID NO: 442470 - RNA, 21 nt, Human
ugcagagucuucuuuggugug

SEQ ID NO: 442471 - RNA, 26 nt, Human
ugcauaucucucauuuuucuccaccu

SEQ ID NO: 442472 - RNA, 18 nt, Human
ugcaugcggcagaacagg

SEQ ID NO: 442473 - RNA, 18 nt, Human
ugcaugcggcagaacagg

SEQ ID NO: 442474 - RNA, 19 nt, Human
ugccacgugcaguuugggu

SEQ ID NO: 442475 - RNA, 19 nt, Human
ugccacgugcaguuugggu

SEQ ID NO: 442476 - RNA, 24 nt, Human
ugccucagccuccugaguagcugg

SEQ ID NO: 442477 - RNA, 23 nt, Human
ugccuucgccgccgccaccuuau

SEQ ID NO: 442478 - RNA, 19 nt, Human
ugcucugucgcucagaccg

SEQ ID NO: 442479 - RNA, 22 nt, Human
ugcugccaccaauggaagggag

SEQ ID NO: 442480 - RNA, 21 nt, Human
ugcuucacagaggaguuguuc

SEQ ID NO: 442481 - RNA, 21 nt, Human
ugcuucacagaggaguuguuc

SEQ ID NO: 442482 - RNA, 24 nt, Human
ugcuucacagaggaguuguucaga

SEQ ID NO: 442483 - RNA, 24 nt, Human
ugcuucacagaggaguuguucaga

SEQ ID NO: 442484 - RNA, 22 nt, Human
uggcaagagcugggaagguggu

SEQ ID NO: 442485 - RNA, 22 nt, Human
uggcaagagcugggaagguggu

SEQ ID NO: 442486 - RNA, 24 nt, Human
uggccaggcuggucucgaacuccu

SEQ ID NO: 442487 - RNA, 20 nt, Human
ugggaagguggucucuggaa

SEQ ID NO: 442488 - RNA, 20 nt, Human
ugggaagguggucucuggaa

SEQ ID NO: 442489 - RNA, 21 nt, Human
ugggacuacaggugcacacca

SEQ ID NO: 442490 - RNA, 22 nt, Human
ugggacuacaggugcacaccau

SEQ ID NO: 442491 - RNA, 24 nt, Human
ugggacuacaggugcacaccauca

SEQ ID NO: 442492 - RNA, 18 nt, Human
uggggugucacagaaaaa

SEQ ID NO: 442493 - RNA, 23 nt, Human
uggggugucacagaaaaaaaaaa

SEQ ID NO: 442494 - RNA, 24 nt, Human
uggggugucacagaaaaaaaaaag

SEQ ID NO: 442495 - RNA, 24 nt, Human
uggggugucacagaaaaaaaaaag

SEQ ID NO: 442496 - RNA, 22 nt, Human
ugggucaaugugauaugcaggc

SEQ ID NO: 442497 - RNA, 21 nt, Human
uggguucaagcaauucuccug

SEQ ID NO: 442498 - RNA, 23 nt, Human
uggguucaagcaauucuccugcc

SEQ ID NO: 442499 - RNA, 18 nt, Human
ugguccauggagaagaug

SEQ ID NO: 442500 - RNA, 21 nt, Human
uggugccacgugcaguuuggg

SEQ ID NO: 442501 - RNA, 21 nt, Human
uguaagugugcucacugcaaa

SEQ ID NO: 442502 - RNA, 24 nt, Human
uguaagugugcucacugcaaaauu

SEQ ID NO: 442503 - RNA, 23 nt, Human
ugucaguucuucacaguuucaau

SEQ ID NO: 442504 - RNA, 24 nt, Human
ugucgcucagaccggaguacggug

SEQ ID NO: 442505 - RNA, 20 nt, Human
ugucucggaugacgggcagg

SEQ ID NO: 442506 - RNA, 23 nt, Human
ugucuuuaaaacuggcaagagcu

SEQ ID NO: 442507 - RNA, 23 nt, Human
ugucuuuaaaacuggcaagagcu

SEQ ID NO: 442508 - RNA, 24 nt, Human
uguguuggccaggcuggucucgaa

SEQ ID NO: 442509 - RNA, 19 nt, Human
uguuggccaggcuggucuc

SEQ ID NO: 442510 - RNA, 20 nt, Human
uguuggccaggcuggucucg

SEQ ID NO: 442511 - RNA, 24 nt, Human
uuaaaagacauuaucugugcucag

SEQ ID NO: 442512 - RNA, 26 nt, Human
uuaaauacuggcaauuacuucguacu

SEQ ID NO: 442513 - RNA, 22 nt, Human
uuaagaacaucuaacaucucag

SEQ ID NO: 442514 - RNA, 20 nt, Human
uuagaggaacaggacuggcu

SEQ ID NO: 442515 - RNA, 20 nt, Human
uuaguagauacacgguuuca

SEQ ID NO: 442516 - RNA, 24 nt, Human
uuaguagauacacgguuucauugu

SEQ ID NO: 442517 - RNA, 21 nt, Human
uucaagcaauucuccugccuc

SEQ ID NO: 442518 - RNA, 24 nt, Human
uucaagcaauucuccugccucagc

SEQ ID NO: 442519 - RNA, 21 nt, Human
uucacagaggaguuguucaga

SEQ ID NO: 442520 - RNA, 21 nt, Human
uucacagaggaguuguucaga

SEQ ID NO: 442521 - RNA, 19 nt, Human
uucacaggacaguaagugu

SEQ ID NO: 442522 - RNA, 19 nt, Human
uucacaggacaguaagugu

SEQ ID NO: 442523 - RNA, 21 nt, Human
uucauaugcauaucucucauu

SEQ ID NO: 442524 - RNA, 18 nt, Human
uuccagagaaaguugucu

SEQ ID NO: 442525 - RNA, 24 nt, Human
uuccggcuccucgaguccacauuc

SEQ ID NO: 442526 - RNA, 23 nt, Human
uuccuuuugcucacuggucugag

SEQ ID NO: 442527 - RNA, 23 nt, Human
uuccuuuugcucacuggucugag

SEQ ID NO: 442528 - RNA, 19 nt, Human
uucuucugcaggcuucucu

SEQ ID NO: 442529 - RNA, 18 nt, Human
uugaaugcccggcuccuc

SEQ ID NO: 442530 - RNA, 18 nt, Human
uugcucacuggucugagg

SEQ ID NO: 442531 - RNA, 18 nt, Human
uugcucacuggucugagg

SEQ ID NO: 442532 - RNA, 19 nt, Human
uugcucacuggucugaggg

SEQ ID NO: 442533 - RNA, 19 nt, Human
uugcucacuggucugaggg

SEQ ID NO: 442534 - RNA, 24 nt, Human
uuucauuguguuggccaggcuggu

SEQ ID NO: 442535 - RNA, 23 nt, Human
uuucauuuugcuuugugaagugg

SEQ ID NO: 442536 - RNA, 23 nt, Human
uuucauuuugcuuugugaagugg

SEQ ID NO: 442537 - RNA, 19 nt, Human
uuuccugcgaaaccagaga

SEQ ID NO: 442538 - RNA, 18 nt, Human
uuucugggaagcuacaug

SEQ ID NO: 442539 - RNA, 18 nt, Human
uuugcugauuuugggcuu

SEQ ID NO: 442540 - RNA, 22 nt, Human
uuuggagagaggccacugcaaa

SEQ ID NO: 442541 - RNA, 22 nt, Human
uuuggagagaggccacugcaaa

SEQ ID NO: 442542 - RNA, 23 nt, Human
uuugugaaaucuuuauagucucu

SEQ ID NO: 442543 - RNA, 23 nt, Human
uuugugaaaucuuuauagucucu

SEQ ID NO: 442544 - RNA, 21 nt, Human
uuuuaggauguucuucugcag

SEQ ID NO: 442545 - RNA, 23 nt, Human
uuuucagguuuuucucacagaua

SEQ ID NO: 442546 - RNA, 23 nt, Human
uuuucagguuuuucucacagaua

SEQ ID NO: 442547 - RNA, 18 nt, Human
uuuuguauuuuuaguaga

SEQ ID NO: 442548 - RNA, 24 nt, Human
uuuuuaguagauacacgguuucau

SEQ ID NO: 442549 - RNA, 18 nt, Human
uuuuuguauuuuuaguag

SEQ ID NO: 442550 - RNA, 18 nt, Human
uuuuuuuuuuuuuuuuug

SEQ ID NO: 442551 - RNA, 20 nt, Human
aaacugccaaguccaggacc

SEQ ID NO: 442552 - RNA, 24 nt, Human
aagaaggcacucgcgagggggacu

SEQ ID NO: 442553 - RNA, 20 nt, Human
aagcagagaguuucucuccc

SEQ ID NO: 442554 - RNA, 19 nt, Human
aagggcgagggaagcagag

SEQ ID NO: 442555 - RNA, 22 nt, Human
acacagcccgcaccugcccucc

SEQ ID NO: 442556 - RNA, 18 nt, Human
agaaggcacucgcgaggg

SEQ ID NO: 442557 - RNA, 21 nt, Human
agcaagaaacugccaagucca

SEQ ID NO: 442558 - RNA, 19 nt, Human
aggaagaggugaggaaggg

SEQ ID NO: 442559 - RNA, 28 nt, Human
aggaagccccguguucaaggugaccuca

SEQ ID NO: 442560 - RNA, 21 nt, Human
aggcacucgcgagggggacuu

SEQ ID NO: 442561 - RNA, 24 nt, Human
agggggauggggaaagcuccaagg

SEQ ID NO: 442562 - RNA, 25 nt, Human
agggggauggggaaagcuccaaggg

SEQ ID NO: 442563 - RNA, 18 nt, Human
cacacagacacacacagc

SEQ ID NO: 442564 - RNA, 25 nt, Human
cacacagacacacacagcccgcacc

SEQ ID NO: 442565 - RNA, 24 nt, Human
cacacagcccgcaccugcccuccc

SEQ ID NO: 442566 - RNA, 22 nt, Human
cacagcccgcaccugcccuccc

SEQ ID NO: 442567 - RNA, 26 nt, Human
cagcccgcaccugcccucccucuaaa

SEQ ID NO: 442568 - RNA, 23 nt, Human
cauauaaaaucagggggaugggg

SEQ ID NO: 442569 - RNA, 23 nt, Human
ccucuaaaaucugcauccggggg

SEQ ID NO: 442570 - RNA, 24 nt, Human
ccugcccucccucuaaaaucugca

SEQ ID NO: 442571 - RNA, 19 nt, Human
cgcaacacccgcuaaggca

SEQ ID NO: 442572 - RNA, 21 nt, Human
cgcaacacccgcuaaggcagg

SEQ ID NO: 442573 - RNA, 18 nt, Human
gaagaggugaggaagggg

SEQ ID NO: 442574 - RNA, 18 nt, Human
gaggaaggggcgggugcu

SEQ ID NO: 442575 - RNA, 21 nt, Human
gaggugaggaaggggcgggug

SEQ ID NO: 442576 - RNA, 24 nt, Human
gcaccugcccucccucuaaaaucu

SEQ ID NO: 442577 - RNA, 23 nt, Human
gcgauggcggcgccgcuuccuuc

SEQ ID NO: 442578 - RNA, 22 nt, Human
gcugggagcaagaaacugccaa

SEQ ID NO: 442579 - RNA, 23 nt, Human
uccaggaccugcccucacacaga

SEQ ID NO: 442580 - RNA, 18 nt, Human
uccuaaaauucagaggag

SEQ ID NO: 442581 - RNA, 24 nt, Human
ucgcgagggggacuucaagccccu

SEQ ID NO: 442582 - RNA, 31 nt, Human
ugggcucagcggcugugaaggagggaccccc

SEQ ID NO: 442583 - RNA, 28 nt, Human
aaaaaaaaaaaagguauguaauuuccaa

SEQ ID NO: 442584 - RNA, 23 nt, Human
aaaacaguaauacugacaagaca

SEQ ID NO: 442585 - RNA, 19 nt, Human
aaagcuuaauccagcccag

SEQ ID NO: 442586 - RNA, 21 nt, Human
aaauucuuccuucagcagcuc

SEQ ID NO: 442587 - RNA, 22 nt, Human
acaauccuguuucucaucccag

SEQ ID NO: 442588 - RNA, 20 nt, Human
accacaaaaaauucaucuca

SEQ ID NO: 442589 - RNA, 23 nt, Human
agaaauucuuccuucagcagcuc

SEQ ID NO: 442590 - RNA, 21 nt, Human
agcauuuauugauugaaaaua

SEQ ID NO: 442591 - RNA, 21 nt, Human
agcggcaccggaggcagcgcg

SEQ ID NO: 442592 - RNA, 23 nt, Human
agggaggagccggggcugcggcg

SEQ ID NO: 442593 - RNA, 20 nt, Human
aguaauacugacaagacauc

SEQ ID NO: 442594 - RNA, 25 nt, Human
aguuuccauucauuugauaugugac

SEQ ID NO: 442595 - RNA, 24 nt, Human
auaagacagugcucacguggccug

SEQ ID NO: 442596 - RNA, 19 nt, Human
augaagacauguuuagaua

SEQ ID NO: 442597 - RNA, 22 nt, Human
augaagggagugaccaucuaca

SEQ ID NO: 442598 - RNA, 23 nt, Human
cagaccccgccccgggggccgga

SEQ ID NO: 442599 - RNA, 18 nt, Human
cagauuaagagaaacuga

SEQ ID NO: 442600 - RNA, 23 nt, Human
cagcacuucuaaguggagggaag

SEQ ID NO: 442601 - RNA, 19 nt, Human
cagcauuuauugauugaaa

SEQ ID NO: 442602 - RNA, 22 nt, Human
caguguuuguacguugaacguu

SEQ ID NO: 442603 - RNA, 23 nt, Human
cauagcuuuaaaaaauauagagc

SEQ ID NO: 442604 - RNA, 19 nt, Human
cauucgugcuuuaaacaau

SEQ ID NO: 442605 - RNA, 21 nt, Human
cauucucacuuuauuuugggg

SEQ ID NO: 442606 - RNA, 20 nt, Human
ccccgggggccggacgaggg

SEQ ID NO: 442607 - RNA, 23 nt, Human
ccggcggcggcggcggcggcgaa

SEQ ID NO: 442608 - RNA, 19 nt, Human
ccuuaucacuuaauuaacu

SEQ ID NO: 442609 - RNA, 20 nt, Human
ccuuuaaaaaaaaaaaaaaa

SEQ ID NO: 442610 - RNA, 23 nt, Human
cggcggcggcggcggcggcgaag

SEQ ID NO: 442611 - RNA, 21 nt, Human
cggcucagcggucgccagcgg

SEQ ID NO: 442612 - RNA, 21 nt, Human
cggggcugcggcgagcugagg

SEQ ID NO: 442613 - RNA, 23 nt, Human
cggggcugcggcgagcugagggg

SEQ ID NO: 442614 - RNA, 19 nt, Human
cugcaccauucuaauucau

SEQ ID NO: 442615 - RNA, 24 nt, Human
cugcauaguuugacaaacuuuugg

SEQ ID NO: 442616 - RNA, 19 nt, Human
gaagagaagccguggugcu

SEQ ID NO: 442617 - RNA, 32 nt, Human
gagcuuggccggcggcggcggcggcggcgacg

SEQ ID NO: 442618 - RNA, 20 nt, Human
gaggaagagaagccguggug

SEQ ID NO: 442619 - RNA, 21 nt, Human
gcuguggggaggacacccggc

SEQ ID NO: 442620 - RNA, 19 nt, Human
ggagcuuggccggcggcgg

SEQ ID NO: 442621 - RNA, 24 nt, Human
ggcaggcuuaggcggagaggggag

SEQ ID NO: 442622 - RNA, 20 nt, Human
ggccgcgggcgcggcggagc

SEQ ID NO: 442623 - RNA, 21 nt, Human
ggccggcggcggcggcggcgg

SEQ ID NO: 442624 - RNA, 18 nt, Human
ggcgcggcggagcuuggc

SEQ ID NO: 442625 - RNA, 21 nt, Human
ggcggccgcgggccgcgggcg

SEQ ID NO: 442626 - RNA, 20 nt, Human
ggcggcggcggcgaagggga

SEQ ID NO: 442627 - RNA, 24 nt, Human
ggcggcggcggcgaaggggaagcc

SEQ ID NO: 442628 - RNA, 19 nt, Human
ggcuuaggcggagagggga

SEQ ID NO: 442629 - RNA, 19 nt, Human
gggccggacgagggaggag

SEQ ID NO: 442630 - RNA, 18 nt, Human
gggcgcggcggagcuugg

SEQ ID NO: 442631 - RNA, 19 nt, Human
gggcgcggcggagcuuggc

SEQ ID NO: 442632 - RNA, 26 nt, Human
guggugcuguggggaggacacccggc

SEQ ID NO: 442633 - RNA, 24 nt, Human
uaaaguucccuuuuaaaaaaaaau

SEQ ID NO: 442634 - RNA, 31 nt, Human
uaacuaggcagugccauggaaagaaaggaaa

SEQ ID NO: 442635 - RNA, 19 nt, Human
uaagagaaacugaccuuua

SEQ ID NO: 442636 - RNA, 22 nt, Human
uaagugaaaauauaaaccauga

SEQ ID NO: 442637 - RNA, 23 nt, Human
uaagugaaaauauaaaccaugaa

SEQ ID NO: 442638 - RNA, 25 nt, Human
uaagugaaaauauaaaccaugaaga

SEQ ID NO: 442639 - RNA, 25 nt, Human
uagcaaaacaguaauacugacaaga

SEQ ID NO: 442640 - RNA, 22 nt, Human
uccuuuaaaaaaaaaaaaaaaa

SEQ ID NO: 442641 - RNA, 18 nt, Human
ugaaaaaaaaaugagaaa

SEQ ID NO: 442642 - RNA, 19 nt, Human
ugaaaugccacaagaaguc

SEQ ID NO: 442643 - RNA, 21 nt, Human
ugaaaugccacaagaagucau

SEQ ID NO: 442644 - RNA, 18 nt, Human
ugaaaugcugcacuaguc

SEQ ID NO: 442645 - RNA, 19 nt, Human
ugacaugucaauucccuuu

SEQ ID NO: 442646 - RNA, 23 nt, Human
ugagcuaacauggacaugaaggg

SEQ ID NO: 442647 - RNA, 21 nt, Human
ugauuuuacauguauaugaug

SEQ ID NO: 442648 - RNA, 19 nt, Human
ugccacaagaagucaucaa

SEQ ID NO: 442649 - RNA, 22 nt, Human
ugccugauuuuacauguauaug

SEQ ID NO: 442650 - RNA, 25 nt, Human
ugccuuggccuuaaaaauuaugugc

SEQ ID NO: 442651 - RNA, 22 nt, Human
uggaaagagauaaaaacacacu

SEQ ID NO: 442652 - RNA, 19 nt, Human
uggccggcggcggcggcgg

SEQ ID NO: 442653 - RNA, 22 nt, Human
ugugaagagagcaacacguuuu

SEQ ID NO: 442654 - RNA, 21 nt, Human
ugugccauuuucauaugugca

SEQ ID NO: 442655 - RNA, 22 nt, Human
uguggggaggacacccggcugg

SEQ ID NO: 442656 - RNA, 24 nt, Human
uguggggaggacacccggcuggca

SEQ ID NO: 442657 - RNA, 22 nt, Human
ugugugugcuuauaacaaccac

SEQ ID NO: 442658 - RNA, 22 nt, Human
uuuaaaaaaaaaaaaaaaaggu

SEQ ID NO: 442659 - RNA, 25 nt, Human
uuuaaaaaaaaaaaaaaaagguaug

SEQ ID NO: 442660 - RNA, 25 nt, Human
aaaaaaaaaaagcacuagcagaaag

SEQ ID NO: 442661 - RNA, 21 nt, Human
aaaaaaaagcacuagcagaaa

SEQ ID NO: 442662 - RNA, 23 nt, Human
aaaaacagaaaaacauaauuaaa

SEQ ID NO: 442663 - RNA, 22 nt, Human
aaaaagcacuagcagaaagcaa

SEQ ID NO: 442664 - RNA, 24 nt, Human
aaaacagaaaaacauaauuaaacc

SEQ ID NO: 442665 - RNA, 21 nt, Human
aaaccaauucauuauagagga

SEQ ID NO: 442666 - RNA, 19 nt, Human
aagaugcccauuucuaaaa

SEQ ID NO: 442667 - RNA, 19 nt, Human
aagcgagggcgagaggcga

SEQ ID NO: 442668 - RNA, 24 nt, Human
aaguaugguggcacacaccuguag

SEQ ID NO: 442669 - RNA, 20 nt, Human
acagagugagaucccauccc

SEQ ID NO: 442670 - RNA, 23 nt, Human
acagagugagaucccaucccauu

SEQ ID NO: 442671 - RNA, 24 nt, Human
accaaguucuucauaauucuccuu

SEQ ID NO: 442672 - RNA, 26 nt, Human
accaaguucuucauaauucuccuuuu

SEQ ID NO: 442673 - RNA, 24 nt, Human
acuccagccugggugacagaguga

SEQ ID NO: 442674 - RNA, 18 nt, Human
acugcacuccagccuggg

SEQ ID NO: 442675 - RNA, 18 nt, Human
acugcacuccagccuggg

SEQ ID NO: 442676 - RNA, 19 nt, Human
acugcacuccagccugggu

SEQ ID NO: 442677 - RNA, 21 nt, Human
acugcacuccagccuggguga

SEQ ID NO: 442678 - RNA, 22 nt, Human
acugcacuccagccugggugac

SEQ ID NO: 442679 - RNA, 24 nt, Human
acugcacuccagccugggugacag

SEQ ID NO: 442680 - RNA, 26 nt, Human
acugcacuccagccugggugacagag

SEQ ID NO: 442681 - RNA, 26 nt, Human
agaaaaaaaaaaaagcacuagcagaa

SEQ ID NO: 442682 - RNA, 21 nt, Human
agaaaaacauaauuaaaccaa

SEQ ID NO: 442683 - RNA, 21 nt, Human
agaaagcaaagaggacuugaa

SEQ ID NO: 442684 - RNA, 24 nt, Human
agaaagcaaagaggacuugaauaa

SEQ ID NO: 442685 - RNA, 18 nt, Human
agaccauggcugcuuccc

SEQ ID NO: 442686 - RNA, 21 nt, Human
agcagaaagcaaagaggacuu

SEQ ID NO: 442687 - RNA, 23 nt, Human
agccugggugacagagugagauc

SEQ ID NO: 442688 - RNA, 24 nt, Human
aucgugcuacugcacuccagccug

SEQ ID NO: 442689 - RNA, 21 nt, Human
auucuccuuuuucuuuucuuu

SEQ ID NO: 442690 - RNA, 25 nt, Human
auucuccuuuuucuuuucuuuuuuu

SEQ ID NO: 442691 - RNA, 19 nt, Human
auugcuugagcccaggagg

SEQ ID NO: 442692 - RNA, 19 nt, Human
cacaccuguagccccagcu

SEQ ID NO: 442693 - RNA, 18 nt, Human
caccuguagccccagcua

SEQ ID NO: 442694 - RNA, 24 nt, Human
caccuguagccccagcuacucagg

SEQ ID NO: 442695 - RNA, 22 nt, Human
cacuccagccugggugacagag

SEQ ID NO: 442696 - RNA, 22 nt, Human
cacuccagccugggugacagag

SEQ ID NO: 442697 - RNA, 24 nt, Human
cacuccagccugggugacagagug

SEQ ID NO: 442698 - RNA, 23 nt, Human
cagcugguuuaauuuuauuaaua

SEQ ID NO: 442699 - RNA, 18 nt, Human
cauacuaaaaaaugcaaa

SEQ ID NO: 442700 - RNA, 19 nt, Human
cccacaaugcccuggcacu

SEQ ID NO: 442701 - RNA, 22 nt, Human
cccacaaugcccuggcacugaa

SEQ ID NO: 442702 - RNA, 19 nt, Human
cccccacaaaaaauaaaag

SEQ ID NO: 442703 - RNA, 22 nt, Human
cccguaauugauuucauucauu

SEQ ID NO: 442704 - RNA, 19 nt, Human
ccgccgccucccccgccuc

SEQ ID NO: 442705 - RNA, 20 nt, Human
ccgccuugcgagcaaggagc

SEQ ID NO: 442706 - RNA, 19 nt, Human
ccugggugacagagugaga

SEQ ID NO: 442707 - RNA, 21 nt, Human
ccuguagccccagcuacucag

SEQ ID NO: 442708 - RNA, 18 nt, Human
cgagaggcgagcgcugga

SEQ ID NO: 442709 - RNA, 21 nt, Human
cggugagaggauugcuugagc

SEQ ID NO: 442710 - RNA, 21 nt, Human
cuacugcacuccagccugggu

SEQ ID NO: 442711 - RNA, 24 nt, Human
cuacugcacuccagccugggugac

SEQ ID NO: 442712 - RNA, 22 nt, Human
cuggagaagcgagggcgagagg

SEQ ID NO: 442713 - RNA, 27 nt, Human
cuucccacaaugcccuggcacugaaag

SEQ ID NO: 442714 - RNA, 20 nt, Human
gaaguuuauuuuauuaaauu

SEQ ID NO: 442715 - RNA, 21 nt, Human
gagccggugcggcugacaggu

SEQ ID NO: 442716 - RNA, 21 nt, Human
gaggcugcggugagaggauug

SEQ ID NO: 442717 - RNA, 23 nt, Human
gcacuccagccugggugacagag

SEQ ID NO: 442718 - RNA, 24 nt, Human
gcccaggagguccagguugcagug

SEQ ID NO: 442719 - RNA, 19 nt, Human
gcuacugcacuccagccug

SEQ ID NO: 442720 - RNA, 24 nt, Human
gcuacugcacuccagccuggguga

SEQ ID NO: 442721 - RNA, 22 nt, Human
gcugcuaucgugcuacugcacu

SEQ ID NO: 442722 - RNA, 19 nt, Human
ggacagauuaucagaaaua

SEQ ID NO: 442723 - RNA, 22 nt, Human
ggagccggugcggcugacaggu

SEQ ID NO: 442724 - RNA, 19 nt, Human
ggaggcugcggugagagga

SEQ ID NO: 442725 - RNA, 22 nt, Human
ggaggcugcggugagaggauug

SEQ ID NO: 442726 - RNA, 23 nt, Human
ggaggcugcggugagaggauugc

SEQ ID NO: 442727 - RNA, 22 nt, Human
ggugagaggauugcuugagccc

SEQ ID NO: 442728 - RNA, 21 nt, Human
uaaaaaaugcaaaugaccuaa

SEQ ID NO: 442729 - RNA, 24 nt, Human
uaaaaagaugcccauuucuaaaaa

SEQ ID NO: 442730 - RNA, 21 nt, Human
uacugcacuccagccugggug

SEQ ID NO: 442731 - RNA, 23 nt, Human
uacugcacuccagccugggugac

SEQ ID NO: 442732 - RNA, 24 nt, Human
uacugcacuccagccugggugaca

SEQ ID NO: 442733 - RNA, 25 nt, Human
uacugcacuccagccugggugacag

SEQ ID NO: 442734 - RNA, 23 nt, Human
uagaccauggcugcuucccacaa

SEQ ID NO: 442735 - RNA, 24 nt, Human
uauguaaaagauuuaaauuuucuu

SEQ ID NO: 442736 - RNA, 21 nt, Human
uccagaaauaaaaagaugccc

SEQ ID NO: 442737 - RNA, 23 nt, Human
uccagccugggugacagagugag

SEQ ID NO: 442738 - RNA, 24 nt, Human
uccagccugggugacagagugaga

SEQ ID NO: 442739 - RNA, 19 nt, Human
ucccucaguucuuuauucu

SEQ ID NO: 442740 - RNA, 23 nt, Human
ucgugcuacugcacuccagccug

SEQ ID NO: 442741 - RNA, 19 nt, Human
ucuaaaaacagaaaaacau

SEQ ID NO: 442742 - RNA, 19 nt, Human
ucuccuuuuucuuuucuuu

SEQ ID NO: 442743 - RNA, 24 nt, Human
ugaauauuauaauuagucauaguc

SEQ ID NO: 442744 - RNA, 20 nt, Human
ugagcccaggagguccaggu

SEQ ID NO: 442745 - RNA, 18 nt, Human
ugcccauuucuaaaaaca

SEQ ID NO: 442746 - RNA, 21 nt, Human
ugcgagcaaggagcgcuggag

SEQ ID NO: 442747 - RNA, 24 nt, Human
ugcuaucgugcuacugcacuccag

SEQ ID NO: 442748 - RNA, 25 nt, Human
ugcuauuauaaugagauuagguguu

SEQ ID NO: 442749 - RNA, 22 nt, Human
uggcacacaccuguagccccag

SEQ ID NO: 442750 - RNA, 23 nt, Human
uggcugcuucccacaaugcccug

SEQ ID NO: 442751 - RNA, 23 nt, Human
uggcugggccgccgccucccccg

SEQ ID NO: 442752 - RNA, 23 nt, Human
ugguggcacacaccuguagcccc

SEQ ID NO: 442753 - RNA, 19 nt, Human
uguacaaauuguuuuauua

SEQ ID NO: 442754 - RNA, 19 nt, Human
uguagccccagcuacucag

SEQ ID NO: 442755 - RNA, 20 nt, Human
uguuuuauucauuuauuuau

SEQ ID NO: 442756 - RNA, 19 nt, Human
uucaagaaaaaaaaaaaag

SEQ ID NO: 442757 - RNA, 25 nt, Human
uucaagaaaaaaaaaaaagcacuag

SEQ ID NO: 442758 - RNA, 23 nt, Human
uucaauuuuacugcauucauuuc

SEQ ID NO: 442759 - RNA, 21 nt, Human
uuccagaaauaaaaagaugcc

SEQ ID NO: 442760 - RNA, 22 nt, Human
uucuuuuuuuuuuuuuuuagau

SEQ ID NO: 442761 - RNA, 22 nt, Human
uugcagugcgcugcuaucgugc

SEQ ID NO: 442762 - RNA, 24 nt, Human
uugcuugagcccaggagguccagg

SEQ ID NO: 442763 - RNA, 23 nt, Human
uuuucaauuuuacugcauucauu

SEQ ID NO: 442764 - RNA, 21 nt, Human
uuuuuuuuuuuuagauggagu

SEQ ID NO: 442765 - RNA, 21 nt, Human
uuuuuuuuuuuuuuagaugga

SEQ ID NO: 442766 - RNA, 22 nt, Human
aaaagcaggcgaccccagagga

SEQ ID NO: 442767 - RNA, 22 nt, Human
aacacagaacagcccagguccc

SEQ ID NO: 442768 - RNA, 18 nt, Human
aacccaccccguccacgg

SEQ ID NO: 442769 - RNA, 23 nt, Human
aacccaccccguccacgguucug

SEQ ID NO: 442770 - RNA, 23 nt, Human
aagugccccucacguggugccca

SEQ ID NO: 442771 - RNA, 19 nt, Human
acagcggcccuuccuuccc

SEQ ID NO: 442772 - RNA, 19 nt, Human
accaagugccccucacgug

SEQ ID NO: 442773 - RNA, 19 nt, Human
accaccccaaacccaagcc

SEQ ID NO: 442774 - RNA, 21 nt, Human
accaccccaaacccaagccga

SEQ ID NO: 442775 - RNA, 18 nt, Human
acugacaauggacaacgc

SEQ ID NO: 442776 - RNA, 19 nt, Human
acugcaaccucucuuuggc

SEQ ID NO: 442777 - RNA, 22 nt, Human
acugcaaccucucuuuggcguc

SEQ ID NO: 442778 - RNA, 18 nt, Human
acuguggguucugggaga

SEQ ID NO: 442779 - RNA, 18 nt, Human
acuguggguucugggaga

SEQ ID NO: 442780 - RNA, 18 nt, Human
agacccagucaccagccc

SEQ ID NO: 442781 - RNA, 20 nt, Human
agccuggcuggcgcguggcc

SEQ ID NO: 442782 - RNA, 23 nt, Human
agcggagucuccuugcccugccu

SEQ ID NO: 442783 - RNA, 24 nt, Human
aggaccuuugggucaaaagcaggc

SEQ ID NO: 442784 - RNA, 19 nt, Human
aggcccuggcccaggacag

SEQ ID NO: 442785 - RNA, 20 nt, Human
agggcacagacccagguggg

SEQ ID NO: 442786 - RNA, 20 nt, Human
agggcacagacccagguggg

SEQ ID NO: 442787 - RNA, 18 nt, Human
caacgcaacaaaugaccu

SEQ ID NO: 442788 - RNA, 18 nt, Human
caacgcaacaaaugaccu

SEQ ID NO: 442789 - RNA, 22 nt, Human
cacagacccaggugggggaguc

SEQ ID NO: 442790 - RNA, 22 nt, Human
cacauucaaggacucggccccc

SEQ ID NO: 442791 - RNA, 22 nt, Human
cacauucaaggacucggccccc

SEQ ID NO: 442792 - RNA, 19 nt, Human
cacggcggacaacauagag

SEQ ID NO: 442793 - RNA, 18 nt, Human
cacuucugcugaccagga

SEQ ID NO: 442794 - RNA, 20 nt, Human
ccaaacccaagccgagaugc

SEQ ID NO: 442795 - RNA, 18 nt, Human
ccaaagagaaugggaaga

SEQ ID NO: 442796 - RNA, 18 nt, Human
ccaaagagaaugggaaga

SEQ ID NO: 442797 - RNA, 19 nt, Human
cccaaacccaagccgagau

SEQ ID NO: 442798 - RNA, 23 nt, Human
cccacgagcacacugacaaugga

SEQ ID NO: 442799 - RNA, 19 nt, Human
cccacuguggguucuggga

SEQ ID NO: 442800 - RNA, 19 nt, Human
cccacuguggguucuggga

SEQ ID NO: 442801 - RNA, 19 nt, Human
cccaggacaggagccccug

SEQ ID NO: 442802 - RNA, 22 nt, Human
cccaggacaggagccccugaag

SEQ ID NO: 442803 - RNA, 19 nt, Human
ccccgcccuguccaccaag

SEQ ID NO: 442804 - RNA, 19 nt, Human
cccugcccacagccuggcu

SEQ ID NO: 442805 - RNA, 22 nt, Human
cccuguccaccaagugccccuc

SEQ ID NO: 442806 - RNA, 19 nt, Human
cccuuccuuccccuccccc

SEQ ID NO: 442807 - RNA, 19 nt, Human
cccuuccuuccccuccccc

SEQ ID NO: 442808 - RNA, 19 nt, Human
ccgcuuucccacugugggu

SEQ ID NO: 442809 - RNA, 19 nt, Human
ccguccacgguucugacug

SEQ ID NO: 442810 - RNA, 22 nt, Human
ccucaacccaccccguccacgg

SEQ ID NO: 442811 - RNA, 25 nt, Human
ccugccuggugggggcucugccugu

SEQ ID NO: 442812 - RNA, 19 nt, Human
ccuggccccgcccugccca

SEQ ID NO: 442813 - RNA, 23 nt, Human
ccuggccccgcccugcccacagc

SEQ ID NO: 442814 - RNA, 21 nt, Human
cgcaacaaaugaccucggaug

SEQ ID NO: 442815 - RNA, 21 nt, Human
cgcaacaaaugaccucggaug

SEQ ID NO: 442816 - RNA, 25 nt, Human
cgcccuguccaccaagugccccuca

SEQ ID NO: 442817 - RNA, 18 nt, Human
cggcccccagcgcggggc

SEQ ID NO: 442818 - RNA, 18 nt, Human
cggcccccagcgcggggc

SEQ ID NO: 442819 - RNA, 22 nt, Human
cggcccuuccuuccccuccccc

SEQ ID NO: 442820 - RNA, 22 nt, Human
cggcccuuccuuccccuccccc

SEQ ID NO: 442821 - RNA, 21 nt, Human
cuccuugcccugccugguggg

SEQ ID NO: 442822 - RNA, 20 nt, Human
cugaagccacauucaaggac

SEQ ID NO: 442823 - RNA, 20 nt, Human
cugaagccacauucaaggac

SEQ ID NO: 442824 - RNA, 18 nt, Human
cugcaugggauucuguaa

SEQ ID NO: 442825 - RNA, 20 nt, Human
cugcuuccaggcccugccug

SEQ ID NO: 442826 - RNA, 21 nt, Human
cuggcccaggacaggagcccc

SEQ ID NO: 442827 - RNA, 22 nt, Human
cuuggcgacagcggcccuuccu

SEQ ID NO: 442828 - RNA, 18 nt, Human
gaagaagggucaguccug

SEQ ID NO: 442829 - RNA, 18 nt, Human
gaccaggaagacgggugg

SEQ ID NO: 442830 - RNA, 21 nt, Human
gacugaggagaggcgagacac

SEQ ID NO: 442831 - RNA, 18 nt, Human
gaggaggccacgucagcc

SEQ ID NO: 442832 - RNA, 23 nt, Human
gcacagacccaggugggggaguc

SEQ ID NO: 442833 - RNA, 19 nt, Human
gcccuuccuuccccucccc

SEQ ID NO: 442834 - RNA, 19 nt, Human
gcccuuccuuccccucccc

SEQ ID NO: 442835 - RNA, 18 nt, Human
gccugggaucccaagacc

SEQ ID NO: 442836 - RNA, 25 nt, Human
ggaccaccccaaacccaagccgaga

SEQ ID NO: 442837 - RNA, 19 nt, Human
ggagucuccuugcccugcc

SEQ ID NO: 442838 - RNA, 18 nt, Human
ggccccgcccugcccaca

SEQ ID NO: 442839 - RNA, 19 nt, Human
ggcccuggcccaggacagg

SEQ ID NO: 442840 - RNA, 22 nt, Human
ggccucaacccaccccguccac

SEQ ID NO: 442841 - RNA, 19 nt, Human
gggcacagacccagguggg

SEQ ID NO: 442842 - RNA, 19 nt, Human
gggcacagacccagguggg

SEQ ID NO: 442843 - RNA, 23 nt, Human
gggguggugcggggcucgcaggc

SEQ ID NO: 442844 - RNA, 22 nt, Human
guccacgguucugacugcaacc

SEQ ID NO: 442845 - RNA, 19 nt, Human
gucuccuugcccugccugg

SEQ ID NO: 442846 - RNA, 20 nt, Human
gugccccucacguggugccc

SEQ ID NO: 442847 - RNA, 21 nt, Human
uaaaaugucauuaucucugaa

SEQ ID NO: 442848 - RNA, 24 nt, Human
uaauucaacgcaacaaaugaccuc

SEQ ID NO: 442849 - RNA, 24 nt, Human
uaauucaacgcaacaaaugaccuc

SEQ ID NO: 442850 - RNA, 21 nt, Human
uacacggcggacaacauagag

SEQ ID NO: 442851 - RNA, 23 nt, Human
uacgugcuccgcgggguggugcg

SEQ ID NO: 442852 - RNA, 18 nt, Human
ucacagguccugcccaag

SEQ ID NO: 442853 - RNA, 24 nt, Human
ucagccccgcccuguccaccaagu

SEQ ID NO: 442854 - RNA, 21 nt, Human
ucaggacaggagccccugaag

SEQ ID NO: 442855 - RNA, 24 nt, Human
uccaggcccugccugggccuuccu

SEQ ID NO: 442856 - RNA, 23 nt, Human
ucccaagacccagucaccagccc

SEQ ID NO: 442857 - RNA, 26 nt, Human
ucccuggguacgugcuccgcggggug

SEQ ID NO: 442858 - RNA, 19 nt, Human
ucccuugcugguuuggggg

SEQ ID NO: 442859 - RNA, 19 nt, Human
ucccuugcugguuuggggg

SEQ ID NO: 442860 - RNA, 21 nt, Human
ugacacaaaaucaugacagca

SEQ ID NO: 442861 - RNA, 19 nt, Human
ugaccaggaagacgggugg

SEQ ID NO: 442862 - RNA, 21 nt, Human
ugacugcaaccucucuuuggc

SEQ ID NO: 442863 - RNA, 19 nt, Human
ugccccucacguggugccc

SEQ ID NO: 442864 - RNA, 23 nt, Human
ugccugggccuuccuaagggugc

SEQ ID NO: 442865 - RNA, 21 nt, Human
ugcggaccaccccaaacccaa

SEQ ID NO: 442866 - RNA, 19 nt, Human
ugcugggaaggaugugggg

SEQ ID NO: 442867 - RNA, 20 nt, Human
uggcgacagcggcccuuccu

SEQ ID NO: 442868 - RNA, 19 nt, Human
uggcuggcgcguggccugg

SEQ ID NO: 442869 - RNA, 26 nt, Human
ugggaaggauguggggaaaccuuggu

SEQ ID NO: 442870 - RNA, 19 nt, Human
ugggaucccaagacccagu

SEQ ID NO: 442871 - RNA, 22 nt, Human
ugggcacacuccuucaacacag

SEQ ID NO: 442872 - RNA, 19 nt, Human
ugggucaaaagcaggcgac

SEQ ID NO: 442873 - RNA, 19 nt, Human
uuccaggcccugccugggc

SEQ ID NO: 442874 - RNA, 23 nt, Human
uuccaggcccugccugggccuuc

SEQ ID NO: 442875 - RNA, 22 nt, Human
uuggaucaucuugacacaaaau

SEQ ID NO: 442876 - RNA, 18 nt, Human
uuugggggcgagaagggg

SEQ ID NO: 442877 - RNA, 18 nt, Human
uuugggggcgagaagggg

SEQ ID NO: 442878 - RNA, 20 nt, Human
aaaaaucaccuccaaaaucu

SEQ ID NO: 442879 - RNA, 19 nt, Human
aaauauuuggcaacauuuu

SEQ ID NO: 442880 - RNA, 23 nt, Human
aacaagaaggaaacaugaagaac

SEQ ID NO: 442881 - RNA, 25 nt, Human
aacaagaaggaaacaugaagaacaa

SEQ ID NO: 442882 - RNA, 22 nt, Human
aagaagaauggagccacaaaga

SEQ ID NO: 442883 - RNA, 25 nt, Human
aagaagaauggagccacaaagagaa

SEQ ID NO: 442884 - RNA, 22 nt, Human
aagaauggagccacaaagagaa

SEQ ID NO: 442885 - RNA, 18 nt, Human
aagagaagauagcacagg

SEQ ID NO: 442886 - RNA, 21 nt, Human
aagcugaauaaggcaaacacu

SEQ ID NO: 442887 - RNA, 21 nt, Human
acaggaggagaacuggacagu

SEQ ID NO: 442888 - RNA, 25 nt, Human
accuaauagugauacaucguaauga

SEQ ID NO: 442889 - RNA, 18 nt, Human
accugugccagucaguga

SEQ ID NO: 442890 - RNA, 23 nt, Human
agaaagcaaagcaaauguucuca

SEQ ID NO: 442891 - RNA, 24 nt, Human
agaaagcaaagcaaauguucucau

SEQ ID NO: 442892 - RNA, 22 nt, Human
agaagaauggagccacaaagag

SEQ ID NO: 442893 - RNA, 19 nt, Human
agaauauguauucccacuc

SEQ ID NO: 442894 - RNA, 24 nt, Human
agaauauguauucccacucacuug

SEQ ID NO: 442895 - RNA, 19 nt, Human
agauuuaaaaagacugaug

SEQ ID NO: 442896 - RNA, 19 nt, Human
agcaccaaccagcagcccu

SEQ ID NO: 442897 - RNA, 19 nt, Human
aggcagggcaggcaaaggu

SEQ ID NO: 442898 - RNA, 21 nt, Human
aggcauuuagguuaaccaugg

SEQ ID NO: 442899 - RNA, 21 nt, Human
aguacguauauuuaagcacuc

SEQ ID NO: 442900 - RNA, 20 nt, Human
auagaagagaagauagcaca

SEQ ID NO: 442901 - RNA, 18 nt, Human
auggagcagcagugcucc

SEQ ID NO: 442902 - RNA, 20 nt, Human
caaaauaacugggcaaggac

SEQ ID NO: 442903 - RNA, 22 nt, Human
caaacacuugaagaggcaguuu

SEQ ID NO: 442904 - RNA, 18 nt, Human
caaacuuaggcaaaagga

SEQ ID NO: 442905 - RNA, 20 nt, Human
caaccagcagcccuugacag

SEQ ID NO: 442906 - RNA, 24 nt, Human
caagacauuaaaaauaaaaagcaa

SEQ ID NO: 442907 - RNA, 23 nt, Human
cagacaaauucaaacccuuaaga

SEQ ID NO: 442908 - RNA, 19 nt, Human
cagcaccaaccagcagccc

SEQ ID NO: 442909 - RNA, 18 nt, Human
caucaauguuaccgagga

SEQ ID NO: 442910 - RNA, 19 nt, Human
caugaagaacaagcacuua

SEQ ID NO: 442911 - RNA, 18 nt, Human
cauuauaacucacuucca

SEQ ID NO: 442912 - RNA, 21 nt, Human
ccagcaccaaccagcagcccu

SEQ ID NO: 442913 - RNA, 26 nt, Human
ccuaaagacaaggaaugcagacaaau

SEQ ID NO: 442914 - RNA, 20 nt, Human
ccuccaaaaucuuccuaagu

SEQ ID NO: 442915 - RNA, 25 nt, Human
ccucucuugggacagauacugguuu

SEQ ID NO: 442916 - RNA, 19 nt, Human
ccuuguaccagcaccaacc

SEQ ID NO: 442917 - RNA, 18 nt, Human
ccuuuugcugaacugggg

SEQ ID NO: 442918 - RNA, 18 nt, Human
cggcgccggauccucucc

SEQ ID NO: 442919 - RNA, 21 nt, Human
cucuccuaccgaagcuggaga

SEQ ID NO: 442920 - RNA, 26 nt, Human
cuuaagaacaacaacaaaaaagauuu

SEQ ID NO: 442921 - RNA, 21 nt, Human
gcacauuuuccuccuuuugcu

SEQ ID NO: 442922 - RNA, 19 nt, Human
gcauuuagguuaaccaugg

SEQ ID NO: 442923 - RNA, 24 nt, Human
gucaagacauuaaaaauaaaaagc

SEQ ID NO: 442924 - RNA, 18 nt, Human
guccagguauagauuguu

SEQ ID NO: 442925 - RNA, 20 nt, Human
gugcagccgccagaugguau

SEQ ID NO: 442926 - RNA, 18 nt, Human
uaaaaagacugaugacug

SEQ ID NO: 442927 - RNA, 20 nt, Human
uaaaacaugaagauggcaaa

SEQ ID NO: 442928 - RNA, 20 nt, Human
uaaaagguuuccuuagcuua

SEQ ID NO: 442929 - RNA, 22 nt, Human
uaacaagaaggaaacaugaaga

SEQ ID NO: 442930 - RNA, 21 nt, Human
uaacagcugaaccaguggcac

SEQ ID NO: 442931 - RNA, 22 nt, Human
uaacugccaaucugagauuagu

SEQ ID NO: 442932 - RNA, 22 nt, Human
uaagaacaacaacaaaaaagau

SEQ ID NO: 442933 - RNA, 21 nt, Human
uacaauaccaaguacagugag

SEQ ID NO: 442934 - RNA, 21 nt, Human
uagcacaggaggagaacugga

SEQ ID NO: 442935 - RNA, 20 nt, Human
uagcauaagggaaagacggu

SEQ ID NO: 442936 - RNA, 21 nt, Human
ucaaacccuuaagaacaacaa

SEQ ID NO: 442937 - RNA, 22 nt, Human
ucacaaugaaauugagugcaau

SEQ ID NO: 442938 - RNA, 18 nt, Human
uccagugacaauuaugac

SEQ ID NO: 442939 - RNA, 20 nt, Human
uccaugaaaggcagggcagg

SEQ ID NO: 442940 - RNA, 20 nt, Human
uccuauggaaaaaaaucacc

SEQ ID NO: 442941 - RNA, 19 nt, Human
uccuuuugcugaacugggg

SEQ ID NO: 442942 - RNA, 18 nt, Human
ucggcgccggauccucuc

SEQ ID NO: 442943 - RNA, 21 nt, Human
ucuaugacuauagcuuuggga

SEQ ID NO: 442944 - RNA, 22 nt, Human
ucuuuugagguacgaacucuga

SEQ ID NO: 442945 - RNA, 22 nt, Human
ugaaaagauacaaaauaagcua

SEQ ID NO: 442946 - RNA, 18 nt, Human
ugaaaagggaauuucccc

SEQ ID NO: 442947 - RNA, 20 nt, Human
ugaaagaagaauggagccac

SEQ ID NO: 442948 - RNA, 20 nt, Human
ugaagaacaagcacuuaaga

SEQ ID NO: 442949 - RNA, 21 nt, Human
ugaagagucaagacauuaaaa

SEQ ID NO: 442950 - RNA, 20 nt, Human
ugagaccaguuaacucuuuu

SEQ ID NO: 442951 - RNA, 23 nt, Human
ugagaccaguuaacucuuuuagg

SEQ ID NO: 442952 - RNA, 21 nt, Human
ugcaguaacuuccuaaaagca

SEQ ID NO: 442953 - RNA, 21 nt, Human
ugccagggccauguggaagug

SEQ ID NO: 442954 - RNA, 19 nt, Human
uggaaaacaaacugguccu

SEQ ID NO: 442955 - RNA, 23 nt, Human
uggagcagcagugcucccugcca

SEQ ID NO: 442956 - RNA, 18 nt, Human
uggagcauggagcagcag

SEQ ID NO: 442957 - RNA, 20 nt, Human
uucaucuuuuuauugauagc

SEQ ID NO: 442958 - RNA, 23 nt, Human
uuccaugaaaggcagggcaggca

SEQ ID NO: 442959 - RNA, 20 nt, Human
uuccuuagcuuaaagcuccu

SEQ ID NO: 442960 - RNA, 21 nt, Human
uugacagcauagaugggauga

SEQ ID NO: 442961 - RNA, 21 nt, Human
uugcuuaaaagcacaaaugcu

SEQ ID NO: 442962 - RNA, 22 nt, Human
uuggacauuuuaguagaaauug

SEQ ID NO: 442963 - RNA, 22 nt, Human
uuggcaacauuuugacuuuaac

SEQ ID NO: 442964 - RNA, 23 nt, Human
uugguaccuaauagugauacauc

SEQ ID NO: 442965 - RNA, 21 nt, Human
uuuuuacugugcuaacagcug

SEQ ID NO: 442966 - RNA, 21 nt, Human
uuuuuuuuuuuuuugcuuuca

SEQ ID NO: 442967 - RNA, 18 nt, Human
uuuuuuuuuuuuuuuuug

SEQ ID NO: 442968 - RNA, 24 nt, Human
aaaacuagcaaaaacuuugcacaa

SEQ ID NO: 442969 - RNA, 18 nt, Human
aaaaggaagugaguagaa

SEQ ID NO: 442970 - RNA, 20 nt, Human
aaaaucugauuccacugggg

SEQ ID NO: 442971 - RNA, 18 nt, Human
aaacaaauguuggucuuu

SEQ ID NO: 442972 - RNA, 19 nt, Human
aaacuagucccaaagucag

SEQ ID NO: 442973 - RNA, 19 nt, Human
aaagacugaggaaaugaua

SEQ ID NO: 442974 - RNA, 21 nt, Human
aaagcaacacaacucugcagc

SEQ ID NO: 442975 - RNA, 24 nt, Human
aacaaaaacccuuuuguauaaaua

SEQ ID NO: 442976 - RNA, 25 nt, Human
aacacaacucuuuccuucccauccc

SEQ ID NO: 442977 - RNA, 23 nt, Human
aagagaccaagugcugauggaca

SEQ ID NO: 442978 - RNA, 21 nt, Human
aagccugagguaucccuuuag

SEQ ID NO: 442979 - RNA, 20 nt, Human
aauauuuaaauaguaacaga

SEQ ID NO: 442980 - RNA, 23 nt, Human
acacauggaaccaaacagcucga

SEQ ID NO: 442981 - RNA, 18 nt, Human
acacuccauggccugcug

SEQ ID NO: 442982 - RNA, 19 nt, Human
acaggcagugucugaaaac

SEQ ID NO: 442983 - RNA, 23 nt, Human
acaugauaggaguacaaaagaaa

SEQ ID NO: 442984 - RNA, 19 nt, Human
acccaugaucaacacaguc

SEQ ID NO: 442985 - RNA, 24 nt, Human
acgggucuuccuuuuucuccaugc

SEQ ID NO: 442986 - RNA, 24 nt, Human
acucuuuccuucccaucccuccuu

SEQ ID NO: 442987 - RNA, 18 nt, Human
agaaaccaacacaacucu

SEQ ID NO: 442988 - RNA, 20 nt, Human
agaagcuacuucugcacaug

SEQ ID NO: 442989 - RNA, 27 nt, Human
agaugcuucccuuuccauggggagucc

SEQ ID NO: 442990 - RNA, 25 nt, Human
agcggguggguccaggaggggacug

SEQ ID NO: 442991 - RNA, 24 nt, Human
aggaguacaaaagaaaagacugag

SEQ ID NO: 442992 - RNA, 20 nt, Human
agggaccaagauuaguuguu

SEQ ID NO: 442993 - RNA, 23 nt, Human
agggagcggguggguccaggagg

SEQ ID NO: 442994 - RNA, 24 nt, Human
aguaagaaaugaaaaaaugugcaa

SEQ ID NO: 442995 - RNA, 20 nt, Human
aguacaaaagaaaagacuga

SEQ ID NO: 442996 - RNA, 24 nt, Human
agucagaagauaaaacuagcaaaa

SEQ ID NO: 442997 - RNA, 23 nt, Human
aguccgauaccaucauggucuuu

SEQ ID NO: 442998 - RNA, 21 nt, Human
aguucuguccaguucucccug

SEQ ID NO: 442999 - RNA, 22 nt, Human
caaacagcucgauggagacacc

SEQ ID NO: 443000 - RNA, 26 nt, Human
caaaccuagaaauauucagggaccaa

SEQ ID NO: 443001 - RNA, 21 nt, Human
caacacaacucugcagcaaaa

SEQ ID NO: 443002 - RNA, 25 nt, Human
caacacaguccaucuuccuacagca

SEQ ID NO: 443003 - RNA, 18 nt, Human
caacgggaagguuacgau

SEQ ID NO: 443004 - RNA, 22 nt, Human
caagcuuccuacccccaucaca

SEQ ID NO: 443005 - RNA, 21 nt, Human
caaguaagaaaugaaaaaaug

SEQ ID NO: 443006 - RNA, 18 nt, Human
cacaacucugcagcaaaa

SEQ ID NO: 443007 - RNA, 25 nt, Human
cacaacucuuuccuucccaucccuc

SEQ ID NO: 443008 - RNA, 23 nt, Human
cacaauauuuagagaaaagcucu

SEQ ID NO: 443009 - RNA, 19 nt, Human
cacccaugaucaacacagu

SEQ ID NO: 443010 - RNA, 23 nt, Human
cacccaugaucaacacaguccau

SEQ ID NO: 443011 - RNA, 24 nt, Human
cacuccauggccugcugcacaugu

SEQ ID NO: 443012 - RNA, 18 nt, Human
cacugaagauaagagacc

SEQ ID NO: 443013 - RNA, 21 nt, Human
cagaaagaaaccaacacaacu

SEQ ID NO: 443014 - RNA, 25 nt, Human
cagauggaaaaguuuccgaccaacg

SEQ ID NO: 443015 - RNA, 19 nt, Human
cagcaaaaacuagucccaa

SEQ ID NO: 443016 - RNA, 22 nt, Human
cagcacugacaaauggagauau

SEQ ID NO: 443017 - RNA, 23 nt, Human
cagcucgauggagacacccugca

SEQ ID NO: 443018 - RNA, 21 nt, Human
cagugucugaaaacuaguccg

SEQ ID NO: 443019 - RNA, 20 nt, Human
cauggaaccaaacagcucga

SEQ ID NO: 443020 - RNA, 20 nt, Human
ccaagcagagcacaguauca

SEQ ID NO: 443021 - RNA, 26 nt, Human
ccagcacugacaaauggagauaugag

SEQ ID NO: 443022 - RNA, 22 nt, Human
cccaugaucaacacaguccauc

SEQ ID NO: 443023 - RNA, 22 nt, Human
ccugcaggucccuuacccuaga

SEQ ID NO: 443024 - RNA, 24 nt, Human
ccuuaagcuauaaacaaaaacccu

SEQ ID NO: 443025 - RNA, 18 nt, Human
cgaucugguaccagucca

SEQ ID NO: 443026 - RNA, 21 nt, Human
cgggcccuggcugcacugggg

SEQ ID NO: 443027 - RNA, 23 nt, Human
cuacacuccauggccugcugcac

SEQ ID NO: 443028 - RNA, 20 nt, Human
cuccaugcaccaagcagagc

SEQ ID NO: 443029 - RNA, 18 nt, Human
cuccuuuacuucuuuuuc

SEQ ID NO: 443030 - RNA, 22 nt, Human
cugaacuaggacaaaaaugacc

SEQ ID NO: 443031 - RNA, 22 nt, Human
cuuauggugaugcugcaggaau

SEQ ID NO: 443032 - RNA, 20 nt, Human
gaaaccuuagaauccuguag

SEQ ID NO: 443033 - RNA, 20 nt, Human
gaauacaugauaggaguaca

SEQ ID NO: 443034 - RNA, 21 nt, Human
gacaaguaagaaaugaaaaaa

SEQ ID NO: 443035 - RNA, 24 nt, Human
gcugauauuuuuuuuuacuuuuag

SEQ ID NO: 443036 - RNA, 21 nt, Human
ggaaaauggccggugaauucu

SEQ ID NO: 443037 - RNA, 20 nt, Human
ggaaucagaaagaaaccaac

SEQ ID NO: 443038 - RNA, 19 nt, Human
ggaucaaccacacccucga

SEQ ID NO: 443039 - RNA, 22 nt, Human
ggcacugaaggcuaaggaaaaa

SEQ ID NO: 443040 - RNA, 20 nt, Human
gggagcggguggguccagga

SEQ ID NO: 443041 - RNA, 24 nt, Human
uaaaacuagcaaaaacuuugcaca

SEQ ID NO: 443042 - RNA, 22 nt, Human
uaaaacugcugcacuuacaaac

SEQ ID NO: 443043 - RNA, 22 nt, Human
uaaacuggguugcuuacaccca

SEQ ID NO: 443044 - RNA, 23 nt, Human
uaaggaaaaaagggagcgggugg

SEQ ID NO: 443045 - RNA, 21 nt, Human
uaaguuuucaacucuggccuu

SEQ ID NO: 443046 - RNA, 22 nt, Human
uacaaaagaaaagacugaggaa

SEQ ID NO: 443047 - RNA, 21 nt, Human
uacaccugcaggucccuuacc

SEQ ID NO: 443048 - RNA, 21 nt, Human
uacacuaucccagaggaaaau

SEQ ID NO: 443049 - RNA, 22 nt, Human
uagaaugaaaagggacugguag

SEQ ID NO: 443050 - RNA, 19 nt, Human
uagaguccgacugcuuuuc

SEQ ID NO: 443051 - RNA, 23 nt, Human
uagcaaaaacuuugcacaauauu

SEQ ID NO: 443052 - RNA, 18 nt, Human
uagguuccucaggagagg

SEQ ID NO: 443053 - RNA, 25 nt, Human
ucagugacagaagaaagccuuuuuc

SEQ ID NO: 443054 - RNA, 18 nt, Human
uccaggaggggacugacc

SEQ ID NO: 443055 - RNA, 20 nt, Human
uccaguccauuuccagaagu

SEQ ID NO: 443056 - RNA, 23 nt, Human
uccaguccauuuccagaaguaca

SEQ ID NO: 443057 - RNA, 18 nt, Human
uccaguucucccugguga

SEQ ID NO: 443058 - RNA, 18 nt, Human
uccaugcaccaagcagag

SEQ ID NO: 443059 - RNA, 19 nt, Human
uccaugcaccaagcagagc

SEQ ID NO: 443060 - RNA, 21 nt, Human
ucccuccuuaagguagagucc

SEQ ID NO: 443061 - RNA, 24 nt, Human
ucccuggugaccuuuuccucccuu

SEQ ID NO: 443062 - RNA, 21 nt, Human
ucuacuccaguacgaugacac

SEQ ID NO: 443063 - RNA, 22 nt, Human
ucuaggguguggagaguacggg

SEQ ID NO: 443064 - RNA, 19 nt, Human
ucucugaaacucucuuacu

SEQ ID NO: 443065 - RNA, 18 nt, Human
ucugaaacucucuuacuu

SEQ ID NO: 443066 - RNA, 23 nt, Human
ucuuucuuucuuuuuaaucuuuc

SEQ ID NO: 443067 - RNA, 21 nt, Human
ugacacacgggcccuggcugc

SEQ ID NO: 443068 - RNA, 21 nt, Human
ugacagaagaaagccuuuuuc

SEQ ID NO: 443069 - RNA, 21 nt, Human
ugagggaaaaucugauuccac

SEQ ID NO: 443070 - RNA, 25 nt, Human
ugcacuuacaaaccuagaaauauuc

SEQ ID NO: 443071 - RNA, 22 nt, Human
ugcagcaaaaacuagucccaaa

SEQ ID NO: 443072 - RNA, 20 nt, Human
ugccauguuucuuaaacugg

SEQ ID NO: 443073 - RNA, 22 nt, Human
uggcugcacuggggauuauggg

SEQ ID NO: 443074 - RNA, 19 nt, Human
uggguugcuuacacccaug

SEQ ID NO: 443075 - RNA, 18 nt, Human
uguuaaacacacauggaa

SEQ ID NO: 443076 - RNA, 18 nt, Human
uuaguugccauguuucuu

SEQ ID NO: 443077 - RNA, 19 nt, Human
uucaaggaucaaccacacc

SEQ ID NO: 443078 - RNA, 25 nt, Human
uuccaugguggauguguaugucacu

SEQ ID NO: 443079 - RNA, 22 nt, Human
uuccgaccaacgggaagguuac

SEQ ID NO: 443080 - RNA, 25 nt, Human
uuuaaaaagucuccaguccauuucc

SEQ ID NO: 443081 - RNA, 20 nt, Human
uuuagauaauuaaagccaag

SEQ ID NO: 443082 - RNA, 24 nt, Human
uuuaggagaaauguuuugucuuag

SEQ ID NO: 443083 - RNA, 20 nt, Human
uuucaguucuguccaguucu

SEQ ID NO: 443084 - RNA, 19 nt, Human
uuucuuuuuaaucuuucua

SEQ ID NO: 443085 - RNA, 20 nt, Human
uuuuccucuuucuucuccuu

SEQ ID NO: 443086 - RNA, 26 nt, Human
uuuuuccucuuucuucuccuucccuc

SEQ ID NO: 443087 - RNA, 22 nt, Human
aaaaaaaaccacaaaaaaacac

SEQ ID NO: 443088 - RNA, 27 nt, Human
aaaaaacacaaaaggauucugggugua

SEQ ID NO: 443089 - RNA, 18 nt, Human
aaacacaaaaggauucug

SEQ ID NO: 443090 - RNA, 19 nt, Human
aacaagguggcccugacac

SEQ ID NO: 443091 - RNA, 20 nt, Human
aacauggugaaacccugucu

SEQ ID NO: 443092 - RNA, 21 nt, Human
aacauggugaaacccugucuc

SEQ ID NO: 443093 - RNA, 21 nt, Human
aagcagagguugcagugagcc

SEQ ID NO: 443094 - RNA, 24 nt, Human
aagcagagguugcagugagccgag

SEQ ID NO: 443095 - RNA, 20 nt, Human
aagcagcccucaucuuaagg

SEQ ID NO: 443096 - RNA, 22 nt, Human
aagcauauucuucaugaggcgg

SEQ ID NO: 443097 - RNA, 23 nt, Human
aaggauucuggguguaacaaucu

SEQ ID NO: 443098 - RNA, 22 nt, Human
acaaaaaaacacaaaaggauuc

SEQ ID NO: 443099 - RNA, 24 nt, Human
acagagcaagacuccaccucaaaa

SEQ ID NO: 443100 - RNA, 24 nt, Human
acagcacuccagccugggugacag

SEQ ID NO: 443101 - RNA, 26 nt, Human
acagcacuccagccugggugacagag

SEQ ID NO: 443102 - RNA, 20 nt, Human
acaguauggaagcaggaggc

SEQ ID NO: 443103 - RNA, 20 nt, Human
accacaaaaaaacacaaaag

SEQ ID NO: 443104 - RNA, 23 nt, Human
acccugucucuacuaaacauaca

SEQ ID NO: 443105 - RNA, 24 nt, Human
acccugucucuacuaaacauacaa

SEQ ID NO: 443106 - RNA, 18 nt, Human
agaagucuguggugcuaa

SEQ ID NO: 443107 - RNA, 19 nt, Human
agacaggagaaaugcuuga

SEQ ID NO: 443108 - RNA, 24 nt, Human
agacaggagaaaugcuugaacccg

SEQ ID NO: 443109 - RNA, 25 nt, Human
agacaggagaaaugcuugaacccgg

SEQ ID NO: 443110 - RNA, 22 nt, Human
agagguugcagugagccgagau

SEQ ID NO: 443111 - RNA, 24 nt, Human
agagguugcagugagccgagauug

SEQ ID NO: 443112 - RNA, 18 nt, Human
agcagugucaauaggaau

SEQ ID NO: 443113 - RNA, 22 nt, Human
agccuggccaacauggugaaac

SEQ ID NO: 443114 - RNA, 24 nt, Human
agccugggugacagagcaagacuc

SEQ ID NO: 443115 - RNA, 23 nt, Human
agcugggcaugguggugggugcc

SEQ ID NO: 443116 - RNA, 25 nt, Human
aggaaucccuucccuauuccaugcc

SEQ ID NO: 443117 - RNA, 22 nt, Human
aggcagggccccucacaucugc

SEQ ID NO: 443118 - RNA, 21 nt, Human
aggccaaggcggguagaucac

SEQ ID NO: 443119 - RNA, 22 nt, Human
aggcggguagaucacuugaggg

SEQ ID NO: 443120 - RNA, 23 nt, Human
aggcggguagaucacuugagguc

SEQ ID NO: 443121 - RNA, 24 nt, Human
aggcugagacaggagaaaugcuug

SEQ ID NO: 443122 - RNA, 24 nt, Human
agggcacaggaccucagaagucug

SEQ ID NO: 443123 - RNA, 20 nt, Human
auacaacaauuagcugggca

SEQ ID NO: 443124 - RNA, 21 nt, Human
aucauggagcuuucaagagug

SEQ ID NO: 443125 - RNA, 24 nt, Human
augcuugaacccgggaagcagagg

SEQ ID NO: 443126 - RNA, 23 nt, Human
auggaggcagcucaucauucaca

SEQ ID NO: 443127 - RNA, 20 nt, Human
auuagcugggcauggugguc

SEQ ID NO: 443128 - RNA, 19 nt, Human
auucaccuacacuucccuc

SEQ ID NO: 443129 - RNA, 24 nt, Human
auugcaccacagcacuccagccug

SEQ ID NO: 443130 - RNA, 19 nt, Human
caaaaaaaaaaaccacaaa

SEQ ID NO: 443131 - RNA, 22 nt, Human
caaaaaaaaaaaccacaaaaaa

SEQ ID NO: 443132 - RNA, 19 nt, Human
caaaaaaacacaaaaggau

SEQ ID NO: 443133 - RNA, 18 nt, Human
caacacagcaacaaaccu

SEQ ID NO: 443134 - RNA, 27 nt, Human
caacacagcaacaaaccuucugcucuc

SEQ ID NO: 443135 - RNA, 24 nt, Human
caacauggugaaacccugucucua

SEQ ID NO: 443136 - RNA, 20 nt, Human
caagaggggcccaggcugga

SEQ ID NO: 443137 - RNA, 21 nt, Human
caaggcggguagaucacuuga

SEQ ID NO: 443138 - RNA, 19 nt, Human
cacaacacagcaacaaacc

SEQ ID NO: 443139 - RNA, 20 nt, Human
cacaacacagcaacaaaccu

SEQ ID NO: 443140 - RNA, 24 nt, Human
cacaccuguaaugccagcacuuug

SEQ ID NO: 443141 - RNA, 24 nt, Human
cacagcaacaaaccuucugcucuc

SEQ ID NO: 443142 - RNA, 24 nt, Human
cacagcacuccagccugggugaca

SEQ ID NO: 443143 - RNA, 19 nt, Human
caccacagaaagaacauuu

SEQ ID NO: 443144 - RNA, 19 nt, Human
caccacagcacuccagccu

SEQ ID NO: 443145 - RNA, 23 nt, Human
cacccccagaucugaagggccag

SEQ ID NO: 443146 - RNA, 20 nt, Human
cacccucucagaccugcccu

SEQ ID NO: 443147 - RNA, 22 nt, Human
caccucaaaaaaaaaaaccaca

SEQ ID NO: 443148 - RNA, 23 nt, Human
caccucaaaaaaaaaaaccacaa

SEQ ID NO: 443149 - RNA, 18 nt, Human
caccugagggaacagagc

SEQ ID NO: 443150 - RNA, 23 nt, Human
caccuguaaugccagcacuuugg

SEQ ID NO: 443151 - RNA, 24 nt, Human
caccuguaaugccagcacuuuggg

SEQ ID NO: 443152 - RNA, 22 nt, Human
cacuccagccugggugacagag

SEQ ID NO: 443153 - RNA, 19 nt, Human
cagaaagaacauuuauggg

SEQ ID NO: 443154 - RNA, 24 nt, Human
cagcacuuugggaggccaaggcgg

SEQ ID NO: 443155 - RNA, 20 nt, Human
cagcaucaggaggcugaggg

SEQ ID NO: 443156 - RNA, 28 nt, Human
cagccagaaggcccaagaggggcccagg

SEQ ID NO: 443157 - RNA, 25 nt, Human
cagccuggccaacauggugaaaccc

SEQ ID NO: 443158 - RNA, 19 nt, Human
cagcgugcgucauguccag

SEQ ID NO: 443159 - RNA, 21 nt, Human
caggaggcccuacuccaccac

SEQ ID NO: 443160 - RNA, 20 nt, Human
cagguggcaguggguucccu

SEQ ID NO: 443161 - RNA, 19 nt, Human
caucagagaacggcaugac

SEQ ID NO: 443162 - RNA, 21 nt, Human
caucaggaggcugaggguccc

SEQ ID NO: 443163 - RNA, 22 nt, Human
caugguggugggugccuguaau

SEQ ID NO: 443164 - RNA, 19 nt, Human
cauguugucagcuuuaacc

SEQ ID NO: 443165 - RNA, 24 nt, Human
ccacaaaaaaacacaaaaggauuc

SEQ ID NO: 443166 - RNA, 18 nt, Human
ccacaccugagaucuagc

SEQ ID NO: 443167 - RNA, 30 nt, Human
ccacacugcccaucucugugcuuaucaugg

SEQ ID NO: 443168 - RNA, 18 nt, Human
ccacagcacuccagccug

SEQ ID NO: 443169 - RNA, 20 nt, Human
ccacagcacuccagccuggg

SEQ ID NO: 443170 - RNA, 21 nt, Human
ccacagcacuccagccugggu

SEQ ID NO: 443171 - RNA, 21 nt, Human
ccacagcacuccagccugggu

SEQ ID NO: 443172 - RNA, 23 nt, Human
ccacagcacuccagccuggguga

SEQ ID NO: 443173 - RNA, 24 nt, Human
ccacagcacuccagccugggugac

SEQ ID NO: 443174 - RNA, 24 nt, Human
ccagaaaaaagaaaauccaacccc

SEQ ID NO: 443175 - RNA, 20 nt, Human
ccagacacaaaguuuccagg

SEQ ID NO: 443176 - RNA, 26 nt, Human
cccaugcgacaguauggaagcaggag

SEQ ID NO: 443177 - RNA, 21 nt, Human
cccucacaucugcaguggccg

SEQ ID NO: 443178 - RNA, 23 nt, Human
ccuacuccaccacagaaagaaca

SEQ ID NO: 443179 - RNA, 21 nt, Human
ccuagugaggagguucuggga

SEQ ID NO: 443180 - RNA, 18 nt, Human
ccucaaaaaaaaaaacca

SEQ ID NO: 443181 - RNA, 24 nt, Human
ccugcccugcaacagcaucaggag

SEQ ID NO: 443182 - RNA, 22 nt, Human
ccuggccaacauggugaaaccc

SEQ ID NO: 443183 - RNA, 24 nt, Human
ccuggccaacauggugaaacccug

SEQ ID NO: 443184 - RNA, 22 nt, Human
ccugggugacagagcaagacuc

SEQ ID NO: 443185 - RNA, 21 nt, Human
ccuguaaucccagcuacuggg

SEQ ID NO: 443186 - RNA, 22 nt, Human
ccuguaaucccagcuacugggg

SEQ ID NO: 443187 - RNA, 20 nt, Human
ccuucuacagacacaggccc

SEQ ID NO: 443188 - RNA, 24 nt, Human
cgggaagcagagguugcagugagc

SEQ ID NO: 443189 - RNA, 24 nt, Human
cgggcccagccuggccaacauggu

SEQ ID NO: 443190 - RNA, 18 nt, Human
cggguagaucacuugagg

SEQ ID NO: 443191 - RNA, 24 nt, Human
cucacaccuguaaugccagcacuu

SEQ ID NO: 443192 - RNA, 22 nt, Human
cuccaccucaaaaaaaaaaacc

SEQ ID NO: 443193 - RNA, 23 nt, Human
cugcugggcacccucucagaccu

SEQ ID NO: 443194 - RNA, 24 nt, Human
cuggccaacauggugaaacccugu

SEQ ID NO: 443195 - RNA, 24 nt, Human
cuucuacagacacaggcccucucc

SEQ ID NO: 443196 - RNA, 18 nt, Human
cuugagguccaggaguuc

SEQ ID NO: 443197 - RNA, 19 nt, Human
gaaacccugucucuacuaa

SEQ ID NO: 443198 - RNA, 21 nt, Human
gaauacaacugggacuaggac

SEQ ID NO: 443199 - RNA, 19 nt, Human
gagaauggcaccugaggga

SEQ ID NO: 443200 - RNA, 20 nt, Human
gagaauguauuuuaaacuug

SEQ ID NO: 443201 - RNA, 21 nt, Human
gagcagugucaauaggaaucc

SEQ ID NO: 443202 - RNA, 20 nt, Human
gaucacuugagguccaggaa

SEQ ID NO: 443203 - RNA, 25 nt, Human
gaucacuugagguccaggaguucgg

SEQ ID NO: 443204 - RNA, 24 nt, Human
gcacuccagccugggugacagagc

SEQ ID NO: 443205 - RNA, 24 nt, Human
gccaacauggugaaacccugucuc

SEQ ID NO: 443206 - RNA, 24 nt, Human
gcccaccuucugacccacacugcc

SEQ ID NO: 443207 - RNA, 19 nt, Human
gcccaucucugugcuuauc

SEQ ID NO: 443208 - RNA, 22 nt, Human
gccuugcuugucuuugcuuguc

SEQ ID NO: 443209 - RNA, 20 nt, Human
ggaagcagagguugcaguga

SEQ ID NO: 443210 - RNA, 20 nt, Human
ggagaagaggcagcccugcu

SEQ ID NO: 443211 - RNA, 21 nt, Human
ggcacccucucagaccugccc

SEQ ID NO: 443212 - RNA, 22 nt, Human
ggcauguugacucccuacugag

SEQ ID NO: 443213 - RNA, 22 nt, Human
ggccgggcacgguggcucacag

SEQ ID NO: 443214 - RNA, 24 nt, Human
gggcacgguggcucacaccuguaa

SEQ ID NO: 443215 - RNA, 24 nt, Human
gggcaugguggugggugccuguaa

SEQ ID NO: 443216 - RNA, 23 nt, Human
ggugccuguaaucccagcuacug

SEQ ID NO: 443217 - RNA, 24 nt, Human
gguggcucacaccuguaaugccag

SEQ ID NO: 443218 - RNA, 21 nt, Human
ggugggugccuguaaucccag

SEQ ID NO: 443219 - RNA, 24 nt, Human
gguggugggugccuguaaucccag

SEQ ID NO: 443220 - RNA, 21 nt, Human
guccaggaguucgggcccagc

SEQ ID NO: 443221 - RNA, 19 nt, Human
guugcagugagccgagauu

SEQ ID NO: 443222 - RNA, 21 nt, Human
guugcagugagccgagauugc

SEQ ID NO: 443223 - RNA, 21 nt, Human
uaaccuucuacagacacaggc

SEQ ID NO: 443224 - RNA, 19 nt, Human
uacaacaauuagcugggca

SEQ ID NO: 443225 - RNA, 23 nt, Human
uacaacugggacuaggacaaugc

SEQ ID NO: 443226 - RNA, 21 nt, Human
uacugaggaaggcagggcccc

SEQ ID NO: 443227 - RNA, 23 nt, Human
uagagccagcgggugacucuggu

SEQ ID NO: 443228 - RNA, 25 nt, Human
uagaucacuugagguccaggaguuc

SEQ ID NO: 443229 - RNA, 25 nt, Human
uaucauggagcuuucaagagugagg

SEQ ID NO: 443230 - RNA, 23 nt, Human
uaugggcgccuaagcccugggag

SEQ ID NO: 443231 - RNA, 24 nt, Human
ucaaugcagucccuaacccuuggg

SEQ ID NO: 443232 - RNA, 22 nt, Human
ucaccacacccccagaucugaa

SEQ ID NO: 443233 - RNA, 24 nt, Human
ucacuugagguccaggaguucggg

SEQ ID NO: 443234 - RNA, 23 nt, Human
ucagaccugcccugcaacagcau

SEQ ID NO: 443235 - RNA, 19 nt, Human
ucaguagagccagcgggug

SEQ ID NO: 443236 - RNA, 18 nt, Human
ucaugaggagaauguauu

SEQ ID NO: 443237 - RNA, 19 nt, Human
uccacaggaagcggcccac

SEQ ID NO: 443238 - RNA, 19 nt, Human
uccaccacagaaagaacau

SEQ ID NO: 443239 - RNA, 19 nt, Human
uccagaagcuggcccaggu

SEQ ID NO: 443240 - RNA, 24 nt, Human
uccagccugggugacagagcaaga

SEQ ID NO: 443241 - RNA, 20 nt, Human
uccaugccaaacagucuucc

SEQ ID NO: 443242 - RNA, 18 nt, Human
uccccagccagaaggccc

SEQ ID NO: 443243 - RNA, 28 nt, Human
ucuauucaccuacacuucccucuuccaa

SEQ ID NO: 443244 - RNA, 24 nt, Human
ucucuacuaaacauacaacaauua

SEQ ID NO: 443245 - RNA, 21 nt, Human
ucugacccacacugcccaucu

SEQ ID NO: 443246 - RNA, 20 nt, Human
ucugcccuuacuugccacuc

SEQ ID NO: 443247 - RNA, 21 nt, Human
ucuggguguaacaaucucagu

SEQ ID NO: 443248 - RNA, 25 nt, Human
ucuuaaggacucuauuucaggccaa

SEQ ID NO: 443249 - RNA, 19 nt, Human
ugaauguacugaaaugucu

SEQ ID NO: 443250 - RNA, 21 nt, Human
ugacaucagggguuuugauau

SEQ ID NO: 443251 - RNA, 24 nt, Human
ugagacaggagaaaugcuugaacc

SEQ ID NO: 443252 - RNA, 22 nt, Human
ugagccgagauugcaccacagc

SEQ ID NO: 443253 - RNA, 23 nt, Human
ugcaacagcaucaggaggcugag

SEQ ID NO: 443254 - RNA, 19 nt, Human
ugccagaaaaaagaaaauc

SEQ ID NO: 443255 - RNA, 22 nt, Human
ugccuguaaucccagcuacugg

SEQ ID NO: 443256 - RNA, 23 nt, Human
ugccuguaaucccagcuacuggg

SEQ ID NO: 443257 - RNA, 21 nt, Human
uggaaaacaagguggcccuga

SEQ ID NO: 443258 - RNA, 19 nt, Human
uggaggcagcucaucauuc

SEQ ID NO: 443259 - RNA, 22 nt, Human
uggcauguguggguguguggug

SEQ ID NO: 443260 - RNA, 24 nt, Human
uggccaacauggugaaacccuguc

SEQ ID NO: 443261 - RNA, 24 nt, Human
uggcucacaccuguaaugccagca

SEQ ID NO: 443262 - RNA, 18 nt, Human
ugggaagcaggugggccu

SEQ ID NO: 443263 - RNA, 24 nt, Human
ugggacuaggacaaugcgggaagc

SEQ ID NO: 443264 - RNA, 19 nt, Human
ugggagaauggcaccugag

SEQ ID NO: 443265 - RNA, 24 nt, Human
ugggaggccaaggcggguagauca

SEQ ID NO: 443266 - RNA, 19 nt, Human
ugggcacaaaccacaggga

SEQ ID NO: 443267 - RNA, 25 nt, Human
uggguucccuauggaggcagcucau

SEQ ID NO: 443268 - RNA, 22 nt, Human
uggugggugccuguaaucccag

SEQ ID NO: 443269 - RNA, 24 nt, Human
uggugggugccuguaaucccagcu

SEQ ID NO: 443270 - RNA, 24 nt, Human
ugguggugggugccuguaauccca

SEQ ID NO: 443271 - RNA, 20 nt, Human
ugucugccagaaaaaagaag

SEQ ID NO: 443272 - RNA, 19 nt, Human
ugugugggugugugguggg

SEQ ID NO: 443273 - RNA, 24 nt, Human
uuaaccuucuacagacacaggccc

SEQ ID NO: 443274 - RNA, 24 nt, Human
uuagcugggcaugguggugggugc

SEQ ID NO: 443275 - RNA, 18 nt, Human
uucagcaaaugugagaga

SEQ ID NO: 443276 - RNA, 22 nt, Human
uuccccagacacaaaguuucca

SEQ ID NO: 443277 - RNA, 18 nt, Human
uugcagugagccgagauu

SEQ ID NO: 443278 - RNA, 19 nt, Human
uugcagugagccgagauug

SEQ ID NO: 443279 - RNA, 22 nt, Human
uugcagugagccgagauugcac

SEQ ID NO: 443280 - RNA, 21 nt, Human
uugccagccacgguucucucc

SEQ ID NO: 443281 - RNA, 19 nt, Human
aacucgagggcuccuucuc

SEQ ID NO: 443282 - RNA, 20 nt, Human
accccucccucuccaguucc

SEQ ID NO: 443283 - RNA, 22 nt, Human
accccucccucuccaguuccag

SEQ ID NO: 443284 - RNA, 18 nt, Human
accgcagaccccucccuc

SEQ ID NO: 443285 - RNA, 20 nt, Human
cacagggcagcucccacagc

SEQ ID NO: 443286 - RNA, 21 nt, Human
cacgguaacucgagggcuccu

SEQ ID NO: 443287 - RNA, 22 nt, Human
cagggcagcucccacagcuccc

SEQ ID NO: 443288 - RNA, 26 nt, Human
cccacgguaacucgagggcuccuucu

SEQ ID NO: 443289 - RNA, 25 nt, Human
ccgcagaccccucccucuccaguuc

SEQ ID NO: 443290 - RNA, 18 nt, Human
cgccccgcccacagaucg

SEQ ID NO: 443291 - RNA, 20 nt, Human
gagccaucggccggcagggu

SEQ ID NO: 443292 - RNA, 21 nt, Human
gcaggguucgccccgcccaca

SEQ ID NO: 443293 - RNA, 20 nt, Human
ggauuuccagcgccgcgucc

SEQ ID NO: 443294 - RNA, 20 nt, Human
uagguccuccgccggauuuc

SEQ ID NO: 443295 - RNA, 23 nt, Human
ucccucuccaguuccagccuuaa

SEQ ID NO: 443296 - RNA, 24 nt, Human
ucgccccgcccacagaucgcuccc

SEQ ID NO: 443297 - RNA, 21 nt, Human
ucguccugaugugggagccau

SEQ ID NO: 443298 - RNA, 23 nt, Human
ucuccaguuccagccuuaauucc

SEQ ID NO: 443299 - RNA, 19 nt, Human
ugaccgcagaccccucccu

SEQ ID NO: 443300 - RNA, 25 nt, Human
aaaacagacaaauuuuacagccaaa

SEQ ID NO: 443301 - RNA, 23 nt, Human
aaacauauaaaccacacuuguaa

SEQ ID NO: 443302 - RNA, 24 nt, Human
aaaccauacacuacauuccaaagc

SEQ ID NO: 443303 - RNA, 20 nt, Human
aacuuaguucaacacugauc

SEQ ID NO: 443304 - RNA, 21 nt, Human
acauuccaaagccaaauauga

SEQ ID NO: 443305 - RNA, 24 nt, Human
cauacacuacauuccaaagccaaa

SEQ ID NO: 443306 - RNA, 20 nt, Human
ccaugaguucuuuuuacuuu

SEQ ID NO: 443307 - RNA, 19 nt, Human
ccgccgccgcccgcgaugc

SEQ ID NO: 443308 - RNA, 30 nt, Human
cgccgccgccgcccgcgaugccgccgccgg

SEQ ID NO: 443309 - RNA, 24 nt, Human
cuaccaaaaaccauacacuacauu

SEQ ID NO: 443310 - RNA, 20 nt, Human
cugaguuaaagguuagggau

SEQ ID NO: 443311 - RNA, 22 nt, Human
cugaguuuucaaaauaagaaua

SEQ ID NO: 443312 - RNA, 19 nt, Human
uaacaguuaucuauaauaa

SEQ ID NO: 443313 - RNA, 23 nt, Human
uaguucaacacugaucuaagcaa

SEQ ID NO: 443314 - RNA, 18 nt, Human
ucagucccucuacacacu

SEQ ID NO: 443315 - RNA, 23 nt, Human
uccuacaacuguuagugugugcu

SEQ ID NO: 443316 - RNA, 21 nt, Human
ugagauuaucaauuucauguc

SEQ ID NO: 443317 - RNA, 20 nt, Human
uggaaaacagacaaauuuua

SEQ ID NO: 443318 - RNA, 19 nt, Human
uuagcuagcacuagaguaa

SEQ ID NO: 443319 - RNA, 19 nt, Human
uucauuagaaguaccauga

SEQ ID NO: 443320 - RNA, 20 nt, Human
aagaagacggcgaaagucgg

SEQ ID NO: 443321 - RNA, 19 nt, Human
acugcaguccuuccugcau

SEQ ID NO: 443322 - RNA, 22 nt, Human
agcucggaccgcgggaaacccg

SEQ ID NO: 443323 - RNA, 21 nt, Human
aggcuggaaaagaaacgacug

SEQ ID NO: 443324 - RNA, 19 nt, Human
aguuugguuuguaaguucu

SEQ ID NO: 443325 - RNA, 18 nt, Human
caaacugccaccuuggcc

SEQ ID NO: 443326 - RNA, 23 nt, Human
cagauucagaguccgaaggccag

SEQ ID NO: 443327 - RNA, 26 nt, Human
cagccaguuucucagaauaaaaguuu

SEQ ID NO: 443328 - RNA, 19 nt, Human
ccccgcccugcggccccgg

SEQ ID NO: 443329 - RNA, 22 nt, Human
ccgcccugcggccccggaacaa

SEQ ID NO: 443330 - RNA, 22 nt, Human
ggaaggaaguuguagauugcuu

SEQ ID NO: 443331 - RNA, 22 nt, Human
uaccacagaaaggcugggccca

SEQ ID NO: 443332 - RNA, 25 nt, Human
uggaaaagaaacgacuguccucccg

SEQ ID NO: 443333 - RNA, 24 nt, Human
uugcuuccuucaugucacuuucuu

SEQ ID NO: 443334 - RNA, 22 nt, Human
uuuguaaguucugauccacugc

SEQ ID NO: 443335 - RNA, 23 nt, Human
aaaaguuaugacaagggauggcu

SEQ ID NO: 443336 - RNA, 23 nt, Human
aaacucccggccucaagcaaucc

SEQ ID NO: 443337 - RNA, 22 nt, Human
aaagacaaggucucgcucuguu

SEQ ID NO: 443338 - RNA, 21 nt, Human
aaaggcaccaaauacugaaaa

SEQ ID NO: 443339 - RNA, 23 nt, Human
aaaggcaccaaauacugaaaagg

SEQ ID NO: 443340 - RNA, 19 nt, Human
aaagugcugggauuacugg

SEQ ID NO: 443341 - RNA, 24 nt, Human
aaagugcugggauuacuggcguga

SEQ ID NO: 443342 - RNA, 18 nt, Human
aagcaauccuccugcuuc

SEQ ID NO: 443343 - RNA, 30 nt, Human
aagcuugcuccccaaccuucacuggcuacc

SEQ ID NO: 443344 - RNA, 25 nt, Human
aagugauccucccaccucagccucc

SEQ ID NO: 443345 - RNA, 26 nt, Human
aagugcugggauuacuggcgugagcc

SEQ ID NO: 443346 - RNA, 21 nt, Human
accacccagccuucuuaucau

SEQ ID NO: 443347 - RNA, 19 nt, Human
accucagccucccuaguag

SEQ ID NO: 443348 - RNA, 18 nt, Human
acuccagccugcucuugc

SEQ ID NO: 443349 - RNA, 22 nt, Human
agagcacagggcccgaggagcc

SEQ ID NO: 443350 - RNA, 20 nt, Human
aggcacacaccaccaaugcc

SEQ ID NO: 443351 - RNA, 21 nt, Human
aggcucaagugauccucccac

SEQ ID NO: 443352 - RNA, 19 nt, Human
agguggaggagaggcuugc

SEQ ID NO: 443353 - RNA, 23 nt, Human
agugcaguagcacaaucauggcu

SEQ ID NO: 443354 - RNA, 18 nt, Human
aucauggcucacugcagc

SEQ ID NO: 443355 - RNA, 24 nt, Human
caaagugcugggauuacuggcgug

SEQ ID NO: 443356 - RNA, 21 nt, Human
caacggcuuuuccuggagucc

SEQ ID NO: 443357 - RNA, 22 nt, Human
caagcaauccuccugcuucagc

SEQ ID NO: 443358 - RNA, 27 nt, Human
caagcaauccuccugcuucagcccucc

SEQ ID NO: 443359 - RNA, 18 nt, Human
caagcaguagauagugag

SEQ ID NO: 443360 - RNA, 20 nt, Human
caagugauccucccaccuca

SEQ ID NO: 443361 - RNA, 27 nt, Human
caagugauccucccaccucagccuccc

SEQ ID NO: 443362 - RNA, 23 nt, Human
caauccuccugcuucagcccucc

SEQ ID NO: 443363 - RNA, 20 nt, Human
cagccucagucccccaggcu

SEQ ID NO: 443364 - RNA, 24 nt, Human
cagccucagucccccaggcucaag

SEQ ID NO: 443365 - RNA, 22 nt, Human
cagccugcucuugcuucucucc

SEQ ID NO: 443366 - RNA, 24 nt, Human
caggaagucagaggauggucaagc

SEQ ID NO: 443367 - RNA, 23 nt, Human
cauguugcccaggcuggucucaa

SEQ ID NO: 443368 - RNA, 24 nt, Human
cauguugcccaggcuggucucaaa

SEQ ID NO: 443369 - RNA, 23 nt, Human
cauuccugccccuagucuugggg

SEQ ID NO: 443370 - RNA, 22 nt, Human
ccaaagugcugggauuacuggc

SEQ ID NO: 443371 - RNA, 22 nt, Human
ccaaagugcugggauuacuggc

SEQ ID NO: 443372 - RNA, 24 nt, Human
ccaaagugcugggauuacuggcgu

SEQ ID NO: 443373 - RNA, 20 nt, Human
ccaaccuucacuggcuacgc

SEQ ID NO: 443374 - RNA, 22 nt, Human
cccaggcucaagugauccuccc

SEQ ID NO: 443375 - RNA, 24 nt, Human
ccccauguugcccaggcuggucuc

SEQ ID NO: 443376 - RNA, 27 nt, Human
ccccauguugcccaggcuggucucaaa

SEQ ID NO: 443377 - RNA, 25 nt, Human
cccccaggcucaagugauccuccca

SEQ ID NO: 443378 - RNA, 18 nt, Human
cccggccucaagcaaucc

SEQ ID NO: 443379 - RNA, 20 nt, Human
cccggccucaagcaauccuc

SEQ ID NO: 443380 - RNA, 24 nt, Human
cccuaguaguugggacuauaggca

SEQ ID NO: 443381 - RNA, 18 nt, Human
cccuggcuguccaggccu

SEQ ID NO: 443382 - RNA, 22 nt, Human
ccucacaagaauacaaaguaga

SEQ ID NO: 443383 - RNA, 25 nt, Human
ccucacaagaauacaaaguagagac

SEQ ID NO: 443384 - RNA, 24 nt, Human
ccucccaccucagccucccuagua

SEQ ID NO: 443385 - RNA, 22 nt, Human
ccuccugcuucagcccuccaaa

SEQ ID NO: 443386 - RNA, 26 nt, Human
ccuccugcuucagcccuccaaagugc

SEQ ID NO: 443387 - RNA, 19 nt, Human
ccuggagucccccucccuc

SEQ ID NO: 443388 - RNA, 25 nt, Human
ccuggagucccccucccucuuuccc

SEQ ID NO: 443389 - RNA, 20 nt, Human
cggccucaagcaauccuccu

SEQ ID NO: 443390 - RNA, 24 nt, Human
cggccucaagcaauccuccugcuu

SEQ ID NO: 443391 - RNA, 24 nt, Human
cucaagcaauccuccugcuucagc

SEQ ID NO: 443392 - RNA, 24 nt, Human
cucaagugauccucccaccucagc

SEQ ID NO: 443393 - RNA, 19 nt, Human
cucacugcagccucagucc

SEQ ID NO: 443394 - RNA, 22 nt, Human
cucccaccucagccucccuaau

SEQ ID NO: 443395 - RNA, 26 nt, Human
cuggagucccccucccucuuucccgc

SEQ ID NO: 443396 - RNA, 24 nt, Human
cugggucuccccauguugcccagg

SEQ ID NO: 443397 - RNA, 24 nt, Human
cuucuuaucauuccugccccuagu

SEQ ID NO: 443398 - RNA, 23 nt, Human
gaagguggaggagaggcuugcag

SEQ ID NO: 443399 - RNA, 18 nt, Human
gagccccuggcuguccag

SEQ ID NO: 443400 - RNA, 20 nt, Human
gagucccccucccucuuucc

SEQ ID NO: 443401 - RNA, 18 nt, Human
gauuacuggcgugagcca

SEQ ID NO: 443402 - RNA, 21 nt, Human
gauuacuggcgugagccacug

SEQ ID NO: 443403 - RNA, 24 nt, Human
gauuacuggcgugagccacugugc

SEQ ID NO: 443404 - RNA, 19 nt, Human
gcccaggaagucagaggau

SEQ ID NO: 443405 - RNA, 25 nt, Human
gcgaagcagacauagaaugggccuu

SEQ ID NO: 443406 - RNA, 23 nt, Human
gcuggucucaaacucccggccuc

SEQ ID NO: 443407 - RNA, 22 nt, Human
gcuguccaggccugaaggcagu

SEQ ID NO: 443408 - RNA, 19 nt, Human
ggaggagaggcuugcagag

SEQ ID NO: 443409 - RNA, 24 nt, Human
gugauccucccaccucagccuccc

SEQ ID NO: 443410 - RNA, 28 nt, Human
gugaugguccucucaacggcuuuuccuu

SEQ ID NO: 443411 - RNA, 19 nt, Human
guucauuggugcccucccc

SEQ ID NO: 443412 - RNA, 25 nt, Human
uaaaggcaccaaauacugaaaaggc

SEQ ID NO: 443413 - RNA, 27 nt, Human
uaaaggcaccaaauacugaaaaggccg

SEQ ID NO: 443414 - RNA, 19 nt, Human
uacaaaguagagacuccag

SEQ ID NO: 443415 - RNA, 24 nt, Human
uacuggcgugagccacugugcccg

SEQ ID NO: 443416 - RNA, 19 nt, Human
uacugugcuguucauuggu

SEQ ID NO: 443417 - RNA, 23 nt, Human
uagcacaaucauggcucacugca

SEQ ID NO: 443418 - RNA, 18 nt, Human
uaggggcccaggaaguca

SEQ ID NO: 443419 - RNA, 22 nt, Human
uaggugggacaucccagcuacc

SEQ ID NO: 443420 - RNA, 24 nt, Human
uaguaguugggacuauaggcacac

SEQ ID NO: 443421 - RNA, 25 nt, Human
ucaaaaguuaugacaagggauggcu

SEQ ID NO: 443422 - RNA, 25 nt, Human
ucaacggcuuuuccuggaguccccc

SEQ ID NO: 443423 - RNA, 24 nt, Human
ucacugcagccucagucccccagg

SEQ ID NO: 443424 - RNA, 21 nt, Human
ucccaccucagccucccuagu

SEQ ID NO: 443425 - RNA, 21 nt, Human
ucccagcuaccacccagccuu

SEQ ID NO: 443426 - RNA, 21 nt, Human
ucccccucccucuuucccgca

SEQ ID NO: 443427 - RNA, 24 nt, Human
ucccuaguaguugggacuauaggc

SEQ ID NO: 443428 - RNA, 20 nt, Human
uccuggagucccccucccuc

SEQ ID NO: 443429 - RNA, 23 nt, Human
ucuccccauguugcccaggcugg

SEQ ID NO: 443430 - RNA, 18 nt, Human
ucucgcucuguugccaga

SEQ ID NO: 443431 - RNA, 23 nt, Human
ucucgcucuguugccagauugga

SEQ ID NO: 443432 - RNA, 23 nt, Human
ucuguugccagauuggagugcag

SEQ ID NO: 443433 - RNA, 21 nt, Human
ugcccaggcuggucucaaacu

SEQ ID NO: 443434 - RNA, 24 nt, Human
ugccccuagucuuggggugaaggu

SEQ ID NO: 443435 - RNA, 23 nt, Human
ugccuggcuuuuuaaauuuuuuu

SEQ ID NO: 443436 - RNA, 18 nt, Human
ugcucagguugugauggu

SEQ ID NO: 443437 - RNA, 18 nt, Human
ugcuucucuccccaggca

SEQ ID NO: 443438 - RNA, 24 nt, Human
uggagugcaguagcacaaucaugg

SEQ ID NO: 443439 - RNA, 23 nt, Human
uggcgugagccacugugcccggu

SEQ ID NO: 443440 - RNA, 21 nt, Human
ugggacuauaggcacacacca

SEQ ID NO: 443441 - RNA, 24 nt, Human
ugggacuauaggcacacaccacca

SEQ ID NO: 443442 - RNA, 22 nt, Human
ugggauuacuggcgugagccac

SEQ ID NO: 443443 - RNA, 22 nt, Human
ugggauuacuggcgugagccac

SEQ ID NO: 443444 - RNA, 22 nt, Human
ugggauuacuggcgugagccac

SEQ ID NO: 443445 - RNA, 24 nt, Human
ugggauuacuggcgugagccacug

SEQ ID NO: 443446 - RNA, 23 nt, Human
ugggucuccccauguugcccagg

SEQ ID NO: 443447 - RNA, 24 nt, Human
uguagagacugggucuccccaugu

SEQ ID NO: 443448 - RNA, 21 nt, Human
uucagcccuccaaagugcugg

SEQ ID NO: 443449 - RNA, 21 nt, Human
uuccuggagucccccucccuc

SEQ ID NO: 443450 - RNA, 23 nt, Human
uuguaaagauguuuuuauuuuua

SEQ ID NO: 443451 - RNA, 27 nt, Human
uuuccuggagucccccucccucuuucc

SEQ ID NO: 443452 - RNA, 20 nt, Human
uuuccuggccaguauuuuuc

SEQ ID NO: 443453 - RNA, 18 nt, Human
uuuuuuuuuuuuuuguug

SEQ ID NO: 443454 - RNA, 19 nt, Human
uuuuuuuuuuuuuuuuguu

SEQ ID NO: 443455 - RNA, 24 nt, Human
aaaaaaaagacaauuuacaaagaa

SEQ ID NO: 443456 - RNA, 20 nt, Human
aaaaauagagaauccagacc

SEQ ID NO: 443457 - RNA, 23 nt, Human
aaaucaaaauagcuuucugcugg

SEQ ID NO: 443458 - RNA, 20 nt, Human
aacaugauggccacacagaa

SEQ ID NO: 443459 - RNA, 18 nt, Human
aagcagaaaaaaaaagac

SEQ ID NO: 443460 - RNA, 19 nt, Human
aagcagaaaaaaaaagaca

SEQ ID NO: 443461 - RNA, 19 nt, Human
acccuuuaaauaaggcagu

SEQ ID NO: 443462 - RNA, 27 nt, Human
agaaaaaaaaagacaauuuacaaagaa

SEQ ID NO: 443463 - RNA, 26 nt, Human
agugaaagagcagcaguuucaaaaga

SEQ ID NO: 443464 - RNA, 18 nt, Human
caaaagacacguccacuc

SEQ ID NO: 443465 - RNA, 20 nt, Human
caaaauagcuuucugcuggc

SEQ ID NO: 443466 - RNA, 24 nt, Human
caacuguauaaaacucgagaauau

SEQ ID NO: 443467 - RNA, 24 nt, Human
cacacagaaaacaguaaagacacu

SEQ ID NO: 443468 - RNA, 18 nt, Human
cagaaaacaguaaagaca

SEQ ID NO: 443469 - RNA, 22 nt, Human
gaauuucuaacucuguagaucu

SEQ ID NO: 443470 - RNA, 22 nt, Human
guccagaaugaauaagcaguuc

SEQ ID NO: 443471 - RNA, 21 nt, Human
uaaaauacaagcaaucaggac

SEQ ID NO: 443472 - RNA, 20 nt, Human
ucaaaagacacguccacucc

SEQ ID NO: 443473 - RNA, 25 nt, Human
ucgagaauaugaguauuuagguggu

SEQ ID NO: 443474 - RNA, 18 nt, Human
ucggugacgccugagaag

SEQ ID NO: 443475 - RNA, 20 nt, Human
ucugaagcagaaaaaaaaag

SEQ ID NO: 443476 - RNA, 19 nt, Human
ucuguagaucuaaaacaca

SEQ ID NO: 443477 - RNA, 24 nt, Human
ugaaagagcagcaguuucaaaaga

SEQ ID NO: 443478 - RNA, 19 nt, Human
ugaagcagaaaaaaaaaga

SEQ ID NO: 443479 - RNA, 20 nt, Human
ugcaguagcugccggcggcc

SEQ ID NO: 443480 - RNA, 18 nt, Human
ugcugagcucucggugac

SEQ ID NO: 443481 - RNA, 23 nt, Human
uuccuuaugcuguuauuucaaaa

SEQ ID NO: 443482 - RNA, 22 nt, Human
uugcaguagcugccggcggcug

SEQ ID NO: 443483 - RNA, 24 nt, Human
uuuuuuuuuuuuuuuuuuuuccag

SEQ ID NO: 443484 - RNA, 22 nt, Human
aaggucccggggcccucggcgu

SEQ ID NO: 443485 - RNA, 21 nt, Human
aaguagcuuggaggcugaagu

SEQ ID NO: 443486 - RNA, 23 nt, Human
acccuggacccaaauuauugcua

SEQ ID NO: 443487 - RNA, 24 nt, Human
agaagccaaaguagcuugguggga

SEQ ID NO: 443488 - RNA, 19 nt, Human
agaagccuggucccaagac

SEQ ID NO: 443489 - RNA, 20 nt, Human
agagcccuuccaccaggccc

SEQ ID NO: 443490 - RNA, 22 nt, Human
agagcccuuccaccaggcccuu

SEQ ID NO: 443491 - RNA, 20 nt, Human
agagggaggcaggcaggguc

SEQ ID NO: 443492 - RNA, 22 nt, Human
agccagcaccggccgguagaca

SEQ ID NO: 443493 - RNA, 29 nt, Human
agcucccccaggcugagaaccccaucggu

SEQ ID NO: 443494 - RNA, 20 nt, Human
aggaggagacaagcccuggu

SEQ ID NO: 443495 - RNA, 19 nt, Human
aggcagaagccaaaguagc

SEQ ID NO: 443496 - RNA, 20 nt, Human
aggcaggcagggucccgggg

SEQ ID NO: 443497 - RNA, 21 nt, Human
aggcagggucccggggcccuc

SEQ ID NO: 443498 - RNA, 22 nt, Human
aggcggccagauggccugaagc

SEQ ID NO: 443499 - RNA, 18 nt, Human
agggaggcaggcaggguc

SEQ ID NO: 443500 - RNA, 22 nt, Human
agggucccggggcccucggcgu

SEQ ID NO: 443501 - RNA, 22 nt, Human
caaacaauaaaauacagggaua

SEQ ID NO: 443502 - RNA, 18 nt, Human
caacggggcacccagcuc

SEQ ID NO: 443503 - RNA, 20 nt, Human
caagacagcaggaagaaagc

SEQ ID NO: 443504 - RNA, 19 nt, Human
caccggccgguagacaccc

SEQ ID NO: 443505 - RNA, 18 nt, Human
cagcgagcacugcacggu

SEQ ID NO: 443506 - RNA, 22 nt, Human
caggaagaaagccggacccucg

SEQ ID NO: 443507 - RNA, 18 nt, Human
caggaggagacaagcccu

SEQ ID NO: 443508 - RNA, 21 nt, Human
caggcccagccucggaggcaa

SEQ ID NO: 443509 - RNA, 22 nt, Human
cagggaccagaauucagguuuc

SEQ ID NO: 443510 - RNA, 18 nt, Human
caucagcccugcuucugc

SEQ ID NO: 443511 - RNA, 19 nt, Human
ccacccagacagggacggg

SEQ ID NO: 443512 - RNA, 23 nt, Human
cccaucaaugccgcugaacaguu

SEQ ID NO: 443513 - RNA, 21 nt, Human
cccccaggcugagaaccccau

SEQ ID NO: 443514 - RNA, 23 nt, Human
cccugguuuuugcgcugggcugg

SEQ ID NO: 443515 - RNA, 18 nt, Human
ccgguagacacccaggug

SEQ ID NO: 443516 - RNA, 19 nt, Human
ccugaucccugggcugaga

SEQ ID NO: 443517 - RNA, 21 nt, Human
cucaggcccagccucggaggc

SEQ ID NO: 443518 - RNA, 18 nt, Human
cucugugcugggguccca

SEQ ID NO: 443519 - RNA, 22 nt, Human
cugagcaucagcccugcuucug

SEQ ID NO: 443520 - RNA, 21 nt, Human
cuggucccaagacagcaggaa

SEQ ID NO: 443521 - RNA, 24 nt, Human
cuggucccaagacagcaggaagaa

SEQ ID NO: 443522 - RNA, 25 nt, Human
cuucugccgcuggcugaggaggagc

SEQ ID NO: 443523 - RNA, 23 nt, Human
cuuugcgcugggcuggccagucc

SEQ ID NO: 443524 - RNA, 21 nt, Human
gacagcagggaccagaauuca

SEQ ID NO: 443525 - RNA, 18 nt, Human
gagaaguagucacacagu

SEQ ID NO: 443526 - RNA, 24 nt, Human
gaggcaggcagggucccggggccc

SEQ ID NO: 443527 - RNA, 20 nt, Human
gcaaaccaacccaaaagccu

SEQ ID NO: 443528 - RNA, 22 nt, Human
gcagaagccaaaguagcuugga

SEQ ID NO: 443529 - RNA, 19 nt, Human
gcccugagaauggguggga

SEQ ID NO: 443530 - RNA, 22 nt, Human
gcugaggaggagcagaagccug

SEQ ID NO: 443531 - RNA, 23 nt, Human
ggcagaagccaaaguagcuugga

SEQ ID NO: 443532 - RNA, 18 nt, Human
ggccaggucaccuugggg

SEQ ID NO: 443533 - RNA, 18 nt, Human
ggccugaagcccacccag

SEQ ID NO: 443534 - RNA, 19 nt, Human
gggcuggccaguccagaag

SEQ ID NO: 443535 - RNA, 23 nt, Human
gugcuggggucccacccuggggu

SEQ ID NO: 443536 - RNA, 22 nt, Human
uaaauagaaagcaagcagccca

SEQ ID NO: 443537 - RNA, 23 nt, Human
uagacacccaggugcucugagaa

SEQ ID NO: 443538 - RNA, 18 nt, Human
uauugccucugugcuggg

SEQ ID NO: 443539 - RNA, 20 nt, Human
uccaaugcagccagcaccgg

SEQ ID NO: 443540 - RNA, 20 nt, Human
ucccccaggcugagaacccc

SEQ ID NO: 443541 - RNA, 22 nt, Human
ucccugagcaucagcccugcuu

SEQ ID NO: 443542 - RNA, 25 nt, Human
ucccugagcaucagcccugcuucug

SEQ ID NO: 443543 - RNA, 23 nt, Human
ucccugaucccuggggugagagc

SEQ ID NO: 443544 - RNA, 22 nt, Human
ucccugggcugagagcccuucc

SEQ ID NO: 443545 - RNA, 18 nt, Human
ucccuggggugagagccc

SEQ ID NO: 443546 - RNA, 19 nt, Human
uccugagccaggcagaagc

SEQ ID NO: 443547 - RNA, 22 nt, Human
ucgcuaggcggccagauggccu

SEQ ID NO: 443548 - RNA, 23 nt, Human
ucguucagccaggcagggacagc

SEQ ID NO: 443549 - RNA, 24 nt, Human
ugaacaguuccugcagcuccccca

SEQ ID NO: 443550 - RNA, 18 nt, Human
ugaagcccacccagacag

SEQ ID NO: 443551 - RNA, 23 nt, Human
ugacaaacaauaaaauacaggga

SEQ ID NO: 443552 - RNA, 26 nt, Human
ugacaaacaauaaaauacagggauaa

SEQ ID NO: 443553 - RNA, 28 nt, Human
ugagaaugggugggaugagggcaugcaa

SEQ ID NO: 443554 - RNA, 21 nt, Human
ugagaugcccaucaaugccgc

SEQ ID NO: 443555 - RNA, 22 nt, Human
ugaucccugggcugagagcccu

SEQ ID NO: 443556 - RNA, 18 nt, Human
ugcccugggucguucagc

SEQ ID NO: 443557 - RNA, 23 nt, Human
ugcccugggucguucagccaggc

SEQ ID NO: 443558 - RNA, 25 nt, Human
ugccuuuauugccucugugcugggg

SEQ ID NO: 443559 - RNA, 23 nt, Human
ugcuggggucccacccugggguu

SEQ ID NO: 443560 - RNA, 20 nt, Human
uggacccaaauuauugcuac

SEQ ID NO: 443561 - RNA, 19 nt, Human
uggccaggucaccuugggg

SEQ ID NO: 443562 - RNA, 21 nt, Human
uggccugggagggcaacgggg

SEQ ID NO: 443563 - RNA, 21 nt, Human
uggggugagagcccuuccacc

SEQ ID NO: 443564 - RNA, 20 nt, Human
ugggguucagaggccucugg

SEQ ID NO: 443565 - RNA, 22 nt, Human
ugggugggaugagggcaugcaa

SEQ ID NO: 443566 - RNA, 21 nt, Human
uuuuuuuuuuuggaagggacc

SEQ ID NO: 443567 - RNA, 21 nt, Human
uuuuuuuuuuuuuuggaaggg

SEQ ID NO: 443568 - RNA, 18 nt, Human
uuuuuuuuuuuuuuuuug

SEQ ID NO: 443569 - RNA, 24 nt, Human
uuuuuuuuuuuuuuuuuggaaggg

SEQ ID NO: 443570 - RNA, 19 nt, Human
agaaggcgcagcucgggga

SEQ ID NO: 443571 - RNA, 18 nt, Human
aggaccccgcuccccacg

SEQ ID NO: 443572 - RNA, 26 nt, Human
aggcaguucccaaaucgaggccgccu

SEQ ID NO: 443573 - RNA, 21 nt, Human
agggcaggcccaggauggggc

SEQ ID NO: 443574 - RNA, 22 nt, Human
cagccagggcaggcccaggaug

SEQ ID NO: 443575 - RNA, 22 nt, Human
cagccuccaggaccccgcuccc

SEQ ID NO: 443576 - RNA, 18 nt, Human
caggaccaagaaccgcug

SEQ ID NO: 443577 - RNA, 19 nt, Human
caggcaguucccaaaucga

SEQ ID NO: 443578 - RNA, 20 nt, Human
ccccagaaggcgcagcucgg

SEQ ID NO: 443579 - RNA, 21 nt, Human
cccgggccgcguccccagaag

SEQ ID NO: 443580 - RNA, 20 nt, Human
ccggggccauggaggcgaag

SEQ ID NO: 443581 - RNA, 23 nt, Human
ccguagacccugauccgagacuu

SEQ ID NO: 443582 - RNA, 21 nt, Human
ccuccaggaccccgcucccca

SEQ ID NO: 443583 - RNA, 18 nt, Human
cgccucagccccgcgcag

SEQ ID NO: 443584 - RNA, 23 nt, Human
cucagccccgcgcagccuccagg

SEQ ID NO: 443585 - RNA, 23 nt, Human
cuccaggaccccgcuccccacgg

SEQ ID NO: 443586 - RNA, 19 nt, Human
cuggccagccagggcaggc

SEQ ID NO: 443587 - RNA, 26 nt, Human
cuuaggccggcaucuucaggcaguuc

SEQ ID NO: 443588 - RNA, 20 nt, Human
gccucagccccgcgcagccu

SEQ ID NO: 443589 - RNA, 20 nt, Human
gcgcagccuccaggaccccg

SEQ ID NO: 443590 - RNA, 19 nt, Human
ggacggccccgacguagcc

SEQ ID NO: 443591 - RNA, 19 nt, Human
uauauuaggaaaucauaca

SEQ ID NO: 443592 - RNA, 19 nt, Human
uccccagaaggcgcagcuc

SEQ ID NO: 443593 - RNA, 23 nt, Human
uccucggucccguagacccuggc

SEQ ID NO: 443594 - RNA, 21 nt, Human
ugccaaaugcauaagcuuuua

SEQ ID NO: 443595 - RNA, 20 nt, Human
uggaggcgaaggcacagugg

SEQ ID NO: 443596 - RNA, 22 nt, Human
uggcaggcaagggaugaggugg

SEQ ID NO: 443597 - RNA, 24 nt, Human
aaacauauacaaaauuagauauaa

SEQ ID NO: 443598 - RNA, 22 nt, Human
agcuggcuucgccaacggcccc

SEQ ID NO: 443599 - RNA, 19 nt, Human
aucuagggcgagacuauuc

SEQ ID NO: 443600 - RNA, 19 nt, Human
caaccaucauuacuaacug

SEQ ID NO: 443601 - RNA, 22 nt, Human
ccgaaacucagauucucggcac

SEQ ID NO: 443602 - RNA, 19 nt, Human
ccugcaaccaucauuacua

SEQ ID NO: 443603 - RNA, 18 nt, Human
uuuuuuuuuuuuuuuuug

SEQ ID NO: 443604 - RNA, 19 nt, Human
uuuuuuuuuuuuuuuuugu

SEQ ID NO: 443605 - RNA, 20 nt, Human
aaagagguugucggcucccu

SEQ ID NO: 443606 - RNA, 22 nt, Human
aagaugagcagcggugcggucc

SEQ ID NO: 443607 - RNA, 18 nt, Human
acccccacccgcacuccc

SEQ ID NO: 443608 - RNA, 19 nt, Human
acccccuuuucccccaaaa

SEQ ID NO: 443609 - RNA, 18 nt, Human
acccugguucguuccucc

SEQ ID NO: 443610 - RNA, 21 nt, Human
acccugguucguuccuccugg

SEQ ID NO: 443611 - RNA, 19 nt, Human
acccuuuugggcuccgccg

SEQ ID NO: 443612 - RNA, 25 nt, Human
accuuccugcauaacccuggcccug

SEQ ID NO: 443613 - RNA, 22 nt, Human
acuccagcgacccuuggggucg

SEQ ID NO: 443614 - RNA, 22 nt, Human
acugacuccagcgacccuuggg

SEQ ID NO: 443615 - RNA, 23 nt, Human
agaaaggcuggccuugcccaugc

SEQ ID NO: 443616 - RNA, 21 nt, Human
agaggcccuggggcgaccuau

SEQ ID NO: 443617 - RNA, 18 nt, Human
agcggcccugaguugagg

SEQ ID NO: 443618 - RNA, 21 nt, Human
aggacaccuccacccucccug

SEQ ID NO: 443619 - RNA, 19 nt, Human
aggcagggagcugggaggg

SEQ ID NO: 443620 - RNA, 19 nt, Human
aggcgaaagugagcucagg

SEQ ID NO: 443621 - RNA, 21 nt, Human
agggggcuccuggcaggcagg

SEQ ID NO: 443622 - RNA, 18 nt, Human
aggggugcgacaggcagg

SEQ ID NO: 443623 - RNA, 24 nt, Human
agguguggcuguggcccccacggc

SEQ ID NO: 443624 - RNA, 22 nt, Human
aguguuaacugggggugggggc

SEQ ID NO: 443625 - RNA, 20 nt, Human
aucagggcuggaccggggcc

SEQ ID NO: 443626 - RNA, 19 nt, Human
auuggccucgcccgccgcg

SEQ ID NO: 443627 - RNA, 20 nt, Human
caacccucaaacccugguuc

SEQ ID NO: 443628 - RNA, 21 nt, Human
cacccaacccucaaacccugg

SEQ ID NO: 443629 - RNA, 19 nt, Human
cacggcaggggauggagaa

SEQ ID NO: 443630 - RNA, 23 nt, Human
cacuauuuaccacuauuuacacg

SEQ ID NO: 443631 - RNA, 23 nt, Human
cagaaacccgguacagaaacgug

SEQ ID NO: 443632 - RNA, 22 nt, Human
cagaggcagggagcugggaggg

SEQ ID NO: 443633 - RNA, 22 nt, Human
cagaggcccuggggcgaccuau

SEQ ID NO: 443634 - RNA, 18 nt, Human
cagccgagccccucaggc

SEQ ID NO: 443635 - RNA, 18 nt, Human
cagccggcccggcgucug

SEQ ID NO: 443636 - RNA, 19 nt, Human
cagcgacccuuggggucgc

SEQ ID NO: 443637 - RNA, 23 nt, Human
cagcucccagccucccccgccag

SEQ ID NO: 443638 - RNA, 22 nt, Human
caggagccagccagacccaagu

SEQ ID NO: 443639 - RNA, 22 nt, Human
caggcagggggauccguuggcc

SEQ ID NO: 443640 - RNA, 19 nt, Human
caggcccauggggcagcca

SEQ ID NO: 443641 - RNA, 21 nt, Human
caggucccagggccucgggcu

SEQ ID NO: 443642 - RNA, 24 nt, Human
cauaacccuggcccugucaccagc

SEQ ID NO: 443643 - RNA, 29 nt, Human
caucagccucaggacaccuccacccuccu

SEQ ID NO: 443644 - RNA, 20 nt, Human
ccacacccccacccgcacuc

SEQ ID NO: 443645 - RNA, 25 nt, Human
ccacacccccacccgcacucccaca

SEQ ID NO: 443646 - RNA, 20 nt, Human
ccagagccucggguggaggg

SEQ ID NO: 443647 - RNA, 24 nt, Human
ccaugacccccuuuucccccaaaa

SEQ ID NO: 443648 - RNA, 24 nt, Human
cccaaaacaaccugacagccuugc

SEQ ID NO: 443649 - RNA, 22 nt, Human
cccacagcuggggcugagaaug

SEQ ID NO: 443650 - RNA, 21 nt, Human
cccacauggggaaacagaggc

SEQ ID NO: 443651 - RNA, 22 nt, Human
cccacccccacccuuuugggcu

SEQ ID NO: 443652 - RNA, 21 nt, Human
cccagacccagacccggaccc

SEQ ID NO: 443653 - RNA, 21 nt, Human
cccagacccggacccggaggc

SEQ ID NO: 443654 - RNA, 23 nt, Human
cccagccucgccccaccugcggc

SEQ ID NO: 443655 - RNA, 18 nt, Human
cccagggccucgggcuca

SEQ ID NO: 443656 - RNA, 22 nt, Human
ccccaaaacaaccugacagccu

SEQ ID NO: 443657 - RNA, 21 nt, Human
ccccaaguccaaaagcucaga

SEQ ID NO: 443658 - RNA, 25 nt, Human
ccccacccuuuugggcuccgccgga

SEQ ID NO: 443659 - RNA, 18 nt, Human
ccccagccucgccccacc

SEQ ID NO: 443660 - RNA, 18 nt, Human
ccccagcuggcaggcccg

SEQ ID NO: 443661 - RNA, 24 nt, Human
ccccagucacggagacccggcccc

SEQ ID NO: 443662 - RNA, 18 nt, Human
cccccagcuggcaggccc

SEQ ID NO: 443663 - RNA, 20 nt, Human
ccccgccccagcugugcugu

SEQ ID NO: 443664 - RNA, 24 nt, Human
cccggccccugcgagucccacccc

SEQ ID NO: 443665 - RNA, 21 nt, Human
cccucaggcccuucuauaagc

SEQ ID NO: 443666 - RNA, 19 nt, Human
cccuggggcgaccuauggg

SEQ ID NO: 443667 - RNA, 20 nt, Human
cccuggggcgaccuaugggg

SEQ ID NO: 443668 - RNA, 19 nt, Human
cccuuggggucgccccagc

SEQ ID NO: 443669 - RNA, 20 nt, Human
ccgcaaaggcccccagcugg

SEQ ID NO: 443670 - RNA, 21 nt, Human
ccgccccguuuccuccuggac

SEQ ID NO: 443671 - RNA, 19 nt, Human
ccgcccucccccagccucg

SEQ ID NO: 443672 - RNA, 20 nt, Human
ccgccgcggcgccgcccucc

SEQ ID NO: 443673 - RNA, 25 nt, Human
ccggaaggcccccgaaccucccgcc

SEQ ID NO: 443674 - RNA, 24 nt, Human
ccggggcucggccacacccccacc

SEQ ID NO: 443675 - RNA, 24 nt, Human
ccucccacccccacccuuuugggc

SEQ ID NO: 443676 - RNA, 19 nt, Human
ccuuaggacuggcccugga

SEQ ID NO: 443677 - RNA, 18 nt, Human
ccuugccagcgcuccacg

SEQ ID NO: 443678 - RNA, 21 nt, Human
cgaagcagcggacccagaccc

SEQ ID NO: 443679 - RNA, 22 nt, Human
cgcaaaggcccccagcuggcag

SEQ ID NO: 443680 - RNA, 24 nt, Human
cgccggagcgcuugggcuccgggu

SEQ ID NO: 443681 - RNA, 20 nt, Human
cgcgcgccaucagggcugga

SEQ ID NO: 443682 - RNA, 21 nt, Human
cggcgggcgccgucaccuccc

SEQ ID NO: 443683 - RNA, 22 nt, Human
cgggcuccaggucccagggccu

SEQ ID NO: 443684 - RNA, 18 nt, Human
cggggguucugagagugg

SEQ ID NO: 443685 - RNA, 19 nt, Human
cggggugggggugggaggc

SEQ ID NO: 443686 - RNA, 20 nt, Human
cggggugggggugggaggcg

SEQ ID NO: 443687 - RNA, 21 nt, Human
cggugaggcgcgaggucgccg

SEQ ID NO: 443688 - RNA, 20 nt, Human
cggugagguguggcuguggc

SEQ ID NO: 443689 - RNA, 21 nt, Human
cuagcggccgccccguuuccu

SEQ ID NO: 443690 - RNA, 30 nt, Human
cucacagcggcccugaguugaggacagcuu

SEQ ID NO: 443691 - RNA, 22 nt, Human
cucagggcugggccaggacgcc

SEQ ID NO: 443692 - RNA, 24 nt, Human
cuccagcaccugcuggguggcaca

SEQ ID NO: 443693 - RNA, 21 nt, Human
cuccaggucccagggccucgg

SEQ ID NO: 443694 - RNA, 21 nt, Human
cugagagugguggggcucggg

SEQ ID NO: 443695 - RNA, 22 nt, Human
cugcagggugugggcccggagc

SEQ ID NO: 443696 - RNA, 27 nt, Human
cugcuggguggcacaccucggugacuu

SEQ ID NO: 443697 - RNA, 19 nt, Human
cuggacugggcggugaggu

SEQ ID NO: 443698 - RNA, 20 nt, Human
cuggcccuggagcauugggg

SEQ ID NO: 443699 - RNA, 24 nt, Human
cuguccccuucuggagcacagcug

SEQ ID NO: 443700 - RNA, 20 nt, Human
gaaaacaaucccugcaaagc

SEQ ID NO: 443701 - RNA, 21 nt, Human
gaaccucccgccuugucccag

SEQ ID NO: 443702 - RNA, 23 nt, Human
gacccagacccggacccggaggc

SEQ ID NO: 443703 - RNA, 25 nt, Human
gagaagcagcaguguuaacuggggg

SEQ ID NO: 443704 - RNA, 28 nt, Human
gagaagcagcaguguuaacugggggugg

SEQ ID NO: 443705 - RNA, 22 nt, Human
gagcacagcuggacugggcggu

SEQ ID NO: 443706 - RNA, 20 nt, Human
gagcagcggugcgguccugg

SEQ ID NO: 443707 - RNA, 24 nt, Human
gagcagcggugcgguccugggcaa

SEQ ID NO: 443708 - RNA, 23 nt, Human
gagcgugugccuucagccugggc

SEQ ID NO: 443709 - RNA, 21 nt, Human
gaggcagccgagccccucagg

SEQ ID NO: 443710 - RNA, 18 nt, Human
gagggaugggucauccgu

SEQ ID NO: 443711 - RNA, 18 nt, Human
gccucgggcucacugccg

SEQ ID NO: 443712 - RNA, 20 nt, Human
gcucacugccgggacucccc

SEQ ID NO: 443713 - RNA, 20 nt, Human
gcuccauccacccaacccuc

SEQ ID NO: 443714 - RNA, 18 nt, Human
ggacaccuccacccuccc

SEQ ID NO: 443715 - RNA, 21 nt, Human
ggaguuccccacggcccacau

SEQ ID NO: 443716 - RNA, 23 nt, Human
ggcucggccacacccccacccgc

SEQ ID NO: 443717 - RNA, 19 nt, Human
gggcaggagccagccagac

SEQ ID NO: 443718 - RNA, 19 nt, Human
gggccgcggugggagggag

SEQ ID NO: 443719 - RNA, 18 nt, Human
ggggaugaggcagccgag

SEQ ID NO: 443720 - RNA, 25 nt, Human
ggggcaacagauggggccgggugag

SEQ ID NO: 443721 - RNA, 20 nt, Human
gggggugggaggcggggcug

SEQ ID NO: 443722 - RNA, 24 nt, Human
ggggugcagggugacaugcauuca

SEQ ID NO: 443723 - RNA, 23 nt, Human
ggggugggggugggaggcggggc

SEQ ID NO: 443724 - RNA, 18 nt, Human
gggugagcacguguuugg

SEQ ID NO: 443725 - RNA, 19 nt, Human
gguggagggcaaggcuggg

SEQ ID NO: 443726 - RNA, 23 nt, Human
gguggggcucgggugggcagagg

SEQ ID NO: 443727 - RNA, 23 nt, Human
ggugucguccuuacgccggacag

SEQ ID NO: 443728 - RNA, 22 nt, Human
guagcucugggaguuccccccg

SEQ ID NO: 443729 - RNA, 18 nt, Human
gucacggagacccggccc

SEQ ID NO: 443730 - RNA, 18 nt, Human
guggggcugggguuuccu

SEQ ID NO: 443731 - RNA, 21 nt, Human
guggucauguugggggccagu

SEQ ID NO: 443732 - RNA, 21 nt, Human
guguggucauguugggggcca

SEQ ID NO: 443733 - RNA, 18 nt, Human
ucacggagacccggcccc

SEQ ID NO: 443734 - RNA, 23 nt, Human
ucaggacucgggguggggguggg

SEQ ID NO: 443735 - RNA, 19 nt, Human
ucaggcccuucuauaagcu

SEQ ID NO: 443736 - RNA, 24 nt, Human
uccaaaagcucagaagagaccacc

SEQ ID NO: 443737 - RNA, 21 nt, Human
uccacggucgggacuugaggc

SEQ ID NO: 443738 - RNA, 24 nt, Human
uccaggucccagggccucgggcuc

SEQ ID NO: 443739 - RNA, 25 nt, Human
ucccccaaaacaaccugacagccuu

SEQ ID NO: 443740 - RNA, 21 nt, Human
ucccccagccucgccccaccu

SEQ ID NO: 443741 - RNA, 20 nt, Human
ucccugaacaccgucugggc

SEQ ID NO: 443742 - RNA, 23 nt, Human
uccgugguggggcugggguuucc

SEQ ID NO: 443743 - RNA, 18 nt, Human
uccuggagaaggcacgug

SEQ ID NO: 443744 - RNA, 21 nt, Human
ucgccccacucagccugcauu

SEQ ID NO: 443745 - RNA, 21 nt, Human
ucgcccggggucaagcaacgg

SEQ ID NO: 443746 - RNA, 23 nt, Human
ucgcugccaccacgcucccccaa

SEQ ID NO: 443747 - RNA, 23 nt, Human
ucuacagcgcaggcccauggggc

SEQ ID NO: 443748 - RNA, 23 nt, Human
ugaaaacaaucccugcaaagccc

SEQ ID NO: 443749 - RNA, 25 nt, Human
ugaaaacaaucccugcaaagcccuc

SEQ ID NO: 443750 - RNA, 21 nt, Human
ugaaaagggacaagaugagca

SEQ ID NO: 443751 - RNA, 21 nt, Human
ugaacaccgucugggcggggc

SEQ ID NO: 443752 - RNA, 23 nt, Human
ugacuuauggacguccugucugg

SEQ ID NO: 443753 - RNA, 23 nt, Human
ugagcagcggugcgguccugggc

SEQ ID NO: 443754 - RNA, 21 nt, Human
ugagcuccauccacccaaccc

SEQ ID NO: 443755 - RNA, 22 nt, Human
ugagcuccauccacccaacccu

SEQ ID NO: 443756 - RNA, 18 nt, Human
ugaguugaggacagcucc

SEQ ID NO: 443757 - RNA, 24 nt, Human
ugcagaaaagagguugucggcucc

SEQ ID NO: 443758 - RNA, 20 nt, Human
ugcagugggcguaccuugag

SEQ ID NO: 443759 - RNA, 24 nt, Human
ugccagcgcuccacggucgggacu

SEQ ID NO: 443760 - RNA, 18 nt, Human
ugccccucccacccccac

SEQ ID NO: 443761 - RNA, 22 nt, Human
ugccggaaggcccccgaaccuc

SEQ ID NO: 443762 - RNA, 20 nt, Human
ugcgcaccuugcugcugggc

SEQ ID NO: 443763 - RNA, 18 nt, Human
ugcggcgggcgccgucac

SEQ ID NO: 443764 - RNA, 24 nt, Human
ugcugggcaaggcgucacgggcag

SEQ ID NO: 443765 - RNA, 18 nt, Human
uggaccuccgcggcacag

SEQ ID NO: 443766 - RNA, 18 nt, Human
uggcaggcccgccgcggc

SEQ ID NO: 443767 - RNA, 22 nt, Human
uggccucugccccucccacccc

SEQ ID NO: 443768 - RNA, 23 nt, Human
uggccucugccccucccaccccc

SEQ ID NO: 443769 - RNA, 24 nt, Human
ugggagggaggccuugcagugggc

SEQ ID NO: 443770 - RNA, 20 nt, Human
ugggaugggguccaaauguc

SEQ ID NO: 443771 - RNA, 24 nt, Human
ugggcggugagguguggcuguggu

SEQ ID NO: 443772 - RNA, 21 nt, Human
ugggcuccggguucccugaac

SEQ ID NO: 443773 - RNA, 20 nt, Human
ugggggccaguggcggucac

SEQ ID NO: 443774 - RNA, 19 nt, Human
ugggggugggaggcggggc

SEQ ID NO: 443775 - RNA, 21 nt, Human
ugggggugggaggcggggcug

SEQ ID NO: 443776 - RNA, 18 nt, Human
ugggggugggggcugggg

SEQ ID NO: 443777 - RNA, 22 nt, Human
ugggggugggggcuggggucag

SEQ ID NO: 443778 - RNA, 19 nt, Human
ugguggggcucgggugggc

SEQ ID NO: 443779 - RNA, 19 nt, Human
ugucccugcgaagcagcgg

SEQ ID NO: 443780 - RNA, 18 nt, Human
ugucggcucccucugcag

SEQ ID NO: 443781 - RNA, 23 nt, Human
uguuuggcauccccaaguccaaa

SEQ ID NO: 443782 - RNA, 27 nt, Human
uugauuguccagagaccgcggacugcc

SEQ ID NO: 443783 - RNA, 23 nt, Human
uugcagugggcguaccuugaguu

SEQ ID NO: 443784 - RNA, 19 nt, Human
uuuggcauccccaagucca

SEQ ID NO: 443785 - RNA, 19 nt, Human
uuuggcauccccaagucca

SEQ ID NO: 443786 - RNA, 25 nt, Human
uuuugagcuccauccacccaacccu

SEQ ID NO: 443787 - RNA, 19 nt, Human
aacucccucauucccagac

SEQ ID NO: 443788 - RNA, 24 nt, Human
acagagaaggagggggccccaaaa

SEQ ID NO: 443789 - RNA, 19 nt, Human
acaguggcccccugccccu

SEQ ID NO: 443790 - RNA, 21 nt, Human
acuacaguggcccccugcccc

SEQ ID NO: 443791 - RNA, 18 nt, Human
acucgcccggugcucccc

SEQ ID NO: 443792 - RNA, 20 nt, Human
acucgcccggugcuccccuu

SEQ ID NO: 443793 - RNA, 18 nt, Human
agaaggagggggccccaa

SEQ ID NO: 443794 - RNA, 18 nt, Human
agacaaacagauagacag

SEQ ID NO: 443795 - RNA, 23 nt, Human
agacaaacagauagacaggccug

SEQ ID NO: 443796 - RNA, 21 nt, Human
aggaggcagugaaacacagcg

SEQ ID NO: 443797 - RNA, 19 nt, Human
aggcauccuucccugacug

SEQ ID NO: 443798 - RNA, 19 nt, Human
aggccuuugucaacagccc

SEQ ID NO: 443799 - RNA, 22 nt, Human
aggguccacaggggcccauggg

SEQ ID NO: 443800 - RNA, 20 nt, Human
auggggcugcugaaagggga

SEQ ID NO: 443801 - RNA, 21 nt, Human
cacucugucucaccccaccuc

SEQ ID NO: 443802 - RNA, 21 nt, Human
cagauagacaggccuguagca

SEQ ID NO: 443803 - RNA, 24 nt, Human
cagcacagagccuggggccucugg

SEQ ID NO: 443804 - RNA, 18 nt, Human
cagcacucaguccaucug

SEQ ID NO: 443805 - RNA, 25 nt, Human
cagccccugcuccuugggccccucc

SEQ ID NO: 443806 - RNA, 18 nt, Human
caggcucugggaacuccu

SEQ ID NO: 443807 - RNA, 25 nt, Human
caggcucugggaacuccucuggggg

SEQ ID NO: 443808 - RNA, 19 nt, Human
cagggagagacucgggggg

SEQ ID NO: 443809 - RNA, 18 nt, Human
cagggcucagccaggcug

SEQ ID NO: 443810 - RNA, 21 nt, Human
cauucccagacagagcacccc

SEQ ID NO: 443811 - RNA, 25 nt, Human
ccagacagagcaccccagcccugac

SEQ ID NO: 443812 - RNA, 18 nt, Human
ccagcccugacagagaag

SEQ ID NO: 443813 - RNA, 18 nt, Human
ccccugggggcugcaugg

SEQ ID NO: 443814 - RNA, 21 nt, Human
ccccuucccagcacucagucc

SEQ ID NO: 443815 - RNA, 20 nt, Human
cccugcuccuugggccccuc

SEQ ID NO: 443816 - RNA, 19 nt, Human
cccugggggcugcaugggg

SEQ ID NO: 443817 - RNA, 21 nt, Human
ccguaaucucucccacucugu

SEQ ID NO: 443818 - RNA, 21 nt, Human
ccugcaccaaacuugguuaac

SEQ ID NO: 443819 - RNA, 18 nt, Human
ccugggggcugcaugggg

SEQ ID NO: 443820 - RNA, 19 nt, Human
cgccccuucccagcacuca

SEQ ID NO: 443821 - RNA, 25 nt, Human
cuccaugccaugccguaaucucucc

SEQ ID NO: 443822 - RNA, 24 nt, Human
cuccuggccugcacagccaugugu

SEQ ID NO: 443823 - RNA, 20 nt, Human
cuccuugggccccuccaugc

SEQ ID NO: 443824 - RNA, 21 nt, Human
cucgcccggugcuccccuuca

SEQ ID NO: 443825 - RNA, 23 nt, Human
gaggguagcggggggagcacagg

SEQ ID NO: 443826 - RNA, 19 nt, Human
gccagggcucagccaggcu

SEQ ID NO: 443827 - RNA, 18 nt, Human
gcccaugggcuauccccc

SEQ ID NO: 443828 - RNA, 20 nt, Human
ggaggguccacaggggccca

SEQ ID NO: 443829 - RNA, 19 nt, Human
gggaggcugggacgggucc

SEQ ID NO: 443830 - RNA, 18 nt, Human
gggagggaggguccacag

SEQ ID NO: 443831 - RNA, 20 nt, Human
gggccccuccaugccaugcc

SEQ ID NO: 443832 - RNA, 21 nt, Human
gggccccuccaugccaugccg

SEQ ID NO: 443833 - RNA, 25 nt, Human
gggccggcaggccugggucuguggg

SEQ ID NO: 443834 - RNA, 18 nt, Human
ggugauggggcugcugaa

SEQ ID NO: 443835 - RNA, 22 nt, Human
guuuccaaauuucuccacgcuc

SEQ ID NO: 443836 - RNA, 19 nt, Human
ucaccccaccucagcuccg

SEQ ID NO: 443837 - RNA, 22 nt, Human
ucaucagcacagagccuggggc

SEQ ID NO: 443838 - RNA, 23 nt, Human
uccacgcucacuacaguggcccc

SEQ ID NO: 443839 - RNA, 19 nt, Human
ucccacucugucucacccc

SEQ ID NO: 443840 - RNA, 23 nt, Human
ucccagacagagcaccccagccc

SEQ ID NO: 443841 - RNA, 19 nt, Human
uccuugggccccuccaugc

SEQ ID NO: 443842 - RNA, 22 nt, Human
ucgcagccgccccuucccagca

SEQ ID NO: 443843 - RNA, 18 nt, Human
ucucaccccaccucagcu

SEQ ID NO: 443844 - RNA, 22 nt, Human
ucuuuugugaaauagaaagugu

SEQ ID NO: 443845 - RNA, 20 nt, Human
ugaaaggggauguagaccca

SEQ ID NO: 443846 - RNA, 24 nt, Human
ugaguuaagaaauagguguuucca

SEQ ID NO: 443847 - RNA, 23 nt, Human
ugcacagccauguguccacuugg

SEQ ID NO: 443848 - RNA, 22 nt, Human
ugccaugccguaaucucuccca

SEQ ID NO: 443849 - RNA, 21 nt, Human
ugggccuccuggccugcacag

SEQ ID NO: 443850 - RNA, 22 nt, Human
uggggagggaggguccacaggg

SEQ ID NO: 443851 - RNA, 26 nt, Human
uggggagggaggguccacaggggccc

SEQ ID NO: 443852 - RNA, 19 nt, Human
ugggguggggaggggaggc

SEQ ID NO: 443853 - RNA, 21 nt, Human
ugggguggggaggggaggcug

SEQ ID NO: 443854 - RNA, 19 nt, Human
ugggucugugggcaggagg

SEQ ID NO: 443855 - RNA, 18 nt, Human
uuccaaauuucuccacgc

SEQ ID NO: 443856 - RNA, 19 nt, Human
aaacaaccucuugcuuggc

SEQ ID NO: 443857 - RNA, 22 nt, Human
aaagacaucaucaagagggaag

SEQ ID NO: 443858 - RNA, 19 nt, Human
aaccacccuggcacuucca

SEQ ID NO: 443859 - RNA, 19 nt, Human
aagaaaggcgcgagccgcg

SEQ ID NO: 443860 - RNA, 18 nt, Human
aagaaggcccaaucccug

SEQ ID NO: 443861 - RNA, 18 nt, Human
aagcaaaaggggagaaag

SEQ ID NO: 443862 - RNA, 23 nt, Human
aagcaaaaggggagaaaggggac

SEQ ID NO: 443863 - RNA, 22 nt, Human
aagcagcagcagcagcagcagc

SEQ ID NO: 443864 - RNA, 27 nt, Human
aagcaugagccuuuaagcagcagcagc

SEQ ID NO: 443865 - RNA, 23 nt, Human
aagcggcaucagggacccuccac

SEQ ID NO: 443866 - RNA, 21 nt, Human
acacacacaaaguugggcauc

SEQ ID NO: 443867 - RNA, 23 nt, Human
acacaggggaagggaacaauuuc

SEQ ID NO: 443868 - RNA, 22 nt, Human
acagaacaaucuuuacaaacau

SEQ ID NO: 443869 - RNA, 18 nt, Human
acccccagccccagccuc

SEQ ID NO: 443870 - RNA, 18 nt, Human
acccuggcacuuccaugc

SEQ ID NO: 443871 - RNA, 21 nt, Human
acccugggucugggaaugcug

SEQ ID NO: 443872 - RNA, 21 nt, Human
accuggagcuugggcuagcug

SEQ ID NO: 443873 - RNA, 23 nt, Human
acuacccucuucuguucccuauc

SEQ ID NO: 443874 - RNA, 19 nt, Human
agaagagacuuucugggca

SEQ ID NO: 443875 - RNA, 22 nt, Human
agaguacccugggucugggaau

SEQ ID NO: 443876 - RNA, 23 nt, Human
agcagcagcauagguaaaggggc

SEQ ID NO: 443877 - RNA, 18 nt, Human
agccagcuugccucuccc

SEQ ID NO: 443878 - RNA, 24 nt, Human
agcuugggcuagcuggggaugggg

SEQ ID NO: 443879 - RNA, 19 nt, Human
aggaagaagggaguauugg

SEQ ID NO: 443880 - RNA, 22 nt, Human
aggaaggaaggcccaaaugaag

SEQ ID NO: 443881 - RNA, 20 nt, Human
aggaagguccggucaacacg

SEQ ID NO: 443882 - RNA, 25 nt, Human
aggcaagagaagugacaaaggacuu

SEQ ID NO: 443883 - RNA, 27 nt, Human
aggcaagagaagugacaaaggggaccc

SEQ ID NO: 443884 - RNA, 18 nt, Human
aggccgaugaggcaggag

SEQ ID NO: 443885 - RNA, 20 nt, Human
agggccucccggggagaggg

SEQ ID NO: 443886 - RNA, 19 nt, Human
augaggcaggagacacaga

SEQ ID NO: 443887 - RNA, 22 nt, Human
auugugggacuuggggggcccu

SEQ ID NO: 443888 - RNA, 23 nt, Human
caacaggacaguucacagccagc

SEQ ID NO: 443889 - RNA, 22 nt, Human
caagcaaaaggggagaaagccc

SEQ ID NO: 443890 - RNA, 22 nt, Human
cacaacaggacaguucacagcc

SEQ ID NO: 443891 - RNA, 24 nt, Human
cacccccagccccagccucgggaa

SEQ ID NO: 443892 - RNA, 22 nt, Human
cacccuccccuccugaccugga

SEQ ID NO: 443893 - RNA, 19 nt, Human
cagcagcagcagcagcagc

SEQ ID NO: 443894 - RNA, 25 nt, Human
cagcagcagcagcagcagcagcguu

SEQ ID NO: 443895 - RNA, 18 nt, Human
cagcagcagcguuagcag

SEQ ID NO: 443896 - RNA, 19 nt, Human
cagcagggguaggucaggg

SEQ ID NO: 443897 - RNA, 18 nt, Human
cagccacccccagcccca

SEQ ID NO: 443898 - RNA, 25 nt, Human
cagccagcaccucuuaacuagaguc

SEQ ID NO: 443899 - RNA, 28 nt, Human
cagcuccagccccacaacaggacaguuc

SEQ ID NO: 443900 - RNA, 23 nt, Human
cagcugggggaauggugcagcag

SEQ ID NO: 443901 - RNA, 24 nt, Human
caggagacacagaaaggaaggggg

SEQ ID NO: 443902 - RNA, 19 nt, Human
caggcagggacuagggcgg

SEQ ID NO: 443903 - RNA, 18 nt, Human
caucuuucuuuccuuccu

SEQ ID NO: 443904 - RNA, 20 nt, Human
ccacacacacaaaguugggc

SEQ ID NO: 443905 - RNA, 23 nt, Human
ccacccuggcacuuccaugcccc

SEQ ID NO: 443906 - RNA, 20 nt, Human
ccagccacccccagccccag

SEQ ID NO: 443907 - RNA, 23 nt, Human
cccacaacaggacaguucacagc

SEQ ID NO: 443908 - RNA, 22 nt, Human
cccacacacacaaaguugggca

SEQ ID NO: 443909 - RNA, 21 nt, Human
cccacuuucuccccuucccca

SEQ ID NO: 443910 - RNA, 22 nt, Human
cccagccacccccagccccagc

SEQ ID NO: 443911 - RNA, 25 nt, Human
cccagccccagccucgggaaaaggc

SEQ ID NO: 443912 - RNA, 19 nt, Human
ccccaaaggaaaagcccug

SEQ ID NO: 443913 - RNA, 22 nt, Human
ccccacuuucuccccuucccca

SEQ ID NO: 443914 - RNA, 27 nt, Human
cccccagccccagccucgggaaaaggc

SEQ ID NO: 443915 - RNA, 19 nt, Human
ccccccuagcccacccacu

SEQ ID NO: 443916 - RNA, 22 nt, Human
ccccccuagcccacccacuacc

SEQ ID NO: 443917 - RNA, 23 nt, Human
ccccccuagcccacccacuaccc

SEQ ID NO: 443918 - RNA, 22 nt, Human
cccccguccccacacacacaaa

SEQ ID NO: 443919 - RNA, 21 nt, Human
ccccgccgcucccgcuggccg

SEQ ID NO: 443920 - RNA, 18 nt, Human
ccccucucuaccucuccc

SEQ ID NO: 443921 - RNA, 24 nt, Human
cccgcgcucagggcagaccggggc

SEQ ID NO: 443922 - RNA, 26 nt, Human
cccucccagccacccccagccccagc

SEQ ID NO: 443923 - RNA, 18 nt, Human
cccuccuuccuucugccc

SEQ ID NO: 443924 - RNA, 18 nt, Human
cccuccuuccuucugccc

SEQ ID NO: 443925 - RNA, 25 nt, Human
cccucucuaccucucccuuaacuga

SEQ ID NO: 443926 - RNA, 18 nt, Human
cccuggaggccaggugag

SEQ ID NO: 443927 - RNA, 19 nt, Human
cccugggguugagcgguag

SEQ ID NO: 443928 - RNA, 19 nt, Human
cccuuccccucccagccac

SEQ ID NO: 443929 - RNA, 21 nt, Human
ccgccgcucccgcuggccgcc

SEQ ID NO: 443930 - RNA, 22 nt, Human
ccgccgcucccgcuggccgccu

SEQ ID NO: 443931 - RNA, 23 nt, Human
ccgcggucaaggagagccagagc

SEQ ID NO: 443932 - RNA, 24 nt, Human
ccgcucccgcuggccgccuccccc

SEQ ID NO: 443933 - RNA, 22 nt, Human
ccgcucccgcuggccgccuccg

SEQ ID NO: 443934 - RNA, 19 nt, Human
ccgggagcggcagcggcga

SEQ ID NO: 443935 - RNA, 28 nt, Human
ccgggagcggcagcggcgagcucuuucu

SEQ ID NO: 443936 - RNA, 22 nt, Human
ccuagcccacccacuacccucu

SEQ ID NO: 443937 - RNA, 24 nt, Human
ccucccagccacccccagccccag

SEQ ID NO: 443938 - RNA, 23 nt, Human
ccuccucucccgccgcggggcag

SEQ ID NO: 443939 - RNA, 19 nt, Human
ccucucccuucccuucccc

SEQ ID NO: 443940 - RNA, 24 nt, Human
ccucucccuucccuuccccuccca

SEQ ID NO: 443941 - RNA, 19 nt, Human
ccuggcacuuccaugcccc

SEQ ID NO: 443942 - RNA, 18 nt, Human
ccuucuucuccccucucc

SEQ ID NO: 443943 - RNA, 19 nt, Human
ccuugggccgccgcggccc

SEQ ID NO: 443944 - RNA, 22 nt, Human
ccuugggccgccgcggccccgg

SEQ ID NO: 443945 - RNA, 23 nt, Human
cgaccaguccccacuccaagcau

SEQ ID NO: 443946 - RNA, 22 nt, Human
cgccuccgcucuucugcagccu

SEQ ID NO: 443947 - RNA, 21 nt, Human
cgguagucucagugccugagc

SEQ ID NO: 443948 - RNA, 22 nt, Human
cuagagucucuccuugcuuuuc

SEQ ID NO: 443949 - RNA, 18 nt, Human
cucccagcuuucuuagcc

SEQ ID NO: 443950 - RNA, 21 nt, Human
cuccccucuccgccuccccca

SEQ ID NO: 443951 - RNA, 26 nt, Human
cuccugggaacccugcucaagcaaaa

SEQ ID NO: 443952 - RNA, 18 nt, Human
cucuccgccucccccaaa

SEQ ID NO: 443953 - RNA, 26 nt, Human
cucuccuugcuuuucucugcauucuu

SEQ ID NO: 443954 - RNA, 25 nt, Human
cugacucccccguccccacacacac

SEQ ID NO: 443955 - RNA, 23 nt, Human
cugcaggucauggcaggccgaug

SEQ ID NO: 443956 - RNA, 24 nt, Human
cuggagaagaagggaggcuuucug

SEQ ID NO: 443957 - RNA, 24 nt, Human
cuggagcccacagaagggagcacu

SEQ ID NO: 443958 - RNA, 19 nt, Human
cuggggauggggugugggg

SEQ ID NO: 443959 - RNA, 21 nt, Human
cuggggauggggugugggggc

SEQ ID NO: 443960 - RNA, 20 nt, Human
cuucuccccucuccgccucc

SEQ ID NO: 443961 - RNA, 22 nt, Human
cuugggccgccgcggccccggc

SEQ ID NO: 443962 - RNA, 19 nt, Human
cuugucuucucuuucuccc

SEQ ID NO: 443963 - RNA, 19 nt, Human
gaaaggcgcgagccgcggc

SEQ ID NO: 443964 - RNA, 21 nt, Human
gaccuggagaagaagggaggc

SEQ ID NO: 443965 - RNA, 19 nt, Human
gagaccugguccccauccc

SEQ ID NO: 443966 - RNA, 21 nt, Human
gagcaaacgcugaugcuccac

SEQ ID NO: 443967 - RNA, 22 nt, Human
gccagagcagcaggagcgccug

SEQ ID NO: 443968 - RNA, 23 nt, Human
gccauggaguccagugauugaag

SEQ ID NO: 443969 - RNA, 19 nt, Human
gccccccuagcccacccac

SEQ ID NO: 443970 - RNA, 26 nt, Human
gccccgccgcucccgcuggggccgcc

SEQ ID NO: 443971 - RNA, 22 nt, Human
gccgcggccccggcgagccggc

SEQ ID NO: 443972 - RNA, 18 nt, Human
gcgcgugcgggcgcagag

SEQ ID NO: 443973 - RNA, 24 nt, Human
gcgcucagggcagacaugaggaag

SEQ ID NO: 443974 - RNA, 20 nt, Human
gcggaggggaccuggagaag

SEQ ID NO: 443975 - RNA, 19 nt, Human
gcggcuccgggagcggcag

SEQ ID NO: 443976 - RNA, 20 nt, Human
gcucuugucuucucuuucuc

SEQ ID NO: 443977 - RNA, 24 nt, Human
gcuugccucucccuucccuucccc

SEQ ID NO: 443978 - RNA, 23 nt, Human
ggaagguccggucaacacgaagg

SEQ ID NO: 443979 - RNA, 18 nt, Human
ggccccggcgagccggcg

SEQ ID NO: 443980 - RNA, 19 nt, Human
ggcgcccggaggccaagaa

SEQ ID NO: 443981 - RNA, 21 nt, Human
ggcuugggggagguggauagg

SEQ ID NO: 443982 - RNA, 20 nt, Human
ggggaauggugcagcagggg

SEQ ID NO: 443983 - RNA, 21 nt, Human
ggggauggggugugggggcag

SEQ ID NO: 443984 - RNA, 21 nt, Human
gggggcagcuggccaguuaug

SEQ ID NO: 443985 - RNA, 23 nt, Human
ggggugugggggcaggaagaagg

SEQ ID NO: 443986 - RNA, 23 nt, Human
ggugugggggcaggaagaaggga

SEQ ID NO: 443987 - RNA, 24 nt, Human
gucacuccccucuccaggcuucug

SEQ ID NO: 443988 - RNA, 23 nt, Human
gugggagcagcuccagccccaca

SEQ ID NO: 443989 - RNA, 21 nt, Human
guuaugggggcagcuggccag

SEQ ID NO: 443990 - RNA, 21 nt, Human
uaaggcaagagaagugacaaa

SEQ ID NO: 443991 - RNA, 19 nt, Human
uaccucggacuccugaaaa

SEQ ID NO: 443992 - RNA, 21 nt, Human
uagagucucuccuugcuuuuc

SEQ ID NO: 443993 - RNA, 23 nt, Human
uagagucucuccuugcuuuucuc

SEQ ID NO: 443994 - RNA, 20 nt, Human
uagccaugucaggcccagca

SEQ ID NO: 443995 - RNA, 19 nt, Human
uaggagaugggagaccugg

SEQ ID NO: 443996 - RNA, 18 nt, Human
ucaaggagagccagagca

SEQ ID NO: 443997 - RNA, 20 nt, Human
ucacggaagcuagggccucc

SEQ ID NO: 443998 - RNA, 25 nt, Human
ucauaaacaaccacuuuaaauaagg

SEQ ID NO: 443999 - RNA, 23 nt, Human
ucccccaaaggaaaagcccugga

SEQ ID NO: 444000 - RNA, 23 nt, Human
ucccccguccccacacacacaaa

SEQ ID NO: 444001 - RNA, 18 nt, Human
ucuuucuuuccuuccuuc

SEQ ID NO: 444002 - RNA, 21 nt, Human
ugaaaagacaucaucaagagg

SEQ ID NO: 444003 - RNA, 22 nt, Human
ugacucugagcaggucacuccc

SEQ ID NO: 444004 - RNA, 26 nt, Human
ugccucucccuucccuuccccuccca

SEQ ID NO: 444005 - RNA, 21 nt, Human
ugcuuggcuuuuacuccuggg

SEQ ID NO: 444006 - RNA, 21 nt, Human
uggcagaagagacuuucuggg

SEQ ID NO: 444007 - RNA, 19 nt, Human
uggccccucacggaagcua

SEQ ID NO: 444008 - RNA, 24 nt, Human
ugggacuuggggggcccugacucc

SEQ ID NO: 444009 - RNA, 20 nt, Human
ugggagcagcuccagcccca

SEQ ID NO: 444010 - RNA, 18 nt, Human
uggggauggggugugggg

SEQ ID NO: 444011 - RNA, 19 nt, Human
uggggaugggguguggggg

SEQ ID NO: 444012 - RNA, 21 nt, Human
uggggauggggugugggggca

SEQ ID NO: 444013 - RNA, 19 nt, Human
ugggggcaggaagaaggga

SEQ ID NO: 444014 - RNA, 19 nt, Human
ugggggcaggaagaaggga

SEQ ID NO: 444015 - RNA, 21 nt, Human
ugggggcgucaguggcagaag

SEQ ID NO: 444016 - RNA, 19 nt, Human
ugugggacuuggggggccc

SEQ ID NO: 444017 - RNA, 23 nt, Human
uucugggcaccgaccagucccca

SEQ ID NO: 444018 - RNA, 21 nt, Human
uucuuagcggcuggcugcucg

SEQ ID NO: 444019 - RNA, 22 nt, Human
uucuucuccccucuccgccucc

SEQ ID NO: 444020 - RNA, 19 nt, Human
uugaacacaggggaaggga

SEQ ID NO: 444021 - RNA, 22 nt, Human
uugcuuggcuuuuacuccuggg

SEQ ID NO: 444022 - RNA, 23 nt, Human
uugggcuagcuggggauggggug

SEQ ID NO: 444023 - RNA, 23 nt, Human
uuggggcguuagaugagacaggc

SEQ ID NO: 444024 - RNA, 20 nt, Human
uuuccuuccuucuguuccuu

SEQ ID NO: 444025 - RNA, 24 nt, Human
uuucuccccuuccccacggggcug

SEQ ID NO: 444026 - RNA, 25 nt, Human
uuucuuuccuuccuucuguuccuuu

SEQ ID NO: 444027 - RNA, 22 nt, Human
uuuuuuuuuuuuuuuuuuucag

SEQ ID NO: 444028 - RNA, 30 nt, Human
uuuuuuuuuuuuuuuuuuucagcuuuuaaa

SEQ ID NO: 444029 - RNA, 19 nt, Human
aaacaaauacacagacuuu

SEQ ID NO: 444030 - RNA, 20 nt, Human
aagcaggaggcagcucaggg

SEQ ID NO: 444031 - RNA, 21 nt, Human
aagcaggaggcagcucaggga

SEQ ID NO: 444032 - RNA, 18 nt, Human
aagcucaccaacaaggag

SEQ ID NO: 444033 - RNA, 21 nt, Human
acuuugagggagaagcaggag

SEQ ID NO: 444034 - RNA, 23 nt, Human
agaagugauuuaaaaucacacaa

SEQ ID NO: 444035 - RNA, 20 nt, Human
agagaaggguaggagacuuu

SEQ ID NO: 444036 - RNA, 22 nt, Human
agagaaggguaggagacuuuga

SEQ ID NO: 444037 - RNA, 21 nt, Human
agaggaagagaaggguaggag

SEQ ID NO: 444038 - RNA, 23 nt, Human
agaggaagagaaggguaggagac

SEQ ID NO: 444039 - RNA, 21 nt, Human
agcccgcgccaaccuaggcgc

SEQ ID NO: 444040 - RNA, 22 nt, Human
agcccgcgccaaccuaggcgcg

SEQ ID NO: 444041 - RNA, 22 nt, Human
aggaaagcgaggaagagagggc

SEQ ID NO: 444042 - RNA, 23 nt, Human
aggaagagagggcuuaaaagagg

SEQ ID NO: 444043 - RNA, 26 nt, Human
aggauuaaggcacaagaagcucacca

SEQ ID NO: 444044 - RNA, 19 nt, Human
aggggcugggucacaggau

SEQ ID NO: 444045 - RNA, 24 nt, Human
cacacaacuuccuggggcagcuag

SEQ ID NO: 444046 - RNA, 22 nt, Human
caccucccagcccgcgccaacc

SEQ ID NO: 444047 - RNA, 22 nt, Human
ccucccagcccgcgccaaccua

SEQ ID NO: 444048 - RNA, 21 nt, Human
cuuuccagcaaagacagaagu

SEQ ID NO: 444049 - RNA, 23 nt, Human
cuuugagggagaagcaggaggca

SEQ ID NO: 444050 - RNA, 21 nt, Human
gaagcaggaggcagcucaggg

SEQ ID NO: 444051 - RNA, 24 nt, Human
gagaagcaggaggcagcucaggga

SEQ ID NO: 444052 - RNA, 21 nt, Human
gagggagaagcaggaggcagc

SEQ ID NO: 444053 - RNA, 19 nt, Human
gcacaagaagcucaccaac

SEQ ID NO: 444054 - RNA, 21 nt, Human
gcuggaacaccucccagcccg

SEQ ID NO: 444055 - RNA, 21 nt, Human
ggagaagcaggaggcagcuca

SEQ ID NO: 444056 - RNA, 23 nt, Human
ggagaagcaggaggcagcucagg

SEQ ID NO: 444057 - RNA, 21 nt, Human
ggagcuagguaggaaggaaag

SEQ ID NO: 444058 - RNA, 26 nt, Human
uccagcaaagacagaagugauuuaaa

SEQ ID NO: 444059 - RNA, 25 nt, Human
ugaccaugccagauguccccaggcc

SEQ ID NO: 444060 - RNA, 22 nt, Human
ugagggagaagcaggaggcagc

SEQ ID NO: 444061 - RNA, 25 nt, Human
ugcaacccugaaacaaauacacaga

SEQ ID NO: 444062 - RNA, 22 nt, Human
ugccagauguccccaggccucc

SEQ ID NO: 444063 - RNA, 20 nt, Human
uuaaggcacaagaagcucac

SEQ ID NO: 444064 - RNA, 19 nt, Human
uuuuuuuuuuuuuuugcaa

SEQ ID NO: 444065 - RNA, 18 nt, Human
aaaaaggucagugccucu

SEQ ID NO: 444066 - RNA, 22 nt, Human
aagugcacucaauauaaaacac

SEQ ID NO: 444067 - RNA, 25 nt, Human
auaaaguauccuuuccugaauaaag

SEQ ID NO: 444068 - RNA, 21 nt, Human
augcaauaaaguauccuuucc

SEQ ID NO: 444069 - RNA, 19 nt, Human
cagcaauggaaaugaacag

SEQ ID NO: 444070 - RNA, 18 nt, Human
cggaaagcuuagauuguc

SEQ ID NO: 444071 - RNA, 24 nt, Human
cugaauaaaggaauugagguuuau

SEQ ID NO: 444072 - RNA, 18 nt, Human
guacugaacccuucggua

SEQ ID NO: 444073 - RNA, 24 nt, Human
uaccagauguaaaagauggacccc

SEQ ID NO: 444074 - RNA, 19 nt, Human
uagaagcuuuaaauaaggu

SEQ ID NO: 444075 - RNA, 21 nt, Human
ucaaaacuacuccaaaaacaa

SEQ ID NO: 444076 - RNA, 22 nt, Human
ugaauuaaugugaagguaaaau

SEQ ID NO: 444077 - RNA, 23 nt, Human
ugacaaaagugguuaagaacaac

SEQ ID NO: 444078 - RNA, 18 nt, Human
aaguugauuuucuuugug

SEQ ID NO: 444079 - RNA, 18 nt, Human
uagcaaguugauuuucuu

SEQ ID NO: 444080 - RNA, 24 nt, Human
uguaguagcaaguugauuuucuuu

SEQ ID NO: 444081 - RNA, 18 nt, Human
agaaccaauaauuaggaa

SEQ ID NO: 444082 - RNA, 24 nt, Human
caauaauuaggauagauuuuaugc

SEQ ID NO: 444083 - RNA, 20 nt, Human
ccggaguagcggccggcccc

SEQ ID NO: 444084 - RNA, 21 nt, Human
cgggauggaaagugcagccgu

SEQ ID NO: 444085 - RNA, 21 nt, Human
cugguaguggaacauauuuuu

SEQ ID NO: 444086 - RNA, 20 nt, Human
gggauggaaagugcagccgu

SEQ ID NO: 444087 - RNA, 23 nt, Human
uaaugcauaaacauauaaguccc

SEQ ID NO: 444088 - RNA, 18 nt, Human
uguccucgcugccaccga

SEQ ID NO: 444089 - RNA, 22 nt, Human
uuucuuugcacugauuuuuauu

SEQ ID NO: 444090 - RNA, 18 nt, Human
uuuuuuuuuuuuucuuug

SEQ ID NO: 444091 - RNA, 19 nt, Human
uuuuuuuuuuuuucuuugc

SEQ ID NO: 444092 - RNA, 23 nt, Human
aaaacacacgagacaaagcuccc

SEQ ID NO: 444093 - RNA, 18 nt, Human
aaccacagaaccggcgcc

SEQ ID NO: 444094 - RNA, 22 nt, Human
aagcagcagcagcagcagcagc

SEQ ID NO: 444095 - RNA, 22 nt, Human
acaaagcuccccuuuggucaag

SEQ ID NO: 444096 - RNA, 22 nt, Human
accaggugggccggucagugcc

SEQ ID NO: 444097 - RNA, 21 nt, Human
accucgccuucguuccuccaa

SEQ ID NO: 444098 - RNA, 25 nt, Human
accucgccuucguuccuccaaccuc

SEQ ID NO: 444099 - RNA, 23 nt, Human
acgcuccccaagcccuccuguuu

SEQ ID NO: 444100 - RNA, 21 nt, Human
acuacuaagaaugaacaacau

SEQ ID NO: 444101 - RNA, 19 nt, Human
agaaaggugcccacgcucc

SEQ ID NO: 444102 - RNA, 18 nt, Human
agaaugccacagcacugg

SEQ ID NO: 444103 - RNA, 21 nt, Human
agaaugccacagcacuggaaa

SEQ ID NO: 444104 - RNA, 18 nt, Human
agagcagcggggcagagu

SEQ ID NO: 444105 - RNA, 21 nt, Human
agcaaggcaaggacaugggga

SEQ ID NO: 444106 - RNA, 24 nt, Human
agcagcagcagcgaguccugccaa

SEQ ID NO: 444107 - RNA, 23 nt, Human
agcggggcagagugcacucuggg

SEQ ID NO: 444108 - RNA, 22 nt, Human
agggagaaaggauacgaggaaa

SEQ ID NO: 444109 - RNA, 21 nt, Human
aggugccacccccgaccccag

SEQ ID NO: 444110 - RNA, 22 nt, Human
caaagcaaggaggaaccucgcc

SEQ ID NO: 444111 - RNA, 19 nt, Human
caaccucaucucccacuga

SEQ ID NO: 444112 - RNA, 21 nt, Human
caaggugucccacacauuccc

SEQ ID NO: 444113 - RNA, 23 nt, Human
caagugggacugaggcccaggug

SEQ ID NO: 444114 - RNA, 23 nt, Human
caauucucagcaaggcaaggaca

SEQ ID NO: 444115 - RNA, 20 nt, Human
cacacaccacaagacucaag

SEQ ID NO: 444116 - RNA, 21 nt, Human
cacacgagacaaagcuccccu

SEQ ID NO: 444117 - RNA, 19 nt, Human
cacaggcccugacgggcac

SEQ ID NO: 444118 - RNA, 22 nt, Human
cacaggugccacccccgacccc

SEQ ID NO: 444119 - RNA, 19 nt, Human
caccaagcaguaaggccuc

SEQ ID NO: 444120 - RNA, 25 nt, Human
caccaggagccccaggcucucacag

SEQ ID NO: 444121 - RNA, 20 nt, Human
cacccccgaccccaggauuu

SEQ ID NO: 444122 - RNA, 21 nt, Human
caccuaacaccucagcggcau

SEQ ID NO: 444123 - RNA, 20 nt, Human
cacgagacaaagcuccccuu

SEQ ID NO: 444124 - RNA, 21 nt, Human
cacgcuccccaagcccuccug

SEQ ID NO: 444125 - RNA, 21 nt, Human
cagcagagcagcggggcagag

SEQ ID NO: 444126 - RNA, 25 nt, Human
cagcagcagcagcagcagcgagucc

SEQ ID NO: 444127 - RNA, 20 nt, Human
cagcagcagcgaguccugcc

SEQ ID NO: 444128 - RNA, 20 nt, Human
cagcagcuccaggacagcca

SEQ ID NO: 444129 - RNA, 19 nt, Human
cagccuucccugcuucccc

SEQ ID NO: 444130 - RNA, 22 nt, Human
cagcggugggcgcgccccccuc

SEQ ID NO: 444131 - RNA, 22 nt, Human
caggcucucacaggugccaccc

SEQ ID NO: 444132 - RNA, 21 nt, Human
cagguggaggccccgcccccc

SEQ ID NO: 444133 - RNA, 19 nt, Human
ccaaccacagaaccggcgc

SEQ ID NO: 444134 - RNA, 21 nt, Human
ccaaggaauggagaucgcacc

SEQ ID NO: 444135 - RNA, 18 nt, Human
ccacugagguagcccuug

SEQ ID NO: 444136 - RNA, 19 nt, Human
ccacugcagcucccagcac

SEQ ID NO: 444137 - RNA, 22 nt, Human
cccaaggaauggagaucgcacc

SEQ ID NO: 444138 - RNA, 22 nt, Human
cccacacacccacuuccugaau

SEQ ID NO: 444139 - RNA, 22 nt, Human
cccacacauucccacugcagcu

SEQ ID NO: 444140 - RNA, 25 nt, Human
cccacacauucccacugcagcuccc

SEQ ID NO: 444141 - RNA, 20 nt, Human
ccccaaagcaaggaggaacc

SEQ ID NO: 444142 - RNA, 24 nt, Human
ccccaccccaacuacacccaaggg

SEQ ID NO: 444143 - RNA, 19 nt, Human
ccccccgucaccacaccug

SEQ ID NO: 444144 - RNA, 20 nt, Human
ccccccgucaccacaccugg

SEQ ID NO: 444145 - RNA, 21 nt, Human
ccccccucgagagcagcccaa

SEQ ID NO: 444146 - RNA, 26 nt, Human
ccccgccccccccgucaccacaccug

SEQ ID NO: 444147 - RNA, 21 nt, Human
cccuaaaccaccuaacaccuc

SEQ ID NO: 444148 - RNA, 20 nt, Human
cccucaagccugacugucac

SEQ ID NO: 444149 - RNA, 21 nt, Human
cccuccuguuuacauuuccua

SEQ ID NO: 444150 - RNA, 21 nt, Human
ccgggacagcagguuacacag

SEQ ID NO: 444151 - RNA, 23 nt, Human
ccuacacaagcagcagcagcagc

SEQ ID NO: 444152 - RNA, 23 nt, Human
ccucccgggcagcgcagccucag

SEQ ID NO: 444153 - RNA, 21 nt, Human
cgaccacgcuguguccugugc

SEQ ID NO: 444154 - RNA, 18 nt, Human
cgaccuacacaagcagca

SEQ ID NO: 444155 - RNA, 19 nt, Human
cgaccuacacaagcagcag

SEQ ID NO: 444156 - RNA, 21 nt, Human
cgccccccucgagagcagccc

SEQ ID NO: 444157 - RNA, 24 nt, Human
cgcgccccccucgagagcagccca

SEQ ID NO: 444158 - RNA, 18 nt, Human
cggcaggcgagcgggcgg

SEQ ID NO: 444159 - RNA, 21 nt, Human
cguggggccgcaguguggcug

SEQ ID NO: 444160 - RNA, 19 nt, Human
cuccaggacagccagccgc

SEQ ID NO: 444161 - RNA, 21 nt, Human
cuccccaagcccuccuguuua

SEQ ID NO: 444162 - RNA, 24 nt, Human
cugugcacgccaucuucagguuuc

SEQ ID NO: 444163 - RNA, 24 nt, Human
cuucagguuucccacacacccacu

SEQ ID NO: 444164 - RNA, 23 nt, Human
cuuuuggcccuaaaccaccuaac

SEQ ID NO: 444165 - RNA, 27 nt, Human
gagcagcggggcagagugcacucuggg

SEQ ID NO: 444166 - RNA, 18 nt, Human
gcacagcggcgcaccaug

SEQ ID NO: 444167 - RNA, 19 nt, Human
gcagcacggggcgcagccc

SEQ ID NO: 444168 - RNA, 22 nt, Human
gcaggcuccagcagcagcucca

SEQ ID NO: 444169 - RNA, 18 nt, Human
gccuucccugcuucccca

SEQ ID NO: 444170 - RNA, 24 nt, Human
gcgccccccucgagagcagcccaa

SEQ ID NO: 444171 - RNA, 19 nt, Human
gcugccgcuccucucacgc

SEQ ID NO: 444172 - RNA, 18 nt, Human
gcuuccccaccccaacua

SEQ ID NO: 444173 - RNA, 18 nt, Human
ggaauggagaucgcacca

SEQ ID NO: 444174 - RNA, 25 nt, Human
ggagcaagugggacugaggcccagg

SEQ ID NO: 444175 - RNA, 23 nt, Human
ggccccgccccccccgucaccac

SEQ ID NO: 444176 - RNA, 20 nt, Human
gggauggaugaaacgcagcg

SEQ ID NO: 444177 - RNA, 23 nt, Human
gggcacucugagcugggcagucu

SEQ ID NO: 444178 - RNA, 20 nt, Human
guggugucugcccaccacac

SEQ ID NO: 444179 - RNA, 18 nt, Human
uaaaccaccuaacaccuc

SEQ ID NO: 444180 - RNA, 19 nt, Human
uaacagacggcuccgcgug

SEQ ID NO: 444181 - RNA, 21 nt, Human
ucacaggugccacccccgacc

SEQ ID NO: 444182 - RNA, 24 nt, Human
ucacagguggaggccccgcccccc

SEQ ID NO: 444183 - RNA, 23 nt, Human
ucccacacacccacuuccugaau

SEQ ID NO: 444184 - RNA, 18 nt, Human
ucccgggcagcgcagccu

SEQ ID NO: 444185 - RNA, 24 nt, Human
ucccgggcagcgcagccucagucc

SEQ ID NO: 444186 - RNA, 18 nt, Human
ucccugcuuccccacccc

SEQ ID NO: 444187 - RNA, 20 nt, Human
uccuugggcguggggccgca

SEQ ID NO: 444188 - RNA, 21 nt, Human
ucggcaggcgagcgggcggga

SEQ ID NO: 444189 - RNA, 20 nt, Human
ucuccccaaagcaaggagga

SEQ ID NO: 444190 - RNA, 23 nt, Human
ucugagggcaggcuccagcagca

SEQ ID NO: 444191 - RNA, 18 nt, Human
ucuucugagacucugacu

SEQ ID NO: 444192 - RNA, 19 nt, Human
ugacaacuucaaacaggac

SEQ ID NO: 444193 - RNA, 25 nt, Human
ugacaacuucaaacaggacuuuaau

SEQ ID NO: 444194 - RNA, 19 nt, Human
ugagggcaggcuccagcag

SEQ ID NO: 444195 - RNA, 18 nt, Human
ugcuggaaucggggcuga

SEQ ID NO: 444196 - RNA, 21 nt, Human
ugcuggaaucggggcugaggu

SEQ ID NO: 444197 - RNA, 22 nt, Human
ugcuuccccaccccaacuacac

SEQ ID NO: 444198 - RNA, 18 nt, Human
uggaaagggacacucuga

SEQ ID NO: 444199 - RNA, 25 nt, Human
uggaaaugccaccaggugaugccac

SEQ ID NO: 444200 - RNA, 21 nt, Human
ugggacugaggcccaggugcu

SEQ ID NO: 444201 - RNA, 20 nt, Human
ugggagcaagugggacugag

SEQ ID NO: 444202 - RNA, 20 nt, Human
ugggcagagaggacacagcg

SEQ ID NO: 444203 - RNA, 18 nt, Human
uggggggaggcagcacgg

SEQ ID NO: 444204 - RNA, 20 nt, Human
uggggggaggcagcacgggg

SEQ ID NO: 444205 - RNA, 21 nt, Human
uggggggaggcagcacggggc

SEQ ID NO: 444206 - RNA, 22 nt, Human
uggggggaggcagcacggggcc

SEQ ID NO: 444207 - RNA, 19 nt, Human
uggugggugcuggaaucgg

SEQ ID NO: 444208 - RNA, 19 nt, Human
uguggugucugcccaccac

SEQ ID NO: 444209 - RNA, 19 nt, Human
uguuuacauuuccuagugg

SEQ ID NO: 444210 - RNA, 22 nt, Human
uucccacugcagcucccagcac

SEQ ID NO: 444211 - RNA, 24 nt, Human
uucccacugcagcucccagcacag

SEQ ID NO: 444212 - RNA, 19 nt, Human
uuccuccaaccucaucucc

SEQ ID NO: 444213 - RNA, 20 nt, Human
uuuuuuuuuuuuuuguuuuc

SEQ ID NO: 444214 - RNA, 24 nt, Human
uuuuuuuuuuuuuuuuuuuguuuu

SEQ ID NO: 444215 - RNA, 26 nt, Human
uuuuuuuuuuuuuuuuuuuuuugggg

SEQ ID NO: 444216 - RNA, 18 nt, Human
aaccgagccccguagccu

SEQ ID NO: 444217 - RNA, 19 nt, Human
agacagcaaguagaagagg

SEQ ID NO: 444218 - RNA, 23 nt, Human
agacagcaaguagaagaggggac

SEQ ID NO: 444219 - RNA, 21 nt, Human
cagccaaaccgagccccguag

SEQ ID NO: 444220 - RNA, 25 nt, Human
ccacauugugucuuucuucugcagu

SEQ ID NO: 444221 - RNA, 19 nt, Human
ccccggccgggcccggcuc

SEQ ID NO: 444222 - RNA, 23 nt, Human
ccccguagccucugccgccgcuc

SEQ ID NO: 444223 - RNA, 25 nt, Human
cccuuggaggcccuuccccgcgcgg

SEQ ID NO: 444224 - RNA, 24 nt, Human
ccgcucacugccacccccuccgac

SEQ ID NO: 444225 - RNA, 19 nt, Human
ccugaccccuagucugggg

SEQ ID NO: 444226 - RNA, 25 nt, Human
ccugaccccuagucugggguuggaa

SEQ ID NO: 444227 - RNA, 20 nt, Human
ccugcaugguacccuaaggc

SEQ ID NO: 444228 - RNA, 23 nt, Human
ccugccgacuccccagucagcca

SEQ ID NO: 444229 - RNA, 25 nt, Human
cugccgacuccccagucagccaaac

SEQ ID NO: 444230 - RNA, 21 nt, Human
cugccgccugccgacucccca

SEQ ID NO: 444231 - RNA, 24 nt, Human
gagaaguggcagugaccucagcag

SEQ ID NO: 444232 - RNA, 23 nt, Human
gcagcgccaggcagcccucgugc

SEQ ID NO: 444233 - RNA, 26 nt, Human
gccaacuccagugcuguauccuggag

SEQ ID NO: 444234 - RNA, 19 nt, Human
gccgggcccggcucaaucc

SEQ ID NO: 444235 - RNA, 21 nt, Human
ggagguccgggucagcacugg

SEQ ID NO: 444236 - RNA, 23 nt, Human
uagcuagcugccugaccccuagu

SEQ ID NO: 444237 - RNA, 21 nt, Human
ugaaauaacauagggagcaga

SEQ ID NO: 444238 - RNA, 23 nt, Human
ugaauuguccugcaugguacccu

SEQ ID NO: 444239 - RNA, 24 nt, Human
ugaccucagcagcaggccugguau

SEQ ID NO: 444240 - RNA, 20 nt, Human
ugagaaaagcugcccuugga

SEQ ID NO: 444241 - RNA, 22 nt, Human
ugagaaaagcugcccuuggagg

SEQ ID NO: 444242 - RNA, 22 nt, Human
ugagaagccaagaucucagcug

SEQ ID NO: 444243 - RNA, 21 nt, Human
ugaguaaagggaugucagucc

SEQ ID NO: 444244 - RNA, 22 nt, Human
ugcagugguaaaaaggcugguc

SEQ ID NO: 444245 - RNA, 19 nt, Human
uggccaacuccagugcugu

SEQ ID NO: 444246 - RNA, 24 nt, Human
ugguccuugaauuguccugcaugg

SEQ ID NO: 444247 - RNA, 23 nt, Human
uuuuuuuuuuuuuuuuuaucuuu

SEQ ID NO: 444248 - RNA, 21 nt, Human
aaacacuccacaaacccccca

SEQ ID NO: 444249 - RNA, 20 nt, Human
aaagggacauccccggcaau

SEQ ID NO: 444250 - RNA, 24 nt, Human
aaaucaguaaccuuucaaaacuga

SEQ ID NO: 444251 - RNA, 19 nt, Human
aaccuaaauaacaaguuaa

SEQ ID NO: 444252 - RNA, 21 nt, Human
aacuaacuuagaaucccuugc

SEQ ID NO: 444253 - RNA, 23 nt, Human
aagacaccugcauuggaaucaca

SEQ ID NO: 444254 - RNA, 19 nt, Human
aagaggaaaaucaguaacc

SEQ ID NO: 444255 - RNA, 24 nt, Human
aagaugauaaacaggugucgcgga

SEQ ID NO: 444256 - RNA, 24 nt, Human
aaguuuuucauucaaauucggaag

SEQ ID NO: 444257 - RNA, 18 nt, Human
aauaaccugagaaguuaa

SEQ ID NO: 444258 - RNA, 22 nt, Human
acaaagcauccaaaaauaucac

SEQ ID NO: 444259 - RNA, 19 nt, Human
acacacacacacacacaua

SEQ ID NO: 444260 - RNA, 21 nt, Human
acacacacacacacacauaua

SEQ ID NO: 444261 - RNA, 24 nt, Human
acacacauauaugcuuauguaugu

SEQ ID NO: 444262 - RNA, 18 nt, Human
acacuccacaaacccccc

SEQ ID NO: 444263 - RNA, 24 nt, Human
acacuccacaaaccccccaucugu

SEQ ID NO: 444264 - RNA, 18 nt, Human
acagcaugcauauauaua

SEQ ID NO: 444265 - RNA, 20 nt, Human
acaucagacuacuagaaaug

SEQ ID NO: 444266 - RNA, 23 nt, Human
acugggaguaaaaaccuaaauaa

SEQ ID NO: 444267 - RNA, 27 nt, Human
agacugaauuucauuacauuuuagaaa

SEQ ID NO: 444268 - RNA, 23 nt, Human
agauucacaauuugaagucugaa

SEQ ID NO: 444269 - RNA, 24 nt, Human
agcaaaaauaaccuaaguugugca

SEQ ID NO: 444270 - RNA, 19 nt, Human
aggaaagggaaggggaagg

SEQ ID NO: 444271 - RNA, 23 nt, Human
aguggcaaaagcaaaccgagaga

SEQ ID NO: 444272 - RNA, 19 nt, Human
auccaaaaauaucacugug

SEQ ID NO: 444273 - RNA, 21 nt, Human
aucuuugaaaaugcagccuuu

SEQ ID NO: 444274 - RNA, 21 nt, Human
augcauauauauauauauaca

SEQ ID NO: 444275 - RNA, 19 nt, Human
augcugcaccacugcccag

SEQ ID NO: 444276 - RNA, 19 nt, Human
auucaguagagucuucccc

SEQ ID NO: 444277 - RNA, 18 nt, Human
caaaaggauaaucaccgu

SEQ ID NO: 444278 - RNA, 20 nt, Human
caaaauguuaagauugacca

SEQ ID NO: 444279 - RNA, 20 nt, Human
caaagcauccaaaaauauca

SEQ ID NO: 444280 - RNA, 20 nt, Human
caacagcaauuccaauuuau

SEQ ID NO: 444281 - RNA, 26 nt, Human
caaguuucacagcaugcauauauaua

SEQ ID NO: 444282 - RNA, 19 nt, Human
cacacacacacacacauau

SEQ ID NO: 444283 - RNA, 27 nt, Human
cacacacacacacacauauaugcuuau

SEQ ID NO: 444284 - RNA, 25 nt, Human
cacacacacacacauauaugcuuau

SEQ ID NO: 444285 - RNA, 28 nt, Human
cacacacacacacauauaugcuuaugua

SEQ ID NO: 444286 - RNA, 21 nt, Human
caccaacagcaauuccaauuu

SEQ ID NO: 444287 - RNA, 20 nt, Human
cacuccacaaaccccccauc

SEQ ID NO: 444288 - RNA, 19 nt, Human
cacuuguaucauucuagcc

SEQ ID NO: 444289 - RNA, 27 nt, Human
cagaaaaauacaucagacuacuagaaa

SEQ ID NO: 444290 - RNA, 18 nt, Human
cagccuuuauucuuaguu

SEQ ID NO: 444291 - RNA, 18 nt, Human
caugcauauauauauaua

SEQ ID NO: 444292 - RNA, 22 nt, Human
ccacuacccgcacuauuacacc

SEQ ID NO: 444293 - RNA, 18 nt, Human
cccuugcuacugggagua

SEQ ID NO: 444294 - RNA, 24 nt, Human
ccgcacuauuacaccuccagcugc

SEQ ID NO: 444295 - RNA, 20 nt, Human
ccggcgccaccgccgccucg

SEQ ID NO: 444296 - RNA, 22 nt, Human
ccucgugugccccaaccucggc

SEQ ID NO: 444297 - RNA, 20 nt, Human
cgaaacauucaaaugcagaa

SEQ ID NO: 444298 - RNA, 22 nt, Human
cggaagcaaaaauaaccuaagu

SEQ ID NO: 444299 - RNA, 21 nt, Human
cggugcaaagcaacuuacuuu

SEQ ID NO: 444300 - RNA, 20 nt, Human
cuagaaaugucauucaggca

SEQ ID NO: 444301 - RNA, 24 nt, Human
cucaugacaaugcugaagaaugcu

SEQ ID NO: 444302 - RNA, 22 nt, Human
cucgugugccccaaccucggcc

SEQ ID NO: 444303 - RNA, 20 nt, Human
cugcaccacugcccagcagc

SEQ ID NO: 444304 - RNA, 19 nt, Human
gaaagggaaggggaagggu

SEQ ID NO: 444305 - RNA, 21 nt, Human
gaaaguaaagucacuucugcu

SEQ ID NO: 444306 - RNA, 21 nt, Human
gaauagcaaacuuggggaggg

SEQ ID NO: 444307 - RNA, 18 nt, Human
gacacaaccauggucugu

SEQ ID NO: 444308 - RNA, 23 nt, Human
gaguuuugcuucuucugcagugu

SEQ ID NO: 444309 - RNA, 19 nt, Human
gauuugaauagcaaacuug

SEQ ID NO: 444310 - RNA, 18 nt, Human
gcagacaaagcauccaaa

SEQ ID NO: 444311 - RNA, 20 nt, Human
gcauccaaaaauaucacugu

SEQ ID NO: 444312 - RNA, 21 nt, Human
gcccugguuauuaaaucucca

SEQ ID NO: 444313 - RNA, 28 nt, Human
ggaacuucuccaaacccacuacccgcac

SEQ ID NO: 444314 - RNA, 20 nt, Human
ggaagggugagggauaaggg

SEQ ID NO: 444315 - RNA, 22 nt, Human
ggggaagggugagggauaaggg

SEQ ID NO: 444316 - RNA, 24 nt, Human
ggggaagggugagggauaagggaa

SEQ ID NO: 444317 - RNA, 24 nt, Human
gguaaugaagacaccugcauugga

SEQ ID NO: 444318 - RNA, 20 nt, Human
guaaccuuucaaaacugaug

SEQ ID NO: 444319 - RNA, 18 nt, Human
guagagucuuccccgacu

SEQ ID NO: 444320 - RNA, 19 nt, Human
guagagucuuccccgacua

SEQ ID NO: 444321 - RNA, 25 nt, Human
gugaaacaaaaauauacgaaacauu

SEQ ID NO: 444322 - RNA, 19 nt, Human
uaaaaaacuaagagggaag

SEQ ID NO: 444323 - RNA, 20 nt, Human
uaaaagauucacaauuugaa

SEQ ID NO: 444324 - RNA, 21 nt, Human
uaaguuuuuagcugaaggcaa

SEQ ID NO: 444325 - RNA, 24 nt, Human
uacaaaaguaggucauacauacaa

SEQ ID NO: 444326 - RNA, 22 nt, Human
uacacacacacacacacauaua

SEQ ID NO: 444327 - RNA, 24 nt, Human
uacacacacacacacacauauaug

SEQ ID NO: 444328 - RNA, 28 nt, Human
uacacacacacacacacauauaugcuua

SEQ ID NO: 444329 - RNA, 21 nt, Human
uagaaugaacagcucucaaca

SEQ ID NO: 444330 - RNA, 20 nt, Human
uagagauuauugccaccacu

SEQ ID NO: 444331 - RNA, 24 nt, Human
uauacacacacacacacacauaua

SEQ ID NO: 444332 - RNA, 31 nt, Human; identical to SEQ ID NO: 251951

SEQ ID NO: 444333 - RNA, 20 nt, Human
uauaugcuuauguauguaug

SEQ ID NO: 444334 - RNA, 21 nt, Human
uauaugcuuauguauguaugu

SEQ ID NO: 444335 - RNA, 25 nt, Human
uauguauguauguauauuauacaua

SEQ ID NO: 444336 - RNA, 21 nt, Human
uauuaagcucaugacaaugcu

SEQ ID NO: 444337 - RNA, 23 nt, Human
ucacugugguuuuaccuuggaca

SEQ ID NO: 444338 - RNA, 19 nt, Human
ucagacuacuagaaauguc

SEQ ID NO: 444339 - RNA, 18 nt, Human
uccaaugaguaguagaau

SEQ ID NO: 444340 - RNA, 25 nt, Human
ucuccaaacccacuacccgcacuau

SEQ ID NO: 444341 - RNA, 26 nt, Human
ucuccaaacccacuacccgcacuauu

SEQ ID NO: 444342 - RNA, 21 nt, Human
ugaaacaaaaauauacgaaac

SEQ ID NO: 444343 - RNA, 24 nt, Human
ugaaacaaaaauauacgaaacauu

SEQ ID NO: 444344 - RNA, 23 nt, Human
ugaaauggcuuugggccacuggc

SEQ ID NO: 444345 - RNA, 21 nt, Human
ugauaaacaggugucuugcaa

SEQ ID NO: 444346 - RNA, 18 nt, Human
ugcaccacugcccagcag

SEQ ID NO: 444347 - RNA, 22 nt, Human
ugcauauauauauauauacaca

SEQ ID NO: 444348 - RNA, 19 nt, Human
uguagucaaguuucacagc

SEQ ID NO: 444349 - RNA, 19 nt, Human
uguauguauauuauacaua

SEQ ID NO: 444350 - RNA, 24 nt, Human
uguauguauauuauacauacacau

SEQ ID NO: 444351 - RNA, 26 nt, Human
ugugaaacaaaaauauacgaaacauu

SEQ ID NO: 444352 - RNA, 21 nt, Human
uuaagcucaugacaaugcuga

SEQ ID NO: 444353 - RNA, 23 nt, Human
uucaguauuuugguuguuauuuc

SEQ ID NO: 444354 - RNA, 19 nt, Human
uugcagacaaagcauccaa

SEQ ID NO: 444355 - RNA, 19 nt, Human
uuggaaucacaaacuauuc

SEQ ID NO: 444356 - RNA, 23 nt, Human
uuuaaaagauucacaauuugaag

SEQ ID NO: 444357 - RNA, 21 nt, Human
uuuagaaugaacagcucucaa

SEQ ID NO: 444358 - RNA, 23 nt, Human
uuucacagcaugcauauauauau

SEQ ID NO: 444359 - RNA, 18 nt, Human
uuugguuguuauuucacc

SEQ ID NO: 444360 - RNA, 21 nt, Human
aaugagggggcagaccgagga

SEQ ID NO: 444361 - RNA, 20 nt, Human
agggggcagaccgaggaggu

SEQ ID NO: 444362 - RNA, 20 nt, Human
aggugguggcugcccggaga

SEQ ID NO: 444363 - RNA, 23 nt, Human
cacccaagucucccugcuaucau

SEQ ID NO: 444364 - RNA, 18 nt, Human
cagggccaggcugugcua

SEQ ID NO: 444365 - RNA, 26 nt, Human
cagggccaggcugugcuagauggcgc

SEQ ID NO: 444366 - RNA, 22 nt, Human
gcccggagaucagggccaggcu

SEQ ID NO: 444367 - RNA, 18 nt, Human
gugaauuuuaaugagggg

SEQ ID NO: 444368 - RNA, 18 nt, Human
ugagggggcagaccgagg

SEQ ID NO: 444369 - RNA, 23 nt, Human
ugagggggcagaccgaggaggug

SEQ ID NO: 444370 - RNA, 20 nt, Human
uggaaggggggucacccaag

SEQ ID NO: 444371 - RNA, 19 nt, Human
uucagggugggaacgugaa

SEQ ID NO: 444372 - RNA, 22 nt, Human
aaaucagagaaauucgcaaagg

SEQ ID NO: 444373 - RNA, 20 nt, Human
aaccacaucuuguaccccuu

SEQ ID NO: 444374 - RNA, 24 nt, Human
aagaaaacuuuucaggugauggcc

SEQ ID NO: 444375 - RNA, 22 nt, Human
aagcagcacaugaagauggccc

SEQ ID NO: 444376 - RNA, 22 nt, Human
aaggguuugugacaagcuuuug

SEQ ID NO: 444377 - RNA, 22 nt, Human
acagaagauaagaaaacuuuuc

SEQ ID NO: 444378 - RNA, 25 nt, Human
accuaaaucuccacacacuucccag

SEQ ID NO: 444379 - RNA, 27 nt, Human
acugaacuuaaaaaaaaaaaaaaaaaa

SEQ ID NO: 444380 - RNA, 18 nt, Human
acuuuuuuuuuuucuugg

SEQ ID NO: 444381 - RNA, 24 nt, Human
agaaauucgcaaaggacuagacaa

SEQ ID NO: 444382 - RNA, 26 nt, Human
aguauaaccacuaagaacacacuaga

SEQ ID NO: 444383 - RNA, 22 nt, Human
caaaagcacagaagauaagaaa

SEQ ID NO: 444384 - RNA, 19 nt, Human
cacaaaucagagaaauucg

SEQ ID NO: 444385 - RNA, 23 nt, Human
cagcagagcagcaccuaaaucuc

SEQ ID NO: 444386 - RNA, 23 nt, Human
caguucuauuaucugggaaugac

SEQ ID NO: 444387 - RNA, 22 nt, Human
caugaagauggcccaggagccu

SEQ ID NO: 444388 - RNA, 25 nt, Human
cauuuccaguucuauuaucugggaa

SEQ ID NO: 444389 - RNA, 19 nt, Human
ccacagaccuuuuuccaaa

SEQ ID NO: 444390 - RNA, 20 nt, Human
cccuuccucaucaacuccag

SEQ ID NO: 444391 - RNA, 20 nt, Human
cgaguguggacaagucacug

SEQ ID NO: 444392 - RNA, 19 nt, Human
cgcaaaggacuagacaaug

SEQ ID NO: 444393 - RNA, 24 nt, Human
cugaacuuaaaaaaaaaaaaaaag

SEQ ID NO: 444394 - RNA, 18 nt, Human
cugguuucaacaguacuu

SEQ ID NO: 444395 - RNA, 24 nt, Human
gaacuucagaggcaacuggaaaua

SEQ ID NO: 444396 - RNA, 21 nt, Human
gacgaguguggacaagucacu

SEQ ID NO: 444397 - RNA, 21 nt, Human
gcagcaccuaaaucuccacac

SEQ ID NO: 444398 - RNA, 20 nt, Human
gcagcagagcagcaccuaaa

SEQ ID NO: 444399 - RNA, 21 nt, Human
gccuguugucacaaaaaccuu

SEQ ID NO: 444400 - RNA, 19 nt, Human
ggagcucuucaagcagcac

SEQ ID NO: 444401 - RNA, 20 nt, Human
ggcaacuuuuuuuuuuucuu

SEQ ID NO: 444402 - RNA, 22 nt, Human
uaagacgaguguggacaaguca

SEQ ID NO: 444403 - RNA, 19 nt, Human
uacaaaauaggagcucuuc

SEQ ID NO: 444404 - RNA, 18 nt, Human
uacaccuuaacaaaggga

SEQ ID NO: 444405 - RNA, 22 nt, Human
uacagagaacuuuuuucacuuu

SEQ ID NO: 444406 - RNA, 23 nt, Human
uagacccuuggcauuaggggauu

SEQ ID NO: 444407 - RNA, 23 nt, Human
uccaaggguuugugacaagcuuu

SEQ ID NO: 444408 - RNA, 21 nt, Human
uccagaacaaagaaauguuuc

SEQ ID NO: 444409 - RNA, 18 nt, Human
ucucaucauauccucucu

SEQ ID NO: 444410 - RNA, 27 nt, Human
ucugccuguugucacaaaaaccuugac

SEQ ID NO: 444411 - RNA, 23 nt, Human
ucuuguaccccuuccucaucaac

SEQ ID NO: 444412 - RNA, 18 nt, Human
ugaaaggcagccauaagg

SEQ ID NO: 444413 - RNA, 20 nt, Human
uggcaucaaugaauaugcac

SEQ ID NO: 444414 - RNA, 23 nt, Human
uggcaucaaugaauaugcacuuc

SEQ ID NO: 444415 - RNA, 18 nt, Human
uggccauauucucaucau

SEQ ID NO: 444416 - RNA, 21 nt, Human
uggcccaggagccuucagcca

SEQ ID NO: 444417 - RNA, 22 nt, Human
uggcccaggagccuucagccau

SEQ ID NO: 444418 - RNA, 19 nt, Human
uggggaaacuucauaacug

SEQ ID NO: 444419 - RNA, 20 nt, Human
uuaaaaaaaaaaaaaaaaaa

SEQ ID NO: 444420 - RNA, 23 nt, Human
uucaacaguacuuuguuuccaga

SEQ ID NO: 444421 - RNA, 22 nt, Human
uucacauguggggaaacuucau

SEQ ID NO: 444422 - RNA, 18 nt, Human
uucaggugauggccauau

SEQ ID NO: 444423 - RNA, 21 nt, Human
uucauacauaggcggauuugu

SEQ ID NO: 444424 - RNA, 18 nt, Human
agcaaccucuugcccuuu

SEQ ID NO: 444425 - RNA, 19 nt, Human
aggggcucuaagucuuuau

SEQ ID NO: 444426 - RNA, 25 nt, Human
ccccuagagagauggcacccaaucc

SEQ ID NO: 444427 - RNA, 23 nt, Human
cucucugacuuccaccauucacu

SEQ ID NO: 444428 - RNA, 21 nt, Human
gaggagcucccaggaauccac

SEQ ID NO: 444429 - RNA, 25 nt, Human
uccacaguucuggaagagaggggcu

SEQ ID NO: 444430 - RNA, 21 nt, Human
ucucugacuuccaccauucac

SEQ ID NO: 444431 - RNA, 23 nt, Human
uuuuuggcaucuaacaguccauu

SEQ ID NO: 444432 - RNA, 21 nt, Human
aaacuccaggauguaguggca

SEQ ID NO: 444433 - RNA, 22 nt, Human
aaccaugcuagaggcucagagc

SEQ ID NO: 444434 - RNA, 19 nt, Human
aaggagcugggaaugggcc

SEQ ID NO: 444435 - RNA, 18 nt, Human
aagugacuagagccaaac

SEQ ID NO: 444436 - RNA, 25 nt, Human
acagcagccccuuugguggccuccc

SEQ ID NO: 444437 - RNA, 24 nt, Human
agcagccccuuugguggccucccu

SEQ ID NO: 444438 - RNA, 22 nt, Human
agccagaagugacuagagccaa

SEQ ID NO: 444439 - RNA, 22 nt, Human
aggcagccagaagugacuagag

SEQ ID NO: 444440 - RNA, 23 nt, Human
aggcagccagaagugacuagagc

SEQ ID NO: 444441 - RNA, 24 nt, Human
aggcuuccagcaucacggcaaaca

SEQ ID NO: 444442 - RNA, 19 nt, Human
aucuauuucauuugagcca

SEQ ID NO: 444443 - RNA, 20 nt, Human
augcaggagacagcagcccc

SEQ ID NO: 444444 - RNA, 21 nt, Human
caaagccuggugaauguaaug

SEQ ID NO: 444445 - RNA, 18 nt, Human
caacuugggaacccagag

SEQ ID NO: 444446 - RNA, 22 nt, Human
cacccuccacccaacaggccac

SEQ ID NO: 444447 - RNA, 20 nt, Human
cagaggguuuaaggagcucc

SEQ ID NO: 444448 - RNA, 24 nt, Human
cagcaucagagccagcagggauau

SEQ ID NO: 444449 - RNA, 19 nt, Human
caggaccuuccacccucca

SEQ ID NO: 444450 - RNA, 18 nt, Human
caggagacagcagccccu

SEQ ID NO: 444451 - RNA, 23 nt, Human
caggcuugcagauaaucacccac

SEQ ID NO: 444452 - RNA, 23 nt, Human
caugauauucucuuucucccuuc

SEQ ID NO: 444453 - RNA, 19 nt, Human
ccacaccuuucguacccac

SEQ ID NO: 444454 - RNA, 24 nt, Human
ccacaccuuucguacccaccagca

SEQ ID NO: 444455 - RNA, 19 nt, Human
cccaacaggccacuuucaa

SEQ ID NO: 444456 - RNA, 23 nt, Human
ccccugauagcugccauggcagc

SEQ ID NO: 444457 - RNA, 19 nt, Human
ccucucccucccuacuccc

SEQ ID NO: 444458 - RNA, 22 nt, Human
ccucucccucccuacucccuca

SEQ ID NO: 444459 - RNA, 25 nt, Human
ccuucuauuccccugauagcugcca

SEQ ID NO: 444460 - RNA, 22 nt, Human
cugcccucuccuaucacagccc

SEQ ID NO: 444461 - RNA, 18 nt, Human
cuuucguacccaccagca

SEQ ID NO: 444462 - RNA, 20 nt, Human
gacugaaccaugcuagaggc

SEQ ID NO: 444463 - RNA, 20 nt, Human
gcuugcagauaaucacccac

SEQ ID NO: 444464 - RNA, 22 nt, Human
ggaacccagagggaggggcugg

SEQ ID NO: 444465 - RNA, 20 nt, Human
ggaccuuccacccuccaccc

SEQ ID NO: 444466 - RNA, 22 nt, Human
ggagcugggaaugggccugggc

SEQ ID NO: 444467 - RNA, 18 nt, Human
ggggcuggagauggggag

SEQ ID NO: 444468 - RNA, 19 nt, Human
gugccucucccucccuacu

SEQ ID NO: 444469 - RNA, 18 nt, Human
uacccaccagcaucagag

SEQ ID NO: 444470 - RNA, 22 nt, Human
uagaggcucagagccaaggcuc

SEQ ID NO: 444471 - RNA, 26 nt, Human
ucacacaccaucacauguucucccca

SEQ ID NO: 444472 - RNA, 21 nt, Human
uccagcaucacggcaaacagg

SEQ ID NO: 444473 - RNA, 18 nt, Human
ucccaaaugagcacuggg

SEQ ID NO: 444474 - RNA, 26 nt, Human
uggcagcccuggggagacaagugcuc

SEQ ID NO: 444475 - RNA, 21 nt, Human
uguaguggcacaggcuuccag

SEQ ID NO: 444476 - RNA, 20 nt, Human
acaggaucuggauuccugca

SEQ ID NO: 444477 - RNA, 23 nt, Human
acugauucuguuucugagcauug

SEQ ID NO: 444478 - RNA, 19 nt, Human
acuggaacaacagugggag

SEQ ID NO: 444479 - RNA, 24 nt, Human
agaguaaacgcauccacgguauac

SEQ ID NO: 444480 - RNA, 21 nt, Human
aggcuucugcaucaguguggu

SEQ ID NO: 444481 - RNA, 18 nt, Human
agggguuugcucaguugg

SEQ ID NO: 444482 - RNA, 18 nt, Human
caagauugacauguccuu

SEQ ID NO: 444483 - RNA, 25 nt, Human
caccaagggccuuccacaggaucug

SEQ ID NO: 444484 - RNA, 25 nt, Human
cacuaaaggcuucugcaucagugug

SEQ ID NO: 444485 - RNA, 25 nt, Human
cagcagugcccagaaaguguguccc

SEQ ID NO: 444486 - RNA, 20 nt, Human
caucguguaacaccaagggc

SEQ ID NO: 444487 - RNA, 24 nt, Human
cauggcagacccucaaccaacacu

SEQ ID NO: 444488 - RNA, 21 nt, Human
cauugugucagguugcaguac

SEQ ID NO: 444489 - RNA, 26 nt, Human
ccaacacucgagcucccgugcagcac

SEQ ID NO: 444490 - RNA, 20 nt, Human
ccagauagucaaauuaaguu

SEQ ID NO: 444491 - RNA, 19 nt, Human
cccgugcagcacuaaaggc

SEQ ID NO: 444492 - RNA, 18 nt, Human
cccguuguccaagcacau

SEQ ID NO: 444493 - RNA, 24 nt, Human
ccuccaugcuuggaacuggaacaa

SEQ ID NO: 444494 - RNA, 23 nt, Human
ccuucugugucugagcaucgugu

SEQ ID NO: 444495 - RNA, 18 nt, Human
cuaaaggcuucugcauca

SEQ ID NO: 444496 - RNA, 18 nt, Human
cugcucccaaggccuugg

SEQ ID NO: 444497 - RNA, 24 nt, Human
cuggagguuuugcgccaguccuaa

SEQ ID NO: 444498 - RNA, 19 nt, Human
cugggguccucugaugccg

SEQ ID NO: 444499 - RNA, 20 nt, Human
cugggguccucugaugccgg

SEQ ID NO: 444500 - RNA, 19 nt, Human
cuuccugugacaguggugg

SEQ ID NO: 444501 - RNA, 24 nt, Human
cuuggaaccuggauaacagucgga

SEQ ID NO: 444502 - RNA, 21 nt, Human
gaccaagauugacauguccuu

SEQ ID NO: 444503 - RNA, 22 nt, Human
gagccuccaugcuuggaacugg

SEQ ID NO: 444504 - RNA, 21 nt, Human
gagccucuaggcuuggaaccu

SEQ ID NO: 444505 - RNA, 21 nt, Human
gauuccugcaguaguuggaga

SEQ ID NO: 444506 - RNA, 18 nt, Human
gcacuaaaggcuucugca

SEQ ID NO: 444507 - RNA, 24 nt, Human
gcccagaaagugugucccaauccc

SEQ ID NO: 444508 - RNA, 21 nt, Human
gcuggggucugugguaaaaca

SEQ ID NO: 444509 - RNA, 18 nt, Human
gguagcacugccggacca

SEQ ID NO: 444510 - RNA, 20 nt, Human
guccucugaugccggugugg

SEQ ID NO: 444511 - RNA, 20 nt, Human
uaaaggcuucugcaucagug

SEQ ID NO: 444512 - RNA, 20 nt, Human
uaacagucagaggcacgacu

SEQ ID NO: 444513 - RNA, 21 nt, Human
uaacucuguccauuaccaugg

SEQ ID NO: 444514 - RNA, 21 nt, Human
uaacucuguccauuaccgugg

SEQ ID NO: 444515 - RNA, 23 nt, Human
uaccgugguagcacugcugcucc

SEQ ID NO: 444516 - RNA, 21 nt, Human
uccacaggaucuggauuccug

SEQ ID NO: 444517 - RNA, 22 nt, Human
ucugugguaaaacaccaagggc

SEQ ID NO: 444518 - RNA, 21 nt, Human
ugaggcuuccuuggucauggc

SEQ ID NO: 444519 - RNA, 18 nt, Human
ugcuuccugugacggugg

SEQ ID NO: 444520 - RNA, 19 nt, Human
uggaaagaaucacauaguu

SEQ ID NO: 444521 - RNA, 20 nt, Human
uggguaguuuucuggggucc

SEQ ID NO: 444522 - RNA, 27 nt, Human
ugguguggugucauagaugaccaagcu

SEQ ID NO: 444523 - RNA, 27 nt, Human
ugguuuggaaggauccucuaggcuugg

SEQ ID NO: 444524 - RNA, 24 nt, Human
uguuuggaaguauccucucgucuu

SEQ ID NO: 444525 - RNA, 21 nt, Human
uucaugucuuuucaucccguu

SEQ ID NO: 444526 - RNA, 21 nt, Human
uucccagaaucuggauuccug

SEQ ID NO: 444527 - RNA, 19 nt, Human
uuccuggucaggccaugug

SEQ ID NO: 444528 - RNA, 20 nt, Human
uucugugucugagcaucgug

SEQ ID NO: 444529 - RNA, 19 nt, Human
uucuguuucugagcauugu

SEQ ID NO: 444530 - RNA, 19 nt, Human
uugacuuacaugagaguaa

SEQ ID NO: 444531 - RNA, 25 nt, Human
uuggaaccuggauaacagucggagg

SEQ ID NO: 444532 - RNA, 18 nt, Human
uuggaacuggaacaacag

SEQ ID NO: 444533 - RNA, 21 nt, Human
uuggguacuuuucugaggucc

SEQ ID NO: 444534 - RNA, 18 nt, Human
uuuaagaaauuacuggaa

SEQ ID NO: 444535 - RNA, 24 nt, Human
agcuggagaugguggugaacagcc

SEQ ID NO: 444536 - RNA, 18 nt, Human
aggaggcccugggacgcu

SEQ ID NO: 444537 - RNA, 18 nt, Human
agucauggccccucccgc

SEQ ID NO: 444538 - RNA, 22 nt, Human
cgcuuuaucuuccucagucucu

SEQ ID NO: 444539 - RNA, 22 nt, Human
cuacaaaaccgauucaaauugu

SEQ ID NO: 444540 - RNA, 19 nt, Human
cucacccucuuucugguuu

SEQ ID NO: 444541 - RNA, 21 nt, Human
cucguagucauggccccuccc

SEQ ID NO: 444542 - RNA, 22 nt, Human
cucugccuuccuuagagacuga

SEQ ID NO: 444543 - RNA, 26 nt, Human
cugaggcucaacccaggucucugccu

SEQ ID NO: 444544 - RNA, 23 nt, Human
cuggagaugguggugaacagccu

SEQ ID NO: 444545 - RNA, 22 nt, Human
cuggugucugugaucagcugga

SEQ ID NO: 444546 - RNA, 23 nt, Human
cugguuuuaggacagcccucccu

SEQ ID NO: 444547 - RNA, 21 nt, Human
gaacagccuguuugcauuucu

SEQ ID NO: 444548 - RNA, 20 nt, Human
gccccucccgcuuccugcuc

SEQ ID NO: 444549 - RNA, 23 nt, Human
gcuuuaucuuccucagucucuca

SEQ ID NO: 444550 - RNA, 20 nt, Human
ucauggccccucccgcuucc

SEQ ID NO: 444551 - RNA, 21 nt, Human
uccucagucucucacccuccu

SEQ ID NO: 444552 - RNA, 21 nt, Human
uccucagucucucacccucuu

SEQ ID NO: 444553 - RNA, 21 nt, Human
ugauucaaaguaaugcacucu

SEQ ID NO: 444554 - RNA, 21 nt, Human
uggccccucccgcuuccugcu

SEQ ID NO: 444555 - RNA, 18 nt, Human
uggucaggagugcauugc

SEQ ID NO: 444556 - RNA, 23 nt, Human
ugucuggagcaccaggguuucac

SEQ ID NO: 444557 - RNA, 21 nt, Human
uuucucuggggcccucccccu

SEQ ID NO: 444558 - RNA, 23 nt, Human
uuuuaaaagaaucuacuugguca

SEQ ID NO: 444559 - RNA, 20 nt, Human
aaacugaucuuaguucaaga

SEQ ID NO: 444560 - RNA, 22 nt, Human
aaccaaacccugugacuucaac

SEQ ID NO: 444561 - RNA, 24 nt, Human
acagugcugggauuacaggcguga

SEQ ID NO: 444562 - RNA, 18 nt, Human
acgggguuucgccauguu

SEQ ID NO: 444563 - RNA, 19 nt, Human
acgggguuucgccauguug

SEQ ID NO: 444564 - RNA, 22 nt, Human
acgggguuucgccauguugcgc

SEQ ID NO: 444565 - RNA, 23 nt, Human
acgggguuucgccauguugcgca

SEQ ID NO: 444566 - RNA, 24 nt, Human
acgggguuucgccauguugcgcag

SEQ ID NO: 444567 - RNA, 18 nt, Human
agccucgaccucccaggc

SEQ ID NO: 444568 - RNA, 18 nt, Human
aggcugaucuugaacucc

SEQ ID NO: 444569 - RNA, 18 nt, Human
agugcugggauuacaggc

SEQ ID NO: 444570 - RNA, 21 nt, Human
agugcugggauuacaggcgug

SEQ ID NO: 444571 - RNA, 22 nt, Human
agugcugggauuacaggcguga

SEQ ID NO: 444572 - RNA, 18 nt, Human
auucucccgccucagccu

SEQ ID NO: 444573 - RNA, 24 nt, Human
auuguagagacgggguuucgccau

SEQ ID NO: 444574 - RNA, 19 nt, Human
cacagugcugggauuacag

SEQ ID NO: 444575 - RNA, 21 nt, Human
cacagugcugggauuacaggc

SEQ ID NO: 444576 - RNA, 21 nt, Human
cagccucgaccucccaggcuc

SEQ ID NO: 444577 - RNA, 23 nt, Human
cagccucgaccucccaggcucag

SEQ ID NO: 444578 - RNA, 24 nt, Human
caggcucaggugauucucccgccu

SEQ ID NO: 444579 - RNA, 24 nt, Human
caggcucaggugauucucccgccu

SEQ ID NO: 444580 - RNA, 22 nt, Human
caggugauucucccgccucagc

SEQ ID NO: 444581 - RNA, 22 nt, Human
caggugauucucccgccucagc

SEQ ID NO: 444582 - RNA, 25 nt, Human
cagugcugggauuacaggcgugagc

SEQ ID NO: 444583 - RNA, 21 nt, Human
caucccgccucagccucucac

SEQ ID NO: 444584 - RNA, 24 nt, Human
cauguugcgcaggcugaucuugaa

SEQ ID NO: 444585 - RNA, 19 nt, Human
cccagguaguugggacuac

SEQ ID NO: 444586 - RNA, 23 nt, Human
cccagguaguugggacuacaagc

SEQ ID NO: 444587 - RNA, 24 nt, Human
ccucccaggcucaggugauucucc

SEQ ID NO: 444588 - RNA, 24 nt, Human
ccucccaggcucaggugauucucc

SEQ ID NO: 444589 - RNA, 27 nt, Human
cgccauguugcgcaggcugaucuugaa

SEQ ID NO: 444590 - RNA, 20 nt, Human
cgccucagccucccaggcuc

SEQ ID NO: 444591 - RNA, 20 nt, Human
cgccucagccucccagguag

SEQ ID NO: 444592 - RNA, 24 nt, Human
cgccucagccucucacagugcugg

SEQ ID NO: 444593 - RNA, 24 nt, Human
cgcucugucacccaggcuggaaug

SEQ ID NO: 444594 - RNA, 24 nt, Human
cucagccucccagguaguugggac

SEQ ID NO: 444595 - RNA, 18 nt, Human
cucaggugauucucccgc

SEQ ID NO: 444596 - RNA, 18 nt, Human
cucaggugauucucccgc

SEQ ID NO: 444597 - RNA, 20 nt, Human
cucaggugauucucccgccu

SEQ ID NO: 444598 - RNA, 20 nt, Human
cucaggugauucucccgccu

SEQ ID NO: 444599 - RNA, 21 nt, Human
cucaggugauucucccgccuc

SEQ ID NO: 444600 - RNA, 23 nt, Human
cucaggugauucucccgccucag

SEQ ID NO: 444601 - RNA, 23 nt, Human
cucaggugauucucccgccucag

SEQ ID NO: 444602 - RNA, 19 nt, Human
cucccaggcucaggugauu

SEQ ID NO: 444603 - RNA, 19 nt, Human
cucccaggcucaggugauu

SEQ ID NO: 444604 - RNA, 25 nt, Human
cucccaggcucaggugauucucccg

SEQ ID NO: 444605 - RNA, 25 nt, Human
cucccaggcucaggugauucucccg

SEQ ID NO: 444606 - RNA, 23 nt, Human
cucccgccucagccucccaggcu

SEQ ID NO: 444607 - RNA, 20 nt, Human
cuccuggauaaaucagauua

SEQ ID NO: 444608 - RNA, 21 nt, Human
cucgcucugucacccaggcug

SEQ ID NO: 444609 - RNA, 22 nt, Human
cucggcucgcugcagccucgac

SEQ ID NO: 444610 - RNA, 20 nt, Human
cugcagccucgaccucccag

SEQ ID NO: 444611 - RNA, 23 nt, Human
cugcagccucgaccucccaggcu

SEQ ID NO: 444612 - RNA, 24 nt, Human
gaccucaggugaucaucccgccuc

SEQ ID NO: 444613 - RNA, 23 nt, Human
gagacgggguuucgccauguugc

SEQ ID NO: 444614 - RNA, 18 nt, Human
gauuacaggcgugagcca

SEQ ID NO: 444615 - RNA, 22 nt, Human
gauuacaggcgugagccaccgc

SEQ ID NO: 444616 - RNA, 23 nt, Human
gauuacaggcgugagccaccgca

SEQ ID NO: 444617 - RNA, 25 nt, Human
gcucugucacccaggcuggaaugca

SEQ ID NO: 444618 - RNA, 23 nt, Human
gcugaucuugaacuccugaccuc

SEQ ID NO: 444619 - RNA, 19 nt, Human
gcuggaaugcagcggcgcg

SEQ ID NO: 444620 - RNA, 23 nt, Human
ggcucaggugauucucccgccuc

SEQ ID NO: 444621 - RNA, 24 nt, Human
ggcugaucuugaacuccugaccuc

SEQ ID NO: 444622 - RNA, 23 nt, Human
gggguuucgccauguugcgcagg

SEQ ID NO: 444623 - RNA, 22 nt, Human
ggguuucgccauguugcgcagg

SEQ ID NO: 444624 - RNA, 24 nt, Human
ggugauucucccgccucagccucc

SEQ ID NO: 444625 - RNA, 24 nt, Human
ggugauucucccgccucagccucc

SEQ ID NO: 444626 - RNA, 21 nt, Human
guagagacgggguuucgccau

SEQ ID NO: 444627 - RNA, 22 nt, Human
guagagacgggguuucgccaug

SEQ ID NO: 444628 - RNA, 18 nt, Human
guaguugggacuacaagc

SEQ ID NO: 444629 - RNA, 24 nt, Human
gugaucaucccgccucagccucuc

SEQ ID NO: 444630 - RNA, 24 nt, Human
gugauucucccgccucagccuccc

SEQ ID NO: 444631 - RNA, 24 nt, Human
gugauucucccgccucagccuccc

SEQ ID NO: 444632 - RNA, 25 nt, Human
uaauuuuuugcuauuuauuguagag

SEQ ID NO: 444633 - RNA, 22 nt, Human
uacaggcgugagccaccgcacc

SEQ ID NO: 444634 - RNA, 23 nt, Human
uacaggcgugagccaccgcaccu

SEQ ID NO: 444635 - RNA, 21 nt, Human
uagagacgggguuucgccaug

SEQ ID NO: 444636 - RNA, 22 nt, Human
uagagacgggguuucgccaugu

SEQ ID NO: 444637 - RNA, 22 nt, Human
ucacagugcugggauuacaggc

SEQ ID NO: 444638 - RNA, 24 nt, Human
ucacagugcugggauuacaggcgu

SEQ ID NO: 444639 - RNA, 19 nt, Human
ucacccaggcuggaaugca

SEQ ID NO: 444640 - RNA, 21 nt, Human
ucccaggcucaggugauucuc

SEQ ID NO: 444641 - RNA, 21 nt, Human
ucccaggcucaggugauucuc

SEQ ID NO: 444642 - RNA, 24 nt, Human
ucccaggcucaggugauucucccg

SEQ ID NO: 444643 - RNA, 24 nt, Human
ucccaggcucaggugauucucccg

SEQ ID NO: 444644 - RNA, 18 nt, Human
ucccagguaguugggacu

SEQ ID NO: 444645 - RNA, 21 nt, Human
ucgaaaccaaacccugugacu

SEQ ID NO: 444646 - RNA, 19 nt, Human
ucgcugcagccucgaccuc

SEQ ID NO: 444647 - RNA, 21 nt, Human
ucgcugcagccucgaccuccc

SEQ ID NO: 444648 - RNA, 23 nt, Human
ucgcugcagccucgaccucccag

SEQ ID NO: 444649 - RNA, 24 nt, Human
ucgcugcagccucgaccucccagg

SEQ ID NO: 444650 - RNA, 24 nt, Human
ucucacagugcugggauuacaggc

SEQ ID NO: 444651 - RNA, 19 nt, Human
ucucccgccucagccuccc

SEQ ID NO: 444652 - RNA, 23 nt, Human
ucucccgccucagccucccaggc

SEQ ID NO: 444653 - RNA, 19 nt, Human
ucucgcucugucacccagg

SEQ ID NO: 444654 - RNA, 23 nt, Human
ucucgcucugucacccaggcugg

SEQ ID NO: 444655 - RNA, 24 nt, Human
ucucgcucugucacccaggcugga

SEQ ID NO: 444656 - RNA, 26 nt, Human
ucucgcucugucacccaggcuggaau

SEQ ID NO: 444657 - RNA, 27 nt, Human
ucucgcucugucacccaggcuggaaug

SEQ ID NO: 444658 - RNA, 24 nt, Human
ucugucacccaggcuggaaugcag

SEQ ID NO: 444659 - RNA, 23 nt, Human
ucuugaacuccugaccucaggug

SEQ ID NO: 444660 - RNA, 20 nt, Human
ugaccucaggugaucauccc

SEQ ID NO: 444661 - RNA, 24 nt, Human
ugaccucaggugaucaucccgccu

SEQ ID NO: 444662 - RNA, 20 nt, Human
ugauucucccgccucagccu

SEQ ID NO: 444663 - RNA, 22 nt, Human
ugcagcggcgcgaucucggcuc

SEQ ID NO: 444664 - RNA, 24 nt, Human
ugcugggauuacaggcgugagcca

SEQ ID NO: 444665 - RNA, 24 nt, Human
uggaaugcagcggcgcgaucucgg

SEQ ID NO: 444666 - RNA, 23 nt, Human
uggauaaaucagauuaaaauuuu

SEQ ID NO: 444667 - RNA, 18 nt, Human
ugggacuacaagcgugca

SEQ ID NO: 444668 - RNA, 18 nt, Human
ugggauuacaggcgugag

SEQ ID NO: 444669 - RNA, 19 nt, Human
ugggauuacaggcgugagc

SEQ ID NO: 444670 - RNA, 21 nt, Human
ugggauuacaggcgugagcca

SEQ ID NO: 444671 - RNA, 22 nt, Human
ugggauuacaggcgugagccac

SEQ ID NO: 444672 - RNA, 23 nt, Human
ugggauuacaggcgugagccacc

SEQ ID NO: 444673 - RNA, 24 nt, Human
ugggauuacaggcgugagccaccg

SEQ ID NO: 444674 - RNA, 24 nt, Human
uguagagacgggguuucgccaugu

SEQ ID NO: 444675 - RNA, 24 nt, Human
uuacuguacagccuuccuccugga

SEQ ID NO: 444676 - RNA, 18 nt, Human
uuagaaacuucaaaacug

SEQ ID NO: 444677 - RNA, 23 nt, Human
uuguagagacgggguuucgccau

SEQ ID NO: 444678 - RNA, 24 nt, Human
uuguagagacgggguuucgccaug

SEQ ID NO: 444679 - RNA, 25 nt, Human
uuuuuauuuuuugagacauggucuc

SEQ ID NO: 444680 - RNA, 24 nt, Human
uuuuuugcuauuuauuguagagac

SEQ ID NO: 444681 - RNA, 21 nt, Human
aaaaaaaaaaaaaaaaagucu

SEQ ID NO: 444682 - RNA, 20 nt, Human
aaaugccaaagucacuaaca

SEQ ID NO: 444683 - RNA, 22 nt, Human
aaaugccaaagucacuaacacu

SEQ ID NO: 444684 - RNA, 19 nt, Human
aacacagugaaaccccguc

SEQ ID NO: 444685 - RNA, 20 nt, Human
aacacagugaaaccccgucu

SEQ ID NO: 444686 - RNA, 21 nt, Human
aacacagugaaaccccgucuc

SEQ ID NO: 444687 - RNA, 23 nt, Human
aacuacuucuucccauuccccac

SEQ ID NO: 444688 - RNA, 21 nt, Human
acacagugaaaccccgucucc

SEQ ID NO: 444689 - RNA, 19 nt, Human
acccuggaauucgaaaggg

SEQ ID NO: 444690 - RNA, 20 nt, Human
acuaacacucaguuccauaa

SEQ ID NO: 444691 - RNA, 18 nt, Human
acugcacuccauccuggg

SEQ ID NO: 444692 - RNA, 19 nt, Human
acugcacuccauccugggc

SEQ ID NO: 444693 - RNA, 24 nt, Human
acugcacuccauccugggcgauag

SEQ ID NO: 444694 - RNA, 19 nt, Human
agacacguccuccggccuc

SEQ ID NO: 444695 - RNA, 22 nt, Human
agagcgagacuccaucucaaaa

SEQ ID NO: 444696 - RNA, 24 nt, Human
agcacuuugggaggccgagguggg

SEQ ID NO: 444697 - RNA, 23 nt, Human
agccgggcgugguggcaggugcc

SEQ ID NO: 444698 - RNA, 22 nt, Human
agcgacaggacagcucuagaga

SEQ ID NO: 444699 - RNA, 25 nt, Human
aggcaggguccucuugucccgucgc

SEQ ID NO: 444700 - RNA, 21 nt, Human
aggccgaggugggcagaucac

SEQ ID NO: 444701 - RNA, 21 nt, Human
aggccggagaauggugugaac

SEQ ID NO: 444702 - RNA, 24 nt, Human
aggccggagaauggugugaacccg

SEQ ID NO: 444703 - RNA, 24 nt, Human
aggcgcgguggcucacgccuguaa

SEQ ID NO: 444704 - RNA, 24 nt, Human
aggcggaguuugcagugagccgag

SEQ ID NO: 444705 - RNA, 24 nt, Human
aggugggcagaucacgaggucagg

SEQ ID NO: 444706 - RNA, 21 nt, Human
aguggagcugcuguuucuucu

SEQ ID NO: 444707 - RNA, 18 nt, Human
auacacccccagaaggac

SEQ ID NO: 444708 - RNA, 20 nt, Human
aucugcauuaaccccucccu

SEQ ID NO: 444709 - RNA, 24 nt, Human
auugagccacugcacuccauccug

SEQ ID NO: 444710 - RNA, 20 nt, Human
caagcacaguaaacacgcug

SEQ ID NO: 444711 - RNA, 19 nt, Human
cacacaggucaauccuggg

SEQ ID NO: 444712 - RNA, 22 nt, Human
caccugcuccucagcuggggau

SEQ ID NO: 444713 - RNA, 24 nt, Human
cacgccuguaaucccagcacuuug

SEQ ID NO: 444714 - RNA, 21 nt, Human
cacucucacaccaaggcaggg

SEQ ID NO: 444715 - RNA, 23 nt, Human
cacugcacuccauccugggcgau

SEQ ID NO: 444716 - RNA, 24 nt, Human
cacugcacuccauccugggcgaua

SEQ ID NO: 444717 - RNA, 24 nt, Human
cagcacuuugggaggccgaggugg

SEQ ID NO: 444718 - RNA, 22 nt, Human
cagcgacaggacagcucuagag

SEQ ID NO: 444719 - RNA, 20 nt, Human
caugacaaccaccccaacca

SEQ ID NO: 444720 - RNA, 23 nt, Human
caugacaaccaccccaaccacca

SEQ ID NO: 444721 - RNA, 18 nt, Human
ccacacucuccaguccuc

SEQ ID NO: 444722 - RNA, 20 nt, Human
ccacugcacuccauccuggg

SEQ ID NO: 444723 - RNA, 21 nt, Human
ccacugcacuccauccugggc

SEQ ID NO: 444724 - RNA, 21 nt, Human
ccacugcacuccauccugggc

SEQ ID NO: 444725 - RNA, 24 nt, Human
ccacugcacuccauccugggcgau

SEQ ID NO: 444726 - RNA, 25 nt, Human
ccaucucaaaaaaaaaaaaaaaaaa

SEQ ID NO: 444727 - RNA, 23 nt, Human
cccaauauauucuuuaguccaaa

SEQ ID NO: 444728 - RNA, 20 nt, Human
cccaaugcuaaacugcuuuc

SEQ ID NO: 444729 - RNA, 19 nt, Human
cccccagaaggacaaggga

SEQ ID NO: 444730 - RNA, 22 nt, Human
ccugggcgauagagcgagacuc

SEQ ID NO: 444731 - RNA, 21 nt, Human
ccuguagucccagcuacucgg

SEQ ID NO: 444732 - RNA, 23 nt, Human
cgagacuccaucucaaaaaaaaa

SEQ ID NO: 444733 - RNA, 24 nt, Human
cgaggugggcagaucacgagguca

SEQ ID NO: 444734 - RNA, 23 nt, Human
cgccuguaaucccagcacuuugg

SEQ ID NO: 444735 - RNA, 24 nt, Human
cgccuguaaucccagcacuuuggg

SEQ ID NO: 444736 - RNA, 24 nt, Human
cguggcuaacacagugaaaccccg

SEQ ID NO: 444737 - RNA, 18 nt, Human
cucaaaaaaaaaaaaaaa

SEQ ID NO: 444738 - RNA, 22 nt, Human
cucacgccuguaaucccagcac

SEQ ID NO: 444739 - RNA, 24 nt, Human
cucacgccuguaaucccagcacuu

SEQ ID NO: 444740 - RNA, 23 nt, Human
cuccagucacuguccagacugga

SEQ ID NO: 444741 - RNA, 19 nt, Human
cuccaucucaaaaaaaaaa

SEQ ID NO: 444742 - RNA, 19 nt, Human
cuccauuuucagcucuuuc

SEQ ID NO: 444743 - RNA, 21 nt, Human
cugaggccggagaauggugug

SEQ ID NO: 444744 - RNA, 21 nt, Human
cuggaagguuuuccuuaaccc

SEQ ID NO: 444745 - RNA, 21 nt, Human
cuuggugcacuugccaucugc

SEQ ID NO: 444746 - RNA, 23 nt, Human
cuuugggaggccgaggugggcag

SEQ ID NO: 444747 - RNA, 24 nt, Human
gacaagggagaguggaugcuggaa

SEQ ID NO: 444748 - RNA, 19 nt, Human
gagcugcuguuucuucucc

SEQ ID NO: 444749 - RNA, 23 nt, Human
gaguuugcagugagccgagauug

SEQ ID NO: 444750 - RNA, 24 nt, Human
gauacacccccagaaggacaaggg

SEQ ID NO: 444751 - RNA, 24 nt, Human
gccacugcacuccauccugggcga

SEQ ID NO: 444752 - RNA, 23 nt, Human
gccagcggcuggguuaccgaggg

SEQ ID NO: 444753 - RNA, 20 nt, Human
ggaaagacagagcgagagag

SEQ ID NO: 444754 - RNA, 24 nt, Human
ggaaggacaucaaaccuggggggg

SEQ ID NO: 444755 - RNA, 21 nt, Human
ggaagguuuuccuuaacccuc

SEQ ID NO: 444756 - RNA, 18 nt, Human
ggagauggagaccaucgu

SEQ ID NO: 444757 - RNA, 24 nt, Human
ggaguuugcagugagccgagauug

SEQ ID NO: 444758 - RNA, 21 nt, Human
ggcagaucacgaggucaggag

SEQ ID NO: 444759 - RNA, 21 nt, Human
ggcucacgccuguaaucccag

SEQ ID NO: 444760 - RNA, 21 nt, Human
gggaaguuuggguucucaggg

SEQ ID NO: 444761 - RNA, 23 nt, Human
gggacaugcacccuuuaguaacc

SEQ ID NO: 444762 - RNA, 23 nt, Human
gguggcucacgccuguaauccca

SEQ ID NO: 444763 - RNA, 24 nt, Human
gguggcucacgccuguaaucccag

SEQ ID NO: 444764 - RNA, 23 nt, Human
guaauaaccagacacguccuccg

SEQ ID NO: 444765 - RNA, 18 nt, Human
gugcuuccucccaaugcu

SEQ ID NO: 444766 - RNA, 23 nt, Human
uacacacaggucaauccugggca

SEQ ID NO: 444767 - RNA, 19 nt, Human
uacacccccagaaggacaa

SEQ ID NO: 444768 - RNA, 23 nt, Human
uaccaccugccucucaggguuca

SEQ ID NO: 444769 - RNA, 18 nt, Human
uaguaaccuggaggggac

SEQ ID NO: 444770 - RNA, 24 nt, Human
uauccaacaguucuaacucugguu

SEQ ID NO: 444771 - RNA, 22 nt, Human
ucaaaaaaaaaaaaaaaaaaaa

SEQ ID NO: 444772 - RNA, 23 nt, Human
ucaaaaaaaaaaaaaaaaaaaaa

SEQ ID NO: 444773 - RNA, 24 nt, Human
ucacgaggucaggagauggagacc

SEQ ID NO: 444774 - RNA, 28 nt, Human
ucagcucuuucuuuuccuggccuucuca

SEQ ID NO: 444775 - RNA, 20 nt, Human
ucaugaccaagcacaguaaa

SEQ ID NO: 444776 - RNA, 19 nt, Human
uccaagggaucuuccucug

SEQ ID NO: 444777 - RNA, 19 nt, Human
uccauaagcuuuaccuugc

SEQ ID NO: 444778 - RNA, 24 nt, Human
uccauccugggcgauagagcgaga

SEQ ID NO: 444779 - RNA, 23 nt, Human
uccaucucaaaaaaaaaaaaaaa

SEQ ID NO: 444780 - RNA, 22 nt, Human
ucccagcagcucaugaccaagc

SEQ ID NO: 444781 - RNA, 22 nt, Human
ucccauuccccacacucuccag

SEQ ID NO: 444782 - RNA, 19 nt, Human
uccccacacucuccagucc

SEQ ID NO: 444783 - RNA, 20 nt, Human
uccucucuccucccuuauug

SEQ ID NO: 444784 - RNA, 19 nt, Human
ucgguaguggagcugcugu

SEQ ID NO: 444785 - RNA, 22 nt, Human
ucucagauacucucugggaagu

SEQ ID NO: 444786 - RNA, 19 nt, Human
ucuccagucacuguccaga

SEQ ID NO: 444787 - RNA, 21 nt, Human
ucuccaguccucucuccuccc

SEQ ID NO: 444788 - RNA, 20 nt, Human
ucuuucuuuuccuggccuuc

SEQ ID NO: 444789 - RNA, 22 nt, Human
ugacaaccaccccaaccaccau

SEQ ID NO: 444790 - RNA, 22 nt, Human
ugagccgagauugagccacugc

SEQ ID NO: 444791 - RNA, 24 nt, Human
ugaggccggagaauggugugaacc

SEQ ID NO: 444792 - RNA, 20 nt, Human
ugaguaggugaguuuauugg

SEQ ID NO: 444793 - RNA, 26 nt, Human
ugccaaagucacuaacacucaguucc

SEQ ID NO: 444794 - RNA, 19 nt, Human
ugcccggcauuucugcccu

SEQ ID NO: 444795 - RNA, 18 nt, Human
ugcccuccuuaucccccu

SEQ ID NO: 444796 - RNA, 20 nt, Human
ugcccugguggcugcacugc

SEQ ID NO: 444797 - RNA, 23 nt, Human
ugccuguagucccagcuacucgg

SEQ ID NO: 444798 - RNA, 24 nt, Human
ugccuguagucccagcuacucggg

SEQ ID NO: 444799 - RNA, 20 nt, Human
ugcuguuucuucuccuguau

SEQ ID NO: 444800 - RNA, 24 nt, Human
uggccaggcgcgguggcucacgcc

SEQ ID NO: 444801 - RNA, 21 nt, Human
uggcuaacacagugaaacccc

SEQ ID NO: 444802 - RNA, 22 nt, Human
uggcucacgccuguaaucccag

SEQ ID NO: 444803 - RNA, 24 nt, Human
uggcucacgccuguaaucccagca

SEQ ID NO: 444804 - RNA, 20 nt, Human
ugggaggccgaggugggcag

SEQ ID NO: 444805 - RNA, 24 nt, Human
ugggaggccgaggugggcagauca

SEQ ID NO: 444806 - RNA, 22 nt, Human
ugggcagaucacgaggucagga

SEQ ID NO: 444807 - RNA, 24 nt, Human
ugguggcaggugccuguaguccca

SEQ ID NO: 444808 - RNA, 25 nt, Human
ugguuuucuccauuuucagcucuuu

SEQ ID NO: 444809 - RNA, 30 nt, Human
uguuucuucuccuguauccaacaguucuaa

SEQ ID NO: 444810 - RNA, 21 nt, Human
uuagccgggcgugguggcagg

SEQ ID NO: 444811 - RNA, 24 nt, Human
uuagccgggcgugguggcaggugc

SEQ ID NO: 444812 - RNA, 18 nt, Human
uuccuuggagcucuccag

SEQ ID NO: 444813 - RNA, 22 nt, Human
uucuuggaaggacaucaaaccu

SEQ ID NO: 444814 - RNA, 21 nt, Human
uugcaggcuccaguguuccug

SEQ ID NO: 444815 - RNA, 25 nt, Human
uugcagugagccgagauugagccac

SEQ ID NO: 444816 - RNA, 25 nt, Human
uugggaggccgaggugggcagauca

SEQ ID NO: 444817 - RNA, 19 nt, Human
uuuccuggccuucucauug

SEQ ID NO: 444818 - RNA, 19 nt, Human
uuugcagugagccgagauu

SEQ ID NO: 444819 - RNA, 24 nt, Human
uuuggccaggcgcgguggcucacg

SEQ ID NO: 444820 - RNA, 22 nt, Human
aaauaaccuaaaggggauccau

SEQ ID NO: 444821 - RNA, 22 nt, Human
aaaugccaaagucacuaacacu

SEQ ID NO: 444822 - RNA, 22 nt, Human
aaaugccaagaccaaccuagcc

SEQ ID NO: 444823 - RNA, 24 nt, Human
acaggaugcuucccagccccaccc

SEQ ID NO: 444824 - RNA, 19 nt, Human
acccuggaacccaaaaggg

SEQ ID NO: 444825 - RNA, 25 nt, Human
accuccccucuauuccuccccccaa

SEQ ID NO: 444826 - RNA, 19 nt, Human
accugacuggaaggguucg

SEQ ID NO: 444827 - RNA, 21 nt, Human
accugguccucagcuggggac

SEQ ID NO: 444828 - RNA, 20 nt, Human
acuaacacucagcuccauaa

SEQ ID NO: 444829 - RNA, 18 nt, Human
acuacaaccaccaccucc

SEQ ID NO: 444830 - RNA, 25 nt, Human
acucucacaccaaggcaggguccuu

SEQ ID NO: 444831 - RNA, 19 nt, Human
agagggagguuggaggggc

SEQ ID NO: 444832 - RNA, 21 nt, Human
agauauacccuggaacccaaa

SEQ ID NO: 444833 - RNA, 21 nt, Human
agccaccuguggacagaggga

SEQ ID NO: 444834 - RNA, 26 nt, Human
aggagaaagcaaauugugggacugaa

SEQ ID NO: 444835 - RNA, 21 nt, Human
aguggagccgcuguuucuucu

SEQ ID NO: 444836 - RNA, 19 nt, Human
auccggccucccccagucu

SEQ ID NO: 444837 - RNA, 21 nt, Human
aucugcauaauaaccagacac

SEQ ID NO: 444838 - RNA, 20 nt, Human
aucugcauuaaccccucccc

SEQ ID NO: 444839 - RNA, 22 nt, Human
caaaugccaagaccaaccuagc

SEQ ID NO: 444840 - RNA, 22 nt, Human
caagaagccacuggcugacuga

SEQ ID NO: 444841 - RNA, 23 nt, Human
caagacagaguggaugcuggaaa

SEQ ID NO: 444842 - RNA, 19 nt, Human
cacacuacaaccaccaccu

SEQ ID NO: 444843 - RNA, 21 nt, Human
caccgccaucaucaagaagcc

SEQ ID NO: 444844 - RNA, 21 nt, Human
cacucucacaccaaggcaggg

SEQ ID NO: 444845 - RNA, 25 nt, Human
cagccccacccuuggcccaguccca

SEQ ID NO: 444846 - RNA, 22 nt, Human
caggggacauauaccccuaaau

SEQ ID NO: 444847 - RNA, 21 nt, Human
caggguccuuuuguccaagga

SEQ ID NO: 444848 - RNA, 22 nt, Human
caucacacuacaaccaccaccu

SEQ ID NO: 444849 - RNA, 25 nt, Human
ccaauauauucguuagucuaaagga

SEQ ID NO: 444850 - RNA, 18 nt, Human
ccacacucuccagucccc

SEQ ID NO: 444851 - RNA, 22 nt, Human
ccaccuguggacagagggaggu

SEQ ID NO: 444852 - RNA, 24 nt, Human
cccagccccacccuuggcccaguc

SEQ ID NO: 444853 - RNA, 23 nt, Human
cccauccuugguccagcagcacc

SEQ ID NO: 444854 - RNA, 20 nt, Human
ccccucuccucccuuauucc

SEQ ID NO: 444855 - RNA, 22 nt, Human
ccccugcugugcucagcuacag

SEQ ID NO: 444856 - RNA, 19 nt, Human
cccuggaacccaaaaggga

SEQ ID NO: 444857 - RNA, 18 nt, Human
ccggccucccccagucuc

SEQ ID NO: 444858 - RNA, 23 nt, Human
ccuccccucuauuccucccccca

SEQ ID NO: 444859 - RNA, 18 nt, Human
ccugggccccagccagcu

SEQ ID NO: 444860 - RNA, 20 nt, Human
ccuugguccagcagcacccu

SEQ ID NO: 444861 - RNA, 18 nt, Human
cgguguuuuuuaaucucc

SEQ ID NO: 444862 - RNA, 22 nt, Human
cuccagcauuccugccuucucc

SEQ ID NO: 444863 - RNA, 19 nt, Human
cuccaguccccucuccucc

SEQ ID NO: 444864 - RNA, 22 nt, Human
cuccccucuauuccucccccca

SEQ ID NO: 444865 - RNA, 20 nt, Human
cuccugggccccagccagcu

SEQ ID NO: 444866 - RNA, 20 nt, Human
cucuuuaucccccuaauaaa

SEQ ID NO: 444867 - RNA, 19 nt, Human
cuguguauggcucaccucc

SEQ ID NO: 444868 - RNA, 21 nt, Human
cuuggugcacuugccaucugc

SEQ ID NO: 444869 - RNA, 27 nt, Human
gagacuguuuuucuugguagguucucg

SEQ ID NO: 444870 - RNA, 20 nt, Human
gagccgcuguuucuucugcu

SEQ ID NO: 444871 - RNA, 20 nt, Human
gaggagaaagcaaauugugg

SEQ ID NO: 444872 - RNA, 25 nt, Human
gcaaaacaggaugcuucccagcccc

SEQ ID NO: 444873 - RNA, 22 nt, Human
gcuccauaaacuuuaccuugcc

SEQ ID NO: 444874 - RNA, 18 nt, Human
gggcaggucgguagugga

SEQ ID NO: 444875 - RNA, 18 nt, Human
ggguuuuuagagacaccu

SEQ ID NO: 444876 - RNA, 27 nt, Human
gucacaacuuggcagcagcuccugauc

SEQ ID NO: 444877 - RNA, 19 nt, Human
guggaucccaccuccagcc

SEQ ID NO: 444878 - RNA, 22 nt, Human
gugucagcaaaugccaagacca

SEQ ID NO: 444879 - RNA, 20 nt, Human
uaaaggggauccaucacacu

SEQ ID NO: 444880 - RNA, 23 nt, Human
uacacacagggcacucagcagga

SEQ ID NO: 444881 - RNA, 23 nt, Human
uacacuuccaggaggacaagaca

SEQ ID NO: 444882 - RNA, 22 nt, Human
uaggacuuacacacagggcacu

SEQ ID NO: 444883 - RNA, 20 nt, Human
uagguucucgcauacucucc

SEQ ID NO: 444884 - RNA, 23 nt, Human
uccaccgccaucaucaagaagcc

SEQ ID NO: 444885 - RNA, 25 nt, Human
uccaccgccaucaucaagaagccac

SEQ ID NO: 444886 - RNA, 19 nt, Human
ucccagccccacccuuggc

SEQ ID NO: 444887 - RNA, 19 nt, Human
uccccacacucuccagucc

SEQ ID NO: 444888 - RNA, 22 nt, Human
uccccacacucuccaguccccu

SEQ ID NO: 444889 - RNA, 19 nt, Human
ucccucugcccucacucuc

SEQ ID NO: 444890 - RNA, 21 nt, Human
ucggcuuucugcauuuucagc

SEQ ID NO: 444891 - RNA, 24 nt, Human
ucuccagucacugaccugacugga

SEQ ID NO: 444892 - RNA, 23 nt, Human
ucuccugggccccagccagcugg

SEQ ID NO: 444893 - RNA, 21 nt, Human
ucugcccucacucucacacca

SEQ ID NO: 444894 - RNA, 20 nt, Human
ucuuucuuuuccuggccuuc

SEQ ID NO: 444895 - RNA, 18 nt, Human
ugagacuguuuuucuugg

SEQ ID NO: 444896 - RNA, 24 nt, Human
ugagauauacccuggaacccaaaa

SEQ ID NO: 444897 - RNA, 19 nt, Human
ugaguaaugagacuguuuu

SEQ ID NO: 444898 - RNA, 27 nt, Human
ugccaaagucacuaacacucagcucca

SEQ ID NO: 444899 - RNA, 18 nt, Human
ugcccucuuuaucccccu

SEQ ID NO: 444900 - RNA, 18 nt, Human
ugcuccagcucccucugc

SEQ ID NO: 444901 - RNA, 19 nt, Human
uggacagagggagguugga

SEQ ID NO: 444902 - RNA, 21 nt, Human
uggagccgcuguuucuucugc

SEQ ID NO: 444903 - RNA, 21 nt, Human
ugguuccugcacaccuccccu

SEQ ID NO: 444904 - RNA, 25 nt, Human
ugugagcaagauccagcuguucuga

SEQ ID NO: 444905 - RNA, 31 nt, Human
uguggacagagggagguuggaggggcuggaa

SEQ ID NO: 444906 - RNA, 23 nt, Human
uuaccuggccuucaggguucaag

SEQ ID NO: 444907 - RNA, 18 nt, Human
uuccauggagcucuccag

SEQ ID NO: 444908 - RNA, 22 nt, Human
uucccagccccacccuuggccc

SEQ ID NO: 444909 - RNA, 20 nt, Human
uucuuuuccuggccuucuca

SEQ ID NO: 444910 - RNA, 24 nt, Human
uugguagguucucgcauacucucc

SEQ ID NO: 444911 - RNA, 19 nt, Human
uuuccuggccuucucauug

SEQ ID NO: 444912 - RNA, 22 nt, Human
uuucuucuuccuauuccccaca

SEQ ID NO: 444913 - RNA, 22 nt, Human
uuuuuuuucuuaacccuugagg

SEQ ID NO: 444914 - RNA, 23 nt, Human
aacacgcugcuccccagcaccuc

SEQ ID NO: 444915 - RNA, 23 nt, Human
aacugcuucuuuccauuccccac

SEQ ID NO: 444916 - RNA, 21 nt, Human
aaguaaagacaggcauaagaa

SEQ ID NO: 444917 - RNA, 20 nt, Human
acaagccgcaaaaccagcaa

SEQ ID NO: 444918 - RNA, 26 nt, Human
accaccaccaccaucaucaagaagcc

SEQ ID NO: 444919 - RNA, 25 nt, Human
acccucaggggugcauucucuuucc

SEQ ID NO: 444920 - RNA, 22 nt, Human
acgagacuuuuacuugguuggu

SEQ ID NO: 444921 - RNA, 18 nt, Human
acuacaaccaccaccacc

SEQ ID NO: 444922 - RNA, 19 nt, Human
agacacguccuccagcccc

SEQ ID NO: 444923 - RNA, 20 nt, Human
agacacguccuccagccccc

SEQ ID NO: 444924 - RNA, 24 nt, Human
agacagcucgagagauccagccuc

SEQ ID NO: 444925 - RNA, 24 nt, Human
agagauccagccucccccaauguc

SEQ ID NO: 444926 - RNA, 21 nt, Human
agauuuucagcaaagcagcuc

SEQ ID NO: 444927 - RNA, 21 nt, Human
aggagacaggguuuugagagc

SEQ ID NO: 444928 - RNA, 19 nt, Human
aggugacauacauccuccu

SEQ ID NO: 444929 - RNA, 21 nt, Human
aguggagccgcuguuucuucu

SEQ ID NO: 444930 - RNA, 23 nt, Human
auaauaaccagacacguccucca

SEQ ID NO: 444931 - RNA, 18 nt, Human
auuuauagacccacccuc

SEQ ID NO: 444932 - RNA, 18 nt, Human
caaccaccaccaccauca

SEQ ID NO: 444933 - RNA, 24 nt, Human
caacuaggacacagugcguccccu

SEQ ID NO: 444934 - RNA, 20 nt, Human
caacuucccagcagcucaca

SEQ ID NO: 444935 - RNA, 20 nt, Human
caagcacagcaaacacgcug

SEQ ID NO: 444936 - RNA, 19 nt, Human
caagccgcaaaaccagcaa

SEQ ID NO: 444937 - RNA, 18 nt, Human
caaggcaaguggaggcag

SEQ ID NO: 444938 - RNA, 19 nt, Human
cacaaggcaaguggaggca

SEQ ID NO: 444939 - RNA, 20 nt, Human
cacaauccacguucuucugc

SEQ ID NO: 444940 - RNA, 18 nt, Human
cacacuacaaccaccacc

SEQ ID NO: 444941 - RNA, 24 nt, Human
cacagcaaacacgcugcuccccag

SEQ ID NO: 444942 - RNA, 24 nt, Human
caccaccaccaucaucaagaagcc

SEQ ID NO: 444943 - RNA, 21 nt, Human
caccaccaucaucaagaagcc

SEQ ID NO: 444944 - RNA, 18 nt, Human
caccagggaaggauucca

SEQ ID NO: 444945 - RNA, 21 nt, Human
cacuacaaccaccaccaccau

SEQ ID NO: 444946 - RNA, 18 nt, Human
cagcaaacacgcugcucc

SEQ ID NO: 444947 - RNA, 20 nt, Human
cagcaaagcagcucccucca

SEQ ID NO: 444948 - RNA, 22 nt, Human
cagcaaagcagcucccuccaug

SEQ ID NO: 444949 - RNA, 19 nt, Human
cagcagcucacaaucaagg

SEQ ID NO: 444950 - RNA, 24 nt, Human
cagcccccaagauauacccaggaa

SEQ ID NO: 444951 - RNA, 27 nt, Human
cagggcgagaucacaggaacacaggac

SEQ ID NO: 444952 - RNA, 22 nt, Human
cagugcguccccucuaggcgag

SEQ ID NO: 444953 - RNA, 18 nt, Human
ccaagauauacccaggaa

SEQ ID NO: 444954 - RNA, 27 nt, Human
ccaccaccaccaucaucaagaagcccc

SEQ ID NO: 444955 - RNA, 22 nt, Human
ccacuggcugacucagauacac

SEQ ID NO: 444956 - RNA, 18 nt, Human
ccccaagauauacccagg

SEQ ID NO: 444957 - RNA, 18 nt, Human
ccccacacucuccagucc

SEQ ID NO: 444958 - RNA, 21 nt, Human
ccccagcauuucugccuucuc

SEQ ID NO: 444959 - RNA, 22 nt, Human
ccccagcauuucugccuucucc

SEQ ID NO: 444960 - RNA, 20 nt, Human
ccccucuccucccuuauucc

SEQ ID NO: 444961 - RNA, 22 nt, Human
ccccugcugugcucagcuacag

SEQ ID NO: 444962 - RNA, 23 nt, Human
cccuacagucucgaccauagaag

SEQ ID NO: 444963 - RNA, 18 nt, Human
ccucaggggugcauucuc

SEQ ID NO: 444964 - RNA, 19 nt, Human
ccucccucucuuccucccc

SEQ ID NO: 444965 - RNA, 19 nt, Human
ccucgcccucuuuauuccc

SEQ ID NO: 444966 - RNA, 24 nt, Human
ccuuauuccaggccccagcauuuc

SEQ ID NO: 444967 - RNA, 22 nt, Human
ccuucaggguucaagcagggga

SEQ ID NO: 444968 - RNA, 18 nt, Human
cguuuggggucccugacu

SEQ ID NO: 444969 - RNA, 21 nt, Human
cuaacacugaguuccauaaac

SEQ ID NO: 444970 - RNA, 21 nt, Human
cucacaagccgcaaaaccagc

SEQ ID NO: 444971 - RNA, 19 nt, Human
cuccaguccccucuccucc

SEQ ID NO: 444972 - RNA, 19 nt, Human
cuccauuuucagcucuuuc

SEQ ID NO: 444973 - RNA, 19 nt, Human
cuccucagcugacaggauu

SEQ ID NO: 444974 - RNA, 20 nt, Human
gaaagaagagaaauaugacc

SEQ ID NO: 444975 - RNA, 23 nt, Human
gaaauaugacucuguuccaccag

SEQ ID NO: 444976 - RNA, 23 nt, Human
gagaucacaggaacacaggaccg

SEQ ID NO: 444977 - RNA, 19 nt, Human
gagccgcuguuucuucucc

SEQ ID NO: 444978 - RNA, 24 nt, Human
gauacacccccgggaggacaaggg

SEQ ID NO: 444979 - RNA, 20 nt, Human
gauacugacuguuagccuca

SEQ ID NO: 444980 - RNA, 19 nt, Human
gaugccucacaagccgcaa

SEQ ID NO: 444981 - RNA, 24 nt, Human
gccucacaagccgcaaaaccagca

SEQ ID NO: 444982 - RNA, 22 nt, Human
ggcaaguggaggcagggcgaga

SEQ ID NO: 444983 - RNA, 21 nt, Human
gggaagugauuuugguuccag

SEQ ID NO: 444984 - RNA, 21 nt, Human
gggagggaguguaugaauagg

SEQ ID NO: 444985 - RNA, 23 nt, Human
ggggagggaguguaugaauaggg

SEQ ID NO: 444986 - RNA, 21 nt, Human
gggugugggugugggucacaa

SEQ ID NO: 444987 - RNA, 18 nt, Human
guaaagacaggcauaaga

SEQ ID NO: 444988 - RNA, 27 nt, Human
guaaagacaggcauaagaaaucacaag

SEQ ID NO: 444989 - RNA, 18 nt, Human
guaaagacaggcauagga

SEQ ID NO: 444990 - RNA, 21 nt, Human
guaaccccuccccugcugugc

SEQ ID NO: 444991 - RNA, 20 nt, Human
guaugaauagggugugggug

SEQ ID NO: 444992 - RNA, 18 nt, Human
gucccggccugugucugg

SEQ ID NO: 444993 - RNA, 24 nt, Human
uaaagcuagguguccaggggagac

SEQ ID NO: 444994 - RNA, 24 nt, Human
uaauaaccagacacguccuccagc

SEQ ID NO: 444995 - RNA, 23 nt, Human
uacacacagggcacucagcaaga

SEQ ID NO: 444996 - RNA, 26 nt, Human
uaccucgcccucuuuauuccccuaaa

SEQ ID NO: 444997 - RNA, 23 nt, Human
uagaauaucacaaggcaagugga

SEQ ID NO: 444998 - RNA, 22 nt, Human
uaggacuuacacacagggcacu

SEQ ID NO: 444999 - RNA, 20 nt, Human
ucaagcacagcaaacacgcu

SEQ ID NO: 445000 - RNA, 25 nt, Human
ucacaaucaagcacagcaaacacgc

SEQ ID NO: 445001 - RNA, 24 nt, Human
ucagcgauauuucucccauuugcu

SEQ ID NO: 445002 - RNA, 21 nt, Human
ucaggggugcauucucuuucu

SEQ ID NO: 445003 - RNA, 19 nt, Human
uccaagggaucuuccucug

SEQ ID NO: 445004 - RNA, 18 nt, Human
uccaggauguuuggauuc

SEQ ID NO: 445005 - RNA, 22 nt, Human
ucccagcagcucacaaucaagc

SEQ ID NO: 445006 - RNA, 22 nt, Human
uccccacacucuccaguccccu

SEQ ID NO: 445007 - RNA, 21 nt, Human
ucccuaaguguuggccgguuu

SEQ ID NO: 445008 - RNA, 21 nt, Human
ucccuccguuuggggucccug

SEQ ID NO: 445009 - RNA, 20 nt, Human
ucccugguggcugcacugcc

SEQ ID NO: 445010 - RNA, 21 nt, Human
ucccugguggcugcacugcuc

SEQ ID NO: 445011 - RNA, 21 nt, Human
uccugaggugacauacauccu

SEQ ID NO: 445012 - RNA, 18 nt, Human
ucucagagacaccugguc

SEQ ID NO: 445013 - RNA, 23 nt, Human
ucucagagacaccugguccucag

SEQ ID NO: 445014 - RNA, 19 nt, Human
ucuccaggauguuuggauu

SEQ ID NO: 445015 - RNA, 19 nt, Human
ucugcguuuugucccggcc

SEQ ID NO: 445016 - RNA, 21 nt, Human
ucuuaucaggagacaggguuu

SEQ ID NO: 445017 - RNA, 20 nt, Human
ucuuucuuuuccuggucuuc

SEQ ID NO: 445018 - RNA, 21 nt, Human
ugacaggauuaggagauuaaa

SEQ ID NO: 445019 - RNA, 20 nt, Human
ugacucagauacacccccgg

SEQ ID NO: 445020 - RNA, 21 nt, Human
ugccaaaguuccuaacacuga

SEQ ID NO: 445021 - RNA, 19 nt, Human
ugccauggcuucagccagu

SEQ ID NO: 445022 - RNA, 23 nt, Human
ugccucccucucuuccuccccca

SEQ ID NO: 445023 - RNA, 19 nt, Human
ugcugguaagacaggguga

SEQ ID NO: 445024 - RNA, 23 nt, Human
uggaaauggcucauuacccggcc

SEQ ID NO: 445025 - RNA, 20 nt, Human
uggccgguuugagaaauaaa

SEQ ID NO: 445026 - RNA, 24 nt, Human
uggggaacuaauaaauguccauga

SEQ ID NO: 445027 - RNA, 23 nt, Human
ugguugguucucagauacucucc

SEQ ID NO: 445028 - RNA, 19 nt, Human
ugucccggccugugucugg

SEQ ID NO: 445029 - RNA, 22 nt, Human
ugucgcugcggggccuccucca

SEQ ID NO: 445030 - RNA, 18 nt, Human
ugucuggcucaccuuccc

SEQ ID NO: 445031 - RNA, 20 nt, Human
uguggaucucaccuccagcu

SEQ ID NO: 445032 - RNA, 21 nt, Human
uguuccuugcugagaaaaaga

SEQ ID NO: 445033 - RNA, 26 nt, Human
uuaaaguaaagacaggcauaagaaau

SEQ ID NO: 445034 - RNA, 21 nt, Human
uuagagauugcgguaaagaca

SEQ ID NO: 445035 - RNA, 24 nt, Human
uuauccuguucuuuuuucaaggug

SEQ ID NO: 445036 - RNA, 20 nt, Human
uuccaggccccagcauuucu

SEQ ID NO: 445037 - RNA, 21 nt, Human
uucccugguggcugcacugcu

SEQ ID NO: 445038 - RNA, 19 nt, Human
uucucagauacucuccagg

SEQ ID NO: 445039 - RNA, 23 nt, Human
uucuuuuccuggucuucucauug

SEQ ID NO: 445040 - RNA, 19 nt, Human
uugaggcuggauacugacu

SEQ ID NO: 445041 - RNA, 22 nt, Human
uuggauucucagagacaccugg

SEQ ID NO: 445042 - RNA, 19 nt, Human
uuuccuggucuucucauug

SEQ ID NO: 445043 - RNA, 18 nt, Human
agaaguuucccuaccccc

SEQ ID NO: 445044 - RNA, 23 nt, Human
caguauucuucagggaagacuug

SEQ ID NO: 445045 - RNA, 25 nt, Human
caguggugacagggugaccaacucu

SEQ ID NO: 445046 - RNA, 25 nt, Human
cauugccacuagaaguuucccuacc

SEQ ID NO: 445047 - RNA, 27 nt, Human
cccccaguauucuucagggaagacuug

SEQ ID NO: 445048 - RNA, 18 nt, Human
ccuucuauuaucauugcu

SEQ ID NO: 445049 - RNA, 27 nt, Human
ccuucuauuaucauugcugcugguuuu

SEQ ID NO: 445050 - RNA, 21 nt, Human
cuagaaguuucccuaccccca

SEQ ID NO: 445051 - RNA, 19 nt, Human
ucuucagggaagacuugca

SEQ ID NO: 445052 - RNA, 23 nt, Human
aaacaaacaaacagggaagaccc

SEQ ID NO: 445053 - RNA, 24 nt, Human
aaacaaacagggaagacccuuuuc

SEQ ID NO: 445054 - RNA, 24 nt, Human
aaacagaaggcaugccgaggucug

SEQ ID NO: 445055 - RNA, 21 nt, Human
aaacugguuucgguuaagugc

SEQ ID NO: 445056 - RNA, 23 nt, Human
aacaaacaaacaaacaaacaaac

SEQ ID NO: 445057 - RNA, 23 nt, Human
aacaaacaaacaaacaaacaaac

SEQ ID NO: 445058 - RNA, 19 nt, Human
aacacaguguuuagggcuc

SEQ ID NO: 445059 - RNA, 22 nt, Human
aaccaugguuugauaagauuua

SEQ ID NO: 445060 - RNA, 22 nt, Human
aacccagaaaauccgagacagg

SEQ ID NO: 445061 - RNA, 18 nt, Human
aaccucuguccuugccuc

SEQ ID NO: 445062 - RNA, 19 nt, Human
aagacagcacaccuagaua

SEQ ID NO: 445063 - RNA, 20 nt, Human
aagacauuaaucaauauaug

SEQ ID NO: 445064 - RNA, 21 nt, Human
aagugcccuguacaggagagc

SEQ ID NO: 445065 - RNA, 21 nt, Human
aauugauugcaaaacugguuu

SEQ ID NO: 445066 - RNA, 18 nt, Human
acaaacaaacaaacaaac

SEQ ID NO: 445067 - RNA, 18 nt, Human
acaaacaaacaaacaaac

SEQ ID NO: 445068 - RNA, 18 nt, Human
acaaacaaacaaacaaac

SEQ ID NO: 445069 - RNA, 18 nt, Human
acaaacaaacaaacaaac

SEQ ID NO: 445070 - RNA, 24 nt, Human
acacagacucaggaaguccugaug

SEQ ID NO: 445071 - RNA, 25 nt, Human
acacagacucaggaaguccugauga

SEQ ID NO: 445072 - RNA, 23 nt, Human
acacuacaaugcaauugccuaau

SEQ ID NO: 445073 - RNA, 21 nt, Human
acagggaagacccuuuuccca

SEQ ID NO: 445074 - RNA, 23 nt, Human
accaagcaccgauagauuuguca

SEQ ID NO: 445075 - RNA, 24 nt, Human
acccagacuggagucucaaaacaa

SEQ ID NO: 445076 - RNA, 18 nt, Human
agacagcacaccuagaua

SEQ ID NO: 445077 - RNA, 18 nt, Human
agccauaaaguuagcuca

SEQ ID NO: 445078 - RNA, 30 nt, Human
agcuugaguuuuccuuagugauucuggggg

SEQ ID NO: 445079 - RNA, 20 nt, Human
aggcacccucaucuccaaga

SEQ ID NO: 445080 - RNA, 23 nt, Human
aggcuaugccaucuaaguuuugu

SEQ ID NO: 445081 - RNA, 20 nt, Human
aggcucucccauauagccuu

SEQ ID NO: 445082 - RNA, 18 nt, Human
aguaguauacaguaaugc

SEQ ID NO: 445083 - RNA, 24 nt, Human
aguagucacaugcuguacaggugc

SEQ ID NO: 445084 - RNA, 21 nt, Human
augguuggggcauaccuuggu

SEQ ID NO: 445085 - RNA, 20 nt, Human
auguggccaagaugguuggg

SEQ ID NO: 445086 - RNA, 22 nt, Human
caaacaaacaaacagggaagac

SEQ ID NO: 445087 - RNA, 19 nt, Human
caaagcucuagggcucuuc

SEQ ID NO: 445088 - RNA, 21 nt, Human
caaagcucuagggcucuucca

SEQ ID NO: 445089 - RNA, 23 nt, Human
caaagcucuagggcucuuccagg

SEQ ID NO: 445090 - RNA, 23 nt, Human
caagacagcacaccuagauagac

SEQ ID NO: 445091 - RNA, 19 nt, Human
cacacugugacacagacuc

SEQ ID NO: 445092 - RNA, 24 nt, Human
caccuagauagacuuuuugcuuau

SEQ ID NO: 445093 - RNA, 20 nt, Human
caccucccuucccuuccaaa

SEQ ID NO: 445094 - RNA, 24 nt, Human
ccacccagaauccauucaugguuu

SEQ ID NO: 445095 - RNA, 22 nt, Human
ccaggacaggcacccucaucuc

SEQ ID NO: 445096 - RNA, 23 nt, Human
ccaggagucaaaugauuuucuuc

SEQ ID NO: 445097 - RNA, 21 nt, Human
cccaccucccuucccuuccaa

SEQ ID NO: 445098 - RNA, 24 nt, Human
cccagaaaauccgagacaggucuc

SEQ ID NO: 445099 - RNA, 19 nt, Human
ccuacaguaguauacagua

SEQ ID NO: 445100 - RNA, 23 nt, Human
cuagguaugcaguaggcuaugcc

SEQ ID NO: 445101 - RNA, 25 nt, Human
cucaagacagcacaccuagauagac

SEQ ID NO: 445102 - RNA, 22 nt, Human
cucucagcccugcaagcuccau

SEQ ID NO: 445103 - RNA, 23 nt, Human
cucucagcccugcaagcuccauu

SEQ ID NO: 445104 - RNA, 24 nt, Human
cuucacauucauucaccacucacu

SEQ ID NO: 445105 - RNA, 21 nt, Human
cuuuuuuuuuuuuuuuuuuuu

SEQ ID NO: 445106 - RNA, 19 nt, Human
gacccacugcugcccaccu

SEQ ID NO: 445107 - RNA, 23 nt, Human
gagcuuccaggucacagauaggu

SEQ ID NO: 445108 - RNA, 23 nt, Human
gauaggaagaguaggguggccuu

SEQ ID NO: 445109 - RNA, 25 nt, Human
gauuuucuucucuccacggagcucu

SEQ ID NO: 445110 - RNA, 19 nt, Human
gccucuccgagguccccug

SEQ ID NO: 445111 - RNA, 24 nt, Human
gccuuugaacaggaauugauugca

SEQ ID NO: 445112 - RNA, 21 nt, Human
ggacaggcacccucaucucca

SEQ ID NO: 445113 - RNA, 18 nt, Human
ggagaggaagauccugaa

SEQ ID NO: 445114 - RNA, 20 nt, Human
ggccuucacauucauucacc

SEQ ID NO: 445115 - RNA, 18 nt, Human
gggcaucuccacccagaa

SEQ ID NO: 445116 - RNA, 22 nt, Human
gggcaucuccacccagaaucca

SEQ ID NO: 445117 - RNA, 24 nt, Human
gucaaaugauuuucuucucuccac

SEQ ID NO: 445118 - RNA, 18 nt, Human
uaagaaguuucccuaagc

SEQ ID NO: 445119 - RNA, 18 nt, Human
uaaguacaaucugugaua

SEQ ID NO: 445120 - RNA, 21 nt, Human
uacaaucugugauaaucacac

SEQ ID NO: 445121 - RNA, 18 nt, Human
uacaggagagccaauucu

SEQ ID NO: 445122 - RNA, 23 nt, Human
uacccuaaaauagggugcuuugg

SEQ ID NO: 445123 - RNA, 21 nt, Human
uauuuggaccuccaaggccau

SEQ ID NO: 445124 - RNA, 23 nt, Human
ucacagauaggugagacacaaac

SEQ ID NO: 445125 - RNA, 19 nt, Human
ucacauucauucaccacuc

SEQ ID NO: 445126 - RNA, 22 nt, Human
ucaccaagagauacaugacugu

SEQ ID NO: 445127 - RNA, 19 nt, Human
ucacugacucaucuggagc

SEQ ID NO: 445128 - RNA, 20 nt, Human
ucagcccugcaagcuccauu

SEQ ID NO: 445129 - RNA, 22 nt, Human
uccagaaggaagguaauugucc

SEQ ID NO: 445130 - RNA, 20 nt, Human
uccaggucacagauagguga

SEQ ID NO: 445131 - RNA, 19 nt, Human
uccauucaugguuuccaaa

SEQ ID NO: 445132 - RNA, 23 nt, Human
ucccuucccuuccaaagcacagg

SEQ ID NO: 445133 - RNA, 21 nt, Human
uccuggacaccccuuccugga

SEQ ID NO: 445134 - RNA, 21 nt, Human
uccuuuguggccuuggguccc

SEQ ID NO: 445135 - RNA, 19 nt, Human
ucgguuaagugcugcagga

SEQ ID NO: 445136 - RNA, 20 nt, Human
ucucagcccugcaagcucca

SEQ ID NO: 445137 - RNA, 24 nt, Human
ucucauucugacacccagacugga

SEQ ID NO: 445138 - RNA, 19 nt, Human
ucuccgagguccccugguc

SEQ ID NO: 445139 - RNA, 18 nt, Human
ucugggcuggagaaagac

SEQ ID NO: 445140 - RNA, 25 nt, Human
ucugggcuggagaaagaccgggguc

SEQ ID NO: 445141 - RNA, 18 nt, Human
ucuuuuuuuuuuuuuuuu

SEQ ID NO: 445142 - RNA, 19 nt, Human
ugaauagagugggaggugg

SEQ ID NO: 445143 - RNA, 23 nt, Human
ugagauggggucucauucugaca

SEQ ID NO: 445144 - RNA, 19 nt, Human
ugcccuaagaaguuucccu

SEQ ID NO: 445145 - RNA, 18 nt, Human
ugccuaaugacacauuua

SEQ ID NO: 445146 - RNA, 25 nt, Human
ugcugcccaccucccuucccuucca

SEQ ID NO: 445147 - RNA, 22 nt, Human
uggggccccaagauauuuuccu

SEQ ID NO: 445148 - RNA, 26 nt, Human
uguauucuucuucuuuuuuuuuuuuu

SEQ ID NO: 445149 - RNA, 24 nt, Human
uguccaauaacaauguuucgguca

SEQ ID NO: 445150 - RNA, 22 nt, Human
uguccccaggagucaaaugauu

SEQ ID NO: 445151 - RNA, 23 nt, Human
uguccuggacaccccuuccugga

SEQ ID NO: 445152 - RNA, 20 nt, Human
ugucugggcuggagaaagac

SEQ ID NO: 445153 - RNA, 21 nt, Human
uguggccaagaugguuggggc

SEQ ID NO: 445154 - RNA, 20 nt, Human
uuaaaaguugcucaagacag

SEQ ID NO: 445155 - RNA, 20 nt, Human
uugccucuccgagguccccu

SEQ ID NO: 445156 - RNA, 21 nt, Human
uugguuugagccauaaaguua

SEQ ID NO: 445157 - RNA, 22 nt, Human
uuugagauggggucucauucug

SEQ ID NO: 445158 - RNA, 20 nt, Human
uuuucccagcacauaggccu

SEQ ID NO: 445159 - RNA, 20 nt, Human
uuuuuuuugagauggggucu

SEQ ID NO: 445160 - RNA, 26 nt, Human
uuuuuuuuuuuugagauggggucuca

SEQ ID NO: 445161 - RNA, 22 nt, Human
uuuuuuuuuuuuuugagauggg

SEQ ID NO: 445162 - RNA, 18 nt, Human
uuuuuuuuuuuuuuuuug

SEQ ID NO: 445163 - RNA, 25 nt, Human
uuuuuuuuuuuuuuuuugagauggg

SEQ ID NO: 445164 - RNA, 21 nt, Human
aaccacccaucaauaaacuuu

SEQ ID NO: 445165 - RNA, 23 nt, Human
accugcucuggucccuagauguc

SEQ ID NO: 445166 - RNA, 19 nt, Human
acucccauccugucuuccc

SEQ ID NO: 445167 - RNA, 25 nt, Human
aggcacugggaguccagaaagagcc

SEQ ID NO: 445168 - RNA, 19 nt, Human
aggcugcagucccugggcc

SEQ ID NO: 445169 - RNA, 24 nt, Human
auccugucuucccucuguguuccc

SEQ ID NO: 445170 - RNA, 18 nt, Human
augagacagcuggacacc

SEQ ID NO: 445171 - RNA, 23 nt, Human
augagacagcuggacaccuggag

SEQ ID NO: 445172 - RNA, 25 nt, Human
augucuggagaccuggggucgucca

SEQ ID NO: 445173 - RNA, 21 nt, Human
cacaggacagaguccucaccc

SEQ ID NO: 445174 - RNA, 24 nt, Human
cacccaucaauaaacuuucuuuuu

SEQ ID NO: 445175 - RNA, 23 nt, Human
cacucccauccugucuucccucu

SEQ ID NO: 445176 - RNA, 19 nt, Human
cagcccucgaguccacacc

SEQ ID NO: 445177 - RNA, 20 nt, Human
cagcuucuggagcugcccuc

SEQ ID NO: 445178 - RNA, 20 nt, Human
cagcuucuggagcugcccuc

SEQ ID NO: 445179 - RNA, 21 nt, Human
caguggagcuggcuuggggac

SEQ ID NO: 445180 - RNA, 23 nt, Human
ccaaaccugcucuggucccuaga

SEQ ID NO: 445181 - RNA, 18 nt, Human
ccaagaccuguggguguu

SEQ ID NO: 445182 - RNA, 20 nt, Human
ccacaugucugaucggcagg

SEQ ID NO: 445183 - RNA, 21 nt, Human
ccagaaagagccacuccccac

SEQ ID NO: 445184 - RNA, 23 nt, Human
cccacaugucugaucggcagggc

SEQ ID NO: 445185 - RNA, 23 nt, Human
cccaccgcugcaccugccaccau

SEQ ID NO: 445186 - RNA, 20 nt, Human
ccccgcgcccagcccucgag

SEQ ID NO: 445187 - RNA, 21 nt, Human
ccccgcgcccagcccucgagu

SEQ ID NO: 445188 - RNA, 20 nt, Human
cccugggccucggggagcuc

SEQ ID NO: 445189 - RNA, 19 nt, Human
ccggccccgcgcccagccc

SEQ ID NO: 445190 - RNA, 22 nt, Human
ccggccccgcgcccagcccucg

SEQ ID NO: 445191 - RNA, 19 nt, Human
ccucggggagcucaggcug

SEQ ID NO: 445192 - RNA, 20 nt, Human
ccucuugggggccugggcag

SEQ ID NO: 445193 - RNA, 21 nt, Human
ccugcagaguguaagguggcg

SEQ ID NO: 445194 - RNA, 22 nt, Human
ccugcagugaagccauaaggac

SEQ ID NO: 445195 - RNA, 19 nt, Human
cggcuucugcgccggcccc

SEQ ID NO: 445196 - RNA, 19 nt, Human
cugcccugggccucgggga

SEQ ID NO: 445197 - RNA, 20 nt, Human
cugccgcugcagccugcaga

SEQ ID NO: 445198 - RNA, 18 nt, Human
cuggagcugcccucuugg

SEQ ID NO: 445199 - RNA, 20 nt, Human
cuggagcugcccucuugggg

SEQ ID NO: 445200 - RNA, 19 nt, Human
cuggccaggcggugggcac

SEQ ID NO: 445201 - RNA, 21 nt, Human
cuggcggcuucugcgccggcc

SEQ ID NO: 445202 - RNA, 21 nt, Human
cugggcaguggagcuggcuug

SEQ ID NO: 445203 - RNA, 19 nt, Human
gaggccaucuggagcugcc

SEQ ID NO: 445204 - RNA, 22 nt, Human
gcaccagcguggugggugggca

SEQ ID NO: 445205 - RNA, 18 nt, Human
gcaguccugggcuuccag

SEQ ID NO: 445206 - RNA, 22 nt, Human
gcggcuucugcgccggccccgc

SEQ ID NO: 445207 - RNA, 22 nt, Human
gcugcccugggccucggggagc

SEQ ID NO: 445208 - RNA, 21 nt, Human
ggacucaggcucuucaguggg

SEQ ID NO: 445209 - RNA, 21 nt, Human
ggcacugggaguccagaaaga

SEQ ID NO: 445210 - RNA, 23 nt, Human
ggcagcuucuggagcugcccucu

SEQ ID NO: 445211 - RNA, 22 nt, Human
ggcaguggagcuggcuugggga

SEQ ID NO: 445212 - RNA, 21 nt, Human
ggcggcuucugcgccggcccc

SEQ ID NO: 445213 - RNA, 28 nt, Human
gggcaguccugggcuuccaggaggccuc

SEQ ID NO: 445214 - RNA, 25 nt, Human
gggcaguggagcuggcuucgggccc

SEQ ID NO: 445215 - RNA, 21 nt, Human
gucccugggccugguggcacc

SEQ ID NO: 445216 - RNA, 20 nt, Human
gugggugggcaguccugggc

SEQ ID NO: 445217 - RNA, 22 nt, Human
uccagaaagagccacuccccac

SEQ ID NO: 445218 - RNA, 23 nt, Human
uccagaaagagccacuccccacc

SEQ ID NO: 445219 - RNA, 29 nt, Human
ucccauccugucuucccucuguguucccu

SEQ ID NO: 445220 - RNA, 26 nt, Human
ucccggagcccugggcaacucagaga

SEQ ID NO: 445221 - RNA, 20 nt, Human
ucccugggccugguggcacc

SEQ ID NO: 445222 - RNA, 22 nt, Human
uccugggcuuccaggaggccuc

SEQ ID NO: 445223 - RNA, 20 nt, Human
ugaagccauaaggacacagu

SEQ ID NO: 445224 - RNA, 18 nt, Human
ugcagucccugggccugg

SEQ ID NO: 445225 - RNA, 20 nt, Human
ugcccugggccucggggagc

SEQ ID NO: 445226 - RNA, 22 nt, Human
ugcccugggccucggggagcuc

SEQ ID NO: 445227 - RNA, 20 nt, Human
ugcucuggucccuagauguc

SEQ ID NO: 445228 - RNA, 21 nt, Human
uggcuacacucccauccuguc

SEQ ID NO: 445229 - RNA, 20 nt, Human
ugggauggggucccggagcc

SEQ ID NO: 445230 - RNA, 24 nt, Human
ugggauggggucccggagcccugg

SEQ ID NO: 445231 - RNA, 21 nt, Human
ugggcaguccugggcuuccag

SEQ ID NO: 445232 - RNA, 18 nt, Human
ugggcaguggagcuggcu

SEQ ID NO: 445233 - RNA, 21 nt, Human
ugggcaguggagcuggcuugg

SEQ ID NO: 445234 - RNA, 22 nt, Human
ugggggccugggcaguggagcu

SEQ ID NO: 445235 - RNA, 21 nt, Human
uggggucccggagcccugggc

SEQ ID NO: 445236 - RNA, 24 nt, Human
uuuuuuguuuugcaaccacccauc

SEQ ID NO: 445237 - RNA, 18 nt, Human
uuuuuuuuuuuuuuuuug

SEQ ID NO: 445238 - RNA, 24 nt, Human
uuuuuuuuuuuuuuuuuuuguuuu

SEQ ID NO: 445239 - RNA, 22 nt, Human
aggagcgggugcacgcauugga

SEQ ID NO: 445240 - RNA, 19 nt, Human
aggcuccgaagaccgagac

SEQ ID NO: 445241 - RNA, 19 nt, Human
ccacuggcccuauagccua

SEQ ID NO: 445242 - RNA, 19 nt, Human
ccccacacuagcccuggac

SEQ ID NO: 445243 - RNA, 24 nt, Human
ccccacacuagcccuggacuucuc

SEQ ID NO: 445244 - RNA, 19 nt, Human
cgccggagcccccacacua

SEQ ID NO: 445245 - RNA, 22 nt, Human
cgggugcacgcauuggauuggu

SEQ ID NO: 445246 - RNA, 22 nt, Human
gacaugauagcucaauaagcuc

SEQ ID NO: 445247 - RNA, 23 nt, Human
guagggcugaggaauuggggccg

SEQ ID NO: 445248 - RNA, 19 nt, Human
uaacgcacuguuguaucag

SEQ ID NO: 445249 - RNA, 19 nt, Human
uccaugcggaugggggcca

SEQ ID NO: 445250 - RNA, 20 nt, Human
ucgggcucacggggcugaag

SEQ ID NO: 445251 - RNA, 22 nt, Human
ugaggagaccugcuuugggggu

SEQ ID NO: 445252 - RNA, 19 nt, Human
ugauagcucaauaagcucc

SEQ ID NO: 445253 - RNA, 24 nt, Human
ugcggaugggggccacagcccccg

SEQ ID NO: 445254 - RNA, 23 nt, Human
ugcuuuggggguugcacagucug

SEQ ID NO: 445255 - RNA, 20 nt, Human
uggcgccgccguguggacug

SEQ ID NO: 445256 - RNA, 31 nt, Human
uggcguugggaagagggucuggcgccgccgg

SEQ ID NO: 445257 - RNA, 24 nt, Human
uggggaggcuccaugcggaugggg

SEQ ID NO: 445258 - RNA, 21 nt, Human
ugggggccacagcccccgccg

SEQ ID NO: 445259 - RNA, 18 nt, Human
aacaacaccaaugggaac

SEQ ID NO: 445260 - RNA, 21 nt, Human
aaugggaacugguauuugucu

SEQ ID NO: 445261 - RNA, 22 nt, Human
acaauaaaaggccacuuuugac

SEQ ID NO: 445262 - RNA, 22 nt, Human
acaauaaaaggccacuuuugac

SEQ ID NO: 445263 - RNA, 23 nt, Human
agagcccuuuccacgcccagagc

SEQ ID NO: 445264 - RNA, 21 nt, Human
aggaagcagagcucccugacu

SEQ ID NO: 445265 - RNA, 21 nt, Human
aggagcagggcggcagcccag

SEQ ID NO: 445266 - RNA, 21 nt, Human
agggcggcagcccagggcacc

SEQ ID NO: 445267 - RNA, 20 nt, Human
auggcggccucaaccuugag

SEQ ID NO: 445268 - RNA, 19 nt, Human
caacaacaccaaugggaac

SEQ ID NO: 445269 - RNA, 24 nt, Human
caccaaugggaacugguauuuguc

SEQ ID NO: 445270 - RNA, 22 nt, Human
cacgcccagagcgaggagcagg

SEQ ID NO: 445271 - RNA, 22 nt, Human
cagggcggcagcccagggcacc

SEQ ID NO: 445272 - RNA, 18 nt, Human
ccacgcccagagcgagga

SEQ ID NO: 445273 - RNA, 21 nt, Human
ccagagcccuuuccacgccca

SEQ ID NO: 445274 - RNA, 23 nt, Human
ccagagcccuuuccacgcccaga

SEQ ID NO: 445275 - RNA, 27 nt, Human
ccagagcccuuuccacgcccagagaag

SEQ ID NO: 445276 - RNA, 21 nt, Human
cgaaaucagaaccgcaggccc

SEQ ID NO: 445277 - RNA, 26 nt, Human
cgaaaucagaaccgcaggcccgccga

SEQ ID NO: 445278 - RNA, 21 nt, Human
cgaggagaagggggagccgcu

SEQ ID NO: 445279 - RNA, 19 nt, Human
cgcccagagcgaggagcag

SEQ ID NO: 445280 - RNA, 22 nt, Human
cgcccagagcgaggagcagggc

SEQ ID NO: 445281 - RNA, 20 nt, Human
cggcagcccagggcaccagg

SEQ ID NO: 445282 - RNA, 20 nt, Human
cggccucaaccuugaggcga

SEQ ID NO: 445283 - RNA, 18 nt, Human
cugggcagggucgggaag

SEQ ID NO: 445284 - RNA, 18 nt, Human
gaagcgucagggacgaaa

SEQ ID NO: 445285 - RNA, 21 nt, Human
gagugcaauuuuucaucuucc

SEQ ID NO: 445286 - RNA, 22 nt, Human
gccagagcccuuuccacgccca

SEQ ID NO: 445287 - RNA, 18 nt, Human
gcccagagcgaggagcag

SEQ ID NO: 445288 - RNA, 20 nt, Human
gccgaggagaagggggagcc

SEQ ID NO: 445289 - RNA, 23 nt, Human
gcgccagagcccuuuccacgccc

SEQ ID NO: 445290 - RNA, 18 nt, Human
ggagaagggggagccgcu

SEQ ID NO: 445291 - RNA, 18 nt, Human
uaagauaguucagauuga

SEQ ID NO: 445292 - RNA, 23 nt, Human
uacaauaaaaggccacuuuugac

SEQ ID NO: 445293 - RNA, 23 nt, Human
uacaauaaaaggccacuuuugac

SEQ ID NO: 445294 - RNA, 24 nt, Human
uaguucagauugaucuuaggucaa

SEQ ID NO: 445295 - RNA, 26 nt, Human
uaguucagauugaucuuaggucaaug

SEQ ID NO: 445296 - RNA, 24 nt, Human
uccacuggcgaaagaugccuuucu

SEQ ID NO: 445297 - RNA, 24 nt, Human
ucggguagcgccagagcccuuucc

SEQ ID NO: 445298 - RNA, 20 nt, Human
ucuuccaauggcggccucaa

SEQ ID NO: 445299 - RNA, 22 nt, Human
uggcugggcagggucgggaagc

SEQ ID NO: 445300 - RNA, 19 nt, Human
ugggaacugguauuugucu

SEQ ID NO: 445301 - RNA, 24 nt, Human
uucagauugaucuuaggucaaugg

SEQ ID NO: 445302 - RNA, 24 nt, Human
uucaucuuccaauggcggccucaa

SEQ ID NO: 445303 - RNA, 19 nt, Human
uugggugcauaucuggcug

SEQ ID NO: 445304 - RNA, 18 nt, Human
uuugucuacaccaaggga

SEQ ID NO: 445305 - RNA, 24 nt, Human
aaagugcugggauuacaggcguga

SEQ ID NO: 445306 - RNA, 19 nt, Human
aaauaauacacaagaccug

SEQ ID NO: 445307 - RNA, 23 nt, Human
aagaaucgcuugaacccgggagg

SEQ ID NO: 445308 - RNA, 18 nt, Human
aagugcuccucugucuuc

SEQ ID NO: 445309 - RNA, 19 nt, Human
aagugcugggauuacaggc

SEQ ID NO: 445310 - RNA, 19 nt, Human
aagugcugggauuacaggc

SEQ ID NO: 445311 - RNA, 26 nt, Human
aagugcugggauuacaggcgugagcc

SEQ ID NO: 445312 - RNA, 24 nt, Human
aaucgcuugaacccgggaggcgga

SEQ ID NO: 445313 - RNA, 23 nt, Human
acaggcacccgccaccacgcccg

SEQ ID NO: 445314 - RNA, 23 nt, Human
acaggcacccgccaccacgcccg

SEQ ID NO: 445315 - RNA, 18 nt, Human
accaaauaauacacaaga

SEQ ID NO: 445316 - RNA, 24 nt, Human
acccugagaccuccuggaacgcug

SEQ ID NO: 445317 - RNA, 24 nt, Human
accuccaggcuccggccgcggccu

SEQ ID NO: 445318 - RNA, 25 nt, Human
accucccagguucacgccauucucc

SEQ ID NO: 445319 - RNA, 21 nt, Human
accugggugaggccacaugag

SEQ ID NO: 445320 - RNA, 24 nt, Human
accuugugauccgcccgccucggc

SEQ ID NO: 445321 - RNA, 18 nt, Human
acgggguuucaccguguu

SEQ ID NO: 445322 - RNA, 19 nt, Human
acgggguuucaccguguua

SEQ ID NO: 445323 - RNA, 20 nt, Human
acgggguuucaccguguuag

SEQ ID NO: 445324 - RNA, 24 nt, Human
acgggguuucaccguguuagccag

SEQ ID NO: 445325 - RNA, 21 nt, Human
acugcaagcuccaccucccag

SEQ ID NO: 445326 - RNA, 19 nt, Human
acugcacuccagccuggcg

SEQ ID NO: 445327 - RNA, 19 nt, Human
agagacgggguuucaccgu

SEQ ID NO: 445328 - RNA, 18 nt, Human
agccuggcgacaaaguga

SEQ ID NO: 445329 - RNA, 23 nt, Human
agcugggcgugguggcacacgcc

SEQ ID NO: 445330 - RNA, 20 nt, Human
aggcacccgccaccacgccc

SEQ ID NO: 445331 - RNA, 24 nt, Human
aggcagaagaaucgcuugaacccg

SEQ ID NO: 445332 - RNA, 23 nt, Human
aggccucuugccccaggccggag

SEQ ID NO: 445333 - RNA, 21 nt, Human
aggcggaaguuguagugagcc

SEQ ID NO: 445334 - RNA, 24 nt, Human
aggcggaaguuguagugagccgag

SEQ ID NO: 445335 - RNA, 24 nt, Human
aggcugaggcagaagaaucgcuug

SEQ ID NO: 445336 - RNA, 18 nt, Human
aggcuggagugcaguggc

SEQ ID NO: 445337 - RNA, 20 nt, Human
aggggcggugcaccccaccc

SEQ ID NO: 445338 - RNA, 20 nt, Human
aguagagacgggguuucacc

SEQ ID NO: 445339 - RNA, 24 nt, Human
agugcaguggcgcgauguccgcuc

SEQ ID NO: 445340 - RNA, 18 nt, Human
agugcugggauuacaggc

SEQ ID NO: 445341 - RNA, 24 nt, Human
aucgcgccacugcacuccagccug

SEQ ID NO: 445342 - RNA, 24 nt, Human
caaagugcugggauuacaggcgug

SEQ ID NO: 445343 - RNA, 20 nt, Human
caaccaaccccugccagccc

SEQ ID NO: 445344 - RNA, 22 nt, Human
caaccccugccagccccacacu

SEQ ID NO: 445345 - RNA, 25 nt, Human
cacacucucaucacaaaauggggga

SEQ ID NO: 445346 - RNA, 19 nt, Human
caccccacccucuccaccu

SEQ ID NO: 445347 - RNA, 18 nt, Human
caccguguuagccaggau

SEQ ID NO: 445348 - RNA, 24 nt, Human
caccguguuagccaggauggucuc

SEQ ID NO: 445349 - RNA, 22 nt, Human
cacgccauucuccugccucagc

SEQ ID NO: 445350 - RNA, 18 nt, Human
cacgccuguagucccagc

SEQ ID NO: 445351 - RNA, 21 nt, Human
cacuccagccuggcgacaaag

SEQ ID NO: 445352 - RNA, 22 nt, Human
cacuccagccuggcgacaaagu

SEQ ID NO: 445353 - RNA, 22 nt, Human
cacucucaucacaaaauggggg

SEQ ID NO: 445354 - RNA, 21 nt, Human
cacugcaagcuccaccuccca

SEQ ID NO: 445355 - RNA, 18 nt, Human
cacugcacuccagccugg

SEQ ID NO: 445356 - RNA, 18 nt, Human
cacugcacuccagccugg

SEQ ID NO: 445357 - RNA, 22 nt, Human
cacugcacuccagccuggcgac

SEQ ID NO: 445358 - RNA, 23 nt, Human
cacugcacuccagccuggcgaca

SEQ ID NO: 445359 - RNA, 24 nt, Human
cacugcacuccagccuggcgacaa

SEQ ID NO: 445360 - RNA, 20 nt, Human
cacuuccccucccuggucac

SEQ ID NO: 445361 - RNA, 24 nt, Human
cagcuacucgggaggcugaggcag

SEQ ID NO: 445362 - RNA, 19 nt, Human
caggggaaggaauugggac

SEQ ID NO: 445363 - RNA, 23 nt, Human
cauguuccuuuccuccccaaccc

SEQ ID NO: 445364 - RNA, 22 nt, Human
ccaaagugcugggauuacaggc

SEQ ID NO: 445365 - RNA, 22 nt, Human
ccaaagugcugggauuacaggc

SEQ ID NO: 445366 - RNA, 24 nt, Human
ccaaagugcugggauuacaggcgu

SEQ ID NO: 445367 - RNA, 19 nt, Human
ccaaccaaccccugccagc

SEQ ID NO: 445368 - RNA, 21 nt, Human
ccaaccccugccagccccaca

SEQ ID NO: 445369 - RNA, 24 nt, Human
ccaacccuguuccacccaggcugc

SEQ ID NO: 445370 - RNA, 24 nt, Human
ccacccaggcugcuuccuggccgu

SEQ ID NO: 445371 - RNA, 19 nt, Human
ccacugcacuccagccugg

SEQ ID NO: 445372 - RNA, 19 nt, Human
ccacugcacuccagccugg

SEQ ID NO: 445373 - RNA, 19 nt, Human
ccacugcacuccagccugg

SEQ ID NO: 445374 - RNA, 20 nt, Human
ccacugcacuccagccuggc

SEQ ID NO: 445375 - RNA, 22 nt, Human
ccacugcacuccagccuggcga

SEQ ID NO: 445376 - RNA, 23 nt, Human
ccacugcacuccagccuggcgac

SEQ ID NO: 445377 - RNA, 21 nt, Human
ccaggcugcuuccuggccguu

SEQ ID NO: 445378 - RNA, 25 nt, Human
ccauguuccuuuccuccccaacccu

SEQ ID NO: 445379 - RNA, 19 nt, Human
cccagggagcaccucugaa

SEQ ID NO: 445380 - RNA, 20 nt, Human
cccagguucacgccauucuc

SEQ ID NO: 445381 - RNA, 24 nt, Human
cccauguuccuuuccuccccaacc

SEQ ID NO: 445382 - RNA, 20 nt, Human
ccccacacucucaucacaaa

SEQ ID NO: 445383 - RNA, 18 nt, Human
ccccacccucuccaccua

SEQ ID NO: 445384 - RNA, 22 nt, Human
cccugccaggcuccccuugccc

SEQ ID NO: 445385 - RNA, 20 nt, Human
ccgcgcggugacaucagagc

SEQ ID NO: 445386 - RNA, 22 nt, Human
ccuccccaacccuguuccaccc

SEQ ID NO: 445387 - RNA, 18 nt, Human
ccucugaagguugagggc

SEQ ID NO: 445388 - RNA, 27 nt, Human
ccucugaagguugagggcccagcucuu

SEQ ID NO: 445389 - RNA, 22 nt, Human
ccugagcgagguggugggaggg

SEQ ID NO: 445390 - RNA, 24 nt, Human
ccugccagccccacacucucauca

SEQ ID NO: 445391 - RNA, 22 nt, Human
ccugccaggcuccccuugccca

SEQ ID NO: 445392 - RNA, 23 nt, Human
ccugccucagccuuccgaguagc

SEQ ID NO: 445393 - RNA, 21 nt, Human
ccuguagucccagcuacucgg

SEQ ID NO: 445394 - RNA, 22 nt, Human
ccuguagucccagcuacucggg

SEQ ID NO: 445395 - RNA, 20 nt, Human
ccuugggaucagagguggca

SEQ ID NO: 445396 - RNA, 23 nt, Human
ccuuuccuccccaacccuguucc

SEQ ID NO: 445397 - RNA, 25 nt, Human
cgaccgcccaccggccuccagcgcg

SEQ ID NO: 445398 - RNA, 24 nt, Human
cgcccaggcuggagugcaguggcg

SEQ ID NO: 445399 - RNA, 20 nt, Human
cgccggcccagucccagguc

SEQ ID NO: 445400 - RNA, 23 nt, Human
cgccuguagucccagcuacucgg

SEQ ID NO: 445401 - RNA, 24 nt, Human
cgccuguagucccagcuacucggg

SEQ ID NO: 445402 - RNA, 24 nt, Human
cggagucuugcucugucgcccagg

SEQ ID NO: 445403 - RNA, 18 nt, Human
cggcgaccgcccaccggc

SEQ ID NO: 445404 - RNA, 24 nt, Human
cgggguuucaccguguuagccagg

SEQ ID NO: 445405 - RNA, 20 nt, Human
cguccggccgcgggggcggg

SEQ ID NO: 445406 - RNA, 24 nt, Human
cucacugcaagcuccaccucccag

SEQ ID NO: 445407 - RNA, 19 nt, Human
cuccucccuccaaccaacc

SEQ ID NO: 445408 - RNA, 24 nt, Human
cuccugaccuugugauccgcccgc

SEQ ID NO: 445409 - RNA, 22 nt, Human
cuccugccucagccuuccgagu

SEQ ID NO: 445410 - RNA, 23 nt, Human
cuccugggccgucgcagccgcgc

SEQ ID NO: 445411 - RNA, 24 nt, Human
cucugucuucucuccucccuccaa

SEQ ID NO: 445412 - RNA, 24 nt, Human
cugcaagcuccaccucccagguuc

SEQ ID NO: 445413 - RNA, 23 nt, Human
cugccucagccuuccgaguagcu

SEQ ID NO: 445414 - RNA, 22 nt, Human
cuuugcaccuuaagugcuccuc

SEQ ID NO: 445415 - RNA, 22 nt, Human
gaccuugugauccgcccgccuc

SEQ ID NO: 445416 - RNA, 24 nt, Human
gaccuugugauccgcccgccucgg

SEQ ID NO: 445417 - RNA, 24 nt, Human
gagacgggguuucaccguguuagc

SEQ ID NO: 445418 - RNA, 23 nt, Human
gagaucgcgccacugcacuccag

SEQ ID NO: 445419 - RNA, 18 nt, Human
gauuacaggcgugagcca

SEQ ID NO: 445420 - RNA, 22 nt, Human
gauuacaggcgugagccaccgc

SEQ ID NO: 445421 - RNA, 22 nt, Human
gauuacaggcgugagccaccgc

SEQ ID NO: 445422 - RNA, 18 nt, Human
gcaagcuccaccucccag

SEQ ID NO: 445423 - RNA, 24 nt, Human
gccagccccacacucucaucacaa

SEQ ID NO: 445424 - RNA, 18 nt, Human
gcccacacaagcagccuu

SEQ ID NO: 445425 - RNA, 20 nt, Human
gcccaggcuggagugcagug

SEQ ID NO: 445426 - RNA, 23 nt, Human
gcccggcuaauuuuuuauauuuu

SEQ ID NO: 445427 - RNA, 20 nt, Human
gccgagaucgcgccacugca

SEQ ID NO: 445428 - RNA, 23 nt, Human
gccucggccucccaaagugcugg

SEQ ID NO: 445429 - RNA, 25 nt, Human
gcucugucgcccaggcuggagugca

SEQ ID NO: 445430 - RNA, 26 nt, Human
gcuggagugcaguggcgcgauguccg

SEQ ID NO: 445431 - RNA, 23 nt, Human
ggaaguuguagugagccgagauc

SEQ ID NO: 445432 - RNA, 24 nt, Human
ggaaguuguagugagccgagaucg

SEQ ID NO: 445433 - RNA, 23 nt, Human
ggagucuugcucugucgcccagg

SEQ ID NO: 445434 - RNA, 24 nt, Human
ggauggucucgaucuccugaccuu

SEQ ID NO: 445435 - RNA, 25 nt, Human
ggccgcgggggcgggagccgcagcc

SEQ ID NO: 445436 - RNA, 21 nt, Human
ggcggugcaccccacccucuc

SEQ ID NO: 445437 - RNA, 25 nt, Human
gggaggcugaggcagaagaaucgcu

SEQ ID NO: 445438 - RNA, 24 nt, Human
gggcgugguggcacacgccuguag

SEQ ID NO: 445439 - RNA, 23 nt, Human
gggguuucaccguguuagccagg

SEQ ID NO: 445440 - RNA, 19 nt, Human
ggucacuuccccucccugg

SEQ ID NO: 445441 - RNA, 20 nt, Human
ggucucgaucuccugaccuu

SEQ ID NO: 445442 - RNA, 24 nt, Human
gguggcacacgccuguagucccag

SEQ ID NO: 445443 - RNA, 23 nt, Human
guagagacgggguuucaccgugu

SEQ ID NO: 445444 - RNA, 24 nt, Human
gugauccgcccgccucggccuccc

SEQ ID NO: 445445 - RNA, 19 nt, Human
guuguagugagccgagauc

SEQ ID NO: 445446 - RNA, 21 nt, Human
guuguagugagccgagaucgc

SEQ ID NO: 445447 - RNA, 24 nt, Human
uaauuuuuuauauuuuuaguagag

SEQ ID NO: 445448 - RNA, 25 nt, Human
uaauuuuuuauauuuuuaguagaga

SEQ ID NO: 445449 - RNA, 23 nt, Human
uacaggcacccgccaccacgccc

SEQ ID NO: 445450 - RNA, 23 nt, Human
uacaggcgugagccaccgcgccc

SEQ ID NO: 445451 - RNA, 19 nt, Human
uaccaaauaauacacaaga

SEQ ID NO: 445452 - RNA, 18 nt, Human
uacccugagaccuccugg

SEQ ID NO: 445453 - RNA, 21 nt, Human
uacccugagaccuccuggaac

SEQ ID NO: 445454 - RNA, 22 nt, Human
uagcugggcgugguggcacacg

SEQ ID NO: 445455 - RNA, 21 nt, Human
uaguagagacgggguuucacc

SEQ ID NO: 445456 - RNA, 24 nt, Human
uaguagagacgggguuucaccgug

SEQ ID NO: 445457 - RNA, 25 nt, Human
uaguagagacgggguuucaccgugu

SEQ ID NO: 445458 - RNA, 26 nt, Human
uaguagagacgggguuucaccguugg

SEQ ID NO: 445459 - RNA, 22 nt, Human
uaucuuagaaaggccuggacuc

SEQ ID NO: 445460 - RNA, 24 nt, Human
ucaccguguuagccaggauggucu

SEQ ID NO: 445461 - RNA, 19 nt, Human
ucacugcaagcuccaccuc

SEQ ID NO: 445462 - RNA, 24 nt, Human
ucacugcaagcuccaccucccagg

SEQ ID NO: 445463 - RNA, 20 nt, Human
ucagagccccgggcucugac

SEQ ID NO: 445464 - RNA, 20 nt, Human
ucagccuuccgaguagcugg

SEQ ID NO: 445465 - RNA, 25 nt, Human
uccaaccaaccccugccagccccac

SEQ ID NO: 445466 - RNA, 18 nt, Human
uccacccaggcugcuucc

SEQ ID NO: 445467 - RNA, 24 nt, Human
ucccaaagugcugggauuacaggc

SEQ ID NO: 445468 - RNA, 19 nt, Human
ucccaggucugagggugga

SEQ ID NO: 445469 - RNA, 19 nt, Human
ucccagguucacgccauuc

SEQ ID NO: 445470 - RNA, 20 nt, Human
ucccagguucacgccauucu

SEQ ID NO: 445471 - RNA, 21 nt, Human
ucccagguucacgccauucuc

SEQ ID NO: 445472 - RNA, 24 nt, Human
ucccagguucacgccauucuccug

SEQ ID NO: 445473 - RNA, 24 nt, Human
uccccaaucccucaagggaaaagc

SEQ ID NO: 445474 - RNA, 23 nt, Human
ucccucaagggaaaagcagagac

SEQ ID NO: 445475 - RNA, 22 nt, Human
ucccugccaggcuccccuugcc

SEQ ID NO: 445476 - RNA, 23 nt, Human
uccgaguagcuggcaauacaggc

SEQ ID NO: 445477 - RNA, 24 nt, Human
uccgaguagcuggcaauacaggca

SEQ ID NO: 445478 - RNA, 19 nt, Human
uccggccgcggccucaggg

SEQ ID NO: 445479 - RNA, 21 nt, Human
uccucugucuucucuccuccc

SEQ ID NO: 445480 - RNA, 24 nt, Human
ucgcccaggcuggagugcaguggc

SEQ ID NO: 445481 - RNA, 23 nt, Human
ucgcgccacugcacuccagccug

SEQ ID NO: 445482 - RNA, 18 nt, Human
ucgcuugaacccgggagg

SEQ ID NO: 445483 - RNA, 18 nt, Human
ucggccucccaaagugcu

SEQ ID NO: 445484 - RNA, 24 nt, Human
ucgggaggcugaggcagaagaauc

SEQ ID NO: 445485 - RNA, 18 nt, Human
ucugucuucucuccuccc

SEQ ID NO: 445486 - RNA, 20 nt, Human
ucugucuucucuccuccccc

SEQ ID NO: 445487 - RNA, 22 nt, Human
ucugucuucucuccucccucca

SEQ ID NO: 445488 - RNA, 22 nt, Human
ucuugcucugucgcccaggcug

SEQ ID NO: 445489 - RNA, 23 nt, Human
ucuugcucugucgcccaggcugg

SEQ ID NO: 445490 - RNA, 24 nt, Human
ucuugcucugucgcccaggcugga

SEQ ID NO: 445491 - RNA, 25 nt, Human
ugacuccgaccccaccuccaggcuc

SEQ ID NO: 445492 - RNA, 22 nt, Human
ugagacggagucuugcucuguc

SEQ ID NO: 445493 - RNA, 22 nt, Human
ugagccgagaucgcgccacugc

SEQ ID NO: 445494 - RNA, 22 nt, Human
ugagcgagguggugggagggcg

SEQ ID NO: 445495 - RNA, 20 nt, Human
ugaggcagaagaaucgcuug

SEQ ID NO: 445496 - RNA, 24 nt, Human
ugaggcagaagaaucgcuugaacc

SEQ ID NO: 445497 - RNA, 25 nt, Human
ugaggcagaagaaucgcuugaaccc

SEQ ID NO: 445498 - RNA, 23 nt, Human
ugccagccccacacucucaucac

SEQ ID NO: 445499 - RNA, 24 nt, Human
ugccucagccuuccgaguagcugg

SEQ ID NO: 445500 - RNA, 24 nt, Human
ugcucugucgcccaggcuggagug

SEQ ID NO: 445501 - RNA, 24 nt, Human
ugcugggauuacaggcgugagcca

SEQ ID NO: 445502 - RNA, 29 nt, Human
uggagaaguaucuuuuuuuuuuuuuuuuu

SEQ ID NO: 445503 - RNA, 19 nt, Human
uggagugcaguggcgcgau

SEQ ID NO: 445504 - RNA, 20 nt, Human
uggagugcaguggcgcgaug

SEQ ID NO: 445505 - RNA, 21 nt, Human
uggcaauacaggcacccgcca

SEQ ID NO: 445506 - RNA, 24 nt, Human
uggcaauacaggcacccgccacca

SEQ ID NO: 445507 - RNA, 21 nt, Human
uggcacacgccuguaguccca

SEQ ID NO: 445508 - RNA, 21 nt, Human
uggcagagucaccuugggauc

SEQ ID NO: 445509 - RNA, 22 nt, Human
ugggaccagcucauucccugcc

SEQ ID NO: 445510 - RNA, 19 nt, Human
ugggagggcgacuacggcg

SEQ ID NO: 445511 - RNA, 19 nt, Human
ugggaucagagguggcaga

SEQ ID NO: 445512 - RNA, 20 nt, Human
ugggaucagagguggcagag

SEQ ID NO: 445513 - RNA, 18 nt, Human
ugggauuacaggcgugag

SEQ ID NO: 445514 - RNA, 19 nt, Human
ugggauuacaggcgugagc

SEQ ID NO: 445515 - RNA, 21 nt, Human
ugggauuacaggcgugagcca

SEQ ID NO: 445516 - RNA, 22 nt, Human
ugggauuacaggcgugagccac

SEQ ID NO: 445517 - RNA, 23 nt, Human
ugggauuacaggcgugagccacc

SEQ ID NO: 445518 - RNA, 24 nt, Human
ugggauuacaggcgugagccaccg

SEQ ID NO: 445519 - RNA, 24 nt, Human
ugguggcacacgccuguaguccca

SEQ ID NO: 445520 - RNA, 21 nt, Human
ugucgcccaggcuggagugca

SEQ ID NO: 445521 - RNA, 18 nt, Human
uuagcugggcgugguggc

SEQ ID NO: 445522 - RNA, 20 nt, Human
uuagcugggcgugguggcac

SEQ ID NO: 445523 - RNA, 24 nt, Human
uuagcugggcgugguggcacacgc

SEQ ID NO: 445524 - RNA, 18 nt, Human
uuaguagagacgggguuu

SEQ ID NO: 445525 - RNA, 22 nt, Human
uuaguagagacgggguuucacc

SEQ ID NO: 445526 - RNA, 24 nt, Human
uuaguagagacgggguuucaccgu

SEQ ID NO: 445527 - RNA, 24 nt, Human
uugcucugucgcccaggcuggagu

SEQ ID NO: 445528 - RNA, 18 nt, Human
uuguagugagccgagauc

SEQ ID NO: 445529 - RNA, 19 nt, Human
uuguagugagccgagaucg

SEQ ID NO: 445530 - RNA, 22 nt, Human
uuguagugagccgagaucgcgc

SEQ ID NO: 445531 - RNA, 21 nt, Human
uuuacccugagaccuccugga

SEQ ID NO: 445532 - RNA, 19 nt, Human
uuucaccguguuagccagg

SEQ ID NO: 445533 - RNA, 24 nt, Human
uuuuuaguagagacgggguuucac

SEQ ID NO: 445534 - RNA, 21 nt, Human
uuuuuauauuuuuaguagaga

SEQ ID NO: 445535 - RNA, 24 nt, Human
uuuuuuauauuuuuaguagagacg

SEQ ID NO: 445536 - RNA, 24 nt, Human
uuuuuuuuuuuugagacggagucu

SEQ ID NO: 445537 - RNA, 22 nt, Human
uuuuuuuuuuuuuugagacgga

SEQ ID NO: 445538 - RNA, 18 nt, Human
uuuuuuuuuuuuuuuuug

SEQ ID NO: 445539 - RNA, 25 nt, Human
aaaaccgcuuugcgggaggagggga

SEQ ID NO: 445540 - RNA, 25 nt, Human
aaacagauaaacagagaagccuccc

SEQ ID NO: 445541 - RNA, 24 nt, Human
aacuacccucuuggggaggcaucc

SEQ ID NO: 445542 - RNA, 23 nt, Human
aagaagccaagagagcuaguggg

SEQ ID NO: 445543 - RNA, 19 nt, Human
aagaggaagaaugacuguu

SEQ ID NO: 445544 - RNA, 22 nt, Human
aagcaagggagaaagggggaga

SEQ ID NO: 445545 - RNA, 18 nt, Human
accaggaagaggauugcc

SEQ ID NO: 445546 - RNA, 25 nt, Human
acucccuuagccuuccccucuccaa

SEQ ID NO: 445547 - RNA, 21 nt, Human
agaacacuguccuaagaagcc

SEQ ID NO: 445548 - RNA, 21 nt, Human
agagugcccuaaaguuguucc

SEQ ID NO: 445549 - RNA, 18 nt, Human
agcauccucugcagggag

SEQ ID NO: 445550 - RNA, 20 nt, Human
agcccgacucucgcuccucg

SEQ ID NO: 445551 - RNA, 22 nt, Human
aggagugacucccuuagccuuc

SEQ ID NO: 445552 - RNA, 22 nt, Human
aggaguuuccaacucugaggcu

SEQ ID NO: 445553 - RNA, 19 nt, Human
aggcauccccgagagggug

SEQ ID NO: 445554 - RNA, 22 nt, Human
aggcgccgaggcgaugagagcu

SEQ ID NO: 445555 - RNA, 18 nt, Human
agggaaccccaggagagc

SEQ ID NO: 445556 - RNA, 19 nt, Human
agggaagcaagggagaaag

SEQ ID NO: 445557 - RNA, 24 nt, Human
agggcaguccccaggguugugccc

SEQ ID NO: 445558 - RNA, 18 nt, Human
aguuucacagccuugcuc

SEQ ID NO: 445559 - RNA, 23 nt, Human
auccugagcuggcucugggcccu

SEQ ID NO: 445560 - RNA, 19 nt, Human
caaaacgagcauccucugc

SEQ ID NO: 445561 - RNA, 26 nt, Human
caaacagauaaacagagaagccuccc

SEQ ID NO: 445562 - RNA, 21 nt, Human
cacagcaccgagaugucuagg

SEQ ID NO: 445563 - RNA, 20 nt, Human
caccacaggcacccaccacc

SEQ ID NO: 445564 - RNA, 24 nt, Human
caccacaggcacccaccaccagcc

SEQ ID NO: 445565 - RNA, 24 nt, Human
caccaccagccauuaccagcacug

SEQ ID NO: 445566 - RNA, 24 nt, Human
caccccuaacuacccucuugggga

SEQ ID NO: 445567 - RNA, 21 nt, Human
cagaggggccaccacaggcac

SEQ ID NO: 445568 - RNA, 24 nt, Human
cagauaaacagagaagccucccag

SEQ ID NO: 445569 - RNA, 18 nt, Human
cagauccugagcuggcuc

SEQ ID NO: 445570 - RNA, 19 nt, Human
cagcaucugagcugaggca

SEQ ID NO: 445571 - RNA, 22 nt, Human
caggagagcuguagaaguggug

SEQ ID NO: 445572 - RNA, 21 nt, Human
caggauccuucuuaguuuagg

SEQ ID NO: 445573 - RNA, 22 nt, Human
cagucgggacaggcuauggagg

SEQ ID NO: 445574 - RNA, 19 nt, Human
cauccaggugcgcacccuc

SEQ ID NO: 445575 - RNA, 19 nt, Human
ccaccagaggggccaccac

SEQ ID NO: 445576 - RNA, 22 nt, Human
ccccaggguugugcccuacacu

SEQ ID NO: 445577 - RNA, 19 nt, Human
cccgcagccguccccaucc

SEQ ID NO: 445578 - RNA, 23 nt, Human
cccuacacuggaugguggccccc

SEQ ID NO: 445579 - RNA, 20 nt, Human
cccuccgcccccaccacgcc

SEQ ID NO: 445580 - RNA, 21 nt, Human
cccugcagaugcccgcagccg

SEQ ID NO: 445581 - RNA, 18 nt, Human
ccuccuucccuccgcccc

SEQ ID NO: 445582 - RNA, 21 nt, Human
ccucggagccgcccgcccucc

SEQ ID NO: 445583 - RNA, 20 nt, Human
ccuggcgccagguugcccuc

SEQ ID NO: 445584 - RNA, 24 nt, Human
ccuuccccucuccaaggacggggg

SEQ ID NO: 445585 - RNA, 18 nt, Human
cgcccuccuucccuccgc

SEQ ID NO: 445586 - RNA, 22 nt, Human
cucccagguucuggcacauuaa

SEQ ID NO: 445587 - RNA, 18 nt, Human
cucucugucucugugccc

SEQ ID NO: 445588 - RNA, 21 nt, Human
cucugugccccgccgcccucc

SEQ ID NO: 445589 - RNA, 21 nt, Human
cuggcacauuaacaaagagga

SEQ ID NO: 445590 - RNA, 19 nt, Human
cugugccaacaguggcccc

SEQ ID NO: 445591 - RNA, 18 nt, Human
cuuacuguuucagugaaa

SEQ ID NO: 445592 - RNA, 18 nt, Human
cuugcucucugucucugu

SEQ ID NO: 445593 - RNA, 18 nt, Human
gagaagccucccagguuc

SEQ ID NO: 445594 - RNA, 20 nt, Human
gaggggaugagaagccugag

SEQ ID NO: 445595 - RNA, 19 nt, Human
gccuugcucucugucucug

SEQ ID NO: 445596 - RNA, 20 nt, Human
ggaggaggggaugagaagcc

SEQ ID NO: 445597 - RNA, 18 nt, Human
gggaagcaagggagaaag

SEQ ID NO: 445598 - RNA, 18 nt, Human
ggggaugagaagccugag

SEQ ID NO: 445599 - RNA, 19 nt, Human
ggucaguggcuggcuccag

SEQ ID NO: 445600 - RNA, 23 nt, Human
uaaccagaauuuucccuggcgcc

SEQ ID NO: 445601 - RNA, 21 nt, Human
uaagaacacaaccucuaaauc

SEQ ID NO: 445602 - RNA, 24 nt, Human
uagaggaacacugccuucucugca

SEQ ID NO: 445603 - RNA, 23 nt, Human
ucagugaaaaguugggagggaag

SEQ ID NO: 445604 - RNA, 21 nt, Human
ucaguggcuggcuccaggguc

SEQ ID NO: 445605 - RNA, 20 nt, Human
uccagcauccaggugcgcac

SEQ ID NO: 445606 - RNA, 23 nt, Human
uccagcaucugagcugaggcagg

SEQ ID NO: 445607 - RNA, 20 nt, Human
uccaggguccaugagugaag

SEQ ID NO: 445608 - RNA, 18 nt, Human
ucccuggcgccagguugc

SEQ ID NO: 445609 - RNA, 18 nt, Human
ucccuguccaggauccuu

SEQ ID NO: 445610 - RNA, 19 nt, Human
uccugguaccuuauccucc

SEQ ID NO: 445611 - RNA, 21 nt, Human
uccugguaccuuauccuccuc

SEQ ID NO: 445612 - RNA, 25 nt, Human
ucggcagucgggacaggccgggguc

SEQ ID NO: 445613 - RNA, 20 nt, Human
ugaauaaccagaauuuuccc

SEQ ID NO: 445614 - RNA, 24 nt, Human
ugacuuggagaaagaacacugucc

SEQ ID NO: 445615 - RNA, 21 nt, Human
ugagcuggcucugggcccuca

SEQ ID NO: 445616 - RNA, 22 nt, Human
ugcaaaagaaggacagugggaa

SEQ ID NO: 445617 - RNA, 21 nt, Human
ugcagggagcggcaggagagc

SEQ ID NO: 445618 - RNA, 18 nt, Human
ugccccgccgcccuccuu

SEQ ID NO: 445619 - RNA, 18 nt, Human
ugcgggaggaggggauga

SEQ ID NO: 445620 - RNA, 19 nt, Human
uggaaacacccuauugcua

SEQ ID NO: 445621 - RNA, 20 nt, Human
uggagggcaguccccagggu

SEQ ID NO: 445622 - RNA, 20 nt, Human
uggcacauuaacaaagagga

SEQ ID NO: 445623 - RNA, 24 nt, Human
uggcaugccuaagaacacaaccuc

SEQ ID NO: 445624 - RNA, 20 nt, Human
uggcugugccaacaguggcc

SEQ ID NO: 445625 - RNA, 20 nt, Human
ugggaggcgccgaggcgaug

SEQ ID NO: 445626 - RNA, 22 nt, Human
ugggaggcgccgaggcgaugag

SEQ ID NO: 445627 - RNA, 18 nt, Human
ugguccagccucuugccu

SEQ ID NO: 445628 - RNA, 18 nt, Human
ugguggcccccuccaccc

SEQ ID NO: 445629 - RNA, 23 nt, Human
uguguugagcagacaccagaucc

SEQ ID NO: 445630 - RNA, 24 nt, Human
uuccccaccccuaacuacccucuu

SEQ ID NO: 445631 - RNA, 22 nt, Human
uucucugcaaaacgagcauccu

SEQ ID NO: 445632 - RNA, 21 nt, Human
uugcucucugucucugugccc

SEQ ID NO: 445633 - RNA, 24 nt, Human
uuuuuuuuuuuuuuuucgcucuga

SEQ ID NO: 445634 - RNA, 21 nt, Human
uuuuuuuuuuuuuuuuucgcu

SEQ ID NO: 445635 - RNA, 27 nt, Human
uuuuuuuuuuuuuuuuuuuuuucgggg

SEQ ID NO: 445636 - RNA, 19 nt, Human
aaaaagacagagugaugua

SEQ ID NO: 445637 - RNA, 19 nt, Human
aacauuuuguccagaggug

SEQ ID NO: 445638 - RNA, 18 nt, Human
aacccgaaauccccaaaa

SEQ ID NO: 445639 - RNA, 18 nt, Human
aagcaagaaaaaaaaauc

SEQ ID NO: 445640 - RNA, 19 nt, Human
aagcaagaaaaaaaaaucc

SEQ ID NO: 445641 - RNA, 22 nt, Human
aagcaagaucaagacuuagcaa

SEQ ID NO: 445642 - RNA, 21 nt, Human
aagcugccaauuccacuucug

SEQ ID NO: 445643 - RNA, 23 nt, Human
aagugccuugugaauuguuaagc

SEQ ID NO: 445644 - RNA, 21 nt, Human
aauaucuuuuuggagaccucc

SEQ ID NO: 445645 - RNA, 23 nt, Human
acucaacuuaucuucccuaagau

SEQ ID NO: 445646 - RNA, 20 nt, Human
agaaggcuguuucaggggac

SEQ ID NO: 445647 - RNA, 23 nt, Human
agaccaggauccaguggcuuuca

SEQ ID NO: 445648 - RNA, 20 nt, Human
agaucaagacuuagcaagac

SEQ ID NO: 445649 - RNA, 23 nt, Human
aggauccaguggcuuucaguuuu

SEQ ID NO: 445650 - RNA, 18 nt, Human
agguggcuuaggaaggga

SEQ ID NO: 445651 - RNA, 19 nt, Human
agguggcuuaggaagggag

SEQ ID NO: 445652 - RNA, 24 nt, Human
augggcaauguggcauuugccuca

SEQ ID NO: 445653 - RNA, 22 nt, Human
caaagcaagaaaaaaaaauccc

SEQ ID NO: 445654 - RNA, 23 nt, Human
caacucaacuuaucuucccuaag

SEQ ID NO: 445655 - RNA, 26 nt, Human
caagaacacagacacuuagaugccau

SEQ ID NO: 445656 - RNA, 21 nt, Human
caguuugacugaaggugcauc

SEQ ID NO: 445657 - RNA, 22 nt, Human
cauuuggcuucucaaauucauc

SEQ ID NO: 445658 - RNA, 21 nt, Human
ccaguggcuuucaguuuuggc

SEQ ID NO: 445659 - RNA, 22 nt, Human
ccaguggcuuucaguuuuggcu

SEQ ID NO: 445660 - RNA, 20 nt, Human
ccccuugugccuuccagcug

SEQ ID NO: 445661 - RNA, 18 nt, Human
cccuugugccuuccagcu

SEQ ID NO: 445662 - RNA, 20 nt, Human
ccuuugggaauucugggcuu

SEQ ID NO: 445663 - RNA, 20 nt, Human
cugaaugccacaauguccuc

SEQ ID NO: 445664 - RNA, 22 nt, Human
cugacugcaaauccagagcuga

SEQ ID NO: 445665 - RNA, 22 nt, Human
cuuagaacccgaaauccccaaa

SEQ ID NO: 445666 - RNA, 23 nt, Human
gacaacucaacuuaucuucccua

SEQ ID NO: 445667 - RNA, 21 nt, Human
gacccagacaaugagggucuu

SEQ ID NO: 445668 - RNA, 24 nt, Human
gagaacuucaaggggaaaagacug

SEQ ID NO: 445669 - RNA, 21 nt, Human
ggaaauccccugaauguaaug

SEQ ID NO: 445670 - RNA, 20 nt, Human
ggggguggggugggggacaa

SEQ ID NO: 445671 - RNA, 23 nt, Human
ggggguggggugggggacaaugg

SEQ ID NO: 445672 - RNA, 19 nt, Human
gggguggggugggggacaa

SEQ ID NO: 445673 - RNA, 20 nt, Human
guggggugggggacaauggu

SEQ ID NO: 445674 - RNA, 21 nt, Human
uaaauugcuaccacuuuccuu

SEQ ID NO: 445675 - RNA, 23 nt, Human
uacaagaacacagacacuuagau

SEQ ID NO: 445676 - RNA, 19 nt, Human
uaccacuuuccuucaucug

SEQ ID NO: 445677 - RNA, 25 nt, Human
uaggaaaauacauuugagcuaaaaa

SEQ ID NO: 445678 - RNA, 18 nt, Human
uaggaaauauccagguag

SEQ ID NO: 445679 - RNA, 22 nt, Human
uauacaaauccaguagcauagc

SEQ ID NO: 445680 - RNA, 21 nt, Human
uaucugaaaaaugggcaaugu

SEQ ID NO: 445681 - RNA, 21 nt, Human
uauguccauagauuguagaac

SEQ ID NO: 445682 - RNA, 18 nt, Human
uauucugggggguggggu

SEQ ID NO: 445683 - RNA, 19 nt, Human
ucaaaugucuguucucaag

SEQ ID NO: 445684 - RNA, 23 nt, Human
ucaaggggaaaagacugagccag

SEQ ID NO: 445685 - RNA, 20 nt, Human
ucaucagaaacauuucacau

SEQ ID NO: 445686 - RNA, 22 nt, Human
ucccaaacugacugcaaaucca

SEQ ID NO: 445687 - RNA, 20 nt, Human
uccuccccuugugccuucca

SEQ ID NO: 445688 - RNA, 23 nt, Human
uccucuaaaaugcaggagagcaa

SEQ ID NO: 445689 - RNA, 22 nt, Human
ucugaagauucagcuagaccag

SEQ ID NO: 445690 - RNA, 27 nt, Human
ucugaaugccacaauguccuccccuug

SEQ ID NO: 445691 - RNA, 19 nt, Human
ucugauaucagcacaaagc

SEQ ID NO: 445692 - RNA, 18 nt, Human
ucuuggacaacucaacuu

SEQ ID NO: 445693 - RNA, 21 nt, Human
ugaaaaaugggcaauguggca

SEQ ID NO: 445694 - RNA, 20 nt, Human
ugacugcaaauccagagcug

SEQ ID NO: 445695 - RNA, 28 nt, Human
ugcagaugcuuuuccaauuagauguccc

SEQ ID NO: 445696 - RNA, 22 nt, Human
uggacaacucaacuuaucuucc

SEQ ID NO: 445697 - RNA, 25 nt, Human
uggacaacucaacuuaucuucccua

SEQ ID NO: 445698 - RNA, 21 nt, Human
uggcaggaagcaagaucaaga

SEQ ID NO: 445699 - RNA, 18 nt, Human
uggggggugggguggggg

SEQ ID NO: 445700 - RNA, 19 nt, Human
uggggugggggacaauggu

SEQ ID NO: 445701 - RNA, 21 nt, Human
ugucgauacugaagaaaaggg

SEQ ID NO: 445702 - RNA, 24 nt, Human
ugugaauuguuaagcccaauaagg

SEQ ID NO: 445703 - RNA, 23 nt, Human
uguuucuaccaauaccuaccugu

SEQ ID NO: 445704 - RNA, 28 nt, Human
uucccuguucgcugcuauuuguuugaau

SEQ ID NO: 445705 - RNA, 21 nt, Human
uucucaaauucaucuugucuc

SEQ ID NO: 445706 - RNA, 20 nt, Human
uuuauacaaauccaguagca

SEQ ID NO: 445707 - RNA, 23 nt, Human
uuugacugaaggugcaucccuug

SEQ ID NO: 445708 - RNA, 21 nt, Human
uuuuaugcagaugcuuuucca

SEQ ID NO: 445709 - RNA, 18 nt, Human
aaagcaggagcugcccuu

SEQ ID NO: 445710 - RNA, 18 nt, Human
aacucgcucucccuacuc

SEQ ID NO: 445711 - RNA, 20 nt, Human
aacucgcucucccuacucca

SEQ ID NO: 445712 - RNA, 21 nt, Human
aaucucucauggaaccccuac

SEQ ID NO: 445713 - RNA, 19 nt, Human
agaacaacagcaauggcuc

SEQ ID NO: 445714 - RNA, 18 nt, Human
agaaucccccucucugcc

SEQ ID NO: 445715 - RNA, 24 nt, Human
agcagagccaucccagaacaacag

SEQ ID NO: 445716 - RNA, 20 nt, Human
agccuccaaucuuccuccaa

SEQ ID NO: 445717 - RNA, 28 nt, Human
aggagcugcccuuguucagggauaauau

SEQ ID NO: 445718 - RNA, 20 nt, Human
aggccauugcuggggggagg

SEQ ID NO: 445719 - RNA, 18 nt, Human
auaaagcaggagcugccc

SEQ ID NO: 445720 - RNA, 18 nt, Human
auucacugcucuccuuac

SEQ ID NO: 445721 - RNA, 28 nt, Human
auugacaauuacucaucuauuuuugacu

SEQ ID NO: 445722 - RNA, 24 nt, Human
caacagugccacgauaagaguuuc

SEQ ID NO: 445723 - RNA, 19 nt, Human
cacugcucuccuuacuuca

SEQ ID NO: 445724 - RNA, 22 nt, Human
cagagaggggccaugaccuguc

SEQ ID NO: 445725 - RNA, 23 nt, Human
cagcaccacacuggauucuggag

SEQ ID NO: 445726 - RNA, 24 nt, Human
caucacccaggccucugguuucca

SEQ ID NO: 445727 - RNA, 19 nt, Human
ccaaucuuccuccaaagaa

SEQ ID NO: 445728 - RNA, 25 nt, Human
ccagaauguaggaagugggacagga

SEQ ID NO: 445729 - RNA, 21 nt, Human
cccagagucugaggccuggac

SEQ ID NO: 445730 - RNA, 19 nt, Human
ccccagagucugaggccug

SEQ ID NO: 445731 - RNA, 23 nt, Human
ccccagagucugaggccuggaca

SEQ ID NO: 445732 - RNA, 24 nt, Human
ccccgagucccagcucccaaacuc

SEQ ID NO: 445733 - RNA, 19 nt, Human
ccugcccacccugggucug

SEQ ID NO: 445734 - RNA, 19 nt, Human
cuccaaagaaagaugcuga

SEQ ID NO: 445735 - RNA, 24 nt, Human
cuccccgagucccagcucccaaac

SEQ ID NO: 445736 - RNA, 18 nt, Human
cugcgaucuggaagcaga

SEQ ID NO: 445737 - RNA, 18 nt, Human
cugcuccugccugacuga

SEQ ID NO: 445738 - RNA, 18 nt, Human
cuggagucuuuccagcca

SEQ ID NO: 445739 - RNA, 21 nt, Human
cugggcccagagaggggccau

SEQ ID NO: 445740 - RNA, 23 nt, Human
cuucacgguagucccagaaugua

SEQ ID NO: 445741 - RNA, 22 nt, Human
gacuccccgagucccagcuccc

SEQ ID NO: 445742 - RNA, 18 nt, Human
gagaggggaaggggcuug

SEQ ID NO: 445743 - RNA, 29 nt, Human
gcuggggggaggggcagggugaagggagg

SEQ ID NO: 445744 - RNA, 20 nt, Human
ggaagggacuucauuugaag

SEQ ID NO: 445745 - RNA, 24 nt, Human
gggaggggcagggugaagggaggg

SEQ ID NO: 445746 - RNA, 20 nt, Human
uaagaaacacaguuugacau

SEQ ID NO: 445747 - RNA, 19 nt, Human
uaaggaaacugaggcccag

SEQ ID NO: 445748 - RNA, 22 nt, Human
uaaugcaguaaaaccauuccuu

SEQ ID NO: 445749 - RNA, 22 nt, Human
ucacccaggccucugguuucca

SEQ ID NO: 445750 - RNA, 19 nt, Human
ucccaaacucgcucucccu

SEQ ID NO: 445751 - RNA, 21 nt, Human
ucccagcucccaaacucgcuc

SEQ ID NO: 445752 - RNA, 20 nt, Human
uccccgagucccagcuccca

SEQ ID NO: 445753 - RNA, 23 nt, Human
uccugcccacccugggucugggu

SEQ ID NO: 445754 - RNA, 23 nt, Human
ucucccuacuccaggcuucacgg

SEQ ID NO: 445755 - RNA, 23 nt, Human
ugacuccccgagucccagcuccc

SEQ ID NO: 445756 - RNA, 18 nt, Human
ugcuggggggaggggcag

SEQ ID NO: 445757 - RNA, 18 nt, Human
uggccccucaguuccugc

SEQ ID NO: 445758 - RNA, 23 nt, Human
uggccccucaguuccugcccacc

SEQ ID NO: 445759 - RNA, 23 nt, Human
ugggacaggauagacuuuaacau

SEQ ID NO: 445760 - RNA, 23 nt, Human
uuaaaacccaaaaucucucaugg

SEQ ID NO: 445761 - RNA, 18 nt, Human
uucacgguagucccagaa

SEQ ID NO: 445762 - RNA, 22 nt, Human
aaaaaagacacaauauaaagga

SEQ ID NO: 445763 - RNA, 20 nt, Human
aaacaaaacaucagcagaaa

SEQ ID NO: 445764 - RNA, 20 nt, Human
aaaccagucccagauacugu

SEQ ID NO: 445765 - RNA, 18 nt, Human
aaauccaaaccccaccaa

SEQ ID NO: 445766 - RNA, 18 nt, Human
aagaaagagggaggcaga

SEQ ID NO: 445767 - RNA, 20 nt, Human
agcucccaggcaaacuaaac

SEQ ID NO: 445768 - RNA, 22 nt, Human
aggaagaaagagggaggcagaa

SEQ ID NO: 445769 - RNA, 20 nt, Human
aggaccugcuaggcgacugg

SEQ ID NO: 445770 - RNA, 24 nt, Human
auaaaaaagacacaauauaaagga

SEQ ID NO: 445771 - RNA, 19 nt, Human
caacauaaaaaagacacaa

SEQ ID NO: 445772 - RNA, 22 nt, Human
cagaagcagaagggguuugggg

SEQ ID NO: 445773 - RNA, 20 nt, Human
cagcacagaacuaauuggcu

SEQ ID NO: 445774 - RNA, 21 nt, Human
caugcaacauaaaaaagacac

SEQ ID NO: 445775 - RNA, 21 nt, Human
ccaaaccccaccaagguuaag

SEQ ID NO: 445776 - RNA, 20 nt, Human
ccaauaaacaaaacaucagc

SEQ ID NO: 445777 - RNA, 18 nt, Human
ccagucccagauacuguu

SEQ ID NO: 445778 - RNA, 22 nt, Human
cccaauaaacaaaacaucagca

SEQ ID NO: 445779 - RNA, 19 nt, Human
cccaggcaaacuaaacgag

SEQ ID NO: 445780 - RNA, 22 nt, Human
cccaggcaaacuaaacgagagg

SEQ ID NO: 445781 - RNA, 18 nt, Human
ccccugugccgaugaaga

SEQ ID NO: 445782 - RNA, 28 nt, Human
cgguaaacaauaauuggcaacaaaauaa

SEQ ID NO: 445783 - RNA, 20 nt, Human
cucccaggcaaacuaaacga

SEQ ID NO: 445784 - RNA, 21 nt, Human
cugguacaagcaguauuagaa

SEQ ID NO: 445785 - RNA, 21 nt, Human
cuuucaagcucccaggcaaac

SEQ ID NO: 445786 - RNA, 19 nt, Human
gaccccgugcuuucuccuu

SEQ ID NO: 445787 - RNA, 22 nt, Human
gcaacaugcaacauaaaaaaga

SEQ ID NO: 445788 - RNA, 21 nt, Human
ggggcgaccccgugcuuucuc

SEQ ID NO: 445789 - RNA, 23 nt, Human
guaguguuuuggaucuuucucug

SEQ ID NO: 445790 - RNA, 23 nt, Human
uaaaaccaagcacauugcuaaau

SEQ ID NO: 445791 - RNA, 24 nt, Human
uaacaagccuagaccaauuuuauc

SEQ ID NO: 445792 - RNA, 20 nt, Human
uaagccgguagaggaccugc

SEQ ID NO: 445793 - RNA, 19 nt, Human
uaauaaccaagauacaaac

SEQ ID NO: 445794 - RNA, 22 nt, Human
uacaagcaguauuagaaaaucu

SEQ ID NO: 445795 - RNA, 20 nt, Human
uacuuuuuucccaaggagaa

SEQ ID NO: 445796 - RNA, 19 nt, Human
uaucaaacauguccuuggu

SEQ ID NO: 445797 - RNA, 19 nt, Human
uauguccaggcauuuacgc

SEQ ID NO: 445798 - RNA, 18 nt, Human
uauuaggaauaauuccaa

SEQ ID NO: 445799 - RNA, 24 nt, Human
uauucugcccaaaccagucccaga

SEQ ID NO: 445800 - RNA, 18 nt, Human
ucaaauccaaaccccacc

SEQ ID NO: 445801 - RNA, 21 nt, Human
ucaaauccaaaccccaccaag

SEQ ID NO: 445802 - RNA, 22 nt, Human
ucaaauccaaaccccaccaagg

SEQ ID NO: 445803 - RNA, 21 nt, Human
ugaugaguuuuccaaaaacuc

SEQ ID NO: 445804 - RNA, 21 nt, Human
ugaugggcagaagcagaaggg

SEQ ID NO: 445805 - RNA, 22 nt, Human
ugcuuucuccuuucaagcuccc

SEQ ID NO: 445806 - RNA, 18 nt, Human
uggaucuuucucuggcug

SEQ ID NO: 445807 - RNA, 25 nt, Human
uggcaacaaaauaaguuuaauauuc

SEQ ID NO: 445808 - RNA, 19 nt, Human
ugggcagaagcagaagggg

SEQ ID NO: 445809 - RNA, 19 nt, Human
ugggcagaagcagaagggg

SEQ ID NO: 445810 - RNA, 25 nt, Human
ugggcagaagcagaagggguuuggg

SEQ ID NO: 445811 - RNA, 23 nt, Human
uggggcucaaaaaacacucaaaa

SEQ ID NO: 445812 - RNA, 21 nt, Human
ugucuggggcucaaaaaacac

SEQ ID NO: 445813 - RNA, 22 nt, Human
ugugccgaugaagauccggcac

SEQ ID NO: 445814 - RNA, 21 nt, Human
uguuuuggaucuuucucuggc

SEQ ID NO: 445815 - RNA, 24 nt, Human
uuggggcgaccccgugcuuucucc

SEQ ID NO: 445816 - RNA, 21 nt, Human
uugguuagauauccaauuuca

SEQ ID NO: 445817 - RNA, 27 nt, Human
aaaaaaaaaaaaaaaaaaaggaaaaag

SEQ ID NO: 445818 - RNA, 26 nt, Human
aaaagaaagggaaacaaacaaaagag

SEQ ID NO: 445819 - RNA, 20 nt, Human
aaacaaaagagaaaaccccc

SEQ ID NO: 445820 - RNA, 23 nt, Human
aaacaaaagagaaaacccccaag

SEQ ID NO: 445821 - RNA, 22 nt, Human
aaacaaacaaaagagaaaaccc

SEQ ID NO: 445822 - RNA, 25 nt, Human
aaacaaacaaaagagaaaaccccca

SEQ ID NO: 445823 - RNA, 20 nt, Human
aaacccccaagccccguccc

SEQ ID NO: 445824 - RNA, 18 nt, Human
aaagaagagaaaguggca

SEQ ID NO: 445825 - RNA, 24 nt, Human
aaaggaaaaaagcauacauaggaa

SEQ ID NO: 445826 - RNA, 20 nt, Human
aacaguaacuccagaguuca

SEQ ID NO: 445827 - RNA, 23 nt, Human
aacgcaaagccaacaaaaaaaaa

SEQ ID NO: 445828 - RNA, 19 nt, Human
aaggaaggggggggaaggc

SEQ ID NO: 445829 - RNA, 23 nt, Human
aagggacuuuuacccaagaacug

SEQ ID NO: 445830 - RNA, 18 nt, Human
acccccaagccccguccc

SEQ ID NO: 445831 - RNA, 30 nt, Human
acgccgccgccgccgcgaaaccgaaacgag

SEQ ID NO: 445832 - RNA, 18 nt, Human
acugcagcccuccggccc

SEQ ID NO: 445833 - RNA, 21 nt, Human
acugcagcccuccggcccgcc

SEQ ID NO: 445834 - RNA, 22 nt, Human
acugcagcccuccggcccgccc

SEQ ID NO: 445835 - RNA, 21 nt, Human
acugcccuuccccccgcaggc

SEQ ID NO: 445836 - RNA, 25 nt, Human
agaaagggaaacaaacaaaagagaa

SEQ ID NO: 445837 - RNA, 22 nt, Human
agaacaguaacuccagaguuca

SEQ ID NO: 445838 - RNA, 20 nt, Human
agaacucauaaggaaggggg

SEQ ID NO: 445839 - RNA, 19 nt, Human
agacugcagcccuccggcc

SEQ ID NO: 445840 - RNA, 21 nt, Human
agagaaaacccccaagccccg

SEQ ID NO: 445841 - RNA, 24 nt, Human
agaggcagcgcggcuccggggccc

SEQ ID NO: 445842 - RNA, 21 nt, Human
agaggcccaggccccccgcuc

SEQ ID NO: 445843 - RNA, 24 nt, Human
aggaaaaaagcauacauaggaaaa

SEQ ID NO: 445844 - RNA, 27 nt, Human
aggaaaaagaaagggaaacaaacaaaa

SEQ ID NO: 445845 - RNA, 18 nt, Human
aggaaaaugaaagauucu

SEQ ID NO: 445846 - RNA, 28 nt, Human
agugauaaggaaacugggcaaaaaagga

SEQ ID NO: 445847 - RNA, 21 nt, Human
augcaugauguguuucagaac

SEQ ID NO: 445848 - RNA, 18 nt, Human
caaaaaaggaaaaaagca

SEQ ID NO: 445849 - RNA, 22 nt, Human
caaacaaaagagaaaaccccca

SEQ ID NO: 445850 - RNA, 18 nt, Human
caaauucaaaagaagaga

SEQ ID NO: 445851 - RNA, 21 nt, Human
caacaacgccgccgccgccgc

SEQ ID NO: 445852 - RNA, 19 nt, Human
cacauuugaaauuacuaag

SEQ ID NO: 445853 - RNA, 18 nt, Human
caccgaccgcacaacuug

SEQ ID NO: 445854 - RNA, 21 nt, Human
cacugggcuccccaccgaccc

SEQ ID NO: 445855 - RNA, 21 nt, Human
cagucgccgccgccacccggg

SEQ ID NO: 445856 - RNA, 20 nt, Human
ccaacaaaaaaaaaaaaaaa

SEQ ID NO: 445857 - RNA, 18 nt, Human
ccaagaacugcuguguuu

SEQ ID NO: 445858 - RNA, 23 nt, Human
cccaagaacugcuguguuucccc

SEQ ID NO: 445859 - RNA, 23 nt, Human
ccccaagccccguccccgccaaa

SEQ ID NO: 445860 - RNA, 21 nt, Human
cccccaagccccguccccgcc

SEQ ID NO: 445861 - RNA, 18 nt, Human
ccccguccccgccaaacu

SEQ ID NO: 445862 - RNA, 20 nt, Human
cccgcuccuccgccuuccuc

SEQ ID NO: 445863 - RNA, 21 nt, Human
ccgacccaggacacccgagag

SEQ ID NO: 445864 - RNA, 19 nt, Human
ccgccgcgguucccgcucc

SEQ ID NO: 445865 - RNA, 21 nt, Human
ccgccgcgguucccgcuccuc

SEQ ID NO: 445866 - RNA, 22 nt, Human
ccgggcccugagacugcgcugg

SEQ ID NO: 445867 - RNA, 18 nt, Human
ccuccuaagggcagaggc

SEQ ID NO: 445868 - RNA, 24 nt, Human
ccuccuaagggcagaggcccaggc

SEQ ID NO: 445869 - RNA, 22 nt, Human
cgaaauaaaaaaaucccaaacc

SEQ ID NO: 445870 - RNA, 26 nt, Human
cgaaauaaaaaaaucccaaaccuauu

SEQ ID NO: 445871 - RNA, 32 nt, Human
cgcaaagccaacaaaaaaaaaaaaaaaaaaaa

SEQ ID NO: 445872 - RNA, 21 nt, Human
cgccaaacuguagaacaguaa

SEQ ID NO: 445873 - RNA, 23 nt, Human
cgccgccgccgccgcgaaacccc

SEQ ID NO: 445874 - RNA, 22 nt, Human
cgccgccgccgccgcgaaaccg

SEQ ID NO: 445875 - RNA, 23 nt, Human
cggaacugcccuuccccccgcag

SEQ ID NO: 445876 - RNA, 24 nt, Human
cuaacgcaaagccaacaaaaaaaa

SEQ ID NO: 445877 - RNA, 25 nt, Human
cuaacgcaaagccaacaaaaaaaaa

SEQ ID NO: 445878 - RNA, 18 nt, Human
cuccuuccaggggauggg

SEQ ID NO: 445879 - RNA, 19 nt, Human
cugcgugggaguugccucc

SEQ ID NO: 445880 - RNA, 21 nt, Human
cugggcaaaaaaggaaaaaag

SEQ ID NO: 445881 - RNA, 25 nt, Human
gaaaaagaaagggaaacaaacaaaa

SEQ ID NO: 445882 - RNA, 23 nt, Human
gagccauccuaacgcaaagccaa

SEQ ID NO: 445883 - RNA, 22 nt, Human
gagccggggccgggggcauuca

SEQ ID NO: 445884 - RNA, 22 nt, Human
gaggcgcggcccggcccggaac

SEQ ID NO: 445885 - RNA, 22 nt, Human
gccaacaacgccgccgccgccg

SEQ ID NO: 445886 - RNA, 19 nt, Human
gcgcggcuccggggccccg

SEQ ID NO: 445887 - RNA, 20 nt, Human
gcgcugggagccgccgcccu

SEQ ID NO: 445888 - RNA, 21 nt, Human
ggaaaaugaaagauucucucg

SEQ ID NO: 445889 - RNA, 21 nt, Human
ggaaacaaacaaaagagaaaa

SEQ ID NO: 445890 - RNA, 23 nt, Human
ggagccggggccgggggcauuca

SEQ ID NO: 445891 - RNA, 22 nt, Human
uaaaagacaaacggcaguuuga

SEQ ID NO: 445892 - RNA, 27 nt, Human
uaacgcaaagccaacaaaaaaaaaaaa

SEQ ID NO: 445893 - RNA, 22 nt, Human
uaagggcagaggcccaggcccc

SEQ ID NO: 445894 - RNA, 21 nt, Human
uaaguuuacuauacuggucuu

SEQ ID NO: 445895 - RNA, 21 nt, Human
uacauaggaaaaugaaagauu

SEQ ID NO: 445896 - RNA, 18 nt, Human
uagaacaguaacuccaga

SEQ ID NO: 445897 - RNA, 18 nt, Human
uagaacaguaacuccaga

SEQ ID NO: 445898 - RNA, 21 nt, Human
uagaugaaacagacuugcaac

SEQ ID NO: 445899 - RNA, 23 nt, Human
ucgaaauaaaaaaaucccaaacc

SEQ ID NO: 445900 - RNA, 20 nt, Human
ucggugcgcugccuccagcc

SEQ ID NO: 445901 - RNA, 18 nt, Human
ucuccagucgccgccgcc

SEQ ID NO: 445902 - RNA, 22 nt, Human
ucuccuuccaggggaugggugg

SEQ ID NO: 445903 - RNA, 20 nt, Human
ugaaagaggugaugguggcg

SEQ ID NO: 445904 - RNA, 18 nt, Human
ugccuccagccgccgccc

SEQ ID NO: 445905 - RNA, 19 nt, Human
ugcuggaagucaacaagga

SEQ ID NO: 445906 - RNA, 21 nt, Human
ugggcaaaaaaggaaaaaagc

SEQ ID NO: 445907 - RNA, 23 nt, Human
ugggcaaaaaaggaaaaaagcau

SEQ ID NO: 445908 - RNA, 23 nt, Human
ugucccggguccccucagccaac

SEQ ID NO: 445909 - RNA, 20 nt, Human
uucagaacuuacuugcugac

SEQ ID NO: 445910 - RNA, 18 nt, Human
uucccauucugcuggaag

SEQ ID NO: 445911 - RNA, 28 nt, Human
aaaaacaguaaagagcacaccgguaccc

SEQ ID NO: 445912 - RNA, 22 nt, Human
aaaaaugaaaaacaguaaagag

SEQ ID NO: 445913 - RNA, 21 nt, Human
aaaauuagugaaaagggaagc

SEQ ID NO: 445914 - RNA, 24 nt, Human
aaaauuagugaaaagggaagccgg

SEQ ID NO: 445915 - RNA, 24 nt, Human
aaaauuagugaaaagggaagccgg

SEQ ID NO: 445916 - RNA, 25 nt, Human
aacaccuaccauuauacauacauua

SEQ ID NO: 445917 - RNA, 25 nt, Human
aacaccuaccauuauacauacauua

SEQ ID NO: 445918 - RNA, 25 nt, Human
aacaccuaccauuauacauacauua

SEQ ID NO: 445919 - RNA, 21 nt, Human
aacagcaugaccuuuuacccu

SEQ ID NO: 445920 - RNA, 20 nt, Human
aauagaaggaccaauuuaga

SEQ ID NO: 445921 - RNA, 19 nt, Human
acuacuaaaugcugccaac

SEQ ID NO: 445922 - RNA, 23 nt, Human
agccuuaaguuuuauugucaaaa

SEQ ID NO: 445923 - RNA, 21 nt, Human
aggcuuuuuuuuuaaugcuuu

SEQ ID NO: 445924 - RNA, 23 nt, Human
agugaaaaggcagguuaaaagaa

SEQ ID NO: 445925 - RNA, 21 nt, Human
auaagcauuugccacuguacu

SEQ ID NO: 445926 - RNA, 19 nt, Human
auauauauauauauauaua

SEQ ID NO: 445927 - RNA, 21 nt, Human
aucacuguccuuacaacaauu

SEQ ID NO: 445928 - RNA, 27 nt, Human
auuauaaucaggcacaauuuuucaacu

SEQ ID NO: 445929 - RNA, 27 nt, Human
auuauaaucaggcacaauuuuucaacu

SEQ ID NO: 445930 - RNA, 27 nt, Human
auuauaaucaggcacaauuuuucaacu

SEQ ID NO: 445931 - RNA, 20 nt, Human
cagguuaaaagaagcagcua

SEQ ID NO: 445932 - RNA, 26 nt, Human
cauaauaauauucuuuaaaaaugaaa

SEQ ID NO: 445933 - RNA, 23 nt, Human
cauuaagcaacugucauuucuac

SEQ ID NO: 445934 - RNA, 21 nt, Human
ccacaacagugcuaccaaaaa

SEQ ID NO: 445935 - RNA, 19 nt, Human
ccucuuucccaguauauug

SEQ ID NO: 445936 - RNA, 24 nt, Human
ccuuaguguuacacuuuuucuuca

SEQ ID NO: 445937 - RNA, 24 nt, Human
ccuuaguguuacacuuuuucuuca

SEQ ID NO: 445938 - RNA, 24 nt, Human
ccuuaguguuacacuuuuucuuca

SEQ ID NO: 445939 - RNA, 22 nt, Human
cuaaaugcugccaacauucagu

SEQ ID NO: 445940 - RNA, 18 nt, Human
gaaaaacaguaaagagca

SEQ ID NO: 445941 - RNA, 24 nt, Human
ggagcuugagaaaaauauuucuuu

SEQ ID NO: 445942 - RNA, 24 nt, Human
ggagcuugagaaaaauauuucuuu

SEQ ID NO: 445943 - RNA, 24 nt, Human
ggagcuugagaaaaauauuucuuu

SEQ ID NO: 445944 - RNA, 22 nt, Human
uaaaaaaaaaagucucaaugua

SEQ ID NO: 445945 - RNA, 23 nt, Human
uaaaagaagcagcuauacuucac

SEQ ID NO: 445946 - RNA, 22 nt, Human
uaaaguauuaauuuucuguacc

SEQ ID NO: 445947 - RNA, 24 nt, Human
uaauaagcauuugccacuguacuu

SEQ ID NO: 445948 - RNA, 18 nt, Human
uacaccuguaacagcaug

SEQ ID NO: 445949 - RNA, 18 nt, Human
uacaccuguaacagcaug

SEQ ID NO: 445950 - RNA, 18 nt, Human
uacaccuguaacagcaug

SEQ ID NO: 445951 - RNA, 19 nt, Human
uacauauugcccauaauac

SEQ ID NO: 445952 - RNA, 19 nt, Human
uaccaaaaagucacaucuu

SEQ ID NO: 445953 - RNA, 19 nt, Human
uacuuuuuaaaagaaugua

SEQ ID NO: 445954 - RNA, 23 nt, Human
uagaguaacuuuucaaggccuuc

SEQ ID NO: 445955 - RNA, 24 nt, Human
uagcuuuuaaauaaagccaacccu

SEQ ID NO: 445956 - RNA, 19 nt, Human
uauauauauauauauauau

SEQ ID NO: 445957 - RNA, 19 nt, Human
uauauauauauauauauau

SEQ ID NO: 445958 - RNA, 21 nt, Human
uauauauauauauauaugcau

SEQ ID NO: 445959 - RNA, 22 nt, Human
uauauauauauauaugcauccu

SEQ ID NO: 445960 - RNA, 22 nt, Human
uaucagaacauuaaaaaaaaaa

SEQ ID NO: 445961 - RNA, 22 nt, Human
uaugcuaagaaugugcauuaca

SEQ ID NO: 445962 - RNA, 22 nt, Human
uaugcuaagaaugugcauuaca

SEQ ID NO: 445963 - RNA, 22 nt, Human
uaugcuaagaaugugcauuaca

SEQ ID NO: 445964 - RNA, 20 nt, Human
ucacacacaaacaccuacca

SEQ ID NO: 445965 - RNA, 20 nt, Human
ucacacacaaacaccuacca

SEQ ID NO: 445966 - RNA, 20 nt, Human
ucacacacaaacaccuacca

SEQ ID NO: 445967 - RNA, 28 nt, Human
ucacacacaaacaccuaccauuauacau

SEQ ID NO: 445968 - RNA, 28 nt, Human
ucacacacaaacaccuaccauuauacau

SEQ ID NO: 445969 - RNA, 28 nt, Human
ucacacacaaacaccuaccauuauacau

SEQ ID NO: 445970 - RNA, 21 nt, Human
ucagaacauuaaaaaaaaaag

SEQ ID NO: 445971 - RNA, 18 nt, Human
ugaaaaacaguaaagagc

SEQ ID NO: 445972 - RNA, 19 nt, Human
ugaaaaacaguaaagagca

SEQ ID NO: 445973 - RNA, 21 nt, Human
ugaaaagaaugaaccacaaca

SEQ ID NO: 445974 - RNA, 19 nt, Human
ugaaaaggcagguuaaaag

SEQ ID NO: 445975 - RNA, 22 nt, Human
ugaaaaggcagguuaaaagaaa

SEQ ID NO: 445976 - RNA, 24 nt, Human
ugaaaaggcagguuaaaagaagca

SEQ ID NO: 445977 - RNA, 19 nt, Human
ugaaucacacacaaacacc

SEQ ID NO: 445978 - RNA, 19 nt, Human
ugaaucacacacaaacacc

SEQ ID NO: 445979 - RNA, 19 nt, Human
ugaaucacacacaaacacc

SEQ ID NO: 445980 - RNA, 24 nt, Human
ugcaaaguuacuuuuaaccacaaa

SEQ ID NO: 445981 - RNA, 24 nt, Human
uuaaagguguucuguuaacucuga

SEQ ID NO: 445982 - RNA, 21 nt, Human
uuaacuucauccuaauguauc

SEQ ID NO: 445983 - RNA, 19 nt, Human
uucaacuaauaagauuuaa

SEQ ID NO: 445984 - RNA, 20 nt, Human
uucauccuaauguaucagaa

SEQ ID NO: 445985 - RNA, 23 nt, Human
uuccuuuauauauauauauauau

SEQ ID NO: 445986 - RNA, 21 nt, Human
uucucacaagcaauacaacac

SEQ ID NO: 445987 - RNA, 21 nt, Human
uucucacaagcaauacaacac

SEQ ID NO: 445988 - RNA, 21 nt, Human
uucucacaagcaauacaacac

SEQ ID NO: 445989 - RNA, 21 nt, Human
uugaauuuuuuuuuucuuuag

SEQ ID NO: 445990 - RNA, 24 nt, Human
uuguauuguuuuuaaacaaaaaua

SEQ ID NO: 445991 - RNA, 19 nt, Human
uuuauauauauauauauau

SEQ ID NO: 445992 - RNA, 19 nt, Human
uuuauauauauauauauau

SEQ ID NO: 445993 - RNA, 23 nt, Human
uuucuucaauuaacuaguaaaca

SEQ ID NO: 445994 - RNA, 23 nt, Human
uuucuucaauuaacuaguaaaca

SEQ ID NO: 445995 - RNA, 23 nt, Human
uuucuucaauuaacuaguaaaca

SEQ ID NO: 445996 - RNA, 18 nt, Human
uuuguugaaaaauagaag

SEQ ID NO: 445997 - RNA, 21 nt, Human
uuuucaaggccuucucaugaa

SEQ ID NO: 445998 - RNA, 23 nt, Human
uuuucaaggccuucucaugaaca

SEQ ID NO: 445999 - RNA, 18 nt, Human
uuuuuuuuuuuuuuuuug

SEQ ID NO: 446000 - RNA, 18 nt, Human
uuuuuuuuuuuuuuuuug

SEQ ID NO: 446001 - RNA, 18 nt, Human
uuuuuuuuuuuuuuuuug

SEQ ID NO: 446002 - RNA, 23 nt, Human
uuuuuuuuuuuuuuuuuggagcu

SEQ ID NO: 446003 - RNA, 25 nt, Human
uuuuuuuuuuuuuuuuuuuuugggg

SEQ ID NO: 446004 - RNA, 25 nt, Human
uuuuuuuuuuuuuuuuuuuuugggg

SEQ ID NO: 446005 - RNA, 22 nt, Human
aaaagggacucccuggggcaga

SEQ ID NO: 446006 - RNA, 20 nt, Human
aaacaggcacauguggaaca

SEQ ID NO: 446007 - RNA, 19 nt, Human
aaagacacucaaagacccc

SEQ ID NO: 446008 - RNA, 25 nt, Human
aacccggccccuccugccuggccac

SEQ ID NO: 446009 - RNA, 24 nt, Human
acacugcaguugcugauucuuggg

SEQ ID NO: 446010 - RNA, 22 nt, Human
accgacgcgggucugacagcac

SEQ ID NO: 446011 - RNA, 22 nt, Human
accggcccuccacaccagcuac

SEQ ID NO: 446012 - RNA, 22 nt, Human
accggugugcagggcagcccca

SEQ ID NO: 446013 - RNA, 22 nt, Human
agaaagacacucaaagaccccc

SEQ ID NO: 446014 - RNA, 22 nt, Human
agcaaggagaggccccagcacc

SEQ ID NO: 446015 - RNA, 18 nt, Human
aggaccgggcgccaggag

SEQ ID NO: 446016 - RNA, 19 nt, Human
aggcguggacucgggagcc

SEQ ID NO: 446017 - RNA, 19 nt, Human
agggcccacccugcgcucc

SEQ ID NO: 446018 - RNA, 26 nt, Human
auccuggggcuggagcuucgguaccc

SEQ ID NO: 446019 - RNA, 24 nt, Human
augcugccaagucaaggugcuggc

SEQ ID NO: 446020 - RNA, 21 nt, Human
caaaagggacucccuggggca

SEQ ID NO: 446021 - RNA, 20 nt, Human
caagagggcuggugcccaca

SEQ ID NO: 446022 - RNA, 19 nt, Human
caagguggaguccaccccu

SEQ ID NO: 446023 - RNA, 21 nt, Human
cacagcaaggagaggccccag

SEQ ID NO: 446024 - RNA, 22 nt, Human
caccugcagaagggaaaggcca

SEQ ID NO: 446025 - RNA, 23 nt, Human
cacucaaagacccccacgcucag

SEQ ID NO: 446026 - RNA, 22 nt, Human
cagagugggccgucccccuacc

SEQ ID NO: 446027 - RNA, 21 nt, Human
cagcuccugaacccggccccu

SEQ ID NO: 446028 - RNA, 23 nt, Human
cagucacucucuucaaaaagaaa

SEQ ID NO: 446029 - RNA, 18 nt, Human
ccaagacugagggucaca

SEQ ID NO: 446030 - RNA, 25 nt, Human
ccacauccaccuucugaagguggcc

SEQ ID NO: 446031 - RNA, 22 nt, Human
ccaccagccgccaccagcuucc

SEQ ID NO: 446032 - RNA, 23 nt, Human
ccaggcccaccugcccgcaccug

SEQ ID NO: 446033 - RNA, 18 nt, Human
ccaggguguuccaggaug

SEQ ID NO: 446034 - RNA, 24 nt, Human
cccacacaggcuggacagcaagcc

SEQ ID NO: 446035 - RNA, 28 nt, Human
cccacgcaccgaagacuccccacgcgca

SEQ ID NO: 446036 - RNA, 25 nt, Human
cccacgcgcaggcggcgcacacccg

SEQ ID NO: 446037 - RNA, 26 nt, Human
cccacuguccaagguggaguccaccu

SEQ ID NO: 446038 - RNA, 22 nt, Human
cccaggcccaccugcccgcacc

SEQ ID NO: 446039 - RNA, 19 nt, Human
ccccacgcaccgaagacuc

SEQ ID NO: 446040 - RNA, 22 nt, Human
ccccacgcaccgaagacucccc

SEQ ID NO: 446041 - RNA, 22 nt, Human
ccccagcaccggucccaggccc

SEQ ID NO: 446042 - RNA, 23 nt, Human
cccccacacaggcuggacagcaa

SEQ ID NO: 446043 - RNA, 19 nt, Human
cccuggggcagagugggcc

SEQ ID NO: 446044 - RNA, 22 nt, Human
cccuuugugcuggcugcuuucc

SEQ ID NO: 446045 - RNA, 18 nt, Human
ccgcacugcaaugaggau

SEQ ID NO: 446046 - RNA, 18 nt, Human
ccuagacccaggcaccac

SEQ ID NO: 446047 - RNA, 26 nt, Human
ccugaacccggccccuccugccuggc

SEQ ID NO: 446048 - RNA, 19 nt, Human
ccugcaucagggccgaggg

SEQ ID NO: 446049 - RNA, 22 nt, Human
ccugcgcuccuuuuucuuccag

SEQ ID NO: 446050 - RNA, 18 nt, Human
ccuuuuucuuccagggug

SEQ ID NO: 446051 - RNA, 22 nt, Human
cgagacgcuguccucacacugc

SEQ ID NO: 446052 - RNA, 21 nt, Human
cgagcacaggggcugaagggc

SEQ ID NO: 446053 - RNA, 22 nt, Human
cgucgcugacagcucggcacgu

SEQ ID NO: 446054 - RNA, 19 nt, Human
cuagacccaggcaccacgc

SEQ ID NO: 446055 - RNA, 25 nt, Human
cuccacaccagcuaccaagagggcu

SEQ ID NO: 446056 - RNA, 22 nt, Human
cuccugggcggggacagaccuu

SEQ ID NO: 446057 - RNA, 19 nt, Human
cucggggaggugaggguug

SEQ ID NO: 446058 - RNA, 22 nt, Human
cucugugcugcagcccaccucc

SEQ ID NO: 446059 - RNA, 18 nt, Human
cugccuggccacguccgc

SEQ ID NO: 446060 - RNA, 20 nt, Human
cuggagcuucccuagaccca

SEQ ID NO: 446061 - RNA, 24 nt, Human
cuggcugcuuucccgguggcuucu

SEQ ID NO: 446062 - RNA, 19 nt, Human
cuggucccaggccccagag

SEQ ID NO: 446063 - RNA, 24 nt, Human
cuucucagcaccuugagccucuga

SEQ ID NO: 446064 - RNA, 18 nt, Human
cuugggucaaauggaagg

SEQ ID NO: 446065 - RNA, 19 nt, Human
cuuugugcuggcugcuuuc

SEQ ID NO: 446066 - RNA, 24 nt, Human
gaaagaacuagagcaaaaccaaag

SEQ ID NO: 446067 - RNA, 21 nt, Human
gaaagacacucaaagaccccc

SEQ ID NO: 446068 - RNA, 18 nt, Human
gaacccggccccuccugc

SEQ ID NO: 446069 - RNA, 27 nt, Human
gaaggaggaggaacgacgagggcagag

SEQ ID NO: 446070 - RNA, 29 nt, Human
gaaggaggaggaacgacgagggcagagug

SEQ ID NO: 446071 - RNA, 21 nt, Human
gaaggcacccuccugggcggg

SEQ ID NO: 446072 - RNA, 20 nt, Human
gacagaccuuggcuccaugc

SEQ ID NO: 446073 - RNA, 24 nt, Human
gacccaggcaccacgcacaggcau

SEQ ID NO: 446074 - RNA, 21 nt, Human
gaccucagguccaacuacagc

SEQ ID NO: 446075 - RNA, 21 nt, Human
gagaggccccagcaccggucc

SEQ ID NO: 446076 - RNA, 18 nt, Human
gaggacagcucaggugug

SEQ ID NO: 446077 - RNA, 24 nt, Human
gaggguuacgaccgacgcgggucu

SEQ ID NO: 446078 - RNA, 20 nt, Human
gcaccgaagacuccccacgc

SEQ ID NO: 446079 - RNA, 22 nt, Human
gcagcccaccucccagcaagcc

SEQ ID NO: 446080 - RNA, 21 nt, Human
gcccccacacaggcuggacag

SEQ ID NO: 446081 - RNA, 21 nt, Human
gccucugaugccccgccucug

SEQ ID NO: 446082 - RNA, 18 nt, Human
gcgccaggagggcucgcu

SEQ ID NO: 446083 - RNA, 22 nt, Human
gcucgcugaaaucucgguccca

SEQ ID NO: 446084 - RNA, 18 nt, Human
gcugacagcucggcacgu

SEQ ID NO: 446085 - RNA, 25 nt, Human
gcuggcugcuuucccgguggcuucu

SEQ ID NO: 446086 - RNA, 23 nt, Human
gcuggcuuccugggcccuuugug

SEQ ID NO: 446087 - RNA, 22 nt, Human
ggaaguggggugaccagggagc

SEQ ID NO: 446088 - RNA, 20 nt, Human
ggacucgggagccgagggug

SEQ ID NO: 446089 - RNA, 22 nt, Human
ggagacgagucacacguggcag

SEQ ID NO: 446090 - RNA, 18 nt, Human
ggagggaggggcgggcag

SEQ ID NO: 446091 - RNA, 21 nt, Human
ggagggaggggcgggcagggc

SEQ ID NO: 446092 - RNA, 18 nt, Human
ggcagggaggagagcacc

SEQ ID NO: 446093 - RNA, 19 nt, Human
ggccagagugaugagcaug

SEQ ID NO: 446094 - RNA, 22 nt, Human
ggccagggccgagguagggccg

SEQ ID NO: 446095 - RNA, 19 nt, Human
ggcugaagggcccaggcug

SEQ ID NO: 446096 - RNA, 19 nt, Human
gggacgggggcgcaguggg

SEQ ID NO: 446097 - RNA, 20 nt, Human
gggcaccggugugcagggca

SEQ ID NO: 446098 - RNA, 23 nt, Human
gggcucgcugaaaucucgguccc

SEQ ID NO: 446099 - RNA, 20 nt, Human
gggcugaagggcccaggcug

SEQ ID NO: 446100 - RNA, 20 nt, Human
gggcuggcuuccugggcccu

SEQ ID NO: 446101 - RNA, 19 nt, Human
gggucaaauggaaggagga

SEQ ID NO: 446102 - RNA, 20 nt, Human
ggucucggccaccacaucca

SEQ ID NO: 446103 - RNA, 19 nt, Human
ggugcuggcguggaaacag

SEQ ID NO: 446104 - RNA, 22 nt, Human
ggugugcagggcagccccaucc

SEQ ID NO: 446105 - RNA, 20 nt, Human
gugcagggcagccccauccu

SEQ ID NO: 446106 - RNA, 20 nt, Human
guggguguggcuauugugga

SEQ ID NO: 446107 - RNA, 21 nt, Human
ucaggccagggccgagguagg

SEQ ID NO: 446108 - RNA, 21 nt, Human
ucaggccagggccgagguagg

SEQ ID NO: 446109 - RNA, 25 nt, Human
ucauuuccagcauuuccaucuuuaa

SEQ ID NO: 446110 - RNA, 19 nt, Human
uccacaccagcuaccaaga

SEQ ID NO: 446111 - RNA, 19 nt, Human
uccaggagugcugcagacg

SEQ ID NO: 446112 - RNA, 19 nt, Human
ucccaggcccaccugcccg

SEQ ID NO: 446113 - RNA, 19 nt, Human
ucccaggccccagagauac

SEQ ID NO: 446114 - RNA, 18 nt, Human
uccuggggcuggagcuuc

SEQ ID NO: 446115 - RNA, 24 nt, Human
ucggcacguggcuggucccaggcc

SEQ ID NO: 446116 - RNA, 24 nt, Human
ucugugcugcagcccaccucccag

SEQ ID NO: 446117 - RNA, 18 nt, Human
ugaagggcccaggcugcu

SEQ ID NO: 446118 - RNA, 18 nt, Human
ugagcaugguggcaggga

SEQ ID NO: 446119 - RNA, 22 nt, Human
ugagccucugaugccccgccuc

SEQ ID NO: 446120 - RNA, 19 nt, Human
ugaggguuggcauguggcg

SEQ ID NO: 446121 - RNA, 21 nt, Human
ugaggguuggcauguggcggg

SEQ ID NO: 446122 - RNA, 24 nt, Human
ugauucuugggucaaauggaagga

SEQ ID NO: 446123 - RNA, 20 nt, Human
ugcagcccaccucccagcaa

SEQ ID NO: 446124 - RNA, 19 nt, Human
ugcccaggggaguguggga

SEQ ID NO: 446125 - RNA, 27 nt, Human
ugcuggagggaggggcgggcagggccg

SEQ ID NO: 446126 - RNA, 19 nt, Human
uggaaacaggcacaugugg

SEQ ID NO: 446127 - RNA, 19 nt, Human
uggaacaccacaucccacu

SEQ ID NO: 446128 - RNA, 21 nt, Human
uggaacaccacaucccacugu

SEQ ID NO: 446129 - RNA, 19 nt, Human
uggaaggaggaggaacgac

SEQ ID NO: 446130 - RNA, 20 nt, Human
uggaaggaggaggaacgacg

SEQ ID NO: 446131 - RNA, 20 nt, Human
uggaaugcugucagguccgc

SEQ ID NO: 446132 - RNA, 18 nt, Human
uggcagcacaucauccag

SEQ ID NO: 446133 - RNA, 24 nt, Human
uggcccagacaccuccacgcugcu

SEQ ID NO: 446134 - RNA, 24 nt, Human
ugggacgagcacaggggcugaagg

SEQ ID NO: 446135 - RNA, 21 nt, Human
uggucggauggcagcgugagc

SEQ ID NO: 446136 - RNA, 21 nt, Human
uggugcccacagggaggaccg

SEQ ID NO: 446137 - RNA, 19 nt, Human
uuauuggaaugcugucagg

SEQ ID NO: 446138 - RNA, 21 nt, Human
aaaagcacucacugaaaaaca

SEQ ID NO: 446139 - RNA, 23 nt, Human
aaacagaaaucacaggaaagcuc

SEQ ID NO: 446140 - RNA, 22 nt, Human
aaagcaaggauauacacagaga

SEQ ID NO: 446141 - RNA, 18 nt, Human
aauuucugaaaagcaaga

SEQ ID NO: 446142 - RNA, 21 nt, Human
acaaaauauucauucaaaacc

SEQ ID NO: 446143 - RNA, 24 nt, Human
acaggaaagcuccuacaucagaac

SEQ ID NO: 446144 - RNA, 20 nt, Human
accucuccuccucccccaca

SEQ ID NO: 446145 - RNA, 21 nt, Human
aggaaggaacgugaaacagaa

SEQ ID NO: 446146 - RNA, 21 nt, Human
aggagggugugacaggaagga

SEQ ID NO: 446147 - RNA, 20 nt, Human
agggcagaagcuuaaguuug

SEQ ID NO: 446148 - RNA, 24 nt, Human
agucacuuuuggucuuuugaagga

SEQ ID NO: 446149 - RNA, 23 nt, Human
auaaagcaaggauauacacagag

SEQ ID NO: 446150 - RNA, 24 nt, Human
auaaagcaaggauauacacagaga

SEQ ID NO: 446151 - RNA, 28 nt, Human
auaaagcaaggauauacacagagacgcc

SEQ ID NO: 446152 - RNA, 24 nt, Human
caaaagaaauauuaaaaaucagaa

SEQ ID NO: 446153 - RNA, 20 nt, Human
caaguguuuauucuauuuag

SEQ ID NO: 446154 - RNA, 24 nt, Human
cacaugaagccuccugguucagga

SEQ ID NO: 446155 - RNA, 24 nt, Human
cagaauuucucaaaagaaauauua

SEQ ID NO: 446156 - RNA, 18 nt, Human
cagcauccgcugauucug

SEQ ID NO: 446157 - RNA, 22 nt, Human
ccaugugucacauggagaccuc

SEQ ID NO: 446158 - RNA, 25 nt, Human
cccauacacgcaacuauuuucugua

SEQ ID NO: 446159 - RNA, 24 nt, Human
cccccacaugaagccuccugguuc

SEQ ID NO: 446160 - RNA, 20 nt, Human
ccuccugguucaggagcagg

SEQ ID NO: 446161 - RNA, 19 nt, Human
ccugguucaggagcaggag

SEQ ID NO: 446162 - RNA, 23 nt, Human
cucuccuccucccccacaugaag

SEQ ID NO: 446163 - RNA, 19 nt, Human
cugucuaaaacacagcuaa

SEQ ID NO: 446164 - RNA, 25 nt, Human
gaagcaaucugucacacgagacacc

SEQ ID NO: 446165 - RNA, 24 nt, Human
gaugacuucaaauauuauuuggca

SEQ ID NO: 446166 - RNA, 21 nt, Human
ggaaauacacaucaugacuuc

SEQ ID NO: 446167 - RNA, 24 nt, Human
ggaauuucuccaggaaauacacau

SEQ ID NO: 446168 - RNA, 20 nt, Human
uaacaaaacuacccaauuac

SEQ ID NO: 446169 - RNA, 26 nt, Human
uaagaaagauucacaaaauauucauu

SEQ ID NO: 446170 - RNA, 24 nt, Human
uaauuuacaaagagacagaugacu

SEQ ID NO: 446171 - RNA, 19 nt, Human
uagcaaaacaaucugcaaa

SEQ ID NO: 446172 - RNA, 19 nt, Human
uauuaugagaacucuuagg

SEQ ID NO: 446173 - RNA, 21 nt, Human
ucaaauauauuuuacugugcu

SEQ ID NO: 446174 - RNA, 20 nt, Human
ucccuuggcagggcagaagc

SEQ ID NO: 446175 - RNA, 24 nt, Human
ugaaaaaguagcaaaacaaucugc

SEQ ID NO: 446176 - RNA, 18 nt, Human
ugagaugauuuauuauga

SEQ ID NO: 446177 - RNA, 21 nt, Human
ugguucaggagcaggaggagc

SEQ ID NO: 446178 - RNA, 20 nt, Human
ugucuaaaacacagcuaaau

SEQ ID NO: 446179 - RNA, 20 nt, Human
uuauuuggcagucaccuuac

SEQ ID NO: 446180 - RNA, 19 nt, Human
uucucccauacacgcaacu

SEQ ID NO: 446181 - RNA, 23 nt, Human
uucuguagcuguaucuucuuacc

SEQ ID NO: 446182 - RNA, 26 nt, Human
uuuuuuuuuuuuucugcugcaagugu

SEQ ID NO: 446183 - RNA, 18 nt, Human
uuuuuuuuuuuuuuucug

SEQ ID NO: 446184 - RNA, 20 nt, Human
uuuuuuuuuuuuuuucugcu

SEQ ID NO: 446185 - RNA, 24 nt, Human
aacuccuuguuucuaugaaacuuc

SEQ ID NO: 446186 - RNA, 19 nt, Human
acacucaaacaacagaaaa

SEQ ID NO: 446187 - RNA, 23 nt, Human
acucaaacaacagaaaacccagc

SEQ ID NO: 446188 - RNA, 23 nt, Human
agcugcagcacuggccugggcag

SEQ ID NO: 446189 - RNA, 18 nt, Human
agucagaaauggcaugcu

SEQ ID NO: 446190 - RNA, 21 nt, Human
caaacaacagaaaacccagca

SEQ ID NO: 446191 - RNA, 25 nt, Human
caacagaaaacccagcauauuuuag

SEQ ID NO: 446192 - RNA, 19 nt, Human
cagagcugcagcacuggcc

SEQ ID NO: 446193 - RNA, 19 nt, Human
cagcacuggccugggcagc

SEQ ID NO: 446194 - RNA, 25 nt, Human
cagcguagaggccauccguuuccag

SEQ ID NO: 446195 - RNA, 21 nt, Human
cauucugcagagcugcagcac

SEQ ID NO: 446196 - RNA, 21 nt, Human
cucaaacaacagaaaacccag

SEQ ID NO: 446197 - RNA, 22 nt, Human
cucaaacaacagaaaacccagc

SEQ ID NO: 446198 - RNA, 21 nt, Human
cugcagcacuggccugggcag

SEQ ID NO: 446199 - RNA, 24 nt, Human
gaaugauagaaaugaagcagacuu

SEQ ID NO: 446200 - RNA, 21 nt, Human
gacucguaacugacaaaaaca

SEQ ID NO: 446201 - RNA, 21 nt, Human
gcagcacuggccugggcagcc

SEQ ID NO: 446202 - RNA, 18 nt, Human
uaacacacucaaacaaca

SEQ ID NO: 446203 - RNA, 19 nt, Human
uaacacacucaaacaacag

SEQ ID NO: 446204 - RNA, 21 nt, Human
uaacacacucaaacaacagaa

SEQ ID NO: 446205 - RNA, 23 nt, Human
uaacacacucaaacaacagaaaa

SEQ ID NO: 446206 - RNA, 20 nt, Human
uaccauaagccuuaguugga

SEQ ID NO: 446207 - RNA, 23 nt, Human
uaccauaagccuuaguuggagac

SEQ ID NO: 446208 - RNA, 20 nt, Human
ucaaacaacagaaaaccccu

SEQ ID NO: 446209 - RNA, 20 nt, Human
ucaaggagagugacuucuuu

SEQ ID NO: 446210 - RNA, 24 nt, Human
ucuaacacacucaaacaacagaaa

SEQ ID NO: 446211 - RNA, 21 nt, Human
ugaaauaccauaagccuuagu

SEQ ID NO: 446212 - RNA, 25 nt, Human
ugacaguuuaaucagaaaaauggaa

SEQ ID NO: 446213 - RNA, 22 nt, Human
ugagauccaagaugccaacucc

SEQ ID NO: 446214 - RNA, 18 nt, Human
ugcagcacuggccugggc

SEQ ID NO: 446215 - RNA, 21 nt, Human
uggcaguuagccguuacaaga

SEQ ID NO: 446216 - RNA, 18 nt, Human
aaaguaaauagaagaacc

SEQ ID NO: 446217 - RNA, 21 nt, Human
aacauggccugggucuuccuc

SEQ ID NO: 446218 - RNA, 22 nt, Human
aagcaaagcaaacccacccccc

SEQ ID NO: 446219 - RNA, 23 nt, Human
aagcaaagcaaacccacccccca

SEQ ID NO: 446220 - RNA, 19 nt, Human
aagccagccugagcacugg

SEQ ID NO: 446221 - RNA, 22 nt, Human
accccaaagcaaagcaaaccca

SEQ ID NO: 446222 - RNA, 22 nt, Human
agaaaacaaaguaaauagaaga

SEQ ID NO: 446223 - RNA, 21 nt, Human
agcaaagcaaacccacccccc

SEQ ID NO: 446224 - RNA, 21 nt, Human
agcacuggagccccaauuccc

SEQ ID NO: 446225 - RNA, 19 nt, Human
aggcaagaucagccccaga

SEQ ID NO: 446226 - RNA, 18 nt, Human
aggccgcuccugcccaca

SEQ ID NO: 446227 - RNA, 20 nt, Human
aggccucagcccugucccga

SEQ ID NO: 446228 - RNA, 18 nt, Human
auaaaaacagccacuccc

SEQ ID NO: 446229 - RNA, 22 nt, Human
aucagccccagaccacuuccgg

SEQ ID NO: 446230 - RNA, 24 nt, Human
auuuugcacucacccugggugaca

SEQ ID NO: 446231 - RNA, 23 nt, Human
caaacccaccccccagaucagca

SEQ ID NO: 446232 - RNA, 21 nt, Human
caaagcaaacccaccccccaa

SEQ ID NO: 446233 - RNA, 18 nt, Human
caaagcaaagcaaaccca

SEQ ID NO: 446234 - RNA, 21 nt, Human
caaagcaaagcaaacccaccc

SEQ ID NO: 446235 - RNA, 19 nt, Human
caaaguaaauagaagaacc

SEQ ID NO: 446236 - RNA, 21 nt, Human
caaaguaaauagaagaacccc

SEQ ID NO: 446237 - RNA, 19 nt, Human
cacuccccaacuugcgggg

SEQ ID NO: 446238 - RNA, 23 nt, Human
cagagaaccccuccgggagguuc

SEQ ID NO: 446239 - RNA, 24 nt, Human
cagggcagaagccagauggcagcc

SEQ ID NO: 446240 - RNA, 19 nt, Human
cagggccugggccagccgg

SEQ ID NO: 446241 - RNA, 22 nt, Human
caugcagcccaagccagccuga

SEQ ID NO: 446242 - RNA, 24 nt, Human
ccaauucccaaccaggucucccuc

SEQ ID NO: 446243 - RNA, 24 nt, Human
ccacagggcuguccucaugcagcc

SEQ ID NO: 446244 - RNA, 22 nt, Human
ccacucccagcaggcccccuca

SEQ ID NO: 446245 - RNA, 22 nt, Human
ccagaccacuuccggggucacu

SEQ ID NO: 446246 - RNA, 22 nt, Human
ccaggcccaggcgugggguaua

SEQ ID NO: 446247 - RNA, 21 nt, Human
ccaggcgugggguauaggucu

SEQ ID NO: 446248 - RNA, 23 nt, Human
ccagugggguccgugcagggagg

SEQ ID NO: 446249 - RNA, 25 nt, Human
cccacaaacacuccccaacuugcgg

SEQ ID NO: 446250 - RNA, 19 nt, Human
ccccaaagcaaagcaaacc

SEQ ID NO: 446251 - RNA, 19 nt, Human
cccccacaaacacucccca

SEQ ID NO: 446252 - RNA, 19 nt, Human
ccccccagaaagggccucg

SEQ ID NO: 446253 - RNA, 21 nt, Human
ccccucagcuuuuugcaucag

SEQ ID NO: 446254 - RNA, 18 nt, Human
ccuccuccucgauggggc

SEQ ID NO: 446255 - RNA, 24 nt, Human
ccuccuccucgauggggcggagac

SEQ ID NO: 446256 - RNA, 23 nt, Human
ccucgaaaggccgccgcugcgcc

SEQ ID NO: 446257 - RNA, 25 nt, Human
ccucgaaaggccgccgcugcgcccu

SEQ ID NO: 446258 - RNA, 23 nt, Human
ccuuugggaacauggccuggguc

SEQ ID NO: 446259 - RNA, 20 nt, Human
cucccucagaccccccagaa

SEQ ID NO: 446260 - RNA, 21 nt, Human
cuccuggcugggggagggcuc

SEQ ID NO: 446261 - RNA, 23 nt, Human
cugccagacuccccuccaaagcc

SEQ ID NO: 446262 - RNA, 24 nt, Human
cugccagacuccccuccaaagccu

SEQ ID NO: 446263 - RNA, 23 nt, Human
cuggagccccaauucccaaccag

SEQ ID NO: 446264 - RNA, 23 nt, Human
gaacauggccugggucuuccuca

SEQ ID NO: 446265 - RNA, 21 nt, Human
gcaaacccaccccccagauca

SEQ ID NO: 446266 - RNA, 18 nt, Human
gcaaagcaaacccacccc

SEQ ID NO: 446267 - RNA, 20 nt, Human
gcagccauggcugacgggcc

SEQ ID NO: 446268 - RNA, 18 nt, Human
gcaggcccaguggggucc

SEQ ID NO: 446269 - RNA, 19 nt, Human
gcaggccucagcccugucc

SEQ ID NO: 446270 - RNA, 19 nt, Human
gccaggcccaggcgugggg

SEQ ID NO: 446271 - RNA, 18 nt, Human
gcccagugggguccgugc

SEQ ID NO: 446272 - RNA, 19 nt, Human
gcugcagggccugggccag

SEQ ID NO: 446273 - RNA, 19 nt, Human
gcugccagacuccccucca

SEQ ID NO: 446274 - RNA, 20 nt, Human
ggaagaacacagcacucggc

SEQ ID NO: 446275 - RNA, 23 nt, Human
ggaagaacacagcacucggcagg

SEQ ID NO: 446276 - RNA, 22 nt, Human
ggacacagggccccacagagaa

SEQ ID NO: 446277 - RNA, 18 nt, Human
ggcagaagccagauggca

SEQ ID NO: 446278 - RNA, 22 nt, Human
ggcauaaaaacagccacuccca

SEQ ID NO: 446279 - RNA, 21 nt, Human
ggccucgaaaggccgccgcug

SEQ ID NO: 446280 - RNA, 21 nt, Human
ggccugggccagccgggcugc

SEQ ID NO: 446281 - RNA, 18 nt, Human
ggucucccucagaccccc

SEQ ID NO: 446282 - RNA, 23 nt, Human
uauaggucuucccccgcaggccu

SEQ ID NO: 446283 - RNA, 23 nt, Human
uccccaacuugcggggcuggggc

SEQ ID NO: 446284 - RNA, 18 nt, Human
uccgugcagggaggaccc

SEQ ID NO: 446285 - RNA, 20 nt, Human
uccuggcugggggagggcuc

SEQ ID NO: 446286 - RNA, 23 nt, Human
ucuucgagaaaacaaaguaaaua

SEQ ID NO: 446287 - RNA, 21 nt, Human
ugaggugaagccaggcccagg

SEQ ID NO: 446288 - RNA, 19 nt, Human
ugcacucacccugggugac

SEQ ID NO: 446289 - RNA, 18 nt, Human
uggacccccacaaacacu

SEQ ID NO: 446290 - RNA, 21 nt, Human
uggacccccacaaacacuccc

SEQ ID NO: 446291 - RNA, 23 nt, Human
ugggaacauggccugggucuucc

SEQ ID NO: 446292 - RNA, 26 nt, Human
ugggguccgugcagggaggaccccag

SEQ ID NO: 446293 - RNA, 20 nt, Human
ugucccgaggcugcaucaca

SEQ ID NO: 446294 - RNA, 18 nt, Human
uuugcacucacccugggu

SEQ ID NO: 446295 - RNA, 23 nt, Human
uuuuuuuuuuuuuuuuucacacu

SEQ ID NO: 446296 - RNA, 22 nt, Human
aaaaaaugucuaaacagaauua

SEQ ID NO: 446297 - RNA, 18 nt, Human
aaaccaaacaaaaaucug

SEQ ID NO: 446298 - RNA, 18 nt, Human
aauuccaggagcuucccu

SEQ ID NO: 446299 - RNA, 18 nt, Human
agauaaagcucacuuagc

SEQ ID NO: 446300 - RNA, 24 nt, Human
agcacagagauauaucaagagaaa

SEQ ID NO: 446301 - RNA, 21 nt, Human
auccucuuuugaaauauuuca

SEQ ID NO: 446302 - RNA, 25 nt, Human
caauagcccuuuuuccccacauauu

SEQ ID NO: 446303 - RNA, 20 nt, Human
cacccugaacucggaaugag

SEQ ID NO: 446304 - RNA, 22 nt, Human
cacuuccauaaagaauuagggg

SEQ ID NO: 446305 - RNA, 24 nt, Human
cagaugucccaaaaugugucaccc

SEQ ID NO: 446306 - RNA, 19 nt, Human
cagcuccuugauuuccccc

SEQ ID NO: 446307 - RNA, 21 nt, Human
caggucucaaaagcacagaga

SEQ ID NO: 446308 - RNA, 18 nt, Human
ccaaaaugugucacccug

SEQ ID NO: 446309 - RNA, 18 nt, Human
ccaggcuggagugcagug

SEQ ID NO: 446310 - RNA, 21 nt, Human
ccaggcuggagugcaguggug

SEQ ID NO: 446311 - RNA, 21 nt, Human
ccaggcuggagugcaguggug

SEQ ID NO: 446312 - RNA, 24 nt, Human
cccaaaaugugucacccugaacuc

SEQ ID NO: 446313 - RNA, 20 nt, Human
cccacauauucuggaagguu

SEQ ID NO: 446314 - RNA, 21 nt, Human
cccuuguuugcuguuuucguc

SEQ ID NO: 446315 - RNA, 21 nt, Human
cggaaugagagaaaaucucau

SEQ ID NO: 446316 - RNA, 22 nt, Human
cucggaaugagagaaaaucuca

SEQ ID NO: 446317 - RNA, 22 nt, Human
cuuccaucacuccccuuucaga

SEQ ID NO: 446318 - RNA, 21 nt, Human
uaguugugccccugcugaugu

SEQ ID NO: 446319 - RNA, 22 nt, Human
uauuagauaaagcucacuuagc

SEQ ID NO: 446320 - RNA, 20 nt, Human
uauuagauacucauuccugg

SEQ ID NO: 446321 - RNA, 22 nt, Human
ucaucccauaaagaauagaagc

SEQ ID NO: 446322 - RNA, 26 nt, Human
uccccacauauucuggaagguucuac

SEQ ID NO: 446323 - RNA, 19 nt, Human
ucccccuagggauaaagau

SEQ ID NO: 446324 - RNA, 26 nt, Human
ucccuguaauuccucaaaaaagcacu

SEQ ID NO: 446325 - RNA, 22 nt, Human
ucuguauuucugggacaaaaaa

SEQ ID NO: 446326 - RNA, 22 nt, Human
ugaaaucuuagaguagaaccac

SEQ ID NO: 446327 - RNA, 21 nt, Human
ugucauucuccuucccucuca

SEQ ID NO: 446328 - RNA, 24 nt, Human
uucagcacugggcuaccagcagau

SEQ ID NO: 446329 - RNA, 18 nt, Human
uuccaaauggcuuaccac

SEQ ID NO: 446330 - RNA, 23 nt, Human
uuccaaauggcuuaccacagagg

SEQ ID NO: 446331 - RNA, 30 nt, Human
uuccaucacuccccuuucagaggcaccaca

SEQ ID NO: 446332 - RNA, 18 nt, Human
aagcagguaaacccgaga

SEQ ID NO: 446333 - RNA, 18 nt, Human
aaggcagcuugcaggccu

SEQ ID NO: 446334 - RNA, 20 nt, Human
acaaaaaccuuuggugcugc

SEQ ID NO: 446335 - RNA, 20 nt, Human
agcggcggcuacucugcugg

SEQ ID NO: 446336 - RNA, 22 nt, Human
aggcagcugaguucaacaguug

SEQ ID NO: 446337 - RNA, 22 nt, Human
aggcagcugaguucaacaguug

SEQ ID NO: 446338 - RNA, 23 nt, Human
aguccagugcccgucccagcaca

SEQ ID NO: 446339 - RNA, 20 nt, Human
aucccacauuuugacguguc

SEQ ID NO: 446340 - RNA, 20 nt, Human
aucccacauuuugacguguc

SEQ ID NO: 446341 - RNA, 26 nt, Human
augccacaggcacgcacaggaccagc

SEQ ID NO: 446342 - RNA, 28 nt, Human
caaagcuuagagcaggaaguaggaaucc

SEQ ID NO: 446343 - RNA, 23 nt, Human
caaauauuugaccauuuuuaaau

SEQ ID NO: 446344 - RNA, 19 nt, Human
cagaaugaguugcuugggc

SEQ ID NO: 446345 - RNA, 19 nt, Human
cagaggaaguaggagucag

SEQ ID NO: 446346 - RNA, 19 nt, Human
cagaggaaguaggagucag

SEQ ID NO: 446347 - RNA, 21 nt, Human
cagagugcaacacccuccguu

SEQ ID NO: 446348 - RNA, 24 nt, Human
cagcacacaccugcuuuuucagac

SEQ ID NO: 446349 - RNA, 23 nt, Human
cagcacaggaaaaucgcuaucuu

SEQ ID NO: 446350 - RNA, 27 nt, Human
caggaagccccuucuccgccucggccu

SEQ ID NO: 446351 - RNA, 23 nt, Human
caggcgcccucuacagaaggagg

SEQ ID NO: 446352 - RNA, 24 nt, Human
cauuguauucuaacaugcccauug

SEQ ID NO: 446353 - RNA, 18 nt, Human
ccacauucuccaaucagc

SEQ ID NO: 446354 - RNA, 24 nt, Human
cccugaagagauguauaaaagagg

SEQ ID NO: 446355 - RNA, 20 nt, Human
ccugggagcccacaaucugu

SEQ ID NO: 446356 - RNA, 24 nt, Human
cggcggcuacucugcuggugguuu

SEQ ID NO: 446357 - RNA, 18 nt, Human
cguucagugucuccugau

SEQ ID NO: 446358 - RNA, 25 nt, Human
cucacagcagcggcggcuacucucc

SEQ ID NO: 446359 - RNA, 23 nt, Human
cuccgccucggccucagcgugca

SEQ ID NO: 446360 - RNA, 19 nt, Human
cuucccaagacaaaaaccu

SEQ ID NO: 446361 - RNA, 18 nt, Human
gaaguaggagucaguggc

SEQ ID NO: 446362 - RNA, 18 nt, Human
gaaguaggagucaguggc

SEQ ID NO: 446363 - RNA, 18 nt, Human
gacgcguugacgcaggug

SEQ ID NO: 446364 - RNA, 21 nt, Human
gcaagagaggaauauguagca

SEQ ID NO: 446365 - RNA, 24 nt, Human
gcccucuacagaaggagggagccg

SEQ ID NO: 446366 - RNA, 19 nt, Human
gcggcuacucuccuggugg

SEQ ID NO: 446367 - RNA, 30 nt, Human
gcggcuacucugcuggugguuuggugggaa

SEQ ID NO: 446368 - RNA, 19 nt, Human
ggcgcccucuacagaagga

SEQ ID NO: 446369 - RNA, 18 nt, Human
gggagcugcugagauaau

SEQ ID NO: 446370 - RNA, 21 nt, Human
gugaucuuuuaucuuguaggu

SEQ ID NO: 446371 - RNA, 22 nt, Human
uaaaaccuuuugcugcaagaga

SEQ ID NO: 446372 - RNA, 25 nt, Human
uaagauuaaguccaauccaaguguc

SEQ ID NO: 446373 - RNA, 25 nt, Human
uaagauuaaguccaauccaaguguc

SEQ ID NO: 446374 - RNA, 20 nt, Human
uaucaugauuuuuuuccuuu

SEQ ID NO: 446375 - RNA, 19 nt, Human
uaucaugauuuuuuucuuu

SEQ ID NO: 446376 - RNA, 21 nt, Human
ucaggaagccccuucuccgcc

SEQ ID NO: 446377 - RNA, 18 nt, Human
ucaguuuuccuacaggca

SEQ ID NO: 446378 - RNA, 18 nt, Human
uccagugcccgucccagc

SEQ ID NO: 446379 - RNA, 20 nt, Human
uccccaggcucacagcagcg

SEQ ID NO: 446380 - RNA, 22 nt, Human
ugacgugucaaaccuuagagca

SEQ ID NO: 446381 - RNA, 22 nt, Human
ugacgugucaaagcuuagagca

SEQ ID NO: 446382 - RNA, 23 nt, Human
ugauugccaucauuguaagaucu

SEQ ID NO: 446383 - RNA, 21 nt, Human
ugcaagagaggaauauguagc

SEQ ID NO: 446384 - RNA, 19 nt, Human
ugccacaggcacgcacagg

SEQ ID NO: 446385 - RNA, 26 nt, Human
ugccacaggcacgcacaggaccagcg

SEQ ID NO: 446386 - RNA, 21 nt, Human
uggcagguggagauguugacg

SEQ ID NO: 446387 - RNA, 18 nt, Human
uggugcugccugauagca

SEQ ID NO: 446388 - RNA, 20 nt, Human
uggugggagguggagauggu

SEQ ID NO: 446389 - RNA, 23 nt, Human
uguacugggacgcucaggaagcc

SEQ ID NO: 446390 - RNA, 23 nt, Human
uguauucuaacaugcccauuggu

SEQ ID NO: 446391 - RNA, 24 nt, Human
uuagagcaggaaguaggaauccac

SEQ ID NO: 446392 - RNA, 24 nt, Human
uuagagcaggaaguaggaauccac

SEQ ID NO: 446393 - RNA, 24 nt, Human
uucacggagggggaccagccugcc

SEQ ID NO: 446394 - RNA, 19 nt, Human
uuccucuauucucagcucc

SEQ ID NO: 446395 - RNA, 19 nt, Human
uuccucuauucucagcucc

SEQ ID NO: 446396 - RNA, 22 nt, Human
uugcuugggcagguauuccucu

SEQ ID NO: 446397 - RNA, 18 nt, Human
agacacccucacccaggg

SEQ ID NO: 446398 - RNA, 20 nt, Human
aggauucugaaauuggaaac

SEQ ID NO: 446399 - RNA, 21 nt, Human
aggauucugaaauuggaaaca

SEQ ID NO: 446400 - RNA, 20 nt, Human
aggcagcuccucuuccccaa

SEQ ID NO: 446401 - RNA, 23 nt, Human
aggcagcuccucuuccccaacag

SEQ ID NO: 446402 - RNA, 19 nt, Human
aguuaggauucugaaauug

SEQ ID NO: 446403 - RNA, 23 nt, Human
caggcacagaccgcaguggagcc

SEQ ID NO: 446404 - RNA, 23 nt, Human
ccccgggguggaaucggcucucu

SEQ ID NO: 446405 - RNA, 19 nt, Human
ccuacgggccccggggugg

SEQ ID NO: 446406 - RNA, 22 nt, Human
ccuggccuuugucuccuccuca

SEQ ID NO: 446407 - RNA, 24 nt, Human
ccuggccuuugucuccuccucagg

SEQ ID NO: 446408 - RNA, 19 nt, Human
cucacagagacacccucac

SEQ ID NO: 446409 - RNA, 20 nt, Human
cugcggagcguccuggccuu

SEQ ID NO: 446410 - RNA, 24 nt, Human
guccuggccuuugucuccuccuca

SEQ ID NO: 446411 - RNA, 21 nt, Human
ucuagggggaaaguggcagaa

SEQ ID NO: 446412 - RNA, 24 nt, Human
aaaaaaaaaaaaacccaaaaaugc

SEQ ID NO: 446413 - RNA, 26 nt, Human
aaaaaaaaaaacccaaaaaugcaagc

SEQ ID NO: 446414 - RNA, 25 nt, Human
aaaaaaacccaaaaaugcaagcacc

SEQ ID NO: 446415 - RNA, 23 nt, Human
aaaacucuuccauguauucacuu

SEQ ID NO: 446416 - RNA, 22 nt, Human
aaagaugaguauccucucaaac

SEQ ID NO: 446417 - RNA, 28 nt, Human
aaagaugaguauccucucaaacgccucc

SEQ ID NO: 446418 - RNA, 21 nt, Human
aaaugcuaaggucacagugcc

SEQ ID NO: 446419 - RNA, 21 nt, Human
aacaaaaaaaaaaaaaaccca

SEQ ID NO: 446420 - RNA, 22 nt, Human
aacaacagagaccaaggggagc

SEQ ID NO: 446421 - RNA, 19 nt, Human
aacaagcgccaacaauaaa

SEQ ID NO: 446422 - RNA, 19 nt, Human
aacgaagcacuaucauggg

SEQ ID NO: 446423 - RNA, 23 nt, Human
aagcuuggguaaguggcaucuuc

SEQ ID NO: 446424 - RNA, 18 nt, Human
aaugaugagcuagaaaga

SEQ ID NO: 446425 - RNA, 22 nt, Human
aauuuccuuuuuaaugaugagc

SEQ ID NO: 446426 - RNA, 22 nt, Human
acaaaaaaaaaaaaaacccaaa

SEQ ID NO: 446427 - RNA, 24 nt, Human
acaaaaaaaaaaaaaacccaaaaa

SEQ ID NO: 446428 - RNA, 21 nt, Human
acaagcgccaacaauaaacag

SEQ ID NO: 446429 - RNA, 27 nt, Human
acacaacuucuaaacagcgcacaaaaa

SEQ ID NO: 446430 - RNA, 27 nt, Human
accauccuacucagcuaucuucaggaa

SEQ ID NO: 446431 - RNA, 21 nt, Human
aguauccucucaaacgccucc

SEQ ID NO: 446432 - RNA, 22 nt, Human
agugcuggucuacaaaucuugc

SEQ ID NO: 446433 - RNA, 26 nt, Human
caaaaaaaaaaaaaacccaaaaaugc

SEQ ID NO: 446434 - RNA, 22 nt, Human
caaaaagaugaguauccucuca

SEQ ID NO: 446435 - RNA, 20 nt, Human
caagauuucaaagccucaua

SEQ ID NO: 446436 - RNA, 21 nt, Human
caaguuuuaagccugacuccu

SEQ ID NO: 446437 - RNA, 23 nt, Human
cacacaacuucuaaacagcgcac

SEQ ID NO: 446438 - RNA, 19 nt, Human
caccgcgccucccaagucc

SEQ ID NO: 446439 - RNA, 23 nt, Human
caccuuuuuguuugcuguuguuu

SEQ ID NO: 446440 - RNA, 23 nt, Human
caggaauuuucucucugaaacgc

SEQ ID NO: 446441 - RNA, 25 nt, Human
caguuuaaaaaaugcaacaaaaguu

SEQ ID NO: 446442 - RNA, 23 nt, Human
ccauguauucacuucucaucacu

SEQ ID NO: 446443 - RNA, 20 nt, Human
cccuccaacaaguuuuaagc

SEQ ID NO: 446444 - RNA, 24 nt, Human
cgccaacaauaaacaggucagauc

SEQ ID NO: 446445 - RNA, 21 nt, Human
cucuaaagcuuggguaagugg

SEQ ID NO: 446446 - RNA, 19 nt, Human
cuucaggaaggcaagauuu

SEQ ID NO: 446447 - RNA, 20 nt, Human
cuuucugcuacuauucuuuc

SEQ ID NO: 446448 - RNA, 21 nt, Human
gcuuggguaaguggcaucuuc

SEQ ID NO: 446449 - RNA, 24 nt, Human
gguauacaugacuuuggcugugca

SEQ ID NO: 446450 - RNA, 24 nt, Human
uaacaaaaaaaaaaaaaacccaaa

SEQ ID NO: 446451 - RNA, 22 nt, Human
uaacuuaauuccagacagcuuu

SEQ ID NO: 446452 - RNA, 24 nt, Human
uaaggucacagugccaguuccccc

SEQ ID NO: 446453 - RNA, 24 nt, Human
uacaugccgaaccuaaggucagga

SEQ ID NO: 446454 - RNA, 23 nt, Human
uaccacuuuuuaaugacaaucac

SEQ ID NO: 446455 - RNA, 18 nt, Human
uacucagcuaucuucagg

SEQ ID NO: 446456 - RNA, 23 nt, Human
uauaacaaaaaaaaaaaaaaccc

SEQ ID NO: 446457 - RNA, 27 nt, Human
uaucaacgauggcaaaaaaucacacaa

SEQ ID NO: 446458 - RNA, 23 nt, Human
uaugacaucaaaccaagacaccu

SEQ ID NO: 446459 - RNA, 30 nt, Human
uauucacuucucaucacuuggucuacaugg

SEQ ID NO: 446460 - RNA, 22 nt, Human
ucaacccaaaauaauaguccuu

SEQ ID NO: 446461 - RNA, 20 nt, Human
ucaccgcgccucccaagucc

SEQ ID NO: 446462 - RNA, 18 nt, Human
ucaugggaaagaaagcuc

SEQ ID NO: 446463 - RNA, 22 nt, Human
uccucuagcucauuuguaucuc

SEQ ID NO: 446464 - RNA, 22 nt, Human
uccucuagcucauuuguaucuc

SEQ ID NO: 446465 - RNA, 18 nt, Human
ucuaaacagcgcacaaaa

SEQ ID NO: 446466 - RNA, 22 nt, Human
ucucaaacgccuccuaagccuc

SEQ ID NO: 446467 - RNA, 18 nt, Human
ucucuuggaacaggaauu

SEQ ID NO: 446468 - RNA, 18 nt, Human
ucuguauuuuaugggaaa

SEQ ID NO: 446469 - RNA, 27 nt, Human
ugaaauaaaccaacagauuaucagaug

SEQ ID NO: 446470 - RNA, 24 nt, Human
ugaagaacagaaccaucagacuga

SEQ ID NO: 446471 - RNA, 23 nt, Human
ugaauaaaaaucgacauuuuuuu

SEQ ID NO: 446472 - RNA, 19 nt, Human
ugacuccucaccgcgccuc

SEQ ID NO: 446473 - RNA, 22 nt, Human
ugaguauccucucaaacgccuc

SEQ ID NO: 446474 - RNA, 19 nt, Human
ugccgaaccuaaggucagg

SEQ ID NO: 446475 - RNA, 18 nt, Human
uggagcuucaacccaaaa

SEQ ID NO: 446476 - RNA, 23 nt, Human
uggcaaaaaaucacacaacuucu

SEQ ID NO: 446477 - RNA, 18 nt, Human
ugguauacaugacuuugg

SEQ ID NO: 446478 - RNA, 18 nt, Human
uuauguugguaaaauguc

SEQ ID NO: 446479 - RNA, 24 nt, Human
uucuucucugaaagaaucucuaaa

SEQ ID NO: 446480 - RNA, 28 nt, Human
uuguuuuuuacacuagauuccuuugucu

SEQ ID NO: 446481 - RNA, 22 nt, Human
uuuagcaaugacacucuagaaa

SEQ ID NO: 446482 - RNA, 21 nt, Human
uuucugcuacuauucuuuccu

SEQ ID NO: 446483 - RNA, 19 nt, Human
uuuguagugcuggucuaca

SEQ ID NO: 446484 - RNA, 20 nt, Human
aaaaaaauucccagacccuc

SEQ ID NO: 446485 - RNA, 19 nt, Human
aaauacaaaaauuagccgg

SEQ ID NO: 446486 - RNA, 20 nt, Human
aacauggugaaacccugucu

SEQ ID NO: 446487 - RNA, 21 nt, Human
aacauggugaaacccugucuc

SEQ ID NO: 446488 - RNA, 21 nt, Human
aagcagcuugcgacuucuggu

SEQ ID NO: 446489 - RNA, 24 nt, Human
aaucgcuugaacccaggaggugga

SEQ ID NO: 446490 - RNA, 24 nt, Human
acagaaugagacucugucccaaaa

SEQ ID NO: 446491 - RNA, 25 nt, Human
acccucggccccagaccuucccaaa

SEQ ID NO: 446492 - RNA, 24 nt, Human
acccugucucuacuaaaaauacaa

SEQ ID NO: 446493 - RNA, 23 nt, Human
accguagaccaucaugaggccug

SEQ ID NO: 446494 - RNA, 18 nt, Human
accugggcccccgggccc

SEQ ID NO: 446495 - RNA, 28 nt, Human
acucugucccaaaaaaaaaaaaaaaaaa

SEQ ID NO: 446496 - RNA, 18 nt, Human
acugcacucuagccugag

SEQ ID NO: 446497 - RNA, 24 nt, Human
acugcacucuagccugagugacag

SEQ ID NO: 446498 - RNA, 18 nt, Human
acuggcuccugcacccac

SEQ ID NO: 446499 - RNA, 22 nt, Human
agaaucgcuugaacccaggagg

SEQ ID NO: 446500 - RNA, 20 nt, Human
agacaccaugagcuggaggg

SEQ ID NO: 446501 - RNA, 20 nt, Human
agcacuuugggaggcuaagg

SEQ ID NO: 446502 - RNA, 24 nt, Human
agccaggaaaggagagaguuccag

SEQ ID NO: 446503 - RNA, 18 nt, Human
agccggacgugguggugu

SEQ ID NO: 446504 - RNA, 24 nt, Human
agccugagugacagaaugagacuc

SEQ ID NO: 446505 - RNA, 22 nt, Human
agccuggccaacauggugaaac

SEQ ID NO: 446506 - RNA, 24 nt, Human
agccuggccaacauggugaaaccc

SEQ ID NO: 446507 - RNA, 22 nt, Human
aggaaggaaggagcuggaggau

SEQ ID NO: 446508 - RNA, 19 nt, Human
aggaggcugaggcaagaga

SEQ ID NO: 446509 - RNA, 18 nt, Human
aggcaagagaaucgcuug

SEQ ID NO: 446510 - RNA, 24 nt, Human
aggcaagagaaucgcuugaaccca

SEQ ID NO: 446511 - RNA, 24 nt, Human
aggcggguggaucacgaggucagg

SEQ ID NO: 446512 - RNA, 21 nt, Human
aggcuaaggcggguggaucac

SEQ ID NO: 446513 - RNA, 24 nt, Human
aggcugaggcaagagaaucgcuug

SEQ ID NO: 446514 - RNA, 19 nt, Human
aggguacggcagggccuug

SEQ ID NO: 446515 - RNA, 24 nt, Human
agguggagcuugcagugagccaag

SEQ ID NO: 446516 - RNA, 24 nt, Human
aucaugccacugcacucuagccug

SEQ ID NO: 446517 - RNA, 23 nt, Human
auuuuuucugcccccugggcaca

SEQ ID NO: 446518 - RNA, 24 nt, Human
caacauggugaaacccugucucua

SEQ ID NO: 446519 - RNA, 21 nt, Human
caaccugacuucuuggaagcu

SEQ ID NO: 446520 - RNA, 24 nt, Human
caagaccagccuggccaacauggu

SEQ ID NO: 446521 - RNA, 24 nt, Human
caagaucaugccacugcacucuag

SEQ ID NO: 446522 - RNA, 23 nt, Human
cacagaaaacuugcucaugacca

SEQ ID NO: 446523 - RNA, 24 nt, Human
cacgccuguaaucccagcacuuug

SEQ ID NO: 446524 - RNA, 22 nt, Human
cacucuagccugagugacagaa

SEQ ID NO: 446525 - RNA, 19 nt, Human
cacugcacucuagccugag

SEQ ID NO: 446526 - RNA, 21 nt, Human
cacugcacucuagccugagug

SEQ ID NO: 446527 - RNA, 24 nt, Human
cacugcacucuagccugagugaca

SEQ ID NO: 446528 - RNA, 25 nt, Human
cacugcacucuagccugagugacag

SEQ ID NO: 446529 - RNA, 24 nt, Human
cagaaaacuugcucaugaccacac

SEQ ID NO: 446530 - RNA, 18 nt, Human
cagaaugagacucugucc

SEQ ID NO: 446531 - RNA, 23 nt, Human
cagacacuggcuccugcacccac

SEQ ID NO: 446532 - RNA, 18 nt, Human
cagagccccagccaggaa

SEQ ID NO: 446533 - RNA, 24 nt, Human
cagagccccagccaggaaaggaga

SEQ ID NO: 446534 - RNA, 24 nt, Human
cagcacuuugggaggcuaaggcgg

SEQ ID NO: 446535 - RNA, 29 nt, Human
caggagguggagcuugcagugacaacggu

SEQ ID NO: 446536 - RNA, 21 nt, Human
caggguacggcagggccuugg

SEQ ID NO: 446537 - RNA, 22 nt, Human
ccaaaaaaaaaaaaaaaaaaaa

SEQ ID NO: 446538 - RNA, 23 nt, Human
ccaaaaaaaaaaaaaaaaaaaaa

SEQ ID NO: 446539 - RNA, 23 nt, Human
ccaagagucuagccgcaggcccc

SEQ ID NO: 446540 - RNA, 22 nt, Human
ccacagaaaacuugcucaugac

SEQ ID NO: 446541 - RNA, 21 nt, Human
ccacaucaccaccauguccca

SEQ ID NO: 446542 - RNA, 22 nt, Human
ccacaucaccaccaugucccag

SEQ ID NO: 446543 - RNA, 20 nt, Human
ccacugcacucuagccugag

SEQ ID NO: 446544 - RNA, 20 nt, Human
ccacugcacucuagccugag

SEQ ID NO: 446545 - RNA, 21 nt, Human
ccacugcacucuagccugagu

SEQ ID NO: 446546 - RNA, 24 nt, Human
ccacugcacucuagccugagugac

SEQ ID NO: 446547 - RNA, 20 nt, Human
ccaggaaaggagagaguucc

SEQ ID NO: 446548 - RNA, 21 nt, Human
cccacaucaccaccauguccc

SEQ ID NO: 446549 - RNA, 18 nt, Human
ccccagacaccaugagcu

SEQ ID NO: 446550 - RNA, 21 nt, Human
ccccagcacugggccaggggg

SEQ ID NO: 446551 - RNA, 21 nt, Human
cccccugggcacaugugccca

SEQ ID NO: 446552 - RNA, 20 nt, Human
ccccugggcacaugugccca

SEQ ID NO: 446553 - RNA, 24 nt, Human
ccccugggcacaugugcccagcuc

SEQ ID NO: 446554 - RNA, 21 nt, Human
cccucggccccagaccuuccc

SEQ ID NO: 446555 - RNA, 24 nt, Human
cccucggccccagaccuucccaaa

SEQ ID NO: 446556 - RNA, 18 nt, Human
cccucgguggccuccgug

SEQ ID NO: 446557 - RNA, 20 nt, Human
ccuccugauaggcccagccc

SEQ ID NO: 446558 - RNA, 22 nt, Human
ccugcacccacaucaccaccau

SEQ ID NO: 446559 - RNA, 27 nt, Human
ccugcacccacaucaccaccauguccc

SEQ ID NO: 446560 - RNA, 22 nt, Human
ccuggccaacauggugaaaccc

SEQ ID NO: 446561 - RNA, 24 nt, Human
ccuggccaacauggugaaacccug

SEQ ID NO: 446562 - RNA, 23 nt, Human
ccugggcccccgggcccugucag

SEQ ID NO: 446563 - RNA, 22 nt, Human
ccugggguucuucgagaacaag

SEQ ID NO: 446564 - RNA, 22 nt, Human
ccuguaaucccagcacuuuggg

SEQ ID NO: 446565 - RNA, 24 nt, Human
ccuguccugccgcaguggggggaa

SEQ ID NO: 446566 - RNA, 19 nt, Human
cgacuccuaggcgcccucc

SEQ ID NO: 446567 - RNA, 24 nt, Human
cgcauguagucccagcuacucagg

SEQ ID NO: 446568 - RNA, 23 nt, Human
cgccuguaaucccagcacuuugg

SEQ ID NO: 446569 - RNA, 23 nt, Human
cggcaccugggcccccgggcccu

SEQ ID NO: 446570 - RNA, 19 nt, Human
cgggagcccagggaggcag

SEQ ID NO: 446571 - RNA, 21 nt, Human
cuagccgcaggccccagacac

SEQ ID NO: 446572 - RNA, 22 nt, Human
cucacgccuguaaucccagcac

SEQ ID NO: 446573 - RNA, 24 nt, Human
cucacgccuguaaucccagcacuu

SEQ ID NO: 446574 - RNA, 21 nt, Human
cuccagagccaagcagcuugc

SEQ ID NO: 446575 - RNA, 19 nt, Human
cucugucccaaaaaaaaaa

SEQ ID NO: 446576 - RNA, 24 nt, Human
cucugucccaaaaaaaaaaaaaaa

SEQ ID NO: 446577 - RNA, 24 nt, Human
cuggccaacauggugaaacccugu

SEQ ID NO: 446578 - RNA, 18 nt, Human
cuggcuccugcacccaca

SEQ ID NO: 446579 - RNA, 24 nt, Human
cugggccgggcacgguggcucacg

SEQ ID NO: 446580 - RNA, 23 nt, Human
cugucccaaaaaaaaaaaaaaaa

SEQ ID NO: 446581 - RNA, 21 nt, Human
cuugcgacuucuggugggcac

SEQ ID NO: 446582 - RNA, 22 nt, Human
cuugggaaccuggguggguugg

SEQ ID NO: 446583 - RNA, 19 nt, Human
gaaacccugucucuacuaa

SEQ ID NO: 446584 - RNA, 18 nt, Human
gaacuccacaggcuggua

SEQ ID NO: 446585 - RNA, 23 nt, Human
gacagaaugagacucugucccaa

SEQ ID NO: 446586 - RNA, 18 nt, Human
gagcuugcagugagccaa

SEQ ID NO: 446587 - RNA, 22 nt, Human
gagcuugcagugagccaagauc

SEQ ID NO: 446588 - RNA, 22 nt, Human
gaucacgaggucaggaguucaa

SEQ ID NO: 446589 - RNA, 24 nt, Human
gaucacgaggucaggaguucaaga

SEQ ID NO: 446590 - RNA, 22 nt, Human
gcaagagaaucgcuugaaccca

SEQ ID NO: 446591 - RNA, 24 nt, Human
gcaccggaauccccugggaugcuu

SEQ ID NO: 446592 - RNA, 24 nt, Human
gccaacauggugaaacccugucuc

SEQ ID NO: 446593 - RNA, 20 nt, Human
gccaagaucaugccacugca

SEQ ID NO: 446594 - RNA, 20 nt, Human
gccacugcacucuagccuga

SEQ ID NO: 446595 - RNA, 21 nt, Human
gccacugcacucuagccugag

SEQ ID NO: 446596 - RNA, 21 nt, Human
gccaggaaaggagagaguucc

SEQ ID NO: 446597 - RNA, 18 nt, Human
gcccagggaggcagggac

SEQ ID NO: 446598 - RNA, 18 nt, Human
ggaaaggagagaguucca

SEQ ID NO: 446599 - RNA, 23 nt, Human
ggaaggagcuggaggauacagug

SEQ ID NO: 446600 - RNA, 23 nt, Human
ggagcuugaggacuaagugggcc

SEQ ID NO: 446601 - RNA, 20 nt, Human
ggagcuugcagugagccaag

SEQ ID NO: 446602 - RNA, 24 nt, Human
ggagcuugcagugagccaagauca

SEQ ID NO: 446603 - RNA, 23 nt, Human
ggcacgguggcucacgccuguaa

SEQ ID NO: 446604 - RNA, 19 nt, Human
ggccccagaccuucccaag

SEQ ID NO: 446605 - RNA, 21 nt, Human
gggaaggaaggaaggagcugg

SEQ ID NO: 446606 - RNA, 22 nt, Human
gggcgcccgcguggaacagugc

SEQ ID NO: 446607 - RNA, 19 nt, Human
ggggcugaggcaggagaua

SEQ ID NO: 446608 - RNA, 21 nt, Human
ggggggcugaggcaggagaua

SEQ ID NO: 446609 - RNA, 19 nt, Human
gggguggagaugggagggg

SEQ ID NO: 446610 - RNA, 24 nt, Human
gggguggagaugggaggggugggu

SEQ ID NO: 446611 - RNA, 23 nt, Human
gguggaucacgaggucaggaguu

SEQ ID NO: 446612 - RNA, 23 nt, Human
gguggcucacgccuguaauccca

SEQ ID NO: 446613 - RNA, 24 nt, Human
gguggcucacgccuguaaucccag

SEQ ID NO: 446614 - RNA, 22 nt, Human
gguggggguggcugugaugagg

SEQ ID NO: 446615 - RNA, 19 nt, Human
guaucuggcuguuggugac

SEQ ID NO: 446616 - RNA, 23 nt, Human
gucucgccuccugaacuccacag

SEQ ID NO: 446617 - RNA, 23 nt, Human
guggaucacgaggucaggaguuc

SEQ ID NO: 446618 - RNA, 18 nt, Human
gugggguggagaugggag

SEQ ID NO: 446619 - RNA, 21 nt, Human
uaaggagauggucagaugggu

SEQ ID NO: 446620 - RNA, 24 nt, Human
uaaggcggguggaucacgagguca

SEQ ID NO: 446621 - RNA, 24 nt, Human
uaccguagaccaucaugaggccug

SEQ ID NO: 446622 - RNA, 19 nt, Human
uagccgcaggccccagaca

SEQ ID NO: 446623 - RNA, 20 nt, Human
uagccggacgugguggugug

SEQ ID NO: 446624 - RNA, 24 nt, Human
ucaagcauaacuugagucugcacu

SEQ ID NO: 446625 - RNA, 21 nt, Human
ucacgaggucaggaguucaag

SEQ ID NO: 446626 - RNA, 24 nt, Human
ucacgaggucaggaguucaagacc

SEQ ID NO: 446627 - RNA, 23 nt, Human
ucaggcuguggccagauguggcc

SEQ ID NO: 446628 - RNA, 22 nt, Human
uccacagaaaacuugcucauga

SEQ ID NO: 446629 - RNA, 20 nt, Human
ucccaaaaaaaaaaaaaaaa

SEQ ID NO: 446630 - RNA, 24 nt, Human
ucccagacccucggccccagaccu

SEQ ID NO: 446631 - RNA, 25 nt, Human
ucccagacccucggccccagaccuu

SEQ ID NO: 446632 - RNA, 26 nt, Human
ucccagacccucggccccagaccuug

SEQ ID NO: 446633 - RNA, 20 nt, Human
ucccaggggcagccuggagg

SEQ ID NO: 446634 - RNA, 27 nt, Human
uccguguuccugggggaaggaaggaag

SEQ ID NO: 446635 - RNA, 24 nt, Human
ucuagccugagugacagaaugaga

SEQ ID NO: 446636 - RNA, 20 nt, Human
ucucagaaggcuucuuccuu

SEQ ID NO: 446637 - RNA, 23 nt, Human
ucucagaaggcuucuuccuuugg

SEQ ID NO: 446638 - RNA, 21 nt, Human
ucucuacuaaaaauacaaaaa

SEQ ID NO: 446639 - RNA, 23 nt, Human
ucugucccaaaaaaaaaaaaaaa

SEQ ID NO: 446640 - RNA, 19 nt, Human
ucuuaggcgacaccgacuc

SEQ ID NO: 446641 - RNA, 21 nt, Human
ugaaccaguucugagaaacug

SEQ ID NO: 446642 - RNA, 23 nt, Human
ugaagacaagucuuccauguggg

SEQ ID NO: 446643 - RNA, 24 nt, Human
ugaagacaagucuuccaugugggg

SEQ ID NO: 446644 - RNA, 25 nt, Human
ugacagaaugagacucugucccaaa

SEQ ID NO: 446645 - RNA, 21 nt, Human
ugagaaacugucccgcgugga

SEQ ID NO: 446646 - RNA, 20 nt, Human
ugaggcaagagaaucgcuug

SEQ ID NO: 446647 - RNA, 24 nt, Human
ugaggcaagagaaucgcuugaacc

SEQ ID NO: 446648 - RNA, 25 nt, Human
ugaggcaagagaaucgcuugaaccc

SEQ ID NO: 446649 - RNA, 18 nt, Human
ugaggcaggagauauggg

SEQ ID NO: 446650 - RNA, 21 nt, Human
ugaggcaggagauauggggaa

SEQ ID NO: 446651 - RNA, 21 nt, Human
ugccaggcugcagccuguguc

SEQ ID NO: 446652 - RNA, 21 nt, Human
ugcccagcucugcaaagacag

SEQ ID NO: 446653 - RNA, 18 nt, Human
ugcccggagcccgcagca

SEQ ID NO: 446654 - RNA, 19 nt, Human
ugcccggagcccgcagcac

SEQ ID NO: 446655 - RNA, 22 nt, Human
uggaucacgaggucaggaguuc

SEQ ID NO: 446656 - RNA, 21 nt, Human
uggcaggcuuggggcgcccgc

SEQ ID NO: 446657 - RNA, 22 nt, Human
uggcaggcuuggggcgcccgcg

SEQ ID NO: 446658 - RNA, 24 nt, Human
uggccaacauggugaaacccuguc

SEQ ID NO: 446659 - RNA, 22 nt, Human
uggccagauguggcccacaggc

SEQ ID NO: 446660 - RNA, 24 nt, Human
uggccagauguggcccacaggcug

SEQ ID NO: 446661 - RNA, 24 nt, Human
uggcucacgccuguaaucccagca

SEQ ID NO: 446662 - RNA, 20 nt, Human
ugggaggcuaaggcgggugg

SEQ ID NO: 446663 - RNA, 24 nt, Human
ugggaggcuaaggcggguggauca

SEQ ID NO: 446664 - RNA, 19 nt, Human
ugggaggggugggugccag

SEQ ID NO: 446665 - RNA, 19 nt, Human
ugggaggggugggugccag

SEQ ID NO: 446666 - RNA, 21 nt, Human
ugggcccccgggcccugucag

SEQ ID NO: 446667 - RNA, 19 nt, Human
ugggggaaggaaggaagga

SEQ ID NO: 446668 - RNA, 21 nt, Human
ugggguucuucgagaacaaga

SEQ ID NO: 446669 - RNA, 19 nt, Human
uggguggguuggggagggu

SEQ ID NO: 446670 - RNA, 18 nt, Human
ugguagaagcggggcuug

SEQ ID NO: 446671 - RNA, 18 nt, Human
ugguggggguggcuguga

SEQ ID NO: 446672 - RNA, 24 nt, Human
ugguggugugcgcauguaguccca

SEQ ID NO: 446673 - RNA, 24 nt, Human
uggugugcgcauguagucccagcu

SEQ ID NO: 446674 - RNA, 20 nt, Human
uguagucccagcuacucagg

SEQ ID NO: 446675 - RNA, 20 nt, Human
ugucucgccuccugaacucc

SEQ ID NO: 446676 - RNA, 20 nt, Human
uguggucagagccccagccc

SEQ ID NO: 446677 - RNA, 24 nt, Human
uuagccggacgugguggugugcgc

SEQ ID NO: 446678 - RNA, 19 nt, Human
uucccaaaggaggcucagg

SEQ ID NO: 446679 - RNA, 27 nt, Human
uucccaaaggaggcucagggauuaggu

SEQ ID NO: 446680 - RNA, 20 nt, Human
uugcagugagccaagaucau

SEQ ID NO: 446681 - RNA, 25 nt, Human
uugggaggcuaaggcggguggauca

SEQ ID NO: 446682 - RNA, 19 nt, Human
uuguggucagagccccagc

SEQ ID NO: 446683 - RNA, 21 nt, Human
uuuuaaaaguccugggccggg

SEQ ID NO: 446684 - RNA, 18 nt, Human
uuuuuuuuuuuuuuuuug

SEQ ID NO: 446685 - RNA, 23 nt, Human
aaaaauucaagucacacaaaacu

SEQ ID NO: 446686 - RNA, 20 nt, Human
aaaagaacaaauuugcugca

SEQ ID NO: 446687 - RNA, 21 nt, Human
aaacucagauccaccuggaau

SEQ ID NO: 446688 - RNA, 22 nt, Human
aaagaagccaguuccauccagg

SEQ ID NO: 446689 - RNA, 18 nt, Human
aaagcgguccccuucuuc

SEQ ID NO: 446690 - RNA, 20 nt, Human
aaagguuuucaggaagcgcc

SEQ ID NO: 446691 - RNA, 22 nt, Human
aaauuugcugcacacugaugcc

SEQ ID NO: 446692 - RNA, 18 nt, Human
aacuguauuuuuaugaug

SEQ ID NO: 446693 - RNA, 20 nt, Human
aaugaugaaaccagcccaaa

SEQ ID NO: 446694 - RNA, 20 nt, Human
agaaaaaaaaaacuuuuggg

SEQ ID NO: 446695 - RNA, 19 nt, Human
agacuuaaaaacaaaggcg

SEQ ID NO: 446696 - RNA, 19 nt, Human
agacuuaaaaacaaaggcg

SEQ ID NO: 446697 - RNA, 20 nt, Human
agggaauaaagguuuucagg

SEQ ID NO: 446698 - RNA, 22 nt, Human
aguccacauuggacguggcggg

SEQ ID NO: 446699 - RNA, 23 nt, Human
auauauguucuucuggcuguagu

SEQ ID NO: 446700 - RNA, 19 nt, Human
augaaaccagcccaaauga

SEQ ID NO: 446701 - RNA, 28 nt, Human
caaaacucaaaaacuguauuaaaaguuu

SEQ ID NO: 446702 - RNA, 21 nt, Human
caaaaugaugaaaccagccca

SEQ ID NO: 446703 - RNA, 18 nt, Human
caaaugacaaagaaggga

SEQ ID NO: 446704 - RNA, 21 nt, Human
caagucacacaaaacucaaaa

SEQ ID NO: 446705 - RNA, 22 nt, Human
caccacacacccgaaggggaag

SEQ ID NO: 446706 - RNA, 20 nt, Human
cagacaacgugccagggaau

SEQ ID NO: 446707 - RNA, 20 nt, Human
caggaagcgccuucaaaugc

SEQ ID NO: 446708 - RNA, 21 nt, Human
ccaacuguauuuuuaugauga

SEQ ID NO: 446709 - RNA, 19 nt, Human
ccagcccaaaugaaggggg

SEQ ID NO: 446710 - RNA, 22 nt, Human
cccaaaugaagggggggggggg

SEQ ID NO: 446711 - RNA, 24 nt, Human
cccagugccacuccugaguccugg

SEQ ID NO: 446712 - RNA, 21 nt, Human
ccccuucuucccagugccacu

SEQ ID NO: 446713 - RNA, 23 nt, Human
ccccuucuucccagugccacucc

SEQ ID NO: 446714 - RNA, 20 nt, Human
ccuggaaugacuaaagaaaa

SEQ ID NO: 446715 - RNA, 20 nt, Human
cgaguggauccgcacggggc

SEQ ID NO: 446716 - RNA, 24 nt, Human
gaaaaaaaaaacuuuugggggaag

SEQ ID NO: 446717 - RNA, 18 nt, Human
gcaaaaugaugaaaccag

SEQ ID NO: 446718 - RNA, 23 nt, Human
gcacuuuuguuagugaugaaacc

SEQ ID NO: 446719 - RNA, 25 nt, Human
gcauaauaacaauucugauacaaga

SEQ ID NO: 446720 - RNA, 19 nt, Human
gcuagaguggacauacccc

SEQ ID NO: 446721 - RNA, 20 nt, Human
gcuccgaggaggggcagggc

SEQ ID NO: 446722 - RNA, 22 nt, Human
gcugauuucucgugacuucaac

SEQ ID NO: 446723 - RNA, 18 nt, Human
ggaaugacuaaagaaaaa

SEQ ID NO: 446724 - RNA, 24 nt, Human
gggcccccugcauaauaacaauuc

SEQ ID NO: 446725 - RNA, 21 nt, Human
guaguaaguugcaacaaauac

SEQ ID NO: 446726 - RNA, 20 nt, Human
uaaaacugguaaauguaaug

SEQ ID NO: 446727 - RNA, 19 nt, Human
uaaagaaaaaaaaaacuuu

SEQ ID NO: 446728 - RNA, 19 nt, Human
uaaagguuuucaggaagcg

SEQ ID NO: 446729 - RNA, 21 nt, Human
uaaauauauauauauauauau

SEQ ID NO: 446730 - RNA, 23 nt, Human
uaccuugcucauuuguauacaac

SEQ ID NO: 446731 - RNA, 26 nt, Human
uauauauauguucuucuggcuguagu

SEQ ID NO: 446732 - RNA, 27 nt, Human
uauauuuuuaaauauauauauauauau

SEQ ID NO: 446733 - RNA, 27 nt, Human
uauuuuuaaauauauauauauauauau

SEQ ID NO: 446734 - RNA, 21 nt, Human
ucagcuccuagagagauccag

SEQ ID NO: 446735 - RNA, 21 nt, Human
uccacaagcaggcuccgagga

SEQ ID NO: 446736 - RNA, 18 nt, Human
uccugaguccuggaaaaa

SEQ ID NO: 446737 - RNA, 20 nt, Human
uccugaguccuggaaaaauc

SEQ ID NO: 446738 - RNA, 20 nt, Human
ugaaacagacaacgugccag

SEQ ID NO: 446739 - RNA, 22 nt, Human
ugaaacagacaacgugccaggg

SEQ ID NO: 446740 - RNA, 24 nt, Human
ugaaacagacaacgugccagggaa

SEQ ID NO: 446741 - RNA, 20 nt, Human
ugaagguucgagugucagcu

SEQ ID NO: 446742 - RNA, 25 nt, Human
ugcagaauuauauucuucucgauaa

SEQ ID NO: 446743 - RNA, 21 nt, Human
ugcugcacacugaugccagcg

SEQ ID NO: 446744 - RNA, 20 nt, Human
uggaaaaauccgaauggguc

SEQ ID NO: 446745 - RNA, 23 nt, Human
uggaaugacuaaagaaaaaaaaa

SEQ ID NO: 446746 - RNA, 19 nt, Human
uggacguggcggggaaugc

SEQ ID NO: 446747 - RNA, 20 nt, Human
uuaaauauauauauauauau

SEQ ID NO: 446748 - RNA, 19 nt, Human
uucaggaagcgccuucaaa

SEQ ID NO: 446749 - RNA, 21 nt, Human
uugcagaaagcgguccccuuc

SEQ ID NO: 446750 - RNA, 24 nt, Human
uuguuagugaugaaaccaaaagaa

SEQ ID NO: 446751 - RNA, 21 nt, Human
uuucaaaugacaaagaaggga

SEQ ID NO: 446752 - RNA, 26 nt, Human
uuuuaaauauauauauauauauaugu

SEQ ID NO: 446753 - RNA, 23 nt, Human
aaacaaaguagaaccuagccaag

SEQ ID NO: 446754 - RNA, 19 nt, Human
aacacggugaaaccgucuc

SEQ ID NO: 446755 - RNA, 24 nt, Human
aacccuucucgcuccuccagcccc

SEQ ID NO: 446756 - RNA, 20 nt, Human
aaccuagagaauauguucua

SEQ ID NO: 446757 - RNA, 21 nt, Human
aaccuagagaauauguucuau

SEQ ID NO: 446758 - RNA, 19 nt, Human
aacuugcuccauucuuucu

SEQ ID NO: 446759 - RNA, 22 nt, Human
aauggcacuuugaauuucauga

SEQ ID NO: 446760 - RNA, 21 nt, Human
acagacacaaacguguuugug

SEQ ID NO: 446761 - RNA, 18 nt, Human
accccgucucacaggcug

SEQ ID NO: 446762 - RNA, 18 nt, Human
acccgcuucucuuagccc

SEQ ID NO: 446763 - RNA, 18 nt, Human
accucacucuuccuucac

SEQ ID NO: 446764 - RNA, 24 nt, Human
acugcacuccagccuggacgacag

SEQ ID NO: 446765 - RNA, 26 nt, Human
acugcacuccagccuggacgacagag

SEQ ID NO: 446766 - RNA, 20 nt, Human
agaaaagccaguucagguag

SEQ ID NO: 446767 - RNA, 21 nt, Human
agaaaccuuaucugacuugga

SEQ ID NO: 446768 - RNA, 24 nt, Human
agcacuuugggaggcugaggcggg

SEQ ID NO: 446769 - RNA, 25 nt, Human
agccguuagccucaucuuccgcccc

SEQ ID NO: 446770 - RNA, 21 nt, Human
aggaugcagguccugacccuc

SEQ ID NO: 446771 - RNA, 18 nt, Human
aggcacaacuugcuccau

SEQ ID NO: 446772 - RNA, 21 nt, Human
aggcaggaaaauggcaugaac

SEQ ID NO: 446773 - RNA, 24 nt, Human
aggcaggaaaauggcaugaaccca

SEQ ID NO: 446774 - RNA, 25 nt, Human
aggcaggaaaauggcaugaacccag

SEQ ID NO: 446775 - RNA, 27 nt, Human
aggcaggaaaauggcaugaacccagga

SEQ ID NO: 446776 - RNA, 24 nt, Human
aggcgggcggaucacaaggucagg

SEQ ID NO: 446777 - RNA, 19 nt, Human
aggcugaggcgggcggauc

SEQ ID NO: 446778 - RNA, 21 nt, Human
aggcugaggcgggcggaucac

SEQ ID NO: 446779 - RNA, 23 nt, Human
aucaauuauuuccacaucauaau

SEQ ID NO: 446780 - RNA, 22 nt, Human
aucccggugcguucacugaagc

SEQ ID NO: 446781 - RNA, 18 nt, Human
augaaauuacucugcccc

SEQ ID NO: 446782 - RNA, 22 nt, Human
augcauuuuuaaaauuuaaaaa

SEQ ID NO: 446783 - RNA, 19 nt, Human
augccuguaaucccagcac

SEQ ID NO: 446784 - RNA, 24 nt, Human
auugcgccacugcacuccagccug

SEQ ID NO: 446785 - RNA, 25 nt, Human
caaauaaaaauagaguuuuaggaug

SEQ ID NO: 446786 - RNA, 19 nt, Human
caagguacaccuacuggca

SEQ ID NO: 446787 - RNA, 21 nt, Human
caauuagaaaugccauaaaca

SEQ ID NO: 446788 - RNA, 18 nt, Human
caccacgggggggucaca

SEQ ID NO: 446789 - RNA, 22 nt, Human
caccacgggggggucacacccg

SEQ ID NO: 446790 - RNA, 18 nt, Human
cacccagagccaccacgg

SEQ ID NO: 446791 - RNA, 21 nt, Human
caccuguagucccagcuacuc

SEQ ID NO: 446792 - RNA, 24 nt, Human
caccuguagucccagcuacucggg

SEQ ID NO: 446793 - RNA, 18 nt, Human
cacugcacuccagccugg

SEQ ID NO: 446794 - RNA, 19 nt, Human
cacugcacuccagccugga

SEQ ID NO: 446795 - RNA, 20 nt, Human
cacugcacuccagccuggac

SEQ ID NO: 446796 - RNA, 22 nt, Human
cacugcacuccagccuggacga

SEQ ID NO: 446797 - RNA, 24 nt, Human
cacugcacuccagccuggacgaca

SEQ ID NO: 446798 - RNA, 22 nt, Human
cagcacuuugggaggcugaggc

SEQ ID NO: 446799 - RNA, 24 nt, Human
cagcacuuugggaggcugaggcgg

SEQ ID NO: 446800 - RNA, 24 nt, Human
cagccuggacgacagagucagaaa

SEQ ID NO: 446801 - RNA, 24 nt, Human
cagcuacucgggaggcugaggcag

SEQ ID NO: 446802 - RNA, 20 nt, Human
cauccugcaagucauaccaa

SEQ ID NO: 446803 - RNA, 24 nt, Human
caugccuguaaucccagcacuuug

SEQ ID NO: 446804 - RNA, 20 nt, Human
cauucuaacaaccaaucuga

SEQ ID NO: 446805 - RNA, 19 nt, Human
ccacugcacuccagccugg

SEQ ID NO: 446806 - RNA, 19 nt, Human
ccacugcacuccagccugg

SEQ ID NO: 446807 - RNA, 20 nt, Human
ccacugcacuccagccugga

SEQ ID NO: 446808 - RNA, 21 nt, Human
ccacugcacuccagccuggac

SEQ ID NO: 446809 - RNA, 24 nt, Human
ccacugcacuccagccuggacgac

SEQ ID NO: 446810 - RNA, 21 nt, Human
cccaucagccugccucuaccu

SEQ ID NO: 446811 - RNA, 19 nt, Human
ccccaaauaaaaauagagu

SEQ ID NO: 446812 - RNA, 22 nt, Human
ccccagcuccuccgcagacacc

SEQ ID NO: 446813 - RNA, 19 nt, Human
cccccagcuccuccgcaga

SEQ ID NO: 446814 - RNA, 24 nt, Human
ccccgcccuagccuggccgccgga

SEQ ID NO: 446815 - RNA, 21 nt, Human
cccggugcccgcccgggcugg

SEQ ID NO: 446816 - RNA, 21 nt, Human
cccuuugauccagccacaccu

SEQ ID NO: 446817 - RNA, 18 nt, Human
ccucaucuuccgccccca

SEQ ID NO: 446818 - RNA, 22 nt, Human
ccucccggccugcacaucccgg

SEQ ID NO: 446819 - RNA, 20 nt, Human
ccuccgcagacacccagagc

SEQ ID NO: 446820 - RNA, 21 nt, Human
ccuggcuaacacggugaaacc

SEQ ID NO: 446821 - RNA, 22 nt, Human
ccuggcuaacacggugaaaccg

SEQ ID NO: 446822 - RNA, 21 nt, Human
ccuguagucccagcuacucgg

SEQ ID NO: 446823 - RNA, 21 nt, Human
ccuuaaccauuguucuuaguu

SEQ ID NO: 446824 - RNA, 23 nt, Human
ccuucucgcuccuccagccccag

SEQ ID NO: 446825 - RNA, 24 nt, Human
cgagaccauccuggcuaacacggu

SEQ ID NO: 446826 - RNA, 26 nt, Human
cgccacugcacuccagccuggacgac

SEQ ID NO: 446827 - RNA, 21 nt, Human
cgggcaccuguagucccagcu

SEQ ID NO: 446828 - RNA, 21 nt, Human
cuaaucugcuccaacaucuaa

SEQ ID NO: 446829 - RNA, 23 nt, Human
cucaugccuguaaucccagcacu

SEQ ID NO: 446830 - RNA, 24 nt, Human
cucaugccuguaaucccagcacuu

SEQ ID NO: 446831 - RNA, 19 nt, Human
cucccggccugcacauccc

SEQ ID NO: 446832 - RNA, 23 nt, Human
cucguucgccaccaagucuucca

SEQ ID NO: 446833 - RNA, 21 nt, Human
cugcggccccgacccccggcc

SEQ ID NO: 446834 - RNA, 25 nt, Human
cuggccgccggaccagccggcugcu

SEQ ID NO: 446835 - RNA, 18 nt, Human
cuggcuaacacggugaaa

SEQ ID NO: 446836 - RNA, 19 nt, Human
cuuccgcccccagcuccuc

SEQ ID NO: 446837 - RNA, 21 nt, Human
cuuugaauuucaugagagccu

SEQ ID NO: 446838 - RNA, 21 nt, Human
cuuugaauuucaugagagccu

SEQ ID NO: 446839 - RNA, 18 nt, Human
gaaguggagcuugcagug

SEQ ID NO: 446840 - RNA, 25 nt, Human
gacaauaaacauuaauauaauucca

SEQ ID NO: 446841 - RNA, 23 nt, Human
gagauugcgccacugcacuccag

SEQ ID NO: 446842 - RNA, 21 nt, Human
gaguuuuaggaugcuauugaa

SEQ ID NO: 446843 - RNA, 24 nt, Human
gcacuccagccuggacgacagagu

SEQ ID NO: 446844 - RNA, 22 nt, Human
gcaggaaaauggcaugaaccca

SEQ ID NO: 446845 - RNA, 27 nt, Human
gcccccgcccuagccuggccgccggac

SEQ ID NO: 446846 - RNA, 18 nt, Human
gcuccuccgcagacaccc

SEQ ID NO: 446847 - RNA, 19 nt, Human
ggcaccuguagucccagcu

SEQ ID NO: 446848 - RNA, 21 nt, Human
ggcggaucacaaggucaggag

SEQ ID NO: 446849 - RNA, 21 nt, Human
ggcgggcaccuguagucccag

SEQ ID NO: 446850 - RNA, 22 nt, Human
ggcgugguggcgggcaccugua

SEQ ID NO: 446851 - RNA, 23 nt, Human
ggcgugguggcucaugccuguaa

SEQ ID NO: 446852 - RNA, 24 nt, Human
gguggcucaugccuguaaucccag

SEQ ID NO: 446853 - RNA, 24 nt, Human
uaaaaauuguuuaaagcagacaac

SEQ ID NO: 446854 - RNA, 24 nt, Human
uaaacaugacauucuaacaaccaa

SEQ ID NO: 446855 - RNA, 19 nt, Human
uaacacggugaaaccgucu

SEQ ID NO: 446856 - RNA, 22 nt, Human
uaacacggugaaaccgucucua

SEQ ID NO: 446857 - RNA, 19 nt, Human
uaacucucugaggcaggau

SEQ ID NO: 446858 - RNA, 26 nt, Human
uaauugccaaaucuauauuggacaga

SEQ ID NO: 446859 - RNA, 24 nt, Human
uacacacaggacaaaaucaucaua

SEQ ID NO: 446860 - RNA, 20 nt, Human
uacaguuaaaccccuaggac

SEQ ID NO: 446861 - RNA, 22 nt, Human
uagccgccgucaccccgucuca

SEQ ID NO: 446862 - RNA, 19 nt, Human
uagccgggcgugguggcuc

SEQ ID NO: 446863 - RNA, 24 nt, Human
uagccgggcgugguggcucaugcc

SEQ ID NO: 446864 - RNA, 21 nt, Human
uagccucaucuuccgccccca

SEQ ID NO: 446865 - RNA, 20 nt, Human
uaggaugcuauugaaggaaa

SEQ ID NO: 446866 - RNA, 21 nt, Human
uauaagaaaucaccuugguua

SEQ ID NO: 446867 - RNA, 23 nt, Human
uaucuuuaaugucuaugcuaaau

SEQ ID NO: 446868 - RNA, 19 nt, Human
ucaagucauuuuccagaga

SEQ ID NO: 446869 - RNA, 18 nt, Human
ucacaaggucaggagauc

SEQ ID NO: 446870 - RNA, 24 nt, Human
ucacaaggucaggagaucgagacc

SEQ ID NO: 446871 - RNA, 18 nt, Human
ucacacaaaaauauguca

SEQ ID NO: 446872 - RNA, 22 nt, Human
ucacauccacuuacacagaccc

SEQ ID NO: 446873 - RNA, 18 nt, Human
uccaaaccuuacuguccc

SEQ ID NO: 446874 - RNA, 23 nt, Human
uccaaaccuuacuguccccgucu

SEQ ID NO: 446875 - RNA, 23 nt, Human
uccaacgaucccccuuccuccaa

SEQ ID NO: 446876 - RNA, 27 nt, Human
uccaacgaucccccuuccuccaaaccu

SEQ ID NO: 446877 - RNA, 24 nt, Human
uccagccuggacgacagagucaga

SEQ ID NO: 446878 - RNA, 18 nt, Human
ucccggugcccgcccggg

SEQ ID NO: 446879 - RNA, 22 nt, Human
ucuaaucugcuccaacaucuaa

SEQ ID NO: 446880 - RNA, 24 nt, Human
ucuagccgggcgugguggcucaug

SEQ ID NO: 446881 - RNA, 21 nt, Human
ucuauugccagauucucucca

SEQ ID NO: 446882 - RNA, 19 nt, Human
ucuccacuucuugcuacuu

SEQ ID NO: 446883 - RNA, 24 nt, Human
ucucuacuaaaaauacaaaaaauu

SEQ ID NO: 446884 - RNA, 23 nt, Human
ucugaaaaacuaccuuuaguggg

SEQ ID NO: 446885 - RNA, 21 nt, Human
ucugacuuggaggaaauaggc

SEQ ID NO: 446886 - RNA, 22 nt, Human
ucuucaaauucaacauuucauc

SEQ ID NO: 446887 - RNA, 22 nt, Human
ugaagaaaacccuucucgcucc

SEQ ID NO: 446888 - RNA, 22 nt, Human
ugaagccaagccguuagccucc

SEQ ID NO: 446889 - RNA, 24 nt, Human
ugaaugcugcucuaaucugcucca

SEQ ID NO: 446890 - RNA, 24 nt, Human
ugaggcaggaaaauggcaugaacc

SEQ ID NO: 446891 - RNA, 19 nt, Human
ugaggcaggaugcaggucc

SEQ ID NO: 446892 - RNA, 23 nt, Human
ugaggcaggaugcagguccugac

SEQ ID NO: 446893 - RNA, 24 nt, Human
ugaggcgggcggaucacaagguca

SEQ ID NO: 446894 - RNA, 25 nt, Human
ugaggcgggcggaucacaaggucag

SEQ ID NO: 446895 - RNA, 23 nt, Human
ugccuguaaucccagcacuuugg

SEQ ID NO: 446896 - RNA, 24 nt, Human
ugccuguaaucccagcacuuuggg

SEQ ID NO: 446897 - RNA, 20 nt, Human
uggaggaaauaggcacaacu

SEQ ID NO: 446898 - RNA, 20 nt, Human
uggcacuauaaaugaaauua

SEQ ID NO: 446899 - RNA, 18 nt, Human
uggcacuucugcggcccc

SEQ ID NO: 446900 - RNA, 22 nt, Human
uggcgggcaccuguagucccag

SEQ ID NO: 446901 - RNA, 22 nt, Human
uggcucaugccuguaaucccag

SEQ ID NO: 446902 - RNA, 24 nt, Human
uggcucaugccuguaaucccagca

SEQ ID NO: 446903 - RNA, 19 nt, Human
ugggaggcugaggcgggcg

SEQ ID NO: 446904 - RNA, 20 nt, Human
ugggaggcugaggcgggcgg

SEQ ID NO: 446905 - RNA, 24 nt, Human
ugggaggcugaggcgggcggauca

SEQ ID NO: 446906 - RNA, 24 nt, Human
ugguggcgggcaccuguaguccca

SEQ ID NO: 446907 - RNA, 24 nt, Human
ugguggcucaugccuguaauccca

SEQ ID NO: 446908 - RNA, 22 nt, Human
uguacagugaaaaaaaugaaac

SEQ ID NO: 446909 - RNA, 21 nt, Human
uuaagaaaaacaaagaaguaa

SEQ ID NO: 446910 - RNA, 22 nt, Human
uuaaugcauuuuuaaaauuuaa

SEQ ID NO: 446911 - RNA, 18 nt, Human
uuagcugggcgugguggc

SEQ ID NO: 446912 - RNA, 24 nt, Human
uuagcugggcgugguggcgggcac

SEQ ID NO: 446913 - RNA, 18 nt, Human
uuccacggcuuuuccuug

SEQ ID NO: 446914 - RNA, 24 nt, Human
uucccuugauggauauaaaaagac

SEQ ID NO: 446915 - RNA, 26 nt, Human
uuccuugauccucacucacauccacu

SEQ ID NO: 446916 - RNA, 18 nt, Human
uucucuccacuucuugcu

SEQ ID NO: 446917 - RNA, 27 nt, Human
uucucuccacuucuugcuacuuccaac

SEQ ID NO: 446918 - RNA, 19 nt, Human
uucuuaguucgagugaaca

SEQ ID NO: 446919 - RNA, 23 nt, Human
uugcgccacugcacuccagccug

SEQ ID NO: 446920 - RNA, 22 nt, Human
uugcuccauucuuucuaucaca

SEQ ID NO: 446921 - RNA, 25 nt, Human
uugggaggcugaggcgggcggauca

SEQ ID NO: 446922 - RNA, 21 nt, Human
uuuggcaaggacaauaaacau

SEQ ID NO: 446923 - RNA, 21 nt, Human
acaaagcugcagaagagggcu

SEQ ID NO: 446924 - RNA, 20 nt, Human
acagggugaagugcaggcac

SEQ ID NO: 446925 - RNA, 18 nt, Human
aggcaggauguggagcgg

SEQ ID NO: 446926 - RNA, 19 nt, Human
cacccagcagccacugauc

SEQ ID NO: 446927 - RNA, 24 nt, Human
cagggcuggagagaagcaaggggg

SEQ ID NO: 446928 - RNA, 20 nt, Human
cagggugaagugcaggcacc

SEQ ID NO: 446929 - RNA, 18 nt, Human
caucuccagcagcggcac

SEQ ID NO: 446930 - RNA, 20 nt, Human
ccaaaaggggccugggccaa

SEQ ID NO: 446931 - RNA, 21 nt, Human
ccccagcauccuuccucagcu

SEQ ID NO: 446932 - RNA, 26 nt, Human
ccccagcauccuuccucagcugccuc

SEQ ID NO: 446933 - RNA, 21 nt, Human
ccugggccagggcugaggggc

SEQ ID NO: 446934 - RNA, 19 nt, Human
cugcacagggugaagugca

SEQ ID NO: 446935 - RNA, 20 nt, Human
cugggccagggcugaggggc

SEQ ID NO: 446936 - RNA, 21 nt, Human
cugugugcacggccccauccc

SEQ ID NO: 446937 - RNA, 21 nt, Human
cuugcuggacagggcuggaga

SEQ ID NO: 446938 - RNA, 19 nt, Human
gagaagcaagggggcuggg

SEQ ID NO: 446939 - RNA, 22 nt, Human
gagaagcaagggggcuggggag

SEQ ID NO: 446940 - RNA, 19 nt, Human
gcagaagagggcuuucccc

SEQ ID NO: 446941 - RNA, 26 nt, Human
gcauccuuccucagcugccuccaaaa

SEQ ID NO: 446942 - RNA, 21 nt, Human
gccccaucccaccucucugca

SEQ ID NO: 446943 - RNA, 19 nt, Human
gccuuccacaaagcugcag

SEQ ID NO: 446944 - RNA, 28 nt, Human
gggcaggcaggauguggagcgggcaucc

SEQ ID NO: 446945 - RNA, 21 nt, Human
gggcuggggagaguggccggu

SEQ ID NO: 446946 - RNA, 20 nt, Human
guggagcgggcaucccugug

SEQ ID NO: 446947 - RNA, 21 nt, Human
ucccugugugcacggccccau

SEQ ID NO: 446948 - RNA, 22 nt, Human
uccuuccucagcugccuccaaa

SEQ ID NO: 446949 - RNA, 20 nt, Human
ugaggggcaggcaggaugug

SEQ ID NO: 446950 - RNA, 24 nt, Human
uggacagggcuggagagaagcaag

SEQ ID NO: 446951 - RNA, 21 nt, Human
uggagagaagcaagggggcug

SEQ ID NO: 446952 - RNA, 23 nt, Human
uggagagaagcaagggggcuggg

SEQ ID NO: 446953 - RNA, 22 nt, Human
uuccccagcauccuuccucagc

SEQ ID NO: 446954 - RNA, 21 nt, Human
aaaaacaacaacaauaacaac

SEQ ID NO: 446955 - RNA, 23 nt, Human
aaaaucagccagaaagcaggcug

SEQ ID NO: 446956 - RNA, 21 nt, Human
aaaguuaugacagaaugaacu

SEQ ID NO: 446957 - RNA, 23 nt, Human
aaauaacaaaaucagccagaaag

SEQ ID NO: 446958 - RNA, 22 nt, Human
aacaaaaucagccagaaagcag

SEQ ID NO: 446959 - RNA, 23 nt, Human
aacaacaacaauaacaacaaaaa

SEQ ID NO: 446960 - RNA, 21 nt, Human
aacagcuuaaauaaacuggua

SEQ ID NO: 446961 - RNA, 19 nt, Human
aacauggagaaaccccauc

SEQ ID NO: 446962 - RNA, 20 nt, Human
aacauggagaaaccccaucu

SEQ ID NO: 446963 - RNA, 21 nt, Human
aacauggagaaaccccaucuc

SEQ ID NO: 446964 - RNA, 22 nt, Human
aagaauaugaauacaaauuugu

SEQ ID NO: 446965 - RNA, 26 nt, Human
aauaacaaaaucagccagaaagcagg

SEQ ID NO: 446966 - RNA, 20 nt, Human
aauauaaacacuccaaagag

SEQ ID NO: 446967 - RNA, 23 nt, Human
aaucgcuugaaccugggaggugg

SEQ ID NO: 446968 - RNA, 24 nt, Human
aauuuauaauauacauguacuuca

SEQ ID NO: 446969 - RNA, 22 nt, Human
aauuuguaauauaaacacucca

SEQ ID NO: 446970 - RNA, 25 nt, Human
acagagcaaaucaaacucuuaggaa

SEQ ID NO: 446971 - RNA, 24 nt, Human
accccaucucuacuaaaaauacaa

SEQ ID NO: 446972 - RNA, 21 nt, Human
acccugaaauuaugaaaggaa

SEQ ID NO: 446973 - RNA, 24 nt, Human
acccugaaauuaugaaaggaaaaa

SEQ ID NO: 446974 - RNA, 25 nt, Human
acuccagccugggcaacaagaguga

SEQ ID NO: 446975 - RNA, 19 nt, Human
acugguuaauugaaccaaa

SEQ ID NO: 446976 - RNA, 18 nt, Human
acugugagagaugaaaaa

SEQ ID NO: 446977 - RNA, 21 nt, Human
agaaagcaggcugaaaagcau

SEQ ID NO: 446978 - RNA, 22 nt, Human
agaaucgcuugaaccugggagg

SEQ ID NO: 446979 - RNA, 23 nt, Human
agaaugaacugaagacacgaaca

SEQ ID NO: 446980 - RNA, 24 nt, Human
agcacuuugggaggcugaggcagg

SEQ ID NO: 446981 - RNA, 22 nt, Human
agccaggcguagugacaaagcc

SEQ ID NO: 446982 - RNA, 23 nt, Human
agccuguaauuccagcuacuugg

SEQ ID NO: 446983 - RNA, 24 nt, Human
agccuguaauuccagcuacuuggg

SEQ ID NO: 446984 - RNA, 18 nt, Human
agcuuaaauaaacuggua

SEQ ID NO: 446985 - RNA, 20 nt, Human
aggaaaaaauuggcuuaaaa

SEQ ID NO: 446986 - RNA, 22 nt, Human
aggcaggagaaucgcuugaacc

SEQ ID NO: 446987 - RNA, 24 nt, Human
aggcaggagaaucgcuugaaccug

SEQ ID NO: 446988 - RNA, 18 nt, Human
aggcaggcggaucaccug

SEQ ID NO: 446989 - RNA, 21 nt, Human
aggcaggcggaucaccugagg

SEQ ID NO: 446990 - RNA, 22 nt, Human
aggcaggcggaucaccugaggu

SEQ ID NO: 446991 - RNA, 26 nt, Human
aggcaggcggaucaccugagguuggg

SEQ ID NO: 446992 - RNA, 18 nt, Human
aggcguagugacaaagcc

SEQ ID NO: 446993 - RNA, 23 nt, Human
aggcguagugacaaagccuguaa

SEQ ID NO: 446994 - RNA, 20 nt, Human
aggcugaggcaggagaaucg

SEQ ID NO: 446995 - RNA, 24 nt, Human
aggcugaggcaggagaaucgcuug

SEQ ID NO: 446996 - RNA, 21 nt, Human
aggcugaggcaggcggaucac

SEQ ID NO: 446997 - RNA, 24 nt, Human
aggcugaggcaggcggaucaccug

SEQ ID NO: 446998 - RNA, 21 nt, Human
aggugacagaaauugccacag

SEQ ID NO: 446999 - RNA, 24 nt, Human
aggugcaguggcucacgccuguaa

SEQ ID NO: 447000 - RNA, 24 nt, Human
agguggggguuguggugagccgag

SEQ ID NO: 447001 - RNA, 23 nt, Human
aguaauauagaacagguuaagaa

SEQ ID NO: 447002 - RNA, 24 nt, Human
aguggcucacgccuguaaucgcag

SEQ ID NO: 447003 - RNA, 21 nt, Human
aucaaauaacaaaaucagcca

SEQ ID NO: 447004 - RNA, 21 nt, Human
aucaccugagguugggaguuc

SEQ ID NO: 447005 - RNA, 24 nt, Human
aucgcgccauugcacuccagccug

SEQ ID NO: 447006 - RNA, 22 nt, Human
aucuugguucugaaguuaaaau

SEQ ID NO: 447007 - RNA, 19 nt, Human
augaaaaguuauauaaccu

SEQ ID NO: 447008 - RNA, 21 nt, Human
augaaguauacuacugaaccc

SEQ ID NO: 447009 - RNA, 21 nt, Human
auuccagagcuagaaaugauc

SEQ ID NO: 447010 - RNA, 24 nt, Human
auugcacuccagccugggcaacaa

SEQ ID NO: 447011 - RNA, 26 nt, Human
caaaaacaacaacaauaacaacaaaa

SEQ ID NO: 447012 - RNA, 31 nt, Human
caaaacucauuacaaucacagaauuccagag

SEQ ID NO: 447013 - RNA, 20 nt, Human
caaauccagccuguuugcaa

SEQ ID NO: 447014 - RNA, 18 nt, Human
caacaaauucuaauugua

SEQ ID NO: 447015 - RNA, 22 nt, Human
caacaacaauaacaacaaaaaa

SEQ ID NO: 447016 - RNA, 26 nt, Human
caacaacaauaacaacaaaaaaccuu

SEQ ID NO: 447017 - RNA, 19 nt, Human
caacaucccaagcauggcc

SEQ ID NO: 447018 - RNA, 23 nt, Human
caacauuaucaacucacuuuagc

SEQ ID NO: 447019 - RNA, 20 nt, Human
caaccuagaaacaguuuaua

SEQ ID NO: 447020 - RNA, 24 nt, Human
caacgucggucuccuccgucuccu

SEQ ID NO: 447021 - RNA, 18 nt, Human
caauagguauaaguaaua

SEQ ID NO: 447022 - RNA, 24 nt, Human
cacgccuguaaucgcagcacuuug

SEQ ID NO: 447023 - RNA, 23 nt, Human
cacuccagccugggcaacaagag

SEQ ID NO: 447024 - RNA, 24 nt, Human
cacuccagccugggcaacaagagu

SEQ ID NO: 447025 - RNA, 25 nt, Human
cacuccagccugggcaacaagagug

SEQ ID NO: 447026 - RNA, 22 nt, Human
cacucucgcucgccucucuucc

SEQ ID NO: 447027 - RNA, 21 nt, Human
cagaaagcaggcugaaaagca

SEQ ID NO: 447028 - RNA, 24 nt, Human
cagcacuuugggaggcugaggcag

SEQ ID NO: 447029 - RNA, 26 nt, Human
cagcacuuugggaggcugaggcaggc

SEQ ID NO: 447030 - RNA, 24 nt, Human
cagcaggaccaacauggagaaacc

SEQ ID NO: 447031 - RNA, 24 nt, Human
cagcuacuugggaggcugaggcag

SEQ ID NO: 447032 - RNA, 24 nt, Human
caggaccaacauggagaaaccccc

SEQ ID NO: 447033 - RNA, 20 nt, Human
caucauagaucuuuugaaca

SEQ ID NO: 447034 - RNA, 18 nt, Human
caucucaaaauacagauc

SEQ ID NO: 447035 - RNA, 18 nt, Human
cauugcacuccagccugg

SEQ ID NO: 447036 - RNA, 19 nt, Human
cauugcacuccagccuggg

SEQ ID NO: 447037 - RNA, 21 nt, Human
cauugcacuccagccugggca

SEQ ID NO: 447038 - RNA, 24 nt, Human
cauugcacuccagccugggcaaca

SEQ ID NO: 447039 - RNA, 22 nt, Human
ccagaaagcaggcugaaaagca

SEQ ID NO: 447040 - RNA, 20 nt, Human
ccauugcacuccagccuggg

SEQ ID NO: 447041 - RNA, 21 nt, Human
ccauugcacuccagccugggc

SEQ ID NO: 447042 - RNA, 23 nt, Human
ccauugcacuccagccugggcaa

SEQ ID NO: 447043 - RNA, 24 nt, Human
ccauugcacuccagccugggcaac

SEQ ID NO: 447044 - RNA, 19 nt, Human
ccccaaaagcagcagucac

SEQ ID NO: 447045 - RNA, 22 nt, Human
ccgcagccgccgccuccuccuc

SEQ ID NO: 447046 - RNA, 19 nt, Human
ccgucccgcagccgccgcc

SEQ ID NO: 447047 - RNA, 19 nt, Human
ccugaaauuauaaaauacu

SEQ ID NO: 447048 - RNA, 22 nt, Human
ccuguaaucgcagcacuuuggg

SEQ ID NO: 447049 - RNA, 24 nt, Human
ccuguaaucgcagcacuuugggag

SEQ ID NO: 447050 - RNA, 21 nt, Human
ccuguaauuccagcuacuugg

SEQ ID NO: 447051 - RNA, 24 nt, Human
cgccauugcacuccagccugggca

SEQ ID NO: 447052 - RNA, 23 nt, Human
cgccuguaaucgcagcacuuugg

SEQ ID NO: 447053 - RNA, 18 nt, Human
cgcucgccucucuuccuc

SEQ ID NO: 447054 - RNA, 20 nt, Human
cgcuugaaccugggaggugg

SEQ ID NO: 447055 - RNA, 24 nt, Human
cggaucaccugagguugggaguuc

SEQ ID NO: 447056 - RNA, 21 nt, Human
cggcagggggggggggggcag

SEQ ID NO: 447057 - RNA, 20 nt, Human
cgucggucuccuccgucucc

SEQ ID NO: 447058 - RNA, 24 nt, Human
cucacgccuguaaucgcagcacuu

SEQ ID NO: 447059 - RNA, 18 nt, Human
cuccuccgucuccuccuc

SEQ ID NO: 447060 - RNA, 22 nt, Human
cucuuuucagccuacuuccaaa

SEQ ID NO: 447061 - RNA, 21 nt, Human
cugguaccaacaucaaaggaa

SEQ ID NO: 447062 - RNA, 22 nt, Human
cugugugcuuugcaauaggaau

SEQ ID NO: 447063 - RNA, 21 nt, Human
gaaaaaacagagcaaaucaaa

SEQ ID NO: 447064 - RNA, 25 nt, Human
gaaaauucucuuuucagccuacuuc

SEQ ID NO: 447065 - RNA, 23 nt, Human
gagaucgcgccauugcacuccag

SEQ ID NO: 447066 - RNA, 24 nt, Human
gaucaccugagguugggaguucga

SEQ ID NO: 447067 - RNA, 19 nt, Human
gcagggggggggggggcag

SEQ ID NO: 447068 - RNA, 22 nt, Human
gccauugcacuccagccugggc

SEQ ID NO: 447069 - RNA, 24 nt, Human
gccauugcacuccagccugggcaa

SEQ ID NO: 447070 - RNA, 22 nt, Human
gccuccuccuccacucucgcuc

SEQ ID NO: 447071 - RNA, 21 nt, Human
gcggaucaccugagguuggga

SEQ ID NO: 447072 - RNA, 21 nt, Human
gcuucucauucugaaaauaaa

SEQ ID NO: 447073 - RNA, 22 nt, Human
ggaaaaaacagagcaaaucaaa

SEQ ID NO: 447074 - RNA, 18 nt, Human
ggagauaaguuuggggga

SEQ ID NO: 447075 - RNA, 23 nt, Human
ggaucaccugagguugggaguuc

SEQ ID NO: 447076 - RNA, 18 nt, Human
ggcagggggggggggggc

SEQ ID NO: 447077 - RNA, 18 nt, Human
ggccaggugcaguggcuc

SEQ ID NO: 447078 - RNA, 21 nt, Human
ggccaggugcaguggcucacg

SEQ ID NO: 447079 - RNA, 18 nt, Human
ggccucaguagccugaaa

SEQ ID NO: 447080 - RNA, 20 nt, Human
ggggaaggugcaaggugggu

SEQ ID NO: 447081 - RNA, 24 nt, Human
ggggguuguggugagccgagaucg

SEQ ID NO: 447082 - RNA, 21 nt, Human
gggguuguggugagccgagau

SEQ ID NO: 447083 - RNA, 22 nt, Human
gggguuguggugagccgagauc

SEQ ID NO: 447084 - RNA, 23 nt, Human
gggguuguggugagccgagaucg

SEQ ID NO: 447085 - RNA, 24 nt, Human
gguaccaacaucaaaggaaaaaau

SEQ ID NO: 447086 - RNA, 19 nt, Human
guacaacacaucacagaaa

SEQ ID NO: 447087 - RNA, 22 nt, Human
gugacaaauuguauugaguuuc

SEQ ID NO: 447088 - RNA, 19 nt, Human
guuugggggaaggugcaag

SEQ ID NO: 447089 - RNA, 20 nt, Human
uaaaaauacaaaauuagcca

SEQ ID NO: 447090 - RNA, 22 nt, Human
uaaaaauacaaaauuagccagg

SEQ ID NO: 447091 - RNA, 23 nt, Human
uaaaaauacaaaauuagccaggc

SEQ ID NO: 447092 - RNA, 18 nt, Human
uaaauuaaagcuauauag

SEQ ID NO: 447093 - RNA, 19 nt, Human
uaacaaaaucagccagaaa

SEQ ID NO: 447094 - RNA, 23 nt, Human
uaacacaaauaagauaauuuaua

SEQ ID NO: 447095 - RNA, 22 nt, Human
uaauuguauauguaacuucuuu

SEQ ID NO: 447096 - RNA, 21 nt, Human
uacaaucacagaauuccagag

SEQ ID NO: 447097 - RNA, 21 nt, Human
uacagaaaugugaaauauguc

SEQ ID NO: 447098 - RNA, 22 nt, Human
uacagaauuaacaguauacaaa

SEQ ID NO: 447099 - RNA, 18 nt, Human
uacccccaaaagcagcag

SEQ ID NO: 447100 - RNA, 19 nt, Human
uaccugugccaccuauucu

SEQ ID NO: 447101 - RNA, 20 nt, Human
uacuaaauguguuccccaag

SEQ ID NO: 447102 - RNA, 24 nt, Human
uagugacaaagccuguaauuccag

SEQ ID NO: 447103 - RNA, 18 nt, Human
uauacuaaauguguuccc

SEQ ID NO: 447104 - RNA, 18 nt, Human
uaugcuucucauucugaa

SEQ ID NO: 447105 - RNA, 22 nt, Human
uauguugcugacuaacccugaa

SEQ ID NO: 447106 - RNA, 24 nt, Human
uauuucauuauggaccauaaagaa

SEQ ID NO: 447107 - RNA, 22 nt, Human
uauuuuaggaaaaaacagagca

SEQ ID NO: 447108 - RNA, 22 nt, Human
uauuuucuacacuauacuaaau

SEQ ID NO: 447109 - RNA, 20 nt, Human
ucaaauaacaaaaucagcca

SEQ ID NO: 447110 - RNA, 24 nt, Human
ucaaauaacaaaaucagccagaaa

SEQ ID NO: 447111 - RNA, 22 nt, Human
ucaaaucauccacggguuuacu

SEQ ID NO: 447112 - RNA, 19 nt, Human
ucaacagcagccugguuca

SEQ ID NO: 447113 - RNA, 18 nt, Human
ucaccugagguugggagu

SEQ ID NO: 447114 - RNA, 23 nt, Human
ucaggcuuuuuuccuguacauag

SEQ ID NO: 447115 - RNA, 19 nt, Human
uccagagcuagaaaugauc

SEQ ID NO: 447116 - RNA, 23 nt, Human
ucccuaacaacgucggucuccuc

SEQ ID NO: 447117 - RNA, 23 nt, Human
ucccucauuucugugcagaaaca

SEQ ID NO: 447118 - RNA, 18 nt, Human
uccuacuucaaaccuggg

SEQ ID NO: 447119 - RNA, 23 nt, Human
ucgacaccagcaggaccaacaug

SEQ ID NO: 447120 - RNA, 23 nt, Human
ucgcgccauugcacuccagccug

SEQ ID NO: 447121 - RNA, 23 nt, Human
ucgcuugaaccugggaggugggg

SEQ ID NO: 447122 - RNA, 20 nt, Human
ucucuacuaaaaauacaaaa

SEQ ID NO: 447123 - RNA, 18 nt, Human
ugaaaaacgguaaaugcc

SEQ ID NO: 447124 - RNA, 19 nt, Human
ugaaaaacgguaaaugcca

SEQ ID NO: 447125 - RNA, 19 nt, Human
ugaaaauaaaaucaucucc

SEQ ID NO: 447126 - RNA, 18 nt, Human
ugaaaaucaucuauuuac

SEQ ID NO: 447127 - RNA, 19 nt, Human
ugaaccugggagguggggg

SEQ ID NO: 447128 - RNA, 27 nt, Human
ugaaccugggagguggggguugugacg

SEQ ID NO: 447129 - RNA, 25 nt, Human
ugaagacacgaacaguuuugaaaau

SEQ ID NO: 447130 - RNA, 19 nt, Human
ugaaguauacuacugaacc

SEQ ID NO: 447131 - RNA, 21 nt, Human
ugaaguauacuacugaacccu

SEQ ID NO: 447132 - RNA, 25 nt, Human
ugaaguauacuacugaacccugaaa

SEQ ID NO: 447133 - RNA, 22 nt, Human
ugaagugaaauuccgucucaaa

SEQ ID NO: 447134 - RNA, 21 nt, Human
ugacaaagccuguaauuccag

SEQ ID NO: 447135 - RNA, 23 nt, Human
ugacagaaugaacugaagacacg

SEQ ID NO: 447136 - RNA, 22 nt, Human
ugagccgagaucgcgccauugc

SEQ ID NO: 447137 - RNA, 20 nt, Human
ugaggcaggagaaucgcuug

SEQ ID NO: 447138 - RNA, 24 nt, Human
ugaggcaggagaaucgcuugaacc

SEQ ID NO: 447139 - RNA, 24 nt, Human
ugaggcaggagaaucgcuugaacc

SEQ ID NO: 447140 - RNA, 20 nt, Human
ugaggcaggcggaucaccug

SEQ ID NO: 447141 - RNA, 21 nt, Human
ugaggcaggcggaucaccuga

SEQ ID NO: 447142 - RNA, 26 nt, Human
ugaggcaggcggaucaccugagguug

SEQ ID NO: 447143 - RNA, 19 nt, Human
ugcacuccagccugggcaa

SEQ ID NO: 447144 - RNA, 22 nt, Human
ugcacuccagccugggcaacaa

SEQ ID NO: 447145 - RNA, 19 nt, Human
ugccagaauguaaauuaag

SEQ ID NO: 447146 - RNA, 24 nt, Human
uggagauaaguuugggggaaggug

SEQ ID NO: 447147 - RNA, 19 nt, Human
uggauuuuaguacaacaca

SEQ ID NO: 447148 - RNA, 18 nt, Human
uggcucacgccuguaauc

SEQ ID NO: 447149 - RNA, 22 nt, Human
uggcucacgccuguaaucgcag

SEQ ID NO: 447150 - RNA, 24 nt, Human
uggcucacgccuguaaucgcagca

SEQ ID NO: 447151 - RNA, 19 nt, Human
ugggaggcugaggcaggag

SEQ ID NO: 447152 - RNA, 23 nt, Human
ugggaggcugaggcaggagaauc

SEQ ID NO: 447153 - RNA, 20 nt, Human
ugggaggcugaggcaggcgg

SEQ ID NO: 447154 - RNA, 24 nt, Human
ugggaggcugaggcaggcggauca

SEQ ID NO: 447155 - RNA, 19 nt, Human
uguaaauuaaguugcccaa

SEQ ID NO: 447156 - RNA, 19 nt, Human
uguacuuucuuaauuccug

SEQ ID NO: 447157 - RNA, 18 nt, Human
uguguaaaagaaauaggu

SEQ ID NO: 447158 - RNA, 19 nt, Human
uguguaaaagaaauagguu

SEQ ID NO: 447159 - RNA, 20 nt, Human
uguguaaaagaaauagguuc

SEQ ID NO: 447160 - RNA, 21 nt, Human
uuagcaauggguuuuuuggau

SEQ ID NO: 447161 - RNA, 20 nt, Human
uuccaaauagaaauagucag

SEQ ID NO: 447162 - RNA, 21 nt, Human
uuccugaugugacaaauugua

SEQ ID NO: 447163 - RNA, 21 nt, Human
uuccugggccaggugcagugg

SEQ ID NO: 447164 - RNA, 24 nt, Human
uugaaccugggagguggggguugu

SEQ ID NO: 447165 - RNA, 19 nt, Human
uugcaugcagcagcagcuu

SEQ ID NO: 447166 - RNA, 23 nt, Human
uugcugacuaacccugaaauuau

SEQ ID NO: 447167 - RNA, 24 nt, Human
uugggaggcugaggcaggagaauc

SEQ ID NO: 447168 - RNA, 25 nt, Human
uugggaggcugaggcaggcggauca

SEQ ID NO: 447169 - RNA, 23 nt, Human
uugggggaaggugcaaggugggu

SEQ ID NO: 447170 - RNA, 19 nt, Human
uugguauguguguaaaaga

SEQ ID NO: 447171 - RNA, 18 nt, Human
uuguggugagccgagauc

SEQ ID NO: 447172 - RNA, 22 nt, Human
uuguggugagccgagaucgcgc

SEQ ID NO: 447173 - RNA, 22 nt, Human
uuuaggaaaaaacagagcaaau

SEQ ID NO: 447174 - RNA, 26 nt, Human
aaaaacucaaggccagcugugaggcc

SEQ ID NO: 447175 - RNA, 22 nt, Human
aagucucacucacacacacgcc

SEQ ID NO: 447176 - RNA, 22 nt, Human
acagaaauacaaagugaccaag

SEQ ID NO: 447177 - RNA, 21 nt, Human
accccaggcaggaggagacag

SEQ ID NO: 447178 - RNA, 19 nt, Human
acugcacccagcacagcag

SEQ ID NO: 447179 - RNA, 21 nt, Human
agacaggugugcuggagucug

SEQ ID NO: 447180 - RNA, 23 nt, Human
aggaggagacaggugugcuggaa

SEQ ID NO: 447181 - RNA, 25 nt, Human
aggcaggaggagacaggugugcugg

SEQ ID NO: 447182 - RNA, 26 nt, Human
aggcaggaggagacaggugugcugga

SEQ ID NO: 447183 - RNA, 18 nt, Human
aggccccuggcagcaccu

SEQ ID NO: 447184 - RNA, 24 nt, Human
aggccccuggcagcaccugcccaa

SEQ ID NO: 447185 - RNA, 23 nt, Human
aggccuuugucacauaccagacc

SEQ ID NO: 447186 - RNA, 18 nt, Human
aguaaaaacucaaggcca

SEQ ID NO: 447187 - RNA, 19 nt, Human
agucuggucacuuuggggc

SEQ ID NO: 447188 - RNA, 18 nt, Human
agugagagccacacaggu

SEQ ID NO: 447189 - RNA, 20 nt, Human
auacaagugcacagacaggu

SEQ ID NO: 447190 - RNA, 24 nt, Human
caaaacauacaagugcacagacag

SEQ ID NO: 447191 - RNA, 23 nt, Human
cacagguagguacacucggcaca

SEQ ID NO: 447192 - RNA, 21 nt, Human
caccaccgagggccucuuccu

SEQ ID NO: 447193 - RNA, 21 nt, Human
cacccccgcacacagggacgu

SEQ ID NO: 447194 - RNA, 24 nt, Human
cacccccuuccauccccauggcca

SEQ ID NO: 447195 - RNA, 22 nt, Human
caccuggccccuccccggacgu

SEQ ID NO: 447196 - RNA, 21 nt, Human
cacugcuuaaccucagucuuc

SEQ ID NO: 447197 - RNA, 22 nt, Human
cacuuuggggcccggcgugggc

SEQ ID NO: 447198 - RNA, 19 nt, Human
cagaugccuccacucaccc

SEQ ID NO: 447199 - RNA, 21 nt, Human
ccaaccaagacagaaauacaa

SEQ ID NO: 447200 - RNA, 19 nt, Human
ccacugggccugacuggcg

SEQ ID NO: 447201 - RNA, 20 nt, Human
ccacugggccugacuggcgc

SEQ ID NO: 447202 - RNA, 27 nt, Human
ccagacccacacaagugagagccacac

SEQ ID NO: 447203 - RNA, 18 nt, Human
ccccauggccaccccagg

SEQ ID NO: 447204 - RNA, 19 nt, Human
ccccgccggcccccaccug

SEQ ID NO: 447205 - RNA, 20 nt, Human
ccccgccggcccccaccugc

SEQ ID NO: 447206 - RNA, 21 nt, Human
ccccuggguaaacgcugacuc

SEQ ID NO: 447207 - RNA, 22 nt, Human
cccugggcccacugcuuaaccu

SEQ ID NO: 447208 - RNA, 23 nt, Human
cccugggcccacugcuuaaccuc

SEQ ID NO: 447209 - RNA, 18 nt, Human
ccgagcaaggaaggcuga

SEQ ID NO: 447210 - RNA, 21 nt, Human
ccggcccccaccugcgugccg

SEQ ID NO: 447211 - RNA, 26 nt, Human
ccggcccccgucucuggcccggcccc

SEQ ID NO: 447212 - RNA, 18 nt, Human
ccuggcagcaccugccca

SEQ ID NO: 447213 - RNA, 20 nt, Human
ccuugucucucugcagcucu

SEQ ID NO: 447214 - RNA, 21 nt, Human
ccuuugucacauaccagaccc

SEQ ID NO: 447215 - RNA, 23 nt, Human
cgccgccuugucucucugcagcu

SEQ ID NO: 447216 - RNA, 24 nt, Human
cgcgggcagaugccuccacucacc

SEQ ID NO: 447217 - RNA, 19 nt, Human
cgggaguggagggccuggg

SEQ ID NO: 447218 - RNA, 20 nt, Human
cgugggcagagcccacuggg

SEQ ID NO: 447219 - RNA, 27 nt, Human
cucacacacacgccacauggacacccc

SEQ ID NO: 447220 - RNA, 18 nt, Human
gacagggcuggcgggacg

SEQ ID NO: 447221 - RNA, 23 nt, Human
gaccugggccgagcaaggaaggc

SEQ ID NO: 447222 - RNA, 19 nt, Human
gagcaaggaaggcugaugg

SEQ ID NO: 447223 - RNA, 22 nt, Human
gagggccugggcucaggccccu

SEQ ID NO: 447224 - RNA, 23 nt, Human
gccaauucccaggccuuugucac

SEQ ID NO: 447225 - RNA, 22 nt, Human
gccuugucucucugcagcucug

SEQ ID NO: 447226 - RNA, 23 nt, Human
gcgggcagaugccuccacucacc

SEQ ID NO: 447227 - RNA, 21 nt, Human
ggcacagggaacuuggcucag

SEQ ID NO: 447228 - RNA, 19 nt, Human
ggccugggcucaggccccu

SEQ ID NO: 447229 - RNA, 19 nt, Human
ggcuggggcaggaggagcg

SEQ ID NO: 447230 - RNA, 19 nt, Human
ggcuggggcaggaggagcg

SEQ ID NO: 447231 - RNA, 18 nt, Human
gggaguggagggccuggg

SEQ ID NO: 447232 - RNA, 18 nt, Human
gggcuggggcaggaggag

SEQ ID NO: 447233 - RNA, 19 nt, Human
gugggcagagcccacuggg

SEQ ID NO: 447234 - RNA, 21 nt, Human
guuuuauuccacccccuucca

SEQ ID NO: 447235 - RNA, 18 nt, Human
uaagacccacacagguac

SEQ ID NO: 447236 - RNA, 21 nt, Human
uacaaaacauacaagugcaca

SEQ ID NO: 447237 - RNA, 19 nt, Human
uauuuuuacagaugccaag

SEQ ID NO: 447238 - RNA, 21 nt, Human
ucaacucacauccuagucuca

SEQ ID NO: 447239 - RNA, 24 nt, Human
ucaacucacauccuagucucauca

SEQ ID NO: 447240 - RNA, 23 nt, Human
uccaaccaagacagaaauacaaa

SEQ ID NO: 447241 - RNA, 26 nt, Human
uccaaccaagacagaaauacaaagug

SEQ ID NO: 447242 - RNA, 19 nt, Human
uccacccccuuccaucccc

SEQ ID NO: 447243 - RNA, 22 nt, Human
ucuaauggcugguuauuuuuac

SEQ ID NO: 447244 - RNA, 24 nt, Human
ucuauggcccugggcccacugcuu

SEQ ID NO: 447245 - RNA, 20 nt, Human
ucucugugggcaggugugga

SEQ ID NO: 447246 - RNA, 21 nt, Human
ugacacaggugagacccgcac

SEQ ID NO: 447247 - RNA, 23 nt, Human
ugacagguuuuauuccacccccu

SEQ ID NO: 447248 - RNA, 19 nt, Human
ugacgaggccgacagggcu

SEQ ID NO: 447249 - RNA, 21 nt, Human
ugacgaggccgacagggcugg

SEQ ID NO: 447250 - RNA, 21 nt, Human
ugacucagaugccugaaacag

SEQ ID NO: 447251 - RNA, 22 nt, Human
ugacucagaugccugaaacagg

SEQ ID NO: 447252 - RNA, 19 nt, Human
ugacuggcgcgggcagaug

SEQ ID NO: 447253 - RNA, 22 nt, Human
ugagaccccuacacguacgccu

SEQ ID NO: 447254 - RNA, 24 nt, Human
ugagacguucacaggugagacccc

SEQ ID NO: 447255 - RNA, 20 nt, Human
ugcacagacaggugugggag

SEQ ID NO: 447256 - RNA, 19 nt, Human
ugccugaaacagaccuggg

SEQ ID NO: 447257 - RNA, 18 nt, Human
ugccuggcacaagugaga

SEQ ID NO: 447258 - RNA, 20 nt, Human
uggcagcaccugcccaaggu

SEQ ID NO: 447259 - RNA, 20 nt, Human
uggcaguaaagggauuggcc

SEQ ID NO: 447260 - RNA, 21 nt, Human
uggcucagggucugcuccugg

SEQ ID NO: 447261 - RNA, 22 nt, Human
ugucacauaccagacccacaca

SEQ ID NO: 447262 - RNA, 26 nt, Human
ugugcuggagucuggucacuuugggg

SEQ ID NO: 447263 - RNA, 21 nt, Human
uguggcaguaaagggauuggc

SEQ ID NO: 447264 - RNA, 24 nt, Human
uucuauggcccugggcccacugcu

SEQ ID NO: 447265 - RNA, 23 nt, Human
uuuuuuuuuuuuuuuuuuucagg

SEQ ID NO: 447266 - RNA, 19 nt, Human
aaaacagaacaccagccuc

SEQ ID NO: 447267 - RNA, 21 nt, Human
aagcucccucacccaucccaa

SEQ ID NO: 447268 - RNA, 18 nt, Human
accaccuccucugcaguc

SEQ ID NO: 447269 - RNA, 23 nt, Human
agaacaccagccucucaccacca

SEQ ID NO: 447270 - RNA, 24 nt, Human
agcacuaucccaauaccaccaccu

SEQ ID NO: 447271 - RNA, 22 nt, Human
auaacagggaacaagaagagaa

SEQ ID NO: 447272 - RNA, 20 nt, Human
aucccaauaccaccaccucc

SEQ ID NO: 447273 - RNA, 21 nt, Human
aucccaguuacuuucagucgu

SEQ ID NO: 447274 - RNA, 22 nt, Human
caaaacagaacaccagccucuc

SEQ ID NO: 447275 - RNA, 24 nt, Human
caccaccagagaugaccggaaaua

SEQ ID NO: 447276 - RNA, 19 nt, Human
caccucaagucacacucau

SEQ ID NO: 447277 - RNA, 24 nt, Human
cacuccucuuuuccucuucucuca

SEQ ID NO: 447278 - RNA, 19 nt, Human
cagaacaccagccucucac

SEQ ID NO: 447279 - RNA, 24 nt, Human
cagccucucaccaccagagaugac

SEQ ID NO: 447280 - RNA, 27 nt, Human
cagcuacuguagucccagcuacuuggg

SEQ ID NO: 447281 - RNA, 18 nt, Human
ccacucacuuuccucuuu

SEQ ID NO: 447282 - RNA, 19 nt, Human
ccacuccucuuuuccucuu

SEQ ID NO: 447283 - RNA, 20 nt, Human
cccaauaccaccaccuccuc

SEQ ID NO: 447284 - RNA, 19 nt, Human
ccccaucuguugcuuccag

SEQ ID NO: 447285 - RNA, 25 nt, Human
ccggaaauauguuuucucuucuucc

SEQ ID NO: 447286 - RNA, 19 nt, Human
ccucacccaucccaacacc

SEQ ID NO: 447287 - RNA, 25 nt, Human
ccucugcaguccccaucuguugcuu

SEQ ID NO: 447288 - RNA, 24 nt, Human
cggaaauauguuuucucuucuucc

SEQ ID NO: 447289 - RNA, 19 nt, Human
cucucagcuucuccacugc

SEQ ID NO: 447290 - RNA, 22 nt, Human
cuggccacuccucuuuuccucu

SEQ ID NO: 447291 - RNA, 22 nt, Human
cuguagucccagcuacuugggg

SEQ ID NO: 447292 - RNA, 20 nt, Human
cuugaaccucuucucauucu

SEQ ID NO: 447293 - RNA, 20 nt, Human
gaagcucccucacccauccc

SEQ ID NO: 447294 - RNA, 19 nt, Human
gagcaggaguugguccugg

SEQ ID NO: 447295 - RNA, 22 nt, Human
gauaacagggaacaagaagaga

SEQ ID NO: 447296 - RNA, 26 nt, Human
ggaaauauguuuucucuucuuccuuc

SEQ ID NO: 447297 - RNA, 19 nt, Human
gggaacaagaagagaagcc

SEQ ID NO: 447298 - RNA, 19 nt, Human
gggaggaaugauaacaggg

SEQ ID NO: 447299 - RNA, 18 nt, Human
gggguuaauccacucacu

SEQ ID NO: 447300 - RNA, 21 nt, Human
guaguggugggagucuggcca

SEQ ID NO: 447301 - RNA, 21 nt, Human
guuuucucuucuuccuucccu

SEQ ID NO: 447302 - RNA, 21 nt, Human
uaacagggaacaagaagagaa

SEQ ID NO: 447303 - RNA, 22 nt, Human
uaaguucuuggcugcagcacua

SEQ ID NO: 447304 - RNA, 23 nt, Human
uaaguucuuggcugcagcacuau

SEQ ID NO: 447305 - RNA, 22 nt, Human
uacuguagucccagcuacuugg

SEQ ID NO: 447306 - RNA, 20 nt, Human
uagccagcacugucaccuug

SEQ ID NO: 447307 - RNA, 22 nt, Human
uaggagguucucuuguaagucu

SEQ ID NO: 447308 - RNA, 19 nt, Human
uaucccaauaccaccaccu

SEQ ID NO: 447309 - RNA, 19 nt, Human
ucacccaucccaacaccuc

SEQ ID NO: 447310 - RNA, 18 nt, Human
ucauuugggagauuuaaa

SEQ ID NO: 447311 - RNA, 23 nt, Human
ucccaauaccaccaccuccucug

SEQ ID NO: 447312 - RNA, 25 nt, Human
ucccagcuacuugggagccugaggc

SEQ ID NO: 447313 - RNA, 21 nt, Human
ucccaguuacuuucagucguu

SEQ ID NO: 447314 - RNA, 19 nt, Human
uccccaucuguugcuucca

SEQ ID NO: 447315 - RNA, 18 nt, Human
ucguuaaguucuuggcug

SEQ ID NO: 447316 - RNA, 24 nt, Human
ucugcaguccccaucuguugcuuc

SEQ ID NO: 447317 - RNA, 20 nt, Human
ucugggugugcuggcccagc

SEQ ID NO: 447318 - RNA, 20 nt, Human
ugaggcacaagaaucacuug

SEQ ID NO: 447319 - RNA, 24 nt, Human
ugaggcacaagaaucacuugaacc

SEQ ID NO: 447320 - RNA, 22 nt, Human
ugggagccugaggcacaagaau

SEQ ID NO: 447321 - RNA, 24 nt, Human
ugggagccugaggcacaagaauca

SEQ ID NO: 447322 - RNA, 18 nt, Human
uggugggagucuggccac

SEQ ID NO: 447323 - RNA, 18 nt, Human
uguagccagcacugucac

SEQ ID NO: 447324 - RNA, 22 nt, Human
uuucugggugugcuggcccagc

SEQ ID NO: 447325 - RNA, 24 nt, Human
aaagacaaggcccaugcggccgcc

SEQ ID NO: 447326 - RNA, 19 nt, Human
aaccagacccccaggcccc

SEQ ID NO: 447327 - RNA, 19 nt, Human
acugcuccugccugcccca

SEQ ID NO: 447328 - RNA, 21 nt, Human
agaaagagacgacacccaggg

SEQ ID NO: 447329 - RNA, 20 nt, Human
agacccccaggccccuccua

SEQ ID NO: 447330 - RNA, 22 nt, Human
agagacagggccauguuuaaug

SEQ ID NO: 447331 - RNA, 20 nt, Human
agcagcagcaguacaggcag

SEQ ID NO: 447332 - RNA, 18 nt, Human
agcagggaggcacaggug

SEQ ID NO: 447333 - RNA, 21 nt, Human
agcaggggcagcaggggaggg

SEQ ID NO: 447334 - RNA, 19 nt, Human
agcccugagcagcagcagc

SEQ ID NO: 447335 - RNA, 23 nt, Human
aggcagaaagagacgacacccag

SEQ ID NO: 447336 - RNA, 25 nt, Human
aggcagaaagagacgacacccaggg

SEQ ID NO: 447337 - RNA, 19 nt, Human
aggggaggggaggcagaaa

SEQ ID NO: 447338 - RNA, 21 nt, Human
aggggcagcaggggcagcagg

SEQ ID NO: 447339 - RNA, 22 nt, Human
aggguggggcccccaggugggc

SEQ ID NO: 447340 - RNA, 19 nt, Human
caccagcagggcagggugc

SEQ ID NO: 447341 - RNA, 22 nt, Human
caccagcagggcagggugcucc

SEQ ID NO: 447342 - RNA, 18 nt, Human
caccgagagagacagggc

SEQ ID NO: 447343 - RNA, 20 nt, Human
cagacccccaggccccuccu

SEQ ID NO: 447344 - RNA, 23 nt, Human
cagauaagggggccagaagccaa

SEQ ID NO: 447345 - RNA, 19 nt, Human
cagcaaagacaaggcccau

SEQ ID NO: 447346 - RNA, 19 nt, Human
cagcagcagcagcaguaca

SEQ ID NO: 447347 - RNA, 22 nt, Human
cagcagcaguacaggcagaagc

SEQ ID NO: 447348 - RNA, 21 nt, Human
cagcaggggcagcaggggagg

SEQ ID NO: 447349 - RNA, 18 nt, Human
caggcagaagcuggcggc

SEQ ID NO: 447350 - RNA, 18 nt, Human
caggcccagucccagcaa

SEQ ID NO: 447351 - RNA, 22 nt, Human
caggggcagcaggggcagcagg

SEQ ID NO: 447352 - RNA, 22 nt, Human
caggggcagcaggggcagcagg

SEQ ID NO: 447353 - RNA, 23 nt, Human
ccacacugcuccugccugcccca

SEQ ID NO: 447354 - RNA, 19 nt, Human
ccacuggccccagcacuca

SEQ ID NO: 447355 - RNA, 20 nt, Human
ccagacccccaggccccucc

SEQ ID NO: 447356 - RNA, 19 nt, Human
ccagcaaagacaaggccca

SEQ ID NO: 447357 - RNA, 23 nt, Human
ccaggccccuccuagagagcucc

SEQ ID NO: 447358 - RNA, 23 nt, Human
ccaggggaggggaggcagaaaga

SEQ ID NO: 447359 - RNA, 25 nt, Human
ccccaaccagacccccaggccccuc

SEQ ID NO: 447360 - RNA, 24 nt, Human
ccccagcacucacagaauuccacc

SEQ ID NO: 447361 - RNA, 22 nt, Human
ccccagccccacuggccccagc

SEQ ID NO: 447362 - RNA, 23 nt, Human
cccccaggccccuccuagagagc

SEQ ID NO: 447363 - RNA, 25 nt, Human
cccccaggccccuccuagagagcuc

SEQ ID NO: 447364 - RNA, 24 nt, Human
cccccaggugggcucugccggucc

SEQ ID NO: 447365 - RNA, 21 nt, Human
cccccggcccccaggggaggg

SEQ ID NO: 447366 - RNA, 19 nt, Human
ccccgccgguccccagccc

SEQ ID NO: 447367 - RNA, 18 nt, Human
cccggcccccaggggagg

SEQ ID NO: 447368 - RNA, 19 nt, Human
ccgagcagggaggcacagg

SEQ ID NO: 447369 - RNA, 22 nt, Human
ccggcaagguggugacucuggc

SEQ ID NO: 447370 - RNA, 19 nt, Human
ccguggccgcuggccgagc

SEQ ID NO: 447371 - RNA, 28 nt, Human
ccugccugccccaaccagacccccaggc

SEQ ID NO: 447372 - RNA, 18 nt, Human
ccugcggggaggccccuc

SEQ ID NO: 447373 - RNA, 20 nt, Human
cgagagagacagggccaugu

SEQ ID NO: 447374 - RNA, 24 nt, Human
cgagcagggaggcacagguguucu

SEQ ID NO: 447375 - RNA, 19 nt, Human
cgcguggggcgggggcaga

SEQ ID NO: 447376 - RNA, 21 nt, Human
cgcguggggcgggggcagaua

SEQ ID NO: 447377 - RNA, 21 nt, Human
cggcaagguggugacucuggc

SEQ ID NO: 447378 - RNA, 23 nt, Human
cucacagaauuccaccagcaggg

SEQ ID NO: 447379 - RNA, 21 nt, Human
cuggcaccguggccgcuggcc

SEQ ID NO: 447380 - RNA, 21 nt, Human
cuggccccagcacucacagaa

SEQ ID NO: 447381 - RNA, 23 nt, Human
cuggucacucacggggggugcug

SEQ ID NO: 447382 - RNA, 23 nt, Human
cuguuccugaccccaugggcacg

SEQ ID NO: 447383 - RNA, 23 nt, Human
cuuggggauuuccuccccuaagg

SEQ ID NO: 447384 - RNA, 21 nt, Human
gagcaggggcagcaggggcag

SEQ ID NO: 447385 - RNA, 21 nt, Human
gcaaaggguggggcccccagg

SEQ ID NO: 447386 - RNA, 27 nt, Human
gcagcagcagcagcaguacaggcagaa

SEQ ID NO: 447387 - RNA, 22 nt, Human
gcagcagcagcaguacaggcag

SEQ ID NO: 447388 - RNA, 18 nt, Human
gcagcaggggagggucug

SEQ ID NO: 447389 - RNA, 22 nt, Human
gcagcaggggcagcaggggcag

SEQ ID NO: 447390 - RNA, 22 nt, Human
gccccaaccagacccccaggcc

SEQ ID NO: 447391 - RNA, 20 nt, Human
gccgcccccggcccccaggg

SEQ ID NO: 447392 - RNA, 22 nt, Human
gcgcggcccgggcgccgcggag

SEQ ID NO: 447393 - RNA, 19 nt, Human
gcggagccgccgaggagcc

SEQ ID NO: 447394 - RNA, 21 nt, Human
gcuccuccgaggggcuccucg

SEQ ID NO: 447395 - RNA, 23 nt, Human
gcuccucgcucccuguuccugac

SEQ ID NO: 447396 - RNA, 20 nt, Human
gcuggcggcucauggugcug

SEQ ID NO: 447397 - RNA, 19 nt, Human
ggcaaaggguggggccccc

SEQ ID NO: 447398 - RNA, 21 nt, Human
ggcagcaggggcagcagggga

SEQ ID NO: 447399 - RNA, 23 nt, Human
ggcagcaggggcagcaggggagg

SEQ ID NO: 447400 - RNA, 20 nt, Human
ggcgggggcagauaaggggg

SEQ ID NO: 447401 - RNA, 23 nt, Human
ggcucugccggucccccgccggu

SEQ ID NO: 447402 - RNA, 21 nt, Human
gggacagcgccaggccagggg

SEQ ID NO: 447403 - RNA, 24 nt, Human
gggaggcagaaagagacgacaccc

SEQ ID NO: 447404 - RNA, 22 nt, Human
gggcagcaggggcagcagggga

SEQ ID NO: 447405 - RNA, 24 nt, Human
gggcagcaggggcagcaggggcag

SEQ ID NO: 447406 - RNA, 27 nt, Human
gggccagaagccaagcagcagcugcca

SEQ ID NO: 447407 - RNA, 18 nt, Human
gggcgcguggggcggggg

SEQ ID NO: 447408 - RNA, 22 nt, Human
ggggaggggaggcagaaagaga

SEQ ID NO: 447409 - RNA, 24 nt, Human
gugcugccagggcgcguggggcgg

SEQ ID NO: 447410 - RNA, 19 nt, Human
uaccacacugcuccugccu

SEQ ID NO: 447411 - RNA, 24 nt, Human
uaccacacugcuccugccugcccc

SEQ ID NO: 447412 - RNA, 24 nt, Human
uacuaccacacugcuccugccugc

SEQ ID NO: 447413 - RNA, 22 nt, Human
ucccagcaaagacaaggcccau

SEQ ID NO: 447414 - RNA, 19 nt, Human
ucccgcagggccaggccca

SEQ ID NO: 447415 - RNA, 20 nt, Human
ugagggagguaggggagaca

SEQ ID NO: 447416 - RNA, 24 nt, Human
ugagggagguaggggagacacgac

SEQ ID NO: 447417 - RNA, 22 nt, Human
ugccccaaccagacccccaggc

SEQ ID NO: 447418 - RNA, 19 nt, Human
ugccugccccaaccagacc

SEQ ID NO: 447419 - RNA, 20 nt, Human
ugcuccugccugccccaacc

SEQ ID NO: 447420 - RNA, 20 nt, Human
ugcuggggaugcuugggggu

SEQ ID NO: 447421 - RNA, 19 nt, Human
uggcacacaggcccagucc

SEQ ID NO: 447422 - RNA, 24 nt, Human
uggcacacaggcccagucccagca

SEQ ID NO: 447423 - RNA, 18 nt, Human
ugggcacgaagcccugag

SEQ ID NO: 447424 - RNA, 21 nt, Human
ugugcaacaacugagggaggu

SEQ ID NO: 447425 - RNA, 19 nt, Human
aagcagacacagcauucca

SEQ ID NO: 447426 - RNA, 20 nt, Human
aauugcaucagucuucugcc

SEQ ID NO: 447427 - RNA, 25 nt, Human
acuggacugguagguguuaccuggc

SEQ ID NO: 447428 - RNA, 27 nt, Human
acuggacugguagguguuaccuggcuu

SEQ ID NO: 447429 - RNA, 18 nt, Human
agacaggcuggcccgagg

SEQ ID NO: 447430 - RNA, 20 nt, Human
aguguagacacagcuuaacc

SEQ ID NO: 447431 - RNA, 25 nt, Human
aguuuaacauuuaguauucacauau

SEQ ID NO: 447432 - RNA, 23 nt, Human
auuuugguucaaagcaaacauua

SEQ ID NO: 447433 - RNA, 19 nt, Human
cagaaggcggccguccugc

SEQ ID NO: 447434 - RNA, 22 nt, Human
ccagcucacuucugaaagcaaa

SEQ ID NO: 447435 - RNA, 19 nt, Human
ccuugauggcaggggugaa

SEQ ID NO: 447436 - RNA, 18 nt, Human
cguccaguaagugaaaca

SEQ ID NO: 447437 - RNA, 28 nt, Human
cugacgcugaugaaguuuaacauuuagu

SEQ ID NO: 447438 - RNA, 18 nt, Human
gaaggaacuaagcaagac

SEQ ID NO: 447439 - RNA, 18 nt, Human
gagucauucggagcgugc

SEQ ID NO: 447440 - RNA, 22 nt, Human
gcuauugcacguuucuccccca

SEQ ID NO: 447441 - RNA, 21 nt, Human
gcugagaagucacccuugauu

SEQ ID NO: 447442 - RNA, 21 nt, Human
gucacccuugauugcaaauuc

SEQ ID NO: 447443 - RNA, 22 nt, Human
uaaaugccugcacuacugaaua

SEQ ID NO: 447444 - RNA, 23 nt, Human
uaacaguuugagaagcuugggaa

SEQ ID NO: 447445 - RNA, 20 nt, Human
uacauauauuuucucauaaa

SEQ ID NO: 447446 - RNA, 24 nt, Human
uauacaguacacacauuauaccac

SEQ ID NO: 447447 - RNA, 19 nt, Human
uauuuauacgagaagggag

SEQ ID NO: 447448 - RNA, 24 nt, Human
ucggagcgugcgugcuaaagcaga

SEQ ID NO: 447449 - RNA, 24 nt, Human
ugaauacauauauuuucucauaaa

SEQ ID NO: 447450 - RNA, 20 nt, Human
ugacagcagaaggcggccgu

SEQ ID NO: 447451 - RNA, 20 nt, Human
ugacaugauggugugcacuc

SEQ ID NO: 447452 - RNA, 23 nt, Human
ugacaugauggugugcacucauu

SEQ ID NO: 447453 - RNA, 21 nt, Human
ugauaggcacugagcauuuug

SEQ ID NO: 447454 - RNA, 18 nt, Human
ugcugagacauuuauuuc

SEQ ID NO: 447455 - RNA, 19 nt, Human
ugugcacucauuaugcacg

SEQ ID NO: 447456 - RNA, 24 nt, Human
uugcaucagucuucugccuucgug

SEQ ID NO: 447457 - RNA, 26 nt, Human
aaaaaaaaaaggauuaauaaauccga

SEQ ID NO: 447458 - RNA, 22 nt, Human
aaaaaaaaagaaaagaaaagaa

SEQ ID NO: 447459 - RNA, 21 nt, Human
aaaaaagaaaaaaaaaaagga

SEQ ID NO: 447460 - RNA, 23 nt, Human
aaaaagaaaagaaaagaaaaaag

SEQ ID NO: 447461 - RNA, 19 nt, Human
aaaagaaaaaaaaaaagga

SEQ ID NO: 447462 - RNA, 19 nt, Human
aaaagaaaaaaaaaaagga

SEQ ID NO: 447463 - RNA, 23 nt, Human
aaaagaaaaaaaaaaaggaaaag

SEQ ID NO: 447464 - RNA, 25 nt, Human
aaaagaaaaaaaaaaaggaaaagag

SEQ ID NO: 447465 - RNA, 22 nt, Human
aaaagacacugaaaccugacuc

SEQ ID NO: 447466 - RNA, 22 nt, Human
aaagaaaaaagaaaaaaaaaaa

SEQ ID NO: 447467 - RNA, 21 nt, Human
aaagcuuuuacauuaaauguu

SEQ ID NO: 447468 - RNA, 18 nt, Human
aacaugcgggucuccccc

SEQ ID NO: 447469 - RNA, 24 nt, Human
aacuacgaccuucucagaaaccaa

SEQ ID NO: 447470 - RNA, 25 nt, Human
aagaaaaaaaaaaaggaaaagagga

SEQ ID NO: 447471 - RNA, 18 nt, Human
aauccuuucuccuccagc

SEQ ID NO: 447472 - RNA, 20 nt, Human
accauacaauaguauguaca

SEQ ID NO: 447473 - RNA, 18 nt, Human
acccugugccccggucuc

SEQ ID NO: 447474 - RNA, 21 nt, Human
agaaaagaaaaaagaaaaaaa

SEQ ID NO: 447475 - RNA, 19 nt, Human
agaaaagaaaagaaaaaag

SEQ ID NO: 447476 - RNA, 19 nt, Human
agaaaccaaaaacccagcc

SEQ ID NO: 447477 - RNA, 18 nt, Human
agacacugaaaccugacu

SEQ ID NO: 447478 - RNA, 21 nt, Human
aggaaaggaaaaaaaaaagga

SEQ ID NO: 447479 - RNA, 27 nt, Human
aguaaaauaauaaauaaaaccauacaa

SEQ ID NO: 447480 - RNA, 21 nt, Human
aguauguacacaacagcacuc

SEQ ID NO: 447481 - RNA, 24 nt, Human
augaaucacagaaaaaugugccuu

SEQ ID NO: 447482 - RNA, 22 nt, Human
caacagcacuccuuccaagucc

SEQ ID NO: 447483 - RNA, 19 nt, Human
cacagaagccuccuccuuu

SEQ ID NO: 447484 - RNA, 21 nt, Human
cagccccucuuccccuccccc

SEQ ID NO: 447485 - RNA, 28 nt, Human
cagcgcacauacaggcgugcgcguguac

SEQ ID NO: 447486 - RNA, 23 nt, Human
caugcgggucuccccccgggccu

SEQ ID NO: 447487 - RNA, 22 nt, Human
ccagcuuucucagcuguccuuc

SEQ ID NO: 447488 - RNA, 21 nt, Human
ccagucccugaaggaggagug

SEQ ID NO: 447489 - RNA, 24 nt, Human
cccccgcuuuaaaaaaaaagaaaa

SEQ ID NO: 447490 - RNA, 18 nt, Human
ccccucuuccccuccccc

SEQ ID NO: 447491 - RNA, 22 nt, Human
cccgcuuuaaaaaaaaagaaaa

SEQ ID NO: 447492 - RNA, 20 nt, Human
cccugaaggaggagugggga

SEQ ID NO: 447493 - RNA, 18 nt, Human
ccucccaacuugaagaua

SEQ ID NO: 447494 - RNA, 20 nt, Human
ccucccaacuugaagauaga

SEQ ID NO: 447495 - RNA, 18 nt, Human
cgauacauacauauuuau

SEQ ID NO: 447496 - RNA, 23 nt, Human
cguguacacacauauguggggug

SEQ ID NO: 447497 - RNA, 18 nt, Human
cucagaaaccaaaaaccc

SEQ ID NO: 447498 - RNA, 20 nt, Human
cucagccccucuuccccucc

SEQ ID NO: 447499 - RNA, 19 nt, Human
cucagcuguccuucuguug

SEQ ID NO: 447500 - RNA, 21 nt, Human
cuccuuccaaguccagugcaa

SEQ ID NO: 447501 - RNA, 18 nt, Human
cuggauccuaguuucccu

SEQ ID NO: 447502 - RNA, 20 nt, Human
cuuugaggaaaggaaaaaaa

SEQ ID NO: 447503 - RNA, 19 nt, Human
gaaaggaaaaaaaaaagga

SEQ ID NO: 447504 - RNA, 25 nt, Human
gcagaccaagcaacaugcgggucuc

SEQ ID NO: 447505 - RNA, 19 nt, Human
gccucccaacuugaagaua

SEQ ID NO: 447506 - RNA, 21 nt, Human
gcuuuggugucuugaucagga

SEQ ID NO: 447507 - RNA, 18 nt, Human
ggaggaguggggacgcag

SEQ ID NO: 447508 - RNA, 18 nt, Human
ggccagucccugaaggag

SEQ ID NO: 447509 - RNA, 18 nt, Human
ggccuuggcuggauccua

SEQ ID NO: 447510 - RNA, 26 nt, Human
ggcgugcgcguguacacacauaugug

SEQ ID NO: 447511 - RNA, 20 nt, Human
gggacgcagaggauuuggug

SEQ ID NO: 447512 - RNA, 26 nt, Human
gugacaaagaggggaggggaggcacc

SEQ ID NO: 447513 - RNA, 24 nt, Human
uaaauccgaaauggcacuuggaaa

SEQ ID NO: 447514 - RNA, 19 nt, Human
uaacugcaaaguacagaua

SEQ ID NO: 447515 - RNA, 19 nt, Human
uaauaaauaaaaccauaca

SEQ ID NO: 447516 - RNA, 18 nt, Human
uacacacauauguggggu

SEQ ID NO: 447517 - RNA, 20 nt, Human
uacagauaaaaccauccuuu

SEQ ID NO: 447518 - RNA, 27 nt, Human
uauggacuuccuuaaaaaaaaaaaagc

SEQ ID NO: 447519 - RNA, 25 nt, Human
uauguacacaacagcacuccuucca

SEQ ID NO: 447520 - RNA, 22 nt, Human
ucaggacccugguaacugaugc

SEQ ID NO: 447521 - RNA, 18 nt, Human
uccaaugcuuaauaugac

SEQ ID NO: 447522 - RNA, 19 nt, Human
ucccugaaggaggaguggg

SEQ ID NO: 447523 - RNA, 21 nt, Human
ucccugaaggaggagugggga

SEQ ID NO: 447524 - RNA, 24 nt, Human
uccuuaaaaaaaaaaaagcuuuua

SEQ ID NO: 447525 - RNA, 18 nt, Human
uccuuucucagccccucu

SEQ ID NO: 447526 - RNA, 21 nt, Human
ucucagaaaccaaaaacccag

SEQ ID NO: 447527 - RNA, 23 nt, Human
ucuccccccgggccuuggcugga

SEQ ID NO: 447528 - RNA, 24 nt, Human
ugaagauagaauccuuucuccucc

SEQ ID NO: 447529 - RNA, 22 nt, Human
ugaaucacagaaaaaugugccu

SEQ ID NO: 447530 - RNA, 20 nt, Human
ugacaaagaggggaggggag

SEQ ID NO: 447531 - RNA, 21 nt, Human
ugacaaagaggggaggggagg

SEQ ID NO: 447532 - RNA, 18 nt, Human
ugagaggagggccuccca

SEQ ID NO: 447533 - RNA, 24 nt, Human
ugagaggagggccucccaacuuga

SEQ ID NO: 447534 - RNA, 19 nt, Human
ugagcaaggugagaggagg

SEQ ID NO: 447535 - RNA, 18 nt, Human
ugagcagaccaagcaaca

SEQ ID NO: 447536 - RNA, 24 nt, Human
ugagcagaccaagcaacaugcggg

SEQ ID NO: 447537 - RNA, 18 nt, Human
ugccuggggucuuaugga

SEQ ID NO: 447538 - RNA, 24 nt, Human
uggacuuccuuaaaaaaaaaaaag

SEQ ID NO: 447539 - RNA, 20 nt, Human
uggccaaaaaaaaaugaauc

SEQ ID NO: 447540 - RNA, 21 nt, Human
uggggugagggcagaccaugg

SEQ ID NO: 447541 - RNA, 24 nt, Human
uucaaaauaucacuguuaacugca

SEQ ID NO: 447542 - RNA, 23 nt, Human
aaaaaugggggguaaaggaagaa

SEQ ID NO: 447543 - RNA, 19 nt, Human
aaucaccacacacacacca

SEQ ID NO: 447544 - RNA, 33 nt, Human
acauauacacacauaucuacacaugcacauggu

SEQ ID NO: 447545 - RNA, 18 nt, Human
accacacacacaccacag

SEQ ID NO: 447546 - RNA, 24 nt, Human
acccgcucuccaaucucuccccac

SEQ ID NO: 447547 - RNA, 20 nt, Human
acuggccaucuucagucccu

SEQ ID NO: 447548 - RNA, 22 nt, Human
agagggcacaggaagcauccag

SEQ ID NO: 447549 - RNA, 18 nt, Human
agcucagacuuagcaucu

SEQ ID NO: 447550 - RNA, 19 nt, Human
augcacauguacacacaca

SEQ ID NO: 447551 - RNA, 19 nt, Human
auggagcacucagucauuu

SEQ ID NO: 447552 - RNA, 21 nt, Human
caacugccacagaacccuagc

SEQ ID NO: 447553 - RNA, 22 nt, Human
cacaaucaccacacacacacca

SEQ ID NO: 447554 - RNA, 19 nt, Human
cacacacaccacagucagc

SEQ ID NO: 447555 - RNA, 24 nt, Human
cacacacaccacagucagcagaau

SEQ ID NO: 447556 - RNA, 19 nt, Human
cacacaccacagucagcag

SEQ ID NO: 447557 - RNA, 21 nt, Human
cacaccacagucagcagaaug

SEQ ID NO: 447558 - RNA, 19 nt, Human
cacacccgcucuccaaucu

SEQ ID NO: 447559 - RNA, 21 nt, Human
cacagaacccuagccuccaag

SEQ ID NO: 447560 - RNA, 18 nt, Human
cacagauuuucugagaca

SEQ ID NO: 447561 - RNA, 24 nt, Human
cacagauuuucugagacacauacu

SEQ ID NO: 447562 - RNA, 22 nt, Human
cacagucagcagaaugccuuuc

SEQ ID NO: 447563 - RNA, 20 nt, Human
cacauaucuacacaugcaca

SEQ ID NO: 447564 - RNA, 22 nt, Human
cacaugcacauguacacacaca

SEQ ID NO: 447565 - RNA, 23 nt, Human
caccacacacacaccacagucag

SEQ ID NO: 447566 - RNA, 18 nt, Human
caccacacacacaccacg

SEQ ID NO: 447567 - RNA, 24 nt, Human
cacccagcacagucucuucuggag

SEQ ID NO: 447568 - RNA, 21 nt, Human
cacucagucauuuguggguca

SEQ ID NO: 447569 - RNA, 21 nt, Human
cagauuuucugagacacauac

SEQ ID NO: 447570 - RNA, 22 nt, Human
caggacaaaggcaagaaagccc

SEQ ID NO: 447571 - RNA, 19 nt, Human
cagggcucucauccccugg

SEQ ID NO: 447572 - RNA, 19 nt, Human
cauuggccacacauucaag

SEQ ID NO: 447573 - RNA, 20 nt, Human
ccaagccacacccagcacag

SEQ ID NO: 447574 - RNA, 18 nt, Human
ccccacacgucaggcacc

SEQ ID NO: 447575 - RNA, 20 nt, Human
cccccugccagccacugucc

SEQ ID NO: 447576 - RNA, 22 nt, Human
cccugccagccacugucugccu

SEQ ID NO: 447577 - RNA, 22 nt, Human
cccugggugccaagccacaccc

SEQ ID NO: 447578 - RNA, 20 nt, Human
ccuccugcagucagggugac

SEQ ID NO: 447579 - RNA, 24 nt, Human
ccucgucccgggccugggcccccc

SEQ ID NO: 447580 - RNA, 18 nt, Human
ccugagcugaaggggagg

SEQ ID NO: 447581 - RNA, 22 nt, Human
cgggccugggccccccugccag

SEQ ID NO: 447582 - RNA, 23 nt, Human
cucugcacuaagccucugucucc

SEQ ID NO: 447583 - RNA, 23 nt, Human
cuggagcucagacuuagcaucuu

SEQ ID NO: 447584 - RNA, 20 nt, Human
cugugccuccugcagucagg

SEQ ID NO: 447585 - RNA, 21 nt, Human
cuuggcccugagcauagcagg

SEQ ID NO: 447586 - RNA, 21 nt, Human
gagcacucagucauuuguggg

SEQ ID NO: 447587 - RNA, 18 nt, Human
gaggccucgucccgggcc

SEQ ID NO: 447588 - RNA, 23 nt, Human
gcaagaaagcccaggagguucac

SEQ ID NO: 447589 - RNA, 20 nt, Human
gcagccacacccgcucucca

SEQ ID NO: 447590 - RNA, 22 nt, Human
gccacacccgcucuccaaucuc

SEQ ID NO: 447591 - RNA, 21 nt, Human
gcccugcaacugccacagaac

SEQ ID NO: 447592 - RNA, 20 nt, Human
gccugagcugaaggggaggc

SEQ ID NO: 447593 - RNA, 21 nt, Human
gccugggccccccugccagcc

SEQ ID NO: 447594 - RNA, 18 nt, Human
gcugugccugagcugaag

SEQ ID NO: 447595 - RNA, 22 nt, Human
ggaucaggacaaaggcaagaaa

SEQ ID NO: 447596 - RNA, 22 nt, Human
ggccugggccccccugccagcc

SEQ ID NO: 447597 - RNA, 23 nt, Human
gggguugggcagccacacccgcu

SEQ ID NO: 447598 - RNA, 28 nt, Human
ggguuccccacacgucaggcacccugcu

SEQ ID NO: 447599 - RNA, 19 nt, Human
gguugccacgagagguagu

SEQ ID NO: 447600 - RNA, 26 nt, Human
gugguccacagcucccguuucuucac

SEQ ID NO: 447601 - RNA, 24 nt, Human
gugguuccaaagcucaaggcugag

SEQ ID NO: 447602 - RNA, 25 nt, Human
uaagccucugucuccauuggccaca

SEQ ID NO: 447603 - RNA, 24 nt, Human
uacauauacacacauaucuacaca

SEQ ID NO: 447604 - RNA, 31 nt, Human
uacauauacacacauaucuacacaugcacag

SEQ ID NO: 447605 - RNA, 24 nt, Human
uaggugucucccaacaugugcccc

SEQ ID NO: 447606 - RNA, 25 nt, Human
ucaccacacacacaccacagucaac

SEQ ID NO: 447607 - RNA, 21 nt, Human
ucacccagaugcaggaucuaa

SEQ ID NO: 447608 - RNA, 22 nt, Human
ucaggacccagcuacuggccau

SEQ ID NO: 447609 - RNA, 22 nt, Human
ucaggcggccguuuucauuggc

SEQ ID NO: 447610 - RNA, 18 nt, Human
ucauuugugggucaggag

SEQ ID NO: 447611 - RNA, 18 nt, Human
uccauaacauugcccugc

SEQ ID NO: 447612 - RNA, 20 nt, Human
ucccccuugaauccccucca

SEQ ID NO: 447613 - RNA, 22 nt, Human
ucuacacaugcacauguacaca

SEQ ID NO: 447614 - RNA, 19 nt, Human
ucugagacacauacucuga

SEQ ID NO: 447615 - RNA, 24 nt, Human
ucugcaggcaggaauuauggaggc

SEQ ID NO: 447616 - RNA, 18 nt, Human
ucugccuugcugucucug

SEQ ID NO: 447617 - RNA, 21 nt, Human
ucuggaagcagaugcucugga

SEQ ID NO: 447618 - RNA, 18 nt, Human
ugaauccccuccacucuc

SEQ ID NO: 447619 - RNA, 18 nt, Human
ugacagugaauccaaugg

SEQ ID NO: 447620 - RNA, 18 nt, Human
ugacagugucaguccugg

SEQ ID NO: 447621 - RNA, 21 nt, Human
ugaccuagauuugucuuccuu

SEQ ID NO: 447622 - RNA, 24 nt, Human
ugagacacauacucugaauucuuc

SEQ ID NO: 447623 - RNA, 21 nt, Human
ugagcugaaggggaggccucg

SEQ ID NO: 447624 - RNA, 25 nt, Human
ugauacauauacacacauaucuaca

SEQ ID NO: 447625 - RNA, 19 nt, Human
ugcaacugccacagaaccc

SEQ ID NO: 447626 - RNA, 23 nt, Human
ugcagaaacaagcagggugacua

SEQ ID NO: 447627 - RNA, 19 nt, Human
ugccaggccguuggcugcu

SEQ ID NO: 447628 - RNA, 18 nt, Human
ugccagugcucuucgccc

SEQ ID NO: 447629 - RNA, 21 nt, Human
ugccugagcugaaggggaggc

SEQ ID NO: 447630 - RNA, 25 nt, Human
ugcucuggaugggguugggcagcca

SEQ ID NO: 447631 - RNA, 21 nt, Human
uggaagagaagaacuggcuug

SEQ ID NO: 447632 - RNA, 20 nt, Human
uggcuuccugcucauuccug

SEQ ID NO: 447633 - RNA, 22 nt, Human
uggguucaggcggccguuuuca

SEQ ID NO: 447634 - RNA, 22 nt, Human
uguccugaagcucgaucucuau

SEQ ID NO: 447635 - RNA, 24 nt, Human
ugucuccauuggccacacauucaa

SEQ ID NO: 447636 - RNA, 19 nt, Human
ugucucugucccucgccuc

SEQ ID NO: 447637 - RNA, 20 nt, Human
ugucucugucccucgccucc

SEQ ID NO: 447638 - RNA, 22 nt, Human
ugucucugucccucgccuccuc

SEQ ID NO: 447639 - RNA, 25 nt, Human
ugugguuccaaagcucaaggcugag

SEQ ID NO: 447640 - RNA, 19 nt, Human
uucauuggcugcucugucc

SEQ ID NO: 447641 - RNA, 24 nt, Human
uuccuuggcccugagcauagcagg

SEQ ID NO: 447642 - RNA, 18 nt, Human
uugggcuccucugccagg

SEQ ID NO: 447643 - RNA, 18 nt, Human
uuuacugaggguucccca

SEQ ID NO: 447644 - RNA, 23 nt, Human
acuugcugauuggggacaggcug

SEQ ID NO: 447645 - RNA, 23 nt, Human
agccacaggcucuugggaagccc

SEQ ID NO: 447646 - RNA, 20 nt, Human
aggacucaucgaggaugucg

SEQ ID NO: 447647 - RNA, 28 nt, Human
aggcugugcugccgccggcuggccuccc

SEQ ID NO: 447648 - RNA, 19 nt, Human
agggguaggaagggcauag

SEQ ID NO: 447649 - RNA, 20 nt, Human
caaaaccgaaaucucccugc

SEQ ID NO: 447650 - RNA, 21 nt, Human
caaugguggcguccaccuucu

SEQ ID NO: 447651 - RNA, 18 nt, Human
caccuggcuuccccaggc

SEQ ID NO: 447652 - RNA, 19 nt, Human
caccuggcuuccccaggcc

SEQ ID NO: 447653 - RNA, 21 nt, Human
cacgguguggcccccucgagc

SEQ ID NO: 447654 - RNA, 20 nt, Human
cagagccuggagcuuagggc

SEQ ID NO: 447655 - RNA, 19 nt, Human
cagcagcugagaggggccc

SEQ ID NO: 447656 - RNA, 20 nt, Human
caguccagguggaguugucc

SEQ ID NO: 447657 - RNA, 26 nt, Human
ccaccaccuccgggagcuggcuccag

SEQ ID NO: 447658 - RNA, 20 nt, Human
cccucggggcuggaggacuc

SEQ ID NO: 447659 - RNA, 25 nt, Human
cccuugugcccacguuuccucccca

SEQ ID NO: 447660 - RNA, 18 nt, Human
ccgggagcuggcuccagg

SEQ ID NO: 447661 - RNA, 21 nt, Human
ccucaaaaccgaaaucucccu

SEQ ID NO: 447662 - RNA, 22 nt, Human
ccucaaaaccgaaaucucccug

SEQ ID NO: 447663 - RNA, 20 nt, Human
ccuccgggagcuggcuccag

SEQ ID NO: 447664 - RNA, 22 nt, Human
ccuccugccuuuuccgcuccuc

SEQ ID NO: 447665 - RNA, 19 nt, Human
ccugccggguccccucccu

SEQ ID NO: 447666 - RNA, 27 nt, Human
ccugggacacgguguggcccccucgag

SEQ ID NO: 447667 - RNA, 20 nt, Human
ccuugaaggaacccuugugc

SEQ ID NO: 447668 - RNA, 20 nt, Human
ccuugugcccacguuuccuc

SEQ ID NO: 447669 - RNA, 19 nt, Human
cguggggcacuccugggca

SEQ ID NO: 447670 - RNA, 19 nt, Human
cuccaggugaccugggcgg

SEQ ID NO: 447671 - RNA, 20 nt, Human
cugggcgggccgguagcucu

SEQ ID NO: 447672 - RNA, 22 nt, Human
cuggggacaugugaucuuccuu

SEQ ID NO: 447673 - RNA, 23 nt, Human
cuugucccacucagggguaggaa

SEQ ID NO: 447674 - RNA, 22 nt, Human
cuuguuuuuggccgggcuccga

SEQ ID NO: 447675 - RNA, 22 nt, Human
gaucuccugguagagcuggggg

SEQ ID NO: 447676 - RNA, 18 nt, Human
gccccagggaaccaugcu

SEQ ID NO: 447677 - RNA, 22 nt, Human
gcgucuucuuguuuuuggccgg

SEQ ID NO: 447678 - RNA, 18 nt, Human
gcucuugggaagccccag

SEQ ID NO: 447679 - RNA, 22 nt, Human
ggcacucaaggcccuucuuguc

SEQ ID NO: 447680 - RNA, 23 nt, Human
ggccgggcuccgaguaugaggcu

SEQ ID NO: 447681 - RNA, 20 nt, Human
gggcccagccagccaacggg

SEQ ID NO: 447682 - RNA, 25 nt, Human
gucuucuuguuuuuggccgggcucc

SEQ ID NO: 447683 - RNA, 18 nt, Human
gugaagugucuggagccc

SEQ ID NO: 447684 - RNA, 19 nt, Human
guguggcccccucgagcuu

SEQ ID NO: 447685 - RNA, 18 nt, Human
uccaggugaccugggcgg

SEQ ID NO: 447686 - RNA, 20 nt, Human
ucccugggacacgguguggc

SEQ ID NO: 447687 - RNA, 19 nt, Human
uccggccggccccuucuca

SEQ ID NO: 447688 - RNA, 21 nt, Human
uccgggagcuggcuccaggug

SEQ ID NO: 447689 - RNA, 21 nt, Human
uccucagccagagccuggagc

SEQ ID NO: 447690 - RNA, 22 nt, Human
uccuggcugguguucaggcccc

SEQ ID NO: 447691 - RNA, 19 nt, Human
uccugggcacucaaggccc

SEQ ID NO: 447692 - RNA, 19 nt, Human
uccugggcacucaaggccc

SEQ ID NO: 447693 - RNA, 19 nt, Human
ugccggguccccucccucc

SEQ ID NO: 447694 - RNA, 27 nt, Human
uggggacaugugaucuucccccccugg

SEQ ID NO: 447695 - RNA, 18 nt, Human
uggguccuugagaccagc

SEQ ID NO: 447696 - RNA, 23 nt, Human
uggguuccucagccagagccugg

SEQ ID NO: 447697 - RNA, 18 nt, Human
uuagaaaccucaaaaccg

SEQ ID NO: 447698 - RNA, 25 nt, Human
uucaggccccgcuccuggaucuccu

SEQ ID NO: 447699 - RNA, 19 nt, Human
uucuugucccacucagggg

SEQ ID NO: 447700 - RNA, 19 nt, Human
uugugcccacguuuccucc

SEQ ID NO: 447701 - RNA, 26 nt, Human
uuuccuccccagcgucuucuuguuuu

SEQ ID NO: 447702 - RNA, 23 nt, Human
uuuuccgcuccucaguggagagc

SEQ ID NO: 447703 - RNA, 23 nt, Human
uuuuuuuucuuaagaaauaacuu

SEQ ID NO: 447704 - RNA, 19 nt, Human
uuuuuuuuuuuuuucuuaa

SEQ ID NO: 447705 - RNA, 22 nt, Human
aaaagaaaacaaaagaacaaca

SEQ ID NO: 447706 - RNA, 23 nt, Human
aaaagaacaacaaaacauucugg

SEQ ID NO: 447707 - RNA, 24 nt, Human
aaauggccccagguauccaaggau

SEQ ID NO: 447708 - RNA, 19 nt, Human
aagaaaacaaaagaacaac

SEQ ID NO: 447709 - RNA, 23 nt, Human
aagaaaacaaaagaacaacaaaa

SEQ ID NO: 447710 - RNA, 19 nt, Human
aagaacccagcagcugcgu

SEQ ID NO: 447711 - RNA, 19 nt, Human
aagaaggcaugaaccacug

SEQ ID NO: 447712 - RNA, 20 nt, Human
aauggccccagguauccaag

SEQ ID NO: 447713 - RNA, 18 nt, Human
acaaaaaagaaaacaaaa

SEQ ID NO: 447714 - RNA, 20 nt, Human
accccaaccuuuauuccauc

SEQ ID NO: 447715 - RNA, 25 nt, Human
accuuuauuccaucaacuccaggaa

SEQ ID NO: 447716 - RNA, 21 nt, Human
agaaaacaaaagaacaacaaa

SEQ ID NO: 447717 - RNA, 18 nt, Human
agauguggagauaggagg

SEQ ID NO: 447718 - RNA, 24 nt, Human
agcccccucaguaauguucuucag

SEQ ID NO: 447719 - RNA, 22 nt, Human
aggcgaccaagcccagguccgc

SEQ ID NO: 447720 - RNA, 21 nt, Human
agggacauggcccugcccaca

SEQ ID NO: 447721 - RNA, 20 nt, Human
agggcaagaacccagcagcu

SEQ ID NO: 447722 - RNA, 19 nt, Human
agggugcuguggcugcagc

SEQ ID NO: 447723 - RNA, 21 nt, Human
augaaggacggagaaagggag

SEQ ID NO: 447724 - RNA, 24 nt, Human
augaaggacggagaaagggagaac

SEQ ID NO: 447725 - RNA, 23 nt, Human
augguugcugagguggaagauga

SEQ ID NO: 447726 - RNA, 19 nt, Human
caacaaaccauuauggcca

SEQ ID NO: 447727 - RNA, 18 nt, Human
caacuccaggaagccagg

SEQ ID NO: 447728 - RNA, 23 nt, Human
caagaacccagcagcugcgugga

SEQ ID NO: 447729 - RNA, 23 nt, Human
caggaagccagguuaucucccag

SEQ ID NO: 447730 - RNA, 24 nt, Human
caguaguguucaaggacaaggccc

SEQ ID NO: 447731 - RNA, 22 nt, Human
caguggggcacggggcaggggg

SEQ ID NO: 447732 - RNA, 24 nt, Human
ccaacaaaccauuauggccacccc

SEQ ID NO: 447733 - RNA, 23 nt, Human
cccaacaaaccauuauggccacc

SEQ ID NO: 447734 - RNA, 21 nt, Human
ccccauaacuaauaaacaaua

SEQ ID NO: 447735 - RNA, 21 nt, Human
cccccaacaaaccauuauggc

SEQ ID NO: 447736 - RNA, 18 nt, Human
cccccaccccucaacuuc

SEQ ID NO: 447737 - RNA, 21 nt, Human
cccccauaacuaauaaacaau

SEQ ID NO: 447738 - RNA, 24 nt, Human
ccccccguuacugcagaugaaggc

SEQ ID NO: 447739 - RNA, 20 nt, Human
cccgggucggagcaacuuuc

SEQ ID NO: 447740 - RNA, 22 nt, Human
ccgggucggagcaacuuucuuu

SEQ ID NO: 447741 - RNA, 24 nt, Human
ccucugaucccuauggcuugguuc

SEQ ID NO: 447742 - RNA, 18 nt, Human
cggauguugcaggggagg

SEQ ID NO: 447743 - RNA, 22 nt, Human
gaagucauucucucccccaccc

SEQ ID NO: 447744 - RNA, 21 nt, Human
gcaagaagaaaauucuucgac

SEQ ID NO: 447745 - RNA, 21 nt, Human
ggaagaaggcaugaaccacug

SEQ ID NO: 447746 - RNA, 19 nt, Human
ggcuggucgacauuugggg

SEQ ID NO: 447747 - RNA, 18 nt, Human
gggcaagaacccagcagc

SEQ ID NO: 447748 - RNA, 23 nt, Human
gggcaguagggugcuguggcugc

SEQ ID NO: 447749 - RNA, 22 nt, Human
ggggcuggucgacauuuggggg

SEQ ID NO: 447750 - RNA, 22 nt, Human
ggggguguuguggccuaauucc

SEQ ID NO: 447751 - RNA, 19 nt, Human
gguggaagaugaggucagg

SEQ ID NO: 447752 - RNA, 23 nt, Human
uaaagcacucggucccgccggcu

SEQ ID NO: 447753 - RNA, 23 nt, Human
uaagagguugaggggagaggaga

SEQ ID NO: 447754 - RNA, 25 nt, Human
uacaaaaaagaaaacaaaagaacaa

SEQ ID NO: 447755 - RNA, 26 nt, Human
uacaaaaaagaaaacaaaagaacaac

SEQ ID NO: 447756 - RNA, 18 nt, Human
uauuccaucaacuccagg

SEQ ID NO: 447757 - RNA, 23 nt, Human
ucccccaccccucaacuucuuca

SEQ ID NO: 447758 - RNA, 21 nt, Human
uccccuagcuucuuaaauggc

SEQ ID NO: 447759 - RNA, 20 nt, Human
ucccuauggcuugguuccca

SEQ ID NO: 447760 - RNA, 22 nt, Human
ucccucacccccaacaaaccau

SEQ ID NO: 447761 - RNA, 20 nt, Human
ucccuguggguuuuuucccu

SEQ ID NO: 447762 - RNA, 18 nt, Human
ugaaggacggagaaaggg

SEQ ID NO: 447763 - RNA, 21 nt, Human
ugaggggagaggagaaaggga

SEQ ID NO: 447764 - RNA, 22 nt, Human
ugaggggagaggagaaagggac

SEQ ID NO: 447765 - RNA, 19 nt, Human
ugagguggaagaugagguc

SEQ ID NO: 447766 - RNA, 21 nt, Human
ugcugagguggaagaugaggu

SEQ ID NO: 447767 - RNA, 21 nt, Human
uggaagaugaggucagggcuc

SEQ ID NO: 447768 - RNA, 21 nt, Human
uggcaagaagaaaauucuucg

SEQ ID NO: 447769 - RNA, 20 nt, Human
uggcaucugugguguagcuu

SEQ ID NO: 447770 - RNA, 21 nt, Human
uggcccugcccacagcccucc

SEQ ID NO: 447771 - RNA, 18 nt, Human
uggcuggggaagagguca

SEQ ID NO: 447772 - RNA, 18 nt, Human
uguugcaggggagggccg

SEQ ID NO: 447773 - RNA, 26 nt, Human
uuagcccccucaguaauguucuucag

SEQ ID NO: 447774 - RNA, 24 nt, Human
uuccccuagcuucuuaaauggccc

SEQ ID NO: 447775 - RNA, 25 nt, Human
uucccugaauuuuuuuuuuaaacaa

SEQ ID NO: 447776 - RNA, 26 nt, Human
uucuucagagauguggagauaggagg

SEQ ID NO: 447777 - RNA, 25 nt, Human
uuggagauuuuccaacccacccuag

SEQ ID NO: 447778 - RNA, 20 nt, Human
uuucaaauguucccucauca

SEQ ID NO: 447779 - RNA, 18 nt, Human
uuucccucacccccaaca

SEQ ID NO: 447780 - RNA, 21 nt, Human
uuuuuuuuuuuuggaguucca

SEQ ID NO: 447781 - RNA, 19 nt, Human
uuuuuuuuuuuuuuuuugg

SEQ ID NO: 447782 - RNA, 23 nt, Human
uuuuuuuuuuuuuuuuuggaguu

SEQ ID NO: 447783 - RNA, 24 nt, Human
aaacauucauugaccaccuuccca

SEQ ID NO: 447784 - RNA, 22 nt, Human
aaaguaugaaaaagugcuucuc

SEQ ID NO: 447785 - RNA, 18 nt, Human
aaagugcuucuccaaacc

SEQ ID NO: 447786 - RNA, 22 nt, Human
aaauaauaaaguauauaccuug

SEQ ID NO: 447787 - RNA, 23 nt, Human
aacauguauacuuucacaaaagu

SEQ ID NO: 447788 - RNA, 18 nt, Human
aagaaucauucauucuuu

SEQ ID NO: 447789 - RNA, 22 nt, Human
aagaccuauaaauacagaaaua

SEQ ID NO: 447790 - RNA, 24 nt, Human
aagcagagcaggaaagcccaaagc

SEQ ID NO: 447791 - RNA, 19 nt, Human
aagcucuggccuuucucag

SEQ ID NO: 447792 - RNA, 22 nt, Human
aagugcuucuccaaaccguucc

SEQ ID NO: 447793 - RNA, 24 nt, Human
aagugguacagaagcacaagagga

SEQ ID NO: 447794 - RNA, 24 nt, Human
acaaaaacauucauuucaucaaaa

SEQ ID NO: 447795 - RNA, 22 nt, Human
acaguacuagggacaaagguac

SEQ ID NO: 447796 - RNA, 25 nt, Human
acccuaggcgacuacaaaacuccca

SEQ ID NO: 447797 - RNA, 18 nt, Human
agauacgagagacugggc

SEQ ID NO: 447798 - RNA, 22 nt, Human
agcagagcaggaaagcccaaag

SEQ ID NO: 447799 - RNA, 21 nt, Human
agcuccacgaugccgggcggc

SEQ ID NO: 447800 - RNA, 27 nt, Human
aggcagaugaaacacaaugaauacagg

SEQ ID NO: 447801 - RNA, 19 nt, Human
aggcgacuacaaaacuccc

SEQ ID NO: 447802 - RNA, 22 nt, Human
agggggccccagcuccacgaug

SEQ ID NO: 447803 - RNA, 23 nt, Human
agugcuucuccaaaccguuccau

SEQ ID NO: 447804 - RNA, 19 nt, Human
auacaaaaacauucauuuc

SEQ ID NO: 447805 - RNA, 22 nt, Human
auauaucuugucacacagcuug

SEQ ID NO: 447806 - RNA, 20 nt, Human
augaaguugcaaaguucaga

SEQ ID NO: 447807 - RNA, 22 nt, Human
caaaccucuuuucccaacacac

SEQ ID NO: 447808 - RNA, 19 nt, Human
caacugaaaguaacuuguu

SEQ ID NO: 447809 - RNA, 18 nt, Human
cacacagcuugaaugcac

SEQ ID NO: 447810 - RNA, 22 nt, Human
cacuugggaaauacaacacagg

SEQ ID NO: 447811 - RNA, 22 nt, Human
cagaauccccagggauguuuuc

SEQ ID NO: 447812 - RNA, 18 nt, Human
caguacuagggacaaagg

SEQ ID NO: 447813 - RNA, 18 nt, Human
cauccauccagacacuug

SEQ ID NO: 447814 - RNA, 23 nt, Human
cauucauuucaucaaaacauuca

SEQ ID NO: 447815 - RNA, 21 nt, Human
ccagacacuugggaaauacaa

SEQ ID NO: 447816 - RNA, 22 nt, Human
ccagacacuugggaaauacaac

SEQ ID NO: 447817 - RNA, 24 nt, Human
cccaaaagcagagcaggaaagccc

SEQ ID NO: 447818 - RNA, 21 nt, Human
ccccagcuccacgaugccggg

SEQ ID NO: 447819 - RNA, 20 nt, Human
cccuuugggaugucaccgcu

SEQ ID NO: 447820 - RNA, 19 nt, Human
ccucuggagaacauaauua

SEQ ID NO: 447821 - RNA, 19 nt, Human
cgacccaaaagcagagcag

SEQ ID NO: 447822 - RNA, 23 nt, Human
cuaccacaucuaagagcugggaa

SEQ ID NO: 447823 - RNA, 20 nt, Human
cucuucuagguacuuagcug

SEQ ID NO: 447824 - RNA, 22 nt, Human
cugcagcagguucacuugcugu

SEQ ID NO: 447825 - RNA, 21 nt, Human
cugccgggccugcccuuuggg

SEQ ID NO: 447826 - RNA, 21 nt, Human
cuggcaggccuuccuaagccc

SEQ ID NO: 447827 - RNA, 21 nt, Human
cuuggcuuuccucugcuucug

SEQ ID NO: 447828 - RNA, 29 nt, Human
gagcaggaaagcccaaagcucuggccuuu

SEQ ID NO: 447829 - RNA, 21 nt, Human
gcagagcaggaaagcccaaag

SEQ ID NO: 447830 - RNA, 20 nt, Human
gcggcggcggcgacacggag

SEQ ID NO: 447831 - RNA, 19 nt, Human
ggaaagcccaaagcucugg

SEQ ID NO: 447832 - RNA, 21 nt, Human
guaaaucaaggcuggacaaag

SEQ ID NO: 447833 - RNA, 19 nt, Human
guacagaagcacaagagga

SEQ ID NO: 447834 - RNA, 24 nt, Human
guucugacgaagugcuuuucauuc

SEQ ID NO: 447835 - RNA, 23 nt, Human
uaaaacaguaguuuugagauucu

SEQ ID NO: 447836 - RNA, 24 nt, Human
uaaaaugacaucaaugcauuuacu

SEQ ID NO: 447837 - RNA, 20 nt, Human
uacaaaacucccaggcaaaa

SEQ ID NO: 447838 - RNA, 24 nt, Human
uaggccuaggcagaugaaacacaa

SEQ ID NO: 447839 - RNA, 27 nt, Human
ucaaaacauucauugaccaccuuccca

SEQ ID NO: 447840 - RNA, 21 nt, Human
ucaaaccaaguucacuucaug

SEQ ID NO: 447841 - RNA, 22 nt, Human
ucagagcuggcagccgcuucug

SEQ ID NO: 447842 - RNA, 23 nt, Human
uccaaauucuuccucuccugugu

SEQ ID NO: 447843 - RNA, 23 nt, Human
uccaaauucuuccucuccugugu

SEQ ID NO: 447844 - RNA, 19 nt, Human
uccagcuuacacagacaga

SEQ ID NO: 447845 - RNA, 19 nt, Human
uccauccagacacuuggga

SEQ ID NO: 447846 - RNA, 24 nt, Human
uccauccauccagacacuugggaa

SEQ ID NO: 447847 - RNA, 19 nt, Human
ucugauguuuuaggcuagc

SEQ ID NO: 447848 - RNA, 18 nt, Human
ucugcagcagguucacuu

SEQ ID NO: 447849 - RNA, 21 nt, Human
ugaguaccucuccauccaucc

SEQ ID NO: 447850 - RNA, 19 nt, Human
ugaguuggucuuuccugau

SEQ ID NO: 447851 - RNA, 20 nt, Human
ugcacaugauauauguacau

SEQ ID NO: 447852 - RNA, 24 nt, Human
ugggaugucaccgcugacccuagg

SEQ ID NO: 447853 - RNA, 21 nt, Human
ugguacagaagcacaagagga

SEQ ID NO: 447854 - RNA, 19 nt, Human
ugucacacagcuugaaugc

SEQ ID NO: 447855 - RNA, 20 nt, Human
uucacaaaaguaugaaaaag

SEQ ID NO: 447856 - RNA, 21 nt, Human
uucagagcuggcagccgcuuc

SEQ ID NO: 447857 - RNA, 25 nt, Human
uuuacacuugcagggagcucuucua

SEQ ID NO: 447858 - RNA, 20 nt, Human
uuuacugcuuucuuuucugu

SEQ ID NO: 447859 - RNA, 23 nt, Human
uuuucccaacacacuggcugaug

SEQ ID NO: 447860 - RNA, 22 nt, Human
aaaaagacaacaggaguacaga

SEQ ID NO: 447861 - RNA, 18 nt, Human
aaacaaaaccaggaacga

SEQ ID NO: 447862 - RNA, 18 nt, Human
aaacaagaugccaaaauc

SEQ ID NO: 447863 - RNA, 23 nt, Human
aaagcagcuccaucccuacacca

SEQ ID NO: 447864 - RNA, 21 nt, Human
aaauccaaacaaaaccaggaa

SEQ ID NO: 447865 - RNA, 20 nt, Human
aaauuaaaugugguuucugg

SEQ ID NO: 447866 - RNA, 27 nt, Human
aacaagaugccaaaauccaaacaaaaa

SEQ ID NO: 447867 - RNA, 22 nt, Human
aagaaaaacugggggccacugg

SEQ ID NO: 447868 - RNA, 20 nt, Human
aagaugccaaaauccaaaca

SEQ ID NO: 447869 - RNA, 21 nt, Human
aagaugccaaaauccaaacaa

SEQ ID NO: 447870 - RNA, 21 nt, Human
aagcaacuccccagcccaucc

SEQ ID NO: 447871 - RNA, 18 nt, Human
aagcugcagcggcggugu

SEQ ID NO: 447872 - RNA, 22 nt, Human
aaggaacccuggggaaacaagc

SEQ ID NO: 447873 - RNA, 24 nt, Human
acacacccgcugccugggcugugg

SEQ ID NO: 447874 - RNA, 18 nt, Human
acagcagagggucauggg

SEQ ID NO: 447875 - RNA, 18 nt, Human
accgcacagcagcaggca

SEQ ID NO: 447876 - RNA, 23 nt, Human
acucaauaaaguuugaaaagguc

SEQ ID NO: 447877 - RNA, 20 nt, Human
agacaacaggaguacagacc

SEQ ID NO: 447878 - RNA, 24 nt, Human
agaugccaaaauccaaacaaaacc

SEQ ID NO: 447879 - RNA, 21 nt, Human
agcccucuuuguccuccgccc

SEQ ID NO: 447880 - RNA, 21 nt, Human
agccgcgcggacccuggccuc

SEQ ID NO: 447881 - RNA, 21 nt, Human
agccugaagagggggguggcc

SEQ ID NO: 447882 - RNA, 21 nt, Human
agcgucgccuuccuggguggc

SEQ ID NO: 447883 - RNA, 22 nt, Human
aggaaggccaggccgagugggc

SEQ ID NO: 447884 - RNA, 25 nt, Human
aggauuagguuuccagagaagaggg

SEQ ID NO: 447885 - RNA, 21 nt, Human
aggccagagaguccugcccag

SEQ ID NO: 447886 - RNA, 19 nt, Human
agggagagacagcagaggg

SEQ ID NO: 447887 - RNA, 18 nt, Human
agggcaccaggagcaggg

SEQ ID NO: 447888 - RNA, 19 nt, Human
agggcagugggccccccuc

SEQ ID NO: 447889 - RNA, 21 nt, Human
aggggcacauggccuggcauu

SEQ ID NO: 447890 - RNA, 20 nt, Human
agggugccagccggcugaug

SEQ ID NO: 447891 - RNA, 25 nt, Human
aggugguucuggagcuaccgcacag

SEQ ID NO: 447892 - RNA, 18 nt, Human
auccaaacaaaaccagga

SEQ ID NO: 447893 - RNA, 21 nt, Human
augcugcugaauccugugggc

SEQ ID NO: 447894 - RNA, 20 nt, Human
caacaggaguacagaccugg

SEQ ID NO: 447895 - RNA, 19 nt, Human
caacuccccagcccauccc

SEQ ID NO: 447896 - RNA, 20 nt, Human
caagcaacuccccagcccau

SEQ ID NO: 447897 - RNA, 21 nt, Human
caagguguugagaguaagaau

SEQ ID NO: 447898 - RNA, 24 nt, Human
cacauccaagagcucaggcugccu

SEQ ID NO: 447899 - RNA, 24 nt, Human
cacgucuugguggcacaagcaacu

SEQ ID NO: 447900 - RNA, 18 nt, Human
cacugugcccaagccgcg

SEQ ID NO: 447901 - RNA, 25 nt, Human
cacuuuuccuccuguguucuggaga

SEQ ID NO: 447902 - RNA, 25 nt, Human
cagagugccaccccagcuguugggg

SEQ ID NO: 447903 - RNA, 18 nt, Human
cagcaccaggaccugcug

SEQ ID NO: 447904 - RNA, 20 nt, Human
cagcccaucccugcucacuu

SEQ ID NO: 447905 - RNA, 20 nt, Human
cagccgacugcaccgucuug

SEQ ID NO: 447906 - RNA, 23 nt, Human
caggaaggucccugagccagggc

SEQ ID NO: 447907 - RNA, 24 nt, Human
caggcagacugaccacacucccga

SEQ ID NO: 447908 - RNA, 26 nt, Human
cagggcagagugccaccccagcuguu

SEQ ID NO: 447909 - RNA, 18 nt, Human
caucuuugcuuuucagaa

SEQ ID NO: 447910 - RNA, 20 nt, Human
cauugcaggccacagaaggc

SEQ ID NO: 447911 - RNA, 22 nt, Human
ccaaaauccaaacaaaaccagg

SEQ ID NO: 447912 - RNA, 24 nt, Human
ccagccggcugaugcugugccaga

SEQ ID NO: 447913 - RNA, 18 nt, Human
ccaggagcagggaaaaag

SEQ ID NO: 447914 - RNA, 22 nt, Human
ccaggagcagggaaaaagacaa

SEQ ID NO: 447915 - RNA, 19 nt, Human
ccaggccgagugggccucg

SEQ ID NO: 447916 - RNA, 19 nt, Human
cccaagccgcgcggacccu

SEQ ID NO: 447917 - RNA, 18 nt, Human
cccagggcucugcuucag

SEQ ID NO: 447918 - RNA, 25 nt, Human
cccagugaucgcuaaaaacauagcc

SEQ ID NO: 447919 - RNA, 24 nt, Human
ccccagaugccugucaggaaggaa

SEQ ID NO: 447920 - RNA, 21 nt, Human
ccccagcccaucccugcucac

SEQ ID NO: 447921 - RNA, 23 nt, Human
cccguuccucacaguggcuguca

SEQ ID NO: 447922 - RNA, 21 nt, Human
cccuacacagguccagagggc

SEQ ID NO: 447923 - RNA, 22 nt, Human
cccugaucugggggagccaagg

SEQ ID NO: 447924 - RNA, 19 nt, Human
cccuugggagaacuugggg

SEQ ID NO: 447925 - RNA, 21 nt, Human
ccgacugcaccgucuuguccu

SEQ ID NO: 447926 - RNA, 23 nt, Human
ccgcgcggacccuggccuccuuc

SEQ ID NO: 447927 - RNA, 20 nt, Human
ccucacaguggcugucaguc

SEQ ID NO: 447928 - RNA, 18 nt, Human
ccugaagagggggguggc

SEQ ID NO: 447929 - RNA, 21 nt, Human
ccugcugcuggggccgguugc

SEQ ID NO: 447930 - RNA, 24 nt, Human
ccugcugcuggggccgguugcugg

SEQ ID NO: 447931 - RNA, 20 nt, Human
ccuggcgcagccugcucuuc

SEQ ID NO: 447932 - RNA, 19 nt, Human
ccuggcuucugcccuccca

SEQ ID NO: 447933 - RNA, 19 nt, Human
ccugggccuggccuccugc

SEQ ID NO: 447934 - RNA, 21 nt, Human
ccuucccugcucucuuccuuc

SEQ ID NO: 447935 - RNA, 24 nt, Human
cgccaggcccuggcucugcuccug

SEQ ID NO: 447936 - RNA, 19 nt, Human
cgcuacacacacacacaca

SEQ ID NO: 447937 - RNA, 24 nt, Human
cggaagggugccagccggcugaug

SEQ ID NO: 447938 - RNA, 21 nt, Human
cgggcuggggacuuggagaac

SEQ ID NO: 447939 - RNA, 24 nt, Human
cgucuuguccuuuuccgcuacaca

SEQ ID NO: 447940 - RNA, 24 nt, Human
cucccaggaaggucccugagccag

SEQ ID NO: 447941 - RNA, 19 nt, Human
cuccgccagcaccaggacc

SEQ ID NO: 447942 - RNA, 18 nt, Human
cucuuccccuucucgccc

SEQ ID NO: 447943 - RNA, 19 nt, Human
cucuuccuucugcucaucu

SEQ ID NO: 447944 - RNA, 19 nt, Human
cugaccacauccaagagcu

SEQ ID NO: 447945 - RNA, 18 nt, Human
cugagcugcgguuucccc

SEQ ID NO: 447946 - RNA, 25 nt, Human
cuggccugggccuggccuccugcag

SEQ ID NO: 447947 - RNA, 21 nt, Human
cuggcgcagccugcucuuccc

SEQ ID NO: 447948 - RNA, 18 nt, Human
cugugugcugagccacag

SEQ ID NO: 447949 - RNA, 22 nt, Human
cugugugcugagccacagaauu

SEQ ID NO: 447950 - RNA, 20 nt, Human
cuucagagccgccguaggag

SEQ ID NO: 447951 - RNA, 19 nt, Human
cuugauggucgguucacuu

SEQ ID NO: 447952 - RNA, 20 nt, Human
gaggguguccagcagccagc

SEQ ID NO: 447953 - RNA, 24 nt, Human
gcagcagccugaagaggggggugg

SEQ ID NO: 447954 - RNA, 20 nt, Human
gccaacagcugaacagggag

SEQ ID NO: 447955 - RNA, 21 nt, Human
gccaggcccuggcucugcucc

SEQ ID NO: 447956 - RNA, 24 nt, Human
gcccguuccucacaguggcuguca

SEQ ID NO: 447957 - RNA, 20 nt, Human
gcccuacacagguccagagg

SEQ ID NO: 447958 - RNA, 18 nt, Human
gcccuggcucugcuccug

SEQ ID NO: 447959 - RNA, 22 nt, Human
gccuccuucccugcucucuucc

SEQ ID NO: 447960 - RNA, 19 nt, Human
gcgaagggcgggcuccggg

SEQ ID NO: 447961 - RNA, 22 nt, Human
gcuacacacacacacacaagug

SEQ ID NO: 447962 - RNA, 19 nt, Human
gcugcugaauccugugggc

SEQ ID NO: 447963 - RNA, 20 nt, Human
gcugggugcuucuggcgcgu

SEQ ID NO: 447964 - RNA, 23 nt, Human
gcugucagucucugcuggggaga

SEQ ID NO: 447965 - RNA, 21 nt, Human
ggaagaaaaacugggggccac

SEQ ID NO: 447966 - RNA, 21 nt, Human
ggagaacuagagggcagaggg

SEQ ID NO: 447967 - RNA, 23 nt, Human
ggcaccaggagcagggaaaaaga

SEQ ID NO: 447968 - RNA, 19 nt, Human
ggcccagcaggugcuguca

SEQ ID NO: 447969 - RNA, 18 nt, Human
ggccgagugggccucggg

SEQ ID NO: 447970 - RNA, 19 nt, Human
ggccgagugggccucgggg

SEQ ID NO: 447971 - RNA, 20 nt, Human
ggccgguugcugggcagggc

SEQ ID NO: 447972 - RNA, 23 nt, Human
ggcgagugcggggucugcccccu

SEQ ID NO: 447973 - RNA, 18 nt, Human
gggaagaaaaacuggggg

SEQ ID NO: 447974 - RNA, 18 nt, Human
gggcagggcugggugcuu

SEQ ID NO: 447975 - RNA, 22 nt, Human
gggcagggcugggugcuucugg

SEQ ID NO: 447976 - RNA, 21 nt, Human
gggcccaagcugcagcggcgg

SEQ ID NO: 447977 - RNA, 21 nt, Human
gggcuuccggcaucuuugcuu

SEQ ID NO: 447978 - RNA, 19 nt, Human
ggggaaagcagcuccaucc

SEQ ID NO: 447979 - RNA, 25 nt, Human
ggggguggccugugcaaaggcaugu

SEQ ID NO: 447980 - RNA, 23 nt, Human
gucccagggcucugcuucagagc

SEQ ID NO: 447981 - RNA, 21 nt, Human
guguggcgagugcggggucug

SEQ ID NO: 447982 - RNA, 26 nt, Human
uaaaaacauagcccucuuuguccucc

SEQ ID NO: 447983 - RNA, 27 nt, Human
uacacacacacacacaagugaagaggg

SEQ ID NO: 447984 - RNA, 20 nt, Human
uagaaccauugacucaauaa

SEQ ID NO: 447985 - RNA, 22 nt, Human
uauuaccaaccuuugggaacaa

SEQ ID NO: 447986 - RNA, 23 nt, Human
ucacuagggugggcuuuuugggg

SEQ ID NO: 447987 - RNA, 19 nt, Human
uccagagaagaggguccca

SEQ ID NO: 447988 - RNA, 22 nt, Human
uccaucccuacaccaaccccag

SEQ ID NO: 447989 - RNA, 18 nt, Human
uccccagcccaucccugc

SEQ ID NO: 447990 - RNA, 20 nt, Human
uccccagcccaucccugcuc

SEQ ID NO: 447991 - RNA, 18 nt, Human
uccccagcugggccuggg

SEQ ID NO: 447992 - RNA, 19 nt, Human
ucccuacaccaaccccaga

SEQ ID NO: 447993 - RNA, 23 nt, Human
ucccugcucacuugcaggcagag

SEQ ID NO: 447994 - RNA, 21 nt, Human
uccgccagcaccaggaccugc

SEQ ID NO: 447995 - RNA, 22 nt, Human
ucuccccagcugggccugggcu

SEQ ID NO: 447996 - RNA, 21 nt, Human
ucucuggccugggccuggccu

SEQ ID NO: 447997 - RNA, 28 nt, Human
ucugcuccuggcgccccuuggcaggaca

SEQ ID NO: 447998 - RNA, 21 nt, Human
ugacccaggcuuccccagugg

SEQ ID NO: 447999 - RNA, 19 nt, Human
ugagcugcgguuuccccgc

SEQ ID NO: 448000 - RNA, 24 nt, Human
ugaggcccuacacagguccagagg

SEQ ID NO: 448001 - RNA, 20 nt, Human
ugaucugggggagccaaggu

SEQ ID NO: 448002 - RNA, 22 nt, Human
ugaucugggggagccaaggugu

SEQ ID NO: 448003 - RNA, 20 nt, Human
ugccugggcugugggucagu

SEQ ID NO: 448004 - RNA, 22 nt, Human
ugccugggcugugggucagucc

SEQ ID NO: 448005 - RNA, 21 nt, Human
ugccuggggucucuggccugg

SEQ ID NO: 448006 - RNA, 20 nt, Human
ugcucucuuccuucugcuca

SEQ ID NO: 448007 - RNA, 18 nt, Human
ugcuggucucuucagggc

SEQ ID NO: 448008 - RNA, 20 nt, Human
ugcugucaggcagggaccag

SEQ ID NO: 448009 - RNA, 20 nt, Human
ugcugucaggcagggaccag

SEQ ID NO: 448010 - RNA, 18 nt, Human
uggagaaacuaaacugga

SEQ ID NO: 448011 - RNA, 20 nt, Human
uggagcuaccgcacagcagc

SEQ ID NO: 448012 - RNA, 18 nt, Human
uggcaggaaggcccagca

SEQ ID NO: 448013 - RNA, 22 nt, Human
uggcaggacagggcgccaucuc

SEQ ID NO: 448014 - RNA, 25 nt, Human
uggcauugcaggccacagaaggcca

SEQ ID NO: 448015 - RNA, 19 nt, Human
uggccccuuauuaccaacc

SEQ ID NO: 448016 - RNA, 21 nt, Human
uggccccuuauuaccaaccuu

SEQ ID NO: 448017 - RNA, 22 nt, Human
uggccugggccuggccuccugc

SEQ ID NO: 448018 - RNA, 21 nt, Human
uggcggugcccagugaucgcu

SEQ ID NO: 448019 - RNA, 20 nt, Human
uggcuuggagaaggaauagu

SEQ ID NO: 448020 - RNA, 25 nt, Human
ugggaggcgaagggcgggcuccggg

SEQ ID NO: 448021 - RNA, 23 nt, Human
uggggaacguucauggguguucu

SEQ ID NO: 448022 - RNA, 19 nt, Human
ugggggccacuggcaggaa

SEQ ID NO: 448023 - RNA, 19 nt, Human
ugggugcccagggcagagu

SEQ ID NO: 448024 - RNA, 21 nt, Human
ugugauguuucaggggcaugg

SEQ ID NO: 448025 - RNA, 19 nt, Human
uguuggggacagcaugggg

SEQ ID NO: 448026 - RNA, 21 nt, Human
uguuggggacagcaugggguc

SEQ ID NO: 448027 - RNA, 22 nt, Human
uugaaaaggucuuaugagccaa

SEQ ID NO: 448028 - RNA, 18 nt, Human
uugauggucgguucacuu

SEQ ID NO: 448029 - RNA, 22 nt, Human
uugauggucgguucacuuuucc

SEQ ID NO: 448030 - RNA, 22 nt, Human
uuggagaacuagagggcagagg

SEQ ID NO: 448031 - RNA, 24 nt, Human
uuuccgcuacacacacacacacaa

SEQ ID NO: 448032 - RNA, 22 nt, Human
aaaaaacccugaaaccucccaa

SEQ ID NO: 448033 - RNA, 27 nt, Human
aaaacacuuuuguuccuuaucucucug

SEQ ID NO: 448034 - RNA, 18 nt, Human
aaaagaaacaaaagaaua

SEQ ID NO: 448035 - RNA, 21 nt, Human
aaaaugcagguacaauacugu

SEQ ID NO: 448036 - RNA, 23 nt, Human
aaacaacagaaaacacuuuuguu

SEQ ID NO: 448037 - RNA, 20 nt, Human
aaagagagagggaaagaaag

SEQ ID NO: 448038 - RNA, 18 nt, Human
aaauagcuuguaauuuga

SEQ ID NO: 448039 - RNA, 23 nt, Human
aacacggccuucuuugagugcca

SEQ ID NO: 448040 - RNA, 18 nt, Human
aacaugggaaaccccagu

SEQ ID NO: 448041 - RNA, 23 nt, Human
aaccccagugauagaagaaacag

SEQ ID NO: 448042 - RNA, 24 nt, Human
aacucacuugccccaaauguccug

SEQ ID NO: 448043 - RNA, 20 nt, Human
aacugcagggcugaaggaac

SEQ ID NO: 448044 - RNA, 18 nt, Human
aagaaaagauucccaggc

SEQ ID NO: 448045 - RNA, 23 nt, Human
aagaaacaaaagaauaaacuggc

SEQ ID NO: 448046 - RNA, 19 nt, Human
aagaaacagccugaaugca

SEQ ID NO: 448047 - RNA, 20 nt, Human
aagaaagagagagggaaagg

SEQ ID NO: 448048 - RNA, 28 nt, Human
aagaagaaagagagagggaaagaaagaa

SEQ ID NO: 448049 - RNA, 30 nt, Human
aagaagaaagagagagggaaagaaagaagc

SEQ ID NO: 448050 - RNA, 24 nt, Human
aagcaaaaagcuggccaaaagcga

SEQ ID NO: 448051 - RNA, 23 nt, Human
aaggaggagugagaaguuggaaa

SEQ ID NO: 448052 - RNA, 19 nt, Human
acaggguaaaaauggaaaa

SEQ ID NO: 448053 - RNA, 22 nt, Human
acagguacuccaacauccauag

SEQ ID NO: 448054 - RNA, 18 nt, Human
accaaaacacucugccag

SEQ ID NO: 448055 - RNA, 23 nt, Human
agaaagaagccagggaagauugu

SEQ ID NO: 448056 - RNA, 23 nt, Human
agaaaggagaggaggaaguaggg

SEQ ID NO: 448057 - RNA, 18 nt, Human
agaaaugucaacuucuga

SEQ ID NO: 448058 - RNA, 18 nt, Human
agaagcaugucaaggcca

SEQ ID NO: 448059 - RNA, 19 nt, Human
agaaguuggaaaaagaggu

SEQ ID NO: 448060 - RNA, 18 nt, Human
agaaucucaaccucugcu

SEQ ID NO: 448061 - RNA, 18 nt, Human
agagagggggggaaaaag

SEQ ID NO: 448062 - RNA, 22 nt, Human
agagagggggggaaaaagagag

SEQ ID NO: 448063 - RNA, 20 nt, Human
agagaucacugcccuaaacc

SEQ ID NO: 448064 - RNA, 20 nt, Human
agagcaaauccuggccucaa

SEQ ID NO: 448065 - RNA, 23 nt, Human
agagggaaagaaagaagccaggg

SEQ ID NO: 448066 - RNA, 19 nt, Human
agcucauucccuuccucaa

SEQ ID NO: 448067 - RNA, 22 nt, Human
aggaaaagggagcucagggcca

SEQ ID NO: 448068 - RNA, 20 nt, Human
aggagaagugcggguugaga

SEQ ID NO: 448069 - RNA, 19 nt, Human
aggagaggaggaaguaggg

SEQ ID NO: 448070 - RNA, 21 nt, Human
aggcagugaaucacucacagg

SEQ ID NO: 448071 - RNA, 20 nt, Human
aggcccagaaacuuguccaa

SEQ ID NO: 448072 - RNA, 23 nt, Human
agggagagacaggccuaggggga

SEQ ID NO: 448073 - RNA, 23 nt, Human
agggucucugugugugugugugu

SEQ ID NO: 448074 - RNA, 25 nt, Human
agggucucugugugugugugugugg

SEQ ID NO: 448075 - RNA, 23 nt, Human
agucaagaaauguaggcccagaa

SEQ ID NO: 448076 - RNA, 24 nt, Human
auacaaacacaucuaucguaauaa

SEQ ID NO: 448077 - RNA, 20 nt, Human
aucaaugcugcccaaacauc

SEQ ID NO: 448078 - RNA, 19 nt, Human
aucauagucugauacuccc

SEQ ID NO: 448079 - RNA, 24 nt, Human
aucaucagaaaaaaaacaauacaa

SEQ ID NO: 448080 - RNA, 19 nt, Human
augcugcccaaacaucugu

SEQ ID NO: 448081 - RNA, 20 nt, Human
caaaauguucccugaacaga

SEQ ID NO: 448082 - RNA, 19 nt, Human
caacagagcauguccagac

SEQ ID NO: 448083 - RNA, 24 nt, Human
caacaugggaaaccccagugauag

SEQ ID NO: 448084 - RNA, 22 nt, Human
caagaaaagcaaugaauagaaa

SEQ ID NO: 448085 - RNA, 23 nt, Human
cacaacuuugacacuuguuugac

SEQ ID NO: 448086 - RNA, 23 nt, Human
cacaguaccuaaaacacaguaaa

SEQ ID NO: 448087 - RNA, 18 nt, Human
caccccagcccaccccau

SEQ ID NO: 448088 - RNA, 24 nt, Human
caccccagcccaccccauccccaa

SEQ ID NO: 448089 - RNA, 21 nt, Human
cacggccuucuuugagugcca

SEQ ID NO: 448090 - RNA, 18 nt, Human
cacucugccagacaggau

SEQ ID NO: 448091 - RNA, 19 nt, Human
cacugaagggaggccugca

SEQ ID NO: 448092 - RNA, 21 nt, Human
cagaaaaaaaacaauacaaac

SEQ ID NO: 448093 - RNA, 24 nt, Human
cagaaaaaaaacaauacaaacaca

SEQ ID NO: 448094 - RNA, 19 nt, Human
cagaaaacacuuuuguucc

SEQ ID NO: 448095 - RNA, 24 nt, Human
cagaagugcugcaacaugggaaac

SEQ ID NO: 448096 - RNA, 20 nt, Human
cagacuguccauacagccac

SEQ ID NO: 448097 - RNA, 21 nt, Human
cagccugaaugcaaaauguuc

SEQ ID NO: 448098 - RNA, 20 nt, Human
cagcuauggcugcugcuugg

SEQ ID NO: 448099 - RNA, 21 nt, Human
caggacccuugccaaagaggc

SEQ ID NO: 448100 - RNA, 22 nt, Human
caggaggacuacaaucacggca

SEQ ID NO: 448101 - RNA, 25 nt, Human
cagucccgagccccggcccucuccc

SEQ ID NO: 448102 - RNA, 21 nt, Human
cauccaccccagcccacccca

SEQ ID NO: 448103 - RNA, 27 nt, Human
cauccccaaagcacuaaaagguccuuc

SEQ ID NO: 448104 - RNA, 22 nt, Human
caugaaaagggcuaugugugga

SEQ ID NO: 448105 - RNA, 21 nt, Human
ccaaaacacucugccagacag

SEQ ID NO: 448106 - RNA, 19 nt, Human
ccacaaagaaaagauuccc

SEQ ID NO: 448107 - RNA, 25 nt, Human
ccacagcaggucccauugaacacac

SEQ ID NO: 448108 - RNA, 23 nt, Human
ccaggaaaaacaugaguaugaca

SEQ ID NO: 448109 - RNA, 20 nt, Human
cccacaaagaaaagauuccc

SEQ ID NO: 448110 - RNA, 21 nt, Human
cccaccccauccccaaagcac

SEQ ID NO: 448111 - RNA, 20 nt, Human
cccagaucaggcucauccuu

SEQ ID NO: 448112 - RNA, 23 nt, Human
cccagaucaggcucauccuugac

SEQ ID NO: 448113 - RNA, 24 nt, Human
cccaggaaaaacaugaguaugacc

SEQ ID NO: 448114 - RNA, 21 nt, Human
ccccaaaacaacagaaaacac

SEQ ID NO: 448115 - RNA, 21 nt, Human
ccccggcccucuccccagauc

SEQ ID NO: 448116 - RNA, 23 nt, Human
cccgagccccggcccucucccca

SEQ ID NO: 448117 - RNA, 21 nt, Human
cccugggcagaagccccaagg

SEQ ID NO: 448118 - RNA, 18 nt, Human
ccuggagcccugggcaga

SEQ ID NO: 448119 - RNA, 27 nt, Human
ccuggagcccugggcagaagccccaag

SEQ ID NO: 448120 - RNA, 20 nt, Human
ccuggucuggaucaggaggc

SEQ ID NO: 448121 - RNA, 21 nt, Human
ccugugcuaggauggcaggag

SEQ ID NO: 448122 - RNA, 22 nt, Human
ccuuuuggagagcaaauccugg

SEQ ID NO: 448123 - RNA, 21 nt, Human
cgaagaagcaugucaaggcca

SEQ ID NO: 448124 - RNA, 19 nt, Human
cgacccagaagugcugcaa

SEQ ID NO: 448125 - RNA, 22 nt, Human
cgacuacaguuugcacauccag

SEQ ID NO: 448126 - RNA, 22 nt, Human
cggccuucuuugagugccagaa

SEQ ID NO: 448127 - RNA, 18 nt, Human
cgggaaaggcaaaauccu

SEQ ID NO: 448128 - RNA, 21 nt, Human
cgggaaaggcaaaauccuagc

SEQ ID NO: 448129 - RNA, 24 nt, Human
cgggaugaaaucaaagcgagaguu

SEQ ID NO: 448130 - RNA, 24 nt, Human
cgggcgccacgggaaaggcaaaau

SEQ ID NO: 448131 - RNA, 23 nt, Human
cguucccaggaaaaacaugagua

SEQ ID NO: 448132 - RNA, 20 nt, Human
cuacucccuuuacuucgcuc

SEQ ID NO: 448133 - RNA, 18 nt, Human
cuccacacagcuauggcu

SEQ ID NO: 448134 - RNA, 22 nt, Human
cuccauacuucuaucaaugcug

SEQ ID NO: 448135 - RNA, 19 nt, Human
cuccccuuggggcuguugg

SEQ ID NO: 448136 - RNA, 21 nt, Human
cuccgaaaaaagguccaucua

SEQ ID NO: 448137 - RNA, 20 nt, Human
cucuccugggaggcagaauc

SEQ ID NO: 448138 - RNA, 22 nt, Human
cugaaagcaaagggaaggggga

SEQ ID NO: 448139 - RNA, 21 nt, Human
cugauccuggagcccugggca

SEQ ID NO: 448140 - RNA, 22 nt, Human
cuggaucaggaggcauagagca

SEQ ID NO: 448141 - RNA, 21 nt, Human
cugggcaccaggacccuugcc

SEQ ID NO: 448142 - RNA, 20 nt, Human
cuguucugucagacugucca

SEQ ID NO: 448143 - RNA, 22 nt, Human
cuuccuaccaaccacauauuuc

SEQ ID NO: 448144 - RNA, 18 nt, Human
cuuucucucucuuucccu

SEQ ID NO: 448145 - RNA, 23 nt, Human
gaaaccucccaacucuaccacau

SEQ ID NO: 448146 - RNA, 20 nt, Human
gaaagaagaaagagagaggg

SEQ ID NO: 448147 - RNA, 22 nt, Human
gaagaaacagccugaaugcaaa

SEQ ID NO: 448148 - RNA, 18 nt, Human
gaagccccaaggagggag

SEQ ID NO: 448149 - RNA, 20 nt, Human
gagaagggcuggguuuggcg

SEQ ID NO: 448150 - RNA, 22 nt, Human
gagcauguccagacuggcauga

SEQ ID NO: 448151 - RNA, 21 nt, Human
gagccccggcccucuccccag

SEQ ID NO: 448152 - RNA, 18 nt, Human
gagggggauggggacggg

SEQ ID NO: 448153 - RNA, 22 nt, Human
gaguuuagucgggggaggggag

SEQ ID NO: 448154 - RNA, 21 nt, Human
gcagaacacuguaguguucca

SEQ ID NO: 448155 - RNA, 19 nt, Human
gcagaagccccaaggaggg

SEQ ID NO: 448156 - RNA, 24 nt, Human
gcagagcagcaaggguaaucaaag

SEQ ID NO: 448157 - RNA, 20 nt, Human
gcaggagaaagaagaaagag

SEQ ID NO: 448158 - RNA, 23 nt, Human
gccugaaugcaaaauguucccug

SEQ ID NO: 448159 - RNA, 23 nt, Human
gcgccacgggaaaggcaaaaucc

SEQ ID NO: 448160 - RNA, 21 nt, Human
gcuaggauggcaggagaaaga

SEQ ID NO: 448161 - RNA, 21 nt, Human
gcuaugcugaagccuccacac

SEQ ID NO: 448162 - RNA, 18 nt, Human
gcuauggcugcugcuugg

SEQ ID NO: 448163 - RNA, 21 nt, Human
gcucugucuugaaccccucca

SEQ ID NO: 448164 - RNA, 18 nt, Human
gcugcaacaugggaaacc

SEQ ID NO: 448165 - RNA, 19 nt, Human
ggacagacucccagucucc

SEQ ID NO: 448166 - RNA, 19 nt, Human
ggagaaagaagaaagagag

SEQ ID NO: 448167 - RNA, 18 nt, Human
ggaggaaaugagagggcc

SEQ ID NO: 448168 - RNA, 21 nt, Human
ggcacaacagagcauguccag

SEQ ID NO: 448169 - RNA, 21 nt, Human
ggccuucuuugagugccagaa

SEQ ID NO: 448170 - RNA, 20 nt, Human
gggacaaccaggacacugaa

SEQ ID NO: 448171 - RNA, 21 nt, Human
gggcagaagccccaaggaggg

SEQ ID NO: 448172 - RNA, 20 nt, Human
gggcuguuggccacuggucu

SEQ ID NO: 448173 - RNA, 21 nt, Human
ggggaggggagggggaugggg

SEQ ID NO: 448174 - RNA, 20 nt, Human
ggggauggggacggggugcu

SEQ ID NO: 448175 - RNA, 18 nt, Human
ggggggaaccugugagug

SEQ ID NO: 448176 - RNA, 22 nt, Human
guccacuccagcaucaucauag

SEQ ID NO: 448177 - RNA, 19 nt, Human
gucuccacauuccucacua

SEQ ID NO: 448178 - RNA, 18 nt, Human
gucugugugugugugugu

SEQ ID NO: 448179 - RNA, 18 nt, Human
gugauagaagaaacagcc

SEQ ID NO: 448180 - RNA, 19 nt, Human
gugauuuuuuuuuuuucuc

SEQ ID NO: 448181 - RNA, 23 nt, Human
guggccagucccgagccccggcc

SEQ ID NO: 448182 - RNA, 23 nt, Human
gugugucuguguguguguguguu

SEQ ID NO: 448183 - RNA, 21 nt, Human
guguguguguguguguaugug

SEQ ID NO: 448184 - RNA, 21 nt, Human
gugugugugugugugugugug

SEQ ID NO: 448185 - RNA, 18 nt, Human
uaaaacacaguaaaagca

SEQ ID NO: 448186 - RNA, 18 nt, Human
uaaaacacaguaaaagca

SEQ ID NO: 448187 - RNA, 24 nt, Human
uaaaacacaguaaaagcaauagga

SEQ ID NO: 448188 - RNA, 21 nt, Human
uaaacuggcaaaugcagagca

SEQ ID NO: 448189 - RNA, 21 nt, Human
uaaauuucaacagugcuucuc

SEQ ID NO: 448190 - RNA, 22 nt, Human
uaacaagaaaagcaaugaauag

SEQ ID NO: 448191 - RNA, 26 nt, Human
uaacuauaucaauaccaaaaauccuc

SEQ ID NO: 448192 - RNA, 21 nt, Human
uacaauacuguggaucaaggc

SEQ ID NO: 448193 - RNA, 19 nt, Human
uacaguuugcacauccagg

SEQ ID NO: 448194 - RNA, 24 nt, Human
uaccauugcugucaggacauaaca

SEQ ID NO: 448195 - RNA, 19 nt, Human
uagaagaaacagccugaau

SEQ ID NO: 448196 - RNA, 22 nt, Human
uagaugcaaaauugcaacgacc

SEQ ID NO: 448197 - RNA, 20 nt, Human
uaggcugagggaauacucca

SEQ ID NO: 448198 - RNA, 23 nt, Human
uaucugguacuagggggcaggua

SEQ ID NO: 448199 - RNA, 18 nt, Human
uauguguacucaaggguc

SEQ ID NO: 448200 - RNA, 20 nt, Human
uauuucacuuccccaaaaca

SEQ ID NO: 448201 - RNA, 22 nt, Human
uauuuggggcaacugcagggcu

SEQ ID NO: 448202 - RNA, 20 nt, Human
ucaacaucaguaucaucaga

SEQ ID NO: 448203 - RNA, 22 nt, Human
ucaaggccaagccuaguaagga

SEQ ID NO: 448204 - RNA, 19 nt, Human
ucaaugcugcccaaacauc

SEQ ID NO: 448205 - RNA, 21 nt, Human
ucaauggaaaguaaaagaggg

SEQ ID NO: 448206 - RNA, 20 nt, Human
ucacagcagaguucauccuu

SEQ ID NO: 448207 - RNA, 24 nt, Human
uccaagcauccccucccggugugc

SEQ ID NO: 448208 - RNA, 18 nt, Human
uccaccccagcccacccc

SEQ ID NO: 448209 - RNA, 22 nt, Human
uccauccaccccagcccacccc

SEQ ID NO: 448210 - RNA, 22 nt, Human
uccauccaccccagcccacccc

SEQ ID NO: 448211 - RNA, 18 nt, Human
ucccaggaaaaacaugag

SEQ ID NO: 448212 - RNA, 19 nt, Human
uccccaaaacaacagaaaa

SEQ ID NO: 448213 - RNA, 19 nt, Human
uccccuacucccuuuacuu

SEQ ID NO: 448214 - RNA, 23 nt, Human
ucccggcugccagacacucguuc

SEQ ID NO: 448215 - RNA, 24 nt, Human
ucccuagcugagaaaucuuagcuu

SEQ ID NO: 448216 - RNA, 26 nt, Human
uccuggagcccugggcaacucagaga

SEQ ID NO: 448217 - RNA, 18 nt, Human
ucgcugggcucccggcug

SEQ ID NO: 448218 - RNA, 18 nt, Human
ucuccgaaaaaaggucca

SEQ ID NO: 448219 - RNA, 21 nt, Human
ucuccggcgccugcucagucu

SEQ ID NO: 448220 - RNA, 26 nt, Human
ucucucugugugugugugugugugug

SEQ ID NO: 448221 - RNA, 19 nt, Human
ucucucuuucccugucucu

SEQ ID NO: 448222 - RNA, 22 nt, Human
ucuggaucaggaggcauagagc

SEQ ID NO: 448223 - RNA, 20 nt, Human
ucuuucuuguaaaagguuac

SEQ ID NO: 448224 - RNA, 25 nt, Human
ugaagccuccacacagcuauggcug

SEQ ID NO: 448225 - RNA, 19 nt, Human
ugaaggagaggagaaagga

SEQ ID NO: 448226 - RNA, 26 nt, Human
ugacaagcaggaggacuucgagggcg

SEQ ID NO: 448227 - RNA, 23 nt, Human
ugagaaguuggaaaaagagguac

SEQ ID NO: 448228 - RNA, 23 nt, Human
ugagggaauacuccaaccaaugg

SEQ ID NO: 448229 - RNA, 18 nt, Human
ugaucccuucacaguacc

SEQ ID NO: 448230 - RNA, 21 nt, Human
ugcaaaauugcaacgacccag

SEQ ID NO: 448231 - RNA, 23 nt, Human
ugcaacgacccagaagugcugca

SEQ ID NO: 448232 - RNA, 22 nt, Human
ugccagacacucguucgauccc

SEQ ID NO: 448233 - RNA, 22 nt, Human
ugccccugggccccuaacucac

SEQ ID NO: 448234 - RNA, 24 nt, Human
ugcuguagagaucacugcccuaaa

SEQ ID NO: 448235 - RNA, 23 nt, Human
uggaaaaagagguacacugaagg

SEQ ID NO: 448236 - RNA, 22 nt, Human
uggagcccugggcagaagcccc

SEQ ID NO: 448237 - RNA, 23 nt, Human
ugggaggcagaaucucaaccucu

SEQ ID NO: 448238 - RNA, 25 nt, Human
ugggccccuaacucacuugccccaa

SEQ ID NO: 448239 - RNA, 24 nt, Human
ugggcucccggcugccagacacuc

SEQ ID NO: 448240 - RNA, 22 nt, Human
uggggacggggugcuugguucc

SEQ ID NO: 448241 - RNA, 23 nt, Human
ugggguuuaggacagacucccag

SEQ ID NO: 448242 - RNA, 23 nt, Human
ugguaccucuuccuaccaaccac

SEQ ID NO: 448243 - RNA, 20 nt, Human
uguccaagcauccccucccg

SEQ ID NO: 448244 - RNA, 25 nt, Human
uguccagacuggcaugacugaggac

SEQ ID NO: 448245 - RNA, 23 nt, Human
ugucuguguguguguguguguaa

SEQ ID NO: 448246 - RNA, 18 nt, Human
ugugcuaggauggcagga

SEQ ID NO: 448247 - RNA, 24 nt, Human
uguguacucaagggucucugugug

SEQ ID NO: 448248 - RNA, 21 nt, Human
ugugucugugugugugugugu

SEQ ID NO: 448249 - RNA, 21 nt, Human
ugugugucugugugugugugu

SEQ ID NO: 448250 - RNA, 19 nt, Human
uguguguguauguguacuc

SEQ ID NO: 448251 - RNA, 21 nt, Human
ugugugugucugugugugugu

SEQ ID NO: 448252 - RNA, 21 nt, Human
ugugugugucugugugugugu

SEQ ID NO: 448253 - RNA, 21 nt, Human
ugugugugucugugugugugu

SEQ ID NO: 448254 - RNA, 21 nt, Human
ugugugugucugugugugugu

SEQ ID NO: 448255 - RNA, 24 nt, Human
ugugugugucugugugugugugug

SEQ ID NO: 448256 - RNA, 19 nt, Human
uguguguguguauguguac

SEQ ID NO: 448257 - RNA, 21 nt, Human
ugugugugugugucugugugu

SEQ ID NO: 448258 - RNA, 24 nt, Human
ugugugugugugucugugugugug

SEQ ID NO: 448259 - RNA, 18 nt, Human
uguguguguguguguaua

SEQ ID NO: 448260 - RNA, 20 nt, Human
uguguguguguguguaugug

SEQ ID NO: 448261 - RNA, 22 nt, Human
uguguguguguguguaugugua

SEQ ID NO: 448262 - RNA, 21 nt, Human
ugugugugugugugucugugu

SEQ ID NO: 448263 - RNA, 23 nt, Human
ugugugugugugugucugugugu

SEQ ID NO: 448264 - RNA, 30 nt, Human
ugugugugugugugucugugugugugugug

SEQ ID NO: 448265 - RNA, 18 nt, Human
ugugugugugugugugua

SEQ ID NO: 448266 - RNA, 20 nt, Human
uguguguguguguguguaua

SEQ ID NO: 448267 - RNA, 22 nt, Human
uguguguguguguguguauguu

SEQ ID NO: 448268 - RNA, 18 nt, Human
ugugugugugugugugug

SEQ ID NO: 448269 - RNA, 18 nt, Human
ugugugugugugugugug

SEQ ID NO: 448270 - RNA, 18 nt, Human
ugugugugugugugugug

SEQ ID NO: 448271 - RNA, 18 nt, Human
ugugugugugugugugug

SEQ ID NO: 448272 - RNA, 18 nt, Human
ugugugugugugugugug

SEQ ID NO: 448273 - RNA, 18 nt, Human
ugugugugugugugugug

SEQ ID NO: 448274 - RNA, 18 nt, Human
ugugugugugugugugug

SEQ ID NO: 448275 - RNA, 18 nt, Human
ugugugugugugugugug

SEQ ID NO: 448276 - RNA, 18 nt, Human
ugugugugugugugugug

SEQ ID NO: 448277 - RNA, 22 nt, Human
ugugugugugugugugugucug

SEQ ID NO: 448278 - RNA, 21 nt, Human
ugugugugugugugugugugu

SEQ ID NO: 448279 - RNA, 21 nt, Human
ugugugugugugugugugugu

SEQ ID NO: 448280 - RNA, 21 nt, Human
ugugugugugugugugugugu

SEQ ID NO: 448281 - RNA, 21 nt, Human
ugugugugugugugugugugu

SEQ ID NO: 448282 - RNA, 21 nt, Human
ugugugugugugugugugugu

SEQ ID NO: 448283 - RNA, 21 nt, Human
ugugugugugugugugugugu

SEQ ID NO: 448284 - RNA, 21 nt, Human
ugugugugugugugugugugu

SEQ ID NO: 448285 - RNA, 21 nt, Human
ugugugugugugugugugugu

SEQ ID NO: 448286 - RNA, 21 nt, Human
ugugugugugugugugugugu

SEQ ID NO: 448287 - RNA, 21 nt, Human
ugugugugugugugugugugu

SEQ ID NO: 448288 - RNA, 21 nt, Human
ugugugugugugugugugugu

SEQ ID NO: 448289 - RNA, 21 nt, Human
ugugugugugugugugugugu

SEQ ID NO: 448290 - RNA, 21 nt, Human
ugugugugugugugugugugu

SEQ ID NO: 448291 - RNA, 21 nt, Human
ugugugugugugugugugugu

SEQ ID NO: 448292 - RNA, 21 nt, Human
ugugugugugugugugugugu

SEQ ID NO: 448293 - RNA, 22 nt, Human
ugugugugugugugugugugug

SEQ ID NO: 448294 - RNA, 22 nt, Human
ugugugugugugugugugugug

SEQ ID NO: 448295 - RNA, 22 nt, Human
ugugugugugugugugugugug

SEQ ID NO: 448296 - RNA, 22 nt, Human
ugugugugugugugugugugug

SEQ ID NO: 448297 - RNA, 22 nt, Human
ugugugugugugugugugugug

SEQ ID NO: 448298 - RNA, 22 nt, Human
ugugugugugugugugugugug

SEQ ID NO: 448299 - RNA, 23 nt, Human
ugugugugugugugugugugugu

SEQ ID NO: 448300 - RNA, 19 nt, Human
uuacugggguuaccauugc

SEQ ID NO: 448301 - RNA, 23 nt, Human
uuacuuuauuuuaaaauuaucuu

SEQ ID NO: 448302 - RNA, 20 nt, Human
uuagaacucucuuguugcug

SEQ ID NO: 448303 - RNA, 20 nt, Human
uuagagaagggcuggguuug

SEQ ID NO: 448304 - RNA, 22 nt, Human
uucaaggucuauccaugaaaag

SEQ ID NO: 448305 - RNA, 21 nt, Human
uucccaagcaaaaagcuggcc

SEQ ID NO: 448306 - RNA, 22 nt, Human
uuccccccuucucaggauuggg

SEQ ID NO: 448307 - RNA, 21 nt, Human
uucccugucucugucugugau

SEQ ID NO: 448308 - RNA, 22 nt, Human
uucgcugggcucccggcugcca

SEQ ID NO: 448309 - RNA, 18 nt, Human
uugccccugggccccuaa

SEQ ID NO: 448310 - RNA, 22 nt, Human
uuguucaaggucuauccaugaa

SEQ ID NO: 448311 - RNA, 23 nt, Human
uuuagggugguagaaaaugcagg

SEQ ID NO: 448312 - RNA, 21 nt, Human
uuuccauucccaucccuguuc

SEQ ID NO: 448313 - RNA, 18 nt, Human
aaaaaaaggcaugguuug

SEQ ID NO: 448314 - RNA, 22 nt, Human
aaaaagacaacacaaaacccac

SEQ ID NO: 448315 - RNA, 24 nt, Human
aaaaagacaacacaaaacccacag

SEQ ID NO: 448316 - RNA, 27 nt, Human
aaaacagaaaagcacaacuugguaagg

SEQ ID NO: 448317 - RNA, 18 nt, Human
aaaacaugaaacuacuga

SEQ ID NO: 448318 - RNA, 22 nt, Human
aaaagacaacacaaaacccaca

SEQ ID NO: 448319 - RNA, 21 nt, Human
aaaagaggcgggucuggccga

SEQ ID NO: 448320 - RNA, 24 nt, Human
aaacaagaaaauuaaaggcagaaa

SEQ ID NO: 448321 - RNA, 23 nt, Human
aaacaugaaacuacugaccaaca

SEQ ID NO: 448322 - RNA, 24 nt, Human
aaagacaacacaaaacccacagaa

SEQ ID NO: 448323 - RNA, 23 nt, Human
aacacaaaacccacagaaaaaua

SEQ ID NO: 448324 - RNA, 18 nt, Human
aaccuaaaguauaaccug

SEQ ID NO: 448325 - RNA, 24 nt, Human
aacucaucuucccucccacaccuc

SEQ ID NO: 448326 - RNA, 21 nt, Human
aacuggcuuuacagauuuccc

SEQ ID NO: 448327 - RNA, 22 nt, Human
aagagauaacaaacaguuuuga

SEQ ID NO: 448328 - RNA, 20 nt, Human
aagcacaacuugguaaggcc

SEQ ID NO: 448329 - RNA, 20 nt, Human
aagcuuccuagcaucuguuu

SEQ ID NO: 448330 - RNA, 23 nt, Human
aagggucaacaagaagaggaagc

SEQ ID NO: 448331 - RNA, 25 nt, Human
aaguagcccuuaaucaagagagggu

SEQ ID NO: 448332 - RNA, 21 nt, Human
aauagaaccccuaaccuaaag

SEQ ID NO: 448333 - RNA, 24 nt, Human
aaucaacagcaaauacagccauac

SEQ ID NO: 448334 - RNA, 26 nt, Human
acaaacaagaaaauuaaaggcagaaa

SEQ ID NO: 448335 - RNA, 21 nt, Human
acaacacaaaacccacagaaa

SEQ ID NO: 448336 - RNA, 23 nt, Human
acaguaccgaaagcaaaugucac

SEQ ID NO: 448337 - RNA, 18 nt, Human
acccgguccgggaagcga

SEQ ID NO: 448338 - RNA, 25 nt, Human
acccugcaacugaguguucaggcug

SEQ ID NO: 448339 - RNA, 19 nt, Human
accgcaagcccgacccugc

SEQ ID NO: 448340 - RNA, 22 nt, Human
acucaucuucccucccacaccu

SEQ ID NO: 448341 - RNA, 19 nt, Human
acugcagccccauacacuu

SEQ ID NO: 448342 - RNA, 24 nt, Human
agacaggugcucccuguugcccuc

SEQ ID NO: 448343 - RNA, 23 nt, Human
agagcuccuccuauaauacauau

SEQ ID NO: 448344 - RNA, 19 nt, Human
agcccuaacagcugccacc

SEQ ID NO: 448345 - RNA, 18 nt, Human
agccuccuccccagcucc

SEQ ID NO: 448346 - RNA, 24 nt, Human
agcuaagaacuauuguuaccaugg

SEQ ID NO: 448347 - RNA, 26 nt, Human
aggaaacuaugaccgacaucaauucc

SEQ ID NO: 448348 - RNA, 20 nt, Human
aggaaccacucccuaaaacc

SEQ ID NO: 448349 - RNA, 21 nt, Human
aggaguuguuucagcuaauau

SEQ ID NO: 448350 - RNA, 19 nt, Human
aggcaccagguuacgauag

SEQ ID NO: 448351 - RNA, 24 nt, Human
aggcagaaagaauacauaaaauug

SEQ ID NO: 448352 - RNA, 22 nt, Human
aggcagaggucucucacuuuuu

SEQ ID NO: 448353 - RNA, 31 nt, Human
aggcaggagguguggaaguccccuccagggg

SEQ ID NO: 448354 - RNA, 23 nt, Human
aggcggccagggagggucguggc

SEQ ID NO: 448355 - RNA, 20 nt, Human
aggcgggcgggcuggcgggg

SEQ ID NO: 448356 - RNA, 19 nt, Human
aguaaaagcuauucuccug

SEQ ID NO: 448357 - RNA, 19 nt, Human
agugugcaugggugugcac

SEQ ID NO: 448358 - RNA, 22 nt, Human
auaaaaaagacaacacaaaacc

SEQ ID NO: 448359 - RNA, 19 nt, Human
auagaaccccuaaccuaaa

SEQ ID NO: 448360 - RNA, 20 nt, Human
auagaaccccuaaccuaaag

SEQ ID NO: 448361 - RNA, 22 nt, Human
auauacacacacucucgauaua

SEQ ID NO: 448362 - RNA, 27 nt, Human
caaacaaacaagaaaauuaaaggcugu

SEQ ID NO: 448363 - RNA, 25 nt, Human
caacaagaagaggaagccaagcuuc

SEQ ID NO: 448364 - RNA, 24 nt, Human
caacagcaaauacagccauacaga

SEQ ID NO: 448365 - RNA, 23 nt, Human
cacaggaaccacucccuaaaaca

SEQ ID NO: 448366 - RNA, 19 nt, Human
cacccaccgcaagcccgac

SEQ ID NO: 448367 - RNA, 20 nt, Human
caccgacagcugcgggcgcg

SEQ ID NO: 448368 - RNA, 24 nt, Human
caccgacagcugcgggcgcguccc

SEQ ID NO: 448369 - RNA, 23 nt, Human
caccgcgcgacuggcccgggagg

SEQ ID NO: 448370 - RNA, 22 nt, Human
cacuugaaaacagaaaagcaca

SEQ ID NO: 448371 - RNA, 24 nt, Human
cagaagauucagcccuaacagcug

SEQ ID NO: 448372 - RNA, 21 nt, Human
cagccuccgcagccuccuccc

SEQ ID NO: 448373 - RNA, 23 nt, Human
cagccuccuccccagcucccaag

SEQ ID NO: 448374 - RNA, 18 nt, Human
cagcucccaagaggguga

SEQ ID NO: 448375 - RNA, 23 nt, Human
cauaaaaaagacaacacaaaacc

SEQ ID NO: 448376 - RNA, 23 nt, Human
ccaagaccacagcgccccccgcc

SEQ ID NO: 448377 - RNA, 18 nt, Human
ccaagcgcucugucuccg

SEQ ID NO: 448378 - RNA, 23 nt, Human
cccacaccuccaggcaccagaca

SEQ ID NO: 448379 - RNA, 18 nt, Human
cccauacacugucacacg

SEQ ID NO: 448380 - RNA, 20 nt, Human
cccauacacugucacacgca

SEQ ID NO: 448381 - RNA, 21 nt, Human
cccauacacugucacacgcag

SEQ ID NO: 448382 - RNA, 22 nt, Human
cccauacacugucacacgcaua

SEQ ID NO: 448383 - RNA, 22 nt, Human
ccccagcucccaagagggugac

SEQ ID NO: 448384 - RNA, 24 nt, Human
ccccgccugcgcgccgcgcgccug

SEQ ID NO: 448385 - RNA, 28 nt, Human
ccccgcgccaagaccacagcgccccccc

SEQ ID NO: 448386 - RNA, 21 nt, Human
cccgaggcgccgccgcgacca

SEQ ID NO: 448387 - RNA, 19 nt, Human
cccgcgccaagaccacagc

SEQ ID NO: 448388 - RNA, 21 nt, Human
cccuguugcccucguuaccua

SEQ ID NO: 448389 - RNA, 24 nt, Human
ccgacagcugcgggcgcguccccg

SEQ ID NO: 448390 - RNA, 22 nt, Human
ccgcgcccgaggcgccgccgcg

SEQ ID NO: 448391 - RNA, 19 nt, Human
ccggcccgaccgccccucc

SEQ ID NO: 448392 - RNA, 19 nt, Human
ccguggaucccaagcgcuc

SEQ ID NO: 448393 - RNA, 22 nt, Human
ccuaaaggcaggagguguggaa

SEQ ID NO: 448394 - RNA, 21 nt, Human
ccucagaguccacuggccucu

SEQ ID NO: 448395 - RNA, 25 nt, Human
ccugcaacugaguguucaggcugcc

SEQ ID NO: 448396 - RNA, 19 nt, Human
ccugcacccgcgcccgagg

SEQ ID NO: 448397 - RNA, 19 nt, Human
ccuugcucccauuuuggcu

SEQ ID NO: 448398 - RNA, 24 nt, Human
cgcagccuccuccccagcucccaa

SEQ ID NO: 448399 - RNA, 20 nt, Human
cgcccgaggcgccgccgcga

SEQ ID NO: 448400 - RNA, 21 nt, Human
cggcaagaugagacuguauuc

SEQ ID NO: 448401 - RNA, 18 nt, Human
cgggcaggcgggcgggcu

SEQ ID NO: 448402 - RNA, 27 nt, Human
cguccccggcccuggagaguggcgguu

SEQ ID NO: 448403 - RNA, 22 nt, Human
cuaaaacaugaaacuacugacc

SEQ ID NO: 448404 - RNA, 24 nt, Human
cuaaaacaugaaacuacugaccaa

SEQ ID NO: 448405 - RNA, 18 nt, Human
cucaaacaaacaagaaaa

SEQ ID NO: 448406 - RNA, 20 nt, Human
cucccacaccuccaggcacc

SEQ ID NO: 448407 - RNA, 23 nt, Human
cucccacaccuccaggcaccaga

SEQ ID NO: 448408 - RNA, 21 nt, Human
cuccgccccggaggguugcgg

SEQ ID NO: 448409 - RNA, 18 nt, Human
cuccuccccagcucccaa

SEQ ID NO: 448410 - RNA, 18 nt, Human
cucucgauauagguucua

SEQ ID NO: 448411 - RNA, 25 nt, Human
cugaaaauagccuuucugggugucu

SEQ ID NO: 448412 - RNA, 22 nt, Human
cugagcacuuuccacccaugcc

SEQ ID NO: 448413 - RNA, 19 nt, Human
cugcgcgccgcgcgccugc

SEQ ID NO: 448414 - RNA, 22 nt, Human
cugcgggcgcguccccggcccu

SEQ ID NO: 448415 - RNA, 21 nt, Human
cugugugcaugagugugcaug

SEQ ID NO: 448416 - RNA, 21 nt, Human
cuugcauaaguaucucauccc

SEQ ID NO: 448417 - RNA, 22 nt, Human
gaggaccuggaacacacguucc

SEQ ID NO: 448418 - RNA, 18 nt, Human
gagguuccgcuuucuggc

SEQ ID NO: 448419 - RNA, 27 nt, Human
gccucugcugcuacugcccugaaagcc

SEQ ID NO: 448420 - RNA, 20 nt, Human
gcggggagggaaaagaggcg

SEQ ID NO: 448421 - RNA, 18 nt, Human
gcgguagggaggagcugu

SEQ ID NO: 448422 - RNA, 21 nt, Human
gcugccuuguggugucucgga

SEQ ID NO: 448423 - RNA, 24 nt, Human
ggaggaccuggaacacacguuccg

SEQ ID NO: 448424 - RNA, 23 nt, Human
ggauguauuucacugucacagga

SEQ ID NO: 448425 - RNA, 24 nt, Human
ggcaggagguguggaaguccccuc

SEQ ID NO: 448426 - RNA, 23 nt, Human
ggcaggcgggcgggcuggcgggg

SEQ ID NO: 448427 - RNA, 21 nt, Human
ggcauucucuaaagcaaaauu

SEQ ID NO: 448428 - RNA, 24 nt, Human
ggcccgggagguuccgcuuucugg

SEQ ID NO: 448429 - RNA, 20 nt, Human
ggcgcgggaggaccuggaac

SEQ ID NO: 448430 - RNA, 20 nt, Human
gggagggaaaagaggcgggu

SEQ ID NO: 448431 - RNA, 18 nt, Human
gggcgggcaggcgggcgg

SEQ ID NO: 448432 - RNA, 21 nt, Human
ggggcgggcaggcgggcgggc

SEQ ID NO: 448433 - RNA, 23 nt, Human
guccucagaguccacuggccucu

SEQ ID NO: 448434 - RNA, 21 nt, Human
gucuggagagaaggccuugcu

SEQ ID NO: 448435 - RNA, 18 nt, Human
guguucaggcugccuugu

SEQ ID NO: 448436 - RNA, 22 nt, Human
uaaaaaagacaacacaaaaccc

SEQ ID NO: 448437 - RNA, 25 nt, Human
uaaaaaagacaacacaaaacccaca

SEQ ID NO: 448438 - RNA, 24 nt, Human
uaaaaaagauguugguucaaaaaa

SEQ ID NO: 448439 - RNA, 18 nt, Human
uaacaagagauaacaaac

SEQ ID NO: 448440 - RNA, 23 nt, Human
uaacaggaauaaauagaaccccu

SEQ ID NO: 448441 - RNA, 20 nt, Human
uaacagguuucaagagaugu

SEQ ID NO: 448442 - RNA, 18 nt, Human
uaaccagaggucuagaac

SEQ ID NO: 448443 - RNA, 25 nt, Human
uaagcucaaacaaacaagaaaauua

SEQ ID NO: 448444 - RNA, 19 nt, Human
uaaguagcccuuaaucaag

SEQ ID NO: 448445 - RNA, 23 nt, Human
uacacgccccgccccucaggagu

SEQ ID NO: 448446 - RNA, 23 nt, Human
uacacuuaaaaacauacucugaa

SEQ ID NO: 448447 - RNA, 18 nt, Human
uacgcaguaaaaggaguu

SEQ ID NO: 448448 - RNA, 25 nt, Human
uauaaaaugcagcaauauauuuuaa

SEQ ID NO: 448449 - RNA, 22 nt, Human
uaugugucaacacaacuggacu

SEQ ID NO: 448450 - RNA, 22 nt, Human
uauuucacugucacaggaagca

SEQ ID NO: 448451 - RNA, 19 nt, Human
ucaaccccacuuaaaauuc

SEQ ID NO: 448452 - RNA, 19 nt, Human
ucaaguacaacauucugcu

SEQ ID NO: 448453 - RNA, 23 nt, Human
ucagccaaaguggcauucucuaa

SEQ ID NO: 448454 - RNA, 19 nt, Human
ucagcccuaacagcugcca

SEQ ID NO: 448455 - RNA, 20 nt, Human
ucagguuguaacuaaaugcu

SEQ ID NO: 448456 - RNA, 22 nt, Human
ucagugggauguuuucuguugg

SEQ ID NO: 448457 - RNA, 24 nt, Human
uccacagauagguaagccaggcgc

SEQ ID NO: 448458 - RNA, 22 nt, Human
uccacaggaaccacucccuaaa

SEQ ID NO: 448459 - RNA, 18 nt, Human
ucccacaaacacuugcug

SEQ ID NO: 448460 - RNA, 25 nt, Human
ucccuaaaacaugaaacuacugacc

SEQ ID NO: 448461 - RNA, 18 nt, Human
ucccucccacaccuccag

SEQ ID NO: 448462 - RNA, 21 nt, Human
uccgcagccuccuccccagcu

SEQ ID NO: 448463 - RNA, 21 nt, Human
uccucagaguccacuggccuc

SEQ ID NO: 448464 - RNA, 19 nt, Human
uccuuuuuugacuacagag

SEQ ID NO: 448465 - RNA, 18 nt, Human
ucucuugagucugucaag

SEQ ID NO: 448466 - RNA, 20 nt, Human
ucugcugcuacugcccugaa

SEQ ID NO: 448467 - RNA, 20 nt, Human
ucugggucacccaccgcaag

SEQ ID NO: 448468 - RNA, 20 nt, Human
ucugucuccgcccggcuucc

SEQ ID NO: 448469 - RNA, 19 nt, Human
ugaaaacagaaaagcacaa

SEQ ID NO: 448470 - RNA, 22 nt, Human
ugaccgacaucaauuccaaugu

SEQ ID NO: 448471 - RNA, 22 nt, Human
ugagcacuuuccacccaugccu

SEQ ID NO: 448472 - RNA, 23 nt, Human
ugcaacugaguguucaggcugcc

SEQ ID NO: 448473 - RNA, 21 nt, Human
ugcauuuaaaggucaacccac

SEQ ID NO: 448474 - RNA, 20 nt, Human
ugcccugaaagccaucuguc

SEQ ID NO: 448475 - RNA, 22 nt, Human
ugccuuguggugucucggaagc

SEQ ID NO: 448476 - RNA, 19 nt, Human
uggacuaagaaagaaaagu

SEQ ID NO: 448477 - RNA, 20 nt, Human
uggaggacagcgguccgagc

SEQ ID NO: 448478 - RNA, 19 nt, Human
uggcuuguguaauaccugg

SEQ ID NO: 448479 - RNA, 19 nt, Human
ugggggccauggucccggc

SEQ ID NO: 448480 - RNA, 22 nt, Human
uguacauaaugcacugugcauu

SEQ ID NO: 448481 - RNA, 18 nt, Human
uguauaaagcuuucagaa

SEQ ID NO: 448482 - RNA, 24 nt, Human
ugucaccgacagcugcgggcgcgu

SEQ ID NO: 448483 - RNA, 20 nt, Human
ugucccacaaacacuugcug

SEQ ID NO: 448484 - RNA, 19 nt, Human
ugucuccgcccggcuuccc

SEQ ID NO: 448485 - RNA, 20 nt, Human
ugugcacacagagaaguaca

SEQ ID NO: 448486 - RNA, 19 nt, Human
uguguacauaaugcacugu

SEQ ID NO: 448487 - RNA, 22 nt, Human
uguguacauaaugcacugugca

SEQ ID NO: 448488 - RNA, 19 nt, Human
ugugugcaugagugugcau

SEQ ID NO: 448489 - RNA, 19 nt, Human
uguucauuuuauuuuuugu

SEQ ID NO: 448490 - RNA, 28 nt, Human
uuaacauaaaaaagacaacacaaaaccc

SEQ ID NO: 448491 - RNA, 18 nt, Human
uuaacucaaacacauacu

SEQ ID NO: 448492 - RNA, 21 nt, Human
uucaagaguauucaccucccu

SEQ ID NO: 448493 - RNA, 21 nt, Human
uucagaacugggccacacagg

SEQ ID NO: 448494 - RNA, 23 nt, Human
uuccacagauagguaagccaggc

SEQ ID NO: 448495 - RNA, 23 nt, Human
uucccggcgacacgacgcguggg

SEQ ID NO: 448496 - RNA, 18 nt, Human
uuguggccacgcuuuucc

SEQ ID NO: 448497 - RNA, 21 nt, Human
uuguggccacgcuuuucccca

SEQ ID NO: 448498 - RNA, 24 nt, Human
uuguggugucucggaagcauuccu

SEQ ID NO: 448499 - RNA, 24 nt, Human
uuugcacuauacuccaugccauuu

SEQ ID NO: 448500 - RNA, 23 nt, Human
uuugguggcucugggucacccac

SEQ ID NO: 448501 - RNA, 26 nt, Human
uuuuucucagauuuuugcuccuuaaa

SEQ ID NO: 448502 - RNA, 22 nt, Human
uuuuuuuuauucauaagucaga

SEQ ID NO: 448503 - RNA, 20 nt, Human
aagaaacuggguucccaaac

SEQ ID NO: 448504 - RNA, 20 nt, Human
agaaacuggguucccaaacu

SEQ ID NO: 448505 - RNA, 23 nt, Human
agccaggcugaccugagggccca

SEQ ID NO: 448506 - RNA, 24 nt, Human
agcuuugacuggagaaauccaaau

SEQ ID NO: 448507 - RNA, 19 nt, Human
aguccuaugagguggccag

SEQ ID NO: 448508 - RNA, 21 nt, Human
aucagagugggcaguuagagg

SEQ ID NO: 448509 - RNA, 24 nt, Human
caaagugccagguuuuuuucugug

SEQ ID NO: 448510 - RNA, 22 nt, Human
cagagugggcaguuagaggccc

SEQ ID NO: 448511 - RNA, 19 nt, Human
cccaggacaagaaacuggg

SEQ ID NO: 448512 - RNA, 21 nt, Human
cccuccuaggcucacccaggc

SEQ ID NO: 448513 - RNA, 22 nt, Human
ccgcuccgggggcagcagaggg

SEQ ID NO: 448514 - RNA, 19 nt, Human
ccgcuggcugccucugacu

SEQ ID NO: 448515 - RNA, 22 nt, Human
cuccuaggcucacccaggcaua

SEQ ID NO: 448516 - RNA, 20 nt, Human
cuggagaaauccaaaucaga

SEQ ID NO: 448517 - RNA, 18 nt, Human
gagguggccaggcccugc

SEQ ID NO: 448518 - RNA, 22 nt, Human
gagugggcaguuagaggcccau

SEQ ID NO: 448519 - RNA, 22 nt, Human
gcagcagaggggccagcccggg

SEQ ID NO: 448520 - RNA, 19 nt, Human
ggacaagaaacuggguucc

SEQ ID NO: 448521 - RNA, 18 nt, Human
gggcagcagaggggccag

SEQ ID NO: 448522 - RNA, 19 nt, Human
gggcagcagaggggccagc

SEQ ID NO: 448523 - RNA, 22 nt, Human
uagcugccgcaaaggcccgggu

SEQ ID NO: 448524 - RNA, 21 nt, Human
ucagaagggaacugaguccua

SEQ ID NO: 448525 - RNA, 18 nt, Human
ucagccaggcugaccuga

SEQ ID NO: 448526 - RNA, 24 nt, Human
ucuuuggccuccugccuacuacuu

SEQ ID NO: 448527 - RNA, 23 nt, Human
ugaagcaggucccgcuggcugcc

SEQ ID NO: 448528 - RNA, 24 nt, Human
ugagcuuugacuggagaaauccaa

SEQ ID NO: 448529 - RNA, 24 nt, Human
ugagggcccaggacaagaaacugg

SEQ ID NO: 448530 - RNA, 19 nt, Human
ugagguggccaggcccugc

SEQ ID NO: 448531 - RNA, 19 nt, Human
uggccuccugccuacuacu

SEQ ID NO: 448532 - RNA, 18 nt, Human
uuagaggcccaugucccc

SEQ ID NO: 448533 - RNA, 21 nt, Human
uuuggccuccugccuacuacu

SEQ ID NO: 448534 - RNA, 22 nt, Human
uuuucugugagcuuugacugga

SEQ ID NO: 448535 - RNA, 22 nt, Human
aaagcaagaaaagaauauuuua

SEQ ID NO: 448536 - RNA, 22 nt, Human
aacacaagaaagcaagaaaaga

SEQ ID NO: 448537 - RNA, 21 nt, Human
acccccuguccucccucgccg

SEQ ID NO: 448538 - RNA, 24 nt, Human
aucaaauuaucccuccaacuaaau

SEQ ID NO: 448539 - RNA, 18 nt, Human
caagaaagcaagaaaaga

SEQ ID NO: 448540 - RNA, 20 nt, Human
cucgcaagcccagucagcca

SEQ ID NO: 448541 - RNA, 23 nt, Human
cuguauuugaauaagaauuccau

SEQ ID NO: 448542 - RNA, 21 nt, Human
cuuaacacaagaaagcaagaa

SEQ ID NO: 448543 - RNA, 23 nt, Human
guccucccucgccgaucuucagu

SEQ ID NO: 448544 - RNA, 21 nt, Human
uacuacaaauauugcagucag

SEQ ID NO: 448545 - RNA, 19 nt, Human
uccuuggccuucgcugcag

SEQ ID NO: 448546 - RNA, 22 nt, Human
uuaacacaagaaagcaagaaaa

SEQ ID NO: 448547 - RNA, 20 nt, Human
aagcagcaaauuaguguuuu

SEQ ID NO: 448548 - RNA, 23 nt, Human
aaucaugugcuuuagacauuuaa

SEQ ID NO: 448549 - RNA, 23 nt, Human
agacauuuaauacuauuucaauu

SEQ ID NO: 448550 - RNA, 20 nt, Human
agcuggaguguacacagaug

SEQ ID NO: 448551 - RNA, 19 nt, Human
cuggaauggggauucuuuc

SEQ ID NO: 448552 - RNA, 21 nt, Human
gaaaaaaaaagcccacuggaa

SEQ ID NO: 448553 - RNA, 21 nt, Human
gaaaaaugauacugaaccuca

SEQ ID NO: 448554 - RNA, 18 nt, Human
uaaaucuacugcuggaau

SEQ ID NO: 448555 - RNA, 24 nt, Human
uaugcagaggaaauaauauaauuc

SEQ ID NO: 448556 - RNA, 19 nt, Human
ucuacugcuggaaugggga

SEQ ID NO: 448557 - RNA, 18 nt, Human
ugaaaaacauuuggucag

SEQ ID NO: 448558 - RNA, 21 nt, Human
ugcuggaauggggauucuuuc

SEQ ID NO: 448559 - RNA, 20 nt, Human
uggaguguacacagaugaaa

SEQ ID NO: 448560 - RNA, 23 nt, Human
uggucagaaagcagcaaauuagu

SEQ ID NO: 448561 - RNA, 22 nt, Human
aaaaacuaaugagaaagcaaac

SEQ ID NO: 448562 - RNA, 21 nt, Human
aagcaaacuggaaggugagac

SEQ ID NO: 448563 - RNA, 20 nt, Human
aaugagaaagcaaacuggaa

SEQ ID NO: 448564 - RNA, 21 nt, Human
acacacaaccuuaagcaaaau

SEQ ID NO: 448565 - RNA, 18 nt, Human
caaaaugucuuccucucc

SEQ ID NO: 448566 - RNA, 22 nt, Human
cacacaaccuuaagcaaaauac

SEQ ID NO: 448567 - RNA, 21 nt, Human
cacacacaaccuuaagcaaaa

SEQ ID NO: 448568 - RNA, 22 nt, Human
cacacacaaccuuaagcaaaau

SEQ ID NO: 448569 - RNA, 19 nt, Human
cagcgauuugggagguugg

SEQ ID NO: 448570 - RNA, 24 nt, Human
cagcggaccccccccccuccagac

SEQ ID NO: 448571 - RNA, 26 nt, Human
cagcggaccccccccccuccagacac

SEQ ID NO: 448572 - RNA, 21 nt, Human
cauugugguuauaacgaagga

SEQ ID NO: 448573 - RNA, 20 nt, Human
ccagacacccgggccgccuu

SEQ ID NO: 448574 - RNA, 22 nt, Human
ccuccagacacccgggccgccu

SEQ ID NO: 448575 - RNA, 27 nt, Human
ccuccagacacccgggccgccuggcuu

SEQ ID NO: 448576 - RNA, 20 nt, Human
cucucccuuuguacuuacca

SEQ ID NO: 448577 - RNA, 20 nt, Human
cuuuguuuucaaauaagugg

SEQ ID NO: 448578 - RNA, 20 nt, Human
gaacauaaaucaaugccauu

SEQ ID NO: 448579 - RNA, 21 nt, Human
gaccccccccccuccagacac

SEQ ID NO: 448580 - RNA, 18 nt, Human
ggugagacuucaucuuug

SEQ ID NO: 448581 - RNA, 22 nt, Human
uaaaauucaaaaugucuuccuc

SEQ ID NO: 448582 - RNA, 20 nt, Human
uacacaauacacacacaacc

SEQ ID NO: 448583 - RNA, 18 nt, Human
uaccauaggcuacacaau

SEQ ID NO: 448584 - RNA, 20 nt, Human
uacuuaccauaggcuacaca

SEQ ID NO: 448585 - RNA, 20 nt, Human
uaggcuacacaauguccuga

SEQ ID NO: 448586 - RNA, 24 nt, Human
uauacacaauacacacacaaccuu

SEQ ID NO: 448587 - RNA, 19 nt, Human
uauauacacaauacacaca

SEQ ID NO: 448588 - RNA, 24 nt, Human
uauauacacaauacacacacaacc

SEQ ID NO: 448589 - RNA, 18 nt, Human
ugagaaagcaaacuggaa

SEQ ID NO: 448590 - RNA, 21 nt, Human
ugcagcuuucagguaaagucc

SEQ ID NO: 448591 - RNA, 20 nt, Human
ugcugauuuguauucugacu

SEQ ID NO: 448592 - RNA, 19 nt, Human
uggaaaaaacuaaugagaa

SEQ ID NO: 448593 - RNA, 20 nt, Human
uggaaaaaacuaaugagaaa

SEQ ID NO: 448594 - RNA, 21 nt, Human
uggaacaagaagaaaauaaca

SEQ ID NO: 448595 - RNA, 21 nt, Human
uggaacauaaaucaaugccag

SEQ ID NO: 448596 - RNA, 21 nt, Human
uggcacugaacacuaaugcca

SEQ ID NO: 448597 - RNA, 24 nt, Human
uuaaacaagcagcucagcgauuug

SEQ ID NO: 448598 - RNA, 20 nt, Human
uucaaaaugucuuccucucc

SEQ ID NO: 448599 - RNA, 20 nt, Human
uucaucuuuguuuucaaaua

SEQ ID NO: 448600 - RNA, 21 nt, Human
uuucagguaaaguccagcacu

SEQ ID NO: 448601 - RNA, 18 nt, Human
uuuuuuuuuuaaacaagc

SEQ ID NO: 448602 - RNA, 20 nt, Human
aaaaaguuaagaaaaaaucu

SEQ ID NO: 448603 - RNA, 23 nt, Human
aaacaacacaaccaagcagaaau

SEQ ID NO: 448604 - RNA, 26 nt, Human
aaacaacacaaccaagcagaaauuca

SEQ ID NO: 448605 - RNA, 24 nt, Human
aaagauugagugaaaaccuaaaaa

SEQ ID NO: 448606 - RNA, 23 nt, Human
aaauggcauuuucuuaauucccc

SEQ ID NO: 448607 - RNA, 21 nt, Human
aacauuucuuacaaggcaguc

SEQ ID NO: 448608 - RNA, 22 nt, Human
aagcacaccugaaaaaagagca

SEQ ID NO: 448609 - RNA, 19 nt, Human
aauccaaaacuaaccaaau

SEQ ID NO: 448610 - RNA, 19 nt, Human
acaacacaaccaagcagaa

SEQ ID NO: 448611 - RNA, 23 nt, Human
acaacacaaccaagcagaaauuc

SEQ ID NO: 448612 - RNA, 22 nt, Human
accaagcacaccugaaaaaaga

SEQ ID NO: 448613 - RNA, 23 nt, Human
acuaagaaaacggcuuaaaacaa

SEQ ID NO: 448614 - RNA, 18 nt, Human
acuacacuuauccucuac

SEQ ID NO: 448615 - RNA, 19 nt, Human
acuacucuaucaaaccagu

SEQ ID NO: 448616 - RNA, 24 nt, Human
agaaagcuuuccuuuggccacugu

SEQ ID NO: 448617 - RNA, 21 nt, Human
agaaccaaugcucuaguauua

SEQ ID NO: 448618 - RNA, 21 nt, Human
agaauugaaagcaauugguca

SEQ ID NO: 448619 - RNA, 24 nt, Human
aggaaagccauguaguuuuuuaag

SEQ ID NO: 448620 - RNA, 19 nt, Human
aggcagaagaguggacuug

SEQ ID NO: 448621 - RNA, 26 nt, Human
aggcagaagaguggacuugauuccuu

SEQ ID NO: 448622 - RNA, 20 nt, Human
aggcagaagaguggacuugg

SEQ ID NO: 448623 - RNA, 21 nt, Human
aggcagauagucauuucauaa

SEQ ID NO: 448624 - RNA, 23 nt, Human
auauauccucuaggcagauuucu

SEQ ID NO: 448625 - RNA, 21 nt, Human
aucacgcauaugacaaacauu

SEQ ID NO: 448626 - RNA, 18 nt, Human
aucccacacacaccacaa

SEQ ID NO: 448627 - RNA, 22 nt, Human
augucacagaauaaauagagca

SEQ ID NO: 448628 - RNA, 20 nt, Human
caaaauuaaaaaguacugca

SEQ ID NO: 448629 - RNA, 24 nt, Human
caaagcagcugugauauaucuugc

SEQ ID NO: 448630 - RNA, 21 nt, Human
caaauguacauuuuuuagaca

SEQ ID NO: 448631 - RNA, 18 nt, Human
caaccaagcagaaauuca

SEQ ID NO: 448632 - RNA, 20 nt, Human
caacuauuaaaaacacuuuu

SEQ ID NO: 448633 - RNA, 24 nt, Human
caagcacaccugaaaaaagagcaa

SEQ ID NO: 448634 - RNA, 21 nt, Human
cagaagaauuguugcugaaaa

SEQ ID NO: 448635 - RNA, 22 nt, Human
cauaagaacaaauacaggagua

SEQ ID NO: 448636 - RNA, 18 nt, Human
caucccacacacaccaca

SEQ ID NO: 448637 - RNA, 19 nt, Human
caugacuucuaaagaacag

SEQ ID NO: 448638 - RNA, 23 nt, Human
ccacucagaaggcgccgcgacga

SEQ ID NO: 448639 - RNA, 22 nt, Human
ccacugagcccaacgccgaccc

SEQ ID NO: 448640 - RNA, 20 nt, Human
ccagccaaucuuacuagaua

SEQ ID NO: 448641 - RNA, 23 nt, Human
cccaacgccgacccguagucccc

SEQ ID NO: 448642 - RNA, 21 nt, Human
cccaaggcauaacuacaaaga

SEQ ID NO: 448643 - RNA, 20 nt, Human
cccacacacaccacaaacca

SEQ ID NO: 448644 - RNA, 23 nt, Human
cccacacacaccacaaaccaucc

SEQ ID NO: 448645 - RNA, 23 nt, Human
cccacacacaccacaaaccaucc

SEQ ID NO: 448646 - RNA, 24 nt, Human
ccccacaucccacacacaccacaa

SEQ ID NO: 448647 - RNA, 26 nt, Human
ccccacaucccacacacaccacaaac

SEQ ID NO: 448648 - RNA, 26 nt, Human
cccccacaucccacacacaccacaaa

SEQ ID NO: 448649 - RNA, 22 nt, Human
ccgcggcgcgggcugcgcggag

SEQ ID NO: 448650 - RNA, 25 nt, Human
ccuauaacauuuuagaacccaaggc

SEQ ID NO: 448651 - RNA, 24 nt, Human
ccucgacccgaccacucagaaggc

SEQ ID NO: 448652 - RNA, 22 nt, Human
cgacuaaauuaacuugacuaaa

SEQ ID NO: 448653 - RNA, 24 nt, Human
cgcauaugacaaacauuucuuaca

SEQ ID NO: 448654 - RNA, 21 nt, Human
cgccugagaucgcgcagcgag

SEQ ID NO: 448655 - RNA, 21 nt, Human
cggagccgaggagaacccgcc

SEQ ID NO: 448656 - RNA, 19 nt, Human
cggcuucagcuacugccca

SEQ ID NO: 448657 - RNA, 21 nt, Human
cgggcugcgcggagccgagga

SEQ ID NO: 448658 - RNA, 18 nt, Human
cugagcccaacgccgacc

SEQ ID NO: 448659 - RNA, 22 nt, Human
cugaugcuaaaauauauuccaa

SEQ ID NO: 448660 - RNA, 22 nt, Human
cuucggcuucagcuacugccca

SEQ ID NO: 448661 - RNA, 21 nt, Human
gaauccccaccggacagcccu

SEQ ID NO: 448662 - RNA, 20 nt, Human
gagccgaggagaacccgccu

SEQ ID NO: 448663 - RNA, 19 nt, Human
gcaguaccugaugguuucc

SEQ ID NO: 448664 - RNA, 22 nt, Human
gcaguaccugaugguuuccaag

SEQ ID NO: 448665 - RNA, 20 nt, Human
gcccaacgccgacccguagg

SEQ ID NO: 448666 - RNA, 18 nt, Human
gcggcgcgggcugcgcgg

SEQ ID NO: 448667 - RNA, 22 nt, Human
gcuaggauucaauucagcaguu

SEQ ID NO: 448668 - RNA, 24 nt, Human
ggauuuacaaaauaaauuguauuu

SEQ ID NO: 448669 - RNA, 20 nt, Human
gggcgggccgcggggucccu

SEQ ID NO: 448670 - RNA, 24 nt, Human
guaucuuacaguucacugauuuac

SEQ ID NO: 448671 - RNA, 18 nt, Human
uaaaaaguacugcaaaaa

SEQ ID NO: 448672 - RNA, 21 nt, Human
uaaaaaugcuaugacagacac

SEQ ID NO: 448673 - RNA, 23 nt, Human
uaaaaaugcuaugacagacacga

SEQ ID NO: 448674 - RNA, 21 nt, Human
uaaaacaaaguuaaacaacua

SEQ ID NO: 448675 - RNA, 23 nt, Human
uaaacaacuacuuuccaaagccc

SEQ ID NO: 448676 - RNA, 28 nt, Human
uaaacaacuacuuuccaaagcccagaaa

SEQ ID NO: 448677 - RNA, 19 nt, Human
uaaauuguauuuuaaaaau

SEQ ID NO: 448678 - RNA, 26 nt, Human
uaauucccccacaucccacacacacc

SEQ ID NO: 448679 - RNA, 23 nt, Human
uacuuacgguaaacaacacaacc

SEQ ID NO: 448680 - RNA, 23 nt, Human
uagaacccaaggcauaacuacaa

SEQ ID NO: 448681 - RNA, 26 nt, Human
uagaacccaaggcauaacuacaaaga

SEQ ID NO: 448682 - RNA, 21 nt, Human
uagguaaauggcauuuucuua

SEQ ID NO: 448683 - RNA, 22 nt, Human
uagguaaauggcauuuucuuaa

SEQ ID NO: 448684 - RNA, 19 nt, Human
uauucauuuuaucccuuuc

SEQ ID NO: 448685 - RNA, 24 nt, Human
ucaugauguggaaucuuccuuaca

SEQ ID NO: 448686 - RNA, 20 nt, Human
ucccacacacaccacaaacc

SEQ ID NO: 448687 - RNA, 23 nt, Human
ucccacacacaccacaaaccauc

SEQ ID NO: 448688 - RNA, 23 nt, Human
ucccuugcuuuucacuuacuaua

SEQ ID NO: 448689 - RNA, 25 nt, Human
ucgagcccacugagcccaacgccga

SEQ ID NO: 448690 - RNA, 18 nt, Human
ucucaggacagacuuagg

SEQ ID NO: 448691 - RNA, 21 nt, Human
ucucugguugggagggagugc

SEQ ID NO: 448692 - RNA, 21 nt, Human
ugcaaagaaaagagcuaaaau

SEQ ID NO: 448693 - RNA, 24 nt, Human
ugcaaagaaaagagcuaaaauuuc

SEQ ID NO: 448694 - RNA, 21 nt, Human
ugggggaaaguuaaaaggcaa

SEQ ID NO: 448695 - RNA, 23 nt, Human
uggguuaaaacauucucuuggag

SEQ ID NO: 448696 - RNA, 18 nt, Human
uggucaagaauugaaagc

SEQ ID NO: 448697 - RNA, 23 nt, Human
ugugguaauauaaaaaauaacca

SEQ ID NO: 448698 - RNA, 18 nt, Human
uguucaguucaagggugu

SEQ ID NO: 448699 - RNA, 26 nt, Human
uuaaaaauuaaauagcaaauuugagu

SEQ ID NO: 448700 - RNA, 26 nt, Human
uuaauucccccacaucccacacacac

SEQ ID NO: 448701 - RNA, 21 nt, Human
uuacauucauccaacugaaga

SEQ ID NO: 448702 - RNA, 22 nt, Human
uucaaaauaugaauaaaggcac

SEQ ID NO: 448703 - RNA, 20 nt, Human
uugaauaaacaggaucgaaa

SEQ ID NO: 448704 - RNA, 25 nt, Human
uuuaaugccauccaauaaauaaacu

SEQ ID NO: 448705 - RNA, 23 nt, Human
aaaacaacucacaccagacaggc

SEQ ID NO: 448706 - RNA, 21 nt, Human
aaaagucucuauucuguacuu

SEQ ID NO: 448707 - RNA, 21 nt, Human
aaacaaagccaaaacaauaug

SEQ ID NO: 448708 - RNA, 21 nt, Human
aaagauacaaacaauaucaau

SEQ ID NO: 448709 - RNA, 22 nt, Human
aaagccaaaacaauauguaagu

SEQ ID NO: 448710 - RNA, 24 nt, Human
aaaguacugggauuacaggcguga

SEQ ID NO: 448711 - RNA, 24 nt, Human
aaagugcugggauuacaggcauga

SEQ ID NO: 448712 - RNA, 20 nt, Human
aaauaaugcuuuaaaauguu

SEQ ID NO: 448713 - RNA, 21 nt, Human
aaccuaaucuaucuauaauag

SEQ ID NO: 448714 - RNA, 25 nt, Human
aagcaauccucucgccucagccucc

SEQ ID NO: 448715 - RNA, 24 nt, Human
aagcaguugggauuacaggugugu

SEQ ID NO: 448716 - RNA, 23 nt, Human
aagcauuucucauaaaacaacuc

SEQ ID NO: 448717 - RNA, 18 nt, Human
aagcggggacuggcgggc

SEQ ID NO: 448718 - RNA, 18 nt, Human
aagcuacaacuaguuccu

SEQ ID NO: 448719 - RNA, 19 nt, Human
aaguacugggauuacaggc

SEQ ID NO: 448720 - RNA, 24 nt, Human
aagugaucugcccgucucagccuc

SEQ ID NO: 448721 - RNA, 19 nt, Human
aagugcugggauuacaggc

SEQ ID NO: 448722 - RNA, 21 nt, Human
aagugcugggauuacaggcau

SEQ ID NO: 448723 - RNA, 23 nt, Human
aauccccaagaucuagggcccaa

SEQ ID NO: 448724 - RNA, 22 nt, Human
acaaaccuuaggagagcuacgg

SEQ ID NO: 448725 - RNA, 21 nt, Human
acagcgcugcucuagaguacu

SEQ ID NO: 448726 - RNA, 21 nt, Human
acaggcgcccgccaccacacc

SEQ ID NO: 448727 - RNA, 18 nt, Human
acaggcgugagcaccacg

SEQ ID NO: 448728 - RNA, 21 nt, Human
accacaccuggcuaauuuugc

SEQ ID NO: 448729 - RNA, 24 nt, Human
accauauuggccaggcuggucuug

SEQ ID NO: 448730 - RNA, 24 nt, Human
accauguuggccaggauggucucg

SEQ ID NO: 448731 - RNA, 24 nt, Human
acgaaaauucaaaaaauugacucg

SEQ ID NO: 448732 - RNA, 18 nt, Human
acgggguuucaccauauu

SEQ ID NO: 448733 - RNA, 20 nt, Human
acgggguuucaccauauugg

SEQ ID NO: 448734 - RNA, 24 nt, Human
acgggguuucaccauauuggccag

SEQ ID NO: 448735 - RNA, 18 nt, Human
acgggguuucaccauguu

SEQ ID NO: 448736 - RNA, 23 nt, Human
acgggguuucaccauguuggcca

SEQ ID NO: 448737 - RNA, 24 nt, Human
acgggguuucaccauguuggccag

SEQ ID NO: 448738 - RNA, 20 nt, Human
acguauuuccccacaucccu

SEQ ID NO: 448739 - RNA, 21 nt, Human
acugagcacuugcaauguggc

SEQ ID NO: 448740 - RNA, 24 nt, Human
acuucaauaauaaccacuuaauau

SEQ ID NO: 448741 - RNA, 24 nt, Human
acuugguucucuugggaggaaaac

SEQ ID NO: 448742 - RNA, 22 nt, Human
agcaaaaauauggcaacuagug

SEQ ID NO: 448743 - RNA, 18 nt, Human
agccuccagagcagcugg

SEQ ID NO: 448744 - RNA, 19 nt, Human
agcguccucauuuuuaaaa

SEQ ID NO: 448745 - RNA, 23 nt, Human
agcuguaugaccucaugcaagcc

SEQ ID NO: 448746 - RNA, 25 nt, Human
aggaaacacaaaccuuaggagagcu

SEQ ID NO: 448747 - RNA, 25 nt, Human
aggcuggggugcaguggcgcgaucu

SEQ ID NO: 448748 - RNA, 20 nt, Human
agugcaguggugcgaucucg

SEQ ID NO: 448749 - RNA, 23 nt, Human
agugcaguggugcgaucucggcu

SEQ ID NO: 448750 - RNA, 24 nt, Human
agugcaguggugcgaucucggcuc

SEQ ID NO: 448751 - RNA, 23 nt, Human
aguugggauuacaggugugugcc

SEQ ID NO: 448752 - RNA, 23 nt, Human
auaaaacaacucacaccagacag

SEQ ID NO: 448753 - RNA, 18 nt, Human
auaaauaucccagcucug

SEQ ID NO: 448754 - RNA, 22 nt, Human
auaaauaucccagcucugugcu

SEQ ID NO: 448755 - RNA, 23 nt, Human
auauuggccaggcuggucuugaa

SEQ ID NO: 448756 - RNA, 21 nt, Human
auccucucgccucagccuccc

SEQ ID NO: 448757 - RNA, 22 nt, Human
augcagagguuaauccccaaga

SEQ ID NO: 448758 - RNA, 20 nt, Human
auuacaaaaacagaaaagug

SEQ ID NO: 448759 - RNA, 20 nt, Human
auuuaaacucugugccucag

SEQ ID NO: 448760 - RNA, 18 nt, Human
auuucuuguaccugugcc

SEQ ID NO: 448761 - RNA, 22 nt, Human
caaaaauaaaacaaagccaaaa

SEQ ID NO: 448762 - RNA, 21 nt, Human
caaaaaucauaaaugccucuc

SEQ ID NO: 448763 - RNA, 22 nt, Human
caaaaaucauaaaugccucuca

SEQ ID NO: 448764 - RNA, 23 nt, Human
caaagccaaaacaauauguaagu

SEQ ID NO: 448765 - RNA, 23 nt, Human
caaccuccaacauugcugggaca

SEQ ID NO: 448766 - RNA, 19 nt, Human
caacuaaaaaaaacugcau

SEQ ID NO: 448767 - RNA, 26 nt, Human
caagaggacagugugccaauacaucc

SEQ ID NO: 448768 - RNA, 22 nt, Human
caagaucuagggcccaagaucc

SEQ ID NO: 448769 - RNA, 19 nt, Human
caauaucaauacaguacuu

SEQ ID NO: 448770 - RNA, 22 nt, Human
cacaggcgcccgccaccacacc

SEQ ID NO: 448771 - RNA, 20 nt, Human
caccauauagaacaggaaac

SEQ ID NO: 448772 - RNA, 21 nt, Human
caccauauuggccaggcuggu

SEQ ID NO: 448773 - RNA, 23 nt, Human
caccauauuggccaggcuggucu

SEQ ID NO: 448774 - RNA, 27 nt, Human
caccauauuggccaggcuggucuugaa

SEQ ID NO: 448775 - RNA, 22 nt, Human
caccauguuggccaggaugguc

SEQ ID NO: 448776 - RNA, 24 nt, Human
caccauguuggccaggauggucuc

SEQ ID NO: 448777 - RNA, 18 nt, Human
cacgagagagaaaauaug

SEQ ID NO: 448778 - RNA, 22 nt, Human
cacucuguugcccagacuggag

SEQ ID NO: 448779 - RNA, 23 nt, Human
cacucuguugcccagacuggagu

SEQ ID NO: 448780 - RNA, 18 nt, Human
cacugcaaccucugccuc

SEQ ID NO: 448781 - RNA, 21 nt, Human
cacugcaaccucugccuccca

SEQ ID NO: 448782 - RNA, 23 nt, Human
cacugccaucucugccuccuggg

SEQ ID NO: 448783 - RNA, 25 nt, Human
cagaaaaguggcaccuaguggccac

SEQ ID NO: 448784 - RNA, 19 nt, Human
cagcauggaggagccccgg

SEQ ID NO: 448785 - RNA, 18 nt, Human
caggagccacuuggucgg

SEQ ID NO: 448786 - RNA, 24 nt, Human
caguagagacgggguuucaccaug

SEQ ID NO: 448787 - RNA, 19 nt, Human
caguggcgcgaucuuggcu

SEQ ID NO: 448788 - RNA, 24 nt, Human
cauauuggccaggcuggucuugaa

SEQ ID NO: 448789 - RNA, 28 nt, Human
caucaaaaauaaaacaaagccaaaacaa

SEQ ID NO: 448790 - RNA, 22 nt, Human
ccaaaguacugggauuacaggc

SEQ ID NO: 448791 - RNA, 24 nt, Human
ccaaaguacugggauuacaggcgu

SEQ ID NO: 448792 - RNA, 23 nt, Human
ccaaagugcugggauuacaggca

SEQ ID NO: 448793 - RNA, 24 nt, Human
ccaaagugcugggauuacaggcau

SEQ ID NO: 448794 - RNA, 24 nt, Human
ccaagcaguugggauuacaggugu

SEQ ID NO: 448795 - RNA, 22 nt, Human
ccagugcaguagccacuagcca

SEQ ID NO: 448796 - RNA, 24 nt, Human
cccaaagugcugggauuacaggca

SEQ ID NO: 448797 - RNA, 19 nt, Human
cccaagcaguugggauuac

SEQ ID NO: 448798 - RNA, 22 nt, Human
cccaagcaguugggauuacagg

SEQ ID NO: 448799 - RNA, 24 nt, Human
cccaagcaguugggauuacaggug

SEQ ID NO: 448800 - RNA, 18 nt, Human
cccagguucaagcaaucc

SEQ ID NO: 448801 - RNA, 20 nt, Human
cccagguucaagcaauccuc

SEQ ID NO: 448802 - RNA, 19 nt, Human
ccccgggcccgcccugccc

SEQ ID NO: 448803 - RNA, 21 nt, Human
ccucccagguucaagcaaucc

SEQ ID NO: 448804 - RNA, 19 nt, Human
ccugaccucaagugaucug

SEQ ID NO: 448805 - RNA, 22 nt, Human
ccugaccucaagugaucugccc

SEQ ID NO: 448806 - RNA, 20 nt, Human
ccugccccggcccaggcggc

SEQ ID NO: 448807 - RNA, 20 nt, Human
ccuugcccacgagccccugg

SEQ ID NO: 448808 - RNA, 20 nt, Human
cgccaccgcagcccguaggc

SEQ ID NO: 448809 - RNA, 24 nt, Human
cgcccaggcuggggugcaguggcg

SEQ ID NO: 448810 - RNA, 21 nt, Human
cgcucaugaauggacugucau

SEQ ID NO: 448811 - RNA, 24 nt, Human
cgcucugucgcccaggcuggggug

SEQ ID NO: 448812 - RNA, 21 nt, Human
cggcggccgccaccgcagccc

SEQ ID NO: 448813 - RNA, 21 nt, Human
cgggcccgcccugccccggcc

SEQ ID NO: 448814 - RNA, 24 nt, Human
cgggguuucaccauguuggccagg

SEQ ID NO: 448815 - RNA, 24 nt, Human
cgucucagccucccaaaguacugg

SEQ ID NO: 448816 - RNA, 24 nt, Human
cuacugagcacuugcaauguggcu

SEQ ID NO: 448817 - RNA, 21 nt, Human
cuaguuccugggucaguuagu

SEQ ID NO: 448818 - RNA, 24 nt, Human
cucacugcaaccucugccucccag

SEQ ID NO: 448819 - RNA, 24 nt, Human
cucacugcaaccucugccucccag

SEQ ID NO: 448820 - RNA, 18 nt, Human
cucacugccaucucugcc

SEQ ID NO: 448821 - RNA, 24 nt, Human
cucacugccaucucugccuccugg

SEQ ID NO: 448822 - RNA, 19 nt, Human
cuccaaagaucaaauacag

SEQ ID NO: 448823 - RNA, 26 nt, Human
cuccugaccucaagugaucugcccgu

SEQ ID NO: 448824 - RNA, 22 nt, Human
cuccugaccucgugauccgccc

SEQ ID NO: 448825 - RNA, 21 nt, Human
cuccuggguucacgccauucu

SEQ ID NO: 448826 - RNA, 24 nt, Human
cucgcucugucgcccaggcugggg

SEQ ID NO: 448827 - RNA, 23 nt, Human
cugcaaccucugccucccagguu

SEQ ID NO: 448828 - RNA, 24 nt, Human
cugcaaccucugccucccagguuc

SEQ ID NO: 448829 - RNA, 20 nt, Human
cugccaccccuggcuuaggc

SEQ ID NO: 448830 - RNA, 23 nt, Human
cugcugcacaccaauucucccca

SEQ ID NO: 448831 - RNA, 22 nt, Human
cuggcagcauggaggagccccg

SEQ ID NO: 448832 - RNA, 18 nt, Human
cuggcuaucugcccacug

SEQ ID NO: 448833 - RNA, 18 nt, Human
cugggcagguuuucuuuc

SEQ ID NO: 448834 - RNA, 24 nt, Human
gaccucaagugaucugcccgucuc

SEQ ID NO: 448835 - RNA, 22 nt, Human
gaccucgugauccgcccacuuc

SEQ ID NO: 448836 - RNA, 24 nt, Human
gaccucgugauccgcccacuucgg

SEQ ID NO: 448837 - RNA, 25 nt, Human
gaccucgugauccgcccacuucggc

SEQ ID NO: 448838 - RNA, 18 nt, Human
gacuuuucuuuucuuuuc

SEQ ID NO: 448839 - RNA, 24 nt, Human
gagacgggguuucaccauguuggc

SEQ ID NO: 448840 - RNA, 19 nt, Human
gagcacuuuuuggaggaag

SEQ ID NO: 448841 - RNA, 19 nt, Human
gagcacuuuuuggaggaag

SEQ ID NO: 448842 - RNA, 24 nt, Human
gagcauacuuggcaagcuaugaaa

SEQ ID NO: 448843 - RNA, 18 nt, Human
gaggagccccgggcccgc

SEQ ID NO: 448844 - RNA, 20 nt, Human
gaguaaaucuuauaugcaga

SEQ ID NO: 448845 - RNA, 23 nt, Human
gaucuagggcccaagauccuucc

SEQ ID NO: 448846 - RNA, 18 nt, Human
gauuacaggcaugagcca

SEQ ID NO: 448847 - RNA, 22 nt, Human
gauuacaggcaugagccacugc

SEQ ID NO: 448848 - RNA, 22 nt, Human
gauuacaggcaugagccacugc

SEQ ID NO: 448849 - RNA, 21 nt, Human
gauuacaggcgugagcaccac

SEQ ID NO: 448850 - RNA, 18 nt, Human
gauuacaggugugugcca

SEQ ID NO: 448851 - RNA, 21 nt, Human
gauuauaagccauuucacuga

SEQ ID NO: 448852 - RNA, 22 nt, Human
gcaaccucugccucccagguuc

SEQ ID NO: 448853 - RNA, 21 nt, Human
gcaauuuguagauauauucuu

SEQ ID NO: 448854 - RNA, 23 nt, Human
gccccgcagcccggccggcagca

SEQ ID NO: 448855 - RNA, 20 nt, Human
gcccugccgggugccgcggc

SEQ ID NO: 448856 - RNA, 23 nt, Human
gccucagccucccaagcaguugg

SEQ ID NO: 448857 - RNA, 21 nt, Human
gcucacugccaucucugccuc

SEQ ID NO: 448858 - RNA, 19 nt, Human
ggacuuggguguuagggug

SEQ ID NO: 448859 - RNA, 24 nt, Human
ggauggucucgaucuccugaccuc

SEQ ID NO: 448860 - RNA, 22 nt, Human
ggauuacaggcaugagccacug

SEQ ID NO: 448861 - RNA, 18 nt, Human
ggcccgcccugccccggc

SEQ ID NO: 448862 - RNA, 24 nt, Human
ggcuggucuugaacuccugaccuc

SEQ ID NO: 448863 - RNA, 20 nt, Human
gggaagcggggacuggcggg

SEQ ID NO: 448864 - RNA, 19 nt, Human
ggggacuggcgggcccugc

SEQ ID NO: 448865 - RNA, 24 nt, Human
ggggagauaccucuuggcagcaug

SEQ ID NO: 448866 - RNA, 23 nt, Human
gggguuucaccauauuggccagg

SEQ ID NO: 448867 - RNA, 23 nt, Human
gggguuucaccauguuggccagg

SEQ ID NO: 448868 - RNA, 22 nt, Human
ggguuucaccauauuggccagg

SEQ ID NO: 448869 - RNA, 19 nt, Human
ggucuugaacuccugaccu

SEQ ID NO: 448870 - RNA, 23 nt, Human
ggugcaguggcgcgaucuuggcu

SEQ ID NO: 448871 - RNA, 24 nt, Human
ggugcaguggcgcgaucuuggcuc

SEQ ID NO: 448872 - RNA, 25 nt, Human
guagaacauuaauaaaagauacaaa

SEQ ID NO: 448873 - RNA, 23 nt, Human
guagagacgggguuucaccaugu

SEQ ID NO: 448874 - RNA, 24 nt, Human
gugaucugcccgucucagccuccc

SEQ ID NO: 448875 - RNA, 22 nt, Human
gugcaguggcgcgaucuuggcu

SEQ ID NO: 448876 - RNA, 20 nt, Human
guuccgugcugggcagguuu

SEQ ID NO: 448877 - RNA, 24 nt, Human
uaaaacaacucacaccagacaggc

SEQ ID NO: 448878 - RNA, 23 nt, Human
uaaauuaaaaaaaaaaacuacaa

SEQ ID NO: 448879 - RNA, 24 nt, Human
uaaauuccauuuauuuacuaaaag

SEQ ID NO: 448880 - RNA, 19 nt, Human
uaacauggauagagacuug

SEQ ID NO: 448881 - RNA, 19 nt, Human
uaaccacuuaauauaaugu

SEQ ID NO: 448882 - RNA, 24 nt, Human
uaagaauuaccacuacaguaaugu

SEQ ID NO: 448883 - RNA, 21 nt, Human
uaagauacauaccagauuuug

SEQ ID NO: 448884 - RNA, 20 nt, Human
uacaaaaacagaaaaguggc

SEQ ID NO: 448885 - RNA, 19 nt, Human
uacagauucaaggaucaau

SEQ ID NO: 448886 - RNA, 23 nt, Human
uacaggcaugagccacugcgccc

SEQ ID NO: 448887 - RNA, 22 nt, Human
uaccauaaaaauaugucacuuc

SEQ ID NO: 448888 - RNA, 20 nt, Human
uaccucaacuaaaaaaaacu

SEQ ID NO: 448889 - RNA, 24 nt, Human
uacucacuguuuucuuaaagugug

SEQ ID NO: 448890 - RNA, 23 nt, Human
uacugggauuacaggcgugagca

SEQ ID NO: 448891 - RNA, 21 nt, Human
uagagacgggguuucaccaug

SEQ ID NO: 448892 - RNA, 22 nt, Human
uagagacgggguuucaccaugu

SEQ ID NO: 448893 - RNA, 20 nt, Human
uaggcugcugcacaccaauu

SEQ ID NO: 448894 - RNA, 23 nt, Human
uaguagaaacgggguuucaccau

SEQ ID NO: 448895 - RNA, 25 nt, Human
uauggaauugaacagccccuccucu

SEQ ID NO: 448896 - RNA, 24 nt, Human
ucaccauguuggccaggauggucu

SEQ ID NO: 448897 - RNA, 18 nt, Human
ucacgaaaauucaaaaaa

SEQ ID NO: 448898 - RNA, 19 nt, Human
ucacugcaaccucugccuc

SEQ ID NO: 448899 - RNA, 24 nt, Human
ucacugcaaccucugccucccagg

SEQ ID NO: 448900 - RNA, 25 nt, Human
ucacugcaaccucugccucccaggu

SEQ ID NO: 448901 - RNA, 23 nt, Human
ucacugccaucucugccuccugg

SEQ ID NO: 448902 - RNA, 24 nt, Human
ucacugccaucucugccuccuggg

SEQ ID NO: 448903 - RNA, 24 nt, Human
ucaguagagacgggguuucaccau

SEQ ID NO: 448904 - RNA, 23 nt, Human
uccaacauugcugggacacuauc

SEQ ID NO: 448905 - RNA, 22 nt, Human
uccaauuccagggcucagugau

SEQ ID NO: 448906 - RNA, 24 nt, Human
ucccaaaguacugggauuacaggc

SEQ ID NO: 448907 - RNA, 24 nt, Human
ucccaaagugcugggauuacaggc

SEQ ID NO: 448908 - RNA, 23 nt, Human
ucccaagcaguugggauuacagg

SEQ ID NO: 448909 - RNA, 24 nt, Human
ucccaagcaguugggauuacaggu

SEQ ID NO: 448910 - RNA, 18 nt, Human
ucccagguucaagcaauc

SEQ ID NO: 448911 - RNA, 18 nt, Human
ucccugugacaggaagau

SEQ ID NO: 448912 - RNA, 18 nt, Human
uccgcagcccggcggcug

SEQ ID NO: 448913 - RNA, 21 nt, Human
uccuggguucacgccauucug

SEQ ID NO: 448914 - RNA, 22 nt, Human
ucgcccaggcuggggugcagug

SEQ ID NO: 448915 - RNA, 24 nt, Human
ucgcucugucgcccaggcuggggu

SEQ ID NO: 448916 - RNA, 26 nt, Human
ucuaaacucaagaauauaugagaagu

SEQ ID NO: 448917 - RNA, 19 nt, Human
ucuacagaaaaauauuaga

SEQ ID NO: 448918 - RNA, 23 nt, Human
ucuacagaaaaauauuagagcga

SEQ ID NO: 448919 - RNA, 24 nt, Human
ucuauuggacagcgcugcucuaga

SEQ ID NO: 448920 - RNA, 24 nt, Human
ucucacucuguugcccagacugga

SEQ ID NO: 448921 - RNA, 26 nt, Human
ucucacucuguugcccagacuggagu

SEQ ID NO: 448922 - RNA, 27 nt, Human
ucucacucuguugcccagacuggagug

SEQ ID NO: 448923 - RNA, 19 nt, Human
ucucgcucugucgcccagg

SEQ ID NO: 448924 - RNA, 22 nt, Human
ucucgcucugucgcccaggcug

SEQ ID NO: 448925 - RNA, 23 nt, Human
ucucgcucugucgcccaggcugg

SEQ ID NO: 448926 - RNA, 23 nt, Human
ucucgcucugucgcccaggcugg

SEQ ID NO: 448927 - RNA, 24 nt, Human
ucucgcucugucgcccaggcuggg

SEQ ID NO: 448928 - RNA, 26 nt, Human
ucucgcucugucgcccaggcuggggu

SEQ ID NO: 448929 - RNA, 27 nt, Human
ucucgcucugucgcccaggcuggggug

SEQ ID NO: 448930 - RNA, 24 nt, Human
ucugucgcccaggcuggggugcag

SEQ ID NO: 448931 - RNA, 21 nt, Human
ucuugaacuccugaccucaag

SEQ ID NO: 448932 - RNA, 20 nt, Human
ugaaagcauuacaaaaacag

SEQ ID NO: 448933 - RNA, 18 nt, Human
ugaagucucacucuguug

SEQ ID NO: 448934 - RNA, 18 nt, Human
ugaccucaagugaucugc

SEQ ID NO: 448935 - RNA, 24 nt, Human
ugaccucaagugaucugcccgucu

SEQ ID NO: 448936 - RNA, 19 nt, Human
ugauuccaaguaucauccu

SEQ ID NO: 448937 - RNA, 21 nt, Human
ugcagagguuaauccccaaga

SEQ ID NO: 448938 - RNA, 22 nt, Human
ugcaguggugcgaucucggcuc

SEQ ID NO: 448939 - RNA, 21 nt, Human
ugcccagacuggagugcagug

SEQ ID NO: 448940 - RNA, 24 nt, Human
ugcccagacuggagugcaguggug

SEQ ID NO: 448941 - RNA, 20 nt, Human
ugccgcggcggccgccaccg

SEQ ID NO: 448942 - RNA, 25 nt, Human
ugccgcggcggccgccaccgcagcc

SEQ ID NO: 448943 - RNA, 24 nt, Human
ugccucagccuccagagcagcugg

SEQ ID NO: 448944 - RNA, 20 nt, Human
ugccuggaaucagaagaccc

SEQ ID NO: 448945 - RNA, 24 nt, Human
ugcuuuguauuuucaguagagacg

SEQ ID NO: 448946 - RNA, 21 nt, Human
uggaaagcauuucucauaaaa

SEQ ID NO: 448947 - RNA, 23 nt, Human
uggagcagggaagcggggacugg

SEQ ID NO: 448948 - RNA, 24 nt, Human
uggagucucgcucugucgcccagg

SEQ ID NO: 448949 - RNA, 23 nt, Human
uggagugcaguggugcgaucucg

SEQ ID NO: 448950 - RNA, 24 nt, Human
uggagugcaguggugcgaucucgg

SEQ ID NO: 448951 - RNA, 24 nt, Human
uggccaggauggucucgaucuccu

SEQ ID NO: 448952 - RNA, 24 nt, Human
uggccaggcuggucuugaacuccu

SEQ ID NO: 448953 - RNA, 21 nt, Human
uggcucacugccaucucugcc

SEQ ID NO: 448954 - RNA, 21 nt, Human
ugggaccacaggcgcccgcca

SEQ ID NO: 448955 - RNA, 24 nt, Human
ugggaccacaggcgcccgccacca

SEQ ID NO: 448956 - RNA, 24 nt, Human
ugggaggaaaacguauuuccccac

SEQ ID NO: 448957 - RNA, 19 nt, Human
ugggauuacaggcaugagc

SEQ ID NO: 448958 - RNA, 22 nt, Human
ugggauuacaggcaugagccac

SEQ ID NO: 448959 - RNA, 22 nt, Human
ugggauuacaggcaugagccac

SEQ ID NO: 448960 - RNA, 23 nt, Human
ugggauuacaggcaugagccacu

SEQ ID NO: 448961 - RNA, 24 nt, Human
ugggauuacaggcaugagccacug

SEQ ID NO: 448962 - RNA, 26 nt, Human
ugggauuacaggcaugagccacugcg

SEQ ID NO: 448963 - RNA, 18 nt, Human
ugggauuacaggcgugag

SEQ ID NO: 448964 - RNA, 19 nt, Human
ugggauuacaggcgugagc

SEQ ID NO: 448965 - RNA, 23 nt, Human
ugggauuacaggcgugagcacca

SEQ ID NO: 448966 - RNA, 24 nt, Human
ugggauuacaggcgugagcaccac

SEQ ID NO: 448967 - RNA, 19 nt, Human
ugggauuacaggugugugc

SEQ ID NO: 448968 - RNA, 21 nt, Human
ugggauuacaggugugugcca

SEQ ID NO: 448969 - RNA, 21 nt, Human
ugggauuacaggugugugcca

SEQ ID NO: 448970 - RNA, 21 nt, Human
ugggauuacaggugugugcca

SEQ ID NO: 448971 - RNA, 22 nt, Human
ugggauuacaggugugugccau

SEQ ID NO: 448972 - RNA, 24 nt, Human
ugggauuacaggugugugccauua

SEQ ID NO: 448973 - RNA, 22 nt, Human
ugggcaaguaugagucuccaau

SEQ ID NO: 448974 - RNA, 24 nt, Human
uggggugcaguggcgcgaucuugg

SEQ ID NO: 448975 - RNA, 25 nt, Human
ugguaggcaggccccucugcucaau

SEQ ID NO: 448976 - RNA, 19 nt, Human
ugguuagaaauauuuuagc

SEQ ID NO: 448977 - RNA, 22 nt, Human
uguaaggaaagcugaaacucuu

SEQ ID NO: 448978 - RNA, 23 nt, Human
ugucggaccaggaauggugccaa

SEQ ID NO: 448979 - RNA, 21 nt, Human
uguugcccagacuggagugca

SEQ ID NO: 448980 - RNA, 21 nt, Human
uuagcaaaaauauggcaacua

SEQ ID NO: 448981 - RNA, 24 nt, Human
uuaguagaaacgggguuucaccau

SEQ ID NO: 448982 - RNA, 23 nt, Human
uuagugaugaccauauaacucau

SEQ ID NO: 448983 - RNA, 28 nt, Human
uucaucuuaaagugcucaacugagcaua

SEQ ID NO: 448984 - RNA, 19 nt, Human
uucggccucccaaagugcu

SEQ ID NO: 448985 - RNA, 21 nt, Human
uucuuuggcucauucuaaacc

SEQ ID NO: 448986 - RNA, 24 nt, Human
uugcccagacuggagugcaguggu

SEQ ID NO: 448987 - RNA, 21 nt, Human
uugggauuacaggugugugcc

SEQ ID NO: 448988 - RNA, 23 nt, Human
uuguauuuuuaguagaaacgggg

SEQ ID NO: 448989 - RNA, 23 nt, Human
uuuaaacauguacuugucauuuu

SEQ ID NO: 448990 - RNA, 22 nt, Human
uuuacggagaucccucaaagac

SEQ ID NO: 448991 - RNA, 24 nt, Human
uuucaccauauuggccaggcuggu

SEQ ID NO: 448992 - RNA, 19 nt, Human
uuucaccauguuggccagg

SEQ ID NO: 448993 - RNA, 20 nt, Human
uuucaccauguuggccagga

SEQ ID NO: 448994 - RNA, 24 nt, Human
uuuucaguagagacgggguuucac

SEQ ID NO: 448995 - RNA, 24 nt, Human
uuuugaguccaggacaaaaggauc

SEQ ID NO: 448996 - RNA, 24 nt, Human
uuuuuaguagaaacgggguuucac

SEQ ID NO: 448997 - RNA, 18 nt, Human
uuuuuuguauuuuuagua

SEQ ID NO: 448998 - RNA, 21 nt, Human
aaaaaaaacuaaaagauacau

SEQ ID NO: 448999 - RNA, 19 nt, Human
aaacagcuccagaaaguuc

SEQ ID NO: 449000 - RNA, 18 nt, Human
aaauaccauaaaauacaa

SEQ ID NO: 449001 - RNA, 22 nt, Human
aaggaggaggcuggcagacagc

SEQ ID NO: 449002 - RNA, 18 nt, Human
acaaaaauaggcugggag

SEQ ID NO: 449003 - RNA, 21 nt, Human
agaaaguucaaacaaaaaaaa

SEQ ID NO: 449004 - RNA, 18 nt, Human
aggaggaggagggagagc

SEQ ID NO: 449005 - RNA, 20 nt, Human
auaucagaacaugccucaca

SEQ ID NO: 449006 - RNA, 25 nt, Human
aucgaacgacgcguucaggcagaca

SEQ ID NO: 449007 - RNA, 21 nt, Human
augauaggaaauauaaacauc

SEQ ID NO: 449008 - RNA, 25 nt, Human
auguaucuguaguaauucucauaca

SEQ ID NO: 449009 - RNA, 24 nt, Human
auguggcaaaaaaguuugcuguuu

SEQ ID NO: 449010 - RNA, 24 nt, Human
caacaccgacgucgcuauuuacag

SEQ ID NO: 449011 - RNA, 24 nt, Human
caacgugacaccaucgaacgacgc

SEQ ID NO: 449012 - RNA, 22 nt, Human
cucaccgacaacaaaccaucau

SEQ ID NO: 449013 - RNA, 19 nt, Human
cuccugggaccuaacgauu

SEQ ID NO: 449014 - RNA, 20 nt, Human
cucggccccgccucgugccg

SEQ ID NO: 449015 - RNA, 22 nt, Human
cuuaguaucagccagauguacc

SEQ ID NO: 449016 - RNA, 20 nt, Human
cuucucuggguucugaaggg

SEQ ID NO: 449017 - RNA, 19 nt, Human
gaggaggaggagggagagc

SEQ ID NO: 449018 - RNA, 19 nt, Human
gccuauaaacauaucagaa

SEQ ID NO: 449019 - RNA, 19 nt, Human
ggaggaggaggagggagag

SEQ ID NO: 449020 - RNA, 25 nt, Human
ggaggaggaggagggagagcgaggu

SEQ ID NO: 449021 - RNA, 24 nt, Human
ggaggaggagggagagcgagguga

SEQ ID NO: 449022 - RNA, 22 nt, Human
ggugaggagggcgggagaagga

SEQ ID NO: 449023 - RNA, 23 nt, Human
uaaaacagcuccagaaaguucaa

SEQ ID NO: 449024 - RNA, 22 nt, Human
ucagccagauguaccaaauacc

SEQ ID NO: 449025 - RNA, 23 nt, Human
uccaacacucaccgacaacaaac

SEQ ID NO: 449026 - RNA, 23 nt, Human
uccagaaaguucaaacaaaaaaa

SEQ ID NO: 449027 - RNA, 24 nt, Human
uccagaaaguucaaacaaaaaaaa

SEQ ID NO: 449028 - RNA, 21 nt, Human
ucuucuauaaaacagcuccag

SEQ ID NO: 449029 - RNA, 18 nt, Human
ugaggagggcgggagaag

SEQ ID NO: 449030 - RNA, 19 nt, Human
uuccccaacgugacaccau

SEQ ID NO: 449031 - RNA, 21 nt, Human
uugcuguuuuauuuguuugcc

SEQ ID NO: 449032 - RNA, 24 nt, Human
uuucuaauguuguuuucucuaaca

SEQ ID NO: 449033 - RNA, 20 nt, Human
uuuuauuacaauggugcaag

SEQ ID NO: 449034 - RNA, 24 nt, Human
uuuucuaauguuguuuucucuaac

SEQ ID NO: 449035 - RNA, 19 nt, Human
aaccacuccccagccccca

SEQ ID NO: 449036 - RNA, 25 nt, Human
acaaagaagguguggccagaacaac

SEQ ID NO: 449037 - RNA, 24 nt, Human
acaagaaguccaaggaagagccga

SEQ ID NO: 449038 - RNA, 24 nt, Human
acagaacacacaagaaguccaagg

SEQ ID NO: 449039 - RNA, 23 nt, Human
agaacacacaagaaguccaagga

SEQ ID NO: 449040 - RNA, 20 nt, Human
agcccccagagccugggagu

SEQ ID NO: 449041 - RNA, 22 nt, Human
aggaagagccgaggguccagug

SEQ ID NO: 449042 - RNA, 21 nt, Human
aggcuugguaaccacucccca

SEQ ID NO: 449043 - RNA, 18 nt, Human
ccagagccugggagugga

SEQ ID NO: 449044 - RNA, 24 nt, Human
ccagagccugggaguggagcuggg

SEQ ID NO: 449045 - RNA, 22 nt, Human
ccaucugaggccaagauauuga

SEQ ID NO: 449046 - RNA, 23 nt, Human
cccaaacuauaaauauuuagcau

SEQ ID NO: 449047 - RNA, 20 nt, Human
cccaagacccugaauccagc

SEQ ID NO: 449048 - RNA, 23 nt, Human
cccaagacccugaauccagcgaa

SEQ ID NO: 449049 - RNA, 21 nt, Human
cccagcccccagagccuggga

SEQ ID NO: 449050 - RNA, 20 nt, Human
ccccagagccugggagugga

SEQ ID NO: 449051 - RNA, 20 nt, Human
cccugaauccagcgaagcuc

SEQ ID NO: 449052 - RNA, 19 nt, Human
ccucugagcuagagacggg

SEQ ID NO: 449053 - RNA, 19 nt, Human
cgcccagggucacagaucc

SEQ ID NO: 449054 - RNA, 19 nt, Human
cgcggcggaccucugaugc

SEQ ID NO: 449055 - RNA, 21 nt, Human
cucacagaacacacaagaagu

SEQ ID NO: 449056 - RNA, 21 nt, Human
cuccccagcccccagagccug

SEQ ID NO: 449057 - RNA, 23 nt, Human
cugagccacaaagaagguguggc

SEQ ID NO: 449058 - RNA, 26 nt, Human
cugaugcccaagacccugaauccagc

SEQ ID NO: 449059 - RNA, 23 nt, Human
gaauccagcgaagcucacagaac

SEQ ID NO: 449060 - RNA, 23 nt, Human
gccaagauauugacgggggggau

SEQ ID NO: 449061 - RNA, 22 nt, Human
gcccccagagccugggagugga

SEQ ID NO: 449062 - RNA, 18 nt, Human
gcggcggaccucugaugc

SEQ ID NO: 449063 - RNA, 20 nt, Human
ggagccaucugaggccaaga

SEQ ID NO: 449064 - RNA, 22 nt, Human
ggcagugggacagaaggagaga

SEQ ID NO: 449065 - RNA, 20 nt, Human
gggacagaaggagagaggag

SEQ ID NO: 449066 - RNA, 25 nt, Human
gggcagugggacagaaggagagagg

SEQ ID NO: 449067 - RNA, 18 nt, Human
ggggagagggcaguggga

SEQ ID NO: 449068 - RNA, 20 nt, Human
gggggggauuccuggguccc

SEQ ID NO: 449069 - RNA, 21 nt, Human
gguaaccacuccccagccccc

SEQ ID NO: 449070 - RNA, 24 nt, Human
guccaaggaagagccgagggucca

SEQ ID NO: 449071 - RNA, 22 nt, Human
uacuuuguguuauuauaagaua

SEQ ID NO: 449072 - RNA, 19 nt, Human
ucaaaccgagauaugaaug

SEQ ID NO: 449073 - RNA, 25 nt, Human
uccacagugggaaguucugugggac

SEQ ID NO: 449074 - RNA, 18 nt, Human
ugaccuuggggagccauc

SEQ ID NO: 449075 - RNA, 23 nt, Human
ugcugaccaauguccucuagggc

SEQ ID NO: 449076 - RNA, 21 nt, Human
uggagcugggaugcugggccg

SEQ ID NO: 449077 - RNA, 23 nt, Human
uggccagaacaacuugggcuccu

SEQ ID NO: 449078 - RNA, 22 nt, Human
ugggaguggagcugggaugcug

SEQ ID NO: 449079 - RNA, 22 nt, Human
ugguaaccacuccccagccccc

SEQ ID NO: 449080 - RNA, 21 nt, Human
ugugggacacauuggcacuga

SEQ ID NO: 449081 - RNA, 22 nt, Human
aaagcuccccaucuguccccuc

SEQ ID NO: 449082 - RNA, 20 nt, Human
aaaggcacguauuccuugaa

SEQ ID NO: 449083 - RNA, 22 nt, Human
aaccauuagccucccugacccc

SEQ ID NO: 449084 - RNA, 22 nt, Human
accccucuccccgcuuccccag

SEQ ID NO: 449085 - RNA, 23 nt, Human
agaaacauucagcaaagcaacca

SEQ ID NO: 449086 - RNA, 22 nt, Human
cagcaaagcaaccauuagccuc

SEQ ID NO: 449087 - RNA, 21 nt, Human
cagccccuaugggaacucgua

SEQ ID NO: 449088 - RNA, 21 nt, Human
ccagaaacauucagcaaagca

SEQ ID NO: 449089 - RNA, 22 nt, Human
ccccagcaguuaggaugaaggc

SEQ ID NO: 449090 - RNA, 22 nt, Human
ccugaccccucuccccgcuucc

SEQ ID NO: 449091 - RNA, 22 nt, Human
gcaaagcaaccauuagccuccc

SEQ ID NO: 449092 - RNA, 18 nt, Human
gccucccugaccccucuc

SEQ ID NO: 449093 - RNA, 22 nt, Human
uaagaaaagcuccccaucuguc

SEQ ID NO: 449094 - RNA, 23 nt, Human
uccccagcaguuaggaugaaggc

SEQ ID NO: 449095 - RNA, 20 nt, Human
ucccugaccccucuccccgc

SEQ ID NO: 449096 - RNA, 21 nt, Human
ugaccccucuccccgcuuccc

SEQ ID NO: 449097 - RNA, 22 nt, Human
ugaccccucuccccgcuucccc

SEQ ID NO: 449098 - RNA, 21 nt, Human
uuccuugaauagguaagaaaa

SEQ ID NO: 449099 - RNA, 25 nt, Human
aaaucacccuugauaacccacuuuc

SEQ ID NO: 449100 - RNA, 18 nt, Human
acgaaauaaaggcaaaag

SEQ ID NO: 449101 - RNA, 21 nt, Human
agacaugcucuucucucuucu

SEQ ID NO: 449102 - RNA, 21 nt, Human
caaauucuugaucaagaguuu

SEQ ID NO: 449103 - RNA, 24 nt, Human
caaguaaagacaugcucuucucuc

SEQ ID NO: 449104 - RNA, 20 nt, Human
caugcucuucucucuucugu

SEQ ID NO: 449105 - RNA, 20 nt, Human
cggcgcccggguuucaaccc

SEQ ID NO: 449106 - RNA, 21 nt, Human
cuguauaaaacuuuacgaaau

SEQ ID NO: 449107 - RNA, 20 nt, Human
gagacgguggcugcccgggc

SEQ ID NO: 449108 - RNA, 22 nt, Human
gagacgguggcugcccgggcuc

SEQ ID NO: 449109 - RNA, 21 nt, Human
gcagaaaauuucaaaucaccc

SEQ ID NO: 449110 - RNA, 24 nt, Human
ugcucuucucucuucuguauaaaa

SEQ ID NO: 449111 - RNA, 18 nt, Human
ugcuggaaaaugcugccc

SEQ ID NO: 449112 - RNA, 22 nt, Human
uggaaaaugcugcccagggcuc

SEQ ID NO: 449113 - RNA, 22 nt, Human
uguguacaucuugcuggaaaau

SEQ ID NO: 449114 - RNA, 23 nt, Human
uucuuauuaagcgccagcuuuaa

SEQ ID NO: 449115 - RNA, 28 nt, Human
uucuuuauuauuacuuauucuuauuaag

SEQ ID NO: 449116 - RNA, 19 nt, Human
uugcuggaaaaugcugccc

SEQ ID NO: 449117 - RNA, 18 nt, Human
uuuuuuuuuuuuuuuuug

SEQ ID NO: 449118 - RNA, 20 nt, Human
uuuuuuuuuuuuuuuuuguu

SEQ ID NO: 449119 - RNA, 21 nt, Human
agacaugcucuucucucuucu

SEQ ID NO: 449120 - RNA, 24 nt, Human
caaguaaagacaugcucuucucuc

SEQ ID NO: 449121 - RNA, 20 nt, Human
cggcgcccggguuucaaccc

SEQ ID NO: 449122 - RNA, 18 nt, Human
cugcagaaaauuucacau

SEQ ID NO: 449123 - RNA, 20 nt, Human
uaagcgccagcuuaaugcug

SEQ ID NO: 449124 - RNA, 24 nt, Human
ugcucuucucucuucuauauaaaa

SEQ ID NO: 449125 - RNA, 19 nt, Human
aagcacaccacccaccucc

SEQ ID NO: 449126 - RNA, 18 nt, Human
agcacaccacccaccucc

SEQ ID NO: 449127 - RNA, 19 nt, Human
caaaugcccaccccaaccc

SEQ ID NO: 449128 - RNA, 18 nt, Human
caccacccaccucccgca

SEQ ID NO: 449129 - RNA, 18 nt, Human
cacguguggccuuggggc

SEQ ID NO: 449130 - RNA, 22 nt, Human
ccacccaccucccgcaucaaau

SEQ ID NO: 449131 - RNA, 25 nt, Human
ccaccucccgcaucaaaugcccacc

SEQ ID NO: 449132 - RNA, 19 nt, Human
cccaccccaacccaacucc

SEQ ID NO: 449133 - RNA, 23 nt, Human
cccaccccaacccaacucccugc

SEQ ID NO: 449134 - RNA, 22 nt, Human
ccccaacccaacucccugccgc

SEQ ID NO: 449135 - RNA, 20 nt, Human
cccugccgccgccgcgcugc

SEQ ID NO: 449136 - RNA, 19 nt, Human
ccugccgccgccgcgcugc

SEQ ID NO: 449137 - RNA, 23 nt, Human
cgcaucaaaugcccaccccaacc

SEQ ID NO: 449138 - RNA, 20 nt, Human
cuagcaagcacaccacccaa

SEQ ID NO: 449139 - RNA, 23 nt, Human
cucccgcaucaaaugcccacccc

SEQ ID NO: 449140 - RNA, 22 nt, Human
cucccugccgccgccgcgcugc

SEQ ID NO: 449141 - RNA, 18 nt, Human
gccuuggggcagguccac

SEQ ID NO: 449142 - RNA, 23 nt, Human
uaaaaaaaaucugucccggccca

SEQ ID NO: 449143 - RNA, 24 nt, Human
uagcaagcacaccacccaccuccc

SEQ ID NO: 449144 - RNA, 21 nt, Human
ucaaaugcccaccccaaccca

SEQ ID NO: 449145 - RNA, 19 nt, Human
ugaccaggcacguguggcc

SEQ ID NO: 449146 - RNA, 20 nt, Human
ugaccaggcacguguggccu

SEQ ID NO: 449147 - RNA, 19 nt, Human
uggggcagguccacugcug

SEQ ID NO: 449148 - RNA, 24 nt, Human
uggguagucugagggggaaggcca

SEQ ID NO: 449149 - RNA, 24 nt, Human
uguggccuuggggcagguccacug

SEQ ID NO: 449150 - RNA, 20 nt, Human
uuggggcagguccacugcug

SEQ ID NO: 449151 - RNA, 24 nt, Human
uuuuuuuuuuuuuuuuuuuacaag

SEQ ID NO: 449152 - RNA, 22 nt, Human
aaaaaaccagccaacagggguu

SEQ ID NO: 449153 - RNA, 20 nt, Human
aaaaagcaagaaggcaaagc

SEQ ID NO: 449154 - RNA, 22 nt, Human
aaaacaaaacagaacaaaaaac

SEQ ID NO: 449155 - RNA, 21 nt, Human
aaaacaaaaugaaacaaaaag

SEQ ID NO: 449156 - RNA, 21 nt, Human
aaaacagcaaagaguuuauag

SEQ ID NO: 449157 - RNA, 21 nt, Human
aaaauaauacaaaacaaaaca

SEQ ID NO: 449158 - RNA, 22 nt, Human
aaacaaaaagcagguaucaaaa

SEQ ID NO: 449159 - RNA, 23 nt, Human
aacaaaacagaacaaaaaaccag

SEQ ID NO: 449160 - RNA, 25 nt, Human
aacagaacaaaaaaccagccaacag

SEQ ID NO: 449161 - RNA, 20 nt, Human
aagcaagaaggcaaagcuga

SEQ ID NO: 449162 - RNA, 22 nt, Human
aagucagugauuacaaaacugg

SEQ ID NO: 449163 - RNA, 19 nt, Human
aaucauucuuucugauuug

SEQ ID NO: 449164 - RNA, 21 nt, Human
aauuuuuugcuguguggcagu

SEQ ID NO: 449165 - RNA, 25 nt, Human
acaaaaagcagguaucaaaaacagc

SEQ ID NO: 449166 - RNA, 27 nt, Human
acaaaacaaaacaaaaugaaacaaaaa

SEQ ID NO: 449167 - RNA, 22 nt, Human
acaaaacaaaacagaacaaaaa

SEQ ID NO: 449168 - RNA, 20 nt, Human
agaacaaaaaaccagccaac

SEQ ID NO: 449169 - RNA, 24 nt, Human
agagaaacagaugcuacccacagg

SEQ ID NO: 449170 - RNA, 19 nt, Human
agauaaucaggaggcaagc

SEQ ID NO: 449171 - RNA, 25 nt, Human
agcaagaaggcaaagcugagagaaa

SEQ ID NO: 449172 - RNA, 19 nt, Human
agcagguaucaaaaacagc

SEQ ID NO: 449173 - RNA, 20 nt, Human
aggcaaagcugagagaaaca

SEQ ID NO: 449174 - RNA, 19 nt, Human
aggcagauaauccacuucc

SEQ ID NO: 449175 - RNA, 26 nt, Human
aggcagauaauccacuuccugccaga

SEQ ID NO: 449176 - RNA, 18 nt, Human
agggcagcgguggcauug

SEQ ID NO: 449177 - RNA, 27 nt, Human
agggguuaaaaguugcacaauuaaacu

SEQ ID NO: 449178 - RNA, 18 nt, Human
agugauuacaaaacuggc

SEQ ID NO: 449179 - RNA, 22 nt, Human
augaaaaagcaagaaggcaaag

SEQ ID NO: 449180 - RNA, 19 nt, Human
augguccaguuuugcaaug

SEQ ID NO: 449181 - RNA, 22 nt, Human
caaaaagcagguaucaaaaaca

SEQ ID NO: 449182 - RNA, 25 nt, Human
caaaacaaaacaaaaugaaacaaaa

SEQ ID NO: 449183 - RNA, 24 nt, Human
caaaacaaaacagaacaaaaaacc

SEQ ID NO: 449184 - RNA, 20 nt, Human
caagacuucuugcucugaac

SEQ ID NO: 449185 - RNA, 20 nt, Human
cacuucccucuuggucaggu

SEQ ID NO: 449186 - RNA, 18 nt, Human
cagaacaaaaaaccagcc

SEQ ID NO: 449187 - RNA, 21 nt, Human
cagaacaaaaaaccagccaac

SEQ ID NO: 449188 - RNA, 22 nt, Human
ccacucccgaggcagauaaucc

SEQ ID NO: 449189 - RNA, 23 nt, Human
cccacaguacagauaaucaggag

SEQ ID NO: 449190 - RNA, 26 nt, Human
cgaggcagauaauccacuuccugcca

SEQ ID NO: 449191 - RNA, 19 nt, Human
cuucccucuuggucaggug

SEQ ID NO: 449192 - RNA, 20 nt, Human
cuucuugcucugaacccugg

SEQ ID NO: 449193 - RNA, 23 nt, Human
cuuucugcaaaucauucuuucug

SEQ ID NO: 449194 - RNA, 21 nt, Human
gaaaaagcaagaaggcaaagc

SEQ ID NO: 449195 - RNA, 24 nt, Human
gaaaaagcaagaaggcaaagcuga

SEQ ID NO: 449196 - RNA, 22 nt, Human
gaacccugggugaccacaaaua

SEQ ID NO: 449197 - RNA, 18 nt, Human
gagccauauuaguggaac

SEQ ID NO: 449198 - RNA, 24 nt, Human
gcauccaauguaaauacuaagcac

SEQ ID NO: 449199 - RNA, 18 nt, Human
ggcagcgguggcauuugg

SEQ ID NO: 449200 - RNA, 19 nt, Human
gggcagcgguggcauuugg

SEQ ID NO: 449201 - RNA, 20 nt, Human
gguaucaaaaacagcaaaga

SEQ ID NO: 449202 - RNA, 20 nt, Human
ggucuuuguaccagcaauuc

SEQ ID NO: 449203 - RNA, 21 nt, Human
guuaaaaauaauacaaaacaa

SEQ ID NO: 449204 - RNA, 19 nt, Human
uaaacccacaguacagaua

SEQ ID NO: 449205 - RNA, 25 nt, Human
uacaaaacaaaacaaaaugaaacaa

SEQ ID NO: 449206 - RNA, 28 nt, Human
uacaaaacaaaacaaaaugaaacaaaaa

SEQ ID NO: 449207 - RNA, 22 nt, Human
uacaaaacaaaacagaacaaaa

SEQ ID NO: 449208 - RNA, 23 nt, Human
uacaaaacaaaacagaacaaaaa

SEQ ID NO: 449209 - RNA, 24 nt, Human
uaccagcaauucccacucccgagg

SEQ ID NO: 449210 - RNA, 22 nt, Human
uacccugaagaacacugaagac

SEQ ID NO: 449211 - RNA, 23 nt, Human
uagaaaacacugagcuaaaacac

SEQ ID NO: 449212 - RNA, 18 nt, Human
uauagaauuucugcacca

SEQ ID NO: 449213 - RNA, 18 nt, Human
uaucaaaaacagcaaaga

SEQ ID NO: 449214 - RNA, 18 nt, Human
ucugaacccugggugacc

SEQ ID NO: 449215 - RNA, 24 nt, Human
ugaccaaaucucucaguauuaguu

SEQ ID NO: 449216 - RNA, 23 nt, Human
ugccagucucucauauuuuuuau

SEQ ID NO: 449217 - RNA, 21 nt, Human
ugcccagaguuuaaauuacac

SEQ ID NO: 449218 - RNA, 20 nt, Human
ugcucugaacccugggugac

SEQ ID NO: 449219 - RNA, 19 nt, Human
uguguggcaguuucuuuuu

SEQ ID NO: 449220 - RNA, 23 nt, Human
uguuuuggucuuuguaccagcaa

SEQ ID NO: 449221 - RNA, 23 nt, Human
uuaaaggacaacugauauguaaa

SEQ ID NO: 449222 - RNA, 23 nt, Human
uuaguggaacaaaaguuugaugu

SEQ ID NO: 449223 - RNA, 19 nt, Human
uucacccaccacuuauucc

SEQ ID NO: 449224 - RNA, 19 nt, Human
uucuuucugauuugcaguu

SEQ ID NO: 449225 - RNA, 20 nt, Human
uugaggggccaugauuauug

SEQ ID NO: 449226 - RNA, 22 nt, Human
uuugaaaggaugaaacacuucu

SEQ ID NO: 449227 - RNA, 18 nt, Human
uuugagaucccaacuacc

SEQ ID NO: 449228 - RNA, 24 nt, Human
ccgccgggccgccuccgcccgcgc

SEQ ID NO: 449229 - RNA, 20 nt, Human
ccggccgccgcccgucccag

SEQ ID NO: 449230 - RNA, 21 nt, Human
cgggaaaagaugcaauuagcg

SEQ ID NO: 449231 - RNA, 23 nt, Human
cucccagggcccgccgggccgcc

SEQ ID NO: 449232 - RNA, 19 nt, Human
cuccgcccgcgcucgugcc

SEQ ID NO: 449233 - RNA, 18 nt, Human
uggccgaggccacccggc

SEQ ID NO: 449234 - RNA, 23 nt, Human
aaaaccaaaccaaacaaaaauaa

SEQ ID NO: 449235 - RNA, 24 nt, Human
aaacaaaaauaaugauaucuuaau

SEQ ID NO: 449236 - RNA, 19 nt, Human
aaacauaagcccucuccca

SEQ ID NO: 449237 - RNA, 19 nt, Human
aaaccaaaccaaacaaaaa

SEQ ID NO: 449238 - RNA, 22 nt, Human
aagaggaaaaaagcaaaaccaa

SEQ ID NO: 449239 - RNA, 21 nt, Human
aagcaaaaccaaaccaaacaa

SEQ ID NO: 449240 - RNA, 24 nt, Human
aagcaaaaccaaaccaaacaaaaa

SEQ ID NO: 449241 - RNA, 18 nt, Human
aagucuuuggcaggcagc

SEQ ID NO: 449242 - RNA, 22 nt, Human
agaaagugcucucaaugcucuc

SEQ ID NO: 449243 - RNA, 20 nt, Human
aggaaaaaagcaaaaccaaa

SEQ ID NO: 449244 - RNA, 28 nt, Human
aggaaaaaagcaaaaccaaaccaaacaa

SEQ ID NO: 449245 - RNA, 25 nt, Human
aggagagaggauacuugggauuaua

SEQ ID NO: 449246 - RNA, 20 nt, Human
aggcaagugcauuuugggga

SEQ ID NO: 449247 - RNA, 25 nt, Human
caagcucccgagcucccaagcuccu

SEQ ID NO: 449248 - RNA, 22 nt, Human
cacaauagucuauagacacugg

SEQ ID NO: 449249 - RNA, 21 nt, Human
cagcagcaagaccauuuuuua

SEQ ID NO: 449250 - RNA, 22 nt, Human
cagccuuaucaaaagagagccu

SEQ ID NO: 449251 - RNA, 24 nt, Human
caguauugagaaaucuccaccaaa

SEQ ID NO: 449252 - RNA, 22 nt, Human
cagugauauauuaauaauauua

SEQ ID NO: 449253 - RNA, 21 nt, Human
cauaagcccucucccaagcuc

SEQ ID NO: 449254 - RNA, 25 nt, Human
cauaagcccucucccaagcucccga

SEQ ID NO: 449255 - RNA, 22 nt, Human
cccucucccaagcucccgagcu

SEQ ID NO: 449256 - RNA, 24 nt, Human
cuaaucuugcuguaaggagcaaaa

SEQ ID NO: 449257 - RNA, 25 nt, Human
cuccaggcucacaauagucuauaga

SEQ ID NO: 449258 - RNA, 22 nt, Human
cucccaagcuccugucaguugc

SEQ ID NO: 449259 - RNA, 22 nt, Human
cucccgagcucccaagcuccug

SEQ ID NO: 449260 - RNA, 18 nt, Human
cucucuguuuccaugagg

SEQ ID NO: 449261 - RNA, 23 nt, Human
cugauaaaauaaguacaauuuca

SEQ ID NO: 449262 - RNA, 20 nt, Human
gaaaauucagcacuacugug

SEQ ID NO: 449263 - RNA, 22 nt, Human
gacagcuacauuauuaaaaaca

SEQ ID NO: 449264 - RNA, 22 nt, Human
gguaagacaucuccaacaagga

SEQ ID NO: 449265 - RNA, 21 nt, Human
gucuuuggcaggcagcucuag

SEQ ID NO: 449266 - RNA, 24 nt, Human
gugcauuuuggggagcugagaggu

SEQ ID NO: 449267 - RNA, 21 nt, Human
uaaaaacauaagcccucuccc

SEQ ID NO: 449268 - RNA, 27 nt, Human
uaaaguaagaggaaaaaagcaaaacca

SEQ ID NO: 449269 - RNA, 20 nt, Human
uauuaacuuaaagucaccau

SEQ ID NO: 449270 - RNA, 19 nt, Human
ucccaagcucccgagcucc

SEQ ID NO: 449271 - RNA, 25 nt, Human
ucccaagcucccgagcucccaagcu

SEQ ID NO: 449272 - RNA, 27 nt, Human
ucccaagcucccgagcucccaagcucc

SEQ ID NO: 449273 - RNA, 20 nt, Human
ucccgagcucccaagcuccu

SEQ ID NO: 449274 - RNA, 22 nt, Human
ucucccaagcucccgagcuccc

SEQ ID NO: 449275 - RNA, 23 nt, Human
ucucccaagcucccgagcuccca

SEQ ID NO: 449276 - RNA, 25 nt, Human
ugaggaaaauucagcacuacugugc

SEQ ID NO: 449277 - RNA, 19 nt, Human
ugaugugaaguuucccauu

SEQ ID NO: 449278 - RNA, 20 nt, Human
ugccugaaaggcaaacaaaa

SEQ ID NO: 449279 - RNA, 25 nt, Human
ugcuguaaggagcaaaaauaagggu

SEQ ID NO: 449280 - RNA, 21 nt, Human
uggggagcugagagguaagac

SEQ ID NO: 449281 - RNA, 20 nt, Human
uguuucuuauaggcaagugc

SEQ ID NO: 449282 - RNA, 25 nt, Human
uucuccaggcucacaauagucuaua

SEQ ID NO: 449283 - RNA, 28 nt, Human
uugaggacaaaaucuauuaggaauuuau

SEQ ID NO: 449284 - RNA, 20 nt, Human
uugguucagccuuaucaaaa

SEQ ID NO: 449285 - RNA, 24 nt, Human
uuuuauaaccuacuaaucuugcug

SEQ ID NO: 449286 - RNA, 21 nt, Human
uuuuuuuuuuuugaggacaaa

SEQ ID NO: 449287 - RNA, 19 nt, Human
uuuuuuuuuuuuuugagga

SEQ ID NO: 449288 - RNA, 23 nt, Human
uuuuuuuuuuuuuuuuuuugagg

SEQ ID NO: 449289 - RNA, 27 nt, Human
uuuuuuuuuuuuuuuuuuuuuuugggg

SEQ ID NO: 449290 - RNA, 24 nt, Human
aagcagggggaggugaucacaggu

SEQ ID NO: 449291 - RNA, 19 nt, Human
aagcgugggguauggaagg

SEQ ID NO: 449292 - RNA, 20 nt, Human
agcaggaagcagggggaggu

SEQ ID NO: 449293 - RNA, 24 nt, Human
agcagggggaggugaucacaggug

SEQ ID NO: 449294 - RNA, 18 nt, Human
aggaagcagggggaggug

SEQ ID NO: 449295 - RNA, 18 nt, Human
aggugaucacagguggag

SEQ ID NO: 449296 - RNA, 23 nt, Human
auaagcgugggguauggaaggca

SEQ ID NO: 449297 - RNA, 19 nt, Human
cagagaggaggugccugag

SEQ ID NO: 449298 - RNA, 22 nt, Human
cagcagcaggaagcagggggag

SEQ ID NO: 449299 - RNA, 21 nt, Human
cagguggagccaggccccguc

SEQ ID NO: 449300 - RNA, 22 nt, Human
ccccucagaccccaugagugag

SEQ ID NO: 449301 - RNA, 23 nt, Human
cccucagaccccaugagugagcu

SEQ ID NO: 449302 - RNA, 21 nt, Human
gcugugccacagcagcaggaa

SEQ ID NO: 449303 - RNA, 22 nt, Human
ugggguauggaaggcagagggc

SEQ ID NO: 449304 - RNA, 18 nt, Human
acuucgaggagggcgaga

SEQ ID NO: 449305 - RNA, 18 nt, Human
caaaaaauucucagagcu

SEQ ID NO: 449306 - RNA, 19 nt, Human
cagcccgcgcugcgccugc

SEQ ID NO: 449307 - RNA, 22 nt, Human
caucucucucgcgggaacgguc

SEQ ID NO: 449308 - RNA, 20 nt, Human
cgaucguacucgucaucacu

SEQ ID NO: 449309 - RNA, 20 nt, Human
cgcucacggccacgguccca

SEQ ID NO: 449310 - RNA, 22 nt, Human
cgcucacggccacggucccacu

SEQ ID NO: 449311 - RNA, 30 nt, Human
cucucugucauuccaaucguccccucgacu

SEQ ID NO: 449312 - RNA, 20 nt, Human
cugcgccugcgucaccccuc

SEQ ID NO: 449313 - RNA, 22 nt, Human
gacuucgaggagggcgagacgg

SEQ ID NO: 449314 - RNA, 21 nt, Human
gggcgaccugggucgcgggcg

SEQ ID NO: 449315 - RNA, 21 nt, Human
uacucgucaucacugucaccc

SEQ ID NO: 449316 - RNA, 26 nt, Human
uccccucgacgucuuucaucucucuc

SEQ ID NO: 449317 - RNA, 21 nt, Human
uugucccugcgccuucgaucg

SEQ ID NO: 449318 - RNA, 18 nt, Human
uuuuuuuuuuuuucccug

SEQ ID NO: 449319 - RNA, 25 nt, Human
uuuuuuuuuuuuuuuucccugugga

SEQ ID NO: 449320 - RNA, 22 nt, Human
uuuuuuuuuuuuuuuuuucccu

SEQ ID NO: 449321 - RNA, 19 nt, Human
aaaacaagugcaauaaaag

SEQ ID NO: 449322 - RNA, 21 nt, Human
aacagaagcaaaguaaaucug

SEQ ID NO: 449323 - RNA, 21 nt, Human
aagaagcuaguucaaauuugc

SEQ ID NO: 449324 - RNA, 23 nt, Human
aaucaucccugcuauagcuuaga

SEQ ID NO: 449325 - RNA, 21 nt, Human
accaagcaggcaaggcuggaa

SEQ ID NO: 449326 - RNA, 24 nt, Human
accauguuggccaggcuggucuug

SEQ ID NO: 449327 - RNA, 24 nt, Human
acucuggcaguaacagaagcaaag

SEQ ID NO: 449328 - RNA, 20 nt, Human
acuucuucccugcuacccau

SEQ ID NO: 449329 - RNA, 22 nt, Human
agaagcaaaguaaaucuggaca

SEQ ID NO: 449330 - RNA, 24 nt, Human
agaaguacuguguagucugcugca

SEQ ID NO: 449331 - RNA, 22 nt, Human
agaauuuuuauuugucauugac

SEQ ID NO: 449332 - RNA, 24 nt, Human
agaggugggguuucaccauguugg

SEQ ID NO: 449333 - RNA, 18 nt, Human
agcuuagauucuccuagg

SEQ ID NO: 449334 - RNA, 22 nt, Human
aguaacagaagcaaaguaaauc

SEQ ID NO: 449335 - RNA, 21 nt, Human
aguagaggugggguuucacca

SEQ ID NO: 449336 - RNA, 22 nt, Human
aguagaggugggguuucaccau

SEQ ID NO: 449337 - RNA, 18 nt, Human
auaaacaggaagacacac

SEQ ID NO: 449338 - RNA, 26 nt, Human
aucaucccugcuauagcuuagauucu

SEQ ID NO: 449339 - RNA, 19 nt, Human
auuuugugcauuaucuucc

SEQ ID NO: 449340 - RNA, 18 nt, Human
caagacaauguaaggaaa

SEQ ID NO: 449341 - RNA, 20 nt, Human
caagugaugggaacacuacu

SEQ ID NO: 449342 - RNA, 21 nt, Human
cacacuccaaacaagugaugg

SEQ ID NO: 449343 - RNA, 21 nt, Human
caccauguuggccaggcuggu

SEQ ID NO: 449344 - RNA, 22 nt, Human
caccauguuggccaggcugguc

SEQ ID NO: 449345 - RNA, 23 nt, Human
caccauguuggccaggcuggucu

SEQ ID NO: 449346 - RNA, 24 nt, Human
caccauguuggccaggcuggucuu

SEQ ID NO: 449347 - RNA, 20 nt, Human
cauaaaucaucccugcuaua

SEQ ID NO: 449348 - RNA, 24 nt, Human
cauguuggccaggcuggucuugaa

SEQ ID NO: 449349 - RNA, 18 nt, Human
cauuccaggaaaucaaaa

SEQ ID NO: 449350 - RNA, 20 nt, Human
ccaagcaggcaaggcuggaa

SEQ ID NO: 449351 - RNA, 21 nt, Human
ccugggcaagcccugcuccug

SEQ ID NO: 449352 - RNA, 19 nt, Human
cggcugcagcggcaccaga

SEQ ID NO: 449353 - RNA, 23 nt, Human
cguaaaaugaccauuucuaaaca

SEQ ID NO: 449354 - RNA, 19 nt, Human
cugcuccugagccagucuu

SEQ ID NO: 449355 - RNA, 25 nt, Human
cugguugguugggaggaacugaauu

SEQ ID NO: 449356 - RNA, 20 nt, Human
gaccauaauuaccaauauca

SEQ ID NO: 449357 - RNA, 18 nt, Human
gaccuccggugauccacc

SEQ ID NO: 449358 - RNA, 20 nt, Human
gaggugggguuucaccaugu

SEQ ID NO: 449359 - RNA, 24 nt, Human
gaggugggguuucaccauguuggc

SEQ ID NO: 449360 - RNA, 24 nt, Human
ggcuggucuugaacuacugaccuc

SEQ ID NO: 449361 - RNA, 22 nt, Human
gggguuucaccauguuggccag

SEQ ID NO: 449362 - RNA, 18 nt, Human
ggguuucaccauguuggc

SEQ ID NO: 449363 - RNA, 19 nt, Human
ggucuugaacuacugaccu

SEQ ID NO: 449364 - RNA, 23 nt, Human
guagaggugggguuucaccaugu

SEQ ID NO: 449365 - RNA, 18 nt, Human
gugggguuucaccauguu

SEQ ID NO: 449366 - RNA, 20 nt, Human
uaacagaagcaaaguaaauc

SEQ ID NO: 449367 - RNA, 19 nt, Human
uagaauagcacacuccaaa

SEQ ID NO: 449368 - RNA, 24 nt, Human
uaggauuuuuuuuuuuuuuuuuuu

SEQ ID NO: 449369 - RNA, 24 nt, Human
uaguagaggugggguuucaccaug

SEQ ID NO: 449370 - RNA, 24 nt, Human
uauacacaauuuuuaguagaggug

SEQ ID NO: 449371 - RNA, 22 nt, Human
uaucagaagugaagacuguggu

SEQ ID NO: 449372 - RNA, 18 nt, Human
uccaaacaagugauggga

SEQ ID NO: 449373 - RNA, 21 nt, Human
ucccuuggcacacauaaacag

SEQ ID NO: 449374 - RNA, 19 nt, Human
uccuauaacucuuuccccc

SEQ ID NO: 449375 - RNA, 26 nt, Human
uccuuuggcagcauuacuuuugauaa

SEQ ID NO: 449376 - RNA, 18 nt, Human
ucucuuggguccaacugg

SEQ ID NO: 449377 - RNA, 19 nt, Human
ucugccggcugcagcggca

SEQ ID NO: 449378 - RNA, 18 nt, Human
ucuuaguuuuuauucugg

SEQ ID NO: 449379 - RNA, 19 nt, Human
ugaaaacaaaaaauaauca

SEQ ID NO: 449380 - RNA, 25 nt, Human
ugaccuccggugauccaccaugccu

SEQ ID NO: 449381 - RNA, 24 nt, Human
ugcauaaaucaucccugcuauagc

SEQ ID NO: 449382 - RNA, 23 nt, Human
ugccugggcaagcccugcuccug

SEQ ID NO: 449383 - RNA, 25 nt, Human
ugccugggcaagcccugcuccugag

SEQ ID NO: 449384 - RNA, 20 nt, Human
uggcagcauuacuuuugauu

SEQ ID NO: 449385 - RNA, 19 nt, Human
uggcaguaacagaagcaaa

SEQ ID NO: 449386 - RNA, 24 nt, Human
uggcaguacacugaguuuuaacug

SEQ ID NO: 449387 - RNA, 24 nt, Human
uggccaggcuggucuugaacuacu

SEQ ID NO: 449388 - RNA, 23 nt, Human
ugggaggaacugaauugugaaca

SEQ ID NO: 449389 - RNA, 21 nt, Human
ugggguuucaccauguuggcc

SEQ ID NO: 449390 - RNA, 24 nt, Human
ugggguuucaccauguuggccagg

SEQ ID NO: 449391 - RNA, 18 nt, Human
uggucaaaacaagugcaa

SEQ ID NO: 449392 - RNA, 18 nt, Human
ugguggguaguuaccaac

SEQ ID NO: 449393 - RNA, 20 nt, Human
ugguugggaggaacugaauu

SEQ ID NO: 449394 - RNA, 18 nt, Human
ugucaagacaauguaagg

SEQ ID NO: 449395 - RNA, 21 nt, Human
ugucaagacaauguaaggaaa

SEQ ID NO: 449396 - RNA, 18 nt, Human
uuagauucuccuagguag

SEQ ID NO: 449397 - RNA, 18 nt, Human
uuaguagaggugggguuu

SEQ ID NO: 449398 - RNA, 22 nt, Human
uuaguagaggugggguuucacc

SEQ ID NO: 449399 - RNA, 24 nt, Human
uuaguagaggugggguuucaccau

SEQ ID NO: 449400 - RNA, 20 nt, Human
uuaguagaggugggguuucg

SEQ ID NO: 449401 - RNA, 23 nt, Human
uuccaguauucuccuucucuuuu

SEQ ID NO: 449402 - RNA, 23 nt, Human
uucccugcuacccaugugcucuu

SEQ ID NO: 449403 - RNA, 24 nt, Human
uuggcacagacauuuuaaucuugu

SEQ ID NO: 449404 - RNA, 23 nt, Human
uugugcuaaagguuuugaaaacc

SEQ ID NO: 449405 - RNA, 30 nt, Human
uuguuuguuuguuuuuaggauuuuuuuuuu

SEQ ID NO: 449406 - RNA, 24 nt, Human
uuucaccauguuggccaggcuggu

SEQ ID NO: 449407 - RNA, 18 nt, Human
uuuuuaguagaggugggg

SEQ ID NO: 449408 - RNA, 24 nt, Human
uuuuuaguagaggugggguuucac

SEQ ID NO: 449409 - RNA, 19 nt, Human
uuuuuguuuguuuguuuuu

SEQ ID NO: 449410 - RNA, 26 nt, Human
uuuuuuuugccacacugguuuuuguu

SEQ ID NO: 449411 - RNA, 20 nt, Human
uuuuuuuuuuuuuuuugcca

SEQ ID NO: 449412 - RNA, 18 nt, Human
uuuuuuuuuuuuuuuuug

SEQ ID NO: 449413 - RNA, 18 nt, Human
uuuuuuuuuuuuuuuuug

SEQ ID NO: 449414 - RNA, 23 nt, Human
aaaaauauuauccuuuggaaauu

SEQ ID NO: 449415 - RNA, 18 nt, Human
aaccuuguauuuucuggc

SEQ ID NO: 449416 - RNA, 22 nt, Human
aaguaucagccuugagaugacc

SEQ ID NO: 449417 - RNA, 20 nt, Human
aggagguugcagccgcauuu

SEQ ID NO: 449418 - RNA, 20 nt, Human
cacagcucaaguaucagccu

SEQ ID NO: 449419 - RNA, 21 nt, Human
cucacaggccaugggacaguc

SEQ ID NO: 449420 - RNA, 19 nt, Human
gacaguccaguucccugca

SEQ ID NO: 449421 - RNA, 18 nt, Human
gaucucugggcacacagc

SEQ ID NO: 449422 - RNA, 18 nt, Human
ggcggccagacgcccauc

SEQ ID NO: 449423 - RNA, 23 nt, Human
uaaaugcacaggagguugcagcc

SEQ ID NO: 449424 - RNA, 18 nt, Human
ucccugcagacccagcgg

SEQ ID NO: 449425 - RNA, 18 nt, Human
ucucugggcacacagcuc

SEQ ID NO: 449426 - RNA, 22 nt, Human
ucuggcaaaaauauaaaucuaa

SEQ ID NO: 449427 - RNA, 18 nt, Human
ugaagauuggcuccaggg

SEQ ID NO: 449428 - RNA, 19 nt, Human
ugcacuuccuuggcaggca

SEQ ID NO: 449429 - RNA, 23 nt, Human
uggcaggcagccaggcgcuccgg

SEQ ID NO: 449430 - RNA, 30 nt, Human
uuaguuuuauuauaaccuuguauuuucugg

SEQ ID NO: 449431 - RNA, 18 nt, Human
uuccuuggcaggcagcca

SEQ ID NO: 449432 - RNA, 25 nt, Human
uuuucuggcaaaaauauaaaucuaa

SEQ ID NO: 449433 - RNA, 18 nt, Human
uuuuuuuuuuuuuuuuug

SEQ ID NO: 449434 - RNA, 22 nt, Human
uuuuuuuuuuuuuuuuugguag

SEQ ID NO: 449435 - RNA, 20 nt, Human
uuuuuuuuuuuuuuuuuugg

SEQ ID NO: 449436 - RNA, 18 nt, Human
aaggagccacaagauuuc

SEQ ID NO: 449437 - RNA, 20 nt, Human
aaguacuucuccuuugcccu

SEQ ID NO: 449438 - RNA, 25 nt, Human
caaguacuucuccuuugcccuuggu

SEQ ID NO: 449439 - RNA, 22 nt, Human
cacaaguacuucuccuuugccc

SEQ ID NO: 449440 - RNA, 23 nt, Human
cacaaguacuucuccuuugcccu

SEQ ID NO: 449441 - RNA, 18 nt, Human
cuuucagucucauccgua

SEQ ID NO: 449442 - RNA, 23 nt, Human
uauuuuuuuuaaauaaaaggagc

SEQ ID NO: 449443 - RNA, 21 nt, Human
ugugucacaaguacuucuccu

SEQ ID NO: 449444 - RNA, 22 nt, Human
uucucagaguucuccuuugagg

SEQ ID NO: 449445 - RNA, 21 nt, Human
agaguucccucagcccugcug

SEQ ID NO: 449446 - RNA, 25 nt, Human
agaguucccucagcccugcuguggc

SEQ ID NO: 449447 - RNA, 26 nt, Human
caguacuuuccuugcuugucccagga

SEQ ID NO: 449448 - RNA, 18 nt, Human
cccaucacauagcagagu

SEQ ID NO: 449449 - RNA, 23 nt, Human
ccucaauaaaacuccaugucucc

SEQ ID NO: 449450 - RNA, 18 nt, Human
ccugcuguggccucccca

SEQ ID NO: 449451 - RNA, 21 nt, Human
ccugcuguggccuccccaggc

SEQ ID NO: 449452 - RNA, 18 nt, Human
ccuggaggagacgugagg

SEQ ID NO: 449453 - RNA, 21 nt, Human
cugccucaguacuuuccuugc

SEQ ID NO: 449454 - RNA, 18 nt, Human
gagaaggcugcuagggcu

SEQ ID NO: 449455 - RNA, 20 nt, Human
gagggcgggaccagaggugc

SEQ ID NO: 449456 - RNA, 18 nt, Human
ggagaaggcugcuagggc

SEQ ID NO: 449457 - RNA, 22 nt, Human
ggaggagacgugagggccaggg

SEQ ID NO: 449458 - RNA, 22 nt, Human
gggagaaggcugcuagggcugg

SEQ ID NO: 449459 - RNA, 20 nt, Human
gugagggcgggaccagaggu

SEQ ID NO: 449460 - RNA, 23 nt, Human
guggccuccccaggccaacaucc

SEQ ID NO: 449461 - RNA, 22 nt, Human
uagcuaccucaauaaaacucca

SEQ ID NO: 449462 - RNA, 20 nt, Human
uccacacugcaauaccauuu

SEQ ID NO: 449463 - RNA, 18 nt, Human
uccccaggccaacauccu

SEQ ID NO: 449464 - RNA, 23 nt, Human
ucccggguccaggauuagggccc

SEQ ID NO: 449465 - RNA, 18 nt, Human
ucccucagcccugcugug

SEQ ID NO: 449466 - RNA, 27 nt, Human
ucuccacacugcaauaccauuuaauca

SEQ ID NO: 449467 - RNA, 24 nt, Human
ucuccacauugcaacaccguucaa

SEQ ID NO: 449468 - RNA, 18 nt, Human
ugagggccagggguccgg

SEQ ID NO: 449469 - RNA, 20 nt, Human
ugagggccagggguccgggu

SEQ ID NO: 449470 - RNA, 25 nt, Human
ugcaacaccguucaaucaaguggcu

SEQ ID NO: 449471 - RNA, 26 nt, Human
ugcaauaccauuuaaucacguagcua

SEQ ID NO: 449472 - RNA, 20 nt, Human
ugccucaguacuuuccuugc

SEQ ID NO: 449473 - RNA, 18 nt, Human
uucccucagcccugcugu

SEQ ID NO: 449474 - RNA, 23 nt, Human
uucccucagcccugcuguggccu

SEQ ID NO: 449475 - RNA, 19 nt, Human
uucgaggggcucgaggcag

SEQ ID NO: 449476 - RNA, 23 nt, Human
uucgaggggcucgaggcagaucu

SEQ ID NO: 449477 - RNA, 19 nt, Human
uuggggagaaggcugcuag

SEQ ID NO: 449478 - RNA, 19 nt, Human
uuuuuuuuuuuuuuuugca

SEQ ID NO: 449479 - RNA, 19 nt, Human
uuuuuuuuuuuuuuuuugc

SEQ ID NO: 449480 - RNA, 27 nt, Human
uuuuuuuuuuuuuuuuuuuuuuugggg

SEQ ID NO: 449481 - RNA, 21 nt, Human
aaacaaggcucagagaagcuc

SEQ ID NO: 449482 - RNA, 20 nt, Human
aaguagagagcugggaggcc

SEQ ID NO: 449483 - RNA, 21 nt, Human
acccgauucuucucucagcgg

SEQ ID NO: 449484 - RNA, 19 nt, Human
acugcaauauguguccuuc

SEQ ID NO: 449485 - RNA, 20 nt, Human
agaugcugggaggggccccu

SEQ ID NO: 449486 - RNA, 22 nt, Human
aggaacaaggggccuacacagc

SEQ ID NO: 449487 - RNA, 18 nt, Human
aggcccggguggcagcga

SEQ ID NO: 449488 - RNA, 18 nt, Human
agugagugagggcgggga

SEQ ID NO: 449489 - RNA, 25 nt, Human
agugcugggcucucccccgaagcuc

SEQ ID NO: 449490 - RNA, 20 nt, Human
agugggacucugcgggaggg

SEQ ID NO: 449491 - RNA, 25 nt, Human
auuccagccccagcgucaccagauc

SEQ ID NO: 449492 - RNA, 20 nt, Human
caaccaagcaacugcaauau

SEQ ID NO: 449493 - RNA, 20 nt, Human
caacuccaucccucagcagc

SEQ ID NO: 449494 - RNA, 18 nt, Human
cacaacuccaugagguaa

SEQ ID NO: 449495 - RNA, 20 nt, Human
caccuuguucuucuaggcaa

SEQ ID NO: 449496 - RNA, 24 nt, Human
cagaucccgggguggggcugggag

SEQ ID NO: 449497 - RNA, 21 nt, Human
ccaccccaguuucuccaggug

SEQ ID NO: 449498 - RNA, 21 nt, Human
ccacuguaguguucaucagag

SEQ ID NO: 449499 - RNA, 25 nt, Human
ccagcucccaugagugaguacaggc

SEQ ID NO: 449500 - RNA, 26 nt, Human
cccacccuccuguugaggcagcacca

SEQ ID NO: 449501 - RNA, 18 nt, Human
ccccagcgucaccagauc

SEQ ID NO: 449502 - RNA, 25 nt, Human
cccccgagguugggagggggguaga

SEQ ID NO: 449503 - RNA, 19 nt, Human
cccccgggccuugucuggg

SEQ ID NO: 449504 - RNA, 18 nt, Human
ccccgaagcucaaacagc

SEQ ID NO: 449505 - RNA, 18 nt, Human
ccccgaagcucaaacagc

SEQ ID NO: 449506 - RNA, 21 nt, Human
ccccuagcuuggcuagguccc

SEQ ID NO: 449507 - RNA, 20 nt, Human
cccgccccaccuuucggggc

SEQ ID NO: 449508 - RNA, 20 nt, Human
cccgggccuugucugggggc

SEQ ID NO: 449509 - RNA, 19 nt, Human
cccgggguggggcugggag

SEQ ID NO: 449510 - RNA, 23 nt, Human
ccgaagcucaaacagcgcaugcc

SEQ ID NO: 449511 - RNA, 21 nt, Human
ccuccugcccgccgccgcagc

SEQ ID NO: 449512 - RNA, 20 nt, Human
ccucggauauggagaguaga

SEQ ID NO: 449513 - RNA, 19 nt, Human
ccuuggcagccagucugca

SEQ ID NO: 449514 - RNA, 21 nt, Human
cgccccaccuuucggggcuca

SEQ ID NO: 449515 - RNA, 22 nt, Human
cgggagaaagugagugagggcg

SEQ ID NO: 449516 - RNA, 22 nt, Human
cgggccgagggcgggagaaagu

SEQ ID NO: 449517 - RNA, 22 nt, Human
cgguaaggguccagucugcaaa

SEQ ID NO: 449518 - RNA, 20 nt, Human
cuccaucccucagcagccuc

SEQ ID NO: 449519 - RNA, 19 nt, Human
cucccccgaagcucaaaca

SEQ ID NO: 449520 - RNA, 18 nt, Human
cugcagcagcugcucucu

SEQ ID NO: 449521 - RNA, 22 nt, Human
gagaaagugagugagggcgggg

SEQ ID NO: 449522 - RNA, 18 nt, Human
gagaggcacggaaaccgg

SEQ ID NO: 449523 - RNA, 20 nt, Human
gagggcggggagcgaggggu

SEQ ID NO: 449524 - RNA, 19 nt, Human
gcaggaagagccaccggua

SEQ ID NO: 449525 - RNA, 23 nt, Human
gcagggugagggcucuggggcug

SEQ ID NO: 449526 - RNA, 21 nt, Human
gcccgagggaccugcugcugg

SEQ ID NO: 449527 - RNA, 18 nt, Human
gcccugcagcagcugcuc

SEQ ID NO: 449528 - RNA, 24 nt, Human
ggagggggguagaugcugggaggg

SEQ ID NO: 449529 - RNA, 21 nt, Human
ggccugggcgggggcugaugc

SEQ ID NO: 449530 - RNA, 21 nt, Human
ggccuugucugggggccgggc

SEQ ID NO: 449531 - RNA, 18 nt, Human
ggcgggggcugaugccuc

SEQ ID NO: 449532 - RNA, 19 nt, Human
ggcucaccuggcugcucca

SEQ ID NO: 449533 - RNA, 20 nt, Human
guacaggccaguuccagcac

SEQ ID NO: 449534 - RNA, 19 nt, Human
guggccuuggcagccaguc

SEQ ID NO: 449535 - RNA, 25 nt, Human
uaggggccucucagcuuugaggccu

SEQ ID NO: 449536 - RNA, 21 nt, Human
ucagccacuguaguguucauc

SEQ ID NO: 449537 - RNA, 20 nt, Human
uccagaugagcaaacaaggc

SEQ ID NO: 449538 - RNA, 20 nt, Human
uccagcacaggcacuuucaa

SEQ ID NO: 449539 - RNA, 24 nt, Human
ucccuacagggccugggcgggggc

SEQ ID NO: 449540 - RNA, 21 nt, Human
uccgaagggcuccauagcuga

SEQ ID NO: 449541 - RNA, 24 nt, Human
uccugcaccuuguucuucuaggca

SEQ ID NO: 449542 - RNA, 21 nt, Human
uccugcccgccgccgcagccg

SEQ ID NO: 449543 - RNA, 18 nt, Human
ucggggcucaccuggcug

SEQ ID NO: 449544 - RNA, 23 nt, Human
ucugcaaagcccuggagcgagcc

SEQ ID NO: 449545 - RNA, 20 nt, Human
ucuucuaggcaccuuuccgg

SEQ ID NO: 449546 - RNA, 21 nt, Human
ucuuuugugggggaccggccu

SEQ ID NO: 449547 - RNA, 22 nt, Human
ugagcuguucccccacccuccu

SEQ ID NO: 449548 - RNA, 22 nt, Human
ugagcuguucccccacccuccu

SEQ ID NO: 449549 - RNA, 18 nt, Human
ugaggcagcacggggucc

SEQ ID NO: 449550 - RNA, 21 nt, Human
ugagggcucuggggcugcuag

SEQ ID NO: 449551 - RNA, 21 nt, Human
ugccagagucugugagaagug

SEQ ID NO: 449552 - RNA, 26 nt, Human
ugccccgccccaccuuucggggcuca

SEQ ID NO: 449553 - RNA, 23 nt, Human
ugcuccacccgauucuucucuca

SEQ ID NO: 449554 - RNA, 22 nt, Human
uggagaggcacggaaaccggga

SEQ ID NO: 449555 - RNA, 18 nt, Human
uggcagccagucugcacc

SEQ ID NO: 449556 - RNA, 18 nt, Human
uggcagcgagggcugggg

SEQ ID NO: 449557 - RNA, 18 nt, Human
uggcuagugggacucugc

SEQ ID NO: 449558 - RNA, 26 nt, Human
uggcuagugggacucugcgggagggu

SEQ ID NO: 449559 - RNA, 24 nt, Human
ugggacucugcgggagggucccag

SEQ ID NO: 449560 - RNA, 20 nt, Human
ugggaggccgggccgagggc

SEQ ID NO: 449561 - RNA, 23 nt, Human
ugggaggccgggccgagggcggg

SEQ ID NO: 449562 - RNA, 21 nt, Human
ugggagggggguagaugcugg

SEQ ID NO: 449563 - RNA, 23 nt, Human
ugggagggggguagaugcuggag

SEQ ID NO: 449564 - RNA, 21 nt, Human
uggggcccgagggaccugcug

SEQ ID NO: 449565 - RNA, 18 nt, Human
uggggcuccaggcccggg

SEQ ID NO: 449566 - RNA, 27 nt, Human
uggggcuccaggcccggguggcagcga

SEQ ID NO: 449567 - RNA, 19 nt, Human
uguggccuuggcagccagu

SEQ ID NO: 449568 - RNA, 21 nt, Human
uguggggcuccaggcccgggu

SEQ ID NO: 449569 - RNA, 24 nt, Human
uguggggcuccaggcccggguggc

SEQ ID NO: 449570 - RNA, 20 nt, Human
uguugaggcagcacgggguc

SEQ ID NO: 449571 - RNA, 20 nt, Human
uucgucccuggcugaggccg

SEQ ID NO: 449572 - RNA, 27 nt, Human
uugcagcuauucuuucacaacuccaug

SEQ ID NO: 449573 - RNA, 18 nt, Human
uugucccuucaccuguuc

SEQ ID NO: 449574 - RNA, 19 nt, Human
aaaaauugagaaauggaca

SEQ ID NO: 449575 - RNA, 22 nt, Human
aaaccccagcuucaacgaccca

SEQ ID NO: 449576 - RNA, 23 nt, Human
aaacuugcugcugccaucucuga

SEQ ID NO: 449577 - RNA, 19 nt, Human
aaagcaaaugaaaauaggc

SEQ ID NO: 449578 - RNA, 18 nt, Human
aaaguucuuuagcuuucc

SEQ ID NO: 449579 - RNA, 22 nt, Human
aacgacccaagcuggagcccca

SEQ ID NO: 449580 - RNA, 23 nt, Human
aacuugcugcugccaucucuuuu

SEQ ID NO: 449581 - RNA, 21 nt, Human
aagaaaauagggcgccuguuu

SEQ ID NO: 449582 - RNA, 22 nt, Human
aagaaccucagcaucaauauug

SEQ ID NO: 449583 - RNA, 20 nt, Human
aagagccgagacugaugauu

SEQ ID NO: 449584 - RNA, 22 nt, Human
aagauuaauccaacuaaacacu

SEQ ID NO: 449585 - RNA, 20 nt, Human
aagcaaacucaaagcauaga

SEQ ID NO: 449586 - RNA, 23 nt, Human
aagcaaacucaaagcauagauca

SEQ ID NO: 449587 - RNA, 19 nt, Human
aaggaaauagaaauagcaa

SEQ ID NO: 449588 - RNA, 23 nt, Human
aagugguuucccaaaccccagcu

SEQ ID NO: 449589 - RNA, 25 nt, Human
acaccguauaccacaauauacaagc

SEQ ID NO: 449590 - RNA, 19 nt, Human
acccugaaaccugacaccg

SEQ ID NO: 449591 - RNA, 22 nt, Human
accuaaauguacaacaggaaau

SEQ ID NO: 449592 - RNA, 19 nt, Human
agccagcaccauaacucaa

SEQ ID NO: 449593 - RNA, 22 nt, Human
agccgagacugaugauuuagcg

SEQ ID NO: 449594 - RNA, 23 nt, Human
caaaccccagcuucaacgaccca

SEQ ID NO: 449595 - RNA, 19 nt, Human
caccauaacucacucacua

SEQ ID NO: 449596 - RNA, 18 nt, Human
cagcacaucuuauuuggg

SEQ ID NO: 449597 - RNA, 18 nt, Human
cagcuaugcuuccauucc

SEQ ID NO: 449598 - RNA, 19 nt, Human
ccaaagaguucuggacuuu

SEQ ID NO: 449599 - RNA, 22 nt, Human
ccauuauuuaaccucaaguuua

SEQ ID NO: 449600 - RNA, 23 nt, Human
ccccagcuucaacgacccaagcu

SEQ ID NO: 449601 - RNA, 23 nt, Human
ccgccgccaccaccacugccgcc

SEQ ID NO: 449602 - RNA, 24 nt, Human
ccgccgccaccaccacugccgccg

SEQ ID NO: 449603 - RNA, 25 nt, Human
ccgccgccaccaccacugccgccgg

SEQ ID NO: 449604 - RNA, 19 nt, Human
ccuucuauuucagaagagc

SEQ ID NO: 449605 - RNA, 23 nt, Human
cugaaaccugacaccguauacca

SEQ ID NO: 449606 - RNA, 22 nt, Human
cuggagccccaccccgugauac

SEQ ID NO: 449607 - RNA, 21 nt, Human
cuugacuaaucaccugugcaa

SEQ ID NO: 449608 - RNA, 20 nt, Human
gaaaaaguacuaaaaagcau

SEQ ID NO: 449609 - RNA, 19 nt, Human
gagaaggaaauagaaauag

SEQ ID NO: 449610 - RNA, 24 nt, Human
gauugcccuaaaccagauccccau

SEQ ID NO: 449611 - RNA, 24 nt, Human
gcaguagaagaaccucagcaucaa

SEQ ID NO: 449612 - RNA, 19 nt, Human
gucauggaauagcauuguu

SEQ ID NO: 449613 - RNA, 25 nt, Human
uaauaaguggaaaauacaauaaugu

SEQ ID NO: 449614 - RNA, 20 nt, Human
uacaaauuuccagaccauag

SEQ ID NO: 449615 - RNA, 23 nt, Human
uacaacaggaaauguguaaacaa

SEQ ID NO: 449616 - RNA, 23 nt, Human
uacaagcaauaguaguauaucau

SEQ ID NO: 449617 - RNA, 20 nt, Human
uacaguaauaauaaguggaa

SEQ ID NO: 449618 - RNA, 24 nt, Human
uacauucuaaaacggcuuuacagg

SEQ ID NO: 449619 - RNA, 18 nt, Human
uaccaaggagaccacagc

SEQ ID NO: 449620 - RNA, 18 nt, Human
uaccacaauauacaagca

SEQ ID NO: 449621 - RNA, 24 nt, Human
uagcaaaauauagccagcaccaua

SEQ ID NO: 449622 - RNA, 21 nt, Human
uagcaguagaagaaccucagc

SEQ ID NO: 449623 - RNA, 24 nt, Human
uagcaguagaagaaccucagcauc

SEQ ID NO: 449624 - RNA, 18 nt, Human
uaguaguauaucauuuua

SEQ ID NO: 449625 - RNA, 18 nt, Human
uaugagaaggaaauagaa

SEQ ID NO: 449626 - RNA, 18 nt, Human
uauuugggagauaaaugu

SEQ ID NO: 449627 - RNA, 23 nt, Human
uauuuuuaaacagaaauuauuuc

SEQ ID NO: 449628 - RNA, 19 nt, Human
ucaccaaagaguucuggac

SEQ ID NO: 449629 - RNA, 26 nt, Human
ucauuugucauauaagcaaagauuuc

SEQ ID NO: 449630 - RNA, 25 nt, Human
ugaaaaaaaacccugaaaccugaca

SEQ ID NO: 449631 - RNA, 21 nt, Human
ugaaaaaucauuauuuuaugc

SEQ ID NO: 449632 - RNA, 20 nt, Human
ugaaaacuuugaauaaccua

SEQ ID NO: 449633 - RNA, 18 nt, Human
ugaagcaaauauucaaua

SEQ ID NO: 449634 - RNA, 21 nt, Human
ugacaccguauaccacaauau

SEQ ID NO: 449635 - RNA, 25 nt, Human
ugagaaagcaaacucaaagcauaga

SEQ ID NO: 449636 - RNA, 20 nt, Human
ugcccuaaaccagaucccca

SEQ ID NO: 449637 - RNA, 21 nt, Human
uggagaugaaguaacuuuagc

SEQ ID NO: 449638 - RNA, 23 nt, Human
uggagccccaccccgugauaccu

SEQ ID NO: 449639 - RNA, 24 nt, Human
uggauuaccuaaaauauuacauuc

SEQ ID NO: 449640 - RNA, 24 nt, Human
uggcagagauuaacuuugaaauga

SEQ ID NO: 449641 - RNA, 25 nt, Human
ugggaaaacaggcaugcuuauucau

SEQ ID NO: 449642 - RNA, 18 nt, Human
ugggguucuggggccgcc

SEQ ID NO: 449643 - RNA, 19 nt, Human
ugggguucuggggccgccc

SEQ ID NO: 449644 - RNA, 21 nt, Human
uguauaaaauaauacaauaga

SEQ ID NO: 449645 - RNA, 20 nt, Human
uguguaaacaaaccguggaa

SEQ ID NO: 449646 - RNA, 25 nt, Human
uguugguaucuuuuuaaugugcuuu

SEQ ID NO: 449647 - RNA, 21 nt, Human
uuaaagcaaaugaaaauaggc

SEQ ID NO: 449648 - RNA, 23 nt, Human
uuacuacccauuauuuaaccuca

SEQ ID NO: 449649 - RNA, 22 nt, Human
uuauaagaauugaaagugcaau

SEQ ID NO: 449650 - RNA, 20 nt, Human
uucccaaaccccagcuucaa

SEQ ID NO: 449651 - RNA, 22 nt, Human
uucgcaguaugaauuccuagca

SEQ ID NO: 449652 - RNA, 23 nt, Human
uuggucaagagaauaaacaguca

SEQ ID NO: 449653 - RNA, 21 nt, Human
uuuuccagacuuccuugacua

SEQ ID NO: 449654 - RNA, 20 nt, Human
aaaaagauauaaacauguca

SEQ ID NO: 449655 - RNA, 18 nt, Human
acagcuuuauucagaugu

SEQ ID NO: 449656 - RNA, 24 nt, Human
agauauaaacaugucaaaggaaug

SEQ ID NO: 449657 - RNA, 19 nt, Human
cagcuuuauucagauguaa

SEQ ID NO: 449658 - RNA, 18 nt, Human
cucaacagaaaugaggag

SEQ ID NO: 449659 - RNA, 21 nt, Human
gcagcaacauuccuugugucc

SEQ ID NO: 449660 - RNA, 23 nt, Human
guggguguuucuaugugugacug

SEQ ID NO: 449661 - RNA, 25 nt, Human
uaaauuaaaaagauauaaacauguc

SEQ ID NO: 449662 - RNA, 19 nt, Human
uaagccaguaacaacauuu

SEQ ID NO: 449663 - RNA, 21 nt, Human
uaauuacagcuuuauucagau

SEQ ID NO: 449664 - RNA, 22 nt, Human
uaccuggccuuguguauaacgu

SEQ ID NO: 449665 - RNA, 23 nt, Human
uauuucaugucuuuucucuuuca

SEQ ID NO: 449666 - RNA, 21 nt, Human
ucagauacagcuggucaugcc

SEQ ID NO: 449667 - RNA, 19 nt, Human
uccaccgcuauuaucauug

SEQ ID NO: 449668 - RNA, 21 nt, Human
ugccacagauagugaagaaga

SEQ ID NO: 449669 - RNA, 26 nt, Human
uggcuugucucuuggguuggaagacc

SEQ ID NO: 449670 - RNA, 19 nt, Human
uguugcaugucauucaguc

SEQ ID NO: 449671 - RNA, 22 nt, Human
uuccacucaacugcaguccaga

SEQ ID NO: 449672 - RNA, 21 nt, Human
uugggugcauuugugggggug

SEQ ID NO: 449673 - RNA, 24 nt, Human
uuuaagccaguaacaacauuuaaa

SEQ ID NO: 449674 - RNA, 24 nt, Human
uuuucucuuucagauacagcuggu

SEQ ID NO: 449675 - RNA, 27 nt, Human
aaaaaccuguuuauuacaucaaugcua

SEQ ID NO: 449676 - RNA, 23 nt, Human
aaaaaucaacugauagggggaaa

SEQ ID NO: 449677 - RNA, 22 nt, Human
aacacccacgcugaaucuccau

SEQ ID NO: 449678 - RNA, 24 nt, Human
aacagcaguuagaaccagaaggaa

SEQ ID NO: 449679 - RNA, 21 nt, Human
aaccagaaggaaaaggcuguu

SEQ ID NO: 449680 - RNA, 22 nt, Human
aaccagaaggaaaaggcuguuu

SEQ ID NO: 449681 - RNA, 20 nt, Human
aaguucuauuaguacuuuuc

SEQ ID NO: 449682 - RNA, 18 nt, Human
aaucuccauuuauuccac

SEQ ID NO: 449683 - RNA, 19 nt, Human
acgcugaaucuccauuuau

SEQ ID NO: 449684 - RNA, 25 nt, Human
agaaggaaaaggcuguuauacagaa

SEQ ID NO: 449685 - RNA, 20 nt, Human
agacagcugcaguguucggu

SEQ ID NO: 449686 - RNA, 19 nt, Human
agggggaaaaaaaaaaaga

SEQ ID NO: 449687 - RNA, 20 nt, Human
agguagaagugaaaaacugg

SEQ ID NO: 449688 - RNA, 19 nt, Human
aguguucggucacauggag

SEQ ID NO: 449689 - RNA, 23 nt, Human
auacugauuacuucuugaacccc

SEQ ID NO: 449690 - RNA, 22 nt, Human
aucaaugcuacuuaugagaauu

SEQ ID NO: 449691 - RNA, 21 nt, Human
augacuguuuuacuuccccua

SEQ ID NO: 449692 - RNA, 18 nt, Human
auuccacggagguggagu

SEQ ID NO: 449693 - RNA, 20 nt, Human
cagauccccaaaugucaaag

SEQ ID NO: 449694 - RNA, 20 nt, Human
cagcaaagauaaugauauag

SEQ ID NO: 449695 - RNA, 20 nt, Human
cagcaguuagaaccagaagg

SEQ ID NO: 449696 - RNA, 23 nt, Human
cccaaaugucaaagugaaacaaa

SEQ ID NO: 449697 - RNA, 21 nt, Human
cugaaaaauacaguaacauaa

SEQ ID NO: 449698 - RNA, 21 nt, Human
cugcccaccagauccccaaau

SEQ ID NO: 449699 - RNA, 20 nt, Human
gaagacaagcuauugacuca

SEQ ID NO: 449700 - RNA, 20 nt, Human
guaauuaugaaaaagggaac

SEQ ID NO: 449701 - RNA, 21 nt, Human
gucuuugacuuguuuauuuac

SEQ ID NO: 449702 - RNA, 19 nt, Human
guggaguguuuacuguccc

SEQ ID NO: 449703 - RNA, 19 nt, Human
gugggaugcaguuuuuuaa

SEQ ID NO: 449704 - RNA, 25 nt, Human
uagaaccagaaggaaaaggcuguua

SEQ ID NO: 449705 - RNA, 24 nt, Human
uaucgcugucaauaacagcaaaga

SEQ ID NO: 449706 - RNA, 20 nt, Human
uaugaaaaagggaacacuuc

SEQ ID NO: 449707 - RNA, 22 nt, Human
uauuaguacuuuucauaagcag

SEQ ID NO: 449708 - RNA, 23 nt, Human
uccacggagguggaguucaccau

SEQ ID NO: 449709 - RNA, 20 nt, Human
ucugaaaaauacaguaacau

SEQ ID NO: 449710 - RNA, 20 nt, Human
ucuugaaccccaaaaagugc

SEQ ID NO: 449711 - RNA, 23 nt, Human
ugaaaaacugaagaauguggagu

SEQ ID NO: 449712 - RNA, 22 nt, Human
ugaagaacaaacuaaaaaccug

SEQ ID NO: 449713 - RNA, 24 nt, Human
ugacucaaagagaaccugccgcga

SEQ ID NO: 449714 - RNA, 23 nt, Human
ugagugucaggaacacaacugug

SEQ ID NO: 449715 - RNA, 21 nt, Human
ugauagggggaaaaaaaaaaa

SEQ ID NO: 449716 - RNA, 25 nt, Human
ugauagggggaaaaaaaaaaagauc

SEQ ID NO: 449717 - RNA, 22 nt, Human
ugcauacugauuacuucuugaa

SEQ ID NO: 449718 - RNA, 20 nt, Human
ugggaugcaguuuuuuaagu

SEQ ID NO: 449719 - RNA, 24 nt, Human
ugucaaagugaaacaaaacucagu

SEQ ID NO: 449720 - RNA, 25 nt, Human
ugucucaucccucuaaugauaugua

SEQ ID NO: 449721 - RNA, 18 nt, Human
uuaaaauauggguucacu

SEQ ID NO: 449722 - RNA, 21 nt, Human
uuccacggagguggaguucac

SEQ ID NO: 449723 - RNA, 23 nt, Human
uuccuuaggguuacugggaagua

SEQ ID NO: 449724 - RNA, 21 nt, Human
uuuauuccacggagguggagu

SEQ ID NO: 449725 - RNA, 22 nt, Human
uuuccagugacuguuuauugag

SEQ ID NO: 449726 - RNA, 23 nt, Human
uuuccagugacuguuuauugagu

SEQ ID NO: 449727 - RNA, 23 nt, Human
uuuuuuuuuuuuuuuuuuaucag

SEQ ID NO: 449728 - RNA, 24 nt, Human
aaagggcugggauuacaggcguga

SEQ ID NO: 449729 - RNA, 24 nt, Human
aagugauccacccgccuuggccuc

SEQ ID NO: 449730 - RNA, 24 nt, Human
accauguuggccaggcuggucuug

SEQ ID NO: 449731 - RNA, 18 nt, Human
acgagguuucaccauguu

SEQ ID NO: 449732 - RNA, 20 nt, Human
acgagguuucaccauguugg

SEQ ID NO: 449733 - RNA, 24 nt, Human
acgagguuucaccauguuggccag

SEQ ID NO: 449734 - RNA, 19 nt, Human
agccaccgcaccuggccug

SEQ ID NO: 449735 - RNA, 24 nt, Human
agggcugggauuacaggcgugagc

SEQ ID NO: 449736 - RNA, 22 nt, Human
agguucaagcaauucuccagcc

SEQ ID NO: 449737 - RNA, 22 nt, Human
agguuucaccauguuggccagg

SEQ ID NO: 449738 - RNA, 23 nt, Human
aucucagcucacuugcagccucg

SEQ ID NO: 449739 - RNA, 22 nt, Human
auuuuuguauuuuuaguagaga

SEQ ID NO: 449740 - RNA, 24 nt, Human
auuuuuguauuuuuaguagagacg

SEQ ID NO: 449741 - RNA, 24 nt, Human
caaagggcugggauuacaggcgug

SEQ ID NO: 449742 - RNA, 21 nt, Human
caccauguuggccaggcuggu

SEQ ID NO: 449743 - RNA, 23 nt, Human
caccauguuggccaggcuggucu

SEQ ID NO: 449744 - RNA, 24 nt, Human
caccauguuggccaggcuggucuu

SEQ ID NO: 449745 - RNA, 27 nt, Human
caccauguuggccaggcuggucuugaa

SEQ ID NO: 449746 - RNA, 23 nt, Human
cacuugcagccucgacuucccag

SEQ ID NO: 449747 - RNA, 24 nt, Human
cagagucucgcucuguugcccagg

SEQ ID NO: 449748 - RNA, 20 nt, Human
cagccucgacuucccagguu

SEQ ID NO: 449749 - RNA, 21 nt, Human
cagccucgacuucccagguuc

SEQ ID NO: 449750 - RNA, 24 nt, Human
cauguuggccaggcuggucuugaa

SEQ ID NO: 449751 - RNA, 22 nt, Human
ccaaagggcugggauuacaggc

SEQ ID NO: 449752 - RNA, 23 nt, Human
ccaaagggcugggauuacaggcg

SEQ ID NO: 449753 - RNA, 24 nt, Human
ccaaagggcugggauuacaggcgu

SEQ ID NO: 449754 - RNA, 22 nt, Human
ccaaguagcugugauaacaggc

SEQ ID NO: 449755 - RNA, 23 nt, Human
cccgccuuggccucccaaagggc

SEQ ID NO: 449756 - RNA, 22 nt, Human
ccugaccucaagugauccaccc

SEQ ID NO: 449757 - RNA, 23 nt, Human
ccugaccucaagugauccacccg

SEQ ID NO: 449758 - RNA, 24 nt, Human
cgcucuguugcccaggcuagacug

SEQ ID NO: 449759 - RNA, 24 nt, Human
cucaagugauccacccgccuuggc

SEQ ID NO: 449760 - RNA, 25 nt, Human
cucuguugcccaggcuagacugcca

SEQ ID NO: 449761 - RNA, 24 nt, Human
cuucccagguucaagcaauucucc

SEQ ID NO: 449762 - RNA, 24 nt, Human
cuuggccucccaaagggcugggau

SEQ ID NO: 449763 - RNA, 23 nt, Human
gaccucaagugauccacccgccu

SEQ ID NO: 449764 - RNA, 23 nt, Human
gacuucccagguucaagcaauuc

SEQ ID NO: 449765 - RNA, 23 nt, Human
gagguuucaccauguuggccagg

SEQ ID NO: 449766 - RNA, 18 nt, Human
gauuacaggcgugagcca

SEQ ID NO: 449767 - RNA, 22 nt, Human
gauuacaggcgugagccaccgc

SEQ ID NO: 449768 - RNA, 23 nt, Human
gauuacaggcgugagccaccgca

SEQ ID NO: 449769 - RNA, 22 nt, Human
gcagccucgacuucccagguuc

SEQ ID NO: 449770 - RNA, 23 nt, Human
gcuggucuugaacuccugaccuc

SEQ ID NO: 449771 - RNA, 24 nt, Human
ggcuggucuugaacuccugaccuc

SEQ ID NO: 449772 - RNA, 19 nt, Human
gggcuccagcggccgcaac

SEQ ID NO: 449773 - RNA, 19 nt, Human
ggucuugaacuccugaccu

SEQ ID NO: 449774 - RNA, 24 nt, Human
gugauccacccgccuuggccuccc

SEQ ID NO: 449775 - RNA, 22 nt, Human
uacaggcgugagccaccgcacc

SEQ ID NO: 449776 - RNA, 23 nt, Human
uacaggcgugagccaccgcaccu

SEQ ID NO: 449777 - RNA, 23 nt, Human
uagacugccauggcaugaucuca

SEQ ID NO: 449778 - RNA, 22 nt, Human
uagagacgagguuucaccaugu

SEQ ID NO: 449779 - RNA, 24 nt, Human
uaguagagacgagguuucaccaug

SEQ ID NO: 449780 - RNA, 26 nt, Human
uaguagagacgagguuucaccauguu

SEQ ID NO: 449781 - RNA, 24 nt, Human
ucacuugcagccucgacuucccag

SEQ ID NO: 449782 - RNA, 19 nt, Human
ucccaaagggcugggauua

SEQ ID NO: 449783 - RNA, 23 nt, Human
ucccaaagggcugggauuacagg

SEQ ID NO: 449784 - RNA, 24 nt, Human
ucccaaagggcugggauuacaggc

SEQ ID NO: 449785 - RNA, 24 nt, Human
ucccaaguagcugugauaacaggc

SEQ ID NO: 449786 - RNA, 21 nt, Human
ucccagguucaagcaauucuc

SEQ ID NO: 449787 - RNA, 24 nt, Human
ucccagguucaagcaauucuccag

SEQ ID NO: 449788 - RNA, 18 nt, Human
ucucgcucuguugcccag

SEQ ID NO: 449789 - RNA, 19 nt, Human
ucucgcucuguugcccagg

SEQ ID NO: 449790 - RNA, 21 nt, Human
ucucgcucuguugcccaggcu

SEQ ID NO: 449791 - RNA, 23 nt, Human
ucucgcucuguugcccaggcuag

SEQ ID NO: 449792 - RNA, 24 nt, Human
ucucgcucuguugcccaggcuaga

SEQ ID NO: 449793 - RNA, 18 nt, Human
ucuguugcccaggcuaga

SEQ ID NO: 449794 - RNA, 21 nt, Human
ucuugaacuccugaccucaag

SEQ ID NO: 449795 - RNA, 24 nt, Human
ugaccucaagugauccacccgccu

SEQ ID NO: 449796 - RNA, 24 nt, Human
ugauuuuuguauuuuuaguagaga

SEQ ID NO: 449797 - RNA, 20 nt, Human
uggcaugaucucagcucacu

SEQ ID NO: 449798 - RNA, 24 nt, Human
uggccaggcuggucuugaacuccu

SEQ ID NO: 449799 - RNA, 18 nt, Human
ugggauuacaggcgugag

SEQ ID NO: 449800 - RNA, 19 nt, Human
ugggauuacaggcgugagc

SEQ ID NO: 449801 - RNA, 21 nt, Human
ugggauuacaggcgugagcca

SEQ ID NO: 449802 - RNA, 22 nt, Human
ugggauuacaggcgugagccac

SEQ ID NO: 449803 - RNA, 23 nt, Human
ugggauuacaggcgugagccacc

SEQ ID NO: 449804 - RNA, 24 nt, Human
ugggauuacaggcgugagccaccg

SEQ ID NO: 449805 - RNA, 24 nt, Human
uuaguagagacgagguuucaccau

SEQ ID NO: 449806 - RNA, 19 nt, Human
uucaagcaauucuccagcc

SEQ ID NO: 449807 - RNA, 24 nt, Human
uuucaccauguuggccaggcuggu

SEQ ID NO: 449808 - RNA, 24 nt, Human
uuuuuaguagagacgagguuucac

SEQ ID NO: 449809 - RNA, 20 nt, Human
uuuuuguauuuuuaguagag

SEQ ID NO: 449810 - RNA, 20 nt, Human
agcugggccuccugcugcca

SEQ ID NO: 449811 - RNA, 20 nt, Human
aggagggaaauacagacaga

SEQ ID NO: 449812 - RNA, 19 nt, Human
caggcuggggcaucugcuu

SEQ ID NO: 449813 - RNA, 19 nt, Human
ccccaguaggagugugucu

SEQ ID NO: 449814 - RNA, 22 nt, Human
cgaggcugaccuggccacgcau

SEQ ID NO: 449815 - RNA, 20 nt, Human
cggcugccgcugucgguccg

SEQ ID NO: 449816 - RNA, 23 nt, Human
cugccagggcuaccuggccugag

SEQ ID NO: 449817 - RNA, 20 nt, Human
cugggccuccugcugccagg

SEQ ID NO: 449818 - RNA, 21 nt, Human
gaaaggggaguggggaggagg

SEQ ID NO: 449819 - RNA, 20 nt, Human
gaggaggagagguauaugcc

SEQ ID NO: 449820 - RNA, 18 nt, Human
gccaaaggcagagagaga

SEQ ID NO: 449821 - RNA, 19 nt, Human
ggagaaacagccgggggcu

SEQ ID NO: 449822 - RNA, 20 nt, Human
ggaguggggaggaggagagg

SEQ ID NO: 449823 - RNA, 24 nt, Human
ggcagagagagagagagagagagc

SEQ ID NO: 449824 - RNA, 23 nt, Human
ggggagaaacagccgggggcuuc

SEQ ID NO: 449825 - RNA, 27 nt, Human
gucgguccgcuucucugcauugggaau

SEQ ID NO: 449826 - RNA, 24 nt, Human
uaaugcacauacaggguuugcaca

SEQ ID NO: 449827 - RNA, 21 nt, Human
ucacccggcugccgcugucgg

SEQ ID NO: 449828 - RNA, 18 nt, Human
ucagacaucacccggcug

SEQ ID NO: 449829 - RNA, 19 nt, Human
ugaccuggccacgcaucca

SEQ ID NO: 449830 - RNA, 23 nt, Human
ugaccuggccacgcauccagcag

SEQ ID NO: 449831 - RNA, 26 nt, Human
uggagauuuuuaaugcacauacaggg

SEQ ID NO: 449832 - RNA, 19 nt, Human
uucaucagacaucacccgg

SEQ ID NO: 449833 - RNA, 24 nt, Human
aaacagaugaaaaacaauucccac

SEQ ID NO: 449834 - RNA, 22 nt, Human
aacuuuuuacaagaguuggaga

SEQ ID NO: 449835 - RNA, 19 nt, Human
aaguccuccaguuuaacuc

SEQ ID NO: 449836 - RNA, 21 nt, Human
aauauacaccuugacacaccu

SEQ ID NO: 449837 - RNA, 21 nt, Human
acaaagacccauagaaagucc

SEQ ID NO: 449838 - RNA, 19 nt, Human
acaaagaugaaagggcaga

SEQ ID NO: 449839 - RNA, 20 nt, Human
acagcacaaagggcaucgcc

SEQ ID NO: 449840 - RNA, 20 nt, Human
accuugacacaccuucacac

SEQ ID NO: 449841 - RNA, 21 nt, Human
acgcugcuucagaggaacagg

SEQ ID NO: 449842 - RNA, 21 nt, Human
agaaucagcaacaaugcccuc

SEQ ID NO: 449843 - RNA, 23 nt, Human
agacaucacagguugucauugcu

SEQ ID NO: 449844 - RNA, 18 nt, Human
agagaugggguuucauca

SEQ ID NO: 449845 - RNA, 22 nt, Human
agagugccuuugaggauggucc

SEQ ID NO: 449846 - RNA, 21 nt, Human
agcagagcagcagucccaggc

SEQ ID NO: 449847 - RNA, 19 nt, Human
aggcagagcccucacccgg

SEQ ID NO: 449848 - RNA, 18 nt, Human
aggccuccagucauacag

SEQ ID NO: 449849 - RNA, 21 nt, Human
aggccuuugcacugagaauga

SEQ ID NO: 449850 - RNA, 19 nt, Human
augaaaaacaauucccaca

SEQ ID NO: 449851 - RNA, 20 nt, Human
augaaaaacaauucccacag

SEQ ID NO: 449852 - RNA, 21 nt, Human
augaaaaacaauucccacaga

SEQ ID NO: 449853 - RNA, 19 nt, Human
augggguuucaucaaguug

SEQ ID NO: 449854 - RNA, 24 nt, Human
augggguuucaucaaguuggccag

SEQ ID NO: 449855 - RNA, 20 nt, Human
auuccgccacuuuuauugag

SEQ ID NO: 449856 - RNA, 27 nt, Human
caaagcacugggacaaugcuggaugug

SEQ ID NO: 449857 - RNA, 20 nt, Human
caaagccagggccuuccccc

SEQ ID NO: 449858 - RNA, 23 nt, Human
caaaguccuccaguuuaacuccc

SEQ ID NO: 449859 - RNA, 26 nt, Human
caacacccuggaaacauuauccaggg

SEQ ID NO: 449860 - RNA, 21 nt, Human
caacucaaagcacugggacaa

SEQ ID NO: 449861 - RNA, 18 nt, Human
caaguuggccaggcuggu

SEQ ID NO: 449862 - RNA, 21 nt, Human
caaguuggccaggcugguuuc

SEQ ID NO: 449863 - RNA, 22 nt, Human
caaguuggccaggcugguuucg

SEQ ID NO: 449864 - RNA, 18 nt, Human
cacacagcagccagcaga

SEQ ID NO: 449865 - RNA, 23 nt, Human
cacccacaacugugaccugagac

SEQ ID NO: 449866 - RNA, 24 nt, Human
cacccacaacugugaccugagacg

SEQ ID NO: 449867 - RNA, 27 nt, Human
cagagcagcagucccaggccacauccc

SEQ ID NO: 449868 - RNA, 19 nt, Human
cagagucuccaaacaggcc

SEQ ID NO: 449869 - RNA, 18 nt, Human
cagccagcagagcagcag

SEQ ID NO: 449870 - RNA, 18 nt, Human
cagcucugccagccuccu

SEQ ID NO: 449871 - RNA, 20 nt, Human
caggaaaagcauccacacag

SEQ ID NO: 449872 - RNA, 22 nt, Human
caggaaaagcauccacacagca

SEQ ID NO: 449873 - RNA, 20 nt, Human
caggccuucccaacacccug

SEQ ID NO: 449874 - RNA, 24 nt, Human
caucaaguuggccaggcugguuuc

SEQ ID NO: 449875 - RNA, 18 nt, Human
caucccaggccgaccuuc

SEQ ID NO: 449876 - RNA, 22 nt, Human
caugcagucugaauacgcuacc

SEQ ID NO: 449877 - RNA, 18 nt, Human
cauugcuagaggcaagaa

SEQ ID NO: 449878 - RNA, 22 nt, Human
ccaaacaggccuuugcacugag

SEQ ID NO: 449879 - RNA, 24 nt, Human
ccacgcggagaggccuccagucau

SEQ ID NO: 449880 - RNA, 19 nt, Human
ccaggacaggcgugaccug

SEQ ID NO: 449881 - RNA, 22 nt, Human
ccauagaaagucccugagugac

SEQ ID NO: 449882 - RNA, 19 nt, Human
cccacaaagacccauagaa

SEQ ID NO: 449883 - RNA, 21 nt, Human
cccacaacugugaccugagac

SEQ ID NO: 449884 - RNA, 18 nt, Human
cccacccccaaguaccca

SEQ ID NO: 449885 - RNA, 18 nt, Human
ccccacccccaaguaccc

SEQ ID NO: 449886 - RNA, 20 nt, Human
ccccagaaaccacucauccc

SEQ ID NO: 449887 - RNA, 24 nt, Human
ccccagaaaccacucaucccugaa

SEQ ID NO: 449888 - RNA, 27 nt, Human
cccccaaguacccacgcggagaggccu

SEQ ID NO: 449889 - RNA, 20 nt, Human
cccccacaaagacccauaga

SEQ ID NO: 449890 - RNA, 18 nt, Human
cccggcacacugucucca

SEQ ID NO: 449891 - RNA, 24 nt, Human
ccuccaguuuaacucccuguugug

SEQ ID NO: 449892 - RNA, 19 nt, Human
cgcugcuucagaggaacag

SEQ ID NO: 449893 - RNA, 19 nt, Human
cgugcaggcuuggggcugg

SEQ ID NO: 449894 - RNA, 19 nt, Human
cucaguccccagcucugcc

SEQ ID NO: 449895 - RNA, 21 nt, Human
cugaccucagaugccccagaa

SEQ ID NO: 449896 - RNA, 23 nt, Human
cugucugcggugggaggcucggg

SEQ ID NO: 449897 - RNA, 24 nt, Human
gaacggguagagaugggguuucau

SEQ ID NO: 449898 - RNA, 25 nt, Human
gaagacaaauuuccuaagaaacuca

SEQ ID NO: 449899 - RNA, 24 nt, Human
gagacgcaggccuucccaacaccc

SEQ ID NO: 449900 - RNA, 23 nt, Human
gagagugccuuugaggauggucc

SEQ ID NO: 449901 - RNA, 21 nt, Human
gauagcuucaaggaguuagca

SEQ ID NO: 449902 - RNA, 30 nt, Human
gcagagucccauucccguccaacucaaagg

SEQ ID NO: 449903 - RNA, 21 nt, Human
gcaucgccuugggcagcucag

SEQ ID NO: 449904 - RNA, 18 nt, Human
gccacacccacaacugug

SEQ ID NO: 449905 - RNA, 21 nt, Human
gccccacccccaaguacccac

SEQ ID NO: 449906 - RNA, 21 nt, Human
gccccagaaaccacucauccc

SEQ ID NO: 449907 - RNA, 19 nt, Human
gccuccucugugcucccca

SEQ ID NO: 449908 - RNA, 20 nt, Human
gcugggcacaacgggggcag

SEQ ID NO: 449909 - RNA, 23 nt, Human
gcugguuucgaacuccugaccuc

SEQ ID NO: 449910 - RNA, 21 nt, Human
gcuuggggcugggggaugccu

SEQ ID NO: 449911 - RNA, 22 nt, Human
gcuuggggcugggggaugccuu

SEQ ID NO: 449912 - RNA, 21 nt, Human
ggacaggcgugaccuguucuc

SEQ ID NO: 449913 - RNA, 18 nt, Human
ggcacacugucuccagga

SEQ ID NO: 449914 - RNA, 21 nt, Human
ggcucgggccggccugggugc

SEQ ID NO: 449915 - RNA, 24 nt, Human
ggcugguuucgaacuccugaccuc

SEQ ID NO: 449916 - RNA, 18 nt, Human
gggaauacaaagccaggg

SEQ ID NO: 449917 - RNA, 18 nt, Human
gggaugccuuggaaagug

SEQ ID NO: 449918 - RNA, 18 nt, Human
gggcagccucucuuacua

SEQ ID NO: 449919 - RNA, 23 nt, Human
gggguucuuaaaauuuaugaagg

SEQ ID NO: 449920 - RNA, 18 nt, Human
gggguuucaucaaguugg

SEQ ID NO: 449921 - RNA, 22 nt, Human
gggguuucaucaaguuggccag

SEQ ID NO: 449922 - RNA, 19 nt, Human
ggguagagaugggguuuca

SEQ ID NO: 449923 - RNA, 22 nt, Human
ggugcgggcagccucucuuacu

SEQ ID NO: 449924 - RNA, 23 nt, Human
ggugguggccugcaccuggggcc

SEQ ID NO: 449925 - RNA, 19 nt, Human
gguuucgaacuccugaccu

SEQ ID NO: 449926 - RNA, 18 nt, Human
gucccaggccacauccca

SEQ ID NO: 449927 - RNA, 19 nt, Human
gugguggccugcaccuggg

SEQ ID NO: 449928 - RNA, 25 nt, Human
uaauaagugggcgauggugcccccu

SEQ ID NO: 449929 - RNA, 20 nt, Human
uagaaacagaugaaaaacaa

SEQ ID NO: 449930 - RNA, 20 nt, Human
uauccugccuuggcugcaga

SEQ ID NO: 449931 - RNA, 22 nt, Human
uccacacagcagccagcagagc

SEQ ID NO: 449932 - RNA, 18 nt, Human
ucccacagagucuccaaa

SEQ ID NO: 449933 - RNA, 21 nt, Human
ucccaggccacaucccaggcc

SEQ ID NO: 449934 - RNA, 21 nt, Human
uccgcaaaacuaaauaauaag

SEQ ID NO: 449935 - RNA, 25 nt, Human
uccucugugcuccccacgccgucug

SEQ ID NO: 449936 - RNA, 21 nt, Human
ucuacagcaaucacgcugcuu

SEQ ID NO: 449937 - RNA, 19 nt, Human
ugaaaaacaauucccacag

SEQ ID NO: 449938 - RNA, 20 nt, Human
ugaaaaacaauucccacaga

SEQ ID NO: 449939 - RNA, 23 nt, Human
ugaaagggcagaacccagugcuu

SEQ ID NO: 449940 - RNA, 23 nt, Human
ugacaauggcgggaacgcuggag

SEQ ID NO: 449941 - RNA, 20 nt, Human
ugaccugagacgcaggccuu

SEQ ID NO: 449942 - RNA, 19 nt, Human
ugagaaugccgagccacga

SEQ ID NO: 449943 - RNA, 21 nt, Human
ugagaggguagguucuguaga

SEQ ID NO: 449944 - RNA, 23 nt, Human
ugagugagaaucagcaacaaugc

SEQ ID NO: 449945 - RNA, 20 nt, Human
ugcaggacgggauugcaaga

SEQ ID NO: 449946 - RNA, 19 nt, Human
ugcagucugaauacgcuac

SEQ ID NO: 449947 - RNA, 18 nt, Human
ugccgagccacgagaaua

SEQ ID NO: 449948 - RNA, 19 nt, Human
ugcggcaggcugccccggu

SEQ ID NO: 449949 - RNA, 21 nt, Human
ugcugggcacaacgggggcag

SEQ ID NO: 449950 - RNA, 24 nt, Human
uggccaggcugguuucgaacuccu

SEQ ID NO: 449951 - RNA, 20 nt, Human
ugggacaaugcuggauguga

SEQ ID NO: 449952 - RNA, 24 nt, Human
uggggccugugcaucugcggcagg

SEQ ID NO: 449953 - RNA, 22 nt, Human
ugggggaugccuuggaaagugc

SEQ ID NO: 449954 - RNA, 24 nt, Human
ugggguuucaucaaguuggccagg

SEQ ID NO: 449955 - RNA, 19 nt, Human
ugggugcgggcagccucuc

SEQ ID NO: 449956 - RNA, 18 nt, Human
uucuguagaacagcgcag

SEQ ID NO: 449957 - RNA, 19 nt, Human
uugaauggcucauuaccaa

SEQ ID NO: 449958 - RNA, 21 nt, Human
uuggggcugggggaugccuug

SEQ ID NO: 449959 - RNA, 21 nt, Human
uuucaucaaguuggccaggcu

SEQ ID NO: 449960 - RNA, 22 nt, Human
aaaaaaaaaaaaaaggagacaa

SEQ ID NO: 449961 - RNA, 22 nt, Human
aaaaaaaaaaggagacaacuga

SEQ ID NO: 449962 - RNA, 21 nt, Human
aaacgucgcaccggcucugcc

SEQ ID NO: 449963 - RNA, 20 nt, Human
aacauggcgagaccccgucu

SEQ ID NO: 449964 - RNA, 21 nt, Human
aacauggcgagaccccgucuc

SEQ ID NO: 449965 - RNA, 21 nt, Human
aaccaggcgcaguggcucaug

SEQ ID NO: 449966 - RNA, 20 nt, Human
aagaaaagaaaagagggcca

SEQ ID NO: 449967 - RNA, 18 nt, Human
aagaaaagagggccagga

SEQ ID NO: 449968 - RNA, 19 nt, Human
aagaacaaagcuggaaagg

SEQ ID NO: 449969 - RNA, 21 nt, Human
aagagacugaaagccugcccu

SEQ ID NO: 449970 - RNA, 22 nt, Human
aagagacugaaagccugcccuc

SEQ ID NO: 449971 - RNA, 23 nt, Human
aagaggggcaggcaaccaggcgc

SEQ ID NO: 449972 - RNA, 19 nt, Human
aagaugcuucugguagcuc

SEQ ID NO: 449973 - RNA, 25 nt, Human
aaggcggguggaucaccugagguca

SEQ ID NO: 449974 - RNA, 24 nt, Human
aauugcuugaacccgggaggcgga

SEQ ID NO: 449975 - RNA, 24 nt, Human
acaccacugcacuucagccugggc

SEQ ID NO: 449976 - RNA, 24 nt, Human
acagagagagacccugucuccaaa

SEQ ID NO: 449977 - RNA, 19 nt, Human
acagagugagaccccgucu

SEQ ID NO: 449978 - RNA, 23 nt, Human
acagagugagaccccgucuggag

SEQ ID NO: 449979 - RNA, 23 nt, Human
acagagugagacuaggucucaaa

SEQ ID NO: 449980 - RNA, 24 nt, Human
acagagugagacuaggucucaaaa

SEQ ID NO: 449981 - RNA, 20 nt, Human
acaggccuauuccuucagga

SEQ ID NO: 449982 - RNA, 23 nt, Human
accaaaaauacaaaaucagccag

SEQ ID NO: 449983 - RNA, 25 nt, Human
acccucuuuugaccccuagaugcug

SEQ ID NO: 449984 - RNA, 30 nt, Human; identical to SEQ ID NO: 170933

SEQ ID NO: 449985 - RNA, 24 nt, Human
acuccagccugggcaacagaguga

SEQ ID NO: 449986 - RNA, 24 nt, Human
acuccagccugggcgacagaguga

SEQ ID NO: 449987 - RNA, 24 nt, Human
acugcacuccagccugggcaacag

SEQ ID NO: 449988 - RNA, 24 nt, Human
acugcacuccagccugggcaacag

SEQ ID NO: 449989 - RNA, 24 nt, Human
acugcacuccagccugggcgacag

SEQ ID NO: 449990 - RNA, 26 nt, Human
acugcacuccagccugggcgacagag

SEQ ID NO: 449991 - RNA, 18 nt, Human
acugcacuucagccuggg

SEQ ID NO: 449992 - RNA, 24 nt, Human
acugcacuucagccugggccacag

SEQ ID NO: 449993 - RNA, 20 nt, Human
acuugcuguguguccuuggc

SEQ ID NO: 449994 - RNA, 18 nt, Human
agacagcagggccggaag

SEQ ID NO: 449995 - RNA, 22 nt, Human
agacagcagggccggaagaaca

SEQ ID NO: 449996 - RNA, 22 nt, Human
agaccacgcuauugcauuccag

SEQ ID NO: 449997 - RNA, 20 nt, Human
agaccuggguggaggcggug

SEQ ID NO: 449998 - RNA, 22 nt, Human
agagacucagaccuuagccccc

SEQ ID NO: 449999 - RNA, 23 nt, Human
agagccccagaggaaaacugggg

SEQ ID NO: 450000 - RNA, 20 nt, Human
agaugcugaaacacugcgcc

SEQ ID NO: 450001 - RNA, 21 nt, Human
agcccagggguuugagaccag

SEQ ID NO: 450002 - RNA, 24 nt, Human
agccuggccaacauggcgagaccc

SEQ ID NO: 450003 - RNA, 22 nt, Human
agccugggcaacagagugagac

SEQ ID NO: 450004 - RNA, 22 nt, Human
agccugggcgacagagugagac

SEQ ID NO: 450005 - RNA, 24 nt, Human
aggaggcugaacagguauaagggu

SEQ ID NO: 450006 - RNA, 21 nt, Human
aggaggcugagguggugggag

SEQ ID NO: 450007 - RNA, 24 nt, Human
aggcaggagaauugcuugaacccg

SEQ ID NO: 450008 - RNA, 19 nt, Human
aggcaggaggauugcuuga

SEQ ID NO: 450009 - RNA, 24 nt, Human
aggcaggaggauugcuugagcuug

SEQ ID NO: 450010 - RNA, 23 nt, Human
aggcaggaggcuugcuugagccc

SEQ ID NO: 450011 - RNA, 24 nt, Human
aggcaggaggcuugcuugagccca

SEQ ID NO: 450012 - RNA, 21 nt, Human
aggccaaggcggguggaucac

SEQ ID NO: 450013 - RNA, 24 nt, Human
aggcgcaguggcucaugccugcaa

SEQ ID NO: 450014 - RNA, 24 nt, Human
aggcggagguugcagugagccaag

SEQ ID NO: 450015 - RNA, 22 nt, Human
aggcggguggaucaccugaggg

SEQ ID NO: 450016 - RNA, 22 nt, Human
aggcggguggaucaccugaggu

SEQ ID NO: 450017 - RNA, 21 nt, Human
aggcugaggcaggagaauugc

SEQ ID NO: 450018 - RNA, 24 nt, Human
aggcugaggcaggagaauugcuug

SEQ ID NO: 450019 - RNA, 27 nt, Human
aggcugagguggugggaggaucgcuug

SEQ ID NO: 450020 - RNA, 18 nt, Human
agggggagagaggauucu

SEQ ID NO: 450021 - RNA, 20 nt, Human
agggguuugagaccagcugg

SEQ ID NO: 450022 - RNA, 24 nt, Human
aggugguagaaguugcagugagcc

SEQ ID NO: 450023 - RNA, 24 nt, Human
agguguggugacucaugccuguag

SEQ ID NO: 450024 - RNA, 21 nt, Human
agucugcagcccuuccugcug

SEQ ID NO: 450025 - RNA, 23 nt, Human
aguggcucaugccugcaauccca

SEQ ID NO: 450026 - RNA, 24 nt, Human
aguuuggggcacaagaaucgcuug

SEQ ID NO: 450027 - RNA, 24 nt, Human
auagcgccacugcacuccagccug

SEQ ID NO: 450028 - RNA, 24 nt, Human
auaugaugguuccagcuacucagg

SEQ ID NO: 450029 - RNA, 24 nt, Human
aucacaccacugcacuucagccug

SEQ ID NO: 450030 - RNA, 22 nt, Human
aucccaacacuuugggaggcca

SEQ ID NO: 450031 - RNA, 22 nt, Human
aucccagcacuuugggaggcca

SEQ ID NO: 450032 - RNA, 19 nt, Human
augccugcaaucccaacac

SEQ ID NO: 450033 - RNA, 20 nt, Human
auugcuugagcuugggaggu

SEQ ID NO: 450034 - RNA, 24 nt, Human
auugugccacugcacuccagccug

SEQ ID NO: 450035 - RNA, 18 nt, Human
caaaaaagggaagagaga

SEQ ID NO: 450036 - RNA, 25 nt, Human
caaaaaagggaagagagacucagac

SEQ ID NO: 450037 - RNA, 20 nt, Human
caaaaauacaaaaucagcca

SEQ ID NO: 450038 - RNA, 23 nt, Human
caaaaauacaaaaucagccaggu

SEQ ID NO: 450039 - RNA, 21 nt, Human
caaaugguaagacccugucuc

SEQ ID NO: 450040 - RNA, 22 nt, Human
caacacuuugggaggccaaggc

SEQ ID NO: 450041 - RNA, 24 nt, Human
caacacuuugggaggccaaggcgg

SEQ ID NO: 450042 - RNA, 24 nt, Human
caaccaggcgcaguggcucaugcc

SEQ ID NO: 450043 - RNA, 24 nt, Human
caaggcggguggaucaccugaggu

SEQ ID NO: 450044 - RNA, 24 nt, Human
cacaccuguaaucccagcacuuug

SEQ ID NO: 450045 - RNA, 19 nt, Human
caccuguaaucccagcacu

SEQ ID NO: 450046 - RNA, 24 nt, Human
caccuguaaucccagcacuuuggg

SEQ ID NO: 450047 - RNA, 20 nt, Human
caccuguggucccagcuacu

SEQ ID NO: 450048 - RNA, 24 nt, Human
caccuguggucccagcuacuuggg

SEQ ID NO: 450049 - RNA, 22 nt, Human
cacuccagccugggcaacagag

SEQ ID NO: 450050 - RNA, 24 nt, Human
cacuccagccugggcaacagagug

SEQ ID NO: 450051 - RNA, 22 nt, Human
cacuccagccugggcgacagag

SEQ ID NO: 450052 - RNA, 22 nt, Human
cacuccagccugggcgacagag

SEQ ID NO: 450053 - RNA, 24 nt, Human
cacuccagccugggcgacagagug

SEQ ID NO: 450054 - RNA, 18 nt, Human
cacugcacuccagccugg

SEQ ID NO: 450055 - RNA, 19 nt, Human
cacugcacuccagccuggg

SEQ ID NO: 450056 - RNA, 19 nt, Human
cacugcacuccagccuggg

SEQ ID NO: 450057 - RNA, 20 nt, Human
cacugcacuccagccugggc

SEQ ID NO: 450058 - RNA, 21 nt, Human
cacugcacuccagccugggca

SEQ ID NO: 450059 - RNA, 23 nt, Human
cacugcacuccagccugggcaac

SEQ ID NO: 450060 - RNA, 24 nt, Human
cacugcacuccagccugggcaaca

SEQ ID NO: 450061 - RNA, 22 nt, Human
cacugcacuccagccugggcga

SEQ ID NO: 450062 - RNA, 23 nt, Human
cacugcacuccagccugggcgac

SEQ ID NO: 450063 - RNA, 24 nt, Human
cacugcacuccagccugggcgaca

SEQ ID NO: 450064 - RNA, 18 nt, Human
cacugcacuucagccugg

SEQ ID NO: 450065 - RNA, 19 nt, Human
cacugcacuucagccuggg

SEQ ID NO: 450066 - RNA, 22 nt, Human
cacugcacuucagccugggcca

SEQ ID NO: 450067 - RNA, 24 nt, Human
cacugcacuucagccugggccaca

SEQ ID NO: 450068 - RNA, 24 nt, Human
cacugcgccaacuucccucgggcc

SEQ ID NO: 450069 - RNA, 21 nt, Human
cagaacacaccaugggacagc

SEQ ID NO: 450070 - RNA, 21 nt, Human
cagagagagacccugucucca

SEQ ID NO: 450071 - RNA, 24 nt, Human
cagcacuuugggaggccaaggcag

SEQ ID NO: 450072 - RNA, 24 nt, Human
cagcacuuugggaggccaaggcag

SEQ ID NO: 450073 - RNA, 24 nt, Human
cagcaggagggccccuguaguccc

SEQ ID NO: 450074 - RNA, 22 nt, Human
cagcaggugucucaagaagccc

SEQ ID NO: 450075 - RNA, 24 nt, Human
cagcuacucaggaggcugaggugg

SEQ ID NO: 450076 - RNA, 24 nt, Human
cagcuacuuaggaggcugaggcag

SEQ ID NO: 450077 - RNA, 18 nt, Human
caggagagggagguggug

SEQ ID NO: 450078 - RNA, 21 nt, Human
caggaggagaagggaggugaa

SEQ ID NO: 450079 - RNA, 25 nt, Human
cauccugugagaccuggguggaggc

SEQ ID NO: 450080 - RNA, 20 nt, Human
caugccugcaaucccaacac

SEQ ID NO: 450081 - RNA, 20 nt, Human
ccaagacccucuuuugaccc

SEQ ID NO: 450082 - RNA, 20 nt, Human
ccacugcacuccagccuggg

SEQ ID NO: 450083 - RNA, 20 nt, Human
ccacugcacuccagccuggg

SEQ ID NO: 450084 - RNA, 20 nt, Human
ccacugcacuccagccuggg

SEQ ID NO: 450085 - RNA, 20 nt, Human
ccacugcacuccagccuggg

SEQ ID NO: 450086 - RNA, 21 nt, Human
ccacugcacuccagccugggc

SEQ ID NO: 450087 - RNA, 21 nt, Human
ccacugcacuccagccugggc

SEQ ID NO: 450088 - RNA, 21 nt, Human
ccacugcacuccagccugggc

SEQ ID NO: 450089 - RNA, 23 nt, Human
ccacugcacuccagccugggcaa

SEQ ID NO: 450090 - RNA, 24 nt, Human
ccacugcacuccagccugggcaac

SEQ ID NO: 450091 - RNA, 24 nt, Human
ccacugcacuccagccugggcgac

SEQ ID NO: 450092 - RNA, 20 nt, Human
ccacugcacuucagccuggg

SEQ ID NO: 450093 - RNA, 21 nt, Human
ccacugcacuucagccugggc

SEQ ID NO: 450094 - RNA, 24 nt, Human
ccacugcacuucagccugggccac

SEQ ID NO: 450095 - RNA, 23 nt, Human
ccaggacagcacguggaguacag

SEQ ID NO: 450096 - RNA, 18 nt, Human
cccagggguuugagacca

SEQ ID NO: 450097 - RNA, 19 nt, Human
ccccagaggaaaacugggg

SEQ ID NO: 450098 - RNA, 24 nt, Human
ccccuguagucccagcuacuuagg

SEQ ID NO: 450099 - RNA, 21 nt, Human
cccgcggcuggaacugcuccg

SEQ ID NO: 450100 - RNA, 21 nt, Human
ccggaagaacaaagcuggaaa

SEQ ID NO: 450101 - RNA, 19 nt, Human
ccggggaggcagacagcag

SEQ ID NO: 450102 - RNA, 19 nt, Human
ccuaggugguagaaguugc

SEQ ID NO: 450103 - RNA, 21 nt, Human
ccucaagcugagaggggugga

SEQ ID NO: 450104 - RNA, 20 nt, Human
ccuccgcaguuggaggcggg

SEQ ID NO: 450105 - RNA, 22 nt, Human
ccuccgcaguuggaggcgggga

SEQ ID NO: 450106 - RNA, 23 nt, Human
ccucgacccgacuaccucccuug

SEQ ID NO: 450107 - RNA, 20 nt, Human
ccugcaaucccaacacuuug

SEQ ID NO: 450108 - RNA, 23 nt, Human
ccuggccaacauggcgagacccc

SEQ ID NO: 450109 - RNA, 24 nt, Human
ccuggccaacauggcgagaccccg

SEQ ID NO: 450110 - RNA, 21 nt, Human
ccuguagucccagcuacucgg

SEQ ID NO: 450111 - RNA, 21 nt, Human
ccuguagucccagcuacuuag

SEQ ID NO: 450112 - RNA, 18 nt, Human
ccugugagaccugggugg

SEQ ID NO: 450113 - RNA, 21 nt, Human
ccuguggucccagcuacuugg

SEQ ID NO: 450114 - RNA, 24 nt, Human
cgccacugcacuccagccugggca

SEQ ID NO: 450115 - RNA, 24 nt, Human
cgggaggcggagguugcagugagc

SEQ ID NO: 450116 - RNA, 27 nt, Human
cggguggaucaccugaggucaguguga

SEQ ID NO: 450117 - RNA, 19 nt, Human
cuaugcuucauaacguaca

SEQ ID NO: 450118 - RNA, 20 nt, Human
cucaaaaagaaaagaaaaga

SEQ ID NO: 450119 - RNA, 22 nt, Human
cucacaccuguaaucccagcac

SEQ ID NO: 450120 - RNA, 24 nt, Human
cucacaccuguaaucccagcacuu

SEQ ID NO: 450121 - RNA, 22 nt, Human
cucagggccgagauggggagga

SEQ ID NO: 450122 - RNA, 24 nt, Human
cucaugccugcaaucccaacacuu

SEQ ID NO: 450123 - RNA, 24 nt, Human
cucaugccuguagucccagcuacu

SEQ ID NO: 450124 - RNA, 21 nt, Human
cugaaagccugcccucagugg

SEQ ID NO: 450125 - RNA, 23 nt, Human
cuggugcagccacuaacuugcug

SEQ ID NO: 450126 - RNA, 20 nt, Human
cuugcuguguguccuuggcu

SEQ ID NO: 450127 - RNA, 23 nt, Human
cuugcuguguguccuuggcugca

SEQ ID NO: 450128 - RNA, 22 nt, Human
cuugcuugagcccagggguuug

SEQ ID NO: 450129 - RNA, 20 nt, Human
gaagcccauggaggagugag

SEQ ID NO: 450130 - RNA, 18 nt, Human
gacagcacguggaguaca

SEQ ID NO: 450131 - RNA, 21 nt, Human
gaccccgucuccaccaaaaau

SEQ ID NO: 450132 - RNA, 21 nt, Human
gacucaugccuguagucccag

SEQ ID NO: 450133 - RNA, 23 nt, Human
gagaauugcuugaacccgggagg

SEQ ID NO: 450134 - RNA, 21 nt, Human
gagagacucagaccuuagccc

SEQ ID NO: 450135 - RNA, 23 nt, Human
gagauagcgccacugcacuccag

SEQ ID NO: 450136 - RNA, 23 nt, Human
gagauugugccacugcacuccag

SEQ ID NO: 450137 - RNA, 20 nt, Human
gaggcaggaggauugcuuga

SEQ ID NO: 450138 - RNA, 21 nt, Human
gagggacugucugaggcagug

SEQ ID NO: 450139 - RNA, 22 nt, Human
gaggggcagaacacaccauggg

SEQ ID NO: 450140 - RNA, 18 nt, Human
gagguugcagugagccaa

SEQ ID NO: 450141 - RNA, 19 nt, Human
gagguugcagugagccaag

SEQ ID NO: 450142 - RNA, 24 nt, Human
gauaaggccgggugugguggcuca

SEQ ID NO: 450143 - RNA, 19 nt, Human
gaucaccugaggucagugu

SEQ ID NO: 450144 - RNA, 21 nt, Human
gaucaccugaggucaguguga

SEQ ID NO: 450145 - RNA, 18 nt, Human
gcaccggcucugcccagc

SEQ ID NO: 450146 - RNA, 24 nt, Human
gcacuccagccugggcaacagagu

SEQ ID NO: 450147 - RNA, 23 nt, Human
gcacuccagccugggcgacagag

SEQ ID NO: 450148 - RNA, 24 nt, Human
gccaacauggcgagaccccgucuc

SEQ ID NO: 450149 - RNA, 23 nt, Human
gccacagagagagacccugucuc

SEQ ID NO: 450150 - RNA, 22 nt, Human
gccacugcacuccagccugggc

SEQ ID NO: 450151 - RNA, 22 nt, Human
gccacugcacuccagccugggc

SEQ ID NO: 450152 - RNA, 24 nt, Human
gccacugcacuccagccugggcaa

SEQ ID NO: 450153 - RNA, 24 nt, Human
gccacugcacuccagccugggcga

SEQ ID NO: 450154 - RNA, 20 nt, Human
gcuguaaucacaccacugca

SEQ ID NO: 450155 - RNA, 18 nt, Human
gcuuaaugccuauccuug

SEQ ID NO: 450156 - RNA, 23 nt, Human
ggaagaacaaagcuggaaaggga

SEQ ID NO: 450157 - RNA, 20 nt, Human
ggagaagggaggugaaggcc

SEQ ID NO: 450158 - RNA, 19 nt, Human
ggagauaaggccgggugug

SEQ ID NO: 450159 - RNA, 22 nt, Human
ggagauaaggccggguguggug

SEQ ID NO: 450160 - RNA, 20 nt, Human
ggaggcugaggcaggagaau

SEQ ID NO: 450161 - RNA, 22 nt, Human
ggagguccaggcuacaugagcu

SEQ ID NO: 450162 - RNA, 18 nt, Human
ggagguugcagugagcca

SEQ ID NO: 450163 - RNA, 20 nt, Human
ggagguugcagugagccaag

SEQ ID NO: 450164 - RNA, 20 nt, Human
ggcaggagagggagguggug

SEQ ID NO: 450165 - RNA, 22 nt, Human
ggcaguggcaccugggcagagc

SEQ ID NO: 450166 - RNA, 22 nt, Human
gggacaggugggaggggcagaa

SEQ ID NO: 450167 - RNA, 20 nt, Human
gggagcagcaggagggcccc

SEQ ID NO: 450168 - RNA, 19 nt, Human
gggaggcagaggcaggagg

SEQ ID NO: 450169 - RNA, 19 nt, Human
gggguggaaaggcaaggga

SEQ ID NO: 450170 - RNA, 20 nt, Human
gggguuugggcaguggcacc

SEQ ID NO: 450171 - RNA, 22 nt, Human
ggguggaggcggugcucccaga

SEQ ID NO: 450172 - RNA, 18 nt, Human
gguagaaguugcagugag

SEQ ID NO: 450173 - RNA, 20 nt, Human
gguagaaguugcagugagcc

SEQ ID NO: 450174 - RNA, 23 nt, Human
gguagaaguugcagugagccgag

SEQ ID NO: 450175 - RNA, 25 nt, Human
gguagacagaggcacaaaaaaggga

SEQ ID NO: 450176 - RNA, 24 nt, Human
ggugacucaugccuguagucccag

SEQ ID NO: 450177 - RNA, 24 nt, Human
gguggcucacaccuguaaucccag

SEQ ID NO: 450178 - RNA, 22 nt, Human
ggugggaggaucgcuugagucc

SEQ ID NO: 450179 - RNA, 23 nt, Human
ggugugguggcucacaccuguaa

SEQ ID NO: 450180 - RNA, 23 nt, Human
guggcucacaccuguaaucccag

SEQ ID NO: 450181 - RNA, 18 nt, Human
gugugguggcucacaccu

SEQ ID NO: 450182 - RNA, 24 nt, Human
guugcagugagccgagauagcgcc

SEQ ID NO: 450183 - RNA, 20 nt, Human
guuugagaccagcuggggca

SEQ ID NO: 450184 - RNA, 26 nt, Human
uaacguacacagaaguggguuuucaa

SEQ ID NO: 450185 - RNA, 22 nt, Human
uaaggccgggugugguggcuca

SEQ ID NO: 450186 - RNA, 24 nt, Human
uaaggccgggugugguggcucaca

SEQ ID NO: 450187 - RNA, 19 nt, Human
uacucggaaguuuggggca

SEQ ID NO: 450188 - RNA, 18 nt, Human
uacucggaaguuuggggg

SEQ ID NO: 450189 - RNA, 24 nt, Human
uagacagaggcacaaaaaagggaa

SEQ ID NO: 450190 - RNA, 24 nt, Human
uagcucucaggaccuuccaauucu

SEQ ID NO: 450191 - RNA, 18 nt, Human
uaggaccucaagcugaga

SEQ ID NO: 450192 - RNA, 22 nt, Human
uauuccuucaggaccagccuca

SEQ ID NO: 450193 - RNA, 25 nt, Human
uauugcauuccagcuuagccaggcg

SEQ ID NO: 450194 - RNA, 21 nt, Human
ucagggccgagauggggagga

SEQ ID NO: 450195 - RNA, 20 nt, Human
ucaguggccagggggcuguc

SEQ ID NO: 450196 - RNA, 20 nt, Human
uccaagagacugaaagccug

SEQ ID NO: 450197 - RNA, 21 nt, Human
uccaagagacugaaagccugc

SEQ ID NO: 450198 - RNA, 22 nt, Human
uccaagagacugaaagccugcc

SEQ ID NO: 450199 - RNA, 19 nt, Human
uccaagggagggaagagcc

SEQ ID NO: 450200 - RNA, 20 nt, Human
uccaagggagggaagagccc

SEQ ID NO: 450201 - RNA, 23 nt, Human
uccagccugggcaacagagugag

SEQ ID NO: 450202 - RNA, 24 nt, Human
uccagccugggcaacagagugaga

SEQ ID NO: 450203 - RNA, 23 nt, Human
uccagccugggcgacagagugag

SEQ ID NO: 450204 - RNA, 24 nt, Human
uccagccugggcgacagagugaga

SEQ ID NO: 450205 - RNA, 25 nt, Human
ucccagcuacucggaaguuuggggg

SEQ ID NO: 450206 - RNA, 23 nt, Human
ucccucgacccgacuaccucccu

SEQ ID NO: 450207 - RNA, 21 nt, Human
uccgcaguuggaggcggggac

SEQ ID NO: 450208 - RNA, 25 nt, Human
ucgcaccggcucugcccagcggcgc

SEQ ID NO: 450209 - RNA, 19 nt, Human
ucucaagaagcccauggag

SEQ ID NO: 450210 - RNA, 21 nt, Human
ucucaggaccuuccaauucug

SEQ ID NO: 450211 - RNA, 20 nt, Human
ucuccaaaaaaaaaaaaaaa

SEQ ID NO: 450212 - RNA, 24 nt, Human
ucugcagcccuuccugcuggagag

SEQ ID NO: 450213 - RNA, 21 nt, Human
ugagaccagccuggccaacau

SEQ ID NO: 450214 - RNA, 23 nt, Human
ugagaccagccuggccaacaugg

SEQ ID NO: 450215 - RNA, 24 nt, Human
ugagaccuggguggaggcggugcu

SEQ ID NO: 450216 - RNA, 19 nt, Human
ugagagggguggaaaggca

SEQ ID NO: 450217 - RNA, 23 nt, Human
ugagcccagggguuugagaccag

SEQ ID NO: 450218 - RNA, 22 nt, Human
ugagccgagauagcgccacugc

SEQ ID NO: 450219 - RNA, 24 nt, Human
ugaggcaggagaauugcuugaacc

SEQ ID NO: 450220 - RNA, 25 nt, Human
ugaggcaggagaauugcuugaaccc

SEQ ID NO: 450221 - RNA, 26 nt, Human
ugaggcagugaguacuauuucuggug

SEQ ID NO: 450222 - RNA, 23 nt, Human
ugagggugggguagacagaggca

SEQ ID NO: 450223 - RNA, 22 nt, Human
ugaggucagugugagaccagcc

SEQ ID NO: 450224 - RNA, 23 nt, Human
ugaguccagcaagcagaggucgg

SEQ ID NO: 450225 - RNA, 19 nt, Human
ugauucagaaccagaccuu

SEQ ID NO: 450226 - RNA, 19 nt, Human
ugauucucauggaggacac

SEQ ID NO: 450227 - RNA, 21 nt, Human
ugcccaagacccucuuuugac

SEQ ID NO: 450228 - RNA, 23 nt, Human
ugccugcaaucccaacacuuugg

SEQ ID NO: 450229 - RNA, 24 nt, Human
ugccugcaaucccaacacuuuggg

SEQ ID NO: 450230 - RNA, 23 nt, Human
ugccuguagucccagcuacucgg

SEQ ID NO: 450231 - RNA, 24 nt, Human
ugcugcccaccuguggucccagcu

SEQ ID NO: 450232 - RNA, 20 nt, Human
ugcuggagagagggucugaa

SEQ ID NO: 450233 - RNA, 22 nt, Human
ugcuggagagagggucugaagc

SEQ ID NO: 450234 - RNA, 24 nt, Human
uggagacagaguagacugugggag

SEQ ID NO: 450235 - RNA, 24 nt, Human
uggagagagggucugaagcucagg

SEQ ID NO: 450236 - RNA, 21 nt, Human
uggagggagcagcaggagggc

SEQ ID NO: 450237 - RNA, 18 nt, Human
uggaucaccugaggucag

SEQ ID NO: 450238 - RNA, 19 nt, Human
uggaucaccugaggucagu

SEQ ID NO: 450239 - RNA, 27 nt, Human
uggaucaccugaggucagugugagacc

SEQ ID NO: 450240 - RNA, 22 nt, Human
uggcaggagagggagguggugg

SEQ ID NO: 450241 - RNA, 26 nt, Human
uggcaggagagggagguggugggcca

SEQ ID NO: 450242 - RNA, 21 nt, Human
uggcucacaccuguaauccca

SEQ ID NO: 450243 - RNA, 22 nt, Human
uggcucacaccuguaaucccag

SEQ ID NO: 450244 - RNA, 24 nt, Human
uggcucacaccuguaaucccagca

SEQ ID NO: 450245 - RNA, 24 nt, Human
uggcucaugccugcaaucccaaca

SEQ ID NO: 450246 - RNA, 19 nt, Human
ugggaggcagaggcaggag

SEQ ID NO: 450247 - RNA, 22 nt, Human
ugggaggcagaggcaggaggau

SEQ ID NO: 450248 - RNA, 24 nt, Human
ugggaggcagaggcaggaggauug

SEQ ID NO: 450249 - RNA, 28 nt, Human
ugggaggcagaggcaggaggauugcuug

SEQ ID NO: 450250 - RNA, 24 nt, Human
ugggaggccaaggcggguggauca

SEQ ID NO: 450251 - RNA, 23 nt, Human
ugggagggacugucugaggcagu

SEQ ID NO: 450252 - RNA, 21 nt, Human
ugggaggggcagaacacacca

SEQ ID NO: 450253 - RNA, 21 nt, Human
ugggaggggcagaacacacca

SEQ ID NO: 450254 - RNA, 23 nt, Human
ugggaggggcagaacacaccaug

SEQ ID NO: 450255 - RNA, 21 nt, Human
ugggcaguggcaccugggcca

SEQ ID NO: 450256 - RNA, 18 nt, Human
uggggcccagggguuugg

SEQ ID NO: 450257 - RNA, 22 nt, Human
ugggggaggcaugugcccaaga

SEQ ID NO: 450258 - RNA, 21 nt, Human
ugggucugcccucgggugggg

SEQ ID NO: 450259 - RNA, 24 nt, Human
uggugacucaugccuguaguccca

SEQ ID NO: 450260 - RNA, 24 nt, Human
ugguggcucacaccuguaauccca

SEQ ID NO: 450261 - RNA, 21 nt, Human
uguaaucacaccacugcacuu

SEQ ID NO: 450262 - RNA, 23 nt, Human
uguagucccagcuacucggaagu

SEQ ID NO: 450263 - RNA, 20 nt, Human
ugucugaggcagugaguacu

SEQ ID NO: 450264 - RNA, 20 nt, Human
ugugggagggacugucugag

SEQ ID NO: 450265 - RNA, 23 nt, Human
uguggugcugcccaccugugguc

SEQ ID NO: 450266 - RNA, 20 nt, Human
uuagccccccagauuaggcu

SEQ ID NO: 450267 - RNA, 18 nt, Human
uucauaugaaaacugaag

SEQ ID NO: 450268 - RNA, 19 nt, Human
uucuuggcaugggaccugg

SEQ ID NO: 450269 - RNA, 24 nt, Human
uugaacccgggaggcggagguugc

SEQ ID NO: 450270 - RNA, 20 nt, Human
uugcagugagccaagaccac

SEQ ID NO: 450271 - RNA, 19 nt, Human
uugcagugagccgagauag

SEQ ID NO: 450272 - RNA, 22 nt, Human
uugcagugagccgagauagcgc

SEQ ID NO: 450273 - RNA, 24 nt, Human
uugcuugaacccgggaggcggagg

SEQ ID NO: 450274 - RNA, 24 nt, Human
uugcuugagcuugggagguccagg

SEQ ID NO: 450275 - RNA, 21 nt, Human
uugggaggcagaggcaggagg

SEQ ID NO: 450276 - RNA, 23 nt, Human
uugugccacugcacuccagccug

SEQ ID NO: 450277 - RNA, 18 nt, Human
uuuaauuuucuaugcuuc

SEQ ID NO: 450278 - RNA, 21 nt, Human
auacuguaauccuccaguuac

SEQ ID NO: 450279 - RNA, 20 nt, Human
cagcacuguagaaauaaaau

SEQ ID NO: 450280 - RNA, 24 nt, Human
cauacuguaauccuccaguuacau

SEQ ID NO: 450281 - RNA, 21 nt, Human
cuccacaaacagaagugcccu

SEQ ID NO: 450282 - RNA, 24 nt, Human
gcacuguagaaauaaaaucagagg

SEQ ID NO: 450283 - RNA, 21 nt, Human
uaaaaucagagguaagcauac

SEQ ID NO: 450284 - RNA, 18 nt, Human
ugacaauguggcaggcuu

SEQ ID NO: 450285 - RNA, 20 nt, Human
uguagaaauaaaaucagagg

SEQ ID NO: 450286 - RNA, 19 nt, Human
uuacuccacaaacagaagu

SEQ ID NO: 450287 - RNA, 25 nt, Human
uuauagcagcacuguagaaauaaaa

SEQ ID NO: 450288 - RNA, 20 nt, Human
uugacaauguggcaggcuuu

SEQ ID NO: 450289 - RNA, 22 nt, Human
uuuauuaacuucuaagccauac

SEQ ID NO: 450290 - RNA, 20 nt, Human
uuuuuauuaacuucuaagcc

SEQ ID NO: 450291 - RNA, 24 nt, Human
uccucuuuaaccugaguuuugucg

SEQ ID NO: 450292 - RNA, 24 nt, Human
ucgucaggaugcuguauuuugggg

SEQ ID NO: 450293 - RNA, 21 nt, Human
aaaaacuggggaaaauuucaa

SEQ ID NO: 450294 - RNA, 22 nt, Human
aaaccccaucucuacuaaaaaa

SEQ ID NO: 450295 - RNA, 23 nt, Human
aaagagacaggacggucgauugg

SEQ ID NO: 450296 - RNA, 21 nt, Human
aaaugucuucuggggaggccc

SEQ ID NO: 450297 - RNA, 24 nt, Human
aaccugggcgacagagcgagacuc

SEQ ID NO: 450298 - RNA, 19 nt, Human
aacguggugaaaccccauc

SEQ ID NO: 450299 - RNA, 20 nt, Human
aacguggugaaaccccaucu

SEQ ID NO: 450300 - RNA, 21 nt, Human
aacguggugaaaccccaucuc

SEQ ID NO: 450301 - RNA, 20 nt, Human
aacuuagccaggcgcagugg

SEQ ID NO: 450302 - RNA, 22 nt, Human
aagacaaacauugcauguucuu

SEQ ID NO: 450303 - RNA, 20 nt, Human
aaggcagguggaucacgagg

SEQ ID NO: 450304 - RNA, 21 nt, Human
aauauggugaaaccccugucu

SEQ ID NO: 450305 - RNA, 24 nt, Human
aaucguccucccaggccaggcucc

SEQ ID NO: 450306 - RNA, 22 nt, Human
acaaagaaagaaugaauaagac

SEQ ID NO: 450307 - RNA, 23 nt, Human
acacacacacacacacacacaca

SEQ ID NO: 450308 - RNA, 18 nt, Human
acaccacugcacuccagc

SEQ ID NO: 450309 - RNA, 20 nt, Human
acaccacugcacuccagccu

SEQ ID NO: 450310 - RNA, 18 nt, Human
acagaaagacaaacauug

SEQ ID NO: 450311 - RNA, 24 nt, Human
acagagcgagacuccaucucaaaa

SEQ ID NO: 450312 - RNA, 22 nt, Human
accacacacacacacacacaca

SEQ ID NO: 450313 - RNA, 24 nt, Human
accacacacacacacacacacaca

SEQ ID NO: 450314 - RNA, 19 nt, Human
accacugcacuccagccug

SEQ ID NO: 450315 - RNA, 18 nt, Human
accccaucucuacuaaaa

SEQ ID NO: 450316 - RNA, 22 nt, Human
acccugaugaccccagcugcca

SEQ ID NO: 450317 - RNA, 23 nt, Human
accugggcgacagagcgagacuc

SEQ ID NO: 450318 - RNA, 21 nt, Human
acgugugcagagcagaaaacc

SEQ ID NO: 450319 - RNA, 20 nt, Human
acucauggagauaagagugg

SEQ ID NO: 450320 - RNA, 18 nt, Human
acugcacuccaaccuggg

SEQ ID NO: 450321 - RNA, 24 nt, Human
acugcacuccaaccugggcgacag

SEQ ID NO: 450322 - RNA, 18 nt, Human
acugcacuccagccuggg

SEQ ID NO: 450323 - RNA, 23 nt, Human
acugcacuccagccugggugaca

SEQ ID NO: 450324 - RNA, 24 nt, Human
acuuugggaggucaaggcagguua

SEQ ID NO: 450325 - RNA, 20 nt, Human
agaaccaaaaccccacucua

SEQ ID NO: 450326 - RNA, 22 nt, Human
agaaucguuggaacccaggagg

SEQ ID NO: 450327 - RNA, 21 nt, Human
agacaaacauugcauguucuu

SEQ ID NO: 450328 - RNA, 19 nt, Human
agaugccucacaaguucag

SEQ ID NO: 450329 - RNA, 20 nt, Human
agcacuuugggaggucaagg

SEQ ID NO: 450330 - RNA, 20 nt, Human
agccggguauaguggugggc

SEQ ID NO: 450331 - RNA, 19 nt, Human
agccuggccaauaugguga

SEQ ID NO: 450332 - RNA, 22 nt, Human
agccuggccaauauggugaaac

SEQ ID NO: 450333 - RNA, 24 nt, Human
agccuggccaauauggugaaaccc

SEQ ID NO: 450334 - RNA, 26 nt, Human
aggaggucaggagaucgagaccaucc

SEQ ID NO: 450335 - RNA, 23 nt, Human
aggcaggagaaucguuggaaccc

SEQ ID NO: 450336 - RNA, 24 nt, Human
aggcaggagaauggcgugaacccg

SEQ ID NO: 450337 - RNA, 20 nt, Human
aggcaggcgcaucaggaggu

SEQ ID NO: 450338 - RNA, 24 nt, Human
aggcaggcgcaucaggaggucagg

SEQ ID NO: 450339 - RNA, 18 nt, Human
aggcagguggaucacgag

SEQ ID NO: 450340 - RNA, 24 nt, Human
aggcagguggaucacgaggucagg

SEQ ID NO: 450341 - RNA, 24 nt, Human
aggcgcaguggcucacaccuauaa

SEQ ID NO: 450342 - RNA, 22 nt, Human
aggcgcaucaggaggucggggc

SEQ ID NO: 450343 - RNA, 21 nt, Human
aggcggagcuugcagugagcc

SEQ ID NO: 450344 - RNA, 24 nt, Human
aggcggagcuugcagugagccgag

SEQ ID NO: 450345 - RNA, 24 nt, Human
aggcggagguugcagugagccaag

SEQ ID NO: 450346 - RNA, 20 nt, Human
aggcugaggcaggagaaucg

SEQ ID NO: 450347 - RNA, 23 nt, Human
aggcugaggcaggagaaucguug

SEQ ID NO: 450348 - RNA, 19 nt, Human
aggcugaggcaggagaaug

SEQ ID NO: 450349 - RNA, 23 nt, Human
agggagauggggaagguuaaugg

SEQ ID NO: 450350 - RNA, 24 nt, Human
agggguagggcaucauccgggagc

SEQ ID NO: 450351 - RNA, 18 nt, Human
agguggaucacgagguca

SEQ ID NO: 450352 - RNA, 24 nt, Human
agguggaucacgaggucaggaguu

SEQ ID NO: 450353 - RNA, 24 nt, Human
aguggcucacaccuauaaucccag

SEQ ID NO: 450354 - RNA, 24 nt, Human
aucacaccacugcacuccagccug

SEQ ID NO: 450355 - RNA, 20 nt, Human
aucacgaggucaggaguucc

SEQ ID NO: 450356 - RNA, 18 nt, Human
aucauccgggagcgccca

SEQ ID NO: 450357 - RNA, 19 nt, Human
augacugguuccucauuuu

SEQ ID NO: 450358 - RNA, 31 nt, Human
auggguaccacacacacacacacacacacag

SEQ ID NO: 450359 - RNA, 24 nt, Human
auugcgccacugcacuccaaccug

SEQ ID NO: 450360 - RNA, 23 nt, Human
auugcucgacucccgaucugcag

SEQ ID NO: 450361 - RNA, 24 nt, Human
auuguaacuggauuguuuguaacu

SEQ ID NO: 450362 - RNA, 22 nt, Human
caaggcagguggaucacgaggu

SEQ ID NO: 450363 - RNA, 24 nt, Human
caaggcagguggaucacgagguca

SEQ ID NO: 450364 - RNA, 25 nt, Human
caauauggugaaaccccugucucua

SEQ ID NO: 450365 - RNA, 23 nt, Human
cacacacacacacaaagaaagaa

SEQ ID NO: 450366 - RNA, 20 nt, Human
cacacacacacacacacaca

SEQ ID NO: 450367 - RNA, 20 nt, Human
cacacacacacacacacaca

SEQ ID NO: 450368 - RNA, 20 nt, Human
cacacacacacacacacaca

SEQ ID NO: 450369 - RNA, 20 nt, Human
cacacacacacacacacaca

SEQ ID NO: 450370 - RNA, 20 nt, Human
cacacacacacacacacaca

SEQ ID NO: 450371 - RNA, 20 nt, Human
cacacacacacacacacaca

SEQ ID NO: 450372 - RNA, 22 nt, Human
cacacacacacacacacacaaa

SEQ ID NO: 450373 - RNA, 22 nt, Human
cacacacacacacacacacaca

SEQ ID NO: 450374 - RNA, 22 nt, Human
cacacacacacacacacacaca

SEQ ID NO: 450375 - RNA, 22 nt, Human
cacacacacacacacacacaca

SEQ ID NO: 450376 - RNA, 22 nt, Human
cacacacacacacacacacaca

SEQ ID NO: 450377 - RNA, 23 nt, Human
cacacacacacacacacacacaa

SEQ ID NO: 450378 - RNA, 26 nt, Human
cacacacacacacacacacacacaca

SEQ ID NO: 450379 - RNA, 26 nt, Human
cacacacacacacacacacacacaca

SEQ ID NO: 450380 - RNA, 26 nt, Human
cacacacacacacacacacacacaca

SEQ ID NO: 450381 - RNA, 21 nt, Human
cacaccacugcacuccagccu

SEQ ID NO: 450382 - RNA, 22 nt, Human
cacaccuauaaucccagcacug

SEQ ID NO: 450383 - RNA, 24 nt, Human
cacaccuguuauccuagcacuuug

SEQ ID NO: 450384 - RNA, 23 nt, Human
cacacugcucuuccuaagccuua

SEQ ID NO: 450385 - RNA, 26 nt, Human
caccacugcacuccagccugggugac

SEQ ID NO: 450386 - RNA, 21 nt, Human
caccuauaaucccagcacugg

SEQ ID NO: 450387 - RNA, 22 nt, Human
caccuucagcuuucuuuaguuc

SEQ ID NO: 450388 - RNA, 23 nt, Human
cacuccaaccugggcgacagagc

SEQ ID NO: 450389 - RNA, 18 nt, Human
cacuccagccugggugac

SEQ ID NO: 450390 - RNA, 19 nt, Human
cacuccagccugggugaca

SEQ ID NO: 450391 - RNA, 23 nt, Human
cacuccagccugggugacaccag

SEQ ID NO: 450392 - RNA, 23 nt, Human
cacugcacuccaaccugggcgac

SEQ ID NO: 450393 - RNA, 24 nt, Human
cacugcacuccaaccugggcgaca

SEQ ID NO: 450394 - RNA, 19 nt, Human
cacugcacuccagccuggg

SEQ ID NO: 450395 - RNA, 19 nt, Human
cacugcacuccagccuggg

SEQ ID NO: 450396 - RNA, 22 nt, Human
cacugcacuccagccuggguga

SEQ ID NO: 450397 - RNA, 23 nt, Human
cacugcacuccagccugggugac

SEQ ID NO: 450398 - RNA, 24 nt, Human
cacugcacuccagccugggugaca

SEQ ID NO: 450399 - RNA, 22 nt, Human
cagcacugggaggcugaggcag

SEQ ID NO: 450400 - RNA, 24 nt, Human
cagcuacucaggaggcugaggcag

SEQ ID NO: 450401 - RNA, 24 nt, Human
cagcuacucgggaggcugaggcag

SEQ ID NO: 450402 - RNA, 23 nt, Human
cagcugccaaggaaacccccagu

SEQ ID NO: 450403 - RNA, 19 nt, Human
ccacacacacacacacaca

SEQ ID NO: 450404 - RNA, 21 nt, Human
ccacacacacacacacacaca

SEQ ID NO: 450405 - RNA, 24 nt, Human
ccacacugcucuuccuaagccuua

SEQ ID NO: 450406 - RNA, 18 nt, Human
ccacugcacuccaaccug

SEQ ID NO: 450407 - RNA, 21 nt, Human
ccacugcacuccaaccugggc

SEQ ID NO: 450408 - RNA, 24 nt, Human
ccacugcacuccaaccugggcgac

SEQ ID NO: 450409 - RNA, 20 nt, Human
ccacugcacuccagccuggg

SEQ ID NO: 450410 - RNA, 20 nt, Human
ccacugcacuccagccuggg

SEQ ID NO: 450411 - RNA, 20 nt, Human
ccacugcacuccagccuggg

SEQ ID NO: 450412 - RNA, 21 nt, Human
ccacugcacuccagccugggu

SEQ ID NO: 450413 - RNA, 21 nt, Human
ccacugcacuccagccugggu

SEQ ID NO: 450414 - RNA, 23 nt, Human
ccacugcacuccagccuggguga

SEQ ID NO: 450415 - RNA, 24 nt, Human
ccacugcacuccagccugggugac

SEQ ID NO: 450416 - RNA, 25 nt, Human
ccacugcacuccagccugggugaca

SEQ ID NO: 450417 - RNA, 24 nt, Human
ccagcacugggaggcugaggcagg

SEQ ID NO: 450418 - RNA, 22 nt, Human
ccaggaggcggagguugcagug

SEQ ID NO: 450419 - RNA, 22 nt, Human
ccaggccaggcuccugcuggcu

SEQ ID NO: 450420 - RNA, 23 nt, Human
ccaggcuccugcuggcugcgcug

SEQ ID NO: 450421 - RNA, 23 nt, Human
cccacucuagauuuacccaggaa

SEQ ID NO: 450422 - RNA, 22 nt, Human
ccccagcugccaaggaaacccc

SEQ ID NO: 450423 - RNA, 24 nt, Human
ccccugucucuacuaaaaauacaa

SEQ ID NO: 450424 - RNA, 21 nt, Human
ccucaggcaacccuguagccc

SEQ ID NO: 450425 - RNA, 22 nt, Human
ccucauuuuuuucucccuccca

SEQ ID NO: 450426 - RNA, 23 nt, Human
ccuggccaauauggugaaacccc

SEQ ID NO: 450427 - RNA, 25 nt, Human
ccuggccaauauggugaaaccccug

SEQ ID NO: 450428 - RNA, 22 nt, Human
ccuggcuaacguggugaaaccc

SEQ ID NO: 450429 - RNA, 23 nt, Human
ccuggcuaacguggugaaacccc

SEQ ID NO: 450430 - RNA, 24 nt, Human
ccuggcuaacguggugaaacccca

SEQ ID NO: 450431 - RNA, 19 nt, Human
ccugggacccacaccucag

SEQ ID NO: 450432 - RNA, 19 nt, Human
ccuguagucccagcuacuc

SEQ ID NO: 450433 - RNA, 21 nt, Human
ccuguagucccagcuacucag

SEQ ID NO: 450434 - RNA, 22 nt, Human
ccuguagucccagcuacucagg

SEQ ID NO: 450435 - RNA, 27 nt, Human
cgaaaaauguauucccgaaagccgcug

SEQ ID NO: 450436 - RNA, 24 nt, Human
cgagaccagccuggccaauauggu

SEQ ID NO: 450437 - RNA, 24 nt, Human
cgagaccauccuggcuaacguggu

SEQ ID NO: 450438 - RNA, 23 nt, Human
cgagacuccaucucaaaaaaaaa

SEQ ID NO: 450439 - RNA, 26 nt, Human
cgccacugcacuccaaccugggcgac

SEQ ID NO: 450440 - RNA, 18 nt, Human
cgggagcgcccaacuggu

SEQ ID NO: 450441 - RNA, 24 nt, Human
cuaaaaaaaaauacaaaaaauuag

SEQ ID NO: 450442 - RNA, 22 nt, Human
cuacuaaaaaaaaauacaaaaa

SEQ ID NO: 450443 - RNA, 22 nt, Human
cucacaccuauaaucccagcac

SEQ ID NO: 450444 - RNA, 24 nt, Human
cucacaccuguuauccuagcacuu

SEQ ID NO: 450445 - RNA, 24 nt, Human
cucauuuuuuucucccucccaucc

SEQ ID NO: 450446 - RNA, 19 nt, Human
cuccaucucaaaaaaaaaa

SEQ ID NO: 450447 - RNA, 19 nt, Human
cucuacuaaaaaaaaauac

SEQ ID NO: 450448 - RNA, 22 nt, Human
cucuagauuuacccaggaaaca

SEQ ID NO: 450449 - RNA, 24 nt, Human
cuuagccaggcgcaguggcucaca

SEQ ID NO: 450450 - RNA, 22 nt, Human
cuugaaaguacccugaugaccc

SEQ ID NO: 450451 - RNA, 19 nt, Human
cuugcagugagccgagauu

SEQ ID NO: 450452 - RNA, 21 nt, Human
cuugcagugagccgagauugc

SEQ ID NO: 450453 - RNA, 18 nt, Human
cuuggcagggugcggugg

SEQ ID NO: 450454 - RNA, 18 nt, Human
gaaaaauguauucccgaa

SEQ ID NO: 450455 - RNA, 25 nt, Human
gacauacuauuugauaacacaacca

SEQ ID NO: 450456 - RNA, 18 nt, Human
gagauugcgccacugcac

SEQ ID NO: 450457 - RNA, 18 nt, Human
gagcuugcagugagccga

SEQ ID NO: 450458 - RNA, 23 nt, Human
gagcuugcagugagccgagauug

SEQ ID NO: 450459 - RNA, 21 nt, Human
gaggcggagguugcagugagc

SEQ ID NO: 450460 - RNA, 18 nt, Human
gagguugcagugagccaa

SEQ ID NO: 450461 - RNA, 22 nt, Human
gagguugcagugagccaagauc

SEQ ID NO: 450462 - RNA, 21 nt, Human
gaucacgaggucaggaguucg

SEQ ID NO: 450463 - RNA, 22 nt, Human
gaucacgaggucaggaguucga

SEQ ID NO: 450464 - RNA, 24 nt, Human
gaucacgaggucaggaguucgaga

SEQ ID NO: 450465 - RNA, 21 nt, Human
gcagaaaaccgaggaagaagu

SEQ ID NO: 450466 - RNA, 21 nt, Human
gcagagcagaaaaccgaggaa

SEQ ID NO: 450467 - RNA, 22 nt, Human
gcaggagaaucguuggaaccca

SEQ ID NO: 450468 - RNA, 22 nt, Human
gcagggagauggggaagguuaa

SEQ ID NO: 450469 - RNA, 20 nt, Human
gccaagaucacaccacugca

SEQ ID NO: 450470 - RNA, 25 nt, Human
gccaauauggugaaaccccugucuc

SEQ ID NO: 450471 - RNA, 24 nt, Human
gccacugcacuccaaccugggcga

SEQ ID NO: 450472 - RNA, 18 nt, Human
gcccgggcugcucgcacc

SEQ ID NO: 450473 - RNA, 23 nt, Human
gccuguagucccagcuacucagg

SEQ ID NO: 450474 - RNA, 18 nt, Human
gcgcuggugcagucucug

SEQ ID NO: 450475 - RNA, 24 nt, Human
gcuaacguggugaaaccccaucuc

SEQ ID NO: 450476 - RNA, 22 nt, Human
gcugaggcaggagaauggcgug

SEQ ID NO: 450477 - RNA, 19 nt, Human
gcugccaaggaaaccccca

SEQ ID NO: 450478 - RNA, 21 nt, Human
gcuggagucagaggcccgucg

SEQ ID NO: 450479 - RNA, 21 nt, Human
ggagaaucguuggaacccagg

SEQ ID NO: 450480 - RNA, 22 nt, Human
ggagauggggaagguuaauggg

SEQ ID NO: 450481 - RNA, 18 nt, Human
ggagcgcggggguaggca

SEQ ID NO: 450482 - RNA, 24 nt, Human
ggagcuugcagugagccgagauug

SEQ ID NO: 450483 - RNA, 20 nt, Human
ggagguugcagugagccaag

SEQ ID NO: 450484 - RNA, 24 nt, Human
ggagguugcagugagccaagauca

SEQ ID NO: 450485 - RNA, 18 nt, Human
ggcagccacacugcucuu

SEQ ID NO: 450486 - RNA, 21 nt, Human
ggggagggauucugggggugu

SEQ ID NO: 450487 - RNA, 22 nt, Human
gggggugucaccuucugguggc

SEQ ID NO: 450488 - RNA, 31 nt, Human
ggguaccacacacacacacacacacacacag

SEQ ID NO: 450489 - RNA, 24 nt, Human
gggugcgguggcucacaccuguua

SEQ ID NO: 450490 - RNA, 24 nt, Human
gguggcucacaccuguuauccuag

SEQ ID NO: 450491 - RNA, 25 nt, Human
gucaauaauaaugguacauuuuaaa

SEQ ID NO: 450492 - RNA, 23 nt, Human
guggaucacgaggucaggaguuc

SEQ ID NO: 450493 - RNA, 19 nt, Human
uaaagaaccaaaaccccac

SEQ ID NO: 450494 - RNA, 23 nt, Human
uaaagaaccaaaaccccacucua

SEQ ID NO: 450495 - RNA, 22 nt, Human
uaacguggugaaaccccaucuc

SEQ ID NO: 450496 - RNA, 24 nt, Human
uaacguggugaaaccccaucucua

SEQ ID NO: 450497 - RNA, 20 nt, Human
uaagaauacuaguuaguagg

SEQ ID NO: 450498 - RNA, 25 nt, Human
uaagaauacuaguuaguagggcugu

SEQ ID NO: 450499 - RNA, 24 nt, Human
uacccaggaaacagcuccuuuaau

SEQ ID NO: 450500 - RNA, 21 nt, Human
uacccugaugaccccagcugc

SEQ ID NO: 450501 - RNA, 24 nt, Human
uacccugaugaccccagcugccaa

SEQ ID NO: 450502 - RNA, 24 nt, Human
uagcacuuugggaggucaaggcag

SEQ ID NO: 450503 - RNA, 25 nt, Human
uagcacuuugggaggucaaggcagg

SEQ ID NO: 450504 - RNA, 24 nt, Human
uagccaggcgcaguggcucacacc

SEQ ID NO: 450505 - RNA, 23 nt, Human
uaguuaguagggcugugcuuucu

SEQ ID NO: 450506 - RNA, 23 nt, Human
ucacaccacugcacuccagccug

SEQ ID NO: 450507 - RNA, 18 nt, Human
ucacgaggucaggaguuc

SEQ ID NO: 450508 - RNA, 24 nt, Human
ucacgaggucaggaguucgagacc

SEQ ID NO: 450509 - RNA, 22 nt, Human
ucagcuuucuuuaguuccucag

SEQ ID NO: 450510 - RNA, 24 nt, Human
ucaggaggucaggagaucgagacc

SEQ ID NO: 450511 - RNA, 25 nt, Human
ucaggaggucaggagaucgagaccc

SEQ ID NO: 450512 - RNA, 24 nt, Human
uccaaccugggcgacagagcgaga

SEQ ID NO: 450513 - RNA, 24 nt, Human
uccagccugggugacaccaggaga

SEQ ID NO: 450514 - RNA, 22 nt, Human
uccaucucaaaaaaaaaaaaaa

SEQ ID NO: 450515 - RNA, 18 nt, Human
ucccaggccaggcuccug

SEQ ID NO: 450516 - RNA, 18 nt, Human
ucccgaugggucgccccc

SEQ ID NO: 450517 - RNA, 22 nt, Human
uccucaguuucccgggggcaga

SEQ ID NO: 450518 - RNA, 24 nt, Human
uccucauuuuuuucucccucccaa

SEQ ID NO: 450519 - RNA, 26 nt, Human
uccucauuuuuuucucccucccaucc

SEQ ID NO: 450520 - RNA, 24 nt, Human
ucgggaggcugaggcaggagaauc

SEQ ID NO: 450521 - RNA, 18 nt, Human
ucucaaaaaaaaaaaaaa

SEQ ID NO: 450522 - RNA, 26 nt, Human
ucucuacuaaaaaaaaauacaaaaaa

SEQ ID NO: 450523 - RNA, 21 nt, Human
ucucuacuaaaaauacaaaaa

SEQ ID NO: 450524 - RNA, 25 nt, Human
ucugggggugucaccuucugguggc

SEQ ID NO: 450525 - RNA, 19 nt, Human
ugaaaccccaucucuacua

SEQ ID NO: 450526 - RNA, 21 nt, Human
ugaaaguacccugaugacccc

SEQ ID NO: 450527 - RNA, 24 nt, Human
ugaaaguacccugaugaccccagc

SEQ ID NO: 450528 - RNA, 22 nt, Human
ugagccgagauugcgccacugc

SEQ ID NO: 450529 - RNA, 19 nt, Human
ugaggcaggagaaucguug

SEQ ID NO: 450530 - RNA, 24 nt, Human
ugaggcaggagaaucguuggaacc

SEQ ID NO: 450531 - RNA, 23 nt, Human
ugaggcaggagaauggcgugaac

SEQ ID NO: 450532 - RNA, 24 nt, Human
ugaggcaggagaauggcgugaacc

SEQ ID NO: 450533 - RNA, 25 nt, Human
ugaggcaggagaauggcgugaaccc

SEQ ID NO: 450534 - RNA, 24 nt, Human
ugaggcaggcgcaucaggagguca

SEQ ID NO: 450535 - RNA, 21 nt, Human
ugauucgcuguauugcuggag

SEQ ID NO: 450536 - RNA, 28 nt, Human
ugcuuucuguguuaaaugucuucugggg

SEQ ID NO: 450537 - RNA, 24 nt, Human
uggaacccaggaggcggagguugc

SEQ ID NO: 450538 - RNA, 22 nt, Human
uggaucacgaggucaggaguuc

SEQ ID NO: 450539 - RNA, 25 nt, Human
uggccaauauggugaaaccccuguc

SEQ ID NO: 450540 - RNA, 22 nt, Human
uggcucacaccuauaaucccag

SEQ ID NO: 450541 - RNA, 24 nt, Human
uggcucacaccuauaaucccagca

SEQ ID NO: 450542 - RNA, 24 nt, Human
uggcucacaccuguuauccuagca

SEQ ID NO: 450543 - RNA, 19 nt, Human
ugggaggcugaggcaggcg

SEQ ID NO: 450544 - RNA, 24 nt, Human
ugggaggcugaggcaggcgcauca

SEQ ID NO: 450545 - RNA, 22 nt, Human
uggggaaaauuucaacgugugc

SEQ ID NO: 450546 - RNA, 23 nt, Human
uggggaggguaguuaggggcugg

SEQ ID NO: 450547 - RNA, 26 nt, Human
uggguaccacacacacacacacacac

SEQ ID NO: 450548 - RNA, 27 nt, Human
uggguaccacacacacacacacacaca

SEQ ID NO: 450549 - RNA, 19 nt, Human
uguagcccgggcugcucgc

SEQ ID NO: 450550 - RNA, 24 nt, Human
uuagccggguauaguggugggcac

SEQ ID NO: 450551 - RNA, 21 nt, Human
uuccuggaggcuggggagggu

SEQ ID NO: 450552 - RNA, 24 nt, Human
uugaaaguacccugaugaccccag

SEQ ID NO: 450553 - RNA, 19 nt, Human
uugaacucauggagauaag

SEQ ID NO: 450554 - RNA, 20 nt, Human
uugcagugagccaagaucac

SEQ ID NO: 450555 - RNA, 18 nt, Human
uugcagugagccgagauu

SEQ ID NO: 450556 - RNA, 19 nt, Human
uugcagugagccgagauug

SEQ ID NO: 450557 - RNA, 22 nt, Human
uugcagugagccgagauugcgc

SEQ ID NO: 450558 - RNA, 22 nt, Human
uuggcagggugcgguggcucac

SEQ ID NO: 450559 - RNA, 23 nt, Human
uuggcagggugcgguggcucaca

SEQ ID NO: 450560 - RNA, 19 nt, Human
uuugauguccugcacgagc

SEQ ID NO: 450561 - RNA, 21 nt, Human
aggcgcggaggaaauggugga

SEQ ID NO: 450562 - RNA, 22 nt, Human
ccggagcaggacuccuuguccu

SEQ ID NO: 450563 - RNA, 24 nt, Human
cggagcaggacuccuuguccuguu

SEQ ID NO: 450564 - RNA, 21 nt, Human
cuguggccacgugccggagca

SEQ ID NO: 450565 - RNA, 21 nt, Human
ggaaaugguggaaggcccagc

SEQ ID NO: 450566 - RNA, 19 nt, Human
uccugggcgcugcccccgu

SEQ ID NO: 450567 - RNA, 24 nt, Human
ucuccaggcacuguuguuguucuc

SEQ ID NO: 450568 - RNA, 21 nt, Human
ucuguggccacgugccggagc

SEQ ID NO: 450569 - RNA, 20 nt, Human
ugauccugggcgcugccccc

SEQ ID NO: 450570 - RNA, 20 nt, Human
ugggauucuccaggcacugu

SEQ ID NO: 450571 - RNA, 18 nt, Human
ugggugauccugggcgcu

SEQ ID NO: 450572 - RNA, 24 nt, Human
uuccccagagccgugggauucucc

SEQ ID NO: 450573 - RNA, 21 nt, Human
aacaacacccuagacccugca

SEQ ID NO: 450574 - RNA, 19 nt, Human
agaaauucggaccaacugc

SEQ ID NO: 450575 - RNA, 20 nt, Human
agcagcgcggggcuugcggc

SEQ ID NO: 450576 - RNA, 26 nt, Human
agcagcgcggggcuugcggccagggc

SEQ ID NO: 450577 - RNA, 20 nt, Human
caacaacacccuagacccug

SEQ ID NO: 450578 - RNA, 23 nt, Human
caacaacacccuagacccugcag

SEQ ID NO: 450579 - RNA, 26 nt, Human
cacuccaacaacacccuagacccugc

SEQ ID NO: 450580 - RNA, 20 nt, Human
cagaagggaccaggcuggug

SEQ ID NO: 450581 - RNA, 24 nt, Human
ccaacaacacccuagacccugcag

SEQ ID NO: 450582 - RNA, 26 nt, Human
ccaacaacacccuagacccugcaguu

SEQ ID NO: 450583 - RNA, 24 nt, Human
ccgacaacacccuagacccugcag

SEQ ID NO: 450584 - RNA, 22 nt, Human
ccgcgggcuucgggagaaauuc

SEQ ID NO: 450585 - RNA, 23 nt, Human
cgacaacacccuagacccugcag

SEQ ID NO: 450586 - RNA, 25 nt, Human
cgacaacacccuagacccugcaguu

SEQ ID NO: 450587 - RNA, 20 nt, Human
cuccgacaacacccuagacc

SEQ ID NO: 450588 - RNA, 22 nt, Human
cuucgggagaaauucggaccaa

SEQ ID NO: 450589 - RNA, 21 nt, Human
guaaguuguauuuggugccag

SEQ ID NO: 450590 - RNA, 24 nt, Human
uaaagagcacuauuuugacauuaa

SEQ ID NO: 450591 - RNA, 27 nt, Human
uagcagcgcggggcuugcggccagggc

SEQ ID NO: 450592 - RNA, 19 nt, Human
ucuuacccgcuccuccgcg

SEQ ID NO: 450593 - RNA, 18 nt, Human
ugcgaggaagaagggcgg

SEQ ID NO: 450594 - RNA, 18 nt, Human
ugcggccagggccgccuc

SEQ ID NO: 450595 - RNA, 20 nt, Human
uuggggccggauucgcgggg

SEQ ID NO: 450596 - RNA, 26 nt, Human
uuuuuuuuuuuuuuugugauucaggg

SEQ ID NO: 450597 - RNA, 21 nt, Human
uuuuuuuuuuuuuuuugugau

SEQ ID NO: 450598 - RNA, 24 nt, Human
aaaaaaaaaaagcauaugcuauag

SEQ ID NO: 450599 - RNA, 22 nt, Human
aaaacacccuucaacacagucc

SEQ ID NO: 450600 - RNA, 19 nt, Human
acacccuucaacacagucc

SEQ ID NO: 450601 - RNA, 19 nt, Human
agaaaaaaaacacccuuca

SEQ ID NO: 450602 - RNA, 18 nt, Human
agcaaaugaaagagcaca

SEQ ID NO: 450603 - RNA, 23 nt, Human
agguaauaauuaaaaaaaaaaaa

SEQ ID NO: 450604 - RNA, 20 nt, Human
caaaaagaaacugcaauaga

SEQ ID NO: 450605 - RNA, 23 nt, Human
caaaugaaagagcacaaauuuug

SEQ ID NO: 450606 - RNA, 27 nt, Human
cacccuucaacacaguccugguguggc

SEQ ID NO: 450607 - RNA, 20 nt, Human
ccagucuaggacugucagaa

SEQ ID NO: 450608 - RNA, 23 nt, Human
cuaaagaauaagaauaguguaaa

SEQ ID NO: 450609 - RNA, 18 nt, Human
cucaacccuuauguauca

SEQ ID NO: 450610 - RNA, 21 nt, Human
gcucugcuuauucaguuauac

SEQ ID NO: 450611 - RNA, 18 nt, Human
gucuuaguguagaagacc

SEQ ID NO: 450612 - RNA, 21 nt, Human
uaaaauaagucaguggacuua

SEQ ID NO: 450613 - RNA, 23 nt, Human
uaaugaacauuuacugaaggcuu

SEQ ID NO: 450614 - RNA, 20 nt, Human
uaauuaaaaaaaaaaaagca

SEQ ID NO: 450615 - RNA, 19 nt, Human
uacauaaagaacucugagc

SEQ ID NO: 450616 - RNA, 19 nt, Human
uagcggaucauuaaaaugc

SEQ ID NO: 450617 - RNA, 20 nt, Human
uauaauagcggaucauuaaa

SEQ ID NO: 450618 - RNA, 18 nt, Human
uauacuagauguguuucu

SEQ ID NO: 450619 - RNA, 21 nt, Human
ucagaagagaguaguccuccu

SEQ ID NO: 450620 - RNA, 23 nt, Human
ucaguggacuuaccacuugagaa

SEQ ID NO: 450621 - RNA, 23 nt, Human
ucccuguuuucugauuuuacaua

SEQ ID NO: 450622 - RNA, 22 nt, Human
ugaaagagcacaaauuuugcua

SEQ ID NO: 450623 - RNA, 20 nt, Human
ugcuuauucaguuauacuag

SEQ ID NO: 450624 - RNA, 19 nt, Human
ugcuugauaacaaaguguu

SEQ ID NO: 450625 - RNA, 18 nt, Human
uggcaaaauuccguugaa

SEQ ID NO: 450626 - RNA, 18 nt, Human
uggcugcacccuggguga

SEQ ID NO: 450627 - RNA, 20 nt, Human
uggcugcacccugggugaua

SEQ ID NO: 450628 - RNA, 21 nt, Human
uuaaauggacauuaccaauua

SEQ ID NO: 450629 - RNA, 25 nt, Human
uuuaaaagaaaaaaaacacccuuca

SEQ ID NO: 450630 - RNA, 18 nt, Human
uuuacaguacagcucuuu

SEQ ID NO: 450631 - RNA, 22 nt, Human
uuucucagaguuauccagucca

SEQ ID NO: 450632 - RNA, 28 nt, Human
uuucucagaguuauccagucggaaaucc

SEQ ID NO: 450633 - RNA, 21 nt, Human
uuugcuaagucaagcauucca

SEQ ID NO: 450634 - RNA, 18 nt, Human
aaaccugaugguggcgcu

SEQ ID NO: 450635 - RNA, 21 nt, Human
accagcgcccccuccucagca

SEQ ID NO: 450636 - RNA, 19 nt, Human
caaaccugaugguggcgcu

SEQ ID NO: 450637 - RNA, 23 nt, Human
ccucuugcuggccggcagcuuca

SEQ ID NO: 450638 - RNA, 20 nt, Human
ccuugcccaggcuccucuuc

SEQ ID NO: 450639 - RNA, 22 nt, Human
cguguacacgcagacuggggug

SEQ ID NO: 450640 - RNA, 20 nt, Human
cugaugguggcgcugccccc

SEQ ID NO: 450641 - RNA, 26 nt, Human
cuggcagcucucaccucuugcuggcc

SEQ ID NO: 450642 - RNA, 18 nt, Human
gaccagcgcccccuccuc

SEQ ID NO: 450643 - RNA, 19 nt, Human
gcgcccccuccucagcagc

SEQ ID NO: 450644 - RNA, 19 nt, Human
ggaccagcgcccccuccuc

SEQ ID NO: 450645 - RNA, 21 nt, Human
ggaccagcgcccccuccucag

SEQ ID NO: 450646 - RNA, 22 nt, Human
ggcagcuucagccacuugggca

SEQ ID NO: 450647 - RNA, 21 nt, Human
gugccccgcagggcagcuuca

SEQ ID NO: 450648 - RNA, 22 nt, Human
guggccccgccggggugcugca

SEQ ID NO: 450649 - RNA, 21 nt, Human
ucaggcccagcgacugcagcg

SEQ ID NO: 450650 - RNA, 20 nt, Human
ugcuggcagaggaggugguc

SEQ ID NO: 450651 - RNA, 21 nt, Human
uggcagaggaggugguccugu

SEQ ID NO: 450652 - RNA, 22 nt, Human
aaaaaagagagagaaguccuua

SEQ ID NO: 450653 - RNA, 27 nt, Human
aaacugucccuccauaggucuccucca

SEQ ID NO: 450654 - RNA, 19 nt, Human
agaaggaagaagagcaaag

SEQ ID NO: 450655 - RNA, 18 nt, Human
agaauacugcucccccuc

SEQ ID NO: 450656 - RNA, 19 nt, Human
agcaaaaaagagagagaag

SEQ ID NO: 450657 - RNA, 25 nt, Human
aggaagaaagcagaguguggcagga

SEQ ID NO: 450658 - RNA, 23 nt, Human
aggaagaggaggcagcugcggag

SEQ ID NO: 450659 - RNA, 23 nt, Human
aggaagaggcagggucccacaaa

SEQ ID NO: 450660 - RNA, 19 nt, Human
agguagcaggaagaggcag

SEQ ID NO: 450661 - RNA, 24 nt, Human
auggcaggaagaaagcagagugug

SEQ ID NO: 450662 - RNA, 19 nt, Human
caggccccaggauccagga

SEQ ID NO: 450663 - RNA, 19 nt, Human
caggccccaggauccagga

SEQ ID NO: 450664 - RNA, 18 nt, Human
caucugcuaggcccaucc

SEQ ID NO: 450665 - RNA, 23 nt, Human
ccauaggucuccuccaggggucc

SEQ ID NO: 450666 - RNA, 22 nt, Human
ccaugcuuccucacugcaacca

SEQ ID NO: 450667 - RNA, 22 nt, Human
cccaggccccaggauccaggag

SEQ ID NO: 450668 - RNA, 22 nt, Human
ccccagcccacccaggccccag

SEQ ID NO: 450669 - RNA, 19 nt, Human
ccucacugcaaccauccuc

SEQ ID NO: 450670 - RNA, 18 nt, Human
cggcggcggcgguggcgg

SEQ ID NO: 450671 - RNA, 22 nt, Human
cgggcggcggcggcgguggcuu

SEQ ID NO: 450672 - RNA, 19 nt, Human
cgguggcgaaggaggaaga

SEQ ID NO: 450673 - RNA, 18 nt, Human
cgguggcggcgguggcga

SEQ ID NO: 450674 - RNA, 18 nt, Human
cugaagaggucaaaacug

SEQ ID NO: 450675 - RNA, 23 nt, Human
cugcuaggcccauccucagcugu

SEQ ID NO: 450676 - RNA, 20 nt, Human
gaaaagguuuaaaaaggaga

SEQ ID NO: 450677 - RNA, 22 nt, Human
gagagacuuuugauagagucaa

SEQ ID NO: 450678 - RNA, 20 nt, Human
gcggcggcggcgguggcggc

SEQ ID NO: 450679 - RNA, 24 nt, Human
gcggcggcggcgguggcggcggug

SEQ ID NO: 450680 - RNA, 24 nt, Human
gcggcggcgguggcggcgguggcg

SEQ ID NO: 450681 - RNA, 20 nt, Human
gcggcgguggcggcgguggc

SEQ ID NO: 450682 - RNA, 26 nt, Human
gcgggcggcggcggcgguggcggcgc

SEQ ID NO: 450683 - RNA, 20 nt, Human
gcggugcugcgggcggcggc

SEQ ID NO: 450684 - RNA, 22 nt, Human
ggagaauacugcucccccuccc

SEQ ID NO: 450685 - RNA, 18 nt, Human
ggcagcugcggagacggc

SEQ ID NO: 450686 - RNA, 18 nt, Human
ggcggcggcggcgguggc

SEQ ID NO: 450687 - RNA, 20 nt, Human
ggcggcggcgguggcggcgg

SEQ ID NO: 450688 - RNA, 19 nt, Human
ggcggcgguggcggcggug

SEQ ID NO: 450689 - RNA, 19 nt, Human
gggcggcggcggcgguggc

SEQ ID NO: 450690 - RNA, 24 nt, Human
gggcggcggcggcgguggcggcgg

SEQ ID NO: 450691 - RNA, 21 nt, Human
guggcggcgguggcgaaggag

SEQ ID NO: 450692 - RNA, 20 nt, Human
guuugcuuuggccuugcugg

SEQ ID NO: 450693 - RNA, 22 nt, Human
uagcaggaagaggcaggguccc

SEQ ID NO: 450694 - RNA, 23 nt, Human
ucaauaauguccagcaaaaaaga

SEQ ID NO: 450695 - RNA, 25 nt, Human
uccacuauccacaggagaaaccguu

SEQ ID NO: 450696 - RNA, 19 nt, Human
uccauggcaggaagaaagc

SEQ ID NO: 450697 - RNA, 23 nt, Human
ucccccagcccacccaggccccc

SEQ ID NO: 450698 - RNA, 18 nt, Human
uccuggugcugaagaggu

SEQ ID NO: 450699 - RNA, 18 nt, Human
ucugggcagacccacagg

SEQ ID NO: 450700 - RNA, 22 nt, Human
ucuguccacuauccacaggaga

SEQ ID NO: 450701 - RNA, 19 nt, Human
ugaaaaaauaaaagauaga

SEQ ID NO: 450702 - RNA, 23 nt, Human
ugaaaaaauaaaagauagagaaa

SEQ ID NO: 450703 - RNA, 18 nt, Human
ugccucgggauugacagc

SEQ ID NO: 450704 - RNA, 18 nt, Human
ugcugaagaggucaaaac

SEQ ID NO: 450705 - RNA, 18 nt, Human
uggcaggaagaaagcaga

SEQ ID NO: 450706 - RNA, 19 nt, Human
uggcaggaagaaagcagag

SEQ ID NO: 450707 - RNA, 21 nt, Human
uggcaggaagaaggaagaaga

SEQ ID NO: 450708 - RNA, 23 nt, Human
uggcaggaagaaggaagaagagc

SEQ ID NO: 450709 - RNA, 21 nt, Human
uggcggcgguggcgaaggagg

SEQ ID NO: 450710 - RNA, 23 nt, Human
ugucccuccauaggucuccucca

SEQ ID NO: 450711 - RNA, 19 nt, Human
accaaaaaaaaugcacaac

SEQ ID NO: 450712 - RNA, 22 nt, Human
agaaagaauccuccaaaaugau

SEQ ID NO: 450713 - RNA, 21 nt, Human
agaaccaaaaaaaaugcacaa

SEQ ID NO: 450714 - RNA, 18 nt, Human
aggaaacagucuguuuua

SEQ ID NO: 450715 - RNA, 18 nt, Human
caaaaugauaaaucccaa

SEQ ID NO: 450716 - RNA, 22 nt, Human
caacacaggaacuucccggcag

SEQ ID NO: 450717 - RNA, 25 nt, Human
cacagguacugaauauguauccugg

SEQ ID NO: 450718 - RNA, 23 nt, Human
cagaaccaaaaaaaaugcacaac

SEQ ID NO: 450719 - RNA, 26 nt, Human
cauugccacaaaauauuuuuuaaaag

SEQ ID NO: 450720 - RNA, 23 nt, Human
ccccauacuuaagguuuccuagc

SEQ ID NO: 450721 - RNA, 18 nt, Human
ccccgcgaacgcucagcc

SEQ ID NO: 450722 - RNA, 21 nt, Human
cccgcgucgcuagcgcggccg

SEQ ID NO: 450723 - RNA, 22 nt, Human
ccgccgccaccccacaaugcag

SEQ ID NO: 450724 - RNA, 23 nt, Human
cgucgcuagcgcggccgccgccg

SEQ ID NO: 450725 - RNA, 19 nt, Human
cucacagauacauugccac

SEQ ID NO: 450726 - RNA, 24 nt, Human
cucggccccgcgaacgcucagccg

SEQ ID NO: 450727 - RNA, 21 nt, Human
gagcauaucuugcucuagaaa

SEQ ID NO: 450728 - RNA, 21 nt, Human
ggggcuaggucauaaugcagu

SEQ ID NO: 450729 - RNA, 22 nt, Human
gggggcuaggucauaaugcagu

SEQ ID NO: 450730 - RNA, 23 nt, Human
uaacuaugagauucucacagaua

SEQ ID NO: 450731 - RNA, 22 nt, Human
uacaaacaggagaauuugagca

SEQ ID NO: 450732 - RNA, 20 nt, Human
uagcgcggccgccgccgccu

SEQ ID NO: 450733 - RNA, 28 nt, Human
uaucuugcucuagaaagaauccuccaaa

SEQ ID NO: 450734 - RNA, 21 nt, Human
ugaauauguauccuggcacaa

SEQ ID NO: 450735 - RNA, 20 nt, Human
ugagaagacauauuuucuaa

SEQ ID NO: 450736 - RNA, 25 nt, Human
ugagaagacauauuuucuaagugau

SEQ ID NO: 450737 - RNA, 21 nt, Human
ugcucuagaaagaauccucca

SEQ ID NO: 450738 - RNA, 24 nt, Human
uucauuuuacaaaauacaaacagg

SEQ ID NO: 450739 - RNA, 18 nt, Human
uucccggcagaggugaac

SEQ ID NO: 450740 - RNA, 21 nt, Human
uuugagcauaucuugcucuag

SEQ ID NO: 450741 - RNA, 22 nt, Human
aagaugcacuugcccuggucca

SEQ ID NO: 450742 - RNA, 23 nt, Human
aagcacaacccuggccguugcac

SEQ ID NO: 450743 - RNA, 22 nt, Human
acacaggaagacagcucuccaa

SEQ ID NO: 450744 - RNA, 18 nt, Human
acagcuacaugacaaaaa

SEQ ID NO: 450745 - RNA, 24 nt, Human
agaggaagaugggagaugggagag

SEQ ID NO: 450746 - RNA, 19 nt, Human
agagguacacaggaagaca

SEQ ID NO: 450747 - RNA, 18 nt, Human
agaugggagaugggagag

SEQ ID NO: 450748 - RNA, 19 nt, Human
agcucugcaauguuccuuc

SEQ ID NO: 450749 - RNA, 24 nt, Human
aggaaaauggaauauuucuuuggc

SEQ ID NO: 450750 - RNA, 24 nt, Human
aggaagacagcucuccaauggcuu

SEQ ID NO: 450751 - RNA, 23 nt, Human
aggcgggcaggacaccagcuggg

SEQ ID NO: 450752 - RNA, 19 nt, Human
agguacagacacugcugcc

SEQ ID NO: 450753 - RNA, 24 nt, Human
aguagccagcguccuuguggccag

SEQ ID NO: 450754 - RNA, 18 nt, Human
auaccacgacugcuuagc

SEQ ID NO: 450755 - RNA, 18 nt, Human
cacaggaagacagcucuc

SEQ ID NO: 450756 - RNA, 18 nt, Human
caccggggcucaucaagc

SEQ ID NO: 450757 - RNA, 26 nt, Human
cacucuggggcagaaugggaagggcc

SEQ ID NO: 450758 - RNA, 21 nt, Human
cagcauauuugcuagaaagca

SEQ ID NO: 450759 - RNA, 21 nt, Human
caggcccucccgccuugaugg

SEQ ID NO: 450760 - RNA, 21 nt, Human
cauaacagcauauuugcuaga

SEQ ID NO: 450761 - RNA, 22 nt, Human
cauaacagcauauuugcuagaa

SEQ ID NO: 450762 - RNA, 27 nt, Human
caugacaaaaaaaaugcuuuugacauc

SEQ ID NO: 450763 - RNA, 22 nt, Human
ccaauaaugcuaaaccugguac

SEQ ID NO: 450764 - RNA, 22 nt, Human
ccacggugaaggagauggcccc

SEQ ID NO: 450765 - RNA, 23 nt, Human
cccccaaaacucuuagaaaccag

SEQ ID NO: 450766 - RNA, 19 nt, Human
cccccauaccacgacugcu

SEQ ID NO: 450767 - RNA, 21 nt, Human
cccccauaccacgacugcuua

SEQ ID NO: 450768 - RNA, 19 nt, Human
ccgccccccaaaacucuua

SEQ ID NO: 450769 - RNA, 18 nt, Human
cgacuccugggacacacc

SEQ ID NO: 450770 - RNA, 23 nt, Human
cgagagaagagagcugugcagug

SEQ ID NO: 450771 - RNA, 18 nt, Human
cggccagggucgggacgg

SEQ ID NO: 450772 - RNA, 26 nt, Human
cugcaauguuccuucuuuuaucuguu

SEQ ID NO: 450773 - RNA, 19 nt, Human
cuggaguccucccauucug

SEQ ID NO: 450774 - RNA, 18 nt, Human
cugguaccaccagcucca

SEQ ID NO: 450775 - RNA, 20 nt, Human
cugguaccaccagcuccacu

SEQ ID NO: 450776 - RNA, 21 nt, Human
cuucucacagcugcaaacacc

SEQ ID NO: 450777 - RNA, 23 nt, Human
cuucucacagcugcaaacacccu

SEQ ID NO: 450778 - RNA, 22 nt, Human
gaaaaugcagacccucuucuuc

SEQ ID NO: 450779 - RNA, 21 nt, Human
gagcagcacuggguuuaggaa

SEQ ID NO: 450780 - RNA, 20 nt, Human
gcaaacacccugggccagau

SEQ ID NO: 450781 - RNA, 18 nt, Human
gcuccucaaucugagccu

SEQ ID NO: 450782 - RNA, 22 nt, Human
gcugcaaacacccugggccaga

SEQ ID NO: 450783 - RNA, 19 nt, Human
gcuuucuuccugugacuuu

SEQ ID NO: 450784 - RNA, 25 nt, Human
ggaguccucccauucugagcccuuc

SEQ ID NO: 450785 - RNA, 22 nt, Human
ggcaggacaccagcugggggcc

SEQ ID NO: 450786 - RNA, 24 nt, Human
gggcggccagggucgggacggggu

SEQ ID NO: 450787 - RNA, 22 nt, Human
guauaaaaugaggauucaauga

SEQ ID NO: 450788 - RNA, 18 nt, Human
guggagaguccuaacccu

SEQ ID NO: 450789 - RNA, 21 nt, Human
guguugugugacacaaacauc

SEQ ID NO: 450790 - RNA, 21 nt, Human
uaccaccagcuccacugacug

SEQ ID NO: 450791 - RNA, 19 nt, Human
uagacacaacuccugaccu

SEQ ID NO: 450792 - RNA, 19 nt, Human
uauuucuuuggcucuucca

SEQ ID NO: 450793 - RNA, 20 nt, Human
uccaaacaucucuccacuga

SEQ ID NO: 450794 - RNA, 20 nt, Human
ucggggcggccagggucggg

SEQ ID NO: 450795 - RNA, 25 nt, Human
ucucacagcugcaaacacccugggc

SEQ ID NO: 450796 - RNA, 22 nt, Human
ucucacuccacauccccuacga

SEQ ID NO: 450797 - RNA, 21 nt, Human
ucucuuacagaaaauuguaau

SEQ ID NO: 450798 - RNA, 25 nt, Human
ucuugagcuccucaaucugagccuu

SEQ ID NO: 450799 - RNA, 18 nt, Human
ugaaggagauggccccau

SEQ ID NO: 450800 - RNA, 19 nt, Human
ugacagccccgccccccaa

SEQ ID NO: 450801 - RNA, 21 nt, Human
ugacagccccgccccccaaaa

SEQ ID NO: 450802 - RNA, 23 nt, Human
ugacuucucacagcugcaaacac

SEQ ID NO: 450803 - RNA, 24 nt, Human
ugacuucucacagcugcaaacacc

SEQ ID NO: 450804 - RNA, 18 nt, Human
ugagaaaaagcauauaaa

SEQ ID NO: 450805 - RNA, 19 nt, Human
ugagauacugcacguggug

SEQ ID NO: 450806 - RNA, 23 nt, Human
ugagcauguauaucaaaugcugc

SEQ ID NO: 450807 - RNA, 27 nt, Human
ugagcccggacaauacacgugggccga

SEQ ID NO: 450808 - RNA, 18 nt, Human
ugcacacacaauuucugg

SEQ ID NO: 450809 - RNA, 19 nt, Human
ugcgagaggaagaugggag

SEQ ID NO: 450810 - RNA, 18 nt, Human
ugcuagaaagcacaaccc

SEQ ID NO: 450811 - RNA, 20 nt, Human
uggaaguugaacuuucugcu

SEQ ID NO: 450812 - RNA, 19 nt, Human
ugggacacaccggggcuca

SEQ ID NO: 450813 - RNA, 20 nt, Human
ugggagaugggagagcagca

SEQ ID NO: 450814 - RNA, 23 nt, Human
ugggauucuagagguacacagga

SEQ ID NO: 450815 - RNA, 18 nt, Human
uggguuuaggaaaaugca

SEQ ID NO: 450816 - RNA, 23 nt, Human
ugugacacaaacaucggaagagu

SEQ ID NO: 450817 - RNA, 19 nt, Human
uguucucacuccacauccc

SEQ ID NO: 450818 - RNA, 22 nt, Human
uucaaccacaaggaaaggaaaa

SEQ ID NO: 450819 - RNA, 26 nt, Human
uucucacagcugcaaacacccugggc

SEQ ID NO: 450820 - RNA, 28 nt, Human
uucucacagcugcaaacacccugggcca

SEQ ID NO: 450821 - RNA, 21 nt, Human
uugaugguucucugcugcugg

SEQ ID NO: 450822 - RNA, 22 nt, Human
uuggaacugaguuugcaacaga

SEQ ID NO: 450823 - RNA, 23 nt, Human
uuuuaauagacaguagccagcgu

SEQ ID NO: 450824 - RNA, 21 nt, Human
acccacuuaucauuuuuuugu

SEQ ID NO: 450825 - RNA, 22 nt, Human
cagcagcggcaccacgugcgca

SEQ ID NO: 450826 - RNA, 21 nt, Human
caggcgugacuguucaccuac

SEQ ID NO: 450827 - RNA, 19 nt, Human
cauaagcaagccaaaaaac

SEQ ID NO: 450828 - RNA, 23 nt, Human
ccuacacauaagcaagccaaaaa

SEQ ID NO: 450829 - RNA, 24 nt, Human
gcaagccaaaaaacaguguguggu

SEQ ID NO: 450830 - RNA, 18 nt, Human
gcagguaggagggcugcc

SEQ ID NO: 450831 - RNA, 21 nt, Human
ggcgagcgggaggcagcagca

SEQ ID NO: 450832 - RNA, 20 nt, Human
uaacauaaccaucacuucac

SEQ ID NO: 450833 - RNA, 24 nt, Human
uacacauaagcaagccaaaaaaca

SEQ ID NO: 450834 - RNA, 20 nt, Human
ucagggcgagcgggaggcag

SEQ ID NO: 450835 - RNA, 21 nt, Human
ucauuuuuuugugguaagaaa

SEQ ID NO: 450836 - RNA, 19 nt, Human
uccucaaaguuucaggcgg

SEQ ID NO: 450837 - RNA, 24 nt, Human
aaaaacugccaagaaguuaccccc

SEQ ID NO: 450838 - RNA, 18 nt, Human
aaaaugagcgcuauccuc

SEQ ID NO: 450839 - RNA, 21 nt, Human
aaagcucuuccuguuauaccc

SEQ ID NO: 450840 - RNA, 19 nt, Human
aacaagaugcucucguucu

SEQ ID NO: 450841 - RNA, 19 nt, Human
aacacugaaaaacugccaa

SEQ ID NO: 450842 - RNA, 22 nt, Human
aacugccaagaaguuaccccca

SEQ ID NO: 450843 - RNA, 21 nt, Human
aagaagacagguuaaaucugc

SEQ ID NO: 450844 - RNA, 25 nt, Human
aagaauucucuauuuuguuucccau

SEQ ID NO: 450845 - RNA, 19 nt, Human
aagaugcucucguucuuua

SEQ ID NO: 450846 - RNA, 21 nt, Human
aaguauuggaaguuaaagacu

SEQ ID NO: 450847 - RNA, 20 nt, Human
aagugcuuugugcaacaacg

SEQ ID NO: 450848 - RNA, 18 nt, Human
aaugggagggaagaagac

SEQ ID NO: 450849 - RNA, 23 nt, Human
acacugaaaaacugccaagaagu

SEQ ID NO: 450850 - RNA, 23 nt, Human
acagcagaggaggcugcaucaga

SEQ ID NO: 450851 - RNA, 21 nt, Human
agaaaaaucuaguuucaacug

SEQ ID NO: 450852 - RNA, 20 nt, Human
agaagacagguuaaaucugc

SEQ ID NO: 450853 - RNA, 23 nt, Human
agaagacagguuaaaucugcaag

SEQ ID NO: 450854 - RNA, 20 nt, Human
agacagggacaagucaaagc

SEQ ID NO: 450855 - RNA, 18 nt, Human
agagaaaaguagguagga

SEQ ID NO: 450856 - RNA, 24 nt, Human
agggaacaacacaagauuuaccau

SEQ ID NO: 450857 - RNA, 18 nt, Human
agggagggggagauaaag

SEQ ID NO: 450858 - RNA, 22 nt, Human
auaaagcaacaguucuuccuuc

SEQ ID NO: 450859 - RNA, 20 nt, Human
aucaaagguaaaaauaaggu

SEQ ID NO: 450860 - RNA, 23 nt, Human
aucuucccuccuguucucuccca

SEQ ID NO: 450861 - RNA, 24 nt, Human
augaaacauuugguuuaaacaaaa

SEQ ID NO: 450862 - RNA, 23 nt, Human
augaaguauuggaaguuaaagac

SEQ ID NO: 450863 - RNA, 23 nt, Human
augaauggcaaacccaacuuugg

SEQ ID NO: 450864 - RNA, 25 nt, Human
auuucauucacaccccccaccccca

SEQ ID NO: 450865 - RNA, 24 nt, Human
caaacccaacuuuggcuaauguca

SEQ ID NO: 450866 - RNA, 19 nt, Human
caccccccacccccacagu

SEQ ID NO: 450867 - RNA, 21 nt, Human
caucacuacaaacugagcaca

SEQ ID NO: 450868 - RNA, 19 nt, Human
caucagacacaugacacuc

SEQ ID NO: 450869 - RNA, 22 nt, Human
cauucugcuacuuucccaaaga

SEQ ID NO: 450870 - RNA, 22 nt, Human
cauuucauucacaccccccacc

SEQ ID NO: 450871 - RNA, 20 nt, Human
ccacucaugggaaagaagcg

SEQ ID NO: 450872 - RNA, 20 nt, Human
ccagcauuauuuauuugauc

SEQ ID NO: 450873 - RNA, 21 nt, Human
cccacagucagacugaaaacu

SEQ ID NO: 450874 - RNA, 25 nt, Human
cccaucacuacaaacugagcacaac

SEQ ID NO: 450875 - RNA, 20 nt, Human
cccaucuucccuccuguucu

SEQ ID NO: 450876 - RNA, 20 nt, Human
ccccaaaagauacagagaau

SEQ ID NO: 450877 - RNA, 20 nt, Human
ccccacccccacagucagac

SEQ ID NO: 450878 - RNA, 24 nt, Human
ccccacccccacagucagacugaa

SEQ ID NO: 450879 - RNA, 22 nt, Human
cccccacccccacagucagacu

SEQ ID NO: 450880 - RNA, 18 nt, Human
ccccccacccccacaguc

SEQ ID NO: 450881 - RNA, 22 nt, Human
ccccccacccccacagucagac

SEQ ID NO: 450882 - RNA, 21 nt, Human
cccuccuguucucucccaucc

SEQ ID NO: 450883 - RNA, 23 nt, Human
cuacagcuguuauuuguacagcc

SEQ ID NO: 450884 - RNA, 21 nt, Human
cugaacacugaaaaacugcca

SEQ ID NO: 450885 - RNA, 19 nt, Human
cuucccuuuuucuuucuuu

SEQ ID NO: 450886 - RNA, 21 nt, Human
gaaaaucauauuccuuuaucc

SEQ ID NO: 450887 - RNA, 23 nt, Human
gaaaaugagaauaaugggaggga

SEQ ID NO: 450888 - RNA, 24 nt, Human
gagcacaacuacaguugucuacac

SEQ ID NO: 450889 - RNA, 24 nt, Human
gaugguggagaaagguaaaaggaa

SEQ ID NO: 450890 - RNA, 19 nt, Human
ggagguaauaaguuuugga

SEQ ID NO: 450891 - RNA, 22 nt, Human
ggggagguaauaaguuuuggaa

SEQ ID NO: 450892 - RNA, 19 nt, Human
ggggucaguccugcagacc

SEQ ID NO: 450893 - RNA, 18 nt, Human
gggucaguccugcagacc

SEQ ID NO: 450894 - RNA, 18 nt, Human
gguaaguaaaaaaucuac

SEQ ID NO: 450895 - RNA, 21 nt, Human
gguaauaaguuuuggaaagaa

SEQ ID NO: 450896 - RNA, 18 nt, Human
ggugaagaacauuacaaa

SEQ ID NO: 450897 - RNA, 25 nt, Human
gguggaaaaacccauugguacuucc

SEQ ID NO: 450898 - RNA, 22 nt, Human
guuuuuuuauagaaaaauuagg

SEQ ID NO: 450899 - RNA, 23 nt, Human
uaagguggaaaaacccauuggua

SEQ ID NO: 450900 - RNA, 22 nt, Human
uaagugcuuugugcaacaacgu

SEQ ID NO: 450901 - RNA, 21 nt, Human
uacccccaaaagauacagaga

SEQ ID NO: 450902 - RNA, 25 nt, Human
uaggggagguaauaaguuuuggaaa

SEQ ID NO: 450903 - RNA, 21 nt, Human
uaguuuauuuggaaagugguu

SEQ ID NO: 450904 - RNA, 24 nt, Human
uaguuuguuuuuuuauagaaaaau

SEQ ID NO: 450905 - RNA, 19 nt, Human
uaucagaagcaaacaugga

SEQ ID NO: 450906 - RNA, 19 nt, Human
uaucucaugaaguggcagu

SEQ ID NO: 450907 - RNA, 23 nt, Human
ucacaauguugacacaugcaggg

SEQ ID NO: 450908 - RNA, 23 nt, Human
ucagacacaugacacucugugac

SEQ ID NO: 450909 - RNA, 26 nt, Human
ucagacacaugacacucugugacauc

SEQ ID NO: 450910 - RNA, 22 nt, Human
uccaggcuuuaguuuauuugga

SEQ ID NO: 450911 - RNA, 21 nt, Human
uccauuuaucagaagcaaaca

SEQ ID NO: 450912 - RNA, 23 nt, Human
uccuguuauacccucucccuacc

SEQ ID NO: 450913 - RNA, 25 nt, Human
uccuuggggucaguccugcagaccu

SEQ ID NO: 450914 - RNA, 18 nt, Human
ucugcaaggguagaucaa

SEQ ID NO: 450915 - RNA, 23 nt, Human
ucugugacauccauuucauucac

SEQ ID NO: 450916 - RNA, 19 nt, Human
ugaaaaaggcaaugaacaa

SEQ ID NO: 450917 - RNA, 21 nt, Human
ugaagaacauuacaaagguua

SEQ ID NO: 450918 - RNA, 25 nt, Human
ugacccaaauauucaccucuagcau

SEQ ID NO: 450919 - RNA, 21 nt, Human
ugccuaggggaugaauggcaa

SEQ ID NO: 450920 - RNA, 23 nt, Human
uggaaagaaacugaaaugcaacc

SEQ ID NO: 450921 - RNA, 24 nt, Human
uggaagaugagcuggcucuggggc

SEQ ID NO: 450922 - RNA, 21 nt, Human
uggacggaggcaaaagucuuc

SEQ ID NO: 450923 - RNA, 24 nt, Human
uggaggagaguuggacaagccaca

SEQ ID NO: 450924 - RNA, 21 nt, Human
uggcagugaaccuacauuucc

SEQ ID NO: 450925 - RNA, 25 nt, Human
uggggucaguccugcagaccugcau

SEQ ID NO: 450926 - RNA, 20 nt, Human
uguagauuaguaaauacuga

SEQ ID NO: 450927 - RNA, 20 nt, Human
uguggugaagaacauuacaa

SEQ ID NO: 450928 - RNA, 23 nt, Human
uguuacagggcugagcagaguug

SEQ ID NO: 450929 - RNA, 21 nt, Human
uguucucucccauccuccaaa

SEQ ID NO: 450930 - RNA, 21 nt, Human
uuaaaagaacaugcaacauga

SEQ ID NO: 450931 - RNA, 19 nt, Human
uuccccuuaugcuuaggug

SEQ ID NO: 450932 - RNA, 21 nt, Human
uucccuuuuucuuucuuuaca

SEQ ID NO: 450933 - RNA, 22 nt, Human
uuccuccagacuuccagucuca

SEQ ID NO: 450934 - RNA, 23 nt, Human
uucuauggcuuuggcugaaaugu

SEQ ID NO: 450935 - RNA, 23 nt, Human
uuggaaagugguuucagcaccug

SEQ ID NO: 450936 - RNA, 18 nt, Human
uugugcccacguuccucc

SEQ ID NO: 450937 - RNA, 18 nt, Human
uuuuuuuuuuuuuuuuug

SEQ ID NO: 450938 - RNA, 21 nt, Human
uuuuuuuuuuuuuuuuugcaa

SEQ ID NO: 450939 - RNA, 18 nt, Human
aaaaagcagaaccaacuc

SEQ ID NO: 450940 - RNA, 19 nt, Human
aaacagccuccuucuccaa

SEQ ID NO: 450941 - RNA, 18 nt, Human
aaagucccaggcaaacug

SEQ ID NO: 450942 - RNA, 19 nt, Human
aaauagcuuuaaaaaaaga

SEQ ID NO: 450943 - RNA, 18 nt, Human
aaauggcccuuccagucc

SEQ ID NO: 450944 - RNA, 22 nt, Human
aagauggcacauuggaugguca

SEQ ID NO: 450945 - RNA, 21 nt, Human
aagcagaaccaacucgcugug

SEQ ID NO: 450946 - RNA, 20 nt, Human
aaggguuauguggaccagug

SEQ ID NO: 450947 - RNA, 25 nt, Human
acaaaaacagccuccuucuccaaac

SEQ ID NO: 450948 - RNA, 19 nt, Human
acccuaaaacacucagaag

SEQ ID NO: 450949 - RNA, 21 nt, Human
acgguugguccuacaagaaaa

SEQ ID NO: 450950 - RNA, 23 nt, Human
acucguaggcucaaagacucacc

SEQ ID NO: 450951 - RNA, 20 nt, Human
agaagaaggggucaaggguu

SEQ ID NO: 450952 - RNA, 18 nt, Human
aggcaaaaagcagaacca

SEQ ID NO: 450953 - RNA, 19 nt, Human
aggcaaaaagcagaaccaa

SEQ ID NO: 450954 - RNA, 21 nt, Human
aggcucaaagacucaccacac

SEQ ID NO: 450955 - RNA, 19 nt, Human
agggucagaagaauggcuu

SEQ ID NO: 450956 - RNA, 19 nt, Human
agguacuagcuuaaggugg

SEQ ID NO: 450957 - RNA, 19 nt, Human
aguagccagaaauuggggg

SEQ ID NO: 450958 - RNA, 22 nt, Human
agucugugacacugaguucaaa

SEQ ID NO: 450959 - RNA, 22 nt, Human
aguuuguacagauuucugcagc

SEQ ID NO: 450960 - RNA, 20 nt, Human
augaagaagaaggggucaag

SEQ ID NO: 450961 - RNA, 21 nt, Human
augaagaagaaggggucaagg

SEQ ID NO: 450962 - RNA, 20 nt, Human
auuccuccaaauacccacca

SEQ ID NO: 450963 - RNA, 22 nt, Human
caaguuuugacucaauccccuc

SEQ ID NO: 450964 - RNA, 23 nt, Human
cagaucuccugaggccacuguuc

SEQ ID NO: 450965 - RNA, 24 nt, Human
cagcuggcuagugcuggcaucauu

SEQ ID NO: 450966 - RNA, 23 nt, Human
ccaccuauuuucccuuuagcugu

SEQ ID NO: 450967 - RNA, 22 nt, Human
ccgacuggguuucccgucuuug

SEQ ID NO: 450968 - RNA, 23 nt, Human
ccuacaagaaaaagagcagcauc

SEQ ID NO: 450969 - RNA, 18 nt, Human
cgcugugccuggaaggga

SEQ ID NO: 450970 - RNA, 26 nt, Human
cucaccacacuuauugcaucuauuuc

SEQ ID NO: 450971 - RNA, 23 nt, Human
cuccaaauacccaccagcuggcu

SEQ ID NO: 450972 - RNA, 18 nt, Human
cuggcaucuuugcugagg

SEQ ID NO: 450973 - RNA, 22 nt, Human
cuggguugauacacuucuugaa

SEQ ID NO: 450974 - RNA, 20 nt, Human
cuuuucuuuggcuuacaggc

SEQ ID NO: 450975 - RNA, 18 nt, Human
gaagaagaaggggucaag

SEQ ID NO: 450976 - RNA, 21 nt, Human
gagagcagcagaaaacuagag

SEQ ID NO: 450977 - RNA, 21 nt, Human
gcacuggguuguaggcuacgc

SEQ ID NO: 450978 - RNA, 25 nt, Human
gcagaccuggcuucuuuggucccag

SEQ ID NO: 450979 - RNA, 21 nt, Human
gcaguucuaaucaacuugcag

SEQ ID NO: 450980 - RNA, 18 nt, Human
gcauucugcuucaagcca

SEQ ID NO: 450981 - RNA, 22 nt, Human
gcuccaguuuccuaggauuugg

SEQ ID NO: 450982 - RNA, 24 nt, Human
ggaagggauguuaaccccgauuca

SEQ ID NO: 450983 - RNA, 22 nt, Human
ggcaaaaagcagaaccaacucg

SEQ ID NO: 450984 - RNA, 24 nt, Human
ggcugguggcaugacucguaggcu

SEQ ID NO: 450985 - RNA, 24 nt, Human
ggguaaauaaacccagaaacuucc

SEQ ID NO: 450986 - RNA, 22 nt, Human
ggucaaggguuauguggaccag

SEQ ID NO: 450987 - RNA, 23 nt, Human
gucaagguuguugaagaaaagaa

SEQ ID NO: 450988 - RNA, 25 nt, Human
guggaccagugacuagguggccucu

SEQ ID NO: 450989 - RNA, 24 nt, Human
guggcucaguaacccuuucuggcu

SEQ ID NO: 450990 - RNA, 22 nt, Human
guuguaccaguugcuccaguuu

SEQ ID NO: 450991 - RNA, 23 nt, Human
uaaauaaacccagaaacuuccau

SEQ ID NO: 450992 - RNA, 19 nt, Human
uagcugugacccuaaaaca

SEQ ID NO: 450993 - RNA, 22 nt, Human
uagcuuaagguggcucaguaac

SEQ ID NO: 450994 - RNA, 24 nt, Human
uaguagcuuuuuagauguggcuuu

SEQ ID NO: 450995 - RNA, 22 nt, Human
ucaaggguuauguggaccagug

SEQ ID NO: 450996 - RNA, 22 nt, Human
ucaauccccucacuggaaacaa

SEQ ID NO: 450997 - RNA, 20 nt, Human
ucagaguguuggcuauaguu

SEQ ID NO: 450998 - RNA, 22 nt, Human
ucaguaaaauaucauaaaagua

SEQ ID NO: 450999 - RNA, 18 nt, Human
ucauaugggccuauucug

SEQ ID NO: 451000 - RNA, 21 nt, Human
ucccugugaagugacacuugc

SEQ ID NO: 451001 - RNA, 23 nt, Human
ucccugugaagugacacuugcuc

SEQ ID NO: 451002 - RNA, 21 nt, Human
ucuaaaccgauuugagaacuc

SEQ ID NO: 451003 - RNA, 18 nt, Human
ucugugacacugaguuca

SEQ ID NO: 451004 - RNA, 22 nt, Human
ucuucugaaacuuuaacucugg

SEQ ID NO: 451005 - RNA, 20 nt, Human
ugaagcccuuaugugcacaa

SEQ ID NO: 451006 - RNA, 23 nt, Human
ugacacugaguucaaauccacuu

SEQ ID NO: 451007 - RNA, 18 nt, Human
ugagagcagcagaaaacu

SEQ ID NO: 451008 - RNA, 19 nt, Human
ugaggagguucucaaguga

SEQ ID NO: 451009 - RNA, 22 nt, Human
ugaggguguuacagcuuucaga

SEQ ID NO: 451010 - RNA, 19 nt, Human
ugagguaccugagauccaa

SEQ ID NO: 451011 - RNA, 21 nt, Human
ugccaggaagauggucagagg

SEQ ID NO: 451012 - RNA, 25 nt, Human
ugccuggguugauacacuucuugaa

SEQ ID NO: 451013 - RNA, 21 nt, Human
ugcugaggagguucucaagug

SEQ ID NO: 451014 - RNA, 21 nt, Human
uggaaacuuacggcacugggu

SEQ ID NO: 451015 - RNA, 21 nt, Human
uggaaacuuacggcacugggu

SEQ ID NO: 451016 - RNA, 22 nt, Human
uggcaucauuauauggcagagg

SEQ ID NO: 451017 - RNA, 23 nt, Human
uggggccagcacuuccuccaugg

SEQ ID NO: 451018 - RNA, 18 nt, Human
uguacagauuucugcagc

SEQ ID NO: 451019 - RNA, 22 nt, Human
uguaccaguugcuccaguuucc

SEQ ID NO: 451020 - RNA, 18 nt, Human
ugugaaauaaaaaucccu

SEQ ID NO: 451021 - RNA, 21 nt, Human
ugugacccuaaaacacucaga

SEQ ID NO: 451022 - RNA, 21 nt, Human
ugugucagaccccuuggggcc

SEQ ID NO: 451023 - RNA, 22 nt, Human
ugugucagaccccuuggggcca

SEQ ID NO: 451024 - RNA, 21 nt, Human
uguuauaggggaauagugguu

SEQ ID NO: 451025 - RNA, 23 nt, Human
uucaagccaccugcauccuagag

SEQ ID NO: 451026 - RNA, 22 nt, Human
uuccauauccugagauauugcc

SEQ ID NO: 451027 - RNA, 20 nt, Human
uuuaacacuguuuugagcuu

SEQ ID NO: 451028 - RNA, 24 nt, Human
uuuggcuuacaggcaaaaagcaga

SEQ ID NO: 451029 - RNA, 24 nt, Human
aaaaccaaauuuuucuaagaaccu

SEQ ID NO: 451030 - RNA, 24 nt, Human
aaaaggcaaagcaauauucuggua

SEQ ID NO: 451031 - RNA, 25 nt, Human
aaacagucauaagaaagcagaaagc

SEQ ID NO: 451032 - RNA, 20 nt, Human
aaaugaucaugguccaaaac

SEQ ID NO: 451033 - RNA, 21 nt, Human
aaccucauagaaaccuccaga

SEQ ID NO: 451034 - RNA, 22 nt, Human
aaccuugaaagaauacuugcaa

SEQ ID NO: 451035 - RNA, 18 nt, Human
aagaaagcagaaagcaac

SEQ ID NO: 451036 - RNA, 20 nt, Human
aagaugauuugagggcuuau

SEQ ID NO: 451037 - RNA, 24 nt, Human
aaugggccacaggcugagcugaug

SEQ ID NO: 451038 - RNA, 19 nt, Human
aauggggcuacugaaagca

SEQ ID NO: 451039 - RNA, 21 nt, Human
acauauaaaauccugccaaca

SEQ ID NO: 451040 - RNA, 22 nt, Human
accaauguauuaaaaacuacuu

SEQ ID NO: 451041 - RNA, 22 nt, Human
acccuagaaucccucuuucccu

SEQ ID NO: 451042 - RNA, 20 nt, Human
accugaaaagucucagggua

SEQ ID NO: 451043 - RNA, 22 nt, Human
accugcucuggugucugguacc

SEQ ID NO: 451044 - RNA, 21 nt, Human
acucuagcccucuaucacaaa

SEQ ID NO: 451045 - RNA, 21 nt, Human
agaaagcagaaagcaacuucc

SEQ ID NO: 451046 - RNA, 18 nt, Human
agagguuuggagauuuug

SEQ ID NO: 451047 - RNA, 23 nt, Human
agauccucggcgauguucagggc

SEQ ID NO: 451048 - RNA, 21 nt, Human
agcauggagauucaggaagga

SEQ ID NO: 451049 - RNA, 18 nt, Human
aggaaugcauuccugguc

SEQ ID NO: 451050 - RNA, 28 nt, Human
aggcaugcuuugugacuuuccucagaag

SEQ ID NO: 451051 - RNA, 23 nt, Human
aggcuacaaaaaugucagaccaa

SEQ ID NO: 451052 - RNA, 21 nt, Human
aguuucuguuuauaucucaua

SEQ ID NO: 451053 - RNA, 20 nt, Human
auacaaacauacaauaaugc

SEQ ID NO: 451054 - RNA, 21 nt, Human
aucccucuuuccccuuuccaa

SEQ ID NO: 451055 - RNA, 19 nt, Human
auuacauuaagcaaaguac

SEQ ID NO: 451056 - RNA, 21 nt, Human
caaaauaguaggcagaaggua

SEQ ID NO: 451057 - RNA, 23 nt, Human
caaauccugccacacuacaucuu

SEQ ID NO: 451058 - RNA, 21 nt, Human
cacuacaucuucgaaaaacca

SEQ ID NO: 451059 - RNA, 24 nt, Human
cacuucacuggcuccuucuccacu

SEQ ID NO: 451060 - RNA, 18 nt, Human
cagagaacaacuuguauu

SEQ ID NO: 451061 - RNA, 19 nt, Human
cagcaagaugauuugaggg

SEQ ID NO: 451062 - RNA, 19 nt, Human
cagccagaagaccaaaagc

SEQ ID NO: 451063 - RNA, 18 nt, Human
cagcugcugugaggauaa

SEQ ID NO: 451064 - RNA, 18 nt, Human
caugcuuugugacuuucc

SEQ ID NO: 451065 - RNA, 23 nt, Human
caugucccuuauggaaaaacaag

SEQ ID NO: 451066 - RNA, 21 nt, Human
ccaaaaaguuuuacaaaagca

SEQ ID NO: 451067 - RNA, 22 nt, Human
ccaacaccugaaaagucucagg

SEQ ID NO: 451068 - RNA, 23 nt, Human
ccaaccuugaaagaauacuugca

SEQ ID NO: 451069 - RNA, 18 nt, Human
ccgacuggagccugacca

SEQ ID NO: 451070 - RNA, 22 nt, Human
ccucuucaaaaucccucuucca

SEQ ID NO: 451071 - RNA, 24 nt, Human
ccugccacacuacaucuucgaaaa

SEQ ID NO: 451072 - RNA, 20 nt, Human
ccuggucccugaugaaaccc

SEQ ID NO: 451073 - RNA, 23 nt, Human
cuagaaucccucuuuccccuuuc

SEQ ID NO: 451074 - RNA, 22 nt, Human
cucauagaaaccuccagagaac

SEQ ID NO: 451075 - RNA, 22 nt, Human
cucucgguuuugccauauugcu

SEQ ID NO: 451076 - RNA, 23 nt, Human
cuggccuuacuuagaauaaaauc

SEQ ID NO: 451077 - RNA, 23 nt, Human
cuguccugcagcugggggcucuc

SEQ ID NO: 451078 - RNA, 18 nt, Human
gacuccaaccuccuggca

SEQ ID NO: 451079 - RNA, 19 nt, Human
gagagaaauaggaaucaag

SEQ ID NO: 451080 - RNA, 21 nt, Human
gagcauggagauucaggaagg

SEQ ID NO: 451081 - RNA, 19 nt, Human
gaggcuccaacaccugaaa

SEQ ID NO: 451082 - RNA, 24 nt, Human
gcacuucacuggcuccuucuccac

SEQ ID NO: 451083 - RNA, 18 nt, Human
gcagcugggggcucucgg

SEQ ID NO: 451084 - RNA, 19 nt, Human
gcaguaaucaaauccugcc

SEQ ID NO: 451085 - RNA, 18 nt, Human
gcuucaguuuccuaacug

SEQ ID NO: 451086 - RNA, 26 nt, Human
ggaaaaacaagucauucuugcuugga

SEQ ID NO: 451087 - RNA, 23 nt, Human
ggaaaagagguacugaaucuguc

SEQ ID NO: 451088 - RNA, 20 nt, Human
ggcgauguucagggcucggc

SEQ ID NO: 451089 - RNA, 18 nt, Human
guaaaaggcaugcuuugu

SEQ ID NO: 451090 - RNA, 23 nt, Human
gucaaacucuagcccucuaucac

SEQ ID NO: 451091 - RNA, 18 nt, Human
gucucuggaagauuguuu

SEQ ID NO: 451092 - RNA, 22 nt, Human
guuuggagauuuuggaauugug

SEQ ID NO: 451093 - RNA, 19 nt, Human
uaaaaacagucauaagaaa

SEQ ID NO: 451094 - RNA, 21 nt, Human
uaaaaagcuauuaauaggcac

SEQ ID NO: 451095 - RNA, 21 nt, Human
uaaauagagauaggacuucaa

SEQ ID NO: 451096 - RNA, 21 nt, Human
uaacagaaggcuacaaaaaug

SEQ ID NO: 451097 - RNA, 18 nt, Human
uaagaaagcagaaagcaa

SEQ ID NO: 451098 - RNA, 22 nt, Human
uaagaaccucauagaaaccucc

SEQ ID NO: 451099 - RNA, 23 nt, Human
uaagaaccucauagaaaccucca

SEQ ID NO: 451100 - RNA, 21 nt, Human
uaagcaguauaauuauacccu

SEQ ID NO: 451101 - RNA, 25 nt, Human
uacaggaaaucacccaaugggccac

SEQ ID NO: 451102 - RNA, 21 nt, Human
uagaaaacuaaacccugagaa

SEQ ID NO: 451103 - RNA, 23 nt, Human
uaggcagaagguagaaaacuaaa

SEQ ID NO: 451104 - RNA, 21 nt, Human
uauaagaaaaggcaaagcaau

SEQ ID NO: 451105 - RNA, 22 nt, Human
uauaagaaaaggcaaagcaaua

SEQ ID NO: 451106 - RNA, 21 nt, Human
uauggcuucaguuuccuaacu

SEQ ID NO: 451107 - RNA, 19 nt, Human
ucaaaagaacuucaacagg

SEQ ID NO: 451108 - RNA, 23 nt, Human
ucaaaagaacuucaacaggaaua

SEQ ID NO: 451109 - RNA, 18 nt, Human
ucacuggcuccuucucca

SEQ ID NO: 451110 - RNA, 19 nt, Human
ucagaccaaaauaguaggc

SEQ ID NO: 451111 - RNA, 19 nt, Human
ucagggaaugaaugccagc

SEQ ID NO: 451112 - RNA, 24 nt, Human
uccccuuuccaaugaaggcuccac

SEQ ID NO: 451113 - RNA, 24 nt, Human
uccugccacacuacaucuucgaaa

SEQ ID NO: 451114 - RNA, 18 nt, Human
ucucaaaugacuccccuu

SEQ ID NO: 451115 - RNA, 21 nt, Human
ucuucaaaaucccucuuccaa

SEQ ID NO: 451116 - RNA, 20 nt, Human
ugaaaaauauuucaguuuuc

SEQ ID NO: 451117 - RNA, 26 nt, Human
ugaaaagucucaggguauuguaaaaa

SEQ ID NO: 451118 - RNA, 20 nt, Human
ugaaaaugcuuuuacaaaau

SEQ ID NO: 451119 - RNA, 21 nt, Human
ugacaacaucuauacagaggc

SEQ ID NO: 451120 - RNA, 20 nt, Human
ugagagguaugccuacaucu

SEQ ID NO: 451121 - RNA, 21 nt, Human
uggaauuguggauaugagauu

SEQ ID NO: 451122 - RNA, 20 nt, Human
uggcaguaaucaaauccugc

SEQ ID NO: 451123 - RNA, 21 nt, Human
uggcugacaacuuucaaauau

SEQ ID NO: 451124 - RNA, 25 nt, Human
uggugauaugauauguccaucaggc

SEQ ID NO: 451125 - RNA, 18 nt, Human
uuacaacuaaagccagca

SEQ ID NO: 451126 - RNA, 24 nt, Human
uucaaaaucccucuuccaaccuuu

SEQ ID NO: 451127 - RNA, 20 nt, Human
uuccuagaguaaaagagcuc

SEQ ID NO: 451128 - RNA, 18 nt, Human
uucuggaugacugguggc

SEQ ID NO: 451129 - RNA, 18 nt, Human
uuggaauuguggauauga

SEQ ID NO: 451130 - RNA, 23 nt, Human
uuucacuuccuuaaacucucucu

SEQ ID NO: 451131 - RNA, 18 nt, Human
uuucagggaaugaaugcc

SEQ ID NO: 451132 - RNA, 22 nt, Human
uuugugacuuuccuucuaaguu

SEQ ID NO: 451133 - RNA, 18 nt, Human
uuuuuuccguauuuccuc

SEQ ID NO: 451134 - RNA, 19 nt, Human
aaagaugaucggcugucuu

SEQ ID NO: 451135 - RNA, 20 nt, Human
aaagaugaucggcugucuua

SEQ ID NO: 451136 - RNA, 20 nt, Human
aacauggugaaacccugucu

SEQ ID NO: 451137 - RNA, 21 nt, Human
aacauggugaaacccugucuc

SEQ ID NO: 451138 - RNA, 20 nt, Human
aacccugucuccgccaaaaa

SEQ ID NO: 451139 - RNA, 27 nt, Human
aagaggaacagcaauucuuucugccac

SEQ ID NO: 451140 - RNA, 23 nt, Human
aaguaaaauaaaauaaaacacaa

SEQ ID NO: 451141 - RNA, 24 nt, Human
aaucacuugaauccgggaggugga

SEQ ID NO: 451142 - RNA, 19 nt, Human
acaacagcgaaacuccauc

SEQ ID NO: 451143 - RNA, 20 nt, Human
acaacagcgaaacuccaucu

SEQ ID NO: 451144 - RNA, 21 nt, Human
acaacagcgaaacuccaucuc

SEQ ID NO: 451145 - RNA, 18 nt, Human
acaccacugcacuccagc

SEQ ID NO: 451146 - RNA, 20 nt, Human
acaccacugcacuccagccu

SEQ ID NO: 451147 - RNA, 24 nt, Human
acaccagagagcaaggaaucaaac

SEQ ID NO: 451148 - RNA, 20 nt, Human
accacacccggcuuaggcag

SEQ ID NO: 451149 - RNA, 19 nt, Human
accacugcacuccagccug

SEQ ID NO: 451150 - RNA, 24 nt, Human
accacugcacuccagccuggguga

SEQ ID NO: 451151 - RNA, 19 nt, Human
accagcagcaagaacaggc

SEQ ID NO: 451152 - RNA, 24 nt, Human
acccagacacaccauggucucuuc

SEQ ID NO: 451153 - RNA, 20 nt, Human
accucuaaaaccaacagaau

SEQ ID NO: 451154 - RNA, 19 nt, Human
acuacagaugcaugccacc

SEQ ID NO: 451155 - RNA, 18 nt, Human
acucugucacccaggcug

SEQ ID NO: 451156 - RNA, 25 nt, Human
acucugucacccaggcuggaaugca

SEQ ID NO: 451157 - RNA, 18 nt, Human
acugcacuccagccuggg

SEQ ID NO: 451158 - RNA, 27 nt, Human
acugcacuccagccugggugacaacag

SEQ ID NO: 451159 - RNA, 19 nt, Human
acugcagccuugaccuccu

SEQ ID NO: 451160 - RNA, 24 nt, Human
acuugaggucaggaguucgagacc

SEQ ID NO: 451161 - RNA, 22 nt, Human
agaaaggaaacauuguagagga

SEQ ID NO: 451162 - RNA, 20 nt, Human
agaacaauauccuguuagca

SEQ ID NO: 451163 - RNA, 23 nt, Human
agaacaggcuuuaguuuuaagug

SEQ ID NO: 451164 - RNA, 25 nt, Human
agaagcaguugagugaucaggugac

SEQ ID NO: 451165 - RNA, 20 nt, Human
agcacugugggaggcugagg

SEQ ID NO: 451166 - RNA, 22 nt, Human
agccuggccaacauggugaaac

SEQ ID NO: 451167 - RNA, 24 nt, Human
agccuggccaacauggugaaaccc

SEQ ID NO: 451168 - RNA, 23 nt, Human
agcugggcaugguggugugugcc

SEQ ID NO: 451169 - RNA, 20 nt, Human
aggaaacauuguagaggaga

SEQ ID NO: 451170 - RNA, 19 nt, Human
aggaggcugaggcuggaga

SEQ ID NO: 451171 - RNA, 18 nt, Human
aggcaaucgggugagagu

SEQ ID NO: 451172 - RNA, 18 nt, Human
aggcaggcggaucacuug

SEQ ID NO: 451173 - RNA, 22 nt, Human
aggcaggcggaucacuugaggu

SEQ ID NO: 451174 - RNA, 26 nt, Human
aggcaggcggaucacuugaggucagg

SEQ ID NO: 451175 - RNA, 21 nt, Human
aggcugaggcaggcggaucac

SEQ ID NO: 451176 - RNA, 24 nt, Human
aggcugaggcaggcggaucacuug

SEQ ID NO: 451177 - RNA, 24 nt, Human
aggcugaggcuggagaaucacuug

SEQ ID NO: 451178 - RNA, 18 nt, Human
aggcuggagaaucacuug

SEQ ID NO: 451179 - RNA, 24 nt, Human
aggcuggagaaucacuugaauccg

SEQ ID NO: 451180 - RNA, 21 nt, Human
agguggagguugcagugagcc

SEQ ID NO: 451181 - RNA, 24 nt, Human
agguggagguugcagugagccgag

SEQ ID NO: 451182 - RNA, 22 nt, Human
agucuuguccuucuccaaucac

SEQ ID NO: 451183 - RNA, 24 nt, Human
aucacaccacugcacuccagccug

SEQ ID NO: 451184 - RNA, 19 nt, Human
aucacccuucacauagugg

SEQ ID NO: 451185 - RNA, 21 nt, Human
aucacuugaggucaggaguuc

SEQ ID NO: 451186 - RNA, 18 nt, Human
aucucacucugucaccca

SEQ ID NO: 451187 - RNA, 22 nt, Human
auggucucuucaugacuguggc

SEQ ID NO: 451188 - RNA, 23 nt, Human
caacauggugaaacccugucucc

SEQ ID NO: 451189 - RNA, 23 nt, Human
caagccgggugcgguggcucacg

SEQ ID NO: 451190 - RNA, 20 nt, Human
caagugauccuccugccuua

SEQ ID NO: 451191 - RNA, 27 nt, Human
caagugauccuccugccuuaaucuccu

SEQ ID NO: 451192 - RNA, 18 nt, Human
caauuuccagagcuguag

SEQ ID NO: 451193 - RNA, 21 nt, Human
cacaccacugcacuccagccu

SEQ ID NO: 451194 - RNA, 19 nt, Human
caccacacccggcuuaggc

SEQ ID NO: 451195 - RNA, 24 nt, Human
caccuauuggauaaaacucaaagu

SEQ ID NO: 451196 - RNA, 22 nt, Human
cacgccuguaaucccagcacug

SEQ ID NO: 451197 - RNA, 18 nt, Human
cacuccagccugggugac

SEQ ID NO: 451198 - RNA, 19 nt, Human
cacuccagccugggugaca

SEQ ID NO: 451199 - RNA, 25 nt, Human
cacuccagccugggugacaacagcg

SEQ ID NO: 451200 - RNA, 22 nt, Human
cacucugucacccaggcuggaa

SEQ ID NO: 451201 - RNA, 23 nt, Human
cacucugucacccaggcuggaau

SEQ ID NO: 451202 - RNA, 19 nt, Human
cacugcacuccagccuggg

SEQ ID NO: 451203 - RNA, 19 nt, Human
cacugcacuccagccuggg

SEQ ID NO: 451204 - RNA, 22 nt, Human
cacugcacuccagccuggguga

SEQ ID NO: 451205 - RNA, 23 nt, Human
cacugcacuccagccugggugac

SEQ ID NO: 451206 - RNA, 24 nt, Human
cacugcacuccagccugggugaca

SEQ ID NO: 451207 - RNA, 25 nt, Human
cacugcacuccagccugggugacaa

SEQ ID NO: 451208 - RNA, 19 nt, Human
cacugcagccuugaccucc

SEQ ID NO: 451209 - RNA, 23 nt, Human
cacuugaggucaggaguucgaga

SEQ ID NO: 451210 - RNA, 22 nt, Human
cagagacaggaucucacucugu

SEQ ID NO: 451211 - RNA, 24 nt, Human
cagcacugugggaggcugaggcag

SEQ ID NO: 451212 - RNA, 26 nt, Human
cagcacugugggaggcugaggcaggc

SEQ ID NO: 451213 - RNA, 22 nt, Human
cagcagcaagaacaggcuuuag

SEQ ID NO: 451214 - RNA, 23 nt, Human
cagccuugaccuccugggcucaa

SEQ ID NO: 451215 - RNA, 24 nt, Human
cagccuugaccuccugggcucaag

SEQ ID NO: 451216 - RNA, 24 nt, Human
cagcucacugcagccuugaccucc

SEQ ID NO: 451217 - RNA, 24 nt, Human
caggaggcugaggcuggagaauca

SEQ ID NO: 451218 - RNA, 27 nt, Human
caugccaccacacccggcuuaggcaga

SEQ ID NO: 451219 - RNA, 20 nt, Human
ccacugcacuccagccuggg

SEQ ID NO: 451220 - RNA, 20 nt, Human
ccacugcacuccagccuggg

SEQ ID NO: 451221 - RNA, 20 nt, Human
ccacugcacuccagccuggg

SEQ ID NO: 451222 - RNA, 21 nt, Human
ccacugcacuccagccugggu

SEQ ID NO: 451223 - RNA, 21 nt, Human
ccacugcacuccagccugggu

SEQ ID NO: 451224 - RNA, 23 nt, Human
ccacugcacuccagccuggguga

SEQ ID NO: 451225 - RNA, 24 nt, Human
ccacugcacuccagccugggugac

SEQ ID NO: 451226 - RNA, 27 nt, Human
ccacugcacuccagccugggugacaac

SEQ ID NO: 451227 - RNA, 18 nt, Human
ccagagcuguagcugcug

SEQ ID NO: 451228 - RNA, 22 nt, Human
ccauaugcuaaguguucucccc

SEQ ID NO: 451229 - RNA, 18 nt, Human
cccugagacacuauacua

SEQ ID NO: 451230 - RNA, 21 nt, Human
cccuuuucauuccaguuacau

SEQ ID NO: 451231 - RNA, 18 nt, Human
ccuccugccuuaaucucc

SEQ ID NO: 451232 - RNA, 24 nt, Human
ccuccugggcucaagugauccucc

SEQ ID NO: 451233 - RNA, 18 nt, Human
ccuccuuccuuauugccc

SEQ ID NO: 451234 - RNA, 22 nt, Human
ccuggccaacauggugaaaccc

SEQ ID NO: 451235 - RNA, 24 nt, Human
ccuggccaacauggugaaacccug

SEQ ID NO: 451236 - RNA, 22 nt, Human
ccugggcucaagugauccuccu

SEQ ID NO: 451237 - RNA, 23 nt, Human
ccugggcucaagugauccuccug

SEQ ID NO: 451238 - RNA, 21 nt, Human
ccuguaaucccagcacugugg

SEQ ID NO: 451239 - RNA, 21 nt, Human
ccuguaaucccagcuacucag

SEQ ID NO: 451240 - RNA, 22 nt, Human
ccuguaaucccagcuacucagg

SEQ ID NO: 451241 - RNA, 22 nt, Human
ccuuaaucuccugaauaggugg

SEQ ID NO: 451242 - RNA, 22 nt, Human
ccuugaccuccugggcucaagu

SEQ ID NO: 451243 - RNA, 19 nt, Human
ccuugugccagccuucccc

SEQ ID NO: 451244 - RNA, 24 nt, Human
cgagaccagccuggccaacauggu

SEQ ID NO: 451245 - RNA, 21 nt, Human
cgccaaaaauacaaaaguuag

SEQ ID NO: 451246 - RNA, 23 nt, Human
cgccuguaaucccagcacugugg

SEQ ID NO: 451247 - RNA, 24 nt, Human
cgccuguaaucccagcacuguggg

SEQ ID NO: 451248 - RNA, 24 nt, Human
cggaucacuugaggucaggaguuc

SEQ ID NO: 451249 - RNA, 27 nt, Human
cggaucacuugaggucaggaguucgag

SEQ ID NO: 451250 - RNA, 29 nt, Human
cgggagguggagguugcagugacaacggu

SEQ ID NO: 451251 - RNA, 24 nt, Human
cgggagguggagguugcagugagc

SEQ ID NO: 451252 - RNA, 22 nt, Human
cucaaaguccucuuuccauccc

SEQ ID NO: 451253 - RNA, 24 nt, Human
cucaagugauccuccugccuuaau

SEQ ID NO: 451254 - RNA, 22 nt, Human
cucacgccuguaaucccagcac

SEQ ID NO: 451255 - RNA, 23 nt, Human
cucacgccuguaaucccagcacu

SEQ ID NO: 451256 - RNA, 24 nt, Human
cucacugcagccuugaccuccugg

SEQ ID NO: 451257 - RNA, 21 nt, Human
cuccuagguggcauuuaaacu

SEQ ID NO: 451258 - RNA, 19 nt, Human
cugaagcugagaaaaaccu

SEQ ID NO: 451259 - RNA, 22 nt, Human
cugcagccuugaccuccugggc

SEQ ID NO: 451260 - RNA, 23 nt, Human
cugcagccuugaccuccugggcu

SEQ ID NO: 451261 - RNA, 20 nt, Human
cugccugaagcugagaaaaa

SEQ ID NO: 451262 - RNA, 24 nt, Human
cuggccaacauggugaaacccugu

SEQ ID NO: 451263 - RNA, 21 nt, Human
cuugaauccgggagguggagg

SEQ ID NO: 451264 - RNA, 18 nt, Human
cuugaucaacaaugucac

SEQ ID NO: 451265 - RNA, 24 nt, Human
cuuuucauuccaguuacauaaacu

SEQ ID NO: 451266 - RNA, 19 nt, Human
cuuuuguucucaucuuucc

SEQ ID NO: 451267 - RNA, 23 nt, Human
gagaaucacuugaauccgggagg

SEQ ID NO: 451268 - RNA, 23 nt, Human
gagaucacaccacugcacuccag

SEQ ID NO: 451269 - RNA, 18 nt, Human
gaggcugaggcuggagaa

SEQ ID NO: 451270 - RNA, 22 nt, Human
gagguugcagugagccgagauc

SEQ ID NO: 451271 - RNA, 24 nt, Human
gaucacuugaggucaggaguucga

SEQ ID NO: 451272 - RNA, 20 nt, Human
gccaaaaauacaaaaguuag

SEQ ID NO: 451273 - RNA, 24 nt, Human
gccaacauggugaaacccugucuc

SEQ ID NO: 451274 - RNA, 18 nt, Human
gccaccacacccggcuua

SEQ ID NO: 451275 - RNA, 21 nt, Human
gccaccacacccggcuuaggc

SEQ ID NO: 451276 - RNA, 20 nt, Human
gccgagaucacaccacugca

SEQ ID NO: 451277 - RNA, 21 nt, Human
gcggaucacuugaggucagga

SEQ ID NO: 451278 - RNA, 19 nt, Human
gcucaagugauccuccugc

SEQ ID NO: 451279 - RNA, 20 nt, Human
gcucaagugauccuccugcc

SEQ ID NO: 451280 - RNA, 21 nt, Human
ggaaggagauuccaaagagga

SEQ ID NO: 451281 - RNA, 20 nt, Human
ggaggcagaaguuucuuagg

SEQ ID NO: 451282 - RNA, 20 nt, Human
ggagguugcagugagccgag

SEQ ID NO: 451283 - RNA, 22 nt, Human
ggagguugcagugagccgagau

SEQ ID NO: 451284 - RNA, 23 nt, Human
ggagguugcagugagccgagauc

SEQ ID NO: 451285 - RNA, 24 nt, Human
ggagguugcagugagccgagauca

SEQ ID NO: 451286 - RNA, 22 nt, Human
ggaucacuugaggucaggaguu

SEQ ID NO: 451287 - RNA, 23 nt, Human
ggaucacuugaggucaggaguuc

SEQ ID NO: 451288 - RNA, 25 nt, Human
ggcagguuuuuuuuuucuucagaga

SEQ ID NO: 451289 - RNA, 21 nt, Human
ggcucacgccuguaaucccag

SEQ ID NO: 451290 - RNA, 21 nt, Human
gggaggcagaaguuucuuagg

SEQ ID NO: 451291 - RNA, 24 nt, Human
gggcaugguggugugugccuguaa

SEQ ID NO: 451292 - RNA, 22 nt, Human
gggcucaagugauccuccugcc

SEQ ID NO: 451293 - RNA, 24 nt, Human
gggugcgguggcucacgccuguaa

SEQ ID NO: 451294 - RNA, 23 nt, Human
gguggcucacgccuguaauccca

SEQ ID NO: 451295 - RNA, 24 nt, Human
gguggcucacgccuguaaucccag

SEQ ID NO: 451296 - RNA, 24 nt, Human
gguggugugugccuguaaucccag

SEQ ID NO: 451297 - RNA, 24 nt, Human
gguuuugggagaaaggaaacauug

SEQ ID NO: 451298 - RNA, 22 nt, Human
gucucuucaugacuguggcuuu

SEQ ID NO: 451299 - RNA, 24 nt, Human
guggugugugccuguaaucccagc

SEQ ID NO: 451300 - RNA, 18 nt, Human
gugguuggccucccuuua

SEQ ID NO: 451301 - RNA, 19 nt, Human
guugcagugagccgagauc

SEQ ID NO: 451302 - RNA, 20 nt, Human
guuuguuuuuguauuuucca

SEQ ID NO: 451303 - RNA, 22 nt, Human
uaaaacacaaaugugaucacag

SEQ ID NO: 451304 - RNA, 24 nt, Human
uaaaacacaaaugugaucacagag

SEQ ID NO: 451305 - RNA, 18 nt, Human
uaaaacagaaacagaacu

SEQ ID NO: 451306 - RNA, 18 nt, Human
uaaaacagaaacagaacu

SEQ ID NO: 451307 - RNA, 28 nt, Human
uaaaauaaaacacaaaugugaucacaga

SEQ ID NO: 451308 - RNA, 22 nt, Human
uaaaauguucaaaauugaucuc

SEQ ID NO: 451309 - RNA, 20 nt, Human
uaaacugcucacaguuaccc

SEQ ID NO: 451310 - RNA, 21 nt, Human
uaaacuggcuaaugggccuug

SEQ ID NO: 451311 - RNA, 21 nt, Human
uaaccaccccugauggucuca

SEQ ID NO: 451312 - RNA, 20 nt, Human
uaagaaaauggguugagagg

SEQ ID NO: 451313 - RNA, 21 nt, Human
uaagcgaguucccuuaaccca

SEQ ID NO: 451314 - RNA, 23 nt, Human
uaaucauaauagaaauucuccuu

SEQ ID NO: 451315 - RNA, 23 nt, Human
uacagaugcaugccaccacaccc

SEQ ID NO: 451316 - RNA, 26 nt, Human
uacaucuccacaucaaugucugacca

SEQ ID NO: 451317 - RNA, 21 nt, Human
uaccagcagcaagaacaggcu

SEQ ID NO: 451318 - RNA, 23 nt, Human
uaccaugagauaaaacagaaaca

SEQ ID NO: 451319 - RNA, 20 nt, Human
uaugcuaaguguucucccca

SEQ ID NO: 451320 - RNA, 20 nt, Human
uauguuuacaugacuggcuu

SEQ ID NO: 451321 - RNA, 23 nt, Human
ucacaccacugcacuccagccug

SEQ ID NO: 451322 - RNA, 19 nt, Human
ucacccaggcuggaaugca

SEQ ID NO: 451323 - RNA, 23 nt, Human
ucacugcagccuugaccuccugg

SEQ ID NO: 451324 - RNA, 24 nt, Human
ucacugcagccuugaccuccuggg

SEQ ID NO: 451325 - RNA, 24 nt, Human
ucacuugaauccgggagguggagg

SEQ ID NO: 451326 - RNA, 20 nt, Human
ucacuugaggucaggaguuc

SEQ ID NO: 451327 - RNA, 18 nt, Human
ucauuguauguuuguuug

SEQ ID NO: 451328 - RNA, 23 nt, Human
uccagccugggugacaacagcga

SEQ ID NO: 451329 - RNA, 21 nt, Human
uccauuaaccuacuauagaag

SEQ ID NO: 451330 - RNA, 24 nt, Human
ucccagaacaauauccuguuagca

SEQ ID NO: 451331 - RNA, 20 nt, Human
ucccagggaaggaccuugcc

SEQ ID NO: 451332 - RNA, 22 nt, Human
ucccugccauuccucugagccc

SEQ ID NO: 451333 - RNA, 21 nt, Human
ucccuuaacccaauguugcuu

SEQ ID NO: 451334 - RNA, 21 nt, Human
uccgggagguggagguugcag

SEQ ID NO: 451335 - RNA, 21 nt, Human
uccugggcucaagugauccuc

SEQ ID NO: 451336 - RNA, 22 nt, Human
uccugggcucaagugauccucc

SEQ ID NO: 451337 - RNA, 24 nt, Human
uccugggcucaagugauccuccug

SEQ ID NO: 451338 - RNA, 19 nt, Human
uccuugugccagccuuccc

SEQ ID NO: 451339 - RNA, 22 nt, Human
ucgaacagcucccacaauguca

SEQ ID NO: 451340 - RNA, 22 nt, Human
ucggcugucuuagauguccauc

SEQ ID NO: 451341 - RNA, 23 nt, Human
ucucacucugucacccaggcugg

SEQ ID NO: 451342 - RNA, 24 nt, Human
ucucacucugucacccaggcugga

SEQ ID NO: 451343 - RNA, 26 nt, Human
ucucacucugucacccaggcuggaau

SEQ ID NO: 451344 - RNA, 27 nt, Human
ucucacucugucacccaggcuggaaug

SEQ ID NO: 451345 - RNA, 19 nt, Human
ucucaucuuuccuucucac

SEQ ID NO: 451346 - RNA, 24 nt, Human
ucugucacccaggcuggaaugcag

SEQ ID NO: 451347 - RNA, 20 nt, Human
ugaagcugagaaaaaccugu

SEQ ID NO: 451348 - RNA, 21 nt, Human
ugaagcugagaaaaaccuguu

SEQ ID NO: 451349 - RNA, 25 nt, Human
ugaccuccugggcucaagugauccu

SEQ ID NO: 451350 - RNA, 22 nt, Human
ugagaggaggcaguuucauugu

SEQ ID NO: 451351 - RNA, 19 nt, Human
ugagauaaaacagaaacag

SEQ ID NO: 451352 - RNA, 24 nt, Human
ugaggcaggcggaucacuugaggu

SEQ ID NO: 451353 - RNA, 26 nt, Human
ugaggcaggcggaucacuugagguca

SEQ ID NO: 451354 - RNA, 20 nt, Human
ugaggcuggagaaucacuug

SEQ ID NO: 451355 - RNA, 25 nt, Human
ugaggcuggagaaucacuugaaucc

SEQ ID NO: 451356 - RNA, 18 nt, Human
ugaucacagagccucccu

SEQ ID NO: 451357 - RNA, 19 nt, Human
ugcagugcagcucacugca

SEQ ID NO: 451358 - RNA, 24 nt, Human
ugccacaagagaaaaaacacuguu

SEQ ID NO: 451359 - RNA, 22 nt, Human
ugccaucccugccauuccucug

SEQ ID NO: 451360 - RNA, 20 nt, Human
ugccugaagcugagaaaaac

SEQ ID NO: 451361 - RNA, 24 nt, Human
ugccuguaaucccagcuacucagg

SEQ ID NO: 451362 - RNA, 23 nt, Human
ugcuaaacuggcuaaugggccuu

SEQ ID NO: 451363 - RNA, 19 nt, Human
ugcuuuuuuuuucuccuug

SEQ ID NO: 451364 - RNA, 20 nt, Human
uggauaaaacucaaaguccu

SEQ ID NO: 451365 - RNA, 24 nt, Human
uggccaacauggugaaacccuguc

SEQ ID NO: 451366 - RNA, 23 nt, Human
uggccuggcaaggaacguucugu

SEQ ID NO: 451367 - RNA, 20 nt, Human
uggcuaaugggccuuggcuu

SEQ ID NO: 451368 - RNA, 24 nt, Human
uggcucacgccuguaaucccagca

SEQ ID NO: 451369 - RNA, 23 nt, Human
ugggaaggagauuccaaagagga

SEQ ID NO: 451370 - RNA, 21 nt, Human
ugggacuacagaugcaugcca

SEQ ID NO: 451371 - RNA, 24 nt, Human
ugggacuacagaugcaugccacca

SEQ ID NO: 451372 - RNA, 18 nt, Human
ugggaggcugaggcaggc

SEQ ID NO: 451373 - RNA, 20 nt, Human
ugggaggcugaggcaggcgg

SEQ ID NO: 451374 - RNA, 24 nt, Human
ugggaggcugaggcaggcggauca

SEQ ID NO: 451375 - RNA, 20 nt, Human
ugggcaaagacgcagcagag

SEQ ID NO: 451376 - RNA, 20 nt, Human
ugggcucaagugauccuccu

SEQ ID NO: 451377 - RNA, 24 nt, Human
ugggcucaagugauccuccugccu

SEQ ID NO: 451378 - RNA, 23 nt, Human
uggugauucccagggaaggaccu

SEQ ID NO: 451379 - RNA, 24 nt, Human
ugguggugugugccuguaauccca

SEQ ID NO: 451380 - RNA, 21 nt, Human
uggugugugccuguaauccca

SEQ ID NO: 451381 - RNA, 22 nt, Human
uggugugugccuguaaucccag

SEQ ID NO: 451382 - RNA, 24 nt, Human
uggugugugccuguaaucccagcu

SEQ ID NO: 451383 - RNA, 23 nt, Human
uguagaggagauucagacuuugg

SEQ ID NO: 451384 - RNA, 24 nt, Human
ugucugggaaggagauuccaaaga

SEQ ID NO: 451385 - RNA, 21 nt, Human
ugucuuagauguccaucuggc

SEQ ID NO: 451386 - RNA, 19 nt, Human
uguguccuaauugaagaaa

SEQ ID NO: 451387 - RNA, 21 nt, Human
uguucucaucuuuccuucuca

SEQ ID NO: 451388 - RNA, 20 nt, Human
uguuuguuuuuguauuuucc

SEQ ID NO: 451389 - RNA, 22 nt, Human
uuaaaguaaaugcuaaacuggc

SEQ ID NO: 451390 - RNA, 21 nt, Human
uuaccagcagcaagaacaggc

SEQ ID NO: 451391 - RNA, 24 nt, Human
uuagcugggcaugguggugugugc

SEQ ID NO: 451392 - RNA, 18 nt, Human
uucauugacagauuauga

SEQ ID NO: 451393 - RNA, 19 nt, Human
uuccagagcuguagcugcu

SEQ ID NO: 451394 - RNA, 19 nt, Human
uuccaucccugaauaccuc

SEQ ID NO: 451395 - RNA, 24 nt, Human
uugaauccgggagguggagguugc

SEQ ID NO: 451396 - RNA, 19 nt, Human
uugcagugagccgagauca

SEQ ID NO: 451397 - RNA, 20 nt, Human
uugcagugagccgagaucac

SEQ ID NO: 451398 - RNA, 20 nt, Human
uuguauguuuguuuguuuuu

SEQ ID NO: 451399 - RNA, 24 nt, Human
uuuggagucauucuccaaacuccu

SEQ ID NO: 451400 - RNA, 18 nt, Human
uuuuccauuaaccuacua

SEQ ID NO: 451401 - RNA, 20 nt, Human
agcuucccuggcccaguccc

SEQ ID NO: 451402 - RNA, 19 nt, Human
aggcagaagccugcacugc

SEQ ID NO: 451403 - RNA, 20 nt, Human
agguggccgggaccccagga

SEQ ID NO: 451404 - RNA, 23 nt, Human
auggggcgggggcugggggcagu

SEQ ID NO: 451405 - RNA, 19 nt, Human
ccacagcucaaagcugagg

SEQ ID NO: 451406 - RNA, 21 nt, Human
ccccaggagcuggcugggccc

SEQ ID NO: 451407 - RNA, 21 nt, Human
ccccuggccgggccucgggac

SEQ ID NO: 451408 - RNA, 22 nt, Human
cccugcccagccccuggccggg

SEQ ID NO: 451409 - RNA, 18 nt, Human
cggcaggaagcggguagc

SEQ ID NO: 451410 - RNA, 23 nt, Human
gacuccggcgcggcgcgggcggc

SEQ ID NO: 451411 - RNA, 22 nt, Human
gagcuuucaacacaggcagggc

SEQ ID NO: 451412 - RNA, 18 nt, Human
gcagccacagcucaaagc

SEQ ID NO: 451413 - RNA, 22 nt, Human
gcgcggcgcgggcggccuggag

SEQ ID NO: 451414 - RNA, 20 nt, Human
gcggguagcuggcggacagc

SEQ ID NO: 451415 - RNA, 19 nt, Human
ggcccaccuggcaucccug

SEQ ID NO: 451416 - RNA, 18 nt, Human
ggcgcggcgcgggcggcc

SEQ ID NO: 451417 - RNA, 22 nt, Human
ggcggcuggcucugcagggcag

SEQ ID NO: 451418 - RNA, 20 nt, Human
ggggaugguaagcggcccgu

SEQ ID NO: 451419 - RNA, 19 nt, Human
ggggcgggggcugggggca

SEQ ID NO: 451420 - RNA, 20 nt, Human
uccccagguggccgggaccc

SEQ ID NO: 451421 - RNA, 18 nt, Human
uggcaggcgcggcuuccc

SEQ ID NO: 451422 - RNA, 20 nt, Human
uggcugggcccaccuggcau

SEQ ID NO: 451423 - RNA, 25 nt, Human
uggguggcagccacagcucaaagcu

SEQ ID NO: 451424 - RNA, 18 nt, Human
uucccuggcccagucccc

SEQ ID NO: 451425 - RNA, 22 nt, Human
uuuuucaggcuuccgggucuuu

SEQ ID NO: 451426 - RNA, 21 nt, Human
uuuuuuuuuuuuuuuuucagg

SEQ ID NO: 451427 - RNA, 20 nt, Human
acaacucaaaggcagagcaa

SEQ ID NO: 451428 - RNA, 20 nt, Human
caacacagaaagacuuuguc

SEQ ID NO: 451429 - RNA, 24 nt, Human
cagggcaggaccaagauggccgcu

SEQ ID NO: 451430 - RNA, 19 nt, Human
gagaaucugucagggcagg

SEQ ID NO: 451431 - RNA, 18 nt, Human
gauuucguucucucacua

SEQ ID NO: 451432 - RNA, 19 nt, Human
gcagagcaagaaggaugag

SEQ ID NO: 451433 - RNA, 20 nt, Human
uaggagaaucugucagggca

SEQ ID NO: 451434 - RNA, 21 nt, Human
ugagaaacaucugacuggccg

SEQ ID NO: 451435 - RNA, 24 nt, Human
aauacaagggccagagcuuccucc

SEQ ID NO: 451436 - RNA, 20 nt, Human
acccuggcugcccacggucc

SEQ ID NO: 451437 - RNA, 21 nt, Human
ggccagagcuuccuccuggac

SEQ ID NO: 451438 - RNA, 26 nt, Human
uuuuuuguauaauuauuauuuuuaau

SEQ ID NO: 451439 - RNA, 18 nt, Human
uuuuuuuuuuuuuuuuug

SEQ ID NO: 451440 - RNA, 19 nt, Human
uuuuuuuuuuuuuuuuugu

SEQ ID NO: 451441 - RNA, 20 nt, Human
caccggaagcacaaccugca

SEQ ID NO: 451442 - RNA, 21 nt, Human
ccugcagacggagcaggaugc

SEQ ID NO: 451443 - RNA, 18 nt, Human
cugcagacggagcaggau

SEQ ID NO: 451444 - RNA, 23 nt, Human
gcaccggaagcacaaccugcaga

SEQ ID NO: 451445 - RNA, 18 nt, Human
gcuuuauucauccgcugc

SEQ ID NO: 451446 - RNA, 20 nt, Human
ggaagcacaaccugcagacg

SEQ ID NO: 451447 - RNA, 23 nt, Human
ugcagacggagcaggaugccgca

SEQ ID NO: 451448 - RNA, 24 nt, Human
aggauucagcaacgauugagauug

SEQ ID NO: 451449 - RNA, 21 nt, Human
aguccugguguccgcugugcc

SEQ ID NO: 451450 - RNA, 23 nt, Human
ggaguccugguguccgcugugcc

SEQ ID NO: 451451 - RNA, 22 nt, Human
gucguggggugggggggugcag

SEQ ID NO: 451452 - RNA, 20 nt, Human
uaugaaaggauucagcaacg

SEQ ID NO: 451453 - RNA, 21 nt, Human
ugaaaggauucagcaacgauu

SEQ ID NO: 451454 - RNA, 20 nt, Human
uggggugggggggugcagag

SEQ ID NO: 451455 - RNA, 20 nt, Human
ccgucgccccgaaccgccgg

SEQ ID NO: 451456 - RNA, 18 nt, Human
ucuuuuuuuuuuuuuuuu

SEQ ID NO: 451457 - RNA, 19 nt, Human
uucagauagcagucugauc

SEQ ID NO: 451458 - RNA, 18 nt, Human
uuuuuuuuuuuuuuuuug

SEQ ID NO: 451459 - RNA, 25 nt, Human
uuuuuuuuuuuuuuuuuuucuuuuu

SEQ ID NO: 451460 - RNA, 24 nt, Human
aaaaacaucacaggcacacacaaa

SEQ ID NO: 451461 - RNA, 22 nt, Human
aaacagccaauuuccaaccccc

SEQ ID NO: 451462 - RNA, 19 nt, Human
aaacaucacaggcacacac

SEQ ID NO: 451463 - RNA, 24 nt, Human
aaacaucacaggcacacacaaaau

SEQ ID NO: 451464 - RNA, 18 nt, Human
aacuuuauuugucacucu

SEQ ID NO: 451465 - RNA, 21 nt, Human
accacagugggauucacguca

SEQ ID NO: 451466 - RNA, 19 nt, Human
acuuuaaagcacacuaaaa

SEQ ID NO: 451467 - RNA, 21 nt, Human
acuuuauuugucacucuugau

SEQ ID NO: 451468 - RNA, 22 nt, Human
agacauugguccacuccaacau

SEQ ID NO: 451469 - RNA, 23 nt, Human
agcaucuauauacuccacaaggc

SEQ ID NO: 451470 - RNA, 23 nt, Human
aggugacgcgcucggacucgucc

SEQ ID NO: 451471 - RNA, 25 nt, Human
augaaaagcaucuauauacuccaca

SEQ ID NO: 451472 - RNA, 22 nt, Human
auucacucuagaaaaacaucac

SEQ ID NO: 451473 - RNA, 22 nt, Human
auucauuaaacagaaugaaauc

SEQ ID NO: 451474 - RNA, 19 nt, Human
caaauuguucauaguauac

SEQ ID NO: 451475 - RNA, 24 nt, Human
cacaaggcuaguuucuucuuagau

SEQ ID NO: 451476 - RNA, 22 nt, Human
cacucuagaaaaacaucacagg

SEQ ID NO: 451477 - RNA, 24 nt, Human
cagaagaggguuaaaaaacagcug

SEQ ID NO: 451478 - RNA, 18 nt, Human
cagccgcagcgugaggag

SEQ ID NO: 451479 - RNA, 23 nt, Human
cagccgcagcgugaggaggugac

SEQ ID NO: 451480 - RNA, 23 nt, Human
cagggauuuuuguguguauaaug

SEQ ID NO: 451481 - RNA, 19 nt, Human
cauaacacgagcuauucua

SEQ ID NO: 451482 - RNA, 24 nt, Human
ccaaauaugauuuucaccuaugcu

SEQ ID NO: 451483 - RNA, 22 nt, Human
ccaacccccuuuucuaauucug

SEQ ID NO: 451484 - RNA, 19 nt, Human
ccacagugggauucacguc

SEQ ID NO: 451485 - RNA, 21 nt, Human
cgacacggaacgggccggcgg

SEQ ID NO: 451486 - RNA, 21 nt, Human
cgacagccgcagcgugaggag

SEQ ID NO: 451487 - RNA, 18 nt, Human
cucuguuacucagauaca

SEQ ID NO: 451488 - RNA, 19 nt, Human
gccaauuuccaacccccuu

SEQ ID NO: 451489 - RNA, 18 nt, Human
uaaaaaguagaauucacc

SEQ ID NO: 451490 - RNA, 24 nt, Human
uaaauguaaaguauacuaucuacu

SEQ ID NO: 451491 - RNA, 22 nt, Human
uagaaaaacaucacaggcacac

SEQ ID NO: 451492 - RNA, 18 nt, Human
uagaauucacccacuucc

SEQ ID NO: 451493 - RNA, 20 nt, Human
ucaaaaugucccucagggau

SEQ ID NO: 451494 - RNA, 19 nt, Human
ucaaauuaagacauuuaca

SEQ ID NO: 451495 - RNA, 25 nt, Human
ucaagcauauuauggaaucuauacc

SEQ ID NO: 451496 - RNA, 20 nt, Human
uccaacauaaaaaguagaau

SEQ ID NO: 451497 - RNA, 20 nt, Human
uccaacccccuuuucuaauu

SEQ ID NO: 451498 - RNA, 18 nt, Human
uccacuccaacauaaaaa

SEQ ID NO: 451499 - RNA, 23 nt, Human
uccauaacacgagcuauucuaaa

SEQ ID NO: 451500 - RNA, 24 nt, Human
ugcagaagaggguuaaaaaacagc

SEQ ID NO: 451501 - RNA, 25 nt, Human
uuauauucaugccucaaaauguccc

SEQ ID NO: 451502 - RNA, 22 nt, Human
uuccaacccccuuuucuaauuc

SEQ ID NO: 451503 - RNA, 24 nt, Human
aaaagccaggguaggaggagggca

SEQ ID NO: 451504 - RNA, 22 nt, Human
aaaccaucagugacacugaccu

SEQ ID NO: 451505 - RNA, 24 nt, Human
aacagagcaaagaucaucacgaaa

SEQ ID NO: 451506 - RNA, 23 nt, Human
aacauacuuuauucaacauagga

SEQ ID NO: 451507 - RNA, 23 nt, Human
aacccgcacccuccgcggcucca

SEQ ID NO: 451508 - RNA, 25 nt, Human
aaccgccacagaaaccaccgcagcc

SEQ ID NO: 451509 - RNA, 22 nt, Human
aacucugcuucaaaccccacug

SEQ ID NO: 451510 - RNA, 24 nt, Human
aaggccucuguuccaagcaucccg

SEQ ID NO: 451511 - RNA, 23 nt, Human
acagagcaaagaucaucacgaaa

SEQ ID NO: 451512 - RNA, 21 nt, Human
acagggagaagccacucauga

SEQ ID NO: 451513 - RNA, 22 nt, Human
accuggauuucucuccaaccuc

SEQ ID NO: 451514 - RNA, 18 nt, Human
acgaaaacccaggacacc

SEQ ID NO: 451515 - RNA, 20 nt, Human
acuacacuacacacaaagcu

SEQ ID NO: 451516 - RNA, 27 nt, Human
acuacacuacacacaaagcuaggggug

SEQ ID NO: 451517 - RNA, 18 nt, Human
acuccccccacuacuccu

SEQ ID NO: 451518 - RNA, 22 nt, Human
acugaagacaucaugauugggg

SEQ ID NO: 451519 - RNA, 19 nt, Human
agagggaagcccugugcac

SEQ ID NO: 451520 - RNA, 21 nt, Human
agccacaugcacggcagcccu

SEQ ID NO: 451521 - RNA, 24 nt, Human
agccagggcugccacgccagcaca

SEQ ID NO: 451522 - RNA, 23 nt, Human
agcccucacagccacaugcacgg

SEQ ID NO: 451523 - RNA, 23 nt, Human
aggaagccccuuggcaggacugu

SEQ ID NO: 451524 - RNA, 21 nt, Human
aggagcagcgcuucgacgugc

SEQ ID NO: 451525 - RNA, 18 nt, Human
aggaggaccuugggcagg

SEQ ID NO: 451526 - RNA, 22 nt, Human
aggcagaaccaagaggacccca

SEQ ID NO: 451527 - RNA, 18 nt, Human
aggcagcucacucagaaa

SEQ ID NO: 451528 - RNA, 22 nt, Human
aggcggggaggguagcaugggg

SEQ ID NO: 451529 - RNA, 23 nt, Human
aggcggggaggguagcauggggc

SEQ ID NO: 451530 - RNA, 21 nt, Human
agggagaagccacucaugaug

SEQ ID NO: 451531 - RNA, 20 nt, Human
agggcugucuggauggaugg

SEQ ID NO: 451532 - RNA, 22 nt, Human
aggggggcugcacaaggucggg

SEQ ID NO: 451533 - RNA, 21 nt, Human
agggguggugggagacccaag

SEQ ID NO: 451534 - RNA, 21 nt, Human
aggguucccugaacucugcuu

SEQ ID NO: 451535 - RNA, 19 nt, Human
auggauggaggcuaagagg

SEQ ID NO: 451536 - RNA, 21 nt, Human
auggcuuccaaacagcaaacc

SEQ ID NO: 451537 - RNA, 18 nt, Human
caaaagacgcaaauauca

SEQ ID NO: 451538 - RNA, 19 nt, Human
caaaccccacuggaaacag

SEQ ID NO: 451539 - RNA, 19 nt, Human
caagcaucccggcugugcu

SEQ ID NO: 451540 - RNA, 20 nt, Human
caauggcuuccaaacagcaa

SEQ ID NO: 451541 - RNA, 20 nt, Human
caccagccuggcccacucag

SEQ ID NO: 451542 - RNA, 20 nt, Human
cacccucggccugagggugu

SEQ ID NO: 451543 - RNA, 21 nt, Human
caccgcagccaaacccgcacc

SEQ ID NO: 451544 - RNA, 18 nt, Human
cacgaaaacccaggacac

SEQ ID NO: 451545 - RNA, 21 nt, Human
cacuacacacaaagcuagggg

SEQ ID NO: 451546 - RNA, 20 nt, Human
cacuacacuacacacaaagc

SEQ ID NO: 451547 - RNA, 21 nt, Human
cagaaaaucacuacacuacac

SEQ ID NO: 451548 - RNA, 21 nt, Human
cagaaaccaccgcagccaaac

SEQ ID NO: 451549 - RNA, 23 nt, Human
cagagcaaagaucaucacgaaaa

SEQ ID NO: 451550 - RNA, 19 nt, Human
cagaugcagggaacucaaa

SEQ ID NO: 451551 - RNA, 20 nt, Human
cagcaaccgccacagaaacc

SEQ ID NO: 451552 - RNA, 24 nt, Human
cagccaaacccgcacccuccgcgg

SEQ ID NO: 451553 - RNA, 18 nt, Human
cagcucacucagaaaagc

SEQ ID NO: 451554 - RNA, 21 nt, Human
caggcagagaggcacagcuga

SEQ ID NO: 451555 - RNA, 20 nt, Human
caggcugcaggcagaaccaa

SEQ ID NO: 451556 - RNA, 23 nt, Human
caggcugcaggcagaaccaagag

SEQ ID NO: 451557 - RNA, 24 nt, Human
caggcugcaggcagaaccaagagg

SEQ ID NO: 451558 - RNA, 19 nt, Human
cagggugacacgaaugagc

SEQ ID NO: 451559 - RNA, 21 nt, Human
caggguggggucagaaaggcg

SEQ ID NO: 451560 - RNA, 22 nt, Human
ccacagaaaccaccgcagccaa

SEQ ID NO: 451561 - RNA, 23 nt, Human
ccacagaaaccaccgcagccaaa

SEQ ID NO: 451562 - RNA, 26 nt, Human
ccacagaaaccaccgcagccaaaccc

SEQ ID NO: 451563 - RNA, 21 nt, Human
ccaccccugcuaauccaagag

SEQ ID NO: 451564 - RNA, 21 nt, Human
ccagggcaggggggcugcaca

SEQ ID NO: 451565 - RNA, 22 nt, Human
ccagucccacacugaagacauc

SEQ ID NO: 451566 - RNA, 19 nt, Human
ccccccacuacuccugcua

SEQ ID NO: 451567 - RNA, 21 nt, Human
ccccuggggaugacagggaga

SEQ ID NO: 451568 - RNA, 23 nt, Human
cccugaacucugcuucaaacccc

SEQ ID NO: 451569 - RNA, 20 nt, Human
cccugcccaggacaccccuc

SEQ ID NO: 451570 - RNA, 23 nt, Human
cccugcccaggacaccccuccug

SEQ ID NO: 451571 - RNA, 20 nt, Human
ccgcacccuccgcggcucca

SEQ ID NO: 451572 - RNA, 21 nt, Human
ccgcacccuccgcggcuccag

SEQ ID NO: 451573 - RNA, 22 nt, Human
ccgcacccuccgcggcuccagg

SEQ ID NO: 451574 - RNA, 20 nt, Human
ccgcagccaaacccgcaccc

SEQ ID NO: 451575 - RNA, 24 nt, Human
ccgcagccaaacccgcacccuccg

SEQ ID NO: 451576 - RNA, 28 nt, Human
ccucacagccacaugcacggcagcccug

SEQ ID NO: 451577 - RNA, 24 nt, Human
ccugugcacugcggagcagccaag

SEQ ID NO: 451578 - RNA, 26 nt, Human
cgcagccaaacccgcacccuccgcgg

SEQ ID NO: 451579 - RNA, 23 nt, Human
cgccacagaaaccaccgcagcca

SEQ ID NO: 451580 - RNA, 23 nt, Human
cgccacagcaaccgccacagaaa

SEQ ID NO: 451581 - RNA, 20 nt, Human
cgcggcuccaggagcagcgc

SEQ ID NO: 451582 - RNA, 24 nt, Human
cuagugaguaccuggauuucucuc

SEQ ID NO: 451583 - RNA, 24 nt, Human
cucacagccacaugcacggcagcc

SEQ ID NO: 451584 - RNA, 23 nt, Human
cuccgccacagcaaccgccacag

SEQ ID NO: 451585 - RNA, 19 nt, Human
cucugcuucaaaccccacu

SEQ ID NO: 451586 - RNA, 21 nt, Human
cugaacaggaggaccuugggc

SEQ ID NO: 451587 - RNA, 19 nt, Human
cuggggaugacagggagaa

SEQ ID NO: 451588 - RNA, 26 nt, Human
cuguauuacuccccccacuacuccug

SEQ ID NO: 451589 - RNA, 20 nt, Human
cuucaaaccccacuggaaac

SEQ ID NO: 451590 - RNA, 18 nt, Human
cuuccuggacccaccccu

SEQ ID NO: 451591 - RNA, 19 nt, Human
gaaaggaugggagugcagg

SEQ ID NO: 451592 - RNA, 22 nt, Human
gaagaagccaaccccgagagag

SEQ ID NO: 451593 - RNA, 19 nt, Human
gaaugagcuggugcccaca

SEQ ID NO: 451594 - RNA, 21 nt, Human
gcacaaggucgggucaggucc

SEQ ID NO: 451595 - RNA, 20 nt, Human
gcagagaggcacagcugauc

SEQ ID NO: 451596 - RNA, 20 nt, Human
gcagaugcagggaacucaaa

SEQ ID NO: 451597 - RNA, 20 nt, Human
gcagcucacucagaaaagcc

SEQ ID NO: 451598 - RNA, 23 nt, Human
gcccagccugggagaggggauga

SEQ ID NO: 451599 - RNA, 20 nt, Human
gcccagggccagcccagccu

SEQ ID NO: 451600 - RNA, 19 nt, Human
gcggagcagccaaggccuc

SEQ ID NO: 451601 - RNA, 19 nt, Human
gcuuccaaacagcaaacca

SEQ ID NO: 451602 - RNA, 19 nt, Human
gcuuugggauggcguggga

SEQ ID NO: 451603 - RNA, 20 nt, Human
ggaagaagccaaccccgagg

SEQ ID NO: 451604 - RNA, 24 nt, Human
ggaagcccugugcacuggugaccc

SEQ ID NO: 451605 - RNA, 18 nt, Human
ggaauucuuucuaccacu

SEQ ID NO: 451606 - RNA, 20 nt, Human
ggcagagaggcacagcugau

SEQ ID NO: 451607 - RNA, 19 nt, Human
gggaagagcaucagucugc

SEQ ID NO: 451608 - RNA, 20 nt, Human
ggguggggaagaucucaggg

SEQ ID NO: 451609 - RNA, 18 nt, Human
ggguggugggagacccaa

SEQ ID NO: 451610 - RNA, 18 nt, Human
gguggggaagaucucagg

SEQ ID NO: 451611 - RNA, 20 nt, Human
gguguagauauccuaugacc

SEQ ID NO: 451612 - RNA, 21 nt, Human
guggccccgcccagggccagc

SEQ ID NO: 451613 - RNA, 23 nt, Human
uacaaugcacggggaagaugaaa

SEQ ID NO: 451614 - RNA, 20 nt, Human
uaccaguguccccuucuagg

SEQ ID NO: 451615 - RNA, 18 nt, Human
uagaugggugaauggcau

SEQ ID NO: 451616 - RNA, 19 nt, Human
ucacuacacuacacacaaa

SEQ ID NO: 451617 - RNA, 20 nt, Human
ucaugauuggggguggggaa

SEQ ID NO: 451618 - RNA, 19 nt, Human
uccaucuacaaugcacggg

SEQ ID NO: 451619 - RNA, 24 nt, Human
ucccugaacucugcuucaaacccc

SEQ ID NO: 451620 - RNA, 18 nt, Human
uccguaaagccccgcccc

SEQ ID NO: 451621 - RNA, 21 nt, Human
uccguaaagccccgccccugc

SEQ ID NO: 451622 - RNA, 21 nt, Human
ugaaagggcuuugggauggcg

SEQ ID NO: 451623 - RNA, 18 nt, Human
ugacaaggaggaagcccc

SEQ ID NO: 451624 - RNA, 19 nt, Human
ugacaaggaggaagccccu

SEQ ID NO: 451625 - RNA, 22 nt, Human
ugacucacagacagggugacac

SEQ ID NO: 451626 - RNA, 21 nt, Human
ugcacggggaagaugaaaggg

SEQ ID NO: 451627 - RNA, 19 nt, Human
ugcagacuggcucaccacc

SEQ ID NO: 451628 - RNA, 24 nt, Human
uggcaggacugugcagcccucaca

SEQ ID NO: 451629 - RNA, 18 nt, Human
uggccuaguuggguccag

SEQ ID NO: 451630 - RNA, 20 nt, Human
ugggaagggcugucuggaug

SEQ ID NO: 451631 - RNA, 22 nt, Human
ugggagugcaggguggggucag

SEQ ID NO: 451632 - RNA, 21 nt, Human
ugggauggcgugggaaugcag

SEQ ID NO: 451633 - RNA, 19 nt, Human
uggggucagaaaggcggug

SEQ ID NO: 451634 - RNA, 21 nt, Human
uggugggagacccaaggagga

SEQ ID NO: 451635 - RNA, 21 nt, Human
ugugcuugugggcagggccca

SEQ ID NO: 451636 - RNA, 23 nt, Human
ugugggcagggcccaugcaaggc

SEQ ID NO: 451637 - RNA, 21 nt, Human
uuccaaacagcaaaccaucag

SEQ ID NO: 451638 - RNA, 20 nt, Human
uuuuuuuuuuuuuuuuccgg

SEQ ID NO: 451639 - RNA, 21 nt, Human
cugacauaagugaaagucuau

SEQ ID NO: 451640 - RNA, 23 nt, Human
uaaugaagauggaauuuuuccua

SEQ ID NO: 451641 - RNA, 22 nt, Human
aaaaauacagaugcucccguca

SEQ ID NO: 451642 - RNA, 21 nt, Human
agccagcggagggcggagggc

SEQ ID NO: 451643 - RNA, 18 nt, Human
agggaggggagacccggg

SEQ ID NO: 451644 - RNA, 19 nt, Human
auggagcgugcggcgcccc

SEQ ID NO: 451645 - RNA, 21 nt, Human
cagaguaaggcaucgcaaccu

SEQ ID NO: 451646 - RNA, 20 nt, Human
cccccaccaccucggagccg

SEQ ID NO: 451647 - RNA, 18 nt, Human
ccgggagucgagggggag

SEQ ID NO: 451648 - RNA, 20 nt, Human
cugccgguguuggggugcca

SEQ ID NO: 451649 - RNA, 23 nt, Human
cugcugguggcagcucugagacu

SEQ ID NO: 451650 - RNA, 20 nt, Human
gcgcagaagccgcugguugg

SEQ ID NO: 451651 - RNA, 21 nt, Human
gcugguugggguggcgaggga

SEQ ID NO: 451652 - RNA, 25 nt, Human
ggagcaguccccagcugggagccca

SEQ ID NO: 451653 - RNA, 20 nt, Human
ggaggggagacccgggagcc

SEQ ID NO: 451654 - RNA, 22 nt, Human
ggcauggagcgcgggaaaagga

SEQ ID NO: 451655 - RNA, 23 nt, Human
gggauggagcgugcggcgccccc

SEQ ID NO: 451656 - RNA, 19 nt, Human
uaaaaauacagaugcuccc

SEQ ID NO: 451657 - RNA, 22 nt, Human
uaacauaaaaauacagaugcuc

SEQ ID NO: 451658 - RNA, 22 nt, Human
ucggagccagcggagggcggag

SEQ ID NO: 451659 - RNA, 19 nt, Human
ugccgguguuggggugcca

SEQ ID NO: 451660 - RNA, 23 nt, Human
ugccgguguuggggugccacggc

SEQ ID NO: 451661 - RNA, 19 nt, Human
uggagcgugcggcgccccc

SEQ ID NO: 451662 - RNA, 21 nt, Human
ugguugggguggcgagggagg

SEQ ID NO: 451663 - RNA, 20 nt, Human
ugucugagccugcugcuggu

SEQ ID NO: 451664 - RNA, 25 nt, Human
uuuauuuuuauuuugugggcuuuua

SEQ ID NO: 451665 - RNA, 21 nt, Human
aaaagguagagagaggucaaa

SEQ ID NO: 451666 - RNA, 23 nt, Human
aaaccgaaagcaaacacucagga

SEQ ID NO: 451667 - RNA, 25 nt, Human
aaaccgaaagcaaacacucaggaaa

SEQ ID NO: 451668 - RNA, 21 nt, Human
aaagcagaaccaaauugggga

SEQ ID NO: 451669 - RNA, 19 nt, Human
aaauuggggauuuucaaag

SEQ ID NO: 451670 - RNA, 18 nt, Human
aacacagagagaccaaca

SEQ ID NO: 451671 - RNA, 20 nt, Human
aagaacacagagagaccaac

SEQ ID NO: 451672 - RNA, 19 nt, Human
acaaaccgaaagcaaacac

SEQ ID NO: 451673 - RNA, 21 nt, Human
acacaaaggugggaaccgaga

SEQ ID NO: 451674 - RNA, 20 nt, Human
acacagagagaccaacagga

SEQ ID NO: 451675 - RNA, 21 nt, Human
acgccacuccaucccugcagc

SEQ ID NO: 451676 - RNA, 24 nt, Human
acgccacuccaucccugcagcacu

SEQ ID NO: 451677 - RNA, 19 nt, Human
acuccaacacaaagguggg

SEQ ID NO: 451678 - RNA, 22 nt, Human
acuccaacacaaaggugggaac

SEQ ID NO: 451679 - RNA, 20 nt, Human
acucuugagggaguugagag

SEQ ID NO: 451680 - RNA, 23 nt, Human
acuggcccagcagacgcgcgcac

SEQ ID NO: 451681 - RNA, 18 nt, Human
agaacacagagagaccaa

SEQ ID NO: 451682 - RNA, 23 nt, Human
agagaaaaagaaaacuccuuuca

SEQ ID NO: 451683 - RNA, 19 nt, Human
agcaaaaagacagucaaaa

SEQ ID NO: 451684 - RNA, 21 nt, Human
agcacugaggacccagguagg

SEQ ID NO: 451685 - RNA, 26 nt, Human
aggaaagagcaaaaagacagucaaaa

SEQ ID NO: 451686 - RNA, 23 nt, Human
aggauucuguguauuauuuggag

SEQ ID NO: 451687 - RNA, 18 nt, Human
aggcugcucucuaacaga

SEQ ID NO: 451688 - RNA, 21 nt, Human
aggucaaaaagcagaaccaaa

SEQ ID NO: 451689 - RNA, 22 nt, Human
agguccauuuaauuuaacauuu

SEQ ID NO: 451690 - RNA, 22 nt, Human
aggucuaagagacccaaauaac

SEQ ID NO: 451691 - RNA, 22 nt, Human
aguaacaaagaacacagagaga

SEQ ID NO: 451692 - RNA, 23 nt, Human
aucaugcugacucccccaacccc

SEQ ID NO: 451693 - RNA, 21 nt, Human
caaacacucaggaaagagccu

SEQ ID NO: 451694 - RNA, 21 nt, Human
caaagauuacccugaaaaggu

SEQ ID NO: 451695 - RNA, 21 nt, Human
caacaaaccgaaagcaaacac

SEQ ID NO: 451696 - RNA, 23 nt, Human
caacaaaccgaaagcaaacacuc

SEQ ID NO: 451697 - RNA, 19 nt, Human
caacaugaaagauggaaug

SEQ ID NO: 451698 - RNA, 24 nt, Human
caacccccagcccucagagaaaaa

SEQ ID NO: 451699 - RNA, 22 nt, Human
caacucuacuggcaauuguaau

SEQ ID NO: 451700 - RNA, 19 nt, Human
caagaggagcugaccagcg

SEQ ID NO: 451701 - RNA, 22 nt, Human
caagaggagcugaccagcgugc

SEQ ID NO: 451702 - RNA, 20 nt, Human
caaguaacaaagaacacaga

SEQ ID NO: 451703 - RNA, 21 nt, Human
cacagagagaccaacaggacg

SEQ ID NO: 451704 - RNA, 20 nt, Human
cacccaaguaacaaagaacc

SEQ ID NO: 451705 - RNA, 23 nt, Human
cagacagauaccagcugugcaaa

SEQ ID NO: 451706 - RNA, 23 nt, Human
cagcaauaagaaaacgccacucc

SEQ ID NO: 451707 - RNA, 19 nt, Human
cagcacuuuaaacauagca

SEQ ID NO: 451708 - RNA, 24 nt, Human
cagcccagcaauacaggcauacca

SEQ ID NO: 451709 - RNA, 19 nt, Human
ccccaaacaacaacucuac

SEQ ID NO: 451710 - RNA, 19 nt, Human
ccccgcccccuucgccgcc

SEQ ID NO: 451711 - RNA, 19 nt, Human
ccccuucgccgccggccgc

SEQ ID NO: 451712 - RNA, 25 nt, Human
cccuucgccgccggccgcccccagc

SEQ ID NO: 451713 - RNA, 23 nt, Human
ccgccggccgcccccagccucgg

SEQ ID NO: 451714 - RNA, 22 nt, Human
ccuaugcgcgcugcggcgcccg

SEQ ID NO: 451715 - RNA, 19 nt, Human
ccucagagaaaaaagugaa

SEQ ID NO: 451716 - RNA, 22 nt, Human
ccugcagcacuuuaaacauagc

SEQ ID NO: 451717 - RNA, 22 nt, Human
ccugcuugcgagcaagaggagc

SEQ ID NO: 451718 - RNA, 24 nt, Human
cgcggagcaaugcagaagcagcag

SEQ ID NO: 451719 - RNA, 18 nt, Human
cgcggccgaggcuccgcc

SEQ ID NO: 451720 - RNA, 24 nt, Human
cuaccagacagauaccagcugugc

SEQ ID NO: 451721 - RNA, 22 nt, Human
cuacuggcaauuguaaucaugu

SEQ ID NO: 451722 - RNA, 19 nt, Human
cucccccaacccccagccc

SEQ ID NO: 451723 - RNA, 26 nt, Human
gaaaaaagugaagaacuuuacacaac

SEQ ID NO: 451724 - RNA, 26 nt, Human
gaaaacucuaaagcuuggaaaugcua

SEQ ID NO: 451725 - RNA, 22 nt, Human
gacuucucucagacuggaucuu

SEQ ID NO: 451726 - RNA, 21 nt, Human
gagaccaacaggacgcauggc

SEQ ID NO: 451727 - RNA, 20 nt, Human
gagcgcggagcaaugcagaa

SEQ ID NO: 451728 - RNA, 25 nt, Human
gaggagcugaccagcgugcugggag

SEQ ID NO: 451729 - RNA, 21 nt, Human
gcagauauaccaaggcggccc

SEQ ID NO: 451730 - RNA, 22 nt, Human
gcaggaauucagaaaacucuaa

SEQ ID NO: 451731 - RNA, 18 nt, Human
gcaggauucuguguauua

SEQ ID NO: 451732 - RNA, 18 nt, Human
gccggccgcccccagccu

SEQ ID NO: 451733 - RNA, 19 nt, Human
gcucccuccccuugccuuc

SEQ ID NO: 451734 - RNA, 26 nt, Human
ggaaagagcaaaaagacagucaaaac

SEQ ID NO: 451735 - RNA, 19 nt, Human
ggcugcucucuaacagagu

SEQ ID NO: 451736 - RNA, 18 nt, Human
gggauauuuuaaggucug

SEQ ID NO: 451737 - RNA, 27 nt, Human
gguaacuaacuacuccacuauguacaa

SEQ ID NO: 451738 - RNA, 21 nt, Human
gguagagagaggucaaaaagc

SEQ ID NO: 451739 - RNA, 22 nt, Human
uaaagaaaacagaaccaguauu

SEQ ID NO: 451740 - RNA, 18 nt, Human
uaacuucagagacuggua

SEQ ID NO: 451741 - RNA, 26 nt, Human
uaagaaaacgccacuccaucccugca

SEQ ID NO: 451742 - RNA, 19 nt, Human
uaaucaugcugacuccccc

SEQ ID NO: 451743 - RNA, 24 nt, Human
uaaucaugcugacucccccaaccc

SEQ ID NO: 451744 - RNA, 20 nt, Human
uaccccaaacaacaacucua

SEQ ID NO: 451745 - RNA, 30 nt, Human
uagcacugaggacccagguagggggauauu

SEQ ID NO: 451746 - RNA, 20 nt, Human
uauguacaauacauacagca

SEQ ID NO: 451747 - RNA, 19 nt, Human
ucagaaaacucuaaagcuu

SEQ ID NO: 451748 - RNA, 18 nt, Human
ucgccccgcccccuucgc

SEQ ID NO: 451749 - RNA, 23 nt, Human
ucgccccgcccccuucgccgccg

SEQ ID NO: 451750 - RNA, 24 nt, Human
ucuaagagacccaaauaacaagac

SEQ ID NO: 451751 - RNA, 19 nt, Human
ugaagaacuuuacacaaca

SEQ ID NO: 451752 - RNA, 22 nt, Human
ugacuccucugcuuggaaaccc

SEQ ID NO: 451753 - RNA, 23 nt, Human
ugcaaaaaguugcaggauucuga

SEQ ID NO: 451754 - RNA, 22 nt, Human
ugcuucgagcagcagcacagcc

SEQ ID NO: 451755 - RNA, 20 nt, Human
uggaaaugcuaucguuugug

SEQ ID NO: 451756 - RNA, 24 nt, Human
uggaaaugcuaucguuugugccac

SEQ ID NO: 451757 - RNA, 20 nt, Human
uggcagaacugcauagaaga

SEQ ID NO: 451758 - RNA, 19 nt, Human
uggggauuuucaaaggcug

SEQ ID NO: 451759 - RNA, 18 nt, Human
ugguaaacuccaacacaa

SEQ ID NO: 451760 - RNA, 26 nt, Human
ugucacauuuucuacauuaaaauaua

SEQ ID NO: 451761 - RNA, 20 nt, Human
ugugcaaaaaguugcaggau

SEQ ID NO: 451762 - RNA, 22 nt, Human
ugugcaaaaaguugcaggauuc

SEQ ID NO: 451763 - RNA, 19 nt, Human
uuuuuuuuuuuuaaggucc

SEQ ID NO: 451764 - RNA, 23 nt, Human
uuuuuuuuuuuuuuuuuuuaagg

SEQ ID NO: 451765 - RNA, 25 nt, Human
aaaaaauaaauagccacacaaauca

SEQ ID NO: 451766 - RNA, 21 nt, Human
aagacaggaaccugucaugca

SEQ ID NO: 451767 - RNA, 20 nt, Human
aaguuccugggcagguuuua

SEQ ID NO: 451768 - RNA, 21 nt, Human
aauagcuacccacuuccuaca

SEQ ID NO: 451769 - RNA, 21 nt, Human
acaggaaccugucaugcaagg

SEQ ID NO: 451770 - RNA, 23 nt, Human
acauggagugggaaaaauagcua

SEQ ID NO: 451771 - RNA, 18 nt, Human
accccaaaaugcaacagu

SEQ ID NO: 451772 - RNA, 21 nt, Human
acgggagucagcugguugugu

SEQ ID NO: 451773 - RNA, 19 nt, Human
agaaagcucuggcugacac

SEQ ID NO: 451774 - RNA, 25 nt, Human
agaaagcucuggcugacacuacuga

SEQ ID NO: 451775 - RNA, 19 nt, Human
agacaggaaccugucaugc

SEQ ID NO: 451776 - RNA, 25 nt, Human
agacaggaaccugucaugcaaggaa

SEQ ID NO: 451777 - RNA, 24 nt, Human
aggaaaagugcagguuuucacaaa

SEQ ID NO: 451778 - RNA, 18 nt, Human
auaaauagacaucuaggu

SEQ ID NO: 451779 - RNA, 22 nt, Human
auggagugggaaaaauagcuac

SEQ ID NO: 451780 - RNA, 19 nt, Human
auuuauuaguaccccaaaa

SEQ ID NO: 451781 - RNA, 22 nt, Human
caaaaaauaaauagccacacaa

SEQ ID NO: 451782 - RNA, 24 nt, Human
caaaaaauaaauagccacacaaau

SEQ ID NO: 451783 - RNA, 18 nt, Human
caaaaguaaucccauaaa

SEQ ID NO: 451784 - RNA, 21 nt, Human
caaaaugcaacaguugucuca

SEQ ID NO: 451785 - RNA, 19 nt, Human
cacaguaauuggccugaga

SEQ ID NO: 451786 - RNA, 24 nt, Human
cagaauggcucccaugacagacaa

SEQ ID NO: 451787 - RNA, 18 nt, Human
cagaucucuuucauccau

SEQ ID NO: 451788 - RNA, 21 nt, Human
caugacagacaagacaggaac

SEQ ID NO: 451789 - RNA, 23 nt, Human
caugacagacaagacaggaaccu

SEQ ID NO: 451790 - RNA, 24 nt, Human
ccacacaaaucaaaccuacacacu

SEQ ID NO: 451791 - RNA, 25 nt, Human
ccagaacuggccuccacagugucuu

SEQ ID NO: 451792 - RNA, 18 nt, Human
cggccgggcaaccgaggc

SEQ ID NO: 451793 - RNA, 19 nt, Human
cggcucggguccccggccg

SEQ ID NO: 451794 - RNA, 25 nt, Human
cggcucggguccccggccgggcaac

SEQ ID NO: 451795 - RNA, 21 nt, Human
cuacccacuuccuacauguug

SEQ ID NO: 451796 - RNA, 19 nt, Human
cuccagaacuggccuccac

SEQ ID NO: 451797 - RNA, 25 nt, Human
cucccaugacagacaagacaggaac

SEQ ID NO: 451798 - RNA, 28 nt, Human
cuggccuccacagugucuuccucuacgg

SEQ ID NO: 451799 - RNA, 22 nt, Human
gcagagaaagcucuggcugaca

SEQ ID NO: 451800 - RNA, 18 nt, Human
gccaaaaaauaaauagcc

SEQ ID NO: 451801 - RNA, 24 nt, Human
ggccuccacagugucuuccucuac

SEQ ID NO: 451802 - RNA, 20 nt, Human
guaaguuccugggcagguuu

SEQ ID NO: 451803 - RNA, 20 nt, Human
uaaauagacaucuagguaaa

SEQ ID NO: 451804 - RNA, 19 nt, Human
uaagcagaucacguguaac

SEQ ID NO: 451805 - RNA, 21 nt, Human
uaagcagaucacguguaacac

SEQ ID NO: 451806 - RNA, 21 nt, Human
uaauaaaaacggaaugacuua

SEQ ID NO: 451807 - RNA, 21 nt, Human
uagccacacaaaucaaaccua

SEQ ID NO: 451808 - RNA, 20 nt, Human
uaggccaaaaaauaaauagc

SEQ ID NO: 451809 - RNA, 18 nt, Human
ucacuugaccccucuugu

SEQ ID NO: 451810 - RNA, 23 nt, Human
ucagacaacagcgccaagguuug

SEQ ID NO: 451811 - RNA, 22 nt, Human
uccacaguaauuggccugagac

SEQ ID NO: 451812 - RNA, 23 nt, Human
uccacaguaauuggccugagacc

SEQ ID NO: 451813 - RNA, 24 nt, Human
ucccaugacagacaagacaggaac

SEQ ID NO: 451814 - RNA, 20 nt, Human
ucugcagagaaagcucuggc

SEQ ID NO: 451815 - RNA, 25 nt, Human
ugagaacaugacuuaacaguaaauu

SEQ ID NO: 451816 - RNA, 25 nt, Human
ugcuaaauuaugauucugcaaaagu

SEQ ID NO: 451817 - RNA, 21 nt, Human
uggccuccacagugucuuccu

SEQ ID NO: 451818 - RNA, 19 nt, Human
uggcugacacuacugaucu

SEQ ID NO: 451819 - RNA, 23 nt, Human
uggcugacacuacugaucugagc

SEQ ID NO: 451820 - RNA, 22 nt, Human
uucggcucggguccccggccgg

SEQ ID NO: 451821 - RNA, 22 nt, Human
uucuuaggccaaaaaauaaaua

SEQ ID NO: 451822 - RNA, 18 nt, Human
uugcaaguggguaggaau

SEQ ID NO: 451823 - RNA, 19 nt, Human
uugcaaguggguaggaaug

SEQ ID NO: 451824 - RNA, 21 nt, Human
uuuaaauuggcagaauggcuc

SEQ ID NO: 451825 - RNA, 20 nt, Human
uuuacagaucucuuucaucc

SEQ ID NO: 451826 - RNA, 23 nt, Human
uuuucggcucggguccccggccg

SEQ ID NO: 451827 - RNA, 18 nt, Human
acuaguuuccuuucccca

SEQ ID NO: 451828 - RNA, 22 nt, Human
agaaaaacagaacaguaucaga

SEQ ID NO: 451829 - RNA, 22 nt, Human
agcaucaaagaggaggaaacac

SEQ ID NO: 451830 - RNA, 19 nt, Human
agugucucuggaguuccac

SEQ ID NO: 451831 - RNA, 19 nt, Human
auuucaggagugucucugg

SEQ ID NO: 451832 - RNA, 20 nt, Human
cguuuggcuccuuugacuua

SEQ ID NO: 451833 - RNA, 22 nt, Human
cuccuuugacuuaggacaauuu

SEQ ID NO: 451834 - RNA, 19 nt, Human
cuggcacuguugcuuccuu

SEQ ID NO: 451835 - RNA, 18 nt, Human
cuuggcacccggggccau

SEQ ID NO: 451836 - RNA, 23 nt, Human
gaacgcacgcuggaaccuggcac

SEQ ID NO: 451837 - RNA, 23 nt, Human
gagcaucaaagaggaggaaacac

SEQ ID NO: 451838 - RNA, 21 nt, Human
ggagucugcacacagaaugug

SEQ ID NO: 451839 - RNA, 19 nt, Human
ggggacggcagagagggag

SEQ ID NO: 451840 - RNA, 19 nt, Human
uaaaagggauuuccuuggc

SEQ ID NO: 451841 - RNA, 23 nt, Human
uauccaaaggguauuucgugaag

SEQ ID NO: 451842 - RNA, 23 nt, Human
uauccuugcacacucagaaucuc

SEQ ID NO: 451843 - RNA, 22 nt, Human
ucaacacuagcuucacuuccca

SEQ ID NO: 451844 - RNA, 24 nt, Human
uccaaaggguauuucgugaagaaa

SEQ ID NO: 451845 - RNA, 26 nt, Human
uccaaaggguauuucgugaagaaaaa

SEQ ID NO: 451846 - RNA, 18 nt, Human
uccccaaaaaacuuaaac

SEQ ID NO: 451847 - RNA, 20 nt, Human
ucgugaagaaaaacagaaca

SEQ ID NO: 451848 - RNA, 18 nt, Human
ugcacacagaauguggaa

SEQ ID NO: 451849 - RNA, 21 nt, Human
ugcucuggcguugggagucug

SEQ ID NO: 451850 - RNA, 24 nt, Human
uggcacccggggccaugacggggg

SEQ ID NO: 451851 - RNA, 19 nt, Human
uggcacuguugcuuccuuc

SEQ ID NO: 451852 - RNA, 23 nt, Human
ugucucuggaguuccacuuucuc

SEQ ID NO: 451853 - RNA, 23 nt, Human
uugaauccaaagagccaggcugu

SEQ ID NO: 451854 - RNA, 18 nt, Human
uuuuuuuuuuuuuuucug

SEQ ID NO: 451855 - RNA, 21 nt, Human
aagcaagaauaugacuuuaau

SEQ ID NO: 451856 - RNA, 19 nt, Human
agauggucaggcuuccugu

SEQ ID NO: 451857 - RNA, 19 nt, Human
agcaaccuagaagcgccuc

SEQ ID NO: 451858 - RNA, 21 nt, Human
agggaagggcugagggcuaug

SEQ ID NO: 451859 - RNA, 26 nt, Human
caaaaaguaaagaaggcugauggcaa

SEQ ID NO: 451860 - RNA, 20 nt, Human
caagccuggggagaggccug

SEQ ID NO: 451861 - RNA, 24 nt, Human
cacagggaagagguaguggaggga

SEQ ID NO: 451862 - RNA, 22 nt, Human
caccagaagccacugaaacccc

SEQ ID NO: 451863 - RNA, 18 nt, Human
cagggaauuggaaaucag

SEQ ID NO: 451864 - RNA, 20 nt, Human
ccagaagccacugaaacccc

SEQ ID NO: 451865 - RNA, 21 nt, Human
ccccagcaaccuagaagcgcc

SEQ ID NO: 451866 - RNA, 19 nt, Human
ccuagaagcgccucaccua

SEQ ID NO: 451867 - RNA, 23 nt, Human
gagcaccagaagccacugaaacc

SEQ ID NO: 451868 - RNA, 18 nt, Human
gagggaagggcugagggc

SEQ ID NO: 451869 - RNA, 24 nt, Human
gcagagcucacccuagagcaccag

SEQ ID NO: 451870 - RNA, 20 nt, Human
ggggagaggccuggaaacgg

SEQ ID NO: 451871 - RNA, 20 nt, Human
ucaaaaaguaaagaaggcug

SEQ ID NO: 451872 - RNA, 23 nt, Human
uuaacaucaacaaugacacugug

SEQ ID NO: 451873 - RNA, 25 nt, Human
aaaaaagacaacauauaaccauuaa

SEQ ID NO: 451874 - RNA, 20 nt, Human
aaaaaauuauuuaaucccuu

SEQ ID NO: 451875 - RNA, 18 nt, Human
acuagagcugugcuaagc

SEQ ID NO: 451876 - RNA, 22 nt, Human
agaaacuaaaagcagcccaaac

SEQ ID NO: 451877 - RNA, 20 nt, Human
agacaacauauaaccauuaa

SEQ ID NO: 451878 - RNA, 27 nt, Human
agagaaacuaaaagcagcccaaagggu

SEQ ID NO: 451879 - RNA, 20 nt, Human
agccgcccacaaucugcgcu

SEQ ID NO: 451880 - RNA, 22 nt, Human
auagauaaagccccugaccuuc

SEQ ID NO: 451881 - RNA, 22 nt, Human
caaaagacauaggaaaaaaaga

SEQ ID NO: 451882 - RNA, 26 nt, Human
caaaagacauaggaaaaaaagacaac

SEQ ID NO: 451883 - RNA, 21 nt, Human
cacagcacaggugcuucucuc

SEQ ID NO: 451884 - RNA, 18 nt, Human
cacugauauacauguugc

SEQ ID NO: 451885 - RNA, 19 nt, Human
cagcgauucugagagcaag

SEQ ID NO: 451886 - RNA, 25 nt, Human
cauagauaaagccccugaccuucaa

SEQ ID NO: 451887 - RNA, 20 nt, Human
ccugaccuucaagaaagugu

SEQ ID NO: 451888 - RNA, 22 nt, Human
cggccuaaggcaccucgaaggc

SEQ ID NO: 451889 - RNA, 23 nt, Human
cuaaccauuagcaagaauggacu

SEQ ID NO: 451890 - RNA, 18 nt, Human
cugaccuucaagaaagug

SEQ ID NO: 451891 - RNA, 23 nt, Human
cuucaagaaaguguuagggaaaa

SEQ ID NO: 451892 - RNA, 28 nt, Human
gaaacuaaaagcagcccaaacaauucca

SEQ ID NO: 451893 - RNA, 22 nt, Human
gacagagucuuuacuuuuaaau

SEQ ID NO: 451894 - RNA, 18 nt, Human
gaugaaaucuuuagauaa

SEQ ID NO: 451895 - RNA, 18 nt, Human
gggaaaaaaauuauuuaa

SEQ ID NO: 451896 - RNA, 23 nt, Human
guggaaggaccuauuauauaaua

SEQ ID NO: 451897 - RNA, 23 nt, Human
uaaacuagaucuaagaaagaaaa

SEQ ID NO: 451898 - RNA, 22 nt, Human
uaagagaaacuaaaagcagccc

SEQ ID NO: 451899 - RNA, 18 nt, Human
uaaggcaccucgaaggcc

SEQ ID NO: 451900 - RNA, 19 nt, Human
uaauacauguaacaaguuc

SEQ ID NO: 451901 - RNA, 22 nt, Human
uacaaaaaagcuagauuugcua

SEQ ID NO: 451902 - RNA, 20 nt, Human
uacauguaacaaguucuuga

SEQ ID NO: 451903 - RNA, 20 nt, Human
ucccuuccuuucuucaaagg

SEQ ID NO: 451904 - RNA, 22 nt, Human
ucuaaaaugccacuccacagca

SEQ ID NO: 451905 - RNA, 20 nt, Human
ucuaguaauuuugauuaaga

SEQ ID NO: 451906 - RNA, 22 nt, Human
ugagggcaucuaaaaugccagu

SEQ ID NO: 451907 - RNA, 24 nt, Human
uuuuaaaugauuaucgauacacca

SEQ ID NO: 451908 - RNA, 19 nt, Human
uuuuuuuuuuuuuuuuugc

SEQ ID NO: 451909 - RNA, 24 nt, Human
uuuuuuuuuuuuuuuuuugcauga

SEQ ID NO: 451910 - RNA, 27 nt, Human
uuuuuuuuuuuuuuuuuuuuuuugggg

SEQ ID NO: 451911 - RNA, 18 nt, Human
aaggagguauaaaugagg

SEQ ID NO: 451912 - RNA, 28 nt, Human
acacaccuuuuuuuuucuugaaaacugu

SEQ ID NO: 451913 - RNA, 28 nt, Human
acacaccuuuuuuuuucuugaaaacugu

SEQ ID NO: 451914 - RNA, 20 nt, Human
caacauaaaaauacgaagcc

SEQ ID NO: 451915 - RNA, 20 nt, Human
caacauaaaaauacgaagcc

SEQ ID NO: 451916 - RNA, 25 nt, Human
cugagagauuauucugagagcccau

SEQ ID NO: 451917 - RNA, 23 nt, Human
uaaaaauacgaagccauaagcaa

SEQ ID NO: 451918 - RNA, 24 nt, Human
uaaaaauacgaagccauaagcaac

SEQ ID NO: 451919 - RNA, 24 nt, Human
uaaggagguauaaaugagguguug

SEQ ID NO: 451920 - RNA, 18 nt, Human
uagucugcuccaagcaag

SEQ ID NO: 451921 - RNA, 21 nt, Human
uaucuuagauuguuuuagucg

SEQ ID NO: 451922 - RNA, 21 nt, Human
ucacauggauuucugguuuca

SEQ ID NO: 451923 - RNA, 18 nt, Human
ugagagcccauuaucuua

SEQ ID NO: 451924 - RNA, 22 nt, Human
uguaguucacauggauuucugg

SEQ ID NO: 451925 - RNA, 23 nt, Human
uuuuuucuugaaaacugugaugu

SEQ ID NO: 451926 - RNA, 23 nt, Human
uuuuuucuugaaaacugugaugu

SEQ ID NO: 451927 - RNA, 22 nt, Human
accccacaacgcacccaaagcc

SEQ ID NO: 451928 - RNA, 23 nt, Human
accccacaacgcacccaaagccg

SEQ ID NO: 451929 - RNA, 19 nt, Human
acguugagggccgcacagg

SEQ ID NO: 451930 - RNA, 21 nt, Human
acuccgggagccgaaagugaa

SEQ ID NO: 451931 - RNA, 19 nt, Human
acugguucugcauugaggc

SEQ ID NO: 451932 - RNA, 21 nt, Human
agagaacaauaaauacagaaa

SEQ ID NO: 451933 - RNA, 18 nt, Human
auuuauuugccauucacu

SEQ ID NO: 451934 - RNA, 20 nt, Human
caaauccucgggaccccaca

SEQ ID NO: 451935 - RNA, 25 nt, Human
caagcaguauauguaacaguaauau

SEQ ID NO: 451936 - RNA, 25 nt, Human
cacucuuaacucuaaacacagugcu

SEQ ID NO: 451937 - RNA, 22 nt, Human
cagccgggcuggggcgccgcgu

SEQ ID NO: 451938 - RNA, 21 nt, Human
caguggagggagacuccggga

SEQ ID NO: 451939 - RNA, 19 nt, Human
ccagagaacaauaaauaca

SEQ ID NO: 451940 - RNA, 21 nt, Human
ccauucacuacuuugcaacaa

SEQ ID NO: 451941 - RNA, 19 nt, Human
cccacaacgcacccaaagc

SEQ ID NO: 451942 - RNA, 18 nt, Human
ccccacaacgcacccaaa

SEQ ID NO: 451943 - RNA, 19 nt, Human
ccgggagccgaaagugaac

SEQ ID NO: 451944 - RNA, 23 nt, Human
ccugucagguccagaggucugag

SEQ ID NO: 451945 - RNA, 18 nt, Human
cguugagggccgcacagg

SEQ ID NO: 451946 - RNA, 23 nt, Human
cuccgggagccgaaagugaacgg

SEQ ID NO: 451947 - RNA, 27 nt, Human
cucgggaccccacaacgcacccaaagg

SEQ ID NO: 451948 - RNA, 23 nt, Human
gaccccacaacgcacccaaagcc

SEQ ID NO: 451949 - RNA, 24 nt, Human
ggacacagccgggcuggggcgccg

SEQ ID NO: 451950 - RNA, 22 nt, Human
ggucugagcaguggagggagac

SEQ ID NO: 451951 - RNA, 19 nt, Human
ggugguccggggcgccggg

SEQ ID NO: 451952 - RNA, 21 nt, Human
guccagaggucugagcagugg

SEQ ID NO: 451953 - RNA, 24 nt, Human
uacagaaucaccuacuuuuauaca

SEQ ID NO: 451954 - RNA, 21 nt, Human
uauuuuguuguuguuguuugg

SEQ ID NO: 451955 - RNA, 18 nt, Human
ucaaaguccaaguaaaga

SEQ ID NO: 451956 - RNA, 21 nt, Human
ucuccugucagguccagaggu

SEQ ID NO: 451957 - RNA, 22 nt, Human
ugaaugucuuucaacaaauccu

SEQ ID NO: 451958 - RNA, 19 nt, Human
ugaggcggaggggaaggcc

SEQ ID NO: 451959 - RNA, 23 nt, Human
ugccauucacuacuuugcaacaa

SEQ ID NO: 451960 - RNA, 23 nt, Human
ugggaaaagcuauauaacagagg

SEQ ID NO: 451961 - RNA, 23 nt, Human
uuaacucuaaacacagugcuccc

SEQ ID NO: 451962 - RNA, 26 nt, Human
uuauuuuguuguuguuguuuggaaau

SEQ ID NO: 451963 - RNA, 20 nt, Human
uuccaaguaaaaucaaacag

SEQ ID NO: 451964 - RNA, 20 nt, Human
uucguaaucuugaaugucuu

SEQ ID NO: 451965 - RNA, 21 nt, Human
uugaggcggaggggaaggcca

SEQ ID NO: 451966 - RNA, 25 nt, Human
acagagccugccuuucaggcucuuc

SEQ ID NO: 451967 - RNA, 23 nt, Human
accuuaaaaaaauccaaaagaga

SEQ ID NO: 451968 - RNA, 22 nt, Human
agcaaauaccuuaaaaaaaucc

SEQ ID NO: 451969 - RNA, 24 nt, Human
auaccaggucauuuucaauuuccg

SEQ ID NO: 451970 - RNA, 22 nt, Human
caaccugguagcucuccuuaga

SEQ ID NO: 451971 - RNA, 28 nt, Human
cugcggugacaaccugguagcucuccuu

SEQ ID NO: 451972 - RNA, 19 nt, Human
gagcucagaucuaccuuuc

SEQ ID NO: 451973 - RNA, 25 nt, Human
uaagaaagcccucuggcaagauacc

SEQ ID NO: 451974 - RNA, 24 nt, Human
uaccuuuccucuucauggaccaga

SEQ ID NO: 451975 - RNA, 18 nt, Human
uagcucuccuuagagagg

SEQ ID NO: 451976 - RNA, 23 nt, Human
ucauggaccagacuggaauuggu

SEQ ID NO: 451977 - RNA, 18 nt, Human
aaaaacacacacacacac

SEQ ID NO: 451978 - RNA, 18 nt, Human
aaaaacacacacacacac

SEQ ID NO: 451979 - RNA, 22 nt, Human
aaaaagagagacaaaaaggaag

SEQ ID NO: 451980 - RNA, 26 nt, Human
aaaaagagagacaaaaaggaaggggu

SEQ ID NO: 451981 - RNA, 25 nt, Human
aaaacacagaaacucacucaaugaa

SEQ ID NO: 451982 - RNA, 23 nt, Human
aacacaacagucacugacauggc

SEQ ID NO: 451983 - RNA, 22 nt, Human
aacgagccacgcuggcaaacaa

SEQ ID NO: 451984 - RNA, 21 nt, Human
aacucccuuccucugaaacaa

SEQ ID NO: 451985 - RNA, 21 nt, Human
aagaaaccaaauagauccugc

SEQ ID NO: 451986 - RNA, 24 nt, Human
aagaugccucugccuuuguggggu

SEQ ID NO: 451987 - RNA, 24 nt, Human
aagcugccaccaguguuguuccga

SEQ ID NO: 451988 - RNA, 22 nt, Human
aaguagcgccaggcagaggguu

SEQ ID NO: 451989 - RNA, 23 nt, Human
aaguagcgccaggcagaggguuu

SEQ ID NO: 451990 - RNA, 26 nt, Human
aaucuucaccacuggcugccuuucag

SEQ ID NO: 451991 - RNA, 22 nt, Human
acaacacaaaauacaaaagcuu

SEQ ID NO: 451992 - RNA, 21 nt, Human
acaaccuucagcuacacagaa

SEQ ID NO: 451993 - RNA, 20 nt, Human
acacaaaauacaaaagcuua

SEQ ID NO: 451994 - RNA, 23 nt, Human
acacacacacacacacacacaca

SEQ ID NO: 451995 - RNA, 23 nt, Human
acacacacacacacacacacaca

SEQ ID NO: 451996 - RNA, 23 nt, Human
acacacacacacacacacacaca

SEQ ID NO: 451997 - RNA, 23 nt, Human
acacacacacacacacacacaca

SEQ ID NO: 451998 - RNA, 23 nt, Human
acacacacacacacacacacaca

SEQ ID NO: 451999 - RNA, 23 nt, Human
acacacacacacacacacacaca

SEQ ID NO: 452000 - RNA, 24 nt, Human
acacacacacacaccccccacaca

SEQ ID NO: 452001 - RNA, 21 nt, Human
acacgcccugccugcaggagc

SEQ ID NO: 452002 - RNA, 20 nt, Human
accagggcccccuccagcga

SEQ ID NO: 452003 - RNA, 19 nt, Human
accccacaaacacaacagu

SEQ ID NO: 452004 - RNA, 20 nt, Human
accccaguaaaaacaagaca

SEQ ID NO: 452005 - RNA, 20 nt, Human
accccaguaaaaacaagaca

SEQ ID NO: 452006 - RNA, 23 nt, Human
accuuuccgcuuuggucuuggag

SEQ ID NO: 452007 - RNA, 18 nt, Human
acgaucccaggaauccag

SEQ ID NO: 452008 - RNA, 19 nt, Human
acgcaaauccaagaucuca

SEQ ID NO: 452009 - RNA, 23 nt, Human
acgcaaauccaagaucucaacca

SEQ ID NO: 452010 - RNA, 23 nt, Human
acugcaaaauccacagguggcgg

SEQ ID NO: 452011 - RNA, 19 nt, Human
agaaaaaaaaagagagaca

SEQ ID NO: 452012 - RNA, 24 nt, Human
agaaaaguacugcaaaacugcaga

SEQ ID NO: 452013 - RNA, 22 nt, Human
agaacacugacgaguaccuucc

SEQ ID NO: 452014 - RNA, 20 nt, Human
agaagaugcuucggagcucc

SEQ ID NO: 452015 - RNA, 24 nt, Human
agaagcaacuugaaaacccaagaa

SEQ ID NO: 452016 - RNA, 18 nt, Human
agaccaucuucauucugc

SEQ ID NO: 452017 - RNA, 26 nt, Human
agagaaaaaaaaagagagacaaaaag

SEQ ID NO: 452018 - RNA, 22 nt, Human
agagacaaaaaggaaggggugg

SEQ ID NO: 452019 - RNA, 20 nt, Human
agagagagaucaaccaauga

SEQ ID NO: 452020 - RNA, 22 nt, Human
agagucccagcccccugaccuu

SEQ ID NO: 452021 - RNA, 19 nt, Human
agcagccacagcuuuauaa

SEQ ID NO: 452022 - RNA, 23 nt, Human
aggaagggguggggggaggggaa

SEQ ID NO: 452023 - RNA, 20 nt, Human
aggcucccacacgcccugcc

SEQ ID NO: 452024 - RNA, 19 nt, Human
agggaagcgccaagaccag

SEQ ID NO: 452025 - RNA, 20 nt, Human
agggguggggggaggggaag

SEQ ID NO: 452026 - RNA, 19 nt, Human
auguggugucaacagccaa

SEQ ID NO: 452027 - RNA, 19 nt, Human
auuagcauaucaauuucca

SEQ ID NO: 452028 - RNA, 21 nt, Human
caacugaauccuuaugcuuaa

SEQ ID NO: 452029 - RNA, 22 nt, Human
caagaaguaaacgcaaauccaa

SEQ ID NO: 452030 - RNA, 24 nt, Human
caagaccagggcccccuccagcga

SEQ ID NO: 452031 - RNA, 24 nt, Human
caagagcaggaguuaguaggcauc

SEQ ID NO: 452032 - RNA, 18 nt, Human
caaggauaacagauugga

SEQ ID NO: 452033 - RNA, 18 nt, Human
cacaacagucacugacau

SEQ ID NO: 452034 - RNA, 20 nt, Human
cacacacacacacacacaca

SEQ ID NO: 452035 - RNA, 20 nt, Human
cacacacacacacacacaca

SEQ ID NO: 452036 - RNA, 20 nt, Human
cacacacacacacacacaca

SEQ ID NO: 452037 - RNA, 20 nt, Human
cacacacacacacacacaca

SEQ ID NO: 452038 - RNA, 20 nt, Human
cacacacacacacacacaca

SEQ ID NO: 452039 - RNA, 20 nt, Human
cacacacacacacacacaca

SEQ ID NO: 452040 - RNA, 20 nt, Human
cacacacacacacacacaca

SEQ ID NO: 452041 - RNA, 20 nt, Human
cacacacacacacacacaca

SEQ ID NO: 452042 - RNA, 20 nt, Human
cacacacacacacacacaca

SEQ ID NO: 452043 - RNA, 20 nt, Human
cacacacacacacacacaca

SEQ ID NO: 452044 - RNA, 22 nt, Human
cacacacacacacacacacaca

SEQ ID NO: 452045 - RNA, 22 nt, Human
cacacacacacacacacacaca

SEQ ID NO: 452046 - RNA, 22 nt, Human
cacacacacacacacacacaca

SEQ ID NO: 452047 - RNA, 27 nt, Human
cacacaccccccacacacuucaaacau

SEQ ID NO: 452048 - RNA, 22 nt, Human
cacacgcccugccugcaggagc

SEQ ID NO: 452049 - RNA, 20 nt, Human
caccccccacacacuucaaa

SEQ ID NO: 452050 - RNA, 19 nt, Human
caccggacugcauccuccu

SEQ ID NO: 452051 - RNA, 22 nt, Human
caccugaccccacaaacacaac

SEQ ID NO: 452052 - RNA, 23 nt, Human
cagaaaagguuaaagauaaaaau

SEQ ID NO: 452053 - RNA, 22 nt, Human
cagacugcgccucaaaccaugc

SEQ ID NO: 452054 - RNA, 22 nt, Human
cagagcuccccucuaaucaaaa

SEQ ID NO: 452055 - RNA, 21 nt, Human
cagcacaaauuucuccuccac

SEQ ID NO: 452056 - RNA, 18 nt, Human
cagucacugacauggccc

SEQ ID NO: 452057 - RNA, 19 nt, Human
caugaguuuacaguuaacc

SEQ ID NO: 452058 - RNA, 28 nt, Human
cauucugcuucugcuggaaaccucuaaa

SEQ ID NO: 452059 - RNA, 19 nt, Human
ccaaaccgacaccaagagc

SEQ ID NO: 452060 - RNA, 23 nt, Human
ccaaaccgacaccaagagcuuuc

SEQ ID NO: 452061 - RNA, 19 nt, Human
ccacaaacacaacagucac

SEQ ID NO: 452062 - RNA, 22 nt, Human
ccagagcuccccucuaaucaaa

SEQ ID NO: 452063 - RNA, 23 nt, Human
ccagagcuccccucuaaucaaaa

SEQ ID NO: 452064 - RNA, 21 nt, Human
ccauauaaaucucccagcuga

SEQ ID NO: 452065 - RNA, 21 nt, Human
cccacaaacacaacagucacu

SEQ ID NO: 452066 - RNA, 25 nt, Human
cccacaaacacaacagucacugaca

SEQ ID NO: 452067 - RNA, 20 nt, Human
cccacacgcccugccugcag

SEQ ID NO: 452068 - RNA, 26 nt, Human
cccacacgcccugccugcaggagcca

SEQ ID NO: 452069 - RNA, 21 nt, Human
cccaccacaacuaagaugacc

SEQ ID NO: 452070 - RNA, 25 nt, Human
cccaccacaacuaagaugacccuag

SEQ ID NO: 452071 - RNA, 20 nt, Human
ccccaggggcuggaaaaggg

SEQ ID NO: 452072 - RNA, 26 nt, Human
ccugaccccacaaacacaacagucac

SEQ ID NO: 452073 - RNA, 18 nt, Human
cgccaagaccagggcccc

SEQ ID NO: 452074 - RNA, 23 nt, Human
cgcucagaaacacgaaagaucau

SEQ ID NO: 452075 - RNA, 25 nt, Human
cggcaguggaacagaucccagaucc

SEQ ID NO: 452076 - RNA, 22 nt, Human
cuaccccaguaaaaacaagaca

SEQ ID NO: 452077 - RNA, 23 nt, Human
cucacacacuauggaugcugaau

SEQ ID NO: 452078 - RNA, 21 nt, Human
cucucaccggacugcauccuc

SEQ ID NO: 452079 - RNA, 20 nt, Human
cuucauucugcuucugcugg

SEQ ID NO: 452080 - RNA, 18 nt, Human
gaaaacacagaaacucac

SEQ ID NO: 452081 - RNA, 19 nt, Human
gacaacaaaauucaaguca

SEQ ID NO: 452082 - RNA, 19 nt, Human
gacaacacaaaauacaaaa

SEQ ID NO: 452083 - RNA, 21 nt, Human
gaccucaaauuaaauuggcug

SEQ ID NO: 452084 - RNA, 20 nt, Human
gaccuccgagaaguacccag

SEQ ID NO: 452085 - RNA, 20 nt, Human
gacugcaaacucccuuccuc

SEQ ID NO: 452086 - RNA, 20 nt, Human
gacuguguaccucaaggccc

SEQ ID NO: 452087 - RNA, 24 nt, Human
gagaaaucuucaccacuggcugcc

SEQ ID NO: 452088 - RNA, 19 nt, Human
gagagacaaaaaggaaggg

SEQ ID NO: 452089 - RNA, 25 nt, Human
gagcaggaguuaguaggcaucagaa

SEQ ID NO: 452090 - RNA, 21 nt, Human
gcaaauccaagaucucaacca

SEQ ID NO: 452091 - RNA, 23 nt, Human
gcaaauccaagaucucaaccaca

SEQ ID NO: 452092 - RNA, 22 nt, Human
ggaaaccucuaaaacuuucuga

SEQ ID NO: 452093 - RNA, 22 nt, Human
gggcuggaaaagggaggucugc

SEQ ID NO: 452094 - RNA, 19 nt, Human
ggggugggggaggcauuag

SEQ ID NO: 452095 - RNA, 20 nt, Human
gguuaaagauaaaaauagcu

SEQ ID NO: 452096 - RNA, 20 nt, Human
uaaaaugcugcccuaaaggc

SEQ ID NO: 452097 - RNA, 26 nt, Human
uaaagcauacugugccagagcucccc

SEQ ID NO: 452098 - RNA, 27 nt, Human
uaacagauuggacuuaggacacucucu

SEQ ID NO: 452099 - RNA, 22 nt, Human
uaacuuuuuaccaaaugucacu

SEQ ID NO: 452100 - RNA, 26 nt, Human
uaagaaacaugccggcauguagucca

SEQ ID NO: 452101 - RNA, 18 nt, Human
uacacaagcuuuauuggg

SEQ ID NO: 452102 - RNA, 24 nt, Human
uacagacugauuuccaagaaaacg

SEQ ID NO: 452103 - RNA, 21 nt, Human
uacagagccagguucagcauc

SEQ ID NO: 452104 - RNA, 21 nt, Human
uacauuaaaaaguagcauggc

SEQ ID NO: 452105 - RNA, 23 nt, Human
uacauuaaaaaguagcauggcca

SEQ ID NO: 452106 - RNA, 22 nt, Human
uaccaugccccccaccugaccc

SEQ ID NO: 452107 - RNA, 22 nt, Human
uaccccaguaaaaacaagacaa

SEQ ID NO: 452108 - RNA, 24 nt, Human
uaccucaaggcccucugaccucaa

SEQ ID NO: 452109 - RNA, 19 nt, Human
uaggcgcagagccacuucc

SEQ ID NO: 452110 - RNA, 20 nt, Human
uaguccauccugggagggga

SEQ ID NO: 452111 - RNA, 24 nt, Human
uauguauucaucaagaaguaaacg

SEQ ID NO: 452112 - RNA, 18 nt, Human
ucaacugaauccuuaugc

SEQ ID NO: 452113 - RNA, 19 nt, Human
ucacacacuauggaugcug

SEQ ID NO: 452114 - RNA, 22 nt, Human
ucacaucugccauguugccuaa

SEQ ID NO: 452115 - RNA, 20 nt, Human
ucaccggacugcauccuccu

SEQ ID NO: 452116 - RNA, 24 nt, Human
ucagccccuccugggagcauucuc

SEQ ID NO: 452117 - RNA, 22 nt, Human
ucaucaaaagacauaugaacaa

SEQ ID NO: 452118 - RNA, 18 nt, Human
ucccccugucacacaacc

SEQ ID NO: 452119 - RNA, 21 nt, Human
ucuaaucaaaaaacgcugucc

SEQ ID NO: 452120 - RNA, 22 nt, Human
ucuuucaggacccucccucccg

SEQ ID NO: 452121 - RNA, 19 nt, Human
ugaaaaugucugagguccu

SEQ ID NO: 452122 - RNA, 20 nt, Human
ugacaucauucucucgcucu

SEQ ID NO: 452123 - RNA, 22 nt, Human
ugaccccacaaacacaacaguc

SEQ ID NO: 452124 - RNA, 20 nt, Human
ugacgaggcucccacacgcc

SEQ ID NO: 452125 - RNA, 18 nt, Human
ugaggaaaucacagacuc

SEQ ID NO: 452126 - RNA, 21 nt, Human
ugcaaaacugcagaaucauaa

SEQ ID NO: 452127 - RNA, 22 nt, Human
ugcuguggcggagaagacagau

SEQ ID NO: 452128 - RNA, 19 nt, Human
ugcuucggagcuccaggug

SEQ ID NO: 452129 - RNA, 23 nt, Human
uggcacguuuccugcuaaaacaa

SEQ ID NO: 452130 - RNA, 22 nt, Human
uggcggggggugggggaggcau

SEQ ID NO: 452131 - RNA, 22 nt, Human
uggcgguuaauauaaauggaac

SEQ ID NO: 452132 - RNA, 21 nt, Human
ugggcuuacagucugauugug

SEQ ID NO: 452133 - RNA, 18 nt, Human
ugggguucucugcugggc

SEQ ID NO: 452134 - RNA, 23 nt, Human
ugggucucuuucaggacccuccc

SEQ ID NO: 452135 - RNA, 28 nt, Human
ugucacacaaccaucaucaaaagacagc

SEQ ID NO: 452136 - RNA, 22 nt, Human
uguccucucaccggacugcauc

SEQ ID NO: 452137 - RNA, 20 nt, Human
uuaaagauccaccaacuuaa

SEQ ID NO: 452138 - RNA, 28 nt, Human
uucacacacacacacaccccccacacac

SEQ ID NO: 452139 - RNA, 21 nt, Human
uuccgcuuuggucuuggagga

SEQ ID NO: 452140 - RNA, 23 nt, Human
uuuaaaaugcugcccuaaaggca

SEQ ID NO: 452141 - RNA, 19 nt, Human
uuucacacacacacacacc

SEQ ID NO: 452142 - RNA, 20 nt, Human
uuucaggacccucccucccg

SEQ ID NO: 452143 - RNA, 18 nt, Human
uuugcaaagucuaaacag

SEQ ID NO: 452144 - RNA, 23 nt, Human
uuuugcaaauaccaugcccccca

SEQ ID NO: 452145 - RNA, 20 nt, Human
aagggcagaaggugcugggg

SEQ ID NO: 452146 - RNA, 26 nt, Human
aaggugcuggggccagcccgcugggg

SEQ ID NO: 452147 - RNA, 21 nt, Human
aauacaaaaaaagaaagaaaa

SEQ ID NO: 452148 - RNA, 22 nt, Human
acaauacaaaaaaagaaagaaa

SEQ ID NO: 452149 - RNA, 21 nt, Human
acacuuaagaggaagaggcca

SEQ ID NO: 452150 - RNA, 22 nt, Human
agaaggugcuggggccagcccg

SEQ ID NO: 452151 - RNA, 23 nt, Human
agagaaacagggcauuauuugca

SEQ ID NO: 452152 - RNA, 19 nt, Human
agaggcugucucagcaucu

SEQ ID NO: 452153 - RNA, 20 nt, Human
agaggcugucucagcaucua

SEQ ID NO: 452154 - RNA, 24 nt, Human
aggaagaggccaucgcagcaucug

SEQ ID NO: 452155 - RNA, 19 nt, Human
aggagaggcugucucagca

SEQ ID NO: 452156 - RNA, 20 nt, Human
agggagaagccauccuggca

SEQ ID NO: 452157 - RNA, 20 nt, Human
agggagaggcugucucagca

SEQ ID NO: 452158 - RNA, 20 nt, Human
agggaggggccaucccggca

SEQ ID NO: 452159 - RNA, 18 nt, Human
aggugcuggggccagccu

SEQ ID NO: 452160 - RNA, 20 nt, Human
caauauggaaauacaauuuu

SEQ ID NO: 452161 - RNA, 24 nt, Human
cagcccgcuggggguggcgguccg

SEQ ID NO: 452162 - RNA, 22 nt, Human
ccauccuggcaucugugcccug

SEQ ID NO: 452163 - RNA, 18 nt, Human
ccugggcucgccuggcgu

SEQ ID NO: 452164 - RNA, 22 nt, Human
cgucccggccucugugcccugg

SEQ ID NO: 452165 - RNA, 23 nt, Human
cuggggccagcccgcugggggug

SEQ ID NO: 452166 - RNA, 27 nt, Human
gaaauacaauuuugacaauacaaaaaa

SEQ ID NO: 452167 - RNA, 27 nt, Human
gagaaaaagaaucccaaauuaaaaugu

SEQ ID NO: 452168 - RNA, 21 nt, Human
gagaaggagaggcugucucag

SEQ ID NO: 452169 - RNA, 23 nt, Human
gagaggcugucucagcaucugug

SEQ ID NO: 452170 - RNA, 20 nt, Human
gagagggagaagccauccug

SEQ ID NO: 452171 - RNA, 21 nt, Human
gaggaagaggccaucgcagca

SEQ ID NO: 452172 - RNA, 19 nt, Human
gcacugagagggagaagcc

SEQ ID NO: 452173 - RNA, 21 nt, Human
gcaggggugaggccccacacu

SEQ ID NO: 452174 - RNA, 19 nt, Human
gcccugggcucgccuggcg

SEQ ID NO: 452175 - RNA, 24 nt, Human
ggagaggcugucucagcaucuaug

SEQ ID NO: 452176 - RNA, 24 nt, Human
ggagaggcugucucagcaucugug

SEQ ID NO: 452177 - RNA, 19 nt, Human
gggaagggcagaaggugcu

SEQ ID NO: 452178 - RNA, 22 nt, Human
gucccggccucugugcccuggg

SEQ ID NO: 452179 - RNA, 23 nt, Human
ucccggccucugugcccugggcu

SEQ ID NO: 452180 - RNA, 24 nt, Human
ugacaauacaaaaaaagaaagaaa

SEQ ID NO: 452181 - RNA, 19 nt, Human
ugagagggaggggccaucc

SEQ ID NO: 452182 - RNA, 19 nt, Human
ugcccugggcucgccuggc

SEQ ID NO: 452183 - RNA, 20 nt, Human
ugcccugggcucgccuggcg

SEQ ID NO: 452184 - RNA, 20 nt, Human
ugcccugggcuugccuagca

SEQ ID NO: 452185 - RNA, 23 nt, Human
uggcaaacccugcguucacuggc

SEQ ID NO: 452186 - RNA, 18 nt, Human
ugggaagggcagaaggug

SEQ ID NO: 452187 - RNA, 21 nt, Human
ugguagcaauggcaaacccug

SEQ ID NO: 452188 - RNA, 20 nt, Human
ugucuaaguuacaggcacag

SEQ ID NO: 452189 - RNA, 25 nt, Human
uuacaggcacagagaaacagggcau

SEQ ID NO: 452190 - RNA, 24 nt, Human
uuguggugcuugcuugguagcaau

SEQ ID NO: 452191 - RNA, 23 nt, Human
aaaaaaggaaaccucaaguaugc

SEQ ID NO: 452192 - RNA, 25 nt, Human
aacaggauguuuggcuuaugcuuuu

SEQ ID NO: 452193 - RNA, 22 nt, Human
aacugcucauuauaaaugcuga

SEQ ID NO: 452194 - RNA, 25 nt, Human
aagcccauaucuaacuacagcaggu

SEQ ID NO: 452195 - RNA, 22 nt, Human
accucgaacacuuaaaaaagga

SEQ ID NO: 452196 - RNA, 18 nt, Human
accugaaauuugcugaua

SEQ ID NO: 452197 - RNA, 19 nt, Human
acuaaaggcaucucugggg

SEQ ID NO: 452198 - RNA, 21 nt, Human
aggaaaccucaaguaugcuga

SEQ ID NO: 452199 - RNA, 20 nt, Human
cccccgccuccuccuccucc

SEQ ID NO: 452200 - RNA, 18 nt, Human
ccccgccuccuccuccuc

SEQ ID NO: 452201 - RNA, 20 nt, Human
ccccgccuccuccuccuccu

SEQ ID NO: 452202 - RNA, 22 nt, Human
cgaacacuuaaaaaaggaaacc

SEQ ID NO: 452203 - RNA, 22 nt, Human
cugguuauucuacaguuuaaac

SEQ ID NO: 452204 - RNA, 24 nt, Human
gaagucuuuaaccugaugggaaua

SEQ ID NO: 452205 - RNA, 19 nt, Human
ggaauaucugguuauucua

SEQ ID NO: 452206 - RNA, 24 nt, Human
uaaacaggauguuuggcuuaugcu

SEQ ID NO: 452207 - RNA, 18 nt, Human
uaaagaugacaaacucau

SEQ ID NO: 452208 - RNA, 19 nt, Human
uaacagguggaguuagaaa

SEQ ID NO: 452209 - RNA, 22 nt, Human
uaauagggcucaucucugugac

SEQ ID NO: 452210 - RNA, 23 nt, Human
uagggcaacucauuaccaacugc

SEQ ID NO: 452211 - RNA, 23 nt, Human
uauaccugaaauuugcugauacc

SEQ ID NO: 452212 - RNA, 24 nt, Human
uaucuaacuauaccugaaauuugc

SEQ ID NO: 452213 - RNA, 23 nt, Human
uaugcuuuuguucagcugacugg

SEQ ID NO: 452214 - RNA, 20 nt, Human
ucaaaguggccagaaugcaa

SEQ ID NO: 452215 - RNA, 21 nt, Human
ugacaaacucaucauuuggga

SEQ ID NO: 452216 - RNA, 21 nt, Human
ugacaaacucaucauuuggga

SEQ ID NO: 452217 - RNA, 18 nt, Human
ugacugcuugcgacaagc

SEQ ID NO: 452218 - RNA, 22 nt, Human
ugagucaacuaggugaagggcc

SEQ ID NO: 452219 - RNA, 19 nt, Human
ugaguucauaaagaugaca

SEQ ID NO: 452220 - RNA, 22 nt, Human
ugaguucauaaagaugacaaac

SEQ ID NO: 452221 - RNA, 21 nt, Human
ugggaaggauuaaagcccaua

SEQ ID NO: 452222 - RNA, 20 nt, Human
ugugacugcuugcgacaagc

SEQ ID NO: 452223 - RNA, 21 nt, Human
ugugcaaaaucaagucaacug

SEQ ID NO: 452224 - RNA, 18 nt, Human
uucauaaagaugacaaac

SEQ ID NO: 452225 - RNA, 20 nt, Human
uuugcugauaccccaagcca

SEQ ID NO: 452226 - RNA, 22 nt, Human
aaggaccagcccccagggccuu

SEQ ID NO: 452227 - RNA, 24 nt, Human
agacgcgaaaccuggagcaggaaa

SEQ ID NO: 452228 - RNA, 19 nt, Human
aggcaaaggaccagccccc

SEQ ID NO: 452229 - RNA, 22 nt, Human
aggcaaaggaccagcccccagg

SEQ ID NO: 452230 - RNA, 23 nt, Human
aggcaaaggaccagcccccaggg

SEQ ID NO: 452231 - RNA, 21 nt, Human
caaaggaccagcccccagggc

SEQ ID NO: 452232 - RNA, 19 nt, Human
caggaaacacagagcgaug

SEQ ID NO: 452233 - RNA, 18 nt, Human
caugacaccuacggcgcg

SEQ ID NO: 452234 - RNA, 25 nt, Human
ccaaagccgcacggucgggcuguac

SEQ ID NO: 452235 - RNA, 22 nt, Human
ccucagagcccucaaccucccu

SEQ ID NO: 452236 - RNA, 25 nt, Human
ccuugucggaauuugguaaaggguc

SEQ ID NO: 452237 - RNA, 26 nt, Human
cgccgccaucuuccgcaugacaccua

SEQ ID NO: 452238 - RNA, 24 nt, Human
cgcgaaaccuggagcaggaaacac

SEQ ID NO: 452239 - RNA, 20 nt, Human
cucagagcccucaaccuccc

SEQ ID NO: 452240 - RNA, 19 nt, Human
cuuccgcaugacaccuacg

SEQ ID NO: 452241 - RNA, 28 nt, Human
gcgaaaccuggagcaggaaacacagagc

SEQ ID NO: 452242 - RNA, 18 nt, Human
ggcaaaggaccagccccc

SEQ ID NO: 452243 - RNA, 18 nt, Human
gggccagacaggcaaagg

SEQ ID NO: 452244 - RNA, 18 nt, Human
gggcuguacggaaaccuc

SEQ ID NO: 452245 - RNA, 18 nt, Human
gucugggaagaugcgaga

SEQ ID NO: 452246 - RNA, 22 nt, Human
uaaagggucuacccuacgaagc

SEQ ID NO: 452247 - RNA, 24 nt, Human
aaacaaacuugacuauaaugaaau

SEQ ID NO: 452248 - RNA, 24 nt, Human
aaacuugacuauaaugaaaugggc

SEQ ID NO: 452249 - RNA, 26 nt, Human
aaaggacauaccuaugaccggggccc

SEQ ID NO: 452250 - RNA, 21 nt, Human
aaaugguggcaaaaaccgagc

SEQ ID NO: 452251 - RNA, 22 nt, Human
aacacaaccaccacccuagucc

SEQ ID NO: 452252 - RNA, 23 nt, Human
aagccgcagggcccgcccaaaca

SEQ ID NO: 452253 - RNA, 23 nt, Human
aaggacacagacuuauaaauggu

SEQ ID NO: 452254 - RNA, 18 nt, Human
aagggccagguuuucagu

SEQ ID NO: 452255 - RNA, 20 nt, Human
aaugaaaugggcaaaaagga

SEQ ID NO: 452256 - RNA, 18 nt, Human
acauaccuaugacuauaa

SEQ ID NO: 452257 - RNA, 19 nt, Human
acccggcuggagcuggagc

SEQ ID NO: 452258 - RNA, 20 nt, Human
acgggcgagggcagaacaca

SEQ ID NO: 452259 - RNA, 23 nt, Human
acucaagaaaaggacacagacuu

SEQ ID NO: 452260 - RNA, 24 nt, Human
acuuauaaaugguggcaaaaaccg

SEQ ID NO: 452261 - RNA, 18 nt, Human
agccccauaaaagaaguc

SEQ ID NO: 452262 - RNA, 21 nt, Human
agcuggagcgggggcgggggc

SEQ ID NO: 452263 - RNA, 26 nt, Human
aggaagaaacaaacuugacuauaaug

SEQ ID NO: 452264 - RNA, 20 nt, Human
caaccaccacccuagucccg

SEQ ID NO: 452265 - RNA, 24 nt, Human
caagaaaaggacacagacuuauaa

SEQ ID NO: 452266 - RNA, 20 nt, Human
caagacgaaucaaugacuga

SEQ ID NO: 452267 - RNA, 22 nt, Human
cacaaccaccacccuagucccg

SEQ ID NO: 452268 - RNA, 20 nt, Human
cagcccagcguuggcgacgg

SEQ ID NO: 452269 - RNA, 22 nt, Human
caggaagaaacaaacuugacua

SEQ ID NO: 452270 - RNA, 28 nt, Human
caggaagaaacaaacuugacuauaaugg

SEQ ID NO: 452271 - RNA, 18 nt, Human
ccgcagggcccgcccaaa

SEQ ID NO: 452272 - RNA, 26 nt, Human
cgccaggagccccauaaaagaagucc

SEQ ID NO: 452273 - RNA, 18 nt, Human
cgggggcggggcgagggc

SEQ ID NO: 452274 - RNA, 20 nt, Human
cugaaugaauagcaccgcca

SEQ ID NO: 452275 - RNA, 23 nt, Human
gaaaauaaauaugaaacacagga

SEQ ID NO: 452276 - RNA, 22 nt, Human
gcccagaguuucucccacggcc

SEQ ID NO: 452277 - RNA, 21 nt, Human
gcgcgacccaaagggccaggu

SEQ ID NO: 452278 - RNA, 22 nt, Human
gcgcgacccaaagggccagguu

SEQ ID NO: 452279 - RNA, 19 nt, Human
gcggggcgagggcggggcc

SEQ ID NO: 452280 - RNA, 23 nt, Human
gcggggcgagggcgggugcuggg

SEQ ID NO: 452281 - RNA, 18 nt, Human
ggccgagcgaggacccgg

SEQ ID NO: 452282 - RNA, 23 nt, Human
ggccgagcgaggacccggcugga

SEQ ID NO: 452283 - RNA, 18 nt, Human
gggcccgcccaaacaaga

SEQ ID NO: 452284 - RNA, 22 nt, Human
gggccgagggcgagccggaaga

SEQ ID NO: 452285 - RNA, 20 nt, Human
gggcggggcgagggcggggc

SEQ ID NO: 452286 - RNA, 21 nt, Human
gggcggggcgagggcggggcc

SEQ ID NO: 452287 - RNA, 21 nt, Human
gggcuggggccgggauggaga

SEQ ID NO: 452288 - RNA, 22 nt, Human
gggggcggggcgagggcggggc

SEQ ID NO: 452289 - RNA, 19 nt, Human
gugagucaacugcaacaaa

SEQ ID NO: 452290 - RNA, 20 nt, Human
uaguggacgcucgacugggc

SEQ ID NO: 452291 - RNA, 24 nt, Human
uaugaaacacaggaagaaacaaac

SEQ ID NO: 452292 - RNA, 23 nt, Human
ucaagaaaaggacacagacuuau

SEQ ID NO: 452293 - RNA, 18 nt, Human
ucaguacucaagaaaagg

SEQ ID NO: 452294 - RNA, 18 nt, Human
ucagucuucgcugugaca

SEQ ID NO: 452295 - RNA, 22 nt, Human
uccgugaggagcgaggauuagg

SEQ ID NO: 452296 - RNA, 22 nt, Human
ugaaaauaaauaugaaacacag

SEQ ID NO: 452297 - RNA, 19 nt, Human
ugccgggucgaguacagag

SEQ ID NO: 452298 - RNA, 23 nt, Human
uggagcgggggcgggggcggggc

SEQ ID NO: 452299 - RNA, 22 nt, Human
ugucugguucuuccgguaccca

SEQ ID NO: 452300 - RNA, 19 nt, Human
uuuuuuuuuuuuuuugucu

SEQ ID NO: 452301 - RNA, 18 nt, Human
uuuuuuuuuuuuuuuuug

SEQ ID NO: 452302 - RNA, 19 nt, Human
uuuuuuuuuuuuuuuuugu

SEQ ID NO: 452303 - RNA, 21 nt, Human
aaauuauucacauuaaaaaau

SEQ ID NO: 452304 - RNA, 21 nt, Human
aagguuccaugugcugaggca

SEQ ID NO: 452305 - RNA, 19 nt, Human
aguaaauauuuaaaaaugu

SEQ ID NO: 452306 - RNA, 18 nt, Human
aucacuuagaaacuuuau

SEQ ID NO: 452307 - RNA, 23 nt, Human
cagcacaguagacauacaaucaa

SEQ ID NO: 452308 - RNA, 21 nt, Human
gaaagacacuuccaggaagua

SEQ ID NO: 452309 - RNA, 19 nt, Human
uaacuucacauuuuuggua

SEQ ID NO: 452310 - RNA, 18 nt, Human
uagaaacuuuauuuggua

SEQ ID NO: 452311 - RNA, 23 nt, Human
uauaaauuauucacauuaaaaaa

SEQ ID NO: 452312 - RNA, 24 nt, Human
uauguauauguagcuguucguaug

SEQ ID NO: 452313 - RNA, 18 nt, Human
ucauuuuucagguuuaga

SEQ ID NO: 452314 - RNA, 21 nt, Human
uccgaaagacacuuccaggaa

SEQ ID NO: 452315 - RNA, 21 nt, Human
uuuuugguauauagaaauuuu

SEQ ID NO: 452316 - RNA, 26 nt, Human
aaaaacaaaaaucacauagaagagaa

SEQ ID NO: 452317 - RNA, 25 nt, Human
acagcauuaaaguuuccuucucuga

SEQ ID NO: 452318 - RNA, 18 nt, Human
acauagaagagaaucuag

SEQ ID NO: 452319 - RNA, 19 nt, Human
accagcccgcacacacgca

SEQ ID NO: 452320 - RNA, 24 nt, Human
acucuuguacuuuuagaucacaaa

SEQ ID NO: 452321 - RNA, 24 nt, Human
agagaaggacuggagaacuguaaa

SEQ ID NO: 452322 - RNA, 18 nt, Human
agaucacaaauuugccuu

SEQ ID NO: 452323 - RNA, 19 nt, Human
aggaaacaaacacuacuac

SEQ ID NO: 452324 - RNA, 20 nt, Human
caaaacccccaugagaacaa

SEQ ID NO: 452325 - RNA, 23 nt, Human
caaaacccccaugagaacaaugg

SEQ ID NO: 452326 - RNA, 25 nt, Human
caaaacccccaugagaacaaugggc

SEQ ID NO: 452327 - RNA, 26 nt, Human
cacaaaaccagcccgcacacacgcag

SEQ ID NO: 452328 - RNA, 21 nt, Human
caccaacccggcaaaugcucc

SEQ ID NO: 452329 - RNA, 22 nt, Human
caccaacccggcaaaugcucca

SEQ ID NO: 452330 - RNA, 27 nt, Human
cacuacacugcuuuauauaaaaaacaa

SEQ ID NO: 452331 - RNA, 19 nt, Human
caggagccaccaacccggc

SEQ ID NO: 452332 - RNA, 22 nt, Human
cccccaugagaacaaugggcuc

SEQ ID NO: 452333 - RNA, 23 nt, Human
cccgcacacacgcagacguuccg

SEQ ID NO: 452334 - RNA, 18 nt, Human
cggcaaaugcuccagcuc

SEQ ID NO: 452335 - RNA, 18 nt, Human
cuagcucaaaaaucacuc

SEQ ID NO: 452336 - RNA, 22 nt, Human
cucagguggaagacuuugaaga

SEQ ID NO: 452337 - RNA, 22 nt, Human
cuuacagguggccucagcuucu

SEQ ID NO: 452338 - RNA, 26 nt, Human
gagccaccaacccggcaaaugcucca

SEQ ID NO: 452339 - RNA, 20 nt, Human
gccacaaaaccagcccgcac

SEQ ID NO: 452340 - RNA, 22 nt, Human
gccacaaaaccagcccgcacac

SEQ ID NO: 452341 - RNA, 21 nt, Human
gguggaagacuuugaagacua

SEQ ID NO: 452342 - RNA, 21 nt, Human
guagaauuaucacuaguagau

SEQ ID NO: 452343 - RNA, 21 nt, Human
guuaauaucacaaaaccccca

SEQ ID NO: 452344 - RNA, 23 nt, Human
uaaagaacauauaaaauuaagau

SEQ ID NO: 452345 - RNA, 21 nt, Human
uaaagcaagacaaacucuucc

SEQ ID NO: 452346 - RNA, 26 nt, Human
uaacaaauacuauuuaauuaucaaga

SEQ ID NO: 452347 - RNA, 18 nt, Human
uaaguaacacauaauaca

SEQ ID NO: 452348 - RNA, 24 nt, Human
uacaaacugagaauuuugaaacua

SEQ ID NO: 452349 - RNA, 24 nt, Human
uagaaagcaagauucauuaaauca

SEQ ID NO: 452350 - RNA, 20 nt, Human
uagcagcagccgccacaaaa

SEQ ID NO: 452351 - RNA, 24 nt, Human
uauaauccuagcucaaaaaucacu

SEQ ID NO: 452352 - RNA, 19 nt, Human
uaucaagacauaugcaaaa

SEQ ID NO: 452353 - RNA, 21 nt, Human
uaucacaaaacccccaugaga

SEQ ID NO: 452354 - RNA, 20 nt, Human
ucacaaaacccccaugagaa

SEQ ID NO: 452355 - RNA, 18 nt, Human
ucagcuucuaaacaccac

SEQ ID NO: 452356 - RNA, 24 nt, Human
ucauuuuuccccuuucaauggaau

SEQ ID NO: 452357 - RNA, 23 nt, Human
ucuagcagcagccgccacaaaaa

SEQ ID NO: 452358 - RNA, 23 nt, Human
ucuucauuuuuccccuuucaaug

SEQ ID NO: 452359 - RNA, 23 nt, Human
ugaaaauaaacauuucagauaua

SEQ ID NO: 452360 - RNA, 26 nt, Human
uguuucucuucauuuuuccccuuuca

SEQ ID NO: 452361 - RNA, 28 nt, Human
uuaauuaucaagacauaugcaaaaguau

SEQ ID NO: 452362 - RNA, 18 nt, Human
uuuauauucacuccucau

SEQ ID NO: 452363 - RNA, 18 nt, Human
aggcagaaauugguggau

SEQ ID NO: 452364 - RNA, 18 nt, Human
cuaaauuaaguagcugaa

SEQ ID NO: 452365 - RNA, 24 nt, Human
cuuuucuguggccuugcaauaggu

SEQ ID NO: 452366 - RNA, 21 nt, Human
uaacauuuuagguauauaaca

SEQ ID NO: 452367 - RNA, 19 nt, Human
uaucugcucuuuucugugg

SEQ ID NO: 452368 - RNA, 21 nt, Human
uaucugcucuuuucuguggcc

SEQ ID NO: 452369 - RNA, 21 nt, Human
ucugcucuuuucuguggccuu

SEQ ID NO: 452370 - RNA, 19 nt, Human
ugagaaaaaauggagaaca

SEQ ID NO: 452371 - RNA, 21 nt, Human
uuggcacuaucugcucuuuuc

SEQ ID NO: 452372 - RNA, 21 nt, Human
uugguggauaaauuauuuccu

SEQ ID NO: 452373 - RNA, 20 nt, Human
aaaagagaaaucgugcugca

SEQ ID NO: 452374 - RNA, 24 nt, Human
aaacaaaaccaaaacaaaaaucua

SEQ ID NO: 452375 - RNA, 26 nt, Human
aaaccaaaacaaaaaucuauucuucc

SEQ ID NO: 452376 - RNA, 19 nt, Human
aaagacuggugaauaaaca

SEQ ID NO: 452377 - RNA, 21 nt, Human
aaagagaaaucgugcugcaga

SEQ ID NO: 452378 - RNA, 19 nt, Human
aaauacagcacaauuacuu

SEQ ID NO: 452379 - RNA, 22 nt, Human
aaugaaaaaacagaagcagccc

SEQ ID NO: 452380 - RNA, 20 nt, Human
agcacaauuacuucagauca

SEQ ID NO: 452381 - RNA, 18 nt, Human
agcacacacucucuugug

SEQ ID NO: 452382 - RNA, 18 nt, Human
agcagacuucagauucau

SEQ ID NO: 452383 - RNA, 20 nt, Human
agggcauuaucaaaagagaa

SEQ ID NO: 452384 - RNA, 21 nt, Human
augacuaggaaaaaaaaaacc

SEQ ID NO: 452385 - RNA, 22 nt, Human
auugcaauggaaauaaauguuc

SEQ ID NO: 452386 - RNA, 23 nt, Human
caaaaaaaaguuuaaacacacaa

SEQ ID NO: 452387 - RNA, 22 nt, Human
caaaacaaaaccaaaacaaaaa

SEQ ID NO: 452388 - RNA, 28 nt, Human
caaaacaaaaccaaaacaaaaaucuauu

SEQ ID NO: 452389 - RNA, 23 nt, Human
cacugcucuacauucccaaugac

SEQ ID NO: 452390 - RNA, 18 nt, Human
cagaagcagccauaauga

SEQ ID NO: 452391 - RNA, 25 nt, Human
cagccacagaaauugcaauggaaau

SEQ ID NO: 452392 - RNA, 23 nt, Human
cauaagcagcuacuuaaaaguuu

SEQ ID NO: 452393 - RNA, 24 nt, Human
cauucccaaugacuaggaaaaaaa

SEQ ID NO: 452394 - RNA, 18 nt, Human
ccacagaaauugcaaugg

SEQ ID NO: 452395 - RNA, 25 nt, Human
cccuaaagggcauuaucaaaagaga

SEQ ID NO: 452396 - RNA, 18 nt, Human
ccgccggccccuccgucc

SEQ ID NO: 452397 - RNA, 23 nt, Human
ccucaagucaauuuuuaguuugc

SEQ ID NO: 452398 - RNA, 21 nt, Human
cgccgccgccgguagccgccg

SEQ ID NO: 452399 - RNA, 18 nt, Human
cgcugcgcgccgccgccg

SEQ ID NO: 452400 - RNA, 28 nt, Human
cucaucagcacacacucucuugugacaa

SEQ ID NO: 452401 - RNA, 19 nt, Human
cuccgccaccgccggcccc

SEQ ID NO: 452402 - RNA, 21 nt, Human
cugcagcagacuucagauuca

SEQ ID NO: 452403 - RNA, 24 nt, Human
cuucauauuguauacacacaaacc

SEQ ID NO: 452404 - RNA, 21 nt, Human
cuucccucgcucaaaaaaaag

SEQ ID NO: 452405 - RNA, 22 nt, Human
gaaaaaacagaagcagccauaa

SEQ ID NO: 452406 - RNA, 18 nt, Human
gagaaaagcgauauauac

SEQ ID NO: 452407 - RNA, 24 nt, Human
gagucauuuucaaaacaaaaccaa

SEQ ID NO: 452408 - RNA, 20 nt, Human
gcagcagacuucagauucau

SEQ ID NO: 452409 - RNA, 24 nt, Human
uaaaagcccucugcacucaacuaa

SEQ ID NO: 452410 - RNA, 21 nt, Human
uaacuaguugugcccuaaagg

SEQ ID NO: 452411 - RNA, 18 nt, Human
uacauacacaaugagaaa

SEQ ID NO: 452412 - RNA, 23 nt, Human
uauauacauacacaaugagaaaa

SEQ ID NO: 452413 - RNA, 24 nt, Human
ucucauaagcagcuacuuaaaagu

SEQ ID NO: 452414 - RNA, 18 nt, Human
ucucuugugacaaaugau

SEQ ID NO: 452415 - RNA, 23 nt, Human
ugagaaaauaaacugcaagauua

SEQ ID NO: 452416 - RNA, 22 nt, Human
ugcaauggaaauaaauguucag

SEQ ID NO: 452417 - RNA, 21 nt, Human
ugccgccgaaccccugcuugc

SEQ ID NO: 452418 - RNA, 20 nt, Human
uguauacacacaaacccaug

SEQ ID NO: 452419 - RNA, 24 nt, Human
uguauacacacaaacccaugaaca

SEQ ID NO: 452420 - RNA, 20 nt, Human
uuaaacacacaaacuuacaa

SEQ ID NO: 452421 - RNA, 19 nt, Human
uuacugauaacuaguugug

SEQ ID NO: 452422 - RNA, 19 nt, Human
uuagcuuucugccuucccu

SEQ ID NO: 452423 - RNA, 21 nt, Human
uucaaaacaaaaccaaaacaa

SEQ ID NO: 452424 - RNA, 21 nt, Human
uuuaauacuggaaaaaucaca

SEQ ID NO: 452425 - RNA, 22 nt, Human
uuuuuuuuuuuuuuuuucauuu

SEQ ID NO: 452426 - RNA, 24 nt, Human
aaauaugacuacaguaaucauaac

SEQ ID NO: 452427 - RNA, 19 nt, Human
aagcacaauggcgcccgcc

SEQ ID NO: 452428 - RNA, 22 nt, Human
agcacaauggcgcccgccccuc

SEQ ID NO: 452429 - RNA, 23 nt, Human
agcauuuuauuucaaaaguauau

SEQ ID NO: 452430 - RNA, 18 nt, Human
aggcauacauguguaugu

SEQ ID NO: 452431 - RNA, 18 nt, Human
caaaaaaggguugauagg

SEQ ID NO: 452432 - RNA, 20 nt, Human
caaaaugagacugcaacuua

SEQ ID NO: 452433 - RNA, 18 nt, Human
caagaguaaaacacaaac

SEQ ID NO: 452434 - RNA, 20 nt, Human
cacaauggcgcccgccccuc

SEQ ID NO: 452435 - RNA, 22 nt, Human
cacaauggcgcccgccccucuc

SEQ ID NO: 452436 - RNA, 23 nt, Human
cauucccccacaaaaguaauuua

SEQ ID NO: 452437 - RNA, 27 nt, Human
cccgugacugaggaaaugccggggucc

SEQ ID NO: 452438 - RNA, 19 nt, Human
gcgaagcacaauggcgccc

SEQ ID NO: 452439 - RNA, 25 nt, Human
uaaucauaacacaaaaaaggguuga

SEQ ID NO: 452440 - RNA, 20 nt, Human
uacaggcauacauguguaug

SEQ ID NO: 452441 - RNA, 20 nt, Human
uagcaagaguaaaacacaaa

SEQ ID NO: 452442 - RNA, 24 nt, Human
uaggugccauauagcauuuuauuu

SEQ ID NO: 452443 - RNA, 24 nt, Human
uauacaggcauacauguguaugua

SEQ ID NO: 452444 - RNA, 24 nt, Human
uauauacaggcauacauguguaug

SEQ ID NO: 452445 - RNA, 19 nt, Human
uauauauacaggcauacau

SEQ ID NO: 452446 - RNA, 23 nt, Human
uauguauauauucauuuuauaua

SEQ ID NO: 452447 - RNA, 18 nt, Human
uauguuaaaaaguccagc

SEQ ID NO: 452448 - RNA, 22 nt, Human
ucaaaaugagacugcaacuuaa

SEQ ID NO: 452449 - RNA, 18 nt, Human
ugacuacaguaaucauaa

SEQ ID NO: 452450 - RNA, 18 nt, Human
ugucccacuuuucucacu

SEQ ID NO: 452451 - RNA, 27 nt, Human
uguguauguauauauucauuuuauaua

SEQ ID NO: 452452 - RNA, 25 nt, Human
uguuaaaaaguccagcagaauuuua

SEQ ID NO: 452453 - RNA, 21 nt, Human
uuaggugccauauagcauuuu

SEQ ID NO: 452454 - RNA, 21 nt, Human
uuugcuauguuaaaaagucca

SEQ ID NO: 452455 - RNA, 18 nt, Human
aaaucaaucucacaacug

SEQ ID NO: 452456 - RNA, 24 nt, Human
acauuagccagacacaaacagccu

SEQ ID NO: 452457 - RNA, 19 nt, Human
agccagacacaaacagccu

SEQ ID NO: 452458 - RNA, 18 nt, Human
auccaagauauuauuuga

SEQ ID NO: 452459 - RNA, 19 nt, Human
caaccaaacaacucuacuu

SEQ ID NO: 452460 - RNA, 24 nt, Human
cucauaaaucccucuaauuauaaa

SEQ ID NO: 452461 - RNA, 18 nt, Human
gaaaacuucccuucuucc

SEQ ID NO: 452462 - RNA, 23 nt, Human
gcgccagcccuauaucugugcuu

SEQ ID NO: 452463 - RNA, 21 nt, Human
ggaagcaccugcgccagcccu

SEQ ID NO: 452464 - RNA, 24 nt, Human
uaagcuuugggaagcaccugcgcc

SEQ ID NO: 452465 - RNA, 24 nt, Human
uaauagaacaaaucacaugaaagu

SEQ ID NO: 452466 - RNA, 20 nt, Human
uacauuuacuauauaagaau

SEQ ID NO: 452467 - RNA, 20 nt, Human
uagaaaacuucccuucuucc

SEQ ID NO: 452468 - RNA, 23 nt, Human
uagagcaaucacucauaaauccc

SEQ ID NO: 452469 - RNA, 23 nt, Human
ucuaauuauaaauaaaauccaag

SEQ ID NO: 452470 - RNA, 21 nt, Human
ugaaguaaaaagucccaaccc

SEQ ID NO: 452471 - RNA, 21 nt, Human
uggcaaaacaagacaaguuuc

SEQ ID NO: 452472 - RNA, 23 nt, Human
uguuacaaguucuccuagugaag

SEQ ID NO: 452473 - RNA, 22 nt, Human
uuagccagacacaaacagccuu

SEQ ID NO: 452474 - RNA, 19 nt, Human
uucaauuccuuuccuuucc

SEQ ID NO: 452475 - RNA, 21 nt, Human
uucaauuccuuuccuuuccuu

SEQ ID NO: 452476 - RNA, 19 nt, Human
uucauacaauacuagaaaa

SEQ ID NO: 452477 - RNA, 23 nt, Human
uucauacaauacuagaaaacuuc

SEQ ID NO: 452478 - RNA, 19 nt, Human
uucgaacuugaaauuagca

SEQ ID NO: 452479 - RNA, 18 nt, Human
uuugacaaugagaugcuu

SEQ ID NO: 452480 - RNA, 19 nt, Human
aaaaaagaaaagaaacaua

SEQ ID NO: 452481 - RNA, 22 nt, Human
aaagaaaaaaaaagaaaaaaaa

SEQ ID NO: 452482 - RNA, 19 nt, Human
aaagagcaaaacaaaaaag

SEQ ID NO: 452483 - RNA, 19 nt, Human
aaauauugaagaauacgcc

SEQ ID NO: 452484 - RNA, 18 nt, Human
aagaaaaaaaaagaaaaa

SEQ ID NO: 452485 - RNA, 18 nt, Human
aagucacuuuuugagaua

SEQ ID NO: 452486 - RNA, 25 nt, Human
aauugcuuuugaaaaugguuucuau

SEQ ID NO: 452487 - RNA, 19 nt, Human
acacauuccaccugcugac

SEQ ID NO: 452488 - RNA, 19 nt, Human
agaaagaaaaaaaaagaaa

SEQ ID NO: 452489 - RNA, 19 nt, Human
agcaaaacaaaaaagaaag

SEQ ID NO: 452490 - RNA, 22 nt, Human
agcaaaacaaaaaagaaagaaa

SEQ ID NO: 452491 - RNA, 24 nt, Human
agcgugcuguguuuuccuucuucu

SEQ ID NO: 452492 - RNA, 19 nt, Human
caaaacaaaaaagaaagaa

SEQ ID NO: 452493 - RNA, 21 nt, Human
caaggugcccgugccaggagc

SEQ ID NO: 452494 - RNA, 23 nt, Human
caccuggaaaauaccaacaccuu

SEQ ID NO: 452495 - RNA, 19 nt, Human
caccuuaggucccauuucc

SEQ ID NO: 452496 - RNA, 24 nt, Human
cacgucuauuccaaauauugaaga

SEQ ID NO: 452497 - RNA, 21 nt, Human
caguggcugucugucaccucu

SEQ ID NO: 452498 - RNA, 22 nt, Human
caguucauuucccccgacaccu

SEQ ID NO: 452499 - RNA, 24 nt, Human
cauucuacuuucuuccaaaucuga

SEQ ID NO: 452500 - RNA, 24 nt, Human
ccaccugcugaccagauuuaaucc

SEQ ID NO: 452501 - RNA, 21 nt, Human
ccagcgugcuguguuuuccuu

SEQ ID NO: 452502 - RNA, 21 nt, Human
ccgacaccuggaaaauaccaa

SEQ ID NO: 452503 - RNA, 22 nt, Human
ccucaguggcugucugucaccu

SEQ ID NO: 452504 - RNA, 19 nt, Human
cucugggacugagaaugaa

SEQ ID NO: 452505 - RNA, 19 nt, Human
cuuggcacuaguuuguuuu

SEQ ID NO: 452506 - RNA, 21 nt, Human
gaaagagcaaaacaaaaaaga

SEQ ID NO: 452507 - RNA, 20 nt, Human
gagaagcgugagguggagau

SEQ ID NO: 452508 - RNA, 20 nt, Human
gagguggagauuguccaugg

SEQ ID NO: 452509 - RNA, 21 nt, Human
gauauuaauaaucacauccag

SEQ ID NO: 452510 - RNA, 19 nt, Human
gcaaaacaaaaaagaaaga

SEQ ID NO: 452511 - RNA, 24 nt, Human
gcaggaagcaaaaacuuuacaaaa

SEQ ID NO: 452512 - RNA, 21 nt, Human
ggaaaauaccaacaccuuagg

SEQ ID NO: 452513 - RNA, 19 nt, Human
uaaaaaaagaaaagaaaca

SEQ ID NO: 452514 - RNA, 18 nt, Human
uacgccuccuuggcacua

SEQ ID NO: 452515 - RNA, 22 nt, Human
uacugugaguuucaguuuccca

SEQ ID NO: 452516 - RNA, 24 nt, Human
uagcaggaagcaaaaacuuuacaa

SEQ ID NO: 452517 - RNA, 25 nt, Human
uagcaggaagcaaaaacuuuacaaa

SEQ ID NO: 452518 - RNA, 19 nt, Human
ucuuacuacaaguucagga

SEQ ID NO: 452519 - RNA, 19 nt, Human
ucuuuuguuuacuuuguua

SEQ ID NO: 452520 - RNA, 22 nt, Human
ugaaagagcaaaacaaaaaaga

SEQ ID NO: 452521 - RNA, 19 nt, Human
ugacucauaaaucuuccuc

SEQ ID NO: 452522 - RNA, 18 nt, Human
ugagaacacgucuauucc

SEQ ID NO: 452523 - RNA, 25 nt, Human
uggaaaauaccaacaccuuaggucc

SEQ ID NO: 452524 - RNA, 27 nt, Human
uguacacauuacaugggaauauaugua

SEQ ID NO: 452525 - RNA, 23 nt, Human
ugucuggaaggaagcaggugaga

SEQ ID NO: 452526 - RNA, 21 nt, Human
ugugaggaggagauucaaggu

SEQ ID NO: 452527 - RNA, 22 nt, Human
uuauacacauuccaccugcuga

SEQ ID NO: 452528 - RNA, 18 nt, Human
uuggcaaaguuuccuugg

SEQ ID NO: 452529 - RNA, 20 nt, Human
uuuacaaaaccccuucacca

SEQ ID NO: 452530 - RNA, 18 nt, Human
uuugauagagaagcguga

SEQ ID NO: 452531 - RNA, 18 nt, Human
aaagaaagacaagucagg

SEQ ID NO: 452532 - RNA, 27 nt, Human
aagcaaacacugaguuacauuuaccac

SEQ ID NO: 452533 - RNA, 18 nt, Human
aaggcgccgccgggugaa

SEQ ID NO: 452534 - RNA, 22 nt, Human
accgagacgugcgcacugccaa

SEQ ID NO: 452535 - RNA, 20 nt, Human
accgggacgcagcgaccaca

SEQ ID NO: 452536 - RNA, 19 nt, Human
agaggaagaggaaagaaag

SEQ ID NO: 452537 - RNA, 21 nt, Human
agucucuucagaaagaaacaa

SEQ ID NO: 452538 - RNA, 18 nt, Human
auaaagcagcaccggccc

SEQ ID NO: 452539 - RNA, 18 nt, Human
auaaagcagcaccggccc

SEQ ID NO: 452540 - RNA, 19 nt, Human
aucauguaaaaaaaccgag

SEQ ID NO: 452541 - RNA, 21 nt, Human
aucugagacgcagacgugaga

SEQ ID NO: 452542 - RNA, 24 nt, Human
cagaccgggacgcagcgaccacaa

SEQ ID NO: 452543 - RNA, 21 nt, Human
cagcgugcggccgggcccggc

SEQ ID NO: 452544 - RNA, 19 nt, Human
cauggcucucacccaggga

SEQ ID NO: 452545 - RNA, 25 nt, Human
cauggcucucacccagggacagguu

SEQ ID NO: 452546 - RNA, 26 nt, Human
ccaaaaucccaugaaagccggguguc

SEQ ID NO: 452547 - RNA, 22 nt, Human
ccaaacgcagaccgggacgcag

SEQ ID NO: 452548 - RNA, 19 nt, Human
ccuugaaaggaaagucucu

SEQ ID NO: 452549 - RNA, 19 nt, Human
cgagacgugcgcacugcca

SEQ ID NO: 452550 - RNA, 21 nt, Human
cgccgccgggugaagcaggug

SEQ ID NO: 452551 - RNA, 21 nt, Human
cgcggacccaugggaagccuu

SEQ ID NO: 452552 - RNA, 21 nt, Human
cgcugagguccaggaacgggc

SEQ ID NO: 452553 - RNA, 24 nt, Human
cggcucaggcucgcugagguccag

SEQ ID NO: 452554 - RNA, 21 nt, Human
cggucggggacagcacggggg

SEQ ID NO: 452555 - RNA, 21 nt, Human
gagcccagccccgugagccgg

SEQ ID NO: 452556 - RNA, 22 nt, Human
gcagaccgggacgcagcgacca

SEQ ID NO: 452557 - RNA, 19 nt, Human
gcguggcugcgggacgggg

SEQ ID NO: 452558 - RNA, 19 nt, Human
ggacacggcgcgcugcccc

SEQ ID NO: 452559 - RNA, 22 nt, Human
gggcaccuccaccuggacacgg

SEQ ID NO: 452560 - RNA, 18 nt, Human
gggcagcagcgggguuga

SEQ ID NO: 452561 - RNA, 23 nt, Human
gggcagcagcgggguugacggua

SEQ ID NO: 452562 - RNA, 24 nt, Human
gggccuggugccggcugguccugu

SEQ ID NO: 452563 - RNA, 23 nt, Human
gugaagcaggugucccggagggc

SEQ ID NO: 452564 - RNA, 23 nt, Human
gugcggccgggcccggcucaggc

SEQ ID NO: 452565 - RNA, 19 nt, Human
uaaaaaaaccgagacgugc

SEQ ID NO: 452566 - RNA, 25 nt, Human
uaaaaaaaccgagacgugcgcacug

SEQ ID NO: 452567 - RNA, 19 nt, Human
uaagucgcaagcaaacacu

SEQ ID NO: 452568 - RNA, 22 nt, Human
uacacucaucgacacaaacuua

SEQ ID NO: 452569 - RNA, 19 nt, Human
uaccacgaagucacuggac

SEQ ID NO: 452570 - RNA, 23 nt, Human
uaccacgaagucacuggacagag

SEQ ID NO: 452571 - RNA, 22 nt, Human
uccaggaacgggcaccuccacc

SEQ ID NO: 452572 - RNA, 21 nt, Human
uccuuaaaucauguaaaaaaa

SEQ ID NO: 452573 - RNA, 20 nt, Human
ucggauuccuggaaccuggg

SEQ ID NO: 452574 - RNA, 19 nt, Human
ugacauucagggauguggc

SEQ ID NO: 452575 - RNA, 22 nt, Human
ugagacgcagacgugagaaacg

SEQ ID NO: 452576 - RNA, 18 nt, Human
ugccccggcaacccccag

SEQ ID NO: 452577 - RNA, 19 nt, Human
uggacagagaccaaaaucc

SEQ ID NO: 452578 - RNA, 18 nt, Human
uuaaacacgggcagcagc

SEQ ID NO: 452579 - RNA, 19 nt, Human
uuaaggcggaaguugggga

SEQ ID NO: 452580 - RNA, 19 nt, Human
uucucauuaaacgaggggc

SEQ ID NO: 452581 - RNA, 23 nt, Human
aagcagcaggaccaugcccuggg

SEQ ID NO: 452582 - RNA, 21 nt, Human
aagggggucagcaugcucagg

SEQ ID NO: 452583 - RNA, 23 nt, Human
acccuagacagggccaaccugac

SEQ ID NO: 452584 - RNA, 21 nt, Human
agccccccagugcaugcccag

SEQ ID NO: 452585 - RNA, 18 nt, Human
agggccaaccugacucaa

SEQ ID NO: 452586 - RNA, 22 nt, Human
aggggccacuucuggcuccaag

SEQ ID NO: 452587 - RNA, 22 nt, Human
agugcaugcccagccccaauaa

SEQ ID NO: 452588 - RNA, 25 nt, Human
caacacaagggcugcuuguccccag

SEQ ID NO: 452589 - RNA, 24 nt, Human
cacuucuggcuccaagggucagga

SEQ ID NO: 452590 - RNA, 24 nt, Human
cagcccagcuccuccagcccccca

SEQ ID NO: 452591 - RNA, 20 nt, Human
cagccccccagugcaugccc

SEQ ID NO: 452592 - RNA, 23 nt, Human
cagcugcccucccuccugggucc

SEQ ID NO: 452593 - RNA, 23 nt, Human
caggccuggggcccagucccaca

SEQ ID NO: 452594 - RNA, 24 nt, Human
caucuguccuucuguuccacccua

SEQ ID NO: 452595 - RNA, 22 nt, Human
ccccccagugcaugcccagccc

SEQ ID NO: 452596 - RNA, 24 nt, Human
ccccccagugcaugcccagccccc

SEQ ID NO: 452597 - RNA, 24 nt, Human
cccuagacagggccaaccugacuc

SEQ ID NO: 452598 - RNA, 18 nt, Human
cccucccuccugggucca

SEQ ID NO: 452599 - RNA, 21 nt, Human
ccgcgccgccgcccgcgcccg

SEQ ID NO: 452600 - RNA, 25 nt, Human
ccuucuguuccacccuagacagggc

SEQ ID NO: 452601 - RNA, 22 nt, Human
cuccuggguccaucuguccuuc

SEQ ID NO: 452602 - RNA, 24 nt, Human
cuggcuccaagggucaggacuugg

SEQ ID NO: 452603 - RNA, 20 nt, Human
cugggccuggaggggcagag

SEQ ID NO: 452604 - RNA, 18 nt, Human
gaagggggucagcaugcu

SEQ ID NO: 452605 - RNA, 24 nt, Human
gaggggcagaggggccacuucugg

SEQ ID NO: 452606 - RNA, 19 nt, Human
gccugaaaagaggugguag

SEQ ID NO: 452607 - RNA, 25 nt, Human
ggaggggcagaggggccacuucugg

SEQ ID NO: 452608 - RNA, 18 nt, Human
gggcagaggggccacuuc

SEQ ID NO: 452609 - RNA, 22 nt, Human
gggccuggaggggcagaggggc

SEQ ID NO: 452610 - RNA, 19 nt, Human
gugaagcagcaggaccaug

SEQ ID NO: 452611 - RNA, 19 nt, Human
ucuggagguaggaaggggg

SEQ ID NO: 452612 - RNA, 19 nt, Human
ucuuuauucuggagguagg

SEQ ID NO: 452613 - RNA, 21 nt, Human
ugcaugcccagccccaauaag

SEQ ID NO: 452614 - RNA, 18 nt, Human
ugcccagccccaauaagu

SEQ ID NO: 452615 - RNA, 19 nt, Human
ugcccucccuccugggucc

SEQ ID NO: 452616 - RNA, 24 nt, Human
ugcccugggccuggaggggcagag

SEQ ID NO: 452617 - RNA, 20 nt, Human
ugggaaggguccagcccagc

SEQ ID NO: 452618 - RNA, 19 nt, Human
ugggcagugccacacggca

SEQ ID NO: 452619 - RNA, 19 nt, Human
ugggcagugccacacggcc

SEQ ID NO: 452620 - RNA, 19 nt, Human
ugguaguugggguggggcc

SEQ ID NO: 452621 - RNA, 19 nt, Human
ugugggcagugccacacgg

SEQ ID NO: 452622 - RNA, 24 nt, Human
ugugggcagugccacacggcaggc

SEQ ID NO: 452623 - RNA, 20 nt, Human
uuuuuuuuuuuuuuuccagg

SEQ ID NO: 452624 - RNA, 22 nt, Human
aaacacaggcacuucuacauag

SEQ ID NO: 452625 - RNA, 26 nt, Human
aaacucuaguaguucauacccccaaa

SEQ ID NO: 452626 - RNA, 26 nt, Human
aaacucuaguaguucauacccccaaa

SEQ ID NO: 452627 - RNA, 21 nt, Human
aaauacuaaaauuacacuaug

SEQ ID NO: 452628 - RNA, 18 nt, Human
aaauauuucaagaaagua

SEQ ID NO: 452629 - RNA, 24 nt, Human
aaaucacuuaaaauggccaaauuc

SEQ ID NO: 452630 - RNA, 20 nt, Human
aacaaaaucacuuaaaaugg

SEQ ID NO: 452631 - RNA, 23 nt, Human
aacaaagucuuuguagccaauag

SEQ ID NO: 452632 - RNA, 20 nt, Human
aacacaggcacuucuacaua

SEQ ID NO: 452633 - RNA, 23 nt, Human
acaacaugggaacuauucaaaau

SEQ ID NO: 452634 - RNA, 18 nt, Human
acaagaaaaauuaaaccc

SEQ ID NO: 452635 - RNA, 18 nt, Human
acaagaaaaauuaaaccc

SEQ ID NO: 452636 - RNA, 20 nt, Human
acaauaaauaaaaccacagg

SEQ ID NO: 452637 - RNA, 19 nt, Human
acagaaauuacucuaaugu

SEQ ID NO: 452638 - RNA, 24 nt, Human
acauaauuccauuucacgaaaacc

SEQ ID NO: 452639 - RNA, 22 nt, Human
accaaucauccugccauaucau

SEQ ID NO: 452640 - RNA, 21 nt, Human
agaaaaauuaaacccucuuuc

SEQ ID NO: 452641 - RNA, 21 nt, Human
agaaaaauuaaacccucuuuc

SEQ ID NO: 452642 - RNA, 19 nt, Human
agaaacaggauuucagaua

SEQ ID NO: 452643 - RNA, 18 nt, Human
auaacaucacaacaagau

SEQ ID NO: 452644 - RNA, 18 nt, Human
auaacaucacaacaagau

SEQ ID NO: 452645 - RNA, 19 nt, Human
auacuguugggguggcagg

SEQ ID NO: 452646 - RNA, 19 nt, Human
auacuguugggguggcagg

SEQ ID NO: 452647 - RNA, 19 nt, Human
auagaagagggcaaacaaa

SEQ ID NO: 452648 - RNA, 24 nt, Human
auaucuuguccgggagcagcucca

SEQ ID NO: 452649 - RNA, 24 nt, Human
auaucuuguccgggagcagcucca

SEQ ID NO: 452650 - RNA, 23 nt, Human
aucacuuaaaauggccaaauucc

SEQ ID NO: 452651 - RNA, 21 nt, Human
augauaccaccaggaaaccaa

SEQ ID NO: 452652 - RNA, 21 nt, Human
augauaccaccaggaaaccaa

SEQ ID NO: 452653 - RNA, 21 nt, Human
auucaaaauacaccuuucuau

SEQ ID NO: 452654 - RNA, 21 nt, Human
caaaaauaucucaagaaagua

SEQ ID NO: 452655 - RNA, 26 nt, Human
caaaauacaccuuucuaugcaaaauu

SEQ ID NO: 452656 - RNA, 26 nt, Human
caaaaucacuuaaaauggccaaauuc

SEQ ID NO: 452657 - RNA, 22 nt, Human
caaauacuaaaauuacacuaug

SEQ ID NO: 452658 - RNA, 23 nt, Human
caacaugggaacuauucaaaaua

SEQ ID NO: 452659 - RNA, 26 nt, Human
caacugacaacugaaauuucaguuuu

SEQ ID NO: 452660 - RNA, 26 nt, Human
caacugacaacugaaauuucaguuuu

SEQ ID NO: 452661 - RNA, 26 nt, Human
caauaaauaaaaccacaggcacuucu

SEQ ID NO: 452662 - RNA, 20 nt, Human
cagcccggcgaccgccgcag

SEQ ID NO: 452663 - RNA, 20 nt, Human
cagcccggcgaccgccgcag

SEQ ID NO: 452664 - RNA, 27 nt, Human
cauaacaucacaacaagauaaauuaga

SEQ ID NO: 452665 - RNA, 27 nt, Human
cauaacaucacaacaagauaaauuaga

SEQ ID NO: 452666 - RNA, 21 nt, Human
ccaaaucccauaaaaauaaac

SEQ ID NO: 452667 - RNA, 21 nt, Human
ccaaaucccauaaaaauaaac

SEQ ID NO: 452668 - RNA, 20 nt, Human
ccaaauuccagaaacaggau

SEQ ID NO: 452669 - RNA, 18 nt, Human
ccacgucccggcgcuccg

SEQ ID NO: 452670 - RNA, 23 nt, Human
ccccaguaucccaucugauaaga

SEQ ID NO: 452671 - RNA, 23 nt, Human
ccccaguaucccaucugauaaga

SEQ ID NO: 452672 - RNA, 20 nt, Human
ccgcagcucacgcuccaugc

SEQ ID NO: 452673 - RNA, 20 nt, Human
ccgcagcucacgcuccaugc

SEQ ID NO: 452674 - RNA, 24 nt, Human
ccggcggugucggcggcagggacu

SEQ ID NO: 452675 - RNA, 24 nt, Human
ccggcggugucggcggcagggacu

SEQ ID NO: 452676 - RNA, 19 nt, Human
ccuccgcgcggcucagccc

SEQ ID NO: 452677 - RNA, 20 nt, Human
cgcggccacauccacguccc

SEQ ID NO: 452678 - RNA, 20 nt, Human
cgcggccacauccacguccc

SEQ ID NO: 452679 - RNA, 23 nt, Human
cggcccggcggugucggcggcag

SEQ ID NO: 452680 - RNA, 23 nt, Human
cggcccggcggugucggcggcag

SEQ ID NO: 452681 - RNA, 24 nt, Human
cugccauaucauccauaaaaaaaa

SEQ ID NO: 452682 - RNA, 19 nt, Human
cuuguugccgcugcugccg

SEQ ID NO: 452683 - RNA, 19 nt, Human
gaacaauaaauaaaaacac

SEQ ID NO: 452684 - RNA, 21 nt, Human
gcaaaagucuguaacuucaac

SEQ ID NO: 452685 - RNA, 20 nt, Human
gcggcaauucaaucuucagu

SEQ ID NO: 452686 - RNA, 23 nt, Human
gggcaaacaaaaucacuuaaaau

SEQ ID NO: 452687 - RNA, 23 nt, Human
gggcggcccggcggugucggcgg

SEQ ID NO: 452688 - RNA, 23 nt, Human
gggcggcccggcggugucggcgg

SEQ ID NO: 452689 - RNA, 24 nt, Human
guccauauugaaaauucacuaaca

SEQ ID NO: 452690 - RNA, 24 nt, Human
guccauauugaaaauucacuaaca

SEQ ID NO: 452691 - RNA, 18 nt, Human
uaaaaacacaggcacuuc

SEQ ID NO: 452692 - RNA, 19 nt, Human
uaaaaauacaguggcuuua

SEQ ID NO: 452693 - RNA, 19 nt, Human
uaaauaaaaacacaggcac

SEQ ID NO: 452694 - RNA, 21 nt, Human
uaaauaaaaccacaggcacuu

SEQ ID NO: 452695 - RNA, 31 nt, Human
uaaauaaaaccacaggcacuucuacauagaa

SEQ ID NO: 452696 - RNA, 22 nt, Human
uaaauaccugaauuacaaauaa

SEQ ID NO: 452697 - RNA, 26 nt, Human
uaccaccaggaaaccaaauacaagaa

SEQ ID NO: 452698 - RNA, 26 nt, Human
uaccaccaggaaaccaaauacaagaa

SEQ ID NO: 452699 - RNA, 22 nt, Human
uaccugaauuacaaauaaauca

SEQ ID NO: 452700 - RNA, 21 nt, Human
uagaagagggcaaacaaaauc

SEQ ID NO: 452701 - RNA, 22 nt, Human
uagaagagggcaaacaaaauca

SEQ ID NO: 452702 - RNA, 21 nt, Human
uauagaagagggcaaacaaaa

SEQ ID NO: 452703 - RNA, 22 nt, Human
uauucaaaauacaccuuucuau

SEQ ID NO: 452704 - RNA, 19 nt, Human
uauuuaagaaaauguuuug

SEQ ID NO: 452705 - RNA, 19 nt, Human
uauuuaagaaaauguuuug

SEQ ID NO: 452706 - RNA, 23 nt, Human
ucaaaauacaccuuucuaugcaa

SEQ ID NO: 452707 - RNA, 21 nt, Human
ucagaaccaaucauccugcca

SEQ ID NO: 452708 - RNA, 22 nt, Human
ucagaaccaaucauccugccau

SEQ ID NO: 452709 - RNA, 18 nt, Human
uccagcucggcggggcgg

SEQ ID NO: 452710 - RNA, 18 nt, Human
uccagcucggcggggcgg

SEQ ID NO: 452711 - RNA, 18 nt, Human
uccaugcgcggcgccccg

SEQ ID NO: 452712 - RNA, 18 nt, Human
uccaugcgcggcgccccg

SEQ ID NO: 452713 - RNA, 19 nt, Human
uccaugcgcggcgccccgg

SEQ ID NO: 452714 - RNA, 19 nt, Human
uccaugcgcggcgccccgg

SEQ ID NO: 452715 - RNA, 22 nt, Human
uccaugcgcggcgccccggacg

SEQ ID NO: 452716 - RNA, 22 nt, Human
uccaugcgcggcgccccggacg

SEQ ID NO: 452717 - RNA, 19 nt, Human
ucccggcgcuccgcgcggc

SEQ ID NO: 452718 - RNA, 22 nt, Human
ucccgggcccuccgcgcggcuc

SEQ ID NO: 452719 - RNA, 21 nt, Human
uccguaaaaaaaaauuaccau

SEQ ID NO: 452720 - RNA, 23 nt, Human
uccugccauaucauccauaaaaa

SEQ ID NO: 452721 - RNA, 20 nt, Human
ucggcggcagggacugcucc

SEQ ID NO: 452722 - RNA, 20 nt, Human
ucggcggcagggacugcucc

SEQ ID NO: 452723 - RNA, 21 nt, Human
ucuaugcaaaagucuguaacu

SEQ ID NO: 452724 - RNA, 21 nt, Human
ucuaugcaaaagucuguaacu

SEQ ID NO: 452725 - RNA, 25 nt, Human
ucucaagaaaguauguuacacaaua

SEQ ID NO: 452726 - RNA, 18 nt, Human
ugaaaaacugaauuccac

SEQ ID NO: 452727 - RNA, 19 nt, Human
ugaaaaacugaauuccaca

SEQ ID NO: 452728 - RNA, 19 nt, Human
ugaaaaacugaauuccaca

SEQ ID NO: 452729 - RNA, 20 nt, Human
ugaaaaacugaauuccacaa

SEQ ID NO: 452730 - RNA, 24 nt, Human
ugaaaaacugaauuccacaacuga

SEQ ID NO: 452731 - RNA, 24 nt, Human
ugaaaaacugaauuccacaacuga

SEQ ID NO: 452732 - RNA, 25 nt, Human
ugaacaauaaauaaaaacacaggca

SEQ ID NO: 452733 - RNA, 21 nt, Human
ugaguaccaaauugaaggguu

SEQ ID NO: 452734 - RNA, 22 nt, Human
ugcaaaagucuguaacuucaac

SEQ ID NO: 452735 - RNA, 26 nt, Human
ugccauaucauccauaaaaaaaaauu

SEQ ID NO: 452736 - RNA, 22 nt, Human
uggcagaauuuuaaacucuagu

SEQ ID NO: 452737 - RNA, 22 nt, Human
uggcagaauuuuaaacucuagu

SEQ ID NO: 452738 - RNA, 26 nt, Human
uggguaucacucauaaaggcaauuuu

SEQ ID NO: 452739 - RNA, 21 nt, Human
uguuuuggucuuugaucugaa

SEQ ID NO: 452740 - RNA, 21 nt, Human
uguuuuggucuuugaucugaa

SEQ ID NO: 452741 - RNA, 22 nt, Human
uuaacaaagucuuuguagccaa

SEQ ID NO: 452742 - RNA, 23 nt, Human
uuacacuaugauaccaccaggaa

SEQ ID NO: 452743 - RNA, 23 nt, Human
uuacacuaugauaccaccaggaa

SEQ ID NO: 452744 - RNA, 23 nt, Human
uuagcggcaauucaaucuucagu

SEQ ID NO: 452745 - RNA, 23 nt, Human
uucaaaauacaccuuucuaugca

SEQ ID NO: 452746 - RNA, 19 nt, Human
uucauacccccaaaaaaca

SEQ ID NO: 452747 - RNA, 19 nt, Human
uucauacccccaaaaaaca

SEQ ID NO: 452748 - RNA, 23 nt, Human
uucaucaacaacacuguauacaa

SEQ ID NO: 452749 - RNA, 23 nt, Human
uucaucaacaacacuguauacaa

SEQ ID NO: 452750 - RNA, 25 nt, Human
uucaucaacaacacuguauacaaau

SEQ ID NO: 452751 - RNA, 25 nt, Human
uucaucaacaacacuguauacaaau

SEQ ID NO: 452752 - RNA, 26 nt, Human
uucaucaacaacacuguauacaaaua

SEQ ID NO: 452753 - RNA, 26 nt, Human
uucaucaacaacacuguauacaaaua

SEQ ID NO: 452754 - RNA, 22 nt, Human
uucuagacaauuuaaaauuuac

SEQ ID NO: 452755 - RNA, 22 nt, Human
uucuagacaauuuaaaauuuac

SEQ ID NO: 452756 - RNA, 27 nt, Human
uucuccuuauuaugaccauaacaucac

SEQ ID NO: 452757 - RNA, 27 nt, Human
uucuccuuauuaugaccauaacaucac

SEQ ID NO: 452758 - RNA, 22 nt, Human
uugaaaaacugaauuccacaac

SEQ ID NO: 452759 - RNA, 22 nt, Human
uugaaaaacugaauuccacaac

SEQ ID NO: 452760 - RNA, 24 nt, Human
uuguugccgcugcugacgcugccg

SEQ ID NO: 452761 - RNA, 20 nt, Human
uuuaaaauuuacccaaaucc

SEQ ID NO: 452762 - RNA, 20 nt, Human
uuuaaaauuuacccaaaucc

SEQ ID NO: 452763 - RNA, 25 nt, Human
uuucaagaaaguauguuacacaaua

SEQ ID NO: 452764 - RNA, 24 nt, Human
uuucaucaacaacacuguauacaa

SEQ ID NO: 452765 - RNA, 21 nt, Human
uuuuuaaaaauacaguggcuu

SEQ ID NO: 452766 - RNA, 24 nt, Human
aaaaaaauuuuaacaauaacacug

SEQ ID NO: 452767 - RNA, 24 nt, Human
aaaaaagaugcaaaccaaccaaaa

SEQ ID NO: 452768 - RNA, 22 nt, Human
aaaaugcuuuaaccccaaacug

SEQ ID NO: 452769 - RNA, 26 nt, Human
aaaauucuuccacacgggcauccuuu

SEQ ID NO: 452770 - RNA, 22 nt, Human
aaacauuaaaaagcuaccugcu

SEQ ID NO: 452771 - RNA, 21 nt, Human
aaacuuaaacacagaccaaua

SEQ ID NO: 452772 - RNA, 23 nt, Human
aaagaacauauuccuaauuccuu

SEQ ID NO: 452773 - RNA, 23 nt, Human
aaccaaaagguaaaaaaagggac

SEQ ID NO: 452774 - RNA, 21 nt, Human
aaccugccugucugcacaaaa

SEQ ID NO: 452775 - RNA, 22 nt, Human
aaccugccugucugcacaaaag

SEQ ID NO: 452776 - RNA, 21 nt, Human
aacuuguuccauucuauucua

SEQ ID NO: 452777 - RNA, 24 nt, Human
aagguuuuuuucauccagguuuga

SEQ ID NO: 452778 - RNA, 24 nt, Human
acacuuccaaguauagauacacag

SEQ ID NO: 452779 - RNA, 21 nt, Human
acauguuggucauuaaaaaug

SEQ ID NO: 452780 - RNA, 23 nt, Human
acauuguacacauuuuucuacau

SEQ ID NO: 452781 - RNA, 21 nt, Human
accaucuucuauucaagugac

SEQ ID NO: 452782 - RNA, 21 nt, Human
accuaguucuuucuguaguga

SEQ ID NO: 452783 - RNA, 22 nt, Human
acuuugaaaaaagaugcaaaaa

SEQ ID NO: 452784 - RNA, 22 nt, Human
agaaggacccuaugagcaacca

SEQ ID NO: 452785 - RNA, 18 nt, Human
agacaccaccuaguucuu

SEQ ID NO: 452786 - RNA, 19 nt, Human
agcuacauggaugugguaa

SEQ ID NO: 452787 - RNA, 28 nt, Human
auagaaaaaaauuaaaauuucuguaaac

SEQ ID NO: 452788 - RNA, 25 nt, Human
auagcccuacacuggagcaccaaaa

SEQ ID NO: 452789 - RNA, 23 nt, Human
caaggaacaugcagcuuuaaaaa

SEQ ID NO: 452790 - RNA, 21 nt, Human
cacucaagucuguuuuuaguu

SEQ ID NO: 452791 - RNA, 18 nt, Human
cacugcuguaaacaagau

SEQ ID NO: 452792 - RNA, 24 nt, Human
ccaguugaaaacgucauuaaaauc

SEQ ID NO: 452793 - RNA, 22 nt, Human
ccuaugagcaaccagcugcccu

SEQ ID NO: 452794 - RNA, 26 nt, Human
ccuugaaauguuguacuguacguuca

SEQ ID NO: 452795 - RNA, 23 nt, Human
cgaggacacuggcacgucaaaau

SEQ ID NO: 452796 - RNA, 19 nt, Human
cugaaaguaacuacaaccu

SEQ ID NO: 452797 - RNA, 24 nt, Human
gaaaacgucauuaaaaucagcuua

SEQ ID NO: 452798 - RNA, 25 nt, Human
gaaagaacauauuccuaauuccuua

SEQ ID NO: 452799 - RNA, 19 nt, Human
gaacuugaacuucccuuua

SEQ ID NO: 452800 - RNA, 21 nt, Human
gaagucauuauuuuggccuuc

SEQ ID NO: 452801 - RNA, 21 nt, Human
gaagugccuucauauuuccuu

SEQ ID NO: 452802 - RNA, 20 nt, Human
gacaccaccuaguucuuucu

SEQ ID NO: 452803 - RNA, 23 nt, Human
gacaucaccuuauuauaugagaa

SEQ ID NO: 452804 - RNA, 21 nt, Human
gagugaguucagucacucuug

SEQ ID NO: 452805 - RNA, 21 nt, Human
gauguuuaaugcucucaauuu

SEQ ID NO: 452806 - RNA, 21 nt, Human
gcaccaaaaaguuuuuuccuu

SEQ ID NO: 452807 - RNA, 23 nt, Human
ggaacacccuguagaacgaggac

SEQ ID NO: 452808 - RNA, 22 nt, Human
gguuuuuuucauccagguuuga

SEQ ID NO: 452809 - RNA, 21 nt, Human
guaauguucugucuuuccauu

SEQ ID NO: 452810 - RNA, 20 nt, Human
guaucuacucugaaaguaac

SEQ ID NO: 452811 - RNA, 24 nt, Human
guuuauuggaaacuauagauuuuu

SEQ ID NO: 452812 - RNA, 22 nt, Human
uaaaaagauagcccuacacugg

SEQ ID NO: 452813 - RNA, 28 nt, Human
uaaaaagauagcccuacacuguaaugac

SEQ ID NO: 452814 - RNA, 22 nt, Human
uaaaccaaauguaaccugccug

SEQ ID NO: 452815 - RNA, 23 nt, Human
uaacaaaaauaaacuugcuuacc

SEQ ID NO: 452816 - RNA, 19 nt, Human
uaacaccaguagcuacaug

SEQ ID NO: 452817 - RNA, 21 nt, Human
uaacacuguguauaaccaucu

SEQ ID NO: 452818 - RNA, 22 nt, Human
uaagaacaagagacuguuuuac

SEQ ID NO: 452819 - RNA, 21 nt, Human
uaauuauuuugccauacaaga

SEQ ID NO: 452820 - RNA, 22 nt, Human
uacaugagaacuugaacuuccc

SEQ ID NO: 452821 - RNA, 24 nt, Human
uagcccuacacuggagcaccaaaa

SEQ ID NO: 452822 - RNA, 21 nt, Human
uaguacuuagcagaggcauac

SEQ ID NO: 452823 - RNA, 21 nt, Human
uagugaagggagguagugugu

SEQ ID NO: 452824 - RNA, 20 nt, Human
uaucacagucaagaagagaa

SEQ ID NO: 452825 - RNA, 21 nt, Human
uauuccaugccaccuaucaca

SEQ ID NO: 452826 - RNA, 24 nt, Human
ucaaccaauggcaaccuuaaacac

SEQ ID NO: 452827 - RNA, 22 nt, Human
ucaagaagagaaaagaaucaca

SEQ ID NO: 452828 - RNA, 23 nt, Human
ucagugacagugaaaacauacaa

SEQ ID NO: 452829 - RNA, 22 nt, Human
uccagguuugacucagugacag

SEQ ID NO: 452830 - RNA, 19 nt, Human
ucccuaacaggugccucug

SEQ ID NO: 452831 - RNA, 20 nt, Human
uccuaauuccuuaaaccaaa

SEQ ID NO: 452832 - RNA, 18 nt, Human
uccuucuuuuuuaaaagg

SEQ ID NO: 452833 - RNA, 18 nt, Human
ucgcguggguuacuaagg

SEQ ID NO: 452834 - RNA, 23 nt, Human
ucuaagcaauguaaacaagccuc

SEQ ID NO: 452835 - RNA, 24 nt, Human
ucucccuagcaguagacaccaccu

SEQ ID NO: 452836 - RNA, 22 nt, Human
ucuguaaacauuaaaaagcuac

SEQ ID NO: 452837 - RNA, 22 nt, Human
ucuguaaacauuaaaaagcuac

SEQ ID NO: 452838 - RNA, 21 nt, Human
ucuguagugaagggagguagu

SEQ ID NO: 452839 - RNA, 20 nt, Human
ugaaaaaagaugcaaaaaaa

SEQ ID NO: 452840 - RNA, 23 nt, Human
ugaagucauuauuuuggccuuca

SEQ ID NO: 452841 - RNA, 25 nt, Human
ugcggaagaauggaacacccuguag

SEQ ID NO: 452842 - RNA, 24 nt, Human
uggcaacuuuucuaucacuuuuuu

SEQ ID NO: 452843 - RNA, 19 nt, Human
uggccagagacacuuaugu

SEQ ID NO: 452844 - RNA, 22 nt, Human
uguagaacgaggacacuggcac

SEQ ID NO: 452845 - RNA, 27 nt, Human
uuaaaaauucuaaauuaucuaagcaau

SEQ ID NO: 452846 - RNA, 19 nt, Human
uuaaaccaaauguaaccug

SEQ ID NO: 452847 - RNA, 22 nt, Human
uuaaucacuuuucuaaaaguuc

SEQ ID NO: 452848 - RNA, 20 nt, Human
uuagggcaacauuaaucacu

SEQ ID NO: 452849 - RNA, 18 nt, Human
uuaugugucauuuucuaa

SEQ ID NO: 452850 - RNA, 18 nt, Human
uucaaaauagaaaaaaau

SEQ ID NO: 452851 - RNA, 23 nt, Human
uugaacuucccuuuaguuuuguu

SEQ ID NO: 452852 - RNA, 25 nt, Human
uugaacuucccuuuaguuuuguuuu

SEQ ID NO: 452853 - RNA, 21 nt, Human
uugaauuaacaaugguuucuc

SEQ ID NO: 452854 - RNA, 20 nt, Human
uugacauuuuuuaaaaagau

SEQ ID NO: 452855 - RNA, 18 nt, Human
uuguacacauuuuucuac

SEQ ID NO: 452856 - RNA, 25 nt, Human
uuguacacauuuuucuacaucuccu

SEQ ID NO: 452857 - RNA, 24 nt, Human
uuuaaguaagugugaugaaggaau

SEQ ID NO: 452858 - RNA, 23 nt, Human
uuuagucccauuuuucugagauu

SEQ ID NO: 452859 - RNA, 22 nt, Human
uuucugagauugcggaagaaug

SEQ ID NO: 452860 - RNA, 20 nt, Human
uuucuguagugaagggaggu

SEQ ID NO: 452861 - RNA, 24 nt, Human
uuugucuuucguccucauuuuacu

SEQ ID NO: 452862 - RNA, 24 nt, Human
uuuucccuuuguugacauuuuuua

SEQ ID NO: 452863 - RNA, 19 nt, Human
aaccugcagacccuucccu

SEQ ID NO: 452864 - RNA, 24 nt, Human
aaguauucagacuucuuagcucca

SEQ ID NO: 452865 - RNA, 19 nt, Human
aaucgaucccagcacccca

SEQ ID NO: 452866 - RNA, 25 nt, Human
accugcagacccuucccuccuccag

SEQ ID NO: 452867 - RNA, 21 nt, Human
acgaagcuuacagaauguuuu

SEQ ID NO: 452868 - RNA, 19 nt, Human
agcccguugaagggacaga

SEQ ID NO: 452869 - RNA, 24 nt, Human
caacaccacagcuaccucuguaaa

SEQ ID NO: 452870 - RNA, 20 nt, Human
caacgaccacccggccacag

SEQ ID NO: 452871 - RNA, 23 nt, Human
cacagcuaccucuguaaagugga

SEQ ID NO: 452872 - RNA, 19 nt, Human
cagacccuucccuccucca

SEQ ID NO: 452873 - RNA, 20 nt, Human
cagcaccccauauccaaguc

SEQ ID NO: 452874 - RNA, 22 nt, Human
cagcuaguuagugguaaagcua

SEQ ID NO: 452875 - RNA, 19 nt, Human
cauggaaccugcagacccu

SEQ ID NO: 452876 - RNA, 26 nt, Human
ccagucaggccuaaaugguggccuga

SEQ ID NO: 452877 - RNA, 23 nt, Human
ccuccagaacccuugaaggcgaa

SEQ ID NO: 452878 - RNA, 23 nt, Human
ccuccuccagaacccuugaaggc

SEQ ID NO: 452879 - RNA, 19 nt, Human
ccugaggagccaagaggcu

SEQ ID NO: 452880 - RNA, 23 nt, Human
cgcgcagcaacgaccacccggcc

SEQ ID NO: 452881 - RNA, 22 nt, Human
cgguaggcacauacccagccca

SEQ ID NO: 452882 - RNA, 18 nt, Human
cucuccuacuacccaccc

SEQ ID NO: 452883 - RNA, 21 nt, Human
cucucggggcucggggcgcgc

SEQ ID NO: 452884 - RNA, 22 nt, Human
cuuuuugcucuccuacuaccca

SEQ ID NO: 452885 - RNA, 18 nt, Human
gaagcccugagagaacca

SEQ ID NO: 452886 - RNA, 22 nt, Human
gccgcaagcccggauuuaccgc

SEQ ID NO: 452887 - RNA, 22 nt, Human
gggcucggggcgcgcagcaacg

SEQ ID NO: 452888 - RNA, 20 nt, Human
gguagguauucucaccuccc

SEQ ID NO: 452889 - RNA, 22 nt, Human
guggagcgacauuucuuacccc

SEQ ID NO: 452890 - RNA, 19 nt, Human
uaauaauaacaacaauaau

SEQ ID NO: 452891 - RNA, 19 nt, Human
uacuuuuugcucuccuacu

SEQ ID NO: 452892 - RNA, 23 nt, Human
uaggcacauacccagcccagccc

SEQ ID NO: 452893 - RNA, 19 nt, Human
uagguauucucaccucccu

SEQ ID NO: 452894 - RNA, 21 nt, Human
ucaacaccacagcuaccucug

SEQ ID NO: 452895 - RNA, 20 nt, Human
uccaaaaaguccauuucauu

SEQ ID NO: 452896 - RNA, 20 nt, Human
ugagccucccaacaguuccg

SEQ ID NO: 452897 - RNA, 19 nt, Human
ugcagacccuucccuccuc

SEQ ID NO: 452898 - RNA, 24 nt, Human
ugugaacacgcauuuauuuacaca

SEQ ID NO: 452899 - RNA, 18 nt, Human
uuacucaaggccacacag

SEQ ID NO: 452900 - RNA, 21 nt, Human
aaaaaaaaaaaaaaaaagucc

SEQ ID NO: 452901 - RNA, 19 nt, Human
aaaaagaaauuccuagccc

SEQ ID NO: 452902 - RNA, 19 nt, Human
aaagaaauuccuagcccuu

SEQ ID NO: 452903 - RNA, 19 nt, Human
aaccuucugcacccacccc

SEQ ID NO: 452904 - RNA, 24 nt, Human
aagacgucaucgucgccuuugaaa

SEQ ID NO: 452905 - RNA, 24 nt, Human
aagccuggagccuucucccuccaa

SEQ ID NO: 452906 - RNA, 23 nt, Human
aagcugggaaggacaacaggaga

SEQ ID NO: 452907 - RNA, 18 nt, Human
aagucccauuuuauugag

SEQ ID NO: 452908 - RNA, 20 nt, Human
aaguggaucuccuugagggu

SEQ ID NO: 452909 - RNA, 23 nt, Human
accaaaaaaaaaaaaaaaaaaaa

SEQ ID NO: 452910 - RNA, 23 nt, Human
agaaaucucuggcaaccuuggcc

SEQ ID NO: 452911 - RNA, 21 nt, Human
agauguccagccacuugagga

SEQ ID NO: 452912 - RNA, 24 nt, Human
agcagggugcgguggggcagggcu

SEQ ID NO: 452913 - RNA, 18 nt, Human
agccaagaacaaggaaca

SEQ ID NO: 452914 - RNA, 20 nt, Human
agccuggagccuucucccuc

SEQ ID NO: 452915 - RNA, 27 nt, Human
agcuuuuugcuuucucccuuuucuccu

SEQ ID NO: 452916 - RNA, 22 nt, Human
aggaaggcacuggcucacgcua

SEQ ID NO: 452917 - RNA, 21 nt, Human
aggaaguggaucuccuugaga

SEQ ID NO: 452918 - RNA, 22 nt, Human
agggaaaaggggagguugggga

SEQ ID NO: 452919 - RNA, 19 nt, Human
agggagcccaccggccucu

SEQ ID NO: 452920 - RNA, 19 nt, Human
aggggagggaagggaggag

SEQ ID NO: 452921 - RNA, 19 nt, Human
agguaggagguggcaaccu

SEQ ID NO: 452922 - RNA, 23 nt, Human
aucucuggcaaccuuggccccag

SEQ ID NO: 452923 - RNA, 24 nt, Human
aucuuuccuaggugacucccgcug

SEQ ID NO: 452924 - RNA, 24 nt, Human
augcuggucugcuaggcccuggag

SEQ ID NO: 452925 - RNA, 21 nt, Human
caaccuucugcacccaccccc

SEQ ID NO: 452926 - RNA, 23 nt, Human
caaccuuggccccagacaggcuc

SEQ ID NO: 452927 - RNA, 21 nt, Human
caaggaacaagcugugucuuc

SEQ ID NO: 452928 - RNA, 19 nt, Human
cacagcugauccaucccuu

SEQ ID NO: 452929 - RNA, 21 nt, Human
caccagccaagaacaaggaac

SEQ ID NO: 452930 - RNA, 24 nt, Human
caccagccaagaacaaggaacaag

SEQ ID NO: 452931 - RNA, 21 nt, Human
cacccaccagccaagaacaag

SEQ ID NO: 452932 - RNA, 21 nt, Human
cagcagcuugggccaaggucc

SEQ ID NO: 452933 - RNA, 22 nt, Human
cagccagaaauucuagcagguu

SEQ ID NO: 452934 - RNA, 21 nt, Human
cagcugauccaucccuucacc

SEQ ID NO: 452935 - RNA, 19 nt, Human
caggcacggagcugcuggc

SEQ ID NO: 452936 - RNA, 20 nt, Human
cagggagcccaccggccucu

SEQ ID NO: 452937 - RNA, 19 nt, Human
cagggccaggugguggcgc

SEQ ID NO: 452938 - RNA, 24 nt, Human
cagggccauaagcuauuucagugc

SEQ ID NO: 452939 - RNA, 20 nt, Human
caucugaacccccugggauu

SEQ ID NO: 452940 - RNA, 23 nt, Human
ccaaaaaaaaaaaaaaaaaaaaa

SEQ ID NO: 452941 - RNA, 20 nt, Human
ccacccuggaggucagcagc

SEQ ID NO: 452942 - RNA, 22 nt, Human
ccagggcacagucaagggcugg

SEQ ID NO: 452943 - RNA, 22 nt, Human
cccaccagccaagaacaaggaa

SEQ ID NO: 452944 - RNA, 23 nt, Human
cccccacagcugauccaucccuu

SEQ ID NO: 452945 - RNA, 19 nt, Human
ccccugggauuccccugag

SEQ ID NO: 452946 - RNA, 25 nt, Human
cccuccccacccuggaggucagcag

SEQ ID NO: 452947 - RNA, 22 nt, Human
cccuccugaagccuggagccuu

SEQ ID NO: 452948 - RNA, 23 nt, Human
ccuccaaauucuucauaaauaaa

SEQ ID NO: 452949 - RNA, 18 nt, Human
ccucggggccaacucugg

SEQ ID NO: 452950 - RNA, 23 nt, Human
ccucuguacggccgaccuaaucu

SEQ ID NO: 452951 - RNA, 19 nt, Human
ccuggagccuucucccucc

SEQ ID NO: 452952 - RNA, 18 nt, Human
ccugggcaucugaacccc

SEQ ID NO: 452953 - RNA, 21 nt, Human
cgaccuaaucucacccacuga

SEQ ID NO: 452954 - RNA, 20 nt, Human
cgagcuccccgaaaaagaaa

SEQ ID NO: 452955 - RNA, 20 nt, Human
cucccuccccacccuggagg

SEQ ID NO: 452956 - RNA, 22 nt, Human
cucugaugcagcugggaacagg

SEQ ID NO: 452957 - RNA, 23 nt, Human
cucuggccucacccuuggcaggg

SEQ ID NO: 452958 - RNA, 20 nt, Human
cucuguacggccgaccuaau

SEQ ID NO: 452959 - RNA, 19 nt, Human
cugcugucugagugacucu

SEQ ID NO: 452960 - RNA, 21 nt, Human
cuggagaagcagggugcggug

SEQ ID NO: 452961 - RNA, 22 nt, Human
cuggagaagcagggugcggugg

SEQ ID NO: 452962 - RNA, 20 nt, Human
cuggccucacccuuggcagg

SEQ ID NO: 452963 - RNA, 19 nt, Human
cugggugcaggcacggagc

SEQ ID NO: 452964 - RNA, 19 nt, Human
cuuaagagccgagcucccc

SEQ ID NO: 452965 - RNA, 22 nt, Human
cuuaagagccgagcuccccgaa

SEQ ID NO: 452966 - RNA, 18 nt, Human
gaaugaggggagggaagg

SEQ ID NO: 452967 - RNA, 26 nt, Human
gagccgagcuccccgaaaaagaaauu

SEQ ID NO: 452968 - RNA, 19 nt, Human
gaggagggccagggaggac

SEQ ID NO: 452969 - RNA, 18 nt, Human
gagggaagggaggagggc

SEQ ID NO: 452970 - RNA, 21 nt, Human
gccccgucuaaaucccuucca

SEQ ID NO: 452971 - RNA, 21 nt, Human
gccuggagccuucucccucca

SEQ ID NO: 452972 - RNA, 21 nt, Human
ggaaugaggggagggaaggga

SEQ ID NO: 452973 - RNA, 18 nt, Human
ggcccuggagaagcaggg

SEQ ID NO: 452974 - RNA, 21 nt, Human
gggaaaaggggagguugggga

SEQ ID NO: 452975 - RNA, 24 nt, Human
gggaacaggaaguuucacaccaaa

SEQ ID NO: 452976 - RNA, 22 nt, Human
gggaagggaggagggccaggga

SEQ ID NO: 452977 - RNA, 19 nt, Human
gggagaagcugggaaggac

SEQ ID NO: 452978 - RNA, 18 nt, Human
gggagguuggggagaagc

SEQ ID NO: 452979 - RNA, 21 nt, Human
gggagguuggggagaagcugg

SEQ ID NO: 452980 - RNA, 19 nt, Human
gggcagggcucuggagggg

SEQ ID NO: 452981 - RNA, 21 nt, Human
gggcagggcucuggagggggc

SEQ ID NO: 452982 - RNA, 22 nt, Human
gggcagggcucuggagggggcu

SEQ ID NO: 452983 - RNA, 20 nt, Human
ggggagggaagggaggaggg

SEQ ID NO: 452984 - RNA, 19 nt, Human
gggugcgguggggcagggc

SEQ ID NO: 452985 - RNA, 23 nt, Human
gguagcucccuccccacccugga

SEQ ID NO: 452986 - RNA, 18 nt, Human
ggugcgguggggcagggc

SEQ ID NO: 452987 - RNA, 28 nt, Human
guuucacaccaaaaaaaaaaaaaaaaaa

SEQ ID NO: 452988 - RNA, 19 nt, Human
uaaaucccuuccagaaguc

SEQ ID NO: 452989 - RNA, 20 nt, Human
uacaacucuaagggguccac

SEQ ID NO: 452990 - RNA, 19 nt, Human
uagcucccagguuuuucug

SEQ ID NO: 452991 - RNA, 24 nt, Human
ucacaccaaaaaaaaaaaaaaaaa

SEQ ID NO: 452992 - RNA, 23 nt, Human
ucagcagcuugggccaagguccc

SEQ ID NO: 452993 - RNA, 21 nt, Human
ucagggagcccaccggccucu

SEQ ID NO: 452994 - RNA, 21 nt, Human
uccccgaaaaagaaauuccua

SEQ ID NO: 452995 - RNA, 26 nt, Human
uccccgaaaaagaaauuccuagcccu

SEQ ID NO: 452996 - RNA, 18 nt, Human
ucccuucaccggggcaga

SEQ ID NO: 452997 - RNA, 18 nt, Human
uccugggcaucugaaccc

SEQ ID NO: 452998 - RNA, 18 nt, Human
ucuaaaucccuuccagaa

SEQ ID NO: 452999 - RNA, 21 nt, Human
ucuccugucuuauaaacuagg

SEQ ID NO: 453000 - RNA, 18 nt, Human
ucucuggcaaccuuggcc

SEQ ID NO: 453001 - RNA, 21 nt, Human
ucucuggcaaccuuggcccca

SEQ ID NO: 453002 - RNA, 19 nt, Human
ugaaggggacgugggggca

SEQ ID NO: 453003 - RNA, 21 nt, Human
ugcaggcacggagcugcuggc

SEQ ID NO: 453004 - RNA, 20 nt, Human
ugccuggaagggaugucagg

SEQ ID NO: 453005 - RNA, 20 nt, Human
ugccuggaagggaugucagg

SEQ ID NO: 453006 - RNA, 23 nt, Human
ugccuggaagggaugucagggag

SEQ ID NO: 453007 - RNA, 23 nt, Human
ugcgguggggcagggcucuggag

SEQ ID NO: 453008 - RNA, 20 nt, Human
ugcugagggcaggcagcugg

SEQ ID NO: 453009 - RNA, 25 nt, Human
uggagaagcagggugcgguggggca

SEQ ID NO: 453010 - RNA, 19 nt, Human
uggccccagacaggcucuc

SEQ ID NO: 453011 - RNA, 24 nt, Human
ugggaacaggaaguuucacaccaa

SEQ ID NO: 453012 - RNA, 28 nt, Human
ugggaacaggaaguuucaccgggauccc

SEQ ID NO: 453013 - RNA, 18 nt, Human
uggugggguugacgaaga

SEQ ID NO: 453014 - RNA, 21 nt, Human
ugucaaucccuccaucuuucc

SEQ ID NO: 453015 - RNA, 20 nt, Human
uucagugcuuucagguugcc

SEQ ID NO: 453016 - RNA, 23 nt, Human
uuccccugagcugggugcaggca

SEQ ID NO: 453017 - RNA, 22 nt, Human
uugccuggaagggaugucaggg

SEQ ID NO: 453018 - RNA, 18 nt, Human
uugcuuucucccuuuucu

SEQ ID NO: 453019 - RNA, 20 nt, Human
uuggcagggacaggaaggca

SEQ ID NO: 453020 - RNA, 23 nt, Human
uuucuccugucuuauaaacuagg

SEQ ID NO: 453021 - RNA, 22 nt, Human
uuugcuuucucccuuuucuccu

SEQ ID NO: 453022 - RNA, 23 nt, Human
uuuugcuuucucccuuuucuccu

SEQ ID NO: 453023 - RNA, 18 nt, Human
aagaaacugaaggcugga

SEQ ID NO: 453024 - RNA, 19 nt, Human
aagaaacugaaggcuggau

SEQ ID NO: 453025 - RNA, 19 nt, Human
aauccuguauguauuuguu

SEQ ID NO: 453026 - RNA, 21 nt, Human
acgcugcugcgaccugggggc

SEQ ID NO: 453027 - RNA, 23 nt, Human
cacaagugcuuauuguagaacag

SEQ ID NO: 453028 - RNA, 23 nt, Human
ccccccggaggcgacacgcugcu

SEQ ID NO: 453029 - RNA, 21 nt, Human
ccccggccccgggcccugccc

SEQ ID NO: 453030 - RNA, 18 nt, Human
ccccgggcccugcccggg

SEQ ID NO: 453031 - RNA, 20 nt, Human
ccggccccgggcccugcccg

SEQ ID NO: 453032 - RNA, 19 nt, Human
ccgggaaagacugggaagg

SEQ ID NO: 453033 - RNA, 18 nt, Human
cggccccgggcccugccc

SEQ ID NO: 453034 - RNA, 24 nt, Human
cggcucuguggccgggcagaggcc

SEQ ID NO: 453035 - RNA, 19 nt, Human
cuucaaaccccggccccgg

SEQ ID NO: 453036 - RNA, 23 nt, Human
cuuuaucaugucauaaaacacaa

SEQ ID NO: 453037 - RNA, 21 nt, Human
gacagcaccuccagcuccggc

SEQ ID NO: 453038 - RNA, 19 nt, Human
gccccgggcccugcccggg

SEQ ID NO: 453039 - RNA, 18 nt, Human
gccgccagacgggacagc

SEQ ID NO: 453040 - RNA, 18 nt, Human
gcuuauuguagaacagug

SEQ ID NO: 453041 - RNA, 20 nt, Human
gggcagaggccaaccccccg

SEQ ID NO: 453042 - RNA, 19 nt, Human
uaaaaaacccuaagcaauc

SEQ ID NO: 453043 - RNA, 21 nt, Human
ugggggccgggaaagacuggg

SEQ ID NO: 453044 - RNA, 21 nt, Human
uucaaaccccggccccgggcc

SEQ ID NO: 453045 - RNA, 24 nt, Human
uucagcaucuucaaaccccggccc

SEQ ID NO: 453046 - RNA, 21 nt, Human
uuuuuuuuuuuuuugcaugga

SEQ ID NO: 453047 - RNA, 18 nt, Human
uuuuuuuuuuuuuuuugc

SEQ ID NO: 453048 - RNA, 22 nt, Human
uuuuuuuuuuuuuuuugcaugg

SEQ ID NO: 453049 - RNA, 21 nt, Human
accacuccuaccagcaccccg

SEQ ID NO: 453050 - RNA, 21 nt, Human
cacccacgccugcccgagggc

SEQ ID NO: 453051 - RNA, 18 nt, Human
caccccagccgccuucgc

SEQ ID NO: 453052 - RNA, 22 nt, Human
cacucuguuucuuuauuggaaa

SEQ ID NO: 453053 - RNA, 20 nt, Human
cuaccagcaccccgcggccc

SEQ ID NO: 453054 - RNA, 19 nt, Human
cuccaaccacuccuaccag

SEQ ID NO: 453055 - RNA, 26 nt, Human
cucuccaaccacuccuaccagcaccc

SEQ ID NO: 453056 - RNA, 21 nt, Human
cuuggcucucacccacgccug

SEQ ID NO: 453057 - RNA, 20 nt, Human
gaaauccgaacaccccagcc

SEQ ID NO: 453058 - RNA, 21 nt, Human
ggcccccggccuaggcuccag

SEQ ID NO: 453059 - RNA, 22 nt, Human
uccuaccagcaccccgcggggc

SEQ ID NO: 453060 - RNA, 21 nt, Human
uucgcaagucucuccaaccac

SEQ ID NO: 453061 - RNA, 19 nt, Human
aauaaauaggaaaaacuca

SEQ ID NO: 453062 - RNA, 21 nt, Human
agaaaacaaauugaggcauug

SEQ ID NO: 453063 - RNA, 21 nt, Human
agucaugcagaaaacaaauug

SEQ ID NO: 453064 - RNA, 22 nt, Human
augaaccccuaaaccacagguu

SEQ ID NO: 453065 - RNA, 18 nt, Human
augacaagaagaccucac

SEQ ID NO: 453066 - RNA, 22 nt, Human
caaaagaaaucauucacaacca

SEQ ID NO: 453067 - RNA, 24 nt, Human
caaaauaaauaggaaaaacucaua

SEQ ID NO: 453068 - RNA, 23 nt, Human
cacacucacaugacaagaagacc

SEQ ID NO: 453069 - RNA, 25 nt, Human
cacucacaugacaagaagaccucac

SEQ ID NO: 453070 - RNA, 24 nt, Human
cauuccuuccucuugucacgcuca

SEQ ID NO: 453071 - RNA, 21 nt, Human
cauugaguggaggcaaagggc

SEQ ID NO: 453072 - RNA, 19 nt, Human
ccaacacugagacucucag

SEQ ID NO: 453073 - RNA, 28 nt, Human
ccccuaaaccacagguugagaaucccug

SEQ ID NO: 453074 - RNA, 27 nt, Human
ccuccaggcucccuguuccggcucacc

SEQ ID NO: 453075 - RNA, 19 nt, Human
ccucuugucacgcucagcc

SEQ ID NO: 453076 - RNA, 18 nt, Human
cgaugagccccucaggca

SEQ ID NO: 453077 - RNA, 25 nt, Human
cucagccccgaugaaccccuaaacc

SEQ ID NO: 453078 - RNA, 21 nt, Human
cugcaggcggacagaagcgcg

SEQ ID NO: 453079 - RNA, 22 nt, Human
gccagguuccauuuucagugcu

SEQ ID NO: 453080 - RNA, 21 nt, Human
gcucagccccgaugaaccccu

SEQ ID NO: 453081 - RNA, 19 nt, Human
gcuugaagaucagaaguuc

SEQ ID NO: 453082 - RNA, 19 nt, Human
ggaugauuugcuuggaggc

SEQ ID NO: 453083 - RNA, 21 nt, Human
ucacaggcgucgaugagcccc

SEQ ID NO: 453084 - RNA, 18 nt, Human
ucagccccgaugaacccc

SEQ ID NO: 453085 - RNA, 20 nt, Human
uccaucuuucuucauucucc

SEQ ID NO: 453086 - RNA, 22 nt, Human
ucccuccaggcucccuguuuga

SEQ ID NO: 453087 - RNA, 18 nt, Human
ucuuucuucauucuccuc

SEQ ID NO: 453088 - RNA, 18 nt, Human
ugaaccccuaaaccacag

SEQ ID NO: 453089 - RNA, 24 nt, Human
ugacuccaucuuucuucauucucc

SEQ ID NO: 453090 - RNA, 20 nt, Human
ugagcaaaucauuaagcagc

SEQ ID NO: 453091 - RNA, 18 nt, Human
ugauuugcuuggaggcuc

SEQ ID NO: 453092 - RNA, 22 nt, Human
ugcccugcaggcggacagaagc

SEQ ID NO: 453093 - RNA, 18 nt, Human
ugucacaggcgucgauga

SEQ ID NO: 453094 - RNA, 18 nt, Human
uuaagucccacauugccu

SEQ ID NO: 453095 - RNA, 18 nt, Human
uuggaggcuccuuguuca

SEQ ID NO: 453096 - RNA, 27 nt, Human
uuuuaagucccacauugccugcauccc

SEQ ID NO: 453097 - RNA, 21 nt, Human
cgccggcguugcccuagaaac

SEQ ID NO: 453098 - RNA, 21 nt, Human
cgggaaggcagcccuucauua

SEQ ID NO: 453099 - RNA, 18 nt, Human
uagaaacagacggcguag

SEQ ID NO: 453100 - RNA, 22 nt, Human
uaucagagacugugcagccugu

SEQ ID NO: 453101 - RNA, 26 nt, Human
ugcccccagcucuggccaccaggcuu

SEQ ID NO: 453102 - RNA, 23 nt, Human
ugcuaagagacgccggcguugcc

SEQ ID NO: 453103 - RNA, 20 nt, Human
uggccaccaggcuugccccu

SEQ ID NO: 453104 - RNA, 19 nt, Human
ugugcagccuguggagccu

SEQ ID NO: 453105 - RNA, 22 nt, Human
uuggcagcgacaccuucgcgaa

SEQ ID NO: 453106 - RNA, 24 nt, Human
uuuuuuuuuuuuuuuuuacucuga

SEQ ID NO: 453107 - RNA, 19 nt, Human
aaaauagugaaacuccauu

SEQ ID NO: 453108 - RNA, 20 nt, Human
aacauggugaaacccccauc

SEQ ID NO: 453109 - RNA, 21 nt, Human
aacauggugaaacccccaucu

SEQ ID NO: 453110 - RNA, 22 nt, Human
aacauggugaaacccccaucuc

SEQ ID NO: 453111 - RNA, 21 nt, Human
aagcucucagaaccgccuucc

SEQ ID NO: 453112 - RNA, 22 nt, Human
aaggauucagcccgcuuugucc

SEQ ID NO: 453113 - RNA, 24 nt, Human
aaucacuugaacccaggaggcaga

SEQ ID NO: 453114 - RNA, 21 nt, Human
acccauuccauccccaagccc

SEQ ID NO: 453115 - RNA, 21 nt, Human
accgccuuccucucugccucc

SEQ ID NO: 453116 - RNA, 24 nt, Human
accugaggucaggaguucgagacu

SEQ ID NO: 453117 - RNA, 19 nt, Human
agaacauacuaggcuagca

SEQ ID NO: 453118 - RNA, 22 nt, Human
agaaccgccuuccucucugccu

SEQ ID NO: 453119 - RNA, 24 nt, Human
agagaggaggaggggaaauggagc

SEQ ID NO: 453120 - RNA, 23 nt, Human
agagguugcagugagccaagauc

SEQ ID NO: 453121 - RNA, 24 nt, Human
agagguugcagugagccaagaucg

SEQ ID NO: 453122 - RNA, 22 nt, Human
agccuggccaacauggugaaac

SEQ ID NO: 453123 - RNA, 24 nt, Human
agccuggccaacauggugaaaccc

SEQ ID NO: 453124 - RNA, 22 nt, Human
agccugggcaaaauagugaaac

SEQ ID NO: 453125 - RNA, 23 nt, Human
agccugggcaaaauagugaaacu

SEQ ID NO: 453126 - RNA, 24 nt, Human
agccugggcaaaauagugaaacuc

SEQ ID NO: 453127 - RNA, 23 nt, Human
aggaguucgagacuagccuggcc

SEQ ID NO: 453128 - RNA, 18 nt, Human
aggcaagagaaucacuug

SEQ ID NO: 453129 - RNA, 24 nt, Human
aggcaagagaaucacuugaaccca

SEQ ID NO: 453130 - RNA, 24 nt, Human
aggcagagguugcagugagccaag

SEQ ID NO: 453131 - RNA, 18 nt, Human
aggcagguggaucaccug

SEQ ID NO: 453132 - RNA, 22 nt, Human
aggcagguggaucaccugaggu

SEQ ID NO: 453133 - RNA, 26 nt, Human
aggcagguggaucaccugaggucagg

SEQ ID NO: 453134 - RNA, 20 nt, Human
agggggugggaggguggagg

SEQ ID NO: 453135 - RNA, 20 nt, Human
agguaucagaaaccugaagg

SEQ ID NO: 453136 - RNA, 22 nt, Human
agguggaucaccugaggucagg

SEQ ID NO: 453137 - RNA, 18 nt, Human
agucagcuuggggagcua

SEQ ID NO: 453138 - RNA, 23 nt, Human
aguggcucaugcuuguaauccca

SEQ ID NO: 453139 - RNA, 24 nt, Human
aguggcucaugcuuguaaucccag

SEQ ID NO: 453140 - RNA, 21 nt, Human
aucaccugaggucaggaguuc

SEQ ID NO: 453141 - RNA, 24 nt, Human
aucgcaccaucgcacuccagccug

SEQ ID NO: 453142 - RNA, 28 nt, Human
aucgcaccaucgcacuccagccugggca

SEQ ID NO: 453143 - RNA, 25 nt, Human
aucgcacuccagccugggcaaaaua

SEQ ID NO: 453144 - RNA, 19 nt, Human
auuccauccccaagcccau

SEQ ID NO: 453145 - RNA, 24 nt, Human
caacauggugaaacccccaucucu

SEQ ID NO: 453146 - RNA, 19 nt, Human
caacauguucuccucugcc

SEQ ID NO: 453147 - RNA, 19 nt, Human
caacccucaagaaagaaaa

SEQ ID NO: 453148 - RNA, 24 nt, Human
caaggcagguggaucaccugaggu

SEQ ID NO: 453149 - RNA, 26 nt, Human
caaggcagguggaucaccugagguca

SEQ ID NO: 453150 - RNA, 20 nt, Human
caauguacacauacacaugu

SEQ ID NO: 453151 - RNA, 24 nt, Human
caccacccauuccauccccaagcc

SEQ ID NO: 453152 - RNA, 23 nt, Human
caccugaggucaggaguucgaga

SEQ ID NO: 453153 - RNA, 23 nt, Human
caccuguaauuuccacuacucgg

SEQ ID NO: 453154 - RNA, 24 nt, Human
cacuacucgggagacugaggcaag

SEQ ID NO: 453155 - RNA, 20 nt, Human
cacuccagccugggcaaaau

SEQ ID NO: 453156 - RNA, 20 nt, Human
cacucugugaacuuaccacc

SEQ ID NO: 453157 - RNA, 26 nt, Human
cacucugugaacuuaccaccacccau

SEQ ID NO: 453158 - RNA, 18 nt, Human
cagaaaccugaaggauuc

SEQ ID NO: 453159 - RNA, 19 nt, Human
cagcagcccaaggaaguga

SEQ ID NO: 453160 - RNA, 22 nt, Human
cagcccagucagcuuggggagc

SEQ ID NO: 453161 - RNA, 23 nt, Human
caggcugggcacaguggcucaug

SEQ ID NO: 453162 - RNA, 24 nt, Human
cagguggaucaccugaggucagga

SEQ ID NO: 453163 - RNA, 22 nt, Human
caguacaggacacaggcacucc

SEQ ID NO: 453164 - RNA, 24 nt, Human
cagugcuuugggaggccaaggcag

SEQ ID NO: 453165 - RNA, 25 nt, Human
cagugcuuugggaggccaaggcagg

SEQ ID NO: 453166 - RNA, 19 nt, Human
caucgcacuccagccuggg

SEQ ID NO: 453167 - RNA, 22 nt, Human
caucgcacuccagccugggcaa

SEQ ID NO: 453168 - RNA, 22 nt, Human
caucugcccaccaaggccccug

SEQ ID NO: 453169 - RNA, 24 nt, Human
caugcuuguaaucccagugcuuug

SEQ ID NO: 453170 - RNA, 20 nt, Human
cauucggggccuagcugccc

SEQ ID NO: 453171 - RNA, 21 nt, Human
ccacccauuccauccccaagc

SEQ ID NO: 453172 - RNA, 22 nt, Human
ccagaggucaugggaguuggga

SEQ ID NO: 453173 - RNA, 22 nt, Human
ccaggaggcagagguugcagug

SEQ ID NO: 453174 - RNA, 23 nt, Human
ccagugcuaggcagauagccaag

SEQ ID NO: 453175 - RNA, 19 nt, Human
ccagugcuuugggaggcca

SEQ ID NO: 453176 - RNA, 20 nt, Human
ccaucgcacuccagccuggg

SEQ ID NO: 453177 - RNA, 21 nt, Human
ccaucgcacuccagccugggc

SEQ ID NO: 453178 - RNA, 24 nt, Human
ccaucgcacuccagccugggcaaa

SEQ ID NO: 453179 - RNA, 25 nt, Human
cccaauguacacauacacaugugua

SEQ ID NO: 453180 - RNA, 20 nt, Human
cccacgcugucaaguagggu

SEQ ID NO: 453181 - RNA, 19 nt, Human
cccagugcuuugggaggcc

SEQ ID NO: 453182 - RNA, 22 nt, Human
ccccacccaccacugaagccag

SEQ ID NO: 453183 - RNA, 23 nt, Human
ccccacccaccacugaagccaga

SEQ ID NO: 453184 - RNA, 19 nt, Human
cccucaauugccaucugcc

SEQ ID NO: 453185 - RNA, 19 nt, Human
cccucccccacccuaauag

SEQ ID NO: 453186 - RNA, 22 nt, Human
cccugccccacccaccacugaa

SEQ ID NO: 453187 - RNA, 24 nt, Human
cccuugaggauguccuaguuacac

SEQ ID NO: 453188 - RNA, 21 nt, Human
ccgcugugucccuugggaggg

SEQ ID NO: 453189 - RNA, 20 nt, Human
ccgggcccuuccucuuccag

SEQ ID NO: 453190 - RNA, 18 nt, Human
ccuaccgcugugucccuu

SEQ ID NO: 453191 - RNA, 21 nt, Human
ccucucugauaccuguggagu

SEQ ID NO: 453192 - RNA, 19 nt, Human
ccucuuccaggggguggga

SEQ ID NO: 453193 - RNA, 22 nt, Human
ccugaggucaggaguucgagac

SEQ ID NO: 453194 - RNA, 19 nt, Human
ccugccccacccaccacug

SEQ ID NO: 453195 - RNA, 22 nt, Human
ccugccccacccaccacugaag

SEQ ID NO: 453196 - RNA, 23 nt, Human
ccuggccaacauggugaaacccc

SEQ ID NO: 453197 - RNA, 23 nt, Human
ccuggccaacauggugaaacccc

SEQ ID NO: 453198 - RNA, 25 nt, Human
ccuggccaacauggugaaaccccca

SEQ ID NO: 453199 - RNA, 24 nt, Human
ccugggcaaaauagugaaacucca

SEQ ID NO: 453200 - RNA, 18 nt, Human
ccuuucaucugcccugcc

SEQ ID NO: 453201 - RNA, 24 nt, Human
cgagacuagccuggccaacauggu

SEQ ID NO: 453202 - RNA, 21 nt, Human
cgcaccaucgcacuccagccu

SEQ ID NO: 453203 - RNA, 20 nt, Human
cgcuuuguccuacuaguguc

SEQ ID NO: 453204 - RNA, 24 nt, Human
cgggagacugaggcaagagaauca

SEQ ID NO: 453205 - RNA, 22 nt, Human
cuagguaucagaaaccugaagg

SEQ ID NO: 453206 - RNA, 24 nt, Human
cucaugcuuguaaucccagugcuu

SEQ ID NO: 453207 - RNA, 18 nt, Human
cucucugccuccgcuguc

SEQ ID NO: 453208 - RNA, 18 nt, Human
cucugugaacuuaccacc

SEQ ID NO: 453209 - RNA, 19 nt, Human
cugccuccgcugucgccgc

SEQ ID NO: 453210 - RNA, 23 nt, Human
cugggcaaaauagugaaacucca

SEQ ID NO: 453211 - RNA, 20 nt, Human
cuuggcugguguaacaguuu

SEQ ID NO: 453212 - RNA, 27 nt, Human
cuuugucugguagagaggaggagggga

SEQ ID NO: 453213 - RNA, 24 nt, Human
gaagcccuuucaucugcccugccc

SEQ ID NO: 453214 - RNA, 21 nt, Human
gacagcgagggcaguacagga

SEQ ID NO: 453215 - RNA, 19 nt, Human
gacaugaggcugagaaggg

SEQ ID NO: 453216 - RNA, 23 nt, Human
gagaaucacuugaacccaggagg

SEQ ID NO: 453217 - RNA, 19 nt, Human
gaggaaaagccuuauggag

SEQ ID NO: 453218 - RNA, 18 nt, Human
gagggaggggacagaggc

SEQ ID NO: 453219 - RNA, 24 nt, Human
gaucaccugaggucaggaguucga

SEQ ID NO: 453220 - RNA, 22 nt, Human
gcaagagaaucacuugaaccca

SEQ ID NO: 453221 - RNA, 20 nt, Human
gcaccaucgcacuccagccu

SEQ ID NO: 453222 - RNA, 20 nt, Human
gcaguacaggacacaggcac

SEQ ID NO: 453223 - RNA, 19 nt, Human
gcauaaguccccugccucc

SEQ ID NO: 453224 - RNA, 25 nt, Human
gccaacauggugaaacccccaucuc

SEQ ID NO: 453225 - RNA, 19 nt, Human
gccuccgcugucgccgccg

SEQ ID NO: 453226 - RNA, 19 nt, Human
gccuccgcugucgccgccg

SEQ ID NO: 453227 - RNA, 22 nt, Human
gccuuccucucugccuccgcug

SEQ ID NO: 453228 - RNA, 21 nt, Human
gcuaggcagauagccaagugg

SEQ ID NO: 453229 - RNA, 19 nt, Human
gcucugccucuguggcuuu

SEQ ID NO: 453230 - RNA, 22 nt, Human
ggaagugagggaggggacagag

SEQ ID NO: 453231 - RNA, 22 nt, Human
ggaggcagagguugcagugagc

SEQ ID NO: 453232 - RNA, 23 nt, Human
ggagggggugcaguggaagcucu

SEQ ID NO: 453233 - RNA, 22 nt, Human
ggaggguggagguggggacagg

SEQ ID NO: 453234 - RNA, 18 nt, Human
ggaggucccucccccacc

SEQ ID NO: 453235 - RNA, 22 nt, Human
ggaucaccugaggucaggaguu

SEQ ID NO: 453236 - RNA, 23 nt, Human
ggcacaguggcucaugcuuguaa

SEQ ID NO: 453237 - RNA, 24 nt, Human
ggcucaugcuuguaaucccagugc

SEQ ID NO: 453238 - RNA, 22 nt, Human
ggcugggcacaguggcucaugc

SEQ ID NO: 453239 - RNA, 24 nt, Human
gggacaggaccaacccucaagaaa

SEQ ID NO: 453240 - RNA, 18 nt, Human
gggagacagcgagggcag

SEQ ID NO: 453241 - RNA, 19 nt, Human
gggagacugaggcaagaga

SEQ ID NO: 453242 - RNA, 18 nt, Human
gggcacaguggcucaugc

SEQ ID NO: 453243 - RNA, 21 nt, Human
gggugggaggguggagguggg

SEQ ID NO: 453244 - RNA, 28 nt, Human
gguagagaggaggaggggaaauggagcc

SEQ ID NO: 453245 - RNA, 20 nt, Human
ggucaugggaguugggaucu

SEQ ID NO: 453246 - RNA, 22 nt, Human
ggugcaguggaagcucuuaaag

SEQ ID NO: 453247 - RNA, 22 nt, Human
gguggugggggagacagcgagg

SEQ ID NO: 453248 - RNA, 22 nt, Human
uaaaaauacaaaacuagcaaga

SEQ ID NO: 453249 - RNA, 23 nt, Human
uaaaaauacaaaacuagcaagau

SEQ ID NO: 453250 - RNA, 18 nt, Human
uaacuuggcugguguaac

SEQ ID NO: 453251 - RNA, 20 nt, Human
uaacuuggcugguguaacag

SEQ ID NO: 453252 - RNA, 21 nt, Human
uaagaaaugucaguggaacag

SEQ ID NO: 453253 - RNA, 18 nt, Human
uaagucucuguccugaga

SEQ ID NO: 453254 - RNA, 19 nt, Human
uacaaaacuagcaagaugu

SEQ ID NO: 453255 - RNA, 22 nt, Human
uacacauacacauguguaucau

SEQ ID NO: 453256 - RNA, 19 nt, Human
uacaggacacaggcacucc

SEQ ID NO: 453257 - RNA, 24 nt, Human
uagccuggccaacauggugaaacc

SEQ ID NO: 453258 - RNA, 18 nt, Human
uaggguggugggggagac

SEQ ID NO: 453259 - RNA, 24 nt, Human
uauaugcauggacacucaagcaca

SEQ ID NO: 453260 - RNA, 21 nt, Human
uaucagaaaccugaaggauuc

SEQ ID NO: 453261 - RNA, 20 nt, Human
ucaccugaggucaggaguuc

SEQ ID NO: 453262 - RNA, 21 nt, Human
ucaugcuuguaaucccagugc

SEQ ID NO: 453263 - RNA, 21 nt, Human
uccagggggugggagggugga

SEQ ID NO: 453264 - RNA, 22 nt, Human
uccauuaaaaaaaaaaaaaaaa

SEQ ID NO: 453265 - RNA, 26 nt, Human
uccauuaaaaaaaaaaaaaaaaguca

SEQ ID NO: 453266 - RNA, 21 nt, Human
uccugagauccuggggcuccu

SEQ ID NO: 453267 - RNA, 19 nt, Human
ucucagaaccgccuuccuc

SEQ ID NO: 453268 - RNA, 20 nt, Human
ucucugcuaaaaauacaaaa

SEQ ID NO: 453269 - RNA, 23 nt, Human
ucugcccaccaaggccccugccc

SEQ ID NO: 453270 - RNA, 21 nt, Human
ugaagcccuuucaucugcccu

SEQ ID NO: 453271 - RNA, 20 nt, Human
ugacuccacuaaagcagcag

SEQ ID NO: 453272 - RNA, 20 nt, Human
ugagaagggaagccagaugu

SEQ ID NO: 453273 - RNA, 22 nt, Human
ugagaagggaagccagauguca

SEQ ID NO: 453274 - RNA, 23 nt, Human
ugagaagggaagccagaugucag

SEQ ID NO: 453275 - RNA, 18 nt, Human
ugaggcaagagaaucacu

SEQ ID NO: 453276 - RNA, 20 nt, Human
ugaggcaagagaaucacuug

SEQ ID NO: 453277 - RNA, 24 nt, Human
ugaggcaagagaaucacuugaacc

SEQ ID NO: 453278 - RNA, 25 nt, Human
ugaggcaagagaaucacuugaaccc

SEQ ID NO: 453279 - RNA, 19 nt, Human
ugagggaggggacagaggc

SEQ ID NO: 453280 - RNA, 21 nt, Human
ugcauaaguccccugccuccc

SEQ ID NO: 453281 - RNA, 23 nt, Human
ugccccacccaccacugaagcca

SEQ ID NO: 453282 - RNA, 23 nt, Human
ugccuccgcugucgccgccgggc

SEQ ID NO: 453283 - RNA, 23 nt, Human
ugcuuguaaucccagugcuuugg

SEQ ID NO: 453284 - RNA, 19 nt, Human
uggaacacaaaauucccug

SEQ ID NO: 453285 - RNA, 24 nt, Human
uggaucaccugaggucaggaguuc

SEQ ID NO: 453286 - RNA, 26 nt, Human
uggaucaccugaggucaggaguucga

SEQ ID NO: 453287 - RNA, 22 nt, Human
uggcacugagggaugcauaagu

SEQ ID NO: 453288 - RNA, 18 nt, Human
uggccaacauggugaaac

SEQ ID NO: 453289 - RNA, 22 nt, Human
uggcucaugcuuguaaucccag

SEQ ID NO: 453290 - RNA, 22 nt, Human
uggcucaugcuuguaaucccag

SEQ ID NO: 453291 - RNA, 24 nt, Human
ugggaggccaaggcagguggauca

SEQ ID NO: 453292 - RNA, 18 nt, Human
ugggagggggugcagugg

SEQ ID NO: 453293 - RNA, 21 nt, Human
uggggguuuugcugaaugucu

SEQ ID NO: 453294 - RNA, 21 nt, Human
ugguagagaggaggaggggaa

SEQ ID NO: 453295 - RNA, 23 nt, Human
ugguagcacacaccuguaauuuc

SEQ ID NO: 453296 - RNA, 20 nt, Human
uguaaucccagugcuuuggg

SEQ ID NO: 453297 - RNA, 25 nt, Human
uguacacauacacauguguaucaug

SEQ ID NO: 453298 - RNA, 27 nt, Human
uguacacauacacauguguaucaugua

SEQ ID NO: 453299 - RNA, 21 nt, Human
uguagccuggcuggcaggcag

SEQ ID NO: 453300 - RNA, 18 nt, Human
uguaucauguauguauau

SEQ ID NO: 453301 - RNA, 18 nt, Human
ugucagagcacaccagga

SEQ ID NO: 453302 - RNA, 19 nt, Human
uguccugagauccuggggc

SEQ ID NO: 453303 - RNA, 20 nt, Human
uguguaucauguauguauau

SEQ ID NO: 453304 - RNA, 21 nt, Human
uguguaucauguauguauaug

SEQ ID NO: 453305 - RNA, 22 nt, Human
uguuugggaaagggaguuggga

SEQ ID NO: 453306 - RNA, 24 nt, Human
uucccugucuuaacauuguacauu

SEQ ID NO: 453307 - RNA, 22 nt, Human
uugcagugagccaagaucgcac

SEQ ID NO: 453308 - RNA, 23 nt, Human
uugcuacccucaauugccaucug

SEQ ID NO: 453309 - RNA, 24 nt, Human
uuuuuuuuuuuuuuagacaaguuu

SEQ ID NO: 453310 - RNA, 24 nt, Human
aaaaaaaacaaaaacaaaaaacga

SEQ ID NO: 453311 - RNA, 22 nt, Human
aaaaaguaaacuccaagugaac

SEQ ID NO: 453312 - RNA, 21 nt, Human
aaaacagacauaccuugggua

SEQ ID NO: 453313 - RNA, 23 nt, Human
aaacaaaaacaaaaaacgauuaa

SEQ ID NO: 453314 - RNA, 20 nt, Human
aaacaaccuggaggucacag

SEQ ID NO: 453315 - RNA, 19 nt, Human
aaacaucuugugacaagcu

SEQ ID NO: 453316 - RNA, 18 nt, Human
aaccuggaggucacagga

SEQ ID NO: 453317 - RNA, 24 nt, Human
aagauacuuuuuaaaauucagaau

SEQ ID NO: 453318 - RNA, 18 nt, Human
aaggaaaaaaaacaaaaa

SEQ ID NO: 453319 - RNA, 21 nt, Human
aaggaaaaaaaacaaaaacaa

SEQ ID NO: 453320 - RNA, 19 nt, Human
agauacuuuuuaaaauuca

SEQ ID NO: 453321 - RNA, 23 nt, Human
agaugugaacuaaagcuauaacc

SEQ ID NO: 453322 - RNA, 24 nt, Human
aggaaaaaaaacaaaaacaaaaaa

SEQ ID NO: 453323 - RNA, 21 nt, Human
augaaaaucaauuuauaaaca

SEQ ID NO: 453324 - RNA, 22 nt, Human
caaugaaucauauaaacuguag

SEQ ID NO: 453325 - RNA, 24 nt, Human
cacagaaggaauguccuauuugcc

SEQ ID NO: 453326 - RNA, 19 nt, Human
cacccagaaugaaaugacu

SEQ ID NO: 453327 - RNA, 20 nt, Human
cacgagaaaaagaagauacu

SEQ ID NO: 453328 - RNA, 22 nt, Human
cagaaugaaaugacucugcuga

SEQ ID NO: 453329 - RNA, 19 nt, Human
cauauaaacuguagacugc

SEQ ID NO: 453330 - RNA, 18 nt, Human
cauuucuuugccuggugc

SEQ ID NO: 453331 - RNA, 22 nt, Human
ccaagugaacaucaaaucaaau

SEQ ID NO: 453332 - RNA, 24 nt, Human
ccaaugauaacaucacacaugcaa

SEQ ID NO: 453333 - RNA, 20 nt, Human
ccauagaagauucuuuuaac

SEQ ID NO: 453334 - RNA, 25 nt, Human
cuaaagcuauaaccccuguacccua

SEQ ID NO: 453335 - RNA, 23 nt, Human
cuaaauaucagccacuuugggcu

SEQ ID NO: 453336 - RNA, 19 nt, Human
cuauaaccccuguacccua

SEQ ID NO: 453337 - RNA, 18 nt, Human
cucaagugauuuaucuac

SEQ ID NO: 453338 - RNA, 20 nt, Human
cuuuucuaauuuucccggag

SEQ ID NO: 453339 - RNA, 22 nt, Human
gaaaaaaaacaaaaacaaaaaa

SEQ ID NO: 453340 - RNA, 20 nt, Human
gacauauaaggaaaaaaaac

SEQ ID NO: 453341 - RNA, 19 nt, Human
gauucugagauaaucccuc

SEQ ID NO: 453342 - RNA, 18 nt, Human
ggcggugauaauacugca

SEQ ID NO: 453343 - RNA, 23 nt, Human
gugaacuaaagcuauaaccccug

SEQ ID NO: 453344 - RNA, 22 nt, Human
guguguuaggaucacccagaau

SEQ ID NO: 453345 - RNA, 22 nt, Human
uaaagcuauaaccccuguaccc

SEQ ID NO: 453346 - RNA, 19 nt, Human
uaacacgagaaaaagaaga

SEQ ID NO: 453347 - RNA, 18 nt, Human
uaacugaggacagaaauc

SEQ ID NO: 453348 - RNA, 19 nt, Human
uacgcagacagaauauaug

SEQ ID NO: 453349 - RNA, 19 nt, Human
uagaaggaggcaacaguuu

SEQ ID NO: 453350 - RNA, 22 nt, Human
uagaaggaggcaacaguuucau

SEQ ID NO: 453351 - RNA, 22 nt, Human
ucaguuauuaaaagguuucuua

SEQ ID NO: 453352 - RNA, 23 nt, Human
ugaaucauauaaacuguagacug

SEQ ID NO: 453353 - RNA, 19 nt, Human
ugacacagaaggaaugucc

SEQ ID NO: 453354 - RNA, 18 nt, Human
ugacugguuguucuuuau

SEQ ID NO: 453355 - RNA, 22 nt, Human
ugaggaauguuaaauagagaaa

SEQ ID NO: 453356 - RNA, 27 nt, Human
ugauaacaucacacaugcaaagauuuu

SEQ ID NO: 453357 - RNA, 22 nt, Human
ugggaaagaugugaacuaaagc

SEQ ID NO: 453358 - RNA, 18 nt, Human
ugggccauugacauauaa

SEQ ID NO: 453359 - RNA, 18 nt, Human
ugugaacuaaagcuauaa

SEQ ID NO: 453360 - RNA, 24 nt, Human
uguucuggucaccaaaugucuugu

SEQ ID NO: 453361 - RNA, 21 nt, Human
uuaaaaaacaucugaacagca

SEQ ID NO: 453362 - RNA, 21 nt, Human
uugcgguaucauuucuaauau

SEQ ID NO: 453363 - RNA, 21 nt, Human
uuuuaaaccgcuaagcauccu

SEQ ID NO: 453364 - RNA, 24 nt, Human
aaacaaauagaggcucucucuagu

SEQ ID NO: 453365 - RNA, 22 nt, Human
aaagcuuuuccacauucaguac

SEQ ID NO: 453366 - RNA, 24 nt, Human
acugcauuuauaguaauuccccuc

SEQ ID NO: 453367 - RNA, 20 nt, Human
agaaaacaaauagaggcucu

SEQ ID NO: 453368 - RNA, 21 nt, Human
agcuugacaacaccaauauca

SEQ ID NO: 453369 - RNA, 19 nt, Human
auuuauaguaauuccccuc

SEQ ID NO: 453370 - RNA, 24 nt, Human
caacaccaauaucaaguaaccaaa

SEQ ID NO: 453371 - RNA, 23 nt, Human
caccaauaucaaguaaccaaaga

SEQ ID NO: 453372 - RNA, 19 nt, Human
caucugaacagaucugacu

SEQ ID NO: 453373 - RNA, 22 nt, Human
cauucauggcauucaugcugcu

SEQ ID NO: 453374 - RNA, 21 nt, Human
ccaucaagcugggacuucuga

SEQ ID NO: 453375 - RNA, 22 nt, Human
ccccauauguguaacuacacau

SEQ ID NO: 453376 - RNA, 21 nt, Human
cuccaguaugaauuuuuuuau

SEQ ID NO: 453377 - RNA, 22 nt, Human
cugaacagaucugacuucugga

SEQ ID NO: 453378 - RNA, 20 nt, Human
gacugccaucaagcugggac

SEQ ID NO: 453379 - RNA, 23 nt, Human
gugcauauuccugcauaaacccu

SEQ ID NO: 453380 - RNA, 24 nt, Human
guuugaauucugagggagguuuuu

SEQ ID NO: 453381 - RNA, 21 nt, Human
uaaggaguuuucugacgguuu

SEQ ID NO: 453382 - RNA, 18 nt, Human
ugagagcuugcuuaugau

SEQ ID NO: 453383 - RNA, 18 nt, Human
ugagugaagacugccuca

SEQ ID NO: 453384 - RNA, 27 nt, Human
ugcaggagcuugacaacaccaauauca

SEQ ID NO: 453385 - RNA, 20 nt, Human
ugcauaaacccucugacugc

SEQ ID NO: 453386 - RNA, 21 nt, Human
uggcauucaugcugcuuuucu

SEQ ID NO: 453387 - RNA, 28 nt, Human
uguguaacuacacaucagcuauaugauc

SEQ ID NO: 453388 - RNA, 24 nt, Human
uguugauuuccuugugaaagcuuu

SEQ ID NO: 453389 - RNA, 21 nt, Human
uuccuugugaaagcuuuucca

SEQ ID NO: 453390 - RNA, 21 nt, Human
uucuccagaaugaauucucug

SEQ ID NO: 453391 - RNA, 24 nt, Human
uuucucacauucacuguacucaua

SEQ ID NO: 453392 - RNA, 23 nt, Human
agcagcagcuuuauuaguggugc

SEQ ID NO: 453393 - RNA, 23 nt, Human
aggcaccaguggcaggaggaggg

SEQ ID NO: 453394 - RNA, 20 nt, Human
cagccaagcagcagcuuuau

SEQ ID NO: 453395 - RNA, 18 nt, Human
cggaugcggcgggcggcu

SEQ ID NO: 453396 - RNA, 22 nt, Human
cggcugcagaagggcgcaggug

SEQ ID NO: 453397 - RNA, 24 nt, Human
gaggcaccaguggcaggaggaggg

SEQ ID NO: 453398 - RNA, 21 nt, Human
gggaacuucuaagugacugga

SEQ ID NO: 453399 - RNA, 22 nt, Human
guuaacacugugauacgaaaac

SEQ ID NO: 453400 - RNA, 21 nt, Human
guucuucccauacccuacagc

SEQ ID NO: 453401 - RNA, 21 nt, Human
uaacacugugauacgaaaacu

SEQ ID NO: 453402 - RNA, 22 nt, Human
uacgaaaacuucagacaacacc

SEQ ID NO: 453403 - RNA, 18 nt, Human
ugaauuggguuuuuggcc

SEQ ID NO: 453404 - RNA, 24 nt, Human
uggaaugauauaaauaaagcuuug

SEQ ID NO: 453405 - RNA, 25 nt, Human
uggguucuucccauacccuacagcg

SEQ ID NO: 453406 - RNA, 25 nt, Human
uuauuaguggugcuggguucuuccc

SEQ ID NO: 453407 - RNA, 19 nt, Human
uuugcaggagagaguacag

SEQ ID NO: 453408 - RNA, 21 nt, Human
aagcccggagccugagggcgg

SEQ ID NO: 453409 - RNA, 20 nt, Human
aaucugggucagcccucccu

SEQ ID NO: 453410 - RNA, 21 nt, Human
agggagcugaggcugucggcu

SEQ ID NO: 453411 - RNA, 21 nt, Human
caaaggagacagcacggaucc

SEQ ID NO: 453412 - RNA, 26 nt, Human
cacggauccucuuuuugcauaggccu

SEQ ID NO: 453413 - RNA, 22 nt, Human
cagcacggauccucuuuuugca

SEQ ID NO: 453414 - RNA, 20 nt, Human
caggccccgccccgcccgug

SEQ ID NO: 453415 - RNA, 21 nt, Human
caggcgccugggggaaagccc

SEQ ID NO: 453416 - RNA, 19 nt, Human
cagggcagugggaacgggu

SEQ ID NO: 453417 - RNA, 23 nt, Human
ccagggcagugggaacgggugga

SEQ ID NO: 453418 - RNA, 19 nt, Human
cccccaggcccgccaggcc

SEQ ID NO: 453419 - RNA, 24 nt, Human
cccucagaaccccgguggacccag

SEQ ID NO: 453420 - RNA, 18 nt, Human
ccgccaggccuccugggc

SEQ ID NO: 453421 - RNA, 20 nt, Human
ccgccucccuccagcacccc

SEQ ID NO: 453422 - RNA, 18 nt, Human
ccgggccugccgccuccc

SEQ ID NO: 453423 - RNA, 18 nt, Human
ccguagcgcccccaggcc

SEQ ID NO: 453424 - RNA, 21 nt, Human
ccucccuccagcaccccgggc

SEQ ID NO: 453425 - RNA, 19 nt, Human
cgccaggccuccugggccc

SEQ ID NO: 453426 - RNA, 20 nt, Human
cgccaggccuccugggcccu

SEQ ID NO: 453427 - RNA, 22 nt, Human
cgcccccaggcccgccaggccu

SEQ ID NO: 453428 - RNA, 19 nt, Human
cgccugggggaaagcccgg

SEQ ID NO: 453429 - RNA, 24 nt, Human
cggauccucuuuuugcauaggccu

SEQ ID NO: 453430 - RNA, 23 nt, Human
cucagaaccccgguggacccagg

SEQ ID NO: 453431 - RNA, 25 nt, Human
cucaggaccucagucuccccucaga

SEQ ID NO: 453432 - RNA, 23 nt, Human
cucucccaccguagcgcccccag

SEQ ID NO: 453433 - RNA, 21 nt, Human
cucugggcccaagcccgaucu

SEQ ID NO: 453434 - RNA, 23 nt, Human
cugcccagggcagugggaacggg

SEQ ID NO: 453435 - RNA, 21 nt, Human
gaucucgaggcaccugacccg

SEQ ID NO: 453436 - RNA, 21 nt, Human
gcccccaggcccgccaggccu

SEQ ID NO: 453437 - RNA, 19 nt, Human
gcccccagggcaucgcggg

SEQ ID NO: 453438 - RNA, 24 nt, Human
gcccuggaaggcagaggcagguac

SEQ ID NO: 453439 - RNA, 20 nt, Human
gcgcccccaggcccgccagg

SEQ ID NO: 453440 - RNA, 20 nt, Human
gcugcccagggcagugggaa

SEQ ID NO: 453441 - RNA, 19 nt, Human
ggaaaacccaaaacuuccg

SEQ ID NO: 453442 - RNA, 24 nt, Human
ggaaaacccaaaacuuccgauggg

SEQ ID NO: 453443 - RNA, 18 nt, Human
ggcacagcuggggccaac

SEQ ID NO: 453444 - RNA, 20 nt, Human
ggcccuggaaggcagaggca

SEQ ID NO: 453445 - RNA, 26 nt, Human
ggccugccgccucccuccagcacccc

SEQ ID NO: 453446 - RNA, 18 nt, Human
ggcggaaaacccaaaacu

SEQ ID NO: 453447 - RNA, 20 nt, Human
gggcagugggaacgggugga

SEQ ID NO: 453448 - RNA, 21 nt, Human
gggccaacgguggcccuggaa

SEQ ID NO: 453449 - RNA, 21 nt, Human
ggggaaagcccggagccugag

SEQ ID NO: 453450 - RNA, 22 nt, Human
gggggaaagcccggagccugag

SEQ ID NO: 453451 - RNA, 22 nt, Human
guagucaaggcacagcuggggc

SEQ ID NO: 453452 - RNA, 21 nt, Human
uagcgcccccaggcccgccag

SEQ ID NO: 453453 - RNA, 22 nt, Human
uagcgcccccaggcccgccagg

SEQ ID NO: 453454 - RNA, 24 nt, Human
uccgcccauauucaagauggcugc

SEQ ID NO: 453455 - RNA, 19 nt, Human
ugacccgggccugccgccu

SEQ ID NO: 453456 - RNA, 23 nt, Human
ugaggacaagauguuacguaguc

SEQ ID NO: 453457 - RNA, 26 nt, Human
uggaaggcagaggcagguaccccugg

SEQ ID NO: 453458 - RNA, 22 nt, Human
uggcugcccagggcagugggaa

SEQ ID NO: 453459 - RNA, 21 nt, Human
uuacguagucaaggcacagcu

SEQ ID NO: 453460 - RNA, 19 nt, Human
aaagcuaugaaacguaagg

SEQ ID NO: 453461 - RNA, 18 nt, Human
aaggugacaaaaggaagg

SEQ ID NO: 453462 - RNA, 20 nt, Human
acugguaauuaauacacuaa

SEQ ID NO: 453463 - RNA, 23 nt, Human
agucaauaaaaagcaguucuacc

SEQ ID NO: 453464 - RNA, 18 nt, Human
auaaaaagcaguucuacc

SEQ ID NO: 453465 - RNA, 25 nt, Human
caauccacugguaauuaauacacua

SEQ ID NO: 453466 - RNA, 22 nt, Human
cacccaccucaggcaacaaagc

SEQ ID NO: 453467 - RNA, 24 nt, Human
caccgccacccaccucaggcaaca

SEQ ID NO: 453468 - RNA, 18 nt, Human
caccucaggcaacaaagc

SEQ ID NO: 453469 - RNA, 20 nt, Human
gagaaaauagacauuuauac

SEQ ID NO: 453470 - RNA, 18 nt, Human
gugcauuucaaggaaagc

SEQ ID NO: 453471 - RNA, 23 nt, Human
uaaaaagcaguucuaccaaucca

SEQ ID NO: 453472 - RNA, 23 nt, Human
uaacuuccaccgccacccaccuc

SEQ ID NO: 453473 - RNA, 24 nt, Human
uacccuaagggcuaacuggcgaag

SEQ ID NO: 453474 - RNA, 19 nt, Human
uagccccugacucccuuaa

SEQ ID NO: 453475 - RNA, 22 nt, Human
uauuuagagaaaauagacauuu

SEQ ID NO: 453476 - RNA, 26 nt, Human
ucccuuaacuuccaccgccacccacc

SEQ ID NO: 453477 - RNA, 20 nt, Human
ugaguauacuaaagcuauga

SEQ ID NO: 453478 - RNA, 18 nt, Human
ugcuuguaauaagaauaa

SEQ ID NO: 453479 - RNA, 21 nt, Human
uggaaagcauuuuacugaaag

SEQ ID NO: 453480 - RNA, 18 nt, Human
uuuccugaguauacuaaa

SEQ ID NO: 453481 - RNA, 23 nt, Human
aaaaaaaggcaaguuacaauaua

SEQ ID NO: 453482 - RNA, 25 nt, Human
aagugguuauaccuaacaaagaacu

SEQ ID NO: 453483 - RNA, 20 nt, Human
acguuuguuuuccccacaaa

SEQ ID NO: 453484 - RNA, 24 nt, Human
acuguguguguaguaaaugugugu

SEQ ID NO: 453485 - RNA, 18 nt, Human
agacaagaauucaaucua

SEQ ID NO: 453486 - RNA, 21 nt, Human
agauauauaauuguucacagu

SEQ ID NO: 453487 - RNA, 24 nt, Human
agccaagaggucaccggccccucc

SEQ ID NO: 453488 - RNA, 20 nt, Human
aggcaaguuacaauauagga

SEQ ID NO: 453489 - RNA, 21 nt, Human
caacccgggaggacucgccga

SEQ ID NO: 453490 - RNA, 19 nt, Human
caagaggucaccggccccu

SEQ ID NO: 453491 - RNA, 22 nt, Human
cacaggaaucuuuacauccaaa

SEQ ID NO: 453492 - RNA, 21 nt, Human
ccacgcgggcgcccgcccucc

SEQ ID NO: 453493 - RNA, 27 nt, Human
ccggcggcagcgaguggagcgcuccuu

SEQ ID NO: 453494 - RNA, 18 nt, Human
cggcggcagcgaguggag

SEQ ID NO: 453495 - RNA, 18 nt, Human
cuaaaaaaucucuagaua

SEQ ID NO: 453496 - RNA, 18 nt, Human
gugaaauaugcuagaucc

SEQ ID NO: 453497 - RNA, 19 nt, Human
uaaaugcucuuagguuuga

SEQ ID NO: 453498 - RNA, 19 nt, Human
uaacaaagaacuaguuauc

SEQ ID NO: 453499 - RNA, 25 nt, Human
uaacuuuuuuaaaaaaaggcaaguu

SEQ ID NO: 453500 - RNA, 20 nt, Human
uaagccuccgacgcggggua

SEQ ID NO: 453501 - RNA, 19 nt, Human
uaccuaacaaagaacuagu

SEQ ID NO: 453502 - RNA, 18 nt, Human
uaggaauuuuagagaauu

SEQ ID NO: 453503 - RNA, 18 nt, Human
uaggugguuuucucacau

SEQ ID NO: 453504 - RNA, 18 nt, Human
uccacagaauagugaaau

SEQ ID NO: 453505 - RNA, 22 nt, Human
ucccucugacgcccgcgggggc

SEQ ID NO: 453506 - RNA, 18 nt, Human
ucgccgucaccacgcggg

SEQ ID NO: 453507 - RNA, 24 nt, Human
ucuaacuuuuuuaaaaaaaggcaa

SEQ ID NO: 453508 - RNA, 19 nt, Human
ugaaacaacuaucaguguc

SEQ ID NO: 453509 - RNA, 20 nt, Human
ugagaaaagaugaagcagau

SEQ ID NO: 453510 - RNA, 22 nt, Human
ugccagacaggaaaaagcaguc

SEQ ID NO: 453511 - RNA, 22 nt, Human
ugcuagauccuaguacaagaca

SEQ ID NO: 453512 - RNA, 22 nt, Human
uguguguguaguaaaugugugu

SEQ ID NO: 453513 - RNA, 22 nt, Human
uguguguguaguaaaugugugu

SEQ ID NO: 453514 - RNA, 22 nt, Human
uuagagaauugaugcauuugag

SEQ ID NO: 453515 - RNA, 24 nt, Human
uucacagugguaaauuauaggugg

SEQ ID NO: 453516 - RNA, 20 nt, Human
uuguguauuguguaaaugcu

SEQ ID NO: 453517 - RNA, 26 nt, Human
aaaauucccuaaagcacacaucgguu

SEQ ID NO: 453518 - RNA, 23 nt, Human
agagaaguuggccgcggcccggg

SEQ ID NO: 453519 - RNA, 23 nt, Human
agagagggguggaagugucuggg

SEQ ID NO: 453520 - RNA, 19 nt, Human
agccuccucgcugccagag

SEQ ID NO: 453521 - RNA, 23 nt, Human
aggcgggggugacguggccagag

SEQ ID NO: 453522 - RNA, 20 nt, Human
agguggugggggugcccaag

SEQ ID NO: 453523 - RNA, 25 nt, Human
aucauuuuccuuuuuagcccuuuua

SEQ ID NO: 453524 - RNA, 21 nt, Human
caaaagacagugcacaaccac

SEQ ID NO: 453525 - RNA, 24 nt, Human
caaccacagcuaacaggugguggg

SEQ ID NO: 453526 - RNA, 26 nt, Human
caacugacuuaaagucucugaaaugc

SEQ ID NO: 453527 - RNA, 19 nt, Human
cagggcugcagaacaagca

SEQ ID NO: 453528 - RNA, 22 nt, Human
cagugcacaaccacagcuaaca

SEQ ID NO: 453529 - RNA, 21 nt, Human
cauccaacauacagauauucc

SEQ ID NO: 453530 - RNA, 19 nt, Human
cauuucugauaaauguuuc

SEQ ID NO: 453531 - RNA, 19 nt, Human
ccaagcagcuaauaaaaac

SEQ ID NO: 453532 - RNA, 20 nt, Human
ccaguccagagaaguuggcc

SEQ ID NO: 453533 - RNA, 25 nt, Human
cccaucuaccccuccaguccagagc

SEQ ID NO: 453534 - RNA, 22 nt, Human
ccccaucuaccccuccagucca

SEQ ID NO: 453535 - RNA, 22 nt, Human
ccccuccaguccagagcuacaa

SEQ ID NO: 453536 - RNA, 19 nt, Human
cccgggguuggaugcggag

SEQ ID NO: 453537 - RNA, 18 nt, Human
ccgccgccgugggccccu

SEQ ID NO: 453538 - RNA, 21 nt, Human
ccuauggcuccuggcacauuu

SEQ ID NO: 453539 - RNA, 23 nt, Human
ccuggcacauuuuacucucucua

SEQ ID NO: 453540 - RNA, 21 nt, Human
ccuuuaugaauuaaaggcggg

SEQ ID NO: 453541 - RNA, 24 nt, Human
ccuuuaugaauuaaaggcgggggu

SEQ ID NO: 453542 - RNA, 20 nt, Human
cgccgugggccccucuccgc

SEQ ID NO: 453543 - RNA, 25 nt, Human
cggcccgggguuggaugcggagcuc

SEQ ID NO: 453544 - RNA, 19 nt, Human
cgggaagccggcgccgggc

SEQ ID NO: 453545 - RNA, 21 nt, Human
cguguccgggaagccggcgcc

SEQ ID NO: 453546 - RNA, 19 nt, Human
cuccccaucuaccccucca

SEQ ID NO: 453547 - RNA, 19 nt, Human
cucuccgccgccgacgugu

SEQ ID NO: 453548 - RNA, 20 nt, Human
gacuccccaucuaccccucc

SEQ ID NO: 453549 - RNA, 22 nt, Human
gaggggaaggaggagauaaagg

SEQ ID NO: 453550 - RNA, 25 nt, Human
gaggggaaggaggagauaaagggag

SEQ ID NO: 453551 - RNA, 20 nt, Human
gcgcgggugcggggcgcugg

SEQ ID NO: 453552 - RNA, 23 nt, Human
gcgggggugacguggccagagag

SEQ ID NO: 453553 - RNA, 19 nt, Human
gcugcagaacaagcaacgg

SEQ ID NO: 453554 - RNA, 20 nt, Human
gcuggggcgcgggugcgggg

SEQ ID NO: 453555 - RNA, 23 nt, Human
ggcccgggguuggaugcggagcu

SEQ ID NO: 453556 - RNA, 24 nt, Human
ggcgcgggugcggggcgcuggcuc

SEQ ID NO: 453557 - RNA, 20 nt, Human
ggcugcagaacaagcaacgg

SEQ ID NO: 453558 - RNA, 19 nt, Human
guccagagaaguuggccgc

SEQ ID NO: 453559 - RNA, 22 nt, Human
gugggccccucuccgccgccga

SEQ ID NO: 453560 - RNA, 20 nt, Human
guguccgggaagccggcgcc

SEQ ID NO: 453561 - RNA, 20 nt, Human
uaaaauucccuaaagcacac

SEQ ID NO: 453562 - RNA, 23 nt, Human
uaacagguggugggggugcccaa

SEQ ID NO: 453563 - RNA, 24 nt, Human
uaacagguggugggggugcccaag

SEQ ID NO: 453564 - RNA, 18 nt, Human
uccccaucuaccccucca

SEQ ID NO: 453565 - RNA, 21 nt, Human
uccuuuuuagcccuuuuauua

SEQ ID NO: 453566 - RNA, 21 nt, Human
ucuaccccuccaguccagagc

SEQ ID NO: 453567 - RNA, 19 nt, Human
ucucaaacaacaagcaacu

SEQ ID NO: 453568 - RNA, 24 nt, Human
ucuuuauuuguacagaguaagaau

SEQ ID NO: 453569 - RNA, 21 nt, Human
ugaaaugcaugcaacuuaaaa

SEQ ID NO: 453570 - RNA, 18 nt, Human
ugaagaaaaucaucucau

SEQ ID NO: 453571 - RNA, 19 nt, Human
ugacuccccaucuaccccu

SEQ ID NO: 453572 - RNA, 21 nt, Human
ugacuccccaucuaccccucc

SEQ ID NO: 453573 - RNA, 19 nt, Human
uucucaaacaacaagcaac

SEQ ID NO: 453574 - RNA, 18 nt, Human
uuuuuuuuuuuuuuuuug

SEQ ID NO: 453575 - RNA, 20 nt, Human
aaacagaaguccaagaaggc

SEQ ID NO: 453576 - RNA, 18 nt, Human
acaaaacaaaacagaagu

SEQ ID NO: 453577 - RNA, 18 nt, Human
accccgaaagcugaggga

SEQ ID NO: 453578 - RNA, 22 nt, Human
accccgaaagcugagggacgga

SEQ ID NO: 453579 - RNA, 18 nt, Human
caaaacaaaacagaaguc

SEQ ID NO: 453580 - RNA, 22 nt, Human
caaaacaaaacagaaguccaag

SEQ ID NO: 453581 - RNA, 21 nt, Human
caagaaggcuaaagucuaagc

SEQ ID NO: 453582 - RNA, 21 nt, Human
caaguuaguaacaggcuucca

SEQ ID NO: 453583 - RNA, 22 nt, Human
cccaggcccgggcccgccccuu

SEQ ID NO: 453584 - RNA, 18 nt, Human
cccgcuccccacggccga

SEQ ID NO: 453585 - RNA, 22 nt, Human
cccgcuccccacggccgaccca

SEQ ID NO: 453586 - RNA, 21 nt, Human
ccuucugcugccgaaccccga

SEQ ID NO: 453587 - RNA, 21 nt, Human
cgccccgcuccccacggccga

SEQ ID NO: 453588 - RNA, 25 nt, Human
cgccccgcuccccacggccgaccca

SEQ ID NO: 453589 - RNA, 23 nt, Human
cuccccacggccgacccaucgcg

SEQ ID NO: 453590 - RNA, 21 nt, Human
gcauuucaaaaagaggguaau

SEQ ID NO: 453591 - RNA, 22 nt, Human
gcccugaagcgcuucccgcccc

SEQ ID NO: 453592 - RNA, 21 nt, Human
ggcccgggcccgccccuucug

SEQ ID NO: 453593 - RNA, 21 nt, Human
ggggucggacgacgccagcca

SEQ ID NO: 453594 - RNA, 21 nt, Human
uaaacugcaaauaacaaaaca

SEQ ID NO: 453595 - RNA, 22 nt, Human
uaaacugcaaauaacaaaacaa

SEQ ID NO: 453596 - RNA, 23 nt, Human
uacaaaaaugugacaagauaucc

SEQ ID NO: 453597 - RNA, 18 nt, Human
ucaaguauaaaaucaaag

SEQ ID NO: 453598 - RNA, 20 nt, Human
ucccaggcccgggcccgccc

SEQ ID NO: 453599 - RNA, 24 nt, Human
ucccgccccgcuccccacggccga

SEQ ID NO: 453600 - RNA, 22 nt, Human
ucucagauuauauccaguuuca

SEQ ID NO: 453601 - RNA, 21 nt, Human
ucugaaaacugaaaacaacuu

SEQ ID NO: 453602 - RNA, 25 nt, Human
ucuuccauuccuuugccaguuuuuc

SEQ ID NO: 453603 - RNA, 18 nt, Human
ugacaagauauccagaug

SEQ ID NO: 453604 - RNA, 19 nt, Human
ugcugccgaaccccgaaag

SEQ ID NO: 453605 - RNA, 24 nt, Human
ugguaagaagcagcuuguagauau

SEQ ID NO: 453606 - RNA, 21 nt, Human
ugguagguuucugauaagccu

SEQ ID NO: 453607 - RNA, 23 nt, Human
uuggcaauauugguaacuccaua

SEQ ID NO: 453608 - RNA, 22 nt, Human
aaaagaacagacugucugaaca

SEQ ID NO: 453609 - RNA, 19 nt, Human
aaacaaaccacaccacauc

SEQ ID NO: 453610 - RNA, 20 nt, Human
aaacaaagccaugccugaca

SEQ ID NO: 453611 - RNA, 27 nt, Human
aaacaagauuccucucuaaaacguaga

SEQ ID NO: 453612 - RNA, 19 nt, Human
aaacagcuccccacgaagg

SEQ ID NO: 453613 - RNA, 18 nt, Human
aacaaaaaaaccccaccc

SEQ ID NO: 453614 - RNA, 19 nt, Human
aacaaaaaaaccccacccc

SEQ ID NO: 453615 - RNA, 24 nt, Human
aacaaacaaaaaaaccccaccccg

SEQ ID NO: 453616 - RNA, 21 nt, Human
aacagcuccccacgaaggccg

SEQ ID NO: 453617 - RNA, 23 nt, Human
aaccacaccacaucauacagaua

SEQ ID NO: 453618 - RNA, 18 nt, Human
aagcagcagauacugaau

SEQ ID NO: 453619 - RNA, 23 nt, Human
aaggugacccgggggaggagucu

SEQ ID NO: 453620 - RNA, 24 nt, Human
aaucgcuugaaccugggaggugga

SEQ ID NO: 453621 - RNA, 23 nt, Human
aaucugaucauuuccaugaccaa

SEQ ID NO: 453622 - RNA, 19 nt, Human
aauggacacuuuuaaaggg

SEQ ID NO: 453623 - RNA, 18 nt, Human
aauuagccaggcauggug

SEQ ID NO: 453624 - RNA, 18 nt, Human
acacaaaaacaagauucc

SEQ ID NO: 453625 - RNA, 19 nt, Human
acagagacuccaucucaaa

SEQ ID NO: 453626 - RNA, 21 nt, Human
acagagcucuaauuuaaaaac

SEQ ID NO: 453627 - RNA, 21 nt, Human
acagccuuggacaacagaaga

SEQ ID NO: 453628 - RNA, 24 nt, Human
acagcguuuaaugcagacccaaag

SEQ ID NO: 453629 - RNA, 18 nt, Human
accccucccgacuagguc

SEQ ID NO: 453630 - RNA, 19 nt, Human
acccuguacucacacacga

SEQ ID NO: 453631 - RNA, 25 nt, Human
acuaucucccuacacagaguuacac

SEQ ID NO: 453632 - RNA, 19 nt, Human
acucacacacgaugcccac

SEQ ID NO: 453633 - RNA, 21 nt, Human
acucuauuaaaaauacaaaaa

SEQ ID NO: 453634 - RNA, 18 nt, Human
acugcacugcagccuggg

SEQ ID NO: 453635 - RNA, 24 nt, Human
acugcacugcagccugggcaacag

SEQ ID NO: 453636 - RNA, 24 nt, Human
acugcacugcagccugggcaacag

SEQ ID NO: 453637 - RNA, 22 nt, Human
agaaucgcuugaaccugggagg

SEQ ID NO: 453638 - RNA, 24 nt, Human
agauacugaauagaauuugcuuca

SEQ ID NO: 453639 - RNA, 24 nt, Human
agcacuuuggggggccgaggcggg

SEQ ID NO: 453640 - RNA, 23 nt, Human
agccaggcauggugccacaugcc

SEQ ID NO: 453641 - RNA, 21 nt, Human
agccugaccaucauggugaaa

SEQ ID NO: 453642 - RNA, 18 nt, Human
agccuuuaauuccgagca

SEQ ID NO: 453643 - RNA, 22 nt, Human
agcugacugccuagaaaaccua

SEQ ID NO: 453644 - RNA, 20 nt, Human
agcugcaugccucgcacccc

SEQ ID NO: 453645 - RNA, 26 nt, Human
aggaagccuuuaauuccgagcagguu

SEQ ID NO: 453646 - RNA, 22 nt, Human
aggcaggagaaucgcuugaacc

SEQ ID NO: 453647 - RNA, 24 nt, Human
aggcaggagaaucgcuugaaccug

SEQ ID NO: 453648 - RNA, 24 nt, Human
aggcgggcggaucacgaggucagg

SEQ ID NO: 453649 - RNA, 19 nt, Human
agguauuuaaggcuacucc

SEQ ID NO: 453650 - RNA, 20 nt, Human
agguggagguugcagugagc

SEQ ID NO: 453651 - RNA, 24 nt, Human
agguggagguugcagugagcugag

SEQ ID NO: 453652 - RNA, 20 nt, Human
aguucuagauucugaaagac

SEQ ID NO: 453653 - RNA, 23 nt, Human
auagaauuugcuucaaucauaaa

SEQ ID NO: 453654 - RNA, 23 nt, Human
augaaacagaacauguacugcuu

SEQ ID NO: 453655 - RNA, 24 nt, Human
auggcucuuucaggcaacagagaa

SEQ ID NO: 453656 - RNA, 19 nt, Human
auuuuguaccggauccuca

SEQ ID NO: 453657 - RNA, 24 nt, Human
caaaaaaaccccaccccguuaagc

SEQ ID NO: 453658 - RNA, 22 nt, Human
caaaagaagucugaauuggaug

SEQ ID NO: 453659 - RNA, 20 nt, Human
caaaagcagcagauacugaa

SEQ ID NO: 453660 - RNA, 26 nt, Human
caaaccaaacaaaccacaccacauca

SEQ ID NO: 453661 - RNA, 18 nt, Human
caacaucaaaagcagcag

SEQ ID NO: 453662 - RNA, 22 nt, Human
caacaucaaaagcagcagauac

SEQ ID NO: 453663 - RNA, 20 nt, Human
caauacaaugugacaagccc

SEQ ID NO: 453664 - RNA, 18 nt, Human
caaugugacaagcccagu

SEQ ID NO: 453665 - RNA, 25 nt, Human
cacacccguuaaucccagcacuuug

SEQ ID NO: 453666 - RNA, 23 nt, Human
caccacaugcccaugacaugagc

SEQ ID NO: 453667 - RNA, 21 nt, Human
caccccucccgacuaggucug

SEQ ID NO: 453668 - RNA, 23 nt, Human
cacggccuaaauaccgacugccc

SEQ ID NO: 453669 - RNA, 20 nt, Human
cacugcacugcagccugggc

SEQ ID NO: 453670 - RNA, 23 nt, Human
cacugcacugcagccugggcaac

SEQ ID NO: 453671 - RNA, 24 nt, Human
cacugcacugcagccugggcaaca

SEQ ID NO: 453672 - RNA, 22 nt, Human
cagacugucugaacaaacaaaa

SEQ ID NO: 453673 - RNA, 18 nt, Human
cagaucacaaaaauacaa

SEQ ID NO: 453674 - RNA, 23 nt, Human
cagaucacaaaaauacaauacaa

SEQ ID NO: 453675 - RNA, 22 nt, Human
cagcacuuuggggggccgaggc

SEQ ID NO: 453676 - RNA, 24 nt, Human
cagcacuuuggggggccgaggcgg

SEQ ID NO: 453677 - RNA, 23 nt, Human
cagcguuuaaugcagacccaaag

SEQ ID NO: 453678 - RNA, 25 nt, Human
caugaccaauuacccaugugaacaa

SEQ ID NO: 453679 - RNA, 19 nt, Human
ccaaacaaaccacaccaca

SEQ ID NO: 453680 - RNA, 21 nt, Human
ccacaccacaucauacagaua

SEQ ID NO: 453681 - RNA, 20 nt, Human
ccacugcacugcagccuggg

SEQ ID NO: 453682 - RNA, 20 nt, Human
ccacugcacugcagccuggg

SEQ ID NO: 453683 - RNA, 21 nt, Human
ccacugcacugcagccugggc

SEQ ID NO: 453684 - RNA, 22 nt, Human
ccacugcacugcagccugggca

SEQ ID NO: 453685 - RNA, 24 nt, Human
ccacugcacugcagccugggcaac

SEQ ID NO: 453686 - RNA, 22 nt, Human
ccagcugcaugccucgcacccc

SEQ ID NO: 453687 - RNA, 18 nt, Human
cccacauguucucaaggc

SEQ ID NO: 453688 - RNA, 25 nt, Human
cccccagcugcaugccucgcacccc

SEQ ID NO: 453689 - RNA, 22 nt, Human
ccccuuucucauaauuuuccua

SEQ ID NO: 453690 - RNA, 22 nt, Human
cccucugaccccaccguccagc

SEQ ID NO: 453691 - RNA, 22 nt, Human
ccuaaauaccgacugcccucug

SEQ ID NO: 453692 - RNA, 22 nt, Human
ccugacagucaaucaaggucaa

SEQ ID NO: 453693 - RNA, 19 nt, Human
ccugaccaucauggugaaa

SEQ ID NO: 453694 - RNA, 24 nt, Human
ccugaccaucauggugaaaucuca

SEQ ID NO: 453695 - RNA, 21 nt, Human
ccugggagguggagguugcag

SEQ ID NO: 453696 - RNA, 19 nt, Human
ccuguacucccagcuacuc

SEQ ID NO: 453697 - RNA, 22 nt, Human
ccuguacucccagcuacucagg

SEQ ID NO: 453698 - RNA, 25 nt, Human
ccuguacucccagcuacucaggugg

SEQ ID NO: 453699 - RNA, 22 nt, Human
ccuuuuuuuuuuuuaaaggccc

SEQ ID NO: 453700 - RNA, 23 nt, Human
cgcaccccucccgacuaggucug

SEQ ID NO: 453701 - RNA, 21 nt, Human
cgcuugaaccugggaggugga

SEQ ID NO: 453702 - RNA, 22 nt, Human
cggaucacgaggucaggaguuc

SEQ ID NO: 453703 - RNA, 24 nt, Human
cggaucacgaggucaggaguucga

SEQ ID NO: 453704 - RNA, 24 nt, Human
cggggugcggcaccggagcugggc

SEQ ID NO: 453705 - RNA, 25 nt, Human
cucacacccguuaaucccagcacuu

SEQ ID NO: 453706 - RNA, 21 nt, Human
cucauauuaacacaaacagcu

SEQ ID NO: 453707 - RNA, 25 nt, Human
cucgcaccccucccgacuaggucug

SEQ ID NO: 453708 - RNA, 25 nt, Human
cugaacaaacaaaaaaaccccaccc

SEQ ID NO: 453709 - RNA, 25 nt, Human
gaacauggacuacagcguuuaaugc

SEQ ID NO: 453710 - RNA, 19 nt, Human
gacaacagaagagaaccau

SEQ ID NO: 453711 - RNA, 18 nt, Human
gacugcccucugacccca

SEQ ID NO: 453712 - RNA, 23 nt, Human
gaggcgggcggaucacgagguca

SEQ ID NO: 453713 - RNA, 21 nt, Human
gagguugcagugagcugagau

SEQ ID NO: 453714 - RNA, 21 nt, Human
gaucacgaggucaggaguucg

SEQ ID NO: 453715 - RNA, 24 nt, Human
gaucacgaggucaggaguucgaga

SEQ ID NO: 453716 - RNA, 18 nt, Human
gcaacaucaaaagcagca

SEQ ID NO: 453717 - RNA, 23 nt, Human
gcaacaucaaaagcagcagauac

SEQ ID NO: 453718 - RNA, 21 nt, Human
gcaccggagcugggcccccag

SEQ ID NO: 453719 - RNA, 19 nt, Human
gccacaugccuguacuccc

SEQ ID NO: 453720 - RNA, 20 nt, Human
ggaaauacacauccuuuaga

SEQ ID NO: 453721 - RNA, 22 nt, Human
ggagguugcagugagcugagau

SEQ ID NO: 453722 - RNA, 23 nt, Human
ggagguugcagugagcugagaug

SEQ ID NO: 453723 - RNA, 24 nt, Human
ggagguugcagugagcugagaugg

SEQ ID NO: 453724 - RNA, 20 nt, Human
ggccgaggcgggcggaucac

SEQ ID NO: 453725 - RNA, 23 nt, Human
ggcggaucacgaggucaggaguu

SEQ ID NO: 453726 - RNA, 23 nt, Human
ggcugaggcaggagaaucgcuug

SEQ ID NO: 453727 - RNA, 23 nt, Human
gggccgaggcgggcggaucacga

SEQ ID NO: 453728 - RNA, 21 nt, Human
gggugcggcaccggagcuggg

SEQ ID NO: 453729 - RNA, 19 nt, Human
gguggagguugcagugagc

SEQ ID NO: 453730 - RNA, 19 nt, Human
gugcaaaacaguaucaaaa

SEQ ID NO: 453731 - RNA, 20 nt, Human
guggagguugcagugagcug

SEQ ID NO: 453732 - RNA, 18 nt, Human
guugcagugagcugagau

SEQ ID NO: 453733 - RNA, 26 nt, Human
uaaaaaauaaaaacucuuccucaaga

SEQ ID NO: 453734 - RNA, 22 nt, Human
uaaaaacgcaaaaaaaaggaca

SEQ ID NO: 453735 - RNA, 19 nt, Human
uaaaaacucuuccugggcu

SEQ ID NO: 453736 - RNA, 21 nt, Human
uaaaaacucuuccugggcugg

SEQ ID NO: 453737 - RNA, 21 nt, Human
uaaaaauacaaaaauuagcca

SEQ ID NO: 453738 - RNA, 19 nt, Human
uacaauacaaugugacaag

SEQ ID NO: 453739 - RNA, 19 nt, Human
uacccaugugaacaauuca

SEQ ID NO: 453740 - RNA, 23 nt, Human
uacccaugugaacaauucaaaau

SEQ ID NO: 453741 - RNA, 25 nt, Human
uagaaacaaagccaugccugacagu

SEQ ID NO: 453742 - RNA, 20 nt, Human
uauacauagaagcacauaug

SEQ ID NO: 453743 - RNA, 18 nt, Human
ucacgaggucaggaguuc

SEQ ID NO: 453744 - RNA, 24 nt, Human
ucacgaggucaggaguucgagacc

SEQ ID NO: 453745 - RNA, 23 nt, Human
ucacuaaggaaaacuauaagcuu

SEQ ID NO: 453746 - RNA, 19 nt, Human
ucagguggcugaggcagga

SEQ ID NO: 453747 - RNA, 18 nt, Human
ucccucuggguuacugac

SEQ ID NO: 453748 - RNA, 24 nt, Human
ucgcuugaaccugggagguggagg

SEQ ID NO: 453749 - RNA, 18 nt, Human
ugaaacagaacauguacu

SEQ ID NO: 453750 - RNA, 19 nt, Human
ugaaacuagaaacaaagcc

SEQ ID NO: 453751 - RNA, 19 nt, Human
ugaaacuagaaacaaagcc

SEQ ID NO: 453752 - RNA, 28 nt, Human
ugaaacuagaaacaaagccaugccugac

SEQ ID NO: 453753 - RNA, 21 nt, Human
ugaacaaacaaaaaaacccca

SEQ ID NO: 453754 - RNA, 22 nt, Human
ugaacaaacaaaaaaaccccac

SEQ ID NO: 453755 - RNA, 24 nt, Human
ugaaccugggagguggagguugca

SEQ ID NO: 453756 - RNA, 24 nt, Human
ugaggcaggagaaucgcuugaacc

SEQ ID NO: 453757 - RNA, 25 nt, Human
ugaggcaggagaaucgcuugaaccu

SEQ ID NO: 453758 - RNA, 20 nt, Human
ugcagccugggcaacagaga

SEQ ID NO: 453759 - RNA, 19 nt, Human
ugccaggaguuggaccugc

SEQ ID NO: 453760 - RNA, 20 nt, Human
ugccucgcaccccucccgac

SEQ ID NO: 453761 - RNA, 24 nt, Human
ugccuguacucccagcuacucagg

SEQ ID NO: 453762 - RNA, 23 nt, Human
uggcucacacccguuaaucccag

SEQ ID NO: 453763 - RNA, 25 nt, Human
uggcucacacccguuaaucccagca

SEQ ID NO: 453764 - RNA, 18 nt, Human
ugggagguggagguugca

SEQ ID NO: 453765 - RNA, 29 nt, Human
ugggagguggagguugcagugacaacggu

SEQ ID NO: 453766 - RNA, 24 nt, Human
ugggagguggagguugcagugagc

SEQ ID NO: 453767 - RNA, 19 nt, Human
ugggcccccagcugcaugc

SEQ ID NO: 453768 - RNA, 19 nt, Human
uggggggccgaggcgggcg

SEQ ID NO: 453769 - RNA, 24 nt, Human
uggggggccgaggcgggcggauca

SEQ ID NO: 453770 - RNA, 20 nt, Human
uguacucacacacgaugccc

SEQ ID NO: 453771 - RNA, 22 nt, Human
uguacucacacacgaugcccac

SEQ ID NO: 453772 - RNA, 23 nt, Human
uuaacacaaacagcuccccacga

SEQ ID NO: 453773 - RNA, 24 nt, Human
uuauaagugaaaaaaaagccuucu

SEQ ID NO: 453774 - RNA, 20 nt, Human
uucaaaaugacgguggaaga

SEQ ID NO: 453775 - RNA, 24 nt, Human
uugaaccugggagguggagguugc

SEQ ID NO: 453776 - RNA, 22 nt, Human
uugcagugagcugagauggcac

SEQ ID NO: 453777 - RNA, 21 nt, Human
uugccaggaguuggaccugca

SEQ ID NO: 453778 - RNA, 25 nt, Human
uuggggggccgaggcgggcggauca

SEQ ID NO: 453779 - RNA, 18 nt, Human
uugguccuggagcaggug

SEQ ID NO: 453780 - RNA, 18 nt, Human
uuuaaaggcccauuaacu

SEQ ID NO: 453781 - RNA, 21 nt, Human
uuuaagagcauucuaaaauua

SEQ ID NO: 453782 - RNA, 25 nt, Human
uuuaguuuuaguauaaccugacauu

SEQ ID NO: 453783 - RNA, 27 nt, Human
uuuauggaaauacacauccuuuagaag

SEQ ID NO: 453784 - RNA, 24 nt, Human
uuucacaagcaccaaaagaagucu

SEQ ID NO: 453785 - RNA, 20 nt, Human
uuugucuugcaacaucaaaa

SEQ ID NO: 453786 - RNA, 19 nt, Human
uuuguuuucugauuaaaaa

SEQ ID NO: 453787 - RNA, 26 nt, Human
uuuuuuuuuuaaaggcccauuaacuu

SEQ ID NO: 453788 - RNA, 19 nt, Human
aaaaugcacaucgcuguaa

SEQ ID NO: 453789 - RNA, 31 nt, Human
aagccgggaacagagcagcucagcgggagaa

SEQ ID NO: 453790 - RNA, 18 nt, Human
acacagugaaacuccauc

SEQ ID NO: 453791 - RNA, 19 nt, Human
acacagugaaacuccaucu

SEQ ID NO: 453792 - RNA, 20 nt, Human
acacagugaaacuccaucuc

SEQ ID NO: 453793 - RNA, 19 nt, Human
acagugaaacuccaucucc

SEQ ID NO: 453794 - RNA, 22 nt, Human
agauguugaauacugauugacu

SEQ ID NO: 453795 - RNA, 22 nt, Human
agccggcuccugcagcacaagg

SEQ ID NO: 453796 - RNA, 21 nt, Human
aggccaaggcgggcggaucac

SEQ ID NO: 453797 - RNA, 23 nt, Human
aggccaaggcgggcggaucacga

SEQ ID NO: 453798 - RNA, 24 nt, Human
aggcgggcggaucacgaggucagg

SEQ ID NO: 453799 - RNA, 20 nt, Human
aucacgaggucaggagaucc

SEQ ID NO: 453800 - RNA, 20 nt, Human
auguguucuggacaaagcag

SEQ ID NO: 453801 - RNA, 21 nt, Human
auuugauaguggcuccaaagu

SEQ ID NO: 453802 - RNA, 22 nt, Human
caaaaugcacaucgcuguaauc

SEQ ID NO: 453803 - RNA, 24 nt, Human
caaggcgggcggaucacgagguca

SEQ ID NO: 453804 - RNA, 20 nt, Human
caauguguucuggacaaagc

SEQ ID NO: 453805 - RNA, 24 nt, Human
cagccuccagcucccccuucuccu

SEQ ID NO: 453806 - RNA, 23 nt, Human
cccuccuaacacuccagcugcgc

SEQ ID NO: 453807 - RNA, 19 nt, Human
ccucuaagccgggaacaga

SEQ ID NO: 453808 - RNA, 24 nt, Human
ccuggcugacacagugaaacucca

SEQ ID NO: 453809 - RNA, 24 nt, Human
cgagaccauccuggcugacacagu

SEQ ID NO: 453810 - RNA, 19 nt, Human
cgcuguaaucucggcacuu

SEQ ID NO: 453811 - RNA, 24 nt, Human
cggcacuuuggaaggccaaggcgg

SEQ ID NO: 453812 - RNA, 28 nt, Human
cuccagccccacuccuaccgcucaggcc

SEQ ID NO: 453813 - RNA, 18 nt, Human
cuccccaacaaucucugg

SEQ ID NO: 453814 - RNA, 19 nt, Human
cucccccuucuccuggucc

SEQ ID NO: 453815 - RNA, 21 nt, Human
cuccuaacacuccagcugcgc

SEQ ID NO: 453816 - RNA, 22 nt, Human
cuccuaacacuccagcugcgcu

SEQ ID NO: 453817 - RNA, 23 nt, Human
cuggcugacacagugaaacucca

SEQ ID NO: 453818 - RNA, 19 nt, Human
cuguaaucucggcacuuug

SEQ ID NO: 453819 - RNA, 18 nt, Human
gcccuccuaacacuccag

SEQ ID NO: 453820 - RNA, 20 nt, Human
gcuccugcagcacaaggauu

SEQ ID NO: 453821 - RNA, 21 nt, Human
ggcggaucacgaggucaggag

SEQ ID NO: 453822 - RNA, 20 nt, Human
uaagaauaaaaaacaugcaa

SEQ ID NO: 453823 - RNA, 22 nt, Human
uaagccgggaacagagcagcuc

SEQ ID NO: 453824 - RNA, 19 nt, Human
uaauacaaguagaauaaca

SEQ ID NO: 453825 - RNA, 20 nt, Human
uaccgcucaggccgcccucc

SEQ ID NO: 453826 - RNA, 20 nt, Human
uacugcacagucccuauuua

SEQ ID NO: 453827 - RNA, 22 nt, Human
uagaauaacacucagggaauuu

SEQ ID NO: 453828 - RNA, 18 nt, Human
ucacgaggucaggagauc

SEQ ID NO: 453829 - RNA, 24 nt, Human
ucacgaggucaggagaucgagacc

SEQ ID NO: 453830 - RNA, 24 nt, Human
uccagcucccccuucuccuggucc

SEQ ID NO: 453831 - RNA, 21 nt, Human
uccccaacaaucucuggcaau

SEQ ID NO: 453832 - RNA, 18 nt, Human
ucccccuucuccuggucc

SEQ ID NO: 453833 - RNA, 24 nt, Human
uccuaccgcucaggccgcccuccu

SEQ ID NO: 453834 - RNA, 22 nt, Human
ugaaaccguugauaacauuucc

SEQ ID NO: 453835 - RNA, 24 nt, Human
ugaaaggagccggcuccugcagca

SEQ ID NO: 453836 - RNA, 22 nt, Human
ugacacagugaaacuccaucuc

SEQ ID NO: 453837 - RNA, 24 nt, Human
ugacacagugaaacuccaucuccu

SEQ ID NO: 453838 - RNA, 22 nt, Human
ugcagcacaaggauaaugauac

SEQ ID NO: 453839 - RNA, 20 nt, Human
ugcuccagccccacuccuac

SEQ ID NO: 453840 - RNA, 24 nt, Human
uggaaggccaaggcgggcggauca

SEQ ID NO: 453841 - RNA, 20 nt, Human
uggacaaagcaggaagaugu

SEQ ID NO: 453842 - RNA, 18 nt, Human
uggcaaugaucccucaga

SEQ ID NO: 453843 - RNA, 22 nt, Human
uguugccaccaccauccagagu

SEQ ID NO: 453844 - RNA, 19 nt, Human
uuucugaggaaauaacuuu

SEQ ID NO: 453845 - RNA, 21 nt, Human
aaacaggagagagaaacuugg

SEQ ID NO: 453846 - RNA, 21 nt, Human
aaacgagagacaggugccccc

SEQ ID NO: 453847 - RNA, 21 nt, Human
aaagacaccaaguaaccaaaa

SEQ ID NO: 453848 - RNA, 20 nt, Human
aacacaaaucucaaauaaau

SEQ ID NO: 453849 - RNA, 22 nt, Human
aacaccucuccccaaaucacaa

SEQ ID NO: 453850 - RNA, 18 nt, Human
aaccugcuuuccugcuuc

SEQ ID NO: 453851 - RNA, 25 nt, Human
aagcaaaaggaugaaauguguagag

SEQ ID NO: 453852 - RNA, 19 nt, Human
acaaaacaggagagagaaa

SEQ ID NO: 453853 - RNA, 18 nt, Human
acaauauuuugccaucag

SEQ ID NO: 453854 - RNA, 18 nt, Human
accaaguaaccaaaaagg

SEQ ID NO: 453855 - RNA, 24 nt, Human
agacacuggugaauaggggaaaca

SEQ ID NO: 453856 - RNA, 18 nt, Human
agcaaagcccccaaaucu

SEQ ID NO: 453857 - RNA, 25 nt, Human
agcaaagcccccaaaucucucaaaa

SEQ ID NO: 453858 - RNA, 18 nt, Human
aggcaaauaaucacaugg

SEQ ID NO: 453859 - RNA, 24 nt, Human
aucauauacaauauuuugccauca

SEQ ID NO: 453860 - RNA, 18 nt, Human
caaagcccccaaaucucu

SEQ ID NO: 453861 - RNA, 18 nt, Human
caagccuccgcuuguuca

SEQ ID NO: 453862 - RNA, 18 nt, Human
caccaaguaaccaaaaag

SEQ ID NO: 453863 - RNA, 18 nt, Human
caccccuccuccaaaaaa

SEQ ID NO: 453864 - RNA, 19 nt, Human
caccccuccuccaaaaaaa

SEQ ID NO: 453865 - RNA, 21 nt, Human
cagaacaagcgaggcaaauaa

SEQ ID NO: 453866 - RNA, 19 nt, Human
cagcacgagcccccaagcc

SEQ ID NO: 453867 - RNA, 24 nt, Human
caguacaaacaaacauuccuucgc

SEQ ID NO: 453868 - RNA, 23 nt, Human
ccaaaaaaauaaaacgagagaca

SEQ ID NO: 453869 - RNA, 21 nt, Human
ccaguccacguaagcaagcaa

SEQ ID NO: 453870 - RNA, 27 nt, Human
cccacagcacgagcccccaaggcccuc

SEQ ID NO: 453871 - RNA, 22 nt, Human
ccccccacagcacgagccccca

SEQ ID NO: 453872 - RNA, 20 nt, Human
cucugauuaucagaaagggg

SEQ ID NO: 453873 - RNA, 22 nt, Human
gacaccaaguaaccaaaaagga

SEQ ID NO: 453874 - RNA, 20 nt, Human
gagcccccaagccuccgcuu

SEQ ID NO: 453875 - RNA, 20 nt, Human
gaggaacaguuuggcacagu

SEQ ID NO: 453876 - RNA, 20 nt, Human
gaugagcacugggaauuuau

SEQ ID NO: 453877 - RNA, 24 nt, Human
gcaaagcccccaaaucucucaaaa

SEQ ID NO: 453878 - RNA, 27 nt, Human
gccucaacauaucacucaggaaaccug

SEQ ID NO: 453879 - RNA, 20 nt, Human
gcucagauggucugauuugg

SEQ ID NO: 453880 - RNA, 20 nt, Human
ggugaauaggggaaacaaaa

SEQ ID NO: 453881 - RNA, 24 nt, Human
ggugaauaggggaaacaaaaaaga

SEQ ID NO: 453882 - RNA, 21 nt, Human
uaaauaaagacaccaaguaac

SEQ ID NO: 453883 - RNA, 22 nt, Human
uaaccaaaaaggaaaaaauaau

SEQ ID NO: 453884 - RNA, 22 nt, Human
uacaauauuuugccaucagaac

SEQ ID NO: 453885 - RNA, 20 nt, Human
uaggaaagguauagucacau

SEQ ID NO: 453886 - RNA, 19 nt, Human
uauacaauauuuugccauc

SEQ ID NO: 453887 - RNA, 20 nt, Human
ucgcuccccugcacacgcuc

SEQ ID NO: 453888 - RNA, 23 nt, Human
ugacaaaggaacucuauguauaa

SEQ ID NO: 453889 - RNA, 21 nt, Human
ugccucuuaaauaaagacacc

SEQ ID NO: 453890 - RNA, 22 nt, Human
ugcuucuuaaaaggaguauaua

SEQ ID NO: 453891 - RNA, 25 nt, Human
uggcacaguacaaacaaacauuccu

SEQ ID NO: 453892 - RNA, 21 nt, Human
ugggagaaacaccucucccca

SEQ ID NO: 453893 - RNA, 18 nt, Human
uguaaagaucauugcugu

SEQ ID NO: 453894 - RNA, 22 nt, Human
uugggggauggagaaguguugu

SEQ ID NO: 453895 - RNA, 20 nt, Human
uuuccugcugccguucugga

SEQ ID NO: 453896 - RNA, 19 nt, Human
aaaggagauuaaagaacac

SEQ ID NO: 453897 - RNA, 22 nt, Human
aaccccaagacauaaagacaga

SEQ ID NO: 453898 - RNA, 20 nt, Human
aagaggaaggaagguccuga

SEQ ID NO: 453899 - RNA, 21 nt, Human
agcucuaaguccucgggcggc

SEQ ID NO: 453900 - RNA, 25 nt, Human
aggaaggaagguccugaaaguguuu

SEQ ID NO: 453901 - RNA, 20 nt, Human
caagacauaaagacagauaa

SEQ ID NO: 453902 - RNA, 24 nt, Human
cacccaagguaaggccauaccagc

SEQ ID NO: 453903 - RNA, 18 nt, Human
ccagagcucuaaguccuc

SEQ ID NO: 453904 - RNA, 21 nt, Human
cccaaccccaagacauaaaga

SEQ ID NO: 453905 - RNA, 20 nt, Human
ccccaagacauaaagacaga

SEQ ID NO: 453906 - RNA, 20 nt, Human
cccgcuccucgugcgggugu

SEQ ID NO: 453907 - RNA, 21 nt, Human
cgcccgccguccccgcuccuc

SEQ ID NO: 453908 - RNA, 19 nt, Human
cgggcggcggggagugcac

SEQ ID NO: 453909 - RNA, 22 nt, Human
cuaguauguggcuaguccuuuc

SEQ ID NO: 453910 - RNA, 18 nt, Human
gcggcggggagugcacgg

SEQ ID NO: 453911 - RNA, 19 nt, Human
ggaaggaagguccugaaag

SEQ ID NO: 453912 - RNA, 22 nt, Human
gggcggcggggagugcacgguc

SEQ ID NO: 453913 - RNA, 21 nt, Human
uaaagaacaacugcaagagga

SEQ ID NO: 453914 - RNA, 18 nt, Human
ucaagccacucuuugagc

SEQ ID NO: 453915 - RNA, 23 nt, Human
ucaguccauacagauaacccaug

SEQ ID NO: 453916 - RNA, 22 nt, Human
uccauacagauaacccauggga

SEQ ID NO: 453917 - RNA, 23 nt, Human
uggaaaaucuaaaaucauucugu

SEQ ID NO: 453918 - RNA, 19 nt, Human
ugggauauauucaagccac

SEQ ID NO: 453919 - RNA, 23 nt, Human
uguuuauucccuuuugcgcuuca

SEQ ID NO: 453920 - RNA, 19 nt, Human
uuaaagaacaacugcaaga

SEQ ID NO: 453921 - RNA, 23 nt, Human
aaacaugauguaacaauaaugac

SEQ ID NO: 453922 - RNA, 22 nt, Human
aaacauucaauuuauuuguggc

SEQ ID NO: 453923 - RNA, 23 nt, Human
aaauaagacaagguuucugcaaa

SEQ ID NO: 453924 - RNA, 18 nt, Human
aagcaaaaccagcaagca

SEQ ID NO: 453925 - RNA, 19 nt, Human
aagcaaaaccagcaagcaa

SEQ ID NO: 453926 - RNA, 21 nt, Human
aagguuucugcaaacaugaug

SEQ ID NO: 453927 - RNA, 24 nt, Human
acucaucagaugcaagcaaaacca

SEQ ID NO: 453928 - RNA, 19 nt, Human
aggaagaccacggaacuug

SEQ ID NO: 453929 - RNA, 21 nt, Human
auccauagacauuuucccauu

SEQ ID NO: 453930 - RNA, 23 nt, Human
auuuugccaauaacaaauucuga

SEQ ID NO: 453931 - RNA, 18 nt, Human
cacuaaauaagacaaggu

SEQ ID NO: 453932 - RNA, 22 nt, Human
cagaccccauaacuuugcuaca

SEQ ID NO: 453933 - RNA, 19 nt, Human
caggguuauaugcaaauag

SEQ ID NO: 453934 - RNA, 25 nt, Human
cauuuucuucuucuggccuuuuccc

SEQ ID NO: 453935 - RNA, 20 nt, Human
ccaaauucaggcuugcuuca

SEQ ID NO: 453936 - RNA, 20 nt, Human
ccagagcuucauccauagac

SEQ ID NO: 453937 - RNA, 20 nt, Human
ccagcuacuuaaaaagcaaa

SEQ ID NO: 453938 - RNA, 23 nt, Human
ccaucugccaguguuuaaauuuc

SEQ ID NO: 453939 - RNA, 22 nt, Human
cuacucaucagaugcaagcaaa

SEQ ID NO: 453940 - RNA, 23 nt, Human
cugcugaaucauuuccaggccac

SEQ ID NO: 453941 - RNA, 18 nt, Human
gaacuugucaucaucaga

SEQ ID NO: 453942 - RNA, 19 nt, Human
ggcaauccaaauucaggcu

SEQ ID NO: 453943 - RNA, 19 nt, Human
gugggucgggguguggggg

SEQ ID NO: 453944 - RNA, 23 nt, Human
ucaucagauugucuucuggcugu

SEQ ID NO: 453945 - RNA, 22 nt, Human
ucauccauagacauuuucccau

SEQ ID NO: 453946 - RNA, 23 nt, Human
uccaaaacaaagaauaggcugaa

SEQ ID NO: 453947 - RNA, 21 nt, Human
ucuccugcaggaggaugaagu

SEQ ID NO: 453948 - RNA, 23 nt, Human
ucuccugcugaaucauuuccagg

SEQ ID NO: 453949 - RNA, 19 nt, Human
ucugcaaacaugauguaac

SEQ ID NO: 453950 - RNA, 22 nt, Human
ugaaaucugaaguuuuguuucu

SEQ ID NO: 453951 - RNA, 22 nt, Human
ugcaagcaaaaccagcaagcaa

SEQ ID NO: 453952 - RNA, 22 nt, Human
uggauggugcacaauggugagu

SEQ ID NO: 453953 - RNA, 20 nt, Human
uguuucuaagaaauaauaga

SEQ ID NO: 453954 - RNA, 19 nt, Human
uucuaaggagaggaggaau

SEQ ID NO: 453955 - RNA, 24 nt, Human
uuucuuaggaagaccacggaacuu

SEQ ID NO: 453956 - RNA, 22 nt, Human
uuuguauuuucaugguuauucu

SEQ ID NO: 453957 - RNA, 22 nt, Human
uuuucaggguuauaugcaaaua

SEQ ID NO: 453958 - RNA, 19 nt, Human
aaaaaucuucccuaccucc

SEQ ID NO: 453959 - RNA, 24 nt, Human
aaaaugcugggauuacaggcauga

SEQ ID NO: 453960 - RNA, 23 nt, Human
aaacaaggugauguuugagucua

SEQ ID NO: 453961 - RNA, 19 nt, Human
aaaugcugggauuacaggc

SEQ ID NO: 453962 - RNA, 21 nt, Human
aacacuugucgaaucaaugca

SEQ ID NO: 453963 - RNA, 21 nt, Human
aagcaauucuccugucucagc

SEQ ID NO: 453964 - RNA, 21 nt, Human
acagaagauagugguuuucau

SEQ ID NO: 453965 - RNA, 19 nt, Human
acauuauuacacuuaaacc

SEQ ID NO: 453966 - RNA, 24 nt, Human
accaugccagcaaugauuccuuuu

SEQ ID NO: 453967 - RNA, 22 nt, Human
accaugcccagccuaaacuugg

SEQ ID NO: 453968 - RNA, 19 nt, Human
accuccaccuccugaaucu

SEQ ID NO: 453969 - RNA, 21 nt, Human
accuccuuuucugcccuccaa

SEQ ID NO: 453970 - RNA, 23 nt, Human
accuccuuuucugcccuccaaga

SEQ ID NO: 453971 - RNA, 25 nt, Human
acuaaaaccuccaccuccugaaucu

SEQ ID NO: 453972 - RNA, 20 nt, Human
agaugccagggcugggguga

SEQ ID NO: 453973 - RNA, 21 nt, Human
agcgcaaaaucucuuggaaac

SEQ ID NO: 453974 - RNA, 22 nt, Human
aggcuggucucaaaguccuggc

SEQ ID NO: 453975 - RNA, 19 nt, Human
agggcuggggugacccaug

SEQ ID NO: 453976 - RNA, 18 nt, Human
aggugauccaccagccuc

SEQ ID NO: 453977 - RNA, 19 nt, Human
aguagcugggacuacaggc

SEQ ID NO: 453978 - RNA, 19 nt, Human
aguagcugggacuacaggc

SEQ ID NO: 453979 - RNA, 22 nt, Human
aguagggaugagguuuugccau

SEQ ID NO: 453980 - RNA, 18 nt, Human
agucaccaugcccagccu

SEQ ID NO: 453981 - RNA, 22 nt, Human
agugcaauggugugauuucggc

SEQ ID NO: 453982 - RNA, 23 nt, Human
auccuauuucucauauguccgca

SEQ ID NO: 453983 - RNA, 21 nt, Human
augaagaccugacacacuaug

SEQ ID NO: 453984 - RNA, 24 nt, Human
augaggccacagugcaaccaggug

SEQ ID NO: 453985 - RNA, 20 nt, Human
augagguuuugccauauugg

SEQ ID NO: 453986 - RNA, 24 nt, Human
augagguuuugccauauuggucag

SEQ ID NO: 453987 - RNA, 23 nt, Human
auggucuuggggacacagcaggg

SEQ ID NO: 453988 - RNA, 25 nt, Human
auuuaaaaaucuucccuaccuccuu

SEQ ID NO: 453989 - RNA, 24 nt, Human
auuuuuguauuuuuaguagggaug

SEQ ID NO: 453990 - RNA, 24 nt, Human
caaaaugcugggauuacaggcaug

SEQ ID NO: 453991 - RNA, 24 nt, Human
cacaccaccaugcccggcuaauuu

SEQ ID NO: 453992 - RNA, 21 nt, Human
cacauuauuacacuuaaaccu

SEQ ID NO: 453993 - RNA, 19 nt, Human
caccaugcccagccuaaac

SEQ ID NO: 453994 - RNA, 24 nt, Human
caccaugcccggcuaauuuuugua

SEQ ID NO: 453995 - RNA, 22 nt, Human
cacuaugcuaaaaguccaaggc

SEQ ID NO: 453996 - RNA, 18 nt, Human
cagaagauagugguuuuc

SEQ ID NO: 453997 - RNA, 19 nt, Human
cagcagggaaugaacugac

SEQ ID NO: 453998 - RNA, 23 nt, Human
cagcagggaaugaacugacagga

SEQ ID NO: 453999 - RNA, 20 nt, Human
cagccuccugaguagcuggg

SEQ ID NO: 454000 - RNA, 20 nt, Human
cagcugggugaugccagggc

SEQ ID NO: 454001 - RNA, 19 nt, Human
caggugcucaauaaacacu

SEQ ID NO: 454002 - RNA, 23 nt, Human
caugagaucauaccuauaaaaca

SEQ ID NO: 454003 - RNA, 22 nt, Human
cauuucugucauaauuaguggg

SEQ ID NO: 454004 - RNA, 23 nt, Human
ccaaaaugcugggauuacaggca

SEQ ID NO: 454005 - RNA, 24 nt, Human
ccaaaaugcugggauuacaggcau

SEQ ID NO: 454006 - RNA, 18 nt, Human
ccacagugcaaccaggug

SEQ ID NO: 454007 - RNA, 27 nt, Human
ccaccuccugaaucuaagcaauucuuu

SEQ ID NO: 454008 - RNA, 24 nt, Human
ccacuaaaaccuccaccuccugaa

SEQ ID NO: 454009 - RNA, 21 nt, Human
ccagggcuggggugacccaug

SEQ ID NO: 454010 - RNA, 19 nt, Human
ccauauuggucaggcuggu

SEQ ID NO: 454011 - RNA, 22 nt, Human
ccauauuggucaggcuggucuc

SEQ ID NO: 454012 - RNA, 20 nt, Human
ccaugcccagccuaaacuug

SEQ ID NO: 454013 - RNA, 24 nt, Human
cccaaaaugcugggauuacaggca

SEQ ID NO: 454014 - RNA, 23 nt, Human
cccacacauuauuacacuuaaac

SEQ ID NO: 454015 - RNA, 24 nt, Human
cccacacauuauuacacuuaaacc

SEQ ID NO: 454016 - RNA, 24 nt, Human
cccacuaaaaccuccaccuccuga

SEQ ID NO: 454017 - RNA, 18 nt, Human
cccagcgcaaaaucucuu

SEQ ID NO: 454018 - RNA, 22 nt, Human
ccucaggugauccaccagccuc

SEQ ID NO: 454019 - RNA, 19 nt, Human
ccugaaaccuacaaaaaaa

SEQ ID NO: 454020 - RNA, 24 nt, Human
ccugaaaccuacaaaaaaagaaaa

SEQ ID NO: 454021 - RNA, 24 nt, Human
ccugaguagcugggacuacaggcu

SEQ ID NO: 454022 - RNA, 18 nt, Human
ccuggccucaggugaucc

SEQ ID NO: 454023 - RNA, 21 nt, Human
ccuggccucaggugauccacc

SEQ ID NO: 454024 - RNA, 23 nt, Human
ccuggccucaggugauccaccag

SEQ ID NO: 454025 - RNA, 23 nt, Human
cgccagcuaugcucuaucuccac

SEQ ID NO: 454026 - RNA, 24 nt, Human
cgcucugucgcacagucuggagug

SEQ ID NO: 454027 - RNA, 24 nt, Human
cucagccuccugaguagcugggac

SEQ ID NO: 454028 - RNA, 23 nt, Human
cugaaucuaagcaauucuccugu

SEQ ID NO: 454029 - RNA, 23 nt, Human
cugucucagccuccugaguagcu

SEQ ID NO: 454030 - RNA, 22 nt, Human
cuucaugccaugcaaaauuacu

SEQ ID NO: 454031 - RNA, 23 nt, Human
cuuccuucucgggcucugggcag

SEQ ID NO: 454032 - RNA, 23 nt, Human
cuugccucaccgcuucugcugag

SEQ ID NO: 454033 - RNA, 24 nt, Human
gacuacaggcucacaccaccaugc

SEQ ID NO: 454034 - RNA, 22 nt, Human
gagguuuugccauauuggucag

SEQ ID NO: 454035 - RNA, 25 nt, Human
gaguagcugggacuacaggcucaca

SEQ ID NO: 454036 - RNA, 18 nt, Human
gauuacaggcaugaguca

SEQ ID NO: 454037 - RNA, 21 nt, Human
gauuacaggcaugagucacca

SEQ ID NO: 454038 - RNA, 22 nt, Human
gauuacaggcaugagucaccau

SEQ ID NO: 454039 - RNA, 18 nt, Human
gcaaaauuacuuuacccc

SEQ ID NO: 454040 - RNA, 22 nt, Human
gcccggcuaauuuuuguauuuu

SEQ ID NO: 454041 - RNA, 23 nt, Human
gccucagccucccaaaaugcugg

SEQ ID NO: 454042 - RNA, 22 nt, Human
ggaaaaacaaggugauguuuga

SEQ ID NO: 454043 - RNA, 24 nt, Human
ggacacagcagggaaugaacugac

SEQ ID NO: 454044 - RNA, 24 nt, Human
ggauuacaggcaugagucaccaug

SEQ ID NO: 454045 - RNA, 24 nt, Human
gggaugagguuuugccauauuggu

SEQ ID NO: 454046 - RNA, 23 nt, Human
gggcagaugccagggcuggggug

SEQ ID NO: 454047 - RNA, 25 nt, Human
ggugauccaccagccucagccuccc

SEQ ID NO: 454048 - RNA, 19 nt, Human
guagcaagcagccucccca

SEQ ID NO: 454049 - RNA, 19 nt, Human
gucacggugcagucauucc

SEQ ID NO: 454050 - RNA, 18 nt, Human
gugggccacauuuucccu

SEQ ID NO: 454051 - RNA, 26 nt, Human
uaaaugccuacuacaugccagccaug

SEQ ID NO: 454052 - RNA, 24 nt, Human
uaauuuuuguauuuuuaguaggga

SEQ ID NO: 454053 - RNA, 18 nt, Human
uacagaagauagugguuu

SEQ ID NO: 454054 - RNA, 24 nt, Human
uacaggcaugagucaccaugccca

SEQ ID NO: 454055 - RNA, 23 nt, Human
uaguagggaugagguuuugccau

SEQ ID NO: 454056 - RNA, 24 nt, Human
uaguagggaugagguuuugccaua

SEQ ID NO: 454057 - RNA, 20 nt, Human
uaguucuggccuggagguuu

SEQ ID NO: 454058 - RNA, 22 nt, Human
uauacaguucugugccugaaac

SEQ ID NO: 454059 - RNA, 22 nt, Human
uaucagcugugugaucugggua

SEQ ID NO: 454060 - RNA, 23 nt, Human
ucaagggcuucagaaaaggacag

SEQ ID NO: 454061 - RNA, 22 nt, Human
ucaauaaacacuugucgaauca

SEQ ID NO: 454062 - RNA, 19 nt, Human
ucagaaaaggacagaacca

SEQ ID NO: 454063 - RNA, 18 nt, Human
ucagccucccaaaaugcu

SEQ ID NO: 454064 - RNA, 23 nt, Human
ucagccuccugaguagcugggac

SEQ ID NO: 454065 - RNA, 24 nt, Human
ucccaaaaugcugggauuacaggc

SEQ ID NO: 454066 - RNA, 19 nt, Human
ucccagagcuuugggagcu

SEQ ID NO: 454067 - RNA, 23 nt, Human
uccccagagcuucuugccucacc

SEQ ID NO: 454068 - RNA, 24 nt, Human
ucccuuggcaaagaggguaaaggu

SEQ ID NO: 454069 - RNA, 24 nt, Human
uccugaaucuaagcaauucuccug

SEQ ID NO: 454070 - RNA, 24 nt, Human
uccugaguagcugggacuacaggc

SEQ ID NO: 454071 - RNA, 21 nt, Human
uccuucucgggcucugggcag

SEQ ID NO: 454072 - RNA, 18 nt, Human
ucuauucugccuccacca

SEQ ID NO: 454073 - RNA, 24 nt, Human
ucuccugucucagccuccugagua

SEQ ID NO: 454074 - RNA, 24 nt, Human
ucucgcucugucgcacagucugga

SEQ ID NO: 454075 - RNA, 18 nt, Human
ucugcccuccaagacugc

SEQ ID NO: 454076 - RNA, 18 nt, Human
ucugcgcuucccucucca

SEQ ID NO: 454077 - RNA, 20 nt, Human
ucugucgcacagucuggagu

SEQ ID NO: 454078 - RNA, 23 nt, Human
ucuucugugugaaacaggaacug

SEQ ID NO: 454079 - RNA, 19 nt, Human
ugaaugaguggaaaaacaa

SEQ ID NO: 454080 - RNA, 23 nt, Human
ugacacacuaugcuaaaagucca

SEQ ID NO: 454081 - RNA, 18 nt, Human
ugagguagcuggaggauc

SEQ ID NO: 454082 - RNA, 24 nt, Human
ugagguuuugccauauuggucagg

SEQ ID NO: 454083 - RNA, 22 nt, Human
ugagucuauaguggucaagggc

SEQ ID NO: 454084 - RNA, 20 nt, Human
ugccaaauacuuguugaaca

SEQ ID NO: 454085 - RNA, 20 nt, Human
ugccagggcuggggugaccc

SEQ ID NO: 454086 - RNA, 24 nt, Human
ugccauauuggucaggcuggucuc

SEQ ID NO: 454087 - RNA, 24 nt, Human
ugcccggcuaauuuuuguauuuuu

SEQ ID NO: 454088 - RNA, 22 nt, Human
ugccugaaaccuacaaaaaaag

SEQ ID NO: 454089 - RNA, 23 nt, Human
ugccugaaaccuacaaaaaaaga

SEQ ID NO: 454090 - RNA, 23 nt, Human
ugcuaaaaguccaaggcugggug

SEQ ID NO: 454091 - RNA, 24 nt, Human
ugcugggauuacaggcaugaguca

SEQ ID NO: 454092 - RNA, 24 nt, Human
ugcuuuggugggccacauuuuccc

SEQ ID NO: 454093 - RNA, 22 nt, Human
uggaaaccucuaacugugucug

SEQ ID NO: 454094 - RNA, 23 nt, Human
uggagugcaauggugugauuucg

SEQ ID NO: 454095 - RNA, 24 nt, Human
uggagugcaauggugugauuucgg

SEQ ID NO: 454096 - RNA, 18 nt, Human
uggcaaagaggguaaagg

SEQ ID NO: 454097 - RNA, 22 nt, Human
uggcaagauaauaaauaaccuu

SEQ ID NO: 454098 - RNA, 25 nt, Human
uggcaagauaauaaauaaccuuuuu

SEQ ID NO: 454099 - RNA, 24 nt, Human
uggccucaggugauccaccagccu

SEQ ID NO: 454100 - RNA, 22 nt, Human
ugggacuacaggcucacaccac

SEQ ID NO: 454101 - RNA, 24 nt, Human
ugggacuacaggcucacaccacca

SEQ ID NO: 454102 - RNA, 18 nt, Human
ugggauuacaggcaugag

SEQ ID NO: 454103 - RNA, 22 nt, Human
ugggauuacaggcaugagucac

SEQ ID NO: 454104 - RNA, 23 nt, Human
ugggauuacaggcaugagucacc

SEQ ID NO: 454105 - RNA, 24 nt, Human
ugggauuacaggcaugagucacca

SEQ ID NO: 454106 - RNA, 25 nt, Human
ugggauuacaggcaugagucaccau

SEQ ID NO: 454107 - RNA, 23 nt, Human
ugggcagaugccagggcuggggu

SEQ ID NO: 454108 - RNA, 24 nt, Human
uggucaggcuggucucaaaguccu

SEQ ID NO: 454109 - RNA, 21 nt, Human
uggugaggggugaaugauuug

SEQ ID NO: 454110 - RNA, 22 nt, Human
uggugugauuucggcccacuaa

SEQ ID NO: 454111 - RNA, 22 nt, Human
ugucgcacagucuggagugcaa

SEQ ID NO: 454112 - RNA, 24 nt, Human
ugucucagccuccugaguagcugg

SEQ ID NO: 454113 - RNA, 18 nt, Human
uuaguagggaugagguuu

SEQ ID NO: 454114 - RNA, 18 nt, Human
uuaguagggaugagguuu

SEQ ID NO: 454115 - RNA, 24 nt, Human
uuaguagggaugagguuuugccau

SEQ ID NO: 454116 - RNA, 20 nt, Human
uuaugucugcgcuucccucu

SEQ ID NO: 454117 - RNA, 20 nt, Human
uuccuaaauaugcaagaaaa

SEQ ID NO: 454118 - RNA, 24 nt, Human
uucuggccuggagguuucugcugc

SEQ ID NO: 454119 - RNA, 18 nt, Human
uucuuuagguuaccaugc

SEQ ID NO: 454120 - RNA, 21 nt, Human
uuggauauacaguucugugcc

SEQ ID NO: 454121 - RNA, 25 nt, Human
uuguauuuuccuccucacaucccca

SEQ ID NO: 454122 - RNA, 27 nt, Human
uuuaaaaaucuucccuaccuccuuuuc

SEQ ID NO: 454123 - RNA, 18 nt, Human
uuucugcugcaucugccu

SEQ ID NO: 454124 - RNA, 18 nt, Human
uuuggcacucaggagggg

SEQ ID NO: 454125 - RNA, 21 nt, Human
uuuuuaguagggaugagguuu

SEQ ID NO: 454126 - RNA, 18 nt, Human
uuuuuguauuuuuaguag

SEQ ID NO: 454127 - RNA, 24 nt, Human
aacaugcuuauauuuuucuuaaga

SEQ ID NO: 454128 - RNA, 19 nt, Human
accauauaccaaugacauu

SEQ ID NO: 454129 - RNA, 25 nt, Human
caucaucaaauauuuugauaaugcc

SEQ ID NO: 454130 - RNA, 20 nt, Human
ccggcagcccgccuggcucc

SEQ ID NO: 454131 - RNA, 21 nt, Human
ccggucauagugcauuuuucu

SEQ ID NO: 454132 - RNA, 26 nt, Human
uaaacagccaccauauaccaaugaca

SEQ ID NO: 454133 - RNA, 22 nt, Human
uaaauuuucuagaggcuaacau

SEQ ID NO: 454134 - RNA, 20 nt, Human
uaacaugcuuauauuuuucu

SEQ ID NO: 454135 - RNA, 21 nt, Human
uacaaccuauguguggcauua

SEQ ID NO: 454136 - RNA, 21 nt, Human
uagugcauuuuucugaacuua

SEQ ID NO: 454137 - RNA, 25 nt, Human
ugauaaugccauuacaauacaaccu

SEQ ID NO: 454138 - RNA, 20 nt, Human
uuaaauuuucuagaggcuaa

SEQ ID NO: 454139 - RNA, 22 nt, Human
uucuagaggcuaacauaacaaa

SEQ ID NO: 454140 - RNA, 20 nt, Human
aaaaaaaaaaucaaagggac

SEQ ID NO: 454141 - RNA, 24 nt, Human
aaaaaaaaucaaagggacacacug

SEQ ID NO: 454142 - RNA, 21 nt, Human
aaacagccaguaaagcugugc

SEQ ID NO: 454143 - RNA, 20 nt, Human
aaagggacacacugggaauu

SEQ ID NO: 454144 - RNA, 20 nt, Human
aacaaacaccuaaaaagcaa

SEQ ID NO: 454145 - RNA, 23 nt, Human
aacaaacaccuaaaaagcacaca

SEQ ID NO: 454146 - RNA, 22 nt, Human
aacacacuaacaugcuauagga

SEQ ID NO: 454147 - RNA, 23 nt, Human
aacccagagaaccuuacaaacug

SEQ ID NO: 454148 - RNA, 20 nt, Human
aagcacacagcauauaauac

SEQ ID NO: 454149 - RNA, 20 nt, Human
aauaagugacacaucaguac

SEQ ID NO: 454150 - RNA, 22 nt, Human
acaguacuaacaaacaccuaaa

SEQ ID NO: 454151 - RNA, 18 nt, Human
acaugcaaacacacuaac

SEQ ID NO: 454152 - RNA, 20 nt, Human
acauucauaggugcccagua

SEQ ID NO: 454153 - RNA, 21 nt, Human
accugcuacucaugcugggcu

SEQ ID NO: 454154 - RNA, 25 nt, Human
acuaaaccaaagcauacaaacagcc

SEQ ID NO: 454155 - RNA, 23 nt, Human
agaaacacagagcuuguagcuug

SEQ ID NO: 454156 - RNA, 21 nt, Human
agacaagaugugaucacagga

SEQ ID NO: 454157 - RNA, 18 nt, Human
agagggugguggcggcgg

SEQ ID NO: 454158 - RNA, 20 nt, Human
agauguguucugucaucaug

SEQ ID NO: 454159 - RNA, 21 nt, Human
aggaagaaacugcagaguccc

SEQ ID NO: 454160 - RNA, 19 nt, Human
aggaccagaagacagugac

SEQ ID NO: 454161 - RNA, 20 nt, Human
aggagacuccaaaaucucaa

SEQ ID NO: 454162 - RNA, 23 nt, Human
aggccgcggccagcucacugcca

SEQ ID NO: 454163 - RNA, 20 nt, Human
aggcugaaguacugaaacug

SEQ ID NO: 454164 - RNA, 25 nt, Human
aguacagaaacacagagcuuguagc

SEQ ID NO: 454165 - RNA, 19 nt, Human
agucccuaccuaacccaga

SEQ ID NO: 454166 - RNA, 20 nt, Human
auccagaaugaucccauuca

SEQ ID NO: 454167 - RNA, 29 nt, Human
augcuggggaagggccccccagguggagu

SEQ ID NO: 454168 - RNA, 20 nt, Human
cacacagcauacauucauag

SEQ ID NO: 454169 - RNA, 19 nt, Human
cacaguacuaacaaacacc

SEQ ID NO: 454170 - RNA, 20 nt, Human
cacaguacuaacaaacaccu

SEQ ID NO: 454171 - RNA, 22 nt, Human
cacauggagcuuuuauguagag

SEQ ID NO: 454172 - RNA, 21 nt, Human
caccuaaaaagcacacagcau

SEQ ID NO: 454173 - RNA, 22 nt, Human
cacuaaaccaaagcauacaaac

SEQ ID NO: 454174 - RNA, 21 nt, Human
cagaagacagugacacaagga

SEQ ID NO: 454175 - RNA, 19 nt, Human
cagccaaggccgcggccag

SEQ ID NO: 454176 - RNA, 24 nt, Human
cagccgagacaagaugugaucaca

SEQ ID NO: 454177 - RNA, 23 nt, Human
caggaagaaacugcagagucccu

SEQ ID NO: 454178 - RNA, 22 nt, Human
cauccagaaugaucccauucau

SEQ ID NO: 454179 - RNA, 18 nt, Human
cauucauuggcuggaggu

SEQ ID NO: 454180 - RNA, 23 nt, Human
ccaaggccgcggccagcucacug

SEQ ID NO: 454181 - RNA, 21 nt, Human
ccacuagguuagccugaguau

SEQ ID NO: 454182 - RNA, 20 nt, Human
ccccgaguaggcuccaaccc

SEQ ID NO: 454183 - RNA, 23 nt, Human
cccuagauaaacaucaggaaccc

SEQ ID NO: 454184 - RNA, 22 nt, Human
ccuaacccagagaaccuuacaa

SEQ ID NO: 454185 - RNA, 19 nt, Human
ccugaaguuuuacucaugg

SEQ ID NO: 454186 - RNA, 19 nt, Human
cgcaugcagggcgcggccg

SEQ ID NO: 454187 - RNA, 18 nt, Human
cucagaagcuccugagag

SEQ ID NO: 454188 - RNA, 19 nt, Human
cuccaaccccgcccgcggc

SEQ ID NO: 454189 - RNA, 19 nt, Human
cugaaacuguggcccaugu

SEQ ID NO: 454190 - RNA, 23 nt, Human
cuguugauuccuacagccgagac

SEQ ID NO: 454191 - RNA, 19 nt, Human
cuugcgaaacaccugaagu

SEQ ID NO: 454192 - RNA, 18 nt, Human
gagggugguggcggcggg

SEQ ID NO: 454193 - RNA, 22 nt, Human
gccccgaguaggcuccaacccc

SEQ ID NO: 454194 - RNA, 21 nt, Human
gcccggcgggguuaaggccuc

SEQ ID NO: 454195 - RNA, 19 nt, Human
gcgcggccgcccggcgggg

SEQ ID NO: 454196 - RNA, 24 nt, Human
gcuccagaggcgucugacucagaa

SEQ ID NO: 454197 - RNA, 28 nt, Human
gcugaaguacugaaacuguggcccaguc

SEQ ID NO: 454198 - RNA, 19 nt, Human
guggcggcggguuagucca

SEQ ID NO: 454199 - RNA, 26 nt, Human
gugguggcggcggguuaacgacggcg

SEQ ID NO: 454200 - RNA, 24 nt, Human
uaaaagagacuucuagaaacagug

SEQ ID NO: 454201 - RNA, 23 nt, Human
uaaacaucaggaaccccacugag

SEQ ID NO: 454202 - RNA, 24 nt, Human
uaaaccaaagcauacaaacagcca

SEQ ID NO: 454203 - RNA, 19 nt, Human
uaacaaacaccuaaaaagc

SEQ ID NO: 454204 - RNA, 23 nt, Human
uacuaacaaacaccuaaaaagca

SEQ ID NO: 454205 - RNA, 19 nt, Human
uacuugagguggggaggag

SEQ ID NO: 454206 - RNA, 22 nt, Human
uagauaaacaucaggaacccca

SEQ ID NO: 454207 - RNA, 18 nt, Human
uaggcuccaaccccgccc

SEQ ID NO: 454208 - RNA, 25 nt, Human
ucacaggagacuccaaaaucucaaa

SEQ ID NO: 454209 - RNA, 22 nt, Human
ucacauggagcuuuuauguaga

SEQ ID NO: 454210 - RNA, 20 nt, Human
uccaaaaucucaaacugggc

SEQ ID NO: 454211 - RNA, 18 nt, Human
uccaggaggguuagguca

SEQ ID NO: 454212 - RNA, 18 nt, Human
uccuucuguugauuccua

SEQ ID NO: 454213 - RNA, 19 nt, Human
ugaaguacugaaacugugg

SEQ ID NO: 454214 - RNA, 19 nt, Human
ugacaggaagaaacugcag

SEQ ID NO: 454215 - RNA, 25 nt, Human
ugacaggaagaaacugcagaguccc

SEQ ID NO: 454216 - RNA, 24 nt, Human
ugagguggggaggaguacuauggu

SEQ ID NO: 454217 - RNA, 20 nt, Human
ugcagagucccuaccuaacc

SEQ ID NO: 454218 - RNA, 24 nt, Human
uggaacagagggugguggcggcgg

SEQ ID NO: 454219 - RNA, 19 nt, Human
uggaaguuccaagaucaca

SEQ ID NO: 454220 - RNA, 18 nt, Human
ugggcuggacaguggaac

SEQ ID NO: 454221 - RNA, 24 nt, Human
uguuucaggauaaauagguccagg

SEQ ID NO: 454222 - RNA, 18 nt, Human
uuaauacuuaacauaaau

SEQ ID NO: 454223 - RNA, 21 nt, Human
uuacacaccagcagguaugcu

SEQ ID NO: 454224 - RNA, 23 nt, Human
uuuaaguggauaaucauggaagu

SEQ ID NO: 454225 - RNA, 21 nt, Human
uuuuucaaaaauaaugcuuaa

SEQ ID NO: 454226 - RNA, 18 nt, Human
aacacgggggguggccag

SEQ ID NO: 454227 - RNA, 23 nt, Human
acuucaauucaucaaacuucaac

SEQ ID NO: 454228 - RNA, 21 nt, Human
agcagcugguggcagaggagg

SEQ ID NO: 454229 - RNA, 22 nt, Human
agggccuggcugggaucucugg

SEQ ID NO: 454230 - RNA, 19 nt, Human
caaaaggaaccaguuggca

SEQ ID NO: 454231 - RNA, 20 nt, Human
cgagcagcugguggcagagg

SEQ ID NO: 454232 - RNA, 18 nt, Human
cuccagggccuggcuggg

SEQ ID NO: 454233 - RNA, 20 nt, Human
cucccagggaggaaccagcu

SEQ ID NO: 454234 - RNA, 23 nt, Human
gagaacaaaaggaaccaguuggc

SEQ ID NO: 454235 - RNA, 18 nt, Human
gagcagcugguggcagag

SEQ ID NO: 454236 - RNA, 22 nt, Human
gagcagcugguggcagaggagg

SEQ ID NO: 454237 - RNA, 21 nt, Human
gaggauggggaacacgggggg

SEQ ID NO: 454238 - RNA, 24 nt, Human
ugaggauggggaacacggggggug

SEQ ID NO: 454239 - RNA, 22 nt, Human
ugcccucccagggaggaaccag

SEQ ID NO: 454240 - RNA, 24 nt, Human
uggccauccaugcuggggagagag

SEQ ID NO: 454241 - RNA, 21 nt, Human
uggcugggaucucuggucagg

SEQ ID NO: 454242 - RNA, 18 nt, Human
uggggagagaagauggca

SEQ ID NO: 454243 - RNA, 21 nt, Human
uggggagagaggguguggucc

SEQ ID NO: 454244 - RNA, 24 nt, Human
uggggagagagggugugguccguu

SEQ ID NO: 454245 - RNA, 20 nt, Human
ugguggcagaggaggcggcc

SEQ ID NO: 454246 - RNA, 18 nt, Human
acacucagccccaggcac

SEQ ID NO: 454247 - RNA, 20 nt, Human
acaguggugggguccagcac

SEQ ID NO: 454248 - RNA, 21 nt, Human
accagcccaccacccccuaca

SEQ ID NO: 454249 - RNA, 20 nt, Human
agaaaaauaaccguucccug

SEQ ID NO: 454250 - RNA, 20 nt, Human
auuuagaaaaauaaccguuc

SEQ ID NO: 454251 - RNA, 23 nt, Human
cacacucagccccaggcaccucu

SEQ ID NO: 454252 - RNA, 19 nt, Human
caccagcccaccacccccu

SEQ ID NO: 454253 - RNA, 20 nt, Human
caccagcccaccacccccua

SEQ ID NO: 454254 - RNA, 21 nt, Human
caccagcccaccacccccuac

SEQ ID NO: 454255 - RNA, 18 nt, Human
caccucucucucucucuu

SEQ ID NO: 454256 - RNA, 19 nt, Human
caccucucucucucucuug

SEQ ID NO: 454257 - RNA, 19 nt, Human
caccucugaccccugcguc

SEQ ID NO: 454258 - RNA, 19 nt, Human
cacuccuuguccaggccuc

SEQ ID NO: 454259 - RNA, 22 nt, Human
cacucuggggugcagagggacu

SEQ ID NO: 454260 - RNA, 25 nt, Human
cacucuggggugcagagggacugcu

SEQ ID NO: 454261 - RNA, 22 nt, Human
cagcugggcucccuuccugacu

SEQ ID NO: 454262 - RNA, 23 nt, Human
cagcugggcucccuuccugacuu

SEQ ID NO: 454263 - RNA, 24 nt, Human
cagcugggcucccuuccugacuuc

SEQ ID NO: 454264 - RNA, 23 nt, Human
ccacaguggugggguccagcaca

SEQ ID NO: 454265 - RNA, 24 nt, Human
ccucccgaggcucugcucuccccg

SEQ ID NO: 454266 - RNA, 24 nt, Human
ccugcccuguagccaccucugacc

SEQ ID NO: 454267 - RNA, 18 nt, Human
ccuugcucugugccaugg

SEQ ID NO: 454268 - RNA, 22 nt, Human
ccuuguccaggccucugucucc

SEQ ID NO: 454269 - RNA, 19 nt, Human
cgaaacgcugcggcacugc

SEQ ID NO: 454270 - RNA, 22 nt, Human
cugugugccccucccgaggcuc

SEQ ID NO: 454271 - RNA, 21 nt, Human
gacugcuccccaaagggacau

SEQ ID NO: 454272 - RNA, 19 nt, Human
gcaccucucucucucucuu

SEQ ID NO: 454273 - RNA, 22 nt, Human
gcacugcugggaggccucacgc

SEQ ID NO: 454274 - RNA, 18 nt, Human
ggcgcagcucugccacag

SEQ ID NO: 454275 - RNA, 20 nt, Human
uacaggugccuccucugccu

SEQ ID NO: 454276 - RNA, 22 nt, Human
ucacucuggggugcagagggac

SEQ ID NO: 454277 - RNA, 26 nt, Human
uccaggccucugucuccgggucucca

SEQ ID NO: 454278 - RNA, 22 nt, Human
uccgggcucucacacucagccc

SEQ ID NO: 454279 - RNA, 21 nt, Human
uccucugccugcccuguagcc

SEQ ID NO: 454280 - RNA, 31 nt, Human
uccucugccugcccuguagccaccucugacu

SEQ ID NO: 454281 - RNA, 19 nt, Human
uccugggccaccagcccac

SEQ ID NO: 454282 - RNA, 24 nt, Human
uccugggccaccagcccaccaccc

SEQ ID NO: 454283 - RNA, 19 nt, Human
ucuccagguggacaggggc

SEQ ID NO: 454284 - RNA, 22 nt, Human
ucuccagguggacaggggccuu

SEQ ID NO: 454285 - RNA, 23 nt, Human
ugaaaucuuccgggcucucacac

SEQ ID NO: 454286 - RNA, 18 nt, Human
ugaccccugcguccuccu

SEQ ID NO: 454287 - RNA, 19 nt, Human
ugaccccugcguccuccuc

SEQ ID NO: 454288 - RNA, 19 nt, Human
ugcagagggacugcucccc

SEQ ID NO: 454289 - RNA, 18 nt, Human
ugccaugggacuugagca

SEQ ID NO: 454290 - RNA, 18 nt, Human
ugccuccucugccugccc

SEQ ID NO: 454291 - RNA, 20 nt, Human
ugucaccagcugggcucccu

SEQ ID NO: 454292 - RNA, 20 nt, Human
uguccaggccucugucuccg

SEQ ID NO: 454293 - RNA, 21 nt, Human
ugucgcucgcuuuggggcuug

SEQ ID NO: 454294 - RNA, 19 nt, Human
ugugugccccucccgaggc

SEQ ID NO: 454295 - RNA, 20 nt, Human
ugugugccccucccgaggcu

SEQ ID NO: 454296 - RNA, 21 nt, Human
uucccguguucacuccuuguc

SEQ ID NO: 454297 - RNA, 24 nt, Human
aaacaaaaaccacaaaaaauuaua

SEQ ID NO: 454298 - RNA, 18 nt, Human
aacaaaaaccacaaaaaa

SEQ ID NO: 454299 - RNA, 22 nt, Human
aacaaaacaaaaaccacaaaaa

SEQ ID NO: 454300 - RNA, 24 nt, Human
aacagggcgagguucuuaaaggga

SEQ ID NO: 454301 - RNA, 18 nt, Human
aagggaccucgcauagga

SEQ ID NO: 454302 - RNA, 18 nt, Human
acaaaacaaaaaccacaa

SEQ ID NO: 454303 - RNA, 21 nt, Human
acaaaacaaaaaccacaaaaa

SEQ ID NO: 454304 - RNA, 26 nt, Human
acuuuaacucaacaaaacaaaaacca

SEQ ID NO: 454305 - RNA, 19 nt, Human
agacagaagcccgagaaac

SEQ ID NO: 454306 - RNA, 24 nt, Human
aggaggcucaaaucuguuucuuuu

SEQ ID NO: 454307 - RNA, 19 nt, Human
auaugcauguacccagucc

SEQ ID NO: 454308 - RNA, 21 nt, Human
caaaacaaaaaccacaaaaaa

SEQ ID NO: 454309 - RNA, 19 nt, Human
caaggaggcucaaaucugu

SEQ ID NO: 454310 - RNA, 19 nt, Human
caggagcgggagggagaag

SEQ ID NO: 454311 - RNA, 21 nt, Human
ccgccuccgcccaggagcggg

SEQ ID NO: 454312 - RNA, 23 nt, Human
cucacaauaauauacuuuaacuc

SEQ ID NO: 454313 - RNA, 23 nt, Human
cuuuaacucaacaaaacaaaaac

SEQ ID NO: 454314 - RNA, 20 nt, Human
gaacccuuggaaggagcuaa

SEQ ID NO: 454315 - RNA, 18 nt, Human
gcaaucaggugcuucacc

SEQ ID NO: 454316 - RNA, 20 nt, Human
ggcaaucaggugcuucaccc

SEQ ID NO: 454317 - RNA, 21 nt, Human
uaaaaucaaggaggcucaaau

SEQ ID NO: 454318 - RNA, 24 nt, Human
uaaagggaccucgcauaggauaga

SEQ ID NO: 454319 - RNA, 24 nt, Human
uaacucaacaaaacaaaaaccaca

SEQ ID NO: 454320 - RNA, 20 nt, Human
uagaggccaguuccgucucu

SEQ ID NO: 454321 - RNA, 19 nt, Human
uaggauagaggccaguucc

SEQ ID NO: 454322 - RNA, 22 nt, Human
uaggauagaggccaguuccguc

SEQ ID NO: 454323 - RNA, 19 nt, Human
ucgccacuuccgcuuccgc

SEQ ID NO: 454324 - RNA, 20 nt, Human
ucucucauagagacagaagc

SEQ ID NO: 454325 - RNA, 21 nt, Human
ugacaaguggcaacuugccuu

SEQ ID NO: 454326 - RNA, 22 nt, Human
ugagugcuggaggaaggaaacg

SEQ ID NO: 454327 - RNA, 20 nt, Human
ugcuggaggaaggaaacgag

SEQ ID NO: 454328 - RNA, 20 nt, Human
uuaaauaaaucucacaauaa

SEQ ID NO: 454329 - RNA, 23 nt, Human
uuucucgccacuuccgcuuccgc

SEQ ID NO: 454330 - RNA, 18 nt, Human
aaaggcagccuuuuacca

SEQ ID NO: 454331 - RNA, 20 nt, Human
aagacuuuccauugugauuu

SEQ ID NO: 454332 - RNA, 19 nt, Human
agacagauaaccuuacccu

SEQ ID NO: 454333 - RNA, 25 nt, Human
agcggccagucaggguuucucuaug

SEQ ID NO: 454334 - RNA, 21 nt, Human
agcuacaguaaaggcagccuu

SEQ ID NO: 454335 - RNA, 18 nt, Human
aguagguaaagcacaaug

SEQ ID NO: 454336 - RNA, 19 nt, Human
auaaccuuacccucaaaga

SEQ ID NO: 454337 - RNA, 25 nt, Human
caauagaaagcaaagcuccaggauc

SEQ ID NO: 454338 - RNA, 20 nt, Human
cacauacaguacaugcaacc

SEQ ID NO: 454339 - RNA, 25 nt, Human
cagacagauaaccuuacccucaaag

SEQ ID NO: 454340 - RNA, 22 nt, Human
ccaccuauuaccgucaaaagcc

SEQ ID NO: 454341 - RNA, 18 nt, Human
cccucagcggccagucag

SEQ ID NO: 454342 - RNA, 23 nt, Human
ccucaaagauucuggguucugag

SEQ ID NO: 454343 - RNA, 21 nt, Human
ccucgcgggcucgccgggcgu

SEQ ID NO: 454344 - RNA, 24 nt, Human
cugagagaacaaacuggcccagga

SEQ ID NO: 454345 - RNA, 22 nt, Human
cugccuccgcuucacuguacac

SEQ ID NO: 454346 - RNA, 23 nt, Human
gaagaugaacugcggcaaagccu

SEQ ID NO: 454347 - RNA, 24 nt, Human
gcaacccggagagacugaaaacac

SEQ ID NO: 454348 - RNA, 21 nt, Human
ggagccgcucugccuccgcuu

SEQ ID NO: 454349 - RNA, 20 nt, Human
ggcaaagccuuugucauaug

SEQ ID NO: 454350 - RNA, 25 nt, Human
gggaaaguggagagaagccgguacc

SEQ ID NO: 454351 - RNA, 23 nt, Human
gugaugcagcaggauuccaggaa

SEQ ID NO: 454352 - RNA, 24 nt, Human
uauaugaaacuaguuucacacucu

SEQ ID NO: 454353 - RNA, 22 nt, Human
ucaagacuuuccauugugauuu

SEQ ID NO: 454354 - RNA, 19 nt, Human
ugagagaacaaacuggccc

SEQ ID NO: 454355 - RNA, 19 nt, Human
ugggaaaguggagagaagc

SEQ ID NO: 454356 - RNA, 21 nt, Human
uuguuuuguuuugaaagaaua

SEQ ID NO: 454357 - RNA, 23 nt, Human
uuuuccaccacuuggacucacua

SEQ ID NO: 454358 - RNA, 23 nt, Human
ccguuuccgcuuccgggucacgc

SEQ ID NO: 454359 - RNA, 25 nt, Human
cuuucugggauccccgacuugccca

SEQ ID NO: 454360 - RNA, 18 nt, Human
ggacggacacccguuucc

SEQ ID NO: 454361 - RNA, 20 nt, Human
ggucacgcuucucuuucugg

SEQ ID NO: 454362 - RNA, 21 nt, Human
uaaaagauccugggcauccac

SEQ ID NO: 454363 - RNA, 21 nt, Human
ucgguccugucgccgccgccg

SEQ ID NO: 454364 - RNA, 18 nt, Human
uggcaggccggagcuggg

SEQ ID NO: 454365 - RNA, 23 nt, Human
ugggacggacacccguuuccgcu

SEQ ID NO: 454366 - RNA, 20 nt, Human
accuggcccucucaggacgu

SEQ ID NO: 454367 - RNA, 23 nt, Human
aggcaauagugggaguccugggg

SEQ ID NO: 454368 - RNA, 25 nt, Human
cacccugcaaaccccaggggcagcc

SEQ ID NO: 454369 - RNA, 22 nt, Human
cagagcacucccggcgaccugg

SEQ ID NO: 454370 - RNA, 18 nt, Human
cagcacccugcaaacccc

SEQ ID NO: 454371 - RNA, 21 nt, Human
cagcacccugcaaaccccagg

SEQ ID NO: 454372 - RNA, 21 nt, Human
cccccaaccugugccuggccc

SEQ ID NO: 454373 - RNA, 22 nt, Human
ccccccaaccugugccuggccc

SEQ ID NO: 454374 - RNA, 19 nt, Human
ccccucuggcacggggccu

SEQ ID NO: 454375 - RNA, 23 nt, Human
cccggcgaccuggcccucucagg

SEQ ID NO: 454376 - RNA, 21 nt, Human
ccucucaggacgugcagcugg

SEQ ID NO: 454377 - RNA, 18 nt, Human
ccugcaaaccccaggggc

SEQ ID NO: 454378 - RNA, 21 nt, Human
ccugcaaaccccaggggcagc

SEQ ID NO: 454379 - RNA, 18 nt, Human
cgugcagcugggagaaca

SEQ ID NO: 454380 - RNA, 22 nt, Human
cuccugggccaaucacagaggc

SEQ ID NO: 454381 - RNA, 22 nt, Human
cuggcguggggguggggccugg

SEQ ID NO: 454382 - RNA, 21 nt, Human
gagcacucccggcgaccuggc

SEQ ID NO: 454383 - RNA, 25 nt, Human
gcaaaccccaggggcaggggaacgc

SEQ ID NO: 454384 - RNA, 22 nt, Human
gcaauagugggaguccugggga

SEQ ID NO: 454385 - RNA, 22 nt, Human
gcacccugcaaaccccaggggc

SEQ ID NO: 454386 - RNA, 23 nt, Human
ggaggggcauggcuggcgugggg

SEQ ID NO: 454387 - RNA, 23 nt, Human
ggaguccuggggaggggcauggc

SEQ ID NO: 454388 - RNA, 18 nt, Human
ggccuaggguugggggcu

SEQ ID NO: 454389 - RNA, 22 nt, Human
gggcagccccccaaccugugcc

SEQ ID NO: 454390 - RNA, 19 nt, Human
gggcaggaugggcuggugu

SEQ ID NO: 454391 - RNA, 20 nt, Human
gggcauggcuggcguggggg

SEQ ID NO: 454392 - RNA, 23 nt, Human
guccugccggaggccagagcacu

SEQ ID NO: 454393 - RNA, 19 nt, Human
guccuggggaggggcaugg

SEQ ID NO: 454394 - RNA, 20 nt, Human
guccuggggaggggcauggc

SEQ ID NO: 454395 - RNA, 18 nt, Human
uccccugggagucagccu

SEQ ID NO: 454396 - RNA, 22 nt, Human
uccugggccaaucacagaggca

SEQ ID NO: 454397 - RNA, 26 nt, Human
ugcaaaccccaggggcagcccccccu

SEQ ID NO: 454398 - RNA, 21 nt, Human
ugcagcacccugcaaaccccu

SEQ ID NO: 454399 - RNA, 18 nt, Human
uggggguggggccuggag

SEQ ID NO: 454400 - RNA, 24 nt, Human
ugugaagaugacguggaagaugac

SEQ ID NO: 454401 - RNA, 19 nt, Human
uuccccugggagucagccu

SEQ ID NO: 454402 - RNA, 23 nt, Human
acacagcuggggagcaugccccu

SEQ ID NO: 454403 - RNA, 19 nt, Human
accccuucugccuuggaga

SEQ ID NO: 454404 - RNA, 19 nt, Human
agcucaaucuccucuggca

SEQ ID NO: 454405 - RNA, 18 nt, Human
agggaggaccuuuccugg

SEQ ID NO: 454406 - RNA, 20 nt, Human
augcugugaacgugguuucc

SEQ ID NO: 454407 - RNA, 25 nt, Human
augcuuuuuugagggaggaccuuuc

SEQ ID NO: 454408 - RNA, 21 nt, Human
auggcccagggcaccccaccg

SEQ ID NO: 454409 - RNA, 19 nt, Human
caaguucugcagcuccugc

SEQ ID NO: 454410 - RNA, 21 nt, Human
cacgugggggcuacaugaugu

SEQ ID NO: 454411 - RNA, 23 nt, Human
cacuccgccgucccauacauccc

SEQ ID NO: 454412 - RNA, 19 nt, Human
cacuggguggccccgcaac

SEQ ID NO: 454413 - RNA, 24 nt, Human
cagcaucuugaguuaugcuaacua

SEQ ID NO: 454414 - RNA, 27 nt, Human
caggaagucucucuucugcaccaguuu

SEQ ID NO: 454415 - RNA, 21 nt, Human
cagggcaccccacgugggggc

SEQ ID NO: 454416 - RNA, 20 nt, Human
cauggagaugauguccagcu

SEQ ID NO: 454417 - RNA, 27 nt, Human
ccaagacuucccggagacgcugaauuu

SEQ ID NO: 454418 - RNA, 19 nt, Human
ccccauggcccagggcacc

SEQ ID NO: 454419 - RNA, 24 nt, Human
cccggcggaccaagacuucccgga

SEQ ID NO: 454420 - RNA, 22 nt, Human
ccgugcccauggccucugguga

SEQ ID NO: 454421 - RNA, 22 nt, Human
cgcaucguccaccaggaagucu

SEQ ID NO: 454422 - RNA, 19 nt, Human
cuacacucuguacagggug

SEQ ID NO: 454423 - RNA, 20 nt, Human
cucccaguucauucacacgg

SEQ ID NO: 454424 - RNA, 18 nt, Human
cucuggggaggaccaugc

SEQ ID NO: 454425 - RNA, 19 nt, Human
gcaguuugguuuuuucuuu

SEQ ID NO: 454426 - RNA, 21 nt, Human
gcaucguccaccaggaagucu

SEQ ID NO: 454427 - RNA, 19 nt, Human
gcucuggggaggaccaugc

SEQ ID NO: 454428 - RNA, 18 nt, Human
ggcaucaugguugucucc

SEQ ID NO: 454429 - RNA, 20 nt, Human
ggggggggguccccauggcc

SEQ ID NO: 454430 - RNA, 24 nt, Human
ggguggggggggguccccauggcc

SEQ ID NO: 454431 - RNA, 21 nt, Human
guccagcugaucuuucuuugc

SEQ ID NO: 454432 - RNA, 18 nt, Human
uaaacagugagacagacu

SEQ ID NO: 454433 - RNA, 22 nt, Human
uaaagacaagaggguggggggg

SEQ ID NO: 454434 - RNA, 23 nt, Human
uacagcuagagagaaguggagau

SEQ ID NO: 454435 - RNA, 18 nt, Human
ucaaucuccucuggcauc

SEQ ID NO: 454436 - RNA, 18 nt, Human
ucagauccuggcuaugau

SEQ ID NO: 454437 - RNA, 19 nt, Human
uccaccaggaagucucucu

SEQ ID NO: 454438 - RNA, 26 nt, Human
uccauaaucaagaaaaaaaguaaaaa

SEQ ID NO: 454439 - RNA, 21 nt, Human
uccccauggcccagggcaccc

SEQ ID NO: 454440 - RNA, 24 nt, Human
ucccggagacgcugaauuuuugcc

SEQ ID NO: 454441 - RNA, 19 nt, Human
uccuggguucggcaugcuc

SEQ ID NO: 454442 - RNA, 18 nt, Human
uccuugucuucuucuugc

SEQ ID NO: 454443 - RNA, 23 nt, Human
ugaauuuuugccaucuccagcuc

SEQ ID NO: 454444 - RNA, 23 nt, Human
ugagacagacuccuggguucggc

SEQ ID NO: 454445 - RNA, 21 nt, Human
ugaggaaacugacaggcuuca

SEQ ID NO: 454446 - RNA, 23 nt, Human
ugauuguuauucuccaguggcac

SEQ ID NO: 454447 - RNA, 21 nt, Human
ugcaguuugguuuuuucuuuu

SEQ ID NO: 454448 - RNA, 19 nt, Human
ugccuucaaccccuucugc

SEQ ID NO: 454449 - RNA, 23 nt, Human
ugcuuucuucucugcccgggagc

SEQ ID NO: 454450 - RNA, 19 nt, Human
uggggaggaccaugcgacg

SEQ ID NO: 454451 - RNA, 25 nt, Human
ugggggcuauaaagacaagagggug

SEQ ID NO: 454452 - RNA, 18 nt, Human
ugugaacgugguuuccau

SEQ ID NO: 454453 - RNA, 22 nt, Human
uuaaccgcucgaccuccgcauc

SEQ ID NO: 454454 - RNA, 24 nt, Human
uuagauacagcuagagagaagugg

SEQ ID NO: 454455 - RNA, 19 nt, Human
uugguuacuuugucuagag

SEQ ID NO: 454456 - RNA, 20 nt, Human
uugguuuuuucuuuuucugg

SEQ ID NO: 454457 - RNA, 19 nt, Human
uuguggaucuucuggauua

SEQ ID NO: 454458 - RNA, 22 nt, Human
uuuccugguguuuggauaaaca

SEQ ID NO: 454459 - RNA, 23 nt, Human
uuuuaacuugauucucaggaaau

SEQ ID NO: 454460 - RNA, 22 nt, Human
uuuugagggaggaccuuuccug

SEQ ID NO: 454461 - RNA, 19 nt, Human
aaaugcaucaucugacaaa

SEQ ID NO: 454462 - RNA, 21 nt, Human
aaccuucuaaggucucaccaa

SEQ ID NO: 454463 - RNA, 18 nt, Human
aacuagugaaacaggucc

SEQ ID NO: 454464 - RNA, 21 nt, Human
aagcaguaggaaaguuuucag

SEQ ID NO: 454465 - RNA, 21 nt, Human
aaguaaacugccgaucaaggu

SEQ ID NO: 454466 - RNA, 26 nt, Human
aaucagauaaagucugauuuguauga

SEQ ID NO: 454467 - RNA, 18 nt, Human
aaucagucaucuucugau

SEQ ID NO: 454468 - RNA, 20 nt, Human
aaucagucaucuucugaugu

SEQ ID NO: 454469 - RNA, 21 nt, Human
aaucagucaucuucugaugug

SEQ ID NO: 454470 - RNA, 21 nt, Human
aaugugacuugaauuaucuug

SEQ ID NO: 454471 - RNA, 19 nt, Human
acccugaggaugugaugaa

SEQ ID NO: 454472 - RNA, 23 nt, Human
acuuugcaacugagucugagcca

SEQ ID NO: 454473 - RNA, 23 nt, Human
aggaagaagacccuccugaagga

SEQ ID NO: 454474 - RNA, 22 nt, Human
aggaauuacuuccaguaaaauc

SEQ ID NO: 454475 - RNA, 22 nt, Human
aggucaucaacuaauccaaaac

SEQ ID NO: 454476 - RNA, 22 nt, Human
caaaauccgccgcucgcugacu

SEQ ID NO: 454477 - RNA, 20 nt, Human
caaaccuucuaaggucucac

SEQ ID NO: 454478 - RNA, 20 nt, Human
cagacaugacccucaccugg

SEQ ID NO: 454479 - RNA, 26 nt, Human
cagggcucauuacucguggaauauug

SEQ ID NO: 454480 - RNA, 19 nt, Human
cauugaaauggcccauuug

SEQ ID NO: 454481 - RNA, 26 nt, Human
ccaaaaagauuggcaucaucaaaaaa

SEQ ID NO: 454482 - RNA, 20 nt, Human
ccaccuuuuuucucugcuuc

SEQ ID NO: 454483 - RNA, 20 nt, Human
cccccgcaucuccccaccaa

SEQ ID NO: 454484 - RNA, 21 nt, Human
cccccgccgccccccgccucg

SEQ ID NO: 454485 - RNA, 24 nt, Human
ccccgccgccccccgccucgacug

SEQ ID NO: 454486 - RNA, 18 nt, Human
ccgccgccccccgccucg

SEQ ID NO: 454487 - RNA, 20 nt, Human
ccgccgccccccgccucgac

SEQ ID NO: 454488 - RNA, 19 nt, Human
ccucaggcgaccacccguc

SEQ ID NO: 454489 - RNA, 18 nt, Human
ccugugaauggcucaguu

SEQ ID NO: 454490 - RNA, 20 nt, Human
ccuuuggcuuggauuucauc

SEQ ID NO: 454491 - RNA, 23 nt, Human
cgaaggucaucaacuaauccagc

SEQ ID NO: 454492 - RNA, 19 nt, Human
cucgcgcuucgccaugacu

SEQ ID NO: 454493 - RNA, 23 nt, Human
gaaaaggaauaaugugaagaaaa

SEQ ID NO: 454494 - RNA, 26 nt, Human
gaacaugguucagugaaucuaugugc

SEQ ID NO: 454495 - RNA, 24 nt, Human
gacacgacccgcccccgcaucucc

SEQ ID NO: 454496 - RNA, 18 nt, Human
gacccgcccccgcaucuc

SEQ ID NO: 454497 - RNA, 21 nt, Human
gacccgcccccgcaucucccc

SEQ ID NO: 454498 - RNA, 23 nt, Human
gacugacacucgcggcuggccgg

SEQ ID NO: 454499 - RNA, 18 nt, Human
gauaugcugaguagauuc

SEQ ID NO: 454500 - RNA, 18 nt, Human
gauuagccuuuucuugcu

SEQ ID NO: 454501 - RNA, 19 nt, Human
ggcaucaucaaaaaagucc

SEQ ID NO: 454502 - RNA, 23 nt, Human
ggcgcccccgccgccccccgccu

SEQ ID NO: 454503 - RNA, 19 nt, Human
guggaauauugcguucccc

SEQ ID NO: 454504 - RNA, 18 nt, Human
uaaaauuuccuucuugau

SEQ ID NO: 454505 - RNA, 26 nt, Human
uaaauucucuucuaaagaugaaaagc

SEQ ID NO: 454506 - RNA, 23 nt, Human
uaacuuagaacauguuuuuguuu

SEQ ID NO: 454507 - RNA, 23 nt, Human
uacaaaugcaucaucugacaaac

SEQ ID NO: 454508 - RNA, 18 nt, Human
uagaaaaugaugaaugcc

SEQ ID NO: 454509 - RNA, 26 nt, Human
uauaugauuacuggaaaaggaauaau

SEQ ID NO: 454510 - RNA, 21 nt, Human
uaugaggugaaaaggaauuac

SEQ ID NO: 454511 - RNA, 24 nt, Human
uauuauuggaucauuuccgaaggu

SEQ ID NO: 454512 - RNA, 23 nt, Human
ucaaaauccgccgcucgcugacu

SEQ ID NO: 454513 - RNA, 21 nt, Human
ucuguaacaauccgggcuguu

SEQ ID NO: 454514 - RNA, 21 nt, Human
ucuuuuccuucaacugaagca

SEQ ID NO: 454515 - RNA, 19 nt, Human
ugaaaagccauuaguuucu

SEQ ID NO: 454516 - RNA, 18 nt, Human
ugaagugucaaaauccgc

SEQ ID NO: 454517 - RNA, 21 nt, Human
ugaauucaaugauguauuggg

SEQ ID NO: 454518 - RNA, 19 nt, Human
ugagaaaauugcugcauug

SEQ ID NO: 454519 - RNA, 21 nt, Human
ugaggaagaagacccuccuga

SEQ ID NO: 454520 - RNA, 20 nt, Human
ugaggcgcccccgccgcccc

SEQ ID NO: 454521 - RNA, 18 nt, Human
ugcuugauuccucuauga

SEQ ID NO: 454522 - RNA, 23 nt, Human
uggaaauuauuugaauucaauga

SEQ ID NO: 454523 - RNA, 22 nt, Human
uggaagauggaggcugucgcug

SEQ ID NO: 454524 - RNA, 18 nt, Human
uggaauauugcguucccc

SEQ ID NO: 454525 - RNA, 19 nt, Human
uguacaaaugcaucaucug

SEQ ID NO: 454526 - RNA, 18 nt, Human
ugucaugaagugucaaaa

SEQ ID NO: 454527 - RNA, 21 nt, Human
ugugaugaaugcaauauuugg

SEQ ID NO: 454528 - RNA, 25 nt, Human
uguucaaaaucagucaucuucugau

SEQ ID NO: 454529 - RNA, 18 nt, Human
uguugacucaucaaagug

SEQ ID NO: 454530 - RNA, 22 nt, Human
uucaaauucugcacccaaauuc

SEQ ID NO: 454531 - RNA, 22 nt, Human
uucgccaugacugaggcgcccc

SEQ ID NO: 454532 - RNA, 20 nt, Human
uucuaaagaugaaaagccau

SEQ ID NO: 454533 - RNA, 19 nt, Human
uuggaucauuuccgaaggu

SEQ ID NO: 454534 - RNA, 20 nt, Human
uuuguuuuuuugcugucuuu

SEQ ID NO: 454535 - RNA, 18 nt, Human
uuuugcugucuuuguccu

SEQ ID NO: 454536 - RNA, 23 nt, Human
aaaaccagcaggcccgggggaga

SEQ ID NO: 454537 - RNA, 22 nt, Human
aacaaaauuaguuacuguaagc

SEQ ID NO: 454538 - RNA, 22 nt, Human
aacaaagaaaacaugccagccc

SEQ ID NO: 454539 - RNA, 27 nt, Human
aacagaacagagauuggaaucauacaa

SEQ ID NO: 454540 - RNA, 18 nt, Human
aacaugccagccccaucc

SEQ ID NO: 454541 - RNA, 19 nt, Human
aagacugaaaaugcuuuuc

SEQ ID NO: 454542 - RNA, 20 nt, Human
aaguccuuuuguuguagcuc

SEQ ID NO: 454543 - RNA, 23 nt, Human
aagugaaaacaauuuugcauuca

SEQ ID NO: 454544 - RNA, 20 nt, Human
aauacaguuuauuagccauu

SEQ ID NO: 454545 - RNA, 21 nt, Human
aauacauuacuuguuccugaa

SEQ ID NO: 454546 - RNA, 20 nt, Human
acagaacuacaauuaaaaca

SEQ ID NO: 454547 - RNA, 25 nt, Human
acccucugcagcucccuccgggcaa

SEQ ID NO: 454548 - RNA, 20 nt, Human
acggcggcgauggacccucu

SEQ ID NO: 454549 - RNA, 21 nt, Human
acugauuuauagaaaaauggc

SEQ ID NO: 454550 - RNA, 18 nt, Human
agaaaacaugccagcccc

SEQ ID NO: 454551 - RNA, 21 nt, Human
aggcagaggcuccggcuccuc

SEQ ID NO: 454552 - RNA, 21 nt, Human
aggcgguggccguggcggcgg

SEQ ID NO: 454553 - RNA, 22 nt, Human
aggcgguggccguggcggcggc

SEQ ID NO: 454554 - RNA, 19 nt, Human
auacaagugccaaacagaa

SEQ ID NO: 454555 - RNA, 23 nt, Human
auaucaaauguuccagcuuuaac

SEQ ID NO: 454556 - RNA, 18 nt, Human
caaaauacaagggaauac

SEQ ID NO: 454557 - RNA, 19 nt, Human
caaacagaacagagauugg

SEQ ID NO: 454558 - RNA, 20 nt, Human
caagaugaagcucaagaguc

SEQ ID NO: 454559 - RNA, 26 nt, Human
caauucccagacaaguuggaaacaac

SEQ ID NO: 454560 - RNA, 18 nt, Human
cacaauguauaucaaaau

SEQ ID NO: 454561 - RNA, 23 nt, Human
cacacaauguauaucaaaauuaa

SEQ ID NO: 454562 - RNA, 22 nt, Human
cacacuacaagacugaaaaugc

SEQ ID NO: 454563 - RNA, 22 nt, Human
cagaguccccucucuccuucuc

SEQ ID NO: 454564 - RNA, 20 nt, Human
cagcggcugcugaggcagag

SEQ ID NO: 454565 - RNA, 25 nt, Human
cagcuugucaagaaacaauuuuuaa

SEQ ID NO: 454566 - RNA, 19 nt, Human
cagcuuuaacaaaauacaa

SEQ ID NO: 454567 - RNA, 22 nt, Human
caggcccgggggagagaugggg

SEQ ID NO: 454568 - RNA, 21 nt, Human
cauuccaauuugaagggccau

SEQ ID NO: 454569 - RNA, 22 nt, Human
cauuuguacaauauauuacaua

SEQ ID NO: 454570 - RNA, 24 nt, Human
ccagccccauccaaaaaaaguaca

SEQ ID NO: 454571 - RNA, 22 nt, Human
ccauccaaaaaaaguacacaga

SEQ ID NO: 454572 - RNA, 19 nt, Human
ccccaaaaccagcaggccc

SEQ ID NO: 454573 - RNA, 22 nt, Human
ccccccaaaaccagcaggcccc

SEQ ID NO: 454574 - RNA, 27 nt, Human
cccccggacuggagguccgggccccca

SEQ ID NO: 454575 - RNA, 24 nt, Human
ccccggacuggagguccgggcccc

SEQ ID NO: 454576 - RNA, 23 nt, Human
ccccucucuccuucuccccccca

SEQ ID NO: 454577 - RNA, 24 nt, Human
cccgcggcggcgacugguaccuuu

SEQ ID NO: 454578 - RNA, 24 nt, Human
cccucucuccuucucccccccaaa

SEQ ID NO: 454579 - RNA, 25 nt, Human
cccucucuccuucucccccccaaaa

SEQ ID NO: 454580 - RNA, 23 nt, Human
ccgcucgggcucccugguugggg

SEQ ID NO: 454581 - RNA, 24 nt, Human
ccuccgggcaaagguccaggcggu

SEQ ID NO: 454582 - RNA, 21 nt, Human
ccucuaaaacaccagguucag

SEQ ID NO: 454583 - RNA, 24 nt, Human
cgaccgagcuccucacuccggacu

SEQ ID NO: 454584 - RNA, 19 nt, Human
cgauggacccucugcagcu

SEQ ID NO: 454585 - RNA, 22 nt, Human
cgcgcugcccuccagaggacgg

SEQ ID NO: 454586 - RNA, 26 nt, Human
cggcgauggacccucugcagcucccu

SEQ ID NO: 454587 - RNA, 26 nt, Human
cuccggacucgacugacgggcaaaca

SEQ ID NO: 454588 - RNA, 19 nt, Human
cucgggcucccugguuggg

SEQ ID NO: 454589 - RNA, 26 nt, Human
cugaggcagaggcuccggcuccuccu

SEQ ID NO: 454590 - RNA, 20 nt, Human
cuuuacaguccuguacaaau

SEQ ID NO: 454591 - RNA, 23 nt, Human
gaaaagaaacauuuacaagaaaa

SEQ ID NO: 454592 - RNA, 20 nt, Human
gaacagagauuggaaucaua

SEQ ID NO: 454593 - RNA, 22 nt, Human
gccauuuucuuuuuucacacaa

SEQ ID NO: 454594 - RNA, 19 nt, Human
gcccgggggagagaugggg

SEQ ID NO: 454595 - RNA, 21 nt, Human
gcgguggccguggcggcggca

SEQ ID NO: 454596 - RNA, 22 nt, Human
gcucauaauaaaauaagcaaua

SEQ ID NO: 454597 - RNA, 21 nt, Human
gcuccggcuccuccuccuccc

SEQ ID NO: 454598 - RNA, 20 nt, Human
gcuccuccuccucccgcggc

SEQ ID NO: 454599 - RNA, 24 nt, Human
ggaaaagaaacauuuacaagaaaa

SEQ ID NO: 454600 - RNA, 23 nt, Human
ggaaacaaagaaaacaugccagc

SEQ ID NO: 454601 - RNA, 26 nt, Human
gggaaaagaaacauuuacaagaaaac

SEQ ID NO: 454602 - RNA, 21 nt, Human
gggaagaagggcggcgggucc

SEQ ID NO: 454603 - RNA, 25 nt, Human
gggcccccaaucgcgcugcccucca

SEQ ID NO: 454604 - RNA, 22 nt, Human
ggggaagaagggcggcgggucc

SEQ ID NO: 454605 - RNA, 18 nt, Human
guaaaacagucuguacaa

SEQ ID NO: 454606 - RNA, 21 nt, Human
gucaauacaagugaaaacaau

SEQ ID NO: 454607 - RNA, 19 nt, Human
gugacuugcuuuaaaaaac

SEQ ID NO: 454608 - RNA, 25 nt, Human
uaaaacaguaaaacagucuguacaa

SEQ ID NO: 454609 - RNA, 24 nt, Human
uaaaauaaccaccauccuuuugag

SEQ ID NO: 454610 - RNA, 19 nt, Human
uaaaguacuguguauuaac

SEQ ID NO: 454611 - RNA, 23 nt, Human
uaaauacaagugccaaacagaac

SEQ ID NO: 454612 - RNA, 21 nt, Human
uaacauguucugacccacccc

SEQ ID NO: 454613 - RNA, 23 nt, Human
uaacauguucugacccaccccuu

SEQ ID NO: 454614 - RNA, 23 nt, Human
uacaaucuuuauacauuguuuaa

SEQ ID NO: 454615 - RNA, 23 nt, Human
uaccagacacacaauucccagac

SEQ ID NO: 454616 - RNA, 18 nt, Human
uauaaaaaaaaaguggcc

SEQ ID NO: 454617 - RNA, 21 nt, Human
uauaaaauagugcuugucuga

SEQ ID NO: 454618 - RNA, 20 nt, Human
uaucaaauguuccagcuuua

SEQ ID NO: 454619 - RNA, 23 nt, Human
uauggcauuuuauuucagagccu

SEQ ID NO: 454620 - RNA, 28 nt, Human
uauugccaggaaacaaagaaaacaugcc

SEQ ID NO: 454621 - RNA, 20 nt, Human
ucaaaauuaaaaaaaaauac

SEQ ID NO: 454622 - RNA, 26 nt, Human
uccaaaaaaaguacacagaacuacaa

SEQ ID NO: 454623 - RNA, 22 nt, Human
uccauuccaauuugaagggcca

SEQ ID NO: 454624 - RNA, 18 nt, Human
ucccccccaaaaccagca

SEQ ID NO: 454625 - RNA, 23 nt, Human
ucccuccgggcaaagguccaggc

SEQ ID NO: 454626 - RNA, 20 nt, Human
ucccugguuggggggagggg

SEQ ID NO: 454627 - RNA, 23 nt, Human
ucccugguuggggggagggggac

SEQ ID NO: 454628 - RNA, 18 nt, Human
ucgcgcugcccuccagag

SEQ ID NO: 454629 - RNA, 23 nt, Human
ucgcgcugcccuccagaggacgg

SEQ ID NO: 454630 - RNA, 23 nt, Human
ucucuacaggcagugaaaagccu

SEQ ID NO: 454631 - RNA, 23 nt, Human
ugaacacauccacaauauacaaa

SEQ ID NO: 454632 - RNA, 21 nt, Human
ugaauaaauauacacuuugaa

SEQ ID NO: 454633 - RNA, 24 nt, Human
ugacuuauacaauuaaagccaccc

SEQ ID NO: 454634 - RNA, 18 nt, Human
ugacuugcuuuaaaaaac

SEQ ID NO: 454635 - RNA, 20 nt, Human
ugaggcagaggcuccggcuc

SEQ ID NO: 454636 - RNA, 24 nt, Human
ugauuuauagaaaaauggcaaagu

SEQ ID NO: 454637 - RNA, 23 nt, Human
ugcaaagugcuuuagcaaguccu

SEQ ID NO: 454638 - RNA, 21 nt, Human
ugcaagaccuuuuagccuaau

SEQ ID NO: 454639 - RNA, 18 nt, Human
ugccaggaaacaaagaaa

SEQ ID NO: 454640 - RNA, 22 nt, Human
uggaaaaauaucaaauguuccc

SEQ ID NO: 454641 - RNA, 21 nt, Human
uggaaggccuuccaguuaccg

SEQ ID NO: 454642 - RNA, 21 nt, Human
uguaaacauguucagucuuuu

SEQ ID NO: 454643 - RNA, 18 nt, Human
uguaaaggauucugacac

SEQ ID NO: 454644 - RNA, 22 nt, Human
uguaagcacacacuacaagacu

SEQ ID NO: 454645 - RNA, 23 nt, Human
uguaagcacacacuacaagacug

SEQ ID NO: 454646 - RNA, 21 nt, Human
uguacaauaaaguacugugua

SEQ ID NO: 454647 - RNA, 18 nt, Human
uguacaauauauuacaua

SEQ ID NO: 454648 - RNA, 19 nt, Human
uuaaaacaguaaaacaguc

SEQ ID NO: 454649 - RNA, 18 nt, Human
uucaacaaaauuaguuac

SEQ ID NO: 454650 - RNA, 22 nt, Human
uucauaaauaaauggaaaaaua

SEQ ID NO: 454651 - RNA, 19 nt, Human
uucccagacaaguuggaaa

SEQ ID NO: 454652 - RNA, 21 nt, Human
uugaaugaacacauccacaaa

SEQ ID NO: 454653 - RNA, 30 nt, Human
uuuaagggaaaagaaacauuuacaagaaaa

SEQ ID NO: 454654 - RNA, 21 nt, Human
uuuaauacaguuuauuagcca

SEQ ID NO: 454655 - RNA, 22 nt, Human
uuuuauaggccuaccaccccca

SEQ ID NO: 454656 - RNA, 21 nt, Human
uuuuuuuuuuuuuaaggauuc

SEQ ID NO: 454657 - RNA, 23 nt, Human
uuuuuuuuuuuuuuuuuuuaagg

SEQ ID NO: 454658 - RNA, 18 nt, Human
aacccagaaagagugggc

SEQ ID NO: 454659 - RNA, 21 nt, Human
acggcucaguccugcagcugc

SEQ ID NO: 454660 - RNA, 18 nt, Human
acuccagcaccaccccuc

SEQ ID NO: 454661 - RNA, 24 nt, Human
agauggcugccagggagagggcag

SEQ ID NO: 454662 - RNA, 22 nt, Human
agcccauucccuuggaaaaccc

SEQ ID NO: 454663 - RNA, 23 nt, Human
aggaauagaggggacaagauggc

SEQ ID NO: 454664 - RNA, 19 nt, Human
agggggagagggccugggc

SEQ ID NO: 454665 - RNA, 24 nt, Human
auggcugccagggagagggcaguu

SEQ ID NO: 454666 - RNA, 22 nt, Human
caccuggacuccagcaccaccc

SEQ ID NO: 454667 - RNA, 20 nt, Human
cacggcucaguccugcagcu

SEQ ID NO: 454668 - RNA, 18 nt, Human
cagacacuccauccugca

SEQ ID NO: 454669 - RNA, 25 nt, Human
cagcugcagcugagacugcggcggg

SEQ ID NO: 454670 - RNA, 24 nt, Human
caggcuacccagggcugggguugg

SEQ ID NO: 454671 - RNA, 18 nt, Human
caggguagggggagaggg

SEQ ID NO: 454672 - RNA, 18 nt, Human
cccagggcugggguuggg

SEQ ID NO: 454673 - RNA, 21 nt, Human
ccccuucaggaacugucaccu

SEQ ID NO: 454674 - RNA, 23 nt, Human
ccuccgggugcacggcucagucc

SEQ ID NO: 454675 - RNA, 25 nt, Human
cgcagggugugagggaaaauuuggg

SEQ ID NO: 454676 - RNA, 19 nt, Human
cucauacacaguuuuauuu

SEQ ID NO: 454677 - RNA, 22 nt, Human
cuccggcccugauggaagaucu

SEQ ID NO: 454678 - RNA, 21 nt, Human
cugggcugggcuggagccucc

SEQ ID NO: 454679 - RNA, 25 nt, Human
cuucaggaacugucaccuggacucc

SEQ ID NO: 454680 - RNA, 26 nt, Human
gaagccccuucaggaacugucaccuu

SEQ ID NO: 454681 - RNA, 18 nt, Human
gcagugcuguggccggca

SEQ ID NO: 454682 - RNA, 21 nt, Human
ggcucaguccugcagcugcag

SEQ ID NO: 454683 - RNA, 19 nt, Human
ggcugggguugggucgcgg

SEQ ID NO: 454684 - RNA, 21 nt, Human
gggggagagggccugggcugg

SEQ ID NO: 454685 - RNA, 23 nt, Human
ggguagggggagagggccugggc

SEQ ID NO: 454686 - RNA, 20 nt, Human
uacagacacuccauccugca

SEQ ID NO: 454687 - RNA, 23 nt, Human
uacccagggcugggguugggucg

SEQ ID NO: 454688 - RNA, 18 nt, Human
uccugugguggcgggagc

SEQ ID NO: 454689 - RNA, 21 nt, Human
ugcaagcccauucccuuggaa

SEQ ID NO: 454690 - RNA, 19 nt, Human
ugccugggcucauacacag

SEQ ID NO: 454691 - RNA, 22 nt, Human
uggaaaacccagaaagaguggg

SEQ ID NO: 454692 - RNA, 20 nt, Human
uggacuccagcaccaccccu

SEQ ID NO: 454693 - RNA, 21 nt, Human
ugggguugggucgcggcacug

SEQ ID NO: 454694 - RNA, 18 nt, Human
ugguggcgggagcgcagg

SEQ ID NO: 454695 - RNA, 24 nt, Human
ugucacuuccugugguggcgggag

SEQ ID NO: 454696 - RNA, 21 nt, Human
ugugguggcgggagcgcaggg

SEQ ID NO: 454697 - RNA, 21 nt, Human
ugugguggcgggagcgcaggg

SEQ ID NO: 454698 - RNA, 22 nt, Human
ugugguggcgggagcgcagggu

SEQ ID NO: 454699 - RNA, 21 nt, Human
uugaggcacuuagggauuuac

SEQ ID NO: 454700 - RNA, 23 nt, Human
uuucccagaagccccuucaggaa

SEQ ID NO: 454701 - RNA, 26 nt, Human
uuugucgccuccuccgggggucuccu

SEQ ID NO: 454702 - RNA, 21 nt, Human
uuuuacagacacuccauccug

SEQ ID NO: 454703 - RNA, 20 nt, Human
uuuuuuuuuuuuuugccugg

SEQ ID NO: 454704 - RNA, 18 nt, Human
uuuuuuuuuuuuuuuuug

SEQ ID NO: 454705 - RNA, 21 nt, Human
uuuuuuuuuuuuuuuuugccu

SEQ ID NO: 454706 - RNA, 24 nt, Human
uuuuuuuuuuuuuuuuugccuggg

SEQ ID NO: 454707 - RNA, 24 nt, Human
uuuuuuuuuuuuuuuuuugccugg

SEQ ID NO: 454708 - RNA, 24 nt, Human
aaaaucaguaguaacuuuagacaa

SEQ ID NO: 454709 - RNA, 21 nt, Human
aaacaguaagcuuucccaaag

SEQ ID NO: 454710 - RNA, 22 nt, Human
aagaugaagcuggggaaacuug

SEQ ID NO: 454711 - RNA, 22 nt, Human
acuugaaaagauauucuaaagg

SEQ ID NO: 454712 - RNA, 23 nt, Human
augauaauagaaagcaaccagcc

SEQ ID NO: 454713 - RNA, 25 nt, Human
augauaauagaaagcaaccagccaa

SEQ ID NO: 454714 - RNA, 21 nt, Human
ccaaagaugaagcuggggaaa

SEQ ID NO: 454715 - RNA, 22 nt, Human
ccaacauagcuaggucuucucu

SEQ ID NO: 454716 - RNA, 22 nt, Human
ccggcgcggcgcugggcgcucg

SEQ ID NO: 454717 - RNA, 23 nt, Human
gauaauagaaagcaaccagccaa

SEQ ID NO: 454718 - RNA, 25 nt, Human
gcacauuauuacuuuaucaaaaaca

SEQ ID NO: 454719 - RNA, 21 nt, Human
gcgcggcgcugggcgcucggg

SEQ ID NO: 454720 - RNA, 20 nt, Human
ggcgcucgggcucucaggau

SEQ ID NO: 454721 - RNA, 22 nt, Human
uaccaugauaauagaaagcaac

SEQ ID NO: 454722 - RNA, 23 nt, Human
uaccaugauaauagaaagcaacc

SEQ ID NO: 454723 - RNA, 25 nt, Human
uaccaugauaauagaaagcaaccag

SEQ ID NO: 454724 - RNA, 18 nt, Human
uagcaguaguuaccuuaa

SEQ ID NO: 454725 - RNA, 23 nt, Human
uagcuaggucuucucuuaaauuu

SEQ ID NO: 454726 - RNA, 20 nt, Human
uauaacugauaccuucugaa

SEQ ID NO: 454727 - RNA, 24 nt, Human
ucaugaguauuuacauuuuucaua

SEQ ID NO: 454728 - RNA, 23 nt, Human
ucugaaauguuucaugcuuuuaa

SEQ ID NO: 454729 - RNA, 21 nt, Human
ugaagcuggggaaacuugaaa

SEQ ID NO: 454730 - RNA, 23 nt, Human
uguggauacuaaaagcuuguaua

SEQ ID NO: 454731 - RNA, 26 nt, Human
uuuuuuuuuuuuuuuuuuucacaaaa

SEQ ID NO: 454732 - RNA, 18 nt, Human
aaaacccccaagcugcag

SEQ ID NO: 454733 - RNA, 25 nt, Human
aaacagcaauacaaagaaaaaaacc

SEQ ID NO: 454734 - RNA, 19 nt, Human
aaagaaaaaaacccccaag

SEQ ID NO: 454735 - RNA, 24 nt, Human
acagcaauacaaagaaaaaaaccc

SEQ ID NO: 454736 - RNA, 18 nt, Human
acgggguccggcuggcgg

SEQ ID NO: 454737 - RNA, 21 nt, Human
auacaaagaaaaaaaccccca

SEQ ID NO: 454738 - RNA, 19 nt, Human
cagcaauacaaagaaaaaa

SEQ ID NO: 454739 - RNA, 22 nt, Human
cagcaauacaaagaaaaaaacc

SEQ ID NO: 454740 - RNA, 27 nt, Human
cagcaauacaaagaaaaaaacccccaa

SEQ ID NO: 454741 - RNA, 23 nt, Human
cccaagcugcaguguguacacaa

SEQ ID NO: 454742 - RNA, 23 nt, Human
gcaauacaaagaaaaaaaccccc

SEQ ID NO: 454743 - RNA, 24 nt, Human
ggaagaccacaaagcucacaaagg

SEQ ID NO: 454744 - RNA, 18 nt, Human
ggcaggugcggggguggu

SEQ ID NO: 454745 - RNA, 26 nt, Human
gguggugcugugcuuccccggcgucc

SEQ ID NO: 454746 - RNA, 24 nt, Human
uacaaagaaaaaaacccccaagcu

SEQ ID NO: 454747 - RNA, 20 nt, Human
uacacaaugucacuuuccag

SEQ ID NO: 454748 - RNA, 21 nt, Human
uuccugaugggaagaccacaa

SEQ ID NO: 454749 - RNA, 24 nt, Human
aaaaauuaucuuaagaaaacuaac

SEQ ID NO: 454750 - RNA, 19 nt, Human
aaaacaagguaucucaaac

SEQ ID NO: 454751 - RNA, 18 nt, Human
aaaauccuaacauuugag

SEQ ID NO: 454752 - RNA, 19 nt, Human
aaacgaaacuaacaaauau

SEQ ID NO: 454753 - RNA, 24 nt, Human
aagaaaacuaacucaaaguucagc

SEQ ID NO: 454754 - RNA, 21 nt, Human
aagguaucucaaacucugaaa

SEQ ID NO: 454755 - RNA, 21 nt, Human
acacugcagcugggacccucc

SEQ ID NO: 454756 - RNA, 24 nt, Human
accuuagucucccuggaucccugg

SEQ ID NO: 454757 - RNA, 19 nt, Human
acucugaaagacacugaga

SEQ ID NO: 454758 - RNA, 24 nt, Human
acucugaaagacacugagacuuca

SEQ ID NO: 454759 - RNA, 19 nt, Human
agacuuagauuaucuggca

SEQ ID NO: 454760 - RNA, 24 nt, Human
agcaaauuuuggcuuauaauugac

SEQ ID NO: 454761 - RNA, 22 nt, Human
agcugugucagguggcagugcc

SEQ ID NO: 454762 - RNA, 21 nt, Human
agggagcucccucuggccccc

SEQ ID NO: 454763 - RNA, 18 nt, Human
auacuagauuucuuuugc

SEQ ID NO: 454764 - RNA, 18 nt, Human
auccuuucagguccugcu

SEQ ID NO: 454765 - RNA, 21 nt, Human
augacuauuccuuuucuuuuu

SEQ ID NO: 454766 - RNA, 24 nt, Human
cacacaugcgcugaucaguagggc

SEQ ID NO: 454767 - RNA, 18 nt, Human
caccagaaaguuugaugc

SEQ ID NO: 454768 - RNA, 24 nt, Human
cacugagacuucagaaaauccuaa

SEQ ID NO: 454769 - RNA, 23 nt, Human
cacugaguuuucugguaauuuua

SEQ ID NO: 454770 - RNA, 24 nt, Human
cagaaaguuugaugcaggcauugg

SEQ ID NO: 454771 - RNA, 21 nt, Human
caguaaaucuccacugaguuu

SEQ ID NO: 454772 - RNA, 22 nt, Human
ccagugccccauaaaucaugag

SEQ ID NO: 454773 - RNA, 20 nt, Human
cccgcaugcacacugcagcu

SEQ ID NO: 454774 - RNA, 19 nt, Human
ccuaggaugcagugugauc

SEQ ID NO: 454775 - RNA, 18 nt, Human
cgaaacuaacaaauauug

SEQ ID NO: 454776 - RNA, 21 nt, Human
cuauuucuagcaucugagauc

SEQ ID NO: 454777 - RNA, 23 nt, Human
cucggagcaugagcuggacaauc

SEQ ID NO: 454778 - RNA, 25 nt, Human
cugcagcugggacccuccucggagc

SEQ ID NO: 454779 - RNA, 20 nt, Human
cuggaugcuagacauuguac

SEQ ID NO: 454780 - RNA, 21 nt, Human
gacuucagaaaauccuaacau

SEQ ID NO: 454781 - RNA, 20 nt, Human
gccaugguaacagguauccu

SEQ ID NO: 454782 - RNA, 24 nt, Human
gccuguuuuuuauuuccuauuggc

SEQ ID NO: 454783 - RNA, 19 nt, Human
ggaaaaguuuuuaaaucaa

SEQ ID NO: 454784 - RNA, 20 nt, Human
ggaacaggcccuacccuagg

SEQ ID NO: 454785 - RNA, 18 nt, Human
ggagcucccucuggcccu

SEQ ID NO: 454786 - RNA, 18 nt, Human
uaacucaaaguucagcaa

SEQ ID NO: 454787 - RNA, 24 nt, Human
uaagaaaacuaacucaaaguucag

SEQ ID NO: 454788 - RNA, 25 nt, Human
uaauaugaaaaauuaucuuaagaaa

SEQ ID NO: 454789 - RNA, 19 nt, Human
uaauguugugugccuguuu

SEQ ID NO: 454790 - RNA, 20 nt, Human
uacccagugccccauaaauc

SEQ ID NO: 454791 - RNA, 21 nt, Human
uacccuagguccugugucagc

SEQ ID NO: 454792 - RNA, 24 nt, Human
uacuuuuaaauuaaaaauuagaaa

SEQ ID NO: 454793 - RNA, 24 nt, Human
uaggguggugggaacaggcccuac

SEQ ID NO: 454794 - RNA, 22 nt, Human
uaggguuucucacuuguguuuu

SEQ ID NO: 454795 - RNA, 19 nt, Human
uauuuuuuuccuuuccuag

SEQ ID NO: 454796 - RNA, 18 nt, Human
ucaugccucucuacugga

SEQ ID NO: 454797 - RNA, 22 nt, Human
uccuuucagguccugcuguaua

SEQ ID NO: 454798 - RNA, 23 nt, Human
ugaccaaaauuuuaaaaaacugg

SEQ ID NO: 454799 - RNA, 22 nt, Human
ugaccgcgaguuccggccaccu

SEQ ID NO: 454800 - RNA, 21 nt, Human
ugagauccaggucaguuguga

SEQ ID NO: 454801 - RNA, 18 nt, Human
ugaggagcacagagcaga

SEQ ID NO: 454802 - RNA, 19 nt, Human
ugaugcaggcauuggaaga

SEQ ID NO: 454803 - RNA, 24 nt, Human
ugcaauguauuuuccugcuuuuca

SEQ ID NO: 454804 - RNA, 25 nt, Human
uggaaaaguuuuuaaaucaaccacu

SEQ ID NO: 454805 - RNA, 24 nt, Human
ugggacagaacccuacuuuuugua

SEQ ID NO: 454806 - RNA, 26 nt, Human
ugguauuugguggcuugcaaaccguu

SEQ ID NO: 454807 - RNA, 19 nt, Human
uguacauuuuaccuucuug

SEQ ID NO: 454808 - RNA, 18 nt, Human
ugucagagacacauggga

SEQ ID NO: 454809 - RNA, 20 nt, Human
ugugucacuagagguguuuu

SEQ ID NO: 454810 - RNA, 19 nt, Human
uguuucuccaucuuagcca

SEQ ID NO: 454811 - RNA, 23 nt, Human
uguuuuaucccuccaggagacua

SEQ ID NO: 454812 - RNA, 20 nt, Human
uguuuucuacccagugcccc

SEQ ID NO: 454813 - RNA, 24 nt, Human
uuaaaauaaaaaauagaaguuuuu

SEQ ID NO: 454814 - RNA, 21 nt, Human
uucauccuggcuuguauguuu

SEQ ID NO: 454815 - RNA, 20 nt, Human
uucugguaauuuuacaaaaa

SEQ ID NO: 454816 - RNA, 23 nt, Human
uucuucuuggaaaaguuuuuaaa

SEQ ID NO: 454817 - RNA, 23 nt, Human
uuucugaauuuggaaucaucaug

SEQ ID NO: 454818 - RNA, 19 nt, Human
uuuucaguaaaucuccacu

SEQ ID NO: 454819 - RNA, 23 nt, Human
uuuucaugccucucuacuggaug

SEQ ID NO: 454820 - RNA, 18 nt, Human
uuuuuuuuuuuuuuuuug

SEQ ID NO: 454821 - RNA, 18 nt, Human
uuuuuuuuuuuuuuuuug

SEQ ID NO: 454822 - RNA, 24 nt, Human
uuuuuuuuuuuuuuuuuuuccaag

SEQ ID NO: 454823 - RNA, 23 nt, Human
aaagagaaagagacagaggaagg

SEQ ID NO: 454824 - RNA, 19 nt, Human
aaagugagaacucccagau

SEQ ID NO: 454825 - RNA, 20 nt, Human
acaauuuaguccaccagaaa

SEQ ID NO: 454826 - RNA, 21 nt, Human
acagaggaaggcacaaugaua

SEQ ID NO: 454827 - RNA, 22 nt, Human
acuuucaaacaaaauuuuuaca

SEQ ID NO: 454828 - RNA, 27 nt, Human
caaagcacccacagaaagaagggaguc

SEQ ID NO: 454829 - RNA, 18 nt, Human
cacccacagaaagaauaa

SEQ ID NO: 454830 - RNA, 24 nt, Human
cagaaagaauaagugcaaaaggua

SEQ ID NO: 454831 - RNA, 20 nt, Human
cagccgagcuccccuccccu

SEQ ID NO: 454832 - RNA, 28 nt, Human
cagccgagcuccccuccccuacccaaac

SEQ ID NO: 454833 - RNA, 23 nt, Human
caggagaugcugcucccuccucc

SEQ ID NO: 454834 - RNA, 21 nt, Human
ccacagaaagaauaagugcaa

SEQ ID NO: 454835 - RNA, 18 nt, Human
cccuccauccaaagaaac

SEQ ID NO: 454836 - RNA, 19 nt, Human
ccuacccaaaccccaacac

SEQ ID NO: 454837 - RNA, 21 nt, Human
ccuacccaaaccccaacacca

SEQ ID NO: 454838 - RNA, 24 nt, Human
ccuccauccaaagaaacauaucca

SEQ ID NO: 454839 - RNA, 22 nt, Human
ccuccccuacccaaaccccaac

SEQ ID NO: 454840 - RNA, 21 nt, Human
ccugcguuuccuuccugcucu

SEQ ID NO: 454841 - RNA, 18 nt, Human
ccuuccugcucuccugcu

SEQ ID NO: 454842 - RNA, 21 nt, Human
cuccaagagcccuggaucucu

SEQ ID NO: 454843 - RNA, 18 nt, Human
cuccccuacccaaacccc

SEQ ID NO: 454844 - RNA, 22 nt, Human
cuuccugcucuccugcuccuuc

SEQ ID NO: 454845 - RNA, 21 nt, Human
ggagaugcugcucccuccucc

SEQ ID NO: 454846 - RNA, 22 nt, Human
gucauguaacuuaacucaucag

SEQ ID NO: 454847 - RNA, 19 nt, Human
guccaccagaaacauggga

SEQ ID NO: 454848 - RNA, 19 nt, Human
uaaauaauuaucugccucu

SEQ ID NO: 454849 - RNA, 22 nt, Human
uaaauaauuaucugccucuucu

SEQ ID NO: 454850 - RNA, 22 nt, Human
uaacuuaacucaucaggccugg

SEQ ID NO: 454851 - RNA, 19 nt, Human
uacccaaaccccaacacca

SEQ ID NO: 454852 - RNA, 22 nt, Human
uagaaggacuggaucuaaucaa

SEQ ID NO: 454853 - RNA, 21 nt, Human
uccugcuccuucccuccuuca

SEQ ID NO: 454854 - RNA, 20 nt, Human
ucucacuugucccucuccaa

SEQ ID NO: 454855 - RNA, 19 nt, Human
ucuccaagagcccuggauc

SEQ ID NO: 454856 - RNA, 27 nt, Human
ucucugucucuccugaugguagaaggu

SEQ ID NO: 454857 - RNA, 18 nt, Human
ucuguguucacaggagau

SEQ ID NO: 454858 - RNA, 20 nt, Human
ucuuagaaggacuggaucua

SEQ ID NO: 454859 - RNA, 22 nt, Human
ugaauacaaucucugauucaug

SEQ ID NO: 454860 - RNA, 18 nt, Human
ugacuuucaaacaaaauu

SEQ ID NO: 454861 - RNA, 18 nt, Human
ugauaaauaauuaucugc

SEQ ID NO: 454862 - RNA, 18 nt, Human
ugcguuuccuuccugcuc

SEQ ID NO: 454863 - RNA, 26 nt, Human
ugcguuuccuuccugcucuccugcuc

SEQ ID NO: 454864 - RNA, 22 nt, Human
uggaguucugacagccgagcuc

SEQ ID NO: 454865 - RNA, 19 nt, Human
uggcuggcucucacuuguc

SEQ ID NO: 454866 - RNA, 18 nt, Human
ugucauugaauacaaucu

SEQ ID NO: 454867 - RNA, 24 nt, Human
uuaacagcaaacaggugcuccucu

SEQ ID NO: 454868 - RNA, 21 nt, Human
uuggcuggcucucacuugucc

SEQ ID NO: 454869 - RNA, 26 nt, Human
uuuccuuccugcucuccugcuccuuc

SEQ ID NO: 454870 - RNA, 26 nt, Human
aacccaucacccaaauagggaacaua

SEQ ID NO: 454871 - RNA, 22 nt, Human
agcuuuuuaaccccugccccuc

SEQ ID NO: 454872 - RNA, 21 nt, Human
aguguuuauuucuccagucuu

SEQ ID NO: 454873 - RNA, 20 nt, Human
cacaggaaggaaauccacug

SEQ ID NO: 454874 - RNA, 19 nt, Human
caugugcaggcuuguuaca

SEQ ID NO: 454875 - RNA, 22 nt, Human
caugugcaggcuuguuacauga

SEQ ID NO: 454876 - RNA, 23 nt, Human
caugugcaggcuuguuacaugag

SEQ ID NO: 454877 - RNA, 19 nt, Human
cccaucacccaaauaggga

SEQ ID NO: 454878 - RNA, 19 nt, Human
ccccucuuccuccuugccc

SEQ ID NO: 454879 - RNA, 20 nt, Human
cccugccccucuuccuccuu

SEQ ID NO: 454880 - RNA, 21 nt, Human
ccuccuugccccccuuuugga

SEQ ID NO: 454881 - RNA, 18 nt, Human
cugggguacaugugcagg

SEQ ID NO: 454882 - RNA, 22 nt, Human
cuugccccccuuuuggaguccu

SEQ ID NO: 454883 - RNA, 20 nt, Human
cuuuuggaguccucaguguu

SEQ ID NO: 454884 - RNA, 20 nt, Human
cuuuuuaaccccugccccuc

SEQ ID NO: 454885 - RNA, 20 nt, Human
gccccucuuccuccuugccc

SEQ ID NO: 454886 - RNA, 21 nt, Human
uaaccccugccccucuuccuc

SEQ ID NO: 454887 - RNA, 22 nt, Human
uaaccccugccccucuuccucc

SEQ ID NO: 454888 - RNA, 20 nt, Human
uccuugccccccuuuuggag

SEQ ID NO: 454889 - RNA, 21 nt, Human
ugaguauauugugugcugcug

SEQ ID NO: 454890 - RNA, 19 nt, Human
ugcugcugagguuuggacu

SEQ ID NO: 454891 - RNA, 21 nt, Human
ugugugcugcugagguuugga

SEQ ID NO: 454892 - RNA, 19 nt, Human
uuuccagaccuugugguug

SEQ ID NO: 454893 - RNA, 24 nt, Human
uuuggaguccucaguguuuauuuc

SEQ ID NO: 454894 - RNA, 22 nt, Human
aaaaaaagggaacuaaaaacau

SEQ ID NO: 454895 - RNA, 27 nt, Human
aaaaacaaaaaaaccuaauaacaacac

SEQ ID NO: 454896 - RNA, 23 nt, Human
aaaacaaaaacaaaaaaaccuaa

SEQ ID NO: 454897 - RNA, 26 nt, Human
aaacaaaaacaaaaaaaccuaauaac

SEQ ID NO: 454898 - RNA, 20 nt, Human
aaagauauauauaucuccuu

SEQ ID NO: 454899 - RNA, 19 nt, Human
aacaaaaaaagggaacuaa

SEQ ID NO: 454900 - RNA, 22 nt, Human
aacugugcagcucccaaagagc

SEQ ID NO: 454901 - RNA, 18 nt, Human
aagcauucaaacaaaaaa

SEQ ID NO: 454902 - RNA, 20 nt, Human
acaaaaacaaaaaaaccuaa

SEQ ID NO: 454903 - RNA, 19 nt, Human
acagcaacauauugcuucc

SEQ ID NO: 454904 - RNA, 22 nt, Human
acauuaggaacgucaauggaca

SEQ ID NO: 454905 - RNA, 24 nt, Human
acuaaaaacauauuacaaagacac

SEQ ID NO: 454906 - RNA, 20 nt, Human
agaaaacaaaaacaaaaaaa

SEQ ID NO: 454907 - RNA, 19 nt, Human
agcauccauccauuucuag

SEQ ID NO: 454908 - RNA, 20 nt, Human
agcaugccacaaaauaaccc

SEQ ID NO: 454909 - RNA, 23 nt, Human
agucaaaaaaagaaaaaaagucc

SEQ ID NO: 454910 - RNA, 21 nt, Human
auagcagcaaaggcacuguac

SEQ ID NO: 454911 - RNA, 24 nt, Human
auagcagcaaaggcacuguacauc

SEQ ID NO: 454912 - RNA, 27 nt, Human
aucaaacacuaagcacuuaagacacca

SEQ ID NO: 454913 - RNA, 22 nt, Human
caaaaaaagaaaaaaaguccaa

SEQ ID NO: 454914 - RNA, 22 nt, Human
caaaaacaaaaaaaccuaauaa

SEQ ID NO: 454915 - RNA, 25 nt, Human
caaaaacaaaaaaaccuaauaacaa

SEQ ID NO: 454916 - RNA, 21 nt, Human
caacaaaacugacuaaagaua

SEQ ID NO: 454917 - RNA, 26 nt, Human
cauuucaacuugcagcauccauccau

SEQ ID NO: 454918 - RNA, 22 nt, Human
ccuaauaacaacacagcaacau

SEQ ID NO: 454919 - RNA, 23 nt, Human
cuaauuguucagccaaauuucca

SEQ ID NO: 454920 - RNA, 19 nt, Human
cucuauacagucaucaguc

SEQ ID NO: 454921 - RNA, 20 nt, Human
gagucaaaaaaagaaaaaaa

SEQ ID NO: 454922 - RNA, 26 nt, Human
gccuauaauacaacaaaaaaagggaa

SEQ ID NO: 454923 - RNA, 18 nt, Human
gcuuaaaagucugaauuc

SEQ ID NO: 454924 - RNA, 22 nt, Human
guuauuuauguuuaaugcuuaa

SEQ ID NO: 454925 - RNA, 18 nt, Human
uaaguucucucuuugagg

SEQ ID NO: 454926 - RNA, 22 nt, Human
uaaugacaucaaacacuaagca

SEQ ID NO: 454927 - RNA, 18 nt, Human
uaggaacgucaauggaca

SEQ ID NO: 454928 - RNA, 22 nt, Human
ucaaaaaaagaaaaaaagucca

SEQ ID NO: 454929 - RNA, 18 nt, Human
ucagccaaauuuccaaaa

SEQ ID NO: 454930 - RNA, 25 nt, Human
ucccaaagagcaugccaaccauugg

SEQ ID NO: 454931 - RNA, 25 nt, Human
ucucauaacaacaaaacugacuaaa

SEQ ID NO: 454932 - RNA, 21 nt, Human
ucuccuuuugcaaagaaaugu

SEQ ID NO: 454933 - RNA, 22 nt, Human
ugaauucacaaacaaucuacca

SEQ ID NO: 454934 - RNA, 19 nt, Human
ugauuugauccauagcagc

SEQ ID NO: 454935 - RNA, 23 nt, Human
uguagaaaacaaaaacaaaaaaa

SEQ ID NO: 454936 - RNA, 24 nt, Human
uguagaaaacaaaaacaaaaaaac

SEQ ID NO: 454937 - RNA, 18 nt, Human
ugugcagcucccaaagag

SEQ ID NO: 454938 - RNA, 20 nt, Human
uucaacuugcagcauccauc

SEQ ID NO: 454939 - RNA, 19 nt, Human
uucacaaacaaucuaccau

SEQ ID NO: 454940 - RNA, 19 nt, Human
aagaugcagcagugugugg

SEQ ID NO: 454941 - RNA, 22 nt, Human
aagaugcagcaguguguggagc

SEQ ID NO: 454942 - RNA, 24 nt, Human
aagaugcagcaguguguggagcag

SEQ ID NO: 454943 - RNA, 19 nt, Human
acccgguggccgcuaggac

SEQ ID NO: 454944 - RNA, 23 nt, Human
aggaggcaauggacccuguugag

SEQ ID NO: 454945 - RNA, 23 nt, Human
auggggcaagggggugugggugg

SEQ ID NO: 454946 - RNA, 23 nt, Human
caggcgcccagccgccugcgccc

SEQ ID NO: 454947 - RNA, 22 nt, Human
cagggugcccacuucccugcuc

SEQ ID NO: 454948 - RNA, 20 nt, Human
ccaggcgcccagccgccugc

SEQ ID NO: 454949 - RNA, 21 nt, Human
ccagggcccgggucccagcgg

SEQ ID NO: 454950 - RNA, 18 nt, Human
cccugagacccaagaugc

SEQ ID NO: 454951 - RNA, 19 nt, Human
ccgcuaggacugaggaccc

SEQ ID NO: 454952 - RNA, 18 nt, Human
ccggagccagggcccggg

SEQ ID NO: 454953 - RNA, 20 nt, Human
ccuuucagacccgguggccg

SEQ ID NO: 454954 - RNA, 20 nt, Human
cuccaaguucuggaggcgag

SEQ ID NO: 454955 - RNA, 20 nt, Human
cuggugcuggaggccucagg

SEQ ID NO: 454956 - RNA, 24 nt, Human
cuucccugcuccaaguucuggagg

SEQ ID NO: 454957 - RNA, 21 nt, Human
gaggacccaggcgacccaaaa

SEQ ID NO: 454958 - RNA, 18 nt, Human
gccaggcgcccagccgcc

SEQ ID NO: 454959 - RNA, 24 nt, Human
gcccgggucccagcggaagggcuc

SEQ ID NO: 454960 - RNA, 22 nt, Human
gccgcccugccugacccgggag

SEQ ID NO: 454961 - RNA, 19 nt, Human
gcggagagcagcucccauc

SEQ ID NO: 454962 - RNA, 20 nt, Human
gcggcccaggcuggucgggu

SEQ ID NO: 454963 - RNA, 18 nt, Human
ggacccuguugaggcagg

SEQ ID NO: 454964 - RNA, 20 nt, Human
gggguguggguggguagggg

SEQ ID NO: 454965 - RNA, 21 nt, Human
gggguguggguggguaggggc

SEQ ID NO: 454966 - RNA, 21 nt, Human
gggugcccacuucccugcucc

SEQ ID NO: 454967 - RNA, 22 nt, Human
ggucagaguggggguuccccag

SEQ ID NO: 454968 - RNA, 20 nt, Human
uaggggcucuucuccgacuu

SEQ ID NO: 454969 - RNA, 23 nt, Human
uccaaguucuggaggcgaggagg

SEQ ID NO: 454970 - RNA, 21 nt, Human
uccgcuaggacugaggaccca

SEQ ID NO: 454971 - RNA, 20 nt, Human
ucgccaggcgcccagccgcc

SEQ ID NO: 454972 - RNA, 18 nt, Human
ucugggucccugagaccc

SEQ ID NO: 454973 - RNA, 24 nt, Human
ugcagcaguguguggagcaggggg

SEQ ID NO: 454974 - RNA, 21 nt, Human
ugcagggaaugcggcccaggc

SEQ ID NO: 454975 - RNA, 19 nt, Human
ugcgucgaggaugcugaca

SEQ ID NO: 454976 - RNA, 20 nt, Human
uggacccuguugaggcaggg

SEQ ID NO: 454977 - RNA, 18 nt, Human
uggaggccucagggugcc

SEQ ID NO: 454978 - RNA, 20 nt, Human
uggguggguaggggcucuuc

SEQ ID NO: 454979 - RNA, 19 nt, Human
uggugcuggaggccucagg

SEQ ID NO: 454980 - RNA, 23 nt, Human
ugucugggucccugagacccaag

SEQ ID NO: 454981 - RNA, 23 nt, Human
uguguggagcagggggccgcccu

SEQ ID NO: 454982 - RNA, 22 nt, Human
aaaaaaaccagcuccggccgga

SEQ ID NO: 454983 - RNA, 21 nt, Human
aaaaacauuuucagggaggcu

SEQ ID NO: 454984 - RNA, 22 nt, Human
aaaacaccugcucacucacuga

SEQ ID NO: 454985 - RNA, 26 nt, Human
aacacaguuuauuacugaacugcacu

SEQ ID NO: 454986 - RNA, 19 nt, Human
aauucuagaaaacuagcug

SEQ ID NO: 454987 - RNA, 23 nt, Human
accagcucuccacgugcacgcgc

SEQ ID NO: 454988 - RNA, 19 nt, Human
acccuggggcucccauagc

SEQ ID NO: 454989 - RNA, 19 nt, Human
acugcacuuucaccuucac

SEQ ID NO: 454990 - RNA, 22 nt, Human
agaagggggugggaggguagag

SEQ ID NO: 454991 - RNA, 19 nt, Human
agaugccacaggcugcucu

SEQ ID NO: 454992 - RNA, 20 nt, Human
agcuccuggccaggccacuc

SEQ ID NO: 454993 - RNA, 19 nt, Human
aggaaccagcccccucgcu

SEQ ID NO: 454994 - RNA, 23 nt, Human
aggcaggcaggugcagcccccgg

SEQ ID NO: 454995 - RNA, 20 nt, Human
aggcaggugcagcccccgga

SEQ ID NO: 454996 - RNA, 22 nt, Human
aggccaaggguggagcagaaga

SEQ ID NO: 454997 - RNA, 21 nt, Human
agggaacugaggugugggggu

SEQ ID NO: 454998 - RNA, 23 nt, Human
agggaggcuaagggguaaggguu

SEQ ID NO: 454999 - RNA, 22 nt, Human
agggaggggaagggacuagggu

SEQ ID NO: 455000 - RNA, 22 nt, Human
agggaugggcucaaccagucca

SEQ ID NO: 455001 - RNA, 19 nt, Human
aggucgggagaggaggugg

SEQ ID NO: 455002 - RNA, 22 nt, Human
agguucugaaaacuuucaagcu

SEQ ID NO: 455003 - RNA, 23 nt, Human
aguaaacacaguuuauuacugaa

SEQ ID NO: 455004 - RNA, 22 nt, Human
auagcucccuuucaccucaggg

SEQ ID NO: 455005 - RNA, 19 nt, Human
augcagcaggcucuccuuc

SEQ ID NO: 455006 - RNA, 21 nt, Human
caaacaucaaaacaaaggcaa

SEQ ID NO: 455007 - RNA, 25 nt, Human
caaacccuuccauaccugccagccu

SEQ ID NO: 455008 - RNA, 21 nt, Human
caaagagcuggaacaagugug

SEQ ID NO: 455009 - RNA, 21 nt, Human
caagcagccugaaucccuagu

SEQ ID NO: 455010 - RNA, 22 nt, Human
cacagacuauuucaaagagcug

SEQ ID NO: 455011 - RNA, 18 nt, Human
cacaggcugcucuuguag

SEQ ID NO: 455012 - RNA, 19 nt, Human
caccaugaggagcagccca

SEQ ID NO: 455013 - RNA, 21 nt, Human
cacugcaagccagcagcuccu

SEQ ID NO: 455014 - RNA, 22 nt, Human
cagaaaaacauuuucagggagg

SEQ ID NO: 455015 - RNA, 24 nt, Human
cagcccaaggcaaagaugccacag

SEQ ID NO: 455016 - RNA, 22 nt, Human
cagcccccggaagaucuuuugu

SEQ ID NO: 455017 - RNA, 18 nt, Human
cagcccuaccccacccca

SEQ ID NO: 455018 - RNA, 22 nt, Human
caggcucuccuuccugcccuuc

SEQ ID NO: 455019 - RNA, 18 nt, Human
cagggaggcuaaggggua

SEQ ID NO: 455020 - RNA, 21 nt, Human
caucaaaacaaaggcaaucua

SEQ ID NO: 455021 - RNA, 19 nt, Human
caucaaaacaaaggcaauu

SEQ ID NO: 455022 - RNA, 24 nt, Human
caucuuuaucccaagcagccugaa

SEQ ID NO: 455023 - RNA, 24 nt, Human
ccaaaacaccugcucacucacuga

SEQ ID NO: 455024 - RNA, 23 nt, Human
ccacaaacaucaaaacaaaggca

SEQ ID NO: 455025 - RNA, 22 nt, Human
ccaccaugaggagcagcccaag

SEQ ID NO: 455026 - RNA, 21 nt, Human
ccacccuagcuuuggcauggg

SEQ ID NO: 455027 - RNA, 21 nt, Human
ccaggccacucuggccuuggc

SEQ ID NO: 455028 - RNA, 24 nt, Human
ccauaccugccagccuccuuugga

SEQ ID NO: 455029 - RNA, 21 nt, Human
ccaugaggagcagcccaaggc

SEQ ID NO: 455030 - RNA, 20 nt, Human
cccagccacaaacccuucca

SEQ ID NO: 455031 - RNA, 20 nt, Human
ccccaugcagcaggcucucc

SEQ ID NO: 455032 - RNA, 21 nt, Human
ccucagggcugaguccccuga

SEQ ID NO: 455033 - RNA, 27 nt, Human
ccuccuuuggacagauuuuguggaaau

SEQ ID NO: 455034 - RNA, 25 nt, Human
ccuggaccagggcaggggagggagc

SEQ ID NO: 455035 - RNA, 18 nt, Human
cgacccggcaggcuggga

SEQ ID NO: 455036 - RNA, 18 nt, Human
cggccucgcgguggcugg

SEQ ID NO: 455037 - RNA, 18 nt, Human
cgggagaggagguggcug

SEQ ID NO: 455038 - RNA, 22 nt, Human
cuccgggcaccagcucuccacg

SEQ ID NO: 455039 - RNA, 18 nt, Human
cuccugcccccagccaca

SEQ ID NO: 455040 - RNA, 18 nt, Human
cucgucucugguuaguga

SEQ ID NO: 455041 - RNA, 18 nt, Human
cucuccuuccugcccuuc

SEQ ID NO: 455042 - RNA, 23 nt, Human
cuggaacaagugugggguggggg

SEQ ID NO: 455043 - RNA, 19 nt, Human
cuggggaagagguucugaa

SEQ ID NO: 455044 - RNA, 20 nt, Human
cuuaacaaaaauaguauauc

SEQ ID NO: 455045 - RNA, 23 nt, Human
cuucuaagauccaaagccaagau

SEQ ID NO: 455046 - RNA, 18 nt, Human
gaacccagguuagugugg

SEQ ID NO: 455047 - RNA, 18 nt, Human
gaagggggugggagggua

SEQ ID NO: 455048 - RNA, 23 nt, Human
gaagggggugggaggguagagug

SEQ ID NO: 455049 - RNA, 27 nt, Human
gagccagggaggggaagggacuagggu

SEQ ID NO: 455050 - RNA, 26 nt, Human
gagcccgggguggcugggaccaaagu

SEQ ID NO: 455051 - RNA, 20 nt, Human
gagguggcugcggggaugcc

SEQ ID NO: 455052 - RNA, 20 nt, Human
gauccaaagccaagauaaga

SEQ ID NO: 455053 - RNA, 19 nt, Human
gaugagacaggccaagggu

SEQ ID NO: 455054 - RNA, 21 nt, Human
gaugagacaggccaagggugg

SEQ ID NO: 455055 - RNA, 24 nt, Human
gcaaaggcaggcaggugcagcccc

SEQ ID NO: 455056 - RNA, 21 nt, Human
gcaccagcucuccacgugcac

SEQ ID NO: 455057 - RNA, 19 nt, Human
gcacgcgcacugcaagcca

SEQ ID NO: 455058 - RNA, 24 nt, Human
gcagaagagagagggaggccugaa

SEQ ID NO: 455059 - RNA, 19 nt, Human
gcaggggagggagcaucag

SEQ ID NO: 455060 - RNA, 20 nt, Human
gcaucuuuaucccaagcagc

SEQ ID NO: 455061 - RNA, 25 nt, Human
gcauguagugguucuccugguggca

SEQ ID NO: 455062 - RNA, 21 nt, Human
gccaguccagaggugaggagg

SEQ ID NO: 455063 - RNA, 19 nt, Human
gccuggcugcccaggcugg

SEQ ID NO: 455064 - RNA, 21 nt, Human
gcgacccggcaggcugggagc

SEQ ID NO: 455065 - RNA, 22 nt, Human
gcuccuggccaggccacucugg

SEQ ID NO: 455066 - RNA, 23 nt, Human
gcugaacugcaagggccacccua

SEQ ID NO: 455067 - RNA, 18 nt, Human
gcuggaacaagugugggg

SEQ ID NO: 455068 - RNA, 19 nt, Human
gcuggcaaaaaaaccagcu

SEQ ID NO: 455069 - RNA, 19 nt, Human
ggaccagggcaggggaggg

SEQ ID NO: 455070 - RNA, 25 nt, Human
ggaggcuaagggguaaggguugcac

SEQ ID NO: 455071 - RNA, 23 nt, Human
gggaacccagguuagugugggga

SEQ ID NO: 455072 - RNA, 20 nt, Human
gggaagggacuaggguggug

SEQ ID NO: 455073 - RNA, 23 nt, Human
gggcaggggagggagcaucaggc

SEQ ID NO: 455074 - RNA, 21 nt, Human
gggggugggaggguagagugg

SEQ ID NO: 455075 - RNA, 19 nt, Human
gggguggggguugggggag

SEQ ID NO: 455076 - RNA, 21 nt, Human
gggguggggguugggggaggg

SEQ ID NO: 455077 - RNA, 22 nt, Human
gggguggggguugggggagggg

SEQ ID NO: 455078 - RNA, 20 nt, Human
gguggagcagagaagggggu

SEQ ID NO: 455079 - RNA, 22 nt, Human
gguggcugggaccccuggggau

SEQ ID NO: 455080 - RNA, 20 nt, Human
gguugggggaggggcagaug

SEQ ID NO: 455081 - RNA, 24 nt, Human
guggagcagagaagggggugggag

SEQ ID NO: 455082 - RNA, 21 nt, Human
guggcugggaccccuggggau

SEQ ID NO: 455083 - RNA, 23 nt, Human
uaacaaaaauaguauaucaucuu

SEQ ID NO: 455084 - RNA, 19 nt, Human
uagaaaacuagcugcaagg

SEQ ID NO: 455085 - RNA, 19 nt, Human
uagucuccuuucuggggaa

SEQ ID NO: 455086 - RNA, 20 nt, Human
uaucccaagcagccugaauc

SEQ ID NO: 455087 - RNA, 20 nt, Human
ucaaagagcuggaacaagug

SEQ ID NO: 455088 - RNA, 19 nt, Human
ucacaggucgggagaggag

SEQ ID NO: 455089 - RNA, 22 nt, Human
ucaccuucacacagacuauuuc

SEQ ID NO: 455090 - RNA, 19 nt, Human
ucagguagggcccuccugc

SEQ ID NO: 455091 - RNA, 22 nt, Human
uccauuguccaaaacaccugcu

SEQ ID NO: 455092 - RNA, 25 nt, Human
uccccugaacccaccaugaggagca

SEQ ID NO: 455093 - RNA, 18 nt, Human
ucccuagucaaaaguggc

SEQ ID NO: 455094 - RNA, 23 nt, Human
ucccuagucaaaaguggccccua

SEQ ID NO: 455095 - RNA, 18 nt, Human
ucccuggaccagggcagg

SEQ ID NO: 455096 - RNA, 23 nt, Human
uccuugcaucuuuaucccaagca

SEQ ID NO: 455097 - RNA, 19 nt, Human
ucugaaaacuuucaagcuc

SEQ ID NO: 455098 - RNA, 19 nt, Human
ucugguuagugauucucuu

SEQ ID NO: 455099 - RNA, 18 nt, Human
ugaacugcaagggccacc

SEQ ID NO: 455100 - RNA, 22 nt, Human
ugaggccaagggaacugagguu

SEQ ID NO: 455101 - RNA, 23 nt, Human
ugagucucgucucugguuaguga

SEQ ID NO: 455102 - RNA, 18 nt, Human
ugcauguagugguucucc

SEQ ID NO: 455103 - RNA, 25 nt, Human
ugcccaggcuggacaggcauggggc

SEQ ID NO: 455104 - RNA, 21 nt, Human
ugccugagguagggaagaccc

SEQ ID NO: 455105 - RNA, 21 nt, Human
uggaaauuuugugaauucuga

SEQ ID NO: 455106 - RNA, 18 nt, Human
uggaacaaguguggggug

SEQ ID NO: 455107 - RNA, 21 nt, Human
uggaaggaaagggaacccagg

SEQ ID NO: 455108 - RNA, 18 nt, Human
uggacggaggauguggug

SEQ ID NO: 455109 - RNA, 22 nt, Human
uggacggaggaugugguggagc

SEQ ID NO: 455110 - RNA, 19 nt, Human
uggagcagagaagggggug

SEQ ID NO: 455111 - RNA, 18 nt, Human
uggcagaaaaacauuuuc

SEQ ID NO: 455112 - RNA, 21 nt, Human
uggcagaaaaacauuuucagg

SEQ ID NO: 455113 - RNA, 23 nt, Human
uggcagaaaaacauuuucaggga

SEQ ID NO: 455114 - RNA, 18 nt, Human
uggcauggggugcuuccu

SEQ ID NO: 455115 - RNA, 20 nt, Human
uggccaggccacucuggccu

SEQ ID NO: 455116 - RNA, 23 nt, Human
uggcugcccaggcuggacaggca

SEQ ID NO: 455117 - RNA, 22 nt, Human
ugggagccagggaggggaaggg

SEQ ID NO: 455118 - RNA, 18 nt, Human
ugggcccaguuggucccu

SEQ ID NO: 455119 - RNA, 18 nt, Human
uggucccucaguaugguc

SEQ ID NO: 455120 - RNA, 25 nt, Human
ugguggcaauggcggcuggacggag

SEQ ID NO: 455121 - RNA, 19 nt, Human
ugugguggagcagagaagg

SEQ ID NO: 455122 - RNA, 21 nt, Human
ugugguggagcagagaagggg

SEQ ID NO: 455123 - RNA, 22 nt, Human
uguuccugauagcucccuuuca

SEQ ID NO: 455124 - RNA, 23 nt, Human
uucaccuucacacagacuauuuc

SEQ ID NO: 455125 - RNA, 21 nt, Human
uucuagucagcccuaccccac

SEQ ID NO: 455126 - RNA, 22 nt, Human
uuucuggggaagagguucugaa

SEQ ID NO: 455127 - RNA, 23 nt, Human
uuuuuuuuuucacugaguaaaca

SEQ ID NO: 455128 - RNA, 22 nt, Human
uuuuuuuuuuuuucacugagua

SEQ ID NO: 455129 - RNA, 23 nt, Human
uuuuuuuuuuuuuuuuuucacug

SEQ ID NO: 455130 - RNA, 24 nt, Human
uuuuuuuuuuuuuuuuuucacuga

SEQ ID NO: 455131 - RNA, 20 nt, Human
aaagaaagccccagcgcucu

SEQ ID NO: 455132 - RNA, 25 nt, Human
acacugaggggguucuagagaggga

SEQ ID NO: 455133 - RNA, 24 nt, Human
accccacagcccugaguggaauag

SEQ ID NO: 455134 - RNA, 22 nt, Human
acuuggaaaagcacacgaagag

SEQ ID NO: 455135 - RNA, 22 nt, Human
agaaaaacuagaaaaaguaggg

SEQ ID NO: 455136 - RNA, 18 nt, Human
aggaaagaggaaaagagg

SEQ ID NO: 455137 - RNA, 22 nt, Human
aggaaggagcuacaguggccga

SEQ ID NO: 455138 - RNA, 21 nt, Human
aggcaggcuguguacucuggg

SEQ ID NO: 455139 - RNA, 23 nt, Human
aggcaggcuguguacucugggga

SEQ ID NO: 455140 - RNA, 24 nt, Human
aguuuuaaacaauuuauuuuuggc

SEQ ID NO: 455141 - RNA, 18 nt, Human
caaaaagaaagccccagc

SEQ ID NO: 455142 - RNA, 22 nt, Human
caaccaccaccccacagcccug

SEQ ID NO: 455143 - RNA, 21 nt, Human
caccccacagcccugagugga

SEQ ID NO: 455144 - RNA, 21 nt, Human
cacugaggggguucuagagag

SEQ ID NO: 455145 - RNA, 19 nt, Human
cagcugacgggaaaggggg

SEQ ID NO: 455146 - RNA, 20 nt, Human
ccaccccacagcccugagug

SEQ ID NO: 455147 - RNA, 19 nt, Human
cccaaagaaugauaaaguu

SEQ ID NO: 455148 - RNA, 20 nt, Human
cccacagcccugaguggaau

SEQ ID NO: 455149 - RNA, 19 nt, Human
ccccacagcccugagugga

SEQ ID NO: 455150 - RNA, 23 nt, Human
ccccagcgcucuagagcucagcu

SEQ ID NO: 455151 - RNA, 23 nt, Human
cccgcacgccccgaccuuccauc

SEQ ID NO: 455152 - RNA, 24 nt, Human
cgcucuagagcucagcugacggga

SEQ ID NO: 455153 - RNA, 21 nt, Human
cguccgagagcgaggagcggg

SEQ ID NO: 455154 - RNA, 18 nt, Human
gaggaaagaggaaaagag

SEQ ID NO: 455155 - RNA, 21 nt, Human
gcaaccaccaccccacagccc

SEQ ID NO: 455156 - RNA, 21 nt, Human
gcccugaguggaauaggaaga

SEQ ID NO: 455157 - RNA, 19 nt, Human
gcuccaagacagggguggg

SEQ ID NO: 455158 - RNA, 20 nt, Human
ggaaaguggagcaaggaagg

SEQ ID NO: 455159 - RNA, 18 nt, Human
ggaggaaagaggaaaaga

SEQ ID NO: 455160 - RNA, 23 nt, Human
ggaggaaagaggaaaagaggagg

SEQ ID NO: 455161 - RNA, 23 nt, Human
gggcaaccaccaccccacagccc

SEQ ID NO: 455162 - RNA, 21 nt, Human
ggguggguuccagcugcccgc

SEQ ID NO: 455163 - RNA, 18 nt, Human
guacucuggggaaagugg

SEQ ID NO: 455164 - RNA, 20 nt, Human
gucaucuuguagcagcuucu

SEQ ID NO: 455165 - RNA, 22 nt, Human
uacacgugaaucgauucugcac

SEQ ID NO: 455166 - RNA, 22 nt, Human
uacccggagcuccaagacaggg

SEQ ID NO: 455167 - RNA, 23 nt, Human
uacccggagcuccaagacagggg

SEQ ID NO: 455168 - RNA, 23 nt, Human
ucagucucgaaaccuggggcgug

SEQ ID NO: 455169 - RNA, 22 nt, Human
uccaagacagggguggguucca

SEQ ID NO: 455170 - RNA, 21 nt, Human
ucuacauugggguaagugcag

SEQ ID NO: 455171 - RNA, 18 nt, Human
ucuagagagggaggggug

SEQ ID NO: 455172 - RNA, 19 nt, Human
ucucgaaaccuggggcgug

SEQ ID NO: 455173 - RNA, 22 nt, Human
ucugcacugaaauaacuaggga

SEQ ID NO: 455174 - RNA, 21 nt, Human
ucuguccuggaggagggaggc

SEQ ID NO: 455175 - RNA, 22 nt, Human
ucuucuguagggggacugugga

SEQ ID NO: 455176 - RNA, 21 nt, Human
ugaguggaauaggaagacuug

SEQ ID NO: 455177 - RNA, 22 nt, Human
ugcagaaaaacuagaaaaagua

SEQ ID NO: 455178 - RNA, 21 nt, Human
uggaaauguuuugggagaucu

SEQ ID NO: 455179 - RNA, 20 nt, Human
uggaggagggaggcgggcag

SEQ ID NO: 455180 - RNA, 20 nt, Human
uggcaaaaacagguagggca

SEQ ID NO: 455181 - RNA, 26 nt, Human
uggcaaaaacagguagggcaaccacc

SEQ ID NO: 455182 - RNA, 21 nt, Human
uggcguccgagagcgaggagc

SEQ ID NO: 455183 - RNA, 24 nt, Human
uucaagaagucgaucaaaaagaaa

SEQ ID NO: 455184 - RNA, 21 nt, Human
uugaauggaaguucuguguug

SEQ ID NO: 455185 - RNA, 22 nt, Human
uugggucuguuacccaaagaau

SEQ ID NO: 455186 - RNA, 21 nt, Human
uuguagcagcuucugagaaag

SEQ ID NO: 455187 - RNA, 22 nt, Human
uuuggcaaaaacagguagggca

SEQ ID NO: 455188 - RNA, 27 nt, Human
aaaaaaugaagacauuuaaaauacuug

SEQ ID NO: 455189 - RNA, 18 nt, Human
aaauaaccaacagccaau

SEQ ID NO: 455190 - RNA, 21 nt, Human
aacuacaaaaaucaugaaaug

SEQ ID NO: 455191 - RNA, 21 nt, Human
aacuguguuuugggagguaaa

SEQ ID NO: 455192 - RNA, 20 nt, Human
aagaaaaacgauaugaacau

SEQ ID NO: 455193 - RNA, 21 nt, Human
aagaacacaucuaacaaaccu

SEQ ID NO: 455194 - RNA, 18 nt, Human
aagaacuguguuuuggga

SEQ ID NO: 455195 - RNA, 18 nt, Human
aaguaauuuuucuaaugc

SEQ ID NO: 455196 - RNA, 21 nt, Human
aauuaacugcaagacacucug

SEQ ID NO: 455197 - RNA, 27 nt, Human
acagguuuucccccagaugacuuaaaa

SEQ ID NO: 455198 - RNA, 20 nt, Human
accacauaaugagaagcaca

SEQ ID NO: 455199 - RNA, 19 nt, Human
accucccauuaaaaagagu

SEQ ID NO: 455200 - RNA, 19 nt, Human
acgcacacuuguuugcugc

SEQ ID NO: 455201 - RNA, 23 nt, Human
acugcucuguacaaaaauacagu

SEQ ID NO: 455202 - RNA, 26 nt, Human
agccaaaaggcaaaaaagagggaccc

SEQ ID NO: 455203 - RNA, 23 nt, Human
aggugauaaccagaugaauucua

SEQ ID NO: 455204 - RNA, 27 nt, Human
agugaaacaguaaagaacauagagcaa

SEQ ID NO: 455205 - RNA, 22 nt, Human
augugugugaguauauauaugu

SEQ ID NO: 455206 - RNA, 20 nt, Human
auuguauuuuagaugagaag

SEQ ID NO: 455207 - RNA, 21 nt, Human
caaaagacucuauaauacuau

SEQ ID NO: 455208 - RNA, 25 nt, Human
caagcaaauaaccaacagccaaugu

SEQ ID NO: 455209 - RNA, 21 nt, Human
caagcaaauaaccaacagccu

SEQ ID NO: 455210 - RNA, 21 nt, Human
cacuggagugauaaacagguu

SEQ ID NO: 455211 - RNA, 28 nt, Human
cagaaacuaauagcauaaacagcaugaa

SEQ ID NO: 455212 - RNA, 21 nt, Human
caggaaaaacagagauccuca

SEQ ID NO: 455213 - RNA, 22 nt, Human
cagguacaugcuaauccauaua

SEQ ID NO: 455214 - RNA, 26 nt, Human
cagguuuucccccagaugacuuaaaa

SEQ ID NO: 455215 - RNA, 22 nt, Human
caguaaacugcaaauaugugug

SEQ ID NO: 455216 - RNA, 21 nt, Human
caucaguuaacuucagaggac

SEQ ID NO: 455217 - RNA, 19 nt, Human
cccaggaaaaacagagauc

SEQ ID NO: 455218 - RNA, 21 nt, Human
cccagggagacgcugauugcc

SEQ ID NO: 455219 - RNA, 24 nt, Human
cggaauaacuagcccugcugagua

SEQ ID NO: 455220 - RNA, 19 nt, Human
cucaagcaaauaaccaaca

SEQ ID NO: 455221 - RNA, 24 nt, Human
cucucuauauuuaugucuuuaaaa

SEQ ID NO: 455222 - RNA, 24 nt, Human
cugcuugaugcuccacaaguguuu

SEQ ID NO: 455223 - RNA, 20 nt, Human
cugucacuuugagcuuguca

SEQ ID NO: 455224 - RNA, 26 nt, Human
gaaaucggaauaacuagcccugcuga

SEQ ID NO: 455225 - RNA, 20 nt, Human
gauaugaacauauuggaagu

SEQ ID NO: 455226 - RNA, 19 nt, Human
gcaaaagcuuuaagguacc

SEQ ID NO: 455227 - RNA, 20 nt, Human
gcaguucauuuuucaagggc

SEQ ID NO: 455228 - RNA, 21 nt, Human
gcuaaaguaagacuaaaccug

SEQ ID NO: 455229 - RNA, 20 nt, Human
gcuuaugccaacugcucccc

SEQ ID NO: 455230 - RNA, 18 nt, Human
ggaauaacuagcccugcu

SEQ ID NO: 455231 - RNA, 19 nt, Human
guagaucuauauccauaga

SEQ ID NO: 455232 - RNA, 20 nt, Human
guugcugaaaucccuaucca

SEQ ID NO: 455233 - RNA, 19 nt, Human
uaaaauggauguaaaagcu

SEQ ID NO: 455234 - RNA, 23 nt, Human
uaaacagaauuaacacaaguuug

SEQ ID NO: 455235 - RNA, 18 nt, Human
uaaagguuucugucugug

SEQ ID NO: 455236 - RNA, 19 nt, Human
uaacaguggaauccuuguc

SEQ ID NO: 455237 - RNA, 21 nt, Human
uaacugcaagacacucugccc

SEQ ID NO: 455238 - RNA, 22 nt, Human
uaagaacacaucuaacaaaccu

SEQ ID NO: 455239 - RNA, 20 nt, Human
uaaguaugaauaccaaucua

SEQ ID NO: 455240 - RNA, 22 nt, Human
uacuuccuuccauugaacaguc

SEQ ID NO: 455241 - RNA, 21 nt, Human
uaggaccaagagaagugccuc

SEQ ID NO: 455242 - RNA, 18 nt, Human
uaggauaagcaggcggua

SEQ ID NO: 455243 - RNA, 18 nt, Human
uaggcacagcuuuaggca

SEQ ID NO: 455244 - RNA, 22 nt, Human
uagggaacaacuuauuaccauu

SEQ ID NO: 455245 - RNA, 18 nt, Human
uauauauauguguguaua

SEQ ID NO: 455246 - RNA, 20 nt, Human
uauaugugugugaguauaua

SEQ ID NO: 455247 - RNA, 24 nt, Human
uaucuaacaauggguuuguggcua

SEQ ID NO: 455248 - RNA, 22 nt, Human
uaugccaacugcuccccugcag

SEQ ID NO: 455249 - RNA, 23 nt, Human
ucacuggagugauaaacagguuu

SEQ ID NO: 455250 - RNA, 18 nt, Human
ucccuuaacauaaaucca

SEQ ID NO: 455251 - RNA, 21 nt, Human
ucuaguguagggcucuuugcu

SEQ ID NO: 455252 - RNA, 18 nt, Human
ucuguacaaaaauacagu

SEQ ID NO: 455253 - RNA, 22 nt, Human
ugaaagaagaacuguguuuugg

SEQ ID NO: 455254 - RNA, 25 nt, Human
ugaaagaagaacuguguuuugggag

SEQ ID NO: 455255 - RNA, 25 nt, Human
ugaaauuucuaggcacagcuuuagg

SEQ ID NO: 455256 - RNA, 21 nt, Human
ugaaguauauuuuacuuuuaa

SEQ ID NO: 455257 - RNA, 22 nt, Human
ugaguauauauauguguguaua

SEQ ID NO: 455258 - RNA, 22 nt, Human
ugauaaacagguuuucccccag

SEQ ID NO: 455259 - RNA, 23 nt, Human
ugcuccacaaguguuuuagaaaa

SEQ ID NO: 455260 - RNA, 23 nt, Human
uggguuuguggcuaaaaauuaug

SEQ ID NO: 455261 - RNA, 18 nt, Human
uguacaaaaauacagucu

SEQ ID NO: 455262 - RNA, 21 nt, Human
ugugaaacugcaaacucaaaa

SEQ ID NO: 455263 - RNA, 23 nt, Human
ugugauguauuuauucgcuuuug

SEQ ID NO: 455264 - RNA, 26 nt, Human
uguguauaucuauaucuauagaugua

SEQ ID NO: 455265 - RNA, 21 nt, Human
ugugugugaguauauauaugu

SEQ ID NO: 455266 - RNA, 22 nt, Human
uguguuuugggagguaaaacaa

SEQ ID NO: 455267 - RNA, 23 nt, Human
uuaacagauuuugcaauacagua

SEQ ID NO: 455268 - RNA, 20 nt, Human
uuagcccaucaguuaacuuc

SEQ ID NO: 455269 - RNA, 21 nt, Human
uucuaaauguugcuuaugcca

SEQ ID NO: 455270 - RNA, 18 nt, Human
uuguacugagauuguuag

SEQ ID NO: 455271 - RNA, 19 nt, Human
uuuauuuuuuuccacauag

SEQ ID NO: 455272 - RNA, 25 nt, Human
uuuguuggaugguggugguuguuuu

SEQ ID NO: 455273 - RNA, 18 nt, Human
uuuuuuggcuguuguuuu

SEQ ID NO: 455274 - RNA, 19 nt, Human
uuuuuuuuuuuuucacuuu

SEQ ID NO: 455275 - RNA, 25 nt, Human
uuuuuuuuuuuuuuuucacuuuuaa

SEQ ID NO: 455276 - RNA, 23 nt, Human
aaaaacauguuucuaaguccuuc

SEQ ID NO: 455277 - RNA, 24 nt, Human
aaaaggaaaaaaacauguuucuaa

SEQ ID NO: 455278 - RNA, 21 nt, Human
aaaguuuaaaaggaaaaaaac

SEQ ID NO: 455279 - RNA, 24 nt, Human
aagaaacauuauaacaacuucaua

SEQ ID NO: 455280 - RNA, 24 nt, Human
aagugccuuccccgaauucgcucc

SEQ ID NO: 455281 - RNA, 23 nt, Human
aauucgcucccucaaaccaacca

SEQ ID NO: 455282 - RNA, 19 nt, Human
acaugguggguccagcuug

SEQ ID NO: 455283 - RNA, 19 nt, Human
acgagcggagaaggagccg

SEQ ID NO: 455284 - RNA, 20 nt, Human
acuauaacacacuguacaug

SEQ ID NO: 455285 - RNA, 22 nt, Human
agaaaagaaacaaauguuccaa

SEQ ID NO: 455286 - RNA, 21 nt, Human
agaaggagccgggccggagaa

SEQ ID NO: 455287 - RNA, 21 nt, Human
aggaaaaaaacauguuucuaa

SEQ ID NO: 455288 - RNA, 22 nt, Human
aggcagggagccugcgauccgg

SEQ ID NO: 455289 - RNA, 25 nt, Human
caagugccuuccccgaauucgcucc

SEQ ID NO: 455290 - RNA, 18 nt, Human
cacacuguacaugguggg

SEQ ID NO: 455291 - RNA, 19 nt, Human
caggcagagaaaucaaagc

SEQ ID NO: 455292 - RNA, 27 nt, Human
cauccagacacgccucagugcuaccac

SEQ ID NO: 455293 - RNA, 18 nt, Human
ccacacaguucugaccac

SEQ ID NO: 455294 - RNA, 23 nt, Human
ccccaagcggacucgaggcggcg

SEQ ID NO: 455295 - RNA, 24 nt, Human
cccccaagcggacucgaggcggcg

SEQ ID NO: 455296 - RNA, 21 nt, Human
cccugcccuaccauacucccc

SEQ ID NO: 455297 - RNA, 25 nt, Human
ccuuccccgaauucgcucccucaaa

SEQ ID NO: 455298 - RNA, 19 nt, Human
cgaggcggcgagaaggagc

SEQ ID NO: 455299 - RNA, 18 nt, Human
cuacacaucucuaccagg

SEQ ID NO: 455300 - RNA, 24 nt, Human
cuacuggauuacauccaauagcau

SEQ ID NO: 455301 - RNA, 19 nt, Human
cucagugcuaccacucacg

SEQ ID NO: 455302 - RNA, 23 nt, Human
gagccugcgauccggcucuuuga

SEQ ID NO: 455303 - RNA, 19 nt, Human
gaguaggcagggagccugc

SEQ ID NO: 455304 - RNA, 19 nt, Human
gauaugagggguggggggg

SEQ ID NO: 455305 - RNA, 24 nt, Human
gcccuaccauacucccccaauccu

SEQ ID NO: 455306 - RNA, 19 nt, Human
ggcggcgagaaggagcggg

SEQ ID NO: 455307 - RNA, 24 nt, Human
ggcggcgagaaggagcggggggcg

SEQ ID NO: 455308 - RNA, 19 nt, Human
gggugggggggguuggcga

SEQ ID NO: 455309 - RNA, 22 nt, Human
gguggagagagauaugaggggu

SEQ ID NO: 455310 - RNA, 21 nt, Human
guacaugguggguccagcuug

SEQ ID NO: 455311 - RNA, 20 nt, Human
guuuaaaaggaaaaaaacaa

SEQ ID NO: 455312 - RNA, 23 nt, Human
uaaaaacaaacguaucccaaagc

SEQ ID NO: 455313 - RNA, 24 nt, Human
uaaaacaucgguuaucagcaauug

SEQ ID NO: 455314 - RNA, 21 nt, Human
uaacuuaaagcauccagacac

SEQ ID NO: 455315 - RNA, 18 nt, Human
uaccacaagcuucauuca

SEQ ID NO: 455316 - RNA, 19 nt, Human
uaguuguuguguguggaua

SEQ ID NO: 455317 - RNA, 18 nt, Human
uauaacacacuguacaug

SEQ ID NO: 455318 - RNA, 25 nt, Human
uauaucaccaagugccuuccccgaa

SEQ ID NO: 455319 - RNA, 21 nt, Human
ucaaagucuucuuuaaauaag

SEQ ID NO: 455320 - RNA, 20 nt, Human
uccuuuuacucauuuuuuuu

SEQ ID NO: 455321 - RNA, 25 nt, Human
ucuaaguccuucugacuggaguaau

SEQ ID NO: 455322 - RNA, 22 nt, Human
ucuguaaacaaaacaaaguuau

SEQ ID NO: 455323 - RNA, 24 nt, Human
ucuuacaggcagagaaaucaaagc

SEQ ID NO: 455324 - RNA, 23 nt, Human
ugacuuaaaaguuuaaaaggaaa

SEQ ID NO: 455325 - RNA, 21 nt, Human
ugaggggugggggggguuggc

SEQ ID NO: 455326 - RNA, 23 nt, Human
ugcauugaaaaguaaagaaacau

SEQ ID NO: 455327 - RNA, 24 nt, Human
ugcccugcccuaccauacuccccc

SEQ ID NO: 455328 - RNA, 25 nt, Human
ugcccugcccuaccauacuccccca

SEQ ID NO: 455329 - RNA, 24 nt, Human
uggugaaaaauuugcaugaauccc

SEQ ID NO: 455330 - RNA, 22 nt, Human
uucacaauaauuaaaacaucgg

SEQ ID NO: 455331 - RNA, 18 nt, Human
uugcaugaaucccacaga

SEQ ID NO: 455332 - RNA, 23 nt, Human
uuguauuaugacacauaugcaca

SEQ ID NO: 455333 - RNA, 25 nt, Human
uuuaaaaggaaaaaaacauguuucu

SEQ ID NO: 455334 - RNA, 21 nt, Human
uuugaaguuuucccccaagcg

SEQ ID NO: 455335 - RNA, 23 nt, Human
uuugaauuuauauuacacacuac

SEQ ID NO: 455336 - RNA, 25 nt, Human
uuuuauguacauuuccaagcaaccu

SEQ ID NO: 455337 - RNA, 20 nt, Human
uuuuuuuuuuuuuuuuucac

SEQ ID NO: 455338 - RNA, 24 nt, Human
uuuuuuuuuuuuuuuuucacgauu

SEQ ID NO: 455339 - RNA, 26 nt, Human
aaaaagauuaagcucaacagcaacua

SEQ ID NO: 455340 - RNA, 19 nt, Human
aaaacauaaaaaccccaaa

SEQ ID NO: 455341 - RNA, 18 nt, Human
aaacagaccacacuuuca

SEQ ID NO: 455342 - RNA, 21 nt, Human
aaacaucaaugaacacucuaa

SEQ ID NO: 455343 - RNA, 22 nt, Human
aaauguacaauuuguccuuuuu

SEQ ID NO: 455344 - RNA, 22 nt, Human
aacacuguaauacuguguacca

SEQ ID NO: 455345 - RNA, 18 nt, Human
aaggcauaaaauaaaaca

SEQ ID NO: 455346 - RNA, 20 nt, Human
acagguccagcaggccgcac

SEQ ID NO: 455347 - RNA, 18 nt, Human
acccauggcuuucagugc

SEQ ID NO: 455348 - RNA, 18 nt, Human
acccuuagaaauuaaguu

SEQ ID NO: 455349 - RNA, 19 nt, Human
acgugcagcauccucacag

SEQ ID NO: 455350 - RNA, 20 nt, Human
acugcaaaaucccaacugca

SEQ ID NO: 455351 - RNA, 23 nt, Human
agaauuuuccuucauuccuaaaa

SEQ ID NO: 455352 - RNA, 22 nt, Human
agcagcgccagcgacaccagca

SEQ ID NO: 455353 - RNA, 21 nt, Human
aggccuucgcugcugggaaca

SEQ ID NO: 455354 - RNA, 22 nt, Human
agguccagcaggccgcacagga

SEQ ID NO: 455355 - RNA, 21 nt, Human
agugcaauccuuaaaaauccc

SEQ ID NO: 455356 - RNA, 21 nt, Human
aguuguggaugauggagucga

SEQ ID NO: 455357 - RNA, 25 nt, Human
auaaaaacauucuaaaaauguacaa

SEQ ID NO: 455358 - RNA, 19 nt, Human
auacuaaaaccucuguugc

SEQ ID NO: 455359 - RNA, 20 nt, Human
aucaacguaacauuccccua

SEQ ID NO: 455360 - RNA, 22 nt, Human
auggccuucagaaauauuaaaa

SEQ ID NO: 455361 - RNA, 22 nt, Human
caacgcacgugaggccgcggcg

SEQ ID NO: 455362 - RNA, 19 nt, Human
caccagccacagagaugcc

SEQ ID NO: 455363 - RNA, 26 nt, Human
cagaaaaaaauuaaaaaccugaaacu

SEQ ID NO: 455364 - RNA, 19 nt, Human
cagaauacuugacauuuac

SEQ ID NO: 455365 - RNA, 18 nt, Human
cagaguccuaccacuucc

SEQ ID NO: 455366 - RNA, 22 nt, Human
cauaaaaaccccaaaaacagaa

SEQ ID NO: 455367 - RNA, 19 nt, Human
ccacugcccccuuccuugg

SEQ ID NO: 455368 - RNA, 23 nt, Human
ccagcgguacacgccgucccucu

SEQ ID NO: 455369 - RNA, 22 nt, Human
cccaaaaacagaauacuugaca

SEQ ID NO: 455370 - RNA, 18 nt, Human
cccauggcuuucagugcc

SEQ ID NO: 455371 - RNA, 19 nt, Human
cccccgcucaggucgcaca

SEQ ID NO: 455372 - RNA, 24 nt, Human
cccuaaauagcuguuguaauaagc

SEQ ID NO: 455373 - RNA, 19 nt, Human
ccgcagaggccuucgcugc

SEQ ID NO: 455374 - RNA, 19 nt, Human
ccgccgccucgcgcugcuc

SEQ ID NO: 455375 - RNA, 20 nt, Human
ccguaguuguggaugaugga

SEQ ID NO: 455376 - RNA, 22 nt, Human
cgcucacaucacaaggccucau

SEQ ID NO: 455377 - RNA, 20 nt, Human
cggcagcuccgagaaccagc

SEQ ID NO: 455378 - RNA, 26 nt, Human
cuaccacuucccacuguuuuccaagu

SEQ ID NO: 455379 - RNA, 23 nt, Human
cucacagccacucacagagccgc

SEQ ID NO: 455380 - RNA, 19 nt, Human
cuccgagucgcgcagcgag

SEQ ID NO: 455381 - RNA, 19 nt, Human
cucugcgcuguguagcucc

SEQ ID NO: 455382 - RNA, 20 nt, Human
cuggauuuaagguuaaccuc

SEQ ID NO: 455383 - RNA, 24 nt, Human
cuguuuuaauguuuugcuggauuu

SEQ ID NO: 455384 - RNA, 21 nt, Human
cuugcaaacucugcugaggac

SEQ ID NO: 455385 - RNA, 20 nt, Human
cuuggaggagggaaggaaau

SEQ ID NO: 455386 - RNA, 19 nt, Human
gacaccagcagcuugcugc

SEQ ID NO: 455387 - RNA, 19 nt, Human
gacuucggacggccucccu

SEQ ID NO: 455388 - RNA, 18 nt, Human
gaggaagucugaugaccg

SEQ ID NO: 455389 - RNA, 23 nt, Human
gagguucuuggggagcccguggg

SEQ ID NO: 455390 - RNA, 18 nt, Human
gcaaaacgcucuucagac

SEQ ID NO: 455391 - RNA, 19 nt, Human
gcaaaacgcucuucagacg

SEQ ID NO: 455392 - RNA, 21 nt, Human
gcagaaaaaaauuaaaaaccu

SEQ ID NO: 455393 - RNA, 20 nt, Human
gcagcuugcugcgcaccacc

SEQ ID NO: 455394 - RNA, 20 nt, Human
gcccaggucggccggguugu

SEQ ID NO: 455395 - RNA, 22 nt, Human
gcccguaguuguggaugaugga

SEQ ID NO: 455396 - RNA, 24 nt, Human
gccucgcgcugcuccgagcccagc

SEQ ID NO: 455397 - RNA, 20 nt, Human
gcugcuccgagcccagcagc

SEQ ID NO: 455398 - RNA, 25 nt, Human
ggagaauuuuccuucauuccuaaaa

SEQ ID NO: 455399 - RNA, 21 nt, Human
gggguuggagguucuugggga

SEQ ID NO: 455400 - RNA, 19 nt, Human
guagagcacgcccgccgcc

SEQ ID NO: 455401 - RNA, 23 nt, Human
guguagcugcccuggaauugacg

SEQ ID NO: 455402 - RNA, 20 nt, Human
guuaaccuuuggccucaacc

SEQ ID NO: 455403 - RNA, 24 nt, Human
uaaaaaaaccaaaaaauuuaaaag

SEQ ID NO: 455404 - RNA, 24 nt, Human
uaaaaaccccaaaaacagaauacu

SEQ ID NO: 455405 - RNA, 20 nt, Human
uaaaaaccugaaacugcuac

SEQ ID NO: 455406 - RNA, 26 nt, Human
uaaaaagauuaagcucaacagcaacu

SEQ ID NO: 455407 - RNA, 21 nt, Human
uaaaacacugguugccacagc

SEQ ID NO: 455408 - RNA, 21 nt, Human
uaaaacauaaaaaccccaaaa

SEQ ID NO: 455409 - RNA, 21 nt, Human
uaaagcaccuuuggauuaaaa

SEQ ID NO: 455410 - RNA, 24 nt, Human
uaaauuucagacaaaaggcuuuca

SEQ ID NO: 455411 - RNA, 22 nt, Human
uacagugaggacuuuuauuacu

SEQ ID NO: 455412 - RNA, 19 nt, Human
uaggaacagaacaaaacaa

SEQ ID NO: 455413 - RNA, 22 nt, Human
uaguuguggaugauggagucga

SEQ ID NO: 455414 - RNA, 21 nt, Human
uaugaaguuaggaacugcucu

SEQ ID NO: 455415 - RNA, 19 nt, Human
ucacacaugugaugagggc

SEQ ID NO: 455416 - RNA, 20 nt, Human
ucagaccacguguagcugcc

SEQ ID NO: 455417 - RNA, 18 nt, Human
ucagugccaccugacuca

SEQ ID NO: 455418 - RNA, 18 nt, Human
uccagaguccuaccacuu

SEQ ID NO: 455419 - RNA, 24 nt, Human
ucccagagauuagugcuaaucacu

SEQ ID NO: 455420 - RNA, 19 nt, Human
ucccuccggaaagaggccu

SEQ ID NO: 455421 - RNA, 22 nt, Human
uccgagcucgcugcuggcaaac

SEQ ID NO: 455422 - RNA, 23 nt, Human
uccgcagaggccuucgcugcugg

SEQ ID NO: 455423 - RNA, 21 nt, Human
ucgcugcugggaacacagccg

SEQ ID NO: 455424 - RNA, 18 nt, Human
ucucggguguguggccuc

SEQ ID NO: 455425 - RNA, 25 nt, Human
ucugcauugcauagaaauaaaauuc

SEQ ID NO: 455426 - RNA, 21 nt, Human
ugaaacagaccacacuuucag

SEQ ID NO: 455427 - RNA, 23 nt, Human
ugaaacagaccacacuuucagga

SEQ ID NO: 455428 - RNA, 24 nt, Human
ugaccgcaaaacgcucuucagacg

SEQ ID NO: 455429 - RNA, 25 nt, Human
ugagccuaggagggccagugauggc

SEQ ID NO: 455430 - RNA, 18 nt, Human
ugauguacaacgagcaag

SEQ ID NO: 455431 - RNA, 19 nt, Human
ugcacguaagacucacaca

SEQ ID NO: 455432 - RNA, 18 nt, Human
ugcagcauccucacagcc

SEQ ID NO: 455433 - RNA, 20 nt, Human
ugccacagcauucugaaaca

SEQ ID NO: 455434 - RNA, 21 nt, Human
ugccacagcauucugaaacag

SEQ ID NO: 455435 - RNA, 20 nt, Human
ugcccaggucggccggguug

SEQ ID NO: 455436 - RNA, 22 nt, Human
ugcuggcaaacucucaagucca

SEQ ID NO: 455437 - RNA, 19 nt, Human
uggagguggccgaucucac

SEQ ID NO: 455438 - RNA, 24 nt, Human
uggagguggccgaucucaccagcc

SEQ ID NO: 455439 - RNA, 19 nt, Human
uggccacugcccccuuccu

SEQ ID NO: 455440 - RNA, 20 nt, Human
uggccgaucucaccagccac

SEQ ID NO: 455441 - RNA, 22 nt, Human
uggccgaucucaccagccacag

SEQ ID NO: 455442 - RNA, 21 nt, Human
uggccuucagaaauauuaaaa

SEQ ID NO: 455443 - RNA, 18 nt, Human
ugguaguccuugcgggcc

SEQ ID NO: 455444 - RNA, 19 nt, Human
ugucaggaguccggcgggu

SEQ ID NO: 455445 - RNA, 23 nt, Human
ugucaggaguccggcggguggaa

SEQ ID NO: 455446 - RNA, 23 nt, Human
ugugaugagggcuuguuacaacg

SEQ ID NO: 455447 - RNA, 18 nt, Human
uuaaaaaccugaaacugc

SEQ ID NO: 455448 - RNA, 19 nt, Human
uuaggaacagaacaaaaca

SEQ ID NO: 455449 - RNA, 19 nt, Human
uucaacacuguaauacugu

SEQ ID NO: 455450 - RNA, 20 nt, Human
uucaguaccaaagccuucuc

SEQ ID NO: 455451 - RNA, 21 nt, Human
uucagugccaccugacucauu

SEQ ID NO: 455452 - RNA, 18 nt, Human
uucaugaggcugauuguc

SEQ ID NO: 455453 - RNA, 19 nt, Human
uucaugaggcugauugucc

SEQ ID NO: 455454 - RNA, 22 nt, Human
uuccuuggugaacaguggagca

SEQ ID NO: 455455 - RNA, 19 nt, Human
uucggacggccucccugga

SEQ ID NO: 455456 - RNA, 26 nt, Human
uugaagacuuuagcauuuucgauaag

SEQ ID NO: 455457 - RNA, 22 nt, Human
uuugagcagaaaauucccuuua

SEQ ID NO: 455458 - RNA, 18 nt, Human
agagggcucgccgaggcu

SEQ ID NO: 455459 - RNA, 19 nt, Human
agcaacggguguuagaaug

SEQ ID NO: 455460 - RNA, 22 nt, Human
agggucuuucuggaagccccuc

SEQ ID NO: 455461 - RNA, 18 nt, Human
cacuccacacccuguuug

SEQ ID NO: 455462 - RNA, 19 nt, Human
cagagggcucgccgaggcu

SEQ ID NO: 455463 - RNA, 24 nt, Human
cccuccaccagcacuccugcggcc

SEQ ID NO: 455464 - RNA, 24 nt, Human
cccuccccuccccuuccaccaggg

SEQ ID NO: 455465 - RNA, 21 nt, Human
ccgcgcaggugcccgcucucc

SEQ ID NO: 455466 - RNA, 24 nt, Human
ccucccuccccuccccuuccacca

SEQ ID NO: 455467 - RNA, 24 nt, Human
cucuccugcggggagagccgaggg

SEQ ID NO: 455468 - RNA, 22 nt, Human
cugagauuuagaggccucugcc

SEQ ID NO: 455469 - RNA, 23 nt, Human
cugcagagggcucgccgaggcuc

SEQ ID NO: 455470 - RNA, 19 nt, Human
cugccugccacuccacacc

SEQ ID NO: 455471 - RNA, 23 nt, Human
cuuucuggaagccccuccaccag

SEQ ID NO: 455472 - RNA, 21 nt, Human
gccgcagggucuuucuggaag

SEQ ID NO: 455473 - RNA, 22 nt, Human
gcgcaggugcccgcucuccugc

SEQ ID NO: 455474 - RNA, 18 nt, Human
gcgcugccgcagggucuu

SEQ ID NO: 455475 - RNA, 23 nt, Human
ggaagccccuccaccagcacucu

SEQ ID NO: 455476 - RNA, 21 nt, Human
ggcaugguggauaauccacac

SEQ ID NO: 455477 - RNA, 21 nt, Human
gggggcuccgcugcagagggc

SEQ ID NO: 455478 - RNA, 21 nt, Human
uauauggguuccucccuccuu

SEQ ID NO: 455479 - RNA, 23 nt, Human
uccacacguggauaaucaagagu

SEQ ID NO: 455480 - RNA, 18 nt, Human
uccccuccccuuccacca

SEQ ID NO: 455481 - RNA, 22 nt, Human
uccucccuccccuccccuucca

SEQ ID NO: 455482 - RNA, 21 nt, Human
ugacuauauggguuccucccu

SEQ ID NO: 455483 - RNA, 26 nt, Human
ugcaaagaagucauucccucuaguua

SEQ ID NO: 455484 - RNA, 18 nt, Human
ugcagagggcucgccgag

SEQ ID NO: 455485 - RNA, 23 nt, Human
ugggcagggggcuccgcugcaga

SEQ ID NO: 455486 - RNA, 22 nt, Human
uuagaauggcccaguuccuccc

SEQ ID NO: 455487 - RNA, 24 nt, Human
uuccaaaaccaaaugggcaggggg

SEQ ID NO: 455488 - RNA, 19 nt, Human
uuuuuuuuuuuuaaggauc

SEQ ID NO: 455489 - RNA, 24 nt, Human
uuuuuuuuuuuuuuuuuuuuaagg

SEQ ID NO: 455490 - RNA, 20 nt, Human
aaaaugccacaguauuugaa

SEQ ID NO: 455491 - RNA, 20 nt, Human
cacaguauuugaacacuagg

SEQ ID NO: 455492 - RNA, 24 nt, Human
cagaggagagagagaaaaggcggg

SEQ ID NO: 455493 - RNA, 22 nt, Human
cagcgaaacaccaacuucuucc

SEQ ID NO: 455494 - RNA, 22 nt, Human
ccagggcccagcgaaacaccaa

SEQ ID NO: 455495 - RNA, 20 nt, Human
cuucaguaccagggcccagc

SEQ ID NO: 455496 - RNA, 19 nt, Human
gaacaaauuccaaauucac

SEQ ID NO: 455497 - RNA, 20 nt, Human
gcccagcgaaacaccaacuu

SEQ ID NO: 455498 - RNA, 27 nt, Human
ggaaacagcuaggggcgaccgguaccc

SEQ ID NO: 455499 - RNA, 19 nt, Human
uaaguuggaacaaauucca

SEQ ID NO: 455500 - RNA, 21 nt, Human
uggaacaaauuccaaauucac

SEQ ID NO: 455501 - RNA, 22 nt, Human
uggaacaaauuccaaauucaca

SEQ ID NO: 455502 - RNA, 18 nt, Human
uucagcaauuuucaaugg

SEQ ID NO: 455503 - RNA, 22 nt, Human
uucagcaauuuucaauggaaaa

SEQ ID NO: 455504 - RNA, 19 nt, Human
aaacacuacaaugugucac

SEQ ID NO: 455505 - RNA, 21 nt, Human
aaauggcuuucuaaaggcccc

SEQ ID NO: 455506 - RNA, 22 nt, Human
aagagucacugaguucuggagg

SEQ ID NO: 455507 - RNA, 22 nt, Human
agaggagauguugccuccaaca

SEQ ID NO: 455508 - RNA, 21 nt, Human
agcccuuccucccuccacccc

SEQ ID NO: 455509 - RNA, 18 nt, Human
agggagcacagaggccug

SEQ ID NO: 455510 - RNA, 20 nt, Human
auagaugugccaggcuugcc

SEQ ID NO: 455511 - RNA, 19 nt, Human
caacagugcuccugauggc

SEQ ID NO: 455512 - RNA, 27 nt, Human
cacaacccuauagccauuugaggcaaa

SEQ ID NO: 455513 - RNA, 19 nt, Human
caccccacaacccuauagc

SEQ ID NO: 455514 - RNA, 21 nt, Human
caccccacaacccuauagcca

SEQ ID NO: 455515 - RNA, 21 nt, Human
caccccacaacccuauagcca

SEQ ID NO: 455516 - RNA, 18 nt, Human
cagcccuuccucccucca

SEQ ID NO: 455517 - RNA, 21 nt, Human
cagcccuuccucccuccaccc

SEQ ID NO: 455518 - RNA, 18 nt, Human
cccagcccuuccucccuc

SEQ ID NO: 455519 - RNA, 21 nt, Human
ccggcaugacuggcuccuuuc

SEQ ID NO: 455520 - RNA, 19 nt, Human
ccuccaacagcagggagga

SEQ ID NO: 455521 - RNA, 19 nt, Human
ccucccagcccuuccuccc

SEQ ID NO: 455522 - RNA, 26 nt, Human
ccucccagcccuuccucccuccaccc

SEQ ID NO: 455523 - RNA, 23 nt, Human
ccucccuccaccccacaacccua

SEQ ID NO: 455524 - RNA, 23 nt, Human
ccucucaagggaaugggggcaga

SEQ ID NO: 455525 - RNA, 26 nt, Human
ccucucaagggaaugggggcagagac

SEQ ID NO: 455526 - RNA, 18 nt, Human
ccucuguaaaaagaggag

SEQ ID NO: 455527 - RNA, 18 nt, Human
ccuuccucccuccacccc

SEQ ID NO: 455528 - RNA, 18 nt, Human
cuaguccaaccaaaggug

SEQ ID NO: 455529 - RNA, 20 nt, Human
cuccugaaugugcacacaug

SEQ ID NO: 455530 - RNA, 18 nt, Human
gacuauaucgcagucugc

SEQ ID NO: 455531 - RNA, 24 nt, Human
gagaauggaaacagguuauaagaa

SEQ ID NO: 455532 - RNA, 23 nt, Human
gccccgccccacucgccuagcca

SEQ ID NO: 455533 - RNA, 27 nt, Human
gcccuuccucccuccaccccacaaccc

SEQ ID NO: 455534 - RNA, 24 nt, Human
uaacauccauguucaagagucacu

SEQ ID NO: 455535 - RNA, 25 nt, Human
uaagaaaaaaggauguacccucugu

SEQ ID NO: 455536 - RNA, 24 nt, Human
uacaaugugucacacuacagcuag

SEQ ID NO: 455537 - RNA, 22 nt, Human
uagcaauuccuccccacucccu

SEQ ID NO: 455538 - RNA, 25 nt, Human
ucacacuacagcuagcagugggaac

SEQ ID NO: 455539 - RNA, 21 nt, Human
ucacugaguucuggagggcag

SEQ ID NO: 455540 - RNA, 22 nt, Human
ucccagcccuuccucccuccac

SEQ ID NO: 455541 - RNA, 21 nt, Human
uccccacucccucccagcccu

SEQ ID NO: 455542 - RNA, 22 nt, Human
uccugauggcuauccucgaguu

SEQ ID NO: 455543 - RNA, 23 nt, Human
ugagaccuggguggcuucccaga

SEQ ID NO: 455544 - RNA, 18 nt, Human
uggcuauccucgaguugu

SEQ ID NO: 455545 - RNA, 18 nt, Human
ugggggcagagacugucg

SEQ ID NO: 455546 - RNA, 24 nt, Human
uguaaaaagaggagauguugccuc

SEQ ID NO: 455547 - RNA, 22 nt, Human
uguaagaaaaaaggauguaccc

SEQ ID NO: 455548 - RNA, 21 nt, Human
ugugcacacaugggguaaaug

SEQ ID NO: 455549 - RNA, 18 nt, Human
uuccuccccacucccucc

SEQ ID NO: 455550 - RNA, 19 nt, Human
aacaaaaaucuuacagacu

SEQ ID NO: 455551 - RNA, 20 nt, Human
aacaagggcacaucaugaac

SEQ ID NO: 455552 - RNA, 18 nt, Human
aacacaauauucaauuag

SEQ ID NO: 455553 - RNA, 21 nt, Human
aacauguaaauucgaaagcaa

SEQ ID NO: 455554 - RNA, 24 nt, Human
aagugacagguaaagguuuacaac

SEQ ID NO: 455555 - RNA, 25 nt, Human
acaacaagggcacaucaugaacaug

SEQ ID NO: 455556 - RNA, 21 nt, Human
cccccgggccggaugccagcc

SEQ ID NO: 455557 - RNA, 22 nt, Human
cccccgggccggaugccagccc

SEQ ID NO: 455558 - RNA, 23 nt, Human
cccgccgagcgcagggcagcggg

SEQ ID NO: 455559 - RNA, 21 nt, Human
cgggccggaugccagcccgcc

SEQ ID NO: 455560 - RNA, 18 nt, Human
cugcagaagggcuggucc

SEQ ID NO: 455561 - RNA, 21 nt, Human
cuuguagucuccuccuucucc

SEQ ID NO: 455562 - RNA, 22 nt, Human
gaggugcgccgccgggacacuu

SEQ ID NO: 455563 - RNA, 18 nt, Human
uacuccugggccuauccu

SEQ ID NO: 455564 - RNA, 21 nt, Human
ucgccacgaggugcgccgccg

SEQ ID NO: 455565 - RNA, 22 nt, Human
ucuccuccuucucccgauucuc

SEQ ID NO: 455566 - RNA, 24 nt, Human
uucuucugcuaacaaaaaucuuac

SEQ ID NO: 455567 - RNA, 20 nt, Human
aaacaaaagcccagugacua

SEQ ID NO: 455568 - RNA, 19 nt, Human
aaagugcugggauuacagg

SEQ ID NO: 455569 - RNA, 20 nt, Human
aaagugcugggauuacaggg

SEQ ID NO: 455570 - RNA, 24 nt, Human
aaagugcugggauuacagggguga

SEQ ID NO: 455571 - RNA, 21 nt, Human
aagacagagucucccucuguc

SEQ ID NO: 455572 - RNA, 24 nt, Human
aaguagcugggauuacagguaugu

SEQ ID NO: 455573 - RNA, 25 nt, Human
aaguagcugggauuacagguaugug

SEQ ID NO: 455574 - RNA, 18 nt, Human
aagugcugggauuacagg

SEQ ID NO: 455575 - RNA, 21 nt, Human
aagugcugggauuacaggggu

SEQ ID NO: 455576 - RNA, 21 nt, Human
aagugcugggauuacaggggu

SEQ ID NO: 455577 - RNA, 22 nt, Human
accauguuggccaagcuggucu

SEQ ID NO: 455578 - RNA, 23 nt, Human
agaaaacugcugcaaaacaucau

SEQ ID NO: 455579 - RNA, 23 nt, Human
agaaagggauccagaccuucaau

SEQ ID NO: 455580 - RNA, 19 nt, Human
agacguagaaaacugcugc

SEQ ID NO: 455581 - RNA, 20 nt, Human
agaggaagagggagaggcuu

SEQ ID NO: 455582 - RNA, 20 nt, Human
agcaacucuucaauaagaca

SEQ ID NO: 455583 - RNA, 21 nt, Human
agccaaacagacaauccuccc

SEQ ID NO: 455584 - RNA, 22 nt, Human
aguagagaugagguuucaccau

SEQ ID NO: 455585 - RNA, 19 nt, Human
agugcaguggugcagucuc

SEQ ID NO: 455586 - RNA, 20 nt, Human
auaaagcaaaacaaaagccc

SEQ ID NO: 455587 - RNA, 18 nt, Human
augagguuucaccauguu

SEQ ID NO: 455588 - RNA, 20 nt, Human
augagguuucaccauguugg

SEQ ID NO: 455589 - RNA, 24 nt, Human
auuuuuguauuuuuaguagagaug

SEQ ID NO: 455590 - RNA, 19 nt, Human
caaaacaaaagcccaguga

SEQ ID NO: 455591 - RNA, 20 nt, Human
caaaacaaaagcccagugac

SEQ ID NO: 455592 - RNA, 24 nt, Human
caaagugcugggauuacaggggug

SEQ ID NO: 455593 - RNA, 21 nt, Human
caccauguuggccaagcuggu

SEQ ID NO: 455594 - RNA, 22 nt, Human
caccauguuggccaagcugguc

SEQ ID NO: 455595 - RNA, 23 nt, Human
caccauguuggccaagcuggucu

SEQ ID NO: 455596 - RNA, 24 nt, Human
caccauguuggccaagcuggucuu

SEQ ID NO: 455597 - RNA, 19 nt, Human
caccuuguuuuacugaggg

SEQ ID NO: 455598 - RNA, 27 nt, Human
cacuaaaucuaaugggaacugcccgac

SEQ ID NO: 455599 - RNA, 19 nt, Human
cacugagguuggggagggg

SEQ ID NO: 455600 - RNA, 23 nt, Human
cagcacagaccccgcgggagcag

SEQ ID NO: 455601 - RNA, 24 nt, Human
cauguuggccaagcuggucuugaa

SEQ ID NO: 455602 - RNA, 26 nt, Human
cauucuaggcucaaacugaauccuuu

SEQ ID NO: 455603 - RNA, 22 nt, Human
ccaaaacaauucugaauaacau

SEQ ID NO: 455604 - RNA, 19 nt, Human
ccaaagugcugggauuaca

SEQ ID NO: 455605 - RNA, 21 nt, Human
ccaaagugcugggauuacagg

SEQ ID NO: 455606 - RNA, 24 nt, Human
ccaaagugcugggauuacaggggu

SEQ ID NO: 455607 - RNA, 21 nt, Human
ccaaguagcugggauuacagg

SEQ ID NO: 455608 - RNA, 24 nt, Human
ccaaguagcugggauuacagguau

SEQ ID NO: 455609 - RNA, 22 nt, Human
cccaaagugcugggauuacagg

SEQ ID NO: 455610 - RNA, 20 nt, Human
cccaauaaaccuggucucag

SEQ ID NO: 455611 - RNA, 18 nt, Human
cccugccucaccccucuu

SEQ ID NO: 455612 - RNA, 24 nt, Human
ccgccuccuggguucaggcgauuu

SEQ ID NO: 455613 - RNA, 22 nt, Human
ccucacccacccaaagugcugg

SEQ ID NO: 455614 - RNA, 19 nt, Human
ccuccgccuccuggguuca

SEQ ID NO: 455615 - RNA, 25 nt, Human
ccucugucacccaggcugaagugca

SEQ ID NO: 455616 - RNA, 18 nt, Human
ccuggcuucaagugaucc

SEQ ID NO: 455617 - RNA, 21 nt, Human
ccuggcuucaagugauccgcc

SEQ ID NO: 455618 - RNA, 23 nt, Human
ccuggcuucaagugauccgccug

SEQ ID NO: 455619 - RNA, 21 nt, Human
ccuuguuuuacugaggguaga

SEQ ID NO: 455620 - RNA, 23 nt, Human
cgggagcagaggaagagggagag

SEQ ID NO: 455621 - RNA, 21 nt, Human
cuaaacuugacuuagaggaca

SEQ ID NO: 455622 - RNA, 23 nt, Human
cuaauuuuuguauuuuuaguaga

SEQ ID NO: 455623 - RNA, 21 nt, Human
cuagcaacucuucaauaagac

SEQ ID NO: 455624 - RNA, 21 nt, Human
cucaaucucuccauucagaga

SEQ ID NO: 455625 - RNA, 18 nt, Human
cucccugccucaccccuc

SEQ ID NO: 455626 - RNA, 18 nt, Human
cucgugccacccacaggc

SEQ ID NO: 455627 - RNA, 18 nt, Human
cucucaaucucuccauuc

SEQ ID NO: 455628 - RNA, 21 nt, Human
cugcaaccuccgccuccuggg

SEQ ID NO: 455629 - RNA, 23 nt, Human
cugcaaccuccgccuccuggguu

SEQ ID NO: 455630 - RNA, 24 nt, Human
cugcaaccuccgccuccuggguuc

SEQ ID NO: 455631 - RNA, 18 nt, Human
cuggucuugaaguccugg

SEQ ID NO: 455632 - RNA, 21 nt, Human
cugugaggaagguggcugggu

SEQ ID NO: 455633 - RNA, 18 nt, Human
gaagggcugcugcugugu

SEQ ID NO: 455634 - RNA, 18 nt, Human
gagguuucaccauguugg

SEQ ID NO: 455635 - RNA, 18 nt, Human
gauuacagguaugugcca

SEQ ID NO: 455636 - RNA, 22 nt, Human
gcaacucuucaauaagacagaa

SEQ ID NO: 455637 - RNA, 24 nt, Human
ggagaggacaugguuggagcuuuu

SEQ ID NO: 455638 - RNA, 19 nt, Human
ggauuacagguaugugcca

SEQ ID NO: 455639 - RNA, 23 nt, Human
gggacugauguggcacccuucug

SEQ ID NO: 455640 - RNA, 21 nt, Human
ggggaggggacugauguggca

SEQ ID NO: 455641 - RNA, 18 nt, Human
guagcugggauuacaggu

SEQ ID NO: 455642 - RNA, 24 nt, Human
guccgcucccugccucaccccucu

SEQ ID NO: 455643 - RNA, 21 nt, Human
guccuugcucgugccacccac

SEQ ID NO: 455644 - RNA, 19 nt, Human
uaaagcaaaacaaaagccc

SEQ ID NO: 455645 - RNA, 20 nt, Human
uaaagcaaaacaaaagccca

SEQ ID NO: 455646 - RNA, 24 nt, Human
uaauuuuuguauuuuuaguagaga

SEQ ID NO: 455647 - RNA, 21 nt, Human
uacagguaugugccaucacac

SEQ ID NO: 455648 - RNA, 19 nt, Human
uacucugaauccuagcaac

SEQ ID NO: 455649 - RNA, 21 nt, Human
uagaaaacugcugcaaaacau

SEQ ID NO: 455650 - RNA, 24 nt, Human
uagaaaauaggaaguccgcucccu

SEQ ID NO: 455651 - RNA, 22 nt, Human
uagagaugagguuucaccaugu

SEQ ID NO: 455652 - RNA, 24 nt, Human
uaguagagaugagguuucaccaug

SEQ ID NO: 455653 - RNA, 26 nt, Human
uaguagagaugagguuucaccauguu

SEQ ID NO: 455654 - RNA, 21 nt, Human
uaugacagaaucuuauccuug

SEQ ID NO: 455655 - RNA, 19 nt, Human
ucaagugauccgccugccu

SEQ ID NO: 455656 - RNA, 20 nt, Human
ucaagugauccgccugccuc

SEQ ID NO: 455657 - RNA, 18 nt, Human
ucacugagguuggggagg

SEQ ID NO: 455658 - RNA, 21 nt, Human
ucagcacagaccccgcgggag

SEQ ID NO: 455659 - RNA, 22 nt, Human
uccaaguagcugggauuacagg

SEQ ID NO: 455660 - RNA, 22 nt, Human
uccaaguagcugggauuacagg

SEQ ID NO: 455661 - RNA, 23 nt, Human
uccaaguagcugggauuacaggu

SEQ ID NO: 455662 - RNA, 24 nt, Human
uccaaguagcugggauuacaggua

SEQ ID NO: 455663 - RNA, 20 nt, Human
ucccucugucacccaggcug

SEQ ID NO: 455664 - RNA, 24 nt, Human
ucccugcaaccuccgccuccuggg

SEQ ID NO: 455665 - RNA, 25 nt, Human
ucccugcaaccuccgccuccugggu

SEQ ID NO: 455666 - RNA, 27 nt, Human
ucccugcaaccuccgccuccuggguuc

SEQ ID NO: 455667 - RNA, 20 nt, Human
ucccugcaaccuccgccucu

SEQ ID NO: 455668 - RNA, 21 nt, Human
ucccugugcggaugucagucc

SEQ ID NO: 455669 - RNA, 19 nt, Human
ucucagcacagaccccgcg

SEQ ID NO: 455670 - RNA, 24 nt, Human
ucucccucugucacccaggcugaa

SEQ ID NO: 455671 - RNA, 18 nt, Human
ucucuaugccuaugacag

SEQ ID NO: 455672 - RNA, 24 nt, Human
ucugucacccaggcugaagugcag

SEQ ID NO: 455673 - RNA, 27 nt, Human
ugaagugcaguggugcaguccuagcag

SEQ ID NO: 455674 - RNA, 24 nt, Human
ugagguuucaccauguuggccaag

SEQ ID NO: 455675 - RNA, 21 nt, Human
ugauuuccauaaagcaaaaca

SEQ ID NO: 455676 - RNA, 18 nt, Human
ugcaguggugcagucucc

SEQ ID NO: 455677 - RNA, 23 nt, Human
ugccucaccccucuuaagcauca

SEQ ID NO: 455678 - RNA, 24 nt, Human
uggccaagcuggucuugaaguccu

SEQ ID NO: 455679 - RNA, 24 nt, Human
uggcuucaagugauccgccugccu

SEQ ID NO: 455680 - RNA, 20 nt, Human
ugggaagggcugcugcugug

SEQ ID NO: 455681 - RNA, 18 nt, Human
ugggauuacaggggugag

SEQ ID NO: 455682 - RNA, 18 nt, Human
ugggauuacaggggugag

SEQ ID NO: 455683 - RNA, 18 nt, Human
ugggauuacaggggugag

SEQ ID NO: 455684 - RNA, 20 nt, Human
ugggauuacaggggugaggu

SEQ ID NO: 455685 - RNA, 23 nt, Human
ugggauuacaggggugagguauc

SEQ ID NO: 455686 - RNA, 18 nt, Human
ugggauuacagguaugug

SEQ ID NO: 455687 - RNA, 19 nt, Human
ugggauuacagguaugugc

SEQ ID NO: 455688 - RNA, 21 nt, Human
ugggauuacagguaugugcca

SEQ ID NO: 455689 - RNA, 21 nt, Human
ugggauuacagguaugugcca

SEQ ID NO: 455690 - RNA, 22 nt, Human
ugggauuacagguaugugccau

SEQ ID NO: 455691 - RNA, 24 nt, Human
ugggauuacagguaugugccauca

SEQ ID NO: 455692 - RNA, 18 nt, Human
uuaguagagaugagguuu

SEQ ID NO: 455693 - RNA, 22 nt, Human
uuaguagagaugagguuucacc

SEQ ID NO: 455694 - RNA, 24 nt, Human
uuaguagagaugagguuucaccau

SEQ ID NO: 455695 - RNA, 21 nt, Human
uucaagugauccgccugccuc

SEQ ID NO: 455696 - RNA, 26 nt, Human
uucaagugauccgccugccucaccca

SEQ ID NO: 455697 - RNA, 21 nt, Human
uuucaccauguuggccaagcu

SEQ ID NO: 455698 - RNA, 24 nt, Human
uuuuuaguagagaugagguuucac

SEQ ID NO: 455699 - RNA, 20 nt, Human
uuuuuguauuuuuaguagag

SEQ ID NO: 455700 - RNA, 21 nt, Human
aaaaagcaauacuuaaacuga

SEQ ID NO: 455701 - RNA, 19 nt, Human
aacugaauuaaaacuaccc

SEQ ID NO: 455702 - RNA, 18 nt, Human
aagaaccacuccggggag

SEQ ID NO: 455703 - RNA, 19 nt, Human
aagaggcucggaacgccug

SEQ ID NO: 455704 - RNA, 25 nt, Human
aagaggcucggaacgccugcccucu

SEQ ID NO: 455705 - RNA, 21 nt, Human
acugauugcuuuuccugcagc

SEQ ID NO: 455706 - RNA, 20 nt, Human
agaugccagugacgaugcca

SEQ ID NO: 455707 - RNA, 22 nt, Human
agcuuuuuaaucuaccuggaac

SEQ ID NO: 455708 - RNA, 23 nt, Human
agggacucuuuggagaguggcug

SEQ ID NO: 455709 - RNA, 21 nt, Human
aucauguccugccggcucucc

SEQ ID NO: 455710 - RNA, 21 nt, Human
augcacaguguagggaagcug

SEQ ID NO: 455711 - RNA, 22 nt, Human
caaaaagcaauacuuaaacuga

SEQ ID NO: 455712 - RNA, 22 nt, Human
cacagccuacugcuggcugucc

SEQ ID NO: 455713 - RNA, 24 nt, Human
cacagccuacugcuggcuguccug

SEQ ID NO: 455714 - RNA, 20 nt, Human
cacugugggccugcuucagg

SEQ ID NO: 455715 - RNA, 20 nt, Human
caggaagaggcucggaacgg

SEQ ID NO: 455716 - RNA, 24 nt, Human
cccacacgugaagcuucuuggaau

SEQ ID NO: 455717 - RNA, 22 nt, Human
cccacugccgagaagaaccacu

SEQ ID NO: 455718 - RNA, 23 nt, Human
cccagacugaagagaccuggggc

SEQ ID NO: 455719 - RNA, 22 nt, Human
ccgaggauggccacacuguggg

SEQ ID NO: 455720 - RNA, 19 nt, Human
ccucacaaucauguccugc

SEQ ID NO: 455721 - RNA, 21 nt, Human
ccuguggggucucucugcugu

SEQ ID NO: 455722 - RNA, 22 nt, Human
cgaugcccgccaagauuccaga

SEQ ID NO: 455723 - RNA, 24 nt, Human
cgccaagauuccagaguaagucag

SEQ ID NO: 455724 - RNA, 24 nt, Human
cgcuugaagcccaaagcgaugagg

SEQ ID NO: 455725 - RNA, 22 nt, Human
cggcgaugcccgccaagauucc

SEQ ID NO: 455726 - RNA, 24 nt, Human
cuccagaauugcguggcaucugcc

SEQ ID NO: 455727 - RNA, 21 nt, Human
cugcccucuauucuauagaaa

SEQ ID NO: 455728 - RNA, 21 nt, Human
cuggggagcuggugguguaga

SEQ ID NO: 455729 - RNA, 24 nt, Human
cugguaauggaauaauagggucuu

SEQ ID NO: 455730 - RNA, 25 nt, Human
cuuggcagaaaugccugugcccaga

SEQ ID NO: 455731 - RNA, 20 nt, Human
gaagagaccuggggcucagg

SEQ ID NO: 455732 - RNA, 21 nt, Human
gaagagaccuggggcucagga

SEQ ID NO: 455733 - RNA, 22 nt, Human
gaccuggggcucaggaagaggc

SEQ ID NO: 455734 - RNA, 20 nt, Human
gccugcuucaggccgagcuc

SEQ ID NO: 455735 - RNA, 24 nt, Human
gcgcagcagucauaagcgauguac

SEQ ID NO: 455736 - RNA, 21 nt, Human
ggaagcccuuggcggcucugc

SEQ ID NO: 455737 - RNA, 22 nt, Human
ggaagcugugggcagcuggggu

SEQ ID NO: 455738 - RNA, 22 nt, Human
ggagauguguucccacuugucc

SEQ ID NO: 455739 - RNA, 23 nt, Human
uaaaacuacccacacgugaagcu

SEQ ID NO: 455740 - RNA, 22 nt, Human
uaaacugaauuaaaacuaccca

SEQ ID NO: 455741 - RNA, 22 nt, Human
uaacagacuuggcagaaaugcc

SEQ ID NO: 455742 - RNA, 20 nt, Human
uaccuggaacuaaggccaaa

SEQ ID NO: 455743 - RNA, 22 nt, Human
uagaaucaaacaggcagcagca

SEQ ID NO: 455744 - RNA, 22 nt, Human
ucauguccugccggcucuccug

SEQ ID NO: 455745 - RNA, 18 nt, Human
uccacagcgccuccucug

SEQ ID NO: 455746 - RNA, 26 nt, Human
ucuggaaggagagcugaucccguccg

SEQ ID NO: 455747 - RNA, 18 nt, Human
ugacgaugccaccugcaa

SEQ ID NO: 455748 - RNA, 24 nt, Human
ugaguugugacugauugcuuuucc

SEQ ID NO: 455749 - RNA, 21 nt, Human
ugcaaauacugugcccacugc

SEQ ID NO: 455750 - RNA, 21 nt, Human
ugcccacugccgagaagaacc

SEQ ID NO: 455751 - RNA, 25 nt, Human
ugcccagacugaagagaccuggggg

SEQ ID NO: 455752 - RNA, 21 nt, Human
uggaaggagagcugaucucau

SEQ ID NO: 455753 - RNA, 18 nt, Human
uggcagaaaugccugugc

SEQ ID NO: 455754 - RNA, 21 nt, Human
uggcagaaaugccugugccca

SEQ ID NO: 455755 - RNA, 19 nt, Human
uggcaggccucuggggagc

SEQ ID NO: 455756 - RNA, 24 nt, Human
ugguguagaugccagugacgaugc

SEQ ID NO: 455757 - RNA, 23 nt, Human
uguagagccagugcugugcccug

SEQ ID NO: 455758 - RNA, 24 nt, Human
ugugacugauugcuuuuccugcag

SEQ ID NO: 455759 - RNA, 20 nt, Human
ugugcccacugccgagaaga

SEQ ID NO: 455760 - RNA, 22 nt, Human
uuaagcaucaagucaguuggca

SEQ ID NO: 455761 - RNA, 26 nt, Human
uuauacauuaaauagaaucaaacagg

SEQ ID NO: 455762 - RNA, 18 nt, Human
uucaggccgagcucagga

SEQ ID NO: 455763 - RNA, 22 nt, Human
uuggcagaaaugccugugccca

SEQ ID NO: 455764 - RNA, 19 nt, Human
uugggaguaggagaugugu

SEQ ID NO: 455765 - RNA, 21 nt, Human
uuuggagaguggcugccuguc

SEQ ID NO: 455766 - RNA, 22 nt, Human
aaaaaaagaacaaaaacaaaaa

SEQ ID NO: 455767 - RNA, 25 nt, Human
aaaaaagaacaaaaacaaaaauuaa

SEQ ID NO: 455768 - RNA, 20 nt, Human
aaaaacaaaaauuaaagaaa

SEQ ID NO: 455769 - RNA, 23 nt, Human
aaacaaacccaucguggcugugg

SEQ ID NO: 455770 - RNA, 24 nt, Human
aaacaggaaagcccacacacucuu

SEQ ID NO: 455771 - RNA, 25 nt, Human
aaacuggcucuccuucagcucucua

SEQ ID NO: 455772 - RNA, 20 nt, Human
aaagaaaaaaagaacaaaaa

SEQ ID NO: 455773 - RNA, 22 nt, Human
aaagaaaaaaagaacaaaaaca

SEQ ID NO: 455774 - RNA, 18 nt, Human
aaagaaagagaaaagaaa

SEQ ID NO: 455775 - RNA, 26 nt, Human
aaagaacaaaaacaaaaauuaaagaa

SEQ ID NO: 455776 - RNA, 19 nt, Human
aacaaaaacaaaaauuaaa

SEQ ID NO: 455777 - RNA, 21 nt, Human
aacaaaaauuaaagaaagaga

SEQ ID NO: 455778 - RNA, 19 nt, Human
aaccugcucuccucccucc

SEQ ID NO: 455779 - RNA, 19 nt, Human
aaccugcucuccucccucc

SEQ ID NO: 455780 - RNA, 24 nt, Human
aagaaaaaaagaacaaaaacaaaa

SEQ ID NO: 455781 - RNA, 27 nt, Human
aagaaaacagaaacaaacccaucgugg

SEQ ID NO: 455782 - RNA, 21 nt, Human
aagaaccaaaagaauucugca

SEQ ID NO: 455783 - RNA, 19 nt, Human
aagaaccuccagcuggcac

SEQ ID NO: 455784 - RNA, 21 nt, Human
aagaaccuccagcuggcacua

SEQ ID NO: 455785 - RNA, 22 nt, Human
aagcaggaggaggaggagacaa

SEQ ID NO: 455786 - RNA, 18 nt, Human
aagcccacacacucuuug

SEQ ID NO: 455787 - RNA, 23 nt, Human
aaguccaauuuuggggaaacugg

SEQ ID NO: 455788 - RNA, 23 nt, Human
aaucacuguuuuuaggaaacaaa

SEQ ID NO: 455789 - RNA, 21 nt, Human
acaagcaucuucucucucucu

SEQ ID NO: 455790 - RNA, 20 nt, Human
acccaagaaaacagaaacaa

SEQ ID NO: 455791 - RNA, 22 nt, Human
acccaagaaaacagaaacaaac

SEQ ID NO: 455792 - RNA, 22 nt, Human
accuucuccacuuucucugcua

SEQ ID NO: 455793 - RNA, 22 nt, Human
acugucccacccccugcucccu

SEQ ID NO: 455794 - RNA, 20 nt, Human
agaaccuccagcuggcacua

SEQ ID NO: 455795 - RNA, 23 nt, Human
agacaaacaagcccaacucuuca

SEQ ID NO: 455796 - RNA, 19 nt, Human
agaggugauuaaauacugc

SEQ ID NO: 455797 - RNA, 26 nt, Human
agcagagugcaggggagaagaaccua

SEQ ID NO: 455798 - RNA, 18 nt, Human
agcuggaggcaggaacuc

SEQ ID NO: 455799 - RNA, 25 nt, Human
aggagacaaacaagcccaacucuuc

SEQ ID NO: 455800 - RNA, 23 nt, Human
aggcaggaacucugagcagggga

SEQ ID NO: 455801 - RNA, 24 nt, Human
aggcugcugcaggcacacacuggu

SEQ ID NO: 455802 - RNA, 23 nt, Human
aguuuuuguuaccaagaaaguaa

SEQ ID NO: 455803 - RNA, 21 nt, Human
caagaucuucucuucuuauaa

SEQ ID NO: 455804 - RNA, 22 nt, Human
caagcccaacucuucauccucc

SEQ ID NO: 455805 - RNA, 21 nt, Human
caaguaaaaucacugauccac

SEQ ID NO: 455806 - RNA, 23 nt, Human
caaguaaggaucugaaaccugcu

SEQ ID NO: 455807 - RNA, 25 nt, Human
cacccaagaaaacagaaacaaaccu

SEQ ID NO: 455808 - RNA, 24 nt, Human
cacccccugcucccuccagccacu

SEQ ID NO: 455809 - RNA, 21 nt, Human
cacugauccaccuuuuuuucc

SEQ ID NO: 455810 - RNA, 18 nt, Human
cacugggguuggugaaau

SEQ ID NO: 455811 - RNA, 22 nt, Human
cacugggguuggugaaaucuca

SEQ ID NO: 455812 - RNA, 22 nt, Human
cagaaauccggcuuugcuuuuc

SEQ ID NO: 455813 - RNA, 26 nt, Human
cagagugcaggggagaagaaccuacu

SEQ ID NO: 455814 - RNA, 20 nt, Human
cagcagcagcgagcaccacc

SEQ ID NO: 455815 - RNA, 30 nt, Human
cagcuuuucuauuccuuauuuuaguuuuug

SEQ ID NO: 455816 - RNA, 22 nt, Human
caguaaaauaaaacuuuccuua

SEQ ID NO: 455817 - RNA, 20 nt, Human
caucguggcuguggaggcug

SEQ ID NO: 455818 - RNA, 22 nt, Human
caucguggcuguggaggcugcu

SEQ ID NO: 455819 - RNA, 22 nt, Human
cauucaauucacacacaccugg

SEQ ID NO: 455820 - RNA, 22 nt, Human
ccaaagaaccaaaagaauucug

SEQ ID NO: 455821 - RNA, 27 nt, Human
ccaacucuucauccuccuccuccucuc

SEQ ID NO: 455822 - RNA, 18 nt, Human
ccaagaaaacagaaacaa

SEQ ID NO: 455823 - RNA, 22 nt, Human
ccacccaagaaaacagaaacaa

SEQ ID NO: 455824 - RNA, 19 nt, Human
cccaucguggcuguggagg

SEQ ID NO: 455825 - RNA, 23 nt, Human
ccccacccaagaaaacagaaaca

SEQ ID NO: 455826 - RNA, 19 nt, Human
cccccucuuggagauucac

SEQ ID NO: 455827 - RNA, 22 nt, Human
cccccugcucccuccagccacu

SEQ ID NO: 455828 - RNA, 22 nt, Human
cccccuggcagcuggaggcagg

SEQ ID NO: 455829 - RNA, 23 nt, Human
ccccugcucccuccagccacucc

SEQ ID NO: 455830 - RNA, 24 nt, Human
ccccuggcagcuggaggcaggaac

SEQ ID NO: 455831 - RNA, 19 nt, Human
ccccuucccucuucugggc

SEQ ID NO: 455832 - RNA, 25 nt, Human
cccgucccugcuccccacccaagaa

SEQ ID NO: 455833 - RNA, 24 nt, Human
cccugcucccuccagccacucccc

SEQ ID NO: 455834 - RNA, 19 nt, Human
ccugcugcuggcuggcugu

SEQ ID NO: 455835 - RNA, 18 nt, Human
ccuuuuuuuccuuccugg

SEQ ID NO: 455836 - RNA, 22 nt, Human
cuaauucuauaguuucuucagc

SEQ ID NO: 455837 - RNA, 24 nt, Human
cuccauucaauucacacacaccug

SEQ ID NO: 455838 - RNA, 24 nt, Human
cuccccuucccucuucugggcacu

SEQ ID NO: 455839 - RNA, 21 nt, Human
cucccuccgcccgucccugcu

SEQ ID NO: 455840 - RNA, 21 nt, Human
cuccgcccgucccugcucccc

SEQ ID NO: 455841 - RNA, 19 nt, Human
cuccugcugcuggcuggcu

SEQ ID NO: 455842 - RNA, 21 nt, Human
cuccugcugcuggcuggcugu

SEQ ID NO: 455843 - RNA, 21 nt, Human
cugcauaucauaucccccucu

SEQ ID NO: 455844 - RNA, 23 nt, Human
cuuaaagaaaaaaagaacaaaaa

SEQ ID NO: 455845 - RNA, 27 nt, Human
cuuaaagaaaaaaagaacaaaaacaaa

SEQ ID NO: 455846 - RNA, 20 nt, Human
cuucugggcacugggguugg

SEQ ID NO: 455847 - RNA, 24 nt, Human
cuugccgccgggaucccguggcuu

SEQ ID NO: 455848 - RNA, 19 nt, Human
gaaacuggcucuccuucag

SEQ ID NO: 455849 - RNA, 21 nt, Human
gaaccuacuggcuguucuugg

SEQ ID NO: 455850 - RNA, 20 nt, Human
gacuugucuucucuaccuaa

SEQ ID NO: 455851 - RNA, 22 nt, Human
gaggagacagcgggauaaccac

SEQ ID NO: 455852 - RNA, 26 nt, Human
gaguggugggguuaccgcgcagggag

SEQ ID NO: 455853 - RNA, 19 nt, Human
gcuggaggcaggaacucug

SEQ ID NO: 455854 - RNA, 25 nt, Human
ggcucggcaaguaaggaucugaaac

SEQ ID NO: 455855 - RNA, 23 nt, Human
ggcucugcuuguucuuggagagg

SEQ ID NO: 455856 - RNA, 24 nt, Human
gggcacugggguuggugaaaucuc

SEQ ID NO: 455857 - RNA, 21 nt, Human
guaaaauaaaacuuuccuuaa

SEQ ID NO: 455858 - RNA, 19 nt, Human
uaagaaggaucaauuggca

SEQ ID NO: 455859 - RNA, 19 nt, Human
uacaauguuucuuaccuug

SEQ ID NO: 455860 - RNA, 18 nt, Human
uacacacagaauaagaag

SEQ ID NO: 455861 - RNA, 25 nt, Human
uaccaagaaaguaaaaugaacagua

SEQ ID NO: 455862 - RNA, 25 nt, Human
uaccaugcaaggucuuggcuacccu

SEQ ID NO: 455863 - RNA, 19 nt, Human
uagugggcucccugucauu

SEQ ID NO: 455864 - RNA, 21 nt, Human
uaucauaucccccucuuggag

SEQ ID NO: 455865 - RNA, 20 nt, Human
ucacugauccaccuuuuuuu

SEQ ID NO: 455866 - RNA, 18 nt, Human
ucacugcagcuuaugagg

SEQ ID NO: 455867 - RNA, 20 nt, Human
ucacugcagcuuaugaggua

SEQ ID NO: 455868 - RNA, 25 nt, Human
ucacugcagcuuaugagguaguggg

SEQ ID NO: 455869 - RNA, 26 nt, Human
ucagcagcagcagcgagcaccaccag

SEQ ID NO: 455870 - RNA, 23 nt, Human
ucagccucuguuuaaaguaacaa

SEQ ID NO: 455871 - RNA, 18 nt, Human
ucagcucucuagcccccc

SEQ ID NO: 455872 - RNA, 19 nt, Human
ucaggaguggugggguuac

SEQ ID NO: 455873 - RNA, 20 nt, Human
ucccacccccugcucccucc

SEQ ID NO: 455874 - RNA, 22 nt, Human
ucccacccccugcucccuccag

SEQ ID NO: 455875 - RNA, 22 nt, Human
ucccuccagccacuccccuucc

SEQ ID NO: 455876 - RNA, 21 nt, Human
ucccucuucugggcacugggg

SEQ ID NO: 455877 - RNA, 19 nt, Human
ucccugccuugggcaaggg

SEQ ID NO: 455878 - RNA, 23 nt, Human
uccuuaaagaaaaaaagaacaaa

SEQ ID NO: 455879 - RNA, 20 nt, Human
ucuaccuucuccacuuucuc

SEQ ID NO: 455880 - RNA, 22 nt, Human
ucucacugcagcuuaugaggua

SEQ ID NO: 455881 - RNA, 21 nt, Human
ugaaaccugcucuccucccuc

SEQ ID NO: 455882 - RNA, 24 nt, Human
ugauccaccuuuuuuuccuuccug

SEQ ID NO: 455883 - RNA, 20 nt, Human
ugcacgaggcccccgccaga

SEQ ID NO: 455884 - RNA, 22 nt, Human
ugcaggcacacacugguguaua

SEQ ID NO: 455885 - RNA, 21 nt, Human
ugcccgaacgaugacacaagg

SEQ ID NO: 455886 - RNA, 23 nt, Human
ugcccgaacgaugacacaaggac

SEQ ID NO: 455887 - RNA, 21 nt, Human
ugcccuugcauaaaaaaacag

SEQ ID NO: 455888 - RNA, 23 nt, Human
ugccuugggcaagggccaguggc

SEQ ID NO: 455889 - RNA, 21 nt, Human
ugcugcuggcuggcugucccc

SEQ ID NO: 455890 - RNA, 21 nt, Human
uggcagcuggaggcaggaacu

SEQ ID NO: 455891 - RNA, 24 nt, Human
uggcauggugcuggcaaagaaccu

SEQ ID NO: 455892 - RNA, 19 nt, Human
uggcccgggcucugcuugu

SEQ ID NO: 455893 - RNA, 21 nt, Human
ugucccacccccugcucccuc

SEQ ID NO: 455894 - RNA, 23 nt, Human
uguuaccaagaaaguaaaaugaa

SEQ ID NO: 455895 - RNA, 23 nt, Human
uucccugccuugggcaagggcug

SEQ ID NO: 455896 - RNA, 21 nt, Human
uuggggaaacuggcucuccuu

SEQ ID NO: 455897 - RNA, 24 nt, Human
uuggggaaacuggcucuccuucag

SEQ ID NO: 455898 - RNA, 23 nt, Human
uuguuaccaagaaaguaaaauga

SEQ ID NO: 455899 - RNA, 27 nt, Human
uuuguaauuuuuuuuuacaauguuucu

SEQ ID NO: 455900 - RNA, 23 nt, Human
aaaacaaguacucuggaccaaaa

SEQ ID NO: 455901 - RNA, 18 nt, Human
aaaauaaaaacaggaaaa

SEQ ID NO: 455902 - RNA, 19 nt, Human
aaacaggugccagaagccc

SEQ ID NO: 455903 - RNA, 19 nt, Human
aagaggaauuagccuacag

SEQ ID NO: 455904 - RNA, 22 nt, Human
aagcaaagcagcaggauccccu

SEQ ID NO: 455905 - RNA, 19 nt, Human
aagcugcugcggagcuggc

SEQ ID NO: 455906 - RNA, 24 nt, Human
aaggcaacgacuuaauaccaaaau

SEQ ID NO: 455907 - RNA, 24 nt, Human
aagucuccugaugucaagcaaucc

SEQ ID NO: 455908 - RNA, 19 nt, Human
aauaaaaacaggaaaagaa

SEQ ID NO: 455909 - RNA, 21 nt, Human
aaucugcucuccaugccucag

SEQ ID NO: 455910 - RNA, 23 nt, Human
acacacacacacacacacacaca

SEQ ID NO: 455911 - RNA, 23 nt, Human
acacacacacacacacacacaca

SEQ ID NO: 455912 - RNA, 23 nt, Human
acacacacacacacacacacaca

SEQ ID NO: 455913 - RNA, 23 nt, Human
acacacacacacacacacacaca

SEQ ID NO: 455914 - RNA, 23 nt, Human
acgcacacgcacauacacacaca

SEQ ID NO: 455915 - RNA, 23 nt, Human
acgcacauacacacacacacaca

SEQ ID NO: 455916 - RNA, 19 nt, Human
acuacauucucuuuauucu

SEQ ID NO: 455917 - RNA, 23 nt, Human
agaaaaaaaaauuauucuucucu

SEQ ID NO: 455918 - RNA, 21 nt, Human
agcaaagcagcaggauccccu

SEQ ID NO: 455919 - RNA, 22 nt, Human
agcuaaucacuacgaaagccug

SEQ ID NO: 455920 - RNA, 18 nt, Human
agcugagcccuggaaagc

SEQ ID NO: 455921 - RNA, 23 nt, Human
aggaaaagaaaaaguuaaaacac

SEQ ID NO: 455922 - RNA, 19 nt, Human
aggaaaagaauuauuuuau

SEQ ID NO: 455923 - RNA, 23 nt, Human
aggagcuuuaaaguccuauacca

SEQ ID NO: 455924 - RNA, 19 nt, Human
aggcacacaugugcacgca

SEQ ID NO: 455925 - RNA, 19 nt, Human
aggcagggguggggagcag

SEQ ID NO: 455926 - RNA, 24 nt, Human
aggcagggguggggagcagaccug

SEQ ID NO: 455927 - RNA, 23 nt, Human
aggugccagaagcccagggaacu

SEQ ID NO: 455928 - RNA, 19 nt, Human
auagugcaucuugaaaaga

SEQ ID NO: 455929 - RNA, 28 nt, Human
augcagcuucaguuggggggggaacgcc

SEQ ID NO: 455930 - RNA, 25 nt, Human
caacacgcaggcacacaugugcacg

SEQ ID NO: 455931 - RNA, 21 nt, Human
caacuacuuaacauuuacuca

SEQ ID NO: 455932 - RNA, 23 nt, Human
caagcaauccuucgugacuuccc

SEQ ID NO: 455933 - RNA, 24 nt, Human
caaguaauuauacaaauaaacauc

SEQ ID NO: 455934 - RNA, 20 nt, Human
cacacacacacacacacaca

SEQ ID NO: 455935 - RNA, 20 nt, Human
cacacacacacacacacaca

SEQ ID NO: 455936 - RNA, 20 nt, Human
cacacacacacacacacaca

SEQ ID NO: 455937 - RNA, 20 nt, Human
cacacacacacacacacaca

SEQ ID NO: 455938 - RNA, 20 nt, Human
cacacacacacacacacaca

SEQ ID NO: 455939 - RNA, 26 nt, Human
cacacacacacacacacacacacaca

SEQ ID NO: 455940 - RNA, 30 nt, Human; identical to SEQ ID NO: 326474

SEQ ID NO: 455941 - RNA, 29 nt, Human
cacacacacacacacacacacacacccug

SEQ ID NO: 455942 - RNA, 20 nt, Human
cacacacccugaaucugcuc

SEQ ID NO: 455943 - RNA, 21 nt, Human
cacagaccaagacuuugaagc

SEQ ID NO: 455944 - RNA, 26 nt, Human
cacauacacacacacacacacacaca

SEQ ID NO: 455945 - RNA, 31 nt, Human
cacgcacacgcacauacacacacacacacag

SEQ ID NO: 455946 - RNA, 22 nt, Human
cagaaaggaucuggcggugcca

SEQ ID NO: 455947 - RNA, 23 nt, Human
cagacccagcucccaaacugaag

SEQ ID NO: 455948 - RNA, 22 nt, Human
cagcuuuacaaauaaaggcaac

SEQ ID NO: 455949 - RNA, 25 nt, Human
cauacacacacacacacacacacac

SEQ ID NO: 455950 - RNA, 25 nt, Human
caugugcacgcacacgcacauacac

SEQ ID NO: 455951 - RNA, 21 nt, Human
ccaaaaauaaaacuucuuuga

SEQ ID NO: 455952 - RNA, 24 nt, Human
ccaaaaauaaaacuucuuugaagg

SEQ ID NO: 455953 - RNA, 23 nt, Human
ccaaaaggagcuuuaaaguccua

SEQ ID NO: 455954 - RNA, 22 nt, Human
ccaaacugaagagugacucaca

SEQ ID NO: 455955 - RNA, 21 nt, Human
ccacugcgcgcuccugucugc

SEQ ID NO: 455956 - RNA, 24 nt, Human
ccagaagcccagggaacuccuccc

SEQ ID NO: 455957 - RNA, 18 nt, Human
cccagggaacuccucccu

SEQ ID NO: 455958 - RNA, 19 nt, Human
ccccaaaccacuaccgugc

SEQ ID NO: 455959 - RNA, 21 nt, Human
ccccauguuagcagaaagcuc

SEQ ID NO: 455960 - RNA, 19 nt, Human
cccccaagucuccugaugu

SEQ ID NO: 455961 - RNA, 19 nt, Human
ccuccggggcagcucagcu

SEQ ID NO: 455962 - RNA, 19 nt, Human
ccugcggaaaccuccccaa

SEQ ID NO: 455963 - RNA, 21 nt, Human
ccugcggaaaccuccccaaac

SEQ ID NO: 455964 - RNA, 23 nt, Human
ccugcggaaaccuccccaaacca

SEQ ID NO: 455965 - RNA, 25 nt, Human
cgacuuaauaccaaaauaaaaacag

SEQ ID NO: 455966 - RNA, 23 nt, Human
cgcacauacacacacacacacac

SEQ ID NO: 455967 - RNA, 20 nt, Human
cgucuggaugaggacugccc

SEQ ID NO: 455968 - RNA, 23 nt, Human
cuacaaucccccccaagucuccu

SEQ ID NO: 455969 - RNA, 21 nt, Human
cuaugccagugccugcuaccu

SEQ ID NO: 455970 - RNA, 21 nt, Human
cuccaaaauauaaacacugua

SEQ ID NO: 455971 - RNA, 19 nt, Human
cugaaucugcucuccaugc

SEQ ID NO: 455972 - RNA, 20 nt, Human
cugacugcucucucuccccg

SEQ ID NO: 455973 - RNA, 22 nt, Human
cuugaaaagcugcugcggagcu

SEQ ID NO: 455974 - RNA, 19 nt, Human
cuugguuugguucccugca

SEQ ID NO: 455975 - RNA, 18 nt, Human
cuuuauucuuccgaggca

SEQ ID NO: 455976 - RNA, 18 nt, Human
gaacuccucccucccucc

SEQ ID NO: 455977 - RNA, 20 nt, Human
gacccagcucccaaacugag

SEQ ID NO: 455978 - RNA, 19 nt, Human
gaccugcggaaaccucccc

SEQ ID NO: 455979 - RNA, 22 nt, Human
gagggcuucgggggucucuccg

SEQ ID NO: 455980 - RNA, 24 nt, Human
gcaaagcagcaggauccccuagag

SEQ ID NO: 455981 - RNA, 26 nt, Human
gcagcuucaguuggggggggaacgcc

SEQ ID NO: 455982 - RNA, 24 nt, Human
gcggagcuggcuggacacaucggg

SEQ ID NO: 455983 - RNA, 22 nt, Human
ggaaguagcgaggaaggaaagc

SEQ ID NO: 455984 - RNA, 19 nt, Human
ggaauugaaaacugagucu

SEQ ID NO: 455985 - RNA, 21 nt, Human
ggcaacgacuuaauaccaaaa

SEQ ID NO: 455986 - RNA, 30 nt, Human
ggcacacaugugcacgcacacgcacauaca

SEQ ID NO: 455987 - RNA, 19 nt, Human
gggagcugagcccuggaaa

SEQ ID NO: 455988 - RNA, 20 nt, Human
ggugggguccuaacagcugg

SEQ ID NO: 455989 - RNA, 23 nt, Human
gugcacgcacacgcacauacaca

SEQ ID NO: 455990 - RNA, 21 nt, Human
guggggagcagaccugcggaa

SEQ ID NO: 455991 - RNA, 24 nt, Human
uaacagcugguugggagcugagcc

SEQ ID NO: 455992 - RNA, 28 nt, Human
uaauaccaaaauaaaaacaggaaaagaa

SEQ ID NO: 455993 - RNA, 20 nt, Human
uacacacacacacacacaca

SEQ ID NO: 455994 - RNA, 25 nt, Human
uacacacacacacacacacacacac

SEQ ID NO: 455995 - RNA, 18 nt, Human
uaccaaaauaaaaacagg

SEQ ID NO: 455996 - RNA, 20 nt, Human
uagaaacaggugccagaagc

SEQ ID NO: 455997 - RNA, 23 nt, Human
uaggccuuugagaagcuaagcuu

SEQ ID NO: 455998 - RNA, 23 nt, Human
ucaagcaauccuucgugacuucc

SEQ ID NO: 455999 - RNA, 23 nt, Human
ucagcuuugugcacuuuggggug

SEQ ID NO: 456000 - RNA, 18 nt, Human
uccacaggaaaagaauua

SEQ ID NO: 456001 - RNA, 18 nt, Human
ucccuagagaaaaaaaaa

SEQ ID NO: 456002 - RNA, 20 nt, Human
ucccuccggggcagcucagc

SEQ ID NO: 456003 - RNA, 22 nt, Human
ucccuccggggcagcucagcuu

SEQ ID NO: 456004 - RNA, 21 nt, Human
ucgacaauaaaggcaaaaggg

SEQ ID NO: 456005 - RNA, 20 nt, Human
ucucccuagagaaaaaaaaa

SEQ ID NO: 456006 - RNA, 21 nt, Human
ucucuggguggggaaaagccc

SEQ ID NO: 456007 - RNA, 21 nt, Human
ucucuucaaaaacaggaauug

SEQ ID NO: 456008 - RNA, 21 nt, Human
ucugaaacauuuuccuuuuua

SEQ ID NO: 456009 - RNA, 19 nt, Human
ucugcuacaauccccccca

SEQ ID NO: 456010 - RNA, 22 nt, Human
ucuggaugaggacugcccugga

SEQ ID NO: 456011 - RNA, 22 nt, Human
ucuucggcuuugagaugcagcu

SEQ ID NO: 456012 - RNA, 27 nt, Human
ucuuuauucuuccgaggcagggguugg

SEQ ID NO: 456013 - RNA, 21 nt, Human
ugaagagugacucacagacca

SEQ ID NO: 456014 - RNA, 21 nt, Human
ugaaggagacggaauccuuuu

SEQ ID NO: 456015 - RNA, 19 nt, Human
ugccaaggcuugguuaggc

SEQ ID NO: 456016 - RNA, 23 nt, Human
ugccaaggcuugguuaggccuuu

SEQ ID NO: 456017 - RNA, 21 nt, Human
ugccucagauuaucucaguau

SEQ ID NO: 456018 - RNA, 19 nt, Human
uggaaucuucggcuuugag

SEQ ID NO: 456019 - RNA, 21 nt, Human
uggaugaggacugcccuggag

SEQ ID NO: 456020 - RNA, 22 nt, Human
ugggagcugagcccuggaaagc

SEQ ID NO: 456021 - RNA, 19 nt, Human
uggggaaaagcccagacgu

SEQ ID NO: 456022 - RNA, 24 nt, Human
uggggaaaagcccagacgucugcu

SEQ ID NO: 456023 - RNA, 20 nt, Human
ugggguccuaacagcugguu

SEQ ID NO: 456024 - RNA, 19 nt, Human
uugcagcauucacaaaaac

SEQ ID NO: 456025 - RNA, 20 nt, Human
uuuacaaauaaaggcaacga

SEQ ID NO: 456026 - RNA, 18 nt, Human
uuugaagcuuuugaaaau

SEQ ID NO: 456027 - RNA, 26 nt, Human
aaacaccuagaaauucaucaaaaaua

SEQ ID NO: 456028 - RNA, 23 nt, Human
aacagcucaaacaauucaauaau

SEQ ID NO: 456029 - RNA, 22 nt, Human
aacccaguagugggucauaaaa

SEQ ID NO: 456030 - RNA, 18 nt, Human
aagaacucugagagcagg

SEQ ID NO: 456031 - RNA, 22 nt, Human
aagaacucugagagcaggacuc

SEQ ID NO: 456032 - RNA, 20 nt, Human
aauuguguuuguuacuaagg

SEQ ID NO: 456033 - RNA, 23 nt, Human
acgaaacagaagaacucugagag

SEQ ID NO: 456034 - RNA, 18 nt, Human
agcaggacucuggguauu

SEQ ID NO: 456035 - RNA, 18 nt, Human
aggcacuagguggaucca

SEQ ID NO: 456036 - RNA, 20 nt, Human
aucucuccuccccuccuccc

SEQ ID NO: 456037 - RNA, 25 nt, Human
aucucuccuccccuccuccccauug

SEQ ID NO: 456038 - RNA, 22 nt, Human
auuucuaaaacauacuuuaaaa

SEQ ID NO: 456039 - RNA, 21 nt, Human
caccuagaaauucaucaaaaa

SEQ ID NO: 456040 - RNA, 24 nt, Human
cagagaaaaauaucauaguucuca

SEQ ID NO: 456041 - RNA, 26 nt, Human
cagggugggugcuuagugaaccuguu

SEQ ID NO: 456042 - RNA, 25 nt, Human
caguagugggucauaaaaauccauu

SEQ ID NO: 456043 - RNA, 23 nt, Human
cccaaacaccuagaaauucauca

SEQ ID NO: 456044 - RNA, 24 nt, Human
ccugugcugcagugauuuccauaa

SEQ ID NO: 456045 - RNA, 18 nt, Human
cuccuccccuccucccca

SEQ ID NO: 456046 - RNA, 20 nt, Human
cuuuaucugucccuggcugg

SEQ ID NO: 456047 - RNA, 22 nt, Human
gagcaggacucuggguauugga

SEQ ID NO: 456048 - RNA, 24 nt, Human
gugggucacgaaacagaagaacuc

SEQ ID NO: 456049 - RNA, 22 nt, Human
uaacaucugaauuacuuuuccu

SEQ ID NO: 456050 - RNA, 19 nt, Human
uaauucuauuuuguucagg

SEQ ID NO: 456051 - RNA, 21 nt, Human
uaccaacuaauacaagcucac

SEQ ID NO: 456052 - RNA, 22 nt, Human
uaccaacuucuucaaguggcau

SEQ ID NO: 456053 - RNA, 21 nt, Human
uacuaggauggaucacacauu

SEQ ID NO: 456054 - RNA, 21 nt, Human
uauccaucucuccuccccucc

SEQ ID NO: 456055 - RNA, 20 nt, Human
uauggcccagaggcacuagg

SEQ ID NO: 456056 - RNA, 18 nt, Human
ucaaaacagcucaaacaa

SEQ ID NO: 456057 - RNA, 19 nt, Human
ucacgaaacagaagaacuc

SEQ ID NO: 456058 - RNA, 19 nt, Human
ucuaaaacauacuuuaaaa

SEQ ID NO: 456059 - RNA, 21 nt, Human
ucucuccuccccuccucccca

SEQ ID NO: 456060 - RNA, 20 nt, Human
ugaaauauccaucucuccuc

SEQ ID NO: 456061 - RNA, 22 nt, Human
ugaaauauccaucucuccuccc

SEQ ID NO: 456062 - RNA, 21 nt, Human
ugacccaaacaccuagaaauu

SEQ ID NO: 456063 - RNA, 19 nt, Human
ugaguccuuuaugacaguu

SEQ ID NO: 456064 - RNA, 18 nt, Human
ugcaugaccucuuuucua

SEQ ID NO: 456065 - RNA, 26 nt, Human
ugcucagccuuauggcccagaggcac

SEQ ID NO: 456066 - RNA, 20 nt, Human
uggaacagaaaauacuagga

SEQ ID NO: 456067 - RNA, 22 nt, Human
uggaacagaaaauacuaggaug

SEQ ID NO: 456068 - RNA, 18 nt, Human
ugguagaaaaguggguca

SEQ ID NO: 456069 - RNA, 24 nt, Human
ugucucauccucuuugcuagccua

SEQ ID NO: 456070 - RNA, 19 nt, Human
ugugacccaaacaccuaga

SEQ ID NO: 456071 - RNA, 22 nt, Human
uuaagugucuuguagcaauauu

SEQ ID NO: 456072 - RNA, 23 nt, Human
uucaggcuugagcuuuuguagga

SEQ ID NO: 456073 - RNA, 18 nt, Human
uucagguaauagcaauaa

SEQ ID NO: 456074 - RNA, 26 nt, Human
uugcugggucauuauauaaauugugu

SEQ ID NO: 456075 - RNA, 18 nt, Human
uuguacuuauuuugcucc

SEQ ID NO: 456076 - RNA, 18 nt, Human
uuuaauagcugaaaagaa

SEQ ID NO: 456077 - RNA, 21 nt, Human
uuugaaaagucucaacuagca

SEQ ID NO: 456078 - RNA, 22 nt, Human
uuuuuuaaaagcuaccaacuaa

SEQ ID NO: 456079 - RNA, 21 nt, Human
uuuuuuuuuuuuuuucucauu

SEQ ID NO: 456080 - RNA, 19 nt, Human
aaagaaaacggaaaaaguc

SEQ ID NO: 456081 - RNA, 24 nt, Human
aaagugcugggauuacaggcguga

SEQ ID NO: 456082 - RNA, 19 nt, Human
aagugcugggauuacaggc

SEQ ID NO: 456083 - RNA, 19 nt, Human
aagugcugggauuacaggc

SEQ ID NO: 456084 - RNA, 26 nt, Human
aagugcugggauuacaggcgugagcc

SEQ ID NO: 456085 - RNA, 18 nt, Human
aauaaggaacaagagaga

SEQ ID NO: 456086 - RNA, 20 nt, Human
aaugugaucuagaaauagag

SEQ ID NO: 456087 - RNA, 20 nt, Human
aauugccaugucuaauucuu

SEQ ID NO: 456088 - RNA, 18 nt, Human
acagcaacaacgaaucaa

SEQ ID NO: 456089 - RNA, 18 nt, Human
acaggguuucaccauguu

SEQ ID NO: 456090 - RNA, 21 nt, Human
acaggguuucaccauguuggc

SEQ ID NO: 456091 - RNA, 24 nt, Human
acaggguuucaccauguuggccag

SEQ ID NO: 456092 - RNA, 24 nt, Human
accauguuggccaggcuggucuug

SEQ ID NO: 456093 - RNA, 19 nt, Human
agagacagagcggggaagg

SEQ ID NO: 456094 - RNA, 25 nt, Human
aggaaaacgaggagaaaccgguacc

SEQ ID NO: 456095 - RNA, 23 nt, Human
aggaacaagagagagagagugac

SEQ ID NO: 456096 - RNA, 20 nt, Human
aggaagcaacagguuaaaca

SEQ ID NO: 456097 - RNA, 22 nt, Human
agguaagaaacaaaaaauaagg

SEQ ID NO: 456098 - RNA, 22 nt, Human
aguagagacaggguuucaccau

SEQ ID NO: 456099 - RNA, 18 nt, Human
agugcugggauuacaggc

SEQ ID NO: 456100 - RNA, 22 nt, Human
caaagaaaacggaaaaagucua

SEQ ID NO: 456101 - RNA, 24 nt, Human
caaagugcugggauuacaggcgug

SEQ ID NO: 456102 - RNA, 18 nt, Human
caagagagagagagugac

SEQ ID NO: 456103 - RNA, 21 nt, Human
caccauguuggccaggcuggu

SEQ ID NO: 456104 - RNA, 23 nt, Human
caccauguuggccaggcuggucu

SEQ ID NO: 456105 - RNA, 24 nt, Human
caccauguuggccaggcuggucuu

SEQ ID NO: 456106 - RNA, 27 nt, Human
caccauguuggccaggcuggucuugaa

SEQ ID NO: 456107 - RNA, 23 nt, Human
cacccgccucagccucccaaagu

SEQ ID NO: 456108 - RNA, 24 nt, Human
caggguuucaccauguuggccagg

SEQ ID NO: 456109 - RNA, 24 nt, Human
cauguuggccaggcuggucuugaa

SEQ ID NO: 456110 - RNA, 22 nt, Human
ccaaagugcugggauuacaggc

SEQ ID NO: 456111 - RNA, 22 nt, Human
ccaaagugcugggauuacaggc

SEQ ID NO: 456112 - RNA, 24 nt, Human
ccaaagugcugggauuacaggcgu

SEQ ID NO: 456113 - RNA, 26 nt, Human
ccacccgccucagccucccaaagugc

SEQ ID NO: 456114 - RNA, 21 nt, Human
ccacugcacccagccuuaagg

SEQ ID NO: 456115 - RNA, 22 nt, Human
ccacugcacccagccuuaaggu

SEQ ID NO: 456116 - RNA, 24 nt, Human
ccgccucagccucccaaagugcug

SEQ ID NO: 456117 - RNA, 20 nt, Human
ccugagcuugugauccaccc

SEQ ID NO: 456118 - RNA, 23 nt, Human
cgcuaggacugcaucuugggaac

SEQ ID NO: 456119 - RNA, 21 nt, Human
cggaaaaagucuaggaguuag

SEQ ID NO: 456120 - RNA, 23 nt, Human
cggaaaaagucuaggaguuagug

SEQ ID NO: 456121 - RNA, 24 nt, Human
cucagaauagaaaggauuuuaaaa

SEQ ID NO: 456122 - RNA, 24 nt, Human
cuccugagcuugugauccacccgc

SEQ ID NO: 456123 - RNA, 25 nt, Human
gaaauagagguugagauugcuccau

SEQ ID NO: 456124 - RNA, 22 nt, Human
gagcuugugauccacccgccuc

SEQ ID NO: 456125 - RNA, 24 nt, Human
gagcuugugauccacccgccucag

SEQ ID NO: 456126 - RNA, 19 nt, Human
gauauccuucaccccacuc

SEQ ID NO: 456127 - RNA, 18 nt, Human
gauuacaggcgugagcca

SEQ ID NO: 456128 - RNA, 19 nt, Human
gauuacaggcgugagccac

SEQ ID NO: 456129 - RNA, 23 nt, Human
gauuacaggcgugagccacugca

SEQ ID NO: 456130 - RNA, 23 nt, Human
gccucagccucccaaagugcugg

SEQ ID NO: 456131 - RNA, 20 nt, Human
ggacugcaucuugggaacag

SEQ ID NO: 456132 - RNA, 20 nt, Human
ggacugcaucuugggaacag

SEQ ID NO: 456133 - RNA, 23 nt, Human
ggcuggucuugaacuccugagcu

SEQ ID NO: 456134 - RNA, 22 nt, Human
ggguuucaccauguuggccagg

SEQ ID NO: 456135 - RNA, 24 nt, Human
gguaagaaacaaaaaauaaggaac

SEQ ID NO: 456136 - RNA, 22 nt, Human
guaagaaacaaaaaauaaggaa

SEQ ID NO: 456137 - RNA, 24 nt, Human
gugauccacccgccucagccuccc

SEQ ID NO: 456138 - RNA, 26 nt, Human
uaaacaguaagagguaagaaacaaaa

SEQ ID NO: 456139 - RNA, 22 nt, Human
uaaauaucugcauuaaagaacg

SEQ ID NO: 456140 - RNA, 23 nt, Human
uaagaaacaaaaaauaaggaaca

SEQ ID NO: 456141 - RNA, 25 nt, Human
uaagaaacaaaaaauaaggaacaag

SEQ ID NO: 456142 - RNA, 19 nt, Human
uacaggcgugagccacugc

SEQ ID NO: 456143 - RNA, 24 nt, Human
uacaggcgugagccacugcaccca

SEQ ID NO: 456144 - RNA, 22 nt, Human
uagagacaggguuucaccaugu

SEQ ID NO: 456145 - RNA, 24 nt, Human
uaguagagacaggguuucaccaug

SEQ ID NO: 456146 - RNA, 26 nt, Human
uaguagagacaggguuucaccauguu

SEQ ID NO: 456147 - RNA, 19 nt, Human
uauggaagauuugaaauac

SEQ ID NO: 456148 - RNA, 24 nt, Human
ucauauucccucuuuugucccaug

SEQ ID NO: 456149 - RNA, 21 nt, Human
uccacccgccucagccuccca

SEQ ID NO: 456150 - RNA, 18 nt, Human
uccagaaggaagcaacag

SEQ ID NO: 456151 - RNA, 24 nt, Human
ucccaaagugcugggauuacaggc

SEQ ID NO: 456152 - RNA, 24 nt, Human
uccuacuuaaaguguauccaaaga

SEQ ID NO: 456153 - RNA, 19 nt, Human
ucuugaacuccugagcuug

SEQ ID NO: 456154 - RNA, 22 nt, Human
ugaacuccugagcuugugaucc

SEQ ID NO: 456155 - RNA, 24 nt, Human
ugcugggauuacaggcgugagcca

SEQ ID NO: 456156 - RNA, 24 nt, Human
uggaagauuugaaauacaaggaua

SEQ ID NO: 456157 - RNA, 24 nt, Human
uggccaggcuggucuugaacuccu

SEQ ID NO: 456158 - RNA, 18 nt, Human
ugggauuacaggcgugag

SEQ ID NO: 456159 - RNA, 19 nt, Human
ugggauuacaggcgugagc

SEQ ID NO: 456160 - RNA, 21 nt, Human
ugggauuacaggcgugagcca

SEQ ID NO: 456161 - RNA, 22 nt, Human
ugggauuacaggcgugagccac

SEQ ID NO: 456162 - RNA, 22 nt, Human
ugggauuacaggcgugagccac

SEQ ID NO: 456163 - RNA, 24 nt, Human
ugggauuacaggcgugagccacug

SEQ ID NO: 456164 - RNA, 26 nt, Human
ugggauuacaggcgugagccacugca

SEQ ID NO: 456165 - RNA, 24 nt, Human
ugugauccacccgccucagccucc

SEQ ID NO: 456166 - RNA, 24 nt, Human
uuaguagagacaggguuucaccau

SEQ ID NO: 456167 - RNA, 25 nt, Human
uucaccccacuccaggaacguucgc

SEQ ID NO: 456168 - RNA, 22 nt, Human
uucccauaugcaaauauuucau

SEQ ID NO: 456169 - RNA, 24 nt, Human
uuucaccauguuggccaggcuggu

SEQ ID NO: 456170 - RNA, 22 nt, Human
aaagagaccuaaacaucuccua

SEQ ID NO: 456171 - RNA, 23 nt, Human
aaccagaguaacaaaacaauucc

SEQ ID NO: 456172 - RNA, 24 nt, Human
aacguccuaaaacccagaaaauuc

SEQ ID NO: 456173 - RNA, 21 nt, Human
aacuaugccaagugcaaagcc

SEQ ID NO: 456174 - RNA, 19 nt, Human
aagcagccugcaggagaga

SEQ ID NO: 456175 - RNA, 18 nt, Human
aagccccaugucuuuggg

SEQ ID NO: 456176 - RNA, 23 nt, Human
aaggaccaaggucuggccaggca

SEQ ID NO: 456177 - RNA, 22 nt, Human
aaggagcccccguggugggcgu

SEQ ID NO: 456178 - RNA, 21 nt, Human
aaggcagguguggauggagcc

SEQ ID NO: 456179 - RNA, 24 nt, Human
aauacaauaugaaaaaccccagaa

SEQ ID NO: 456180 - RNA, 20 nt, Human
aaugaagaugcccaggucug

SEQ ID NO: 456181 - RNA, 19 nt, Human
aaugugcagcucuaucccc

SEQ ID NO: 456182 - RNA, 20 nt, Human
aauuuugcacaaugacuguu

SEQ ID NO: 456183 - RNA, 21 nt, Human
acacuaagguaaugcacagaa

SEQ ID NO: 456184 - RNA, 18 nt, Human
acacuguaacggaaggua

SEQ ID NO: 456185 - RNA, 23 nt, Human
acagggugaucgggaaaaaagua

SEQ ID NO: 456186 - RNA, 20 nt, Human
accacaauuuggcacaacaa

SEQ ID NO: 456187 - RNA, 22 nt, Human
accagaguaacaaaacaauucc

SEQ ID NO: 456188 - RNA, 18 nt, Human
acucaucuccgagucuaa

SEQ ID NO: 456189 - RNA, 18 nt, Human
acucuuuacccaggccca

SEQ ID NO: 456190 - RNA, 29 nt, Human
acugcagccucagguccagcuggucccaa

SEQ ID NO: 456191 - RNA, 21 nt, Human
agaacccuacagcuaccuuuc

SEQ ID NO: 456192 - RNA, 22 nt, Human
agaagacugcagccucaggucc

SEQ ID NO: 456193 - RNA, 22 nt, Human
agaaucugaauacccuggauuu

SEQ ID NO: 456194 - RNA, 18 nt, Human
agagaagaccugcaugug

SEQ ID NO: 456195 - RNA, 19 nt, Human
agagggaaggggaaggggc

SEQ ID NO: 456196 - RNA, 20 nt, Human
agauacugcauaaacuacaa

SEQ ID NO: 456197 - RNA, 25 nt, Human
agcagaauacaggggcucagggcug

SEQ ID NO: 456198 - RNA, 19 nt, Human
agcaggggucccaguggcu

SEQ ID NO: 456199 - RNA, 18 nt, Human
agcccuugguggcucaga

SEQ ID NO: 456200 - RNA, 21 nt, Human
agcugcagcgugcggcgcccc

SEQ ID NO: 456201 - RNA, 20 nt, Human
aggaccacgagcauagacca

SEQ ID NO: 456202 - RNA, 28 nt, Human
aggcuggaaccuccuaaaacugcuuucu

SEQ ID NO: 456203 - RNA, 19 nt, Human
agggagcaggaccaggacu

SEQ ID NO: 456204 - RNA, 20 nt, Human
agguguggauggagccucug

SEQ ID NO: 456205 - RNA, 23 nt, Human
agugggcuccuggcgagccuggc

SEQ ID NO: 456206 - RNA, 19 nt, Human
auaaagaccaacauucuga

SEQ ID NO: 456207 - RNA, 19 nt, Human
aucugugcugggacaccuc

SEQ ID NO: 456208 - RNA, 19 nt, Human
augaaacuaugccaagugc

SEQ ID NO: 456209 - RNA, 22 nt, Human
augaaucaacacuguaacggaa

SEQ ID NO: 456210 - RNA, 19 nt, Human
auuuugcacaaugacuguu

SEQ ID NO: 456211 - RNA, 18 nt, Human
caaacacggugggagcug

SEQ ID NO: 456212 - RNA, 20 nt, Human
caaagcucucacaagugucc

SEQ ID NO: 456213 - RNA, 26 nt, Human
caaauaaauaccccauacuguaauga

SEQ ID NO: 456214 - RNA, 19 nt, Human
caacucagguucugccccu

SEQ ID NO: 456215 - RNA, 19 nt, Human
caacucagguucugccccu

SEQ ID NO: 456216 - RNA, 19 nt, Human
cacagcucugccucgugcu

SEQ ID NO: 456217 - RNA, 21 nt, Human
caccccaaguacaaaaggacu

SEQ ID NO: 456218 - RNA, 18 nt, Human
caccugcuguccacgcug

SEQ ID NO: 456219 - RNA, 22 nt, Human
cacggcaccugagaccgucucu

SEQ ID NO: 456220 - RNA, 24 nt, Human
cagaaaaaauacaguacucagaca

SEQ ID NO: 456221 - RNA, 19 nt, Human
cagagagcugugggagggg

SEQ ID NO: 456222 - RNA, 22 nt, Human
cagagagcugugggagggggca

SEQ ID NO: 456223 - RNA, 18 nt, Human
caguggcauauccaaaaa

SEQ ID NO: 456224 - RNA, 20 nt, Human
cauccccuacugcgcaugcc

SEQ ID NO: 456225 - RNA, 20 nt, Human
caucuccuaccugugaaucc

SEQ ID NO: 456226 - RNA, 22 nt, Human
ccacucccacuaaccucacuca

SEQ ID NO: 456227 - RNA, 23 nt, Human
ccagacaaacacggugggagcug

SEQ ID NO: 456228 - RNA, 18 nt, Human
ccagcagaauacaggggc

SEQ ID NO: 456229 - RNA, 18 nt, Human
ccagcagaauacaggggc

SEQ ID NO: 456230 - RNA, 22 nt, Human
ccauacagaugaaguuaucucc

SEQ ID NO: 456231 - RNA, 22 nt, Human
ccaugucuuugggacugaaccc

SEQ ID NO: 456232 - RNA, 18 nt, Human
ccccagaaucugaauacc

SEQ ID NO: 456233 - RNA, 18 nt, Human
ccuaugcugcaggcugga

SEQ ID NO: 456234 - RNA, 21 nt, Human
ccucacucagcaaacaaaaca

SEQ ID NO: 456235 - RNA, 20 nt, Human
ccuccugauacccucagcuc

SEQ ID NO: 456236 - RNA, 21 nt, Human
ccucuggaaaugggagaaccc

SEQ ID NO: 456237 - RNA, 19 nt, Human
ccuggguuauggucagcug

SEQ ID NO: 456238 - RNA, 25 nt, Human
cgaggaacaugcaagucucaacuca

SEQ ID NO: 456239 - RNA, 19 nt, Human
cgcaggccgggcccuccuc

SEQ ID NO: 456240 - RNA, 24 nt, Human
cgcagggcuuagaagauggcaggg

SEQ ID NO: 456241 - RNA, 26 nt, Human
cggcuagacuccuacccucugugcau

SEQ ID NO: 456242 - RNA, 19 nt, Human
cguccuaaaacccagaaaa

SEQ ID NO: 456243 - RNA, 24 nt, Human
cuaaagcuacacgcuauggagcac

SEQ ID NO: 456244 - RNA, 19 nt, Human
cuaugcugcaggcuggaac

SEQ ID NO: 456245 - RNA, 22 nt, Human
cucaacucagguucugccccuu

SEQ ID NO: 456246 - RNA, 20 nt, Human
cucacucagcaaacaaaaca

SEQ ID NO: 456247 - RNA, 19 nt, Human
cucagcuugucccagaagg

SEQ ID NO: 456248 - RNA, 24 nt, Human
cucccacuaaccucacucagcaaa

SEQ ID NO: 456249 - RNA, 21 nt, Human
cuccuuccuauuccuuuucca

SEQ ID NO: 456250 - RNA, 26 nt, Human
cugaugcaacgccccauggcgccucg

SEQ ID NO: 456251 - RNA, 22 nt, Human
cugcagugugacagggccgggu

SEQ ID NO: 456252 - RNA, 22 nt, Human
cuggcagccagggaagaagggu

SEQ ID NO: 456253 - RNA, 24 nt, Human
cugggcuuggggaagaaauucugg

SEQ ID NO: 456254 - RNA, 21 nt, Human
cuucacaacguccuaaaaccc

SEQ ID NO: 456255 - RNA, 19 nt, Human
gaaaaccuggggccuuggg

SEQ ID NO: 456256 - RNA, 26 nt, Human
gagaaaagagagcguuagaaagcggu

SEQ ID NO: 456257 - RNA, 19 nt, Human
gagcauagaccacggcacc

SEQ ID NO: 456258 - RNA, 18 nt, Human
gcaaagcuuucccagcac

SEQ ID NO: 456259 - RNA, 22 nt, Human
gcaggaccaggacuccucccuu

SEQ ID NO: 456260 - RNA, 24 nt, Human
gcaggggucccaguggcuugggug

SEQ ID NO: 456261 - RNA, 19 nt, Human
gccaucccccagauugcac

SEQ ID NO: 456262 - RNA, 23 nt, Human
gcgagucuugcuggggcaggggg

SEQ ID NO: 456263 - RNA, 18 nt, Human
gcugcagcgugcggcgcc

SEQ ID NO: 456264 - RNA, 21 nt, Human
gcuggaaccuccuaaaacugc

SEQ ID NO: 456265 - RNA, 19 nt, Human
ggaaggcagguguggaugg

SEQ ID NO: 456266 - RNA, 18 nt, Human
ggagcacacagcucugcc

SEQ ID NO: 456267 - RNA, 21 nt, Human
ggcagagagcugugggagggg

SEQ ID NO: 456268 - RNA, 20 nt, Human
ggcugcagugugacagggcc

SEQ ID NO: 456269 - RNA, 21 nt, Human
gggaagaacgcgcagggcaga

SEQ ID NO: 456270 - RNA, 22 nt, Human
gggaaggggaaggggcugcagu

SEQ ID NO: 456271 - RNA, 22 nt, Human
gggagggggcaacacggucucu

SEQ ID NO: 456272 - RNA, 20 nt, Human
gggcagagagcugugggaag

SEQ ID NO: 456273 - RNA, 22 nt, Human
ggugcuccugagggggcuuuga

SEQ ID NO: 456274 - RNA, 19 nt, Human
ggugugaggagcaccugcc

SEQ ID NO: 456275 - RNA, 24 nt, Human
guaaagaaucacugacuaacagaa

SEQ ID NO: 456276 - RNA, 20 nt, Human
guaacucgaaugccucuucc

SEQ ID NO: 456277 - RNA, 19 nt, Human
guaauacuacucauucaau

SEQ ID NO: 456278 - RNA, 22 nt, Human
gucaugcuucacaacguccuaa

SEQ ID NO: 456279 - RNA, 22 nt, Human
gucugggugugaggagcaccug

SEQ ID NO: 456280 - RNA, 18 nt, Human
gugggcaugccagcagcc

SEQ ID NO: 456281 - RNA, 20 nt, Human
uaaaaaaagaacauguguaa

SEQ ID NO: 456282 - RNA, 19 nt, Human
uaaccagagcaaaggucaa

SEQ ID NO: 456283 - RNA, 24 nt, Human
uaaccucacucagcaaacaaaaca

SEQ ID NO: 456284 - RNA, 21 nt, Human
uaauacuacucauucaauaau

SEQ ID NO: 456285 - RNA, 23 nt, Human
uaauaucaaaauaucaaaagugc

SEQ ID NO: 456286 - RNA, 21 nt, Human
uacaccuguggguguccaacc

SEQ ID NO: 456287 - RNA, 27 nt, Human
uacaggaccacgagcauagaggacauc

SEQ ID NO: 456288 - RNA, 22 nt, Human
uacuauggcuaacccucauccc

SEQ ID NO: 456289 - RNA, 19 nt, Human
uagcaggggucccaguggc

SEQ ID NO: 456290 - RNA, 24 nt, Human
uagguugcccuuccuuccuccuug

SEQ ID NO: 456291 - RNA, 21 nt, Human
uaugaaaaaccccagaaucug

SEQ ID NO: 456292 - RNA, 20 nt, Human
uccaacccagccaagcccuu

SEQ ID NO: 456293 - RNA, 20 nt, Human
uccaagaguaccaauuugac

SEQ ID NO: 456294 - RNA, 20 nt, Human
ucccaaagcacacucaaggu

SEQ ID NO: 456295 - RNA, 21 nt, Human
ucccuuggguuuccccacggg

SEQ ID NO: 456296 - RNA, 24 nt, Human
uccuaccaaugugacucuuuaccc

SEQ ID NO: 456297 - RNA, 22 nt, Human
uccugagggggcuuugaggagu

SEQ ID NO: 456298 - RNA, 19 nt, Human
ucggcccauacagaggccu

SEQ ID NO: 456299 - RNA, 22 nt, Human
ucuucggcccauacagaggccu

SEQ ID NO: 456300 - RNA, 24 nt, Human
ucuuugggacugaacccccuaugg

SEQ ID NO: 456301 - RNA, 20 nt, Human
ugaaaagaauugcaguggca

SEQ ID NO: 456302 - RNA, 21 nt, Human
ugaaaagaauugcaguggcau

SEQ ID NO: 456303 - RNA, 20 nt, Human
ugacaaguggcccuggcccu

SEQ ID NO: 456304 - RNA, 22 nt, Human
ugacuaacagaauuuugcacaa

SEQ ID NO: 456305 - RNA, 20 nt, Human
ugagaaugaucugugcuggg

SEQ ID NO: 456306 - RNA, 22 nt, Human
ugaggcggacagcuacaggacc

SEQ ID NO: 456307 - RNA, 23 nt, Human
ugaggcggacagcuacaggacca

SEQ ID NO: 456308 - RNA, 25 nt, Human
ugaucugugcugggacaccucccuu

SEQ ID NO: 456309 - RNA, 22 nt, Human
ugauuauuauuuuuuuguuugg

SEQ ID NO: 456310 - RNA, 25 nt, Human
ugcaaauaaauaccccauacagaug

SEQ ID NO: 456311 - RNA, 18 nt, Human
ugcacagaaaaaauacag

SEQ ID NO: 456312 - RNA, 23 nt, Human
ugcacagaaaaaauacaguacuc

SEQ ID NO: 456313 - RNA, 19 nt, Human
uggcagaagagaagaccug

SEQ ID NO: 456314 - RNA, 21 nt, Human
uggccaggcacuuggaaagcu

SEQ ID NO: 456315 - RNA, 22 nt, Human
uggcuaacccucauccccuacu

SEQ ID NO: 456316 - RNA, 24 nt, Human
uggcucagacuucaggcuaggguu

SEQ ID NO: 456317 - RNA, 20 nt, Human
ugggagcugaggcggacagc

SEQ ID NO: 456318 - RNA, 18 nt, Human
ugggagggggcaacacgg

SEQ ID NO: 456319 - RNA, 22 nt, Human
uggggcagggggaucugggccc

SEQ ID NO: 456320 - RNA, 21 nt, Human
uggggucaccccaaguacaaa

SEQ ID NO: 456321 - RNA, 18 nt, Human
ugggugcuccugaggggg

SEQ ID NO: 456322 - RNA, 21 nt, Human
ugggugugaggagcaccugcc

SEQ ID NO: 456323 - RNA, 24 nt, Human
uggguuauggucagcugugucugu

SEQ ID NO: 456324 - RNA, 21 nt, Human
ugguccuaccaaugugacucu

SEQ ID NO: 456325 - RNA, 19 nt, Human
uguaccacaauuuggcaca

SEQ ID NO: 456326 - RNA, 20 nt, Human
ugugacagggccggguggcc

SEQ ID NO: 456327 - RNA, 21 nt, Human
ugugggaaggcagguguggau

SEQ ID NO: 456328 - RNA, 23 nt, Human
uuagcaggggucccaguggcuug

SEQ ID NO: 456329 - RNA, 22 nt, Human
uucacaacguccuaaaacccag

SEQ ID NO: 456330 - RNA, 20 nt, Human
uucauacagcuugcucagcu

SEQ ID NO: 456331 - RNA, 21 nt, Human
uuccaugaaacuaugccaagu

SEQ ID NO: 456332 - RNA, 22 nt, Human
uuccuauuccuuuuccaugcuc

SEQ ID NO: 456333 - RNA, 23 nt, Human
uuccuggguuauggucagcugug

SEQ ID NO: 456334 - RNA, 24 nt, Human
uuccuggguuauggucagcugugu

SEQ ID NO: 456335 - RNA, 24 nt, Human
uugaagcucuccacgugcugggag

SEQ ID NO: 456336 - RNA, 21 nt, Human
uugcaguggcauauccaaaaa

SEQ ID NO: 456337 - RNA, 20 nt, Human
uugggugcugagggagcagg

SEQ ID NO: 456338 - RNA, 24 nt, Human
uuuaaaaucuguaauuucaaacau

SEQ ID NO: 456339 - RNA, 21 nt, Human
uuucuaagccccugaauuugc

SEQ ID NO: 456340 - RNA, 23 nt, Human
uuugaccacucccacuaaccuca

SEQ ID NO: 456341 - RNA, 25 nt, Human
uuugagaaugaucugugcugggaca

SEQ ID NO: 456342 - RNA, 19 nt, Human
uuuggagaaggaaggacag

SEQ ID NO: 456343 - RNA, 19 nt, Human
aaaaacaaaaaaccugagu

SEQ ID NO: 456344 - RNA, 24 nt, Human
aaacaaaaaaccugaguauaaaac

SEQ ID NO: 456345 - RNA, 31 nt, Human
aaacaaaaaaccugaguauaaaaccucagcu

SEQ ID NO: 456346 - RNA, 22 nt, Human
aaccucagcaguguuccagcac

SEQ ID NO: 456347 - RNA, 24 nt, Human
acagcagcaggccgccaccuccag

SEQ ID NO: 456348 - RNA, 22 nt, Human
accagcacucccccugcuaccu

SEQ ID NO: 456349 - RNA, 22 nt, Human
agaaaaaacgaaaacuggaaua

SEQ ID NO: 456350 - RNA, 20 nt, Human
cagggcaguggucauggggg

SEQ ID NO: 456351 - RNA, 26 nt, Human
ccugccgugugggcaggggcaggagu

SEQ ID NO: 456352 - RNA, 20 nt, Human
cuggcggcggcgaugcuggc

SEQ ID NO: 456353 - RNA, 24 nt, Human
cuggcggcggcgaugcuggcagcg

SEQ ID NO: 456354 - RNA, 24 nt, Human
gaaaacaguuaaaaagauaacagc

SEQ ID NO: 456355 - RNA, 25 nt, Human
ggcaggagugaauggcucuuccugg

SEQ ID NO: 456356 - RNA, 21 nt, Human
ggcaggggcaggagugaaugg

SEQ ID NO: 456357 - RNA, 20 nt, Human
uaaaaaggcaucaugagaaa

SEQ ID NO: 456358 - RNA, 24 nt, Human
uaacagcagcaggccgccaccucc

SEQ ID NO: 456359 - RNA, 19 nt, Human
uagaaaaaacgaaaacugg

SEQ ID NO: 456360 - RNA, 19 nt, Human
uauaaaaaggcaucaugag

SEQ ID NO: 456361 - RNA, 24 nt, Human
uaucacacaggggugugaccagca

SEQ ID NO: 456362 - RNA, 20 nt, Human
uccagggcaguggucauggg

SEQ ID NO: 456363 - RNA, 21 nt, Human
ucuguaagccacccgggaggc

SEQ ID NO: 456364 - RNA, 23 nt, Human
ugaccagcacucccccugcuacc

SEQ ID NO: 456365 - RNA, 20 nt, Human
ugagaaaacaguuaaaaaga

SEQ ID NO: 456366 - RNA, 20 nt, Human
ugagaaaacaguuaaaaaga

SEQ ID NO: 456367 - RNA, 18 nt, Human
ugccgugugggcaggggc

SEQ ID NO: 456368 - RNA, 23 nt, Human
uggcggcggcgaugcuggcagcg

SEQ ID NO: 456369 - RNA, 22 nt, Human
ugggcacaggccacaguuaacc

SEQ ID NO: 456370 - RNA, 19 nt, Human
uggggguggggccagcccc

SEQ ID NO: 456371 - RNA, 22 nt, Human
uggggguggggccagccccgcc

SEQ ID NO: 456372 - RNA, 19 nt, Human
uuuuuuuuuuuuuugcugg

SEQ ID NO: 456373 - RNA, 21 nt, Human
aacauaauguaguagcccaug

SEQ ID NO: 456374 - RNA, 19 nt, Human
aaccugagcuggaagugau

SEQ ID NO: 456375 - RNA, 18 nt, Human
aacuuugaauggucagca

SEQ ID NO: 456376 - RNA, 18 nt, Human
aagcagcccuuuuauguc

SEQ ID NO: 456377 - RNA, 22 nt, Human
aaguccccggcccggcgcgcag

SEQ ID NO: 456378 - RNA, 18 nt, Human
aaguguaggaaacuaagc

SEQ ID NO: 456379 - RNA, 21 nt, Human
acccaauaaaauuucagggcc

SEQ ID NO: 456380 - RNA, 20 nt, Human
aggauacugugaugcagaag

SEQ ID NO: 456381 - RNA, 19 nt, Human
augcugcuguggcggcugc

SEQ ID NO: 456382 - RNA, 21 nt, Human
caagggcaaguccccggcccg

SEQ ID NO: 456383 - RNA, 22 nt, Human
cacagccugggccccgccgccc

SEQ ID NO: 456384 - RNA, 25 nt, Human
cagggagcgugcaagggcaaguccc

SEQ ID NO: 456385 - RNA, 21 nt, Human
ccaagccucacauuccgcgcu

SEQ ID NO: 456386 - RNA, 18 nt, Human
ccaauaguuccucuucug

SEQ ID NO: 456387 - RNA, 21 nt, Human
ccauaucaggacaacaaagca

SEQ ID NO: 456388 - RNA, 19 nt, Human
ccauuuccaggucuuagug

SEQ ID NO: 456389 - RNA, 24 nt, Human
ccccaagcgcacagccugggcccc

SEQ ID NO: 456390 - RNA, 22 nt, Human
cccgccaagccucacauuccgc

SEQ ID NO: 456391 - RNA, 24 nt, Human
ccgccccuggcccguccgagcgug

SEQ ID NO: 456392 - RNA, 20 nt, Human
ccgcuccgcggcuccgcugc

SEQ ID NO: 456393 - RNA, 24 nt, Human
cgaggggucgccgccccuggcccg

SEQ ID NO: 456394 - RNA, 19 nt, Human
cgcacagccugggccccgc

SEQ ID NO: 456395 - RNA, 28 nt, Human
cgcagccgggcguccgcgaggggucgcc

SEQ ID NO: 456396 - RNA, 23 nt, Human
cgccccuggcccguccgagcgug

SEQ ID NO: 456397 - RNA, 24 nt, Human
cggcugcugaggaggucccugacc

SEQ ID NO: 456398 - RNA, 19 nt, Human
cucuguccaauaguuccuc

SEQ ID NO: 456399 - RNA, 21 nt, Human
cugauguugagcuagcaucug

SEQ ID NO: 456400 - RNA, 24 nt, Human
cugauuucuaaugcacacaacaua

SEQ ID NO: 456401 - RNA, 20 nt, Human
cugcggcccgccaagccuca

SEQ ID NO: 456402 - RNA, 19 nt, Human
cugcugcugcugcugcugc

SEQ ID NO: 456403 - RNA, 19 nt, Human
cugcugcugcugcugcugc

SEQ ID NO: 456404 - RNA, 18 nt, Human
cugcugcugcuguugcug

SEQ ID NO: 456405 - RNA, 19 nt, Human
cugcuguugcuguugcugc

SEQ ID NO: 456406 - RNA, 19 nt, Human
cuguugcuguugcugcugc

SEQ ID NO: 456407 - RNA, 19 nt, Human
cuguugcuguugcugcugc

SEQ ID NO: 456408 - RNA, 23 nt, Human
gcaaguccccggcccggcgcgca

SEQ ID NO: 456409 - RNA, 19 nt, Human
gccugcugauacugcggca

SEQ ID NO: 456410 - RNA, 18 nt, Human
gccugggccccgccgccc

SEQ ID NO: 456411 - RNA, 23 nt, Human
gcgcagccgggcguccgcgaggg

SEQ ID NO: 456412 - RNA, 23 nt, Human
gcgcagccgggcguccgcgaggg

SEQ ID NO: 456413 - RNA, 18 nt, Human
gcgcuccccaagcgcaca

SEQ ID NO: 456414 - RNA, 20 nt, Human
gcgcuccccaagcgcacagc

SEQ ID NO: 456415 - RNA, 21 nt, Human
gcgugcaagggcaaguccccg

SEQ ID NO: 456416 - RNA, 21 nt, Human
gcuacuaucaagcaacugauu

SEQ ID NO: 456417 - RNA, 23 nt, Human
gcugcugcugcugcugcugcugg

SEQ ID NO: 456418 - RNA, 23 nt, Human
gcugcuguggcggcugcugagga

SEQ ID NO: 456419 - RNA, 20 nt, Human
gcuggugaggaugacgaugc

SEQ ID NO: 456420 - RNA, 19 nt, Human
gcuuuuccuagcagcugcu

SEQ ID NO: 456421 - RNA, 19 nt, Human
gugcugcugcugcugcugc

SEQ ID NO: 456422 - RNA, 21 nt, Human
guggcaguaguagcagaguug

SEQ ID NO: 456423 - RNA, 23 nt, Human
guggugcugcugcugcugcugcu

SEQ ID NO: 456424 - RNA, 24 nt, Human
gugguggugcugcugcugcugcuc

SEQ ID NO: 456425 - RNA, 23 nt, Human
uaaaaauuguuguugaagcaucu

SEQ ID NO: 456426 - RNA, 23 nt, Human
uaaaaugucucccuuuuuauuga

SEQ ID NO: 456427 - RNA, 22 nt, Human
uaaagugaaaaagaauuuauuu

SEQ ID NO: 456428 - RNA, 20 nt, Human
uaagaagauggccugaauuu

SEQ ID NO: 456429 - RNA, 26 nt, Human
uaaggcaaaauaauaaaaugucuccc

SEQ ID NO: 456430 - RNA, 18 nt, Human
uaauguaguagcccaugu

SEQ ID NO: 456431 - RNA, 22 nt, Human
uagcauacuaucagcaauauug

SEQ ID NO: 456432 - RNA, 18 nt, Human
uaggaggaguccauuaug

SEQ ID NO: 456433 - RNA, 20 nt, Human
uaguagcagaguuggccuuu

SEQ ID NO: 456434 - RNA, 23 nt, Human
uaguagcagaguuggccuuuggu

SEQ ID NO: 456435 - RNA, 24 nt, Human
uauugagugugcagaaaaacagag

SEQ ID NO: 456436 - RNA, 22 nt, Human
ucaaagggcaucucagacccac

SEQ ID NO: 456437 - RNA, 26 nt, Human
uccccaagcgcacagccugggccccg

SEQ ID NO: 456438 - RNA, 20 nt, Human
uccgcgaggggucgccgccc

SEQ ID NO: 456439 - RNA, 21 nt, Human
uccucuccaaaaggauuccac

SEQ ID NO: 456440 - RNA, 22 nt, Human
ucuaugcugcuguggcggcugc

SEQ ID NO: 456441 - RNA, 19 nt, Human
ucuccaaucucccugcugu

SEQ ID NO: 456442 - RNA, 25 nt, Human
ugagguuucuguugguccaauggua

SEQ ID NO: 456443 - RNA, 22 nt, Human
ugcagaaaaacagagcugcaaa

SEQ ID NO: 456444 - RNA, 25 nt, Human
ugcauuaaaaauuguuguugaagca

SEQ ID NO: 456445 - RNA, 24 nt, Human
ugcugaggaggucccugacccaau

SEQ ID NO: 456446 - RNA, 18 nt, Human
ugcugcugcugcugcugc

SEQ ID NO: 456447 - RNA, 21 nt, Human
ugcugcugcugcugcugcugc

SEQ ID NO: 456448 - RNA, 21 nt, Human
ugcugcugcugcugcugcugc

SEQ ID NO: 456449 - RNA, 21 nt, Human
ugcugcugcugcugcugcugc

SEQ ID NO: 456450 - RNA, 21 nt, Human
ugcugcugcugcugcugcugu

SEQ ID NO: 456451 - RNA, 18 nt, Human
ugcugcugcugcugcugu

SEQ ID NO: 456452 - RNA, 18 nt, Human
ugcugcugcugcuguugc

SEQ ID NO: 456453 - RNA, 21 nt, Human
ugcugcugcugcuguugcugu

SEQ ID NO: 456454 - RNA, 18 nt, Human
ugcugcugcuguugcugu

SEQ ID NO: 456455 - RNA, 18 nt, Human
ugcugcugcuguugcugu

SEQ ID NO: 456456 - RNA, 21 nt, Human
ugcugcuguugcuguugcugc

SEQ ID NO: 456457 - RNA, 24 nt, Human
ugcuguggcggcugcugaggaggu

SEQ ID NO: 456458 - RNA, 21 nt, Human
ugcuguugcugcugcugcugc

SEQ ID NO: 456459 - RNA, 21 nt, Human
ugcuguugcugcugcugcugu

SEQ ID NO: 456460 - RNA, 21 nt, Human
ugcuguugcuguugcugcugc

SEQ ID NO: 456461 - RNA, 21 nt, Human
ugcuguugcuguugcugcugc

SEQ ID NO: 456462 - RNA, 18 nt, Human
uggugguggugguggugg

SEQ ID NO: 456463 - RNA, 20 nt, Human
uggugguggugguggugguc

SEQ ID NO: 456464 - RNA, 20 nt, Human
uggugguggugguggugguc

SEQ ID NO: 456465 - RNA, 20 nt, Human
ugguggugguggugguggug

SEQ ID NO: 456466 - RNA, 21 nt, Human
ugguggugguggugguggugc

SEQ ID NO: 456467 - RNA, 20 nt, Human
ugguugauauaccgaaugca

SEQ ID NO: 456468 - RNA, 18 nt, Human
ugucccuuacuugaucuu

SEQ ID NO: 456469 - RNA, 23 nt, Human
ugugaagcaaaauaagccuucaa

SEQ ID NO: 456470 - RNA, 21 nt, Human
uguugcugcugcugcugcugc

SEQ ID NO: 456471 - RNA, 21 nt, Human
uguugcuguugcugcugcugc

SEQ ID NO: 456472 - RNA, 21 nt, Human
uguugcuguugcugcugcugc

SEQ ID NO: 456473 - RNA, 22 nt, Human
uuagagauauucugaauuuaac

SEQ ID NO: 456474 - RNA, 25 nt, Human
uuagugccccuuuuggucuaugguu

SEQ ID NO: 456475 - RNA, 19 nt, Human
uuccaaccugagcuggaag

SEQ ID NO: 456476 - RNA, 22 nt, Human
uuuaauuuuugccauaucagga

SEQ ID NO: 456477 - RNA, 24 nt, Human
uuuccaggucuuagugccccuuuu

SEQ ID NO: 456478 - RNA, 19 nt, Human
uuuuuuuuuuuuuuuuuaa

SEQ ID NO: 456479 - RNA, 24 nt, Human
caaaaucacuccuaaaaagacuaa

SEQ ID NO: 456480 - RNA, 20 nt, Human
cuaaagaacagaaauguaaa

SEQ ID NO: 456481 - RNA, 23 nt, Human
uaaaaagacuaagacuauugcca

SEQ ID NO: 456482 - RNA, 20 nt, Human
uaagacuauugccacauugu

SEQ ID NO: 456483 - RNA, 19 nt, Human
uuccaaaaacaaaucugug

SEQ ID NO: 456484 - RNA, 21 nt, Human
uuuggagaagucaaacuagca

SEQ ID NO: 456485 - RNA, 18 nt, Human
aaacuuccagaaauuuuu

SEQ ID NO: 456486 - RNA, 24 nt, Human
aaagugcugggauuacagguguga

SEQ ID NO: 456487 - RNA, 25 nt, Human
aaauggaaaguaaguuaacucuacu

SEQ ID NO: 456488 - RNA, 24 nt, Human
aagcuaguucaauauagaaaacag

SEQ ID NO: 456489 - RNA, 24 nt, Human
aaguaagaauggcuuccaggccca

SEQ ID NO: 456490 - RNA, 18 nt, Human
aagugcugggauuacagg

SEQ ID NO: 456491 - RNA, 19 nt, Human
aagugcugggauuacaggu

SEQ ID NO: 456492 - RNA, 26 nt, Human
aagugcugggauuacaggugugagcc

SEQ ID NO: 456493 - RNA, 24 nt, Human
aaugauucgcccgccucagccucc

SEQ ID NO: 456494 - RNA, 24 nt, Human
aaugcaguggcgccaucuuggcuc

SEQ ID NO: 456495 - RNA, 19 nt, Human
acaagcaagcucaguaaca

SEQ ID NO: 456496 - RNA, 24 nt, Human
accaugcuggccaggcuggucucg

SEQ ID NO: 456497 - RNA, 19 nt, Human
acuugggcaaggggagggg

SEQ ID NO: 456498 - RNA, 18 nt, Human
agaaaacagguucuacaa

SEQ ID NO: 456499 - RNA, 18 nt, Human
agaccuguccccaacccc

SEQ ID NO: 456500 - RNA, 28 nt, Human
aggcacgaaaguaaaacaaaagggaccc

SEQ ID NO: 456501 - RNA, 22 nt, Human
aguagagaugggguuucaccau

SEQ ID NO: 456502 - RNA, 23 nt, Human
aguggcugggacuacaggcaugu

SEQ ID NO: 456503 - RNA, 19 nt, Human
auagaaaacagguucuaca

SEQ ID NO: 456504 - RNA, 22 nt, Human
augauauggaaauaauaugcaa

SEQ ID NO: 456505 - RNA, 24 nt, Human
augauucgcccgccucagccuccc

SEQ ID NO: 456506 - RNA, 20 nt, Human
augggguuucaccaugcugg

SEQ ID NO: 456507 - RNA, 20 nt, Human
auggucuucuggccguucag

SEQ ID NO: 456508 - RNA, 24 nt, Human
auuuuuguauuuuuaguagagaug

SEQ ID NO: 456509 - RNA, 24 nt, Human
caaagugcugggauuacaggugug

SEQ ID NO: 456510 - RNA, 22 nt, Human
caaauuauugauucagcaguuu

SEQ ID NO: 456511 - RNA, 24 nt, Human
caccacaccuggcuaauuuuugua

SEQ ID NO: 456512 - RNA, 21 nt, Human
caccaugcuggccaggcuggu

SEQ ID NO: 456513 - RNA, 24 nt, Human
caccaugcuggccaggcuggucuc

SEQ ID NO: 456514 - RNA, 24 nt, Human
caccucaaaugauucgcccgccuc

SEQ ID NO: 456515 - RNA, 21 nt, Human
cacugcaaccucugccucccg

SEQ ID NO: 456516 - RNA, 23 nt, Human
cacugcaaccucugccucccggg

SEQ ID NO: 456517 - RNA, 22 nt, Human
cagaagggucccaggugagcac

SEQ ID NO: 456518 - RNA, 24 nt, Human
cagggucuugcucuguugcccagg

SEQ ID NO: 456519 - RNA, 24 nt, Human
caugcuggccaggcuggucucgaa

SEQ ID NO: 456520 - RNA, 21 nt, Human
ccaaagugcugggauuacagg

SEQ ID NO: 456521 - RNA, 21 nt, Human
ccaaagugcugggauuacagg

SEQ ID NO: 456522 - RNA, 24 nt, Human
ccaaagugcugggauuacaggugu

SEQ ID NO: 456523 - RNA, 23 nt, Human
ccaaccccuucccuguugaccau

SEQ ID NO: 456524 - RNA, 23 nt, Human
ccaaguagaguggauucauaaga

SEQ ID NO: 456525 - RNA, 20 nt, Human
ccaccacaccuggcuaauuu

SEQ ID NO: 456526 - RNA, 19 nt, Human
cccggguucaagcaagucu

SEQ ID NO: 456527 - RNA, 22 nt, Human
cccggguucaagcaagucuugc

SEQ ID NO: 456528 - RNA, 23 nt, Human
cccuaguggcugggacuacaggc

SEQ ID NO: 456529 - RNA, 21 nt, Human
cccuguuuccucuuuauauug

SEQ ID NO: 456530 - RNA, 20 nt, Human
ccgccucagccucccaaagg

SEQ ID NO: 456531 - RNA, 24 nt, Human
ccgccucagccucccaaagugcug

SEQ ID NO: 456532 - RNA, 23 nt, Human
ccuaguggcugggacuacaggca

SEQ ID NO: 456533 - RNA, 20 nt, Human
ccuguuuccucuuuauauug

SEQ ID NO: 456534 - RNA, 29 nt, Human
ccuuuagcugggguggauuacucagggac

SEQ ID NO: 456535 - RNA, 22 nt, Human
cgucguagaugaacaggcaguc

SEQ ID NO: 456536 - RNA, 22 nt, Human
cgucucagccgcccuaguggcu

SEQ ID NO: 456537 - RNA, 23 nt, Human
cuaauuuuuguauuuuuaguaga

SEQ ID NO: 456538 - RNA, 20 nt, Human
cuacaaggauuaaggaacau

SEQ ID NO: 456539 - RNA, 18 nt, Human
cucaaaugauucgcccgc

SEQ ID NO: 456540 - RNA, 24 nt, Human
cucacugcaaccucugccucccgg

SEQ ID NO: 456541 - RNA, 24 nt, Human
cucagccgcccuaguggcugggac

SEQ ID NO: 456542 - RNA, 20 nt, Human
cucuguugcccaggcuggaa

SEQ ID NO: 456543 - RNA, 23 nt, Human
cucuguugcccaggcuggaaugc

SEQ ID NO: 456544 - RNA, 19 nt, Human
cugcaaccucugccucccg

SEQ ID NO: 456545 - RNA, 23 nt, Human
cugcaaccucugccucccggguu

SEQ ID NO: 456546 - RNA, 24 nt, Human
cugcaaccucugccucccggguuc

SEQ ID NO: 456547 - RNA, 22 nt, Human
cuuggaaucccagacgaagucc

SEQ ID NO: 456548 - RNA, 18 nt, Human
cuugggcaaggggagggg

SEQ ID NO: 456549 - RNA, 20 nt, Human
gaaaguaaguuaacucuacu

SEQ ID NO: 456550 - RNA, 18 nt, Human
gaaaguauguggcugaag

SEQ ID NO: 456551 - RNA, 23 nt, Human
gaacaaaugcucuguccguccuu

SEQ ID NO: 456552 - RNA, 24 nt, Human
gaacaucucuuggcccacagaaga

SEQ ID NO: 456553 - RNA, 19 nt, Human
gagaagccucuggaaugaa

SEQ ID NO: 456554 - RNA, 18 nt, Human
gagaugggguuucaccau

SEQ ID NO: 456555 - RNA, 24 nt, Human
gagaugggguuucaccaugcuggc

SEQ ID NO: 456556 - RNA, 18 nt, Human
gauuacaggugugagcca

SEQ ID NO: 456557 - RNA, 20 nt, Human
gauuacaggugugagccacc

SEQ ID NO: 456558 - RNA, 23 nt, Human
gauuacaggugugagccaccgca

SEQ ID NO: 456559 - RNA, 21 nt, Human
gcaggacuguguuuuguuuug

SEQ ID NO: 456560 - RNA, 23 nt, Human
gccucagccucccaaagugcugg

SEQ ID NO: 456561 - RNA, 18 nt, Human
gcgccaucuuggcucacu

SEQ ID NO: 456562 - RNA, 21 nt, Human
gcucacugcaaccucugccuc

SEQ ID NO: 456563 - RNA, 20 nt, Human
gcucuguccguccuuuagua

SEQ ID NO: 456564 - RNA, 20 nt, Human
gcuggaaugcaguggcgcca

SEQ ID NO: 456565 - RNA, 23 nt, Human
ggaccucaaagguauuggugaug

SEQ ID NO: 456566 - RNA, 19 nt, Human
ggacuacaggcaugugcca

SEQ ID NO: 456567 - RNA, 22 nt, Human
gggguuucaccaugcuggccag

SEQ ID NO: 456568 - RNA, 20 nt, Human
ggguuugccuuuagcugggg

SEQ ID NO: 456569 - RNA, 22 nt, Human
ggugaugauuuauuucuugagc

SEQ ID NO: 456570 - RNA, 19 nt, Human
gguuuuguuuuuuguuuug

SEQ ID NO: 456571 - RNA, 25 nt, Human
gguuuuuagcauuaaucaacaacuu

SEQ ID NO: 456572 - RNA, 23 nt, Human
guaaaacaaaaaacaguacagaa

SEQ ID NO: 456573 - RNA, 24 nt, Human
gucuugcucuguugcccaggcugg

SEQ ID NO: 456574 - RNA, 20 nt, Human
guggcugggacuacaggcau

SEQ ID NO: 456575 - RNA, 23 nt, Human
uaagugguuuuguuuuuuguuuu

SEQ ID NO: 456576 - RNA, 24 nt, Human
uaauuuuuguauuuuuaguagaga

SEQ ID NO: 456577 - RNA, 22 nt, Human
uacaggcaugugccaccacacc

SEQ ID NO: 456578 - RNA, 24 nt, Human
uacaggugugagccaccgcaccca

SEQ ID NO: 456579 - RNA, 22 nt, Human
uaccacaagcaagcucaguaac

SEQ ID NO: 456580 - RNA, 21 nt, Human
uacuugggcaaggggagggga

SEQ ID NO: 456581 - RNA, 19 nt, Human
uaggaacgaaauucuggac

SEQ ID NO: 456582 - RNA, 18 nt, Human
uagguauaauugacaaaa

SEQ ID NO: 456583 - RNA, 24 nt, Human
uaguagagaugggguuucaccaug

SEQ ID NO: 456584 - RNA, 26 nt, Human
uaguagagaugggguuucaccaugcu

SEQ ID NO: 456585 - RNA, 18 nt, Human
uaguaguaucaugaauuu

SEQ ID NO: 456586 - RNA, 25 nt, Human
uaguggcugggacuacaggcaugug

SEQ ID NO: 456587 - RNA, 23 nt, Human
uaguucaauauagaaaacagguu

SEQ ID NO: 456588 - RNA, 23 nt, Human
uauauaaauugaauacuucuucc

SEQ ID NO: 456589 - RNA, 22 nt, Human
uaugcaaucacuagagauaaaa

SEQ ID NO: 456590 - RNA, 21 nt, Human
uauuuuuguuuuaaauagaaa

SEQ ID NO: 456591 - RNA, 24 nt, Human
ucacugcaaccucugccucccggg

SEQ ID NO: 456592 - RNA, 25 nt, Human
ucacugcaaccucugccucccgggu

SEQ ID NO: 456593 - RNA, 23 nt, Human
ucccaaagugcugggauuacagg

SEQ ID NO: 456594 - RNA, 20 nt, Human
ucccggguucaagcaagucu

SEQ ID NO: 456595 - RNA, 20 nt, Human
ucccggguucaagcaagucu

SEQ ID NO: 456596 - RNA, 22 nt, Human
ucccggguucaagcaagucuug

SEQ ID NO: 456597 - RNA, 20 nt, Human
uccuuuaguaggaagcagug

SEQ ID NO: 456598 - RNA, 24 nt, Human
ucuguugcccaggcuggaaugcag

SEQ ID NO: 456599 - RNA, 23 nt, Human
ucuugcucuguugcccaggcugg

SEQ ID NO: 456600 - RNA, 24 nt, Human
ucuugcucuguugcccaggcugga

SEQ ID NO: 456601 - RNA, 23 nt, Human
ugaaauacuaugauauggaaaua

SEQ ID NO: 456602 - RNA, 23 nt, Human
ugaagucauuuuucccuaacccc

SEQ ID NO: 456603 - RNA, 20 nt, Human
ugagaccacaccauacauac

SEQ ID NO: 456604 - RNA, 18 nt, Human
ugaggauaaaaguauggu

SEQ ID NO: 456605 - RNA, 27 nt, Human
ugcaggcacgaaaguaaaacaaaaaac

SEQ ID NO: 456606 - RNA, 22 nt, Human
ugcaguggcgccaucuuggcuc

SEQ ID NO: 456607 - RNA, 21 nt, Human
ugcccaggcuggaaugcagug

SEQ ID NO: 456608 - RNA, 24 nt, Human
ugcccaggcuggaaugcaguggcg

SEQ ID NO: 456609 - RNA, 18 nt, Human
ugcuggccaggcuggucu

SEQ ID NO: 456610 - RNA, 24 nt, Human
ugcugggauuacaggugugagcca

SEQ ID NO: 456611 - RNA, 22 nt, Human
uggaaucccagacgaagucccc

SEQ ID NO: 456612 - RNA, 24 nt, Human
uggaaugcaguggcgccaucuugg

SEQ ID NO: 456613 - RNA, 24 nt, Human
uggccaggcuggucucgaauuccu

SEQ ID NO: 456614 - RNA, 21 nt, Human
uggcuuccaggcccacuuccu

SEQ ID NO: 456615 - RNA, 18 nt, Human
ugggacuacaggcaugug

SEQ ID NO: 456616 - RNA, 21 nt, Human
ugggacuacaggcaugugcca

SEQ ID NO: 456617 - RNA, 22 nt, Human
ugggacuacaggcaugugccac

SEQ ID NO: 456618 - RNA, 24 nt, Human
ugggacuacaggcaugugccacca

SEQ ID NO: 456619 - RNA, 19 nt, Human
ugggagagacugaaaagua

SEQ ID NO: 456620 - RNA, 18 nt, Human
ugggauuacaggugugag

SEQ ID NO: 456621 - RNA, 19 nt, Human
ugggauuacaggugugagc

SEQ ID NO: 456622 - RNA, 21 nt, Human
ugggauuacaggugugagcca

SEQ ID NO: 456623 - RNA, 22 nt, Human
ugggauuacaggugugagccac

SEQ ID NO: 456624 - RNA, 23 nt, Human
ugggauuacaggugugagccacc

SEQ ID NO: 456625 - RNA, 24 nt, Human
ugggauuacaggugugagccaccg

SEQ ID NO: 456626 - RNA, 24 nt, Human
ugggguuucaccaugcuggccagg

SEQ ID NO: 456627 - RNA, 20 nt, Human
ugguguacauauacuuucug

SEQ ID NO: 456628 - RNA, 21 nt, Human
ugucuggggucaauacccggg

SEQ ID NO: 456629 - RNA, 24 nt, Human
uguuuugguguacauauacuuucu

SEQ ID NO: 456630 - RNA, 26 nt, Human
uguuuuguuuuguuuuguuuuuuaau

SEQ ID NO: 456631 - RNA, 24 nt, Human
uguuuuguuuuuuagcaagccuua

SEQ ID NO: 456632 - RNA, 21 nt, Human
uuaacucuacuguaccaaagc

SEQ ID NO: 456633 - RNA, 23 nt, Human
uuagcaagccuuacacauuuucu

SEQ ID NO: 456634 - RNA, 18 nt, Human
uuaguagagaugggguuu

SEQ ID NO: 456635 - RNA, 22 nt, Human
uuaguagagaugggguuucacc

SEQ ID NO: 456636 - RNA, 24 nt, Human
uuaguagagaugggguuucaccau

SEQ ID NO: 456637 - RNA, 21 nt, Human
uucauguggauccuguguuaa

SEQ ID NO: 456638 - RNA, 21 nt, Human
uucgcccgccucagccuccca

SEQ ID NO: 456639 - RNA, 23 nt, Human
uugaaggguuugccuuuagcugg

SEQ ID NO: 456640 - RNA, 19 nt, Human
uugaccauggacaauggag

SEQ ID NO: 456641 - RNA, 24 nt, Human
uugcccaggcuggaaugcaguggc

SEQ ID NO: 456642 - RNA, 24 nt, Human
uuggugaugauuuauuucuugagc

SEQ ID NO: 456643 - RNA, 23 nt, Human
uuguauuuuuaguagagaugggg

SEQ ID NO: 456644 - RNA, 21 nt, Human
uuucaccaugcuggccaggcu

SEQ ID NO: 456645 - RNA, 21 nt, Human
uuucuaaacaaaugagaccac

SEQ ID NO: 456646 - RNA, 18 nt, Human
uuuguuuuguuuuguuuu

SEQ ID NO: 456647 - RNA, 24 nt, Human
uuuuuaguagagaugggguuucac

SEQ ID NO: 456648 - RNA, 20 nt, Human
uuuuuguauuuuuaguagag

SEQ ID NO: 456649 - RNA, 21 nt, Human
aaaaauauaauucauacacaa

SEQ ID NO: 456650 - RNA, 19 nt, Human
aacaaaauauuguacuacc

SEQ ID NO: 456651 - RNA, 18 nt, Human
aacucuuugggguuguag

SEQ ID NO: 456652 - RNA, 21 nt, Human
aagcacuuuaacaugacaacc

SEQ ID NO: 456653 - RNA, 18 nt, Human
acaaaaagaaaucaauga

SEQ ID NO: 456654 - RNA, 22 nt, Human
acacaagugaaaagcaccaaag

SEQ ID NO: 456655 - RNA, 26 nt, Human
acacuacucccuuagguacacauaca

SEQ ID NO: 456656 - RNA, 20 nt, Human
acacuauuuaaaagcuaagu

SEQ ID NO: 456657 - RNA, 19 nt, Human
agaaaucaaugauagacuc

SEQ ID NO: 456658 - RNA, 19 nt, Human
agccauaaaauuuccacag

SEQ ID NO: 456659 - RNA, 21 nt, Human
caaaaagaaaucaaugauaga

SEQ ID NO: 456660 - RNA, 21 nt, Human
caagugaaaagcaccaaagac

SEQ ID NO: 456661 - RNA, 24 nt, Human
caccaaagacaauucggcaccaua

SEQ ID NO: 456662 - RNA, 20 nt, Human
cacugcauuuaaaaacuaaa

SEQ ID NO: 456663 - RNA, 21 nt, Human
cagguaggaugaguaucucuc

SEQ ID NO: 456664 - RNA, 19 nt, Human
cagguuaaaauauagacua

SEQ ID NO: 456665 - RNA, 21 nt, Human
caguaacuccugaaaugaugc

SEQ ID NO: 456666 - RNA, 18 nt, Human
caguaaucaacucuacua

SEQ ID NO: 456667 - RNA, 23 nt, Human
ccaaagacaauucggcaccauaa

SEQ ID NO: 456668 - RNA, 23 nt, Human
ccaagauacuacuuagaacacaa

SEQ ID NO: 456669 - RNA, 19 nt, Human
ccacaagcuuuguugaacc

SEQ ID NO: 456670 - RNA, 19 nt, Human
ccugcagcaucauguugac

SEQ ID NO: 456671 - RNA, 19 nt, Human
ccugcagcaucauguugac

SEQ ID NO: 456672 - RNA, 18 nt, Human
gaaaagcaccaaagacaa

SEQ ID NO: 456673 - RNA, 20 nt, Human
gaguaucucucugaauuacc

SEQ ID NO: 456674 - RNA, 20 nt, Human
gcacacuuuuuacacugcau

SEQ ID NO: 456675 - RNA, 19 nt, Human
gccuuuuauuuauauuugg

SEQ ID NO: 456676 - RNA, 24 nt, Human
gcuuuguugaaccugugccugcua

SEQ ID NO: 456677 - RNA, 20 nt, Human
ggcaccauaacucugaugaa

SEQ ID NO: 456678 - RNA, 22 nt, Human
gguacacauacauacuaauaua

SEQ ID NO: 456679 - RNA, 18 nt, Human
uaaaacacaagugaaaag

SEQ ID NO: 456680 - RNA, 19 nt, Human
uaaaacacaagugaaaagc

SEQ ID NO: 456681 - RNA, 23 nt, Human
uaaaacacaagugaaaagcacca

SEQ ID NO: 456682 - RNA, 24 nt, Human
uaaaacacaagugaaaagcaccaa

SEQ ID NO: 456683 - RNA, 26 nt, Human
uaaaacacaagugaaaagcaccaaag

SEQ ID NO: 456684 - RNA, 19 nt, Human
uaaaagcuaaguucacaca

SEQ ID NO: 456685 - RNA, 29 nt, Human
uaaaauuuccacagcacacuuuuuacacu

SEQ ID NO: 456686 - RNA, 24 nt, Human
uaacaagcagugacacuacucccu

SEQ ID NO: 456687 - RNA, 23 nt, Human
uaagcacuuuaacaugacaaccc

SEQ ID NO: 456688 - RNA, 18 nt, Human
uaccacaaaaagaaauca

SEQ ID NO: 456689 - RNA, 19 nt, Human
uaccacaaaaagaaaucaa

SEQ ID NO: 456690 - RNA, 21 nt, Human
uaccaucuuuucagaaacaag

SEQ ID NO: 456691 - RNA, 22 nt, Human
uacuaccaaaaaaguacugcuu

SEQ ID NO: 456692 - RNA, 21 nt, Human
uacuggauuuaucucaguuua

SEQ ID NO: 456693 - RNA, 27 nt, Human
uaguaacucuuucagguaaccuaagug

SEQ ID NO: 456694 - RNA, 18 nt, Human
uaucagaaacgccuaaca

SEQ ID NO: 456695 - RNA, 18 nt, Human
uauuuguuuccauuuccu

SEQ ID NO: 456696 - RNA, 21 nt, Human
ucacacuauuuaaaagcuaag

SEQ ID NO: 456697 - RNA, 23 nt, Human
ucccuuguaaauaaacagauugg

SEQ ID NO: 456698 - RNA, 22 nt, Human
ucuacacuauaauuuaguauuc

SEQ ID NO: 456699 - RNA, 20 nt, Human
ugaaagaacaacaaauccag

SEQ ID NO: 456700 - RNA, 22 nt, Human
ugauagacucuuauguagaauu

SEQ ID NO: 456701 - RNA, 22 nt, Human
uuaacaaaauucuaagcaacua

SEQ ID NO: 456702 - RNA, 25 nt, Human
uuacuggauuuaucucaguuuauau

SEQ ID NO: 456703 - RNA, 18 nt, Human
uuagaacacaacucuuug

SEQ ID NO: 456704 - RNA, 22 nt, Human
uuaguaccaaagcagacuagaa

SEQ ID NO: 456705 - RNA, 21 nt, Human
uuauaugcaggcuucuuuccc

SEQ ID NO: 456706 - RNA, 21 nt, Human
uucccuuguaaauaaacagau

SEQ ID NO: 456707 - RNA, 23 nt, Human
uugacuuucuuccuaacuuugua

SEQ ID NO: 456708 - RNA, 20 nt, Human
aaaaaagacagagaaaugug

SEQ ID NO: 456709 - RNA, 25 nt, Human
aaaaaagcacaagaccuaacucaaa

SEQ ID NO: 456710 - RNA, 26 nt, Human
aaaaaagcacaagaccuaacucaaag

SEQ ID NO: 456711 - RNA, 21 nt, Human
aaaugaauggggaagaaaagg

SEQ ID NO: 456712 - RNA, 18 nt, Human
aacaauguuuuuugaguu

SEQ ID NO: 456713 - RNA, 19 nt, Human
aauacuaggcugaaaagcc

SEQ ID NO: 456714 - RNA, 23 nt, Human
aauauguuacacaaaacaauguu

SEQ ID NO: 456715 - RNA, 22 nt, Human
aauguaaacaugaugcuacaga

SEQ ID NO: 456716 - RNA, 20 nt, Human
accacaccuggcuucauguc

SEQ ID NO: 456717 - RNA, 20 nt, Human
agaauucuuuauaaaaacac

SEQ ID NO: 456718 - RNA, 21 nt, Human
agaguaagcuguguugaaaau

SEQ ID NO: 456719 - RNA, 23 nt, Human
agauggcuauuuuaaaacuucug

SEQ ID NO: 456720 - RNA, 24 nt, Human
aggaaaaaaaagcacaagaccuaa

SEQ ID NO: 456721 - RNA, 18 nt, Human
aggcagggucucaguaug

SEQ ID NO: 456722 - RNA, 23 nt, Human
aggcagggucucaguaugcugcc

SEQ ID NO: 456723 - RNA, 20 nt, Human
aggcaucuccacagguaggu

SEQ ID NO: 456724 - RNA, 18 nt, Human
auaaaaacaccauguccc

SEQ ID NO: 456725 - RNA, 24 nt, Human
augccaaaauauuuaaaauucuua

SEQ ID NO: 456726 - RNA, 19 nt, Human
caaaaaagacagagaaaug

SEQ ID NO: 456727 - RNA, 20 nt, Human
caaguaauucucuugccuca

SEQ ID NO: 456728 - RNA, 22 nt, Human
caaguaauucucuugccucagc

SEQ ID NO: 456729 - RNA, 23 nt, Human
cacagaauucuuuauaaaaacac

SEQ ID NO: 456730 - RNA, 23 nt, Human
cagaauucuuuauaaaaacacca

SEQ ID NO: 456731 - RNA, 21 nt, Human
cagaguaagcuguguugaaaa

SEQ ID NO: 456732 - RNA, 19 nt, Human
cagccugggacuacaggca

SEQ ID NO: 456733 - RNA, 22 nt, Human
caggaaaaaaaagcacaagacc

SEQ ID NO: 456734 - RNA, 18 nt, Human
cauaccaccacaccuggc

SEQ ID NO: 456735 - RNA, 21 nt, Human
ccaccacaccuggcuucaugu

SEQ ID NO: 456736 - RNA, 20 nt, Human
cccugguguuuuguuuuugu

SEQ ID NO: 456737 - RNA, 20 nt, Human
ccugggcucaaguaauucuc

SEQ ID NO: 456738 - RNA, 20 nt, Human
ccugggcucaaguaauucuc

SEQ ID NO: 456739 - RNA, 20 nt, Human
cucaaaggaggaaaauaaua

SEQ ID NO: 456740 - RNA, 23 nt, Human
cucacagaauucuuuauaaaaac

SEQ ID NO: 456741 - RNA, 21 nt, Human
cuccugggcucaaguaauucu

SEQ ID NO: 456742 - RNA, 23 nt, Human
cuccugggcucaaguaauucucu

SEQ ID NO: 456743 - RNA, 20 nt, Human
cugaaaagccaaaaugaaaa

SEQ ID NO: 456744 - RNA, 22 nt, Human
gggcucaaguaauucucuugcc

SEQ ID NO: 456745 - RNA, 21 nt, Human
uaaaauaaugguaagauuuac

SEQ ID NO: 456746 - RNA, 24 nt, Human
uaagaacaaaagccuaucauucuc

SEQ ID NO: 456747 - RNA, 22 nt, Human
uaauaaauuaauucuaaaguuu

SEQ ID NO: 456748 - RNA, 20 nt, Human
uaauucucuugccucagccu

SEQ ID NO: 456749 - RNA, 18 nt, Human
uacagaguaagcuguguu

SEQ ID NO: 456750 - RNA, 22 nt, Human
uaccucuuuuucguucauaaga

SEQ ID NO: 456751 - RNA, 23 nt, Human
uauaugcacaccuucgauguaua

SEQ ID NO: 456752 - RNA, 24 nt, Human
uaugcugcccaggauggauucaaa

SEQ ID NO: 456753 - RNA, 25 nt, Human
ucauucaacauauaugcacaccuuc

SEQ ID NO: 456754 - RNA, 21 nt, Human
uccugggcucaaguaauucuc

SEQ ID NO: 456755 - RNA, 21 nt, Human
uccugggcucaaguaauucuc

SEQ ID NO: 456756 - RNA, 18 nt, Human
ucucuugccucagccugg

SEQ ID NO: 456757 - RNA, 21 nt, Human
ugaauggggaagaaaagggac

SEQ ID NO: 456758 - RNA, 24 nt, Human
ugaauggggaagaaaagggacuag

SEQ ID NO: 456759 - RNA, 23 nt, Human
ugccaaaauauuuaaaauucuua

SEQ ID NO: 456760 - RNA, 28 nt, Human
ugcccaggauggauucaaacuccugggc

SEQ ID NO: 456761 - RNA, 22 nt, Human
uggaaagcucugcugucaagug

SEQ ID NO: 456762 - RNA, 26 nt, Human
uggccaggaaaaaaaagcacaagacc

SEQ ID NO: 456763 - RNA, 21 nt, Human
ugggacuacaggcacauacca

SEQ ID NO: 456764 - RNA, 24 nt, Human
ugggacuacaggcacauaccacca

SEQ ID NO: 456765 - RNA, 20 nt, Human
ugggcucaaguaauucucuu

SEQ ID NO: 456766 - RNA, 24 nt, Human
ugggcucaaguaauucucuugccu

SEQ ID NO: 456767 - RNA, 19 nt, Human
uguauaggacacugaucaa

SEQ ID NO: 456768 - RNA, 22 nt, Human
uuagaguuucaacauggagauu

SEQ ID NO: 456769 - RNA, 25 nt, Human
uuagaguuucaacauggagauucua

SEQ ID NO: 456770 - RNA, 23 nt, Human
uucuccaggcuacuagaauguuu

SEQ ID NO: 456771 - RNA, 21 nt, Human
uuuauaaaaacaccauguccc

SEQ ID NO: 456772 - RNA, 26 nt, Human
uuuauacauacaauguaaacaugguu

SEQ ID NO: 456773 - RNA, 25 nt, Human
uuucaguggcauucaaucaacccaa

SEQ ID NO: 456774 - RNA, 20 nt, Human
uuuguagugcuaccucuuuu

SEQ ID NO: 456775 - RNA, 18 nt, Human
uuuuguucuguuuguuuu

SEQ ID NO: 456776 - RNA, 25 nt, Human
uuuuuuauuauuuuuauuucuaugc

SEQ ID NO: 456777 - RNA, 22 nt, Human
uuuuuugaguuguaaauaaaua

SEQ ID NO: 456778 - RNA, 22 nt, Human
aaaauccgaacagaacaaaaug

SEQ ID NO: 456779 - RNA, 18 nt, Human
aaacacaacaaccaaccu

SEQ ID NO: 456780 - RNA, 18 nt, Human
aacaugccuacuauagag

SEQ ID NO: 456781 - RNA, 21 nt, Human
aagaaaauggacagaauccua

SEQ ID NO: 456782 - RNA, 23 nt, Human
aaucccccccuccccgaagagaa

SEQ ID NO: 456783 - RNA, 29 nt, Human
agaauccuaaaacacaacaaccaaccucc

SEQ ID NO: 456784 - RNA, 22 nt, Human
agagggaagggugguggguggg

SEQ ID NO: 456785 - RNA, 20 nt, Human
agugaaaaggccccucuaaa

SEQ ID NO: 456786 - RNA, 24 nt, Human
auaacaguaaaaaaaauggauaau

SEQ ID NO: 456787 - RNA, 23 nt, Human
auggcaaaucacuuuacaaacau

SEQ ID NO: 456788 - RNA, 23 nt, Human
caaccaaccucuaaaaacaaucu

SEQ ID NO: 456789 - RNA, 22 nt, Human
caaccucuaaaaacaaucucua

SEQ ID NO: 456790 - RNA, 22 nt, Human
cacacaaaacaaauuaugugau

SEQ ID NO: 456791 - RNA, 21 nt, Human
cacauuguguucaguuauagu

SEQ ID NO: 456792 - RNA, 18 nt, Human
caccagcauggaacaauu

SEQ ID NO: 456793 - RNA, 18 nt, Human
cacggggguuagguuacu

SEQ ID NO: 456794 - RNA, 24 nt, Human
cagaacaaaaugaaaaaagucgaa

SEQ ID NO: 456795 - RNA, 22 nt, Human
cagaauccuaaaacacaacaac

SEQ ID NO: 456796 - RNA, 22 nt, Human
cagcauggaacaauuuauuccu

SEQ ID NO: 456797 - RNA, 24 nt, Human
cagcucccuaggaagagcacagga

SEQ ID NO: 456798 - RNA, 21 nt, Human
ccaaccucuaaaaacaaucuu

SEQ ID NO: 456799 - RNA, 18 nt, Human
cccauaaaacccuucggg

SEQ ID NO: 456800 - RNA, 19 nt, Human
ccccaaucccccccucccc

SEQ ID NO: 456801 - RNA, 19 nt, Human
cccccaaucccccccuccc

SEQ ID NO: 456802 - RNA, 20 nt, Human
cccucuaaaaccccucuggg

SEQ ID NO: 456803 - RNA, 19 nt, Human
cccucuggggccccucccc

SEQ ID NO: 456804 - RNA, 23 nt, Human
cuuaaagucaguucacaucacac

SEQ ID NO: 456805 - RNA, 20 nt, Human
cuuuccaccagcauggaaca

SEQ ID NO: 456806 - RNA, 18 nt, Human
gaaaaggccccucuaaaa

SEQ ID NO: 456807 - RNA, 22 nt, Human
gccccucccccaaucccccccu

SEQ ID NO: 456808 - RNA, 22 nt, Human
ggaaacaacacagcucccuagg

SEQ ID NO: 456809 - RNA, 21 nt, Human
gggaaggguggugggugggaa

SEQ ID NO: 456810 - RNA, 22 nt, Human
gggccccucccccaaucccccc

SEQ ID NO: 456811 - RNA, 22 nt, Human
guuacugauguuaguucccaua

SEQ ID NO: 456812 - RNA, 21 nt, Human
uaagaacaacauaacaugccu

SEQ ID NO: 456813 - RNA, 18 nt, Human
uaauacagcuaauacccu

SEQ ID NO: 456814 - RNA, 22 nt, Human
uaauacccugaaaaaucaagaa

SEQ ID NO: 456815 - RNA, 19 nt, Human
ucaguuauaguaugaugcu

SEQ ID NO: 456816 - RNA, 24 nt, Human
ucccccaaucccccccuccccgaa

SEQ ID NO: 456817 - RNA, 25 nt, Human
ucccccaaucccccccuccccgaaa

SEQ ID NO: 456818 - RNA, 21 nt, Human
uccgaacagaacaaaaugaaa

SEQ ID NO: 456819 - RNA, 29 nt, Human
ucuaugcauauuaacaacauacauagugu

SEQ ID NO: 456820 - RNA, 24 nt, Human
ucugaaaagaauaaaaaauccaga

SEQ ID NO: 456821 - RNA, 21 nt, Human
ugaaaagaauaaaaaauccag

SEQ ID NO: 456822 - RNA, 22 nt, Human
uggacagaauccuaaaacacaa

SEQ ID NO: 456823 - RNA, 19 nt, Human
ugggaaacaacacagcucc

SEQ ID NO: 456824 - RNA, 31 nt, Human
ugggaaacaacacagcucccuaggaagagcc

SEQ ID NO: 456825 - RNA, 23 nt, Human
uggggagauuaacucuaaucucc

SEQ ID NO: 456826 - RNA, 21 nt, Human
uggggccccucccccaauccc

SEQ ID NO: 456827 - RNA, 22 nt, Human
uggggccccucccccaaucccc

SEQ ID NO: 456828 - RNA, 20 nt, Human
uuaaagucaguucacaucac

SEQ ID NO: 456829 - RNA, 19 nt, Human
uuaacucuaaucuccacau

SEQ ID NO: 456830 - RNA, 23 nt, Human
uucacacaaaacaaauuauguga

SEQ ID NO: 456831 - RNA, 25 nt, Human
uucacuuacacuuagaaauuaaauc

SEQ ID NO: 456832 - RNA, 21 nt, Human
aaaaaaaaaaaacaaaaaaaa

SEQ ID NO: 456833 - RNA, 27 nt, Human
aaaaaaaaacaaaaaaacacaacaaca

SEQ ID NO: 456834 - RNA, 21 nt, Human
aaaaaaaacaaaaaaacacaa

SEQ ID NO: 456835 - RNA, 19 nt, Human
aaaaaaacacaacaacaaa

SEQ ID NO: 456836 - RNA, 24 nt, Human
aaaaaaacacaacaacaaaaaaga

SEQ ID NO: 456837 - RNA, 20 nt, Human
aaaacagcaaaaaugagccc

SEQ ID NO: 456838 - RNA, 29 nt, Human
aaaacagcaaaaaugagcccccaaaaaag

SEQ ID NO: 456839 - RNA, 19 nt, Human
aaagaaagcggggaccugg

SEQ ID NO: 456840 - RNA, 22 nt, Human
aaagagagagagagagagaagc

SEQ ID NO: 456841 - RNA, 22 nt, Human
aaauccaucaucuuacgccaga

SEQ ID NO: 456842 - RNA, 19 nt, Human
aacacaacaacaaaaaaac

SEQ ID NO: 456843 - RNA, 23 nt, Human
aagcccgggaaucaaaacagcaa

SEQ ID NO: 456844 - RNA, 23 nt, Human
aagcuguaacaauccacccugca

SEQ ID NO: 456845 - RNA, 18 nt, Human
aaucacacagcaguggca

SEQ ID NO: 456846 - RNA, 19 nt, Human
acaaaacaggagcacaguu

SEQ ID NO: 456847 - RNA, 24 nt, Human
acaacaaaaaaacuguccucugag

SEQ ID NO: 456848 - RNA, 21 nt, Human
acacagcaguggcaaaaggag

SEQ ID NO: 456849 - RNA, 22 nt, Human
acagcaaaaaugagcccccaaa

SEQ ID NO: 456850 - RNA, 19 nt, Human
acaggcuuuuuauuucuca

SEQ ID NO: 456851 - RNA, 18 nt, Human
acaguagaggagccaggg

SEQ ID NO: 456852 - RNA, 26 nt, Human
acucuauucugucuccucauccaccu

SEQ ID NO: 456853 - RNA, 21 nt, Human
acugggccugucuaaucacac

SEQ ID NO: 456854 - RNA, 23 nt, Human
agacaaaacaggagcacaguuga

SEQ ID NO: 456855 - RNA, 21 nt, Human
agagaagcagccacuguuacc

SEQ ID NO: 456856 - RNA, 18 nt, Human
agaggagccagggacucu

SEQ ID NO: 456857 - RNA, 19 nt, Human
agaggagccagggacucug

SEQ ID NO: 456858 - RNA, 18 nt, Human
agaugugaagguugggcu

SEQ ID NO: 456859 - RNA, 20 nt, Human
agcaaaaaugagcccccaaa

SEQ ID NO: 456860 - RNA, 21 nt, Human
agcccagccagucccccacag

SEQ ID NO: 456861 - RNA, 19 nt, Human
aggaacagccgagaugacc

SEQ ID NO: 456862 - RNA, 21 nt, Human
aggagcggccagcaugugccc

SEQ ID NO: 456863 - RNA, 21 nt, Human
aggcagcuccggccagaggcc

SEQ ID NO: 456864 - RNA, 24 nt, Human
agggaggagggcgaaucaaaucca

SEQ ID NO: 456865 - RNA, 20 nt, Human
aggugugacagauaaggaac

SEQ ID NO: 456866 - RNA, 27 nt, Human
agguuuccagcgaagcuguaacaaucc

SEQ ID NO: 456867 - RNA, 25 nt, Human
aucuaccaaaaaaaaaaaacaaaaa

SEQ ID NO: 456868 - RNA, 22 nt, Human
caaaacagcaaaaaugagcccc

SEQ ID NO: 456869 - RNA, 23 nt, Human
caaaacaggagcacaguugaaac

SEQ ID NO: 456870 - RNA, 21 nt, Human
caacaaaaaaacuguccucug

SEQ ID NO: 456871 - RNA, 26 nt, Human
caacaacaaaaaaacuguccucugag

SEQ ID NO: 456872 - RNA, 20 nt, Human
cacaacaacaaaaaaacugg

SEQ ID NO: 456873 - RNA, 23 nt, Human
cacacacaagucaugcaucuacc

SEQ ID NO: 456874 - RNA, 20 nt, Human
cacacggccugcagcagccc

SEQ ID NO: 456875 - RNA, 19 nt, Human
cacagcaguggcaaaagga

SEQ ID NO: 456876 - RNA, 19 nt, Human
cacagcaguggcaaaagga

SEQ ID NO: 456877 - RNA, 23 nt, Human
caccccguuuccccaaugacuua

SEQ ID NO: 456878 - RNA, 21 nt, Human
caccugguaagcccgggaauc

SEQ ID NO: 456879 - RNA, 24 nt, Human
cacuuucaagacaaaacaggagca

SEQ ID NO: 456880 - RNA, 19 nt, Human
cagcaaaaaugagccccca

SEQ ID NO: 456881 - RNA, 19 nt, Human
caggaaggcugguggcacc

SEQ ID NO: 456882 - RNA, 27 nt, Human
ccaaaaaaaaaaaacaaaaaaacacaa

SEQ ID NO: 456883 - RNA, 18 nt, Human
ccacugccuuuuucugag

SEQ ID NO: 456884 - RNA, 18 nt, Human
ccagccagucccccacag

SEQ ID NO: 456885 - RNA, 22 nt, Human
cccccacagcaucgagccaagu

SEQ ID NO: 456886 - RNA, 19 nt, Human
cccgcugcacaggcagaag

SEQ ID NO: 456887 - RNA, 20 nt, Human
cccugcgggagcugcugccu

SEQ ID NO: 456888 - RNA, 20 nt, Human
ccgccgccgccaccucugcc

SEQ ID NO: 456889 - RNA, 22 nt, Human
ccgccgccgccaccucugccaa

SEQ ID NO: 456890 - RNA, 18 nt, Human
ccuccaaagaaagcgggg

SEQ ID NO: 456891 - RNA, 18 nt, Human
ccucugaggaggcacagg

SEQ ID NO: 456892 - RNA, 19 nt, Human
ccuucuuccucccucacuu

SEQ ID NO: 456893 - RNA, 21 nt, Human
ccuucuuccucccucacuucu

SEQ ID NO: 456894 - RNA, 23 nt, Human
ccuucuuccucccucacuucuca

SEQ ID NO: 456895 - RNA, 19 nt, Human
cggcucacugggccugucu

SEQ ID NO: 456896 - RNA, 23 nt, Human
cggggaccugggcggacugcguc

SEQ ID NO: 456897 - RNA, 20 nt, Human
cuaauuugaaaauguugauc

SEQ ID NO: 456898 - RNA, 20 nt, Human
cuaccaaaaaaaaaaaacaa

SEQ ID NO: 456899 - RNA, 26 nt, Human
cuaccaaaaaaaaaaaacaaaaaaac

SEQ ID NO: 456900 - RNA, 24 nt, Human
cucacugggccugucuaaucacac

SEQ ID NO: 456901 - RNA, 23 nt, Human
cucauccaccugaaguucacccc

SEQ ID NO: 456902 - RNA, 22 nt, Human
cuccaaagaaagcggggaccug

SEQ ID NO: 456903 - RNA, 20 nt, Human
cugcagcucagauucaacag

SEQ ID NO: 456904 - RNA, 22 nt, Human
cugucagcucuagcaaaaggga

SEQ ID NO: 456905 - RNA, 22 nt, Human
cuguccucugaggaggcacagg

SEQ ID NO: 456906 - RNA, 18 nt, Human
cuucagcccugcgggagc

SEQ ID NO: 456907 - RNA, 21 nt, Human
gacacauucacuguggaaggc

SEQ ID NO: 456908 - RNA, 19 nt, Human
gacugugacagccucaaca

SEQ ID NO: 456909 - RNA, 21 nt, Human
gagagagagagaagcagccac

SEQ ID NO: 456910 - RNA, 19 nt, Human
gagcugcugccuccaaaga

SEQ ID NO: 456911 - RNA, 18 nt, Human
gagggaggagcggccagc

SEQ ID NO: 456912 - RNA, 20 nt, Human
gcaucuaccaaaaaaaaaaa

SEQ ID NO: 456913 - RNA, 18 nt, Human
gccagacgcuuccuauca

SEQ ID NO: 456914 - RNA, 22 nt, Human
gcccugcgggagcugcugccuc

SEQ ID NO: 456915 - RNA, 24 nt, Human
ggacacugccuucuuccucccuca

SEQ ID NO: 456916 - RNA, 22 nt, Human
ggagccagggacucugucucca

SEQ ID NO: 456917 - RNA, 19 nt, Human
ggcccacaggaaggcuggu

SEQ ID NO: 456918 - RNA, 20 nt, Human
uaccaaaaaaaaaaaacaaa

SEQ ID NO: 456919 - RNA, 24 nt, Human
uaccaaaaaaaaaaaacaaaaaaa

SEQ ID NO: 456920 - RNA, 23 nt, Human
uaugacagggaggagggcgaauc

SEQ ID NO: 456921 - RNA, 22 nt, Human
ucaaaacagcaaaaaugagccc

SEQ ID NO: 456922 - RNA, 22 nt, Human
ucaagacaaaacaggagcacaa

SEQ ID NO: 456923 - RNA, 21 nt, Human
ucagcccugcgggagcugcug

SEQ ID NO: 456924 - RNA, 21 nt, Human
uccacacucaggacugugaca

SEQ ID NO: 456925 - RNA, 22 nt, Human
ucccucacuucucaccugguaa

SEQ ID NO: 456926 - RNA, 25 nt, Human
ucuaccaaaaaaaaaaaacaaaaaa

SEQ ID NO: 456927 - RNA, 19 nt, Human
ucuaugacagggaggaggg

SEQ ID NO: 456928 - RNA, 21 nt, Human
ugaaaauguugaucuccuuuc

SEQ ID NO: 456929 - RNA, 19 nt, Human
ugacagauaaggaaccugc

SEQ ID NO: 456930 - RNA, 20 nt, Human
ugacagccucaacaacauga

SEQ ID NO: 456931 - RNA, 19 nt, Human
ugacagggaggagggcgaa

SEQ ID NO: 456932 - RNA, 18 nt, Human
ugcagccacucugggacc

SEQ ID NO: 456933 - RNA, 19 nt, Human
ugcagcucuaugacaggga

SEQ ID NO: 456934 - RNA, 23 nt, Human
ugccagacgcuuccuaucacucu

SEQ ID NO: 456935 - RNA, 23 nt, Human
uggugccacuuucaagacaaaac

SEQ ID NO: 456936 - RNA, 25 nt, Human
ugguggcaccagggaauaaacccug

SEQ ID NO: 456937 - RNA, 19 nt, Human
uguaacaauccacccugca

SEQ ID NO: 456938 - RNA, 21 nt, Human
uguaacaauccacccugcagc

SEQ ID NO: 456939 - RNA, 20 nt, Human
ugugaagguugggcugacag

SEQ ID NO: 456940 - RNA, 23 nt, Human
uucagcccugcgggagcugcugc

SEQ ID NO: 456941 - RNA, 19 nt, Human
aaagccggucugcacgagu

SEQ ID NO: 456942 - RNA, 20 nt, Human
aacccugcccuaagccgggc

SEQ ID NO: 456943 - RNA, 26 nt, Human
aagccacaacgcucccagccuccagc

SEQ ID NO: 456944 - RNA, 25 nt, Human
aagggucagcaagaaaagaggaagc

SEQ ID NO: 456945 - RNA, 20 nt, Human
aauaaagaagcaauuaggaa

SEQ ID NO: 456946 - RNA, 25 nt, Human
acacacgcgcacacacacgugugua

SEQ ID NO: 456947 - RNA, 27 nt, Human
acacgcgcacacacacguguguaguug

SEQ ID NO: 456948 - RNA, 26 nt, Human
acccaggcugacgacccacgauuagc

SEQ ID NO: 456949 - RNA, 18 nt, Human
agcaagaaaagaggaagc

SEQ ID NO: 456950 - RNA, 19 nt, Human
agcacugcacuuggucauc

SEQ ID NO: 456951 - RNA, 21 nt, Human
agccacaacgcucccagccuc

SEQ ID NO: 456952 - RNA, 22 nt, Human
aggccccccagggcgucuccuc

SEQ ID NO: 456953 - RNA, 25 nt, Human
caaaauaaagaagcaauuaggaaaa

SEQ ID NO: 456954 - RNA, 26 nt, Human
caaggugcagccacuucccagagcuc

SEQ ID NO: 456955 - RNA, 18 nt, Human
cacuaugcauggcggggc

SEQ ID NO: 456956 - RNA, 19 nt, Human
cacuggccagcucucucgg

SEQ ID NO: 456957 - RNA, 22 nt, Human
cagcuggaaaccacgcggugga

SEQ ID NO: 456958 - RNA, 24 nt, Human
ccaaaauaaagaagcaauuaggaa

SEQ ID NO: 456959 - RNA, 24 nt, Human
ccaccuguccagcucucaaaagcc

SEQ ID NO: 456960 - RNA, 23 nt, Human
ccagagcuccgaagggucagcaa

SEQ ID NO: 456961 - RNA, 21 nt, Human
ccagggcgucuccuccaacgc

SEQ ID NO: 456962 - RNA, 18 nt, Human
cccaggcugacgacccac

SEQ ID NO: 456963 - RNA, 23 nt, Human
cccuaagccgggcccagccaccc

SEQ ID NO: 456964 - RNA, 20 nt, Human
cccugcccuaagccgggccc

SEQ ID NO: 456965 - RNA, 22 nt, Human
ccucgugccccacgcccguguc

SEQ ID NO: 456966 - RNA, 18 nt, Human
ccuguccagcucucaaaa

SEQ ID NO: 456967 - RNA, 20 nt, Human
ccuguguaguacagcccagc

SEQ ID NO: 456968 - RNA, 27 nt, Human
cgaucaccagguucccaguuuuucagu

SEQ ID NO: 456969 - RNA, 20 nt, Human
cgcgcacacacacguguggu

SEQ ID NO: 456970 - RNA, 19 nt, Human
cgggagggucccgcggagg

SEQ ID NO: 456971 - RNA, 24 nt, Human
cuaaggccccccagggcgucuccu

SEQ ID NO: 456972 - RNA, 22 nt, Human
cuccgaagggucagcaagaaaa

SEQ ID NO: 456973 - RNA, 22 nt, Human
gagcccccuaccauuggaaaug

SEQ ID NO: 456974 - RNA, 21 nt, Human
gagccgccaaggugcagccac

SEQ ID NO: 456975 - RNA, 18 nt, Human
gcacugcacuuggucauc

SEQ ID NO: 456976 - RNA, 18 nt, Human
gcccccuaccauuggaaa

SEQ ID NO: 456977 - RNA, 26 nt, Human
gcucccagccuccagcuggaaaccac

SEQ ID NO: 456978 - RNA, 19 nt, Human
gguaauaagaacauagcac

SEQ ID NO: 456979 - RNA, 19 nt, Human
gugcacuguguuuuauaca

SEQ ID NO: 456980 - RNA, 21 nt, Human
uaaaggcugaguauuagugca

SEQ ID NO: 456981 - RNA, 21 nt, Human
uacagcccagcacuggccagc

SEQ ID NO: 456982 - RNA, 18 nt, Human
uacggccugucuaaagca

SEQ ID NO: 456983 - RNA, 24 nt, Human
ucaaaauaaaagcugcggauaaac

SEQ ID NO: 456984 - RNA, 25 nt, Human
ucaacuccugagcccccacguugcc

SEQ ID NO: 456985 - RNA, 19 nt, Human
uccaacgcgccgaugccca

SEQ ID NO: 456986 - RNA, 19 nt, Human
ucccagccuccagcuggaa

SEQ ID NO: 456987 - RNA, 23 nt, Human
ucgcgccaggauagcggcuccaa

SEQ ID NO: 456988 - RNA, 24 nt, Human
ucuauccaccaccuguccagcucu

SEQ ID NO: 456989 - RNA, 23 nt, Human
ucugcagacacauacguuuuaga

SEQ ID NO: 456990 - RNA, 20 nt, Human
ugaguauuagugcacugugu

SEQ ID NO: 456991 - RNA, 22 nt, Human
ugaucuauccaccaccugucca

SEQ ID NO: 456992 - RNA, 23 nt, Human
ugaucuauccaccaccuguccag

SEQ ID NO: 456993 - RNA, 20 nt, Human
ugcccuaagccgggcccagc

SEQ ID NO: 456994 - RNA, 21 nt, Human
uggcccaaaauaaagaagcaa

SEQ ID NO: 456995 - RNA, 19 nt, Human
ugucccaacgggagggucc

SEQ ID NO: 456996 - RNA, 21 nt, Human
ugucuaccgcuucagggcagc

SEQ ID NO: 456997 - RNA, 26 nt, Human
uguguuuuauacacacgcgcacacag

SEQ ID NO: 456998 - RNA, 20 nt, Human
uguuaucuagcuucuucacu

SEQ ID NO: 456999 - RNA, 23 nt, Human
uugaugucugcagacacauacgu

SEQ ID NO: 457000 - RNA, 20 nt, Human
uugccaccugucuaccgcuu

SEQ ID NO: 457001 - RNA, 20 nt, Human
uuggaaaugccaaacccugc

SEQ ID NO: 457002 - RNA, 22 nt, Human
uuugucaacuccugagccccca

SEQ ID NO: 457003 - RNA, 23 nt, Human
aaaagaacaggaugagcaguggg

SEQ ID NO: 457004 - RNA, 19 nt, Human
aaacaaacaaacaaacaca

SEQ ID NO: 457005 - RNA, 21 nt, Human
aaacaaacaaacaaacacaac

SEQ ID NO: 457006 - RNA, 19 nt, Human
aaacaaacaaacacaacaa

SEQ ID NO: 457007 - RNA, 18 nt, Human
aaacaaacacaacaauga

SEQ ID NO: 457008 - RNA, 23 nt, Human
aacaaacaaacaaacacaacaau

SEQ ID NO: 457009 - RNA, 24 nt, Human
aacaaugcagaagaggaggagaga

SEQ ID NO: 457010 - RNA, 25 nt, Human
acaaaaaaaaaaaaaaaaaaaagaa

SEQ ID NO: 457011 - RNA, 21 nt, Human
acaaacaaacacaacaaugaa

SEQ ID NO: 457012 - RNA, 23 nt, Human
acaaugaaucuagcuacauauca

SEQ ID NO: 457013 - RNA, 21 nt, Human
agaagaggaggagagagaggc

SEQ ID NO: 457014 - RNA, 18 nt, Human
aggaggagagagaggcuu

SEQ ID NO: 457015 - RNA, 21 nt, Human
caaugaaucuagcuacauauc

SEQ ID NO: 457016 - RNA, 19 nt, Human
caccagcagccagccgggc

SEQ ID NO: 457017 - RNA, 22 nt, Human
cagguaaaacaaacaaacaaac

SEQ ID NO: 457018 - RNA, 23 nt, Human
ccaccagcagccagccgggccag

SEQ ID NO: 457019 - RNA, 23 nt, Human
cccccaagauaauaucagguaaa

SEQ ID NO: 457020 - RNA, 25 nt, Human
ccucuagaacaaaaaaaaaaaaaaa

SEQ ID NO: 457021 - RNA, 19 nt, Human
cucaugucugaaacuggau

SEQ ID NO: 457022 - RNA, 21 nt, Human
cucaugucugaaacuggaucu

SEQ ID NO: 457023 - RNA, 27 nt, Human
cucuagaacaaaaaaaaaaaaaaaaaa

SEQ ID NO: 457024 - RNA, 18 nt, Human
gaaaaacaaugcagaaga

SEQ ID NO: 457025 - RNA, 22 nt, Human
gcugggaucagcuacgucaggc

SEQ ID NO: 457026 - RNA, 21 nt, Human
uaucagguaaaacaaacaaac

SEQ ID NO: 457027 - RNA, 23 nt, Human
ucuagaacaaaaaaaaaaaaaaa

SEQ ID NO: 457028 - RNA, 24 nt, Human
ucuagaacaaaaaaaaaaaaaaaa

SEQ ID NO: 457029 - RNA, 19 nt, Human
ucucaugucugaaacugga

SEQ ID NO: 457030 - RNA, 20 nt, Human
ugagcagggaaaaacaaugc

SEQ ID NO: 457031 - RNA, 22 nt, Human
ugggaucagcuacgucaggccc

SEQ ID NO: 457032 - RNA, 22 nt, Human
uuuucuaguuuauaagaguuau

SEQ ID NO: 457033 - RNA, 22 nt, Human
aaacaaaugaggcaagcaagau

SEQ ID NO: 457034 - RNA, 20 nt, Human
aacaaaugaggcaagcaaga

SEQ ID NO: 457035 - RNA, 23 nt, Human
aacuccauggauaaugaccaucu

SEQ ID NO: 457036 - RNA, 22 nt, Human
aagggugcuccugaggcacuug

SEQ ID NO: 457037 - RNA, 23 nt, Human
acaggugcccaccacuacacccg

SEQ ID NO: 457038 - RNA, 18 nt, Human
acgggguuucaccauguu

SEQ ID NO: 457039 - RNA, 19 nt, Human
acgggguuucaccauguua

SEQ ID NO: 457040 - RNA, 20 nt, Human
acgggguuucaccauguuag

SEQ ID NO: 457041 - RNA, 24 nt, Human
acgggguuucaccauguuagccag

SEQ ID NO: 457042 - RNA, 24 nt, Human
agaaauuaaugaagagaugccaca

SEQ ID NO: 457043 - RNA, 28 nt, Human
agaaauuaaugaagagaugccgguaccc

SEQ ID NO: 457044 - RNA, 23 nt, Human
agccccaauuuuuuuuuuaaggg

SEQ ID NO: 457045 - RNA, 18 nt, Human
agccucucgaguagcuag

SEQ ID NO: 457046 - RNA, 25 nt, Human
aggcuggagugcaguggcgcgaucu

SEQ ID NO: 457047 - RNA, 19 nt, Human
agggaggcaaggagagcgg

SEQ ID NO: 457048 - RNA, 22 nt, Human
aguagagacgggguuucaccau

SEQ ID NO: 457049 - RNA, 20 nt, Human
aguccuguauauagcaguuu

SEQ ID NO: 457050 - RNA, 21 nt, Human
agugcaguggcgcgaucuccg

SEQ ID NO: 457051 - RNA, 24 nt, Human
agugcaguggcgcgaucuccgcuc

SEQ ID NO: 457052 - RNA, 24 nt, Human
auccuaagaacauaaccaggaaac

SEQ ID NO: 457053 - RNA, 26 nt, Human
caagaaauuaaugaagagaugccaca

SEQ ID NO: 457054 - RNA, 18 nt, Human
caccauguuagccaggau

SEQ ID NO: 457055 - RNA, 22 nt, Human
caccauguuagccaggaugguc

SEQ ID NO: 457056 - RNA, 24 nt, Human
caccauguuagccaggauggucuc

SEQ ID NO: 457057 - RNA, 18 nt, Human
caccccaucaaauucaga

SEQ ID NO: 457058 - RNA, 19 nt, Human
caccucccggguucacgcc

SEQ ID NO: 457059 - RNA, 24 nt, Human
cagagucuugcccuguugcccagg

SEQ ID NO: 457060 - RNA, 21 nt, Human
cagauggcauaaauuuuuucc

SEQ ID NO: 457061 - RNA, 23 nt, Human
caggaaacaaaugaggcaagcaa

SEQ ID NO: 457062 - RNA, 21 nt, Human
caggugcccaccacuacaccc

SEQ ID NO: 457063 - RNA, 24 nt, Human
caggugcccaccacuacacccggc

SEQ ID NO: 457064 - RNA, 23 nt, Human
caguccuguauauagcaguuuca

SEQ ID NO: 457065 - RNA, 21 nt, Human
ccaccauaaucauauacaagc

SEQ ID NO: 457066 - RNA, 23 nt, Human
ccuaagaacauaaccaggaaaca

SEQ ID NO: 457067 - RNA, 24 nt, Human
ccucccggguucacgccauucucc

SEQ ID NO: 457068 - RNA, 23 nt, Human
cuaccucagccucucgaguagcu

SEQ ID NO: 457069 - RNA, 24 nt, Human
cucacugcaagcuccaccucccgg

SEQ ID NO: 457070 - RNA, 21 nt, Human
cucccggguucacgccauucu

SEQ ID NO: 457071 - RNA, 24 nt, Human
cucgaguagcuaggacuacaggug

SEQ ID NO: 457072 - RNA, 24 nt, Human
cucucgaguagcuaggacuacagg

SEQ ID NO: 457073 - RNA, 24 nt, Human
cugcaagcuccaccucccggguuc

SEQ ID NO: 457074 - RNA, 24 nt, Human
cuuacuaaaaucuucuacugucuu

SEQ ID NO: 457075 - RNA, 19 nt, Human
cuuauauaucugaaaucac

SEQ ID NO: 457076 - RNA, 24 nt, Human
cuugcccuguugcccaggcuggag

SEQ ID NO: 457077 - RNA, 18 nt, Human
gaacauaaccaggaaaca

SEQ ID NO: 457078 - RNA, 24 nt, Human
gagacgggguuucaccauguuagc

SEQ ID NO: 457079 - RNA, 19 nt, Human
gcccaggcuggagugcagu

SEQ ID NO: 457080 - RNA, 20 nt, Human
gcccaggcuggagugcagug

SEQ ID NO: 457081 - RNA, 25 nt, Human
gcccuguugcccaggcuggagugca

SEQ ID NO: 457082 - RNA, 25 nt, Human
gcuggagugcaguggcgcgaucucc

SEQ ID NO: 457083 - RNA, 22 nt, Human
ggacuacaggugcccaccacua

SEQ ID NO: 457084 - RNA, 21 nt, Human
ggagagcgggauggauuugga

SEQ ID NO: 457085 - RNA, 23 nt, Human
gggguuucaccauguuagccagg

SEQ ID NO: 457086 - RNA, 22 nt, Human
ggguuucaccauguuagccagg

SEQ ID NO: 457087 - RNA, 24 nt, Human
gguuucaccauguuagccaggaug

SEQ ID NO: 457088 - RNA, 23 nt, Human
guagagacgggguuucaccaugu

SEQ ID NO: 457089 - RNA, 21 nt, Human
uaaccaggaaacaaaugaggc

SEQ ID NO: 457090 - RNA, 24 nt, Human
uaauuuuuuguauguuuaguagag

SEQ ID NO: 457091 - RNA, 23 nt, Human
uaccucagccucucgaguagcua

SEQ ID NO: 457092 - RNA, 24 nt, Human
uaccucagccucucgaguagcuag

SEQ ID NO: 457093 - RNA, 22 nt, Human
uagagacgggguuucaccaugu

SEQ ID NO: 457094 - RNA, 21 nt, Human
uaggacuacaggugcccacca

SEQ ID NO: 457095 - RNA, 24 nt, Human
uaguagagacgggguuucaccaug

SEQ ID NO: 457096 - RNA, 26 nt, Human
uaguagagacgggguuucaccauguu

SEQ ID NO: 457097 - RNA, 22 nt, Human
uauaaaagucacuucaugcuua

SEQ ID NO: 457098 - RNA, 19 nt, Human
uauacaguccuguauauag

SEQ ID NO: 457099 - RNA, 18 nt, Human
uauaucugaaaucaccca

SEQ ID NO: 457100 - RNA, 24 nt, Human
ucaccauguuagccaggauggucu

SEQ ID NO: 457101 - RNA, 24 nt, Human
ucacugcaagcuccaccucccggg

SEQ ID NO: 457102 - RNA, 19 nt, Human
ucagggaggcaaggagagc

SEQ ID NO: 457103 - RNA, 18 nt, Human
ucccaacaagaaauuaau

SEQ ID NO: 457104 - RNA, 21 nt, Human
ucccggguucacgccauucuc

SEQ ID NO: 457105 - RNA, 23 nt, Human
ucccggguucacgccauucuccu

SEQ ID NO: 457106 - RNA, 26 nt, Human
uccgaacagauggcauaaaggaguuc

SEQ ID NO: 457107 - RNA, 18 nt, Human
ucuccaggaucaguuucu

SEQ ID NO: 457108 - RNA, 24 nt, Human
ucuccuaccucagccucucgagua

SEQ ID NO: 457109 - RNA, 23 nt, Human
ucucgaguagcuaggacuacagg

SEQ ID NO: 457110 - RNA, 24 nt, Human
ucucgaguagcuaggacuacaggu

SEQ ID NO: 457111 - RNA, 24 nt, Human
ucugaaguuuuucucuuggaaacu

SEQ ID NO: 457112 - RNA, 20 nt, Human
ucuuagucagaauccuaaga

SEQ ID NO: 457113 - RNA, 23 nt, Human
ucuugcccuguugcccaggcugg

SEQ ID NO: 457114 - RNA, 24 nt, Human
ucuugcccuguugcccaggcugga

SEQ ID NO: 457115 - RNA, 18 nt, Human
ugagacagagucuugccc

SEQ ID NO: 457116 - RNA, 22 nt, Human
ugagacagagucuugcccuguu

SEQ ID NO: 457117 - RNA, 18 nt, Human
ugcccaggcuggagugca

SEQ ID NO: 457118 - RNA, 21 nt, Human
ugcccaggcuggagugcagug

SEQ ID NO: 457119 - RNA, 22 nt, Human
ugcccaggcuggagugcagugg

SEQ ID NO: 457120 - RNA, 24 nt, Human
ugcccaggcuggagugcaguggcg

SEQ ID NO: 457121 - RNA, 24 nt, Human
ugcccuguugcccaggcuggagug

SEQ ID NO: 457122 - RNA, 25 nt, Human
ugcccuguugcccaggcuggagugc

SEQ ID NO: 457123 - RNA, 23 nt, Human
ugcgagagguagcuugcccaggc

SEQ ID NO: 457124 - RNA, 22 nt, Human
uggagugcaguggcgcgaucuc

SEQ ID NO: 457125 - RNA, 24 nt, Human
uggagugcaguggcgcgaucuccg

SEQ ID NO: 457126 - RNA, 18 nt, Human
uguaggcuuacuaaaauc

SEQ ID NO: 457127 - RNA, 23 nt, Human
uguccagauuauauacucuuaac

SEQ ID NO: 457128 - RNA, 24 nt, Human
uguccagauuauauacucuuaacu

SEQ ID NO: 457129 - RNA, 24 nt, Human
uguggucaccccaucaaauucaga

SEQ ID NO: 457130 - RNA, 22 nt, Human
uguggucggcuuaugcaguacc

SEQ ID NO: 457131 - RNA, 21 nt, Human
uguugcccaggcuggagugca

SEQ ID NO: 457132 - RNA, 24 nt, Human
uguuuaguagagacgggguuucac

SEQ ID NO: 457133 - RNA, 18 nt, Human
uuaguagagacgggguuu

SEQ ID NO: 457134 - RNA, 22 nt, Human
uuaguagagacgggguuucacc

SEQ ID NO: 457135 - RNA, 24 nt, Human
uuaguagagacgggguuucaccau

SEQ ID NO: 457136 - RNA, 23 nt, Human
uuauuuuuuauaccacaagaucu

SEQ ID NO: 457137 - RNA, 22 nt, Human
uucaagaggagaaugcugagga

SEQ ID NO: 457138 - RNA, 25 nt, Human
uucuucauuguagauaauuuccgau

SEQ ID NO: 457139 - RNA, 23 nt, Human
uugcauugccugauuuguguuuc

SEQ ID NO: 457140 - RNA, 24 nt, Human
uugcccuguugcccaggcuggagu

SEQ ID NO: 457141 - RNA, 19 nt, Human
uuggaguuuuauagauuga

SEQ ID NO: 457142 - RNA, 19 nt, Human
uuucaccauguuagccagg

SEQ ID NO: 457143 - RNA, 20 nt, Human
uuucaccauguuagccagga

SEQ ID NO: 457144 - RNA, 20 nt, Human
uuuuaaaugcguguuaacca

SEQ ID NO: 457145 - RNA, 21 nt, Human
uuuuuguauguuuaguagaga

SEQ ID NO: 457146 - RNA, 24 nt, Human
uuuuuuguauguuuaguagagacg

SEQ ID NO: 457147 - RNA, 20 nt, Human
uuuuuuuuuuugagacagag

SEQ ID NO: 457148 - RNA, 24 nt, Human
uuuuuuuuuuuugagacagagucu

SEQ ID NO: 457149 - RNA, 18 nt, Human
uuuuuuuuuuuuuuuuug

SEQ ID NO: 457150 - RNA, 25 nt, Human
aaaaaaggaaaaggguagaagagaa

SEQ ID NO: 457151 - RNA, 24 nt, Human
aaaaaggaaaaggguagaagagaa

SEQ ID NO: 457152 - RNA, 25 nt, Human
aaaaauauccaaacaucuaucaagg

SEQ ID NO: 457153 - RNA, 22 nt, Human
aaaagcucuagaauagcagucc

SEQ ID NO: 457154 - RNA, 18 nt, Human
aaaaggaaaaggguagaa

SEQ ID NO: 457155 - RNA, 23 nt, Human
aaaaggaauauacacauguauuu

SEQ ID NO: 457156 - RNA, 19 nt, Human
aaaccagaagagggacuga

SEQ ID NO: 457157 - RNA, 21 nt, Human
aacacacacaaccacaagacc

SEQ ID NO: 457158 - RNA, 19 nt, Human
aacauuucaaacagcugug

SEQ ID NO: 457159 - RNA, 24 nt, Human
aacuacgugaacacaccauacuuc

SEQ ID NO: 457160 - RNA, 20 nt, Human
aagaccacccacgacuauag

SEQ ID NO: 457161 - RNA, 20 nt, Human
aagagcaacaucuaucuguu

SEQ ID NO: 457162 - RNA, 20 nt, Human
aagcucuagaauagcagucc

SEQ ID NO: 457163 - RNA, 24 nt, Human
aauaaagggaaaccagaagaggga

SEQ ID NO: 457164 - RNA, 18 nt, Human
acacaaugaggcccccuc

SEQ ID NO: 457165 - RNA, 23 nt, Human
acacauguauuuguacacacaca

SEQ ID NO: 457166 - RNA, 23 nt, Human
acucagcuggggacugcuagaac

SEQ ID NO: 457167 - RNA, 18 nt, Human
agacugaaaggacaggca

SEQ ID NO: 457168 - RNA, 23 nt, Human
agagaaauaaagggaaaccagaa

SEQ ID NO: 457169 - RNA, 19 nt, Human
agagagauggauggaucag

SEQ ID NO: 457170 - RNA, 21 nt, Human
aggcaagagagagauggaugg

SEQ ID NO: 457171 - RNA, 23 nt, Human
aggcagcagggauccugcaagcc

SEQ ID NO: 457172 - RNA, 27 nt, Human
aggcaggaggaagggcaaaggggaccc

SEQ ID NO: 457173 - RNA, 19 nt, Human
aggcaggggccaggagaaa

SEQ ID NO: 457174 - RNA, 23 nt, Human
aggcucucgggcgucagcaaucu

SEQ ID NO: 457175 - RNA, 20 nt, Human
agucacaaagucuuccuggg

SEQ ID NO: 457176 - RNA, 21 nt, Human
auaaaacaucacaggccaaaa

SEQ ID NO: 457177 - RNA, 25 nt, Human
caaaaaauauccaaacaucuaucaa

SEQ ID NO: 457178 - RNA, 28 nt, Human
caaaaaggcgccgucaggaaugugacag

SEQ ID NO: 457179 - RNA, 22 nt, Human
caaacagcugugcaacgaacac

SEQ ID NO: 457180 - RNA, 23 nt, Human
cacaaccacaagaccacccacga

SEQ ID NO: 457181 - RNA, 23 nt, Human
cacaagaccacccacgaccacgg

SEQ ID NO: 457182 - RNA, 21 nt, Human
cacacacaaccacaagaccac

SEQ ID NO: 457183 - RNA, 20 nt, Human
cacacacagggcacaccaaa

SEQ ID NO: 457184 - RNA, 23 nt, Human
cacaccaaaaaauauccaaacau

SEQ ID NO: 457185 - RNA, 19 nt, Human
cacaggccaaaaaggcgcc

SEQ ID NO: 457186 - RNA, 24 nt, Human
cacccacgacuauaggacuuuaca

SEQ ID NO: 457187 - RNA, 24 nt, Human
cacucugcaauccccaugcuaaau

SEQ ID NO: 457188 - RNA, 26 nt, Human
cagcccgggaucaccaaggcagcagg

SEQ ID NO: 457189 - RNA, 22 nt, Human
caggcaggggccaggagaaagu

SEQ ID NO: 457190 - RNA, 25 nt, Human
cagggcacaccaaaaaauauccaaa

SEQ ID NO: 457191 - RNA, 18 nt, Human
caucacaggccaaaaagg

SEQ ID NO: 457192 - RNA, 18 nt, Human
cauguuucugucuagccu

SEQ ID NO: 457193 - RNA, 25 nt, Human
ccaaaaaauauccaaacaucuauca

SEQ ID NO: 457194 - RNA, 21 nt, Human
ccacaagaccacccacgacua

SEQ ID NO: 457195 - RNA, 25 nt, Human
ccagacacccaggugaaagagcaac

SEQ ID NO: 457196 - RNA, 20 nt, Human
ccaggaccuagauggggaca

SEQ ID NO: 457197 - RNA, 18 nt, Human
cccucacucuccaggagc

SEQ ID NO: 457198 - RNA, 25 nt, Human
ccgccgccacugucgccgucugccg

SEQ ID NO: 457199 - RNA, 19 nt, Human
ccgcugugcucucuggcug

SEQ ID NO: 457200 - RNA, 22 nt, Human
ccuccaguucuguucucugccu

SEQ ID NO: 457201 - RNA, 21 nt, Human
ccucccgucuucugcuuccuu

SEQ ID NO: 457202 - RNA, 20 nt, Human
cgaggcugcgggauuugaaa

SEQ ID NO: 457203 - RNA, 22 nt, Human
cgcagaaaaagcagcaagugac

SEQ ID NO: 457204 - RNA, 20 nt, Human
cgccgccgccacugucgccg

SEQ ID NO: 457205 - RNA, 24 nt, Human
cgggaaagcuugagcccagacacc

SEQ ID NO: 457206 - RNA, 23 nt, Human
cuagaacuacgugaacacaccau

SEQ ID NO: 457207 - RNA, 25 nt, Human
cuagaacuacgugaacacaccauac

SEQ ID NO: 457208 - RNA, 24 nt, Human
cucucccacucacucagcugggga

SEQ ID NO: 457209 - RNA, 22 nt, Human
cugaagauuuguggacaacuaa

SEQ ID NO: 457210 - RNA, 21 nt, Human
cugacaaggaggggucacaga

SEQ ID NO: 457211 - RNA, 19 nt, Human
cugcaagcccugccauggc

SEQ ID NO: 457212 - RNA, 19 nt, Human
gaaaggacaggcaugcuga

SEQ ID NO: 457213 - RNA, 19 nt, Human
gaaaggcaggaggaagggc

SEQ ID NO: 457214 - RNA, 25 nt, Human
gaacacacacaaccacaagaccacc

SEQ ID NO: 457215 - RNA, 23 nt, Human
gaagagggacugaggagucagua

SEQ ID NO: 457216 - RNA, 18 nt, Human
gacaguugagaaaggcag

SEQ ID NO: 457217 - RNA, 24 nt, Human
gacauguuucugucuagccugcug

SEQ ID NO: 457218 - RNA, 20 nt, Human
gaccuaaugggagccagcgg

SEQ ID NO: 457219 - RNA, 23 nt, Human
gaccuagauggggacagaacaca

SEQ ID NO: 457220 - RNA, 18 nt, Human
gagaaaggcaggaggaag

SEQ ID NO: 457221 - RNA, 19 nt, Human
gaucaccaaggcagcaggg

SEQ ID NO: 457222 - RNA, 21 nt, Human
gcccuccgcuuucuucaaccc

SEQ ID NO: 457223 - RNA, 19 nt, Human
gccgccgccacugucgccg

SEQ ID NO: 457224 - RNA, 22 nt, Human
gccuccaguucuguucucugcc

SEQ ID NO: 457225 - RNA, 22 nt, Human
gccuccaguucuguucucugcc

SEQ ID NO: 457226 - RNA, 20 nt, Human
gcgccgccgccacugucgcc

SEQ ID NO: 457227 - RNA, 19 nt, Human
gcuaaaccucaaaaucaga

SEQ ID NO: 457228 - RNA, 19 nt, Human
ggagccagcgggcgcaggc

SEQ ID NO: 457229 - RNA, 21 nt, Human
ggccaaaaaggcgccgucagg

SEQ ID NO: 457230 - RNA, 22 nt, Human
gggcaaaggaagugaggcuggg

SEQ ID NO: 457231 - RNA, 25 nt, Human
gggcagggccuucaccaaggcugcc

SEQ ID NO: 457232 - RNA, 21 nt, Human
gucacauuggggcagcugacc

SEQ ID NO: 457233 - RNA, 18 nt, Human
gugcucucuggcugucag

SEQ ID NO: 457234 - RNA, 20 nt, Human
uaaaacaucacaggccaaaa

SEQ ID NO: 457235 - RNA, 26 nt, Human
uaaauaaaaacuguagcggcaccuac

SEQ ID NO: 457236 - RNA, 18 nt, Human
uacuucaaugcugcagag

SEQ ID NO: 457237 - RNA, 21 nt, Human
uagaauagcaguccagacguu

SEQ ID NO: 457238 - RNA, 22 nt, Human
uaggacuuuacaauaaaagcac

SEQ ID NO: 457239 - RNA, 18 nt, Human
uaucaaggggaucaaggc

SEQ ID NO: 457240 - RNA, 21 nt, Human
ucaaacagcugugcaacgaac

SEQ ID NO: 457241 - RNA, 24 nt, Human
ucaaugccuccccucccgucuucu

SEQ ID NO: 457242 - RNA, 25 nt, Human
ucacaaagucuuccuggguauucuc

SEQ ID NO: 457243 - RNA, 24 nt, Human
ucaccaaggcugccgggcaccgcu

SEQ ID NO: 457244 - RNA, 24 nt, Human
ucagcaaucucuucaaauucgaga

SEQ ID NO: 457245 - RNA, 27 nt, Human
ucaggaaugugacacccgcgaggccga

SEQ ID NO: 457246 - RNA, 23 nt, Human
uccccaugcuaaauaaaaacugu

SEQ ID NO: 457247 - RNA, 24 nt, Human
uccccaugcuaaauaaaaacugua

SEQ ID NO: 457248 - RNA, 21 nt, Human
ucccuagauggacugccucca

SEQ ID NO: 457249 - RNA, 25 nt, Human
ucccuagauggacugccuccaguuc

SEQ ID NO: 457250 - RNA, 18 nt, Human
uccucacaguaaugaggc

SEQ ID NO: 457251 - RNA, 20 nt, Human
uccuuucuuaaaaaugaagu

SEQ ID NO: 457252 - RNA, 22 nt, Human
ucuaucaaggggaucaaggccg

SEQ ID NO: 457253 - RNA, 27 nt, Human
ucuccagcaggcaggggccaggagaaa

SEQ ID NO: 457254 - RNA, 19 nt, Human
ucuccaggagcugagccgc

SEQ ID NO: 457255 - RNA, 21 nt, Human
ucucuggcugucagcccggga

SEQ ID NO: 457256 - RNA, 22 nt, Human
ucugccgcagccugccuccacc

SEQ ID NO: 457257 - RNA, 23 nt, Human
ucugccgcagccugccuccaccu

SEQ ID NO: 457258 - RNA, 23 nt, Human
ugaccuaugucaaugccuccccu

SEQ ID NO: 457259 - RNA, 24 nt, Human
ugagaaaggcaggaggaagggcaa

SEQ ID NO: 457260 - RNA, 25 nt, Human
ugagaaaggcaggaggaagggcaaa

SEQ ID NO: 457261 - RNA, 21 nt, Human
ugaggcgagagggguggucau

SEQ ID NO: 457262 - RNA, 21 nt, Human
ugcaaaaaugagcccugucuu

SEQ ID NO: 457263 - RNA, 21 nt, Human
ugcaagcccugccauggcgcc

SEQ ID NO: 457264 - RNA, 24 nt, Human
ugcacgggagacacaaugaggccc

SEQ ID NO: 457265 - RNA, 18 nt, Human
ugccgggcaccgcugcag

SEQ ID NO: 457266 - RNA, 23 nt, Human
ugccuccaguucuguucucugcc

SEQ ID NO: 457267 - RNA, 25 nt, Human
ugccuccaguucuguucucugccug

SEQ ID NO: 457268 - RNA, 27 nt, Human
ugccuggcccaucucucuuuccccuca

SEQ ID NO: 457269 - RNA, 24 nt, Human
ugcuaaaccucaaaaucagaccac

SEQ ID NO: 457270 - RNA, 22 nt, Human
uguucucugccuggcccaucuc

SEQ ID NO: 457271 - RNA, 24 nt, Human
uuaugaccuaugucaaugccuccc

SEQ ID NO: 457272 - RNA, 25 nt, Human
uuccuggguauucuucauaacguac

SEQ ID NO: 457273 - RNA, 19 nt, Human
uucgauaaagcuucuuuaa

SEQ ID NO: 457274 - RNA, 29 nt, Human
uuuguacacacacacacacacagggcaca

SEQ ID NO: 457275 - RNA, 22 nt, Human
uuuuuuuuuuuuuuuuuuaaag

SEQ ID NO: 457276 - RNA, 23 nt, Human
aaaaaagagacucuuaaaaaaaa

SEQ ID NO: 457277 - RNA, 22 nt, Human
aaaauaacaaaucucacacugg

SEQ ID NO: 457278 - RNA, 18 nt, Human
aaacuaaaauagaaacac

SEQ ID NO: 457279 - RNA, 24 nt, Human
aaagugcugggauuacaggcguga

SEQ ID NO: 457280 - RNA, 20 nt, Human
aaccuccgccucccaggcuc

SEQ ID NO: 457281 - RNA, 27 nt, Human
aagcgauucucaugucucagucuccca

SEQ ID NO: 457282 - RNA, 19 nt, Human
aaguagcugggauuacagg

SEQ ID NO: 457283 - RNA, 24 nt, Human
aaguagcugggauuacaggugugc

SEQ ID NO: 457284 - RNA, 24 nt, Human
aagugauccgcuggccuuggccuc

SEQ ID NO: 457285 - RNA, 19 nt, Human
aagugcugggauuacaggc

SEQ ID NO: 457286 - RNA, 19 nt, Human
aagugcugggauuacaggc

SEQ ID NO: 457287 - RNA, 26 nt, Human
aagugcugggauuacaggcgugagcc

SEQ ID NO: 457288 - RNA, 21 nt, Human
aaugguacgaucucggcucac

SEQ ID NO: 457289 - RNA, 22 nt, Human
acaaaucucacacugggaaacc

SEQ ID NO: 457290 - RNA, 22 nt, Human
acaaucauuuuuaaaaagaagc

SEQ ID NO: 457291 - RNA, 22 nt, Human
acacacacacacauauauauau

SEQ ID NO: 457292 - RNA, 24 nt, Human
acacuagauuuaaauucugauuug

SEQ ID NO: 457293 - RNA, 24 nt, Human
acaggguuucuccauguuggucag

SEQ ID NO: 457294 - RNA, 22 nt, Human
acuagauuuaaauucugauuug

SEQ ID NO: 457295 - RNA, 18 nt, Human
agacaggguuucuccaug

SEQ ID NO: 457296 - RNA, 23 nt, Human
aggcgugagccaccgugccuggc

SEQ ID NO: 457297 - RNA, 25 nt, Human
aggcuggagugcagugguacgaucu

SEQ ID NO: 457298 - RNA, 21 nt, Human
aguagcugggauuacaggcau

SEQ ID NO: 457299 - RNA, 24 nt, Human
agugauucuccugccucagccucc

SEQ ID NO: 457300 - RNA, 24 nt, Human
agugcaaugguacgaucucggcuc

SEQ ID NO: 457301 - RNA, 20 nt, Human
agugcagugguacgaucuug

SEQ ID NO: 457302 - RNA, 23 nt, Human
agugcagugguacgaucuuggcu

SEQ ID NO: 457303 - RNA, 24 nt, Human
agugcagugguacgaucuuggcuc

SEQ ID NO: 457304 - RNA, 18 nt, Human
agugcugggauuacaggc

SEQ ID NO: 457305 - RNA, 24 nt, Human
agugguacgaucuuggcucauugc

SEQ ID NO: 457306 - RNA, 22 nt, Human
aguugagacaggguuucuccau

SEQ ID NO: 457307 - RNA, 19 nt, Human
auauaaccauauccauaua

SEQ ID NO: 457308 - RNA, 19 nt, Human
auauauauauauauauaua

SEQ ID NO: 457309 - RNA, 32 nt, Human
auauauauauauauaucccacauauauauggc

SEQ ID NO: 457310 - RNA, 20 nt, Human
auauauauauauaucccaca

SEQ ID NO: 457311 - RNA, 22 nt, Human
auauccauauauauauauauau

SEQ ID NO: 457312 - RNA, 18 nt, Human
auguauauguaugugugu

SEQ ID NO: 457313 - RNA, 21 nt, Human
auguauguguguguguauaua

SEQ ID NO: 457314 - RNA, 22 nt, Human
augucucagucucccaaguagc

SEQ ID NO: 457315 - RNA, 23 nt, Human
augucucagucucccaaguagcu

SEQ ID NO: 457316 - RNA, 24 nt, Human
augucucagucucccaaguagcug

SEQ ID NO: 457317 - RNA, 18 nt, Human
auguguauauauguauac

SEQ ID NO: 457318 - RNA, 18 nt, Human
auucuccugccucagccu

SEQ ID NO: 457319 - RNA, 24 nt, Human
auuuuuuuuuuuugaaauggaguu

SEQ ID NO: 457320 - RNA, 24 nt, Human
caaagugcugggauuacaggcgug

SEQ ID NO: 457321 - RNA, 23 nt, Human
caaccuccgccucccaggcucaa

SEQ ID NO: 457322 - RNA, 20 nt, Human
caagugauucuccugccuca

SEQ ID NO: 457323 - RNA, 22 nt, Human
caagugauucuccugccucagc

SEQ ID NO: 457324 - RNA, 20 nt, Human
cacacacacacacacacaua

SEQ ID NO: 457325 - RNA, 22 nt, Human
cacacacacacacacacauaua

SEQ ID NO: 457326 - RNA, 26 nt, Human
cacacacacacacacacauauauaua

SEQ ID NO: 457327 - RNA, 19 nt, Human
cacacacacacacacauau

SEQ ID NO: 457328 - RNA, 25 nt, Human
cacacacacacacacauauauauau

SEQ ID NO: 457329 - RNA, 18 nt, Human
cacacacacauauauaua

SEQ ID NO: 457330 - RNA, 20 nt, Human
cacacacauauauauauaua

SEQ ID NO: 457331 - RNA, 24 nt, Human
cacacacauauauauauauauaca

SEQ ID NO: 457332 - RNA, 21 nt, Human
cacugcaaccgccgccucccg

SEQ ID NO: 457333 - RNA, 23 nt, Human
cacugcaaccgccgccucccggg

SEQ ID NO: 457334 - RNA, 24 nt, Human
caggguuucuccauguuggucagg

SEQ ID NO: 457335 - RNA, 19 nt, Human
cagugguacgaucuuggcu

SEQ ID NO: 457336 - RNA, 24 nt, Human
cagugucuugcucugucgcccagg

SEQ ID NO: 457337 - RNA, 18 nt, Human
cauauauauauauauaca

SEQ ID NO: 457338 - RNA, 20 nt, Human
cauauauauauauauauaua

SEQ ID NO: 457339 - RNA, 20 nt, Human
cauauccauauauauauaua

SEQ ID NO: 457340 - RNA, 22 nt, Human
cauauccauauauauauauaua

SEQ ID NO: 457341 - RNA, 26 nt, Human
caucccauauauauaaccauauccau

SEQ ID NO: 457342 - RNA, 21 nt, Human
cauugcaaccuccgccuccca

SEQ ID NO: 457343 - RNA, 22 nt, Human
ccaaagugcugggauuacaggc

SEQ ID NO: 457344 - RNA, 22 nt, Human
ccaaagugcugggauuacaggc

SEQ ID NO: 457345 - RNA, 24 nt, Human
ccaaagugcugggauuacaggcgu

SEQ ID NO: 457346 - RNA, 19 nt, Human
ccaaccaaaccaucccaua

SEQ ID NO: 457347 - RNA, 21 nt, Human
ccaaguagcugggauuacagg

SEQ ID NO: 457348 - RNA, 24 nt, Human
ccaaguagcugggauuacaggugu

SEQ ID NO: 457349 - RNA, 20 nt, Human
ccaccacgccuggcuaauuu

SEQ ID NO: 457350 - RNA, 19 nt, Human
ccauguuggucaggcuggu

SEQ ID NO: 457351 - RNA, 22 nt, Human
cccaaguagcugggauuacagg

SEQ ID NO: 457352 - RNA, 23 nt, Human
cccaaguagcugggauuacaggu

SEQ ID NO: 457353 - RNA, 24 nt, Human
cccaaguagcugggauuacaggug

SEQ ID NO: 457354 - RNA, 18 nt, Human
cccacauauauaugggau

SEQ ID NO: 457355 - RNA, 20 nt, Human
cccaggcucaagcgauucuc

SEQ ID NO: 457356 - RNA, 18 nt, Human
cccaggcuggagugcaau

SEQ ID NO: 457357 - RNA, 23 nt, Human
cccgaguagcugggauuacaggc

SEQ ID NO: 457358 - RNA, 24 nt, Human
cccgaguagcugggauuacaggca

SEQ ID NO: 457359 - RNA, 23 nt, Human
cccggguucaagugauucuccuc

SEQ ID NO: 457360 - RNA, 23 nt, Human
cccggguucaagugauucuccug

SEQ ID NO: 457361 - RNA, 23 nt, Human
ccgaguagcugggauuacaggca

SEQ ID NO: 457362 - RNA, 24 nt, Human
ccgaguagcugggauuacaggcau

SEQ ID NO: 457363 - RNA, 24 nt, Human
ccgccucccaggcucaagcgauuc

SEQ ID NO: 457364 - RNA, 24 nt, Human
ccgccucccggguucaagugauuc

SEQ ID NO: 457365 - RNA, 24 nt, Human
ccucccggguucaagugauucucc

SEQ ID NO: 457366 - RNA, 18 nt, Human
ccugaccucaagugaucc

SEQ ID NO: 457367 - RNA, 22 nt, Human
ccugaccucaagugauccgcug

SEQ ID NO: 457368 - RNA, 25 nt, Human
ccugaccucaagugauccgcuggcc

SEQ ID NO: 457369 - RNA, 23 nt, Human
ccugccucagccucccgaguagc

SEQ ID NO: 457370 - RNA, 24 nt, Human
cucacugcaaccgccgccucccgg

SEQ ID NO: 457371 - RNA, 24 nt, Human
cucagccucccgaguagcugggau

SEQ ID NO: 457372 - RNA, 22 nt, Human
cucagucucccaaguagcuggg

SEQ ID NO: 457373 - RNA, 24 nt, Human
cucagucucccaaguagcugggau

SEQ ID NO: 457374 - RNA, 19 nt, Human
cucauugcaaccuccgccu

SEQ ID NO: 457375 - RNA, 24 nt, Human
cuccauguuggucaggcuggucuc

SEQ ID NO: 457376 - RNA, 20 nt, Human
cucccggguucaagugauuc

SEQ ID NO: 457377 - RNA, 23 nt, Human
cucugucgcccaggcuggagugc

SEQ ID NO: 457378 - RNA, 22 nt, Human
cucuuguugcccaggcuggagu

SEQ ID NO: 457379 - RNA, 22 nt, Human
cugaucaaaauaacaaaucuca

SEQ ID NO: 457380 - RNA, 18 nt, Human
cugcaaccgccgccuccc

SEQ ID NO: 457381 - RNA, 23 nt, Human
cugcaaccgccgccucccggguu

SEQ ID NO: 457382 - RNA, 23 nt, Human
cugccucagccucccgaguagcu

SEQ ID NO: 457383 - RNA, 24 nt, Human
cuuguugcccaggcuggagugcaa

SEQ ID NO: 457384 - RNA, 24 nt, Human
gaccucaagugauccgcuggccuu

SEQ ID NO: 457385 - RNA, 20 nt, Human
gagacaggguuucuccaugu

SEQ ID NO: 457386 - RNA, 21 nt, Human
gagacaggguuucuccauguu

SEQ ID NO: 457387 - RNA, 24 nt, Human
gaguagcugggauuacaggcaugc

SEQ ID NO: 457388 - RNA, 25 nt, Human
gagucugucaccaauuuuuuuuuuu

SEQ ID NO: 457389 - RNA, 18 nt, Human
gauuacaggcaugcgcca

SEQ ID NO: 457390 - RNA, 18 nt, Human
gauuacaggcgugagcca

SEQ ID NO: 457391 - RNA, 21 nt, Human
gauuacaggcgugagccaccg

SEQ ID NO: 457392 - RNA, 24 nt, Human
gauuacaggcgugagccaccgugc

SEQ ID NO: 457393 - RNA, 21 nt, Human
gauucucaugucucagucucc

SEQ ID NO: 457394 - RNA, 19 nt, Human
gcccaggcuggagugcagu

SEQ ID NO: 457395 - RNA, 20 nt, Human
gcccaggcuggagugcagug

SEQ ID NO: 457396 - RNA, 22 nt, Human
gccuuggccucccaaagugcug

SEQ ID NO: 457397 - RNA, 24 nt, Human
gcucuuguugcccaggcuggagug

SEQ ID NO: 457398 - RNA, 23 nt, Human
gcuggucucgaacuccugaccuc

SEQ ID NO: 457399 - RNA, 21 nt, Human
ggagagagagagagagacagu

SEQ ID NO: 457400 - RNA, 19 nt, Human
ggauuacaggcaugcgcca

SEQ ID NO: 457401 - RNA, 24 nt, Human
ggcuggucucgaacuccugaccuc

SEQ ID NO: 457402 - RNA, 22 nt, Human
ggguucaagugauucuccugcc

SEQ ID NO: 457403 - RNA, 23 nt, Human
ggguucaagugauucuccugccu

SEQ ID NO: 457404 - RNA, 19 nt, Human
ggucucgaacuccugaccu

SEQ ID NO: 457405 - RNA, 18 nt, Human
guagcugggauuacaggc

SEQ ID NO: 457406 - RNA, 20 nt, Human
guagcugggauuacaggcau

SEQ ID NO: 457407 - RNA, 22 nt, Human
guauauauauacacauguauau

SEQ ID NO: 457408 - RNA, 24 nt, Human
gugauucuccugccucagccuccc

SEQ ID NO: 457409 - RNA, 18 nt, Human
guuuuuuuaaaaaagaga

SEQ ID NO: 457410 - RNA, 24 nt, Human
uaaaaaagagacucuuaaaaaaaa

SEQ ID NO: 457411 - RNA, 20 nt, Human
uacacacacacacacacaca

SEQ ID NO: 457412 - RNA, 26 nt, Human
uacacacacacacacacacauauaua

SEQ ID NO: 457413 - RNA, 22 nt, Human
uacacacacacacauauauaua

SEQ ID NO: 457414 - RNA, 22 nt, Human
uacaggcaugcgccaccacgcc

SEQ ID NO: 457415 - RNA, 22 nt, Human
uacaggcgugagccaccgugcc

SEQ ID NO: 457416 - RNA, 23 nt, Human
uacaggcgugagccaccgugccu

SEQ ID NO: 457417 - RNA, 23 nt, Human
uacuuuauaaaugagauuucauu

SEQ ID NO: 457418 - RNA, 24 nt, Human
uaguugagacaggguuucuccaug

SEQ ID NO: 457419 - RNA, 26 nt, Human
uauacacacacacacacacacauaua

SEQ ID NO: 457420 - RNA, 24 nt, Human
uauacacacacacacauauauaua

SEQ ID NO: 457421 - RNA, 25 nt, Human
uauacacacacacacauauauauau

SEQ ID NO: 457422 - RNA, 19 nt, Human
uauacacauguauauguau

SEQ ID NO: 457423 - RNA, 24 nt, Human
uauacacauguauauguaugugug

SEQ ID NO: 457424 - RNA, 25 nt, Human
uauauacacacacacacauauauag

SEQ ID NO: 457425 - RNA, 23 nt, Human
uauauacacauguauauguaugu

SEQ ID NO: 457426 - RNA, 18 nt, Human
uauauauacacauguaua

SEQ ID NO: 457427 - RNA, 19 nt, Human
uauauauacacauguauau

SEQ ID NO: 457428 - RNA, 24 nt, Human
uauauauacacauguauauguaug

SEQ ID NO: 457429 - RNA, 27 nt, Human
uauauauacacauguauauguaugugu

SEQ ID NO: 457430 - RNA, 24 nt, Human
uauauauauacacauguauaugua

SEQ ID NO: 457431 - RNA, 19 nt, Human
uauauauauauauauauau

SEQ ID NO: 457432 - RNA, 23 nt, Human
uauauauauauauauaucccaca

SEQ ID NO: 457433 - RNA, 25 nt, Human
uauauauauaucccacauauauaug

SEQ ID NO: 457434 - RNA, 24 nt, Human
uauaugggaugguauauauauaca

SEQ ID NO: 457435 - RNA, 26 nt, Human
uauaugggaugguauauauauacaca

SEQ ID NO: 457436 - RNA, 20 nt, Human
uauauguaugugugugugua

SEQ ID NO: 457437 - RNA, 25 nt, Human
uauauguauguguguguguauauaa

SEQ ID NO: 457438 - RNA, 18 nt, Human
uauauguguauauaugua

SEQ ID NO: 457439 - RNA, 19 nt, Human
uauauguguauauauguau

SEQ ID NO: 457440 - RNA, 21 nt, Human
uaucccacauauauaugggau

SEQ ID NO: 457441 - RNA, 20 nt, Human
uauguauguguguguguaua

SEQ ID NO: 457442 - RNA, 18 nt, Human
uauguguauauauguaua

SEQ ID NO: 457443 - RNA, 20 nt, Human
uauguguauauauguauaau

SEQ ID NO: 457444 - RNA, 24 nt, Human
uauguguguguguauauaugugua

SEQ ID NO: 457445 - RNA, 19 nt, Human
ucaagugauucuccugccu

SEQ ID NO: 457446 - RNA, 18 nt, Human
ucacugcaaccgccgccu

SEQ ID NO: 457447 - RNA, 24 nt, Human
ucacugcaaccgccgccucccggg

SEQ ID NO: 457448 - RNA, 20 nt, Human
ucagccucccgaguagcugg

SEQ ID NO: 457449 - RNA, 23 nt, Human
ucaggaagcuaaacuaaaauaga

SEQ ID NO: 457450 - RNA, 19 nt, Human
ucauugcaaccuccgccuc

SEQ ID NO: 457451 - RNA, 24 nt, Human
ucauugcaaccuccgccucccagg

SEQ ID NO: 457452 - RNA, 25 nt, Human
ucauugcaaccuccgccucccaggc

SEQ ID NO: 457453 - RNA, 19 nt, Human
uccauauauauauauauau

SEQ ID NO: 457454 - RNA, 24 nt, Human
uccauguuggucaggcuggucucg

SEQ ID NO: 457455 - RNA, 24 nt, Human
ucccaaagugcugggauuacaggc

SEQ ID NO: 457456 - RNA, 23 nt, Human
ucccaaguagcugggauuacagg

SEQ ID NO: 457457 - RNA, 24 nt, Human
ucccaaguagcugggauuacaggu

SEQ ID NO: 457458 - RNA, 21 nt, Human
ucccaggcucaagcgauucuc

SEQ ID NO: 457459 - RNA, 24 nt, Human
ucccaggcucaagcgauucucaug

SEQ ID NO: 457460 - RNA, 24 nt, Human
ucccgaguagcugggauuacaggc

SEQ ID NO: 457461 - RNA, 21 nt, Human
ucccggguucaagugauucuc

SEQ ID NO: 457462 - RNA, 24 nt, Human
ucccggguucaagugauucuccug

SEQ ID NO: 457463 - RNA, 22 nt, Human
ucgcccaggcuggagugcagug

SEQ ID NO: 457464 - RNA, 22 nt, Human
ucgcucuuguugcccaggcugg

SEQ ID NO: 457465 - RNA, 23 nt, Human
ucgcucuuguugcccaggcugga

SEQ ID NO: 457466 - RNA, 24 nt, Human
ucuccugccucagccucccgagua

SEQ ID NO: 457467 - RNA, 21 nt, Human
ucucgaacuccugaccucaag

SEQ ID NO: 457468 - RNA, 19 nt, Human
ucucggcucacugcaaccg

SEQ ID NO: 457469 - RNA, 21 nt, Human
ucugaucaaaauaacaaaucu

SEQ ID NO: 457470 - RNA, 24 nt, Human
ucugucgcccaggcuggagugcag

SEQ ID NO: 457471 - RNA, 18 nt, Human
ucuuacagucaucuuuau

SEQ ID NO: 457472 - RNA, 23 nt, Human
ucuugcucugucgcccaggcugg

SEQ ID NO: 457473 - RNA, 24 nt, Human
ucuugcucugucgcccaggcugga

SEQ ID NO: 457474 - RNA, 22 nt, Human
ucuuguugcccaggcuggagug

SEQ ID NO: 457475 - RNA, 18 nt, Human
ugaccucaagugauccgc

SEQ ID NO: 457476 - RNA, 19 nt, Human
ugaccucaagugauccgcu

SEQ ID NO: 457477 - RNA, 22 nt, Human
ugagacaggguuucuccauguu

SEQ ID NO: 457478 - RNA, 22 nt, Human
ugcaaccgccgccucccggguu

SEQ ID NO: 457479 - RNA, 18 nt, Human
ugcccaggcuggagugca

SEQ ID NO: 457480 - RNA, 21 nt, Human
ugcccaggcuggagugcaaug

SEQ ID NO: 457481 - RNA, 21 nt, Human
ugcccaggcuggagugcaaug

SEQ ID NO: 457482 - RNA, 24 nt, Human
ugccucagccucccgaguagcugg

SEQ ID NO: 457483 - RNA, 24 nt, Human
ugcucugucgcccaggcuggagug

SEQ ID NO: 457484 - RNA, 24 nt, Human
ugcugggauuacaggcgugagcca

SEQ ID NO: 457485 - RNA, 23 nt, Human
uggagugcaaugguacgaucucg

SEQ ID NO: 457486 - RNA, 24 nt, Human
uggagugcaaugguacgaucucgg

SEQ ID NO: 457487 - RNA, 23 nt, Human
uggagugcagugguacgaucuug

SEQ ID NO: 457488 - RNA, 24 nt, Human
uggagugcagugguacgaucuugg

SEQ ID NO: 457489 - RNA, 21 nt, Human
ugggaccaaccaaaccauccc

SEQ ID NO: 457490 - RNA, 18 nt, Human
ugggauuacaggcaugcg

SEQ ID NO: 457491 - RNA, 21 nt, Human
ugggauuacaggcaugcgcca

SEQ ID NO: 457492 - RNA, 22 nt, Human
ugggauuacaggcaugcgccac

SEQ ID NO: 457493 - RNA, 24 nt, Human
ugggauuacaggcaugcgccacca

SEQ ID NO: 457494 - RNA, 18 nt, Human
ugggauuacaggcgugag

SEQ ID NO: 457495 - RNA, 21 nt, Human
ugggauuacaggcgugagcca

SEQ ID NO: 457496 - RNA, 22 nt, Human
ugggauuacaggcgugagccac

SEQ ID NO: 457497 - RNA, 23 nt, Human
ugggauuacaggcgugagccacc

SEQ ID NO: 457498 - RNA, 23 nt, Human
ugggauuacaggcgugagccacc

SEQ ID NO: 457499 - RNA, 24 nt, Human
ugggauuacaggcgugagccaccg

SEQ ID NO: 457500 - RNA, 21 nt, Human
ugggauuacaggugugcacca

SEQ ID NO: 457501 - RNA, 22 nt, Human
ugggauuacaggugugcaccac

SEQ ID NO: 457502 - RNA, 24 nt, Human
ugggauuacaggugugcaccacca

SEQ ID NO: 457503 - RNA, 23 nt, Human
ugguauauauauacacauguaua

SEQ ID NO: 457504 - RNA, 27 nt, Human
ugguauauauauacacauguauaugua

SEQ ID NO: 457505 - RNA, 24 nt, Human
uggucaggcuggucucgaacuccu

SEQ ID NO: 457506 - RNA, 24 nt, Human
uguauacacacacacacacacaca

SEQ ID NO: 457507 - RNA, 25 nt, Human
uguauacacacacacacacacacag

SEQ ID NO: 457508 - RNA, 19 nt, Human
uguauauauguguauauau

SEQ ID NO: 457509 - RNA, 23 nt, Human
uguauauauguguauauauguau

SEQ ID NO: 457510 - RNA, 24 nt, Human
ugugcaccaccacaccaggcuaac

SEQ ID NO: 457511 - RNA, 18 nt, Human
uguguauauauguguaua

SEQ ID NO: 457512 - RNA, 18 nt, Human
uguguauauauguguaua

SEQ ID NO: 457513 - RNA, 20 nt, Human
uguguauauauguguauaua

SEQ ID NO: 457514 - RNA, 20 nt, Human
uguguauauauguguauaua

SEQ ID NO: 457515 - RNA, 21 nt, Human
uguguauauauguguauauau

SEQ ID NO: 457516 - RNA, 24 nt, Human
uguguauauauguguauauaugua

SEQ ID NO: 457517 - RNA, 19 nt, Human
uguguguauauauguguau

SEQ ID NO: 457518 - RNA, 24 nt, Human
uguguguguauauauguguauaua

SEQ ID NO: 457519 - RNA, 20 nt, Human
uguguguguguauauaugug

SEQ ID NO: 457520 - RNA, 25 nt, Human
uguguguguguauauauguguauca

SEQ ID NO: 457521 - RNA, 20 nt, Human
uguugcccaggcuggagugc

SEQ ID NO: 457522 - RNA, 21 nt, Human
uucaagugauucuccugccuc

SEQ ID NO: 457523 - RNA, 23 nt, Human
uucaagugauucuccugccucag

SEQ ID NO: 457524 - RNA, 24 nt, Human
uucaagugauucuccugccucagc

SEQ ID NO: 457525 - RNA, 24 nt, Human
uucgcucuuguugcccaggcugga

SEQ ID NO: 457526 - RNA, 18 nt, Human
uucugauuugaauacucu

SEQ ID NO: 457527 - RNA, 23 nt, Human
uugcaaccuccgccucccaggcu

SEQ ID NO: 457528 - RNA, 24 nt, Human
uugcaaccuccgccucccaggcuc

SEQ ID NO: 457529 - RNA, 18 nt, Human
uugcccaggcuggagugc

SEQ ID NO: 457530 - RNA, 24 nt, Human
uugcucugucgcccaggcuggagu

SEQ ID NO: 457531 - RNA, 18 nt, Human
uuggccucccaaagugcu

SEQ ID NO: 457532 - RNA, 27 nt, Human
uuuaucuucuugggacaacauucuuuu

SEQ ID NO: 457533 - RNA, 23 nt, Human
uuucgcucuuguugcccaggcug

SEQ ID NO: 457534 - RNA, 24 nt, Human
uuucgcucuuguugcccaggcugg

SEQ ID NO: 457535 - RNA, 21 nt, Human
uuucuccauguuggucaggcu

SEQ ID NO: 457536 - RNA, 24 nt, Human
uuuuuuuuuuugaaauggaguuuc

SEQ ID NO: 457537 - RNA, 23 nt, Human
aaaauaaggucaacaaaccacca

SEQ ID NO: 457538 - RNA, 20 nt, Human
aacaaaugcccuccaaaaga

SEQ ID NO: 457539 - RNA, 20 nt, Human
aacaaaugcccuccaaaaga

SEQ ID NO: 457540 - RNA, 21 nt, Human
aacagaaucgauccacaccaa

SEQ ID NO: 457541 - RNA, 18 nt, Human
aagaggaguuuugagccu

SEQ ID NO: 457542 - RNA, 18 nt, Human
aagaggaguuuugagccu

SEQ ID NO: 457543 - RNA, 23 nt, Human
aagccaauuaaacugaagcacag

SEQ ID NO: 457544 - RNA, 24 nt, Human
aaguccuccaagcgucaacagcuu

SEQ ID NO: 457545 - RNA, 23 nt, Human
aaguuccugggaugcaguugcau

SEQ ID NO: 457546 - RNA, 18 nt, Human
acaaaccaccaaauccca

SEQ ID NO: 457547 - RNA, 22 nt, Human
acaacaagauucugggggcaaa

SEQ ID NO: 457548 - RNA, 20 nt, Human
accacaaccccaggccagca

SEQ ID NO: 457549 - RNA, 18 nt, Human
accaccaaaucccaaguc

SEQ ID NO: 457550 - RNA, 20 nt, Human
acccggccucaaccacaacc

SEQ ID NO: 457551 - RNA, 19 nt, Human
agccaccaaaaugaaccuu

SEQ ID NO: 457552 - RNA, 20 nt, Human
aggucaaacggacagccacc

SEQ ID NO: 457553 - RNA, 18 nt, Human
aggucaacaaaccaccaa

SEQ ID NO: 457554 - RNA, 21 nt, Human
aggucugauaucaaagaggag

SEQ ID NO: 457555 - RNA, 22 nt, Human
auggcagcucuuuuuaguaaac

SEQ ID NO: 457556 - RNA, 18 nt, Human
auuaaacugaagcacagc

SEQ ID NO: 457557 - RNA, 23 nt, Human
caaaauaaggucaacaaaccacc

SEQ ID NO: 457558 - RNA, 22 nt, Human
caaaccaccaaaucccaagucc

SEQ ID NO: 457559 - RNA, 23 nt, Human
caacaaaccaccaaaucccaagu

SEQ ID NO: 457560 - RNA, 21 nt, Human
caagaggaacauggauccaaa

SEQ ID NO: 457561 - RNA, 21 nt, Human
caagaggaacauggauccaaa

SEQ ID NO: 457562 - RNA, 21 nt, Human
caagccaauuaaacugaagca

SEQ ID NO: 457563 - RNA, 28 nt, Human
caaguugguaaaauuuauucuacauuua

SEQ ID NO: 457564 - RNA, 28 nt, Human
caaguugguaaaauuuauucuacauuua

SEQ ID NO: 457565 - RNA, 22 nt, Human
caccaaaucccaaguccuccaa

SEQ ID NO: 457566 - RNA, 18 nt, Human
caccaguaagaucaugau

SEQ ID NO: 457567 - RNA, 19 nt, Human
cagaaucgauccacaccaa

SEQ ID NO: 457568 - RNA, 22 nt, Human
cagaaucgauccacaccaaaac

SEQ ID NO: 457569 - RNA, 25 nt, Human
cagcuucagaucuccuugcaugaag

SEQ ID NO: 457570 - RNA, 25 nt, Human
cagcuucagaucuccuugcaugaag

SEQ ID NO: 457571 - RNA, 18 nt, Human
caggaagaaggaguagag

SEQ ID NO: 457572 - RNA, 19 nt, Human
cagugugucccaaacagaa

SEQ ID NO: 457573 - RNA, 23 nt, Human
cauggcacuggacugaagugugu

SEQ ID NO: 457574 - RNA, 21 nt, Human
cauuucuauuucugcugaaga

SEQ ID NO: 457575 - RNA, 21 nt, Human
cauuucuauuucugcugaaga

SEQ ID NO: 457576 - RNA, 18 nt, Human
ccaaaacaucccaggaag

SEQ ID NO: 457577 - RNA, 19 nt, Human
ccaaaacaucccaggaaga

SEQ ID NO: 457578 - RNA, 21 nt, Human
ccaaacaaaugcccuccaaaa

SEQ ID NO: 457579 - RNA, 21 nt, Human
ccaaacaaaugcccuccaaaa

SEQ ID NO: 457580 - RNA, 23 nt, Human
cccggccucaaccacaaccccag

SEQ ID NO: 457581 - RNA, 28 nt, Human
cccggccucaaccacaaccccaggccag

SEQ ID NO: 457582 - RNA, 22 nt, Human
ccgucugcaagguaaaaucugg

SEQ ID NO: 457583 - RNA, 22 nt, Human
ccgucugcaagguaaaaucugg

SEQ ID NO: 457584 - RNA, 23 nt, Human
ccuaggacuggcacacucaauuc

SEQ ID NO: 457585 - RNA, 23 nt, Human
cgggcacaggagcggagacccgg

SEQ ID NO: 457586 - RNA, 23 nt, Human
cgggcacaggagcggagacccgg

SEQ ID NO: 457587 - RNA, 24 nt, Human
cucaaccacaaccccaggccagca

SEQ ID NO: 457588 - RNA, 23 nt, Human
cugaagauauagcaauguacaga

SEQ ID NO: 457589 - RNA, 23 nt, Human
cugaagauauagcaauguacaga

SEQ ID NO: 457590 - RNA, 20 nt, Human
cugaagauuuucauuguuca

SEQ ID NO: 457591 - RNA, 20 nt, Human
cugaagauuuucauuguuca

SEQ ID NO: 457592 - RNA, 28 nt, Human
cugaccgccgaacuugagaagguuuucc

SEQ ID NO: 457593 - RNA, 20 nt, Human
cuuaaccaaacaaaugcccu

SEQ ID NO: 457594 - RNA, 20 nt, Human
cuucaguaggcaaacaacaa

SEQ ID NO: 457595 - RNA, 24 nt, Human
cuucccgggcacaggagcggagac

SEQ ID NO: 457596 - RNA, 24 nt, Human
cuucccgggcacaggagcggagac

SEQ ID NO: 457597 - RNA, 19 nt, Human
cuuguaaacucgccacuau

SEQ ID NO: 457598 - RNA, 19 nt, Human
cuuguaaacucgccacuau

SEQ ID NO: 457599 - RNA, 19 nt, Human
gaacaaauuugauucccca

SEQ ID NO: 457600 - RNA, 19 nt, Human
gaacaaauuugauucccca

SEQ ID NO: 457601 - RNA, 22 nt, Human
gaagacggagcuuucacccgcc

SEQ ID NO: 457602 - RNA, 22 nt, Human
gaagacggagcuuucacccgcc

SEQ ID NO: 457603 - RNA, 20 nt, Human
gacagccaccaaaaugaacc

SEQ ID NO: 457604 - RNA, 21 nt, Human
gacccggccucaaccacaacc

SEQ ID NO: 457605 - RNA, 21 nt, Human
gacccggccucaaccacaacc

SEQ ID NO: 457606 - RNA, 19 nt, Human
gaucaugaucaucaucaua

SEQ ID NO: 457607 - RNA, 20 nt, Human
gcauggcacuggacugaagu

SEQ ID NO: 457608 - RNA, 19 nt, Human
gggcaaaagacauuucuuc

SEQ ID NO: 457609 - RNA, 18 nt, Human
gugugucccaaacagaau

SEQ ID NO: 457610 - RNA, 20 nt, Human
uaaacucgccacuauccuuu

SEQ ID NO: 457611 - RNA, 20 nt, Human
uaaacucgccacuauccuuu

SEQ ID NO: 457612 - RNA, 18 nt, Human
uaaccaaacaaaugcccu

SEQ ID NO: 457613 - RNA, 22 nt, Human
uaaccaaacaaaugcccuccaa

SEQ ID NO: 457614 - RNA, 22 nt, Human
uaaccaaacaaaugcccuccaa

SEQ ID NO: 457615 - RNA, 24 nt, Human
uaaccaaacaaaugcccuccaaaa

SEQ ID NO: 457616 - RNA, 24 nt, Human
uaaccaaacaaaugcccuccaaaa

SEQ ID NO: 457617 - RNA, 24 nt, Human
uaaggucaacaaaccaccaaaucc

SEQ ID NO: 457618 - RNA, 22 nt, Human
uagaaagguccuaggacuggca

SEQ ID NO: 457619 - RNA, 19 nt, Human
ucaaaacgggcaaaagaca

SEQ ID NO: 457620 - RNA, 19 nt, Human
ucaacaaaccaccaaaucc

SEQ ID NO: 457621 - RNA, 20 nt, Human
ucaacaaaccaccaaauccc

SEQ ID NO: 457622 - RNA, 20 nt, Human
uccaaaagaaggaaaauaac

SEQ ID NO: 457623 - RNA, 20 nt, Human
uccaaaagaaggaaaauaac

SEQ ID NO: 457624 - RNA, 21 nt, Human
uccaaagaagccuucuuaacc

SEQ ID NO: 457625 - RNA, 21 nt, Human
uccaaagaagccuucuuaacc

SEQ ID NO: 457626 - RNA, 23 nt, Human
uccacaccaaaacaucccaggaa

SEQ ID NO: 457627 - RNA, 21 nt, Human
uccccacaacacuuuuugcuu

SEQ ID NO: 457628 - RNA, 21 nt, Human
uccccacaacacuuuuugcuu

SEQ ID NO: 457629 - RNA, 21 nt, Human
ucccugggccaugauggcagc

SEQ ID NO: 457630 - RNA, 21 nt, Human
ucccugggccaugauggcagc

SEQ ID NO: 457631 - RNA, 23 nt, Human
uccuguuucuauaaggauucuac

SEQ ID NO: 457632 - RNA, 19 nt, Human
uguuuugugcaugaggaaa

SEQ ID NO: 457633 - RNA, 19 nt, Human
uguuuugugcaugaggaaa

SEQ ID NO: 457634 - RNA, 22 nt, Human
uucagaagacggagcuuucacc

SEQ ID NO: 457635 - RNA, 22 nt, Human
uucagaagacggagcuuucacc

SEQ ID NO: 457636 - RNA, 21 nt, Human
uucauuguucagcuucagauc

SEQ ID NO: 457637 - RNA, 22 nt, Human
uuccaaaguccaaagaagccuu

SEQ ID NO: 457638 - RNA, 22 nt, Human
uuccaaaguccaaagaagccuu

SEQ ID NO: 457639 - RNA, 18 nt, Human
uuccaagccaauuaaacc

SEQ ID NO: 457640 - RNA, 22 nt, Human
uucucaguccucuuugcauuuc

SEQ ID NO: 457641 - RNA, 23 nt, Human
uuugugcaugaggaaaggaacaa

SEQ ID NO: 457642 - RNA, 23 nt, Human
uuugugcaugaggaaaggaacaa

SEQ ID NO: 457643 - RNA, 24 nt, Human
uuuuuuuuuuuuuuuuuuuccaag

SEQ ID NO: 457644 - RNA, 20 nt, Human
aaacaaauuccagauuagca

SEQ ID NO: 457645 - RNA, 22 nt, Human
aaacaaauuccagauuagcaac

SEQ ID NO: 457646 - RNA, 23 nt, Human
aaacaaauuccagauuagcauag

SEQ ID NO: 457647 - RNA, 22 nt, Human
aagaaaauuuaaaccauaacua

SEQ ID NO: 457648 - RNA, 18 nt, Human
aaggcaaacaaaguacag

SEQ ID NO: 457649 - RNA, 23 nt, Human
acaccacaucaacuccuacggac

SEQ ID NO: 457650 - RNA, 24 nt, Human
acagaaaaaaauauauuucaggca

SEQ ID NO: 457651 - RNA, 21 nt, Human
acagaugcuguacauuaaaaa

SEQ ID NO: 457652 - RNA, 20 nt, Human
acuccuacggacaaaagggc

SEQ ID NO: 457653 - RNA, 19 nt, Human
auauaucacucacaccaca

SEQ ID NO: 457654 - RNA, 21 nt, Human
caaacaaaguacagaugcugu

SEQ ID NO: 457655 - RNA, 19 nt, Human
caacaacagaaacacuccc

SEQ ID NO: 457656 - RNA, 24 nt, Human
cacagcaauuagcuaacaauaaaa

SEQ ID NO: 457657 - RNA, 24 nt, Human
caccacaucaacuccuacggacaa

SEQ ID NO: 457658 - RNA, 24 nt, Human
cagacuacauuugggcugacaggg

SEQ ID NO: 457659 - RNA, 19 nt, Human
ccugcagucacagcugaaa

SEQ ID NO: 457660 - RNA, 23 nt, Human
cuuccugcagucacagcugaaag

SEQ ID NO: 457661 - RNA, 22 nt, Human
gauacaagugauguaguuugac

SEQ ID NO: 457662 - RNA, 24 nt, Human
guauuacacugcaaaacuuacaca

SEQ ID NO: 457663 - RNA, 24 nt, Human
guuucauuuaucuuaccuuuauca

SEQ ID NO: 457664 - RNA, 22 nt, Human
uaaaaacacucccacuuccugc

SEQ ID NO: 457665 - RNA, 25 nt, Human
uaagaaaauuuaaaccauaacuaga

SEQ ID NO: 457666 - RNA, 22 nt, Human
uacagaugcuguacauuaaaaa

SEQ ID NO: 457667 - RNA, 22 nt, Human
uacauuaaaaacauagaaauau

SEQ ID NO: 457668 - RNA, 21 nt, Human
uagccaacaacagaaacacuc

SEQ ID NO: 457669 - RNA, 26 nt, Human
uauauacagaccagacuacauaugua

SEQ ID NO: 457670 - RNA, 22 nt, Human
uauguauuacacugcaaaacuu

SEQ ID NO: 457671 - RNA, 22 nt, Human
ucaaggcaaacaaaguacagau

SEQ ID NO: 457672 - RNA, 25 nt, Human
uggauuuucaaucacuguauaauuc

SEQ ID NO: 457673 - RNA, 25 nt, Human
uuuaaaccauaacuagacauaaaca

SEQ ID NO: 457674 - RNA, 24 nt, Human
uuuuuuuuuuuuuuucuuaacuug

SEQ ID NO: 457675 - RNA, 23 nt, Human
aaaaagaaaauucaaaauccagc

SEQ ID NO: 457676 - RNA, 18 nt, Human
aaaauucaaaauccagcc

SEQ ID NO: 457677 - RNA, 25 nt, Human
aaacaagcacggagcagcuuccugc

SEQ ID NO: 457678 - RNA, 19 nt, Human
aaccucccauccccuggac

SEQ ID NO: 457679 - RNA, 19 nt, Human
aagcagcaauaaaagggga

SEQ ID NO: 457680 - RNA, 18 nt, Human
aagccagccuccuucccc

SEQ ID NO: 457681 - RNA, 18 nt, Human
aagcuguggaggucagca

SEQ ID NO: 457682 - RNA, 22 nt, Human
aaggaaaagcagcaauaaaagg

SEQ ID NO: 457683 - RNA, 19 nt, Human
aaggagcuuggcugcuugg

SEQ ID NO: 457684 - RNA, 20 nt, Human
aaggagcuuggcugcuuggc

SEQ ID NO: 457685 - RNA, 19 nt, Human
aagggcaccuagagucagc

SEQ ID NO: 457686 - RNA, 22 nt, Human
aaguagaaguuguuucuugagg

SEQ ID NO: 457687 - RNA, 18 nt, Human
acccuaggaguucuccac

SEQ ID NO: 457688 - RNA, 24 nt, Human
acgggccccuuccaguccaccuuu

SEQ ID NO: 457689 - RNA, 19 nt, Human
agagaaaaaagggacgucu

SEQ ID NO: 457690 - RNA, 18 nt, Human
agaggcuccccgccaggu

SEQ ID NO: 457691 - RNA, 22 nt, Human
agccuuaaccuccacucauccc

SEQ ID NO: 457692 - RNA, 22 nt, Human
agcuguggaggucagcagcccc

SEQ ID NO: 457693 - RNA, 22 nt, Human
agcuguuauuuccccagugggg

SEQ ID NO: 457694 - RNA, 25 nt, Human
aggagauacucagagaaaaaaggga

SEQ ID NO: 457695 - RNA, 18 nt, Human
aggaggagagaggggaag

SEQ ID NO: 457696 - RNA, 22 nt, Human
aggccacacucugcugccagcu

SEQ ID NO: 457697 - RNA, 23 nt, Human
aggugguagggagcacccagaac

SEQ ID NO: 457698 - RNA, 23 nt, Human
aguguguucugggaggggcaggc

SEQ ID NO: 457699 - RNA, 21 nt, Human
aucaaugcccacaaccuccca

SEQ ID NO: 457700 - RNA, 23 nt, Human
aucugcuucagacucccccaucg

SEQ ID NO: 457701 - RNA, 21 nt, Human
auggggguugguuccucuagc

SEQ ID NO: 457702 - RNA, 23 nt, Human
auuucaauuuugaacaaaucacu

SEQ ID NO: 457703 - RNA, 26 nt, Human
caaacaagcacggagcagcuuccugc

SEQ ID NO: 457704 - RNA, 21 nt, Human
caaccucccauccccuggacc

SEQ ID NO: 457705 - RNA, 19 nt, Human
caagaugacugcaggcuug

SEQ ID NO: 457706 - RNA, 18 nt, Human
caccccaccccaucucgc

SEQ ID NO: 457707 - RNA, 19 nt, Human
caccccaucucgccuggcg

SEQ ID NO: 457708 - RNA, 23 nt, Human
caccuagagucagcccugccugc

SEQ ID NO: 457709 - RNA, 21 nt, Human
cagcccaggggggugcagaug

SEQ ID NO: 457710 - RNA, 19 nt, Human
cagccuccuuccccaucaa

SEQ ID NO: 457711 - RNA, 21 nt, Human
caggauccggugacauggggu

SEQ ID NO: 457712 - RNA, 23 nt, Human
cauccccuggacccagccacccu

SEQ ID NO: 457713 - RNA, 23 nt, Human
caucugcuucagacucccccauc

SEQ ID NO: 457714 - RNA, 19 nt, Human
ccacaaccucccauccccu

SEQ ID NO: 457715 - RNA, 24 nt, Human
ccacaaccucccauccccuggacc

SEQ ID NO: 457716 - RNA, 18 nt, Human
ccaccccaccccaucucg

SEQ ID NO: 457717 - RNA, 22 nt, Human
ccaccuuucuccguuccgacuc

SEQ ID NO: 457718 - RNA, 22 nt, Human
ccauccccuggacccagccacc

SEQ ID NO: 457719 - RNA, 20 nt, Human
cccacaaccucccauccccu

SEQ ID NO: 457720 - RNA, 26 nt, Human
cccacaaccucccauccccuggaccc

SEQ ID NO: 457721 - RNA, 23 nt, Human
cccagaacugccggacgggccuc

SEQ ID NO: 457722 - RNA, 23 nt, Human
cccaguggggccucccaaggagc

SEQ ID NO: 457723 - RNA, 18 nt, Human
ccccaaaugaggauacuc

SEQ ID NO: 457724 - RNA, 20 nt, Human
ccccaaggaaaagcagcaau

SEQ ID NO: 457725 - RNA, 21 nt, Human
ccccaaggaaaagcagcaaua

SEQ ID NO: 457726 - RNA, 22 nt, Human
ccccuaagcugauggagugugu

SEQ ID NO: 457727 - RNA, 23 nt, Human
ccccucuguggcagggcagagau

SEQ ID NO: 457728 - RNA, 18 nt, Human
ccccuggacccagccacc

SEQ ID NO: 457729 - RNA, 20 nt, Human
ccccuggacccagccacccu

SEQ ID NO: 457730 - RNA, 20 nt, Human
ccccuggugcucagcuucug

SEQ ID NO: 457731 - RNA, 18 nt, Human
cccuggacccagccaccc

SEQ ID NO: 457732 - RNA, 18 nt, Human
cccugggcuccagccuag

SEQ ID NO: 457733 - RNA, 21 nt, Human
cccugggcuccagccuagccc

SEQ ID NO: 457734 - RNA, 22 nt, Human
cccugggcuccagccuagcccc

SEQ ID NO: 457735 - RNA, 22 nt, Human
cccuggugcucagcuucuggcu

SEQ ID NO: 457736 - RNA, 24 nt, Human
cccuggugcucagcuucuggcuuu

SEQ ID NO: 457737 - RNA, 18 nt, Human
ccgaaggccacacucugc

SEQ ID NO: 457738 - RNA, 19 nt, Human
ccuaggacacucuuagccc

SEQ ID NO: 457739 - RNA, 19 nt, Human
ccuggggacuucccugccu

SEQ ID NO: 457740 - RNA, 21 nt, Human
ccuggggacuucccugccuca

SEQ ID NO: 457741 - RNA, 20 nt, Human
ccuuaaccuccacucauccc

SEQ ID NO: 457742 - RNA, 19 nt, Human
ccuuaggaucccagcuccu

SEQ ID NO: 457743 - RNA, 21 nt, Human
cggguuucuuucuugcuucuc

SEQ ID NO: 457744 - RNA, 23 nt, Human
cuaggaguucuccaccccacccc

SEQ ID NO: 457745 - RNA, 24 nt, Human
cuaggaguucuccaccccacccca

SEQ ID NO: 457746 - RNA, 20 nt, Human
cucagccuuaaccuccacuc

SEQ ID NO: 457747 - RNA, 20 nt, Human
cuccaccccaccccaucucg

SEQ ID NO: 457748 - RNA, 20 nt, Human
cuccagccuagccccagggc

SEQ ID NO: 457749 - RNA, 21 nt, Human
cuccagccuagccccagggcc

SEQ ID NO: 457750 - RNA, 22 nt, Human
cucggccuucacgcuuccucag

SEQ ID NO: 457751 - RNA, 19 nt, Human
cugagcuuccugcuugguc

SEQ ID NO: 457752 - RNA, 18 nt, Human
cugugccuuugagcugcu

SEQ ID NO: 457753 - RNA, 21 nt, Human
cuuccucguuguccugccgug

SEQ ID NO: 457754 - RNA, 23 nt, Human
cuuuccgcucccugggcuccagc

SEQ ID NO: 457755 - RNA, 19 nt, Human
gaaaagcagcaauaaaagg

SEQ ID NO: 457756 - RNA, 21 nt, Human
gaagcuguggaggucagcaac

SEQ ID NO: 457757 - RNA, 20 nt, Human
gacacucuuagccacgguga

SEQ ID NO: 457758 - RNA, 21 nt, Human
gacacucuuagccacggugag

SEQ ID NO: 457759 - RNA, 18 nt, Human
gaccugucuuuccucucu

SEQ ID NO: 457760 - RNA, 20 nt, Human
gagcacccagaacugccgga

SEQ ID NO: 457761 - RNA, 24 nt, Human
gagccacagcuguuauuuccccag

SEQ ID NO: 457762 - RNA, 20 nt, Human
gaucaaaggcuggggaggug

SEQ ID NO: 457763 - RNA, 18 nt, Human
gccccaaggaaaagcagc

SEQ ID NO: 457764 - RNA, 23 nt, Human
gcuggccuuuccucagccuuaac

SEQ ID NO: 457765 - RNA, 23 nt, Human
ggacaagccagccuccuucccca

SEQ ID NO: 457766 - RNA, 23 nt, Human
ggagcacccagaacugccggacg

SEQ ID NO: 457767 - RNA, 22 nt, Human
ggaggagagaggggaagcugug

SEQ ID NO: 457768 - RNA, 19 nt, Human
ggaggugcgugagguucuc

SEQ ID NO: 457769 - RNA, 20 nt, Human
ggagugaggaggggacaagc

SEQ ID NO: 457770 - RNA, 19 nt, Human
ggaguucuccaccccaccc

SEQ ID NO: 457771 - RNA, 25 nt, Human
gggaagcuguggaggucagcagccc

SEQ ID NO: 457772 - RNA, 19 nt, Human
gggcacggcuuccuggggc

SEQ ID NO: 457773 - RNA, 20 nt, Human
gggccccuuccaguccaccu

SEQ ID NO: 457774 - RNA, 18 nt, Human
gggccucccacaccccag

SEQ ID NO: 457775 - RNA, 23 nt, Human
gggcuccagccuagccccagggc

SEQ ID NO: 457776 - RNA, 20 nt, Human
gggggugcagauggguaagg

SEQ ID NO: 457777 - RNA, 18 nt, Human
gggugcagauggguaagg

SEQ ID NO: 457778 - RNA, 18 nt, Human
gucagcccugccugcaga

SEQ ID NO: 457779 - RNA, 20 nt, Human
guguucugggaggggcaggc

SEQ ID NO: 457780 - RNA, 19 nt, Human
uaaggugaugccacggagg

SEQ ID NO: 457781 - RNA, 18 nt, Human
uaccugaacucaaccagu

SEQ ID NO: 457782 - RNA, 19 nt, Human
uaccugaacucaaccaguc

SEQ ID NO: 457783 - RNA, 20 nt, Human
uagcuaccccaaaugaggau

SEQ ID NO: 457784 - RNA, 21 nt, Human
uagcuaccccaaaugaggaua

SEQ ID NO: 457785 - RNA, 19 nt, Human
uccaccccaccccaucucg

SEQ ID NO: 457786 - RNA, 19 nt, Human
uccacucauccccuggugc

SEQ ID NO: 457787 - RNA, 21 nt, Human
uccagcaucacugccugcccc

SEQ ID NO: 457788 - RNA, 18 nt, Human
uccccgccaggugccucu

SEQ ID NO: 457789 - RNA, 21 nt, Human
ucccucugucgggucggacuc

SEQ ID NO: 457790 - RNA, 22 nt, Human
ucccugggcuccagccuagccc

SEQ ID NO: 457791 - RNA, 21 nt, Human
uccuaggacacucuuagccac

SEQ ID NO: 457792 - RNA, 20 nt, Human
uccuggggccuggggacuuc

SEQ ID NO: 457793 - RNA, 21 nt, Human
uccuguuggaaggagcaucca

SEQ ID NO: 457794 - RNA, 19 nt, Human
ucgccuggcggaggggacc

SEQ ID NO: 457795 - RNA, 21 nt, Human
ucggccuucacgcuuccucag

SEQ ID NO: 457796 - RNA, 19 nt, Human
ucucgccuggcggagggga

SEQ ID NO: 457797 - RNA, 24 nt, Human
ucucucagcccaggggggugcaga

SEQ ID NO: 457798 - RNA, 22 nt, Human
ucucugagaggaacccuagcuc

SEQ ID NO: 457799 - RNA, 19 nt, Human
ucuuagccacggugagccc

SEQ ID NO: 457800 - RNA, 19 nt, Human
ugacaugggguggacccag

SEQ ID NO: 457801 - RNA, 23 nt, Human
ugacugcaggcuugggggccugg

SEQ ID NO: 457802 - RNA, 24 nt, Human
ugagaggaacccuagcucucuugg

SEQ ID NO: 457803 - RNA, 22 nt, Human
ugagcccuuaggaucccagcuc

SEQ ID NO: 457804 - RNA, 24 nt, Human
ugagcugcuuuccgcucccugggc

SEQ ID NO: 457805 - RNA, 20 nt, Human
ugauggaguguguucuggga

SEQ ID NO: 457806 - RNA, 19 nt, Human
ugauugauccaucucccuc

SEQ ID NO: 457807 - RNA, 23 nt, Human
ugcaucugcuucagacuccccca

SEQ ID NO: 457808 - RNA, 27 nt, Human
ugccacggaggggaugguugagaugac

SEQ ID NO: 457809 - RNA, 22 nt, Human
ugcccacaaccucccauccccu

SEQ ID NO: 457810 - RNA, 20 nt, Human
ugccuuugagcugcuuuccg

SEQ ID NO: 457811 - RNA, 18 nt, Human
ugcucagcuucuggcuuu

SEQ ID NO: 457812 - RNA, 18 nt, Human
uggaaggagcauccagca

SEQ ID NO: 457813 - RNA, 22 nt, Human
uggaguguguucugggaggggc

SEQ ID NO: 457814 - RNA, 21 nt, Human
uggcggaggggaccgccgggu

SEQ ID NO: 457815 - RNA, 20 nt, Human
ugggaagggagugaggaggg

SEQ ID NO: 457816 - RNA, 18 nt, Human
uggggaggugguagggag

SEQ ID NO: 457817 - RNA, 23 nt, Human
uggggaggugguagggagcaccc

SEQ ID NO: 457818 - RNA, 21 nt, Human
ugggguggacccagcgcuguu

SEQ ID NO: 457819 - RNA, 18 nt, Human
uguccgaaggccacacuc

SEQ ID NO: 457820 - RNA, 24 nt, Human
uguucuagaaauggggguugguuc

SEQ ID NO: 457821 - RNA, 18 nt, Human
uuccucagccuuaaccuc

SEQ ID NO: 457822 - RNA, 26 nt, Human
uuccucagccuuaaccuccacucauc

SEQ ID NO: 457823 - RNA, 18 nt, Human
uuccucuagcuaccccaa

SEQ ID NO: 457824 - RNA, 23 nt, Human
uuccucucugagaggaacccuag

SEQ ID NO: 457825 - RNA, 18 nt, Human
uuccuggggccuggggac

SEQ ID NO: 457826 - RNA, 21 nt, Human
uucuccaccccaccccaucuc

SEQ ID NO: 457827 - RNA, 19 nt, Human
uugaagacaucuucuuggu

SEQ ID NO: 457828 - RNA, 26 nt, Human
uuuuuuuuuugaagacaucuucuugg

SEQ ID NO: 457829 - RNA, 18 nt, Human
uuuuuuuuuuuuuuuuug

SEQ ID NO: 457830 - RNA, 18 nt, Human
auccggcccuggcccucc

SEQ ID NO: 457831 - RNA, 27 nt, Human
cacauccggcccuggcccuccuggucc

SEQ ID NO: 457832 - RNA, 21 nt, Human
cacuuggggugaggaggaggg

SEQ ID NO: 457833 - RNA, 19 nt, Human
ccacugcggagacuggggc

SEQ ID NO: 457834 - RNA, 20 nt, Human
ccacuggguggggcaggaag

SEQ ID NO: 457835 - RNA, 22 nt, Human
ccugggcagcagccgggguggg

SEQ ID NO: 457836 - RNA, 22 nt, Human
cggcagaggcuggaccgugauc

SEQ ID NO: 457837 - RNA, 22 nt, Human
cgggguccggcggauccugggc

SEQ ID NO: 457838 - RNA, 22 nt, Human
cuccugguccgguuugcugaag

SEQ ID NO: 457839 - RNA, 23 nt, Human
cugaagcaacacacuuggccuac

SEQ ID NO: 457840 - RNA, 22 nt, Human
cuggaggccagcuuuacugugc

SEQ ID NO: 457841 - RNA, 20 nt, Human
cugugcuagaggaagagggu

SEQ ID NO: 457842 - RNA, 23 nt, Human
cuuuaccgcccgcucugcucucc

SEQ ID NO: 457843 - RNA, 20 nt, Human
gaccgugaucuugagguuca

SEQ ID NO: 457844 - RNA, 22 nt, Human
gcagcagccgggguggggaugc

SEQ ID NO: 457845 - RNA, 24 nt, Human
gccuacccacuggguggggcagga

SEQ ID NO: 457846 - RNA, 24 nt, Human
ggagacuggggcuccggcagaggc

SEQ ID NO: 457847 - RNA, 21 nt, Human
ggcccucagcaacugcagccc

SEQ ID NO: 457848 - RNA, 23 nt, Human
gggaugcugucacauucggggac

SEQ ID NO: 457849 - RNA, 23 nt, Human
ggggaugcugucacauucgggga

SEQ ID NO: 457850 - RNA, 18 nt, Human
ggggcaggaagucucgag

SEQ ID NO: 457851 - RNA, 19 nt, Human
gugaucuugagguucaggg

SEQ ID NO: 457852 - RNA, 20 nt, Human
guucaggggugcauucuggg

SEQ ID NO: 457853 - RNA, 18 nt, Human
ucacuuggggugaggagg

SEQ ID NO: 457854 - RNA, 19 nt, Human
ucggcccucagcaacugca

SEQ ID NO: 457855 - RNA, 23 nt, Human
uggggcaggaagucucgagcccc

SEQ ID NO: 457856 - RNA, 22 nt, Human
aaccacugaaaaugcacuccaa

SEQ ID NO: 457857 - RNA, 19 nt, Human
aagaaaguccuccagccuc

SEQ ID NO: 457858 - RNA, 21 nt, Human
aaugcacuccaagacuucugc

SEQ ID NO: 457859 - RNA, 20 nt, Human
agaaaacuuuucuguaaagg

SEQ ID NO: 457860 - RNA, 23 nt, Human
agaacacacacuguaaggccucc

SEQ ID NO: 457861 - RNA, 18 nt, Human
agaaugcccugcauaaaa

SEQ ID NO: 457862 - RNA, 22 nt, Human
agauuucucucacaggcacuuu

SEQ ID NO: 457863 - RNA, 23 nt, Human
agcucccaaauaauaaugacucu

SEQ ID NO: 457864 - RNA, 24 nt, Human
aggaagugauauuauuucuagcau

SEQ ID NO: 457865 - RNA, 22 nt, Human
agugcguauaaacucaaguaac

SEQ ID NO: 457866 - RNA, 23 nt, Human
auaaagggaaagaaaguccucca

SEQ ID NO: 457867 - RNA, 20 nt, Human
augacucuuggguaauaagg

SEQ ID NO: 457868 - RNA, 25 nt, Human
auuucuagcauuguaagaaccccag

SEQ ID NO: 457869 - RNA, 25 nt, Human
auuuugugauuauucuuaaaggcca

SEQ ID NO: 457870 - RNA, 19 nt, Human
caccagguuaacuucucac

SEQ ID NO: 457871 - RNA, 20 nt, Human
caccagguuaacuucucaca

SEQ ID NO: 457872 - RNA, 20 nt, Human
cauauaaaauauccagcaag

SEQ ID NO: 457873 - RNA, 21 nt, Human
cauucggaagccgacccgccc

SEQ ID NO: 457874 - RNA, 21 nt, Human
cauuuggaauacagaaugccc

SEQ ID NO: 457875 - RNA, 23 nt, Human
ccaaaagagcaggauaaacaaau

SEQ ID NO: 457876 - RNA, 23 nt, Human
ccauuucugcaaggccucuuuug

SEQ ID NO: 457877 - RNA, 19 nt, Human
ccggaauacguuuccaaaa

SEQ ID NO: 457878 - RNA, 21 nt, Human
ccuccguaagugaaaagcgga

SEQ ID NO: 457879 - RNA, 21 nt, Human
cucacaggcacuucugcaaca

SEQ ID NO: 457880 - RNA, 22 nt, Human
cucacaggcacuucugcaacaa

SEQ ID NO: 457881 - RNA, 24 nt, Human
cuccaagacuucugcugaacaacc

SEQ ID NO: 457882 - RNA, 21 nt, Human
gaaaaugcacuccaagacuuc

SEQ ID NO: 457883 - RNA, 23 nt, Human
gaagguagauaaauuuauugcca

SEQ ID NO: 457884 - RNA, 23 nt, Human
gacucuuggguaauaaggaagua

SEQ ID NO: 457885 - RNA, 20 nt, Human
gacuucugcugaacaaccuc

SEQ ID NO: 457886 - RNA, 21 nt, Human
gaguuacagaaucuuuuucuu

SEQ ID NO: 457887 - RNA, 21 nt, Human
gccgacccgcccagucccucc

SEQ ID NO: 457888 - RNA, 23 nt, Human
ggaaagaaaguccuccagccucc

SEQ ID NO: 457889 - RNA, 24 nt, Human
guaacacagaacacacacuguaag

SEQ ID NO: 457890 - RNA, 30 nt, Human
guaacacagaacacacacuguaaggccucu

SEQ ID NO: 457891 - RNA, 21 nt, Human
guaucaccagguuaacuucuc

SEQ ID NO: 457892 - RNA, 26 nt, Human
uaaacaaauucugcagugcguauaaa

SEQ ID NO: 457893 - RNA, 26 nt, Human
uaaauauaacucagaugagucagaca

SEQ ID NO: 457894 - RNA, 21 nt, Human
uaacucagaugagucagacaa

SEQ ID NO: 457895 - RNA, 19 nt, Human
uaagaaccccagcucccaa

SEQ ID NO: 457896 - RNA, 21 nt, Human
uaauaaggaaguaccuuagca

SEQ ID NO: 457897 - RNA, 24 nt, Human
uaauugacagguugcauuuuuucu

SEQ ID NO: 457898 - RNA, 19 nt, Human
uagacaauagcaaaugaau

SEQ ID NO: 457899 - RNA, 21 nt, Human
uagcauguuuuccugaaguac

SEQ ID NO: 457900 - RNA, 24 nt, Human
uagcauguuuuccugaaguacuug

SEQ ID NO: 457901 - RNA, 18 nt, Human
uagcauuguaagaacccc

SEQ ID NO: 457902 - RNA, 19 nt, Human
uauccauuuggaauacaga

SEQ ID NO: 457903 - RNA, 22 nt, Human
uaugauggcuaaucauaaauac

SEQ ID NO: 457904 - RNA, 19 nt, Human
ucagacaaaaaaaaucauu

SEQ ID NO: 457905 - RNA, 21 nt, Human
uccaagacuucugcugaacaa

SEQ ID NO: 457906 - RNA, 18 nt, Human
ucccuacuacaauuacuu

SEQ ID NO: 457907 - RNA, 23 nt, Human
ucucacuccuaaccacuuccgau

SEQ ID NO: 457908 - RNA, 21 nt, Human
ucucucacuccuaaccacuuc

SEQ ID NO: 457909 - RNA, 23 nt, Human
ucugcaguuguaguggccaaaac

SEQ ID NO: 457910 - RNA, 21 nt, Human
ugcccugcauaaaacuagcau

SEQ ID NO: 457911 - RNA, 20 nt, Human
uggccaaaaccaggcuuaga

SEQ ID NO: 457912 - RNA, 18 nt, Human
uggguaauaaggaaguac

SEQ ID NO: 457913 - RNA, 19 nt, Human
uuccugaaguacuuguuaa

SEQ ID NO: 457914 - RNA, 20 nt, Human
uuggaaaaagucuaccuuuu

SEQ ID NO: 457915 - RNA, 20 nt, Human
uuggauauucuugucuguug

SEQ ID NO: 457916 - RNA, 18 nt, Human
uuguaguggccaaaacca

SEQ ID NO: 457917 - RNA, 26 nt, Human
uuugaagauuucucucacaggcacuu

SEQ ID NO: 457918 - RNA, 24 nt, Human
uuuggugcuaaaagagaguuacag

SEQ ID NO: 457919 - RNA, 20 nt, Human
uuuguagcucaaaaaauuac

SEQ ID NO: 457920 - RNA, 22 nt, Human
aaaaaaaaaaaaaaacaaaaca

SEQ ID NO: 457921 - RNA, 21 nt, Human
aaaaaaaaaaaacaaaacaaa

SEQ ID NO: 457922 - RNA, 26 nt, Human
aaaaaaaaaaaacaaaacaaauaaau

SEQ ID NO: 457923 - RNA, 27 nt, Human
aaaaaaaaaacaaaacaaauaaauaaa

SEQ ID NO: 457924 - RNA, 18 nt, Human
aaaauuagcugggcgugg

SEQ ID NO: 457925 - RNA, 23 nt, Human
aaacaggauggagaaaaaucuaa

SEQ ID NO: 457926 - RNA, 22 nt, Human
aacaaaacaaauaaauaaaaau

SEQ ID NO: 457927 - RNA, 22 nt, Human
aacuuccucccugucucugcua

SEQ ID NO: 457928 - RNA, 19 nt, Human
accauucagaauacaggag

SEQ ID NO: 457929 - RNA, 18 nt, Human
acuuccuuaaaaguuggg

SEQ ID NO: 457930 - RNA, 24 nt, Human
acuuuguuuucucuaacugccuuc

SEQ ID NO: 457931 - RNA, 21 nt, Human
agaagauacugaaacaugcua

SEQ ID NO: 457932 - RNA, 24 nt, Human
agagauugauaaaggaauguauaa

SEQ ID NO: 457933 - RNA, 24 nt, Human
agaucacauuuuuuuaauaacaaa

SEQ ID NO: 457934 - RNA, 20 nt, Human
agcaggcaaauuuuugugcu

SEQ ID NO: 457935 - RNA, 19 nt, Human
agccuggcgacagagaguc

SEQ ID NO: 457936 - RNA, 19 nt, Human
agcucuaaaaagagccaga

SEQ ID NO: 457937 - RNA, 23 nt, Human
agcugggcgugguggugcaugcc

SEQ ID NO: 457938 - RNA, 19 nt, Human
aggaacuuacaauguucaa

SEQ ID NO: 457939 - RNA, 19 nt, Human
aggcaggagaagccuggcg

SEQ ID NO: 457940 - RNA, 18 nt, Human
agggacagaugagucacc

SEQ ID NO: 457941 - RNA, 22 nt, Human
agggcaaauaaaaucuucccuu

SEQ ID NO: 457942 - RNA, 19 nt, Human
aguaaaugauaaaaauuua

SEQ ID NO: 457943 - RNA, 23 nt, Human
auaaaaacuuccucaaacaucag

SEQ ID NO: 457944 - RNA, 22 nt, Human
auaaauauaacucaucagcacu

SEQ ID NO: 457945 - RNA, 22 nt, Human
auacgauucaguaaauuuuaau

SEQ ID NO: 457946 - RNA, 19 nt, Human
aucaaaagcuuccaguuaa

SEQ ID NO: 457947 - RNA, 23 nt, Human
augucuauucacuucaucauaac

SEQ ID NO: 457948 - RNA, 21 nt, Human
caaaaaaaaaaaaaaacaaaa

SEQ ID NO: 457949 - RNA, 19 nt, Human
caacaaaaagggacagaug

SEQ ID NO: 457950 - RNA, 26 nt, Human
caauaaauauaacucaucagcacuuc

SEQ ID NO: 457951 - RNA, 18 nt, Human
cacuuugcuacccccuuc

SEQ ID NO: 457952 - RNA, 22 nt, Human
cagcaaauacuuuuuccuuuga

SEQ ID NO: 457953 - RNA, 19 nt, Human
cagcacuuccgaucuguau

SEQ ID NO: 457954 - RNA, 19 nt, Human
cauccaggguccauaauuc

SEQ ID NO: 457955 - RNA, 22 nt, Human
cccuucuguuccccuucacugu

SEQ ID NO: 457956 - RNA, 25 nt, Human
cccuucuguuccccuucacuguuuc

SEQ ID NO: 457957 - RNA, 25 nt, Human
ccuaugauagagaagauacugaaac

SEQ ID NO: 457958 - RNA, 21 nt, Human
ccucaaaaaaaaaaaaaaaca

SEQ ID NO: 457959 - RNA, 27 nt, Human
ccucaaaaaaaaaaaaaaacaaaacaa

SEQ ID NO: 457960 - RNA, 20 nt, Human
ccuguagucccagcuacucg

SEQ ID NO: 457961 - RNA, 24 nt, Human
cuccccaacauacaccuucugcag

SEQ ID NO: 457962 - RNA, 18 nt, Human
cuccugguguuuucauag

SEQ ID NO: 457963 - RNA, 27 nt, Human
cugccucaaaaaaaaaaaaaaacaaaa

SEQ ID NO: 457964 - RNA, 23 nt, Human
cugcuuccagaguucaccauuca

SEQ ID NO: 457965 - RNA, 24 nt, Human
gaaaaaucuaaauuaaagcaaaaa

SEQ ID NO: 457966 - RNA, 24 nt, Human
gaguauggacaacaaaaagggaca

SEQ ID NO: 457967 - RNA, 24 nt, Human
gaugcuucuacuguaaauucccac

SEQ ID NO: 457968 - RNA, 23 nt, Human
ggucugaaucuuaaaaaaaguaa

SEQ ID NO: 457969 - RNA, 21 nt, Human
gguuucuugaagcuacuuguu

SEQ ID NO: 457970 - RNA, 28 nt, Human
gucaaguauuuuguuuucccuuucaguu

SEQ ID NO: 457971 - RNA, 25 nt, Human
gucaccuuucauuaaucauugacuc

SEQ ID NO: 457972 - RNA, 25 nt, Human
uaaaaauaaaaacuuccucaaacau

SEQ ID NO: 457973 - RNA, 20 nt, Human
uaaaaauaaaaacuuccucc

SEQ ID NO: 457974 - RNA, 25 nt, Human
uaaaaauaaaaacuuccucccuguc

SEQ ID NO: 457975 - RNA, 19 nt, Human
uaauucauacgcauucccu

SEQ ID NO: 457976 - RNA, 19 nt, Human
uaccaauauuuauucugaa

SEQ ID NO: 457977 - RNA, 22 nt, Human
uaugucaaguauuuuguuuucc

SEQ ID NO: 457978 - RNA, 24 nt, Human
uauuguaagaaacggggccucuga

SEQ ID NO: 457979 - RNA, 18 nt, Human
ucuccccaacauacaccu

SEQ ID NO: 457980 - RNA, 23 nt, Human
ucucugcuaaaaauacaaaaauu

SEQ ID NO: 457981 - RNA, 21 nt, Human
ucugccucaaaaaaaaaaaaa

SEQ ID NO: 457982 - RNA, 20 nt, Human
ucuguaacacuuugcuaccc

SEQ ID NO: 457983 - RNA, 19 nt, Human
ucugugacaguaguagccu

SEQ ID NO: 457984 - RNA, 22 nt, Human
ucugugacaguaguagccuuaa

SEQ ID NO: 457985 - RNA, 18 nt, Human
ucuguugcuuuccuccuu

SEQ ID NO: 457986 - RNA, 23 nt, Human
ucuuauuuuuuuucccccaauga

SEQ ID NO: 457987 - RNA, 18 nt, Human
ugaaagccacuacacuuc

SEQ ID NO: 457988 - RNA, 18 nt, Human
ugaggcaggagaagccug

SEQ ID NO: 457989 - RNA, 23 nt, Human
ugauaugucuauucacuucauca

SEQ ID NO: 457990 - RNA, 21 nt, Human
ugcacaaagaaauuacagauc

SEQ ID NO: 457991 - RNA, 22 nt, Human
ugccucaaaaaaaaaaaaaaac

SEQ ID NO: 457992 - RNA, 24 nt, Human
ugccucaaaaaaaaaaaaaaacaa

SEQ ID NO: 457993 - RNA, 21 nt, Human
ugccuguagucccagcuacuc

SEQ ID NO: 457994 - RNA, 25 nt, Human
ugccuguagucccagcuacucguga

SEQ ID NO: 457995 - RNA, 21 nt, Human
uggagaaaaaucuaaauuaaa

SEQ ID NO: 457996 - RNA, 18 nt, Human
uggugcaugccuguaguc

SEQ ID NO: 457997 - RNA, 24 nt, Human
ugguggugcaugccuguaguccca

SEQ ID NO: 457998 - RNA, 21 nt, Human
uuacaacaacaaaaaauacca

SEQ ID NO: 457999 - RNA, 23 nt, Human
uuagaaauacuauccucaaaaca

SEQ ID NO: 458000 - RNA, 19 nt, Human
uuagcugggcgugguggug

SEQ ID NO: 458001 - RNA, 24 nt, Human
uuagcugggcgugguggugcaugc

SEQ ID NO: 458002 - RNA, 22 nt, Human
uucaaaaccaaagaauaaaaau

SEQ ID NO: 458003 - RNA, 22 nt, Human
uucaauuuuacaacaacaaaaa

SEQ ID NO: 458004 - RNA, 19 nt, Human
uuguucuaaaaaaaaaaau

SEQ ID NO: 458005 - RNA, 22 nt, Human
acacacaacauacauccuuaca

SEQ ID NO: 458006 - RNA, 21 nt, Human
acagaggaaagaaauaaaagc

SEQ ID NO: 458007 - RNA, 20 nt, Human
acuuuacugauuuuggcaca

SEQ ID NO: 458008 - RNA, 18 nt, Human
agagggaagaggaacaga

SEQ ID NO: 458009 - RNA, 21 nt, Human
aggaaagaaauaaaagcaaga

SEQ ID NO: 458010 - RNA, 22 nt, Human
aggaaagaaauaaaagcaagaa

SEQ ID NO: 458011 - RNA, 21 nt, Human
caaaaaaagucaaaaugcaaa

SEQ ID NO: 458012 - RNA, 21 nt, Human
caguagaaaauaaagucauug

SEQ ID NO: 458013 - RNA, 26 nt, Human
caugaacaugcauacguaauauucua

SEQ ID NO: 458014 - RNA, 24 nt, Human
gucacagaauuuuucucaguagag

SEQ ID NO: 458015 - RNA, 23 nt, Human
guccuuguccuucuauccuuggg

SEQ ID NO: 458016 - RNA, 19 nt, Human
uaaaaaacugcauucucag

SEQ ID NO: 458017 - RNA, 22 nt, Human
uaaaaaacugcauucucaguca

SEQ ID NO: 458018 - RNA, 22 nt, Human
uaaaaaagagggaagaggaaca

SEQ ID NO: 458019 - RNA, 23 nt, Human
uaaaacuuuaaacaaaaguauua

SEQ ID NO: 458020 - RNA, 21 nt, Human
uaacuuuacugauuuuggcac

SEQ ID NO: 458021 - RNA, 19 nt, Human
uaagguaccuucagccagu

SEQ ID NO: 458022 - RNA, 18 nt, Human
uaauaaagguuaaacaca

SEQ ID NO: 458023 - RNA, 19 nt, Human
uagacaugaacaugcauac

SEQ ID NO: 458024 - RNA, 21 nt, Human
ucaacagccauucuuuagaca

SEQ ID NO: 458025 - RNA, 21 nt, Human
ucuguccuuguccuucuaucc

SEQ ID NO: 458026 - RNA, 18 nt, Human
ugauuaaaaaagagggaa

SEQ ID NO: 458027 - RNA, 21 nt, Human
uuacugauuuuggcacagaaa

SEQ ID NO: 458028 - RNA, 18 nt, Human
uuccuaguucacuuguuc

SEQ ID NO: 458029 - RNA, 20 nt, Human
uugguugcacaugaaaaagg

SEQ ID NO: 458030 - RNA, 23 nt, Human
uuuuggcacagaaaagaagucuu

SEQ ID NO: 458031 - RNA, 20 nt, Human
aaagaaaaaaaaaaggagag

SEQ ID NO: 458032 - RNA, 22 nt, Human
aaagaaaaaaaaaaggagaggg

SEQ ID NO: 458033 - RNA, 24 nt, Human
aggcaagaggaaaguaacugucca

SEQ ID NO: 458034 - RNA, 19 nt, Human
caaagaaaaaaaaaaggag

SEQ ID NO: 458035 - RNA, 19 nt, Human
caaguccagucccuaaagc

SEQ ID NO: 458036 - RNA, 18 nt, Human
cagucccuaaagcgcccc

SEQ ID NO: 458037 - RNA, 21 nt, Human
caucaauaagggggaaaauca

SEQ ID NO: 458038 - RNA, 19 nt, Human
cccgacaguuuccaaaugu

SEQ ID NO: 458039 - RNA, 21 nt, Human
gauaugaacaggcaagaggaa

SEQ ID NO: 458040 - RNA, 20 nt, Human
gggaaaaucaaagaaaaaaa

SEQ ID NO: 458041 - RNA, 23 nt, Human
ucaaaaacagaaugaauaucagu

SEQ ID NO: 458042 - RNA, 21 nt, Human
ucaaagaaaaaaaaaaggaga

SEQ ID NO: 458043 - RNA, 23 nt, Human
ucaauaagggggaaaaucaaaga

SEQ ID NO: 458044 - RNA, 26 nt, Human
ugaacaggcaagaggaaaguaacugu

SEQ ID NO: 458045 - RNA, 20 nt, Human
ugaagguugacaacuauucu

SEQ ID NO: 458046 - RNA, 22 nt, Human
ugacaacuauucuccuuuaaaa

SEQ ID NO: 458047 - RNA, 20 nt, Human
acgacggacggaaaugggcc

SEQ ID NO: 458048 - RNA, 22 nt, Human
acgcugccgugccccaguggac

SEQ ID NO: 458049 - RNA, 19 nt, Human
acucacugugccucccccc

SEQ ID NO: 458050 - RNA, 20 nt, Human
acucacugugccucccccca

SEQ ID NO: 458051 - RNA, 23 nt, Human
agcacaagcaucaggcugugucu

SEQ ID NO: 458052 - RNA, 21 nt, Human
aggcuccguuaggaccuggcu

SEQ ID NO: 458053 - RNA, 22 nt, Human
caguggacucacugugccuccc

SEQ ID NO: 458054 - RNA, 23 nt, Human
ccacaucuccugcagucucacuc

SEQ ID NO: 458055 - RNA, 22 nt, Human
cccacgccgcucuucuuagaag

SEQ ID NO: 458056 - RNA, 22 nt, Human
ccccacgacggacggaaauggg

SEQ ID NO: 458057 - RNA, 18 nt, Human
ccccaggagguggggacc

SEQ ID NO: 458058 - RNA, 21 nt, Human
cccgccgccuccaagcuccgc

SEQ ID NO: 458059 - RNA, 21 nt, Human
ccgcaggcccacagccgggcu

SEQ ID NO: 458060 - RNA, 22 nt, Human
ccgccgccuccaagcuccgccc

SEQ ID NO: 458061 - RNA, 25 nt, Human
ccgggagcacgguggagcgguggag

SEQ ID NO: 458062 - RNA, 18 nt, Human
ccugcagucucacuccuc

SEQ ID NO: 458063 - RNA, 20 nt, Human
cgacugaagcgaaggucgcc

SEQ ID NO: 458064 - RNA, 21 nt, Human
cgcccaccggagcacaagcau

SEQ ID NO: 458065 - RNA, 19 nt, Human
cggccccaggaggugggga

SEQ ID NO: 458066 - RNA, 18 nt, Human
cugcgcuggggaggcugc

SEQ ID NO: 458067 - RNA, 21 nt, Human
gagccccccacgccgcucuuc

SEQ ID NO: 458068 - RNA, 19 nt, Human
ggcggcgggggcggggagc

SEQ ID NO: 458069 - RNA, 21 nt, Human
gggcacaggggacugcacggg

SEQ ID NO: 458070 - RNA, 19 nt, Human
gggcggggagccgggagca

SEQ ID NO: 458071 - RNA, 24 nt, Human
ggucgggcgucuccgccggcuacu

SEQ ID NO: 458072 - RNA, 25 nt, Human
ucccgccgccuccaagcuccgccca

SEQ ID NO: 458073 - RNA, 22 nt, Human
ucccgcucgccgcgccuucaaa

SEQ ID NO: 458074 - RNA, 23 nt, Human
uccugcagucucacuccucaaga

SEQ ID NO: 458075 - RNA, 19 nt, Human
ucgccgagccccccacgcc

SEQ ID NO: 458076 - RNA, 18 nt, Human
ucucgggaguccaggccg

SEQ ID NO: 458077 - RNA, 21 nt, Human
uggcaagcgguucagcugucu

SEQ ID NO: 458078 - RNA, 19 nt, Human
uuagacgcugccgugcccc

SEQ ID NO: 458079 - RNA, 23 nt, Human
uuaggaccuggcuuaugugcucg

SEQ ID NO: 458080 - RNA, 21 nt, Human
uuggggcccgcgggcggcggg

SEQ ID NO: 458081 - RNA, 18 nt, Human
uuuuuuuuuuuuuuuuug

SEQ ID NO: 458082 - RNA, 23 nt, Human
aacuccgccaccagcgcucacua

SEQ ID NO: 458083 - RNA, 27 nt, Human
caaaauaaauuauacaugcuguauaaa

SEQ ID NO: 458084 - RNA, 19 nt, Human
caccagcgcucacuaucug

SEQ ID NO: 458085 - RNA, 23 nt, Human
uaacuccgccaccagcgcucacu

SEQ ID NO: 458086 - RNA, 21 nt, Human
ucugccaccucagccugaagc

SEQ ID NO: 458087 - RNA, 23 nt, Human
ucugccaccucagccugaagccu

SEQ ID NO: 458088 - RNA, 24 nt, Human
ugcuuugacuuuaacuccgccacc

SEQ ID NO: 458089 - RNA, 19 nt, Human
aaaaagccaggcagcaguu

SEQ ID NO: 458090 - RNA, 21 nt, Human
aaaauccaacccaugcagagg

SEQ ID NO: 458091 - RNA, 24 nt, Human
aaacagaaauauucauaaaaagga

SEQ ID NO: 458092 - RNA, 18 nt, Human
aaacauuaucacacaauc

SEQ ID NO: 458093 - RNA, 24 nt, Human
aaagaaaggugaaauagcuuaaac

SEQ ID NO: 458094 - RNA, 20 nt, Human
aaagcaaaaauaaaaauuca

SEQ ID NO: 458095 - RNA, 25 nt, Human
aaaggugaaauagcuuaaacagaaa

SEQ ID NO: 458096 - RNA, 23 nt, Human
aaagguuuaaagaaaaaagggag

SEQ ID NO: 458097 - RNA, 23 nt, Human
aaaugaacugugcuaaaaacccg

SEQ ID NO: 458098 - RNA, 23 nt, Human
aacccaugcagagggauaaaaaa

SEQ ID NO: 458099 - RNA, 21 nt, Human
aacccgacaggcaucuucccu

SEQ ID NO: 458100 - RNA, 21 nt, Human
aaccuuaauuaccuagauuug

SEQ ID NO: 458101 - RNA, 21 nt, Human
aagcaaaaauaaaaauucaca

SEQ ID NO: 458102 - RNA, 24 nt, Human
aagcaaaaauaaaaauucacaacc

SEQ ID NO: 458103 - RNA, 22 nt, Human
aagcaccgaagaccaugaugcu

SEQ ID NO: 458104 - RNA, 22 nt, Human
aagcaccgaagaccaugaugcu

SEQ ID NO: 458105 - RNA, 20 nt, Human
aagcucggaagaaaaaaagc

SEQ ID NO: 458106 - RNA, 18 nt, Human
aaucauguuuuguuuuug

SEQ ID NO: 458107 - RNA, 20 nt, Human
aauccucuaacccaguuucu

SEQ ID NO: 458108 - RNA, 25 nt, Human
acaaagcaaaaauaaaaauucacaa

SEQ ID NO: 458109 - RNA, 30 nt, Human
acaaagcaaaaauaaaaauucacaaccuuu

SEQ ID NO: 458110 - RNA, 18 nt, Human
acagaaaugcuucaaaau

SEQ ID NO: 458111 - RNA, 21 nt, Human
acaggcaucuucccugcccuc

SEQ ID NO: 458112 - RNA, 19 nt, Human
agaaaaaagggaggggcuu

SEQ ID NO: 458113 - RNA, 20 nt, Human
agaaauauucauaaaaagga

SEQ ID NO: 458114 - RNA, 21 nt, Human
agacccaccucggagggccag

SEQ ID NO: 458115 - RNA, 23 nt, Human
agggaggggcuuucuuacaagcu

SEQ ID NO: 458116 - RNA, 20 nt, Human
augaugcuggcuggagugaa

SEQ ID NO: 458117 - RNA, 20 nt, Human
augaugcuggcuggagugaa

SEQ ID NO: 458118 - RNA, 23 nt, Human
auucguaaaugcuggccuuccuu

SEQ ID NO: 458119 - RNA, 27 nt, Human
caacccaugcagagggauaaaaaacug

SEQ ID NO: 458120 - RNA, 22 nt, Human
caagagcuuucccacacgccaa

SEQ ID NO: 458121 - RNA, 24 nt, Human
cacaauccuauucugaaagacaaa

SEQ ID NO: 458122 - RNA, 18 nt, Human
cacacaauccuauucuga

SEQ ID NO: 458123 - RNA, 27 nt, Human
caccugagguuggagggccccaagggc

SEQ ID NO: 458124 - RNA, 19 nt, Human
caccugcaggccggcugcu

SEQ ID NO: 458125 - RNA, 20 nt, Human
caccugcaggccggcugcuu

SEQ ID NO: 458126 - RNA, 20 nt, Human
caccugcaggccggcugcuu

SEQ ID NO: 458127 - RNA, 25 nt, Human
caguuucugggcagcuucuauccug

SEQ ID NO: 458128 - RNA, 18 nt, Human
caucaccugagguugagc

SEQ ID NO: 458129 - RNA, 18 nt, Human
caucaccugagguuggag

SEQ ID NO: 458130 - RNA, 24 nt, Human
caucuucccugcccuccccccacu

SEQ ID NO: 458131 - RNA, 27 nt, Human
caugcagagggauaaaaaacugacauc

SEQ ID NO: 458132 - RNA, 18 nt, Human
ccaaagcugugagggggg

SEQ ID NO: 458133 - RNA, 18 nt, Human
ccaguguguuccgccagg

SEQ ID NO: 458134 - RNA, 18 nt, Human
ccccccgcccccaccccc

SEQ ID NO: 458135 - RNA, 27 nt, Human
cccccgcccccacccccaguguguucc

SEQ ID NO: 458136 - RNA, 19 nt, Human
ccccgggcccggaagcacc

SEQ ID NO: 458137 - RNA, 20 nt, Human
ccccgggcccgggaagcacc

SEQ ID NO: 458138 - RNA, 18 nt, Human
ccccucugucuggagucu

SEQ ID NO: 458139 - RNA, 18 nt, Human
ccccucugucuggagucu

SEQ ID NO: 458140 - RNA, 22 nt, Human
cccgacagaccccgggcccgga

SEQ ID NO: 458141 - RNA, 22 nt, Human
cccgacagaccccgggcccggg

SEQ ID NO: 458142 - RNA, 21 nt, Human
ccgcaucuuccccccgccccc

SEQ ID NO: 458143 - RNA, 18 nt, Human
ccugagguuggagggccc

SEQ ID NO: 458144 - RNA, 19 nt, Human
cgcaucuuccccccgcccc

SEQ ID NO: 458145 - RNA, 22 nt, Human
cgcccccacccccaguguguuc

SEQ ID NO: 458146 - RNA, 18 nt, Human
cggaagcaccgaagacca

SEQ ID NO: 458147 - RNA, 24 nt, Human
cggaagcaccgaagaccaugaugc

SEQ ID NO: 458148 - RNA, 19 nt, Human
cuauccuggggcgagagcc

SEQ ID NO: 458149 - RNA, 23 nt, Human
cuggacgcuuagacgugaacauc

SEQ ID NO: 458150 - RNA, 23 nt, Human
cuggacgcuuagacgugaacauc

SEQ ID NO: 458151 - RNA, 21 nt, Human
gaaaugaacugugcuaaaaac

SEQ ID NO: 458152 - RNA, 23 nt, Human
gagccugugugugugugugugug

SEQ ID NO: 458153 - RNA, 22 nt, Human
gauaagacaagcucggaagaaa

SEQ ID NO: 458154 - RNA, 25 nt, Human
gccugugugugugugugugugugug

SEQ ID NO: 458155 - RNA, 20 nt, Human
ggaauccagugggggauggg

SEQ ID NO: 458156 - RNA, 20 nt, Human
ggaauccagugggggauggg

SEQ ID NO: 458157 - RNA, 20 nt, Human
gggccucuaggaugucccag

SEQ ID NO: 458158 - RNA, 24 nt, Human
ggggaagcugugggaaggcuucca

SEQ ID NO: 458159 - RNA, 21 nt, Human
gggggaagcugugggaaggcu

SEQ ID NO: 458160 - RNA, 24 nt, Human
ggggggccagugcccagcucaaga

SEQ ID NO: 458161 - RNA, 21 nt, Human
guacuggcucaucguggccaa

SEQ ID NO: 458162 - RNA, 21 nt, Human
gugaacacacagccaccucgu

SEQ ID NO: 458163 - RNA, 21 nt, Human
gugugugugugugugugugug

SEQ ID NO: 458164 - RNA, 21 nt, Human
gugugugugugugugugugug

SEQ ID NO: 458165 - RNA, 21 nt, Human
gugugugugugugugugugug

SEQ ID NO: 458166 - RNA, 21 nt, Human
gugugugugugugugugugug

SEQ ID NO: 458167 - RNA, 18 nt, Human
uccccccgcccccacccc

SEQ ID NO: 458168 - RNA, 18 nt, Human
ucccucccgacagacccc

SEQ ID NO: 458169 - RNA, 19 nt, Human
ucccucccgacagaccccg

SEQ ID NO: 458170 - RNA, 20 nt, Human
ucccugcccuccccccacuc

SEQ ID NO: 458171 - RNA, 20 nt, Human
ucccuggaaagccagggccc

SEQ ID NO: 458172 - RNA, 20 nt, Human
ucccuggaaagccagggccc

SEQ ID NO: 458173 - RNA, 22 nt, Human
uccuuguagggaauccaguggg

SEQ ID NO: 458174 - RNA, 22 nt, Human
uccuuguagggaauccaguggg

SEQ ID NO: 458175 - RNA, 23 nt, Human
ucgggacucugccagucucuuuu

SEQ ID NO: 458176 - RNA, 23 nt, Human
ucgggacucugccagucucuuuu

SEQ ID NO: 458177 - RNA, 21 nt, Human
ucucgggacucugccagucuc

SEQ ID NO: 458178 - RNA, 21 nt, Human
ucucgggacucugccagucuc

SEQ ID NO: 458179 - RNA, 20 nt, Human
ucugcaauccucuaacccag

SEQ ID NO: 458180 - RNA, 20 nt, Human
ucuucccugcccucccccca

SEQ ID NO: 458181 - RNA, 18 nt, Human
ucuucugcaauccucuaa

SEQ ID NO: 458182 - RNA, 20 nt, Human
ugaaaggggccaaagcugug

SEQ ID NO: 458183 - RNA, 24 nt, Human
ugaaaugaacugugcuaaaaaccc

SEQ ID NO: 458184 - RNA, 25 nt, Human
ugaaaugaacugugcuaaaaacccg

SEQ ID NO: 458185 - RNA, 19 nt, Human
ugaacaucuuucucagcuc

SEQ ID NO: 458186 - RNA, 19 nt, Human
ugaacaucuuucucagcuc

SEQ ID NO: 458187 - RNA, 18 nt, Human
ugaggggggaaggacccc

SEQ ID NO: 458188 - RNA, 19 nt, Human
ugaggggggaaggaccccg

SEQ ID NO: 458189 - RNA, 22 nt, Human
ugagguugagcaagggccccuc

SEQ ID NO: 458190 - RNA, 20 nt, Human
ugcagagggauaaaaaacug

SEQ ID NO: 458191 - RNA, 24 nt, Human
ugggggaagcugugggaaggcuuc

SEQ ID NO: 458192 - RNA, 24 nt, Human
ugggggauggggacaugacuacag

SEQ ID NO: 458193 - RNA, 24 nt, Human
ugggggauggggacaugacuacag

SEQ ID NO: 458194 - RNA, 18 nt, Human
ugugcuaaaaacccgaca

SEQ ID NO: 458195 - RNA, 21 nt, Human
ugugugugaacacacagccac

SEQ ID NO: 458196 - RNA, 18 nt, Human
ugugugugugugugugug

SEQ ID NO: 458197 - RNA, 18 nt, Human
ugugugugugugugugug

SEQ ID NO: 458198 - RNA, 18 nt, Human
ugugugugugugugugug

SEQ ID NO: 458199 - RNA, 18 nt, Human
ugugugugugugugugug

SEQ ID NO: 458200 - RNA, 18 nt, Human
ugugugugugugugugug

SEQ ID NO: 458201 - RNA, 18 nt, Human
ugugugugugugugugug

SEQ ID NO: 458202 - RNA, 18 nt, Human
ugugugugugugugugug

SEQ ID NO: 458203 - RNA, 18 nt, Human
ugugugugugugugugug

SEQ ID NO: 458204 - RNA, 18 nt, Human
ugugugugugugugugug

SEQ ID NO: 458205 - RNA, 18 nt, Human
ugugugugugugugugug

SEQ ID NO: 458206 - RNA, 21 nt, Human
ugugugugugugugugugugu

SEQ ID NO: 458207 - RNA, 21 nt, Human
ugugugugugugugugugugu

SEQ ID NO: 458208 - RNA, 21 nt, Human
ugugugugugugugugugugu

SEQ ID NO: 458209 - RNA, 21 nt, Human
ugugugugugugugugugugu

SEQ ID NO: 458210 - RNA, 21 nt, Human
ugugugugugugugugugugu

SEQ ID NO: 458211 - RNA, 21 nt, Human
ugugugugugugugugugugu

SEQ ID NO: 458212 - RNA, 21 nt, Human
ugugugugugugugugugugu

SEQ ID NO: 458213 - RNA, 21 nt, Human
ugugugugugugugugugugu

SEQ ID NO: 458214 - RNA, 21 nt, Human
ugugugugugugugugugugu

SEQ ID NO: 458215 - RNA, 21 nt, Human
ugugugugugugugugugugu

SEQ ID NO: 458216 - RNA, 21 nt, Human
ugugugugugugugugugugu

SEQ ID NO: 458217 - RNA, 21 nt, Human
ugugugugugugugugugugu

SEQ ID NO: 458218 - RNA, 21 nt, Human
ugugugugugugugugugugu

SEQ ID NO: 458219 - RNA, 21 nt, Human
ugugugugugugugugugugu

SEQ ID NO: 458220 - RNA, 21 nt, Human
ugugugugugugugugugugu

SEQ ID NO: 458221 - RNA, 21 nt, Human
ugugugugugugugugugugu

SEQ ID NO: 458222 - RNA, 21 nt, Human
ugugugugugugugugugugu

SEQ ID NO: 458223 - RNA, 21 nt, Human
ugugugugugugugugugugu

SEQ ID NO: 458224 - RNA, 22 nt, Human
ugugugugugugugugugugug

SEQ ID NO: 458225 - RNA, 22 nt, Human
ugugugugugugugugugugug

SEQ ID NO: 458226 - RNA, 22 nt, Human
ugugugugugugugugugugug

SEQ ID NO: 458227 - RNA, 22 nt, Human
ugugugugugugugugugugug

SEQ ID NO: 458228 - RNA, 18 nt, Human
uuccccccgcccccaccc

SEQ ID NO: 458229 - RNA, 18 nt, Human
uuccccccgcccccaccc

SEQ ID NO: 458230 - RNA, 27 nt, Human
uucuccuuaaaagggaaggauuucaaa

SEQ ID NO: 458231 - RNA, 23 nt, Human
uugcaacauuccaagcccccccc

SEQ ID NO: 458232 - RNA, 20 nt, Human
uuuaaagguuuaaagaaaaa

SEQ ID NO: 458233 - RNA, 18 nt, Human
uuuugcaacauuccaagc

SEQ ID NO: 458234 - RNA, 21 nt, Human
aaguccuuuuucuugcagagu

SEQ ID NO: 458235 - RNA, 25 nt, Human
acaaaaugaggcaucugucgcuuga

SEQ ID NO: 458236 - RNA, 23 nt, Human
agaaacuguaagggaagagcggc

SEQ ID NO: 458237 - RNA, 20 nt, Human
agcggcucaggcagcucccg

SEQ ID NO: 458238 - RNA, 19 nt, Human
aggcaaaaaauauuucaga

SEQ ID NO: 458239 - RNA, 22 nt, Human
caaauacaauccccaagcuuug

SEQ ID NO: 458240 - RNA, 19 nt, Human
cagaugagagccaaaaauu

SEQ ID NO: 458241 - RNA, 26 nt, Human
caucauuaaguuuucacaaaaugagg

SEQ ID NO: 458242 - RNA, 26 nt, Human
cauccuagaccucuuuucucaacagc

SEQ ID NO: 458243 - RNA, 19 nt, Human
ccaaaaauuugaucuuuaa

SEQ ID NO: 458244 - RNA, 25 nt, Human
ccaaaauuccagccuuccuccuucc

SEQ ID NO: 458245 - RNA, 23 nt, Human
ccuaacucguuaaugacucuuuc

SEQ ID NO: 458246 - RNA, 26 nt, Human
ccucccacuggcugucgucccaaaau

SEQ ID NO: 458247 - RNA, 24 nt, Human
ccuguaauuguugcccagauugcc

SEQ ID NO: 458248 - RNA, 19 nt, Human
cggcucaggcagcucccgg

SEQ ID NO: 458249 - RNA, 23 nt, Human
cucaacagcuucaaugcauugcu

SEQ ID NO: 458250 - RNA, 23 nt, Human
cuuccuguaauuguugcccagau

SEQ ID NO: 458251 - RNA, 22 nt, Human
gcguggacaugagguucuugga

SEQ ID NO: 458252 - RNA, 27 nt, Human
uaauaaguccuuuuucuugcagaguuu

SEQ ID NO: 458253 - RNA, 21 nt, Human
uacaaaccacggaacugugga

SEQ ID NO: 458254 - RNA, 23 nt, Human
uagaccucuuuucucaacagcuu

SEQ ID NO: 458255 - RNA, 20 nt, Human
uauagugcuauccuuuucuc

SEQ ID NO: 458256 - RNA, 21 nt, Human
uccacaaacugcucaaagaaa

SEQ ID NO: 458257 - RNA, 25 nt, Human
ucccaaaauuccagccuuccuccuu

SEQ ID NO: 458258 - RNA, 19 nt, Human
uccccaagcuuugcgugga

SEQ ID NO: 458259 - RNA, 22 nt, Human
uccucugagccgaagaucuuac

SEQ ID NO: 458260 - RNA, 18 nt, Human
ucugguagaccaugugga

SEQ ID NO: 458261 - RNA, 20 nt, Human
ucugguagaccauguggauc

SEQ ID NO: 458262 - RNA, 19 nt, Human
ucugucagucuuccucuga

SEQ ID NO: 458263 - RNA, 27 nt, Human
ucuuguguuguugucuugcuuuuugau

SEQ ID NO: 458264 - RNA, 19 nt, Human
ugacaacguggauguccuc

SEQ ID NO: 458265 - RNA, 21 nt, Human
ugaggcaucugucgcuugaaa

SEQ ID NO: 458266 - RNA, 21 nt, Human
ugagguucuuggaggcuuugg

SEQ ID NO: 458267 - RNA, 21 nt, Human
uggcugucgucccaaaauucc

SEQ ID NO: 458268 - RNA, 18 nt, Human
ugucacgauuuggcggag

SEQ ID NO: 458269 - RNA, 23 nt, Human
ugucuugcuuuuugaucgcuucc

SEQ ID NO: 458270 - RNA, 21 nt, Human
uuacaaaccacggaacugugg

SEQ ID NO: 458271 - RNA, 23 nt, Human
uuauugacaaugccaucaacucc

SEQ ID NO: 458272 - RNA, 24 nt, Human
uuauugacaaugccaucaacuccu

SEQ ID NO: 458273 - RNA, 23 nt, Human
uucaaugcauugcuuuacaaacc

SEQ ID NO: 458274 - RNA, 19 nt, Human
uucacguucacacacuuug

SEQ ID NO: 458275 - RNA, 23 nt, Human
uugcguggacaugagguucuugg

SEQ ID NO: 458276 - RNA, 21 nt, Human
uuucucggcaaugaccuguua

SEQ ID NO: 458277 - RNA, 28 nt, Human
uuuuuuauugucaauuauuuuauucaaa

SEQ ID NO: 458278 - RNA, 20 nt, Human
aaaacaaccagccagaaaga

SEQ ID NO: 458279 - RNA, 19 nt, Human
aaacaaaggcuuacaugca

SEQ ID NO: 458280 - RNA, 24 nt, Human
aaacaggccaggcagaggccaggc

SEQ ID NO: 458281 - RNA, 20 nt, Human
aacacauaaagccaaaggcc

SEQ ID NO: 458282 - RNA, 21 nt, Human
aagaagagguaauauccagaa

SEQ ID NO: 458283 - RNA, 20 nt, Human
aagccacaaagccuccaccg

SEQ ID NO: 458284 - RNA, 19 nt, Human
aaguagccccacaccaggg

SEQ ID NO: 458285 - RNA, 23 nt, Human
aaugguauggagacccacaggga

SEQ ID NO: 458286 - RNA, 24 nt, Human
acaacaaaaaaacaauuucacaag

SEQ ID NO: 458287 - RNA, 21 nt, Human
acaaccagccagaaagaaccu

SEQ ID NO: 458288 - RNA, 24 nt, Human
acaauggucagugugucccagagc

SEQ ID NO: 458289 - RNA, 18 nt, Human
acacacauacacacauau

SEQ ID NO: 458290 - RNA, 20 nt, Human
acacccugagaauagaauuc

SEQ ID NO: 458291 - RNA, 22 nt, Human
acccccacccucagcaagccac

SEQ ID NO: 458292 - RNA, 24 nt, Human
accuugauccagagaggggagaac

SEQ ID NO: 458293 - RNA, 24 nt, Human
agaaacccaacccucccugagguc

SEQ ID NO: 458294 - RNA, 24 nt, Human
agaaauuaaaaaaaauuaaaacac

SEQ ID NO: 458295 - RNA, 20 nt, Human
agaaggccugcagagccaug

SEQ ID NO: 458296 - RNA, 23 nt, Human
agagaaacccaacccucccugag

SEQ ID NO: 458297 - RNA, 24 nt, Human
agaggcagagugcccagaccccag

SEQ ID NO: 458298 - RNA, 22 nt, Human
agagguauguuguuuccaagga

SEQ ID NO: 458299 - RNA, 19 nt, Human
agcaagagaaggcugccag

SEQ ID NO: 458300 - RNA, 19 nt, Human
agccagaaguuugguucau

SEQ ID NO: 458301 - RNA, 23 nt, Human
agccauggugaccaaagucuucc

SEQ ID NO: 458302 - RNA, 23 nt, Human
aggcagaggccaggcugaguccu

SEQ ID NO: 458303 - RNA, 24 nt, Human
aggcagagugcccagaccccaggg

SEQ ID NO: 458304 - RNA, 25 nt, Human
aggcagagugcccagaccccagggc

SEQ ID NO: 458305 - RNA, 19 nt, Human
aggcauuucuuucccgagg

SEQ ID NO: 458306 - RNA, 25 nt, Human
aggggccaguuuagaucacuaagcc

SEQ ID NO: 458307 - RNA, 20 nt, Human
aggggguggaggucgggggg

SEQ ID NO: 458308 - RNA, 24 nt, Human
aguggcugcuguaaauaaucccgg

SEQ ID NO: 458309 - RNA, 22 nt, Human
aguuccucuggaaaaaccacag

SEQ ID NO: 458310 - RNA, 23 nt, Human
auaaagccaaaggcucuguacag

SEQ ID NO: 458311 - RNA, 26 nt, Human
auaacaacaaaaaaacaauuucacaa

SEQ ID NO: 458312 - RNA, 21 nt, Human
caacaaaaaaacaauuucaca

SEQ ID NO: 458313 - RNA, 20 nt, Human
caacaguguuugacaaaggc

SEQ ID NO: 458314 - RNA, 18 nt, Human
caacuucuagaaaccccu

SEQ ID NO: 458315 - RNA, 23 nt, Human
caagacucaaaaguccccaccag

SEQ ID NO: 458316 - RNA, 18 nt, Human
caagccacaaagccucca

SEQ ID NO: 458317 - RNA, 18 nt, Human
caagcugguccccggcuc

SEQ ID NO: 458318 - RNA, 19 nt, Human
caagcugguccccggcucc

SEQ ID NO: 458319 - RNA, 18 nt, Human
caagggccugacagagaa

SEQ ID NO: 458320 - RNA, 19 nt, Human
caaggggucuggggucccc

SEQ ID NO: 458321 - RNA, 20 nt, Human
cacaaaguuugacucugagg

SEQ ID NO: 458322 - RNA, 24 nt, Human
cacacagcuuagugagcagaacac

SEQ ID NO: 458323 - RNA, 18 nt, Human
cacagggaaggcugaauu

SEQ ID NO: 458324 - RNA, 25 nt, Human
caccuccccaucaagucccucaaaa

SEQ ID NO: 458325 - RNA, 24 nt, Human
caccugcacagagagagggggcag

SEQ ID NO: 458326 - RNA, 21 nt, Human
cacuggccaccugcacagaga

SEQ ID NO: 458327 - RNA, 20 nt, Human
cagaaagaaccuuucuccuu

SEQ ID NO: 458328 - RNA, 24 nt, Human
cagaacacaagcugaauuccagcc

SEQ ID NO: 458329 - RNA, 20 nt, Human
cagagagaaauuaaaaaaaa

SEQ ID NO: 458330 - RNA, 21 nt, Human
cagagcagggaggggcacugg

SEQ ID NO: 458331 - RNA, 24 nt, Human
cagagccauggugaccaaagucuu

SEQ ID NO: 458332 - RNA, 20 nt, Human
cagcugggccccucuggguc

SEQ ID NO: 458333 - RNA, 24 nt, Human
caggagcagugagacaggucagcu

SEQ ID NO: 458334 - RNA, 22 nt, Human
cagggaugggguagaaggcuag

SEQ ID NO: 458335 - RNA, 18 nt, Human
cagucagaccaccuucca

SEQ ID NO: 458336 - RNA, 24 nt, Human
cagucccucucccaacccccaccc

SEQ ID NO: 458337 - RNA, 21 nt, Human
cagucuucaagcugguccccc

SEQ ID NO: 458338 - RNA, 19 nt, Human
cagugcagucagaccaccu

SEQ ID NO: 458339 - RNA, 23 nt, Human
ccaaggaaaccaaggggucuggg

SEQ ID NO: 458340 - RNA, 23 nt, Human
ccacagcacucuuccugggaggc

SEQ ID NO: 458341 - RNA, 20 nt, Human
ccagacgguguuccuggugc

SEQ ID NO: 458342 - RNA, 21 nt, Human
ccagcuggucccaggccgcca

SEQ ID NO: 458343 - RNA, 19 nt, Human
ccaggccgccagugguggc

SEQ ID NO: 458344 - RNA, 20 nt, Human
cccaacccccacccucagcc

SEQ ID NO: 458345 - RNA, 23 nt, Human
cccacaccagggcacgcacacag

SEQ ID NO: 458346 - RNA, 22 nt, Human
cccacugcaaacuugcccccga

SEQ ID NO: 458347 - RNA, 21 nt, Human
cccagacuuugaaacaggcca

SEQ ID NO: 458348 - RNA, 21 nt, Human
cccaggccagcacugauuugc

SEQ ID NO: 458349 - RNA, 24 nt, Human
ccccaccagcccucaggcugccua

SEQ ID NO: 458350 - RNA, 23 nt, Human
cccccacccucagcaagccacaa

SEQ ID NO: 458351 - RNA, 24 nt, Human
ccccuuucuucuuccucucuccca

SEQ ID NO: 458352 - RNA, 18 nt, Human
cccgcuucugccacgucc

SEQ ID NO: 458353 - RNA, 21 nt, Human
cccucaaaaagaagugcucac

SEQ ID NO: 458354 - RNA, 19 nt, Human
cccugaggucugcuggagg

SEQ ID NO: 458355 - RNA, 20 nt, Human
cccuuucuucuuccucucuc

SEQ ID NO: 458356 - RNA, 20 nt, Human
ccucccaggcauuucuuucc

SEQ ID NO: 458357 - RNA, 24 nt, Human
ccugcacaacuguacauccagaag

SEQ ID NO: 458358 - RNA, 24 nt, Human
ccugcccgauguccuuccuguucc

SEQ ID NO: 458359 - RNA, 22 nt, Human
ccugcuggguuccagagcaugc

SEQ ID NO: 458360 - RNA, 24 nt, Human
ccugucaccaccuugauccagaga

SEQ ID NO: 458361 - RNA, 18 nt, Human
ccuuccaccugccccagg

SEQ ID NO: 458362 - RNA, 19 nt, Human
cgauagccccuguggaucc

SEQ ID NO: 458363 - RNA, 21 nt, Human
cucccaacccccacccucagc

SEQ ID NO: 458364 - RNA, 19 nt, Human
cucucccaacccccacccu

SEQ ID NO: 458365 - RNA, 22 nt, Human
cugaagaccuccucuccucaga

SEQ ID NO: 458366 - RNA, 20 nt, Human
cugagcaccuuuagcuggga

SEQ ID NO: 458367 - RNA, 19 nt, Human
cugaggucugcuggaggug

SEQ ID NO: 458368 - RNA, 21 nt, Human
cugcacagagagagggggcag

SEQ ID NO: 458369 - RNA, 21 nt, Human
cugccagcuaccuccuggguu

SEQ ID NO: 458370 - RNA, 24 nt, Human
cuguccaggacagucaccguggcu

SEQ ID NO: 458371 - RNA, 27 nt, Human
cuugcccccgaugucccucagugccga

SEQ ID NO: 458372 - RNA, 24 nt, Human
gaaccuuucuccuuccugacagcu

SEQ ID NO: 458373 - RNA, 20 nt, Human
gaacuggaagacuugggcuu

SEQ ID NO: 458374 - RNA, 23 nt, Human
gaauaacccccaggcaggggcca

SEQ ID NO: 458375 - RNA, 18 nt, Human
gagaaggcugccaguggc

SEQ ID NO: 458376 - RNA, 25 nt, Human
gagcagaacacaagcugaauuccag

SEQ ID NO: 458377 - RNA, 18 nt, Human
gagcaugcccuucuggcc

SEQ ID NO: 458378 - RNA, 20 nt, Human
gagcugccacaccggcugcu

SEQ ID NO: 458379 - RNA, 23 nt, Human
gagggggcaguggggcucugagc

SEQ ID NO: 458380 - RNA, 20 nt, Human
gagugaguuccuggcuuugc

SEQ ID NO: 458381 - RNA, 18 nt, Human
gaucacggcccccaucca

SEQ ID NO: 458382 - RNA, 18 nt, Human
gauguggagcuggccggc

SEQ ID NO: 458383 - RNA, 21 nt, Human
gcagaggccaggcugaguccu

SEQ ID NO: 458384 - RNA, 19 nt, Human
gccaggcagaggccaggcu

SEQ ID NO: 458385 - RNA, 24 nt, Human
gccccacaccagggcacgcacaca

SEQ ID NO: 458386 - RNA, 26 nt, Human
gccccacugcaaacuugcccccgaug

SEQ ID NO: 458387 - RNA, 24 nt, Human
gcucauagguuugguggaacuggg

SEQ ID NO: 458388 - RNA, 23 nt, Human
gcucugagcaccuuuagcuggga

SEQ ID NO: 458389 - RNA, 20 nt, Human
gcuggagguggcaggagcug

SEQ ID NO: 458390 - RNA, 24 nt, Human
ggaaaccaaggggucugggguccc

SEQ ID NO: 458391 - RNA, 20 nt, Human
ggaagacgugcacaggcagc

SEQ ID NO: 458392 - RNA, 21 nt, Human
ggacuucccucaccagaucug

SEQ ID NO: 458393 - RNA, 20 nt, Human
ggaggcuggcugggcaccua

SEQ ID NO: 458394 - RNA, 18 nt, Human
ggcaggagcuggccagga

SEQ ID NO: 458395 - RNA, 19 nt, Human
ggcugccaguggcccagac

SEQ ID NO: 458396 - RNA, 23 nt, Human
gggaggcccuggcugaaccgucc

SEQ ID NO: 458397 - RNA, 23 nt, Human
ggggauggagucugagggggugg

SEQ ID NO: 458398 - RNA, 19 nt, Human
gggggugggggauggaguc

SEQ ID NO: 458399 - RNA, 22 nt, Human
gggugacaggugagccccuucc

SEQ ID NO: 458400 - RNA, 24 nt, Human
gguaugaaaaaggacuggggauaa

SEQ ID NO: 458401 - RNA, 23 nt, Human
ggucacaaaguuugacucugagg

SEQ ID NO: 458402 - RNA, 22 nt, Human
ggucgggggggaggggcagguc

SEQ ID NO: 458403 - RNA, 19 nt, Human
ggucuccucgauagccccu

SEQ ID NO: 458404 - RNA, 20 nt, Human
ggugggggauggagucugag

SEQ ID NO: 458405 - RNA, 22 nt, Human
guagaaggcuagcaaugcuccc

SEQ ID NO: 458406 - RNA, 23 nt, Human
guagcccugaggucuucuuuguc

SEQ ID NO: 458407 - RNA, 20 nt, Human
guaugaaaaaggacugggga

SEQ ID NO: 458408 - RNA, 23 nt, Human
guccacuucccagagaacaucac

SEQ ID NO: 458409 - RNA, 20 nt, Human
gucugaggggguggaggucg

SEQ ID NO: 458410 - RNA, 30 nt, Human
uaaaacacaaaauaacaacaaaaaaacaaa

SEQ ID NO: 458411 - RNA, 20 nt, Human
uaaaaugguauggagaccca

SEQ ID NO: 458412 - RNA, 23 nt, Human
uaaauaaucccgguuuuuuggug

SEQ ID NO: 458413 - RNA, 22 nt, Human
uaacugaguuccucuggaaaaa

SEQ ID NO: 458414 - RNA, 23 nt, Human
uacacaucauaaaaugguaugga

SEQ ID NO: 458415 - RNA, 19 nt, Human
uacaggucaggauccaggu

SEQ ID NO: 458416 - RNA, 31 nt, Human
uaccccaccuccccaucaagucccucaaaag

SEQ ID NO: 458417 - RNA, 22 nt, Human
uacucuaaaagucacuuagcug

SEQ ID NO: 458418 - RNA, 18 nt, Human
uacucuagacuccuccua

SEQ ID NO: 458419 - RNA, 18 nt, Human
uagcuggcaaagccacug

SEQ ID NO: 458420 - RNA, 23 nt, Human
ucacaaaguuugacucugagggu

SEQ ID NO: 458421 - RNA, 19 nt, Human
ucacuaacggaucaucuuc

SEQ ID NO: 458422 - RNA, 21 nt, Human
ucacugggguagcaugcuccu

SEQ ID NO: 458423 - RNA, 20 nt, Human
ucagugugucccagagccag

SEQ ID NO: 458424 - RNA, 18 nt, Human
uccacagcacucuuccug

SEQ ID NO: 458425 - RNA, 23 nt, Human
uccacccucauugcaggagucca

SEQ ID NO: 458426 - RNA, 19 nt, Human
uccaccgucuucagcuggu

SEQ ID NO: 458427 - RNA, 21 nt, Human
uccagaauaucugagcagaac

SEQ ID NO: 458428 - RNA, 21 nt, Human
uccaggucagacucucccucc

SEQ ID NO: 458429 - RNA, 20 nt, Human
ucccaacccccacccucagc

SEQ ID NO: 458430 - RNA, 23 nt, Human
ucccaacccccacccucagcaag

SEQ ID NO: 458431 - RNA, 25 nt, Human
ucccaacccccacccucagcaagcc

SEQ ID NO: 458432 - RNA, 18 nt, Human
ucccagagccagucuuca

SEQ ID NO: 458433 - RNA, 18 nt, Human
ucccagaggcagagugcc

SEQ ID NO: 458434 - RNA, 22 nt, Human
ucccagaggcagagugcccaga

SEQ ID NO: 458435 - RNA, 20 nt, Human
uccccggcuccuucucugca

SEQ ID NO: 458436 - RNA, 23 nt, Human
uccccggcuccuucucuggggcc

SEQ ID NO: 458437 - RNA, 23 nt, Human
ucccugaggucugcuggaggugg

SEQ ID NO: 458438 - RNA, 18 nt, Human
uccucgauagccccugug

SEQ ID NO: 458439 - RNA, 19 nt, Human
uccucgauagccccugugg

SEQ ID NO: 458440 - RNA, 19 nt, Human
uccuggggccuccaagugg

SEQ ID NO: 458441 - RNA, 24 nt, Human
uccuggguuuuguugguggggaag

SEQ ID NO: 458442 - RNA, 22 nt, Human
uccuuggguagcccugaggucu

SEQ ID NO: 458443 - RNA, 24 nt, Human
ucucccagaggcagagugcccaga

SEQ ID NO: 458444 - RNA, 23 nt, Human
ugaaacaggccaggcagaggcca

SEQ ID NO: 458445 - RNA, 23 nt, Human
ugaaagaagagcugacaaaggca

SEQ ID NO: 458446 - RNA, 23 nt, Human
ugaaagaagagcugacaaaggca

SEQ ID NO: 458447 - RNA, 26 nt, Human
ugaagaacauaaacacauaaagccaa

SEQ ID NO: 458448 - RNA, 25 nt, Human
ugaccaaagucuucccgcuucugcc

SEQ ID NO: 458449 - RNA, 19 nt, Human
ugaccaacuucuagaaacc

SEQ ID NO: 458450 - RNA, 19 nt, Human
ugagacaggucagcugggc

SEQ ID NO: 458451 - RNA, 21 nt, Human
ugagacaggucagcugggccc

SEQ ID NO: 458452 - RNA, 18 nt, Human
ugagggaggucacuggga

SEQ ID NO: 458453 - RNA, 20 nt, Human
ugaggggguggaggucgggg

SEQ ID NO: 458454 - RNA, 23 nt, Human
ugagggguccuuagagaaaccca

SEQ ID NO: 458455 - RNA, 18 nt, Human
ugcacagagagagggggc

SEQ ID NO: 458456 - RNA, 22 nt, Human
ugcagucagaccaccuuccacc

SEQ ID NO: 458457 - RNA, 20 nt, Human
ugcccagaccccagggcagc

SEQ ID NO: 458458 - RNA, 22 nt, Human
ugcccuggcucacuuaagacag

SEQ ID NO: 458459 - RNA, 21 nt, Human
ugccugucaccaccuugaucc

SEQ ID NO: 458460 - RNA, 21 nt, Human
ugcgacauguuugaggggucc

SEQ ID NO: 458461 - RNA, 21 nt, Human
ugcuggagguggcaggagcug

SEQ ID NO: 458462 - RNA, 21 nt, Human
uggcaaagccacuguccuggc

SEQ ID NO: 458463 - RNA, 23 nt, Human
uggcaaagccacuguccuggcuu

SEQ ID NO: 458464 - RNA, 18 nt, Human
uggcaaggucucugaagc

SEQ ID NO: 458465 - RNA, 20 nt, Human
uggcccagacuuugaaacag

SEQ ID NO: 458466 - RNA, 21 nt, Human
uggcccagacuuugaaacagg

SEQ ID NO: 458467 - RNA, 20 nt, Human
uggccgaagcccugcugggu

SEQ ID NO: 458468 - RNA, 18 nt, Human
uggccuagcuggaagcug

SEQ ID NO: 458469 - RNA, 19 nt, Human
uggccuggggacuucccuc

SEQ ID NO: 458470 - RNA, 22 nt, Human
ugggaggcuggcugggcaccua

SEQ ID NO: 458471 - RNA, 24 nt, Human
ugggaggcuggcugggcaccuaug

SEQ ID NO: 458472 - RNA, 25 nt, Human
uggggacuucccucaccagaucugu

SEQ ID NO: 458473 - RNA, 21 nt, Human
uggggauaagggggaagaggu

SEQ ID NO: 458474 - RNA, 24 nt, Human
ugggggcugagggaggucacuggg

SEQ ID NO: 458475 - RNA, 22 nt, Human
ugggggugggggauggagucug

SEQ ID NO: 458476 - RNA, 22 nt, Human
ugggucuccucgauagccccug

SEQ ID NO: 458477 - RNA, 18 nt, Human
uguacagauuuuuaaaaa

SEQ ID NO: 458478 - RNA, 23 nt, Human
uguggauccagggaugggguaga

SEQ ID NO: 458479 - RNA, 21 nt, Human
uguugguggggaagaagggag

SEQ ID NO: 458480 - RNA, 20 nt, Human
uuacaggucaggauccaggu

SEQ ID NO: 458481 - RNA, 21 nt, Human
uuacaggucaggauccagguc

SEQ ID NO: 458482 - RNA, 20 nt, Human
uucacuguuagcaccaaugu

SEQ ID NO: 458483 - RNA, 20 nt, Human
uuccucagucgaagaaucua

SEQ ID NO: 458484 - RNA, 19 nt, Human
uuccucuggaaaaaccaca

SEQ ID NO: 458485 - RNA, 22 nt, Human
uucggacacagaccuacucccc

SEQ ID NO: 458486 - RNA, 19 nt, Human
uucucacauaugcaaaagu

SEQ ID NO: 458487 - RNA, 22 nt, Human
uucuuuguccagggaagccguc

SEQ ID NO: 458488 - RNA, 23 nt, Human
uuuccagucccucucccaacccc

SEQ ID NO: 458489 - RNA, 18 nt, Human
uuucccgaggaggaaggu

SEQ ID NO: 458490 - RNA, 18 nt, Human
uuugugagucuacucuag

SEQ ID NO: 458491 - RNA, 18 nt, Human
aacucuuccucucucucu

SEQ ID NO: 458492 - RNA, 19 nt, Human
ccuacaacaaacugaccug

SEQ ID NO: 458493 - RNA, 23 nt, Human
ccucccccuaccacucuuccucu

SEQ ID NO: 458494 - RNA, 20 nt, Human
ccucuauuacuguacacccu

SEQ ID NO: 458495 - RNA, 18 nt, Human
ccucucucucucccuccc

SEQ ID NO: 458496 - RNA, 19 nt, Human
cgagcuccuaggccaagcc

SEQ ID NO: 458497 - RNA, 21 nt, Human
cuucccugggcucuaaguggc

SEQ ID NO: 458498 - RNA, 18 nt, Human
gcucuaaguggcaguuuu

SEQ ID NO: 458499 - RNA, 21 nt, Human
ucccugggcucuaaguggcag

SEQ ID NO: 458500 - RNA, 21 nt, Human
uccugaaggcagcaagccucu

SEQ ID NO: 458501 - RNA, 22 nt, Human
ucucucucucccucccccuacc

SEQ ID NO: 458502 - RNA, 20 nt, Human
ucuuguggaacguaaauguc

SEQ ID NO: 458503 - RNA, 21 nt, Human
ucuuguggaacguaaaugucu

SEQ ID NO: 458504 - RNA, 19 nt, Human
ugggcucuaaguggcaguu

SEQ ID NO: 458505 - RNA, 20 nt, Human
uuccuacaacaaacugaccu

SEQ ID NO: 458506 - RNA, 23 nt, Human
uuccugaaggcagcaagccucua

SEQ ID NO: 458507 - RNA, 20 nt, Human
aaaaaaacccagagcucugc

SEQ ID NO: 458508 - RNA, 21 nt, Human
aaaaaaacccagagcucugca

SEQ ID NO: 458509 - RNA, 18 nt, Human
aaaaaacaaaaaaaccca

SEQ ID NO: 458510 - RNA, 21 nt, Human
aaaaauacagguuuugaaagc

SEQ ID NO: 458511 - RNA, 25 nt, Human
aaacaaaaaaacccagagcucugca

SEQ ID NO: 458512 - RNA, 22 nt, Human
aaacaaaaaacaaaaaaaccca

SEQ ID NO: 458513 - RNA, 25 nt, Human
aaacaaaaaacaaaaaaacccagag

SEQ ID NO: 458514 - RNA, 19 nt, Human
aaagugcugggauuacaga

SEQ ID NO: 458515 - RNA, 24 nt, Human
aaagugcugggauuacagacguga

SEQ ID NO: 458516 - RNA, 20 nt, Human
aaauuaggacccaaaaagau

SEQ ID NO: 458517 - RNA, 18 nt, Human
aacaaaaaaacccagagc

SEQ ID NO: 458518 - RNA, 23 nt, Human
aacaaaaaacaaaaaaacccaga

SEQ ID NO: 458519 - RNA, 19 nt, Human
aacauggugaaaccccguc

SEQ ID NO: 458520 - RNA, 20 nt, Human
aacauggugaaaccccgucu

SEQ ID NO: 458521 - RNA, 21 nt, Human
aacauggugaaaccccgucuc

SEQ ID NO: 458522 - RNA, 21 nt, Human
aacugguucuaaggcccuuua

SEQ ID NO: 458523 - RNA, 22 nt, Human
aagccucuuccauccaaggcac

SEQ ID NO: 458524 - RNA, 21 nt, Human
aaggaaaaagggcauacagcg

SEQ ID NO: 458525 - RNA, 19 nt, Human
aaggcccuuuauccagucc

SEQ ID NO: 458526 - RNA, 22 nt, Human
aagguggaaggaucacaguccc

SEQ ID NO: 458527 - RNA, 22 nt, Human
aaguaggauuaaaacccagagc

SEQ ID NO: 458528 - RNA, 19 nt, Human
aagugcugggauuacagac

SEQ ID NO: 458529 - RNA, 26 nt, Human
aagugcugggauuacagacgugagcc

SEQ ID NO: 458530 - RNA, 19 nt, Human
acaccuguaaucucggcac

SEQ ID NO: 458531 - RNA, 18 nt, Human
acagacgugagccaccgc

SEQ ID NO: 458532 - RNA, 20 nt, Human
acagagcgagacuccgucuc

SEQ ID NO: 458533 - RNA, 24 nt, Human
acagagcgagacuccgucucaaaa

SEQ ID NO: 458534 - RNA, 24 nt, Human
accccgucucuacuaaaaauacaa

SEQ ID NO: 458535 - RNA, 24 nt, Human
acccuaagacagcccccaagaaga

SEQ ID NO: 458536 - RNA, 26 nt, Human
acccuaagacagcccccaagaagaaa

SEQ ID NO: 458537 - RNA, 20 nt, Human
acgugagccaccgcgcccga

SEQ ID NO: 458538 - RNA, 24 nt, Human
acuccuucccaggcucacaggcag

SEQ ID NO: 458539 - RNA, 23 nt, Human
acugcacuccagccuggcgacag

SEQ ID NO: 458540 - RNA, 25 nt, Human
acugcacuccagccuggcgacagag

SEQ ID NO: 458541 - RNA, 20 nt, Human
acuggaaugaaagucaccca

SEQ ID NO: 458542 - RNA, 22 nt, Human
agaaaagaucaagggaacugaa

SEQ ID NO: 458543 - RNA, 19 nt, Human
agacaggaggaaaauuagg

SEQ ID NO: 458544 - RNA, 22 nt, Human
agacaggaggaaaauuaggacc

SEQ ID NO: 458545 - RNA, 25 nt, Human
agacaggaggaaaauuaggacccaa

SEQ ID NO: 458546 - RNA, 23 nt, Human
agcagacaugacuuagaaggaaa

SEQ ID NO: 458547 - RNA, 22 nt, Human
agcagaucaguuucccagccuc

SEQ ID NO: 458548 - RNA, 19 nt, Human
agccaccgcgcccgaccac

SEQ ID NO: 458549 - RNA, 21 nt, Human
agccuggcgacagagcgagac

SEQ ID NO: 458550 - RNA, 23 nt, Human
agccuggcgacagagcgagacuc

SEQ ID NO: 458551 - RNA, 23 nt, Human
agcugggcgugguggcgugcgcc

SEQ ID NO: 458552 - RNA, 18 nt, Human
agcugguugucccagccc

SEQ ID NO: 458553 - RNA, 18 nt, Human
aggcagaagaauggcuug

SEQ ID NO: 458554 - RNA, 19 nt, Human
aggcaggcuggcugucagg

SEQ ID NO: 458555 - RNA, 23 nt, Human
aggccgaggcgggcagaucacga

SEQ ID NO: 458556 - RNA, 21 nt, Human
aggcggagguugcagugagcc

SEQ ID NO: 458557 - RNA, 24 nt, Human
aggcggagguugcagugagccgag

SEQ ID NO: 458558 - RNA, 24 nt, Human
aggcgggcagaucacgaggucaag

SEQ ID NO: 458559 - RNA, 24 nt, Human
aggcugaggcagaagaauggcuug

SEQ ID NO: 458560 - RNA, 24 nt, Human
agugcugggauuacagacgugagc

SEQ ID NO: 458561 - RNA, 21 nt, Human
aguugcuccacccaacaucug

SEQ ID NO: 458562 - RNA, 20 nt, Human
auccugccauuccuccuuca

SEQ ID NO: 458563 - RNA, 21 nt, Human
auccuggccaacauggugaaa

SEQ ID NO: 458564 - RNA, 24 nt, Human
aucgcaccacugcacuccagccug

SEQ ID NO: 458565 - RNA, 18 nt, Human
caaaaaaacccagagcuc

SEQ ID NO: 458566 - RNA, 22 nt, Human
caaaaaacaaaaaaacccagag

SEQ ID NO: 458567 - RNA, 24 nt, Human
caaagugcugggauuacagacgug

SEQ ID NO: 458568 - RNA, 22 nt, Human
caacaucugucuuuuuuccugc

SEQ ID NO: 458569 - RNA, 24 nt, Human
caacauggugaaaccccgucucua

SEQ ID NO: 458570 - RNA, 22 nt, Human
caagggaacugaauaguaggua

SEQ ID NO: 458571 - RNA, 24 nt, Human
cacaccuguaaucucggcacuuug

SEQ ID NO: 458572 - RNA, 19 nt, Human
caccacuugcuagaagcag

SEQ ID NO: 458573 - RNA, 23 nt, Human
caccuguaaucucggcacuuugg

SEQ ID NO: 458574 - RNA, 24 nt, Human
caccuguaaucucggcacuuuggg

SEQ ID NO: 458575 - RNA, 22 nt, Human
cacuccagccuggcgacagagc

SEQ ID NO: 458576 - RNA, 23 nt, Human
cacuccagccuggcgacagagcg

SEQ ID NO: 458577 - RNA, 18 nt, Human
cacugcacuccagccugg

SEQ ID NO: 458578 - RNA, 18 nt, Human
cacugcacuccagccugg

SEQ ID NO: 458579 - RNA, 22 nt, Human
cacugcacuccagccuggcgac

SEQ ID NO: 458580 - RNA, 23 nt, Human
cacugcacuccagccuggcgaca

SEQ ID NO: 458581 - RNA, 23 nt, Human
cacugcacuccagccuggcgaca

SEQ ID NO: 458582 - RNA, 21 nt, Human
cagagcagaggauaggccuuc

SEQ ID NO: 458583 - RNA, 18 nt, Human
cagagcucugcauauccc

SEQ ID NO: 458584 - RNA, 18 nt, Human
cagcccccaagaagaaaa

SEQ ID NO: 458585 - RNA, 20 nt, Human
cagccuccucaggaagcaau

SEQ ID NO: 458586 - RNA, 21 nt, Human
cagcgguucuucaagauuuaa

SEQ ID NO: 458587 - RNA, 19 nt, Human
cagcugccugugaaucucc

SEQ ID NO: 458588 - RNA, 20 nt, Human
caguaauugagauacagagc

SEQ ID NO: 458589 - RNA, 20 nt, Human
cauacagcgguucuucaaga

SEQ ID NO: 458590 - RNA, 27 nt, Human
cauccugccauuccuccuucagcucca

SEQ ID NO: 458591 - RNA, 26 nt, Human
caucugucuuuuuuccugccucuugu

SEQ ID NO: 458592 - RNA, 22 nt, Human
ccaaagugcugggauuacagac

SEQ ID NO: 458593 - RNA, 22 nt, Human
ccaaagugcugggauuacagac

SEQ ID NO: 458594 - RNA, 24 nt, Human
ccaaagugcugggauuacagacgu

SEQ ID NO: 458595 - RNA, 21 nt, Human
ccaacacuuccuuaccucuuu

SEQ ID NO: 458596 - RNA, 20 nt, Human
ccaagaagaaaagaucaagg

SEQ ID NO: 458597 - RNA, 19 nt, Human
ccacugcacuccagccugg

SEQ ID NO: 458598 - RNA, 19 nt, Human
ccacugcacuccagccugg

SEQ ID NO: 458599 - RNA, 20 nt, Human
ccacugcacuccagccuggc

SEQ ID NO: 458600 - RNA, 22 nt, Human
ccacugcacuccagccuggcga

SEQ ID NO: 458601 - RNA, 23 nt, Human
ccacugcacuccagccuggcgac

SEQ ID NO: 458602 - RNA, 22 nt, Human
cccagagcucuggccgagcgcg

SEQ ID NO: 458603 - RNA, 20 nt, Human
cccagccucaaagcccugcu

SEQ ID NO: 458604 - RNA, 19 nt, Human
cccccaacacuuccuuacc

SEQ ID NO: 458605 - RNA, 18 nt, Human
cccugcugaaaguagggu

SEQ ID NO: 458606 - RNA, 25 nt, Human
ccgucucaaaaaacaaaaaacaaaa

SEQ ID NO: 458607 - RNA, 18 nt, Human
ccuccuucagcuccaacu

SEQ ID NO: 458608 - RNA, 21 nt, Human
ccucuguagcaguugcuccac

SEQ ID NO: 458609 - RNA, 23 nt, Human
ccucuguagcaguugcuccaccc

SEQ ID NO: 458610 - RNA, 20 nt, Human
ccucuuuucugucucagcug

SEQ ID NO: 458611 - RNA, 25 nt, Human
ccugacccuaagacagcccccaaga

SEQ ID NO: 458612 - RNA, 22 nt, Human
ccuggccaacauggugaaaccc

SEQ ID NO: 458613 - RNA, 23 nt, Human
ccuggccaacauggugaaacccc

SEQ ID NO: 458614 - RNA, 24 nt, Human
ccuggccaacauggugaaaccccg

SEQ ID NO: 458615 - RNA, 21 nt, Human
ccuggcgacagagcgagacuc

SEQ ID NO: 458616 - RNA, 18 nt, Human
ccuuaccucuuuucuguc

SEQ ID NO: 458617 - RNA, 21 nt, Human
ccuucuuuaaacaccuaggag

SEQ ID NO: 458618 - RNA, 19 nt, Human
ccuuuugcaugcuucuaca

SEQ ID NO: 458619 - RNA, 24 nt, Human
cgagaccauccuggccaacauggu

SEQ ID NO: 458620 - RNA, 24 nt, Human
cgaggcgggcagaucacgagguca

SEQ ID NO: 458621 - RNA, 21 nt, Human
cgcaccacugcacuccagccu

SEQ ID NO: 458622 - RNA, 22 nt, Human
cgccgguagucucagcuacucg

SEQ ID NO: 458623 - RNA, 25 nt, Human
cgccgguagucucagcuacucgcug

SEQ ID NO: 458624 - RNA, 24 nt, Human
cggcacuuugggaggccgaggcgg

SEQ ID NO: 458625 - RNA, 24 nt, Human
cgggaggcggagguugcagugagc

SEQ ID NO: 458626 - RNA, 22 nt, Human
cgggcagaucacgaggucaaga

SEQ ID NO: 458627 - RNA, 24 nt, Human
cgguccagcugucugacagcuuca

SEQ ID NO: 458628 - RNA, 28 nt, Human
cgucucaaaaaacaaaaaacaaaaaaac

SEQ ID NO: 458629 - RNA, 23 nt, Human
cuauacagaugcuucucuuaccu

SEQ ID NO: 458630 - RNA, 27 nt, Human
cucaaaaaacaaaaaacaaaaaaaccc

SEQ ID NO: 458631 - RNA, 22 nt, Human
cucacaccuguaaucucggcac

SEQ ID NO: 458632 - RNA, 24 nt, Human
cucacaccuguaaucucggcacuu

SEQ ID NO: 458633 - RNA, 24 nt, Human
cuccagccuggcgacagagcgaga

SEQ ID NO: 458634 - RNA, 19 nt, Human
cuccuucagcuccaacucc

SEQ ID NO: 458635 - RNA, 18 nt, Human
cugacccuaagacagccc

SEQ ID NO: 458636 - RNA, 25 nt, Human
cugacccuaagacagcccccaagaa

SEQ ID NO: 458637 - RNA, 22 nt, Human
cugugaaucuccuuuagggucu

SEQ ID NO: 458638 - RNA, 23 nt, Human
cuucccaggcucacaggcagcag

SEQ ID NO: 458639 - RNA, 20 nt, Human
cuuccuuaccucuuuucugu

SEQ ID NO: 458640 - RNA, 23 nt, Human
cuuccuuaccucuuuucugucuc

SEQ ID NO: 458641 - RNA, 21 nt, Human
cuucuacaucgcuccaugaca

SEQ ID NO: 458642 - RNA, 21 nt, Human
cuuuuucugcuccauuuccau

SEQ ID NO: 458643 - RNA, 22 nt, Human
gaauaauugaaaugaagaacag

SEQ ID NO: 458644 - RNA, 24 nt, Human
gacagagcgagacuccgucucaaa

SEQ ID NO: 458645 - RNA, 19 nt, Human
gacuuagaaggaaaaaggg

SEQ ID NO: 458646 - RNA, 23 nt, Human
gagaucgcaccacugcacuccag

SEQ ID NO: 458647 - RNA, 24 nt, Human
gagcgcgguggcucacaccuguaa

SEQ ID NO: 458648 - RNA, 23 nt, Human
gagguugcagugagccgagaucg

SEQ ID NO: 458649 - RNA, 18 nt, Human
gauuacagacgugagcca

SEQ ID NO: 458650 - RNA, 22 nt, Human
gauuacagacgugagccaccgc

SEQ ID NO: 458651 - RNA, 20 nt, Human
gcaccacugcacuccagccu

SEQ ID NO: 458652 - RNA, 23 nt, Human
gcacuccagccuggcgacagagc

SEQ ID NO: 458653 - RNA, 23 nt, Human
gcacuuugggaggccgaggcggg

SEQ ID NO: 458654 - RNA, 20 nt, Human
gcaugcuucuacaucgcucc

SEQ ID NO: 458655 - RNA, 24 nt, Human
gccaacauggugaaaccccgucuc

SEQ ID NO: 458656 - RNA, 18 nt, Human
gccaccgcgcccgaccac

SEQ ID NO: 458657 - RNA, 20 nt, Human
gccgagaucgcaccacugca

SEQ ID NO: 458658 - RNA, 22 nt, Human
gcuaaagugcuggggguaccug

SEQ ID NO: 458659 - RNA, 21 nt, Human
gcuggggguaccugcagcugc

SEQ ID NO: 458660 - RNA, 21 nt, Human
gcuugaaccgggaggcggagg

SEQ ID NO: 458661 - RNA, 20 nt, Human
ggagguugcagugagccgag

SEQ ID NO: 458662 - RNA, 22 nt, Human
ggagguugcagugagccgagau

SEQ ID NO: 458663 - RNA, 24 nt, Human
ggagguugcagugagccgagaucg

SEQ ID NO: 458664 - RNA, 19 nt, Human
ggauuaaaacccagagcuc

SEQ ID NO: 458665 - RNA, 18 nt, Human
ggcagaucacgaggucaa

SEQ ID NO: 458666 - RNA, 21 nt, Human
ggccgagcgcgguggcucaca

SEQ ID NO: 458667 - RNA, 18 nt, Human
gggaauucuucauccugc

SEQ ID NO: 458668 - RNA, 21 nt, Human
gggccgaagcagugccagaaa

SEQ ID NO: 458669 - RNA, 25 nt, Human
gggcgugguggcgugcgccgguagu

SEQ ID NO: 458670 - RNA, 22 nt, Human
gggucuucaggaucuucagaag

SEQ ID NO: 458671 - RNA, 24 nt, Human
ggucuuuuucugcuccauuuccau

SEQ ID NO: 458672 - RNA, 20 nt, Human
gguggcucacaccuguaauc

SEQ ID NO: 458673 - RNA, 24 nt, Human
gguggcucacaccuguaaucucgg

SEQ ID NO: 458674 - RNA, 21 nt, Human
guaaguuccuuuugcaugcuu

SEQ ID NO: 458675 - RNA, 24 nt, Human
guucuggugcuucugcaaucuccc

SEQ ID NO: 458676 - RNA, 19 nt, Human
guugcagugagccgagauc

SEQ ID NO: 458677 - RNA, 23 nt, Human
uaaaaauacaaaacaauuagcug

SEQ ID NO: 458678 - RNA, 27 nt, Human
uaagacagcccccaagaagaaaagauc

SEQ ID NO: 458679 - RNA, 21 nt, Human
uaagacagcccccaagaaggg

SEQ ID NO: 458680 - RNA, 21 nt, Human
uaagccucuuccauccaaggu

SEQ ID NO: 458681 - RNA, 24 nt, Human
uaaugagcugacucuccuggcucc

SEQ ID NO: 458682 - RNA, 23 nt, Human
uacagacgugagccaccgcgccc

SEQ ID NO: 458683 - RNA, 18 nt, Human
uagaagcagauuaccugc

SEQ ID NO: 458684 - RNA, 19 nt, Human
uagggucaugcaaaggaca

SEQ ID NO: 458685 - RNA, 23 nt, Human
uaucccauacaaaaugacccuac

SEQ ID NO: 458686 - RNA, 24 nt, Human
ucacgaggucaagagaucgagacc

SEQ ID NO: 458687 - RNA, 21 nt, Human
ucaggaucuucagaagugcca

SEQ ID NO: 458688 - RNA, 21 nt, Human
uccacccaacaucugucuuuu

SEQ ID NO: 458689 - RNA, 22 nt, Human
uccagccuggcgacagagcgag

SEQ ID NO: 458690 - RNA, 19 nt, Human
ucccacugagaagugaaga

SEQ ID NO: 458691 - RNA, 22 nt, Human
ucccuccaguuagacaggagga

SEQ ID NO: 458692 - RNA, 21 nt, Human
ucccuccugagccauggagau

SEQ ID NO: 458693 - RNA, 23 nt, Human
ucgcaccacugcacuccagccug

SEQ ID NO: 458694 - RNA, 21 nt, Human
ucgcagguuuuuccguagccu

SEQ ID NO: 458695 - RNA, 18 nt, Human
ucggccuuccaaagugcu

SEQ ID NO: 458696 - RNA, 19 nt, Human
ucuacagcuaaaguaggau

SEQ ID NO: 458697 - RNA, 20 nt, Human
ucuacagcuaaaguaggauu

SEQ ID NO: 458698 - RNA, 25 nt, Human
ucucaaaaaacaaaaaacaaaaaaa

SEQ ID NO: 458699 - RNA, 20 nt, Human
ucucuacuaaaaauacaaaa

SEQ ID NO: 458700 - RNA, 25 nt, Human
ucucuuaccuucaccacuugcuaga

SEQ ID NO: 458701 - RNA, 19 nt, Human
ucucuugccuccuauacag

SEQ ID NO: 458702 - RNA, 18 nt, Human
ugaaaguagggucaugca

SEQ ID NO: 458703 - RNA, 18 nt, Human
ugaagaacaguaauugag

SEQ ID NO: 458704 - RNA, 20 nt, Human
ugaauaguagguaagaauaa

SEQ ID NO: 458705 - RNA, 22 nt, Human
ugacccuaagacagcccccaag

SEQ ID NO: 458706 - RNA, 22 nt, Human
ugagccgagaucgcaccacugc

SEQ ID NO: 458707 - RNA, 21 nt, Human
ugagcugacucuccuggcucc

SEQ ID NO: 458708 - RNA, 20 nt, Human
ugaggcagaagaauggcuuc

SEQ ID NO: 458709 - RNA, 24 nt, Human
ugaggcagaagaauggcuugaacc

SEQ ID NO: 458710 - RNA, 21 nt, Human
ugaugaagggccgaagcagug

SEQ ID NO: 458711 - RNA, 22 nt, Human
ugcauaucccauacaaaaugac

SEQ ID NO: 458712 - RNA, 23 nt, Human
ugccagaaaugcuuucacauacc

SEQ ID NO: 458713 - RNA, 24 nt, Human
ugcugggauuacagacgugagcca

SEQ ID NO: 458714 - RNA, 21 nt, Human
ugcuggggguaccugcagcug

SEQ ID NO: 458715 - RNA, 24 nt, Human
uggccaacauggugaaaccccguc

SEQ ID NO: 458716 - RNA, 24 nt, Human
uggccgagcgcgguggcucacacc

SEQ ID NO: 458717 - RNA, 24 nt, Human
uggcgugcgccgguagucucagcu

SEQ ID NO: 458718 - RNA, 24 nt, Human
uggcucacaccuguaaucucggca

SEQ ID NO: 458719 - RNA, 19 nt, Human
ugggaggccgaggcgggca

SEQ ID NO: 458720 - RNA, 20 nt, Human
ugggaggccgaggcgggcag

SEQ ID NO: 458721 - RNA, 24 nt, Human
ugggaggccgaggcgggcagauca

SEQ ID NO: 458722 - RNA, 18 nt, Human
ugggauuacagacgugag

SEQ ID NO: 458723 - RNA, 19 nt, Human
ugggauuacagacgugagc

SEQ ID NO: 458724 - RNA, 21 nt, Human
ugggauuacagacgugagcca

SEQ ID NO: 458725 - RNA, 22 nt, Human
ugggauuacagacgugagccac

SEQ ID NO: 458726 - RNA, 23 nt, Human
ugggauuacagacgugagccacc

SEQ ID NO: 458727 - RNA, 24 nt, Human
ugggauuacagacgugagccaccg

SEQ ID NO: 458728 - RNA, 19 nt, Human
ugucagguaagccucuucc

SEQ ID NO: 458729 - RNA, 19 nt, Human
ugucucagggcugcuccua

SEQ ID NO: 458730 - RNA, 22 nt, Human
uuaaugagcugacucuccuggc

SEQ ID NO: 458731 - RNA, 19 nt, Human
uuagcugggcgugguggcg

SEQ ID NO: 458732 - RNA, 20 nt, Human
uuagcugggcgugguggcgu

SEQ ID NO: 458733 - RNA, 22 nt, Human
uuagcugggcgugguggcgugc

SEQ ID NO: 458734 - RNA, 24 nt, Human
uucagaagugccagccuccucagg

SEQ ID NO: 458735 - RNA, 24 nt, Human
uucuggugcuucugcaaucucccu

SEQ ID NO: 458736 - RNA, 23 nt, Human
uugaaccgggaggcggagguugc

SEQ ID NO: 458737 - RNA, 20 nt, Human
uugcagugagccgagaucgc

SEQ ID NO: 458738 - RNA, 22 nt, Human
uugcagugagccgagaucgcac

SEQ ID NO: 458739 - RNA, 19 nt, Human
uuggaacugaugaagggcc

SEQ ID NO: 458740 - RNA, 25 nt, Human
uugggaggccgaggcgggcagauca

SEQ ID NO: 458741 - RNA, 23 nt, Human
uuuccguagccucggccuuccaa

SEQ ID NO: 458742 - RNA, 24 nt, Human
uuuugcaugcuucuacaucgcucc

SEQ ID NO: 458743 - RNA, 22 nt, Human
uuuuuuuuuuuuaaaugucuca

SEQ ID NO: 458744 - RNA, 23 nt, Human
uuuuuuuuuuuuuuuuuuaaaug

SEQ ID NO: 458745 - RNA, 24 nt, Human
aaacaggagcugaaagggccagaa

SEQ ID NO: 458746 - RNA, 20 nt, Human
agccuagagcucaggaaccg

SEQ ID NO: 458747 - RNA, 24 nt, Human
agggcacgaugggagcgggagaca

SEQ ID NO: 458748 - RNA, 18 nt, Human
agggguguguggcucagc

SEQ ID NO: 458749 - RNA, 22 nt, Human
cagcagcggccucccauagugc

SEQ ID NO: 458750 - RNA, 22 nt, Human
cagccuagagcucaggaaccag

SEQ ID NO: 458751 - RNA, 22 nt, Human
caggacagauccugaaacagga

SEQ ID NO: 458752 - RNA, 24 nt, Human
caucccaaugccagaccuuccucc

SEQ ID NO: 458753 - RNA, 24 nt, Human
ccuaccucuucucucuucccucca

SEQ ID NO: 458754 - RNA, 20 nt, Human
ccuuucuuccuaccucuucu

SEQ ID NO: 458755 - RNA, 23 nt, Human
cuaccucuucucucuucccucca

SEQ ID NO: 458756 - RNA, 22 nt, Human
cugaaacaggagcugaaagggc

SEQ ID NO: 458757 - RNA, 21 nt, Human
cugaaagggccagaacuggca

SEQ ID NO: 458758 - RNA, 18 nt, Human
cuuccuaccucuucucuc

SEQ ID NO: 458759 - RNA, 19 nt, Human
cuugcagaaaaguggggca

SEQ ID NO: 458760 - RNA, 21 nt, Human
gacuuuaagugcuccacgcag

SEQ ID NO: 458761 - RNA, 20 nt, Human
gagcucaggaaccaggacag

SEQ ID NO: 458762 - RNA, 20 nt, Human
gaggggcauccgguccugga

SEQ ID NO: 458763 - RNA, 18 nt, Human
gccuagagcucaggaacc

SEQ ID NO: 458764 - RNA, 19 nt, Human
guauguccccagggcggca

SEQ ID NO: 458765 - RNA, 21 nt, Human
uaccucuucucucuucccucc

SEQ ID NO: 458766 - RNA, 27 nt, Human
uaccucuucucucuucccuccaccaga

SEQ ID NO: 458767 - RNA, 18 nt, Human
uagcagccuagagcucag

SEQ ID NO: 458768 - RNA, 23 nt, Human
uagugcacaaugguggaaggagg

SEQ ID NO: 458769 - RNA, 20 nt, Human
uccugaaacaggagcugaaa

SEQ ID NO: 458770 - RNA, 18 nt, Human
ucucucuucccuccacca

SEQ ID NO: 458771 - RNA, 19 nt, Human
ucuuccuaccucuucucuc

SEQ ID NO: 458772 - RNA, 21 nt, Human
aaacaaaugcaaaaacuacuu

SEQ ID NO: 458773 - RNA, 18 nt, Human
aaacccuaauuccuaccc

SEQ ID NO: 458774 - RNA, 18 nt, Human
aaagcagggccgagcgga

SEQ ID NO: 458775 - RNA, 19 nt, Human
aacagcacugcuccaucag

SEQ ID NO: 458776 - RNA, 20 nt, Human
aaccaguacagcagugaaca

SEQ ID NO: 458777 - RNA, 24 nt, Human
aagaagaugcaucauucaauaaac

SEQ ID NO: 458778 - RNA, 22 nt, Human
acaaaauuaaccuaauuuacag

SEQ ID NO: 458779 - RNA, 23 nt, Human
acggccaggucgcaaaaagcagg

SEQ ID NO: 458780 - RNA, 19 nt, Human
agcggagcccgcuccccuc

SEQ ID NO: 458781 - RNA, 21 nt, Human
agcggagcccgcuccccucgg

SEQ ID NO: 458782 - RNA, 23 nt, Human
agcuauuaaagagcuaaauucaa

SEQ ID NO: 458783 - RNA, 21 nt, Human
auaaacaaaugcaaaaacuac

SEQ ID NO: 458784 - RNA, 24 nt, Human
augucccauauauacauauauaca

SEQ ID NO: 458785 - RNA, 20 nt, Human
caaaacagcacaauaugaug

SEQ ID NO: 458786 - RNA, 21 nt, Human
caagaaauuugcaaaccagua

SEQ ID NO: 458787 - RNA, 20 nt, Human
caggaaauguauuuaaccau

SEQ ID NO: 458788 - RNA, 23 nt, Human
caggucgcaaaaagcagggccga

SEQ ID NO: 458789 - RNA, 25 nt, Human
cagguuacauaaaaauaugggccaa

SEQ ID NO: 458790 - RNA, 21 nt, Human
cauacaaacuugaauaaacac

SEQ ID NO: 458791 - RNA, 23 nt, Human
ccagaaguguucugauaaaccaa

SEQ ID NO: 458792 - RNA, 23 nt, Human
ccauuuaugcauauaaauauuuc

SEQ ID NO: 458793 - RNA, 23 nt, Human
cccauagugagaguuuaaaaagc

SEQ ID NO: 458794 - RNA, 18 nt, Human
ccccggaggaagccuugg

SEQ ID NO: 458795 - RNA, 20 nt, Human
cccggcccaaucccccggcc

SEQ ID NO: 458796 - RNA, 27 nt, Human
cccucuuaaauccucuaguucuaagaa

SEQ ID NO: 458797 - RNA, 21 nt, Human
ccggcccaaucccccggccgc

SEQ ID NO: 458798 - RNA, 23 nt, Human
ccggcccaaucccccggccgcag

SEQ ID NO: 458799 - RNA, 20 nt, Human
ccucguccucuucgccccuc

SEQ ID NO: 458800 - RNA, 22 nt, Human
ccucguccucuucgccccucca

SEQ ID NO: 458801 - RNA, 21 nt, Human
cgcuugcaucuguacuugcug

SEQ ID NO: 458802 - RNA, 25 nt, Human
cggccaggucgcaaaaagcagggcc

SEQ ID NO: 458803 - RNA, 19 nt, Human
cuuuagaaaaucguggucu

SEQ ID NO: 458804 - RNA, 22 nt, Human
gccaaauuaaacacguaucuaa

SEQ ID NO: 458805 - RNA, 18 nt, Human
gccuuggcccccucgucc

SEQ ID NO: 458806 - RNA, 21 nt, Human
ggcauuuuucuucgaguuguu

SEQ ID NO: 458807 - RNA, 22 nt, Human
ggcgguggagaccccggcccaa

SEQ ID NO: 458808 - RNA, 24 nt, Human
ggucaaacaacuaccgaguucaaa

SEQ ID NO: 458809 - RNA, 21 nt, Human
guccccggaggaagccuuggc

SEQ ID NO: 458810 - RNA, 23 nt, Human
uaaaaagcagccccuguuuucua

SEQ ID NO: 458811 - RNA, 22 nt, Human
uaacaaacguguuauccaaaac

SEQ ID NO: 458812 - RNA, 25 nt, Human
uaaguucuugaucaacuuguuuuaa

SEQ ID NO: 458813 - RNA, 24 nt, Human
uaauuccuacccucuuaaauccuc

SEQ ID NO: 458814 - RNA, 22 nt, Human
uacacauuaaaaaauauugcuc

SEQ ID NO: 458815 - RNA, 20 nt, Human
uacauauauacaaacccuaa

SEQ ID NO: 458816 - RNA, 20 nt, Human
uauuaaagagcuaaauucaa

SEQ ID NO: 458817 - RNA, 21 nt, Human
uauugucaaacaugauuucau

SEQ ID NO: 458818 - RNA, 19 nt, Human
ucagucuuguuuggacuag

SEQ ID NO: 458819 - RNA, 22 nt, Human
uccccggaggaagccuuggccc

SEQ ID NO: 458820 - RNA, 23 nt, Human
uccccucggucggcgguggagac

SEQ ID NO: 458821 - RNA, 23 nt, Human
ucccuuguauaauacaaaaguug

SEQ ID NO: 458822 - RNA, 29 nt, Human
uccuacccucuuaaauccucuaguucuaa

SEQ ID NO: 458823 - RNA, 18 nt, Human
ugagaaaaaaaccuuggg

SEQ ID NO: 458824 - RNA, 19 nt, Human
ugcauauaaauauuucacc

SEQ ID NO: 458825 - RNA, 23 nt, Human
uggaaguauuuugguaaagugcc

SEQ ID NO: 458826 - RNA, 22 nt, Human
uguaacagccagaaguguucug

SEQ ID NO: 458827 - RNA, 20 nt, Human
uucaaugucaacuacaaacu

SEQ ID NO: 458828 - RNA, 23 nt, Human
uuccauggggacaaguucugcua

SEQ ID NO: 458829 - RNA, 26 nt, Human
uuccauggggacaaguucugcuaguu

SEQ ID NO: 458830 - RNA, 19 nt, Human
uucugcuaguucugccaaa

SEQ ID NO: 458831 - RNA, 21 nt, Human
uugaauaaacaccacaucuaa

SEQ ID NO: 458832 - RNA, 23 nt, Human
uuuaaccaucuguugccuuauga

SEQ ID NO: 458833 - RNA, 18 nt, Human
aaaggucugaagccaacg

SEQ ID NO: 458834 - RNA, 21 nt, Human
aaaggucugaagccaacgucc

SEQ ID NO: 458835 - RNA, 23 nt, Human
gguguaucacaaaggucugaagc

SEQ ID NO: 458836 - RNA, 22 nt, Human
ucccuggcaacacuuucuucua

SEQ ID NO: 458837 - RNA, 23 nt, Human
aaaagaaggcuagccagcgagaa

SEQ ID NO: 458838 - RNA, 22 nt, Human
aacagcugaaaaagcaaauuuc

SEQ ID NO: 458839 - RNA, 20 nt, Human
aaggaucauuggacaagaaa

SEQ ID NO: 458840 - RNA, 21 nt, Human
acccccuccccaccaaagugc

SEQ ID NO: 458841 - RNA, 18 nt, Human
accccgccgcuggccucg

SEQ ID NO: 458842 - RNA, 20 nt, Human
agcagcaguggcgggaagcc

SEQ ID NO: 458843 - RNA, 22 nt, Human
agcgagaaauuuugccccacaa

SEQ ID NO: 458844 - RNA, 20 nt, Human
aggcuagccagcgagaaauu

SEQ ID NO: 458845 - RNA, 19 nt, Human
caacggcagcgaccccgcc

SEQ ID NO: 458846 - RNA, 18 nt, Human
cacccccuccccaccaaa

SEQ ID NO: 458847 - RNA, 24 nt, Human
caccgaaacgaggauccacccccu

SEQ ID NO: 458848 - RNA, 22 nt, Human
cacgcaaggaucauuggacaag

SEQ ID NO: 458849 - RNA, 19 nt, Human
cagcagcaguggcgggaag

SEQ ID NO: 458850 - RNA, 22 nt, Human
cagcagcaguggcgggaagccu

SEQ ID NO: 458851 - RNA, 21 nt, Human
cagcugaaaaagcaaauuuca

SEQ ID NO: 458852 - RNA, 18 nt, Human
cauuggacaagaaaucag

SEQ ID NO: 458853 - RNA, 20 nt, Human
cauuggacaagaaaucaguu

SEQ ID NO: 458854 - RNA, 19 nt, Human
ccacccccuccccaccaaa

SEQ ID NO: 458855 - RNA, 19 nt, Human
ccacccccuccccaccaaa

SEQ ID NO: 458856 - RNA, 22 nt, Human
cccaccaaagugcgggagggaa

SEQ ID NO: 458857 - RNA, 19 nt, Human
ccccacaaauccgccagca

SEQ ID NO: 458858 - RNA, 19 nt, Human
ccgcggcgacaacuuccuc

SEQ ID NO: 458859 - RNA, 19 nt, Human
ccucaacggcagcgacccu

SEQ ID NO: 458860 - RNA, 21 nt, Human
ccucgugcgcagcuggucccc

SEQ ID NO: 458861 - RNA, 24 nt, Human
cgccagcagcaguggcgggaagcc

SEQ ID NO: 458862 - RNA, 22 nt, Human
cggcagcgaccccgccgcuggc

SEQ ID NO: 458863 - RNA, 19 nt, Human
cuggaauagagcugcccaa

SEQ ID NO: 458864 - RNA, 19 nt, Human
gcgggagggaaaagaaggc

SEQ ID NO: 458865 - RNA, 21 nt, Human
ggaucauuggacaagaaauca

SEQ ID NO: 458866 - RNA, 22 nt, Human
uaacuaacacuaaguuucacaa

SEQ ID NO: 458867 - RNA, 22 nt, Human
uaaguuucacaacgggcagcuu

SEQ ID NO: 458868 - RNA, 22 nt, Human
uagaaaaggucauuacaguuag

SEQ ID NO: 458869 - RNA, 22 nt, Human
uagguuagcacauaaaaaacca

SEQ ID NO: 458870 - RNA, 24 nt, Human
uagguuagcacauaaaaaaccaac

SEQ ID NO: 458871 - RNA, 19 nt, Human
uccccaccaaagugcggga

SEQ ID NO: 458872 - RNA, 20 nt, Human
ucccccuccaaggccagcaa

SEQ ID NO: 458873 - RNA, 19 nt, Human
ucgcagucacugccucggc

SEQ ID NO: 458874 - RNA, 24 nt, Human
ucguugaagcuggaucucggccac

SEQ ID NO: 458875 - RNA, 24 nt, Human
ugccucggcgcuccucccccucca

SEQ ID NO: 458876 - RNA, 22 nt, Human
uggaauggauaaaacauguugu

SEQ ID NO: 458877 - RNA, 18 nt, Human
aaaaaagacuacgaauau

SEQ ID NO: 458878 - RNA, 22 nt, Human
aaauagccagaaaaauaucaga

SEQ ID NO: 458879 - RNA, 19 nt, Human
aaauuggccacaccucuga

SEQ ID NO: 458880 - RNA, 19 nt, Human
aacaagaccuaagugucag

SEQ ID NO: 458881 - RNA, 26 nt, Human
aacaagaccuaagugucagauacaag

SEQ ID NO: 458882 - RNA, 25 nt, Human
aacacagccccuucuucaaaacucc

SEQ ID NO: 458883 - RNA, 20 nt, Human
aacagccuuccaggagaucg

SEQ ID NO: 458884 - RNA, 21 nt, Human
aacuauacaacuaaaaaaaac

SEQ ID NO: 458885 - RNA, 21 nt, Human
aacuccaggaaaugucaauau

SEQ ID NO: 458886 - RNA, 20 nt, Human
aagaaaaaggaccagcgaag

SEQ ID NO: 458887 - RNA, 23 nt, Human
acaaaaccaacuccaggaaaugu

SEQ ID NO: 458888 - RNA, 18 nt, Human
accaaccacacaguauca

SEQ ID NO: 458889 - RNA, 20 nt, Human
agaaaaaggaccagcgaagg

SEQ ID NO: 458890 - RNA, 18 nt, Human
agaccacaggugagacca

SEQ ID NO: 458891 - RNA, 21 nt, Human
agacuuuuuuucccuggacuu

SEQ ID NO: 458892 - RNA, 20 nt, Human
agcccccaagggccaauucu

SEQ ID NO: 458893 - RNA, 26 nt, Human
agccuacguggcccaaacacagcccc

SEQ ID NO: 458894 - RNA, 23 nt, Human
aggacaaaaccaacuccaggaaa

SEQ ID NO: 458895 - RNA, 19 nt, Human
aggaccagcgaaggaaccu

SEQ ID NO: 458896 - RNA, 24 nt, Human
aggaccagcgaaggaaccugagaa

SEQ ID NO: 458897 - RNA, 20 nt, Human
aggagcacagacacagaaca

SEQ ID NO: 458898 - RNA, 21 nt, Human
aggaggagcacagacacagaa

SEQ ID NO: 458899 - RNA, 20 nt, Human
aggcagagauaacaaacgug

SEQ ID NO: 458900 - RNA, 19 nt, Human
agguauguguguuuccaag

SEQ ID NO: 458901 - RNA, 21 nt, Human
agugaaggagugggaguggaa

SEQ ID NO: 458902 - RNA, 24 nt, Human
agugaugauugacaucgaaaggcc

SEQ ID NO: 458903 - RNA, 20 nt, Human
auagauggagcaaagucugg

SEQ ID NO: 458904 - RNA, 18 nt, Human
auccaagaguucucagca

SEQ ID NO: 458905 - RNA, 22 nt, Human
auggagcaaagucuggggguca

SEQ ID NO: 458906 - RNA, 20 nt, Human
caaccacacaguaucacaua

SEQ ID NO: 458907 - RNA, 21 nt, Human
caaugacaaagaagggaaaaa

SEQ ID NO: 458908 - RNA, 22 nt, Human
cacaccaaccacacaguaucac

SEQ ID NO: 458909 - RNA, 19 nt, Human
cacagccccuucuucaaaa

SEQ ID NO: 458910 - RNA, 20 nt, Human
cacauguaaccaaauaaagc

SEQ ID NO: 458911 - RNA, 21 nt, Human
cacauguaaccaaauaaagcc

SEQ ID NO: 458912 - RNA, 18 nt, Human
caccaaccacacaguauc

SEQ ID NO: 458913 - RNA, 31 nt, Human
caccagacacauucccuccucugcacccuuc

SEQ ID NO: 458914 - RNA, 20 nt, Human
cacccaggcacauguaaccu

SEQ ID NO: 458915 - RNA, 23 nt, Human
caccugcacagaugggugagcag

SEQ ID NO: 458916 - RNA, 19 nt, Human
cagaaaaagaaacucaaca

SEQ ID NO: 458917 - RNA, 19 nt, Human
cagggcaugacagaaaaag

SEQ ID NO: 458918 - RNA, 22 nt, Human
caggggaagggauccagaguac

SEQ ID NO: 458919 - RNA, 20 nt, Human
caguagauaacaggauaaca

SEQ ID NO: 458920 - RNA, 18 nt, Human
cauagaaacucaaaauac

SEQ ID NO: 458921 - RNA, 20 nt, Human
caugacagaaaaagaaacuc

SEQ ID NO: 458922 - RNA, 21 nt, Human
ccaaauaaagcccccaagggc

SEQ ID NO: 458923 - RNA, 20 nt, Human
ccagaguacauuccaaaggg

SEQ ID NO: 458924 - RNA, 23 nt, Human
ccaggaaaugucaauaugucagg

SEQ ID NO: 458925 - RNA, 20 nt, Human
cccagagacaccugcacaga

SEQ ID NO: 458926 - RNA, 23 nt, Human
cccaugauagagucuaagcuggu

SEQ ID NO: 458927 - RNA, 19 nt, Human
cccuccuccauauaguuua

SEQ ID NO: 458928 - RNA, 23 nt, Human
ccugugaugugggggcuugaaag

SEQ ID NO: 458929 - RNA, 23 nt, Human
cugcuacccucaacucagauguc

SEQ ID NO: 458930 - RNA, 22 nt, Human
cuucuucaaaacuccacaccaa

SEQ ID NO: 458931 - RNA, 22 nt, Human
gaaaaagaaacucaacaaggga

SEQ ID NO: 458932 - RNA, 21 nt, Human
gaaugaaucaaggacaaaacc

SEQ ID NO: 458933 - RNA, 19 nt, Human
gacuuuuuuucccuggacu

SEQ ID NO: 458934 - RNA, 19 nt, Human
gagcacagacacagaacac

SEQ ID NO: 458935 - RNA, 19 nt, Human
gagggacacagcaggucau

SEQ ID NO: 458936 - RNA, 21 nt, Human
gaguagagccuacguggccca

SEQ ID NO: 458937 - RNA, 18 nt, Human
gauaacaaugacaaagaa

SEQ ID NO: 458938 - RNA, 23 nt, Human
gauaacaaugacaaagaagggaa

SEQ ID NO: 458939 - RNA, 19 nt, Human
gcacacacacacaucacac

SEQ ID NO: 458940 - RNA, 18 nt, Human
gcagccccagagacaccu

SEQ ID NO: 458941 - RNA, 20 nt, Human
gccacaccucugaacagggu

SEQ ID NO: 458942 - RNA, 19 nt, Human
gcucugaggucaaugguag

SEQ ID NO: 458943 - RNA, 18 nt, Human
ggaaaucacaacagccuu

SEQ ID NO: 458944 - RNA, 23 nt, Human
ggaaggaggagcacagacacaga

SEQ ID NO: 458945 - RNA, 20 nt, Human
ggaagggauccagaguacau

SEQ ID NO: 458946 - RNA, 21 nt, Human
ggaagugggucaccaaaauca

SEQ ID NO: 458947 - RNA, 21 nt, Human
ggagaagcuaacauuuaggca

SEQ ID NO: 458948 - RNA, 19 nt, Human
ggggaaaugaccaggggcu

SEQ ID NO: 458949 - RNA, 22 nt, Human
gguaauaagggugauagaggga

SEQ ID NO: 458950 - RNA, 21 nt, Human
gucaaugguaguccuggguug

SEQ ID NO: 458951 - RNA, 24 nt, Human
uaaauguuucucuacauuuugcuu

SEQ ID NO: 458952 - RNA, 21 nt, Human
uaacaaugacaaagaagggaa

SEQ ID NO: 458953 - RNA, 26 nt, Human
uaaccaaauaaagcccccaagggcca

SEQ ID NO: 458954 - RNA, 25 nt, Human
uaagcugguaaagaccacccaggca

SEQ ID NO: 458955 - RNA, 27 nt, Human
uacugcagaccacaggugagaccagca

SEQ ID NO: 458956 - RNA, 20 nt, Human
uagagccuacguggcccaaa

SEQ ID NO: 458957 - RNA, 21 nt, Human
uagauggaaaucacaacagcc

SEQ ID NO: 458958 - RNA, 18 nt, Human
uaggcagagauaacaaac

SEQ ID NO: 458959 - RNA, 23 nt, Human
uauucaacacacauuuacugagc

SEQ ID NO: 458960 - RNA, 18 nt, Human
ucagccaauugugucuac

SEQ ID NO: 458961 - RNA, 24 nt, Human
ucagccaauugugucuacugcaga

SEQ ID NO: 458962 - RNA, 18 nt, Human
ucccucucuguguguucu

SEQ ID NO: 458963 - RNA, 26 nt, Human
ucugaacagggucuaacccaggucag

SEQ ID NO: 458964 - RNA, 23 nt, Human
ucuuguaaaaccuuccagaaagg

SEQ ID NO: 458965 - RNA, 25 nt, Human
ucuuucgacauaugcaccauucuga

SEQ ID NO: 458966 - RNA, 22 nt, Human
ugaacagggucuaacccaggug

SEQ ID NO: 458967 - RNA, 19 nt, Human
ugaagaaaggcagaugaua

SEQ ID NO: 458968 - RNA, 21 nt, Human
ugaaucaaggacaaaaccaac

SEQ ID NO: 458969 - RNA, 23 nt, Human
ugacagaaaaagaaacucaacaa

SEQ ID NO: 458970 - RNA, 20 nt, Human
ugagaagagcagaagccccc

SEQ ID NO: 458971 - RNA, 20 nt, Human
ugagaaggccagugggguga

SEQ ID NO: 458972 - RNA, 19 nt, Human
ugagaauggagcuucaugg

SEQ ID NO: 458973 - RNA, 20 nt, Human
ugagaauggagcuucauggg

SEQ ID NO: 458974 - RNA, 22 nt, Human
ugagagggaaggaggagcacag

SEQ ID NO: 458975 - RNA, 22 nt, Human
ugagcagccaccugagacucca

SEQ ID NO: 458976 - RNA, 18 nt, Human
ugcacacacacacaucac

SEQ ID NO: 458977 - RNA, 18 nt, Human
ugcaccugagaaggccag

SEQ ID NO: 458978 - RNA, 23 nt, Human
uggagcaaagucugggggucaaa

SEQ ID NO: 458979 - RNA, 23 nt, Human
uggcugggagugaugauugacau

SEQ ID NO: 458980 - RNA, 21 nt, Human
ugguaaagaccacccaggcac

SEQ ID NO: 458981 - RNA, 24 nt, Human
uggugagaaauuuggggucucagu

SEQ ID NO: 458982 - RNA, 21 nt, Human
uguaaccaaauaaagccccca

SEQ ID NO: 458983 - RNA, 22 nt, Human
uguacaagaauccagauucaaa

SEQ ID NO: 458984 - RNA, 21 nt, Human
uguuuccaagauucucucuca

SEQ ID NO: 458985 - RNA, 19 nt, Human
uuagugaaggagugggagu

SEQ ID NO: 458986 - RNA, 20 nt, Human
uucaaaacuccacaccaacc

SEQ ID NO: 458987 - RNA, 22 nt, Human
uugaaaauauuuuuuaaauccu

SEQ ID NO: 458988 - RNA, 19 nt, Human
uuucaugguucuuuugccu

SEQ ID NO: 458989 - RNA, 18 nt, Human
uuucuggugagaagagca

SEQ ID NO: 458990 - RNA, 18 nt, Human
ccaccccagccccaggca

SEQ ID NO: 458991 - RNA, 22 nt, Human
ccacccgcacagcccucgugcc

SEQ ID NO: 458992 - RNA, 20 nt, Human
ccagccccaggcaggcagaa

SEQ ID NO: 458993 - RNA, 19 nt, Human
cccaccgcgcgccggccgc

SEQ ID NO: 458994 - RNA, 20 nt, Human
ugacuucagcacgaccaccc

SEQ ID NO: 458995 - RNA, 21 nt, Human
uuuuuuuuuuuugcacagggu

SEQ ID NO: 458996 - RNA, 21 nt, Human
uuuuuuuuuuuuuugcacagg

SEQ ID NO: 458997 - RNA, 23 nt, Human
uuuuuuuuuuuuuuuuugcacag

SEQ ID NO: 458998 - RNA, 25 nt, Human
uuuuuuuuuuuuuuuuugcacaggg

SEQ ID NO: 458999 - RNA, 27 nt, Human
uuuuuuuuuuuuuuuuuuuuuuugggg

SEQ ID NO: 459000 - RNA, 25 nt, Human
auggggaagucccagucuucuuguu

SEQ ID NO: 459001 - RNA, 25 nt, Human
ccacugacuguuaacaagccaccug

SEQ ID NO: 459002 - RNA, 18 nt, Human
ccccauagauugcauaga

SEQ ID NO: 459003 - RNA, 21 nt, Human
cucaugguugcugaaauugcu

SEQ ID NO: 459004 - RNA, 19 nt, Human
gcaguauucuggcucuccu

SEQ ID NO: 459005 - RNA, 23 nt, Human
gggaagucccagucuucuuguuc

SEQ ID NO: 459006 - RNA, 23 nt, Human
ucagucuucccccauagauugca

SEQ ID NO: 459007 - RNA, 23 nt, Human
ucccagucuucuuguuccaucug

SEQ ID NO: 459008 - RNA, 21 nt, Human
ucuuucaaauucccacugacu

SEQ ID NO: 459009 - RNA, 23 nt, Human
ugacuguuaacaagccaccuggu

SEQ ID NO: 459010 - RNA, 20 nt, Human
uggggccagaaacucauggu

SEQ ID NO: 459011 - RNA, 23 nt, Human
aaaaaacaaaaacaaaacaaaaa

SEQ ID NO: 459012 - RNA, 24 nt, Human
aaaaaacaaaaacaaaacaaaaaa

SEQ ID NO: 459013 - RNA, 21 nt, Human
aaaaacaaaaagcagggagga

SEQ ID NO: 459014 - RNA, 20 nt, Human
aaaaagcagggaggacgagc

SEQ ID NO: 459015 - RNA, 22 nt, Human
aaaacaaaaaaacacaacaaaa

SEQ ID NO: 459016 - RNA, 23 nt, Human
aaaacaaaaaaacacaacaaaag

SEQ ID NO: 459017 - RNA, 21 nt, Human
aaaacaaaaacaaaacaaaaa

SEQ ID NO: 459018 - RNA, 28 nt, Human
aaaacaaaaacaaaacaaaaaaacacaa

SEQ ID NO: 459019 - RNA, 27 nt, Human
aaacaaaaacaaaacaaaaaaacacaa

SEQ ID NO: 459020 - RNA, 22 nt, Human
aaacaaaaagcagggaggacga

SEQ ID NO: 459021 - RNA, 23 nt, Human
aacaaaacaaaaaaacacaacaa

SEQ ID NO: 459022 - RNA, 21 nt, Human
aacagcuucaagaggguucgc

SEQ ID NO: 459023 - RNA, 22 nt, Human
aacgcaaaucuuccagaagaga

SEQ ID NO: 459024 - RNA, 24 nt, Human
aacgcagccucccucgcgccgccc

SEQ ID NO: 459025 - RNA, 19 nt, Human
aagcacagagggacccugg

SEQ ID NO: 459026 - RNA, 19 nt, Human
aaggcaaaaaacaaaaaca

SEQ ID NO: 459027 - RNA, 24 nt, Human
acaaaacaaaaaaacacaacaaaa

SEQ ID NO: 459028 - RNA, 18 nt, Human
acaaggcaaaaaacaaaa

SEQ ID NO: 459029 - RNA, 20 nt, Human
acaaggcaaaaaacaaaaac

SEQ ID NO: 459030 - RNA, 23 nt, Human
acaaggcaaaaaacaaaaacaaa

SEQ ID NO: 459031 - RNA, 25 nt, Human
acaaggcaaaaaacaaaaacaaaac

SEQ ID NO: 459032 - RNA, 26 nt, Human
acaaggcaaaaaacaaaaacaaaaca

SEQ ID NO: 459033 - RNA, 18 nt, Human
acgcagccucccucgcgc

SEQ ID NO: 459034 - RNA, 19 nt, Human
acugaggggacaaagagga

SEQ ID NO: 459035 - RNA, 19 nt, Human
agaaagcgcgcagagaggc

SEQ ID NO: 459036 - RNA, 21 nt, Human
agagaggcagcuucaggccag

SEQ ID NO: 459037 - RNA, 22 nt, Human
agagaggcagcuucaggccagg

SEQ ID NO: 459038 - RNA, 20 nt, Human
agcagggaggacgagccguc

SEQ ID NO: 459039 - RNA, 19 nt, Human
agcgaaaaagcacagaggg

SEQ ID NO: 459040 - RNA, 18 nt, Human
aggaacacaaaauuuauu

SEQ ID NO: 459041 - RNA, 26 nt, Human
aggcaaaaaacaaaaacaaaacaaaa

SEQ ID NO: 459042 - RNA, 19 nt, Human
aggcugccccggcucccgc

SEQ ID NO: 459043 - RNA, 22 nt, Human
auacuaaagcuuuugauuuuca

SEQ ID NO: 459044 - RNA, 22 nt, Human
caaaaaacaaaaacaaaacaaa

SEQ ID NO: 459045 - RNA, 26 nt, Human
caaaaacaaaacaaaaaaacacaaca

SEQ ID NO: 459046 - RNA, 19 nt, Human
caaaaagcagggaggacga

SEQ ID NO: 459047 - RNA, 26 nt, Human
caacaagcuacaguacaaccaggucu

SEQ ID NO: 459048 - RNA, 26 nt, Human
caaggcaaaaaacaaaaacaaaacaa

SEQ ID NO: 459049 - RNA, 19 nt, Human
cacagagggacccugggcg

SEQ ID NO: 459050 - RNA, 22 nt, Human
cagaggucagggaggugagcac

SEQ ID NO: 459051 - RNA, 20 nt, Human
cagccucccucgcgccgccc

SEQ ID NO: 459052 - RNA, 21 nt, Human
cagcgugggccaggcaggcag

SEQ ID NO: 459053 - RNA, 22 nt, Human
ccacaauacuuccccgguugcc

SEQ ID NO: 459054 - RNA, 25 nt, Human
ccagcagcgugggccaggcaggcag

SEQ ID NO: 459055 - RNA, 18 nt, Human
ccaggcaggcagugaucu

SEQ ID NO: 459056 - RNA, 18 nt, Human
ccccaaacaacaagcuac

SEQ ID NO: 459057 - RNA, 18 nt, Human
cccccaaacaacaagcua

SEQ ID NO: 459058 - RNA, 24 nt, Human
cccccgccccgccuagugggcccc

SEQ ID NO: 459059 - RNA, 27 nt, Human
ccccgccccgccuagugggccccgcgg

SEQ ID NO: 459060 - RNA, 21 nt, Human
ccccuagggagcggccggcgg

SEQ ID NO: 459061 - RNA, 19 nt, Human
cccgcgcuugcuugcugga

SEQ ID NO: 459062 - RNA, 19 nt, Human
cccucgcgccgcccgcggu

SEQ ID NO: 459063 - RNA, 19 nt, Human
cccucuccuuccccuuccc

SEQ ID NO: 459064 - RNA, 20 nt, Human
cccugggcgcuggcuccaga

SEQ ID NO: 459065 - RNA, 22 nt, Human
cccuuuccgcggugaauuuggg

SEQ ID NO: 459066 - RNA, 19 nt, Human
ccgcggugaauuugggcag

SEQ ID NO: 459067 - RNA, 24 nt, Human
ccggcucccgcugggucccaaccc

SEQ ID NO: 459068 - RNA, 23 nt, Human
ccggggccggaggugcccgaagc

SEQ ID NO: 459069 - RNA, 18 nt, Human
ccggguuucacauuucuc

SEQ ID NO: 459070 - RNA, 18 nt, Human
ccggucgcaccuccgccc

SEQ ID NO: 459071 - RNA, 24 nt, Human
ccgucccagcagcgugggccaggc

SEQ ID NO: 459072 - RNA, 24 nt, Human
cgacaaggcaaaaaacaaaaacaa

SEQ ID NO: 459073 - RNA, 19 nt, Human
cgaguacaggccguggagc

SEQ ID NO: 459074 - RNA, 19 nt, Human
cgccccgggcccuuuccgc

SEQ ID NO: 459075 - RNA, 22 nt, Human
cgcugccgacgcccggucgcac

SEQ ID NO: 459076 - RNA, 18 nt, Human
cgcuggcuccagaggcgg

SEQ ID NO: 459077 - RNA, 22 nt, Human
cgcugggucccaacccccgccc

SEQ ID NO: 459078 - RNA, 21 nt, Human
cggaaagagacgagcccagua

SEQ ID NO: 459079 - RNA, 22 nt, Human
cggcucccgcugggucccaacc

SEQ ID NO: 459080 - RNA, 20 nt, Human
cggcuccgggccacaagacc

SEQ ID NO: 459081 - RNA, 21 nt, Human
cggggacauuuguuuuugauu

SEQ ID NO: 459082 - RNA, 27 nt, Human
cgucgucggcugcgaccggggccggcg

SEQ ID NO: 459083 - RNA, 19 nt, Human
cuccaggcgcuggcgcggc

SEQ ID NO: 459084 - RNA, 19 nt, Human
cuccgccccgggcccuuuc

SEQ ID NO: 459085 - RNA, 18 nt, Human
cucgcgccgcccgcggug

SEQ ID NO: 459086 - RNA, 24 nt, Human
cucgcgccgcccgcgguguaaacc

SEQ ID NO: 459087 - RNA, 21 nt, Human
cucuccuuccccuuccccuag

SEQ ID NO: 459088 - RNA, 22 nt, Human
gaaaaacaaaaagcagggagga

SEQ ID NO: 459089 - RNA, 24 nt, Human
gaaacuuccccaauugguagacga

SEQ ID NO: 459090 - RNA, 22 nt, Human
gaaagagacgagcccaguagaa

SEQ ID NO: 459091 - RNA, 21 nt, Human
gaagaugaggaauacuaaagc

SEQ ID NO: 459092 - RNA, 20 nt, Human
gacaaggcaaaaaacaaaaa

SEQ ID NO: 459093 - RNA, 22 nt, Human
gacgcuggggcuccggaaagag

SEQ ID NO: 459094 - RNA, 18 nt, Human
gaggaaacgcagccuccc

SEQ ID NO: 459095 - RNA, 23 nt, Human
gaggaauacuaaagcuuuugauu

SEQ ID NO: 459096 - RNA, 24 nt, Human
gcaaaaaacaaaaacaaaacaaaa

SEQ ID NO: 459097 - RNA, 22 nt, Human
gcagagaggcagcuucaggcca

SEQ ID NO: 459098 - RNA, 29 nt, Human
gccugucgcugcucuccccucuccuuccc

SEQ ID NO: 459099 - RNA, 23 nt, Human
ggcaaaaaacaaaaacaaaacaa

SEQ ID NO: 459100 - RNA, 23 nt, Human
ggcagcuucaggccaggggagug

SEQ ID NO: 459101 - RNA, 19 nt, Human
ggccaggcaggcagugauc

SEQ ID NO: 459102 - RNA, 23 nt, Human
ggcucccgcugggucccaacccc

SEQ ID NO: 459103 - RNA, 20 nt, Human
ggcugcgaccggggccggcg

SEQ ID NO: 459104 - RNA, 20 nt, Human
gggacaaagaggagcgacag

SEQ ID NO: 459105 - RNA, 19 nt, Human
gggaggacgagccguccca

SEQ ID NO: 459106 - RNA, 19 nt, Human
uagcaaacuccaaggccac

SEQ ID NO: 459107 - RNA, 21 nt, Human
uagcaaacuccaaggccacaa

SEQ ID NO: 459108 - RNA, 21 nt, Human
ucaggccaggggagugcaagg

SEQ ID NO: 459109 - RNA, 18 nt, Human
uccaaggccacaauacuu

SEQ ID NO: 459110 - RNA, 22 nt, Human
uccaggacuugcaucgaaagau

SEQ ID NO: 459111 - RNA, 28 nt, Human
ucccaacccccgccccgccuagugggcc

SEQ ID NO: 459112 - RNA, 20 nt, Human
ucccgcugggucccaacccc

SEQ ID NO: 459113 - RNA, 20 nt, Human
uccucgcauccgucugcacc

SEQ ID NO: 459114 - RNA, 19 nt, Human
ucgcggagcaaacacacgu

SEQ ID NO: 459115 - RNA, 25 nt, Human
ucgcugcucuccccucuccuucccc

SEQ ID NO: 459116 - RNA, 21 nt, Human
ucucaaacuucuggagacugc

SEQ ID NO: 459117 - RNA, 23 nt, Human
ucucaaacuucuggagacugcgg

SEQ ID NO: 459118 - RNA, 19 nt, Human
ucucuagaaaauuuggucc

SEQ ID NO: 459119 - RNA, 19 nt, Human
ugaggucaggcuggcggcg

SEQ ID NO: 459120 - RNA, 22 nt, Human
ugccccggcucccgcugggucc

SEQ ID NO: 459121 - RNA, 20 nt, Human
uggcgcggcaaagaguuggg

SEQ ID NO: 459122 - RNA, 19 nt, Human
uggcggcggcgucgucggc

SEQ ID NO: 459123 - RNA, 25 nt, Human
uggcuccagaggcgggcccagaggg

SEQ ID NO: 459124 - RNA, 20 nt, Human
ugggcaggagacgcuggggc

SEQ ID NO: 459125 - RNA, 22 nt, Human
ugggcaggagacgcuggggcuc

SEQ ID NO: 459126 - RNA, 18 nt, Human
uggucccccaaacaacaa

SEQ ID NO: 459127 - RNA, 23 nt, Human
uuccccuagggagcggccggcgg

SEQ ID NO: 459128 - RNA, 24 nt, Human
uugcaucgaaagauccggggacau

SEQ ID NO: 459129 - RNA, 18 nt, Human
uuugauuuuuuucuucag

SEQ ID NO: 459130 - RNA, 20 nt, Human
uuuuuuuuuuuaaaagaagg

SEQ ID NO: 459131 - RNA, 22 nt, Human
uuuuuuuuuuuuaaauacucuc

SEQ ID NO: 459132 - RNA, 20 nt, Human
aaaacucuuucccuccacuc

SEQ ID NO: 459133 - RNA, 22 nt, Human
aaaagcaacugcuucaaaggac

SEQ ID NO: 459134 - RNA, 21 nt, Human
aaaaggccaucugaauaucac

SEQ ID NO: 459135 - RNA, 25 nt, Human
aaacaggaggugccaagaggcuggg

SEQ ID NO: 459136 - RNA, 23 nt, Human
aaacccacguacugaucacuuaa

SEQ ID NO: 459137 - RNA, 22 nt, Human
aacaggccacgugccacgagca

SEQ ID NO: 459138 - RNA, 23 nt, Human
aacccacuuccccaaccucccua

SEQ ID NO: 459139 - RNA, 22 nt, Human
aacucuugccccucucaacccc

SEQ ID NO: 459140 - RNA, 20 nt, Human
aagaggaagacaagcccgaa

SEQ ID NO: 459141 - RNA, 19 nt, Human
aagaggcugggcaggggca

SEQ ID NO: 459142 - RNA, 21 nt, Human
aagcagcugugguggcagggg

SEQ ID NO: 459143 - RNA, 20 nt, Human
aauaaaggggcaagggugaa

SEQ ID NO: 459144 - RNA, 22 nt, Human
accacaaccuugagacucuuaa

SEQ ID NO: 459145 - RNA, 19 nt, Human
accccaacccacuucccca

SEQ ID NO: 459146 - RNA, 22 nt, Human
acgugccacgagcacacagcaa

SEQ ID NO: 459147 - RNA, 18 nt, Human
acugcacugggauugggc

SEQ ID NO: 459148 - RNA, 23 nt, Human
agaaaggccaggccccagcuccc

SEQ ID NO: 459149 - RNA, 19 nt, Human
agaagaaagagaggauucu

SEQ ID NO: 459150 - RNA, 21 nt, Human
agagcuggcccagaaugaguu

SEQ ID NO: 459151 - RNA, 25 nt, Human
agaguccuuugacauuuuggacccu

SEQ ID NO: 459152 - RNA, 21 nt, Human
agcaaaaaaaaaaaaaaaaaa

SEQ ID NO: 459153 - RNA, 22 nt, Human
aggaaagugugcuuggcuuuca

SEQ ID NO: 459154 - RNA, 24 nt, Human
aggaacugugcauagcaaaaaaaa

SEQ ID NO: 459155 - RNA, 21 nt, Human
aggaaggguggacacugaggu

SEQ ID NO: 459156 - RNA, 18 nt, Human
aggagggguggagagaac

SEQ ID NO: 459157 - RNA, 22 nt, Human
aggcaggaaggguggacacuga

SEQ ID NO: 459158 - RNA, 25 nt, Human
aggggcuaucaggaugucgucucgg

SEQ ID NO: 459159 - RNA, 24 nt, Human
aggugccaagaggcugggcagggg

SEQ ID NO: 459160 - RNA, 22 nt, Human
agguggcugcugccuagguugg

SEQ ID NO: 459161 - RNA, 24 nt, Human
aguaaaagcaacugcuucaaagga

SEQ ID NO: 459162 - RNA, 18 nt, Human
agucccacccacccuuuc

SEQ ID NO: 459163 - RNA, 22 nt, Human
caaaaaaaaaaaaaaaaaaaaa

SEQ ID NO: 459164 - RNA, 24 nt, Human
caaaauaaauguuugcagagaggc

SEQ ID NO: 459165 - RNA, 24 nt, Human
caacaggccacgugccacgagcac

SEQ ID NO: 459166 - RNA, 22 nt, Human
caacccacuuccccaaccuccc

SEQ ID NO: 459167 - RNA, 18 nt, Human
cacuacaugcuacauacc

SEQ ID NO: 459168 - RNA, 20 nt, Human
cacugggauugggcagggag

SEQ ID NO: 459169 - RNA, 23 nt, Human
cacuuauucaggcaacccaccuu

SEQ ID NO: 459170 - RNA, 31 nt, Human
cagagaacacaggugacuuggauucaaacaa

SEQ ID NO: 459171 - RNA, 24 nt, Human
cagcaaacaugugaagaauguuug

SEQ ID NO: 459172 - RNA, 18 nt, Human
cagcagcaggacaaggua

SEQ ID NO: 459173 - RNA, 21 nt, Human
cagcaugcagaguccuuugac

SEQ ID NO: 459174 - RNA, 20 nt, Human
cagcccggggcugcuuccag

SEQ ID NO: 459175 - RNA, 25 nt, Human
cagcccggggcugcuucccccucug

SEQ ID NO: 459176 - RNA, 24 nt, Human
cagcugguaaguggcauagcuggc

SEQ ID NO: 459177 - RNA, 20 nt, Human
cagcuugggaugguggucag

SEQ ID NO: 459178 - RNA, 19 nt, Human
caggccccagcucccagag

SEQ ID NO: 459179 - RNA, 21 nt, Human
caggccccagcucccagaggg

SEQ ID NO: 459180 - RNA, 23 nt, Human
cagggaagauccaccucaccauu

SEQ ID NO: 459181 - RNA, 19 nt, Human
caguaauuacaggcuacag

SEQ ID NO: 459182 - RNA, 18 nt, Human
ccaaggaauuuuaucacc

SEQ ID NO: 459183 - RNA, 18 nt, Human
ccaccucaccauuaccua

SEQ ID NO: 459184 - RNA, 19 nt, Human
ccaccucccgggcuaaucu

SEQ ID NO: 459185 - RNA, 23 nt, Human
ccacucucuccacagaacucuug

SEQ ID NO: 459186 - RNA, 24 nt, Human
ccauuggucagagagggaagguug

SEQ ID NO: 459187 - RNA, 20 nt, Human
cccagaaugaguuuccugga

SEQ ID NO: 459188 - RNA, 19 nt, Human
ccccaacccacuuccccaa

SEQ ID NO: 459189 - RNA, 27 nt, Human
ccccaacccacuuccccaaccucccuu

SEQ ID NO: 459190 - RNA, 18 nt, Human
cccggggcugcuuccagg

SEQ ID NO: 459191 - RNA, 22 nt, Human
ccucccgggcuaaucucaccag

SEQ ID NO: 459192 - RNA, 18 nt, Human
cgacaccaucuucacaca

SEQ ID NO: 459193 - RNA, 18 nt, Human
cgagcacacagcaacgug

SEQ ID NO: 459194 - RNA, 23 nt, Human
cuagucccacccacccuuucuca

SEQ ID NO: 459195 - RNA, 22 nt, Human
cucaccauuaccuaacaucacc

SEQ ID NO: 459196 - RNA, 23 nt, Human
cuccacagaacucuugccccucu

SEQ ID NO: 459197 - RNA, 19 nt, Human
cuccuguuucgucuguacc

SEQ ID NO: 459198 - RNA, 21 nt, Human
cucugcaauauucuuuuagcc

SEQ ID NO: 459199 - RNA, 23 nt, Human
cugcgaaaggacccaacaggcca

SEQ ID NO: 459200 - RNA, 23 nt, Human
cugcugccuagguuggccuugaa

SEQ ID NO: 459201 - RNA, 22 nt, Human
cuggcccagaaugaguuuccug

SEQ ID NO: 459202 - RNA, 22 nt, Human
cuggucacuagccauaucaaaa

SEQ ID NO: 459203 - RNA, 20 nt, Human
cuucaaaggacugcgaaagg

SEQ ID NO: 459204 - RNA, 24 nt, Human
gaaacccuccacauucauuugcuu

SEQ ID NO: 459205 - RNA, 22 nt, Human
gaaaccuucugcauuaucacag

SEQ ID NO: 459206 - RNA, 20 nt, Human
gaagaggaagacaagcccga

SEQ ID NO: 459207 - RNA, 19 nt, Human
gacaugaggcaggaagggu

SEQ ID NO: 459208 - RNA, 18 nt, Human
gagcugcugccuugagac

SEQ ID NO: 459209 - RNA, 18 nt, Human
gcacgagcuccugggcug

SEQ ID NO: 459210 - RNA, 22 nt, Human
gcagcagcaggacaagguagcu

SEQ ID NO: 459211 - RNA, 19 nt, Human
gccaaggaauuuuaucacc

SEQ ID NO: 459212 - RNA, 18 nt, Human
gccuguugacacucagcc

SEQ ID NO: 459213 - RNA, 22 nt, Human
gccuuguuuccugagaaggugg

SEQ ID NO: 459214 - RNA, 18 nt, Human
ggagagaacccaggugcu

SEQ ID NO: 459215 - RNA, 23 nt, Human
ggcaggggcacacgaagggaggg

SEQ ID NO: 459216 - RNA, 19 nt, Human
ggccccagcucccagaggg

SEQ ID NO: 459217 - RNA, 19 nt, Human
ggccucgggccuugcuuca

SEQ ID NO: 459218 - RNA, 21 nt, Human
ggcuaucaggauguggggaca

SEQ ID NO: 459219 - RNA, 23 nt, Human
gggacaguaaaagcaaccgguac

SEQ ID NO: 459220 - RNA, 21 nt, Human
gggaguccagaggaggggugg

SEQ ID NO: 459221 - RNA, 18 nt, Human
gggcaaggacuguggcug

SEQ ID NO: 459222 - RNA, 20 nt, Human
gggcagagccuagaggcccc

SEQ ID NO: 459223 - RNA, 21 nt, Human
gggcagagccuagaggcccca

SEQ ID NO: 459224 - RNA, 21 nt, Human
gggcagcagcaggacaaggua

SEQ ID NO: 459225 - RNA, 23 nt, Human
gggcagccuccauccagacucug

SEQ ID NO: 459226 - RNA, 19 nt, Human
gggcucggggaguaaacag

SEQ ID NO: 459227 - RNA, 24 nt, Human
gggggcucggggaguaaacaggag

SEQ ID NO: 459228 - RNA, 21 nt, Human
gguggcaggggcagcagcagg

SEQ ID NO: 459229 - RNA, 19 nt, Human
guaaagcauagcaaaugca

SEQ ID NO: 459230 - RNA, 20 nt, Human
guauguauauauuuauauau

SEQ ID NO: 459231 - RNA, 18 nt, Human
gucacuagccauaucaaa

SEQ ID NO: 459232 - RNA, 19 nt, Human
gucccacccacccuuucuc

SEQ ID NO: 459233 - RNA, 19 nt, Human
gugaagggcagagccuaga

SEQ ID NO: 459234 - RNA, 18 nt, Human
gugccacgagcacacagc

SEQ ID NO: 459235 - RNA, 24 nt, Human
guuuggucagcugcauuccagagg

SEQ ID NO: 459236 - RNA, 22 nt, Human
uaaaacaggggacaguaaaagc

SEQ ID NO: 459237 - RNA, 20 nt, Human
uaaaaggaaaccuucugcau

SEQ ID NO: 459238 - RNA, 24 nt, Human
uaacagcaaacaugugaagaaugu

SEQ ID NO: 459239 - RNA, 23 nt, Human
uaaccuacaacacuguuucuugg

SEQ ID NO: 459240 - RNA, 21 nt, Human
uaagauuuaaaacaaaaauuc

SEQ ID NO: 459241 - RNA, 23 nt, Human
uaagcagcugugguggcaggggc

SEQ ID NO: 459242 - RNA, 24 nt, Human
uacaaauaaaaugcccacaggaga

SEQ ID NO: 459243 - RNA, 22 nt, Human
uacaguaucauagacucugcaa

SEQ ID NO: 459244 - RNA, 19 nt, Human
uacauaccaugucuaguga

SEQ ID NO: 459245 - RNA, 21 nt, Human
uaccaugucuagugaagcucu

SEQ ID NO: 459246 - RNA, 20 nt, Human
uaccccaacccacuucccca

SEQ ID NO: 459247 - RNA, 22 nt, Human
uaccccaacccacuuccccaac

SEQ ID NO: 459248 - RNA, 25 nt, Human
uaccccaacccacuuccccaaccuc

SEQ ID NO: 459249 - RNA, 24 nt, Human
uaccccaacccacuuccccaaggu

SEQ ID NO: 459250 - RNA, 21 nt, Human
uagcacacaaaauaaauguuu

SEQ ID NO: 459251 - RNA, 19 nt, Human
uagguucuuucacuuauuc

SEQ ID NO: 459252 - RNA, 20 nt, Human
uauauauuuauauauauaua

SEQ ID NO: 459253 - RNA, 20 nt, Human
uauccagcaacauaucucca

SEQ ID NO: 459254 - RNA, 23 nt, Human
uauggaaauuuuuaugaacaguu

SEQ ID NO: 459255 - RNA, 20 nt, Human
uauguauauauuuauauaua

SEQ ID NO: 459256 - RNA, 22 nt, Human
uauguauauauuuauauauaua

SEQ ID NO: 459257 - RNA, 22 nt, Human
uauguauauauuuauauauaua

SEQ ID NO: 459258 - RNA, 23 nt, Human
ucagaggagggcuuggagaggaa

SEQ ID NO: 459259 - RNA, 21 nt, Human
ucauucacauauacaacaauc

SEQ ID NO: 459260 - RNA, 24 nt, Human
uccaaggccuuguuuccugagaag

SEQ ID NO: 459261 - RNA, 26 nt, Human
uccaccucaccauuaccuaacaucac

SEQ ID NO: 459262 - RNA, 20 nt, Human
uccacucucuccacagaacu

SEQ ID NO: 459263 - RNA, 22 nt, Human
uccagaggagggguggagagaa

SEQ ID NO: 459264 - RNA, 25 nt, Human
uccauccagacucuguguggggacc

SEQ ID NO: 459265 - RNA, 19 nt, Human
ucccagcuugggauggugg

SEQ ID NO: 459266 - RNA, 21 nt, Human
uccccaaccucccuauuauuu

SEQ ID NO: 459267 - RNA, 25 nt, Human
ucuacagucaccacaaccuugagac

SEQ ID NO: 459268 - RNA, 19 nt, Human
ucucacagaggggcagcug

SEQ ID NO: 459269 - RNA, 23 nt, Human
ucugcaauauucuuuuagccaag

SEQ ID NO: 459270 - RNA, 18 nt, Human
ucugcuauaaacaucauu

SEQ ID NO: 459271 - RNA, 22 nt, Human
ugaaagcaugaagacaugacug

SEQ ID NO: 459272 - RNA, 24 nt, Human
ugaauaucacuuaaaaucagcuug

SEQ ID NO: 459273 - RNA, 21 nt, Human
ugacacucagcccuuucccag

SEQ ID NO: 459274 - RNA, 22 nt, Human
ugacauuuuggacccaacuugg

SEQ ID NO: 459275 - RNA, 23 nt, Human
ugacugcacugggauugggcagg

SEQ ID NO: 459276 - RNA, 20 nt, Human
ugagaaucugggggcucggg

SEQ ID NO: 459277 - RNA, 18 nt, Human
ugaguuccuagucccacc

SEQ ID NO: 459278 - RNA, 21 nt, Human
ugcccuuaaccuacaacacug

SEQ ID NO: 459279 - RNA, 22 nt, Human
ugcgaaaggacccaacaggcca

SEQ ID NO: 459280 - RNA, 28 nt, Human
ugcgaaaggacccaacaggccacgugcc

SEQ ID NO: 459281 - RNA, 18 nt, Human
uggauguggucauggacc

SEQ ID NO: 459282 - RNA, 20 nt, Human
uggcagaagaaagagaggau

SEQ ID NO: 459283 - RNA, 21 nt, Human
uggcagaagaaagagaggauu

SEQ ID NO: 459284 - RNA, 22 nt, Human
uggcagaagaaagagaggauuc

SEQ ID NO: 459285 - RNA, 23 nt, Human
uggcauagcuggcacugaacuca

SEQ ID NO: 459286 - RNA, 19 nt, Human
ugggaauuuguuuggucag

SEQ ID NO: 459287 - RNA, 20 nt, Human
ugggaugguggucagugcug

SEQ ID NO: 459288 - RNA, 18 nt, Human
ugggcagaaaggccaggc

SEQ ID NO: 459289 - RNA, 19 nt, Human
ugggcagaaaggccaggcc

SEQ ID NO: 459290 - RNA, 22 nt, Human
ugggcagaaaggccaggcccca

SEQ ID NO: 459291 - RNA, 20 nt, Human
ugggcagggaggaaugccuu

SEQ ID NO: 459292 - RNA, 20 nt, Human
uggggacagcagaggggaug

SEQ ID NO: 459293 - RNA, 20 nt, Human
ugucuuguuugaaacccucc

SEQ ID NO: 459294 - RNA, 20 nt, Human
uuaaaaucagcuugugcacu

SEQ ID NO: 459295 - RNA, 21 nt, Human
uuaaagcaaaucugagacauc

SEQ ID NO: 459296 - RNA, 22 nt, Human
uucaacaauuaucaacucacac

SEQ ID NO: 459297 - RNA, 21 nt, Human
uucaugguggagggaaaagga

SEQ ID NO: 459298 - RNA, 23 nt, Human
uuccuagucccacccacccuuuc

SEQ ID NO: 459299 - RNA, 18 nt, Human
uuccugagaagguggcug

SEQ ID NO: 459300 - RNA, 18 nt, Human
uuccuuagguucuuucac

SEQ ID NO: 459301 - RNA, 18 nt, Human
uugcaguaugcagaccug

SEQ ID NO: 459302 - RNA, 19 nt, Human
uuuguugagaaugggcaga

SEQ ID NO: 459303 - RNA, 18 nt, Human
aaaauuacugugaaaaac

SEQ ID NO: 459304 - RNA, 22 nt, Human
aaacaagagugagauuccagaa

SEQ ID NO: 459305 - RNA, 21 nt, Human
aagcauauauaauaacaucau

SEQ ID NO: 459306 - RNA, 22 nt, Human
aagucuuuugagaaggauggca

SEQ ID NO: 459307 - RNA, 19 nt, Human
accucagcuacugagcaug

SEQ ID NO: 459308 - RNA, 24 nt, Human
agaaaucugguuuaggccaggugc

SEQ ID NO: 459309 - RNA, 24 nt, Human
aggugcgguggcucacaccuguaa

SEQ ID NO: 459310 - RNA, 18 nt, Human
agugagauuccagaaaaa

SEQ ID NO: 459311 - RNA, 20 nt, Human
caaagagcuaggauuaaaua

SEQ ID NO: 459312 - RNA, 24 nt, Human
cacaccuguaaucccggccaaaug

SEQ ID NO: 459313 - RNA, 18 nt, Human
caccuguaaucccggcca

SEQ ID NO: 459314 - RNA, 25 nt, Human
cacucuggaacaacguuggaccaaa

SEQ ID NO: 459315 - RNA, 20 nt, Human
caggaggagcaaaagcgcgu

SEQ ID NO: 459316 - RNA, 22 nt, Human
ccuaccucagcuacugagcaug

SEQ ID NO: 459317 - RNA, 18 nt, Human
cguagacccaggucccuc

SEQ ID NO: 459318 - RNA, 19 nt, Human
cuaauccccaaagucgaga

SEQ ID NO: 459319 - RNA, 25 nt, Human
cuacugagcaugcgggaaacugcgc

SEQ ID NO: 459320 - RNA, 26 nt, Human
cuuauaaugaugccacaagaauaaac

SEQ ID NO: 459321 - RNA, 19 nt, Human
gaauaacaaagagcuagga

SEQ ID NO: 459322 - RNA, 18 nt, Human
gagcuuuggcacugucaa

SEQ ID NO: 459323 - RNA, 24 nt, Human
ggaacaacguuggaccaaagacac

SEQ ID NO: 459324 - RNA, 23 nt, Human
ggaccaaagacacuucaggagga

SEQ ID NO: 459325 - RNA, 19 nt, Human
ggcucacaccuguaauccc

SEQ ID NO: 459326 - RNA, 22 nt, Human
gguggcucacaccuguaauccc

SEQ ID NO: 459327 - RNA, 24 nt, Human
gguggcucacaccuguaaucccgg

SEQ ID NO: 459328 - RNA, 21 nt, Human
uaaaaagcuggugaauaacaa

SEQ ID NO: 459329 - RNA, 18 nt, Human
uaacaaagagcuaggauu

SEQ ID NO: 459330 - RNA, 27 nt, Human
uaauuuauuuaaaaaaaacuuuucuca

SEQ ID NO: 459331 - RNA, 18 nt, Human
uaccgagcuuuggcacug

SEQ ID NO: 459332 - RNA, 20 nt, Human
ucauuggaaggaauagaagc

SEQ ID NO: 459333 - RNA, 24 nt, Human
ucucucauuggaaggaauagaagc

SEQ ID NO: 459334 - RNA, 22 nt, Human
ucuuuugagaaggauggcaucc

SEQ ID NO: 459335 - RNA, 24 nt, Human
uggaacaacguuggaccaaagaca

SEQ ID NO: 459336 - RNA, 21 nt, Human
uggcucacaccuguaaucccg

SEQ ID NO: 459337 - RNA, 21 nt, Human
uguccaguaccgagcuuuggc

SEQ ID NO: 459338 - RNA, 21 nt, Human
uguguccaguaccgagcuuug

SEQ ID NO: 459339 - RNA, 20 nt, Human
uuaaaaaaaacuuuucucau

SEQ ID NO: 459340 - RNA, 24 nt, Human
uuaggccaggugcgguggcucaca

SEQ ID NO: 459341 - RNA, 22 nt, Human
aaaaauaagcagacaccacagc

SEQ ID NO: 459342 - RNA, 24 nt, Human
aaaaauuucucuuccaauuauaaa

SEQ ID NO: 459343 - RNA, 24 nt, Human
aaacaaaaggaagugaugucccag

SEQ ID NO: 459344 - RNA, 26 nt, Human
aaacaaaaggaagugaugucccagag

SEQ ID NO: 459345 - RNA, 19 nt, Human
aaacaguuccccgcaaaga

SEQ ID NO: 459346 - RNA, 23 nt, Human
aaaccaaauaauauuggaaauaa

SEQ ID NO: 459347 - RNA, 19 nt, Human
aaacgacaagaucucuagc

SEQ ID NO: 459348 - RNA, 21 nt, Human
aaacugaaguucuugagaaaa

SEQ ID NO: 459349 - RNA, 22 nt, Human
aaacuggagggcugaguuugga

SEQ ID NO: 459350 - RNA, 19 nt, Human
aacacggcgagaccccauc

SEQ ID NO: 459351 - RNA, 20 nt, Human
aacacggcgagaccccaucu

SEQ ID NO: 459352 - RNA, 21 nt, Human
aacacggcgagaccccaucuc

SEQ ID NO: 459353 - RNA, 24 nt, Human
aacacggcucuuagaaaccucauu

SEQ ID NO: 459354 - RNA, 22 nt, Human
aagaaaacaaaaggaagugaug

SEQ ID NO: 459355 - RNA, 21 nt, Human
aagaucuccccuuuuacaucc

SEQ ID NO: 459356 - RNA, 19 nt, Human
aagcugccaaguggccugg

SEQ ID NO: 459357 - RNA, 19 nt, Human
aaggagaaaaaaaaaauga

SEQ ID NO: 459358 - RNA, 20 nt, Human
aagugaucucucccuaaagc

SEQ ID NO: 459359 - RNA, 22 nt, Human
aauauacacacacacugaagug

SEQ ID NO: 459360 - RNA, 19 nt, Human
aaucauggucuucucauug

SEQ ID NO: 459361 - RNA, 20 nt, Human
aauguggaaacacacagaaa

SEQ ID NO: 459362 - RNA, 18 nt, Human
aauuccuugagguugcuc

SEQ ID NO: 459363 - RNA, 23 nt, Human
acagcacuagagaaagagggugc

SEQ ID NO: 459364 - RNA, 23 nt, Human
acagcacuagagaaagagggugc

SEQ ID NO: 459365 - RNA, 22 nt, Human
acucagaacccagaggcucucc

SEQ ID NO: 459366 - RNA, 18 nt, Human
acugaaguucuugagaaa

SEQ ID NO: 459367 - RNA, 21 nt, Human
acuguacugcaaauaaauaua

SEQ ID NO: 459368 - RNA, 23 nt, Human
acuugagugcaaagcuucaucca

SEQ ID NO: 459369 - RNA, 24 nt, Human
acuuuaaaaaaugccagauuuccg

SEQ ID NO: 459370 - RNA, 19 nt, Human
agaaagacaacaccagcag

SEQ ID NO: 459371 - RNA, 22 nt, Human
agaacaaaaaggaacuucaaua

SEQ ID NO: 459372 - RNA, 20 nt, Human
agaagacgcacucacccaca

SEQ ID NO: 459373 - RNA, 19 nt, Human
agagcagagcugaauucuu

SEQ ID NO: 459374 - RNA, 23 nt, Human
aggcagccgaagugcccucugga

SEQ ID NO: 459375 - RNA, 19 nt, Human
aggcggaggcgggcagggc

SEQ ID NO: 459376 - RNA, 21 nt, Human
aucacagaagauggauggaaa

SEQ ID NO: 459377 - RNA, 19 nt, Human
aucugugaagaucuccccu

SEQ ID NO: 459378 - RNA, 24 nt, Human
auggaaagcacaaauacaaaaaua

SEQ ID NO: 459379 - RNA, 21 nt, Human
augguuauaauucaugugugc

SEQ ID NO: 459380 - RNA, 21 nt, Human
caaaaauaagcagacaccaca

SEQ ID NO: 459381 - RNA, 23 nt, Human
caaauaaauauacacacacacug

SEQ ID NO: 459382 - RNA, 22 nt, Human
caacugaacagaacccacucag

SEQ ID NO: 459383 - RNA, 22 nt, Human
caacugcagauccuccuacccc

SEQ ID NO: 459384 - RNA, 18 nt, Human
caagagccgcugcaaccu

SEQ ID NO: 459385 - RNA, 24 nt, Human
caagagccgggccucgaaugagag

SEQ ID NO: 459386 - RNA, 20 nt, Human
caagaucucuagcccaucca

SEQ ID NO: 459387 - RNA, 23 nt, Human
caagucgugcuagaaaaccuuaa

SEQ ID NO: 459388 - RNA, 19 nt, Human
cacacauacaaguuagagc

SEQ ID NO: 459389 - RNA, 18 nt, Human
cacccacacgugcgcgua

SEQ ID NO: 459390 - RNA, 24 nt, Human
cacggcgagaccccaucucuaggg

SEQ ID NO: 459391 - RNA, 31 nt, Human
cacgugcgcguacacacacacacacgcgcgg

SEQ ID NO: 459392 - RNA, 22 nt, Human
cagaaagacggcugaacaacug

SEQ ID NO: 459393 - RNA, 22 nt, Human
cagaacccagaggcucuccaga

SEQ ID NO: 459394 - RNA, 19 nt, Human
cagagaaauggagccugua

SEQ ID NO: 459395 - RNA, 21 nt, Human
cagagcccucugcacaccuuc

SEQ ID NO: 459396 - RNA, 19 nt, Human
cagcagaaagacggcugaa

SEQ ID NO: 459397 - RNA, 23 nt, Human
cagcagagagagagccaggacug

SEQ ID NO: 459398 - RNA, 21 nt, Human
caggccagauuucccugcugg

SEQ ID NO: 459399 - RNA, 23 nt, Human
cauccuggcgcucagagcccucu

SEQ ID NO: 459400 - RNA, 22 nt, Human
caucgguaaaccaagcugccaa

SEQ ID NO: 459401 - RNA, 18 nt, Human
caucugaagaaacuggag

SEQ ID NO: 459402 - RNA, 24 nt, Human
caugagugaaacaguuccccgcaa

SEQ ID NO: 459403 - RNA, 24 nt, Human
ccaccgcccagaacggaaccuauu

SEQ ID NO: 459404 - RNA, 21 nt, Human
ccaccugggcuguugccaagg

SEQ ID NO: 459405 - RNA, 23 nt, Human
ccacucagaagacgcacucaccc

SEQ ID NO: 459406 - RNA, 24 nt, Human
ccagaacuaaaaauuaaaauccuc

SEQ ID NO: 459407 - RNA, 18 nt, Human
ccaggccuguggcaugac

SEQ ID NO: 459408 - RNA, 22 nt, Human
ccauccuggcgcucagagcccu

SEQ ID NO: 459409 - RNA, 22 nt, Human
cccacgagucuggauguccgca

SEQ ID NO: 459410 - RNA, 23 nt, Human
cccacucagaagacgcacucacc

SEQ ID NO: 459411 - RNA, 20 nt, Human
ccccaagcuccaggacgcuc

SEQ ID NO: 459412 - RNA, 23 nt, Human
cccgcaaagagauuuguaaaauc

SEQ ID NO: 459413 - RNA, 19 nt, Human
ccucuggagagaaaggccc

SEQ ID NO: 459414 - RNA, 25 nt, Human
cgcguacacacacacacacgcgcgc

SEQ ID NO: 459415 - RNA, 22 nt, Human
cgugcuagaaaaccuuaagaag

SEQ ID NO: 459416 - RNA, 18 nt, Human
cuaaagcauccuugugcu

SEQ ID NO: 459417 - RNA, 21 nt, Human
cuacaagagccgcugcaaccu

SEQ ID NO: 459418 - RNA, 19 nt, Human
cucaagcguucucuucaau

SEQ ID NO: 459419 - RNA, 21 nt, Human
cucacacauacaaguuagagc

SEQ ID NO: 459420 - RNA, 21 nt, Human
cuccgaaagaaaacaaaagga

SEQ ID NO: 459421 - RNA, 22 nt, Human
cuccgaaagaaaacaaaaggaa

SEQ ID NO: 459422 - RNA, 18 nt, Human
cugaagaaacuggagggc

SEQ ID NO: 459423 - RNA, 18 nt, Human
cugcaaauaaauauacac

SEQ ID NO: 459424 - RNA, 23 nt, Human
cugcacaccuucgaacgggcugu

SEQ ID NO: 459425 - RNA, 26 nt, Human
cugugaagaucuccccuuuuacaucc

SEQ ID NO: 459426 - RNA, 20 nt, Human
cuuagaaaccucauuccaaa

SEQ ID NO: 459427 - RNA, 24 nt, Human
gaacggaaccuauucugucagcaa

SEQ ID NO: 459428 - RNA, 19 nt, Human
gacagucugugcaacacgg

SEQ ID NO: 459429 - RNA, 26 nt, Human
gacgcacucacccacacgugcgcgua

SEQ ID NO: 459430 - RNA, 20 nt, Human
gaggaagcagaggcagccga

SEQ ID NO: 459431 - RNA, 18 nt, Human
gaggcaucugugaagauc

SEQ ID NO: 459432 - RNA, 20 nt, Human
gaguggcacagaagggaugg

SEQ ID NO: 459433 - RNA, 20 nt, Human
gauggcagaaagacaacacc

SEQ ID NO: 459434 - RNA, 20 nt, Human
gauggcauugaguggcacag

SEQ ID NO: 459435 - RNA, 22 nt, Human
gcaaagcuucauccagguccca

SEQ ID NO: 459436 - RNA, 24 nt, Human
gcacaaaaaaagguggaagaauuc

SEQ ID NO: 459437 - RNA, 20 nt, Human
gcaccaaggccggccagaga

SEQ ID NO: 459438 - RNA, 19 nt, Human
gccucgaaugagaggaagc

SEQ ID NO: 459439 - RNA, 24 nt, Human
gccugcccuucagguuuuucccau

SEQ ID NO: 459440 - RNA, 23 nt, Human
gcguacacacacacacacgcggg

SEQ ID NO: 459441 - RNA, 18 nt, Human
gcuccaggacgcucagag

SEQ ID NO: 459442 - RNA, 24 nt, Human
gcuccgaaagaaaacaaaaggaag

SEQ ID NO: 459443 - RNA, 25 nt, Human
gcucuuagaaaccucauuccaaauc

SEQ ID NO: 459444 - RNA, 28 nt, Human
gcugcaaccucagagaagggggaacgcc

SEQ ID NO: 459445 - RNA, 28 nt, Human
ggaaaaaccaugucuggauggcauugag

SEQ ID NO: 459446 - RNA, 20 nt, Human
ggagagaaaggccccuggag

SEQ ID NO: 459447 - RNA, 21 nt, Human
ggcagaguccugggguuuucc

SEQ ID NO: 459448 - RNA, 19 nt, Human
ggcgggcccagcacgugca

SEQ ID NO: 459449 - RNA, 22 nt, Human
gggaaaaaaagggaacgugaag

SEQ ID NO: 459450 - RNA, 18 nt, Human
gggaaaaaccaugucugg

SEQ ID NO: 459451 - RNA, 23 nt, Human
gggaauguggaaacacacagaaa

SEQ ID NO: 459452 - RNA, 25 nt, Human
ggguagacgggugcuugcacuuucu

SEQ ID NO: 459453 - RNA, 23 nt, Human
guacacacacacacacgcgcgca

SEQ ID NO: 459454 - RNA, 24 nt, Human
gugaaacaguuccccgcaaagaga

SEQ ID NO: 459455 - RNA, 24 nt, Human
guggggacugucccugcaaguggg

SEQ ID NO: 459456 - RNA, 24 nt, Human
uaacagcaaaaauuucucuuccaa

SEQ ID NO: 459457 - RNA, 19 nt, Human
uaacauaccuuacaggacu

SEQ ID NO: 459458 - RNA, 23 nt, Human
uaagcagacaccacagcacuaga

SEQ ID NO: 459459 - RNA, 22 nt, Human
uaccgagccaugggugggcccc

SEQ ID NO: 459460 - RNA, 22 nt, Human
uagccggccagaacuaaaaauu

SEQ ID NO: 459461 - RNA, 24 nt, Human
uauucacaugcauaggagugcaua

SEQ ID NO: 459462 - RNA, 19 nt, Human
ucacaccugugaagauagc

SEQ ID NO: 459463 - RNA, 20 nt, Human
ucagaaagaugaaggugcug

SEQ ID NO: 459464 - RNA, 19 nt, Human
uccaagaaacgacaagagg

SEQ ID NO: 459465 - RNA, 21 nt, Human
ucccagugccggcuauagaga

SEQ ID NO: 459466 - RNA, 19 nt, Human
uccccaagcuccaggacgc

SEQ ID NO: 459467 - RNA, 24 nt, Human
ucccuugacaauacuugagugcaa

SEQ ID NO: 459468 - RNA, 20 nt, Human
ucgaaagacugcgguucucu

SEQ ID NO: 459469 - RNA, 22 nt, Human
ucugcacaccuucgaacgggcu

SEQ ID NO: 459470 - RNA, 23 nt, Human
ucuggagagaaaggccccuggag

SEQ ID NO: 459471 - RNA, 23 nt, Human
ugaagaacacggcucuuagaaac

SEQ ID NO: 459472 - RNA, 20 nt, Human
ugaauacagacagucugugc

SEQ ID NO: 459473 - RNA, 24 nt, Human
ugaaugugguaugaucacaccugu

SEQ ID NO: 459474 - RNA, 18 nt, Human
ugacuuauuuuuuuccuu

SEQ ID NO: 459475 - RNA, 25 nt, Human
ugacuuccaagaaacgacaagaucu

SEQ ID NO: 459476 - RNA, 25 nt, Human
ugagaacaaaaaggaacuucaauac

SEQ ID NO: 459477 - RNA, 21 nt, Human
ugagggcuugaauuaccuaga

SEQ ID NO: 459478 - RNA, 22 nt, Human
ugaguggcacagaagggauggg

SEQ ID NO: 459479 - RNA, 20 nt, Human
ugaguuuggaguaaaggaga

SEQ ID NO: 459480 - RNA, 23 nt, Human
ugcaaagcuucauccagguccca

SEQ ID NO: 459481 - RNA, 21 nt, Human
ugcacuuucuggcuuuggugg

SEQ ID NO: 459482 - RNA, 22 nt, Human
ugcagaaagugguuuuguuuua

SEQ ID NO: 459483 - RNA, 28 nt, Human
ugccaaaaacugacuuauuuuuuuccuu

SEQ ID NO: 459484 - RNA, 21 nt, Human
ugccuagaguggcagaguccu

SEQ ID NO: 459485 - RNA, 18 nt, Human
ugcucaagcguucucuuc

SEQ ID NO: 459486 - RNA, 22 nt, Human
ugcucaggccagauuucccugc

SEQ ID NO: 459487 - RNA, 23 nt, Human
uggaagaauucucacuggggaaa

SEQ ID NO: 459488 - RNA, 24 nt, Human
uggaguaaaggagaaaaaaaaaau

SEQ ID NO: 459489 - RNA, 26 nt, Human
uggcacaaaaaaagguggaagaauuc

SEQ ID NO: 459490 - RNA, 21 nt, Human
uggcacagaagggaugggacu

SEQ ID NO: 459491 - RNA, 21 nt, Human
uggcagagaaauuaaucuaua

SEQ ID NO: 459492 - RNA, 22 nt, Human
uggcaugaccucuggcuugcug

SEQ ID NO: 459493 - RNA, 21 nt, Human
uggcauugaguggcacagaag

SEQ ID NO: 459494 - RNA, 21 nt, Human
ugucagcaagagccgggccuc

SEQ ID NO: 459495 - RNA, 23 nt, Human
ugucccugcaagugggaguucag

SEQ ID NO: 459496 - RNA, 22 nt, Human
ugugugccuagaguggcagagu

SEQ ID NO: 459497 - RNA, 20 nt, Human
uguuucagaagugaaugugg

SEQ ID NO: 459498 - RNA, 26 nt, Human
uuaaaagaaaucauggucuucucauu

SEQ ID NO: 459499 - RNA, 18 nt, Human
uuaccuagauuuuccaag

SEQ ID NO: 459500 - RNA, 20 nt, Human
uucccuagguguucucucca

SEQ ID NO: 459501 - RNA, 23 nt, Human
uucccuagguguucucuccacac

SEQ ID NO: 459502 - RNA, 18 nt, Human
uugaccacacgcagugga

SEQ ID NO: 459503 - RNA, 22 nt, Human
uuuguaaaauccugaugaugac

SEQ ID NO: 459504 - RNA, 23 nt, Human
aagcuggucucuuccgugacaca

SEQ ID NO: 459505 - RNA, 19 nt, Human
accccaucggaagcacaau

SEQ ID NO: 459506 - RNA, 18 nt, Human
acccuggaacuugagccc

SEQ ID NO: 459507 - RNA, 18 nt, Human
acccuggaacuugagccc

SEQ ID NO: 459508 - RNA, 21 nt, Human
accuuaaaacccuggaacuug

SEQ ID NO: 459509 - RNA, 20 nt, Human
agcacaauuucccauugucu

SEQ ID NO: 459510 - RNA, 18 nt, Human
aguccccaccccaucgga

SEQ ID NO: 459511 - RNA, 19 nt, Human
auccaggacuuccagcugc

SEQ ID NO: 459512 - RNA, 20 nt, Human
auccaggacuuccagcugcu

SEQ ID NO: 459513 - RNA, 20 nt, Human
cccaccccaucggaagcaca

SEQ ID NO: 459514 - RNA, 22 nt, Human
ccccucugcccucuggugccug

SEQ ID NO: 459515 - RNA, 22 nt, Human
ccuuaaaacccuggaacuugag

SEQ ID NO: 459516 - RNA, 18 nt, Human
ccuuuccuucucaguccc

SEQ ID NO: 459517 - RNA, 30 nt, Human
ccuuugcaaacagacuuucaggugggaacu

SEQ ID NO: 459518 - RNA, 23 nt, Human
cuccugggaguuccaagcaccuu

SEQ ID NO: 459519 - RNA, 21 nt, Human
cugucuguccuuuccuucuca

SEQ ID NO: 459520 - RNA, 21 nt, Human
cuuaaaacccuggaacuugag

SEQ ID NO: 459521 - RNA, 20 nt, Human
cuuuuccccuauuguugaau

SEQ ID NO: 459522 - RNA, 19 nt, Human
cuuuuugucuugcuugagg

SEQ ID NO: 459523 - RNA, 21 nt, Human
gaagguuugccaggcuccugg

SEQ ID NO: 459524 - RNA, 18 nt, Human
gcuuuuugucuugcuuga

SEQ ID NO: 459525 - RNA, 20 nt, Human
ggccccuuucuuuauucugu

SEQ ID NO: 459526 - RNA, 23 nt, Human
gggccccuuucuuuauucugugg

SEQ ID NO: 459527 - RNA, 23 nt, Human
gugcuuagcagcuuuuugucuug

SEQ ID NO: 459528 - RNA, 23 nt, Human
uaaaacccuggaacuugagcccc

SEQ ID NO: 459529 - RNA, 23 nt, Human
uaacagggccccuuucuuuauuc

SEQ ID NO: 459530 - RNA, 24 nt, Human
ucacagagacggagggagcagugc

SEQ ID NO: 459531 - RNA, 20 nt, Human
ucugucugucugucuguccu

SEQ ID NO: 459532 - RNA, 22 nt, Human
ugaagguuugccaggcuccugg

SEQ ID NO: 459533 - RNA, 22 nt, Human
ugggaacuauccaggacuucca

SEQ ID NO: 459534 - RNA, 25 nt, Human
uguacaacccccugucugucugucu

SEQ ID NO: 459535 - RNA, 22 nt, Human
uguccuuuccuucucagucccc

SEQ ID NO: 459536 - RNA, 24 nt, Human
ugucucugucuuuuccccuauugu

SEQ ID NO: 459537 - RNA, 24 nt, Human
ugucugucuguccuuuccuucuca

SEQ ID NO: 459538 - RNA, 19 nt, Human
uuccaagcaccuuaaaacc

SEQ ID NO: 459539 - RNA, 20 nt, Human
uucucaguccccaccccauc

SEQ ID NO: 459540 - RNA, 21 nt, Human
uugaauaacagggccccuuuc

SEQ ID NO: 459541 - RNA, 27 nt, Human
uuucccauugucucugucuuuuccccu

SEQ ID NO: 459542 - RNA, 22 nt, Human
uuuuccccuauuguugaauaac

SEQ ID NO: 459543 - RNA, 21 nt, Human
aggcuggaaggcgagccgaga

SEQ ID NO: 459544 - RNA, 22 nt, Human
cacccucacauuuagcugaagg

SEQ ID NO: 459545 - RNA, 21 nt, Human
cacucucacagugucagggag

SEQ ID NO: 459546 - RNA, 18 nt, Human
cagcagcagcagcuccuc

SEQ ID NO: 459547 - RNA, 19 nt, Human
cagcagcagcagcuccucg

SEQ ID NO: 459548 - RNA, 18 nt, Human
cauccaucucuaaggcca

SEQ ID NO: 459549 - RNA, 18 nt, Human
ccggcgcgggcccggcgg

SEQ ID NO: 459550 - RNA, 18 nt, Human
cgagccgagagcgagcgg

SEQ ID NO: 459551 - RNA, 19 nt, Human
gagccgagagcgagcggcc

SEQ ID NO: 459552 - RNA, 18 nt, Human
ugccgccgccucagcagc

SEQ ID NO: 459553 - RNA, 20 nt, Human
aaaaccuccccccuccccgg

SEQ ID NO: 459554 - RNA, 22 nt, Human
aaacaaguuacagaaagccccu

SEQ ID NO: 459555 - RNA, 24 nt, Human
aaacucacagcuaaccucuuucca

SEQ ID NO: 459556 - RNA, 21 nt, Human
aacccacccuacuuuccccaa

SEQ ID NO: 459557 - RNA, 24 nt, Human
aacuuuauucuccccucuuuccac

SEQ ID NO: 459558 - RNA, 24 nt, Human
aagaaaaagcuacauaucaaagaa

SEQ ID NO: 459559 - RNA, 21 nt, Human
aagcaaaugaauacacuuucu

SEQ ID NO: 459560 - RNA, 18 nt, Human
aagcaugcuuggacagau

SEQ ID NO: 459561 - RNA, 23 nt, Human
aagccccucauuguaaacaaaag

SEQ ID NO: 459562 - RNA, 22 nt, Human
aaucaaagcaaaacucacagcc

SEQ ID NO: 459563 - RNA, 21 nt, Human
accacaaaagcaugcuuggac

SEQ ID NO: 459564 - RNA, 18 nt, Human
acccacccuacuuucccc

SEQ ID NO: 459565 - RNA, 18 nt, Human
acccacccuacuuucccc

SEQ ID NO: 459566 - RNA, 22 nt, Human
accugcgggguuugaggugggc

SEQ ID NO: 459567 - RNA, 18 nt, Human
agaaaacuuggaaauaaa

SEQ ID NO: 459568 - RNA, 18 nt, Human
agcagcaguaacaggcag

SEQ ID NO: 459569 - RNA, 22 nt, Human
aggagcccuccugagcaccugc

SEQ ID NO: 459570 - RNA, 21 nt, Human
aggcaaaaguaaagguaauuc

SEQ ID NO: 459571 - RNA, 18 nt, Human
aggcacaccugcgggguu

SEQ ID NO: 459572 - RNA, 18 nt, Human
aggcacagaggcuaugcc

SEQ ID NO: 459573 - RNA, 21 nt, Human
aggcagagaggcagccugagg

SEQ ID NO: 459574 - RNA, 22 nt, Human
aggcagagaggcagccugagga

SEQ ID NO: 459575 - RNA, 27 nt, Human
agguguccaaaaccacacauccaggcc

SEQ ID NO: 459576 - RNA, 23 nt, Human
caaagacucgagaaaaccacaaa

SEQ ID NO: 459577 - RNA, 25 nt, Human
caccaggcacagaggcuaugcccac

SEQ ID NO: 459578 - RNA, 25 nt, Human
cagagaggcagccugaggagcccuc

SEQ ID NO: 459579 - RNA, 18 nt, Human
cagcaguaacaggcagag

SEQ ID NO: 459580 - RNA, 22 nt, Human
cagcauaacuuuauucuccccu

SEQ ID NO: 459581 - RNA, 24 nt, Human
cagcuaaccucuuuccaagguguc

SEQ ID NO: 459582 - RNA, 20 nt, Human
ccaaaaccacacauccaggc

SEQ ID NO: 459583 - RNA, 18 nt, Human
ccacacauccaggccuga

SEQ ID NO: 459584 - RNA, 20 nt, Human
ccaggcacagaggcuaugcc

SEQ ID NO: 459585 - RNA, 27 nt, Human
cccacaguugcaggacuuucccagcaa

SEQ ID NO: 459586 - RNA, 21 nt, Human
cccaccagacaggcaugcuca

SEQ ID NO: 459587 - RNA, 21 nt, Human
cccacucacagcgcccagacg

SEQ ID NO: 459588 - RNA, 19 nt, Human
ccccaacauaaugcuuuac

SEQ ID NO: 459589 - RNA, 26 nt, Human
ccccaggaccagggagggagcagcag

SEQ ID NO: 459590 - RNA, 21 nt, Human
cccucauuguaaacaaaagau

SEQ ID NO: 459591 - RNA, 19 nt, Human
ccgcugggaggcacaccug

SEQ ID NO: 459592 - RNA, 18 nt, Human
ccggcccagagcccacag

SEQ ID NO: 459593 - RNA, 31 nt, Human
ccuaccaccacacaccaguccccucucggaa

SEQ ID NO: 459594 - RNA, 27 nt, Human
ccucauuguaaacaaaagauuacaagu

SEQ ID NO: 459595 - RNA, 21 nt, Human
ccugcgggguuugaggugggc

SEQ ID NO: 459596 - RNA, 19 nt, Human
ccugcgucccuaccaccac

SEQ ID NO: 459597 - RNA, 18 nt, Human
cgacgggagcggggacac

SEQ ID NO: 459598 - RNA, 18 nt, Human
cgagaaaaccacaaaagc

SEQ ID NO: 459599 - RNA, 24 nt, Human
cgcccagacggagauggguuccua

SEQ ID NO: 459600 - RNA, 26 nt, Human
cucacagcgcccagacggagaugggu

SEQ ID NO: 459601 - RNA, 22 nt, Human
cucacagcuaaccucuuuccaa

SEQ ID NO: 459602 - RNA, 29 nt, Human
cuccugagcaccugcgucccuaccaccuu

SEQ ID NO: 459603 - RNA, 18 nt, Human
cucucggaccacaccaac

SEQ ID NO: 459604 - RNA, 20 nt, Human
cucuguguaaagagcaugau

SEQ ID NO: 459605 - RNA, 21 nt, Human
cugagcaccugcgucccuacc

SEQ ID NO: 459606 - RNA, 22 nt, Human
cugcggagaccacagcaacgcu

SEQ ID NO: 459607 - RNA, 23 nt, Human
gaacaauauacaaacauguacag

SEQ ID NO: 459608 - RNA, 24 nt, Human
gaacaauauacaaacauguacagc

SEQ ID NO: 459609 - RNA, 20 nt, Human
gacacacccaccggcgguca

SEQ ID NO: 459610 - RNA, 18 nt, Human
gagaaaaccacaaaagca

SEQ ID NO: 459611 - RNA, 25 nt, Human
gagaaaaccacaaaagcaugcuugg

SEQ ID NO: 459612 - RNA, 20 nt, Human
gagcagcaguaacaggcaga

SEQ ID NO: 459613 - RNA, 21 nt, Human
gagcagcaguaacaggcagag

SEQ ID NO: 459614 - RNA, 20 nt, Human
gcaggcggucccccaggaag

SEQ ID NO: 459615 - RNA, 18 nt, Human
ggaggcacaccugcgggg

SEQ ID NO: 459616 - RNA, 22 nt, Human
gggacgacgggagcggggacac

SEQ ID NO: 459617 - RNA, 21 nt, Human
gggagcagcaguaacaggcag

SEQ ID NO: 459618 - RNA, 19 nt, Human
ggggaaaaagaauuaaaga

SEQ ID NO: 459619 - RNA, 21 nt, Human
ggugaccaaagacucgagaaa

SEQ ID NO: 459620 - RNA, 24 nt, Human
uaaagcaaaugaauacacuuucua

SEQ ID NO: 459621 - RNA, 20 nt, Human
uaagaaaaagcuacauauca

SEQ ID NO: 459622 - RNA, 25 nt, Human
uacaaguuauaaaaucaaaguacac

SEQ ID NO: 459623 - RNA, 19 nt, Human
uacacagcauaacuuuauu

SEQ ID NO: 459624 - RNA, 19 nt, Human
uauacaaugcaaugcauuc

SEQ ID NO: 459625 - RNA, 23 nt, Human
uauauacaucacagguaccauac

SEQ ID NO: 459626 - RNA, 22 nt, Human
uauuaaacauucaaaagucuuu

SEQ ID NO: 459627 - RNA, 24 nt, Human
ucaaagcaaaacucacagcuaacc

SEQ ID NO: 459628 - RNA, 24 nt, Human
ucaaaguacacacaggccagaguc

SEQ ID NO: 459629 - RNA, 22 nt, Human
uccaaaguuucuauugcuacca

SEQ ID NO: 459630 - RNA, 21 nt, Human
uccacauacagggcuggaccc

SEQ ID NO: 459631 - RNA, 23 nt, Human
ugaccaaagacucgagaaaacca

SEQ ID NO: 459632 - RNA, 21 nt, Human
ugaggagcccuccugagcacc

SEQ ID NO: 459633 - RNA, 24 nt, Human
uggaaacccacccuacuuucccca

SEQ ID NO: 459634 - RNA, 25 nt, Human
uggaaauaaaaccuccccccucccc

SEQ ID NO: 459635 - RNA, 19 nt, Human
uggugaucugcaagugaug

SEQ ID NO: 459636 - RNA, 27 nt, Human
uguccaaaaccacacauuaccauaggg

SEQ ID NO: 459637 - RNA, 18 nt, Human
uuguaaacaaaagauuac

SEQ ID NO: 459638 - RNA, 21 nt, Human
uuuccaagguguccaaaacca

SEQ ID NO: 459639 - RNA, 26 nt, Human
uuuuuuuucuugacuuuauuuuuaau

SEQ ID NO: 459640 - RNA, 20 nt, Human
aaaaaaucaacguaaaaaaa

SEQ ID NO: 459641 - RNA, 18 nt, Human
aaaaagagcucccccuuc

SEQ ID NO: 459642 - RNA, 25 nt, Human
aaaaaucaacguaaaaaaagagcua

SEQ ID NO: 459643 - RNA, 22 nt, Human
aaaacgaagccgugcuggggga

SEQ ID NO: 459644 - RNA, 22 nt, Human
aaacagaguagaaaaaaaaaaa

SEQ ID NO: 459645 - RNA, 21 nt, Human
aacaaucucaaaacagggccc

SEQ ID NO: 459646 - RNA, 18 nt, Human
aacccgccacaucuccaa

SEQ ID NO: 459647 - RNA, 21 nt, Human
aagcagucucuuuggggccuc

SEQ ID NO: 459648 - RNA, 20 nt, Human
aauuagaacaaacaaucuca

SEQ ID NO: 459649 - RNA, 22 nt, Human
acaaagucuucccaagcuucca

SEQ ID NO: 459650 - RNA, 19 nt, Human
acccgccacaucuccaagc

SEQ ID NO: 459651 - RNA, 19 nt, Human
acccuccccccagccuuac

SEQ ID NO: 459652 - RNA, 18 nt, Human
acugcccgcugggaccag

SEQ ID NO: 459653 - RNA, 23 nt, Human
agagacccacagggaaguggcaa

SEQ ID NO: 459654 - RNA, 21 nt, Human
agcagcagcgaagaaucugga

SEQ ID NO: 459655 - RNA, 20 nt, Human
aggcagaagagugccgcaga

SEQ ID NO: 459656 - RNA, 24 nt, Human
aggccauuuccaagcggauggagg

SEQ ID NO: 459657 - RNA, 18 nt, Human
aggggaccaaauggggag

SEQ ID NO: 459658 - RNA, 20 nt, Human
agggguccgguccugcggag

SEQ ID NO: 459659 - RNA, 21 nt, Human
aggugcggaagccaucgccuc

SEQ ID NO: 459660 - RNA, 25 nt, Human
auccuaaagccuuccagggggccuc

SEQ ID NO: 459661 - RNA, 18 nt, Human
caaagucuucccaagcuu

SEQ ID NO: 459662 - RNA, 25 nt, Human
caaagucuucccaagcuuccaugca

SEQ ID NO: 459663 - RNA, 21 nt, Human
caacaaagacaguccagggga

SEQ ID NO: 459664 - RNA, 23 nt, Human
caacguaaaaaaagagcuccccc

SEQ ID NO: 459665 - RNA, 24 nt, Human
cacccccuccgcgcgcgcgcgcuc

SEQ ID NO: 459666 - RNA, 21 nt, Human
cagacggcggacagcaagaaa

SEQ ID NO: 459667 - RNA, 19 nt, Human
cagagccuccagcacucuc

SEQ ID NO: 459668 - RNA, 22 nt, Human
cagcacucucuccccgccuccc

SEQ ID NO: 459669 - RNA, 22 nt, Human
cagcagcacccagauuggcuga

SEQ ID NO: 459670 - RNA, 18 nt, Human
cagcagcagcgaagaauc

SEQ ID NO: 459671 - RNA, 18 nt, Human
cagggguguggccgcaag

SEQ ID NO: 459672 - RNA, 24 nt, Human
ccaacaaagucuucccaagcuucc

SEQ ID NO: 459673 - RNA, 23 nt, Human
ccagcacucucuccccgccuccc

SEQ ID NO: 459674 - RNA, 21 nt, Human
ccaggggcuucuagggggucu

SEQ ID NO: 459675 - RNA, 23 nt, Human
ccagggggccuccaaaguugccc

SEQ ID NO: 459676 - RNA, 22 nt, Human
ccauuggccaaagcagggaaac

SEQ ID NO: 459677 - RNA, 22 nt, Human
cccaccccccgccuuuccccca

SEQ ID NO: 459678 - RNA, 25 nt, Human
cccacccuccccccagccuuaccua

SEQ ID NO: 459679 - RNA, 19 nt, Human
cccagggccccaaauggag

SEQ ID NO: 459680 - RNA, 19 nt, Human
ccccaaauggagcggaagg

SEQ ID NO: 459681 - RNA, 23 nt, Human
ccccacccccuccgcgcgcgcgc

SEQ ID NO: 459682 - RNA, 25 nt, Human
ccccacugcagagccagcucuccua

SEQ ID NO: 459683 - RNA, 21 nt, Human
ccccagccccucccuuccgga

SEQ ID NO: 459684 - RNA, 18 nt, Human
ccccagggccccaaaugg

SEQ ID NO: 459685 - RNA, 19 nt, Human
cccccaccccccgccuuuc

SEQ ID NO: 459686 - RNA, 20 nt, Human
cccccaccccccgccuuucc

SEQ ID NO: 459687 - RNA, 25 nt, Human
cccccaccccccgccuuucccccag

SEQ ID NO: 459688 - RNA, 20 nt, Human
cccccagccuuaccuagcuu

SEQ ID NO: 459689 - RNA, 21 nt, Human
cccccagccuuaccuagcuua

SEQ ID NO: 459690 - RNA, 22 nt, Human
ccccccgccuuucccccagcca

SEQ ID NO: 459691 - RNA, 27 nt, Human
ccccuucuucccuccccauggaggcug

SEQ ID NO: 459692 - RNA, 20 nt, Human
cccgccacaucuccaagcca

SEQ ID NO: 459693 - RNA, 20 nt, Human
cccuuagaagugaauagggc

SEQ ID NO: 459694 - RNA, 20 nt, Human
ccgagccccgcgccagcccu

SEQ ID NO: 459695 - RNA, 20 nt, Human
ccgccuccaucuuugaaauc

SEQ ID NO: 459696 - RNA, 19 nt, Human
ccgcuucccccccaccccc

SEQ ID NO: 459697 - RNA, 22 nt, Human
ccuagaggggggcggggggggg

SEQ ID NO: 459698 - RNA, 22 nt, Human
ccuaugucccgaaacccagagc

SEQ ID NO: 459699 - RNA, 22 nt, Human
ccuccaaaguugcccucggcuu

SEQ ID NO: 459700 - RNA, 23 nt, Human
ccuccagcacucucuccccgccu

SEQ ID NO: 459701 - RNA, 22 nt, Human
ccuccaggcgacaaacccccug

SEQ ID NO: 459702 - RNA, 21 nt, Human
ccugcggagccuuccugcccc

SEQ ID NO: 459703 - RNA, 22 nt, Human
ccugggggucgcgccaaggggc

SEQ ID NO: 459704 - RNA, 22 nt, Human
cgaaauggcgccgccgagcccc

SEQ ID NO: 459705 - RNA, 21 nt, Human
cgccgagccccgcgccagccc

SEQ ID NO: 459706 - RNA, 21 nt, Human
cgcggccacgucagcagcacc

SEQ ID NO: 459707 - RNA, 24 nt, Human
cggcggccucagcugaggcgggcc

SEQ ID NO: 459708 - RNA, 19 nt, Human
cgggaggggucgcgugggc

SEQ ID NO: 459709 - RNA, 22 nt, Human
cuaaagccuuccagggggccuc

SEQ ID NO: 459710 - RNA, 20 nt, Human
cuagaggcugcuccacucca

SEQ ID NO: 459711 - RNA, 20 nt, Human
cuccacuccagcacgaaaug

SEQ ID NO: 459712 - RNA, 21 nt, Human
cuccagcacucucuccccgcc

SEQ ID NO: 459713 - RNA, 27 nt, Human
cuccccccagccuuaccuagcuuaaaa

SEQ ID NO: 459714 - RNA, 23 nt, Human
cucucuccccgccuccccuucca

SEQ ID NO: 459715 - RNA, 19 nt, Human
cucuugggccuccaggcga

SEQ ID NO: 459716 - RNA, 20 nt, Human
cugcagagccagcucucccc

SEQ ID NO: 459717 - RNA, 21 nt, Human
cugcaucccucccccacugca

SEQ ID NO: 459718 - RNA, 24 nt, Human
cugccaagcucgagcaggucgugc

SEQ ID NO: 459719 - RNA, 19 nt, Human
cuucaguaaaugucccugc

SEQ ID NO: 459720 - RNA, 20 nt, Human
cuuuauauauaggcggggag

SEQ ID NO: 459721 - RNA, 22 nt, Human
gaaauggcgccgccgagccccg

SEQ ID NO: 459722 - RNA, 23 nt, Human
gacaguccaggggaccaaauggg

SEQ ID NO: 459723 - RNA, 21 nt, Human
gagggcggaguagagggggug

SEQ ID NO: 459724 - RNA, 20 nt, Human
gccaauuggcugagcugugg

SEQ ID NO: 459725 - RNA, 22 nt, Human
gccccacccuccccccagccuu

SEQ ID NO: 459726 - RNA, 23 nt, Human
gccccagagccuccagcacucuc

SEQ ID NO: 459727 - RNA, 20 nt, Human
gcccgcuucccccccacccc

SEQ ID NO: 459728 - RNA, 25 nt, Human
gcccgcuucccccccaccccccgcc

SEQ ID NO: 459729 - RNA, 19 nt, Human
gcccucagccgcggaaagu

SEQ ID NO: 459730 - RNA, 25 nt, Human
gcccuuagaagugaauagggcagcu

SEQ ID NO: 459731 - RNA, 22 nt, Human
gccgcaagacgccuggcgggug

SEQ ID NO: 459732 - RNA, 20 nt, Human
gcggccacgucagcagcacc

SEQ ID NO: 459733 - RNA, 23 nt, Human
gcggggcccgaaaaaggggagcu

SEQ ID NO: 459734 - RNA, 23 nt, Human
gcguagcccccagccccucccuu

SEQ ID NO: 459735 - RNA, 23 nt, Human
gcucccccuucuucccuccccau

SEQ ID NO: 459736 - RNA, 18 nt, Human
ggagguggauuguaaugg

SEQ ID NO: 459737 - RNA, 24 nt, Human
ggccccacccuccccccagccuua

SEQ ID NO: 459738 - RNA, 18 nt, Human
ggcccgaaaaaggggagc

SEQ ID NO: 459739 - RNA, 18 nt, Human
gggaggccguuccucuug

SEQ ID NO: 459740 - RNA, 19 nt, Human
gggaggggucgcgugggcg

SEQ ID NO: 459741 - RNA, 23 nt, Human
gggccuccaggcgacaaaccccc

SEQ ID NO: 459742 - RNA, 21 nt, Human
gggcggggcccgaaaaagggg

SEQ ID NO: 459743 - RNA, 24 nt, Human
gggcugggaauucaauguuguuuu

SEQ ID NO: 459744 - RNA, 18 nt, Human
gggcugggggggugggga

SEQ ID NO: 459745 - RNA, 23 nt, Human
ggggagggggcguagcccccagc

SEQ ID NO: 459746 - RNA, 20 nt, Human
ggggcaggguggucuagggg

SEQ ID NO: 459747 - RNA, 21 nt, Human
ggggcccgaaaaaggggagcc

SEQ ID NO: 459748 - RNA, 20 nt, Human
gggggaaggggcaggugggg

SEQ ID NO: 459749 - RNA, 25 nt, Human
gggggaaggggcagguggggcaggg

SEQ ID NO: 459750 - RNA, 22 nt, Human
ggggggaggccguuccucuugg

SEQ ID NO: 459751 - RNA, 19 nt, Human
gggguggggagagcaucgg

SEQ ID NO: 459752 - RNA, 24 nt, Human
gggucgcgccaaggggccaagggg

SEQ ID NO: 459753 - RNA, 24 nt, Human
gguggauuguaauggcggccccgg

SEQ ID NO: 459754 - RNA, 22 nt, Human
guaaaaaaagagcucccccuuc

SEQ ID NO: 459755 - RNA, 20 nt, Human
guaaggcagcagcagcgaag

SEQ ID NO: 459756 - RNA, 25 nt, Human
uaaaaaaagagcucccccuucuucc

SEQ ID NO: 459757 - RNA, 21 nt, Human
uaaaugucccugcaucccucc

SEQ ID NO: 459758 - RNA, 19 nt, Human
uaacuccagaucagggcuu

SEQ ID NO: 459759 - RNA, 21 nt, Human
uaaggagggacugacucuuca

SEQ ID NO: 459760 - RNA, 22 nt, Human
uagaaucaacaaagacagucca

SEQ ID NO: 459761 - RNA, 18 nt, Human
uagcccccagccccuccc

SEQ ID NO: 459762 - RNA, 22 nt, Human
ucaacccccccccagaaaacga

SEQ ID NO: 459763 - RNA, 26 nt, Human
ucacgugcccgcuucccccccacccc

SEQ ID NO: 459764 - RNA, 22 nt, Human
uccacuccagcacgaaauggcg

SEQ ID NO: 459765 - RNA, 19 nt, Human
ucccacccuugcccugccc

SEQ ID NO: 459766 - RNA, 19 nt, Human
uccccagcuuccuaucccg

SEQ ID NO: 459767 - RNA, 22 nt, Human
uccccagcuuccuaucccgcag

SEQ ID NO: 459768 - RNA, 19 nt, Human
ucccccagccacgaggacc

SEQ ID NO: 459769 - RNA, 22 nt, Human
uccccccagccuuaccuagcuu

SEQ ID NO: 459770 - RNA, 18 nt, Human
ucccccccaccccccgcc

SEQ ID NO: 459771 - RNA, 23 nt, Human
ucccccccaccccccgccuuucc

SEQ ID NO: 459772 - RNA, 21 nt, Human
uccccgaucucagacaccguc

SEQ ID NO: 459773 - RNA, 20 nt, Human
uccccgccuccccuuccaac

SEQ ID NO: 459774 - RNA, 23 nt, Human
uccccgccuccccuuccaacaaa

SEQ ID NO: 459775 - RNA, 18 nt, Human
uccgcgcgcgcgcgcucg

SEQ ID NO: 459776 - RNA, 24 nt, Human
uccgcgcgcgcgcgcucgcucacg

SEQ ID NO: 459777 - RNA, 23 nt, Human
uccgcgggagcuuuuucuauugg

SEQ ID NO: 459778 - RNA, 25 nt, Human
ucgaaggggaaggaacaccucuccg

SEQ ID NO: 459779 - RNA, 20 nt, Human
ucguagcuccuccauuggcc

SEQ ID NO: 459780 - RNA, 19 nt, Human
ucuagaggcugcuccacuc

SEQ ID NO: 459781 - RNA, 26 nt, Human
ucuugggccuccaggcgacaaacccc

SEQ ID NO: 459782 - RNA, 26 nt, Human
ugagaugaagaagugucacagcaaag

SEQ ID NO: 459783 - RNA, 19 nt, Human
ugcccgcuucccccccacc

SEQ ID NO: 459784 - RNA, 22 nt, Human
ugcccucagccgcggaaagucc

SEQ ID NO: 459785 - RNA, 23 nt, Human
ugcugggggagggggcguagccc

SEQ ID NO: 459786 - RNA, 20 nt, Human
ugcuuguccauauccccagc

SEQ ID NO: 459787 - RNA, 19 nt, Human
uggaagaggugcggaagcc

SEQ ID NO: 459788 - RNA, 21 nt, Human
uggcggguggugguucucggc

SEQ ID NO: 459789 - RNA, 19 nt, Human
uggggagagcaucggggcc

SEQ ID NO: 459790 - RNA, 24 nt, Human
uggggggguggggagagcaucggg

SEQ ID NO: 459791 - RNA, 20 nt, Human
uguccaagagaucacucccc

SEQ ID NO: 459792 - RNA, 24 nt, Human
uguccaagagaucacuccccaaug

SEQ ID NO: 459793 - RNA, 26 nt, Human
uguccauauccccagcuuccuauccc

SEQ ID NO: 459794 - RNA, 20 nt, Human
ugucccugcaucccuccccc

SEQ ID NO: 459795 - RNA, 24 nt, Human
uguuuuguccaugucccuccuuca

SEQ ID NO: 459796 - RNA, 19 nt, Human
uuagaagugaauagggcag

SEQ ID NO: 459797 - RNA, 21 nt, Human
uuagaagugaauagggcagcc

SEQ ID NO: 459798 - RNA, 19 nt, Human
uuccaaggugucagucacc

SEQ ID NO: 459799 - RNA, 19 nt, Human
uucccuccccauggaggcu

SEQ ID NO: 459800 - RNA, 18 nt, Human
uuuuccccacccccuccg

SEQ ID NO: 459801 - RNA, 19 nt, Human
aagcaggcacaucuguccu

SEQ ID NO: 459802 - RNA, 20 nt, Human
acaaagcuaacagcuuucaa

SEQ ID NO: 459803 - RNA, 23 nt, Human
accacgagcggagaacgcacauc

SEQ ID NO: 459804 - RNA, 18 nt, Human
agcaggcacaucuguccu

SEQ ID NO: 459805 - RNA, 18 nt, Human
agccuggucuccacaagc

SEQ ID NO: 459806 - RNA, 21 nt, Human
aguuuuuuuuuuuuuuuuuua

SEQ ID NO: 459807 - RNA, 20 nt, Human
auucagugaugaagaagaga

SEQ ID NO: 459808 - RNA, 23 nt, Human
caaagggauuccacaagguucuu

SEQ ID NO: 459809 - RNA, 20 nt, Human
caagcaggcacaucuguccu

SEQ ID NO: 459810 - RNA, 24 nt, Human
caaggacaaugcguguugacaaag

SEQ ID NO: 459811 - RNA, 19 nt, Human
caaugcguguugacaaagc

SEQ ID NO: 459812 - RNA, 19 nt, Human
cacacaagauagaucucug

SEQ ID NO: 459813 - RNA, 18 nt, Human
caccccccaagggcucca

SEQ ID NO: 459814 - RNA, 25 nt, Human
caccccccaagggcuccacgcuccg

SEQ ID NO: 459815 - RNA, 19 nt, Human
cacccgaccaccccccaag

SEQ ID NO: 459816 - RNA, 22 nt, Human
cacccgaccaccccccaagggc

SEQ ID NO: 459817 - RNA, 18 nt, Human
cagccccuccagaaagag

SEQ ID NO: 459818 - RNA, 22 nt, Human
cagguugggccuaagcaaaggg

SEQ ID NO: 459819 - RNA, 24 nt, Human
cauaacacugaauuaagaagcaga

SEQ ID NO: 459820 - RNA, 20 nt, Human
ccacccgaccaccccccaag

SEQ ID NO: 459821 - RNA, 21 nt, Human
ccagccuggucuccacaagca

SEQ ID NO: 459822 - RNA, 23 nt, Human
ccagccuggucuccacaagcagg

SEQ ID NO: 459823 - RNA, 18 nt, Human
ccaggcgacaguuggccu

SEQ ID NO: 459824 - RNA, 18 nt, Human
cccagccuggucuccaca

SEQ ID NO: 459825 - RNA, 20 nt, Human
ccccaagggcuccacgcucc

SEQ ID NO: 459826 - RNA, 22 nt, Human
cccuccagaaagagguggccgc

SEQ ID NO: 459827 - RNA, 19 nt, Human
ccuccggcagcucacucac

SEQ ID NO: 459828 - RNA, 22 nt, Human
cgcacaucccacccgaccaccc

SEQ ID NO: 459829 - RNA, 24 nt, Human
cuaacagcuuucaaauacaguacc

SEQ ID NO: 459830 - RNA, 21 nt, Human
cuccacaagcaggcacaucug

SEQ ID NO: 459831 - RNA, 24 nt, Human
cugaauuaagaagcagaccugcac

SEQ ID NO: 459832 - RNA, 22 nt, Human
gaccaccccccaagggcuccac

SEQ ID NO: 459833 - RNA, 19 nt, Human
gagaaagcgcgacguccca

SEQ ID NO: 459834 - RNA, 18 nt, Human
gagcuccugacaucacca

SEQ ID NO: 459835 - RNA, 31 nt, Human
gaugccucgaguuuuuuuuuuuuuuuuuccc

SEQ ID NO: 459836 - RNA, 20 nt, Human
gcacaucccacccgaccacc

SEQ ID NO: 459837 - RNA, 20 nt, Human
gcccagccuggucuccacaa

SEQ ID NO: 459838 - RNA, 21 nt, Human
gcugcuucuacgcucccugag

SEQ ID NO: 459839 - RNA, 18 nt, Human
gcuuggagaggcccuggc

SEQ ID NO: 459840 - RNA, 21 nt, Human
gcuuggagaggcccuggcugc

SEQ ID NO: 459841 - RNA, 21 nt, Human
gucaucggguuagcauuugaa

SEQ ID NO: 459842 - RNA, 24 nt, Human
uaucauaacacugaauuaagaagc

SEQ ID NO: 459843 - RNA, 18 nt, Human
uauggaaaccugcaggcu

SEQ ID NO: 459844 - RNA, 20 nt, Human
ucacuuucugucacagcagc

SEQ ID NO: 459845 - RNA, 21 nt, Human
ucaguguauggaaaccugcag

SEQ ID NO: 459846 - RNA, 21 nt, Human
uccacgcuccgggcuggggcu

SEQ ID NO: 459847 - RNA, 23 nt, Human
uccacgcuccgggcuggggcugc

SEQ ID NO: 459848 - RNA, 22 nt, Human
ucccacccgaccaccccccaag

SEQ ID NO: 459849 - RNA, 21 nt, Human
uccucagccccuccagaaaga

SEQ ID NO: 459850 - RNA, 22 nt, Human
uccuuggaaaaaauucuuucuc

SEQ ID NO: 459851 - RNA, 18 nt, Human
ucugucacagcagcggcu

SEQ ID NO: 459852 - RNA, 18 nt, Human
ugaccuaugaaagcaaaa

SEQ ID NO: 459853 - RNA, 18 nt, Human
uggaaaccugcaggcugc

SEQ ID NO: 459854 - RNA, 19 nt, Human
uggaacagaaguaguaaua

SEQ ID NO: 459855 - RNA, 23 nt, Human
uggcugcuucuacgcucccugag

SEQ ID NO: 459856 - RNA, 20 nt, Human
ugucacagcagcggcuugga

SEQ ID NO: 459857 - RNA, 22 nt, Human
uguccuguucuguccgaagcca

SEQ ID NO: 459858 - RNA, 22 nt, Human
uuaggcccagccuggucuccac

SEQ ID NO: 459859 - RNA, 21 nt, Human
uugaaguugucaucuccaagu

SEQ ID NO: 459860 - RNA, 25 nt, Human
uuuuuuuuuuuuuuuuuaaucuuuu

SEQ ID NO: 459861 - RNA, 20 nt, Human
aaaaaaaacgaaacagaaac

SEQ ID NO: 459862 - RNA, 24 nt, Human
aaaaaaacgaaacagaaacacagg

SEQ ID NO: 459863 - RNA, 20 nt, Human
aaaauggacuuaagcuauag

SEQ ID NO: 459864 - RNA, 23 nt, Human
aaacacaggugggaaggaacuga

SEQ ID NO: 459865 - RNA, 18 nt, Human
aaacgaaacagaaacaca

SEQ ID NO: 459866 - RNA, 22 nt, Human
aaagacuccaaaaaggcucaga

SEQ ID NO: 459867 - RNA, 22 nt, Human
aacaauggagacgaaggaggaa

SEQ ID NO: 459868 - RNA, 23 nt, Human
aacaauggagacgaaggaggaaa

SEQ ID NO: 459869 - RNA, 23 nt, Human
aacagaaacacaggugggaagga

SEQ ID NO: 459870 - RNA, 21 nt, Human
aacgucacguucuuggggaca

SEQ ID NO: 459871 - RNA, 23 nt, Human
aacugacuuugguugguggccuc

SEQ ID NO: 459872 - RNA, 28 nt, Human
aagcagugccauugugucucccaguagg

SEQ ID NO: 459873 - RNA, 27 nt, Human
aagcagugccauugugucucccagugg

SEQ ID NO: 459874 - RNA, 18 nt, Human
aaggaaucuggaacugaa

SEQ ID NO: 459875 - RNA, 18 nt, Human
aagggccucugccccgca

SEQ ID NO: 459876 - RNA, 23 nt, Human
acagggcaccagugagaagcaug

SEQ ID NO: 459877 - RNA, 22 nt, Human
acgaaggaggaaagacuccaaa

SEQ ID NO: 459878 - RNA, 18 nt, Human
acggagcccauagaaacu

SEQ ID NO: 459879 - RNA, 23 nt, Human
agaaaaaaaaaaacgaaacagaa

SEQ ID NO: 459880 - RNA, 25 nt, Human
agaaaaagagggaugggacaaagag

SEQ ID NO: 459881 - RNA, 19 nt, Human
agaaccaggaaggcugggc

SEQ ID NO: 459882 - RNA, 19 nt, Human
agagagaaaacauacuugg

SEQ ID NO: 459883 - RNA, 18 nt, Human
agagggaugggacaaaga

SEQ ID NO: 459884 - RNA, 21 nt, Human
agagggaugggacaaagagag

SEQ ID NO: 459885 - RNA, 22 nt, Human
agaguagcaccacaugaaugca

SEQ ID NO: 459886 - RNA, 22 nt, Human
agcacaguggcaacacccacaa

SEQ ID NO: 459887 - RNA, 21 nt, Human
aggaaggcugggcaggacagc

SEQ ID NO: 459888 - RNA, 20 nt, Human
aggaaucuggaacugaagac

SEQ ID NO: 459889 - RNA, 18 nt, Human
aggaccccagagaaccag

SEQ ID NO: 459890 - RNA, 23 nt, Human
agggaaguaguuaggguccaaag

SEQ ID NO: 459891 - RNA, 19 nt, Human
agucagacuucuagcagua

SEQ ID NO: 459892 - RNA, 19 nt, Human
aucaaagucagaagccacc

SEQ ID NO: 459893 - RNA, 24 nt, Human
caagcacaguggcaacacccacaa

SEQ ID NO: 459894 - RNA, 25 nt, Human
cacaagcaaacacuuacagagagcg

SEQ ID NO: 459895 - RNA, 18 nt, Human
cacacagaguagcaccac

SEQ ID NO: 459896 - RNA, 21 nt, Human
cacaccauuucggagauaagc

SEQ ID NO: 459897 - RNA, 22 nt, Human
cacccagaggaccccagagaac

SEQ ID NO: 459898 - RNA, 24 nt, Human
cacccagaggaccccagagaaccc

SEQ ID NO: 459899 - RNA, 24 nt, Human
cacggcacuauucccuuuugcaca

SEQ ID NO: 459900 - RNA, 27 nt, Human
cacucaagcacaguggcaacacccacu

SEQ ID NO: 459901 - RNA, 18 nt, Human
cacuccccggccgagggc

SEQ ID NO: 459902 - RNA, 19 nt, Human
cacugagccuuccaggguc

SEQ ID NO: 459903 - RNA, 19 nt, Human
cacuugcucguaacaaggc

SEQ ID NO: 459904 - RNA, 26 nt, Human
cagcagcaccacacuuugcuguaccc

SEQ ID NO: 459905 - RNA, 20 nt, Human
cagcgagggggugggccggc

SEQ ID NO: 459906 - RNA, 20 nt, Human
caggcccugaggcauccccu

SEQ ID NO: 459907 - RNA, 19 nt, Human
ccaaaaaggcucagaguca

SEQ ID NO: 459908 - RNA, 21 nt, Human
ccacacuuugcuguacccauc

SEQ ID NO: 459909 - RNA, 18 nt, Human
ccacaugaaugcaugugu

SEQ ID NO: 459910 - RNA, 20 nt, Human
ccaccgccccuaacacuagu

SEQ ID NO: 459911 - RNA, 19 nt, Human
ccagaaaaucaaagucaga

SEQ ID NO: 459912 - RNA, 20 nt, Human
ccagcccacgcaggccugcc

SEQ ID NO: 459913 - RNA, 20 nt, Human
ccagcgagggggugggccgg

SEQ ID NO: 459914 - RNA, 22 nt, Human
ccaucaguggccugccuucucu

SEQ ID NO: 459915 - RNA, 19 nt, Human
cccacagcgcgguggcagc

SEQ ID NO: 459916 - RNA, 21 nt, Human
ccccagagaaccaggaaggcu

SEQ ID NO: 459917 - RNA, 20 nt, Human
ccccgggggacaggcccagg

SEQ ID NO: 459918 - RNA, 23 nt, Human
cccuccaggagaugccacccacc

SEQ ID NO: 459919 - RNA, 21 nt, Human
cccuggccuccugggagcggg

SEQ ID NO: 459920 - RNA, 22 nt, Human
ccuccagcccacgcaggccugc

SEQ ID NO: 459921 - RNA, 21 nt, Human
ccuccaggagaugccacccac

SEQ ID NO: 459922 - RNA, 18 nt, Human
ccugggcggcuggccagg

SEQ ID NO: 459923 - RNA, 18 nt, Human
cggaacaauggagacgaa

SEQ ID NO: 459924 - RNA, 21 nt, Human
cuagugaucccaucacauucu

SEQ ID NO: 459925 - RNA, 22 nt, Human
cuccaggagaugccacccaccc

SEQ ID NO: 459926 - RNA, 28 nt, Human
cucccacuccuuaucuaggacagcucua

SEQ ID NO: 459927 - RNA, 19 nt, Human
cucccggcgggcaggacau

SEQ ID NO: 459928 - RNA, 23 nt, Human
cucgcccgccuccagcccacgca

SEQ ID NO: 459929 - RNA, 22 nt, Human
cugaucccaccuccaccaccgc

SEQ ID NO: 459930 - RNA, 23 nt, Human
cugcccuggccuccugggagcgg

SEQ ID NO: 459931 - RNA, 18 nt, Human
gaacaauggagacgaagg

SEQ ID NO: 459932 - RNA, 23 nt, Human
gaaggaggaaagacuccaaaaag

SEQ ID NO: 459933 - RNA, 18 nt, Human
gacaugacuaauccaccc

SEQ ID NO: 459934 - RNA, 20 nt, Human
gacuaggcgugugcugcugg

SEQ ID NO: 459935 - RNA, 19 nt, Human
gaggaccccagagaaccag

SEQ ID NO: 459936 - RNA, 23 nt, Human
gaggcccagucauccuacacggg

SEQ ID NO: 459937 - RNA, 26 nt, Human
gaggcccagucauccuacacgggucu

SEQ ID NO: 459938 - RNA, 21 nt, Human
gaggccugggcggcuggccag

SEQ ID NO: 459939 - RNA, 21 nt, Human
gaguccugucccuuucacgga

SEQ ID NO: 459940 - RNA, 18 nt, Human
gaucccaccuccaccacc

SEQ ID NO: 459941 - RNA, 24 nt, Human
gcacacagaguagcaccacaugaa

SEQ ID NO: 459942 - RNA, 19 nt, Human
gcacuauucccuuuugcac

SEQ ID NO: 459943 - RNA, 22 nt, Human
gcagcugggugccauguggccc

SEQ ID NO: 459944 - RNA, 22 nt, Human
gcagucuuuacacagagaggcc

SEQ ID NO: 459945 - RNA, 19 nt, Human
gccacccacccagaggacc

SEQ ID NO: 459946 - RNA, 23 nt, Human
gcggcagcaacgauguccugugu

SEQ ID NO: 459947 - RNA, 20 nt, Human
gcuugugggggagggucggg

SEQ ID NO: 459948 - RNA, 23 nt, Human
ggacaucacgaacgucacguucu

SEQ ID NO: 459949 - RNA, 26 nt, Human
ggccaggcccugaggcauccccuggc

SEQ ID NO: 459950 - RNA, 28 nt, Human
ggcugggguguggggaaagacucccggg

SEQ ID NO: 459951 - RNA, 24 nt, Human
gggcaggacagccaggcagucuuu

SEQ ID NO: 459952 - RNA, 19 nt, Human
guggccucacuccccggcc

SEQ ID NO: 459953 - RNA, 21 nt, Human
uaaggcagacaggcucugcaa

SEQ ID NO: 459954 - RNA, 24 nt, Human
uaaggcagacaggcucugcaaucc

SEQ ID NO: 459955 - RNA, 24 nt, Human
uacccaucaguggccugccuucuc

SEQ ID NO: 459956 - RNA, 23 nt, Human
uagaggccuugccucuaaagcuc

SEQ ID NO: 459957 - RNA, 24 nt, Human
uagaggccuugccucuaaagcucc

SEQ ID NO: 459958 - RNA, 25 nt, Human
uauagaaaaaaaagaaaaaaaaaaa

SEQ ID NO: 459959 - RNA, 26 nt, Human
uauagaaaaaaaagaaaaaaaaaaac

SEQ ID NO: 459960 - RNA, 24 nt, Human
uauauagaaaaaaaagaaaaaaaa

SEQ ID NO: 459961 - RNA, 25 nt, Human
uaucuaggacagcucuagaggucag

SEQ ID NO: 459962 - RNA, 20 nt, Human
uauuaagaguccguguccaa

SEQ ID NO: 459963 - RNA, 19 nt, Human
uauucccuuuugcacaagc

SEQ ID NO: 459964 - RNA, 18 nt, Human
ucaaagucagaagccacc

SEQ ID NO: 459965 - RNA, 21 nt, Human
ucaauguuuugccagaaaauc

SEQ ID NO: 459966 - RNA, 19 nt, Human
ucagugccagcgagggggu

SEQ ID NO: 459967 - RNA, 19 nt, Human
uccaaagucccagaaaaag

SEQ ID NO: 459968 - RNA, 22 nt, Human
ucccaccuccaccaccgccccu

SEQ ID NO: 459969 - RNA, 25 nt, Human
ucccaccuccaccaccgccccuaac

SEQ ID NO: 459970 - RNA, 21 nt, Human
ucuagaggucagaguguucuu

SEQ ID NO: 459971 - RNA, 18 nt, Human
ucugcaauccucagcugc

SEQ ID NO: 459972 - RNA, 22 nt, Human
ucuuccgcacacugaacgagag

SEQ ID NO: 459973 - RNA, 23 nt, Human
ucuuccgcacacugaacgagagc

SEQ ID NO: 459974 - RNA, 23 nt, Human
ucuuuggcuuggccagcagcacc

SEQ ID NO: 459975 - RNA, 21 nt, Human
ugccacccacccagaggaccc

SEQ ID NO: 459976 - RNA, 19 nt, Human
ugccagaaaaucaaaguca

SEQ ID NO: 459977 - RNA, 18 nt, Human
ugccccgcauguggggau

SEQ ID NO: 459978 - RNA, 19 nt, Human
ugcccuggccuccugggag

SEQ ID NO: 459979 - RNA, 21 nt, Human
ugcucguaacaaggcgugugc

SEQ ID NO: 459980 - RNA, 19 nt, Human
uggacacacacaccuccac

SEQ ID NO: 459981 - RNA, 20 nt, Human
uggcaacacccacaaggggc

SEQ ID NO: 459982 - RNA, 21 nt, Human
uggccagcagcaccacacuuu

SEQ ID NO: 459983 - RNA, 21 nt, Human
uggcucgagcuuacagggcac

SEQ ID NO: 459984 - RNA, 19 nt, Human
ugggaaggaacugacuuug

SEQ ID NO: 459985 - RNA, 19 nt, Human
ugggacaaagagagaaaac

SEQ ID NO: 459986 - RNA, 25 nt, Human
ugggagcgggcggcgauggcugggg

SEQ ID NO: 459987 - RNA, 21 nt, Human
ugguugguggccucacucccc

SEQ ID NO: 459988 - RNA, 22 nt, Human
ugguugguggccucacuccccg

SEQ ID NO: 459989 - RNA, 20 nt, Human
uguccgacuggccguaaggc

SEQ ID NO: 459990 - RNA, 18 nt, Human
ugugagggguggugggug

SEQ ID NO: 459991 - RNA, 23 nt, Human
uuaaaaauaaaauagaauucaac

SEQ ID NO: 459992 - RNA, 20 nt, Human
uuccagggucuagaggccuu

SEQ ID NO: 459993 - RNA, 18 nt, Human
uugagaagacggagccca

SEQ ID NO: 459994 - RNA, 23 nt, Human
uugccucuaaagcucccacuccu

SEQ ID NO: 459995 - RNA, 23 nt, Human
uugcugggaaggaaucuggaacu

SEQ ID NO: 459996 - RNA, 23 nt, Human
uuggggucuggcuuugcacacag

SEQ ID NO: 459997 - RNA, 18 nt, Human
uugugggggagggucggg

SEQ ID NO: 459998 - RNA, 24 nt, Human
aagcauuucuaaguuaagaaugaa

SEQ ID NO: 459999 - RNA, 25 nt, Human
caaguccaaccucuggaacauccaa

SEQ ID NO: 460000 - RNA, 22 nt, Human
cuaauacaaguccaaccucugg

SEQ ID NO: 460001 - RNA, 22 nt, Human
uauaaucaaauaccaggcagcc

SEQ ID NO: 460002 - RNA, 22 nt, Human
uccaaccucuggaacauccaaa

SEQ ID NO: 460003 - RNA, 19 nt, Human
ucuaaguuaagaaugaaaa

SEQ ID NO: 460004 - RNA, 22 nt, Human
aagaaaaaaauuccaucuagaa

SEQ ID NO: 460005 - RNA, 21 nt, Human
agaacuucguuuugaaaauau

SEQ ID NO: 460006 - RNA, 21 nt, Human
cagugcaugggaauguguaua

SEQ ID NO: 460007 - RNA, 20 nt, Human
ccaucuagaaaguacuaugu

SEQ ID NO: 460008 - RNA, 18 nt, Human
ccguagucucuaguuucc

SEQ ID NO: 460009 - RNA, 23 nt, Human
cucgucucaaacaaaaugaaauc

SEQ ID NO: 460010 - RNA, 26 nt, Human
cugguguucaggugaaugacuuggua

SEQ ID NO: 460011 - RNA, 19 nt, Human
gccguagucucuaguuucc

SEQ ID NO: 460012 - RNA, 19 nt, Human
ggaaauguauuucauugag

SEQ ID NO: 460013 - RNA, 24 nt, Human
gggaauggagacauuuauuuccau

SEQ ID NO: 460014 - RNA, 22 nt, Human
guaaaauuuagaacuagagaaa

SEQ ID NO: 460015 - RNA, 23 nt, Human
uauaauauuuccauuggaaaagg

SEQ ID NO: 460016 - RNA, 18 nt, Human
uaugguacaauguuuaau

SEQ ID NO: 460017 - RNA, 20 nt, Human
ucaaaucagauuucagcaaa

SEQ ID NO: 460018 - RNA, 21 nt, Human
ucaaaucagauuucagcaaaa

SEQ ID NO: 460019 - RNA, 26 nt, Human
ucaggagaauauagguaauucucuuu

SEQ ID NO: 460020 - RNA, 22 nt, Human
ucaguaucaggagaauauaggu

SEQ ID NO: 460021 - RNA, 25 nt, Human
ucugcagguuaccaccacagccgua

SEQ ID NO: 460022 - RNA, 19 nt, Human
ugaaugacuugguaaucag

SEQ ID NO: 460023 - RNA, 24 nt, Human
ugauaagauaaugaaauuguaugg

SEQ ID NO: 460024 - RNA, 21 nt, Human
ugcagguuaccaccacagccg

SEQ ID NO: 460025 - RNA, 23 nt, Human
ugcagguuaccaccacagccgua

SEQ ID NO: 460026 - RNA, 21 nt, Human
uggaaaagggcuccucuagua

SEQ ID NO: 460027 - RNA, 19 nt, Human
uuccauuggaaaagggcuc

SEQ ID NO: 460028 - RNA, 21 nt, Human
uucccugugaauugguuucau

SEQ ID NO: 460029 - RNA, 28 nt, Human
uuucagcaaaacuuagguuuuuugggaa

SEQ ID NO: 460030 - RNA, 18 nt, Human
uuugggaauugguaaaau

SEQ ID NO: 460031 - RNA, 20 nt, Human
aacuaagaaauagaggcaag

SEQ ID NO: 460032 - RNA, 18 nt, Human
aagcccaaagugaucaaa

SEQ ID NO: 460033 - RNA, 18 nt, Human
aagugaagggcucuagga

SEQ ID NO: 460034 - RNA, 24 nt, Human
agaaauagaggcaagaaagaggga

SEQ ID NO: 460035 - RNA, 23 nt, Human
agagacaaaggcuuuggaagaaa

SEQ ID NO: 460036 - RNA, 22 nt, Human
agaggucucagagacaaaggcu

SEQ ID NO: 460037 - RNA, 24 nt, Human
aggaagcggcuguaugugcugaca

SEQ ID NO: 460038 - RNA, 22 nt, Human
aggcaagaaagagggaguaacc

SEQ ID NO: 460039 - RNA, 25 nt, Human
aggcaagaaagagggaguaacccga

SEQ ID NO: 460040 - RNA, 21 nt, Human
aggcagucuggcuggccaccu

SEQ ID NO: 460041 - RNA, 22 nt, Human
aggucucagagacaaaggcuuu

SEQ ID NO: 460042 - RNA, 23 nt, Human
caaaugcugccuccuggaacuga

SEQ ID NO: 460043 - RNA, 20 nt, Human
cagccagcucaaguuggauu

SEQ ID NO: 460044 - RNA, 22 nt, Human
cagcucaaguuggauuucagca

SEQ ID NO: 460045 - RNA, 24 nt, Human
cagggaccaccagccagcucaagu

SEQ ID NO: 460046 - RNA, 22 nt, Human
cccccgacagacgcaccgaccu

SEQ ID NO: 460047 - RNA, 20 nt, Human
ccccggaaaauuacugcacc

SEQ ID NO: 460048 - RNA, 19 nt, Human
cgcccccgacagacgcacu

SEQ ID NO: 460049 - RNA, 19 nt, Human
cgugcaaaagcugcugugu

SEQ ID NO: 460050 - RNA, 19 nt, Human
cgugggcauuccugaggcu

SEQ ID NO: 460051 - RNA, 23 nt, Human
cucucaagacugguguuuccuag

SEQ ID NO: 460052 - RNA, 20 nt, Human
cugaggcuuuacuuuccccg

SEQ ID NO: 460053 - RNA, 24 nt, Human
cuggaacugagggacaaagguuuu

SEQ ID NO: 460054 - RNA, 19 nt, Human
gaaaauuacugcaccauaa

SEQ ID NO: 460055 - RNA, 24 nt, Human
gcaagaaagagggaguaacccgaa

SEQ ID NO: 460056 - RNA, 18 nt, Human
gcgcgcgcgccgcgggca

SEQ ID NO: 460057 - RNA, 23 nt, Human
ggagaaacagcgaggggcauuua

SEQ ID NO: 460058 - RNA, 26 nt, Human
ggcuuuggaagaaaggcgugggcauu

SEQ ID NO: 460059 - RNA, 22 nt, Human
ggguacagguacccgagcgcgc

SEQ ID NO: 460060 - RNA, 21 nt, Human
uaacuugacuuguaaaucacc

SEQ ID NO: 460061 - RNA, 21 nt, Human
uacugcaccauaauuugugag

SEQ ID NO: 460062 - RNA, 18 nt, Human
uagaggcaagaaagaggg

SEQ ID NO: 460063 - RNA, 20 nt, Human
uaugugcugacacgcaugug

SEQ ID NO: 460064 - RNA, 24 nt, Human
ucagcagucggggcugccuggggc

SEQ ID NO: 460065 - RNA, 21 nt, Human
ucucagagacaaaggcuuugg

SEQ ID NO: 460066 - RNA, 19 nt, Human
ugccuggggcgugcaaaag

SEQ ID NO: 460067 - RNA, 21 nt, Human
uggccaccucucaagacuggu

SEQ ID NO: 460068 - RNA, 21 nt, Human
ugugagcaaaacgcugccgug

SEQ ID NO: 460069 - RNA, 18 nt, Human
uuccuagagcuuuccauu

SEQ ID NO: 460070 - RNA, 20 nt, Human
uuccuagagcuuuccauugg

SEQ ID NO: 460071 - RNA, 20 nt, Human
uuguaaaucaccacuggaac

SEQ ID NO: 460072 - RNA, 20 nt, Human
uuuuuuuuuuuuucagagga

SEQ ID NO: 460073 - RNA, 21 nt, Human
uuuuuuuuuuuuuuuucagag

SEQ ID NO: 460074 - RNA, 22 nt, Human
aaaagcagugcuuuauugaguu

SEQ ID NO: 460075 - RNA, 18 nt, Human
acugccucuccacgcucc

SEQ ID NO: 460076 - RNA, 22 nt, Human
agccucgggcgggagcagcagc

SEQ ID NO: 460077 - RNA, 18 nt, Human
agcuggguguaggaaagc

SEQ ID NO: 460078 - RNA, 25 nt, Human
caaaacaguccugaagcuuaaucaa

SEQ ID NO: 460079 - RNA, 21 nt, Human
ccgcgcccgccgcuccggccc

SEQ ID NO: 460080 - RNA, 19 nt, Human
ccggccgcgcccgccgcuc

SEQ ID NO: 460081 - RNA, 21 nt, Human
cgcuccggcccggcucggcuc

SEQ ID NO: 460082 - RNA, 24 nt, Human
cggucccaccucgcuuuacaaaac

SEQ ID NO: 460083 - RNA, 23 nt, Human
gaaaacauuauuucucaccuuuc

SEQ ID NO: 460084 - RNA, 23 nt, Human
ggguguaggaaagccgggccugg

SEQ ID NO: 460085 - RNA, 22 nt, Human
gguaugaaucucauuuauugga

SEQ ID NO: 460086 - RNA, 20 nt, Human
guacacaacauuuacauuag

SEQ ID NO: 460087 - RNA, 19 nt, Human
uacaaaacaguccugaagc

SEQ ID NO: 460088 - RNA, 22 nt, Human
ucggcucggucggccccggcgg

SEQ ID NO: 460089 - RNA, 21 nt, Human
ugucaugagccucgggcggga

SEQ ID NO: 460090 - RNA, 23 nt, Human
uuuuuuuuuuuuuuuuuuaaugg

SEQ ID NO: 460091 - RNA, 20 nt, Human
caaaauaaauauaaaguaac

SEQ ID NO: 460092 - RNA, 20 nt, Human
cauugaauacaaaauaaaua

SEQ ID NO: 460093 - RNA, 23 nt, Human
uaaaguaacugaaaaacaaauca

SEQ ID NO: 460094 - RNA, 21 nt, Human
uaacugaaaaacaaaucaggu

SEQ ID NO: 460095 - RNA, 20 nt, Human
uuuuucuuucuuguaaaugc

SEQ ID NO: 460096 - RNA, 19 nt, Human
aaacaguggggacaaaauu

SEQ ID NO: 460097 - RNA, 18 nt, Human
aacauuuuuaaacagugg

SEQ ID NO: 460098 - RNA, 20 nt, Human
aagugcuagugguuacaaau

SEQ ID NO: 460099 - RNA, 18 nt, Human
aaugacacccaggccaac

SEQ ID NO: 460100 - RNA, 22 nt, Human
aauuuuguucucuucaguuuuu

SEQ ID NO: 460101 - RNA, 23 nt, Human
acccaggccaaccccccggcagc

SEQ ID NO: 460102 - RNA, 21 nt, Human
cauuuuuaaacaguggggaca

SEQ ID NO: 460103 - RNA, 18 nt, Human
ccagcccgaaggcccgcc

SEQ ID NO: 460104 - RNA, 28 nt, Human
ccggcagccgacggcgagccagcccgaa

SEQ ID NO: 460105 - RNA, 24 nt, Human
cgacaccagaccccgagugguccc

SEQ ID NO: 460106 - RNA, 27 nt, Human
cuagugguuacaaauuuuguucucuuc

SEQ ID NO: 460107 - RNA, 20 nt, Human
cugcugccgcuucccagagc

SEQ ID NO: 460108 - RNA, 22 nt, Human
gaaauacacagguaacauuuuu

SEQ ID NO: 460109 - RNA, 23 nt, Human
gcugugccgacaccagaccccga

SEQ ID NO: 460110 - RNA, 18 nt, Human
uaauagaugauauacaua

SEQ ID NO: 460111 - RNA, 27 nt, Human
uaauagaugauauacauauuacugccg

SEQ ID NO: 460112 - RNA, 21 nt, Human
uaguaaaaauagcauucagug

SEQ ID NO: 460113 - RNA, 25 nt, Human
uauauacacugcauggaaauacaca

SEQ ID NO: 460114 - RNA, 31 nt, Human
ucagcagcagcuggcaaugcugucccuucuu

SEQ ID NO: 460115 - RNA, 23 nt, Human
ucaguuuuucauuaaguaaauuc

SEQ ID NO: 460116 - RNA, 19 nt, Human
ucccagagccaaugacacc

SEQ ID NO: 460117 - RNA, 25 nt, Human
ucuaauagaugauauacauauuacu

SEQ ID NO: 460118 - RNA, 21 nt, Human
ucugcugccgcuucccagagc

SEQ ID NO: 460119 - RNA, 21 nt, Human
ucugugacucagcagcagcug

SEQ ID NO: 460120 - RNA, 20 nt, Human
ucuuguggucauuaaagaca

SEQ ID NO: 460121 - RNA, 20 nt, Human
ugacacccaggccaaccccc

SEQ ID NO: 460122 - RNA, 21 nt, Human
ugacacccaggccaacccccc

SEQ ID NO: 460123 - RNA, 21 nt, Human
ugacucagcagcagcuggcaa

SEQ ID NO: 460124 - RNA, 19 nt, Human
ugauauacauauuacugca

SEQ ID NO: 460125 - RNA, 22 nt, Human
uggcaaugcugucccuucaaga

SEQ ID NO: 460126 - RNA, 20 nt, Human
uggucccugccucugcugcc

SEQ ID NO: 460127 - RNA, 18 nt, Human
ugguuuagaaacucucag

SEQ ID NO: 460128 - RNA, 22 nt, Human
aaaaaugagacucagagagaga

SEQ ID NO: 460129 - RNA, 20 nt, Human
aaaagaccaguguggugacg

SEQ ID NO: 460130 - RNA, 28 nt, Human
aaacaagaggggacccgccuugauccag

SEQ ID NO: 460131 - RNA, 23 nt, Human
aaacuccccuaugaaaaauuuaa

SEQ ID NO: 460132 - RNA, 22 nt, Human
aaagagcauuuuaaaaaaugag

SEQ ID NO: 460133 - RNA, 21 nt, Human
aaccaugcgauuggucaaaac

SEQ ID NO: 460134 - RNA, 21 nt, Human
aacuggcccugcgacuuuggu

SEQ ID NO: 460135 - RNA, 22 nt, Human
aagaaaaagaccagugugguga

SEQ ID NO: 460136 - RNA, 18 nt, Human
aagaaggaaggaggcaga

SEQ ID NO: 460137 - RNA, 18 nt, Human
aagaaggaaggaggcaga

SEQ ID NO: 460138 - RNA, 19 nt, Human
aagaaggaaggaggcagag

SEQ ID NO: 460139 - RNA, 19 nt, Human
aagaaggaaggaggcagag

SEQ ID NO: 460140 - RNA, 22 nt, Human
aagagaaagcaagacugggcaa

SEQ ID NO: 460141 - RNA, 23 nt, Human
aaggucacagaguccacagcuga

SEQ ID NO: 460142 - RNA, 25 nt, Human
aauaaagagagagacuaagaagaga

SEQ ID NO: 460143 - RNA, 18 nt, Human
acaaaauccaaaacccca

SEQ ID NO: 460144 - RNA, 22 nt, Human
acacccagccugauaggagccc

SEQ ID NO: 460145 - RNA, 20 nt, Human
acacugaagccucugaaagu

SEQ ID NO: 460146 - RNA, 23 nt, Human
acuguuuuguccaaaacuccccu

SEQ ID NO: 460147 - RNA, 18 nt, Human
agaaaaaguccaugagga

SEQ ID NO: 460148 - RNA, 24 nt, Human
agaaaaggaauaugggaaagagaa

SEQ ID NO: 460149 - RNA, 24 nt, Human
agaaaauaaguuucagacagucau

SEQ ID NO: 460150 - RNA, 18 nt, Human
agagaaagaaggaaggag

SEQ ID NO: 460151 - RNA, 21 nt, Human
agagcaucaugugcuucacag

SEQ ID NO: 460152 - RNA, 25 nt, Human
agagggcagacccagcugacgagca

SEQ ID NO: 460153 - RNA, 21 nt, Human
agaggguuugaaauaaaagua

SEQ ID NO: 460154 - RNA, 24 nt, Human
agcacagcuccacacaaaccaccc

SEQ ID NO: 460155 - RNA, 26 nt, Human
aggagagaagaaggagaaaaggggag

SEQ ID NO: 460156 - RNA, 18 nt, Human
aggcagggcagggcagag

SEQ ID NO: 460157 - RNA, 21 nt, Human
aggccgccgagcaggucggcg

SEQ ID NO: 460158 - RNA, 21 nt, Human
aggggguugaagagaaagaag

SEQ ID NO: 460159 - RNA, 18 nt, Human
aggugguggagagugaag

SEQ ID NO: 460160 - RNA, 23 nt, Human
agucaaguguguaaaaauggcag

SEQ ID NO: 460161 - RNA, 20 nt, Human
aguuguguugguuugucagu

SEQ ID NO: 460162 - RNA, 21 nt, Human
auacaaaauccaaaaccccau

SEQ ID NO: 460163 - RNA, 26 nt, Human
caagaaggagcccaggaccucuugcc

SEQ ID NO: 460164 - RNA, 23 nt, Human
cacacaaaccacccucgacaucc

SEQ ID NO: 460165 - RNA, 24 nt, Human
cacacaaaccacccucgacaucca

SEQ ID NO: 460166 - RNA, 20 nt, Human
cacacuugcagagcugggaa

SEQ ID NO: 460167 - RNA, 21 nt, Human
cacagcagacgcgacagagac

SEQ ID NO: 460168 - RNA, 20 nt, Human
cacccagccugauaggagcc

SEQ ID NO: 460169 - RNA, 25 nt, Human
cacuguguggccacacaauggagga

SEQ ID NO: 460170 - RNA, 27 nt, Human
cagcaaagaaaaaaacaagaggggacc

SEQ ID NO: 460171 - RNA, 18 nt, Human
cagcagacgcgacagaga

SEQ ID NO: 460172 - RNA, 28 nt, Human
cagccgccugcccggccccaccguucgg

SEQ ID NO: 460173 - RNA, 18 nt, Human
cagggcagagcgcaggcc

SEQ ID NO: 460174 - RNA, 22 nt, Human
caguuuuuuuuuccuuccauuu

SEQ ID NO: 460175 - RNA, 21 nt, Human
ccaggugguggagagugaagc

SEQ ID NO: 460176 - RNA, 21 nt, Human
cccagccugauaggagcccac

SEQ ID NO: 460177 - RNA, 19 nt, Human
ccccacagcuguuucuacu

SEQ ID NO: 460178 - RNA, 24 nt, Human
cccccugggacccuggcguaucca

SEQ ID NO: 460179 - RNA, 20 nt, Human
ccccugagggaccuugggug

SEQ ID NO: 460180 - RNA, 22 nt, Human
ccccugggacccuggcguaucc

SEQ ID NO: 460181 - RNA, 19 nt, Human
ccccugggcgcgggcgggc

SEQ ID NO: 460182 - RNA, 24 nt, Human
cccggcccgcgcuggggccccggc

SEQ ID NO: 460183 - RNA, 23 nt, Human
cccgugccacagcaggaucugag

SEQ ID NO: 460184 - RNA, 21 nt, Human
cccuuaguggggagaaagccc

SEQ ID NO: 460185 - RNA, 24 nt, Human
cccuuuuaaacucuggcucauguc

SEQ ID NO: 460186 - RNA, 18 nt, Human
ccgccgccgccgcucccg

SEQ ID NO: 460187 - RNA, 18 nt, Human
ccgccgccgccgcucccg

SEQ ID NO: 460188 - RNA, 23 nt, Human
ccggccccaccguucggggcccc

SEQ ID NO: 460189 - RNA, 21 nt, Human
ccggccgccgccgccgcuccc

SEQ ID NO: 460190 - RNA, 23 nt, Human
ccggccgccgccgccgcucccgg

SEQ ID NO: 460191 - RNA, 24 nt, Human
ccucaagaaggagcccaggaccuc

SEQ ID NO: 460192 - RNA, 19 nt, Human
ccuccguggccuccgccgu

SEQ ID NO: 460193 - RNA, 22 nt, Human
ccucugaaaguuguguugguuu

SEQ ID NO: 460194 - RNA, 23 nt, Human
ccugaggagccuggcagagacac

SEQ ID NO: 460195 - RNA, 22 nt, Human
ccugauaggagcccacccugaa

SEQ ID NO: 460196 - RNA, 21 nt, Human
cgacagagacacauaggcccc

SEQ ID NO: 460197 - RNA, 21 nt, Human
cgccgugcccccucccggccc

SEQ ID NO: 460198 - RNA, 22 nt, Human
cgcuggggccccggcccggccg

SEQ ID NO: 460199 - RNA, 25 nt, Human
cggccgccgccgccgcucccggggg

SEQ ID NO: 460200 - RNA, 20 nt, Human
cggggccccugggcgcgggc

SEQ ID NO: 460201 - RNA, 19 nt, Human
cgugccacagcaggaucug

SEQ ID NO: 460202 - RNA, 23 nt, Human
cgugcccccucccggcccgcgcu

SEQ ID NO: 460203 - RNA, 26 nt, Human
cuccacacaaaccacccucgacaucc

SEQ ID NO: 460204 - RNA, 21 nt, Human
cucugucugggccugaggagc

SEQ ID NO: 460205 - RNA, 21 nt, Human
cugaaaguuguguugguuugu

SEQ ID NO: 460206 - RNA, 20 nt, Human
cugagggaccuuggguggga

SEQ ID NO: 460207 - RNA, 20 nt, Human
cuucccuagccauaugcugu

SEQ ID NO: 460208 - RNA, 22 nt, Human
gaaaaagaaaaggaauauggga

SEQ ID NO: 460209 - RNA, 21 nt, Human
gacuguuuuguccaaaacucc

SEQ ID NO: 460210 - RNA, 19 nt, Human
gagacaccaccuggcauag

SEQ ID NO: 460211 - RNA, 23 nt, Human
gagcauuuuaaaaaaugagacuc

SEQ ID NO: 460212 - RNA, 19 nt, Human
gaggagccuggcagagaca

SEQ ID NO: 460213 - RNA, 26 nt, Human
gaguccacagcugaccaacuaccugg

SEQ ID NO: 460214 - RNA, 18 nt, Human
gccuaccaugagaggggg

SEQ ID NO: 460215 - RNA, 19 nt, Human
gcguauccacggcaucucu

SEQ ID NO: 460216 - RNA, 22 nt, Human
gcuguuucuacuucuaacuggu

SEQ ID NO: 460217 - RNA, 19 nt, Human
ggaagagggcagacccagc

SEQ ID NO: 460218 - RNA, 24 nt, Human
ggaccaccucguggcagcaaagaa

SEQ ID NO: 460219 - RNA, 24 nt, Human
ggagagaagaaggagaaaagggga

SEQ ID NO: 460220 - RNA, 19 nt, Human
ggcaagcggaugcaggccc

SEQ ID NO: 460221 - RNA, 23 nt, Human
gggaaugagacauuaaagaaaaa

SEQ ID NO: 460222 - RNA, 20 nt, Human
gggagagagugugagcuugg

SEQ ID NO: 460223 - RNA, 22 nt, Human
gggagaggggaagcacuggcuc

SEQ ID NO: 460224 - RNA, 19 nt, Human
gggaguagcagaggcuagg

SEQ ID NO: 460225 - RNA, 18 nt, Human
gggcaagcggaugcaggc

SEQ ID NO: 460226 - RNA, 23 nt, Human
gggcacacuugcagagcugggaa

SEQ ID NO: 460227 - RNA, 23 nt, Human
gggcagaagaggcuucucugugc

SEQ ID NO: 460228 - RNA, 18 nt, Human
ggggcacacuugcagagc

SEQ ID NO: 460229 - RNA, 23 nt, Human
gggugggaggugguguccugggg

SEQ ID NO: 460230 - RNA, 19 nt, Human
ggucacagaguccacagcu

SEQ ID NO: 460231 - RNA, 22 nt, Human
ggugggaggugguguccugggg

SEQ ID NO: 460232 - RNA, 20 nt, Human
gguguccugggggagggggu

SEQ ID NO: 460233 - RNA, 19 nt, Human
gguugugggcuggccucug

SEQ ID NO: 460234 - RNA, 19 nt, Human
guggcagcaaagaaaaaaa

SEQ ID NO: 460235 - RNA, 19 nt, Human
guggccuccgccgugcccc

SEQ ID NO: 460236 - RNA, 22 nt, Human
uaaaaagucaaguguguaaaaa

SEQ ID NO: 460237 - RNA, 20 nt, Human
uaagaaguuguggugguugg

SEQ ID NO: 460238 - RNA, 23 nt, Human
uagaaagcaaauaaagucacucu

SEQ ID NO: 460239 - RNA, 25 nt, Human
uagaaagcaaauaaagucacucucu

SEQ ID NO: 460240 - RNA, 18 nt, Human
uagaacaguauuuuacaa

SEQ ID NO: 460241 - RNA, 19 nt, Human
uagcagaggcuaggcaggg

SEQ ID NO: 460242 - RNA, 21 nt, Human
uaggauggagcgggccaggca

SEQ ID NO: 460243 - RNA, 24 nt, Human
uaugcuguauuguuuuuauuauua

SEQ ID NO: 460244 - RNA, 23 nt, Human
uauuauacaaaauccaaaacccc

SEQ ID NO: 460245 - RNA, 21 nt, Human
ucaaggggaaugagacauuaa

SEQ ID NO: 460246 - RNA, 19 nt, Human
ucacagcagacgcgacaga

SEQ ID NO: 460247 - RNA, 20 nt, Human
ucagugaaauauccccugag

SEQ ID NO: 460248 - RNA, 21 nt, Human
uccacacaaaccacccucgac

SEQ ID NO: 460249 - RNA, 23 nt, Human
uccagagaacagacacugaagcc

SEQ ID NO: 460250 - RNA, 18 nt, Human
uccauuuuugagaaggug

SEQ ID NO: 460251 - RNA, 19 nt, Human
ucccuagccauaugcugua

SEQ ID NO: 460252 - RNA, 24 nt, Human
uccguggccuccgccgugcccccu

SEQ ID NO: 460253 - RNA, 26 nt, Human
uccuaagcugggcccaagccccacag

SEQ ID NO: 460254 - RNA, 22 nt, Human
uccugggggagggggucauagg

SEQ ID NO: 460255 - RNA, 22 nt, Human
ucggcgcggcccgggaagcgga

SEQ ID NO: 460256 - RNA, 19 nt, Human
ucggggccccugggcgcgg

SEQ ID NO: 460257 - RNA, 21 nt, Human
ucggggccccugggcgcgggc

SEQ ID NO: 460258 - RNA, 24 nt, Human
ucuacaauaaauagagccgggguc

SEQ ID NO: 460259 - RNA, 23 nt, Human
ucuggcaggggcagaagaggcuu

SEQ ID NO: 460260 - RNA, 23 nt, Human
ugaaaaauaaagagagagacuaa

SEQ ID NO: 460261 - RNA, 21 nt, Human
ugaagagaaagaaggaaggag

SEQ ID NO: 460262 - RNA, 25 nt, Human
ugagaaggugaagguggggaggggg

SEQ ID NO: 460263 - RNA, 18 nt, Human
ugagagggggaagcugcc

SEQ ID NO: 460264 - RNA, 20 nt, Human
ugagagggggaagcugccgg

SEQ ID NO: 460265 - RNA, 24 nt, Human
ugaggagagaagaaggagaaaagg

SEQ ID NO: 460266 - RNA, 21 nt, Human
ugagggaccuugggugggagu

SEQ ID NO: 460267 - RNA, 26 nt, Human
ugcaacuggcccugcgacuuuggugc

SEQ ID NO: 460268 - RNA, 20 nt, Human
ugcagaaaaaguccaugagg

SEQ ID NO: 460269 - RNA, 18 nt, Human
ugcgauuggucaaaacug

SEQ ID NO: 460270 - RNA, 22 nt, Human
ugcgggauggaggcagggcaag

SEQ ID NO: 460271 - RNA, 18 nt, Human
uggcaggcgccaugccau

SEQ ID NO: 460272 - RNA, 20 nt, Human
uggcucaugucccaaaugua

SEQ ID NO: 460273 - RNA, 21 nt, Human
ugggaaguugugucaacagcu

SEQ ID NO: 460274 - RNA, 23 nt, Human
ugggaggugguguccugggggag

SEQ ID NO: 460275 - RNA, 21 nt, Human
ugggaucagugucggaaccuc

SEQ ID NO: 460276 - RNA, 19 nt, Human
uggggagaaagcccagucc

SEQ ID NO: 460277 - RNA, 19 nt, Human
uggggaggggguugaagag

SEQ ID NO: 460278 - RNA, 20 nt, Human
uuaaagaaaaagaccagugu

SEQ ID NO: 460279 - RNA, 20 nt, Human
uugaagagaaagaaggaagg

SEQ ID NO: 460280 - RNA, 22 nt, Human
uugcagagcugggaaguugugu

SEQ ID NO: 460281 - RNA, 18 nt, Human
uuggcacaagagaaaaag

SEQ ID NO: 460282 - RNA, 22 nt, Human
uugguucccuuuuaaacucugg

SEQ ID NO: 460283 - RNA, 25 nt, Human
uuucucagagagaaaauaaguuuca

SEQ ID NO: 460284 - RNA, 25 nt, Human
uuuuacaauuauauacaccaugucc

SEQ ID NO: 460285 - RNA, 19 nt, Human
aagcccuuggcacccccaa

SEQ ID NO: 460286 - RNA, 19 nt, Human
acucuaaggaaugauauga

SEQ ID NO: 460287 - RNA, 18 nt, Human
agagggcggggggcugcc

SEQ ID NO: 460288 - RNA, 21 nt, Human
agagggcggggggcugcccag

SEQ ID NO: 460289 - RNA, 21 nt, Human
agagggcggggggcugcccag

SEQ ID NO: 460290 - RNA, 25 nt, Human
agccccaggcaccagccuugggucc

SEQ ID NO: 460291 - RNA, 22 nt, Human
aggggcggggccggggcggggc

SEQ ID NO: 460292 - RNA, 18 nt, Human
agggggagggggcggagc

SEQ ID NO: 460293 - RNA, 20 nt, Human
agggggcgggguccgggugg

SEQ ID NO: 460294 - RNA, 19 nt, Human
cacccccaacgcccucugc

SEQ ID NO: 460295 - RNA, 25 nt, Human
cacccccaacgcccucugcugguuc

SEQ ID NO: 460296 - RNA, 20 nt, Human
ccccgcccugucagcccucc

SEQ ID NO: 460297 - RNA, 21 nt, Human
ccccgcccugucagcccuccc

SEQ ID NO: 460298 - RNA, 28 nt, Human
ccccuggacagucacuccucaccagccc

SEQ ID NO: 460299 - RNA, 26 nt, Human
cccgccugucccgccguccccucccu

SEQ ID NO: 460300 - RNA, 29 nt, Human
cccugucagcccucccgccggucccacuu

SEQ ID NO: 460301 - RNA, 23 nt, Human
ccgauccaccuccguccgcagcu

SEQ ID NO: 460302 - RNA, 24 nt, Human
ccucccuggaccgguggcgagggc

SEQ ID NO: 460303 - RNA, 23 nt, Human
ccugucccgccguccccucccug

SEQ ID NO: 460304 - RNA, 21 nt, Human
ccuuggguccgauccaccucc

SEQ ID NO: 460305 - RNA, 18 nt, Human
cgcagcugcuccuucggg

SEQ ID NO: 460306 - RNA, 21 nt, Human
cgggcggagagggcggggggc

SEQ ID NO: 460307 - RNA, 18 nt, Human
cggggccggggcggggcg

SEQ ID NO: 460308 - RNA, 22 nt, Human
cguagaggggguggggcgggca

SEQ ID NO: 460309 - RNA, 22 nt, Human
cucuccuuucuucucacucuuu

SEQ ID NO: 460310 - RNA, 18 nt, Human
cucugcugguuccccugg

SEQ ID NO: 460311 - RNA, 19 nt, Human
cugcaggcacagaacaacc

SEQ ID NO: 460312 - RNA, 20 nt, Human
cuuagccccaggcaccagcc

SEQ ID NO: 460313 - RNA, 22 nt, Human
cuuggcacccccaacgcccucu

SEQ ID NO: 460314 - RNA, 22 nt, Human
gaaguaaaucugggcuucccuu

SEQ ID NO: 460315 - RNA, 18 nt, Human
gaggggcguagagggggu

SEQ ID NO: 460316 - RNA, 21 nt, Human
gaggggguggggcgggcagga

SEQ ID NO: 460317 - RNA, 19 nt, Human
gccagggggagggggcgga

SEQ ID NO: 460318 - RNA, 22 nt, Human
gcccugucagcccucccgccgg

SEQ ID NO: 460319 - RNA, 18 nt, Human
gcuggucagugaaagcag

SEQ ID NO: 460320 - RNA, 27 nt, Human
gcuuuuccucuccuuucuucucacucc

SEQ ID NO: 460321 - RNA, 22 nt, Human
ggcaggaaaggggcggggccgg

SEQ ID NO: 460322 - RNA, 19 nt, Human
ggccagggggagggggcgg

SEQ ID NO: 460323 - RNA, 22 nt, Human
ggcccgggccgagguggcggcu

SEQ ID NO: 460324 - RNA, 19 nt, Human
ggcggagagggcggggggc

SEQ ID NO: 460325 - RNA, 19 nt, Human
ggcguagaggggguggggc

SEQ ID NO: 460326 - RNA, 19 nt, Human
gggaagggcugcucaagcg

SEQ ID NO: 460327 - RNA, 21 nt, Human
gggcaggaaaggggcggggcc

SEQ ID NO: 460328 - RNA, 21 nt, Human
gggccgagguggcggcugaac

SEQ ID NO: 460329 - RNA, 20 nt, Human
gggcggagagggcggggggc

SEQ ID NO: 460330 - RNA, 19 nt, Human
gggcggggccggggcgggg

SEQ ID NO: 460331 - RNA, 20 nt, Human
gggcggggccggggcggggc

SEQ ID NO: 460332 - RNA, 19 nt, Human
gggcggggcgggcccgggc

SEQ ID NO: 460333 - RNA, 19 nt, Human
gggggagggggcggagccc

SEQ ID NO: 460334 - RNA, 19 nt, Human
gggguggggcgggcaggaa

SEQ ID NO: 460335 - RNA, 25 nt, Human
gggguggggcgggcaggaaaggggc

SEQ ID NO: 460336 - RNA, 18 nt, Human
gucacuccucaccagccc

SEQ ID NO: 460337 - RNA, 20 nt, Human
gucagcccucccgccggucc

SEQ ID NO: 460338 - RNA, 25 nt, Human
guccggguggaggggcguagagggg

SEQ ID NO: 460339 - RNA, 22 nt, Human
uccaccuccguccgcagcugcu

SEQ ID NO: 460340 - RNA, 22 nt, Human
ucccuggaccgguggcgagggc

SEQ ID NO: 460341 - RNA, 23 nt, Human
ucccuugcggagaagcccuuggc

SEQ ID NO: 460342 - RNA, 25 nt, Human
uccggguggaggggcguagaggggg

SEQ ID NO: 460343 - RNA, 20 nt, Human
uccucuccuuucuucucacu

SEQ ID NO: 460344 - RNA, 22 nt, Human
uccuuuggucccuaaacucuaa

SEQ ID NO: 460345 - RNA, 20 nt, Human
ucuaugcugcaggcacagaa

SEQ ID NO: 460346 - RNA, 19 nt, Human
ucuccuuucuucucacucu

SEQ ID NO: 460347 - RNA, 28 nt, Human
ugccagccugcgcucuaugcugcaggca

SEQ ID NO: 460348 - RNA, 25 nt, Human
ugcggagaagcccuuggcaccccca

SEQ ID NO: 460349 - RNA, 19 nt, Human
uggcacccccaacgcccuc

SEQ ID NO: 460350 - RNA, 19 nt, Human
uggggcgggcaggaaaggg

SEQ ID NO: 460351 - RNA, 22 nt, Human
uggggcgggcaggaaaggggcg

SEQ ID NO: 460352 - RNA, 20 nt, Human
uguggcuggucagugaaagc

SEQ ID NO: 460353 - RNA, 22 nt, Human
uuagccccaggcaccagccuug

SEQ ID NO: 460354 - RNA, 20 nt, Human
uuccccuggacagucacucc

SEQ ID NO: 460355 - RNA, 21 nt, Human
uuuuuguuuguuuguuucuuu

SEQ ID NO: 460356 - RNA, 24 nt, Human
aaauauucauuuucucuaagaucc

SEQ ID NO: 460357 - RNA, 19 nt, Human
aacaaaaccagcucaacaa

SEQ ID NO: 460358 - RNA, 25 nt, Human
acuucggaggagcauuaacaaaaga

SEQ ID NO: 460359 - RNA, 25 nt, Human
agaaauaaugaaaaacaccgguacc

SEQ ID NO: 460360 - RNA, 19 nt, Human
auguuacuuuuacccccug

SEQ ID NO: 460361 - RNA, 22 nt, Human
auucauuuucucuaagauccag

SEQ ID NO: 460362 - RNA, 18 nt, Human
caaagaugaaauguggca

SEQ ID NO: 460363 - RNA, 21 nt, Human
cagcucaguaaaagauuaccc

SEQ ID NO: 460364 - RNA, 21 nt, Human
cccugaaaaacuucggaggag

SEQ ID NO: 460365 - RNA, 18 nt, Human
ccugcaauuuuaaacuac

SEQ ID NO: 460366 - RNA, 22 nt, Human
cugaaaaugcaacaaauucuca

SEQ ID NO: 460367 - RNA, 18 nt, Human
cuuggaaacaaaaaccgc

SEQ ID NO: 460368 - RNA, 20 nt, Human
gaaacaguucuguaguucuu

SEQ ID NO: 460369 - RNA, 21 nt, Human
gcuuuguuuuuguuguuuuau

SEQ ID NO: 460370 - RNA, 21 nt, Human
guguuuaaaggcuggugcaaa

SEQ ID NO: 460371 - RNA, 20 nt, Human
uaaaaccuaaaaauguuuua

SEQ ID NO: 460372 - RNA, 21 nt, Human
uaaaauaauacccuccacuga

SEQ ID NO: 460373 - RNA, 22 nt, Human
uaaacuacaagaucaaagcuaa

SEQ ID NO: 460374 - RNA, 18 nt, Human
uaagcugaacaaaaccag

SEQ ID NO: 460375 - RNA, 21 nt, Human
uaauacccuccacugauguua

SEQ ID NO: 460376 - RNA, 24 nt, Human
uaaucaucggggugacuccgggaa

SEQ ID NO: 460377 - RNA, 21 nt, Human
uaaugaaaaugacauaucugu

SEQ ID NO: 460378 - RNA, 19 nt, Human
uacaagcacucauguuagg

SEQ ID NO: 460379 - RNA, 21 nt, Human
ucaacaagguuaagaaaaaaa

SEQ ID NO: 460380 - RNA, 22 nt, Human
ucaauguuggcaaucugcuucu

SEQ ID NO: 460381 - RNA, 22 nt, Human
ucccugcaauuuuaaacuacaa

SEQ ID NO: 460382 - RNA, 23 nt, Human
ucucuaagauccagcucaguaaa

SEQ ID NO: 460383 - RNA, 23 nt, Human
ucugaaacaguucuguaguucuu

SEQ ID NO: 460384 - RNA, 20 nt, Human
ugaaaaacacaauugggaaa

SEQ ID NO: 460385 - RNA, 22 nt, Human
ugaaaagaaauaaugaaaaaca

SEQ ID NO: 460386 - RNA, 23 nt, Human
ugaaaagaaauaaugaaaaacac

SEQ ID NO: 460387 - RNA, 20 nt, Human
ugcaggacuagcccugcugu

SEQ ID NO: 460388 - RNA, 20 nt, Human
uuaagaaaaaaaugucacau

SEQ ID NO: 460389 - RNA, 22 nt, Human
aaaaaguagcaagcccccaaga

SEQ ID NO: 460390 - RNA, 23 nt, Human
aaaaaguagcaagcccccaagaa

SEQ ID NO: 460391 - RNA, 27 nt, Human
aagacaaaaaguagcaagcccccaaga

SEQ ID NO: 460392 - RNA, 23 nt, Human
aagcggggacaaggaggaaccag

SEQ ID NO: 460393 - RNA, 21 nt, Human
aaguagcaagcccccaagaaa

SEQ ID NO: 460394 - RNA, 23 nt, Human
acccacccugcccuuggacuccu

SEQ ID NO: 460395 - RNA, 21 nt, Human
agaaagccacacaauagaaga

SEQ ID NO: 460396 - RNA, 20 nt, Human
agaccgggauggggagaagg

SEQ ID NO: 460397 - RNA, 27 nt, Human
agaggaaggauuuggggguggaggggc

SEQ ID NO: 460398 - RNA, 19 nt, Human
agccccagacaagccccag

SEQ ID NO: 460399 - RNA, 19 nt, Human
aggaaggauuugggggugg

SEQ ID NO: 460400 - RNA, 24 nt, Human
aggaaggugacacaggacuggggu

SEQ ID NO: 460401 - RNA, 23 nt, Human
aggggacauagaaggaaaaagga

SEQ ID NO: 460402 - RNA, 18 nt, Human
auggagaugcccacaccc

SEQ ID NO: 460403 - RNA, 21 nt, Human
caaggcuggacccacccugcc

SEQ ID NO: 460404 - RNA, 18 nt, Human
cacccugucucucaaaag

SEQ ID NO: 460405 - RNA, 20 nt, Human
cacccugucucucaaaagcu

SEQ ID NO: 460406 - RNA, 19 nt, Human
cagcucaggccgggcacgg

SEQ ID NO: 460407 - RNA, 20 nt, Human
ccacacccugucucucaaaa

SEQ ID NO: 460408 - RNA, 24 nt, Human
ccacccugcccuuggacuccuggg

SEQ ID NO: 460409 - RNA, 25 nt, Human
ccacccugcccuuggacuccugggc

SEQ ID NO: 460410 - RNA, 18 nt, Human
ccagugcccgaucccgcc

SEQ ID NO: 460411 - RNA, 20 nt, Human
ccagugcccgaucccgcccu

SEQ ID NO: 460412 - RNA, 22 nt, Human
cccccaagaaagcggggacaag

SEQ ID NO: 460413 - RNA, 24 nt, Human
ccccucagccucagcgcccccccc

SEQ ID NO: 460414 - RNA, 22 nt, Human
cccgcccucuucccagcugggg

SEQ ID NO: 460415 - RNA, 18 nt, Human
cccucuucccagcugggg

SEQ ID NO: 460416 - RNA, 22 nt, Human
cccuuggacuccugggcucagg

SEQ ID NO: 460417 - RNA, 23 nt, Human
ccucagccucagcgccccccccg

SEQ ID NO: 460418 - RNA, 23 nt, Human
ccugcaguuggcagugauggggc

SEQ ID NO: 460419 - RNA, 19 nt, Human
ccuuggacuccugggcuca

SEQ ID NO: 460420 - RNA, 23 nt, Human
cgcagcucccccucagccucagc

SEQ ID NO: 460421 - RNA, 19 nt, Human
cucagccucagcgcccccc

SEQ ID NO: 460422 - RNA, 21 nt, Human
gaggagaggaaggauuugggg

SEQ ID NO: 460423 - RNA, 19 nt, Human
gccccagacaagccccagg

SEQ ID NO: 460424 - RNA, 20 nt, Human
gcggaacgcggggggcgcgg

SEQ ID NO: 460425 - RNA, 18 nt, Human
ggauuuggggguggaggg

SEQ ID NO: 460426 - RNA, 18 nt, Human
ggcaaggggugggacugg

SEQ ID NO: 460427 - RNA, 24 nt, Human
ggcccgaggggcccccugcaguug

SEQ ID NO: 460428 - RNA, 20 nt, Human
gggacugggaggagaggaag

SEQ ID NO: 460429 - RNA, 18 nt, Human
gggagaagggggaagccc

SEQ ID NO: 460430 - RNA, 22 nt, Human
gggauggggagaagggggaagc

SEQ ID NO: 460431 - RNA, 24 nt, Human
gggcaaggggugggacugggagga

SEQ ID NO: 460432 - RNA, 23 nt, Human
gggcggaacgcggggggcgcggg

SEQ ID NO: 460433 - RNA, 22 nt, Human
ggggagaagggggaagcccuag

SEQ ID NO: 460434 - RNA, 19 nt, Human
uagaagacaaaaaguagca

SEQ ID NO: 460435 - RNA, 24 nt, Human
uagcaagacgcagcucccccucag

SEQ ID NO: 460436 - RNA, 21 nt, Human
uagcaagcccccaagaaagcg

SEQ ID NO: 460437 - RNA, 23 nt, Human
ucaaaagcugggucucuggagac

SEQ ID NO: 460438 - RNA, 25 nt, Human
ucaaauacucagaaagccacacaau

SEQ ID NO: 460439 - RNA, 18 nt, Human
ucaggccgggcacggagg

SEQ ID NO: 460440 - RNA, 22 nt, Human
uccguggggcaaggggugggac

SEQ ID NO: 460441 - RNA, 19 nt, Human
ugcccuuggacuccugggc

SEQ ID NO: 460442 - RNA, 21 nt, Human
ugcccuuggacuccugggcuc

SEQ ID NO: 460443 - RNA, 24 nt, Human
ugcccuuggacuccugggcucagg

SEQ ID NO: 460444 - RNA, 24 nt, Human
uggagaugcccacacccugucucu

SEQ ID NO: 460445 - RNA, 19 nt, Human
uggaggggcucaaggcugg

SEQ ID NO: 460446 - RNA, 20 nt, Human
uggcagugauggggccagug

SEQ ID NO: 460447 - RNA, 24 nt, Human
uggcagugauggggccaguggagg

SEQ ID NO: 460448 - RNA, 22 nt, Human
uggggagaagggggaagcccua

SEQ ID NO: 460449 - RNA, 20 nt, Human
uuggcagugauggggccagu

SEQ ID NO: 460450 - RNA, 19 nt, Human
aaccagaaggaacugucua

SEQ ID NO: 460451 - RNA, 20 nt, Human
aaccagaaggaacugucuau

SEQ ID NO: 460452 - RNA, 21 nt, Human
acaggaaugcagggggaggcc

SEQ ID NO: 460453 - RNA, 23 nt, Human
accacagcccuccccuugagcca

SEQ ID NO: 460454 - RNA, 25 nt, Human
agaggccaaggcuggagcaguggga

SEQ ID NO: 460455 - RNA, 25 nt, Human
aggaaugcagggggaggccgguacc

SEQ ID NO: 460456 - RNA, 23 nt, Human
aggaggccacaugggccuggggu

SEQ ID NO: 460457 - RNA, 21 nt, Human
aguuugguguugcacuggggu

SEQ ID NO: 460458 - RNA, 19 nt, Human
cacaugguaggacccaucu

SEQ ID NO: 460459 - RNA, 19 nt, Human
cagcgugcuggggugacgg

SEQ ID NO: 460460 - RNA, 19 nt, Human
cauucuaggcucuuggcug

SEQ ID NO: 460461 - RNA, 19 nt, Human
cauucuaggcucuuggcug

SEQ ID NO: 460462 - RNA, 21 nt, Human
ccaagcaaggaggaggccaca

SEQ ID NO: 460463 - RNA, 21 nt, Human
cccugaaguuugguguugcac

SEQ ID NO: 460464 - RNA, 23 nt, Human
ccucuucacccagacaggaauug

SEQ ID NO: 460465 - RNA, 18 nt, Human
ccugggguagcccuggcc

SEQ ID NO: 460466 - RNA, 19 nt, Human
ccuggguuccacagaggcg

SEQ ID NO: 460467 - RNA, 20 nt, Human
cgaagagcacauucucugca

SEQ ID NO: 460468 - RNA, 23 nt, Human
cguaacacgucuccucuucaccc

SEQ ID NO: 460469 - RNA, 24 nt, Human
cucgcucaucaguguucuuccucc

SEQ ID NO: 460470 - RNA, 25 nt, Human
cucuuggcuguacaugacaagggcu

SEQ ID NO: 460471 - RNA, 27 nt, Human
cugggccuggggaacugggaccaaagu

SEQ ID NO: 460472 - RNA, 18 nt, Human
gaagagcacauucucugc

SEQ ID NO: 460473 - RNA, 24 nt, Human
gaagagcacauucucugcacacgu

SEQ ID NO: 460474 - RNA, 22 nt, Human
gauagcaggggcuguggaggga

SEQ ID NO: 460475 - RNA, 25 nt, Human
gcaccacagcccuccccuugagcca

SEQ ID NO: 460476 - RNA, 20 nt, Human
gccacgggaaggagcccuuu

SEQ ID NO: 460477 - RNA, 19 nt, Human
gcccuggccuugcccaccu

SEQ ID NO: 460478 - RNA, 23 nt, Human
ggagagggacaucaggagaggcc

SEQ ID NO: 460479 - RNA, 22 nt, Human
ggaggccacaugggccuggggu

SEQ ID NO: 460480 - RNA, 19 nt, Human
gggaacuggguugaagcag

SEQ ID NO: 460481 - RNA, 20 nt, Human
gggaggccaggcaauggcug

SEQ ID NO: 460482 - RNA, 19 nt, Human
gggaugaggagcugcugga

SEQ ID NO: 460483 - RNA, 21 nt, Human
gggaugaggagcugcuggaug

SEQ ID NO: 460484 - RNA, 18 nt, Human
gggcuguggagggaggga

SEQ ID NO: 460485 - RNA, 19 nt, Human
ggguagcccuggccuugcc

SEQ ID NO: 460486 - RNA, 19 nt, Human
uagcugagucuuauucugg

SEQ ID NO: 460487 - RNA, 21 nt, Human
uaggacccaucuaaccagaag

SEQ ID NO: 460488 - RNA, 21 nt, Human
ucauucuaggcucuuggcugu

SEQ ID NO: 460489 - RNA, 19 nt, Human
ucuaggcucuuggcuguac

SEQ ID NO: 460490 - RNA, 22 nt, Human
ugaagcagccacgggaaggagc

SEQ ID NO: 460491 - RNA, 21 nt, Human
ugacaagggcugguacagagc

SEQ ID NO: 460492 - RNA, 23 nt, Human
ugcagggggaggccaggcaaugg

SEQ ID NO: 460493 - RNA, 21 nt, Human
uggagggagggagagggacau

SEQ ID NO: 460494 - RNA, 24 nt, Human
uggagggagggagagggacaucag

SEQ ID NO: 460495 - RNA, 19 nt, Human
uggguuccacagaggcggc

SEQ ID NO: 460496 - RNA, 21 nt, Human
uguguccucgcuugugccccu

SEQ ID NO: 460497 - RNA, 21 nt, Human
uucuggucccuuagauguguc

SEQ ID NO: 460498 - RNA, 23 nt, Human
aaaucaugcaaagauuuaaauaa

SEQ ID NO: 460499 - RNA, 20 nt, Human
aaccacacaucccauagaua

SEQ ID NO: 460500 - RNA, 19 nt, Human
aaccagaaccacacauccc

SEQ ID NO: 460501 - RNA, 24 nt, Human
aacuauugaaagacccuaagucag

SEQ ID NO: 460502 - RNA, 18 nt, Human
aagauacuucaaaccacc

SEQ ID NO: 460503 - RNA, 18 nt, Human
aagcguauuuuucagcag

SEQ ID NO: 460504 - RNA, 20 nt, Human
agauaauuccauuuaacuga

SEQ ID NO: 460505 - RNA, 21 nt, Human
auucauaacacucaaacuacu

SEQ ID NO: 460506 - RNA, 18 nt, Human
auuuacacaaaauuccau

SEQ ID NO: 460507 - RNA, 21 nt, Human
caacacagcuguaacacugac

SEQ ID NO: 460508 - RNA, 22 nt, Human
caagagaccucagccaccaaua

SEQ ID NO: 460509 - RNA, 20 nt, Human
caccgucaucaucucaaucu

SEQ ID NO: 460510 - RNA, 19 nt, Human
cagagagacagguauagug

SEQ ID NO: 460511 - RNA, 20 nt, Human
cagcugcgcgguugcccagg

SEQ ID NO: 460512 - RNA, 23 nt, Human
caucaccgucaucaucucaaucu

SEQ ID NO: 460513 - RNA, 21 nt, Human
caugcaguuucaauuguucag

SEQ ID NO: 460514 - RNA, 21 nt, Human
ccgccgccaucgcccaggccg

SEQ ID NO: 460515 - RNA, 18 nt, Human
ccuauccccaacacagcu

SEQ ID NO: 460516 - RNA, 21 nt, Human
cgccgccaucgcccaggccgc

SEQ ID NO: 460517 - RNA, 18 nt, Human
gccaaucuaugaaauuau

SEQ ID NO: 460518 - RNA, 24 nt, Human
uaagaaaauggaaaaucuguuuuu

SEQ ID NO: 460519 - RNA, 20 nt, Human
uaaggcagaaguauuuucug

SEQ ID NO: 460520 - RNA, 19 nt, Human
uaaucaccuuccacaacga

SEQ ID NO: 460521 - RNA, 21 nt, Human
uacaagaugaaggugaaaaag

SEQ ID NO: 460522 - RNA, 24 nt, Human
uacuacuacaaaauauccuucucu

SEQ ID NO: 460523 - RNA, 23 nt, Human
uagcaauuucaagagaccucagc

SEQ ID NO: 460524 - RNA, 20 nt, Human
uaggucuccaacgucaagaa

SEQ ID NO: 460525 - RNA, 23 nt, Human
uauuacaaaugcuaacaacaaga

SEQ ID NO: 460526 - RNA, 18 nt, Human
ucacaauguugaagugag

SEQ ID NO: 460527 - RNA, 22 nt, Human
ucccaaacuauugaaagacccu

SEQ ID NO: 460528 - RNA, 23 nt, Human
ucgcccaggccgccuccggaggc

SEQ ID NO: 460529 - RNA, 23 nt, Human
ucuuuacaaugucagagcaguug

SEQ ID NO: 460530 - RNA, 18 nt, Human
ugaagugauggcuguuca

SEQ ID NO: 460531 - RNA, 23 nt, Human
ugcaugcaguuucaauuguucag

SEQ ID NO: 460532 - RNA, 20 nt, Human
uguaucuuacuuagaaaaaa

SEQ ID NO: 460533 - RNA, 18 nt, Human
uguugaagugauggcugu

SEQ ID NO: 460534 - RNA, 23 nt, Human
uuaguauuuuauucgguuucuug

SEQ ID NO: 460535 - RNA, 20 nt, Human
uucaagagaccucagccacc

SEQ ID NO: 460536 - RNA, 20 nt, Human
uucauuuuuuauaagagaau

SEQ ID NO: 460537 - RNA, 21 nt, Human
uucuuaauuuucugaaauuua

SEQ ID NO: 460538 - RNA, 25 nt, Human
uuuacaauauaaagugaaauauuac

SEQ ID NO: 460539 - RNA, 23 nt, Human
uuuacacaaaauuccauuuauag

SEQ ID NO: 460540 - RNA, 24 nt, Human
uuugcccaucucaccuaaccuuca

SEQ ID NO: 460541 - RNA, 18 nt, Human
uuuuauauauauauauau

SEQ ID NO: 460542 - RNA, 19 nt, Human
uuuuauggcugcaugcagu

SEQ ID NO: 460543 - RNA, 18 nt, Human
aaaggaacgcaaggucug

SEQ ID NO: 460544 - RNA, 18 nt, Human
accaggugggcuagggca

SEQ ID NO: 460545 - RNA, 23 nt, Human
acccggucggggccggcuggggc

SEQ ID NO: 460546 - RNA, 20 nt, Human
acgcggggugggugggggcg

SEQ ID NO: 460547 - RNA, 27 nt, Human
aggaacgcaaggucugggacccacggc

SEQ ID NO: 460548 - RNA, 24 nt, Human
aggcugggcuuggguggccucggg

SEQ ID NO: 460549 - RNA, 21 nt, Human
auccccgcggagggagggcgg

SEQ ID NO: 460550 - RNA, 20 nt, Human
cacagggcaaccccguccug

SEQ ID NO: 460551 - RNA, 18 nt, Human
cacagggucugaguccca

SEQ ID NO: 460552 - RNA, 20 nt, Human
caccugggccagggcuaggc

SEQ ID NO: 460553 - RNA, 21 nt, Human
cacuggccuggccaccucccc

SEQ ID NO: 460554 - RNA, 18 nt, Human
cacugggccuggcaccgc

SEQ ID NO: 460555 - RNA, 21 nt, Human
cagagaaaugggaaucgcaaa

SEQ ID NO: 460556 - RNA, 19 nt, Human
cagcaccuggggguggcuc

SEQ ID NO: 460557 - RNA, 24 nt, Human
cagcccugucccuaguccugaggg

SEQ ID NO: 460558 - RNA, 23 nt, Human
caggcgagcagugcuccuggacc

SEQ ID NO: 460559 - RNA, 25 nt, Human
caguauguacaggcgagcagugcuc

SEQ ID NO: 460560 - RNA, 20 nt, Human
cagugaagagacgcgaggga

SEQ ID NO: 460561 - RNA, 23 nt, Human
caucugggggcauggucugagga

SEQ ID NO: 460562 - RNA, 24 nt, Human
ccaccuccccggcugcccugaucc

SEQ ID NO: 460563 - RNA, 22 nt, Human
ccacuggccuggccaccucccc

SEQ ID NO: 460564 - RNA, 22 nt, Human
ccccacacugaauccugcgugc

SEQ ID NO: 460565 - RNA, 21 nt, Human
ccccagcagcagaugauggcc

SEQ ID NO: 460566 - RNA, 18 nt, Human
cccguccugaugcugaga

SEQ ID NO: 460567 - RNA, 19 nt, Human
cccuaguccugagggauug

SEQ ID NO: 460568 - RNA, 22 nt, Human
ccuggcaccgcguggugggggg

SEQ ID NO: 460569 - RNA, 20 nt, Human
cgcgagggacgcccgcggcg

SEQ ID NO: 460570 - RNA, 19 nt, Human
cugauccagcagccacacu

SEQ ID NO: 460571 - RNA, 23 nt, Human
cuggcccaggccggcacagcccu

SEQ ID NO: 460572 - RNA, 19 nt, Human
gagcugcggguccgugggc

SEQ ID NO: 460573 - RNA, 20 nt, Human
gcagacgacgugggcaggcg

SEQ ID NO: 460574 - RNA, 21 nt, Human
gcagugaagagacgcgaggga

SEQ ID NO: 460575 - RNA, 19 nt, Human
gcccaggccggcacagccc

SEQ ID NO: 460576 - RNA, 19 nt, Human
gcccugagcugcggguccg

SEQ ID NO: 460577 - RNA, 18 nt, Human
gcggcaggggagcucugg

SEQ ID NO: 460578 - RNA, 23 nt, Human
gcggcaggggagcucuggggcac

SEQ ID NO: 460579 - RNA, 21 nt, Human
gcguggccggaguggggaggg

SEQ ID NO: 460580 - RNA, 23 nt, Human
gcuccuagcagagaaaugggaau

SEQ ID NO: 460581 - RNA, 19 nt, Human
gcugcccugauccagcagc

SEQ ID NO: 460582 - RNA, 18 nt, Human
ggacaggaacaaaaggaa

SEQ ID NO: 460583 - RNA, 19 nt, Human
ggcguggccggagugggga

SEQ ID NO: 460584 - RNA, 23 nt, Human
ggcuuggguggccucgggcacgu

SEQ ID NO: 460585 - RNA, 25 nt, Human
gggaccccagcagcagaugauggcc

SEQ ID NO: 460586 - RNA, 21 nt, Human
gggcacagggucugaguccca

SEQ ID NO: 460587 - RNA, 18 nt, Human
ggggaggggcugugcccc

SEQ ID NO: 460588 - RNA, 21 nt, Human
gggugggggcguggccggagu

SEQ ID NO: 460589 - RNA, 25 nt, Human
gguggcucccacggcaccagguggg

SEQ ID NO: 460590 - RNA, 18 nt, Human
gugaacacagggcaaccc

SEQ ID NO: 460591 - RNA, 21 nt, Human
gugaacacagggcaaccccgu

SEQ ID NO: 460592 - RNA, 21 nt, Human
uaaaaaaaucaucugggggca

SEQ ID NO: 460593 - RNA, 20 nt, Human
uacaggcgagcagugcuccc

SEQ ID NO: 460594 - RNA, 18 nt, Human
ucagguggaugagaacgg

SEQ ID NO: 460595 - RNA, 21 nt, Human
uccacagggccuggccacugg

SEQ ID NO: 460596 - RNA, 18 nt, Human
uccccggcugcccugauc

SEQ ID NO: 460597 - RNA, 20 nt, Human
uccgugggcccuggcccagg

SEQ ID NO: 460598 - RNA, 24 nt, Human
ucugcggcaggggagcucuggggc

SEQ ID NO: 460599 - RNA, 21 nt, Human
ugagaaagguggcauggagug

SEQ ID NO: 460600 - RNA, 21 nt, Human
ugagaacggacacugcaaacc

SEQ ID NO: 460601 - RNA, 25 nt, Human
ugcccccagcaccuggggguggcuc

SEQ ID NO: 460602 - RNA, 30 nt, Human
ugcgcagaacucaagccggcauccaggcag

SEQ ID NO: 460603 - RNA, 24 nt, Human
ugcuccuggacccggucggggccg

SEQ ID NO: 460604 - RNA, 18 nt, Human
uggcccaggccggcacag

SEQ ID NO: 460605 - RNA, 24 nt, Human
uggccuggccaccuccccggcugc

SEQ ID NO: 460606 - RNA, 24 nt, Human
uggcuccuagcagagaaaugggaa

SEQ ID NO: 460607 - RNA, 23 nt, Human
uggggaggggcugugcccccagc

SEQ ID NO: 460608 - RNA, 18 nt, Human
ugggggcguggccggagu

SEQ ID NO: 460609 - RNA, 24 nt, Human
uuuuuuuuuuuauuuucuauuuuu

SEQ ID NO: 460610 - RNA, 24 nt, Human
uuuuuuuuuuuuuuuuuuuauuuu

SEQ ID NO: 460611 - RNA, 21 nt, Human
aaaaauaacuguuuccuagau

SEQ ID NO: 460612 - RNA, 21 nt, Human
aaacaaaugcccccaguuccu

SEQ ID NO: 460613 - RNA, 24 nt, Human
aaaccaaaucuuuuguagaagugu

SEQ ID NO: 460614 - RNA, 18 nt, Human
aaaccaacaaagcugaua

SEQ ID NO: 460615 - RNA, 18 nt, Human
aaagagauuagcccgggc

SEQ ID NO: 460616 - RNA, 20 nt, Human
aacaaagguaucucauuaca

SEQ ID NO: 460617 - RNA, 18 nt, Human
aacugaaaccaacaaagc

SEQ ID NO: 460618 - RNA, 23 nt, Human
aaggacaauaggguuuaaaaugu

SEQ ID NO: 460619 - RNA, 26 nt, Human
aaguggcccagaggcacagugaauac

SEQ ID NO: 460620 - RNA, 23 nt, Human
aauacaauuuucaaauuuuaccc

SEQ ID NO: 460621 - RNA, 21 nt, Human
aauguaaaaggaauaaaacga

SEQ ID NO: 460622 - RNA, 18 nt, Human
acacacacaccccaggac

SEQ ID NO: 460623 - RNA, 22 nt, Human
accaguaacagcuuuucaucau

SEQ ID NO: 460624 - RNA, 18 nt, Human
acgcacugcaccugaaga

SEQ ID NO: 460625 - RNA, 19 nt, Human
acucuggguggcggcgggg

SEQ ID NO: 460626 - RNA, 18 nt, Human
acugcaaagaugacaggc

SEQ ID NO: 460627 - RNA, 18 nt, Human
acugggucuguuaaauau

SEQ ID NO: 460628 - RNA, 22 nt, Human
agaugacaggcacagagcugua

SEQ ID NO: 460629 - RNA, 18 nt, Human
agcaggaggcggccaagg

SEQ ID NO: 460630 - RNA, 22 nt, Human
agcauauuagccuucauuccau

SEQ ID NO: 460631 - RNA, 22 nt, Human
aggcaacaagcccacaucuaca

SEQ ID NO: 460632 - RNA, 21 nt, Human
aggggaagaaguggcccagag

SEQ ID NO: 460633 - RNA, 25 nt, Human
agguaauggcaagagugauuaaaac

SEQ ID NO: 460634 - RNA, 20 nt, Human
agguagagaggagacagcuc

SEQ ID NO: 460635 - RNA, 18 nt, Human
agucauggccuaaacaaa

SEQ ID NO: 460636 - RNA, 24 nt, Human
auauuagguauaauaaaauguguc

SEQ ID NO: 460637 - RNA, 18 nt, Human
aucaauuuauuucuguuc

SEQ ID NO: 460638 - RNA, 21 nt, Human
augaacaacgacaaagacugc

SEQ ID NO: 460639 - RNA, 24 nt, Human
augaacuaguuuuauuugcauuua

SEQ ID NO: 460640 - RNA, 18 nt, Human
augcaacucuaaaaacca

SEQ ID NO: 460641 - RNA, 20 nt, Human
auggaggcagcuagcaaaca

SEQ ID NO: 460642 - RNA, 21 nt, Human
auuguacacugagguuuaucu

SEQ ID NO: 460643 - RNA, 19 nt, Human
auuuauguauuuuuuccuu

SEQ ID NO: 460644 - RNA, 18 nt, Human
caaaaguaaauaaagcaa

SEQ ID NO: 460645 - RNA, 23 nt, Human
caaaauccaagauuacaaaagua

SEQ ID NO: 460646 - RNA, 22 nt, Human
caaacacacuugcaugcgcaug

SEQ ID NO: 460647 - RNA, 23 nt, Human
caacaaauguaaaaggaauaaaa

SEQ ID NO: 460648 - RNA, 24 nt, Human
caacaagcccacaucuacagggga

SEQ ID NO: 460649 - RNA, 21 nt, Human
cacaguaugacuuauacaaau

SEQ ID NO: 460650 - RNA, 18 nt, Human
cacccaccucaacaaucu

SEQ ID NO: 460651 - RNA, 21 nt, Human
cacuaaaccaguacaagccag

SEQ ID NO: 460652 - RNA, 19 nt, Human
cacuggacacugccaggga

SEQ ID NO: 460653 - RNA, 21 nt, Human
cagaaaagcugcccagaaaca

SEQ ID NO: 460654 - RNA, 23 nt, Human
caggaggcggccaaggaccacac

SEQ ID NO: 460655 - RNA, 21 nt, Human
cagguagagaggagacagcuc

SEQ ID NO: 460656 - RNA, 21 nt, Human
caucaaauaacguccaaaagg

SEQ ID NO: 460657 - RNA, 22 nt, Human
ccaaacacaaccacugucuacu

SEQ ID NO: 460658 - RNA, 22 nt, Human
ccagaaacacauggauacuuca

SEQ ID NO: 460659 - RNA, 24 nt, Human
ccagggacacaggcacuaaaccag

SEQ ID NO: 460660 - RNA, 18 nt, Human
ccccaucaugauuccugu

SEQ ID NO: 460661 - RNA, 25 nt, Human
cccgggcuaagagguuaacugaaac

SEQ ID NO: 460662 - RNA, 24 nt, Human
ccuguaaucuccccaauaagaaau

SEQ ID NO: 460663 - RNA, 20 nt, Human
cggcugaaggcaacaagccc

SEQ ID NO: 460664 - RNA, 21 nt, Human
cuagaucaccugaaaaugcua

SEQ ID NO: 460665 - RNA, 21 nt, Human
cugaaaccaacaaagcugaua

SEQ ID NO: 460666 - RNA, 18 nt, Human
cuugcagagcaggagcag

SEQ ID NO: 460667 - RNA, 20 nt, Human
cuuguuaucaauuuauuucu

SEQ ID NO: 460668 - RNA, 21 nt, Human
cuuuguuagaacaaugguuuc

SEQ ID NO: 460669 - RNA, 21 nt, Human
gaaaagaaaucugcuuguaga

SEQ ID NO: 460670 - RNA, 22 nt, Human
gaacuaguuuuauuugcauuua

SEQ ID NO: 460671 - RNA, 18 nt, Human
gaaggcaacaagcccaca

SEQ ID NO: 460672 - RNA, 18 nt, Human
gaaguaucuguauugaaa

SEQ ID NO: 460673 - RNA, 25 nt, Human
gagagggugguggaacgcuugggaa

SEQ ID NO: 460674 - RNA, 22 nt, Human
gccuugcuggggccagcaggag

SEQ ID NO: 460675 - RNA, 20 nt, Human
gcuacacugcaaagaugaca

SEQ ID NO: 460676 - RNA, 21 nt, Human
ggaaagcacauaaucucccca

SEQ ID NO: 460677 - RNA, 20 nt, Human
ggacacaggcacuaaaccag

SEQ ID NO: 460678 - RNA, 19 nt, Human
ggcaaggugaccuuuucac

SEQ ID NO: 460679 - RNA, 22 nt, Human
ggcacagugaauacgucagggc

SEQ ID NO: 460680 - RNA, 21 nt, Human
ggccagcaggaggaccauuac

SEQ ID NO: 460681 - RNA, 20 nt, Human
ggcugaaggcaacaagccca

SEQ ID NO: 460682 - RNA, 20 nt, Human
gggacacaggcacuaaacca

SEQ ID NO: 460683 - RNA, 20 nt, Human
gugcgcaggcacacacacac

SEQ ID NO: 460684 - RNA, 19 nt, Human
guggagagaagaguuuggc

SEQ ID NO: 460685 - RNA, 19 nt, Human
guuaacugaaaccaacaaa

SEQ ID NO: 460686 - RNA, 27 nt, Human
uaaaaaaaugaacaaagguaucucauu

SEQ ID NO: 460687 - RNA, 19 nt, Human
uaaaaaccacaaagccuua

SEQ ID NO: 460688 - RNA, 22 nt, Human
uaaaacgagagccaaacacaac

SEQ ID NO: 460689 - RNA, 24 nt, Human
uaaacaaaugcccccaguuccuua

SEQ ID NO: 460690 - RNA, 19 nt, Human
uaaagcaagcauauuagcc

SEQ ID NO: 460691 - RNA, 20 nt, Human
uaaauaaugcuguaagcuac

SEQ ID NO: 460692 - RNA, 19 nt, Human
uaaaucccagaagcaacaa

SEQ ID NO: 460693 - RNA, 21 nt, Human
uaacuccuggcuccagacaag

SEQ ID NO: 460694 - RNA, 23 nt, Human
uaagagguuaacugaaaccaaca

SEQ ID NO: 460695 - RNA, 24 nt, Human
uaauccaguguucuccucccucag

SEQ ID NO: 460696 - RNA, 21 nt, Human
uacaaaauccaagauuacaaa

SEQ ID NO: 460697 - RNA, 22 nt, Human
uacaauaacauucaacaugagg

SEQ ID NO: 460698 - RNA, 19 nt, Human
uacaaucaaaguggaucag

SEQ ID NO: 460699 - RNA, 22 nt, Human
uacagugugucucucuuuagag

SEQ ID NO: 460700 - RNA, 20 nt, Human
uacauuguucuauacacagg

SEQ ID NO: 460701 - RNA, 19 nt, Human
uacuagccagguagagagg

SEQ ID NO: 460702 - RNA, 18 nt, Human
uagaauaaaguugccugc

SEQ ID NO: 460703 - RNA, 20 nt, Human
uaugccaucaauuaaauuau

SEQ ID NO: 460704 - RNA, 20 nt, Human
ucaggcaaguuggaaccaga

SEQ ID NO: 460705 - RNA, 20 nt, Human
ucagggcagucacucauggg

SEQ ID NO: 460706 - RNA, 21 nt, Human
ucauggccuaaacaaaugccc

SEQ ID NO: 460707 - RNA, 21 nt, Human
uccaauaauccaguguucucc

SEQ ID NO: 460708 - RNA, 22 nt, Human
uccugagcuggcaaacacacuu

SEQ ID NO: 460709 - RNA, 21 nt, Human
ucuacugacaauaaaaucuaa

SEQ ID NO: 460710 - RNA, 21 nt, Human
ucuaguuuuaaaagcuacaaa

SEQ ID NO: 460711 - RNA, 18 nt, Human
ucuccucccucagggaag

SEQ ID NO: 460712 - RNA, 21 nt, Human
ucugaaguguuuaauaccuaa

SEQ ID NO: 460713 - RNA, 21 nt, Human
ugaacacacuggacacugcca

SEQ ID NO: 460714 - RNA, 20 nt, Human
ugaaggcaacaagcccacaa

SEQ ID NO: 460715 - RNA, 19 nt, Human
ugaauagaaacuggcuuua

SEQ ID NO: 460716 - RNA, 20 nt, Human
ugacagugagcguuagugaa

SEQ ID NO: 460717 - RNA, 21 nt, Human
ugagagggugguggaacgcuu

SEQ ID NO: 460718 - RNA, 20 nt, Human
ugaugcacaagugacuacag

SEQ ID NO: 460719 - RNA, 25 nt, Human
ugcaccugaagacuaucacacccac

SEQ ID NO: 460720 - RNA, 20 nt, Human
ugcacuguuacauuaaaaau

SEQ ID NO: 460721 - RNA, 18 nt, Human
ugccagggacacaggcac

SEQ ID NO: 460722 - RNA, 21 nt, Human
uggagagaagaguuuggcuuu

SEQ ID NO: 460723 - RNA, 23 nt, Human
ugggaaagcacauaaucucccca

SEQ ID NO: 460724 - RNA, 22 nt, Human
ugggugcgcaggcacacacaca

SEQ ID NO: 460725 - RNA, 19 nt, Human
uguacacugagguuuaucu

SEQ ID NO: 460726 - RNA, 22 nt, Human
uguuuugggggguaagaggagu

SEQ ID NO: 460727 - RNA, 24 nt, Human
uuagaacaaugguuucuaguuuua

SEQ ID NO: 460728 - RNA, 24 nt, Human
uuagguauaauaaaaugugucacu

SEQ ID NO: 460729 - RNA, 21 nt, Human
uuggaaccagaugugcacuuu

SEQ ID NO: 460730 - RNA, 22 nt, Human
uuucacacgacuuucaccagca

SEQ ID NO: 460731 - RNA, 21 nt, Human
uuugcagaugagcuaagcauc

SEQ ID NO: 460732 - RNA, 20 nt, Human
uuuguuagaacaaugguuuc

SEQ ID NO: 460733 - RNA, 22 nt, Human
caacccccacuuuuaggaugau

SEQ ID NO: 460734 - RNA, 23 nt, Human
caccagaguccuuugagacuggg

SEQ ID NO: 460735 - RNA, 21 nt, Human
cagaguccacaugucugccug

SEQ ID NO: 460736 - RNA, 24 nt, Human
caguaccuccccagaguccacaug

SEQ ID NO: 460737 - RNA, 22 nt, Human
ccccagaguccacaugucugcc

SEQ ID NO: 460738 - RNA, 22 nt, Human
ccccaguaccuccccagagucc

SEQ ID NO: 460739 - RNA, 18 nt, Human
ccugguuccagggagggg

SEQ ID NO: 460740 - RNA, 25 nt, Human
cuccucaggcaucugagaauuccag

SEQ ID NO: 460741 - RNA, 19 nt, Human
gagaaagcagggacaacgg

SEQ ID NO: 460742 - RNA, 20 nt, Human
gcagagagaaagcagggaca

SEQ ID NO: 460743 - RNA, 26 nt, Human
gcccccaguaccuccccagaguccac

SEQ ID NO: 460744 - RNA, 21 nt, Human
gccugggggaucauccuugag

SEQ ID NO: 460745 - RNA, 18 nt, Human
ggcagagagaaagcaggg

SEQ ID NO: 460746 - RNA, 20 nt, Human
ggcccccaguaccuccccag

SEQ ID NO: 460747 - RNA, 21 nt, Human
uaccuccccagaguccacaug

SEQ ID NO: 460748 - RNA, 22 nt, Human
ucaggcaucugagaauuccagu

SEQ ID NO: 460749 - RNA, 19 nt, Human
uccaagguccgccuggugg

SEQ ID NO: 460750 - RNA, 18 nt, Human
uccagggaggggagaauc

SEQ ID NO: 460751 - RNA, 19 nt, Human
uccuuugagacugggagcu

SEQ ID NO: 460752 - RNA, 18 nt, Human
ugggaaagaaggaugggc

SEQ ID NO: 460753 - RNA, 21 nt, Human
ugggcagagagaaagcaggga

SEQ ID NO: 460754 - RNA, 19 nt, Human
ugguguaaugacucuggga

SEQ ID NO: 460755 - RNA, 23 nt, Human
aaacagaaacaagcgaagucaag

SEQ ID NO: 460756 - RNA, 27 nt, Human
aaacagaaacaagcgaagucaagucua

SEQ ID NO: 460757 - RNA, 19 nt, Human
accaccccucuucccuggg

SEQ ID NO: 460758 - RNA, 24 nt, Human
accugagauuaggcgcacacacgc

SEQ ID NO: 460759 - RNA, 19 nt, Human
cagaaacaagcgaagucaa

SEQ ID NO: 460760 - RNA, 18 nt, Human
ccaaacagaaacaagcga

SEQ ID NO: 460761 - RNA, 21 nt, Human
cccaaacagaaacaagcgaag

SEQ ID NO: 460762 - RNA, 21 nt, Human
cggguggaccaccugagauua

SEQ ID NO: 460763 - RNA, 18 nt, Human
cugcagguaauaguuaua

SEQ ID NO: 460764 - RNA, 21 nt, Human
gaccaccugagauuaggcgca

SEQ ID NO: 460765 - RNA, 21 nt, Human
ggagcaagggucauuagugcu

SEQ ID NO: 460766 - RNA, 22 nt, Human
uccacaccuucuuguaaauuca

SEQ ID NO: 460767 - RNA, 20 nt, Human
uggaccaccugagauuaggc

SEQ ID NO: 460768 - RNA, 19 nt, Human
uuagauaccuacacauccu

SEQ ID NO: 460769 - RNA, 24 nt, Human
aauugccacccaacaggaagaaac

SEQ ID NO: 460770 - RNA, 18 nt, Human
acaaaaagaagaggacac

SEQ ID NO: 460771 - RNA, 22 nt, Human
acaaagaacagcugugcaaaca

SEQ ID NO: 460772 - RNA, 22 nt, Human
accacaaccccaugcuaaccug

SEQ ID NO: 460773 - RNA, 18 nt, Human
acccugaggagaggcagc

SEQ ID NO: 460774 - RNA, 22 nt, Human
accucacuucccuccaucauaa

SEQ ID NO: 460775 - RNA, 19 nt, Human
agaacagcugugcaaacaa

SEQ ID NO: 460776 - RNA, 20 nt, Human
agaauacgauggaaauggaa

SEQ ID NO: 460777 - RNA, 22 nt, Human
agagagaugcuauaacaaaaag

SEQ ID NO: 460778 - RNA, 24 nt, Human
agagagaugcuauaacaaaaagaa

SEQ ID NO: 460779 - RNA, 22 nt, Human
aggaagaaacagacuggguaaa

SEQ ID NO: 460780 - RNA, 22 nt, Human
aggcuauggaggagagggguua

SEQ ID NO: 460781 - RNA, 18 nt, Human
aggggacccugaggagag

SEQ ID NO: 460782 - RNA, 21 nt, Human
aggugcaauccccacccucuc

SEQ ID NO: 460783 - RNA, 22 nt, Human
agguguaagccuggagucuauu

SEQ ID NO: 460784 - RNA, 22 nt, Human
agguguguguaagggguuuggg

SEQ ID NO: 460785 - RNA, 22 nt, Human
auaacaaaaagaagaggacaac

SEQ ID NO: 460786 - RNA, 24 nt, Human
caaaaagaagaggacaacuggaaa

SEQ ID NO: 460787 - RNA, 23 nt, Human
caacaggaagaaacagacugggu

SEQ ID NO: 460788 - RNA, 24 nt, Human
cacaaccccaugcuaaccugaccc

SEQ ID NO: 460789 - RNA, 22 nt, Human
cacagcucagacccauagaagu

SEQ ID NO: 460790 - RNA, 19 nt, Human
caccccuccaucccccaaa

SEQ ID NO: 460791 - RNA, 20 nt, Human
caccccuccaucccccaaau

SEQ ID NO: 460792 - RNA, 19 nt, Human
cagcauguaggaaagcugg

SEQ ID NO: 460793 - RNA, 21 nt, Human
caggaagaaacagacugggua

SEQ ID NO: 460794 - RNA, 21 nt, Human
caggagcuucagccuggguga

SEQ ID NO: 460795 - RNA, 23 nt, Human
caggugcaaucaguccagcugca

SEQ ID NO: 460796 - RNA, 21 nt, Human
caugugccuggauucaccuca

SEQ ID NO: 460797 - RNA, 20 nt, Human
ccacaaccccaugcuaaccu

SEQ ID NO: 460798 - RNA, 19 nt, Human
ccacccuucuggagcagca

SEQ ID NO: 460799 - RNA, 18 nt, Human
ccaggcaagggagaaaca

SEQ ID NO: 460800 - RNA, 19 nt, Human
ccccaugcuaaccugaccc

SEQ ID NO: 460801 - RNA, 20 nt, Human
ccuccaaguuccuuuauggg

SEQ ID NO: 460802 - RNA, 23 nt, Human
ccuccaucauaauauucccucca

SEQ ID NO: 460803 - RNA, 21 nt, Human
ccuuugaguuugcuccaagua

SEQ ID NO: 460804 - RNA, 19 nt, Human
cucccacccuucuggagca

SEQ ID NO: 460805 - RNA, 18 nt, Human
gacuggguaaagcuagca

SEQ ID NO: 460806 - RNA, 21 nt, Human
gagaauacgauggaaauggaa

SEQ ID NO: 460807 - RNA, 24 nt, Human
gaggugacauaagguugagauggu

SEQ ID NO: 460808 - RNA, 19 nt, Human
ggaagaaacagacugggua

SEQ ID NO: 460809 - RNA, 22 nt, Human
ggaaggugcaauccccacccuc

SEQ ID NO: 460810 - RNA, 23 nt, Human
ggagcagcaagauaacugaugug

SEQ ID NO: 460811 - RNA, 19 nt, Human
ggcuauggaggagaggggu

SEQ ID NO: 460812 - RNA, 21 nt, Human
gguaaagacgaugagcaacau

SEQ ID NO: 460813 - RNA, 21 nt, Human
gguacagaaacagauuuggaa

SEQ ID NO: 460814 - RNA, 23 nt, Human
gucaccccuccaucccccaaaua

SEQ ID NO: 460815 - RNA, 19 nt, Human
gugagucccucaggagcuu

SEQ ID NO: 460816 - RNA, 23 nt, Human
uaaagccuguuuuuccacauacc

SEQ ID NO: 460817 - RNA, 19 nt, Human
uaacaaaaagaagaggaca

SEQ ID NO: 460818 - RNA, 25 nt, Human
uacaaagaacagcugugcaaacaac

SEQ ID NO: 460819 - RNA, 21 nt, Human
uagcagcagcaauguaaccuu

SEQ ID NO: 460820 - RNA, 22 nt, Human
uagucuuaagggauuaggagaa

SEQ ID NO: 460821 - RNA, 26 nt, Human
uauuucaaccacaaccccaugcuaac

SEQ ID NO: 460822 - RNA, 19 nt, Human
ucaaaaauucucuccucua

SEQ ID NO: 460823 - RNA, 24 nt, Human
ucagacccauagaaguggggccag

SEQ ID NO: 460824 - RNA, 22 nt, Human
ucaggagcuucagccuggguga

SEQ ID NO: 460825 - RNA, 19 nt, Human
ucccucaggagcuucagcc

SEQ ID NO: 460826 - RNA, 20 nt, Human
ucccucaggagcuucagccu

SEQ ID NO: 460827 - RNA, 19 nt, Human
uccuggauaccaagauauu

SEQ ID NO: 460828 - RNA, 22 nt, Human
ugacccaaucucgaucccuaau

SEQ ID NO: 460829 - RNA, 24 nt, Human
ugagccagguguucaucaugugcc

SEQ ID NO: 460830 - RNA, 19 nt, Human
ugcaaucaguccagcugca

SEQ ID NO: 460831 - RNA, 21 nt, Human
uggaaacuggagaauacgaug

SEQ ID NO: 460832 - RNA, 24 nt, Human
uggaaggugcaauccccacccucu

SEQ ID NO: 460833 - RNA, 21 nt, Human
uggaagguguaagccuggagu

SEQ ID NO: 460834 - RNA, 23 nt, Human
ugggauuucagccugagauuguc

SEQ ID NO: 460835 - RNA, 24 nt, Human
aaagaggcagcuggaagauguucu

SEQ ID NO: 460836 - RNA, 22 nt, Human
aaaugccauaaauaccaacaaa

SEQ ID NO: 460837 - RNA, 19 nt, Human
aagaagggccucacaggca

SEQ ID NO: 460838 - RNA, 24 nt, Human
aagcaaaggaacuacuaaaaacac

SEQ ID NO: 460839 - RNA, 22 nt, Human
aauguuguaaauguauguaugu

SEQ ID NO: 460840 - RNA, 25 nt, Human
aauguuguaaauguauguauguaau

SEQ ID NO: 460841 - RNA, 22 nt, Human
acaggcacggaaaaggcugaac

SEQ ID NO: 460842 - RNA, 22 nt, Human
acuagacgcaaaccuucccaaa

SEQ ID NO: 460843 - RNA, 19 nt, Human
agagcaggcagggacagga

SEQ ID NO: 460844 - RNA, 22 nt, Human
agcucucugguuccacuuccuc

SEQ ID NO: 460845 - RNA, 18 nt, Human
aggcagggacaggaggcc

SEQ ID NO: 460846 - RNA, 21 nt, Human
aguggccacuuccaugaaggc

SEQ ID NO: 460847 - RNA, 22 nt, Human
augaagauggggcuguccucac

SEQ ID NO: 460848 - RNA, 21 nt, Human
caagauaucaugaaaccagga

SEQ ID NO: 460849 - RNA, 22 nt, Human
caaguccauaucuucuggugcc

SEQ ID NO: 460850 - RNA, 21 nt, Human
cacaccccaaccugaagaagg

SEQ ID NO: 460851 - RNA, 21 nt, Human
cacccagagcaggcagggaca

SEQ ID NO: 460852 - RNA, 25 nt, Human
caccccaaccugaagaagggccuca

SEQ ID NO: 460853 - RNA, 23 nt, Human
caccgugaccccauuggcuccug

SEQ ID NO: 460854 - RNA, 23 nt, Human
cacucaaucacguuuuccaccuc

SEQ ID NO: 460855 - RNA, 21 nt, Human
cacuucugucucuccagagag

SEQ ID NO: 460856 - RNA, 21 nt, Human
cacuuucuucuuggcugggag

SEQ ID NO: 460857 - RNA, 18 nt, Human
cagaagccauucugagga

SEQ ID NO: 460858 - RNA, 21 nt, Human
caggaagacgcccacccggca

SEQ ID NO: 460859 - RNA, 19 nt, Human
caggaccacaucaacugca

SEQ ID NO: 460860 - RNA, 21 nt, Human
caggaccucaaauuucagcca

SEQ ID NO: 460861 - RNA, 22 nt, Human
cauaaauaccaacaaauauuaa

SEQ ID NO: 460862 - RNA, 25 nt, Human
caucuccagcuucauaguccaggaa

SEQ ID NO: 460863 - RNA, 21 nt, Human
caucuucaucccagguccagg

SEQ ID NO: 460864 - RNA, 20 nt, Human
ccaaccugaagaagggccuc

SEQ ID NO: 460865 - RNA, 22 nt, Human
ccacaguccacucaaucacguu

SEQ ID NO: 460866 - RNA, 22 nt, Human
ccacuuccucuaucucugaucu

SEQ ID NO: 460867 - RNA, 22 nt, Human
ccagagcaggcagggacaggag

SEQ ID NO: 460868 - RNA, 19 nt, Human
ccagucgucccucuucucu

SEQ ID NO: 460869 - RNA, 21 nt, Human
ccagucgucccucuucucucc

SEQ ID NO: 460870 - RNA, 23 nt, Human
cccauaguuacaagcaaaggaac

SEQ ID NO: 460871 - RNA, 23 nt, Human
cccuguaggccucauuccaaguc

SEQ ID NO: 460872 - RNA, 21 nt, Human
ccucacaccccaaccugaaga

SEQ ID NO: 460873 - RNA, 26 nt, Human
ccucacaccccaaccugaagaagggc

SEQ ID NO: 460874 - RNA, 27 nt, Human
ccuccccuuuccucucaacacugucuc

SEQ ID NO: 460875 - RNA, 19 nt, Human
ccucucuccucuuacaucc

SEQ ID NO: 460876 - RNA, 22 nt, Human
cggaaaaggcugaacggggaca

SEQ ID NO: 460877 - RNA, 24 nt, Human
cucaaucacguuuuccaccuccac

SEQ ID NO: 460878 - RNA, 22 nt, Human
cucacacuucuccgguccucug

SEQ ID NO: 460879 - RNA, 18 nt, Human
cucccagguccccuuagc

SEQ ID NO: 460880 - RNA, 22 nt, Human
cugguccauuacuccuuggcuc

SEQ ID NO: 460881 - RNA, 19 nt, Human
cuucauucaucuucauccc

SEQ ID NO: 460882 - RNA, 24 nt, Human
cuucucacacuucuccgguccucu

SEQ ID NO: 460883 - RNA, 23 nt, Human
gaagcucucccggccuaggacac

SEQ ID NO: 460884 - RNA, 23 nt, Human
gaccuccccuuuccucucaacac

SEQ ID NO: 460885 - RNA, 22 nt, Human
gauucuauaggcucuggugggu

SEQ ID NO: 460886 - RNA, 19 nt, Human
ggaaaaggcugaacgggga

SEQ ID NO: 460887 - RNA, 20 nt, Human
ggaaauccuggggcugggug

SEQ ID NO: 460888 - RNA, 23 nt, Human
ggaauccuccaucauuuguaagg

SEQ ID NO: 460889 - RNA, 18 nt, Human
ggccuggggucucaggaa

SEQ ID NO: 460890 - RNA, 18 nt, Human
ggcuugucuacauggcug

SEQ ID NO: 460891 - RNA, 22 nt, Human
gggcugaggucuguagugggug

SEQ ID NO: 460892 - RNA, 22 nt, Human
ggggcacaggcacuacuagacg

SEQ ID NO: 460893 - RNA, 21 nt, Human
gguuccugauccccagagagg

SEQ ID NO: 460894 - RNA, 18 nt, Human
guccuguggauuccucuc

SEQ ID NO: 460895 - RNA, 20 nt, Human
gucucagguuuaggccuggg

SEQ ID NO: 460896 - RNA, 19 nt, Human
gugcgcucuggaaauccug

SEQ ID NO: 460897 - RNA, 20 nt, Human
gugguuccugauccccagag

SEQ ID NO: 460898 - RNA, 19 nt, Human
gugugaccagaggggagga

SEQ ID NO: 460899 - RNA, 19 nt, Human
guuauggugggacuuagcc

SEQ ID NO: 460900 - RNA, 18 nt, Human
guugucaggcacgcucuc

SEQ ID NO: 460901 - RNA, 21 nt, Human
uacagacccccacaguccacu

SEQ ID NO: 460902 - RNA, 21 nt, Human
uagaugugcgaucugucccuc

SEQ ID NO: 460903 - RNA, 21 nt, Human
uagccacccuuacaaccuugg

SEQ ID NO: 460904 - RNA, 22 nt, Human
uagccacccuuacaaccuuggu

SEQ ID NO: 460905 - RNA, 22 nt, Human
uaggccuggggucucaggaacc

SEQ ID NO: 460906 - RNA, 24 nt, Human
uauaaauuaauaaauguuguaaau

SEQ ID NO: 460907 - RNA, 20 nt, Human
uauauuaaccuauaauuggc

SEQ ID NO: 460908 - RNA, 21 nt, Human
uaucaggggaggacacggccc

SEQ ID NO: 460909 - RNA, 18 nt, Human
ucaaucacguuuuccacc

SEQ ID NO: 460910 - RNA, 20 nt, Human
ucaggcccucuucaggcacc

SEQ ID NO: 460911 - RNA, 20 nt, Human
ucaggcccucuucaggcacc

SEQ ID NO: 460912 - RNA, 21 nt, Human
uccaugaaggcucucugaucc

SEQ ID NO: 460913 - RNA, 18 nt, Human
uccauuacuccuuggcuc

SEQ ID NO: 460914 - RNA, 18 nt, Human
ucccaguaauguuucccu

SEQ ID NO: 460915 - RNA, 19 nt, Human
uccccuuuccucucaacac

SEQ ID NO: 460916 - RNA, 21 nt, Human
ucccugaagcgaagcucuccc

SEQ ID NO: 460917 - RNA, 22 nt, Human
ucucaaaugccauaaauaccaa

SEQ ID NO: 460918 - RNA, 19 nt, Human
ucucacacuuucuucuugg

SEQ ID NO: 460919 - RNA, 22 nt, Human
ucuccagagacagaagcaguuc

SEQ ID NO: 460920 - RNA, 22 nt, Human
ucucccagguccccuuagcugu

SEQ ID NO: 460921 - RNA, 21 nt, Human
ucucuggguugucaggcacgc

SEQ ID NO: 460922 - RNA, 18 nt, Human
ucugaggaaucagcagga

SEQ ID NO: 460923 - RNA, 18 nt, Human
ucugguucccucuccucu

SEQ ID NO: 460924 - RNA, 20 nt, Human
ucugucucuccagagacaga

SEQ ID NO: 460925 - RNA, 23 nt, Human
ugaaaccaggaaguuugaagcug

SEQ ID NO: 460926 - RNA, 27 nt, Human
ugaaagaggcagcuggaagauguucuc

SEQ ID NO: 460927 - RNA, 21 nt, Human
ugaagggauccccacguagug

SEQ ID NO: 460928 - RNA, 22 nt, Human
ugaagugucaggcccucuucag

SEQ ID NO: 460929 - RNA, 22 nt, Human
ugaggaggagaaaacuggggcu

SEQ ID NO: 460930 - RNA, 23 nt, Human
ugaucugcauaucugguucccuc

SEQ ID NO: 460931 - RNA, 23 nt, Human
ugccaacuggaauacugggcuua

SEQ ID NO: 460932 - RNA, 24 nt, Human
ugcccuuuaugcaucuccaagguc

SEQ ID NO: 460933 - RNA, 21 nt, Human
uggaaaugagccaucaucucc

SEQ ID NO: 460934 - RNA, 18 nt, Human
uggaauacugggcuuaau

SEQ ID NO: 460935 - RNA, 22 nt, Human
ugggagcuguguaacaacuagu

SEQ ID NO: 460936 - RNA, 19 nt, Human
uggugccaacuggaauacu

SEQ ID NO: 460937 - RNA, 20 nt, Human
uguagaaggagacaucucca

SEQ ID NO: 460938 - RNA, 23 nt, Human
uguagaugugcgaucugucccuc

SEQ ID NO: 460939 - RNA, 23 nt, Human
uuaacccaaauaaacaaaaacuc

SEQ ID NO: 460940 - RNA, 20 nt, Human
uuacaagcaaaggaacuacu

SEQ ID NO: 460941 - RNA, 21 nt, Human
uuaggccuggggucucaggaa

SEQ ID NO: 460942 - RNA, 23 nt, Human
uucaugcuauuuuaauauaaauu

SEQ ID NO: 460943 - RNA, 21 nt, Human
uucccaaaagaggagaaaaaa

SEQ ID NO: 460944 - RNA, 21 nt, Human
uucccuaugccuggaucccau

SEQ ID NO: 460945 - RNA, 22 nt, Human
uucugaggaaucagcaggaccu

SEQ ID NO: 460946 - RNA, 21 nt, Human
uugcuuuuucuuuucuccgcu

SEQ ID NO: 460947 - RNA, 18 nt, Human
uuggcuccugugagugca

SEQ ID NO: 460948 - RNA, 21 nt, Human
aaaggaacuacuaaagccaca

SEQ ID NO: 460949 - RNA, 21 nt, Human
aaaguuuuuuugagcuaacau

SEQ ID NO: 460950 - RNA, 25 nt, Human
aacacacucacagacacacccagaa

SEQ ID NO: 460951 - RNA, 21 nt, Human
aagucugaaagccucagaacc

SEQ ID NO: 460952 - RNA, 21 nt, Human
aaguucaaaggccggagagcc

SEQ ID NO: 460953 - RNA, 21 nt, Human
acaguagguucacugcccaac

SEQ ID NO: 460954 - RNA, 21 nt, Human
acauuaaucguuuuucaucuc

SEQ ID NO: 460955 - RNA, 21 nt, Human
accaggaccucaaaccucaac

SEQ ID NO: 460956 - RNA, 18 nt, Human
accagugucacacuuuuu

SEQ ID NO: 460957 - RNA, 21 nt, Human
agagaauuucccacugacuca

SEQ ID NO: 460958 - RNA, 22 nt, Human
agcucucugguuccacuuccuc

SEQ ID NO: 460959 - RNA, 18 nt, Human
aggaccucaaaccucaac

SEQ ID NO: 460960 - RNA, 22 nt, Human
aggcagauaugauaauacaaau

SEQ ID NO: 460961 - RNA, 23 nt, Human
aguccaaagccaaaggccugaga

SEQ ID NO: 460962 - RNA, 22 nt, Human
auugggcacccagccaacagaa

SEQ ID NO: 460963 - RNA, 24 nt, Human
caaguccugaaguucaaaggccgg

SEQ ID NO: 460964 - RNA, 24 nt, Human
cacacucacagacacacccagaaa

SEQ ID NO: 460965 - RNA, 21 nt, Human
cagaaggagagaauuucccac

SEQ ID NO: 460966 - RNA, 19 nt, Human
cagcuucucucacuuucuu

SEQ ID NO: 460967 - RNA, 20 nt, Human
caguccaaagccaaaggccu

SEQ ID NO: 460968 - RNA, 19 nt, Human
cauaaauauuaacccaaau

SEQ ID NO: 460969 - RNA, 19 nt, Human
caucugagccaaaccacau

SEQ ID NO: 460970 - RNA, 21 nt, Human
caucuucaucccagguccagg

SEQ ID NO: 460971 - RNA, 22 nt, Human
cauugaaccugaaugcugacgu

SEQ ID NO: 460972 - RNA, 23 nt, Human
ccaaaccacauccacaugagucc

SEQ ID NO: 460973 - RNA, 24 nt, Human
ccaaagccaaaggccugagaaccc

SEQ ID NO: 460974 - RNA, 27 nt, Human
ccaaauaaacaaaagcucuuuaaaguc

SEQ ID NO: 460975 - RNA, 19 nt, Human
ccacauccacaugagucca

SEQ ID NO: 460976 - RNA, 18 nt, Human
ccacaugaguccauguuc

SEQ ID NO: 460977 - RNA, 22 nt, Human
ccacuuccucuaucucugaucu

SEQ ID NO: 460978 - RNA, 25 nt, Human
ccagagagacaaaaucaauaugaua

SEQ ID NO: 460979 - RNA, 21 nt, Human
ccagggcaggcagagaccaga

SEQ ID NO: 460980 - RNA, 19 nt, Human
ccagucagguugacaucua

SEQ ID NO: 460981 - RNA, 22 nt, Human
ccagucagguugacaucuaaaa

SEQ ID NO: 460982 - RNA, 19 nt, Human
cccagaaauaauguuguac

SEQ ID NO: 460983 - RNA, 23 nt, Human
cccauaauuacaagcaaaggaac

SEQ ID NO: 460984 - RNA, 21 nt, Human
cccucucccuucugguggucc

SEQ ID NO: 460985 - RNA, 21 nt, Human
ccugguacaaguccugaaguu

SEQ ID NO: 460986 - RNA, 18 nt, Human
ccuggugaacccuguugg

SEQ ID NO: 460987 - RNA, 19 nt, Human
cuaaagccacagacuagug

SEQ ID NO: 460988 - RNA, 20 nt, Human
cucacagacacacccagaaa

SEQ ID NO: 460989 - RNA, 23 nt, Human
cucacuugccaaucucuucugga

SEQ ID NO: 460990 - RNA, 20 nt, Human
cucgguaucugggaccuguu

SEQ ID NO: 460991 - RNA, 22 nt, Human
cugauuuuaaacaguagguuca

SEQ ID NO: 460992 - RNA, 19 nt, Human
cugcccugcucgaccagga

SEQ ID NO: 460993 - RNA, 21 nt, Human
cuggcauauugggcuuaaugu

SEQ ID NO: 460994 - RNA, 22 nt, Human
cugguccaguacugcccugcuc

SEQ ID NO: 460995 - RNA, 23 nt, Human
cuggugccaacuggcauauuggg

SEQ ID NO: 460996 - RNA, 24 nt, Human
cuuauggugggacuuagccauccu

SEQ ID NO: 460997 - RNA, 19 nt, Human
cuucauucaucuucauccc

SEQ ID NO: 460998 - RNA, 20 nt, Human
cuuuccucugccuuuuuguu

SEQ ID NO: 460999 - RNA, 20 nt, Human
gagaaaacuggggcagaggg

SEQ ID NO: 461000 - RNA, 21 nt, Human
gagaagaauuugccuuuccuc

SEQ ID NO: 461001 - RNA, 28 nt, Human
gaggaggagaaaacuggggcagagggcu

SEQ ID NO: 461002 - RNA, 21 nt, Human
gagugggugugaaaaaggcag

SEQ ID NO: 461003 - RNA, 26 nt, Human
gauugcuuuuucacaaaacauccuau

SEQ ID NO: 461004 - RNA, 18 nt, Human
gcagaagaagaagagugu

SEQ ID NO: 461005 - RNA, 18 nt, Human
gcucaucuguaggcugga

SEQ ID NO: 461006 - RNA, 20 nt, Human
gcuguggaaauccugggguu

SEQ ID NO: 461007 - RNA, 20 nt, Human
ggaaauccugggguugggug

SEQ ID NO: 461008 - RNA, 24 nt, Human
gggcacccagccaacagaaggaga

SEQ ID NO: 461009 - RNA, 19 nt, Human
gggcgugucuuucauuagg

SEQ ID NO: 461010 - RNA, 20 nt, Human
gguugugcgguggcugcuga

SEQ ID NO: 461011 - RNA, 18 nt, Human
guccuguggauuccucuc

SEQ ID NO: 461012 - RNA, 21 nt, Human
gugugcuguggaaauccuggg

SEQ ID NO: 461013 - RNA, 24 nt, Human
guucacugcccaacagcuucucuc

SEQ ID NO: 461014 - RNA, 19 nt, Human
uaaaguccucaauaacuuc

SEQ ID NO: 461015 - RNA, 21 nt, Human
uaaccagugucacacuuuuug

SEQ ID NO: 461016 - RNA, 22 nt, Human
uaacuuccaggauccacuauuc

SEQ ID NO: 461017 - RNA, 19 nt, Human
uacaaaggcagauaugaua

SEQ ID NO: 461018 - RNA, 18 nt, Human
uagaucaggaaguuugaa

SEQ ID NO: 461019 - RNA, 22 nt, Human
uagccauccuuacaaccuuggu

SEQ ID NO: 461020 - RNA, 21 nt, Human
uagugaggaggagaaaacugg

SEQ ID NO: 461021 - RNA, 18 nt, Human
uauugcagggacaucuga

SEQ ID NO: 461022 - RNA, 22 nt, Human
uccaaagccaaaggccugagaa

SEQ ID NO: 461023 - RNA, 24 nt, Human
uccaaagccaaaggccugagaacc

SEQ ID NO: 461024 - RNA, 23 nt, Human
uccagaggagagaagaauuugcc

SEQ ID NO: 461025 - RNA, 19 nt, Human
uccucucuccucucucauc

SEQ ID NO: 461026 - RNA, 22 nt, Human
ucuacauuaaccuauaacugau

SEQ ID NO: 461027 - RNA, 19 nt, Human
ucuagguauuccuuaaucc

SEQ ID NO: 461028 - RNA, 21 nt, Human
ucuaugagcaggcauuuauua

SEQ ID NO: 461029 - RNA, 18 nt, Human
ucuccagagagacaaaau

SEQ ID NO: 461030 - RNA, 18 nt, Human
ucugguucccucucccuu

SEQ ID NO: 461031 - RNA, 20 nt, Human
ucuucuggaaacacacucac

SEQ ID NO: 461032 - RNA, 18 nt, Human
ugaaaaaggcagcuggaa

SEQ ID NO: 461033 - RNA, 23 nt, Human
ugaucugcauaucugguucccuc

SEQ ID NO: 461034 - RNA, 23 nt, Human
ugcccugcucgaccaggaccuca

SEQ ID NO: 461035 - RNA, 19 nt, Human
ugcuguggaaauccugggg

SEQ ID NO: 461036 - RNA, 19 nt, Human
uggaaaaaguuaaccagug

SEQ ID NO: 461037 - RNA, 21 nt, Human
uggaaaugagccaucaucucc

SEQ ID NO: 461038 - RNA, 21 nt, Human
uggagacccugggaugcuggu

SEQ ID NO: 461039 - RNA, 24 nt, Human
uggauuccucucuccucucucauc

SEQ ID NO: 461040 - RNA, 20 nt, Human
ugggguuggguggaaaugag

SEQ ID NO: 461041 - RNA, 20 nt, Human
uggugggacuuagccauccu

SEQ ID NO: 461042 - RNA, 18 nt, Human
ugucucagcuccagagga

SEQ ID NO: 461043 - RNA, 21 nt, Human
ugugcaguaaaguuuuuuuga

SEQ ID NO: 461044 - RNA, 20 nt, Human
ugugcuguggaaauccuggg

SEQ ID NO: 461045 - RNA, 23 nt, Human
ugugguuuugggauuccuagaga

SEQ ID NO: 461046 - RNA, 18 nt, Human
uguuguauugggcaccca

SEQ ID NO: 461047 - RNA, 23 nt, Human
uuaacccaaauaaacaaaagcuc

SEQ ID NO: 461048 - RNA, 23 nt, Human
uuaaugcuauuuuaacauaaauu

SEQ ID NO: 461049 - RNA, 20 nt, Human
uuacaagcaaaggaacuacu

SEQ ID NO: 461050 - RNA, 19 nt, Human
uuagaucaggaaguuugaa

SEQ ID NO: 461051 - RNA, 25 nt, Human
uuagaucaggaaguuugaagccacu

SEQ ID NO: 461052 - RNA, 18 nt, Human
uuagccauccuuacaacc

SEQ ID NO: 461053 - RNA, 22 nt, Human
uuaucugcauggcugugagucc

SEQ ID NO: 461054 - RNA, 18 nt, Human
uucaaaggccggagagcc

SEQ ID NO: 461055 - RNA, 20 nt, Human
uucacugcccaacagcuucu

SEQ ID NO: 461056 - RNA, 21 nt, Human
uucauuagggggguugugcgg

SEQ ID NO: 461057 - RNA, 21 nt, Human
uucccuaugccuggaucccau

SEQ ID NO: 461058 - RNA, 19 nt, Human
uuccuagagagaacucuga

SEQ ID NO: 461059 - RNA, 22 nt, Human
uuggccucauuccaaguccaca

SEQ ID NO: 461060 - RNA, 20 nt, Human
uuguuuuuuuuauuuggacc

SEQ ID NO: 461061 - RNA, 19 nt, Human
uuuaaaguccucaauaacu

SEQ ID NO: 461062 - RNA, 19 nt, Human
uuuuguuucaaugucaaau

SEQ ID NO: 461063 - RNA, 22 nt, Human
uuuuuuuuuuuuagaugccuca

SEQ ID NO: 461064 - RNA, 18 nt, Human
aaaaaaaaaaaaucccug

SEQ ID NO: 461065 - RNA, 18 nt, Human
aaaagaacggccauaggg

SEQ ID NO: 461066 - RNA, 25 nt, Human
aaauaucccuguaagccggucaccc

SEQ ID NO: 461067 - RNA, 26 nt, Human
aaaucaccucuuagcauuccccucug

SEQ ID NO: 461068 - RNA, 20 nt, Human
aacagaguaagacuccaucu

SEQ ID NO: 461069 - RNA, 22 nt, Human
aacaggggugucaacuccacaa

SEQ ID NO: 461070 - RNA, 20 nt, Human
aacauagugaacccucaucu

SEQ ID NO: 461071 - RNA, 22 nt, Human
aacuagucaugucuacuuugua

SEQ ID NO: 461072 - RNA, 23 nt, Human
aagaaacaggguggaaaagaacg

SEQ ID NO: 461073 - RNA, 21 nt, Human
aagcagagaaaaguuacuuca

SEQ ID NO: 461074 - RNA, 20 nt, Human
aaggaaaaacccacgcgucc

SEQ ID NO: 461075 - RNA, 23 nt, Human
aaucagcugggaaggagucaaca

SEQ ID NO: 461076 - RNA, 24 nt, Human
aauuguuugaacccaggaggugga

SEQ ID NO: 461077 - RNA, 24 nt, Human
acagaguaagacuccaucuuaaaa

SEQ ID NO: 461078 - RNA, 23 nt, Human
acauagugaacccucaucuguac

SEQ ID NO: 461079 - RNA, 21 nt, Human
accaaacucaaacaacuguca

SEQ ID NO: 461080 - RNA, 19 nt, Human
accucuuagcauuccccuc

SEQ ID NO: 461081 - RNA, 24 nt, Human
acuccacaaccaccuacagugauc

SEQ ID NO: 461082 - RNA, 23 nt, Human
acugcacuccagccuagcaacag

SEQ ID NO: 461083 - RNA, 23 nt, Human
acugcacuccagccuagcaacag

SEQ ID NO: 461084 - RNA, 22 nt, Human
agaauuguuugaacccaggagg

SEQ ID NO: 461085 - RNA, 20 nt, Human
agaccgagguggguggauca

SEQ ID NO: 461086 - RNA, 24 nt, Human
agcacuuugggagaccgagguggg

SEQ ID NO: 461087 - RNA, 23 nt, Human
agccuguaaucccagcacuuugg

SEQ ID NO: 461088 - RNA, 19 nt, Human
aggaaggcuggcucuggcu

SEQ ID NO: 461089 - RNA, 23 nt, Human
aggcaggagaauuguuugaaccc

SEQ ID NO: 461090 - RNA, 24 nt, Human
aggcaggagaauuguuugaaccca

SEQ ID NO: 461091 - RNA, 21 nt, Human
aggcugaggcaggagaauugu

SEQ ID NO: 461092 - RNA, 24 nt, Human
aggcugaggcaggagaauuguuug

SEQ ID NO: 461093 - RNA, 20 nt, Human
agguggagguugcagggagc

SEQ ID NO: 461094 - RNA, 24 nt, Human
agguggagguugcagggagcugag

SEQ ID NO: 461095 - RNA, 20 nt, Human
agguggggggcagacacuau

SEQ ID NO: 461096 - RNA, 24 nt, Human
agguggguggaucaugaggucaag

SEQ ID NO: 461097 - RNA, 20 nt, Human
aucgcaccacugcacuccag

SEQ ID NO: 461098 - RNA, 21 nt, Human
auucacuuuucugcaccccag

SEQ ID NO: 461099 - RNA, 21 nt, Human
auuuguuggguggaacacauc

SEQ ID NO: 461100 - RNA, 18 nt, Human
caaagcuaauccaaggcg

SEQ ID NO: 461101 - RNA, 22 nt, Human
caaagcucauaacacagcacuc

SEQ ID NO: 461102 - RNA, 20 nt, Human
caaccaccuacagugauccu

SEQ ID NO: 461103 - RNA, 21 nt, Human
caagacacucugcaaagcuaa

SEQ ID NO: 461104 - RNA, 24 nt, Human
caagccuguaaucccagcacuuug

SEQ ID NO: 461105 - RNA, 22 nt, Human
caauaauaaugaugauaaugag

SEQ ID NO: 461106 - RNA, 25 nt, Human
caccacugcacuccagccuagcaac

SEQ ID NO: 461107 - RNA, 22 nt, Human
cacuccagccuagcaacagagu

SEQ ID NO: 461108 - RNA, 18 nt, Human
cacugcacuccagccuag

SEQ ID NO: 461109 - RNA, 20 nt, Human
cacugcacuccagccuagca

SEQ ID NO: 461110 - RNA, 21 nt, Human
cacugcacuccagccuagcaa

SEQ ID NO: 461111 - RNA, 24 nt, Human
cacugcacuccagccuagcaacag

SEQ ID NO: 461112 - RNA, 21 nt, Human
cagcacuuugggagaccgagg

SEQ ID NO: 461113 - RNA, 24 nt, Human
cagcacuuugggagaccgaggugg

SEQ ID NO: 461114 - RNA, 23 nt, Human
caguacucgggaggcugaggcag

SEQ ID NO: 461115 - RNA, 20 nt, Human
ccaaacucaaacaacuguca

SEQ ID NO: 461116 - RNA, 21 nt, Human
ccaagacacucugcaaagcua

SEQ ID NO: 461117 - RNA, 22 nt, Human
ccaagacacucugcaaagcuaa

SEQ ID NO: 461118 - RNA, 19 nt, Human
ccacugcacuccagccuag

SEQ ID NO: 461119 - RNA, 19 nt, Human
ccacugcacuccagccuag

SEQ ID NO: 461120 - RNA, 20 nt, Human
ccacugcacuccagccuagc

SEQ ID NO: 461121 - RNA, 23 nt, Human
ccacugcacuccagccuagcaac

SEQ ID NO: 461122 - RNA, 21 nt, Human
cccaggagguggagguugcag

SEQ ID NO: 461123 - RNA, 21 nt, Human
ccuagcaacagaguaagacuc

SEQ ID NO: 461124 - RNA, 21 nt, Human
ccucuuagcauuccccucuga

SEQ ID NO: 461125 - RNA, 19 nt, Human
ccuggccaacauagugaac

SEQ ID NO: 461126 - RNA, 22 nt, Human
ccuggccaacauagugaacccu

SEQ ID NO: 461127 - RNA, 24 nt, Human
ccuggccaacauagugaacccuca

SEQ ID NO: 461128 - RNA, 22 nt, Human
ccuguaaucccagcacuuuggg

SEQ ID NO: 461129 - RNA, 24 nt, Human
cgagaccauccuggccaacauagu

SEQ ID NO: 461130 - RNA, 22 nt, Human
cgagguggguggaucaugaggu

SEQ ID NO: 461131 - RNA, 24 nt, Human
cgagguggguggaucaugagguca

SEQ ID NO: 461132 - RNA, 21 nt, Human
cgcaccacugcacuccagccu

SEQ ID NO: 461133 - RNA, 24 nt, Human
cucaagccuguaaucccagcacuu

SEQ ID NO: 461134 - RNA, 21 nt, Human
cucaaguauggugaccgaaga

SEQ ID NO: 461135 - RNA, 24 nt, Human
cugcaaagcuaauccaaggcgugc

SEQ ID NO: 461136 - RNA, 25 nt, Human
cuuaaaaaaaaaaaaaaaucccugu

SEQ ID NO: 461137 - RNA, 22 nt, Human
cuuaucacauuuguugggugga

SEQ ID NO: 461138 - RNA, 23 nt, Human
cuuuaugguugugauugguugcu

SEQ ID NO: 461139 - RNA, 27 nt, Human
cuuugagucccaacauugaaaaucacc

SEQ ID NO: 461140 - RNA, 18 nt, Human
gaaaaucucuaggguauu

SEQ ID NO: 461141 - RNA, 23 nt, Human
gagaucgcaccacugcacuccag

SEQ ID NO: 461142 - RNA, 22 nt, Human
gagcauuuuaaguucuccauua

SEQ ID NO: 461143 - RNA, 18 nt, Human
gagcugggcagggagaag

SEQ ID NO: 461144 - RNA, 23 nt, Human
gagguggguggaucaugagguca

SEQ ID NO: 461145 - RNA, 23 nt, Human
gagguugcagggagcugagaucg

SEQ ID NO: 461146 - RNA, 20 nt, Human
gcaccacugcacuccagccu

SEQ ID NO: 461147 - RNA, 23 nt, Human
gcacuccagccuagcaacagagu

SEQ ID NO: 461148 - RNA, 22 nt, Human
gcaggagaauuguuugaaccca

SEQ ID NO: 461149 - RNA, 19 nt, Human
gcugagaucgcaccacugc

SEQ ID NO: 461150 - RNA, 21 nt, Human
gcugggcagggagaagcagag

SEQ ID NO: 461151 - RNA, 22 nt, Human
gcugggcagggagaagcagaga

SEQ ID NO: 461152 - RNA, 24 nt, Human
ggaaaccuccacuucccuagagcu

SEQ ID NO: 461153 - RNA, 18 nt, Human
ggagguugcagggagcug

SEQ ID NO: 461154 - RNA, 24 nt, Human
ggagguugcagggagcugagaucg

SEQ ID NO: 461155 - RNA, 20 nt, Human
ggccucuagucucuuuccaa

SEQ ID NO: 461156 - RNA, 19 nt, Human
gggcagggagaagcagaga

SEQ ID NO: 461157 - RNA, 18 nt, Human
gggugucaacuccacaac

SEQ ID NO: 461158 - RNA, 19 nt, Human
gggugucaacuccacaacc

SEQ ID NO: 461159 - RNA, 24 nt, Human
gguggcgugcaccuauauucccag

SEQ ID NO: 461160 - RNA, 23 nt, Human
gguggcucaagccuguaauccca

SEQ ID NO: 461161 - RNA, 24 nt, Human
gguggcucaagccuguaaucccag

SEQ ID NO: 461162 - RNA, 22 nt, Human
gucaacuccacaaccaccuaca

SEQ ID NO: 461163 - RNA, 20 nt, Human
guggaacacaucuguucccc

SEQ ID NO: 461164 - RNA, 19 nt, Human
gugggucgaccugcaggca

SEQ ID NO: 461165 - RNA, 23 nt, Human
uacggugagguuauucucucaac

SEQ ID NO: 461166 - RNA, 22 nt, Human
uagaauuccaaauggaaaccuc

SEQ ID NO: 461167 - RNA, 23 nt, Human
uagaauuccaaauggaaaccucc

SEQ ID NO: 461168 - RNA, 22 nt, Human
uagcaacagaguaagacuccau

SEQ ID NO: 461169 - RNA, 23 nt, Human
uagcaggcagcaguugaaaggaa

SEQ ID NO: 461170 - RNA, 21 nt, Human
uagugaacccucaucuguacu

SEQ ID NO: 461171 - RNA, 19 nt, Human
uauggugaccgaagaagau

SEQ ID NO: 461172 - RNA, 23 nt, Human
ucaaccaagacacucugcaaagc

SEQ ID NO: 461173 - RNA, 24 nt, Human
ucaaccaagacacucugcaaagcu

SEQ ID NO: 461174 - RNA, 21 nt, Human
ucaauucacuuuucugcaccc

SEQ ID NO: 461175 - RNA, 24 nt, Human
ucaugaggucaagagaucgagacc

SEQ ID NO: 461176 - RNA, 18 nt, Human
ucaugcugcauaucagga

SEQ ID NO: 461177 - RNA, 23 nt, Human
uccaucuuaaaaaaaaaaaaaaa

SEQ ID NO: 461178 - RNA, 23 nt, Human
uccauucuuucuacuaugguuaa

SEQ ID NO: 461179 - RNA, 20 nt, Human
ucccaacauugaaaaucacc

SEQ ID NO: 461180 - RNA, 23 nt, Human
uccuucuggaagaaaggaaaaac

SEQ ID NO: 461181 - RNA, 23 nt, Human
ucgggaggcugaggcaggagaau

SEQ ID NO: 461182 - RNA, 22 nt, Human
ucucaaccaagacacucugcaa

SEQ ID NO: 461183 - RNA, 25 nt, Human
ucucaaccaagacacucugcaaagc

SEQ ID NO: 461184 - RNA, 19 nt, Human
ucugacaaucagcugggaa

SEQ ID NO: 461185 - RNA, 21 nt, Human
ucuggaagaaaggaaaaaccc

SEQ ID NO: 461186 - RNA, 21 nt, Human
ugaacaucucccaacugcaga

SEQ ID NO: 461187 - RNA, 23 nt, Human
ugacaaucagcugggaaggaguc

SEQ ID NO: 461188 - RNA, 24 nt, Human
ugaggcaggagaauuguuugaacc

SEQ ID NO: 461189 - RNA, 25 nt, Human
ugaggcaggagaauuguuugaaccc

SEQ ID NO: 461190 - RNA, 18 nt, Human
ugcccugccucaacuucc

SEQ ID NO: 461191 - RNA, 21 nt, Human
ugccucaacuuccauacuugc

SEQ ID NO: 461192 - RNA, 24 nt, Human
ugccucaacuuccauacuugcuaa

SEQ ID NO: 461193 - RNA, 20 nt, Human
ugcuaaaugagacuacccga

SEQ ID NO: 461194 - RNA, 22 nt, Human
ugcuguggagggggaggcccuc

SEQ ID NO: 461195 - RNA, 24 nt, Human
uggaaaagaacggccauagggccg

SEQ ID NO: 461196 - RNA, 20 nt, Human
uggaagguggggggcagaca

SEQ ID NO: 461197 - RNA, 18 nt, Human
uggauagaccccucuccu

SEQ ID NO: 461198 - RNA, 19 nt, Human
uggccucuagucucuuucc

SEQ ID NO: 461199 - RNA, 22 nt, Human
uggcucaagccuguaaucccag

SEQ ID NO: 461200 - RNA, 24 nt, Human
uggcucaagccuguaaucccagca

SEQ ID NO: 461201 - RNA, 21 nt, Human
ugggaaggagucaacaggggu

SEQ ID NO: 461202 - RNA, 19 nt, Human
ugggagaccgaggugggug

SEQ ID NO: 461203 - RNA, 24 nt, Human
ugggagaccgagguggguggauca

SEQ ID NO: 461204 - RNA, 24 nt, Human
ugggcagggagaagcagagaaaag

SEQ ID NO: 461205 - RNA, 21 nt, Human
ugggggaagaaacagggugga

SEQ ID NO: 461206 - RNA, 21 nt, Human
uggguggaacacaucuguucc

SEQ ID NO: 461207 - RNA, 23 nt, Human
uggguggaucaugaggucaagag

SEQ ID NO: 461208 - RNA, 19 nt, Human
ugguaccaaacucaaacaa

SEQ ID NO: 461209 - RNA, 19 nt, Human
uguagucaauucacuuuuc

SEQ ID NO: 461210 - RNA, 20 nt, Human
ugucauguggguacggugag

SEQ ID NO: 461211 - RNA, 19 nt, Human
uguugcgaggauuaaagga

SEQ ID NO: 461212 - RNA, 23 nt, Human
uuaguuauugcuguuuagauccc

SEQ ID NO: 461213 - RNA, 23 nt, Human
uuccccucugaaaaucacagccc

SEQ ID NO: 461214 - RNA, 24 nt, Human
uugaacccaggagguggagguugc

SEQ ID NO: 461215 - RNA, 20 nt, Human
uugcagggagcugagaucgc

SEQ ID NO: 461216 - RNA, 23 nt, Human
uugcccugccucaacuuccauac

SEQ ID NO: 461217 - RNA, 24 nt, Human
uugcuguuuagaucccagcugugu

SEQ ID NO: 461218 - RNA, 19 nt, Human
uuggguggaacacaucugu

SEQ ID NO: 461219 - RNA, 24 nt, Human
uuguuugaacccaggagguggagg

SEQ ID NO: 461220 - RNA, 22 nt, Human
uuuguugggugugguggcgugc

SEQ ID NO: 461221 - RNA, 22 nt, Human
uuuuuuuuuuuuuuuuuuucag

SEQ ID NO: 461222 - RNA, 19 nt, Human
aaagugcuaggauuacagg

SEQ ID NO: 461223 - RNA, 24 nt, Human
aaagugcuaggauuacaggcauga

SEQ ID NO: 461224 - RNA, 26 nt, Human
aagugcuaggauuacaggcaugagcu

SEQ ID NO: 461225 - RNA, 19 nt, Human
accuugugauccgcccucc

SEQ ID NO: 461226 - RNA, 18 nt, Human
acgggguuucaccguguu

SEQ ID NO: 461227 - RNA, 19 nt, Human
acgggguuucaccguguua

SEQ ID NO: 461228 - RNA, 20 nt, Human
acgggguuucaccguguuag

SEQ ID NO: 461229 - RNA, 24 nt, Human
acgggguuucaccguguuagccag

SEQ ID NO: 461230 - RNA, 21 nt, Human
acugcaagcucugccuuccgg

SEQ ID NO: 461231 - RNA, 19 nt, Human
agagacgggguuucaccgu

SEQ ID NO: 461232 - RNA, 25 nt, Human
aggcuggagugcaguggcgugaucu

SEQ ID NO: 461233 - RNA, 20 nt, Human
aguagagacgggguuucacc

SEQ ID NO: 461234 - RNA, 18 nt, Human
aguagcugggacuacagg

SEQ ID NO: 461235 - RNA, 19 nt, Human
agugcaguggcgugaucuc

SEQ ID NO: 461236 - RNA, 20 nt, Human
agugcaguggcgugaucucg

SEQ ID NO: 461237 - RNA, 23 nt, Human
agugcaguggcgugaucucggcu

SEQ ID NO: 461238 - RNA, 24 nt, Human
agugcaguggcgugaucucggcuc

SEQ ID NO: 461239 - RNA, 21 nt, Human
auucuccugccucagccuccc

SEQ ID NO: 461240 - RNA, 24 nt, Human
auuuuuuguauuuuuaguagagga

SEQ ID NO: 461241 - RNA, 24 nt, Human
caaagugcuaggauuacaggcaug

SEQ ID NO: 461242 - RNA, 18 nt, Human
caccguguuagccaggau

SEQ ID NO: 461243 - RNA, 23 nt, Human
caccguguuagccaggauggucu

SEQ ID NO: 461244 - RNA, 24 nt, Human
caccguguuagccaggauggucuu

SEQ ID NO: 461245 - RNA, 23 nt, Human
cacugcaagcucugccuuccggg

SEQ ID NO: 461246 - RNA, 19 nt, Human
caggugcccgucaccaugc

SEQ ID NO: 461247 - RNA, 21 nt, Human
caguauggaaaaccaucccuu

SEQ ID NO: 461248 - RNA, 22 nt, Human
caguauggaaaaccaucccuug

SEQ ID NO: 461249 - RNA, 23 nt, Human
caguauggaaaaccaucccuugg

SEQ ID NO: 461250 - RNA, 22 nt, Human
caugccauucuccugccucagc

SEQ ID NO: 461251 - RNA, 21 nt, Human
cauuagagcaucaggcugacu

SEQ ID NO: 461252 - RNA, 19 nt, Human
ccaaagugcuaggauuaca

SEQ ID NO: 461253 - RNA, 22 nt, Human
ccaaagugcuaggauuacaggc

SEQ ID NO: 461254 - RNA, 24 nt, Human
ccaaagugcuaggauuacaggcau

SEQ ID NO: 461255 - RNA, 19 nt, Human
cccaggcuggagugcagug

SEQ ID NO: 461256 - RNA, 22 nt, Human
cccaggcuggagugcaguggcg

SEQ ID NO: 461257 - RNA, 23 nt, Human
cccgaguagcugggacuacaggu

SEQ ID NO: 461258 - RNA, 24 nt, Human
cccgaguagcugggacuacaggug

SEQ ID NO: 461259 - RNA, 18 nt, Human
ccgcccuccucagccuuc

SEQ ID NO: 461260 - RNA, 22 nt, Human
ccggguucaugccauucuccug

SEQ ID NO: 461261 - RNA, 21 nt, Human
ccuuccggguucaugccauuc

SEQ ID NO: 461262 - RNA, 18 nt, Human
ccuugugauccgcccucc

SEQ ID NO: 461263 - RNA, 21 nt, Human
ccuugugauccgcccuccuca

SEQ ID NO: 461264 - RNA, 22 nt, Human
ccuugugauccgcccuccucag

SEQ ID NO: 461265 - RNA, 24 nt, Human
cgcucugucucccaggcuggagug

SEQ ID NO: 461266 - RNA, 24 nt, Human
cucacugcaagcucugccuuccgg

SEQ ID NO: 461267 - RNA, 24 nt, Human
cucagccucccgaguagcugggac

SEQ ID NO: 461268 - RNA, 22 nt, Human
cuccugaccuugugauccgccc

SEQ ID NO: 461269 - RNA, 24 nt, Human
cucgcucugucucccaggcuggag

SEQ ID NO: 461270 - RNA, 23 nt, Human
cugccucagccucccgaguagcu

SEQ ID NO: 461271 - RNA, 24 nt, Human
gaccuugugauccgcccuccucag

SEQ ID NO: 461272 - RNA, 24 nt, Human
gacuacaggugcccgucaccaugc

SEQ ID NO: 461273 - RNA, 20 nt, Human
gagaaucagagcccacagaa

SEQ ID NO: 461274 - RNA, 24 nt, Human
gagacgggguuucaccguguuagc

SEQ ID NO: 461275 - RNA, 21 nt, Human
gauuacaggcaugagcugcug

SEQ ID NO: 461276 - RNA, 24 nt, Human
gauuacaggcaugagcugcugugc

SEQ ID NO: 461277 - RNA, 20 nt, Human
gccucagccucccgaguagc

SEQ ID NO: 461278 - RNA, 25 nt, Human
gccuuccggguucaugccauucucc

SEQ ID NO: 461279 - RNA, 19 nt, Human
gcuggagugcaguggcgug

SEQ ID NO: 461280 - RNA, 22 nt, Human
ggauuacaggcaugagcugcug

SEQ ID NO: 461281 - RNA, 24 nt, Human
ggauuacaggcaugagcugcugug

SEQ ID NO: 461282 - RNA, 22 nt, Human
ggcuggagugcaguggcgugau

SEQ ID NO: 461283 - RNA, 23 nt, Human
gggguuucaccguguuagccagg

SEQ ID NO: 461284 - RNA, 22 nt, Human
ggguuucaccguguuagccagg

SEQ ID NO: 461285 - RNA, 19 nt, Human
ggucuugaucuccugaccu

SEQ ID NO: 461286 - RNA, 20 nt, Human
ggucuugaucuccugaccuu

SEQ ID NO: 461287 - RNA, 23 nt, Human
guagagacgggguuucaccgugu

SEQ ID NO: 461288 - RNA, 24 nt, Human
gugauccgcccuccucagccuucc

SEQ ID NO: 461289 - RNA, 21 nt, Human
gugaucucggcucacugcaag

SEQ ID NO: 461290 - RNA, 24 nt, Human
uaauuuuuuauuuuuuguauuuuu

SEQ ID NO: 461291 - RNA, 19 nt, Human
uaggauuacaggcaugagc

SEQ ID NO: 461292 - RNA, 19 nt, Human
uaggauuacaggcaugagc

SEQ ID NO: 461293 - RNA, 19 nt, Human
uaggauuacaggcaugagc

SEQ ID NO: 461294 - RNA, 20 nt, Human
uaggauuacaggcaugagcu

SEQ ID NO: 461295 - RNA, 22 nt, Human
uaggauuacaggcaugagcugc

SEQ ID NO: 461296 - RNA, 24 nt, Human
uaggauuacaggcaugagcugcug

SEQ ID NO: 461297 - RNA, 21 nt, Human
uaguagagacgggguuucacc

SEQ ID NO: 461298 - RNA, 24 nt, Human
uaguagagacgggguuucaccgug

SEQ ID NO: 461299 - RNA, 26 nt, Human
uaguagagacgggguuucaccguguu

SEQ ID NO: 461300 - RNA, 26 nt, Human
uaguagagacgggguuucaccguugg

SEQ ID NO: 461301 - RNA, 24 nt, Human
ucaccguguuagccaggauggucu

SEQ ID NO: 461302 - RNA, 18 nt, Human
ucacugcaagcucugccu

SEQ ID NO: 461303 - RNA, 24 nt, Human
ucacugcaagcucugccuuccggg

SEQ ID NO: 461304 - RNA, 23 nt, Human
ucagccucccgaguagcugggac

SEQ ID NO: 461305 - RNA, 18 nt, Human
ucaugccauucuccugcc

SEQ ID NO: 461306 - RNA, 24 nt, Human
uccaaagugcuaggauuacaggca

SEQ ID NO: 461307 - RNA, 21 nt, Human
uccauuagagcaucaggcuga

SEQ ID NO: 461308 - RNA, 21 nt, Human
uccauucuuucuauuauggcu

SEQ ID NO: 461309 - RNA, 22 nt, Human
ucccaggcuggagugcaguggc

SEQ ID NO: 461310 - RNA, 23 nt, Human
ucccgaguagcugggacuacagg

SEQ ID NO: 461311 - RNA, 24 nt, Human
ucccgaguagcugggacuacaggu

SEQ ID NO: 461312 - RNA, 21 nt, Human
uccgcccuccucagccuucca

SEQ ID NO: 461313 - RNA, 22 nt, Human
uccuugagugucuuuaccuuug

SEQ ID NO: 461314 - RNA, 19 nt, Human
ucgugagcuaaaugaguuc

SEQ ID NO: 461315 - RNA, 19 nt, Human
ucuccauucuuucuauuau

SEQ ID NO: 461316 - RNA, 24 nt, Human
ucucccaggcuggagugcaguggc

SEQ ID NO: 461317 - RNA, 24 nt, Human
ucuccugccucagccucccgagua

SEQ ID NO: 461318 - RNA, 21 nt, Human
ucucgcucugucucccaggcu

SEQ ID NO: 461319 - RNA, 22 nt, Human
ucucgcucugucucccaggcug

SEQ ID NO: 461320 - RNA, 23 nt, Human
ucucgcucugucucccaggcugg

SEQ ID NO: 461321 - RNA, 24 nt, Human
ucucgcucugucucccaggcugga

SEQ ID NO: 461322 - RNA, 25 nt, Human
ucugcagucuauuuuuccauacauc

SEQ ID NO: 461323 - RNA, 19 nt, Human
ucugucucccaggcuggag

SEQ ID NO: 461324 - RNA, 24 nt, Human
ucugucucccaggcuggagugcag

SEQ ID NO: 461325 - RNA, 22 nt, Human
ugagacagagucucgcucuguc

SEQ ID NO: 461326 - RNA, 26 nt, Human
ugagacagagucucgcucugucuccc

SEQ ID NO: 461327 - RNA, 22 nt, Human
ugauccgcccuccucagccuuc

SEQ ID NO: 461328 - RNA, 24 nt, Human
ugcccggcuaauuuuuuauuuuuu

SEQ ID NO: 461329 - RNA, 24 nt, Human
ugccucagccucccgaguagcugg

SEQ ID NO: 461330 - RNA, 19 nt, Human
ugccuuccggguucaugcc

SEQ ID NO: 461331 - RNA, 20 nt, Human
ugcuaggauuacaggcauga

SEQ ID NO: 461332 - RNA, 19 nt, Human
uggagugcaguggcgugau

SEQ ID NO: 461333 - RNA, 23 nt, Human
uggagugcaguggcgugaucucg

SEQ ID NO: 461334 - RNA, 24 nt, Human
uggagugcaguggcgugaucucgg

SEQ ID NO: 461335 - RNA, 20 nt, Human
uggcgugaucucggcucacu

SEQ ID NO: 461336 - RNA, 19 nt, Human
ugggacuacaggugcccgu

SEQ ID NO: 461337 - RNA, 22 nt, Human
ugggacuacaggugcccgucac

SEQ ID NO: 461338 - RNA, 24 nt, Human
ugggacuacaggugcccgucacca

SEQ ID NO: 461339 - RNA, 25 nt, Human
ugggacuacaggugcccgucaccau

SEQ ID NO: 461340 - RNA, 21 nt, Human
uguauuuuuaguagagacggg

SEQ ID NO: 461341 - RNA, 24 nt, Human
ugugauccgcccuccucagccuuc

SEQ ID NO: 461342 - RNA, 18 nt, Human
uuaguagagacgggguuu

SEQ ID NO: 461343 - RNA, 22 nt, Human
uuaguagagacgggguuucacc

SEQ ID NO: 461344 - RNA, 24 nt, Human
uuaguagagacgggguuucaccgu

SEQ ID NO: 461345 - RNA, 19 nt, Human
uucaugccauucuccugcc

SEQ ID NO: 461346 - RNA, 24 nt, Human
uuccggguucaugccauucuccug

SEQ ID NO: 461347 - RNA, 19 nt, Human
uuuaacaagguggagccuc

SEQ ID NO: 461348 - RNA, 19 nt, Human
uuucaccguguuagccagg

SEQ ID NO: 461349 - RNA, 20 nt, Human
uuucugcagucuauuuuucc

SEQ ID NO: 461350 - RNA, 23 nt, Human
uuuucaaucuucacucgaccacu

SEQ ID NO: 461351 - RNA, 24 nt, Human
uuuuuaguagagacgggguuucac

SEQ ID NO: 461352 - RNA, 22 nt, Human
uuuuuguauuuuuaguagagaa

SEQ ID NO: 461353 - RNA, 30 nt, Human
uuuuuuauuuuuuguauuuuuaguagagaa

SEQ ID NO: 461354 - RNA, 24 nt, Human
uuuuuuguauuuuuaguagagacg

SEQ ID NO: 461355 - RNA, 20 nt, Human
uuuuuuuucuugagacagag

SEQ ID NO: 461356 - RNA, 25 nt, Human
uuuuuuuuucuugagacagagucuc

SEQ ID NO: 461357 - RNA, 27 nt, Human
uuuuuuuuuuuuuuuuuuuucuugggg

SEQ ID NO: 461358 - RNA, 21 nt, Human
aaaaaaaaucaggcuggaaaa

SEQ ID NO: 461359 - RNA, 26 nt, Human
aaaccauuucuuaguauuccccucug

SEQ ID NO: 461360 - RNA, 18 nt, Human
aaccaagacacucugcag

SEQ ID NO: 461361 - RNA, 18 nt, Human
aacuccacaagcacuuaa

SEQ ID NO: 461362 - RNA, 24 nt, Human
acuccacaagcacuuaaaaugauc

SEQ ID NO: 461363 - RNA, 19 nt, Human
aggaaggcuggcucuggcu

SEQ ID NO: 461364 - RNA, 18 nt, Human
aucccagcucugcuguuc

SEQ ID NO: 461365 - RNA, 21 nt, Human
auucaccuuucugcaccccag

SEQ ID NO: 461366 - RNA, 21 nt, Human
caagacacucugcagagcuaa

SEQ ID NO: 461367 - RNA, 21 nt, Human
cacauuuguugggugggaaca

SEQ ID NO: 461368 - RNA, 19 nt, Human
caccuuucugcaccccagu

SEQ ID NO: 461369 - RNA, 18 nt, Human
caguauggaaaaccauuu

SEQ ID NO: 461370 - RNA, 22 nt, Human
caguauggaaaaccauuucuua

SEQ ID NO: 461371 - RNA, 24 nt, Human
caguauggaaaaccauuucuuagu

SEQ ID NO: 461372 - RNA, 22 nt, Human
ccaagacacucugcagagcuaa

SEQ ID NO: 461373 - RNA, 24 nt, Human
cugcagagcuaauccaaggagugc

SEQ ID NO: 461374 - RNA, 23 nt, Human
cuuaucacauuuguuggguggga

SEQ ID NO: 461375 - RNA, 25 nt, Human
cuuccauacuugcaaaauaugacua

SEQ ID NO: 461376 - RNA, 18 nt, Human
gagaaucucuaggguauu

SEQ ID NO: 461377 - RNA, 19 nt, Human
gagguuauucucucaacca

SEQ ID NO: 461378 - RNA, 23 nt, Human
gcuuauaacacagcacuaagaac

SEQ ID NO: 461379 - RNA, 18 nt, Human
ggaacauaucugugcccc

SEQ ID NO: 461380 - RNA, 20 nt, Human
ggccucuagucucuuuccaa

SEQ ID NO: 461381 - RNA, 19 nt, Human
gggaacauaucugugcccc

SEQ ID NO: 461382 - RNA, 21 nt, Human
gguuuaacauccaccaaugac

SEQ ID NO: 461383 - RNA, 18 nt, Human
uaacacauuuauugaaca

SEQ ID NO: 461384 - RNA, 21 nt, Human
uaauucaccuuucugcacccc

SEQ ID NO: 461385 - RNA, 24 nt, Human
uacaguggugagcaauaauaguga

SEQ ID NO: 461386 - RNA, 23 nt, Human
uagcaggcagcaguugaaaggaa

SEQ ID NO: 461387 - RNA, 20 nt, Human
uagggaugucaacuccacaa

SEQ ID NO: 461388 - RNA, 19 nt, Human
uauggguuuaacauccacc

SEQ ID NO: 461389 - RNA, 27 nt, Human
uauuaacacauuuauugaacaacuaga

SEQ ID NO: 461390 - RNA, 24 nt, Human
ucaaccaagacacucugcagagcu

SEQ ID NO: 461391 - RNA, 27 nt, Human
ucaccuuucugcaccccaguuuccuua

SEQ ID NO: 461392 - RNA, 22 nt, Human
uccacaagcacuuaaaaugauc

SEQ ID NO: 461393 - RNA, 21 nt, Human
ucccuguaauucuuuuagcuu

SEQ ID NO: 461394 - RNA, 22 nt, Human
uccuugagugucuuuaccuuug

SEQ ID NO: 461395 - RNA, 24 nt, Human
ucuacccugcagcuguccugggaa

SEQ ID NO: 461396 - RNA, 22 nt, Human
ucucaaccaagacacucugcag

SEQ ID NO: 461397 - RNA, 25 nt, Human
ucucaaccaagacacucugcagagc

SEQ ID NO: 461398 - RNA, 19 nt, Human
ucuccauucuuucuauuau

SEQ ID NO: 461399 - RNA, 24 nt, Human
ugaccaggaguggacagaccuauu

SEQ ID NO: 461400 - RNA, 20 nt, Human
ugaucucuacccugcagcug

SEQ ID NO: 461401 - RNA, 23 nt, Human
ugccucagcuuccauacuugcaa

SEQ ID NO: 461402 - RNA, 24 nt, Human
ugcuguuuagaucccagcucugcu

SEQ ID NO: 461403 - RNA, 19 nt, Human
uggccucuagucucuuucc

SEQ ID NO: 461404 - RNA, 24 nt, Human
ugggaaaaaaaaucaggcuggaaa

SEQ ID NO: 461405 - RNA, 23 nt, Human
ugggaacauaucugugccccaug

SEQ ID NO: 461406 - RNA, 21 nt, Human
uguugcccugccucagcuucc

SEQ ID NO: 461407 - RNA, 19 nt, Human
uguugugaggauuaaagga

SEQ ID NO: 461408 - RNA, 21 nt, Human
uuaauucaccuuucugcaccc

SEQ ID NO: 461409 - RNA, 19 nt, Human
uuagaucccagcucugcug

SEQ ID NO: 461410 - RNA, 23 nt, Human
uuaguuauugcuguuuagauccc

SEQ ID NO: 461411 - RNA, 22 nt, Human
uuccaagucacaugucauguug

SEQ ID NO: 461412 - RNA, 23 nt, Human
uuccccucugaaaaucacagccc

SEQ ID NO: 461413 - RNA, 23 nt, Human
uugcccugccucagcuuccauac

SEQ ID NO: 461414 - RNA, 20 nt, Human
acagaguucucaagucacca

SEQ ID NO: 461415 - RNA, 26 nt, Human
cacccucguccucaccauagugggga

SEQ ID NO: 461416 - RNA, 18 nt, Human
cagaguucucaagucacc

SEQ ID NO: 461417 - RNA, 19 nt, Human
cccaaaucaacacucucaa

SEQ ID NO: 461418 - RNA, 20 nt, Human
ccccacccucguccucacca

SEQ ID NO: 461419 - RNA, 24 nt, Human
ccucaccauaguggggagacuaaa

SEQ ID NO: 461420 - RNA, 26 nt, Human
cguccucaccauaguggggagacuaa

SEQ ID NO: 461421 - RNA, 20 nt, Human
cuagugauuauggcacuccu

SEQ ID NO: 461422 - RNA, 21 nt, Human
gaaacaguccucagaaaccag

SEQ ID NO: 461423 - RNA, 20 nt, Human
uaaaguggccagggauuugc

SEQ ID NO: 461424 - RNA, 23 nt, Human
uaaaguggccagggauuugccuu

SEQ ID NO: 461425 - RNA, 19 nt, Human
ucaaugccccacccucguc

SEQ ID NO: 461426 - RNA, 20 nt, Human
ucaaugccccacccucgucc

SEQ ID NO: 461427 - RNA, 25 nt, Human
uccucagaaaccaggcacagaguuc

SEQ ID NO: 461428 - RNA, 18 nt, Human
ucucaaugccccacccuc

SEQ ID NO: 461429 - RNA, 20 nt, Human
ugugcagugcguucugaguu

SEQ ID NO: 461430 - RNA, 24 nt, Human
aaaaagaucaaaauaggauaaaug

SEQ ID NO: 461431 - RNA, 19 nt, Human
acugaaaaggacauccagc

SEQ ID NO: 461432 - RNA, 18 nt, Human
acuugggcaguaucuuuc

SEQ ID NO: 461433 - RNA, 21 nt, Human
cugguuuuccucugcacucgg

SEQ ID NO: 461434 - RNA, 22 nt, Human
ggacauccagcucgcacaaacg

SEQ ID NO: 461435 - RNA, 22 nt, Human
gggcaguaucuuucccucuuaa

SEQ ID NO: 461436 - RNA, 19 nt, Human
uacugaaaaggacauccag

SEQ ID NO: 461437 - RNA, 21 nt, Human
uacugaaaaggacauccagcu

SEQ ID NO: 461438 - RNA, 21 nt, Human
uuccuuucagaagacuugaaa

SEQ ID NO: 461439 - RNA, 23 nt, Human
uuucugguuuuccucugcacucg

SEQ ID NO: 461440 - RNA, 28 nt, Human
uuuuuuuuuuuuuuuuuuuuuuuggggg

SEQ ID NO: 461441 - RNA, 22 nt, Human
aaaaagagaaaugaccaaagag

SEQ ID NO: 461442 - RNA, 24 nt, Human
acugcacucuggccugguugacag

SEQ ID NO: 461443 - RNA, 24 nt, Human
agauucuugguauauuuagcaucu

SEQ ID NO: 461444 - RNA, 21 nt, Human
aggcccaggaacuugaagcaa

SEQ ID NO: 461445 - RNA, 20 nt, Human
aggugggaggagcccgggag

SEQ ID NO: 461446 - RNA, 18 nt, Human
cacugcacucuggccugg

SEQ ID NO: 461447 - RNA, 23 nt, Human
cacugcacucuggccugguugac

SEQ ID NO: 461448 - RNA, 25 nt, Human
cacugcacucuggccugguugacag

SEQ ID NO: 461449 - RNA, 25 nt, Human
cacugcacucuggccugguugacag

SEQ ID NO: 461450 - RNA, 26 nt, Human
cagugagacccucgagacagaaguuc

SEQ ID NO: 461451 - RNA, 25 nt, Human
ccaaagagguuaacaaguauuuaga

SEQ ID NO: 461452 - RNA, 22 nt, Human
ccugaagucccagcuacucaag

SEQ ID NO: 461453 - RNA, 18 nt, Human
ccugauggugaggagcaa

SEQ ID NO: 461454 - RNA, 21 nt, Human
ccugcacgcugucagcaggcc

SEQ ID NO: 461455 - RNA, 21 nt, Human
cgagacagaaguucuucuuuc

SEQ ID NO: 461456 - RNA, 21 nt, Human
cugguugacagugagacccuc

SEQ ID NO: 461457 - RNA, 18 nt, Human
gaggagcaaagucaagga

SEQ ID NO: 461458 - RNA, 18 nt, Human
gaucuggcugucuuccuu

SEQ ID NO: 461459 - RNA, 23 nt, Human
ggaagaaggcaaguuugcccuga

SEQ ID NO: 461460 - RNA, 22 nt, Human
uaaaaagagaaaugaccaaaga

SEQ ID NO: 461461 - RNA, 21 nt, Human
uaaaaguuucuuuuggcacaa

SEQ ID NO: 461462 - RNA, 20 nt, Human
uauuuuacuauguugaugaa

SEQ ID NO: 461463 - RNA, 18 nt, Human
ucaaggauuacacugauu

SEQ ID NO: 461464 - RNA, 19 nt, Human
ucacugcacucuggccugg

SEQ ID NO: 461465 - RNA, 20 nt, Human
ucacugcacucuggccuggu

SEQ ID NO: 461466 - RNA, 24 nt, Human
ucacugcacucuggccugguugac

SEQ ID NO: 461467 - RNA, 26 nt, Human
ucacuggaucuggcugucuuccuuuc

SEQ ID NO: 461468 - RNA, 22 nt, Human
ucucucuuuccuuugcaguguu

SEQ ID NO: 461469 - RNA, 21 nt, Human
ugaagcugggcaguuguaguc

SEQ ID NO: 461470 - RNA, 21 nt, Human
ugaccaaagagguuaacaagu

SEQ ID NO: 461471 - RNA, 23 nt, Human
ugaccaaagagguuaacaaguau

SEQ ID NO: 461472 - RNA, 24 nt, Human
ugaucuucacugcacucuggccug

SEQ ID NO: 461473 - RNA, 21 nt, Human
ugcuguagcuguuuuaaaagu

SEQ ID NO: 461474 - RNA, 18 nt, Human
ugguauauuuagcaucuc

SEQ ID NO: 461475 - RNA, 22 nt, Human
uggugaggagcaaagucaagga

SEQ ID NO: 461476 - RNA, 21 nt, Human
uguauggauguuguugaaugu

SEQ ID NO: 461477 - RNA, 19 nt, Human
uguccuaccuaucuuugcu

SEQ ID NO: 461478 - RNA, 24 nt, Human
uguucuguuuauuuacuggagcuu

SEQ ID NO: 461479 - RNA, 18 nt, Human
uguuguugaauguugagg

SEQ ID NO: 461480 - RNA, 19 nt, Human
uuccccugugcccuguugc

SEQ ID NO: 461481 - RNA, 20 nt, Human
uuguugaauguugaggucug

SEQ ID NO: 461482 - RNA, 25 nt, Human
aaaacaaaacaaaacaaaaaguuaa

SEQ ID NO: 461483 - RNA, 19 nt, Human
aaacaaaacaaaacaaaaa

SEQ ID NO: 461484 - RNA, 22 nt, Human
aaacaaaacaaaacaaaacaaa

SEQ ID NO: 461485 - RNA, 22 nt, Human
aaacaaaacaaaacaaaacaaa

SEQ ID NO: 461486 - RNA, 22 nt, Human
aaaccagagaccaaacaauuga

SEQ ID NO: 461487 - RNA, 19 nt, Human
aaacggcaacuaggguaug

SEQ ID NO: 461488 - RNA, 26 nt, Human
aaccagagaccaaacaauugagcuuu

SEQ ID NO: 461489 - RNA, 26 nt, Human
aacgaagccaguccaguaugaccgag

SEQ ID NO: 461490 - RNA, 20 nt, Human
aagaaccaggacacaugaga

SEQ ID NO: 461491 - RNA, 21 nt, Human
aagccaguccaguaugaccga

SEQ ID NO: 461492 - RNA, 22 nt, Human
aaugaaaaggcagccauuaaaa

SEQ ID NO: 461493 - RNA, 27 nt, Human
aaugcaaaacaaaacaaaacaaaacaa

SEQ ID NO: 461494 - RNA, 22 nt, Human
aauggaucaauuguauaccaag

SEQ ID NO: 461495 - RNA, 24 nt, Human
aauggcaccuucaaaaggggcgau

SEQ ID NO: 461496 - RNA, 18 nt, Human
acaaaacaaaacaaaaag

SEQ ID NO: 461497 - RNA, 27 nt, Human
acaaaacaaaacaaaacaaaacaaaaa

SEQ ID NO: 461498 - RNA, 24 nt, Human
acaugacauuuuaucuacaacucc

SEQ ID NO: 461499 - RNA, 24 nt, Human
acccauuuguuuugccuggaaaga

SEQ ID NO: 461500 - RNA, 22 nt, Human
acguacucaagauucauguuaa

SEQ ID NO: 461501 - RNA, 23 nt, Human
acuaaaugcagaaguuucucaag

SEQ ID NO: 461502 - RNA, 22 nt, Human
agguagaagauaacugaaaaga

SEQ ID NO: 461503 - RNA, 21 nt, Human
augcaaaacaaaacaaaacaa

SEQ ID NO: 461504 - RNA, 20 nt, Human
caaaacaaaacaaaaaguua

SEQ ID NO: 461505 - RNA, 24 nt, Human
caaaacaaaacaaaacaaaaaguu

SEQ ID NO: 461506 - RNA, 21 nt, Human
caaaacaaaacaaaacaaaac

SEQ ID NO: 461507 - RNA, 24 nt, Human
caaaacaaaacaaaacaaaacaaa

SEQ ID NO: 461508 - RNA, 24 nt, Human
caaaacaaaacaaaacaaaacaaa

SEQ ID NO: 461509 - RNA, 31 nt, Human
caacaaucaguuauaauguucuuuuuaaggg

SEQ ID NO: 461510 - RNA, 25 nt, Human
caacuccuguuugcuuuacugaggg

SEQ ID NO: 461511 - RNA, 23 nt, Human
caagcaaugguccacguacucaa

SEQ ID NO: 461512 - RNA, 20 nt, Human
cacaaagucuucccauaaaa

SEQ ID NO: 461513 - RNA, 21 nt, Human
cagaucacuacguagaaaucu

SEQ ID NO: 461514 - RNA, 20 nt, Human
caggagguagaagauaacug

SEQ ID NO: 461515 - RNA, 18 nt, Human
cagggcuccgggcaugcc

SEQ ID NO: 461516 - RNA, 23 nt, Human
caguuaaaauaaaauuugccaug

SEQ ID NO: 461517 - RNA, 24 nt, Human
cauugcacuucauuuguuauagca

SEQ ID NO: 461518 - RNA, 19 nt, Human
ccaaaucauauccuuaaaa

SEQ ID NO: 461519 - RNA, 20 nt, Human
cccaaugacuacauacauag

SEQ ID NO: 461520 - RNA, 21 nt, Human
ccucugccacauuaugauuuc

SEQ ID NO: 461521 - RNA, 24 nt, Human
cggcaacugcggcggugucuccuc

SEQ ID NO: 461522 - RNA, 23 nt, Human
cucaaaaugaacuuuuaaaugac

SEQ ID NO: 461523 - RNA, 24 nt, Human
cucaacuuucuucuucccaccacc

SEQ ID NO: 461524 - RNA, 22 nt, Human
cucuaaggaugaaaaccagaga

SEQ ID NO: 461525 - RNA, 20 nt, Human
cugaaaagacuaaugcaaca

SEQ ID NO: 461526 - RNA, 21 nt, Human
cuucuucccaccaccucugcc

SEQ ID NO: 461527 - RNA, 24 nt, Human
cuuuuccaguuuaauuugcaaaca

SEQ ID NO: 461528 - RNA, 18 nt, Human
gaagauguaagaaccagg

SEQ ID NO: 461529 - RNA, 24 nt, Human
gaccuuuaacauuuucaacaauuu

SEQ ID NO: 461530 - RNA, 22 nt, Human
gaggaaagagccagaaaucccc

SEQ ID NO: 461531 - RNA, 19 nt, Human
gauguaagaaccaggacac

SEQ ID NO: 461532 - RNA, 21 nt, Human
ggauaucuggaguuaaaaaug

SEQ ID NO: 461533 - RNA, 26 nt, Human
uaaaauaaauggaucaauuguauacc

SEQ ID NO: 461534 - RNA, 25 nt, Human
uaaauggaucaauuguauaccaaga

SEQ ID NO: 461535 - RNA, 23 nt, Human
uaaggcgaagaggaaagagccag

SEQ ID NO: 461536 - RNA, 22 nt, Human
uacaggagguagaagauaacug

SEQ ID NO: 461537 - RNA, 21 nt, Human
uacaguagaaaauacaggagg

SEQ ID NO: 461538 - RNA, 19 nt, Human
uaccaagaaguauuuggcu

SEQ ID NO: 461539 - RNA, 21 nt, Human
uagcagcaagaaaagaugaaa

SEQ ID NO: 461540 - RNA, 18 nt, Human
uaggaagauguaagaacc

SEQ ID NO: 461541 - RNA, 20 nt, Human
uaggauaucuggaguuaaaa

SEQ ID NO: 461542 - RNA, 24 nt, Human
uauaccaagaaguauuuggcucau

SEQ ID NO: 461543 - RNA, 21 nt, Human
uauagcaaauacucuaagcca

SEQ ID NO: 461544 - RNA, 23 nt, Human
uaucaaaguuacucauuuuaaca

SEQ ID NO: 461545 - RNA, 23 nt, Human
uaucuggaguuaaaaaugcaaaa

SEQ ID NO: 461546 - RNA, 25 nt, Human
ucaguuauaauguucuuuuuaaggg

SEQ ID NO: 461547 - RNA, 21 nt, Human
ucauugaugagcagggcuccg

SEQ ID NO: 461548 - RNA, 20 nt, Human
uccacucagucucugguggc

SEQ ID NO: 461549 - RNA, 21 nt, Human
ucccaauuagaacaugcugac

SEQ ID NO: 461550 - RNA, 20 nt, Human
ucuauagcuccuguagcuac

SEQ ID NO: 461551 - RNA, 18 nt, Human
ugaaaagaauacccauuu

SEQ ID NO: 461552 - RNA, 22 nt, Human
ugaaaaggcagccauuaaaaua

SEQ ID NO: 461553 - RNA, 21 nt, Human
ugaaagcccuuauaucaugcu

SEQ ID NO: 461554 - RNA, 21 nt, Human
ugaauacauuuugccugugca

SEQ ID NO: 461555 - RNA, 24 nt, Human
ugacuacauacauagauggguagc

SEQ ID NO: 461556 - RNA, 23 nt, Human
ugagacucuggauacuuuuccag

SEQ ID NO: 461557 - RNA, 25 nt, Human
ugcaaaacaaaacaaaacaaaacaa

SEQ ID NO: 461558 - RNA, 26 nt, Human
ugcaagcaaugguccacguacucaag

SEQ ID NO: 461559 - RNA, 22 nt, Human
ugccauauuaucucacaaauca

SEQ ID NO: 461560 - RNA, 18 nt, Human
ugccuuuugagacucugg

SEQ ID NO: 461561 - RNA, 23 nt, Human
uggauacuuuuccaguuuaauuu

SEQ ID NO: 461562 - RNA, 18 nt, Human
uggcucauaagaauggca

SEQ ID NO: 461563 - RNA, 22 nt, Human
ugucauugcacuucauuuguua

SEQ ID NO: 461564 - RNA, 25 nt, Human
ugucauugcacuucauuuguuauag

SEQ ID NO: 461565 - RNA, 18 nt, Human
uguggcuacauuuucccc

SEQ ID NO: 461566 - RNA, 22 nt, Human
uuaacacaaagucuucccauaa

SEQ ID NO: 461567 - RNA, 19 nt, Human
uucaccccauucacaacaa

SEQ ID NO: 461568 - RNA, 26 nt, Human
uucacuuuuaacacaaagucuuccca

SEQ ID NO: 461569 - RNA, 20 nt, Human
uucccaccaccucugccaca

SEQ ID NO: 461570 - RNA, 24 nt, Human
uuucaagucuguucuccauggcuu

SEQ ID NO: 461571 - RNA, 25 nt, Human
uuugcaaacagaauuuuuauaacaa

SEQ ID NO: 461572 - RNA, 23 nt, Human
aaaaacaaaaccauuucucccuc

SEQ ID NO: 461573 - RNA, 22 nt, Human
aaacaaaacaaaaacaaaacca

SEQ ID NO: 461574 - RNA, 21 nt, Human
aaaguggccuguaauagacac

SEQ ID NO: 461575 - RNA, 23 nt, Human
acaaaaacaaaaccauuucuccc

SEQ ID NO: 461576 - RNA, 20 nt, Human
acaaaacaaaaacaaaacca

SEQ ID NO: 461577 - RNA, 19 nt, Human
acagacacauugacauaga

SEQ ID NO: 461578 - RNA, 24 nt, Human
acaguaccugaaaaauacagcuaa

SEQ ID NO: 461579 - RNA, 24 nt, Human
aggcugggggcugcggcgauucgu

SEQ ID NO: 461580 - RNA, 25 nt, Human
auagacaccaguggggcggucacca

SEQ ID NO: 461581 - RNA, 22 nt, Human
aucacauacaugagcagauaca

SEQ ID NO: 461582 - RNA, 18 nt, Human
auccuauuuuuuuuuucc

SEQ ID NO: 461583 - RNA, 21 nt, Human
auccuauuuuuuuuuuccuuu

SEQ ID NO: 461584 - RNA, 24 nt, Human
auggaggagugaaggacagacacc

SEQ ID NO: 461585 - RNA, 25 nt, Human
caaaaacaaaaccauuucucccucu

SEQ ID NO: 461586 - RNA, 27 nt, Human
caaaacaaaaacaaaaccauuucuccc

SEQ ID NO: 461587 - RNA, 22 nt, Human
caauggaggagugaaggacaga

SEQ ID NO: 461588 - RNA, 27 nt, Human
cacacaguaccugaaaaauacagcuaa

SEQ ID NO: 461589 - RNA, 18 nt, Human
caccaguggggcggucac

SEQ ID NO: 461590 - RNA, 21 nt, Human
cagauacacaacuaccaaagu

SEQ ID NO: 461591 - RNA, 22 nt, Human
cagaucuacuugacuccuuguu

SEQ ID NO: 461592 - RNA, 23 nt, Human
cagcagcagcagcagcagcagug

SEQ ID NO: 461593 - RNA, 23 nt, Human
cagcagcagcggcagcagcagca

SEQ ID NO: 461594 - RNA, 27 nt, Human
cagcagcaguggcggcagacaauggag

SEQ ID NO: 461595 - RNA, 24 nt, Human
cagcggcagcagcagcagcagcag

SEQ ID NO: 461596 - RNA, 22 nt, Human
caguaccugaaaaauacagcua

SEQ ID NO: 461597 - RNA, 24 nt, Human
ccauuuaaaaacaaaacaaaaaca

SEQ ID NO: 461598 - RNA, 25 nt, Human
ccugaaaaauacagcuaaaaaagga

SEQ ID NO: 461599 - RNA, 23 nt, Human
ccuguaauagacaccaguggggc

SEQ ID NO: 461600 - RNA, 21 nt, Human
cgaaaacagaagccaaguuuc

SEQ ID NO: 461601 - RNA, 23 nt, Human
cggcagcagcagcagcagcagca

SEQ ID NO: 461602 - RNA, 20 nt, Human
gaaaacagaagccaaguuuc

SEQ ID NO: 461603 - RNA, 19 nt, Human
gacaauggaggagugaagg

SEQ ID NO: 461604 - RNA, 19 nt, Human
gacaauggaggagugaagg

SEQ ID NO: 461605 - RNA, 18 nt, Human
gauacacaacuaccaaag

SEQ ID NO: 461606 - RNA, 21 nt, Human
gcagcagcaguggcggcagac

SEQ ID NO: 461607 - RNA, 24 nt, Human
uaaaaacaaaacaaaaacaaaacc

SEQ ID NO: 461608 - RNA, 25 nt, Human
uaaaaacaaaacaaaaacaaaacca

SEQ ID NO: 461609 - RNA, 23 nt, Human
uacacaacuaccaaaguggccug

SEQ ID NO: 461610 - RNA, 19 nt, Human
uccauuuaaaaacaaaaca

SEQ ID NO: 461611 - RNA, 21 nt, Human
uccuuugcgaaaacagaagcu

SEQ ID NO: 461612 - RNA, 25 nt, Human
ugaaggacagacacauugacauaga

SEQ ID NO: 461613 - RNA, 21 nt, Human
ugagcagauacacaacuacca

SEQ ID NO: 461614 - RNA, 23 nt, Human
ugagcagauacacaacuaccaaa

SEQ ID NO: 461615 - RNA, 25 nt, Human
uggccuguaauagacaccagugggg

SEQ ID NO: 461616 - RNA, 18 nt, Human
uggcggcagacaauggag

SEQ ID NO: 461617 - RNA, 18 nt, Human
uuucucccucugcacaag

SEQ ID NO: 461618 - RNA, 25 nt, Human
uuucucccucugcacaagggaagcc

SEQ ID NO: 461619 - RNA, 27 nt, Human
aaaaacaacaaaaaaaagccaggugug

SEQ ID NO: 461620 - RNA, 21 nt, Human
aaaaagccaggugugguggcg

SEQ ID NO: 461621 - RNA, 20 nt, Human
aaaagaaaaagaaaaugugg

SEQ ID NO: 461622 - RNA, 23 nt, Human
aaaagaaaaagaaaauguggagg

SEQ ID NO: 461623 - RNA, 21 nt, Human
aaacaacaaaaaaaagccagg

SEQ ID NO: 461624 - RNA, 21 nt, Human
aagaaaaagaaaauguggagg

SEQ ID NO: 461625 - RNA, 24 nt, Human
aagagagcuggggcaggccaccag

SEQ ID NO: 461626 - RNA, 24 nt, Human
aagaucacuugagcccaggaguuc

SEQ ID NO: 461627 - RNA, 18 nt, Human
aaggcuccuggauugaaa

SEQ ID NO: 461628 - RNA, 19 nt, Human
aaggugaggccuuugaaaa

SEQ ID NO: 461629 - RNA, 20 nt, Human
acaccacugcacuccagucu

SEQ ID NO: 461630 - RNA, 24 nt, Human
acacucuguccccaaacccucccg

SEQ ID NO: 461631 - RNA, 20 nt, Human
acagagcaagacccugucuc

SEQ ID NO: 461632 - RNA, 24 nt, Human
acagagcaagacccugucucaaaa

SEQ ID NO: 461633 - RNA, 19 nt, Human
accacugcacuccagucug

SEQ ID NO: 461634 - RNA, 18 nt, Human
acccugucucuaaaaaca

SEQ ID NO: 461635 - RNA, 20 nt, Human
accucccaaagagggacuga

SEQ ID NO: 461636 - RNA, 19 nt, Human
accuggguggaugugcugu

SEQ ID NO: 461637 - RNA, 23 nt, Human
accuguggucccagcuguucagg

SEQ ID NO: 461638 - RNA, 22 nt, Human
acucuguccccaaacccucccg

SEQ ID NO: 461639 - RNA, 24 nt, Human
acugcacuccagucugggugacag

SEQ ID NO: 461640 - RNA, 26 nt, Human
acugcacuccagucugggugacagag

SEQ ID NO: 461641 - RNA, 21 nt, Human
agaaaaagaaaauguggaggg

SEQ ID NO: 461642 - RNA, 18 nt, Human
agagcccugccuccugcu

SEQ ID NO: 461643 - RNA, 24 nt, Human
agaggacagaggaaggacacucug

SEQ ID NO: 461644 - RNA, 23 nt, Human
agccaggugugguggcgugcacc

SEQ ID NO: 461645 - RNA, 22 nt, Human
agccugagcaauauagugagac

SEQ ID NO: 461646 - RNA, 24 nt, Human
agccugagcaauauagugagaccc

SEQ ID NO: 461647 - RNA, 24 nt, Human
agcguuuugggaggcccacguggg

SEQ ID NO: 461648 - RNA, 23 nt, Human
aggaguucaagaccagccugagc

SEQ ID NO: 461649 - RNA, 23 nt, Human
aggcaggaggauugcuugaaccc

SEQ ID NO: 461650 - RNA, 24 nt, Human
aggcaggaggauugcuugaaccca

SEQ ID NO: 461651 - RNA, 19 nt, Human
aggccuuugaaaaacaaug

SEQ ID NO: 461652 - RNA, 21 nt, Human
aggcgcgguggcucacacuug

SEQ ID NO: 461653 - RNA, 24 nt, Human
aggcgcgguggcucacacuuguag

SEQ ID NO: 461654 - RNA, 21 nt, Human
aggcugaggcaggaggauugc

SEQ ID NO: 461655 - RNA, 24 nt, Human
aggcugaggcaggaggauugcuug

SEQ ID NO: 461656 - RNA, 24 nt, Human
aucacaccacugcacuccagucug

SEQ ID NO: 461657 - RNA, 24 nt, Human
aucacuugagcccaggaguucaag

SEQ ID NO: 461658 - RNA, 19 nt, Human
auugcuugaacccaggagg

SEQ ID NO: 461659 - RNA, 22 nt, Human
caaaaaaaagccagguguggug

SEQ ID NO: 461660 - RNA, 21 nt, Human
caagacccugucucaaaaaag

SEQ ID NO: 461661 - RNA, 22 nt, Human
caauauagugagacccugucuc

SEQ ID NO: 461662 - RNA, 21 nt, Human
cacaccacugcacuccagucu

SEQ ID NO: 461663 - RNA, 24 nt, Human
caccuguggucccagcuguucagg

SEQ ID NO: 461664 - RNA, 22 nt, Human
cacuccagucugggugacagag

SEQ ID NO: 461665 - RNA, 23 nt, Human
cacuccagucugggugacagagc

SEQ ID NO: 461666 - RNA, 19 nt, Human
cacugcacuccagucuggg

SEQ ID NO: 461667 - RNA, 21 nt, Human
cacugcacuccagucugggug

SEQ ID NO: 461668 - RNA, 22 nt, Human
cacugcacuccagucuggguga

SEQ ID NO: 461669 - RNA, 23 nt, Human
cacugcacuccagucugggugac

SEQ ID NO: 461670 - RNA, 24 nt, Human
cacugcacuccagucugggugaca

SEQ ID NO: 461671 - RNA, 25 nt, Human
cacugcacuccagucugggugacag

SEQ ID NO: 461672 - RNA, 18 nt, Human
cagaagagagcuggggca

SEQ ID NO: 461673 - RNA, 22 nt, Human
cagcguuuugggaggcccacgu

SEQ ID NO: 461674 - RNA, 24 nt, Human
cagcguuuugggaggcccacgugg

SEQ ID NO: 461675 - RNA, 24 nt, Human
cagcuguucaggaggcugaggcag

SEQ ID NO: 461676 - RNA, 20 nt, Human
ccacugcacuccagucuggg

SEQ ID NO: 461677 - RNA, 20 nt, Human
ccacugcacuccagucuggg

SEQ ID NO: 461678 - RNA, 20 nt, Human
ccacugcacuccagucuggg

SEQ ID NO: 461679 - RNA, 21 nt, Human
ccacugcacuccagucugggu

SEQ ID NO: 461680 - RNA, 21 nt, Human
ccacugcacuccagucugggu

SEQ ID NO: 461681 - RNA, 23 nt, Human
ccacugcacuccagucuggguga

SEQ ID NO: 461682 - RNA, 24 nt, Human
ccacugcacuccagucugggugac

SEQ ID NO: 461683 - RNA, 21 nt, Human
ccagagccgccucugcacucu

SEQ ID NO: 461684 - RNA, 22 nt, Human
ccaggagguugagggugcagug

SEQ ID NO: 461685 - RNA, 23 nt, Human
ccaggcccagggcuggcgaugug

SEQ ID NO: 461686 - RNA, 18 nt, Human
cccagacuggccuggagg

SEQ ID NO: 461687 - RNA, 18 nt, Human
cccguccagggugugagg

SEQ ID NO: 461688 - RNA, 21 nt, Human
ccuccaggccccagccccacc

SEQ ID NO: 461689 - RNA, 20 nt, Human
ccuggcugcagccgcuaucc

SEQ ID NO: 461690 - RNA, 23 nt, Human
ccugucucaaaaaagaaaaagaa

SEQ ID NO: 461691 - RNA, 23 nt, Human
ccugucucaaaaaagaaaaagaa

SEQ ID NO: 461692 - RNA, 25 nt, Human
cuaagacagacaguugaaggugagg

SEQ ID NO: 461693 - RNA, 23 nt, Human
cucacacuuguaguuccagcguu

SEQ ID NO: 461694 - RNA, 22 nt, Human
cucugcucgcuuccugcucaga

SEQ ID NO: 461695 - RNA, 21 nt, Human
cugggccuccaggccccagcc

SEQ ID NO: 461696 - RNA, 19 nt, Human
cugggugacagagcaagac

SEQ ID NO: 461697 - RNA, 23 nt, Human
cuuccugcucagaaagccagaag

SEQ ID NO: 461698 - RNA, 20 nt, Human
gaaaaagaaaauguggaggg

SEQ ID NO: 461699 - RNA, 19 nt, Human
gaaggaacuuagguagaga

SEQ ID NO: 461700 - RNA, 19 nt, Human
gaagugaaagcauagggag

SEQ ID NO: 461701 - RNA, 19 nt, Human
gacccugucucuaaaaaca

SEQ ID NO: 461702 - RNA, 24 nt, Human
gaggccuuugaaaaacaaugggaa

SEQ ID NO: 461703 - RNA, 24 nt, Human
gaucacuugagcccaggaguucaa

SEQ ID NO: 461704 - RNA, 24 nt, Human
gcacuccagucugggugacagagc

SEQ ID NO: 461705 - RNA, 22 nt, Human
gcaggaggauugcuugaaccca

SEQ ID NO: 461706 - RNA, 24 nt, Human
gccagguacagcauuggggacauc

SEQ ID NO: 461707 - RNA, 22 nt, Human
gcccaggaguucaagaccagcc

SEQ ID NO: 461708 - RNA, 24 nt, Human
gccccagagcccugccuccugcuc

SEQ ID NO: 461709 - RNA, 23 nt, Human
gcuaugaucacaccacugcacuu

SEQ ID NO: 461710 - RNA, 20 nt, Human
ggcccuagaacuuggaggug

SEQ ID NO: 461711 - RNA, 23 nt, Human
ggccggcccgcacaccguccuuc

SEQ ID NO: 461712 - RNA, 22 nt, Human
gguggcucacacuuguaguucc

SEQ ID NO: 461713 - RNA, 24 nt, Human
gguggcucacacuuguaguuccag

SEQ ID NO: 461714 - RNA, 19 nt, Human
gugcaccuguggucccagc

SEQ ID NO: 461715 - RNA, 21 nt, Human
guggagggcuugggccaggcg

SEQ ID NO: 461716 - RNA, 23 nt, Human
uaaaaacaacaaaaaaaagccag

SEQ ID NO: 461717 - RNA, 20 nt, Human
uagaacuuggaggugucagg

SEQ ID NO: 461718 - RNA, 24 nt, Human
uauagugagacccugucucuaaaa

SEQ ID NO: 461719 - RNA, 23 nt, Human
ucacaccacugcacuccagucug

SEQ ID NO: 461720 - RNA, 25 nt, Human
ucagccagguacagcauuggggaca

SEQ ID NO: 461721 - RNA, 18 nt, Human
uccagggugugagggcuc

SEQ ID NO: 461722 - RNA, 19 nt, Human
uccagggugugagggcucg

SEQ ID NO: 461723 - RNA, 23 nt, Human
uccagggugugagggcucgggac

SEQ ID NO: 461724 - RNA, 24 nt, Human
uccagucugggugacagagcaaga

SEQ ID NO: 461725 - RNA, 19 nt, Human
ucccguguccugacggccc

SEQ ID NO: 461726 - RNA, 20 nt, Human
uccugcucagaaagccagaa

SEQ ID NO: 461727 - RNA, 19 nt, Human
ucuaagacagacaguugaa

SEQ ID NO: 461728 - RNA, 26 nt, Human
ucuacgacaaggacagccauucuggc

SEQ ID NO: 461729 - RNA, 23 nt, Human
ucugggccuccaggccccagccc

SEQ ID NO: 461730 - RNA, 24 nt, Human
ugaaagcauagggaggccauagcc

SEQ ID NO: 461731 - RNA, 22 nt, Human
ugacagagcaagacccugucuc

SEQ ID NO: 461732 - RNA, 24 nt, Human
ugagcaauauagugagacccuguc

SEQ ID NO: 461733 - RNA, 23 nt, Human
ugagcccaggaguucaagaccag

SEQ ID NO: 461734 - RNA, 24 nt, Human
ugaggcaggaggauugcuugaacc

SEQ ID NO: 461735 - RNA, 25 nt, Human
ugaggcaggaggauugcuugaaccc

SEQ ID NO: 461736 - RNA, 23 nt, Human
ugagggugcagugagcuaugauc

SEQ ID NO: 461737 - RNA, 19 nt, Human
ugcccagacuggccuggag

SEQ ID NO: 461738 - RNA, 23 nt, Human
ugcccagacuggccuggaggggc

SEQ ID NO: 461739 - RNA, 23 nt, Human
ugccuccugcucuggaaugcagc

SEQ ID NO: 461740 - RNA, 24 nt, Human
uggcgugcaccuguggucccagcu

SEQ ID NO: 461741 - RNA, 20 nt, Human
uggcucacacuuguaguucc

SEQ ID NO: 461742 - RNA, 22 nt, Human
uggcucacacuuguaguuccag

SEQ ID NO: 461743 - RNA, 23 nt, Human
uggcucacacuuguaguuccagc

SEQ ID NO: 461744 - RNA, 18 nt, Human
ugggaaggaacuuaggua

SEQ ID NO: 461745 - RNA, 19 nt, Human
ugggccuccaggccccagc

SEQ ID NO: 461746 - RNA, 22 nt, Human
ugggccuccaggccccagcccc

SEQ ID NO: 461747 - RNA, 19 nt, Human
uggggacauccccaggccc

SEQ ID NO: 461748 - RNA, 25 nt, Human
uggggacauccccaggcccagggcu

SEQ ID NO: 461749 - RNA, 24 nt, Human
ugguggcgugcaccugugguccca

SEQ ID NO: 461750 - RNA, 19 nt, Human
ugucaggacacaacacaga

SEQ ID NO: 461751 - RNA, 25 nt, Human
ugucucuaaaaacaacaaaaaaaag

SEQ ID NO: 461752 - RNA, 23 nt, Human
ugugguggcgugcaccugugguc

SEQ ID NO: 461753 - RNA, 22 nt, Human
uugagcccaggaguucaagacc

SEQ ID NO: 461754 - RNA, 24 nt, Human
uugcuugaacccaggagguugagg

SEQ ID NO: 461755 - RNA, 24 nt, Human
uugggccaggcgcgguggcucaca

SEQ ID NO: 461756 - RNA, 18 nt, Human
uuuuuuuuuuuuuuuucg

SEQ ID NO: 461757 - RNA, 19 nt, Human
uuuuuuuuuuuuuuuuucg

SEQ ID NO: 461758 - RNA, 18 nt, Human
agcaggugggacacuucc

SEQ ID NO: 461759 - RNA, 19 nt, Human
cagcaacaguaaaaaaaag

SEQ ID NO: 461760 - RNA, 19 nt, Human
cagugaagccaucugguug

SEQ ID NO: 461761 - RNA, 18 nt, Human
cgccguccgccaccggaa

SEQ ID NO: 461762 - RNA, 25 nt, Human
gcaacaguaaaaaaaaguaauuuac

SEQ ID NO: 461763 - RNA, 24 nt, Human
gccaccggaagaacacgucgacag

SEQ ID NO: 461764 - RNA, 20 nt, Human
uccgccaccggaagaacacg

SEQ ID NO: 461765 - RNA, 23 nt, Human
uucagugaagccaucugguuguu

SEQ ID NO: 461766 - RNA, 24 nt, Human
uuucagugaagccaucugguuguu

SEQ ID NO: 461767 - RNA, 21 nt, Human
aagcccagcagcuucuguaaa

SEQ ID NO: 461768 - RNA, 19 nt, Human
aaggaaggagaggauggca

SEQ ID NO: 461769 - RNA, 23 nt, Human
aaggucccggaagaacuccgcaa

SEQ ID NO: 461770 - RNA, 22 nt, Human
acacugaggaugacuacccagu

SEQ ID NO: 461771 - RNA, 18 nt, Human
accacuuucuucuuguca

SEQ ID NO: 461772 - RNA, 19 nt, Human
accaugccgcugcagaaug

SEQ ID NO: 461773 - RNA, 21 nt, Human
acugauuuugucuugcuucug

SEQ ID NO: 461774 - RNA, 20 nt, Human
agaaggaaggagaggauggc

SEQ ID NO: 461775 - RNA, 22 nt, Human
agacaggaaggccaagagggac

SEQ ID NO: 461776 - RNA, 21 nt, Human
agaggacagugaugcacacac

SEQ ID NO: 461777 - RNA, 23 nt, Human
agcaggcagggcaggccugggug

SEQ ID NO: 461778 - RNA, 22 nt, Human
agcauguaguagcagaccucuu

SEQ ID NO: 461779 - RNA, 21 nt, Human
agccagcaggcagugauggga

SEQ ID NO: 461780 - RNA, 22 nt, Human
agccccaggccccucccugggc

SEQ ID NO: 461781 - RNA, 18 nt, Human
aggaaguagccagcaggc

SEQ ID NO: 461782 - RNA, 23 nt, Human
aggagaaagaggaagauggccgg

SEQ ID NO: 461783 - RNA, 18 nt, Human
aggagaggauggcagcag

SEQ ID NO: 461784 - RNA, 24 nt, Human
aggcaacacgagcaggaccgagcc

SEQ ID NO: 461785 - RNA, 19 nt, Human
aggcaccagaucugggggg

SEQ ID NO: 461786 - RNA, 18 nt, Human
aggcagagaaggggcggc

SEQ ID NO: 461787 - RNA, 19 nt, Human
aggcaggcagggcagguag

SEQ ID NO: 461788 - RNA, 22 nt, Human
aggcaggcagggcagguagggu

SEQ ID NO: 461789 - RNA, 19 nt, Human
aggcagggcaggccugggu

SEQ ID NO: 461790 - RNA, 18 nt, Human
aggcgcgaugggaacaga

SEQ ID NO: 461791 - RNA, 18 nt, Human
aggcguggugggggugac

SEQ ID NO: 461792 - RNA, 23 nt, Human
aggcugcagguggagccagaaug

SEQ ID NO: 461793 - RNA, 24 nt, Human
agggagcaggccucgugcggguua

SEQ ID NO: 461794 - RNA, 22 nt, Human
agggaggaaggccugcucccag

SEQ ID NO: 461795 - RNA, 19 nt, Human
agguggguaggagccaggu

SEQ ID NO: 461796 - RNA, 19 nt, Human
agguggguaggagccaggu

SEQ ID NO: 461797 - RNA, 21 nt, Human
aggugguaugcaggagaaaga

SEQ ID NO: 461798 - RNA, 21 nt, Human
aggugguaugcaggagaaaga

SEQ ID NO: 461799 - RNA, 24 nt, Human
aguacugagugagccagacgaugc

SEQ ID NO: 461800 - RNA, 25 nt, Human
agucagcgccucgguagguccucga

SEQ ID NO: 461801 - RNA, 20 nt, Human
agugcaugagggucuguggg

SEQ ID NO: 461802 - RNA, 21 nt, Human
aguuggcagaggccgcaggcg

SEQ ID NO: 461803 - RNA, 19 nt, Human
aucagguacaugggccacc

SEQ ID NO: 461804 - RNA, 23 nt, Human
augcacaugcauacgcgccaaca

SEQ ID NO: 461805 - RNA, 25 nt, Human
augcacaugcauacgcgccaacacu

SEQ ID NO: 461806 - RNA, 21 nt, Human
augccggccuggaccacagau

SEQ ID NO: 461807 - RNA, 22 nt, Human
caaaggccccaucaugcucccc

SEQ ID NO: 461808 - RNA, 22 nt, Human
caaggcccaccauaccccacuc

SEQ ID NO: 461809 - RNA, 27 nt, Human
cacacucaugcacaugcauacgcgcca

SEQ ID NO: 461810 - RNA, 27 nt, Human
cacacucaugcacaugcauacgcggug

SEQ ID NO: 461811 - RNA, 21 nt, Human
caccacgaucccgggcauggc

SEQ ID NO: 461812 - RNA, 24 nt, Human
caccacggacaggaucacaaacca

SEQ ID NO: 461813 - RNA, 20 nt, Human
caccacuuucuucuugucau

SEQ ID NO: 461814 - RNA, 19 nt, Human
caccugcuccugccugggc

SEQ ID NO: 461815 - RNA, 23 nt, Human
cacuccacacccuuccccaucuu

SEQ ID NO: 461816 - RNA, 19 nt, Human
cacugcaggccaccucggc

SEQ ID NO: 461817 - RNA, 25 nt, Human
cacugcccacagaccagcgccgccg

SEQ ID NO: 461818 - RNA, 21 nt, Human
cagaggacggcuacugaacac

SEQ ID NO: 461819 - RNA, 19 nt, Human
cagccaccuuggcucuggg

SEQ ID NO: 461820 - RNA, 20 nt, Human
cagccauccaggccaguccc

SEQ ID NO: 461821 - RNA, 19 nt, Human
caggacccacccuggcaga

SEQ ID NO: 461822 - RNA, 19 nt, Human
caggcagugaugggaggca

SEQ ID NO: 461823 - RNA, 21 nt, Human
cagggcagguagggugggcag

SEQ ID NO: 461824 - RNA, 20 nt, Human
cagggcauccuugggggaca

SEQ ID NO: 461825 - RNA, 22 nt, Human
cagggggccggccagcaggcac

SEQ ID NO: 461826 - RNA, 22 nt, Human
cagggugggcaggggcucccag

SEQ ID NO: 461827 - RNA, 23 nt, Human
cagggugggcaggggcucccagg

SEQ ID NO: 461828 - RNA, 18 nt, Human
cagguagccgcggccgug

SEQ ID NO: 461829 - RNA, 22 nt, Human
caguggacagaggucuccagcc

SEQ ID NO: 461830 - RNA, 20 nt, Human
cagugugguaugggguggag

SEQ ID NO: 461831 - RNA, 20 nt, Human
cauacgcgccaacacuagca

SEQ ID NO: 461832 - RNA, 23 nt, Human
cauccugagccaagcccagcagc

SEQ ID NO: 461833 - RNA, 21 nt, Human
caugcacacccucccaccccg

SEQ ID NO: 461834 - RNA, 18 nt, Human
caugcacaugcauacgcg

SEQ ID NO: 461835 - RNA, 18 nt, Human
cauggagggcagucaggc

SEQ ID NO: 461836 - RNA, 21 nt, Human
cauggccuguccuggagcagg

SEQ ID NO: 461837 - RNA, 24 nt, Human
cauuagaggucccaggacccaccc

SEQ ID NO: 461838 - RNA, 19 nt, Human
ccaaacccagcaggggagg

SEQ ID NO: 461839 - RNA, 22 nt, Human
ccaagccugccccagccccaag

SEQ ID NO: 461840 - RNA, 19 nt, Human
ccaaggcccaccauacccc

SEQ ID NO: 461841 - RNA, 25 nt, Human
ccacacccuuccccaucuuucccca

SEQ ID NO: 461842 - RNA, 21 nt, Human
ccacccguaggcagccagggc

SEQ ID NO: 461843 - RNA, 21 nt, Human
ccacccuccucuggccccucc

SEQ ID NO: 461844 - RNA, 18 nt, Human
ccagaacacauccugagc

SEQ ID NO: 461845 - RNA, 21 nt, Human
ccagaacacauccugagccaa

SEQ ID NO: 461846 - RNA, 20 nt, Human
ccagcaggcaccagaucugg

SEQ ID NO: 461847 - RNA, 23 nt, Human
ccagcaggcagggcaggccuggg

SEQ ID NO: 461848 - RNA, 18 nt, Human
ccagcucccucugucagg

SEQ ID NO: 461849 - RNA, 24 nt, Human
ccaggugguaugcaggagaaagag

SEQ ID NO: 461850 - RNA, 19 nt, Human
ccagugugguauggggugg

SEQ ID NO: 461851 - RNA, 23 nt, Human
ccauccaggccagucccagcugu

SEQ ID NO: 461852 - RNA, 19 nt, Human
cccaccacccuuugggugg

SEQ ID NO: 461853 - RNA, 21 nt, Human
cccacuccacacccuucccca

SEQ ID NO: 461854 - RNA, 22 nt, Human
cccaggccccugggaggacagg

SEQ ID NO: 461855 - RNA, 19 nt, Human
cccagguagccgcggccgu

SEQ ID NO: 461856 - RNA, 19 nt, Human
cccauggccuguccuggag

SEQ ID NO: 461857 - RNA, 22 nt, Human
ccccacuccacacccuucccca

SEQ ID NO: 461858 - RNA, 21 nt, Human
ccccagccccaagccugaaac

SEQ ID NO: 461859 - RNA, 21 nt, Human
cccccuggcggggaguaggca

SEQ ID NO: 461860 - RNA, 18 nt, Human
ccccggauacugaucacc

SEQ ID NO: 461861 - RNA, 19 nt, Human
ccccggauacugaucacca

SEQ ID NO: 461862 - RNA, 21 nt, Human
ccccuggcugccuugggcccu

SEQ ID NO: 461863 - RNA, 20 nt, Human
ccccugggaggacaggcccg

SEQ ID NO: 461864 - RNA, 19 nt, Human
cccuccaggccccuggcug

SEQ ID NO: 461865 - RNA, 21 nt, Human
cccugcucagaggacggcuac

SEQ ID NO: 461866 - RNA, 24 nt, Human
cccugggugcccaggauugagccc

SEQ ID NO: 461867 - RNA, 18 nt, Human
cccuuguggcccagccag

SEQ ID NO: 461868 - RNA, 21 nt, Human
ccgcuucuggggaaacuccgg

SEQ ID NO: 461869 - RNA, 20 nt, Human
ccuauggggaccucaggcua

SEQ ID NO: 461870 - RNA, 25 nt, Human
ccucaaaggccccaucaugcucccc

SEQ ID NO: 461871 - RNA, 24 nt, Human
ccucaccucagcaggcccccuggc

SEQ ID NO: 461872 - RNA, 21 nt, Human
ccucuugguggcucucagcuu

SEQ ID NO: 461873 - RNA, 22 nt, Human
ccugaccccacccuccucuggc

SEQ ID NO: 461874 - RNA, 24 nt, Human
ccugcucccaggagggugcccagg

SEQ ID NO: 461875 - RNA, 20 nt, Human
ccuggcugccuugggcccug

SEQ ID NO: 461876 - RNA, 27 nt, Human
ccugugccugaggcuaaaccggggucc

SEQ ID NO: 461877 - RNA, 22 nt, Human
ccuuguggcccagccaggugcc

SEQ ID NO: 461878 - RNA, 21 nt, Human
cgcaucauggcaggagguaua

SEQ ID NO: 461879 - RNA, 22 nt, Human
cgccggaacaccacgaucccgg

SEQ ID NO: 461880 - RNA, 25 nt, Human
cgccucgguacacaccaguuuucca

SEQ ID NO: 461881 - RNA, 18 nt, Human
cgcgaugggaacagaugg

SEQ ID NO: 461882 - RNA, 21 nt, Human
cggagcagcaccaggccagca

SEQ ID NO: 461883 - RNA, 25 nt, Human
cggugcacacucaugcacaugcaua

SEQ ID NO: 461884 - RNA, 22 nt, Human
cuaaagcugagcuugucccugc

SEQ ID NO: 461885 - RNA, 20 nt, Human
cuaacugcuucccaaaccca

SEQ ID NO: 461886 - RNA, 21 nt, Human
cucagcagcgaugccugugcc

SEQ ID NO: 461887 - RNA, 23 nt, Human
cucagugggccuggugcucaccu

SEQ ID NO: 461888 - RNA, 20 nt, Human
cuccccacuccacacccuuc

SEQ ID NO: 461889 - RNA, 24 nt, Human
cucucagcuugacaaaggugcggc

SEQ ID NO: 461890 - RNA, 24 nt, Human
cugaagcucuguaugccucagcag

SEQ ID NO: 461891 - RNA, 22 nt, Human
cugcagccuugggggugggggg

SEQ ID NO: 461892 - RNA, 22 nt, Human
cugccgcugccggagcagcacc

SEQ ID NO: 461893 - RNA, 20 nt, Human
cugcucagaggacggcuacu

SEQ ID NO: 461894 - RNA, 22 nt, Human
cugcucccaggagggugcccag

SEQ ID NO: 461895 - RNA, 20 nt, Human
cuggccccuccaggccccug

SEQ ID NO: 461896 - RNA, 21 nt, Human
cuggcugccuugggcccugcu

SEQ ID NO: 461897 - RNA, 25 nt, Human
cugggcccggcuggccacgcaacug

SEQ ID NO: 461898 - RNA, 28 nt, Human
cuugcaagcccagaacacauccugagcc

SEQ ID NO: 461899 - RNA, 22 nt, Human
cuuggccccaccuccuaccaac

SEQ ID NO: 461900 - RNA, 19 nt, Human
gaaagaggaagauggccgg

SEQ ID NO: 461901 - RNA, 24 nt, Human
gaagcucuguaugccucagcaggg

SEQ ID NO: 461902 - RNA, 22 nt, Human
gacaugcccacauuagaggucc

SEQ ID NO: 461903 - RNA, 27 nt, Human
gaccccacccuccucuggccccuccag

SEQ ID NO: 461904 - RNA, 23 nt, Human
gacgaugcccacgauggcguaga

SEQ ID NO: 461905 - RNA, 18 nt, Human
gagaggcacaaggcagag

SEQ ID NO: 461906 - RNA, 24 nt, Human
gagcaccacggacaggaucacaaa

SEQ ID NO: 461907 - RNA, 20 nt, Human
gagcagggggugccagaaug

SEQ ID NO: 461908 - RNA, 24 nt, Human
gagccgggggccagaauucaggcc

SEQ ID NO: 461909 - RNA, 21 nt, Human
gaggaaggccugcucccagga

SEQ ID NO: 461910 - RNA, 21 nt, Human
gaggaugacuacccaguugca

SEQ ID NO: 461911 - RNA, 20 nt, Human
gaggcagcuugcccauggcc

SEQ ID NO: 461912 - RNA, 22 nt, Human
gaucccagccaccuuggcucug

SEQ ID NO: 461913 - RNA, 18 nt, Human
gauggcacaaugucaagg

SEQ ID NO: 461914 - RNA, 19 nt, Human
gcagcaggcaggcagggca

SEQ ID NO: 461915 - RNA, 20 nt, Human
gcagcaggcaggcagggcag

SEQ ID NO: 461916 - RNA, 20 nt, Human
gccccagaggccccuuccuu

SEQ ID NO: 461917 - RNA, 23 nt, Human
gcccgcugccgcugccgggggag

SEQ ID NO: 461918 - RNA, 19 nt, Human
gccugaggcuaaacugccc

SEQ ID NO: 461919 - RNA, 19 nt, Human
gccuggaccacagaugaga

SEQ ID NO: 461920 - RNA, 21 nt, Human
gcggcccaggucucgcccaaa

SEQ ID NO: 461921 - RNA, 21 nt, Human
gcggggggcuugcaagcccag

SEQ ID NO: 461922 - RNA, 24 nt, Human
gcuaaacugccccugggggucugu

SEQ ID NO: 461923 - RNA, 20 nt, Human
gcugcccaggcuccucccca

SEQ ID NO: 461924 - RNA, 21 nt, Human
gcuucuguaaacauguacagc

SEQ ID NO: 461925 - RNA, 19 nt, Human
ggacacaggcaacacgagc

SEQ ID NO: 461926 - RNA, 18 nt, Human
ggcaggcaccaggugccc

SEQ ID NO: 461927 - RNA, 19 nt, Human
ggcccagcucccucuguca

SEQ ID NO: 461928 - RNA, 24 nt, Human
ggccgaagagcaccacggacagga

SEQ ID NO: 461929 - RNA, 19 nt, Human
ggcucagugggccuggugc

SEQ ID NO: 461930 - RNA, 20 nt, Human
ggcugguggcucugcagagg

SEQ ID NO: 461931 - RNA, 21 nt, Human
ggcugguggcucugcagaggc

SEQ ID NO: 461932 - RNA, 22 nt, Human
gggagcaggccucgugcggguu

SEQ ID NO: 461933 - RNA, 23 nt, Human
gggaggcagcuugcccauggccu

SEQ ID NO: 461934 - RNA, 20 nt, Human
gggcagcaggcaggcagggc

SEQ ID NO: 461935 - RNA, 22 nt, Human
gggcagcaggcaggcagggcag

SEQ ID NO: 461936 - RNA, 24 nt, Human
gggcagccccagaggccccuuccu

SEQ ID NO: 461937 - RNA, 25 nt, Human
gggugccagaaugcccccauggagg

SEQ ID NO: 461938 - RNA, 21 nt, Human
gggugggcagccccagaggcc

SEQ ID NO: 461939 - RNA, 21 nt, Human
ggucuguccuuaaagcugccc

SEQ ID NO: 461940 - RNA, 22 nt, Human
ggucuguccuuaaagcugcccg

SEQ ID NO: 461941 - RNA, 25 nt, Human
ggugccccuccacggggaggcgcuc

SEQ ID NO: 461942 - RNA, 24 nt, Human
gguguguugguuccagaucccagg

SEQ ID NO: 461943 - RNA, 18 nt, Human
guagaagguaagccagga

SEQ ID NO: 461944 - RNA, 19 nt, Human
guccgcagguuacgcugcc

SEQ ID NO: 461945 - RNA, 18 nt, Human
gugaauucuugaggucga

SEQ ID NO: 461946 - RNA, 20 nt, Human
gugcagcaggcccauccuuc

SEQ ID NO: 461947 - RNA, 19 nt, Human
gugcaugagggucuguggg

SEQ ID NO: 461948 - RNA, 20 nt, Human
gugcugggcugaagcucugg

SEQ ID NO: 461949 - RNA, 20 nt, Human
gugcugggcugaagcucugu

SEQ ID NO: 461950 - RNA, 27 nt, Human
gugggcgcagaaggaaggagaggaugg

SEQ ID NO: 461951 - RNA, 19 nt, Human
uaaaaggccagacaucaag

SEQ ID NO: 461952 - RNA, 24 nt, Human
uacacaccaguuuuccaaaacggg

SEQ ID NO: 461953 - RNA, 19 nt, Human
uaccagugaucaugagagg

SEQ ID NO: 461954 - RNA, 24 nt, Human
uacgcgccaacacuagcaugcaca

SEQ ID NO: 461955 - RNA, 20 nt, Human
uacugugggcgcagaaggaa

SEQ ID NO: 461956 - RNA, 21 nt, Human
uaggacgaggucaucacugcc

SEQ ID NO: 461957 - RNA, 21 nt, Human
uaggcaaagcacuugaggguc

SEQ ID NO: 461958 - RNA, 18 nt, Human
uaggcgauuucugaguag

SEQ ID NO: 461959 - RNA, 24 nt, Human
uagggugggcagccccagaggccc

SEQ ID NO: 461960 - RNA, 18 nt, Human
uaguacugagugagccag

SEQ ID NO: 461961 - RNA, 18 nt, Human
uauauuaauuugucucuc

SEQ ID NO: 461962 - RNA, 23 nt, Human
ucaaaggccccaucaugcucccc

SEQ ID NO: 461963 - RNA, 20 nt, Human
ucaaggucccggaagaacuc

SEQ ID NO: 461964 - RNA, 23 nt, Human
ucacagcagugcccaccacccuu

SEQ ID NO: 461965 - RNA, 22 nt, Human
ucccagccaccuuggcucuggg

SEQ ID NO: 461966 - RNA, 18 nt, Human
ucccagccccaggccccu

SEQ ID NO: 461967 - RNA, 22 nt, Human
ucccagccccaggccccucccu

SEQ ID NO: 461968 - RNA, 22 nt, Human
ucccagcuguguggggagccgg

SEQ ID NO: 461969 - RNA, 25 nt, Human
ucccaggacagccauccaggccagu

SEQ ID NO: 461970 - RNA, 21 nt, Human
ucccaggacccacccuggcag

SEQ ID NO: 461971 - RNA, 19 nt, Human
ucccaggagggugcccagg

SEQ ID NO: 461972 - RNA, 18 nt, Human
ucccugggcaguggacag

SEQ ID NO: 461973 - RNA, 19 nt, Human
ucccugggcaguggacaga

SEQ ID NO: 461974 - RNA, 20 nt, Human
ucuguaaacauguacagcac

SEQ ID NO: 461975 - RNA, 22 nt, Human
ucuguaugccucagcagggcca

SEQ ID NO: 461976 - RNA, 19 nt, Human
ucugugcugggcugaagcu

SEQ ID NO: 461977 - RNA, 22 nt, Human
ucuuccucgauggugacuccag

SEQ ID NO: 461978 - RNA, 20 nt, Human
ugaacacaugauugggcggg

SEQ ID NO: 461979 - RNA, 19 nt, Human
ugacaaaggugcggcccgu

SEQ ID NO: 461980 - RNA, 22 nt, Human
ugacuccaggggcgaaccgcgg

SEQ ID NO: 461981 - RNA, 22 nt, Human
ugaggaugacuacccaguugca

SEQ ID NO: 461982 - RNA, 26 nt, Human
ugaggggaggcccagcucccucuguc

SEQ ID NO: 461983 - RNA, 19 nt, Human
ugcagcaggcccauccuuc

SEQ ID NO: 461984 - RNA, 18 nt, Human
ugcaggagaaagaggaag

SEQ ID NO: 461985 - RNA, 22 nt, Human
ugcagucagcgccucgguacac

SEQ ID NO: 461986 - RNA, 23 nt, Human
ugcauacgcgccaacacuagcau

SEQ ID NO: 461987 - RNA, 18 nt, Human
ugcccccauggagggcag

SEQ ID NO: 461988 - RNA, 18 nt, Human
ugccggagcagcaccagg

SEQ ID NO: 461989 - RNA, 21 nt, Human
ugccuaggcguggugggggug

SEQ ID NO: 461990 - RNA, 18 nt, Human
ugcugggcugaagcucug

SEQ ID NO: 461991 - RNA, 19 nt, Human
uggaggagggagacgugca

SEQ ID NO: 461992 - RNA, 21 nt, Human
uggaggagggagacgugcagc

SEQ ID NO: 461993 - RNA, 25 nt, Human
uggcagaggaggaauuaaaaggcca

SEQ ID NO: 461994 - RNA, 18 nt, Human
uggcagaggccgcaggcg

SEQ ID NO: 461995 - RNA, 24 nt, Human
uggcaggcugggaggggcagcagg

SEQ ID NO: 461996 - RNA, 18 nt, Human
uggcauuacagccacagc

SEQ ID NO: 461997 - RNA, 23 nt, Human
uggccuguccuggagcagggggu

SEQ ID NO: 461998 - RNA, 22 nt, Human
uggcugcagccuuggggguggg

SEQ ID NO: 461999 - RNA, 22 nt, Human
ugggacaggaccaucuccugcu

SEQ ID NO: 462000 - RNA, 22 nt, Human
ugggcugccccugggugcccag

SEQ ID NO: 462001 - RNA, 20 nt, Human
uggggguccuaagcugaggu

SEQ ID NO: 462002 - RNA, 20 nt, Human
ugggggugggagggaggaag

SEQ ID NO: 462003 - RNA, 23 nt, Human
ugggggugggagggaggaaggcc

SEQ ID NO: 462004 - RNA, 23 nt, Human
uggguaggagccagguuaggggu

SEQ ID NO: 462005 - RNA, 19 nt, Human
ugggugcccaggauugagc

SEQ ID NO: 462006 - RNA, 19 nt, Human
ugguaugcaggagaaagag

SEQ ID NO: 462007 - RNA, 21 nt, Human
ugguguggcugcagccuuggg

SEQ ID NO: 462008 - RNA, 21 nt, Human
ugguuccagaucccagggccc

SEQ ID NO: 462009 - RNA, 22 nt, Human
uguaaacauguacagcacugca

SEQ ID NO: 462010 - RNA, 22 nt, Human
ugucaaggucccggaagaacuc

SEQ ID NO: 462011 - RNA, 19 nt, Human
ugucagggugggcaggggc

SEQ ID NO: 462012 - RNA, 18 nt, Human
uguccuggagcagggggu

SEQ ID NO: 462013 - RNA, 18 nt, Human
uguguggggagccggggg

SEQ ID NO: 462014 - RNA, 20 nt, Human
uguguggggagccgggggcc

SEQ ID NO: 462015 - RNA, 21 nt, Human
uguguggggagccgggggcca

SEQ ID NO: 462016 - RNA, 23 nt, Human
uuaggggugggcugccccugggu

SEQ ID NO: 462017 - RNA, 21 nt, Human
uucugugcugggcugaagcuc

SEQ ID NO: 462018 - RNA, 19 nt, Human
uucuugauguacucagcug

SEQ ID NO: 462019 - RNA, 21 nt, Human
uucuuggcaggcugggagggg

SEQ ID NO: 462020 - RNA, 19 nt, Human
uugguuccgcggcccaggu

SEQ ID NO: 462021 - RNA, 23 nt, Human
uuuggguggugaggauccuuggg

SEQ ID NO: 462022 - RNA, 23 nt, Human
aaaagcaaauuccuggaagaagc

SEQ ID NO: 462023 - RNA, 27 nt, Human
aaaagcaaauuccuggaagaagcagag

SEQ ID NO: 462024 - RNA, 28 nt, Human
aaaagcaaauuccuggaagaagcagaga

SEQ ID NO: 462025 - RNA, 22 nt, Human
aaagcaaauuccuggaagaagc

SEQ ID NO: 462026 - RNA, 27 nt, Human
aaagcaaauuccuggaagaagcagaga

SEQ ID NO: 462027 - RNA, 21 nt, Human
aagaaacucuaauucuaagac

SEQ ID NO: 462028 - RNA, 19 nt, Human
aagaagcagagaaauaggc

SEQ ID NO: 462029 - RNA, 21 nt, Human
acacauucucaccucuuugcc

SEQ ID NO: 462030 - RNA, 24 nt, Human
acagaaccuggcagccccuauacu

SEQ ID NO: 462031 - RNA, 21 nt, Human
acagccccccggcagccucag

SEQ ID NO: 462032 - RNA, 20 nt, Human
acauucucaccucuuugccc

SEQ ID NO: 462033 - RNA, 27 nt, Human
acuaauaaaagcaaauuccuggaagaa

SEQ ID NO: 462034 - RNA, 24 nt, Human
agcccacagccccccggcagccuc

SEQ ID NO: 462035 - RNA, 22 nt, Human
agccccccggcagccucagccu

SEQ ID NO: 462036 - RNA, 21 nt, Human
agcuauaggaaaagaagcaca

SEQ ID NO: 462037 - RNA, 22 nt, Human
aggcgccggcggcccgguagcc

SEQ ID NO: 462038 - RNA, 20 nt, Human
auggaaggacuugguccaca

SEQ ID NO: 462039 - RNA, 22 nt, Human
auggagacacagaaccuggcag

SEQ ID NO: 462040 - RNA, 21 nt, Human
caaaaaaggucuauaaguuaa

SEQ ID NO: 462041 - RNA, 23 nt, Human
caaaguaguaaaaaacaauggcc

SEQ ID NO: 462042 - RNA, 20 nt, Human
cacagcaagucacuacggca

SEQ ID NO: 462043 - RNA, 20 nt, Human
cacagcaagucacuacggca

SEQ ID NO: 462044 - RNA, 20 nt, Human
cacagccccccggcagccuc

SEQ ID NO: 462045 - RNA, 19 nt, Human
cacgugcagacaugcugca

SEQ ID NO: 462046 - RNA, 24 nt, Human
cagcugaaaggagguaaaggucag

SEQ ID NO: 462047 - RNA, 24 nt, Human
ccacagccccccggcagccucagc

SEQ ID NO: 462048 - RNA, 19 nt, Human
ccagacaagaucucuaagc

SEQ ID NO: 462049 - RNA, 26 nt, Human
cccacagccccccggcagccucagcc

SEQ ID NO: 462050 - RNA, 23 nt, Human
ccggcggcccgguagcccacagc

SEQ ID NO: 462051 - RNA, 23 nt, Human
ccucuuugcccuccuguuaaagg

SEQ ID NO: 462052 - RNA, 22 nt, Human
cuauaggaaaagaagcacauau

SEQ ID NO: 462053 - RNA, 21 nt, Human
cuugagaaaucaaugaaucaa

SEQ ID NO: 462054 - RNA, 21 nt, Human
cuugguccacagcaagucacu

SEQ ID NO: 462055 - RNA, 25 nt, Human
gacacagaaccuggcagccccuaua

SEQ ID NO: 462056 - RNA, 18 nt, Human
gaggcgccggcggcccgg

SEQ ID NO: 462057 - RNA, 23 nt, Human
gcaaauuccuggaagaagcagag

SEQ ID NO: 462058 - RNA, 22 nt, Human
ggauaaugucccugggcucuuu

SEQ ID NO: 462059 - RNA, 24 nt, Human
ggcagccucagccucgaggcuccu

SEQ ID NO: 462060 - RNA, 18 nt, Human
ggcccgguagcccacagc

SEQ ID NO: 462061 - RNA, 24 nt, Human
gguaaaggucagguuccuguuuau

SEQ ID NO: 462062 - RNA, 19 nt, Human
guccacagcaagucacuac

SEQ ID NO: 462063 - RNA, 27 nt, Human
guguaugcaugcacacgugcagacaug

SEQ ID NO: 462064 - RNA, 18 nt, Human
uaaaugaaagaguuagac

SEQ ID NO: 462065 - RNA, 19 nt, Human
uagacuguaauggauaaug

SEQ ID NO: 462066 - RNA, 21 nt, Human
uagcccacagccccccggcag

SEQ ID NO: 462067 - RNA, 20 nt, Human
uagguauccuggcaccuguu

SEQ ID NO: 462068 - RNA, 18 nt, Human
ugaaacagcugaaaggag

SEQ ID NO: 462069 - RNA, 20 nt, Human
ugaaacagcugaaaggaggu

SEQ ID NO: 462070 - RNA, 18 nt, Human
ugaaaggagguaaagguc

SEQ ID NO: 462071 - RNA, 19 nt, Human
ugagaaaucaaugaaucaa

SEQ ID NO: 462072 - RNA, 23 nt, Human
uggcagccccuauacuugacuaa

SEQ ID NO: 462073 - RNA, 21 nt, Human
uggcuuggaaaucaggucugc

SEQ ID NO: 462074 - RNA, 20 nt, Human
ugggaaggagccccuggagc

SEQ ID NO: 462075 - RNA, 22 nt, Human
uguaugcaugcacacgugcagu

SEQ ID NO: 462076 - RNA, 21 nt, Human
ugucaacccgguguguaugca

SEQ ID NO: 462077 - RNA, 19 nt, Human
uuaaaggcuugaauacaaa

SEQ ID NO: 462078 - RNA, 21 nt, Human
uuccuggaagaagcagagaaa

SEQ ID NO: 462079 - RNA, 18 nt, Human
uuucacauaauccauacu

SEQ ID NO: 462080 - RNA, 24 nt, Human
uuuuuuuuuuuuaacacauucuca

SEQ ID NO: 462081 - RNA, 24 nt, Human
aaaaaacaacaacaacaaaaaccc

SEQ ID NO: 462082 - RNA, 23 nt, Human
aaaaagccaguuauccaauaaug

SEQ ID NO: 462083 - RNA, 19 nt, Human
aaaacaaacaaacaaaaaa

SEQ ID NO: 462084 - RNA, 18 nt, Human
aaaacuauguggugaaaa

SEQ ID NO: 462085 - RNA, 22 nt, Human
aaacaaaaaacaacaacaacaa

SEQ ID NO: 462086 - RNA, 24 nt, Human
aaacaaacaaaaaacaacaacaac

SEQ ID NO: 462087 - RNA, 21 nt, Human
aaacaacaacaacaaaaaccc

SEQ ID NO: 462088 - RNA, 21 nt, Human
aaacccagcaaaacccaguca

SEQ ID NO: 462089 - RNA, 20 nt, Human
aaacucgaaaauagaaggua

SEQ ID NO: 462090 - RNA, 27 nt, Human
aacaaacaaacaaaaaacaacaacaac

SEQ ID NO: 462091 - RNA, 20 nt, Human
aacaacaaaaacccugaaaa

SEQ ID NO: 462092 - RNA, 22 nt, Human
aacaacaacaacaaaaacccug

SEQ ID NO: 462093 - RNA, 18 nt, Human
aacccagcaaaacccagu

SEQ ID NO: 462094 - RNA, 19 nt, Human
aagaggcacccacaacccc

SEQ ID NO: 462095 - RNA, 24 nt, Human
acaacaacaacaaaaacccugaaa

SEQ ID NO: 462096 - RNA, 25 nt, Human
accaaaacaaacaaacaaaaaacaa

SEQ ID NO: 462097 - RNA, 23 nt, Human
acccacaaccccagcccuaguuc

SEQ ID NO: 462098 - RNA, 23 nt, Human
acccagcaaaacccagucaguuc

SEQ ID NO: 462099 - RNA, 23 nt, Human
acccugaaaauuaucuugaaagu

SEQ ID NO: 462100 - RNA, 23 nt, Human
agaaaaucugcuuuuugugaaaa

SEQ ID NO: 462101 - RNA, 22 nt, Human
agacacagcagauacccagaua

SEQ ID NO: 462102 - RNA, 21 nt, Human
agcggucccacagcccggagc

SEQ ID NO: 462103 - RNA, 25 nt, Human
aggaagaaaaaagccaguuauccaa

SEQ ID NO: 462104 - RNA, 19 nt, Human
aggcacccacaaccccagc

SEQ ID NO: 462105 - RNA, 18 nt, Human
aggcagauuuauuuuuau

SEQ ID NO: 462106 - RNA, 23 nt, Human
auuuuuauuguuacauuccaaag

SEQ ID NO: 462107 - RNA, 19 nt, Human
caaaacaaacaaacaaaaa

SEQ ID NO: 462108 - RNA, 26 nt, Human
caaacaaaaaacaacaacaacaaaaa

SEQ ID NO: 462109 - RNA, 23 nt, Human
caaacaaacaaaaaacaacaaca

SEQ ID NO: 462110 - RNA, 23 nt, Human
caacaaaaacccugaaaauuauc

SEQ ID NO: 462111 - RNA, 20 nt, Human
caaccccagcccuaguucaa

SEQ ID NO: 462112 - RNA, 20 nt, Human
cacaaccccagcccuaguuc

SEQ ID NO: 462113 - RNA, 19 nt, Human
caccaaaacaaacaaacaa

SEQ ID NO: 462114 - RNA, 19 nt, Human
cacccacaaccccagcccu

SEQ ID NO: 462115 - RNA, 20 nt, Human
cagauaauacagucagugca

SEQ ID NO: 462116 - RNA, 20 nt, Human
caggcacaggcuugggaccc

SEQ ID NO: 462117 - RNA, 18 nt, Human
caggcuugggacccggcu

SEQ ID NO: 462118 - RNA, 23 nt, Human
cagucaguucuuuccaguugucu

SEQ ID NO: 462119 - RNA, 20 nt, Human
ccacaaccccagcccuaguu

SEQ ID NO: 462120 - RNA, 27 nt, Human
ccacaaccccagcccuaguucaaagcu

SEQ ID NO: 462121 - RNA, 21 nt, Human
ccagcggucccacagcccgga

SEQ ID NO: 462122 - RNA, 23 nt, Human
ccagcggucccacagcccggagc

SEQ ID NO: 462123 - RNA, 19 nt, Human
ccaggcaucccuccccucu

SEQ ID NO: 462124 - RNA, 21 nt, Human
cccacagcccggagcccccgc

SEQ ID NO: 462125 - RNA, 21 nt, Human
cccaccaaaacaaacaaacaa

SEQ ID NO: 462126 - RNA, 25 nt, Human
cccaccaaaacaaacaaacaaaaaa

SEQ ID NO: 462127 - RNA, 18 nt, Human
cccccgcgaccggcuccc

SEQ ID NO: 462128 - RNA, 20 nt, Human
cccuccccucucccaccaaa

SEQ ID NO: 462129 - RNA, 20 nt, Human
cucccggcucgggcucaggc

SEQ ID NO: 462130 - RNA, 25 nt, Human
gaggacagaggaagaaaaaagccag

SEQ ID NO: 462131 - RNA, 22 nt, Human
gcccggagcccccgcgaccggc

SEQ ID NO: 462132 - RNA, 19 nt, Human
ggcccagcggucccacagc

SEQ ID NO: 462133 - RNA, 25 nt, Human
guuaacaagaaaaaaaaaucaagca

SEQ ID NO: 462134 - RNA, 22 nt, Human
uaaaaugaaacccagcaaaacc

SEQ ID NO: 462135 - RNA, 28 nt, Human
uaaagguacuagaagaugaguaagacca

SEQ ID NO: 462136 - RNA, 21 nt, Human
uacaugaagaaaaucugcuuu

SEQ ID NO: 462137 - RNA, 20 nt, Human
uauguggugaaaaagagagu

SEQ ID NO: 462138 - RNA, 18 nt, Human
ucagaagaggcacccaca

SEQ ID NO: 462139 - RNA, 18 nt, Human
ucaguucuuuccaguuga

SEQ ID NO: 462140 - RNA, 21 nt, Human
uccagguaaaggacuucaaga

SEQ ID NO: 462141 - RNA, 26 nt, Human
ucccuccccucucccaccaaaacaaa

SEQ ID NO: 462142 - RNA, 18 nt, Human
ugacaaauguguauauau

SEQ ID NO: 462143 - RNA, 21 nt, Human
ugaguaagaccacacacacca

SEQ ID NO: 462144 - RNA, 24 nt, Human
ugaguaagaccacacacaccaaga

SEQ ID NO: 462145 - RNA, 24 nt, Human
ugcaaaagucaaaugaguaaguca

SEQ ID NO: 462146 - RNA, 18 nt, Human
uggagcucaaacagcugc

SEQ ID NO: 462147 - RNA, 20 nt, Human
uggagcucaaacagcugccu

SEQ ID NO: 462148 - RNA, 18 nt, Human
uggcugacuuugagcugu

SEQ ID NO: 462149 - RNA, 18 nt, Human
ugugcuuuuaaaaauguc

SEQ ID NO: 462150 - RNA, 19 nt, Human
ugugcuuuuaaaaaugucu

SEQ ID NO: 462151 - RNA, 19 nt, Human
uguggugaaaaagagagug

SEQ ID NO: 462152 - RNA, 18 nt, Human
uguuucuuucuagucacc

SEQ ID NO: 462153 - RNA, 24 nt, Human
uuacguuaacaagaaaaaaaaauc

SEQ ID NO: 462154 - RNA, 22 nt, Human
uuccagguaaaggacuucaaga

SEQ ID NO: 462155 - RNA, 24 nt, Human
aaacaaaaugucacucauguacaa

SEQ ID NO: 462156 - RNA, 18 nt, Human
aaacucccagccuccacc

SEQ ID NO: 462157 - RNA, 19 nt, Human
accuagauccucagggcuc

SEQ ID NO: 462158 - RNA, 22 nt, Human
agauacuggugguuauuugacu

SEQ ID NO: 462159 - RNA, 19 nt, Human
agccccaaacucccagccu

SEQ ID NO: 462160 - RNA, 20 nt, Human
agccccaaacucccagccuc

SEQ ID NO: 462161 - RNA, 23 nt, Human
caacaggugccuuccugcugcuu

SEQ ID NO: 462162 - RNA, 26 nt, Human
cacccacagccccaaacucccagccu

SEQ ID NO: 462163 - RNA, 24 nt, Human
cacucauguacaacuaggcuuuau

SEQ ID NO: 462164 - RNA, 18 nt, Human
cacucuguauaacucucc

SEQ ID NO: 462165 - RNA, 21 nt, Human
cacucuguauaacucuccucg

SEQ ID NO: 462166 - RNA, 20 nt, Human
cagaggauccacccacagcc

SEQ ID NO: 462167 - RNA, 26 nt, Human
cagaggauccacccacagccccaaac

SEQ ID NO: 462168 - RNA, 20 nt, Human
cagccccaaacucccagccu

SEQ ID NO: 462169 - RNA, 20 nt, Human
cagccuccaccucagccuca

SEQ ID NO: 462170 - RNA, 22 nt, Human
cagggcccuggcagggagcccc

SEQ ID NO: 462171 - RNA, 21 nt, Human
ccagccuccaccucagccuca

SEQ ID NO: 462172 - RNA, 23 nt, Human
cccaaacucccagccuccaccuc

SEQ ID NO: 462173 - RNA, 21 nt, Human
cccagccuccaccucagccuc

SEQ ID NO: 462174 - RNA, 25 nt, Human
cccagccuccaccucagccucaggc

SEQ ID NO: 462175 - RNA, 22 nt, Human
ccucacaacaggugccuuccug

SEQ ID NO: 462176 - RNA, 20 nt, Human
ccucagccucaggcuccuuc

SEQ ID NO: 462177 - RNA, 25 nt, Human
ccucaggcuccuucugacaguuggg

SEQ ID NO: 462178 - RNA, 19 nt, Human
ccuucagaggauccaccca

SEQ ID NO: 462179 - RNA, 21 nt, Human
cuaggcuuuaugggaaggugg

SEQ ID NO: 462180 - RNA, 23 nt, Human
cucagccucaggcuccuucugac

SEQ ID NO: 462181 - RNA, 20 nt, Human
cucccagccuccaccucagc

SEQ ID NO: 462182 - RNA, 23 nt, Human
cucccagccuccaccucagccuc

SEQ ID NO: 462183 - RNA, 26 nt, Human
cucuuccacggaagaggcaucuuaaa

SEQ ID NO: 462184 - RNA, 22 nt, Human
gaggugaaacaaaaugucacuc

SEQ ID NO: 462185 - RNA, 19 nt, Human
gcccuggcagggagcccca

SEQ ID NO: 462186 - RNA, 19 nt, Human
ggaagguggcagaguggcu

SEQ ID NO: 462187 - RNA, 19 nt, Human
uauuaagaggugaaacaaa

SEQ ID NO: 462188 - RNA, 22 nt, Human
ucaggcuccuucugacaguugg

SEQ ID NO: 462189 - RNA, 19 nt, Human
uccacccacagccccaaac

SEQ ID NO: 462190 - RNA, 19 nt, Human
ucccagccuccaccucagc

SEQ ID NO: 462191 - RNA, 20 nt, Human
ugggaagguggcagaguggc

SEQ ID NO: 462192 - RNA, 22 nt, Human
ugggaagguggcagaguggcug

SEQ ID NO: 462193 - RNA, 18 nt, Human
uuaccuagauccucaggg

SEQ ID NO: 462194 - RNA, 23 nt, Human
uuuaccauguuuauucuuuaccu

SEQ ID NO: 462195 - RNA, 22 nt, Human
aaaaaaaaaccaaccaaacaaa

SEQ ID NO: 462196 - RNA, 24 nt, Human
aaaaaagcacugaaagagacagac

SEQ ID NO: 462197 - RNA, 26 nt, Human
aaaaccaaccaaacaaacaaaaaagc

SEQ ID NO: 462198 - RNA, 21 nt, Human
aaaaggcacugaggccgggcg

SEQ ID NO: 462199 - RNA, 24 nt, Human
aacacuuugggaggccaagguggg

SEQ ID NO: 462200 - RNA, 23 nt, Human
aacagagugagacugucucaaaa

SEQ ID NO: 462201 - RNA, 20 nt, Human
aacaugguuaaaccccgucu

SEQ ID NO: 462202 - RNA, 21 nt, Human
aacaugguuaaaccccgucuc

SEQ ID NO: 462203 - RNA, 21 nt, Human
aaccaaacaaacaaaaaagca

SEQ ID NO: 462204 - RNA, 26 nt, Human
aaccaaacaaacaaaaaagcacugaa

SEQ ID NO: 462205 - RNA, 20 nt, Human
aagagggaccaggccuagcg

SEQ ID NO: 462206 - RNA, 21 nt, Human
aaggcugacccagucagcacu

SEQ ID NO: 462207 - RNA, 24 nt, Human
accaaacaaacaaaaaagcacuga

SEQ ID NO: 462208 - RNA, 24 nt, Human
accccgucucuacuaaaaauacaa

SEQ ID NO: 462209 - RNA, 24 nt, Human
acgccacugcacuccagccugggc

SEQ ID NO: 462210 - RNA, 24 nt, Human
acgccacugcacuccagccugggc

SEQ ID NO: 462211 - RNA, 24 nt, Human
acuccagccugggcaacagaguga

SEQ ID NO: 462212 - RNA, 24 nt, Human
acugcacuccagccugggcaacag

SEQ ID NO: 462213 - RNA, 24 nt, Human
acugcacuccagccugggcaacag

SEQ ID NO: 462214 - RNA, 23 nt, Human
agccgggcaugguggcgggugcc

SEQ ID NO: 462215 - RNA, 22 nt, Human
agccugggcaacagagugagac

SEQ ID NO: 462216 - RNA, 22 nt, Human
agcuauuaagagaaucauacag

SEQ ID NO: 462217 - RNA, 19 nt, Human
aggaagagggaccaggccu

SEQ ID NO: 462218 - RNA, 18 nt, Human
aggcaggagaauggugug

SEQ ID NO: 462219 - RNA, 24 nt, Human
aggcaggagaauggugugaacccg

SEQ ID NO: 462220 - RNA, 21 nt, Human
aggccaagguggguggaucac

SEQ ID NO: 462221 - RNA, 21 nt, Human
aggcggaacuugcagugagcc

SEQ ID NO: 462222 - RNA, 24 nt, Human
aggcggaacuugcagugagccgag

SEQ ID NO: 462223 - RNA, 19 nt, Human
aggcugaggcaggagaaug

SEQ ID NO: 462224 - RNA, 24 nt, Human
agguggguggaucacgaggucaag

SEQ ID NO: 462225 - RNA, 24 nt, Human
aucacgccacugcacuccagccug

SEQ ID NO: 462226 - RNA, 22 nt, Human
aucccaacacuuugggaggcca

SEQ ID NO: 462227 - RNA, 19 nt, Human
augugauggcagugauggu

SEQ ID NO: 462228 - RNA, 22 nt, Human
caaaaaagcacugaaagagaca

SEQ ID NO: 462229 - RNA, 20 nt, Human
caaacaaacaaaaaagcacu

SEQ ID NO: 462230 - RNA, 21 nt, Human
caaacaaacaaaaaagcacug

SEQ ID NO: 462231 - RNA, 24 nt, Human
caacacuuugggaggccaaggugg

SEQ ID NO: 462232 - RNA, 22 nt, Human
caacagagugagacugucucag

SEQ ID NO: 462233 - RNA, 24 nt, Human
caacaugguuaaaccccgucucua

SEQ ID NO: 462234 - RNA, 24 nt, Human
caagguggguggaucacgagguca

SEQ ID NO: 462235 - RNA, 24 nt, Human
cacgccuguaaucccaacacuuug

SEQ ID NO: 462236 - RNA, 20 nt, Human
cacuaaaaacaggauuaaug

SEQ ID NO: 462237 - RNA, 22 nt, Human
cacuccagccugggcaacagag

SEQ ID NO: 462238 - RNA, 22 nt, Human
cacuccagccugggcaacagag

SEQ ID NO: 462239 - RNA, 24 nt, Human
cacuccagccugggcaacagagug

SEQ ID NO: 462240 - RNA, 19 nt, Human
cacugcacuccagccuggg

SEQ ID NO: 462241 - RNA, 21 nt, Human
cacugcacuccagccugggca

SEQ ID NO: 462242 - RNA, 22 nt, Human
cacugcacuccagccugggcaa

SEQ ID NO: 462243 - RNA, 23 nt, Human
cacugcacuccagccugggcaac

SEQ ID NO: 462244 - RNA, 24 nt, Human
cacugcacuccagccugggcaaca

SEQ ID NO: 462245 - RNA, 18 nt, Human
cagcaucauuauauuacu

SEQ ID NO: 462246 - RNA, 24 nt, Human
cagcuacucgggaggcugaggcag

SEQ ID NO: 462247 - RNA, 22 nt, Human
caguaaaaccuguucagacagc

SEQ ID NO: 462248 - RNA, 22 nt, Human
caugguggcgggugccuguagu

SEQ ID NO: 462249 - RNA, 18 nt, Human
caugguuaaaccccgucu

SEQ ID NO: 462250 - RNA, 18 nt, Human
ccaaacaaacaaaaaagc

SEQ ID NO: 462251 - RNA, 24 nt, Human
ccaaacaaacaaaaaagcacugaa

SEQ ID NO: 462252 - RNA, 21 nt, Human
ccaaccaaacaaacaaaaaag

SEQ ID NO: 462253 - RNA, 20 nt, Human
ccacugcacuccagccuggg

SEQ ID NO: 462254 - RNA, 20 nt, Human
ccacugcacuccagccuggg

SEQ ID NO: 462255 - RNA, 21 nt, Human
ccacugcacuccagccugggc

SEQ ID NO: 462256 - RNA, 23 nt, Human
ccacugcacuccagccugggcaa

SEQ ID NO: 462257 - RNA, 24 nt, Human
ccacugcacuccagccugggcaac

SEQ ID NO: 462258 - RNA, 23 nt, Human
ccuggccaacaugguuaaacccc

SEQ ID NO: 462259 - RNA, 24 nt, Human
ccuggccaacaugguuaaaccccg

SEQ ID NO: 462260 - RNA, 21 nt, Human
ccuguagugccagcuacucgg

SEQ ID NO: 462261 - RNA, 24 nt, Human
cgagaccauccuggccaacauggu

SEQ ID NO: 462262 - RNA, 24 nt, Human
cgagaucacgccacugcacuccag

SEQ ID NO: 462263 - RNA, 24 nt, Human
cgccacugcacuccagccugggca

SEQ ID NO: 462264 - RNA, 23 nt, Human
cgccuguaaucccaacacuuugg

SEQ ID NO: 462265 - RNA, 24 nt, Human
cgccuguaaucccaacacuuuggg

SEQ ID NO: 462266 - RNA, 28 nt, Human
cgggcaugguggcgggugccuguagugc

SEQ ID NO: 462267 - RNA, 20 nt, Human
cgucaaggcgcaugcgcgca

SEQ ID NO: 462268 - RNA, 24 nt, Human
cuaaaaauacaaaaaaaauagccg

SEQ ID NO: 462269 - RNA, 22 nt, Human
cucacgccuguaaucccaacac

SEQ ID NO: 462270 - RNA, 24 nt, Human
cucacgccuguaaucccaacacuu

SEQ ID NO: 462271 - RNA, 19 nt, Human
cuugcagugagccgagauc

SEQ ID NO: 462272 - RNA, 18 nt, Human
gaaagagacagacuccag

SEQ ID NO: 462273 - RNA, 23 nt, Human
gaaagcaagcaguaaaaccuguu

SEQ ID NO: 462274 - RNA, 19 nt, Human
gacugucucaaaaaaaaac

SEQ ID NO: 462275 - RNA, 24 nt, Human
gcacuccagccugggcaacagagu

SEQ ID NO: 462276 - RNA, 24 nt, Human
gccaacaugguuaaaccccgucuc

SEQ ID NO: 462277 - RNA, 22 nt, Human
gccacugcacuccagccugggc

SEQ ID NO: 462278 - RNA, 24 nt, Human
gccacugcacuccagccugggcaa

SEQ ID NO: 462279 - RNA, 20 nt, Human
gccgagaucacgccacugca

SEQ ID NO: 462280 - RNA, 22 nt, Human
ggcacugaggccgggcgcggug

SEQ ID NO: 462281 - RNA, 23 nt, Human
ggcgcgguggcucacgccuguaa

SEQ ID NO: 462282 - RNA, 18 nt, Human
gguggaucacgaggucaa

SEQ ID NO: 462283 - RNA, 23 nt, Human
gguggcucacgccuguaauccca

SEQ ID NO: 462284 - RNA, 22 nt, Human
guuaaaaaaggcacugaggccg

SEQ ID NO: 462285 - RNA, 23 nt, Human
uaauguauagcuauuaagagaau

SEQ ID NO: 462286 - RNA, 18 nt, Human
uacaguggcuuuauucuu

SEQ ID NO: 462287 - RNA, 21 nt, Human
uagccgggcaugguggcgggu

SEQ ID NO: 462288 - RNA, 22 nt, Human
ucaaaaaaaaaccaaccaaaca

SEQ ID NO: 462289 - RNA, 24 nt, Human
ucacgaggucaagagaucgagacc

SEQ ID NO: 462290 - RNA, 23 nt, Human
ucacgccacugcacuccagccug

SEQ ID NO: 462291 - RNA, 23 nt, Human
uccagccugggcaacagagugag

SEQ ID NO: 462292 - RNA, 24 nt, Human
uccagccugggcaacagagugaga

SEQ ID NO: 462293 - RNA, 18 nt, Human
uccaguucccggaaggcu

SEQ ID NO: 462294 - RNA, 27 nt, Human
ucucaaaaaaaaaccaaccaaacaaac

SEQ ID NO: 462295 - RNA, 22 nt, Human
ucucuacuaaaaauacaaaaaa

SEQ ID NO: 462296 - RNA, 23 nt, Human
ugaaagagacagacuccaguucc

SEQ ID NO: 462297 - RNA, 22 nt, Human
ugagccgagaucacgccacugc

SEQ ID NO: 462298 - RNA, 23 nt, Human
ugaggcaggagaauggugugaac

SEQ ID NO: 462299 - RNA, 24 nt, Human
ugaggcaggagaauggugugaacc

SEQ ID NO: 462300 - RNA, 25 nt, Human
ugaggcaggagaauggugugaaccc

SEQ ID NO: 462301 - RNA, 24 nt, Human
ugaggccgggcgcgguggcucacg

SEQ ID NO: 462302 - RNA, 23 nt, Human
ugccuguagugccagcuacucgg

SEQ ID NO: 462303 - RNA, 24 nt, Human
ugccuguagugccagcuacucggg

SEQ ID NO: 462304 - RNA, 23 nt, Human
uggaaagcaagcaguaaaaccug

SEQ ID NO: 462305 - RNA, 19 nt, Human
uggcgggugccuguagugc

SEQ ID NO: 462306 - RNA, 21 nt, Human
uggcucacgccuguaauccca

SEQ ID NO: 462307 - RNA, 24 nt, Human
uggcucacgccuguaaucccaaca

SEQ ID NO: 462308 - RNA, 23 nt, Human
ugggaggccaagguggguggauc

SEQ ID NO: 462309 - RNA, 24 nt, Human
ugggaggccaagguggguggauca

SEQ ID NO: 462310 - RNA, 22 nt, Human
ugugauggcagugauggucaac

SEQ ID NO: 462311 - RNA, 24 nt, Human
uucaggcaaacaagcguggaggac

SEQ ID NO: 462312 - RNA, 18 nt, Human
uugcagugagccgagauc

SEQ ID NO: 462313 - RNA, 20 nt, Human
uugcagugagccgagaucac

SEQ ID NO: 462314 - RNA, 21 nt, Human
uugcagugagccgagaucacg

SEQ ID NO: 462315 - RNA, 22 nt, Human
uuuuuuucauuuccaaaucucu

SEQ ID NO: 462316 - RNA, 22 nt, Human
uuuuuuuuuuuuuuuuucauuu

SEQ ID NO: 462317 - RNA, 20 nt, Human
agauccugggugccaugggg

SEQ ID NO: 462318 - RNA, 20 nt, Human
ccaacugcagcccacgggcg

SEQ ID NO: 462319 - RNA, 21 nt, Human
ccggugcauggcagcggcugc

SEQ ID NO: 462320 - RNA, 22 nt, Human
cgagaccagauccugggugcca

SEQ ID NO: 462321 - RNA, 20 nt, Human
cguuccaacugcagcccacu

SEQ ID NO: 462322 - RNA, 20 nt, Human
cugcagcccacgggcgugag

SEQ ID NO: 462323 - RNA, 19 nt, Human
gaccggugcauggcagcgg

SEQ ID NO: 462324 - RNA, 18 nt, Human
ggcgugaggcuggaaagg

SEQ ID NO: 462325 - RNA, 25 nt, Human
uugaggaggccacacauguuuauua

SEQ ID NO: 462326 - RNA, 21 nt, Human
uuuuuuuuuuuugaggaggcc

SEQ ID NO: 462327 - RNA, 22 nt, Human
uuuuuuuuuuuuugaggaggcc

SEQ ID NO: 462328 - RNA, 19 nt, Human
uuuuuuuuuuuuuugagga

SEQ ID NO: 462329 - RNA, 18 nt, Human
uuuuuuuuuuuuuuuuug

SEQ ID NO: 462330 - RNA, 23 nt, Human
uuuuuuuuuuuuuuuuuuugagg

SEQ ID NO: 462331 - RNA, 23 nt, Human
aaaccacccuaagcagagaucac

SEQ ID NO: 462332 - RNA, 21 nt, Human
aacuccgugagcccacugacc

SEQ ID NO: 462333 - RNA, 25 nt, Human
aacuccgugagcccacugaccucca

SEQ ID NO: 462334 - RNA, 20 nt, Human
aagccacccacugagguugc

SEQ ID NO: 462335 - RNA, 26 nt, Human
aagugaccucugcacccaccgagggu

SEQ ID NO: 462336 - RNA, 21 nt, Human
acccaucucccuucuuugucu

SEQ ID NO: 462337 - RNA, 22 nt, Human
accccaauggcuuccaccuggc

SEQ ID NO: 462338 - RNA, 18 nt, Human
accucacugccccucccc

SEQ ID NO: 462339 - RNA, 21 nt, Human
accucugcccccgaggcuccc

SEQ ID NO: 462340 - RNA, 20 nt, Human
acuccgugagcccacugacc

SEQ ID NO: 462341 - RNA, 18 nt, Human
acuggggaaagaagaaua

SEQ ID NO: 462342 - RNA, 20 nt, Human
agacagacagaggggcggau

SEQ ID NO: 462343 - RNA, 24 nt, Human
agauaucagaacucaccucaaacc

SEQ ID NO: 462344 - RNA, 22 nt, Human
agaucacuccggcugacgcagg

SEQ ID NO: 462345 - RNA, 21 nt, Human
agcaggugcuuauuucuugca

SEQ ID NO: 462346 - RNA, 18 nt, Human
agcuccugccugggcccc

SEQ ID NO: 462347 - RNA, 18 nt, Human
aggacucucaaauaugcu

SEQ ID NO: 462348 - RNA, 21 nt, Human
agggcaacccaguccuccuuc

SEQ ID NO: 462349 - RNA, 21 nt, Human
aggggagacuggggaaagaag

SEQ ID NO: 462350 - RNA, 19 nt, Human
aggugcugcugauuccagu

SEQ ID NO: 462351 - RNA, 23 nt, Human
aggugcuuauuucuugcaguucu

SEQ ID NO: 462352 - RNA, 23 nt, Human
agguguccggggaugcuuugauu

SEQ ID NO: 462353 - RNA, 25 nt, Human
agugaucaguagucauaucuggaac

SEQ ID NO: 462354 - RNA, 22 nt, Human
aguguggggacagcccagcaga

SEQ ID NO: 462355 - RNA, 18 nt, Human
aucaguagucauaucugg

SEQ ID NO: 462356 - RNA, 21 nt, Human
augaaugaaugagugcuggga

SEQ ID NO: 462357 - RNA, 19 nt, Human
caacaagaagagugaaccc

SEQ ID NO: 462358 - RNA, 22 nt, Human
caccaagaacgaggccaugucu

SEQ ID NO: 462359 - RNA, 19 nt, Human
caccacccugcaucuucca

SEQ ID NO: 462360 - RNA, 23 nt, Human
caccacccugcaucuuccaaguc

SEQ ID NO: 462361 - RNA, 22 nt, Human
caccaggcaagggaggccaccc

SEQ ID NO: 462362 - RNA, 24 nt, Human
caccccacaucuaucaccucugcc

SEQ ID NO: 462363 - RNA, 20 nt, Human
caccgcaccuucccucccac

SEQ ID NO: 462364 - RNA, 20 nt, Human
caccucccaccugcacggcc

SEQ ID NO: 462365 - RNA, 18 nt, Human
caccuucccucccacccu

SEQ ID NO: 462366 - RNA, 19 nt, Human
caccuucccucccacccug

SEQ ID NO: 462367 - RNA, 20 nt, Human
cacggccuccagcauugccc

SEQ ID NO: 462368 - RNA, 22 nt, Human
cacugcuucccagagccagccc

SEQ ID NO: 462369 - RNA, 20 nt, Human
cagagccagcccagagcugu

SEQ ID NO: 462370 - RNA, 21 nt, Human
cagcauaguagcccccacccu

SEQ ID NO: 462371 - RNA, 21 nt, Human
cagcccaacaaggccugugcu

SEQ ID NO: 462372 - RNA, 19 nt, Human
cagcucccguggcaccgug

SEQ ID NO: 462373 - RNA, 24 nt, Human
caggucccugaggggagacugggg

SEQ ID NO: 462374 - RNA, 27 nt, Human
ccaccugcacggccuccagcauugccc

SEQ ID NO: 462375 - RNA, 21 nt, Human
ccagucuuggugagggcucuc

SEQ ID NO: 462376 - RNA, 23 nt, Human
cccaccgcaccuucccucccacc

SEQ ID NO: 462377 - RNA, 19 nt, Human
cccagagccagcccagagc

SEQ ID NO: 462378 - RNA, 21 nt, Human
ccccaccgcaccuucccuccc

SEQ ID NO: 462379 - RNA, 22 nt, Human
ccccaccgcaccuucccuccca

SEQ ID NO: 462380 - RNA, 18 nt, Human
ccccacugggcugugccc

SEQ ID NO: 462381 - RNA, 23 nt, Human
cccccgaggcuccccagguucac

SEQ ID NO: 462382 - RNA, 19 nt, Human
cccccugucuuccacacaa

SEQ ID NO: 462383 - RNA, 18 nt, Human
ccccuccccuuccugccu

SEQ ID NO: 462384 - RNA, 20 nt, Human
ccccuuccugccugcccuuc

SEQ ID NO: 462385 - RNA, 21 nt, Human
ccgggaccccccugucuucca

SEQ ID NO: 462386 - RNA, 23 nt, Human
ccucaagggcaacccaguccucc

SEQ ID NO: 462387 - RNA, 23 nt, Human
ccucacugccccuccccuuccug

SEQ ID NO: 462388 - RNA, 22 nt, Human
ccucagcccaacaaggccugug

SEQ ID NO: 462389 - RNA, 23 nt, Human
ccuccagcauugcccaaauucac

SEQ ID NO: 462390 - RNA, 19 nt, Human
ccuccauacgccccuccuc

SEQ ID NO: 462391 - RNA, 21 nt, Human
ccucugcccccgaggcucccc

SEQ ID NO: 462392 - RNA, 23 nt, Human
ccugcacggccuccagcauugcc

SEQ ID NO: 462393 - RNA, 18 nt, Human
ccugccugcccuucuucc

SEQ ID NO: 462394 - RNA, 22 nt, Human
ccugggccccggccucuugccc

SEQ ID NO: 462395 - RNA, 23 nt, Human
ccuucuuccggggcacccagcag

SEQ ID NO: 462396 - RNA, 18 nt, Human
ccuuucccagcauaguag

SEQ ID NO: 462397 - RNA, 24 nt, Human
cgagcucccaacugggacaccccu

SEQ ID NO: 462398 - RNA, 21 nt, Human
cggccuccagcauugcccaaa

SEQ ID NO: 462399 - RNA, 18 nt, Human
cuccaugggcuggacugu

SEQ ID NO: 462400 - RNA, 19 nt, Human
cucguguguugggaggcug

SEQ ID NO: 462401 - RNA, 22 nt, Human
cugaccagcucacucuuauuuu

SEQ ID NO: 462402 - RNA, 18 nt, Human
cugauggacagaaaaggg

SEQ ID NO: 462403 - RNA, 21 nt, Human
cugugcccugccuccuuaaag

SEQ ID NO: 462404 - RNA, 22 nt, Human
cuugcaguucuggaggcuggaa

SEQ ID NO: 462405 - RNA, 19 nt, Human
gaacaaaugugggggcucu

SEQ ID NO: 462406 - RNA, 18 nt, Human
gaacucacagcauguaca

SEQ ID NO: 462407 - RNA, 23 nt, Human
gacacaggggggcccugcagcca

SEQ ID NO: 462408 - RNA, 21 nt, Human
gaccagcaccgcugggguucu

SEQ ID NO: 462409 - RNA, 20 nt, Human
gagcccccaccgcaccuucc

SEQ ID NO: 462410 - RNA, 19 nt, Human
gaggcuggugaagccuggc

SEQ ID NO: 462411 - RNA, 22 nt, Human
gaucccccuuuccacuagccac

SEQ ID NO: 462412 - RNA, 19 nt, Human
gcaccaggcaagggaggcc

SEQ ID NO: 462413 - RNA, 22 nt, Human
gcagaccccaagccacccacug

SEQ ID NO: 462414 - RNA, 22 nt, Human
gcagugggggucaccacccugc

SEQ ID NO: 462415 - RNA, 18 nt, Human
gcauaguagcccccaccc

SEQ ID NO: 462416 - RNA, 19 nt, Human
gccaaccucacugccccuc

SEQ ID NO: 462417 - RNA, 19 nt, Human
gccacaccaagaacgaggc

SEQ ID NO: 462418 - RNA, 23 nt, Human
gccacaccaagaacgaggccaug

SEQ ID NO: 462419 - RNA, 26 nt, Human
gcccaacaaggccugugcuucugacc

SEQ ID NO: 462420 - RNA, 19 nt, Human
gccuucacucccaagucca

SEQ ID NO: 462421 - RNA, 20 nt, Human
gcggaugcagccuaccuccu

SEQ ID NO: 462422 - RNA, 19 nt, Human
ggacacaggggggcccugc

SEQ ID NO: 462423 - RNA, 19 nt, Human
ggacccucaggcugggcag

SEQ ID NO: 462424 - RNA, 19 nt, Human
ggcaacccaguccuccuuc

SEQ ID NO: 462425 - RNA, 18 nt, Human
ggcaccagggugaggugg

SEQ ID NO: 462426 - RNA, 21 nt, Human
ggccacccauugcuccagcuc

SEQ ID NO: 462427 - RNA, 19 nt, Human
ggccggggccucguggcca

SEQ ID NO: 462428 - RNA, 23 nt, Human
ggccucagaugucagcaaaugcc

SEQ ID NO: 462429 - RNA, 19 nt, Human
ggccuccagcauugcccaa

SEQ ID NO: 462430 - RNA, 19 nt, Human
gggagacuggggaaagaag

SEQ ID NO: 462431 - RNA, 22 nt, Human
gggaggcuggugaagccuggca

SEQ ID NO: 462432 - RNA, 19 nt, Human
gggccucguggccaccccc

SEQ ID NO: 462433 - RNA, 21 nt, Human
gggcuccaugggcuggacugu

SEQ ID NO: 462434 - RNA, 21 nt, Human
gggcugggcugggggcaccag

SEQ ID NO: 462435 - RNA, 18 nt, Human
gggggcccugcagccagg

SEQ ID NO: 462436 - RNA, 18 nt, Human
ggguccucagccuccgcc

SEQ ID NO: 462437 - RNA, 22 nt, Human
ggugaagccuggcauugggggg

SEQ ID NO: 462438 - RNA, 26 nt, Human
guccuucuuucuccgggaccccccuu

SEQ ID NO: 462439 - RNA, 18 nt, Human
gucuuccacacaagccaa

SEQ ID NO: 462440 - RNA, 26 nt, Human
gugaagccuggcauuggggggcacca

SEQ ID NO: 462441 - RNA, 19 nt, Human
gugugacacuguaauagug

SEQ ID NO: 462442 - RNA, 24 nt, Human
uaaaaaauaaaaucuuuauuaaaa

SEQ ID NO: 462443 - RNA, 24 nt, Human
uacaacaagaagagugaacccuca

SEQ ID NO: 462444 - RNA, 20 nt, Human
uacgucuguuuacucaccca

SEQ ID NO: 462445 - RNA, 24 nt, Human
uacucacccaucugaggcuaggga

SEQ ID NO: 462446 - RNA, 21 nt, Human
uagaguuagaguccaguaauc

SEQ ID NO: 462447 - RNA, 22 nt, Human
uagcccccacccucaggucagg

SEQ ID NO: 462448 - RNA, 22 nt, Human
ucacccagagagcaugggcugc

SEQ ID NO: 462449 - RNA, 23 nt, Human
ucacccagagagcaugggcugca

SEQ ID NO: 462450 - RNA, 25 nt, Human
ucaccccaauggcuuccaccuggcc

SEQ ID NO: 462451 - RNA, 21 nt, Human
ucacugccccuccccuuccug

SEQ ID NO: 462452 - RNA, 19 nt, Human
ucacuggggacacaggggg

SEQ ID NO: 462453 - RNA, 19 nt, Human
ucacuggggacacaggggg

SEQ ID NO: 462454 - RNA, 21 nt, Human
ucagaacucaccucaaaccac

SEQ ID NO: 462455 - RNA, 23 nt, Human
ucaggcaccaggcaagggaggcc

SEQ ID NO: 462456 - RNA, 20 nt, Human
ucaguggccacaccaagaac

SEQ ID NO: 462457 - RNA, 18 nt, Human
uccaaucacugccggugc

SEQ ID NO: 462458 - RNA, 21 nt, Human
uccagggcugcagguugcuuu

SEQ ID NO: 462459 - RNA, 20 nt, Human
uccaguaaucccccugaguc

SEQ ID NO: 462460 - RNA, 20 nt, Human
uccaugggcuggacuguucc

SEQ ID NO: 462461 - RNA, 23 nt, Human
ucccaaguccacagaggugucuc

SEQ ID NO: 462462 - RNA, 19 nt, Human
uccccaggaguggguguca

SEQ ID NO: 462463 - RNA, 19 nt, Human
ucccugaggggagacuggg

SEQ ID NO: 462464 - RNA, 22 nt, Human
uccgugagcccacugaccucca

SEQ ID NO: 462465 - RNA, 19 nt, Human
uccucagccuccgcccaag

SEQ ID NO: 462466 - RNA, 21 nt, Human
uccucagccuccgcccaaggc

SEQ ID NO: 462467 - RNA, 21 nt, Human
uccuccuucacucaggcacca

SEQ ID NO: 462468 - RNA, 22 nt, Human
uccuucacucaggcaccaggca

SEQ ID NO: 462469 - RNA, 19 nt, Human
ucucagccacaggccgggg

SEQ ID NO: 462470 - RNA, 23 nt, Human
ucucuguaaacaugaaacugcuc

SEQ ID NO: 462471 - RNA, 19 nt, Human
ucuguaaacaugaaacugc

SEQ ID NO: 462472 - RNA, 20 nt, Human
ucuguaaacaugaaacugcu

SEQ ID NO: 462473 - RNA, 21 nt, Human
ucuguaaacaugaaacugcuc

SEQ ID NO: 462474 - RNA, 25 nt, Human
ucuguaaacaugaaacugcucuaaa

SEQ ID NO: 462475 - RNA, 19 nt, Human
ucuugggcugggcuggggg

SEQ ID NO: 462476 - RNA, 20 nt, Human
ugaaacaccccacaucuauc

SEQ ID NO: 462477 - RNA, 24 nt, Human
ugaaacaccccacaucuaucaccu

SEQ ID NO: 462478 - RNA, 21 nt, Human
ugaaugaaugagugcugggag

SEQ ID NO: 462479 - RNA, 25 nt, Human
ugacuaggucaauauugguucauua

SEQ ID NO: 462480 - RNA, 25 nt, Human
ugagcgagcucccaacugggacacc

SEQ ID NO: 462481 - RNA, 21 nt, Human
ugaggcuagggaagugaccuc

SEQ ID NO: 462482 - RNA, 19 nt, Human
ugagggcucucuuccuggc

SEQ ID NO: 462483 - RNA, 22 nt, Human
ugaggggagacuggggaaagaa

SEQ ID NO: 462484 - RNA, 23 nt, Human
ugagugcugggagcugucucagg

SEQ ID NO: 462485 - RNA, 24 nt, Human
ugccagccucagcccaacaaggcc

SEQ ID NO: 462486 - RNA, 25 nt, Human
ugcccccgaggcuccccagguucac

SEQ ID NO: 462487 - RNA, 18 nt, Human
ugcccgaacucacagcau

SEQ ID NO: 462488 - RNA, 20 nt, Human
ugcccuggcccugaugcugg

SEQ ID NO: 462489 - RNA, 18 nt, Human
ugcccuggugucuugggc

SEQ ID NO: 462490 - RNA, 21 nt, Human
ugcccuggugucuugggcugg

SEQ ID NO: 462491 - RNA, 19 nt, Human
ugccuugaaacaccccaca

SEQ ID NO: 462492 - RNA, 18 nt, Human
uggcaagguccuuccuca

SEQ ID NO: 462493 - RNA, 20 nt, Human
uggcaagguccuuccucaaa

SEQ ID NO: 462494 - RNA, 20 nt, Human
uggcaagguccuuccucaag

SEQ ID NO: 462495 - RNA, 22 nt, Human
uggcaagguccuuccucaaggg

SEQ ID NO: 462496 - RNA, 20 nt, Human
uggcugcaggucccugaggg

SEQ ID NO: 462497 - RNA, 18 nt, Human
ugggaggcuggugaagcc

SEQ ID NO: 462498 - RNA, 19 nt, Human
ugggcugggggcaccaggg

SEQ ID NO: 462499 - RNA, 21 nt, Human
ugggcugugcccugccuccuu

SEQ ID NO: 462500 - RNA, 21 nt, Human
ugggggcagugugugugacuu

SEQ ID NO: 462501 - RNA, 19 nt, Human
uggggggagccaaccucac

SEQ ID NO: 462502 - RNA, 23 nt, Human
ugggguccucagccuccgcccaa

SEQ ID NO: 462503 - RNA, 22 nt, Human
uggugagggcucucuuccuggc

SEQ ID NO: 462504 - RNA, 22 nt, Human
ugguggggggagccaaccucac

SEQ ID NO: 462505 - RNA, 20 nt, Human
uguacaacaagaagagugaa

SEQ ID NO: 462506 - RNA, 20 nt, Human
ugucucacugccuugaaaca

SEQ ID NO: 462507 - RNA, 26 nt, Human
ugugacucacugcuucccagagccag

SEQ ID NO: 462508 - RNA, 21 nt, Human
ugugagggacccucaggcugg

SEQ ID NO: 462509 - RNA, 21 nt, Human
uguugacagacagacagaggg

SEQ ID NO: 462510 - RNA, 19 nt, Human
uguuuaguagacaugaggu

SEQ ID NO: 462511 - RNA, 20 nt, Human
uucacuguccuucuuucucc

SEQ ID NO: 462512 - RNA, 19 nt, Human
aaaaaaacaaacaaaaaca

SEQ ID NO: 462513 - RNA, 28 nt, Human
aaaaaaacaaacaaaaacaaaagccaag

SEQ ID NO: 462514 - RNA, 24 nt, Human
aaaaacugguuauaaaaagaacac

SEQ ID NO: 462515 - RNA, 24 nt, Human
aaaacaaaaugaugccccaaagaa

SEQ ID NO: 462516 - RNA, 22 nt, Human
aaaacaaacaaaaacaaaagcc

SEQ ID NO: 462517 - RNA, 20 nt, Human
aaaaucacuuuuguaaguua

SEQ ID NO: 462518 - RNA, 18 nt, Human
aaacaaaaugagggcaca

SEQ ID NO: 462519 - RNA, 24 nt, Human
aaacaaacaaaaacaaaagccaaa

SEQ ID NO: 462520 - RNA, 22 nt, Human
aaacaagcucuccucaaacuga

SEQ ID NO: 462521 - RNA, 23 nt, Human
aaacacaagccauauacacucca

SEQ ID NO: 462522 - RNA, 19 nt, Human
aaacauacgcaaaaauucu

SEQ ID NO: 462523 - RNA, 30 nt, Human
aaacgaaacaaaaaaacaaacaaaaacaaa

SEQ ID NO: 462524 - RNA, 24 nt, Human
aaaugaugccccaaagaaaagucc

SEQ ID NO: 462525 - RNA, 23 nt, Human
aacaaaaaaacaaacaaaaacaa

SEQ ID NO: 462526 - RNA, 25 nt, Human
aacaaaaaaacaaacaaaaacaaaa

SEQ ID NO: 462527 - RNA, 24 nt, Human
aacaaaaacaaaagccaaaaaaaa

SEQ ID NO: 462528 - RNA, 19 nt, Human
aacagaacauauggcuuua

SEQ ID NO: 462529 - RNA, 25 nt, Human
aacccuggccauggcuggggguagc

SEQ ID NO: 462530 - RNA, 24 nt, Human
aacuaccaaacgaaacaaaaaaac

SEQ ID NO: 462531 - RNA, 26 nt, Human
aacuaccaaacgaaacaaaaaaacaa

SEQ ID NO: 462532 - RNA, 22 nt, Human
aagacaaaacaaaaugaugccc

SEQ ID NO: 462533 - RNA, 19 nt, Human
aagcaaacaagacuugaac

SEQ ID NO: 462534 - RNA, 20 nt, Human
aagcaaacaagacuugaaca

SEQ ID NO: 462535 - RNA, 23 nt, Human
aagcaaacaagacuugaacagaa

SEQ ID NO: 462536 - RNA, 24 nt, Human
aauccccgagguccaacgccauuc

SEQ ID NO: 462537 - RNA, 20 nt, Human
acaaaacaaaaugaugcccc

SEQ ID NO: 462538 - RNA, 25 nt, Human
acaaaacaaaaugaugccccaaaga

SEQ ID NO: 462539 - RNA, 26 nt, Human
acaaaagccaaaaaaaaaaaaaaaaa

SEQ ID NO: 462540 - RNA, 21 nt, Human
acaaacaaaaacaaaagccaa

SEQ ID NO: 462541 - RNA, 22 nt, Human
acaagcucuccucaaacugaag

SEQ ID NO: 462542 - RNA, 24 nt, Human
accaaacgaaacaaaaaaacaaac

SEQ ID NO: 462543 - RNA, 20 nt, Human
acccgggaaaggggguuccu

SEQ ID NO: 462544 - RNA, 23 nt, Human
acgaaacaaaaaaacaaacaaaa

SEQ ID NO: 462545 - RNA, 24 nt, Human
acgaaacaaaaaaacaaacaaaaa

SEQ ID NO: 462546 - RNA, 25 nt, Human
acgaaacaaaaaaacaaacaaaaac

SEQ ID NO: 462547 - RNA, 24 nt, Human
agaaaacaauuaccaaucaaaaac

SEQ ID NO: 462548 - RNA, 19 nt, Human
agacguuugauucuuuuau

SEQ ID NO: 462549 - RNA, 18 nt, Human
agagcauauuaucuacca

SEQ ID NO: 462550 - RNA, 19 nt, Human
agauugcucugaaauguuc

SEQ ID NO: 462551 - RNA, 24 nt, Human
agccaaaaaaaaaaaaaaaaaucc

SEQ ID NO: 462552 - RNA, 25 nt, Human
agccaaaaaaaaaaaaaaaaauccc

SEQ ID NO: 462553 - RNA, 21 nt, Human
aggaggcgugcaaaggucaag

SEQ ID NO: 462554 - RNA, 19 nt, Human
aggcagaugaacuaccaaa

SEQ ID NO: 462555 - RNA, 22 nt, Human
agggacccacccuugccaccug

SEQ ID NO: 462556 - RNA, 21 nt, Human
auaugaaacaagcucuccuca

SEQ ID NO: 462557 - RNA, 21 nt, Human
auccugguaacaguuuuccuc

SEQ ID NO: 462558 - RNA, 23 nt, Human
augaacuaccaaacgaaacaaaa

SEQ ID NO: 462559 - RNA, 23 nt, Human
augaagcaagacacuguuaccuu

SEQ ID NO: 462560 - RNA, 25 nt, Human
caaaaaaaaaaaaaaaaaucccaaa

SEQ ID NO: 462561 - RNA, 22 nt, Human
caaaacaaaaugaugccccaaa

SEQ ID NO: 462562 - RNA, 31 nt, Human
caaaacacaagccauauacacuccaaauagg

SEQ ID NO: 462563 - RNA, 27 nt, Human
caaaacucaccaccaggcgagaccaga

SEQ ID NO: 462564 - RNA, 20 nt, Human
caaaauaacacuuagagggc

SEQ ID NO: 462565 - RNA, 19 nt, Human
caaaaugagggcacacuug

SEQ ID NO: 462566 - RNA, 20 nt, Human
caaagaaaagucccagaggc

SEQ ID NO: 462567 - RNA, 25 nt, Human
caagguacaguaaacaauuagcaug

SEQ ID NO: 462568 - RNA, 22 nt, Human
caauacaauauaaacauacgca

SEQ ID NO: 462569 - RNA, 24 nt, Human
caccaguggagccaaacccuggcc

SEQ ID NO: 462570 - RNA, 21 nt, Human
cacuauuugagcaagucacca

SEQ ID NO: 462571 - RNA, 22 nt, Human
cagaggaggcccaaggacaguc

SEQ ID NO: 462572 - RNA, 18 nt, Human
cagcuuggugggcuccag

SEQ ID NO: 462573 - RNA, 21 nt, Human
cagggcuuacugcugacucca

SEQ ID NO: 462574 - RNA, 23 nt, Human
cagugggauauggauaugaaaca

SEQ ID NO: 462575 - RNA, 20 nt, Human
cauauggcuuuacgauaaca

SEQ ID NO: 462576 - RNA, 22 nt, Human
ccaaacccuggccauggcuggc

SEQ ID NO: 462577 - RNA, 20 nt, Human
ccacggaggccacgugugcc

SEQ ID NO: 462578 - RNA, 22 nt, Human
ccagcugaccccuccagagccc

SEQ ID NO: 462579 - RNA, 18 nt, Human
ccagggcuuacugcugac

SEQ ID NO: 462580 - RNA, 22 nt, Human
cccacccuugccaccuguccca

SEQ ID NO: 462581 - RNA, 18 nt, Human
ccccaaagaaaaguccca

SEQ ID NO: 462582 - RNA, 20 nt, Human
cccgagguccaacgccauuc

SEQ ID NO: 462583 - RNA, 19 nt, Human
cccugcuacgaaagacaaa

SEQ ID NO: 462584 - RNA, 19 nt, Human
ccgccuaauacuuuggucc

SEQ ID NO: 462585 - RNA, 24 nt, Human
cgaaacaaaaaaacaaacaaaaac

SEQ ID NO: 462586 - RNA, 20 nt, Human
cgaaagacaaaacaaaauga

SEQ ID NO: 462587 - RNA, 26 nt, Human
cgagaccagagcauauuaucuaccag

SEQ ID NO: 462588 - RNA, 18 nt, Human
cuauuacagaaaugaaaa

SEQ ID NO: 462589 - RNA, 22 nt, Human
cuccaaauagucuaguguuuca

SEQ ID NO: 462590 - RNA, 18 nt, Human
cuccauauggccgaggaa

SEQ ID NO: 462591 - RNA, 21 nt, Human
cugcaguccucagucagcagc

SEQ ID NO: 462592 - RNA, 19 nt, Human
cugguccugaucccuugca

SEQ ID NO: 462593 - RNA, 20 nt, Human
cuuggcuuggccccuccaac

SEQ ID NO: 462594 - RNA, 23 nt, Human
cuuuggucacacuaauaauuguc

SEQ ID NO: 462595 - RNA, 21 nt, Human
gaugccccaaagaaaaguccc

SEQ ID NO: 462596 - RNA, 18 nt, Human
gccaaaaaaaaaaaaaaa

SEQ ID NO: 462597 - RNA, 19 nt, Human
gcuccuugcccauuacagg

SEQ ID NO: 462598 - RNA, 21 nt, Human
ggagugcuggaaucuccacac

SEQ ID NO: 462599 - RNA, 23 nt, Human
ggccauggcuggcaaaacucacc

SEQ ID NO: 462600 - RNA, 19 nt, Human
ggcugugauguauuuuugu

SEQ ID NO: 462601 - RNA, 22 nt, Human
ggucuuucaaaccaaguuuaaa

SEQ ID NO: 462602 - RNA, 20 nt, Human
ggugcugcuuccagaggagg

SEQ ID NO: 462603 - RNA, 20 nt, Human
gugcaauauuuuuacacuuc

SEQ ID NO: 462604 - RNA, 19 nt, Human
gugcuggaaucuccacacc

SEQ ID NO: 462605 - RNA, 18 nt, Human
uaaaaggcagaugaacua

SEQ ID NO: 462606 - RNA, 22 nt, Human
uaaaaggcagaugaacuaccaa

SEQ ID NO: 462607 - RNA, 18 nt, Human
uaaaaguagaaacaaaau

SEQ ID NO: 462608 - RNA, 23 nt, Human
uaaaaugaaaaaggaaaucagaa

SEQ ID NO: 462609 - RNA, 20 nt, Human
uaacccuuucaccagacgau

SEQ ID NO: 462610 - RNA, 25 nt, Human
uaaguuagaacaaccaaaauaacac

SEQ ID NO: 462611 - RNA, 28 nt, Human
uaaguuagaacaaccaaaauaacacuua

SEQ ID NO: 462612 - RNA, 22 nt, Human
uaccacagaggccacaguggga

SEQ ID NO: 462613 - RNA, 22 nt, Human
uaccacggaggccacgugugcc

SEQ ID NO: 462614 - RNA, 22 nt, Human
uacgauaacaucaauuuaucaa

SEQ ID NO: 462615 - RNA, 21 nt, Human
uagaacaauacaauauaaaca

SEQ ID NO: 462616 - RNA, 26 nt, Human
uagagggcauuuucauucuacaacuc

SEQ ID NO: 462617 - RNA, 22 nt, Human
uaugaccccuccauauggccga

SEQ ID NO: 462618 - RNA, 23 nt, Human
uaugcagauugcucugaaauguu

SEQ ID NO: 462619 - RNA, 19 nt, Human
ucacuauauauauacacaa

SEQ ID NO: 462620 - RNA, 26 nt, Human
ucaggcagcccugaggcaagcaggag

SEQ ID NO: 462621 - RNA, 19 nt, Human
uccaaauagucuaguguuu

SEQ ID NO: 462622 - RNA, 24 nt, Human
uccaacgccauucaagucaggcag

SEQ ID NO: 462623 - RNA, 21 nt, Human
uccauaccacagaggccacag

SEQ ID NO: 462624 - RNA, 24 nt, Human
uccauaugcaauguaauguuuagg

SEQ ID NO: 462625 - RNA, 21 nt, Human
uccuccccauugucauauccu

SEQ ID NO: 462626 - RNA, 22 nt, Human
uccucugggggugcugcuucca

SEQ ID NO: 462627 - RNA, 19 nt, Human
ucuaauuccauuagcagca

SEQ ID NO: 462628 - RNA, 24 nt, Human
ucuaccaguaauccccgaggucca

SEQ ID NO: 462629 - RNA, 20 nt, Human
ucucccagcagucaguggga

SEQ ID NO: 462630 - RNA, 22 nt, Human
ucuguacaaugucuuagaaucu

SEQ ID NO: 462631 - RNA, 21 nt, Human
ugaaacaagcucuccucaaac

SEQ ID NO: 462632 - RNA, 21 nt, Human
ugaaauguucauuggugaugc

SEQ ID NO: 462633 - RNA, 22 nt, Human
ugaaauguucauuggugaugcu

SEQ ID NO: 462634 - RNA, 19 nt, Human
ugaauggguuaaaaggcag

SEQ ID NO: 462635 - RNA, 23 nt, Human
ugagugaaaaccucacaagguac

SEQ ID NO: 462636 - RNA, 19 nt, Human
ugauguauuuuuguauuga

SEQ ID NO: 462637 - RNA, 22 nt, Human
ugcaaaggucaagggacccacc

SEQ ID NO: 462638 - RNA, 25 nt, Human
ugccccaaagaaaagucccagaggc

SEQ ID NO: 462639 - RNA, 19 nt, Human
ugggaugcuacuucuaaaa

SEQ ID NO: 462640 - RNA, 21 nt, Human
ugggaugcuacuucuaaaaaa

SEQ ID NO: 462641 - RNA, 21 nt, Human
uguaaaaugaacgcacucuaa

SEQ ID NO: 462642 - RNA, 24 nt, Human
ugugcaauauuuuuacacuucuga

SEQ ID NO: 462643 - RNA, 23 nt, Human
uguuucaaauacaauagaucugu

SEQ ID NO: 462644 - RNA, 22 nt, Human
uucaagucaggcagcccugagg

SEQ ID NO: 462645 - RNA, 24 nt, Human
uucacuuguaggaauaaucauuuc

SEQ ID NO: 462646 - RNA, 22 nt, Human
uuccagaggaggcccaaggaca

SEQ ID NO: 462647 - RNA, 24 nt, Human
uuccauuagcagcacgagcauuuu

SEQ ID NO: 462648 - RNA, 23 nt, Human
uucuucuuuguggcuccuugccc

SEQ ID NO: 462649 - RNA, 27 nt, Human
uuuucagaauauccuuuugguuuuaaa

SEQ ID NO: 462650 - RNA, 21 nt, Human
aggcucccagccagccagcuc

SEQ ID NO: 462651 - RNA, 18 nt, Human
aggcugcugcuaagggga

SEQ ID NO: 462652 - RNA, 19 nt, Human
agggaucagaggcugcugc

SEQ ID NO: 462653 - RNA, 24 nt, Human
cacagaaucauuuacaaaaauaaa

SEQ ID NO: 462654 - RNA, 19 nt, Human
cacccugagguggaacccc

SEQ ID NO: 462655 - RNA, 22 nt, Human
cacucccgggccaugccauccu

SEQ ID NO: 462656 - RNA, 21 nt, Human
cacugugucgcugggcgaagu

SEQ ID NO: 462657 - RNA, 22 nt, Human
cacuugguuuggucucaaaggc

SEQ ID NO: 462658 - RNA, 19 nt, Human
cagcaggcccccggcggcc

SEQ ID NO: 462659 - RNA, 22 nt, Human
cagcaggcccccggcggccugg

SEQ ID NO: 462660 - RNA, 24 nt, Human
cccagccuggaccaucuuccuccu

SEQ ID NO: 462661 - RNA, 21 nt, Human
cccccggcggccugguggccc

SEQ ID NO: 462662 - RNA, 19 nt, Human
cccgggccaugccauccuu

SEQ ID NO: 462663 - RNA, 23 nt, Human
ccucaggcugcuaaugguucccu

SEQ ID NO: 462664 - RNA, 24 nt, Human
ccucccgccaggcccccgcccccc

SEQ ID NO: 462665 - RNA, 19 nt, Human
cgccaggcccccgcccccc

SEQ ID NO: 462666 - RNA, 24 nt, Human
cucaggcugcuaaugguucccucc

SEQ ID NO: 462667 - RNA, 21 nt, Human
gccaagggaucagaggcugcu

SEQ ID NO: 462668 - RNA, 21 nt, Human
gcucccagccagccagcuccu

SEQ ID NO: 462669 - RNA, 21 nt, Human
ggagacgggguccugcccgcc

SEQ ID NO: 462670 - RNA, 18 nt, Human
gggagacgggguccugcc

SEQ ID NO: 462671 - RNA, 21 nt, Human
ggucucaaaggcaaaaggaaa

SEQ ID NO: 462672 - RNA, 22 nt, Human
guccccgaggcucccagccagc

SEQ ID NO: 462673 - RNA, 24 nt, Human
gugagcugggagcaaggcugggcg

SEQ ID NO: 462674 - RNA, 19 nt, Human
uaaugguucccuccugcuu

SEQ ID NO: 462675 - RNA, 21 nt, Human
uaggaaggagccugaggcccg

SEQ ID NO: 462676 - RNA, 22 nt, Human
ucccagccuggaccaucuuccu

SEQ ID NO: 462677 - RNA, 21 nt, Human
ucgcugggcgaagucuggcuu

SEQ ID NO: 462678 - RNA, 23 nt, Human
ucuggcauaucuccucaauugca

SEQ ID NO: 462679 - RNA, 22 nt, Human
ugagcugggagcaaggcugggc

SEQ ID NO: 462680 - RNA, 18 nt, Human
ugcuaaggggaugcuccc

SEQ ID NO: 462681 - RNA, 18 nt, Human
uggaagcacuugguuugg

SEQ ID NO: 462682 - RNA, 20 nt, Human
aaaacauuucucucaacuaa

SEQ ID NO: 462683 - RNA, 20 nt, Human
aaaaguacgugcacagacuc

SEQ ID NO: 462684 - RNA, 23 nt, Human
aaacagagugaucuaaaacuaac

SEQ ID NO: 462685 - RNA, 22 nt, Human
aaacagccuuccacaauaaagu

SEQ ID NO: 462686 - RNA, 24 nt, Human
aaaccaaaacaaaacuauggaaga

SEQ ID NO: 462687 - RNA, 21 nt, Human
aaaccucuagagcugauacug

SEQ ID NO: 462688 - RNA, 18 nt, Human
aaacuaaaacacaaaugu

SEQ ID NO: 462689 - RNA, 18 nt, Human
aaacuaaaacacaaaugu

SEQ ID NO: 462690 - RNA, 20 nt, Human
aaagagacuugaaguagcca

SEQ ID NO: 462691 - RNA, 21 nt, Human
aaccaugauauaaaacauuuc

SEQ ID NO: 462692 - RNA, 18 nt, Human
aagaaacuaaaacacaaa

SEQ ID NO: 462693 - RNA, 19 nt, Human
aagagacaugggcaauucc

SEQ ID NO: 462694 - RNA, 18 nt, Human
aauaaaucauagagaaaa

SEQ ID NO: 462695 - RNA, 20 nt, Human
aaucaacaccuuauuugaaa

SEQ ID NO: 462696 - RNA, 20 nt, Human
acaaaaaaaaaaaaugcaga

SEQ ID NO: 462697 - RNA, 20 nt, Human
acaaagcaaaauuaugucuu

SEQ ID NO: 462698 - RNA, 22 nt, Human
acauuucagacaauuuuuucuu

SEQ ID NO: 462699 - RNA, 19 nt, Human
accccagcuuaguuagccg

SEQ ID NO: 462700 - RNA, 21 nt, Human
acugcaguugauggaaggcag

SEQ ID NO: 462701 - RNA, 23 nt, Human
agaaacuaaaacacaaauguuuu

SEQ ID NO: 462702 - RNA, 18 nt, Human
agaaagaaggaaaagcua

SEQ ID NO: 462703 - RNA, 24 nt, Human
agaaagaaggaaaagcuaacaaaa

SEQ ID NO: 462704 - RNA, 21 nt, Human
agacgcuccaagguccggagc

SEQ ID NO: 462705 - RNA, 19 nt, Human
agacuugaaguagccaaug

SEQ ID NO: 462706 - RNA, 23 nt, Human
agcaaaccucuagagcugauacu

SEQ ID NO: 462707 - RNA, 22 nt, Human
agcucuucucuuucuuccuuuc

SEQ ID NO: 462708 - RNA, 24 nt, Human
aggaaaggaaauacuucuuaagga

SEQ ID NO: 462709 - RNA, 19 nt, Human
aggaggagauauaaaucgg

SEQ ID NO: 462710 - RNA, 24 nt, Human
aggcccuuugcucagaaucagagg

SEQ ID NO: 462711 - RNA, 21 nt, Human
agggagcugcccgagagggag

SEQ ID NO: 462712 - RNA, 18 nt, Human
aguggaauuaguugcuac

SEQ ID NO: 462713 - RNA, 18 nt, Human
auauguaugugugcauau

SEQ ID NO: 462714 - RNA, 19 nt, Human
aucuuagauuuuugguuug

SEQ ID NO: 462715 - RNA, 23 nt, Human
auuacaaacuauuucagccauga

SEQ ID NO: 462716 - RNA, 21 nt, Human
auuacacugcaguugauggaa

SEQ ID NO: 462717 - RNA, 24 nt, Human
caaaacaaaacuauggaagaaaua

SEQ ID NO: 462718 - RNA, 22 nt, Human
caaaccucuagagcugauacug

SEQ ID NO: 462719 - RNA, 23 nt, Human
caaagggacaaggaaaaccaacg

SEQ ID NO: 462720 - RNA, 22 nt, Human
caaaucccagagauggcuguga

SEQ ID NO: 462721 - RNA, 24 nt, Human
caaccuccauagcuuaugccuccu

SEQ ID NO: 462722 - RNA, 22 nt, Human
caacuggcucugccagggguaa

SEQ ID NO: 462723 - RNA, 21 nt, Human
caauagcaaaaacugguguca

SEQ ID NO: 462724 - RNA, 22 nt, Human
caauagcaaaaacuggugucag

SEQ ID NO: 462725 - RNA, 18 nt, Human
caauguaaagcagcauaa

SEQ ID NO: 462726 - RNA, 18 nt, Human
cacugcaacuggcucugc

SEQ ID NO: 462727 - RNA, 19 nt, Human
cagaauuccugagaauagu

SEQ ID NO: 462728 - RNA, 24 nt, Human
cagaugcuauaaaaauggaggagu

SEQ ID NO: 462729 - RNA, 21 nt, Human
caguagccagacucuagacgc

SEQ ID NO: 462730 - RNA, 22 nt, Human
ccacauaaaucaacaccuuauu

SEQ ID NO: 462731 - RNA, 18 nt, Human
ccccaucacuccugccuc

SEQ ID NO: 462732 - RNA, 23 nt, Human
ccccaucacuccugccucaucug

SEQ ID NO: 462733 - RNA, 20 nt, Human
cccccgcgcguccagugccg

SEQ ID NO: 462734 - RNA, 22 nt, Human
cccccgcgcguccagugccgca

SEQ ID NO: 462735 - RNA, 20 nt, Human
ccccuuagcggcuacucugg

SEQ ID NO: 462736 - RNA, 26 nt, Human
ccgaauaaacauauuacaauagcaaa

SEQ ID NO: 462737 - RNA, 20 nt, Human
ccgcaucccccgcgcgucca

SEQ ID NO: 462738 - RNA, 19 nt, Human
ccuggcuuccugcaauguc

SEQ ID NO: 462739 - RNA, 18 nt, Human
cgagagggaggcggagga

SEQ ID NO: 462740 - RNA, 20 nt, Human
cggcacuugagggaaguuca

SEQ ID NO: 462741 - RNA, 27 nt, Human
cuagcacuuuucacuugaguuuuccuc

SEQ ID NO: 462742 - RNA, 25 nt, Human
cucaacuaaaacagagugaucuaaa

SEQ ID NO: 462743 - RNA, 20 nt, Human
cugaaaaaacacuacccaau

SEQ ID NO: 462744 - RNA, 20 nt, Human
cugcaacuggcucugccagg

SEQ ID NO: 462745 - RNA, 19 nt, Human
cugcccgagagggaggcgg

SEQ ID NO: 462746 - RNA, 20 nt, Human
cuggucuuuuauauguuaga

SEQ ID NO: 462747 - RNA, 21 nt, Human
cuggucuuuuauauguuagaa

SEQ ID NO: 462748 - RNA, 19 nt, Human
cuucagcuuggaacaacuu

SEQ ID NO: 462749 - RNA, 22 nt, Human
cuugugcacauuuacauggaaa

SEQ ID NO: 462750 - RNA, 19 nt, Human
cuuucaaaaccucaccacc

SEQ ID NO: 462751 - RNA, 19 nt, Human
gaacucaaccauacuuucc

SEQ ID NO: 462752 - RNA, 25 nt, Human
gagaaagaaggaaaagcuaacaaaa

SEQ ID NO: 462753 - RNA, 19 nt, Human
gagcaaaccucuagagcug

SEQ ID NO: 462754 - RNA, 18 nt, Human
gagcugcauaaaccacaa

SEQ ID NO: 462755 - RNA, 21 nt, Human
gcacagacucagacaauuaca

SEQ ID NO: 462756 - RNA, 23 nt, Human
gcagagacguuucuguuuuucuu

SEQ ID NO: 462757 - RNA, 21 nt, Human
gccggugucguugucauggga

SEQ ID NO: 462758 - RNA, 19 nt, Human
gcgucccagccggcuuagg

SEQ ID NO: 462759 - RNA, 21 nt, Human
gcuccaagguccggagccuca

SEQ ID NO: 462760 - RNA, 18 nt, Human
ggagcaugagaaccucuc

SEQ ID NO: 462761 - RNA, 20 nt, Human
ggcagaaagccaccccagcu

SEQ ID NO: 462762 - RNA, 24 nt, Human
ggcccuuugcucagaaucagagga

SEQ ID NO: 462763 - RNA, 24 nt, Human
gggaacgcgggagggcggucuagc

SEQ ID NO: 462764 - RNA, 21 nt, Human
ggggagcaugagaaccucucu

SEQ ID NO: 462765 - RNA, 24 nt, Human
guauacauguaccuaacaaaaaaa

SEQ ID NO: 462766 - RNA, 25 nt, Human
guccggagccucagcgagcgcacug

SEQ ID NO: 462767 - RNA, 19 nt, Human
uaaaacagagugaucuaaa

SEQ ID NO: 462768 - RNA, 20 nt, Human
uaaaacagagugaucuaaaa

SEQ ID NO: 462769 - RNA, 19 nt, Human
uaaaccaaaacaaaacuau

SEQ ID NO: 462770 - RNA, 23 nt, Human
uaaauccccuguggcacagaucc

SEQ ID NO: 462771 - RNA, 24 nt, Human
uaagcagcauucauguaauacaga

SEQ ID NO: 462772 - RNA, 22 nt, Human
uaaggagggggggggagcauga

SEQ ID NO: 462773 - RNA, 18 nt, Human
uacaaauaaggagggggg

SEQ ID NO: 462774 - RNA, 26 nt, Human
uacaauagcaaaaacuggugucagag

SEQ ID NO: 462775 - RNA, 18 nt, Human
uacacugcaguugaugga

SEQ ID NO: 462776 - RNA, 22 nt, Human
uacccacgaugcucgauuuaau

SEQ ID NO: 462777 - RNA, 21 nt, Human
uacuuagucacaggggcugaa

SEQ ID NO: 462778 - RNA, 25 nt, Human
uagagaaauacuggcauauauaugu

SEQ ID NO: 462779 - RNA, 21 nt, Human
uauaaaaagaaacuuaagauc

SEQ ID NO: 462780 - RNA, 22 nt, Human
uauguaugugugcauaugugug

SEQ ID NO: 462781 - RNA, 18 nt, Human
ucaaaucccagagauggc

SEQ ID NO: 462782 - RNA, 20 nt, Human
ucagacaaauguugcuguuc

SEQ ID NO: 462783 - RNA, 24 nt, Human
ucagcucuucucuuucuuccuuuc

SEQ ID NO: 462784 - RNA, 18 nt, Human
ucaggcagguguauacau

SEQ ID NO: 462785 - RNA, 23 nt, Human
uccaagcauauaucucccugaga

SEQ ID NO: 462786 - RNA, 19 nt, Human
uccacaauaaaguauggau

SEQ ID NO: 462787 - RNA, 21 nt, Human
uccauuguguuugaucugguc

SEQ ID NO: 462788 - RNA, 24 nt, Human
ucuagcguccggcuccccuuagcg

SEQ ID NO: 462789 - RNA, 18 nt, Human
ucucucaacuaaaacaga

SEQ ID NO: 462790 - RNA, 24 nt, Human
ucucuggaaucugaauggaagagu

SEQ ID NO: 462791 - RNA, 22 nt, Human
ucugaacuuucuugagugcccc

SEQ ID NO: 462792 - RNA, 22 nt, Human
ucuggucuuuuauauguuagaa

SEQ ID NO: 462793 - RNA, 23 nt, Human
ucuucugccauucaggccuugaa

SEQ ID NO: 462794 - RNA, 22 nt, Human
ucuuucuuccuuuccaaccucc

SEQ ID NO: 462795 - RNA, 18 nt, Human
ugaaaaaacacuacccac

SEQ ID NO: 462796 - RNA, 21 nt, Human
ugaaaaaagaaacuaaaacac

SEQ ID NO: 462797 - RNA, 20 nt, Human
ugaaaaagcguaaguguugc

SEQ ID NO: 462798 - RNA, 22 nt, Human
ugaaaagacaaguuagaauaug

SEQ ID NO: 462799 - RNA, 28 nt, Human
ugaaaagacaaguuagaauaugaaaaua

SEQ ID NO: 462800 - RNA, 23 nt, Human
ugaaauagaaauuccacaacaaa

SEQ ID NO: 462801 - RNA, 18 nt, Human
ugaccacuaaaggugaug

SEQ ID NO: 462802 - RNA, 18 nt, Human
ugagaauagugugugcua

SEQ ID NO: 462803 - RNA, 18 nt, Human
ugaggggugggcguugag

SEQ ID NO: 462804 - RNA, 24 nt, Human
ugagugccccaucacuccugccuc

SEQ ID NO: 462805 - RNA, 24 nt, Human
ugcaauccgacaccugcuguagcc

SEQ ID NO: 462806 - RNA, 19 nt, Human
ugcaguggcagaugcagag

SEQ ID NO: 462807 - RNA, 18 nt, Human
ugccaucauuucuuccca

SEQ ID NO: 462808 - RNA, 21 nt, Human
ugcccgagagggaggcggagg

SEQ ID NO: 462809 - RNA, 19 nt, Human
ugccuccucugaacuuucu

SEQ ID NO: 462810 - RNA, 23 nt, Human
ugcuuugcuugauuggacaaaua

SEQ ID NO: 462811 - RNA, 24 nt, Human
uggaaaucugucuuucaaaaccuc

SEQ ID NO: 462812 - RNA, 19 nt, Human
uggaacaacuugucaaggc

SEQ ID NO: 462813 - RNA, 23 nt, Human
uggaacagacauacucauagaua

SEQ ID NO: 462814 - RNA, 19 nt, Human
uggagagaaagaaggaaaa

SEQ ID NO: 462815 - RNA, 19 nt, Human
ugggagcagaagacuuuac

SEQ ID NO: 462816 - RNA, 19 nt, Human
ugggagugggagcagaaga

SEQ ID NO: 462817 - RNA, 20 nt, Human
ugguagguaaacccugggac

SEQ ID NO: 462818 - RNA, 18 nt, Human
ugucaugggaacgcggga

SEQ ID NO: 462819 - RNA, 21 nt, Human
uguuaaaaauaaaccaaaaca

SEQ ID NO: 462820 - RNA, 24 nt, Human
uucauguaauacagaauuccugag

SEQ ID NO: 462821 - RNA, 19 nt, Human
uuccauuguguuugaucug

SEQ ID NO: 462822 - RNA, 24 nt, Human
uucuguggcccuaauuuggaaaag

SEQ ID NO: 462823 - RNA, 20 nt, Human
uugcuacgauugcuacaaau

SEQ ID NO: 462824 - RNA, 19 nt, Human
uugguuugaccacuaaagg

SEQ ID NO: 462825 - RNA, 24 nt, Human
uuucaaaaccucaccacccucuuu

SEQ ID NO: 462826 - RNA, 24 nt, Human
uuugccaagcuuugaggcugguua

SEQ ID NO: 462827 - RNA, 18 nt, Human
acaaggguuucccuggac

SEQ ID NO: 462828 - RNA, 23 nt, Human
aucaaaauacaaggguuucccug

SEQ ID NO: 462829 - RNA, 25 nt, Human
caagcagguuuuaaagugcacuauu

SEQ ID NO: 462830 - RNA, 21 nt, Human
ccuggacacuugguaaccaag

SEQ ID NO: 462831 - RNA, 23 nt, Human
uuuaaagugcacuauugugucca

SEQ ID NO: 462832 - RNA, 19 nt, Human
aaacagagccagcugcuaa

SEQ ID NO: 462833 - RNA, 24 nt, Human
aaacugguccuguccuggccccua

SEQ ID NO: 462834 - RNA, 24 nt, Human
aacaaagucaucauaagguaacca

SEQ ID NO: 462835 - RNA, 21 nt, Human
aacagagccagcugcuaacgg

SEQ ID NO: 462836 - RNA, 27 nt, Human
aacagcuuuaagggggagagccgacca

SEQ ID NO: 462837 - RNA, 24 nt, Human
aacaggcaaaccccagaaagucca

SEQ ID NO: 462838 - RNA, 21 nt, Human
aacugguccuguccuggcccc

SEQ ID NO: 462839 - RNA, 21 nt, Human
aacuucuucccuaacccaggg

SEQ ID NO: 462840 - RNA, 27 nt, Human
aagcaagcaggcccggggcugcuuccc

SEQ ID NO: 462841 - RNA, 20 nt, Human
aagcagcuuggauccccagc

SEQ ID NO: 462842 - RNA, 20 nt, Human
aagggggagagccgucugcc

SEQ ID NO: 462843 - RNA, 18 nt, Human
acagagccagcugcuaac

SEQ ID NO: 462844 - RNA, 23 nt, Human
accaccauaucuggaaagaggua

SEQ ID NO: 462845 - RNA, 21 nt, Human
acugguccuguccuggccccu

SEQ ID NO: 462846 - RNA, 21 nt, Human
agaacaugaacccccauugag

SEQ ID NO: 462847 - RNA, 19 nt, Human
agaaugaguggugggacag

SEQ ID NO: 462848 - RNA, 18 nt, Human
agagagaagaagggaggg

SEQ ID NO: 462849 - RNA, 22 nt, Human
agagguggcagcauaccacagg

SEQ ID NO: 462850 - RNA, 23 nt, Human
agccgggcagcuggcagcuucca

SEQ ID NO: 462851 - RNA, 23 nt, Human
agccucggaaugcaccaggcacc

SEQ ID NO: 462852 - RNA, 23 nt, Human
aggaacgcaggcagugaagcugc

SEQ ID NO: 462853 - RNA, 20 nt, Human
aggaagcaagcaggcccggg

SEQ ID NO: 462854 - RNA, 22 nt, Human
aggaagcaagcaggcccggggc

SEQ ID NO: 462855 - RNA, 27 nt, Human
aggaaggcccaagaagucucuggcucu

SEQ ID NO: 462856 - RNA, 19 nt, Human
aggauucccccagugggag

SEQ ID NO: 462857 - RNA, 21 nt, Human
aggcaaaccccagaaagucca

SEQ ID NO: 462858 - RNA, 18 nt, Human
aggcagggcuggccucgg

SEQ ID NO: 462859 - RNA, 23 nt, Human
aggcagggcuggccucggcugcc

SEQ ID NO: 462860 - RNA, 19 nt, Human
aggggaggcaagggagaau

SEQ ID NO: 462861 - RNA, 22 nt, Human
aucccugcuauuccugcauccc

SEQ ID NO: 462862 - RNA, 22 nt, Human
caaaggugggcagguccucucu

SEQ ID NO: 462863 - RNA, 24 nt, Human
caacuccugcacugaggaaccccu

SEQ ID NO: 462864 - RNA, 21 nt, Human
caagcagcuuggauccccagc

SEQ ID NO: 462865 - RNA, 22 nt, Human
caagcagcuuggauccccagcc

SEQ ID NO: 462866 - RNA, 22 nt, Human
cacaccccugcucuggcccacu

SEQ ID NO: 462867 - RNA, 18 nt, Human
cacgcaggcuucuaaggg

SEQ ID NO: 462868 - RNA, 19 nt, Human
cacuaccaagccauccccc

SEQ ID NO: 462869 - RNA, 24 nt, Human
cagcagguggcccacuuaccuucc

SEQ ID NO: 462870 - RNA, 23 nt, Human
cagcauaccacagggcaaggaca

SEQ ID NO: 462871 - RNA, 18 nt, Human
caggaacaaacgccaaag

SEQ ID NO: 462872 - RNA, 21 nt, Human
caggcaaaccccagaaagucc

SEQ ID NO: 462873 - RNA, 24 nt, Human
cagggcaaggacagcaauucccuu

SEQ ID NO: 462874 - RNA, 18 nt, Human
cagggcagggacagggcc

SEQ ID NO: 462875 - RNA, 18 nt, Human
caguggacggucacuuuc

SEQ ID NO: 462876 - RNA, 18 nt, Human
caguguuggggggugccu

SEQ ID NO: 462877 - RNA, 23 nt, Human
ccaacccaggcagggcuggccuc

SEQ ID NO: 462878 - RNA, 26 nt, Human
ccacuaccaagccaucccccagggaa

SEQ ID NO: 462879 - RNA, 18 nt, Human
ccagaaaguccacuacca

SEQ ID NO: 462880 - RNA, 22 nt, Human
ccaggaacgcaggcagugaagc

SEQ ID NO: 462881 - RNA, 20 nt, Human
cccagaaaguccacuaccaa

SEQ ID NO: 462882 - RNA, 19 nt, Human
ccccagaaaguccacuacc

SEQ ID NO: 462883 - RNA, 20 nt, Human
ccccauugaggaagcccagg

SEQ ID NO: 462884 - RNA, 19 nt, Human
ccccuaggggguggcaggc

SEQ ID NO: 462885 - RNA, 19 nt, Human
ccccuggucccuggugugg

SEQ ID NO: 462886 - RNA, 23 nt, Human
cccucaagcagcuuggaucccca

SEQ ID NO: 462887 - RNA, 20 nt, Human
cccugguguggugcugccuc

SEQ ID NO: 462888 - RNA, 18 nt, Human
ccuccaaccaccauaucu

SEQ ID NO: 462889 - RNA, 20 nt, Human
ccugcacugaggaaccccuc

SEQ ID NO: 462890 - RNA, 19 nt, Human
cgaccagcuggaacagcaa

SEQ ID NO: 462891 - RNA, 21 nt, Human
cuagcuccauccuuccauucc

SEQ ID NO: 462892 - RNA, 24 nt, Human
cucagggagaagaacugggaguuu

SEQ ID NO: 462893 - RNA, 20 nt, Human
cucuagggcuuaccuggccc

SEQ ID NO: 462894 - RNA, 22 nt, Human
cugcccaccagccaagaccagg

SEQ ID NO: 462895 - RNA, 22 nt, Human
cuggcguaacaggcaaacccca

SEQ ID NO: 462896 - RNA, 23 nt, Human
cuugggagccaagcccucccagg

SEQ ID NO: 462897 - RNA, 20 nt, Human
gaaggcccaagaagucucug

SEQ ID NO: 462898 - RNA, 19 nt, Human
gaaucguaaaauuccuaug

SEQ ID NO: 462899 - RNA, 19 nt, Human
gacacucacaccauugcca

SEQ ID NO: 462900 - RNA, 23 nt, Human
gagggggcugggagcaagcuauc

SEQ ID NO: 462901 - RNA, 24 nt, Human
gauccgagcccccugcugaucuca

SEQ ID NO: 462902 - RNA, 22 nt, Human
gcaagggagaaugggcucugaa

SEQ ID NO: 462903 - RNA, 19 nt, Human
gcagagcuggccugcagcg

SEQ ID NO: 462904 - RNA, 20 nt, Human
gccacaggcuuccccuuccc

SEQ ID NO: 462905 - RNA, 25 nt, Human
gcccugggacuucuugggagcccca

SEQ ID NO: 462906 - RNA, 19 nt, Human
gccucggcugcccugggac

SEQ ID NO: 462907 - RNA, 21 nt, Human
gccugcagcgggcuccagugu

SEQ ID NO: 462908 - RNA, 20 nt, Human
gcucagggagaagaacuggg

SEQ ID NO: 462909 - RNA, 23 nt, Human
gcuggccucggcugcccugggac

SEQ ID NO: 462910 - RNA, 26 nt, Human
gcuuucuagcuccauccuuccauucc

SEQ ID NO: 462911 - RNA, 19 nt, Human
ggaaaggccuccacuauag

SEQ ID NO: 462912 - RNA, 18 nt, Human
ggaacagcuuuaaggggg

SEQ ID NO: 462913 - RNA, 21 nt, Human
ggaaugcaccaggcaccacua

SEQ ID NO: 462914 - RNA, 25 nt, Human
ggagaacaaagucaucauaaggaag

SEQ ID NO: 462915 - RNA, 19 nt, Human
ggcagggcuggccucggcu

SEQ ID NO: 462916 - RNA, 19 nt, Human
ggccacacuuaaagcuuag

SEQ ID NO: 462917 - RNA, 20 nt, Human
ggccugugaagggcugaggg

SEQ ID NO: 462918 - RNA, 20 nt, Human
ggcugaggguggcuucacca

SEQ ID NO: 462919 - RNA, 21 nt, Human
gggauuccugcuccucugcuc

SEQ ID NO: 462920 - RNA, 21 nt, Human
gggcaguggacggucacuuuc

SEQ ID NO: 462921 - RNA, 18 nt, Human
ggggggugccugggcacc

SEQ ID NO: 462922 - RNA, 21 nt, Human
ggggugccugggcaccccugg

SEQ ID NO: 462923 - RNA, 20 nt, Human
gguggcccacuuaccuuccc

SEQ ID NO: 462924 - RNA, 24 nt, Human
ggugguugggagugggaugggugu

SEQ ID NO: 462925 - RNA, 21 nt, Human
gguguggugcugccucaggag

SEQ ID NO: 462926 - RNA, 18 nt, Human
gucaguuucuccaaccca

SEQ ID NO: 462927 - RNA, 18 nt, Human
gugaagggcugagggugg

SEQ ID NO: 462928 - RNA, 18 nt, Human
gugggaugggugucggag

SEQ ID NO: 462929 - RNA, 23 nt, Human
guggguccccucucugcaggccc

SEQ ID NO: 462930 - RNA, 21 nt, Human
guguaacaccauugcauccag

SEQ ID NO: 462931 - RNA, 22 nt, Human
uaaagcuuagaaguccgagucu

SEQ ID NO: 462932 - RNA, 23 nt, Human
uaaaugaauacuacacuccuucc

SEQ ID NO: 462933 - RNA, 18 nt, Human
uaacaggcaaaccccaga

SEQ ID NO: 462934 - RNA, 21 nt, Human
uaacaggcaaaccccagaaag

SEQ ID NO: 462935 - RNA, 25 nt, Human
uaaggcaacuuugguccaagguuga

SEQ ID NO: 462936 - RNA, 21 nt, Human
uacauggaguggggcucggca

SEQ ID NO: 462937 - RNA, 20 nt, Human
uagggcuuaccuggcccacu

SEQ ID NO: 462938 - RNA, 19 nt, Human
ucacaccccugcucuggcc

SEQ ID NO: 462939 - RNA, 21 nt, Human
uccaagaacaugaacccccau

SEQ ID NO: 462940 - RNA, 21 nt, Human
uccaagguugacccccucaag

SEQ ID NO: 462941 - RNA, 26 nt, Human
ucccccagugggagggagaacaaagu

SEQ ID NO: 462942 - RNA, 20 nt, Human
ucccugaagcccuuuuaccu

SEQ ID NO: 462943 - RNA, 21 nt, Human
uccugcaucccccugcucuuc

SEQ ID NO: 462944 - RNA, 18 nt, Human
uccuggauauuccugguu

SEQ ID NO: 462945 - RNA, 21 nt, Human
ucugcccaccagccaagacca

SEQ ID NO: 462946 - RNA, 23 nt, Human
ucuuagggcuggauccgagcccc

SEQ ID NO: 462947 - RNA, 18 nt, Human
ugaacaaaucagggccac

SEQ ID NO: 462948 - RNA, 24 nt, Human
ugaacccccauugaggaagcccag

SEQ ID NO: 462949 - RNA, 22 nt, Human
ugaagcccuuuuaccacaggcu

SEQ ID NO: 462950 - RNA, 27 nt, Human
ugaagcuagggggagauuagcccagug

SEQ ID NO: 462951 - RNA, 19 nt, Human
ugacaaauaccaagcucag

SEQ ID NO: 462952 - RNA, 21 nt, Human
ugaguagacuuaaggcacaaa

SEQ ID NO: 462953 - RNA, 22 nt, Human
ugcccugggacuucuugggagc

SEQ ID NO: 462954 - RNA, 22 nt, Human
uggaaacagagccagcugcuaa

SEQ ID NO: 462955 - RNA, 19 nt, Human
uggcacaugacaaauacca

SEQ ID NO: 462956 - RNA, 19 nt, Human
uggcacuuaagauacaacu

SEQ ID NO: 462957 - RNA, 18 nt, Human
uggcagcauaccacaggg

SEQ ID NO: 462958 - RNA, 20 nt, Human
ugggaaguagggggcgcucu

SEQ ID NO: 462959 - RNA, 22 nt, Human
ugggagugggaugggugucggg

SEQ ID NO: 462960 - RNA, 18 nt, Human
uggggagggggcugggag

SEQ ID NO: 462961 - RNA, 23 nt, Human
uggggcugugcuguguccagaug

SEQ ID NO: 462962 - RNA, 19 nt, Human
uggggggugccugggcacc

SEQ ID NO: 462963 - RNA, 21 nt, Human
uggugcugccucaggagggca

SEQ ID NO: 462964 - RNA, 22 nt, Human
uguccagaugggcuccaugggg

SEQ ID NO: 462965 - RNA, 19 nt, Human
ugucggaggcucccuggga

SEQ ID NO: 462966 - RNA, 22 nt, Human
uuaagggggagagccgucugcc

SEQ ID NO: 462967 - RNA, 18 nt, Human
uucccucugugccgugag

SEQ ID NO: 462968 - RNA, 22 nt, Human
uuucuagcuccauccuuccauu

SEQ ID NO: 462969 - RNA, 24 nt, Human
uuucuagcuccauccuuccauucc

SEQ ID NO: 462970 - RNA, 23 nt, Human
uuugguccaagguugacccccuc

SEQ ID NO: 462971 - RNA, 22 nt, Human
uuuuuuuuuuuuuugagaugga

SEQ ID NO: 462972 - RNA, 27 nt, Human
uuuuuuuuuuuuuuuuuuuuuuugggg

SEQ ID NO: 462973 - RNA, 24 nt, Human
aaagugcugagauuacaggcguga

SEQ ID NO: 462974 - RNA, 19 nt, Human
aacaauccuucugccucag

SEQ ID NO: 462975 - RNA, 26 nt, Human
aagugcugagauuacaggcgugagcc

SEQ ID NO: 462976 - RNA, 19 nt, Human
acccaggcuggagugcagu

SEQ ID NO: 462977 - RNA, 25 nt, Human
acucuguuacccaggcuggagugca

SEQ ID NO: 462978 - RNA, 19 nt, Human
acugauuuacauucccacc

SEQ ID NO: 462979 - RNA, 23 nt, Human
agauguaaccuaacaggugugag

SEQ ID NO: 462980 - RNA, 22 nt, Human
agauuacaggcgugagccacca

SEQ ID NO: 462981 - RNA, 24 nt, Human
agauuacaggcgugagccaccaug

SEQ ID NO: 462982 - RNA, 21 nt, Human
agcacuuuuucauauaccugu

SEQ ID NO: 462983 - RNA, 18 nt, Human
agccaccaugcccagccc

SEQ ID NO: 462984 - RNA, 21 nt, Human
agcugcaggaacacggagugg

SEQ ID NO: 462985 - RNA, 25 nt, Human
aggcuggagugcaguaaugcgaucu

SEQ ID NO: 462986 - RNA, 23 nt, Human
aguagcugggauuacaggcgcgu

SEQ ID NO: 462987 - RNA, 25 nt, Human
aguagcugggauuacaggcgcgugc

SEQ ID NO: 462988 - RNA, 24 nt, Human
agugcaguaaugcgaucucggcuc

SEQ ID NO: 462989 - RNA, 21 nt, Human
auccuucugccucagccuccc

SEQ ID NO: 462990 - RNA, 24 nt, Human
caaagugcugagauuacaggcgug

SEQ ID NO: 462991 - RNA, 23 nt, Human
caaccuccaccucccggguucaa

SEQ ID NO: 462992 - RNA, 24 nt, Human
caccucggccucccaaagugcuga

SEQ ID NO: 462993 - RNA, 23 nt, Human
cacucuguuacccaggcuggagu

SEQ ID NO: 462994 - RNA, 24 nt, Human
cacucuguuacccaggcuggagug

SEQ ID NO: 462995 - RNA, 21 nt, Human
cacugcaaccuccaccucccg

SEQ ID NO: 462996 - RNA, 23 nt, Human
cacugcaaccuccaccucccggg

SEQ ID NO: 462997 - RNA, 25 nt, Human
caugguguuagccaggauggucucc

SEQ ID NO: 462998 - RNA, 20 nt, Human
ccaaagugcugagauuacag

SEQ ID NO: 462999 - RNA, 22 nt, Human
ccaaagugcugagauuacaggc

SEQ ID NO: 463000 - RNA, 22 nt, Human
ccaaagugcugagauuacaggc

SEQ ID NO: 463001 - RNA, 24 nt, Human
ccaaagugcugagauuacaggcgu

SEQ ID NO: 463002 - RNA, 20 nt, Human
ccaccacaccuggcuaaugu

SEQ ID NO: 463003 - RNA, 27 nt, Human
ccaccucccggguucaaacaauccuuu

SEQ ID NO: 463004 - RNA, 27 nt, Human
ccaucaugguguuagccaggauggucu

SEQ ID NO: 463005 - RNA, 23 nt, Human
cccgaguagcugggauuacaggc

SEQ ID NO: 463006 - RNA, 24 nt, Human
cccgaguagcugggauuacaggcg

SEQ ID NO: 463007 - RNA, 21 nt, Human
cccggguucaaacaauccuuc

SEQ ID NO: 463008 - RNA, 22 nt, Human
ccgaguagcugggauuacaggc

SEQ ID NO: 463009 - RNA, 18 nt, Human
ccuaacaggugugaggug

SEQ ID NO: 463010 - RNA, 24 nt, Human
ccuucugccucagccucccgagua

SEQ ID NO: 463011 - RNA, 24 nt, Human
cucacucuguuacccaggcuggag

SEQ ID NO: 463012 - RNA, 24 nt, Human
cucacugcaaccuccaccucccgg

SEQ ID NO: 463013 - RNA, 24 nt, Human
cucagccucccgaguagcugggau

SEQ ID NO: 463014 - RNA, 21 nt, Human
cucccaaagugcugagauuac

SEQ ID NO: 463015 - RNA, 21 nt, Human
cucccggguucaaacaauccu

SEQ ID NO: 463016 - RNA, 18 nt, Human
cuccugaccuugugauuc

SEQ ID NO: 463017 - RNA, 26 nt, Human
cucuacacuguuuuccacaauagcug

SEQ ID NO: 463018 - RNA, 18 nt, Human
cugcaaccuccaccuccc

SEQ ID NO: 463019 - RNA, 23 nt, Human
cugcaaccuccaccucccggguu

SEQ ID NO: 463020 - RNA, 23 nt, Human
cugccucagccucccgaguagcu

SEQ ID NO: 463021 - RNA, 23 nt, Human
cuuguucauuuuugcuuuucuug

SEQ ID NO: 463022 - RNA, 23 nt, Human
cuuuucuugccugagcuuuuggu

SEQ ID NO: 463023 - RNA, 18 nt, Human
gaacacggaguggagaag

SEQ ID NO: 463024 - RNA, 22 nt, Human
gaccuugugauucucccaccuc

SEQ ID NO: 463025 - RNA, 22 nt, Human
gaccuugugauucucccaccuc

SEQ ID NO: 463026 - RNA, 24 nt, Human
gaccuugugauucucccaccucgg

SEQ ID NO: 463027 - RNA, 18 nt, Human
gauuacaggcgcgugcca

SEQ ID NO: 463028 - RNA, 18 nt, Human
gauuacaggcgugagcca

SEQ ID NO: 463029 - RNA, 24 nt, Human
gauuacaggcgugagccaccaugc

SEQ ID NO: 463030 - RNA, 22 nt, Human
gcaaccuccaccucccggguuc

SEQ ID NO: 463031 - RNA, 19 nt, Human
gcaggaacacggaguggag

SEQ ID NO: 463032 - RNA, 19 nt, Human
ggagaagacuaagucugug

SEQ ID NO: 463033 - RNA, 19 nt, Human
ggucucagucuccugaccu

SEQ ID NO: 463034 - RNA, 18 nt, Human
guagcugggauuacaggc

SEQ ID NO: 463035 - RNA, 19 nt, Human
guagucagacuguaggugc

SEQ ID NO: 463036 - RNA, 18 nt, Human
guaucucauuguggcuuu

SEQ ID NO: 463037 - RNA, 20 nt, Human
gugaguuccuuauauaguuu

SEQ ID NO: 463038 - RNA, 24 nt, Human
gugauucucccaccucggccuccc

SEQ ID NO: 463039 - RNA, 24 nt, Human
uaauguuucauauuuuuaguagag

SEQ ID NO: 463040 - RNA, 27 nt, Human
uacaaaaauucccuuuucuccagaccc

SEQ ID NO: 463041 - RNA, 23 nt, Human
uacacuguuuuccacaauagcug

SEQ ID NO: 463042 - RNA, 22 nt, Human
uacaggcgcgugccaccacacc

SEQ ID NO: 463043 - RNA, 24 nt, Human
uacaggcgugagccaccaugccca

SEQ ID NO: 463044 - RNA, 22 nt, Human
uacccaggcuggagugcaguaa

SEQ ID NO: 463045 - RNA, 23 nt, Human
uaguagagauggguguuagccca

SEQ ID NO: 463046 - RNA, 24 nt, Human
uaguagagauggguguuagcccau

SEQ ID NO: 463047 - RNA, 27 nt, Human
uaguagagauggguguuagcccaucau

SEQ ID NO: 463048 - RNA, 23 nt, Human
uauacaaaaauucccuuuucucc

SEQ ID NO: 463049 - RNA, 18 nt, Human
uauuuuuuuuuuuuuuga

SEQ ID NO: 463050 - RNA, 24 nt, Human
ucacucuguuacccaggcuggagu

SEQ ID NO: 463051 - RNA, 23 nt, Human
ucacugcaaccuccaccucccgg

SEQ ID NO: 463052 - RNA, 24 nt, Human
ucacugcaaccuccaccucccggg

SEQ ID NO: 463053 - RNA, 25 nt, Human
ucacugcaaccuccaccucccgggu

SEQ ID NO: 463054 - RNA, 27 nt, Human
ucacugcaaccuccaccucccggguuc

SEQ ID NO: 463055 - RNA, 20 nt, Human
ucagccucccgaguagcugg

SEQ ID NO: 463056 - RNA, 24 nt, Human
ucccaaagugcugagauuacaggc

SEQ ID NO: 463057 - RNA, 24 nt, Human
ucccgaguagcugggauuacaggc

SEQ ID NO: 463058 - RNA, 20 nt, Human
ucccggguucaaacaauccu

SEQ ID NO: 463059 - RNA, 24 nt, Human
ucccggguucaaacaauccuucug

SEQ ID NO: 463060 - RNA, 18 nt, Human
ucggccucccaaagugcu

SEQ ID NO: 463061 - RNA, 24 nt, Human
ucucacucuguuacccaggcugga

SEQ ID NO: 463062 - RNA, 26 nt, Human
ucucacucuguuacccaggcuggagu

SEQ ID NO: 463063 - RNA, 27 nt, Human
ucucacucuguuacccaggcuggagug

SEQ ID NO: 463064 - RNA, 20 nt, Human
ucucuuaucuuuuugacaaa

SEQ ID NO: 463065 - RNA, 24 nt, Human
ucuguuacccaggcuggagugcag

SEQ ID NO: 463066 - RNA, 22 nt, Human
ugacaauagcagauguaaccua

SEQ ID NO: 463067 - RNA, 22 nt, Human
ugagauggagucucacucuguu

SEQ ID NO: 463068 - RNA, 18 nt, Human
ugagauuacaggcgugag

SEQ ID NO: 463069 - RNA, 22 nt, Human
ugagauuacaggcgugagccac

SEQ ID NO: 463070 - RNA, 23 nt, Human
ugagauuacaggcgugagccacc

SEQ ID NO: 463071 - RNA, 24 nt, Human
ugagauuacaggcgugagccacca

SEQ ID NO: 463072 - RNA, 25 nt, Human
ugagauuacaggcgugagccaccau

SEQ ID NO: 463073 - RNA, 24 nt, Human
ugaggugguaucucauuguggcuu

SEQ ID NO: 463074 - RNA, 22 nt, Human
ugcaguaaugcgaucucggcuc

SEQ ID NO: 463075 - RNA, 25 nt, Human
ugcccagccccuuugaccauuuuua

SEQ ID NO: 463076 - RNA, 24 nt, Human
ugccucagccucccgaguagcugg

SEQ ID NO: 463077 - RNA, 24 nt, Human
ugcugagauuacaggcgugagcca

SEQ ID NO: 463078 - RNA, 23 nt, Human
uggagugcaguaaugcgaucucg

SEQ ID NO: 463079 - RNA, 24 nt, Human
uggagugcaguaaugcgaucucgg

SEQ ID NO: 463080 - RNA, 18 nt, Human
ugggauuacaggcgcgug

SEQ ID NO: 463081 - RNA, 21 nt, Human
ugggauuacaggcgcgugcca

SEQ ID NO: 463082 - RNA, 22 nt, Human
ugggauuacaggcgcgugccac

SEQ ID NO: 463083 - RNA, 24 nt, Human
ugggauuacaggcgcgugccacca

SEQ ID NO: 463084 - RNA, 21 nt, Human
uguaaccuaacaggugugagg

SEQ ID NO: 463085 - RNA, 20 nt, Human
uguuaggucaugucucuagc

SEQ ID NO: 463086 - RNA, 22 nt, Human
uguuucauauuuuuaguagaga

SEQ ID NO: 463087 - RNA, 24 nt, Human
uguuucauauuuuuaguagagaug

SEQ ID NO: 463088 - RNA, 24 nt, Human
uuacccaggcuggagugcaguaau

SEQ ID NO: 463089 - RNA, 18 nt, Human
uuaguagagauggguguu

SEQ ID NO: 463090 - RNA, 24 nt, Human
uucaaacaauccuucugccucagc

SEQ ID NO: 463091 - RNA, 23 nt, Human
uucucccaaucuacaguccaccu

SEQ ID NO: 463092 - RNA, 20 nt, Human
uuucauauuuuuaguagaga

SEQ ID NO: 463093 - RNA, 20 nt, Human
uuuccacaauagcuguacug

SEQ ID NO: 463094 - RNA, 24 nt, Human
uuuccacaauagcuguacugauuu

SEQ ID NO: 463095 - RNA, 22 nt, Human
uuuguuuucuuuaaguucugug

SEQ ID NO: 463096 - RNA, 20 nt, Human
uuuuuaguagagaugggugu

SEQ ID NO: 463097 - RNA, 23 nt, Human
uuuuuuuuuuugagauggagucu

SEQ ID NO: 463098 - RNA, 26 nt, Human
uuuuuuuuuuuugagauggagucuca

SEQ ID NO: 463099 - RNA, 22 nt, Human
uuuuuuuuuuuuuugagaugga

SEQ ID NO: 463100 - RNA, 23 nt, Human
aaaaaacaagcauggcacaaaua

SEQ ID NO: 463101 - RNA, 24 nt, Human
aaaaaccugggugaaaaaacaagc

SEQ ID NO: 463102 - RNA, 26 nt, Human
aaacuaaaaccaagcaaaaacuggaa

SEQ ID NO: 463103 - RNA, 19 nt, Human
aaaguuugggaucagugug

SEQ ID NO: 463104 - RNA, 23 nt, Human
aaauacuaccuguguacaguaug

SEQ ID NO: 463105 - RNA, 25 nt, Human
aacaauccuuucccacccauucccc

SEQ ID NO: 463106 - RNA, 18 nt, Human
aaccaagcaaaaacugga

SEQ ID NO: 463107 - RNA, 23 nt, Human
aaccagacaagcuuuggauucac

SEQ ID NO: 463108 - RNA, 24 nt, Human
aacugguuuggcuuccaauuuuua

SEQ ID NO: 463109 - RNA, 21 nt, Human
aagauugccacauucuacauu

SEQ ID NO: 463110 - RNA, 24 nt, Human
aagcaaaaacuggaacaaauagga

SEQ ID NO: 463111 - RNA, 24 nt, Human
aagcaaaaacuggaacaaccccgg

SEQ ID NO: 463112 - RNA, 24 nt, Human
aauagagaauggguaagaggcagg

SEQ ID NO: 463113 - RNA, 23 nt, Human
acaggaugaacaggaacuguauu

SEQ ID NO: 463114 - RNA, 22 nt, Human
acccauuccccaaagaccccaa

SEQ ID NO: 463115 - RNA, 24 nt, Human
accucacccuccccuuccgacaca

SEQ ID NO: 463116 - RNA, 18 nt, Human
acucugccuggggcuugg

SEQ ID NO: 463117 - RNA, 18 nt, Human
agaaaaaagacacauaga

SEQ ID NO: 463118 - RNA, 18 nt, Human
agaaaggaaauuggaaaa

SEQ ID NO: 463119 - RNA, 19 nt, Human
agaacuugaauccuuugga

SEQ ID NO: 463120 - RNA, 19 nt, Human
agaauaaccaccgagaaaa

SEQ ID NO: 463121 - RNA, 20 nt, Human
agagaaaaaagacacauaga

SEQ ID NO: 463122 - RNA, 23 nt, Human
agauggacuagguuguagagaag

SEQ ID NO: 463123 - RNA, 18 nt, Human
aggauggagagaaaaaag

SEQ ID NO: 463124 - RNA, 18 nt, Human
aggcagagagggccgggc

SEQ ID NO: 463125 - RNA, 19 nt, Human
aggcagagagggccgggcg

SEQ ID NO: 463126 - RNA, 19 nt, Human
agguagggcuggucuccuu

SEQ ID NO: 463127 - RNA, 23 nt, Human
aguucuuuguuccaguggcccag

SEQ ID NO: 463128 - RNA, 22 nt, Human
augggaugggugagccccagcc

SEQ ID NO: 463129 - RNA, 21 nt, Human
caaacaauccuuucccaccca

SEQ ID NO: 463130 - RNA, 23 nt, Human
caaaccucacccuccccuuccga

SEQ ID NO: 463131 - RNA, 25 nt, Human
caaacuaaaaccaagcaaaaacugg

SEQ ID NO: 463132 - RNA, 26 nt, Human
caaacuaaaaccaagcaaaaacugga

SEQ ID NO: 463133 - RNA, 24 nt, Human
caaagccccuacucaccaccagcu

SEQ ID NO: 463134 - RNA, 20 nt, Human
cacccuccccuuccgacaca

SEQ ID NO: 463135 - RNA, 22 nt, Human
cacccuccccuuccgacacaaa

SEQ ID NO: 463136 - RNA, 22 nt, Human
cacucccuccucccuagacucg

SEQ ID NO: 463137 - RNA, 23 nt, Human
cagagaacaccaaacaugucaaa

SEQ ID NO: 463138 - RNA, 24 nt, Human
cagccgaaagcugccugacagugc

SEQ ID NO: 463139 - RNA, 22 nt, Human
cagugggcaaaccucacccucc

SEQ ID NO: 463140 - RNA, 23 nt, Human
cauauuccugguuugaucccaaa

SEQ ID NO: 463141 - RNA, 21 nt, Human
cccaaaagcuaauguguuccu

SEQ ID NO: 463142 - RNA, 23 nt, Human
cccagaaagcuuaauguucagca

SEQ ID NO: 463143 - RNA, 18 nt, Human
cccagggcggcagggcgg

SEQ ID NO: 463144 - RNA, 19 nt, Human
ccccaaagccccuacucac

SEQ ID NO: 463145 - RNA, 25 nt, Human
ccccaaagccccuacucaccaccag

SEQ ID NO: 463146 - RNA, 19 nt, Human
ccccaacacaguuuuucac

SEQ ID NO: 463147 - RNA, 22 nt, Human
ccccagccaauccagcucuuuc

SEQ ID NO: 463148 - RNA, 24 nt, Human
ccccaguguggggaacaggucaga

SEQ ID NO: 463149 - RNA, 21 nt, Human
ccccgccgcagcugccuccuc

SEQ ID NO: 463150 - RNA, 24 nt, Human
ccccgccgcagcugccuccucccg

SEQ ID NO: 463151 - RNA, 23 nt, Human
ccccgcggcgacggccggggagc

SEQ ID NO: 463152 - RNA, 20 nt, Human
ccccgcugccgccgccgccc

SEQ ID NO: 463153 - RNA, 20 nt, Human
ccgcggcgacggccggggag

SEQ ID NO: 463154 - RNA, 23 nt, Human
ccgcugccgccgccgcccuagcc

SEQ ID NO: 463155 - RNA, 22 nt, Human
ccuacucaccaccagcuagcca

SEQ ID NO: 463156 - RNA, 18 nt, Human
ccuagauuaagccggagc

SEQ ID NO: 463157 - RNA, 22 nt, Human
ccuguguacaguaugugagaaa

SEQ ID NO: 463158 - RNA, 19 nt, Human
ccuuccacucccuccuccc

SEQ ID NO: 463159 - RNA, 21 nt, Human
cgacacaaacuuugaaaaaga

SEQ ID NO: 463160 - RNA, 23 nt, Human
cgaccaggugacuuuccaguuug

SEQ ID NO: 463161 - RNA, 22 nt, Human
cgacggccggggagcucccagg

SEQ ID NO: 463162 - RNA, 21 nt, Human
cgcccccgcugccgccgccgc

SEQ ID NO: 463163 - RNA, 20 nt, Human
cgccgcagcugccuccuccc

SEQ ID NO: 463164 - RNA, 21 nt, Human
cucaaacaauccuuucccacc

SEQ ID NO: 463165 - RNA, 19 nt, Human
cucacaaagagggaaaaac

SEQ ID NO: 463166 - RNA, 19 nt, Human
cucguuauaccauaucccc

SEQ ID NO: 463167 - RNA, 23 nt, Human
cugaagcuaucugcuucuaugau

SEQ ID NO: 463168 - RNA, 27 nt, Human
cugccgcccccgcugccgccgccgccc

SEQ ID NO: 463169 - RNA, 24 nt, Human
cuuuugugugugugugugguuaau

SEQ ID NO: 463170 - RNA, 22 nt, Human
gaaaaaacaagcauggcacaaa

SEQ ID NO: 463171 - RNA, 24 nt, Human
gaaaaagauucuuuucuccauaaa

SEQ ID NO: 463172 - RNA, 24 nt, Human
gaacugguuuggcuuccaauuuuu

SEQ ID NO: 463173 - RNA, 25 nt, Human
gagacccuuccacucccuccucccu

SEQ ID NO: 463174 - RNA, 21 nt, Human
gagcagcagcugcuucuacag

SEQ ID NO: 463175 - RNA, 25 nt, Human
gaucacuuugcuaaugaaaggaaau

SEQ ID NO: 463176 - RNA, 19 nt, Human
gccccaaagccccuacuca

SEQ ID NO: 463177 - RNA, 20 nt, Human
gccccaaagccccuacucac

SEQ ID NO: 463178 - RNA, 22 nt, Human
gccgcccccgcugccgccgccg

SEQ ID NO: 463179 - RNA, 25 nt, Human
gccgcccccgcugccgccgccgccc

SEQ ID NO: 463180 - RNA, 26 nt, Human
gccgcccccgcugccgccgccgcccu

SEQ ID NO: 463181 - RNA, 19 nt, Human
ggaaggagggaggagcgag

SEQ ID NO: 463182 - RNA, 21 nt, Human
ggaauaaauagagaaugggua

SEQ ID NO: 463183 - RNA, 19 nt, Human
ggagucuaguucaguucug

SEQ ID NO: 463184 - RNA, 18 nt, Human
ggcccagaaagcuuaaug

SEQ ID NO: 463185 - RNA, 19 nt, Human
ggcggcagggcggggaggg

SEQ ID NO: 463186 - RNA, 20 nt, Human
ggcggggagggagggcggug

SEQ ID NO: 463187 - RNA, 18 nt, Human
gggagggagggcgguggg

SEQ ID NO: 463188 - RNA, 20 nt, Human
gggaugggugagccccagcc

SEQ ID NO: 463189 - RNA, 21 nt, Human
gggcaaaccucacccuccccu

SEQ ID NO: 463190 - RNA, 24 nt, Human
gguguaaaggaugcuugagaagaa

SEQ ID NO: 463191 - RNA, 21 nt, Human
guugaaaacgaccaugagggu

SEQ ID NO: 463192 - RNA, 18 nt, Human
uaaaaaauacucaaacaa

SEQ ID NO: 463193 - RNA, 21 nt, Human
uaaaaaauacucaaacaaucc

SEQ ID NO: 463194 - RNA, 19 nt, Human
uaaaaguuugggaucagug

SEQ ID NO: 463195 - RNA, 23 nt, Human
uaaauauucucuuuaaauacagc

SEQ ID NO: 463196 - RNA, 21 nt, Human
uaaguaggaguagugucuccc

SEQ ID NO: 463197 - RNA, 20 nt, Human
uacaaaucuuuucaggcuca

SEQ ID NO: 463198 - RNA, 23 nt, Human
uagagaaggccuuucgcuugaca

SEQ ID NO: 463199 - RNA, 18 nt, Human
uagcaagcagccuguucc

SEQ ID NO: 463200 - RNA, 19 nt, Human
uaggccuagacugggacug

SEQ ID NO: 463201 - RNA, 23 nt, Human
uaucccaccagaaaaggcuuuau

SEQ ID NO: 463202 - RNA, 18 nt, Human
ucagagaaccagacaagc

SEQ ID NO: 463203 - RNA, 25 nt, Human
ucauauuccugguuugaucccaaaa

SEQ ID NO: 463204 - RNA, 24 nt, Human
uccaaacuaaaaccaagcaaaaaa

SEQ ID NO: 463205 - RNA, 23 nt, Human
uccacauaggccuccuaugggau

SEQ ID NO: 463206 - RNA, 19 nt, Human
uccagauagcaagcagccu

SEQ ID NO: 463207 - RNA, 18 nt, Human
uccauaaagccaaauucc

SEQ ID NO: 463208 - RNA, 22 nt, Human
ucccacccauuccccaaagacc

SEQ ID NO: 463209 - RNA, 21 nt, Human
uccccagaucaagguagggcu

SEQ ID NO: 463210 - RNA, 19 nt, Human
uccuggagauuuuguacag

SEQ ID NO: 463211 - RNA, 28 nt, Human
uccugugagauccuaguucuuuguuccc

SEQ ID NO: 463212 - RNA, 24 nt, Human
uccuuggggagcccaccaaguugg

SEQ ID NO: 463213 - RNA, 20 nt, Human
uccuugguacuguuucccuu

SEQ ID NO: 463214 - RNA, 21 nt, Human
ucuuugccccaagacuauccc

SEQ ID NO: 463215 - RNA, 19 nt, Human
ugaaaaaacaagcauggca

SEQ ID NO: 463216 - RNA, 22 nt, Human
ugaaaaaacaagcauggcacaa

SEQ ID NO: 463217 - RNA, 19 nt, Human
ugaaaacgaccaugagggu

SEQ ID NO: 463218 - RNA, 18 nt, Human
ugaaggaaggcagguuac

SEQ ID NO: 463219 - RNA, 18 nt, Human
ugccgcccccgcugccgc

SEQ ID NO: 463220 - RNA, 18 nt, Human
ugccuccuuuggccacag

SEQ ID NO: 463221 - RNA, 19 nt, Human
ugcucccuacugccuccau

SEQ ID NO: 463222 - RNA, 20 nt, Human
uggaacaaauaggaaaggca

SEQ ID NO: 463223 - RNA, 22 nt, Human
uggacuagguuguagagaaggc

SEQ ID NO: 463224 - RNA, 22 nt, Human
uggccccaaagccccuacucac

SEQ ID NO: 463225 - RNA, 21 nt, Human
ugggaaggagggaggagcgag

SEQ ID NO: 463226 - RNA, 22 nt, Human
ugggagagaaagggcuuugcca

SEQ ID NO: 463227 - RNA, 27 nt, Human
ugggagcagcagcugcuuccucccggg

SEQ ID NO: 463228 - RNA, 19 nt, Human
ugggaucagugugagucac

SEQ ID NO: 463229 - RNA, 22 nt, Human
ugggaucagugugagucacaac

SEQ ID NO: 463230 - RNA, 22 nt, Human
uggggcuugggagagaaagggc

SEQ ID NO: 463231 - RNA, 23 nt, Human
ugggugagccccagccgaaagcu

SEQ ID NO: 463232 - RNA, 18 nt, Human
uguacagaagcagagacc

SEQ ID NO: 463233 - RNA, 19 nt, Human
uguacagaagcagagaccc

SEQ ID NO: 463234 - RNA, 25 nt, Human
uuaaugcuaaauguuaauauuuagc

SEQ ID NO: 463235 - RNA, 18 nt, Human
uucauauuccugguuuga

SEQ ID NO: 463236 - RNA, 18 nt, Human
uuccagauagcaagcagc

SEQ ID NO: 463237 - RNA, 23 nt, Human
uucccacccauuccccaaagacc

SEQ ID NO: 463238 - RNA, 18 nt, Human
uuccuagauuaagccgga

SEQ ID NO: 463239 - RNA, 22 nt, Human
uuccugguuugaucccaaaagc

SEQ ID NO: 463240 - RNA, 23 nt, Human
uuggauucacauugaaaauacua

SEQ ID NO: 463241 - RNA, 21 nt, Human
uuuucagagaaccagacaagc

SEQ ID NO: 463242 - RNA, 18 nt, Human
aaagaaacuuaagcuuga

SEQ ID NO: 463243 - RNA, 19 nt, Human
aacaugcuuacgugcaugu

SEQ ID NO: 463244 - RNA, 18 nt, Human
aagaaacuuaagcuugaa

SEQ ID NO: 463245 - RNA, 20 nt, Human
aagaaacuuaagcuugaagu

SEQ ID NO: 463246 - RNA, 21 nt, Human
aaugaugguuaucugcauuua

SEQ ID NO: 463247 - RNA, 22 nt, Human
accccagugggguuccaauccc

SEQ ID NO: 463248 - RNA, 21 nt, Human
agaaaugauggugaaguacaa

SEQ ID NO: 463249 - RNA, 22 nt, Human
aguacaagagggugccccaggg

SEQ ID NO: 463250 - RNA, 18 nt, Human
cagccccacugcaaguga

SEQ ID NO: 463251 - RNA, 19 nt, Human
cagguuuggaccuuugcac

SEQ ID NO: 463252 - RNA, 19 nt, Human
ccccaucaagccaggcccc

SEQ ID NO: 463253 - RNA, 21 nt, Human
ccuccucugcugcaggcugaa

SEQ ID NO: 463254 - RNA, 18 nt, Human
ccugacugcauuucucuu

SEQ ID NO: 463255 - RNA, 19 nt, Human
cucugcugccgugcccucc

SEQ ID NO: 463256 - RNA, 19 nt, Human
cugagacuguggcagcccc

SEQ ID NO: 463257 - RNA, 20 nt, Human
cugcauuucucuuacagcug

SEQ ID NO: 463258 - RNA, 20 nt, Human
cugcccccucuucaagaccc

SEQ ID NO: 463259 - RNA, 21 nt, Human
cugcccccucuucaagacccc

SEQ ID NO: 463260 - RNA, 18 nt, Human
cugcugcaggcugaacug

SEQ ID NO: 463261 - RNA, 21 nt, Human
gaccuaaaagaaacuuaagcu

SEQ ID NO: 463262 - RNA, 19 nt, Human
gacucugggguggagagac

SEQ ID NO: 463263 - RNA, 20 nt, Human
gccccugcagacagacagcu

SEQ ID NO: 463264 - RNA, 23 nt, Human
ggagacaagcccagguuuggaaa

SEQ ID NO: 463265 - RNA, 25 nt, Human
ggugaaguacaagagggugccccag

SEQ ID NO: 463266 - RNA, 20 nt, Human
guaacuuaauuugcaucugc

SEQ ID NO: 463267 - RNA, 19 nt, Human
guaggggaugcugugcucc

SEQ ID NO: 463268 - RNA, 22 nt, Human
gugaaguacaagagggugcccc

SEQ ID NO: 463269 - RNA, 21 nt, Human
gugccugagacucuggggugg

SEQ ID NO: 463270 - RNA, 19 nt, Human
guggguguaggaacaugcu

SEQ ID NO: 463271 - RNA, 18 nt, Human
uaagguaggcuggucaug

SEQ ID NO: 463272 - RNA, 23 nt, Human
ucagaaaugauggugaaguacaa

SEQ ID NO: 463273 - RNA, 24 nt, Human
ucagaaaugauggugaaguacaag

SEQ ID NO: 463274 - RNA, 22 nt, Human
uccucugcugcaggcugaacug

SEQ ID NO: 463275 - RNA, 18 nt, Human
ugaaguacaagagggugc

SEQ ID NO: 463276 - RNA, 22 nt, Human
ugaaguuucugagauguagcau

SEQ ID NO: 463277 - RNA, 22 nt, Human
ugacgugaaguggagacaagcc

SEQ ID NO: 463278 - RNA, 22 nt, Human
ugacucaguuuucuuguaguga

SEQ ID NO: 463279 - RNA, 23 nt, Human
ugcaccuuacuaucagguccagc

SEQ ID NO: 463280 - RNA, 21 nt, Human
ugcagacagacagcacgccau

SEQ ID NO: 463281 - RNA, 19 nt, Human
ugccccaggguacauggga

SEQ ID NO: 463282 - RNA, 19 nt, Human
ugcugccgugcccuccucu

SEQ ID NO: 463283 - RNA, 19 nt, Human
ugcuuacgugcaugugcgu

SEQ ID NO: 463284 - RNA, 21 nt, Human
uggagagaccccagugggguu

SEQ ID NO: 463285 - RNA, 21 nt, Human
ugggguggagagaccccagug

SEQ ID NO: 463286 - RNA, 22 nt, Human
aaaaaagagaaauucauaaaga

SEQ ID NO: 463287 - RNA, 18 nt, Human
aaaaagucaaaugccucc

SEQ ID NO: 463288 - RNA, 23 nt, Human
aagaaaaaaagagaaauucauaa

SEQ ID NO: 463289 - RNA, 21 nt, Human
aaguguccaugugugauaaau

SEQ ID NO: 463290 - RNA, 20 nt, Human
aaguucucuuucugggcauc

SEQ ID NO: 463291 - RNA, 22 nt, Human
acagaacucgucuaguuccgaa

SEQ ID NO: 463292 - RNA, 20 nt, Human
acagagaagaaaaaaagaga

SEQ ID NO: 463293 - RNA, 26 nt, Human
agaaaaaaagagaaauucauaaagag

SEQ ID NO: 463294 - RNA, 22 nt, Human
agaagaaaaaaagagaaauuca

SEQ ID NO: 463295 - RNA, 18 nt, Human
agagaagaaaaaaagaga

SEQ ID NO: 463296 - RNA, 24 nt, Human
agauucccagcauagcacaaguuc

SEQ ID NO: 463297 - RNA, 20 nt, Human
caaaugccuccauguaaaua

SEQ ID NO: 463298 - RNA, 24 nt, Human
cugcaaguucucuuucugggcauc

SEQ ID NO: 463299 - RNA, 21 nt, Human
gucaaaugccuccauguaaau

SEQ ID NO: 463300 - RNA, 19 nt, Human
guggauugagcugcaaguu

SEQ ID NO: 463301 - RNA, 23 nt, Human
ucccagcauagcacaaguuccug

SEQ ID NO: 463302 - RNA, 21 nt, Human
ugacaggauuucuacagaacu

SEQ ID NO: 463303 - RNA, 23 nt, Human
uuacuaauauucacagguaacac

SEQ ID NO: 463304 - RNA, 19 nt, Human
aaaaacauacaguaucuua

SEQ ID NO: 463305 - RNA, 28 nt, Human
aaaaugccaacuguacuuggacaaaaua

SEQ ID NO: 463306 - RNA, 20 nt, Human
agagaaguaaauaaagccaa

SEQ ID NO: 463307 - RNA, 21 nt, Human
agggugguaaaauuauucugg

SEQ ID NO: 463308 - RNA, 23 nt, Human
auaaagccaauggcacucccuuc

SEQ ID NO: 463309 - RNA, 24 nt, Human
caauggcacucccuucagaggcuc

SEQ ID NO: 463310 - RNA, 23 nt, Human
ccauuaaaauaggcuaaaaugaa

SEQ ID NO: 463311 - RNA, 19 nt, Human
ccccgcgccgcgcugcccc

SEQ ID NO: 463312 - RNA, 21 nt, Human
cccgcgccgcgcugccccugc

SEQ ID NO: 463313 - RNA, 22 nt, Human
cccgcgccgcgcugccccugca

SEQ ID NO: 463314 - RNA, 24 nt, Human
cccugcacugcgggcuaccucccc

SEQ ID NO: 463315 - RNA, 22 nt, Human
ccgcgucccgucgguggccccg

SEQ ID NO: 463316 - RNA, 26 nt, Human
uaaauaaagccaauggcacucccuuc

SEQ ID NO: 463317 - RNA, 23 nt, Human
ucaggacuagcagaggagagaag

SEQ ID NO: 463318 - RNA, 18 nt, Human
uccagagaugacaucuag

SEQ ID NO: 463319 - RNA, 19 nt, Human
ugguuguccauuaaaguuu

SEQ ID NO: 463320 - RNA, 21 nt, Human
uuuacauaaacuuauaaggau

SEQ ID NO: 463321 - RNA, 24 nt, Human
augcaaccuuuacgaaggccuucc

SEQ ID NO: 463322 - RNA, 24 nt, Human
auuuuuuuuuuucccgcggguccc

SEQ ID NO: 463323 - RNA, 24 nt, Human
cauaucuguuucaaaaguaucaga

SEQ ID NO: 463324 - RNA, 22 nt, Human
cccgcggguccccaggagcgaa

SEQ ID NO: 463325 - RNA, 21 nt, Human
ccuuuacgaaggccuuccucc

SEQ ID NO: 463326 - RNA, 18 nt, Human
gaccaccgagauuuggaa

SEQ ID NO: 463327 - RNA, 22 nt, Human
ggauuuuuuuuuuucccgcggg

SEQ ID NO: 463328 - RNA, 20 nt, Human
ggcuagaugacugaagagca

SEQ ID NO: 463329 - RNA, 24 nt, Human
ggguguuggauuuuuuuuuuuccc

SEQ ID NO: 463330 - RNA, 23 nt, Human
ggugacaaaaucgagcggagaga

SEQ ID NO: 463331 - RNA, 24 nt, Human
guggcuagaugacugaagagcaaa

SEQ ID NO: 463332 - RNA, 21 nt, Human
uacgaaggccuuccuccuccc

SEQ ID NO: 463333 - RNA, 20 nt, Human
ugacugaagagcaaaccuuc

SEQ ID NO: 463334 - RNA, 21 nt, Human
ugacugaagagcaaaccuucc

SEQ ID NO: 463335 - RNA, 19 nt, Human
ugggaaggggcuagccgcg

SEQ ID NO: 463336 - RNA, 26 nt, Human
ugggaaggggcuagccgcggggccug

SEQ ID NO: 463337 - RNA, 21 nt, Human
ugugggaaggggcuagccgcg

SEQ ID NO: 463338 - RNA, 25 nt, Human
uuuacgaaggccuuccuccuccccc

SEQ ID NO: 463339 - RNA, 24 nt, Human
uuucccgcggguccccaggagcug

SEQ ID NO: 463340 - RNA, 18 nt, Human
uuuuuuuuuuuuggaguc

SEQ ID NO: 463341 - RNA, 18 nt, Human
uuuuuuuuuuuuuuuuug

SEQ ID NO: 463342 - RNA, 28 nt, Human
uuuuuuuuuuuuuuuuuuuuuuuggggg

SEQ ID NO: 463343 - RNA, 22 nt, Human
aacucuccccucccuaccccca

SEQ ID NO: 463344 - RNA, 25 nt, Human
acccccaccaaacccuggaaaauca

SEQ ID NO: 463345 - RNA, 24 nt, Human
ccaaacccuggaaaaucacagaca

SEQ ID NO: 463346 - RNA, 23 nt, Human
ccccucccuacccccaccaaacc

SEQ ID NO: 463347 - RNA, 24 nt, Human
ccuacccccaccaaacccuggaaa

SEQ ID NO: 463348 - RNA, 22 nt, Human
ccucccuacccccaccaaaccc

SEQ ID NO: 463349 - RNA, 22 nt, Human
uaacucuccccucccuaccccc

SEQ ID NO: 463350 - RNA, 22 nt, Human
uagcaucaauguccaggcauac

SEQ ID NO: 463351 - RNA, 25 nt, Human
aaaaacacccacccaacucuacaac

SEQ ID NO: 463352 - RNA, 20 nt, Human
aaaaagaaagaaaaccacuu

SEQ ID NO: 463353 - RNA, 18 nt, Human
aaagcaucauacuauucu

SEQ ID NO: 463354 - RNA, 24 nt, Human
aaagugcugggauuacagguguga

SEQ ID NO: 463355 - RNA, 20 nt, Human
aaauaaauguuacucaagua

SEQ ID NO: 463356 - RNA, 27 nt, Human
aacacagccugaggcaacaaaaugcuc

SEQ ID NO: 463357 - RNA, 19 nt, Human
aacauggugaaaccccauc

SEQ ID NO: 463358 - RNA, 20 nt, Human
aacauggugaaaccccaucu

SEQ ID NO: 463359 - RNA, 21 nt, Human
aacauggugaaaccccaucuc

SEQ ID NO: 463360 - RNA, 21 nt, Human
aacauggugaaaccccaucuc

SEQ ID NO: 463361 - RNA, 24 nt, Human
aagcagagguugcagugagccaag

SEQ ID NO: 463362 - RNA, 25 nt, Human
aagcagagguugcagugagccaaga

SEQ ID NO: 463363 - RNA, 18 nt, Human
aagugcugggauuacagg

SEQ ID NO: 463364 - RNA, 19 nt, Human
aagugcugggauuacaggu

SEQ ID NO: 463365 - RNA, 26 nt, Human
aagugcugggauuacaggugugagcc

SEQ ID NO: 463366 - RNA, 24 nt, Human
aaucgcuuaaaccugggaagcaga

SEQ ID NO: 463367 - RNA, 18 nt, Human
acaaagcaaaucaaaagc

SEQ ID NO: 463368 - RNA, 24 nt, Human
acaaggugagacucugucucaaaa

SEQ ID NO: 463369 - RNA, 21 nt, Human
acaggcgcccgccaccacacc

SEQ ID NO: 463370 - RNA, 24 nt, Human
accccaucucuacuaaaaauacaa

SEQ ID NO: 463371 - RNA, 19 nt, Human
accgacuccgccgccgugc

SEQ ID NO: 463372 - RNA, 21 nt, Human
acgccuauaauuccagcacuu

SEQ ID NO: 463373 - RNA, 19 nt, Human
acuacacuuacuaagugcc

SEQ ID NO: 463374 - RNA, 25 nt, Human
acucuguugccuaggcuggagugca

SEQ ID NO: 463375 - RNA, 18 nt, Human
acugcacucuagccuggg

SEQ ID NO: 463376 - RNA, 25 nt, Human
acugcacucuagccugggugacaag

SEQ ID NO: 463377 - RNA, 18 nt, Human
agaaaaccacuuucccug

SEQ ID NO: 463378 - RNA, 19 nt, Human
agaaccacuuucuggcugg

SEQ ID NO: 463379 - RNA, 21 nt, Human
agacucagggucaugaagagg

SEQ ID NO: 463380 - RNA, 18 nt, Human
agaggagaaaauaggaug

SEQ ID NO: 463381 - RNA, 23 nt, Human
agagguugcagugagccaagauc

SEQ ID NO: 463382 - RNA, 24 nt, Human
agagguugcagugagccaagaucg

SEQ ID NO: 463383 - RNA, 24 nt, Human
agcacuuugggaggcugagggagg

SEQ ID NO: 463384 - RNA, 18 nt, Human
agccuccagaguagcuag

SEQ ID NO: 463385 - RNA, 22 nt, Human
agccuggacaacauggugaaac

SEQ ID NO: 463386 - RNA, 24 nt, Human
agccuggacaacauggugaaaccc

SEQ ID NO: 463387 - RNA, 24 nt, Human
agccugggugacaaggugagacuc

SEQ ID NO: 463388 - RNA, 20 nt, Human
aggaguuugagaccagccug

SEQ ID NO: 463389 - RNA, 26 nt, Human
aggcaacaaaaugcucugacaauuac

SEQ ID NO: 463390 - RNA, 22 nt, Human
aggcaagagaaucgcuuaaacc

SEQ ID NO: 463391 - RNA, 24 nt, Human
aggcaagagaaucgcuuaaaccug

SEQ ID NO: 463392 - RNA, 25 nt, Human
aggcuggagugcaguggggcaaucu

SEQ ID NO: 463393 - RNA, 24 nt, Human
agggagguggaucaugaggucagg

SEQ ID NO: 463394 - RNA, 24 nt, Human
agguggaucaugaggucaggaguu

SEQ ID NO: 463395 - RNA, 20 nt, Human
agugcaguggggcaaucucg

SEQ ID NO: 463396 - RNA, 24 nt, Human
agugcaguggggcaaucucggcuc

SEQ ID NO: 463397 - RNA, 18 nt, Human
auaaauuucucucacuuu

SEQ ID NO: 463398 - RNA, 22 nt, Human
auaguaugguauauuccuuaau

SEQ ID NO: 463399 - RNA, 24 nt, Human
aucgugccacugcacucuagccug

SEQ ID NO: 463400 - RNA, 19 nt, Human
auuuuuuuuugagacagag

SEQ ID NO: 463401 - RNA, 21 nt, Human
caaaaacacccacccaacucu

SEQ ID NO: 463402 - RNA, 27 nt, Human
caaaagcaaugacauuacacaacaaaa

SEQ ID NO: 463403 - RNA, 22 nt, Human
caaagcaaaucaaaagcaauga

SEQ ID NO: 463404 - RNA, 24 nt, Human
caaagugcugggauuacaggugug

SEQ ID NO: 463405 - RNA, 18 nt, Human
caaaucaaaagcaaugac

SEQ ID NO: 463406 - RNA, 22 nt, Human
caaaucaaaagcaaugacauua

SEQ ID NO: 463407 - RNA, 22 nt, Human
caacauggugaaaccccaucuc

SEQ ID NO: 463408 - RNA, 24 nt, Human
caacauggugaaaccccaucucua

SEQ ID NO: 463409 - RNA, 24 nt, Human
caagaucgugccacugcacucuag

SEQ ID NO: 463410 - RNA, 22 nt, Human
caagccauucuccugccucagc

SEQ ID NO: 463411 - RNA, 19 nt, Human
cacagccugaggcaacaaa

SEQ ID NO: 463412 - RNA, 24 nt, Human
caccauguuagccacgauggucuc

SEQ ID NO: 463413 - RNA, 23 nt, Human
caccuguagucccaccuacucgg

SEQ ID NO: 463414 - RNA, 24 nt, Human
caccuguagucccaccuacucggg

SEQ ID NO: 463415 - RNA, 24 nt, Human
cacucuagccugggugacaaggug

SEQ ID NO: 463416 - RNA, 22 nt, Human
cacucuguugccuaggcuggag

SEQ ID NO: 463417 - RNA, 23 nt, Human
cacugcaagcgccgucucccggg

SEQ ID NO: 463418 - RNA, 19 nt, Human
cacugcacucuagccuggg

SEQ ID NO: 463419 - RNA, 19 nt, Human
cacugcacucuagccuggg

SEQ ID NO: 463420 - RNA, 22 nt, Human
cacugcacucuagccuggguga

SEQ ID NO: 463421 - RNA, 23 nt, Human
cacugcacucuagccugggugac

SEQ ID NO: 463422 - RNA, 24 nt, Human
cacugcacucuagccugggugaca

SEQ ID NO: 463423 - RNA, 25 nt, Human
cacugcacucuagccugggugacaa

SEQ ID NO: 463424 - RNA, 24 nt, Human
cagaaaacauacaaauaaaagucc

SEQ ID NO: 463425 - RNA, 18 nt, Human
cagagguagaauuuggga

SEQ ID NO: 463426 - RNA, 24 nt, Human
cagcacuuugggaggcugagggag

SEQ ID NO: 463427 - RNA, 25 nt, Human
cagcacuuugggaggcugagggagg

SEQ ID NO: 463428 - RNA, 18 nt, Human
cagcuccgucuccugccc

SEQ ID NO: 463429 - RNA, 21 nt, Human
cagcuccgucuccugcccccg

SEQ ID NO: 463430 - RNA, 19 nt, Human
cagggucaugaagaggauu

SEQ ID NO: 463431 - RNA, 19 nt, Human
caggguuucaccauguuag

SEQ ID NO: 463432 - RNA, 22 nt, Human
caggucacagggcguuaacuaa

SEQ ID NO: 463433 - RNA, 24 nt, Human
caugaggucaggaguuugagacca

SEQ ID NO: 463434 - RNA, 21 nt, Human
ccaaagugcugggauuacagg

SEQ ID NO: 463435 - RNA, 21 nt, Human
ccaaagugcugggauuacagg

SEQ ID NO: 463436 - RNA, 24 nt, Human
ccaaagugcugggauuacaggugu

SEQ ID NO: 463437 - RNA, 19 nt, Human
ccacccaacucuacaucuc

SEQ ID NO: 463438 - RNA, 20 nt, Human
ccacugcacucuagccuggg

SEQ ID NO: 463439 - RNA, 20 nt, Human
ccacugcacucuagccuggg

SEQ ID NO: 463440 - RNA, 21 nt, Human
ccacugcacucuagccugggu

SEQ ID NO: 463441 - RNA, 21 nt, Human
ccacugcacucuagccugggu

SEQ ID NO: 463442 - RNA, 23 nt, Human
ccacugcacucuagccuggguga

SEQ ID NO: 463443 - RNA, 24 nt, Human
ccacugcacucuagccugggugac

SEQ ID NO: 463444 - RNA, 21 nt, Human
ccccccgccgcucagcuccgu

SEQ ID NO: 463445 - RNA, 18 nt, Human
cccccgccgcucagcucc

SEQ ID NO: 463446 - RNA, 23 nt, Human
cccggguucaagccauucuccug

SEQ ID NO: 463447 - RNA, 20 nt, Human
cccugauacuuuaccaucca

SEQ ID NO: 463448 - RNA, 24 nt, Human
ccgccucagccucccaaagugcug

SEQ ID NO: 463449 - RNA, 19 nt, Human
ccgcucagcuccgucuccu

SEQ ID NO: 463450 - RNA, 23 nt, Human
ccgcucagcuccgucuccugccc

SEQ ID NO: 463451 - RNA, 23 nt, Human
ccugauacuuuaccauccaggaa

SEQ ID NO: 463452 - RNA, 24 nt, Human
ccuggacaacauggugaaacccca

SEQ ID NO: 463453 - RNA, 22 nt, Human
ccugggugacaaggugagacuc

SEQ ID NO: 463454 - RNA, 23 nt, Human
cgccuauaauuccagcacuuugg

SEQ ID NO: 463455 - RNA, 24 nt, Human
cgccuauaauuccagcacuuuggg

SEQ ID NO: 463456 - RNA, 21 nt, Human
cucaaaaaaaaaacgagaaaa

SEQ ID NO: 463457 - RNA, 24 nt, Human
cucacucuguugccuaggcuggag

SEQ ID NO: 463458 - RNA, 24 nt, Human
cucacugcaagcgccgucucccgg

SEQ ID NO: 463459 - RNA, 24 nt, Human
cuccugaccuugugauccucccgc

SEQ ID NO: 463460 - RNA, 20 nt, Human
cucugucucaaaaaaaaaac

SEQ ID NO: 463461 - RNA, 23 nt, Human
cugccucagccuccagaguagcu

SEQ ID NO: 463462 - RNA, 27 nt, Human
cuugugauccucccgccucagccuccc

SEQ ID NO: 463463 - RNA, 24 nt, Human
gacaaggugagacucugucucaaa

SEQ ID NO: 463464 - RNA, 24 nt, Human
gaccuugugauccucccgccucag

SEQ ID NO: 463465 - RNA, 23 nt, Human
gagcagcaaaacuacaauuugga

SEQ ID NO: 463466 - RNA, 25 nt, Human
gaguagcuagaacuacaggcgcccg

SEQ ID NO: 463467 - RNA, 22 nt, Human
gaucaugaggucaggaguuuga

SEQ ID NO: 463468 - RNA, 24 nt, Human
gaucaugaggucaggaguuugaga

SEQ ID NO: 463469 - RNA, 18 nt, Human
gauuacaggugugagcca

SEQ ID NO: 463470 - RNA, 22 nt, Human
gauuacaggugugagccaccgc

SEQ ID NO: 463471 - RNA, 22 nt, Human
gauuacaggugugagccaccgc

SEQ ID NO: 463472 - RNA, 20 nt, Human
gccaagaucgugccacugca

SEQ ID NO: 463473 - RNA, 24 nt, Human
gccacugcacucuagccuggguga

SEQ ID NO: 463474 - RNA, 23 nt, Human
gccucagccucccaaagugcugg

SEQ ID NO: 463475 - RNA, 19 nt, Human
gcuccgucuccugcccccg

SEQ ID NO: 463476 - RNA, 21 nt, Human
gcugggugugguggcuuacgc

SEQ ID NO: 463477 - RNA, 19 nt, Human
ggaaauguaugcauccuug

SEQ ID NO: 463478 - RNA, 20 nt, Human
ggaagcagagguugcaguga

SEQ ID NO: 463479 - RNA, 22 nt, Human
ggagguggaucaugaggucagg

SEQ ID NO: 463480 - RNA, 22 nt, Human
ggcaaaauuauccaacuguaga

SEQ ID NO: 463481 - RNA, 19 nt, Human
gggaggcugaggcaagaga

SEQ ID NO: 463482 - RNA, 24 nt, Human
gggcgugguggcgggcaccuguag

SEQ ID NO: 463483 - RNA, 20 nt, Human
ggucucgaucuccugaccuu

SEQ ID NO: 463484 - RNA, 24 nt, Human
gguggcuuacgccuauaauuccag

SEQ ID NO: 463485 - RNA, 23 nt, Human
ggugugguggcuuacgccuauaa

SEQ ID NO: 463486 - RNA, 25 nt, Human
gguuucaccauguuagccacgauga

SEQ ID NO: 463487 - RNA, 19 nt, Human
guaugguauauuccuuaau

SEQ ID NO: 463488 - RNA, 24 nt, Human
gugacaaggugagacucugucuca

SEQ ID NO: 463489 - RNA, 24 nt, Human
gugauccucccgccucagccuccc

SEQ ID NO: 463490 - RNA, 18 nt, Human
gugaugcugauguugccg

SEQ ID NO: 463491 - RNA, 23 nt, Human
guggaucaugaggucaggaguuu

SEQ ID NO: 463492 - RNA, 23 nt, Human
guggcuuacgccuauaauuccag

SEQ ID NO: 463493 - RNA, 23 nt, Human
guuccuuagacggcaucaacaag

SEQ ID NO: 463494 - RNA, 26 nt, Human
uaaauguaaagcaucauacuauucua

SEQ ID NO: 463495 - RNA, 23 nt, Human
uaacacagccugaggcaacaaaa

SEQ ID NO: 463496 - RNA, 21 nt, Human
uaagaaccaggcaaagacuca

SEQ ID NO: 463497 - RNA, 22 nt, Human
uacaggcgcccgccaccacacc

SEQ ID NO: 463498 - RNA, 22 nt, Human
uacaggugugagccaccgcgcc

SEQ ID NO: 463499 - RNA, 23 nt, Human
uacaggugugagccaccgcgccu

SEQ ID NO: 463500 - RNA, 24 nt, Human
uacgccuauaauuccagcacuuug

SEQ ID NO: 463501 - RNA, 27 nt, Human
uacuacauuacuaaucaaccacuacuu

SEQ ID NO: 463502 - RNA, 20 nt, Human
uagaaagccagacaaaaugc

SEQ ID NO: 463503 - RNA, 21 nt, Human
uagaacuacaggcgcccgcca

SEQ ID NO: 463504 - RNA, 24 nt, Human
uagaacuacaggcgcccgccacca

SEQ ID NO: 463505 - RNA, 19 nt, Human
uagaaucuuaugucaguau

SEQ ID NO: 463506 - RNA, 22 nt, Human
uagagccaggguuucaccaugu

SEQ ID NO: 463507 - RNA, 24 nt, Human
uaguagagccaggguuucaccaug

SEQ ID NO: 463508 - RNA, 19 nt, Human
uaucuaaagauguauagag

SEQ ID NO: 463509 - RNA, 24 nt, Human
uaucuccuuucacaaagcaaaucc

SEQ ID NO: 463510 - RNA, 19 nt, Human
uauuuauuuaaauaagaau

SEQ ID NO: 463511 - RNA, 25 nt, Human
ucaaaaauagcccaucauaaauccu

SEQ ID NO: 463512 - RNA, 25 nt, Human
ucaagccauucuccugccucagccu

SEQ ID NO: 463513 - RNA, 22 nt, Human
ucacaaagcaaaucaaaagcaa

SEQ ID NO: 463514 - RNA, 24 nt, Human
ucacucuguugccuaggcuggagu

SEQ ID NO: 463515 - RNA, 24 nt, Human
ucacugcaagcgccgucucccggg

SEQ ID NO: 463516 - RNA, 22 nt, Human
ucagccuccagaguagcuagaa

SEQ ID NO: 463517 - RNA, 24 nt, Human
ucaugaggucaggaguuugagacc

SEQ ID NO: 463518 - RNA, 23 nt, Human
ucccaaagugcugggauuacagg

SEQ ID NO: 463519 - RNA, 21 nt, Human
ucccggguucaagccauucuc

SEQ ID NO: 463520 - RNA, 24 nt, Human
ucccggguucaagccauucuccug

SEQ ID NO: 463521 - RNA, 20 nt, Human
ucccugauacuuuaccaucc

SEQ ID NO: 463522 - RNA, 27 nt, Human
uccucccgccucagccucccaaagugc

SEQ ID NO: 463523 - RNA, 19 nt, Human
uccugcccccgcccgaggu

SEQ ID NO: 463524 - RNA, 24 nt, Human
ucgggaggcugaggcaagagaauc

SEQ ID NO: 463525 - RNA, 18 nt, Human
ucucaaaaaaaaaacgag

SEQ ID NO: 463526 - RNA, 23 nt, Human
ucucacucuguugccuaggcugg

SEQ ID NO: 463527 - RNA, 24 nt, Human
ucucacucuguugccuaggcugga

SEQ ID NO: 463528 - RNA, 24 nt, Human
ucuccugccucagccuccagagua

SEQ ID NO: 463529 - RNA, 23 nt, Human
ucucuacuaaaaauacaaaaauu

SEQ ID NO: 463530 - RNA, 22 nt, Human
ucucucacuuuguuauauugua

SEQ ID NO: 463531 - RNA, 30 nt, Human
ucugaaauugagguaacacagccugaggcc

SEQ ID NO: 463532 - RNA, 18 nt, Human
ucuggcuggguguggugg

SEQ ID NO: 463533 - RNA, 24 nt, Human
ucuguugccuaggcuggagugcag

SEQ ID NO: 463534 - RNA, 19 nt, Human
ugaaaccccaucucuacua

SEQ ID NO: 463535 - RNA, 21 nt, Human
ugacaaaaacacccacccaac

SEQ ID NO: 463536 - RNA, 22 nt, Human
ugaccuugugauccucccgccu

SEQ ID NO: 463537 - RNA, 18 nt, Human
ugagacagagucucacuc

SEQ ID NO: 463538 - RNA, 22 nt, Human
ugagacagagucucacucuguu

SEQ ID NO: 463539 - RNA, 22 nt, Human
ugagccaagaucgugccacugc

SEQ ID NO: 463540 - RNA, 24 nt, Human
ugaggcaagagaaucgcuuaaacc

SEQ ID NO: 463541 - RNA, 24 nt, Human
ugagggagguggaucaugagguca

SEQ ID NO: 463542 - RNA, 21 nt, Human
ugagguaacacagccugaggc

SEQ ID NO: 463543 - RNA, 18 nt, Human
ugaggucaggaguuugag

SEQ ID NO: 463544 - RNA, 18 nt, Human
ugauagcaaacaguaguc

SEQ ID NO: 463545 - RNA, 19 nt, Human
ugauuuggugggucuggug

SEQ ID NO: 463546 - RNA, 20 nt, Human
ugauuuggugggucuggugu

SEQ ID NO: 463547 - RNA, 21 nt, Human
ugcauaauacauacauaguua

SEQ ID NO: 463548 - RNA, 18 nt, Human
ugccuagaccgaggcgac

SEQ ID NO: 463549 - RNA, 19 nt, Human
ugccuaggcuggagugcag

SEQ ID NO: 463550 - RNA, 20 nt, Human
ugccuaggcuggagugcagu

SEQ ID NO: 463551 - RNA, 21 nt, Human
ugccuaggcuggagugcagug

SEQ ID NO: 463552 - RNA, 22 nt, Human
ugccuaggcuggagugcagugg

SEQ ID NO: 463553 - RNA, 25 nt, Human
ugccuaggcuggagugcaguggggc

SEQ ID NO: 463554 - RNA, 24 nt, Human
ugccucagccuccagaguagcuag

SEQ ID NO: 463555 - RNA, 24 nt, Human
ugcugggauuacaggugugagcca

SEQ ID NO: 463556 - RNA, 22 nt, Human
uggacaacauggugaaacccca

SEQ ID NO: 463557 - RNA, 20 nt, Human
uggagugcaguggggcaauc

SEQ ID NO: 463558 - RNA, 23 nt, Human
uggagugcaguggggcaaucucg

SEQ ID NO: 463559 - RNA, 24 nt, Human
uggagugcaguggggcaaucucgg

SEQ ID NO: 463560 - RNA, 21 nt, Human
uggaucaugaggucaggaguu

SEQ ID NO: 463561 - RNA, 24 nt, Human
uggaucaugaggucaggaguuuga

SEQ ID NO: 463562 - RNA, 18 nt, Human
uggaucucuuucuaauuc

SEQ ID NO: 463563 - RNA, 21 nt, Human
uggcuuacgccuauaauucca

SEQ ID NO: 463564 - RNA, 22 nt, Human
uggcuuacgccuauaauuccag

SEQ ID NO: 463565 - RNA, 24 nt, Human
uggcuuacgccuauaauuccagca

SEQ ID NO: 463566 - RNA, 24 nt, Human
ugggaagcagagguugcagugagc

SEQ ID NO: 463567 - RNA, 24 nt, Human
ugggaggcugagggagguggauca

SEQ ID NO: 463568 - RNA, 18 nt, Human
ugggauuacaggugugag

SEQ ID NO: 463569 - RNA, 19 nt, Human
ugggauuacaggugugagc

SEQ ID NO: 463570 - RNA, 21 nt, Human
ugggauuacaggugugagcca

SEQ ID NO: 463571 - RNA, 22 nt, Human
ugggauuacaggugugagccac

SEQ ID NO: 463572 - RNA, 23 nt, Human
ugggauuacaggugugagccacc

SEQ ID NO: 463573 - RNA, 24 nt, Human
ugggauuacaggugugagccaccg

SEQ ID NO: 463574 - RNA, 24 nt, Human
ugguggcgggcaccuguaguccca

SEQ ID NO: 463575 - RNA, 24 nt, Human
ugguggcuuacgccuauaauucca

SEQ ID NO: 463576 - RNA, 24 nt, Human
ugugauccucccgccucagccucc

SEQ ID NO: 463577 - RNA, 21 nt, Human
uguugccggucugagaagcau

SEQ ID NO: 463578 - RNA, 20 nt, Human
uguugccuaggcuggagugc

SEQ ID NO: 463579 - RNA, 22 nt, Human
uuacgccuauaauuccagcacu

SEQ ID NO: 463580 - RNA, 24 nt, Human
uuaguagagccaggguuucaccau

SEQ ID NO: 463581 - RNA, 18 nt, Human
uucaagccauucuccugc

SEQ ID NO: 463582 - RNA, 21 nt, Human
uucaagccauucuccugccuc

SEQ ID NO: 463583 - RNA, 24 nt, Human
uuccagcacuuugggaggcugagg

SEQ ID NO: 463584 - RNA, 24 nt, Human
uuccugaacaauguacuguuucua

SEQ ID NO: 463585 - RNA, 22 nt, Human
uugcagugagccaagaucgugc

SEQ ID NO: 463586 - RNA, 23 nt, Human
uugccuaggcuggagugcagugg

SEQ ID NO: 463587 - RNA, 25 nt, Human
uugggaggcugagggagguggauca

SEQ ID NO: 463588 - RNA, 18 nt, Human
uuggugggucuggugugg

SEQ ID NO: 463589 - RNA, 20 nt, Human
uuucaccauguuagccacga

SEQ ID NO: 463590 - RNA, 23 nt, Human
uuucuaauucuaacacucauguu

SEQ ID NO: 463591 - RNA, 24 nt, Human
uuuuuaguagagccaggguuucac

SEQ ID NO: 463592 - RNA, 23 nt, Human
uuuuuuguauuuuuuuaguagag

SEQ ID NO: 463593 - RNA, 18 nt, Human
aaaacaugcacaaaccca

SEQ ID NO: 463594 - RNA, 18 nt, Human
aaacaugcacaaacccaa

SEQ ID NO: 463595 - RNA, 18 nt, Human
acccacccagcagaaaac

SEQ ID NO: 463596 - RNA, 23 nt, Human
caaacccaagguauauguggaag

SEQ ID NO: 463597 - RNA, 22 nt, Human
cagaaaacaugcacaaacccaa

SEQ ID NO: 463598 - RNA, 19 nt, Human
cagcagaaaacaugcacaa

SEQ ID NO: 463599 - RNA, 25 nt, Human
caugcacaaacccaagguauaugug

SEQ ID NO: 463600 - RNA, 22 nt, Human
ccagcagaaaacaugcacaaac

SEQ ID NO: 463601 - RNA, 23 nt, Human
ccagcagaaaacaugcacaaacc

SEQ ID NO: 463602 - RNA, 21 nt, Human
ccagccgcccggcagcgccug

SEQ ID NO: 463603 - RNA, 18 nt, Human
ccccggccccaaguuagc

SEQ ID NO: 463604 - RNA, 19 nt, Human
cccucugaacccacccagc

SEQ ID NO: 463605 - RNA, 25 nt, Human
ccucugaacccacccagcagaaaac

SEQ ID NO: 463606 - RNA, 21 nt, Human
cgcccggcagcgccuggaaac

SEQ ID NO: 463607 - RNA, 22 nt, Human
cggagcagccguagccacagcc

SEQ ID NO: 463608 - RNA, 19 nt, Human
cuggaguccccugccgcug

SEQ ID NO: 463609 - RNA, 18 nt, Human
gaacccacccagcagaaa

SEQ ID NO: 463610 - RNA, 18 nt, Human
uagcagcugggacgaugc

SEQ ID NO: 463611 - RNA, 25 nt, Human
ugcacaaacccaagguauaugugga

SEQ ID NO: 463612 - RNA, 18 nt, Human
ugcccucugaacccaccc

SEQ ID NO: 463613 - RNA, 22 nt, Human
uguacacauaaaagagaaauug

SEQ ID NO: 463614 - RNA, 24 nt, Human
uuauuuagcauauguacacauaaa

SEQ ID NO: 463615 - RNA, 21 nt, Human
aaaaaaaaaaaaaaaaagucu

SEQ ID NO: 463616 - RNA, 23 nt, Human
aaaacaacaaaauaaagugaaga

SEQ ID NO: 463617 - RNA, 21 nt, Human
aaaacagaaaaacaaaacaaa

SEQ ID NO: 463618 - RNA, 22 nt, Human
aaaacagaaaaacaaaacaaaa

SEQ ID NO: 463619 - RNA, 19 nt, Human
aaacaaaacaaaacaacaa

SEQ ID NO: 463620 - RNA, 25 nt, Human
aaacaaaacaaaacaacaaaauaaa

SEQ ID NO: 463621 - RNA, 27 nt, Human
aaacaaaacaacaaaauaaagugaaga

SEQ ID NO: 463622 - RNA, 24 nt, Human
aaacaaaacagaaaaacaaaacaa

SEQ ID NO: 463623 - RNA, 25 nt, Human
aaacaaaacagaaaaacaaaacaaa

SEQ ID NO: 463624 - RNA, 19 nt, Human
aaaggagguggcugcccag

SEQ ID NO: 463625 - RNA, 19 nt, Human
aacaaaauacaccccaucc

SEQ ID NO: 463626 - RNA, 21 nt, Human
aacaaaccaaaacauuuuccc

SEQ ID NO: 463627 - RNA, 21 nt, Human
aacacuggccuuggcaaaaaa

SEQ ID NO: 463628 - RNA, 18 nt, Human
aaccaaaacauuuucccc

SEQ ID NO: 463629 - RNA, 25 nt, Human
aaccaauacuauacugcuuaacaca

SEQ ID NO: 463630 - RNA, 19 nt, Human
aagaagaauuggggcucug

SEQ ID NO: 463631 - RNA, 19 nt, Human
aagcaaaaacaaaacaaca

SEQ ID NO: 463632 - RNA, 21 nt, Human
aagcaaaaacaaaacaacacg

SEQ ID NO: 463633 - RNA, 19 nt, Human
aagcagccgugcgcccgcu

SEQ ID NO: 463634 - RNA, 27 nt, Human
aagcauccgugcaucaauaaagcaaaa

SEQ ID NO: 463635 - RNA, 18 nt, Human
acaaaacaaaacaacaaa

SEQ ID NO: 463636 - RNA, 24 nt, Human
acaaaacaacaaaauaaagugaag

SEQ ID NO: 463637 - RNA, 23 nt, Human
acaaaacagaaaaacaaaacaaa

SEQ ID NO: 463638 - RNA, 24 nt, Human
acaaaacagaaaaacaaaacaaaa

SEQ ID NO: 463639 - RNA, 21 nt, Human
acaaaauacaccccauccccc

SEQ ID NO: 463640 - RNA, 22 nt, Human
acaccccaucccccccgacacc

SEQ ID NO: 463641 - RNA, 22 nt, Human
accagcacccacgcccaccucu

SEQ ID NO: 463642 - RNA, 20 nt, Human
accgccggcgcagcgccucg

SEQ ID NO: 463643 - RNA, 23 nt, Human
accuuuguuucaaaauauagaaa

SEQ ID NO: 463644 - RNA, 21 nt, Human
agacaagcggggcccccagga

SEQ ID NO: 463645 - RNA, 19 nt, Human
agaggucgaagacgacgcg

SEQ ID NO: 463646 - RNA, 20 nt, Human
agcggcggcggcggcggcgg

SEQ ID NO: 463647 - RNA, 23 nt, Human
agcggcggcggcggcggcggcgg

SEQ ID NO: 463648 - RNA, 18 nt, Human
aggagccccugggggagc

SEQ ID NO: 463649 - RNA, 20 nt, Human
aggcccccgcccgggcuguc

SEQ ID NO: 463650 - RNA, 22 nt, Human
agggagggucgaguuggguugg

SEQ ID NO: 463651 - RNA, 18 nt, Human
aggggagggagggucgag

SEQ ID NO: 463652 - RNA, 18 nt, Human
aggggguggggggaguac

SEQ ID NO: 463653 - RNA, 22 nt, Human
caaaaaaaaaaaaaaaaaaaaa

SEQ ID NO: 463654 - RNA, 22 nt, Human
caaaauacaccccauccccccc

SEQ ID NO: 463655 - RNA, 23 nt, Human
caaacaaaacagaaaaacaaaac

SEQ ID NO: 463656 - RNA, 20 nt, Human
caaaccaaaacauuuucccc

SEQ ID NO: 463657 - RNA, 22 nt, Human
caaaccaaaacauuuuccccuc

SEQ ID NO: 463658 - RNA, 23 nt, Human
caacaaaauacaccccauccccc

SEQ ID NO: 463659 - RNA, 25 nt, Human
caacaaaauacaccccauccccccc

SEQ ID NO: 463660 - RNA, 24 nt, Human
caacacuggccuuggcaaaaaaaa

SEQ ID NO: 463661 - RNA, 25 nt, Human
caacacuggccuuggcaaaaaaaaa

SEQ ID NO: 463662 - RNA, 21 nt, Human
caauaaagcaaaaacaaaaca

SEQ ID NO: 463663 - RNA, 20 nt, Human
cacaaaccagcuuauccuuc

SEQ ID NO: 463664 - RNA, 24 nt, Human
cacaaacuugcaacaaaauacacc

SEQ ID NO: 463665 - RNA, 19 nt, Human
cacagguagcaagauuguc

SEQ ID NO: 463666 - RNA, 19 nt, Human
caccagcacccacgcccac

SEQ ID NO: 463667 - RNA, 23 nt, Human
caccccaucccccccgacacccc

SEQ ID NO: 463668 - RNA, 23 nt, Human
caccccccggguugggcagcccc

SEQ ID NO: 463669 - RNA, 19 nt, Human
cacccccuuaccauuuugc

SEQ ID NO: 463670 - RNA, 23 nt, Human
cacgccgagacgccaccgacgcc

SEQ ID NO: 463671 - RNA, 18 nt, Human
cagcaacacuggccuugg

SEQ ID NO: 463672 - RNA, 23 nt, Human
cagcaacacuggccuuggcaaaa

SEQ ID NO: 463673 - RNA, 25 nt, Human
cagcaccgcaggcuugcuggaacca

SEQ ID NO: 463674 - RNA, 20 nt, Human
cagcccucucuucgccccca

SEQ ID NO: 463675 - RNA, 24 nt, Human
caucccccccgacacccccuuacc

SEQ ID NO: 463676 - RNA, 25 nt, Human
caucccccccgacacccccuuacca

SEQ ID NO: 463677 - RNA, 23 nt, Human
ccaccgccggcgcagcgccucgc

SEQ ID NO: 463678 - RNA, 23 nt, Human
ccaccuccuacugcgguugacuc

SEQ ID NO: 463679 - RNA, 23 nt, Human
ccagcacccacgcccaccucugc

SEQ ID NO: 463680 - RNA, 18 nt, Human
ccaggccagacggggccg

SEQ ID NO: 463681 - RNA, 23 nt, Human
ccccaucccccccgacacccccu

SEQ ID NO: 463682 - RNA, 25 nt, Human
cccccaggccguugggcagucgcgc

SEQ ID NO: 463683 - RNA, 21 nt, Human
ccccccggguugggcagcccc

SEQ ID NO: 463684 - RNA, 24 nt, Human
cccccgagacaagcggggccccca

SEQ ID NO: 463685 - RNA, 19 nt, Human
ccccggguugggcagcccc

SEQ ID NO: 463686 - RNA, 19 nt, Human
ccccguaaccagcccaccg

SEQ ID NO: 463687 - RNA, 21 nt, Human
ccccugggggagcaggcgucg

SEQ ID NO: 463688 - RNA, 24 nt, Human
cccggugguggccgccguugccuc

SEQ ID NO: 463689 - RNA, 19 nt, Human
cccucaggauuggagagga

SEQ ID NO: 463690 - RNA, 18 nt, Human
ccgcagcgcuggccgggc

SEQ ID NO: 463691 - RNA, 21 nt, Human
ccgcaggcuugcuggaaccau

SEQ ID NO: 463692 - RNA, 19 nt, Human
ccgcggcgccuucuccucc

SEQ ID NO: 463693 - RNA, 21 nt, Human
ccgugcguuccacgccgagac

SEQ ID NO: 463694 - RNA, 19 nt, Human
cgagacgccaccgacgccg

SEQ ID NO: 463695 - RNA, 21 nt, Human
cgagccgggccucuuaccacc

SEQ ID NO: 463696 - RNA, 27 nt, Human
cgagccgggccucuuaccaccagcacc

SEQ ID NO: 463697 - RNA, 21 nt, Human
cgcccccaccuccuacugcgg

SEQ ID NO: 463698 - RNA, 18 nt, Human
cgccgugggggcuccacc

SEQ ID NO: 463699 - RNA, 21 nt, Human
cggcccgaggggagggggcga

SEQ ID NO: 463700 - RNA, 22 nt, Human
cggcccgggggagcggccgucc

SEQ ID NO: 463701 - RNA, 24 nt, Human
cggcggcggcggcggcggcagcgc

SEQ ID NO: 463702 - RNA, 21 nt, Human
cggcugcccagggcgugggga

SEQ ID NO: 463703 - RNA, 21 nt, Human
cgggcugucuccgcggcgccu

SEQ ID NO: 463704 - RNA, 19 nt, Human
cggggcccccaggagcccc

SEQ ID NO: 463705 - RNA, 20 nt, Human
cguagcgcuccaggccagac

SEQ ID NO: 463706 - RNA, 20 nt, Human
cguggaagcucgaaaggggc

SEQ ID NO: 463707 - RNA, 24 nt, Human
cguggccgauacacccgggguacc

SEQ ID NO: 463708 - RNA, 22 nt, Human
cucagcucggccagggccucgg

SEQ ID NO: 463709 - RNA, 23 nt, Human
cucagcucggccagggccucggc

SEQ ID NO: 463710 - RNA, 18 nt, Human
cuccgccaccccccgggu

SEQ ID NO: 463711 - RNA, 20 nt, Human
cucugggggucccuccucug

SEQ ID NO: 463712 - RNA, 24 nt, Human
cugcgggggagggaggaggggggg

SEQ ID NO: 463713 - RNA, 19 nt, Human
cugcugcugcugcugcugc

SEQ ID NO: 463714 - RNA, 21 nt, Human
cugcugcuucccaggcucacc

SEQ ID NO: 463715 - RNA, 18 nt, Human
cugcuguugcuguugcug

SEQ ID NO: 463716 - RNA, 19 nt, Human
cuggucuagggcaaaggag

SEQ ID NO: 463717 - RNA, 23 nt, Human
cugucucuuccucuccccgggga

SEQ ID NO: 463718 - RNA, 19 nt, Human
cuucccaggcucaccggcg

SEQ ID NO: 463719 - RNA, 21 nt, Human
cuuggcaaaaaaaaaaaaaaa

SEQ ID NO: 463720 - RNA, 23 nt, Human
cuuuuucuuuuguguguguuuuu

SEQ ID NO: 463721 - RNA, 19 nt, Human
gaagaaguuacauaccuuu

SEQ ID NO: 463722 - RNA, 21 nt, Human
gaagcucccggcccgagggga

SEQ ID NO: 463723 - RNA, 18 nt, Human
gagcugcguccucucccc

SEQ ID NO: 463724 - RNA, 20 nt, Human
gaggagggggggcgagaaag

SEQ ID NO: 463725 - RNA, 23 nt, Human
gcagcggcggcggcggcggcggc

SEQ ID NO: 463726 - RNA, 26 nt, Human
gccccugggggagcaggcgucggggg

SEQ ID NO: 463727 - RNA, 21 nt, Human
gcccgaggggagggggcgagg

SEQ ID NO: 463728 - RNA, 23 nt, Human
gcccuggggaagguaggcccccg

SEQ ID NO: 463729 - RNA, 18 nt, Human
gccguagcgcuccaggcc

SEQ ID NO: 463730 - RNA, 22 nt, Human
gccguagcgcuccaggccagac

SEQ ID NO: 463731 - RNA, 21 nt, Human
gccucggcguugcgcugcuuc

SEQ ID NO: 463732 - RNA, 18 nt, Human
gcgccuucuuccuggugc

SEQ ID NO: 463733 - RNA, 24 nt, Human
gcggcggcggcggcggcggcagcg

SEQ ID NO: 463734 - RNA, 23 nt, Human
gcggcggcggcggcggcggcggc

SEQ ID NO: 463735 - RNA, 24 nt, Human
gcggcggcggcggcggcggcggca

SEQ ID NO: 463736 - RNA, 24 nt, Human
gcggcggcggcggcggcggcggcg

SEQ ID NO: 463737 - RNA, 23 nt, Human
gcucccggcccgaggggaggggg

SEQ ID NO: 463738 - RNA, 20 nt, Human
gcugcccagggcguggggag

SEQ ID NO: 463739 - RNA, 21 nt, Human
ggagcaggcgucgggggccca

SEQ ID NO: 463740 - RNA, 25 nt, Human
ggaggacuggccggcuggggaggga

SEQ ID NO: 463741 - RNA, 19 nt, Human
ggaggagggggggcgagaa

SEQ ID NO: 463742 - RNA, 18 nt, Human
ggcaaaaaaaaaaaaaaa

SEQ ID NO: 463743 - RNA, 18 nt, Human
ggccuccgccaccccccg

SEQ ID NO: 463744 - RNA, 23 nt, Human
ggcggcggcggcggcggcggcgg

SEQ ID NO: 463745 - RNA, 23 nt, Human
ggcggcggcggcggcggcggcgg

SEQ ID NO: 463746 - RNA, 23 nt, Human
ggcguggggagggggugggggga

SEQ ID NO: 463747 - RNA, 22 nt, Human
ggcuggaagcucccggcccgag

SEQ ID NO: 463748 - RNA, 21 nt, Human
gggagcaggcgucgggggccc

SEQ ID NO: 463749 - RNA, 26 nt, Human
gggagcaggcgucgggggcccacggc

SEQ ID NO: 463750 - RNA, 20 nt, Human
gggagggucgaguuggguug

SEQ ID NO: 463751 - RNA, 19 nt, Human
gggcaaaggagguggcugc

SEQ ID NO: 463752 - RNA, 20 nt, Human
gggcaggucgcacagguagc

SEQ ID NO: 463753 - RNA, 18 nt, Human
gggcccacggcugcccag

SEQ ID NO: 463754 - RNA, 19 nt, Human
gggcguggggagggggugg

SEQ ID NO: 463755 - RNA, 23 nt, Human
ggggaguaccgcagcgcuggccc

SEQ ID NO: 463756 - RNA, 26 nt, Human
gggugaggggagggagggucgaguug

SEQ ID NO: 463757 - RNA, 20 nt, Human
guccgacugcgggggaggga

SEQ ID NO: 463758 - RNA, 23 nt, Human
guggccgauacacccgggguacc

SEQ ID NO: 463759 - RNA, 20 nt, Human
guugcgcugcuucuccuuca

SEQ ID NO: 463760 - RNA, 22 nt, Human
guugcugcugcugcugcugcug

SEQ ID NO: 463761 - RNA, 23 nt, Human
guugcuguugcgcggcggcggcg

SEQ ID NO: 463762 - RNA, 19 nt, Human
uaaagcaaaaacaaaacaa

SEQ ID NO: 463763 - RNA, 20 nt, Human
uaaaggacaaacagagcaga

SEQ ID NO: 463764 - RNA, 20 nt, Human
uacaaaaauacacaccagca

SEQ ID NO: 463765 - RNA, 25 nt, Human
uacaaguuacuaagcuccaaggcac

SEQ ID NO: 463766 - RNA, 23 nt, Human
uagaaacaaaccaaaacauuuuc

SEQ ID NO: 463767 - RNA, 18 nt, Human
uagcauuucgcucuacug

SEQ ID NO: 463768 - RNA, 23 nt, Human
uagcauuuuuuuuuuuuuuuuuu

SEQ ID NO: 463769 - RNA, 22 nt, Human
ucaggcgccuucuuccuggugc

SEQ ID NO: 463770 - RNA, 24 nt, Human
uccaccgcagcggcggcggcggcg

SEQ ID NO: 463771 - RNA, 20 nt, Human
ucccccccgacacccccuua

SEQ ID NO: 463772 - RNA, 18 nt, Human
uccccggaguggcuggug

SEQ ID NO: 463773 - RNA, 19 nt, Human
uccuggucugugcucgaca

SEQ ID NO: 463774 - RNA, 22 nt, Human
ucgcgaggggagcucaggcgcc

SEQ ID NO: 463775 - RNA, 23 nt, Human
ucgcucagcucggccagggccuc

SEQ ID NO: 463776 - RNA, 19 nt, Human
ucuccaugucuagcauuuc

SEQ ID NO: 463777 - RNA, 18 nt, Human
ugaagaagaauuggggcu

SEQ ID NO: 463778 - RNA, 19 nt, Human
ugcaaacaaaacagaaaaa

SEQ ID NO: 463779 - RNA, 21 nt, Human
ugcaaacaaaacagaaaaaca

SEQ ID NO: 463780 - RNA, 24 nt, Human
ugcaaacaaaacagaaaaacaaga

SEQ ID NO: 463781 - RNA, 26 nt, Human
ugcaucaauaaagcaaaaacaaaaca

SEQ ID NO: 463782 - RNA, 18 nt, Human
ugcccuggggaagguagg

SEQ ID NO: 463783 - RNA, 20 nt, Human
ugcccuggggaagguaggcc

SEQ ID NO: 463784 - RNA, 21 nt, Human
ugcgguagcagguuggggggc

SEQ ID NO: 463785 - RNA, 24 nt, Human
ugcgguagcagguuggggggcacg

SEQ ID NO: 463786 - RNA, 21 nt, Human
ugcugcugcugcugcugcugc

SEQ ID NO: 463787 - RNA, 21 nt, Human
ugcugcugcugcugcugcugc

SEQ ID NO: 463788 - RNA, 21 nt, Human
ugcugcugcugcugcugcugc

SEQ ID NO: 463789 - RNA, 21 nt, Human
ugcugcugcugcugcugcugu

SEQ ID NO: 463790 - RNA, 21 nt, Human
ugcugcugcugcugcugcugu

SEQ ID NO: 463791 - RNA, 18 nt, Human
ugcugcugcugcugcugu

SEQ ID NO: 463792 - RNA, 18 nt, Human
ugcugcugcugcugcugu

SEQ ID NO: 463793 - RNA, 21 nt, Human
ugcugcugcugcuguugcugc

SEQ ID NO: 463794 - RNA, 21 nt, Human
ugcugcugcugcuguugcugu

SEQ ID NO: 463795 - RNA, 21 nt, Human
ugcugcugcuguugcugcugc

SEQ ID NO: 463796 - RNA, 21 nt, Human
ugcugcuguugcugcugcugc

SEQ ID NO: 463797 - RNA, 30 nt, Human
ugcuggcccacuccucggcgcgguugcgcc

SEQ ID NO: 463798 - RNA, 21 nt, Human
ugcuguugcugcugcugcugc

SEQ ID NO: 463799 - RNA, 18 nt, Human
ugcuguugcuguugcugu

SEQ ID NO: 463800 - RNA, 23 nt, Human
ugcuguugcuguugcuguugcgc

SEQ ID NO: 463801 - RNA, 20 nt, Human
uggcccagggcaugcggggc

SEQ ID NO: 463802 - RNA, 22 nt, Human
uggccuuggcaaaaaaaaaaaa

SEQ ID NO: 463803 - RNA, 23 nt, Human
ugggcagccccguaaccagccca

SEQ ID NO: 463804 - RNA, 20 nt, Human
uggggaggggguggggggag

SEQ ID NO: 463805 - RNA, 18 nt, Human
ugggggaggggcccucag

SEQ ID NO: 463806 - RNA, 24 nt, Human
ugggggaggggcccucaggauugg

SEQ ID NO: 463807 - RNA, 23 nt, Human
ugguugagcuguuguugcugcug

SEQ ID NO: 463808 - RNA, 22 nt, Human
uguauaaaggacaaacagagca

SEQ ID NO: 463809 - RNA, 19 nt, Human
uguggcugcugcuucccag

SEQ ID NO: 463810 - RNA, 21 nt, Human
uguugcugcugcugcugcugc

SEQ ID NO: 463811 - RNA, 21 nt, Human
uguugcugcugcugcugcugc

SEQ ID NO: 463812 - RNA, 24 nt, Human
uugagcuguuguugcugcugcugc

SEQ ID NO: 463813 - RNA, 20 nt, Human
uuggcaaaaaaaaaaaaaaa

SEQ ID NO: 463814 - RNA, 23 nt, Human
uugggggugaggggagggagggu

SEQ ID NO: 463815 - RNA, 30 nt, Human
uuugcaaacaaaacagaaaaacaaaacaaa

SEQ ID NO: 463816 - RNA, 19 nt, Human
uuuuucuuuuguguguguu

SEQ ID NO: 463817 - RNA, 23 nt, Human
uuuuuuuuuuuuuuuuuuuuagg

SEQ ID NO: 463818 - RNA, 22 nt, Human
aaacaaggacgcaccucccgug

SEQ ID NO: 463819 - RNA, 24 nt, Human
aacaauaccccagugcugcaccaa

SEQ ID NO: 463820 - RNA, 23 nt, Human
aacacaagaagccaacaauaccc

SEQ ID NO: 463821 - RNA, 25 nt, Human
aacacaagaagccaacaauacccca

SEQ ID NO: 463822 - RNA, 21 nt, Human
aagaagccaacaauaccccag

SEQ ID NO: 463823 - RNA, 20 nt, Human
accaaguuacuucccacugu

SEQ ID NO: 463824 - RNA, 19 nt, Human
agggcguggggauuuccag

SEQ ID NO: 463825 - RNA, 25 nt, Human
auuacaaaguuuccaacacaagaag

SEQ ID NO: 463826 - RNA, 20 nt, Human
caacaauaccccagugcugc

SEQ ID NO: 463827 - RNA, 24 nt, Human
caacaauaccccagugcugcacca

SEQ ID NO: 463828 - RNA, 23 nt, Human
cacaagacgauaaagggaaacag

SEQ ID NO: 463829 - RNA, 18 nt, Human
cacagcuuaaccacggcc

SEQ ID NO: 463830 - RNA, 18 nt, Human
caccaaguuacuucccac

SEQ ID NO: 463831 - RNA, 19 nt, Human
caggacccgaagcugagag

SEQ ID NO: 463832 - RNA, 23 nt, Human
ccaaggcacagucaauuaauaau

SEQ ID NO: 463833 - RNA, 22 nt, Human
ccgcagccgcaggacccgaagc

SEQ ID NO: 463834 - RNA, 24 nt, Human
ccucauagaaucuccagcaucagg

SEQ ID NO: 463835 - RNA, 22 nt, Human
ccucccguggcucuaugcaugg

SEQ ID NO: 463836 - RNA, 27 nt, Human
gaaccuacgaccgucugauacccuuga

SEQ ID NO: 463837 - RNA, 19 nt, Human
gaagccaacaauaccccag

SEQ ID NO: 463838 - RNA, 23 nt, Human
gcugcaccaaguuacuucccacu

SEQ ID NO: 463839 - RNA, 23 nt, Human
ggccaggagcaagaauucgaguu

SEQ ID NO: 463840 - RNA, 20 nt, Human
ggggauuuccaguuuuuccu

SEQ ID NO: 463841 - RNA, 23 nt, Human
guacacagcuuaaccacggccag

SEQ ID NO: 463842 - RNA, 21 nt, Human
uaagaaccuacgaccgucuga

SEQ ID NO: 463843 - RNA, 18 nt, Human
uacccuugaggagagcac

SEQ ID NO: 463844 - RNA, 28 nt, Human
ucgcucaguuuauaaaaacuugaggcca

SEQ ID NO: 463845 - RNA, 18 nt, Human
ugccacugaugaaucaaa

SEQ ID NO: 463846 - RNA, 23 nt, Human
uggaaaacaaggacgcaccuccc

SEQ ID NO: 463847 - RNA, 25 nt, Human
aaaaacaggagcuuuuuaaaagaaa

SEQ ID NO: 463848 - RNA, 28 nt, Human
aaaacaggaaauacuaaaauaaaaauau

SEQ ID NO: 463849 - RNA, 21 nt, Human
aaaaguaaagucuguucuauc

SEQ ID NO: 463850 - RNA, 21 nt, Human
aaacaaugucauuaugcucuu

SEQ ID NO: 463851 - RNA, 19 nt, Human
aacaaagggaauauuuuac

SEQ ID NO: 463852 - RNA, 23 nt, Human
accuaucagaaggguuaaaccag

SEQ ID NO: 463853 - RNA, 21 nt, Human
agcauaauuaggcuucaucaa

SEQ ID NO: 463854 - RNA, 23 nt, Human
agggaauauuuuacugcaaagaa

SEQ ID NO: 463855 - RNA, 24 nt, Human
caaacgccaagcuugagaggaagu

SEQ ID NO: 463856 - RNA, 21 nt, Human
caggaaauacuaaaauaaaaa

SEQ ID NO: 463857 - RNA, 23 nt, Human
ccaaacaaacgccaagcuugaga

SEQ ID NO: 463858 - RNA, 18 nt, Human
ccaccaaacaaacgccaa

SEQ ID NO: 463859 - RNA, 20 nt, Human
cccauaaauucuacuuucca

SEQ ID NO: 463860 - RNA, 20 nt, Human
ccccaccaaacaaacgccaa

SEQ ID NO: 463861 - RNA, 20 nt, Human
ccccagcauccacaacuacc

SEQ ID NO: 463862 - RNA, 19 nt, Human
cuccaggcaaagauuauuc

SEQ ID NO: 463863 - RNA, 20 nt, Human
cucugcuucuagaucaaugc

SEQ ID NO: 463864 - RNA, 24 nt, Human
cucugcuucuagaucaaugcuggg

SEQ ID NO: 463865 - RNA, 18 nt, Human
gaaauucuagaguguagu

SEQ ID NO: 463866 - RNA, 19 nt, Human
gaaucacaaguuggaacug

SEQ ID NO: 463867 - RNA, 26 nt, Human
gccauuauccaaauagcacaaccauu

SEQ ID NO: 463868 - RNA, 21 nt, Human
ggaauauuuuacugcaaagaa

SEQ ID NO: 463869 - RNA, 21 nt, Human
guaaccccaccaaacaaacgc

SEQ ID NO: 463870 - RNA, 21 nt, Human
guucucauccccagcauccac

SEQ ID NO: 463871 - RNA, 21 nt, Human
uaaaaauaucugacacugcca

SEQ ID NO: 463872 - RNA, 22 nt, Human
uaaaccaggucaaaacagucca

SEQ ID NO: 463873 - RNA, 26 nt, Human
uaaauucuacuuuccaaaaacaggag

SEQ ID NO: 463874 - RNA, 23 nt, Human
uaacacugagaugcaaucuaaca

SEQ ID NO: 463875 - RNA, 21 nt, Human
uaacauuaacaaagggaauau

SEQ ID NO: 463876 - RNA, 22 nt, Human
uacaaaugcugccuagugccau

SEQ ID NO: 463877 - RNA, 27 nt, Human
uaccuucuucccccuuccccgaccgga

SEQ ID NO: 463878 - RNA, 24 nt, Human
uacuaaaauaaaaauaucugacac

SEQ ID NO: 463879 - RNA, 21 nt, Human
uagcacaaccauuuuacgucu

SEQ ID NO: 463880 - RNA, 19 nt, Human
uagugucacuccaggcaaa

SEQ ID NO: 463881 - RNA, 20 nt, Human
ucauuuaagugaccuuaugu

SEQ ID NO: 463882 - RNA, 24 nt, Human
uccccagcauccacaacuaccuau

SEQ ID NO: 463883 - RNA, 18 nt, Human
ucccccuuccccgaccgg

SEQ ID NO: 463884 - RNA, 19 nt, Human
uccuuuuuguauccccccu

SEQ ID NO: 463885 - RNA, 25 nt, Human
ucuaagaugcaaauaaaccaaaaca

SEQ ID NO: 463886 - RNA, 24 nt, Human
ucuacuuuccaaaaacaggagcug

SEQ ID NO: 463887 - RNA, 19 nt, Human
ucucauccccagcauccac

SEQ ID NO: 463888 - RNA, 23 nt, Human
uggcaaugcaggaaagaugucuu

SEQ ID NO: 463889 - RNA, 23 nt, Human
uuaacacugagaugcaaucuaac

SEQ ID NO: 463890 - RNA, 23 nt, Human
uuaccuucuucccccuuccccga

SEQ ID NO: 463891 - RNA, 20 nt, Human
uuauguaaaaaauaaaauaa

SEQ ID NO: 463892 - RNA, 21 nt, Human
uucaaauguacauaaaagaaa

SEQ ID NO: 463893 - RNA, 23 nt, Human
uuuagcaguuccaaguauccaaa

SEQ ID NO: 463894 - RNA, 25 nt, Human
uuuuuuuuuuuuuuuuacuuuuuaa

SEQ ID NO: 463895 - RNA, 21 nt, Human
agacuacagguggccgcugca

SEQ ID NO: 463896 - RNA, 19 nt, Human
caagagccaggcugcgaga

SEQ ID NO: 463897 - RNA, 23 nt, Human
cacacaauguccuugaggcucua

SEQ ID NO: 463898 - RNA, 19 nt, Human
caccccuaacagcguccgc

SEQ ID NO: 463899 - RNA, 27 nt, Human
caggcacaacgcgcccaacaagcgcca

SEQ ID NO: 463900 - RNA, 21 nt, Human
ccagagccucucgaaccgccg

SEQ ID NO: 463901 - RNA, 20 nt, Human
ccccccgccaccccuaacag

SEQ ID NO: 463902 - RNA, 24 nt, Human
ccccgccaccccuaacagcguccg

SEQ ID NO: 463903 - RNA, 18 nt, Human
ccgccgccaaccccccgc

SEQ ID NO: 463904 - RNA, 24 nt, Human
cuuagacugccggcccagagccuc

SEQ ID NO: 463905 - RNA, 20 nt, Human
gcccaacaagcgccaugggg

SEQ ID NO: 463906 - RNA, 22 nt, Human
gcugcaggcacaacgcgcccaa

SEQ ID NO: 463907 - RNA, 21 nt, Human
ucucgaaccgccgccaacccc

SEQ ID NO: 463908 - RNA, 18 nt, Human
uugcuugagggugcggcu

SEQ ID NO: 463909 - RNA, 22 nt, Human
uuuuuuuuuuuuuuuuuuucag

SEQ ID NO: 463910 - RNA, 21 nt, Human
aaaggaaaacaaauucagacc

SEQ ID NO: 463911 - RNA, 25 nt, Human
aaaggaaaacaaauucagaccaaaa

SEQ ID NO: 463912 - RNA, 21 nt, Human
aaccacauuauucugagacag

SEQ ID NO: 463913 - RNA, 23 nt, Human
aaguaguaguuuuuuuuuuuucu

SEQ ID NO: 463914 - RNA, 22 nt, Human
aaugguuauuuugcagagaaga

SEQ ID NO: 463915 - RNA, 18 nt, Human
aauguuuacaaaauaagu

SEQ ID NO: 463916 - RNA, 21 nt, Human
acacuguaucagcuggagucc

SEQ ID NO: 463917 - RNA, 24 nt, Human
acauuauucugagacaguacauuu

SEQ ID NO: 463918 - RNA, 19 nt, Human
acugagauauuuucugguu

SEQ ID NO: 463919 - RNA, 24 nt, Human
acuuuaagaaucuaaccaaaggaa

SEQ ID NO: 463920 - RNA, 20 nt, Human
aguuuuuuuuuuuucuacuu

SEQ ID NO: 463921 - RNA, 23 nt, Human
aguuuuuuuuuuuucuacuuuaa

SEQ ID NO: 463922 - RNA, 26 nt, Human
augaagacugcugucaaaaucugucc

SEQ ID NO: 463923 - RNA, 20 nt, Human
auucauuuucuuacuuuuuu

SEQ ID NO: 463924 - RNA, 21 nt, Human
auuuccuguugugcucuagug

SEQ ID NO: 463925 - RNA, 23 nt, Human
auuugaguaagcucuuuaaaaau

SEQ ID NO: 463926 - RNA, 23 nt, Human
caaaaagggcugaaaaaagguug

SEQ ID NO: 463927 - RNA, 22 nt, Human
cacacuguaucagcuggagucc

SEQ ID NO: 463928 - RNA, 18 nt, Human
cacuguaucagcuggagu

SEQ ID NO: 463929 - RNA, 23 nt, Human
cacuuacgggagauuuccacuga

SEQ ID NO: 463930 - RNA, 21 nt, Human
cagagauaagccaauauuucc

SEQ ID NO: 463931 - RNA, 19 nt, Human
cauuucaaaucaaugguua

SEQ ID NO: 463932 - RNA, 24 nt, Human
ccccagaauuuauaauuucucaca

SEQ ID NO: 463933 - RNA, 19 nt, Human
cccuuugguuauauuuuaa

SEQ ID NO: 463934 - RNA, 25 nt, Human
cuaguguacaaaggggcaaaggaag

SEQ ID NO: 463935 - RNA, 24 nt, Human
cuccacauuucaaaucaaugguua

SEQ ID NO: 463936 - RNA, 26 nt, Human
cucuuuaaaaaugcuguuuuagaaag

SEQ ID NO: 463937 - RNA, 21 nt, Human
cugugcuuucuuuucucuugc

SEQ ID NO: 463938 - RNA, 21 nt, Human
gagaagaaaacggaggcacuu

SEQ ID NO: 463939 - RNA, 21 nt, Human
guucacacaaaaccuauauau

SEQ ID NO: 463940 - RNA, 19 nt, Human
guugcaauugcauuguauu

SEQ ID NO: 463941 - RNA, 20 nt, Human
uaagcaacuccuauagagac

SEQ ID NO: 463942 - RNA, 21 nt, Human
uagaaaacacucauauggaac

SEQ ID NO: 463943 - RNA, 24 nt, Human
uagaggaauugagaucucagcuca

SEQ ID NO: 463944 - RNA, 24 nt, Human
uaguaguuuuuuuuuuuucuacuu

SEQ ID NO: 463945 - RNA, 20 nt, Human
uccacugagcuccuacacca

SEQ ID NO: 463946 - RNA, 25 nt, Human
ugaagacugcugucaaaaucugucc

SEQ ID NO: 463947 - RNA, 19 nt, Human
ugagacaguacauuucauu

SEQ ID NO: 463948 - RNA, 18 nt, Human
ugagcuccuacaccagca

SEQ ID NO: 463949 - RNA, 21 nt, Human
ugaguaagcucuuuaaaaaug

SEQ ID NO: 463950 - RNA, 22 nt, Human
uuaaaauaucugaaucaaaauc

SEQ ID NO: 463951 - RNA, 23 nt, Human
uucacauuaaauaaaauuuucuu

SEQ ID NO: 463952 - RNA, 20 nt, Human
uugcuuagaagaggacugau

SEQ ID NO: 463953 - RNA, 26 nt, Human
uuguauguucacacaaaaccuauaua

SEQ ID NO: 463954 - RNA, 22 nt, Human
uuuaaaauaucugaaucaaaau

SEQ ID NO: 463955 - RNA, 21 nt, Human
uuugaaguaacucgcccaggg

SEQ ID NO: 463956 - RNA, 18 nt, Human
accaagaaucauaaaagu

SEQ ID NO: 463957 - RNA, 18 nt, Human
aggugacggugaggaugg

SEQ ID NO: 463958 - RNA, 21 nt, Human
auaaaaguaaaaaaagcugcu

SEQ ID NO: 463959 - RNA, 21 nt, Human
cggaauacuaagaaguugcug

SEQ ID NO: 463960 - RNA, 26 nt, Human
cuaagaaguugcugcuggucuacaga

SEQ ID NO: 463961 - RNA, 23 nt, Human
ggugaggauggucccaagaggcg

SEQ ID NO: 463962 - RNA, 19 nt, Human
uaccaagaaucauaaaagu

SEQ ID NO: 463963 - RNA, 21 nt, Human
uaccaagaaucauaaaaguaa

SEQ ID NO: 463964 - RNA, 23 nt, Human
ucuacagagcccugggaggugac

SEQ ID NO: 463965 - RNA, 24 nt, Human
ugcugcuggucuacagagcccugg

SEQ ID NO: 463966 - RNA, 20 nt, Human
aaaccagcaucagaggaagg

SEQ ID NO: 463967 - RNA, 23 nt, Human
aacuacugaccaagacugccacc

SEQ ID NO: 463968 - RNA, 24 nt, Human
aacuacugaccaagacugccaccu

SEQ ID NO: 463969 - RNA, 19 nt, Human
aagcagaccaacaacacac

SEQ ID NO: 463970 - RNA, 19 nt, Human
acacaccaagcagaccaaa

SEQ ID NO: 463971 - RNA, 18 nt, Human
acacaguuccuccccuuc

SEQ ID NO: 463972 - RNA, 19 nt, Human
acagggcgaggcugguguc

SEQ ID NO: 463973 - RNA, 22 nt, Human
accaugccccaccucuagcacc

SEQ ID NO: 463974 - RNA, 21 nt, Human
acccuuggccuuaaaucccaa

SEQ ID NO: 463975 - RNA, 21 nt, Human
accugagaguucugagggcca

SEQ ID NO: 463976 - RNA, 25 nt, Human
acuacaaacugagacugggccacga

SEQ ID NO: 463977 - RNA, 21 nt, Human
acuuccagccaccaugcccca

SEQ ID NO: 463978 - RNA, 21 nt, Human
acuuguggcugcuccuuccuc

SEQ ID NO: 463979 - RNA, 23 nt, Human
agagcagaggcccagggcggggg

SEQ ID NO: 463980 - RNA, 23 nt, Human
agccaccaggcagaggucauacc

SEQ ID NO: 463981 - RNA, 25 nt, Human
agccaggcaagagagcagaggccca

SEQ ID NO: 463982 - RNA, 21 nt, Human
aggcaagagagcagaggccca

SEQ ID NO: 463983 - RNA, 24 nt, Human
aggcaagagagcagaggcccaggg

SEQ ID NO: 463984 - RNA, 21 nt, Human
aggcagggcuccgggagcugu

SEQ ID NO: 463985 - RNA, 24 nt, Human
aggcagggcuccgggagcuguuuc

SEQ ID NO: 463986 - RNA, 25 nt, Human
agggagcaagggcugccaagccagg

SEQ ID NO: 463987 - RNA, 23 nt, Human
agggccagaggucgcccagaacc

SEQ ID NO: 463988 - RNA, 18 nt, Human
aggggaaggaaaggcagg

SEQ ID NO: 463989 - RNA, 20 nt, Human
agugaaagggccaaggggga

SEQ ID NO: 463990 - RNA, 25 nt, Human
caacacacaagcucauugccagccc

SEQ ID NO: 463991 - RNA, 22 nt, Human
caagagagcagaggcccagggc

SEQ ID NO: 463992 - RNA, 18 nt, Human
caagcgcacccacaaggg

SEQ ID NO: 463993 - RNA, 19 nt, Human
cacacaagcucauugccag

SEQ ID NO: 463994 - RNA, 24 nt, Human
cacacacaccaagcagaccaacaa

SEQ ID NO: 463995 - RNA, 20 nt, Human
cacacacccgaccaccccuc

SEQ ID NO: 463996 - RNA, 21 nt, Human
caccaagcagaccaacaacac

SEQ ID NO: 463997 - RNA, 23 nt, Human
caccaggcagaggucauacccac

SEQ ID NO: 463998 - RNA, 26 nt, Human
caccccagaggcgcaaaguacccaga

SEQ ID NO: 463999 - RNA, 22 nt, Human
caccccuccauuccucgguccc

SEQ ID NO: 464000 - RNA, 22 nt, Human
cacccgaccaccccuccauucc

SEQ ID NO: 464001 - RNA, 25 nt, Human
cagacaacuuacccauucucggccc

SEQ ID NO: 464002 - RNA, 18 nt, Human
cagaccaacaacacacaa

SEQ ID NO: 464003 - RNA, 19 nt, Human
cagagauggccagggccag

SEQ ID NO: 464004 - RNA, 18 nt, Human
cagaggaaggaaggugac

SEQ ID NO: 464005 - RNA, 23 nt, Human
caggaccccagcaggagaccccu

SEQ ID NO: 464006 - RNA, 25 nt, Human
caggcagaggucauacccacacgca

SEQ ID NO: 464007 - RNA, 18 nt, Human
caggcaguuggcauggca

SEQ ID NO: 464008 - RNA, 25 nt, Human
cagggcugggcccaggggccugggc

SEQ ID NO: 464009 - RNA, 24 nt, Human
cagguacaguguccucucuaccug

SEQ ID NO: 464010 - RNA, 25 nt, Human
cauucucggcccagcaggucagaaa

SEQ ID NO: 464011 - RNA, 21 nt, Human
ccacacacccgaccaccccuc

SEQ ID NO: 464012 - RNA, 23 nt, Human
ccacugccgagaccaacgugugc

SEQ ID NO: 464013 - RNA, 23 nt, Human
ccaggcaagagagcagaggccca

SEQ ID NO: 464014 - RNA, 18 nt, Human
ccaggcaguuggcauggc

SEQ ID NO: 464015 - RNA, 20 nt, Human
ccagggccagaggucgccca

SEQ ID NO: 464016 - RNA, 19 nt, Human
ccagggcugggcccagggg

SEQ ID NO: 464017 - RNA, 23 nt, Human
cccagaggcgcaaaguacccaga

SEQ ID NO: 464018 - RNA, 19 nt, Human
ccccagaggcgcaaaguac

SEQ ID NO: 464019 - RNA, 22 nt, Human
cccccugccacccacugacccu

SEQ ID NO: 464020 - RNA, 24 nt, Human
ccuccauuccucggucccgucgca

SEQ ID NO: 464021 - RNA, 19 nt, Human
ccucccagcuuaucuuccc

SEQ ID NO: 464022 - RNA, 21 nt, Human
ccucccguccugccaguagac

SEQ ID NO: 464023 - RNA, 23 nt, Human
ccugacuccagacaacuuaccca

SEQ ID NO: 464024 - RNA, 19 nt, Human
ccugcagccccacccucuu

SEQ ID NO: 464025 - RNA, 22 nt, Human
ccugucagcuggggugaggggc

SEQ ID NO: 464026 - RNA, 19 nt, Human
ccugugccacaggccuggg

SEQ ID NO: 464027 - RNA, 19 nt, Human
ccuuccacauccggcuucu

SEQ ID NO: 464028 - RNA, 24 nt, Human
cgccugugccacaggccuggggac

SEQ ID NO: 464029 - RNA, 19 nt, Human
cgcugcuucuccucaaauc

SEQ ID NO: 464030 - RNA, 18 nt, Human
cuccuuccggccccagca

SEQ ID NO: 464031 - RNA, 18 nt, Human
cucgggcacugggacagg

SEQ ID NO: 464032 - RNA, 21 nt, Human
cucuuucccucaaaaaagaag

SEQ ID NO: 464033 - RNA, 21 nt, Human
cugcagccccacccucuuucc

SEQ ID NO: 464034 - RNA, 23 nt, Human
cugucagcuggggugaggggccc

SEQ ID NO: 464035 - RNA, 21 nt, Human
cuuacagccacugccgagacc

SEQ ID NO: 464036 - RNA, 21 nt, Human
cuuccagccaccaugccccac

SEQ ID NO: 464037 - RNA, 19 nt, Human
gaaagggccaagggggagu

SEQ ID NO: 464038 - RNA, 21 nt, Human
gaaagggccaagggggaguga

SEQ ID NO: 464039 - RNA, 21 nt, Human
gacaguggcaggauacagugg

SEQ ID NO: 464040 - RNA, 23 nt, Human
gacccuguccuacgugggcccac

SEQ ID NO: 464041 - RNA, 23 nt, Human
gagcagaggcccagggcggggga

SEQ ID NO: 464042 - RNA, 20 nt, Human
gagcaggugugagcaggcac

SEQ ID NO: 464043 - RNA, 19 nt, Human
gaggacacagggcagacgg

SEQ ID NO: 464044 - RNA, 19 nt, Human
gccagggccagaggucgcc

SEQ ID NO: 464045 - RNA, 24 nt, Human
gccauccacacacccgaccacccc

SEQ ID NO: 464046 - RNA, 22 nt, Human
gcccucagcagggagcaagggc

SEQ ID NO: 464047 - RNA, 23 nt, Human
gcucauugccagcccccugccac

SEQ ID NO: 464048 - RNA, 19 nt, Human
gcucuguuagucuucugcc

SEQ ID NO: 464049 - RNA, 24 nt, Human
ggagcuguuucaggggaaggaaag

SEQ ID NO: 464050 - RNA, 23 nt, Human
ggccaagggggagugaaagggcc

SEQ ID NO: 464051 - RNA, 21 nt, Human
ggcgcaaaguacccagaaaca

SEQ ID NO: 464052 - RNA, 20 nt, Human
gggcgggggagugaaagggc

SEQ ID NO: 464053 - RNA, 18 nt, Human
gggcuucuauaccugaga

SEQ ID NO: 464054 - RNA, 23 nt, Human
gggggagugaaagggccaagggg

SEQ ID NO: 464055 - RNA, 19 nt, Human
gucacagcuggaaauccca

SEQ ID NO: 464056 - RNA, 21 nt, Human
gucagaaacgccugugccaca

SEQ ID NO: 464057 - RNA, 19 nt, Human
gucagcuggggugaggggc

SEQ ID NO: 464058 - RNA, 23 nt, Human
uacacccgacucugguuugguuu

SEQ ID NO: 464059 - RNA, 21 nt, Human
uagcaccccagaggcgcaaag

SEQ ID NO: 464060 - RNA, 19 nt, Human
ucaaaaaagaaggaagcca

SEQ ID NO: 464061 - RNA, 22 nt, Human
ucaaaaaagaaggaagccaggc

SEQ ID NO: 464062 - RNA, 19 nt, Human
ucaaagggacaaguuccuu

SEQ ID NO: 464063 - RNA, 21 nt, Human
ucagcuggggugaggggcccg

SEQ ID NO: 464064 - RNA, 22 nt, Human
ucccagggcuggucuacaccuc

SEQ ID NO: 464065 - RNA, 23 nt, Human
uccucggucccgucgcaggucug

SEQ ID NO: 464066 - RNA, 18 nt, Human
ucucccuaagcugucacu

SEQ ID NO: 464067 - RNA, 21 nt, Human
ucuucugccugucagccucag

SEQ ID NO: 464068 - RNA, 18 nt, Human
ugaaagggccaaggggga

SEQ ID NO: 464069 - RNA, 20 nt, Human
ugacaggaggccaugcagug

SEQ ID NO: 464070 - RNA, 20 nt, Human
ugacccuuggccuuaaaucc

SEQ ID NO: 464071 - RNA, 19 nt, Human
ugacucaaagggacaaguu

SEQ ID NO: 464072 - RNA, 21 nt, Human
ugagaaacuacaaacugagac

SEQ ID NO: 464073 - RNA, 24 nt, Human
ugagacccugaggacucagccucc

SEQ ID NO: 464074 - RNA, 24 nt, Human
ugagcaggcacagcaacagccugu

SEQ ID NO: 464075 - RNA, 19 nt, Human
ugaguuagugcagagaugg

SEQ ID NO: 464076 - RNA, 24 nt, Human
ugcaguggcagugcgagaccagga

SEQ ID NO: 464077 - RNA, 20 nt, Human
ugcccuggcccagucacagc

SEQ ID NO: 464078 - RNA, 19 nt, Human
ugcguggaugccauauaua

SEQ ID NO: 464079 - RNA, 25 nt, Human
uggaaaucccagggcuggucuacac

SEQ ID NO: 464080 - RNA, 20 nt, Human
uggaugccauauauagaugg

SEQ ID NO: 464081 - RNA, 21 nt, Human
uggauggacagggaacaggca

SEQ ID NO: 464082 - RNA, 20 nt, Human
uggcagugcgagaccaggaa

SEQ ID NO: 464083 - RNA, 21 nt, Human
uggcaucagcacugagggugu

SEQ ID NO: 464084 - RNA, 18 nt, Human
ugggauacaccagccacc

SEQ ID NO: 464085 - RNA, 18 nt, Human
uggggugaggggcccggc

SEQ ID NO: 464086 - RNA, 26 nt, Human
uggucuacacccgacucugguuuggu

SEQ ID NO: 464087 - RNA, 19 nt, Human
uuggcauggcaucagcacu

SEQ ID NO: 464088 - RNA, 22 nt, Human
uuggccuuaaaucccaacagaa

SEQ ID NO: 464089 - RNA, 22 nt, Human
uugugacccuguccuacguggg

SEQ ID NO: 464090 - RNA, 25 nt, Human
uuuuuuuuuuuuuuuuuaccuguaa

SEQ ID NO: 464091 - RNA, 19 nt, Human
aagaaacuaguucaugggg

SEQ ID NO: 464092 - RNA, 20 nt, Human
aagcccaaagcuucccuucu

SEQ ID NO: 464093 - RNA, 18 nt, Human
aagcuucccuucuuggcc

SEQ ID NO: 464094 - RNA, 20 nt, Human
acagacacagaugauccgca

SEQ ID NO: 464095 - RNA, 23 nt, Human
accagcugcaccccaggccccag

SEQ ID NO: 464096 - RNA, 21 nt, Human
accccaggccccagccggccc

SEQ ID NO: 464097 - RNA, 25 nt, Human
acuccagcuucuucuggggggccgc

SEQ ID NO: 464098 - RNA, 19 nt, Human
agcagcagaggccacagcg

SEQ ID NO: 464099 - RNA, 20 nt, Human
agcagcgugaggcuccagga

SEQ ID NO: 464100 - RNA, 22 nt, Human
agccaguggcccccuuggccuc

SEQ ID NO: 464101 - RNA, 22 nt, Human
agcucuccaggaccagcagucc

SEQ ID NO: 464102 - RNA, 19 nt, Human
aggcagcuguguuuaggcc

SEQ ID NO: 464103 - RNA, 23 nt, Human
aggccuccccggggcagcagcuc

SEQ ID NO: 464104 - RNA, 19 nt, Human
agggucagcgagacagccu

SEQ ID NO: 464105 - RNA, 18 nt, Human
aguggacaagcccccacc

SEQ ID NO: 464106 - RNA, 18 nt, Human
aucaggaccugagagaga

SEQ ID NO: 464107 - RNA, 18 nt, Human
auucagccccauucuguc

SEQ ID NO: 464108 - RNA, 18 nt, Human
caacuccccuucuagggg

SEQ ID NO: 464109 - RNA, 26 nt, Human
cacagccaaggugagcaaggggcagg

SEQ ID NO: 464110 - RNA, 22 nt, Human
cacagcccacagccaaggugag

SEQ ID NO: 464111 - RNA, 18 nt, Human
caccacgaaggacaggau

SEQ ID NO: 464112 - RNA, 20 nt, Human
cacccaccgaagcccaaagc

SEQ ID NO: 464113 - RNA, 22 nt, Human
caccccaggccccagccggccc

SEQ ID NO: 464114 - RNA, 21 nt, Human
cacuccgacaccagcugaggg

SEQ ID NO: 464115 - RNA, 21 nt, Human
cacugcuggccggcucauggc

SEQ ID NO: 464116 - RNA, 23 nt, Human
cagagcccgagacccugcagggg

SEQ ID NO: 464117 - RNA, 23 nt, Human
cagagcccgagacccugcccgag

SEQ ID NO: 464118 - RNA, 25 nt, Human
cagcagcagaggccacagcggggag

SEQ ID NO: 464119 - RNA, 20 nt, Human
cagcauacccugacaccagc

SEQ ID NO: 464120 - RNA, 24 nt, Human
cagcgagacagccugucuacggca

SEQ ID NO: 464121 - RNA, 21 nt, Human
cagcggggagaaaaaggguuc

SEQ ID NO: 464122 - RNA, 22 nt, Human
cagcugcaccccaggccccagc

SEQ ID NO: 464123 - RNA, 26 nt, Human
caggaccagcaguccgagcuccuggg

SEQ ID NO: 464124 - RNA, 18 nt, Human
cagggccugguuccuccu

SEQ ID NO: 464125 - RNA, 24 nt, Human
caguagaucccauggcuccaggug

SEQ ID NO: 464126 - RNA, 27 nt, Human
caucagcaaacagcauacccugacacc

SEQ ID NO: 464127 - RNA, 20 nt, Human
ccacaguggacaagccccca

SEQ ID NO: 464128 - RNA, 19 nt, Human
ccaccaugugcagagcagc

SEQ ID NO: 464129 - RNA, 21 nt, Human
ccaggccuccccggggcagca

SEQ ID NO: 464130 - RNA, 18 nt, Human
ccagggucagaugugagg

SEQ ID NO: 464131 - RNA, 19 nt, Human
ccccaggagcugccccagc

SEQ ID NO: 464132 - RNA, 20 nt, Human
ccccaggagcugccccagcc

SEQ ID NO: 464133 - RNA, 21 nt, Human
ccccaggccccagccggcccu

SEQ ID NO: 464134 - RNA, 20 nt, Human
ccccaggccccagccggccu

SEQ ID NO: 464135 - RNA, 19 nt, Human
cccccuuggccucaggguu

SEQ ID NO: 464136 - RNA, 21 nt, Human
cccgggcucggugcacgcucc

SEQ ID NO: 464137 - RNA, 20 nt, Human
cccugggaggcgaggccagg

SEQ ID NO: 464138 - RNA, 21 nt, Human
cccuucuuggccucucugagg

SEQ ID NO: 464139 - RNA, 24 nt, Human
ccugcacccaccgaagcccaaagc

SEQ ID NO: 464140 - RNA, 23 nt, Human
ccuggagcugauucagccccauu

SEQ ID NO: 464141 - RNA, 21 nt, Human
ccugggcucagagcccgagac

SEQ ID NO: 464142 - RNA, 19 nt, Human
ccugucuacggcauugugg

SEQ ID NO: 464143 - RNA, 20 nt, Human
cggaauguucacagcccaca

SEQ ID NO: 464144 - RNA, 22 nt, Human
cggggcagcagcuccacguagc

SEQ ID NO: 464145 - RNA, 27 nt, Human
cuaugcacuccagcuucuucugggggc

SEQ ID NO: 464146 - RNA, 20 nt, Human
cucagcaccacgaaggacag

SEQ ID NO: 464147 - RNA, 21 nt, Human
cucagcaccacgaaggacagg

SEQ ID NO: 464148 - RNA, 25 nt, Human
cuccagggccgcgcacuccgacacc

SEQ ID NO: 464149 - RNA, 23 nt, Human
cugacccagacaagaaacuaguu

SEQ ID NO: 464150 - RNA, 21 nt, Human
cugacccuugggcugcacgga

SEQ ID NO: 464151 - RNA, 20 nt, Human
cugcaccccaggccccagcc

SEQ ID NO: 464152 - RNA, 21 nt, Human
cugcucagggcagccucccgg

SEQ ID NO: 464153 - RNA, 20 nt, Human
cuuggccaggccuccccggg

SEQ ID NO: 464154 - RNA, 18 nt, Human
gacaggaugggcagcagg

SEQ ID NO: 464155 - RNA, 20 nt, Human
gagccagggacgagcuggaa

SEQ ID NO: 464156 - RNA, 20 nt, Human
gaggcagcuguguuuaggcc

SEQ ID NO: 464157 - RNA, 20 nt, Human
gaggcgaggccaggcccugc

SEQ ID NO: 464158 - RNA, 25 nt, Human
gaggcgaggccaggcccugcaggga

SEQ ID NO: 464159 - RNA, 21 nt, Human
gcccagggucccggaauguuc

SEQ ID NO: 464160 - RNA, 24 nt, Human
gcccccaccaugugcagagcagcg

SEQ ID NO: 464161 - RNA, 19 nt, Human
gcccccucuucccugaugc

SEQ ID NO: 464162 - RNA, 22 nt, Human
gcccccucuucccugaugcucc

SEQ ID NO: 464163 - RNA, 21 nt, Human
gccggccugggguguggccuc

SEQ ID NO: 464164 - RNA, 24 nt, Human
gcgguccuuggaggcagcuguguu

SEQ ID NO: 464165 - RNA, 21 nt, Human
gcuacacaggagagcagggcc

SEQ ID NO: 464166 - RNA, 22 nt, Human
gcugacccuugggcugcacgga

SEQ ID NO: 464167 - RNA, 22 nt, Human
ggaaaagacaucaggaccugag

SEQ ID NO: 464168 - RNA, 20 nt, Human
ggagaaaaaggguuccucaa

SEQ ID NO: 464169 - RNA, 20 nt, Human
ggagaaaaaggguuccucaa

SEQ ID NO: 464170 - RNA, 21 nt, Human
ggcagaggugccaaccccaag

SEQ ID NO: 464171 - RNA, 21 nt, Human
ggcagcagcuccacguagcuc

SEQ ID NO: 464172 - RNA, 27 nt, Human
ggcccccuuggccucaggguucugggg

SEQ ID NO: 464173 - RNA, 20 nt, Human
ggcuccaggaugguccucag

SEQ ID NO: 464174 - RNA, 25 nt, Human
gggaugccaauggcgguggggggug

SEQ ID NO: 464175 - RNA, 21 nt, Human
ggggucagaggggagagaaac

SEQ ID NO: 464176 - RNA, 22 nt, Human
ggguucugggggaggagcuugg

SEQ ID NO: 464177 - RNA, 20 nt, Human
guucugggggaggagcuugg

SEQ ID NO: 464178 - RNA, 21 nt, Human
uagauaagaugcccagggucc

SEQ ID NO: 464179 - RNA, 20 nt, Human
uagcucagggcacucugcag

SEQ ID NO: 464180 - RNA, 20 nt, Human
ucauggggcuacaacucccc

SEQ ID NO: 464181 - RNA, 25 nt, Human
uccgagcuccugggccgccgcgcag

SEQ ID NO: 464182 - RNA, 18 nt, Human
uccugggccgccgcgcag

SEQ ID NO: 464183 - RNA, 21 nt, Human
ucuccacugcuggccggcuca

SEQ ID NO: 464184 - RNA, 18 nt, Human
ugacaccagcugcacccc

SEQ ID NO: 464185 - RNA, 27 nt, Human
ugacagucaagagggcugacccuuggg

SEQ ID NO: 464186 - RNA, 19 nt, Human
ugacccagacaagaaacua

SEQ ID NO: 464187 - RNA, 20 nt, Human
ugcacuccagcuucuucugg

SEQ ID NO: 464188 - RNA, 21 nt, Human
ugcacuccagcuucuucuggg

SEQ ID NO: 464189 - RNA, 21 nt, Human
ugcacuccagcuucuucuggg

SEQ ID NO: 464190 - RNA, 21 nt, Human
ugcacuccagcuucuucuggg

SEQ ID NO: 464191 - RNA, 21 nt, Human
ugcacuccagcuucuucuggg

SEQ ID NO: 464192 - RNA, 18 nt, Human
ugcccaucagcaaacagc

SEQ ID NO: 464193 - RNA, 20 nt, Human
uggacugccgucuccacugc

SEQ ID NO: 464194 - RNA, 20 nt, Human
uggaucuccuccaccgcggu

SEQ ID NO: 464195 - RNA, 23 nt, Human
uggcccccucuucccugaugcuc

SEQ ID NO: 464196 - RNA, 20 nt, Human
uggcuccagguguaggagag

SEQ ID NO: 464197 - RNA, 18 nt, Human
ugggguguggccucuggg

SEQ ID NO: 464198 - RNA, 20 nt, Human
ugggugggggcagcauguga

SEQ ID NO: 464199 - RNA, 19 nt, Human
ugugcagagcagcgugagg

SEQ ID NO: 464200 - RNA, 23 nt, Human
uuggaggcagcuguguuuaggcc

SEQ ID NO: 464201 - RNA, 18 nt, Human
aaaaguaccauuacucca

SEQ ID NO: 464202 - RNA, 19 nt, Human
acguaaaauauauaucuua

SEQ ID NO: 464203 - RNA, 18 nt, Human
agaaaaaggcauaauaga

SEQ ID NO: 464204 - RNA, 19 nt, Human
agaaagaauaaaaguacca

SEQ ID NO: 464205 - RNA, 18 nt, Human
agucuguguuagaaaaag

SEQ ID NO: 464206 - RNA, 22 nt, Human
aucaccuuucaaugaaagagug

SEQ ID NO: 464207 - RNA, 21 nt, Human
cuaacacaagaccugugaggg

SEQ ID NO: 464208 - RNA, 21 nt, Human
cugugagggucauggcucugg

SEQ ID NO: 464209 - RNA, 20 nt, Human
guucucuuggguucuuucuc

SEQ ID NO: 464210 - RNA, 20 nt, Human
uaacuuuaguucucuugggu

SEQ ID NO: 464211 - RNA, 20 nt, Human
uaguccuuuucuucuuuuua

SEQ ID NO: 464212 - RNA, 24 nt, Human
uaguccuuuucuucuuuuuaguga

SEQ ID NO: 464213 - RNA, 21 nt, Human
uaucaagaaagaauaaaagua

SEQ ID NO: 464214 - RNA, 21 nt, Human
uaucaagaaagaauaaaagua

SEQ ID NO: 464215 - RNA, 24 nt, Human
ucaagaaagaauaaaaguaccauu

SEQ ID NO: 464216 - RNA, 22 nt, Human
uccuggguaggaauaccagccc

SEQ ID NO: 464217 - RNA, 25 nt, Human
uccuuuucuucuuuuuagugaccaa

SEQ ID NO: 464218 - RNA, 24 nt, Human
ucuuuauuugauuuucaucaccuu

SEQ ID NO: 464219 - RNA, 19 nt, Human
ugaaagacagugaagaaag

SEQ ID NO: 464220 - RNA, 20 nt, Human
ugaaagacagugaagaaagu

SEQ ID NO: 464221 - RNA, 22 nt, Human
ugagggucauggcucuggccca

SEQ ID NO: 464222 - RNA, 23 nt, Human
uggcaagacaugagucaagggaa

SEQ ID NO: 464223 - RNA, 22 nt, Human
uuaguucucuuggguucuuucu

SEQ ID NO: 464224 - RNA, 18 nt, Human
uugugcauguucucaaaa

SEQ ID NO: 464225 - RNA, 22 nt, Human
aaaccccacuuuucagauccca

SEQ ID NO: 464226 - RNA, 22 nt, Human
acauuguaauuucccaaggcug

SEQ ID NO: 464227 - RNA, 21 nt, Human
accccacuuuucagaucccag

SEQ ID NO: 464228 - RNA, 25 nt, Human
agagucaggggccuggaucggaucc

SEQ ID NO: 464229 - RNA, 18 nt, Human
aguugaguuggagaugau

SEQ ID NO: 464230 - RNA, 18 nt, Human
auagguggauuauuugua

SEQ ID NO: 464231 - RNA, 18 nt, Human
caggccaaaagaauguga

SEQ ID NO: 464232 - RNA, 24 nt, Human
ccagaucagugcugccucuacugg

SEQ ID NO: 464233 - RNA, 24 nt, Human
ccauggauggaaagccuaucucuc

SEQ ID NO: 464234 - RNA, 19 nt, Human
cccaguaucugcaggaauc

SEQ ID NO: 464235 - RNA, 22 nt, Human
cccauauccaggaauucagcca

SEQ ID NO: 464236 - RNA, 20 nt, Human
cccgaggauuccccauaucc

SEQ ID NO: 464237 - RNA, 23 nt, Human
ccuggggcucuucaacauuuucc

SEQ ID NO: 464238 - RNA, 22 nt, Human
cggcaacgccaccaaacacuag

SEQ ID NO: 464239 - RNA, 20 nt, Human
cugcguagaacccauguaga

SEQ ID NO: 464240 - RNA, 22 nt, Human
gagaguuccugagggcccaaag

SEQ ID NO: 464241 - RNA, 20 nt, Human
gcaacgccaccaaacacuag

SEQ ID NO: 464242 - RNA, 20 nt, Human
gcccaaaggaucauacugcg

SEQ ID NO: 464243 - RNA, 18 nt, Human
guagaacccauguagaua

SEQ ID NO: 464244 - RNA, 23 nt, Human
guccuuugccacuuguugugcug

SEQ ID NO: 464245 - RNA, 24 nt, Human
gugagaguuccugagggcccaaag

SEQ ID NO: 464246 - RNA, 21 nt, Human
gugcugccucuacuggauagg

SEQ ID NO: 464247 - RNA, 23 nt, Human
guuucaucccgaggauuccccau

SEQ ID NO: 464248 - RNA, 21 nt, Human
uacaaacgucucccagagcaa

SEQ ID NO: 464249 - RNA, 21 nt, Human
ucagcuuagagucaggggccu

SEQ ID NO: 464250 - RNA, 24 nt, Human
uccccuggugaccaccgaagauuc

SEQ ID NO: 464251 - RNA, 20 nt, Human
uccuuugccacuuguugugc

SEQ ID NO: 464252 - RNA, 24 nt, Human
ucucccagagcaaaaguaaauggc

SEQ ID NO: 464253 - RNA, 19 nt, Human
ugagaguuccugagggccc

SEQ ID NO: 464254 - RNA, 30 nt, Human
ugcaacggcaacgccaccaaacacuagagg

SEQ ID NO: 464255 - RNA, 22 nt, Human
ugcuagcuguguccuuugccac

SEQ ID NO: 464256 - RNA, 18 nt, Human
uguuccaggaguugccau

SEQ ID NO: 464257 - RNA, 28 nt, Human
uugaguuggagaugaucaccggacuucc

SEQ ID NO: 464258 - RNA, 18 nt, Human
uuuuuuuuuuuccgcuug

SEQ ID NO: 464259 - RNA, 20 nt, Human
aaaaaagccagacuagccaa

SEQ ID NO: 464260 - RNA, 18 nt, Human
aaaaagccagacuagcca

SEQ ID NO: 464261 - RNA, 19 nt, Human
aaaaagccagacuagccaa

SEQ ID NO: 464262 - RNA, 22 nt, Human
aaaaaucucccucaaagcaaag

SEQ ID NO: 464263 - RNA, 20 nt, Human
aaauggucaacagggaagga

SEQ ID NO: 464264 - RNA, 27 nt, Human
aacaaacccacacucugucugucucuu

SEQ ID NO: 464265 - RNA, 20 nt, Human
aacagggaaggacccacagc

SEQ ID NO: 464266 - RNA, 19 nt, Human
aacuacauacaaagacaua

SEQ ID NO: 464267 - RNA, 22 nt, Human
aagcaaaguaaaaaugguucua

SEQ ID NO: 464268 - RNA, 19 nt, Human
aaggacccacagcagauuc

SEQ ID NO: 464269 - RNA, 18 nt, Human
aagguagcuugcuaucuu

SEQ ID NO: 464270 - RNA, 18 nt, Human
aaggucccgaaguggaga

SEQ ID NO: 464271 - RNA, 22 nt, Human
acagggaaggacccacagcaga

SEQ ID NO: 464272 - RNA, 25 nt, Human
acauacaaagacauaaaaauaaaac

SEQ ID NO: 464273 - RNA, 27 nt, Human
accaaccaccacaccaguuaaucucaa

SEQ ID NO: 464274 - RNA, 21 nt, Human
agaaagaagcuuguuguccca

SEQ ID NO: 464275 - RNA, 21 nt, Human
agaggugugcuggccacucug

SEQ ID NO: 464276 - RNA, 23 nt, Human
aggaaaaaaguuuuaaugugaag

SEQ ID NO: 464277 - RNA, 21 nt, Human
aggaggggcggaugagaggug

SEQ ID NO: 464278 - RNA, 21 nt, Human
auacauacaccaaccaccaca

SEQ ID NO: 464279 - RNA, 22 nt, Human
auggagcaggaggggcggauga

SEQ ID NO: 464280 - RNA, 23 nt, Human
caaaauaaaugccuaagaaauuu

SEQ ID NO: 464281 - RNA, 24 nt, Human
caaccaccacaccaguuaaucuca

SEQ ID NO: 464282 - RNA, 18 nt, Human
caccaaccaccacaccaa

SEQ ID NO: 464283 - RNA, 22 nt, Human
caccacaccaguuaaucucaac

SEQ ID NO: 464284 - RNA, 26 nt, Human
cacugcacuuccaucagcccccgccg

SEQ ID NO: 464285 - RNA, 21 nt, Human
cagaggccuccgaacaaaccc

SEQ ID NO: 464286 - RNA, 21 nt, Human
cagcagagcccacugaaaguc

SEQ ID NO: 464287 - RNA, 18 nt, Human
cagcccccgcugccacuc

SEQ ID NO: 464288 - RNA, 19 nt, Human
ccacugcacuuccaucagc

SEQ ID NO: 464289 - RNA, 18 nt, Human
ccccgcugccacucucuc

SEQ ID NO: 464290 - RNA, 18 nt, Human
ccccuucuuccuuuccca

SEQ ID NO: 464291 - RNA, 21 nt, Human
ccccuucuuccuuucccaucc

SEQ ID NO: 464292 - RNA, 19 nt, Human
cccucuccagcccccacug

SEQ ID NO: 464293 - RNA, 21 nt, Human
cccugagucacuaggccacca

SEQ ID NO: 464294 - RNA, 23 nt, Human
ccucccauguaguaucuccuuag

SEQ ID NO: 464295 - RNA, 18 nt, Human
ccucuucuuuuccuaucc

SEQ ID NO: 464296 - RNA, 18 nt, Human
ccugacuccugggcugcc

SEQ ID NO: 464297 - RNA, 19 nt, Human
ccuuagggggagguaaagg

SEQ ID NO: 464298 - RNA, 21 nt, Human
ccuucccuuuuucuguguccc

SEQ ID NO: 464299 - RNA, 23 nt, Human
ccuuccuucucagcagagcccac

SEQ ID NO: 464300 - RNA, 21 nt, Human
cgacaaauggccuugcuccug

SEQ ID NO: 464301 - RNA, 18 nt, Human
cggccuuggaagguagcu

SEQ ID NO: 464302 - RNA, 20 nt, Human
cucugucugucucuucuuuc

SEQ ID NO: 464303 - RNA, 19 nt, Human
cugccacucucucgccggc

SEQ ID NO: 464304 - RNA, 19 nt, Human
cugccacucucucgccggc

SEQ ID NO: 464305 - RNA, 21 nt, Human
cugccacucucucgccggcuc

SEQ ID NO: 464306 - RNA, 22 nt, Human
cugccacucucucgccggcucc

SEQ ID NO: 464307 - RNA, 19 nt, Human
cuggcuucuggucuaguuc

SEQ ID NO: 464308 - RNA, 21 nt, Human
cuuagggggagguaaaggaag

SEQ ID NO: 464309 - RNA, 23 nt, Human
cuucuggucuaguucgacucauu

SEQ ID NO: 464310 - RNA, 33 nt, Human
cuuuaaaaaaaaaaaaagccagacuagccaaaa

SEQ ID NO: 464311 - RNA, 19 nt, Human
cuuuccacagggcucacug

SEQ ID NO: 464312 - RNA, 19 nt, Human
gaaguggagauuucccugg

SEQ ID NO: 464313 - RNA, 19 nt, Human
gaaucuguauuuccaugac

SEQ ID NO: 464314 - RNA, 18 nt, Human
gacaaauggccuugcucc

SEQ ID NO: 464315 - RNA, 21 nt, Human
gacagcagaggccuccgaaca

SEQ ID NO: 464316 - RNA, 20 nt, Human
gacaugcuccucucugggcu

SEQ ID NO: 464317 - RNA, 18 nt, Human
gagaugaagaagagagga

SEQ ID NO: 464318 - RNA, 24 nt, Human
gaguucuagcaguuugcugguguc

SEQ ID NO: 464319 - RNA, 21 nt, Human
gauaaugagaugaagaagaga

SEQ ID NO: 464320 - RNA, 19 nt, Human
gaugaagaagagaggaagg

SEQ ID NO: 464321 - RNA, 23 nt, Human
gcccccgcugccacucucucgcc

SEQ ID NO: 464322 - RNA, 18 nt, Human
gccuuaucuguguuugaa

SEQ ID NO: 464323 - RNA, 21 nt, Human
ggaauccauugacagcagagg

SEQ ID NO: 464324 - RNA, 21 nt, Human
ggacaggucauugcuaccccu

SEQ ID NO: 464325 - RNA, 24 nt, Human
uaaaaauaaaacauacauacacca

SEQ ID NO: 464326 - RNA, 22 nt, Human
uaaaggaagacaugcuccucuc

SEQ ID NO: 464327 - RNA, 24 nt, Human
uaaaucaaaaaucucccucaaagc

SEQ ID NO: 464328 - RNA, 19 nt, Human
ucacuaggccaccaaaaug

SEQ ID NO: 464329 - RNA, 24 nt, Human
uccaaaacucuuucauucacuuga

SEQ ID NO: 464330 - RNA, 18 nt, Human
uccugggcugccuuccuu

SEQ ID NO: 464331 - RNA, 19 nt, Human
uccuuagggggagguaaag

SEQ ID NO: 464332 - RNA, 22 nt, Human
ucuccagcccccacugcacuuc

SEQ ID NO: 464333 - RNA, 26 nt, Human
ucuccagcccccacugcacuuccauc

SEQ ID NO: 464334 - RNA, 19 nt, Human
ucucugggcuggcucggcc

SEQ ID NO: 464335 - RNA, 20 nt, Human
ucucugggcuggcucggccu

SEQ ID NO: 464336 - RNA, 24 nt, Human
ucuucaauuuugaucaucagugcu

SEQ ID NO: 464337 - RNA, 18 nt, Human
ugaccuugaggaguuggg

SEQ ID NO: 464338 - RNA, 21 nt, Human
ugacuccugggcugccuuccu

SEQ ID NO: 464339 - RNA, 21 nt, Human
ugagagcagacacugacaaug

SEQ ID NO: 464340 - RNA, 20 nt, Human
ugagaugaagaagagaggaa

SEQ ID NO: 464341 - RNA, 22 nt, Human
ugauauuaaucacaguuaugag

SEQ ID NO: 464342 - RNA, 18 nt, Human
uggagcaggaggggcgga

SEQ ID NO: 464343 - RNA, 22 nt, Human
uggccaaaacaaagaaucugua

SEQ ID NO: 464344 - RNA, 24 nt, Human
uggccaaaacaaagaaucuguauu

SEQ ID NO: 464345 - RNA, 23 nt, Human
ugggcugccuuccuucucagcag

SEQ ID NO: 464346 - RNA, 20 nt, Human
uggucaacagggaaggaccc

SEQ ID NO: 464347 - RNA, 20 nt, Human
uguaaacucugagagcagac

SEQ ID NO: 464348 - RNA, 22 nt, Human
uguagaacuacauacaaagaca

SEQ ID NO: 464349 - RNA, 23 nt, Human
uuccaucagcccccgcugccacu

SEQ ID NO: 464350 - RNA, 21 nt, Human
uuggagaagcuauguaagaag

SEQ ID NO: 464351 - RNA, 18 nt, Human
uuguccaucagaaagcac

SEQ ID NO: 464352 - RNA, 23 nt, Human
uuuaaaaaaaaaaaaagccagac

SEQ ID NO: 464353 - RNA, 24 nt, Human
uuucugugucccccucccauguag

SEQ ID NO: 464354 - RNA, 22 nt, Human
uuuucugugucccccucccaug

SEQ ID NO: 464355 - RNA, 22 nt, Human
aaacgggacagaaaggagagcu

SEQ ID NO: 464356 - RNA, 22 nt, Human
aaagagcccagucuucugagac

SEQ ID NO: 464357 - RNA, 19 nt, Human
aaaggagaggccggggacc

SEQ ID NO: 464358 - RNA, 19 nt, Human
aaccccugcccugucucca

SEQ ID NO: 464359 - RNA, 24 nt, Human
aacuagaaggggaagaagggugag

SEQ ID NO: 464360 - RNA, 20 nt, Human
aagaggugggggcccagggc

SEQ ID NO: 464361 - RNA, 19 nt, Human
aagcuugcaauuguccuug

SEQ ID NO: 464362 - RNA, 24 nt, Human
aaguucagagugagaaccccuaug

SEQ ID NO: 464363 - RNA, 19 nt, Human
acaguggaaauaaaugagc

SEQ ID NO: 464364 - RNA, 22 nt, Human
acaguggccucccugcaucucc

SEQ ID NO: 464365 - RNA, 19 nt, Human
acccauguucucuaagaca

SEQ ID NO: 464366 - RNA, 19 nt, Human
acggaaagaaaggccagug

SEQ ID NO: 464367 - RNA, 19 nt, Human
acgucacuggcaagaauug

SEQ ID NO: 464368 - RNA, 22 nt, Human
agagagcagaugaagcaggcau

SEQ ID NO: 464369 - RNA, 21 nt, Human
agagcugcgcacccauccucc

SEQ ID NO: 464370 - RNA, 22 nt, Human
agcaggcaugacccauguucuc

SEQ ID NO: 464371 - RNA, 25 nt, Human
agccaccugaccccacuaugaccuc

SEQ ID NO: 464372 - RNA, 19 nt, Human
agcugcgcacccauccucc

SEQ ID NO: 464373 - RNA, 21 nt, Human
aggaaaagcuugcaauugucc

SEQ ID NO: 464374 - RNA, 22 nt, Human
aggaagggugugugguaagucu

SEQ ID NO: 464375 - RNA, 20 nt, Human
aggagaaagggagcaggugg

SEQ ID NO: 464376 - RNA, 18 nt, Human
aggaguagcccucuccca

SEQ ID NO: 464377 - RNA, 24 nt, Human
aggccucagggagacuggggacac

SEQ ID NO: 464378 - RNA, 23 nt, Human
agggaagcuugucuuggcccagg

SEQ ID NO: 464379 - RNA, 19 nt, Human
agggaggauggucaaagcu

SEQ ID NO: 464380 - RNA, 23 nt, Human
aguggccucccugcaucuccagc

SEQ ID NO: 464381 - RNA, 20 nt, Human
auggguaguagagagggaaa

SEQ ID NO: 464382 - RNA, 22 nt, Human
auuguccuuggccucaccugga

SEQ ID NO: 464383 - RNA, 22 nt, Human
caaaaagccaaccccgcuuucc

SEQ ID NO: 464384 - RNA, 24 nt, Human
caacgaggaguagcccucucccag

SEQ ID NO: 464385 - RNA, 23 nt, Human
cacagcauggccguggcgugggu

SEQ ID NO: 464386 - RNA, 18 nt, Human
caccaaaaagccaacccc

SEQ ID NO: 464387 - RNA, 19 nt, Human
caccgaaaaccccgucuuc

SEQ ID NO: 464388 - RNA, 22 nt, Human
caccuucaccugagagguugau

SEQ ID NO: 464389 - RNA, 18 nt, Human
cacgggccugagaccaga

SEQ ID NO: 464390 - RNA, 19 nt, Human
cacuaugaccucugaccuu

SEQ ID NO: 464391 - RNA, 19 nt, Human
cagaagcaggggcuaaaag

SEQ ID NO: 464392 - RNA, 18 nt, Human
cagcacaggagccgaggg

SEQ ID NO: 464393 - RNA, 21 nt, Human
cagcacaggagccgagggugg

SEQ ID NO: 464394 - RNA, 23 nt, Human
cagcacaggagccgaggguggaa

SEQ ID NO: 464395 - RNA, 23 nt, Human
cagcacuggaaugccucaggcug

SEQ ID NO: 464396 - RNA, 22 nt, Human
cagcccaggagggucccagcag

SEQ ID NO: 464397 - RNA, 22 nt, Human
caggacccagggauguggacau

SEQ ID NO: 464398 - RNA, 24 nt, Human
caggagccgaggguggaaggcccu

SEQ ID NO: 464399 - RNA, 24 nt, Human
cagugugugucagccaccugaccc

SEQ ID NO: 464400 - RNA, 18 nt, Human
ccaaagagcccagucuuc

SEQ ID NO: 464401 - RNA, 20 nt, Human
ccaaccccgcuuuccuacac

SEQ ID NO: 464402 - RNA, 20 nt, Human
ccaccuucaccaaaaagcca

SEQ ID NO: 464403 - RNA, 23 nt, Human
ccacugagguaccagcuaaaggg

SEQ ID NO: 464404 - RNA, 22 nt, Human
ccagcuaaaggggcaaggaaag

SEQ ID NO: 464405 - RNA, 22 nt, Human
ccaggccucagggagacugggg

SEQ ID NO: 464406 - RNA, 18 nt, Human
ccagggauguggacaucc

SEQ ID NO: 464407 - RNA, 21 nt, Human
ccagugcugcaaacgggacag

SEQ ID NO: 464408 - RNA, 18 nt, Human
ccccaggcgagaaggccc

SEQ ID NO: 464409 - RNA, 18 nt, Human
cccccaaacuacuggccu

SEQ ID NO: 464410 - RNA, 24 nt, Human
ccccuacacgguaccccaucgcuu

SEQ ID NO: 464411 - RNA, 18 nt, Human
ccccugcccugucuccac

SEQ ID NO: 464412 - RNA, 22 nt, Human
cccugcaucuccagccucucac

SEQ ID NO: 464413 - RNA, 21 nt, Human
cccugcccugucuccacugga

SEQ ID NO: 464414 - RNA, 21 nt, Human
cccuggcuccaccgaaaaccc

SEQ ID NO: 464415 - RNA, 20 nt, Human
cccuguacuccaaagagccc

SEQ ID NO: 464416 - RNA, 21 nt, Human
ccucagccuuggaaugagacg

SEQ ID NO: 464417 - RNA, 18 nt, Human
ccucaggcugggcugucc

SEQ ID NO: 464418 - RNA, 22 nt, Human
ccucagggagggcagagcugcg

SEQ ID NO: 464419 - RNA, 19 nt, Human
ccucccugcuaaauccugg

SEQ ID NO: 464420 - RNA, 21 nt, Human
ccucuagacucaugacugucc

SEQ ID NO: 464421 - RNA, 20 nt, Human
ccuggaaaggauucuaccug

SEQ ID NO: 464422 - RNA, 24 nt, Human
ccuugagcuuggggugccuggucc

SEQ ID NO: 464423 - RNA, 24 nt, Human
ccuugagcuuggggugccuggucc

SEQ ID NO: 464424 - RNA, 24 nt, Human
cuaaguacuuugaccaccuucacc

SEQ ID NO: 464425 - RNA, 22 nt, Human
cucacaguaaagacggacagcc

SEQ ID NO: 464426 - RNA, 24 nt, Human
cuccaaagagcccagucuucugag

SEQ ID NO: 464427 - RNA, 24 nt, Human
cuccaccgaaaaccccgucuuccc

SEQ ID NO: 464428 - RNA, 19 nt, Human
cuccccuacacgguacccc

SEQ ID NO: 464429 - RNA, 21 nt, Human
cucugaccuuacgccccagcc

SEQ ID NO: 464430 - RNA, 25 nt, Human
cucuguggcugcauccucugccacc

SEQ ID NO: 464431 - RNA, 18 nt, Human
cugcauccucugccaccu

SEQ ID NO: 464432 - RNA, 21 nt, Human
cuggccgacagggagaaaagc

SEQ ID NO: 464433 - RNA, 24 nt, Human
cugguccugggcuugccuccguga

SEQ ID NO: 464434 - RNA, 21 nt, Human
cuugguaaggaagccucccca

SEQ ID NO: 464435 - RNA, 22 nt, Human
gaaacaaaaccagugcugcaaa

SEQ ID NO: 464436 - RNA, 18 nt, Human
gaaaguggcugcgucccc

SEQ ID NO: 464437 - RNA, 21 nt, Human
gaaauugguuuccuuggggau

SEQ ID NO: 464438 - RNA, 24 nt, Human
gaagcaggcaugacccauguucuc

SEQ ID NO: 464439 - RNA, 18 nt, Human
gaaugagacgggggaggg

SEQ ID NO: 464440 - RNA, 20 nt, Human
gagaagggaagcuugucuug

SEQ ID NO: 464441 - RNA, 18 nt, Human
gagauggggauuuccagg

SEQ ID NO: 464442 - RNA, 19 nt, Human
gagauggggauuuccaggg

SEQ ID NO: 464443 - RNA, 18 nt, Human
gccaccucccugcuaaau

SEQ ID NO: 464444 - RNA, 21 nt, Human
gccaccuucaccaaaaagcca

SEQ ID NO: 464445 - RNA, 22 nt, Human
gccaguuuccucucuguggucu

SEQ ID NO: 464446 - RNA, 20 nt, Human
gcccagggcagguaagcaug

SEQ ID NO: 464447 - RNA, 19 nt, Human
gccccagcacuggaaugcc

SEQ ID NO: 464448 - RNA, 26 nt, Human
gcugauaugcaaaaggcugugaucua

SEQ ID NO: 464449 - RNA, 19 nt, Human
gcuucuggcauaguccugg

SEQ ID NO: 464450 - RNA, 23 nt, Human
ggaaaggauucuaccuguuugga

SEQ ID NO: 464451 - RNA, 19 nt, Human
ggaagaggagcagcaggaa

SEQ ID NO: 464452 - RNA, 18 nt, Human
ggagaaaggcugagagca

SEQ ID NO: 464453 - RNA, 20 nt, Human
ggagaaagggagcaggugga

SEQ ID NO: 464454 - RNA, 20 nt, Human
ggagagaaucuuaaaggaga

SEQ ID NO: 464455 - RNA, 18 nt, Human
ggagaggggagcuaagga

SEQ ID NO: 464456 - RNA, 19 nt, Human
ggauguggacauccugagg

SEQ ID NO: 464457 - RNA, 22 nt, Human
ggcaagaauuguaaggacaagc

SEQ ID NO: 464458 - RNA, 22 nt, Human
ggcaggaagaggagcagcagga

SEQ ID NO: 464459 - RNA, 22 nt, Human
ggccagugaggagaaagggagc

SEQ ID NO: 464460 - RNA, 20 nt, Human
ggccucagggagggcagagc

SEQ ID NO: 464461 - RNA, 24 nt, Human
ggcgacggugccccagcacuggaa

SEQ ID NO: 464462 - RNA, 22 nt, Human
gggaagaagggugaggggcuau

SEQ ID NO: 464463 - RNA, 23 nt, Human
gggacacacacccugggcacuuc

SEQ ID NO: 464464 - RNA, 22 nt, Human
gggggagcugaggagagucagg

SEQ ID NO: 464465 - RNA, 20 nt, Human
gggggcccagggcugcuguu

SEQ ID NO: 464466 - RNA, 22 nt, Human
ggugaggggcuauucuggaggg

SEQ ID NO: 464467 - RNA, 19 nt, Human
gucuggguggauugguggc

SEQ ID NO: 464468 - RNA, 22 nt, Human
gugugccacggacgcaugcaca

SEQ ID NO: 464469 - RNA, 22 nt, Human
uaaagaacagagccgaaaugag

SEQ ID NO: 464470 - RNA, 23 nt, Human
uaagacaguggaaauaaaugagc

SEQ ID NO: 464471 - RNA, 23 nt, Human
uaauagccuggcaggcagcacgc

SEQ ID NO: 464472 - RNA, 21 nt, Human
uacccuguccuuugcaaucca

SEQ ID NO: 464473 - RNA, 21 nt, Human
uaggacaaggacaacugcugg

SEQ ID NO: 464474 - RNA, 22 nt, Human
uaggggacuccuacccccaaac

SEQ ID NO: 464475 - RNA, 19 nt, Human
uauguaauggguccaggau

SEQ ID NO: 464476 - RNA, 20 nt, Human
uauucaaacaugugaugagg

SEQ ID NO: 464477 - RNA, 21 nt, Human
uauucuggagggaggguaggc

SEQ ID NO: 464478 - RNA, 18 nt, Human
ucaaagcuguguaaagug

SEQ ID NO: 464479 - RNA, 20 nt, Human
ucaacugugugcucuguggc

SEQ ID NO: 464480 - RNA, 24 nt, Human
ucagccaccugaccccacuaugac

SEQ ID NO: 464481 - RNA, 19 nt, Human
ucaggaacgguuccacggg

SEQ ID NO: 464482 - RNA, 18 nt, Human
ucaggccaugggcucugg

SEQ ID NO: 464483 - RNA, 22 nt, Human
ucauuuccgccccauuuagaag

SEQ ID NO: 464484 - RNA, 25 nt, Human
uccaaagagcccagucuucugagac

SEQ ID NO: 464485 - RNA, 18 nt, Human
uccacgccuggaaguuuc

SEQ ID NO: 464486 - RNA, 25 nt, Human
uccccaggcgagaaggcccucccuc

SEQ ID NO: 464487 - RNA, 18 nt, Human
ucccugcaucuccagccu

SEQ ID NO: 464488 - RNA, 24 nt, Human
uccucuagacucaugacuguccac

SEQ ID NO: 464489 - RNA, 21 nt, Human
uccugacuuaaccaaagccuc

SEQ ID NO: 464490 - RNA, 18 nt, Human
uccuuacagggucugugg

SEQ ID NO: 464491 - RNA, 22 nt, Human
uccuuacagggucugugggaau

SEQ ID NO: 464492 - RNA, 18 nt, Human
uccuugggaggggcucug

SEQ ID NO: 464493 - RNA, 19 nt, Human
ucuaagacaguggaaauaa

SEQ ID NO: 464494 - RNA, 21 nt, Human
ucuaggacaaggacaacugac

SEQ ID NO: 464495 - RNA, 20 nt, Human
ucuuggugugaggcugcugc

SEQ ID NO: 464496 - RNA, 21 nt, Human
ugaaccccugcccugucucca

SEQ ID NO: 464497 - RNA, 20 nt, Human
ugaagaaaugaaggggauca

SEQ ID NO: 464498 - RNA, 26 nt, Human
ugaagaaaugaaggggaucagggagg

SEQ ID NO: 464499 - RNA, 19 nt, Human
ugaaggggaucagggaggu

SEQ ID NO: 464500 - RNA, 22 nt, Human
ugacccauguucucuaagacag

SEQ ID NO: 464501 - RNA, 21 nt, Human
ugaccucugaccuuacgcccc

SEQ ID NO: 464502 - RNA, 20 nt, Human
ugagaccagaugccccuuuc

SEQ ID NO: 464503 - RNA, 23 nt, Human
ugaggagaaagggagcaggugga

SEQ ID NO: 464504 - RNA, 22 nt, Human
ugagguaccagcuaaaggggca

SEQ ID NO: 464505 - RNA, 20 nt, Human
ugauaagggcaggaagagga

SEQ ID NO: 464506 - RNA, 22 nt, Human
ugauaugcaaaaggcugugauc

SEQ ID NO: 464507 - RNA, 20 nt, Human
ugcaaacgggacagaaagga

SEQ ID NO: 464508 - RNA, 22 nt, Human
ugcacagacaggcgggcaggag

SEQ ID NO: 464509 - RNA, 24 nt, Human
ugccccuggcuccaccgaaaaccc

SEQ ID NO: 464510 - RNA, 18 nt, Human
ugcccugucuccacugga

SEQ ID NO: 464511 - RNA, 21 nt, Human
ugcgcacccauccuccaggca

SEQ ID NO: 464512 - RNA, 23 nt, Human
ugcugcaaacgggacagaaagga

SEQ ID NO: 464513 - RNA, 19 nt, Human
uggaaggcccuggguggga

SEQ ID NO: 464514 - RNA, 20 nt, Human
uggagggaggguaggcgggc

SEQ ID NO: 464515 - RNA, 22 nt, Human
uggcaccccugcuaagugugca

SEQ ID NO: 464516 - RNA, 25 nt, Human
uggcauaguccugggccucagggag

SEQ ID NO: 464517 - RNA, 22 nt, Human
uggcccagggcagguaagcaug

SEQ ID NO: 464518 - RNA, 22 nt, Human
uggccgacagggagaaaagcca

SEQ ID NO: 464519 - RNA, 19 nt, Human
uggccguggcguggguugg

SEQ ID NO: 464520 - RNA, 20 nt, Human
uggcguggguuggaagagga

SEQ ID NO: 464521 - RNA, 21 nt, Human
uggcuccccuacacgguaccc

SEQ ID NO: 464522 - RNA, 19 nt, Human
ugggcucuggguauccccc

SEQ ID NO: 464523 - RNA, 19 nt, Human
ugggucucccucccgacca

SEQ ID NO: 464524 - RNA, 18 nt, Human
uguccuuggccucaccug

SEQ ID NO: 464525 - RNA, 21 nt, Human
ugugcacacaguaggcucaca

SEQ ID NO: 464526 - RNA, 22 nt, Human
uuaaagaacagagccgaaauga

SEQ ID NO: 464527 - RNA, 19 nt, Human
uuccuuacagggucugugg

SEQ ID NO: 464528 - RNA, 21 nt, Human
uuccuucuuggugugaggcug

SEQ ID NO: 464529 - RNA, 23 nt, Human
uucuggagggaggguaggcgggc

SEQ ID NO: 464530 - RNA, 25 nt, Human
aaaaaaaaaaaaaaagacaaaaagg

SEQ ID NO: 464531 - RNA, 20 nt, Human
aaaaaaaagacaaaaagaca

SEQ ID NO: 464532 - RNA, 18 nt, Human
aaaaaagacaaaaagaca

SEQ ID NO: 464533 - RNA, 23 nt, Human
aaaaagacaaaccaaccaaccag

SEQ ID NO: 464534 - RNA, 24 nt, Human
aaaaagacaaaccaaccaaccaga

SEQ ID NO: 464535 - RNA, 26 nt, Human
aaaaagacaaaccaaccaaccagagg

SEQ ID NO: 464536 - RNA, 18 nt, Human
aaaagaaaaaaggaacac

SEQ ID NO: 464537 - RNA, 23 nt, Human
aaaagacaaaaagacaaaccaac

SEQ ID NO: 464538 - RNA, 20 nt, Human
aaaagagacggaaagcaaaa

SEQ ID NO: 464539 - RNA, 21 nt, Human
aaacaacaacaaaaaccacaa

SEQ ID NO: 464540 - RNA, 22 nt, Human
aaacaccaagggcugugcccuc

SEQ ID NO: 464541 - RNA, 23 nt, Human
aaacagagaacacuuggccagga

SEQ ID NO: 464542 - RNA, 20 nt, Human
aaaccaaccaaccagauccc

SEQ ID NO: 464543 - RNA, 22 nt, Human
aacaaaaaccacaacacugcca

SEQ ID NO: 464544 - RNA, 20 nt, Human
aacucucaacucugaaacag

SEQ ID NO: 464545 - RNA, 23 nt, Human
aagaaaaagaaaagaaaaaagga

SEQ ID NO: 464546 - RNA, 21 nt, Human
aagcacacacuuccugaggcc

SEQ ID NO: 464547 - RNA, 20 nt, Human
aaggaaacccgaacacauca

SEQ ID NO: 464548 - RNA, 18 nt, Human
aaguguccacaaauccca

SEQ ID NO: 464549 - RNA, 21 nt, Human
acaaacaccaagggcugugcc

SEQ ID NO: 464550 - RNA, 24 nt, Human
acaaaucccacagagcaacacacc

SEQ ID NO: 464551 - RNA, 19 nt, Human
acaacaacaaaaaccacaa

SEQ ID NO: 464552 - RNA, 21 nt, Human
acaccuuggaacaccugcauc

SEQ ID NO: 464553 - RNA, 18 nt, Human
acagaacgugcgugcucc

SEQ ID NO: 464554 - RNA, 19 nt, Human
accaaccaaccagauccca

SEQ ID NO: 464555 - RNA, 25 nt, Human
acccagccugccuccccuugccccc

SEQ ID NO: 464556 - RNA, 19 nt, Human
acccuaggguucuagaaac

SEQ ID NO: 464557 - RNA, 19 nt, Human
accuuggaacaccugcauc

SEQ ID NO: 464558 - RNA, 21 nt, Human
acgcaggcccugccauggucu

SEQ ID NO: 464559 - RNA, 20 nt, Human
acugcauccuuuaauggcag

SEQ ID NO: 464560 - RNA, 20 nt, Human
acuuauuuuacaaacaccaa

SEQ ID NO: 464561 - RNA, 19 nt, Human
agaaaaagaaaagaaaaaa

SEQ ID NO: 464562 - RNA, 22 nt, Human
agaaaagaaaaaaggaacaccc

SEQ ID NO: 464563 - RNA, 24 nt, Human
agaaaagaaaaaaggaacacccag

SEQ ID NO: 464564 - RNA, 23 nt, Human
agacaaaaagacaaaccaaccaa

SEQ ID NO: 464565 - RNA, 20 nt, Human
agacaaaccaaccaaccaga

SEQ ID NO: 464566 - RNA, 20 nt, Human
agacaaaccaaccaaccaga

SEQ ID NO: 464567 - RNA, 24 nt, Human
agagcccacagagucugaggccag

SEQ ID NO: 464568 - RNA, 23 nt, Human
agcaaaagaaaaagaaaagaaga

SEQ ID NO: 464569 - RNA, 20 nt, Human
agcaggagccccugagcccg

SEQ ID NO: 464570 - RNA, 22 nt, Human
agccugccuccccuugccccca

SEQ ID NO: 464571 - RNA, 18 nt, Human
agcuggaggccaggugcc

SEQ ID NO: 464572 - RNA, 18 nt, Human
agcuguccggggcugggc

SEQ ID NO: 464573 - RNA, 18 nt, Human
aggaaaaacaacaacaaa

SEQ ID NO: 464574 - RNA, 20 nt, Human
aggagcguucaauaccuucc

SEQ ID NO: 464575 - RNA, 22 nt, Human
agggugaggagcguucaauacc

SEQ ID NO: 464576 - RNA, 21 nt, Human
agguggcucuucaggacucug

SEQ ID NO: 464577 - RNA, 19 nt, Human
augcagccacaagcacaca

SEQ ID NO: 464578 - RNA, 22 nt, Human
augcuuugcccagaaaacccac

SEQ ID NO: 464579 - RNA, 24 nt, Human
auuauauacauauuugcaccacca

SEQ ID NO: 464580 - RNA, 19 nt, Human
caaaaaccacaacacugcc

SEQ ID NO: 464581 - RNA, 23 nt, Human
caaaagaaaaagaaaagaaaaaa

SEQ ID NO: 464582 - RNA, 21 nt, Human
caaaccaaccaaccagauccc

SEQ ID NO: 464583 - RNA, 24 nt, Human
cacaaaucccacagagcaacacac

SEQ ID NO: 464584 - RNA, 19 nt, Human
caccccuugcgcccaucuc

SEQ ID NO: 464585 - RNA, 19 nt, Human
cacgcaggcccugccaugg

SEQ ID NO: 464586 - RNA, 20 nt, Human
cacugggccuccagcaaggc

SEQ ID NO: 464587 - RNA, 23 nt, Human
cagaaaacccacugggccuccag

SEQ ID NO: 464588 - RNA, 19 nt, Human
cagagaacacuuggccagg

SEQ ID NO: 464589 - RNA, 19 nt, Human
cagaggcuccccauccccu

SEQ ID NO: 464590 - RNA, 18 nt, Human
cagcccuguaggacaccc

SEQ ID NO: 464591 - RNA, 18 nt, Human
cagggagggcacgugugg

SEQ ID NO: 464592 - RNA, 20 nt, Human
ccaaccaaccagaucccagc

SEQ ID NO: 464593 - RNA, 21 nt, Human
ccaaccagaucccagcacuga

SEQ ID NO: 464594 - RNA, 18 nt, Human
ccacaaaucccacagagc

SEQ ID NO: 464595 - RNA, 23 nt, Human
ccagcaccccuugcgcccaucuc

SEQ ID NO: 464596 - RNA, 20 nt, Human
ccauaggugggccuccuccu

SEQ ID NO: 464597 - RNA, 18 nt, Human
ccauggucuugguuccgg

SEQ ID NO: 464598 - RNA, 22 nt, Human
cccagcacugaccccucagggc

SEQ ID NO: 464599 - RNA, 21 nt, Human
cccauagugccgcugggggcu

SEQ ID NO: 464600 - RNA, 19 nt, Human
ccccacuaccuuugggucc

SEQ ID NO: 464601 - RNA, 21 nt, Human
ccccagcaccccuugcgccca

SEQ ID NO: 464602 - RNA, 22 nt, Human
ccccaggguccccauuguuggg

SEQ ID NO: 464603 - RNA, 23 nt, Human
cccccacuaccuuuggguccagu

SEQ ID NO: 464604 - RNA, 23 nt, Human
cccccagcaccccuugcgcccau

SEQ ID NO: 464605 - RNA, 19 nt, Human
ccccugagcccgccacacu

SEQ ID NO: 464606 - RNA, 23 nt, Human
ccccugagcccgccacacugacc

SEQ ID NO: 464607 - RNA, 19 nt, Human
cccucagccagggugggag

SEQ ID NO: 464608 - RNA, 19 nt, Human
ccggggcugggcugcagug

SEQ ID NO: 464609 - RNA, 22 nt, Human
ccuaggggcugccuccuagagg

SEQ ID NO: 464610 - RNA, 18 nt, Human
ccugaggaggagggaagg

SEQ ID NO: 464611 - RNA, 21 nt, Human
ccugccuccuggcuccaaacu

SEQ ID NO: 464612 - RNA, 20 nt, Human
ccuggagcuguccggggcug

SEQ ID NO: 464613 - RNA, 23 nt, Human
ccuuuguccuggggaaaaggggc

SEQ ID NO: 464614 - RNA, 24 nt, Human
cgaacacaucaauaccucaugccc

SEQ ID NO: 464615 - RNA, 22 nt, Human
cguucaauaccuucccagacac

SEQ ID NO: 464616 - RNA, 18 nt, Human
cuccuaggggcugccucc

SEQ ID NO: 464617 - RNA, 23 nt, Human
cugaaacaguauuuacacuuuug

SEQ ID NO: 464618 - RNA, 19 nt, Human
cugcaggcuggggggcauc

SEQ ID NO: 464619 - RNA, 23 nt, Human
cugcaggcuggggggcauccgcu

SEQ ID NO: 464620 - RNA, 23 nt, Human
cuggugugggcaagcagggugug

SEQ ID NO: 464621 - RNA, 25 nt, Human
cuguaggacacccugccuccuggcu

SEQ ID NO: 464622 - RNA, 22 nt, Human
cuuccacgcaggcccugccaug

SEQ ID NO: 464623 - RNA, 18 nt, Human
cuucugcugcaggcuggg

SEQ ID NO: 464624 - RNA, 23 nt, Human
gaaaaaaggaacacccagccugc

SEQ ID NO: 464625 - RNA, 21 nt, Human
gacaggagcaggcaugcgcca

SEQ ID NO: 464626 - RNA, 18 nt, Human
gacggaaagcaaaagaaa

SEQ ID NO: 464627 - RNA, 19 nt, Human
gaggagggaaggggaaucc

SEQ ID NO: 464628 - RNA, 21 nt, Human
gaggcuucugcugcaggcugg

SEQ ID NO: 464629 - RNA, 23 nt, Human
gaggguggcagggagggcacgug

SEQ ID NO: 464630 - RNA, 19 nt, Human
gccaugcuuugcccagaaa

SEQ ID NO: 464631 - RNA, 23 nt, Human
gccuccccuugcccccaaguucc

SEQ ID NO: 464632 - RNA, 21 nt, Human
gcgcagccacugcacggaucc

SEQ ID NO: 464633 - RNA, 27 nt, Human
gcugcaggguucccacucaguccguuu

SEQ ID NO: 464634 - RNA, 19 nt, Human
ggagcuguccggggcuggg

SEQ ID NO: 464635 - RNA, 19 nt, Human
ggccaggagccaccccagg

SEQ ID NO: 464636 - RNA, 20 nt, Human
ggcugggcugcagugcaggc

SEQ ID NO: 464637 - RNA, 24 nt, Human
gggacaggagcaggcaugcgccag

SEQ ID NO: 464638 - RNA, 18 nt, Human
gggcacagggugaggagc

SEQ ID NO: 464639 - RNA, 19 nt, Human
guccaguucucacugugga

SEQ ID NO: 464640 - RNA, 22 nt, Human
guggcucuucaggacucugccc

SEQ ID NO: 464641 - RNA, 22 nt, Human
guguaaaaaaaaaaaaaaaaaa

SEQ ID NO: 464642 - RNA, 21 nt, Human
guucuuaggcugaauauucca

SEQ ID NO: 464643 - RNA, 25 nt, Human
uaaaagagacggaaagcaaaagaaa

SEQ ID NO: 464644 - RNA, 21 nt, Human
uaaguguccacaaaucccaca

SEQ ID NO: 464645 - RNA, 21 nt, Human
uagacggaggguggcagggag

SEQ ID NO: 464646 - RNA, 24 nt, Human
uagagaacaauuuuucuuuaaaag

SEQ ID NO: 464647 - RNA, 20 nt, Human
ucaaaaggagaggaaaaaca

SEQ ID NO: 464648 - RNA, 20 nt, Human
uccaagaggagggcuccagc

SEQ ID NO: 464649 - RNA, 19 nt, Human
uccacgcaggcccugccau

SEQ ID NO: 464650 - RNA, 21 nt, Human
ucccagacaccaacuguuccc

SEQ ID NO: 464651 - RNA, 22 nt, Human
ucccagacaccaacuguucccu

SEQ ID NO: 464652 - RNA, 25 nt, Human
ucccagacaccaacuguucccuuug

SEQ ID NO: 464653 - RNA, 22 nt, Human
uccccuggcugcaggguuccca

SEQ ID NO: 464654 - RNA, 25 nt, Human
uccgcuugcucuagacggagggugg

SEQ ID NO: 464655 - RNA, 23 nt, Human
uccuuaauaccuuuucacucuca

SEQ ID NO: 464656 - RNA, 23 nt, Human
ucucaaaaggagaggaaaaacaa

SEQ ID NO: 464657 - RNA, 24 nt, Human
ucuuaggcugaauauuccaagagg

SEQ ID NO: 464658 - RNA, 18 nt, Human
ucuucaggacucugcccc

SEQ ID NO: 464659 - RNA, 19 nt, Human
ugaaacaguauuuacacuu

SEQ ID NO: 464660 - RNA, 21 nt, Human
ugaaacaguauuuacacuuuu

SEQ ID NO: 464661 - RNA, 19 nt, Human
ugaccagaacuuaagaugg

SEQ ID NO: 464662 - RNA, 22 nt, Human
ugagcccgccacacugaccaga

SEQ ID NO: 464663 - RNA, 22 nt, Human
ugaggagcguucaauaccuucc

SEQ ID NO: 464664 - RNA, 20 nt, Human
ugauggcaaaugagaauuuc

SEQ ID NO: 464665 - RNA, 21 nt, Human
ugcuccuaggggcugccuccu

SEQ ID NO: 464666 - RNA, 18 nt, Human
uggaagacagauauggag

SEQ ID NO: 464667 - RNA, 19 nt, Human
uggaagacagauauggagu

SEQ ID NO: 464668 - RNA, 22 nt, Human
uggcagggagggcacguguggu

SEQ ID NO: 464669 - RNA, 22 nt, Human
uggcccagaggcaggauagcag

SEQ ID NO: 464670 - RNA, 18 nt, Human
uggcggcgcagccacugc

SEQ ID NO: 464671 - RNA, 19 nt, Human
uggggugggauaggagccu

SEQ ID NO: 464672 - RNA, 23 nt, Human
uggggugggauaggagccuuguu

SEQ ID NO: 464673 - RNA, 22 nt, Human
ugggguggggugggauaggagc

SEQ ID NO: 464674 - RNA, 25 nt, Human
uggugggccagggagacgggcagau

SEQ ID NO: 464675 - RNA, 18 nt, Human
uggugugggcaagcaggg

SEQ ID NO: 464676 - RNA, 23 nt, Human
uggugugggcaagcagggugugg

SEQ ID NO: 464677 - RNA, 19 nt, Human
ugugcagcccuguaggaca

SEQ ID NO: 464678 - RNA, 21 nt, Human
ugugggcaagcaggguguggc

SEQ ID NO: 464679 - RNA, 22 nt, Human
uguucaccccacccugaggagg

SEQ ID NO: 464680 - RNA, 23 nt, Human
uuacuggauuaagagaccacagg

SEQ ID NO: 464681 - RNA, 22 nt, Human
uucauuuuucucuuuuuggggu

SEQ ID NO: 464682 - RNA, 23 nt, Human
uuccaagaggagggcuccagcuu

SEQ ID NO: 464683 - RNA, 22 nt, Human
uugcccccaaguucccuacccu

SEQ ID NO: 464684 - RNA, 25 nt, Human
uuggccugcagccacauggugggcc

SEQ ID NO: 464685 - RNA, 22 nt, Human
uuguguaaaaaaaaaaaaaaaa

SEQ ID NO: 464686 - RNA, 24 nt, Human
uuuuacaaaagaaaauucucaaaa

SEQ ID NO: 464687 - RNA, 21 nt, Human
aaacaggcaacaaaaucucuu

SEQ ID NO: 464688 - RNA, 21 nt, Human
aaauuuucuuuucuuuaaggc

SEQ ID NO: 464689 - RNA, 20 nt, Human
aggauguuauaaaaucaaag

SEQ ID NO: 464690 - RNA, 24 nt, Human
caacaauauuucuuucuaaaauuu

SEQ ID NO: 464691 - RNA, 22 nt, Human
cacuuagaauuccucacuggga

SEQ ID NO: 464692 - RNA, 20 nt, Human
ccagucuuauuuuagcuucu

SEQ ID NO: 464693 - RNA, 23 nt, Human
ccucauauauauagacauauuua

SEQ ID NO: 464694 - RNA, 21 nt, Human
ccucuaccuggccaccauuua

SEQ ID NO: 464695 - RNA, 21 nt, Human
gaaaguguauuucuguaagaa

SEQ ID NO: 464696 - RNA, 24 nt, Human
ggaagaaauacuaccaauuauaaa

SEQ ID NO: 464697 - RNA, 20 nt, Human
gugcuagacauauuaccuuu

SEQ ID NO: 464698 - RNA, 25 nt, Human
uacugcaaauauaaacucaauucuu

SEQ ID NO: 464699 - RNA, 26 nt, Human
uacugcaaauauaaacucaauucuug

SEQ ID NO: 464700 - RNA, 21 nt, Human
ucacagcucauuuaaagcuuc

SEQ ID NO: 464701 - RNA, 25 nt, Human
uccucauauauauagacauauuuau

SEQ ID NO: 464702 - RNA, 23 nt, Human
ucuaguuccucuaccuggccacc

SEQ ID NO: 464703 - RNA, 18 nt, Human
ugaaagguuucuauaagg

SEQ ID NO: 464704 - RNA, 21 nt, Human
ugugugggugugguagggggg

SEQ ID NO: 464705 - RNA, 24 nt, Human
ugugugugggugugguaggggggu

SEQ ID NO: 464706 - RNA, 19 nt, Human
uucucagugacaauaacac

SEQ ID NO: 464707 - RNA, 26 nt, Human
uuuauagucauucaugugaaagguca

SEQ ID NO: 464708 - RNA, 24 nt, Human
uuuuuuuuuuuuuuuuuuaauuuu

SEQ ID NO: 464709 - RNA, 23 nt, Human
agaaagaccuaaaagggaagcug

SEQ ID NO: 464710 - RNA, 22 nt, Human
auaaaaauaguccugaaacccc

SEQ ID NO: 464711 - RNA, 19 nt, Human
caauagagagaugucagag

SEQ ID NO: 464712 - RNA, 22 nt, Human
ccacaagaugaggacaauucag

SEQ ID NO: 464713 - RNA, 19 nt, Human
ccaugcaggacaagccaaa

SEQ ID NO: 464714 - RNA, 20 nt, Human
ccaugcaggacaagccaaag

SEQ ID NO: 464715 - RNA, 19 nt, Human
cuccagcugucuucuucca

SEQ ID NO: 464716 - RNA, 18 nt, Human
cuugcagaaauuaucuca

SEQ ID NO: 464717 - RNA, 18 nt, Human
gaagcugcauaaugaaga

SEQ ID NO: 464718 - RNA, 24 nt, Human
ggccaugcaggacaagccaaacuc

SEQ ID NO: 464719 - RNA, 21 nt, Human
uaaaagggaagcugcauaaug

SEQ ID NO: 464720 - RNA, 18 nt, Human
ucaggauagaaagcuccu

SEQ ID NO: 464721 - RNA, 21 nt, Human
ucuccagcugucuucuuccag

SEQ ID NO: 464722 - RNA, 22 nt, Human
ucucuccagcugucuucuucca

SEQ ID NO: 464723 - RNA, 19 nt, Human
ugagagggucugcaccgca

SEQ ID NO: 464724 - RNA, 20 nt, Human
ugggaugaaacaaguggcug

SEQ ID NO: 464725 - RNA, 23 nt, Human
uuugaagucaaccuaaugcccag

SEQ ID NO: 464726 - RNA, 19 nt, Human
gcuaggugggacagggcga

SEQ ID NO: 464727 - RNA, 18 nt, Human
uaugagaaucauguauua

SEQ ID NO: 464728 - RNA, 18 nt, Human
uguauuaaacaaauuugu

SEQ ID NO: 464729 - RNA, 22 nt, Human
aaaaaacaaaacccagaaaaca

SEQ ID NO: 464730 - RNA, 26 nt, Human
aaaaaaccacaaaagaaaguuuacua

SEQ ID NO: 464731 - RNA, 22 nt, Human
aaaaaauaaccacacugaaagc

SEQ ID NO: 464732 - RNA, 30 nt, Human
aaaaaccacaaaagaaaguuuacuacacag

SEQ ID NO: 464733 - RNA, 19 nt, Human
aaaacaaaacccagaaaac

SEQ ID NO: 464734 - RNA, 21 nt, Human
aaaaccaaccaaagaaaaaau

SEQ ID NO: 464735 - RNA, 25 nt, Human
aaaacccagaaaacaaaacaaaaaa

SEQ ID NO: 464736 - RNA, 18 nt, Human
aaaagaaaguuuacuaca

SEQ ID NO: 464737 - RNA, 25 nt, Human
aaaagaaaguuuacuacacaaaacc

SEQ ID NO: 464738 - RNA, 18 nt, Human
aaaaggcuugggaagagg

SEQ ID NO: 464739 - RNA, 20 nt, Human
aaaauaaccacacugaaagc

SEQ ID NO: 464740 - RNA, 18 nt, Human
aaacaaaaaacaaaaccc

SEQ ID NO: 464741 - RNA, 24 nt, Human
aaacaaaaaacaaaacccagaaaa

SEQ ID NO: 464742 - RNA, 27 nt, Human
aaacaaaaaacaaaacccagaaaacaa

SEQ ID NO: 464743 - RNA, 23 nt, Human
aaacaaaacaaaaaaccacaaaa

SEQ ID NO: 464744 - RNA, 24 nt, Human
aaacaaaacaaaaaaccacaaaag

SEQ ID NO: 464745 - RNA, 18 nt, Human
aaacaccccacuugguuu

SEQ ID NO: 464746 - RNA, 22 nt, Human
aaacauacagacacacaaagga

SEQ ID NO: 464747 - RNA, 22 nt, Human
aaacauuccaaacaccaaauuc

SEQ ID NO: 464748 - RNA, 25 nt, Human
aaagaaaaaauaaccacacugaaag

SEQ ID NO: 464749 - RNA, 20 nt, Human
aaaugcuguccuucuguuuc

SEQ ID NO: 464750 - RNA, 27 nt, Human
aacaaaaaacaaaacccagaaaacaaa

SEQ ID NO: 464751 - RNA, 25 nt, Human
aacaaaacccaaacaccaugucaaa

SEQ ID NO: 464752 - RNA, 22 nt, Human
aacccaaacaccaugucaaacu

SEQ ID NO: 464753 - RNA, 21 nt, Human
aagagaagcacaaaagguuuc

SEQ ID NO: 464754 - RNA, 24 nt, Human
aagcaaucauuaauggauuccuau

SEQ ID NO: 464755 - RNA, 22 nt, Human
aaggccuugaugaagucagaaa

SEQ ID NO: 464756 - RNA, 19 nt, Human
acaaaacaaaaaaccacaa

SEQ ID NO: 464757 - RNA, 21 nt, Human
acaaaacaaaaaaccacaaaa

SEQ ID NO: 464758 - RNA, 21 nt, Human
acaaaacccagaaaacaaaac

SEQ ID NO: 464759 - RNA, 21 nt, Human
acaaaggagagaccucccaga

SEQ ID NO: 464760 - RNA, 20 nt, Human
acagacaaaaacaaaaaaca

SEQ ID NO: 464761 - RNA, 19 nt, Human
acagugaggaugauaaggc

SEQ ID NO: 464762 - RNA, 20 nt, Human
acauacagacacacaaagga

SEQ ID NO: 464763 - RNA, 22 nt, Human
acccaaacaccaugucaaacua

SEQ ID NO: 464764 - RNA, 18 nt, Human
acccaacaugccaugguu

SEQ ID NO: 464765 - RNA, 23 nt, Human
acccagaaaacaaaacaaaaaac

SEQ ID NO: 464766 - RNA, 22 nt, Human
accugguuagcuugucuagggc

SEQ ID NO: 464767 - RNA, 25 nt, Human
acuaacuccauacacucgcacacac

SEQ ID NO: 464768 - RNA, 23 nt, Human
acuccacagugaggaugauaagg

SEQ ID NO: 464769 - RNA, 21 nt, Human
agaaaaaauaaccacacugaa

SEQ ID NO: 464770 - RNA, 22 nt, Human
agaaaacaaaacaaaaaaccac

SEQ ID NO: 464771 - RNA, 19 nt, Human
agaaaacauuccaaacacc

SEQ ID NO: 464772 - RNA, 20 nt, Human
agaagggauggagauggggc

SEQ ID NO: 464773 - RNA, 25 nt, Human
agacaaaaacaaaaaacaaaaccca

SEQ ID NO: 464774 - RNA, 26 nt, Human
agacaaaaacaaaaaacaaaacccag

SEQ ID NO: 464775 - RNA, 28 nt, Human
agacaaaaacaaaaaacaaaacccagaa

SEQ ID NO: 464776 - RNA, 18 nt, Human
agagggccagcaacugug

SEQ ID NO: 464777 - RNA, 23 nt, Human
agauggggcaggagggugggaag

SEQ ID NO: 464778 - RNA, 18 nt, Human
agcauacggggcgggggg

SEQ ID NO: 464779 - RNA, 22 nt, Human
agcugcaggucuugcacagaca

SEQ ID NO: 464780 - RNA, 21 nt, Human
agcuuuuuggaauagcagccu

SEQ ID NO: 464781 - RNA, 18 nt, Human
aggaaaaaaggacugaga

SEQ ID NO: 464782 - RNA, 19 nt, Human
aggaaaaaggcuugggaag

SEQ ID NO: 464783 - RNA, 23 nt, Human
aggaaaaaggcuugggaagagga

SEQ ID NO: 464784 - RNA, 18 nt, Human
aggaaggccuaccagagc

SEQ ID NO: 464785 - RNA, 23 nt, Human
aggccuugaugaagucagaaaca

SEQ ID NO: 464786 - RNA, 24 nt, Human
aggccuugaugaagucagaaacac

SEQ ID NO: 464787 - RNA, 20 nt, Human
aggcugggagacugcagcug

SEQ ID NO: 464788 - RNA, 24 nt, Human
agggauggagauggggcaggaggg

SEQ ID NO: 464789 - RNA, 20 nt, Human
aggggccugggcccucugug

SEQ ID NO: 464790 - RNA, 21 nt, Human
aguucccauuggcuucuccca

SEQ ID NO: 464791 - RNA, 23 nt, Human
auccugucaccaccaaccucuca

SEQ ID NO: 464792 - RNA, 21 nt, Human
augcagaauggggcuuuagau

SEQ ID NO: 464793 - RNA, 23 nt, Human
auggggcuuuagauaggagcugg

SEQ ID NO: 464794 - RNA, 21 nt, Human
caaaaaaacaaaacccaaaca

SEQ ID NO: 464795 - RNA, 26 nt, Human
caaaaaaacaaaacccaaacaccaug

SEQ ID NO: 464796 - RNA, 21 nt, Human
caaaaacaaaaaacaaaaccc

SEQ ID NO: 464797 - RNA, 27 nt, Human
caaaacccagaaaacaaaacaaaaaac

SEQ ID NO: 464798 - RNA, 28 nt, Human
caaaagaaaguuuacuacacaaaaccag

SEQ ID NO: 464799 - RNA, 22 nt, Human
caagcucuuacucagguacaca

SEQ ID NO: 464800 - RNA, 20 nt, Human
cacaaaaaccaaccaaagaa

SEQ ID NO: 464801 - RNA, 24 nt, Human
cagacaaaaacaaaaaacaaaacc

SEQ ID NO: 464802 - RNA, 20 nt, Human
cagcaaugcuucauuggagg

SEQ ID NO: 464803 - RNA, 21 nt, Human
cagcagaugggcacgugugug

SEQ ID NO: 464804 - RNA, 28 nt, Human
cagccucuuaaacuguucuuccaauuuc

SEQ ID NO: 464805 - RNA, 20 nt, Human
cagcgagaaacagaaaagaa

SEQ ID NO: 464806 - RNA, 22 nt, Human
cagcugcaggucuugcacagac

SEQ ID NO: 464807 - RNA, 22 nt, Human
caguuccucucucucucccucc

SEQ ID NO: 464808 - RNA, 24 nt, Human
caucugccuucccuucucagcuuu

SEQ ID NO: 464809 - RNA, 23 nt, Human
ccaaccacucucucugaagagca

SEQ ID NO: 464810 - RNA, 19 nt, Human
ccaagagucagaaaacauu

SEQ ID NO: 464811 - RNA, 18 nt, Human
ccacacuaacuccauaca

SEQ ID NO: 464812 - RNA, 22 nt, Human
ccagaaaacaaaacaaaaaacc

SEQ ID NO: 464813 - RNA, 21 nt, Human
cccaagagucagaaaacauuc

SEQ ID NO: 464814 - RNA, 26 nt, Human
cccagaaaacaaaacaaaaaaccaca

SEQ ID NO: 464815 - RNA, 21 nt, Human
cccagcaccaccacccacacu

SEQ ID NO: 464816 - RNA, 19 nt, Human
cccgccccaagagucagaa

SEQ ID NO: 464817 - RNA, 23 nt, Human
ccuaccacuagcacagcaauuga

SEQ ID NO: 464818 - RNA, 20 nt, Human
ccucccagaaaauaaacccu

SEQ ID NO: 464819 - RNA, 19 nt, Human
ccugcaaacccaacaugcc

SEQ ID NO: 464820 - RNA, 27 nt, Human
ccugcuaguccagcccagcaccaccac

SEQ ID NO: 464821 - RNA, 19 nt, Human
ccuggccagaggaaggccu

SEQ ID NO: 464822 - RNA, 22 nt, Human
ccugucaccaccaaccucucag

SEQ ID NO: 464823 - RNA, 19 nt, Human
ccuuccucuucagacuguc

SEQ ID NO: 464824 - RNA, 18 nt, Human
ccuugcuacacacugacu

SEQ ID NO: 464825 - RNA, 24 nt, Human
ccuuucaaaaaaacaaaacccaaa

SEQ ID NO: 464826 - RNA, 23 nt, Human
cucaaacacacaaacuggguaaa

SEQ ID NO: 464827 - RNA, 23 nt, Human
cugaaaguggaggcugggagacu

SEQ ID NO: 464828 - RNA, 20 nt, Human
cugcuggagucuccuggcca

SEQ ID NO: 464829 - RNA, 18 nt, Human
cuguucuuccaauuucuc

SEQ ID NO: 464830 - RNA, 19 nt, Human
cuguuucuacacaagaaca

SEQ ID NO: 464831 - RNA, 18 nt, Human
cuugggaagaggagagaa

SEQ ID NO: 464832 - RNA, 22 nt, Human
cuuucaaaaaaacaaaacccaa

SEQ ID NO: 464833 - RNA, 22 nt, Human
cuuuuccaggaaaugacuaaca

SEQ ID NO: 464834 - RNA, 24 nt, Human
gaaaagagggcugccaccugcagg

SEQ ID NO: 464835 - RNA, 26 nt, Human
gacaaaaacaaaaaacaaaacccaga

SEQ ID NO: 464836 - RNA, 18 nt, Human
gacugugugggccagucc

SEQ ID NO: 464837 - RNA, 20 nt, Human
gagcuggguauuacugggag

SEQ ID NO: 464838 - RNA, 21 nt, Human
gaggcagcugggaaagggaac

SEQ ID NO: 464839 - RNA, 22 nt, Human
gccuucauucccagguugccac

SEQ ID NO: 464840 - RNA, 19 nt, Human
gcuugggaagaggagagaa

SEQ ID NO: 464841 - RNA, 21 nt, Human
ggaggcagcugggaaagggaa

SEQ ID NO: 464842 - RNA, 18 nt, Human
ggauggagauggggcagg

SEQ ID NO: 464843 - RNA, 21 nt, Human
ggauggagauggggcaggagg

SEQ ID NO: 464844 - RNA, 21 nt, Human
ggauggagauggggcaggagg

SEQ ID NO: 464845 - RNA, 21 nt, Human
ggcacaaaaaccaaccaaaga

SEQ ID NO: 464846 - RNA, 23 nt, Human
ggcacaaaaaccaaccaaagaaa

SEQ ID NO: 464847 - RNA, 26 nt, Human
ggcaggagggugggaaguagaauggg

SEQ ID NO: 464848 - RNA, 26 nt, Human
ggcuugggaagaggagagaaaggugg

SEQ ID NO: 464849 - RNA, 25 nt, Human
gggaaagggaacuucacagcaaugc

SEQ ID NO: 464850 - RNA, 23 nt, Human
gggagacugcagcugggcagggg

SEQ ID NO: 464851 - RNA, 21 nt, Human
gggcaggggccugggcccucu

SEQ ID NO: 464852 - RNA, 24 nt, Human
ggggacugugugggccaguccugc

SEQ ID NO: 464853 - RNA, 21 nt, Human
gggggggcuccaaccacucuc

SEQ ID NO: 464854 - RNA, 18 nt, Human
gugacaugaacuaacugc

SEQ ID NO: 464855 - RNA, 26 nt, Human
guggaauuuaauaaaggccuugauga

SEQ ID NO: 464856 - RNA, 21 nt, Human
uaacagaaaugcuguccuucu

SEQ ID NO: 464857 - RNA, 19 nt, Human
uaaggcgaggaaucccgcc

SEQ ID NO: 464858 - RNA, 24 nt, Human
uaauaaaggccuugaugaagucag

SEQ ID NO: 464859 - RNA, 20 nt, Human
uaaugacagugacaugaacu

SEQ ID NO: 464860 - RNA, 18 nt, Human
uacacaugaccguggaau

SEQ ID NO: 464861 - RNA, 18 nt, Human
uacacccucuugacagcg

SEQ ID NO: 464862 - RNA, 18 nt, Human
uaccacuagcacagcaau

SEQ ID NO: 464863 - RNA, 20 nt, Human
uaccagagccuucugacagg

SEQ ID NO: 464864 - RNA, 18 nt, Human
ucaccaccaaccucucac

SEQ ID NO: 464865 - RNA, 23 nt, Human
ucagaaaacauuccaaacaccaa

SEQ ID NO: 464866 - RNA, 21 nt, Human
ucagcagcugcaggucuugca

SEQ ID NO: 464867 - RNA, 22 nt, Human
uccacagugaggaugauaaggc

SEQ ID NO: 464868 - RNA, 18 nt, Human
uccauacacucgcacaca

SEQ ID NO: 464869 - RNA, 21 nt, Human
ucccagaaaauaaacccuacc

SEQ ID NO: 464870 - RNA, 18 nt, Human
uccccaaagaggaaaaaa

SEQ ID NO: 464871 - RNA, 25 nt, Human
ucccuccggaaggccccggggggac

SEQ ID NO: 464872 - RNA, 19 nt, Human
uccucgauuggggcucgag

SEQ ID NO: 464873 - RNA, 20 nt, Human
ucuacagcugucuuccagcu

SEQ ID NO: 464874 - RNA, 18 nt, Human
ucugccuucccuucucag

SEQ ID NO: 464875 - RNA, 24 nt, Human
ucuucagacugucuuuugggcccc

SEQ ID NO: 464876 - RNA, 19 nt, Human
ucuuuugggccccaacugc

SEQ ID NO: 464877 - RNA, 19 nt, Human
ugaagucagaaacacccca

SEQ ID NO: 464878 - RNA, 23 nt, Human
ugaauuucacucugaaaguggag

SEQ ID NO: 464879 - RNA, 20 nt, Human
ugagauaaacagcaguuccc

SEQ ID NO: 464880 - RNA, 22 nt, Human
ugagugagauaaacagcaguuc

SEQ ID NO: 464881 - RNA, 23 nt, Human
ugcacacauuaggaauaaaaaca

SEQ ID NO: 464882 - RNA, 25 nt, Human
ugcacagacaaaaacaaaaaacaaa

SEQ ID NO: 464883 - RNA, 28 nt, Human
ugcacagacaaaaacaaaaaacaaaacc

SEQ ID NO: 464884 - RNA, 21 nt, Human
ugcagugacaacuggggcucc

SEQ ID NO: 464885 - RNA, 27 nt, Human
ugcccagacugcagugaccggggguuc

SEQ ID NO: 464886 - RNA, 18 nt, Human
ugcuaguccagcccagca

SEQ ID NO: 464887 - RNA, 21 nt, Human
ugcucaucuuggcuauaagug

SEQ ID NO: 464888 - RNA, 23 nt, Human
ugcucuacagcugucuuccagcu

SEQ ID NO: 464889 - RNA, 24 nt, Human
ugcugugcgacuguaaaauguaca

SEQ ID NO: 464890 - RNA, 19 nt, Human
uggacacagggaaggggcu

SEQ ID NO: 464891 - RNA, 25 nt, Human
uggaggcugggagacugcagcuggg

SEQ ID NO: 464892 - RNA, 22 nt, Human
ugggaaagggaacuucacagca

SEQ ID NO: 464893 - RNA, 19 nt, Human
ugguggaauacuuacaccc

SEQ ID NO: 464894 - RNA, 22 nt, Human
uguaagcauacggggcgggggg

SEQ ID NO: 464895 - RNA, 19 nt, Human
uguacaggaaucaaaaacg

SEQ ID NO: 464896 - RNA, 26 nt, Human
uguguacacaaacauacagacacaca

SEQ ID NO: 464897 - RNA, 23 nt, Human
uguguguacacaaacauacagug

SEQ ID NO: 464898 - RNA, 22 nt, Human
uuauggagccuucauucccagg

SEQ ID NO: 464899 - RNA, 27 nt, Human
uuauuuuccuuucuuucgaccuucagg

SEQ ID NO: 464900 - RNA, 24 nt, Human
uucauauugccauuggguaggggg

SEQ ID NO: 464901 - RNA, 23 nt, Human
uuccacacuaacuccauacacuc

SEQ ID NO: 464902 - RNA, 21 nt, Human
uucuuggggagaugugauguu

SEQ ID NO: 464903 - RNA, 19 nt, Human
uucuuuuuguugcacugcg

SEQ ID NO: 464904 - RNA, 23 nt, Human
uugacagcgagaaacagaaaaga

SEQ ID NO: 464905 - RNA, 19 nt, Human
uugcagcugccugaaugca

SEQ ID NO: 464906 - RNA, 18 nt, Human
uuggaauagcagccucuu

SEQ ID NO: 464907 - RNA, 20 nt, Human
uuuauggagccuucauuccc

SEQ ID NO: 464908 - RNA, 18 nt, Human
uuucaguccucuuuccuc

SEQ ID NO: 464909 - RNA, 24 nt, Human
uuucuacacaagaacauuuucagu

SEQ ID NO: 464910 - RNA, 19 nt, Human
uuugcucuacagcugucuu

SEQ ID NO: 464911 - RNA, 22 nt, Human
uuuuucuuuuuguugcacugcg

SEQ ID NO: 464912 - RNA, 19 nt, Human
uuuuugcagauuaguggag

SEQ ID NO: 464913 - RNA, 21 nt, Human
aaaaaagccaaacauugaggg

SEQ ID NO: 464914 - RNA, 23 nt, Human
aaacaaaaaccagauacccaagg

SEQ ID NO: 464915 - RNA, 25 nt, Human
aaacaaaaaccagauacccaaggaa

SEQ ID NO: 464916 - RNA, 23 nt, Human
aaacaaaacaccacaaaaaucaa

SEQ ID NO: 464917 - RNA, 24 nt, Human
aaacaaaacagaaaacuggagcaa

SEQ ID NO: 464918 - RNA, 19 nt, Human
aaaguggggacccgccccu

SEQ ID NO: 464919 - RNA, 22 nt, Human
aaauaugaaaacaaaaaccaga

SEQ ID NO: 464920 - RNA, 25 nt, Human
aagaaugagaguucuuaaaucuguc

SEQ ID NO: 464921 - RNA, 21 nt, Human
aagcugccucuuguccuaaag

SEQ ID NO: 464922 - RNA, 18 nt, Human
aagucugcaacaucuguu

SEQ ID NO: 464923 - RNA, 23 nt, Human
aauacccaccccuacuggauaac

SEQ ID NO: 464924 - RNA, 23 nt, Human
aaucaaucugugaagaaagcaga

SEQ ID NO: 464925 - RNA, 18 nt, Human
acaaaaaccagauaccca

SEQ ID NO: 464926 - RNA, 25 nt, Human
acaaaacaccacaaaaaucaaccca

SEQ ID NO: 464927 - RNA, 20 nt, Human
acacagcagcaccagcacug

SEQ ID NO: 464928 - RNA, 24 nt, Human
acacaugcacacacucaaauauga

SEQ ID NO: 464929 - RNA, 20 nt, Human
acauggcaaacuggucaccu

SEQ ID NO: 464930 - RNA, 18 nt, Human
acccuuuauauauuacau

SEQ ID NO: 464931 - RNA, 21 nt, Human
accugcagccgcuggcgcucc

SEQ ID NO: 464932 - RNA, 18 nt, Human
acuccaacugccaugaug

SEQ ID NO: 464933 - RNA, 23 nt, Human
acuggccucggcggcugcgguuc

SEQ ID NO: 464934 - RNA, 23 nt, Human
agaaaacuggagcaaacagauga

SEQ ID NO: 464935 - RNA, 19 nt, Human
agaaaggguguccgccugg

SEQ ID NO: 464936 - RNA, 23 nt, Human
agaaauccagacaggguuuagcc

SEQ ID NO: 464937 - RNA, 22 nt, Human
agaacaaaacaaaacagaaaac

SEQ ID NO: 464938 - RNA, 26 nt, Human
agagagcgggugccaggccccccaag

SEQ ID NO: 464939 - RNA, 26 nt, Human
agaggcagagagcgggugccaggccc

SEQ ID NO: 464940 - RNA, 21 nt, Human
agcaccccagccaccucccac

SEQ ID NO: 464941 - RNA, 19 nt, Human
agcauccugacucgagugg

SEQ ID NO: 464942 - RNA, 31 nt, Human
aggaaaaaaaaaauucucuauuaaacaaaaa

SEQ ID NO: 464943 - RNA, 21 nt, Human
aggacaaauaaugaggucaag

SEQ ID NO: 464944 - RNA, 21 nt, Human
aggauaguugcuggccugaaa

SEQ ID NO: 464945 - RNA, 23 nt, Human
aggcaaauaguuuaucacuuccc

SEQ ID NO: 464946 - RNA, 18 nt, Human
aggggaacaggaaaaaaa

SEQ ID NO: 464947 - RNA, 21 nt, Human
aggggaacaggaaaaaaaaaa

SEQ ID NO: 464948 - RNA, 18 nt, Human
agugacucacagaacuca

SEQ ID NO: 464949 - RNA, 18 nt, Human
augaggcugccuugacua

SEQ ID NO: 464950 - RNA, 23 nt, Human
auguuguucaaccuuaauguggg

SEQ ID NO: 464951 - RNA, 23 nt, Human
caaaaaccagauacccaaggaaa

SEQ ID NO: 464952 - RNA, 22 nt, Human
caaaacaaaacagaaaacugga

SEQ ID NO: 464953 - RNA, 18 nt, Human
caaaacaccacaaaaauc

SEQ ID NO: 464954 - RNA, 19 nt, Human
caaaacagaaaacuggagc

SEQ ID NO: 464955 - RNA, 20 nt, Human
caaaacagaaaacuggagca

SEQ ID NO: 464956 - RNA, 26 nt, Human
caaauaccuacacaaacugucaaaua

SEQ ID NO: 464957 - RNA, 23 nt, Human
caacugccaugauggucacaggc

SEQ ID NO: 464958 - RNA, 24 nt, Human
cacaaaaaucaacccaaacuuccu

SEQ ID NO: 464959 - RNA, 21 nt, Human
cacacuagaucacuuugguua

SEQ ID NO: 464960 - RNA, 21 nt, Human
cacagccaguccucacccuuu

SEQ ID NO: 464961 - RNA, 18 nt, Human
caccacaaaaaucaaccc

SEQ ID NO: 464962 - RNA, 19 nt, Human
caccagcacugcugauguc

SEQ ID NO: 464963 - RNA, 18 nt, Human
cacccaccacucccccgg

SEQ ID NO: 464964 - RNA, 19 nt, Human
caccccagccaccucccac

SEQ ID NO: 464965 - RNA, 21 nt, Human
cacucugaaauagcacgcaag

SEQ ID NO: 464966 - RNA, 24 nt, Human
cagcaccccagccaccucccaccc

SEQ ID NO: 464967 - RNA, 18 nt, Human
cagcagcaccagcacugc

SEQ ID NO: 464968 - RNA, 18 nt, Human
cagccaccucccacccca

SEQ ID NO: 464969 - RNA, 22 nt, Human
caugacacugcaaaggucaaau

SEQ ID NO: 464970 - RNA, 21 nt, Human
ccaaaaguugcacacacaagu

SEQ ID NO: 464971 - RNA, 21 nt, Human
ccaauguguccacacccacca

SEQ ID NO: 464972 - RNA, 21 nt, Human
ccacacacagcagcaccagca

SEQ ID NO: 464973 - RNA, 19 nt, Human
ccauaauaaaaaagccaaa

SEQ ID NO: 464974 - RNA, 24 nt, Human
ccauccacaggccuccccacaaga

SEQ ID NO: 464975 - RNA, 18 nt, Human
cccacagugagucgggaa

SEQ ID NO: 464976 - RNA, 24 nt, Human
cccagccaccucccaccccauuaa

SEQ ID NO: 464977 - RNA, 19 nt, Human
cccaggcuaagggguggag

SEQ ID NO: 464978 - RNA, 26 nt, Human
cccauccacaggccuccccacaagag

SEQ ID NO: 464979 - RNA, 24 nt, Human
ccccagcaccccagccaccuccca

SEQ ID NO: 464980 - RNA, 23 nt, Human
cccccauccacaggccuccccac

SEQ ID NO: 464981 - RNA, 22 nt, Human
cccccgggugccguggaagucu

SEQ ID NO: 464982 - RNA, 22 nt, Human
ccgggacagggcaggaugcaca

SEQ ID NO: 464983 - RNA, 20 nt, Human
ccucccaccccauuaaaaaa

SEQ ID NO: 464984 - RNA, 23 nt, Human
ccucccaccccauuaaaaaaguc

SEQ ID NO: 464985 - RNA, 23 nt, Human
ccucggcggcugcgguucccagg

SEQ ID NO: 464986 - RNA, 18 nt, Human
ccugcgguggguucccag

SEQ ID NO: 464987 - RNA, 24 nt, Human
ccuguggacucugcucugaagggc

SEQ ID NO: 464988 - RNA, 23 nt, Human
cgaggcgggcggcggggaagucc

SEQ ID NO: 464989 - RNA, 24 nt, Human
cgcccggcugggcugccugagggc

SEQ ID NO: 464990 - RNA, 20 nt, Human
cgggccgaggcgggcggcgg

SEQ ID NO: 464991 - RNA, 21 nt, Human
cguacacuaagcuuguguaug

SEQ ID NO: 464992 - RNA, 19 nt, Human
cuaagaacaaaacaaaaca

SEQ ID NO: 464993 - RNA, 23 nt, Human
cucaaauaccuacacaaacuguc

SEQ ID NO: 464994 - RNA, 25 nt, Human
cuccccagaugcucuuucuguuuuu

SEQ ID NO: 464995 - RNA, 19 nt, Human
cucccgccgccgcugcacc

SEQ ID NO: 464996 - RNA, 21 nt, Human
cucguacacuaagcuugugua

SEQ ID NO: 464997 - RNA, 18 nt, Human
cucuauacugacgcccuc

SEQ ID NO: 464998 - RNA, 22 nt, Human
cucugaaauagcacgcaagaca

SEQ ID NO: 464999 - RNA, 21 nt, Human
cugagggcggcggcggcugcc

SEQ ID NO: 465000 - RNA, 21 nt, Human
cugaggucuguggccuucccu

SEQ ID NO: 465001 - RNA, 19 nt, Human
cugccuuauccuaaagaca

SEQ ID NO: 465002 - RNA, 18 nt, Human
cuguagcagcgcgcaaac

SEQ ID NO: 465003 - RNA, 24 nt, Human
gaacaaaacaaaacagaaaacugg

SEQ ID NO: 465004 - RNA, 23 nt, Human
gaacugaugugggccacacuccc

SEQ ID NO: 465005 - RNA, 19 nt, Human
gacuugugacagaauccuu

SEQ ID NO: 465006 - RNA, 25 nt, Human
gcaaaggucaaaugucaaaggucaa

SEQ ID NO: 465007 - RNA, 22 nt, Human
gcaaggauaguugcuggccuga

SEQ ID NO: 465008 - RNA, 19 nt, Human
gcagcguguccucugcaaa

SEQ ID NO: 465009 - RNA, 19 nt, Human
gccacacucccagggagcc

SEQ ID NO: 465010 - RNA, 18 nt, Human
gcccaggccccagugcgg

SEQ ID NO: 465011 - RNA, 21 nt, Human
gccuguggacucugcucugaa

SEQ ID NO: 465012 - RNA, 22 nt, Human
gcgcgcaaacccgggacaggga

SEQ ID NO: 465013 - RNA, 18 nt, Human
gcggcggcugccggggag

SEQ ID NO: 465014 - RNA, 23 nt, Human
gcuaaguuuuuuuuuaauuuuuc

SEQ ID NO: 465015 - RNA, 21 nt, Human
gcucugaagggcccuccccau

SEQ ID NO: 465016 - RNA, 23 nt, Human
ggagagauaggacaaauaaugag

SEQ ID NO: 465017 - RNA, 21 nt, Human
ggagcaaggggcugcgagggg

SEQ ID NO: 465018 - RNA, 22 nt, Human
ggccauaauaaaaaagccaaac

SEQ ID NO: 465019 - RNA, 19 nt, Human
ggccuagcuugcuggucag

SEQ ID NO: 465020 - RNA, 18 nt, Human
ggcggcggcggcugccgg

SEQ ID NO: 465021 - RNA, 21 nt, Human
gggaaggaaggccgaggcugg

SEQ ID NO: 465022 - RNA, 24 nt, Human
gguggagcggagagcgugaagcuc

SEQ ID NO: 465023 - RNA, 18 nt, Human
guagcagcgcgcaaaccc

SEQ ID NO: 465024 - RNA, 20 nt, Human
guccacacccaccacucccc

SEQ ID NO: 465025 - RNA, 18 nt, Human
guccuagucuaaaaugcu

SEQ ID NO: 465026 - RNA, 22 nt, Human
uaaaaaaaaagucacaucugcg

SEQ ID NO: 465027 - RNA, 19 nt, Human
uaaaaaagccaaacauuga

SEQ ID NO: 465028 - RNA, 28 nt, Human
uaaaacggacaaacuagaccaauaagug

SEQ ID NO: 465029 - RNA, 18 nt, Human
uaaaaugcuagaauuuaa

SEQ ID NO: 465030 - RNA, 28 nt, Human
uaaacaaaacaccacaaaaaucaaccca

SEQ ID NO: 465031 - RNA, 18 nt, Human
uaaaguggggacccgccc

SEQ ID NO: 465032 - RNA, 21 nt, Human
uaagaacaaaacaaaacagaa

SEQ ID NO: 465033 - RNA, 20 nt, Human
uaagugauuccuguccccca

SEQ ID NO: 465034 - RNA, 23 nt, Human
uacacuaagcuuguguauguagc

SEQ ID NO: 465035 - RNA, 18 nt, Human
uacacucguacacuaagc

SEQ ID NO: 465036 - RNA, 19 nt, Human
uagaacaguccuagucuaa

SEQ ID NO: 465037 - RNA, 21 nt, Human
uagagcauccugacucgagug

SEQ ID NO: 465038 - RNA, 27 nt, Human
uagaucccaagagaaauccagacaggg

SEQ ID NO: 465039 - RNA, 22 nt, Human
uaguucaaauccccccauccac

SEQ ID NO: 465040 - RNA, 22 nt, Human
ucaaauccccccauccacaggc

SEQ ID NO: 465041 - RNA, 24 nt, Human
ucaacccaaacuuccuucaacccc

SEQ ID NO: 465042 - RNA, 24 nt, Human
ucacaaagagcuccagaaggcaaa

SEQ ID NO: 465043 - RNA, 24 nt, Human
ucaguaucacaugggcagugaacu

SEQ ID NO: 465044 - RNA, 28 nt, Human
ucauuaaagucaugcacacaugcacaca

SEQ ID NO: 465045 - RNA, 24 nt, Human
uccaaaaaaccugucuuucagccg

SEQ ID NO: 465046 - RNA, 18 nt, Human
uccacacacagcagcacc

SEQ ID NO: 465047 - RNA, 19 nt, Human
uccacacacagcagcacca

SEQ ID NO: 465048 - RNA, 20 nt, Human
uccacacacagcagcaccag

SEQ ID NO: 465049 - RNA, 18 nt, Human
uccccccauccacaggcc

SEQ ID NO: 465050 - RNA, 23 nt, Human
uccucugcaaagugcagguguuc

SEQ ID NO: 465051 - RNA, 20 nt, Human
ucuagaccugagcagggaga

SEQ ID NO: 465052 - RNA, 19 nt, Human
ucucugccuuauccuaaag

SEQ ID NO: 465053 - RNA, 20 nt, Human
ucucuuagcagugacucaca

SEQ ID NO: 465054 - RNA, 24 nt, Human
ucugcaacaucuguuucucugccu

SEQ ID NO: 465055 - RNA, 24 nt, Human
ucugggggugggugggaaaggaag

SEQ ID NO: 465056 - RNA, 26 nt, Human
ucuguagcagcgcgcaaacccgggac

SEQ ID NO: 465057 - RNA, 18 nt, Human
ucuguuuuucugggggug

SEQ ID NO: 465058 - RNA, 19 nt, Human
ucuuaaaucugucagacca

SEQ ID NO: 465059 - RNA, 18 nt, Human
ugaaauagcacgcaagac

SEQ ID NO: 465060 - RNA, 18 nt, Human
ugaagaaagcagaaagga

SEQ ID NO: 465061 - RNA, 24 nt, Human
ugacagauuguggagugggaagaa

SEQ ID NO: 465062 - RNA, 21 nt, Human
ugacugugaccacuaagaaca

SEQ ID NO: 465063 - RNA, 24 nt, Human
ugagggcggcggcggcugccgggg

SEQ ID NO: 465064 - RNA, 24 nt, Human
ugaguagugaacugaagaauuagg

SEQ ID NO: 465065 - RNA, 18 nt, Human
ugcauggugcauggacag

SEQ ID NO: 465066 - RNA, 20 nt, Human
ugcggcucacaguguucacc

SEQ ID NO: 465067 - RNA, 20 nt, Human
uggagcggagagcgugaagc

SEQ ID NO: 465068 - RNA, 20 nt, Human
ugggaaucaguaucacauga

SEQ ID NO: 465069 - RNA, 24 nt, Human
ugggcagugaacugaagaauuagg

SEQ ID NO: 465070 - RNA, 19 nt, Human
ugggcugccugagggcggc

SEQ ID NO: 465071 - RNA, 19 nt, Human
ugggggugggugggaaagg

SEQ ID NO: 465072 - RNA, 21 nt, Human
ugggggugggugggaaaggaa

SEQ ID NO: 465073 - RNA, 22 nt, Human
ugggggugggugggaaaggaag

SEQ ID NO: 465074 - RNA, 18 nt, Human
ugguaugggaugccuggg

SEQ ID NO: 465075 - RNA, 24 nt, Human
ugguaugggaugccugggaggguu

SEQ ID NO: 465076 - RNA, 25 nt, Human
ugguaugggaugccugggaggguuu

SEQ ID NO: 465077 - RNA, 23 nt, Human
ugugaagaaagcagaaaggacuc

SEQ ID NO: 465078 - RNA, 22 nt, Human
ugugaccacuaagaacaaaaca

SEQ ID NO: 465079 - RNA, 21 nt, Human
uguggcaaucaguaucacaug

SEQ ID NO: 465080 - RNA, 23 nt, Human
uguggcaaucaguaucacauggg

SEQ ID NO: 465081 - RNA, 18 nt, Human
ugugggccacacucccag

SEQ ID NO: 465082 - RNA, 21 nt, Human
uguucucagagcuccugcagc

SEQ ID NO: 465083 - RNA, 19 nt, Human
uguugaacugaugugggcc

SEQ ID NO: 465084 - RNA, 19 nt, Human
uuccauggucaaaaauaug

SEQ ID NO: 465085 - RNA, 22 nt, Human
uucccaggcuaagggguggagc

SEQ ID NO: 465086 - RNA, 22 nt, Human
uuucugggggugggugggaaag

SEQ ID NO: 465087 - RNA, 19 nt, Human
uuucuuguucucagagcuc

SEQ ID NO: 465088 - RNA, 22 nt, Human
uuugagaaaggguguccgccug

SEQ ID NO: 465089 - RNA, 21 nt, Human
aaaaaagagaaauaacaguaa

SEQ ID NO: 465090 - RNA, 23 nt, Human
aaaaaagagaaauaacaguaaag

SEQ ID NO: 465091 - RNA, 21 nt, Human
aaacagaagugggugacaagg

SEQ ID NO: 465092 - RNA, 18 nt, Human
aaacauugagaaaagaca

SEQ ID NO: 465093 - RNA, 25 nt, Human
aacaaaaguggaauaacugggucua

SEQ ID NO: 465094 - RNA, 22 nt, Human
aaucuuuaccccaaacuuuaaa

SEQ ID NO: 465095 - RNA, 19 nt, Human
acauuaacaaaaguggaau

SEQ ID NO: 465096 - RNA, 20 nt, Human
accacauuuguaaacaaagu

SEQ ID NO: 465097 - RNA, 24 nt, Human
acuguaauuaaacugucucuagau

SEQ ID NO: 465098 - RNA, 25 nt, Human
agaagugggugacaagguacauaua

SEQ ID NO: 465099 - RNA, 20 nt, Human
agcaagaaacaaagagacaa

SEQ ID NO: 465100 - RNA, 20 nt, Human
agcugcaguggccaaaaggc

SEQ ID NO: 465101 - RNA, 20 nt, Human
agguaacaugucucuggucc

SEQ ID NO: 465102 - RNA, 24 nt, Human
auacagcaguguugacaaguuaug

SEQ ID NO: 465103 - RNA, 21 nt, Human
augugauaagaaugaaaagga

SEQ ID NO: 465104 - RNA, 20 nt, Human
caaaaaagagaaauaacagu

SEQ ID NO: 465105 - RNA, 23 nt, Human
caaaaggcacuggggagagcuga

SEQ ID NO: 465106 - RNA, 24 nt, Human
caacccuauuucugagauaaaaga

SEQ ID NO: 465107 - RNA, 18 nt, Human
caagcuaugauaugugau

SEQ ID NO: 465108 - RNA, 21 nt, Human
caguggcagcaagaaacaaag

SEQ ID NO: 465109 - RNA, 26 nt, Human
ccagggaugacaaacuauggcaccac

SEQ ID NO: 465110 - RNA, 23 nt, Human
ccaucugaauacauccuaggcau

SEQ ID NO: 465111 - RNA, 19 nt, Human
ccgcgcccggccagaagca

SEQ ID NO: 465112 - RNA, 24 nt, Human
ccuaaaauaguuacuuucuggccc

SEQ ID NO: 465113 - RNA, 23 nt, Human
ccuauauuuuuuaagaaggagaa

SEQ ID NO: 465114 - RNA, 21 nt, Human
ccucacuauguacgucaaccc

SEQ ID NO: 465115 - RNA, 20 nt, Human
ccuccuaucccacuauaacc

SEQ ID NO: 465116 - RNA, 20 nt, Human
cgcccggccagaagcagcgg

SEQ ID NO: 465117 - RNA, 20 nt, Human
cuggaacaaagccacgcccg

SEQ ID NO: 465118 - RNA, 26 nt, Human
cuguggguuccgcuuccccgaggcuc

SEQ ID NO: 465119 - RNA, 23 nt, Human
gaaaagacaaagucauccauuuu

SEQ ID NO: 465120 - RNA, 23 nt, Human
gagcuggcaguggcagcaagaaa

SEQ ID NO: 465121 - RNA, 18 nt, Human
gaugacaaaagcagcaca

SEQ ID NO: 465122 - RNA, 19 nt, Human
gcccggccagaagcagcgg

SEQ ID NO: 465123 - RNA, 19 nt, Human
ggcagucucaacaaugagc

SEQ ID NO: 465124 - RNA, 20 nt, Human
guaagagaaagaaauggcag

SEQ ID NO: 465125 - RNA, 22 nt, Human
gugcuucauacagcaguguuga

SEQ ID NO: 465126 - RNA, 20 nt, Human
uaaaacaagcaucaggaaac

SEQ ID NO: 465127 - RNA, 21 nt, Human
uaaaacaagcaucaggaaaca

SEQ ID NO: 465128 - RNA, 19 nt, Human
uaacaaaaguggaauaacu

SEQ ID NO: 465129 - RNA, 18 nt, Human
uaagagaaagaaauggca

SEQ ID NO: 465130 - RNA, 18 nt, Human
uaagguaauauuuucaug

SEQ ID NO: 465131 - RNA, 24 nt, Human
uacaaauaaaaacauugagaaaag

SEQ ID NO: 465132 - RNA, 26 nt, Human
uaccccaaacuuuaaagugguuuaua

SEQ ID NO: 465133 - RNA, 24 nt, Human
uacucuucagaaugaaaaccuuau

SEQ ID NO: 465134 - RNA, 24 nt, Human
uacuggaacaaagccacgcccgua

SEQ ID NO: 465135 - RNA, 21 nt, Human
uagguaacaugucucuggucc

SEQ ID NO: 465136 - RNA, 21 nt, Human
ucccacuauaaccaguuagua

SEQ ID NO: 465137 - RNA, 19 nt, Human
uccuagacccagggaugac

SEQ ID NO: 465138 - RNA, 21 nt, Human
ucuacgguagcugcaguggcc

SEQ ID NO: 465139 - RNA, 18 nt, Human
ucucuagauaacaaaguu

SEQ ID NO: 465140 - RNA, 18 nt, Human
ucucuggucccuguuacu

SEQ ID NO: 465141 - RNA, 21 nt, Human
ugaauaaaacaagcaucagga

SEQ ID NO: 465142 - RNA, 20 nt, Human
ugaguaagagaaagaaaugg

SEQ ID NO: 465143 - RNA, 27 nt, Human
ugauaagaaugaaaaggauagcccaga

SEQ ID NO: 465144 - RNA, 18 nt, Human
ugaugggucucaaaucca

SEQ ID NO: 465145 - RNA, 20 nt, Human
ugaugggucucaaauccaau

SEQ ID NO: 465146 - RNA, 22 nt, Human
uggaauaacugggucuaauuaa

SEQ ID NO: 465147 - RNA, 24 nt, Human
uggaugaacauauuuugaguuuug

SEQ ID NO: 465148 - RNA, 24 nt, Human
uggcaccacauuuguaaacaaagu

SEQ ID NO: 465149 - RNA, 21 nt, Human
uggcagucucaacaaugagcu

SEQ ID NO: 465150 - RNA, 20 nt, Human
uggggaaguuuuacucuuca

SEQ ID NO: 465151 - RNA, 26 nt, Human
uguaaacaaaguuuuacuggaacaaa

SEQ ID NO: 465152 - RNA, 21 nt, Human
uguauugucuauggcugcuuu

SEQ ID NO: 465153 - RNA, 22 nt, Human
uugagugugggaugacaaaagc

SEQ ID NO: 465154 - RNA, 20 nt, Human
aagaggaugcugggggcugc

SEQ ID NO: 465155 - RNA, 21 nt, Human
aauuuauugaaggcuuacaua

SEQ ID NO: 465156 - RNA, 23 nt, Human
acaagaauuuguuuuccuccucc

SEQ ID NO: 465157 - RNA, 19 nt, Human
accccacucgcucuagagc

SEQ ID NO: 465158 - RNA, 25 nt, Human
accccagagguaggagggaaaggga

SEQ ID NO: 465159 - RNA, 20 nt, Human
acugaaauuuauugaaggcu

SEQ ID NO: 465160 - RNA, 20 nt, Human
acuuugggggguauacagca

SEQ ID NO: 465161 - RNA, 18 nt, Human
agaagcucucccagaccg

SEQ ID NO: 465162 - RNA, 18 nt, Human
agaccagagcagcagagg

SEQ ID NO: 465163 - RNA, 22 nt, Human
agagaccccagagguaggaggg

SEQ ID NO: 465164 - RNA, 22 nt, Human
agcaagagaccccagagguagg

SEQ ID NO: 465165 - RNA, 23 nt, Human
agcacaggacagaagcucuccca

SEQ ID NO: 465166 - RNA, 25 nt, Human
agcagcagaggcaagcagcaagaga

SEQ ID NO: 465167 - RNA, 18 nt, Human
agcuggugccuguggcug

SEQ ID NO: 465168 - RNA, 21 nt, Human
agcuggugccuguggcuggau

SEQ ID NO: 465169 - RNA, 23 nt, Human
aggcaagcagcaagagaccccag

SEQ ID NO: 465170 - RNA, 25 nt, Human
aggcaagcagcaagagaccccagag

SEQ ID NO: 465171 - RNA, 19 nt, Human
agggaaagggacacuuugg

SEQ ID NO: 465172 - RNA, 27 nt, Human
agggguggggaggguaaaagcgggaag

SEQ ID NO: 465173 - RNA, 19 nt, Human
auacccaugcagcacagga

SEQ ID NO: 465174 - RNA, 20 nt, Human
auccggggccgccugguggg

SEQ ID NO: 465175 - RNA, 20 nt, Human
auuuauugaaggcuuacaua

SEQ ID NO: 465176 - RNA, 24 nt, Human
cacaggacagaagcucucccagac

SEQ ID NO: 465177 - RNA, 25 nt, Human
caccccacucgcucuagagcccacc

SEQ ID NO: 465178 - RNA, 20 nt, Human
cacccuguacuuaaacaccu

SEQ ID NO: 465179 - RNA, 20 nt, Human
cacucucauucugaggggga

SEQ ID NO: 465180 - RNA, 21 nt, Human
cacucucauucugagggggac

SEQ ID NO: 465181 - RNA, 22 nt, Human
cacuugggagcaucucagaggc

SEQ ID NO: 465182 - RNA, 20 nt, Human
cagaccagagcagcagaggc

SEQ ID NO: 465183 - RNA, 24 nt, Human
cagagcagcagaggcaagcagcaa

SEQ ID NO: 465184 - RNA, 22 nt, Human
cagagcugagaggccaccuaga

SEQ ID NO: 465185 - RNA, 23 nt, Human
cagaggcaagcagcaagagaccc

SEQ ID NO: 465186 - RNA, 19 nt, Human
cagaggcccccaaggcccc

SEQ ID NO: 465187 - RNA, 23 nt, Human
cagcacaggacagaagcucuccc

SEQ ID NO: 465188 - RNA, 18 nt, Human
cagcagguuucuuuuugu

SEQ ID NO: 465189 - RNA, 19 nt, Human
cagcagguuucuuuuugug

SEQ ID NO: 465190 - RNA, 22 nt, Human
cagcuggugccuguggcuggaa

SEQ ID NO: 465191 - RNA, 21 nt, Human
ccagaccagagcagcagaggc

SEQ ID NO: 465192 - RNA, 18 nt, Human
ccagagguaggagggaaa

SEQ ID NO: 465193 - RNA, 23 nt, Human
ccagcuggugccuguggcuggaa

SEQ ID NO: 465194 - RNA, 22 nt, Human
cccagaccagagcagcagaggc

SEQ ID NO: 465195 - RNA, 21 nt, Human
ccccaccacgcuccgcucccc

SEQ ID NO: 465196 - RNA, 22 nt, Human
ccccaccacgcuccgcuccccg

SEQ ID NO: 465197 - RNA, 24 nt, Human
ccccuccccaccacgcuccgcucc

SEQ ID NO: 465198 - RNA, 23 nt, Human
ccccuggcuggguccccuggggc

SEQ ID NO: 465199 - RNA, 20 nt, Human
cccguccuuucuccucucca

SEQ ID NO: 465200 - RNA, 20 nt, Human
cccuagggaagaggggcacc

SEQ ID NO: 465201 - RNA, 19 nt, Human
cccucccuggcacuuggga

SEQ ID NO: 465202 - RNA, 19 nt, Human
cccuggggcauggccgagg

SEQ ID NO: 465203 - RNA, 18 nt, Human
cccuugcaaaucagaaag

SEQ ID NO: 465204 - RNA, 22 nt, Human
ccgcugucuccugugucgccug

SEQ ID NO: 465205 - RNA, 18 nt, Human
ccggggccgccugguggg

SEQ ID NO: 465206 - RNA, 18 nt, Human
ccucgcucggcccucccu

SEQ ID NO: 465207 - RNA, 24 nt, Human
cgccgcugucuccugugucgccug

SEQ ID NO: 465208 - RNA, 20 nt, Human
cgggaaggauggaaauaagu

SEQ ID NO: 465209 - RNA, 23 nt, Human
cgucacccuguacuuaaacaccu

SEQ ID NO: 465210 - RNA, 21 nt, Human
cgucacggagggaccgcggag

SEQ ID NO: 465211 - RNA, 22 nt, Human
cugaaauuuauugaaggcuuac

SEQ ID NO: 465212 - RNA, 24 nt, Human
cugggggcugcuggucccaaccag

SEQ ID NO: 465213 - RNA, 25 nt, Human
cugucccgcuccccuccccaccacg

SEQ ID NO: 465214 - RNA, 22 nt, Human
cuuugggggguauacagcaggu

SEQ ID NO: 465215 - RNA, 21 nt, Human
gaagcucucccaguccagagc

SEQ ID NO: 465216 - RNA, 21 nt, Human
gagcaucucagaggcgcccaa

SEQ ID NO: 465217 - RNA, 21 nt, Human
gaggcaagcagcaagagaccc

SEQ ID NO: 465218 - RNA, 23 nt, Human
gcaagcagcaagagaccccagag

SEQ ID NO: 465219 - RNA, 25 nt, Human
gccccguccuuucuccucuccaccc

SEQ ID NO: 465220 - RNA, 18 nt, Human
gccgcggcgccgcugucu

SEQ ID NO: 465221 - RNA, 24 nt, Human
gcgacgaugaggacgcgggggcac

SEQ ID NO: 465222 - RNA, 22 nt, Human
gcugcuggucccaaccagcugg

SEQ ID NO: 465223 - RNA, 19 nt, Human
ggaaggauggaaauaaguc

SEQ ID NO: 465224 - RNA, 19 nt, Human
ggagcccagggacgggugg

SEQ ID NO: 465225 - RNA, 26 nt, Human
ggagcccagggagggguggggagggu

SEQ ID NO: 465226 - RNA, 20 nt, Human
ggagggguggggaggguaaa

SEQ ID NO: 465227 - RNA, 21 nt, Human
ggagggguggggaggguaaaa

SEQ ID NO: 465228 - RNA, 23 nt, Human
ggccccguccuuucuccucucca

SEQ ID NO: 465229 - RNA, 21 nt, Human
ggcggcggccuggagcccagg

SEQ ID NO: 465230 - RNA, 21 nt, Human
gggagggguggggaggguaaa

SEQ ID NO: 465231 - RNA, 24 nt, Human
gggcugcuggucccaaccagcugg

SEQ ID NO: 465232 - RNA, 26 nt, Human
gggggcugcuggucccaaccagcugg

SEQ ID NO: 465233 - RNA, 20 nt, Human
gggguggggaggguaaaagc

SEQ ID NO: 465234 - RNA, 20 nt, Human
ggucccaaccagcuggugcc

SEQ ID NO: 465235 - RNA, 23 nt, Human
ggucccaaccagcuggugccugu

SEQ ID NO: 465236 - RNA, 20 nt, Human
gucacggagggaccgcggag

SEQ ID NO: 465237 - RNA, 19 nt, Human
gucccgcuccccuccccac

SEQ ID NO: 465238 - RNA, 19 nt, Human
guccuuucuccucuccacc

SEQ ID NO: 465239 - RNA, 20 nt, Human
ucagaaagagccacucucau

SEQ ID NO: 465240 - RNA, 21 nt, Human
ucccccacagucuaaauaccc

SEQ ID NO: 465241 - RNA, 18 nt, Human
ucccgcuccccuccccac

SEQ ID NO: 465242 - RNA, 24 nt, Human
ucccuccccaccacgggcacugga

SEQ ID NO: 465243 - RNA, 18 nt, Human
uccugugucgccuguccc

SEQ ID NO: 465244 - RNA, 18 nt, Human
ucggugugcccucagggc

SEQ ID NO: 465245 - RNA, 21 nt, Human
ucucagaggcccccaaggccc

SEQ ID NO: 465246 - RNA, 22 nt, Human
ucucagaggcccccaaggcccc

SEQ ID NO: 465247 - RNA, 19 nt, Human
ugaggagggggcggcggcc

SEQ ID NO: 465248 - RNA, 21 nt, Human
ugcagcuagagguggcagagc

SEQ ID NO: 465249 - RNA, 22 nt, Human
ugcccggggcgacgaugaggac

SEQ ID NO: 465250 - RNA, 21 nt, Human
ugccugccuuaccaccccauu

SEQ ID NO: 465251 - RNA, 24 nt, Human
ugcugggggcugcuggucccaacc

SEQ ID NO: 465252 - RNA, 18 nt, Human
ugcuggucccaaccagcu

SEQ ID NO: 465253 - RNA, 24 nt, Human
uggaaauaagucuagagaagaggg

SEQ ID NO: 465254 - RNA, 19 nt, Human
uggcagagcugagaggcca

SEQ ID NO: 465255 - RNA, 25 nt, Human
uggggaggguaaaagcgggaaggau

SEQ ID NO: 465256 - RNA, 22 nt, Human
ugucccgcuccccuccccacca

SEQ ID NO: 465257 - RNA, 21 nt, Human
uguuuuccuccuccagugcua

SEQ ID NO: 465258 - RNA, 22 nt, Human
uuaagagcuuuacaaacauucu

SEQ ID NO: 465259 - RNA, 18 nt, Human
uugccugcgccucgcucg

SEQ ID NO: 465260 - RNA, 18 nt, Human
uuggacucuucgugccug

SEQ ID NO: 465261 - RNA, 19 nt, Human
aaacacaaagaaaauccac

SEQ ID NO: 465262 - RNA, 22 nt, Human
aagaacccaaaaccccgaagcc

SEQ ID NO: 465263 - RNA, 18 nt, Human
aagccgggcccgcgugca

SEQ ID NO: 465264 - RNA, 20 nt, Human
accccgaagccgggcccgcg

SEQ ID NO: 465265 - RNA, 23 nt, Human
agaacccaaaaccccgaagccgg

SEQ ID NO: 465266 - RNA, 23 nt, Human
aggcggcggcgcgcggccagcuc

SEQ ID NO: 465267 - RNA, 21 nt, Human
agucucauucggucagcuuca

SEQ ID NO: 465268 - RNA, 21 nt, Human
caaaaccccgaagccgggccc

SEQ ID NO: 465269 - RNA, 20 nt, Human
caccuugcugcugaguuggu

SEQ ID NO: 465270 - RNA, 23 nt, Human
cagggacauuuuuuuucuuuaaa

SEQ ID NO: 465271 - RNA, 23 nt, Human
cccaaaaccccgaagccgggccc

SEQ ID NO: 465272 - RNA, 19 nt, Human
cccacaguguguccggggc

SEQ ID NO: 465273 - RNA, 19 nt, Human
ccccccgccccuguccucc

SEQ ID NO: 465274 - RNA, 20 nt, Human
cccccgccccuguccuccuc

SEQ ID NO: 465275 - RNA, 22 nt, Human
cccccgccccuguccuccucgu

SEQ ID NO: 465276 - RNA, 23 nt, Human
ccccgccgcuuggaguaagaacc

SEQ ID NO: 465277 - RNA, 18 nt, Human
ccucccuccuccucuucu

SEQ ID NO: 465278 - RNA, 20 nt, Human
cgggggggcugaagguggca

SEQ ID NO: 465279 - RNA, 26 nt, Human
cuccaguaacugagcgcgggguaccc

SEQ ID NO: 465280 - RNA, 23 nt, Human
cucccuccuccucuucuuccucc

SEQ ID NO: 465281 - RNA, 23 nt, Human
cuccuccuccccacagugugucc

SEQ ID NO: 465282 - RNA, 19 nt, Human
cuccuccucuucuuccucc

SEQ ID NO: 465283 - RNA, 20 nt, Human
cugaagguggcaagccuccc

SEQ ID NO: 465284 - RNA, 23 nt, Human
cugcugaguuggucaagaugugu

SEQ ID NO: 465285 - RNA, 20 nt, Human
gaguaagaacccaaaacccc

SEQ ID NO: 465286 - RNA, 18 nt, Human
ggaggcggcggcgcgcgg

SEQ ID NO: 465287 - RNA, 23 nt, Human
ggcguucgcgggggggcugaagg

SEQ ID NO: 465288 - RNA, 20 nt, Human
ggcucccccuccuccccgcc

SEQ ID NO: 465289 - RNA, 19 nt, Human
gucuuuuuucuuccucccu

SEQ ID NO: 465290 - RNA, 20 nt, Human
gucuuuuuucuuccucccuu

SEQ ID NO: 465291 - RNA, 24 nt, Human
uaaacacaaagaaaauccaccuug

SEQ ID NO: 465292 - RNA, 23 nt, Human
uaagaacccaaaaccccgaagcc

SEQ ID NO: 465293 - RNA, 24 nt, Human
uaagaacccaaaaccccgaagccg

SEQ ID NO: 465294 - RNA, 23 nt, Human
uccccgccgcuuggaguaagaac

SEQ ID NO: 465295 - RNA, 19 nt, Human
uccucccuccuccucuucu

SEQ ID NO: 465296 - RNA, 18 nt, Human
uccuccucuucuuccucc

SEQ ID NO: 465297 - RNA, 20 nt, Human
ucgcgggggggcugaaggug

SEQ ID NO: 465298 - RNA, 22 nt, Human
ucuucuuccuccuccucccccc

SEQ ID NO: 465299 - RNA, 24 nt, Human
ucuuuuuucuuccucccuccuccu

SEQ ID NO: 465300 - RNA, 19 nt, Human
uggaguaagaacccaaaac

SEQ ID NO: 465301 - RNA, 20 nt, Human
uggaguaagaacccaaaacc

SEQ ID NO: 465302 - RNA, 21 nt, Human
uggcaagccucccgccccccg

SEQ ID NO: 465303 - RNA, 20 nt, Human
ugugaaagaagcagcggccg

SEQ ID NO: 465304 - RNA, 21 nt, Human
uuuuuucuuccucccuccucc

SEQ ID NO: 465305 - RNA, 18 nt, Human
aaaaaaaaaaaaaacaac

SEQ ID NO: 465306 - RNA, 23 nt, Human
aaaaaaaaaaaaaacaacuaaug

SEQ ID NO: 465307 - RNA, 23 nt, Human
aaaaaaaaaaaacaacuaaugcc

SEQ ID NO: 465308 - RNA, 26 nt, Human
aaacaaaaacaaaaaccaugauucaa

SEQ ID NO: 465309 - RNA, 21 nt, Human
aaacaaaaaccaugauucaac

SEQ ID NO: 465310 - RNA, 20 nt, Human
aaacaauaaaauccaacaac

SEQ ID NO: 465311 - RNA, 19 nt, Human
aaaccaaaaaaaaaagggg

SEQ ID NO: 465312 - RNA, 20 nt, Human
aacaaauucaggcaaguuua

SEQ ID NO: 465313 - RNA, 18 nt, Human
aagaagaaaaaagaaaaa

SEQ ID NO: 465314 - RNA, 20 nt, Human
aagcuggcuuuuccaaugug

SEQ ID NO: 465315 - RNA, 21 nt, Human
aaucaagucaucuugaucauu

SEQ ID NO: 465316 - RNA, 22 nt, Human
aaugaaaggcaacaccucccuc

SEQ ID NO: 465317 - RNA, 22 nt, Human
aauuaaaagccaauaagggucu

SEQ ID NO: 465318 - RNA, 22 nt, Human
aauucuuucacacuuaaaacuu

SEQ ID NO: 465319 - RNA, 21 nt, Human
acaaaauaucccauaccaaac

SEQ ID NO: 465320 - RNA, 25 nt, Human
acaacaaaccaaaaaaaaaaggggg

SEQ ID NO: 465321 - RNA, 18 nt, Human
acaacaacaacaaaccaa

SEQ ID NO: 465322 - RNA, 24 nt, Human
accguguuuuaggaaaaaguuuug

SEQ ID NO: 465323 - RNA, 20 nt, Human
accugggaucuaaacauacu

SEQ ID NO: 465324 - RNA, 25 nt, Human
acuaaaaaaaaaaaaaaacaacuaa

SEQ ID NO: 465325 - RNA, 21 nt, Human
acuacaacaacaacaaaccaa

SEQ ID NO: 465326 - RNA, 19 nt, Human
acucuuuuuggaagccuau

SEQ ID NO: 465327 - RNA, 20 nt, Human
acuuaugcugagcuuucuuc

SEQ ID NO: 465328 - RNA, 23 nt, Human
agaaaaagggagacguauaaugc

SEQ ID NO: 465329 - RNA, 21 nt, Human
agaaaguguacaauuuuucuu

SEQ ID NO: 465330 - RNA, 28 nt, Human
agacagaaaaauggaacaaaagggaccc

SEQ ID NO: 465331 - RNA, 21 nt, Human
agcauaaucagaaugccacaa

SEQ ID NO: 465332 - RNA, 20 nt, Human
agcuggcuuuuccaaugugu

SEQ ID NO: 465333 - RNA, 20 nt, Human
aggaagagaguggcaguaag

SEQ ID NO: 465334 - RNA, 20 nt, Human
aggcaacaccucccucuaau

SEQ ID NO: 465335 - RNA, 19 nt, Human
aggggggggggguggaagu

SEQ ID NO: 465336 - RNA, 19 nt, Human
agguauaauuaaaagccaa

SEQ ID NO: 465337 - RNA, 23 nt, Human
agguggccgacaccaggcagaac

SEQ ID NO: 465338 - RNA, 23 nt, Human
agguuccauuucagaguagucac

SEQ ID NO: 465339 - RNA, 25 nt, Human
auacuauucuuuuuccccuccccaa

SEQ ID NO: 465340 - RNA, 24 nt, Human
auauacaggauuauauacauuuug

SEQ ID NO: 465341 - RNA, 25 nt, Human
auggaacaaaauguauauagcuguu

SEQ ID NO: 465342 - RNA, 20 nt, Human
auuauacucuuuuuggaagc

SEQ ID NO: 465343 - RNA, 24 nt, Human
auugcaaauaagggcauaucauuu

SEQ ID NO: 465344 - RNA, 20 nt, Human
caaaaccaagaaaggcgagc

SEQ ID NO: 465345 - RNA, 21 nt, Human
caaaagagccucuaaccccca

SEQ ID NO: 465346 - RNA, 20 nt, Human
caaaauaucccauaccaaac

SEQ ID NO: 465347 - RNA, 23 nt, Human
caacagaaaaugugacagauucc

SEQ ID NO: 465348 - RNA, 20 nt, Human
caacauuuaacugagguaga

SEQ ID NO: 465349 - RNA, 20 nt, Human
caacuuuagaaaccuaaguu

SEQ ID NO: 465350 - RNA, 18 nt, Human
cacacuuaaaacuuuaug

SEQ ID NO: 465351 - RNA, 21 nt, Human
caccucccucuaauggccaaa

SEQ ID NO: 465352 - RNA, 23 nt, Human
caucugcucauuuucuccaagcc

SEQ ID NO: 465353 - RNA, 18 nt, Human
cauggcucuguaagacag

SEQ ID NO: 465354 - RNA, 21 nt, Human
cccaaaagagccucuaacccc

SEQ ID NO: 465355 - RNA, 21 nt, Human
cccauaccaaacauaucuagu

SEQ ID NO: 465356 - RNA, 27 nt, Human
ccccacuccacuacuaaaaggucggac

SEQ ID NO: 465357 - RNA, 26 nt, Human
ccccacuccacuacuaaaaggucggc

SEQ ID NO: 465358 - RNA, 20 nt, Human
ccccgccguccacacggagg

SEQ ID NO: 465359 - RNA, 22 nt, Human
ccccgccguccacacggaggug

SEQ ID NO: 465360 - RNA, 21 nt, Human
ccuacaaggauauaaugcuag

SEQ ID NO: 465361 - RNA, 19 nt, Human
cgacaccaggcagaacgcg

SEQ ID NO: 465362 - RNA, 18 nt, Human
cgagccuuguggcucaaa

SEQ ID NO: 465363 - RNA, 26 nt, Human
cgucaaugaaaggcaacaccucccuc

SEQ ID NO: 465364 - RNA, 25 nt, Human
cuaaaaaaaaaaaaaaacaacuaau

SEQ ID NO: 465365 - RNA, 22 nt, Human
cuaaaaaacaaaacacuaaaaa

SEQ ID NO: 465366 - RNA, 18 nt, Human
cuaaaaauauccauuuug

SEQ ID NO: 465367 - RNA, 19 nt, Human
cuaacccccaaaaccaaga

SEQ ID NO: 465368 - RNA, 23 nt, Human
cuacaacaacaacaaaccaaaaa

SEQ ID NO: 465369 - RNA, 20 nt, Human
cucaguaaucuuucccuggc

SEQ ID NO: 465370 - RNA, 22 nt, Human
cucccuuacuccauuuuucaga

SEQ ID NO: 465371 - RNA, 22 nt, Human
cugcuguuuuuaacagcuccaa

SEQ ID NO: 465372 - RNA, 24 nt, Human
cuguaagacagaaaaauggaacaa

SEQ ID NO: 465373 - RNA, 22 nt, Human
cuuaacaagugaacaauuugcu

SEQ ID NO: 465374 - RNA, 24 nt, Human
cuucccaaaagagccucuaacccc

SEQ ID NO: 465375 - RNA, 20 nt, Human
cuugccuaacaaaauauccc

SEQ ID NO: 465376 - RNA, 23 nt, Human
gagccucuaacccccaaaaccaa

SEQ ID NO: 465377 - RNA, 21 nt, Human
gagguggccgacaccaggcag

SEQ ID NO: 465378 - RNA, 19 nt, Human
gcagcuuugcaauuaaaau

SEQ ID NO: 465379 - RNA, 21 nt, Human
gccgacaccaggcagaacgcg

SEQ ID NO: 465380 - RNA, 22 nt, Human
ggccugagguguugcagggugg

SEQ ID NO: 465381 - RNA, 26 nt, Human
ggggaacuguggauuuccauuuuuga

SEQ ID NO: 465382 - RNA, 24 nt, Human
guaagacagaaaaauggaacaaaa

SEQ ID NO: 465383 - RNA, 21 nt, Human
uaaaaacaaaaacaaaaacca

SEQ ID NO: 465384 - RNA, 24 nt, Human
uaaaauccaacaacaguaguguua

SEQ ID NO: 465385 - RNA, 20 nt, Human
uaaaaugaauaaagccauga

SEQ ID NO: 465386 - RNA, 23 nt, Human
uaaacacaggucaccauacacua

SEQ ID NO: 465387 - RNA, 25 nt, Human
uaaccacuuaggucacuuagagugu

SEQ ID NO: 465388 - RNA, 19 nt, Human
uaagcaaucuccacaaugu

SEQ ID NO: 465389 - RNA, 23 nt, Human
uaaguaagcaaucuccacaaugu

SEQ ID NO: 465390 - RNA, 24 nt, Human
uaaguagguaaacagguuaaguuu

SEQ ID NO: 465391 - RNA, 24 nt, Human
uaaucaccucuaagagaaaugaac

SEQ ID NO: 465392 - RNA, 23 nt, Human
uacaacaacaacaaaccaaaaaa

SEQ ID NO: 465393 - RNA, 22 nt, Human
uacaauucuuucacacuuaaaa

SEQ ID NO: 465394 - RNA, 23 nt, Human
uacauaacugcaauacagcacug

SEQ ID NO: 465395 - RNA, 23 nt, Human
uacgauaacuacgccagucagaa

SEQ ID NO: 465396 - RNA, 22 nt, Human
uagaaggcuauccaaacuccua

SEQ ID NO: 465397 - RNA, 25 nt, Human
uauaugcagaaaaaaacuagcuauu

SEQ ID NO: 465398 - RNA, 20 nt, Human
uauccagagacaacagaaau

SEQ ID NO: 465399 - RNA, 23 nt, Human
uaugcagagaacucacugagaaa

SEQ ID NO: 465400 - RNA, 24 nt, Human
uauggaaggcccaaugggagguuc

SEQ ID NO: 465401 - RNA, 26 nt, Human
uauuaaccacacacaguuuaccuuuu

SEQ ID NO: 465402 - RNA, 22 nt, Human
ucagcuaaaauccuugauucca

SEQ ID NO: 465403 - RNA, 23 nt, Human
uccaaacuccuauuccccacucc

SEQ ID NO: 465404 - RNA, 23 nt, Human
uccaagccccaguccuauaaauc

SEQ ID NO: 465405 - RNA, 18 nt, Human
uccagagacaacagaaau

SEQ ID NO: 465406 - RNA, 22 nt, Human
ucccauaccaaacauaucuagu

SEQ ID NO: 465407 - RNA, 25 nt, Human
ugaacuggaaaugauuuauaaucua

SEQ ID NO: 465408 - RNA, 23 nt, Human
ugagcaaagacuguuuucaccau

SEQ ID NO: 465409 - RNA, 23 nt, Human
ugagcaaagacuguuuucaccau

SEQ ID NO: 465410 - RNA, 19 nt, Human
ugagguguugcaggguggu

SEQ ID NO: 465411 - RNA, 22 nt, Human
ugauuccagauuuguaaacauu

SEQ ID NO: 465412 - RNA, 22 nt, Human
ugcaauuaaaaugaacaaagca

SEQ ID NO: 465413 - RNA, 23 nt, Human
ugcagagagacuaaaaauaucca

SEQ ID NO: 465414 - RNA, 23 nt, Human
ugggauggaguaaggcugauggc

SEQ ID NO: 465415 - RNA, 18 nt, Human
uguggugaucacuucagc

SEQ ID NO: 465416 - RNA, 25 nt, Human
uuacuaaauucuaccccccucuaaa

SEQ ID NO: 465417 - RNA, 21 nt, Human
uuagugaaguuaaaaucagaa

SEQ ID NO: 465418 - RNA, 19 nt, Human
uuaugggaaaaguauugca

SEQ ID NO: 465419 - RNA, 24 nt, Human
uucauucacagaauguuuuuuuuu

SEQ ID NO: 465420 - RNA, 19 nt, Human
uucgggguucauagaaucc

SEQ ID NO: 465421 - RNA, 18 nt, Human
uugaaaauaccugaauua

SEQ ID NO: 465422 - RNA, 21 nt, Human
uuuauaaucuacccuacaagg

SEQ ID NO: 465423 - RNA, 18 nt, Human
uuucacacuuaaaacuuu

SEQ ID NO: 465424 - RNA, 21 nt, Human
uuuuuaaacacaggucaccau

SEQ ID NO: 465425 - RNA, 25 nt, Human
uuuuucauaaauuacaucauaagaa

SEQ ID NO: 465426 - RNA, 21 nt, Human
uuuuuuuuuaaacacagguca

SEQ ID NO: 465427 - RNA, 20 nt, Human
uuuuuuuuuuaaacacaggg

SEQ ID NO: 465428 - RNA, 18 nt, Human
aaaagucggggagggaaa

SEQ ID NO: 465429 - RNA, 26 nt, Human
aaacaauccuccugccucaaccaccc

SEQ ID NO: 465430 - RNA, 25 nt, Human
aaagagcuaguuuaaagucauggag

SEQ ID NO: 465431 - RNA, 23 nt, Human
aaagugcugggauuauaggugua

SEQ ID NO: 465432 - RNA, 21 nt, Human
aaaugccaggauaugagugag

SEQ ID NO: 465433 - RNA, 20 nt, Human
aacauggugaaaacccaucu

SEQ ID NO: 465434 - RNA, 21 nt, Human
aacauggugaaaacccaucuc

SEQ ID NO: 465435 - RNA, 25 nt, Human
aaccuuuugaaaucacuagcucuga

SEQ ID NO: 465436 - RNA, 24 nt, Human
aacgcuuuggcuuuuuucagagaa

SEQ ID NO: 465437 - RNA, 19 nt, Human
aaggcaaacccucaaaccc

SEQ ID NO: 465438 - RNA, 24 nt, Human
aaguagcuaggacugcaggcacac

SEQ ID NO: 465439 - RNA, 22 nt, Human
aagugcagaguauacucaaaac

SEQ ID NO: 465440 - RNA, 18 nt, Human
aagugcugggauuauagg

SEQ ID NO: 465441 - RNA, 18 nt, Human
aauacuugggacuggaga

SEQ ID NO: 465442 - RNA, 19 nt, Human
aaucauaguucacugcagc

SEQ ID NO: 465443 - RNA, 24 nt, Human
aaucuccugaacccaggaggcgga

SEQ ID NO: 465444 - RNA, 24 nt, Human
aaugaaccaggacuauuugaaugg

SEQ ID NO: 465445 - RNA, 18 nt, Human
acaccacugcacuccagc

SEQ ID NO: 465446 - RNA, 20 nt, Human
acaccacugcacuccagccu

SEQ ID NO: 465447 - RNA, 24 nt, Human
acagagcgagacuccaucucaaaa

SEQ ID NO: 465448 - RNA, 21 nt, Human
accacucaaaugacacauaca

SEQ ID NO: 465449 - RNA, 22 nt, Human
accacucaaaugacacauacaa

SEQ ID NO: 465450 - RNA, 24 nt, Human
acccaggaggcggagguugcagug

SEQ ID NO: 465451 - RNA, 25 nt, Human
acuccgucgcccaagcuggagugca

SEQ ID NO: 465452 - RNA, 24 nt, Human
acugcacuccagccuuggcgacag

SEQ ID NO: 465453 - RNA, 26 nt, Human
acugcacuccagccuuggcgacagag

SEQ ID NO: 465454 - RNA, 19 nt, Human
acugcacuccagccuuggg

SEQ ID NO: 465455 - RNA, 23 nt, Human
agaaagcagagacugggggagaa

SEQ ID NO: 465456 - RNA, 19 nt, Human
agaacaauucauguccaca

SEQ ID NO: 465457 - RNA, 24 nt, Human
agaauaaccucgcuccaaucugga

SEQ ID NO: 465458 - RNA, 22 nt, Human
agauguguuuugucuauuucca

SEQ ID NO: 465459 - RNA, 27 nt, Human
agcacuuaucuuuucuuuuuuuuauua

SEQ ID NO: 465460 - RNA, 24 nt, Human
agcacuuugggaagucgagguggg

SEQ ID NO: 465461 - RNA, 18 nt, Human
agcaggaugaguaacagg

SEQ ID NO: 465462 - RNA, 18 nt, Human
agcaggccccaaauagcc

SEQ ID NO: 465463 - RNA, 25 nt, Human
agccuggccaacauggugaaaaccc

SEQ ID NO: 465464 - RNA, 24 nt, Human
agccuuggcgacagagcgagacuc

SEQ ID NO: 465465 - RNA, 20 nt, Human
aggaugagaucuugcuaugu

SEQ ID NO: 465466 - RNA, 23 nt, Human
aggcaggaagccauuauucaagg

SEQ ID NO: 465467 - RNA, 19 nt, Human
aggccccaaauagccccag

SEQ ID NO: 465468 - RNA, 24 nt, Human
aggcggagguugcagugagccgag

SEQ ID NO: 465469 - RNA, 23 nt, Human
agugcagugguaaaaucauaguu

SEQ ID NO: 465470 - RNA, 23 nt, Human
aguucccacauuucccgagcagc

SEQ ID NO: 465471 - RNA, 21 nt, Human
auaaaauuuucuugccucauc

SEQ ID NO: 465472 - RNA, 24 nt, Human
auaguucacugcagccucaacuuc

SEQ ID NO: 465473 - RNA, 25 nt, Human
aucacaccacugcacuccagccuug

SEQ ID NO: 465474 - RNA, 19 nt, Human
augguauccccagugcuug

SEQ ID NO: 465475 - RNA, 18 nt, Human
auggugaaaacccaucuc

SEQ ID NO: 465476 - RNA, 21 nt, Human
auuuaugcuagaacaagcacu

SEQ ID NO: 465477 - RNA, 22 nt, Human
auuucaacacaccaugcuaaau

SEQ ID NO: 465478 - RNA, 28 nt, Human
caaacaauccuccugccucaaccaccca

SEQ ID NO: 465479 - RNA, 18 nt, Human
caaacuuccuucgagagg

SEQ ID NO: 465480 - RNA, 24 nt, Human
caaagugcugggauuauaggugua

SEQ ID NO: 465481 - RNA, 20 nt, Human
caaauagccccagcacagca

SEQ ID NO: 465482 - RNA, 22 nt, Human
caacacaccaugcuaaaugcca

SEQ ID NO: 465483 - RNA, 20 nt, Human
caaccccuaaguguaccccu

SEQ ID NO: 465484 - RNA, 27 nt, Human
caagugacccucucaccucagccuccc

SEQ ID NO: 465485 - RNA, 21 nt, Human
cacaccacugcacuccagccu

SEQ ID NO: 465486 - RNA, 20 nt, Human
cacauccagcccaaaaacuu

SEQ ID NO: 465487 - RNA, 25 nt, Human
caccccaaguaugccauugucuuug

SEQ ID NO: 465488 - RNA, 24 nt, Human
caccucagccucccaaagugcugg

SEQ ID NO: 465489 - RNA, 23 nt, Human
cacuccagccuuggcgacagagc

SEQ ID NO: 465490 - RNA, 24 nt, Human
cacuccagccuuggcgacagagcg

SEQ ID NO: 465491 - RNA, 22 nt, Human
cacuccgucgcccaagcuggag

SEQ ID NO: 465492 - RNA, 19 nt, Human
cacugcacuccagccuugg

SEQ ID NO: 465493 - RNA, 20 nt, Human
cacugcacuccagccuuggc

SEQ ID NO: 465494 - RNA, 22 nt, Human
cacugcacuccagccuuggcga

SEQ ID NO: 465495 - RNA, 23 nt, Human
cacugcacuccagccuuggcgac

SEQ ID NO: 465496 - RNA, 24 nt, Human
cacugcacuccagccuuggcgaca

SEQ ID NO: 465497 - RNA, 21 nt, Human
cagagaaagacuucagccaaa

SEQ ID NO: 465498 - RNA, 21 nt, Human
cagcacuuugggaagucgagg

SEQ ID NO: 465499 - RNA, 24 nt, Human
cagcacuuugggaagucgaggugg

SEQ ID NO: 465500 - RNA, 22 nt, Human
caucugccccuuggacuuugga

SEQ ID NO: 465501 - RNA, 22 nt, Human
cauguuuaugaccuagaaauuc

SEQ ID NO: 465502 - RNA, 21 nt, Human
ccaaagugcugggauuauagg

SEQ ID NO: 465503 - RNA, 24 nt, Human
ccaaagugcugggauuauaggugu

SEQ ID NO: 465504 - RNA, 20 nt, Human
ccacagaucacaccuuccac

SEQ ID NO: 465505 - RNA, 24 nt, Human
ccacccaaguagcuaggacugcag

SEQ ID NO: 465506 - RNA, 20 nt, Human
ccacugcacuccagccuugg

SEQ ID NO: 465507 - RNA, 20 nt, Human
ccacugcacuccagccuugg

SEQ ID NO: 465508 - RNA, 21 nt, Human
ccacugcacuccagccuuggc

SEQ ID NO: 465509 - RNA, 23 nt, Human
ccacugcacuccagccuuggcga

SEQ ID NO: 465510 - RNA, 24 nt, Human
ccacugcacuccagccuuggcgac

SEQ ID NO: 465511 - RNA, 20 nt, Human
ccagacagucccacagauca

SEQ ID NO: 465512 - RNA, 22 nt, Human
cccaaguagcuaggacugcagg

SEQ ID NO: 465513 - RNA, 24 nt, Human
cccaaguagcuaggacugcaggca

SEQ ID NO: 465514 - RNA, 24 nt, Human
cccaggccaauaaaauuuucuugc

SEQ ID NO: 465515 - RNA, 22 nt, Human
ccccaaauagccccagcacagc

SEQ ID NO: 465516 - RNA, 18 nt, Human
cccgcugcuagcuccugg

SEQ ID NO: 465517 - RNA, 23 nt, Human
ccgcgcccgcugcuagcuccugg

SEQ ID NO: 465518 - RNA, 19 nt, Human
ccucagcucccucucaccc

SEQ ID NO: 465519 - RNA, 23 nt, Human
ccuccauuuccgcuuagcuucuc

SEQ ID NO: 465520 - RNA, 24 nt, Human
ccuccugccucaaccacccaagua

SEQ ID NO: 465521 - RNA, 26 nt, Human
ccucucaccucagccucccaaagugc

SEQ ID NO: 465522 - RNA, 23 nt, Human
ccucuuuggcuuccugccuuacu

SEQ ID NO: 465523 - RNA, 22 nt, Human
ccugccaaauagugcccagucc

SEQ ID NO: 465524 - RNA, 19 nt, Human
ccuggccaacauggugaaa

SEQ ID NO: 465525 - RNA, 24 nt, Human
ccuggccaacauggugaaaaccca

SEQ ID NO: 465526 - RNA, 19 nt, Human
ccugugcugagcgcggaaa

SEQ ID NO: 465527 - RNA, 22 nt, Human
ccuucgagaggcgagagacagg

SEQ ID NO: 465528 - RNA, 22 nt, Human
ccuuggcgacagagcgagacuc

SEQ ID NO: 465529 - RNA, 20 nt, Human
cgagaggcgagagacaggag

SEQ ID NO: 465530 - RNA, 21 nt, Human
cgagaggcgagagacaggagg

SEQ ID NO: 465531 - RNA, 24 nt, Human
cgagaucacaccacugcacuccag

SEQ ID NO: 465532 - RNA, 20 nt, Human
cgccuucuggggcgccuccu

SEQ ID NO: 465533 - RNA, 21 nt, Human
cgcuguaaucccagcacuuug

SEQ ID NO: 465534 - RNA, 26 nt, Human
cucaaacaauccuccugccucaacca

SEQ ID NO: 465535 - RNA, 24 nt, Human
cucaagugacccucucaccucagc

SEQ ID NO: 465536 - RNA, 21 nt, Human
cucacgcuguaaucccagcac

SEQ ID NO: 465537 - RNA, 23 nt, Human
cucacgcuguaaucccagcacuu

SEQ ID NO: 465538 - RNA, 23 nt, Human
cuccugggcucaagugacccucu

SEQ ID NO: 465539 - RNA, 24 nt, Human
cugaacccaggaggcggagguugc

SEQ ID NO: 465540 - RNA, 20 nt, Human
cugggauuauagguguaagc

SEQ ID NO: 465541 - RNA, 21 nt, Human
cuguaaucccagcacuuuggg

SEQ ID NO: 465542 - RNA, 21 nt, Human
cuguaauuccagcuacuuggg

SEQ ID NO: 465543 - RNA, 20 nt, Human
cuuucagucuuacccaggcc

SEQ ID NO: 465544 - RNA, 31 nt, Human
cuuuugucuuuauucauuuauuuauuuauuu

SEQ ID NO: 465545 - RNA, 21 nt, Human
gaaaacccaucuccaccaaaa

SEQ ID NO: 465546 - RNA, 23 nt, Human
gaaagacuucagccaaauugucc

SEQ ID NO: 465547 - RNA, 23 nt, Human
gaaagcuuuuggacaaguuggaa

SEQ ID NO: 465548 - RNA, 24 nt, Human
gaacuccugggcucaagugacccu

SEQ ID NO: 465549 - RNA, 18 nt, Human
gaagacagaguauuuuaa

SEQ ID NO: 465550 - RNA, 19 nt, Human
gagaaaaaaaagcugucau

SEQ ID NO: 465551 - RNA, 20 nt, Human
gagacagggucucacuccgu

SEQ ID NO: 465552 - RNA, 23 nt, Human
gagaccagccuggccaacauggu

SEQ ID NO: 465553 - RNA, 18 nt, Human
gaggaaggaacaaaguug

SEQ ID NO: 465554 - RNA, 21 nt, Human
gaggcggagguugcagugagc

SEQ ID NO: 465555 - RNA, 19 nt, Human
gagggaaaccacgauguaa

SEQ ID NO: 465556 - RNA, 22 nt, Human
gagguugcagugagccgagauc

SEQ ID NO: 465557 - RNA, 24 nt, Human
gcacuccagccuuggcgacagagc

SEQ ID NO: 465558 - RNA, 24 nt, Human
gccaacauggugaaaacccaucuc

SEQ ID NO: 465559 - RNA, 22 nt, Human
gccagguccuaugcaccaggga

SEQ ID NO: 465560 - RNA, 20 nt, Human
gcccaagcuggagugcagug

SEQ ID NO: 465561 - RNA, 20 nt, Human
gccgagaucacaccacugca

SEQ ID NO: 465562 - RNA, 19 nt, Human
gccugugcugagcgcggaa

SEQ ID NO: 465563 - RNA, 20 nt, Human
gcucugaaauuaagagcaaa

SEQ ID NO: 465564 - RNA, 18 nt, Human
ggacaaaugccgaguccu

SEQ ID NO: 465565 - RNA, 20 nt, Human
ggagguugcagugagccgag

SEQ ID NO: 465566 - RNA, 22 nt, Human
ggagguugcagugagccgagau

SEQ ID NO: 465567 - RNA, 23 nt, Human
ggagguugcagugagccgagauc

SEQ ID NO: 465568 - RNA, 24 nt, Human
ggagguugcagugagccgagauca

SEQ ID NO: 465569 - RNA, 24 nt, Human
ggcaaacccucaaacccgucucuu

SEQ ID NO: 465570 - RNA, 18 nt, Human
ggcaugauugccucugug

SEQ ID NO: 465571 - RNA, 28 nt, Human
gggcagugcaucuggccaucgggccccc

SEQ ID NO: 465572 - RNA, 21 nt, Human
gggcucaagugacccucucac

SEQ ID NO: 465573 - RNA, 19 nt, Human
ggggugcaagaagcccugc

SEQ ID NO: 465574 - RNA, 23 nt, Human
gguagcucacgcuguaaucccag

SEQ ID NO: 465575 - RNA, 19 nt, Human
guccuucccuucuucacau

SEQ ID NO: 465576 - RNA, 19 nt, Human
guugcagugagccgagauc

SEQ ID NO: 465577 - RNA, 22 nt, Human
uaaaauaaaaagucggggaggg

SEQ ID NO: 465578 - RNA, 24 nt, Human
uaacuuagcuaagcccuuugcaca

SEQ ID NO: 465579 - RNA, 23 nt, Human
uaauaaaauauguaaggccagaa

SEQ ID NO: 465580 - RNA, 24 nt, Human
uacaagggaaaaaaugacaagccc

SEQ ID NO: 465581 - RNA, 23 nt, Human
uacauuugcauucucaaacaaaa

SEQ ID NO: 465582 - RNA, 18 nt, Human
uagaacaauucaugucca

SEQ ID NO: 465583 - RNA, 24 nt, Human
uagcaggaagcacaaaugaugacu

SEQ ID NO: 465584 - RNA, 22 nt, Human
uagcuaagcccuuugcacaguc

SEQ ID NO: 465585 - RNA, 21 nt, Human
uagcucacgcuguaaucccag

SEQ ID NO: 465586 - RNA, 23 nt, Human
uagcucacgcuguaaucccagca

SEQ ID NO: 465587 - RNA, 21 nt, Human
uaggacugcaggcacacacca

SEQ ID NO: 465588 - RNA, 24 nt, Human
uaguucacugcagccucaacuucc

SEQ ID NO: 465589 - RNA, 24 nt, Human
uaugccauugucuuuguaauucuu

SEQ ID NO: 465590 - RNA, 23 nt, Human
uauguuucccaggcuugucuaga

SEQ ID NO: 465591 - RNA, 23 nt, Human
ucaaccacccaaguagcuaggac

SEQ ID NO: 465592 - RNA, 23 nt, Human
ucacaccacugcacuccagccuu

SEQ ID NO: 465593 - RNA, 23 nt, Human
ucaccucagccucccaaagugcu

SEQ ID NO: 465594 - RNA, 24 nt, Human
ucacgcuguaaucccagcacuuug

SEQ ID NO: 465595 - RNA, 19 nt, Human
ucacugcagccucaacuuc

SEQ ID NO: 465596 - RNA, 19 nt, Human
ucauucauuuugugcccuu

SEQ ID NO: 465597 - RNA, 23 nt, Human
uccagccuuggcgacagagcgag

SEQ ID NO: 465598 - RNA, 24 nt, Human
uccagccuuggcgacagagcgaga

SEQ ID NO: 465599 - RNA, 22 nt, Human
uccaucuucaaauuaaacaauc

SEQ ID NO: 465600 - RNA, 23 nt, Human
ucccaaagugcugggauuauagg

SEQ ID NO: 465601 - RNA, 24 nt, Human
ucccagggagucgggcagccuuug

SEQ ID NO: 465602 - RNA, 19 nt, Human
ucccugcaauacuauuccc

SEQ ID NO: 465603 - RNA, 21 nt, Human
ucccugcaauacuauucccuc

SEQ ID NO: 465604 - RNA, 22 nt, Human
uccggugugaggucagccuggg

SEQ ID NO: 465605 - RNA, 21 nt, Human
uccucagcucccucucacccc

SEQ ID NO: 465606 - RNA, 21 nt, Human
uccugggcucaagugacccuc

SEQ ID NO: 465607 - RNA, 24 nt, Human
uccugggcucaagugacccucuca

SEQ ID NO: 465608 - RNA, 18 nt, Human
ucgcccaagcuggagugc

SEQ ID NO: 465609 - RNA, 21 nt, Human
ucuagaacuccugggcucaag

SEQ ID NO: 465610 - RNA, 24 nt, Human
ucucacuccgucgcccaagcugga

SEQ ID NO: 465611 - RNA, 26 nt, Human
ucucacuccgucgcccaagcuggagu

SEQ ID NO: 465612 - RNA, 27 nt, Human
ucucacuccgucgcccaagcuggagug

SEQ ID NO: 465613 - RNA, 18 nt, Human
ucucugcuuaaagcuaca

SEQ ID NO: 465614 - RNA, 21 nt, Human
ucucugugaaaggucaguagu

SEQ ID NO: 465615 - RNA, 24 nt, Human
ucugguuuuauuauucaaauuaag

SEQ ID NO: 465616 - RNA, 23 nt, Human
ucuuacccugguagucuccaaaa

SEQ ID NO: 465617 - RNA, 19 nt, Human
ucuugcuauguuucccagg

SEQ ID NO: 465618 - RNA, 22 nt, Human
ugaaaacccaucuccaccaaaa

SEQ ID NO: 465619 - RNA, 23 nt, Human
ugaaaacccaucuccaccaaaaa

SEQ ID NO: 465620 - RNA, 24 nt, Human
ugaaaacccaucuccaccaaaaau

SEQ ID NO: 465621 - RNA, 19 nt, Human
ugaaaagcaaaacaaacuc

SEQ ID NO: 465622 - RNA, 27 nt, Human
ugaaauuaagagcaaacuuccuucgag

SEQ ID NO: 465623 - RNA, 22 nt, Human
ugaagcaaaugcucuaaagaac

SEQ ID NO: 465624 - RNA, 21 nt, Human
ugacacauacaagucuguaug

SEQ ID NO: 465625 - RNA, 24 nt, Human
ugacagcaggccccaaauagcccc

SEQ ID NO: 465626 - RNA, 24 nt, Human
ugagaucuugcuauguuucccagg

SEQ ID NO: 465627 - RNA, 20 nt, Human
ugaucuaaacaaguucucaa

SEQ ID NO: 465628 - RNA, 24 nt, Human
ugccaaauagugcccaguccuccc

SEQ ID NO: 465629 - RNA, 23 nt, Human
ugccagguccuaugcaccaggga

SEQ ID NO: 465630 - RNA, 21 nt, Human
ugccgcauggcuguaauucca

SEQ ID NO: 465631 - RNA, 24 nt, Human
ugccucaaccacccaaguagcuag

SEQ ID NO: 465632 - RNA, 22 nt, Human
ugcuauguuucccaggcuuguc

SEQ ID NO: 465633 - RNA, 20 nt, Human
ugcuuucagucuuacccagg

SEQ ID NO: 465634 - RNA, 24 nt, Human
uggaauauaggcaccuggcagagu

SEQ ID NO: 465635 - RNA, 24 nt, Human
uggaaucuuacccugguagucucc

SEQ ID NO: 465636 - RNA, 21 nt, Human
uggagugcagugguaaaauca

SEQ ID NO: 465637 - RNA, 18 nt, Human
uggaguuuuugccaaaaa

SEQ ID NO: 465638 - RNA, 18 nt, Human
uggauaaaguuagggcac

SEQ ID NO: 465639 - RNA, 19 nt, Human
uggccaacauggugaaaac

SEQ ID NO: 465640 - RNA, 24 nt, Human
uggcuguaauuccagcuacuuggg

SEQ ID NO: 465641 - RNA, 24 nt, Human
ugggaagucgagguggguggaucg

SEQ ID NO: 465642 - RNA, 20 nt, Human
ugggagggcugaaaagggug

SEQ ID NO: 465643 - RNA, 18 nt, Human
ugggauuauagguguaag

SEQ ID NO: 465644 - RNA, 19 nt, Human
ugggauuauagguguaagc

SEQ ID NO: 465645 - RNA, 22 nt, Human
ugggauuauagguguaagcuac

SEQ ID NO: 465646 - RNA, 24 nt, Human
ugggauuauagguguaagcuacca

SEQ ID NO: 465647 - RNA, 26 nt, Human
ugggcaugauugccucugugggggcu

SEQ ID NO: 465648 - RNA, 18 nt, Human
ugggcucaagugacccuc

SEQ ID NO: 465649 - RNA, 22 nt, Human
ugggggagaaguggucuuuacu

SEQ ID NO: 465650 - RNA, 21 nt, Human
uguaauacuugggacuggaga

SEQ ID NO: 465651 - RNA, 19 nt, Human
ugucuuggggaauuguggu

SEQ ID NO: 465652 - RNA, 23 nt, Human
ugugaaaggucaguaguaaaaga

SEQ ID NO: 465653 - RNA, 21 nt, Human
ugugaggucagccugggcugg

SEQ ID NO: 465654 - RNA, 23 nt, Human
ugugcugagcgcggaaacugccc

SEQ ID NO: 465655 - RNA, 19 nt, Human
uuaaucuuuuggaagcaag

SEQ ID NO: 465656 - RNA, 24 nt, Human
uuagcuucucuugaaucuauuggg

SEQ ID NO: 465657 - RNA, 20 nt, Human
uuccagcuacuugggacgcu

SEQ ID NO: 465658 - RNA, 24 nt, Human
uuccagggggugcaagaagcccug

SEQ ID NO: 465659 - RNA, 24 nt, Human
uucccaggcuugucuagaacuccu

SEQ ID NO: 465660 - RNA, 23 nt, Human
uucucaaacaaaauuaaaaagcc

SEQ ID NO: 465661 - RNA, 20 nt, Human
uugaaucuauugggcaugau

SEQ ID NO: 465662 - RNA, 18 nt, Human
uugcagugagccgagauc

SEQ ID NO: 465663 - RNA, 19 nt, Human
uugcagugagccgagauca

SEQ ID NO: 465664 - RNA, 20 nt, Human
uugcagugagccgagaucac

SEQ ID NO: 465665 - RNA, 19 nt, Human
uuggggaggggccagguag

SEQ ID NO: 465666 - RNA, 21 nt, Human
uugucuagaacuccugggcuc

SEQ ID NO: 465667 - RNA, 22 nt, Human
uugucuauuuccauuaaaaugu

SEQ ID NO: 465668 - RNA, 21 nt, Human
uugugaaaccuuuugaaauca

SEQ ID NO: 465669 - RNA, 23 nt, Human
uuugccaaaaaccaugucucgag

SEQ ID NO: 465670 - RNA, 19 nt, Human
uuuuuuuuuuaaagaaagu

SEQ ID NO: 465671 - RNA, 23 nt, Human
uuuuuuuuuugagacagggucuc

SEQ ID NO: 465672 - RNA, 20 nt, Human
uuuuuuuuuuugagacaggg

SEQ ID NO: 465673 - RNA, 19 nt, Human
aaaaaaaacuuggaaagca

SEQ ID NO: 465674 - RNA, 24 nt, Human
aaaaaaacaacccccaaacccaaa

SEQ ID NO: 465675 - RNA, 21 nt, Human
aaaaaacaacccccaaaccca

SEQ ID NO: 465676 - RNA, 24 nt, Human
aaaaaacaacccccaaacccaaaa

SEQ ID NO: 465677 - RNA, 25 nt, Human
aaaaauaccaaaccaagcaacaaca

SEQ ID NO: 465678 - RNA, 21 nt, Human
aaacaaaaaaaaacuuggaaa

SEQ ID NO: 465679 - RNA, 25 nt, Human
aaacaaaaaaaaacuuggaaagcaa

SEQ ID NO: 465680 - RNA, 21 nt, Human
aaacagaaagccagaggcagc

SEQ ID NO: 465681 - RNA, 18 nt, Human
aaacaggaaaacauaaac

SEQ ID NO: 465682 - RNA, 20 nt, Human
aaaccaaaaauaccaaacca

SEQ ID NO: 465683 - RNA, 20 nt, Human
aaaccaagcaacaacaaaaa

SEQ ID NO: 465684 - RNA, 22 nt, Human
aaacuaccgccuaccaaauuuu

SEQ ID NO: 465685 - RNA, 22 nt, Human
aaacuagcuugcacuucaccua

SEQ ID NO: 465686 - RNA, 21 nt, Human
aaacuuggaaagcaaagcucc

SEQ ID NO: 465687 - RNA, 25 nt, Human
aacaaaaaaacaacccccaaaccca

SEQ ID NO: 465688 - RNA, 18 nt, Human
aacaacccccaaacccaa

SEQ ID NO: 465689 - RNA, 22 nt, Human
aacaacccccaaacccaaaaac

SEQ ID NO: 465690 - RNA, 23 nt, Human
aacccccaaacccaaaaacucuc

SEQ ID NO: 465691 - RNA, 21 nt, Human
aagaacagaaaaagaacuaca

SEQ ID NO: 465692 - RNA, 23 nt, Human
aagcaacaacaaaaaaacaaccc

SEQ ID NO: 465693 - RNA, 26 nt, Human
aauaccaaaccaagcaacaacaaaaa

SEQ ID NO: 465694 - RNA, 21 nt, Human
acaaaaaaacaacccccaaac

SEQ ID NO: 465695 - RNA, 22 nt, Human
acaaauacacacaaaaccaaaa

SEQ ID NO: 465696 - RNA, 26 nt, Human
acaacaaaaaaacaacccccaaaccc

SEQ ID NO: 465697 - RNA, 23 nt, Human
acaacccccaaacccaaaaacuc

SEQ ID NO: 465698 - RNA, 19 nt, Human
acacuacaaacaggaaaac

SEQ ID NO: 465699 - RNA, 25 nt, Human
acagacaaaagaugaagaaccagug

SEQ ID NO: 465700 - RNA, 20 nt, Human
accaagcaacaacaaaaaaa

SEQ ID NO: 465701 - RNA, 23 nt, Human
accaagcaacaacaaaaaaacaa

SEQ ID NO: 465702 - RNA, 27 nt, Human
accacccccuccacccccuucccccca

SEQ ID NO: 465703 - RNA, 22 nt, Human
acccccuccacccccuuccccc

SEQ ID NO: 465704 - RNA, 23 nt, Human
acccccuccacccccuucccccc

SEQ ID NO: 465705 - RNA, 23 nt, Human
acccccuccacccccuucccccc

SEQ ID NO: 465706 - RNA, 18 nt, Human
agaaguacuuuuuucuua

SEQ ID NO: 465707 - RNA, 21 nt, Human
agacaaaaacccaaacuuuau

SEQ ID NO: 465708 - RNA, 21 nt, Human
agacaaaagaugaagaaccag

SEQ ID NO: 465709 - RNA, 21 nt, Human
agcaaagcucccaaaccagcu

SEQ ID NO: 465710 - RNA, 18 nt, Human
agcacgaagagauuuucc

SEQ ID NO: 465711 - RNA, 18 nt, Human
agcggggcucacggcggg

SEQ ID NO: 465712 - RNA, 19 nt, Human
agcggggcucacggcgggg

SEQ ID NO: 465713 - RNA, 18 nt, Human
aggaaaacauaaacauca

SEQ ID NO: 465714 - RNA, 22 nt, Human
aggcacuuaagaucacccaacc

SEQ ID NO: 465715 - RNA, 21 nt, Human
agggauaaauauggaucaaau

SEQ ID NO: 465716 - RNA, 18 nt, Human
aguauuuccucuuuuggu

SEQ ID NO: 465717 - RNA, 20 nt, Human
auacaaauacacacaaaacc

SEQ ID NO: 465718 - RNA, 23 nt, Human
auacaaauacacacaaaaccaaa

SEQ ID NO: 465719 - RNA, 18 nt, Human
auguggagagaaguauga

SEQ ID NO: 465720 - RNA, 24 nt, Human
auuuuuacucuacugaauugaaag

SEQ ID NO: 465721 - RNA, 22 nt, Human
caaaaaaacaacccccaaaccc

SEQ ID NO: 465722 - RNA, 24 nt, Human
caaaaaaacaacccccaaacccaa

SEQ ID NO: 465723 - RNA, 23 nt, Human
caaaaauaaaguauuucuaucuc

SEQ ID NO: 465724 - RNA, 19 nt, Human
caaaaauaccaaaccaagc

SEQ ID NO: 465725 - RNA, 21 nt, Human
caaaccaagcaacaacaaaaa

SEQ ID NO: 465726 - RNA, 26 nt, Human
caaauccuguuaguagaaaacagaaa

SEQ ID NO: 465727 - RNA, 22 nt, Human
caaauccuugagacaaaaaccc

SEQ ID NO: 465728 - RNA, 19 nt, Human
caacaaaaaaacaaccccc

SEQ ID NO: 465729 - RNA, 23 nt, Human
caacaaaaaaacaacccccaaac

SEQ ID NO: 465730 - RNA, 27 nt, Human
caacaacaaaaaaacaacccccaaacc

SEQ ID NO: 465731 - RNA, 25 nt, Human
caagcaacaacaaaaaaacaacccc

SEQ ID NO: 465732 - RNA, 27 nt, Human
cacacaaaaccaaaaauaccaaaccaa

SEQ ID NO: 465733 - RNA, 22 nt, Human
cacuacaaacaggaaaacauaa

SEQ ID NO: 465734 - RNA, 20 nt, Human
cauaaaauuccaaacacuuu

SEQ ID NO: 465735 - RNA, 23 nt, Human
caugauaaacauuugcaaugucc

SEQ ID NO: 465736 - RNA, 23 nt, Human
ccaaaaauaccaaaccaagcaac

SEQ ID NO: 465737 - RNA, 22 nt, Human
ccaaaccaagcaacaacaaaaa

SEQ ID NO: 465738 - RNA, 24 nt, Human
ccaaaccaagcaacaacaaaaaaa

SEQ ID NO: 465739 - RNA, 22 nt, Human
ccaaauccuuucauccaaaauc

SEQ ID NO: 465740 - RNA, 24 nt, Human
ccaaauccuuucauccaaaaucuu

SEQ ID NO: 465741 - RNA, 21 nt, Human
ccaccacaaacugcgcagaag

SEQ ID NO: 465742 - RNA, 20 nt, Human
ccaucuauacagacaccuga

SEQ ID NO: 465743 - RNA, 23 nt, Human
cccccuccacccccuucccccca

SEQ ID NO: 465744 - RNA, 25 nt, Human
cccccuccacccccuuccccccacu

SEQ ID NO: 465745 - RNA, 26 nt, Human
cccccuccacccccuuccccccacuu

SEQ ID NO: 465746 - RNA, 24 nt, Human
cccccuuccccccacuuaaugguu

SEQ ID NO: 465747 - RNA, 22 nt, Human
cccuccacccccuuccccccac

SEQ ID NO: 465748 - RNA, 24 nt, Human
ccggagcggggcucacggcggggu

SEQ ID NO: 465749 - RNA, 21 nt, Human
ccgugccaagcccgcccgggg

SEQ ID NO: 465750 - RNA, 19 nt, Human
ccuccgugccaagcccgcc

SEQ ID NO: 465751 - RNA, 23 nt, Human
ccugaucagaguucuaaacuacc

SEQ ID NO: 465752 - RNA, 18 nt, Human
ccuugagacaaaaaccca

SEQ ID NO: 465753 - RNA, 25 nt, Human
cuaccgccuaccaaauuuuucuuug

SEQ ID NO: 465754 - RNA, 21 nt, Human
cuccacccccuuccccccacu

SEQ ID NO: 465755 - RNA, 20 nt, Human
cugaugcuacuuuacaacau

SEQ ID NO: 465756 - RNA, 26 nt, Human
cuuaagaucacccaaccuuuuuaauu

SEQ ID NO: 465757 - RNA, 19 nt, Human
cuuuauaccaaauccuuuc

SEQ ID NO: 465758 - RNA, 20 nt, Human
cuuugcauuaagcccaacuc

SEQ ID NO: 465759 - RNA, 21 nt, Human
gaaaaagaacuacaguuggua

SEQ ID NO: 465760 - RNA, 20 nt, Human
gaaaacagaaagccagaggc

SEQ ID NO: 465761 - RNA, 20 nt, Human
gaacugacgugaaugcccac

SEQ ID NO: 465762 - RNA, 19 nt, Human
gcccggggacccggagcgg

SEQ ID NO: 465763 - RNA, 18 nt, Human
gccuuaaaacaaaaaaaa

SEQ ID NO: 465764 - RNA, 21 nt, Human
ggagcggggcucacggcgggg

SEQ ID NO: 465765 - RNA, 21 nt, Human
guagaaaacagaaagccagag

SEQ ID NO: 465766 - RNA, 22 nt, Human
uaaaaaguuacaucccuuaaga

SEQ ID NO: 465767 - RNA, 24 nt, Human
uaaaacaaaaaaaaacuuggaaag

SEQ ID NO: 465768 - RNA, 22 nt, Human
uaagcccaacucaucacugauc

SEQ ID NO: 465769 - RNA, 18 nt, Human
uaaguuagaaacugcuca

SEQ ID NO: 465770 - RNA, 24 nt, Human
uaauuuauaaccaaaucucuccuc

SEQ ID NO: 465771 - RNA, 22 nt, Human
uacaaacaggaaaacauaaaca

SEQ ID NO: 465772 - RNA, 22 nt, Human
uacaacugaugcuacuuuacaa

SEQ ID NO: 465773 - RNA, 21 nt, Human
uacacacaaaaccaaaaauac

SEQ ID NO: 465774 - RNA, 20 nt, Human
uacagacaccugagaaccaa

SEQ ID NO: 465775 - RNA, 19 nt, Human
uaccacccccuccaccccc

SEQ ID NO: 465776 - RNA, 20 nt, Human
uaccacccccuccacccccu

SEQ ID NO: 465777 - RNA, 20 nt, Human
uagaaaacagaaagccagag

SEQ ID NO: 465778 - RNA, 24 nt, Human
uagaaaacagaaagccagaggcag

SEQ ID NO: 465779 - RNA, 23 nt, Human
uagcacgaagagauuuuccuuca

SEQ ID NO: 465780 - RNA, 19 nt, Human
uauaccaaauccuuucauc

SEQ ID NO: 465781 - RNA, 20 nt, Human
uauauuagauuaauggucuc

SEQ ID NO: 465782 - RNA, 26 nt, Human
uauuaccacccccuccacccccuucc

SEQ ID NO: 465783 - RNA, 25 nt, Human
ucaauguggagagaaguaugauuuc

SEQ ID NO: 465784 - RNA, 22 nt, Human
ucagaguucuaaacuaccgccu

SEQ ID NO: 465785 - RNA, 19 nt, Human
ucccaaauuacuacuauug

SEQ ID NO: 465786 - RNA, 21 nt, Human
ucuaaacuaccgccuaccaaa

SEQ ID NO: 465787 - RNA, 24 nt, Human
ugaaaaaucuaccuuuauauguga

SEQ ID NO: 465788 - RNA, 19 nt, Human
ugaaagaacagaaaaagaa

SEQ ID NO: 465789 - RNA, 24 nt, Human
ugaaagaacagaaaaagaacuaca

SEQ ID NO: 465790 - RNA, 19 nt, Human
ugaaauacauuaugaccug

SEQ ID NO: 465791 - RNA, 18 nt, Human
ugaaauguuuccauuaaa

SEQ ID NO: 465792 - RNA, 24 nt, Human
ugaagaaccagugaccaaauccug

SEQ ID NO: 465793 - RNA, 19 nt, Human
ugaaugaaaaugacacugu

SEQ ID NO: 465794 - RNA, 19 nt, Human
ugaaugcccacagggcugg

SEQ ID NO: 465795 - RNA, 18 nt, Human
ugacgugaaugcccacag

SEQ ID NO: 465796 - RNA, 18 nt, Human
ugagacaaaaacccaaac

SEQ ID NO: 465797 - RNA, 25 nt, Human
ugagacaaaaacccaaacuuuauac

SEQ ID NO: 465798 - RNA, 22 nt, Human
ugagacugauauucaauaauau

SEQ ID NO: 465799 - RNA, 21 nt, Human
ugagacuuggcuucauaugaa

SEQ ID NO: 465800 - RNA, 21 nt, Human
ugauauucaauaauauguauu

SEQ ID NO: 465801 - RNA, 19 nt, Human
ugccaagcccgcccgggga

SEQ ID NO: 465802 - RNA, 22 nt, Human
ugccaagcccgcccggggaccc

SEQ ID NO: 465803 - RNA, 21 nt, Human
ugccuuaaaacaaaaaaaaac

SEQ ID NO: 465804 - RNA, 23 nt, Human
uggaaagcaaagcucccaaacca

SEQ ID NO: 465805 - RNA, 22 nt, Human
uggcaagaauuacacagcagaa

SEQ ID NO: 465806 - RNA, 19 nt, Human
uguaguaccugaucagagu

SEQ ID NO: 465807 - RNA, 26 nt, Human
uguuaguagaaaacagaaagccagag

SEQ ID NO: 465808 - RNA, 22 nt, Human
uuacgagaauaagauugcucag

SEQ ID NO: 465809 - RNA, 22 nt, Human
uucaugcugauaagcauuuagc

SEQ ID NO: 465810 - RNA, 20 nt, Human
uucuaaacuaccgccuacca

SEQ ID NO: 465811 - RNA, 22 nt, Human
uuuaugaccacauuaauuggaa

SEQ ID NO: 465812 - RNA, 19 nt, Human
aaaaaacagcccacauuaa

SEQ ID NO: 465813 - RNA, 19 nt, Human
aaaagugacaagcccacag

SEQ ID NO: 465814 - RNA, 21 nt, Human
aaauauggugagcaugaucau

SEQ ID NO: 465815 - RNA, 19 nt, Human
acccugagggaggugaagg

SEQ ID NO: 465816 - RNA, 21 nt, Human
acuaaaaagucaacuaaacag

SEQ ID NO: 465817 - RNA, 22 nt, Human
agaagaguugagucuauggagu

SEQ ID NO: 465818 - RNA, 18 nt, Human
agaguugagucuauggag

SEQ ID NO: 465819 - RNA, 19 nt, Human
aggagaaacccagcagagg

SEQ ID NO: 465820 - RNA, 21 nt, Human
aggcauugugaacuccagaag

SEQ ID NO: 465821 - RNA, 23 nt, Human
aguaaacaaggacuuccaacuua

SEQ ID NO: 465822 - RNA, 22 nt, Human
agugacaagcccacagaaggaa

SEQ ID NO: 465823 - RNA, 24 nt, Human
cagaaggaaaggcuguauaaggaa

SEQ ID NO: 465824 - RNA, 23 nt, Human
caguuugaucauaaaaaacagcc

SEQ ID NO: 465825 - RNA, 27 nt, Human
ccaacuuauccuauaacuaaaaaguca

SEQ ID NO: 465826 - RNA, 18 nt, Human
cccugagggaggugaagg

SEQ ID NO: 465827 - RNA, 25 nt, Human
ccuaagaugacuaaaaauacggcuc

SEQ ID NO: 465828 - RNA, 23 nt, Human
cugaaaagugacaagcccacaga

SEQ ID NO: 465829 - RNA, 22 nt, Human
cugagggaggugaaggagggug

SEQ ID NO: 465830 - RNA, 18 nt, Human
cuguacccugggucuucc

SEQ ID NO: 465831 - RNA, 22 nt, Human
cuuucauuacccugagggaggu

SEQ ID NO: 465832 - RNA, 20 nt, Human
guacugaaaagugacaagcc

SEQ ID NO: 465833 - RNA, 20 nt, Human
gucaaauuucuacuuucauu

SEQ ID NO: 465834 - RNA, 21 nt, Human
uaaaaauacggcucuccuuuc

SEQ ID NO: 465835 - RNA, 27 nt, Human
uaaaauucucuuggguuuggcccaaaa

SEQ ID NO: 465836 - RNA, 20 nt, Human
uaagaugacuaaaaauacgg

SEQ ID NO: 465837 - RNA, 19 nt, Human
uaaggagaaacccagcaga

SEQ ID NO: 465838 - RNA, 20 nt, Human
ucaagaauagagguagggag

SEQ ID NO: 465839 - RNA, 21 nt, Human
ugacaagcccacagaaggaaa

SEQ ID NO: 465840 - RNA, 19 nt, Human
ugaucauaaaaaacagccc

SEQ ID NO: 465841 - RNA, 22 nt, Human
uggcagugucucuggucacaug

SEQ ID NO: 465842 - RNA, 28 nt, Human
uuaaaauucucuuggguuuggcccaaaa

SEQ ID NO: 465843 - RNA, 25 nt, Human
uuaggcuuuuuagagcuacaaugag

SEQ ID NO: 465844 - RNA, 20 nt, Human
uucauuacccugagggaggu

SEQ ID NO: 465845 - RNA, 23 nt, Human
uuuauuuugcuucacauuuaagg

SEQ ID NO: 465846 - RNA, 20 nt, Human
uuugaucauaaaaaacagcc

SEQ ID NO: 465847 - RNA, 23 nt, Human
aaagccuuuccuuggagauuuau

SEQ ID NO: 465848 - RNA, 27 nt, Human
aagcaggcuaaacaaggcagcuuggcu

SEQ ID NO: 465849 - RNA, 26 nt, Human
aagcauuaggauuauacgugugagcc

SEQ ID NO: 465850 - RNA, 18 nt, Human
aaggccagagacaaaagc

SEQ ID NO: 465851 - RNA, 23 nt, Human
accuggcaggcauguucuguggc

SEQ ID NO: 465852 - RNA, 22 nt, Human
agccccaggugaugcuccuacc

SEQ ID NO: 465853 - RNA, 19 nt, Human
auccaaguuauccaacuua

SEQ ID NO: 465854 - RNA, 22 nt, Human
augcauaacguuauuucuggaa

SEQ ID NO: 465855 - RNA, 23 nt, Human
caaaagccuuuccuuggagauuu

SEQ ID NO: 465856 - RNA, 22 nt, Human
caaagcauuaggauuauacgug

SEQ ID NO: 465857 - RNA, 24 nt, Human
caguagagacagaaucucauuaug

SEQ ID NO: 465858 - RNA, 24 nt, Human
cauuaugucauccaggcuggucuc

SEQ ID NO: 465859 - RNA, 20 nt, Human
ccaggcuggucuccaacucc

SEQ ID NO: 465860 - RNA, 24 nt, Human
cccagccccaggugaugcuccuac

SEQ ID NO: 465861 - RNA, 30 nt, Human
ccuacaauguaaagcaggcuaaacaaggcc

SEQ ID NO: 465862 - RNA, 22 nt, Human
ccucccagccccaggugaugcu

SEQ ID NO: 465863 - RNA, 27 nt, Human
gccagagacaaaagccuuuccuuggag

SEQ ID NO: 465864 - RNA, 24 nt, Human
gcuccuaccucagccucucaaagc

SEQ ID NO: 465865 - RNA, 21 nt, Human
gcuuugggauguuugagguuc

SEQ ID NO: 465866 - RNA, 24 nt, Human
ggauuauacgugugagccaucaug

SEQ ID NO: 465867 - RNA, 20 nt, Human
uaaagcaggcuaaacaaggc

SEQ ID NO: 465868 - RNA, 22 nt, Human
uaccucagccucucaaagcauu

SEQ ID NO: 465869 - RNA, 22 nt, Human
uagagacagaaucucauuaugu

SEQ ID NO: 465870 - RNA, 20 nt, Human
uagcuuugggauguuugaga

SEQ ID NO: 465871 - RNA, 22 nt, Human
uagcuuugggauguuugagguu

SEQ ID NO: 465872 - RNA, 21 nt, Human
uaggauuauacgugugagcca

SEQ ID NO: 465873 - RNA, 22 nt, Human
uaggauuauacgugugagccau

SEQ ID NO: 465874 - RNA, 24 nt, Human
uaggauuauacgugugagccauca

SEQ ID NO: 465875 - RNA, 21 nt, Human
uauccaacuuagcuuugggau

SEQ ID NO: 465876 - RNA, 23 nt, Human
uaucccaucauuuugaagcuuuu

SEQ ID NO: 465877 - RNA, 24 nt, Human
uaugucauccaggcuggucuccaa

SEQ ID NO: 465878 - RNA, 21 nt, Human
ucccagccccaggugaugcuc

SEQ ID NO: 465879 - RNA, 19 nt, Human
ucucauuaugucauccagg

SEQ ID NO: 465880 - RNA, 24 nt, Human
ucucauuaugucauccaggcuggu

SEQ ID NO: 465881 - RNA, 20 nt, Human
uggcccauucuucauccaag

SEQ ID NO: 465882 - RNA, 23 nt, Human
uggcguucuaguggcaagaauca

SEQ ID NO: 465883 - RNA, 19 nt, Human
ugugcacucguggcagaca

SEQ ID NO: 465884 - RNA, 21 nt, Human
uguggcccauucuucauccaa

SEQ ID NO: 465885 - RNA, 23 nt, Human
uuaaaaauagauaauaaugauuu

SEQ ID NO: 465886 - RNA, 18 nt, Human
uucucacuuugcuccucu

SEQ ID NO: 465887 - RNA, 20 nt, Human
uugaagcuuuuaaaaauaga

SEQ ID NO: 465888 - RNA, 21 nt, Human
aaaucagaagauggcucagag

SEQ ID NO: 465889 - RNA, 20 nt, Human
aaauggaaagauauuacaga

SEQ ID NO: 465890 - RNA, 20 nt, Human
gagucucaauuuccagaaau

SEQ ID NO: 465891 - RNA, 25 nt, Human
guucaaucaaauugaagaauugauc

SEQ ID NO: 465892 - RNA, 24 nt, Human
uaaauauacacacauuuauaaccu

SEQ ID NO: 465893 - RNA, 21 nt, Human
uagagcaaugaaaaaucagaa

SEQ ID NO: 465894 - RNA, 24 nt, Human
uauaaccugcauuuauuuucuaaa

SEQ ID NO: 465895 - RNA, 21 nt, Human
ucaccaaagucagugagaaga

SEQ ID NO: 465896 - RNA, 24 nt, Human
uuccagagacuaaaauuuaauacc

SEQ ID NO: 465897 - RNA, 20 nt, Human
uucuagguuucaaaaucacc

SEQ ID NO: 465898 - RNA, 18 nt, Human
uugaaaaggcugaacagu

SEQ ID NO: 465899 - RNA, 19 nt, Human
uugaaaaggcugaacaguu

SEQ ID NO: 465900 - RNA, 18 nt, Human
uuuccauuacagacuaga

SEQ ID NO: 465901 - RNA, 22 nt, Human
aaggcaaaacgaacaaaagcaa

SEQ ID NO: 465902 - RNA, 21 nt, Human
aaugguacggaaauauggagg

SEQ ID NO: 465903 - RNA, 20 nt, Human
acaaaagcaaaaucugaagc

SEQ ID NO: 465904 - RNA, 19 nt, Human
acacagauaaguaaaaucc

SEQ ID NO: 465905 - RNA, 19 nt, Human
agaaggcaaaacgaacaaa

SEQ ID NO: 465906 - RNA, 23 nt, Human
aguggagaugggguuucaucaug

SEQ ID NO: 465907 - RNA, 19 nt, Human
augggguuucaucauguug

SEQ ID NO: 465908 - RNA, 21 nt, Human
caaaagcaaaaucugaagcag

SEQ ID NO: 465909 - RNA, 21 nt, Human
cagaaaguucuuaagagaucu

SEQ ID NO: 465910 - RNA, 23 nt, Human
caguggagaugggguuucaucau

SEQ ID NO: 465911 - RNA, 24 nt, Human
caguggagaugggguuucaucaug

SEQ ID NO: 465912 - RNA, 25 nt, Human
caucauguugcccaggcuaguuuuc

SEQ ID NO: 465913 - RNA, 18 nt, Human
cauguugcccaggcuagu

SEQ ID NO: 465914 - RNA, 18 nt, Human
cauguugcccaggcuagu

SEQ ID NO: 465915 - RNA, 21 nt, Human
ccaguacaggcugggccaaau

SEQ ID NO: 465916 - RNA, 22 nt, Human
gaacaaaagcaaaaucugaagc

SEQ ID NO: 465917 - RNA, 19 nt, Human
gaaggaaaaguaauggcaa

SEQ ID NO: 465918 - RNA, 18 nt, Human
gagaugggguuucaucau

SEQ ID NO: 465919 - RNA, 22 nt, Human
gagaugggguuucaucauguug

SEQ ID NO: 465920 - RNA, 23 nt, Human
gagaugggguuucaucauguugc

SEQ ID NO: 465921 - RNA, 22 nt, Human
gaugggguuucaucauguugcc

SEQ ID NO: 465922 - RNA, 23 nt, Human
gauguuggagagagugggaagga

SEQ ID NO: 465923 - RNA, 20 nt, Human
gcaguggagaugggguuuca

SEQ ID NO: 465924 - RNA, 24 nt, Human
gcaguggagaugggguuucaucau

SEQ ID NO: 465925 - RNA, 24 nt, Human
ggacagaaggcaaaacgaacaaaa

SEQ ID NO: 465926 - RNA, 19 nt, Human
ggcaaaacgaacaaaagca

SEQ ID NO: 465927 - RNA, 21 nt, Human
ggcaaaacgaacaaaagcaaa

SEQ ID NO: 465928 - RNA, 22 nt, Human
gggguuucaucauguugcccag

SEQ ID NO: 465929 - RNA, 23 nt, Human
gggguuucaucauguugcccagg

SEQ ID NO: 465930 - RNA, 21 nt, Human
guggagaugggguuucaucau

SEQ ID NO: 465931 - RNA, 21 nt, Human
guuagaucaggcuuaaauuga

SEQ ID NO: 465932 - RNA, 19 nt, Human
guuccaaggacagaaggca

SEQ ID NO: 465933 - RNA, 21 nt, Human
uaaagugaaugugauguugga

SEQ ID NO: 465934 - RNA, 22 nt, Human
uaagaagcagaugucuauacaa

SEQ ID NO: 465935 - RNA, 19 nt, Human
uaaguaaaauccacgcugu

SEQ ID NO: 465936 - RNA, 23 nt, Human
uaccaggcacugugcuaagcucu

SEQ ID NO: 465937 - RNA, 22 nt, Human
uagaagaauaaauuagagaaua

SEQ ID NO: 465938 - RNA, 19 nt, Human
uauagaagaauaaauuaga

SEQ ID NO: 465939 - RNA, 23 nt, Human
uaucuuagcccaccgcuucucag

SEQ ID NO: 465940 - RNA, 20 nt, Human
uccaaggacagaaggcaaaa

SEQ ID NO: 465941 - RNA, 21 nt, Human
ugauguuggagagagugggaa

SEQ ID NO: 465942 - RNA, 24 nt, Human
ugggguuucaucauguugcccagg

SEQ ID NO: 465943 - RNA, 18 nt, Human
ugucacagaaacugaauu

SEQ ID NO: 465944 - RNA, 21 nt, Human
ugugauguuggagagaguggg

SEQ ID NO: 465945 - RNA, 21 nt, Human
uugaggauuaacuguucuguc

SEQ ID NO: 465946 - RNA, 19 nt, Human
uugucacuuccauuguucu

SEQ ID NO: 465947 - RNA, 25 nt, Human
uuuccaagcaguugcgcagaugauu

SEQ ID NO: 465948 - RNA, 23 nt, Human
aaaaagcugcucucuccagaggg

SEQ ID NO: 465949 - RNA, 19 nt, Human
aaagugcugggauuccagg

SEQ ID NO: 465950 - RNA, 24 nt, Human
aaagugcugggauuccaggcguga

SEQ ID NO: 465951 - RNA, 19 nt, Human
aagugcugggauuccaggc

SEQ ID NO: 465952 - RNA, 18 nt, Human
acgggguuucaccguguu

SEQ ID NO: 465953 - RNA, 19 nt, Human
acgggguuucaccguguua

SEQ ID NO: 465954 - RNA, 20 nt, Human
acgggguuucaccguguuag

SEQ ID NO: 465955 - RNA, 24 nt, Human
acgggguuucaccguguuagccag

SEQ ID NO: 465956 - RNA, 19 nt, Human
acucuguugcccaggcugg

SEQ ID NO: 465957 - RNA, 20 nt, Human
acucuguugcccaggcugga

SEQ ID NO: 465958 - RNA, 21 nt, Human
acucuguugcccaggcuggag

SEQ ID NO: 465959 - RNA, 25 nt, Human
acucuguugcccaggcuggagagca

SEQ ID NO: 465960 - RNA, 19 nt, Human
agagacgggguuucaccgu

SEQ ID NO: 465961 - RNA, 20 nt, Human
aguagagacgggguuucacc

SEQ ID NO: 465962 - RNA, 21 nt, Human
aguagagacgggguuucaccg

SEQ ID NO: 465963 - RNA, 18 nt, Human
aguagcugggacuacagg

SEQ ID NO: 465964 - RNA, 24 nt, Human
agugauucuccugccucagccucc

SEQ ID NO: 465965 - RNA, 20 nt, Human
auaaaaagcugcucucucca

SEQ ID NO: 465966 - RNA, 24 nt, Human
augaucugcccaccucggcuuccc

SEQ ID NO: 465967 - RNA, 24 nt, Human
caaagugcugggauuccaggcgug

SEQ ID NO: 465968 - RNA, 23 nt, Human
caaccuccaccucccggguucaa

SEQ ID NO: 465969 - RNA, 20 nt, Human
caagugauucuccugccuca

SEQ ID NO: 465970 - RNA, 22 nt, Human
caagugauucuccugccucagc

SEQ ID NO: 465971 - RNA, 19 nt, Human
caccgcgcccggcccacag

SEQ ID NO: 465972 - RNA, 18 nt, Human
caccguguuagccaggau

SEQ ID NO: 465973 - RNA, 24 nt, Human
caccguguuagccaggauggucuu

SEQ ID NO: 465974 - RNA, 24 nt, Human
caccucggcuucccaaagugcugg

SEQ ID NO: 465975 - RNA, 24 nt, Human
cagaguuuuacucuguugcccagg

SEQ ID NO: 465976 - RNA, 20 nt, Human
cagcaguccugaugguccag

SEQ ID NO: 465977 - RNA, 20 nt, Human
cagccuccugaguagcuggg

SEQ ID NO: 465978 - RNA, 21 nt, Human
caggcgugagccaccgcgccc

SEQ ID NO: 465979 - RNA, 21 nt, Human
cagugcccaucauguucccug

SEQ ID NO: 465980 - RNA, 21 nt, Human
cagugguccaaucucaacuca

SEQ ID NO: 465981 - RNA, 22 nt, Human
ccaaagugcugggauuccaggc

SEQ ID NO: 465982 - RNA, 24 nt, Human
ccaaagugcugggauuccaggcgu

SEQ ID NO: 465983 - RNA, 19 nt, Human
ccaccgcgcccggcccaca

SEQ ID NO: 465984 - RNA, 24 nt, Human
ccaccucccggguucaagugauuc

SEQ ID NO: 465985 - RNA, 20 nt, Human
cccagaagcuuccaggagac

SEQ ID NO: 465986 - RNA, 23 nt, Human
cccggguucaagugauucuccuc

SEQ ID NO: 465987 - RNA, 23 nt, Human
cccggguucaagugauucuccug

SEQ ID NO: 465988 - RNA, 24 nt, Human
ccucccggguucaagugauucucc

SEQ ID NO: 465989 - RNA, 23 nt, Human
ccugaguagcugggacuacaggc

SEQ ID NO: 465990 - RNA, 24 nt, Human
ccugaguagcugggacuacaggca

SEQ ID NO: 465991 - RNA, 24 nt, Human
ccugccucagccuccugaguagcu

SEQ ID NO: 465992 - RNA, 18 nt, Human
cggcaaccuccaccuccc

SEQ ID NO: 465993 - RNA, 24 nt, Human
cgggguuucaccguguuagccagg

SEQ ID NO: 465994 - RNA, 22 nt, Human
cucacggcaaccuccaccuccc

SEQ ID NO: 465995 - RNA, 24 nt, Human
cucacggcaaccuccaccucccgg

SEQ ID NO: 465996 - RNA, 24 nt, Human
cucagccuccugaguagcugggac

SEQ ID NO: 465997 - RNA, 20 nt, Human
cucccggguucaagugauuc

SEQ ID NO: 465998 - RNA, 20 nt, Human
cuccugaccuuaugaucugc

SEQ ID NO: 465999 - RNA, 22 nt, Human
cuccugccucagccuccugagu

SEQ ID NO: 466000 - RNA, 22 nt, Human
gaccuuaugaucugcccaccuc

SEQ ID NO: 466001 - RNA, 22 nt, Human
gaccuuaugaucugcccaccuc

SEQ ID NO: 466002 - RNA, 24 nt, Human
gaccuuaugaucugcccaccucgg

SEQ ID NO: 466003 - RNA, 24 nt, Human
gacuacaggcacaugccacuaugc

SEQ ID NO: 466004 - RNA, 24 nt, Human
gagacgggguuucaccguguuagc

SEQ ID NO: 466005 - RNA, 20 nt, Human
gaguagcugggacuacaggc

SEQ ID NO: 466006 - RNA, 25 nt, Human
gaguagcugggacuacaggcacaug

SEQ ID NO: 466007 - RNA, 18 nt, Human
gauuccaggcgugagcca

SEQ ID NO: 466008 - RNA, 21 nt, Human
gauuccaggcgugagccaccg

SEQ ID NO: 466009 - RNA, 22 nt, Human
gauuccaggcgugagccaccgc

SEQ ID NO: 466010 - RNA, 22 nt, Human
gcaaccuccaccucccggguuc

SEQ ID NO: 466011 - RNA, 20 nt, Human
gccucagccuccugaguagc

SEQ ID NO: 466012 - RNA, 23 nt, Human
ggcagcaguccugaugguccagu

SEQ ID NO: 466013 - RNA, 23 nt, Human
gggguuucaccguguuagccagg

SEQ ID NO: 466014 - RNA, 22 nt, Human
ggguucaagugauucuccugcc

SEQ ID NO: 466015 - RNA, 23 nt, Human
ggguucaagugauucuccugccu

SEQ ID NO: 466016 - RNA, 19 nt, Human
ggucuuaaucuccugaccu

SEQ ID NO: 466017 - RNA, 23 nt, Human
guagagacgggguuucaccgugu

SEQ ID NO: 466018 - RNA, 20 nt, Human
guccagugagacccagaagc

SEQ ID NO: 466019 - RNA, 24 nt, Human
gugauucuccugccucagccuccu

SEQ ID NO: 466020 - RNA, 24 nt, Human
guuuuacucuguugcccaggcugg

SEQ ID NO: 466021 - RNA, 24 nt, Human
uacaggcacaugccacuaugccca

SEQ ID NO: 466022 - RNA, 21 nt, Human
uaguagagacgggguuucacc

SEQ ID NO: 466023 - RNA, 24 nt, Human
uaguagagacgggguuucaccgug

SEQ ID NO: 466024 - RNA, 26 nt, Human
uaguagagacgggguuucaccguguu

SEQ ID NO: 466025 - RNA, 19 nt, Human
ucaagugauucuccugccu

SEQ ID NO: 466026 - RNA, 24 nt, Human
ucaccguguuagccaggauggucu

SEQ ID NO: 466027 - RNA, 24 nt, Human
ucacggcaaccuccaccucccggg

SEQ ID NO: 466028 - RNA, 23 nt, Human
ucagccuccugaguagcugggac

SEQ ID NO: 466029 - RNA, 21 nt, Human
ucagugcccaucauguucccu

SEQ ID NO: 466030 - RNA, 20 nt, Human
uccaggagaccuucaguccc

SEQ ID NO: 466031 - RNA, 19 nt, Human
uccaggcgugagccaccgc

SEQ ID NO: 466032 - RNA, 24 nt, Human
ucccaaagugcugggauuccaggc

SEQ ID NO: 466033 - RNA, 21 nt, Human
ucccggguucaagugauucuc

SEQ ID NO: 466034 - RNA, 24 nt, Human
ucccggguucaagugauucuccug

SEQ ID NO: 466035 - RNA, 24 nt, Human
uccugaguagcugggacuacaggc

SEQ ID NO: 466036 - RNA, 20 nt, Human
ugagacccagaagcuuccag

SEQ ID NO: 466037 - RNA, 23 nt, Human
ugaucugcccaccucggcuuccc

SEQ ID NO: 466038 - RNA, 24 nt, Human
ugaucugcccaccucggcuuccca

SEQ ID NO: 466039 - RNA, 20 nt, Human
ugauucuccugccucagccu

SEQ ID NO: 466040 - RNA, 24 nt, Human
ugccucagccuccugaguagcugg

SEQ ID NO: 466041 - RNA, 21 nt, Human
ugggacuacaggcacaugcca

SEQ ID NO: 466042 - RNA, 22 nt, Human
ugggacuacaggcacaugccac

SEQ ID NO: 466043 - RNA, 22 nt, Human
ugggacuacaggcacaugccac

SEQ ID NO: 466044 - RNA, 22 nt, Human
ugggacuacaggcacaugccac

SEQ ID NO: 466045 - RNA, 24 nt, Human
ugggacuacaggcacaugccacua

SEQ ID NO: 466046 - RNA, 26 nt, Human
ugggacuacaggcacaugccacuaug

SEQ ID NO: 466047 - RNA, 18 nt, Human
ugggauuccaggcgugag

SEQ ID NO: 466048 - RNA, 19 nt, Human
ugggauuccaggcgugagc

SEQ ID NO: 466049 - RNA, 23 nt, Human
ugggauuccaggcgugagccacc

SEQ ID NO: 466050 - RNA, 24 nt, Human
ugggauuccaggcgugagccaccg

SEQ ID NO: 466051 - RNA, 20 nt, Human
uuacucuguugcccaggcug

SEQ ID NO: 466052 - RNA, 21 nt, Human
uuacucuguugcccaggcugg

SEQ ID NO: 466053 - RNA, 22 nt, Human
uuacucuguugcccaggcugga

SEQ ID NO: 466054 - RNA, 18 nt, Human
uuaguagagacgggguuu

SEQ ID NO: 466055 - RNA, 22 nt, Human
uuaguagagacgggguuucacc

SEQ ID NO: 466056 - RNA, 24 nt, Human
uuaguagagacgggguuucaccgu

SEQ ID NO: 466057 - RNA, 21 nt, Human
uucaagugauucuccugccuc

SEQ ID NO: 466058 - RNA, 23 nt, Human
uucaagugauucuccugccucag

SEQ ID NO: 466059 - RNA, 24 nt, Human
uucaagugauucuccugccucagc

SEQ ID NO: 466060 - RNA, 18 nt, Human
uugcccaggcuggagagc

SEQ ID NO: 466061 - RNA, 19 nt, Human
uuucaccguguuagccagg

SEQ ID NO: 466062 - RNA, 22 nt, Human
uuuuacucuguugcccaggcug

SEQ ID NO: 466063 - RNA, 24 nt, Human
uuuuacucuguugcccaggcugga

SEQ ID NO: 466064 - RNA, 24 nt, Human
uuuuuaguagagacgggguuucac

SEQ ID NO: 466065 - RNA, 24 nt, Human
uuuuuucuauuuuuaguagagacg

SEQ ID NO: 466066 - RNA, 24 nt, Human
aaaaaaagaaaaaagguucccuga

SEQ ID NO: 466067 - RNA, 21 nt, Human
aaacacacuccugcccugcug

SEQ ID NO: 466068 - RNA, 19 nt, Human
aaacagccacucauguccu

SEQ ID NO: 466069 - RNA, 19 nt, Human
aaaggauuuggcugaaggc

SEQ ID NO: 466070 - RNA, 19 nt, Human
aaagugcuaggauuacagg

SEQ ID NO: 466071 - RNA, 24 nt, Human
aaagugcuaggauuacaggcauga

SEQ ID NO: 466072 - RNA, 23 nt, Human
aaauguccacugugcaccgagcc

SEQ ID NO: 466073 - RNA, 20 nt, Human
aacauagcaagacccugucu

SEQ ID NO: 466074 - RNA, 20 nt, Human
aagauugcuugggcccagga

SEQ ID NO: 466075 - RNA, 18 nt, Human
aagcuucgggaaaggauu

SEQ ID NO: 466076 - RNA, 24 nt, Human
accaacauagcaagacccugucuc

SEQ ID NO: 466077 - RNA, 18 nt, Human
accauguuggccaggcug

SEQ ID NO: 466078 - RNA, 20 nt, Human
acccagagaauuccccuuca

SEQ ID NO: 466079 - RNA, 19 nt, Human
accccaaagccacacagcg

SEQ ID NO: 466080 - RNA, 19 nt, Human
accccugaugcaagccccc

SEQ ID NO: 466081 - RNA, 22 nt, Human
acccuguggcacacagccccuc

SEQ ID NO: 466082 - RNA, 18 nt, Human
acgggguuucaccauguu

SEQ ID NO: 466083 - RNA, 23 nt, Human
acgggguuucaccauguuggcca

SEQ ID NO: 466084 - RNA, 24 nt, Human
acgggguuucaccauguuggccag

SEQ ID NO: 466085 - RNA, 25 nt, Human
acugcacuuacuggaaccagacauc

SEQ ID NO: 466086 - RNA, 23 nt, Human
agaacucagaggguuacaacccc

SEQ ID NO: 466087 - RNA, 20 nt, Human
agacauguugagagcucagu

SEQ ID NO: 466088 - RNA, 21 nt, Human
agaccaagccagacgacauca

SEQ ID NO: 466089 - RNA, 21 nt, Human
agaccagugaggcucaaacug

SEQ ID NO: 466090 - RNA, 22 nt, Human
agaccuccaugcagaggagggg

SEQ ID NO: 466091 - RNA, 21 nt, Human
agagaccuccaugcagaggag

SEQ ID NO: 466092 - RNA, 21 nt, Human
agagagagggacuggccaccc

SEQ ID NO: 466093 - RNA, 21 nt, Human
agagcacagccacaaauggaa

SEQ ID NO: 466094 - RNA, 22 nt, Human
agagcaggagagagcuauaaug

SEQ ID NO: 466095 - RNA, 20 nt, Human
agaggcccaggccccaggac

SEQ ID NO: 466096 - RNA, 25 nt, Human
agaggugggaagauugcuugggccc

SEQ ID NO: 466097 - RNA, 18 nt, Human
agcaagagagaagcagag

SEQ ID NO: 466098 - RNA, 24 nt, Human
agcacuuuaggaggcagagguggg

SEQ ID NO: 466099 - RNA, 18 nt, Human
agcagggugggcucaggg

SEQ ID NO: 466100 - RNA, 22 nt, Human
agcccaugaggaaucuucccac

SEQ ID NO: 466101 - RNA, 22 nt, Human
agcccguggccaccuugccugu

SEQ ID NO: 466102 - RNA, 18 nt, Human
agccuccugaauagcugg

SEQ ID NO: 466103 - RNA, 19 nt, Human
agcugggaggccuggccca

SEQ ID NO: 466104 - RNA, 22 nt, Human
aggacacaucaaacacacuccu

SEQ ID NO: 466105 - RNA, 21 nt, Human
aggaccugcccuaaccuuucu

SEQ ID NO: 466106 - RNA, 21 nt, Human
aggagaucuggccuccagucc

SEQ ID NO: 466107 - RNA, 21 nt, Human
aggagcaagagagaagcagag

SEQ ID NO: 466108 - RNA, 23 nt, Human
aggaguucaagacuagccugacc

SEQ ID NO: 466109 - RNA, 21 nt, Human
aggcagaggugggaagauugc

SEQ ID NO: 466110 - RNA, 23 nt, Human
aggcagaggugggaagauugcuu

SEQ ID NO: 466111 - RNA, 24 nt, Human
aggcagaggugggaagauugcuug

SEQ ID NO: 466112 - RNA, 19 nt, Human
aggcagggcuacggaagag

SEQ ID NO: 466113 - RNA, 21 nt, Human
aggcaugcaccaccacgccag

SEQ ID NO: 466114 - RNA, 18 nt, Human
agggggugugggggccau

SEQ ID NO: 466115 - RNA, 21 nt, Human
aguaggaggugaugaggaggg

SEQ ID NO: 466116 - RNA, 23 nt, Human
aucaguggcccucaugugcccaa

SEQ ID NO: 466117 - RNA, 19 nt, Human
augugggugggaaagucac

SEQ ID NO: 466118 - RNA, 24 nt, Human
auugcuugggcccaggaguucaag

SEQ ID NO: 466119 - RNA, 24 nt, Human
auuuuaguagagacgggguuucac

SEQ ID NO: 466120 - RNA, 20 nt, Human
caaauguccacugugcaccg

SEQ ID NO: 466121 - RNA, 24 nt, Human
caacaccacagcagaccgggacuc

SEQ ID NO: 466122 - RNA, 24 nt, Human
caacauagcaagacccugucucua

SEQ ID NO: 466123 - RNA, 27 nt, Human
caagucccggugacuuuaccuccccua

SEQ ID NO: 466124 - RNA, 20 nt, Human
caccacaucagcucccagua

SEQ ID NO: 466125 - RNA, 24 nt, Human
caccacgccaggcuaauuuuugua

SEQ ID NO: 466126 - RNA, 20 nt, Human
caccaggcucaucuccaaga

SEQ ID NO: 466127 - RNA, 21 nt, Human
caccauguuggccaggcuggu

SEQ ID NO: 466128 - RNA, 24 nt, Human
caccauguuggccaggcugguuuc

SEQ ID NO: 466129 - RNA, 31 nt, Human
caccauguuggccaggcugguuucaaacucc

SEQ ID NO: 466130 - RNA, 21 nt, Human
caccccaaagccacacagcgg

SEQ ID NO: 466131 - RNA, 18 nt, Human
caccccucuccuacucuc

SEQ ID NO: 466132 - RNA, 22 nt, Human
caccccucuccuacucucagcc

SEQ ID NO: 466133 - RNA, 21 nt, Human
cacugcaaccuccgccuccca

SEQ ID NO: 466134 - RNA, 20 nt, Human
cacugggggaaacacaaagg

SEQ ID NO: 466135 - RNA, 22 nt, Human
cacugggugugguguggaggac

SEQ ID NO: 466136 - RNA, 21 nt, Human
cacugucaccaccuuguuucu

SEQ ID NO: 466137 - RNA, 23 nt, Human
cacugugcaccgagcccugaggc

SEQ ID NO: 466138 - RNA, 20 nt, Human
cagaggcccaggccccagga

SEQ ID NO: 466139 - RNA, 18 nt, Human
cagcacuuuaggaggcag

SEQ ID NO: 466140 - RNA, 24 nt, Human
cagcacuuuaggaggcagaggugg

SEQ ID NO: 466141 - RNA, 20 nt, Human
cagccacccaccucacucua

SEQ ID NO: 466142 - RNA, 19 nt, Human
cagccccucugcagcgccc

SEQ ID NO: 466143 - RNA, 19 nt, Human
cagccccucugcagcgccc

SEQ ID NO: 466144 - RNA, 18 nt, Human
cagcccguggccaccuug

SEQ ID NO: 466145 - RNA, 24 nt, Human
caggacacaucaaacacacuccug

SEQ ID NO: 466146 - RNA, 25 nt, Human
cagggcgguucccaggacacaucaa

SEQ ID NO: 466147 - RNA, 24 nt, Human
cauagcaagacccugucucuaaaa

SEQ ID NO: 466148 - RNA, 27 nt, Human
cauagcaagacccugucucuaaaaaaa

SEQ ID NO: 466149 - RNA, 18 nt, Human
caucuuguuaaucccucc

SEQ ID NO: 466150 - RNA, 20 nt, Human
caugcaccaccacgccaggc

SEQ ID NO: 466151 - RNA, 23 nt, Human
cauguuggccaggcugguuucaa

SEQ ID NO: 466152 - RNA, 19 nt, Human
cauuucuaccacagaaaca

SEQ ID NO: 466153 - RNA, 19 nt, Human
ccaaagugcuaggauuaca

SEQ ID NO: 466154 - RNA, 24 nt, Human
ccaaagugcuaggauuacaggcau

SEQ ID NO: 466155 - RNA, 24 nt, Human
ccaaggggaggauaugaguagaag

SEQ ID NO: 466156 - RNA, 21 nt, Human
ccacaaauggaaagaccaagc

SEQ ID NO: 466157 - RNA, 19 nt, Human
ccaccugccccagacccag

SEQ ID NO: 466158 - RNA, 22 nt, Human
ccacuccuguccccugcaagcc

SEQ ID NO: 466159 - RNA, 22 nt, Human
ccacugucaccaccuuguuucu

SEQ ID NO: 466160 - RNA, 19 nt, Human
ccaggccucugccugugcu

SEQ ID NO: 466161 - RNA, 18 nt, Human
cccaaauguccacugugc

SEQ ID NO: 466162 - RNA, 20 nt, Human
cccaagcccugagcacgcca

SEQ ID NO: 466163 - RNA, 23 nt, Human
cccaccaggucucuccuucccca

SEQ ID NO: 466164 - RNA, 18 nt, Human
cccagagaauuccccuuc

SEQ ID NO: 466165 - RNA, 23 nt, Human
cccagccccaaccccucugcauc

SEQ ID NO: 466166 - RNA, 19 nt, Human
ccccaaauguccacugugc

SEQ ID NO: 466167 - RNA, 19 nt, Human
ccccaaccccucugcaucc

SEQ ID NO: 466168 - RNA, 22 nt, Human
ccccaaccccucugcauccucc

SEQ ID NO: 466169 - RNA, 23 nt, Human
ccccagccccaccugccccagac

SEQ ID NO: 466170 - RNA, 19 nt, Human
cccccgaccuccccuuaca

SEQ ID NO: 466171 - RNA, 26 nt, Human
cccccgaccuccccuuacaaagcccc

SEQ ID NO: 466172 - RNA, 19 nt, Human
cccccucuccccugcauuc

SEQ ID NO: 466173 - RNA, 24 nt, Human
cccccugcccuucugccacacaaa

SEQ ID NO: 466174 - RNA, 25 nt, Human
ccccucugcagcgcccuggcuucug

SEQ ID NO: 466175 - RNA, 19 nt, Human
ccccuuucccccuuggccc

SEQ ID NO: 466176 - RNA, 22 nt, Human
cccuaaguccuuccucuccaag

SEQ ID NO: 466177 - RNA, 22 nt, Human
cccuacacuccuuaaacucucc

SEQ ID NO: 466178 - RNA, 24 nt, Human
cccuccugcccacagacagcucac

SEQ ID NO: 466179 - RNA, 23 nt, Human
cccugagcacgccacugucacca

SEQ ID NO: 466180 - RNA, 21 nt, Human
cccugcucccacuccuguccc

SEQ ID NO: 466181 - RNA, 18 nt, Human
cccuguuccaggcuaccc

SEQ ID NO: 466182 - RNA, 24 nt, Human
ccgccucagccucccaaagugcua

SEQ ID NO: 466183 - RNA, 21 nt, Human
ccucagaggucucuccucaga

SEQ ID NO: 466184 - RNA, 21 nt, Human
ccuccaggaccugcccuaacc

SEQ ID NO: 466185 - RNA, 22 nt, Human
ccucccagguucaagcgauucu

SEQ ID NO: 466186 - RNA, 24 nt, Human
ccucccaucacucccugcauccag

SEQ ID NO: 466187 - RNA, 26 nt, Human
ccucccaucacucccugcauccagcc

SEQ ID NO: 466188 - RNA, 18 nt, Human
ccucuuggcuuggggugu

SEQ ID NO: 466189 - RNA, 24 nt, Human
ccugaauagcugggacugcaggca

SEQ ID NO: 466190 - RNA, 22 nt, Human
ccugaccaacauagcaagaccc

SEQ ID NO: 466191 - RNA, 24 nt, Human
ccugaccaacauagcaagacccug

SEQ ID NO: 466192 - RNA, 18 nt, Human
ccugcaggcaccuucugg

SEQ ID NO: 466193 - RNA, 21 nt, Human
ccugcccagcucccucugccc

SEQ ID NO: 466194 - RNA, 25 nt, Human
ccuggcccaccuucugguccccugg

SEQ ID NO: 466195 - RNA, 19 nt, Human
ccuuccuguccucuuuggu

SEQ ID NO: 466196 - RNA, 18 nt, Human
cgcccucuuggcuugggg

SEQ ID NO: 466197 - RNA, 24 nt, Human
cgccucagccucccaaagugcuag

SEQ ID NO: 466198 - RNA, 27 nt, Human
cgcucugucgcccaggcuaaggcugga

SEQ ID NO: 466199 - RNA, 18 nt, Human
cggacugccaccaucucc

SEQ ID NO: 466200 - RNA, 24 nt, Human
cgggguuucaccauguuggccagg

SEQ ID NO: 466201 - RNA, 20 nt, Human
cuaggcacauuucaugugcu

SEQ ID NO: 466202 - RNA, 27 nt, Human
cuaggcucagguggggccccaggagcc

SEQ ID NO: 466203 - RNA, 24 nt, Human
cucacugcaaccuccgccucccag

SEQ ID NO: 466204 - RNA, 22 nt, Human
cucagaggguuacaacccccau

SEQ ID NO: 466205 - RNA, 22 nt, Human
cucagaguagauaacaagaagu

SEQ ID NO: 466206 - RNA, 19 nt, Human
cuccauucugguguccucu

SEQ ID NO: 466207 - RNA, 18 nt, Human
cuccccuuacaaagcccc

SEQ ID NO: 466208 - RNA, 20 nt, Human
cucccucugcccuaacggcc

SEQ ID NO: 466209 - RNA, 24 nt, Human
cuccugaauagcugggacugcagg

SEQ ID NO: 466210 - RNA, 26 nt, Human
cuccugaccucaagcuauccgcccgc

SEQ ID NO: 466211 - RNA, 20 nt, Human
cucugccugugcugcuccuc

SEQ ID NO: 466212 - RNA, 19 nt, Human
cugaaaacaaucaguuucc

SEQ ID NO: 466213 - RNA, 23 nt, Human
cugcaaccuccgccucccagguu

SEQ ID NO: 466214 - RNA, 24 nt, Human
cugcaaccuccgccucccagguuc

SEQ ID NO: 466215 - RNA, 24 nt, Human
cugcagcgcccuggcuucugagcc

SEQ ID NO: 466216 - RNA, 23 nt, Human
cugcuguccugguacacauuguc

SEQ ID NO: 466217 - RNA, 24 nt, Human
cuuccccagccccaccugccccag

SEQ ID NO: 466218 - RNA, 19 nt, Human
cuugggcccaggaguucaa

SEQ ID NO: 466219 - RNA, 25 nt, Human
cuuguuucuggccaucucagccucu

SEQ ID NO: 466220 - RNA, 21 nt, Human
cuuugguaggcgggcaucugu

SEQ ID NO: 466221 - RNA, 21 nt, Human
gacaggcuucccccgaccucc

SEQ ID NO: 466222 - RNA, 24 nt, Human
gaccucaagcuauccgcccgccuc

SEQ ID NO: 466223 - RNA, 21 nt, Human
gacuccucaggaggacucuag

SEQ ID NO: 466224 - RNA, 23 nt, Human
gagaauuccccuucagcuugguc

SEQ ID NO: 466225 - RNA, 24 nt, Human
gagacgggguuucaccauguuggc

SEQ ID NO: 466226 - RNA, 20 nt, Human
gagagagagggacuggccac

SEQ ID NO: 466227 - RNA, 22 nt, Human
gagagcacagccacaaauggaa

SEQ ID NO: 466228 - RNA, 22 nt, Human
gagcaagagagaagcagaggcc

SEQ ID NO: 466229 - RNA, 19 nt, Human
gaggauugauuagcaaugu

SEQ ID NO: 466230 - RNA, 25 nt, Human
gaugucauaggagagagcacagcca

SEQ ID NO: 466231 - RNA, 18 nt, Human
gauuacaggcaugagcca

SEQ ID NO: 466232 - RNA, 22 nt, Human
gauuacaggcaugagccacugc

SEQ ID NO: 466233 - RNA, 22 nt, Human
gauuacaggcaugagccacugc

SEQ ID NO: 466234 - RNA, 22 nt, Human
gcaaccuccgccucccagguuc

SEQ ID NO: 466235 - RNA, 18 nt, Human
gcacuccagccacacgac

SEQ ID NO: 466236 - RNA, 21 nt, Human
gcacugggggaaacacaaagg

SEQ ID NO: 466237 - RNA, 23 nt, Human
gcagcacuccagccacacgacgg

SEQ ID NO: 466238 - RNA, 21 nt, Human
gccagcacugggggaaacaca

SEQ ID NO: 466239 - RNA, 23 nt, Human
gccaucucagccucuaggcugcc

SEQ ID NO: 466240 - RNA, 23 nt, Human
gcccacagacagcucacccucac

SEQ ID NO: 466241 - RNA, 22 nt, Human
gcccaggaguucaagacuagcc

SEQ ID NO: 466242 - RNA, 23 nt, Human
gccccgacuccucaggaggacuc

SEQ ID NO: 466243 - RNA, 20 nt, Human
gccccuuucccccuuggccc

SEQ ID NO: 466244 - RNA, 18 nt, Human
gcccuggcuucugagccu

SEQ ID NO: 466245 - RNA, 18 nt, Human
gcccuggcuucugagccu

SEQ ID NO: 466246 - RNA, 21 nt, Human
gcccuggcuucugagccuuug

SEQ ID NO: 466247 - RNA, 24 nt, Human
gcuauccgcccgccucagccuccc

SEQ ID NO: 466248 - RNA, 25 nt, Human
gcuuguauuuccugccuuagaacag

SEQ ID NO: 466249 - RNA, 21 nt, Human
ggacacaucaaacacacuccu

SEQ ID NO: 466250 - RNA, 24 nt, Human
ggacucugguugaaaccaagggga

SEQ ID NO: 466251 - RNA, 22 nt, Human
ggagguuuugcaaaagcuucgg

SEQ ID NO: 466252 - RNA, 22 nt, Human
ggauuacaggcaugagccacug

SEQ ID NO: 466253 - RNA, 24 nt, Human
ggcugguuucaaacuccugaccuc

SEQ ID NO: 466254 - RNA, 21 nt, Human
gggaagguaucuaaggucaca

SEQ ID NO: 466255 - RNA, 19 nt, Human
gggcaagccccgacuccuc

SEQ ID NO: 466256 - RNA, 20 nt, Human
gggcucagggcaagccccga

SEQ ID NO: 466257 - RNA, 18 nt, Human
ggggccaugggagcuggg

SEQ ID NO: 466258 - RNA, 23 nt, Human
gggguuucaccauguuggccagg

SEQ ID NO: 466259 - RNA, 21 nt, Human
ggucucgcucugucgcccagg

SEQ ID NO: 466260 - RNA, 20 nt, Human
gguugaaaccaaggggagga

SEQ ID NO: 466261 - RNA, 23 nt, Human
guagagacgggguuucaccaugu

SEQ ID NO: 466262 - RNA, 19 nt, Human
gugcuaggcucaggugggg

SEQ ID NO: 466263 - RNA, 19 nt, Human
guguuucuugucuccccac

SEQ ID NO: 466264 - RNA, 21 nt, Human
guugcagagagagagggacug

SEQ ID NO: 466265 - RNA, 22 nt, Human
uaaaacugaaaacaaucaguuu

SEQ ID NO: 466266 - RNA, 18 nt, Human
uaaggcccagaaucccag

SEQ ID NO: 466267 - RNA, 21 nt, Human
uaaguugguuuacuuaggccu

SEQ ID NO: 466268 - RNA, 25 nt, Human
uaauuuuuguauauuuuaguagaga

SEQ ID NO: 466269 - RNA, 19 nt, Human
uacaauuuccuugacaccu

SEQ ID NO: 466270 - RNA, 22 nt, Human
uagaaaucucuuugugacacau

SEQ ID NO: 466271 - RNA, 18 nt, Human
uagaacaggacccagcca

SEQ ID NO: 466272 - RNA, 22 nt, Human
uagagacgggguuucaccaugu

SEQ ID NO: 466273 - RNA, 22 nt, Human
uagcagcugugugcccccacca

SEQ ID NO: 466274 - RNA, 24 nt, Human
uaggaggcagaggugggaagauug

SEQ ID NO: 466275 - RNA, 22 nt, Human
uaggauuacaggcaugagccac

SEQ ID NO: 466276 - RNA, 22 nt, Human
uaggauuacaggcaugagccac

SEQ ID NO: 466277 - RNA, 23 nt, Human
uaggauuacaggcaugagccacu

SEQ ID NO: 466278 - RNA, 24 nt, Human
uaggauuacaggcaugagccacug

SEQ ID NO: 466279 - RNA, 24 nt, Human
uaggauuacaggcaugagccacug

SEQ ID NO: 466280 - RNA, 22 nt, Human
uaggccuuugucauuacaucug

SEQ ID NO: 466281 - RNA, 21 nt, Human
uaggugguuguaagacucuug

SEQ ID NO: 466282 - RNA, 24 nt, Human
uaguagagacgggguuucaccaug

SEQ ID NO: 466283 - RNA, 18 nt, Human
uauggcaauggccagagg

SEQ ID NO: 466284 - RNA, 19 nt, Human
uauggcaauggccagaggc

SEQ ID NO: 466285 - RNA, 18 nt, Human
uauugcccaucuguguuu

SEQ ID NO: 466286 - RNA, 19 nt, Human
uauugcccaucuguguuuc

SEQ ID NO: 466287 - RNA, 19 nt, Human
ucacaguccucgcuuagca

SEQ ID NO: 466288 - RNA, 19 nt, Human
ucacugcaaccuccgccuc

SEQ ID NO: 466289 - RNA, 24 nt, Human
ucacugcaaccuccgccucccagg

SEQ ID NO: 466290 - RNA, 25 nt, Human
ucacugcaaccuccgccucccaggu

SEQ ID NO: 466291 - RNA, 27 nt, Human
ucacugcaaccuccgccucccagguuc

SEQ ID NO: 466292 - RNA, 18 nt, Human
ucagaagccuuccugucc

SEQ ID NO: 466293 - RNA, 26 nt, Human
ucagcccaugaggaaucuucccaccc

SEQ ID NO: 466294 - RNA, 20 nt, Human
ucaguuauaugagccuuuug

SEQ ID NO: 466295 - RNA, 19 nt, Human
ucauaggagagagcacagc

SEQ ID NO: 466296 - RNA, 22 nt, Human
uccagccuaaucgucaugcccu

SEQ ID NO: 466297 - RNA, 24 nt, Human
ucccaaagugcuaggauuacaggc

SEQ ID NO: 466298 - RNA, 20 nt, Human
ucccagguucaagcgauucu

SEQ ID NO: 466299 - RNA, 20 nt, Human
ucccagguucaagcgauucu

SEQ ID NO: 466300 - RNA, 22 nt, Human
ucccccacugcuggauaaagcc

SEQ ID NO: 466301 - RNA, 21 nt, Human
ucccuaaguccuuccucucca

SEQ ID NO: 466302 - RNA, 22 nt, Human
ucccugcucccacuccuguccc

SEQ ID NO: 466303 - RNA, 21 nt, Human
uccgcccgccucagccuccca

SEQ ID NO: 466304 - RNA, 21 nt, Human
uccuaagucuuacaugacguu

SEQ ID NO: 466305 - RNA, 21 nt, Human
uccucagaagccuuccugucc

SEQ ID NO: 466306 - RNA, 24 nt, Human
uccugaauagcugggacugcaggc

SEQ ID NO: 466307 - RNA, 23 nt, Human
uccugaauccaaagccaacacuc

SEQ ID NO: 466308 - RNA, 20 nt, Human
uccugccuuagaacaggacc

SEQ ID NO: 466309 - RNA, 19 nt, Human
ucgcucagccagggucugc

SEQ ID NO: 466310 - RNA, 24 nt, Human
ucucccugcucccacuccuguccc

SEQ ID NO: 466311 - RNA, 18 nt, Human
ucuccuaucucccugcuc

SEQ ID NO: 466312 - RNA, 18 nt, Human
ucuccuuccccauauggu

SEQ ID NO: 466313 - RNA, 22 nt, Human
ucuccuugcugagcaggucggc

SEQ ID NO: 466314 - RNA, 18 nt, Human
ucucgcucugucgcccag

SEQ ID NO: 466315 - RNA, 19 nt, Human
ucucgcucugucgcccagg

SEQ ID NO: 466316 - RNA, 26 nt, Human
ucucgcucugucgcccaggcuaaggc

SEQ ID NO: 466317 - RNA, 27 nt, Human
ucucgcucugucgcccaggcuaaggcu

SEQ ID NO: 466318 - RNA, 18 nt, Human
ucugccauuuccuccccu

SEQ ID NO: 466319 - RNA, 24 nt, Human
ucugccucccuaaguccuuccucu

SEQ ID NO: 466320 - RNA, 22 nt, Human
ucuggccaucucagccucuagg

SEQ ID NO: 466321 - RNA, 19 nt, Human
ucuggccuccaguccuggu

SEQ ID NO: 466322 - RNA, 20 nt, Human
ucugucgcccaggcuaaggc

SEQ ID NO: 466323 - RNA, 24 nt, Human
ucuucuguggaaccaccccucucc

SEQ ID NO: 466324 - RNA, 20 nt, Human
ucuuguggucuuuaguuccu

SEQ ID NO: 466325 - RNA, 21 nt, Human
ugacguggagacaccaagucc

SEQ ID NO: 466326 - RNA, 19 nt, Human
ugacucuggcagggguccc

SEQ ID NO: 466327 - RNA, 18 nt, Human
ugagccuuugguccugcc

SEQ ID NO: 466328 - RNA, 24 nt, Human
ugaggagaguguugcagagagaga

SEQ ID NO: 466329 - RNA, 21 nt, Human
ugaggagggggugugggggcc

SEQ ID NO: 466330 - RNA, 19 nt, Human
ugaguagaagcagcccgug

SEQ ID NO: 466331 - RNA, 21 nt, Human
ugaguagaagcagcccguggc

SEQ ID NO: 466332 - RNA, 18 nt, Human
ugauaaauuucaucuuug

SEQ ID NO: 466333 - RNA, 23 nt, Human
ugcaaagaugcagcagaaacaaa

SEQ ID NO: 466334 - RNA, 19 nt, Human
ugcaagcccccugcccuuc

SEQ ID NO: 466335 - RNA, 21 nt, Human
ugcagagagagagggacuggc

SEQ ID NO: 466336 - RNA, 22 nt, Human
ugcccacagacagcucacccuc

SEQ ID NO: 466337 - RNA, 19 nt, Human
ugcccagcucccucugccc

SEQ ID NO: 466338 - RNA, 23 nt, Human
ugcccugcugugcccugcccagc

SEQ ID NO: 466339 - RNA, 22 nt, Human
ugccucagccuccugaauagcu

SEQ ID NO: 466340 - RNA, 27 nt, Human
ugccucagccuccugaauagcugggac

SEQ ID NO: 466341 - RNA, 21 nt, Human
ugccuggagcuuugcagggga

SEQ ID NO: 466342 - RNA, 18 nt, Human
ugccugugcugcuccucg

SEQ ID NO: 466343 - RNA, 18 nt, Human
uggacagagggagccaug

SEQ ID NO: 466344 - RNA, 24 nt, Human
uggagugcuauggcgcgaucucgg

SEQ ID NO: 466345 - RNA, 23 nt, Human
uggcaauggccagaggcccaggc

SEQ ID NO: 466346 - RNA, 18 nt, Human
uggcaggggucccccauc

SEQ ID NO: 466347 - RNA, 20 nt, Human
uggcaggggucccccaucug

SEQ ID NO: 466348 - RNA, 21 nt, Human
uggcaggggucccccaucugc

SEQ ID NO: 466349 - RNA, 26 nt, Human
uggcaucuuguuaaucccuccacuau

SEQ ID NO: 466350 - RNA, 24 nt, Human
uggccaggcugguuucaaacuccu

SEQ ID NO: 466351 - RNA, 22 nt, Human
uggcccagcaacugcugguggg

SEQ ID NO: 466352 - RNA, 23 nt, Human
uggcccccucuccccugcauucc

SEQ ID NO: 466353 - RNA, 24 nt, Human
uggccccuuucccccuuggccccc

SEQ ID NO: 466354 - RNA, 19 nt, Human
uggcugaaggcagcugaau

SEQ ID NO: 466355 - RNA, 21 nt, Human
ugggacugcaggcaugcacca

SEQ ID NO: 466356 - RNA, 24 nt, Human
ugggacugcaggcaugcaccacca

SEQ ID NO: 466357 - RNA, 22 nt, Human
uggggccccagaacucagaggg

SEQ ID NO: 466358 - RNA, 20 nt, Human
ugggggccaugggagcuggg

SEQ ID NO: 466359 - RNA, 22 nt, Human
ugggggccgcugcugacucugg

SEQ ID NO: 466360 - RNA, 21 nt, Human
ugguuagccccagccacccac

SEQ ID NO: 466361 - RNA, 22 nt, Human
ugugggggccaugggagcuggg

SEQ ID NO: 466362 - RNA, 24 nt, Human
ugugggggccaugggagcugggcc

SEQ ID NO: 466363 - RNA, 23 nt, Human
ugugguggccaaguucuggagau

SEQ ID NO: 466364 - RNA, 18 nt, Human
uuaguagagacgggguuu

SEQ ID NO: 466365 - RNA, 22 nt, Human
uuaguagagacgggguuucacc

SEQ ID NO: 466366 - RNA, 24 nt, Human
uuaguagagacgggguuucaccau

SEQ ID NO: 466367 - RNA, 19 nt, Human
uuauuucaauacuuaccau

SEQ ID NO: 466368 - RNA, 24 nt, Human
uucaagcgauucuuguugccucag

SEQ ID NO: 466369 - RNA, 19 nt, Human
uuccacuggcccuuguagg

SEQ ID NO: 466370 - RNA, 24 nt, Human
uuccagugcugcugggccucacag

SEQ ID NO: 466371 - RNA, 22 nt, Human
uuccccauaugguuagccccag

SEQ ID NO: 466372 - RNA, 24 nt, Human
uuccugcaaagaugcagcagaaac

SEQ ID NO: 466373 - RNA, 19 nt, Human
uuccuucuggaaaucuggu

SEQ ID NO: 466374 - RNA, 18 nt, Human
uucgagagucacuuucag

SEQ ID NO: 466375 - RNA, 24 nt, Human
uucugccacacaaacucuucaccc

SEQ ID NO: 466376 - RNA, 18 nt, Human
uucuggcucaucuucugc

SEQ ID NO: 466377 - RNA, 20 nt, Human
uugcagagagagagggacug

SEQ ID NO: 466378 - RNA, 23 nt, Human
uuggcccccucuccccugcauuc

SEQ ID NO: 466379 - RNA, 21 nt, Human
uugggcccaggaguucaagac

SEQ ID NO: 466380 - RNA, 22 nt, Human
uuuacaaauaacagauuagacg

SEQ ID NO: 466381 - RNA, 24 nt, Human
uuucaccauguuggccaggcuggu

SEQ ID NO: 466382 - RNA, 18 nt, Human
uuucuugucuccccacua

SEQ ID NO: 466383 - RNA, 22 nt, Human
uuuguccuuuuugggaguagga

SEQ ID NO: 466384 - RNA, 22 nt, Human
uuuuguauauuuuaguagagac

SEQ ID NO: 466385 - RNA, 21 nt, Human
uuuuuguauauuuuaguagag

SEQ ID NO: 466386 - RNA, 22 nt, Human
aagccggcugcuccagagcuag

SEQ ID NO: 466387 - RNA, 18 nt, Human
aaggagcuuccgaggcag

SEQ ID NO: 466388 - RNA, 20 nt, Human
aagggaggguucaggguccc

SEQ ID NO: 466389 - RNA, 22 nt, Human
aggaagccggcugcuccagagc

SEQ ID NO: 466390 - RNA, 21 nt, Human
aggcaagcaaggugaagggag

SEQ ID NO: 466391 - RNA, 18 nt, Human
aggcaggaggcaagcaag

SEQ ID NO: 466392 - RNA, 21 nt, Human
cagagggaguccagccucuac

SEQ ID NO: 466393 - RNA, 21 nt, Human
caggcuggugcccagagccac

SEQ ID NO: 466394 - RNA, 24 nt, Human
caucccugguaugcgaaaccugga

SEQ ID NO: 466395 - RNA, 21 nt, Human
ccagagccacuuccacaggaa

SEQ ID NO: 466396 - RNA, 25 nt, Human
cccacacccaaggagcuuccgaggc

SEQ ID NO: 466397 - RNA, 20 nt, Human
cccacaggcuggugcccaga

SEQ ID NO: 466398 - RNA, 22 nt, Human
cccacaggcuggugcccagagc

SEQ ID NO: 466399 - RNA, 18 nt, Human
cccaggcccgaccucgug

SEQ ID NO: 466400 - RNA, 19 nt, Human
cccgcaacccgagacccgc

SEQ ID NO: 466401 - RNA, 25 nt, Human
cccgcaacccgagacccgcuaccca

SEQ ID NO: 466402 - RNA, 23 nt, Human
ccgcuacccacuaccgucggacc

SEQ ID NO: 466403 - RNA, 22 nt, Human
ccugcaacccgcaacccgagac

SEQ ID NO: 466404 - RNA, 19 nt, Human
cgccgggaaggcaguugcc

SEQ ID NO: 466405 - RNA, 22 nt, Human
cgccgggaaggcaguugccugg

SEQ ID NO: 466406 - RNA, 23 nt, Human
cuggagguuuuccaggaagccgg

SEQ ID NO: 466407 - RNA, 21 nt, Human
gaaaccuggagguuuuccagg

SEQ ID NO: 466408 - RNA, 19 nt, Human
gagguuuuccaggaagccg

SEQ ID NO: 466409 - RNA, 22 nt, Human
gcuacccacuaccgucggaccc

SEQ ID NO: 466410 - RNA, 19 nt, Human
ggcccauggcugcugcaac

SEQ ID NO: 466411 - RNA, 24 nt, Human
gguucagggucccacaacagcagu

SEQ ID NO: 466412 - RNA, 20 nt, Human
guucagggucccacaacagc

SEQ ID NO: 466413 - RNA, 25 nt, Human
ucaccuucgcaggccaagccagggg

SEQ ID NO: 466414 - RNA, 23 nt, Human
uccaggaagccggcugcuccaga

SEQ ID NO: 466415 - RNA, 22 nt, Human
ugcggcuugcaaccugcaaccc

SEQ ID NO: 466416 - RNA, 19 nt, Human
uugccuggggccugcggcu

SEQ ID NO: 466417 - RNA, 20 nt, Human
uugccuggggccugcggcuu

SEQ ID NO: 466418 - RNA, 20 nt, Human
uuuuuuuuuuuuuuaccuuc

SEQ ID NO: 466419 - RNA, 21 nt, Human
aaaaaacaaaauagcuacaga

SEQ ID NO: 466420 - RNA, 23 nt, Human
aaaaaacaaaauagcuacagaua

SEQ ID NO: 466421 - RNA, 26 nt, Human
aaagcaaaaaacaaaauagcuacaga

SEQ ID NO: 466422 - RNA, 25 nt, Human
aacaauaaccaaagcaaaaaacaaa

SEQ ID NO: 466423 - RNA, 22 nt, Human
aaccguagcagaaaaguauucc

SEQ ID NO: 466424 - RNA, 25 nt, Human
aagcaaaaaacaaaauagcuacaga

SEQ ID NO: 466425 - RNA, 24 nt, Human
aagcuauggccauggcgcuuacgc

SEQ ID NO: 466426 - RNA, 23 nt, Human
aauacaaucccaaacauccaccu

SEQ ID NO: 466427 - RNA, 20 nt, Human
aauuacagauuugugggcca

SEQ ID NO: 466428 - RNA, 20 nt, Human
aauuacuacaaaaacaauac

SEQ ID NO: 466429 - RNA, 21 nt, Human
acaauaaccaaagcaaaaaac

SEQ ID NO: 466430 - RNA, 23 nt, Human
acaguaucauggcaggaggugag

SEQ ID NO: 466431 - RNA, 23 nt, Human
agcaaaaaacaaaauagcuacag

SEQ ID NO: 466432 - RNA, 20 nt, Human
auacaaucccaaacauccac

SEQ ID NO: 466433 - RNA, 24 nt, Human
auagcuaagaaaagggaaaaaaac

SEQ ID NO: 466434 - RNA, 24 nt, Human
caauaccaauaaaguuauagcaaa

SEQ ID NO: 466435 - RNA, 21 nt, Human
cagcagcucaagaugguugag

SEQ ID NO: 466436 - RNA, 21 nt, Human
caggaggugagaaggagcaau

SEQ ID NO: 466437 - RNA, 24 nt, Human
cauagcuaagaaaagggaaaaaaa

SEQ ID NO: 466438 - RNA, 23 nt, Human
cccgaguccuccagggccugggg

SEQ ID NO: 466439 - RNA, 20 nt, Human
ccuccagggccuggggggac

SEQ ID NO: 466440 - RNA, 24 nt, Human
cuggggggacuggguggaagcucg

SEQ ID NO: 466441 - RNA, 20 nt, Human
gaaaaaaacaauaaccaaag

SEQ ID NO: 466442 - RNA, 22 nt, Human
gaguggaauuuuagaugucuau

SEQ ID NO: 466443 - RNA, 22 nt, Human
ggccauggcgcuuacgcugccu

SEQ ID NO: 466444 - RNA, 21 nt, Human
gucacagcagcucaagauggu

SEQ ID NO: 466445 - RNA, 24 nt, Human
guuucauucucugauacacacaag

SEQ ID NO: 466446 - RNA, 19 nt, Human
uaaccaaagcaaaaaacaa

SEQ ID NO: 466447 - RNA, 18 nt, Human
uaagaaaagggaaaaaaa

SEQ ID NO: 466448 - RNA, 21 nt, Human
uaaucuccuugauuuugaaga

SEQ ID NO: 466449 - RNA, 24 nt, Human
uagcagaaaaguauuccaauccuc

SEQ ID NO: 466450 - RNA, 18 nt, Human
uagcccagggucaggaaa

SEQ ID NO: 466451 - RNA, 18 nt, Human
uagugauuucuuaaggcc

SEQ ID NO: 466452 - RNA, 24 nt, Human
uauggccauggcgcuuacgcugcc

SEQ ID NO: 466453 - RNA, 23 nt, Human
uauucaaauaaaauuuuaaugau

SEQ ID NO: 466454 - RNA, 19 nt, Human
uccagggccuggggggacu

SEQ ID NO: 466455 - RNA, 23 nt, Human
uccaggguuagggugauugagac

SEQ ID NO: 466456 - RNA, 19 nt, Human
uggggggacuggguggaag

SEQ ID NO: 466457 - RNA, 22 nt, Human
uucaccgggcccgaguccucca

SEQ ID NO: 466458 - RNA, 21 nt, Human
uuuuuuuuuuuuuuuuuucag

SEQ ID NO: 466459 - RNA, 18 nt, Human
aaaaagacagagacaucg

SEQ ID NO: 466460 - RNA, 21 nt, Human
aaaagaaaucaaauaacagaa

SEQ ID NO: 466461 - RNA, 23 nt, Human
aaaagaaaucaaauaacagaaaa

SEQ ID NO: 466462 - RNA, 19 nt, Human
aaacaaagauccaguuggc

SEQ ID NO: 466463 - RNA, 19 nt, Human
aaacaaagauccaguuggc

SEQ ID NO: 466464 - RNA, 18 nt, Human
aaagaacaacaacaaaaa

SEQ ID NO: 466465 - RNA, 22 nt, Human
aaagaacaacaacaaaaaaguu

SEQ ID NO: 466466 - RNA, 21 nt, Human
aacaaagcuaaaggaagaggu

SEQ ID NO: 466467 - RNA, 24 nt, Human
aacaucuuuauaaaaugucuacca

SEQ ID NO: 466468 - RNA, 19 nt, Human
aagagcaucaccaucuacc

SEQ ID NO: 466469 - RNA, 18 nt, Human
aauuucugaaugccuuuc

SEQ ID NO: 466470 - RNA, 18 nt, Human
acaaaaaaaaagacagag

SEQ ID NO: 466471 - RNA, 21 nt, Human
acaaaaaaaaagacagagaca

SEQ ID NO: 466472 - RNA, 25 nt, Human
agaaauaggaacaaagcuaaaggaa

SEQ ID NO: 466473 - RNA, 19 nt, Human
agacaaaaaaaaagacaga

SEQ ID NO: 466474 - RNA, 26 nt, Human
agacaggaaagaaauuuaaaucuucu

SEQ ID NO: 466475 - RNA, 21 nt, Human
agccaauacaaagcaaacauc

SEQ ID NO: 466476 - RNA, 21 nt, Human
agccugaauaagugaaaauaa

SEQ ID NO: 466477 - RNA, 22 nt, Human
aggcaaguuuaaaaacaguuau

SEQ ID NO: 466478 - RNA, 24 nt, Human
aguguucagauuuauuuggaaauu

SEQ ID NO: 466479 - RNA, 20 nt, Human
aguuaucacuacuaaaagug

SEQ ID NO: 466480 - RNA, 20 nt, Human
caaaaaaaaagacagagaca

SEQ ID NO: 466481 - RNA, 23 nt, Human
caaggggcuucuauaaaaucagg

SEQ ID NO: 466482 - RNA, 21 nt, Human
caaguguucagauuuauuugg

SEQ ID NO: 466483 - RNA, 22 nt, Human
caauaaauggucaauucucucc

SEQ ID NO: 466484 - RNA, 20 nt, Human
cacaacacacagaucacaua

SEQ ID NO: 466485 - RNA, 20 nt, Human
caccaucuaccuaacagaac

SEQ ID NO: 466486 - RNA, 22 nt, Human
cagaaaaaguuaucccuccucu

SEQ ID NO: 466487 - RNA, 25 nt, Human
cagaaaaaguuaucccuccucuucc

SEQ ID NO: 466488 - RNA, 22 nt, Human
caggcacagacccccucaaagc

SEQ ID NO: 466489 - RNA, 18 nt, Human
cauuacaaacaauaccca

SEQ ID NO: 466490 - RNA, 19 nt, Human
cauuacaaacaauacccaa

SEQ ID NO: 466491 - RNA, 21 nt, Human
cauuccuaucccaccuaagga

SEQ ID NO: 466492 - RNA, 23 nt, Human
ccaccuaaggaacugggcuucca

SEQ ID NO: 466493 - RNA, 24 nt, Human
ccaccuaaggaacugggcuuccaa

SEQ ID NO: 466494 - RNA, 21 nt, Human
cccucccccaaacccuucaaa

SEQ ID NO: 466495 - RNA, 25 nt, Human
cccucccccaaacccuucaaauacu

SEQ ID NO: 466496 - RNA, 23 nt, Human
ccuuucgcuuuuucuucucuuca

SEQ ID NO: 466497 - RNA, 24 nt, Human
cgcuuuuucuucucuucagcaaga

SEQ ID NO: 466498 - RNA, 20 nt, Human
cucacuguaucucugcucuc

SEQ ID NO: 466499 - RNA, 19 nt, Human
cucuucagcaagaauuucg

SEQ ID NO: 466500 - RNA, 23 nt, Human
cuucaggcacagacccccucaaa

SEQ ID NO: 466501 - RNA, 21 nt, Human
gaacagacuuaaaaauuccau

SEQ ID NO: 466502 - RNA, 24 nt, Human
gaccucuuuucaaggggcuucuau

SEQ ID NO: 466503 - RNA, 21 nt, Human
ggaauaauaaucucuuuagac

SEQ ID NO: 466504 - RNA, 19 nt, Human
gucaauucucucccuuuca

SEQ ID NO: 466505 - RNA, 24 nt, Human
uaaaacacgcuguuaaccuaaagc

SEQ ID NO: 466506 - RNA, 20 nt, Human
uaaacaaacaaagaaggcgu

SEQ ID NO: 466507 - RNA, 23 nt, Human
uaaacaaagauccaguuggcaag

SEQ ID NO: 466508 - RNA, 22 nt, Human
uaaagcagcaacuuaaacaaac

SEQ ID NO: 466509 - RNA, 26 nt, Human
uaaauaagucacauuacaaacaauac

SEQ ID NO: 466510 - RNA, 19 nt, Human
uaacaagagcaucaccauc

SEQ ID NO: 466511 - RNA, 21 nt, Human
uaacagaaaaaguuaucccuc

SEQ ID NO: 466512 - RNA, 20 nt, Human
uaacagaacagacuuaaaaa

SEQ ID NO: 466513 - RNA, 20 nt, Human
uaacuuaaacaucacaacaa

SEQ ID NO: 466514 - RNA, 20 nt, Human
uaagaaguaauccagccuga

SEQ ID NO: 466515 - RNA, 21 nt, Human
uaagaaguaauccagccugaa

SEQ ID NO: 466516 - RNA, 22 nt, Human
uaagcuaaagaaaaccuucaca

SEQ ID NO: 466517 - RNA, 19 nt, Human
uaauuucucacuguaucuc

SEQ ID NO: 466518 - RNA, 24 nt, Human
uacaaacaauacccaagaaaggua

SEQ ID NO: 466519 - RNA, 21 nt, Human
uacuaauaaaaacagugaaag

SEQ ID NO: 466520 - RNA, 20 nt, Human
uacuuuugucccaguaauua

SEQ ID NO: 466521 - RNA, 23 nt, Human
uauuuuuuaaagacaaaaaaaaa

SEQ ID NO: 466522 - RNA, 18 nt, Human
ucaaaaauuugucugcau

SEQ ID NO: 466523 - RNA, 20 nt, Human
ucaaauacuacagacuguuc

SEQ ID NO: 466524 - RNA, 20 nt, Human
ucacauauguauuaccucuu

SEQ ID NO: 466525 - RNA, 25 nt, Human
ucacauuacaaacaauacccaagaa

SEQ ID NO: 466526 - RNA, 18 nt, Human
ucauugaguuaguaacua

SEQ ID NO: 466527 - RNA, 18 nt, Human
uccacacuccugagcuuc

SEQ ID NO: 466528 - RNA, 20 nt, Human
ucccaccuaaggaacugggc

SEQ ID NO: 466529 - RNA, 19 nt, Human
ucccaguaauuaaucuugu

SEQ ID NO: 466530 - RNA, 29 nt, Human
ucccauuaauauuuucucccucccccaag

SEQ ID NO: 466531 - RNA, 24 nt, Human
uccugagcuucaggcacagacccc

SEQ ID NO: 466532 - RNA, 20 nt, Human
ucucccuuucaaaaagaaac

SEQ ID NO: 466533 - RNA, 20 nt, Human
ugaauagcuaauugugcaga

SEQ ID NO: 466534 - RNA, 25 nt, Human
ugaaugccuuucccauuaauauuuu

SEQ ID NO: 466535 - RNA, 18 nt, Human
uggcauuauaaauagaca

SEQ ID NO: 466536 - RNA, 18 nt, Human
uuaaacaaacaaagaagg

SEQ ID NO: 466537 - RNA, 25 nt, Human
uuaggcuuucauuccuaucccaccu

SEQ ID NO: 466538 - RNA, 25 nt, Human
uucaaaaaccuaacaaaguuauaaa

SEQ ID NO: 466539 - RNA, 21 nt, Human
uucaaagaacaacaacaaaaa

SEQ ID NO: 466540 - RNA, 18 nt, Human
uugaaaauucucuuccca

SEQ ID NO: 466541 - RNA, 20 nt, Human
uugcaaaaaaagauccugua

SEQ ID NO: 466542 - RNA, 22 nt, Human
uuguagccaauacaaagcaaac

SEQ ID NO: 466543 - RNA, 21 nt, Human
uuuagacuuaaccaauuagau

SEQ ID NO: 466544 - RNA, 21 nt, Human
uuucaaaaagaaacauguucc

SEQ ID NO: 466545 - RNA, 19 nt, Human
uuucugaaugccuuuccca

SEQ ID NO: 466546 - RNA, 21 nt, Human
uuuuuaggaucuuuagacugu

SEQ ID NO: 466547 - RNA, 20 nt, Human
aaaaaaaaauucuuuuaaaa

SEQ ID NO: 466548 - RNA, 22 nt, Human
aaaaaaaauucuuuuaaacuca

SEQ ID NO: 466549 - RNA, 22 nt, Human
aaaacuucccccguccccaugg

SEQ ID NO: 466550 - RNA, 19 nt, Human
aaacaaaaguaccuaauga

SEQ ID NO: 466551 - RNA, 19 nt, Human
aaacaccuguaaugcacuu

SEQ ID NO: 466552 - RNA, 18 nt, Human
aaacucaguucauccugc

SEQ ID NO: 466553 - RNA, 24 nt, Human
aaacuggcaagaguauuaacccug

SEQ ID NO: 466554 - RNA, 19 nt, Human
aaagaacuucagcucagag

SEQ ID NO: 466555 - RNA, 18 nt, Human
aacacagugcaucaucuc

SEQ ID NO: 466556 - RNA, 20 nt, Human
aaccauagcaucuauauuuc

SEQ ID NO: 466557 - RNA, 18 nt, Human
aagaagaaagaaagagca

SEQ ID NO: 466558 - RNA, 19 nt, Human
aagaagaaagaaagagcag

SEQ ID NO: 466559 - RNA, 18 nt, Human
aagaucccccaaacaaga

SEQ ID NO: 466560 - RNA, 23 nt, Human
aagcaccauuuuguuagaacuca

SEQ ID NO: 466561 - RNA, 18 nt, Human
aagcuaaagcuauuguuc

SEQ ID NO: 466562 - RNA, 20 nt, Human
aaugacaaagaagaaagaaa

SEQ ID NO: 466563 - RNA, 23 nt, Human
acaaaccauauagauuuaaacca

SEQ ID NO: 466564 - RNA, 19 nt, Human
acacauuuccucugucugu

SEQ ID NO: 466565 - RNA, 21 nt, Human
acagagcaagccuuugcaggg

SEQ ID NO: 466566 - RNA, 18 nt, Human
acaguggugguaaaaagc

SEQ ID NO: 466567 - RNA, 20 nt, Human
acccagccugccagggaagg

SEQ ID NO: 466568 - RNA, 26 nt, Human
acccuuucucugaggcuuuggggccu

SEQ ID NO: 466569 - RNA, 21 nt, Human
accgaaggcagagaccagaug

SEQ ID NO: 466570 - RNA, 23 nt, Human
accgcagcccacuuccccacauc

SEQ ID NO: 466571 - RNA, 25 nt, Human
acgaaauccccaccguggcacgcca

SEQ ID NO: 466572 - RNA, 25 nt, Human
acuagcucccuacuuggugugugcg

SEQ ID NO: 466573 - RNA, 18 nt, Human
agaaaaugcacaaaccau

SEQ ID NO: 466574 - RNA, 20 nt, Human
agaaagcuguguuuuccugu

SEQ ID NO: 466575 - RNA, 23 nt, Human
agaaaucuuguaauuccagaauu

SEQ ID NO: 466576 - RNA, 20 nt, Human
agacagagaacaaaaguucc

SEQ ID NO: 466577 - RNA, 19 nt, Human
agacaugaggccucccaga

SEQ ID NO: 466578 - RNA, 21 nt, Human
agagaagauauucaggggagc

SEQ ID NO: 466579 - RNA, 20 nt, Human
agauaagagcaacagcacaa

SEQ ID NO: 466580 - RNA, 19 nt, Human
agcaaaaauaaacaggaga

SEQ ID NO: 466581 - RNA, 24 nt, Human
agcagugauggcaccugaaauuca

SEQ ID NO: 466582 - RNA, 18 nt, Human
agcucggagcacuggcau

SEQ ID NO: 466583 - RNA, 24 nt, Human
agcucggagcacuggcauuccggg

SEQ ID NO: 466584 - RNA, 24 nt, Human
agcugcuagaaagcuguguuuucc

SEQ ID NO: 466585 - RNA, 21 nt, Human
agcugggccccaaggggagcu

SEQ ID NO: 466586 - RNA, 19 nt, Human
agcugggugugugagaugu

SEQ ID NO: 466587 - RNA, 22 nt, Human
agcuguugagcagggguggagu

SEQ ID NO: 466588 - RNA, 21 nt, Human
aggaauguguuccagugcccc

SEQ ID NO: 466589 - RNA, 21 nt, Human
aggacacaaaggcugagggcu

SEQ ID NO: 466590 - RNA, 19 nt, Human
aggauaggcacauaacaga

SEQ ID NO: 466591 - RNA, 19 nt, Human
aggaugaaguggaggcggg

SEQ ID NO: 466592 - RNA, 20 nt, Human
aggcgagaagcccagcggcg

SEQ ID NO: 466593 - RNA, 22 nt, Human
aggcggggccacaggcagggug

SEQ ID NO: 466594 - RNA, 22 nt, Human
aggggagcugaggggugagcug

SEQ ID NO: 466595 - RNA, 21 nt, Human
aguugagaaaaugcacaaacc

SEQ ID NO: 466596 - RNA, 23 nt, Human
auagauuuaaaccauggguuuug

SEQ ID NO: 466597 - RNA, 22 nt, Human
aucaacuguggacuaugaacug

SEQ ID NO: 466598 - RNA, 18 nt, Human
aucugugaacaaaucccu

SEQ ID NO: 466599 - RNA, 20 nt, Human
augcaguucauccccacauu

SEQ ID NO: 466600 - RNA, 24 nt, Human
auuugcauuuauuuaagugcugau

SEQ ID NO: 466601 - RNA, 22 nt, Human
caaagacagguuguccuugaau

SEQ ID NO: 466602 - RNA, 23 nt, Human
caaaguaacagcaaaaauaaaca

SEQ ID NO: 466603 - RNA, 20 nt, Human
caacugaaaacuggagacca

SEQ ID NO: 466604 - RNA, 24 nt, Human
caagagucucccagaauuauugac

SEQ ID NO: 466605 - RNA, 21 nt, Human
caagggcuugugaugaggaug

SEQ ID NO: 466606 - RNA, 19 nt, Human
caaggggagcugaggggug

SEQ ID NO: 466607 - RNA, 22 nt, Human
caaggggagcugaggggugagc

SEQ ID NO: 466608 - RNA, 24 nt, Human
caaggggagcugaggggugagcug

SEQ ID NO: 466609 - RNA, 25 nt, Human
cacacagcuuccacuucaggaacau

SEQ ID NO: 466610 - RNA, 25 nt, Human
cacauuacccaaacauaacgucgua

SEQ ID NO: 466611 - RNA, 20 nt, Human
caccuuguggcccuucaacc

SEQ ID NO: 466612 - RNA, 20 nt, Human
caccuuguggcccuucaacc

SEQ ID NO: 466613 - RNA, 18 nt, Human
cacuucaggaacaucaaa

SEQ ID NO: 466614 - RNA, 21 nt, Human
cagagaaggacacaaaggcug

SEQ ID NO: 466615 - RNA, 23 nt, Human
cagccugccagggaagguuuuga

SEQ ID NO: 466616 - RNA, 19 nt, Human
cagcucagaggaauagugg

SEQ ID NO: 466617 - RNA, 21 nt, Human
cagcucagaggaauagugggc

SEQ ID NO: 466618 - RNA, 19 nt, Human
cauccccacauuacccaaa

SEQ ID NO: 466619 - RNA, 19 nt, Human
cauguggcuggcccuuccu

SEQ ID NO: 466620 - RNA, 20 nt, Human
ccagaguuccaacugaaaac

SEQ ID NO: 466621 - RNA, 21 nt, Human
ccagcggcgacaggagcuucu

SEQ ID NO: 466622 - RNA, 25 nt, Human
ccagcggcgacaggagcuucuaucu

SEQ ID NO: 466623 - RNA, 22 nt, Human
ccccacauuacccaaacauaac

SEQ ID NO: 466624 - RNA, 19 nt, Human
ccccacugugccacgcccg

SEQ ID NO: 466625 - RNA, 18 nt, Human
cccuagccccguagauua

SEQ ID NO: 466626 - RNA, 19 nt, Human
cccucuuccuucccuccuu

SEQ ID NO: 466627 - RNA, 23 nt, Human
cccuggcuuguucugcugcugaa

SEQ ID NO: 466628 - RNA, 24 nt, Human
cccuuguggguuccacagaggggu

SEQ ID NO: 466629 - RNA, 19 nt, Human
ccguagucaaguguguggu

SEQ ID NO: 466630 - RNA, 20 nt, Human
ccuccugcauccuuucucaa

SEQ ID NO: 466631 - RNA, 21 nt, Human
ccucuuccuucccuccuuacc

SEQ ID NO: 466632 - RNA, 19 nt, Human
ccugagcugucugguuggg

SEQ ID NO: 466633 - RNA, 23 nt, Human
ccuguaaugcacuucaagcaacu

SEQ ID NO: 466634 - RNA, 19 nt, Human
cgaucucugagccuucccu

SEQ ID NO: 466635 - RNA, 18 nt, Human
cgcccuagccccguagau

SEQ ID NO: 466636 - RNA, 18 nt, Human
cggaauuggucacauugg

SEQ ID NO: 466637 - RNA, 28 nt, Human
cgugucucugugugugugugugugugug

SEQ ID NO: 466638 - RNA, 22 nt, Human
cuaaugaucaucuccauccauc

SEQ ID NO: 466639 - RNA, 20 nt, Human
cucaaaggacaacaaagcug

SEQ ID NO: 466640 - RNA, 24 nt, Human
cucaaaggacaacaaagcugcacc

SEQ ID NO: 466641 - RNA, 24 nt, Human
cucugcgggaggcgagaagcccag

SEQ ID NO: 466642 - RNA, 22 nt, Human
cugagccuucccuccucacagu

SEQ ID NO: 466643 - RNA, 19 nt, Human
cugcagggcuuccucuguc

SEQ ID NO: 466644 - RNA, 22 nt, Human
cugcguuggggcugugggaagc

SEQ ID NO: 466645 - RNA, 21 nt, Human
cugggccccaaggggagcuga

SEQ ID NO: 466646 - RNA, 23 nt, Human
cuugcaaggccgacagugaccgc

SEQ ID NO: 466647 - RNA, 27 nt, Human
gaaaagaacugcuugccaccuugcaga

SEQ ID NO: 466648 - RNA, 18 nt, Human
gaaaagacaaagcaacuu

SEQ ID NO: 466649 - RNA, 23 nt, Human
gaaaauaccugcauguuccaagg

SEQ ID NO: 466650 - RNA, 22 nt, Human
gaaguuuugccaaauggacacu

SEQ ID NO: 466651 - RNA, 22 nt, Human
gacacauuuccucugucuguuc

SEQ ID NO: 466652 - RNA, 21 nt, Human
gagaagcuaagaagagaaaua

SEQ ID NO: 466653 - RNA, 21 nt, Human
gagcacuggcauuccgggcag

SEQ ID NO: 466654 - RNA, 18 nt, Human
gagccuucccuccucaca

SEQ ID NO: 466655 - RNA, 20 nt, Human
gagcucggagcacuggcauu

SEQ ID NO: 466656 - RNA, 21 nt, Human
gaugaggauggaaaagacaaa

SEQ ID NO: 466657 - RNA, 22 nt, Human
gcacaaaaccuccaucuuuccu

SEQ ID NO: 466658 - RNA, 20 nt, Human
gcggggccacaggcagggug

SEQ ID NO: 466659 - RNA, 25 nt, Human
ggcaaaaccagaaacagcagggacu

SEQ ID NO: 466660 - RNA, 19 nt, Human
ggcaggaugaaguggaggc

SEQ ID NO: 466661 - RNA, 19 nt, Human
ggccgacagugaccgcagc

SEQ ID NO: 466662 - RNA, 20 nt, Human
gggaagauggcauguggcug

SEQ ID NO: 466663 - RNA, 21 nt, Human
gggaagccaaggacagaaaug

SEQ ID NO: 466664 - RNA, 22 nt, Human
gggccuuggagggagacacauu

SEQ ID NO: 466665 - RNA, 20 nt, Human
ggggagcugaggggugagcu

SEQ ID NO: 466666 - RNA, 23 nt, Human
gggugccccuuuggaauggggag

SEQ ID NO: 466667 - RNA, 19 nt, Human
gucucuguguggcccucug

SEQ ID NO: 466668 - RNA, 23 nt, Human
gugaugaggauggaaaagacaaa

SEQ ID NO: 466669 - RNA, 24 nt, Human
guggaggcggggccacaggcaggg

SEQ ID NO: 466670 - RNA, 21 nt, Human
uaaaaucucaggaugcugcau

SEQ ID NO: 466671 - RNA, 18 nt, Human
uaaggcaaaaccagaaac

SEQ ID NO: 466672 - RNA, 20 nt, Human
uaaggcaaaaccagaaacac

SEQ ID NO: 466673 - RNA, 22 nt, Human
uaaggcaaaaccagaaacaccc

SEQ ID NO: 466674 - RNA, 18 nt, Human
uaauucaagcuuaagcca

SEQ ID NO: 466675 - RNA, 24 nt, Human
uagaaagcuguguuuuccuguuuu

SEQ ID NO: 466676 - RNA, 19 nt, Human
uagaauccucugaauggcc

SEQ ID NO: 466677 - RNA, 23 nt, Human
uaugaaaauagugucuuugauua

SEQ ID NO: 466678 - RNA, 21 nt, Human
uauucaguuuuuuccaagagu

SEQ ID NO: 466679 - RNA, 19 nt, Human
ucaaaacacagugcaucau

SEQ ID NO: 466680 - RNA, 22 nt, Human
ucaaaugacaaagaagaaagaa

SEQ ID NO: 466681 - RNA, 23 nt, Human
ucaauccuaaucagcaugagcaa

SEQ ID NO: 466682 - RNA, 18 nt, Human
ucacgaaauccccaccgu

SEQ ID NO: 466683 - RNA, 20 nt, Human
ucauccuaggaagagaaaca

SEQ ID NO: 466684 - RNA, 21 nt, Human
uccacuuuuuugccugaucgc

SEQ ID NO: 466685 - RNA, 22 nt, Human
ucccagagauacucagguaacu

SEQ ID NO: 466686 - RNA, 19 nt, Human
uccccacauuacccaaaca

SEQ ID NO: 466687 - RNA, 22 nt, Human
ucccuacuuggugugugcgcca

SEQ ID NO: 466688 - RNA, 25 nt, Human
uccuccaccacuggcuaacagacag

SEQ ID NO: 466689 - RNA, 22 nt, Human
uccuuaagcaaacugccugacu

SEQ ID NO: 466690 - RNA, 20 nt, Human
uccuugaauuuguuuccuug

SEQ ID NO: 466691 - RNA, 24 nt, Human
ucugugugugugugugugugugug

SEQ ID NO: 466692 - RNA, 19 nt, Human
ucuuuacauugucugcuuu

SEQ ID NO: 466693 - RNA, 19 nt, Human
ugaaaagggagggggagua

SEQ ID NO: 466694 - RNA, 26 nt, Human
ugaacaggucaccugggcagaaacac

SEQ ID NO: 466695 - RNA, 20 nt, Human
ugaccgcagcccacuucccc

SEQ ID NO: 466696 - RNA, 26 nt, Human
ugacuucacaaacaccuguaaugcac

SEQ ID NO: 466697 - RNA, 18 nt, Human
ugacuuuuuaauuccacu

SEQ ID NO: 466698 - RNA, 25 nt, Human
ugagaaaaugcacaaaccauauaga

SEQ ID NO: 466699 - RNA, 18 nt, Human
ugagaugacuuuaaaaag

SEQ ID NO: 466700 - RNA, 28 nt, Human
ugaggauauaauuuaaauggcuuuuccc

SEQ ID NO: 466701 - RNA, 19 nt, Human
ugaggaugguggcugguga

SEQ ID NO: 466702 - RNA, 18 nt, Human
ugaggggagggagagagu

SEQ ID NO: 466703 - RNA, 25 nt, Human
ugaggggagggagagaguugguccu

SEQ ID NO: 466704 - RNA, 21 nt, Human
ugaggggugagcugcagccac

SEQ ID NO: 466705 - RNA, 18 nt, Human
ugauuuagacaauggaga

SEQ ID NO: 466706 - RNA, 19 nt, Human
ugcaaauaaacccaaggcu

SEQ ID NO: 466707 - RNA, 23 nt, Human
ugcagggcuuccucugucugagc

SEQ ID NO: 466708 - RNA, 19 nt, Human
ugcaucaugaugcuauggc

SEQ ID NO: 466709 - RNA, 23 nt, Human
uggaagugagcagagaagauauu

SEQ ID NO: 466710 - RNA, 21 nt, Human
uggcauguggcuggcccuucc

SEQ ID NO: 466711 - RNA, 20 nt, Human
uggccagacagauggcugcu

SEQ ID NO: 466712 - RNA, 18 nt, Human
uggcgagcugggugugug

SEQ ID NO: 466713 - RNA, 25 nt, Human
uggcuuguucugcugcugaacaggu

SEQ ID NO: 466714 - RNA, 19 nt, Human
ugggaguggugugcaagag

SEQ ID NO: 466715 - RNA, 21 nt, Human
ugggaguggugugcaagagaa

SEQ ID NO: 466716 - RNA, 19 nt, Human
ugggcaaaaucugcugaaa

SEQ ID NO: 466717 - RNA, 22 nt, Human
ugggccccaaggggagcugagg

SEQ ID NO: 466718 - RNA, 22 nt, Human
ugucuccuucaccccaaaugau

SEQ ID NO: 466719 - RNA, 18 nt, Human
ugugugugugugugugug

SEQ ID NO: 466720 - RNA, 18 nt, Human
ugugugugugugugugug

SEQ ID NO: 466721 - RNA, 18 nt, Human
ugugugugugugugugug

SEQ ID NO: 466722 - RNA, 18 nt, Human
ugugugugugugugugug

SEQ ID NO: 466723 - RNA, 18 nt, Human
ugugugugugugugugug

SEQ ID NO: 466724 - RNA, 18 nt, Human
ugugugugugugugugug

SEQ ID NO: 466725 - RNA, 18 nt, Human
ugugugugugugugugug

SEQ ID NO: 466726 - RNA, 18 nt, Human
ugugugugugugugugug

SEQ ID NO: 466727 - RNA, 21 nt, Human
ugugugugugugugugugugu

SEQ ID NO: 466728 - RNA, 21 nt, Human
ugugugugugugugugugugu

SEQ ID NO: 466729 - RNA, 21 nt, Human
ugugugugugugugugugugu

SEQ ID NO: 466730 - RNA, 21 nt, Human
ugugugugugugugugugugu

SEQ ID NO: 466731 - RNA, 21 nt, Human
ugugugugugugugugugugu

SEQ ID NO: 466732 - RNA, 21 nt, Human
ugugugugugugugugugugu

SEQ ID NO: 466733 - RNA, 21 nt, Human
ugugugugugugugugugugu

SEQ ID NO: 466734 - RNA, 22 nt, Human
ugugugugugugugugugugug

SEQ ID NO: 466735 - RNA, 22 nt, Human
ugugugugugugugugugugug

SEQ ID NO: 466736 - RNA, 22 nt, Human
ugugugugugugugugugugug

SEQ ID NO: 466737 - RNA, 22 nt, Human
ugugugugugugugugugugug

SEQ ID NO: 466738 - RNA, 22 nt, Human
ugugugugugugugugugugug

SEQ ID NO: 466739 - RNA, 22 nt, Human
ugugugugugugugugugugug

SEQ ID NO: 466740 - RNA, 24 nt, Human
uuaaacucaguucauccugcaaaa

SEQ ID NO: 466741 - RNA, 21 nt, Human
uuaucugugggaauuguccuc

SEQ ID NO: 466742 - RNA, 20 nt, Human
uucaaaacacagugcaucau

SEQ ID NO: 466743 - RNA, 22 nt, Human
uucacacaucaccuagagucuc

SEQ ID NO: 466744 - RNA, 21 nt, Human
uucauccuaggaagagaaaca

SEQ ID NO: 466745 - RNA, 22 nt, Human
uucauugucuugguguccaucu

SEQ ID NO: 466746 - RNA, 18 nt, Human
uuccaacugaaaacugga

SEQ ID NO: 466747 - RNA, 20 nt, Human
uuguccuugaauuuguuucc

SEQ ID NO: 466748 - RNA, 21 nt, Human
uuuagcaagacuugugcuggc

SEQ ID NO: 466749 - RNA, 21 nt, Human
uuugaccaaaaaaccagaucu

SEQ ID NO: 466750 - RNA, 20 nt, Human
uuugcuaagauuccagucca

SEQ ID NO: 466751 - RNA, 26 nt, Human
uuuuuugucaaaucucaucucuguuc

SEQ ID NO: 466752 - RNA, 22 nt, Human
aaaaagaaacaaauuuccaccu

SEQ ID NO: 466753 - RNA, 18 nt, Human
aaacaaauuuccaccucu

SEQ ID NO: 466754 - RNA, 24 nt, Human
aaaguccugggauuauaggcauga

SEQ ID NO: 466755 - RNA, 27 nt, Human
acaaacuuaaaaaaagaaacaaauuuc

SEQ ID NO: 466756 - RNA, 22 nt, Human
accucuucccugucuccuguua

SEQ ID NO: 466757 - RNA, 22 nt, Human
accuuggccccucccucuuucc

SEQ ID NO: 466758 - RNA, 24 nt, Human
acgauguuuugccauguuggucag

SEQ ID NO: 466759 - RNA, 25 nt, Human
acucuguugcccaggcuggagugca

SEQ ID NO: 466760 - RNA, 22 nt, Human
acugcaaccuccaccuccuggg

SEQ ID NO: 466761 - RNA, 19 nt, Human
acuugcagagccuuuugcu

SEQ ID NO: 466762 - RNA, 21 nt, Human
agaaccgcucacucgaccccc

SEQ ID NO: 466763 - RNA, 19 nt, Human
agacgauguuuugccaugu

SEQ ID NO: 466764 - RNA, 21 nt, Human
agagugugcacauaagcaaaa

SEQ ID NO: 466765 - RNA, 18 nt, Human
agcggcagcagccgggca

SEQ ID NO: 466766 - RNA, 18 nt, Human
agcgggccugcaaaagau

SEQ ID NO: 466767 - RNA, 21 nt, Human
aggcaugagcuaccacauccc

SEQ ID NO: 466768 - RNA, 25 nt, Human
aggcuggagugcaguggcaggaucu

SEQ ID NO: 466769 - RNA, 21 nt, Human
agggaggugagaaguuggaaa

SEQ ID NO: 466770 - RNA, 18 nt, Human
aguagcugggauuacagg

SEQ ID NO: 466771 - RNA, 23 nt, Human
agugcaguggcaggaucucagcu

SEQ ID NO: 466772 - RNA, 18 nt, Human
aucucauucauugagaag

SEQ ID NO: 466773 - RNA, 24 nt, Human
augauccguccaccucagcuuccc

SEQ ID NO: 466774 - RNA, 24 nt, Human
auucuguauuaucuuccagccuca

SEQ ID NO: 466775 - RNA, 24 nt, Human
caaaguccugggauuauaggcaug

SEQ ID NO: 466776 - RNA, 20 nt, Human
caaccuccaccuccuggguu

SEQ ID NO: 466777 - RNA, 23 nt, Human
caaccuccaccuccuggguucaa

SEQ ID NO: 466778 - RNA, 24 nt, Human
caccucagcuucccaaaguccugg

SEQ ID NO: 466779 - RNA, 24 nt, Human
cacucuguugcccaggcuggagug

SEQ ID NO: 466780 - RNA, 21 nt, Human
cacuugcagagccuuuugcug

SEQ ID NO: 466781 - RNA, 19 nt, Human
cagcggcagcagccgggca

SEQ ID NO: 466782 - RNA, 21 nt, Human
cagcuaacugcaaccuccacc

SEQ ID NO: 466783 - RNA, 24 nt, Human
cagcuucuuaagcccccagauccc

SEQ ID NO: 466784 - RNA, 21 nt, Human
caggcgcccaacaccacgccu

SEQ ID NO: 466785 - RNA, 25 nt, Human
caggggcguccggagcaaagaagcu

SEQ ID NO: 466786 - RNA, 27 nt, Human
caguagcugggauuacaggcgcccaac

SEQ ID NO: 466787 - RNA, 22 nt, Human
caucccgccagcaccuggcacu

SEQ ID NO: 466788 - RNA, 24 nt, Human
cauguuggucaggcuggucuugaa

SEQ ID NO: 466789 - RNA, 22 nt, Human
cauucuguauuaucuuccagcc

SEQ ID NO: 466790 - RNA, 18 nt, Human
ccaaaguccugggauuau

SEQ ID NO: 466791 - RNA, 24 nt, Human
ccaaaguccugggauuauaggcau

SEQ ID NO: 466792 - RNA, 19 nt, Human
ccaacaccacgccugucua

SEQ ID NO: 466793 - RNA, 24 nt, Human
ccaccuccuggguucaagcgauuc

SEQ ID NO: 466794 - RNA, 21 nt, Human
ccaguagcugggauuacaggc

SEQ ID NO: 466795 - RNA, 19 nt, Human
ccauguuggucaggcuggu

SEQ ID NO: 466796 - RNA, 21 nt, Human
ccauguuggucaggcuggucu

SEQ ID NO: 466797 - RNA, 21 nt, Human
ccauguuggucaggcuggucu

SEQ ID NO: 466798 - RNA, 18 nt, Human
cccaacaccacgccuguc

SEQ ID NO: 466799 - RNA, 22 nt, Human
cccaacaccacgccugucuaau

SEQ ID NO: 466800 - RNA, 23 nt, Human
cccaguagcugggauuacaggcg

SEQ ID NO: 466801 - RNA, 23 nt, Human
ccccagccuacaguugugggguc

SEQ ID NO: 466802 - RNA, 23 nt, Human
ccccaguagcugggauuacaggc

SEQ ID NO: 466803 - RNA, 25 nt, Human
cccccagccuacaguuguggggucu

SEQ ID NO: 466804 - RNA, 18 nt, Human
cccucgcggcugcccgcc

SEQ ID NO: 466805 - RNA, 22 nt, Human
ccgcgucccggcuuuccucagc

SEQ ID NO: 466806 - RNA, 19 nt, Human
ccggagcaaagaagcucuc

SEQ ID NO: 466807 - RNA, 30 nt, Human
ccuaaaaacacaaacuuaaaaaaagaaaca

SEQ ID NO: 466808 - RNA, 19 nt, Human
ccuccaccuccuggguuca

SEQ ID NO: 466809 - RNA, 24 nt, Human
ccuccuggguucaagcgauucucc

SEQ ID NO: 466810 - RNA, 24 nt, Human
ccugaccucaaaugauccguccac

SEQ ID NO: 466811 - RNA, 23 nt, Human
ccugggacauucuguauuaucuu

SEQ ID NO: 466812 - RNA, 24 nt, Human
cgauguuuugccauguuggucagg

SEQ ID NO: 466813 - RNA, 21 nt, Human
cgccucagccuccccaguagc

SEQ ID NO: 466814 - RNA, 24 nt, Human
cgccucagccuccccaguagcugg

SEQ ID NO: 466815 - RNA, 23 nt, Human
cggcggggcuccgcgucccggcu

SEQ ID NO: 466816 - RNA, 27 nt, Human
cgucggccccagccucgugccgguucc

SEQ ID NO: 466817 - RNA, 24 nt, Human
cucaaaugauccguccaccucagc

SEQ ID NO: 466818 - RNA, 24 nt, Human
cucacucuguugcccaggcuggag

SEQ ID NO: 466819 - RNA, 23 nt, Human
cucagccuccccaguagcuggga

SEQ ID NO: 466820 - RNA, 21 nt, Human
cucagcuucccaaaguccugg

SEQ ID NO: 466821 - RNA, 21 nt, Human
cuccuggguucaagcgauucu

SEQ ID NO: 466822 - RNA, 18 nt, Human
cugcaaccuccaccuccu

SEQ ID NO: 466823 - RNA, 24 nt, Human
cugcaaccuccaccuccuggguuc

SEQ ID NO: 466824 - RNA, 21 nt, Human
cugcuagaauguaagcugcau

SEQ ID NO: 466825 - RNA, 23 nt, Human
cuguauuaucuuccagccucacg

SEQ ID NO: 466826 - RNA, 19 nt, Human
cuguugcccaggcuggagu

SEQ ID NO: 466827 - RNA, 25 nt, Human
cuuccagccucacgccucaugccuc

SEQ ID NO: 466828 - RNA, 24 nt, Human
cuucuuaagcccccagaucccugc

SEQ ID NO: 466829 - RNA, 18 nt, Human
cuuugaucuacauggagg

SEQ ID NO: 466830 - RNA, 19 nt, Human
cuuugcacuugcagagccu

SEQ ID NO: 466831 - RNA, 19 nt, Human
cuuuugcuggagaccucuu

SEQ ID NO: 466832 - RNA, 22 nt, Human
gaaccgcucacucgacccccca

SEQ ID NO: 466833 - RNA, 22 nt, Human
gaacucagcucaaaaauggaaa

SEQ ID NO: 466834 - RNA, 24 nt, Human
gaccucaaaugauccguccaccuc

SEQ ID NO: 466835 - RNA, 19 nt, Human
gacuugacucaugcaauga

SEQ ID NO: 466836 - RNA, 26 nt, Human
gagcuaccacaucccgccagcaccug

SEQ ID NO: 466837 - RNA, 20 nt, Human
gaggaggugagccugaggcu

SEQ ID NO: 466838 - RNA, 19 nt, Human
gaugcacgugcauauccug

SEQ ID NO: 466839 - RNA, 23 nt, Human
gauguuuugccauguuggucagg

SEQ ID NO: 466840 - RNA, 19 nt, Human
gauuauaggcaugagcuac

SEQ ID NO: 466841 - RNA, 21 nt, Human
gauuauaggcaugagcuacca

SEQ ID NO: 466842 - RNA, 21 nt, Human
gauucucccgccucagccucc

SEQ ID NO: 466843 - RNA, 20 nt, Human
gcagcuucuuaagcccccag

SEQ ID NO: 466844 - RNA, 20 nt, Human
gccauguuggucaggcuggu

SEQ ID NO: 466845 - RNA, 19 nt, Human
gcccaggcuggagugcagu

SEQ ID NO: 466846 - RNA, 23 nt, Human
gccuacaguuguggggucuugcu

SEQ ID NO: 466847 - RNA, 20 nt, Human
gccugaggcuagaaccgcuc

SEQ ID NO: 466848 - RNA, 24 nt, Human
gcgauucucccgccucagccuccc

SEQ ID NO: 466849 - RNA, 23 nt, Human
gcggcagcagccgggcagagcgu

SEQ ID NO: 466850 - RNA, 18 nt, Human
gcuaccacaucccgccag

SEQ ID NO: 466851 - RNA, 24 nt, Human
gcucaagucuguggccgacuugac

SEQ ID NO: 466852 - RNA, 23 nt, Human
gcuggucuugaacuccugaccuc

SEQ ID NO: 466853 - RNA, 24 nt, Human
ggcuggucuugaacuccugaccuc

SEQ ID NO: 466854 - RNA, 19 nt, Human
ggucuugaacuccugaccu

SEQ ID NO: 466855 - RNA, 25 nt, Human
ggucuuugcacuugcagagccuuuu

SEQ ID NO: 466856 - RNA, 27 nt, Human
uaaaaacacaaacuuaaaaaaagaaac

SEQ ID NO: 466857 - RNA, 24 nt, Human
uaacugcaaccuccaccuccuggg

SEQ ID NO: 466858 - RNA, 27 nt, Human
uaacugcaaccuccaccuccuggguuc

SEQ ID NO: 466859 - RNA, 21 nt, Human
uaagcccaaguccagaagcuu

SEQ ID NO: 466860 - RNA, 21 nt, Human
uaauuuuuguauuuuuuuaga

SEQ ID NO: 466861 - RNA, 23 nt, Human
uaccuuggccccucccucuuucc

SEQ ID NO: 466862 - RNA, 19 nt, Human
ucaagcgauucucccgccu

SEQ ID NO: 466863 - RNA, 20 nt, Human
ucagccuccccaguagcugg

SEQ ID NO: 466864 - RNA, 23 nt, Human
ucagcggcagcagccgggcagag

SEQ ID NO: 466865 - RNA, 18 nt, Human
ucagcuucccaaaguccu

SEQ ID NO: 466866 - RNA, 19 nt, Human
ucagcuucccaaaguccug

SEQ ID NO: 466867 - RNA, 21 nt, Human
uccacugcugcaucuuucaga

SEQ ID NO: 466868 - RNA, 24 nt, Human
ucccaaaguccugggauuauaggc

SEQ ID NO: 466869 - RNA, 24 nt, Human
uccccaguagcugggauuacaggc

SEQ ID NO: 466870 - RNA, 21 nt, Human
uccguccaccucagcuuccca

SEQ ID NO: 466871 - RNA, 18 nt, Human
uccugaccucaaaugauc

SEQ ID NO: 466872 - RNA, 21 nt, Human
uccuggguucaagcgauucuc

SEQ ID NO: 466873 - RNA, 24 nt, Human
uccuggguucaagcgauucucccg

SEQ ID NO: 466874 - RNA, 23 nt, Human
ucucacucuguugcccaggcugg

SEQ ID NO: 466875 - RNA, 24 nt, Human
ucucacucuguugcccaggcugga

SEQ ID NO: 466876 - RNA, 26 nt, Human
ucucacucuguugcccaggcuggagu

SEQ ID NO: 466877 - RNA, 27 nt, Human
ucucacucuguugcccaggcuggagug

SEQ ID NO: 466878 - RNA, 23 nt, Human
ucucagcuaacugcaaccuccac

SEQ ID NO: 466879 - RNA, 25 nt, Human
ucucccgccucagccuccccaguag

SEQ ID NO: 466880 - RNA, 24 nt, Human
ucuguaagcccaaguccagaagcu

SEQ ID NO: 466881 - RNA, 18 nt, Human
ucuguugcccaggcugga

SEQ ID NO: 466882 - RNA, 24 nt, Human
ucuguugcccaggcuggagugcag

SEQ ID NO: 466883 - RNA, 19 nt, Human
ucuugaacuccugaccuca

SEQ ID NO: 466884 - RNA, 22 nt, Human
ugaauaaauagaugguuggaug

SEQ ID NO: 466885 - RNA, 19 nt, Human
ugaccucaaaugauccguc

SEQ ID NO: 466886 - RNA, 20 nt, Human
ugagaaguuggaaauagcuu

SEQ ID NO: 466887 - RNA, 21 nt, Human
ugagaaguuggaaauagcuug

SEQ ID NO: 466888 - RNA, 22 nt, Human
ugagaaguuggaaauagcuugu

SEQ ID NO: 466889 - RNA, 21 nt, Human
ugaguugucaacuuaaaaucu

SEQ ID NO: 466890 - RNA, 23 nt, Human
ugauccguccaccucagcuuccc

SEQ ID NO: 466891 - RNA, 22 nt, Human
ugcacauaagcaaaaauuauuc

SEQ ID NO: 466892 - RNA, 24 nt, Human
ugccauguuggucaggcuggucuu

SEQ ID NO: 466893 - RNA, 18 nt, Human
ugcccaggcuggagugca

SEQ ID NO: 466894 - RNA, 21 nt, Human
ugcccaggcuggagugcagug

SEQ ID NO: 466895 - RNA, 22 nt, Human
ugcccaggcuggagugcagugg

SEQ ID NO: 466896 - RNA, 24 nt, Human
ugcccaggcuggagugcaguggca

SEQ ID NO: 466897 - RNA, 20 nt, Human
ugccuggaggaccgccgugg

SEQ ID NO: 466898 - RNA, 21 nt, Human
uggaaauuuuccagguacuga

SEQ ID NO: 466899 - RNA, 23 nt, Human
uggagugcaguggcaggaucuca

SEQ ID NO: 466900 - RNA, 24 nt, Human
uggagugcaguggcaggaucucag

SEQ ID NO: 466901 - RNA, 20 nt, Human
uggcaacaccugugcuuggg

SEQ ID NO: 466902 - RNA, 24 nt, Human
uggcaacaccugugcuuggggugc

SEQ ID NO: 466903 - RNA, 24 nt, Human
uggcaggaucucagcuaacugcaa

SEQ ID NO: 466904 - RNA, 19 nt, Human
ugggauuacaggcgcccaa

SEQ ID NO: 466905 - RNA, 22 nt, Human
ugggauuacaggcgcccaacac

SEQ ID NO: 466906 - RNA, 24 nt, Human
ugggauuacaggcgcccaacacca

SEQ ID NO: 466907 - RNA, 18 nt, Human
ugggauuauaggcaugag

SEQ ID NO: 466908 - RNA, 19 nt, Human
ugggauuauaggcaugagc

SEQ ID NO: 466909 - RNA, 22 nt, Human
ugggauuauaggcaugagcuac

SEQ ID NO: 466910 - RNA, 23 nt, Human
ugggauuauaggcaugagcuacc

SEQ ID NO: 466911 - RNA, 24 nt, Human
ugggauuauaggcaugagcuacca

SEQ ID NO: 466912 - RNA, 24 nt, Human
uggucaggcuggucuugaacuccu

SEQ ID NO: 466913 - RNA, 22 nt, Human
ugucaaggucuuugcacuugcc

SEQ ID NO: 466914 - RNA, 20 nt, Human
ugucuuguccacugcugcau

SEQ ID NO: 466915 - RNA, 26 nt, Human
ugucuuguccacugcugcaucuuuca

SEQ ID NO: 466916 - RNA, 21 nt, Human
ugugcacauaagcaaaaauua

SEQ ID NO: 466917 - RNA, 23 nt, Human
uucaagcgauucucccgccucag

SEQ ID NO: 466918 - RNA, 24 nt, Human
uucaagcgauucucccgccucagc

SEQ ID NO: 466919 - RNA, 20 nt, Human
uucccugucuccuguuauuc

SEQ ID NO: 466920 - RNA, 20 nt, Human
uugcagagccuuuugcugga

SEQ ID NO: 466921 - RNA, 21 nt, Human
uugccauguuggucaggcugg

SEQ ID NO: 466922 - RNA, 24 nt, Human
uugccauguuggucaggcuggucu

SEQ ID NO: 466923 - RNA, 24 nt, Human
uugcccaggcuggagugcaguggc

SEQ ID NO: 466924 - RNA, 22 nt, Human
uugcuggagaccucuuuucgag

SEQ ID NO: 466925 - RNA, 21 nt, Human
uuuugagauagucucacucug

SEQ ID NO: 466926 - RNA, 19 nt, Human
uuuuuguauuuuuuuagac

SEQ ID NO: 466927 - RNA, 22 nt, Human
uuuuuuuuuuuuuuuuuuuggg

SEQ ID NO: 466928 - RNA, 26 nt, Human
uuuuuuuuuuuuuuuuuuugguuuuu

SEQ ID NO: 466929 - RNA, 19 nt, Human
aaccucaaccuccugaccc

SEQ ID NO: 466930 - RNA, 20 nt, Human
aaccuccugaccccacaucc

SEQ ID NO: 466931 - RNA, 18 nt, Human
acauuacuggucaagcac

SEQ ID NO: 466932 - RNA, 22 nt, Human
accacauuacuggucaagcacu

SEQ ID NO: 466933 - RNA, 21 nt, Human
accucaaccuccugaccccac

SEQ ID NO: 466934 - RNA, 24 nt, Human
accucaaccuccugaccccacauc

SEQ ID NO: 466935 - RNA, 19 nt, Human
cacauccgaaguugggggc

SEQ ID NO: 466936 - RNA, 19 nt, Human
cagcuacaagucuucccca

SEQ ID NO: 466937 - RNA, 23 nt, Human
ccccagcccugucauaucacuac

SEQ ID NO: 466938 - RNA, 18 nt, Human
ccuguucuugccccagcc

SEQ ID NO: 466939 - RNA, 24 nt, Human
cuaauaaggcagcuagugccccug

SEQ ID NO: 466940 - RNA, 23 nt, Human
cucaacuuuaauguuccucagau

SEQ ID NO: 466941 - RNA, 19 nt, Human
cuccaggagcguggucucc

SEQ ID NO: 466942 - RNA, 23 nt, Human
ggaacauacacaaaauuacaacc

SEQ ID NO: 466943 - RNA, 19 nt, Human
ggagggcacuaaauuagcu

SEQ ID NO: 466944 - RNA, 22 nt, Human
uaauagugaaccucaaccuccu

SEQ ID NO: 466945 - RNA, 20 nt, Human
uacauccgauucucucaaaa

SEQ ID NO: 466946 - RNA, 23 nt, Human
uagaaaaaaauauuuccaaccug

SEQ ID NO: 466947 - RNA, 19 nt, Human
ucagaguuuuaauguauuu

SEQ ID NO: 466948 - RNA, 24 nt, Human
ucuucugagccccugaauugucca

SEQ ID NO: 466949 - RNA, 18 nt, Human
ugagaagacuauuuugug

SEQ ID NO: 466950 - RNA, 20 nt, Human
ugagccccugaauuguccaa

SEQ ID NO: 466951 - RNA, 27 nt, Human
uugccacaguuuuaucuaaagccaggu

SEQ ID NO: 466952 - RNA, 21 nt, Human
cagcggacagggugcuggggc

SEQ ID NO: 466953 - RNA, 18 nt, Human
ccccuggcccucccgggc

SEQ ID NO: 466954 - RNA, 26 nt, Human
cccgcgcugcggcaggggcggcgggg

SEQ ID NO: 466955 - RNA, 24 nt, Human
ccgcccgcgcugcggcaggggcug

SEQ ID NO: 466956 - RNA, 21 nt, Human
ccgggcgccucgugccgaauu

SEQ ID NO: 466957 - RNA, 18 nt, Human
ccgggcugcgggcugcgg

SEQ ID NO: 466958 - RNA, 22 nt, Human
ccucccgggcucuucucuggcc

SEQ ID NO: 466959 - RNA, 23 nt, Human
ccuggcugggggcggcggucgag

SEQ ID NO: 466960 - RNA, 22 nt, Human
cgccccuggcccucccgggcuc

SEQ ID NO: 466961 - RNA, 21 nt, Human
cgcccggaggccguggcgcuc

SEQ ID NO: 466962 - RNA, 18 nt, Human
cgggggcuccggcugcuu

SEQ ID NO: 466963 - RNA, 18 nt, Human
cuccgggcugcgggcugc

SEQ ID NO: 466964 - RNA, 21 nt, Human
cugcgggcugcgggcugcagg

SEQ ID NO: 466965 - RNA, 21 nt, Human
gagcccgcgaucuggcuccgg

SEQ ID NO: 466966 - RNA, 24 nt, Human
gcccggaggccguggcgcucgcgc

SEQ ID NO: 466967 - RNA, 24 nt, Human
gcugggggcggcggucgagucggg

SEQ ID NO: 466968 - RNA, 19 nt, Human
ggcugcaggcugcaggcug

SEQ ID NO: 466969 - RNA, 19 nt, Human
ggcugcgggcugcaggcug

SEQ ID NO: 466970 - RNA, 18 nt, Human
ucccggcucugaggcggc

SEQ ID NO: 466971 - RNA, 21 nt, Human
ugccgggcugcgcgcugaccg

SEQ ID NO: 466972 - RNA, 23 nt, Human
ugccgggcugcgcgcugaccgcc

SEQ ID NO: 466973 - RNA, 18 nt, Human
ugcgggugccgggcugcg

SEQ ID NO: 466974 - RNA, 21 nt, Human
ugcgggugccgggcugcgcgc

SEQ ID NO: 466975 - RNA, 18 nt, Human
uggcagaguccaggcgcg

SEQ ID NO: 466976 - RNA, 18 nt, Human
uuuuuuuuuuuuuugccu

SEQ ID NO: 466977 - RNA, 20 nt, Human
uuuuuuuuuuuuuugccugg

SEQ ID NO: 466978 - RNA, 18 nt, Human
uuuuuuuuuuuuuuuuug

SEQ ID NO: 466979 - RNA, 21 nt, Human
uuuuuuuuuuuuuuuuugccu

SEQ ID NO: 466980 - RNA, 24 nt, Human
uuuuuuuuuuuuuuuuugccuggg

SEQ ID NO: 466981 - RNA, 18 nt, Human
aaaauagguccaagagag

SEQ ID NO: 466982 - RNA, 24 nt, Human
aaaugcccccacacuccugggucc

SEQ ID NO: 466983 - RNA, 24 nt, Human
aacagagcaagacucugucucaag

SEQ ID NO: 466984 - RNA, 23 nt, Human
aagaaucgcuugaacccgggagg

SEQ ID NO: 466985 - RNA, 21 nt, Human
aauauggugaaaccccaucuc

SEQ ID NO: 466986 - RNA, 24 nt, Human
aaucgcuugaacccgggaggcaga

SEQ ID NO: 466987 - RNA, 18 nt, Human
aauuagccaggcauggua

SEQ ID NO: 466988 - RNA, 21 nt, Human
acagaacccuugaccuggcca

SEQ ID NO: 466989 - RNA, 24 nt, Human
acagagcaagacucugucucaaga

SEQ ID NO: 466990 - RNA, 24 nt, Human
accacugcacucuagccugggcaa

SEQ ID NO: 466991 - RNA, 19 nt, Human
accagagaucaccccccgg

SEQ ID NO: 466992 - RNA, 24 nt, Human
accagcugcaccugaacacccaga

SEQ ID NO: 466993 - RNA, 19 nt, Human
acccagaacacaggccccc

SEQ ID NO: 466994 - RNA, 23 nt, Human
acccagaacacaggcccccauga

SEQ ID NO: 466995 - RNA, 24 nt, Human
accccaucucuacuaaaaauacaa

SEQ ID NO: 466996 - RNA, 20 nt, Human
acccccaggcccagcagagg

SEQ ID NO: 466997 - RNA, 22 nt, Human
accugccccugccaccgggacc

SEQ ID NO: 466998 - RNA, 24 nt, Human
acugcacucuagccugggcaacag

SEQ ID NO: 466999 - RNA, 24 nt, Human
acugcacucuagccugggcaacag

SEQ ID NO: 467000 - RNA, 25 nt, Human
agaagggcaggccaccuggguuugg

SEQ ID NO: 467001 - RNA, 22 nt, Human
agagaucaccccccggggcacc

SEQ ID NO: 467002 - RNA, 22 nt, Human
agagguugcagugaacugagau

SEQ ID NO: 467003 - RNA, 24 nt, Human
agagguugcagugaacugagauug

SEQ ID NO: 467004 - RNA, 22 nt, Human
agcaagagaagagggggaaggg

SEQ ID NO: 467005 - RNA, 21 nt, Human
agcaggcgccuguaaucccag

SEQ ID NO: 467006 - RNA, 21 nt, Human
agcauuuugagaggccgaggc

SEQ ID NO: 467007 - RNA, 26 nt, Human
agcauuuugagaggccgaggcgggug

SEQ ID NO: 467008 - RNA, 23 nt, Human
agccaggcaugguagcaggcgcc

SEQ ID NO: 467009 - RNA, 19 nt, Human
agccuggccaauaugguga

SEQ ID NO: 467010 - RNA, 22 nt, Human
agccuggccaauauggugaaac

SEQ ID NO: 467011 - RNA, 24 nt, Human
agccuggccaauauggugaaaccc

SEQ ID NO: 467012 - RNA, 24 nt, Human
agccugggcaacagagcaagacuc

SEQ ID NO: 467013 - RNA, 18 nt, Human
agcuccccagaccugcug

SEQ ID NO: 467014 - RNA, 23 nt, Human
aggagcagaaauaggcugggagg

SEQ ID NO: 467015 - RNA, 24 nt, Human
aggcacgguggcucacaccuguaa

SEQ ID NO: 467016 - RNA, 24 nt, Human
aggcagaagaaucgcuugaacccg

SEQ ID NO: 467017 - RNA, 20 nt, Human
aggcagagguugcagugaac

SEQ ID NO: 467018 - RNA, 24 nt, Human
aggcagagguugcagugaacugag

SEQ ID NO: 467019 - RNA, 21 nt, Human
aggcagcaccaggccggagga

SEQ ID NO: 467020 - RNA, 24 nt, Human
aggcaggggcaggaucaggcaggg

SEQ ID NO: 467021 - RNA, 24 nt, Human
aggcaugguagcaggcgccuguaa

SEQ ID NO: 467022 - RNA, 21 nt, Human
aggccgaggcgggugggucac

SEQ ID NO: 467023 - RNA, 24 nt, Human
aggcugaggcagaagaaucgcuug

SEQ ID NO: 467024 - RNA, 20 nt, Human
auauugagaaaguccuagaa

SEQ ID NO: 467025 - RNA, 23 nt, Human
aucccagccacuagggaggcuga

SEQ ID NO: 467026 - RNA, 20 nt, Human
auggugaaaccccaucucua

SEQ ID NO: 467027 - RNA, 21 nt, Human
auugagaaaguccuagaaccu

SEQ ID NO: 467028 - RNA, 24 nt, Human
auugcaccacugcacucuagccug

SEQ ID NO: 467029 - RNA, 26 nt, Human
caaaugcccccacacuccuggguccu

SEQ ID NO: 467030 - RNA, 24 nt, Human
caagaccagccuggccaauauggu

SEQ ID NO: 467031 - RNA, 21 nt, Human
caaggcccuggcagagcccug

SEQ ID NO: 467032 - RNA, 24 nt, Human
caauauggugaaaccccaucucua

SEQ ID NO: 467033 - RNA, 24 nt, Human
cacaccuguaaucccagcauuuug

SEQ ID NO: 467034 - RNA, 18 nt, Human
caccaaugggcggaggcc

SEQ ID NO: 467035 - RNA, 24 nt, Human
caccacugcacucuagccugggca

SEQ ID NO: 467036 - RNA, 21 nt, Human
caccaggccggaggagggcuc

SEQ ID NO: 467037 - RNA, 19 nt, Human
caccccccaaaugccccca

SEQ ID NO: 467038 - RNA, 23 nt, Human
caccugaagucaggaguucaaga

SEQ ID NO: 467039 - RNA, 23 nt, Human
caccuguaaucccagcauuuuga

SEQ ID NO: 467040 - RNA, 18 nt, Human
caccuugauaaagccugg

SEQ ID NO: 467041 - RNA, 18 nt, Human
caccuugauaaagccugg

SEQ ID NO: 467042 - RNA, 18 nt, Human
cacuagggaggcugaggc

SEQ ID NO: 467043 - RNA, 19 nt, Human
cacuagggaggcugaggca

SEQ ID NO: 467044 - RNA, 21 nt, Human
cacuagggaggcugaggcaga

SEQ ID NO: 467045 - RNA, 19 nt, Human
cacuccuggguccucuccu

SEQ ID NO: 467046 - RNA, 23 nt, Human
cacucuagccugggcaacagagc

SEQ ID NO: 467047 - RNA, 18 nt, Human
cacugcacucuagccugg

SEQ ID NO: 467048 - RNA, 19 nt, Human
cacugcacucuagccuggg

SEQ ID NO: 467049 - RNA, 21 nt, Human
cacugcacucuagccugggca

SEQ ID NO: 467050 - RNA, 23 nt, Human
cacugcacucuagccugggcaac

SEQ ID NO: 467051 - RNA, 24 nt, Human
cacugcacucuagccugggcaaca

SEQ ID NO: 467052 - RNA, 24 nt, Human
cagaacacaggcccccaugagccg

SEQ ID NO: 467053 - RNA, 23 nt, Human
cagacccccaggcccagcagagg

SEQ ID NO: 467054 - RNA, 22 nt, Human
cagagaucaccccccggggcac

SEQ ID NO: 467055 - RNA, 24 nt, Human
cagcauuuugagaggccgaggcgg

SEQ ID NO: 467056 - RNA, 26 nt, Human
cagccaagauagaagcagggucuccc

SEQ ID NO: 467057 - RNA, 18 nt, Human
cagcugcaccugaacacc

SEQ ID NO: 467058 - RNA, 23 nt, Human
caggcaggggcaggaucaggcag

SEQ ID NO: 467059 - RNA, 21 nt, Human
caucuggccauggagccacgg

SEQ ID NO: 467060 - RNA, 19 nt, Human
ccaaaugcccccacacucc

SEQ ID NO: 467061 - RNA, 24 nt, Human
ccaccuggguuuggaaggcuaggg

SEQ ID NO: 467062 - RNA, 20 nt, Human
ccacugcacucuagccuggg

SEQ ID NO: 467063 - RNA, 21 nt, Human
ccacugcacucuagccugggc

SEQ ID NO: 467064 - RNA, 23 nt, Human
ccacugcacucuagccugggcaa

SEQ ID NO: 467065 - RNA, 24 nt, Human
ccacugcacucuagccugggcaac

SEQ ID NO: 467066 - RNA, 22 nt, Human
ccagcaccugagcucuccagcc

SEQ ID NO: 467067 - RNA, 25 nt, Human
ccagcaccugagcucuccagccggg

SEQ ID NO: 467068 - RNA, 20 nt, Human
cccaaaugcccccacacucc

SEQ ID NO: 467069 - RNA, 20 nt, Human
cccagacccccaggcccagc

SEQ ID NO: 467070 - RNA, 23 nt, Human
cccagacccccaggcccagcaga

SEQ ID NO: 467071 - RNA, 21 nt, Human
cccaggaacaugugagaaaca

SEQ ID NO: 467072 - RNA, 22 nt, Human
cccaggaacaugugagaaacac

SEQ ID NO: 467073 - RNA, 18 nt, Human
ccccacacuccugggucc

SEQ ID NO: 467074 - RNA, 20 nt, Human
ccccaucagcaucacccagg

SEQ ID NO: 467075 - RNA, 25 nt, Human
cccccaaaugcccccacacuccugg

SEQ ID NO: 467076 - RNA, 21 nt, Human
cccccacacuccuggguccuc

SEQ ID NO: 467077 - RNA, 23 nt, Human
ccccccggggcaccucagccccc

SEQ ID NO: 467078 - RNA, 20 nt, Human
cccccggggcaccucagccc

SEQ ID NO: 467079 - RNA, 22 nt, Human
cccggggcaccucagccccaga

SEQ ID NO: 467080 - RNA, 23 nt, Human
cccugcaggggacgggaccagca

SEQ ID NO: 467081 - RNA, 19 nt, Human
cccugccaccgggaccccc

SEQ ID NO: 467082 - RNA, 18 nt, Human
ccgccugggcuggacugg

SEQ ID NO: 467083 - RNA, 22 nt, Human
ccggugagaggggcaugagggg

SEQ ID NO: 467084 - RNA, 22 nt, Human
ccucacccuucccgggacccag

SEQ ID NO: 467085 - RNA, 21 nt, Human
ccucuggggagaagggcaggc

SEQ ID NO: 467086 - RNA, 28 nt, Human
ccugaacacccagaacacaggcccccag

SEQ ID NO: 467087 - RNA, 23 nt, Human
ccugaagucaggaguucaagacc

SEQ ID NO: 467088 - RNA, 22 nt, Human
ccuggcacuuggucagacccug

SEQ ID NO: 467089 - RNA, 23 nt, Human
ccuggccaauauggugaaacccc

SEQ ID NO: 467090 - RNA, 24 nt, Human
ccuggccaauauggugaaacccca

SEQ ID NO: 467091 - RNA, 22 nt, Human
ccugggcaacagagcaagacuc

SEQ ID NO: 467092 - RNA, 19 nt, Human
ccuggggcuuccguggccc

SEQ ID NO: 467093 - RNA, 19 nt, Human
cgaggcgggugggucaccu

SEQ ID NO: 467094 - RNA, 18 nt, Human
cgccugggcuggacuggc

SEQ ID NO: 467095 - RNA, 23 nt, Human
cgccuguaaucccagccacuagg

SEQ ID NO: 467096 - RNA, 24 nt, Human
cgccuguaaucccagccacuaggg

SEQ ID NO: 467097 - RNA, 22 nt, Human
cggaaguucagaugacuuuggu

SEQ ID NO: 467098 - RNA, 22 nt, Human
cggcugugagcaccagagauca

SEQ ID NO: 467099 - RNA, 19 nt, Human
cgggagggcggcccagagg

SEQ ID NO: 467100 - RNA, 24 nt, Human
cgggugggucaccugaagucagga

SEQ ID NO: 467101 - RNA, 23 nt, Human
cuagaaccugguugcuccagugu

SEQ ID NO: 467102 - RNA, 24 nt, Human
cuauguacacaucucuccccgccu

SEQ ID NO: 467103 - RNA, 21 nt, Human
cucacaccuguaaucccagca

SEQ ID NO: 467104 - RNA, 21 nt, Human
cucacaccuguaaucccagca

SEQ ID NO: 467105 - RNA, 21 nt, Human
cugagucagaaucugcauuua

SEQ ID NO: 467106 - RNA, 21 nt, Human
cugcugagucagaaucugcau

SEQ ID NO: 467107 - RNA, 21 nt, Human
cugcuucacagcagugcaaac

SEQ ID NO: 467108 - RNA, 19 nt, Human
cuggcuccuuggcccaugu

SEQ ID NO: 467109 - RNA, 21 nt, Human
cugggaggaggcaggaagggg

SEQ ID NO: 467110 - RNA, 19 nt, Human
cugggucugcuuuaaaacc

SEQ ID NO: 467111 - RNA, 20 nt, Human
cuucgggggccacuucaccc

SEQ ID NO: 467112 - RNA, 23 nt, Human
cuucgggggccacuucacccccc

SEQ ID NO: 467113 - RNA, 24 nt, Human
cuuggcccaugucugcaauacuaa

SEQ ID NO: 467114 - RNA, 22 nt, Human
cuuguugcuggcccagaccccc

SEQ ID NO: 467115 - RNA, 19 nt, Human
gaacacccagaacacaggc

SEQ ID NO: 467116 - RNA, 19 nt, Human
gaaccugguugcuccagug

SEQ ID NO: 467117 - RNA, 20 nt, Human
gaagaaacggaaggccugag

SEQ ID NO: 467118 - RNA, 21 nt, Human
gaagggcaggccaccuggguu

SEQ ID NO: 467119 - RNA, 21 nt, Human
gagcugcccacccgggccuua

SEQ ID NO: 467120 - RNA, 25 nt, Human
gaggcgggugggucaccugaaguca

SEQ ID NO: 467121 - RNA, 24 nt, Human
gcacucuagccugggcaacagagc

SEQ ID NO: 467122 - RNA, 20 nt, Human
gcagcuggaggcccugggga

SEQ ID NO: 467123 - RNA, 21 nt, Human
gcaggccaccuggguuuggaa

SEQ ID NO: 467124 - RNA, 19 nt, Human
gcaguggugcaggccugag

SEQ ID NO: 467125 - RNA, 24 nt, Human
gccaauauggugaaaccccaucuc

SEQ ID NO: 467126 - RNA, 20 nt, Human
gccaccgggaccccguccca

SEQ ID NO: 467127 - RNA, 26 nt, Human
gcccuggcagagcccugggaggaggc

SEQ ID NO: 467128 - RNA, 22 nt, Human
gccugaggucccuccuuugcuc

SEQ ID NO: 467129 - RNA, 22 nt, Human
gcguggcggggucaggcagggg

SEQ ID NO: 467130 - RNA, 25 nt, Human
gcucuaaagccuggggcuuccgugg

SEQ ID NO: 467131 - RNA, 18 nt, Human
gcugcaguggugcaggcc

SEQ ID NO: 467132 - RNA, 18 nt, Human
ggacaccaggccacccca

SEQ ID NO: 467133 - RNA, 20 nt, Human
ggagacagcauucuuuaauc

SEQ ID NO: 467134 - RNA, 19 nt, Human
ggagcagaaauaggcuggg

SEQ ID NO: 467135 - RNA, 21 nt, Human
ggccaggcacgguggcucaca

SEQ ID NO: 467136 - RNA, 19 nt, Human
ggccucuggcuccuuggcc

SEQ ID NO: 467137 - RNA, 21 nt, Human
ggcucacaccuguaaucccag

SEQ ID NO: 467138 - RNA, 23 nt, Human
gggaaggagauaccugccccugc

SEQ ID NO: 467139 - RNA, 22 nt, Human
gggaggcugaggcagaagaauc

SEQ ID NO: 467140 - RNA, 23 nt, Human
gggcaccucagccccagagucug

SEQ ID NO: 467141 - RNA, 23 nt, Human
gggcacugggccggugagagggg

SEQ ID NO: 467142 - RNA, 20 nt, Human
gggcagagagcaccugggga

SEQ ID NO: 467143 - RNA, 20 nt, Human
ggggaccucccuggccuucc

SEQ ID NO: 467144 - RNA, 21 nt, Human
ggggcaugaggggcagagagc

SEQ ID NO: 467145 - RNA, 22 nt, Human
gggugguuuauagcacaggucu

SEQ ID NO: 467146 - RNA, 24 nt, Human
gguagcaggcgccuguaaucccag

SEQ ID NO: 467147 - RNA, 19 nt, Human
ggucaccugaagucaggag

SEQ ID NO: 467148 - RNA, 24 nt, Human
ggucaccugaagucaggaguucaa

SEQ ID NO: 467149 - RNA, 22 nt, Human
gguggaugaggaacgggaagga

SEQ ID NO: 467150 - RNA, 23 nt, Human
gguggcucacaccuguaauccca

SEQ ID NO: 467151 - RNA, 24 nt, Human
gguggcucacaccuguaaucccag

SEQ ID NO: 467152 - RNA, 19 nt, Human
guccucuccucacagaacc

SEQ ID NO: 467153 - RNA, 23 nt, Human
guggcucacaccuguaaucccag

SEQ ID NO: 467154 - RNA, 21 nt, Human
uaaaaauacaaaaauuagcca

SEQ ID NO: 467155 - RNA, 18 nt, Human
uaauggaggaccagcugc

SEQ ID NO: 467156 - RNA, 19 nt, Human
uagcacggggagcccugga

SEQ ID NO: 467157 - RNA, 22 nt, Human
uagcaggcgccuguaaucccag

SEQ ID NO: 467158 - RNA, 24 nt, Human
uagguuagcaagcuucuuaaaaua

SEQ ID NO: 467159 - RNA, 22 nt, Human
ucaccugaagucaggaguucaa

SEQ ID NO: 467160 - RNA, 23 nt, Human
ucaccugaagucaggaguucaag

SEQ ID NO: 467161 - RNA, 23 nt, Human
ucauagacugaccccaucagcau

SEQ ID NO: 467162 - RNA, 21 nt, Human
uccaaguuugagaagugcugg

SEQ ID NO: 467163 - RNA, 22 nt, Human
uccccggggaccucccuggccu

SEQ ID NO: 467164 - RNA, 22 nt, Human
uccccggggaccucccuggccu

SEQ ID NO: 467165 - RNA, 23 nt, Human
uccugcagguguuuguaaaggca

SEQ ID NO: 467166 - RNA, 20 nt, Human
uccugcuucacagcagugca

SEQ ID NO: 467167 - RNA, 18 nt, Human
ucgcuugaacccgggagg

SEQ ID NO: 467168 - RNA, 23 nt, Human
ucucuacuaaaaauacaaaaauu

SEQ ID NO: 467169 - RNA, 19 nt, Human
ugaaaccccaucucuacua

SEQ ID NO: 467170 - RNA, 18 nt, Human
ugaaugaauaaaugaacg

SEQ ID NO: 467171 - RNA, 19 nt, Human
ugagaggccgaggcgggug

SEQ ID NO: 467172 - RNA, 22 nt, Human
ugagaggccgaggcgggugggu

SEQ ID NO: 467173 - RNA, 24 nt, Human
ugagaggccgaggcggguggguca

SEQ ID NO: 467174 - RNA, 26 nt, Human
ugagaggccgaggcgggugggucacc

SEQ ID NO: 467175 - RNA, 24 nt, Human
ugagauugcaccacugcacucuag

SEQ ID NO: 467176 - RNA, 20 nt, Human
ugagcaagagaagaggggga

SEQ ID NO: 467177 - RNA, 23 nt, Human
ugagcaagagaagagggggaagg

SEQ ID NO: 467178 - RNA, 20 nt, Human
ugaggcagaagaaucgcuug

SEQ ID NO: 467179 - RNA, 24 nt, Human
ugaggcagaagaaucgcuugaacc

SEQ ID NO: 467180 - RNA, 25 nt, Human
ugaggcagaagaaucgcuugaaccc

SEQ ID NO: 467181 - RNA, 19 nt, Human
ugagggcaggggcagggcc

SEQ ID NO: 467182 - RNA, 19 nt, Human
ugaggggcagagagcaccu

SEQ ID NO: 467183 - RNA, 21 nt, Human
ugaggggcagagagcaccugg

SEQ ID NO: 467184 - RNA, 20 nt, Human
ugcaaacugagcccugcagg

SEQ ID NO: 467185 - RNA, 21 nt, Human
ugcaguggugcaggccugagc

SEQ ID NO: 467186 - RNA, 23 nt, Human
ugcucuagcuccccagaccugcu

SEQ ID NO: 467187 - RNA, 22 nt, Human
ugcuggcccagacccccaggcc

SEQ ID NO: 467188 - RNA, 22 nt, Human
uggaaggcuagggggacaccag

SEQ ID NO: 467189 - RNA, 23 nt, Human
uggccaaggcccccugggguuug

SEQ ID NO: 467190 - RNA, 24 nt, Human
uggccaauauggugaaaccccauc

SEQ ID NO: 467191 - RNA, 24 nt, Human
uggcccagacccccaggcccagcc

SEQ ID NO: 467192 - RNA, 24 nt, Human
uggccuuccugcuucacagcagug

SEQ ID NO: 467193 - RNA, 21 nt, Human
uggcucacaccuguaauccca

SEQ ID NO: 467194 - RNA, 24 nt, Human
uggcucacaccuguaaucccagca

SEQ ID NO: 467195 - RNA, 22 nt, Human
ugggagggaugauggcagccaa

SEQ ID NO: 467196 - RNA, 25 nt, Human
ugggcuggacuggccagucacugag

SEQ ID NO: 467197 - RNA, 24 nt, Human
ugggucaccugaagucaggaguuc

SEQ ID NO: 467198 - RNA, 24 nt, Human
ugguagcaggcgccuguaauccca

SEQ ID NO: 467199 - RNA, 24 nt, Human
uguugggagaauucuagaaugugg

SEQ ID NO: 467200 - RNA, 20 nt, Human
uuaaucaugcuggacggcag

SEQ ID NO: 467201 - RNA, 19 nt, Human
uugcagugaacugagauug

SEQ ID NO: 467202 - RNA, 20 nt, Human
uugcagugaacugagauugc

SEQ ID NO: 467203 - RNA, 22 nt, Human
uugcagugaacugagauugcac

SEQ ID NO: 467204 - RNA, 20 nt, Human
uuuuuuuuuuuuaagaggag

SEQ ID NO: 467205 - RNA, 20 nt, Human
uuuuuuuuuuuuuuuaagag

SEQ ID NO: 467206 - RNA, 21 nt, Human
uuuuuuuuuuuuuuuaagagg

SEQ ID NO: 467207 - RNA, 22 nt, Human
aaacacauacaccuuggcauga

SEQ ID NO: 467208 - RNA, 18 nt, Human
aaagacaggaaaagcaag

SEQ ID NO: 467209 - RNA, 22 nt, Human
aacuauuaaaaauuuaaagcag

SEQ ID NO: 467210 - RNA, 18 nt, Human
aagugugaaguggaaacc

SEQ ID NO: 467211 - RNA, 22 nt, Human
aauaaaagaaacauuuaaaaga

SEQ ID NO: 467212 - RNA, 23 nt, Human
aauaaaagaaacauuuaaaagau

SEQ ID NO: 467213 - RNA, 24 nt, Human
accaucccaccagauauuugaaaa

SEQ ID NO: 467214 - RNA, 18 nt, Human
acccccuuaaacacauac

SEQ ID NO: 467215 - RNA, 19 nt, Human
accucugcccggccgcccc

SEQ ID NO: 467216 - RNA, 19 nt, Human
agaaaugguagaucagaca

SEQ ID NO: 467217 - RNA, 24 nt, Human
aggcccaaugagcagagaggauuu

SEQ ID NO: 467218 - RNA, 19 nt, Human
augauuaguguuuuuccau

SEQ ID NO: 467219 - RNA, 25 nt, Human
caaaaaauaacuugaugaaaaauaa

SEQ ID NO: 467220 - RNA, 25 nt, Human
caaacuuucccccaaaacaugaggc

SEQ ID NO: 467221 - RNA, 24 nt, Human
caccuucuggaaccccagauucaa

SEQ ID NO: 467222 - RNA, 24 nt, Human
cagauucaaucagaguguuuacca

SEQ ID NO: 467223 - RNA, 24 nt, Human
caucuguuugcuaugcugcucauc

SEQ ID NO: 467224 - RNA, 22 nt, Human
cauguccugacucagaaggaga

SEQ ID NO: 467225 - RNA, 22 nt, Human
ccauauguucacuuuucccgga

SEQ ID NO: 467226 - RNA, 23 nt, Human
cccauauuuaugagaaagcuauu

SEQ ID NO: 467227 - RNA, 25 nt, Human
ccccagauucaaucagaguguuuac

SEQ ID NO: 467228 - RNA, 19 nt, Human
cccggccgccccucugucu

SEQ ID NO: 467229 - RNA, 24 nt, Human
ccucugggaagugaggagcaccuc

SEQ ID NO: 467230 - RNA, 21 nt, Human
cggaagagaauaauugaagaa

SEQ ID NO: 467231 - RNA, 18 nt, Human
cucucucccuccuucucc

SEQ ID NO: 467232 - RNA, 19 nt, Human
cucugcccggccgccccuc

SEQ ID NO: 467233 - RNA, 19 nt, Human
cugcccggccgccccucug

SEQ ID NO: 467234 - RNA, 20 nt, Human
cuggcuccugcacccucugg

SEQ ID NO: 467235 - RNA, 22 nt, Human
cuggcuccugcacccucuggga

SEQ ID NO: 467236 - RNA, 24 nt, Human
cuuacaggcucauuaaaggguugu

SEQ ID NO: 467237 - RNA, 25 nt, Human
cuucugggucucuguucucacuucg

SEQ ID NO: 467238 - RNA, 21 nt, Human
gaaguaaacauuuccucuucu

SEQ ID NO: 467239 - RNA, 23 nt, Human
gaucccauuccugcuuguuccac

SEQ ID NO: 467240 - RNA, 18 nt, Human
gcagauccaugagaagca

SEQ ID NO: 467241 - RNA, 21 nt, Human
gcccaaugagcagagaggauu

SEQ ID NO: 467242 - RNA, 20 nt, Human
gcguaaaagcuucucuggcc

SEQ ID NO: 467243 - RNA, 23 nt, Human
gcuggcuccugcacccucuggga

SEQ ID NO: 467244 - RNA, 21 nt, Human
ggauaaagggaauacuauuac

SEQ ID NO: 467245 - RNA, 22 nt, Human
ggcuguuaucuguaagcaggug

SEQ ID NO: 467246 - RNA, 18 nt, Human
uaaaagaaacauuuaaaa

SEQ ID NO: 467247 - RNA, 22 nt, Human
uaauccccauuaccaucccacc

SEQ ID NO: 467248 - RNA, 21 nt, Human
uaccucaaaccaccuuugcug

SEQ ID NO: 467249 - RNA, 22 nt, Human
uacuauauagccuuucgagaau

SEQ ID NO: 467250 - RNA, 24 nt, Human
uagcagacccugugugcuuuuagc

SEQ ID NO: 467251 - RNA, 21 nt, Human
uauacaaacaugaaggaauaa

SEQ ID NO: 467252 - RNA, 31 nt, Human
uaucaaacuuucccccaaaacaugaggcuuu

SEQ ID NO: 467253 - RNA, 23 nt, Human
ucaccccugccaggccuccucug

SEQ ID NO: 467254 - RNA, 21 nt, Human
ucauuucaaucuccauuuuua

SEQ ID NO: 467255 - RNA, 21 nt, Human
uccaucacacccccuuaaaca

SEQ ID NO: 467256 - RNA, 22 nt, Human
uccccaaguuugcauuuucgac

SEQ ID NO: 467257 - RNA, 22 nt, Human
ucucaggcuggcuuucaaagcu

SEQ ID NO: 467258 - RNA, 20 nt, Human
ucucccuccuucuccuguuc

SEQ ID NO: 467259 - RNA, 21 nt, Human
ucucuaggcuucaaaccaauu

SEQ ID NO: 467260 - RNA, 24 nt, Human
ucuggaaccccagauucaaucaga

SEQ ID NO: 467261 - RNA, 23 nt, Human
ucugggaaguggggagcaccuuu

SEQ ID NO: 467262 - RNA, 19 nt, Human
ucuguaagcaggugacuac

SEQ ID NO: 467263 - RNA, 23 nt, Human
ucuugcuuugguugucccaugaa

SEQ ID NO: 467264 - RNA, 26 nt, Human
ugaaagcaagauaggguugaaagaca

SEQ ID NO: 467265 - RNA, 18 nt, Human
ugaagaacaaggugcuga

SEQ ID NO: 467266 - RNA, 21 nt, Human
ugacacaagcaagagugggac

SEQ ID NO: 467267 - RNA, 19 nt, Human
ugacucagaaggagagcaa

SEQ ID NO: 467268 - RNA, 23 nt, Human
ugagaagcaaugucuuaccacaa

SEQ ID NO: 467269 - RNA, 19 nt, Human
ugauguuuccgcccucccc

SEQ ID NO: 467270 - RNA, 21 nt, Human
ugcaguucagugaagaacaag

SEQ ID NO: 467271 - RNA, 18 nt, Human
ugccauuuccuuucuggu

SEQ ID NO: 467272 - RNA, 22 nt, Human
ugcccggccgccccucugucug

SEQ ID NO: 467273 - RNA, 23 nt, Human
ugcguuugaagcuuggagcucau

SEQ ID NO: 467274 - RNA, 19 nt, Human
ugcuguugagaauaccaau

SEQ ID NO: 467275 - RNA, 21 nt, Human
ugcuuuagaaucugaguggga

SEQ ID NO: 467276 - RNA, 20 nt, Human
uggcaguauccagcucugaa

SEQ ID NO: 467277 - RNA, 18 nt, Human
uggcaugauuaguguuuu

SEQ ID NO: 467278 - RNA, 21 nt, Human
uggcaugauuaguguuuuucc

SEQ ID NO: 467279 - RNA, 21 nt, Human
uggcucucucccuccuucucc

SEQ ID NO: 467280 - RNA, 18 nt, Human
ugggaaaccaucacacua

SEQ ID NO: 467281 - RNA, 25 nt, Human
ugggaagugaagagugccucuggcc

SEQ ID NO: 467282 - RNA, 21 nt, Human
ugggaagugaggagcaccucu

SEQ ID NO: 467283 - RNA, 20 nt, Human
ugggaaguggggagcaccuu

SEQ ID NO: 467284 - RNA, 21 nt, Human
ugggaaguggggagcaccuuu

SEQ ID NO: 467285 - RNA, 18 nt, Human
ugguccauugauucuccu

SEQ ID NO: 467286 - RNA, 25 nt, Human
ugguucaugacugucugcaauaacu

SEQ ID NO: 467287 - RNA, 18 nt, Human
ugguuucaacuuuucugu

SEQ ID NO: 467288 - RNA, 18 nt, Human
ugugagacuuggaaggga

SEQ ID NO: 467289 - RNA, 23 nt, Human
uguuauguuuuucuuaaauaaca

SEQ ID NO: 467290 - RNA, 23 nt, Human
uuaaagcagaaauauguguuuau

SEQ ID NO: 467291 - RNA, 21 nt, Human
uuaccaucccaccagauauuu

SEQ ID NO: 467292 - RNA, 21 nt, Human
uuaggacaaauguuugucuug

SEQ ID NO: 467293 - RNA, 24 nt, Human
uucacagcauuuugcccuuauuuc

SEQ ID NO: 467294 - RNA, 20 nt, Human
uucguccccaucauuaccuc

SEQ ID NO: 467295 - RNA, 22 nt, Human
uugaagaauugcaguucaguga

SEQ ID NO: 467296 - RNA, 20 nt, Human
uuguaugugauguuuccgcc

SEQ ID NO: 467297 - RNA, 24 nt, Human
uuucccuaucccuucucugucaca

SEQ ID NO: 467298 - RNA, 18 nt, Human
uuuccgcccuccccaagu

SEQ ID NO: 467299 - RNA, 24 nt, Human
uuugaaauaaauaccuagcagauc

SEQ ID NO: 467300 - RNA, 21 nt, Human
aacccuguuccucucaguuca

SEQ ID NO: 467301 - RNA, 24 nt, Human
augaauggagcaacaccagugcca

SEQ ID NO: 467302 - RNA, 21 nt, Human
caccugcagcugugacaucac

SEQ ID NO: 467303 - RNA, 22 nt, Human
ccuguuccucucaguucagcca

SEQ ID NO: 467304 - RNA, 23 nt, Human
guucagccagcacucaggcuggg

SEQ ID NO: 467305 - RNA, 22 nt, Human
ugccaggcaccaacccuguucc

SEQ ID NO: 467306 - RNA, 21 nt, Human
uggagcaacaccagugccagg

SEQ ID NO: 467307 - RNA, 23 nt, Human
uggagcaacaccagugccaggca

SEQ ID NO: 467308 - RNA, 24 nt, Human
aagaacccaaacccaaacgaaacc

SEQ ID NO: 467309 - RNA, 18 nt, Human
aagcgaccccgccagggg

SEQ ID NO: 467310 - RNA, 22 nt, Human
acagauccacagcucucagcca

SEQ ID NO: 467311 - RNA, 19 nt, Human
accaagacagacacucgcc

SEQ ID NO: 467312 - RNA, 19 nt, Human
accugggcuggggcuggag

SEQ ID NO: 467313 - RNA, 18 nt, Human
acgaaaccccaaaaccac

SEQ ID NO: 467314 - RNA, 24 nt, Human
acgaaaccccaaaaccacacacac

SEQ ID NO: 467315 - RNA, 20 nt, Human
acguagucaacuacuuacac

SEQ ID NO: 467316 - RNA, 21 nt, Human
agacagacacucgccagggcc

SEQ ID NO: 467317 - RNA, 25 nt, Human
agaugucuucagcacaguucuaaaa

SEQ ID NO: 467318 - RNA, 22 nt, Human
augaagugcaaauucugcaaau

SEQ ID NO: 467319 - RNA, 20 nt, Human
caaaaccacacacacgguag

SEQ ID NO: 467320 - RNA, 21 nt, Human
caaacccaaacgaaaccccaa

SEQ ID NO: 467321 - RNA, 27 nt, Human
caagaacccaaacccaaacgaaacccc

SEQ ID NO: 467322 - RNA, 22 nt, Human
caccaagacagacacucgccag

SEQ ID NO: 467323 - RNA, 20 nt, Human
cacggaaccaacaguuucua

SEQ ID NO: 467324 - RNA, 22 nt, Human
cacggagcccacgcgucugcgc

SEQ ID NO: 467325 - RNA, 18 nt, Human
cacugucaccaucaaaau

SEQ ID NO: 467326 - RNA, 22 nt, Human
cagaugucuucagcacaguucu

SEQ ID NO: 467327 - RNA, 24 nt, Human
cagccgcuuuugugcgcgucuccc

SEQ ID NO: 467328 - RNA, 18 nt, Human
caggaaacagcugcaaac

SEQ ID NO: 467329 - RNA, 22 nt, Human
caggcucugagcagugccuucc

SEQ ID NO: 467330 - RNA, 21 nt, Human
cagugccuuccagcgagccuc

SEQ ID NO: 467331 - RNA, 24 nt, Human
cagugggcugccucugcagagucu

SEQ ID NO: 467332 - RNA, 20 nt, Human
ccaaaaccacacacacggua

SEQ ID NO: 467333 - RNA, 20 nt, Human
ccaaacgaaaccccaaaacc

SEQ ID NO: 467334 - RNA, 21 nt, Human
ccaccugggcuggggcuggag

SEQ ID NO: 467335 - RNA, 26 nt, Human
ccagggccucuuuucugcugucagcc

SEQ ID NO: 467336 - RNA, 23 nt, Human
ccauagcuucaguggagccucaa

SEQ ID NO: 467337 - RNA, 21 nt, Human
cccaaacgaaaccccaaaacc

SEQ ID NO: 467338 - RNA, 21 nt, Human
ccgcuuuugugcgcgucuccc

SEQ ID NO: 467339 - RNA, 24 nt, Human
ccggcccucuggcccaugcaucug

SEQ ID NO: 467340 - RNA, 19 nt, Human
ccggguguccagacauagg

SEQ ID NO: 467341 - RNA, 25 nt, Human
ccugggcuggggcuggagcuggggc

SEQ ID NO: 467342 - RNA, 21 nt, Human
cgaaaccccaaaaccacacac

SEQ ID NO: 467343 - RNA, 19 nt, Human
cggaaccaacaguuucuag

SEQ ID NO: 467344 - RNA, 25 nt, Human
cguagucaacuacuuacacggaacc

SEQ ID NO: 467345 - RNA, 21 nt, Human
cgucaagaacccaaacccaaa

SEQ ID NO: 467346 - RNA, 19 nt, Human
cugcagagucuggugggag

SEQ ID NO: 467347 - RNA, 19 nt, Human
cugcucucuccgaugggcc

SEQ ID NO: 467348 - RNA, 23 nt, Human
gaaacuacuuuuuucccccacaa

SEQ ID NO: 467349 - RNA, 21 nt, Human
gagagcagugcuccggggugg

SEQ ID NO: 467350 - RNA, 19 nt, Human
gagcagugcuccggggugg

SEQ ID NO: 467351 - RNA, 20 nt, Human
gagcagugcuccgggguggc

SEQ ID NO: 467352 - RNA, 19 nt, Human
gcacugucaccaucaaaau

SEQ ID NO: 467353 - RNA, 24 nt, Human
gccacggagcccacgcgucugcgc

SEQ ID NO: 467354 - RNA, 18 nt, Human
gcggaagguuccugcagg

SEQ ID NO: 467355 - RNA, 20 nt, Human
ggcacugucaccaucaaaau

SEQ ID NO: 467356 - RNA, 18 nt, Human
ggcagugggcugccucug

SEQ ID NO: 467357 - RNA, 23 nt, Human
ggccagggccucuuuucugcucc

SEQ ID NO: 467358 - RNA, 21 nt, Human
gggcggcccaccugggcuggg

SEQ ID NO: 467359 - RNA, 20 nt, Human
uaaaauagaugaauacauga

SEQ ID NO: 467360 - RNA, 19 nt, Human
uacagaugucuucagcaca

SEQ ID NO: 467361 - RNA, 25 nt, Human
uagcuucaguggagccucaggcaac

SEQ ID NO: 467362 - RNA, 19 nt, Human
ucaccaucaaaaugcacag

SEQ ID NO: 467363 - RNA, 22 nt, Human
ucagaaaaguaaugaagugcaa

SEQ ID NO: 467364 - RNA, 19 nt, Human
ucagggaugguagggaggc

SEQ ID NO: 467365 - RNA, 18 nt, Human
uccacaguuacccuggag

SEQ ID NO: 467366 - RNA, 25 nt, Human
ucucccuuaagauaaaacuuaaaaa

SEQ ID NO: 467367 - RNA, 20 nt, Human
ucugcaaauuaugccauagc

SEQ ID NO: 467368 - RNA, 20 nt, Human
ucugcagagucuggugggag

SEQ ID NO: 467369 - RNA, 22 nt, Human
ucuuugggcugguggugggcag

SEQ ID NO: 467370 - RNA, 28 nt, Human
ucuuugggcugguggugggcagugggcu

SEQ ID NO: 467371 - RNA, 18 nt, Human
ugagagaagcacugggca

SEQ ID NO: 467372 - RNA, 19 nt, Human
ugagagaagcacugggcac

SEQ ID NO: 467373 - RNA, 26 nt, Human
ugcacagauccacagcucucagccag

SEQ ID NO: 467374 - RNA, 18 nt, Human
ugccauagcuucagugga

SEQ ID NO: 467375 - RNA, 21 nt, Human
ugggagguugaggaagagacu

SEQ ID NO: 467376 - RNA, 19 nt, Human
uggggcuggagcuggggcc

SEQ ID NO: 467377 - RNA, 20 nt, Human
uuaagauaaaacuuaaaaau

SEQ ID NO: 467378 - RNA, 22 nt, Human
uucccccacaaaauagucuuac

SEQ ID NO: 467379 - RNA, 23 nt, Human
uucucaagguuucuucauaaaua

SEQ ID NO: 467380 - RNA, 21 nt, Human
uuucugcugucagcccuucag

SEQ ID NO: 467381 - RNA, 25 nt, Human
uuuuuuuuuuuuuuuuucagcuuuu

SEQ ID NO: 467382 - RNA, 21 nt, Human
uuuuuuuuuuuuuuuuuucag

SEQ ID NO: 467383 - RNA, 21 nt, Human
aaccagggggcaggugugccc

SEQ ID NO: 467384 - RNA, 18 nt, Human
aagcaagcaaagcaaaac

SEQ ID NO: 467385 - RNA, 19 nt, Human
aagggcccuccuggguucc

SEQ ID NO: 467386 - RNA, 19 nt, Human
acaagcaagcaaagcaaaa

SEQ ID NO: 467387 - RNA, 24 nt, Human
acacuggacuccacagaagcuggu

SEQ ID NO: 467388 - RNA, 23 nt, Human
accuucuccgagccaggucaccg

SEQ ID NO: 467389 - RNA, 23 nt, Human
agcccucggccucucccaccucc

SEQ ID NO: 467390 - RNA, 23 nt, Human
agcgcacgcccagccggccgccu

SEQ ID NO: 467391 - RNA, 20 nt, Human
agcuggggcauuggggggcc

SEQ ID NO: 467392 - RNA, 20 nt, Human
aggaaggggguggccccggg

SEQ ID NO: 467393 - RNA, 20 nt, Human
aggacccaagagggagcugg

SEQ ID NO: 467394 - RNA, 21 nt, Human
agggcagggguggguggggcu

SEQ ID NO: 467395 - RNA, 20 nt, Human
agggccaccuucuccgagcc

SEQ ID NO: 467396 - RNA, 23 nt, Human
augguggccacaggcggccucgg

SEQ ID NO: 467397 - RNA, 20 nt, Human
cacaggacccaagagggagc

SEQ ID NO: 467398 - RNA, 21 nt, Human
caccaggggagaggcccuagu

SEQ ID NO: 467399 - RNA, 21 nt, Human
cacgcccagccggccgccucc

SEQ ID NO: 467400 - RNA, 19 nt, Human
cacuggacuccacagaagc

SEQ ID NO: 467401 - RNA, 22 nt, Human
cagaggugccagccaauuccga

SEQ ID NO: 467402 - RNA, 24 nt, Human
cagcugccccucgcccgcuguccc

SEQ ID NO: 467403 - RNA, 23 nt, Human
caggacccaagagggagcugggg

SEQ ID NO: 467404 - RNA, 18 nt, Human
caggaugggggacaagca

SEQ ID NO: 467405 - RNA, 22 nt, Human
caggggucugaaagggcagggg

SEQ ID NO: 467406 - RNA, 21 nt, Human
cauguauacagggcaacccac

SEQ ID NO: 467407 - RNA, 19 nt, Human
ccacacccccagguccaag

SEQ ID NO: 467408 - RNA, 24 nt, Human
cccaccucccccacgucaucacug

SEQ ID NO: 467409 - RNA, 22 nt, Human
cccagccccggcuucggggagc

SEQ ID NO: 467410 - RNA, 23 nt, Human
cccagcccucgcccggcuccggc

SEQ ID NO: 467411 - RNA, 24 nt, Human
cccagcucccagcccucgcccggc

SEQ ID NO: 467412 - RNA, 19 nt, Human
ccccaggcccuggggcgga

SEQ ID NO: 467413 - RNA, 23 nt, Human
ccccaggcccuggggcggacuug

SEQ ID NO: 467414 - RNA, 19 nt, Human
ccccggacccggcccagcu

SEQ ID NO: 467415 - RNA, 20 nt, Human
ccccggacccggcccagcuc

SEQ ID NO: 467416 - RNA, 22 nt, Human
ccccgggccccagcaugguccc

SEQ ID NO: 467417 - RNA, 20 nt, Human
ccccucccuucugacucgcc

SEQ ID NO: 467418 - RNA, 23 nt, Human
ccccucgcccgcuguccccggac

SEQ ID NO: 467419 - RNA, 21 nt, Human
ccccugcaucccuggaggguc

SEQ ID NO: 467420 - RNA, 24 nt, Human
cccggacccggcccagcucccagc

SEQ ID NO: 467421 - RNA, 23 nt, Human
cccggcuccggcccagccccggc

SEQ ID NO: 467422 - RNA, 23 nt, Human
cccuaggccuccaugagugaccc

SEQ ID NO: 467423 - RNA, 24 nt, Human
cccuaggccuccaugagugacccu

SEQ ID NO: 467424 - RNA, 26 nt, Human
cccugagcggccuggcugcccggcuc

SEQ ID NO: 467425 - RNA, 18 nt, Human
cccugcagagccacugcc

SEQ ID NO: 467426 - RNA, 21 nt, Human
ccgacaugguggccacaggcg

SEQ ID NO: 467427 - RNA, 18 nt, Human
ccggccgccuccgacugc

SEQ ID NO: 467428 - RNA, 19 nt, Human
ccucgcccgcuguccccgg

SEQ ID NO: 467429 - RNA, 20 nt, Human
ccucgcccgcuguccccgga

SEQ ID NO: 467430 - RNA, 20 nt, Human
ccucggccucucccaccucc

SEQ ID NO: 467431 - RNA, 24 nt, Human
ccucggccucucccaccuccccca

SEQ ID NO: 467432 - RNA, 22 nt, Human
ccugcagagccacugccccaga

SEQ ID NO: 467433 - RNA, 19 nt, Human
ccugcuggugcaaaacucu

SEQ ID NO: 467434 - RNA, 20 nt, Human
ccugggagagccuugaaggc

SEQ ID NO: 467435 - RNA, 19 nt, Human
cgaggcuggggggccccgg

SEQ ID NO: 467436 - RNA, 23 nt, Human
cgcccagccggccgccuccgacu

SEQ ID NO: 467437 - RNA, 21 nt, Human
cgcccgcuguccccggacccg

SEQ ID NO: 467438 - RNA, 19 nt, Human
cgccgccgccucacaucug

SEQ ID NO: 467439 - RNA, 20 nt, Human
cgccuccgacugcgggacuc

SEQ ID NO: 467440 - RNA, 21 nt, Human
cggcagcugccccucgcccgc

SEQ ID NO: 467441 - RNA, 19 nt, Human
cggccucucccaccucccc

SEQ ID NO: 467442 - RNA, 19 nt, Human
cgggacucuucccuuccgc

SEQ ID NO: 467443 - RNA, 19 nt, Human
cucccagcccucgcccggc

SEQ ID NO: 467444 - RNA, 21 nt, Human
cucccagcccucgcccggcuc

SEQ ID NO: 467445 - RNA, 18 nt, Human
cucccccacgucaucacu

SEQ ID NO: 467446 - RNA, 20 nt, Human
cuccuggguucccugggucu

SEQ ID NO: 467447 - RNA, 22 nt, Human
cuccuggguucccugggucuuc

SEQ ID NO: 467448 - RNA, 21 nt, Human
cucgcuguuccccuaggccuc

SEQ ID NO: 467449 - RNA, 23 nt, Human
cucgcuguuccccuaggccucca

SEQ ID NO: 467450 - RNA, 22 nt, Human
cugaaagggcaggggugggugg

SEQ ID NO: 467451 - RNA, 21 nt, Human
cuggggccauggguccgaggg

SEQ ID NO: 467452 - RNA, 25 nt, Human
gaaggggguggccccgggccccagc

SEQ ID NO: 467453 - RNA, 22 nt, Human
gacaggaaggggguggccccgg

SEQ ID NO: 467454 - RNA, 20 nt, Human
gacgcaggcagucggucccc

SEQ ID NO: 467455 - RNA, 18 nt, Human
gagggaggcgaggcuggg

SEQ ID NO: 467456 - RNA, 19 nt, Human
gaggugccagccaauuccg

SEQ ID NO: 467457 - RNA, 21 nt, Human
gcaaagcaaaacacuggacuc

SEQ ID NO: 467458 - RNA, 22 nt, Human
gcaaagcaaaacacuggacucc

SEQ ID NO: 467459 - RNA, 24 nt, Human
gcaacccaccccuaggcaaagccc

SEQ ID NO: 467460 - RNA, 21 nt, Human
gccacugccccagaagggccc

SEQ ID NO: 467461 - RNA, 22 nt, Human
gccagcuguccccugcccugag

SEQ ID NO: 467462 - RNA, 24 nt, Human
gcccagggccaccuucuccgagcc

SEQ ID NO: 467463 - RNA, 18 nt, Human
gcccuuggcucccaacag

SEQ ID NO: 467464 - RNA, 20 nt, Human
gccucggggauggggcgcgg

SEQ ID NO: 467465 - RNA, 19 nt, Human
gcggccucggggauggggc

SEQ ID NO: 467466 - RNA, 22 nt, Human
gcuggugcaaaacucugccugg

SEQ ID NO: 467467 - RNA, 26 nt, Human
ggaaggggguggccccgggccccagc

SEQ ID NO: 467468 - RNA, 21 nt, Human
ggagcuggggcauuggggggc

SEQ ID NO: 467469 - RNA, 19 nt, Human
ggaggagggaggcgaggcu

SEQ ID NO: 467470 - RNA, 19 nt, Human
ggaggggucacuguccaca

SEQ ID NO: 467471 - RNA, 23 nt, Human
ggccauggguccgagggaaaggc

SEQ ID NO: 467472 - RNA, 22 nt, Human
ggcccuuggcucccaacagccc

SEQ ID NO: 467473 - RNA, 21 nt, Human
ggcgccagcuguccccugccc

SEQ ID NO: 467474 - RNA, 21 nt, Human
ggcgguuggccccuuggugcc

SEQ ID NO: 467475 - RNA, 21 nt, Human
ggcucaggacaggauggggga

SEQ ID NO: 467476 - RNA, 18 nt, Human
gggaacugaguaccaggg

SEQ ID NO: 467477 - RNA, 24 nt, Human
gggaaucgugagggaacugaguac

SEQ ID NO: 467478 - RNA, 20 nt, Human
gggagcuggggcauuggggg

SEQ ID NO: 467479 - RNA, 21 nt, Human
gggcagggguggguggggcuu

SEQ ID NO: 467480 - RNA, 23 nt, Human
gggcccuuggcucccaacagccc

SEQ ID NO: 467481 - RNA, 23 nt, Human
gggcggaugggcgggggcagggg

SEQ ID NO: 467482 - RNA, 22 nt, Human
gguaggaggagggaggcgaggc

SEQ ID NO: 467483 - RNA, 21 nt, Human
gguggccacaggcggccucgg

SEQ ID NO: 467484 - RNA, 23 nt, Human
uacaaauaaccagggggcaggug

SEQ ID NO: 467485 - RNA, 22 nt, Human
ucacugagcuguggcaaccaga

SEQ ID NO: 467486 - RNA, 24 nt, Human
uccaagugagggaugguaggagga

SEQ ID NO: 467487 - RNA, 19 nt, Human
uccacacccccagguccaa

SEQ ID NO: 467488 - RNA, 21 nt, Human
uccccggacccggcccagcuc

SEQ ID NO: 467489 - RNA, 24 nt, Human
uccccugcaucccuggagggucgc

SEQ ID NO: 467490 - RNA, 21 nt, Human
uccggcagcugccccucgccc

SEQ ID NO: 467491 - RNA, 22 nt, Human
uccugcuggugcaaaacucugc

SEQ ID NO: 467492 - RNA, 19 nt, Human
ugacaggaaggggguggcc

SEQ ID NO: 467493 - RNA, 21 nt, Human
ugacaggaaggggguggcccc

SEQ ID NO: 467494 - RNA, 22 nt, Human
ugacaggaaggggguggccccg

SEQ ID NO: 467495 - RNA, 23 nt, Human
ugacaggaaggggguggccccgg

SEQ ID NO: 467496 - RNA, 22 nt, Human
ugacagggcagagaauccugga

SEQ ID NO: 467497 - RNA, 23 nt, Human
ugacccugcagagccacugcccc

SEQ ID NO: 467498 - RNA, 19 nt, Human
ugagugacccugcagagcc

SEQ ID NO: 467499 - RNA, 19 nt, Human
ugccccucgcccgcugucc

SEQ ID NO: 467500 - RNA, 24 nt, Human
ugcccugagcggccuggcugcccg

SEQ ID NO: 467501 - RNA, 22 nt, Human
ugcugagcaaggggugguggaa

SEQ ID NO: 467502 - RNA, 18 nt, Human
uggauccccugcaucccu

SEQ ID NO: 467503 - RNA, 25 nt, Human
uggccccgggccccagcaugguccc

SEQ ID NO: 467504 - RNA, 18 nt, Human
ugggagagccuugaaggc

SEQ ID NO: 467505 - RNA, 18 nt, Human
ugggucuucaccagggga

SEQ ID NO: 467506 - RNA, 24 nt, Human
uggucccugccccaguguucaggg

SEQ ID NO: 467507 - RNA, 19 nt, Human
uguauacagggcaacccac

SEQ ID NO: 467508 - RNA, 21 nt, Human
uuccgaggagaauugggucca

SEQ ID NO: 467509 - RNA, 20 nt, Human
uucggggagcgagcgcacgc

SEQ ID NO: 467510 - RNA, 21 nt, Human
uuggcacaggacccaagaggg

SEQ ID NO: 467511 - RNA, 21 nt, Human
aaacagacucacacagauuga

SEQ ID NO: 467512 - RNA, 21 nt, Human
aaacauucccaagacaaucac

SEQ ID NO: 467513 - RNA, 19 nt, Human
aagcaagccucagauaccc

SEQ ID NO: 467514 - RNA, 19 nt, Human
aagccaagcaagccucaga

SEQ ID NO: 467515 - RNA, 18 nt, Human
aagggggagggagggagg

SEQ ID NO: 467516 - RNA, 23 nt, Human
acacaagccaagcaagccucaga

SEQ ID NO: 467517 - RNA, 21 nt, Human
acaggaagaaguccaaacaac

SEQ ID NO: 467518 - RNA, 18 nt, Human
acccuacaaauccgaaag

SEQ ID NO: 467519 - RNA, 18 nt, Human
acucgcagugccccgaau

SEQ ID NO: 467520 - RNA, 19 nt, Human
agaagggggagggagggag

SEQ ID NO: 467521 - RNA, 18 nt, Human
agaaugccagccagaagc

SEQ ID NO: 467522 - RNA, 19 nt, Human
agacccuccuccccuccuc

SEQ ID NO: 467523 - RNA, 21 nt, Human
agccaagcaagccucagauac

SEQ ID NO: 467524 - RNA, 24 nt, Human
agccagaagcaugaaucacuuuca

SEQ ID NO: 467525 - RNA, 19 nt, Human
aggaagaaguccaaacaac

SEQ ID NO: 467526 - RNA, 19 nt, Human
aggccggcugugcugcugc

SEQ ID NO: 467527 - RNA, 20 nt, Human
caaagcaccccauauucuuc

SEQ ID NO: 467528 - RNA, 24 nt, Human
caagacaaucacuaaacaugcaga

SEQ ID NO: 467529 - RNA, 21 nt, Human
caaucacuaaacaugcagaau

SEQ ID NO: 467530 - RNA, 24 nt, Human
caccccauauucuucugaaccuaa

SEQ ID NO: 467531 - RNA, 22 nt, Human
caccgacagcugcuggcagagc

SEQ ID NO: 467532 - RNA, 22 nt, Human
cacuaaacaugcagaaugccag

SEQ ID NO: 467533 - RNA, 28 nt, Human
cagcauggagagaauaauugccauuuca

SEQ ID NO: 467534 - RNA, 21 nt, Human
caggaagaaguccaaacaacu
